United States Patent Application Publication US 2007/0067865 A1 - sequence listing, part 30

SEQ ID NO: 187475 - DNA, 228 bp, Arabidopsis thaliana
cccgagaatttataggcgggggggcatagtggcagataatagaggcgcatgtctggcaggggatgtgttttgtgagcagggggcggggggcccgtgtgtatgagggatggaatagtgagtgagttgatgctgacaggattgtgtgaggagtaacgacccgccgcgccaccgcgcccgcgcgcttcacgaatgttgtatatatggctctgcggcgacgttcaggggcac

SEQ ID NO: 187476 - DNA, 508 bp, Arabidopsis thaliana
ccagacaccgaaaccactagggccctacggggacagaccagacagcggaaagagaggcggagggcgccgaagcaggatatcagcgctcaaggacgcggaacgagacagaaaataccacaggaggagcaggatagaagcgcagaagacattttttcgggaggacgagcaggacgcagacggactgacccccgaacaaagaaggcaagcataaaaatgaggtcggacaggacaagcatagcgctcacagagccccccaccggatagcccgaaagggacgccgggtccgcgccagagacggcaccgcagtcgcccggacgcgacgcgcacaaaccgatcccgcccccggagagccgacgcgcaatcgcagcgacgaaccaccagaaaaaacaaagcacgccgaaaggaaccccagaggcaccgcgacacaacaggcgacgatactcgaagggagggcgcgcggcgcgaggaccgaacactaataggacacgcgcgctagctagcgggccac

SEQ ID NO: 187477 - DNA, 174 bp, Arabidopsis thaliana
ttgggaactcaccccccaggaggattctagacgaagagaaacatgagctcagagtcgaggcgccggcggcggcggaggagctagattttctcggcacgcctaccgaaacaccgcagaggcgtctgggatgagagagaggacgttgatcgagcgccgagaagggaccacggggga

SEQ ID NO: 187478 - DNA, 402 bp, Arabidopsis thaliana
aagggagaagaggaaagaacagaccagccgccgaaagagagggaggcgccgcgccgcaggcacgcgaaagaacagaagagaaacgagaagagccgacccgaagaggcggggggagagaagacacgcgcgccccggccttttttcggggggggagaaaaaggaaggcccgcccccccaaccggagagagaaaaaaggccgaaaacccaaccggccggcgagaaggaaaaaaagggacgaaacaccgggcagcccacagaaacgccccgcaggacccgaacaaacgcgcgcagagcccgagcagcgcacaccaagagggaacccacggcccgcagggcagacgcaagaaagataacccacgccacaccacagaacccggccgcagaacgaaaaaggagcgcggc

SEQ ID NO: 187479 - DNA, 535 bp, Arabidopsis thaliana
gggggtggggggaaaccccccccacctacaaacaaactcatgtgggtgttatccttcaccgcctactttcctatcacagatccgaagacggacagattcgtgaaacctattctagaggacgggcaagctcaacgtcccatacgcagggcaaacccacgggaacgacaccacgcgctttcttccatttggggggtggggacaccatcactgctgtgatcataatgcaaaaaaaaaacagccttacacaggaaaacgagtgcgagcaacaggaaccaccccccccctcatacaatcgagaaatcaacacgaatacgagagcagaaaagcagcttataccatcacgacgtaatgcctgtcgaccgccacatctcaagtccagatatccattgccacatatacccaatactttgcaatcaacaaatagacatagctcatttgccccggtaggatgatatcccataatatagtgacaatataaccgcgtgagccgacgcgccgaaaccatcatattttcaataagcataatacgcatgat

SEQ ID NO: 187480 - DNA, 377 bp, Arabidopsis thaliana
aagaacaggtatgcctaggacgcgggaaggggggggttatgtgggaactaggcgggggaggttagtgagggagtgaacaggacaggaggaggatgggattgtaaggcaaagtaacattttggggtgggagagaggaagacagagtacgaagctcaagttaaggaggtgtaatgtatgataaatgaaagaacggtagataagtctacatgggatcgggttgtgagatgttaggtgagaatggggcaactccccccgcgcggaaggaggagatgacggcgcagaatgtcgaatagagggacaaaagacgaggggggagggcggtttttatgggagagcggcgaggagcggagagggactgtcactgatatggaaagatg

SEQ ID NO: 187481 - DNA, 479 bp, Arabidopsis thaliana
gaccactctacaagatcatgacgtcgcctgcacgcctacgtaagctcggaattcggctcgaggcgataaaaaggtgggtggagaagagagatcacgttatgtttaaaaaagaggggaagaagtagttggtgctggttctctcttcgtccttaaatccaaagggacatgggggcgctgctgattccacttgacgacctcctataggggcgcctgccctactgaattttccggaggggggggagctcttaagaggggctcacggaatatattgtctgggcggaggagcaccccatcctttctactggaacatttttttttcttttactcttaaacacccacgctttttcgggaaccgttcccttccgttccgggacgtgggtcatccccttcctcggcccaaagggggaagggccttccctctcacccctacaaatgggtggggcttttggtgggggttttcccccccccctcttgggagg

SEQ ID NO: 187482 - DNA, 543 bp, Arabidopsis thaliana
  unsure (1)..(543): unsure at all n locations
actcctttatggaaagctacgtccgcctgcgggacccgaccggaataattccctgctcgacgagctcagtagtcggcggccgcccttttttttttttttttttttaaaaaaaaaaggggtgtttcttaaatatagaaaaaacagcctccctcgtgtctggcgggggcttttatcccccccgcaaccaacctatgcggggggcggcatccattataattttttttgggcggggggttccatgatccagccccccgaaaacaaaaaaaaaccagggggatccccagggntggacacaaaaacagagatctttttttagcgcgggttcagaaccaaagtccaaaaaaccctaccgcgagcaagttgcgcttggggttctaatcccccaccctcctccacaaggcccctccccctttacacacgagagccccctcgccccaggtagtggtgtcccgccgcaggcaaggcgcgccacaagcactgcggcggggcggacacgaggcaaaaaaaccactttttcgtgcggcgaggccgcttcgaccccgc

SEQ ID NO: 187483 - DNA, 384 bp, Arabidopsis thaliana
ccccgcgaggattcatgaggggggggaaccgcgcctccttgatggaagtgtgccgcagagatgtgcttagagttttatcgcgcgggggcggcgggagcggggtgagcctacgaaggtgtatgagaggggcaggtcgctcgacgtccgtcataatattgtggccgcgcgctcaccgcaccccgaggggtaatcaacattcattataatgttacggccgcagccgctgtaagatggatataattatgatacatgtaggatcacgctggcgtgaggccccacgacacaatgttttcttcgaggtggggtgaatagaaagatgagagcggatcacgcgccgcttagcggtattaagtagtttatttggtagtgagggcgaaggcggta

SEQ ID NO: 187484 - DNA, 505 bp, Arabidopsis thaliana
ttaggacaactatagaagattatgacgtcgcctgcacgcgtacgtaagctcggaattcggctcgagattacctttctctgtatttgcacacaatcacactcaaattttatttagtcttaataaactaaagacagaccaaacccttttgacagtcactgagtcatattaaacaaacatccctaaccggtccattacaatatatactcgcttttcactgatccatgatggattatcttaattcgagaacctttctatggacgattgaaatctaggtgcttttttatcgctcactttgaaaaaaaaatgtatatgttcaaaccagtgaatacgataaactaaacttcagaataccttaaaaaggtttttttattgtatggaacatacatatcaatattcatggatcatccctttcattacactttcaggacctattttactagcagatggacttctccttttttcgaccagaacaaaaaacctttccccgcatgaggactttccctta

SEQ ID NO: 187485 - DNA, 605 bp, Arabidopsis thaliana
ccccccaggagagagaggccgaccccacgccttacccaggggggaagggcgcgggaaaacaagcgaggcgccgacacgcgagagcgcgagcaacgaagcccccggccggcgccaccagagaccccaccacaccaaccgccgcgcgtcgacgcgcgaagaacaggacggcgagcccgaacgccgacccggccgcgccgagagcccaagaccgtcttttcttcggggggggggggacacccagagccgcgcgagagccccgcacgaacagaaaaaaaaaggagcgcggcggagcgccagaccgcaacagagccaccggcaggacaaggcgcgacaagaccccgcaacaccagtcgcggcggcggcgcgtgagcggaggcgcgcggaccgcgaggcccacagcgggccacaccggaggcaagccccacgaaaaccccgtcacgcgcgccgagagaacacgcacacatccgcgcgcgataaagaagagaccatgccaaaacgagcacacagcacagcacagaacagacgagacggcaagaacaggaaaacagcgcgcccggacggcggagtcgggagaagacacgcaaacagagcaagagaaggggcag

SEQ ID NO: 187486 - DNA, 460 bp, Arabidopsis thaliana
caccgacgaaaaagagggggggggggggtttagggagacgaccccaagagttagggggagaaccgccccgccggaccggaggaacggcgaacgctttcagcggggggcaaaacccgaagagccgagagaggaccggccggccgcagcaggaagaggaacgggaccgcacaggagagagacggagggcgggcggagcgcgcacgcagcagaggagagacggcgagacgaggcaagaggagcgcggacacggagccccgccgcctacgagatggggggcgcggcgcgacaaggcgagaacgaagcgaagagacaacaaagcagacgagagagacgacgctcgcgcagcacaagagagccgacgggaaaaaacgacgacagcaactagacggaacgacccggccaacgacggagaagagcagcggagagcgacgcgagagaaagggcgagcagggcggagcgg

SEQ ID NO: 187487 - DNA, 481 bp, Arabidopsis thaliana
aacccccaggaagagaaggtgcagagccccgcttttctaaagcggggcaagcgcccccgcagaaaccgacccgggggccgcgcaggccccgcgccgccacgcgcgcgccccgccgccgcccccccaccgccccaacgcggcccaccgccgcggcggcggccgcgccacccaccacccggacccgttccccgtccgcccgctctccacaagccaccttttttttttccccggggggtggcaccccacccgtgcgtcccactcgtgcgtctaacacaacgcgtcccttgcgtgcgtccccgtcaccccctgtcacccccaagtaatcttacgaatccgatccgtatagacttaccccgccgcccccctcgtcgcttcgctctccactctccaatcgaggtcccctcttcctccgccgtcctcccctcccgcgcgcccgactttcgctcctccgccgtcccgtcagtctgtatgccgtcccgct

SEQ ID NO: 187488 - DNA, 230 bp, Arabidopsis thaliana
  unsure (1)..(230): unsure at all n locations
gggggggggggcgcaaaaaacaaaaaaanaanaaaacaaaaagggcggcgaagagaacggcaccaacaacccgccgcaaagcgaggggacgagaccagcagatcggaccgcggacacgggagcgggcacgccgcggtagcagccggccccaacggcgaacgacatttttttttgggttgttttgganaacaacacaacaccccacggccaacgaaaaaaatacctcccct

SEQ ID NO: 187489 - DNA, 417 bp, Arabidopsis thaliana
  unsure (1)..(417): unsure at all n locations
ccccgagagaagaatgagagagggggacgaacgacttttttagaancgggggcgggggctctctcaaaaaacaccttgatcgtttcgcgacgctacgaggtgtattaattacaccagagtagtgacgacactggattgcaatcttattggaagagagcagtgaatttaatacagggccatattcaaatgctagagtacgacacggagcagtggacgataaccacgagagaagaaatgtttttttcgagggggggggacgggaatatcgtcggtactttgcgcatggagaaaaaattgtgtcatatagtacgtaggtattttctgtcgtctgttcagtgtcagctagcgtcctgttagttccgcgcaatcggagggcgtgtgtacggcgatgagacggatgttgacgtagaattgtct

SEQ ID NO: 187490 - DNA, 508 bp, Arabidopsis thaliana
  unsure (1)..(508): unsure at all n locations
aaggaggcggaggtgatgtggtatcgcgcttgggccgtggatgcgggagtagggatgggaggaattgaaagatgcaagaagcaagtgaacttagagttttgttagaactatataacaatatacgaagaggatttttttttggaggggggagaggccaagagattgnctatggatagagaaacgaagaaggatgnggaagtgaaaagaggagacaatacagattattccaaagaatatactaggatttgaatcagagtatgcgttagcggagattcaaatagggaagaaacatggaatatgatagtgaagcagtgagaacggtaaaatatacaaaatcgcaaaaagtaacgcccggagtcgcgacagacattaattgcacgtgatacgtgattagatatattatattagttatgagttgtacgcggatggagaaggtaaatgaatagaggacgggcatttaatatcgaaatagatattgaaggtggggaatcaggaagaaggtgtagca

SEQ ID NO: 187491 - DNA, 474 bp, Arabidopsis thaliana
ggcccccgaacgaggcgcaagcacaagaaccttttcccagggggggaggccgcgcccagacgcggaggagagacgcgacaaggccgcgcaaggagcgccaccccgcggccgccaacgacccagggcagcgaaggcgaatagaacgacacgaggcaacgcgcagacgagacccgggcccaagccacaaagaagagaaattttttataggggggggaggacggaaggcgcggacgacgcaccaaacggagccgcgcgggccgcacgcaacccacagaacgcgcaggaacgcggcgcaaaaccgaacgacacaacagccgacaacacatgacacggcaagccaagaccagactaacccgagcaacgagggcccacggaagccggacaggaccgcgccagacggaccacacaagccgagaaaggaaccacagacggcgccgccaccccggaaaggacagggccgcagcaaccaggaaa

SEQ ID NO: 187492 - DNA, 256 bp, Arabidopsis thaliana
gacgagcacgagagcacaacggttttttacaagagggggggaaaggccccgcacaacacaaaaaacaaacacagaacagaccgcgggcgaagtcagagcaccaccaaggccaccggccgcgcgggaacgcgcacgcacgccgacagcctaccgttgcgttaccgagaccccacaggctccgtagcggacccgacgcgcacccgcgcagccaaaggcgccaaagcagctttttttttgttggggggtggggccccac

SEQ ID NO: 187493 - DNA, 209 bp, Arabidopsis thaliana
accaccgtagagcggagacgaaagcgcaaccgcaggaccgcgagcccggacgaggaagaagaacggaagccgcccatacacggacaaacgcaggagagcgacgcagggccgaggaccgcagaacgcagaagaggcggggcgttttttttttgaggggggccacgagaagcgaggagacaagagcgaaaaaaagaagaacaccacgcaac

SEQ ID NO: 187494 - DNA, 488 bp, Arabidopsis thaliana
  unsure (1)..(488): unsure at all n locations
aaaanaaaacccnccaggagggaaggaaaagagcgcaagacgagcgccaggaccaccccaaccagacacagacaagcgcaccgagagaactacggaaggccggacacaagcgaaacgaagcagacggccagcaagcccaaaggagaaattttttttggaggtaggggccgacggcaccccagcaagaaaaaaaaaaccccccaccgagaaagaagagaggaaagccccccacaaaaagcacgcggaacggaaagcgggccaaggcgccggcaaggaggaacaacgcaacagcacacaggaagcccacacagccaacacaaccaaaaagggagagggaggcaggaccggaacgagacgcacacaaaaggagaagagacgagaacggcgcgagacaccccgagcacagaaagacgaggccgaaaaggacaagacgagccgcgccacagcacccgaggacgacaggccgaggagaacgcggaaggagcgcg

SEQ ID NO: 187495 - DNA, 272 bp, Arabidopsis thaliana
  unsure (1)..(272): unsure at all n locations
ccgggggtttgggggggggagaccaagccccccggaggggggagggaggagagagaaagatttttnaaggggggggagaaaaggcccaaaacaaacaaacacggagggaacgagaacagcaaggggcgcgcgggcaagaagcgccaacgaccacgaggcgccggcaggaaccgcggaggacaggaccaccctcagggcagacagggaagacgaaagcacaagagaaggcgagacaagcaacggaaccgcgaaagcgggaggtcttttttttt

SEQ ID NO: 187496 - DNA, 539 bp, Arabidopsis thaliana
  unsure (1)..(539): unsure at all n locations
ccaaaaaaaaaaaaancccaacaaaagggggggagagaaacagaaaaaacacgcacgccccccaggcggcacgacgaacacaaaacaaacaaggaaacgcaaaaccacaacgcgcagacgaaagccacgcgagacgaacacgacgacagcacgcgaaaacagaacaaacgacaccanntttaaaaaggcaagaagggcggggagacagacgcgacgcgacgtcacaaagaaaaaaacccccccacacaggagggggcggggaggcggccacccacaaaaaaacgaaagcgcgaaaccacgcacacgggacagcgagacgaaccaaaggaaagcgaaaacgagagggacgaccgaccacaacggcccaagcccgacagaaacagccgacgcggacaacaacgcgaagcccgagcacgcccggcagaaaaaacgcacaacgacggaccgagcgcaagcgagacaaaaacaacccgcgagccagccaaacaaaaagagaacgcgaaagagaaaagaaacaacaaaaccgaccacgaagccaa

SEQ ID NO: 187497 - DNA, 493 bp, Arabidopsis thaliana
  unsure (1)..(493): unsure at all n locations
ccccccggggggggggggggaaaaatttttgggggggggcgaagcccccaaaaacaaaaacaaaaaanaggggggaagaaagggaacacaaacaaaacgggcgccccgcggcgggaccaacggattcacacgacaggagaacacggaagcggcaccggggcccgaacccgagcgggggctnttacaaggaaagtggggggcacaccagagggcgcacgaaaaaaaaaaccccccccccgggggggggggggcgcaccccaacaaaaaaaaagaccggccccgaacacaaagcggggggggggacacgaaaccagacacacagaacacccccccagcacacgaaagccccgcgaccggccgaagcgaacccacagaaacgagcgagagcagcgccgccgaggccccgagcgaaggagcagacgaggaccgacgggagaagagacagggcgccggcaccangagaggagaggcgacaagacgaagaaagcacgca

SEQ ID NO: 187498 - DNA, 433 bp, Arabidopsis thaliana
tttaaagggggggggggggacccacaaaaaacaaaaaataaatagggggacgttgcaaagtaagtacgcgatgataaggagttaataatagacgatcacatcaatcatagtagaatagggaatgtacagtgttacgcagggcaccgacagaacactttttttttggctagtaaggacaccaacacgggaagatttccaaaaaaagaagtacaccaacaattcgcagaaaattaaactctccccattgtatacaagcatagctatacatgaaaaaagaaaaaaatatagactcatatcatatggcaagaatacgtacgaaggcaataaattcccggctatcagtagataaggtggttaagtcgactggaatcgtatgactatccacttcaaattgcaataaaccctctaaccccctcaaattcaaatagtcaaa

SEQ ID NO: 187499 - DNA, 454 bp, Arabidopsis thaliana
ccccacgaagcccaacactgataggaatcttttaacagaggggggagggcggagaaaaaaaaacagtcagatcacatagcaacgacactctgcaaattatgagtccacgggcattaagggaatgtaaacatgttcccgcaataagcaagagacgtcaatgcgatacagatcggaatgtcctgacccggcccaaagcattttttttttggggggagagagtaaccgaacagggcccccgaaaaaaacagacgcccagatctagctaacagctactgacctcctgcaggtgcaaagcgatcacaggtgtgacgataggcactctggggcgagcatagaacaattttgaacgcgcattaaggtgatgtagaagcacaagcttgagtactcacagttggaccgacggagaccgcaacgctagcaaggccgaactgagacgtcaagtacgcagcgggga

SEQ ID NO: 187500 - DNA, 541 bp, Arabidopsis thaliana
gccgcctacgtaagcttggatcctctagagcggttcgcctttgggtttttttttttttttttaccactaaaggggcaactcaaagaccaatgggtataaggtggcccaaacccgtcaaaaaaaatcatatcaggggaaaatttcccgggaaacaaattaaaccagaccttgtgtttgcctttttgccaggggaaaaccttttttttttggaaagttgcggaaacttggattggggaaacatttataataaaggaggccaaacatttaccaaagaaagttaaagggatctggcccttggaccttgggtaaagaaaagaaaaaaaaaatgctttggggagcgggagcgagggaaaatccccttttgggagaacagacgagatggaaaaattgttttgatgccccgccgtttcccaacctggggaagggggaggtccaaacctttttgtttttttttatttgggaacgcattgcggggccaaagaaacgctatcctttacacgggggcttgcggttctaagaatcgggggggacccccgtctct

SEQ ID NO: 187501 - DNA, 360 bp, Arabidopsis thaliana
ccatacaaaggcctaacttctaaagagaggccaacccaaaccaaacctttattgtccccaacctaggttaaaagggagattttttggggcggattacttgggggggttctataaaaaggttcctggacttgttaccccaacggaccccctttgggtttggcccaccccaccgtgagacggggtttttcccccaaaaggggggggtccttagggtggcctggccaaatcttttaaaaacccttttggggaaaggcccctaaaggagaggttatgttttccggcccaaaacccaattttttggcggggcccactggcctttagcgcctaggttttctaaaaaccccaggggcgttacccaaa

SEQ ID NO: 187502 - DNA, 486 bp, Arabidopsis thaliana
cgagcgggaggcgaggcagcgccgaacgaaggcgccaggagcccagcggaccacgccacccacgacagcagcgcgaccgacgccgcgcgagccccgcgagacacaggagaccgccgcccgagcacgcgcgtctttttttaagaagggggggggacaggcccgacagcgcgcacgcacaaaaaaagaacccgcaacccgccgacgccagccgggcgacacgagagggcgccgccagcacggcaggcacgacaaaacgcaggaggccagcgacatgcagagacagagagcaagccacgagcaaaaagcgacagaccgagcaagagggggcgcgaagcagcgccgaggccgcgaacacacagcgacgcaccgaaggcgcccgcagccccgcgcacgacagcgagaagaccgaagccgcaggagacgcgcccgaagcgaccgaggcgcaccagccgccacaacgccgagcgaaacacagtcacaaccaga

SEQ ID NO: 187503 - DNA, 571 bp, Arabidopsis thaliana
  unsure (1)..(571): unsure at all n locations
cccggggggccggggctcaataaaaaacccctaaaaattttccaccccccctttaacctcttaaaattacctaaaaggggccctcaaaaaaaaaaataaattttccccccccctaacctcttaaaaaaaaatggccaaccctttctctcccgggggtgtgggggncacaacccccgggcgcccgcaaaaacaataaccccccaactctggtctccccccaccacacccccaaaaaaacaaaccctttttttttttactaccccagagtggccgggcgccgcccctccaaatttctttccttttcgccccacgcgcccgccctcaatccgccttaaaaagaggaaaagcgctcctccctctcccgaaacaatgcccgccggaaacccccctcccccccccctctacgggcgccctccttaccttcgcccccccacaaccccccccattttcgtttccccagatcttctccctctcaaaagcgcgcgcgcccctctccccaaccgaccgctcgccccccaaaacacctccttgccttcgttgcgcgccgccggccactaactaaacaaaaaaa

SEQ ID NO: 187504 - DNA, 541 bp, Arabidopsis thaliana
  unsure (1)..(541): unsure at all n locations
cccccccctcccgagtgcccggtgccctttttcccgcggggagcgcggggtcaaaaaaaataaaaaaatcttacccccccccggatggggctggggcgcaaaccatctacctccctacataaaaacttgcggagccacgtgcggcgggaaaaatcccggctccccctctcctttaaaaccttcccgcgaagactccaccaccccccccccctcctttaaaaggggggcgtatggngcccccaaaatctgggcgacaccaaaaaaagattaaacccccccctcccccccccacctcccgcgncccccccacctccgctgcgcacatcatacaatcccctcaaaggggggccacccgcggcttcccctttttctcctcccccacaccaaaaacttctttccacaaaaaccccgctcgccctcccccccccaaaaataaaaacaaaaagcgaaacggcccctccctcttctctccaaactcccccacgcacaaaacccctctccccaccacaaacaaaaaagaacgcccggcgcgccaaacaac

SEQ ID NO: 187505 - DNA, 352 bp, Arabidopsis thaliana
acggggggggagagggcgggaccaaaaaaaaatacgaaacaggcggggcgcgacagggccggagagaggcaactagcagcaccgcaccgaccccggcgtaaacgtcagcacgggcgactacggaaacaatatgcaacgaataggagcagcggcgcaccaggagggagagggaaatttttttaaaacaagggaggggggacaaaacagaaaatttctgcccgacgcaaaaaaaaacaagaccgagacgcgggtgtaaatggccagagggccacgacacaattccgtccgcacgcaccgagtgcccgcgagacatcgccatgcggacaggaaggagtcggaggcgtcaggcgag

SEQ ID NO: 187506 - DNA, 473 bp, Arabidopsis thaliana
  unsure (1)..(473): unsure at all n locations
aagtacccctcccttattccccgtggaccccgcctacaaaaactttttatttctccctttactttttttataaacgcaaaaacaaatttcaatagttcttgtaagccccaacttttaataaaaaacataccaccatttgggagggttttgttttgcataatatttttcccccctggtgaagaaaaanaacttaagcccaccctaaaaaataaatttaaaaacccntctcaaataaaaaccaccctttttttttaaccccatcccccccccatgggttttttcaaaaaaaaaaaatcccttacccccctttttccgccaatccctttaaacttaaaccccatccccccaaatcttataaaggggccctccctttttattatgcaaaaccaatcgctaaaaaaattttcaaaaaaccaccgccaaatttaaaaagataaatttttcccctttccccaaatacccccccctttttt

SEQ ID NO: 187507 - DNA, 523 bp, Arabidopsis thaliana
gcacgcctccgtaagcttggatcctctaaagcggtgcgcccttgggggcggggttttttttatttatttttttttaacggtggtgggctttattttcacgccgagagattttgttccccgcccccccaaagaaagggggtttttaaaaaaaaaataaaacattttcaatgtcctttgggggcccccaaaaaaaaaaattttttttggccgtgagagaaccccccgcggggggccacataaaaaatattagggcgcggaagaaaaaaatttcccctttccccggggggttgttataaaaggggcttttcttttttaagaggaaaaacaaagaggcgggggagatataaaaggcgggggcggacagttggttgctcggtgggaacagtctcttagaaagggccgcctctttataaaacaacaccgggggggtggggggggccgcctgtatgtgggttttttaccccgacctccgccccaaagaaatatagcgcggggggggaaaagcggaggatttttttctttt

SEQ ID NO: 187508 - DNA, 521 bp, Arabidopsis thaliana
  unsure (1)..(521): unsure at all n locations
gtacccgtcccgaattccccggtggacccacgcgtccccataaaattnntcttcttcttcttcaacgttcctctccaaaatcctcagaccaagaaatcataatggccctcaatctaatccctttcccctaaaatanatgatcaaaccgctattcaaaaaaccttttttctccaagggtgagaggggatnaaaacattctgatcccttaaaataaataacccccccaaacaaaaacacaacttccccctgttccaaaatcactaacttcccctttttataatcaaaacccttttttttttctttaaccctactggcccccctcngttaaaaccccacccggatccacccactttctctccccatttaaaaaactccaaagccaaatccttaaaacatcccacccccagcctcccctatagaaaacacccctcacatcccccctaaattccccctccccacccctaaggaaaacccttcttctcttttaaccaaatctttttccacccaaaattaaaaacccc

SEQ ID NO: 187509 - DNA, 422 bp, Arabidopsis thaliana
cggagcctccaaactttccccctggggaggccttttttaaagtgcaggaacgggaaacaaacagatcccaaggggggagacaacacacaggccaaagggcaacctgggccgaaaaaacggcgggaagaagtcggccaaccaccaaccgttttttcgggggaggaaaaaaaaagggcggggacaaaaaaacgcagcaggcgaacccggaattaaactaggaaaagggggggggggggtgagttaaacagggagcgggtaaagaacggaagacaggaagcacgccctccacggagggcggcagcatcccgcgccgcccgatgacaccgccacccgaagatagccagacagcggccagaacaccgaggcccgcgggcagccacgacgcagacagcgactagagcgcgagggcaacccacggaaga

SEQ ID NO: 187510 - DNA, 411 bp, Arabidopsis thaliana
  unsure (1)..(411): unsure at all n locations
cccttcaggtacccgtcccaattcccggaggaacagcggttctctcaactttccngcaccccattgcctcaaaatatatattctctctctctctaaagctattatcaagaaccctcctttctatattcttaaaagggtaaaaaatttatccatcccaaaaccattttatactgcgggggggctaaatccacaatnaaaccataaaaacccgacctcacttccccgaaaatcaaataaaaaacgggtcttgactcccaaaaactattttccccacccaaccccggacaagatccacacatccctccccgtntttccccccccctaaaaaaccgggggnntcttccccacccctttttcttagcggggaaaacttacacccacccccccccccccgggggggacgcccttttt

SEQ ID NO: 187511 - DNA, 520 bp, Arabidopsis thaliana
  unsure (1)..(520): unsure at all n locations
ttcccctcgtccctcccaattcccgtggaccaccctccacaaacttccggaaccctgtttacactttaagcaatcctctataattttattaccctcacaggctgaaaacttttattaacctcccatttaaaaaattncaattnaccccctttttttaaaggacctttctttcttaaaaattccaatataaatttcacccctccaatctgttttcttaaataattcaaaacctttcaccccccaatttatttttcattcccgaacaaaaaaattttttttaaacccaatccttaacgcccaacctaaaaaaaaacttncccagaatcccatttncctctttttcccccccataaaacccccctatttttttgaagaaaacaccctttttaaaaaatccctttctttaaataactccccaaacccctttttttgttaaaaacaagtaaaacaccccatgtttataggncccttttttttctttacaaatatttcccccttaggaaaaataaaaaatccttct

SEQ ID NO: 187512 - DNA, 558 bp, Arabidopsis thaliana
gggccccccccgcgaaggggcgcagggacaaacgattttttaacacgggggggggggggggcgcaaaacaaaaacccccgcggcagagccgggggcgagccggggaagcatcgaaagagcgcaagcggtacccgccgcagacgcggcagaggaggcgcaggtgaggcagagcagaccggcgaagcggcgggaggagaagcgaggggggagggcgcgcgagccgagaccttttcttcttttgggaggtgggagaaagaagcggcacagagggaggcggaaagaaaagaacaggggaggggccagcagcaggaagagggagaggggagatatggcgtcgccgtggagcggagtgcgagcaaggaagttgcagacccggggcggaggggagagaccgcgaggaggcgcgcgtgaagacggcggtccagcggcgcacaagagagagagcgaacgccgcaagccatgggcgcgagccgcgcgccggggccgagaaagccgcacccggcgcgtggaaaaatgagtagcgagagcgagcggcgaaagaggacggcgggagatgga

SEQ ID NO: 187513 - DNA, 518 bp, Arabidopsis thaliana
aggaaaacgccccccgggggaaggcgaacagagaattttcgcaagggagagagcggccaaaaaaagacgcagcgcgggcgccgcggggccacggcggagccagcggcagtgcaacgcggggagcgggaggaggcgagcgcgacgcaccgacccccggaagcgcgaggaagaagaaggaggggaacgccgcgagagggcgttttttttaacggggggggaaagagaacagagaccgcgggggagcgggaaagaagaggaggagaaggacgaccgccaaacggagcgacgcggacgaagacgcacacgccgaggccgcgccgcacccccccagcgcaagcagaccgaggccgcggccgccgaggagagggcagctgaagctaacaaccccaggagagagcagcggcgagcaccggccccttgggcggacgaacggccggacgcacaacgagagcgcagacgcgcgagcgaatgggcagcgccggcaagggccagacggaaagaaagcgggcgcacgacaa

SEQ ID NO: 187514 - DNA, 174 bp, Arabidopsis thaliana
gcccgggcccgattatcccggggggcgccgggcgggccataaaaacaattttaacccctaactcccaaatccctttcctctttaaaaatttttccccaaataaaacgccttctttgtccgggacctagatttcaaaatggtctcccctctcccggaaaaaatttctcccggggg

SEQ ID NO: 187515 - DNA, 424 bp, Arabidopsis thaliana
atataaaagagggcgcgcagcgggtgccgacacgagcggacagagagagccgccgtccacgcatgagccgcgggaccacatacatgccaagctgcgcaatgcaaagagagcacggagaggcggggactttttcacgagggaggggtagacacaagcataaatagatcgaacaaataaatggagcaaccaaggagaagggagtcggacgggctgcaggccagacgcgcggaggcaccaaaatcagcaaagggcaaggccgttcgtccgctactgccgcgcggagccttccaacagcacccaagcacaaccctgaagagagcgaatcgacgccaaccgctcgaatcccgtgcgagcgccccccccgtcggagatgcgagagctatcggggaagcacgacgcgaggccgggtagcgcgggtcgcccg

SEQ ID NO: 187516 - DNA, 529 bp, Arabidopsis thaliana
  unsure (1)..(529): unsure at all n locations
agttttatagccggagacggcccgcctacgtaagcttggatcctctatagcgtgccccctttggttttttttttatacaacaaaatgagaatttttttctacactcatttaaaccatttcaaaggggcattacataattttactcacaaagtatcataacaaatctgagaatacaggggcctcggaaaacaaaatagggtggctttgtgccaaaaaacaaacacccaatattttattttggtggggggggagnttgtcccaacgaagaagcctcaaagaaaaattcagtgtgacaacccagggcggctaaaacagacccgtggcaccgcgtacttttttattaaaaacccccttttccaacaaagacccactcccacacgacgtacaaccgagaggtggaataacataaattattgtgattccgcacaactaatcaccgcaccgccactgaaccaccgagtatgcttacccacctctaaccattaccgtattcccagggagagtttttgctatgcacgctataactact

SEQ ID NO: 187517 - DNA, 157 bp, Arabidopsis thaliana
tatagggacagctggtacccctgcaggtaccgcgcccgaattccccgggggggcggggcgtgcgatctttatggaagaagacgggtcttattggggcgggtgtggcttcaagagatacttcatccaaccatcaattttcaagggggttaccgattcc

SEQ ID NO: 187518 - DNA, 484 bp, Arabidopsis thaliana
accccccacggcccaaaacagggagcgccacagccacacaagcgcacccccccgcggggagaaaagcgaccgtttaataaacaaccaccacccaccacgcgagaagacgagggcgcctacacgaaagagagacggacaagatacaggggagcgccgccccaacgcgccacatgaagcgacgacacgaaaaagacagggagggcagcccgagggccaagcacccgacaacagagacaggagagaagaagacacgccgcggaggggagagaggtctctttttgaggggggggggggggcgcgcacccagactgagcggggaccgcgaacggaagaaaaaacaaaggaggcgcgcgcacacagcgagcagaggcgcaaacgaacagacaccaccgaagaggagcagggacacagcaaacccgaccagagagagcgcgaggaagacccaagacacgccgacaacgcgagcagagggcccagccaagca

SEQ ID NO: 187519 - DNA, 573 bp, Arabidopsis thaliana
  unsure (1)..(573): unsure at all n locations
agggcaagctggtacgcctgcaggtaccggtccgctatattccccgggtgagccgagcgcgtccaattatatgggctctataacccacagtagcagcaatggaccttccccctcctctgattgttggaacttcgcttgagggcctttcaccaccggagggaatgggatggccttttgcctaattggcactggtttcttgcccctttgaggatggcctatnaacccggacaacccgttgtaaaaaattcccccggggccttgtaacattgcccttaaacccccttttttaattgcccaagccaatttttgtctccagcctgctggttcctgggaccttgcttgctaattttgaaacccttggtatgttctcagaaacccaaaaacggatcccattgttcccaaacccaactgcggggagttaaaaaccccaaagtcttgttaacaaccccacctttttaccaccttcgcgggggaggggggactctccaccttagacggaggggggaagcccccggcgcacctttttgaaatttctttatccccctacgccattttaacttttttttttttttt

SEQ ID NO: 187520 - DNA, 244 bp, Arabidopsis thaliana
  unsure (1)..(244): unsure at all n locations
ggggggggnaaaccgccgccccccccgnngnggggggngggcggcacgggggcattttttcnnggagcgggggaggagggcgcgccaaacaacaaagaggaccagaaagaggggacgggtgcacagcgaatcgttgcgtcgaggggcagcccaacagggacccggtccggaggggagatgagggaggtgatcaccgactatgaccagagtaaggatggcactgtgtgagaggacggcagagccc

SEQ ID NO: 187521 - DNA, 362 bp, Arabidopsis thaliana
ccccgcacgcaaacttggatcctatagaacggttcgccctttgtgtttggtccttatataacaactctagtgtttcaaggacaggacctctttaaaagaacaaaaagagagtcacagcgagggcggagagaccggacagcaccatattgccaccccgggcccgcgcgacgaccgcgcgatggggggtcagcagaggacacgacaaacaccatttttttagggggggggggggggaacagaccgaacacgacaaaaaaaaaaaatagagaacacacctcgagtggcaagacgaacagacagacccgcgcgaggagcgcgcgcccgaccgcggacaatcaataacgagcgacgcgccaaggaga

SEQ ID NO: 187522 - DNA, 515 bp, Arabidopsis thaliana
  unsure (1)..(515): unsure at all n locations
tttttttttaaataaaaaaaaatcacatataaaaatcccgccacctcttcttcttctctctcgtccccctcaacccaccttcaaattccacccccacaataaaaacacacttttattaaccacggtttgatagcaccnccccacgggcttttctataagataaaccccccttctccccttcctctttgaacaccccccacacaacatccactctaaaaatctctaaattttccccacacaacaaatcattttcaccccccgcgcgcccaaactcacccaaacgccacacaacacccctctattccccaaacactctaacacccaccccctccgcctactttccctccaaataaaaatacacatttttccacacccccaaccactctccacacgccctaaaaaaaaaaccaccttccaacacaaaattcccacacaaacaagtttttcttaaacaatttctagacatacccacaaaaaaaaaaaataaaaaaccaactctcttccatcaacaacca

SEQ ID NO: 187523 - DNA, 445 bp, Arabidopsis thaliana
  unsure (1)..(445): unsure at all n locations
ctaaagggggggtatcaatttggaagggcgaggggagggggatatagggcaggcacctgggaatctaacaaggtctatattcaaggttgtttgggagaattcattgggggggttttttggatgggtgttggccccnanatggaacntatttaaaaaaaaacccccacctattatggcaagctgctgggcgcttttgggggggcccttaccatggggggatttaggggggacaacaaggtggctgggctaaattcctgaaacccggtgggggtttttcggggcccggatatccataggaaaatttttaggggccttccaaataagacccngatggggggggcccaaacctgcccattttaaaaaaattaaaaaaaccggggggggttaaatgagttgaactgtggccccccagcgcgtgaaattttggaaaagggacttttttggg

SEQ ID NO: 187524 - DNA, 202 bp, Arabidopsis thaliana
ccccccgcgagcccgggacctataaagcgttccccccgtggttgtggccttcaactaaccccccccctctatttaggaaaagcaaccaccccaaagggcggggagcgccgcggttagtcacaaaaacaaaaagaatcaacacggcgcaatgaaccacaccttgagactagaactcgacaaccaaaaggcattttttttcggg

SEQ ID NO: 187525 - DNA, 604 bp, Arabidopsis thaliana
  unsure (1)..(604): unsure at all n locations
cctcccccccaaggaccccgcccctattccccggggggccgggggccgaaacaaaacctnccaaaaaaaaaaaaaatattaaaaggggcaacaactttcctccaaaagattggcgccctaaaccacaaaacaagcctccaagcgcccccccgctttctactcaacccctcacccccacccatattattatccgggggtgtgcggccccttctcncggggcctcaaataaattaataacccccccccccccaactccccnnccccatccccatnccactccccccccctctcaaaaaacctctcctccctccccccttaaacacaacaccaaatcaatcctcacccctcccccctccacacacaccncctccctctccctccctctcccttctccaacccccttcctccctaaacacaacacccaccccctncacccctcttctctcaaccccccactctctctcaaacaccaaaacccctctctttatcaacaacaacccccctcccacaaaaaaccaacacacacccctcccccactctccccactccccaacaaacccctcactccccacaccccacatatacctccaaaacaccccccccc

SEQ ID NO: 187526 - DNA, 172 bp, Arabidopsis thaliana
ctaaaaaaaacctttcccaggctttctaaaaactgcccggtttccccttcaaagtaaatggggaatcaccctatccacccctccacttattaggttataaaccaacattcttcatactctaaaaaccctcatcaaggcccctcctctaaatactaaatccccccctcccccc

SEQ ID NO: 187527 - DNA, 564 bp, Arabidopsis thaliana
ctcttccccttccagcatccccgcgcgaaattcccccggggggggaggggtccattaaagtgaaattctcgttaccacacctagttttttggtaatattaatattaagcccaattttgtctcctaggacaactttttaccacgggataaaagacaattgaaactccaataggttttttttaacagggggggggggcccactttgtttctgaaaaaaaaaaacaacgcacgttaagtatttacatctcaaccgataccttaacctcccaaaagcgttcccttcccacctgttttcattggtacaaaggagtgttttttctaatctcttcatctaaacagttaaatttaattttctcggaaacctttgtcaaaaacgcgcgtctatatccaatcacttattgtgccacagtgatgctgtttcaacaatacctttcaaactctaagccaacgacctaccgcactggcaaacagtgagaaccaccagcgttaaatatattttatcctctgaccgctccaaaacatctagcgacttctttacacgcgtctcatctcctgagcctacgga

SEQ ID NO: 187528 - DNA, 602 bp, Arabidopsis thaliana
gggaacagctggtacgcctgcaggtaccgggcccgaatttcccggtgcggccgggcgtccgtatatatatagaaagagatttgagaaatatatgtgtaggggttagggttttcattacttgggaattggggctggggcattgaatagaggggttcggggttttctccctttggtaaaggatgaaggtttctctaggggaggacggtaaatggccttctaaccccatctggagaaaggggatggaagtggtaaaaggggctaaaaaccacttattttgggttacgggattggaattggattccgcttgggggcctttacccgggggaggggatttaagattgggaagcaaagcctcgcgtacaataaattttttttggaagaagaccttctcttttgttcgttgttggggggcggggaaaaaaaagctcacaaaacagcccccttcccctctcctcgcactcagcgcggacgccacgccccctcgtacgggtgcgcgaaccgcctcatgttttgtcccgcgccgtgccggggaccgcgcgccgccacggccactgcgcgccgcgccgcgccgtcccgcatccaccccgccgccgcgccggccg

SEQ ID NO: 187529 - DNA, 532 bp, Arabidopsis thaliana
ccccccggaacaagagggagagggagagtttttaggaaggggggaggaggcggagacaaaaaggcggagaggcggacaaggagcagggacgggaggaggaaaagaggaagcgagcgcggttacagcaggaaattgtatgttaagactgatgagtggttattataaaggtgtttgcttgcggaatagggatagcgcagggtttttttttcagggggggtgagaaggagggaagaggggagggagaagagaagggtgggtgagaaaacgttggattttgcgcggtacggtgaggtgcttaggccggatagtgtcttgatattagggttgcgggagagttggggttttgtacggggaatcatagctcggagtatggtttattagtgatagattgtttggttttaggtgttattggccttaatagttttataaaatgtagtcggattgatgcgctatatgggccaattctcgtaatgttatgtccatatcgacatttaggagatatatttcacggtggttaagagttgaggtgata

SEQ ID NO: 187530 - DNA, 292 bp, Arabidopsis thaliana
gcggacaaaaaaaaattccaccacctttttttcccccccattaacctcttgttcccgctccaaaaagaaaccttccttaccacggggaacgaggagaaaaaccgcaaaccaaaaaattccgcgccacaattttcttctaaaaacaaagatgcaaacccctttcccaaaccccaaaaaaaaatctccggaagggaaagaaaaaaaactaccccccccctaaaattacaatttcccccccccaaaaagacgaggctttccctggcggcgaaaacccgcccaaaccgcccccaaa

SEQ ID NO: 187531 - DNA, 492 bp, Arabidopsis thaliana
ggggggagcgagcgcgagcacacacaaaatggaggtattgccgggtgggagcgcgaccgcgctgtttccggcgagggcacacccgcacgcacatctgcgacaaggcgagacgatagtgctcgcactagcattaccacagttaagaaacggtatgaggtccgcgcaccacggtttttttttgagggggaagatataaggcgccagggagcgcagaaaacaaacagaagctatcccgaacgggattctaggggtaccgaggtgtgtgcgatggcgggaaagcgcacgattaactcaacgcgacagagaacgtatgtaaagcaaggagtcagagcgcgacgcgaagcaccgagcgacgcacgacctgcgcacgcacctaccaccacggcaacgagcgtggaaaaacgttatttaccgatcagagagcggaagcgacgaaaggagccaccgcacaatcggttcatacagcagggcgggtgcagagggagaacaagg

SEQ ID NO: 187532 - DNA, 529 bp, Arabidopsis thaliana
  unsure (1)..(529): unsure at all n locations
caggcgcgggagagcagccactcccacgcgggggagccgcgaaacaaacagagagagccgccgcggccggacgcccaacgcgcgagcgcgaagccccccgcgcgccgccaagcgaacacccaccccagccacaccagacgcacggaccccgcagcagcctttaaacaacgggggcaagggcagccaaaacgcaccgaggagagagccccccgaccgcgaccgcccggaccacaacgcgaaccgcgcacgcgcccgcaacccgagagccggcggacccccgcacagacaaccgacagcacgcagcgaagcgccgccacgcgcgacagagcccacccgagccncgccgcgcacaccgcgacgcgcccgagcacgcggcgcgcgggccacacccgaggagcacaccgccggcaaacaagcgcgggccacgcgcccgcgccaaccacacgacccgaagggcacagcaccgcgagcaaacagccaaagcggcacgcccggcaccgccccagcaacgccaccaagcacgaagagg

SEQ ID NO: 187533 - DNA, 472 bp, Arabidopsis thaliana
gagctgggatcctctagagcgtccgcccttggggttgtgtcttttaggcaaggacgaaacaaaaagagcccaaacgaagatattctcccaggattgtggagcacagtgtatagttagggacacatacacacaagggtcggtccccagttttattttttaaagggttgaattaaaaacccccgatcgttttttttaggggggggggattaccctaggggggcggtttttggggaagagagaggagatgagaaaacaccgagctgtggggaaggccggacacccaccgggggggagggcggaggtgggggggaggcgggataggcttctagacacacgagggggcgagtttgtgcggaaccccataaatgggcaggagggcggggttaagcgaagaggtgcggtccgacaacacaaaggggagagcggattcgggggactcgcggggagaggggggcggtgcatcaaatggtcg

SEQ ID NO: 187534 - DNA, 154 bp, Arabidopsis thaliana
cttagttgacccgcaggttcgtgccggataggacgcccggttataggaagcacaggggtacggatactccgattcgctagcgtgtgcgtgtagtgtgcggaggatagtccgaagtaacgctgcattgtgagcgataaccgagaacgactttttt

SEQ ID NO: 187535 - DNA, 195 bp, Arabidopsis thaliana
cactattaggacctctccctcagtccgcccattccgggggccgctcataaaaaacctatttttctttgtgccccaaccaataatctcaacccctttccttttggggcggtccgccgaccggaagcccttttttttagggggggccttgggcattttttaacaaagggctctctttttgggctaatcaaaatttaa

SEQ ID NO: 187536 - DNA, 486 bp, Arabidopsis thaliana
  unsure (1)..(486): unsure at all n locations
cccccgggganttttnggggggggggaacagcccccccccccggcgggaccgcgagacgcgccgaggcttttttcagcgcggggggaagaggccctcctcacaaaaaaaacacacccgccgaccggcacgcgacgcggattattgtcggcatctatacgcgccccgacccacgccgcgcgcttatcttgagcgagcagcgccgcgccgcccggccccaccgcgcgatggccgattgcgaggatatacctcgtcgtggcccgcacagagcgcgcgccgcgcacacgacacactcttttttttttttagggagagtttgggccggcaagccagcacgagacgtaagcgcgactcaaaaaaataaaacaccacccccgagcgacgccaaccgaagaaatgagatgagagggccaggagacgcgcgcgcgcctccacgcgggatagacggccaggcaccgcgcgggagcggcgacatgctgctgcgcgtt

SEQ ID NO: 187537 - DNA, 541 bp, Arabidopsis thaliana
  unsure (1)..(541): unsure at all n locations
ggtcaaaaaaaaaaaaaaaaaacctcccccacaactcaaaacaaccccccccccggcaacaaaaataaaaccccaggcgcacggcgccccccaccatcgaactctccaacccacgggcgcgcgccaacataaataaacccgnccaccccttcttcttttctcgggggttcgtcgcggaccccccaaacacagcgcgacccccgaaaaactactcaaaccccgcgcgggcggcgaaaaaaagcggccccctccaaacctaaccgacaaaaccaccccccgatagagaagaatcttcttaacctaccgggccggaaaacgattgtccccctcctttctacacctcaccgcgaacaaaaagggcccgggccacacacacatatcccttaacgctatcccgcctgtccaggagaagcacctccccaccacaccctggaaaaaaaaagacccccgccccaaacgcggcgctgttccctcgacacaaaaagaagagcccacacaccatccccgccctccatacataacagaaatagcgaaacccaag

SEQ ID NO: 187538 - DNA, 384 bp, Arabidopsis thaliana
tagggacagctggtacccctgcaggtaccgggcccgaattccccggtgggcccgcgggtgcggtcaactggaaaaaaaaaagacctccatggtgattattaagaagatgaaaaattcactctttgttcctcggcggacgcctcttctctttatctgggtttgggccttcaacccaccccggggagatttttaccccctgggggggagaccaatccgggggggttataaaaaaaaaaaacccttcaatcggagctatggccctcctatgggcgggccgcttggcagttaaaaaggggcctttgctcgacccccccagaggggcagggaatcgctcggatttttttcccttccaataacaaaggaaactgtcctaaagggaaccgg

SEQ ID NO: 187539 - DNA, 304 bp, Arabidopsis thaliana
gccagctggaatccaaaatttcccttggggtaggccgtcacagataccccctccgaaaaaaatttggccactattgaaagggagggccaccgataatccgaacacacattcaataattcttcttcacccgaccatacaaaaaagggggtggtggcgtgtctgttcccctactccccctttttttttttaagggggtgtgggaggaaattcattgcgcacaaaaacaaaaaaaatttgcaccctacgacattttctcgcagtttgacctctctgagtctataggccggcgtcgcacacgcccacg

SEQ ID NO: 187540 - DNA, 372 bp, Arabidopsis thaliana
  unsure (1)..(372): unsure at all n locations
tacccgtcccgaattaattnnctgggtccacgagctcactaaaccctnngncncacttttttttttttttcttgagtagaatcctataaatcccaacccatttaagattcaaattaacccgacactcaaaaggtcttttcaaaccctaattaattctgtgcccatttttactaaactgggggggccaaccggaaaacaaaaataccccaaaaactcnctttctataatgccccttacgaaaaaccaaaaaattcctcaccagggtccccccttcccgtttcctaaattttaaaaaccctatccccctcccttcccaaaccggggttttaaataaaatcaccccgtttatatttttaaaaaaaagctttaaaa

SEQ ID NO: 187541 - DNA, 545 bp, Arabidopsis thaliana
ctaagcttggatcctcctaaagcgttcgcccttggtttttttctttctttacaaactccattgctttcggccgggcctactcttttcgtccacccattgggtttttgagcaccttctcgcactttgtttcccttgaggagaaccctagaaaaccccccgccatccttaaagatgttttggtgggcactccccaaacattttttttggggtgttgggggttccctctcccctaaacccgcaaaaaaaattttccctcctccctttttgttcactcggggacacccacaaccgggccttggggggaaaatgcctctcccagaaggggcctttgcccccccccccccccgtttttctacccccctcgctgggcggggagataaggccccccggccctcttcaaagagaaggccactcttccccccgcggcaccccaaaaaagctactcgtgcccggtgccgccccagaacctttcttggggggcccacacgccacccccgtgcgagccggccccctcttgtatcgccccgacacgcccccctccatgg

SEQ ID NO: 187542 - DNA, 350 bp, Arabidopsis thaliana
gcggccagagagcggccgccaaaaccaaaccagggccacccgcacgcagagaagacaaagagggcccaagagaaaccgagaggagagaaagacgaacccgcctttttttcggggggagaaaagacagccccgcaggggaaaaaagaacgagcccccccacaagacgagaaggaaaaagaagggagccccccacccgcacgaagacaacgcagacgccaccagaacccacaacagcaagcacacacccagaacacaaccgaaggaaacacacaaggacgacaggcaaagccgacaacaagacgaaagaccaaaccagacgagaaccaaaaaaaacaaccgccagcccacaa

SEQ ID NO: 187543 - DNA, 528 bp, Arabidopsis thaliana
  unsure (1)..(528): unsure at all n locations
atattagaatttccctatccctccattccgtgccacctcctctaacaaaagagaatttttaccccactcttaaaccatcctttttcctcatattttaccaaaatcaatctatattcaatttaaggaccttttcactatggggggtgacccaatttaggttattcccaaaaaaaatttacaagcccgaattaaatcttttcttcaaccttaaccaaggaaacatgttttaaggtttttttcggaaaaaataccatttaatccaaactcccaagcctgaagctttcaacttcctcctaaaaaacttgaaccccatttctctactccctttggttttggggtttaaaccccctttgttataacctataacataggcatttaataaataaatagcccacttttttttatagctaataaaaaaaaattttctttttcaaaaaaaaaaaacaacccaaaacaacaaccaataccactcaccccaanacaaaaagagggcccccctttttaaaaagaaccaacctttcccccccg

SEQ ID NO: 187544 - DNA, 423 bp, Arabidopsis thaliana
  unsure (1)..(423): unsure at all n locations
ccctcagtccctcctattccgtgaccacctcataaacaccttctaacaaaatcagaaacttaagatccaacatttcttttctttataactccgtttctcctaatcagtggtgtcccccacttctctttttaaaaaaagggagaacccccaaaaaactttaaaaaattccttttttcaaaaaaaaaaatttttccaaaaaatttactttttgccaaattataattttttttttttaaatgtaaacctaatttcttttttaaccaacccattatacctaccacttcttttattttaaaaaaaattctttttttttgctaaaaaaacaaaaaaaanatatgtgggcgcccccttaaaaaaaacaaattaacatccttatatacaaaaaaattttttataggccaaaaaataattaatgcccttttt

SEQ ID NO: 187545 - DNA, 276 bp, Arabidopsis thaliana
  unsure (1)..(276): unsure at all n locations
cccccgaaagtttaaacaaggagaaaccgccccccccataacagggagagacggatgagtgaaaattttttcgacncggggggaaaggggccacaaaacaaaaaacacagaagaaggagaagtagtatacacgaactgaccgtttgctgtgtagagtcacgcagcccacgccacccgcttgccaacgtgagtaaacggtaagtatcacagtaccaccgcctcctccgacacagcagtggattcagcgcgtcgcgacaccggacgaggctttttttt

SEQ ID NO: 187546 - DNA, 601 bp, Arabidopsis thaliana
caacacgggggggaagccccagcacaacaaaacaccgaagccggaacgaaccgcagcccgacgacacaggaggcggagagggcaaggagtacccacgccaaccagcgcccgagtacgcacacccacccacaagccgcaggccacagccgccgcagacacccccacgcagttttttttatacgcagggggtgggcacaggcaggaccagagaggcccccgcgcaagaaaaaggacagagcgacgcggtgcccacaccggacggcactacgcagcagcaagacacaccacacccccaccacacaagcagccagcaagacaaccacccgtacgcccaacacaactcacgaacgaccagcagaaccagagacaaacacacgacagacgacgcgcgagccacacccccagacagcaacccggcccccgcacgcgaagaacacaagcacgcgcatccgccaccaccgccgaccgcacccgccacgcaaccccacccccagacgaaggcccaacgaacgaacggctacacagacgacaaaaccaccacactcgcacaaaccacacgcaacaccacacgcacccccgacaagcaccgcagtaacaccaa

SEQ ID NO: 187547 - DNA, 572 bp, Arabidopsis thaliana
  unsure (1)..(572): unsure at all n locations
ccccccccgcagcgacgaaagccacagaacaaactaattttttaccccgagggggaaaaggagccccgcaaaaccataaacccacacgtgtacgcagagcgcgaacaacagaccgacaacaaaacaacaccgtagaaaggnccacacggcgtcggcgggcgcgagatagactaaggagatccagcgccgagacgacagagtcaaacagatagctataaagagaagaacggcaacccgaggttccttctctggggggggggggaaaaaagtagaagagaacccccaagaaaaaaaaaaaagacgcagggacagagccgacccagcaccgaacacatcctcgagaaaaggatcagcccaccgccaccgcctgctgggtgaacagcgcacccaccgcccacaccacgttaggcgggaggcgcgcacggaccacaaagacgttcttccgcgaacaaaagacgcaccgcacgaaaccacacaccaatcgcccgcgcgatcacaacgtcaccccgcaaccatactacaaaatcggtgtgtcacgcacccagaacagagagacaacgaagagcaattcg

SEQ ID NO: 187548 - DNA, 515 bp, Arabidopsis thaliana
  unsure (1)..(515): unsure at all n locations
accccccccccccgaaaaggggggaggaactattagggcaccccccaaaattttgagngaaccccccccccctaacttgatcccttaaacttccccctttgttttttttttttaaaacaaaaataatacattaattttttccccaaanccccttcccctttccacaacaaaccccattccaaagaaaaagttttccaataaaatcacccccttctaccccttttaacctttttataaaaccccccctggccccacaaaagcgcccctcccccaacaccactttccccattttccctctttctggaaaaagctgttgctcccccccccctctttttcctccccccaaaccacaaaccccccctttttccttttcncccccactcccccctttttcattattgaaaccggccccccatttcccccaatcaaaaaaaccaaaaacacccccttctttttttctttttctctccaacttcttcttaattttttctacaaagctgcctcttttccttcaa

SEQ ID NO: 187549 - DNA, 155 bp, Arabidopsis thaliana
gcccgcgagggaccgggcccgaaatcccgggtcgagccacagcgggcgagcgccgctaccggcaaaagacgaggcacgagaacaggagcccagagagagagagacccagggccaccacaagacacaaaccaggcgagagcttacaggaagaacac

SEQ ID NO: 187550 - DNA, 494 bp, Arabidopsis thaliana
gcgcatggccgcctaccgtagcttggatccttttgagcgggcggcctttttttttttttttaaaatggaccgttcggggataaaaattaacccggggcttatttacctggcttttgaacggaaacccctggctggggtttaatttttaaatggatttttattaggtattggtattattaaggcaagggacctttaaggaagggatttatttaaaggagaatgaaagaacttagcaatttttttaaaggttaaacacccaaccaatttttttctttcaatccattacttttaattggttcggtttttcttcctcctgtccaatttttatgaattggggtaggaaatgtggagtggaagtggccttcaatccttcctaagttctaaaactctttagccaatgttgagttacaaggtagatgcaaaatcgaaatacagccagggatgttaggagccgtgatatgacaagcggagggaagatgaccggttagggttgc

SEQ ID NO: 187551 - DNA, 574 bp, Arabidopsis thaliana
  unsure (1)..(574): unsure at all n locations
gaccccctccccccccccctccctccccccccccccnnggggggaagggggggggggaaacctaattaggggacgacgctcccaaactttggggggnnnacccccccccccccctaaaacccggaaccccactaaaaccttcccccccctggggttttagtcttttttaaaataaaaaaaacccctttaaacactgaaattattncaaaaacaaccacaacaaaatttccctctttccccggcaaaaaaattttcgaaaatctaaaaccctaacatttcacaccttcccccctcccaaccaacccacaaccccctttcttactccgggacgctgggcccccccccttttccccccccttaaaaaaaaaaaaaacccctcccccccccccaaaaccacccacccacccctccccaccccacccccccccaactcccccctcccccacacagcctttcaccccacaccccccccccccccaaccctccttcccccccccccacaacaaaaaaaaccctcttccctcaccccccctccccttcttcttccccacacccccccccccacaaaaaacaa

SEQ ID NO: 187552 - DNA, 437 bp, Arabidopsis thaliana
cgcctgcagggaccgggccggaattcccgggttgacccacgcgttcggaatcgacgagcatcaagacctttgagaacttgctactattgaacactatttgaagaacttcattatctaaatatggtcctctactgcacctacaatttattaacagtgcccgaatggtaagatccgaagcctaagctgacaattacatcataaacggctaaaacgaaaacgtatactcttgagcaaccgattctctatccgattctctgattcaaaggggttagcattaactatccactgccctaacgtgcatagcaggatgaaatgaacaacctaatggggcaaagagcttgctttggccatgagaaatcccaaggccccaaaatctaagtccagattgaatggtaccgatctaaactacccatgattggacacgggatatgaaaaaa

SEQ ID NO: 187553 - DNA, 678 bp, Arabidopsis thaliana columbia
  unsure (1)..(678): unsure at all n locations
ccccaccccccccccccctcaccctctnctcaccccccccnnnnnnnnnnttgnngaggggggggggggggggggtaacctcagattaaggggagacgacttctccccccaaaaactcnnnnnnggggggnnnnnccccccccacccccccccaccctgaaaacccttggcatcccccctaaaaaacgctccccccccttttgtttttagtttttttttaacaacacaaaaatttttccaaaacacaaagngggaaaacaccacaacaacccccctccaaaaaaaaaacaaaaccccccctgcaaaaacattggggggccacaaaccccccccccaaaacctcttttaaaaaaaacaaattcaacaacgggctcccccccaacaataaaaaaaccccccccccccttttaaaaacttttctctagggtccgctcggggaacnccccctctcttttttccccaaaaaaaaacaaaaaccccccaaccttaaacccctcccttccccccccccaacacaccaaaccacttctccccacaccctcccttttctcttcacccccccccccccaaccccccaatttnttcccccccacccctccaattcccccccaaaaaaacccccccccccccccccccccaaacccaaaaccccttttttaccaacccgctctccccccc

SEQ ID NO: 187554 - DNA, 487 bp, Arabidopsis thaliana
  unsure (1)..(487): unsure at all n locations
cccccccccctaagcctgatcccctcaaagcggcccccccctggggtgggggcttataaaaaaaatcccaggggggtnaacccctacccccaaccccccccgaaaccctcccctcccaccgccccggggaaaaaagacccgcccaataaaaaaacccaacccccccccaattttcaaaaacacccccccaaggggcccccacgcgctcccctcccaaccccccccacttcaancccccccccaaacctcctccttaaacaacggggaacgacggggggccncccccacttactccggggcgtgtttcccgcaataaaccaccaaccaacccccccccgccgccgcnctaaaaaaaccttcacggcggcgcggacgcggtctccgcccccccccttgagggggggccccctccacccccccctccccccccgggggggaggcgccgcggcgcgcccttctctcctccccacacaaaaggcggccccaa

SEQ ID NO: 187555 - DNA, 414 bp, Arabidopsis thaliana
  unsure (1)..(414): unsure at all n locations
taagcctggatcctctagagcgggcgccccggggggaaggggccccccaaccatcaattttataaaaccttctgcccgaaaataaaaatagaggggttatttttatctttcctgaacaaacggagaggtttttttttctttttttttgggggcataacgaacaaccccggtnccggaaccccaatccaaaggggggggggccccccctccccgagcaaatttctataaaaaaaggccccctccccttttcttcccccccccctccggttcttccgcgggggggccccccccccccccctaaatgaccccctcccgacggggccgggggggtggccaagaacaaaccttcccaaattttttttttaaaaggagggggtcctcccctttaaggcccccccaaacccccccccaact

SEQ ID NO: 187556 - DNA, 364 bp, Arabidopsis thaliana
ccttcaacccagggtgcggccaccctaaccaacattttataaaacttctccccgaaaataaaaaaaagatttatttttatctttttggttaccccaaaaaaaaaacctgcccttttcactttttacttaaccaaaaaaatggccaccttttccccatttaaaaatgaggggggggcccaaaccttaggttcttccaaataaaaaaaaaccaccccccaaaactttacttaagggtttcctctttcaaaaaatctctttggtttaaaccaaaaaccccccgtttaaatccctaaaaaaaaaacctcaaaccctttttttttaaaaaacctccccctggctttgcttttcccctttttttttttta

SEQ ID NO: 187557 - DNA, 350 bp, Arabidopsis thaliana
  unsure (1)..(350): unsure at all n locations
gcccgcaggaagcgggccggaagaccgggncgcccgggcgggcgaggcgaagaagaagcgggagagagaaaacccgaggggcacaagcgncagcaaggcacgcggcggacccccccaaaacccggngggaaccgggcgcaacaaggacgccgcggcgaacggaacaagaaccaagggcgagcaacgccgggaaaacctcccagggggggggaaacgaccccaaccggaccaaaacagggaccccggccagggacaggggcggggcgggggaaaaagggagccgnagcggggcgcgcggggcagcaaccacagccgcgcccaccaagcggagaagacacacggccgaccgc

SEQ ID NO: 187558 - DNA, 427 bp, Arabidopsis thaliana
  unsure (1)..(427): unsure at all n locations
gaagccaggacccgaaagagcggccggcccgaaaacacccaaaaaaaagccccagccgacccgaccgagggaggcaacaccncacgagaaagccgagaacaaaaaagggaccaccaggcgaagcaaaaacaagacagccccgcggcccaaacacacacgacacggacccagccggcacacgccagaacatttcttttagggggaggcagaaaacacccaaacacaaaaaagagaaaaagaaaaaaagagcaaacaccggaacagccgcaagcaagaccaccacaggcccaacaccccgagaccaagaaccgagcaagcagaccgcaccacaacacacccacccgcacaaacaacaaccaaacaagccaagaaaggagaaagacacaaagcccaccagcacacccacagcccccccaggagccaagag

SEQ ID NO: 187559 - DNA, 384 bp, Arabidopsis thaliana
  unsure (1)..(384): unsure at all n locations
gcccgggggaaccgggncggagangccgggtccagcgangggggaaacccgaagaagggggcgacaggaaaaccacaagggggcagaccagggaagagcgaagggcaaggcgcacaaacaaaaaggacaagaggggcagaacgaggaacaaagagaagggcccccaagccaaggaaggaacaaccccaaaaacccctttttcaaaagggggggggacggacaacaaagaaagcaaaaagacccccaacaaagggacaaacacagggaggccgcaccaaacaaaacgcgggaacagacaacaccggcagcaaaaaaacaggagccaacgaggaaccgacgcaaccaagaggcgaacgcgagagcgggagagggcggggacaaaca

SEQ ID NO: 187560 - DNA, 323 bp, Arabidopsis thaliana
  unsure (1)..(323): unsure at all n locations
tcgtaagcttggatcctctagagcggtcgccctttgggttttgttttttttttaaaaaaacacctggtcttatgtgtgctgcctaattcacgtggtagggaggatagtctattctactctatagcccattttgacttttggtgggacaaggagaaaggaacaccatnanaaatcaaaggtccgttttactggtattatagaagggggggggaaaaaaaanatcactattccctccctaaaactggggatccaaaaccttattattagcgttggctattgacacacatttaagcgttttatttgtgctttccaaaaaaaatgtt

SEQ ID NO: 187561 - DNA, 310 bp, Arabidopsis thaliana
taagcttggatcctctagagcggtcgcccttgtgttttggttttttttatgtaaaacatgatttcccttgattatattatataagccttggggagcacagagaatgggcatttcctccaaggggatcacattcccctgattcacatcggggctttttattggatattacaccccaagaccaagcccaccttttcccaggggagccggccattttaaaaggggaagggggcctggaaaaaaaagaaaggggaacaccacccgggtgggatcctcaaccctgcggggttggggcctcccccctctggggggg

SEQ ID NO: 187562 - DNA, 350 bp, Arabidopsis thaliana
aaccttctttctacacaacacaaaactatatataaagatcatacactgtaataaccgtcctgcaactattacaatcattctcccgtggaattaaccggggacctcaatgtgtttttgggattgttaatcaaagggcgggggttacctctttttttaatagagaggggggtctttaaggaccctgtgtgctctggaaaaaaaaaggaagaccccaggaaaccctttgaatctcacctcactgaaccatgtttctgtccttgggcccatccccgcaacaaaatctaataaattttttaccaaaagggggttagggggtcatccccaaaccaaagaacctaaaatccctaaaa

SEQ ID NO: 187563 - DNA, 497 bp, Arabidopsis thaliana
  unsure (1)..(497): unsure at all n locations
ccctcaccccccccctccctccccccnccnngggggggggggggggtaatattcccaagtaacaacccctgatttaaggaaactcctacccctccaagtaacccgtgcccccgaatttccccgcggtncccaccccacgggggtggcgggaaaaacaacaaacttcaaaaaccattttcaccggggttttcactttgggaaatccttttgggttttttctccattttccccaaataataaaaaaaattggccaaagcccccaccctgaaatctttctttttcctccctcctttgcgcccccgtattcctaacctccccttttaatctggggggtggtttttaactaccgaacttttcagaaaaactccccccccccccgactcaagggtggttttacttttatcaaaaaacaccaaacttttgaatttgaatagccttcaaaaaatctttccaatgtgaaattcccccaatttttcctcaccgtgcctttcccttaa

SEQ ID NO: 187564 - DNA, 388 bp, Arabidopsis thaliana
cacaaaaccccaaaattaaaccgaagaccccccccttttagattaaaataaacctcaaaggcccacttaaccatttataaatttaaaaaacccttaaagggcttaacacctctttaataaaaaggcagctggggccccccctccccctggaggggtttttcataaaaaaaaacccccttttcctttttcagtttaaaacacttaaaaaagtattttttttataatttcacacctgcgcgttccccccccccacgcaagaaaaactttacacacacccccgagccgccccttgtttttctctcaaatttttttaccaaaacttacaaagggtctcctttgtttaaccaaaaaaataaccttgtgccttctccctgaccccccacccctt

SEQ ID NO: 187565 - DNA, 394 bp, Arabidopsis thaliana
ggggagagaacacacccgcagaacccggccccaagaccgggttgacccacgcgggcgagcggcaggaagagaccagcctaactgaggcagacacgcctcacacagcggaagaacacgctctcacggcaacagcgagaggatccatgcgagggcccaacgaggaggcccaaaacccccgccgcagagagcagcagaagaccattctgattaagggaggagaacaagcgaacacgagggctgcataccgaaccaacaaacgacacaaccggcggggccctccagcccaaaccaccaacgcaagacaaatgaccacgaaccagaagctgcacagaaaaggaggcacccctcaccgcgaacgcaaggatcaagatccagaccaacccacccccgccgc

SEQ ID NO: 187566 - DNA, 453 bp, Arabidopsis thaliana
  unsure (1)..(453): unsure at all n locations
gcccccgccccggcccggagaccccaaagcagtcggcgccccgagcaactagaagcgaaaaccancaggcccaaaaaagaggcgccgcaanaacccaaccaaccacggggcagcccggccaacaaccagaaacacccaaacccgacccacccgcaaaaacaaaaaaaaaagcgcgcccccccaaaagaaatttttttaaaagggggggacaaacacaccgacgaaggaagaccaacgaggcgacaaacaaaaggagaagcagtccccaaaagaaacagcacagcaccacaaacagcagaaaactccatggccgcaaacgaccccccgacacacacccgaacacccgcacaacccccgacaaagggagagagctccccccccccgacccatgcacagacagaaaacaccataaccgagccaacacccaaaaaggacggagaacaaagaccagaa

SEQ ID NO: 187567 - DNA, 170 bp, Arabidopsis thaliana
ccccgcgggacccggcccggaacccgggttgacccagccggccaaacccaccaaagggcaaaaccgacccaggagaacgggccgtcggagaaggaccaagggccccccaagaccaaaccagcgggacccaggccagaaaaccacgccaccggaagacaccccgggccacc

SEQ ID NO: 187568 - DNA, 501 bp, Arabidopsis thaliana
gaacgccgaaggcccccgtccgtagcctggaatcctttaaagcggccgccctttttttttttttttaatgtaaaagagctcaaacttcaaataaattccaccgttatcatccaccacggatcattaagtgtggggcaagctttattaacacaaagtctaagggactttagcggaggatgcgtttgaatccatacctagggacactccacacattttgcaccaatggttatgcagcccgtagagttcttactcgaataacctaaagggcctgaaaatccggataaccaatcacttggaacatgcaagaatcagccacactacggctggcttataacaaattcctgaaggggacatgatctcaggagggagcagacaacattttgcactaaaacttcctatgcattaacaaatatcataggcccatattaaaccaccaacgtcttgcactccttcaggcattgctagaacgatttgcatcccttgatcagcagttaaacgata

SEQ ID NO: 187569 - DNA, 110 bp, Arabidopsis thaliana
cctgccgggagtcggcacaaagcttgggcacgcacagaaacgaaattagaaaagcgggacaacaacaagacgaagcgagcgcgagaacgacgagcggagagacggagacg

SEQ ID NO: 187570 - DNA, 337 bp, Arabidopsis thaliana
  unsure (1)..(337): unsure at all n locations
cgtaagcttggatcctctagagcggccgccccnagttacgtgaatataaataaattttttttttttttnaagagaaaaagcccacttggctattataattttttctaattcaaaaacctttcaatgaatgaacaaaaaaagggggcccaattatatgaggccaaacataaagaaagagttattttactattggggggggaaaaatgcttggataatttcttgaataacatgaggggtctaattttttttggcccaaaagggggggtgtaatttttattttttccaaaaaaaggggaaatcggaggaggcttgttttggtttaaaaacacactgacca

SEQ ID NO: 187571 - DNA, 468 bp, Arabidopsis thaliana
  unsure (1)..(468): unsure at all n locations
ggaaaaattccggccccccttacaaatacccccacccccatttttccctttttcccccccctcgccgtttacgggggaaattccaaaattaaaaaanaaaccccctttacccacccttaaccttaccgttttttttgaaaaaattttttttcaaatttcccgaaactccctattcccctttttaaactttttccccccaaccattctttccaattaaaaaacttacctttttcctttcttttttcatcgggggttgggcttccttacccacctttttttttccatttaataaaattaccgcgaacttgaaattttcccaccacatttcccattatccccaaaaccccctctcccccccaccgttcacctctcatttcnnaattttctaaaaaaaaaaaacccccttttttcttttaatttcaaaaaccccccattcttttcaaaaaaaaaacttttccaccttttttc

SEQ ID NO: 187572 - DNA, 390 bp, Arabidopsis thaliana
gacgtggcacgcacgccgtcgtaagcttggatcctctaagggcgccttgggttgggctttttctatatttttttttaattacctttatcctttttcgaaaaaactggcccttttttggctcagaaagttttttttaaacaaaaatttttcaaaattcggggaacacctttcatcatttaagggggttctttccctctgggggggagggcaaaaaaggaacccccaaggaataccccttccgagattttcccggtttttatggggtaatgagccccaaagagccccttaaaccccctcataacgttctggggtcattgggccaattttcggcccttttttccctggtttctttttttaaaaaagggggggggttttgctcccgttgggggc

SEQ ID NO: 187573 - DNA, 374 bp, Arabidopsis thaliana
ccctgcggtaccgtcccgaattccggtcacccacggtacggttttccaccaaatttcctttttttttttttttgggtctgggctgcttttttgttgtgttgttcgtgatgaaggtccctaagggaagaaacacatgatttcgaaagaccaagaccaataccaattacccccaccttggtcttgggggtggaaagggcttcttcttttcctctctttaaaataactccttactccttcttttggggtgcctcttcccggtttttcttataccgagaatcaccaaaccaaacctccagattttttagccccacctctttttctctggaatcccctcgttgtttttttccccccaaattgttcaaattttttttttt

SEQ ID NO: 187574 - DNA, 500 bp, Arabidopsis thaliana
  unsure (1)..(500): unsure at all n locations
aaagcccagaaccccccaaaggggggcgaccccaaagcacgcggaagcacaaggggacgcccgccagcggcgaaggaaaaaccaacttcgcccccggccgccgaggaagagacaacggcaggacggaggccgccacaaacaaaagaaaaaaaacctccctggaagcaaaggaagacacacgccaggaggggcccaaagaagacagagcccagccggaggagggaggggcgggccgcaagagagaaaacgcgagaacaacaggaagagaaacaggagcagcacgacggggagaaaaaagaacaccacggcaaagcancaaaccaaagaaacaaacccacacagcgaccaaacacacgcgacagccacccaacncccccccccaccaacaacacgacaaaagaacaacccaacacacagccccaccaccccgagggcaccagggagcgcgcggacacccccacaccaccccgccccagcgagacaaacgaaagaaaagacag

SEQ ID NO: 187575 - DNA, 376 bp, Arabidopsis thaliana
  unsure (1)..(376): unsure at all n locations
accccgaccgaaaganggaagcccccaaagggtccgccctccgnacaatattcaaaaaaaaaccacgggcggcgggaagcgggaccattccccccgacgacccaagaaagaaccacaagacgcccgagagggcaccgaccacccaaaacggcaccccaaacgccccacaacccggaacgcgcccaccacggcaaagaaatttttttttttaaagaaggaacccaccccgccgccgcgaaacccacacaaacaaaaaacacaaaaaacaggaccccaagccgnccgcaccggaccacagaccgacacaagaagagacaaaaacacgaccacaaaaagaaaccaggagccacagccacaccaaccccacaaaccccac

SEQ ID NO: 187576 - DNA, 672 bp, Arabidopsis thaliana
  unsure (1)..(672): unsure at all n locations
cccgccgccagaacacgcccgcccccgccggccaaggagcaacccgccggaaaagaggccccccgggagggcaaanagaccctcntgtggggaggaccagacccccccccggcctctaggagggggaggaacaacggaccccccccagggagcgggcgacgccgacccgacgcgccccgcaccactctctacaccccccacgggagangggaaagggcgcgccgccccacacacacaacaccggcgccgccgcagcgcgccccgacaacccggacaccgacaccacccggcgcggccgccaccccgacacacgacacgccacgccccgacccaccacgccgaccaggacccccgccacccgcacgagccagcgcgccgaggacgccccccgcccgcccgccgccacacccaagcgcgcgcacgagcgcgcccgacggctctccctctagccccgaggggggcgcgcccgcgcggcggccgcgccgccggccgccgccccgcgccgccacaaaaagaccgcgccggcgccggacccggcacgccacagcgcgcggcccaccaggcgcgacgagccgccgcacggcgcacagaccgcaggcaggccggcagcggcccgcagccgcacgccccgccgcgaccacggcgaccgcgcacgaggcaagggcgccccag

SEQ ID NO: 187577 - DNA, 420 bp, Arabidopsis thaliana
ccccgggggccggccggaaaccggtcgcccaccgccagccagaaaaaagacaaacaaacacaggagccgcgaaaagggcgcgaccccaacccgaggcgccaacccacccagcgaagaagacaggagccaccaggacaggaggaaaggaacaagagacatgcttcctcgcggggaggacaaccacaagcaacaaagccaccggacggccaccacggaaagaacgacacaccacgaacgcgaaggcacacagccccggacgacaccacaggaccacccgccgcgagcgcgccgggccacacgaaccagaagcgagcaaaaagaggaacgcgcccacagggaccaaaaggagaccgacccgaggaaccgcacacacgcagggcagcggaccccgggcacggaggaagcagggggaccccagag

SEQ ID NO: 187578 - DNA, 338 bp, Arabidopsis thaliana
  unsure (1)..(338): unsure at all n locations
ccaaaccgcgaccccccacaccgccccccaccacaacaccggaacaacccgacagcaccaggggagggngcctccttgtggacacaacccccccacgagttgcgaggagggaaacaccgaaggccgcaaacgagcgcgcaacgcaccggagaacaacttttcacacgccagggggggcgaggcgcgcgaccaaacccaaacacccgcagacccgaccacccgccccacgccacccaagccaacccagaggacaggcccgcagacaccgcgaagcgacagagcggccgagccgcgcaacacacggaaacacaacacgccggcgcgagggagagccccag

SEQ ID NO: 187579 - DNA, 507 bp, Arabidopsis thaliana
ggggaggaaaccccccccggcgggacccggcccgaaaaacccgggtggaccacaccgcccgaccaccaagcggggaaaacggccagaagcgcaacccggaaaagccggaggggccagccgaccacccacggggacaaaacgcgcggaaaacacccaacacccggcggggggggccccgggaacccgaggggaggagagaggcaaaacagtttttaaggaggggggagacggggcaacggagcagccccccaaacgaaaggacgcacgccggaaggacaccagcagatggccggggcccaagccgacagggacacgcagaaccggagccccaaccggacagcggcgatgcgacgccgacgccgggagcgggaggacggaccaagaagaaaccacagaggcgcgggcaccgaagccgacggaaccaggccacgggccgggggaagccaaacacgacagaccgaaccagaaagaccggaccccgcacaggagaaccacccgcccagggag

SEQ ID NO: 187580 - DNA, 472 bp, Arabidopsis thaliana
accccccccccaccgaagcccggactcctctaaagcgtgtcgcccttggggttttgttcttctaacaaaaaaaaacccctccctctctacataggatgggaaaaccatcggacccctactaaacccgcgtcaactacaagcgaaattgcctcaccacacacaaacctattccacacacccggaccctccgccttttttaaaaaactctcctgaaaaacgcctctttttttactcaaagggggggggcccaaaaacttctactcgaaaaaatgcttccaaaaaatacagcacacccgccttggacacacaaggacacccaaacctcccccgaaaatccctcttcttgccataaacacggcaacttacacaaaacaccttcccgcctcacaccactaatcccttattagtctcccaacaaagacccccatccttttcggaacgcacactcccctccccctctgcgcccccaccc

SEQ ID NO: 187581 - DNA, 457 bp, Arabidopsis thaliana
  unsure (1)..(457): unsure at all n locations
actcactattgnggagagctaggcacgcctgcaggaccggtccggcataccgggtcgacccacgcgtcgccacgcgtncagagacgcgtggggataaaagagtgatatctcttgatgtgctctctctgtctgcacaatgggtccgaacactagcttagcttcggtcacttgtaagactgctaaaaaggacagtgtattccacgagcatatactatgctcaaggattgctccacacactcccatggatgcttcgcagagtcccacatgtacacaattgttcacagctagtcgaaacactctgtgcttggagggcattgagtgttctcgaagctcttcttcagagctggcagcccggaccatgggggcacctggtggatcccaccctcaggattcgagtactctgaaaacggactgatgagaaaacgctngtacctcagacttcattaaaagcccgaag

SEQ ID NO: 187582 - DNA, 562 bp, Arabidopsis thaliana
  unsure (1)..(562): unsure at all n locations
gggnccggggcccgggaacagcccgggtttgagccgggagcgcgcaaaaacccaccaaaacagagacagaagnagngagaaaaaagaggcagggaacaccaggaaagcgcggacgaacgacccaagaaagcaccagcaaagaccgaagccaacagggaggccaagaacaaggacccccaagggacaagggggggcagaggcaaaccgagaagcacagccttttttttttgaaagcggggggcaaacaaagaagcaacaaggaagcgagcaagcgcgaagagcagcaaagcacccagaagagagcagggcagccagacaaggaaagaccgcaggccaagcagcaggacggaaaaggcgaagcagaggcaacggaaaacccaaagaggcacccaacccgaagagccagggacagagccacaacagacacaggaaggaagccagggccaagagaagcaggaaaagagggggacgagcaaacaaaagcgaagcgcggcggaccagacagcggacagggaaggacnagggggaaacagaaagaggcagagcacacagggccaggaga

SEQ ID NO: 187583 - DNA, 583 bp, Arabidopsis thaliana columbia
cccccccccccaccccccccccccccccaccgccccccccccaccaccccccccacaaaaaacctcttttaacacgaccccttcccctctcaaaaaaaaaaacaccccccccccccccccccccccccccccccccccccttcccccccccgggggccagccgccccacaaacaaaaacccccccccccccccccccccccacccccccccccccccccccccccccacccccccccccccccacacacaaaccaccaccccccccccctccccaccaccaccccccccccccaccccccccccccccaccccccccccccccccctcctttttcaccccggggggggggacaacccaacatccccgaccccccacccacaaaaaacaaaaccccccccaccccccccacccacccccaccccgcccccacccaccacccccccccgcgcccccacccccccccccgtccaccccccccaccaaccccaccccccacccccccccccctcccccacccccccccccacccccacccacctcccccacccacccaccacccccacacccccccaaccccacccg

SEQ ID NO: 187584 - DNA, 497 bp, Arabidopsis thaliana
  unsure (1)..(497): unsure at all n locations
gaaagcagggaacccccaaaagggtccgcccttctttttttttttttaacgccggaaagacccgcaggaatccgaaacgaaaataaccaccaggcttggagagaaccagggaagaaaaaggccacccaacacccacagggccgtccgcccagtagaaataagaaaggcgtgtcaaccaacacaccggggacagtatttttttttaggcgggggccccccccaggggccnagccgcggggagagcagcaagaaaggaaaccccagacgaacgcaaccccgcaagccaaagccgggaaggcaaggaagaaacaggaccccaagccgaccacaaccaaggcccccccgcccgaaacacaagaacaaagcagaggcacggggagggaggaaacacaggacacaagcgccacaccaaaagaccaaaacggcaaaccaaggaaccaacgcggcaccaaagaccccaacncgggaaagaaacgagaccgaaacacccacaccac

SEQ ID NO: 187585 - DNA, 590 bp, Arabidopsis thaliana
cccccccgaggtttagaggggggaaaaaaaccccaaccccccacccaggcggccccaccacccagaacaaacaaccctctcccaacccaggagagagaagaggcccgcaacaaacccaaaaaaaaccacgagagagcaccccgaagcgcgccagagaaaagaacgcaccgccaagacaccgagacaacacgaggaagccaagacaggcaacggacaccacacgacgcccgccgccacaacgcccgcgcaggcacacgccccccgcccgcccccgcacagacgccagcacgcaacaacccgcacagctcccttctcttccagagggggcggggcggccacggggccggcagcaccagcacacgccccacgagacaaaaagagcaacccgcccacaccaccccgccgcagcccacccacccaaccgcacaagaccgcaaaaccccaccgcgacgccacggcccacccccacgacccgcaggccccccccacagccccccacaaccgcacaaaacacgaccccccagccgcgcgcccccgcccccaccacccgcgcccacacaagaccggcagacccacacacccacacgcag

SEQ ID NO: 187586 - DNA, 143 bp, Arabidopsis thaliana
  unsure (1)..(143): unsure at all n locations
taccgggcccgaattcccgggtcnacccacgggtgcgagtctagaaggttactcttgacattttcacaaagccttgaacagaaatgggctctctcactgcgactcctcccggaagactcctatcccttagcatcggacggggg

SEQ ID NO: 187587 - DNA, 504 bp, Arabidopsis thaliana
gaacgcacgcggacgcaagctgggatcctctagagcggtcgcccttcgtgtttttttctttatctaaaaccactactcccggatttagacggtacctcagcgaaacccagtgttatgttccaaccatcacgagcaactcaaccccacgaacaatgagcgaaaaaataggtaacaccaacaagatgcaccccacgacacggactactgctttgggggggggagacgaggacccatcgccagaaccaaccacggaccaaggtgtcaagtgcttatgagcacttacggctacaagtgaaaatagacttcaggggaaagggcgcctgcgaagacggatggagccgctgatgactaaaaaacgcttggcgccatgccggagaaacgacattctagatccggaccgctacctaggccggcaccaacccggggccaggaacaacaatagcacctcgaaggctaagcgggtgtgtttggagagagataaccgtagctggccccagcagacga

SEQ ID NO: 187588 - DNA, 458 bp, Arabidopsis thaliana
  unsure (1)..(458): unsure at all n locations
ggggccgggcccgaaaaccgggttggccgggcggcgaaccagggaaaaacccagaccggagncagggggcccccccagccggcggaggccccaaaccgcagaaaggcacccggcggaagggaaaggcagagaaggagaaaggccacaaaagacacacaagggcaggagcttcgtctacgggggggggaagcaaacaggcggcccccccaaaaaccggagccaccaaacaggggagggcacgcgaggcggcgaagagggcacacaaagaaggagggcccgccggcaaccacacgggggggaacgccagaccccaaggagaggaagacaaggcggaaccagagcgaacagacggccgagaaaaaaaaagaaaagggggggacacgccggggcagggcgggcccagcgaaaaaagggccaacccggagacacacagcagnaaacaaaacaagggggcgaga

SEQ ID NO: 187589 - DNA, 527 bp, Arabidopsis thaliana
  unsure (1)..(527): unsure at all n locations
ctctcccccaccttctctcttcccccccccccccccccgccccnnnnnnnngngggggggggggggggggaaataattccccaaagttacaatcccccctnaatttgaggggaaaatatccttcccccttccaaatacccccttccccgaatttcccctttttccacccaagcgcttccggcccacccttaaccaaaaatnaaacacattccanactttttatttaccccaatctttttaatttgggccgcccaactttttttccttccccgcccgggggtattttaattttaccaatcccacaatcttttttttgcttgggttttctctggctttccataccctttaaccaaaaaatgggggtggggtctcttaatttccnnaaatcctttttttctccctncttttaaaaaaaaaaaaaatttggttaatcctatttttcttcccctttttttccctttacaacacttctaacaggaataccttcccaacaaaattctctaaaatatccccccacacccaaaaaa

SEQ ID NO: 187590 - DNA, 502 bp, Arabidopsis thaliana
tctctcacaaaaaacaaaactcgttttaaacccccccccaccatttataccccaccaaaccacccccaactacatccccccccacaccatcacttttccccctgcggggtaggccgcgccaaacatacaaccactcataccattcccttcattaccctcatacaacaaatactttcgatcacactacacccttattctagcaccgaaacatacttatattttttctacaattctctctttaaaaacccccattactataacacaacaaacctttttttttcaccgcggggttgacccacctcaaccctatccaaccacagaacaaacaattcttaatcccaaatcaccatcacactaacttctctcatctttctctcctaataccaccacctcaccacctattcccatcttcctctcctccacctacatctcccaccccttctcccacatcctaacctcctcccacaacaccatccatcattcaccacaacaatcacctaac

SEQ ID NO: 187591 - DNA, 559 bp, Arabidopsis thaliana
  unsure (1)..(559): unsure at all n locations
agaaaaaacgaaaacaaaaaaaaaaaaaaacgcacccctcntgttacgacaaaaaaattaagggggnaaagcacccgaaccggaacccgggaccccaaaagagggcagcgcccgggcaccaccaccgaaaccccggacccccaagaacggggcagcccaagggccccgaacccaacaaagagcgccccccaacggcaaaagaaaaaaccgcgcgacgacccgcgaaccaaagaaagacacgacgccacaagaaaagaaaaaattttttttaaggggggaaccacacaaagcagaagaacaccccaaaaaaggaacaacaaacaaggggcgacgcgacaaaaaaaagagcaagagacaacaagagcaacagccaccgcccaccggggcacacccccccgccccccgcccaaccacccggaggcgccccaggaaagagcaaggaaaaaaaccacccccaacaaagaccgggaaggaaaaaacagagcaggaaaacacaccccgaaaagcaaaaaaggaaaacaagcaccacccaccacacaagagaggcgaacaaaaacaa

SEQ ID NO: 187592 - DNA, 744 bp, Arabidopsis thaliana
acaccaccccacccagacgcaccgccacagcagccgcgccccaccctcaccacccacccccgacccccccgacacaaaaagaggcaaaccctccacttgtgggaaccgagccccccccccggctgatgaagaagagaaaaacccaacgccccccccaacacgacgcccccgcgcaccccgaagacccttcttcaccccccgaaggcgcaggggggggccccccaaacaaacaccagcccccccagcccccccgcgcgcccccaccaccccccgccccaccgaaccccacacccccaccaccccgcccccacccacccgcccgcgcacccacccacccccaccccacacataccgcaccccgaacaacagccacagccccccccccaacagggccgaccacgcacaaagaaagcaccccacagagactctctttctctctcaccaaccaaggggggcgggcaacacacaccacccgccaccacacaacccccgccccgaccccaaaaacacagcccacccccgcccccccccgccgcaccgccacacccccccgcgacaccacgccaccgcaccgcacgaccccacgcccgccccccccaccacccagcccaccccaccgccccccaccccccccgcccagcccgcgccgcgaccacccaccctcacccaccacccggacccacctgcgaacacaaccacgcccccgcgccgaccccgccaccccacgccccccacgcccccgcc

SEQ ID NO: 187593 - DNA, 407 bp, Arabidopsis thaliana
  unsure (1)..(407): unsure at all n locations
cccgcagaccgacggatccggtgaccagcggcgtctttctttttaaaactttctcatatggaaagcaggttcttttcgagcataagaaatgtatctcttctaggttcctcttaccggggagccgtttggaaaataggaatcgagacttctcctttgcagagccngcggacattgacgttttagaaataggtttgacctttcgggtcctcacttcccgagatttcttgcctcaccgtaaggctttggggttttgttgaaccctcaccgttcacctttttttttaggccctcggcttttcaggctgaaacaggggaacggtatcaatgtcaacctttcttttccatccccgacattggggtacgagaataggcgttcaacatcaaaatgttccctcttcatcattaggg

SEQ ID NO: 187594 - DNA, 528 bp, Arabidopsis thaliana
  unsure (1)..(528): unsure at all n locations
cacaccaaagggggggaaaaacccccgcccccaacacacaaaacaagcgcagaaggagaaaaagagcacgccggggcgaacccaaggcgcagcaaaaagagaagaaacagaggcagccaagcccgcccaaacacaagcgcggccggcggcgcgagaacagcgggacggggcgcgccccggacgacgcccgcgacaacaaagaacgccggaggccaaaaaggccgcgggcatttttttttagggagggggcggagggccgggccccgccgagacgcgggcaagaaagaacagacgacaccccggcaagcgcccacccgacagcccccccgcccccccacgccgcccaagcgcgcgcacccgaacgccggccggacagcgcgcccccaccacccgcacgacgccgcccgcgggcgggcaaccgcacgaggggagccgcgaacgccgcacgcacgccaggcggggggcggacgagaaggaccgcgncgcccgcgcccaagcgaccccaacgccgcccgggagggcgcgcac

SEQ ID NO: 187595 - DNA, 347 bp, Arabidopsis thaliana
  unsure (1)..(347): unsure at all n locations
acgccngcggnaccggnccggaaacccgggtcgacccacgcggcgtccggagcggacgnaagcgccaccgagaagcagagcccaccaacggcgggagacaagccgcaatcgccagcagaccaagcggtggccacactacaaggagcggacccagacaccacaaagaaacagccaccaccggctctctccttatagggggggaaaggaacagacgcccaaagcagcagcccaacccacaccacaagagagggcacaacaccccgcccccaccaagagccaggccacaaccagaagaaaggacgggcgacaccgcacaggagcaccagagcccacacacacccgaggca

SEQ ID NO: 187596 - DNA, 539 bp, Arabidopsis thaliana
ccccccctcaagcgaaagcccgggcacgccctctcacaaccacgttccacgcctctcgggactgtcgggccgtctctcccactaacgcttctcccttccatccccccccgaagaggcgggccccctaccccccaccccacttttttttttttttttttaatcacaccctcttttttttacctttaatggaggcgccttcataaaacacttctcctccaccgcggcccaaagatttttcctctaacgccttcaaaaaattttttttttcccctggggggaggggaccccccccccttaacttttggggaacctctctatattatacctcccgttaatctcctccccctccaaaggggtcccccccctttctcttccacaccccattttctcgcccaccaacccccccccagcccgagaccttttatgcctcttctatccctaacccgattcgccctccttccacgtcctgacttcttttttgatctcgccccctcttctcccctttgtctatccaaatccctccttccccctctcttcga

SEQ ID NO: 187597 - DNA, 166 bp, Arabidopsis thaliana
  unsure (1)..(166): unsure at all n locations
ccggnccggaanncccgggttgaccgaggcgggcgaggcaacncnagcnccngngnngagagccnaagccaagannctcnngcanggcngcgannnncagaccngcnncagcgncacnggannnacgaccaaaggggannngcacgaancncncnacgaaagagcg

SEQ ID NO: 187598 - DNA, 231 bp, Arabidopsis thaliana
  unsure (1)..(231): unsure at all n locations
ggggggggggggtatatacctacgccggggttactaatcccccacttgacttataanggggaaaagctcccttaccccccttccaagggtacccccgggcccgcgaatttccccctgttcccaccccacggggtttccggggccaaaaaaaaacaacccacccnnnnaaattcccaattttttttccaattctcctttaccaaaaagtatccttttaaaaccccggggggg

SEQ ID NO: 187599 - DNA, 421 bp, Arabidopsis thaliana
atctattaggaacactctacaagatcttgagtcgcctgccgcgtcgtaagctggatcttaagcggcgcctttgttttgtttttaaaaaaaaacacacttttcttcgctaaaaaaaatctacacaataatcaactaagagttacccgaacctaatcaaagaacacaaaaaaaaaaaaaaggggactggggaagaaaaataaaagttccaaaaataatactttgccttggggggggaatcttttattaatgttttctttgaaaaggagccccatggtttgctcctccttatctggggcccattgggtcactcaaataaccccccaatattctatatataaaaaaattggggaaaaaaaagggtttctttggcttgaaaggggggaataaccattccttaaaaaaggccacctccctaggggga

SEQ ID NO: 187600 - DNA, 263 bp, Arabidopsis thaliana
  unsure (1)..(263): unsure at all n locations
cccccanaatgggtctaaacaaacttgctccaaattccacggnggggcctacaatcccaagacagggtcttaggaggagccccaaccaagtcaaccaaaaaaatatgccttcttttcgagggggggtggaccanngctcaatacctggataattggtttaaaaaaagaacacttcatcaggaaacccccaaaccactttactcctaagtcctcaattgggactttattgtggggcctctccgtgcgctttttccgggggggga

SEQ ID NO: 187601 - DNA, 585 bp, Arabidopsis thaliana
cccccccgggccttaagggggggggaaaacaaaagcccccccaagagacgaaagcggaacagaccccgcccgcctttcaccagcccggggggggaagccccacccaacaacacaaccccccccccgggcggccagggacaaagacgcaacgccgggcccgcgccgcaccccccacgaacacggaccgcccggacgcccccacgagcccgcgccgcagcacccaacaaggccggcaccgcgcccgcgacgggagccgccgcggcgcaccgccgacgccaccccacccctctctctcccacgggggggggacgaggacgaaaccggacgaagagcacacgcgcccacccacacaccccacgccgcgccggcccggccgccacgcggccccaccggaccaaacgcacccacccccacagacaggcacggaaagcacgcacacacgccgccccacaccgcccccacaccccccccgccccgacgagccaccacccgcaccccacagacacagcgcagcccgcgcccccccccggcaaccggccgggaacaagcgacgacgcacccaacacccgcacccccgccccgccc

SEQ ID NO: 187602 - DNA, 444 bp, Arabidopsis thaliana
  unsure (1)..(444): unsure at all n locations
ccgccgggacccggcccgaaatcccggggccgaccaagccgtccgaccacccggccgaccaagaagagacccgtggaagccgaacaccaggacaggcggcccacccagaaggggaccaaggacgaccactgaacccagagacaagcagaccaaaagagaaagggcacggaaagagcgacgcagcccctcgattgacacagagggaggcggccggcccgagcccccacgaggaagagggacacgcncagggcgaaaccagcggacgaaccccgaaaagcaaagggggaacaaggccaaagtgccacgggaacgaggaaaaaagcccggcaacacacacagggaaaaaggagcaaccccacgccagaccagaaaaagggcacggggggaacggaaggcgcacagcccaggggcacgcaaaccccaaagggagccgaacacaacggc

SEQ ID NO: 187603 - DNA, 466 bp, Arabidopsis thaliana
  unsure (1)..(466): unsure at all n locations
gggggggggggggggtaatactcgccctgttacaaaaccccttnacttaangggaaagctcttgcccccttccaaataccccctccccaaatttccctgttcccaccccaggcgttccggaagggcccaacacaatttnaatttnaactttccctccacaccccaaattcccacacctntcntctgttttctctctataaaaaaccctttttcttttttctcctcaacgcccttaaaacttctaaaaaaattaaaaaaaaacttccccatctcaaaaaaaaacttttaatttttcggtgggggctcccaaaaaaaaaaaatcccccccatttaaaaaaactaataattcttaaatcctccaaaattcaaaaccaatttttttccaaattcctttttacttaaaataaaaatttttcttccccaattttcaaaatccaaaaattctttccaaattaaaaaacccttt

SEQ ID NO: 187604 - DNA, 378 bp, Arabidopsis thaliana
acgccgcgacgtaagcttggtccttagagctccaggggtggttattcctttttatttttttttttttttttttgggtgtttttttttttttttttttttgggaaaacaaaccgggggttttattaattttgaaaaccaaatccaatttcttcttaattaattgtaaggggtttttaaaactttttttttttgggtgttggggggaaccccagggttagggaaaaaaaaaaacacccaaaggccatgagcggggtgaactgtttttcaaaaaaatgggaaaggggggcaggacttttttaataaaaggggggccataaacaactttttggggaagtggggaggtgtcttttgggggggggttttttttaaaagaaaaaa

SEQ ID NO: 187605 - DNA, 342 bp, Arabidopsis thaliana
cctcgtgtgaacattttctataggcgccaccagagaccaccaccacccttttttttttgcgggggggggcgacagacgtgagggacaccctatgtactaataaaactagcgttgctgtctttagttctggctggtcgtacactcggccgagaccaaacaggtgggcttcgataggcatgagtccgaacgcccagtgtcgcgtcctcactgggagtacgctggaccactgctcgaaggagcgtatctaccgtaagagccagcctatatgtgattggccacaacacggcacggacgctcgcgtgctcattgccaggcgacagcggcgcattagcgggggtcgac

SEQ ID NO: 187606 - DNA, 380 bp, Arabidopsis thaliana
aaaaaagatgcactagcgaaccaccaagactcagcggtcagggaccaaggaacgggagcgagcgacggaagtgcacaccgccgcggagcaacagaccggaccggacgaaggggtggacacaggggaaggctttttttggggggggggagcaggacgcgggggggctaaaaaaaaacccgcgaggtggctccgggcagagaacgcggggagagaaaggacggcaagagggggggagggggtggataacagaagagctagaagatgctacgaggggagaggcgatgcccagcgggtgagggtggcgtgcgtcgggacgggcaaagggggtagtgtgtcaagccgagaagcggatgggggaaacagggggaagttggggggta

SEQ ID NO: 187607 - DNA, 605 bp, Arabidopsis thaliana
aggaggggggagggagcgggagaaagagaggggtttataagggagacgggggcaaaaacccaagcgagaagacacgaacagagagcagacaaccagcgcgacgagcgaacagagacagacgcacacgagagaacaaccgaggcgaaggaggaaagaagggggaaaaggagaaaggagaaaaaagggagggaggccgaggagacggagcgaaaaggcggcggaagacgccggaaaacgacaaaggagggttttttttgccgagagaggggaaaacaggaggcaaggaagaggagaggggagacagcacgccgagaaaacagcaggaacgaaggagagggagaggagggggcagagacgagaggaggagaggcagcgaaagacgggggaggcgaaagaaaggaggagacgagaaggaaaagacaacggacgcgcggaacaaacagagaaagaggagaaggggcaagcgggcgggggaaagagaaggagagaaggggcaaggaaacggagaaacgacagagagaaggcacagcgaaagagcccaggaccacaccccgacggcagcaagccgagtggcgcggcggcagagaaaacggcaggagaagacc

SEQ ID NO: 187608 - DNA, 194 bp, Arabidopsis thaliana
tttttctcaccacacccacaacgatttatcaagcgaggaaccaccccagcaagaagacgagcagagccgagggacgcgcgcgcagagcgtttatacagacctcgccggacgtgaaacacgcacccaacacaacgacgaggcagcgcgcgcacggcagggagcgcgcgcagcgacggcggagcgagacgcacgcg

SEQ ID NO: 187609 - DNA, 675 bp, Arabidopsis thaliana
  unsure (1)..(675): unsure at all n locations
gaggcacagggggagacgcgggggagagacaaaagaagatttttttttcccccaccccccactttcagggggaaccaaaaggggaggaaaagaggggggaccaaaacgagattctagcagcggggggaaacccgcgaaacaacgaggagaagaaacaggaaggggggggaggggaaggcaagacacaggagagaacagacacgcgcgccacgccggaagacagcgagaaggagcagagggaggcagagaggggagggaggaggagaggccgaggggaaaaggggcgggggagtttttttgggggggcgggggcacagacggcgaggcagaggcgaagggggcggaagggagcggcacggaagagagaagcgcggaagcgagagcggaccggagacacgcagacagagcgaaagcaggagcagagagggagaagagggcggggacggggacacgggagaaaagagaggagaagaaagagagcgcagggaaagcagacgcgaaaggtatggacgcaaggacgaggcagggaggaagagaacgagaagtaacgaaggagacaagggnaaaagacacgagggggaagggcgcacgaaaacaacagcgagagagcgggcagacgggggcagcgaaggacgggggaagcaagaacaccgcgaagaaaacgacgagagaaga

SEQ ID NO: 187610 - DNA, 187 bp, Arabidopsis thaliana
caacgctacgagcagcgcccgcgagcgacgggaaggccccattttttaagcgggcggggcaaaccccggaaactacacaattgtccgactgcgggcaagcctgctagcgatgtgtgggtataagataagacctggaggagtactgctggattacgacttattgaccgcagccacaagtagcggagcc

SEQ ID NO: 187611 - DNA, 412 bp, Arabidopsis thaliana
gaaacgagaggcacacggagcagaccgggggccgcaggtgcaatgtgaagagggcccgaccggacacgagatcaagacgacaactcgacgcgaaaaagtacggcgcgcaaaaaattttgtacggcgggagggcgaaaacgcgcacaacgcacgtacgccagacgcagagcgcgacgcagggcgcagagcgaccggggacggagcgcgacgacaggagcgcccgtatcgccccggcgcggcgcgcaacagagggcgcgcacccgcgcgcggcaggaaccacccaacaccggaagacgggggacgggccccacctataacgacccgctcgcacagatacggacggccgcacccgggagcaccaacgaacgaagagccgagcagagccggcacacccaaacgaaagaaccaagga

SEQ ID NO: 187612 - DNA, 287 bp, Arabidopsis thaliana
cgagaccaggagactttttcacacacgacggcggaagacagaccgacaaatagaggagcggcacagcgccatataggcgtgccagagggcgacaagatgagcggacctatccaaataacatgcggacagaagacgcgcgacgagtggaagtacaacgggaacaccgacgcacgctagcgcacgtagttagagagcgctagagggcccacggggacgtaccaatcgagtctcgaaaacatagcgatgtttttcttaccaagggcgtagagaatttccgaatgcttata

SEQ ID NO: 187613 - DNA, 324 bp, Arabidopsis thaliana
  unsure (1)..(324): unsure at all n locations
caccccccggagactgacaaagaaagaccaanacccagagagcgcgacggagagcccccggagtttaaagacggaggcggaaccccagagaaacagaagacgcaacgagaccacaacggaagagaacacagaggcaaaggccagcgaccaggcacaggcgcacaacggcgaccacccgagctgacaccccaacaagcacggcaccgcccgcacaaaacaagacacccaggagaccgggcaccacaaccgggggaggcacacgacgtttttagcggacaagagggaaagcgaagcacaagagcgacgaacacacggaggagacaa

SEQ ID NO: 187614 - DNA, 433 bp, Arabidopsis thaliana
gggcggagcagccgagaagaggacgcgcaacgaccgcagagaagaggacggggggacggcagagaaagagcacgcgcacgcgcgacgaggacgggggcgacggggtttttacgcgcgcgggggaggaccagcgcgcgagaggccgaacgcaggcaccgaccggcggacaccgcgcacacgaccagcaacgccacaggcgcgaacgacgcgaaagacgcacaaaccggccaaaggcagcgagaaaaaaccgcggcgaaaagcgcgcgcaaaacgaaagaaagaaagaagcaacccgcgaacaaacccaaaaaaagggaagcgcgaacgcagcgcgaagaaagagagagaaaggcccgggaaccaccagcgaccaccgcacggaacgcaccaaagacccagccccggcacgacaaggcgccgccagcccgggagg

SEQ ID NO: 187615 - DNA, 518 bp, Arabidopsis thaliana
  unsure (1)..(518): unsure at all n locations
gcccgcggggccgggccggaattaccaattttcgggggggttaaaactcnnaaannnannannnncgggagaaaaagaaaaaaggagaaaaagagagcaaagaaggggggggggaaaaggggggggggggaaagggaaaggaggagggagaggaataggaaaagagagaaaaagaagaaagagggggggaaatttttttttgggtgtttggggacacagaaaaaatattttttttaaaaaaataaagtatgaagggttggtgtgatggggatattgttgtggaggaaaaggaatggtatagatgtggtgtgaagagagtggttgataagggttgttgatgagttagatagaggtgggggatgggggtgatagtgagtggttagagtattagttgttgatttggagggaataatagtggtagtgggtgagagtaggggttagtgtggggggttgttattaggggagagagaaaggaggagtaatggggtgtggttatgagtatagtgtggtggtgggtt

SEQ ID NO: 187616 - DNA, 601 bp, Arabidopsis thaliana
  unsure (1)..(601): unsure at all n locations
caaccaccagcccccccacccgaccggcggggaaggttttttatgtaaccacaaaaccaaattttgacaaaaacccccgccccggcgngggacagccccacaacacaatttacacccaaggggaaaagccccccacaaaaaaaaaacaaacaaaccaaaaccacccaacgcaccaaacacgaaccaaaaacaaagaacaggaacaagcgagaggaaagagaaacgcacgagagaggaaggacgaccccaagcacgcaaaccaaaaaaaagagacacgaccaacagggggaccgccaccacatcccacgagggggggggggcgaccccgcacgccgcgcccgaaccccgccagaacaaaaaaggacgcaccccgccgcgacgacagacgccagaaggggcacaacacacaacacaccaaggagaacgagaggggaaacccaacgaaaggggacgaaaagagcacccagaggacaaacagagacggcacgaggagagggagggcggcacaaaccgggcagaagagcaaagcgacaacaggcgcgcacagacggacagcacacaaaacagcaccacccacaagggcaaaccagcacgaagagga

SEQ ID NO: 187617 - DNA, 510 bp, Arabidopsis thaliana
tggacgcttttgtagtgctcccgcgctagaaccgctgacacaaccacctttttcttttttcaacccgcccccaccttttttcaaacaaggaaaacagcgagagcgcccccgcccctatacacccgcaacaattctaacataggggggggaaggccggaccataaacacgatgctacagtgatagcgtcggaggtaagcctcaatcatccgatcacgcccgtaattccacacccgcaccgctatagaacaaagaccaacccccactcacctgcccggctcataaaactccactacttacctgtccaagataagcagcgtacgactataacaagtttttttccaaggggggggtgataccatgatcccacctaattacgcccactaacaaaaaactctgcgcgtcagccgcagcaggtagatgccctacatattggtgtcatcgagttcaggccattctcacctctgagtatgatggattgccctcccgccactcatccccaccctttctgc

SEQ ID NO: 187618 - DNA, 456 bp, Arabidopsis thaliana
  unsure (1)..(456): unsure at all n locations
gtaagctgggatcctatagagcgtttcgcctttgggttaggcctnaaatagaaacttnntgaataaaaataaaccagggactcatttacatgcttatagagcgaaaacccaggcttgtgtccgatatatagatggataccatgaaagggctgggaatataaaagaaaggacctgaagaatttttttgggttgttgggagagacgaagttgcaaaataaaaaaaaaccccccccgagcctggtgttggcgtcccccccatcgctcaacacgggagcgggtgttcggtctgcgggctaatgttttatggtgtgcggcgggagctcggcgagatagggtgagcagaaaatcgcggcgaacgcggagaggttgtgagtccacgtggggctccccgggggccgcgcaccgttgtgtccggccgctgcctggtgcccggcttacggagccgcgcagtgaggg

SEQ ID NO: 187619 - DNA, 529 bp, Arabidopsis thaliana
gacgtcgcactgcacgcgtacgtagcttggatcctctagagcggtcgccctatgggtttgtccttttttaatttttttaacctttaagaggctttgtttattttcttgattaaaaaaaaacgcttgtttacgggaaccttttttacattaccgggagattttgtctacttcccctcaagaaaaaaaaaaaaactctttttgagtttttttacgggagtgggcgccgcttgggagccaaactcaaccaaaaaaaattccctttcgcagagagcgttttatggggggcccgcctggtcctgtttttttgggagggggagaaccggccccgactccttcagtttaaaagggcgaaaagggtggtgtattgtaaaggagaaagtcacaagtgtggttcttggtaaccagcctcctcggccggaggccatatggggatcccctggggggacttaaaacccagcgggcgcaggccccctcctgttgcgggagggcaaaggtcctctctcgttctagccccttcctttaccatggc

SEQ ID NO: 187620 - DNA, 543 bp, Arabidopsis thaliana
accacagggggaaccggtgcggaattgcagggtttgagagaaaggggggagaggttgagggcagggcgggagagaaggaagaggagaagacacaaacatgtagcacgggggcgtgagaaccgggggaagagagtggagtccgggagaggggagcgcggaggaagacgggtcggaaaggacagagagagagggagagaggaaaagagggagaggagaggaatttttttgtagagggaggggcaggagtgtacagagcaagaaagcacggaatagggaggcgggagactcacgaagagcgccggggagggagaggaggagaaggagaagaaggaggtagagggcgagggagagaaaggagagtggaggaggagagggagcaaggaggcgagatcaagcagaagaggagcacgggagatgagaaggggaggagatgaaggcaatacgaggaggcaggaagggccgacaggagccgcaagagaagacagtggtaagagggagaggaagacaagtgagacgggcaggaggggcgatgaaagaagaatg

SEQ ID NO: 187621 - DNA, 604 bp, Arabidopsis thaliana
cccacccgcagaaacaacaagactttataccacaagaggggagaagaggccgcacgaaacacgcactccggccgcgcgcgacgccaaaccaacaacacgtaagcccgcacaactacacacagaagcccaaaaaggaacacccaacgcagcaaagacagacaaaaggggcacagaccccacacaaacccggacagcccccgccccacccgtagaccgaaacacccacccaagcagcacttaaccccaggggggcgggaacaaagcaaacaaaacctgaccgccaacgagaccaacagaagcccgcgcccacgccaagacaccgggaaaggagaacacgcagcggaaagataacgaaaaggaacgaaccggaccgcacggaagagaggaaaacataccattcgcacacccaccccacccaaagcccccagcgccgcgagcaccccgaacgacgccacgaccacgagccacagggcagcacgcacaaagctgcaccgagataccacgccaggcccggccgcccggcaaagccgcaataggaagccacccgccaaccacacccagcaccacccagagcgcagaggaacaccagaacaccgaaacgcaa

SEQ ID NO: 187622 - DNA, 297 bp, Arabidopsis thaliana
accccccccccatttaacgggggagaacgacacccgacaggggcgcacgcgcgcaaggaaccattttcgaaccatgggggaaagggagaggaaaaaaaaagagcacattgacgacgcgtaggaggcgtagacagagcgcgatctcaacgatgttggtaactggttctgcgtgtgccactgtttcactagtgtttacctggagtagtagaggctggatgttcgttgccactcgagaccggacgaggaaggttttttttttagtgggggggtggcccagaacgatcgggatgacggatg

SEQ ID NO: 187623 - DNA, 299 bp, Arabidopsis thaliana
aggcgcggattttttttaaccccccccaccgttttaccgcggaaaccccctccgcgtgaagaccggtgctgcgggcgatttttagtacggggtaaaggtttcttaaaaaaagggttcttggtacctagctgacaaggcacggagggagataaaaaggggcggatgagagcatgcatgctagttatggtggtgccagagttgaccaaggggacgagcagaggacgagcgtttttttacgaggggaacaggacaactccatgggcagcctggtagaagcaagtcgttggaacttctccaag

SEQ ID NO: 187624 - DNA, 508 bp, Arabidopsis thaliana
cgcaccggacgaagcttggatcctatagagctttgcccttgggtttttcctaactgagaattaatttgaaagaaaagtaaatgtgatcacggaaaaataattgactgtagcttcgaaaaataaaggaaaatcgggtggagggaacacctctgcggacatgggaaaattaaaacgtgccacggaaaatttttttggggggggggggggcatcaggggactctagatgtagtaagagggaaacatttcatggggggggtgggaaaacccggttcgagggagaaaaccaggaaagaggggatacttatttatagaacaaaaagtatgcataaagggcaggcaaaacacaaagtaaaagcggggaagccgtttacaacagcgactcgggtgcggcttcaggagaacagaagggagcccttccggggggagggaaatagctggaatcatgtacaatcaagaagggcgttcagataggggggaaagcaagaagagaaatgaaagagcccttcgt

SEQ ID NO: 187625 - DNA, 191 bp, Arabidopsis thaliana
  unsure (1)..(191): unsure at all n locations
acaattccccgcactgggatcctttgaaggcctggagattcccgccgccatntacacgccttagcaatcggccattttttttttcaggggggggggggccattccccgaagtgttataactccacatgaaacgcgaggaattttggatcaaagcacccggatggacattgaagggatggaagtgcgacgaa

SEQ ID NO: 187626 - DNA, 256 bp, Arabidopsis thaliana
ccccccccctttagagggaagaagaaagaagacgcccggcagcgagcacgcaggacggagaaaccagttttagaggagagggggaaaaggccgacgggaaagaacaagaaggagagcaacggaggaaggaggacggggcaagaccgccagacgcacccacagagcgaagagcaccgacggggcgaccgcgcgaggagcagagaacagaacgcgacggggcgagcagcgccccaacgaacccgaccgcgcacagacg

SEQ ID NO: 187627 - DNA, 544 bp, Arabidopsis thaliana
tttttaaccccgtccccaaggtttttgggggacgcaaccggagcgagcagtagcatgaagggagaacgagggagattttttgcgcgaggggggataggtcccctaacaacgaatgttacgacaatgaaaagcagagtacgcgggccacggagatgtatcctaaggaacggcgcagcgcgcgagcgagctttgatactggtacgtagttgagtgtgttaggacacgacgcgagccgtggagtgatagactgtgtaggagggtgggaggatgcgacatgttttttaggagcgtgggatgccatgttgtatgacgagaagccctcgagatagcttgaattcccaccccacaccggggatggatggtagttcgtcggaatgcttacgcagggcaacgctttgacatgacgggagcacaaagtcagagagatactccctgtttccgacatgaggaggcacggcggctggcccgaaacaaagaacggggtatattcgccggcgggacgcctcggaacccttgccgcgaggtcagggacgcccgaagactg

SEQ ID NO: 187628 - DNA, 467 bp, Arabidopsis thaliana
  unsure (1)..(467): unsure at all n locations
gccgggccccccacgngggggggggntttctggtgacaccccccaaaattataggggacgacccgccccccccccccaagcatcggaatcctctatagagtttcgccctttggtttttgttttttttaaaaaaaaaaaaggggcggtcctcccaggtcccatctctttcaaaccaccgccgatacacaactgaatacgcggtgcctgttatctctttttgcacggtctttctctgtttttcgcatcaaaaagccagtcctgcccatgttttttttgggttgagggggaacaaccagccgcctctttttaaaaaaaaagaccatcgggccgtggtgtagacaacctcaccacctctctcttccggaacgtgggtgtgaacagcttcgcgtaattctgtcctctctgtttgtctccgcccaccccccctactatgttggtgtcagccgctagtgtccctgcggaccatc

SEQ ID NO: 187629 - DNA, 516 bp, Arabidopsis thaliana
cccccccaaataatagaaaaaaccggcccctccacaaaccccccccaaatcccgtttaccccggggggcggggggaaaaaaaacaattctcccaaaactattaaataattccaacaaacaaccaatatttacacgcatttcccagaacgaacaccatatcccactcttccccaccatactaaacccccaaaaacccaaaaataaataaaacatcactttttttccgggcgtggtccatacaacacaaacacccatttcaaaaaaaaaaaaatcctaccaaaattcccacaaacattcacacattttgcttaatattaaaaaaaaactacacacatttataactgaccttgacaccaacccaacacaaccccactctatccacacaaatatacaacatcttgtcaacaaaaccactcaacattccactcaatttctattaatcataccatcacacctaaaaaacatgctcaatacacaactacaacactcctatatattaaaaataacaaacaacaa

SEQ ID NO: 187630 - DNA, 317 bp, Arabidopsis thaliana
cccatttcgagggcggcgaacgcaacgccgagagagcggcagcagcggcaaagcgcccacttttgaacgatggggtggcagtgaggggcagcctcgagccgcggcgcacgcaacgagggaccgccgctcgagacccacagccgctcctacgctccacacccgtcacgcaccgcccctagtcagaacagaagaaccgccagcgaaacagatctacataccggacgagcacagacacggaaccgaccgcggacacttttttttgagacgggggcacaaatcagagacgcacggacggcgccatgatagacgcctgacgc

SEQ ID NO: 187631 - DNA, 616 bp, Arabidopsis thaliana
gggaagaggacggacaacgggcgcgaccgcggggacggcagagaggagaccgcgccaaagaggggttttttaggagacagggcgggggaagacaccgcgcaacaggagggaaggaacgagacggaaccgcgtggaagacaagggagaagagggagactgggcgacaaacggacgggaagagacccaagagggaggcaaccgagaaggggaaagaaggggaggggcgacagcccaccggcaaaaccaaggaaaaggagaaggaggagggggggccggcacattttacccagaggcgtgggaagcaagggacacgagccgcacagcacccgagagagaagaggagaacccacgaaagggcaggagcgaggagaggacagcaaggcagaacagcgcacaaagagaccgacggaaggcggaggagcaacacagcaccgcacacgccgacaagacaacacgaagagagggcaccgcgcagcgaccaggataccgagagagcggcggaacacgacggcaggcggaccaaagggggcccagcgccgccgcgaaaccgagacaacacaagcgaggacaaagaaaccgcgggcaacccaggccagggaagaggccggcgcaccaa

SEQ ID NO: 187632 - DNA, 288 bp, Arabidopsis thaliana
ccccccccacattaaaagggaaagaaccagagcccgcagaggaggcggcagggggcgcagacgacagattctaacgcgcagggcgggaggggacggggccagcaacaagcgcgccgacacgcacgcgcacgcgccccagcgggacgcccaccgccaggcgacaccagacggggcgaaaggaggagaggagagaggcgagccagaggagagaggagaaggcgcacgccgggcgcaaacgcgagacgcaacgaccgcgcgccggacccagcgaagcgcgacgccgccgaa

SEQ ID NO: 187633 - DNA, 474 bp, Arabidopsis thaliana
ccccccattcaggggaagaacggggccccggggcgcccgccctttattaagttttgccccgggcgaggggcctccaaatactttcaaaaaaactttggctctttttgacaccttctccacgcccacaaccaattttcaaatgtgtaggtaaacaaccaacaagcctctatctaaaatacggctctcaatccttctctatgcgctctttttttcgggatgtatgccccctttctctcttcccttacaaaaaaaaatccctcgctccacagcgcgggcgttttccaacagtatttttttttaacgacatttcattaactgttgttttcgccatctcttttcccaaagtagcccactttcacctccgctaccaagaccgcactaagttcctctaatccctccaaatgttttattctacgcccacacttaatctctccctctcccttctcatccacttcgtttgtatcctgtccgccc

SEQ ID NO: 187634 - DNA, 638 bp, Arabidopsis thaliana
  unsure (1)..(638): unsure at all n locations
cccccaccaattaaaaaggaaaaaaacccaaacccccccccaaccacccacaccgcggcaacaccaccttttttaacacaaggggggaaaaggccgncgccaaaaacaaacacccacataccacccaccccacacccccccctcacccccccaaactccaacaccaaccccccaacaatacacccacccaaccacacacatcaaaacacaaacactcacaaccaaaacatatccacccaacacacaaactacctaaacacaaacaaccgaaacctctttttttttgcgcgacgatcggccaaccacaacaaagctcccccgacccaaaaaaaaaaacaaaaacccccccaacccccctacacacaaacacacagaacaaccccaccatcccaccccacaatcaaaccgaaccccaaaacaagaaaatgaccccccacgccaatctcacccaccctaatatcctcccccgcaattaccacgcagttcatcccctcgacacaaacatcaaaccaccaccacaccaccccaacaaaaccacggaccgaccacccacccacctccaaatcaacagccccctacaaccatcgcctatgcacaacccgtcatacagccacaaaaaacaatacccacccacaccc

SEQ ID NO: 187635 - DNA, 535 bp, Arabidopsis thaliana
tactctacaagagcttgacgaggcatccacgcgtgcgtaagcttggatcctctagagcggcctgcctctgtgttttttttttttttttttttttaaagcattactttttattgaaggtattgatatacaacaggggatttgttttaaggctcaaaggcatccaattgccaaattaatactggaaataattaaataggcctgtcatgccgatcactggaaggttttttcaaggggtgtactctatacatattatttctactaactgcgcttaaataattaccaaaagcttctttttttgcagagaacaattggatatgttgcttgtaacatttcaaaggggggaaaaaaataaactcctcttaaaattttaaggggaaaaacccctgcaaaaaatatttttcttcaagagtaaaaagggattctctttttcacaaaaaggcacaaaggagctaaaaaaatattggcaaattttttacctaaacccttacatcccattattatctttattataaagtggcggggcccacacaatttt

SEQ ID NO: 187636 - DNA, 467 bp, Arabidopsis thaliana
  unsure (1)..(467): unsure at all n locations
tttttttctaaaaaaaaaaggtttacaattggttgtgaaaattttttccccacaaggggggggtttaaatccccccacaccacaattttttcttttttgggaaaaaaaaaaaacaaggggggtttttttcgaggggagggaaaaaaaaaccccctcnctcctacacacacctttaaaaaactttttttttaggaagaaaaaaaagaaaaaaaaacgccgccttctctcttctgggcggtattttttttttgtgtgtcccacccaccactcaaaaaagaaaccccttcttttttgtttttccgtatagaggtggtgacacaaatatattttttttccatcaaaacccgctatttcttcagcaaacgattttttttttttatttcttcccaccccacttcttcttcctttcgtttgtttagggtactatatttttttttctcgaaccaaccacagagaggggggggtgt

SEQ ID NO: 187637 - DNA, 517 bp, Arabidopsis thaliana
  unsure (1)..(517): unsure at all n locations
aaaaaatatttgggggcccacccacgcgaagggggaaaggaaaaaaacacgagcccccggtctttggtggccaccccaaaaaagagaaaatcttaggcccgaccccccgcagaaaactccccctcccccaaatataaaaccccaccggccccccgcacgtatttttttggggaagttggggggcacnccccccccccccctctaaaaaaaaaaaaacaagtgcgtttttgttgccgcgggcgccccttttctcccccccccaaaagcgacgaggtgatcttataaaaaaaaacaaccaaggttttgtctgttgggacccacataccccgcaccggggggggaggcacaaaaacaaaagggtgtggggggcgggtggctacccccggaaagacgagatggttgatcctcacccccggagcccccaaaacaacaaggcacatcccgcccccggccggcggggccggccacagtgcaatccccctaagacagccgcccgttctttcaacaaaaagaaaag

SEQ ID NO: 187638 - DNA, 513 bp, Arabidopsis thaliana
cactcactttatggaaagctcgccgcctgccggtaccggtccggaatttccgggttgacccacagcgttcgggcacgcgtacgacacaatcaatggggtctcaacgggtatatccggtctgattgtgactctgtccgtgttttttaccatacccaacattacactgggactccttaagaaagctgcgctgatttcataaaaacttgcttcgattttttttggggggggtggtataacccattccatctatggagaaaaaaaaaaccttgttcgtgagccccattcttattatgcccttaacaaccacccttaccatcacaaaatgagaataagaaatgttttggggggaatatacggggtccaaaccggcggacaattttggaacccggacagggtttggaccacgggggaaaaaaggactactcttccaagcagtccaaaaagggatgtgtttctttcaaaaaaaaagagggtcgtgttttcctttttttaaacccaacgagaccccgaacg

SEQ ID NO: 187639 - DNA, 267 bp, Arabidopsis thaliana
caaaaaatttatggacgggggaaccccaccccccaccgcaagacccgggaaccttcttacaaaaggtttgcccccacgggggcagagccccccccaaaatataatataattttgcgccccgcgcacccagaaaagaaacacaaaagagagacttacccccaaaaacccgcgaaacccggggaggaaacctcattataacccgcgtgagtgaaaaaaaggaaaaattatatcaaaaagcacggcacccatgatatagggtcaagccct

SEQ ID NO: 187640 - DNA, 517 bp, Arabidopsis thaliana
aggagacgtttgttcttataccactcactatttggaaagccggcccgcctgccggtaccgggccggaatatccgggtcgacccacgcgttcggttggggtagattaaggccgtcccccgaaagggaaacagagatatgtgttgggggagctctttccacacagggacaggcttgtacggtatgccccgccttaacctactaaaacaagggcttgcctgtataagcagcctccacctacccccttttttgaagggggggggtccaaaattcacgattcttctaaacaaaaaaaaaaccctccacccttaaaaaaaacagaacaaacgggcgcctatttctcgcagcatcccagtctatcccgccgctatatgtgaacctaaatagattttaccagacggcccacctaacaacaatcacccctggccattccgcctacaccagaggacagcattgataaaactcctcgcgatggccgaaactctaagacaacgttcggaggtaccccgcatacctcgta

SEQ ID NO: 187641 - DNA, 422 bp, Arabidopsis thaliana
  unsure (1)..(422): unsure at all n locations
gcgccccggcccannnnncggccgcttttgtgtcactctacaagactatgcgtcgcacgccccgtccgcaagcttggatcctatatagcggttgcccttttgggaggaggccttttattatttggggtttttccacgcccttgctcttcggggctccctctctgttcgggcggcggggcggacccgagcccggcgcgaaaaaaaaaaaaaaacccaacgtctttgggggcggcacccgccacaatcttatcctctgcggctttttttcgggtgtgtgggccccccttttgttttttttaaaaaaaaaagggggtttttttttttctcccccccgagaagccgcgttgtttttctaccacccgcccggggcccctccacactcttccctttctctatctctgtcgcctactaaatactccgca

SEQ ID NO: 187642 - DNA, 594 bp, Arabidopsis thaliana
acaacatacccccagtagtagccgcccccgatagtagacaccaatctttttttacccacctcactatttttgcaaagcccggcccccccccgcgaagaacccccgcccccggaaaaatctccgcgcgttgtacccaaagccggtgcggaggggcggcttataaaaacaaacggccccttcacctacaagtagccgcggttcctttctaaccgcagaattgaaacacctaacaatctattttcacacatcaaaaaaccaaccatgtataaaaacactaatccaactcccttcttcgttctaattaccccccaaaatctcccagtgaaaaaatttttttggggggggggaaacaccctaacgacatacccataaaaaacaaccaaccgtctgtcccgcattaccaactcccccaataaaaccggccgaccaaatcaaaaccacacaaaaataaaaccctcgtaaaatacaaaatcaaccaactctccaacataacaccgttaattcccccaccacactaattcaacaacaaccacaccacctacctaacgcgcgccaacacccaataaacctcctaaccaccaaccacctccatta

SEQ ID NO: 187643 - DNA, 607 bp, Arabidopsis thaliana
  unsure (1)..(607): unsure at all n locations
tgcgccccgcgcggtagaaccccncccccgccacgcaaccaggtgtcactattacaaaaaatttttgtgggacgcccccccgccgccagcggggggtacctctaaaagaaggtttgcccccatcgggtttggttcctcataaacaaaaaaagctaacaacaaaccccacgcgcgccccacaacgaaagagataatcgcgctcagaaaggaaggaccagcaaaagagggaaaggggcctttactgaaaagaacccaaaaaacttctaagggagcgaagtctcggacgcgaaaaccaccacaaaaaaacttttttttggggagtgagggagcccacccgcaaaggcacccctctctaaaaaaaaaaaagaagaggacctccgggtcgagaaatcaaaccccaaacaacacgaacttctagaacaaaacaaagccaacgtacccccgccaacccccttcaacttcaatataccaaccaacgaagaggccgcgcccactcaagacctcggaatcggcgaaggaaaacctgtcaacccggacaggaagcgccaagaacccaatcccacaaagaaccagcccaaaaagcccgcacacaatggcgcaccgaacc

SEQ ID NO: 187644 - DNA, 454 bp, Arabidopsis thaliana
  unsure (1)..(454): unsure at all n locations
gggacccccccggcgcaacaggcgggagcggtacaatcaaccaagtttcccagaggggcggagagacccccgcaccgaggaggccagaagaagcccgaccgggcgcatccgacaccagaccgaacgaaaccgcacccccggaagagagacagaccccgacaagacaaaccgtccaagacccagacgaacgcgtagagagaccgcccacgcgaagggcaccgccggacacacacgaacacacgactcttttttcccgggggggggggaccaaacaaaagagccgacgacgcccaaaacgaggaacgaaacaagggatcaggcggaagcggagaacggcaaacgcagccnggtgccaccggccaacacaaggggggcgacaagctgacgggccagacggccaaagccgcacagagaacgtggcaaccgagaaacacgacgcgacgagaaacgcgcg

SEQ ID NO: 187645 - DNA, 500 bp, Arabidopsis thaliana
cacattttttttttccccccacctttttgaggggggcccccaccggaggagcgggggaggaagaaaagcccatttgcaagggcggggggaggcgccaaagcaaaccgaacggcaggaggaaagcgaggaccaagaccgcgcagcggaaaccccaaccaccgcaacgcccgacaggaaatacggacagggcaaaccgcaagacaaatccatagcagagcggacacggggaagcagcgagaagaaagcctttttcaacggagggggcgagcccggcaaagcaggcgtacaagagaaaaacagagacccacctggagaaccgccgagaaccaccgacgccccaaaaacaaccggccgagccaaaagaaacgcacgccggaggaggcaccagaggcgggaaaaaacaaaccaacagagacaaagaaaaaaaagaccagagagaacgcacgccacgcacaaaagcgaataacaacaggcgaacgaagagagaaacaagcggaaaa

SEQ ID NO: 187646 - DNA, 528 bp, Arabidopsis thaliana
ggaaaggtggtacgcctgcaggtacccgggccggaattaattaccgggtccacgagctcactagtcggggggccgccttttttttttttttttggggggagaacgctgtgggttcccaccccgcggaagagtcaaatcaaaacacgggctttaaaagggggggcaaaacacggaaaaatattttggcccgggaaccacttcaaccaacaaccgataacattgaaaggaggggggccactcacttccttaactatttttgggggaacccccccgcaaaggcaggcaaacctcccagggggggggaacccccccccggcttaaacgaaacaaacctcatttggggccaggcccaccgggttttttatacacaacccgggaaaatttttcccaaggggggcggccacactccgcagcgaaagggggagtgcctccgaagaaggaggatcaaactttgcccgagaagggacagggccaacacagagaggggggcccctctattgccacccccttcaagaaaaaacatcttaa

SEQ ID NO: 187647 - DNA, 439 bp, Arabidopsis thaliana
  unsure (1)..(439): unsure at all n locations
tccacacctcccattacctctcccatcacacttcttactcaacatctatatactaaccatccacccctcttactcactcccttttctaactcttatttttcttccatcgcgggggtggggtcacccctcacctatcgcctccttctctaaaaaataaaaaccttcctactctcctcgttcctcccctcccctatcccactcccctcatattaaacatatccctcatttttatcacccatttctatctctcccctccacaaatatctttgactatataatacatccccttcccctncccctctctattctactcctcacgtccctattcttttctacttcctcccacctctattccattaccttcgccccactctcttattatcttacactttactatttctcctctccccattatacttccacattcttcttatatatc

SEQ ID NO: 187648 - DNA, 476 bp, Arabidopsis thaliana
tttacctaacccaaccacaaccttataactatcccaaccactttttacttccaacccactccacaaacactttatctattttctcatcacattacccccaacaccaaatttttttaacgggggggggactaccacaggtgctcaaaaaaaaaaaattaaatccctcccttctcttccatctcaattcatttccgtcttctatctacctatatccattacctaccttcccccccttcttttactataattccgacatcaacaacacatttattctaccatataccgcatcccaatacctaccttatacaacatccctctcccacatactaccgttacattaaatcaccctcacctaaatcaacaatccaaaccacaattaaaccaatccatacccccgtttctactattcaaatctattcgctcctagcattaaaaatacttaacaacattatttatcaataacacagttttcacat

SEQ ID NO: 187649 - DNA, 483 bp, Arabidopsis thaliana
  unsure (1)..(483): unsure at all n locations
cccccctccccgaccccctcccttttcccnntgtaaaggggccattaaaaaaacncncccttttttnaatttttattttctaaaactcacaaaaaaccacacctttttaaaaaacctctctttccttcacacctttaaaaaataaaaantccccacaacccctccttcaggggggaggggaaaaccccaagggggaccccaaataaaaaaacccccaatccncccccctttttctttcccctctcttttctccgtcccctccctcccccccctttccccctctcctccctttttcttcccccctctttttccataattctatctaaatttctcgccgtcgtccttgagcccaacattaaaaaccctctcataccacaccaccaaacaacacctcgtcccactaatctacctaaccctcccccaccactcacacaacccccccaccaccctctaccacacacaacccctttactccatcccccc

SEQ ID NO: 187650 - DNA, 286 bp, Arabidopsis thaliana
aaaaaaaattctttccaccattcttaaccccaattattctatccctccggtttttccttatctaaacctccttcccctcacaaaaaccttccccccccccttttcctttttcccctaaagaaaaaaaaacctttaatttccacaccctcttaatcccaacccaaaaactttttcaaacccccctcaaaaatatccccggctattttccctccttctccaaaaaaatttcccccccctcctcctttccctcccccttcttttagaaaaaaaaaaatttcttccaccc

SEQ ID NO: 187651 - DNA, 487 bp, Arabidopsis thaliana
  unsure (1)..(487): unsure at all n locations
gcccccccccctgggggggcggccccttttccccggggagaggggcggaaaaaaaaaaaaaatccccaacccccttttttaaaaaaaaaaacaatcttaaaaaatttnctcctctatctcccttctaataaaaaaactcccccaaaccaaattattttcttctttcccccccttctcctctctagggagtggggcaaccaaaggggggggcctaaaataaaaatccccatactcccaccccgcccggccgcccccgccgcccctctctcccttcgcggggggatactctctagccctttctttaggccccttctcccctccctcgcgcccagcatgagggaattttcccatccaaacctttccgcccctggggcccggcccacacaaaaacgtgggccccccgcacacttccttccgcgccgctccacaaggccgggtcgtgtccccacctctccccggcggcgcggctcccctccagccccggggg

SEQ ID NO: 187652 - DNA, 378 bp, Arabidopsis thaliana
ccccctctctccatctattaaaaaaataacccccctaaatcttaaaattttcacccccttttttccatacaaaaaaaaacccaaaatgtgcaaaccctccgaaataaaaataaaaaacaaacgcgccccccacaattcaattcccacaacaaatcactttctcccaaacccctaacgtttctccccaaccccacaccatatttctcaagacccgctatttacctcaccaccctccaatattctccacaaacccccaccttccccttacaaaaaaaatatccataaaaattctcaacccacaaccattcctctttcccctttaaacacaaaccaacaatcctcttctacctttctccccacaaaacccactccaaacaa

SEQ ID NO: 187653 - DNA, 543 bp, Arabidopsis thaliana
tacacccccctctttttcagccccctctcacatccccatccctccactcactccttttttctccgagggggaagggtatacaaaaaaaaaatcccctacttacacctattccaaccaaattcatcactctctctcttcacacttagtactccccctgcctattttaatttatcttctaattatcttttctattattctctatatatctattctacccaccccccctctcttcttctctcctctgggtggttggtggctatcctattcattctgcgcttccccataaaaaaaaaacaatgctatataatcctgctccattcacgtctctctccaaattgttcttcctctcttttttacatcatattcacctcctcttctccataatcactctatatttcacatctaacccttcctctccctaaccgaatatccatagataaccatcctctctcctcaccatctacctcatatctcaactactctctacctataattattcccttttccatttttcttctccctgcttctattctccccaaatca

SEQ ID NO: 187654 - DNA, 647 bp, Arabidopsis thaliana
  unsure (1)..(647): unsure at all n locations
ccccccccccgnctctttatccggcggcgtctttgccgggggggtgttggggggggnccccccgcggcncttggcgccctccgcctctccccctttctccccggaggggatgggtgttctcttaccccccntcctncccccccnccccccccctcccctcccccccnccnctttctccccnncccccccccctccttccccctcttctcccctcccccccctccttcctccctctttcctttctccccccccctccctctcttctcccccccccccttccctcnnttcctgtaagtnggggnccccccccccggggggggcccncttgggagggctacctcccccctcgccgtccccccctcccccgcgcctccccccctcccgtngtcgcgccgcccctcccggcccctcgcgcggctccgcgtcgctctttccccgcggcgcgcgcccggcgcccccgccgcgcgccgctggccgccgccccgggcgggggggggggggggttgctccgcctcgggcgttgcgctcgccgttgccgctcggcgcggtctgctcgcgctgtgcgccccgcggcgcccggcgcgcccgctggtggcgcgcccggcgcgggccggtgcgcgcgcggcctcggcgcgcccgtgtgggcg

SEQ ID NO: 187655 - DNA, 663 bp, Arabidopsis thaliana columbia
  unsure (1)..(663): unsure at all n locations
ccccccccccccnntttcncccccccccttttatcgcctcttctcttctcccccccttttcgccccgccgcccccccccctttttccccntccctctcttcttcctttttcncccggggggttgggcttctttatacaccccccccccccccccccccccccctccccccctctctcccccctctcccccctccccgcccccctccctcccccttcttctcctctcccttctctccccctttcccttcctctgtcttcccctcgtctgggccccgccccgccccttctctcctttcggtttgttgtggnccccncccctttgggccccccttcttaacactaaataccccctcccctcctctcctccctcctctccctttccctcctttttccccccccccttcctcccccccctccttccctcttttcctctccccccctcccctcccctcccttctccctcccctctccccctctccctctcctcctttcctcccttctttcttctcttcccctccttcttcctcctctctcccccctcccccttccctctctttctcttctntctttccctccttcctttcctcctcccccctcctccctctcctctctntccccttctctccttctcctcttccctctctcccctcctctcccctccct

SEQ ID NO: 187656 - DNA, 587 bp, Arabidopsis thaliana
  unsure (1)..(587): unsure at all n locations
cccacctctaattccactaattagggaaactcctccccttcattcccctcccaaattcccgttccacccccgggtacgctctattaactaaattaaactcccttttncttttcctatcaaaaaacattcttcttcctttcctttctctcnaaaaaccattaaatttaattactcttttccctcttaacttcactccaaaaaaaaaaacttagcgtctttttcttcccttttattttttaaaagggggggggagntcttttcccncangggaaaaatttttataaaaaaaactcccccacaaattncttttttttttttcccttaccttccccttcntcttccctcncccttttctcattcaaaaaacaccacaacccctcactttctttaccttccctccctcctccttacaaccccttctttctctccaatccttcccccattctccacaacaaccaaacacaaccccacattttttcacaaaccctcccctccttccccccacacttttccccacaccttccacntccactttttactaccatctcccaccccccctctctctatctactatataacaccccctc

SEQ ID NO: 187657 - DNA, 249 bp, Arabidopsis thaliana
  unsure (1)..(249): unsure at all n locations
atccccacaaaatccaagcgccttttnattcccccntgntttttcccttatnttcacaattaacattaaaaaaccaacctccccaaaccatttggaaaaggcctttattggagataatcttttaatcaacaaaaaaaatatacttttccattctaccaaatatttgcgcccaacatccttaaaaattttcccaagaagaaagtttctaaacccccccccacaatcccccaaaatcctnaaaccccctac

SEQ ID NO: 187658 - DNA, 561 bp, Arabidopsis thaliana columbia
  unsure (1)..(561): unsure at all n locations
cccccccgccccctttcccccccccccccatttccccctctctccccccccatatgcgcaaccccgcccccttctttcccccctcctttttccctttctccctttgttttatctcctaaacaaaatatnccccccccccccccccttcttncccccttcttttccccctccctccccccccncttccccccccccccccccttcctcttttcttcctctctccccccccttccttcttctttctcccccccctttttctttcctcgtgttggcccccccccnccctctcccctctaaaacataaaaccccccccccttcccctccccntcctccccccccccctccctccctccccttcctctcccctcccccctctccccttcccccctccctccccccttcccccccccccccctcccctccctcccccccccttctccctccccctctcctcccctcttttccccctccccctctcccctcctcttcctctttttcccctccccccctcccctcctcctccttcctctcttctctctccccctctctcccctcccccc

SEQ ID NO: 187659 - DNA, 566 bp, Arabidopsis thaliana columbia
  unsure (1)..(566): unsure at all n locations
cccctcccccccccccccccccccccccctattcccccctcttccccccccttttccgccaggcggcccccccctcccccccccctttctccctttccccccgggtttagttttttaataaacccccnccctcctcttttcttccctccttccccccccccccccttcccccccccccccccttctttttccttccctctccccccccctttcctccccccctctctctttcctccccctccttttttttcccgttgtattgtncccccccccctgcccnccttaaacacaaaaccccccctcccctccccccttccctctccccctctccttcccccccctttctcctcccccctcccttttctctcccccccccccccctcccctctccccccctctcccctctctccttcccccccctctcttgtctcctccccttcctttctctctccccccccccccctcccctcctctccccccctcccccctccctccttctccctctccccctccccccccccttttctcccctctcctccttctcctccccttccctcccccctccc

SEQ ID NO: 187660 - DNA, 668 bp, Arabidopsis thaliana columbia
  unsure (1)..(668): unsure at all n locations
ccccccccccctcccccccccccccttttcccccctctccccctccctcattttcccggagtccttccccctccctccccccccccatttccccctttccccccctgggttgcgctccttttacacccaccttctcccctccctttttttttccttctttccaccccccccccccttccccctcccccacccccccacacccccccttttctcttttctccccccccccttcctctcccccccctttctccccccccccccncccccccccacctttttttttctggggttgtttgcccccccccccccccgcccgggntcccaacaaacaaaaactttccccccctctcncccctctccccccctccccctccccctctccccccnccccctccctcccccctctccccctctctcccccctcccctctccccccctcccccccccctccccccccctccctctcctccccctcctctccctccccccccccccctcctcctccctccccctctcccgtctccctttccctccctcccccccttcctcccccccctccccctcncctccccctcctctccccctccccccgccccccccccgcccccccctcccttccccctctctcctcccccctcttccccttccccccctcccctcccccctcc

SEQ ID NO: 187661 - DNA, 501 bp, Arabidopsis thaliana
  unsure (1)..(501): unsure at all n locations
ccctcccccctacctaaccttgatcctcttaacgccgcccttttttttttttaattntaaaaatataaccacccttttcttttgcctctttaaaaaggtttcacccccttaaacccgtttatagaaaacattgacataaactttttttcttttttcacaancccatttttaacaaaagtagaagacaaaaaaccctttgttctcaaaatattcccctctccacaaccaccccttatccttttccttcataaattcccccagttttaaaaacccacagcttcaacataaccaacctttatacctaaataaaaagtcaccctcaagtaaaattcctcaacccctcaatcccaaaatcccaaattcaaaacaacaacaactcccaaaaaatcaaacctttcctctccctcccttcctttccttctcaccaaacttgttaaataaaattaaatttcaaaaacccctttttcaaaaaccccaaacccccccaaacccccaataatt

SEQ ID NO: 187662 - DNA, 449 bp, Arabidopsis thaliana
  unsure (1)..(449): unsure at all n locations
attccccnctccncttcccccccccccaaacaccaaatttcttttattttttttntctttcccctaaacccccaaaattttttcttacaaaaaccaaaatttctaagctcttttccaagccgctttgtcccaaaaatcttcgcctttctcaaccacaataaccccccctcccccctttttttcttaaaaaaaaattttccctttttgcccttcccccccaccccttaaatctttcttttcttaaaaaaaccctctcccggatttttctttttcccggctccccccccttctttttattaccggctcaccctcttttctttgcggtataaacctcttcttttttcgaaattcccccccttttttaaaaccccccccctttcccacccccanagcccctttaaaagccccctccttactaatacacctttcaaaccccttttttttccccc

SEQ ID NO: 187663 - DNA, 652 bp, Arabidopsis thaliana columbia
  unsure (1)..(652): unsure at all n locations
ccccccccccccncccccccccccgggggaataataacccccttccttccccccccattttgggggaacgcccccccccctccctctcccccctcccacttttccccttttcccccccggggttcgtttctctaaccaaacaccccctcttcctttttccccaatccctcccttcccacacccaccctccccctttttccccccctcttctcccacctttccccccctttcccacactcttttcttttccctcccccccccccctccctccccaccccccctcttctccccgggggggtgcgcccccccccccgccggccccccccacaaaaaacacaccctctcccccgccttcttccccttccttctccgccccccgccnctccctccccccccccccccccctctccccacccccccccttgcccactcccctccccccccctcccccccccccccccccccccccctcccccccccctccctccccccccctcttccccacccccctccctctcctccctctcccccccctcctcttctcctgccttccccccctctgccccccctcttcgtcatctcaccccttcccccccccccctctcctcctcctccccccccctccccccccccccccccccctacacttcct

SEQ ID NO: 187664 - DNA, 448 bp, Arabidopsis thaliana
ttatacttaccctccctctactatcttacccgcctcttaaaattttcttttcttattctttcaaaaaaaaaaacccttttttcaaactacatttaataacctaatttattctcaatttgtttcctacccccaaaaaaaccccacttttcccccaaataaaaagtgttttattaacccccccaacctaaaacccctttctttttcttgataaaaaaaaaaaacccctcgttcccctttcctaaagccctttaaaaatccacccttcccataaatacacttaatatatcgctcttcaaacatttctttttttctcatctttccttttcccccctttttctcacccccatatccctctattttgattccctcctccacacccttaacacaaaccctcccctctaccccctcccttttccgggcccaattttataatttaacaaccctcccc

SEQ ID NO: 187665 - DNA, 696 bp, Arabidopsis thaliana
  unsure (1)..(696): unsure at all n locations
cccccccccgcccccccccggggggggaggaatttcccggggtaacgaaccccccatgaattanaagnggaaaagaacccggcccccctcccaaggaccccgnncccaaatttccccgtttcccacccccggggcttaggagtccttataaactaaaatttntacacccccccntaattcttcctccttcctcccacccacaatnnccccacccctaatcttccccccacccacccattttaaacccccctctccccccccaaaaaaacacaaaaccccaaccgaanttttttccttcccttttccccctccccccctttcttttttttgctatagtttgggcccncccccccagggggcttttttctcacagccagtgaaattccccccaaactcccaccctccctgcgcggcgcccccccccttattttaaatatgacccccccccccccctttacccaatacaaccctcttacaccttgacacccggtctttccnccctctcttctcccaaacaatatacaaaaccccccctcttctgccacaacacccctcctccgctccccctttctttcccccccgcccacaaaacacgcgcggcccccccgcccctcctcctcccgtatgcttttcattttctttcccccccaaccctctccccccgcccacgcggcctctatcacagccgccctcttt

SEQ ID NO: 187666 - DNA, 295 bp, Arabidopsis thaliana
caaaaaacctttttttcctttttataaaagggggggcccctccggtccttctcacaacaccgagggctaaattcctccgctcgggcggcgtcaacaacacagaatcttcgtgaggagagcgcccgtccacctccacccacaaaggaagggggcgaccacgctcaggaacatacatccaaaaaaccaccatttctctcttctctgttggtgcgtcggggggggcgctattctcaaaccagacacacaccacacaaaggagtggagtgcgccccctacccgcttttatcctcttccc

SEQ ID NO: 187667 - DNA, 322 bp, Arabidopsis thaliana
  unsure (1)..(322): unsure at all n locations
accccccacctccaacggagagaacaaccgcagaaacagacnaccgcaccaccctttcccccgagggggggaggggggcacaacacaaaacaggagggacaaccagagacaggagaggccggcgcaagcgacgagcggagaaccacaccacacacacagacgacgcanaaacggggaccgcagagacggacagcgcgagaccgcccgcacagcacgagacgatctcctgcccgcggggggggggacccacccacaacgggaggcagcacaaaaaacgcacgaacagcgcagagacgggcaccgccgcgcaacccagccaagg

SEQ ID NO: 187668 - DNA, 575 bp, Arabidopsis thaliana columbia
  unsure (1)..(575): unsure at all n locations
actcccccccccccccccccccccatatccccctttatcccctcatttcccaaggttctcccctcctttaccccccccaaattcccctttcccccttggttagggtttttaaataaaaaacccncccttttttcnccccnaaacctccttctcccctttctttttcccccccccctccttcccttttaacaactctccccacactttctccaccccccccccccccccacctctccccctttctctttggggatgttggcgcnccnccccccgggncccccaaaaaaaaaaattctcaccctcccccctcccccctcctccctccccccccncccctcccctccccccccctccccccccccccttttcttttccccctcccccttcctcccccctcccctcttccttcccctcccccccttcccctccctctctccccccctccttctttctctctcccccctccccccctccttccctttcctcctttctctttcctctccctctttctcttccccccccccctcccctccctcttcttctctcctttccccctccttctctcctccccctct

SEQ ID NO: 187669 - DNA, 521 bp, Arabidopsis thaliana columbia
  unsure (1)..(521): unsure at all n locations
cccccccccccccccccccccccccccccccctccccccccccncccccnnccccccccccccactcttttaaacccccccccccttttcgngccccccccccccccctcttttcccccccccctttccccctttcncccccccgttttctttccccccaccaccctccntccccccccccccccccctccccccccccccccctccccccccccccccccccccccccccccccctcccccccccccccctccccccctcccctcccccccccccccccccctccccccccccctctttttttttttccccccgttttccccccccctctccccctcgncccccacacacaaccctttcctccctctccccccccctctttccccccctccctccctccctccctcccctcccccttcctcctttccctcctcttcccccccccttcccctcttcccctttttcctctcctcctctctccccctcccttcccccctctccctttctctcctccctccctc

SEQ ID NO: 187670 - DNA, 655 bp, Arabidopsis thaliana
  unsure (1)..(655): unsure at all n locations
ccccccccccccgccccctcccccccccccccccccccnccccccccnnnnnnnnnnnnnnnnngggggggggggtgctaaatatgggagactctttctnccggcttttcttnngcggggnccctccccccccctccctttgaagctctcccaaatttncccnnctccccactccttttnntcttcttgtttttaagccgcccccgccaaatattaaaaaccaccnnnnttnntataaaaccccctctttgcccccctcctttggaaaaagggccccctcccccccccccccttttttccaccccccccccccttcctccctttttttccccccccttaccctccccccttcccccccccccactttctttccaaaattctcttctttccctcttttttccacatttttttttaagagaggccgcctgtctttctttttttttttctcccccccgctttaaaccccacccacatttttcttcgcccttcttttttccccccttccttccccccccctcttcctcccaaccccccccctctctccccacaccccctcccccacccccttttcctccccaaaccctcttttctcccccacccaccaaccccctcccctcccccccctttctctcccacactcttcccccccccccct

SEQ ID NO: 187671 - DNA, 602 bp, Arabidopsis thaliana columbia
  unsure (1)..(602): unsure at all n locations
ccccccccccccccccccccccccccccccttccccccccccccccccnncnncngcccggcggggcactccttttaccccccatctccccctgccccgccgccccccccccccccctccccccccccccccccttcccccttccctccccccgcttctccttttttccccaccccccccnncccnnccccccccccccccccccccnnccccccccccccttctccccccccccctcctcccctcctccntcccccccntcccccccccctccccccctccccctcccctcctccctcttccctccctccccccccctcccccccccccncccccccccttttttttcccccccgccgccctcccccccccccctccccctccctcccccccccccccaccacccccccctccctccctccccctcccccccccccccctcccccccctccctctcctctccccccctcccccccccccctcctccctctctccccctcctcctccccccccccgccctccccccccctccctccccccccctcccccccctccccgccccccctccccccccctctcctcccccccctcccccccccccc

SEQ ID NO: 187672 - DNA, 657 bp, Arabidopsis thaliana
  unsure (1)..(657): unsure at all n locations
ccccccccccccaaaactactaataacaaaaaaaaaccccctactcactttttttcaacccaaattaaataataaataactatcatactcctatactctaacttcaacaccctccctatatttactccccccccccttttgttgtaaaaatatttcctcaaaaaaacaaaaaaaacaaccccttcncccttctttcctctcttactcattaacaacatcnccaaatctcacgtctaacttccctctccataatgcatcgcacctaataatttatttatacaacttaatctcactacataaaccaattctcacaaactacaaaacacctctacatacacacaatcccacaatatctacatgcctaatctaaaacacttacacaaacccaacaacaacatttcttattattcaaaaacaatatctgttatttcttaaaatttatctaaatcatattttttttcttaaaaataaaaaaaaaaaaatcttctgccctcctcttgtctcctccccccttctctctcttcctctcctacattttctcttctacataaacaaattcccaccatacactctccactaacaataaatacataccaacactaactcatcaactaaaaacaaacctataccacacactatatatccatatacaatcaa

SEQ ID NO: 187673 - DNA, 477 bp, Arabidopsis thaliana columbia
  unsure (1)..(477): unsure at all n locations
ccccccccccgccccccctcccccctcccccccccnncnggnnaaaacanaaaagaacctatttagacacctcttccgttgggggggaaccccccccccccttcccccccgccccttctcctttccccctccgtcgaggggcccncaacaaacccncccttccccccccccccnnctccccccctcctcccccccctttttttcccccccccctttccccccccgcccccccccccccccccccctcccccccccccccccccaccccccccccccctttttttttcgccttgtttgcccccctccccccggcgcccccccacctaccccccccccccccccttcccccccccctcccccccctcttccccccctctctcccccgccccccccccccccccccccccctccccccccccctcccccccctccccccccccccctcccccccccctcccccccccctccccccccccc

SEQ ID NO: 187674 - DNA, 577 bp, Arabidopsis thaliana columbia
  unsure (1)..(577): unsure at all n locations
cccccccccccccccccccccttccccccccccnnnncncccccccncnccccnnnggggggggggggcctcgttttgacaccttcttcccccttggggncccccccccccccccccccccctaccccccccccccctccccccttccccccctccgtttttttttttttccaccccaccaccccttcctccttctttttcccccccccctccctccccccccttcttccccccccccccccccccccccccccccccccctccccccccctctcccctttctcccccccccccccccccccccccccccccccccccccggccccnnccccccttccctctctctcccccgccgtggccccccccccccctcccccccctcccctcccaaaccacccccaccccccccccccctccctcccccccccccccggccccccccctccccccccccccccccccccccccctccccctccccccccccccccccccctccccctcccccccccctcctccccccccccccccccccccttctccctccccccccctccccccccccccccccccccccc

SEQ ID NO: 187675 - DNA, 669 bp, Arabidopsis thaliana columbia
  unsure (1)..(669): unsure at all n locations
ccccccccccccccccccccctccccctccccccntcccccncgcccccccccnnnnnnnnnnnnnnnggggggggggggggtacctcattttaggaacacctttcttaccaaactttcttnnngngnnnncacttccccccccctctcctttaaccctttnntttccctttttaaaacccttcccccccccccaagatttaagttctttacctattttttaanagaaaaattcggccncttttttcctttatttttttttcccccccaaaaattttttctttcacccctttttttnccaaaaactttctttcccccttgaattttcttcttttttcttttttataagcttttttcccttcttttaccacccccctttttttttttccccccccccccaaanccttctttttccttttttggggggttttaaacaccccccttttcttttttggatcttttttttacaaattaaatattttccccaaaaacttttttttttccccccggccccgccccttttttttaacttccccccgtggctttttttaaacccttttaccacacccctctcttttttttttaaaccccctttccccccccctctttaagactttttaacccttttccccctcgtttttttttttttttttccccccctttttaaaca

SEQ ID NO: 187676 - DNA, 744 bp, Arabidopsis thaliana
  unsure (1)..(744): unsure at all n locations
cccccccacccccacgccgcacccgaacaccaaacggcgaaccggaccaccccacccgcccccccaccgacaaaccaacaagcggaaaggaaacctcnagaaacagaaaaagccccccccccacccctcaccgccggaacgagaaagaccccacaacaccacccggcgcaccacccgccaacgagaacaccacatttctagcacaacccgaagcaggaaacagcgccccccaaaacaaaaaacacccgggaaccccccccaaccccacagcaccgaaccgcccacacccgacacacgcacacaccccgccagcccacagcaaccccaccaccccgtcaccccgccccagacagcccacgcacgccccacacaccacccacaccccggacgaaaccaccgccgccaccacaacacaacgcacaaagcaccagaacctctttcttatagctcgaacgggggaggcgggccaccacaacccaccgaacagaccaccccgaccccagccacacacacacactccaccaccacccccgcgcaccacccgcggaccagcacgccacgcacagccacccaccccaccgaaccgcacaccccgcaaagacgacaaccaaaagcaacagaccagccgcaccccgccgaccgaccacacagagacagcaccacccacacgacccacccccgccaccgccccccacacacaagacccaccacaacacacaccccacaccaccccgccgacaccac

SEQ ID NO: 187677 - DNA, 621 bp, Arabidopsis thaliana
  unsure (1)..(621): unsure at all n locations
aaaaaaaaaaaacacaaccccccccccccccacacacacccacaccttttttcncncgcggggaaagcggccctaaataatatcccccccccnncccccctctcnnncccccctccctcttttcttttttccaaactcccccccccctctttccttttttaaaaaaacccccctctcttaaaagcctcacaccccatctctctcttctacaaaaaaaatccctcctttnctccgggtcgtagcgcccaccccaacagcgggcncccataaattgattttaacccccacacttcctctccccccccccctcctcccttttccncacccttccncaccccccctctcctctctttcccccccacccacccccaccttccctccacccccacaccttcccccacccctctacaccacaatcccctcctcctttttctccccctcccccacaattccctccctctatacccacaacaacccctcccctcttctcctctctctctcccaccacccccccccacccccctcccccccacccaaatttccttatacactcttatctctcttcactttcaaccccaatctctccttccccacccacataccctttccctcaccccccca

SEQ ID NO: 187678 - DNA, 548 bp, Arabidopsis thaliana columbia
  unsure (1)..(548): unsure at all n locations
cccccccccccccccccccccccncccnccncccncnnnnnnnnnnnnnnngggggggggggccactaattttgaacccattcttccccctctnnnngnnnnaccgcccccccccccccggccccccntcccctcttacctttcccccccctttgttttttttttttttccaccccacctttcccccccccncctttttttttcccccttcccccccccccctacacccccccccccctcctctcccccacacccccccccncccnccccccccccccgggcccctctcccccctttccntccccctccccccccctcttttcttccaccgggcctgttctccgncccccccnggcccgggcccccccaccccccacccacacannnnccccccccnccccccctccctcctcctccccccctctcccccccccccccccccctcctcccccccccctcccccccccccccccccccccngccccccccccccccccccccctccccctcctctcccccccctccccccttcccccccccccgccccc

SEQ ID NO: 187679 - DNA, 560 bp, Arabidopsis thaliana columbia
  unsure (1)..(560): unsure at all n locations
ccccccccccccgccccccccccccccccncccccnccccnncccnnnncggggaagggggggggggcaccttattttgngccaagttcttccccctccgggggggnacccggccccccccctcggccccccnnccccccccccctctcccccccccccgcttaagggcccatcaaaaccaaaacaannnccnctctcccacccccccccccccccccacacccacttccccccccctcttccctcccccccccccccctcctcccccccccccccccaccccccccctcctttcccccccccctcccccccccccccccccacccacccccctctttctcttttggccccgcactccccccccccccccccgcccgcccctccaaaaccccaccccccccccccccgcctcccccccccccccccccccctcccccccccccccccctccccacccccccccccctctccctcccccccctctccctccccccccccctcccccccctccnctctccctcctcctttccccctccccccccccccccccccctcccccc

SEQ ID NO: 187680 - DNA, 594 bp, Arabidopsis thaliana columbia
  unsure (1)..(594): unsure at all n locations
cccccctcacctcccccccccccccccccccccccccccccccacnnnnngnngnngcgggggggggggacctcatttaggaaccccttcttcccattcttngggccggcccccccccccccccctaccctccccttcctcttccccctttcctccccccgcctttaattctttctctcactccaaaacccccctcccttccccctctttcaaaaccccttttttccccctctcccaactttcccctttttctttttccccacccttccttcttctccccttcccccccccccccccccttttttttccccccccccccccccccccctcaacctcttttttttttttccccccggcggtgtcccccctttttcttccccccctcccnccccaaaacaacaacaattcccccttctccccgccccccctcccctcccctctcccctcttcggttcttcccccccccctctttctctccccctccctctcccgcccccccccccctccccctctctccctctcccctccccccctctccctcctcccccttctccccccccccccctctccctctccccccccccccttcccctc

SEQ ID NO: 187681 - DNA, 582 bp, Arabidopsis thaliana columbia
  unsure (1)..(582): unsure at all n locations
ccccccccgagcccccgcgccccacacaacncctccccccccccncccncccctcccccccccccccccccccccccccttnccccctccctctttccctccccctcccccccccgcccccccccncccccccccnctcccccccccccccccccccccccctcccccccccccatttgattcccccccccccgggggcggcccccacngccatcctacccccaaaccccccccctcccccncncccccccctcccccccccccccccccncnnccccccccctctccccccccccccccgccccccccccccccccgccccctccctcctcccccccgncccccgccccccccccccccccccccccccccccccccccccctcntcctcccccccctccccctcccccccccccccccccccccccccccctccccccccgctcgccccccctcctcccccgttccccccgcccccccccctncccccccctncccctcccccccccctccccctcccttttcccgccccccccccccccccctcccccccccccccccctcccctcccccccccccccg

SEQ ID NO: 187682 - DNA, 687 bp, Arabidopsis thaliana columbia
  unsure (1)..(687): unsure at all n locations
cccccccccccccccccccccccccctcccccccccccccccccnncnngcggccccccgggggactcctttggaaaccccatctcccccctcngggggggggggccccccccccccccccctttctngggccccccccgccccccccttcccccaccccttttccccnccccncccgatagttctctccgtgtgtccctcctccccaccccacaaccannnnncncnnccccccnccctnnccccncnnncncnnccccccccctcccccccttcccccccccccccccccccccccccncccccccccccccncccccccnnccccccccctcaacccctccccccctccccctcccccccccccccccccctccccccccccccccccttcccccccccccccccccctctttttttttcngcgccctgttttttccaccccccccccccccccccggccgncccccacaacccaccacacctccccccccccctcnnctcctccctcccctccccccccttcccccccccccccttctccccccttcttcccccctccccctcctcttcctcccccctccccctcccccccccttcccccctccccccccccctctcccccctcccccccccccccttctcctctccccccccccccgtctcccccccccctccctctccccc

SEQ ID NO: 187683 - DNA, 646 bp, Arabidopsis thaliana
tctttcttcttccccacctccctcccactcccttttttttttccctaccactttttttaacaatcctcccccacttctcccctacccccctcactcttcttttccccacgcggccacgctcctccaacacacaccctattcccccctcatttactccctgccgcaaccttattatatctcccccccatacgatcactgctttctcccactatcacctatttctccccttatcccctttttcttttatcatatctgctctccaatctttcccccgcctcgcccacctttttcggggggtgtggtgtttcagtatccctccctcttctcctttttaaaataaacctctccgtcccccgcctccttcttccttatttcctttttctccttctcgcatcatttcacatttctcttttcccatccatatctttcccccaattacctatacctctgtctttatcctccttccctcaactcacttacaacacaccatttatctcctccaaactcctcacatacacacttcaatctctaatctccagtatccttcttcctctttcattcttccctcattatcctcctttctttatccccccgtcatcttcgtttccctccccctctcccacccaaccctttttcccctcccccc

SEQ ID NO: 187684 - DNA, 562 bp, Arabidopsis thaliana
  unsure (1)..(562): unsure at all n locations
gggggcgattttttttcttttntactccccccatttttgtcctccgccgccggctggtacggccgtaagtggtggtggatggcctttttcagcgggggggggaggtaggaaaaaaattggtcccgttattttgctcggccgcgcggtatacgcttccctcccacagcggtgcacctcctcagtgcttccttgcggatgtccgcattcgtgtgtcaatcgccctggaagtgccgagcgcacgaccggttttcgcggggggttgactcccccgttgcgctattttaaaaaaaaaagagcgcggccgcgtcgtgcttttccatttttcgtccggtgaatcggcggtttcgttgggatccttcgaggtccgctttgtctggttcgttatgcccccttcgctgcaccgtagccggcttcgggtggggcgccggagacaaattccataggtccgactcctcctctctggcgggctcagttcgcgcctcgcatcttgcgggcgctcgttctgcagacgagtcgtgggtagacgcgcaaatgcgatcgataacaatggtttgtaacaccc

SEQ ID NO: 187685 - DNA, 521 bp, Arabidopsis thaliana
actcctacctccgcatcactccctccgcactccaccccctccttttttccttccccaacccaccccccccttttttcctccctactccccctctcaacctcccatcttactctccttctctcctcttcctccatccgggtaatatttaccaaaaaaatacccccctattattcctccccccttcccctttttttcctctctctcctacttacaccaccttctacacctcctcctcctccacttccccaatctcccctctttctcctgatctaatctcttcccaccctcatctccactatcctactccaatctccactctcctctcgtgggtgttatcctctccccccttctcttatttttataaaaaaaaaaaccccctctctctccttctttttttccctattctccaccccatatttcttccctcctatacctttcccctacacatcactttttcctcactgcatacatatactatccctcctatctcaccccgtgcccttttccttcctttcctcttc

SEQ ID NO: 187686 - DNA, 591 bp, Arabidopsis thaliana
caccacaaggccgactattatccgacacgaaattttttttatatcccctcgttttttcaacgccacccgcatcaaacaaaaacatcaccattacttttttctacgggggtaagggtatgtcaaaaaaaaaattcccccaatattattactcctccccgccaagttaataccatatcttactaaaacctatacatatatcatcaccaggacttatactataacactatatgaccctcattaacattatctatactcaatgaaattggcccagacttaatctaagtatcttttgggggggtgggcatacttcacacttttgttgttatattcaaaaatacttcccacttctcccctatttatctattaaacaatacgtgttaaccgcattaatctatccctgctccctatttcccccatattccatttttcacaatagaccaccatactctttagcaatcatcccccatcatgttctctatacatttatacttatctacatatctgtatagactatcttccacacactctttcttttaccacacacatccatcgctcttcagatcaattgtcattaatactcgttatattgta

SEQ ID NO: 187687 - DNA, 570 bp, Arabidopsis thaliana
agtgcgggataacttccgacttcaattttggcgacgccggtgagctctaagattctagaggtcccaaaaagcccctcgagatagtggttgcatatgtaggctaacatttatcatcccacattacagagcgagagatacgccttttacgccgccggggtagatccgtagttaaaacgtctgcgggtgtggctcccggttttatcgacccgcggcgtctcctcgatatgtgcccccggcccttcgggctatgcctatgggcacacgggtcgtgacgtgacggccatgttcggctttttaagcttatctgtgttctctcacccgtcagaggctctcgcatgcactgccgatcctgttcttcgggggtgtgtgccttcgatattgcgcagggttgccggagtgatatgtcacatcagcacgacggggtcggcgtggctacgcgcgcacttagtcgcgataatggacgaccccaggggctgccgaggagatcaatacgacccatctcctggagtacccgtggggccctgcctgtgctgttttatccgcgtgtgctctgttctacagtcgcgcggc

SEQ ID NO: 187688 - DNA, 402 bp, Arabidopsis thaliana
cgctcccgtgtccgattctttttttcccctgtgccctctgggtttttcagtgcggccccacgtttctactaagttacgggccgtatatctccacattttagcccggggggagggctcctcctcaacaatgctgcccgagtattttgggtccgggttcgtttaattcccgctctcctgagagatcacctcccacctcctggcctcctttggtaccggtaatggccgctttcacgtatactatccccgcctgggtgtgtctgggtgacatctatagatatatttccccggggggtgggtccctccccttctcgcgtatccttacacaaaaaacctcccggcctcctctcttttttctcttacctcctcccgtggtttttgccgtgtaccttctcggcgcctcgt

SEQ ID NO: 187689 - DNA, 559 bp, Arabidopsis thaliana
tttttttcacattcatttcccacctttattttcaacacctcccgcccttttttcttttttcttccttactcccactttcttctcaccccaaaccactctccccaacacaactcctccttctccctcctccataccttttttaacatcttgggtggttaattcttcccccaaaataacaactctccctcccattcttcttctttcactactctttctttactttctttcttatcttcaccctttctttctatcttcacattaccctctttccttcccttactttcttccacctcttcctttctcacactcctctctcttactcatacaactcatatccccttccaactactattactccacacttttattcccggggtggtccccaacacaccaccttctaccacacctctctctctactaactatatcttacattcctctcttttacattatccctatctcttcttttctattacctttctttaattctactctctctactatttctctcatcttttatctctctttccttctctctcttcctcttttcccttctctta

SEQ ID NO: 187690 - DNA, 569 bp, Arabidopsis thaliana
cacacagacaattcccgaatcccccaatttttttttttttccccccactttttcacctacccccccactttcacccccaataccctcccattaccctctttcccccccgggtgtaagggtcttctccaaaaaatactatcctcccatctttcctactcctttatccatcaattattctcctctccccaaccctcccctcgcctatcatcctccctccctctcccattgtccccgtatgccaccctttaccacatacctttactctacctcctacatcccacctcatcctacctcacactatttttttcccgggcggtggtgctatccctccctcccccttcatctccccttaaaaaaaaacacccccacctcttctcccattattccattttatactcccgcatttatcccccacttccttcccctactctccttccatccacccctatacataacttccatctctttcccctacctctctactactccatccccaactctcctccctctacatacaccaccccacctcccatatcctactttcaaatacatcctcactacctacccat

SEQ ID NO: 187691 - DNA, 461 bp, Arabidopsis thaliana
ttttttttttttttaggggggaaaactgatattcaatttcttataaagagtgaacctctcccccgggaaaaaatgaattaccattttttctccctttggatttaccgggggaatgtgcccttttttctaccccaaaaggggtgggggtccatccgttttttgaatgaatccaaaaaactcccgaatttttttactcgggaaaagcttttttcctttgggggaaaaataaccccccattaattaacccccccctttttctctaaagggtcccttgggaaaaaaagaaaccctcccaaaacctcccattaaaatttcttttaaaaaccacttaaccccgaaaaaagggtgtttaattatccgccccaaactctactggggttcctcccttaggcttaaaccccaacctcccgagctttttcataaaaccacacggggaaaatccccctatgtgttgccccccc

SEQ ID NO: 187692 - DNA, 415 bp, Arabidopsis thaliana
acaactcaccccgcacacgtctgcgcatctttttttttttttttttcctcgccaccatttctactatctcaccaacgcgcccacaccttctccgccgatcactcctctactcctatcacccttttctctaccgggtgctagagagttcctctaaccacaaaactatatcccccaacctaattaccccctcccaactcccttttaatacaccacctttctttcccagcttatcctttccacctcctcaacctcaactcatcctcccatttcataatcaatcctcttcaataatcccttctacttcatttcctcaacccacaccacatttttcttactcggtggttttcccattcccttccctcttctttctttaataaaaacaaaatcactcccccccacactcccccccaattat

SEQ ID NO: 187693 - DNA, 456 bp, Arabidopsis thaliana
  unsure (1)..(456): unsure at all n locations
tctccctctctcccctaccgcccccccccaccccgcccacgaaatatctttttgagccccctccccttttacgcgggcacgcccccccccttcccccccgccccccccccccctttttcccccgggggtaggggtcttcaaaacaaaacccccccccgccccgcggttttcctttttctctgcctcttacctccactccacactcctcgtgttctctcgctctttccccgcctttcatcgctcctaactgcgcctcctcacccccctcccttcacccccccgccccccccgccnccctttttctcgggtggtgtttcgccccccnaacccacgcccttcccctataaaaatatattcgtcctcacccttctctctctcccctccctccctcatcttctctcccccttcctcccttccctctcctctttactctcctttttctacttttccttctat

SEQ ID NO: 187694 - DNA, 721 bp, Arabidopsis thaliana columbia
  unsure (1)..(721): unsure at all n locations
tttttctctttttctccctttcccccccagctccacccccccccaccanccaccttagttttattttatcccttctgcccctttttccccaccaccacccccccccccccccccccccccaccccccccccccncacnactttttccncnccccagattttacccccccccctataccacacttccctctccctcttctctttcttttntcctcctcttcccctccctctctttcctcttctttctcctttcctcccctttcctcttctctctttttcttatctttttctctcttccctcttctccctcttttttttctccttcctctttcgtctccccncccccccttttttttttctcgtttgtttttcccaacccccacccctcctgccccccccctctacatatattctctctctcccccctctctctctcccccttctcctctccctccttctttttctctcttcttttctccttcttcccccctctctttctttgtgttctatttcctcttttcttcttctttcttttctctcttttctccccccctcccttttcccctcttttctttctcccctttctctctttcttttttcttcttcactctcttctttcccctttctctctctttcccctttcttctcttcctttcctcttcacctctctctttctctcctctcttctttcccccttctctttctcttcttttcctcccctt

SEQ ID NO: 187695 - DNA, 165 bp, Arabidopsis thaliana
  unsure (1)..(165): unsure at all n locations
tctccaaaaacaaaatataccccccactacatactcgctcccctcttttcctcatttatatatcccaaccccgtcccatctggtgcatctccatatccctcctcagtcgcncctcacgaaaccgttatcccctgctttaacatattcataatctctcctactaaa

SEQ ID NO: 187696 - DNA, 492 bp, Arabidopsis thaliana
atatatgtccctccacgacacactcaagcatggagccgaaacctcacagctcagataataattaacccgttaatagccaacctatacaaccatcacgtcatatcgggggcccaccgtctttctgaacccacggtacgacgccgctagaacaagccgtctgaacgcaataaacctctccaataagcaggcgtactgtaacccccacggcgcccacaaaagttctctatccgagactttcgacgttagtgtcgcgtcctccgtgggtcttggggagggcgctccgctcgggccgcgggggcgttgagtatcccttgcgcgtaggcgctctcgtcgtcgaaaacatagtgtgtcggtgcggatcgaaatgcctcataattatcgtatagctgcttgacgggggtctattcgcgggagattctttaccggcttggcatccgatctcgttcgcacctctgacacttgcgcattcagaccattgaaccaccggcccgc

SEQ ID NO: 187697 - DNA, 515 bp, Arabidopsis thaliana
  unsure (1)..(515): unsure at all n locations
tttctttcctcgctgctgtcgtcttttccccttcgttggcccccggcttttttttttttcttttccccccttttttccgcgccgaggcccccccctcgcgggcgccgcgccctcctcnccttttttttcnggggggtttgggtccgacaaaactcaccccccgcgcccgctgtcttcccccttctcccactcgtcgctcgccctcccttgtcgcccctccctctgcggcctcctcctcgccctctttctccccccctctttctccttctcctgcgtttcagcccatttcccgtagcgcgtgatccgcttttttttggggggggggcgccacccctcccgccgctgtctctataaaaaatattcctttctttctccttcctcccgttctctctttcctcctctctctcgtccgtctcccctgccggctcgtccctcccgcgtccgctgcgtgcgtttgcgtgctctctctgtctcgtctctcttctccttctttcccttccccctggcgcttcctc

SEQ ID NO: 187698 - DNA, 149 bp, Arabidopsis thaliana
ttcggtcacagcgcgcggtgtccacgttatcccctttagacttctttctttgctgctcgtcgctgtggtgctgacgccaaccctggcccaccatatttttcgcgcggggggggcgctatctctcctcctctacattattatacaaaaaa

SEQ ID NO: 187699 - DNA, 615 bp, Arabidopsis thaliana
  unsure (1)..(615): unsure at all n locations
ccccggcgcggcggccgcccgagcgcgcccccaccacattttccacgcgggggggtatggggtgcnccacaaccaaaactcnctccccccacaccgcgctcgcgtattgcggtcgtcgccgcgctctccccgccccccgcggcgccgccgctcgcgcgcgccgcccggccgccgctccagcgccggcgcggccccggccgccggccgccgcgtgcgcggggcgagctcgcgccggccgaaccttcttttttggggtgtgggcgcccgcccacaacccgcccgccccggcctaaaaaacacaagccgcgtcccgccgtcgcgccatccccgcggcccggtggccgccgcgccgccgcgccgtctcgccggctgccacccgcggcccccgtgggcgcccgcgcgtcgcccgccctctcgccgtaccgcgcgcccacgcgatcgcccgcccgcgctcgctctccggcggcgcgcctcgccgcgcgcgggcgtgcggggcggggctgcgcgcgcggcgcgcggtacccccggctggcgtcggcgctgctctcacgccccccgccccgcccccgctcggcgcgagcgcggtccactgccgtctgctgcccgcctccgcga

SEQ ID NO: 187700 - DNA, 656 bp, Arabidopsis thaliana
aaccttcgggccaacgcccccttttaaccgcttctccgaccccttttttcttttccccacccctacctttcccctacctctatcccaacacacgacatgccccaacctcccccccccaccccccttttacctttctagtgggttacgtctccccaaaaaaaaatacttgaactcactctttctgttaattttttctaattaccccccacctatcctttcttcacccctacttctatatatcaccccgcctcataccacaaccccccttctctcccacccccccgcccctctcacctcctttcacgctcaaccaccctctacttcacggggggggatctaacttccctcctccactctcccaccgcaaaatacataaaacgtcacctctcaataccccaccccacccccccacactcgcccactcttccctctcctacccccacctcccacccatcgccctcttccctcctcacaccaccctttccaatcttactctcgcctctctccacccacgtagacgtttttcgtccagcccacacccatggtcgcctctttccacatacatcatcaatccatacaaactctcgccctcccacctcctccctccccttcctcacgcaacaattcacattctcacctacacactctcctaaccc

SEQ ID NO: 187701 - DNA, 512 bp, Arabidopsis thaliana
ccggagtgcgaatggtggacggggaggttttttctgtagcggcggattcaagtgaccggcgcacgcaccgcacgcagccccccccaatttgcccggggggttcgtctcaaaacaaccccgcctgtcgggagggtcatatgagtctttaaatgttgagcaatatggtcactgtagtcattacctacgggtgtgacttagtgtttatctgcgacacttatggggcagagagtatcgaggaccgatcttatagggggtggcacgaacggtcgctttctaacataaaaggcaacggcgcgtaaatcttgtgtgagtagcggtgaagtgcgacaatactatgaccccactcgtccccgctatatacgcttaacaatggcaacatggtcgcccagccatatgacgagatattgacagccgccaaagaactgacgtaagtccggcctaacccgacccgcgaacggtgagcgctccgccacgctacgacacgcagtctacatgtgtgggagagcgtagag

SEQ ID NO: 187702 - DNA, 292 bp, Arabidopsis thaliana
cctacccctatccccccctggggggggtggactttcctctccaaatcccggatctctctaaaaaaagaaaactctcccctccccttgtggtttttcttttacgcctaattcattttctatgtttgtataaacaaacagctcgcttgtccccctctatacgtgccactcatcttcatcgactcccgaatacccctgcatcagatatcttatattcgcgactgaccatcctttcctatcttacctctatatcttacgctgtctcatacatttacctgtcgcacaatttatctct

SEQ ID NO: 187703 - DNA, 553 bp, Arabidopsis thaliana
  unsure (1)..(553): unsure at all n locations
ccccttccggcccgaaacccccccccccccgccccgccgcgcccccccgccccccctttcnccccgaagtgggagggcccccaaaacaaaaaacaccccaacccctccatacagaaaagtcccgacgaccgcaacgcgacgcaccacgagaacacacagcaaccacccctcccaccagagtcagcgcagcgcaacgcaccacccaagaaccagccacgcgcgccacacacgacgacccacttttttgggggttggtggggcccnccctgtgcgggggccgcccaaaaaaaaaaaccccccccactaccacccgcccggcccgcaagcccacgccccacccacaccaatcacggaccatgaccccagccccaccacggcaccaagggacaggacgacccgaagcgactggagcgcgcaacccgcggagagcgagacccaacccggcgtagacgcgggcgtcaccacaaacgcgcgacacgcacacgcagcagaagcgggacccgcaagcggcanactcgacggccccccctcgaccaccacgctcgccagggcc

SEQ ID NO: 187704 - DNA, 231 bp, Arabidopsis thaliana
gctcggttaatataaacactggtgtgcataccaataactacaaactaatagcccccacaccccctgctactgatttattagtcgttatattcctaatttgtagcgaaactgccattagctcatggggggtagctcggatttaaatccaccacattctccccttaatataaacgttctcgccccttacatattccccctccaactaaagcaatcagcaaacaccgccacgag

SEQ ID NO: 187705 - DNA, 435 bp, Arabidopsis thaliana
acacctttttttttttatccaccacacactttccaccccaccccacccccacccccccaccctctcccttcccagcccgcacttttcccctcttggggtaacttctcccccaaaaaaacccctcactccccattgtataccgacatctcaccctctccttcccatcctcctccacttctcacctttctcctattctccctctccctacccccctatcccttcctctctcaccactaaacttaacactatacctaccttctccaacctcccgcatctttttttttcgcgtggttgccacacccatcattcttctctttcttactctacacaaaaaaatattacattcttcccgatactcttctcttactatctatcacttaccatcccattcaccaactcctctatcacttcctctctacacattatcaacctctc

SEQ ID NO: 187706 - DNA, 635 bp, Arabidopsis thaliana
tcttacatatatcctttcacgccatacactactctgcggctgcccgacaaatttttatcttctcttaacataccacactttttttctaaaccacccacctacgatccaaacgcaacccaaaccgccattttccccgggggcagggggctatccaacaaaacttaccctcataatatcaccctccgtcacctttatactctacccccatacacttaaccgtatcttccacttctcactcttatcccttatacaaataaatcactaccattcccgccccaccacacccactttctcatccatacgtttttttccggggtggggtgtccccccccatattctattttcacaaaaaaaaaatccctaccttatatattttttttcctcttctcattctccgactaccagcgtaaattcatcacctcacactaacctccccctcatcccttccttccacaattttccccctacttcctccttatctcccctcatattctcattcacacttcactactaatcctaccacataaccgtctctatctcctctactcccactcccccactccaatccctctaactttttatccaccatctatctctttttctcacactccatcatacatctcttttatcaccac

SEQ ID NO: 187707 - DNA, 607 bp, Arabidopsis thaliana columbia
  unsure (1)..(607): unsure at all n locations
ttccccccccccncncccccccccccccccccccnccccccaatcccctccttcttcccccccccccttatcgcggggcngtgccccccccctcccgcgcccccacccctttttttttttcccccccttgttcccggttccccccccccccctctttttnttttttttttttcccccccccccctccttctctctttccccncccccccccctcccccccccccctcccccccccctttcccccctttccccctcccccccccccccccccctctcncnccccctttccccgggtggtgcccccntcctctcncccccccccccacccctancccccttctccccccccccccccctcttcccttcccncnccccccccccccccctccccccccccccctctccccccnccctccttccctccctcccccccccctcccccccccccccctctctccttctctcccctcccccctcccccccccccccnttctctctctcctctccccncccttccccccctctcccccctcctccctcccccccccccctctcttccccccttccccccctcctcccccctctttcccccccccccccccctccc

SEQ ID NO: 187708 - DNA, 416 bp, Arabidopsis thaliana
  unsure (1)..(416): unsure at all n locations
ccccccccctccggagcgcgggacccaccccccccccgggcgcggcccccccccaacccgcttttcncacggggggggggaggggcgccaaacaacaaacaaccaccacgncgcgcagcgctggcacgctcccgcgcgcgcggcgcgccgctgccgccacggccgcgcccgccgcggacgcgcgcggcgcggcgaccaagcgcgcgaggggccccccggcacacgggcgccacagaatcggagcgcgcagggcggcctcttttagggtgggtgggccccacccccaccaccgcgccgcccccacaaaaaaaaaccgcgcccgccgcgggcgcaggccggcaccgcgaggcacccacgcccgccgaccgagcgcggcaagcgtcgcccacgaggcaggcgggcccgatgcgagccgc

SEQ ID NO: 187709 - DNA, 385 bp, Arabidopsis thaliana
atcatgcaccaatgcttggacagcatgtctatagttgtcccccctagtctccctccagtgcagtgatacatctgcttcgggccatcatgacctgcccgtactcggtaggggagtgacgctcagccttagggggagagcggtgttccaaaaacacggagtttgcccccagttattggattctggctatccccagtaatcgccacggcaccatgactctaaacgcttatatacccagtattaccatcttccccgtatcggaacgttcgttggttcagatctgatgtcggagagtagtggatcgttctactgtgtcggggggggcggggtgtagggtctgctcacgttacatgagatataaaaaagacataatggacactgtgcctac

SEQ ID NO: 187710 - DNA, 629 bp, Arabidopsis thaliana
  unsure (1)..(629): unsure at all n locations
tttactaacttccctccccctatccacccacatttttttttccccaaatccacccaatttttttatctcccacccccattaatattactattagccaccccaacccccccttcccaccgcgggaaccctcctcccccaacaacatattctcaccctaacttctccccccccgccctcataaaccatcctatcaacgctttcctataccctccgatcctcaccccctctttactcatcacatacatcccctttcagtcaagcactacatacccactccacttttttcctggggttttacaataccctcccttctctccttctttactaaaaaaaaatccacacctcaacacccctttcctaaatactcaatttcaatcctcaatactattattaataatttaccataacgcaacgtctatatattctcccctctctctcctgccctcacacacctaacccctatcctccttttctcattccaacacctcttattactcgttcacctctctctcctcatcccaacccgtctaccacaccnttcctatctcaccgcctactgtatctcatcccccctccatccataacacttattactctataaaacccccttccttaccccactatctcat

SEQ ID NO: 187711 - DNA, 534 bp, Arabidopsis thaliana
tttcaaccctgggtgtgaagcgtctccaaacaaaaaaaattatccccagtcaaataactacactctttccgtaataatacctctctacccctcctaactttctactaccacccttctaacatctattttccatttataccaactttaacctcctagtctccccttcatacagcccacacataattatacctaatttttatgggggggtggtcatatttctttttttcttattttatttaaaaaaaaaaagacttcttatttttcctgtattattactttattttacatcctctatattcccgcataatcattccgcccttacatttataccccactgttcgtttcttccacactttctacacatcacaatacccatactgatcccactcaactaacctcaatatatactcttatttacaaacttcacccataacttgaaactcgtagcttctataaccatacttctctcaattacattacaattactatatgtattactcctcacactccccatatttaatcttcttttttttt

SEQ ID NO: 187712 - DNA, 669 bp, Arabidopsis thaliana columbia
  unsure (1)..(669): unsure at all n locations
ttcccccccccccccccccctcccccccccccccccctatgctttcctttttctccccccccttttcccccgccccccccccccccccccgcccccccccccctcttccccttttcccgtttgtttctccttttncctattcccccccccccccccccctcccncctnctcnttcctcctctcccccccccctttctcccctcctttctccctccccctctccctccttttctctcctccttctcttctttctccccctcccccccccccccccccccccccccccccctttccttcccccccccnggcnccctttttttttttttttgtttctcccccnccnctcctccttcctcccccctttattattttttctcccttttcntttctcctctcctcttttttcttcctcccctcctcttccttcccccttttcctttttctctttcttctcccttccctcttccttccccttnccctctccccttcctcccttttccccccctctcccccctccctcctccttttccttctccttctccctccctcccctctctctcgtcctctcccccccccttcctccccttccctcctcccccctccctccctcctctccttcccttttctctccctttccctcttcctctcttttcccctccctccccctcc

SEQ ID NO: 187713 - DNA, 624 bp, Arabidopsis thaliana
ttcacgtcatgttttttctttcttcttcccccccccttcctcgtaattttattttcccccagcaccacccgccttttacattcacagccccctatcatctcccccttcctaacccccatacggctccccattatctcctgcgggggtcccttcgtgtcaccaaacatataccaccctaactatatgtcgccacccccctccgatattattccctccctctccacattccaggccttcagtggcacactccgccgttatcttctctcagtatacgtcactctacgatcgcatatttcagtcatcctattactctatctctggccactttcttacacgtgatcctagaggcttcctctctgcgcggggggtggttacttccattctccgctccacgcttttgtttccacgagtaataacgcccgccgcgcgcgcgctctgtaattatcctttatcgtgcatcaccatatattacttgactctcgtctcccgaccatccttccttcgccccttatcctaaccttacattctgactcctgtcctcacccgttggtcgcttttatcgaactgccctatcccctatgctcctaattgtgccacaaattttcatccttccagtttcagccc

SEQ ID NO: 187714 - DNA, 214 bp, Arabidopsis thaliana
gtatcgccgtcatatcaatatcgccaaatctcgtatttctatttagctaatttttaagaataggttatggtttttaaaaccacacagacattgcccgttataaattatacaagcaatgaagaataattacgccatcaacagcgaatcggagcatatatgcatccgctctccgcgtacctctctattaaccacacaatagcacgacattatgctc

SEQ ID NO: 187715 - DNA, 698 bp, Arabidopsis thaliana
gctcgcgcttgctcatcgtgtgctgtcgacgccgccccatggggctcgtcgatttttgttctccctcggccccggcggctttggtttgttggataggccgtgccgttttcccggggcagccgccggatttccgttttcgtctttggggttaggggggtccgcacaacacagggggttgcgtcccgcgttgtgtttcgcccgtctgcgcgttcatttagtgtacctcgggtacagggctctcctgtctcccggtcgtgtcgcgtactagtggccgttgtgcgccgcctgtggtgggtcccagagcgggtctggggggggtctcggcacggcgtccctcttctttctgcgggggggggtgtgcacattttctctccgtggggtcggtattcaataaaaagaaaagggcgtccgggcgctgccggtcgcctttgtctgggtgagggtccctgcgtcgtgttcttggcggcgtgttcgttcccgcttggcgccttgcattcgcctgtgcgtcgttgcgatcgcgtctcgcctcgggtgccagacgccgagtagtggcggtggttttcgtggtcagtttcctcgacgttttcgcgctgttccgcttcggtgccggatctctcggcgtccccgtgtggcattcggcggtgttctgtgcggtgtgtattggtctgacgcggttcgttatgtttcgcgcttcgcgc

SEQ ID NO: 187716 - DNA, 681 bp, Arabidopsis thaliana columbia
  unsure (1)..(681): unsure at all n locations
tttttttccctcccccctctccccccccttctccctttcctccgccccccttttttttctctcttttcccccccctctctttctcccccccctccccaccccccctcccattctttccgcccctccctccccccctccnccttttctcccccgttgttttttctctccatacatcttacccctcctccctcctccctcttcttctcctttcctccccccccttccctctctccctcccctcccctccccctcccccccctctccccccttcctccattctccctccttctcctccctcctctccctcccttccccccttcctcccttcccctcccccttttccctgttttttccaccctctcccctctctccttccctccaaaacacacctctcccctccccctccccctccctccctctttctctctcctccttcctctctttttcctctctctcctccacctcctccccccctctcctctcctctttctcccctccctccctctcctccctccttttctttctcttctcccttctctccccttcttcctcctcctctcccccactctcccctcttcccctctctctctccctccttctccctccttcctcctcccccctcccccccctcctccccccctccctctctctcctctctcctctccactctctctttcttct

SEQ ID NO: 187717 - DNA, 753 bp, Arabidopsis thaliana
tttttgttttgtatcacttatctcccattattctcctttcctcctgttctcctaccttttttctatcttattccacctctccttcattttcttcgttccctttcccctcttcctccacttcttttgcatcccctctcctcccctctaccttctttttcttcggcttgggggtttttatttttcccaaaacacatcaccctccccctctccttcttctcttcatctaccccttctccactcttccccctccctccccctctctcctatcttactctttctccctcctatctcttttcacactctcgctcttgctcatatgtgtccatttctatacatattctctctccttcccattctcacccttctccctcactcttcttctggggtgttcgtcctctccccccttattattctctgcgatctctattatatctcttattctccgttttattttcctctcttactctctctcttcttctttttctctctattttcttctttctactcctttcttattcttcttctctttccacctcatctcttttccctttctaattcacctcttattgcatcctcccactctatctctctctatctcttctttcgtgcccgttctccttcttttatcatccagcgttccaagcccattttcatttttcctttcatctctccacaatttccatcctcttcttctacctacttcttcattcttcccatttccactatcgctaacagccccaccctcctgtccac

SEQ ID NO: 187718 - DNA, 384 bp, Arabidopsis thaliana
  unsure (1)..(384): unsure at all n locations
cccgcggcgcccccgcccccccgccggttcgcaggnngggggggctggtgtggccggcccttacttggntttcgcccccctcccccctcgcgaggcttccctcctttccacccgggggggggggcgggcctataaaatccatcttcccccgcttcggttccccgcccaaagaaaatgatttcttttgtctttaaggggcgcgatttttgcgccccccggcggcgcaccagcgcacccacgccttgtgcccggcccggctcttttttcccgttcgggggggggggcccccctcctcggggggtgttttgataaaaaaaatccacaacaggttgtccgccgtgtaggcgcccccgcaggggagcgacgcctggcccccccgccccc

SEQ ID NO: 187719 - DNA, 336 bp, Arabidopsis thaliana
  unsure (1)..(336): unsure at all n locations
ccttttcaaaataacacaaacttttaacagnacctcccactcccttttttcatccctaatttctctccccaaccacaactaattttccttgggggagggaccaatctttgcaacatcaaaaaaaaaatatctttccaacctctctttttccactcccaaaaaactctctatccccccccaccattctcctcttttaccactccccctcttcaaatcctccccaaatttctccctttttaataaaaaaacaactccccacaccccctttctcatttctttaaaactaaatatcgtctttcctcacaataaattccaccccccaccttttttttttca

SEQ ID NO: 187720 - DNA, 372 bp, Arabidopsis thaliana
cgttacttgggttaccaaccccaacaaaaaggggaaaatttctcttaaacaaggggaccccctcctctttctgagggggtgaaaacaaaatcgcgggggtcccccccaaaataaaacaacccacccccctttgggtgtcttattttaatccttctaaaaccctccccgcctccggaacccctccccttctcaaggaagcccaaaaccaacctttttgtcccccttttataaaaatgcgcccccccctaaacccttcctaaaggggcccccccccccaaggcccaaaaacccccaagggggtgcccccacaaacacaaccccctttttcagaaaaaaaaccccaaaacccggccgcgcgcaacatacccccaa

SEQ ID NO: 187721 - DNA, 433 bp, Arabidopsis thaliana
  unsure (1)..(433): unsure at all n locations
cgcctgcaggtaccgggccggaatacccgggttagaccgggcgtccaaaccancgcacagcagaagaaaccagggaagaagcgagaaacccaccggagcgccaagagagaacagacaccgaggccgggcaccggtaaacccaagaagaaggccagcgaacgcacagccgaggcaccggggaagccaacggtcttctcctttccggggggggcgagcacccaagccagacaccagacagcagaaagcggacggccgaagaacacggaggggcgggagagcccagcaccagacgccggccgcaccaaaggaaagcaacccgcagggagggacaaaaaaagacgggacgcngcgcccgacccggacaaacagaagagggggaagggaagcacgccccgcacgaacaaagaaaaaggggacccaagaagccaagaaa

SEQ ID NO: 187722 - DNA, 351 bp, Arabidopsis thaliana
cccagaaaacaacctaagaaatacaccccattttcataagggtggaggggggccctaaaaaaataaatttactcttcatatcaatacttcacatttattataattttaactacagctcactaatatgtaatgatgttaaatacattgtctttttggtttatatgtaaatagatctctacaactatattagcaaatactatgaatagcacaggagcacaaattttttttttgggtgggttgtggcagcaaaagcggggggcacatcatataaaaaaaacatattacatattattatttattcttctttcttcagtaacgcgactctcacccactcacccctcttctatttat

SEQ ID NO: 187723 - DNA, 495 bp, Arabidopsis thaliana
  unsure (1)..(495): unsure at all n locations
cttgactccctgcaccctactaacttggatcctctaaacaggcgggggtgggttttttttttaattttaacccataaaaaagcgaacccttttctctagcattcaacgtttcacaatgacccaaaaacccgannaccgggcaatgggacaatgggtgggaaccgaaaataccaaaagggactgggttttaaacaataaagggggaggggttttttccaaaggggggaaccttgtagaaaaaacaacaagggggggaggggggaacccaaagcgtaaacaattccaccggaagctgggatctttaaatgaaatccaaaaagggaggaattggtgtttgggagcccgataaaactggtttaaagaattgggttttttgtttcggaaaattgcgttttctttcttttgtgggggtgttgggaaaaataacctctcctgttagttcccccaaaacatccttgtggaaaaacccacaggtggggtgtattctccccggaa

SEQ ID NO: 187724 - DNA, 563 bp, Arabidopsis thaliana
  unsure (1)..(563): unsure at all n locations
ggtggggggggggggaaaagaaatttcctattttacaaccccccccccactttttggggaaaagctacccccgnccctccccgtaacccctcccccaatttacccccggttttccctaccggggtgcgagctgccctttaaaaaaaaaaaaaaaacccttnaaacacaaattcaaaaactcttttctccttccccccttaacttcaacaaacctcccaaaacttttttacccccttaaacccccaaaaaaaaagcccatctttccccttcatctttaagcccctttaaacacccatttcacacattttcttccgggtgtggaataaatataaacccgggttccccaaaaaacacacaaccccttttattttccaacccggtggggtttccttttccctccccccctcccccttaaaaaaatcatttcccttccaaaaaacaaaatatttttttcccctttttttcttttacccaacatttttgcccccgtaaaagtgttttcttctttcttttaaactttaaaaaaaagaccccctttatctcctttgttttaagaaaaaccc

SEQ ID NO: 187725 - DNA, 377 bp, Arabidopsis thaliana
ggaaggtgtgccccctgccggtgccgggcccgaatttccgggttgagccacacggtgcgcgccacgcttccgcccacacttcggcacaccgtccaaacctgtaatggttctgtggaatttatttattaccggccaacaaaaaactggcaaaatgaaaaaggcttcccttcaacaaatctttttctaatggggattcctttttttaaatctttttttttttaaatggccatacactcattaatggatcttatgagagacgacctcctgtggttctttcttccttcaaacaggaaaagggtcttcttttaataatcagaatccacccaatgagatttttcgtgttttccggcttttataataggtctatttttttaaac

SEQ ID NO: 187726 - DNA, 526 bp, Arabidopsis thaliana
  unsure (1)..(526): unsure at all n locations
ccctccccacaaataaacacatttattccatataatcccccaactaaactcttcaattaacatcctttcactacttttctcttcttctattccttctgattcctctttcgacttttcccccnncacacacacacacttcnactcactatcccatacacacttcaacatcttaccatcatcttcacaatcacccccttctcttcttttaaaaaaggtagatgaggacacaacacaaccagcagcaccattttcaccacttcaacaaatatattactcccctccgcatctaaattatcactcccctttcttttaccctcctacctctctctcttatctattgataatatatcatactattctataactcactatactaccactctacccacacttaccatacgttcacacctccacttcaccaacaaatactaccactatcaaccgattcaattaaaatctcattctccccacccacccctctctgttcgatactcatctcatatacacactcaccatatcatacctt

SEQ ID NO: 187727 - DNA, 485 bp, Arabidopsis thaliana
  unsure (1)..(485): unsure at all n locations
acggagagcagcacacagcggccggagagagagcaacagagaagaagagagaggcctgaaaaaaaaacaaaaccccgaaacttagagagagaggcacggaacgcacgggggagcgagggaagaccgaggggcggtttaacgccacggggggaggaggccgccccaaaccaacaaagcataacacaggcccaaaaccaacaccacgaagagcaaggcgggcgagcgaccagagcgcagcccgccaccgagcacggccccgggacgnccgaaaacggaggcgcgcacagcggagcgcggggagagaggcggccgcgggacgcgaccgcttttagacacagagggaggggaaacaaaacacgccagcacacagcccgcgaacccacgcacaacacaaggtcgcacgagctcgagacgaaataagaaaaaccagagccacgcaacaggaagcaccacgcagtgagcatacacggagagaagacgagtga

SEQ ID NO: 187728 - DNA, 380 bp, Arabidopsis thaliana
gcgaactttttttttgggggggtgggggcaccacaccactcggccactcccccctaggaaaaaatatttgctttagtagtctttttcgtcgtcgtgttttgctttccgtcgacgccggtatctgtcctgcttcctttgctgcccgccctccccatccctctcttgcgacatctctgctacaccccctctctccacccaccttacactcctcaccgcattcggtacatgcagtagaatttttattccttgtgttgtgccggtctctctatttataacatcttcgtatgttacgaaatgatcgatggcagactgcttctgtttacctgtcatctaccgctcatgttcttacttctgctgtcgcatatttgtatagtcaatgt

SEQ ID NO: 187729 - DNA, 560 bp, Arabidopsis thaliana
  unsure (1)..(560): unsure at all n locations
ccccaaacccgggacccccaaagaggggttccaccggggggaggaacccccccaaaacaccaaaaaccacaacaaacggagcgaattagccacggcagagagggagaagaacacccggacagcggcgagcaggcggaagagccacccacgaaagcagcgggcaaccccagagagacccccanccagcaaacacccgggcccctttttttttggggagcggggagaaaaagggcccccgcacgcccgaaaaacaagaccgcccccacgcaaaaggcaaccgcggagccgagaggaagcagacacccccggcaagaacccacggaaagagaaaggggncaagaaccaccaagagcaccaccagacggacgcgcacgggccaccggagagccgccaccagcaaggcgcgaaccccccaacgcgcgcgcgacccagcgagagcaggagacgaacacggcgacaggagacagccccacgggaaaacgcaggaagcagcccgcgggccacgcacagagaagagcccacgcgaggagccacgcacagcagcccgcagaccccgcaca

SEQ ID NO: 187730 - DNA, 501 bp, Arabidopsis thaliana
cgcctgcggtaccgggccggaaacccgggtcgacccacgcggccagacacagcacgacaaaaccgacctgggaatgagggcaacaacaaggcgacgtgaggacccaaaggaagcatagaccgggaaagcggggaaagaaaaacagcggagaaggcacaaaagtgaagaccctgaagcagcaccggacgttcctgtttagggggggggcccaaggaggcaccacagaaagaaggaggagatgccgacaaaaaaccaccaagaaaagggaaaaagaccccaaagacaaagaagacgccacacacacgcaaagaaggaagggggacccatacggaccgggacgggggggagaagcaaagacaaggacaaagggaaaaagctgcaagggacacggaaaggggggcaacgcgcacaggagaagaacaaaacgcgccacccagagagcagagaggacacaggagccaagccaccgggggaaatacccccgagggaacgacaggcagg

SEQ ID NO: 187731 - DNA, 236 bp, Arabidopsis thaliana
tctgcacaccacccactgacgacgaccaatacccatttttttttgggggggtgacaacactaccccggacccctacgaaaaaagatagtgattagtattgattacatgtgtgcaccgcccacgtaccacaccatcacgatgatgccacctgccacacccgcactaaccactaactcttatcgcatactgaacaaaacttgtatcgagcccatgaccacactcctatacctctattc

SEQ ID NO: 187732 - DNA, 517 bp, Arabidopsis thaliana
ccccgcggaaccggaccggaaacccgggtcgaccgggcggacaaaccccaacacaggcccccgggcggccagccggcgaccgagcgagagaaacgagggcggccgacgcaaaaacgagcggcggcaggcccgccgcggaccccgggcagccccacgcgggcaagcggcaacgccggaggcggctgttcaaacagggggggggggacaggaaacgaagaaccaagcgagaacgagccgagcccggaacagcccgcggaggccacgcgccccggacccggagcggggccaggcaccaggccacacgagggaccgccccaacacaccaccaggcacacaagcgaacccacccggagggaaaaacgaagaccgcccgccacacacagaagacgaacaacgaagacaaacagcacgcacagcaacgccacagaagcaccgggagccccgacacccggcagccgaggcgaggaaagaggccaaacgaaaaaggcgccgagacaccaccaccaggggaaacgga

SEQ ID NO: 187733 - DNA, 500 bp, Arabidopsis thaliana
cccccgcaaaaacgaaggtgaggaaaaatttttacggggggggggggcaagaaaaaacactcactcccaccccgcagacagataaccatcatcatcaggagattacaggaataattgtgatacaaacctaacaacgcagacaaccgagcaggcacagaacctgcacaaaacacaaaccttttttttggggggggaaccaacccacgggcccatataaaagaaagtgcaatgaaaaaacgatccgcaaccgcttgaagtatacagaaaccgtgggaccgcatgacaaaaaagacgcgcgttataaacgtacaacgcaatagtagtgactatgagaaacagaacaagacatagccgttttacaagaaaaaaccaaaaactatataacaaaccataagaaacccaacacaaatacattagtccacagaaaattgattcaaggtatcatacggatgtcaatttaagatatagaaagtggaaaacgcacgatgagcgcacccccg

SEQ ID NO: 187734 - DNA, 345 bp, Arabidopsis thaliana
  unsure (1)..(345): unsure at all n locations
aaacaacaaacgaggaccccaacctggcccacagcacggggaagggggaccaggacaacaagtaaggacgtttttttagggggaggcacaacacaaaaccaaggccagcaaccgaagccaaggaaagcataaaaagccggcccgaacagccccacgaacacaacggggggacagaaagcngaaccaccgacgcccaaaagaccgaaggaggggaaacccccaaagcccacaaggcactcgcgcgaaggcaaaaccccaaccccaaaggggacccaccaacagagaagagggagacctggacaaggagggaaaaaccaaaaaacagggcatcccccagcgcggcca

SEQ ID NO: 187735 - DNA, 498 bp, Arabidopsis thaliana
gccgtaggctgggatccttaaaagcggctttccttgcttttttttttttttgctggagggaaaaaattttgcttttgtgaacttttggacgatgatcggcaaagacgctaagacgcgatctatggtgaaaaaataagagggggggctgaaaaagcaaaaccggttaacattaaacacggaagcaaatacattacataatataggggtgcaaaaaacaccacccaactccgagggttacgctgggttaactctcccgatcaccggaaaaacacaatctgtggcaaggattcgggctcctgggggagatgcaatttaactttcggaggtcagaaaacgacactttggttatagggtgcgctcaaggcccccccgctatggaaaaagagcgttattgttgaccgaattaaaaagcaactactgcttgtccttggagagttattcagaatatggccaaagccttgaaccaacccccaggggtaaaccaccaccctggaacat

SEQ ID NO: 187736 - DNA, 176 bp, Arabidopsis thaliana
ccccgcgcaggacccggcccggaatcccggttcacccaggcgccaaccggctggcagagcagcgaagcaaaaaggacggagtcacacgaaccgtatcttctggtggacactgcaattgataaatatgtccccgacaaggttgtggaccataccatcagcgtacttacacgagacgg

SEQ ID NO: 187737 - DNA, 487 bp, Arabidopsis thaliana
cgtagcctgggtcctttagagggggctgcccttgtttgtttgttttttttttgttttttcgttttgggaaaagggggaggggtttgcttttttgctaacgtggaatgggcaacccgattttccccgaaaaaaacaccggggacctcatccagtgcccaccgagatttttttctgtttgaaaggaaaattttttattgggggtgaaaaacaaaagagggggggtcctaaacctcgcacctataaggggcaaggcccttttgcggccaaaaataaatgggccggggctgcagggggattcttacacctttgtttttggagggggccctgggtcggggtataagccaaaagacactgtggagcccccctcgtttcaggaaaaccggggtggcccacgtttttgtttttgggctggacagctcgcggggaattatccacatttttatacccttggcaaaggggagggggccacctaaaatttataccgggt

SEQ ID NO: 187738 - DNA, 401 bp, Arabidopsis thaliana
  unsure (1)..(401): unsure at all n locations
tttttacaccaaaaccctcctttccccccataaaacccctttctcacaacaacctctcctttctctttaatccaaaaatttaaatactcttttacccctaaaaactccaataacctacttcaacattctttcaccaaaaaaggggggtcgcccccnaaaaaaagcccttccaaaaaaataaaaacccccccccttagattcatcattgctcccccccttcccccttaccaccaattttaaatttcttccgacaactccccattacctggtgcctattaaaattccaacttcccccacgaccccccaaaaaacccccctccttttttaaattcccccttcccccccaccaccaccctattatatatttcttttaaaccccttccttttctatccatatcttt

SEQ ID NO: 187739 - DNA, 577 bp, Arabidopsis thaliana
  unsure (1)..(577): unsure at all n locations
gggcgccggcgggggggggggggggattcgggggctaggcgcgccattcnngggggacggcccccccggggccgcggcggatctactcctttccccctggggtggggggggggagaaaaaaaacaaaatccttttttttccnggttgtttcccctagcggccacggcccctcaaaaaagctgagtggatgtttgttccccgccagtgtttcgcgactcccaaattttttttttttttttacaacaccaaaaccttttttttcggggggtggggccacacttgggggcggctccaaactgagtgaactcccccgcccctcccccccccagagctctcccttctgtgggggcgccccctgccctccttctcgtgtgtgtgggaaaagaatgttgcacagtgcggccctgcccgcgggcgtttttctagaggggtggggggggcgcacccaccgcggaggaagaacgggtcgcttcccccttcttctgcgtgctcggcgcagcgctccctccgtcgcgtctgctgtgtcgcgtcgccgcgtcggtggggcctagcgctcatggcctgcggccgggcctct

SEQ ID NO: 187740 - DNA, 482 bp, Arabidopsis thaliana
accacttacatatagggaaggtgtggcccctggcagtgcccggtccggatttccggtgttaacccagcgggtcggcgccaccgtcccccaccttcccccaccttccaaaatctgtaattgattgtgtcagaatattatttatattaacggaccacacaaaaaaactcttgcagaagagtgaaagaaaagcgcttccccctccacaccaaattctatttttctaagagggggaatattccctttcttttaattccctttttttttttttaaatgcgccattcactcattattgatcttatgtgagaccccctcctgtgtatcttcttttcctcgacacattaaaggggctttcttttaaattagatataccaatctgtctcttctgggttttgcttctatatggagttatcttatacacgatgtgaaaattaaactctgggtgggttgttaacatattaaatcccctttgaatccatttcatc

SEQ ID NO: 187741 - DNA, 462 bp, Arabidopsis thaliana
  unsure (1)..(462): unsure at all n locations
ggcagggacgcggccccgaagaaaaccgttggacccagcaggcgaggagcccaaangcagaaaccagggccggcccaagcgccccccacccaccgaaagccaagaggccaacaacgggacgcccaaacgacgcgcaaaggaagaacgacgaggacaaaacgagcaccagggagaggcaccggatttttttttgggggggggcaccacgcaggcaaaggcgaagcgacacaaaagagaggaacaccaacggagccaaacacaaacccaccaaaacgagccagaagagagacaccgagacaaaaaggagcccgccgagcggaaaagagacaaagcagaagagccccgcaaaaaacgggacgccaacccccagaagcccagcgcaaccacaccagacgagagaaacaagcccccacggccaaagccggacccggagagagcccccgcggcaaacagcagcaacac

SEQ ID NO: 187742 - DNA, 459 bp, Arabidopsis thaliana
  unsure (1)..(459): unsure at all n locations
caccggcaagaggaggggaaccgggggagacaagtagccgcccgccaaggagcaaccacgacccgggaacgacacgaaccgacaaagcagagagagcccgagggggcgagcgagcgggaggaaagccgaggcgagggaggcagcagaaagcagaaaggccctctttttttttgaggagaggggaagaccccagagaagagcgcacagcccacccagcaccggcgccgagaacacacgcggacacccacgcgacacggaacacaaggaggccaagcacccaggcagcggcccgaaggggacaggcaggcaaggaggccccacancgcagcaagaggcaagggagcaggaacgaaaggaggcacgagagacggcagcaccaaggacgccgaaagacggaaaggagaagcagcccacacaacggcgcgcagacagacagcagccgggagcagcggacacgaa

SEQ ID NO: 187743 - DNA, 140 bp, Arabidopsis thaliana
ctccaggaaccgggccggaatacccgggttgacccacgcgagcgcgccacagacaggaccaccacggacgacacccgagggaggagacagacgaccggggggaacaggcaggacaaagagcacaggccgagccacccacc

SEQ ID NO: 187744 - DNA, 291 bp, Arabidopsis thaliana
cctgcaggaaccggaccggaatacaccgttttcgacgcgacgaggagcagatccctaaataagcggggcccgataccgatctgcgagcgatcgaatccgtccaaataaaaaggggagaagcgaagctaagacaagcatcgcatggacggtacttctctggcccgtacgaagactaataagatggggcctggggctccagagcgagagagacagcagaggaaattttcctcctttttgggggggggggagcggggagcggcacccgagggccggagagaggggggcagcaga

SEQ ID NO: 187745 - DNA, 513 bp, Arabidopsis thaliana
cggtgcgcgcacgcatgctcccaaccccggcgacactctttttttaatacccccccgcgctttttccggagaggacgcagaaccagtggacaaccgcgccagtcttggatctgttttttgtgcggggggggggggcgcgtaaaactaaacttctgcttggacccccgcccctactcgcttgtcggcgaccctccctctattcgtcagagatctgtttccgctttcccgcgcccagcgcaccccgccgaccgagtccgttggcggaacagcgtgcctccctccactgttctcgttttttgggggggggggcactaccgccaccgcgccctcgccaacgcgcactttttttgcgcttatgctgttccactgacgggcgtacgttctccgcactccttgctgcagaacaaatgtcgctgtggatcacgtgatcgtacatccccaccatttactgtcccgttgttcttcctcccctcacttttttcgcgatggccttccggcagatcttagcccaag

SEQ ID NO: 187746 - DNA, 645 bp, Arabidopsis thaliana
  unsure (1)..(645): unsure at all n locations
gcaactatttctagctaacaaccacgacgaggaacaaaaaagaagggggctcattatatataaaaaacaccaaatttttgatgggaggggacacgaggaccgggnctagaaagtagggcgtagcaaacatttcttcatgtgaggggggggggggaccaatgaaaaaaacagcagaggccccgacacagtccgtataatattaccgcactctatgtgactcgacctatactatatataccctacccacatccaaacatagaagaaaagagaaagctatatcaccctgccacaactgtggtttacaccaaaagaagaaattttttaaaatataatgggtgtgccatattataatatctgagcgttgcgacagcgaagtcctatgctagtttcactattggtgcaacctgtacgcacgccgaccaccactgaaccgaagacttgtttgattgtttctatgctcatgtgtataattgtaacgagagcgctcatttacttatacagtctatatttcgggtcaattgagacgcaggccacagcaccgacaaccccacccgcctttcacgtttgagaatggttctctgtctctaaacccagctctacagaccataagacgacaacgacaaacataatagaaatacataaacg

SEQ ID NO: 187747 - DNA, 543 bp, Arabidopsis thaliana
  unsure (1)..(543): unsure at all n locations
cgcccgcaggaaccgggccggaaacccgggtcaagcgggagggcaaccccccgcacaaacacacacgaatccgaggggggcaaacaccaagccaccgaagaaggaggagcacaaaacgaagcgcgacacccgtggggccgaacaacagcgaacggccacgggaacgcgcggcgacagaaacacagaacttcttctaaaggggggggcaacaggaagggaggcccaagaaccgcaggagacacggcgccgaaaagaaggaggagaggggcggcaccagcccaaccaagacaaagaagcaacgacaaccccggaggggaaggaaaacacgagaagcaaggccgcaggcggagagcagacagaagaaaagaagggagagcccagccgcacacgggaggaggcacgccgcggggccaggaagcagggnacacgcgcaaagcgcaacgaaccgaacggcaaaacgcgaaagagggccaacgaccgcgcccagcaaaaagcacgccgaccaagcaacggccggaaagagccgcacacaacggccacgaa

SEQ ID NO: 187748 - DNA, 493 bp, Arabidopsis thaliana
gcccgcagtaccgggccggaataccgggtcgacccacgcgtccgaaccgcgaccccaacacgaaccgccaagcggggggccacgccgccggaaacaccgaaagcccacaggcggaccacgaggaacagggaaagaccaagaacaccaggagcagaaaaacgaccagaacaaaaccgaacccgcggccctcgctggtatgggggggggggacagagaacccacacaccggaagaaggggagccggcaccgacagaaggcgccaggagggacggggccaccgcaacacgaggaggaccgcgaccccgcgccagagacggaacggaggagaacacagaagacaccacacaaaagggccaggcgaacggaccgccagacgcgcggaggcggcgccagcgaaggccaacaaagcacgaaacggcagagcgcgaagacacaccccgcaaaaccaaaaacacgccgcacggcaaccccacaacgcgcgaaaaaacaccgc

SEQ ID NO: 187749 - DNA, 324 bp, Arabidopsis thaliana
  unsure (1)..(324): unsure at all n locations
cttgacggaacattacgccgcgcacacgcacggttctttttcaaataaggccgcatcgtttaacgccacagagcacagtcgccagatcggcgcgtacctacgaagaccaatttttccaccggggggagggggtcccaatcaacaaatttatatctccttcttcatttccaaccaccttncattgatctggagtcatatggcccttgtattgttccacacaaaatatgtatatacacacagatcattatatctataatacatttatgacgaccagcagtcagtttatgtttctagacccatcatccatacatgccattatttttt

SEQ ID NO: 187750 - DNA, 612 bp, Arabidopsis thaliana
ccgaccgaaggctggaacccgcaaaaccggcctccctcgccgggaagcaccccaggtaccccccaaaccagcaggggaaacccggggaattgggacggccagggcccaccaggattgaaaagaccggagccggagaccaagagaacaaaaaggggacaaccacacaccgccacagattcaaacaaccaaagagagggggcacacccggcaccacaatattttattagagaggcggggaacaccaacccacgcccgaaaacccgaggacagagacgggcggcgaaaaaccgaaccccgacgagaagagcgcggaccaaaacaacggagagggcctagtcggcccacaagggccaccacaccagcctcaagaaagctggggagaacggaaccacaaaaaccacaaaacggtttcgggaaacagaagctcacaacgcggggtggcaccacaaccccacacaccagggcccccgacacacacaggccaaacccgtcggcaaaccgagtccaacaaaaattccacgcaaacccgccgcgcccaccgaagagccaccaccaccaacaacccagcacaccaccgaacccactacagagaaacaacagccgcccgggaaa

SEQ ID NO: 187751 - DNA, 307 bp, Arabidopsis thaliana
  unsure (1)..(307): unsure at all n locations
gcacgaagcaaggcaccgagacagcaggacgtcccggggggagggaacccaaaacgaaacgacaacgaccgagcggggggaaggacaaagcgagaaccggaccaaagacaagcagaccgaccgcgaccggaaaaaggagaaggggaggcaccacacaggaaccccggcaaaggcccggcaaagacccccccttaaaaggntgaaggggaaacgaaacggaggggaggagccaaacagaggaggcccgaagggccagcgggacaaagaaacccgacaagaagacccgcgacgggcgagagaagacggg

SEQ ID NO: 187752 - DNA, 504 bp, Arabidopsis thaliana
  unsure (1)..(504): unsure at all n locations
agctacccccctgcagtaccgggcccgaataccgggttaccccgcgggcgatccacagangccaaagccaanacaaccccaggggccctatttcgtccaaggccggggaaaccgggacaaatataccccccttataacttttagtcaagtcaagagttgagccccatggaagttttccaaccccacaagatttttgtttgaggggaggaaaccacccccggcgaccgaaacccaaaagcgcccagaacaccgagagaagnaaaaaaaaaaggacgggaacccacaaacggccccggaaacggaaaaaggcggccnggaaaaagccaaaaaccgcaaagaaaaacacagccaaaaaacacggcccgcaaaaacccgcccccgccgaaaaggcccgcggcccacccggggccccccccacacaaaccggaaagaaccccagaagcacagacaccccccggccagacgcgaggggggaaaagagaagcccccacccacccccaaaaa

SEQ ID NO: 187753 - DNA, 395 bp, Arabidopsis thaliana
  unsure (1)..(395): unsure at all n locations
agcttccttctacagaggcgcacaatcagtccctcactcgctgtgcgccgtgcgtctatcttttcttttcctgcgcgggcggtgcggaccgtctaaaaacgatnatatgcgggcctccgctccggccttgcaggatcagcagtgcganccgtgactcgcaactctctagatatcgattccgccactcgtgggtactcgagtcgncacagaacgcggactagcgccgagtcactctatctctattttgcgctcacgatgctcgctctacgacgctcttttttaatcgtggggggggcaactcggtacgggggaggcctgttctagtaaaaaattatctacccgcaggctccgaccacgattgggaccgagaccaatatgacgcactgccccgttcc

SEQ ID NO: 187754 - DNA, 507 bp, Arabidopsis thaliana
cccccgcaaggacccggcccgaaaaccgggttgccccgcgggcaagaaaaaaaagagaaagcagggcccgccgaacaccaaagccccagggaaaaagagggagaaaaacacgagggggcatactaggcggggggacgacagacagacagagggagccaagggcggcgggagaaaagacacaccactttttgtggggggagaaaccacaggccgccaaggacggcacagcacacaccacgggaggaagcgggcgcaaaggacgcgggggcaacacagggtgctaacaaaggcgggaaaaacacacacaggggggggaaaaccgggcagaaaaagacaagaaagacgggggagccacaaaaaacacacacacccgcgaacgggcgacagagagagagcagagagaagacgacgaagaacagcggcccgcacgacacaggaacgagccacaacacggcggaggaccccagagaaaaagagcccgcgaacaccccagaaaaagaaaaaaac

SEQ ID NO: 187755 - DNA, 398 bp, Arabidopsis thaliana
ttttaacacccccccccatttaaaacacaaacaccccccattaaccctctcaacttatttatcttttttaccttggggggtgggtctttaaaacaatcctaacccccctccccctcccctctttctcccatcctactctcctctccacatcttattcttctctactccatcccctagctattatcctccacttctactcttcatacacccccagaataatttctcttctattacacatataaaccctacattttttattcggggtggtgacacaccctcttccgtcacacgctctcacttctaaaaaatttattttcttcctattctcttctcctccctcctctcccattacttatacactctaactctacgctcattttcctctctcacttctccta

SEQ ID NO: 187756 - DNA, 530 bp, Arabidopsis thaliana
  unsure (1)..(530): unsure at all n locations
gacgacgcatccacgcctccgtacggctgggagcctctatagcgagtctgccctcctttgttttttttctctctttccgttgagncggaccattcattattggtcagccatcctatgtaccttatcatattttttatacgagacctaattacatgctactacactaatagatgtgcaaatgtaacggacgcggacgatgaaaaagaaaccaacgcttacttgtttttgcggggggccacgcacaattaatttttttatgcaaagacataggcttgtgccctcatatccttgtgtatttgaaattcacaaccgaaacccgaagaggtcctccctcttcttctttgcccaagaaaatatcatgataattttattcctgatctatgacccagagatcggaagatagaggtatagtgatgagccttgcctctacctttttattttataatacctaatagtagtcggtgcaaaaattctctacatggctcaggggccttaaagggttcagttagcacctgtatcataaagctttt

SEQ ID NO: 187757 - DNA, 397 bp, Arabidopsis thaliana
cgaagcacggaaaacggcaagagaggtcgccgagcggggcggagaccgaaaccaaccggcacgccccaggacaacaagaacggatgagcaacggagcaaacacagggcacaaaccaacacgcaaagaccagctacggcaccgcgaccaaacacccagcaagaacgccagagacacacgccaaagacaaacttttttttgggggggggaacgacaaccaacgaacccccaccggaacgcccgaaggcacacacacacacaccaaacaacccgcacacccgcacgagcaccaccacacacaggcgaacacagcccagagacacacgcacgggcaacaccacaaaacccgcaccacagggccaaggcaaacgccccaccgaccaggccaaaaaacgaggc

SEQ ID NO: 187758 - DNA, 185 bp, Arabidopsis thaliana
  unsure (1)..(185): unsure at all n locations
gcctgcaggtaccggnccggaatncccgtttcgacccacgcgtacgtccaagtgtacggatgcccttaccctgagagcgggggggttctaaaggtttcaatgatgaaaataatgtagatacttgctgctgatttctcacgtagatattttgaccttttgataacggcgtgagcctcaatggaggt

SEQ ID NO: 187759 - DNA, 589 bp, Arabidopsis thaliana
  unsure (1)..(589): unsure at all n locations
acccccagagcgggctgtcncggggggggggtacccgaaagacacggcacccaccaaaaaagggagcaactttaactcgaacagggggggccacacagggggagacccacaccagacgagaggaccatcagagggaaaacgccaacgccacacgcccggagaggcccgcacagcacgaacgcgaaaaaccattttctataggacgttggggccccacaaacgcggcgaccacccccagcaaaaagaggaacgcccangagaccgagagacaccgcgacccacaccgcggaaagcagccgccccgcccgagcacacccccccgcccgcaagaaaagcgcgcggggcgggccgcacaaacgccaaacgcaaggcagaacggggcaacagaggccaacccaacccaccgccgcgcacaccaagaacaccagcaccccgggaagcagcagccggacacacaaccgccgccggcacggggacgcaccaccngnagacgggggagggcgcccccagacccgggcggacagcacgacaccaacacgcggcgcgcccccccgcgaggaccagggcgaacacccgcgaacaccgggag

SEQ ID NO: 187760 - DNA, 464 bp, Arabidopsis thaliana
aaaagacaaaaaacagagaagacaccaaaattttttggggactacccccacacagtaaggagaaaaaacaaaaccacagacaaggcgagaaactaagaaaatattttcaccggggggggggccatacaaaaataagaagataggacctcgtccgcggatgagatcagtcacagcgcgtacacacaataggagattagaacgaaacatcttcgaaaataaatcaccaacagacaataatataatgacgacagaaagaaaattttttggggggggggtcaacaaagcgactcagcggccggaaaaacagaattttattcttattcagaacgataataaaaagtaaggcaaaaaaagataagagagaaaagaatcatgaagagagcagggaaccattcatgaacaaaacaacaataaggaaaataaagtgggagattcaagagaaaagagagtcaaaaaagaataaa

SEQ ID NO: 187761 - DNA, 300 bp, Arabidopsis thaliana
  unsure (1)..(300): unsure at all n locations
aagcagagccgggaccggatggaagcaccacgccggagggggaacgcgagggccaaggaccaattttttttgggggggggggcccccgcccccacccggacgaagggcgagcacccaagaagaacgccaggcaacccgaagcgcacaccaagcgagacggaaagcgagccagngcaaccaacccgaaacgaggaacggcccacgagcccgagcgggacgccgggcaacaaggacaaacgacccaagccgcccgcgccgaaggggcaggccgccccagcggcaacacagagcaaagggccc

SEQ ID NO: 187762 - DNA, 544 bp, Arabidopsis thaliana
aaggaaggaagccaccaaagggagcgtgccgcccggggagagaacacccagcacgacaacacggagagaaaaaaagagggccacttcacccacaaaacggagcgagcaaaaacacaaacccggaaccccccaaagcaaacgcgggacccgcaagaaaccccgggcggagagaagaacggcaaaaaaaaaagaacacttttctttaggggggggagcacgaggccccaagacaaacagacaaaggagaagccgggccacccccaagcgccgcgagacagaaccgagccaagaccagggaccaacagagccagacacccgacaaggggacgaagaacaaagaacaggcgcacacggaccccgagcaaccaacaaacgcgccgacacccggggagcaaccagccaaacacacaaaccccccagcaaaaagaagacagcacagacgcagcgaaagcggcgcacgaggaggaaccaccgaaacccaccaaacgaccacaacggacagaggacacacgaccgcccggggaacggcgaccacaagagcaag

SEQ ID NO: 187763 - DNA, 514 bp, Arabidopsis thaliana
  unsure (1)..(514): unsure at all n locations
cccaaacnggaacccaaaagagtttacaggggggggaaacccagaggaccaacccaccgaagcggggcaccagcccagacagagaagacgaacccccaccacaccaacccgcggacgaaacaacccgaagcaagcagaaccacgaaaagagaaaaccagaaaacagggacacatttctttttgggggggggaaaaccaaagccaccccgaaaccacagaacaaaagaaacaaccaaagcaaagcgcaaaaaaaagaaccacaaagaggaccccaccacaaagacaggaaccagaaagaagaacaaccacccagacgaaagcccacagaacaaagccaaacagacagacggaaagagacccgcaaagaagaaaaaaagacaggaaaaccgaaggaaagaaagacaagaggagaaacagcccacagagcacaacccagacacaacacacacaagaaaccaagagccaaccggaaaccccacacgacgcaggcacacacaagaccaaaacaacacaa

SEQ ID NO: 187764 - DNA, 355 bp, Arabidopsis thaliana
acgtttttcacccggggggggggggggcctcaaacaaaaaatatgacgagcgcgaaagcaccgcggcggcctcatagagacttcaataccttcgaccttgtcgtcgtgtacgcaattgtgtactgttttatatgtagcgcactgctctctctcgacgctcctgatacaccaccggacgagttcatatgcccgcggccgcagtttttttttgggggggtgacaccccaacgtcgggtggccgaccctcataataagccctcatacttttatcgtacccggacttcgctattcggctattgcggtcctttcgtagactcgacagcggcgattcctctgcccgccctacccacttcac

SEQ ID NO: 187765 - DNA, 699 bp, Arabidopsis thaliana
  unsure (1)..(699): unsure at all n locations
acccacaaccacaaaccccacaaaccacaacaaaaaaaagaagaagaaggaaaggcctccgataaaaaaacaacccgcaagctaaaggggagaggaaaaaggaaagcggagaaaacaaacgcgaacacaactctctacaaaaaaggaggagagcccgtaacccaaaacaagaaggacgcccaaagaaaggccccaaccacaacacagcaaaccgccacacccccaaacaagcacgagaacgagccgaccagcacacccaccggcaggcacagcaaagaaagagcacaaacaaaacacaaacacacaaaagaacccttctcgaaaacaaaggggggggcaaacaaaccaacaacgaaaagaaaaacacacacgagacaaacaacaagcggacacgaaggcaacaagaagaaagagacccgggagagagaacaccgcgcagaggcaccgcaccccgcgcacgcccaaccgccacacacgagaggcaaccaccgcccaggaacacaacnaacaaacagaaagaagcaggaaacagcggaagacagcgaagaaagcaggagaaagaccaggagacagaccacaaacaaagcacaaaaacagcaccaacaagagacgaaaaaacaaccaaagacagacacagcgcaggacgaagacaacgaaaaagcacacacggagacccacccagccaccgcacagccaccg

SEQ ID NO: 187766 - DNA, 427 bp, Arabidopsis thaliana
accgccgaacaggcggcaaaccgcgacacagaacgacgacaacagaaacgcgcccccaacaacggctttttttaataaaaagagggggggcggggagagaccaggcccaacaagccgaaccgcccggcacgccggccccccacagcccgcggcggcagcacgagccgacagggacgaagggcggagcgagcccgcccgcaaaagagcgcaccgcgcaaaaccagacacccccaacccggggaccggcgcccgcgaggaagaacaaaaacacaaacggcggccaaaaaccccgacgagcggcggagaggaaagcgacacgcacgacccagacacaacggaacgcgccgcccaaaccacaaagaaccagagacagacgggaacggaagcgcccgaggccaaagacacaccagaaggcaacagagagaac

SEQ ID NO: 187767 - DNA, 578 bp, Arabidopsis thaliana
  unsure (1)..(578): unsure at all n locations
aaagaaaacgagataaatgcgagaaaaaaaaaaaaagagacgtgcctcataagataancaccccgggtttgnaggaggagagccacgcgcagaagaggagagaaaggagaagaagattttaagaaagggggtgggggttgacgaacataaaacaatatagtgtcatataaataagaagaaaagcacactagaaaaagatgaatgaacgcgaacggatattttagcnctagagaggggaggagacagaggagagggggagaaagacactgatgtaacgtttctttttttaggagggggggaatgttagggaaccaagagttaatatatatatatgttcagaggtaggtgagaggaataaagagaaaatattgagtatgtagagagtggaagccgcgtaatagcatcatatgaagggagacgaaagaggaaggatgaaatatgtaatactagaaatagtcgttaatgaataataaaaagagagatanacagatagaccaggacaagagtgtaaatctaaggagagtaaaagataaaagatgtcgaaggagagtagaagaagcggggagaagccaacagcg

SEQ ID NO: 187768 - DNA, 314 bp, Arabidopsis thaliana
ggcgcatgcccgcctacgttagcttggatcctatcaaggggttccccataagggggtggtttttttttaaataaaccaatcctcactagagagggagtttcagttcactaactaacccttctgggttgaatatatgggctgccacccctttttactgtattcaccctccaaagaacctttggcaacgcctgctaaacaacaacgcaccgtcttttttttttagggaggggggaacgcacaccgctcctaaccccaatgaaaggcccttgttccgcgttggcgtcataacttatgttcccctttgcgccatgtcc

SEQ ID NO: 187769 - DNA, 617 bp, Arabidopsis thaliana
cgtgcggggcgcgcgccgctctttttgataggcccccggcgtctcgcgcgcgcgcacccgtctgcggtccctcccctccgtagctctgttcttttcgcccgggggcgggggcctgaaaatcaaaatccccgtgcgctccgccccccgccttgttaggcgcactccccccgcgcccgccctccttttggttctgtttctccgccgcggcagcaggtttcttatgccgtcgcgccctcctcgcgtgcgttgacgtcgtgcacgcccaggctttttttttgggggggggcggcccgccgctctctctttcccaagaaaaaattctttgctcgccgtttcccacttccctctcccaccacacgcccgcccctcgctcccgtctccccgcctctctctctctcccgctctccccccctggccccacggttggcaggccgtcttctggatcgccttgtttccccgttttcggccctccgcctgttgtctctcaccgcatcccaccgctcgctcttccgcgtcctcctctgcctttctccgcactctctctcgtctggtttttggagtcatcgctggccacgctcgttcccgcgcgccctccatctccctcttccccggcccca

SEQ ID NO: 187770 - DNA, 553 bp, Arabidopsis thaliana
  unsure (1)..(553): unsure at all n locations
cccccgcgcgagggnggggaccctccagagggttcgccccgggggggggtccctnagcaaagactgctctgccacgaagagggcaattctttctaccgctggagcgccgacccgggcatgtccacaaaaacgagagtccataagaaggagagtcgccacgaccgaagccacgaagcaaccaaaccgggaggcattttcctccttgggggggggggcggcgccccagcgccagccgcccccccccaccacgaagcggcgccggccggccgcgaagggccgacgaacaggcggaggaacccgccccccacaggacgcgcgacggggaccgggcccgcaggcgagggagcagcagacgaggaaagaagcaagcaccagaagcagccgcgggcggcgccgagcccacacgaggagggacggaacaccagagcaacaggacagccgcgaacaacgccagagagggcccgcccaaacaacggggagcgcgcggggcgcgagggaggcagggaacggagccgaaccccacgccgccggcgccgggaaccagcaggcggac

SEQ ID NO: 187771 - DNA, 366 bp, Arabidopsis thaliana
aaaaaacgaaccacatctttgatggaggaagagaaaaaggaaaagttttttatatagagagggggggagacaaacaaaaagaaaaggaaaaatgtataaagatgataaaacccaaattagtttagataagtatactaaaccgtgttggtctaaaaaatcaatacacaactattacatagacaataataagggagaatataagataataatagaagaaaaaaatatatagaatttatggtttagttgtagtatacaatatgaaatatgaacaaataattaaatgtaataaattgaataaattaatatacgataactaaataatgacacaataaaaaggaattgtaagagtataagagagaaagaatc

SEQ ID NO: 187772 - DNA, 197 bp, Arabidopsis thaliana
cacgcctgcagggaccgggccggaattaacgttttgaccgacgcggccagtcaagggtggccgtcctaagccccttgattgccatgcttagaggaccgcaatggaatgcaactttctaataggagacgaatacgtttatgaggctcaaccagatagctgtctcgtcttgatttaaaagctaggcacaccccccattt

SEQ ID NO: 187773 - DNA, 358 bp, Arabidopsis thaliana
aacaaagccccaaaaggaaaacgtctttttgtccggggggggggggccggggaaaaaaaatactaccacctcccaaccggcgccaaaaatagcaatcaaccgttcgaagggcacgcgcggcgaggaaggagctgtgagagagacatggacacctggcaacatgagtacgcgcccacaaacgtcctacagtcagctatccgcgctgagccgcgatcacttcttttttttgtggggggtgagtgggaacaacagacggcggggcgccgctgcacaaaaaaaacgtcgcgcaggattgttgtcggctggcgataactatgcccactgaacgctaagtagcaacgcagagaaccgagcgcga

SEQ ID NO: 187774 - DNA, 299 bp, Arabidopsis thaliana
  unsure (1)..(299): unsure at all n locations
acgcgtacgnaagctcggaacccgcgcagagacatcccacgggggcgacgaggcgccnaacgcggaaagcacgccaccgcagccgggccacctccgncaccgaccgagccagagagcggcacggcgaagagcnggccaagacagcgaacacaaacgcgacccccggacgcggaaaccaggcgacggacgagccaaatttttacggcggggaacgcacggacccgacagggcgagagagcacngaggcaacccgcaagccagccagacgccgcagggcaacgcaccgggacccgggcaag

SEQ ID NO: 187775 - DNA, 545 bp, Arabidopsis thaliana
  unsure (1)..(545): unsure at all n locations
ggcgggggggggggggnnnnncgggnntttttgttcgngcgcgggggggaaaggcggtctgttgaattaatcatttccaccttttatgatctatgcatatttttttagtatgctgcgcgatttcatattattaaagttgacattttgagacgataaacancgaacgtaggataaacaactagcaccaaaagagagatacatcgcatacaacccaaaccagcaacaataatttttttttaacacgcggggtggggcccaaaatcaaatcgtatcctatcttttctaatttcctctctaactataacggctcgtgatatccacatattctattaagaaaacgtcacacaatatatttattgattatttatttattatattaatatactattttttttgaatactataaataaattgtcatagtaaggatgaggaactaaggcgcattgaggtagtgagtaccgtctccctccccagactgcgaaacacatctaataacagaaaaatggacaggagaggacgaagacaaggacgagtacggtaaagag

SEQ ID NO: 187776 - DNA, 531 bp, Arabidopsis thaliana
  unsure (1)..(531): unsure at all n locations
ccggnccggaaaaaaagcttgtgggggggcgcaaaacccggcggcggcccagngaagagcgcaggggcccgaaagaacccgccgcggagagacggcacaccaaggggaggcgaccgcaacgaaggcagagaaaaaagggaccgggcggcgacaaaaaacaagggaaaccccagaacgttcctataaaaggggagggagcaaacccccaagcaggaccaagcaaagcagcaccacacaggggaaccaggggacgaagaaaaccccccgagagcaagaaagagacgaagacgaaacagggagcgagagaaagggcggacacgaaagcaaaggaacgccgcgcgaggggccgggggaagagaaacgaaaggaacgaaacgggcgagagagaggcgaccgagccggggagcaagaacccaacgcgagacgcggccagggcgcggggagacgcgaaaaccggaggaaaagaaaacagcacaccggaagagaagagcgacgaaaccaaagcagccggcagaggaggcacgacaaaga

SEQ ID NO: 187777 - DNA, 486 bp, Arabidopsis thaliana
accccccccgaaaggcaggaacgagcaattttttactgggggggggggcgcaaagaaaaaaacatacatcatcggaggaggatcgatgtggcttagagccccggtcaggagggaaactcaccctcgccccacgcgcagacccactacgcatcaccgactgaagtcgaaagcagcaatcgccatctttttttggggggggggccgaccgccgctggcccgcggcacaaagatcctctgtagatgcgttgagcacccgtcggagcgcgttgaccgtacgcctgaacacggccggataagctgttgaaatcggtgaggacagctatcctgacctctctcgcacgttcgacgcccatcctccagcacagcgagccattgtgctcgcggggtaggaaagttaacggtttattgaccgtagcgcagtgtgcgagtgcgatagacacggggcataatattgtacggagagcagcccggcgaatggcggcaggt

SEQ ID NO: 187778 - DNA, 472 bp, Arabidopsis thaliana
  unsure (1)..(472): unsure at all n locations
gaaagccggaaacccggacgagaaattgcgccgggggggggagagcccnaaacggagaccggagggcccccgaaacggggccactgccccaacgggcggggcggagccccccacaccccaagaacccggcaaaaacaccgaaaaacaaagggcgccccccgggacggggaaacccgggcaaagggccaaaacaattttttataggggggggaacgcaggaaaccccacggggccacgaaaacacgggaggccaaacggcccaagcggcgcggaaccagcgagggacacaggaccacgggacccggaaccaggcccccgcccagggcaaaagacaaaagggaggagagacccggggccaccgcggccacccaaaggcgcggaaaaagggggggagacgccccccagaaaaacaaaaaaganagccccaggggaaaaaaaggcccaaagagggaggcgagccccccaccggggg

SEQ ID NO: 187779 - DNA, 498 bp, Arabidopsis thaliana
  unsure (1)..(498): unsure at all n locations
caggaaccggccggaaaaccgggtcgaccaggcgccaaaccagcggaaanccccacaccacaagagggcccaaaaaggcagcgacggagacacacaaacaaccgggcgagagagccaaaacccaaaacaagcgccagaagcgcggaaccgacgagancgggagaaccaaatcctccaaaggggggggagaagcgccgaggcgaaggaacagaacaaagaccaccaaccgaaccaagaaggaggccaacacggccaacaggagccgagacacccggcggcaaagggaggggggaggaaaagcccgacaccaacacagcaacccggggaagacaaaacaggccgacaccagagcacccagccgaaaacgggggaggccaaggaacaaagaaggggcgaagacagagagccaggacgggcggaccgacaaggacagaaaaggggcccgcgcaggcncaacgggacaaaaaacccaaagaaggcggcgcaaaagacagagag

SEQ ID NO: 187780 - DNA, 506 bp, Arabidopsis thaliana
  unsure (1)..(506): unsure at all n locations
ccgcaggaaccgggcccgaaaacaccggctgacccacgcggccaagccacaccanaccaaaacacagaccgagaccgcggaaccacccgaccacgaaaaacccacaaccacacaaccgaagccgcaacaccccaccccacaacacccaggcacggagacaccacacagcaccgcaccccccacccccacgccacnctaaaacaagggggggcccacgagaagccacgccaaacacgacgcacaccaaacaaacgccaggcacgacacgcgcgagcacacccaccagcgccaaacacaacccgcacccgccaacgaaacacccccaggaccacaacacccgccgaacaaccccccaaaaaccaaacccaccacacacccaacgcacacaaaccaacgaaaccaaccccaccaacccccaacacaccaaaacacacccaacgcacaacaccaaaacaacagccacacaaaccaccagccaagcccccaagaacccccaacaaacaaca

SEQ ID NO: 187781 - DNA, 573 bp, Arabidopsis thaliana
  unsure (1)..(573): unsure at all n locations
ctagatgatctgaagcgatgagggggcggcagggggcgcattattgctataaattacacccgccagacgtttagcgggatattatatgtgtgatgaagangattgtcgactagcagctagaaggtacttttatgtgtgggggtgcgggtcgtcattagatagaaatcatggagacgagcgttctgaatgaggacaaaacggtctccgagcgtgcgatggtggactgggatccgtatagtttaattggagctggtgaagaggagaggtgtcggtgggtcggcggtgacgcggtcgctacttacatctgacgccgggccgcggaccgtttttttgggggggggggacaactggacctggatgctcccaggggtccgaaatcctcattgtgtgaatttattacgaaggggagatgtgtgcagtgtaggcggtgtagaatggtgtcgtgagctgccgcgagcacggattggtgtcgcgccggttcctacctcaatagacttagactacttgcggcggctctgagtactagtggtagctctcatcatgattagtgtatcggactgtcgggagatccta

SEQ ID NO: 187782 - DNA, 545 bp, Arabidopsis thaliana
  unsure (1)..(545): unsure at all n locations
aaaataactaaagaaagaatattttaaaataagggggtaacgcgcttagctaattttattgtcccgagtattcacaccatgcgcgagtcagagaacgactccgtagtgactcacagcaacaacgaccaacagcnaaacaattaacaaaaacacacaacgcaaacaagacgagagacaacagaataacgacatcagaaacaccacaaatatatttttcaaaaccatagaatgggggagagcaaataagatagggaagcggagatcgtagacacagcacgggatgcgccgctcacatgccgcacaaaccaaataggacttacaaaccatacaataagattatcaaaaacaccacgaacatacaactttctatgggcaacgcacggcgcagacaattaatcccgtagaagctatacttcaatgacgtgttttgacaaactaaggtaacagatgatgtagcatatggtaagtagaacagagacgggccgaggagggtgaaggaaaagtagcgacgacaatacatgacacgacgcagcaagctcagtaaa

SEQ ID NO: 187783 - DNA, 468 bp, Arabidopsis thaliana
gccgcgaagaagcagcaccaaaggctgcccgggggagagcccccaaaggagaaagagcccagggggaaaattagcagcagcgcgccaggacaccagggcccacccccgaaaggaaagggggcgcgaaggccacgcaccaaggaagggacgcccaaagccggcaattttttggccgagggagaaaaaaaaacgaggggaccacaccaaagggggaacgaggccagcaccccaaaaagccaaagaccggacgcggcacggggaaggaagggcgacgaaccccaaggaaaaggcgcgacaccacggagaaaaagggccgcaacgaccgcaaaacaaaccgaaccgccaaaaacaaaccacccggccaaccccaccagccacccaccagacaagagcacacaacagaacacgcgcgggaagacacacacccgacgacagcccccgaggaaccgcggggcagccacgaccggc

SEQ ID NO: 187784 - DNA, 520 bp, Arabidopsis thaliana
  unsure (1)..(520): unsure at all n locations
ccccgcaggaccgggcccgaaaaccgggttgcccacgggggcgagcccccnacgcanaccaccaacacggcggcggaagacttaaaccgcacagggggggaaacgcaagggcgcgcaaccggaccgggggccggccggaccaccacaaccccgaccacggcggacacccggccgggcaaacctttctctcttgggggggggccccccgacgcccgaggggggaaccccgggacccggaggacccacggcccgggggcaaaacaaacccggccgggaggggaaccaaggcgcggnagaaaccaagggcgcgggaaggaccgggagacaccacccaaaggggggacccccacccaaagagagcaagagaccaacccggacaggaagaccccaacacaacaccgaagccgaggccccggaaacgccgacccaagagccaaccgaggcccgccgagagagcgccaaaaagaagagaggccggaaaaagcgggggggacggagccacaagaagaggccccccggc

SEQ ID NO: 187785 - DNA, 554 bp, Arabidopsis thaliana
  unsure (1)..(554): unsure at all n locations
acggcgcaagcacgccaacgaaagcaacggaggcagcgacagaggcctgcccacaggggggggagtgcccaagcacagcccaacaccgaccagggggggggggcacgngccatacgcagcacactcggggacgggaggaacaccacaccaccccaaaccacaacacatcagcggcaggacgcggcccgccggcagcaaacaagagaaccgcattgcttacacaggagggggcgacgctcccagacacacagcccccgaggggagacccaagaccaaacgcccagcgtccgagagaaacccgaaaccgagcctacaacccagagccacggggcaatggaggtcgcaccccggcgccgggcaacggcatagaggaaagcgccaccggcgcaaacgaccgaacgcaagagacccgaactagaccagcccgagccaggcaacgcagcagggcccaaacaccggcgccgcagagccacccccccgaacacgcgccgacgcacaggccccccgaaagcccaaagcgcgggcagccaaacccagcccaacgaaccgcgccc

SEQ ID NO: 187786 - DNA, 532 bp, Arabidopsis thaliana
ttttttttttttttttttcccaaagaaccaattaaatttacctctttccacaaacaataagattccattttcgcaaaaaaaaatattcaaatttgtgtgaaaccaaaacaataacctcttcacaatacccacactttgttgaatttgttctttgcctcttaaagttttaattctcctaataccggggggggagcaaaattttcccccttgggcgagttaccacaaaaaaaaaagggtttttcaaaaaaccccttaaagccgaagacccccccctcaaaccttccccccccaaaaaaaaaactctaacctttggcggtttgaccagaacactttctccaaaaacactcccctttaagaaccacaaagttcccccctcttctctttttttccccccccgaaggctgaaactcttctttttaaaaatgtttctccaatacaagagcggcccccccccccccccccttgacgccccctttttctctttttgcactttaaaacacccccccccccactttcttttccccctgtttca

SEQ ID NO: 187787 - DNA, 416 bp, Arabidopsis thaliana
ccgccagccggaccgagaggctcccggggcgggaaaacacgaccccgaagggccaaaccacccggcgccaagccggcaccccaagacaaacgcccaggaagccccccaccacacgggggccaccagacaaactttttaagggggggaaaccggagccacgccccgcacagagggaccagaaccgccacaccgaccaaacaggagacgccaaccgagagaaccaagcacccccgcccaccacagaccggcggaaaacaaccgacaacggccagagaccccgcacaaccaagagaaagcaaaaagggagaacagcggcgaaacaaccgaggaggccaacgcgccagacaagaagacgaagaggaagagagaagacacaaaccaaagaaaacaaagaaaaaagaaaacacacaaaagaa

SEQ ID NO: 187788 - DNA, 612 bp, Arabidopsis thaliana
acaaaccaagaaacccaccgcccaccacagggaaaaaaaaaagaacctattaaaaaaacacacccccagagtttaaaggggaaacaccaccacacagaacaaaagaaaacgaaaaaaaacaactcttcaccccgcgggggaaagccccccaaaacaccaaacaaagcaacaacccacacaaaaaacctaaacaaaacagcaacacatccccgcacaagcaacgcccacaccccaaaacctgcaccaccagacacaaacacgaacaagccacaaaacacaacccaccacaccaacaaacacccttttatcaagcaaggggggagatgggacgaaacagcacaagccccaaaacaactaaccccccccaacacccccacacaaccccacacccccacaaaaccaaacgcaaaaacaacagacacacgcacaacacacgagacaccccagcaacaccaaagaaaatcaaaacaccaaagaaaaacccaaacgtacaagaaaacaaaaccaaacagaacgacacacgacagagacggcacacgcacgccgacaacgccgagcgagaagccgcagcagaccaacacacacagacacaccaaaaaaacaaagaaagaa

SEQ ID NO: 187789 - DNA, 285 bp, Arabidopsis thaliana
  unsure (1)..(285): unsure at all n locations
gcctgcaggtaccgggccggaattaaacgtttggacgacgagctcactacccggagaaccccctttctttccgatccgcaggggccgtaaacccccgtagagcaggggaccagaagagaggggggagaagggcgcttagacgcgagacataacaagcgaactagaacggcacaccagcgcagaaacacaaccgcaaaaacctttttttttttgggggggggaggaaggacccacgccaaagacccgaaacgacgcngaccgccagagccgagagaagcggcgcgc

SEQ ID NO: 187790 - DNA, 535 bp, Arabidopsis thaliana
  unsure (1)..(535): unsure at all n locations
tatctcacttgtcgcgcgaacttttttcatcacgtacccctcacgtacgctgatgcggtattaaggccagatctcttgcagtcctattgactcactgtacttgtctccgaagcttttcccgcattatggaaacatagatgtattcatctgcttttcttcggggggggggtcacacacaaccctctcgtgtgcgtttacataaaacaactcttgattattttctcctcccttttcatacgagcgtcttgctcatccacacaccgattttagttgcgctattctgtagtccgcgttttgttctttatgtatcatggactctaacggataagtccctcacgcactgctctatccctatgttctccttcccccttctgtggcgcgtctcgagcgcgtgtgtacggtcttccttcatgtcctctttccctgtcccctcttccacctatctcgccgcgccttctccggagtctctaccttcacgtcccttatagactcgatatactcacgcntaaacatgtcgccttcttaccataccttc

SEQ ID NO: 187791 - DNA, 341 bp, Arabidopsis thaliana
taatttaggcgcactcatagattactatgacgtcgcatgcacgcgtacgtaagctcggaattcggctcgagaaccggcgtggccctaattttgctttctcctctttgttcagaaaattttccctttactctcaaattccttttcgatttccctctcttaaacctgcgaaagctcacactggcgtctcgaaactatcgggtgggagctcttcgcagcttcgttaaccctgggcttagctttgattcacctgggcgaagcaaactccgaaggagatgctctctacgctctttcccggagtttgacagatccagaccatgtcctccagagctgggatccaactc

SEQ ID NO: 187792 - DNA, 224 bp, Arabidopsis thaliana
gccgggaccaggataaaaccgtttttgcccccggcaggacaagcacccggaagagcaccacacaaatcgcaaagccacggaaacccaacgaggccccaaaaaaaaggcaggcccgaagcgagggaaccgcaaagagagcaagtggacagagaacggaacaaccggacggagaccgcacgcagggcgacgagccaagaagccggatgcggcagattttttttttt

SEQ ID NO: 187793 - DNA, 531 bp, Arabidopsis thaliana
acaaaaaaaaaaaaaaaggcctcaaaaaaaaacaaccccacaatttaaaggagggaaaaaaaaccgagaaaaaaccccagggccccccactttccccccacgaggggcaaaccgcaacccaaaaaacccgggcgacccacaaccccaacaaaaccaaaccacctaccccaacgggaccgcaccacagaccacgagaacccacaacgcccaaaacacccgcacaccaaacaaaacgaaaacacaagaccagacccgacacaaaagaacttccaaaaacagaggggggggcgaccccaaaggcacgaaaaagtaaacacggacacaagacacacacagccaagtcaacaagaccaaagcgaaggcaaagcagcgcaacaccacacaacccgccgcccacacaagaacacaaccccagccacaaaaaaaaacacacaacacgcacgccacgcgcaacgaaccaaggacacccggaccggcaccagcagaacggaaagcccccacaaccaccaagacgcacccaccgccaaacac

SEQ ID NO: 187794 - DNA, 455 bp, Arabidopsis thaliana
ggagcgtaaaaaaataaggcgaacaccgccacaaatgtttacttgcgtccatcaacggccacatgtaatatgttaacctccaatctagtgctcgtgttccccactaaacagaaagcccataggcggaagaatagttttttagagggtgtaccgacaaacagatatcactcaaaaaaaataattaattaagtacctacacttacatggtacggccccgtaaaatttaggattacttctctagcccacaagacttttctatttgcacgtagcattcagtattgcgttcgtctgcgcgagcataaagtatatattatgaaatttccactgacatcctgtagacagttgtaaccagctctaactcatatgcttcacacaaccagaagatgttagcccaaacatctacccaaaaatttacgtctagtaaaagatgttaataacctagacgtgcacagcgt

SEQ ID NO: 187795 - DNA, 301 bp, Arabidopsis thaliana
tccaagggagggggaggaagcgcaaaacgaacgggagagtttagggaaaggagcgacgacaaccagggcaggcagggcgaaaaaaactaagaaaaaagggaacacaccaccagcccgaagcacaagaggatacacgagaagtgccccagacggacaagaagaggcgtttttttttaagggggtggagaagaaacaaacgcaagaaagggaggaagccaaaggaaaagacaaactaacaaacagcggagcgtacgaataatagcggaacgagtggagagagcgggggagagcgggagaaggg

SEQ ID NO: 187796 - DNA, 476 bp, Arabidopsis thaliana
  unsure (1)..(476): unsure at all n locations
ccccccgcggcccggccggaaaaaaggttgggccgggcgaaaagccaggcagacgcctgaacatgagcgagagaaagacccgaaaggaaaaacccgccccacaaacgaggccagggaacacacgaaacaagaggcgagcgccggaaaagacacaacagccaggagaacaggcggccttttttgtaagaggggggggacacacaaaagnaccaaacagggccggagaagggcacggaacaccggaaggacgcagccggacagcacccacaccaacacgaggcaacaagcccgacagagaccaacgggagcgagcaaacaggccgcacaagagcgacgaagcgagcaaggcccacgcgaggggcgaaccgaaaaaaccaacacggcgccgggccaacacaaacaccgggacggccacacccaacgcaaggcccgaggccaacaaccgagagaccccgccagaccgacagaagggagaa

SEQ ID NO: 187797 - DNA, 446 bp, Arabidopsis thaliana
  unsure (1)..(446): unsure at all n locations
ccctaccgaagcttgggaatccggcagaggattgccccgccggaataccgaacctctagactaaaatccgggtcgggtcttaggacggagcttcctcagatgcctgggcaaaccaaaagacttcctctggtctgcaaataggaatccgttggaccccaccttattgtgttggggggggcaagaacccaaaaacacgtttttttccacggtacgaccaccngcttctacaattttacgtccaaaaaggtgcctggggggcaaccatgctcgaaagcacaaggggagctcctttctgatgcacttccgaccacagcccaatcggagctggttagagcctggacacaaccaagaaaaaagaagcgctcacgtaagtctacggagggtgaaaagccagacgacaagtcgaggcgcttggccgggggcggtaggggcaacgaaaccagtgc

SEQ ID NO: 187798 - DNA, 385 bp, Arabidopsis thaliana
ggaggtgggcccctgggggaccgggccgggattattggctggtccaaggggtccgttggccgggggcgcgccttgaatttcctttgtgtcggggttatatctggtaggtggccaaagcctctaaaagaacctgggtttagttgcggcccaggatttctggagatttagaatttttttttttttataggaaaacataattatgttcctcgaggtcaacggaggcttgctggcgactcggggtgtttgggcggacggactcccgcaacctagaggttaaaactttgttgttggatccaaacgctctctcgattgttgtggagagagtcctgaagttaagggttgaccacgccggtcttctactaagtccatgaatggtgcgagaacc

SEQ ID NO: 187799 - DNA, 556 bp, Arabidopsis thaliana
  unsure (1)..(556): unsure at all n locations
ccccccgcaagaccgggcccaaaaaccccttttagcccagggggcagggcccccaaaaccaaaacccgggacgnccgcccagaacgtgcagacacccaggagagggacccacccacacaaaccccacgncacaaacacccagcccaacgaaacacccacaccccgcaaccccaccaccgggacaanacgcggattttcctcctttggggggggggggagcgagccgaccgccagcggcaagagaagccaccagagaacacacacgagggggcggacacaccacagcgcacccggcgaacacacgggccagacacgggcccgcgagaagcagcgccgcccagaacgaccacacccacaccgacaagagcgacacggttagggaggagccaactagccctctgccgcataggctgtgtgactaacttgacagaatgatagaatatcacaacagcttaatataaagcaccccaagctgcatatacttcgagaatgcactcccactaagtataacccacgccaaaaaccaccctaaccccccggaaataaaaatagaaat

SEQ ID NO: 187800 - DNA, 326 bp, Arabidopsis thaliana
aagagaaaccacaccacccgaacggcacccaaggaagaatattttacatccgggggggggggcgggaacataattctcccacccaccaaccctacgccccaccacccattccacccaagttaaactatagatcctaaacagtttcatctctaaatgaacccctaatccctattccacgtatcaaccatattacactagacagcgcagtctgttttttcacgggggggcgaacacagtaccacgacgcatatagaaatatttccccactcgaatacgacacacacggaccaacgccccaccacgcggccacaccaaccaagtacagc

SEQ ID NO: 187801 - DNA, 407 bp, Arabidopsis thaliana
  unsure (1)..(407): unsure at all n locations
tgaggacaccacgcgacttactggacctctaagaggttgcccaggggaggtacttaatacacccaccgcaagggcgactcccttcatgtgtcccctcgggcaaaacaaggcacactctaatgatacgctcgatcaccacctgacccatcgaacacccaaattattgttgggggggacaccaaaccttgctactctaagaaacatctgttagcgcagtcactctttcaaacatgtcagacctancacaccgcccactcttcaaggaggcaatatccaacgcataaagcaccgcataagcggacataaccaattattcttatcccaaccgcgcccaggattccctgactaagagactaaatcccaaacacctacaatactctaacatatctctcagaacaatcaacatt

SEQ ID NO: 187802 - DNA, 399 bp, Arabidopsis thaliana
gtcttaataaatcctttcttctcttgtctagtggggggggggcaaggttggtattattatggccaggcaccgatcgctcgtctttaggagagtttgacgggttttaggtgattggtcggaaattttttttctatgggtgggggagctgagttatagagagggaaaaaaaaaaggcctccgggtgggtttggcagggttacgtaatgtgtcgagggtgcgaaggtaggagggataggggcgacagggtgaggcgggttgtgggggcagtagggcggcgtgagcgtagaagtaggatgggaaggactcatgcagtagtacccagggatgatgggtgtagggggagagagcgtataaaagagtctgtggacaagggacgagaagggtaaaaaaaagagaaag

SEQ ID NO: 187803 - DNA, 489 bp, Arabidopsis thaliana
acgcccgcagaccgggccggaaaaaaggtcgaccaggcagaacgaaaccagagacgacacagaacaaaccgggggcggaccaccccgaagcgacaagccagaaaaaaggggggggagaggcaagaaagagcacaaaaaaaaaagagcagcagcgagaaaccgcccgaaaacgcgacgtttttttgaagggggggggcccaggacagaccagggaagagaaaaacgccaaaaagagggcccaaggaagaaaggaggaagcacgcaaagaaggagcggcgaaccgcaaagggacacccgaggaccaacacacagcgaaagagccgaaggagaaaaaaaagaagccaaaccgggacgagaaagagaaagcgggagcggaggagaagaaaaacgaaagcagacaggacagcacgcccgccgcaaagagaagagcaagcgcgcgaggaagaggcacgaacggagaaccccaagggagacgaaaaagcaaaaaag

SEQ ID NO: 187804 - DNA, 375 bp, Arabidopsis thaliana
  unsure (1)..(375): unsure at all n locations
gggcggcgaggatcgaaaatcatgtctaatttttctagggggtggggaggggtgaaaaaaataaattccgtaaaccgtcccccttaactgcgtcaatatggtccgttcattcagcgcgcaaactaaagtagagatagaaagagtgaaaaagagaaatgagtgagactataaaacagacaataagcgattataatagatattataattggtaaccgaaattttttttgagggggtgtggaaaaaatcacaaacgggaagatctaatataaaataatgagattacatttaaatgccgttttatacaaaaagtcacaattaacgagtgtngagtaactggatgcagccaagcacctaataatgagataagagtaaagg

SEQ ID NO: 187805 - DNA, 509 bp, Arabidopsis thaliana
ccggcccggaaaaaaagcctggggggggagagaaacccacggcggcgcgccagaagacaaacgggggcgcggcagcgaacgcccccgagagcgagcgccacaaaaaggagggcgcaccgcaccaaaagccgggaaggcaaggcgccgggcgcgagccagagcgcgcaaacgccaaagcctcctcccaagggggggaggggggcacgcgaggcgagagacaggaggagacaagcaccccccaaggggcgcgggcggcagaaaaagccgcagaaagaacccgcaggggggagcacaccaaaccgcggaaaagagcgacgagcggaacgaaaggcgggggcaagggggcgacgagaaaagggagcgagagccgagcccccgacgaagagaaaaaaggaggcaagccggagaagaaaggcgaacgggacggcagaaaacgacgaccacccgcacgacgagacgacgaccaaaccgagggccgcccaggcgggcccgggccaacaaagcgggca

SEQ ID NO: 187806 - DNA, 496 bp, Arabidopsis thaliana
  unsure (1)..(496): unsure at all n locations
cccgcggaaccggnccggaaaaaaggtggaccgcgggcaaaaccgcggagacacacacgcgacacagacgcgaaagcaaaccggggcagaaaagaacacgcacaacacgagagacaaacccacaggaccacaaaaagccaacggggagaccagagccggacagcaaaacccacacaaaatatttattttagaggggggagacgcagcgggccccagaaaaccgcagaggaaggccaccaagagcgcccccgggggacgacaggcagacgaaaggggaagggcccaccgccccagagcagagagcaggacacccagcccggcgaaggagcagagacaggaagaagacagacaagacggcccaggcacaaaagagaggaccagggaggacggccacgcgagcgggcaaacaggcgcgcccggcaggagacgcgaacacaccgacgggaagagcgcacagacgaaagacaccgcacaagccagcagaaaaaaagagaag

SEQ ID NO: 187807 - DNA, 472 bp, Arabidopsis thaliana
acccccgccgagatggagggaggaaaacccagcccacgacaggcgggaagagaaataaaaagttttttaaacgggggagggggggtctaaaatacaataattaaagggtacgtggaggattagcaacgcatagatgaatgtgcggacccataataaacgcgataagagtgatataaggcggtatagaagggctaagaataacactgttaaaaggagagcgatgaaaacgtatagaggaatcaggacgaaacattttttttggtgggggggggacaagacaggcagcaaggacgacacgtgcctaagagaggatacgcataattatatatgtcatgaggcgtactgagggttcgtgcactcaggatacagaaactcgttatggtgtagacttatgtagacaaaagcggagtggatataggaggtatcgcgtcaaagaatatggtatgagttgattatcaatgttttcggatgt

SEQ ID NO: 187808 - DNA, 501 bp, Arabidopsis thaliana
  unsure (1)..(501): unsure at all n locations
aagcccggaaccccgccagagggctaccccagggcgaggaaccccaaagaaaccaccgcaaagaaagagaggggaacagccccgcngagggggggggacccccccacaaaacgaagggaggggggacacccgggggaacccagggaacccccggaggcggcaccgccgcgcaacgggaaaggacttttttttagggggaggaaaaaaggaacccccccaccccagccagagacaacacccgaagccaaccccagacaagaacacacaagcaagaacccacgcgggaaccaacaacggcgcaaccggcagccaacaggaagcaaaccgaggaccaaacacacccggggcgccaaagggcgcgggggagaccaaacccaagagccacgccaccccaaaaagcccaaaaaagagcccccaaaggcggaaacaaacaaaaaaagcccacggccccacggaccggggccgccgggagacgacccccaacaccccaccgaggaagga

SEQ ID NO: 187809 - DNA, 554 bp, Arabidopsis thaliana
  unsure (1)..(554): unsure at all n locations
ggggggaaaagggggacgactgcactgaaccccaccccggnctgggggggggaaaccggggggnngggtgnggagggagaggacccttttttncccggggggaaaaccctcccctaaacaaattttttccacccctatttcctcattccttcctctttaccccccttaatttactcacccgctatctcaccaccggaacccacgctaagcgtcaacacccccaccaaactccctcccccaatttcacacaccccaacctttttctttcccacagggggggggacaccttctccaacccttcttgcctacatataaaacccccgcccctctctccgcattccccttccactccccacttcctatcctgtattccatacaaaccttcattttatatatatttctttcaatattatgtatttaaatatatttattataattaaacgaatactttcgtctaacatcctcctctcaaccgttcctatctacatctcacccccacacatccctcccgacaaccacatacaaacgccaagtagcggcataaaccatccccc

SEQ ID NO: 187810 - DNA, 555 bp, Arabidopsis thaliana
  unsure (1)..(555): unsure at all n locations
gaaggctgggacccccaaaaggggcgtccctaggggggggagaaacctctccaacagacaccccaaccgcggaggggggcgaaattggaagggggaaggcggacggggcggccggaacagggcagggcggcccccccaaacggcaaaataccggggcccaaaaagaaaaccgacccaaaggggggggccccctttattgtgggggggggagaaaaaacacccccgggccccccaggagggggcacggaanccaccaaagggcaccgcccggggaaaacccagaggggacgccgggggcccagggggggcaaaaaagaaggagggccgcccgggggggggggcgggccgggcccccggggggaggggaagaggacacccacaacagcgacaaggggagggggggaaccccgcgggccgggagggaaaagaagngacacacccccccccccaagggaaagggcggggcagagggggcccccccaccgggaagggcgcgccacccggaaccccacaacgaagaaagggggcacaggggcaacccccccgggggcgccc

SEQ ID NO: 187811 - DNA, 580 bp, Arabidopsis thaliana
gggaaccggggccgcgggggcgtgtacagggtccatctgattttttctggggggggggggcggtacacagaaatccaccacccttcggtcccggtggcgtgcatcgggcgggatagcccatggacggtgaaggggattagatttactgttcttagaaggtcagaacagagtggagcagcaggagctgagtgaattcacaatagggatggcaacggcgacacactttttctggggggggggggacacacccacccagggcgccaccctccaaaaagatgggatgtggtatattgaagcttgtgcgtgcgccgcgtctgcgagtctgcccacccatccggcgcgactcgtatacgccccggacaagagtgagtaagctgcgtagcgggggtgcaaagaggtgtaacgttcgatctgcagcagcgcaggtccagggtgtggccgcgcggggtcagaggttggctcttctagggacaaatgtctgcggagcgcggcgcggtgcgcgggagcggagtcggctacgggtacgggacggcggagaggaagcatgggagctttgggcaacgagagcaccggtattggg

SEQ ID NO: 187812 - DNA, 592 bp, Arabidopsis thaliana
  unsure (1)..(592): unsure at all n locations
cgcgcgcgaaagcaaggaaccgcaaaagcggtctgtccagggggacacaaaacccaaaagccggaaccacagacggcaaagcggggcaaaaaggcgaggaagaacgcggcagcggcacagcaggagaccaaagagcaagcgaagcaagaaaaacacggaaggggggccgacccccacgaacgcccggagcgcagaggacggcggacacgggagacagagcaggaaaagcatttttatttcttgggggcgggggggagaacagacaggccgccagggcggcgccgaagaggacccacccaacgcggagaaggacgaacaggcccagganacaaagacaggaccccggaggacagggaaccgcgcagccaagagcgaccccaggcgccacgcaagaccaaggcacgaagaaaggaccccagggggcaccgggcccacgagccaaaagaaaccccgagaggcggaacaagaggaccggcgacaccgccccaggcaaggacaacgggggcgaaaccagcaaacaccaggcagcgggaggaaagagaaaaacaagacgaagaaacgggagaaccaacccaagcgggagaggacggaa

SEQ ID NO: 187813 - DNA, 459 bp, Arabidopsis thaliana
cccgcgggaccggcccggaatacccggttcgacccacgcgaacaaacacgccgggagagcaggaacacaccacacgggagggaggcacacggaaccagggagacacgcgggccaaagcaagagaaaagaacgcacaagaaaaagggcggcacgcaaacaaaaggagaggcaccccccgaaggggaattttttgtgaggggggagagagagccacgccagagcccaccgaaagaggggagaaggacaaggagggaggaacacacggcaaggcgacgacgcagaggggacgaccacccgcgacaggacacaggagagcaagccacaagcacacggaaacgccaagaaaggacgcaagccgacaaacaccaggcagcaaggaaacggggaccaagaaaggaaagaccccccaccaccgcagaaaagaaccacgagcgccgagacgcaagaggcgcggagggc

SEQ ID NO: 187814 - DNA, 474 bp, Arabidopsis thaliana
acgccgcaccaaagcaaggaagccccaagagcgggcgtcccagggggggagggaccccaaaaggggcaccacaaccgacaaggggacgaaatggaccgggacgcgcacccggggcaggggcacaagccagccgcagaaaacaaaaacgggcccccccccaggcccccaccccagaagccggaccggcacagagggaaagaatttttttgggggggggaaccgaaagcacaggggcgcaaggcccaaacaggaaaaaggcgcaggccacgcgaggggcaaacaaaaaaaaaggaagggggcgaagagcccgcccaggccacagcacgagaggaacacgaccagcggccgccgggccacgggcgccaagggagaaggaaaagcgggcacccgcggcgcggaacgcgggacggagaggagggagggcaacgggggaaaacgaagccgaaccgaagcacggggaggaggaggaaccca

SEQ ID NO: 187815 - DNA, 250 bp, Arabidopsis thaliana
ctatagaagagctttgacgtccatgccgcgtacgtagctggatccgataggccaactgcctccttcattgtgacgcaaaatcactttctgcgtaacccatctccaccgaagactacctatctcacaacaacgacgaacgtgtcgctccaactactcacactgcacgctgtcagtctaccctgttgatgcgtcaaggaactcaagccgacgacggagatcacgatggagtacacttcccgtgaacggatgt

SEQ ID NO: 187816 - DNA, 403 bp, Arabidopsis thaliana
  unsure (1)..(403): unsure at all n locations
ccagctctatacgactcactatangnaaagctgtcgccctgcagtacggtccgaattccccggtcgaccacgcgtcggctttttttccagttgctttttgggttttcccattttccgggttttccgaattgcgactttggaacaaaattttaaattagggggccaaaaaaaaccacttttttgggggggtattttcgcggaaaaaaaaagggttgttttctccaaacgggtttcccccccccggaaaaccctttttttttttttttttttttggggaggggggttttttctctcttttaaccaaaaaaaaaaattttgtttttttttttttttcttttgaaaaagaccgccctctataaaaaaaaaaaaacgccggtggtttgttttttcttttttttttttt

SEQ ID NO: 187817 - DNA, 402 bp, Arabidopsis thaliana
  unsure (1)..(402): unsure at all n locations
tttccccatcttcctgggttctccggattgcgatcttggaactanatattgaatttanggggccaatcaaatcncanctgcttagggggggatattacggcggagaaaaaaatgggggttatggggggggcggggttttccccggctgggggaacctaaaaaaattctggccttctttgagggcaagggctaagcatccccttaaacctacaagaaaatgctccctgaaatcttcccttcagatcaggaaactaagcctaataataaaaaatccgcaagctgggtaagtatccctctaagaatcttttacaaatccaaagattacagagtccctttagcaaaaattttacaaaaattccaaatggaaaattggttaaagaaaggcgcttaacccttataaaa

SEQ ID NO: 187818 - DNA, 476 bp, Arabidopsis thaliana
  unsure (1)..(476): unsure at all n locations
cccaaaaaaaaaccccaccncanccccccgcaacagacagccaacgcgcccgcccccgccccccacccgccccgcaacacccccaacggcccctccctcggcccccataactcccacaaccacacccacacccacaaccacccccacccccaccacactctttttttttaaagggggggtgggaaaaacaccgacgctcacgacacctctataaaaaaaacacacctccatcttcactaatactcatttcganacactacagacaatacaatagtagaatcaatataccccccccccccccccccacaacgatcgtaaccaccacaccctacacctctcctatacccactctatcactactacctacttctgccacacccatcaagacctcctatcccaccagacacctcaaacactagttactttacacacttccgtcctacttccctcatcaccattacctccacacttctccc

SEQ ID NO: 187819 - DNA, 473 bp, Arabidopsis thaliana
  unsure (1)..(473): unsure at all n locations
ccccgcgcaggacccggcccgaaatacccggtccgacccacgcgtccgaaaggctacaacacaccacacggaacacgcggccgcggaggcgctatatcccatcatcggaccgcctaaccggaggcagacggccggcgctgcacccccccgaaacctccatcaaccaccatccgaccacacagagcacaaacctttttcttcgagagagggggcagagagcgagctgnggaggtcaaccgaagcacggaacaccccccgctgcacaaagcagaccaagcaccactaacccgcgcgcgacgcagacggagccaagactgcagaacaaaccacgccgacgaagcgcaaaaggtactaaccgacgcagcggggacgggccaaacagagaaaaacaagtgcgcgccggaacgagggaccaccccgatgggccgaaacgcaccagccaggcccggagcggcggcggaaagcaaggaaaa

SEQ ID NO: 187820 - DNA, 545 bp, Arabidopsis thaliana
  unsure (1)..(545): unsure at all n locations
cccccgggttttgggggggggaacacgagcccaagggaagagaaaanaaaaaaaaatttttttacnaggaagagaaaagccccccaaaaaaaaatttcctctcttttcccaccgtcttacatttttctattattctatatatttccttctttcatccaacccacctaaacccgctaacccatttaaatacagacacctgaaaaacacaaaacacaacaaacaagccacctttttttttttcaagaaagtaggcaaacaaaaaaaaacacagacctcacaacaaaaaacaacccccactactttcactcttttatcgccttctctcacacacccaagtagcaaaactacatcctataacctaccaacacataacaaataaatactaatacaacacccattaaaaaccaacacacatttactaaaaaaattattaatcaataacaccttctattatcatatacatcactaaattattatacactctaatataaaaaactctctctatacaatccttaacacataaattctaatcaacactatactaa

SEQ ID NO: 187821 - DNA, 505 bp, Arabidopsis thaliana
gcacgcctaccgaagcctggaacccctagagcgggcctccctggggggtatttttcttttttctacttctttaagatcatttgggggtactttttaatttctttggggtttacaaaaaaatagggggtcccccttccaaatcagggacccaaatattcccaccaccaaccatttggggcccaacctaaacaaaaaaacctctcatttgggggaggacccccccccccaaaagttttcccttattaaaatctcccccccttaaacaaaagacccacccaaaatccccctaattctgaaccacccccacaattccctccccccatctttttaatggccccccgagccccaaaaagggccctaaaaagggaatcggccccccacaaagggggttggcccacaagcgccgtgtccgggggggaaccccccccgacccaggggcggatttcctcccgagagacccaaagggggggagccccgggaagcgggggcttttttcccaagggtt

SEQ ID NO: 187822 - DNA, 500 bp, Arabidopsis thaliana
  unsure (1)..(500): unsure at all n locations
gcaggaaccggccggaaacccgggtcgacccagcgcggcaacctcggcggaaaagccccggttgttttgcgggagccggcgaagctctaggaagcgggaccccggcggggacacgcgacccaagcgaaacagacagccgagagcgaacaaacaacgcagcgggcaggctcctcacaattcctcgagagagaggggcgcggacggggaccaaaacaaccnccgagcaccgccacggaggaacccagggagagcccaagagacccagcaccaaacagaggaaggaaccggcccgccgcaagcacagaagcagccccgccgccggaggggcgagcacagagggccaacccaagaggagggacacaagaaggcccaggaagggaaacagggcccagacacagggagccggaaggcaaacaccgggaacccgaggccacggaccccccccgccaagagacccacacaggcacgcacagggagagagggcggggcccacaaggaca

SEQ ID NO: 187823 - DNA, 340 bp, Arabidopsis thaliana
gagattaagccaacgcgattcttcagggagaacgcgccatttttttggggtgtgggcgaccacgacggcgccgcccactacaaagaaaagtcattattgttttccattggctgtttatgatgcgagtgtgactcgtgtaacactactatacttatgatttgcgctcaggtggaggcccgatcactatatgatttccgcattcgctgcctctgcctatcgtgagtttcgcgttttatgtctagtctgggcacatgaacgagtaaagttggtgcatgaggccactgatggctcatgataacctcttgtgcttgttttgattcggttctattatttgcatgta

SEQ ID NO: 187824 - DNA, 512 bp, Arabidopsis thaliana
cccgaccgaagcccggaaccccgaaagggggccgtccccagggcgcggagaaccaaagaaacaaaccgcccacaacgaagaggccccaagcccacgtgcgaggaggaggacccaccgccccaacccaccaagagagagggaaccaaggggacacccgacgaagccaaagaaagccagggagaaacccacggggggcaacgctttttaaaagggggggaaaaggggccccacacccccagggaaaggcaaaaacgggccggggagggcgcaaaagaacacacaaaacggggaaagaaaagaaggcccaccagcggaaagagaaacaaaagcagcgaaacagagaaagcaaacaacacgggcagagacccacgggggaagcaagaggggaaaaccccggggaccccgcccccggcgagccgaaaaaccaacccagggagggggagcaaagcaaaaagaagcgccccggggggacggcacacggggggaaaaaagaaacaggcgacggggcacaa

SEQ ID NO: 187825 - DNA, 592 bp, Arabidopsis thaliana
cccccccccaaacacaccagccacaaacttccaccccctctttcccccccggggggcaagggggcacccaaaaacaaaaaaaatcctttccctcctcccacacctcctccacgatttctccctaatccataaccttcaccaaacaaacatttattttatctctttttacaccacccacaaaaacaaagcccgccccacttccagccaaacatatccacacccctattaaaacaaaatttttttttgggtggtggggccaatctccccggaggctcccctcaacaaccaccaaaattctcaaaaatactctccctcctcgctccgcgcgcccactctccacaaaacacaaaatctccacttatacccaaaataaccctaaacaacaagtctccgactcattatacatcctcacttaaaactctccaacaatccacctctcaaacataatatccctcctctatatatcaccaacatctcccacataaacataccccaatcatatttctcacaattttctcctaacaaatcactcccactcctattaaatcaaccacctcactcccaataccttactatttcactacacacacac

SEQ ID NO: 187826 - DNA, 507 bp, Arabidopsis thaliana
agggggcaggcacgcgtccgtaggctgggatcctttagagcggccgccctttttttttttttttttttttttttattcttttttttttttttgttttttttttttggttgggccccagggaatgggacaccccattttccggaaggagtcaacgggaaccttttccaggttaaaccaagaattttttccttttgggtgggaaaccttttttttgggggggattaaaaaagaggggggggccttagcttttttacttataaggccaggggccttttgcgccccattataaacgggctgggggggaagcaagcttttaacaaccctgaaatttatagacaggtccatggctcccggaacaggaattaagacttcttgtgtcccctttttggttttatttttaacggaagagggcacatttttttcctttttcgcatcaagaggtgggaggggacatatacaacctttcaaaggcttttggtatttttgggggggagccaacgaaacttt

SEQ ID NO: 187827 - DNA, 498 bp, Arabidopsis thaliana
ggaaggcagcgcccctgccaggaccgggcccgaatttccgggttgacccaagccttccaaaatggcgggtggagtgggttaatccttaaaaggagggagaccacggacccttatctcctcctggtccactgcattggtaaaattggtccttgataaggtttggaaccatataataagcatacttacactggtgggggaatttatgttgacacagatggatagccactcaaagcctatctttgaggggtttatatcaatggccattccatttgggctgtctaaaactaaaagtgaggagcagttgttacagattttggtgaaagtcttacctgatattgtggagcatagaaggcgttcaattgtagctcacttgctgggagttatcggtgaacgaaatggctggcctgcttggcttgtcctcttatttaagtctttgatttcaagaaaagactcagctgggcttggtaatgccaacgtttctgaaagttttgcttccat

SEQ ID NO: 187828 - DNA, 470 bp, Arabidopsis thaliana
  unsure (1)..(470): unsure at all n locations
cccattccggggaagaaccccccccccccgcgccccgtgaacaatttacagtttttcccccggggtagagggcggcaaataaaacacatctttcctcaaaaaagcgagaccaacccacacacattttttttcttttaacataaaataaaaacactaaactctctatcccgcgttcccaccaaaaatatacacctatttttaattcctcccccaaacccaattttttttggtgtggggaccncccccccacggcttctcttaaaaaaaaaaattaacaataggtcacattcccttctatcctcccaaaaatacaaaaacaacgacgtcccaccttctatacatttctataccacatctctacatcaccactctcgcacaataaaacacccactccccgaaccatctcttttttgtcccaaatcccgcaacaaaacatgactttacatactttattactttctctcttatat

SEQ ID NO: 187829 - DNA, 498 bp, Arabidopsis thaliana
gggaaggtgggacccctggcgggaccgggccgggatttacgggtgggaccaaggggtcggttgaccgggggtggaccttaaaatttctttggtccgagtttaatttgggaggtggccgaggcccttaaaaaaacctatgttattttggggaccccgatttttgggaatttggaattttttttttttaataggaaaacaggttttttttcatggaggttaaaggaggctgggtggcgactcggggttatggggcggacggagtcccaaaacttgaaggttaaggctttgttgttggatccaatcgttccctcgaaggttgggaagagagacttgaagttaagggggccccaagccggttttctacaagatctatggatggtaggaaaaccttggaagagaaaggagcggaccaccccgatgtggatgttgaggaggaacggttcatccgttcggtggaatgcctaactggccaggaggaggctacctttaggaacctcg

SEQ ID NO: 187830 - DNA, 468 bp, Arabidopsis thaliana
acgtcgcatgcacgcctacctaagcttggaatctgggtaggggccacccatgcccttttctttcatttggtgaaggcaaagaattcacttttcttggccaggtgaacccctattctccaaaccggtttgactgatcccttctccacaaaaaacaacggtacgtggtagattcataacagttcaacattgccacgaaggcaactctaccttgaatgagccttccaaggaatccaagccaactccggggataacgatggatgtcccttcaccgttgaagggatggtaaaattcctccgggaaaatgggggtacgttgaggcgatgaaaattaggctggcgggggccagggaacgacaacgctggtttgagtggcggttctatccaccaccggcttaacatcagacgcgtgatttttgctgaagttggaccacaacctgcctggttttctctgggcagccttaacggacta

SEQ ID NO: 187831 - DNA, 503 bp, Arabidopsis thaliana
  unsure (1)..(503): unsure at all n locations
cgcctgcaagtaccaagtccggaattcccgggctgacccacgcgtncaaccacgcgtncgcccacgcgtccggagacgcgtggagaagcgcccgcatgagccctggagccgaggcccatgcagatatcccgcgctcaaagaggcagaccctcgcatgagcgatccacaaaagatgaaagaaagcaaacaagcccgtaccctttccgagaggggaangccaaganagccaactccgtgaaccccagacccccgaagcacgggaaaccgacacccccgtgcaaaacgaaggcctgacccctgctgacaaacaccacacacaaacaagcctaaactccccgaaccccgcacgatagaaggaacccagaacccacacaaggcccgaaagaagacccagaaacggccccgacaagaacaagaaccaaacggaaaacccgaacccggaacaccaccacacccccccacgcaccacaagcccaacaacgggaaccaaggacccccgcaaa

SEQ ID NO: 187832 - DNA, 644 bp, Arabidopsis thaliana
  unsure (1)..(644): unsure at all n locations
cccctcctacttaatccttaaccccggctaggggcnaaaaatatttttttcctttttttaaaaaaaactctttttttttttggtaaaataacccccccactaaaaattccttttaaaaaccttatttcccaaaaaaaaacatttttgtcttttttttaaccctgggagcagttgtnanaaacccctcttccaaccaaaaaaactaaaaatccttctccttaanccttttttaaaaaaaaaaattcccaaaccacaaaaacccccttttcccctttttttaaaacaaaacctctttttttcccacaccttatttttatcgctttttaacccaccttgtgttttaaccttttccccctataaacaaaaatttgtccccttttttatttctctaaaaaaagaaacaaccaaaaaacacatttgcccccttgaaacattattatatccacaatgtttttcaaaaatcttttggaaattaactttagaaaaagaaccttcttctctctccaaataaaactcccccacaattttttttgttgaaaactttttaacccccccaccaacactttgaaatatttttttaaaccctcttatttaaaaaaaaaaaccttttctttttgaacctcttttcctcaccacccccgggg

SEQ ID NO: 187833 - DNA, 595 bp, Arabidopsis thaliana
aaaaaaaatctaataaaaacaaccccgagttgaaaagagaacaacacctcgacgaattaagtaaaaaacagttaaaacggggtaggcgagcaaacataatttgcactttgaagcggaggatagccaggcagagacatttctaaagtttccatacctcatatgaaacatatcttccacaacgaacgcggctcaagggcatctaagcggagcggacggtttttaatagatggtggggggagtaagcgagtagggagaaaagagcacaaacaactcccgacccgacaacaggatgcagaagacgatacgtgtggtctgcgtaagccaggtagaaaggccgcctcttgggagaagtatagatattccaaaaaggtagaaatcattattcttgtgtggggctcacagcatagataccgatagatgagataactaagagtggtggtcgatcacggtagcgttcgcatctctctaatctcgagtgttgcgctcagtctacccatcacaagcaataaattagaatcttctctgtagaggagagctaattctataatattgctttatcctttatagttctcgtgtaggtgtcggtacgctcccg

SEQ ID NO: 187834 - DNA, 466 bp, Arabidopsis thaliana
  unsure (1)..(466): unsure at all n locations
ccgcgccgtaagctaggatcctctagagcggctgcccggggggggaaaggcccaacaccaaaaaaatagcaaaaacgcgggggggaggtggcacaaaacagaaaaccggcgcaagaaaagaggagtgcggggcaccacgaggacgagaggagaagaggcccggcccggcggcacaccaacagacagcannncnttccctacaagagagtagggaacacaaacccgagacccnccgggaacgcgggaggaaaaaaagagggggggggggggaggccaacaggcaaacaggccccancaggagaaccaaaccagaacgcgacgaaacgaaacccggaggcggacggcaaacacaggaagcccacaaaggaacaccaccaaagngccgcgcgggggaccaacaccgagcggggcgcgagccaaggaacagggacacggcggcgacccggaccccgaagaaaaccgagag

SEQ ID NO: 187835 - DNA, 508 bp, Arabidopsis thaliana
cgccccgaaagcaaggagccgcaagagcggcctgcccaggaggggagagaccccgccacccaaactaacaaaaaaaaaaagggcacacaagcgaaaaaacgccgcccgacgcccaaaaaaacaaacagagcgaccccaggatacggacacccacacaaaccaacacacacgccaccagaagcccggcgagaaaacaaacacccctgagagggagatgaaggaaaacccgggaccacggccccggagcaagaaacgcacccacaaccgagagagcacaaaaaacccccccccacaacacaaaacaaaaaagcggaacacccaacgcccgcccaccgcgggcaaaggcaccccgcgcacagaccccccgggcacagcccaacccgcacaaggcaaggaaccacggaaacgaccgaacccaaaacgggaacaggaacaccaccaccagaccccggggaacccaaaagagccgaccccaccccccccccccggccaaccaacaccccccccc

SEQ ID NO: 187836 - DNA, 562 bp, Arabidopsis thaliana
  unsure (1)..(562): unsure at all n locations
cgccccgcagaccgggccggaagcccggggttcgcggggcggcgaaagcccggagcccaggcccacacagagagacggcacgcacccgccggcggaagaacaaaccggcggaaagagcgacgnacccgcgcacccagaacaacgacggccgaccgagggaaccccagaagcgagccggggacggcgagacccttcttttcaaagcgggggcagnacaaccagaccgggagccgcgccacgaaccaaacagaccgccccaaggggcgccggcgcgaccagcccagccgcacgagcacaacagcgcgagccaacgcgcgaaaggagaacgggggcccaccgagcccaggcgccgagagcaacaccgcaaaggagaaagccgggagaaagggggcgggaagacagccgaaaacccaaagacaacgagacacccgcggaagggcggcgcaccaccggagaggacacaccgcgacagacccagaaagcacgaggcgaacgccaaccgaagacccggcacaggcgaaccacacaagcgcgacagccgcagcgcgggcccgcaaggcac

SEQ ID NO: 187837 - DNA, 550 bp, Arabidopsis thaliana
cccgggttggggggggacagaacagagattaaggtagaatagtattcggagggggggggccgccggacacttccgggcctggcggacaacacaataaagtgtgcggtttatggttagcaagtcgccatgttaccccgcgcgcccttagctcttttcgattaagggatcacggcactttttgtagcggggtgggtgaagactactcggccgttaacacaacccctcaggctgactgggattgtcctaccaagctggtcacgccggactgccggcagaataaaaggctgagcacgacacaatgtgtagggggggcgggggagcccgaactaattaatattaaacggtaacatcaaagtgagcaccgcgctcgagtcgccacaacatccagccccaccccgccttcgtggagacgagagcaagtttgaggtcgagataccacagccgctgtgggcgaactccttgaccgccgtcatctctccctccctcccctcgccgggcgcgcaagggaaatgataggacggaaacggagacgtaacacaccagcaataaa

SEQ ID NO: 187838 - DNA, 109 bp, Arabidopsis thaliana
aggggagagggccctcacgagagctatgattacactcttttctccctggggggaggggcgttcaaataaaaatcctccattacttacccggacttaaaacaccacctcc

SEQ ID NO: 187839 - DNA, 321 bp, Arabidopsis thaliana
ggccgccagccgggaccacagagagggggcaggccgaagaagaacgcgggaaggagacccccaaaaacgacccccaggcgccgagcgacggacgaagcgggaaccgaacgaagcaaagacgacccgcagacagagaggaaagaagagcctgccttctaagagaggcagggggagaaagacaagagagagagaccgacgcaaaacggagacgacccgacggcgaagggagggggaccaccgcggacgcagcacgagcagacggaacagaaacagcagcgcggggaggagcgggagacgaagcagacaagggcgggagagggc

SEQ ID NO: 187840 - DNA, 487 bp, Arabidopsis thaliana
  unsure (1)..(487): unsure at all n locations
cacgcctgcaggtaccgggccggaattaattccctggtcgaggagctcactactcggcggccgcccttngaactctatgtctgctagtcttgcaagaacccgggaacgagctcattctaaaaaccaagcttcttaagcagttaacacacacaccccaaaaaaaaaactctcgccacaagaagggatcaagaatctttttttaggggggggaggaanacaccacacacaaacacacttagagcaaacagccgattttaaaagatggaaataccttcgcctcctcggcttaataaaagaaacaccccctagaacttcatctatgtcccaaagatccctagacccaacttaaaccgaattaacttcccaaaactcttggaaccagcaaaaaacaaaggcagttaggtcttgctaccactcaccaacaacgacatattcaaaaaaaaactccgcaccctgcttttttttttgcatatcccaaaatacatgt

SEQ ID NO: 187841 - DNA, 433 bp, Arabidopsis thaliana
cgcctgcaggtaccgggccggaattcccgggttcgcccacgcggccggggacgcgtgggtgatttatctctcgacgcctggcggtctgtttctaacacaagagcccagcagacagaataacaaactcgtcggactctaaccacccgaaaagaaactgagaaccacgtccggtcacaacgcaacaatgggatcaaatagcaactgttcttttcttaaggggggggaggacacaagatacactaccgtataacccctcaggaggggacttgctccactaacagacaccgtcgcgtcaacaagcccacccaatggtgtaaaaggtggtcctgagcgattaaaaataatgacctcaacgaacagggataggagttgcttctaaccgcgtaggccgcacgtggccgatcaaatctaccatgaacactcccagcccacg

SEQ ID NO: 187842 - DNA, 367 bp, Arabidopsis thaliana
accccctcccctttaggcgcggggagagagggataggacgagatagagagtaagataggaggggcttttagatgtagggttgcggacagacgaagagtgaagactccgagcggcagaggacatgagagggagtggtgcagccatggagccgctgtggcgagcgaacgagcaggcggggcggagcgcgcccaactggctacgactcggcgactgcacgacgcggacgctgatccgagaacagaactcttttgtaaggacgtggagcgcctggcacggcgcccaccacaagaaccacacaacatgaccacgacactcgcgagagaccgcgatgacccgctgcatcacacgatacagaaacacaaatcca

SEQ ID NO: 187843 - DNA, 383 bp, Arabidopsis thaliana
agaaaaaaagagaaaggctcatttattacaacccccaaggttgggggaggaaaaataaggagagagatagctccaactctggagtttttgtgagagggggggggggcggtgaattaaaatcatggcgcgcacgaaaaactaataacacatagttgtatcgtaagacactgatgaaattttggcgaattaggcgacacggaggcgttatatccacgtaccccgacacccaaccaacaaaccaccgtttttacaaaaaaagcgggaatacacgcccaaactcttactcctctccctattcccctatttcttgatactacgtagtgtcaaacaagagcacccgtggacacgctctattacgagaaaacttactatagcgaggtctc

SEQ ID NO: 187844 - DNA, 547 bp, Arabidopsis thaliana
aaaaaaaaagaggctcttttaaaaccccccttgaggagggaacacccagtttcctaaataaaaactttacaaagggggtaaggtaaaacatatgtgctgatcttatattttctttacccgcataatgaccaccacatccttacctgctacatagaatgtgcataaaatcgttcgctgtgaccaaatggcccatggtgttttttcatcaggggcgtcactccaaattaaaacctccctcatactaccctggctgaccccacgctctacattctctctccatcatttttcccccccatacgcccccacaccctagctcacgcaccacaccaccacggcgggctcagcgcccccattcggatagtgtaggactgatcacgaagcacgcgcggcctcccaccacccctcccactatcgacccgttatctcgctccccttcctcccctacccctctattcatcaccatagtctgtgaataatagatattagcacatgtcaccacagatctctcgtgttggtcgcaatatcatcattccgccctacctacatt

SEQ ID NO: 187845 - DNA, 483 bp, Arabidopsis thaliana
  unsure (1)..(483): unsure at all n locations
gcccggaagaggggggngggggagaaagcctctagggggggggaaaaccaagacgccaggacacccgaaagaggcagagatttttggacgaaaaggaaggaaggcaaacaaaactagagcagaaggaattgagcagacagaacgaatcagacagagggagagagagaagggaggcagaggcttcctcttagggggggggaggaaaggaggggcagagaggcaagacaagaggcgaaggcgggcgacggaagacggaacgaagccgagaaagaggaaagacaagcaggggggagccacagaagaggagacagagacgagaacagagcggacggagaaaagcgccgaaaacacaacaagagcaggaagaggcggcaggagcgagaggaggaagggcgggaaccggggggcggggaggaagctacgcgagcggaaaaccacggcggccgaacaagaaaaagaggaagaaagagaactaagaagaac

SEQ ID NO: 187846 - DNA, 512 bp, Arabidopsis thaliana
  unsure (1)..(512): unsure at all n locations
acgccccgaaagaaggaggggacaagacgttgacaggggggggaaaccccaccagggcgaagacgaccgcaaagcggcgcgcgttggccgccaaaggcggagggggcagcacngaaaanaacaaagcccaccacaacagaggncgggacgngacacagagcaacgaccgcggngccccganccggggacaacacaggaagcctgccgtccgagtaagtagggaaaagaaaaaccggggaggacaaaggagaaagagccgcaccgaacgggaggggacggccaacgccccccaagggaaaaggacaacgggcccgggcagccacgccgaaggagaacaggaccacgcccaacaccgcaagaacagcaaccgaaagcaaaaaggccaccgcgaagcaacacgagcaccacggacaaagagagaaagcccgacaaggaccaccaaaaaccgaaaaacaaaagcaacaccccgcacgggaccgccagcgaaaagaccagcggaaacccaccccccg

SEQ ID NO: 187847 - DNA, 486 bp, Arabidopsis thaliana
  unsure (1)..(486): unsure at all n locations
accccccgaaagcaaggaaacccaaaacccgtttcccccgagggagaggccgccaaaaaaaaaaccacaaaaccccacggggaccacttcccacccgcacgggcaccgacacccaaggaagcgaacaccggcaacacaactgaaccggaacaccaacaacaacgacccggggcgcgaccaaaaaaaaaaaaacaattctacaaagaggtggcgacacaacccgcgccacccacaaggaaaaaaccacccaaagagggcgggcgccgcgaacacccccccaagaaaggacaacccccaggcacaacccagcaacaaaagacaccccccccaacaaaacaaaacccccaccgggcaaaagcaaaagccacacccgaagnagagaccaaacccgacaccaaagacggccgcgacagcaccaaaacccagaaaaaacaaacaccccccccaccccccccccccaagganaggaccacaaacacccccccc

SEQ ID NO: 187848 - DNA, 229 bp, Arabidopsis thaliana
ggggggggcagagaaagaatatatttttagactggtcgtcgagtagcggaccacccccgagcaaccgcactcaatccccgggtcagcgccacggaacgcgctgcagccagcacagtcgccgccgcgtgcccaccacgaacagccaccagacgtcgagaggagatttttttcctcccgggggggacggaatacataatgagtagccgcaccaacaaacacgctcacagac

SEQ ID NO: 187849 - DNA, 450 bp, Arabidopsis thaliana
  unsure (1)..(450): unsure at all n locations
gagcggttttgccggggggggggaggggcccgccccacacaaacaaaacaanaaaccccacaaagaacaaagcccacccacagggagaggggaaaaaacgaggcacaccaaccaaaaagccctgncaaagaccccaaagcacgaaacagagcacccggggccgacaaaaaccagcatttttttaagggggggacaaaaaaccgccccccaccccaaccngaaaaaagaaaaaccgaaaccaaagagagccaccgaccccatcagaagcaaaaacccgggggccccaaaccccacaaaaacaacgagccccagggggaaggaggacccggggaacaaaacggggacccggggccgcaaggaagggaccacagaaaaaaaagggagcagcgggcagaccccagacccggagaaacaagaaccggccccgcgcgcacccgaggaggggggaaa

SEQ ID NO: 187850 - DNA, 487 bp, Arabidopsis thaliana
  unsure (1)..(487): unsure at all n locations
acgcacgccaacgcaagctcggaaacggagccgcggttaccaaagggggagcgggcaaccaagcccagnaccacaaacgcaaagcggaccagcaggccgagcacaagcgccccgcacccagaaanaaaggacgaccagaccgcacacagccgcccgcaccgacgaccccccagccagaaagcagagacacaaaaaggaccctgagagggggtaggaancaccaacccgggacaaaaaggaacacgcccgacagagccccagggcacgccaacccacgacccgggacggaaagagagcgacacaaccagacgcacgaggaagagggcccgccgagaccaccacccgcaaggaggaccggccaaaaccaccccacccaacgggcccccaacaacgggacaggacagaaccccacacaccaacccaagacccgcagagccagagcacccccacccccgccacggacagcaaagagaaacgacccaaagcc

SEQ ID NO: 187851 - DNA, 341 bp, Arabidopsis thaliana
  unsure (1)..(341): unsure at all n locations
ggaaccnggaaagacccttacgggggggggtaagaactcccaaacccaaaaacaaactaaaaaaggggggccctttacacaccggcgcgggacggtcccaaaaaaagacaggagaacggcctactctatccgacaccgtccgcgcacccgcgaacgacgacaccgccccccgcccaaagaccacaacccctccctaaaagtttagaaaaaacacaaaaggggaagacgagagaaaaacaacacccccccaaaaaaagggggagggggggccccccgccaagaaaagccgcaaaaggcagacggcccccgagcgcgccaccgcccgccgaacaaacaccccc

SEQ ID NO: 187852 - DNA, 146 bp, Arabidopsis thaliana
  unsure (1)..(146): unsure at all n locations
aaaaaaaaaagccctttttgggaacacacctccngtcttcaagggggatactgatccatctaataatcgcacgacagacaccttttattacggggaagggaccataaaataaaattctgtttttcattatatgtaatactgtggta

SEQ ID NO: 187853 - DNA, 404 bp, Arabidopsis thaliana
  unsure (1)..(404): unsure at all n locations
agaaagcgaggaagnaagcgccttcccggagcgggaaaaaccccncccaacaaaaaagaaaaggcacaacgcggaccgggcgaagacacaggcgggagggacangaaaaaccccagccgccggaccaagggccggcaaacgcaaacaacaaccgcacccagccacccagcaacaaaaaaaaaccaacgttccgtaaaaaaaagtaaggaacaaaaaccacgcccgcccccacgagcaaaaaaaaacggcccgagaaaagacgagaaagacgcgcgaacaacacccccacaagaacacccgacaaccgcgacggcaaagaagaccgaaaaagcgcacaaggaacaaggcagccgcacaacaccgcaaaaccgagcccaccgcccgccgacgacaacaccgaaccc

SEQ ID NO: 187854 - DNA, 526 bp, Arabidopsis thaliana
cccccgggagattgggtgactgtagtttttttgggggggggggctatgaatcatcattgcgaggtgttctgtttcgtcctccgatcggcatcatcccgatctcctctctttctgcgggcgcggcgggatggtcgagcacccaacttaagagtacatgcacacaaaaaaaattcttaaaaaaagggggacgcccggaagtggtatttatgtaactacatgggtattttaaacgatcgtgagtgcagtctttatgtttaatattatagctcgttcattgtgggcggtataagtgtaggttcagagacggcgccgccttgctctctgtcccctcgcgggtgtggtctgttgttatgcgcgtgttcccgtctcgtcgctcgtggtttgtggctgtaacgttttgtatttagttattggccgtcgccggccgcgctgggggggcggtcgatgttatagtctacttaccgctgcccgcccgtccttcttccgccctcccgcttccggcggggccgcggggccccctcagctc

SEQ ID NO: 187855 - DNA, 490 bp, Arabidopsis thaliana
  unsure (1)..(490): unsure at all n locations
cacgcgcacgcaagcgcggagactctatagcgcttgcgccgagacnacaaccccagagaagangggcanggcaangaagccaggcccgaaccacggaacaggaggcagccacaaaaggagcgcggaagaaaggaaaaaaaaacaacggacaggaagcgaaaagaaaaaaagaaccgaccgaggcgcgggaaaatttttttgttggggggtggacagcccacccacgggacacacacaaaaaaaaagaagcagcggcgctctaggcgcaaaccacgaaaagagtagagtgtttgcagcaacttccacccagaacaggaagaatagctccacacaaagaaagaggaaaagtgaccgacctcgacgaagtgccgggacaaacaggagagaccaacggttatgtagcaatccactccgcaacagaaaaaacacgcatcagacaacaacccccggcggcccccctgctgtcaaatgggggaaccacccaacaaac

SEQ ID NO: 187856 - DNA, 200 bp, Arabidopsis thaliana
aggaacagctcctgcaggttccgggtcccgattcgtaatctgccgacgagctcctactcgatgacaacctagaactgcagcacaacaagttctcagactacacctcttgccccgaacgagtaggacttgatgaagctgtttaaaccacccaagaatcactatcttttctccatctcagaaccaacttacaaaggcatttt

SEQ ID NO: 187857 - DNA, 502 bp, Arabidopsis thaliana
  unsure (1)..(502): unsure at all n locations
acgcggacgaaagcagggcaaccggacagcggctggccgggggggtagaggcgcaaaagangaaaaaccaaaaaaccacggggcagtttcccccgggacacgaaaaggaaccccagaaaagaacaaaagccccaactgtgagggaggaaaaaggaacaggcgccccccccgacggagaacacgccagagcaaaaaaaatccctcctaggagttgggaaacaaaacacccggcccgcaggaacaaaacagcaccagtaaaggcagggaaggcgggcaccaaggccaacaaaaacacaggcaacccgcgaagacagcgcggcgcggaaagataacagggccaacacacccggggaacgaggcgaacgcagagaaaaaacggggcgaggagacagccgggggcggcggaaaaaggaggcaacaagcagccgccagaccccaggaaaaagagcagcgcccgcccccccgcccccccgcggaaaaaaaaggggaaacgagacacccc

SEQ ID NO: 187858 - DNA, 306 bp, Arabidopsis thaliana
aaggggggaagaaaaaaaaaacgccaaggaaggacgagaaacggaagacaaaagacacaaaggacggccgcaacgccgcaacgagcacggacaccacggcacgaaggaaaaagcacgcacccgagcacgcaaaaaacaaccaagcacgacacaaccgcaaagacacaagaacaagagcgccccaaccgcgacgccacacaggacgccgcccagcaaaacacagaggaacccagaaagaagagcggccgccccgggcgaaaaagaggcgaaggaggaacagagagcgcacaaacgggcaggacaaga

SEQ ID NO: 187859 - DNA, 456 bp, Arabidopsis thaliana
  unsure (1)..(456): unsure at all n locations
cacagacaaaaaagacacggggcgcccggcccaccacacgggggaccgaacaaaaaaaaaacagagaaacccccggcgcagcggaacgcagagcagccaagcgcacagccccccagcacccccacccacacaacacaaaaccctccataaaagataggnaacaacaaacccccccagccacggaagcaaaaaacgccgccgaaacacagggagagagcgcccagaacccacacaacgagaggacacacgccgcccccgcccacccgccgcgcaaaacaacacacgccaccgagcgcacgaggccgcgcgaacgaaccagacacaacacgccggcaaaccacccgacccgagaaaaaaccaaagcacaacgaccacgacgcaaaacccgaaagaaaagcaaccgccccccccccccccgcccccccgccggagaagaaacgacagcaaaaaacaccc

SEQ ID NO: 187860 - DNA, 445 bp, Arabidopsis thaliana
  unsure (1)..(445): unsure at all n locations
cctagagcggctcccgggggggaaaaacccccgccccagcnaggngaaaaaacaagagaggaggntanaaaaaaaccggggacgaaacccacaaaacacccgacaccaaaaaagggtccccaacaaaaaaaagacccgggcaaagaaaaaccagaaaagaatatcgtggatgagaagaaaaaancagcgcgaaccaaagggaacaaagaggcccaaagggggggggaaggggacacccccaaggggggcaacccaaagcccaaaaccggacccggcaaaaacaccccaggcngcccgagcccaaggaccggagggaagaccggaacccaccaaaccgggcccggccgaaggagggaaccccaagcccagcggcgggcaccaagaccgggaacaaaggagcncccccccccgcaccccccccaccgaagcccggcaaggggaaaac

SEQ ID NO: 187861 - DNA, 465 bp, Arabidopsis thaliana
  unsure (1)..(465): unsure at all n locations
cgaagcaaggaancggancgagagttgaagagcgagaaacccagnggcggcncnncagancangacggcgcgaccgcccagcangaanaaggcggccgacgcacaaaaaggccccggagaccgcaacgacggnagcnccaccgcccgcagccaacgcgacccgagaaagacagcccgangcccctgcaagaagtcgaaacgaagnggaccagaagccgccagggaaagaggccaccggagacaaacgaagaacccaccaagagccaggcacccggaaccaaagaggcccgaaccgcagaaaaaaaccgaccacaggaaaacaaacacagacaccgaaacgcaccaaacgaaaccaaaaaaaaaaccacagccaccagagcggaaacaagcaccccaacgcaggcccggaaacaaaaaaaacacccccccccccccccacacaaaacaaacaaagggccgcccccc

SEQ ID NO: 187862 - DNA, 481 bp, Arabidopsis thaliana
aaggaccgggccggaaagaaaaccctggaaggagagcccaaaccacagcgggcggccccgaccaaaaacaagggccgaagacgaagacagaaaaagggggaaaaacaaaacaagcgcgaggggacaaaaagaccacaggggaacccgccaacgagaaaagggcgacaaccaacacaaaaaaaggacgttttttgggggggggggaaacgagggaaaaaaaccccaaccgaaagcaagccaaagccgggaacgcggcaaaaaaaaagagagaaacacccaccccaaaggcccggggggcaaggggaaccaaacgaacggggaccgagcgaacgggacgggagacaaccaaaaggggaaacgagaacaccaggcagagagcaaagcgggaaacaatacccggaggccaaagagaggcacgcgacacacgggaacccgggaacaaacagcacgacaaagacaaagaggccgaaccagaaaagac

SEQ ID NO: 187863 - DNA, 528 bp, Arabidopsis thaliana
  unsure (1)..(528): unsure at all n locations
ggcgcccgcaggaacccggcccgaattaaaacctcgggcgacgagctgcacacntcggcggccgcccttcttttttttttttgtgctctttataagggcctaacgaacagaagcactaaaaccgtagcattataccaattcaaaacaggaaaactgcctaagctaggcgcaccactcaccttaacaagaaacaactctttttcttataagagggaaaaacgcgcccaaaaaaaccagacggcaccaccaggtctacaagactcagtagtcccagctgattagaaatacactctcaaacgcctgggaaaactgagggggctctgacaaagcattgctataagccctagtccacattttgaacgtaaacaaactctcgccctcaaataaaataaaaaaaccttcaccattataagaagccaaaactacgttatctggcctcgacctcatcaacaggagccctgtctccatgcctcgtacgcaaatcggatatgagacaccacccacctagaaccgctctctcgaggggac

SEQ ID NO: 187864 - DNA, 358 bp, Arabidopsis thaliana
ggccccaattcggagacgcacgacgttgcactcactgcctacggttatcacttctgtctgttggtaaaggctctaaaataaaatgatcggtgtcgctgtcgtggcacttatacagtattataccactaaaaaaagttacgacattatcgtaatcaagcagccgcaggatatagtaaatctccacctatcgacgacacgccgcacgcgagaagccctttctccatatcacggagatcagcaaacgacacctcgccttcatctctctcgcaaacacagctccaccaccgactcactcgacgcgccgttgacgccagccggagagagaccgagaggcagtacacgatgctggcgtactggg

SEQ ID NO: 187865 - DNA, 307 bp, Arabidopsis thaliana
gctttgggcgcggggtgtatttcgtgttcgggagcgctgtgcgagggggtcgttttagtcgagagggttgtcagtcgtcaaaaaccaaattgtgagtcgaccagaacgcgggcagtgtggccagcgactcttattatcgccgagagcgcgtctgctccgccgcccacctcatctcaggcttcctctgttgatacgggatgtgggtgtaagccgcgagtccgcggccgttccgtgcttttcattaccagcgtggtgcgacactccatgagcgtggtgacggaaatacaagagggctgaagagggtatt

SEQ ID NO: 187866 - DNA, 579 bp, Arabidopsis thaliana
ggggaggaacagcgggtggatagtgagagggagcgattttttgcatcggggttggtggcacaaacaaatgtgattcggtcggtgctattgtcagtaagattataagagcaagggttgtgtgtaaggagatgcattgctagttattgtattcgtggatgtatgttgttgagtccggtagataaaagtttttgaacagaagtgggaatatatatcgacatcagttagacttttttttatgcagatggaagagcagtcatgattggagttggaaactatcatcgacagagtagcagcgtcagatatagtagccatattagagttctggcgagggttgagtgtagcattatgatcgacgtcgattttcggttctcttagttaactgtcataggattatacaaggagtgtaactttgcctttgatgcgtggcacccggcgcgccgccggcatgtgttgggtgtttgtacggattctagactgcgtgcgtatggagtagcaactaggtatgcgttgcatgtgtttagtgttagagcagtgtagagagtttgatgattaagtacgagtgttttagacacgagagtg

SEQ ID NO: 187867 - DNA, 573 bp, Arabidopsis thaliana
cgggtgcgcgcatacgcacaccagatatgtccggagccaactgcagccacgaaacctcctcccgaacagcaaagtcgccaactgtaggcgtgtcaaaccgcaggcgacgtgtcggctaccccgccggtgcgcacagaagaagaccggaggacgacgaactgtctttttgtcccgcggaggtgtggcgagccgttctggcgatcagaaccacagcagcctgtctagaccagcgcgacgcacacgcgcagaagaaaagaggcgtaacaccaaacacaatcgcgcggacgggagagtcgcggtatggcgggacggacgtcgtcaagaggtgttgggtggtgagatagattaccaggatgagggggagagagaggatattgaggtcgatagccaggcgcgtctgtatcctagcgccctgagttcgtgctcgacgccccccaaccacacaagaaaacgcgaatcaacgccagacgagccgccgcgaggccacagagcgaagcgcgcagaaactgttacgagctatgcatcacccacagcgagctagataggccccgcccggtcccgggcgcacgccga

SEQ ID NO: 187868 - DNA, 165 bp, Arabidopsis thaliana
agaggcgagagaggggatatggattgggggctgtagatgggttagaagtggggaggtaggctgaaaaaagaaggagcgtggagatatacaatttatttgaaacaaaggactagaagaaaattgtttagtgtagttgtacgcctaaatgcgggagatgatatcaga

SEQ ID NO: 187869 - DNA, 416 bp, Arabidopsis thaliana
  unsure (1)..(416): unsure at all n locations
agcaacccaaccgggcccagcgaaacgcgccccgacgacgcaaccccggaaaaggaaaacagccggcgaggacgcncgccaacgaggccgcccaggcccccccgcacccgccacaagaacccaaaacccctcaaggaagttgggaaaaaacccccgcgcccaccaccccaaaaaacgcaccaaaaaaagggggcgcggaaacaaccaccccacacccgccgcgaggcacagacaacacccgcaccagaaaagccccccccgcaaaccgccacacccccacgccccaaagaacacgccccgaacccaagaggggccgaccccgagaagacaacccacccgccacgaccaaaaccccaaaaaaacagcagccccccccccgcccccccccggaagaaagaagcacaacacaacccccc

SEQ ID NO: 187870 - DNA, 407 bp, Arabidopsis thaliana
  unsure (1)..(407): unsure at all n locations
ccgaggtgaaggggagaaaaanaatcttcagggaggaaaaacccaaacccgccccaccggagacaccggggagtctccgaaacgaggagagagccaaagcacgacgccgccgcgggcaaaaaccgaagcacgaagccgccagagcggaggaggaagacttttttaggggggaaaaaaacgcgaacggcgcaagcagcctacagccggagagcagggggacagtctacaatgcagtgatcacaacacacgcacacgggacgcgcagacgaataagacggccggcaaacgcggacacgcaaaccaacgaaattggccagaatgtgggagtggaaaaaagaggggccgtgcttacaaatacggcaacacaaaaagacaagggaagaactcatgccggccacggacaaacc

SEQ ID NO: 187871 - DNA, 457 bp, Arabidopsis thaliana
  unsure (1)..(457): unsure at all n locations
ggcgcggtggggggggggggggggggtttctggggggggggaaaaccccgagcggcggacgcggggagggcgggcggcgggggggcctttctggcgancatttggggtggctgtgatggtggcatccgcgccgtctggcgggccgttgatgggcgaggggtggcggcggtaggtgtcgtggggggtgcgagcgagcccgtgggcgtttgggtgttttttttttttgggggggggtggcgggaggggggagaggcgcagtgagtgcgtggcgagtgggacgccggtgtgggatgcgcggacgcgttctgagttgcttccgtgtgggcggcgctgtgtggcttcgacgtgaacgtgtaatgtgcggtcgtcggttgggggggggcatgatggggcggacggtggtcttgggtgtgtgcgctgtgttgtttttgcttttaatagcacttgtgagcatgcg

SEQ ID NO: 187872 - DNA, 488 bp, Arabidopsis thaliana
  unsure (1)..(488): unsure at all n locations
cgcgtacgtaagctcggaatnnggntcgagctttacagggaggctaagaaccctcccaccctgagtaaaaggcgaaactaccgccctcgcttacaaagccacggggggtccaataatggacaaaccgaaaaacaccatctttgcagagctggtacacaccattcggagaagaacgacaccgaacccaaaaccaatttcttcttgggggggcgacaaaaacaagccccccaaccgaaagaaaaacccgcctgacgacttgaaatcccccaacaaaggaataactggaccactttcatccacacttatccaccggaacataaaaacccacatcacagccaaactacacccccaacaaaaaagacaccccacccccgcgaacctagggcgtgccccccataaacttatcaacgacatgcaaccaccacaaccccgaagaacatagaataatcgcgcccaccccgccccccaccctcggcctcacagaacac

SEQ ID NO: 187873 - DNA, 387 bp, Arabidopsis thaliana
gcacaagaaaggctattaaacaaccccaatttagagggggcacttccccctaccaaatacaacttcttttattaagggtagggggttaaataattctccccccgcgatactctcacactccctcttctcacatcttatataatcctttctttatttttctctttttctccgctccaccataatcatctaggtccaaaccaccaacaaacatatttcccactatttttcacatatttttattatttcgttggggggggcgacaacaccactatcctccaccgacccctaataaaactcccacaccccatcccagcccaatcatctatcgacctgcatatcacctgtaatccagcaaaattcttctatacataacaaattaatacactt

SEQ ID NO: 187874 - DNA, 425 bp, Arabidopsis thaliana
  unsure (1)..(425): unsure at all n locations
cgaagcaggaagnggcaaagcttaccgggggaaaaccgccacacaaaaaaacaagaacccggaccttaccacccgcggcggcgccaaaaaaaaagccgaaaagcaaggcaaggccgcacaccgcagagagacgacggcgccccccacaaaaaaaaaagctcctggggtgggaaaaaaacaaacccacagcacacaaaaaaaaacccaaaaaaaaacaaaacgcgacaccaaagaccaacacggacaacaccccaccccaccacacaccaaaagaaccaacccaaaaacaccaccaccccggcgccaaaaaaggaaccaacccaaaaaggagccaaccagagagaaaccacgaaacaccccgacccaaccccaaaaaaaaagacgccccaccccccccacgcgccgcaacgccacaaccaacaccc

SEQ ID NO: 187875 - DNA, 346 bp, Arabidopsis thaliana
aaaaaaaaaaacctctttttaaaaacccccccctcttaggacgagggaaataagaccgcggcatccaaccgctgaaagcagtttaacgcggggggtgggggcggcaaaaaaaacaccggcgattactcggcagttcaagatgatggtatatgactacgcggtctcctctgcggacgagccaccgtatccgagcggacgcgtctcacccaggtgcccgtttcaatcgctacagttgccgattcggaaagttattcttgagacaggggggcggcacagcctacaccgattagacaccgacaaaaaatatgtctagacgcatctattagtggttaatagattaggcagt

SEQ ID NO: 187876 - DNA, 491 bp, Arabidopsis thaliana
  unsure (1)..(491): unsure at all n locations
cgcgcacgtaagctcggaancggcccgagggtaacgaaggccagaaccaggacgggacggccccnaggagcgagacagacaatgagctagatcgccacagccacacagacggaaacacaacgcatgacccccagataggacgccggaagaagcccacgggcccggaaggaccgcccgagcaagcaagtcctcctcgggtgggaccagcgganaaaggagcgaagacggcgggaccgcggcaccgggaaccaccaccggccaccacaacaaggagaccccgcgcgcggaaaccaccacccgaaaagcccccccaagaaaaccaccgccgggaggcgccaagggagcccgccgaccgggccaacagaacccgagccccaagcaaaccgagcggcgccacaaaccaccaaagcacgcacaccccaaaacaccaaaaggaggcgcaccccccccccccccccgccccccacacagaagaacaccccgccaaaaca

SEQ ID NO: 187877 - DNA, 495 bp, Arabidopsis thaliana
  unsure (1)..(495): unsure at all n locations
cgaaagcanggaanccggnaagagcctagaagggggacgaagacacacaggacccaccaccacagaaagagaggcaagagcgcngcacgcagaggaggaacccccacaaacaaaaacaaaaagcgggacaccacagacgcaggagaagaaaccggcggagcccccaaccgccccacccagaaaaaaaacccctgcctggacgtagaagaaaaaagaaccacgcgaaccacagccaaaagacaaccccccccgagagaaggcagaagaggacacccccccaagccagagaccaccccccggaacccccaccaggaaccccggggaaaaaaaccacggaccaaaaagaaacaaaagacacaaccgaggaaacaaaagccgagcaagcggaaaagaaacgcacgggggacaaaacaaccaaagcggcgccaccgagacccgagaaaagaaaaagaaacccccccgcaccaccgaaaaaaaggaaacaacaacccaacc

SEQ ID NO: 187878 - DNA, 457 bp, Arabidopsis thaliana
  unsure (1)..(457): unsure at all n locations
aacccccccccccngccaaaggaaacaagccccacccacgagacccccggcacagccccaagaaaagccgaaacggcccgaggcaggcaaccacgaagcggccggggcagccgagccagccggcagaaacacaaaaatttttttcggggggggcacaaaaacacccgcgcgcccccccgccgaaaaaacccccccaaaaacgaaacccgacggccccgacccgcgccaaaacgnacaaccanacagggcccagggacccacgccgccggcgaaaagaaaaccgcccccaacccaccgaaaaccccccaccccgacacaaccagacgccgaggacgaccacacggacaagacagacccgaagaaaaaaagacccacaacgcccacgcgccaaacccccgaaaaagagggagacgggcccccccacgcccccagggcggaaaacagaaccaaaccaacc

SEQ ID NO: 187879 - DNA, 470 bp, Arabidopsis thaliana
aaaaaaaaaaacaagcctatttgtgaaaacccccccccttagagggagaaagaagggagataagagaggaaaaaagaaggtttcgaggggggggggggggacggcattgaagaggtcacagtaaatgaaggggaccgagaccgatggcccaatgacgccacagccaagcacaagggccgtccacacaaggtggcttgcgatcgatcctgcgttcgacgccagccagagcagcacaagatagcgtttttacacccagcggggggaccacgcgcccagcgaggaacacacacacgataacaccaaacagcgaagacaaattcaatggttacccactcaatatcatatgttcctctatactacatgcgcgcgcacacctccttattgacgacatattcagtgaccaccaccccgccaacaacatgaagtcgagtaagcgcggatcacatacccaatatgcttgatggggtacg

SEQ ID NO: 187880 - DNA, 443 bp, Arabidopsis thaliana
  unsure (1)..(443): unsure at all n locations
gagctttctctgggggcaacaaagccaaaaaaagccnngcaacagaaaaacaaggcgggagaatcggccacagaaacaaaaaacggaaaggaaaacccacaacgcaccaggacagaggaggcacagcacggacccncaaggaacaangggaaggccgaagcaaagattcctgcttgagggtgtagactcatcaacaggtcggctccccgaagtaaaacccaccacggagccaagcacccatggaggctcgacctataattcgttcaaaagacaaggccgctggagaatctcatcggatctcaaccgctcgctttaaaccgaaccctcctcctctctccgaatggaatccggaaaagcctgctcggaattctttcccttttgcatgcaaagacagagttcccacagctcatcccgatttaaacccacccgaacttcaggatccc

SEQ ID NO: 187881 - DNA, 501 bp, Arabidopsis thaliana
ggcgcccgcgcgggcaccggccggattatacctttgggcgacgagagcactctactgagggggcgctcttttttttttttttttttcccataatacgaaacacagattataatccccaaccccaaataaaaaaagatctgacgacaaaaaccaacacagccgtgagctcaaccacgaagaaaaaaaaaaaattttttttttgggagaaaaacaaaacccagacaacaacaacaccaccaccagcccgcctcatcttattacaatcagttcaaaagaaacgtatcccccctcaacaacaagaggcttgctccgaaagaaaaacctcctccccaaaacccgcgtaaaaaacccatactcgttacaaaagattacaaaagcacatcccctcggcaaaaaagcaccctaaatggctagagaaaaaatgacaccatccctttgtaccattccaacatgcggaaaaaaaacacttgaacagaactggataaaaaccccatacccaac

SEQ ID NO: 187882 - DNA, 446 bp, Arabidopsis thaliana
  unsure (1)..(446): unsure at all n locations
aaaaaaaacaaccaacccaccagggggcgccgagtttgggcccgcgcacgagggacacgcccccaaaaaaaaaaaccaagcccaaactcctgaaggggcaccacatccgagcacgacacgggacgcgggccaaaaaacaagaaaaaaccgtgcggggagtggggaaaaaaacccccgcccgcagaaaaaaaaaccccaccaaagaggggggaggggagcaccccaccggggaacggaacancgacacaggggcacgccagagcggaggaggggcggcgcgccccgagagagagcgcacaggacagcaacgcggaccaagccacagggcaacagcccaacggcagaccacgccggacacaacgaacgggacagcacgaccgagaccgcaggaaaacccacccccccccccccccccccggccacaaaagagaaaaacacacaccccc

SEQ ID NO: 187883 - DNA, 501 bp, Arabidopsis thaliana
  unsure (1)..(501): unsure at all n locations
agcaaggagccncaaaagcggttgcccggggggggagagacggcnaaaaacnananaccaaannaaagggggacaaactaaccccgcgccagggcccagcgcacaggaaaaaaacnaagcccaaaaaccgaaacacggaacccgacccgcccaagacagaggagcccgacgcgacaaaaacacaaaaccctcctgcagagagtagagaaaaaaaaaccccccgacaaccgaaggaaaaaacgggccctaaacagggggggcggccaccacccccacatcggaaaggacacaaggccagcgggacggcagcaaaaaaaggaaacgcgcccgaaaaggcccaaagacgcgcccccgaaaaaagaaacggccccccgcgcagaggcgcccacgaccccccgcacacaaaccaaccccacgaccacgccccagaaacccagaaaaaaacagacaccccgcaccccccccgcccccaggccaaaacacaagcccggccacaccccc

SEQ ID NO: 187884 - DNA, 549 bp, Arabidopsis thaliana
  unsure (1)..(549): unsure at all n locations
ggggtgnggggggggaccgccccacgacgggggagatatggtgtactttccgggggccgggggccgtaaccaactcccccccccctcccgccccctcgtcaccccccgagacggcgtggcgcggcgcacgggggtgcctaggcgtgggagcgcccaccccccccggagagtgcgaacgcaggacagcttttttcgccggtggggggggacgccaccgcccccctcgccaaaaaaaccccccccccgcccccccgcctcaccgcacgccaggacaacgccccccccaccgcgccccgccccggcgcccgcgccggccgggggggcgggagcgacgctggggcgggaagcaacaaaagagagagaccggactggggcgcctgactagcccattgagggtggtgagcgcgacgccgcgcggcgcccgctggcgcccgctgctcgacgccccacccctccccccgtggaggcgttgcaagccacagcctcccgcccgcccgcacgccgccccggcgccgcccccgccggcgcggccccccccccctccggccc

SEQ ID NO: 187885 - DNA, 371 bp, Arabidopsis thaliana
  unsure (1)..(371): unsure at all n locations
cacgcctacgaaagctaggagcctggacagcggtttccccggggggggagggccgncgaaacaaaaatcacaccccacccgggggggaatttccgggcaaacaacaacccccgtaaggaaaaacaggagcgccagccccacgaaagcagctaactccacaaagccgggcgccgcgcgccacgaagaaaanagcacgcggctcctgaatgcaagttggagaaaaaccccccaacccnnccccaaggcggccacaacaaccaacagcgggccggggagaagccccccgccgcgggcgacggccaaaaaaaaaccacgccggcaaaaacacccgcccgcggaagaagaaacccagcccggagcgacccaaccgg

SEQ ID NO: 187886 - DNA, 458 bp, Arabidopsis thaliana
  unsure (1)..(458): unsure at all n locations
agggggacgattttggaaacacaagggggccgcgcccccgaaaaaaaagaacggaaccgccgacataacaggggaggcaacagacgcaccacgcggggaagcggggcgcggcaggatttaanctctcctgcaaaaaagttagaaaaaacaacccaggcccgcgcgaagcgaaaaaaaaccccccccaaggggagggggagggagagccgccccaccaaggcaaaccaaaggcgcccaagagcacccccagacccaacgaaccgccggaaacagaccccgcggcagaagagggaaggcaaaggacccgcacngggccggcgcgcgaaggggcgccaaccgacacgcggaggccgcgaggagaaaaagaccaacaacacccacccaccagaaacccggagaggaaagggggccgcccgcccccccacgccccaagaaagagagaaaacaaaaaagaaccc

SEQ ID NO: 187887 - DNA, 410 bp, Arabidopsis thaliana
  unsure (1)..(410): unsure at all n locations
gaggggcaggagaaaagcctcaggggggggaaaaccagcagggacaagcgcaggggaggggaaccggggcaaggggagaagcgacagaacaggcgggagaagagcggacgggggagaaaaaaacgcgaaagagcaagcagggcggggagggagacccgcttaaaaaggggggaaanaacagcgcggagcccgggcaagggaggggaggggggaggggaggggagcacagacaaagagaaggacgacagagcggcgcgaagagccgggcgggcgccgaggaggcggaggaagagaggcggcaggaacggcggaagcagaagagaccaacgcgggaccgcaggcgacgacacgcggagcaggcgacaggagaaggagcgggcgaacgaagcgaagacagggcgggacgcacc

SEQ ID NO: 187888 - DNA, 562 bp, Arabidopsis thaliana
cccggggggttgggggggggggaccggagacaggagaagatagaagtcagacacaccttttaacgagggggggggaccgcttctcttatatacacaacccacaagaacagcagataaaaactcacgaactccattatatgttactgccgaacttgtaaaattttcctagcgtcttacccatcagacgtatgtggtttcataactggctacggcgaaaagaaacttttttatccggggggggaggggaagacacaggctatatcgactgaccttaaaaattatcaccctagacggtgataaaatagaagagtggcagcaagtaggcgtcattcaggaagcgagataagagcaccgaacgtgagcgagggaattacttcgtcgtagaatggcgattgttaatatgtattaaataaacaaacgaaaagaaagaaagaagaagaatgaaagagatacgataattgcgatagacgacagccaaggtcaacaaagtagaataacaaaatctaagcacagacatacatatgaggatgttatatgtaatattcatatactgttctctgat

SEQ ID NO: 187889 - DNA, 492 bp, Arabidopsis thaliana
  unsure (1)..(492): unsure at all n locations
cgcgcaagcacggaagcncgaaagagccctgacagggcgagcaaaaaccagcgagcgcgagcgacncagaggaaacccggggcaacctgcagcgccccacgcggggacacacaggacaaagacaaacgacagccccgcacaaggacgagcaaacaccaacggacgcgggacgcgcaccccaccacaaagacactgccttcgtgaagaaggaaganaaccccacggcgacacagacaagaacaggcgcccaaaaggacgccggcaagcagagacacaagaaaagaaggacgccacggcaccccgcaaaggaacaggggccaacacacccgccgcagaagcaggcgccaggcgcgcacaaccgggcacccacaaaccgccgcccgacaggagccggacagaaggaccgaacacagaggcacccaaaacaccaagaccaacagaacaccgccccacccccaccccgccacaaaggccccgcaagaaacaaccccc

SEQ ID NO: 187890 - DNA, 441 bp, Arabidopsis thaliana
agccccgaggggggtggtgaggggacttttttaggggggaggggccgcaaaagtttaatcaatatgatctatagtaacacagttgaagatcgcgaggaatttaaagaggagagctgtagtacacaggttagagcataggtttaaatacatattgcgagtgtagggacgatgacacttttttaaaaacggggggagacaaaatacgaaaagcaaagcacaaagtatgtaacccaaaaagtgaagggtcatgtttgttgcggtcgcgaggggcgcgagtaaaagatgatgcacgtaacgagacacaccgctgaataaccagtaatcggatagtagggaatgaggcaggggagcgggtatgactgggaggaggtcgtcacgcgctgctaggccgtggatcggtcgcactaaaacaatcacactcagataaaaactaaatcaaaa

SEQ ID NO: 187891 - DNA, 547 bp, Arabidopsis thaliana
  unsure (1)..(547): unsure at all n locations
ggggggggggacccacagggagatgtgangttttgttgggcttttcgttgaggggggagggcggggtaaaaacaatcttcctcgtcccttaggaaggaattgtatagatgtgcgtcgatgtttgttttcaccttttctaagatgtccgaacgcctcctgacaaatattaaacctacagattaagtaacacgcaatcagccaccctctcttctaaagggatgttgggcacacgcccccacataccgctcgcccaaaaccagcccccccacttacgaaatgaagcggaacgcgtcttgagaagaaatgctgtatgcctaaacataaaaataaaattcgaattgctacaaaagtcgaagatgtgggtgccatataataccccacaatatatctgaccagctcgatatatccctatatctatgttcccaccccccacagcactttcgctctacttgattgccctcatcccacaccccgcctacaattattatttattctcctcacctgaccacaccggtgagagacgatgctccatcctgaatcccttcgt

SEQ ID NO: 187892 - DNA, 464 bp, Arabidopsis thaliana
ccccgggttggggggggaaccggcgcagttgggattgctagccaattttaaccagggggggggctattaactcacatcctgccgcatcgttacgggcgcagacatttgaagagatagagacaggaataagtgaatttcgcagacggaaatgtatgacaaatgccagctacatacaataaccaaaagggttttttttctgtgggggggggcccagtcacgtatagaaagcgataaaaacgcctatacatatactaaaaggaagccaaaaaatttgtaagtttcggtggtaaacaagaaactttatacttcccttatgtaaattaatcaatatacgacaggggaataaattctaccataaataacaagactcaagacgacccaccaccatagctatcccacaatatccataatcacgcttcctccgcaacgatagcaacccctacacccgcattccagcctatatg

SEQ ID NO: 187893 - DNA, 609 bp, Arabidopsis thaliana
  unsure (1)..(609): unsure at all n locations
acccccgggttgngagggggggaaccgagcctgaagaggtgtgtgtagtagctatttttgcttccaggggtggcgtacctaaccattgcgtatttacatcaactctcaaaaaaatattgtgatcacacacgttaaatcataagaatactacaacccgcgcaaccacgcacgcccgcccggcaaacgccacccgaacagacaaaccttttttctatcttgggggggggaacgacaacagacacaatttcccctctacacacctctcggattatcctcacctccgcgcacactccccaccccacatcgcccctccaaaatatcctcatacagtaacacgccacccaaatgtgtgttgctttattttcctacaaaattagtcggaagaacaccaggggcacttttagaatagatcctcctcagtataaacacatgtatgttcagctaccatcttcgctcagcctttaatcatttattcccattattccattatccatcacacacacattagacttcaccaacactctcgcccactctctgaacgtccatataaaccggtcggcaccaatctgcactaatcgaccttgacactcatcaaaacttgatgcttac

SEQ ID NO: 187894 - DNA, 535 bp, Arabidopsis thaliana
cgcccgccctttttttttttttttatttttgaacgcaattaaaaatatatttaagacctcattacttatccccaatttttaataaccttgtatcattgacttgaaataacaatggctttttagtacatttttatcaaatggggaggggtttcttactaagaggggtgggagaaaaaaaaaccccttcctctccggtgtgcacgggctctcgaaaatgaagtgcaatattggaaatcaggcggcgcaaagaatattagaccgcagctaatggagacgggcaattgtacgagaacagcgcagagagaacaaagaacccagaacgtgcacatgaccacccccccacgcactgacgcaaggcgacctacaaggctacggtagcagctccagtctactaaggctcgattcacatgtcgagtagagctacctaaaagtacccctcacaaggcctggttattagcattgctctcaatcgtaagacaccacatatgatagcagaaagagcataagatagaaaacagcgaaacagaaaaaaaaa

SEQ ID NO: 187895 - DNA, 497 bp, Arabidopsis thaliana
acgcctgccaggaccgggccggaaataacggctttgacggcgaggccaattcgccgggggcggccttttgttttttttctgggtgggaaggaggcaacctgaaggcgaaacccctaagttgtcttaggattaaatgaaggttccaaaaggcaaaccgttggcggggagatcttaaggagcctagccacagaaaaacgaatttttttttttgaggggggggcaaacgcaggccggcaaaaccggccggagaaagccggcgcacagatcgcccggggggggaggcgcggacccaagcaggcaggagaaagcaaccagagcctcggagggacgggaaaggaagcacaggcaaaacgcgggccctcggcaggaaagacaaacccacggggaccagggaaaaagaaggaagacgcgaagaagggagagaggggggaaggggagcccaaagaggcggggggggagcgcccaaacggaacgacaaaacaagcgcgcgacccgag

SEQ ID NO: 187896 - DNA, 342 bp, Arabidopsis thaliana
  unsure (1)..(342): unsure at all n locations
agcnngganccacgagagcggttgcccggggggagaaagcccanncgaggaggngacaacgcnggacgggacaacgaaaggaaacacgcaggggagcncacagaaaaaaaaagccgagggaggacaaagacnagacgaagcagaggaggacacgngaggaaannagagaggcccccngtgttctcttgaagttggcaacaancncaggagggaccgggagaacacccgggcgccnacaagaagacaagggccgggccccaaggcgggcaccgaaacgcaacncgcggaacccacagagagaagaacccaagcgggccncgagggggaacagcagccacaacg

SEQ ID NO: 187897 - DNA, 189 bp, Arabidopsis thaliana
  unsure (1)..(189): unsure at all n locations
cgcctgcaagtaccggggcggaatnnccgggttgacccacgcgggagacgccttctacccaaacggacacaccggcaagaggcccacttacctgagnactccggattgcgagcttggtaactagatcttggagttagggtgccaatcaaatcgcagctgctaggggggggtacaaggcggaaaaaaaaa

SEQ ID NO: 187898 - DNA, 496 bp, Arabidopsis thaliana
  unsure (1)..(496): unsure at all n locations
cccccacgnaagcnnggaacctcnaaagcggctcnccggggggggtgaggcccccaaacacaccanannannnnannaaccgcgcccattaacggccccgaggagcgccgcccacaaaaaacatcggcagaccgagaaccttttgngccgngaggaagagaaacccgcacccgacagcgacccacccccaccaagccccaccccccctccaaggcagtntggaccaaaaaagcgccnnaccacagcccaagaaaaaaccccaaagagcagccgcggcaggccanccgccagcccccgagagccccaacccccaggcaagaccccagcccgcggccagaaggcagaaagcccccggcgcaacaaacccgcccccgccggggcgccacccgggcgggacccccaacggcacacgcacaaccccgccccaccggggcgagcccccgaacgcccgccacccagacccgagaaaccccggcccacacaccacccccgcccc

SEQ ID NO: 187899 - DNA, 472 bp, Arabidopsis thaliana
  unsure (1)..(472): unsure at all n locations
ccgcccacggaagagccgagagacaagaccgggtgcccaggagggcaaagacagacgcaacacgcccaaccancccggagggcgcaagctatcctcagaagacggcggccgccggcacacagatagccgaagcaaataccccagataccggcactgcgcccgacgccgggaaaagaagnacaagacccncacgcccctgcacaagagtgggaaaaagccccgccaggccnccacccaaagcggaaaacacaccagagcggccgcccgcacgacccagggacaggacacagacccagggaggcngaccaaacagcagggcccccaacggaacaacgccccggcaaagcaaggcccacaccaacacccaaacaggacccaagccccccacaagggcggagaccggccaccggcacaccccgccacaggagaacacccacccgccacccagcggcagaaacgcaaaacaagggca

SEQ ID NO: 187900 - DNA, 269 bp, Arabidopsis thaliana
gggggggggaaggtagggccggtttgcgcgtttacggaatagggagtgccatgaaggcgttcgactgaagcgccagggaacaggacacgaggtgggctgatggacgcatggaagcagtgatgtctgggttttctctctgtatatctacgcatcggtgagaagattgaggtgcacgaaatattatgtggcctttagatgtgcgagactgtctctgatttacatgacaagctctaaacaacaagttacgatagatggtcagattaaagact

SEQ ID NO: 187901 - DNA, 372 bp, Arabidopsis thaliana
  unsure (1)..(372): unsure at all n locations
acgcgcacgtaagctaggatcctctagagcggcctccncggggggggagagaccctagaaaaccaacancttatgataacggagggccaccaagattaaaaagacgacccacccatgaaaaaaggccgaatcgcgccacattatacagaagacgagggaaggcccccgatgaccacaagaacaaaacaagacaatccctcccgggtgtggggaacccaaaacacagcaccgaggcccgaaaacaccacaccccggcaggggcggagagaaccccccccgcccgggcccccnaaaaagcaaaagccgccaagcgggaagcgggccgganacaccangggacccccgccaaaccccggaccggagcgagcccgg

SEQ ID NO: 187902 - DNA, 427 bp, Arabidopsis thaliana
  unsure (1)..(427): unsure at all n locations
gaaaccgcctaacaggggggggaaaccacaccacacgcgggggcgccggcacaaggaacactctaggacacaggaagaccaccgccccgaacaaaccggaaagagagcccggaccgagcgagaaagaaaagagaacgaacgcagcaggaaaaaggaaagacaaaaaaaactgcttcctgggagggggggagggaanaacagagaagcccgcgaaacccaaagcaccagcgcgcgggggcgagggggaagaggacccgacccgggacgcacaccaaaagcagacgacggcggagaaagcgccagcgaacaggagcaaccggcacgcagcgccgggcggacaaccgaacaacaaaagggaagcgcaccagacacaccgggagcaccaccccgcaggcgcgagcagagagcgaaggccagcccggaggga

SEQ ID NO: 187903 - DNA, 500 bp, Arabidopsis thaliana
gcctgcaggtccgggccggaataacggctggaccacgaggccacacacccggggccggacaggagtaaggagaaaaaggggaatttagggggtccagcaagcaggaacaagtcgccatcttacagcaagctacgcgaccgagactaaaaagaatttgactagaccgcgactcaccattcccaaacgggaagacttttctcttctgagggggcgaaggccaaggacaagggaaggcccgtaacacggacggccaaaaccccaaaacaagcgggggaaagcaactcgaaacagaagctgacggcaccgagaggagcgacacgcaaaacaaggacactggaaggcgaccagccaccggggcagacagactacaccccagcaaataggtacaaacaaatgtgaagccactatgcttcctctgttagaaagggctggggcgagtaaccatgctcggaggatctggggacaacgcgcgtcacgaagacaccctgggacctctcggc

SEQ ID NO: 187904 - DNA, 198 bp, Arabidopsis thaliana
ggggggaaccaggggggcggggtagggtgagcttgtgatccttctttaacggaggggggcgagggggttctttatattatataaaaacatcacagtccgcctgctataaaaacacgattgaaccaacgttagtagctacgcgacagcctagcaacaatactcttctgctgctatgtgaaataatacatacgctcccta

SEQ ID NO: 187905 - DNA, 468 bp, Arabidopsis thaliana
  unsure (1)..(468): unsure at all n locations
gattagtgtgacactatagaaagactatgacgtcgcatgccacccgttcgttagcttggattcttttaagccgcccgcccttnttttttttttttttttttttttttttttaggggattcntgttaaaacccaattcaaacccactggaacaacaaacaaattcctccttttttttaaaggaaaacctacttcttgcaaagggataacaagtttcaggaccaagaaattttcattatttttccgggaacccggggggtttcaaactgccaacattttggttttttttttcttttaaaaaaaattcctgtttaatggtcaaaaaaatttttgaaatcgttttgtcaaaaatttttaacctttaattttttaaaccactcgcagaaattattgaacctctaaaccttctcatgggggactttgaccctaaccatggattttacaaacccacaacttgctttcacaagcat

SEQ ID NO: 187906 - DNA, 488 bp, Arabidopsis thaliana
tctctcatccccacattataccctacgagaagaggaaattttaatctctaatatatcgttcttaattatgtcacgcccgcatcccccgcctctcttcgtatttctggtatttaaatcatatagataacgcaatattaataacctcgtgggcgcatcatctcatataaaaaatatttataattcatcgttatactaatcatgatatctactttctcccttcatagcatccaattataacctctccccggctccactataatctcctatttatcccctactcccccctccctcgagtacttcattttacaatataacacaccatctaccctacaccaacatatctccctaccactccctctcacctaaggggggggggaatatactctccctctcaccatccaccacatcctctcaaacacacacattttactcacatatataactagtcttacatattacacaacccacaccccattatctaactcctc

SEQ ID NO: 187907 - DNA, 659 bp, Arabidopsis thaliana
  unsure (1)..(659): unsure at all n locations
ccatcacgcccccccgcccccacccccacactataaatcattctctctccgcgaccactctctaattgtcccccgcncccaccaccccccactctctccccccctccatcctctctcctatttcccccgcgcgggttttaattntctaaaatacaatcccccccctccccaccccttcattcctctctccatccccccacctctctcatccacccattccttccttccctccctccatctctccctccttctccccttccctccccccttactcccttcttcctcccctcaccccaccnctccccccactctttctcccgtggtttttttctcccccttcctgctcccccccccaaaaaaaaaaaacctctcaactccttcctcctccctccctctcttttctcacctctctctcctcctttttccacccattcttctctcccttcctctcccctctctttccctctctctcctccctttcctcatccgctttccaccctctctctcttctctctcttttctcctctccctaccttctctctccctccttcttctctcccatcctcccttttctcaacacctcctccctaccacatctcttcaacctcaccttaccttctactcccatctccttcatctactctccataactctcttca

SEQ ID NO: 187908 - DNA, 292 bp, Arabidopsis thaliana
  unsure (1)..(292): unsure at all n locations
acgcccgcaggaaccggaccggaaaacaggcccgaccgacgcggaaacccaancgagcaacgaaaaaaaaaggaaaacaaaaaaaccgaggaaaaaacaaacaaaacagcccaccaaccaccagcaccgagaccacccgaggaaggccgagcgcgaccaccagcgcgcgacgccaaaaaaaaagccgagcccatttctaacaaggggggggagaaccaacaagacacccccaaaaaccacagaaacacaccaccgagaaaaccagacaaccagcacaaaaaagaaacacaca

SEQ ID NO: 187909 - DNA, 267 bp, Arabidopsis thaliana
  unsure (1)..(267): unsure at all n locations
acgcccgcggaccggccggaataacgctgggccgacgagccaccgacggaggccgccngaaaaggcagnacggagggacacacaacacaaagcggacccacaacaaaacagcaggaaaccacggaccnacagggcaaacacccagacaaagcacaagacgaagaaaaaggagggcttcttcctaaaggggggggagnacaanaaaggcccggagaagaaacaaaaccacccccagcaagcgccggcccccagggcccaacaaacaaa

SEQ ID NO: 187910 - DNA, 270 bp, Arabidopsis thaliana
  unsure (1)..(270): unsure at all n locations
acgcctgcaggtaccgggccggaatnaacggttgggccgacgagcaaacccggcggaggccacccaacaanagaaaanaggcgaagaacgcgcangaangacaggcagggaaaacagagcaagagcccaccggatgcnggcacaagggacaaaacaaccacagaaagagcggcaaaacacaaaaagggattcttctcagggggggcggacagnacagaanccacggaaagaaagaaaacaaccgccaagaaggaaggcgcaaaggaccaa

SEQ ID NO: 187911 - DNA, 482 bp, Arabidopsis thaliana
  unsure (1)..(482): unsure at all n locations
gcgtacgtaagctgggatcctctagagcggctgccctgtgtttttttttctctttttcagcaaacaaaaacttatctaagactattgaatcgaacaagagtctgaagagctacagagaaacaaacatgtgcccgcggttcccaggagggcgggtactaagaacaagcacaccgcctggagagaaacatcctangaacgaggggtcaaacaccgcggaaacgggcggttactgtatgcgccattgcttgtgcccacagcagacgaatcagcgacggtaactaaaaggggggcagcaaccatcagcccggctttcatgtgcaacgggtttaggcccaccttgcccagtatcaaacgtgaaggccgggaaccacgttaacccattgtacccaaaacgggcaacctgtaggaccaaagtcggaccccttggactccccactacagcaaatggcaatccactacttgctttgagcattgccacccgt

SEQ ID NO: 187912 - DNA, 443 bp, Arabidopsis thaliana
ccccgcacgagccggaaccggcgaggtgagccacgaggaagcccacgggggccagacggggaggaagggggcccagggacaagaacagggacgaagggagcaaaaggggaagaggaaacgggcgggaaaagaacccacacccaggacggggacgcggcggggaattttacagggagaggcaaaaccggggagggaacggacggggcagcgggggccccaaggagaagaccgggaccagcggaacagagacaggggcgccgggagaggaccagggccgagggggccacaacgggccagggaaccaaaacccgggacgggacggcagaaaacgaggggcacagcgagagacgaagcggccggaaaaaaaaggccccgggcgcaaccaaaccagcccccacgcgacagacaaaaaaacaaaaaaagaaagggcaggcggcccgcca

SEQ ID NO: 187913 - DNA, 512 bp, Arabidopsis thaliana
gaaccggggaggggtttccaggggggggaaaaccccccccgcccgccgaagcagcgccgggccggccgggtcacgccgggccgccgcccaagcccacaaacaaaacacgaagccggctcggacaagactcgcgggggcaggagcaccggagggcaagaacggcggggaagacccctttcctccctagggggggggcccaaagaacccacgaaggggcccccgccacggcccgggccgagccgccgggcaccgggcggagaggggcgccggagaacgggcaaccagcggaacggagcaggcacgggcgcgaaagggggcagcgagggcgcccacaggcgggagggcgaagcggccccccgcaccggggcggcgcggagacacagggccagacgagaggggaagagaggcgcgaggcacggcccgggggaagcgagcccggcaccacagaggacacaacaccccacgcgcagggacagaagggccccgaagacacaacccaggacgaggcagac

SEQ ID NO: 187914 - DNA, 273 bp, Arabidopsis thaliana
  unsure (1)..(273): unsure at all n locations
acgcctgcagtaccggtccggaataatngttttttgggccgacgagctcaatcctcggcagccgcccttaaaattgaagatagggggacatttcccaaactataagaaccaggaaaactaaccacgaaaaggacccacaaaactcgaaacccaacagaaaagccccccacacataacaggggagagacccctcccatgagaacacccacagaaaacgtgcccgccccataacatagaaacccaagcagaaaaagccattgaacccagccacca

SEQ ID NO: 187915 - DNA, 536 bp, Arabidopsis thaliana
  unsure (1)..(536): unsure at all n locations
agggcgaaacgcacgcgaacgaaagcncggaacccggccagagattcacccacgctgctgaaacatccacaaagcccagccccacaaaaccaaatcccaaactcaagaacacattcgatgcagagacaaagatgtctgagtattctgcgaacttggaggaaacaggtctgcatctgctgctctacatgcatggaaatcgactggctacgaacctcgtttctttttttgagcggagacaaacaaagcccggaaaaccccatcggtgattggaaagataaaggggtggaacttttttatgggtgaatttccaaggggaccaaaaccaggagggcttaacggatttctggccagagctgattccaatcggtgaagaaagggaacgtatttggcacagacaaccaactgagatggcgcgttaggctcgaaagtacttccaacacctgcgttgtttcccggttttttgttccccacgaggactcctacacatttcaaggacgcattttgggccgcccccctatgaacaacggggtacaacc

SEQ ID NO: 187916 - DNA, 279 bp, Arabidopsis thaliana
  unsure (1)..(279): unsure at all n locations
acgcctgcaggtaccgggccggaattaatggctgggccgacgagctcactcgtcggcggccgcccttttttttttttttttgatgatcaacaccagcttatcgaatgtatactcgaggcagaaattaaaaaccagttcctacttggcaagagtccaatacattgaaatcgatccattaatcgacaatcccctttttgataagggatacacngagagcagaccctccttctgaaaactgatgatgcaatcatcaaacatctcaggtagtgacttgaaggc

SEQ ID NO: 187917 - DNA, 542 bp, Arabidopsis thaliana
tctatttcctttcccccttctttttcccccctctatatattatttttttttttatattaccgccaattcgcactctcgggtacttttctcaggcttccttttccactcggggttaacgcccccaaaaaacaccttttctcctcccccctcatcccccctaccttcctcttttctatgcgtgcacgccttctctctttctttaatacctcctctccctgcccttcttgtcaccccactttttctttcttcgcccccctgtcctctccttcctcgtgtgggtgtggctattcttcctcccccggccttctcaaaaaaacaaaattcctttccttcttctttattcctttctttccctctctctccccttccttccgcttctctctctctcctcttctttatttctattctcgtttactctttgcttattccttcctcaccctttctccttctgtgggcgtccttcctctccttttccttcacactcctcctttgtcttctcctttccacttctccactttttatctcccccctctcgctccacc

SEQ ID NO: 187918 - DNA, 263 bp, Arabidopsis thaliana
  unsure (1)..(263): unsure at all n locations
gaccgaaagccccggaaacccgcgagaaggagctacccaaagggggaaaaaagaccccaggcggcggcgggaagaagcggagacaaaaagaggggacggcagaacgccgaggagaacaggggccggcagaagccgcaaacgaaaaaggaaaaaggggagcccccgaaacggaagagcaacgcgagagacaaagagaaagacacncaggagaggagaagcgcggaccngggagagacacaaagaaagacctttttttttaacgg

SEQ ID NO: 187919 - DNA, 476 bp, Arabidopsis thaliana
gtggggatcggatcaggggaatgaagggagaggggtttggtggggatgtattagtagaggatttgtggagttgaacgccgccccaagaatatatgaggtagtgagtgggtggtgtgttgcaagtggggtgtgtttctgtgagacatacgaagggtgggtagtgttgtatgatgtagggagtatcttagaaatacgaatacgatgagttggttgtgatgttgtggatggagtgaattgtgtgcttacattaccaagtacggatatgattgaaacgtgtgttacggtggagcacggattgtataaatgttatagaatgaggggggttatgatgaatgtatgaggcgatcgcacgagcctacaaaaacacatcgattaaaattaggatgatttgtaatgggtgggtaagagtgaatcgcgggaagagctataggtcacgttaaaagacgaggcggaggaataataaatataatttaact

SEQ ID NO: 187920 - DNA, 677 bp, Arabidopsis thaliana
caacgaaaagcagaagccagacaacgcaccccgtcgaggcaccagagaagcaagagcgaggagccgccacacagccacaagacaaaaacccgcagtacgccccccccagaaccgccgaagaggcagaccgcccagacccgcgaggggaccacctccccgaggggggaaccgaagccgcgcgaaaacactcacacagggcggcgcgccacaccccaaagccacccgaaggcgcagaccacacgcaaagccagggtcgcgaccccaacgagccgaagccgcggcgcccgcccgcagagagccgcggcacaacacgcgacggaagccgcacacacgaaaaggccagagagaggaggaaggacaacggccgacccgacgggagaaacacggcaggcgcgcccgcacagcgggagggcgggagagagacacgcaacagaaggcgcgagcgccaccgagagcggccgcagtacggcgacccacacgaggagagagggagcgcccccacgcgaagggcaccgccacagccagagcacgagcaccgccgccgaacgaagagagaagcacaaacacagaaacaacaggaacagcaacgcgataacacacgtcgaacgagtgacaggcaacagccgacatcccgccccccaagacccccgccccacgacgaagagaaaagcacggcg

SEQ ID NO: 187921 - DNA, 366 bp, Arabidopsis thaliana
  unsure (1)..(366): unsure at all n locations
agccgggancccggagagcgggcgcccacagcaagggagagacccaacgggggcaagagaaaagaagacaagggacaaagcccggaaaaccaagagaaagggggaaaacagacagagaccacaagggagagccgcgaaacgggggcgggaaaacgaagacccggaaaccaacaaagaaggagaaagcgcgcacagagaaaattatttcgaggggggggggaggacgaaccacggggaagggaaacgcgaaacgcgaagaggaagagaagacccacgcgaggaaggaaaagacggacaagcagaaccaaancgaacaaagcccaagcgaagagaaggcgccgaggggacaagaaaagcgcaaaaaaa

SEQ ID NO: 187922 - DNA, 144 bp, Arabidopsis thaliana
  unsure (1)..(144): unsure at all n locations
gtgggggcgcggcccaccccgcacacagtatttctacatacccntatactccgtcgggcggggtgtcacctctcgcccacctattcacctgtagccgctcgcgtccttcctcgcaccgcgcgtcgcagccgattacatcggtca

SEQ ID NO: 187923 - DNA, 155 bp, Arabidopsis thaliana
  unsure (1)..(155): unsure at all n locations
gatgattagtgaccttgagacttgacgtcctgccctctagctcgatcgctcaggtgagacacgagtgtagagcgagtatcagacagtgatgaaagattgtctatgnacgagagaagtgtaggatggctgcaagatggtgaaaaggatttggttgg

SEQ ID NO: 187924 - DNA, 721 bp, Arabidopsis thaliana
ctctctccttcttaactcatccccctcgtctgcttcccgtgctctgttgttttttccttcttgttcccgtttcgtttacctcctctcttcctctgccctttccttcccctccttcggctctttttcttcctttttcgcctttttctccctggggggtagtcctttcccaaaaatccttttctcccttttccgtcctctttctcccttccttcctcccgccctcccccttctcgccgttcttttctgttctcctccttcttcttttcttccttctcgttcctctcttccctctctttcctctcttctcgcccccctctttcgccgtctgtcccaccccctttctttcttgggtgggggctccttcctactcccactcgggtgttgtccctcctatataataatttcctctcgtctccccttcgcctctctccctgttctctttctttcgcttctctcgctctccttcttcctctctcttgtctttcttttttcctcctccctcctcttctccgttccctcttcttcccttcttcactcttgtccttctctctctcctttccctttctgctgtgctatctcctccccccccgcttctctcctcccttccatctctcttcctctctttcttcttgtcctctctcctctccttcccccctctctcgtttccaccttcttgcccctgtcttccttctcctgctttctttttcttttcccttctctt

SEQ ID NO: 187925 - DNA, 206 bp, Arabidopsis thaliana
aaccggtggatgccggccccgacgattgacagcgatcaagggcacctcctccccgggcgggggcccccacaagccgccagaaatgatcacatcagaggggggaaagccccaggagccgcgaccccaaagaaagagcgagacccctgcaccgccggtcgcacaccgcaccccaagcagtaatcagagcactagcgagagagacatca

SEQ ID NO: 187926 - DNA, 211 bp, Arabidopsis thaliana
acggagaaaccgccgcgctaatcgaaaactcccccccaatcccaccacctatatatacaaacaataccacccaacgtaaagccgatgccgggaaggtctctttcagcggaggagcaagacaaaacgcgccgcgaaaggagagtttaaggagggtctggcgcccggagcctcacagcacaagacaggcgcccgccacagataggaggggaaa

SEQ ID NO: 187927 - DNA, 140 bp, Arabidopsis thaliana
tcattgttgaggatatatatgcacgattacccatattgtctcaagagtgcacgtgttaattgtgtccagttcccgcttcacattaaccgtcatggttggagttctcatacatcataatcgtcacgccacattgacatgct

SEQ ID NO: 187928 - DNA, 158 bp, Arabidopsis thaliana
ccggatgttccccatcatctatttacttccagggcggcgtgtttatgtgctccgatccaccgcccatcgggcgcgtcgtcgcacgcctcccgcgtgctccttgtattagttatgcttactattggggtcgtcgtcgcccgtcaaatgccgtcgtcgct

SEQ ID NO: 187929 - DNA, 450 bp, Arabidopsis thaliana
  unsure (1)..(450): unsure at all n locations
gttccgaagggggaaaaaaacccccgggcctcgaacaagaccgcctcccgccncaggtaacagcagcaagggcccctccacccgacggaaagggagaactcgaccgttacctctccttctccttctgaaatttccgccagaaaagcgggaccccaaaaggtttctccctccgggggaggaacacacaggcggaancagaatacgccccgccaaacaaagccccggcgctggagagaccacgaccccgggacccaaacaaacagggcaaaaacacgaaccacgcggggagggaggaggagcacgaagaaccggaaacgaacaccgagacgacgacccccgaaacggcaacgaacaaggggcccggacccggcaagcacgccagaggaaggccccacgcgacccacaaaaaaaacagcccccacaagaacaaaaaggccccagaaccaaacc

SEQ ID NO: 187930 - DNA, 197 bp, Arabidopsis thaliana
  unsure (1)..(197): unsure at all n locations
agctaccacgcctgcaggtaccgggccggaataattctttggtcgacgagctcactacgtcggcggccgccgcttaagnncgnntncctnctctcttagcagcagtaatggctccctcacgcgtggaaaggagttactcataccgttacctcaccttctccgtatgaaaacaacgacaagaaagttcgggactcaaa

SEQ ID NO: 187931 - DNA, 542 bp, Arabidopsis thaliana
aggggacgaggggttacccagggggacaaaaaccccaagccaggcgcaaacaccaggacgaaacgagggggggcagaggaggcgaaaagaagaaccgaaaagggagcaaaggggagacccaagaaaggcaccccagaaaacagacacaaagacggaacccggaggagggggaaagaaagggaacgaaaaggattttttttttggggggggggggacacgcaacaacgagaaggggcacacagccaaggagaagagaaagcaccggcagccgaaaggagaaaaccacccccaccggggggagcggaaaaccaaggaggcagcaaaacggcagcgggcccgcaaccaaaaaacgaagaaggagaaaaggcaacgggggcgaaaaagaaagagggcggacacccagagcaaggggcgcaagagggggagcaagagaaaaacgcacagccaaaggcgacacagagagccacgcgaaaacgccacgaaaaagagacgccgccccgccaaaagaacaaaggggcccaaaaacgcgcaaagagggaaac

SEQ ID NO: 187932 - DNA, 307 bp, Arabidopsis thaliana
gccggtcccacaggccgcgcgtgacccccgcgtataattagcgcgccagcccgccccagggatcggtcagacacgcagcgggtggggggggcggcgcctaccgggggggaaccacggcggcggaaaacctttataggcgagtcaccactccgtgacacagaagcgcgggcaccacggggcacgacaccccacagagaaaaactactgcggaacactaccgcgcacccgagaaaccagggcgcgatatgagaaaacagagagggaggaggccgagaggacgaccgcgagatatatcggacacacgccg

SEQ ID NO: 187933 - DNA, 431 bp, Arabidopsis thaliana
cgaagcagggaacagcacgggattcaagaaggggaagccacgggcaaagagaagaacacacaggcgccccggaagcccgacgcagggccaaggcaaaccgggggacgcaagcaaaagaggaaaccgcgcgccagagaaaggaagaaagacaagaacgggacacattttaggggggggggtatagcaaaggggggcagcaagaagaggcgagacagaagaagagagggcgaaaacacagaccggacgaaaaaaaagaaaaaacggagcggagccgcaaaagaaaacacgaaagaaccccgaccccccacgaaggcgccccgggcgccacgagagcacacaaacgcgccagcagcagccgagggaggggacacccaccagaggaacaacgccgccgcgcgacgaagacgcaaagaccagccagaagcaccgga

SEQ ID NO: 187934 - DNA, 281 bp, Arabidopsis thaliana
acgcccgcaggaaccgggccggaattaataccctggacgacgagctcaaccctcggcggccgcccttagatatgttttgtgaggcaacccaaagacgagacggaaacaccaccagcccaagggaaaaccagccacatcgccacaccagaaaccagaagcgaaaagcagtccacaaacagggccaaaaaaactttctcctgtggggaggggcaaaaaacccaagaaaccgaaccgcaagacaacgaccccggaaagccgaaccaagcacaaccccagcggaa

SEQ ID NO: 187935 - DNA, 342 bp, Arabidopsis thaliana
atgccgcgtcgtagctcggattcgctcgagagatagttgatcatctgggaaatatgctgtcaggtcttctcggctgaaccctgttccggtggaagaggcgctgagataccgcctacagactgcctctcaatgcgcggctattaacaaccacctcgatacgactgctgagacggcacctcgcgaaggcagatcggttcagtctcacagttgactacgcatgatacagctttacacagacagtgtcacagtgtgactgtcagggagagcaccgattggcatttggcggtactctcgccggattcttgcccgagtgctcttcttggtacacacaggtgctttgct

SEQ ID NO: 187936 - DNA, 591 bp, Arabidopsis thaliana
  unsure (1)..(591): unsure at all n locations
ggtgttcttccttctgcttgtcggggccgggcgtgggtttttttttttttctgtttctcccttctccttttccgggggcttcttgggggtgtgctctttctatcggggggtgggcgcccaaaccttctttctttncgttgggtctctctgtctctcgtcctgcttttcccccttcgcgggggcgcgccctcctcctttttccctgtctccccgtcgggtcgttctttttttcttttttccttctcttcctctcctgggccctcttttcgggggcgtgtgggttccttctccgggggcggttttccaaaatactcctctctctctcgttttctcccttcttctctcccctccctcccttttctccctttctcctccctcttctcttttttgcccccctcctctttcctccctgtttgtttcttctctttcttccccttttgcgggggggtcgctctctcttgccccttttcggtttccctctgactcctccctcttcctttttcgtcttcttctctctgcttgtggcgctctcttgtttttctcgttttttctgtctctccgtttcctttcttcgtccgtctccttcctccc

SEQ ID NO: 187937 - DNA, 161 bp, Arabidopsis thaliana
  unsure (1)..(161): unsure at all n locations
gccgggccggaaaaacncctttggncgacgagcgcactccccggcggccgcccannngaagaggagacgggcgcacatgcgacgaaggggggacgcgcccggagaacacgaacggcggccgacttcccgaggcganacccggcgaccgcgagggggaccgg

SEQ ID NO: 187938 - DNA, 436 bp, Arabidopsis thaliana
  unsure (1)..(436): unsure at all n locations
ggctttcccgggggggnaaaaaaaccccnnaggaggaggaaaaaaaaaaanacgaagggcgcagtttgccccagaaaacaagaccggccgcgcaaaaggataaaccagaacggtcttgccaggcgcaggggggggggggcccacacaccaaaccaccccagagcgaggggaaattcttaaatgggggggcgaaccaagaaaagcaggaagaggggggacaccccgccccgggcaccaaagcaccgaaaggcaaagaaccaaaaaacggccagacaacgcacgcggggcacacaccagcgggcccccacaaccacacaggcgaccgagagagaagcgcaagccgcgcaccacaagagaggcacacaggagcaaagggaaccagcccggggcccaacggcgaggcaacaccacacggggaacaacggccacagccacc

SEQ ID NO: 187939 - DNA, 354 bp, Arabidopsis thaliana
cgctttcccgttctcgggcgctcaacttcccttcttttctcccagggggtgctctctctaaaaatttcgctatctccccttagcccgcttcttcgccctccttcttccctcgccgccgtcgtctctccctcttccttacgtccgtcttatttgctcatctatttcttctcctctgctccttccctttttctgttctgtcgtcgcgtgttgcgttctctttcgggggggggtctttcctcccttctggtctccttcgtctgaaaaacaagcgttacctggctccctgctgactgtgtggctgttctcttcctctctccttgtctctttctatattctcgcactcctgtgctatct

SEQ ID NO: 187940 - DNA, 739 bp, Arabidopsis thaliana
  unsure (1)..(739): unsure at all n locations
tcttttccttcccccccccctctttccgcgcagttttgttttttttcttttttttcttcttttttcctcccctcccaccccccctcgctctattctgttgggggcccttcccctttctcggggtcccggccnttcaaactttctttctcttttctctcactccttttcctcctttccctctcccctttccttcccccttcctctcggcctctctcctccccccttttccttattcctgtctccccgccccctccctcctctctcttgtcccctcactttccctcttttctcccttctcgtgctttttcccctctctgcgtgggggttgtagcatcttctcttctcgggcgttctcttttataacaaaaacaactcccgctttcctctcttcttcttctttccctctctctgttgcctccccctctttcctcctctcttcttcctcttatctctccctccctcctcttctcttccttctcctctcccccaccttcctcactcccttctttcccttctttctctctcctctccccctccgcgcgggggccccccttcttctcctcttctcccttctcctttttttctttcctcactctttctccctcccttttttcctcttcgctcccttccttcttctcttcctctccttcctgtgtttctccttcctcccctcctcttctcctcctcccctcccctcctctccccctcgctctcctctccccctctttctcccccctct

SEQ ID NO: 187941 - DNA, 567 bp, Arabidopsis thaliana
gccccgcggcgagactcaatggggggggattaatcccccccaacacccgggcccttttgcggccgggggggcgtttggccggccgcccggcgccgcaggggcccccacggagaggaacccccgcgggggcctgtgaacaagcgccgcggcgaagcacgacgccacgggcgccgagaggcacgcggcgggcggggagcgcggcccttttttttgaagggggtgatacaccccccccccccagagggggggcggccgagaacaaaaaaccgcgcccgcgggggcccagagggaggggggggggcccccccaaacagacacaccgcgcaggcagccggggggccggcgcgagcgcggacgacagccagggcacgggaccggccgccgcccgccgcacgacgaagcacagcgcccgccgggagacggcgcgccccgacgcgcccgcgacgcgggcggacaacggcacggcgccgcgcgacgaccgcgcgccgcccccggggaggggcgcgcaggggaccgcacgcaggaacagaggcccccccgcccgacggacagaggaggaccagagag

SEQ ID NO: 187942 - DNA, 348 bp, Arabidopsis thaliana
tatcttcgcgatcccgcttttctgattacggacccggggccgacgagcgcacgggcactggcccgaagagactctgcattttttttacagggggggataggtgatcagaaaaaaatcagcccgtattcccccacaacagaactaccggccctacctcacagcgctccgccgctgtgaacgcgcgcgtgctctaagcagtaccgcaaacgtaataagcgcggaacgtccttcgtcacgcgccctctctacagaatctccctattccctcctcggaatgatcggtcctgtaccgtactctcgggtggggtgggtgcacattcaccacctaaccgggcgcggctaacgaca

SEQ ID NO: 187943 - DNA, 541 bp, Arabidopsis thaliana
tcccccgccgcgcgcgcagacggcgagagtatacgtctgggtcttgtttcgtgtctttcgtgtgcgacccccgaccgcctcggtctttcccttttctcctttcccatttcccccgcggggttggtgcccccgtaaaatctcctctcgttccctcccgcctcccattgtctcgtcttccctgcccttcccctgtgtttgccccgcccttggctcttctttctccccccgccccgcccctcttgtccctcttcttcgttcggccctcccgtcccgcctcttccgatcggtgttggggggggctctccccctcctctcgcccctttcgcgctaaaactctctcttttcctcttctttttctttcctgcttcctgtggttcgctctgtcgtgccctcattatatcgttgttcgccctctgctctccttgcttgtatcttccgttatgctcctccttttctctggtccgtctgtctttcgtgtgcttcggttttcgcgtctcccctggcacggcattgcttttcggagtctctagatgctactctc

SEQ ID NO: 187944 - DNA, 411 bp, Arabidopsis thaliana
acccctctctcccgcgttatccttcctcttttgttgtgtccttttctctcctgcgtcctccctgtcctccccggcttcgtgtgctggtctgtttgcccccggggtccgttcccaaatccggttctcgccgggtctttggtgccctggctttctccgttcttctgcttcttttttcgcggggtgctctctctgccggtttctctgtctcctcgcgcctcgcgtgctcgtgtccgtcttctctcccttcttccctctttcactctcctgggggggggtgcccaccccctacctacgctcgtccgtccttaaaaaagtggtgtgcctcccccctcctccacatctcctggtcgccgcgtgtggttgacgtgtcgttccgtcgctttctgttgtccctgctccgtgctcgtcgct

SEQ ID NO: 187945 - DNA, 685 bp, Arabidopsis thaliana
ggagggggtgacgactggtatatgattgattagagagggacgcgggcgcgacgcacgtgaccagggtaggcgagagtggaatgttaaatgggtagcacgctaatcctcagaccaataatgtcacgaaccgcagcactgaatcacacaacgtagtatacgggtcacgagcggcgactactagtcatggccatgcgacgagtgtatagtaataactcgcgtcacttacgaaatttacaagttagtgtcgattagccgcgcgtgatcgcgggtgtgcgttcaaggcggtttttgagttgtgttgcgtacggtcgagtatgtcgcgcgtattcgatcgaggttctcgacgctgctggaggttgcgcgtgagccgcgcacatgtgtctgagatgtacgagagatagaaggcggcggcaaatagaaacaaggacgggactaacatcaataatggcaggcgcacgtttcatccgtgtaggcgatgagggctcggcgctagtatgagtaggattcgtcgtcgctactgcggtcggggggcgcctgtccgcgtacactttcccgcgatacgattcaacgaataactaggtgttgcatgagatatagcgagtaaattatattgcgtgtaccgtgttcgagcgaattgaatgatccttatcgttacacttccaatagatcgtgatttgaacgcagt

SEQ ID NO: 187946 - DNA, 276 bp, Arabidopsis thaliana
  unsure (1)..(276): unsure at all n locations
cgcccgcagagaaccggaccggaaaaaaancctgggacgacgagcacactccacggcggccagccaaaaaaaaaaaaacagaacaacttaggccacacacccaacaaagcaacgacacaacaccacccaacgcacgcccgcgcaccaccccagagcgagacaaaggggcccgcacgggaaagggaaagctcttcctaaggagttgggacccgacccacccccaccgccgccgggacaccaccccaagaggccgacaccccggccaccaaaagcgca

SEQ ID NO: 187947 - DNA, 229 bp, Arabidopsis thaliana
  unsure (1)..(229): unsure at all n locations
cgcaggaaccggccggataatcctggcgacgagccacactcggcggccgcctantttaaaagaggaaagacagcaagaggaaagccaccccacaagagaaacacctgaccaggccgaccaggacgaccaaagcagacccgagaacaagaaaacctctctgggggggggaaaagaaaaagaccccgcaccacgagaacaccccacacccaacgacgccagccccccggag

SEQ ID NO: 187948 - DNA, 753 bp, Arabidopsis thaliana
  unsure (1)..(753): unsure at all n locations
tccctccccccccctcctttcccgcggggtttgtgtgattctcatctcttttttttttcttttttcttctcccagacccctctcctcctttcgctctctctctccgcttggtccccctctttcctctacttgggggttttcctcctcttctaaatccccccttctctctttctcctcctcctccctcttctcccttcctctccctctttccctcccgtcccttcctcctctcttcttttcttctcctcctcccccccctcctcccttttctccttttctcccttttttctcttcttcctccccntcccgcggcctctcctcttttctccggcgcttgtattgggggcncncntcttccatctntggtcgcctcctcttaacaacaaaatatatatctccctctctctcctcctctttttcttttctctctctcgttttctccttcctccctttccctcttctttcctcttctctccccccctctctccctctttcttctctcccccccccccttttctctcccttctctttttcctttcttcttcccttcccctctcccacttctctcggtgccggtccctcccttcctccctccccccttctctctgttcttcttttctctcttcccccctcctttcttcttcccttttcttttctctcttcctctctctccttatctttcctcttctttttctttccttcttttatccccctctccctctccccttcctccctcctctccttccttcttct

SEQ ID NO: 187949 - DNA, 124 bp, Arabidopsis thaliana
gtgtatgtgaatctttcgatccgaccccgactccatcttcacatcatgtacattgtcgatatactctcatgtccttattacgcatcatggtgggctacgtatcacacataaacacatattcacg

SEQ ID NO: 187950 - DNA, 491 bp, Arabidopsis thaliana
atgattagtgcactatagagacttgagcctgccgcgtcgtagctcggatcgctggctttctatcacaagaaaaaaaagtcttctcttttttacagtctgagatttctacagaacaaaatctgattgtttttcccactttgcatctgttttgaggatgccagctacgggattttcaaggatcatttggaaggtcgttgctaagtttactggcgagaccaagttgactcatcaacagtcgtctccggaagtagtagccaccacgagccaagcaccatggaggttgagctagattcgtttcaaagacaagtcgctgagaaattcatcgatctcaacgcttcttcaaacgaccttctctctttcgaatggatcggaaagcttcttgattctttcctctgttgtcaagaagagtttcgagctatcgtattcaaccaccgatctcagatctctaaatctccgatggaccgtttgatttcagattacttcgaacggag

SEQ ID NO: 187951 - DNA, 380 bp, Arabidopsis thaliana
gtcccgtttttctccccgcgtacttatcctctcctgtctccttttcctcgctctgcccctttgctactgttgcctttccgtttccgtcgtctccgcctcactcctttcctctcccttccccgcctctacttctaattttcccctgccgtgggggttgacgtactctctcaaaatactctcctctccctctgttctgtgctgttcttcttctcccttacgccctcgtctccgctttctctcttttccctctcctggttcgtctctgccccccttttctctccccgtctctctttgtgtgctacgctcgctttcttgactgttctctcgcttcatgtccttctctcttcctgccctccgctctcctctgttttctccggcgg

SEQ ID NO: 187952 - DNA, 284 bp, Arabidopsis thaliana
cccccgagcgaaggcggataccaagaagcggcgcggaccgaaggcctttccagcaagaacgggggaagctggaagcgaaaggccgcgcacagccgaacaccggccaccgttttttggggggcaggcccaaaacacacgcccgcccgcgaacagagcacccggaaacggacccccccccacaggcgcccgcacgcccccagaggagaagggaaccaaaacaccagcgagcccgggcgacggccagaaccccgcccacaggccccccaacaaggccaaagaccccc

SEQ ID NO: 187953 - DNA, 313 bp, Arabidopsis thaliana
tgcgggacccgcgaaccgaccgccagaaggagaggaaccaaaagcgcgaaaggggacccgaggcacggccccacgcgccccacaggggaacaggcccacccggaacaggcccaccgcagcgaggggttttacgggaggccgcggcagggacccccccaaagaagaaaggacccccgccaagacaccgccaggaaaacaagaggccccaggagcccccgacccagaagggcccggacaggccacgaaacccgccaaccgcaacacgccgcccaacccaaaacccccccaccaaccacgccaagagagaccgaag

SEQ ID NO: 187954 - DNA, 300 bp, Arabidopsis thaliana
cccgagcatcaattaattatatgcagccgtcggcgaaccccccgcgaagattaccatcggagcggatctgcggacgcggccgtgtagccgcgggagcgagagggaaccccttcgacggagagtatcgtatagtgcgcgccattattctggctttaagtttgagttcttggcgcgaggggcagtacgcgatgtagtaggcaccgcggtaatatcttgaagaggagtgatgaagagcgcctgatggtctcagcgcgacatctgaggagggtgagcagcacatgcagtgacgccacgcagggg

SEQ ID NO: 187955 - DNA, 488 bp, Arabidopsis thaliana
ttcatttgcttctacggggtggttgcggggcctcgcgccaaatcactgcgtcgcgctctcgccgctggtgctctcttgtgtgtttccgcgtatcctgtcctactctctcgacgctcctcggcggggcccttccgtctcgctgttcgtgtccttgtttccgcccgggccccttgtctttatgtcgcgtgtttgtgcttcgaggatgccgcgtcccgcgctcctcgctccttccggcggggggggggcttctctttctctcacgcggcctgtggtctgtctacacaaagaatattctccctcactgttccttcggttcatttggcgcctcagtgtttgatgcggccccgcctctgctctctcttatctcgtccgttctgcgctcgccgcttccgtcgcctctgtcgtcgcccgcgcggggcatgggtcctctcgcgctgtagtattcttgtcgcgcgttctgcgtttctcgcgctatgttgggggggggg

SEQ ID NO: 187956 - DNA, 360 bp, Arabidopsis thaliana
tggacgtgcgtctgctggtgggtcgggcgggtggatgagattaattttttagtttgttctcgccgttcgcagctgccccagcccacagtttatttgtgagtgtgataatactctcgggtgtgtggcggagttgcttctgtctcgatcgcgtatgtgctcggctggctggtgtcgcgtttgtggtcgtgtctggcgaagtgcgtgcggcagctacttgctgtcggtcagcgcggcgatatggataagactagtttcctcactcgccctcctcgagcactacatatgtcagtttaattcaacttcctccagtctataacatagacacgctcctcctggggtagtgtacgataagcgagtcga

SEQ ID NO: 187957 - DNA, 251 bp, Arabidopsis thaliana
ggggaaaaaccagcgccgggagaaacaaaaccgcccccagaaaggaaaaccaaccccccggccgaaaggccaagagcaccggggagaaagcggaaccggcccccacggaaggcacgccaccccaggacccgcccaccaacggccaggagcgcaccacggccaaggccccccacccgccgccacccagaaacccccgcagccacgaaagagggcgcacccaccgcacagggaccccaaaacaacgccaacac

SEQ ID NO: 187958 - DNA, 275 bp, Arabidopsis thaliana
aaagaaacctgacgtcaaaaaaggaggaaaagggccagggacacaaaccggaggacatggacagggcgacgaagaccaggacccccacctttttttaggttgaccgggcccaaaaccgaagcgagaagccccgcgccaccgacaacgaaagaggaggaagacccaccggcccacgagaacaagaagccggcaagggagaaacgcccgaacgacgggaaaccgcgggaaaaccacaggacgagacgcccgccaacgagcccaaaaccgcacccacc

SEQ ID NO: 187959 - DNA, 707 bp, Arabidopsis thaliana
cctccccttctaccccaccccttcaccccattccactcaaataccacactacccaatatcacctttgcgtacccacacctccctacgcctcctactattttctcacccagcaatactttttaactccggggttaccctttttcaaaataactcctcacctcctcccttcttcttcacctcattcttctctaatactccccacaccttacccaccctcccatgtcttccacccctttctcccccctcttaaatacgtcttccgcgtctcagcttaattctacccccgcacctgccttcttcccattccttgggggggtgtcctattctctacctctatcgactttttttttaaaaaaaagaagcgcaatcttcatatcacatcgatccaatgaacctccttcgcttcctcgcttgtctcactttacttcactttattatcacgctctactatcacctctcccaccgaatattccattatttatatccatcttccgcttacttattcgacttctccccttcgacctacaccaccgtacttcgcctcctccttcttctcatccgctattcttctttattttccactgtcatctatctgcattatcctttatgttctcaaccctctagatatttatcactcttacctgacccattgtttaacctaattgtctgatgcaccacgtcatcatcgcctgctcgccctttactct

SEQ ID NO: 187960 - DNA, 333 bp, Arabidopsis thaliana
aaggggaggacagaaaaaccccaggggacccgcggagccggaacaggagaagagccgacgaaagcggggggaggcaaaagcccgcccaggccccacaaaaaaacggaaagacgaagaagcccgagaaaccggaagccacagcgagccacaaagcacgggggccgcgggggcggggcaagaagggagccgccaatcttttttttttggagggggggggacggaaacgcaacccggacaaaaccaggcgggcccaggggcagagagaaaccagaaagggcgggcgggcgggggaggaccccccacgagaagggcgaacccccggccggagagggc

SEQ ID NO: 187961 - DNA, 158 bp, Arabidopsis thaliana
ccaggttgacgtgtgggcgtggcgttttttccttcgttcgcgctagcgggcgcaggtatacgcctttcatatggcggtgattcggtcgttcgttagccttcctcgcgtgcgcgcgtctcaagaatcaacatcaccagggcggggggggcaccccccca

SEQ ID NO: 187962 - DNA, 526 bp, Arabidopsis thaliana
catcccaaccaacccccccactcccctccccctcctccaatcatctccctaccccaaatcttcttctttttcccactcattcactcctctctcctctcccacatcttatccatccttttccttcacggggtagagcgtctctaaaacccaccttttctcattttattattattatatccgccttcttccatctttcataccactcacattcccacccctccccaacttcctgacacctatcattatatcacaacttccccctttctcctacttcttcattccccccaaccctctcctccctcctaccgggggggtgggctcacctctatcctatcccttctcttccaaaaaaaaactcctcccctctccctactatattctttctactccctcatctcttatccactctcacatccactctcttcctacctctcctcttctccctctactcttacatctcttttacttactccctattttatccccacactcatctcacttctctactctgtcaacatctacccct

SEQ ID NO: 187963 - DNA, 264 bp, Arabidopsis thaliana
ataaagagacactgagtaatatggttccatcgcatgaagatatagtgtccgcaggcataaatgcgccgcgacactatatatattaatcacaaagattataccgctcatatattttatcagataaatatgaagcaccgaataaacagaaaaatcagcgaaccttgtgtcgagatataatagaagcggggagataggtagttattgaggtggataaaaagcaaaggcgacaattcagtaatgggatgttagaccgagaaagcgaga

SEQ ID NO: 187964 - DNA, 412 bp, Arabidopsis thaliana
ttcatctacacctcttcacctacacattatctattcttactcacttcttactcttcttcatatctttctcctcattgggactttacatattccggggggtgtggccaacttaccaaggccgttcttaaaaaaaaaaaattctgcctacttgttcaatctagacacaacctgtctaaaagacactattatacaaacttgtccctgccacctttccctaaccccacttatccatctatacaaaccctcagctaccgtccatcctaacacatctattgcggggggcacttacatcccctcaccgtctatttttttaattaatcttctacaatgattacattaacagactaatcttcctcacctacttcccccttcattctctacctcctacctctacaataacactaattctcgc

SEQ ID NO: 187965 - DNA, 324 bp, Arabidopsis thaliana
  unsure (1)..(324): unsure at all n locations
aaaaagttcttttttaaagtgctttgtaaaaaccaaagttgctggccccctaggttccccggggttttcanaggtggttgttgggtccttttttaaaccccccccttttttcctttttaaccccccccccccccccttttttcccgggaaaaagaccctgaaaaccccccctctttttttttttttaaaaaaattttcccccaacctcctgctgaatttgtttccccggttcccccccctgacccccccccccctccctggggttttcctgctgcccctcaaatgacttttcggtctgaaccttaaaaaatttggggttccccg

SEQ ID NO: 187966 - DNA, 567 bp, Arabidopsis thaliana
ggtgttgtgcacggtggtgcggttgggagcgcgttcgcgcgccgccgcgcggtcgccgtgttgtgttggctagggcgtgtcttcttgttatacctggggggggttcgctgcggccaaaaaaaggtcgtcctgccccgagtgtccggtgccgccccctgctcctccgcgccccctccggcgcgcggcgggccttccgtccgttctggtctctccctgcgtcccccgcgcgcgcctgtctctccgtgctcggtttgtggtgccgcgcccgccgctcctcggcccccctcgtggcggggggggggggaccctcccccgtggggcgcgcgtgcaaacaaaaaagcgcgtcgtcgccgttttagtcgggggtggggcccctcccgtgcgctggggtgttccgctttctcagcgcctggttgttctcctcgcccccgcggtgttcctggcccgcggagcgacctcttgtgcgcgaattgtctctcggggggcgggggggctggcgccctccccgcctcgcgggtacgcgctctctccttccccctccagccctcggggggtgtggccgcgcgg

SEQ ID NO: 187967 - DNA, 449 bp, Arabidopsis thaliana
  unsure (1)..(449): unsure at all n locations
cgaagcctgggaccccaaaagcgttgcccttttttttaaatcctctttttcccataatttttgcgcgatagggctgatttactatttatagccgcggctgcccgcccaaagttggaaaaaaagtttctttttggaaggggcttggggaaaaccagggggccgggcccccaaaataaacaggggctccaaaaggggggggaaagcccccanaaaaaacccacccttttttccttttaaaacccgcccccaaaccctttatagggggaaaaaaaaatcttaaaaaaccccccttttttttttattaaaaaagaatttcccccaggctgtgggggaaattgattcggggtggccaccccggaaacccaccccccccccctggggtttgggcgggggcccccaaatcaaatttgggggaggaaaaagaaaaaaaggggggggtcccaggacca

SEQ ID NO: 187968 - DNA, 659 bp, Arabidopsis thaliana
tgcgcatggagagtcggtttgtgggactagaggagaggagtgcctatttggttgtgttattggtgggaccgagcccggtgctgaattatgtcctttctgttttgttattagtgtgttgattagtactgcgccgtgttggctgttatgggacgtaattgttagtccgtgatggtgcggcaggcccttttgtacctcctgtcgtgcgcgttgatgcagttgtggtcgtggatttatcatgtgtctcccgcctccccgcttgccgtttacccgcgttattcgttgcgttccggcgtccatccttccccgttcgcggtgcgtttgtgtttatcctgcgccccccgcctcccgacctcttctctttttattgtatcgtttaagctgtcccgactgggggcctggcgcgagttaggccgcgttttgcgcgccgttgtcacttgtgtcgcgtacagaccgttatgtagcagcctgtgttcggccgatattagtctatgtcccgcatgtcctcagtcacgctcgcagcgagtttgcgcgtaatcgcgttatcgcttgtttttagtctcgtgttctctgttgcgcgttttcattaatgtagacttacctctttccaatcgtgtccttgatccgtccgtcgcggtgcctcctggcgccgtatgtgttga

SEQ ID NO: 187969 - DNA, 309 bp, Arabidopsis thaliana
  unsure (1)..(309): unsure at all n locations
cccatcactctcctcccagaatttatctttaatccaattttccgttcgcctctttactattcctcttttcatcttaatctattttccctcattctctctattccaatctccgggggtgggccccccccccgcggcgccgtcaaaaaataatacccctgtacatntctctccatcaactcattctcccaacctatttacctatcattattttgctctcaccctacacccattctattttctatctccctcatcaccatccttctcctccccaccctctactttaacatgtcattctctccattacacacc

SEQ ID NO: 187970 - DNA, 428 bp, Arabidopsis thaliana
  unsure (1)..(428): unsure at all n locations
aaacccaccatggaatgattncggatgccaaccaggattaaaaagacgaatcatccattatagaaattggaatcgggctattttatacataagatgtgggaagcctctcattgaccacattaacaaaacaggcctttcttctaaacgnggggagaaacccaaaacacagaaacaagaccccgaaccccccacccaccagggccaaagagaagccacccgccggcgaccccaaaagccaaagggacaagcggaagaagggcggacccnaagggaaacggcagagaagggcccaccagcccaaccccaagaccaagggaaaacaaaccaaccccaacagggggcacaaccccaanaccccccccggaccacgcccagacccgaaggcccgcaagcgcaaacccccacccccgcccacagccaaccgaagc

SEQ ID NO: 187971 - DNA, 268 bp, Arabidopsis thaliana
  unsure (1)..(268): unsure at all n locations
cgcctgcaggaaccgggccggaatacacggctcgaccgacgaggacaccaccgcgcgcccgaccnggannnnggngaaaaagaaaaaaaagacccaagcacaagagagcaccagcgagaacgncacggcggcnacgcgacggcnagcgaagaaaccgacagaaccggagcacgacancagacagaaacctttttctttagggggggggacaccgaccagggagcgaaacccccaagaagcgacaaaccggagaacggcgagaacaacc

SEQ ID NO: 187972 - DNA, 126 bp, Arabidopsis thaliana
taaagggggtgaggcgctagaaaactatcccatctcgtccttcacggtacatactccacagcgtagtactcatataccgttcggccatcacatacaaattactcctaacccctctcacatcggagc

SEQ ID NO: 187973 - DNA, 328 bp, Arabidopsis thaliana
ggcgaactatagaatactatgacgtaccatgcacgcgtacgtaagctcggaattcggctcgagatgcgagttggatcgatcgctacatcggtattgtggaatttccaggcattgttgtctggcttttgcatcagttggagccaccatctccaaggagccctgctgttgcagcttcaaatggattttctcatgatttcaccaccgatgttctggataacggagattcagcagtaacttctggaaacttctttgaggtccttacttcttcagagctatacaagaacacccaggttcgagatatcttctggacattcccgtgggcacccgt

SEQ ID NO: 187974 - DNA, 163 bp, Arabidopsis thaliana
  unsure (1)..(163): unsure at all n locations
gcgtacgtaagctcggaattccttctagggcgtgtggagacggaanaatctctctccttttcatgtcntccttcaacctggggttcagctgcttcttccgccgtcacgttaaagaatctggtgcttcanaaaatccaaccaaaaacgcttcccgtttagaaat

SEQ ID NO: 187975 - DNA, 317 bp, Arabidopsis thaliana
gttttttcttaaaagaaaatttaaaaaccccctcccccgtttattcaatgttcctgaagacctacaaaaggtccagggaaaaccttgtgtttataaattcttttgatccctttttgaaccccgggaggtaaaaacccattaaattctcggaaaaaccaaaaaaaaattaaagcccccaaccattttccctttttttaactcccccttgaaaaacccttagtttttagccggaaaacaattttacccaaattttccccaggccaatcctttttagatattttaggcccccatctctttttttttaaaaaaaaaccttt

SEQ ID NO: 187976 - DNA, 406 bp, Arabidopsis thaliana
  unsure (1)..(406): unsure at all n locations
ggggggggagaacaggccccacggggggaggngagacggaggagcctctcccnaaggggggagaagccgggccacaacaaaaaaanaaaacaaggaagcgcgagcgggccacgccaggaagcgagcgagcacgccaccgcgaggcgcagcagcccgcggcacgagccggcgcgccgagcaggcccgcaacgcgcgagcgcagagaacaggaacaagggccctcctccttaaatgcgggggggggaggcggcccagagccagcgaaaagggatagagacaaagcacacagcggagggagagaggagaaacgacaaagcagaaaggagcgaaggaggagggaatgagcgagagcgaagaccagaaacagaccggccaccgacccgaccgaggcgagagagaacgcgag

SEQ ID NO: 187977 - DNA, 553 bp, Arabidopsis thaliana
tcgggggggaaacaaacacccaaaagagaggggcagcgccctccccggggggggaagcgggcccacccaggaggggaggagcacaagaaccccgacagcccggagaggaacgaaccacgcgaggaagagccccacgccgggagacaagagcaccgaaacgacaccgcgaccgggcaaagaagggagggccctttttaaaaacaggggggacgagaacagaggcgccagacaccgcagcgcccggccacaggcgcgggcagcgggccgcccgcgacaaaccagcggccacaacaccgagaacaagaaaagaaggggacgcaagaagaagaaaagaaaaacaaaacaaacaacacacacacaagacaacaacgacacgagcccgacgcacgcgcaagcagcacacacccaccgcacaccacaaccaaaacaacacgaccgcaccagcccgcccacccacagacccccgcaccaataccgcgccgcgcgcgcccacgcgacgccgccagcaccgccgcgcaccgccaccggcccggcggccggcacgcaccccccc

SEQ ID NO: 187978 - DNA, 487 bp, Arabidopsis thaliana
gacggccgaggcgcgggacacgccgggcgcccagaggaagaggagcacaggggccagaaccgccgacgccaccggagcgggccgaaccgcccagaccgcaccgaaaagcccctccccgggggggggacccaacgcgacaagacacgcaaaaaaaagcgcaccagaacgcggagaaggacagaaacgagcccagcgaacggcagaaacccaaaaccccccggcgcgacgagagaaccccgagccccgcaacacggcccaccccccgcgccccaccgcccgcgccccacagacacccccacccccccaagcccgaccccaagcccagcccagaggcccagcaacgaccacccccaaggacaacaaaacgaaccggcaaagagagccgacaaacagcgccgccagacccaccaccacaacgagcccgacaccgccgagcccaccccgagcgcgggaacgccagcgccgcccacgcccccgcaaccggccc

SEQ ID NO: 187979 - DNA, 548 bp, Arabidopsis thaliana
gggggggaacaggcccccaagaagggagcgggcggagccctcccacaagggggagagacccgcacacccgcgaagacgacaagacagagccacgaaccccaccccgcggagagaggcgcagcaccgaaccaacaaaccgcccaaaacgcacgaccccgacacacccaccccccacaccccgaaagaaacttcccacacaagggggggccgagccccaacacacgaccagaacacacagaccgaccgccgcgcgaaccgacaccgcagaaagagcacgcaggcagaacacgaagcgcccgaccgccgccacccaggacaggaagctcgcaaacgcccggacgccgcggccgacagacacgcgcgcgcggcgggcgcgcgccgcgcgcgggcgcggccgcgcacgccacccacaccacacgcaccccgcacgcgcgccccgcgacccgcgacgcaacagacgaccaaacacagaaacgaggaccactacgcgatccgaaagcacacgacgcgcaggcgccacacagcagccgacgacgcaacaggcgccc

SEQ ID NO: 187980 - DNA, 319 bp, Arabidopsis thaliana
ccccccccccaattcacggccggaaggaacagcagccccccgcccaccccgcagacggggcgccgcggcgcggcaattttgcggccccgggggggccacacagccacaaaaacaacaagccggcgacgcgcgcccatctcgcacgcgcgcgcgacacagcccacccgccaggagccaacaggccctcactgcggcccggacgcgcgcaccgcgaccgtgcggcgaaagccgagcaggcagcaggaccgccgcaacgcaacgagcgcccaccgcaagcaccgcgcgcgcgccgaacaagaaggcatttttttttcggcgg

SEQ ID NO: 187981 - DNA, 473 bp, Arabidopsis thaliana
gggggagttcggaaacaagaagaagcggacggcggaggaggcgggcccgcgacaaagcccagaggcgacgagaagagcgccgcgcgccaaacgacaatcaggcagcgttttttcttaaggggtgtgggggccccccgcacaaaaggccacgaaaaaaaacaagccccgaggggggggagaagggaggcggcagctaggacaagccacacgcagaggaagagaacagtggaggcaaacacgcgaccaaagagggaggcgagagaacaccaagaccaaaaacgacgccgggggcagccgagcgcgggcgagagccgagagcccgccgagaggccacgggaaaaagggtcgcggggaagaggaggccaggagagagaccacgcgccggcaaccaagcgcaagccagacccgcaaacgagacgcaggccacccccgaagcgaacggaaccgagcgcagcgcgagaccagacgcagac

SEQ ID NO: 187982 - DNA, 378 bp, Arabidopsis thaliana
aaaaaaaaagccgagcgcgcgcgcgcagcgggaaaggccagaaacccacccagccaacgcacggagaacagaagaaaaccgacgacgggccagacagcgcgcgggaagccgagaccgccgacacacgcacgaaaatttttttttcagggggggggagcaggaacgcgggcgcacaacgcagaaaaagaccgacgacggggccgagaacaggcgaggcgcaggagcacagcgacacgaacgaagcgccgcccaaggaccgcaaaagaagagcgaagaacaaggacgagagaagggcgacacagaaagaagggcgcgcggcgaaagacaacacaacaagggacacagaggcgacaacaacccaaaaaggcggcacaaaga

SEQ ID NO: 187983 - DNA, 603 bp, Arabidopsis thaliana
ctatgacgtacactgcacgcgtacgtaagctcggaattcgtgttcgagctggagcgaaagaaagcaactttttttgggtgaaattcacagaacaaccaagggttttcttcttcttcttcttctccagttcctacagaatcatgcctgacaagaacatcgtagaggacgttatcggtgatttggaggataacttctcggagactgtggcagaagacaaacatggttcctccttcttcgaacaagatgattccgtcagttctcgtttcaaccgtttgtttgatcgccagaagccaattcatcatggtctaggcgggggcaaatctgctgatgtgttgtaatggaagaacaagagatctccgcaggggtttgatgggagctcccgaatttgggggccttttgaatggacaaatttcattttctggcctctcgttggtatggccctttggctgggattgatggacaaattcgtgtgggctaaccgccctgggattctaaacccggtcacaatctaaaatggcctcccttaatttcttacaaaggaattcctttgcttaaatccggtggggcccgtagaaaaagaagttaaccgcgggttggtttttt

SEQ ID NO: 187984 - DNA, 327 bp, Arabidopsis thaliana
  unsure (1)..(327): unsure at all n locations
ccccccccccccccccccccccncccccttttttttggggtgttggggcccccccccgggggggctcccaaaaaaaaaccccccccgcggggtcggttggtctnttctttttcttcgcttccctgctcccctctttttgtgtctcttgcgttctccgtgtccgctgcttgtcccgtttctgcgttctcgcgtccctctgggttggcgttgtgcctctttcgtttcgtttctgttttcttcctgcccgtccgcttctcgcccgttctcgtcctgtgtggccccgtctgtctgttcgctgccgcggtttctcctctgcgtttgtgggct

SEQ ID NO: 187985 - DNA, 250 bp, Arabidopsis thaliana
  unsure (1)..(250): unsure at all n locations
ttatttnaaagacaacgcattttctggatactttcaaccatacttacttttagaggcctaaactacttcctaatcgccaaaaacccacttttttattttcaagagaggtggnaaaacaatttcncgggtttcctaaataacataaaaaccctctctaaaaaaaaaaaatttttnnaccacaatcttcttcaccctctaaacaacaaatccaaaaattttcctccccccaaccaaaattattcaataaaac

SEQ ID NO: 187986 - DNA, 430 bp, Arabidopsis thaliana
gcgcaggcgacgttaggggcggagatgcgatataagatgtgcgtaagaaccgatgcacactatgcggtctctatttcacggttgaacgcttgattgggtaagagaatgtgtctttgagcccggacggtcgcgggacccgcgaagtagtttttttgggagggggacgagcaagcgacgcaccaacgctctggagagagcgcccaagaacatagaacgtggtatgagaagtggatctaccagtagtactattgaatgaggtgcacgaggcacaagatcatgaaatcaaatgacagttctagccatacgtatttagttatatgtccacaccacacgagaggggagcgtatgatcgagcgagccggcatggtccgcccagccggtcccgtacgggtcgagacaaggctagttgacaaggacaactggccgtggg

SEQ ID NO: 187987 - DNA, 674 bp, Arabidopsis thaliana
ggacagaagcgagcgcgagcggcgggaggagattttggggggaacgggcccccgaaattcaagagaaaaaagggccccccccgggcggccggcggcggcagggaattccgagccgggcgggagggcgcgcaaaaacaacagccgcggcccgaccgacagccgcgccccaggcgcgggagagacgaaccgcgccgcagccccgcggcacccagggagacggcgcaagacgacagaaagcgcagcagacccacaacaccagcacaacggaaaggccaaagccgctcttttttgtaggggggggggggggccaaccaaaaacgaccagacgacgcacgaggaaaacgcgaaggaaaccgcgaccggagacggagcaaaaggcgcggggacagcgcggagccaggcgcacggcgggcgcgcgcgaaggccgcaacaaagacccgcaccaacccaggccgggaggcaaggcggccaggcgagccacaagacgacggaccacagagcagccgaaagcagcggccaccaggacggaccgcggcaacaccgcagaggagcgcgaagcggaccggcggagccggacgaggacggagcggacacacacgacgaccgccagagcgacgacggcggccagaacaaggccgacgcacccgagggcgcaggcgagacgcgccgacgcg

SEQ ID NO: 187988 - DNA, 375 bp, Arabidopsis thaliana
  unsure (1)..(375): unsure at all n locations
ctatgacgacgcatgcacgcctacctaagctcggaattcggctgcgaaagcttatacaatatcataacacccacaagtgattcantgtttgtttacttatacaacaaaaaaaggggtactaaaatcctcaaattaaagctcatccctggcctaagaaaaaacacaagagaaggccgccaaaaaaaaaaaattttctcccaagggggggggaaaaactcaccccactctcagggagagaaaaccctcgactcatcggggcccacccatgtctttgaccagccaaaaaaatcccaaatgcgcgaaataccccaacggagcgttgtcttccacccgcccttgaaaactttaaccccccaataaacctaaaaaggcggg

SEQ ID NO: 187989 - DNA, 401 bp, Arabidopsis thaliana
  unsure (1)..(401): unsure at all n locations
cccaccctccattctctccctccctcttcttctcggcaccgaccttctttttttattcgggggtgtgtttttccancccacccccactcgcccctcttttccatcatacaaaatgtctctccctctctctttccgggcctccacgcgctctccactatcgcttccgctctccctctctccctcttcctttcttgtcttttttgctcccccctactaccttttgtcctccgatttcctactcccgttcccttccgcccgcccgcttttatcactgtttcctcgcggcttgttccctccctccttcctccttccgctctcgccgcctacgccctctccgctctcgccctccctccgcgtccgtcgtctccccccccgccctcttcctgcccctctttttgctc

SEQ ID NO: 187990 - DNA, 410 bp, Arabidopsis thaliana
cggctcgtcgctttctaggagattccaggatgtgagatttaggtctaacagacgacggtatcttctggggcgggcgcccgtccctctcggcgctcgccccatgcgagtgccacctcgacccagtcggagctcccttccccctcggttttccacctccagccgtcttgcgccctcctccttgcaccacgcgctttatgtccttcgggtgccgccccttcggcgtgggaggtgtgagcgcgtgtgctttattggtccgagtcgccgctctgttctcggtccgatactcttttcccctctctggcccgcttctttttttatgagggggggggtcgcggctcgccgaggcgctcgctacttcccctcgatacaccccctctggccccggcacccgcacattcgatatagcgcaa

SEQ ID NO: 187991 - DNA, 566 bp, Arabidopsis thaliana
ctgtgacaacgcatgcacgcgtacgtaagctcggaattcctctcgaggaagggtgagccgtgaatttctctctgaggcaattcgtcgaacaacatggggtccaaacaaccatacctaaacggcgcgtactacggaccatcaattccaccaccgcctaaagctcaccgcagctataactcacctggatttttatgctcggggggggagctgcctcagaagcctgctacattactaagggtggctgatcttaagcctgatctgcaacataccaatagctggagccgaaatccctgggagccccggtttttttcctgtggcctcaacttccggccaaacgccgggaaattctacgtgtccgacccttatcttaacccgataaagttttgaacaaacaaaaacctccattacagggccgatctcaaatttaacaaccggaaccctaattaacgagcggggggcccacaacaaaaagtcctcggttaagggctattaacagagaacaaagaatccgatctgccaacgtgtgggcggtttattaaggggcaaaaaaaaaccacggggagttt

SEQ ID NO: 187992 - DNA, 667 bp, Arabidopsis thaliana
  unsure (1)..(667): unsure at all n locations
gggggggggggggattggttgcgggccggcccccgccggtttcgaggggcgggcgccgcccccccccccctgcggcgccccggccgcgtgccttttttccggcgggcagttttgggtgggncctcacncccccccctttctttttcctttctctctttttcctcctcctttcgcgctgccccgcctgcgcgcgccgctccccctgtgtccgctctgttcgccctgtcttttctctgccgctgcgggccgcgcgtcccttcctgcgccccgctccgcccgcccgcccctttttttttcgggtttgtttgggccccccccccgggggcgcgccctcccgtcacaaactcccctccgctgtgctcctctctccctctcgcctctcctntgttgtctggggccgcccgcgctcctgttcctcctccccgctcctccgtgtttgcttggtccgtggtctctccacgctcgctcttccgtcgtgttgttgccgtgtcccttcgcctccgttccgccgcttctcccgcgcgcctcccgtgcggctctctccccctcccgtccggccgcggcgtcgctcgccgtcccctcccgtcgtcgctgcgcgtggtgtgtgcttgcgccctttcgtgctcgccgcgcctgccgccccgggccgtcgccttgccgtggggcg

SEQ ID NO: 187993 - DNA, 348 bp, Arabidopsis thaliana
gcgccccgcgcggtccggggtgtgcgtcattcctttctggtcctgtgcgcgtgacacttccacgtgtatgctgctttcccgctcttccgcgagcgttttttttttttgcgggtttgttgcccgccgcacggtgtgccgcgttccttaataaatacgctacagtcatcctcttctttgttccttctctactcctatttcgtggatcccggccctaacacctgtgtattaccgctttcttcgcgtcgcaccttctttcttgcaccggtagtgacatctttgtgggtctctggcctgcgcgtgttcgctgccatatggtggctgactggtgtgacggtgtccgtctctctc

SEQ ID NO: 187994 - DNA, 294 bp, Arabidopsis thaliana
caaaaatatgtgccggctttatttccattttccccttcccacaagggcaaagggctacactacgggtggaaccttgtcaaactttttctccccccccacactttggggtttttttccggtgaggcccttccaccaaccatttaaaaaaaaaaaggggcgagaaaaaagggcccgccccaaacccgggaaactgaaaaaaaaaaaaatttttttaaaggattcctaaccgcccttgggaaaagggccggttaaatttcaaacccaccaaaaggggtaaaagtttggtttcccccc

SEQ ID NO: 187995 - DNA, 631 bp, Arabidopsis thaliana columbia
  unsure (1)..(631): unsure at all n locations
ccccccccccccccccgctccccccccccccgccttaattcaccccccccccccccccccccccttcnccgccgccccccccccccccccctctccccccccccccccccccccccatcnccccccgagggttaactcccccccaacaaaacncccncccccccccccccccccccccccccccccccccccccccccccccncccccccccgctccccccctcccccccccccgtccccctccccccctcccccccccccccccccccccccccccccccgccccccttttttctcccggtagtgttgcccccccccccccccncccccccaaaaaaaaaacccccccccncccccctcccctcccccccccccttcccccccctcccccctcccccccccccccccccccccccccccccccccccccccctcccccccccccncctcccccctcccaccctccccccccccccccccccccccacccctccatcctccctctcctccccaccccccccccacccccccctccctccccccccccccccccccccctccccaccctctcctcccctctccccccctcaccctcccctctctccccccccaccccccccccccccccccc

SEQ ID NO: 187996 - DNA, 542 bp, Arabidopsis thaliana
  unsure (1)..(542): unsure at all n locations
gaggagaacgcacgcgtacgtaagctnggaattaagttttactgtttggatgggagtgagacagttacanaagaggttctattatattttgaaagagcctcccaatagaagatcacgcttggggtttatacttttttggggggaatttttttaaactttttgggggatggaaaataaatatttttcttttttggtcttgaacaaaaagagatatttttggtgggtgagtgggagtacggcctaatcttgcattccatagaaaaaaatttgttgtttgggagggtgggaacaagaaacacctttttggtgggttctcataacaaaaaaggttggggggggaacccgctttgaggttttattttatgaagaacacctgctcatgtgtgttggtctaaagaaaaaagcgtcattttttctttgtttattataaaaaaagaaaataaggggtgtgtggtacgcaccatttctagcgggcaggggttgagagacaggaatgatgttatttgtggatttgtattagaacgcggcgtgcgccgcatgtt

SEQ ID NO: 187997 - DNA, 523 bp, Arabidopsis thaliana
  unsure (1)..(523): unsure at all n locations
ctacaaaactatgacgtcgcacgcacgcgtacgtaagctcggaattcggctcgagttcaaatccgagagcttagcgtgaagagaagaaaagtttcaatggcggcgattntttctctcttccttttcttcattctcttcatcggctctcttctcatcatcttatctttcatcggacgggcaagatccgtcacgatccccataaagtttcgccacgttttcattacgggggggagcaagcgggatcggtcttgtttcttgtaacccgggccggtttcgagaggggctaaagtctccctcctcccctcgtaaaactaaaaatcttgccgaaacccaaacgatccttccaagttatttcccgggggtagaaggtccccacctttttctgcgggactttcgccaataccaaccccgtttttaaaagggattgatgtattccgcgccccctctcttgggttgtttgccaacaaagggtgttttttttgggaaaaaacttagaaaaaagagccctgaggggggatatttt

SEQ ID NO: 187998 - DNA, 669 bp, Arabidopsis thaliana columbia
  unsure (1)..(669): unsure at all n locations
cccgaacccccccccccccccccccgcgggtggattgttttgttaagggggccccccccatttgggcccngnccccccccccccctcttctccnccccccgcacccccntcttccccccngggggcttaaggttccctaaattaaaccctncccccttccccccccnccccccccccccccttctttttcttcctcctcccccctctttttctttcctccttcccccncctcctccccctcctctttttcttcctcccctcctcttcccccccccctccccnnccccntttttttttgggttcgtaattccccccccaccggggggcccccctataaaaaaaaatttctctcttttctctctccccccttcctccctctctttcttcttcccccctcctcccttttctcctcccttcccctctccccttctccctctctttccctctttnttcccctcttttccccctctctttttcctcttcccctgtgccgctgccctcccccttcctctcccctttcttccttctcctccttctccctctttcttccttctttcctcttttcctctcccttccctctcctcctcctctttctctccttctcctcttttttcctccctcctttcctcgcctctccttctctcctccntctgtctccccctcttttct

SEQ ID NO: 187999 - DNA, 514 bp, Arabidopsis thaliana
ggacgaagaaagagagaagattttaaagaaggagaagagggggagaaaagacccaacgaaagaaaataagaggagaagcaagagacgtacagaacaagagaaggacgaagagtgaaatagaagagaaggagaaaggaagtacagagcgaacgggaaacgatgcaagcgaaacaaggtgggaaaaagacagaaagagcgagcaaggcaaggacatgagagagcgagagggaagggcaagaggacagacaaacgaagaaaaagaataaaataagacaaaaaaagcgacagcgagagagaagtatcgaacgaggaagaaggaggaaagggaaagggagagggcaggggggacggctagggaataagtgaagaggaagtagagaagagggacgggcgagcagaaagagacaaaggaagagaaggaagaggaagagcaaagaacaagaatgagcgcaaaacgggtgagaatacagcataagcaagaagagaaaatacaaaagtaagcaaggagaagaaa

SEQ ID NO: 188000 - DNA, 566 bp, Arabidopsis thaliana
gacgtcgcccgcgcgccgtcgtaagctcggaattctgctctagggaaggaagggggagtgagagatgatgggtctggccaggaaaataaacaaaaaggaagttttttagaaccttaaggacgaccggatattttttatccccctcccggctcaaaaataattccccccgcctcaaaagaaacaccgagggtgttacggggaataatattgattattcctgttctgttaaaggggggggggcggtttttttgaaaacgaacctggggggctccaaaaaaagagaaaacacacggccccctcttctgttggggattattccaaaaaaatcggggaggcaacatcgcttaagccccctttttaaaaggggttttggggggtatatttacatcccgaaggccgggtagaaaaactggattttaaataaaccgggtctttcctttcttccgcacattttttttaaccccgggaggggtaaaaacccggaacctccccttggaaaaatcggactcttttctccccacgcccaaaaaaagacgctgaacttgtttcccgcccccctcccacgg

SEQ ID NO: 188001 - DNA, 522 bp, Arabidopsis thaliana
aggtgcactctagaagactatgacgtcgtacgccgcctgcgtaagctcggaattcggctcgagctcgagccgaaggggctcccgacaaaaaaggctctctcacttctttcagtctttatctttttccatgtctttaccaatagttgtttttagctgcttcaaatagaggaatccaacgccttatttttctttaccaacgccaacactttcatcgccatctgcggctaccaaaccggcggggggggttcttaaaccggcgacgccgttgtacaagccccccacgctggccacctattcttttataccacccaccaaaaaacctccggacaaacctccaactatttccggtgacaccagtaaaacctcccgggttcaactccctccgataaaactaccgccgggtcaacccccctacttacaatcctcccatcgccaacatttaaacctctcgtcgcgcccaacacctttcgtacaaaccccccaatccaaacggtttaacccccccccttactccccggggta

SEQ ID NO: 188002 - DNA, 184 bp, Arabidopsis thaliana
ggtgaaaaacccaacaactcaaataatataccctttaccctcgcacccaaatgggaacccgttgacgaaggtggaaccaaaaaccccatgtcgcgaggtttcaactaacccattcccacccccctttgtgtaccgtggcaaatgggggcagagaatgggaaaaaaaaggcctgtgttcttactg

SEQ ID NO: 188003 - DNA, 239 bp, Arabidopsis thaliana
ggggagaaaaccaggtgagtacggagatgagagttaaggatataaagaagtagtaggaaatgagggtgtgtgtagtgaatgagttttatgtgttaaaatgatagaagaagggaattagaggtgtaaagaagtgataggagaagtgcataatttggaaaataggctaagaatgagaggtaagaaagaataagagtgagtggtgatttgttataaggtgggggaggaggggagaggagaga

SEQ ID NO: 188004 - DNA, 620 bp, Arabidopsis thaliana
cgggccaaccgcccccccccccgagaaggaattattttttaaaggccccccccaatcgagggcccaccacccccccccccgccacacgcccccccccccaccaatttctccgggggggggggagggcccacaccaacctcccccccctcccccctccgcccaacccccccccatctagtcgtgcccgtccccccactcgcgagcccctagccccgcacaccccgctcccaacgtgttgtatccgctgccccgcgcgtaccccccccgcccccccccgcgacattatttttttttaggggcgggggggcccccccaccaccgcccgcgcctgccccgcaaaaaaagagagtcatatccctcacgcccctcgttcccccgccctatacctttcgcccccctctccaatccacacagtctcctcatccgccgccgctcctatctctccatcgtcctccgcgcctcctccccgcctgcgtccccctccttagcacgcgcgcgcgcttgctgtcgaccctcccgcgttcccgacaccctccctcctcttactccctcactgcacatccgacgaaatccctcccgccccgtttccgccccgcccttatcccgccgccgttcacccc

SEQ ID NO: 188005 - DNA, 337 bp, Arabidopsis thaliana
  unsure (1)..(337): unsure at all n locations
agagaaagataatgcggggataaagnggaagctattagtgaactctacaagatctatgacgtggcaccgccgcctacgtaagctcggaattaggctcgagcttgaaattgcggtcttattctttaggttgagctttaggttttgagagcaaaaaaaaacgaagacgccgtgaaaggggctggaaagtggatatcgcttcttgctgttggggtatgaagaccctacgacatttttaagaagggtgagttggtttaaagagactagtttgttagttaagggaactgatgcacttcttcgggtctgttaaaaaattacacactgggtagagataatacca

SEQ ID NO: 188006 - DNA, 528 bp, Arabidopsis thaliana
gacgtcgtacgcacgcgtacgtaagctcggaattcggctcgagttggttctggagatcgactcatatattactactttttcacctacaatatcatttggagatagtggagtctatgcgcctttaattgaaggaagcactccgtggattgggctattagactttttcccaaatatattggtcgccgttgcacaactatatatccagggggactgggcattaggttacttgcaaggaaccatattaccagcaaaatctttggaatgggaatctgggcttatggcgaataaaaatattgatgacagggaccccgaaaccagcttcaaaacttttagggaaagagcttcagacatgccagggcccgggggaatcaatgaggaaaacccctctctgagaattacacctggatcagctacgccgtggttgaaaaatcttcctctcaagaaccctcctaggtgaaaggggggtaaaaaagcctttttactacaaaaaccctcttgagactcgggcaacacagacctattttatat

SEQ ID NO: 188007 - DNA, 360 bp, Arabidopsis thaliana
atttaatagaggtatattataaaatggaatatgaatggaacaaaagagaggtttgaatgacggatcgaagctagtgttaatatggaagtcgtagggagatcgctctagataaatccgacagttttttcattagcgggtgaggaaagagcaaggggagcggggtcggtgtaagagtaagtttattaatatatgcatctaagcgatcgaagtcgatatcacgaagggaagatgtagggtggtaacgatagtctgatacatataagatagaccgcaagaggtgagatatatatgtgagtatactagagcctagtcgaagaacactagtgaataaatgaattgcgcgttggtagtatatgggaa

SEQ ID NO: 188008 - DNA, 482 bp, Arabidopsis thaliana
  unsure (1)..(482): unsure at all n locations
cacgcgnacgtaagctcggaattaggctcctttacggggggagtcgaaagccatctggattctttgattcttcttaattaccaaacacaacttactttgttttttgggtggggctggggggaaaatgagcttagggttctatgtaacagcttggcttacctcataaggccgggtaaaaagctccaactttgtcttcctaaggagggggggactcaatcgtggggatggatgtctccttaaggggccccctttaccgggagcgtccccctagaacccccccgggttgaaaatgtgaggggttaatgttctgcgcaaaagcaagacgaggtttccggggggggacgactttagcaatgggagccgctccgcaacgctgggagcaaaggggtgtcttcggggcgccccaccacccttcttaagacaagaaaagggcccttgcgcggcaaaacaccagcgcgtacccggaacctggggtacgtccg

SEQ ID NO: 188009 - DNA, 532 bp, Arabidopsis thaliana
cccacgcggcatcgtgcaacccgcccgccgcccgccgccaaatcattttataaaggccccccccgaatgacgccgcggacccccagccgccgcgcccccggcgccacccggaccatctctccccggggggggaagggagaaaaaaaaaacacccccccgtgcgactgcgcgccgggccgcccactgtctactcagccactcgcccatcagatcatacatgggaccgccgtccggccgtgcgtgtcgtaattgtcgcgcgcccgagcgttgccgcacccccacacccgaaaatattttttttaagggggggtggcgacccgacagctatcgccccatgctataaaaaaacattgtgtgaaatggcagtcccgccaacaccctccgtcaacccgatcccccccacagactctacacccacgctcaagccacacccccacgtcaaaagactaacctcacctcctctactacgccgcggcctccggcgctcattcaccgacccggccgcccccccacacaggccgctgtcggccac

SEQ ID NO: 188010 - DNA, 498 bp, Arabidopsis thaliana
  unsure (1)..(498): unsure at all n locations
aagcgccccacaaaccaaaacanccggggcgcccgcccggccccgcgccgcgcccggcaaccccgacccccccccgacgggggcgcgccccccgccgcacccgcgccgccgcaaaggagaaaagcgcgggccgcgggccccccccccccgcccgccccgaaagacgaagtattatcggggggggggggggaccgcagctcccccacccggagccaaggaaaaaaagactcggcgcgggccggacgagagccccccgcgaacacaaacgcccaaacaaaaaaaacaaaaggcgaaagccgcaggcggagggcgaggagccgcagacagaaacacaacagcacccggacgcgagcaaccaaccgacccgccaaccggagatcgacggaccgcgcgagcgaacggacgcgggaaacgtcgcgaggcccgaggacccgagcaccacccgccctcgcccgccgcctctgaagacacccacaaaaggacccacacccgaccgca

SEQ ID NO: 188011 - DNA, 607 bp, Arabidopsis thaliana
cgcgcgcccgcgcccccgagcggggagagagaattaggtggggggaggggcgccccgggaattggggccggccggggaccggcgccccgagtccgactgacggccgggcccgcgccgcgttatccacacacgggagagggagagggcccccaacacacaaacaccccaagctcggcgcgcgcccggcgccccccgcgcgcgagaggtgcgctgccccgcgcgagacgcgttgttgcgtgcgcgcaggcgccgcccgcggccgtgcggaggggtggacgcggcgcggctgtgcccgcccgccgcgcgcgcgcgggggccggggtgaggggggttttttcggccgggggggggggctcccgcgcacccgcgccggtgcgcgactacgtgaaaataacggggacggccgcatggcgcgcccgctatgccgctccgcccccgtcgcgtcgggatcaccgcggcgcggtccccacgcccgcgtctcgcattcgcctctcggctgtcgtcggcgtgcgttcgcgggggccggcggtgtctccgaccgtcgccgtccggcccgcccgcgcccgcgagccccgcgagcacgccacgccccccgctccgtcggccg

SEQ ID NO: 188012 - DNA, 508 bp, Arabidopsis thaliana
ggggggagggggggggaaaaaaacaaaactccccggagaaacaaacacgcgcgaaaacccccccgcggagacagcaatcccatagcccggcattagagtgaccgtagaccccaccacccgcgcatcgagaataaaggacgcggcataaggcggcggcccccgcgcaccagacaaagaatttttttttaggggggggggcgcccacccagccatcgccggcccaacccacaaaaaagaaataaggatatatagtgcgcgctgagcgagtgacgcacgcacacgcgcggcgcccgcctccacgaggcgcacgacagccagcgtaggggacagcgcagggaagaggtcgagggcaggctgagactgcggaggccgggagacgcacaatataggaagccactctccgaggcgcggcgatggtcgagcgcgtagaggcgagtcggccaatatgcagtcggaagagaggaccggtcgagggagcggacccgcagcgcgtacgctgggcggcgca

SEQ ID NO: 188013 - DNA, 526 bp, Arabidopsis thaliana
gacgtcgcacgcacgcctacctaagctcggaattcggctcgagtgtctctgcccgggacctcacacagatatcagagtctcggcgattgaagtgaactctcatccttataatttcattccgaaagattttggattaagttttgatttttttggttcacaataaccctgttcgaagctttctccaacgccgtagccaatcaagacaatgtttactcgggggggcgattttcccattccctttttaccaagagaggtattttttcaaaacctgaaaccgaaagctagaaaacccctaattgtggggacccttggtgaatccaattgtcggggtgggggaattcctttgaaagtcgtggttgaaattcttcgttttggggaaaaaaggcctaatcttgagcttgaaaggggcgctcttggcctcccaacggtttttgtcaagaaacacgtttgggaaaaatggtaagagcacttgcttcaaaaaaattgggtgaaaaagcttgagattttcaaggacctgatccgaaaa

SEQ ID NO: 188014 - DNA, 474 bp, Arabidopsis thaliana
cgcacgcgtgcgtaagcgtcggaattcaagctctgattataattctgggggttaaaacaaaaaagaagcaaacctcactgttctttcatcgtttccgagagaggagagacggacctggaaagaggaactgtgcactacacccctcgaactgtggaaaaagtctttctagattttaagggccgccgagctggcataattcttttcctcaccgggggatgaggaaaattttttccagcaatgcaaccctgagaagcagaaatcttgcttgtgtgggttcccaaatgaatgtgggggaagtaactcccccactgaaaaaaagggcctctaaagcttcccaaaccttcactagaggttaactttgccagaagagggaagacaggaaagaaactggctttttctcattcgttgtccccagaaggcaggggtttctttcggggggcttttcctttggcgtcaagaattgggtttcaaata

SEQ ID NO: 188015 - DNA, 404 bp, Arabidopsis thaliana
  unsure (1)..(404): unsure at all n locations
gccccccccgcgcgaccggaccgcccaacaccccactcctaccncccgnagatgaggggcggcacaacaaaacccctcccnccgggagagccacccagccgaacgccccgcacaacggggcaggccatgacccccacctgactatttccctcagagccccctcccgcccccataccttcttacttccgccgcgcctttcgtttccccccgcccgccgccgcccttttttttttttaaggtttgtgtggagcgcccccccgccatctttgctctctccttacaaaaaaaatgctttgtgtcagtgttgtctgactccccgcccttggttaccactctcgttcgctcttcccccgcctctatctattactgggcgcttccctcttatcccttcgcccctcagtatc

SEQ ID NO: 188016 - DNA, 303 bp, Arabidopsis thaliana
cgagcgaagagggagatagggggggagggcccttgttgttgaccccccccgggggcctgttgggggggaccaaggaaggggaaagtgtgaaatgatggaatgaggtttttataggcgaaggggtaaccccacagaggactgtgaggctggtacaggcaggcgtcgcgagtagtggaaaagtatagttacaatcgcgcgcggcagtccggtcgcaagaaagacgaacggcagaggctgcaccgccctgtcaaagagcagagagtggaagagtgaagcatgcacgaagctgagcaggatcttcgc

SEQ ID NO: 188017 - DNA, 510 bp, Arabidopsis thaliana
tttaataaaatttaccaatttgagcagccggagcacaacagcgtgatcacgccaaattctccacggggaaggatacgaaaaaacaaaatcctttactcctgcatcattccccctataaatatacctactcaactaacatatttatggcccccaaccctcagacccatataaaaacaccattacatgtcccgccaacccccgagaaaaatagttttttttacggggggggcggccgcaaacaccaaacggaccaccgaaaattttgatgtgccgcccgaaaaacccatcagtatatccgccgtgtaaattgcataccaaatcgtaactcataatcattgtattgtcctatgtaatgagtatccgtaaataatcttcaccttaaatacacccaaacaaacaaatcatacagagcagtaacaactaaccgcgatacgaccccatacacattaacagagtgaggttaaaaacccaacccccaaatagtctcacgattaagatcgccaaccaaac

SEQ ID NO: 188018 - DNA, 656 bp, Arabidopsis thaliana columbia
  unsure (1)..(656): unsure at all n locations
cccccccccccccccccccccccccggggccctatcgtttggctaccccccccctttccggcccccccccccccccccccgcgcccccccttctcccctttttttccctctgggtttggtttcccctaccaccctctcttttcctcccctccccttttcccccctcctctttcctttcccttccccccctctcttctctctccttcccccctttcccctccccctcctttccgtttcttttccccccttcttctctccccccccttcccctcttcttccgnncagtttcttttcttctcggtgggtgtgggcccaccccccccccggcgcttcttctatataaaaattttcttccttttccctctccctccccctcctttctttttctccttctctttcttttctcttctcttcccctcccctcctcctctctttctttccctttcttctccctctccctctttctttctcctctctcctcttcttttctctctctctctccctctctttcctctccttccctctcccctctccttcctcttctccttttcttcttcctcccttctctcctctcctctctctcttctcctctctttcgttctcctttcttctccctttctcccccgcctcttccccctctctcttccccttttcct

SEQ ID NO: 188019 - DNA, 499 bp, Arabidopsis thaliana
gaggggggaacgcacgcgggcgagagcgaagtgttatgtcattttttccgggggggttaaaaccaccaatttttatcttcacgtggggttcagtgaaaggtagctgacgaatgtctcgatgtggcattatcaaatagctaggtgaccaataggtttaggtggctgcgggtttattgaagcttcaggaggcaaggttaatcattaagacctcccatttctttatgagggggggtgtcaatataccaccggcattgtatctacgaatgtggtatcctgcaggacattctagaggcgcggattaaacgataatgggtggggggcagacagactttttacggtagcgtgggtgccaggtgtacagggtacacggttagagaagagagaacgagaaatgggtgattaatatgtggtatatcggagtgtggtattgtgtgtttatgtgaccgctgtacatgcacttagttatgcgtgggtaatctaagggggagtagaggggagg

SEQ ID NO: 188020 - DNA, 535 bp, Arabidopsis thaliana
gacgtggcaccccgcgtacgtaagctcggaattcggctcgatcttgagatggggctcaaatttccagacagaatcaggctgttctcccaacaatctctgttcctattcgtttaactacggggatggaagtggcacttttaggttctacatcgcaaatttcatggactttgatactggtattaccaaatccttggggtatacattccctctgctccgtggtgttttagattatagccatttaacaatctggagatttccagaggcctataataacattagattacctcttttagtgtaagaacaagaaaatttataggcaaatctctcagctgagctgagcaaaggactatgcccccaaaaacatcactctcattacacaaaaaggcgaaattacacaccgagagagtcttacagaacactcaggccaatactatcgtcgtcgcaagtccgaatatttttccgtcaaattctcttcattacaaattttgtgtggaggagctgtcgctaagtgatcaaaagaaaataataatacaac

SEQ ID NO: 188021 - DNA, 308 bp, Arabidopsis thaliana
ttttaaaggactcgcgggaaatacaggggcggacaggcgagcacgacgaggaaaccgggaagggcacaggcagcttttttccgatgggagggaaagagcgcggaaaaaaacgcgggggcggcggtggggacgcgcggccgaatgccccccgcaacttatagcggcttgccgccgtgtttcttatatccgtatcccgcaggctgcccgcttacgtgcagcttagtgagcggttggcggctgccgcgagccccgcagacaagtattttttttaaggggggggggcccgagactgccatcgcgccgacgga

SEQ ID NO: 188022 - DNA, 429 bp, Arabidopsis thaliana
ggggtggaggtaggggatagggggagtttttagggggggtttaaaccttgaataaggattattgtagagagatttgagtatggagatttagtggtgagtggggagtaagaggagggtgtataagaggaatgatttgaggaagagggggatagtggatggatagagtgagggttttggtggatgataagtgatgtggaaagtttttttttttaggggggggggggaaaagagtgatagttatagggtggtgtgaatttaattttatgtgaaggtgagagatagtggttgtgtaggaggaaattattgatggggttgggtatgtggattagtattgggtaggaagaggtggtgagtaggggaaatggagttgtgtagagtttggttgagtgtgggagtaagggaatgtggaaatgattaaggagtgtttat

SEQ ID NO: 188023 - DNA, 481 bp, Arabidopsis thaliana
aaaagggggggggttgttggggggaacaggggggagggtgtatattagtggatgagtttttagggaggggtaaaaccggaaaatgttgttgagtatgggggggatatgtgtgttattggggggtggtgttggtgtggtttgatgagaagagaatgttgagtaagagttagaggagggagaaggtaggtaagatggatttgattggtgatgggtatattgttgttttggagggggtgtggtgataaagtttaatatgtttagttagagagaatgtgtgtgttgtgttggatgataagtatgaaatgagtgagaggagatagtgaaaagatgagggaaggtggagagtggtatagtagtggaaagttaagagagcgaataaagatattgaggatgtaaaatgtatttgtgtaattaggtaaggttagtatagataatggttatgtggttgtaagttttaagaagtgtaaaagagaggtgtggg

SEQ ID NO: 188024 - DNA, 496 bp, Arabidopsis thaliana
gggccgcccgcaccgcccccccccacgaccggaacgcccgcccgcggcattttcgcgcgcgggggggaaggtccggcaaaacaccccgcccgcgggcgaccgcgccacctgactcccccgccaagcccgaccgctccccgctgacacgatcgacggactcccggcccccgccgatacgtctaaagagacaccgcgtgatcgacccgcccccgcccgcgacacggcaactcgtttttttcggggggggggtggggagggggcccccacatgcgcgggtaaagaaaaacagcagagatgacgcccccaccaaccccccccgcgcgtatcccccgccgtcatggtcgcgcgcgacgccgcaagccttgcgccggcgtcaatttaacctgcaacactggaaccaggcacacccggcggctcgacatacccgccgagcgccgcgtccagcgtccgtccatccgccgacgccccactccgcacccgacgaagcggccacggg

SEQ ID NO: 188025 - DNA, 548 bp, Arabidopsis thaliana
gttcgtaaactcggaaatttgggtctggtatagaataaaagaggatattccgtgacaaggtgcccacccttcttttgtcttttttggctacatttaccgaccatttaaggccttcccaccgggaaactaggggcattctaacgggcctccggtgtactttttggaaaataaagctgaagggaaggaaaatattcgtggtttttaaagaaggggggggggttgataaaacaaaaaccctaactacaaaaaaataatggtcgtttcaatgggtttcacacaacctccaaaagaacacaagaatttctcccacccccagaaggatagaattgagagagagccttggggaaattttctgtggtggtctctaccactagaaaccgtgaattttggagaaaaaagagatcccccctcccctccaccccacgtggataaaaaggagagaaactctggaacttttaaaaaaactgggacgtataacgtgaaagacggggccacaaaagtgtgatagggcgagggagatgaaaaaaggggggccaacatcatggata

SEQ ID NO: 188026 - DNA, 379 bp, Arabidopsis thaliana
cgtcgctacgcgtgtcccgcacgattggtgtcacgccgcgccgccgtcatcttgtgatacggcagcagccccccccgcgcaacgttcattctttaccgacacggcatgatcccccgccccccacggaccaaatttttttttaaagggggggtagcggcgcgagaccgtcgcccgctgcagcaaacgagaatgggagaaccagacgccccagaccgacgccgacaacggataacgcggcgagaaggtagcgaaccccggttaccaaccacagagagcgcggaagagcgcaaggacgaacgcaaccacgcccgcctcgtgcgaacaggggggatgagtggagagttgtgacggcagcgatcagacggacacaagatgacga

SEQ ID NO: 188027 - DNA, 400 bp, Arabidopsis thaliana
cccagcgcgcgcccgccgccgaggggaatttgatgaaggaggagaaggaggagcaatttcgggagggaggggacagaggccaggcccgcgtcgaatacacgagggcgccctcgcacgcttttagcagcgcgggggcacggtctcataaaaaataatccaccgacgatgctcgccgttcgacgcggtcgcatgactataaccgcccccgtagcatcgacatacgtcatcccaacgtaaaagcacatatactcgaacacgcaccacataccgcccctgatactagaaaatgaagcgcgacctgctaggagaggccccgccccaccagggaagatttttttattaagggtgtggtaaccgaccccaccaccgacgatgcgcgggagataacgagtggagatag

SEQ ID NO: 188028 - DNA, 600 bp, Arabidopsis thaliana columbia
  unsure (1)..(600): unsure at all n locations
ccccccacccccgcccccccccccccgcccggcttattcctcttttccggcccccccgctttcgccccccccccccccccccttcccccctcccttccccctcttcccccggggtttggttnccccacccccccccccccttctcccccccccctctccccctctctctcccctcccttccccccttcctttttcccctctcccccccccccctccctctcttcttcctcccccctctcccccccccccccccccccccctttctcttcccggttgtgttcccccccctcttctccccccctcttattaaatcttctcttttttcccccccctccttccccccttcttttccccctctctctcttttccctctccccctcccctccccccccttccctctcctcctccccttctccccctcttcctcctcctctcccccccccctccctcccctccccccccctctcccccctctctccccccccttccctccttttcccctccctctcctctcccctcctcctttcccctccctctcttctccccccccttccctcctcctttccccctccccttctcccctctccccctctccttcct

SEQ ID NO: 188029 - DNA, 441 bp, Arabidopsis thaliana
  unsure (1)..(441): unsure at all n locations
ttctggtgtgttgcccggcgcgggggccggnggggagagttagggtgggggggggggggggcggaatttaggggtagaggggaccgcgcgcggatgtcgatgtgcgatgccgcccgtgcatttttccagagcgggggggcggtgtgggataaaaaggcctgcgcccgcgtgtcgtgcgcgcctccttattcgcccgctctcgagctgctcccgcttcccccgcgttcgtgtacggagagcgcccggctgctcgcggcgccgtcgtttatatttctagccgttcgttttctgcgccgcggtccgcaatcatattggtgaattttttttatgcgggggcggggggcgcgcagctgacgcacctcactcgccgcctgctcgaataattcgtgatacgctgtctcccccgattgtgcccctccttcttgcggtatcccccggcgc

SEQ ID NO: 188030 - DNA, 550 bp, Arabidopsis thaliana
ccgcgtgcgtaagcccggaattaagggtcgtgttaaatattagggggaggcctatctacttgtagagtgtatgaaagttccctttttaaaacatgtgagtgtgtgaaaacaaaattaaccaaaaaatggccgggattgttgttgaactttcttgggcactggaaataaagggtgggtggacaaactttgaccattggagttttttttgctttgggggggaaaatcctggaatctttttttcatggagtgaaaggggcactccaaaaaaccgtttttggttcttttatggggtgggacccacaaattttggatttttataaaagtgttcgaaaaaacccaggaccaccttgggagtattgggttgtttgatacaaaaaaccattgtctcttaaattgtgttgggggccacccccgttggggggtggtttaaaaattttgttgctagatgcggttcatatggttttcgtttggcggcgaaaagattggagaatgatggaagccctggcatttgataggtaaaataaaaatatcgcgttattagataaaataa

SEQ ID NO: 188031 - DNA, 142 bp, Arabidopsis thaliana
aaaaatcgacaggtcacagagcacgacgccgcacggcacgaattttttagatgagaagggagatgtgcgagattgaatgggcgtggggcgagcaggcggagacagagcggagacggcagagacgcaggatttgagcgggggg

SEQ ID NO: 188032 - DNA, 596 bp, Arabidopsis thaliana
  unsure (1)..(596): unsure at all n locations
ggggagggnggggagaggggtttttgtgggaggggggggggaaaagccaaatgnagaagnatgagggagggttgggatgtggagagagaggatggatagagggtggtggtgattttggaagggatagatattatgtattatgatgttgtatgtgagataatgtgaggataattggatgagatgtgaagtgaaggtggatataaggaggatatatgttagggtgagggatgttttttttctnggagaggggtggggagagaaaatgaggattgatatgagatatgataatgtgtgtggattaggttttagagggtgagggggagtgtgttgtgtttttatgtagtaagatatgatagagtatagtagagtatatggggatgatagttttgtgatgtttagtgagtagtgttatgtaggtaagtgtaagtgatggaagcggtggggtgttgaagtgagggtagggaatttagagttggtgaggagggtggttgtggtggggagnagagggtatatatgagtttcagagatgggtggagattgagggtagaagaggtgagagtaggtagtagagtgtggagtttgagaggttggtaaga

SEQ ID NO: 188033 - DNA, 574 bp, Arabidopsis thaliana
agtagttgttagatggagggggaggagaaggggaggggttttattggggaacaggggggggggtttattgagggtggaaacaaagagggaggagaggatgacgagggagaattgaagtttttagaagggggggggaaaggcggggagggatgtgaggagggagggttgagtgatggaataagatagtgatatgtagagtgggggatagaatgtagggataagtgattgtgagatatgcgtgtagggaggggagggaattgtagggagatgagtaaggagtggtcggtaggttgaatagtagtggggtttttttaggaaaagaggtgggtatatggctattaggggtgaagattaggtggagacacgtttgtaaagtcgagggtttgttcgtatgtgatagagtagtaggatgagtagtggagagaggaacgtgatgtgtgatgctagaagagagaacaacgggagtatgtaaggtgggtaatggagtaagcgatggattgagagtgtagaagcggataagtcatgagttggttgacagtcgaggggtgagttgagtaagagaatggattagatg

SEQ ID NO: 188034 - DNA, 506 bp, Arabidopsis thaliana
accgcctaaccaccaatttgaaattatggccgaattcaaaacaagttaccgttttggtggaggtaaaaaaacagttcctcacattccaaaggggtaacggagtaaccccgcttaaccactccgtccaaataaaagggtggccgaatatcttaattaccttaatgtcctttcagcttaagaatctttcgggggattgcctcaatccctttttatctaagagggggggccactagaataggttaataaatgcttaaaaacttcaatattataaatacactcttccctaccctaatacggaagaccaagacgatcgaaattcatcataaatcacttggaagaagatctttactttggttttacagccggccaaatggttcaaccccattacttttcccgcgataacaccaactctcctaaacaatcatatcgaaacaatgggaaattaacttcaccttccattcaccccgaatggattttaagacaaacataacccggaaaaatcaaaa

SEQ ID NO: 188035 - DNA, 498 bp, Arabidopsis thaliana
  unsure (1)..(498): unsure at all n locations
acgcccgcagggaccggnccggaattcccgggtttacccacgcgggcggaggcttgagtccaaacgctactgggacgaaccggaagagtctctttctttacccaaatggaaggacaggacccttgctttcggaaatccctattccacagaaaccatgagagttccctttgcctatcaagagtaaaaacatctgtctccgttgggggaggggtggnccaacaagagaggggggcggacaacaaaaagaacctcccatcttctagaagcccggtttgctaagaataagaccccttagctgggaggctgaaaggcaatacaaatccgagaggggtaaccagagacttaaaagacctggacctttaactgagggacctagcccttttgggaaccgaattctaaaacaaaaaaattttcggagaacacgggaagaggggccgacccagggaagacccccatttgggaacgggaaggggataaaaactcgccattcaaaagggg

SEQ ID NO: 188036 - DNA, 592 bp, Arabidopsis thaliana
cggccttagaagggggttgcccgagggggctaggctgacataaaaaccaggcggcacaagtcccaatagcacaacccattgcacaaagggacctggccctaagaggaaacaaccggtcgcggaagcgtttccctaataaacaaggcaaaactagccaccaccgagggcgcccgaccaaacaactcagcaccgggagatttttttttttgtatgggggggaggacacacacagcgcagcggccaaagccgacacccccgtgtcgacctaccttcaagagtaatacaccatcacgccacaagacctccaacaaacacagctcaagaacacatcttacgcacgccaccacccacgcgccaagccacctgcacgccaacaccatttcgacacaatcgaacccccccacccgaaattagacactcccgacgccatcctccacacatgtcccgccccctctatagcactgatcgccgtacgccacccgcgcaccgtttgccattgcccctgtaacacccccagacacaatacccagccgcaccccatactacgccccgtacgcccggaccgtcacgtcgaactgtgtttaaccataca

SEQ ID NO: 188037 - DNA, 178 bp, Arabidopsis thaliana
  unsure (1)..(178): unsure at all n locations
cccnnaaaaggggctgcccaggggggggagaaccacccaaaaaaccccaagaccccccaaagaaggggcccgcacccgcgcccgggaaaggccgccgccggaggcacaacacgacacgaggcggcccgaacagggcgaacgcccgcaagacagaagacccaccgcccacaagggaaga

SEQ ID NO: 188038 - DNA, 155 bp, Arabidopsis thaliana
  unsure (1)..(155): unsure at all n locations
ccggnccggaatncccggtttgaccgaggcgtccgaagcacgagccccaccccnngccagagcgagaagtcggcgatgcgaganccgagccagagcggcccccaacacgaggccaggcgcatctcacagctctagctgagacagacaaagaagac

SEQ ID NO: 188039 - DNA, 439 bp, Arabidopsis thaliana
  unsure (1)..(439): unsure at all n locations
cccagcgcccaacaccacccaacacgcgaaggcaccgcacacgagcaggaacccaaaaggggaaatatctttttcacccggggaagaagggaaanaggcgcaaacgaaaaaaaaccggccaggcccaccaaacacccgccagacaagaaagcgcacggaagaagaagcccccccccggacggaaagaccggcgagagcaacggacgaaccagcgcggcccccaaaacgcgggacacccaacagaacaggcaccgggccgacaaacgggagaaagaacagcgggcgccgcccacaagccaccacggcgaacggcggaaaaccaccccaaccaccagacgcggagccacaaagggccgaacgcagcaagcacccaagcggaccaaccccccagagaaaggcacaccacaagagaacgccgggaaaagccggagaaagagaa

SEQ ID NO: 188040 - DNA, 424 bp, Arabidopsis thaliana
aagatgaatactgtcagtggcgataaagtggtcaaagagtcgccagggcgcggaaatccccacctttgggactgtgccctcaatacgatcacacttattccttgggagttctagctaacgattcttaccaacaattttaactccacccttagtgggttcaccccaaatggtcccctccaagatgtagtggccaatcacttaaggacgatttttttttttggggggggaggacagggctgatgaaaatctttggaaaaagccacaaagtcgaccacctaagggatcgggtattattcagcgcaccaaaagcacaaaattttataccgtcaaggcgcacaccgtaaagcggaatctctttacaaaatcgacccgttccatctttccatgtcaggacctccgtcttaaaccaaatatcctcgacaca

SEQ ID NO: 188041 - DNA, 478 bp, Arabidopsis thaliana
atgacacaatgactaccctctttaaggtgtggcgttagggacctagaatctgattaccggagtattgggagatgctcgacgaatcttatgactgcagactgccttgtttctaccacctctgtttcgattgtgatgcgtggttatctagaatcattcctcgcaccgtaggacatcagtggtttgtcctggggggctgtggcacttccctctggataactattttacaaattatgtagcctccgctcccgtaccggaccggctgacagaacagattggcctttcttgaagttccagaggcagaaatttcactcttgattctcttccccctggggaccttgtacgacggggtcctaaagggcccccagcccctgtacttcttgctcacgccaacggggccctaatccccctatcccccccttggggccccccccctcccaattccccgttctccttcccgccttgggcccgtaaacaattt

SEQ ID NO: 188042 - DNA, 528 bp, Arabidopsis thaliana
  unsure (1)..(528): unsure at all n locations
cagggagcccccaccacacaaacacggagaaccccccgagaggggaagcccggagcaagggcaaggaacccaccccaccgacacaaacgcgaaaccacgccggcgccaagcaggcaaaacgcagaaaaaaggaggaccagggccacaccagccacaccgaaacacaaagagcgtttttttttaggggggggggggaacaaaaaaaacccaaacaaccccaccagggaaaaaaagaccgccaagacaaaaccgcaaccacgaaaaaacggcaccccacanccnaaaaacgggacgaaaccaaacgcaaaccaagacaacgacacaccccgcacacacaaaaccagcaaccccgccccccgggcaaggcccgcgacaacaccgaaaacgccacaccaccccccccaaacacaagcgacgccccccacgcccccaaccgcgcaaccaaacacgaacgcaaacccaaggggaaacaaccacccaccaagaaacccgggggacaaacagaacgcaacacgcggaacacaaaaa

SEQ ID NO: 188043 - DNA, 516 bp, Arabidopsis thaliana
  unsure (1)..(516): unsure at all n locations
ccaccgaaagctggaacccanaaaggggttccttgggggggagggggccaacacacaaantttccataaaggggggcgcacccccccgtacccgcaccggggcgaaacaacccacccggaacctaacaacgccggcatccgcgggggaaaaacacctggtggcctcgcgcatcacaatggactaaacactttcatgcctcgcgggggggaggacccnaaatacccnacacggccactccaaaagagaacacaccatcccccttccctggggggggggggcggccctcacccaaacgaataggcctccggtctagggcacctcttatcggtcggcaaccctccaacaacaaccanagttagcttctaacacacacaccgttccgtataccaccctaactcccaccaccctttgtcaaacacagaagcccgaaacccggaggccctccctcccaccccctcgtcatgcgcataaacagccactggcaccgctcaccccccgcccattaaccaaacgca

SEQ ID NO: 188044 - DNA, 414 bp, Arabidopsis thaliana
agggtttgaccaaagggaggaaggcgccgacaaaagagcgaaaagaagcaaccgaggacaggaaagacaagcggggccagcaccggcccaaacgcaacgcgaggaaagacacacgaaagagcccgaccaacaaccgaccggcagcggacaaaaacaaaaaagaaatttttggaggggggggggagcgcagaaagaagcctgaaccggcgtctatgaaccaccggcaccgaagaatgcccctgcacaaaccaaaggaccctaaaacagcgaaaagacaagagcacgaaggcccacgaaccgggggccgcggcgcaggaggcaaggtcgccgggcccagcacataacgccggcccggcacgcggcaggcgaccacccgtaacgggagagccagaaagagcgcagcccccgcggggg

SEQ ID NO: 188045 - DNA, 430 bp, Arabidopsis thaliana
  unsure (1)..(430): unsure at all n locations
cggaannccgggttcgaccgagggggaaagccgggnaacaggcgcaaanaaagggaaaaacagagggggaggagngccaaaccaaaccggccccaaagacggacccagggcgaacaanaaccagcacgccaacgaagcnggggcacggcanggaacgggcaaaagaccggctccctccaaagggggggggggacaagaancaagacaacgaccnnaaagagcgagccaacaagacggcaaggggaggcaaagaaacagaagagggagcggaaccgccagaagaagaagacaccggacaggacggaaggaagacaaacgaacagggggcggggacaacacggaagcggcagcggccaaggaagagacacggaaaaaccgcaaacgaccaaggccaaacacaggaaggaggggcagccagaaaggcggaccc

SEQ ID NO: 188046 - DNA, 498 bp, Arabidopsis thaliana
  unsure (1)..(498): unsure at all n locations
cgcccgcggnaccggnccggaaacccgggttgacccggcgggcagaggccacagagagcgagncacgcgccgagnggggggcacnaggacccaacaaagggggcggcgccgccggcgcgagcgcgcacagagagcgccnacagaccgagagggcaaggcgcgggcccggcggacagagcggcagcagaaaaggcttccttgggaagtcgcccccgaaccccgcgaaggagggacacccaaacaagcggcggggaccagaagggggggaggcgcacccgggacgcccggcccagaggaagaggccaggaaagcacgccgcagcgcgagacaccgcccaagagcaacccggcggngggggacgaggggagacggcccccggcggccgcacgcggcccgcccgaggggccggcgcgagcgccaaacggagagaggcggcggccgagaacaacacacagaacagacaccccacaacacaaacagcgcgcgcgaacgaggaag

SEQ ID NO: 188047 - DNA, 365 bp, Arabidopsis thaliana
aggaaggggttttcaagaggtgaggaatccaagccgaattcttttgattcccggggggggacctatggggatgggtggtagaaaacaaaaaacacgtacagcccagtgggggggcgaatttcccaaggcgcgactcttcgggtgcaattgtgagaactaaaaaaattttttttttttggggaggggcccgcagaaccagagacgcaaaggagcaaaaagaacccccggcagaaaaaaacaaacaccgcgcagcataacccgcaccaaaaaaccatcttagcgccgctgtttattagccggacaatatacaacctcgtatatcgttaaacacaacctcgctatattgttggtggaagatccattat

SEQ ID NO: 188048 - DNA, 376 bp, Arabidopsis thaliana
  unsure (1)..(376): unsure at all n locations
gccgaggacggccgganaanccctggccgaggaggaaagcgcgaaaccgccnnnccccannagggggaagaaacaacgcaagcaagacgcaaccccaaacaaacaacccaccaaaacccccgcaagacccacagggagcaaaggcaaacagaggcccccttcacggaggaggaaaccaaaaaacgacccaacaaacaaaacccacccccacgcgaggggggagcacccccacccagcacaccacaccccnggaaccccgacacaaaagccggccccaaacccccaaccacggcgaacgggcacccaccagcgaccaccaacaccgccaccaaaaccccgcaaaaaccaaccacgcgcgccgcagcgcaacgcaaac

SEQ ID NO: 188049 - DNA, 419 bp, Arabidopsis thaliana
tgcactatagagacttgcgcctgccgctctagctgatcgctggccgagctacagtctattagtcaaacatcgactgaaagatctgcgcacatcatagcgcatagtgaacaagagagaagaaccagtctgcaagagatcatacatgcttgttgaggtgactctcttcatggatgctgagcattcaatacatgggatattgctatttgggacaagacgcatgaggtgcttaagcccaagcagcagtcaaggttgatgatgacacgatgatgagaccgggagattcatcttggcctagagctcaatttttgtctgaagttgggatttattctttaccttatactgccccgttctaatgctcgattctttttgttctagctttagacttagcttgtacagtgtttgactgtttgtaacaacaa

SEQ ID NO: 188050 - DNA, 541 bp, Arabidopsis thaliana
  unsure (1)..(541): unsure at all n locations
aaaaaaaaanttgcacgagaagaaaaaaggctggggttacgacccaaattggaagggggcccccccagggccgggccgaaaaccggttggccaggcggcagccgcgccgaacccccaaaacaccacgggacngcaatggaaccgagagggagcgcccccaaccaacaaaaaccgcccaaaccggaaaaccccgagccggggcaacggcggccgaaaaaaaggaggcccagggaaccgctttctcccgggggggggggcgccggagcaaaaccccgggggacaaaacgaacgaggccggaaaccccccccaagaagagaccccgcaaagcggccccgcggagcccgagaacccagcgcggccccagaccccccccccggcgcgaaagcccccaccgcgcgcaccgaaagcagagcggcgcgcccacgggccacggaaccgcggccgccgacggagcccagcggccacaaccccggccggaggggaaactaggaagagcccgccaagggaggcgcgccccgacaaccagcccgagggggagag

SEQ ID NO: 188051 - DNA, 444 bp, Arabidopsis thaliana
  unsure (1)..(444): unsure at all n locations
gggaggtgggcccctcgccggcccgcccggttatttcctggcgagccagcttctcttccgggggcgccccttnntttttttttttgtttttntttttttttnttttttttttttttttnnntnttttttttnnnaaaaaccacttcttcacccataagtggcttctcttcttcttttttttctacatcttttggggtttttttatgggggggctcttcctctttttctttcccccccaacttcacattctggtggtcgcctttctctttgagattgatttcccgtggccaattataattttccccgtggggttttaaccccctttccattatggggggcttttttgccggtctggggctaccggggctaaaaccccccggcgttgttctttgtttgcccccatttcgttttatcccccattttttttttccgctagaccaaaaa

SEQ ID NO: 188052 - DNA, 486 bp, Arabidopsis thaliana
  unsure (1)..(486): unsure at all n locations
ggccgggcccgaaaaacggcttgcccgagggggaaagacccnccccacacacnngaanccanggaggaggaaaacaacaccccgacgagggcaacaccccagcaaaaaaaacaacccacaaggagcgcagcaaaccaacgaaggcacccccccgcacgaggcaccggccaaaacaccactccctcnatacagccgcgagggacncgcgcagccagccccaacacgcaaaaaacaaggcaccaaaaccccccgggcggagggaacacacccccacgacacccaccccacccaccaaaaaccgaaaccagaacccaaacgcggcccacacgaaaacggacaaagaaccccggccaaaacccccgacacaccagcacgcaacagaccgcgaaacaaccaaaagaccacaaggcaacaagcagaccaagccgcagcgcccgaaagccaccccccccggcccaacagaaaaccacgcccccccgccaacca

SEQ ID NO: 188053 - DNA, 416 bp, Arabidopsis thaliana
  unsure (1)..(416): unsure at all n locations
gaacccggtcgccgggcggacggccaaccccccaaaagncccgaccccacgggcaaccgaagacngacaagaaaacccacaaaacaaaaaacaaccacccttagccacacgcccccccaccgcacaaggaccgcagcaacacaccaaaccaaccctccctcnctgagaggcgggaacccggacccacagaaccccaagccagaaacgaacacaaccggggccgagaggggccccccaaaagcacagaacacaccgaacacacgccccagccgaaaacccccccccaccccgacaaagacgagcaccacccaacgcaccgaggccccccaggggccaggggccacggcccccccccgcccggcccccacgcacaccccgcccaaccgcacacccgagcgccaaaacccaggggccca

SEQ ID NO: 188054 - DNA, 529 bp, Arabidopsis thaliana
  unsure (1)..(529): unsure at all n locations
aacccaggagagcaaaaaacccgccgcccaaaaacacccaacaacccacccaggccccaaccacaggaacgacccacccacacaagcgcccccacacccccaaacgaccaaggacgagccnaaccacacccgcacactttttttttttccccggcgcgtcgggacacaccaaagcaaacaatgcaaattttaaacgcgcaaaagaaaagagcgccccttttcccctccaacccatcaaacccccctcaccatccatacaaacagccaacctccaacaacacccatcatccatatatactccccaaccgcctttattctcatcaaaaccctccaccccctctccatatccctcctgccaccactataacccaccatttcccaccaccattcccgcacagtaacccccactccgactcgcctctcccatagcccgtctccccctattctacacccaaacccaaatcgccccctcaccaccaataacccccattcacccaagtaacatccctaccaccttcttttcccgttc

SEQ ID NO: 188055 - DNA, 446 bp, Arabidopsis thaliana
  unsure (1)..(446): unsure at all n locations
gcaggaccgggccggaattaccgggtttgaaccaagcggtcgagggacccctgggctgaaccctaacgctgggcaggggcctagagctgaccaggcggtccatcttcaaatggttaagggacggctccagattgggccaaaccagattgagggtttggaccaggacccccaggttcaagccggaagttgttcctatgggggtggcggcgganaacctaaacaggacaaggaccctgtgcttaaccctgaaaagaagttagagtgccttgggggaaagcttccatttgaataattgagccaaaactggaatattgttctggaagagctaacccgcttaaaagagataattgactaaaagagtttttcatcgccgtaaaaccaggggcaaaacagaattgggttgatgcatngggggcctggatatcttttttacccatgataatgga

SEQ ID NO: 188056 - DNA, 525 bp, Arabidopsis thaliana
ccccaaaaaccccggcacaagagaagcaacgcacaccccaaaaagagcacggaagcacaaccacccacagccaacaggccgcaccgcggaggccgccccgggcgcccagtaaacagacaaagcggggcaaaaaaacaccgaagagacacagagcgcaagacaggggtacacccacgcagcaccggacgaagccacagaaccgacagccagacccgcgaaagcacgagatccggccggagggggcagcgcagagcggcgcgacacagggagccgcccacgtcgaccccaccaccacccagacagcgaaccaccaaaccagaacccgcgaaacaacgaagaaaggagacaacccagaaaggaccacaacaaagccaagggcgaaaaacgctcagacacacccgccccgggagaacacgcggcgcgggacgcccagaaaaccggcgcgagagcaagagacggacaagccagccacaacaacggacgaaggcgccggaagaagcgaggagacagccccagcccccccga

SEQ ID NO: 188057 - DNA, 505 bp, Arabidopsis thaliana
cccccccacaaggacccgggcccggaaaaaaaaccccttgccgaggaggagccacaagaccagcggccccacccgcccagaacaggggcggagaagagaaccgacaccagcggcacaacacacaaagaggagagaaggggagaacgcgaaaccccgaggaaaagggggacacccgacgcgcgaaacgcccacacgcaaaaaaaagaccgacgaaacgacacttttctaaaggggggggggcggggggggcccaaaacggggcacccccccaaggaggaaagagcgagaaaaaccgccaacgggccgagcaccaccaagaaggacaccgcaaacaaacacgggaaagccccaccgcaaagccccacaccggagcgcgcgcgacgcaacgcaccgccgacaacacaagcggaaaccaagagccccaggcaacaccaacagccgcaagcaccacaaaagcaacccagcacacacacgcgccgagggccagaaacccacacaacggacg

SEQ ID NO: 188058 - DNA, 441 bp, Arabidopsis thaliana
ggggaggggcccaccaacccaaagccaccggagcaccccgaggggacacataacccgacgcagacacccacaccaccccccggcaggcccacccaaggaggataacacaacgagacggaggggacccgccaccacacagaacgcggaccttttttttatggggggggggaacaacgagggcgaccaaccccccgcggatgccccgctcagaacgagcccacacccccagctatcccccataaataacaaacgaagcgcccccacaccaagccgccgcgaccccaccgaaggccgaattcgcaccagggtacaaatgcgacaccacgcgagaacgcaaacccacccacccaggcaaaaacaaacagacgcggtacaccgtcaacatgcccattaggccccaaagaccccccggccgcgacaatccgcttagcgcctatataa

SEQ ID NO: 188059 - DNA, 482 bp, Arabidopsis thaliana
gcccccgaaaacaaaaaggacccgaaaacgcgcgccgaccccgagcgacgagcgacgccaaagcgccgcacgaaggccggcggcactggaaccggaacaccgaaacaagagacagcccacgccaaaaaaggaacgacaaacgagaccatttttttttacgggggggggggaaccgcaaagacagacgccgacccatatacccgacgacaccggcacacccgacggcgcggcaagcgggaaccgcacacaccaaaacaagagaaccgcccgggcaacagcggacgaacaacgccgcaagcgaccgtgccgtggaacctacccccgtaggacatccaacgagcaaccacagccctaaacgccacccggtaacgaaaaaaccaggaccgacgacagacggggagaggaccacagagagcccccaggaaaccacgcgcacgcaccgaaagaacgcgagagccaaacacacaagaccccccaagacc

SEQ ID NO: 188060 - DNA, 249 bp, Arabidopsis thaliana
ggggggggaggaattttttagttttaaaaggaggtgacttttgggggagggcgggcccccgcaggggcccgggccggatttatatcctctgtgcaccggggtcactattacggaggcgccccacctattttttttctggattcaagagagagactatatgtgtccgaaggaacagagggccgcaggtatatagcgcgaaccggttcaaacgaagatcgtggatgattacacgaggattggtggtccccc

SEQ ID NO: 188061 - DNA, 651 bp, Arabidopsis thaliana
ccggggggggggggggggcttcagggtgaccgggccacggccccttggaaagtcgggcccccccggcacggccccggggcgggagaggcccccccgggccgcagaggcacccgaagcaggcgcaggacgccagaccgcagggcaggaaaagggacggtcggccccaagcgccaccgcgcgcgccgcagggagggccccccaagaagagaagcagaggcatacacgacgaagaagggagaacaacacgaaagacggacaggaagaggcgcccccctccgcaacggcggaggacagagaagcacaacgggcccgaacgagacccaatcgcacaggacgcaagagactaagcccccgcccccaacaacactcgtaccgagaccacgagcagaccaggaggagaaggcaacgccgcaaacaaggacccgcgaaaccaccgtccagagaagagcaagcgatgccagacgtagacaaggagagcaccgcgcacccctaaacacccccaccgcagataggcgacacgcggccataacaacgacacacgcacagtaaggcgaacccgctcgacgtacgagagccatcagagaccggacgagcgcgcgaaggggagccccgcacaggcaaagcgcaccccgacgcgcacccgacgacaag

SEQ ID NO: 188062 - DNA, 338 bp, Arabidopsis thaliana
  unsure (1)..(338): unsure at all n locations
gggaacggaggccggaaccgggcccgcagacctaggcagcgggcgcagcagccagcaggacgagagggaaagcaaaaggacagaacaaaccacaaagccaggaccaggcccaccacagcgcagagcgcagaccgccgcgcgcggaccaacagccaggagaggagactcgcaaggacgggggaccagaaacggcgggaaacccaaaagaagcaggccccgaccgcacgaanagcgagcacaggacggaaaggcaccgccacagccaacgacagacacagaaaaacggaagcccaccggggcggataagggaaaggaagccagcgacgccgcccgaaccg

SEQ ID NO: 188063 - DNA, 330 bp, Arabidopsis thaliana
  unsure (1)..(330): unsure at all n locations
ttccccccctcgcggnngccgccccccgttgtggaagtgggccggggagtggggggctggcgggagtggactatacatgtgtgggggggcaggtcgagaaattgtcgtttgggggcacggtagggcgtgcgcaggtggtgcggggtattgtgggtggacggggcgttgtcggggccgtctcatgtatgatacttataagttgtccgcgatacgactagcgtggccgcggagcgttgccggaaccataatgggggggggggggccacaggccnctgtcggcgggggggcgacacaaaaaagcgcgtggcgtctgtcgttgcggctgggccc

SEQ ID NO: 188064 - DNA, 394 bp, Arabidopsis thaliana
tgacgtcgcatgcacgcgtacgtaagctcggaattcggctcgagtttccatcttcttcaagtcttggccagaatggactgttctaagccaagcacggctttaaatgttttagaatcgaactcctccgacatgctggaggaaattgctggcgaatgctccttcatggcaaacacttgattttggaatacgatgtgaaacaaccattttttttcatgggccagaagcccaaatggcaaccatttgcttttttaaggccggagaaaagccaatcggtatcgatccaacaacaatcggtttcggaaaaatagatggcttggtgctaatggttaacctgaggaattcttccgttaaaccatgggatgaagaaattcaaatttatatggaccgggacctt

SEQ ID NO: 188065 - DNA, 616 bp, Arabidopsis thaliana
  unsure (1)..(616): unsure at all n locations
tttttctctgttggggggttggttctttctcatataatcctcctcctctcctccggtcgcctctgcttcgtgctcagtccttcgctgtgcggtgttcctgcttcgtggttctttcgttctcgtgtccctctcttcctcttctcgcggctcttcctcccttctactctgctctccgcctcccttttttccgctgcgccgtgtcactttctcttctcggggggggggtgtctcccctcccctcgccgcgctgtccgcgcaaaaataaaagcagctcctttgtcctctgttctcgccgccgtccccttgtttcgctggtcttgtgcttgtgtgtttgggttggttcgcncttcttgtctggttctcgtgttttcgtctgctttcttctttctagttcttttcttcgatcttctggtttcatgtttcctcccgtctttgtgggggggtgcatttctgcctgttctcgtccatgcttatgctccttttccctgtatgtccgctgcctctgcccccgcctgtctattgctctcctcgttgctgcgcgccccgcccgcgctccctccttgttcgtttccccgtcgctcttctccttctttcatgctcccctcttccctctttc

SEQ ID NO: 188066 - DNA, 481 bp, Arabidopsis thaliana
  unsure (1)..(481): unsure at all n locations
ttgacgtcgcatgcacgcgtacgtaagctcggaattcggctcgagctcacatctgttacaatgcggactagactggttcttactgagccaagatctggtatgatgtgttaggaatacaacagacccaacagactgaagaaatctgctgcctactacacaacctagccgatcacttcatagcgaaagagattctgaaacgacacctgatgtgcatgggcaagaagccaacggcgcaactactgcatctgttactgatgaagagaggcatattcggaatgggtatgagcacatctgatgtccagatgaatctgatgcatcagtacacttctgaagctggaggattactgcagtgaatgctacggattcagagagttcgacattgactggatagggctgatctcncaacctgtgtgggagctagggcatatatgcacccggctatgaaaatgacttcagcataagcgctacaattgctcagcta

SEQ ID NO: 188067 - DNA, 277 bp, Arabidopsis thaliana
gacgtcgcatgcacgcctacctaagctcggaattcggctcgaggtcccttgattggaactattttccctaacccatagccagaacccaaccccttttgccttagctttcggtagcattttcatggaagctggccgattccttgtaggaaagacgaattcgatcccacttggtgaaccgaatttggcgctctatccggggaacttcttgttttggtgggaatctcccggagggaattcccgggccagcttggaaaaattcctgggtaggtggaaaccg

SEQ ID NO: 188068 - DNA, 294 bp, Arabidopsis thaliana
ccccacccaccttcaaggcccacgcgaacctgattgaggtttcccgccgctcggcgggcgccggcgctcacgtctcgccctcacctcccactcctccccatccgggtccccgcctccctcgcgagcgattctctcgcttctcccacaggggggcacaatgtcacctccaataaaatccaacgcgacactccctaagcctccacgccccccacgacatgaccagcgccacctcgcccactcccgctcatccctcgcgcggggtggacctcgtggcacggatccgttgtctcttct

SEQ ID NO: 188069 - DNA, 332 bp, Arabidopsis thaliana
cctcccatacctccgccacatttaagttcccgccatcgctccccaaacctcccggtcgcggcgtcgttgaccacatgtttgacacgctctcaccttttataggtaaggatagatttattcggggcatccctcgcctacctcgtatatttctttggcatagatgcgccattacccccgtcccttaccctatatacctcccatccccgaagattaatttgggggggggaacgtcgtaccttcaagatcatgcacttagggaatagccgttcttcacaatatatctataataccctggcacatctgttttacattccgctctccgaccctacctg

SEQ ID NO: 188070 - DNA, 416 bp, Arabidopsis thaliana
atcgacttacttagggaaagctggtacgcctgcagtaccggtcccgattattccggggtcggacgagctcactagtccgggggcagccttttttttttttttttttttttgaaacaatttgacctccagtttctccattaggggataaacacatgcttgggacaaaacagtccacaccaaactatggaaaagagaaatttcttagacatgtggtcatataaaatgcagttccaacttacattgacatgggttccttttgagggataagatttgattagaaagaaatagtttagagacattggtcctataaaataggtgcatacactacttcttaactgggataaccataaatagttttcttgtaaaacagtttcctaaaacatcgaccaggggaataaacttgaccctttgaaaca

SEQ ID NO: 188071 - DNA, 466 bp, Arabidopsis thaliana
ttaacgtggcttcgccccgtccgtaacctcggattccggttcaggtccaagggcattgtaggcacaagctgcttaaggcaagggggcacaaacctctcgtctccagtggagaagccaggcacggtgaaaggcttccaggaaccttatggcaaccccatggggggaggatccaccatgctctgcgagggatacaatgtgggccttcattgacaagcacaaatcttcggcactcttgaacggtggtactcaaaatgttgcgatacctaccctaagcaaaaagccgcccattctcacattcgtggataaccaccatgaccacttggatgacctcgacatagggtccatcgatagccgaaccacttactgtgtagctcatatagccaaggctatgattgacggatctgccattgtctacagcactcataaccgctggccattatatcagtgtctcttggaacacaccata

SEQ ID NO: 188072 - DNA, 528 bp, Arabidopsis thaliana
ctatcaatttattccttcgcaggacttcgctcgcaccgatcaacgaataattagattgtaattaccataaatataatcatatagagcgcgtgacccccggtacgatttcggtctatgctagagcaccgatccacccaaatacaacgtagaccatattattagcgtcctcttcttataccacgcataccatttatgcttggagcgtgactccttgagttgcagcaaggcgcgctgatcgcactcacactttctgcggcctcccgatgcgtcaaagctagtagactccatcgcttatcatatctactaaattactggtcctcacggaactcatatctactctcgttgcctccctgtattacctattctgtcgcattgctgtaattatcgtgatctatactacgaaatcactcgaccacggaggactggcggcgagtagatattgagatctgtgagattttatgtgagaagtatagtacgccgcccctatgtaatgctagtacgtttccactacgacaacgcacccccctt

SEQ ID NO: 188073 - DNA, 379 bp, Arabidopsis thaliana
taggggacctatagaagatcttgacgtcgcatgcacgcgtacgtaagctcggaattcgggttgagcgactcaacgcaaagcttcttcaaagattcccccagaaaccattcaactttcttccattttcaccttattcttccggtggagcttggcttttaagctggagcattggcggcccttcttccttggctttggaataaatggactctttcttattaacaattcacaccggacaatggaacgcgccatgaacttccgggtggcaaccttgggttttgacgccggttacaaggacccgaacggtggccgtgttggacaagaaggtccgtttgtttaccaaggagttaaggttcggtgttgagggccgccctgtcttctt

SEQ ID NO: 188074 - DNA, 373 bp, Arabidopsis thaliana
ttttcctcattcctttgttctcgcgtttagtgcgtccggtccgtggctcccggtctgctttattatcttgtctttgggtgttacgtgtctataaatcgttttggtcttttggtttcttcgcgattttatgtccccgcgtgcgcgttgtagtcgtgttgtttttcggtgtgtagtgtgggttgcccgccatcggcctccctctggcttgtttgtcgccttgtgtcgttatccccattctcactcggcttcttgtcgtatctccgtttggtgtttcgggggggggtgatctttttatctctgttctgcttgttctgttaaaaaaaaaaggtagtgagcgctgtgcctactttatcgctctgttgtgctcttgtct

SEQ ID NO: 188075 - DNA, 494 bp, Arabidopsis thaliana
ggcccccttccgaagctgggattcgtcttaggtgtcgaactggttggtaaggctactcagaaagtccccccgcgcgctgttcagcccggatatgcaccagcgggcccttgattgctcaggagggtatcctcttcctttcccaatccctcgagcctcatgacgtcgccccgtaagaattcggctccgctggcgttttttttttttgggggttgggcgtcacccccgctaaggctttgataaaacgcgtctaaaccacaacgcatgggtccacagctatcctccggcccttaatagctctacctttacctgatctttaccctttttctttatggagctttagtccgaaagacagctcacaactccttgcccaggatctaagtttgagcacaatttctcgaccttatgtttcaccatttgcttgagaacaacaggtcgtacgcgcctagactttatcttattgcacatgaagcctctgcgttggggttcttgcaggt

SEQ ID NO: 188076 - DNA, 316 bp, Arabidopsis thaliana
gccgccgcaggaccggccggattccgggcgaccaacgccgctcctagacaccgcaaaccaactacaaccaaaccgcaatgcaacacaaccagagggatcaagcccagctggaccaaaggggcaacctagagaccccgttcacctggggggcgacccggaccggaagacgaccccgaaacccaagaaggggcggaggaagacggggagacgggggggccgggggaacacacggggccgggagagccgaccggaaaggccacgaagaacggaaggaagaaacggcaggaaacggcccccggggggggccaaacggagc

SEQ ID NO: 188077 - DNA, 340 bp, Arabidopsis thaliana
  unsure (1)..(340): unsure at all n locations
ccccgacttcgttgttgcgtgcgtctcggtgtttggtcttctctttcggccccccgctcgnccgttttttcccccctgtctttttcttgctctcgtggcgcgccttcgtctggcgagcttccctttttcttctggggggggtgtggcgtctgttaaaacctctcctccccctctctccctcttcgttttcgttctcttccttcgtctcccgtcgctcgcggggttcccctcctggcgttctcgcgattctttgctgtcggctcgcgtgcccgtttgtctctcctcgtctctatggcctgtgttcgtctgcgggctcttcttttttcgcgggggggggggg

SEQ ID NO: 188078 - DNA, 601 bp, Arabidopsis thaliana
gtggggcgggtcgccgcttcgtacttcccactcccgcgttcaacgacatcagtggggtcctcctccgtcgaggtcggtcccttccccttctggggggtagcccctccccaacaacactctcccctcctctccacctctccgcgctgtctgggctgtgtctcgccgcccatctccgggggctcgttgtgtgtctgcgcgccgatcttcctccccttccgtctcccctctcctgtcgcccccctcccttttccccctccctttcaaccgtcgtttttctccgggggggtgtttcttcccgttcgccggccctcccttcttaaaaagcccccgccctccccttctccgctccgcgcctgtttgtgagcggccgacccctgtgcgctggtctgtgcgccttgcccgcctcctttctcggctttcccttgctctcgccgttgtgcctccctctcctgtccccgccccgcggggcttggccgtccgcccgccgtccctggccctctgtctgggagtgggtggcccggctcttcgcttatgacttgcctcggttcgttgttctctctccgtcgcctcctttattgtgtactcacctccctcggcccgc

SEQ ID NO: 188079 - DNA, 431 bp, Arabidopsis thaliana
tctcactcccttctcctatttcttcatacctttttcttattccttctcaccactaccgccctttattcggcccccccttaaaaatcacattccctgcctccactcaaccccaactataacctcatacataggaaaaatcttccccacacaaaatatcgcgccttccttcccatcccacattatccctccctttctttcaccgggggacttcccattgcttaaaaaaaacccccattttaccctcttctctctaatactcccccacccccacattccaacaaacactcctctcatctatatttcattcctactccctcccacaatctcacggggggggaatctatttcctttcttcttcacaaaaactcacattaaataatatatattctatttctttcacctatcccctccaaaaaaatctattcctttac

SEQ ID NO: 188080 - DNA, 531 bp, Arabidopsis thaliana
cccccgaccgaagcccggaatccggcgcaaggaccacccgcccaaggggcgggcccaaaaaaaaagcggaaaaccacacccggcgccttaggcgaaagcagggcaaactcccccagccacccaggccaaacgcgccccgcccaccccacaaacaggcaccgacacgcccgccccagggaaagaaaaggcccccaagagaccccttcttcggacgggggggcgagggccccaaacccccaacaccccccccccacaaaacgccgcgggcaacacccccgccgcccaaagcgccaggccccaccacccaaccggcccacccagcccccgagccccccccacaccctccgccacaccagcaacatgaccacccccaaaccccgacactgaaccccactccgccccccaaagggccgtagaagccgggcacccagaacccgagaaagaacacgaggccctagacgggacacacccccgccagaggcccacacagcagaaccccggcccttaaccacccaccaggacaagaagccc

SEQ ID NO: 188081 - DNA, 365 bp, Arabidopsis thaliana
gtcaccgttgtttatataactatcgcgctagcacttctctatcgcacgcgtacacattatgacgtatatgtgttctttacaccgcacgtaaattatagtgtataaagggttgatagcctatacgtagcacacgctcgcgcgccattctggacgcgcggtgctacacctccctaatcatcgctctaccttaacgctcggcagtcctgaatagggaggcacgttgttaatggggtggtgtaataccgcagcatgtcttgtatataatttctcctcggtgttctgtgccgtatatacatgttcctatctgcttaaatatttcccttcattctatcacctccgtcctatgaattgttctatttcttctt

SEQ ID NO: 188082 - DNA, 664 bp, Arabidopsis thaliana
  unsure (1)..(664): unsure at all n locations
ctattactccttttttggtataagttcttctccaacacctcaatatattttctccatcncatggcgggctccggcgtccgatccaccgaagtatatatttcttcaacccgagggtgttaagtggtctcaaaaaacaaaatccctctttcctcccgtatacttcaaacagacccacgatctcatattctattactctttccgtggcggtgtggtcattctcgccgtcacatataatacgtattcttttcacctaactcgaactctttctctactttgtgctgtcaacccacccccgccaccctttcttccgggtggggggactccccctcgacggttgggcatttaaaaaaaaaaatatggacctactcactttttcgcgctcttactttccctatcatttcaccactccgccaatccctactattagagtaattagtcattctacatattgttgttagtattcgactcctctgtgatcttctcttgactaccgcccctcccctttaccggctcgtctcgcgacatccattcattttttcttactatgcagcgactacgagaccgacttacgcttatctgcgtactgcaccataattgttccacaacgatttccgcctatttctattaattctatgtcactttctcatccctcatcctctcttcc

SEQ ID NO: 188083 - DNA, 179 bp, Arabidopsis thaliana
cgcgcccactgtatctatccctgcatcttcccccccctccggtgcttgcgccgtctagcgcggcgaccattcatcgcactcgcgcgagcatactcccttcctaaattgctccttcccacaatcacccgaccgctacctattcacttctcaccggcatatgacagcgccttatcatctta

SEQ ID NO: 188084 - DNA, 533 bp, Arabidopsis thaliana
cctgcacccgtacgtaacctcggatttcggttctttactcaaacaaacatttcactgggctccagacctacactaaaaagccattcagcgggaaggggttatcgatttttgagcggcaaaaatctctctgctccgggtaatctaacacaatcgccttatctctctctcctcagatcctgccgccactctccgcacacagatgctttttttttagcttggatacgaccgccactctcacaatctattctcaggtcaccctcaagctcttagcatcccagacataactctgtacctacgtctagatctctcatggcgcatattgtttcaacccggatactccatatgctatatatgggtacatcccactataggctcacttctttccttaagaccctccctgttacccatagcgtcacgagaacatatagaaaacacaaagagccagcgacacaacgtgccactcggtcccacttcgcaaataacttgtcccctcccctatcctgaaacttttttatggacggataatcagtgga

SEQ ID NO: 188085 - DNA, 461 bp, Arabidopsis thaliana
gcctgcagggaccgggccggaattaactcccggggccaagagcccactaggcggcgggcggcccttttttggcctctaggccggaggggcacggcggcccggaaaagaccacacccgcgggaaccaacccttaactacggcaaaaggcccgagcagccagggaaaaaaaatctctcctgcaccaaaggggggagcccgggcccataaaacaagagacccggaaggggcgccacacaaggccccggggcccccaaaccagaggaagggccagggagggacccaccccccaacgggaaccaaagacccgccccaacaaaaacccgggggagggacataagggcaataaacggggcaggcccgcaagccagaaccaccagcggcaacaaaacaaagggcaaggcaccccacagcggccgcaaacaccaaggggggagggcacaacccgaaaaaaaaaagttcgc

SEQ ID NO: 188086 - DNA, 569 bp, Arabidopsis thaliana
cgctccctgggggggttgtggcctgcccctcgcccgttgtcccctgcccttcctgtctgtttgtgggtctctctcgtcgggtcctttttgttctcccgggggcgggggctctcaaatttttgccttctctctcctttctttcgtctttcgttcccgcggcctccgtggggggggctttttcgttgttcgtctggggtctggggggcccttgccggcgcatcctttcctccccgtcctctggcggcgtcttttttggggggggggggccccctcctcctccgtgggtcttcttcaaaaaaatcatcctttcctcttcttgtccgcttcttgccgcgttttctttttctctggtgctttcgtccgctctctcgggctcatgtcggtgcgttccgctgtgtgcggggtgcgcgtgcctctttctcttgtggcgggtcgtgggccctgtcggccggggggggggagtgcctgtactgctgtcggttctctttttttgtttgtccggctgcgggctgttgccgcggtgtggttgcctgtctgtgtgtgctgtgccggcggctgcgtggtgttcg

SEQ ID NO: 188087 - DNA, 504 bp, Arabidopsis thaliana
cacgacaatatacacacaactccccctcgcaatattaattatctatatcatcttgggtgttcacaacccaccccacctccacccataatgacacccctgctacctcctacccctcatacactccactactcaaccatccccgtaatttcacacatccggggggggggacacctactatcttcattactccacaaacaaaactttccccctgctctcccctatccccgttttcatacaacctcaacacatcccgtctctatcctatctcacattaaaaatttattatctctctattctatgtaatcatcttcatacaatatccgcaatattaacaattaacccaatgggggggggctaatctatatctcatcccccatttctcaacttcatattacaaccctcctcgtttaatccgtataaattaatcttccgtttataatttcaccctcacccccaatcacaaaaaattctagtacagtaactactaatctaccatccccccct

SEQ ID NO: 188088 - DNA, 148 bp, Arabidopsis thaliana
tctccctgggggggtggctcccctataaaaaacactgctcccgctcactctcatccgtccgtgcttctctctacctgtcgttgatcacgacaatcgccgttctcctcgctgcactagtgtccctacggctccgtaggtgttgtgatgc

SEQ ID NO: 188089 - DNA, 479 bp, Arabidopsis thaliana
  unsure (1)..(479): unsure at all n locations
aaaaatttagggaggagccattggggggaaaaaaaaaaagtctatcagtnaattactcgacgcttatagggggaacaagcagcgccgcctgtacgggtcgggaatttattaatgggtgggagagactagtacactagtggggcgcgccgcccttttgtgttttttttatagtgggagccattatttcctagttaagaagagggcttggagttaaataactaggaagcaatacaaggcggggggagcctaaaggaagggagttgctcatatttttcaggggggagggaggaaaaacagcacgaccttagaagagagaaacgccgaatgtaaagagaggagagacatagaaacaaccaaagaccacgcccacctggctggaaattattgggaagaggcgctcccgtagccgcctataaggatagaacgaagaggaaaggcactgctgttaactatgagggcgcacagagcagaagaaacct

SEQ ID NO: 188090 - DNA, 277 bp, Arabidopsis thaliana
  unsure (1)..(277): unsure at all n locations
gcggtgcgctcgacgtccctgttctactgtgtcctgccgttcccggttcttttttcgctcccgtgcagtctccgtcctgccccctgccccgctgtcgcgcgttccttgccgtccggtttcgcgcacttcgtcggcgccgcgctttctttctctctcagcggggggttctgctcctcttggccaaaatacgcgtcgtcggggtaggcggntgtcgtgcgttcgcgtctttcgcccccctcgcgcttgtgttgtggttggcgtttgctggtgggtgtga

SEQ ID NO: 188091 - DNA, 328 bp, Arabidopsis thaliana
cactctttttgggaaagctggtacccctgcaaggtccggtcccgaatttattcccgggtcgaccaacttactaatccgggggccgcctttttttttttttttttactggttcctggttaattaaatcccgtgggaaccttttaaccaaacccaaattccaccttggttaaccttaaccaaagttttatttaaggggggggaaaaccttgacctaaaacccggtattaaagaaaagaatctttctgaagaattattaagcttattaagaccttgctgaccttgtcgttcgtcgtttcgggtcaaatgctctggtaaatggccttggcat

SEQ ID NO: 188092 - DNA, 264 bp, Arabidopsis thaliana
gccgcgtacgtaagctcggaatccggctcttttccaggagagggaagggagccaaattagaagggaaaaggccccctcgaggcgaacgcttgacagcggaacttcgcagctcctcgtaagacgatatcagtctatagttgcctattgccactatgcgaagttccccatgtcgagatcagcgaggaggatccttagagagaaacttttttttttttttgggagccggcggggaagcggcagccaagaccgcgcgaaagacaggcc

SEQ ID NO: 188093 - DNA, 487 bp, Arabidopsis thaliana
  unsure (1)..(487): unsure at all n locations
ttacactccccttccccccttccttaacctcgaattccgcttcaggtttgggaatgtaaccggaccaaccccagggggaaaggaccccttccggttaagaaaacggccaacgtcgattccttccaaaaaggcagcaggaggatcaaaaactgaaccaaggacctctcctcctacttacggcttgtaatctctaccacacaccacagttcttgaaaaggagaggagaggaggaaaccggattccccccccttaaacaatgtcgtttaaactgcatgaagtggtggtttttttgcttttgtaggccaaagaggtgtccagggttctcttatgtatgcgtgtatgagttggttggtgtgttggttttttatatgtaatctcgtttttttcggtaatgcttttatgcgttttgtaaatttttgctgcaatgaaaataaaaacttgtggttttaaaaaaaaaaaaaaaaaaaaaaaaanaaaaaaaaaaaaa

SEQ ID NO: 188094 - DNA, 456 bp, Arabidopsis thaliana
tccccagctctaattcgactttctttggggaagctgggacccctgccaggaccgggcccggatttatttccggggcgaccagcctacttatccgggggcggccctttttttttttttttttttttttttttttttttttttttttttttttaaccaccaagttttttttttctttggggcaaaattttccaaaacgcttaaaagctttcccgaaaaaaacgagtttccttttaaaaaacaaacccccaaacaatcttttccccgcttccttaagaaaaccctgaacacctttttggcctacaaaagcaaaaaaacccccctttgatgcagtttaaacgacatcgtttaagggggggaccccgggttacttcttcccttctcttttccaaaacttgggttgggggttagaaatcacatgccgtaagtaggaggagagctccttgggccagtctttga

SEQ ID NO: 188095 - DNA, 168 bp, Arabidopsis thaliana
atacgcagagagttcgagaggaggttgcgcgatgctacagatgtggcggggggcgggaccaactgtgaaacaataattacgagcgtgcctgccacagagcccatctcgcaacgacgcgagtatgcgaccgtgcggacgcgcgcatgcgctcgttcagatatataattc

SEQ ID NO: 188096 - DNA, 499 bp, Arabidopsis thaliana
  unsure (1)..(499): unsure at all n locations
ttcttctatctgcctatgttggcatttcatcccacccacccccctccaccattttccaacccacccaaacccactccctcaagcggtcccataccagccaaaataatcctcttttcactacaggtgggaaaaaatccctttaaaaataaacancctctntacacatcacacaaccatttacatctctacctcactatcccaaattccctatcaggtggtcttaactctttacatacatcataactacctgtcctgctaacactatttaaatcatcccaatctcttcccacaccccacacatacttttagggggtgggaaaccccccacactgccttaaaaaaaaaaaccctattctccttttctttctctctttttaatatcactctctactctctctccatataataacaaaataaataacattcccacctttataatctatctcacaccatcctctttctacacaacacttcgggggggtaccaacctcactcatcc

SEQ ID NO: 188097 - DNA, 513 bp, Arabidopsis thaliana
tcttcccattcataatatatttactcttcacgcaccctcactcacccactaccaccatttctcccacatcccttattccttctccccccgccagcacttctttaataccggatcactccccaaaacaacctcccctcccatcaccgatacctattccccctcgatatattacatttatctagtggaatattatactcatatctcccccacacaacctattaggagtttccttcgacaaccccacacaacacatccatatctaaggcccatctttcttgggggggtggaccactcacttctctcgctcccacccaaaaaaacacaactactctccactctcacctctccttacaccactcacctccttcctcacacctccacacatcccaactcacacagcccgctcattattcaattaatagttgttctttataccacaatctctatctccttccccccaatctctccatctatagggtggggtggctcttccttctatgcactacccttttc

SEQ ID NO: 188098 - DNA, 496 bp, Arabidopsis thaliana
aggtgacctatagaagtatctatgacgtcgcatgcacgcgttcgtaagcttcggaattcggcttcgagggccccacatcaggagggagaaaagggatccgttatgggggggggaagtgggtcacttaggggaatcgcccaattggtgaacggtcctttacccgtggcatggtatggtggaaccgccgtattttaaagaaaatttggccccctttggaaaaaaaaaaaaaaaaaaaaaaaaagggccggccgccacctatgaacctgtccaccccggaatttatttccgacccgttccttgagggcttcccagttttccttttagggagccgatttaaacctggccgtatccttggccttagctgttccctggggaaaatggtattccgttcccatttccacccaccttccaacccgaagccttaaggggtaaagcctggggggcctatggagggacctacctcactttattggcgtggccctaactgcccgttttc

SEQ ID NO: 188099 - DNA, 756 bp, Arabidopsis thaliana
ctcccccgccccctcacctttttctcttcctcttccctctttgcctcctctcccctttctccccgcctttctctctcccccatactcctccttctctctcctccgtcctctctcccactccagctgccactctttattttaccctcctggttatgccctctcccccacaacctccattctatcacacttctcctacctacctccattcccctccccacattatccccttcccttactcattattgtggtcacattcacctcgcccctctcccctccaccttctcctctctccatccggctctcactcaccccgtccccctcccccctctccttatctgctccccccgtccgctccattctctccccgggggtggggactcttccactcttcctcctcttcccctccctctaaaaaacaaactcttccttctccctccccattcttccccctttatcttttcttctcctctcctctctcttaccctctaatcctaaccccatctccttacattccctctcccctcctcctccccccctccccccctccttccactctttcaccctttcctccttcacattggggggggggggttcactctctcatcacacctcactaccttctttcccctcctctctaccccacctctctccctccccacctcccctcctcactctctttcttccttttctcctacattgtttactatccctctccccaaacaatcacaaccaccgcccctcctcctttttccatct

SEQ ID NO: 188100 - DNA, 518 bp, Arabidopsis thaliana
gccgcccacctaagcccggaattcggctcgtttccaaccccgagtttgggttctcccaaaaaactcgagcgtgaatggggccaatacctgttcagtatcaccggggttgacgataacctcctatggattcgtttcccttacgctggaaacggatctttttcacgtccccaaattaaaaacccggaagaagctttttttttggcgagcgggggacggaccaagtgtgctcataccgcccaccacttttctgcaggtgtccggtggccttggactgtgggaggagttggggtccacacggtttgggttggtcctattcactcgcctcacttgggccttccctagattgatattatattcaacaaagtttcttcgactcagggggtatcctattccagtaataacccttttgacacctagtgtgccatgacctccgcgccctcttacatagagtatcactagagaacctaatgcggggaaagaagccgcggaatacgtaatacgaatgcgggagagggaag

SEQ ID NO: 188101 - DNA, 598 bp, Arabidopsis thaliana
cttgctcccccccgctagtcggccctctcgacccagccaggcctctccgtttgccctatatctccaccccccacacttctttattgcgacgtgcggcccctatgtgtcgtcccttgtttatcgcggggtctggctcggaactgcccagtctcgctagcgcctctcaagctccggtggatttttatatgttaatgtgttagcggccggccgcgccgctgtttagtttgggggtgcgcgtggtaggccggcttccctgttggccgtcccggactgtttcaccgcgggggggcatactaaccccgtcgtgcgccgcaaaaaaagattcttctgttcttgtgtgcgactcttgttccttagtctgtctccctgcactctccgttgctgtcggacctcaggtatgggctggtactggtgctctatgccccgctacgcacgggtgatgtttgcttggcgggtctcgcgcgggaggaaggcgcgcgagcagtcgttttcctcctacgctcgcgcagggtgggtgggtgttagtggtgtataaggccagtggcgccgggccccctccgcccagcggactcccccgtctccgcgtgctcgttcctcc

SEQ ID NO: 188102 - DNA, 452 bp, Arabidopsis thaliana
ttgacctcgcctgcacccctaccttagctcggaattcggctcgagaaaaacctttaatctctcggtggcttggttccacaagaaccagcccattaagattttccccagtttattgaaccccaacacattgggccaccagaagcgcgcctggtaaaaccgattgggcttaagcttccttcattgcttcttaccaaaacactttagaatgacttcaaacccaacctccattggtacccttaagaaattgattccaccagcccaacctaacactaaaatgggtcaaaagaattaccttaacctccatttttgtgcctgcccttagaaggttcccacaggaacctcctaaggattccacaacagcctcttaaataccaaaattatatcctattaattataccaacactccctctctttcttttagtgaaaaatgtgaatgcctctgtttatacctg

SEQ ID NO: 188103 - DNA, 441 bp, Arabidopsis thaliana
  unsure (1)..(441): unsure at all n locations
ccgcttccccctttcctctctccacttcccccctgctccatgcgttctcctcccggcccgtgccgttctttgtcgttcgggggggccagcccctcttcaataagagngctgcgccatttatgttcctcttccgtcctcattgtgtgtcgctccancgttttaattctcctctcttcttttctgggggttgtggtccctccgcccgcccgccccatctccccgtgtttttttggggtatgtcccctctgtccccccgcctctgccccgcgcctatgccggcgttgcgcgctactcttttcctcccgggggggggctgtcctccctcgtcctctgcgctccctccacgaaaaaaaaattgcgctgccggcctctcccctctcttctccttctctattgtcgctgtagcgcgtggcccgcctagtcttctaggtctctcgttcc

SEQ ID NO: 188104 - DNA, 264 bp, Arabidopsis thaliana
  unsure (1)..(264): unsure at all n locations
aggggggggtgacntctctcaacatcggctcttcttcaataaaagaaagaactcttatattacatctacttcttagctgaccagaacatactcggcccttcacggttacctgttaactgaggagggcgccctcgacctagattcattgtgaagacttactattcgatacaactttaccctgacatacacaaatagagatgatgagtagccgcggacgtagacctgtatctcgacttgacacgtaacggtgcccgcgcaaaacaa

SEQ ID NO: 188105 - DNA, 484 bp, Arabidopsis thaliana
cccctaccttaacctcgaaatccggttctggactaaatcaaatatgttggggaatacaaagtaacccaaaaccgccttaaggagctagggcttatgattttggggagggacaatcacaatatgcttaaagatctggactatttgtctgagccgtggaaccaacattcttgtcggaccttatcaaccaatataacctctttttaaagcgggaatgcctcggcattaaccaattaagacaaaggatacatggtctccatgaaatttcacacttaagactaaaaaatatgatagatagatccactaatatgtatctgaagcaacagaacctactattacagatttatagcttcccccaacaatagagtcatcagcctacttaatatagtatgatgctccaaacacattcttcgatcctttcatatacatcaaatccctcacataacaatattcaacgcattattcttttatatttgtatcaatttat

SEQ ID NO: 188106 - DNA, 456 bp, Arabidopsis thaliana
  unsure (1)..(456): unsure at all n locations
ggaacctggcacgcctgcagaggccgggccggatttaatcccggggcgaccagctcactattcgggggccgcccttttttttttttttttgattatctggcggagggggaccaccaaaagtccaacctgctgaaaggccacaattgtattttttagaagaagggggaaaggtagccggaaaaaaacacctttttttatcaaaaaagggaaaagnggaccagataaagaagaaatgagaaaggggcccccacaataatccggggccataaccacgagagggggaggagctgcccccacccaatggtagcagcaaatcaccccacccaacccccgggaggcaataagggctgttaaacaagtcggccaggaaacataccacccagccggaaagaatcaacgaacagagacgggccttgtctgtggacccccgccccaatgtgacacaaccataaaaaa

SEQ ID NO: 188107 - DNA, 672 bp, Arabidopsis thaliana
aacttcactgctcatatcctctttcgcttctcgcatttcatcttcttctctttctcccttctcttcatccctcttatctcctttccttttattcgttcctgccctctgttcgtttctttttaattcttccctgattacactcaccccaaaacgcccttctattatttcttttttctcctcctatttttcttctatttttattttgtgcccttcatccagcccccccttccttaataaatcctccttcccggtcctatccccgctcaataattccattccaacatcacttcacccattattcttatctctcttattctggggtggggggctccccctctctcccctcacctctcggtcttcacaataaaaacttcctccatacctctcatcctccaccgctcgtctttcctctcccactctcttcctacccctctgtttcttctcttttctttttattttctattcatttatctcctactacaccataactatgaccctccctctttctccttcttccactatttttttggggggaggtttctcttaccctgctcctcacttacctactattttcccttgttcctttttttaatctgtccctctcttttttctgtacaccggatcctttcccttccccccctgtctacatatctctcctcttctcctcccccc

SEQ ID NO: 188108 - DNA, 396 bp, Arabidopsis thaliana
  unsure (1)..(396): unsure at all n locations
ctctctcctcgttcctatcttagtcttcatttactcgtgggaaacgcccaaaataattctcttccctctacccatcaccctcccccaatcccctcttcctcggctatttctcttccttttctcaaacaattatccttcctttctttcactactaacatattttccttccctttccctttttcggtgtggggcccncccgtggtcctctaaaaaaaatactctcttctttttcctccccctctcctctgctcccgcctacctcctccgcctaccccaatattctatccgctctttaaattatcatctcttctaccttttttactcctactcaccttccaccccttatcttcgttcggtgattctataaatcatccttcctctcctcctatcccctct

SEQ ID NO: 188109 - DNA, 243 bp, Arabidopsis thaliana
ctcccccttctgcttctttgctttcgcttccgctgcggtccgtttcttaactcctgggctcgttcccccatttatctccgccccgcgcgtcccctatttttacggtgttctcccctcgtcggggtgtgcctttttatcgagttgggggtttgcggttctctttacaatctctccgcgcgtcgttcggtgggctatttgtttttgcttccggcggcgtgttattctttgttgatttgtggtttg

SEQ ID NO: 188110 - DNA, 670 bp, Arabidopsis thaliana
  unsure (1)..(670): unsure at all n locations
ttttatctctcttcggtgacttttccgcttctcctctccatttcgcctatttcgctctgcctaatttttcgcgttccttaggctcctctcccccgctggcttgtcgttatttagtgtggggggtttcttgcttccaaaaacccacctcctcttgtcttttcctctatgtgttcttctcggccgcngtatttttttatttcgttggtttattttcctctgctcggccccaccccgtcatttatcttttgtgcctctccccgtttccctctcgtctcttccctcttggttccgtgtcccccctttttgaggggggggtttctctcacctctcgcctcccctttgcaaaaaaaaccgttttctttctcctctttttgtcgtttctattgtttcctgtttgccgccgctctttgttctcttcattttgtggacgaggtcccctactgttccttcttgtattttctctctctttcttcatgctcccctcctccgttctttcgggtgtgttctttctgtgccacgttcgacctacgcgccatctgcctcccgcctgccctccttacctgtttgttgttttattatgtttntctacttagttgttcctttcgcgcgttccgtgccacaagtctctagcttttcccattcgccgcgttctctgccccgctcctccccc

SEQ ID NO: 188111 - DNA, 589 bp, Arabidopsis thaliana
tgtcctacctgcgcggtgtgtcgttctcgcctttcttgtctgttgtttctccctcttctcgtcgcttcttcttgtcttattgcgtgttccccggcccgcctccgcgttctttatttgggggttgctctcgcctaaacatcccgtcagtgtcgctcctgcttgcttcctcccggtgtgtattcgcttttgtggttttgttgggtctccgcccccgcggttccctggtcgttccggcctgtcccctcctacgtctcttccagtgtcctggcgcctcgggggggggggcccctcccttcctcggttgcttgcaaaaaagcgctccggtgtctgctggcgcgctcctgcgtcgccgtgttgccgcgtctctcgtctggctcgctgcgccgcgtgttcccttcttctcgtcttcgcgttcccgtcccccggccggtcctccgcgctctcttggcatcgccttctcgggttcgctcttgcggttcccggcccgcttcccttctgctgcccgtccggccggtcttgtgtgtgggtgttcgggtgtccagtccgcggacgccgtggttgccctgtcccgcttctccttcctcccccc

SEQ ID NO: 188112 - DNA, 647 bp, Arabidopsis thaliana
  unsure (1)..(647): unsure at all n locations
cctgtctccttttttgcccctctctgtccccgggtttcttttttttgttgtggcgcgtgtgtcggggtgctctttccggctctcctttagttttccctggcgggtgttctccttcccgtcttcctctctttttttcccccggggggtttgcgtctcccaaaatctcctcgcctnctctcttttccctcctcgtccggtcttccgcttcttctcttcaccgtccctttggccgcggcctgtccgccctgtctcttgccgtcgcgctctcatttctttttctctctcccgtgctgtctctctgctctgtctctctcggcgccctttttttcggggggggtggggctcctccccgtcgcggcgcctctaaaaaaatcgccccgctttctcctcctcgccccctgttctctttgcgcttcctctcctctccgggtggtctgtcccgtcgccgtttttccgcgcctctgcttctctctccctttcctgccgctctctcctcggtctgggtggtgtttgtctgtcggtttcgctcccgtgtcgttcggcacgcccccgccgcccccgtgtgcgtgccgctttctccggccccggccgtccctccctttttctgtctttcctcctcttgtgcttccctggtcccatcccgcttt

SEQ ID NO: 188113 - DNA, 475 bp, Arabidopsis thaliana
accgcccctgccccccttccttagcctcggattccggttcagccaaaccaccaaaaaaaaggggggggccttgggcctcctcctaattaaagctttccttcggagtaaaccttggattaatttggaaaggtttgggaagttccatgtgattctggggaaaggggttggttattattggggattcccgtaaaaaaaaaaaaaaaattaaaaaaagggcggcaaaaacacaattaagctcttaaatcaaaaaaaaaaaaaaaaagggggcgccccccgcttagggacctctccaccccggaatttattcccgacccggaccctgagggctacccagtttcccttttggggagccgtttaaaacctgggcgtaaccagggcattagcggctcccgggggaaaatggtatcccgttaacattcccacacaaattacagacccgtaaccttaatgtggaaacccgggggtccctaatgag

SEQ ID NO: 188114 - DNA, 214 bp, Arabidopsis thaliana
cacaccgaaacaaacccgaccggcacagcccgcgaccacgcccaacaagccgcgacgggacgcggcggcgccggaacaccagcgcgaggcggcgagagaacgggcacggcgagaaagaggccaggcagacgacttttttttactaccggggacgcgaagccccgcacccaccccgcccaccccgcccccgcacaacaccgcggatccgacacag

SEQ ID NO: 188115 - DNA, 326 bp, Arabidopsis thaliana
cctctccccttccttctttcccttgcgctgctcttgctgttgtccgtgctgggcgtctgttctgtcgctgtctgtcgcttcctctgttcgttgtgttctcgtcgttgttcgttgcttttgtgtcttctcttgtttgctgtttcctgggtgtgggggggtggtgtcgcgctctcgctgctctgtgtgttgtctcgtgctggtctcgtgctcgtcgtgctttcggtggtgcgccggcgggcatggcgcggtggttgtgtgcgtcgtgcgtggtttgcggcgtggtgccggtgtctcgcctgctgctgctctcgcggtgctcctctgtg

SEQ ID NO: 188116 - DNA, 284 bp, Arabidopsis thaliana
  unsure (1)..(284): unsure at all n locations
ccgcctcttaaaaccaccgtcccttctttactccttcgctatctcttcttacaccgcatcctctttatattttttcttttttcggtatttgttatctcacgctccgcccccccncccctgtcttatgtgtgtcctcatgcgctcgcgcaatcccccacacctgcgcttctccctgtctttcgacttctaccgtgtgaggggggacatcctcatctcacatcccttctctctttaaaaaaaaaaatgtcctacacgctctctctatgccttctctcatttcccct

SEQ ID NO: 188117 - DNA, 494 bp, Arabidopsis thaliana
  unsure (1)..(494): unsure at all n locations
cccccgnccgaaggccggaattcgggcagttttgccagggccggcagggcacaacaaccggggagggcggaaaaggcgggaacggcttttaccaaaacagggggaaccgccgaaggacaaaatcccaaaatccttccccgccatgaacaaggcggacgccgacgggggcaaggtaagagatctggccgtttttttttaggggggggcgcggaaaaacaaaacgaccccaaaagagacgggagcaccgggagcccggcgggccggccacgcggaggccaggcaccccggaaaagccaggcccaaagcgcaaaaccgccgcaaacaagcgccccaggggaccaaaacacgggggccgcggcccccggccaaaagagaagcagcgccaaacccccagcccaggaggaccgggaagcgcccccacgggaccaccaccccggcacggggccgaaggccgcgcaagcaccagaaacgcgacccggggcacgggccgacga

SEQ ID NO: 188118 - DNA, 482 bp, Arabidopsis thaliana
ttacttctatctacatccattatcttcttcttcccccccttaatttaatctatatagtctattactattaataccacctccaaacgcgtctttctcgcttttatacatttacaagtatatccaacctctctcactataatattctactccccccatcaatgggggtggtctcctccccactcatctccccctatttataaaaaaaacctctttcttctctcacctctatcccatactatcatctttatcccctcaaaattaccttcttctcctacatgtacatataacataattaactaaataccattccatcacacacttcctattatcaggggggtaccactccctcaaactttatatttccatacttccctcttactcttttccaatcatataaatatttataaactaaactttctctatatacaatacaaccacacaatataatctcatctaccaccatactcacctctccccacccc

SEQ ID NO: 188119 - DNA, 482 bp, Arabidopsis thaliana
  unsure (1)..(482): unsure at all n locations
aacccccataactatctctccccacatccctcacctaacgttcctccccacgcctccacactcagactcaaactcgtatcttctctcacacatcgggcgattcaattccttttacaaaatatatcccaccctctactcccttcctcttcattctcaccctcttcttcgtatatccaacaatcgcggcattcttccctccccttcccgtaataagctcctcggcagaactcccacccttagcctcctctcnctctgctatttctccctccctctatacttccgggggggggcccctccctacaccactcctttaaaaaaaaaaaatcctccctctcctctttnctctctcgtctccctcctcacacctacaccgatacacacccatttaatacccatactcttactcacctctttcttatgctgttcttttctctctctctccgtctcctctcgtaatcctatccttcatnctactcgggggg

SEQ ID NO: 188120 - DNA, 486 bp, Arabidopsis thaliana
  unsure (1)..(486): unsure at all n locations
atcccactccttcatatttaaattattatccctagttcttccaatctcaccctccccccctctattatcttaattctctctccctcttctctccccttcccctctctttcctctccccctctacttttttctccggtggggtatacactcatcccccccctctctctatttaaaatatactcttctctctttctcactctcattcactccctctccactttctcccttaccctcttcccttctttccctccttctattcctatcctactttttcccttccccctattactctctcactcccctcctttctctcttcttatgggggtgtttattaccatttcctcatctacccttctatctctanctccctctgcttcacctccctatactactcttttttttaaatctattttttttccttactcttatatccttcccttattaaataattcccctctcccccctattttctctccccccccctcc

SEQ ID NO: 188121 - DNA, 188 bp, Arabidopsis thaliana
  unsure (1)..(188): unsure at all n locations
tgctcgaacgctgtatcatgtgatctagtattttattagttaagctatcttcgatatccctcgtcggtcggtgattgcgagtaaggttcggtgtattccctcggggtcgngatataagattgaaactttatagaagaaggtagcgcggcgagttggcgtggcgttgttacgtcgcatgctgtgcggtt

SEQ ID NO: 188122 - DNA, 203 bp, Arabidopsis thaliana
ggaatttcccggggtccgaccccacgccgtcccggctttcttcttccccaagctggcctttctgggcttttccccatccttactgggtttcctaccggattggcgatcttggggaacctaggacttggattttaggggtgcccaatcaaaatcccagactgctaagggggggaaaattttttgctgaaaaaaaaaatgggggg

SEQ ID NO: 188123 - DNA, 519 bp, Arabidopsis thaliana
  unsure (1)..(519): unsure at all n locations
ccccnnctctggcgcgcctccgcgcccctgntccngtctcgtcggnttacgccccaggccgtcgcgcgtctccgtatcgactgcctcgttggtgtcactttggcctgctgtatgtctggtgctctactatactcctatcggctgctggttatatgggtcttgttcctcttcttttgctgcggactctcaggcgcgtcagtggggcgccctgttcctctggttgatttcgattttccctttncctggcctacgcgctcgtcccttgttaactcgtgctcctctggtttcccgtgcgcgttctccgcccgtccgctagtctcgtctcgcattcctgcgccggccgtccggncttgttatgagtcggtantcttcattgcaggtgtctgtgtttcgcgcgcgctcgttggctgactgttaggcgggcgttgcgtgacagcgagtggtgttgtggccgcgcgccgcgtcctgtgggctattgtccttttgtctaatctgtacctatctctcctgcgtcgttat

SEQ ID NO: 188124 - DNA, 380 bp, Arabidopsis thaliana
  unsure (1)..(380): unsure at all n locations
gcacccgaacgnaagcngggaaccccaaaattttccgcccttattaaagccttttgacaaacaaacctcatgagtccctacggcgcgttcagaaaaggctaaggggattctggcccaaatgtaccatagagccatacaaccagggggtacaggggagagaacttgcccgggcagaagcgaaaaacacaaagtttcttctttgaggggggggncgcaccaaaaggaagagagccccggcccagccgcaagagaaaggaagaaccagccccgcaacgcgacccgccaggaccaaaacacagccaagaacagcccccacaacaagacaacgcccgacccacaaacagcggcccggaccccccggggacccccggcgcacccaa

SEQ ID NO: 188125 - DNA, 440 bp, Arabidopsis thaliana
gggcccccccgaagccaggccggatttaacccgggcacaactctctaattgggggcgggccccaaatagacattataagggagagccgggtgcttcccgcccgacccaggcatcaagcccacaagacttgaacagaaatggcagacaaccgagaacaggtttttttacacagaaagagaaaaaacgccccccccataatacactctccgtcagttgggtcacggcaaactagaagatgatatccaaacaataacggctaaaaactagatatagcgcgttctgtgtactcttctattcagcaataccacaagacaaaaaactaaaaacaaatgaaaagaaaacaactaactacaaccgcacgaaacaacgtagagctagtatacagatagcagaaaagcagaaaatacataactaacagaataataccaacacaaaaacaa

SEQ ID NO: 188126 - DNA, 387 bp, Arabidopsis thaliana
accctttttcctctcatctttcctaattcatctctttacactacaatcccacccctgctactcttcttactctcctttatattatgttcctccgcgtgtctctatatcatttatcctacgcactctaagattatccctaccacataatatatacttcacaggggggagtaaccatcctctcttctatcttttctcatacaaaaaaaaattctcatctttctactcctttttttactaactccctatttacttcttcttcttcctctctcctccctactctcccataatacaactctcacttcttttcaattttaagctccattcctctttttcttttctctttcatatcatttctcagcgggggggtcctctctttcatattcttta

SEQ ID NO: 188127 - DNA, 498 bp, Arabidopsis thaliana
gacgttccatgcacgccttccttagcctggattcttttaaaccggccgcccttttttttttttttttttttttttttttttttttttttaaccaaaaaagaacttttgtattttacccaccggaccaaaaagaggggccgggggctgacaaagggttcaaaaacttcttgtttttgtaaggaataccaaaaaatcaacctttttctttaaaaaatcctaccggaaattctcaaccttttaatcaacaaaccccttaggggaaaactttccattctttaacacttttttttcctaccaaacgaatgactaagtatggctgcttttcatttaaaaaaagcgtcccaagatgggacctcattggcttatccttccttttaattttctagcaaaggtctctcctttgggctcactcccggaacaaacaacataccctgtttccacttggaagtctcttagagtaacacgctcttgaagctgggcgttgctgcaaatgactga

SEQ ID NO: 188128 - DNA, 258 bp, Arabidopsis thaliana
agaggcaaaccgcgaccgggcgaaccttggcgaagaacacggggcggccccccgggagagacgccccacattgtgcccagccggggagagggcgccggaccgaaaccggaaggggaggaacgagaaagttttttttttggggggggggagaagagaacaagggcgcacaagcagacaacacgccacccggacacacgcacggcccgccagcagccacaacacgagcaacggccacgccaaagaaaaccggggcgggga

SEQ ID NO: 188129 - DNA, 422 bp, Arabidopsis thaliana
  unsure (1)..(422): unsure at all n locations
gccgcctgcggtaccgggccggatttacggggggggcgaacactncatacaccgagggcgggcaccccggggccctttaacaaacagccacgagcaatccagtgaaacaatgggtttcacacgacaaccaagggagcagacccaccccacaaatgcctggaaaagggggtccgtaaaattttggggggggggagagccaaacccaagggacgagaagacaatgggcaaaacgacccccggcggggcgaaaaccccaaacccgaagacaaggcgcagcggaaacaaggcgccgggaacagacgcgggggagaaccgcggcaacccccccgcagcagcaaggagagcgggaggaggagcagacgcgcaaagacccccccagacaggaaacgcacggggacgcagagccgccacagcaggagggg

SEQ ID NO: 188130 - DNA, 582 bp, Arabidopsis thaliana
tcctcataccccccacttctcctctaaacctttccatcattcctaccatatcatttctccttctcacaatcccttattccattcacccccctccacgtccacccaatacttttagtttatcccccacacaaaactcacctcttcctcacaatttattaaacccacatatttaacaatataacatgtgtaaaaaaatcaccccccaccaatgattattacgcgtctccccacagcacccctatctcacctacaatcttcactacccaccttaactcctcctcggggggtggctacctatactcctacacacacttcacaccatataatacaaaaaatacctcatacctaccatcaccctcccctactctcacatatcttctctcaatttacttatcctccttcctcataccattctttctatctcaatcctacatccttcttgcaaccacaacacaccatcaccccaccacctaccccttcattctctccggggggggagaatctatactacttttacctataccaccccatctctactatcactactacccactgcttacctacctctttaattctatcata

SEQ ID NO: 188131 - DNA, 116 bp, Arabidopsis thaliana
gccgctcccttcgattgcgtcgccgcgcccgcattcggcgcatgcactgctgcggaagacatagtccgaacgcccgtacctcagtcgcatgccgtccctcgggagtgtcgtacgcg

SEQ ID NO: 188132 - DNA, 446 bp, Arabidopsis thaliana
  unsure (1)..(446): unsure at all n locations
ccgccgtaagctggaacccggaatctcaagccctgaaaatagctaaggaataaaaacatctaatcaaaatcgccggatccaaaccaatacggcatcgcctgtccagagtttaatggggtacattgggaaatcccgtccgcgtggaggatggtaaacaacgaggaccatccacccaaaggttttttttttaaggggggggacccaaccaaacaagcgaaagccgcagccccccgaccccaacacccggggaccaaacacacgagcccaggcaaagacccgccaccagagagcgaaaacacacacggaaccggaacacgggcgaaccacgaccgaacccccacacagggagccgggaaaaccgaccacacagaaaaaccgaaaancccagggcgcacacaaaaagagaaggccgaaacaacaacccgaaaaggaacaagacaagcgaa

SEQ ID NO: 188133 - DNA, 471 bp, Arabidopsis thaliana
gcacgccagcaggaaccgggccggaataaaagccggggcgacgagctcactagacggagggcgcccccccctgggtcactcgcccgaaccaaaacgagaaggagaccacagcgcaggaggccaaacgagggcaaccgccttcccgcaccaaaagaagaaagccgaggaaaaaaagccccctcccccccccgaggggggagagcacaaaaacaccgcaaggaccccggcgcgccccaagaaaggaaaagaggccggggaacaagaacggcacaacaccggacacccaggacgcaaaggggagagccccaccccacggcgagggggaaaacacgcgccccaaacccacccacacaggcgagaagcaccgctcgcccacacccccaccgggcgaaggagccaacccccccgcccgcaggagagaagcgaagcggggcgggcaccccgccagcaaaacgaccggagccgggcaag

SEQ ID NO: 188134 - DNA, 328 bp, Arabidopsis thaliana
  unsure (1)..(328): unsure at all n locations
tctttttttttttttttggtttaccaaaccgatggattttgacgcctccttctattccaaggagctgaattgatcccttttggaaggtggtaccattgttcataaaaaatgggtttgaaactgataaggtaaatttttcgcctaaaagtacggatcctgtttttttttnggatggaggcggcatatcagcaaatccaacgaggggaagtgggctagatactggcatggcatgatgatgtgacggggctggtttcgacgctagtggcagatgctgaaaccggcgtggtgcaggcgttgctggggcactatgatggtttagagcactgct

SEQ ID NO: 188135 - DNA, 283 bp, Arabidopsis thaliana
  unsure (1)..(283): unsure at all n locations
ccaccccccaaacggcgcggaggcccgccacgcctatttttcacaccagagcggatggtggcctgtgtgataaataaaacaaanaccacacccgccctacatatcctacaccctttttttttaataacaactccgttcggtccccggggtgtttgtacgttagcgagtggttatttgcacaccctctcctatcccatctcttattctcttcgcacttgctccgactacatatgcacccaccccccactttttttttttcccgcggggtgttcccagacataaa

SEQ ID NO: 188136 - DNA, 433 bp, Arabidopsis thaliana
gccccccaccaaacgcgcgggccgggggattgtttaagacccccccaatcgacgcaaagaccccgcccccgccatgccccctttctcggggggggggggtaaaaacaccaacatcccccagaccctcgcaacgtggttagaggcgagaatggcagaaggcctaacgcacaatctttgccaattcgcccgaggccgactccaacccgattttttggggggggcaccccacaccacgcgtacaacaaaaagctaccacggcaaagggaaagtcgagcgcaccacacgcgcgccgcccaacctcaacggcagaaacgcgccaatggatcacctcaccaaccccaaccgccgaagcaccccacgctcgacgacactccaacccagctctcaaagataatgcgaggatcgacagtcgtttgcgtgaagcgcctcagtt

SEQ ID NO: 188137 - DNA, 621 bp, Arabidopsis thaliana
  unsure (1)..(621): unsure at all n locations
ggcggggggggggggagaattttggcgagggactcnatccttcctaaattaagagggaaaaccctttccccccctcccctttccccccccccccaatttccccttttcccccccgtgccttgggctttacctccaccaaatcccctttttccccnatttctttttttttttaagtgccctaacgggcccctcccttttccctttttcaccccttggttcctccttccaaaccttttcccccacccgttttttttttttccccaaaccaaaccttttttttttgcggtggtgggcttcccccacgagggccccctttttacaccataaccccccaacaagggggcctcttcttttcggcccccctccccccttctctttttcccacccctttccccccctttttcacctatcgctctccctctcttgccgttattggaacaaacctccccttttcttcccacctctcccttcctctcctccccccccccccaacccccccattttcgccccctctaactcctctgtcctcccttctccccccactccccccaaattaggccccccaccaccccccctcccccccaccttctccccacttcttccccccccccccttcttctt

SEQ ID NO: 188138 - DNA, 433 bp, Arabidopsis thaliana
  unsure (1)..(433): unsure at all n locations
cgccccgcaacacgccggcggaggaagggggaggcctatttttttaaacccgccccccccgcgttttgnagtcacagaacgcgctgctttggttcggtgctaggcgcgagatacaagccatttttaacgagggggggaggggggcgtgagaaaagaactgcatgtaactcacgagtggcccgtaagctgctggtgccacgaatcgaccttgtcccccaatctgaatcagccgacgccgacaacagacccaacagggaaaggatgatcccaacgggtcacactaagtggccgatagcaaaacaaaagaggaagcgcttttttttttgagcggggagcggcaccagacctgaatcgctaggcgaaatttccaccataacatggcgacgaaagtcacgcgatatacgacgtgcacatgacccatacacacagggga

SEQ ID NO: 188139 - DNA, 507 bp, Arabidopsis thaliana
ctttacgtcgcatgcacgccttccttagcttggattcttttgagcgggccgccctttttttttttttttttttttttttttttttttttttttttttttttttttttttttttttttttttttttttttttttttttttttttttttgggcccaaaacccggaagtttccaaaaaaaaaccaaatttttaacctcttttgggagggtttttttttttccaaatttcatggaaattggatttcctttcaaaaggaaaaaatccccttccttcaaccattgaataatcccaatttttttattttttttgggggtgacaaggcttaaaccccggggaagggggaaaactgtcttttggggcttttggttttaacccaaaggggggggttcagggggtaaccaaaaaacccaaaatcttccttacccaccccctttgggccgtttttcccattttcccctttttttttttttgggatttttaaaccttttaaccccttttttttgggcttt

SEQ ID NO: 188140 - DNA, 638 bp, Arabidopsis thaliana
  unsure (1)..(638): unsure at all n locations
atctccccctccccctaccccccacgccaccccagggggggggtaataatagttcccacgacttaacccccactgtatataagggaaaaaacccctccccccctcttcttacctttccccaattcccctctacccccggggtacgcgttcttaaaaaaaaaatcttacccccccccacctcctcttcacttcccttctttacttccccaacaaaccccccccttcctttccttcccacccttaacaccccaacaaccctccttccttcctttttcccttaattctcccttctcaataatttttataaggggggggggacacacaccccccccatcggctcttccacaaaaacaaatacaacccccttctcaccttccaaacaccccctcttcntctctccaattcaaaacccccttccccccactctattcaccactacaataaacctctctcctagtctttaaaccctcaaccttatccaacctctcccaccttcttctttccacaatcaccccactctttttcaccaccccactcctcttcaaatcaaacaaaattttttccactatcccccccgctcatccctcctccacactttctatttttcatcattttctacataccttacactcacatca

SEQ ID NO: 188141 - DNA, 478 bp, Arabidopsis thaliana
tggaccccttccgtagcttggattcttttaaaggggcggccctatgtttttttgaatttgttgtgtcgacccctttggtcaaaaccaaatggaattttttatttactttacttttatgcttaactaaaaaaaaaaaatggtccgtcacatcccttggtccagggatttaccaggaaaaagggccccctttttttgttaaaatggttcccagcccaatcttttacaacccccacgaacgtggtttcttaccttttagggacttctaccccctaagagggtactttttatgcggaaaggagactttttccctatcaaacccgggaaaaaagtccgggattacactatgagatgggcctgggacccaaacaaaggctgaaattttttttgatgaaaaaaaaccgactattgttgaagactgaaacctcgttgtccctaaagccaatttacgcttggtatggcccacgatcatattttgcaa

SEQ ID NO: 188142 - DNA, 504 bp, Arabidopsis thaliana
  unsure (1)..(504): unsure at all n locations
agcngggacccacnaaagcggccgtccaacggggcggggaaaccaccaaccagaagagggcgccagaaaagagggggggaggcccaagcaaccgagcacaagagaagaaaccgccacacccagccgaataccaagggacacggggcccaggngaccacaggacacggaaccgagagccgcggaaaacagcacagggggaggcacattttttttatgggagaggggagacaaaaaaaggcgagagggaaaaaaacagagaagaaccaggggggcggaggagcaggaagcgaagccaaaaaaaacggggacagcaaaggccaacaggcggcggcagaggaacagcgccgatcagacgaagaaggagaacgcgggaacacgagaaaagacaaacccagcgcaagaaagccgccaaacgaaagccacagggaaaaagcaacagcgagacgcggaagaaaagaaggacgagcaaacacaacgcagagaggggacgacaaacgaaaagag

SEQ ID NO: 188143 - DNA, 590 bp, Arabidopsis thaliana
ccccgcgcccgcggcgggggggggtaatattctccaagtctcatccccatcattataagggaaaccctttcgccttcaaatacccttccccgattccccttttcacccaggcgtgcgtttaaaactataaaaaaaacacttaaaaaatccaacccactttttttttaaataacttttcaaaaatttaaccccaccaccctctttttcccactaaacatttccaaaccattttaaaaggttttcctcctcaaaccccccatttccttttttttttttgagggggagaatcctcaacaacctaaggggaaaaaaacaaaaaacccttacatggggtgtttcgtaaacccaagccttaaaaaattccaaccctaaacttttgggccccattttgccctttaaaacccccgcttttctacaaccctttaacctccacttttcccagcacttttctaaccacaaagttatcaaaacctttccccttagaaaatccccccctctttttccaaattttttaacctcgaatcccggagaaatcacccccccacagaatactttttttatcctatcaaaccttctaaccaccaaaaaca

SEQ ID NO: 188144 - DNA, 430 bp, Arabidopsis thaliana
ccacttttaattatctctaaatcatttctttacccgaggcttgttttaccacaacctgttctttatctgaagccattaaatttaaacggcccccatccccccccccggggtgtaaaaacacaactcccagaacctttttttttcggggggggggggggcccttttttgggggggaggttaatataaaaaaatctacccggcattcctccttggggcgacgtcacaggggctccttttttcaacattactgggggggagcgcaccagcctccttcttccaaaacaaaccaggagttcttctacttgcggggggttctccttttttttcccttccccggaaggctttctctcttctctacccgcccggtccgagatccttgtacaagaaccacccactctctacccccccctcccattccgggaccccctct

SEQ ID NO: 188145 - DNA, 623 bp, Arabidopsis thaliana
ggggggggggggggagatatctccgagtactatcccactgaataaagggggggccggtgcccccttcggtccccgctccggatttcccttttccccccgggggtggggggaaccaaacaataactttttcccttcttaaaaactccttctatttctttctttacaaaaaaaaaacctttttttctccccccgtggtttttttgggtgtctcccccacttcttacttgaaaaaaaccaaagaaatacttttcttccgtgggggcaggcccctttttctattgcgggggggggggcctctcttttttgtgggccaggacagaaaaaaaaatttttttttcaaggtccctcaaaccttttttggggagccccctcccaaacccatttctttttttttttttagggtggtccaccccatgggcggggtggaaaattttcttccacttttttcgcccatttccgcccccttttcttagttcctatcgagcgaaatttggcctcttcgaatttcccgtttggacaacacttttttctttcttcaaagggggattgtctttaccctttctctctcccgcgcgtgtaacctcttgtgtccccccccctcttccagctgtctttcggtccct

SEQ ID NO: 188146 - DNA, 187 bp, Arabidopsis thaliana
gcgcgaacaactcaccaagccatcatagtcgcgtcatgtgatgaatggcgaggtcggtcggagggaggaggagcgcacggaagccgacgagacagtaggcgtggctagcaacacccgacacaattaaagcggagctgatcatctggacccccgtgccccggcacgcatcccgcgcctacagccacgt

SEQ ID NO: 188147 - DNA, 645 bp, Arabidopsis thaliana
gcattagacgagatttttatcatgaggggtcggtgtggtttagaaatagaaatatttgcgacgctgagctggtcgggatagttccactatcaaattttcatcagcccatcgccgtgagtttgcgcctccatccacatacggagcgcaggcgagaaagatggtacgtcgttcggagtatcaactgattagtatgaggcgggctcatgtatgcacgcgacggccgtttttttttctggagggggagtgcgaacacaacaacaatatactcccctatgataaagaaaacgatcgttgcttacgcccataatgactctgagggatatatatatcgctagagtagtacgcacgacggacggtcttattgtagagagactaacagcgacatcaattcgttatctatacatgttctattgatatcatgctaccgatctagcagacctatcattcttcggccccgcaacgatactgacttccctttaccggtcgtacgacgacactacatatttacgatacacatctcacactcgagtgcagcctacatactacattgtagcatcacaatactgtctcgtttatcgtacagaagagtggtgagaagtattgtgttcacgagatactcgtgtacactcgtgcggacagcgcggt

SEQ ID NO: 188148 - DNA, 461 bp, Arabidopsis thaliana
  unsure (1)..(461): unsure at all n locations
aaggggttttcctgggggggaagaaggccccaaaaaaaaanaanaggaagggaaagggggggggggaaccggaccaagagaaaaaaaccggcgacacgcncaaaccgagcccgacaagnacccgtggcaccgacaaaaggcgcccggcacagagaggcaaaagcaaaacggaaaaaaaaaataataaatcgcagattgacgacaaccccaccccaggaaggcggaaaaaagaccccccaccccacgggggggggggggccaccccagcgccacgaaccgggcacgaagaggcccgcacaaaaaaagcggcgccggaaaaggagagaagagaacaaacccacgcccgcaaaagaaaaaaacccccaacggaaaagagaacaagggcccgacaaaaaacgcccaaaccaaccaccagcacgcacaaccgcgccccccgacagagagaaaaaaaaagcagggca

SEQ ID NO: 188149 - DNA, 448 bp, Arabidopsis thaliana
acaattagaaaaggttcgacgacccacgccggcgcagtgatcgcgcaccgtggagagcgatataaggtgaggggagacagcactgaagtgccaatgtgataaattatcaatcaaccgaatactcatgaaaaggaaaggacaagcaggatagtaccccaccaccacgctcacccgcactcgcacaaccataagagcaatacaggaactgtgaacggagcgaagggattaacgataacgcacatcgacgccacgcggtgccgacgttcgataagtgtcatagctgagagagaaagggtgggggacaagtcaagaagtctagttacgacaaggagaatcatgtaagaatacgacatcgcaaaatcgcacagaaaacgtattcactctcgctcgccactgctcttatgcagctgagacgggagaagtcgagcaatcttactatacagcgcaa

SEQ ID NO: 188150 - DNA, 303 bp, Arabidopsis thaliana
tgcacggccgtaccgtgaaggctgtgtgagtccttatagaagctggcccgcccttgtggggtgtgggttttattatattttcatctactatttctacgctgcgtgtttcttttccgtctttatttttgttctttttgtttggccgcacaagaaaagagggctttttttttttgtttgttacaacacgcggggcgggcagggtggaaagacagactaaaaccacggacgggggtccgcccgggggtgggaaatgttgtttgggggggtggggggcacatttctctgtggggggggcgtcgcgag

SEQ ID NO: 188151 - DNA, 452 bp, Arabidopsis thaliana
cgcggaagtaggccgaatctatcctaaaccggggggggggttaaattaagcaaataacacgccccactactacttctcgaaccacccccgttccctctcaaaaacttccacaaactgagatccgttaggctaggggccagatttttttccgagccttacctcaaatctcacaataacgaggggggggacaccacgcgcgcgtaacattcaaaaaaactccattctatatgacccgtggagacgcgcgctacccttcacacaactctaacggctaaccctatatccttctacactacgcctatccagtcacataccaccctgtcacacctacctccccatcatatcagtctcccgcctatgcaatatctcttggacaagtttatctcaaccatcaccgtccacatcccgctaacggatgtacagtagttgccggcctccccgcgtctggttct

SEQ ID NO: 188152 - DNA, 454 bp, Arabidopsis thaliana
gggggggggggggaataagtttggaacgcaccccggaaaattacagaggcaacaagaaggcggacacggagcaaagggggggagcgctcattttcccgcggggggggggcggtaataataggttacaaggaaaaacccgcagaggcgctatcgcggccctttcatcttaacacaacatgcggcgccgggacgacgagtccgtgaccgtacaggatgcgatctatcgcgcaccagtgaatgtgcagctgaggcagcgaggcgggaggcggggttttataattttagggggggggcagtcaggaagacgcttacagatctcgcatcccttaaactaaggcaaaacgggagcaggagccgggaggcgaaccccgggtgtgtagcgtggttaatgtgcggcagaaatatggtaccgaagactatcacagacgactgggagcccgcggggcgcaccgga

SEQ ID NO: 188153 - DNA, 495 bp, Arabidopsis thaliana
  unsure (1)..(495): unsure at all n locations
caaggaccgggcccggaaaccccgggccaaccaggggggcggaaagccgaaaaacaaaaaaggaaaccccccaggggaggcaaccaaggcaaaaagccggccgaaggaacagagcagcagcaaccgcgcagagcaaacggagggcagaacacgggcaacagggaacgacgaagcaagaaaacggccacagcccgaggcttcttctggaggggggggaaacaccaaaggggaaaaaccccgaagaaacccaacccgcggggggggggggggggaccaccaagaagccaaacccccnaaagccacaaaaagagaacggaggaggaacagaccacaaaagggcaaaccaagacgagcccacaaaacgcccggaaagacaccccaaccgcacaacacaggcgaaaagcaaaggccagcaacaccacgaacccgagcagaaggcccacaaaaaccacggaaggcaacaacaagaaaaaacaaggaacgacagaagcaaag

SEQ ID NO: 188154 - DNA, 297 bp, Arabidopsis thaliana
ttttacacccggggggtgggcggtcgtacacaaaaaccaaaaatcagacgcccgggtcgagcgcgggctgaagaatccacccgctctcacggcgcgttgagggggggcgctcgcgggcggtacgcgaaggatgcggttgtcgcaggcaccaggacgacacttcgcaccgggttcgagctacgagcagcgaccacggtttttttttttagcggggggggacggacacaccagagtcgcacgtttataccgcctgcagtacatgcgaggcgtcaacatctaatgtgtgacaagacacaa

SEQ ID NO: 188155 - DNA, 401 bp, Arabidopsis thaliana
gccgccagtgccgcccgaggcgaattttttacgccccccttcagagaaaagaccacccccccgacagaactttttcttggggggggcgaaacaaacagagaagcctagccaagacttttagtgtttacgctgtagcgccaacattgttctgccatcctcacaccctcaacgctttcgaccgcgaaaatttttttagggtggaaaacacgaatcattattaaataacttccgacctggaatcttgtaacccggcttccacattgtatcctgtacccaactgccgtattccgcgggttgtagtttgttacggtgcatattcttaatctgacctaaataaaaagcgccgctcgtgtagtcgtgagcataggaatgaaccctccgcctgtcgtacggtgttttaa

SEQ ID NO: 188156 - DNA, 461 bp, Arabidopsis thaliana
  unsure (1)..(461): unsure at all n locations
ggggggaagaagccccnaaacacacagaccccgccangaggggggagcccagggccagcccgggggcaggggccccccaaagcgaggccggaacacctagcaagaaagagagaaccacccgaggacacacgaagacaagggaaaaaaaaaaaanttttcaggcaagatagggccaccccacaggggcggagccggggaaaaaaacaccccccccaaaggaggggggggggggggccccccccccaaaaggaagaaaagccccccccgagaacgagaagggcagcggggggggggaaaaacgacgaacaagcaaagagggaagcgaggggcagcaagagaaacgacggaacaagacacgcaaacgagcgggaacaaacagggaggcaaaaaacagagaaaccacagcgcgcagcagcagcagaaaggaaaaagaccgcagagcacgagggacaggggagcag

SEQ ID NO: 188157 - DNA, 500 bp, Arabidopsis thaliana
  unsure (1)..(500): unsure at all n locations
agcaccgccaaagacccgcgttaccagggggcggaagcaagaaaaacacnagccgcaaggaagggaaaaaaaccgaagggaaaccggaaagggaacgcggccagggcggaggaggaaaaaaagccaccacacgcaaagcgggcgccagaaaggaaaccaaacgccggccgagacattcttagaggagaaggaggcacagaaacccgccccaggagccaaaaaagaaccaccggggcgggcccggggggagaccccancaagggaaacgacccagggggaaccacggacacggaaccacgaggcaagcggccacaccgagagacaggggcccacggcgcaagacgacgaagccaggacggcggaggaacgaccgacagaaacccccaacaacagacagaagcggggcgcgagaagcaaaaaaacaccagaccgacaccagcccagaaccgagaccacagcaaaccaccaccaaaaccgaagaccgacccacacgcaaggaa

SEQ ID NO: 188158 - DNA, 375 bp, Arabidopsis thaliana
agggaaaactctttttacaccccccagactaaaagagagaaagggcccgcaagacccgcggacccggatatcttttacagagggggtgggtcgaccaacaaacacagaccgcgccccgctgggcaggcgacatgcgtaccgacccccatataggtacgcgcgcgagagcaatagaaaatataccgactggccaaacagagtgaactatatcacaacggaacagaccacggttttttttttaggggaggggcggcacagcggggcagtctagtaaacgcgtatgaaaacgatgccacggactggtatgcggtcaccaacacccaacaactcagccctcttaccgaggcaataccgcgcaggtcggtggtgatgcta

SEQ ID NO: 188159 - DNA, 219 bp, Arabidopsis thaliana
agagggggggggctacttttttaaacctaccccaccagaattgcgcccggtggataccaaatgttcctatcctgcttcaccgcggacccccgcctttttttacgcggggtgtcgaggcgccgtgaacgacaaaaaaacacgccggacagccatacgaagcctggtttccgcgagagacagtattcagagatcacactgacatgtccggtgtgtcggccg

SEQ ID NO: 188160 - DNA, 526 bp, Arabidopsis thaliana
tttgaaacatcgcctccccaatttgttaaaatagaaaagaccactctcctctatgcccgcgcgcggccctgaggactttttcgccggggggggcggagcgtcactacaaaaagactgtttattggtaaggtaccgtacaagctcggcgaggtatgcgtgcgtggtttaaggcgcgaggcgcgagcgagcagtataacgtacatcaactggtcacatcggatatacgcgtgaatttcgacatggaatgtcagagaggaaaggacaactttttttttgtgaggggggcggagaggtgcgacatctctcccgctccttcgcctagtataacccctcgcttttgttgcgtaagtcatggttatacaataagctgaggactcgcccctccgcgcccctcgtaacaccccaccaccccgcaattgttcccaagtatcatggtggtataatacggttagttgtaccatcacttgttgcagaccctaggcacttagaagcatttgtacgattatggcccgcgtgttagagagat

SEQ ID NO: 188161 - DNA, 675 bp, Arabidopsis thaliana
gacacccccctccgcgcccgccgcccgccgccgattatttgtaaccggccccccaatttcgaacaggacacacctttacacctaccgcgcgagacccaaactgccatcttttgcactaagagggtgagagatgaattaataacttataaatcccccttaatccctgtcgcgcctttccgcatccccccacaccacttaccccgccccccgacccccgcctcgctcggagcagactaccaacaacacacgcgctcgcggtctatattctcacatataccacatacgaaaagtgctcactcacgaacaacaacttttatacggctggggggggcatgagaaaaagaaacacacagctaaaagaaaaaaaacatcataataaaacacaaacacaccaaaaatacagtagtgacaaccatagaagagccgagcaagttgcaaagaggaaaataatagatgacatagatagaattattacagcccccacgaaaaattaatatagcccgcgtgaaagcgaaaatacagtgcatggtaaccccgcacatccagtactgcaaagaagcacccacgaccctgtccacaacggctacccccacctacctatcctcaatcatattataacttaacagtcgaacgcagatagtagccgtacgactaccacccgccacgtacagcaac

SEQ ID NO: 188162 - DNA, 525 bp, Arabidopsis thaliana
ccgggcgaatcaaccaggccccgcgcgccccggaaatattgggaacacccccccaagtttatgacagaaactgcgcgccttacgaagcttggatcctataaagcggccgcccttggggtttggtttttaaagagacaccaaaacaggaccgaggctcttcctccttttaatctaaaatccgccggtcttactgacgcgattcaccaaagcgtgggggaaaaaattggcgacggaagaaaaatagatcggataattttgggtcgcgaaaagggtttttttttgggggggggggtgcaaaacgtgtagagcataggacaagatacaaaaatgcctgtaggagagacgccatcagccgccaaccttaagagcttcggaacggcctcaaacatggttgaaaacaagactaccaaacgcaacacgggcgcacccaaatccccgtactcgaggggcaccgcctaaagcgggaccgcggaggcccggcgcccgaccgttctcactagtgggggaagcagccaacccgcggta

SEQ ID NO: 188163 - DNA, 591 bp, Arabidopsis thaliana
tccccccacaccaactccacaccccaccaccccccccggcaaaaaatacattccgcgaaaccatcccctccccaccaatttttataaagaaaaaaaaacacccaacaaccccattccctactcatatatactactcccaaatctcactttatcttttactccagtgtgggatagggtggcccttacaataaacacataacaaccacactctccctcctacccaatacacactccacatacatcacactctttcacttccctccttatcatactaacttcccacatctctccatctcctaaacactcaccaaatctacctctcactcaatctctaatataacacataaactaataaacgtctcatcaaatctacatcatacataatattacaactattttttcaaccgcgggcgggtgcagccaccccctctcccgcggcttcactccccacaccaaaaaaaacactcctcctcatctccctatcctcataatacctaactccccccattatccacactatattattacacacatctccccaaaactcacaacaacaaataactaaaatatacaatctaatcatctaaataa

SEQ ID NO: 188164 - DNA, 568 bp, Arabidopsis thaliana
  unsure (1)..(568): unsure at all n locations
tacccccgcgcccngccccccccccggccggggggggtagataatcctccaagaacttaatccccactngactattaggggaaaaactccgtccccccttccaggtcaccgttgccccaaatttccccttttccacccagggggttcgggaccaacaaaaaaccaatcccccccccccattttactcactttttctcaaaaaaaccctcttctctttcttccctataccttcatttttctccccccaaactccatccccacctctcttcccttttacttcctttaaaaaaatttttaaccgggggggtttccctccaatgccgcattgaaaaaaaacccccccccctttttaacccattttttacccccaccctttctccttcttacaacaaaatcctaaaacccactcccgttttaatcattcccccaaaaccaacatgtcaatcccttttcccgaaaatcccttccccctcaacaaatctcctctcagaaaatcttttcaccccctcccacacaaattcgctttcatcccccctaccgcccccctcacccttcacccatccaccct

SEQ ID NO: 188165 - DNA, 424 bp, Arabidopsis thaliana
  unsure (1)..(424): unsure at all n locations
gcccccggggggggggaaacccccaaaaaaaaagcgcccgaggcagggggagnagcgaccgagcggaaaccagccccgcccccggcaagagcggggaccaagaagagaagcccgagacggggaccggacagacacgccaaaggggaaaaacctaaaaaggagaaggcaacaaagaacaagaaaggcaccaaacagccgcgccgaagggggaagcacgcagcacgacgccaaagcaaacagaggagaacaacacgaacgaccgaaagacacgcccaacacaaagcaaaaccgcagcgaggcccccgggaggagaaggaacccacgccgagagcgcgcaaaccccccccgcacacgagaagccacaccaacccccgagagagacagggacgcccgccaccacaaccgaggaagacgccaaaccaaa

SEQ ID NO: 188166 - DNA, 569 bp, Arabidopsis thaliana
  unsure (1)..(569): unsure at all n locations
cgcggccgggggggggggaactaattgtgtaccacccccagcaattcatnggggcaacccgcccccccccctcaagcctggattctttataatttccgccctcggggggggtgtttttttatttttatacctaattcccccttctgccgttcacacattccacaaccaccacccccccaccacaaaaacgtttaaaacgataaaaaaaataacacaccctcctcatacaaatacttttcttccaaccgaacctagccaccgcaattcttttattaggagggtggggtccataccttcagagcattcccataataaaagaaattttttcaaacacccccgcctcccatgagcaagcaatcctctcttctcatccatgtagtcactagataaacaccacacagcattatttctcttacttttaataaacaaataccctcaggcgacgacagatcccccccctttcctcaatgtcccgagtttgtcctacaacaattcttccctttgccatcacttcatgcataaataattatataataattaatctattatcccctatcactcccgatccc

SEQ ID NO: 188167 - DNA, 235 bp, Arabidopsis thaliana
caaaaccgcaccgccgacgccggcgtccgtaaacctcccttttttctccccggggggggagggggcgaaaaaaaaaaaaatcacaatccctcatactctctcttttcgtcacccctcttctctcgcgccgagttaatattgagatcacttgcgcttcgcagtaaccgtacatacgtcactttccttaaccatcgcacctgtaacagccgatacccgaaagacgactttttttttc

SEQ ID NO: 188168 - DNA, 378 bp, Arabidopsis thaliana
  unsure (1)..(378): unsure at all n locations
acgcgctgcacgctcgtaaagctggatcttagagcgccgcctagcgncggaatatgattagaggaaagaaagcaaatatgctaggaagctcacgctttttggacagaacaaaaacacttgaacaagggaagcgccagtggaaaatacctagcgacgatggggcccctaagttctttctcgcgttaaaccttaagaactatnggagaagagtcgaagccggttttaaaaaaggacagaactgggacttcaagtttgagagatcggttgactagaaaacctttggaggtgttctagaaatctgcaaaggaaaaaaacctgtggaaacccaatccattttcggtggatggggccatgccgccacttttttttcgaaatggt

SEQ ID NO: 188169 - DNA, 685 bp, Arabidopsis thaliana
  unsure (1)..(685): unsure at all n locations
ttttccccccccaaaggcccccggagagaaaaacctcgtttgatacaccccccccccacctanagnagaaaaaacccgacaccctcccaacaccaccccccccaaatatactcttttttntcccccgtggggtgggtggcgtcttataatatcaaaacaanccacaaatccacaatcccctccaccctctctccctcccccacttttctcctcacctcctcttcctctcatatttcccccacacctaccgaatcattcaacaatattcattaaaaattttttattcatcttttcaaaatttccttaatccacccacacctctttctttcaaaggggggttggcttctacaccccccctatgcctcttttcacaaaactacccaccccccccctcccaccaacacatttattatttttccctctcccctctcctctcactccacaccactatccctctttcccacccactcctcctccactcttaactacaccccctttttcctctccattccctcctcttccctcaccctccctcctctcttcttactcaactacccctctcctctctcacctcactcacccctccccttttctatttttactcccctactatacctcctccctccctcacctccctccactctctccttctctctccctctctaccaatactaacctcccttcc

SEQ ID NO: 188170 - DNA, 249 bp, Arabidopsis thaliana
gaagctggcacgccctgcaggtaccggtcccgaattcccgggttcgcccacgcgtccggaaataatgtattcagaggaaaagaaaagcagaaattatgggtcaatcttttgctactgcttccttctgttccgactccatggggagggtgcaagaatccccaaaccctataataacctttcaaaccctatttgagacggaagccagagttttatgagggttcatggccgtggggaacctcaggaatcctt

SEQ ID NO: 188171 - DNA, 538 bp, Arabidopsis thaliana
  unsure (1)..(538): unsure at all n locations
gacgtggacctgccgcctacgtaagcttggatcctctatagcggtcgcccccggggggggggggaataaaaatatttttttttatcccccatcacctttttttttttgctttgttttttttgtccccgcggtggggcgggttattgcaacacaaaaaaaaaggggggggggggggggtccaccccttgcttttttttttttttagagaaaagggggttttttttccggaaagatagggcaccccacccctcggcgggncgacaaaaaaatatttttttatttggatggggtttaaaacatacgggctcaaaaaatggtcaccacgattttctcccggcggaaaagaaagtatactaccaccnatctaacagaaaacaaatatcaacccgtgacaaaaaaaactatttttatccgtccggtgtgtgcctcctcaaagcgaaaaacaacccccacatctaattttggccgtggggcgcaaaacagcgctgctcctatcaaaaaaagaaaaaaacacacctcgccccactgatacattaaa

SEQ ID NO: 188172 - DNA, 606 bp, Arabidopsis thaliana
  unsure (1)..(606): unsure at all n locations
ccctccccaatgaccccctccccccaattttccccttttccccccactgcgttaggtggaaaaaaaaaaaaaaaaccttttccaacccccccaccccccctccttttttttgtttctaaataaacccctcaatccccccgcccaaaaaaaaaaaaaacactcccaataatacttccctccgcttttctctccacttctctcttcctctccctattttcctctcccnnncgccccctttatcttcttctaggatgatgagggacacctctttctccttggccgcttccacaaacgtcatttacaaactctctctttttttatttttcctacccctatatatacccctccctctctctcccccaatcttcatataatacttcgacgtaacaaccaaaaaaccccgcgcctcacatccatcacaatattacgtgtacccccacccacccccttttctttcatctccctatctaacaatataaataaaaacacccttctactatcctcttctttacttcattattttcacccactattttttaaaaacatacacccctcctcactatcatctctcctataaacacccgcgcctcatttttactttctcct

SEQ ID NO: 188173 - DNA, 479 bp, Arabidopsis thaliana
  unsure (1)..(479): unsure at all n locations
ttccccgggggggggaaacccccaaaacccagccangcaagggagaggggcggcagcacccggaaaaagacacaaacagggcgcgcggcaagaaaacagagcacccacaccagaaaccccacagacaaaccacagagccagaaagaaccaaaaccgacgcacaggaaggcgaataaaaataaaagggcagttcggagcgccgcccaccgccaagacgccgcaagaaaacaaagacccgacccaccaccgggagggaaggcccccccccaagaacaaagaccaagcgaggcccgagaccaaccggagaagcaccgacagagcgcccccaaaccaagagaaagaggaggagcagaagcaggagaagagagggaaagaaaaagaaacaccgcgagcaggaagcgaaagcacggaaggcagagaagaacaagaacacagcaacagcacaaacaccaaacacacagaccagagaaagaccacaa

SEQ ID NO: 188174 - DNA, 255 bp, Arabidopsis thaliana
ttttttaaacggggggggggcgtgcgcacaaaaaacacagaccacaatgtagcgggccctggagatggagagagagcaggatgctgattatatccgtcgcactgttaagactagctcccactagcgttcgacccgggacaaatgacgacaaaatacggctatctaacattttatattccgcattcgacacgcgatttttttttacaggggggtgacatccgcgccagcacccgtgcgatgattccctgtatacac

SEQ ID NO: 188175 - DNA, 130 bp, Arabidopsis thaliana
  unsure (1)..(130): unsure at all n locations
gaaccggcaccatacacggctcgccagcgccgaaacggagaacacacctggaaccangccggccacggggcccaaaaggcgcgaacgggccacagcgagcagagggctccacaacaccgacaggagacga

SEQ ID NO: 188176 - DNA, 607 bp, Arabidopsis thaliana
  unsure (1)..(607): unsure at all n locations
cccccccccctctcaccccccccacgcggcgggggggggtagaaaataacttttaaaactccacccccacatcaataataagggaagaaaccccgtcccccctcccccctccacccctcccgctaattctcctttttacaaaccctagggaacaatgcctctcctaaaacaaaactacaaacaacacacaacctttccattctaaacaacttactccacatccccccttttacttaatatcccccattctcccttctgaatttcaccactccacctcccctctttctccaaacaataaataacctctccccccacacaacctcttcgaaccattcccattttatttttcaacggtgggcgcgcccccccaattcaaccttttactcactcaaaaaaaaaacatactctccccaatatctatcctccacctctaaccaccttctttatttctctcctaaacacacctctatcaccacaccaactcaaaaactccctatcatctcacccttcattaaaaaactctcttcantaccaccttttctccttctccccaactaattttcccacaacccaccaccactctctcaaacaatcttcactccccacc

SEQ ID NO: 188177 - DNA, 627 bp, Arabidopsis thaliana
  unsure (1)..(627): unsure at all n locations
ctccccccccccccccccccccccccccccccgggtaagattatcctagatactaaccccccctgcattataaggggaaaacccgttcccccctcccacgtaaccccgtcccccaaattccctttttccaacccccggggtcccgggaaatttaaaaaaaaaaaactttcncaattacccttccccctcctcttccccccgaatttacttcccttctttttaactccccttcccacccccaccaaaccgttcattaaaatatttccacaaccccccttcccatcgtccacccttttttttaggaaatttttaaccgcgggggggaaccacacctcttccgtcgttttttcaaaaaaaactaagatttaccccccacacccccacgttctcccccgcttcccctttctaaatcttcccccccctaatctgttttttttttcttttcccccacaacctacaatcttctccctcctcctccctccccacaaaaaccacccccccaaaacaccccctccccctccccacccccccaccctaccccttccttatcatccccaccccctctattacaccccacccccccttttttccactcactttttttttaccccacccttcccccccccc

SEQ ID NO: 188178 - DNA, 451 bp, Arabidopsis thaliana
  unsure (1)..(451): unsure at all n locations
ggacccnnaaaaggggcctacctagggggggaagacccnaaaaacaaagcanngaaggaaaagtaggagagaaagggaagaccaagaccaaaaaaaccacgccgaggacaaacacgcggaggaagaggcaacccggtgaaaccaccaaccccagtagaacaggaaagggcaaaaaaaaaattcgctcatagagaggagaaggggaaaagacaagggaaaaggcacaaaagagaaagacgcccaggcaaacacaaagggaaaacccaccgaggcaaacacgccgccaccccccaaaacaacggacaagcaagagaacgcaccggcacggcaccgccagagccacaagcacaccgaaaaacccaaaccccgaacccccggaaaccacgcaacaaacccaggagcgaggaccccaaccgaaaccacaaccgaacccgcccggacaagacaccag

SEQ ID NO: 188179 - DNA, 207 bp, Arabidopsis thaliana
cccgcggagacgcggcgaatatttgtacaacagcctccacgcttttaggcgaaaccggggcaacgggcaaagctttaatcgcacccgttttccaaccggggaggaggcgactcaactcctcctatttgctgctccgacagctcctctcatgagctatctgcacggataagcgcactctactacgcgccgctcccgcgctactaccct

SEQ ID NO: 188180 - DNA, 456 bp, Arabidopsis thaliana
  unsure (1)..(456): unsure at all n locations
cggccggaatcccgggcttcccaggggcgcaggccgaaaccgaccgnggggacagaggagagccaggcggcgcgngggaggcccgcaaggaggaaaacaccgacgaggaggaaaccgagaaggaccggcgcggagaaaccggggccaaacagacacttttcggaggaggaaccgaccgagacggacaacgcacaaagacccacccaaagcgccggagggcaacacacgccaggacacgacggaccccggcaacagacaagccaaagaaacgcagggaaacgcccagaacggcacaaaacccacaacgaacccacgaccggccacccggcaaaccgaacgcccaaccacccgcgggccacaaacgggagaagcccccgaaaccagaagcaccaaaaacccaaacccgccgccccccccggaaaacccgggccgacaaccccaaccccccccgcaccc

SEQ ID NO: 188181 - DNA, 404 bp, Arabidopsis thaliana
tttttattaaaaaaacaaaacattctaatcaacacattatcacaccacaaccaaatacttcattaaacaacaacaaaacaaaccccactccactcaacaatatactctaaaataatccctcctcatctccttttaccacttctaccacccaatcctaagaccaaaccactccccacacatttatttctataggggggagggcacccacaccatcaaaaccgactactcctcacaaacaaaaatatcatgctccatcccttctctatccccaaccacaaatcccctacaaatcttatctaacccaacaatcaaacccacccttcccccacatctccacctaaacaccccccctctataccccacaccaccacccgtccttcaactccactccatacaaccacacc

SEQ ID NO: 188182 - DNA, 438 bp, Arabidopsis thaliana
  unsure (1)..(438): unsure at all n locations
cgaactggcacccaaacagggccgccacgcgccgggacccaagacgacccgtggggacagaaaagagaagggagccgacgagcaaggaacccacgcggaggacaaacattgggnggtggaggcaaccggtgaaggcgccaaccccagaggacaggaaagggcataacaaaaaacgatancaaagcgcgaaggcgaaagagaaggagaaagcgccacaggacgaaatgctaaggccaacacacgcggaaacacacccaggacaaggacgccacccccccccaagacaaaaccaaagaaaacgaagggacaagcacgaaaacgcgtaacagcaccacaaaccgaccaaaagaccggcgaacagggaaaaaccgcaggcagggatcaccggcgaaagaaacaactgacaacgtggaggcaccctaagaggcaacggcccgg

SEQ ID NO: 188183 - DNA, 567 bp, Arabidopsis thaliana
ctcacacggcgccggggggggggggtaatataccaagactataccactgattataggaaagacggtcccccttccagtacccggtccccaatttccctttcccacccgggtgggggggactatattaataaaaaacccccataattctccgcccataggttttctttatttccgaaacaccccctaactaattgttcccaacaacaaccacatacacaggtttctgccctttcctctgctaatacttggcaaccttttttagtgggggggggtcctaaaagcgaattcctccaaaaaaaaaattaaattcacccctttccccgaatgtaaaactgtttttcactctttccctcccaacattcctctcggaacaatacatacctattcacaccccatttggtcctttacctggccccatctaacaaatctccttcccatctcagggggtttatacattggcggccaacattctacaaccggatgttcccttttcctcaaactccagctccctccccctctcacgcctcacgaggagaaaactcatccccccccctccttcttttaaaa

SEQ ID NO: 188184 - DNA, 566 bp, Arabidopsis thaliana
  unsure (1)..(566): unsure at all n locations
aaacccttccccctctccgctacccctcccccaaattccccttttacccccggggggcgggtggattacccaaaaaacccccattttttttnagncgattaaaaaaaaaaaaatttctttctttttcaaaccttcttttaaaaaaaaaattcctcccttttcttcaccccataatcaccctctaactcgcttttatttctattctctaaatcccaacaaacccaacttttctttctcaccgacgtgggagccactctcctcttttttcgccccaaaaatcacaaaagattttttccctttataaattttttaaccacaacttcctcccttttctccgccacctcttcttttctccccccctttcttttgaatcctacaactcccctctgttctcctcttttaaccatcccttcctttttccttctccccccaccccttaaatctttaaatacactttatctcttttcttctccaacccccccttcccccacctctttccctttcgccccccttcccccttcaaaaccatcttaccccctccctcccataaaaatacacccctctct

SEQ ID NO: 188185 - DNA, 397 bp, Arabidopsis thaliana
tttctaaacaaaaaaaaaaaaagaaaacttttttattctctctccccaatgagaaaagaaaacccagagattcccaatcatcttcttgcaaaacccccatcaaagaaattactttggaataggaaaccaatcctgggggggtggaaaaacaaatcgttaaaaaaggcaaaaactttttttggttaaaattttaaaaatttgattttttatttttcttatcttggcgatccaatccctatcccaaaaaattaaaacttgggaagggcgttaaggaaattaatggccccacaacggccaggaaaccttgacccttttttctcacaaatattcctgctttactttattacccaaaccttaagctgggaccaaaaagctttcctcaacaatttttaaaacc

SEQ ID NO: 188186 - DNA, 381 bp, Arabidopsis thaliana
  unsure (1)..(381): unsure at all n locations
gttgggatggaaaacatcctttttttttcctttacccttatttttccgcggggggggggctaaaacaacatttttttttttaaaaaaaaattttttttttttttcaacaaaaaaaaacccgggggtttttatttccttcttctcaaaacccccccacaaaaatgcgtttttttttttttaaaaaaacccgaatttaaccttttttacctttttgggaaaaacttttttctacaggggacacaataaattttaaaccgttttaacttctacgcagatcgtcacctttggtctcggtgtcttcttttttttcgatgattttaataaaagaaacccttaataattcatctcccncggagaaaaaacacgcgcacattctttttt

SEQ ID NO: 188187 - DNA, 563 bp, Arabidopsis thaliana
  unsure (1)..(563): unsure at all n locations
ccaccctttgtgtttttgtttttctataaaaaaacaacacctctccactccttcttaaaacacaaatttaaaaaaaaaaacctttacatccacaaaaatattacccctataacccaaaaccaacataccccccccacctccactcatactccccaaaggcatgcccccacacccctcccctcctcctctttatttataaaagggggggcgcgatttcaactccacctcttcccttccccaataaaacaaactcnctctcaaacacaatttactcactcccaatcaacgcccccactaccctcttctacaacacaccccaaaacccaccaccctcccacacacaaccacgcccattaactaccatccccccccttacccacccaccacaatactcccaaaaacttcactcaaccccctccatactaatactcacaccaccacccctccctctcccaccaataacttcacccacttatcacaccctcacaccacaacccacctaatccatactcaatacctcctctccatataacacccctctcccccatccccccccccccccc

SEQ ID NO: 188188 - DNA, 379 bp, Arabidopsis thaliana
cccccctccccgccccgccccggggtaaaatcccacactatcccatattaggaaccttccctcctccctccaatccttcaccggtcggattaaatatttccttcttccccattaattcctcttctccccataccctccttcaatctccatttacaccccttcccctccacccaaaagattacctcctatgacaacatataaacccctttttctagggggggggcaatttttccacgcgcgcttaccaaaaaaaaaacacattcttttaactatcctccttgcttcccccttttaccctcgtccttaccctaaaatatttaacccaattccctactttttatttaaccccattcaccccgccacaatttctactcctctc

SEQ ID NO: 188189 - DNA, 613 bp, Arabidopsis thaliana
aatcccgccctataccgccccccccccctagaatacccgaacatcccccataattaagggaaaactggtccccccccacgtcccctcccccaaattccctttgtcaacccagggggacgggccacacaaaacaattaaactttccttctctcctttcctaaactcaatttttctttccctcttctttaaaaatcttcttttttctccaaataccctcccttaatccctcctgtttttttattcctacaggtgtttttttttccgacgaaagaaaatcccctatattcttttcggggggggtttttctcccccaaggtgtttttcttaaaaaaaaaaaaaccttccgcccaacttcttcaaattcttatttcctcttaccgtttcccctttctttttttccatcaaccaccatcaatatccccaaacttaaccatctctcttgttctcaccacaatataacaccaaaaattcttcgccccttatttaacaccctatactctacccttctctcaaaagaacatattacgccctaactgcccgacgttctctaacgctttcttttcccaaaacaaaacgtattatttcccccactccacccgacccttcccacctc

SEQ ID NO: 188190 - DNA, 494 bp, Arabidopsis thaliana
gtcgcatgcacgcgtaataagcttggatcctctagagcgccgcctttgtgtttgttgtggtggatttttggattgttccagattcgagttacgatgcttacattaccacaaaaaagacaagtgtcttttatgcagggaaaaagaaggatgttttttttttcaaaggaaacaatagcattttcttttctgagggaaaatttttttttccgcgttttttaaaagcggacccccctagaaattaaaattctaaccggacccccggggtttttacttcccactagaaacaccagcgaacaatccccccaagaaaaaacccctgttgatttgacccagggtttttaatttagcccccaaacggccaaaggaaatcctacccggataaaaacaaaaaattgcgtccacacccggataaaccaaaaatttttggggccttgggttcaaaagtaggcgggcacgccctgggcaattttttcaagggggggaaacttctttcc

SEQ ID NO: 188191 - DNA, 450 bp, Arabidopsis thaliana
gcacgcctacctaagcttggatcctctatagcggccgccctggggtttttttttttggtttaagggcttaaacccgatcgatggaagattatatggggcctatttgggggtctctccaataggggcgcacaagagttaaataaaaaatggttttcaagaatgagagatatccgaaatctacaacaaagaggtttttttttgtgggggggggggtttttttttggggggctcgttcaaaaattaaaaaccccctttcttggtgaaaaaacttacaccttttagggattgagaaccccgttaaaataatctcgtagctttgaactattaatgctttttctccagggaacgaggagacctcttgggcttgtaataagaataatctctcctggagagatcgcgtccttgagagatgaatcatcttaaccaggggccaaagttggttttgttctt

SEQ ID NO: 188192 - DNA, 471 bp, Arabidopsis thaliana
cgtaacctggattcttttaaaggggccgccctttttttttttttttggtttaaggggcttaaccccgatcgatgcaggatctttggttgccaattggtggtttccttcattatggctgcacacaagttaaattaaaattggttatccaagattgagagatatcgaaatctaaacaacgaggtctctttttttatgaagggggttctttttccggtctgtatcgaccttagaacgcccatcttggtgaagaactaacagctctaggtctaggtaccggttggataatctgtcgctctgaactattaatcctttgcttaatgatagaggagaccgttggcctgtaatagtcattactcctgtgtgacattgctccttgtgaatgcatcttcttcccatggacgaagcttatctgtttctccagcatttctcttctaccattcaaactcttctgaggagttccccatctgctgg

SEQ ID NO: 188193 - DNA, 522 bp, Arabidopsis thaliana
ttcctcaccccggggggaacggggaaaacaataaaacaatactttcctttcctctcccttccccacgtttttttcattcaccacattccaacccattttcccccccctattcttcacccccttaaaaacctttcttacagcaaaaccaaactttcccaacaacccattttcaacacactaaccacttttactctttttttttttgggggggggacaccccctatctcgggggtgttcaaaaaaaaaaaataacccctttcccacttacctcaaattcccccacactccctccacaaaccctctccctccaacctcctacccatccacaatcacctctccacccttacacactattatccacacccccactcattccccatattacctcatcaattacatcttttcccctcccacttcccaataaccctcaacacatttctccctcactcaccctcgacccctccctcttctacctcttactttttaaaaaaaagaatactcctacccccccttctatatcca

SEQ ID NO: 188194 - DNA, 582 bp, Arabidopsis thaliana
  unsure (1)..(582): unsure at all n locations
gtgggctggaggggggggggggnnngnnngggaagtattgggtagcaactctacaagatttttgacgtggcctgcacgcgtgcgtgagcttggatcctctagagggggcggccttggggttggttttttaattaaagaaccttcataaacactccaaaagcttgattatgtacacctattcatattatgggtataggccatagaaatcttcccaaattaaagttttaatctaagaaaaatgtcccccaccgggtttttgggtttaatttttgatgaggggggggatcctatggggggggaagtggaaaggactgaataagctccctctggtcgggtaaccagctttgagaggtggcttgctccacaatcgggcgggttggattacaccacgggaggtaacaccctcttagggggggaaagggggggggcagctccacgggggggcgggcgttgtagtgggggctctttaacgcctgttgggcgggcgccctttttgattttgcggctaggggggctgtggggtcttccgcgcagagggagacagcgggggggggggtctgagagcaccaggtctttggtttc

SEQ ID NO: 188195 - DNA, 490 bp, Arabidopsis thaliana
gtgacactatacagagcttgacgtcgctgccgcgtcgtagcttgatctataagcggcgactgcgtcgttggtgtaccgatggaacagagtttagacagaaggggttagtttgggcttgggcaactttatgggggaaagtcacatcgagagggttacggttaacaccaccaccaatttccttttttaaacaaaccgagcctaccgtttggggtttttgaaattattggcgaaaaaaaacgggggattgtttaacctccaaaatcgtttatactcgatggaacaaccaacttgttggtctccggaataaaaaaaagaaacaggttgttaatgggtttcctggggggtgagacccccgacaaaaaacaaaaatgatttgtggtagctgcggagtttaacatgcacgttactataaccgcacccggatgcattgttcgatccagtacacaaacaagaagtctttgcatcaaattatccggggagtgatggttca

SEQ ID NO: 188196 - DNA, 334 bp, Arabidopsis thaliana
acttaacccctaaacaatacatttaggacattatggttttcaattgggggttggaccatggcgcttactaaaaatttcaccgcttttttcctttatattcccctttttcataaaaacctcttaaatttaccaaaacaaaataaaaccccttttcttaaaacaacaaaatgctctttcttttttttgcatcccctctgggtgggttaatatcacactattaaacctctttgtatttttctaaaaaaatgttttgggagggcactaaccaaaatttttttaaatatttttttttaaaaaaaaaaaaaaaaaagggggccgccccctttttaaaaaa

SEQ ID NO: 188197 - DNA, 438 bp, Arabidopsis thaliana
  unsure (1)..(438): unsure at all n locations
agaggacgagcaccaggggacctcactagagacgcccgctggaagggaccaggagtgacaacgacgctacaagaagcaaccagcccgccagacacaatcgagagagccanccaattccttctaacaggggtgggcgganaggacagacaaggagcgagcgcaagagaaaaaccacacagggaaaccggcggagccgcccgccccgccaaaaaaaaaccggacgccccacaagaacgaccgaccgagagggaaacaaccccagccacaccgagcggcacaaaggagaaggaaagagcacgaaagacgggagaaaagacacacgaaaagcaacccaccccaaccagccagaaacccccccaccgcgcaaccggcggagagggaaagcacgagaaacgcgccccggagagagcccgacacaaccagccccacacacaacag

SEQ ID NO: 188198 - DNA, 406 bp, Arabidopsis thaliana
  unsure (1)..(406): unsure at all n locations
gggtcggtgggaagaggggggggggagtaagactccatggggacctccggggggaggatactttggggggggcgacgcgccacgcgcngcgaatctgggggccgctcccgcaggggcctttgcctagcgtggcagaaaaaaccaatgagtccgcagggcaccgtcctaggtcatgggggaagcaggggtaacaggcctgattcactggacntctttcacagggccagagacagtggatcatcacgcaacacgggtacgcccggattaatgccgccccgaaggcgagggacaacactgcgggaaatacgtattctttctttataccggagggcggacagccgccgtatcccacgtacaagcagagcggacacaagaggcactgtgtaccgacgcatcctcgcgacag

SEQ ID NO: 188199 - DNA, 416 bp, Arabidopsis thaliana
tttacaggggttgatccagcgggcagggaccccacgggggagggaatcctgcaaatgcgaggcttttgctttcagcgggcagagagctggggggaacatcagccttattctggggggggggggcaccctcttgggggactccaacttaaagaaaaaggagcaggtgagaaaccaattaccgggaacaaggaacccaacagattccctctaaggggccgggcttaagaaggtggggggctggggttcggaaatggggggagggacttggataatctggagccagggggcctggtaaaaatgggtttacctatgggggggaattggggggaaaaaaactttttaacctcgggcaaaggagaagatggtgcttggcaaagaaccgaagggggggggggccagtgggcgtgggtatgggc

SEQ ID NO: 188200 - DNA, 643 bp, Arabidopsis thaliana
cccgcacccggggggggaaatattgatcccaaaaacttactcccccaataattattaagggaaaaaccttttgcgcccctccctgttaccccatctcccaaatttccccttttttcaccccccggcgttagtggggtctcaaaaaaaaaaaaaaaataatactctccccccccataaaaacactttacccccccttttttcttcttctcctaaacacttttcttttcaattaaataaaaataaaaaaaaaaaccttctttttaaaagctttattaaccttcaccaccctttttaacaaaaaattttttttccaagggggggaaaccctcttcttgggccaattcttataaaactatcaaaccctccccattctctttttacctaatctccccccctctctttaaaacaaattttacacttccccctatacaaaaacccccacaatcctcacttctttttttaacccctcttctttatctaccaccccacttaccactttatctccccccctctttttttctcccccctccccccttctcctatccctccaaaaacacccactctttctttccttcttctttaccatacttacacacaaaattcacaatctcttccctcccccttccttcaccccaacattttt

SEQ ID NO: 188201 - DNA, 697 bp, Arabidopsis thaliana
  unsure (1)..(697): unsure at all n locations
ctccacccccccgcgggggggnnggggggtaatattcccagctctattcccattactttagggaaaacccgtgtcgctctctccggttacccctcccccgaatttccccctttcccacccccggggtgggggtttttttaaacaaacttcaaaaaaaaaaaaaaaactttttttaaaaaaacctttttaaaaattccattggccgatttcttccttttcccccccccttttcctactccctcccccccaaataacttcctcttttcctttaaccccgccttttgcgggggcgcccccctttaaatatttcctatattcctccccgggcgggagggtggncaaccctatttccgcggacccctccaatataaaaaatgttgggtctcctccccttcttcgttggggccctctccacaaaacccccccccccttgttcttattaatatttatttccgcgttttttcaacaaccaaaaaaccttcccccccgcagaaacccctcttttgttccctttccctcttttaaaaaaatgggaaattttcccccccccctttttaaaaacccctcccacaccttctctcagtgtggaagctccctcgttcacattccacaaccctacaatttcacccttccccccacccctttaatcttcacctctttcccaccccttttttttttttccttctaaaaagacaaa

SEQ ID NO: 188202 - DNA, 603 bp, Arabidopsis thaliana
gccccccgccccccccccccccggggggggaaatattgggacgcctctcccagattttgacgcgcctgccccctacgtaacttggtcctttataccttcccccttgtgtttggggtgttttaagaaatttttctatccttttagagaggaaagaattacacacgccttctcgagaaagggcctatctcttcccacacccgcaaattggacaaccaccccccggaatttaattcttcccctgatttatctttaaccccaactttttttttttcgggggggggggcacaaccccggcggttctttttaaaaaaaaacccccgcacctgttccccttgtgttccccctttcactggccgtctttcggggtgccaccagctcccaatctgcacgatttttttgccctttcattaacccgcgtcttccacgcacctacaccagctcctggagcgacaagaccgctccttctgctttttttcctgctaagaccgcggggggggaacgggtattgggcactcttgctgcaacgccctttggttggccggtgtggagaacgcagacgcgagccccgtccccgcacgctgtacaccgattcccctctctctc

SEQ ID NO: 188203 - DNA, 461 bp, Arabidopsis thaliana
cttggacctctaaactttccccttgggtggtgttataaaaaaccataaatccacacctctcattcccctcaattcccacccacacccccaacccacctttttttaaccctcttttcctttttaacaacctaatttcgccctgttaaaaaacaaacttttttttttgggggggggcctttttatcttcaccctcgataaaaaaatttccaaaacccccggtgtgttttccccctttccttatctctctccacattccaataaaattccaaactccttttttattcccgtacaaactccccccctttctacccaaatatatatatcccacccacaactttcaaaccctgcgaaaatctaactcttttttttcccatttttcctccctaattattacaactatccctccttcccttcaaaccaaccccgcccatctatcccccctactatttctccataaccat

SEQ ID NO: 188204 - DNA, 389 bp, Arabidopsis thaliana
ttttaaattaaacaccccaaaaaacaacacgagggggtggagaagggttatccaaaaccaacttctcatcccgctttacacgacgacacgccatggggaacacaagataaaaactggaattaatgtgtctcaaagggaaacatatcgcgcgtttttttttaggggggggggcgccctcattttggcggtatcccccacaaaaaaaactgcccccggtatcgacatcttcgtcgccgcacgcatgcgttcctgttttttggcggcgacatttacgcctaaaggttgacactctttttttttaatcactctcccctgctcatccacgctcttttcgtccctccacaccgcgtgggtaagtacagaatacaactcgtcaaacaaagccggtc

SEQ ID NO: 188205 - DNA, 293 bp, Arabidopsis thaliana
ttttttttaggggtgtgggggagagggaacaaccaagcgcttaagaaagaagaagtgtacgggagcttgggggggagcgtggtggagcagaaggacgcgcgaacgcggggcagtgcgggcacggaagaggcgatagaaaaggtgccttgaaaagtacaatagataggggccgcatcagagagaaggggaaaagtcgcgcgcgtacacgtagagtaacgaaccgagagtgaaggaagggaggggcacacaagaggcaaacgggggggacgaaagcaacaggaagagaagaacga

SEQ ID NO: 188206 - DNA, 469 bp, Arabidopsis thaliana
  unsure (1)..(469): unsure at all n locations
aaccacaaaggggctttcaaggggggggggagccaaaaaccaaccaaaacacaaaancccggggcccaaaggaacaccccagggcagggaccagggaaggcgcggaaaaaggaaggaaccaggaacaaaaagacaaaaaacgaaggcaaaacaacagcgccggcggaaaaggnttccaaaggaagttggggaaaaccaaaaccccgccaccgaaagaaaaaaagcccccccaaggggggggggggggagacaccccggccaaaaaaaacaagaccaaacagcccaaaacacaggcgcccgcagaaggaaacacaacaaaggagggagacccgccccggcacaaagaccgccaagaaaccccaaaaacaaacaccaacacaaccaaaaaaagaggcgcggaagaccccaccgaaaaaaagggacaaccccacgccgcaaaaagacggagcgcccagaaggcaaacaagaa

SEQ ID NO: 188207 - DNA, 574 bp, Arabidopsis thaliana
  unsure (1)..(574): unsure at all n locations
ccctccccgtacccgttcccaaattccccttttcnaccccacgcgttcggggttcctaaaaaccttttcccaaaacccacccccccctccccccccaataaaaaatccccacttttctttccccaccccccgggttcccctcactttaggtttaaaaagggcctttcccccctctcattttttacttaaccctcccgttgttttaatccaaccatagtttttcttttttttcacgggcgtggttggaaataaaaaaatccttggattttttctataacacgaaaatttttttttttcctttcaaggcccccttctngccccttttttttttttttccaaacccaaaaacaacttttttaaccttataaggagaaaataaaacactccccttaaccataaccccttcaaaagctcctcttcactttttcccaaccccaacccttctcccctcttaaccttaaactcttacctcctcttaccaaacactcttctcttcccccacgaaaaaacccttttcaactctattccccgccaaatacacacccctctttctttcttttttttcccccaaacc

SEQ ID NO: 188208 - DNA, 315 bp, Arabidopsis thaliana
actcgggggggcggagggcgcgcgaaaaaaaaaaaacaaaccacagagccgagcagacgaggaggagcaggacgacagaatgagaccgccgcgctcgctcggcgggcccgccccgacgaacgcaccacacaccgacaatgagacaagtcaggaccacaagaggaggagatgaaacgcaacgcagacaggacctttttttttaggggggggggggggacggcccagagacgggaaagataacaaaaaacaaagaccacgagaaacagagaacgccagaaaggcgataaggaggagaaagaaacgcacctagaaagg

SEQ ID NO: 188209 - DNA, 359 bp, Arabidopsis thaliana
ttttgaacacccccccgcccccttgtaggggggccacgggccccttcccgggccacggcgctgggtcgcttttttctcctgggggtttggtggctcacaaatcaaccggcgcgtaggggtcgtatccgggtgttgtccttcttctgtgcgctttcgtttctctctccctctttgcctatttcctgtctgctcttgtccgtttctcttggtccctcgtgtttttgttttccttgtccgctgttatctctccgtctcaggcggcctttttttctctcggggtgtgtgatgggagactgcgccctttctcttgttgtctgcataaagaaggtgcgcctcgtggtcgacggtcgtcgttttgg

SEQ ID NO: 188210 - DNA, 308 bp, Arabidopsis thaliana
agccaggacccagccccggcagaaaaggaaccttttatggggtagggggggagcaacgcccccgagcgcaaaggccaaacacagggggggaaggcgcaacccgggcgcaaccccggacagggacccgagaagccacagaacccccgaaccagaacccgggacggcgaccccaacgaggaacacgaccacgccagacaagacccgacgcggacgggacaaccaagagaggacgaagggccccgaccggcagaaccgcaaaggaccgagcgacgagggacaaggagcgcgggccgaagacaacagaccag

SEQ ID NO: 188211 - DNA, 180 bp, Arabidopsis thaliana
acagagcatgtcttctgaccctagtcttctgtggcggtcgctagctatcacgcgcgtttgtagggaatgtgagtggaacgtcgttggagatctgtgtagctgtacgggcgtctgccgtcgtctctatttgtctcacataacacaagtatgtgtttaacaggatgatagggcattcataga

SEQ ID NO: 188212 - DNA, 409 bp, Arabidopsis thaliana
  unsure (1)..(409): unsure at all n locations
gggggggagggcgccctcgtctgcgtgttttttggngcggggcagggacaggcgcgcccgtccgctgttacgcggcagccgggtcagcggcgcgtatttttgtagctccggggggtgttgggcgcgncctaaaaacaatatgntctggactgcgcgtagccgctctgtgcgttccgtctctcccttgctctcttccgctttctttctctttttgtcgctcgtggtcgttcggtggtgtgtcgttggcttctattttcgttatttcgtgcgctatctcgtcttcctgtgttatccgtatcgttccgaatgagagggtttttttttgcggggtttgtttagacgcacgctcctcggcggtgttgttgtcgcgggatgccatttccgccgttttgctatcatgttgtgtggt

SEQ ID NO: 188213 - DNA, 452 bp, Arabidopsis thaliana
ggcgcgcccccgccaatttatgaggatgaacgcgccggccgcccctcctggttccgccgcgccgcgtcacgcacttctatcacctggggggggacgtggcgctaataaaactccgcggggcagacaacacggcacaagatgagcgtcgcgagcgcgccgcgcttgcccggccaccacgtcatattagagaacggaggggcggatcaccgtgggtcggtagtgcggcacacgccgtcgcgtccacttaccgcgatgacggtccaccgggcgcttttttttttccggggttggtggctccgcgcgtgcgttgtgagtgtgtgtgcgaggagcgagaagcggcgtaccgcgtgcatacaccgatgaatgtgtcccgctatccgtgataagccatgatcctcgcctatcaggacgccaggagagatgcgcgacggcccgtcagcactgtgcccagg

SEQ ID NO: 188214 - DNA, 386 bp, Arabidopsis thaliana
  unsure (1)..(386): unsure at all n locations
attacaccactactactcttcctcattatcacatccatcgccggccgttttttttggggggtttttccacaaccacgagagcgattcttaaaaaaatactttaccctatcacttttttctcttgtttctcattttttatttcctaatgctatgcattacactcctttgattgttcttcatccatgtgtcgcgttgtgtcctatgttttagtattccgctttttatgcttcttgttcttatctcttcttcctgtcattccccctttgtctttccgctctgtatccttttttcaatncttctccccacttcacgacaatattcctccctaataaatatttctgctcgctctattgacccaatgattattctttcttcttctcgatata

SEQ ID NO: 188215 - DNA, 575 bp, Arabidopsis thaliana
cgccgcgcgggacggcggggaatttttacgagcgaggcgccgcccgcggccttttccccgggcggatgccgccgccggcgggggggcgcgcgtcggattttttcggggggtggttgccccaaaatccctgcgggccccgcgcccctccacccatcttgtgttgcgctcccggtcgtgtccgatcccttgcggcgtggttctggtcccgccgcgctgtcgttacgtcttgttccgtctgacttcctacgaccagcagcgcaacggtttttttttgcggggggttttgcagccacgcttcgtggcggcggggtgagagaaaacggtcgttccctggccgtacgttccgcgccgttgtcgcctcttgacggtacactccgtacgcccgggccggcgcggtagttgttccgcgcagccctcgtggacgcgacgcacctgcaacgcacgctcccttctgcgacgtcgcgcgtctgactggtgggcggccgcgcgtggccgtaccgcgggaatctgccctgaggacgccagtccatagctccgcgtggtgggtgggcgagccccgcggacgagtgtacgcc

SEQ ID NO: 188216 - DNA, 270 bp, Arabidopsis thaliana
gcccccgggggtttgcatatagagttgacactattagagagagctaatgtacgtccgcctggcccgccttgccgtaaaagcatagggttccttttagaaccggcccgccccattatatattctgttagttctccagggtctcgcccacgggagccgttgatctgtaacgataccgatgtatatgcgtacattggacgatatctgtaccgtgcccgtttttcattctctgttgtaattctgtcaggttcagccccaacctcagcagctata

SEQ ID NO: 188217 - DNA, 710 bp, Arabidopsis thaliana
  unsure (1)..(710): unsure at all n locations
cctcccgcgggggggggctgaacggagagggggggagctggttttgggacagcccccctccgcacctctgtggggggaggaccggcccccgccccgtagactcttctctccttcttcacgtttttcctctcggcggtttgggggcgtttaaaataatacttttcttccctccgcctcccccccttctcttctcccccccctccccccccttctctcccnccctctccctttcctcccccctccgccgctcggtctcgccccgtcctttctcggctccttccccgtctaagcccgtgngcgcgctccttcttttttttgggggggggcggggttttctttccctggggggttcgtccttaaaataaaaacccttcgccgcgcgcgctccctcgttccgctcctcccgcccccccgtgtgctcttcgtgtctgcgcgccgctcccccctgctcccgctctcccgctttctttgcccgctcgccgcccccccccgcgcccgcccgcgtcttcgcgcccgtcggcgcctcacgttcgctccctgctcctctgtccccctgcgccccgccgcctctgngctcgttcgtcgtcgcgcgcgtcgtcactctccgtgncttctgtcgctcctcggcgggtcgctggctcgtgcgcccccttctcttctgcggtcgtctggtcgttgtcctgtggctcgccgtcgcgcgttcctctccg

SEQ ID NO: 188218 - DNA, 310 bp, Arabidopsis thaliana
aaaaaaaaaataattctccacacctttcttcctcccccttctccctccccaccctatttctgacttactccccctcccaccacatcattcatcataccccctaccttccctcacatactacaacctccagctatcttttttccccccacatcaatacactcttacctccatcctcctctcacctctatatacatacctcacaacttcatcatcttcccattcatcattttattcttttatacctcattgtcgtccctctacttcactctaacccactagtactcacaccatctactctactcaactccct

SEQ ID NO: 188219 - DNA, 464 bp, Arabidopsis thaliana
ggggcgcttattgggagtttttggcgtcccggccccgtactaagcttgaacctctaaagcggccgcctttttttttttttagtgtttagacagaaacccacgtgtttttaatttgaacgggcgcgtcaaaaatactatggagggggaatggaaaaggttccacacctcacttcctacctatgaaagattgacattcgatcgcaaaaccggttgtgttatttcattggaactgctccccgattagttagcagaacggatgtatcattggccgtttattagaagcagggtgattcactattattttgagagggccgtggtggagacctcaggctcatggtaatgtgagcgcttgggaggtggagagggtgaccggggtattgtagggatcatttgggctgtaaggggtgttacgttgtgtatgcacagagtgtagtgctaaaattgtaatatggggaagggatatt

SEQ ID NO: 188220 - DNA, 516 bp, Arabidopsis thaliana
  unsure (1)..(516): unsure at all n locations
gccccccagaggccccggcccaatttcccgggttacccacgcgggcgggggggacattattctttagactgccctcacctcttccagagtgtggtgacccccgctggggaaagaaaagactcaacagaagaaaagaactacctccagagcagatgctggtgccacgaacaacagaaggtctcagaggaagcagccatcctcttttagagaagaggggggcncgccaggaaggaaaacgttggcatactaagcaaaactttctcaaaggaggcgaacacccacttgacgctttgcttgatcacagactggcctgactgaatgtagtgtgaggggagcgcgcccttcccctcagcgccgcgcccaccataggaagtccgagcgggacggacacacctccctatccatcctccagcaggcaagcaaaagccaactgatgcattccagcgggaggggctagccgccgccgaagaaaaagaatggcagcagaaccccccccggaggaaaaagaaagcccac

SEQ ID NO: 188221 - DNA, 233 bp, Arabidopsis thaliana
ctttcacaaggagcccagcgcggccccagtgcccccgaccctagagcctgggaatacttcacgaggggggtccgacctttgattattcttctttatttccaatagaaagcgaccatccctacgacaaacttccaatggtggggcaggcgacgccaccattacaatatttgtgtcttactcacaccgtgatattttatagcgcaatagctacggggactattctctaaatggaa

SEQ ID NO: 188222 - DNA, 459 bp, Arabidopsis thaliana
  unsure (1)..(459): unsure at all n locations
ttacccaagaggaaaacagacccccaccacgggcacggagaaggacgagggaaatttcaccgggggggagaggcgcgcacacaaaacgccgnccgcgcacgcccagcgccgccgccgaagcgcacccgaacgaggagcgagcaggcacaggacgaaaaagaagagagagcccagacgcccacaccccagcgcgaacgcgcgcacggagcggaacaggacttttttagagagggggaggaaagcacaccacgcaggcgggcgggcaccacacaaactcgcgcagaccgccgaaaccccaccgaccgcgcacgacgacacgcgcggggcggcgccgaccgcacccacgggcgcacagccacgcgagagcgcaacaaccgaggcccgacaacccggggaacggcgacccaggcgacggccggcgaagaaaccgaacccgacagcgaaaggcgaacaacgcca

SEQ ID NO: 188223 - DNA, 187 bp, Arabidopsis thaliana
gggggggccgccaaaaagacagacgcagcacaccaatccgtcacactatctgaccgcataagctccgagatctgcgtgacagctggccaacgatatagaagaccgggacaacgggaggctgtcgttgactgctgctgagtagtcgaaacgggaagagcgaaaggtttttttgtagcggggggggaag

SEQ ID NO: 188224 - DNA, 536 bp, Arabidopsis thaliana
ggggataagccccccccaaaagccccggcccaaaaaacccggttccaccccgcgggggggggtcctacaaatacggaaggccctaggacgaaaggcacctggagcaacgccggcgaggaagcgagccaggaccgctgccccaggaaacagggactccacaggccgcccagccagcaagggccacatctagccaaccacaccggggagtttttttgaggggggggggccccgaaaccaacccaaagagaagcagaaaagcccacacgccacgaggcctaaaccaggggaaagcgagaaagcaacaacacccgagcgaaagtcccaccgctggagaccaggaaggcgaccaccccaccaaacaaaccgcggcccacagaagcccggtgaagaggggggccccccaaccccgggacgcgacagggctgggcacaccctcaagggcgcccccccgcaccacccaaggccacgcagaaacagaggctagaaaccaagaaggaactcggaaactacacaaagagggagatagacgagggaga

SEQ ID NO: 188225 - DNA, 361 bp, Arabidopsis thaliana
ttttttaaacagccccccccaattttcacatgggggagcgcaccaccgcccgagagcagcggcggcgctggagcttttttcccaccgggggggagttgtcctaccgaagaatagagagcgcgggccccgcagacatgcgcacagtgattgctaggagtacttattacgagtcgtgcacggcgcgcatgtaagggacgcatagcgagaaagccgcactgcaaacgcgctgcggacgataacgcgctgctcagaaaacaaccacgctattttattcggcggggggtggctgcacacatatccaaatcggaggagacagtctatatacacaggtcccggatgtgaagcgaatgccccgcattgc

SEQ ID NO: 188226 - DNA, 579 bp, Arabidopsis thaliana
cccttgaggggtttccggccggcgggcactcccccccccgcggaggaccagttactgcgtaaagacaccgtcctcaagatatagtccagttcccgcgtacgcatatagaccgacgatagtaagagcgagacatactatcatctttgtctatcgctgtcgccaaatatcattattgtcgtgcctctcgttgtataatgtataattgactcacttctttatagctaatttcctaaagcgataggacgcgacgacaatcactcacacgttaggatgactgcgcgcgctccacgtcgggctatggtaatcataagacgagccgtgcagcgtatatccgggcgcacagtggtggttgggtatcgtggaacgcccttaaatgtaacagacggtgtcagcatcccgcgatattatatcttcactatcgacttctattatttactcatcataccttataattgacatagtcctgacgtggtatgctgatatctttctgcccagctttgtcgctctgccgcggtgaggaccaccaccgggcaccgaagctgtgtatgtaacagaagtagttaagcagagggaggaagt

SEQ ID NO: 188227 - DNA, 359 bp, Arabidopsis thaliana
ccgccggggggcggggggggccaaaagaataagcttgcgcccgtggcgcgccgtcgcgctgttggcgccaccgagacgatcgtgcgggtgaggactgcgcgttgctcgggtatgcgttaggccgtgccggcccgctccgacagtccgccgtccattctgacggttggcaacacagccgggttttttttttttacggggggggagcgggaaaaggacgcctatggtacttcaaatccagctccccccttgctctactagccgggtgtggccaggtgatgggtgacggggcgagacgggcgagccatgcgaggagcgctggggcaatcgccggggggcgcggcgctagtctatggagtgcc

SEQ ID NO: 188228 - DNA, 509 bp, Arabidopsis thaliana
cgggccggagtcccgggcttaccgaggcggccgggggtctggaagaaacaaggggataaaccgaaaaacgggaaacgccgacccgatcaagggaacgaacggcaccgaggtgccgacgacaacaaaaacgagaaccggatggctcgctgcgccagaggcccactctttctccggggggggaccaggacccgggggcaccctcaacaaaccaaacacaaacggcccccgggaggcacaaatcaaccggaaccggccgaaaccacatcagggggggggccagcgccaagcgcggaacaccagcgcgacaaagcgaaaacgccaaacacaagagtcgccacaccgagcaaagcggccacgcgcacccagcagggagggagggccacaacgcggggccgtacaacaccgacgagacgcaacgaagcacacgcagcggaaagcctcccaagcgacccaacgaccgacaggcatgagggccgggcggaagcgaagagggacaagggcaagacaga

SEQ ID NO: 188229 - DNA, 478 bp, Arabidopsis thaliana
  unsure (1)..(478): unsure at all n locations
ccgggcggggtccccggttcgccgggggggggggggncaaaaaaaagnaacccaaccaaggcgccattggcgcgcccggcagcccagcgcagtggggggagggagacggatggacgccgggggcacaccaccaccccctgccgggggagggggagagccaatcttctctttgggaagttgggncaaccccgaggggccgcgcacaggaaaacagtcccccccgcagaggggcaggacaactgtggaacggggggccaggcaagcggcggaccgacaggcgccggcgcaacgagagagagcgaggacccaccacgcacgcaccgactaaccctccaaaggattagccagcggacaaaaaatcgcggacagacacacagccgccctcacacaacagccaacgcccccgccccgccacaactgacaaccaacacagaaaacagacacagagcacacgagacacagggctctataccgccaa

SEQ ID NO: 188230 - DNA, 202 bp, Arabidopsis thaliana
cccactctgccgcctcttacttaagtgggggcatatgtcctctatgattaacgcagactgctctctcgatagtagtaatggtagacacaacctagcgcatagctcgagaatcgacaggcttggatgtagaacgttggacagaccacgtccacatttacatgcgtatagtgacatctctacgttgtactttgagagcggatat

SEQ ID NO: 188231 - DNA, 473 bp, Arabidopsis thaliana
atgtgttttacataaaaatcccgtccgcgttactcgccggcgagtcgcgcccaatcttgtatacagagcgcgtggtatacacttgatcgttgtagtcgcgacatggatccacgactgtcgtttagctgcctggtccgcatatctgcggtggagggcaagaacagagattttttttccggcggggggggaagaggcatcggcgggttgttgtagttggagccgcccactgcgccacattcagggtttcgccccatgacaagtccttttatgatactgatagcggcgccgtgcagcgattatgacatactcgttcgatgcgggagttatgctggtcataggcgcgcgcggtcggattttatgctttgtccgccatgagccgcaaccagcgactgctccattcgacgtcgctctccccatgttaacgcctacgtaggtacagacacggcggcaactaattgatgaatcagcgcctc

SEQ ID NO: 188232 - DNA, 504 bp, Arabidopsis thaliana
aaaacaacagacaacaggagcggctctggcgcgagacaatgaataaggtagagcacggcgaatacatctacctcatacataaccccacatccgaccgctgaaccaccactagcgcgaatatattgcagcttgagagcgaaccgcgagaaaggtattttttattcggggtgtgttggcccgacccgccacaagggagatctaaaacaaacgaagcccataatccccgaatggacgaatacacattagacgcccacccttcgacacacaccgacagcaccacccccccctaagatgtctaaatgcgagagccgacgatttccgagcgtctttctctccggagaactagcgcaggcagcatatgcgagcccgtatgtcacgatcacgatttagtgtatatggtcactctccgacaccctatatgaaaagcgagaagcagagtaggacgtacgaatgacctcacgccttgagacagaactaacacctaccatctccgacataatcatg

SEQ ID NO: 188233 - DNA, 522 bp, Arabidopsis thaliana
ttttagcccgccgggggggagaggggcgggtccagaacaaaaactggtcgctatggtgtgcggagtatatcataccttgcagaacgggtaggtgagcggaaggcacgcaagttaaatgctcagactcggttggtacgaacccgtggtggctgctcgagctcggcgtttccctgaacgttttcacagaaagccgagacaatctttttatgagggggtggggaccacacccgcggggcccttatccctaaaaacattatatccttatttttattttgttcagaatgctctttatggtctgtgactgactcgttcggcgcgacgtgcgcgcggtaagcagttcatacagtgagtctcagttgtagacttaacagaccaccttgatttaagaatagattgatctggatgtagctggagggctggattagatataccgccacgtccgcctcgcatccctggtgtagatacctctccgccgtacggccgcgcggggccgttacctctggcgtgcgtcgggcgtgagcc

SEQ ID NO: 188234 - DNA, 455 bp, Arabidopsis thaliana
aaattttggccgtgcctggcccccttccttaacctgggatcctttaaagcggccccccttttttttttttttttatgacactttgacccgtgaccgatacaaaaaattaaaacggattggaaacccattgcccatggttgtgccgcgatatgagaagcataataggccggatggggcaagtccccttaccttaggcggtatatttggtaaaaaccgggactttttcccggagaaccctcgagaccgtgtgcgtgtatccagacacacttctgcactaatcgggatgagcgcccgtaacaggcacgttttctacgtaggccatagatttggtccagcgaggccaatagtacaccccgagagaaataaagaaaccgtatatttgggctttttctaaccgcactcgttattagctactcgtagcgaaaatcgcccgaaagaattaagcaaatataata

SEQ ID NO: 188235 - DNA, 448 bp, Arabidopsis thaliana
cccgacactctgctcgcgcgcgaggcggcgaattcctccgcggagagccggtccccttctcccgtagtggtggcttgggtgcccggccttcgcgcgcacggtcaatttttcggtggggggaggattgaccaaaaaataacctactcgcctcagaccctaaccttgcccaccatcttaggtcgattacaaccatgtatttcagacgtgcgactgtacaacagttcaccagcatttacacagccacaaccgcgaaacgctatcatcgcggtctgttaagcgccccccagcttgcaatcctttttcttcgaggggtggggttccactcctctatcctcaggcccggactgaaacaacaaccaccgaacaccccacagtgttacaccatttccccatttagcgcgccccacgtcagcacctccgcgtctgcgtacgagttgtcgggccctga

SEQ ID NO: 188236 - DNA, 414 bp, Arabidopsis thaliana
  unsure (1)..(414): unsure at all n locations
aaaaaaaaaaaaagagagaagcgaacccctctgaacgagcccgaagcttcgaaaatgtgattgataatatccccaaaagaaatcctcacaaattcccatcctcttccaggcctttttttgggggggtggagatacaaaangcattgtgattcaccaaaaacccagatattgttctaaaaaacatcttcattaagccaaaaagctttaactctttcttattccaacccaacctttagaactaaaaatgattaatttttcccaaagaaactcatccacaaatttgattaaaaaaccatacctcaccttttcctacaaattcattcccaggtatacaaatcagaatccgaacctttcattttaacctcaaaaccccctacttatccccccctttatttcttaccccttttccactaa

SEQ ID NO: 188237 - DNA, 360 bp, Arabidopsis thaliana
agcctccaaggaccccgcccaatatcccggtttttcacgaggtgggggcccataataaaaaattaaatacacatgtctaatatttctgctgcaccttggtattatctgctctcaggtgccccacgcagtgtcaggtcatcagtatatgtgattcaacctgctaggaattacctcccccgaaatttttttttggaggtgggacaacagacataccacaaattgaggcaacaaatctctccaatctggttcggtgaataagaagaagtcatatagacataatatatatttttttcaactatgtagggacacgctattatatgattatcattctctggcaatataaatttagggagtctttgt

SEQ ID NO: 188238 - DNA, 503 bp, Arabidopsis thaliana
cccccccctatctaggccttatttcttttccacattttttctcttccggggggggatggggttttaaaattaatttccttccactttcttcctctcccctacttcgacgtctcgttcgcttcgttcctctctcagactacgctccactcgctcccccacatcatatctgcttacttctcagcgcttttacaccctttacttctattgtgttgtcacctttcgcctatctccccacgcaatcactcctttttttctttcttgcgggggggagagggtcatctagtacctctcccggttcgtcacatacaaaaaaaaaaaaattctcctcttatcgtgtccacttcttacttaaccatattctaattcttgtccctccccctactaatagcgtcatcttgctttaccaccacatcatctttctcgtactaccccaacacttctaacacgataattctactttctacttcttagctccaccgaccaattccgggtcaacacttcat

SEQ ID NO: 188239 - DNA, 448 bp, Arabidopsis thaliana
acggttcaccccttgggggggtgggggcgttttatattaaaaacaaaataacacttcttttttttacccccttgtctttgtgtgacacagcgaccattttttttcccttgcaaaaatagaaaacgcgttcgccttgggtcacaaccagcgctgtgtccacaacttttcttttctagaccacgggtgtttttgatgtaaccttttcttcgggggggggggggccaccccttgcggcggtgttttcttaaaaaaaaacgtcggggggggggggggggacacacccccggctatccctcctcgctccgcacgcgctgctttccctggttcatacgaccttctttcggcgccctggcgcctcttccggcgctcgtctcccaaccgccgggctgtcgtggggcgtcgcgcctcatacaggctgtctgggcggcggggtcgcggtgcctgccgc

SEQ ID NO: 188240 - DNA, 580 bp, Arabidopsis thaliana
  unsure (1)..(580): unsure at all n locations
gggcccggaatccccggttttcccaaagcggccgaggacatctgtataaaacacgacgcttccaattttcgggcggaacccttttctctcccctccaacccctactctcaacgccgtcggctacccaaattttcttaaccccccggaccattcccaccgcttccaacatatcagctcactccccatcctatataggaccaagccccttttttttttcacgggagtgggaaaccnnncccccnccccctccactctctaacacattgcgccccaaacccgctttagaaaagacacacacacacccatgccgctcaaaactcgaaattccaatcctacactattaatccaaatcttatcctatcccttatacaacctcccaccaaccggctatactcccgaccccaaccactatgtgaacaaacccctcccaaacaccccgcaacaagagtataacacaactaatactcacaccccaatccaaacacatcttacatacaccatactctacaacctcaatactacacatacactaaaacaataaaacacggccacctgcttaacgacgagagcaataaatcca

SEQ ID NO: 188241 - DNA, 181 bp, Arabidopsis thaliana
  unsure (1)..(181): unsure at all n locations
cgaattcccggtttacccacgcgggcgagggggnattttaaaaatattctctgcctcaaagagagaaattttgggatctctcatcgcacaaaaacaacacctaggtcgcgtgtctttattcccggcgcgaaggggcaccatcccaccccccatcaatgaaaagagggcccaaaaccccccc

SEQ ID NO: 188242 - DNA, 157 bp, Arabidopsis thaliana
atttccatttatatacgtcaattgtgtgtagttaaaatgtcttctacttgctaactgtagaaaaagaagctcgtaggacttgtctaatgagatctccgggcgtacttacatcatctttttttatagggggaggcgtttcccatgtagatttataaaa

SEQ ID NO: 188243 - DNA, 332 bp, Arabidopsis thaliana
actatcgatattggagggcccgagccgcgattcggtacactcggcctgcgcctgctgaatgggactgggtatgtgtgaatactaaacagcacaaaaaatgctggtctgtctttttacgcagacaggaggatcagagaggatgtatggacatacaagcttcgctgaggactcagggccaagaagcaacgatttgacagactgaaagcttgattcctctcagctgaaaagctgaatctgatgaaatactaatctgttctttttacttattgctgagaatttgaatatcatatttagatctgatgtatggttcgaaaaaaaaaaaaaggcgcgtt

SEQ ID NO: 188244 - DNA, 448 bp, Arabidopsis thaliana
  unsure (1)..(448): unsure at all n locations
tatatctgaaacagcacccgtaacctacccatactctaagttttttgctatctacctctttttagccaccctcactatcactcacgccctctctaccctctcgttcctccccacaggaagaaacacactctttttttttagaggggggtgagagaagacnnccccaaacaaattaccttcaaatatattcactcgcgtaacatccagtcctaaatatttttacccctatctcgcatacagaaccccccaccgcagacatcataaaagtcgcatgatactcaacacgtaacatccaagatcctgcgctcccacacaaccaccaccctagcaccccccacaaaacctcaaaatcacatctcgacagaacctactattcgtcatatctctctactataccacttctatcaaaatcattatactaccactaatccccatactaaaaaattta

SEQ ID NO: 188245 - DNA, 496 bp, Arabidopsis thaliana
ctatgacgtcgcatgcacgcctaccttagcctggattctttagaacgggccgcctttttttttttttttaacccaatcctttttttcatttgaacaagggaaagaatttgaccacggaggggttaccaattgggagaagaaaccgggagagaggttagccgccagaactaaccaacctttctgaaccggggaaaaaatggaagaaaacttttaaacctgaaccacctggtattcctttaaacctcttacccaaaagtccaacccatttattaaggtaggtttctttcctggagaacccaccattggccatccagcttcttatttaaggaccacccccccttaacctgaccttaacaggtttaaacctcgccgaaaagggtaaaaggtggcttatttggttcaaacttccaagaaccttcaaggttggtagaaccatctctcgaagcatatatgtccttttccttaaacctaggaaaatagcccagaaaatgtttta

SEQ ID NO: 188246 - DNA, 497 bp, Arabidopsis thaliana
aactatgacgtcgcatgcacccctaccttagcttggatcctttaaagcgggccgcctttttttttttttttgaattaaaacctaattaaatcacattatggtgcattattttggttccagccccttacgaaatgacctttttgggttaccaccaaattaaaaccccaatggcttccacccattactggttccaatgggccaacccttccattaaaccttccttatgacctgggccggcctggttaactggttttaaagggcaaccgatttttttgaacccacaccggtggactcatgacacaataaatttacctttatgggcaaccaacgctgtttattaaagtcaccaatgggattttcaatgactacggtttcaagccaagctggcctaattttcattttttcgaccaatgccgttacatgggaacgtgaatagatcaagtttttaaactctttttcgtccgtgtacaacaagtaatcaatcggcccagaatgat

SEQ ID NO: 188247 - DNA, 539 bp, Arabidopsis thaliana
cccccgcccgagcgtgcgcccggcgccacgagaggcgcgagatcgccgcgggaacggcccccccgggaattctccgggaggcaggcggcgcccgggcggccgccggggcagagcggcgcaccgaattttcccgcccgggggggagaggcacgccgaaaacgcctgaggcggtggaccgcgagccatgcccacatcagtgttgccgcgcgcacagcaagtgtgcgccgcgcgggcccgcacaggctgcggcccccagccgcgtagacagcgccagcccagcgggagaggcggggcagagtaagagacgggaccgcttttttttcggggggggggggacgccgcaacacgagccaggatcgaggcacccagagcgcagcgccccgtcgtgccaaacggccgcggtccgccccgtgcccccccacgcgtctcgccgccacaccccgcggacgacccccaccatgcagaggcaccggcccatcggtacacgagacccgccgcccccgcaccacggtgaagggggcggccgggcgtgcgcgcag

SEQ ID NO: 188248 - DNA, 494 bp, Arabidopsis thaliana
  unsure (1)..(494): unsure at all n locations
ggcccgggccgggattcccgggtttacccgggggggggggggggttacaaacagggggcgcccaaatgggacagctttggcgggcccggactgccctaccatgctgctaaacagcctgctagtttgttacaccatgggtcccccatggccgcccatagtacggagagcggcgcagcccaccaaatctcctctctcggaagagggancnncccacgtggagccacggcggctggcagagcgctctccgcggtggggggggggggcaggcagacatttctgccacttggggatggccaagccgggtgctcacagagccccacaaggatagttgacccaccccggacccccgcaactctatatggtgtctgtggaggctccccaagacccccggggcgggctgaaaggggggagccctgccgtgcgcaggggtgcggcacccagattccctcaattaacatatgactaggcgataatagagcacaggacaactaaag

SEQ ID NO: 188249 - DNA, 270 bp, Arabidopsis thaliana
caagagttttgaagataccgcatataacggacccagatatgtacagtcacgacgataatggccttcttacaccagggggggtcgtggttcgttgccacatacgtgcagaagggcgagtatagtgcgttacctcatactacacaatcatcgagcctttcctccgaactctgactcgcgcgcgtctgctacctcattttagacaacaccaagtgctctcgatgcgcagacgaaattcgtcatgtttcatagccagtgttatctttttgttgt

SEQ ID NO: 188250 - DNA, 503 bp, Arabidopsis thaliana
  unsure (1)..(503): unsure at all n locations
ggatttaggtggacttttggaaggaacctggccgcggctaggcacccgtccgtaggctgggtatcctctgaagcggccgccctttttttttttttttttttttttttttttttttttttttttttttttttttttttttttttttttttttttttttttttttttttttttnnaaaaaaaccaagggggcccctttttttttttccgaaaagaaacccccccccaccccccggttttgttttttgggggggcaacccaacccaattttttggccgcccccccccccccccggtttttaaccccaaaccccccaaaggtttggggtgaaacaaattttttcacccccccggttttttccttaaaaaaaaattccccggccctttgaaaaaaaaaaaggttttcccccccccccccacaaaaaaatttttaaacaacccccctttttgggttttccccccccccctggggggtggggcccctcccgggggggagaaagaaaaaaa

SEQ ID NO: 188251 - DNA, 441 bp, Arabidopsis thaliana
cgaccaatgacacaagttattttcaaaagatgatgccaaattctagatcggggaccataactccgacgaccgactcaacccccaccacaaccacatccactacgactctaaacacgtgggattggtgttacagtttttctcgaggggggagcggttgggaaggacaatacgcgaacgcttggagttttatgtccttatgggaacggcggaccccctctaaaaaattggaaaattctggctaattccacccgtcaggggggattgcgggtttccatctactgaaaggtatatccggcggggggaaaccaaataggacctattagttagaccgcgccgataatctaagcgagcgggacagacctttatatgcgtgtcatgcggcttgcacggttggaagcaggaagatgaaccccgcggaagaccgtataaacccccaaaggg

SEQ ID NO: 188252 - DNA, 230 bp, Arabidopsis thaliana
tctctcaacgtatcctcttacacccttctttcataactacataacactaatacctctttattaatcatctcccacccccataccaccgtcccatctcctccggtgactcgtctctctttctcccccctccatctctcgcatcctttcactcttccgtctcaccccctctttctctcttccctctcttccactcgtccatctacatagactcttaaatccattctcttcta

SEQ ID NO: 188253 - DNA, 252 bp, Arabidopsis thaliana
cgacctagtcttgggtctttagagcgggccgcctttttatgtcttcttggtcgcggcagcccagccgtgtttctcgtccccgaatgatagctttcttttttagcaattccgcctcgcctttgcagaaggaatgtacccccgctccatattttctcacctcacttgtccttctctcggcgtctccttttgttgggtagtgagcatgatcttcgaggagggaaagcaattcctcgcgagcacgcaacgagcgct

SEQ ID NO: 188254 - DNA, 494 bp, Arabidopsis thaliana
aaagacacagccgggaccaggaaagagagacaagcggcggaacaaccgccggcgggtcctaggggagccaagacatagcaccacccgaagaggcgagcgccccccacaagcaacacgagcaagccaaacgagcggaggcacgcacaaccagcacgcccccagtttttctttcagagcggggggcgcgccaaccaaccccaacgggaaaagaagcccaagaccacacgaccgcgagagactaaacccccacaaggcaaccgccaaagggccacccagagggagcccacacacggcaacaaaccggagcagccccgcacaccacgctcacggcaccccacctccttaccagcgccgcgcaaagggccacaaagaataccgccaccgccaagaccgcccgagacaggcccctcggacccatcgacgagacaccacagaatgaggcgagaaacaaaacccatcacaaactaaaccaaaacacaatacagaacgacaaa

SEQ ID NO: 188255 - DNA, 483 bp, Arabidopsis thaliana
cactgggtatgtgcggagggccatcaactctttacatcaggggggagggtggctcaaaaaaaatcacttatcatcctatgttaaattattgcacacctgactcagagtcttctctcacggccttttctcggaagcgtgccgccacggagcttttttgaacgctcttaccttctcttgcactaacgcagacatttttcttatgggggggggagataaatatcttatgatatttcaaaaaaaacaaacgtccttccacccagctatacgggatgatatacgcaacttgtgaggatagacgtaacgaaggaagatgatgtcacgtcccacatcgatcagtagaagtggctcttcagttagttatttactgtaagttgaatcactgcctttgtcgttcacgtgtgttacgtatttaccacggtcgctaactcttgagagttcgtaaatcataatttaagacgcagagatccagtacgataagtgtac

SEQ ID NO: 188256 - DNA, 366 bp, Arabidopsis thaliana
aatcatctcactctccattatcttctcctccccccaaaactcttttttttcaaggaggggggctactttcttaccggaaacctccaaaaaaaaaaacctcacggggccctctcctctctcccccgcctctacatcatcctcctcactcactactacctcattcctatcttccttcttcacaatcctccatacctcttcatacacttatttactcaccttcactcccctcaatccctcccatctccaccctccttccactcatccatcactcctttcaattcttaatccctatatcaccacttttccacctatcaaccatatacatctttacgagcaaatttaactattccaatcaatctttactct

SEQ ID NO: 188257 - DNA, 490 bp, Arabidopsis thaliana
ttagggtgacactattagaagaactattaccttgcatgccccccttccttagcttggattcttttaaaccggcggccctttttttttttttttttttttttttttttttttttttttttttttttttttttcaccttaaaccttgccttttaggggggtgaaaccttgtacctttccggtccaaaaaattcaaccaagggggcaattgggattggccttatttctttaaacagttttttatttggaccaaggaaaatgggaatttaattggcccttttttaagcccccaccccaattttttttatttccgttgttgttgaaggcattccttgggccggttttggttttttccccacttttaaacaaaagttgggtttgaaaaaacctcaaaattcccttcgtttgcaacaccaaaaaaaaaatggttgggcgaaaaataaacctttgccccttttggttttgaattacctccaatgctttaagttgaaaa

SEQ ID NO: 188258 - DNA, 499 bp, Arabidopsis thaliana
gggtgcaccttataaaagagtcttgacgtcgcttgcacgcttacttaaccttggatcccttagagcggccgccctttcattttcatgttcaccggaccttaccatacttgtctgtaagaagacgcgtggtggaccgcaatgctaccgaataaatatgaggaaagagaatggaacgagatcgatagacaatatgaaactatcacaaatatgttctcgtatattatgatctagaaattgagcgataataatgtagccgttctaaattagggcaaccagtgtatatagtaggcgaagagaaaatgaatagatttatttcacgatacggcgtagatgtggacccgaatctagcttaagctgcgaccaactttattatcaacagtactagagtcaaaccacaagcccaatcagtgtaatagagagggtgcgcggcgactgtggaacctgtggaagacgtgtgaccatcgtctacgaacttaccagaatccatattatcgtaagt

SEQ ID NO: 188259 - DNA, 652 bp, Arabidopsis thaliana
  unsure (1)..(652): unsure at all n locations
ctgcggggggagggaaaggggggggggagctagttgggccncttctcaacctcttaaggagccgccccctccttaactttattccttttaaacctttcccctttaaggattagggggtttaaaaaaaaaattnttttctgtttctcccttctcccctttcctcaccacacaaccatcctcttcccaacatttttaaaccccgtctttttaaccctctttttttttataatttcccacatacaaattgttttttcccgcggggtttttctttttctccccttctttctttctttacgggggagtgaggggtttctttttttgtgggggggtttctttttttataaaaaaaataagcctctttttgtgtggtttagaaaatattttttcctcccttttttttttctttcacggcgttttcccccccccttctcttgcaatgtatttttttttcttcgcaatccctcccctgttttctgccgcgcttttttttttcttctcttttttttttcctgtgtcatcccgctttttcttggttctcttcttaaataatcacttttttctctcttcagggggtttcttttttacttcttttctcctctgcaagttgggccgccctctataattccttttctctccttaccacccccttttt

SEQ ID NO: 188260 - DNA, 589 bp, Arabidopsis thaliana columbia
  unsure (1)..(589): unsure at all n locations
ccccggcgcnggggggcgggggccgggggggggggtgggtgggccccgtctccccctcgggggggggcccccccccccctcccccccccgggncnccttttcccccggggtttgggttccctattcccaccccccccccccccctccccccccccncccccctcccctcccccccctcctccttcccccttcctctcctcttctccctcttttttntcctcccccccctccctccccctccccccctcccnccccctctttttttggtttgtctgggncncccccccggggggcccccccccccacttttcccccttcctccccttcctcccctttcccctcttttcctctcccttcctcccccccccttcctctccctcctcccccccctctcccctcctccccttctcctccccccctcctcccctccccctttttcgtctcctccccccccccctccctcctgccctcccctctcccttctccttctccctccctctcctccctctcctcctccccccccccgcccctccctccctccccccccccccctccccctccttgccgcgccgcgccccgcgcggtgtcc

SEQ ID NO: 188261 - DNA, 137 bp, Arabidopsis thaliana
cggcgtcgtggcgcgtttttttttttcgtggaggggggggggagccgccgtgcacggccgcgagggtcgtatgatctccatcacactcgtgttccgtcatgatctcttcgtagcttgtccgcgcggtcgttacgtgg

SEQ ID NO: 188262 - DNA, 463 bp, Arabidopsis thaliana
aacttgacgtgcagccgctcgtagctggtccttaagcggctccttttggttgtgcatggaacatattgtcgggaggagaattcaactccgttcctgtaagttatcacgaaaagcttgcgcttccactacctacgaaattcaataccctcggttatcttgtcgaccttttatcagggggataccccagagtgtactcactcgttgtgggctttcttccaaacgcatacccacccgggcactagttgagattgtgaggctgaaacgatattctttatgcatataccgcacccacgcgctttccctcaccatttctcaagatccaaaggccaatgtacgccaccgattccgcctcacatgtcgccactcaaattaggtctgtctcgggaagaaccggttggtcagaagcacttgttcataagatcgatttggtcatttctggggctagcgtagaacttattgctag

SEQ ID NO: 188263 - DNA, 478 bp, Arabidopsis thaliana
actcactttgggaaaccggccccccgcaggccccgtccagaattcccgggtccacccacgccgtccaaagcctgaaaaaattactaacttctaaaacacttttttgggattaaattatccattagctgcttgattttcattaacaaggcagaagttggcagactggccgtggcaccgaaccgggaaagcccaacctgagaccaacgcctgggcaccgcttatgatgccttgccagccccacaagacaaaacttgtattgcagcgtccaaattatgcttaatgaacaccccccttttccgaaaacctccagttaccggcgaagaaataccaccttgtttgcgacacggcctagcaaatttcctttttgctcccaaactttctaaagaaccgggttcctaaacccttgacctaactccgatttttcaaacctcactgctttgaaccctatcgggggtccctaggcgggactccgatatca

SEQ ID NO: 188264 - DNA, 305 bp, Arabidopsis thaliana
aagagctcttacgtgtcatgcgcgcctatcctagagtggatactctagagcgggcgccccctttttttctttgtgtttctttgtatgggactccctttactgtacctcgcttccgagttcgatgagtttctgggaagggagatggaatctttgtctgaaaaagcgttgctttctttcagatgatttatacaagagatgagacccctttgctttcaccatattctttacaaatttcaagggttaccctcagtttatgggcaaatgctgattaatcctgtttctctttcatttagttcctagttctc

SEQ ID NO: 188265 - DNA, 106 bp, Arabidopsis thaliana
acctgcacgtactgtccgatatgggttgccacgcgtacctcacggtacgacgcctgataagctcatacatgtctagccatagaacacgtggatagggcatgattta

SEQ ID NO: 188266 - DNA, 420 bp, Arabidopsis thaliana
  unsure (1)..(420): unsure at all n locations
aaaaaaaaaaacccaccccccccccccgaagggggaggaaagcgaggagcaaaagcttttcaccacacaaggacgaagagagggggggggacacaaaacaaaaaaacaccnacaaacaacccgcaaagaagaggaggaagacaagacacaaagcgaacagaagncaaacaaaagaacgaagacacacgaagaagccaaccacaacaccagacccaccgcccacgaccagcgcaaccacaacaacacgcaaacacacacgacaacagcgacgaacaaaacgcccttttacaacaaagaggaggtgggcgacaccgacaccaccgcaacgcggcacccgaaaaaaaaaaaaaacgaggcccgacggcactccagcacaaggaaggacagcacaaagacacaccccgcaagagacgaaaaaga

SEQ ID NO: 188267 - DNA, 135 bp, Arabidopsis thaliana
tatataaggcgactggtggctgtagttagccgtcgacctactagtgcgaactattctatagtaggaagactgggtctaccctcgagggagcccggcggccttgattactgtgggtggcggagcctactacggtcg

SEQ ID NO: 188268 - DNA, 539 bp, Arabidopsis thaliana
accctaccctgtagagctgggaacctctatagaggggcgcgctctttttttttttttttattagtgcgaagcaaaccatcagttaagaaggcgggggcttgagtttcggggactgaaccggggaaataccttttcaccatttcatataataacagcatcatctaaaatcgtttatctggacctgctttagtcatacagctcggagggctagaatcttatctctcggaacttctagatggatagtcagtactgagttagactgtcctcattggatcaagcccatagcagcagataaagagggatccttggtaatagatgtggactacctgcataaacaagttggtctatatttaacaaagtctgggacaggtacatgcataagcataatattatttgcaagtttttaaggttccgcagaagcgtagtatatctttatattttgtccaagataaggtgcacctgaagacttggttcacgtttgggcccagagctatactcaaaaaatgaagtatgttttggaacaaacaggcgaatgatat

SEQ ID NO: 188269 - DNA, 249 bp, Arabidopsis thaliana
aggaggaaagcaaggacacagccaggcagagaacacggggccaggaaaacaccgggagcgaccacacgcgggccaggggaagcagagacagagaacgggaacccgaactgcggagcgaggaaacgacaacagggcacaagcaaagaaggacgaaagaacgcgaagggcaccggcacacacaaaagaccaaagagccagagaagaaacgaacgccaggaacgagaaaccaaggacgacagcgcaaaagaa

SEQ ID NO: 188270 - DNA, 565 bp, Arabidopsis thaliana
gacaaaggaaaaaaaaatttgcagtgtctctgttgctctaaactcctttttaaggaaagcagcaacgcgcgcggtcccaaagaatatctggggggacacatcgtccgcgcccccaaaacatggatggagtgagacatgatgtatacaacaacacctactacggaccgacaagaaggctttacgagatcacctccacaaccacgaggcagtgagtccgaagcagcgagacctgctagaatgcatatgtttaaaaaacattgtaaaaaacaggtccgaatgactagccagagtcacagatcagtccattcgagaaaaaaggacgtggcggaagaacaaaatgaacaccaaggaagtaggacaccgcgtcaaagccagggaacacacaaaaacagtaaacgatatactacacacagcccaaaacgaacgcaatgagggacagaacactaacagtatcacagctggtactgttgtcaaaagctaaaagaagtgaagttcacaggctaaagcatggggagagcacacccacaaaggatccaaagacaaacagatcgaaatgaacagaagt

SEQ ID NO: 188271 - DNA, 462 bp, Arabidopsis thaliana
ggaagccgggccacccccgcagaccaccggacccaggaaacccccggggagaaacccagccgggcgcggggcagacgagcagacggagcccagccaagcacacagagcgaagagcacacccacacgcgaggcggaccaacggcccgacaaacgcaccggcagcacggaacaaaacaacaaaaagccaagccccgccaaacgacgcaacaaaacccagcagaaaagacggaacgaaagagagaacaagcaacgcagggagcgcaaaaagcacggaacagggggaggcagaacgcaggagagacacggcccgacaccaccaaagcgcaggcaagaggcaggacagagacgcgagccaacgggccccggcaccacgaagcagcagagagcagaagccggaccgccacgggcaccacaacggggagcacggggacagggcaggacccacacaggcagaacacaggg

SEQ ID NO: 188272 - DNA, 296 bp, Arabidopsis thaliana
ttcctcctctctcccgcgtcgtccgctcgccaagctgcgcacgagcgcacccgatcctttttttttggggggggggggccgtgctctcctggtcggcagtctttcgttcgcaataatctcgcgtaccaccttgttccgggttgcaggaggtgctcgatcgcgggctactctgcgttccctccgtgtctacctgccctcctccgcgcccgccgcctccgcgcgcgccgcgcggtggccctgggcgtccgcgtccggacgcctattgattctcttttcaaggctactacgctccgcgt

SEQ ID NO: 188273 - DNA, 456 bp, Arabidopsis thaliana
caccccccccacccccgggcacgccccacccacccctccgagccaggacaagacgcacacgaacaccaccattcaccgcacgagaaacccacccccccccccacttcaacagcgaacaacccccccccccacgcccgacccgccccgtcaccggcccagactccccacacactttccccacacccccccgggcggggaacgagcgccccccaaaaaaaacaacaacgacacccgcccacaaacaacaccaccaccttatcagaaacaccgccatgacacacgagcagcgccaacaccgcccgcccccccccgcgcgatctagacgcaacaagcactcacacacccaccccacaagaaaccgagaaacaaacacacacaaccacggacacaagacagacgaggcacccagttttttctgacaaaccaaggaggggggccccacagctcaaaacccac

SEQ ID NO: 188274 - DNA, 402 bp, Arabidopsis thaliana
ccaaaacaaaactcttaagatgcaagcgcacctatcgcagcagctatgatctagaatggccgccctctgtgagcttggatcctctaaaagcgggacggccctggtacaaagttttttttacagtgagcaaaaacatataatctcatctcctgagaagagaagggaataaaagtaaaccacatcgcaccagccccttaaagggccaatatcaccttctgaaagggcataaagatactgtaagcaacaacaaatatggtcgagatagtcagcgggggccacatgaaactaacgcataggatctaacgctggaagaaatgccccatgaagagcaaaatttcttttccgacaccccaggaaggaagacacgcacccccggacaaaaaaaagaccacaacacccccc

SEQ ID NO: 188275 - DNA, 230 bp, Arabidopsis thaliana
tattaatcttctgaagtcttgtactaagttattgtgaagctatttagtgagttaactgaatcatcatttttttgaaacgggggggagtaccctaatatacccgccttactcaacgaatgcgttgaatacaataaaataattgataggagcgtgtatcagagaactgtctgtagcagctattctggacgtggtactccaggctcctgttctcgagaccatcttcttatcca

SEQ ID NO: 188276 - DNA, 564 bp, Arabidopsis thaliana
ccccacccaatcaaaactctgaatctcctaaagagccttcccccttgggtctgtggaccctacaaaacacaagcaatcatcactgtggtaaggacgagctttgcttacaccgatcaatcaagaaataaggccttaacagcctcccatctgcaaactgaacaccccaatacattaaattggccctctgtcgccagcaccccggaacttttatagcaggggaccaaacactatacaagtaaaaaagctactgccaagaaccaagactactgaagctcaccctaccacctagaaaagagaatcaactcataaacaccgtccaccccaacaaaatgcggataacacccaagaccaccttgcaccgattgggccaaacccacacttcatacaacatcttatagggacacaggactcatcacaacttgctttttgctaacaaaacatttgatgttacaattaaaatcacaatagcatctctcgcccactcatccgacgaagtcctcaccctcactccatatcactatggggcagagctacagaattaagcaaactcagctcaaaaaaaat

SEQ ID NO: 188277 - DNA, 672 bp, Arabidopsis thaliana columbia
  unsure (1)..(672): unsure at all n locations
cgcccccccccgcagcacgcccaacccccccccccccccacgcccccccccccacccccccaccccgccacagcaaaaaccctccttccttgtacaacgggcgccccccctctcccggggcgccagcccccccccccccccgcacgagccacggacacccgcgccgactcttcccnccnccgagcgcgaccggccnccacaaaacaaacaccccgcagggggccgccccccgcccccgccccaacggcgacccccgcccccaccgcccgccccgcccccccgccaccaccccccacacgccagagcaccccgcgccgcccgccgcccacccccggcccacccggcaccgcacgcccgccgacaccccgcgcgccacgcgccccccaccccacgacagattttttttttacaccacggggggggtgcacgcacccccccgcccccgcacggagccgccgcccacaaaaacaaccagcccccacacgcccgcccaccgccgccccgcgacccccgctccacccgccaccacaccgccccacccccggccaccacccccccccccgacccccaccccccgcccccacccacacgagccagcgccgccaccgaccccccgaccccccccccccccccccgggcccagcgaccgccccgccccccccacgccccccc

SEQ ID NO: 188278 - DNA, 556 bp, Arabidopsis thaliana columbia
cgcgcaactctgcaaccgccggacacaggcaggacctttttgtaaagggccgcacgctttgtacactcagacccgttctgatttactcgaaacgctcagtctctttttactttgggggatgttgtttaaactatgctgactgtccaatggatctaatgggcgtgttaccgtcacctcgatatgtgacgggcgcggaacgcactctacgtaggctggcggaagggtgggcttatacttgcggtcaggactgattttttttagagggggggaatccgtcgcacggtgctggcttgtctctgttggttgttcgctttgtggtctttgtttattagtatatataattacataacttttttctacgagatggtattcaatgaatgctgttagtcgtaggctctttcgcgatcgttgctacttgagaagtcccgcaaaactactctgatttacggtggttctgttcctcctcgactgatgcccacttcacatacagttcgtgacaaggtgtgcgtctcttggctgtctgggcctgtgaatcaattttttagttatccttgtg

SEQ ID NO: 188279 - DNA, 375 bp, Arabidopsis thaliana
ggcagcccccccaacgggtgccaagaggttcccggggggggaccaaaagggaccccccatgaccgaaccataagacacccccgagcaaaggacccagtgaaaaaacccacacggggctaaagagagggcataaccacacaccttccccggcggaacccccagcgaaagcccagaacgcccctcccccccgggtccgccccccccaaaagcccggacctcccgcggctcccccggggccgcagcatcccgcaggcggcccccccccgccccgcgggagataggcgggataggccagaccacctgcagactgcagggcaggaggagccgaccgtaccgcatgacgcggcaaaccccggcggggcgagaggacgaggg

SEQ ID NO: 188280 - DNA, 408 bp, Arabidopsis thaliana
  unsure (1)..(408): unsure at all n locations
agaaccaaaaagccacacacgcccccgcaccgaccccaccgcacagccaccccaacaacagcccacacaccccaccagagacacgagaccaaacctcctcctcgtagaaaaaccaccccaccccccgcaccttcacgaccaaacgacgacaacgcacacccctcaaccaaccagagcagcgacgcagaccccaacagagaccttcttaaaaccaccccgggagggcaaccgncaacacaccaaaacaacaaaaaagcaacagcagcaccgcacacccgccacacaccagacgacaccacaaccaaccccgcacaaccagcgaccaaccagcgccccacccccgccaccgagacgcccacagacccaccccccccacgcaacaccaccaaccccgaccaccccaccccc

SEQ ID NO: 188281 - DNA, 575 bp, Arabidopsis thaliana
aaggcggcagccgcccgccttcaggagctgggatcctaaagagggggcgccctttttgttttttttttataggttctgggtacttctgggcaggcggcgaatcctttactttttctctctgaatccgagcgtaaacattctgtgagacaaaattttcttcttacacttgatccatagaacaagagagttttgtattctcgaatccaaaaattttatctccggtggtaagtggcggctcacttttggtgggctttattaagggggtagactctcgtgcttggaaacaccgccctctgacgattgtaatagcttccttctgtctgggagaaggggccccccacaccttggtatcaaaggcctttcacggggattagttgtatatttaataacaaaatctccgactgtgaggaaaagaggcctaggtgatttatgccaactcctggtttctatatggtatccgttcgtggttctttggagtggggcttcttcctgtcgggctacttattatactcattgcatcagcgtgtagaacacgtctgctaggattcaacacagcgtacgttatttctcccttt

SEQ ID NO: 188282 - DNA, 550 bp, Arabidopsis thaliana
acacttcacttttaggaaaagctgcaacgcttgcaggcacccgtccggaatccccggttcgacccacccgtccgctcttgctccaaatttcatctctgcgccgcttttcctccttcgccatagtaattccccggaataattatctacctatgcatctcccaacacctcccgtaaacaatgccctatcttcccgcccttaccctctcaattcctcgtcgcgacctgcgattccttccctctaatttttcaccacacatggtagactaatcaaacctctccgagagttattcctagctggtatcggtcctgttccctctcccgtattcaatttaccggatctttcccttaccacaccaactaatctgactcacggacctattcacctgccccctttgaatacccctccgttctccaacagacccccataccttctgtcttactctattcagacggccctcctcgccgtggtggaccccttttcacctttcaccttcttgagcatcgcctcccgcgcggcacctttatccagctttccttatttacatatggt

SEQ ID NO: 188283 - DNA, 497 bp, Arabidopsis thaliana
accgtcgcatgccacccgctcgtaagcttggatcctctaaagcgggcgccccttttttttttttttttataaaaagaagtttatttggatttgaccccaagggttctttatctgggaaaataaaaagttcttttgtgaaaaagggaacaaaaaaaaaaacttcaaaaccttaactcctacccctccaattttacaaaacccaaccccccaaaagaaacctggtgacaacccttacccgggggaacggaaaataaccaatttttttctcccccgccttcattaggctaggccgcctttaatcccacttaaaaacccacgcctccccgtcccttagccccctacctgcaataaacccccccggaaacacttgaacccctcacgtcccaaaaaaaacaattcgacaaccccggttgcccaaaaagaatccaccagttcctcggaggaaggaaaaacccccacaactcccattggagatccccccgaaagctcttccatat

SEQ ID NO: 188284 - DNA, 318 bp, Arabidopsis thaliana
cgactcacctatggaggaaagctgggcccccggagggccaggacagaaatccgggagcagcccacgcgtgcgcgactcatcatggtctatgcatttcatacttagagtagttattgttactggctagtgggcggaataaaggatgggggcccacgattacgcgggccgtacactttcagtgttacgatgtgctgcgacgacgacgcataagggtgggtgataggacattaagggaatagatccacgggtacaaatatacgctactcgacagaatggaggagaataatggggccgtacacttggtatgagcagtgaggt

SEQ ID NO: 188285 - DNA, 384 bp, Arabidopsis thaliana
cagtggagggcggctcgctctgtacacaaactaacttctcgttgttatgactgtgactacgcctaatgtacgtctacgtgcgatgctactcattcagcgagtggacgacttgactgtcgtgacctactgtctggttgcttcactgacgccactgttttagtccgctagatgcccttagtgaaaccccgccacatgatccacctccttctttttacggcgggtggctttccgcgttcggagtgcgctcgctcattcaagtataatagtcgacccggattccaacgcgatcggcgataggcgatcggcggactgacgcttaccacactccagccactctcgaatatacgacgcgaggcgctgcgtcaccccaatacgcaccgctgc

SEQ ID NO: 188286 - DNA, 503 bp, Arabidopsis thaliana
gccccctttttttttttttttttataaaccatggttcttaattacagttttgttggctgacctattcaagcaacaacaagaacgtttttattgggctgaaaaacacttcaaccactccaccggtccgttagcaggcctaggcgctgaggatctctaaataacacgactttaagagggggggggcaaaccccccccctcgccaaagcgagtacatggaataccaagagtatcactcctatatatatctgagtcaataataggtgtttcttcacttttagggattcctacaagccgttaacgcccgtggtccggtgcctaaacaccccctcactcggagtattcctcatccctcccttggggcgtaccgcacacctcggcgtgcgtgagatggcttcaccacacccatatcccacctgagtgtgctttcgcgtaccgccagagacacaacggcggtcggtgctctatcgctccttgtggaacacttgcgtctctcgacccatgta

SEQ ID NO: 188287 - DNA, 291 bp, Arabidopsis thaliana
  unsure (1)..(291): unsure at all n locations
tttagaaaaccggggggggagggggcgacacaaaaaaaaaaccacacaccnaccccccacaaggggacaaacacaggcgagagcgagagacacccaccaccgacgaccgcaaacgaggaancacacccgccgcggcaagagcgacgccgcgcgggcagcggaagcgaggggcgcagcacgcccgcgcagaaagagccgggggcgcggnagattttctctacacacggggggtgggaggtaaaacgccaccagaaaaaacaaccgccagaaaaaaaaaacaaaaaaaaacca

SEQ ID NO: 188288 - DNA, 642 bp, Arabidopsis thaliana
aaaaaacaaaaaaagaaacccttcttttctaaaaaccccccccctcttttaggaaagcaaacccccccccgtcctactaccacacctcctttcccccctctttaaccctgcgggggggcaggctccccaaaaaaaaaaaacacaccctgttctgtacttcttcagacaactactacgcttcctctatattctcgccgttccacccactcacactctatcatcctttcttggtctatcacacgccctcaccccctctctactcaactctcgcacccgcgcacaccgcctcctaatcctttttttttttggcagggggcgatctctcatctttctccttgctacaacacaaaataaaacactcccctcctccttcatacctccctcactttctctcctctctcactcaccctccacacactctgtcttctctccccttattacaatcgctaccacctcctctcctctcttcaccctctcccccctctctctccttctctccactccctccatcacccatcctctaactttcgctcgcatctcaccctcccctcctacctacatacacatgctccattctcctatcactctattctttcctaatctatatcttacatattcccacccttctccctacccccctcc

SEQ ID NO: 188289 - DNA, 521 bp, Arabidopsis thaliana
ctctacccacaaaaaaaaaaaaacctattaaaagccccccgtttcgacaacaacccccccccttctcaaccaacttacattttttcggagagaagggttaaaaaaaaatttttttctctttccttttttcctcctttcttttttcttccttactctttcccaacacaatctcgcttctctatatttcttatctccatatcttttcatcttatttttataaaccttttttttttgaggggggtctctttccttggcgctcaaaaaaaaaattctaactttccctcccattctccccaattccttcccctcctcaccccatccactccccccatttttatttttcctttccttgccttcctcatacatctatctttcatcgcttcatctataaatctacctccatctcactcccacctctccactacatctcccaacatctacccaaccatatcttcttcaatcactctcacctcccttaaatcttctcccctctcatccacctttatcgcttctattctcca

SEQ ID NO: 188290 - DNA, 274 bp, Arabidopsis thaliana
ttgtgtgggaggtgtcacgaaggctgggttgctcttggggtccttataaaaaatcttagatttcagtgcacgcttacaagagggtgtatcctctagagcgcgccccctttaaaacttgggaccccaagggaggggcgccttttttgtgtttttgtagcacacggaacgcacattttttccggaggaggcctacacactcccggctgtaaaagaaattttccccttcacgctactcgttatagtcgcgagaagggcggcttcaacaccactcgct

SEQ ID NO: 188291 - DNA, 454 bp, Arabidopsis thaliana
agacttgtatgaccatgcctcgcctcctaggctaggaatccttatagcgggcggcctttcttttttttttttttgacgaggctggggtcttgttaagactgcggcggtatccttttagaatatctaggcacccatagcgtacagtaggactgaagacatgacacatcttactatctcaagagagccatagacgccctggtgcatggtatatgtaagatctctacctcgtggctaatcattgcagggagacaccgctccgaggggagtagagccatgggaattacaattgctacaaagcctgagctcatcagagtcctcagaagtcaaaagaggacatagactgcaatgtcttgtgaaataaatttccctccttcgtcaataggctgttcacaacgactccgccggtcgtgtattatgtgtagcaccacagcgagaatgataatgagcgctctga

SEQ ID NO: 188292 - DNA, 480 bp, Arabidopsis thaliana
  unsure (1)..(480): unsure at all n locations
aaacctccctcccccctttcaggtaaccccctcccccgaattcccccttttcaacccccccggtacccgggggaccccataaccaaccaccccttcctttttntccccccctctctctttccctttcctaaacccaaaaacctttttttaaatcctcccaaaaatttataggccacaaccccacaagataaaaaatccctaaccttaaaaaaaatttcctnaaaaaataattaaatttcccaatttttttccccaaggtcctcccaaaaaagtttccccgctaaaaaatttacaataactcccctccccttttatttccaattgggatcccaactcccccctgaaaaccctccaaccccccccccccccctttttttnnttcacttaaaatttcttttccccccctccccccgttttaattgttatttttcattctcccccccctacacaaaaatcttcaattgcccccttaaaacctaa

SEQ ID NO: 188293 - DNA, 522 bp, Arabidopsis thaliana
ccgacccttattattagttgctcgcaccccgcacaagatttttgagcgcataagcacagggccccttccccaacaggggaaggggggaaagaggtagtacccgaggccctttgtggaggatacccgcccacggcgtccggttgtagataattaaatcaacaggcgcagaaagaccaccccccaacaaatgaaagaattgatacgagatgtgacacctgcacttcgaaaaaaaaggatagtattaacacacaccccggcaaaagacctgctgtgagctatgacatgtcctcccgccagcccgctatcatatatcaatagagagaccatgttcccgcatactaaaggaggaccctctcccatgctgaggcgcaaatcctttgaacagggcacagagtcataacacttcttgactgccgttggcatggaatgagatggggtcgagtacacagcgtccccaggcagtgtgtatgcaacggactgcttactactatttctcaaactaacgatgcacgcatatcttga

SEQ ID NO: 188294 - DNA, 491 bp, Arabidopsis thaliana
cggcctccccctctccttgtctagttctttcgcaagacacaccactgcaccattaggagaagcggaaaggattgctacacgtatctaatgcctcaagccaacttccccctcagaagggaaagtcattacacataaacgcacctgaatcttaggagtcaagtcgacaaacaagacccggaactttactcggacgcgaaacgaacaatttcacagacgttatacacctccaaggcagcccaaaccagcgcgcgtgccgcctcctagtctcaccaaaccaaaggaactctccgatcgcggccttcttaaatgtattactacacaacacctatacacacctaacaatttaaagccccagtccaagtacagcaaacgtgatatcgacatacccactatatcaacctacaatcatccgtagcgcacaccagcctcccacaacctccaagagggatctgtgcacatcctaatagcagcactataagtataaatttgac

SEQ ID NO: 188295 - DNA, 519 bp, Arabidopsis thaliana
atttactcggaatcgctctgaagggaccttccaacactaacagacaatatgtgtgctttggtgataaaatctgaaataccgccaccagaaaaaaatatggtcagcgttggcaaaaaaagttccgatccttcttaagggtattttattgcgcctaaatcaaaacgtgggtttgaagaagaattttattccaagcccaactctagtgaagggcccggtgtgaaaaaaattgaactccccgaccatggggtcccctgcttgagtaaggtaacaagttaaagggttcggttccccagaattttttgggccttttgccatggccgagatataaaatcgatcatgggccccctatcttcaaggtagggaacaaagggctcctttttattataaagggtacaaaacggctgtttgggattcgaattggagtccgtaaccagattgttcttgtgttttgaagacctagggaaagggggggggacacctgtgggggggccctggggttatatgagacggcgcttaagg

SEQ ID NO: 188296 - DNA, 630 bp, Arabidopsis thaliana columbia
  unsure (1)..(630): unsure at all n locations
ccccccccccaaaatctaccacaaaccacactctctaccccccccccaccttcccccccctccccccccctctcccctccttccctctctctctttctttcgcgttttttctttaacaaaattttcttttctctctttttctctcttcgttcctcctccgctctctcctcctctcctcctccttctcctctcctttctcccctctttctttccttctttttttccctccttcctctctcctcctcccccctcacctttctcttccttcttcctccgcgcgcgcgtntctttcctcttcccgtctctctctataaaaaaactttngttttcttcctttcttctcctccttcttcctctcctccttttctcccccgctccttctctccttacctctcctctccttccctccctcccccttcctctcccccccctcctcctcccccctcatctttcattcttcttttcttctcttctctctctcctttatcttcctctctctcctcctctctcccctctttccccctatcttcctcccctccctcccccctcccccttcctctccctcctctctcctctcccctccctctctctctctccccctcatcttcccccctcctcctctccccctct

SEQ ID NO: 188297 - DNA, 382 bp, Arabidopsis thaliana
agctatgacgtcgcatgcacgcttgcgttaggctgggatcctttagagcggccgccctttcttattttttttagtgtcctatataaattctagtgagaagagaatgagtctggttcgagagctaggtgaggtcacagtcactctcggttgctcgcggggaacagaccccggagttactcccacgcctgctgtgcccttcgcgaatagggattggcttatgttcgaggctttcagcgggggagaggttgcgatacgttctcccacgattaatatatattcacaccatataggagtagatgtttaagtggaggcccatccactacacactatctattgctcagcatggcgcccgcgtctaactacttctttgtatttcgggagg

SEQ ID NO: 188298 - DNA, 524 bp, Arabidopsis thaliana
atctaagagatatgaggttcgatttttaggagcctctatgaggacattgtaactgcatgccacttctacgcgagacttctatgcctctcgagagcccccccccttatcccttggactccaatggagggggcgctctttatttttcaatcgtatgggaccacgtcggcttgcacacgacgcaacacgagctccaaggcatcctataaagatcccctagctgctaaaatgtatacgctaagttggggggctcactccgaaaattgtgatgtgctagaacacaatccctcccaagtgatagagcggatcctgccagcccctcatcgaataaacaaggacggtccatttgttccgtaaacattatatctagtatgtagatatctcaccagctgctctcagcgcaaatatctttctccttcttagcccccatgcggtgtcacacatgtacgtgaatgaaatgcgacagagctggctttacttacgttaattctattccgcaagttactacttaagctcataacctccca

SEQ ID NO: 188299 - DNA, 376 bp, Arabidopsis thaliana
gcagaaccacactttaggggaaaggcggggaacggcccggcagggcgcccgggaacgggaaaaaccccgagaccgaacccacagcagcggcggaacacaaaaacgccaagaagagcgaacacagccgaccaacaggagagcgcgggcccacagcagggcagaagcacaaggggacgagaggcgcccgcgaagcagcgcatccaggaggaagagcaaaaaaggaacgcggaaaacgagagaagaaagaagacgcctaccaccggccgaaaggcgcaacagaaggggggagaggaaataccagaccaacgggaggggagagccgaggccaggaggcaccaggagcagcagaagagaccggaaccaccaaagagcggga

SEQ ID NO: 188300 - DNA, 257 bp, Arabidopsis thaliana
agcgctatgactgtgcctgcgcacgccctcgagggcttggacctctatagagggggccccctttatagcattggtactctgagcgagggagctctttgatagcgcacgggttctattagcgttatctccggcagggcggaaaaccgagccgtgtggacaagagagtatcgtttctcgcccggattgcaaacagcaggggagtgctgttctcctttctccagacggttaccttctctccagagtcagaactcagactg

SEQ ID NO: 188301 - DNA, 167 bp, Arabidopsis thaliana
cgagcgaagattgaacgaactctgagaaagaatcagcgatacagagctgcgactttgtttctacaggggggtcaaggccaagtacaaaaaaaacatcacacgtctcaaccatacgtactagtagaagagcagagacgtgacacacgtgaattcgacagcactacaga

SEQ ID NO: 188302 - DNA, 320 bp, Arabidopsis thaliana
ggcaccgcccgagtgacctaagcgccccttgttgtttagaaaaccagaatcccagtaagcaattaaacagaacgtacggaaaaagggactccaaaaacccacccgagtcaaggcccgcaccgcgttgaggggacccgcaggggaggcgagggcagcagcccgacaacagcgaggacagaacacgaaacagagggccaccgcgcagaagcaaaacaagaacttaccccgaaaaaagcataaaaccacaagccaagggaacgggacccaaaaaagaaaaagaataacaaacagcgaaagaaaaaaaagaagaccaaagaaca

SEQ ID NO: 188303 - DNA, 218 bp, Arabidopsis thaliana
gggggaaaggcgggaacccccctgcagggaaccagggaccgtgaattcccagggtccgacccaacgccgaccggagtaagaaaagtcgtaaaacgtcgcaaagagaccgtcgaagtaggggagaatccagtaaatcgcctaggggaaagattcaagcgagggaagaagaccccctaggggtatcaaggagggcgtgggcatgtaagtgaccagaccac

SEQ ID NO: 188304 - DNA, 282 bp, Arabidopsis thaliana
gtatctatgaaaatagctatggacgaggcatgcacacatatataagctactatgcagtggagctgccgccctttatttgctttggtttgttatagaagcggacatgggatattcagaaaccaagtcataggtcgagcgatggactgctctgtggaagaaagagtgacgtaaccatctccactgcggcgacttacagagctgctagttcagctctctagagcagctggtgcgaagactatattatagagttagcgctaccggacgcacgggaacattgtattg

SEQ ID NO: 188305 - DNA, 109 bp, Arabidopsis thaliana
gtaagtataacgtcttagtgtgacgagataactgtcaaaattgtgttctaatctttaagtcttcttccatattggtagcatagggttgttctgcgtctctcgtatccgt

SEQ ID NO: 188306 - DNA, 476 bp, Arabidopsis thaliana
  unsure (1)..(476): unsure at all n locations
tctttgagcgtaacaaaaaaatgtctgtgcacgagtcttagtcttggtgcaccgggtcgcctcagagtgaggcgacttgcgcgtgcggcgataccgagtagtcgcggtaacgtcggcgcgctctacctctcctttacttcatatgcctgagcgcgccgaagtttgtgcgctttaatcgccgtgactttttttttttttgggggggagaggcgctcctctattagagttgagggtcaangacatacttgtggaccaacatctttctgacgtccgtattctcttctcctcgctacgtactttacttgctctttgctacgtcttactctctgtgacttctctccgagactgcgtggaggcggcctcccgtttcctattctaggcgtatctctgatcggcgcacattcagggtaacccggccgtctgtggactcggcatagcacggcaacgtggtagtgatgccagcgaccgcactgtcc

SEQ ID NO: 188307 - DNA, 539 bp, Arabidopsis thaliana
acgtggcatgcacgcgcccgtaagctgggatcctctacagcggcctccctctttttttttgtgtttttatactgcccgaggtctctaacaatgggggccgagagccgaatccgaaatgggcatcagcctgcacgacatcaatgccaaaagaacgaagatgacgtccatcccatggagtggagagaacacagagtcttggaacgtgagcacacctcttttttggagggggggcgaggactatgacagggggggtggacgtgagagccccccgccctccacaacactgctgaaatcttcaggcagtggaaatcacatcgcacaaagcaggagcgtgctcccccctcaagatgagctttcggaggggagtttttgtaaattcggttacgccccccgactagctaaggccctggatccagagcggtccgccccgcttgagctggccagtgtgaccatgggttgtcgcgctcacagccggaattcggcaaccttccgtataggtcgcttcagtattatatattgcggctccccatgcccccccg

SEQ ID NO: 188308 - DNA, 165 bp, Arabidopsis thaliana
tagggtttgagggacgagggaacgccatatcttactgcactagagtggttgccactggcgtctcgctcatattacagctttcgtttgcatcagagattatgttaggtagattaatagtctgctttatggattgaggatattgtcagggaaatatgcatgttggag

SEQ ID NO: 188309 - DNA, 431 bp, Arabidopsis thaliana
gatatcactgtacgttgcctgccacctaggctaggtatcccttatagcagagcggcctttctttcttttttttaatggagcctaggaattaaatagacagcattagttcctcgtttaaataatagtactcacaaaatggacatcatggctttagaaaaaagcaattccaactacagaaaggatgtttgtcatccaccatagtcattgtcagagtggcatcacagaatgataagttacctaacgtcaagactacttttcagaagtggttggaggagatgtaggaaaccacaacccaataaaccctgagcctaaaaccaaccacacgaataggcgtaaagaagatcatgcgagcgaggccgacattagagaaatctcattcctatacgacaatgtgatataatctagaaatcacatcgattttgtcagactga

SEQ ID NO: 188310 - DNA, 206 bp, Arabidopsis thaliana
atgctgactaggatcgctagtaagtttcgaactatgagagcaagacttggtaccctctggctgccgcctgcgtcctggtatctacagaatctacgcaccgagttcagcaacacacgcagagtacatacatagaaacctgtgggagataccataatttatataagctagctcagggcaagcctatcagagtgaggatgcagaccgct

SEQ ID NO: 188311 - DNA, 120 bp, Arabidopsis thaliana
acgttgcacccagagaacaataggatgtatctatacagcctcgtaccttcccacacaaaccactatctcatctcataccctcatcaagatctataagtctctcatagttaacgaagcacg

SEQ ID NO: 188312 - DNA, 529 bp, Arabidopsis thaliana
gggatatgttttgtgtgtttggttgacgtggaggtgggttgtcgacgcccagctctcattccgcttccttattatgagtgagtctgatttctcccttgccgttcccttgcatagatttgtcccgaatattccccctgctgcgcggatgtaagaggagttttttcattccagtctgtagccgttcgtaatgagtctaaggtatggcttcggagtcgagttgtatgtggatcgcatagcgtttgggctagggacatccggttgcccttagtgtgtctcgtttgcgattcgttacagtgttctattcaggaacgtatagtgttgggtcattctctttaatttgagtaggtcattgccgttgtattagagttgtctggctttccggcagtatgggcgggcctggtcgggaacactgggcttttcgcgcagtgatatagagaagtgcggaggctgtgccctgtgtcccccttctggggtgggtgccatggggtacaccttcgccatacggtttaccttaccaggttatccgtcc

SEQ ID NO: 188313 - DNA, 108 bp, Arabidopsis thaliana
taaagaaatattaatactaatctatcaactacaaaaatcgtagctgacgacctgacacgatggtcccaccattctctacctcgttcaatccttcaatttccaatagac

SEQ ID NO: 188314 - DNA, 145 bp, Arabidopsis thaliana
tccagaagtcataaacggcgacatggggagaagactgagatagaaggactagcgagggtagtcgatagccaaatcaccacaaaagaggggaaaggcgtggagaaccaccctaggcagaggcaggctagagaaccatgaagattcc

SEQ ID NO: 188315 - DNA, 251 bp, Arabidopsis thaliana
tcttgagtttcttttcccgtagaagctttgaactggccagagagattcatagtaagtgagcattggtgaatgggtgtaacacttgggtaagataggtccccatgtgaattccgtggcgctgtaatctattaaaattcagtttattagtgaggtgagtattcttctaagtaattaggcttggattatatagcaatatagaatacatagcgggaagcatgagtggacatcgaataagaaccgaaactcaaaag

SEQ ID NO: 188316 - DNA, 585 bp, Arabidopsis thaliana
  unsure (1)..(585): unsure at all n locations
ggggggggggggggggggaaaataccttgttcacatatcaatcccccccaaattaaangggaaaaccccgcccccctcccagtaccccctcccccaatttcccccttttnccccccacccgctttacggcccccccccaataaaaaaatcctttccccttccctaaaaaaaccaaacaagttttcaaaaaccctttccttgttccctttcccaagggccctcaaaagcccaaanntttttttcacaatttttacccctcccacaaaattggtttttatttccccttctccaaaaaaattcctcccccacggcaataatattttttaattttgggggccgcccgcccttaaaccctctttttggatattttcccnccctccttccaaaacacttaaaatatctttcccccccancccctcttcttctctttcttatataaaacatttcccccaaatcttccctctttttttcaaaaaaaaacaaaccctcaaggtcaccccccctttttttttcttaaaaaaaaaacctctcccctaacctcccccctctcaaaaaattcttttctccccacacccttttttcttc

SEQ ID NO: 188317 - DNA, 364 bp, Arabidopsis thaliana
ttgggccgggtggggcccaaccggcgggcgcaaacattttcccccttccccattaatttttcccccctccggccttttattccctgggaaatttaaattattggggggagcccctacaacaaaatgggcccgcttttttctctactttgagaatatattctttattaccccgccttattgggcgccaccgcaaaagaaaaaaacctccccgcgaaccgtctgtgcgcatttaattgtgcaacccctttctttttttgcaaagtggtgtttttaacaaaaaaattgggacacatcctgttgcgcctgtgccactcaacactttaatgattgtttttttattttccgggggataccgccccccttt

SEQ ID NO: 188318 - DNA, 615 bp, Arabidopsis thaliana
  unsure (1)..(615): unsure at all n locations
aggggggggctcgtgtgggggctccccccccccctttacggngcccgcccggccgcgcctggttcccctcttctctttttttntttttcttctcgcggctctgggggttttcacctatttttcttgtnggtgttggcgggctgtcctctgcccgccgcccgccggnnncgtcccccgccgcttctccctcctcttntcgcccccccccccccccncccgccgtgtcccgttggccctgctcctttccgcttctctcctccgctttcggggtttctttttttgggggggggggttttttttttttgggggggttctctcaccaaacatctgggcggcgtcgtggctcccctctcttgctcctcttctcctcgccctctttcttttccgcggcttccgcgtccggtgcgtgcctcggtttgtttttccccctccgcttgcgcgctcttcccttccgtttctccctcctcttgggggtgctgttctctctccctcgtctgccttctttctctctctccgcctgtgggttctcctcgcgccttcgcctcgttgcttctccgggcctcgctctcgtttccgccttctgccgctggcggctctctcccgtggctgccccgc

SEQ ID NO: 188319 - DNA, 574 bp, Arabidopsis thaliana
ggggggtggggggcgtctttaaaaacaaaagtcgccacgcggcccgtgcgatcccgtgtgcgagtgctgtcgtgcggtcgcaccgcgctgaccttcgccgcctctcgcgccccttcgcacccagcgccgccctcctgctggcaccatcactcaccccgtccccccctgcgcccgggctcgggccttcttctttcttcgcggggggggggcgactacttgccggcggttctggcgcgctacacaacactctcttgttatccctgggcgcggcgccctcggccccgcggcttcatgcgtcatgtcggctccgcatctgacgctcgtgccctcgccgcgtcctggagtcgccgctgccgccccgcgggtgtccgccctctcgcctctttcctcagcccctccccgctgcccctctgcctgccccctctccctattgcgcccgcgcgctcttcaccctgcctctcttgcggctgcgggcggcagctgcctcgacggcatggcgtgcgcgtcgtgtgcccggcaccgtgcccacccgccgccccgcgtcgctcgcgtcgcccgtcgtgtgcccggctgc

SEQ ID NO: 188320 - DNA, 334 bp, Arabidopsis thaliana
gccgtaataaatctatagtaaggaaaagctgtcgcctataccagatgttaggggacttagggtctgattttccgacaagctaagccactgtcgtatcgttggctgtatgcgagatagtaaatcaggaggtcggacgcaggtagagacacgacgaacgaattatagttgcttagtatgcatggataatttataggggctatgcgatcacgcggtacgagcgatattgttcatcgctgattacaaagtatagataagcatcattcgttcgagtagatgataaaagagatgatatctaacacgagatgggatcagatgttaagttgatggtggttgg

SEQ ID NO: 188321 - DNA, 321 bp, Arabidopsis thaliana
aagtaaaagtcgcatgttgtaggtatgtcttgtgatatgcgaggaaggcaaacatgcattttaaattagttgttgatccagaccaacgccgggcggactacttaatccattagtatcagtgatactgtgcctgagacgtgggatcccgctcgtcatgtgatagacggcacccgggtaagatccgtgtcagcgacaaagattcatgctgataacctttcgaggagaagtcgttgactgtgtcatcgttgtcattccttttcgcacagttctatctcatgtatagttggcgagagcggaagatcgccagcacgaaacagaggt

SEQ ID NO: 188322 - DNA, 597 bp, Arabidopsis thaliana
  unsure (1)..(597): unsure at all n locations
ccccctactatgtatcactcccttacgttactaacgccagctttatacaactcatattgggaaagctggtacccccgccggtcccggcccggaattcccgggtcaacccacccctccgcggacacgtgggttatctacccctctccttcatctttcaagtaatatataactggaatgattatcaacattatcattgcgtggccctcgcattcatgaacctgccccttgatcaccgaaaaatgctgcatgtcaaacaacaacgggttcatacgtaacttaaggaacatcgttccctggtcacactaacatctcaacaaacaccactattgagcctttacggtcccagttcccacttatatttcataccgtcctcctccctccccattcctctctccttttcggctgccccccctttttctcccttccccttntatccctccccccccatgatccacataaccattccttttccctctacaatctcaatatttaatatctcacacccctcgccattctccgcattccaccacccctccgcttcgttgcccaccactccgtcttctccccccattccctcctttcctctacacccatatt

SEQ ID NO: 188323 - DNA, 224 bp, Arabidopsis thaliana
gatactaagcttatcactactataggagctggcgcctgcagtaccggtccgattccggtgacaccgtcgcactgtatataagatagtactaggacgcatacatcttataacgtcgtaatctaccggcctggttcacgctgctgatagaagtttagcactttcataacagatatttctggttgtcacacacatgacacgatcttgattgaagaccttacagagtg

SEQ ID NO: 188324 - DNA, 534 bp, Arabidopsis thaliana
tttttctctccccgggggcttgacctcttctctcaaaaaaaactcgcccctgttcatacacctctcttgatccacctctcctttctcacacttacttttgctccatctttctatccctcttatccactcatttccccacatcctttcctctacctctcttcttcttttctcttcctcttttctcctctccatccccccaccctctcccttttttttttcttcggggtgtacccctccactccgctctccctcttcttaaaaacacttctctttattcgttctctttttctttcctatcctcccactcatcttactctcatccactccctcctttcttcttctctttctcttcttcctcccttccccacttccccttctaccctctttcctcctctccccctacccacttcctccctcctccccttttccacccgctccctctccccttcttctctcttctcattcttcccttttcatctactccttctttccttttctccctctcctcccctcctctccacttattcccacatt

SEQ ID NO: 188325 - DNA, 563 bp, Arabidopsis thaliana
  unsure (1)..(563): unsure at all n locations
ttattttctctccccccgccccgcccccccgccgcaccggtaattttttttcccccccttctcccccagacgcccgccgacagcgggacgacccgagcgatttttcttgggggggtgatgggcccacacaaaatangcgcgcggcgcccggtcacatccgccataccccgtcgacaatcctctcagtcgtttgggctctttcgttctttatgtttatgacacttgactcgtacatcccgtcggttgtctgacagatacctcttttttcgtcgggggggtgtctcttccccgtttcggcgacggttaaaaaaaactgcttccgctctcttgtttcgttctctccttgccaatcgtcttttcccgtcccgtatctattctccagtatcaccatggcgcgttgtttattgcgtatctcttgtgctctctttatcttcgcctgattgtctgggcttccgttcatattcacctctctagcgtccttttccctccatctccccgttttcccgtcggtctttcctcgggaggcccggttgaccttatgcacggctattgtcactgtatcc

SEQ ID NO: 188326 - DNA, 438 bp, Arabidopsis thaliana columbia
  unsure (1)..(438): unsure at all n locations
cccccccncccccccccnncnncccccccccccccccnnnnnccccccccccccccccccnncccccctnccccccccccccccccccccccccnccccccccccccctccccccccccccccccccccccctcctccccnngaaaatgtccccccccccccgcccggcccaaaaaaacacaaaaccccccaannnnccccccccccccctctccccccctcttncnccccccccccccctccccccccccccccccccccccccccccccctccccccccccccccctccccccccccctctctctcccccccccccccccccccccccctcccctctccccccccccctccccccccccccccccccccccccccccccttcccctcccccccccccccccccccccccccccccccccctccctcccccccccca

SEQ ID NO: 188327 - DNA, 641 bp, Arabidopsis thaliana columbia
  unsure (1)..(641): unsure at all n locations
ccccccccacccccccccccccccccacaccaccccgccaaattaatttttaaaccaagcggcccctcccccgacccaaaccccccccccacccaaaaacccccccccccccccctttcccccccggcccaaggcccccaaacaaaacncccccccccccccccccccccccaccccaccccccccaccacacccaccccccccccccccccccacccccccccccccccccccccacccccccccccccccccccccccaccccccccacaccccccccctttcccccccggggggtgcccccccccccccctccccctccctcccaaaaaaaaaacccccccgccccccccacccccccccccccccccacccccccccccccctacacccccccaccccccccccccccaacccttaccccccccccaccccccacccatccccacaacctcccccccacccctcccccacccccacacccccccccacccctcctctcaccccccccccactcacccccacccttacctccccccccccccccccccaccactgccaccccctacccccccacccccctccacccccatcccccacccacccccccacacccctccccccccccctccccccctccc

SEQ ID NO: 188328 - DNA, 541 bp, Arabidopsis thaliana
  unsure (1)..(541): unsure at all n locations
gggaaagcgcccccccccgcgccccgggccccccccgcgccccttttccccccccgctggtgagggggggccacaaaatcaaacacnanncccccgcgccgcccgccgccgcgccgccccgcgtgtcgctcccgccgcattggctcggtcgtccgccgcgggcccgtagtgggtgcctctcgcgtccgccgcctgcgcgccccccgcccgcccgccccgccggcccccggcccgcccaccccgccccctttttccccccgggggggtgcccccccctcgcgcgggcggccgctaagcgaaaaaaaccccctctcccccgtctctgcgcgccgctggctccggcgtacccccctgcggtctccaatgtgccgaccggccactggccgcctgcccgccgaacctcgtccacgccaccccgtaacgcgcactaccttccacgccgcccgccatccctactccacccccttaggcattccttgctcctgccctccctcacgcccttccccgccgcccccccctccgtctggtgctgctcgtctcg

SEQ ID NO: 188329 - DNA, 260 bp, Arabidopsis thaliana
aaccccccggggcgttggtgttatgctgctcgattctgctcatgtgtctacagaacgtacgcgcggccctacctccatacgtttatcttaccttccgtgacgatctttatgtagtgcgcatggttgcacgttaggttcatggtccgctcctcgcttgtttctacggtggggggggggccggcctttagcgtggtgtgcgttcgagcagtacaaaactacttcgccccggcacgagcagtcgggccgttgattcgcacccc

SEQ ID NO: 188330 - DNA, 711 bp, Arabidopsis thaliana columbia
  unsure (1)..(711): unsure at all n locations
cccccccccccccccnncccccccccccgcccccgcccgcccccgggatttcctctccccacccgggcgggccccgattagcggcccgggggacagccccccccccctctcaancaaccaaccccccgcccccaattttcccccccgnntgtttccggtgggccccccacccacccacccncccccccccccccccccccccccccccccnnncnnnccccccccccccccctcccctcccctcccnncccctccccccccccctccctcccccccccccccccccccccccccccccccctccccnccccccccccccccccccccngccccctttcttcnccccgctttgttttgtggcccncccccccccccggcgccccccccaccgcccacccccccacccccctcctcctccctccccttccctctcctcctcccctctccccccgccccaccccccccgcccccctcccccccccccctcccccctcccccctccccttctcccaccccccccccccgtcccccgcccccnctctcccctccccgtcccccccccccccccctccctccccctcccccccccgccccactccctcccccctccccccccccccccccgcccctctccccccctcccccccccctcccccctcccccccctccccctcccccccccctccctccccccccctccccccccccccc

SEQ ID NO: 188331 - DNA, 812 bp, Arabidopsis thaliana columbia
  unsure (1)..(812): unsure at all n locations
cccccccccccacacccacaccccccccccaccgccccccacacncccaccccaaattactgtttttaaaacaacccccccccccgtttccccccccccaaaacaccaccacccccccccccacccaccccaccccccaccccccccctcttccccccccgccaggttccacgtgtccccccacaaaacacaaacaccccccccgcccccgccccccccaccactccccccacaccccccacaccccccccccccacctcccaccccaccccccccccccacacccaccgcacaccacaccccaccccaacaccacacacccccccagaccccactccccccccccccccccccccctcaccccccacccccacccttttttctccccccgggggggggcccccccccccccaaccctccaccccctccccccccacaaaaacaacaccccctccccgccccgctcatacccaaacctaccccaccacactactcactccccctccccaccgcccccccaccccccaccaccccacccacacaccacccacccttccccgcaccccccccccacacgacccccccctctcaccccccaccacaccactacacaacaccgcccccccccccacaccccaacaccccccccccaccacacgccaccaccacattcaccaccccccgcaccctaccgcccaactcccccctaccaccaactctaccacccgccccaccccaccccccccacccccccgcccctaatcaccccctcttcccaccaacccaccacccaccccccgcacccccccccc

SEQ ID NO: 188332 - DNA, 455 bp, Arabidopsis thaliana
cccccagcggacgccgcgcgcccgctcaccgctcccgagccccggcgcgcgctcgcgccgcgcccccgcgcgccggaaccggcgccggcgcgcgcgcccgccccccaccccccccgccccccgcccgcccgcgtccggcgcaccccccctttcccccgggggggccgggcgcattgtcgcggcgcgcgagaaaaaaagggggcccccgccgcctcgcctcgcgccactcatcttgcggccccctcccgaccctcgcccgacgtgacaccccgggcagcggtcccgccgaccgtggcgccgcaccggcgaggcgcggacgtcgggagccgcgtccgtcgcctcgcgcgcccgctatgacaccacaagggagacgccgcctcgcgctcccgcgacgccctgggtcccccaggccccgagcgcgccacacgcgcggtgcagcgggtatgccgtggcga

SEQ ID NO: 188333 - DNA, 740 bp, Arabidopsis thaliana columbia
  unsure (1)..(740): unsure at all n locations
ccttctttctctctcccctccccccccccccccgcccccccccccgccgcagnttgggttttttanccccgggcntgnccgctacccgngcccncgcaccccccccccccccccccncacccancccccccccccccccctttttcccccccccttttttttttttttttccccctctttcttatcccnncccccctcccccctctccttcccctnccctcccccttctcccccccccttccccctttctttctctctnctcctttcttttctccttttttttttttttcctttctttcctttcctcttttttttcttctctctctttttcccttttttttctcncnccncccccttttttttttccncgttttttttttttccccccncccncccccttgtcccccgccccattttttattctttttcnncccncctctctnctttctttttttctcttttttttcttttcttctccctcctcctctttctctctcttctttctttttttttncctcttttttcctttctttcttttttcctttttttccttcttctccttttttctttcttttttttttcccttctcttccttttctctcctctctttttctttctttttttctttctttctctttttccttttctttttctcccttttctcccttttcctctttcttctcctctccccctcttttccccttttttctccttttttttcccttctttttcctcttttc

SEQ ID NO: 188334 - DNA, 705 bp, Arabidopsis thaliana columbia
  unsure (1)..(705): unsure at all n locations
cctttccccccccccnccccccccccccccccccccccccccccaagtcctcttttacccgcccgccccttccnccccccccaggcccccccccccccccaccaaccccccccccccctttttcccccccccgtttttcctctccccatatccaatccccccccccccccctccctttcttttctttcccccctccccccccttccttccctcttttcctttttccctctctctcccctnttccccttccttttttcttttctctttcccctttttccccccccctccctctcccccttcnncccccccccccctttttttttttcngccttgtttttttcccncccccnccctcttttccttccccctcctttatttctcccttctcttccccccctcctctttttctccccctctccttttcttctttcccctccctcttcccctctccctctcactcttcttcctctcttttctcctcccctcccccttcttttctttttctcccccctctcttctcctcttcctcctttcctcttcctctctttccctcccctcccctcctcttcccccttctccctctttctctcccctccttctctccctcttcttcttccacttttcttccatctctttttccctcttctcctttcccttcctctccctctttttctcttccccctctctccccttctttatctccct

SEQ ID NO: 188335 - DNA, 660 bp, Arabidopsis thaliana columbia
  unsure (1)..(660): unsure at all n locations
ccctcccccccccccccacccccccccccccccccccgcggggccgccaaataatttctcccacccccccccccccatctcccccccccccccccaccccccccccctccccccccccaccccccccccccccctttttcccccccccttgttcttcggccccncccacacccacatcccccccccccncccccccctctccttttcctccccccctccccccccctcccccccccctctcccttttctccttntccccccctcccccccccccccctccccccccctcccccccccttcccccccccccccccccccttccccccccccccccctttttttttcttcttgttttcccccccccccccctgtccctccccaaccctaccttaccctcctcccccccccccccctcttcctcccctccctccccccttcccccccccctcccccccctccccccctttctcccttctctccccccccccccccccctctcccctccccccccctccccccccccctcccccccccccccttcctcctcccccccccttccccccccccctctccccccctccccccctcccccccctcccccccccctctccccccccctctcccccctcccctccttcctcccctcccctccccccccct

SEQ ID NO: 188336 - DNA, 669 bp, Arabidopsis thaliana
  unsure (1)..(669): unsure at all n locations
tttttttatatccccccccccccttttttcccncacccacaccacacccccccccctcccttacccccttcccacctcctactttccaccctttttccccacgccgggggtgtttcttctctccccacatctaatacccctcccccctcactccccccaccctctctctctctactcaatcctccccccctcccaccatatatcccttctccctctcttccctctccctccctcttccctcttcctttcccttcaccctttactccgcatttccttcctcaccctcctcacctcttccctctcttttttctcgcgcgcgtgtgttccactccctcccctctcccccgcctctccttatttaaaaactcttcgcaccctcccattctcttcaatctacctatacccctctttcccaccttactatttccttcttcatttctccccctacttcccctccctctttatttcttctcctccttccactctactccctcctcttttctcctccccctcctctcctatccccccacccctctctcctacctcataccttcctccctcttactccctatcattttcccgctttatttatcattctccattccttcttccttatactcccttatttacctattttccacttcttttctcctccttctttccccctcc

SEQ ID NO: 188337 - DNA, 290 bp, Arabidopsis thaliana
ccccctccccccgaacgacccacccggcaccccccccccttcccggggggtagaggcacaaaaaaccccccccccgggggcgcccgcccgcgcccgcgggcccagcgctactccggcgctgcgcgccagcggtgccacagcggcccccgcgcgtcgcaggcgcgctttttggggggggggccccccgcccctccgacaaaaaaaaaatcgcacgcgtgttccgccgccctgcgtggcggttcgagcctggcccgtgcgccgttttcgcgggccgccccttgccgccgagt

SEQ ID NO: 188338 - DNA, 667 bp, Arabidopsis thaliana columbia
  unsure (1)..(667): unsure at all n locations
cccgcacccccacacctccccccggcgcgcccccggcgcccgcgganttggntttttaaaaccccccccctccccgcgcgaaaacagcccccccgcccccccccccccccgccccattttccccccgatgcgaacgggcccccaacacaaaaccccccccccccgcaccccccccccgccccccacaccaccccccccgcccccacccccccccagctccccaccgcgcccgcccccgccccaccaccccaccccaccgcccaccccctccacgccccccgcgcccccgccaccacccccattttttttttcccgggggggggtggccccccccactcccccccgggcgccccccccaaaaaaaacacccccgacccccccccgccggcccacaccccacgccgcccccgcccggcccccactcacctcaccagcaccgcacgccacaccgccaccccacccacgctcccccgcacccacaccccgccgcccacccgcatcacccccacccacgctcgccccggcaccccccccccgcccgcccccgccccccccccctcgccccacccgccgtctccccccccccgcggccccccgcccccccccccccgcccccgccccccccccgaccgccgccccgcccccccctccccccccgccccccccc

SEQ ID NO: 188339 - DNA, 649 bp, Arabidopsis thaliana columbia
  unsure (1)..(649): unsure at all n locations
ccccccccccccccccccccccccccccccccccccccgganatggttttccccgttctccccttccgcgnnggggcccccccccccccggcncccccttctcccctttccccccttgtccctgttctcccacccaccccccccccccccctccccccccccccccccccccccccccccccccttccccccctcccctcccccctttcccccccccccctcctccctcctctcccccccctttctcccccctcctccccctcctccccccctcccccccttttttttttccccctttgttttcccccncccccccccgcgcgccccccccctccatctccctccctcccccnccnncccccctccccctctcctcctcctcccctttcccctccctctccctccctccctccctcttcccccccctcccccccctccccccctcctcctctccccctccccttcccctttttcctcccttttctccccccctccctccctccctccccctcccccccccctcccccctctctctctcctcccctccgcctcccctcctccttcccctttcttcccccctcccccttcctcccccttttccccctcttctcccctccctccctccctcccccccccctctccccccccc

SEQ ID NO: 188340 - DNA, 644 bp, Arabidopsis thaliana columbia
  unsure (1)..(644): unsure at all n locations
ccgcccctccccccnnccgccnccggccgccccccgcgccacgacgtcacttttttcgccccccccccttccccccccnccncccccccccccgccccccnnncggccggcccctttttttcccccattgtttaagggggncctaattaaaacncnccnccnnccccccncttcttttccctcctcttntccctccccccnccctttttctccctttctctttctcctctcctttcctcctccctctttccttctcccctctccccccntttccccccccccctcctctctttctcccccggggttttttttttggttgttagtacccccnccccggggggtgggctcaaatttattaaattccntttattctcctctcctccctttcttttctcccttctccccttcctcctcccttctctctcctcccccccttttccccctcttttctccctctccctttcttctctttccccctctttttttttccccctttcctcctttcccgggctcttctctcccctctctctctccttttttcttttcttctcnctttcttccctctttttttctcttttcgctctttcttctcctctccttttcttctctccccttttgttttcctccttccccttttttcccct

SEQ ID NO: 188341 - DNA, 601 bp, Arabidopsis thaliana
  unsure (1)..(601): unsure at all n locations
cccgtctgccccctcgccccgcgggcggcgactcctttttttttccccccctttctcccccgcagggccccccccnaccccgcgaccccccctctcctttcccgcaacggtgtcgggcgccaccattcaatctcccgcctctctccttttgttttctccccctttcgccttccgcttctgttcgcgtttcgcctgtctccgtctcccctctctatggcgtcttcatgtccctcctaccccccctctcctgcgccgacggcgccccctctttttttttccggtgggggggnccctctccccccgggtccctccgtctaaaaatgtcctctttgcctgcttgcgctttccgcggctcgcttcccggttctccgctgttcgtctctgtccgggttgctccgtcttttcgcccgccccctttcgttgtcttgcccccgtgttcctctttctcccgtgtcccgcttcctgtttcgtttggtccccccgtttctttctcctcgcttttgtctctctctcttccctgtcttttctcgntttcctgtcctctttccctttccttcctgtctctgcccctttctttgccccctttcgcccgtctttctcc

SEQ ID NO: 188342 - DNA, 682 bp, Arabidopsis thaliana columbia
  unsure (1)..(682): unsure at all n locations
ccctaacccccccccccccccccccccccgcccccccccaaaaagcgaaaccttcttttttaaaaccaacaaccctcgccccccccacaaaacccccccccccgacacccagccgacaccgaccccccaccctttccccccccacggcgcacaccccccccccacaaaaannccccccccccccccccnnccccccccccccccccaccccccccccccccccccccccccccacccccgccccccccccccccccccccccccccccccgccccccccgacccccccccccccccccccccaccaccaccccccccctttctttcccccgcgcggtggccgccccncccccccccccggcgcccctcccaccaaaaaaacaacccccccccaccccccacccccccccgtccccccccccatccccaccccccttcccccccccctccccctacctccccccctccccccccctacccccccccccccccccccccccgctccccccccccccccaccccccccccccccctctcccccccccccccacccccaccccccccccctccacccccacccacacccaccccccaccaccccccccccacccccccccctccccccccccccccccccccccccaacccaccccatccccccccccccccccccctcccccccc

SEQ ID NO: 188343 - DNA, 635 bp, Arabidopsis thaliana columbia
  unsure (1)..(635): unsure at all n locations
ccctcttccccccccgtcccccccccccccccccccccccccccgcaaataatctttttcccccccccccccccttccgcccccncccccnccccccaccccggccccgcaaccncccccgggccccncttttncccccgtttgtttttctttcccctattactccccccccnctcccccttcctttcttccccttcctctcccccccctttcccttttccttcctctctctctcccctccccctttccctccccctccccctctttcccccccttctctccctcccnnccnnccccccnccttttttttttttcnctttgttttttccccccccccccccccggcgccnccccattctcactctatccctcttccccctccttccccttttttcttcctctcctctttccccttccctccctcctttctccctcttcccctctcttcccctttttcttcccctctcccttttcttcttctcccccctttttcctttcccccttcccccctccttttcctctttcccccctctccccccctcctttcctcccccctcttcctcccttttccctccctctccctcttccttccctttccttccctcctttttttcccccttccccctttccccccc

SEQ ID NO: 188344 - DNA, 354 bp, Arabidopsis thaliana
  unsure (1)..(354): unsure at all n locations
ccaccccggtccagaaacctcaaaaaatgggcttgaaaaacaaactcccttacaagctggtggttcgcgtaatcaaccccctctgcccctcaccacctttttaaatttcctttttttttgtagagggggtgtggcccccccccctccgggcctcanttcccataagagaaaaaacccaatttattgtcctcggggcgcttcctctcaaacagagatatccttttaagcggtatgggtctcttaatatacaaccaaccaaacaccacaagcttgcgccagggcttttttggtttacccccaaaaaagttatgtggttacgcggagaaaattgtgctctcctcccacaaccccaca

SEQ ID NO: 188345 - DNA, 474 bp, Arabidopsis thaliana
  unsure (1)..(474): unsure at all n locations
aaaaaggagttaacataacccttttgttttcaaaatgagggtgtttccaagtctcttattctcgattacccttatcggggtttgggggatattcctctcgccccgaaccttatggatcccaaattccccttttttttatttttgggggggggcntcccccccccctcacaaatggtgtttaaaaaaaaaatcggaagtttttcccaggggtccccaccccccccagggggcaaaaatttctttttttgtacggcctccaacccagcggggacaccacctatttataaaaatcccaatccccccctgccaccccctctcaatgtcccgtccacccctccccggggttaaaacccctttgggaaatatttcctcgcgccccgcactaacactttggcccccattattgggagaaaacccacccctttacaaaaccaccgctgggagcccaccttaataatctctttgtttttttgt

SEQ ID NO: 188346 - DNA, 372 bp, Arabidopsis thaliana
  unsure (1)..(372): unsure at all n locations
aaaaccctacttatcactcacttaggaaactctccctcagtccctcccattccgtcaccacggtcggccccaaaaatttcctccaatttacctagcatatctacatacatttcacttcattttttaccccagataaacttacctttccttctatactctattcacaaacctatctaggggttcacggccaaaatacattcataaataaaccacttcattttctatccaactcancccccaaaaggtctanattacttacatcaagactttaaccaacattattccccttaacataaaatctattaccttctcatcgataaaatttccaaaccccctgtgttaaaatttttgttaaaaaaaacttcttccaca

SEQ ID NO: 188347 - DNA, 368 bp, Arabidopsis thaliana
ccgaaaggcggagagaagaacggcgcgcggagcgagaagcagccgagaggcgaaagccgacaggagacacagaaaacgagagcggagagacaggagggagaggggaggacgggggcgatgcgcgggccgacaaaaaacgcgagcctgcgcgtaaccgccaggcgatgattttttcgggaggggcggggccaaaaaagggagcaagacaaagacgcacgaagtatgtgagcgtcacagcacacccaaacacgcgacagcgagagaataggcgaaacacccacaatcaaaagaagaagaaaaataacgagaaaacagccacaagacgatcacagctgaaagagaaaataaacagagacatagttgcggcg

SEQ ID NO: 188348 - DNA, 521 bp, Arabidopsis thaliana
  unsure (1)..(521): unsure at all n locations
cgcgccgcgccccgggaacaaggagaaaggaaacgtttttttcccccccacccttttagggaaacccaccacagaaagcagggngaaaaaagcttcancacgggggaagaccccggacccaacaccggcgcggagaacaacacagaaaggaaggcccaacggcggcgagaggaccggggcgagcaaccagaagccaggccacaggcagaggggagaacacagaggacagaaccgcgaaaaacattcttttcccaggggggaaaacccaacacacccagggcgcgcgaagccacgccacccccgccacgaagagaagacaccggaaggaacagcgcgaggcaaagaccggcacccggccacggcgccgacctaacaccaagcccaaggaacgaacccccccaagaagaagaacagccgcacaaaccgagagaaacagcaggaagaaaacaacaccacaaacaaagacgcaaacccgagccgacacaggcgccctcgcaaacccccccacagagaccaaagac

SEQ ID NO: 188349 - DNA, 289 bp, Arabidopsis thaliana
ggggcggccgagggccttcttttttttatttattcaacgcttttttgtacgcggcacggcccgcggacgattcggatatggtagagcgatttgagggcggcggggcgtggcgcgcgcaaacaatcgagtagagagattcacgaggaggtgtacaggtcgtcgctataaagccggaacagaatcccgatcgagacagcgattgtcgcacggctgctatcgagactcaatggttcgttaccccacccgtgatacgcacaaccgagatggcaatgctttttttttcgccgcg

SEQ ID NO: 188350 - DNA, 358 bp, Arabidopsis thaliana
ccccccttttttagaacgaggacacgacccggagccgcagagccgcgatgaggttcggtttttacaatctggggtagcccccgccgggcgaccaacgacggattgcgggcaggcgtagatcttcccctcaacgaatgacggttcccctacgccaccgagaagtccgcccgtacatcacgggccatggagtaatgaaccccccagaacacacgtccggacgaagaagttttttttagcagggtaaaaaacccccggcccgtccgtaatatcacaccaatacgtccggttaaggagcccgatcgcttcgtctactccctcgcgccttaatcacacgacgacgccagaaggacgaacaatg

SEQ ID NO: 188351 - DNA, 487 bp, Arabidopsis thaliana
  unsure (1)..(487): unsure at all n locations
aacgggaaaaacgggggacgagagaaaaccgaggagaaaagaagaaaattttttttttaccccaccaacccactgccgacggggaaacaaaccgaagaagagcgagacaggcccccggggcgaggtttacaacgaggggggagaaagcccggggaaaccacgaacaaaacgccggagggaagggacaaaggagacaggacaaaaaaagaaacgaggcgagggagaaagaaagccggggccgaagagaaagagcagagcccagagcaagaagaggagcaaaatacgcaagcgcagcagaaaccaaaaaaaaaagcgagtttttttttctgaggggggaggacaggcgacccacccccaggaaggggcnaaaggacaccaaacacgcacagagggagagagcagggcgcagcaccaacaaccgaaggagagagaagaaaagaaccgaccacggcgcccgagacagacgggagagaaaaagccgacgagc

SEQ ID NO: 188352 - DNA, 575 bp, Arabidopsis thaliana
atgccacgcacaagcagaacaacaacaagaaaacaagcttcttttttttaaaaacacccgcacacttgtgcacggcaggacccggaagacaagaacgcaggatacaaaacaacgaccactttttccaaaaacgggagccacgcccaacaaaccaaaaaaacggaaccagcgaagcggggaaaagaagacaagccggagaagaagacgaacgcgagcaaccccaaccccgtcagcgtatgtacgcagcgccaagcataagaaagacgcgcgacggaggcgaacacgcgccccgaaaacaacgcaacaagacacgtggagcgggagcaaacttttttttttccaagaagcggccccccactaaccacccgcacgccccacgaagagaacccgtgacagggagtccgcgaaagccgagccacgacacccccagcatcaccgaagaaatcacacgcaaactcaccaagagacacgagcgacctgcccggcggtgcaaggcgaccggagaactcccacgcgccaggcacgcacagcagcgaaggagaccgaagcgccggagaaaaaagccacagacccag

SEQ ID NO: 188353 - DNA, 379 bp, Arabidopsis thaliana
gggggggaaccccagacaggcgggaagggggagagggaggaagaaccagatttctggggggggggaaaaacccacaggcaccggaggagaaaagcaggacaaggcgggcgggggccgcggagcaggggaggacagcgcaggacccgacgggcgcgaggggaggcgagaagagcacgcaagaagacagaggcgggagggccaaaggcggcccaagaaagagaggagaaagagaagagggacaggcaggcagaaagaacgagttcttttttagccgagggggcgggcgagcaagagagcaacagcgagcagaagggaagggaacgaacgacgacgggagcaacggcgagacgggcaaaagaaaggcggggcgcacgcggga

SEQ ID NO: 188354 - DNA, 181 bp, Arabidopsis thaliana
ggagggggtggaacgacgtttatcgatatacgcgtatgcgttaccgtatttgccggtgccaggcggtgtcgacgagcggattgaccctgtcgccgtccgaataagcgggcgacggaggaaggagatttttttttcttcggcgcgcgttcggtgatgccccgcccgccggtatccgtcatcc

SEQ ID NO: 188355 - DNA, 169 bp, Arabidopsis thaliana
tcccggcagcacgaaatgcggtaagccgttacgctgcgtggtatcaaagcgcgttgtcatgcagcgccgttgtgctaaccccccaccgaatgccggcccgctgaacaaagttttttttcgaggaggtaattcccccactcgttccgtagtccgagaactaaacgcccga

SEQ ID NO: 188356 - DNA, 582 bp, Arabidopsis thaliana
ggggacccggcgagcgccgcaccgccagaaagaaaaagagaaacttttttttaccccccccaccctgcttgtgggaacacacacccccggagcgaggaggcgcaaaggttttgcagggggggaaaacgaaagaagaaaaaaaaggaaaaaagaagaaagggagggagggagacagcacgaagcaaaaaagggaaagagagcggacacggcagcggcgaggggcccaagcacggagcgcaaaaaacgggacgaggagagacgaggaaacacgttttttcaccagagggggggacgcgacaagcaccgcagaaggaaaaacacgcgacacgcgcaaagagggaagaagagcaagcacaaccaaggggagaacaagagaagacaccgcgcccggggccaccgggggcgggctcaagacaacacgccagaagccgaaacccgaaccgggacgacagagacggacccgggaaaaaacggaacggccagggacacaacccagcacaaccagagacggaggaccagggcaaacgagcgcgcccaccgagcaacaccgcgaaaaagacgcagtcgagccaggggaggcaa

SEQ ID NO: 188357 - DNA, 638 bp, Arabidopsis thaliana
ggcaacggaggaagggggcgggaaagagaggagaattttttttgccaccccacaactttttgggggaaacccccgcgcgagaggcggagaggaacagcggggcttttccggggggggagaaaaccggcaggggcagaaagagaggagacgaagaagagaaccgcgggaagaaagagggaacgagaaccgggaggggaaaagagaagcaggaacggagaggaaggagagagcgcgcaggcggggaacacgaaaaaggcgggggcgaaaggagcgagaagaagctttttttgaaggggggagaggaaaagccgcaaacaacaggggggggggaacaaaagaagcgggcacgccagagaggcgacaagagcgagggccgtagaaaccggaaaagagacagacggggaaaagcgacgaggaggaacagggggaggcagagatggaaaacgaaagcagcgagaaagccgaaccgcccgaccgaaggaaacgagcggagaggcccagaagagcaaaaggaagggccacaaggagagaggcgaagccgaggaggagccgggccgcggcagaggcaacgacggagcggaaggcagcagaaggcccgacatgcgcggccgcaggcgggcgaagaaaagcgggacgaa

SEQ ID NO: 188358 - DNA, 188 bp, Arabidopsis thaliana
accaaagcaggcggagaggcaccgcccgcaggaaccgaccgaactgacagggagccaacgcggcagaccaacatacaggaaccaagccgctcgcaaaggcggtagaatcagaaaacagcggacacggagagcgggcgatgtagcggaccccagaacgacaacgccacgaacgggttgtgcggaagaac

SEQ ID NO: 188359 - DNA, 488 bp, Arabidopsis thaliana
  unsure (1)..(488): unsure at all n locations
gcagaaggaagggagctttttttgtcaccccccccccttttcggggaaccaccccaagggaggggggggngcccagggcttttaaggaggggaaaccccacaaagcaacaacagaaaaaggagaagaaaagcaggagaaggacaaaaagggcacggggccgaaaaaggcgcccgcgccaggcgggaccggggccgaggcagcagggaaagacgaggagcgcggaacaagaaaaggtttttttacagggagcaagaacagccgcccccacggggacaaaaagacccacacaacagaagaagaagaccaacccccggaaacgaaaaaaccaagaagcagcaggcgcacgggacaagcagagagaagggacatagccagagagccaagacaccccccaaaacaacagcggcgaccaaacagaaaaagagggcggcgggcaccggcccggagagaggggaggccagccggacccgcaacgacaaccaccaga

SEQ ID NO: 188360 - DNA, 297 bp, Arabidopsis thaliana
ttttttttagttcaattttccccttttttgtgaagcggcgtcaaccgggagcgatgtcccaaaaattagtaggaacttaattgtccaagaaatatacccgttatatccagacgtatatccgtatattggattccgcctgttagctagcatagcgcatgcgagctctggttagtcgatgaagcggattgcaaacgcgtctatatcgtgtcgcgaaactaagtccgaagcgcgcgtatatacagcgttcagcctccgccagtagctacagacacgtgtatgcagagttgccggttattt

SEQ ID NO: 188361 - DNA, 430 bp, Arabidopsis thaliana
cggagacggagagggggggggaagggagggaaaaaaaagcgaagggggaaaaggggggagggggagcagagggggaaggggaagaaaagaaagagcgttttttttacagggggtgggggaaagggggggtggctgcgggagaagaaaatgggggggcgaggcagtgatgggaggagaggggagcccgagggatggtggggtcggtcgtgagtggggagtccaaaccgggtggagcggaggggagggatggaggaaggtagctggtgaatccagtctcggactcggagaaagggtagttgtgtgggcgagtgagagttaggttggtgaaaaggaaggtgtgttcggaaggttgtctgtaattgttgcgtgacctggggaaaggggggaagggctcaattgtgcgtcgggtcatgaagcatggttgtgggtg

SEQ ID NO: 188362 - DNA, 672 bp, Arabidopsis thaliana
  unsure (1)..(672): unsure at all n locations
gaaagaacgagaggaaggaaggcttttttttttttcttctccgcgacttttttttcgaagnaggaccccccgcggcggggagcgcggtggctctcacccggtttttcttctattgtgttggatattcctcacgacgcccactcctaccgtcttagattacgtatccaagtgggaatgtgaactgtctggtgcgaattcagtatctacagacagataactacagatatatattacgagacggtatcgacaatctatgcaataataaatttacgtaaagcattcaaattgagaaaaagattgttttttttttcagcggtggttgttatattacgcgataccgcctccaactgtttaatattagttccagctaatcgctgagggcgttttgtacgacttcccctcaaatgaattccgtttgtgcatcgacgtatgaccaatcccaccttatcccgtcgtgagaagattcattatgtgtatgtaccgagtaatttccttgtcccccctcacccagccatcttatttgttcttctccgtataccttatgtgctgataacaactgttttgctacagacttcgattgtacgtattttgtcttttgcgtttgcccgcgcgcgttcctaccattcattttcctccgcttaaataatactacgttatactatcttctagcgg

SEQ ID NO: 188363 - DNA, 338 bp, Arabidopsis thaliana
cggggcgaagagaaactttttttttttccaacccacccccttttaggcgcacgccccgcccgcgcgccgaagcgcataagacgaacgccgccatctataacatgggaacagccgccgaaccagacgagttccccgttacgggcaacccgcatcttaccaacggcccgacgacgtctccagaaccgctccggacccagctttcgccgccctccatctgcaaagccctacgcccacaccccccgcagccggcccaccccagaccgagacagcgtttttttcagcgtccgtggatcccccgcccctttttgcgcttccccactctcttacccccgtttctg

SEQ ID NO: 188364 - DNA, 200 bp, Arabidopsis thaliana
gtccgtttgttattcagccccccatgacctgagacgcgcgagcattttcttttttcacccccaatcatctacccagccgcgttccggtgtaacacttataatctccaatttatatttgccaatccgctaacggtaccagactccccgtagatccgcgacggagcactcatcagatggcgcgaccgggcgtgagaccccct

SEQ ID NO: 188365 - DNA, 723 bp, Arabidopsis thaliana columbia
  unsure (1)..(723): unsure at all n locations
gggggagacagagggagagaaggaatgaaggagggaaggaaaggaagaaaggagagttttttgtggtgggaagaaaaaaaaagattcatatgggggggggacaacaagaaacgaggggngnnnnngagggnggagaaggaggttttgangggggggggggaagagaaccngaagggaggagaaaaagagaaaagaagagaagggagagaggaggaggggggaagggagaggagangaaaaagagggggagagggaaaaaaagagaagaggagaagagaagaggaaggggggagggggaggagagaggggggggagaggaggaagagggaaggagggaagaggaaaagagggggtttttttcgagaagggagaaagaaaaggggagaaagaggaagagaagagggagaagagagaagagagaggagagagaaggacagaaaggggcagagaagaagaagagggagggagaaggagagaagaggagaggagaggagacgggggaaagaggggaaaagggaagggagagaaagggagaagngagagaagagggaaagagaagggaaagaagagggagagggggaaagaaaagaaagaaggagggcggagggagagacgaaagaaagagaaggagaggaggaaaaggaaggagaaaagggggggaggaagggaggagaaagagggagagaggagaaagaggaaatcagggaggagaggggaaggagg

SEQ ID NO: 188366 - DNA, 226 bp, Arabidopsis thaliana
gggagctccgcaatttgtcccccaaacgaacagacaaacacttttttttttacacaccacccccttttttaagaaggaacagccccgcgcaatcgcggaaaaattgcgtccatttaacgaggggggaagcgcgccggaccaaacaaaatcgggagcacatagccgatacagaactaaccgggcgaagtcttaaagatgacgggatgaccgagccggtgtaagaggg

SEQ ID NO: 188367 - DNA, 639 bp, Arabidopsis thaliana
  unsure (1)..(639): unsure at all n locations
ggaaacggagggaagggagacggcctttgttgcgcgcccacattttgtgaagggaacacaacaggggaggagggggcgggggganggaacacgttttctgggggggggggaaaaacccagggcacgcgaaggaccacacagagagagccggagggaagagcaggcggagaggggggcggaggacaaacccgaggagaggaaagaggccagagggagccggagggggcgagaggacggcagagagggaggaaagagagcgggacggcccgaagccgagaggttttttttggggggcggggagaccgcgaaaggcgcggaggccgccacggccgggacgagagacagccaccacggccgaagagggtgaagaaggggcggcccccccacgcacccgagacggcgagcaaaaacgacacgcgaccgcgagcaagggagggggaagagaaacgcggggagccaggggacccagagacgcgcgccggaggacgacgggaaggggaggcccagaggcggccaggagcaggcccgaaagaaagccggagagcccgaggcggggggggacggtgcccaagaccgggccgaggacaggcgcacaaggcccgcaagaagaaggcacacgacggcgcagcgcgagcgggc

SEQ ID NO: 188368 - DNA, 336 bp, Arabidopsis thaliana
atctattgagccacaatggttgtgttcggcctccgtgagcggctcgtaccgtagaggtttttttcctaccgtgtgcccgccgcaattcgacgtagaggccatgcctccgaattggtgccagagcgcctcctccgccacccagcaccggatgccccccaaagctccgagtatagcgcaactacaaatgagaggttaaaagctgatacgtatgaacgcgaccatactggcgcgtcgagaaggtcgaccgggcacgcagcgaggacggatgagcattaagacagagagacacaaccagtagtaatcacagtgtgaccgaccggggtgtagagtagccac

SEQ ID NO: 188369 - DNA, 392 bp, Arabidopsis thaliana
  unsure (1)..(392): unsure at all n locations
gaccgccgcccgaacagagaaggaaaaattttttttttcccaccacccccctccctgggggaaacacacacccgggagcggggngncgcnggagccttttnaccggaggggaaagccccagacaaacaaaacccaaaccaggagaggcaacgcccgcgaggagcgcggagcaagaacgagggagaggagaagaggacgagccacgcgaggagcgggggacccgagccgcgggcggagaggcggaagcgaggcacgagacaggcgagaaccagccttttttccgagggggggatgccccggacgccaccgcaggggaaacagcagacaccgccacccggacaggagaggcgacccccccgtggctacacaagcggaacgcgaacccccccccc

SEQ ID NO: 188370 - DNA, 527 bp, Arabidopsis thaliana
ccagtagcccctccagatccaacaagaagcctttttttttaacaaaacccccagttgagagggaacaaaacagccacgaaaccatattcgcatgaaagcaattttgctcttatgggacaggccaacactcaaattagattttactaagcgcaatagaacactcgagaatgtcctttcgttaaccctagggtccggtatagcaggcgatcagcggaaacgttttagaaatacgcaccaaacatacatcactcgggaaaacgaaaccttctttctttacaagtgcccccccccggttcggttttacgtctttttattccattaataagttccctaacgcttttctaataaattaaatgtataccgccaataaacacaatataaaaataatctagagtaggttaactaaattcacacgcataattcggtttgagaagagaacactctccatgataactaccagacagatctgtagggcgggagccatgaatacaagaagaacctgccatcgagaacacattgaggagaga

SEQ ID NO: 188371 - DNA, 535 bp, Arabidopsis thaliana
ttacaaaagaattttttttttttcagacaccctttggaggacgcgcagaactcgcgcccatgcgcctatacgtacaggttagcgtatgggggaacttccactcaaacaagcgataacgctagcgctaacgatctcgaaccatcagtcaactctgaaaggtcgcatactagaggatatcggacgcatgattcgactgctttgttcgttccccacgcaatcgcaggcgagtcagttcttttttttcccgcgttcaatatgaccccaaccgacgccatcacctttatacccccgttgtggtcacaatcgccgatccaccgccatccgtaaacccgcgaaacagctggaataaagcaagctacgcgcaagacccaaaacccacccatacaccctctctacgaacacgcccgaagacgtactatccaactcacggatacaagtatggcggcgattattaggacctcgtctcaattatatgccgacaactacgtgtgcaagccactcttataacttctcgctcgtccatcttatgttacgc

SEQ ID NO: 188372 - DNA, 202 bp, Arabidopsis thaliana
atcccgctctcccacagggtacacgaccaacgtaacaaaacaaagaccttttttttttttttaatccccaccccctttttcaacacacaccaacagctcgctcacacacaaacttcgtaattcaaatacagacatcttttaccacctggtgggactagggcccccccataaccaatccacacatacgccataacaggcagcg

SEQ ID NO: 188373 - DNA, 632 bp, Arabidopsis thaliana
cacaccccccaagaaacgcacaccaaaagagaaaaaaaaagaccctcgtttttatcaccccccacccccttccaagagaaaaaacacaaacccccgagaaaaaacggaaaaaaaacgaaacacacccttccacaccggagggaggggggaggcccgcaccaaaacaaaacaacacaagcgggccggacacgcgaccaccgcccaccacaacgcaaaccgccgaaaacagacgacaacgaaacagcccaaaacccggccacagagagacgaggcccaacgcacaacgcagacaacgaaccgagaaaacacaccccgcaaaacacgaacacacaacagacgaaaaaaccatttctttccccagcgggcggaacaagcaccgcccaccgaaacagcgagcgacccacaagaagcccccagataaagccaagacaaaagacgacgcaccacaaccgacacacaaaaaaacccacccaaaaccaccacccgaaagaaccgaccaaaaacagcagaccacaaccaccgcacccgaaaaccccaccagaacaacgaaccacacgcaaaagaagaacgcacgcccaacatacgacacgcaacaagaaaaaccacaaaacccgcaaaaccacaccaacaag

SEQ ID NO: 188374 - DNA, 672 bp, Arabidopsis thaliana
gcaacccccccaaaaagaacaccaacaaagaaaaaaaaaagaaagcctggtttttatcacacccccccacctcacaaggaagaaacaaagcccccggggaaaacacaaaaacaaagacacaccttacaagacgggggggagggcgcgcaaacaaacaaaacacgaaaaaaacagagccacagaagaaagaacgaagcaaaaaaaaaaacaagaaccccacacagacacagaaagagcaaaacaacgaaacaaaaaacaaagcaacaaagcccacccgccagaccacacacaacgaacaagaagccaactcttctaaccgagggggggacccagcacccaaagagccgacagccacgcggaacaaaacacaaagaacaacagaaccagaacgcgcgaacacaccacacccacacgccaaaacacgccccaaaacgacgcacagaagaaaacacgccaagaagacgaaggcgcggaaaacacaaacaagaaagacccagaaaacaggaaacagacgaacaagaaaaaacaaagaagaaggagcagacaggagaaaaaagaaaaaagcaaggaagcaccaaccaggaaggcacacagggaagaacaccacccgacgcccagcgaactcacaacaaccaaaaaacgacacgacccgagcagagaaacagacaaaga

SEQ ID NO: 188375 - DNA, 703 bp, Arabidopsis thaliana columbia
acccatcccgcaataaccccccaaccaccgaccagaaccctcttctttttttccccccccccacatcccaaccacggaaccaaacccccccacaaaaaaagacacaagaaaaacaacccacctttacaaccgggggggggaggggccgcaaaaaataacatacacaccacaaccagctaagaccaccaaccttaactcccgtctccaacgaccatctgcaataacctacataccaccccctctttctcgcacccccatactactccccgcccataatatatcagacgccacccgcacttacccaacaccaagaacagacaaccaaatacatcttttttcaccgcggggtggctcgcccccatatacccaatccccaattgttaaaaacacaaatatccatccgcgtaaagcaaactcacctcaaccacctcacatatcccctctcaaaacaccctaaatattaaaacgacccactaccacaacacccaacaacactcatcacctaaagcaccgcatacaaaaccaaacataccccacaaataaaacactcagcgaccgcgacgttcagtagaacacacacaaacacacagaaaatcacctacaataatcctcccacaacagaacgacccacctcaaacgctgaagcacatcacgaacacaagctaaaaaccatagccaaagaaacccccaccacacaccccac

SEQ ID NO: 188376 - DNA, 432 bp, Arabidopsis thaliana
  unsure (1)..(432): unsure at all n locations
cgtcgctatcacgcgtacgtaagctcggaattcggctcgagctattccaccaggtaatgacgcactcacagtggaattggcttcatgcacaggaagaggctgattcgaaatctggtgacactttacatatgcgtagaggatcaactgctcgagaanaannntnangnntcacacancattaacttaaattattggcctccttttctggttctgggcacacattgtctagaggcttttatagaatctacaaatcccgcttcctttcattgacagtaggtccccagactttggtgctccttttgcctntacataatcatagacctatcatgttggtggagctacttgagtttgtctataatacaccttcttggggttcctctgctccttgggacgagggtttcacccgcttgctttttttgctttcgggacctc

SEQ ID NO: 188377 - DNA, 718 bp, Arabidopsis thaliana
tacctcccgtagtttccgagccacagacgcaagggggggactttttttttttttttaacaagggcacctctttatatcggggagtcgcacaacgctcgttgcccgctcgcatatcagtgggtccggatcttttctcaccccatggggggcagagagccctgaccaaaacaacctgtgatcacgccagtgccatttagacacgctaatctatcgtattctcacccccaatccatattctcgtccttaattcccactatgcgcatcgcttcccctgtattgtttcgcagccagccggctattctcttgatgttttacagacccgttgtgccaagcccgccggcgtttttttagtgagggggtggtgcgaagcagttcggtgagcccgcgccgcctcacgcaacatgaaatatagtatcatatccatactgttaatccgagtattgtatccattcacacgcattccagcccattcgtaaagtcacaatgattccagtgattcgccagttagacgcctccacacatgtttcacgatattcccccccccgcctgccacccgtacacttttcccccccaatgacccgatcatatgattatccctcgccgctcattgtttaacgtacgattataaccgagtccaccctatcctcaacgtatattacctccgccctacttattggactcatattatgtcccatcctatacccactagtcattgacc

SEQ ID NO: 188378 - DNA, 126 bp, Arabidopsis thaliana
gagtcgcgatttacgcacgacgaccagatttttttccgttaccacagctctccctttcttgtcccggtgacccccggtgcgcctgtcatttaccgccgacggtgtgaccccgctctttttcccgct

SEQ ID NO: 188379 - DNA, 380 bp, Arabidopsis thaliana
aaaacaagcgcccgaccccagagcgccccgcagccgaggcggatccgcccccgccaacacaagagccagcaccaggacacgggggacacatcacgggacgagaacagagaagccccgggacagcagaacacgaagcaggagccgcccccgggccccgcacaccacccacatatttttagtaggggaggggggaccagagcgaagacaacccgcagaaacccgcaacaaacaaacaagagcagaagacccgcgagcgagacccagcgaccccaccggtacgccctcaggccaacccaaacagagagccccaaatgagacccaagaaacccaagatagcactgacaacacgagagaccgacaacgcccccccaggccgaagc

SEQ ID NO: 188380 - DNA, 153 bp, Arabidopsis thaliana
  unsure (1)..(153): unsure at all n locations
atatttgcgccgtagcaggcggagacgtttttctattccctaatgtttctccacgtattccgcgtgcagccccaggatggcnagtgattgtcgcggtgtattgccgcgcccgcgatttccctcttccgggggggtggggagcgtgagagaaaa

SEQ ID NO: 188381 - DNA, 160 bp, Arabidopsis thaliana
  unsure (1)..(160): unsure at all n locations
gtacgtgagcttggatcctctaaagcgttcgcccttggggttatgggtgtcttaantgtaatctattacatanatcaaacatgaggacttgactacaaaatccatcaaaggggttggccaaagaactgagtgtgcanattcataaccagagggagacata

SEQ ID NO: 188382 - DNA, 632 bp, Arabidopsis thaliana
cggcaggccacggcgtgaacccgggggaagggcttttttttttttacatcgcacctttctcgggtgagaccccccagcacggaccatccagggcatgagcgccagaggtttcctccctggggggggggggcgcgaaaacaacaacaaggagtgaggcaggcgcagatacaccgccgcataacgttcccacgccatgccatctgccgacattacacaccagccccgaggcgtacctgagtgatggacaacggtgagcggcagttgggccaagaccacccgcttatcccaagcccgcccattttttacagggggggggagagacacatcgatttcgcgtgctcgcccccgccagtagtcagtatcatggcgtcactacaatgtcgagtaaagagagctgaccccctcgacgcagcgctagcaatatcccgtgttacccatagaccatttgacgccagcgccgatgaagcgcgccgccccgccggccggatacccatccgcatgccacccaatacccgtttcagatattcagaccccgccatgaatgagtatagttgaaccctaccacccgtgtccttcgagacatcccccccccagccatgagagccaagtaagacgcggccgtgcccgcggca

SEQ ID NO: 188383 - DNA, 628 bp, Arabidopsis thaliana
  unsure (1)..(628): unsure at all n locations
ccctaacattcctttccccaaccgccctttttttttcatttatcccctttttcccacccccccaaccaattaaaccccacctaattatcccccccccctttttcccactacggggggtaggtgtnttctaaaaaacaaacattccgcctctcgattctattttcctcccctaaccttacatatattaatttattcttccatatttccccccatttgccccccaccttcccctttatctctcaccctcctatacctcccactcttccctcattgccttctattataccctattccaccctttttttttttttactggggtgtcggcggacaattttccccctttgttttatataaaaataaaaccattctactttttctatttcttcttccccttccccatttccttttttaccattactgttcaccccatcgacacccttcacttactcataccattacgtcaatcatatttcccccccaccctaattttctccccaccacttcatctcatcccccgcccccctattattcccctaattcttcttattcccctatacccccccaatccccccagattccatctccttctactcctataatcaattactcccccacccttttacccccc

SEQ ID NO: 188384 - DNA, 427 bp, Arabidopsis thaliana
ggcggtcccgcccggccggtcgcggtagcggcgagcccttttttttaaaacccccccccctttccggccgcaaacccccgcgcccgaccgacccccgcgacgccccctttttccccgggggggggggggcggtaaaacaaataagccgggccccgtcgcggctcttggcgcccggtgcgaaagcttcaggggagtcgccgtaccgcccgtgccgcccccgtcccgccttttggcacccctccccgaatctcacgcctgtgcgcgtggttcgcgtctcgtaagggcgcaggtttttttttgcggagggggggggcgccgagcccgcccgcggagcgttgggcgcaaaaaaaagcaagaggggctatccgcccggtaggcctgggcggcggggtgtttttccgcgtacccgggatgagctgcgtctggg

SEQ ID NO: 188385 - DNA, 685 bp, Arabidopsis thaliana columbia
gacggggcgcgccccacaaacccccaagacccaacacaccaggcctttcttttttcaaaaaacacccccccttctcccaaaccccaaaacccccccaaacccccgacaaaagcccacacaccgcccctttcacccggggggggcaagagggaccaaaaacaaaacgcacgccggaacggagcccccagccccccacccacccagacgcacccccaacacacccccaaaccccccccaaccaccccaaaccaccaccacccagaccccccccagacgcccgggaccccaaccaccggagccaaagccccccaccacttttttcacaggcggggggccaccacacccccccagaccacacacccaacaaaaaaccccgcgcgcgccccgccaccccacaaaccccagccccaatgacgcaaaacagcgaagacaaacaagcaccagaaccacacccacacagaacaacgcgcgcctggccacgcaccgacacacccacccccgcccgaaaacacccccacgccccaccgaaacgcccacgccaccccccgacaccgcccaagtacacaccgaacccccgataccccccaccaacccacccaacaacaaaccaaggcagcaccactgcggacagcagacccccccaccacaaaactcccccagaccgaagacaacccccagccccccg

SEQ ID NO: 188386 - DNA, 457 bp, Arabidopsis thaliana
tatccatttattcacaaagatattaagaaccccaaccaaacttaattggtcccaataattaaaatgaagaggggcactttggtcaatacaacctaataaccctctttttatggggggggccgcaactatttggccttaaccccccaaataatattcccaccccaccaccaccccccacccgggtttcccccttcaccacgtatccaccgggttggttttttccaatttctcccctctcatgcgggaggaaaataaaaaccttagcccttccccgtcctctccttttttgtgaacaaagaaccctcaaatttttatttcctgtggcaatccccacagcggagactttaacccactcccaaaatggcgtgtgcccctcctctcttcaatgggggacgggccttgcctccttttatacacattcctctacatttccgcggcgtttaagttcccaaaaaaa

SEQ ID NO: 188387 - DNA, 250 bp, Arabidopsis thaliana
ccaagcgagctcccgtgggatcggtttcggattgaaataagagagaacaccagagaaccccgattaggcccgccgtcacgaaattcgtggaggggtgcctaatctgcggatgttaccaggggtggcaagaggaatggccaagcacgccgcgatttttttttttcggggggggggggccccccctttcccaggtaatggtgtaaacaaaaaaacaaccatttgagggtcagaggacagagaaccagcatcg

SEQ ID NO: 188388 - DNA, 570 bp, Arabidopsis thaliana
gtggggagcacacccctcccgtacaccaccggatcctcaacacgcggtctcctcccggggggggggggggcgcgaaagaaaacatactttggcccacccactgtacctcctcatttcgctgcccccacaaataagttccagtcctttatcggcaaacacattaaatcctagttgttactccaaaatagaaaggctaatgcattgcacccccgtacccacccccctcttttttcgggggggggtgaaccaccaatagtaggccccacaacaaaaaaaaatgcacgacggttcaagccttatgcactcccatgcaaacacctcgccccctggccgcccagaataatactccattttaccctttaaccctgtttcaccttctcctggatgcgctcttccccccccatctttccccatccacaatccccccataacctacctgtaatatccatcgcgccctataatcatacctgttctccctcccccccttaccgatccattatccccaccctccttcatatatgtcccgggtatgatccacatctcaacccccacacctgcatcctattccgc

SEQ ID NO: 188389 - DNA, 333 bp, Arabidopsis thaliana
ccccctttttcccgagggggggggacgatcgagcaaataaaaaaaaagaagcattccgcgctaacgcgacacgatggaacctgcggtactcgcttacagcatactttataatactctcctataatctcccgttatcccacccctatcccccccttatccacccctctgcctttcccccctcatcactcattcgcaattacgaaccctaacacccctttttttttgggggggcgggaacgccaccccaacggcttgacccccggaatactaaatattgatacccacccacccggtattcctgtgcacccaggacttataaccacttaccccatt

SEQ ID NO: 188390 - DNA, 380 bp, Arabidopsis thaliana
aaaaacacggagtacaatcttttattcccatgaacttttaccaaaccagcgaaaaggcgtggcaccccatttcatggggggggggaaaaaaaaagtatacgtggatacgggacccattcgaggggataaagtcccgtcttgacgtatccgcgcctccgactgcgtcgatgcgttcgtacgtatcaggttgctattgaagcaaaaaacttttttaggggggagcccacaacatggggacgtgagaaaaactacgaagtggagggggagggattcggacgcgtagtgtggttggtggtggatgcaggagggggtgcaagcaacatctatagctacgatattagtcgctcgcgcccgaatgtgtaacggcgacaacaataaga

SEQ ID NO: 188391 - DNA, 231 bp, Arabidopsis thaliana
  unsure (1)..(231): unsure at all n locations
tttcccagagcccccgggggcgatgcgaagcccccctggatattacgcccacatcttttccccacaaaggtgcgggtggggnggttaatagaaaaaaaatgcaatcccagtggcggttccgtgtggcgtcgtttagatccccgtcttggttgtgtctccggtccaccccccattgcctgcccccggtcagctcgtcttcgtgtccccgtccgatttcgttcccgtttgtgt

SEQ ID NO: 188392 - DNA, 370 bp, Arabidopsis thaliana
gggatagtccgacccattccaaagcgcagatgccggctcgcgaacgagacgctttcaatacccgaaaagtctttttttcgcgggtcccccgaccttacaagacgcgctcggtagccccgccctttcacctgggggggaaaaggtattaaaaaagaaactcgaggtggggtttatagtgtacactggcaaacaccagagaggattagacgcgcatcccccattatccccgacgttacacctaatttgcacaccagtccataatgtccgcgtgagtccacgggtatgcgataatactatagccgactcgccactttttttttgtggtggggtgcaccctcccaaaattattgcgcgcgatttcgaatataaa

SEQ ID NO: 188393 - DNA, 226 bp, Arabidopsis thaliana
cgagacatagtcgagtggactttttttccctccggggggatggaggggcggacacaacgacaaaagacgaccccgaacccatatccccctcagcattgcgtatgcccacgcccggcggatttagcggtcctagagacctactattcaacgaccatgtgcacagtgtgttgcaacacacaacgagcgggctagtgttgataaatatccacgcagcgatgagccacgc

SEQ ID NO: 188394 - DNA, 555 bp, Arabidopsis thaliana
tttttgcgggatgcgcgcgtcccagtcaacccgcgcaagtgtcgcgccccagtttcccactgggggttgtgggtcaggaaaataatacttcacgctgtcgtttcgtttgagcaagtcgacgcaagtctgatgatacacgatttatcgcgcattcgcccgcccgttcccccatttcattccccttcaatatcgtcccgtgattccgtgttaccatttagtagatcgaatatccacacgtttttttttgtcagctgtgggcagcgcaacgttgtcccccgggtgggttgataaacatgcgcccattgtcgaaagagaaagctttttgccgcttccgaggtgcggtatatgctttggcggcgacgccatgagaagcgcgatctatctatggatgcgttagattgtctatgtacgaccccgccgtatagggcgcgacctttcggtaggcggcgcgccgatattccccctagctgtggtcgcccatcgcccgccgagcggcgagtgcgcggtagattctggtcgtgtttccgcgccacagttccaccccttggggatcag

SEQ ID NO: 188395 - DNA, 224 bp, Arabidopsis thaliana
caatttacccgagaccggcagtttctttttttatacacacactctatctctctatcccaagaaacgcgagatccatcaatacccggggtattatcgccgccttttacccaacgaggggcgacatttgaacataaaaaaaatatgaatacgcatggcagattctgtgcctccggattcgggtggtatgttgtggtacgatcatatatctcccaatttgcccctcc

SEQ ID NO: 188396 - DNA, 492 bp, Arabidopsis thaliana
accccagggaacaagcaagacaaggggggttttttttaaaaaacccccttctggagaaaaaagccgcgcagggggaggaggcggaaactcccagggggaggaaggcggaaaaaaaaaaaaagccaagcagaagagccacgagagaagcccccccaaggagggcgcacaaaccggggcacagaagaccaggggaggcaacaggcaagaggcggggagcaccccacgggcgaaacacatttttttttagggggggggccaaacaagaacgcccaggacacccaaaaaaagaggaagaaccacagaacgaagaacacacgagcacgccgcgaccagcggaaacccgggagcccaggaggcagagacaccagcagagagggagcaacccccccgaaacccagcgaaacccccagagccgaaaaaaagaccacgcgcaaagcaagagcaaccgaccgaccccgcaaccggcatgagacaacacacggacagaaacaa

SEQ ID NO: 188397 - DNA, 638 bp, Arabidopsis thaliana
cacaccaccggaatctttttcttttccccttgatatcccctttttcccctctcccccatccatactacccgcgccatttccccgcccttttccctcaagggggacatgttgagcttaaaaatatcctccgccttgcgtgattccttactccgtatcattagaatcttgtatgacatccgatcacccccattgtcccaccttccccttatttcatcccacatccggtcttccgactgattccctatatgcattatatctttcacaccacgccccttttttttaacgatcgaggacccacccaacttttgcctcagttttcggttagatgatctatcccaccatttttattctgtcgtcaaatttgtatctcacttcccaattttcattttttatcgtatacatatgaagcccaatgcgaaccccttaccagaccgaccgtccctagacgtagatgttttattccccacctccctttatttctcccaggccgtacatattgacgaagcccctcgttctttccccattttctttcatatccaccaaaccccccccatctgcaccttttattcctaattctaacatctctgctctagtagcacaccgcacatatcacctcctatcaagtataaccactgaac

SEQ ID NO: 188398 - DNA, 684 bp, Arabidopsis thaliana
gcacccgaccctatctcattttccgaagacgacagatcgtttttttttcccatgtatcactttttaaccgcaatttccaccagtcccttataatcaaccactcaataccccgcctttttcccatatgggggctgtatggcgtctaaaataaacagacacatccccaccccattaatatattccacctctttcacccataacatatagttgacatcaatgcatcccccttatcctcccccattccccacatttattcgcaatcgcatttcgccacactttatacacgtatagcatatagtattttcgttttccaccttttttttatgagggggcggtgtacccccccacatttttacaccccgattttaataaaaaaacgatccacaccatgataaattgagtgccgcatatcttccgccttccccccagtattttcatcttcagtatcactggatatcaacggtagcgaagccagaaccagaacatccgatcctttatcatctttctactattccccccccgcgcctattattctccccacccctatcatattgcccagcacacgcagtcatatcccgctatttaggtccatacccactttatctccgcgattccacctatagtctacttactatgccctattggatgccacaacagactgcaacccattaccccccactatca

SEQ ID NO: 188399 - DNA, 595 bp, Arabidopsis thaliana
  unsure (1)..(595): unsure at all n locations
ggagagggagggggaacggcaaggggccggggggggggttttttttgaaagggccacatttttggggggaaaccaccccggcgcccggaaggagcccgagaataccccggggggttgaggccgcacacccacaannaannnaaagccaagagacccaactaggcgggcgagcccggacagggggcggaagcggcggcaggccacacgagagcaagagagggagcccgggaggcgggaaggggcacaagcgcacccagaggccgggcgaccgggggtttttttttaggggggggggggacgaaaacaaaaaggcgagccggcacgccaagcaaaacaaaggagggcgggccagagacgagaccacaggaggagccagaggccggagagagcggccgaggcgaaaagcgccaagagagcccagaggagcccagagggcgcggcggcagatagagccagaagaacccgacccacgaaaccccgacagcgatccgcgcgaagggccggacgaacgaggacgcgcgccccgcgatcgcaaaggcgacagggagacccgtagccgccagagcagaaaaggagtccacgcgcgccagccggt

SEQ ID NO: 188400 - DNA, 505 bp, Arabidopsis thaliana
atatcgattcggtgatcccggggcacacgaggccgttctgttccattaggacttttttcccagtacccccgggcgtgtcagccctcctgcattacgccgcgactttttccagtctggggggagatggccatgaaaaaaagatataccgcatgcgttcattttgtacggcgggtccgtatgaaatcgtataaattgtccagaagcgcccattggcgccgcggcgccgactttcgtccgcttccgtatagccgccatgtgacggtggtccctcttagtttttcggtgtacgccgaattttttttgtagggggtggcccccgcaacgattagaacaagttgaggtaaaaaaagagtggaccgacgggcgtagtttgggtcgatgtttctccaacgtcccgagattatgttatttggttgcatacggggccgcttgtagagcagcacaccgggcattacatgcgctattaatagactttcggtgcgtccgacgccggttatattcaccc

SEQ ID NO: 188401 - DNA, 254 bp, Arabidopsis thaliana
cccgcctgtttccccctcgcgcggggggcgggtgggtcgattaaataaaacaatcagtccccgcgtccggcggcttctgtaggccaccgattgccgtggcgcgtgagagaaggtgacgaccagacaacgccccattgccgccgcccggtccccctcgttttgcgccgcgcttgcgtatccttccgcaatgttgcggggttgcctcttggtgtggccgatctcccggcgttttttttttggcgggggggccgcgc

SEQ ID NO: 188402 - DNA, 351 bp, Arabidopsis thaliana
  unsure (1)..(351): unsure at all n locations
ttccccgtgtgtttccctctcatcaacgggaataacatattaatctggttcctcacttctttgggggggttttcaaagggggtcaaccattttccccctcaggtaaaatccctttaaacgggggctccnttttgaaatcaaaaaaaattaaccnngccccctcccttttaaaaaatttttcacctcttggcagcccccacattaacatttattcacggggaaaacacctccccccattttcccccaaacttaagtccctttttttttccccccttcttcaaacaacaaagaaaaactcccaaaaaattttagacccccccgggaaacctcccaataacttaaaacccttcc

SEQ ID NO: 188403 - DNA, 560 bp, Arabidopsis thaliana
cagggaggggtttttttgacaaaccccggccctttcctgcgggaaaacaaaccacccgagcccgggggggaaaggggccggcttcccacaggggagaggagggcggacacccaaacacacacaacgcacggacaagggaaaagccagcagggcgaggcagcccacaagaaggagagccggcaaggggcggcaggcggcgggcaggagaaggggcgcgcaccgagacgcgggcaggcggcgaaggagcgaccgggaggacgcggcggccttctttttaagggggggggggagagaaaccgaagaagagaccacgccaggaagaaacacaagaggaagaggagggagacaacggaagaacggagaaggaagcagcaccagcgccacaccgcaagagggaaagcccggagaagcccagcggacccaaaggacacggcgccaagaaggcgcggcgaaccgcagcgcagaagagcggcggggcaggaagccccacagaaacgcagagcaaggagggagcaaccgcggggggcgacagaggcgagacaagacgccccgcccgcagg

SEQ ID NO: 188404 - DNA, 561 bp, Arabidopsis thaliana
cagacatacgcccagagagagaagctttttttgttatacacagccccccccttccagcgggggggaccagacgcgcggagcaccgcaggagaagacgcccgagctttaccccgcgggggaggagcgcgcacaacaaaagaacaaccaaagccaattgcacgacacaaagcgagcctccacccaacaacaaaacagcacaaccacacccaactaccagcccagaagacagcgccccaggacagcgaacaacgcgcaaggaccacaccgctaaccccgaccccccctctttttttttagaggggggaggggcaaaccgcaacgagagaccacggccacggccgcacaccaaacaaaaacaacgcggaccactccaaaacccaggagcacaccgcgccacgcgcaccgacaccaacgagaaacgcccagatacccagaacgacccacaagccgcaccaccacaatagccaagaaacccccacacccacacgcacaacagcaaacccccaaagacccaagcaaaaatatccgcccccccccaaacgagacggaccgaagaaaccc

SEQ ID NO: 188405 - DNA, 312 bp, Arabidopsis thaliana
cccgctccaccgttgtcgcccactgtgaagtaataaataactcctctacccatttctcctgtcccccgcccgtattactcaccatcccgcatgtacatttttttcttttgcgtcaggagtgacataaacaagcccctatccaagtcgttccttcacttcgaataatcttttctttcctccacccccttaatttctgccacacctttcaagtagagcacgcgcacgcttcagaaccacatttcttagattcctctttccccccccctcccacccttgttcccgttattccacctcattgtatagtatcacctc

SEQ ID NO: 188406 - DNA, 597 bp, Arabidopsis thaliana
ggggggaacaacagccccgccccgagcggagaaagggcccgagaacatttccccccggggcggtgagggcgggcgacacacacaaaaacccacagcacccaaaacccccaccaacacgcgacgcccccccagcgaacgaggacgacagagagccggcagagcgcagaccggccaccgaagaggcgccccgcgggaggacgagacgcggcaaggccccccccaggcccggccccccaccagacagtattttaaaaggggggggggggaaccaaacaacacagccgcgcacccccccaaagaaaacaacacagcccaaacgagaaccggacacagacccgaacctcccccgccaaccagaaccgaggacccgggaggacccgaacagcacagaaagcgcgacacccgagaagccgagagcggccgcccacgaagccccgacccgaaaccccccggaacgcaaacagcgcaaagccgaccgccccacagagagacgagacggagacccacgcacgcgagcccgacacaccaaccccccccggagacggtacccgcacagggaaagccaacaaacacccccacgcacggacccgggagcac

SEQ ID NO: 188407 - DNA, 686 bp, Arabidopsis thaliana
acctaccccaccccaaccaactccaaagacccccccacccccgaacttttttttttttcccaaacacaccaccttttttcccaacaacacacaagccccacaaaacccccatcgtcaccccccaccctttccacaacccgggcggaaaggccctaaaaaaaacaaaaaaccccaagacagacaccaatccccatcaacacaacacttaaaataaaccacccacccaacccccatacacccccccatcccccaatataaccccaccatacattactcaacccattcccccatcaacccccatcctaatcatcccccacacccccccaattttatttcatatcagggggcgcccaccccaatacactccacaaaaaacatataaaaaaaacaacccaagatactcacgccaccacaataataccgccatcccacgctacctcatctacgaatcccaaacacaccatctacacaccacctcccatacaaccaaacacacacctacaccctcatacccacccccaccaaaaatccaccaaccccatccaaaaaaccaccccccccaacatccccacatactattacaacccccaaacccccccaacactcacaaattcccatatcaacccacataaaactataaaactcacaccaaaacccccccacacaataaaccaccccacaccccc

SEQ ID NO: 188408 - DNA, 393 bp, Arabidopsis thaliana
ccccccaaccccacccccgcacacccgacccacccgccccgcccgcgccccgagccgcgcgacccggagcacaagcccgcggcaaaacgccccccccaaaccgccgccccccgccgctttttttctaggggggttgcccaccccccccccccccccctccccccaataaaacccataatcgcctgggcacgaccctgtgcctcccctatccccccctccaacccattcctttacatcgcgtctaaactcctctcaatccctgtatcatccaccccactttttccctccacccccccccgccgcttcgcccaacctatttacgccccgattgccccacccgtaccattacccaccccccccttttacttctatgcgctctatgttcactccccc

SEQ ID NO: 188409 - DNA, 286 bp, Arabidopsis thaliana
gccgtttcgcagcccgatccctgtccccgtatccgccatcgccgcatgttctttttttttttttcctccccacccttttttgccccggcaaccccccgccccaaacgatccccccaacacatccccccttttttccccggggggcgagggtggccaaaaaaaaaaataccgcccccttgtcggttcgtgttcgccatttcccttcccttcgtgttatatgccgccggtggtcgccgggtttcgcgcacccaggtccggctctattcctcccccctcccgtttccct

SEQ ID NO: 188410 - DNA, 465 bp, Arabidopsis thaliana
  unsure (1)..(465): unsure at all n locations
gtaagctcggaattcggctcnagatttcctaccgggttgaggcgnataattcantccctcccccaaaaacaaaattggtagataacgagcaattgttttttttcagattagatcctgaatttttacatttttttttttgcaatctcccccctaatgtgggggggactccgtcggttcttcgtgggaatctttctgggggggggggggggaaacaacgagggagaaattccaatataaagggggttggttttttgcatacagaaaaaaaatcaaggcttatgaatttggggggtcaattttttcggtctaagggcgaaggggggggtttttttcagaacgagaatgctgtctttcaaaattccttctgattttacccttttttcttcttcttaaaatttcagggaaggggggggggagatttttggatccccctttttcgggatctacacaggggggggggtaatt

SEQ ID NO: 188411 - DNA, 466 bp, Arabidopsis thaliana
  unsure (1)..(466): unsure at all n locations
cccacgggcggggggttttttttttttgccacccgccccaatcatttttggggaaacacccccccccgcccgaaggagggaagggggganggaaattccccccggggggggtgagggccccacacaccaaaaaaacanacccccagcgccaaaaaccaccccgacaaacggggccccccgccgcgccgacagccagccaaccgcccgccgcccacgcagcacccacaagggaagcgccccggcggaacgccggggagggaaggaccgcgcccaggagccccacgccgcggcctttttttatatcgggggggtggggcnccccacaacgatcccccacggcggcggccccaaacaaagagagggccgcagagaggacaacagcggcgacccactgggacggaaccgcggatcccgcgccagccccgtcccgatcaggtagacccacacagaagcccgacgcacgccc

SEQ ID NO: 188412 - DNA, 521 bp, Arabidopsis thaliana
  unsure (1)..(521): unsure at all n locations
gtgaactatagaagactttgacgtggcatcacgcgtacgtaagctcggaattcggctagagcatttccaccgcgtattgaggcactcacagaggaattggcttcatgcacaggaggaggctgattcgaaatctggtgacactttacatatgcgtagaggatcaactgctcgagagnnnnnnttngggttaaataataaaaaaattgaaagagggggagtttatttttntaggttgtgggggaatctccaggggggaaaaacaaaaaaaaccaaattccggattgtcaaattaaattttggtatcacggggttaggggccccttggatcgttacctaaagatagagtgaatcaaatcccggggggcgatcttttgggggttgaaaataacaacgatggtacgggtcctttgacgggtgggggagggttcactagaatgggacttttgctgtttggggggcaaggaaccctctcattcaggaaaccctttcttgtaaaatttggaagagggggccataatggg

SEQ ID NO: 188413 - DNA, 589 bp, Arabidopsis thaliana
tttttttgcagaataccccgctttatccgagggcccccgaacgccagcttcaccctcagttgccccgccgctttttttctccggggggtgggggtggacaaaaaaaatcccttgcggtatcaaggcccgtttccccgcctgcagatgaggtaagcagtaatccccatttgccccccgtccccccttttctatcccgctccgttttaccgcgtgtaccggcttgcgttacgtttttcgcttatccccccagcattttttttttcagggcggggggggaccgttgcgcgggggtgggggatttggacaaacaccattgcgttatcgtggcgagttttccccttccccgaatcgtcttttgaagtgacacgcatcgaccttactacccattctcatgttccatcccttacttgtatcatattcctccgcacccaatgttctatcccggcatcacgttgaaggaccccccatgtttccccaaatattttgctgcctccttcgccccccgtccacccgatgccacccggtggtcatcattaatgagatcggcgccccccaatcccccccctcccggttccagccccaaaccccc

SEQ ID NO: 188414 - DNA, 563 bp, Arabidopsis thaliana
gcaggaaagcgagccaggcacagcccgcacacacacttttgaagccccagaatttttgggaccccacgccgcgggggcagccacaatttaaccggggggagggcacggcaacacacccccgggacgggcatgacacgcaagacaggcaagcccgggacccacgcagcaagacacacagcgcgacaccaagccgagcccacaccccagacagcggcgcgccacgcgccgacccgcaccgagagcacccgacataagccaggccgcggccttttttttttccggggggtgtggcgcacacaccgcagcgcgcacccgcgccaaagagaaaagagacacagccacgaagacccaagagaggacacagccacccccaggccctcccacgaaccagggggcgcaaacaagacacaggcagaagaagacgccgaaacgccggcacaaccacggccgcacagccaacgacggaaacaccaggccccccccccgcaactcgcacgcaacggggacgaacacgagaggaagcgggcgcggaaggcgacgccatagcaaaagatgagacgaag

SEQ ID NO: 188415 - DNA, 234 bp, Arabidopsis thaliana
cgcccatccgtccgcctcgcgccctagtgccgctacaccgtccctccccttcttcgtccctctgcgcggcgctgccgccccccggttccccccacgccgtcccctccgccgcccccggtttttttttcgcggaggggggcgcccgctcacgtcacccccacccgctccacctaacgaatagcaacaccggcagcttaactgcgccccttcgtcgctcaaggcccccgggtccct

SEQ ID NO: 188416 - DNA, 481 bp, Arabidopsis thaliana
  unsure (1)..(481): unsure at all n locations
cgtcccacgcaccccctacctaaacttggatcctctaaacctttccccctttgtgtttttcttttttatattaagcacaaacaatcattttattataaccacacccttctatatctnncaaatcatttccacaatnaaaaattaaaaaaaaaataaactctttttattacaaccaaaacctcatnaatctttccccacctcacaattttttacatgggggaaacctttcaaacaaaaattccaaacacaaatccttctttnacccctaataacaaaccccctttactaaaaaaatcctttaatacttccccaaatctttctccaacccataaatttttttttcaaaaccaccctctaacaacccaatcttttttttaaaaccctctcccccctccaaatttatcaccccctcacccttcaaacctttctttaaaaattcactcttcacaacccaaacttctttttcaaaaccaaaaaaccc

SEQ ID NO: 188417 - DNA, 473 bp, Arabidopsis thaliana
  unsure (1)..(473): unsure at all n locations
actccatccccctactaacttgatcctctaacgtcccctgggttagccttaaaaaaataacccttttnnnnccaccaaaaccccttcttcaaaaaaaaataaacataaacactttaacagttaaaatctttactattataaacccttaaacatctataaccacttcaccctnaaaaattccctttattttttaacagggggggtgcccccccttacttctcttattaaaaaaaaaacaccctctacctcccttaataccctctccccccaaccctcctcatcctaaacttccccccacaaaaaacaaaaccctcntttttaaccccaaaccccttttccccctttttaaccctcccctttctcattacaccaaattttatttttttttttttaaaaccctctcccaaaaccccaaaactttcctttctttcactccccaaaaaacaaaacccttcctaaaaacacccctttaa

SEQ ID NO: 188418 - DNA, 404 bp, Arabidopsis thaliana
cgtttgttcgcacccgacggcgttctcgcagccgcaacgtaaggcgtcgtggcgtaggccgtacataagcttttagacgaaggcgacgactcgtagccacgaccagtccagatgtgttcgccataccaccaccgacagagaccgcacacgaagactcgttgtctcgaaggtagagaggaggcataaagcaacaactactcattcagatacctggcgtgatagagtgctacaccacaagacggaccttggagcagccaagagggcacgcttttttttctccagagttagagtcaccaacatcggaacgcgcacgccgatgcgctagaattgaactccgcgagtggcagtaggcaagatgacacgcagaaacagcggcgtgcccgccagcgaataagacagacgca

SEQ ID NO: 188419 - DNA, 447 bp, Arabidopsis thaliana
  unsure (1)..(447): unsure at all n locations
cgtccgcccccccgccccggcccggcggcgggagcgcgcggcgggaataatattttaagaggcccccgcccattgtggcgcccgagcagcccccggccgggcgccccgccgccagggcggccccctattttttgccccgtggggtgtggggggcctcataatatataaatagagcgcggaccgcgggcctccccgtgtctcctctgtgagcacctgtcggctcgtcggtgtgccttctgttcgatccgcccgctctccgcggcgctcgagttggccgtcgtcgccatggggtgttcgccactccccgtcgcgctcctctgctgtgccgccggctgagggtgggtgggcacctgtttttttctccgcgggggtggtgtccncggcgcgcccaggcgcatctctgttccgtatgaaaacaaactgcgtctgtctctgtctgctcgttcg

SEQ ID NO: 188420 - DNA, 531 bp, Arabidopsis thaliana
  unsure (1)..(531): unsure at all n locations
ctcccctccacgcctccctaaactttgatcctctacacccttcccccttttgttttttttttttacacataaacctcatgtttntatactttgcccataaaaaaacccttaaacactagatttagtttaaaatccaacctttttttttccccccaatgctccccattcactttttaccccattaaactaataagatttttttcaattcctcctaggggtgttttcanncccccttttttttttaaaaaaaanaaaacccccccttttttccccaatttaaaaaccccccccttaaaaatccccttcttcccttccaaattcccaacccaaattctttactcacaactttttttcccccccccctttcccctttcttttaaaaaaaacctctttttccctcccccccacctcccaatttatcacaccctttttctcccccccaaaccctcttcaccgaaccaattccctcccaacccccaaccctcttccttttttacttttttccttataaacaaaccccacaccccccct

SEQ ID NO: 188421 - DNA, 553 bp, Arabidopsis thaliana
  unsure (1)..(553): unsure at all n locations
acccccccaattcccagccaaaccgcccccaaacggaaaaggagcgagcaaattacccaaagagagagagggcgccacacaaaaaacgcaccgggcacccaaccgggcaccaaacncaacaggagaccaaccgccagcagtggagaccgtggacaccacctgcgcccacctgcggggaccggacaaagagacggcccaacacacgaccaaaccaggaagaccaaggccttttttttacaagggggggaagacgcaccccaagagcgacagcaccaaaaaaccacgaccccacccaccgactggaccaatagacacccaggacaaggccaagacacagaacagcgcgtgaagcgcgacgaacgcccaccagcgtgagagaaagcagagaacaaacgagaagcggccgccaagccaccacgcaacaagacaccaagaacccgaaaagacgtaaccacgacacaacccagagcacggccgcaagccgagaccgcgacaccaagcccaccaacacacgagaacagaaagagggcagagaacccgagcgcgccatagc

SEQ ID NO: 188422 - DNA, 468 bp, Arabidopsis thaliana
gggaacccgcccgacggggggaagcgcaccccgcattaccccgcggggaaacccccccacaaaccacagcgggaacacggccgaagcggagaaacagcggccggccaaccggacgaaaggccggaacgcagagcccagccgaccgccgccccaccccacagcggagaccacgaacgccgagagcctttttttttgggggtcgcgacagcaccgcaccccgcaagaagaaaagccccccgacccagcgaacgacggcccagcccaaccccgcccgcccccaggcggcggagcgcaaagagcacgaccaacggaccacaccacccgccgagagcccgcgcagagcagggcccgggggcggacaccgcagcacacgggccacaaagcgaccccccgcgcgacaagaggacagcggcgccaaaggccaaaacacggcggcacgcagcagacccgaggaacccgaccgccacc

SEQ ID NO: 188423 - DNA, 395 bp, Arabidopsis thaliana
  unsure (1)..(395): unsure at all n locations
aacagcgaacagaagcgatttttttttgccccccaacgattgaagggaggaacacccacgacaagcgaagaggaggacaccacccttttacgggggggggaaagcccgaccgaaacaacggagacgagacaagaacaagaccacgcacaaacgggaaaacgacggagacgggcgagacaacgaaggaaagcggcagggacaacgcgaaacggacgaaaggcagagaagaacgaagacagaaacagaagaaggggacagaggcaaagagaattttttttttccggggggggaggacccaagacaaacaaagaggggacgnaaagaaaagaaaccgaaggaggacaggccgcgcagacaagaaagagagcaccagcggaaccccgaaccacccgcga

SEQ ID NO: 188424 - DNA, 701 bp, Arabidopsis thaliana
  unsure (1)..(701): unsure at all n locations
ccccccccttttcccggggaagacctcccccccccctcccccataccccccgcccccaattttcccccttttccccccccctttgtttacactccccctttataccnaaaacaccttnnnncctcctcccttttttttntttccccacccccaaccctttttnncnttcaaacaaaaaccaacctcccttctccccctctcctcaaacttcacctccccccacaaatccctttttnaccccctccccatttctcccccctanctttcttccccttcnccccctctcttttctcggggcggttgtttgtccttttacacnacatccacccccccctttcacaacaccacccacaaagcccttcccccttttttcccttctcttccaaaggcttctcacacattgacttccccttctccttcccncacacaaccttcctcccacccacacccccccaaccctcttcctccccacacccttccgacttctttttctcctctccccccccacccccacttctttttttccctcccccacctctccccacctccttcctcaccatccttcttccctctcctccctatacacccctctcccctttcctcctctctcaaccaccccccacaactctccctcttcctcctcctccctctctttcttaccactctccctccccttcccaccctccccatctctctctctg

SEQ ID NO: 188425 - DNA, 440 bp, Arabidopsis thaliana
  unsure (1)..(440): unsure at all n locations
gaccacaggggaagtttttttttttatacacacggcgcaccttttcgagggagaaagaaagccacggaggtggcggcggagagcagaggagaccacctttttcctgtcacggggggagagcgaagcggacagcatacaagcgagcgtcacgagggaccactgtcgtccaggcgcccagtcggagcggaatagacactccagagctcacgcacacgtgccccccccgaacgaggcacggcgcgaatcataggggcgcnccacacagtgcgacccacaagcggacgcgccagagcaaggggattttttttcacgaggggggaacgggacgacacaggcaccccacagcgagcaacagataaataacaacagatgtcgatcgaaagataccagcgtgaggcgccgcttgcagccggaggactgacggtacagaacagagagtg

SEQ ID NO: 188426 - DNA, 284 bp, Arabidopsis thaliana
  unsure (1)..(284): unsure at all n locations
tttatttacccccccccccccaattttcgcgccggcccaccaccccggcagnatcgccgcgaagggcggccccgccattttttacagacggggggggtaggtgcctccggaaaagaaaatgccgcggaggggggcggcggcagcgaggtgtaggtacggtcgcggcggacggaatgctttctcgcatgcacgagggcagcacggtacaacatcgaacaagctgccggttagtcgacgggctaaaactgcggacggtactgagtccagcccaggcaaacgttttt

SEQ ID NO: 188427 - DNA, 416 bp, Arabidopsis thaliana
  unsure (1)..(416): unsure at all n locations
acgtggcgtcgccgcgtacgtaagcttggatcctctanagcggtcgcccccagggggagggcgatttaataaaaatttttttttatccttttttccaacggttttttttttaccccgcggtcggggggggggcgccttgtggggcggctttttttaaacccaccgggcagggaaattgggtcccccccgcgcctccccccccctttttattgggggggggggggaacncccccatgggggcctttntaaattaccaaccccccccggtgtggtttttggcttttcccctcccccgtgtaggttttcgccccacaaaaaggtccccccggggagaggacccccaccgtggcccactttttttgagaaaaaacgttccaaaaagggcgcccccccccgagggcaccgttctggggggg

SEQ ID NO: 188428 - DNA, 548 bp, Arabidopsis thaliana
  unsure (1)..(548): unsure at all n locations
cacgccttttaacagcgcggggggagacgaccacgagacacgacggaccaccacgcgcgcacacgcgaggcgcgacacgaagcggaaacggcgaggcggaaacaaaataacgcgacggccacgccaaacgccgacagccgacgccacccgacacaccccagacggaggagacgcggacagaagagggaaccgatttttttagaggggaggggcggagcgacaggcgagcgagcaggcggaaggcgtcggaagcaagcccgcaggacccgagcgcgcgcgaccccggccacgaccgccacccccacccgagaaggcaacccagcgcaccgacaccagcatcggcgcgccaacggacactaggcacgacnaccgaaggaggagacagggagagaagcgaagaaagcgaagaacacagtaacacccaacgcagaaggagtgcggctagtcgaaacagcntcgccagacggcgacagacgagaaaggacaccgagatggatggccacgagcgacgcgaagcccggccgagcgggaagaaacagccagaaacc

SEQ ID NO: 188429 - DNA, 282 bp, Arabidopsis thaliana
gagagaaccacccgaggcgcggggccagggacatttacacggggggacgcgaacaacaaaaaagcccacggcgcccaaggggcccgcaaacccgcaagagaagccgacaaggagagagagacagcggcccgacaagcaacgcggcacgcggagcacctacgcaggggaccgccaggcgcggcacgggagagagggcagcgttttttttccggggggggggggccgaaagaacaccagcggccgaagacgcgagaaaagacagcgcgcccgaagaacagccaa

SEQ ID NO: 188430 - DNA, 415 bp, Arabidopsis thaliana
  unsure (1)..(415): unsure at all n locations
cccccccaaaccccccccggggggttcttttttttttttcctttgccaaaaaaaattccctcccccaaacaaaagaaaaaaattttccgggggaaaacaccaaatttttataacagccgcgccggaaacgcccgcnactttttttttcgggggggggtgggggaaacaccccacccggtgaaagatggttaaaaaaagggggccccacatttttgggggagaccctcccccaccccccacccttagggagggtacccacattggtctgggcgggccccccggaaacattgcccccccctcatttgttttccaacccggaaaaaaaattttcgtacgcagctccgaccggcgccagaaaaaacaacccctcttttggcataaaagagacaccccccccccccggcggccggtgctc

SEQ ID NO: 188431 - DNA, 312 bp, Arabidopsis thaliana
accacaccaccccgcccgcggggaagaaaccaacaaccagacacaaatctttcgcaaaccacgggggggaaaaccccgccaccgcacaaaaaaaaccaaacgaagagaaaacaacaaccaagggccagaaagagcaaaagcaaaagcgaacaacacaaacaacaaccagacccaggcggagcgcacacggagacacaagaaccataagccgagcaagaccaaaaacaaagaaaacaacacaacagaacagacaacgcaagcgacgcagccacacaacgcgactttttcttaaagaagggggggaacgcaaca

SEQ ID NO: 188432 - DNA, 587 bp, Arabidopsis thaliana
  unsure (1)..(587): unsure at all n locations
acggggcaccacccgtccgtaagctcggaattcggctcgagttataaaccaggggatagggttcccttaaccctaaccacaacaattncgggggggtctctaggaaatatctcactccccgctctccttcggggcgtgtggtgtaatccggattttttgatggaaaccccggttcggggttttttcctcttagaatcccgtgtttgggggtttttctattttcccccccggggttttttttttngtggggggggtggggaancnccccccctccgtgcgtncaaaaaaaaaccaacaccctccccccaattccccttttctccttcncccctccccccctttttttcttaaaacaccctctttcttttttcacactcccccaacatttccccaacctcttcccccttctcaanaacagaattgcggttccgcctcccccggcgtttgcggacaggaaaccgcttcccccttatccgcccgccagtgggcgccgtttgtttcccccccgcgctccggggctgcccgcgccgcctggccggctcttttccacacgtcccccgccgttggtcagcccgcccccgtcacgg

SEQ ID NO: 188433 - DNA, 485 bp, Arabidopsis thaliana
cacggacgcacccaagcaaaaacaacaggagcacgccatttttttttttacccacccccccgaatttttgccgaccccaacccgaggccgacccagaaagcaaccacgacgcaaagctttttaaacaccacggggggaagagcccgcccaaaaaaaaaaacgcgggggggacgcaccagaccgggacaccgcgagcgcggccgacgccgcacaaccacgcacgcggacccaccgacagaacccaccaccaacaagcgacccgacgagcccgcaacaccacacacgaaacgcacccaagagcctaccgggagcgagcagacgcctttaacaacacggggggtgaaacaccagcaccaagcacacacccaacgcccaaaaacacaaaggcccaacgccaagacaacgacagagaggccaaaacccaacagccgcaaccaagcgaaacagccagccgacgacgcccaaaagcaacaaagaccacccac

SEQ ID NO: 188434 - DNA, 428 bp, Arabidopsis thaliana
  unsure (1)..(428): unsure at all n locations
gtaagctnggaattaggctcgagttttctttcaggggaaggcgtctaaaaaaaanccannnanatcactnattacaaacacatnttctttcctcaaccatttaactcttnntaaaaacaaatnnaactaaaaacttcatantcattcattaaaatatnntttaccttatcccccccanacttctccttggggaggtggggaccnaaccangggggccttcaaaccatcaaatccccacgttcctgtttcctttgtccccccccccttttgtaaatcctgcctttttcttcgggcaaagaacatgaacctttcccacttcttcaaaatggaacattcgtcttagctggttaatgtgatacttgagccgccactggcgtgaatattcgcgctccccacttacctttcgaagagacgcgctccccccgcta

SEQ ID NO: 188435 - DNA, 242 bp, Arabidopsis thaliana
gaccacacacaagcgagaaagccgcgacccgaatatttgaacaaggggggggggaagaccccgacaaaaaaaaaaaagggacgccggagacgacacaggcgaacgccgcgagagagcaagggaacccagacaggagcgcactagaaaggaaaggggagaggcgagcgcaaggaccgcccacacgcagacaaccgccaccacgaccacgcgcgagccgccgagccgcagggaacgcgcaccgc

SEQ ID NO: 188436 - DNA, 442 bp, Arabidopsis thaliana
  unsure (1)..(442): unsure at all n locations
aaatttcttctttctccaaaacccataagaaagaactacataccccccgtaccttgatctctatccccgccccaccccatttccaatatcaaccaatacctacttttgcaaaaaccactttcctacnttcctggggtcgaactnttataatttgccantcccaaaaaataataccaccaccattttttttcaaacctcccccccccctatnttctttaaccccacaattcttacttaaaaaaatttcttttccaaaattccttaatttcaacctcacaacaccccccccttttttttttacaaacctaaaccttttctctctcaccccccacncccaaaaaaaaaatcacttcnacccaaaacactcactttccccccttcttctcttttccaaaaattcacacactctcccctaacaaccccnatattaacttcccccccc

SEQ ID NO: 188437 - DNA, 441 bp, Arabidopsis thaliana
  unsure (1)..(441): unsure at all n locations
atgaatatgtaccttacaaatcttgagtccctgccgcgtactaagctcggaattcgctcatcaaaaagaggccaggctctnactatntctctctttctcttccngtgggtctatatttatatataaaaagacaagatctctggtctgaaattaaaagaatcttatttggggttttttcttaggattaacctctaatggcagatcaagtaaaagagctttttttagaggggggcgtctcctccccaagccctnttnaaaaaaaactcactctttatttcaagtgcctcccaccttctattacaaaattggaacctggttaaaaaaaaccccangccgggtctttttgaacctcttaaaagggcaaagccaacgttatgctggggggattcatatcactacttctcacagggggacaacccccattctaaatttttggctctc

SEQ ID NO: 188438 - DNA, 410 bp, Arabidopsis thaliana
gtgtcgcaccagcacgcacgcaacgcgaccttcggaagagcccagagagtttttttttttacatacccccccccttcacgacgagcggcaccccccgcgggagcgcagggacggaccgacattttaaccgcggggggtggcccggagcaaaaaaaaaacacacaccaccgaggcaaaagcacggccctgcggcccccaagcagcacagacccacgtgtaccatacacgcccaccccgcaacagcaatgtgacatgcgtgaacccccccctgaaacaccaagaagaggcaaaagaatgagagcgttttttcccggcggggagcgcccccgcagccccgccacgctcccacgaagctatgccacgttcctggtcgcagtccacatgaggcccccatgccccaccccaatgcc

SEQ ID NO: 188439 - DNA, 470 bp, Arabidopsis thaliana
  unsure (1)..(470): unsure at all n locations
gtgacacctatacaagatctatgacgtcgcatgcgcgcgtacgtaagctccgaattcagctcgaggtctnatcgtgggcttgggtactgaattcacataaaaattttaaaggaatgtgcataccctagctagggaagaagagaagactaactaaggatgggggggacttgtttctccggggaaacctctcacaacaatacccttttttcccaaaaaaatattttggggggggaaaaatnncaacaccaatccnnattaaaaaaaaatttcacctttttaacaaatcccctcccttttctccaaaaacccnaagtcctttctatccttacccttaaaaactttaaattcccaatttaaaacaacactctttataataacaaaaaccacacccctaccaattttaaattccaaaaaaaaaacaccttttttttttttaccccctccttcctaaaaaaaattttctctcaaaa

SEQ ID NO: 188440 - DNA, 260 bp, Arabidopsis thaliana
  unsure (1)..(260): unsure at all n locations
ccaaaacacacccttttttttttttttttggaggggcttccatcccctttaagagctcttgggttcttgaatggaccaggctttaaaagggacttggttttaacctccttttggttacaacccaaaaccctttccgggngaaggaacataaaagcccttttntggggggggagggttttccaaaaaaccttttccatttaaaaaaaaaaaagcccccctttttttcaaccaaccccctttcccccaatttttaaaaaaaa

SEQ ID NO: 188441 - DNA, 476 bp, Arabidopsis thaliana
  unsure (1)..(476): unsure at all n locations
ttttttttttttttttttttttttttttttttttttcgccacacaaaaaaaaattttcaacaacacccccccacacacccaaggggggtaaaaaaaaaggtcccaccccctcataatataactccattaataaacccgggaatacaaaaaaanattctcttccncccggggtgttggggggcacacccccaacggccttccaaaaatccatttataattcccccccaagggggggaccggtcttcccccacacacaccccccttttctttttttcccctccctttaaaaaaacctccacgcacccaaaaaaaaactcccacaaaaaaactcccttctcccacatctctctcgccaaaaaaatgtcgccgccccctctctcatatccccactcttataaaaaaccggcgggggggcgaggtttttcacacaaacacccccctcaaaaaaaacccacccaggcgccgcgcgggggggt

SEQ ID NO: 188442 - DNA, 280 bp, Arabidopsis thaliana
ccgagttttttttttttctttttgccgaatttattcacaggacaccaccggcgtgcaccacggacggcgcaccccgagaacttactgggcgtgggtaaaatcccggtcacaaaaaaacggcgcagcgtggtcatctccgcagcccctctgagatacgtatcatgcttcgttgttcttatgttataggcacgactgtttagcatcatttggtgctgcgtctagtattctggtgaaggtatgtttatagtgttattcagcagcaaggcgtttttttttttcc

SEQ ID NO: 188443 - DNA, 309 bp, Arabidopsis thaliana
gaggcggccggaccccacgcagcgcacagcgacgcggaccgcgggccggcgcgcagcaggcaccgcgggccccgcgcttttttttccggggggggccgcgcgaacgccgccggcgccgggccgagcggcggggcgcgccagcgcgccacgagcgcgcgaggccacggcaaacggcagcggaagagaggggggaggcggagggcggaagcggatcggacgccggagagacaggggcacacggaacaacgggcggcccagcgagagaacacacggcacagcggtacggcgcacagcggcgcggtcgccgcc

SEQ ID NO: 188444 - DNA, 516 bp, Arabidopsis thaliana
gaagccgacagccccgcaacagcaggcggcggcgcacgttaaggaggccaagccccgcgaattaagccaagcgcccaacgcgcagcacaccccgcgacccacagcacaaattttcagccggggggagggccgagcaaacgaacacccagacacgaaacacgagagcgaaacacgccagcccccgacggcaccaaggaagacgggcaagagaacacgccgacaagaagcccgacgaacgagcaaacaccggcgaggacaggagcgcgcccggctttttttaacgggggggaccgacccacgcagcgacaggcaacacaaaaccaggacccgcccgcggccaagaagccgactcccgaggcggagcgagtcgacgccgaggacgcggcagcccaaagaagcgaagaagacacaacaacaccacgacaccctacgcgcagagacgccgcagaaacaaccaggcaccagcaacaacccaccaacgaagacagcaagaaacaaaaacggagacgagaaggg

SEQ ID NO: 188445 - DNA, 406 bp, Arabidopsis thaliana
cgcgcaccacgacaccataaccccacagcaccaccagacccacacaccacccacctcaaagcgcccccccccccacatttaatcccaggcgcccacaccccccccaccgcaccccaccccgacgcaccccaaatttcccaaccggcgggaaagaccccacaacaacaaaacaaagaacacagagcagaaaccagccacaaacccacaagaacgcgcagcacggacgaacccccaacacaacaccagaagaacacaagcgcccgaagaaccaacgactccacaccaccagccccaaccaccaagaccacagccgaagccaaccagctcagcacgcacacccacggcttttcttttttccacggggggtggcccacccaaacacacccacacgccacaccgacccaaa

SEQ ID NO: 188446 - DNA, 311 bp, Arabidopsis thaliana
  unsure (1)..(311): unsure at all n locations
tttgtgtcccccacccccaaattcaccagcgacaacgaacccccacaaggcgagagacgcggcaagggggaaatttttcagcgcggggagagaaaaccccccgccacacaaaaaaacccgaaggacgcacgcgacggcagagacagcacaagagacgaagggnaggcagaacgacggacaaaaagagaagagggaggaagagaacagacacacagagagaaaccgaccacgccgcaccaacagcagccggcaaagcacaacaacggcacgcacagcaacccacacggcacccgttgtttttttagaggggg

SEQ ID NO: 188447 - DNA, 181 bp, Arabidopsis thaliana
ccatgcaagtgagttcgacggcaacaacgcgcaggccggttttttcttttcgatctccccccaaatttttttgtatgactagccaccagtgcggagcgcgaccgctcggctgtcggcgaccaatttttagccctgcggggcgaaattccatagcacactgcacgggccggggagaggggag

SEQ ID NO: 188448 - DNA, 285 bp, Arabidopsis thaliana
  unsure (1)..(285): unsure at all n locations
acagacgaccggacacaccgaggcccacgacgcgcgcagccccacacacgattctttacgtgcgccccccccgccaacaatattacggaccgcnaaccccgaacaaagccgacacacacgagaggagcacccgccgaatttccgacggccggggggcaagcccccgcaacaaacacacaccaagcccaacaagagaacaaaccccccccgccgaccaccaacagcagcggccagcaccgacgacgagaaacacaagaaaaggagaaaaccacacggccagcaacc

SEQ ID NO: 188449 - DNA, 460 bp, Arabidopsis thaliana
gccccgcggaggcgagcgcgcaatttaaccgaccggggggaagcccgcggaaaaaaaaagggcgggccagacaggacgcggcgggcgcggcggcgagaggaacggcgcagatgcacaagccgaccaggcaccaccacacgacacgaaagccggacgcgagaaaacgacagacgcgggggcgggggaggcacgagacgcttttttctcacaggggtgtaacgccgcgcgaccccgagaccgacagcccgaccgcaatatgcagagcccgcaggtcggacggaggggagcgccgggacagaggggcacacaccgccaaccgggcgcggaagcgacgaacccaacagaacttaaaaaagggccgcgacaccgaacagcgccgccggaaatcatggagaggagagaaggctaaaacgcaagagcccacatagaaagccaaagccccaagcacagcacacaagag

SEQ ID NO: 188450 - DNA, 524 bp, Arabidopsis thaliana
  unsure (1)..(524): unsure at all n locations
cccccccgcgccccgaaggcacccgaggcacaggaggggcaccttccaggcccgggggggaggccgccccaaaaanaaaaagcaggccgccggccgcgggcccggcgggcgcgcccggtgccccaggagacgggacgagggcccgcggaggccggcccccggcccgccacacgcgagaagggggccagaaagagccacccgccccgcaccaccccagaggggcccaggcgccagacgcgacggccgctttcttctcacccggggatggggtgccgccacagcacacacaccgccgcgcacgctcagcccgcagccaagacacccgcagcggccacgaggcgcaagagacgagacacgccatacgccccgcgccaccagacgccacggacacgaacgcgcgcacacggcagcccgcccgtncgcccgcggcccgccacatacacccacacgcgacggacgaccacaaacacccacgccacgctacgccacacagcgcgatccacaaacgaccacacagcgccgcg

SEQ ID NO: 188451 - DNA, 313 bp, Arabidopsis thaliana
caaaaaaaacttgtttttttattaaaaaaaaaaagggggtgtcttatcattttatcccatttaaaagaaccatttatttgttacttaaaaaaaaagggggatctattaggggggttgtgtttacaccatgtagataacaaagtttttacctggatttgaggttccttgccattttgttcttttctctgattgcagcgtttttaaatacgccagcgatgaataagtagaaatattttttttgaaccgcccccaatttttctattttgtccatatataggtatgaactgtgccgagatcatggagggttgcatat

SEQ ID NO: 188452 - DNA, 381 bp, Arabidopsis thaliana
  unsure (1)..(381): unsure at all n locations
taattcttcgaaaactcactgtggtggactctggaggttaaaaagagggntactttctttgggctcattagattttctagggggggggacaaagagaccttgtgtttttgagacaaaaaagggggattcccattttaatgccttgaaagaatagatggttattaccccaagaaaaagtgattttaaggggattagttaaccaaggttagaacaaggtgacggggattgaatacttgagcattataagatttctggtaatacgaaggtatgaaaccgagccgaaaaatgggaagaatatgcatttgaacccccacaattgcctttttttcatttctggataaattggcccgagacaagaagggtccagcatttttacacatt

SEQ ID NO: 188453 - DNA, 524 bp, Arabidopsis thaliana
gcacgcgtgccgaagctgggatcctctacagctttcgacggggggtaaagcctttcttctatttacaccaaggaaaccacctcgaacttggattaagaagagatagctgatgttacaccatggctaacaatgtgccacctgccagacccagaaactggtgagttttctcaaagatgaaatttcttacaaaacatcttctttcagagtgtaacgcacaaaacaacccggaaccgtgataaaaaatgggcccccaataaaaaatgggcttctgcgctgcggggggccaaaagcgtttatttttgacgaggtatacgtggctgagcgtggcactcttgagaggtattatttaggcacccaataaagagagactaacattcccaagatagcaaaataaagaagtcccgaggggtaaatggacggagaattcctatacagccgattttaggggggaagagtaccgcgaatctcacacaaacatttaccccgtccagtctcaccatcgcaccgacgtatacttccaagaa

SEQ ID NO: 188454 - DNA, 649 bp, Arabidopsis thaliana
  unsure (1)..(649): unsure at all n locations
ggggggagaggggggggaggaggagaactaatgataggaccaccccccccgatctttaggaagccaggccccgccctcccccctttgctccccccccagcctcctctctcctttttcatgaggggtggtggggttttttaataaaaatctgccggtccttttcttttctcttttttactcgtctcaattgcctccttcgcctctctctcttttctcgctttttttcccgatctcctcactcttccctcctctctcctactcctctctctctcctctatcccctcattacgtcctgcgcatttnttttttcttttaggggggggttgtgctcctttccctcgttgccgtctcttacaaaaaaaataaactcctctcttttcgcgtgtttctccttccttctccctcttcgtctatcctcttcctctccgttcctctgtattctcgtttgcctctcgctacctctctctcgccgttcccttttcctctccatttcttctgtcatcttttctgttcgtttatgccattcgttccctctcctctttcccacccctcctctcccctcctctgttccctctacctctcttcttctctcctctctgtcaccttcactctcacctctcctccttccctttcccgtccttcttagtct

SEQ ID NO: 188455 - DNA, 526 bp, Arabidopsis thaliana
tcacttttagggaaggtggcacgcctggctaggacccgggaccgaattacctggttggaccaagcggtcggccacccgtagaaaaaccctcaatttgtcccccacccttaaaagcgggcccctcgatccgacctaaaaagaatttctacccaagaacccggctttgtaaatacttacttacacattcgaaaaataattcatcccattactgcaaaaagccgagtcataaccgccgagttccccgagccccaacttgccgaagtaaccgcccccccagatcaacctacactttaccgtcatatattagttaccgcgcccaaacccgtgttacgagatcggtagctaatcacccttttggcggtctgactttacccttctctagccagtttctgcagtaaatacactcccatttaccacttaaaagtatccaggtgtacgttttcctgtgaagtacaaataggggtcacgtgcaaaaggcctagccctatccccagtagatcggaatcatgtgtcttccccccccgtt

SEQ ID NO: 188456 - DNA, 460 bp, Arabidopsis thaliana
  unsure (1)..(460): unsure at all n locations
gcccaggggcgcggggggggcgggggggccttcgggggggggggtaaagcccagaaaggaggggngggggggcggggggggcagcgccggaaaaaggaaagccagggccgcgcagcgaggacgcccgggaagaggagggacgggggaggcgaggggacaggagaagagagggcacagcgagacgaacaggaggggagagcagcgttttttaggagaggtgggagacggcgcacgaggagcgaaccgcaggaagccggacgccacacagcggacgcgaacccaccaacacagacgaagagagagaacaacaccgaacaagacagaacgaccggcgagaaccgcgaagacacagacgagagagcgagcgcagagagaagacgagagggggagggagagagagaaggggagacggagaagggagcgcgcacacgggaggacacacagacggaagcggagccgg

SEQ ID NO: 188457 - DNA, 507 bp, Arabidopsis thaliana
  unsure (1)..(507): unsure at all n locations
ccgcgtacgtaagcttggatcctctagagcggtcngcgcgggggttttaaaccatttaatttttttaggaagatattggaggatattgttccttttctgttgagaagggaaaaaaaaggacaattctttcccatcaaatgactgaggttgggattcccaacggagataaccttttggcccccattctagaggcttttcaatggggggggtccattgggaggacttttataataaaaaaggtttgcccacttgaaaaccaaccggggttctccaaattcctgggggagtttttttttaaaaaatttttttttttttaaaaacacccgtttcattaggttttggccgaaccagcaaacctctttctctttttttgttgggggccccttctcttgtgtggcctagctcccaagtttttttcccccaaaaaaaccccactttggacccaaccaatcggatattgatcttcttcaccccccttttttgaaacccatttttggccaattctcc

SEQ ID NO: 188458 - DNA, 591 bp, Arabidopsis thaliana
cgcagggaagagaaaattggtatgtcggttttatccactcatttagggaaagctggtacgcctgcacggaccggtccgggatttccggggccgcccaagccttcgttgaaaaaaactggcataagacaaaaaaggccgaaactcttcacccttcgttgttgaagggacaagccgccttagccataaaggtgtatcccatcggttgagggttaattttaccagctccccggttctcggttattcggatgcttgtaagccaaatacaccatttccgtcggaacgttgtggcttacgcgtacaattccgacaactctgtccccacgaacagtatatggttcattcttagccacactatatcgcaaactctataacaggttacaaggacttttttcctaaccccgacaggcgcagagttcacataacgggtccgaacagcccctctcatatcctatatccctcaccatgccagtacatcaatgtcgttacttaggctttattagcgactagtctgaaatctagtcgccaacacctttgcacaagtacatgagtcaagagaaggccgggagcctcacttacatacaaatttatttt

SEQ ID NO: 188459 - DNA, 378 bp, Arabidopsis thaliana
ttgtttttatcctccattaaggcgcgcgcggggatttgtgggagatacccaagaggttgctgtttttttatcgatctaaatcgaaggacctcgctcccacctgtcgaacttcaggcccgaaattttgttagaggaggcttgcgtatatggagatgggtgtgggcgccatcatactaacgacccacatgacatcaatcccattacgattactgggccgagtatgtggacgtatagggctgtatggaacaatgtataaatgttaaccgtagttagcacctgcgtctacgtgcccgcacgtagtcatgtcgccgttagcacagggtcgatgattagcgtcggaatagagatgactgaagccatctgagatatccccgttct

SEQ ID NO: 188460 - DNA, 568 bp, Arabidopsis thaliana
ccccccaggattgagaggggaaaccccggcgagtgcagataaatttcaacgattatctaaatttacagcccatggggtagcagatcagcatataaggagagagacgaatgcgggcggcttcttttccaaatcaagtagtaagcaatataagctgttcctacgccgccgccccgatgcttcacgtcggggactcttacacatggtctccctagtgcgatcagaccgatagcacgaacggcgcagtattttttttaatcaggggggggaacgaaccccacgtcgaggaattaggaggggtgagatttacccaccatataagggggggtaaagattagcagcacgatatttgaagatcgcgactgcacacagacaaaagaaatagtaaatagcgaggatgaatataacatagggataccgtgcagccacacacggaaaacaatggatggagaatgaaatccaaacacaacatatgaagattcacaccaggatcaaatgatatgtcgagataatcacatcaagtgaagtgccgagcaaagtgaagcctgggtagtgtgataattaatgtacc

SEQ ID NO: 188461 - DNA, 341 bp, Arabidopsis thaliana
  unsure (1)..(341): unsure at all n locations
acccccgggacttttttgggaggagagcgcgcgcggggggccgcgcggcgggggtgtccgacgagttttatttgagggatggagtaccgccccaagctcaaccggcaacaggccgcagcgcgaggggacgccgttaggtagcgtctacgccgttatacttctaagtagcgtagaggcgagccggagagataacgagagggagtagacagcacgacacagtctatggtcgatctacacgtcgccacagcgaacaaaagccgagatcttttttttctgagacgggagcccagcaatanagtggcaccatcgcccgcccccacgcgtttccggccacaccgcgc

SEQ ID NO: 188462 - DNA, 435 bp, Arabidopsis thaliana
  unsure (1)..(435): unsure at all n locations
caaaaaaaaatctcccccttctctctcccccttttctcaccacatacatcttactcctctccccctattttacaatccctccccctctcatttacacttctaatccctactcacccttctcttttccccacattttttttttttgggggggggtggcctccnccttctgggggnttataaaaaaaaaaaacccctctggccggctacctctgcttgttttctctcattagacgccgcccatttcttctccggattttttgcgtacctgatttgtgctcgcattcacatctaattcttgtagcgcggttgtcgtaatttatctgtacaccctttaccttcttattctcattctttttttactcttatcaacctctcaatcataccgacatgcaacgtgcgctctctttattcgacgcccctttcctcaccaacata

SEQ ID NO: 188463 - DNA, 510 bp, Arabidopsis thaliana
  unsure (1)..(510): unsure at all n locations
aaaaggccaaaacgggaggacggcncggggcaaacgcagaccccaagaagacagaggggccggacgaaggaagagggagcaaaagcgacgagaccgaccgagcgagcggagagagagggaaaaagggacggcggggagagggaggaggaaggaggggggaggagacaagacaagagagggagagcgaaagaagggacgcgcagaaaggacagaggagaaaaggcgctcggagcgggaaagcgcccgaatagggcggcggagggagaagaccggaggagggggacaggaaaaagagaagaaacaggaacgggacgagagcacagacgagccacacggacagcgggggagggagaagggaggggggggggagggggaggaggagagggagcgagaaaggcgaagaacgcaggggacgaaagggggacgggaggaggcagggccgacggacgcgggaggaggacaggagaggaacagcgcgagaagaaaggccgggagaggagccgaggaaag

SEQ ID NO: 188464 - DNA, 256 bp, Arabidopsis thaliana
  unsure (1)..(256): unsure at all n locations
ggggggaggggtaaacccccgaaaaagaggncgacaaagaaaaaaggaagcgaggggagaggcggcggcgcgcgggaccacgccacagaggagacgtgaccaaggcgcgcagacagcccgcgagaagggaacgaacaaaacgggcaaggaacacacgagaggcggagagaaaagcaggagaggaggatttttttttccacggcgggagagggaagacgcgcccggcgcgccgacaggcccgacgccgaggcccaac

SEQ ID NO: 188465 - DNA, 478 bp, Arabidopsis thaliana
  unsure (1)..(478): unsure at all n locations
agctaggatcctatagagatgacggggggggggtaagccgaanacaagnaagcgccaggaggaggccaccacggagaaaaagggcaaacacaaaggcgggcggcttttaaaaccagataaggaaatatgggagcaaaggagaggggacccacggacaggggttgaaaacggagcgccacagacattttttagggggggggggatatatggggaggttatggccccggagttgacgcacgaacaaaggggaaagggagaactcgtgggaaaggggaacctttggcattgaaggggaaggaagcgaggtgggaaaccctcgcgatagaaaggcgaaggaaagagcacggaggagaataacaaaagcgccgtagcaacgcagaggggccgtggaaagccggggggggggagatttccgttcttgcccacaaccggcattttggacacgagaaaacaaaaggaaagatccagagacctgacg

SEQ ID NO: 188466 - DNA, 243 bp, Arabidopsis thaliana
agaacccagctctatacgactattaggaagctgtcgctgagtacggtcggattcgggtgaccacgcgtcgcacgcgtcgaacataatgactattctatctttcttctttttcatttctatttaacttgtcgacacggcggtaactaactaccgcagtcatgacattcgaatgaactcactctagtacatcacgaatttttttaatttacacgcagatttttactggttgcagtttggttttac

SEQ ID NO: 188467 - DNA, 614 bp, Arabidopsis thaliana
  unsure (1)..(614): unsure at all n locations
tttccccgggggngggggggggggggggggggtaattcctccccacttctcttcccctgatcttaagggaaacctcttcccccctccatataccccctcccccaatttcctcttttcaccccccgcgtcggggaccccaaatattccccccaatcccccaacctttttttcctcnntaaatctttcccttccatttcccttanaaacccctttttttctcctccacaaaacctcaaccttccctttatcctcccccccccttctcttttttctttccattcccaattttnatttatattttttttgggggggagggctttnatttcttcgcggggctttttctttaaaaaaaaaattcgacccctctcttccatcgattttaaataaaacccccctcgcaccgctgcttacttcccccccccccgctgctctttttccctccctcgccttcttcccaagggagcgcttttttccaacccacccctcttttattcccatacatccctttttctcccccaaaaaaccccctcttcccgcccttgcttctttctctctctttcacccggcgccctcttctcttcacccccgttttcaaccaccctctcccttccccc

SEQ ID NO: 188468 - DNA, 187 bp, Arabidopsis thaliana
ccctatcatattgagtgccggcgcgatccggcacactcgccgctcgcagcgaatgacggagtattaacaattaagctcatcacgtttaatgactttaattggtttgttacttgtatataggtacccgtgtttcagggtaactggaaagtcaacctccgattatggtttccctaaaaacacaaaaatt

SEQ ID NO: 188469 - DNA, 429 bp, Arabidopsis thaliana
gtgaaaagagaggcggaaaggaggagggtagtgtacggagggagagagaagctccatgctattgtcctgactacctatgtggtgatagccgacgacggccttgctggctcccgaatccgggaaccccgtggagtcgtgaatatgatgtctcccatagtgtcaaaggaggcacgcttgttatttgctagccacctacatatttaggaaacctatggtagatattaccgtcagccaaccgctaaacgctcacattctccctccctccgctgtcattacctctcattcgaaggaacagggtatatctccacagaccgcgtaacacgatatcggcaaggacgctgatgggtcacgcagagatatgccagcgaatgctaatcaccacagtcatgttttaagctgcgagcgagagtacaacaccagcgtagtacg

SEQ ID NO: 188470 - DNA, 444 bp, Arabidopsis thaliana
ccccagagttttaagggaaaagcaccgcccccctccccggtacccgacccccacattcccccatttccacccccgcggggcgggggagcccaaaaaaaatattttttttttcatttgacttaacaagggcagaaacatctccttacccgtccccttttttttccaaagagcctcagatcttcccgcttcgagaggcctctccgctcttcactgttgcggcggcaaacaaacacacaaaatacatgtcctccctcttcttcaaagggggggggggttgacctccttgtgggggtttctccaaaaaaaaattctcgcttcacgtccggtcgcgcgtttgcccccgcctcgtgctcaaaggcgactacacaccccctgcctgtttgccccgctgcagctctgcagaagaatgggccgccgcgataacgttactcgcccccgccccac

SEQ ID NO: 188471 - DNA, 472 bp, Arabidopsis thaliana
  unsure (1)..(472): unsure at all n locations
gtaagcttggatcctctagagctgccgcgcgggggttagcccannngnaaaagacactgggcttcataaccttttgtatacaaaacgcaggtacaacagaatcgcccaactgtttagtgtgaccaggctcgggcaagagttttcaaatcttccaaacgaccggttaaaataaaatcgatccctatttaagaggggggaacacagtgtcatcatatctggcttataaaaccccaccccgtccttaagggaacatatcccaattcaatctccaataccgattcccaacccacataagatgtgttatcaagactccaattaatcgcgactaaaacccctccctagagaacaaacgaaccatgactcattcccgattgatcccgccccactgggggccgctcaccctaccaacccagagaagggggtgatactgacactggacggctgagcgttttcgcaacactggccgctggct

SEQ ID NO: 188472 - DNA, 120 bp, Arabidopsis thaliana
ctggccgggtaacgcgggtgctagggaatatcgctgagtcccgtgagccaagtccgcctccagtgaagccgcatgacgccagacccgcaagaggaatgaacaagccaacgccaccgagag

SEQ ID NO: 188473 - DNA, 696 bp, Arabidopsis thaliana
gacaagggacgcgctcctaagacgagcccactacatccgcaggagactgctagcaccccacgatgctcacgcagcgccggaatgacattatccccggtgcagcccggcgcatcttacgcatgggcaatcgcggccatgataatatacgctggactcgccctcctctatcggcgccccgcacgggatatgcagcataggatacatatcgctttcagaaccgcggagaggattgtgagctgctccttgggggagaggagggtatagatccagcactctgtacgatctagagcaagagtttctatgatcggacccccggcgccgctatgttcctgattattctgggactgatatcaccgctcactgttgtacgccgtacccccgtacccacgcgatgtttttttatatgctccagcgccgcacccccgtggtcgcggacacatgtatcacctttcccgcatgttgcgtgagcactttacagctgtctcctggcggcagtgagtagtagcgatttgcgtctcctgtgtgccggagttattgaccctgagttgcgccgtgcgtgccacgttagttcgatgctctgtctaccgggcaccaggtggcgccttttgtgtcatacaagtatctacacaaccctgtactcctagcgtcctagataggaggggggtccctgcgtcgattctgtaggatccagggttt

SEQ ID NO: 188474 - DNA, 614 bp, Arabidopsis thaliana
  unsure (1)..(614): unsure at all n locations
ggcggggggggggggggggggaagactctcgggtacacaccccccgacttggggggaaggcccttcccctcccaggacccgtgcccgaatttcccttttcccccccggggtagggggtttttaaacaaaaannngttttccttttaaaaaaataacaccccgaaaccctgggagtccctttttactaatcccccattttttctttttggaaaaggatggtctctatattgtgggggatcgactttaaagaatggggcgggacccgccctttgggctattttttttcgggggggggggggatacacctctcttcgggggtgcggcccaaaaaaaacaaaaaggcggtggggggggtggcgaagttccctgccccctacccccccccgctactcaccaaaaaaccccagccgttgggggtgcgcttgcctctaaaaccccacaacaaccttctggtgttggggggggtgaccctcgcatttggctggcgcccccccccagggcctccctctcccgcgtctcctctctcttcgacccccgccgcgctctcgcacgtcctccctccccacccccgcccccgcggaagacagctgtatttaacactccgtcctccctcg

SEQ ID NO: 188475 - DNA, 479 bp, Arabidopsis thaliana
agaaagaagggaagggaggaaggactcttttttacaaccccccgattctggggagggacgaaacccggagccatagggagtgtaagatctttttgaggggggaggggctcgtaataaaatctctctaaatatcggaggtgacgtaataattctcactaacgggttgtggggtgaactctgtgcatggcacgccaaacacctggaacggtaagtaacatataataaaagaagatgacgaaacaccgagaagtcatttcttttgacggggaggggagcgagataatcatgatgaagaccatctagtaattaaaagatcgaggtaccgtgacgaggatgagagcgattcagtgacctgaccgggaataatactgcgaaatactttacactttgcgttcatgagtggatgctatttataaggttacaagatatcaattcggatagaaagaacggtaacattgtgcgacccgtacgatgatgat

SEQ ID NO: 188476 - DNA, 331 bp, Arabidopsis thaliana
gcgaacgaagcacgagacataaggacgagtattgtgtacgcgagccgtcccgaacgttttccctttgacaccgtcggggagggagcggagagacaaataaccagatcacctcgtcgctgcggataagcgacatgaaatcctatgtcatgagggacgtgtccgcaacgcagatggttagttagtcatacatggaggaagttcgccggtagttcaagtcaggcagtaaaggagaattacgacgccataagagaaaccaccaatgctataaaccagggtagcttgctctcaaacggggagcgagcaacacgatgactacgagcgccgtgccgag

SEQ ID NO: 188477 - DNA, 390 bp, Arabidopsis thaliana
ttcttacaacctaatttcactcaatcaaatctttctctatccacctaatttttttatatatgagaggcaatactctttttaacaatatttcatcaaataaaaaaaaaacccccatactttaatctatctcatcacacctcttaacctacatccacctataatacatctagtcctacaaatcaattaacaaccactctctcactaattaattttaatacaatcttattattatattttcctccaaatagatctaatacatactcaacccttcattacccccataacactttcatcctacttcccctaccaacacctctacacatatcctcttaatatatatctattcattatattaataatatttattacattcacttacatacaatacat

SEQ ID NO: 188478 - DNA, 477 bp, Arabidopsis thaliana
caatcttttcttttctttttccttttttttatacaaaaacactttatctctaaccttttttagctcatcctatcttagctctcaccctatgttttcatctcacccccaacatatctattacttcaatttccccctcctctacccactcccactcctcacctatttcttcttttttctgaaaggaggggggaaaaatcattctatctggtccacactaaaacaaaaaaacattctccttctcctctctattcttttttcttctcttccctactctccatttttctctcatcatattctgtcatatcctacacttccatcttactactatccctcctcaccctacaaataagtatttcagccttattatacatataactttacatatactctcaatatattaccacaatcacctctcatcctccaatcctctctccttcactttcttatctccactcatactcccatcttaactcttcc

SEQ ID NO: 188479 - DNA, 257 bp, Arabidopsis thaliana
cggggggtatagcgggggacgggccgggaccggcccagcgaggccgcggtatcgaggggcatgcctcgccatactggtgccgtgcgtgtgaatcgcccgctagagtattgtatgcgtcggcccgcgccaccgagtatgttgtacctggttcgtggtgagaagagacgccagtggaaagccgtgtgcgcctggctcccgcatccatgccccgaagtggacgaggagtacgattaccctccaggcccctgtacaggttc

SEQ ID NO: 188480 - DNA, 494 bp, Arabidopsis thaliana
  unsure (1)..(494): unsure at all n locations
gcgcgccggggcngggagccgtagaggttcgggggggggtaaacccngacaggaaaaaaaagagagagagggaacgaccgctcggggaagcgagacgccgaaggggagaaaaaagggcactaccggcgggggcgccaaaagtggaggagggcgacgatagcccgtggggactcgccgacagttcttatgagggggggggcaagcgccaaattcgcgaaggaagaacaaaccaccgcgcccaacgtggggctcgcggaaaacccgcaagcgaggcacgggaggaaggaaggacacacgcgagggaggggaaagcgcgggggggcaggcggggaaagcgaagggacgggagaggcgcgcggggcggggggagaaggcgcccgaggaggcggggagggggggcgagggccgcggagggggggcaagacaagagcgccgtaaaagggagggccgaggcagcgcgcgaccaagggcgagggcacagggcccaaggaggg

SEQ ID NO: 188481 - DNA, 381 bp, Arabidopsis thaliana
aaaacgcaagacaacagaaccggccaaccgggcaggggagccaggcgcgggcaaggagggacaaaaccaccaaacgaccggggaaaagaaaatgggcaacttttttttgaggggggtgaacccgcgcccctcataacctggcttatagaaaacccccccccggtgcttagggggaacatatcacatttcaatttttcccaataccacccccaacatccataaggagggggatataagaccccactaattcgggccttaaccctatttccagaaaaacaaccagactggagcctcacccccctttaccacctctccccggtggacgcataccctcccaaccgcaaagaacgggtcgttagcacgtacaggtacacccccgtc

SEQ ID NO: 188482 - DNA, 566 bp, Arabidopsis thaliana
  unsure (1)..(566): unsure at all n locations
ggggggggggggggggggtaatacctggtgaggtgacaattcccataactttangggaaggtcgtgccccctccaggtacccggtcccggaattccctggtccaccccagggggcgggtgagtttaaaaaaaaaanaagttnnactttttaaatttcaaattataaaaacttnnataaaaggcttacctccttttccctgtgttactcanaaaacccgccttctgaagggggaaaccattattcctatttctaaaaacctttctttttgggggggggcgcataaaacggggggtgttttttataaaaaagatgtggggagattgtttggcccgtttttgctcttattggacactcccgaaacctaaataagaagaaaaggggcgccgaggggttgaaacctttttttttaaagaaacccccgccttttaagttttaaagaggggaatccttcctttgaacaagatcttttgaaaaattggagcgcgaaaactcacaaagccctgaactttgaaaaccccggtgaacgcaggtttttaggtaaaatccccagttttcccctcgtggt

SEQ ID NO: 188483 - DNA, 417 bp, Arabidopsis thaliana
  unsure (1)..(417): unsure at all n locations
ggggggggngggggggggaatacctaccagctacaacccactactaanggaaactcgtcccttcagtacccgtccgaattccctttccaccacagctacggggatgaaataaanattttttaattttttntaccatcttcatgcactggatgaatcgcaacaaattctaccaggaggagtcattgacacacaaaaactactggaacattcaacgtgttaatcaacnaaactaactgatgggggggcatcttacctcagcataccctaaaaaaaataccccaanaaaattgtttgcccacttcttttaaaaaacataccattccattttttagcatcatgggggcttttgttcctttggggggagggtgaccgcattttggattgagccttttccatgggcccctctttggtctcccc

SEQ ID NO: 188484 - DNA, 177 bp, Arabidopsis thaliana
tgtattggggtgtgtggtgttctctcataggagaagtcgcctaatctcccgtgatctgcccttctattatttcacaatcctgcgccagtttttgggacgcgcacctcctgcgtatgttcaatccttgttttgcgatacagagtagagttagtgtttgaatagcggatcgcccagccc

SEQ ID NO: 188485 - DNA, 545 bp, Arabidopsis thaliana
  unsure (1)..(545): unsure at all n locations
cccgagagggggcgcgcgtggtaatatggggggggggaaggcggggncacgaaggccgccgagtgggcggcgggggggcgaggcgagccatccacacgcaccgcaggggagaggcggggggggcggggggaagggcggcgggggcggcgcgggcgcgggcgcagaggcgagcgcgagtgcggggagctgtgttttctaggggggtgggagagacaaccacggggagggcggagngggggggggagagcagggcgggttgtggtagcgttggagcggggaggggtagtgtggggtgcggcgtgcggtggcgtgcgggcgagcggggaaggggcggcggagtggtgtggggggaactgggtgagcggggagagtgggggtggaggcggttgggttgggcggcgtggggggcgggacggtgggttggggttggcgggtgccgagggtgcggcgagtgagttgtgacacagtaacgcgacgcgatgcggcgctgcgccagggggggggagggccgccgtgggggcgggggggggcgacggggggggcgg

SEQ ID NO: 188486 - DNA, 542 bp, Arabidopsis thaliana
  unsure (1)..(542): unsure at all n locations
ccgagggggggaataaggggggggggtaaaccccgggggaggcagcaggngcgagaaaaacgcgacccggtcagcggcaaaccacacggggaggcgcaacagagacacaagaagcgaaccgcgagaagacgcgagaagggaagagacagggggacagggagaagggaaagggagactaaacattttttttttcgaggggtggggaagaagcgaacgggacggaagccatgggcgaaagataaggcagggagcaaaggaagggaagaagcagaaggactataacgcaagaacaagagggatggagggaccgacgcaaccggagtacaagggagagtgaagaagggtaagaggaagggaaggagcgcgagcgcgaggacggcacgagacaaacacaggagggccgcaaatgagaagagcggaactgcgcgggggggggaggagaggagaaggaggagatagagagagcgacaaggcaaaagagagaagagagaggagagaagaaggagacataaacagacaaaccaagagattcaataaatacg

SEQ ID NO: 188487 - DNA, 557 bp, Arabidopsis thaliana columbia
  unsure (1)..(557): unsure at all n locations
ctccagctctatacgactcactatatgggaagctgttacgcctgcaagtaccggtcccggaataatttccgggtccgaccagctcactaatccgcggccccccctttttttttttttttttttttttttttttggggattttttttttttttttttttttttttttttttttttatctttttttatttttttttttnnncccttttaacccaaattccaattttcaaaccccttttttcaaaatttaaactttttttttttggcacttaaaataaattcctctcccccttttttaaaccccaataatttgaaaaaaccctggttttcccaaatttaacccttttaaaaaattcccccttttccaactttgggtaaaaaaaaaaaaagcccccccatccccctttccaaaaatttacacctcctataatgaaaattcccaccccccttttacccccacaaaaaaacccaggggtgtttggttgttatacccccaataaaaccttttatttttcaacagcccctaaaccccggactttaaatttttttcccttcttttc

SEQ ID NO: 188488 - DNA, 548 bp, Arabidopsis thaliana
ccccccctccgcggtggcccccgcccgcggaattaatttcacccttttttttgggggcgcacgcgggtgggaaaaacaaaaacccttctctctttttcttttcttttttttctaacaaaaccccacagcgcgcaacgtcgggaaagattccaccccccccccccccgaaacagcactctcgtagtgggtgcgggaacaaaaagcgccgtcccgcgcgggcggagaatcgcgcgcgcaagacaacccacacctcttcttcccggcgggggggggctcttcccctccccggcgggagggcttcccaaaaaaaaacacgccgccgcgaccgcgcccccacacacgcagcagactcccactgccccctcgacggggccgcgcgccgaccacgcgcgtcgcctcgtcgggggcaccgcccccgcacctcgcgccgcgacggcacaagcgtcgggcaacctgagagcgcgctaagccgcagcatgtcgcgggcacgcgcacacgcgccgagcgcgggccgacgcgggccgccccctccggccgcccagcgagcg

SEQ ID NO: 188489 - DNA, 549 bp, Arabidopsis thaliana
  unsure (1)..(549): unsure at all n locations
gggggnggggggaaaactctcagtacaaccccccaccttagggaaaccgccccccccgcaccccccccgataaattcctctttccagggggagaggggccaaaaaaaaaactttttttttttttttacctcccaaccaaccacaacacataaaaaagagggcgcaacccacacaaagaggaccttggggggaaggatttccaacccggcttcgcataaaacaacacctcttttcacatcaaaaaaaccacacacccggtctctcttctcgcggagggagggggtaacaaccctnctgcgggggtcttcccccaaaaacacacaacacgccacacccgtcgttgtgtgttctttgccgccgcacccagatattaagacgcagacgggaaaaatccctcctccaaaaggccctccagcgggtcccccctcctcctccaacagacggtgataaaccacacaatacgcgccacgcgctcttgctcagccaaatcacaaatcctagaccactatcccgcggaggtacacgcgggctttttcttgcatactaacg

SEQ ID NO: 188490 - DNA, 369 bp, Arabidopsis thaliana
gtattacatgtccagcccttcctcattacaggaacgggtattagtaagacgccccaaagcacttaatacggaatccaattatacggggaaaaggctgcgaccccttggccaggccccccggaccggaatatacccggccaccacacttactgtgaacgagggaaagatttacactgaaatagttatccttcgccccccccgacaacctcctttttttctttcgcagagaaaggaggatacatcccccactatcctcctatacaataattatatgtatgtgctatatgcccctttaacccatcattatccctgattcgtaccagatccattttccactccttttcttgcaacacatgctttattatgtat

SEQ ID NO: 188491 - DNA, 401 bp, Arabidopsis thaliana
  unsure (1)..(401): unsure at all n locations
gcaggtgtccttacactacactttagggcgagatggtagcgcctggaggcaccggtcgtcgtaatgcccgtattacaccatccgccgagccacttgacaaccacgattggtatcggtggcccctattatatctcgccccccctggggtggccgctgtgtttagcccgtccctacgctgaaaaatagcacgccctgtggcctcgtccgtctgtcaaggcccaccatcggcgtgtgtcggctgatcgcgccgtacaacgaatcggtgtctcagctatagctgcgtgcaccccccacactatttccagtacctctgcaatacattcgttatgattgtagctggccatcccacttgtttacgatacccctntgcccgtgggaccttgtgcgctggttgctttaga

SEQ ID NO: 188492 - DNA, 229 bp, Arabidopsis thaliana
cgccctcctagtggcctcgcccgtgtcatcagatcaggatatagccatgccgccacggtctcatcactcgcgtactccacgttatggggggaaaaggcttggcgccggccctgtcgaggtacccacggcactctagttatttccctggcgcccgcatcgagcgcgtggtcaggtagatgcccacagcggctatcctcaccaagttgaaccccacacggcccacgctagt

SEQ ID NO: 188493 - DNA, 428 bp, Arabidopsis thaliana
ggggcgcgagggacggggagggggagaggacgcggacggaagcaaggaacgaacggacggggcgagcgggcaagcgagagaagcgcggcccacacgcacgcacggcggggagaagccgacaagagggagggcgccggagaggaggaagagaccgccgttttttcagaggggggggggcggcggagcacaacgaagacgagccccgcacaaaaaaccacccccaaccaagccaacgcgagacgagaagcaccccgaacgcaggcagaggataagggaggcgcaacgagaagcgacgaagccagacaaaggaggcggagacgacgggagacgaccagaggacgaggggcagcacggagaagacacgagggcagcccagcaggcgaaaaacgcagcgacccggacgcgcagagcgcgcgggggaacggcac

SEQ ID NO: 188494 - DNA, 139 bp, Arabidopsis thaliana
actccacatccacacccattacatttcgccccctctacaggcacgatgagtctgcatggagctcccaacctccactcaacgaggctaatataccatcagtagtacttccatccatttcacgccgacctatatagcatca

SEQ ID NO: 188495 - DNA, 785 bp, Arabidopsis thaliana
ttgccgctgctggaggtatatgcatatgttctatcttcatatacttatggctccaggacgcggcattatgtctgtatcgtgtttgtttagggactaataatgatgtttattttgcgctcacagagaagcgccttgggcttcaaccagcatgcaccggcgcctgaagggcaaactctctaagttgtacagctaacagttgctaggtttgcctcatgtttttttctctactaaaaaccttatatgaaggccccttttggcctcgccaggaaaaaaaataaatactgtatgtttgcggggaagagtgtacattaattctgtagcagaaagaccccctacccatgtggcggaatcaagggaggagtgatgcgtgtgagtcccatcgatctgaaggctgctgtaaagaggaagatggaaggggaaggagtgagaagcatgtcagttactctgctgctgtacaaattaaacttagctcttaaagtgaggagaaagtaagctgttagctgtctgcctaaaggaaagaaaggaaaaaaaaaagaagctggaggccattgggaccctgtttcatgtgttggtatagctgctggggctctcctggggtctgggtggcctttggtggaccataaaagctgaggcgcactagccctgcctttggtttttaacaagtaaagcctgaaggttattaagtagttcaagctttttccttgaaaccctggctttgggttatggaaaaatggcgaaaccttcctgtgtttgcctttccccctgggagactaaaagtggccttt

SEQ ID NO: 188496 - DNA, 750 bp, Arabidopsis thaliana
gttgctgctggaggtatatgcatatgttctatcttcatatacttatggctccaggacgcggcattatgtctgtatcgtgtttgtttagggactaataatgatgtttattttgtgctcacagagaagcgccttgggcttcaaccagcatgcaccgccgcctgaagggaaactctctaagttgtacagctaacagttgctaggtttgcctcatgtttttttctctactaaaaaccttatatgaaggccccttttggcctcgccaggaaaaaaaataaatactgtatgtttgcggggaagagtgtacattaattctgtagcagaaagaccccctacccatgtggcggaatcaagggaggagtgatgcgtgtgagtgcgatcgatctgaaggctgctgtaaagaggaagatggaaggggaaggagtgagaagcatgtcagttactctgctgctgtacaaattaaacttagctcttagagtgaggagaaagtaagctgttagctgtctgcctaaagggaagaaagggaaaaaaaaagaagctggaagccattggcaccctgtttcatgtgttggtatagctgctgtggctctcctgttgtctgtctggcctttgttgtaacataaagctgaggcgcactagccttccttcgttttcacagttaagctgaagttattagtatcagctttcctgaactgcttggtatgtaatgtgactctgtttcttccttgtactaatgcttgtctcatgtaatcc

SEQ ID NO: 188497 - DNA, 527 bp, Arabidopsis thaliana
  unsure (1)..(527): unsure at all n locations
atgctctagtagtcacctgcaggggcggggactcgttatccacgataccacacaccttgttatcaagcctttagacatccaggtctttcntatttatctctctggaagcatgccatggcctcattcacacttctattgtgggctacggtgcacactattcgttcaacataatctcctatccagataacactcagaatctatccgctgcactaataatatgggaacacaccttataaatgaatgtggaggcttaaaccttcacctattatgaaagatcagatgctcctacactttcccgtggcgactcctccattgaaaaccacacaacttgcttgtttcgcccctaacatattcatgaatccacccccccgcatctctctcaaagaatgcgtggaatcttcaccttgcgccttgcaagaaatactccacccttctccctaccaaaccggcacataagttgcactcccacatacatccttttcttttggcagcttcacccacatttttatatgaccctctctcctgaa

SEQ ID NO: 188498 - DNA, 903 bp, Arabidopsis thaliana
  unsure (1)..(903): unsure at all n locations
tgcagcggggnnngggattgcttataaagcataaccggaccgaccggccagtaggcttggttgcttcctgggaggtcggtttcttcacatttgtacgcgttcggggggctttacctcggggggatcgggatcgtcccaatgcgattcgtgcttgtgtacgttcagcgcgaagccgaaaccaaacagggcgcccggcggatacgaaagaacaagcggtgctccttcagttgggtctacctcttttttcgctctatctggatccatttccggccttcttctctctgttggaaccagggagaaccataagaatatagctgcgggcttcccctcaaaacgtattccctgtgtatgagagagtgatgcttttgagcggcactctgtagctttgcctacaacccatttttgcatggcggatgacagagatacacccttttcatgaacgtgggacaatttccctcatctttgcttattacggggcccatggcccaatcaaaaggtcagccgccgccttgactcagtcggaccgttgactcattcgggtacaagacactcatcgctcggtctgtgccaagataactgccgccgccatatttccggagcgttctggaatacctcttcgtctgcagggtccattactttttacagaacggtggggaatttcttagacagggaccggaacgtttccctggttcctaaaaccatgtggaattcgctaagaccacctgtagggggcctttgggccacccctttggcgcggacaaggatattgtcggccgttcctaagtgttaacaggcctccttgatgcacccccggctttttacaatgcatggggaacggccattgtaacaaactgccctcgccgtgggggacaatcactcggcctattccccaactttaattgc

SEQ ID NO: 188499 - DNA, 608 bp, Arabidopsis thaliana
ggagatctctacaatcgacctgcaggtagagaaaaggaaaaaggggaagaaaaaaaaaaacagctttgcatcaccatctcgtacgcggagttcctccccaccgatatgtgcaccccgtcgacgtgtgcccaactgatccatacccggcgcatctgcgcgcaagtccgcccggcctatgatacagcggcgtcatgccccgcctcgtatcgccgcgaagctattgaatgcccggttcgattctgcactgaacacacattggcagctcggtatgctgcaaacttttgcaggcaaaccgcctaagcatgtcgtccttccaacgcctccgccttctccttcgcaacatcaggaggcggcagcgtacctttctacggtaaccgccccgcccgtttcgcgtattcgccgctctaacgtccgtcgttcggaacttcgcctttgacttgacccggcttcctaaccgcaaaacagggatcatgatgccgttcgttgcgtgtcctactgtgttagtttcgcggacatgttctttagttcgtttaccgcatacctaggacctcgactcataacgacccacaagcagaatggccatcacgaacgcctactgtattcaaagc

SEQ ID NO: 188500 - DNA, 748 bp, Arabidopsis thaliana
cttacctctgatggtgttttataatagttaatgataaaaataaacaatgacattgtcaagagatcacttgttgacaaatatgttcattttgatgtacacataatattttttacatctcacaatgtgtataaatgacaatgttttccattaataacaaagaaagtatgtcttgagtataatttacgcggggatggggatccccgatggggatttatcccgcaggtaatggtgatgggaaagaaatgtcccccgcaaccattcgggggatttccatggagaaattttttctctcggtgatggagatggggaggtacaacccgacagggaattccctgttgccatccctaattgcaccaccttagcactcatcacatgctggaattctcgtgaaaggtctgatatcctaaggatgtcttcagcagatcgtgcatatagttatataaaacatgttttgtattgtatactgcattgttcatatagtgaagtttagaatacaagatatgatagaagatagaatgagaaagttgttggagacagtctaatggttataggagtctcgcctagtgtaaaaggaacgaggtgtggttttggtgggagaaggaagctagagataagacattaatgatttaatgccagaataaatatacatagttttagccactacaaagggtcatccagtttccttcatggactctttcctacacctagcatattcgaagggccttaaaattaaaccagaatataaatc

SEQ ID NO: 188501 - DNA, 721 bp, Arabidopsis thaliana
caccgctcatcatacacaatcgctgccaacgtacatcttatacctacagattgcaggtttggattccatacttgtgcaaaacaatcgattagcactattaagtacatggcggtactacaggattaaccaggtactggcagtcatacgttatacatcaaacattgacatatagtataggcaccagtataaactagatttattacaccacaaccaaccaaccagaatggcattggacttgatgcataaaaatacagaagttgcagggtggctgaacattactagactcacacttataacaatgtcttacacatacacttgtaaggtggctaagcattactttgacatatgtacacttgtaaatggatgaactgatataaacaaccgtacattacgattcaaaggaccaagacagcatgaacaactgtatgtacattatcacaacaacagccacaacaacaagcaagacatggaacaaaccatgacaaggcaccaaaatacagggaaaacgacacttgtgaacaccataacagtaagcattaggcatacaaatggtaccacacacatactggatgtatgatcaaacacatttatccaaggcaaacatgtatttcagcagactggaggcatcagtcacgatatgaaccccacagtaggattcaacatcagaaaaagcacgaaaggaaatgtgacgacaaagttgtaggatcatggagagcaacca

SEQ ID NO: 188502 - DNA, 801 bp, Arabidopsis thaliana
ccggggatcgtcgacctgcagccaagcttttcatttcaaaaaatataaggtcccaaaatttagggtgaagcacgaaggacaaacatctaccagtaaattgtgctcctagtcatctattcttgtacttgactatgtttggcttataaaaaacacttgtggtaactaaaggcatgggtagttaaccactaagactcacctttgccacataaaactcctagtcactctagcatcattcactaagaaccattcccactaagtaaagggtctcatcattcctcacacaccaagtcatcgttgttacagattatcagtgtttgatgatcgataaccttactataggattccaagggtaaagttagctggtatcaacgaaaaatcaaattcaatggcaatggcaagacatcgatttagatatgttcaagttgctggatagtgtaataccctacgtcctatatgttggattgccatatgtcgaattattgaatatgatctattacaaggggagtaccactacctctatatagtcctgagtataggtgcatgattctagtcctatccgtgtatgatagagtagttcttaattcaataataatggttagtccttcccaataagctggccttaaccttagttttgacttggtccatggggaatttcaaccacgccaactttgttgttagtgccttacccctaaggccattttttttggggtgggtggttccggaatctcacgagcgcaaacgtgttttgtttggagccagattggggaagatttcctgccaaccccaggcaaaatttgtaag

SEQ ID NO: 188503 - DNA, 771 bp, Arabidopsis thaliana
cggggatcgtcgacctgcagccaagctttcagcagtaacacagagggaaacagagagagcagagcatagctattctatttgctttgcaatatgaaatgtcaaacaaatcatatttatcaatgaaaactgtagttacgaggttatgatgtgaaggaggttagcttatcagttaaaacatcttttcctattgtagagccatcatctccgatatcaatgcctgaactatcttctatttcaaggcacactcgacataattttcatgaagtcttccatctgagacaaggaatttactctgacatgcctatttctaaagttttggagataatgaaatccaccaacttggatgtaagtggaatataatgattctttctgaaatgtgcgtgagataatgtcagcccaaattctgatctttttattcattgcatcatgtggaaccaattttacagaatgcccctactcagtcacttttgagttttgtgaatgccatccttgatcggatcattgaaaataagaatggagaaattccatatgtaggctactgaaaagcaatacagttagttatttcttttcaaacatgaggactttgggacattttgttttatacttcaaacaacccccttggattaaaaaagatagcatttcttttggcaccagaaatatgcgcttggcattgtttggaggaaaagggtaaataaatgggaggaatttggaagcggcccgcaattttctaacctcaaaggccaagaaccacaattaaaggaaaattgttaa

SEQ ID NO: 188504 - DNA, 808 bp, Arabidopsis thaliana
  unsure (1)..(808): unsure at all n locations
ccgtgcccgtgatcctctagagtcgacctgcagctgcagccgcagccgaagagcagagcgtcacggggggtggcagaggaagaggcgcctggagcaacggacaggtggtgtctccaaaggctgagctggacacggcgggggagagagagcatggcagtccactccggcagagatttcctctcacaggcgcacacacacactatcgctctctttagtctttactctttacgttggcagcgaaaacaaatacaaaagcaggagattgtgtgatgcttctctgctttcttgggattagattctcttcttttcttaacacctctgctgctttagcgaggtttcaagtagtattagtattgtagcgaaccctttttttgttgctttgacgcggacgacgtcgccctttgcattgccccgcccccaatgcatgcccaggaaacagcactgcaatgatttagtgcttgtttttttttactgatgaatgatgataggacagcgagttctgattcctgggtgctagactgctagtagaaaaaaaacgtttggaccgacacggcgtgatcattactttttcctcngctgtatgatgaggcgacgaccagcatccattccatggctttggcttgtggttttcctcatctttttcttgcgacgctccgactgttccgcttcctttggccgggccgctcttttaaggctttttacacctaccatcagggaagcttgggggcctgtgcccttcgcccgctttttggcccgaaaggccgaaaaaaaacccccaaaaggcgggggcccttgccccgccccccgt

SEQ ID NO: 188505 - DNA, 1038 bp, Arabidopsis thaliana
tcgacctgcagaacgccgcaactgatggatcaggtatgtaggtatgtatgggtatgggtatgggtttgtgtttaccgctagtggcggctcgtacccatcagctcacggtcaacgctgttgatcctgaggtactcacactctacaatccgactgctgtcctcgactgaatcactcgcgacatgcacgctttgggtgtgcttggacatagctgtgacctgtgtgaaactgctgtccctctccaatgccccacctgaacccagccggaaggaccttgcgggaagacctgtggggccttaagggtgggctcctgcgacgccaacaaacaagaaatgatccatgtgactcacgggcctcccctataaaacatctcacccgggttgtggctggcccccttatgaccctggtaccctaaatgccctcttcgttccccaccttttgcctcccatccctgggtttgccaaactcccgcgccagatcccccacggaatcgtgttatttcctcccggggctgtttgtgcaaacaaaatcccgggcccctcagcaccttgctttcgtgtcatctaccccgtatccgtctcatagactccgccccccttctcacatcgtagcatcacatccccaacacgtgagctgcgctccctcacacgtccggagcgcgtccttctcctcccgccccaccctacacgcagcagaactacgcgcggcacccttacgagcactcttctcttggagtaggcccccgcgccgccaaacaagaatagttcctcttccaacttcccgctttgggtctactaaccctctcacccctccacctaatgactatgttatggcgacccccagtctggcttctcttctaccccttcacggaaggggcccccccccgggagccctcccccacccctgggtctgtctctcccgcatcgcccgcctacactcctgcggctccgcctctgcctcctcccccgggcgcccgcaccgaccgttctcctttttccccccatcatggtccaggccgctactcacccttcttccctctcg

SEQ ID NO: 188506 - DNA, 1431 bp, Arabidopsis thaliana
  unsure (1)..(1431): unsure at all n locations
tggggggggggncatatatcncaaaacaccaacacaaaacccaaaaccctttttatttttcaaccaaacaaacccaaacccaaccccttctcacacaacaaaccaaataaacaccacacacacccaaccaacaaccctacctaccaaacaccacaccctaaataacacaccccaaccaacctcccacaacacaacccactaaccacaacacacaacccaaaagcacaccaaacctcctcccaaccaacccaccacatccaatcacaccacaaaccactctacctcccacgaccacaacacatactaacaaaacccaaccccacatcataaatcctacctccaaataccacacacattctaatccccctccacaccaaataaatctacaacaccccgcactatacaccaccaacataacaaacatacccacaatcattgtcaatcactctacaaccaacacacatctaatattcaccacccacacaccatacgttctaccacaaaaaccacatacatctctccccatcactgatacataacaccttctacagaacccactacctcactccaccaactaacaccatactaccctccagccacaccacatatctacaaaaactcgcgtcactttcttctttcacctccccacttactactacaacatatcatgcattcatacccacacactacacaacctgcatcacacacataacgcacgcaccgatacatcctccaatacggacgacatcaccacacatatgacctctccactcctctaccacatatacacacatacaaacactaccnctctatatcacatcacttctcaacccaacacaaccacactctcttaacaatctatacatcccactcatacaacaacctcccacccacacaacctcaacgtcaacaacaactatctcaacaaccaccatacacacatactctctctctgcataacacaaccatgaataccagcgccaccacactcaccttatccaacagaaacaacccacacccccacactaccacacatctacaccactataccccaacataccactcctactccaccaaataaccaacacctaccacactaccacgactactctacacctcccaacacccaactcacacctaactaaccacacagctcaaactcaaaaaaacatactccccaccacacatcacaaactcaccatccctaccaaccactacaacataaaactcaccaatacaaccaatcatactacaacctccaaccatacaaccaccacaacctcctacccactctacagaactaacaacccacacattacatacaacctaatccttcaaccaacaccacactttccacccacccacatatcacccacacaccctcactaaaccacaacaccgtttcaatatactcagtcacacctccaccca

SEQ ID NO: 188507 - DNA, 1238 bp, Arabidopsis thaliana
gagcttgcatgcctgcagcagcagagctgtataacacacgtcatacacattcaatctcctgactgaggccatgtcacgctttcagtatctgtgctaccattctcacgtcatggcagaaggagccagcaatgtagcaaactagcgctcagaagcatgacagatccgctctggcgctcgctagcatggtttgatcgcagccataccagtagcgcacgagctgtgccattttaaggtggagcaggtgcaattattgtacatgctcgacttaagcaggttggaggacctggagactcctcaatcgtggattcgggtgcctgcaggcaggttaatttaagtacgcttattcacaatgtttcgcaatcaaaggtcttgctactatgtatattgcagtgctacatctatcgtcatgttcgcatgttcttgcatggcatgctaccaccggataagagacattaatggctgctatctccttattgctcgaggtatagagatgctagactggtgcagatgtacctacgactttggggtgtatgattgttaatgtagcgtgttgtgagtctagcgtatgttcttgagctactgcattctgttgcgatggtggtggtatctgaggttgtcgtggtgctggtggtgttgtcaccagaacggtgtgtgtgagtggatcagtcaccggtgtggtccggtaggttagattgtcgaccgagatgagtgtgtatcgatagcagtgcttgtttggttgtgttgtggttatggaagtctcagtatgcataatgaagcggagactgtgatgccgccaagtagcctccgtgtagataatgtcgtaggtggtgtcctgtgagtctgctgagtggagtgtatttcgagtcagtgttgttatgtgacactagtgagtgtgccgcacttattgttgttgtccgaagactctctggagatagtgtgtctgtgctaaagaggcgcctcaaagtggaggtggcgagttcacgagtagggtgatggaaatgtgttgcgcccattgagaatgcggtgagaatggatattcgatgaagctgtgtccgaatcgcagagagctaaacatggctgtgtcagtaggaatagaaacgtcaggtgcgtctgctggtgtgtagtagtggtactgtgtaaggcggtgctcttatggtattggaagcgcatgtattcgagtatgatagggtggaggctgctgggagaggaccttgtgtatgggtctaggtgtgtttttg

SEQ ID NO: 188508 - DNA, 834 bp, Arabidopsis thaliana
  unsure (1)..(834): unsure at all n locations
cgacctgcagcacagcctgtgcacgatgaggacgaacggcacccactgcatgatgaggacgcggacgtgctggccgctaggaggacgggagagggcccggcccatgaaccggttgcgcggcgaatccttgattgcactcgcctttgagatacatccctggctagccaaggagccaggacttggcgataagacccgaccggctctgaatggacagggactgaagaccttccgagactcaatgctgtctggtatacacctcgctgtacacagagcacaaggccgatacaggggttagatgcatcagccgctagcggggcttgctggtgcccacaatcgagtaaccggtggacgtagcaaagcaaggcttggtctcgggagaggccaactcgatgatgttcaagctccgcaccatgctgatcccgtaggaagaggaggactcctcacacttgcacacaaaaaaccagccgcgagcatactgggacaagcctcgcaagtctatggaggcggcgacatcacatgtattgcgtggcgctcacttgcctcctgttccaactagaaaaacctgggcgcggccaacttgctttgtctgaaattcggaccaacctcccctgtccgagagggcgcttttcacgtcatagggggggantgtttttcccctttcctctgttaaatctaaatccccttgggccctcagaacctttctccacttccgccggaaacccgatatttagcctcaaccttcaaagaggccggggataccccggttattcccccccaaaatcttgggggggtaaacgccccccgaaagaacaccattgtgtggccacacaagcg

SEQ ID NO: 188509 - DNA, 830 bp, Arabidopsis thaliana
tcgccgacctgcagctaggcttgtgttggtagagcaccgtgcgaaacctgagcggagcgatcgcatgggagcctcggttcatgaactccatgactccattaggtccatgggaatggagaatggaactatgccaagagacgtgctgttcctgagcagctgattcgtcgactggggtgcgcactgacggggccatgtatcagctgcaatgcagcaacctgaggttgcaacagagccctctgaatgtgactgcggagttctttgactgtcgatcacgaacaggctggggcttgcccatgaccaacccaacgacgggataccgaccgggaggtctgttgtgaaggatagacgcccgagcccgcactcagcaggagctgccgttccacgcatcccggtggtaatgcatcggagcacacatttccgcagaagagtcacgccagaaagcctggtgaacgcgggcgagccatgtcacaacgtcgtctgactggacggatacgaatcgcgtttccccaaccataagccggccgtggaaggaaatccccctttttgcgacagtctggccgtttttaaagaaacagggccccgcacacggattttcggtcgggcgggtggggggacttcaagcgaaagaatccgccggggccggctgaatgggcaggcttttctacgggaaacccagggggcccggttggcggatagactggtcccttggaaccctaaaatttgaaggtgggcggaaaaagaacaagggcgttcaccgcacgccaaacaaatttgggaaagaccttccagggtacctccgcctggtggtttccaggaatcccgggaaaccg

SEQ ID NO: 188510 - DNA, 759 bp, Arabidopsis thaliana
gtacccggggatctctagatgtcgacctgtagatccggcatttgcacgatgcggacctaccgcgctaggctctgctggctacgcagtacatgctttagagcgatctagccggcgacatgcccagaaccagcgtcgctcagcgaactcatccttcttcgcatctctctttaactagatccctaactctggcaagaaccagcacttcggcgataacgccggatagctcctcatcgtaattgactgataaccgttcgcacacctctgactttcggggttccacagcgcaattctggactatacatgccgtccatggcttaagggcacctcactcgaatggtgcaataccgtacgtcacatcatagcatctcagtggtcgctgacgctgagcgcatacataccgcaatgtccaactccctggtcaacaagctccacatcatgcagatctagcacgacgcggagatctccaccacgttgatcgccaacaaccctttcctcgcatcctcctacaacacgcgcaataccatcaggcatatacacaccctgggctgcaacgccttcttcaaatccctgatacccaatatcctgaatccattcatatcccaccgccagcttcaggcatccaaccttggcgtaaccatatgcaaagctggggccattttcaaattactatccgctcacaattccacacaacatactagccttcatcatactgtacaaatcctccgaatgcggatcatctgcctaactcacattaattgg

SEQ ID NO: 188511 - DNA, 863 bp, Arabidopsis thaliana
aagctcgtacgactgcagccaagcttagagtagcaggcgcaccgcgactccctcggtatccaggcgagcgcaatgcatggagcgtccgcgcactgtctctctgccgccccgcgttccgagcagagtttccgcgctaatatccagcgagacggcctgttcctgaccagctaattcgtcgtttcgtgttgcccactgccggggctatagatcacagcgaatgaccagcatccgttgtacggtccaacgcctcgtccggtcgagtcttcgacttcggaacgacagacaaggaagcgtgacagaccacgaggctaccgacggaggtcgttgtgagatcgatgtcgaccgcatcacggactcgtccacgcagcggacatatatgggcaactccgggtcacatccgctgtagctgtccgtgagtatgctcgctacgttttgagtccagggtcgaacagcgtcgacctccaagcgctagggggagatgccggcccgcctcgtgggcggagtttgtttccacgttgccaaagaaatgcgggtactggcccctgcaacgtcattttccgggcatagggctgagccgtgcgcgtaatgttcgcaagggcgaaaagcattttcccatgcctggtaagcgcggggcgttaaaattgtggccagagcgttttgtaatatcgggggtaatacgaatgggggtgtagcccgagctttcttcggtagaatgtcgccgtttgttcgcgaagtttggaaggttgctagaacgtattgtccggaggtgttaagttatcgcgagaacaattttgcaccattagaggcgcgttgtgtaaaactcgagagcggtttctaggatgctgagttccttgtgtgtcaaa

SEQ ID NO: 188512 - DNA, 522 bp, Arabidopsis thaliana
acctgcacactcaacaaaacaaaaacatcaaactggttgctaccaacgtacgttacatggttgcatgacgcagcttctgggaaaaacactccacacgacaatgtttgctcaaacaaaccttgcgcttcaactcaaacaaacccacaaaccatgactcaagctcgtaacaaaccaggtaaccacacagacacaccaaacaaaaactgagtgcacgcaccaaccacttcacttcatggtacacgtacaatagactacaagatgtcctaccactatctacgtggtgggttctggtgtctgctacagcatatggtacggtcatctggtcaagcatgcacaccatcgaaaacaacccatcggtattatctccgatagtattctcgttcgggttcaggtccgtcatttgattcacacacgggtcttttggggtgtacatactcgggtttgggacgtgatctgtatttggggatttcactgcgctatacagacgccatcacctttttctgggggtttgtagtttcttta

SEQ ID NO: 188513 - DNA, 266 bp, Arabidopsis thaliana
  unsure (1)..(266): unsure at all n locations
gtgtacctagtgtgtgttccatcatatgatgtctagaccataacatagctaccaganctactgtgtcctaccttatgtgtaagcctgtacagctgtagcgtgtcactagctggttaatctatcccagcactctgtcatgtcatagcacctgtacacctgtacatatgtcctgtgtacacttcagtcatanattacatctcatctgtgttagagcctactgtactcatgtcaaccacaagtatactgttgtatacctgtgtgtgtgt

SEQ ID NO: 188514 - DNA, 230 bp, Arabidopsis thaliana
caccgaccaacaccgcgcgcacccgcggccagcacccaaccgcacgcgcgtacacagcgggcaccgcaaacgaccaagcggcagcgcagcatggccgccaccaaccaacgcggcacgaacagcggcgcaagcagccgcccaacgcgcggacccaggagcaaggcgcaccgacggacgcagcacgagacacaactggcccaaccaatgcggaccgaccagcacgaggacca

SEQ ID NO: 188515 - DNA, 802 bp, Arabidopsis thaliana
gctcgtacccgggatcctctagagtcgacctgcaggctgtccatccatatcccactgccactggccagtgggcacgggtcacgcacccactgtgggagggggtaggccttgtagcattgaattcccggcgcctatcatcggcgccgcgcacatgtgggccttgtggcttgggcagcacaataaaggaaagcttcacttccatcatggcatccaccccgtcaggcagcgggctcacggcatgcacgcactcacgcacacagggctgcgcccgttcctcgtatggtgtgtcatctgcgccaggacaccagcgcaccgcacagaggccacgcacgcagcagtctagaatagaacgagacaatcatcattcgagaggaagaggtcaacaagacctacagctacctatctatagggtgtggagcgacccgctccaggaccgacgtgccgtgcgcccgtgccattggcgctgatactgtgcccggtgctttacacaagtaggctttgaaactcattattcctacccatttactgtgcctggcggcacatgcaccatctgagcagtgtgctactactaccacagcccacgccgaatgccataacctggagtgcgtaggctgaatgaacacacgtgcctccctgggccttgcctccctacacatatgcaaggtttggcacaactcatgtgtatagcctctctccttgtcagaaaatttgttgatcccctccataatttaacccaaagccctttgcagacccgggcaaccaacacagttgatacaccgcccctggagcgggccttaaatgt

SEQ ID NO: 188516 - DNA, 735 bp, Arabidopsis thaliana
  unsure (1)..(735): unsure at all n locations
gcaagcttgcatgcctgcagcgggcgcggcgcaggggacgacgtgggtttcaagagccaacgcgacaccaggttatgggatgcggcgtgggctgtggtagtaggaggagcctgctcagatcgtgctttcgccgccactacagtgaagcgaccggaataatcagactcagaggctacttggacgacggacgacggccagtaccagcgccaatggcacgggcgcacggcacgtcggtcgcggcacggcacgcaccacaccctatagataggtagctgtagctcttgttgacctcttcctctcgaatgatgattctctcgttctattctagactgctgcgtgcgtggcctctgtgcggtgcgctggtgtcctggcgcagatgagagacgagacgagggacgggcgcagcgctgtgtgcgtgcgtgcgtgcatgccgtgagcctgctgactgacgcggttgatgccatgctggaactgaagccttcctttattgtgcgcccaagccacaaggcccacatctgcgcgacgacgctgatcgacgccgggaatccaatgccacaaggcctacccccacccacagtgcgtgcgtaacccgtgcccactaggccattggcagtggggatattgaatgggacagccttgcaggtcgaactcttaaaggatccccgggggtacccgaacttcgaaaattccactaggccggtcgttttttacaaagncgtcgtgaccttggggaaa

SEQ ID NO: 188517 - DNA, 756 bp, Arabidopsis thaliana
gggggggggtaacgttcctacccgtgcccgggatcctctagatgcgacctgcagatgagcgcgcccacgatgaccaccaggctcacccactccatgatgagaaggcagtccatggtgtcgcgcttgaagtccgaggtcatgccctcgtccatgaacgggtcgtcgtcctcatcctcgaaggcacctgacttgccgatgggccctgatttgccaatgagccccgacttgccgataagacccgaccggagctggccggacttgggcggcagccccttggagacaaatgactttcggggatccacctcgctggcgggggcgctcgacgtcgacggtggcgggggatccattagccgagatcgcgtcttgctgcgcgccagcagggaggaaccggtggacgtcgacgtgcagcgtagcacctcgggagtgtccaagtcgatggtgctctggttccggttgtggctggcgtcgtaggaggaggaggacgcctaccacgtggacggggagaacccgttgcggggatcctggaacgagacgcgcaggtccctggaggcagttacataacattaagcggcgtgcgctctttgtctgctttccacctggaaacctgttcggaccgcagctttccaggagagggcccctcgctcccagagacccctccccatgaggcgcgctcgttttgacggttaatgggcctggccccgcccgtcgggcccggggaaccgaccctcacatcgtccgagtagtttggtatacctt

SEQ ID NO: 188518 - DNA, 736 bp, Arabidopsis thaliana
accggggatcctctagagtcgacctgcagcgggaactcgtagccggcgtcgacaccatctcccagctctgcatcaccatctcgtacccggagatcctccccgccgacgggtgcaccacgtagacgtgtcgcccctggcccagacccggcgcatcgcgcgaggtcgccgtccttgaacgcggcgtagaaccgcgcgttcgccgccagcaccgcggcccggccgtcctcctggagcacgcgcacgtcgtcccggagcgccgcgtccgcgcgtcagtacctcctcctcgatcgcggtttcgagctcgcgccgcaaggcagtcctcgtccgggccgccgctgccggttgcgctctcctccgtgctcggacgcccctcggcttccccgctcttcacgtgagcggttgtgagccttgtggtgcctcggtgtcggtgccgacaggtgcttgccgttcggagccctggactgctggacaggacgcagaggagatgttacagaatttattatcagcacgttaccaatggcatcacacatttccacaggaaaaggatcgatgcaaagcaacaagattttttctgaaaccggtgaatggagttcgcatacgctactagattgaactactgcacctgcactgatgaagacagaagacacgaagaggagaaatgccgaaatctgttttgattcagataatcttctcagggcatcaaataattagactaagagaaaatgcatgtatgtat

SEQ ID NO: 188519 - DNA, 734 bp, Arabidopsis thaliana
  unsure (1)..(734): unsure at all n locations
tcggttcccgggtatcctctagagtcgacctgcagcctagtgggcgttattcttaccgccatgctaaatttgtcgatttctgatttaactgagactaaagccattacagaatttcagctcgaacctacagctctgaagacatgctccaaaagacaacttccaacggatagctaaagaattgcataacagaatgctcccccaagattggacatgaaagattaaccgacaggaacaagctaaaacagccacgaggtaccagacgagtctcggttcctgtggcacccaaatatcttaacgccccatgaatttctacggttccacctgcacaattccgaatcaaactaccttcaagcaagtaacgaccacacagcaagcaccaaatgagcaacagataagagaaggggtcagaggctcagagctgagagctgggaatctcaccaccgtcccacggcgtatcatccggcctgcgaaaccacacgaacctctcatcagcacaacgaacacaagagtaagaacaaaaggaatagctgagatcccgtctccctccccgagatccggagtccctcaatcaaaccctagaacaggaacgggattaacggactccaggggggggcgtttgtggggtaacgaaatcggtggaggggggaggggctgnctcccggcgtccctgggcgcagcagtcgtgctgggccctgtccgtctggnctgcgggcgtgccccccggcggtgtcctg

SEQ ID NO: 188520 - DNA, 641 bp, Arabidopsis thaliana
ccgggatcctgtagagtcgacctgcagcagcgcgacaggcgacgccagccacgacagtcgacaggtgaggggggacactgttcttccgacttcccgagcgtgggggcggggcgacgaaacgaaaaggtggtggtggtggcgctggcctgcgagctttgggcaggagccagagccagccagaaggggacgcgggggcggggccaaagggggaggaggagggtacggcgatggccaggccaagtatctctgccgtctggctgtggtgcatgcactgcgcctgcgcggagacggaacggaacacccggccggctttgtagtgcgtactgcgcactcatttcccggatcttgtctcggcgttccacctgtggtttctgccgtgagcgcaccctcatgaatttgagctggtgtactcagggttacggtacatgctcctggcttcctcgttcgaccgggatcgtgcacgttctcgccatccaacgcccgtcggggcactcctcccctttcttccctttacctttttgctctcagtgattccgacggacgatctggtttacgccccatggggcgcacgggatgttgtacaccccgagctcttcttggtggccccgggggccaagcaatctatactctgtgctcctagt

SEQ ID NO: 188521 - DNA, 703 bp, Arabidopsis thaliana
cagacgctaccagcacccacatccatcacaccagtcagttcacccagtggtcacagagaccagctccaggcaggcgtaatcgcctgcgacgtgggctttcgatccaatgcgggtggagcattccaatctcaacagtccaaccctggcacagcataccagagacgaagaacagcgcaccaacccccaccaaggacccaaggcacatcagcctgaatcccacggggaatgatttggacgcacccatgcagacggtagcattccccccccttcgtccatttcatttcagccacattctattgcaggcatgcctcaccttgaccggacagtccatcttcagccattgccctcccaggacaccaccaccctcccccctcccaggcaggctagggacttcaggacaccatgctccaccaggagtcgccaatccgccaacaaaacccagcggtggcagccttgacccgggaggattttggagctatcggctccggtacaacccgcatctcctcgtccctggaatgctgacatcaccagttgatccgcaaccaccttgcccggagtcctgcttcccccattccccaccagcagcccacataccacacccacaccacagcacactggattggcgcagcaggcaagcgggccttaagcaggggcatagcggggtccgtggggaaatggggatccgggcacaatgccacacaac

SEQ ID NO: 188522 - DNA, 719 bp, Arabidopsis thaliana
acgcgcaccgcgcacccccggtgcggcgcgagcgcatgcatgagcgaccgcttttatgatattctgccgccccgcgttccgagcagagtgtacgggttaatatccaacgagacggcctgttcctgagcctctgagttgtagtctgggttgcccactgccggggccatggatcagcagcggaggagcagcatcaggttgtacgggtccaacgcctcgtcccggtcggggtccttcgactttgaacacgaccaggacaaggaacgcgctgaccagaccatagacggtgaccgccgggaggtcgtcgagactagctgctcctgggtcgtgctcttgcattgccttacctcggacagtggcatgtacagacacagctacaaggtcagcacgccgcggtccgtagtcacggagagcatgctctcggcgtctgtgttcggcttcgagcgggcaaacctccaacgctgggggccaagccccccgcttcggcgagaaggctgccgcgtactgcgcaagggctgaaggtcgacttctagaagatccccggatcccgaaattcgaattgactgggccatgggttacaaactcgggaactggaaaaccctgggggtacacaatttaatcggccctgaaatacaatccctttagacaagaggggtataaccacagaggaccttttcaaaccccctttggaacagtgcgtaacctgaaggaacaccggaacc

SEQ ID NO: 188523 - DNA, 311 bp, Arabidopsis thaliana
gactatcatataggagcgccaagcttcaaggtcactctcagatctgctctctcggcgagtgtgcgaagcgtactgcgcaatgtggtcgttgcacgcacctcatcgagcactctatgctatggcaggctgatatgtcgccgtgcccgatgggtttattattgcacgcagcgattcaggcaggcgttacgaataccggaatggactacgaacgtttctttataggttctagcatgggactagagtgatcctagttatgctgatgctcaatgatgtatgtaggtgacagtgctttagttgtgctcagctttgcg

SEQ ID NO: 188524 - DNA, 762 bp, Arabidopsis thaliana
taacacctaacacccaagcagcatacgcaccgcgactccccgagtcgtcaactagcgcatgcatctagcgtccgcgcaatgtctctctaccgccccacgttccgtacagagtttccccgctaacatccagcgagacggcctattcctgatcagctgattcgtcgtttgggtagcccactgccgtggccatgaatcagcagcggaggatcagcatcaggttatacgtcaccaacgcctcatcccgatccaagtccttcatatacgtatacaaccattacaaagaacgcgctagatcacccaacgacggctaccaccatgaggtcatcgtgaaaatcgacgccgagccgcactcgccggtctccctccacgctgccgtaagatgtccctacacatctccacgttcaacacgccgcagtgccgacgaccggcttgagcatactcgcagcttctgcttccagctcgatcacatcaacctccaacgctttcagtggatacgcccccctccgtcatagtcgttcaaatttccaaaaacccgcacactcacaatctttcgtgcctgcactcgtgcgaagttccaacctaaataatccatctcggaactcatgcttcaattatagcaagctttcctgtcccattaaacctaagaccctgcaccagcttgttcggatcaaaaattccttgcatcgcaaaatctgcaactcccgctgaaatttttgttcggtaggtgtttataggccactcaagttaactattgtatggtag

SEQ ID NO: 188525 - DNA, 790 bp, Arabidopsis thaliana
cactttcgcgttgaagagtattcatgctaatagaaggtgcgcttctcacggatcatttgtgcagcagctttccaatcttcagcgaaccctaatgcgacaagaagcgcacacatgacacagacacttgtgccatgacctgttagagatataacacgccattaaataataaaatccaagtgaccaatattattggacttataagtttaattggatggcatgttagataagtgaggaagaagtaagaacaagccataataaggaggttttattttggaaactagtaacagggagatttaagctaagagccaaacctaagagtgcagccagtgcacatatccagaacttaagtttctttcaatgtttgagcttaaattgggccaaaaaatctctttaaagcctggtacaatctacacaacatatgggatgaaccttatactatctgaatgtaatgcagatgctgctcagcttatgcatggcagttttacttctcgtcacaggtaagaactaaataagacatgacaaataatcacatgaaataagatgacacgagaaatggaaaaaagtagcatatcagcatattgctgtttcctgactccagctgttacacaatatatggttgaccaatacaatgcccattgtggatcatcatggtctggagttgggttaaacatgggctcaacagttatctaaatatgactaaactacagaaatgcatttaggaacataaacctatgtatttgaagaaaaatcacataggacaataccacccagggccttatgcaaacatagg

SEQ ID NO: 188526 - DNA, 956 bp, Arabidopsis thaliana
ctcttgagtcgatctgcagcctggcagccagaatggagctagcgatagatttctcagaacagctgattcttggacggcattgattggcgggatcgagacactggacattcggtcgccgtcggagtaaacctgatcttcttagtggaatcctaaggttggattttacgttctggggtggtcctgtgactgttgtagctcctagccttgcggggggtgatctgatttccacttgcgagcggttcccacaccgccggggagttcttgttgtgatcgttgtgttgcggcctgtatacggtagccactgggactgccggtggcgtctattgccagatggcgttggtaggtctattcttggtcatgggttttctgctcgttttgtgggttttttttttaccgggacgctttttcttcgaagttgtttttcgcggcggacgagtgttcgtttgtgtttgtgtttgtgccccgctccccacaattccccccccccgcggggtggtggagggggggtatgttgggggcgggtgggggccttccccccccacgcatcccccgccccgccaggttattagggtctgtggggcctttgtggtattgggcccttaactaaggccccattttgttgggaaatatccggggccccggggcctcagggaaaaaccccggtttctgtttcccttttccccttggttgaaagggatcccccaaatgtgtctggcgcccggttttggggggctgtgtttaagaaaccccgggtgggtgtggtggtatggggggttgtggttgggtggtggttttatgcggtgttgtggtcggtgtggttgttgattgtgtgggggtggggtgtgtttgcggttgttgtttgttgtggggagtgtgggtgctgtgttggcttttgtgtggttgggttgtggtggtgtggggtttgtttggtgtgttgtggttgtgtggtggaaagg

SEQ ID NO: 188527 - DNA, 764 bp, Arabidopsis thaliana
ttccgtttgcatgcctgcagctaatggatgctggctctcctttccagcatgaataaactaatgctcggtttgaatctgctaaaaagttagagattattactaactctagcgcatttaaataacgggtagctaaaacaatttacttccgtgtgagggctgttaaaagttgcccggtacactctggtgcatttgtgcggaaggcgcatgtgtaagatctaattctatatccacttgagacttcatttaacatgtctgagggagggtgccacgtatgaggaactatgatgatggccggacaggataaggaccactggcaccagcatagagggcgaccacttggtttgttgcaactgaccctacatttatgctacagtacttgtcactgcttacctttagctgacaatcatgattaaacttggcctatatcagcaccgagtctaacttgacatatataattatactgtgtggaggtactgcaacggctttcattaatcagaaaccagcatactgactatagacatgatcgaccagacaccaccgtatgaagatagtattccttcaggtgcactgaatgatgcctacattacgccaacaaaggttcttgcacgattagacatacgggttgccctgtaaacagctgctcagtacaccgaccatactgataaagacactgtggagaacgtgaacatgccgaatgatatggcagcatttgcctgctacaaactttacttgacagaatgcacgcgacggcgttcactgtgata

SEQ ID NO: 188528 - DNA, 999 bp, Arabidopsis thaliana
cagttgttggtttccttattcattgttgcctcgcatgatatttcttggcattttgtttcttcgtgcgtgttcccccccccccacacccccgccgccccctttgtggtggtctccccccgcaccctaaccccgccctcttttcgtggtctttgtgttggttgtgcccgttttgtgtttctccccccccccccccccatacccccccccccccctcgttctttccttcttctgtgtctgctttcttggcttcgcttggctcccctgtttcctggggtccctgttcctcggtcctctctgttgttcgtcttgcttctgctctggctgctggggcttctgcctaattctctgttgtttgtttgggtgtgttgtggtttgtttgtccctggccccctcttcccctgccctttcttgtggtttgtgttttggtgtttgtttgtttttggtgtgtgtgggttttgtgtttgttgtttgtttttctgtgtggtgttttgtgtttgtgtgtgtgttttttgtgttgtggtgggtgttcgttttgtgtgtgtttgtgtttgttgtgtgtgttctgttgtttgtggtggtgtctgtgggtggttttgtggttgtggttgttgtgtgttgtgtgtgtgttctgtggttttgtgtgtgtcgttgtgtgtggtgtgtgtgttgtgtgttttgcgtgtgtgtgtgtgtgtcttgttgtgtgctgtggcgttgtgtgtggtgtgtgtgtgttgtgctgttgtgtgtgtgtttggtggtgtggtgtcgtcggttgtggtgttgctgttgtgtgcgtgctgtcttggtttgtggtgtgggtgttcgtcgtgggttttgtgtgtgtgtgtgctgtttcgcgtgtgtgtgtgtgtggtgtgtgtgtgtgtcgtgtgtgttctgtgtgtgtgctgttgtgtgtttgggtgtggtgtgttgtgttgtgtgtcttgtgtgtgtgtgtgttgtcttcgtggtttgtgtcgtgtgttgtgtgtt

SEQ ID NO: 188529 - DNA, 792 bp, Arabidopsis thaliana
taacttgcatgcctgcagctcatggatgctggctctcctttacagcatgaataagctaaggctcggtttgaatcagctaaaaagttagagataattattaactctagtgcatttaaataacggctagctaaaacaatttactaccgtgtgaaggctgttaaaagttgcccggcacactctgcagcatttgagcggaaggcgcatgtgtaatatctaattcactatccacttgagactacaattgagatgtctgagagagggtagcacgtattaggtagtatgattaatgccgagaatgtaaatgaccacggacgcaagcaaaacggactacgacgttggtggtggccacgggccctagatgactgttacagtgcctgttacttcttcgatttggtaaaagatacggattaaccgtgggcaaaatatggactgagtcgtatttaggatctaaagctagactggctatagctaatgcaacggctaataatccagagtagctaacatttatgatattcggatcaatgagtgcatcgttctatatcaacaagctcacgctatggagattgaataaccataccaactttcacgccaataatggtttaatgcaatgtacagttattcgcgtaccactcaagtacagttaccacaggacagagacacatacttaattaaacgctttacagcattcaactgccataactacactagaaccatttccccccaaataccgtatcttcagcggtacgcaccggaccgtcaacactaaacgcgagaaatccaaaccgtcagcgt

SEQ ID NO: 188530 - DNA, 875 bp, Arabidopsis thaliana
gatgctgtggagtggacgtggagggctagtgcggcgtgattgttggaggagtgggtaggtttgtgcgggtgtgagtgtgtgagtgaggcgtagaggcgtagagggtttgagggtggaaggtagacgtgtgaagagcgtggtggaaaacagaagttgcaacgggtagggtaggagggttgggtaagagggtgggtggcccaagagttggacgtgagagagtaaccgacagaacaagctaaaacacccacgaggtagcagagcgagtgtgcggttggtggtggcagggcaaagtgtcgttaagggcgggcagtggagtttgctaggggttggcagggtggcagcagttggcgggtgaaactaggttgaagcaagtgacgaccacacagcaagcaccaaagtgaggcaagcagcagtaacgagcaaggggggtgcagagggggtcaggagggatgaggaggcgtggggaatcgtcaggcaggcgtgcccacgggcggtagtgcatggcgggggtggcgaaagcgcacagcgaaggcgtgctcatgaggcagcaagcgcaagcaggcaaggagcgtgaggagagcaagaaagggaagtaggcgtgaggagtggccgggtcgtggggtggcggcggaggagtgcggggagtcggcgtcagtcaaacgccgtaggaacaggaacggggattaacggagtgcaggggggggggggtttgtgggggtaagcgaaagtgcggggggcgaggcggggcagggggcaagggggcacggggggctagggcggagagtagtgcagcggggcgtttgcgaggaggcgatggagtgtgtgttggtgcgtagcgggggggggcggctggagtgcgcggggcgggggggggt

SEQ ID NO: 188531 - DNA, 731 bp, Arabidopsis thaliana
accggggatctctagagtcgacctgcaggcgccggacagcttcagctcaagagctcggaggccagccgcgtggaggtggagggctcggagctgagcacgaggtcaccagggactactacctggaccggctctggtgattccgcctggtgtagaagaggaggatagcttaacaattcggtacatagtgaaatgtcatgactaagctacgactaatcacaactacattagaggtcgagtataagagtaggtatggtatcatagagaaggaaataaatggtgtcctccagctatcgccggccatttggcgacaaaaggcgatgggtaagaaaacaactgcctcacctagtagtgcagctgcaactgggttctgagttctgacacagtatagaatgcagcttcgacgccgatacgtagaaccagatgtcgacataacctgtggctagtcctacgtggaatccgatccgacagtgctggtgttgatggcatggagatcagaaaatgaaggcttggaggttaaagacaagcaaatgttgtctggtacagcagaaccgtgcttctcccaacttcattgcaccatgttgccgtactctgagcctctgggtgaagtattactaccactacttatactgggagtgggtactagagagcctggcctgcgcacgcgggtgcagctttgtgtttgtgtaacgggcgcatgttgagcgttggcatgacattggcttgctgtggcg

SEQ ID NO: 188532 - DNA, 823 bp, Arabidopsis thaliana
ccgtgcccgggatcctctagagtcgacctgcagcaggatgaggccgtcgggtcatcgaccggaggcggtggcgagcagagctcggccagggcgcgggcaaaggtcggcacgcaggacagcagctgcccctcctcctgttgctcctcttcctcggccttccgctcctccgacgattcgatgggggacacctcaggcacgacgacgagcttgctcgacaggagctccccgacgctcttgacgtgcggcctccgagtgcgcgccttgcgcttggaccacgccggcgcgacctgctgctggcgcttcttccacgtcgttgtcgccacgccggcctcgagcgtcgtcgagtgcgggtccgtcgggcgcaggcgcaagcgaaggcgctcgtgccgcctggcgagcgggttcgcggagtgcaccgaggcgtcgcagccctggcacaggaaggcgtcgtcggcagcgcaggaccaccgcgcgcgcctgcgcaagcaggtggtcgaggcgcgcgcggccttgcccgctacggcgcccccggggtgcttggagctgctcatgtgccgcccccaaagctaggaatccccggaaaccctgcccaaaggcgagctagatgcgccccgctccagaagcccccccgaatccaagccgctgaccaggaatcccctcgggattgggcctagcccccctacaccgtggaccaaaaaatccgcggccgaaaaaaaccccactgacctccgcatttaaacggcccccccacataggagctttcttgtttttcccagccgaaccccaccgggtcgcgcggaatccccctcaagggagcgccaca

SEQ ID NO: 188533 - DNA, 572 bp, Arabidopsis thaliana
tacccggggatcctgtagagtcgacctgcagaacctcctctctttatcaggctatgtcaaacaggtcaagcgtatggtcgtgcaccgtagactgcacggtaagctgctggagatagccttatcggcatgatatgtttccatcagaagagcactctcacgctgaaagttttgtccattccaaatttgaacaagcagtgacagtggccgcgatctaccgagtaattaagactctaggatgatgcagggagatcctgagggtcctacgcggatctctgctggctatataatacgcgcccatcctacaggatttgattttagttgcaaccgtggaaaactctggacagatcactgagctttgattgcaccaaatgttgaacctagcacaccaaatatttgatgatgaggaactatgcctcacctatcgagcgcatgagactttctgagcacgcaggaaggctgattgcttatcacgagccataacgatgtgataggcgctgcacacacaggccaagtctcaatggttgactggaggagcacacaggatcacacggggggcgggaaaaacagcgact

SEQ ID NO: 188534 - DNA, 826 bp, Arabidopsis thaliana
cgtgcccgggatcctgtagagtcgacctgcagtgcgcgttcgcgtagttaaacccttgtcagttcccctgcccccgcctctatccggcgcgccggccttgcagccgccaacatcgccatgaaaccctcgccgcacttcccggagatcggaaagaagcctaaaggtacgcccaccttgctccctcggatgcgctcacggaatcccttggtttcgctgaaaataatagagattccatcttgtacgcagatttgattgctaaggaccacacatttaacatcgcggcttacatctcgtctggagcggtacgtgcatctctttcctcctctcccagattcctgagtcctttacttttgcgtctcgattagagcttgactcaacagctagatttggggctagggttttgctctattttgggtttgttggggaatgctatgctaatttgcttggataaattagtgtgcgcattagcaatagttctttgttgctcagtaggccatgaagctagtgccgcccgtggtggatggatgtgcccggattctgttctgatcttcataatcaggactgggctgggatacttggctgtgtggctccggctgattctatctgtatgccacacggggtaacctagcagactggggggggcaaggcatggggcttatttcggcctggggaaacggccttcccgcttttggaggggacaagtaagccccccataatggacggattgtcccacggcgcgcctgaaactacaacctatgctcccccctgacagggccgctatttttgcccaggcttctcaaacgactttctgtcggcgaacggaccc

SEQ ID NO: 188535 - DNA, 718 bp, Arabidopsis thaliana
  unsure (1)..(718): unsure at all n locations
gcaacttgcatgctgcagtactacggccggcagcggaggttagcgaatcgatccctaccacagcgtgcacacctccccggcgccgtcgaggttccacaggctgccccacgtggcgccgtcctcctcgctggacccgtactcgtcgctggccgtggagccgcagcagctgccggtgccggcctgtccgccggcgccgtggagcacgaggaggtcgtcgcagcaggacatggggcacaagaagcaatccatggcgtcgtgcatgaccaggtcggccccggcttcggtggctaccgacgtcgtcgtcggcggcgcgcgcacgcgtcaccggtcgcgctgccgcagtcgttgtcgccggacgccgccgtggcccggtgatgcagcacgcgccgcgcgctaggtccccgccctcgtcgaggtgcaggtgctgccgcccaagagactgctgctgcatcatcatttcccggcgctgcttgaggaaccgggctctccgcgtcaacgttcttgacgttgccttcttgaatctcccatattcttgattgttcgtctccgggagctcacatctcacactgttatcacgtgtacactacagtacagtactataatgagtaataaaactacacatcagatgccaaattaaagaacttttattttagttgccatcagngtttcggtttcgaatcaaaaattttggtttttgccgttttccattggattaaaa

SEQ ID NO: 188536 - DNA, 616 bp, Arabidopsis thaliana
caccgggcatctgtacagcgtggacgctgcacgcgaccgtggacaccccgcgcagcaccaaaattattaagcacctcaccagttagtaattacctgcaccgctacggatcagagctgttataatcaaaggtagccctgtcagctttggcacatgcatgccaccttgaagtgttcacacggcatgtgctgttgtgataatgcgtatagcccatgggtacgtacacacatggttgttgttgttgttgttgagttgttttgtacttgacctaatgaataaccacggaaacaacttacccaaaccaaaaaaacatgaacagcgcgtatacaatggcaacagcactaccaagtgtagctgtacgtacaccaagcacaattattacgcgatggcatggaatgcacggaattaaacgcatgtataatttgtggccacaccccacacgcacgcgcgcgcgtcacatcacatgaacgcgtgcagctagcggatggcattcacgcatatgcatgcatcgtctatgtcacctgatagaccagcaataaaatcatatataaactccgctgcataacataatcatacacctttcagcgcataaagcaaatcagcatgcctaaattaagg

SEQ ID NO: 188537 - DNA, 751 bp, Arabidopsis thaliana
cccgtggaccctgtgagcacggacctgcagcccttgcacaggacgcggcagacgatgcagctcatcgatctgccccgctgtgtggatcgatcgagcggcacgcaccggtgtatatatgcgggcactgagccttctccttggatatatatgggcgctagctgcagttctatctcgatctctctgtggcagggacaaacgtacggtatgggaagcgcacgacccatgagcagctagctaggcgaccatggcggcggccggggtttttatgccactgcagcaccagctgaaaaaccgatggatagaggtccgtgagggacagcgggaccaggactagaagctagctaggagagaaggaaggctgggggctgcatgcttatatacacaaacctggctggatgctggagcacagaggaagaggcacctgcaccagggggcacaattaaaaggtgcgattcgaggaaagacaatagaaattggcggctgcgctccaatgactttgccggatggcgccatgctgtggtgcctacagaccactgtatgtcccatattgtgcggtgccctgactgcacgcaagctaggcgtaatacctgtcatacctgatgcctgagtgaaattgccatcccctcacaagagacacaatatgcgtagcgcgctcataaggtggaaagcccggtgagcctaaggagtgggctaactgacaggagggggggggcgctgactgccccgttgtccagagggaaacctgcccggc

SEQ ID NO: 188538 - DNA, 540 bp, Arabidopsis thaliana
ttgttggttctggtgcccgtaccgctcgagaaatgctgggtcgatctcggcttccgggggcagctttttttttttttactgggagcccgatgaaaaaggaggaggtcttagcggcctctaaaacttcagcctaccccatgatgcagagaatggatgaagagaagatagctgagaagttccccgctggagacacggactatgatcgaggagcgtatatggcaggcgaatcactggcggatgggcgaccagctgctggcgggccatgagttcgcagaccttatgaatggagagggagagcatgtgcggaccatctaatgccaggatgccctagagagtatcgtggagtagcccgagtgcccaggacgccgagtgccatggacgtaagatgcccacagatttcaatgactgtgggggcctgcaccgttcttatcagagcgagggacatatcccctttcctcttccggtgagagcatcgctgattcccagcctagatatgggttctggacgtgcagatgctcttttgagaagatacactactca

SEQ ID NO: 188539 - DNA, 346 bp, Arabidopsis thaliana
gggacgaagacagaaacaaacaggaaaaacccagaacggacttttatcttttaccagcacaacaccacagacaaagaacaggggaggggggggacacaaacccaggcaacacaaccaaccaagaaacagcagaacgcgagaacgaggccaccggagaacacggagggcaccagcaaaccgagaggaacccaacggaacgaccaaggtgcagagacccacgacagaagcacacaaggaagacacggaccacaaagaaccgcaccagagggacgacaacagaacgacaagaccaaacgcagaatccagcaagcacgaaaaacgccagccgcacggagcgaaccccacc

SEQ ID NO: 188540 - DNA, 622 bp, Arabidopsis thaliana
aacccctgcaaaaaacccctacggagtttgggccaccgggccccgccgagagacaaaaccacccgaaactggggggagcaggaggttacaatgttattcccgggaccggacaacaacaaccgagcaagggggggacacacaacaaaggccaaaccagacagccacaacaagaagccaaccaaaaacccacacaaaagccccgcacgcagcaaccgaaagcggccacacggggcaaaaaagaacaaagaggacaccgaccaaaaaacacaggacaaacacgcaggcaagagacccaagaagaaacccgcacggaacaccaaagcgagaaaggaaaggaggacataccaacactacgcagaagaaacccaccacacaagacaccacacaacaacggacagcgaaaacccgggccccaagagcgcaaaggaagagaaggaaaaaggccccgagaaaaaaacaccaaacgacatccacccgaaggacacaacaagcaccaggcggagaaaaagtagacccaccccagaggagtcaaaaccgcgaccgtagagccccccgatgagaaccaccgcaccagcagaagaccacgaccctcacacacaaacaaacccaggacgcccacatc

SEQ ID NO: 188541 - DNA, 897 bp, Arabidopsis thaliana
  unsure (1)..(897): unsure at all n locations
aaaaaccnttttgggtttagaaaaacggagccccaaagaggaggagaaagattgaaaaatagtggaacagaggtttgattttaagaggagaagaaatataagaaggagggtgaaaaaagaaaaagggaggaatgaagagaaaagaaaaagagaagaagaggagaaaaaaaatggaataaaggaaagaaataaggacatgttgaaatacgaagaaagagacagagaggagtggaaggaaaaaaaggaaattatgctgaatgtgagaaagggaaagagaggaggggagaaaaggacataaaaaagatcgataggagagtcattgggaaagtaaggagttaaagttggataagtgataaaatagagagagtggagaaatgagtagctataataaggtattaataagaaaaaggctagacttaggtggggggaggaaaatgcaaaaatgaagaaagagagcaaaatgaaggggattagtagaggaagaaagagagaaaaagttgaaaagatgatcaatatggtacagggaagaaaagtaaaaaagaaattgtaataaagataaaacagagaagaaagctaatatagtataaaaaaacaaagaagaatttttaagtaatagagaggtaaaaaggaaaaaaggagtaaataaggagaaaagagaataagataagaagttgactagaatctagtaagggaagaagagacgctaagaaaaatgagtaaagaagagaaattaaagtaacgaaagacagttgggtatacaatgtggggagagagatagaattatggtagaagaaaggaaacggagaaaggtaaagaattgggataaagtaaaaggttaaatcaaacagttagaggagagtgaaggaacagagttaaccaggtatatgttgaaagcaa

SEQ ID NO: 188542 - DNA, 659 bp, Arabidopsis thaliana
cgcggatggcggccgcttctttagaactagtggactcccccggttctgcagttatattcgcggcccgccaacaagcaagacttcgtgatgtcatatggatcacgatgagggtacctcacttcacttctacaagcttaagagacaacgaagcagtcattggcctttcatcgggtcatagccgggaggcaactcattaaattctctctgggggcttacgtttggctctccttgacttactacatacttccgtctgacctcctagcacaagccagtctaaccggccatcttggttaagtgaatgaccggacacctgtactggtgactgactggttgctttaccgttgtggggtttaagaaagggtgtcacgtttaggaccaacgccccaaagaatgggacatccctcacgcctggcttataggtttttgtgttaccggaccacaccaggccccttgtagggaagggttcaccagggaagaaagacaccattgggcacaggaggttcctcctaactccgggatttccgaaagaatttccggaacctttggacttctccccaagctgaaataccattaaggcgggaagaccggatggccacttaattgaaataacatccctctggggaagtggaatgggctccagtcaattacctaattgcttc

SEQ ID NO: 188543 - DNA, 100 bp, Arabidopsis thaliana
atcgtacttgtcgtacttcttacagatcgagttatctctagtcagaatatcgatcacagtcatcttcttccaaatctatcacaagaagctcccagatctg

SEQ ID NO: 188544 - DNA, 1170 bp, Arabidopsis thaliana
ttttggggattcaagcagaacaccacgcccaccccccgtgacgcgggataatggagacttccacccccgaagacgcatacccaagcccgacacagcatttttttagcttatatcaaccgagaaaaacatcacaatagcccaacacctccggagaggggggaaaccaaaacctacgaggcacgcaaccactcactggaggacccccctagagccgaccaaacaccaggacccgactctggagcacacaccaacaaggatactcgcccgtccccccctaccccaagggaggcaacatcggcaaacacaaacgggggaaactccccccgccaggggggcacagactcacacaacgcggaaaaaaatcaggggacatatacctagcaacgaggaaaccctcctaccaaagcacccagacccaaaacacacacctaggacgccaggcaaccactatgactaccccctgctcctgagcccgcgacgatgacaacaaacagatcttcagaactcaaccaacgaacgtactcctgacaacaagcggcgattcagatgccagcaagtgactacctctgctcggaccgcattcaaccgaaaagcgatcgactatacctatagcacaccaatgatgtgggcacggcaaccacacccaataaccacaaagacccggaccccttcgagcgtactacacgcgaacccggaacggaagccaactaaactcgtacacgccgagctacactccaccaccaactcatacacagaagtgacaccacaaacatcggatgaggacgccccccaaagcacacccccacagacacccccataacgaaccccaaactgcccactctataacagaccaacacacacaaacgtgcacacaccccgcacccaaacactaaccagccccaacaacaggcgtacgaggcacgcaggatccgacacaaaacatgacccccccagccgggggtgcgtaccccaaaaaagccccccaggacccagaaaatcacaaaccctcagcccccctcgaaaaaccccccctccaaaccacaaagcacgggacctaccccacacaagccaacccacaaacccacccacagacaaagagacgacacaccacaccaaaaaacgcccaacacaaaacgatacagccacccaccacacgccaaagccgctaga

SEQ ID NO: 188545 - DNA, 552 bp, Arabidopsis thaliana
acaaccaaaccaggggggaagaaaaaccccaaaacaaaccaggccacacaagcagccaaccacgaaacaaaccccccaccccacacaagaccacacaagcggccccccgaaaccaagaagaccacacacaacccgggacaggccaccaaaacgaaaacaaaaggggcccacaccgaaacccgggaaaaaacaaggcagccgagaaggcacccaaccaaccacagggaaagcggcccccagaggagccaagaaagacacaaaaacagcaccagaaaaaaacaggacccaggcaccaaggggaaccacgcgacgcgaccaaaaagaccctccggaaaggagagcaaaccgagacaacaacggacagcccagacacgcaacacgacagcggagaaagcaccaaacagacgacagacacaagaagcggaaaacccaaggaccaaacccgaacaacacgcacaggaccagcccacaaaccgacaccaaagacaagccccagcaaccacagaaaaacacacgcacgccaaaaaacgagacaccaaacaaagcgggacg

SEQ ID NO: 188546 - DNA, 404 bp, Arabidopsis thaliana
agccagcccgccaggaaggaggcagacgcagagcgagaaccagcacccactacgagacaagcaagagaaaacgcacagcgacgcagcagagagcgcacaagcgacacgagacacaacacgcccacccccagagaggagaaagtggaaatcgatggccattgcaaaaagcctttgagattgggacaaacacccaacaccaacgataacaggaaaaacgccgcctctgcctttcagaacaggaaacagagacggaggggggagccaaacccgagcgcaagggcagccacgagcaagaacaacgatcagaagagcaaagggggcagcgacacaccccaatcgaaacagaggcgaccacaccgacgaaagacgacgcacgcgcgggcgagacacgatgggcgcgcaca

SEQ ID NO: 188547 - DNA, 401 bp, Arabidopsis thaliana
ttggccaaagaggccattaggggatagggggcacggcccgccgggccggaccggaaaacccggggggcccaagcgagcgaactaaaccatttttacaaggggggcaaaaaaacaaaacgggcgagggggaggcccagcaaaaaaaaaagctccaaaaccccatagggcacacaccacagacgcaggcacgggagagcaggacccacccacggaggcgggggggatgccaacggcacaagaccccaccccaacaaaatacccagacaacatataagacgggggcgagcgagcaaccaacacccaggacgggaaacggggccagcgccacaagaaaaccccgggaccggggacacaagaatcagaagagccaaggacaacagcggacgggagcccccacaaaa

SEQ ID NO: 188548 - DNA, 817 bp, Arabidopsis thaliana
aggaaaaaatagggaataatataataaaaaatatatgttcaagatattatatgtgtggagaagtggaggttattaattataacaaaatgggaacatgagatagtttgtgtagtggaaatagaaaaagtttttcgtggtgaataagaaaggaaggaataatatattagtgtgtgaatgtattgataataggataagtgaaaaataaaaaagaatagtgtggaggtgtagaaaattataagaaaaggtgataagagagtaaagatggaaaaaaggttagatgggagatttgaaagattatgtgttaaaaaaagtctgggtgagggaaatatgaaatggagggtgaaaaattatggtttttatttatgagagataagattatataggggggttgtgggaagattaagtgtttaaatatagggggaaagagtattaatagagagtgtttttaagatagaaaagaagaaattcaataaattatgattggtttagggaaaggaaggaaattaaattgaggaggttgtaatgtaggggaggggtattaataaaaaaaatgagagagtttaaatgatggtagagggaaaaaataagattgggaggtaggttatgataaatgggctcttgtagtgaataatggaagataaagatagtaggtgggtagttgtatgattgaagaagcatgaaagtagtaatgttataatggtggaggtgtgtgggtatgtatattttaaaaacgaagaagttatgtattatagtagagggtaagcatgtaaggacgatgattggagtatatggttaggatatatagagaaggtgtgtg

SEQ ID NO: 188549 - DNA, 606 bp, Arabidopsis thaliana
cccggggccccggcggggctggcggagcagcccgggaaataagcgggagccccccgggtctgctagtttactcgacggaccgaggcaagacaaccaaaacccggcccgggggagaccaaagaggaccagcgaaagccccagagcccggacaaaggggaaacacacagagaacgcgaacagcgaacaaagaaacggggaccgaggagaaagaggcgcacacgaaaaaggggggggcgcaacaaccgaccaaacccagacgggacgaaccggggacacccgggaaagttcacaagagacagaacaaaaaagcgaacaaccgcgaaagaggaaagaaaaacaaacacacgccccgggacaagacaaacagggaaacaacacgacggagggaagggaagaaacaaaccccgccgaatccaccaaggaaagccacgggaacaaaacaggagagcgcaaccacaacacagaaacggcagccccgaatggcggaaccggtggacacaggaagccgcacacaacaggggatacgagcggggcaatcacgcaaaacaccaccgcgagctggaaccacggaaaaacaaagcagaccacgccgggagacaaaagaat

SEQ ID NO: 188550 - DNA, 610 bp, Arabidopsis thaliana
ggcacgcacacctcctcatatagcccgcccacacagggggggtgcgttgggacgcacaccacctaccaccacccagccacccctgacccaactaccccaacaatcccagacgtagtcaccactcggaacacaaaccagaagccccgcccaaaaaccaagggtcacatcaatgggaacacatccatctacaaagtgcgacacaacccgccggtggaccaacacccgcccgaaaggcgagagacccgcccccacgaggccagagctgagctacaaccacacatcgcaccccctcacacgagccagacacaggagcgacgacacccccgccacagcttagcctcccgaacacgaacacagagcagaacgatcagccaccacgccacataagccccacgcagactcgcaccagccgaacacggacacagaaaagccccacccaaccagacaacgacacccacgatgacccctacgcacaccaaacacgccaacatcaaccgtacgacgacgtaggctagacagacgaccgcactagaccgacagcccgcgcgcaatatcaacaccactcccagcctgtcgcaactaccatccccatccagatagtccgccgcaa

SEQ ID NO: 188551 - DNA, 1498 bp, Arabidopsis thaliana
ccagccgcgaaacgtgtacgccaggcagaatctcagcagcacgaaacccatcaagacgaacaccacccgcgcttatccctctcttccaaccacccgagacccccgacacccattgacactcaacacccgatacatcctctctccacccacccacccatgcgacaaacttgaaactccactgcccactggccaagaacccactttggggttttgggggccccgctagcccgacaccggacccgagaatatccggggaacgccccacggcggtacggtttttttactttttcttgaagagaaacacgacccacaccccatacctgccgcgcagcgggcgatcccaccacccatcggtaaagcgcggacacaaccccctcccagcacaacaggcaccccgcaccccctgtacccaggcaaggcaacacccacaacacaccaaaagcgcaccgagcccctctaggaacccccatgcacaggcgaccagagcttacatcactcccgcaccttccacacgcgaaccctttggaccctacctgccctcacagcgtcccccgctacaagaactctcgcaccgccatcccgagggactacctcacatctactaacgagcaacttacctcatcaccagaatacgctgccgcgcggcccagaacaacacccattaccggctctggcccaaagggcaagacagctatactcagccgcaacatccatatgtcgcacgaccagacgcagagcgagacgcatttccctcattaaccacgagccgcaccatgacgacgctcacccatacacccgcactacgaccgacaaactacctaacacgcctcgtcccacagcagacacaatctacgaccagccaacaccccacgtaagaccacaacagggcgcacgatgaaagctactagtgcaaccagcgcgcgctaagtacaactcgcggacatcgatacacatctacaccagccctatgacaaccaccactagatctatcacccacacgcgcaataacaccacccatcactactcccgactcacgacgccagtcacgcagaatctctcgtaccacgcagcagaccgatctccgagcgtgacgacgcagacgcaccatatatcacctagcgtcccgtaggttcatcgacgcccacatacacacgacctacgatctcgctccagcaccactcacacacgcacgatcaccgccgctgcactgtcgtccacgacggccaccgtaccacagtcctacgcgtctggtccaacaatgcccctcatgtaccacctcccatgatacgccgtgctacacaacatcccaccattatctcacacacgcgcggtccaagacacccccacttaccatgctggcacatgcgcagcaccgcagcactccgcagcaccagctacattaccctcccctaacgaggctcgcaatgcccacccatctgcatgtcgtccactcctcaagtctctaccatgcaccaccacgctcgccacacctcctaac

SEQ ID NO: 188552 - DNA, 531 bp, Arabidopsis thaliana
tataggcatatctggttctcctgcacgtaccggtccggaattgccggtcaaactaaagctcccggagcccgcttgtattttttttccccggacgcactctgaaacataaagggcgaacgtcatggatatattgatcaccacgcagtgatcggccaaatttcagagcatacaaacgattctcggatcacagacacactcgttagctataaaagttattagacttcaaacacatgctacttgtctaggataggttcgtaagttccagaatgcaactctcactttctaccatctcaatacctttactatttctatcgtctggtttctcagtctttatctgtactaatcattctcttattgcctctcttatgtttgtcttataaacccatctaacgctgggaatctttacttatcgtcactggccaggatactttatccctgtctgaaacacgactacggtctcatagttctaacaagataggatgctctagtcaaccacatcaatcaatcttctagttcttgtgagacattatc

SEQ ID NO: 188553 - DNA, 682 bp, Arabidopsis thaliana
gggataaagtatatctcgcagtgagctctgttcacctcgcaagaaccgggcactttttttttattacctgttaaactggacaaaggtaggaacatgcacgtgtacaaataaattaccaaagagggggtgtggatgaagttttacataggggtataacataacacacaagtgggagtcttgtttccaccgtctacagattcaatatggcttgagctattcaaaaactaggaaacgtgttaataataattacttactaaatcaatatggacgagttcaaaaggtaggcatatcgatatgcctatagtgaagttcaaaacgaagcggtttgagcacgcccttcattggtattttcaaagatcgaaagttaatcccgagccaacaaaaaaaatggaactacgaatagggccgtgaacgcaatgagatgtataaaccatacaattggggattatatttttatattatccaaaaataccattataagctaatgttatagcgtgtgagcactacaaatcgttaatccctgtatgagagaacacgtatgataatcttaaacagttcatggggaaaataatgtgaattgaaatataataaaagaaattggctacttccttacaattgtctttatgggtgaaattgaaatctatgtggagacaactccggggattatataaccttatcataa

SEQ ID NO: 188554 - DNA, 844 bp, Arabidopsis thaliana
agggaaagcggcccgccgcagcaccggccggaaacccggaacgaccagcgccgattttactttaaaacggacagaacgaaccgagggcgggggacaccaaaaaggcgcccccccaaccaaacagaagaaagcagcaacaggaacagcccggacaaaaaaagacatcagacacaccgccaaagaaaccagaacgcacgagcgaaaaagacgcacagaaacacaaaacaaacgaaaccaagaggacaaaacaacaagacggccaagcaaagaacacaggcgccaaaaacaaccaaaagaaaaagaacgaagccaaaaacacacgacgacaaaaacgaaaacaagcacaagaacaccaacccggccaccccggcacaaacaacagacaaaggcccaacaggcccctcacacaacaacggaccaccagggaacactccacgcagggggaacaacccaaggacaatccccgaagcaatcgcagtcccacatgaacacaaaacaaccgagcaaggccgaccaaacaaagcgagaaacaccggacgtccacacggggaaacggacaacaacaaactggggaacaccaaaaaaaaaaacaacataacgacgaccacgagcggcaacaaggctaaaaaacaaaacacgagaacggagagactccccggccacacacaaagaacccagccaagaaaaaaaaccgcagaacggaaacagatgcacaaaaaaaccacccgaccccggaaacggacgaaagtacaaagaaaacccaccccacccaggggccccccaacaaccaacagcaaaacagaaccgggagcgcgacgacaaccacaccggaaaacgaaaaaaa

SEQ ID NO: 188555 - DNA, 495 bp, Arabidopsis thaliana
aaaccaattaggggtaagcatagaagctgctgctggaccgggtggggggatcgtcgtataacatccaggcgcccgctttctgcattaattcgcggccgccaaagctgtatctctctgacatgcaaggccaaggatctgaccggaagctgtcactggaacttataacaatcatgcagcctgggatgctaaactcgaggatgggaccatggaatcaccaagtgtcctttcaaccgaagagcttcatgtgggtgtcagtgattcccggctggcaccattgatgagcgaccacaccttgtgcccatcaagaatcttaggactcatgatcaacccgaggccgtttttttactcggggattgatactccgatatagttccccacagtttcgccagtgtttcgaggggtcaccaggttggtcttcgtaagaacggcgtggtacctgggcgttaacaacccaacttgtgcttccaaaggaaggtgacctgggtattgcaattg

SEQ ID NO: 188556 - DNA, 842 bp, Arabidopsis thaliana
  unsure (1)..(842): unsure at all n locations
aaaaccccccccaagtttctaaaaccggggccccccccccgggggggggggcggcttcctgtaacacagaagggggaccccccgggtctgggaagtaaatttttccgcggccgcgctttttggaagaataaacccacagaccccccaaaagggtgtttcccactcttccacaccacaaaaacacgtgggggcgccnccaaaaaaaaaattttctcttctcttcctgtggggaccctcaccccacccaaaaggaagaattttccaggaagacaatttttctcttcttatatttaatcctggaggaagaaaaaaataaaaaacaattttttccggaacggcccaaaaaacaaaaaaaagaaaacactttttttgggtaagaaattttgaagatgaatttttccccttggaataatggacgggaggcccgggggctacatatggcagcaccagaacacaacaaggtcgggctcttaaatatcaaaccactgggggccctcttaaggtcacgcaacaattcttgggggaacccaacgccccactcgaagcaagaaccaccggtcgatcattccacctaaagtctcaatccaagggtcaacccgcggaagaaacctcgtaccgggtcacagaattcacaaggtaaccacatacacagactttttccctaatccttccaaattcccacccaaaactttttttaaaaaggggggaccggtcgggttttttgggggtctttccaccggggccaaatataaccttccaacccaatgggcccggggcccccaaaagccttccgggcggaaagccttcccgggaactcggggtcttcccccccaataaggccc

SEQ ID NO: 188557 - DNA, 759 bp, Arabidopsis thaliana
aaaggttatacaatacgcctggtagtctaccactcgctggatggcaggaccgcatctagtaacatagtggtatccccccgtttttgcagtgtaattcgcggcacgcgccaaactaccactaacgaggactggtgtggttgtacttaacagtgataacagaacattgactcgattatttaaatcgatgaacacaagtataaactagataaagaagcatcaagtgctatactttagtctcttgtcctgagcccttataagatagcctatttcgtgcgtaaagatgaacaatatctatcgcgaataactgatacaatcatctcaataaccacttcatacactagagacttcattcgttagagagttccatttattcgcttggatacagcgtcttattgaccaacctatcggatttctcggacaaattagaatctttgtgatgctgaggaacgtaccctactattgaccgaagagaccgaatatgggtcattgtctcttgttatcagcctagactccagatactctgatctgatgcactatatgcgggggtccaaccagctggtgactcatcgattgatcgatcgttgtcgaatattttgttcgtcttgaactacaaggaggaccatcctcttttgcggggccatccgagctggaataatacggaattggtaccacgattttagtgtattctcaggattacgtccactatccccatatggccgcgtacatatgtgccctaagtgactttcgaaattccctcta

SEQ ID NO: 188558 - DNA, 489 bp, Arabidopsis thaliana
  unsure (1)..(489): unsure at all n locations
aagccagattcgaancgcgggcgcaagttctaacggcgggagttctccactatagaattggaacatcataaaaacgaaagaaatgaaacgccttccgttgaggtgaatcaagagatccaaaatcaaatatgagttgaagattcgagctcaaggatttagaagagctgccgtcaaatgttttttttttcaagacgatgagnaggaagagacactncaaacgaacgcgaacacagaagacctgtgacgatgcctgcatagaagttcttagaaaggagctctttaagaaaaaagtaccagcgggtgaactacgatgatgtgagaccttatatcgaacgtgttgcgaatggagagccttcaaatatttttcagggagaaaccatgactaattcgctttctagctacgggaccttctggaggggaacaaaaagatctttgcctgagaccaacaaagacttagagaatataatactctatccaggcttgaaggct

SEQ ID NO: 188559 - DNA, 404 bp, Arabidopsis thaliana
ataatagagtgatgttagaggggggcaaatcttaaaagcggggaaatttgggttaaaagatagacaccagcaaacggcgcagctaaaagcacgccacctgcacaatgatacggaacatccaacggaacggagcaaatgaggacatagcaagagacgaggtacaactacctgagaggaaagggcctttttttcttaagggggttagagtacaccaaacagaacgactggtcataggacgccgcatagacctaaggaagctcacgcatcaaaataaatatctcataaaatctaaacggggaatgaggttcacgaactgtatgcaagagacgaactgagcaagaggtatgtacatcaagtcgaacgccgcgagataaagacacgcagtccctcacctatctcacgac

SEQ ID NO: 188560 - DNA, 412 bp, Arabidopsis thaliana
cggagggaatgatatggagaaaaaaagagaaggcccttaagacgacgccccccctagcctatgaggggataaataagcttgatatcgaattcgcggccgcgacaagtcaatctaagaggataggaaaaaaacagaaactattgagagaaacaccggaacgatctcagctctgagtgctgtcgtcttttagctacagttttatcataaataagatgctgaatgctcattgaagaacaccgggttggggaatttttgtctgaggaaagacactggaactcgcgtgtcttttatgagaaaggtaagagtagtagaaagatcgttgtggtgccacggaaaaccattatgggggtcggatgaatggtattgaattttggtgtaccgacactcactttataaatttgcaacttggctt

SEQ ID NO: 188561 - DNA, 519 bp, Arabidopsis thaliana
ctggagcttcaccggggtggggggcggtctaatttaatggatcccccaggctgcaagaattggcgggccgatagactagtggtggatattcaaaataaaacttcaaccacattcacttatggcctaatgattaaaataaaatgcttaacacttcaaccggaattatgggaagaagacctttgcaaaattttctcattttgcagatggtaaaaccctaaggttgattttcttccactttttccggatagaccggaaccagggggggtcattgaatatttttcccggaacctgggaaaaccaccagctttaattttttcaacgtttttaaaggttttttaccccaccttggttggcacgcaccagcttgcaccttcaaaataatttaccaacccttcaacgccttccttaaaaaccaattagctttgggggtctctttagctccccaaccttgaaattggttttaacttaaacccataaattctcggatcccaatttcttaaggttaaaacccccatctcc

SEQ ID NO: 188562 - DNA, 255 bp, Arabidopsis thaliana
tggagctgcaccgcggtggggggcgctctttactagaggaggccaagcccggaagaaacgcagtcgggacggaaaagacagtgctcaatacaacagacaactgatcgaacacataccagatagagttctgacataacggggaacactcatttagggtacaaacccagtccaacatggggcttaggggagagttttctctttcaagggatggtgaaaacaaacccaagaaggatacaccattttttttttgaaacc

SEQ ID NO: 188563 - DNA, 423 bp, Arabidopsis thaliana
  unsure (1)..(423): unsure at all n locations
tcacgggggggggggcgctcttttaccaaggggaagcccccgcgctggaagaatttgggggccgccaaaaaaggctttttaagacgatgtgggggattttttaagaaccaaaggtttttttttccctggcatttggccagatgaagggttaaggacccattattcaagaatttttaaggaggtctctctaaaagaggaaggaaaanaacccaaaaccaaaacccctttctggtttctctttaaaacgtagtggggaaggcttttccgttaaaggaagaaaaacaaaccatttggtccggattggaccaaaacacggattaccaaggctgggaaaagggttccaggctcaaaagagaaccttggaactcccaacggattctggagaaggtctttaattttaactacaaggttcaatgtttccaa

SEQ ID NO: 188564 - DNA, 467 bp, Arabidopsis thaliana
aagcctgatatcgaattcgcgggcggcgaattttcttgattggggattacccccagcctggtgactttgccaagaaaggccaccagggggccattaagattggtggttccaatgccgaaaaaccaaagatggttggaaggcacctttgcctgggagaagaacctatgagtcacatatcgaggagaaccattccctcccttaaatcttaccacccggatgaattatcggtggaagaatggaaacttagtaggaaaccggaaaaccttctcaagattcaggaagaaaatcaaatggcttccttggaacctggaacccttttaacttccttggtatgcccgggctgggttgattccaaaccaattaattccgtcttccggctcttaccgaagaacccttcccgaagaattggaagaaaaaccagaaaaaagttttcgtttttgggttaatttccttccttttttaggcct

SEQ ID NO: 188565 - DNA, 462 bp, Arabidopsis thaliana
  unsure (1)..(462): unsure at all n locations
agcccgcaggtaccggngcggaagacccgggctcaaccaggcgggcaaagcgagacagaagagacggccgcgaccaagaaagaggaggaagcaaagcccanagcgacaggacaccagaaggaagagccggcagccgaacgcgaaggaaggaggccggaagacacagaccacccagaaagccacgagagaattctgtcagcgggggcgaaagagaagacccacgacgacaagcaaaaagagggctgccccggcggagaacgcgaggacaaccacaacggagaccgggcctggcaggaaaaaggaaagtcccgcagacgcccagctcgcccccaaaaccacagaccgggaagaagccggccccggtcgccccccaaacggccacagcaaccaaagacaacaacccaacccccactgcccgcccccccccccccccaacagacccgtgcgcagagcacagcgccc

SEQ ID NO: 188566 - DNA, 487 bp, Arabidopsis thaliana
  unsure (1)..(487): unsure at all n locations
agacccacgcgtnncgaaagaacaaatgcattggtcttttactggaatgacaatttttgctattatctggctaggaaacttcccctgagtggctaggtgaactagcctttcatataatagattaggtgaaaaaccatcttgacaacaattatttccaagaggttacggatgaaggagatacttcggagatagaggaagcggccgacggaaggctttcctgctttaagggggggtgccccagaccactttataggctgggtctactattatgaatgatgataaggcaccaaggtaaccctggaatctggccgagctacctagacttcctggaaagaaagaatatgttcaaaggaataatatccgagtttacatgagtataatacctgcttttcaagagctaggcggctataacagtttgaccgcagaattaaaggttgcagacttgttgcaggtctctctaaatattaattaagtacaatagaataac

SEQ ID NO: 188567 - DNA, 508 bp, Arabidopsis thaliana
  unsure (1)..(508): unsure at all n locations
gggtggcggtcgctctattactagaggcgcccctcctgcaagattagcgggccgtatagacctcgtgataacctggtggcagcctcagggaccctggtggggaaggaccttgcatggccattactaggcttcatctaccttctacgaacaggcataacaactcttaaaaaagcctcctccctttagagaagaaaaaagaagaaggcatcaaccggaactttatttgttcttgggagatcaaataccatttgaattttgcaaacagaggaaccgaatttggcagttcgtggccaaggacagaaccataaacctganaattggtgactaataaccggcttaactaaatgggaaccaacccatggtgatcattactcgctgcttgatgtgaataaaaaaaaaagaactgcgcgacagtgtaatcacccaaacccggcacctattaccgggccgggtggataacctaattgattccaagaaatttttggacccccttcttaactttgaggta

SEQ ID NO: 188568 - DNA, 439 bp, Arabidopsis thaliana
  unsure (1)..(439): unsure at all n locations
acggcgagcaacgggggaggaaaagagagccaagggggaaccngaaaagggaggcagacgcaanaaaagttaagtacagtataaatggaaagttgaaagggaagataggacaaacatggggacaaacttttctttggggggtgcgaagaaaggagaaagagaaggggaagagggaaagaaaaaacaggaaaacggggggcggacccggacgcaacagagaaggcaagagggaaacaaaaaggggaagagaaaggagaaaagggggaggaccaaggaccaagagcggacaacagaggggcagacggggaaaagaggaagaccaggaaacgaagagacgggagacaaagaagaagaaaaggaacacacagccgacggggcagagccaaaacgacccgaaggagcggaagaagggcgacagggagacggcggcaaggggaaa

SEQ ID NO: 188569 - DNA, 516 bp, Arabidopsis thaliana
cccccctggcctgtgaggatatcactaagcttgatatcgaattcgcggccgctgtaattcctcaagagactgaaactagctttgatgagaattaacagcgagtgttcacggtctttcgaatcacactactctcaaactagaacagggactatatcatccgtgagctactcttgctctacgaccctcattagcactctccaagctggaaacacatggacctggacagaattgtttctaacgtgaagtggagccagagacttcctggaccacgttagacagatgcgagacctacgcccatgcagaaagtgatacgatgtgatcaaagacactgtgcaagacggcttagcagtcgctgtgcaacacatgacgaagaaactgtctatgtgtatcctgccgttactttcgacacaacaaagttgccctgcagaagccacctggaaactcgagacggtgtaccaacgtgctcccgaacaatactgcctgaagtccttattaccataaagaattgcaacctat

SEQ ID NO: 188570 - DNA, 599 bp, Arabidopsis thaliana
gggccggtttgtcctttgccggggaggtgaatcctttctggcctggaagctttgctcctcggatgttgcagcctccccttattgcgcttggaaccctgcagaggagtttcaatagcgattttttgtgaagctgcggtctacccgggccttttatagctcaacaaatcacccttcacccgaggtcttccctcccttctgggaggctttttaggggccacccccttaataaccgaaccggtataaattcatggcctgctccccatctttttcaaccgccattatctaaagccctccttctaaataattcactgaccaactcttgtctctacttttcccactccacatctattttcactctatattagatagcgtcacgtgatctagagcctttactctgatagttccaacaatctttgaacctacccgggccgcgaatccgccatccatggtcgaccggacctaacccaacacgcaaggtagcatgcgatccatcctaccctttcccatacgggtttccgcgtgcgtagaaaacccttagacccaggctgatggtctgtggtgtgcccatcttgttgcacgccccacctattatgatttaa

SEQ ID NO: 188571 - DNA, 370 bp, Arabidopsis thaliana
  unsure (1)..(370): unsure at all n locations
aaaggacaaccccagaacaggggagagccgccccacgaacaacgggcccacaaaaaaacaaaaaccaaaccaaaagacgacccaaaggcagnnggaaaacgcttatttgaggggggggggnggaagnggggagagggaacggcgaaaaaaaaagcgcagcaggggggcaaaagggaagcggcagaaaaagaaaaacgggaccaggaggaagcgaggcgcaaccaggccaaagacgaagagaaaagccagcagcaagcgaaacgggcccgccgcggggaagcagaccggagaaacaacgggccgcccggcccccggcagaacaccagagaagccgggccagccccggggagggcgcccgggaggacaaaga

SEQ ID NO: 188572 - DNA, 556 bp, Arabidopsis thaliana
  unsure (1)..(556): unsure at all n locations
caaccactaggnaggaaggcacttttaccaacaatgcgngcgaatcaagttgttaaacccggatgaatgtccgatggttccccttaaacccaaagtgcaggacccgtgtttaataaaatgtagcttcttcgtttgttcgttaaccaggtggaccagtaggattaatggcgggaggatttctttccttttgaaatgagttgaagaaagccggaaggcgaggaaccctaacgagctttaaaaggtcctaaaggccgttgaaaaccacgagggccatttgacggtgtggctaagaaagggataatcgttgtatttgacttacggcgggtccgttacttcccctcgttggagataatactctataaagcccgagaacttttgaccttacagtgttaaaagaagccttcatgctaggtgggctggatgaaagtgctcttcttattggtttataaaggtgaagtaagtgggacaagaacgggacttcttcggacgactaatgctgggcttttttagtacaataggaggaacctcgggatgcgaagtagctattagtttttaa

SEQ ID NO: 188573 - DNA, 516 bp, Arabidopsis thaliana
aggagctgcaccgcggaggcgggcgctctcttctagaggagccaacgcgctgcaagaatacgcggccgccttcagagaggaagaacattctaatatccacagagatgggaccagactgtacaggtagcatcacgatagttacgactcaaggagattgataggcacgagtgcaccggcacagacgaaccatcctttcctacaggggggttggagaaaaaaagggtgattcagcggaataaatgagcgagccacgagcgagatggtgcggaatttatgctaggagcgcggagggggaggaacagcgaatcgataagagagaacagatagggaggcggaagaagaggtgccgacggcctctcctgccgaagggagaagagtccgccggataagatccacgggctggcaaagaggacaggacattcggagggaaaggtctcgcctgggagaacggggaaccacaagctgaaacgcgggtcttgaacctaagacgcccgggaagcggcgcggtcctcggac

SEQ ID NO: 188574 - DNA, 424 bp, Arabidopsis thaliana
agcttgatatcgaattcgcggccgctctgaattgacagtggaagacaacgctcgcctgagctagtcaacgaaacgccagccacggagtgacagcaaaaaagcgagcctcaaccaatggtcaccgagctcgaacggaaaactttaccacggagcaccggagcactcgccgtcgtatatcacaaccgagagactactgtccttttttctatgagaggaggagcggacctgctaatgaccgttcccagatgaagtctgatccagacgaaggaaccggcgccgagaaccagcaggaggctcaagggggtaaatctcagtaagaatagcaaggccgcgaaggcatcaacacattgaacctacaactgggaatcacgattttgtgtatggttgaaggccaagacatggaacaccaaaggtccagggctac

SEQ ID NO: 188575 - DNA, 292 bp, Arabidopsis thaliana
gcaaatgtctgggggagctctcctttgtgtttcataagattggtacctatgtaagattggtatttcggggttttgacaattaactggcgtggaagatgatagtctctccacaatcgctccgggaggggtcagagcgggtggatgggggagacttgtgcgagggggtctgaaacactgggagaggagtcaaacttggaggcttacgtgggggtgggaggcgaactaggaagtatctaggggttgtgacaaggaaagaaagtttttaaggacgttaactatttaaagggttgga

SEQ ID NO: 188576 - DNA, 266 bp, Arabidopsis thaliana
  unsure (1)..(266): unsure at all n locations
ccggggaaaaccgacgccaaaaaactggaacaacaccggcagggggctgctcaccggaagaaggaggagaaggggaccggagaaaacgcgaaacgaagggcnccggaaggaagggggcgcagaagacaacaggcacgggacgacgaaggggacaaaccgaagacgggcctgaagaagagaccgggaaggggacaagcaaccaaccgggaggcaaagagggccccccaggggaaaccaagggggggcgcaggaagggaaaggaccaa

SEQ ID NO: 188577 - DNA, 463 bp, Arabidopsis thaliana
  unsure (1)..(463): unsure at all n locations
acaggaaaccaaagacccgagaaaagaccaagaaaaaggcnncaaaaaaaacacagggaaggcaggagggagcccacncggaagagcngaacccaaaganaaaggaaaaacnccgaaacggcgggggagtattttttttggggggagcgcgccangcaagagcccggccgtacaggtataaaccactctcgcatttgtagagagcagaccttcctttttcaaaggggaagctgtggtctggacttaccttcagggagtgcaccgggccgacttcccaagggtaattagcttgaagcttggaacttgaagagaccggcctccatggggctttcacaaaatatgtagggatctatttctcattatccttaaagtgcaccaatggggagcttataacacttactggaagccacaattggaatttaccctgaagggacctgcttgggcttgacgaaaaggttgatga

SEQ ID NO: 188578 - DNA, 171 bp, Arabidopsis thaliana
gggggggggggcgctctattctagggggtgccccggcctgcaagaattcggggcccggaaaaaaccactaggtttaacaaaacacttggtaagaagggggctggtttgaaaatggtaccgggtctttaaagaaccctttgaaaggttcccaaaaccgaaccataccaagaa

SEQ ID NO: 188579 - DNA, 536 bp, Arabidopsis thaliana
tggagctcaccggggaggcggacgctctatttcagaggatccccaggctgcaagatacgcgggcgcacacaaagagacaaccaaaagggcagcagcgaactcccaaggacaacctccggttcccatctcaagaagaggcaccctaggggaagaacggcacagggttctgctggtagagaaaacgataactttttttcaagggcggaaagcggggcagaacccgcaagagcaaagggaacacatagggcgagggataaccaagaggcgaacaggaccagaaagaggccagcacgaaccgggagccaagggaaaggcgacgcaagcacgcaggagaacaaaggggccagcggagaccaacagaaccgggcaaacgaagccaagaaaggggcaacaaggcgcgaaggagccgggcgaccaacgggggggaagcggaagccaagggcgcactctcgagaagcaccgagaagcaaccactgggacggccggaaacaaacgggaggaaaggggggagcaaataaaggcgaggcaaactaaag

SEQ ID NO: 188580 - DNA, 444 bp, Arabidopsis thaliana
  unsure (1)..(444): unsure at all n locations
gcccgcggcgagaaacgggcccccgaaaaggaccgccgagaggagcgcacgggccccccccccagggaacccgccacccgccgaggaagagccaggcccaaagagagggaccttcttactaaaagggggggagggacaacaaagagggaccagggggaaagaaacaaaaacaaggagggagggggggcggcgagacgagacacccacccaccggaaaacgccaaagaaaacgacgaaaaggaaggccccccagaccagaagcgggccgccccaacagggggccagacgacaggaaggcacccgcccagacagccaaaaaagaacccacggagaggccggcccccaccacgagcacagggacgaggccccgggcgaggagcaggggcagcggagccgaagagcccanaagaggccaaggggcgggagcggaaagcgcccccaggc

SEQ ID NO: 188581 - DNA, 426 bp, Arabidopsis thaliana
aaaaaaaaaagaacgacaggggcaagggaacagaagaaaacaaagacaaaccaggccaagagagaaacaaaccggcacgcgagagaaaaaaacggggacggagggcgaacaggaccgaggaccgagaaaagaaaacccccttctccggagggtgggggaaagaacagggggggggaaacgccaaaaaaaacgcccagcacaaaagaggaggagagaacagagacaaaaaggaaaacgggaacgaaacacgaagacacacacgaaagaccaagaaaaaaagacaaagcaaacgagcaaccaaaaggaacggggcgccaaagaaaacagcccgaacccaaagagaaaaagaggacccacacgaagagagcagaccgccagacagagccacaaaccaacaaaagaaacgccaaggggcgccgccgacca

SEQ ID NO: 188582 - DNA, 379 bp, Arabidopsis thaliana
aggcgctgcaccgaggaggcggacgctcactacagaggagcacagcccgcaggaaacgcggccgcggcagacggagacaggaccacggagaaacagaggagaccaaaggaccgaccgtcagcgagagccctactcgggccaggcaacaacatgagaacgatgggcggagggagacccctccccctaaaagggggggcagaaagggaaaaaacccggggcaggcaacaaagagcaagcatgcgccgggagggaaccacagcaagcaggagcccccggccgcagaagacgatgcgggcaggaccgcgcagagagaccgtgaagccccggagcccgggctccgggcgggtcaccgcaagcacggcaaacggacacaggcgag

SEQ ID NO: 188583 - DNA, 414 bp, Arabidopsis thaliana
  unsure (1)..(414): unsure at all n locations
tatcacataatggaaacgcgccgatgaaaaaagacaggaaattcgaaatgagtaccagcctacgcacatatctatctaatattaactgatgagacatatcacatcacagaaacaggagggacctctttcatgggcgttgtcggnaanaacgaggacggcgtcgcaaaaagagagcaggcactggattgtgacaggaagtacggccctgtatgacgccagaaccccagcggcacgggcaagggtaggacccggaccaacggctttaccgagcaaaggagagcaccggcagcctagcagacagacggacggtgcactggcccagtctcaaaggtcagcaacccccgctgcggcccccttggggaagccgagccccccagtcccggacgcaaagccccccgtcaggtagccggtacc

SEQ ID NO: 188584 - DNA, 450 bp, Arabidopsis thaliana
gaggaggccgccccttacagaggagcacagccagcaagaaaaagggccgccaacaagagcgcacaacaacacaccgaagaaagagccgcgcacaagcacacaaagacggacaggagcggaggaccaaacaagccgccgacacaccgaagacaccaacacaacaaaacaaaccctactcgagggggggaaaaagggagaagccacgaagaaaaacaaaacgcgggcccaggaggaggggagacagcgggcacaggaccgaccccccggcgaggaaccgggagcagcagaacccgccaacaaacaaaggaaagcggcgaacagacccggccccgcggagctcaaaggcaggacagcaaacaaccccgcggcagaaaacagccaccaccacaaagggccgaacaaacccacagcagcccagcgaaagacgacaaccagaatgacaacacgcca

SEQ ID NO: 188585 - DNA, 224 bp, Arabidopsis thaliana
cggatggacgatatgagaaccccgaaagattctgggaagagtcttacgctccattcgactccataacgaaccgagagacaggttcactgccgacccacggtcgaaagactccctgtggcccgacgagggccgatagacccttgtggaagagagctttgggagagtgacgaggaacgaaagcagaagcgacttcaggagccgaagaaggaacgaggcattgtggt

SEQ ID NO: 188586 - DNA, 490 bp, Arabidopsis thaliana
ggggggggaagttccgccaaaaaaagaggggaccagagaacgaagagcccaaaggcgccacggcgcacaaggcggaacaacgcgacacacccagcggacgcgagcgagacaaagggggggaggggcaagaaaacagacgagaaaaaaaaaccctcttttaagggggtggggaaagggaaagccggcggacccccacaaacgcgggcaggcggcgcggggggggaggggcgaggacgcgcggagaagaacgcccaccagagagaggccagaccagcgggaggggcgcgcgagaggaagacgcaagagccacgcaagagcaccggcaaaaccggacaaaaaagaaacacacaacccggcccacggcacggagagcacgaagaaaggaaaacgagcggccaagagcagaaaggccacgcccggcgcgagcacgcgcaaaccggacaccgacagcgacgaggcggcagccggaagcgccgcgcgcagaggcggg

SEQ ID NO: 188587 - DNA, 136 bp, Arabidopsis thaliana
  unsure (1)..(136): unsure at all n locations
tgcctgcaagaacttcgcaggcccgcgcggtccgcggaaaatnctaagcccgtccagaaccatgccagatcaagaaacattcgccattaggccagtccaagatgaaagcccccagtcccgatgccttaaaggcggg

SEQ ID NO: 188588 - DNA, 371 bp, Arabidopsis thaliana
aaaatggaccccaaaagccgcccaaaggacaaaccggaggccggcccacacacaaaaacgccacggcgcatttaaccaggatgatgccccgcccaacaaccaagggaaacaaccggggccggcacagggaaacacaccgggggagggaccaggaccgagaccgagaaccaagaacagagaggccacaccacggaggggcgagaaaaacaagggacggagcggacgcgcagcaaaccacgggcagcacgccaggacgcacacacagccgggcagaggcagcacccacaaaccgggagagaggacgccgagcacgccaaccgcgacaggcgccggaaacacgagggagacagccccacacaacaacaagcaca

SEQ ID NO: 188589 - DNA, 1132 bp, Arabidopsis thaliana
ctagaggaacccccctttttttttttttttacacagccgccagaaaaagaacaccttttggattttgtttcactaaaatccttaatagacttcgtaaatacacccccccacatctactaaatataatctatctctgatactaatatacattcgacatttaacaccacatacctttgtcctctcatataaaattaaatttacattcaattattacagtgattctacactaataataaataagatctctcaataacctctcctatatattcaaaactcgctacaaccatcttcatgtcaaaagtaatccccttatctatgtgctatacaccacatacgcaacaactaggaccaatatcctatagtattcgtcacctcatatatcctctacttcataccgatgtatctcctctacacaacactctttccaatatattccacctcaataaatcccagacaacacccctcatacaagtatattctcatttacaatccaaccctattccacgaatcaaacctataacaccactatctcctaacataccaacttacgctctaagaatacctatcccaacccacatcgctctacctagcaacacttactacattccgcacctcaattcaaacactctaaattcattactcttctccactacctataacaaatacgcatttcaatcaatgaaacaatcctctcctatctagttacgtagccatctaaactccatctataacatcatcttaataactatcccctgataatatcaatttataatatcacaccccccattctaatccaagcggcccaccctccaattctttatactcacatcttccaccgatcatctatttgacatctacgtcatgtaacacatatcctggccacactcagaaatcgccccatagaatacatgctccggcctatccctctatttcctagtcaaattcaccccttacaatcacttatactcctactacccactcactttctctatttacaccttctaactctcctctatctttaactaactgcatacacccttccatcaaccacataccaacacaggtttaactatatttctcatctattcacacaaacccttacttcgattaaaaacttttacaaccatatccc

SEQ ID NO: 188590 - DNA, 314 bp, Arabidopsis thaliana
  unsure (1)..(314): unsure at all n locations
ggcccccggaggggagggagggaggcgcccgacagggagagtgcggactgacggcgacgatttacaacgagtttttgagngcacaccgcgccgaacggggaggaggggggccgaaggggggcgccaaacaaggacgcgccccaccacacccacgcaaccgagccggtgccaggaacaaaccaacaaccgaccaaccgcggcgaggccaaaagggccggggccacaacaggatcgcgccaacagcaggccgccgggaaagaaagcagaggggcgagacacccaccagccgcgaaaagccaggtgacggaaaaaca

SEQ ID NO: 188591 - DNA, 948 bp, Arabidopsis thaliana
  unsure (1)..(948): unsure at all n locations
ttggggataaaggggaaaccccgacgccccgaggcaggaaccaccaacgagcccgaccagcaaagaacggagaccgaggggcaaataaacgatttaacgccaacgaccatcccgaggaccaggacaacaccgcggggagggggggaccccaaagaaagccagcgtagagacagccagagcaaacacagaggagcaagggccgaagaagggcacggacaacgaggacagagaaacagccacccgcaaaccgagcgcgcacgaacaggaacacagacgacgccgaagcagccaccaacgacggaccaacaacacagcgcgacagacccgcccacgagccaaaacacacgagaccacacggaacggaccgcagacaaccagccgaaccccagcccgacacaagcaacggcggaacaggacagaagaagcccgcaaggccaaaacacgaaacgacgggcggacgcagcgagaccgacggaaaagagaccaggccaccgaagcagcgaaagacaccaagcgaaagcggaacggacacaaagccggcgcgagccacccgcacgccggaaccgagcggcagacgggcagccacaccacgccgacgatgacacagccgtagcagacccgacagcacagcgcatgacacgcaaaccgccaaccgacaacagacggcgacaggccaagaggggagccagaacatacacggcaacgcgagcgcaacccgcaaccgagaacaggcacgcgcaacgcaacagagacgaccaggcgcgaacacagagccacagcgcgcacaagagacgggcacggaaacgaccagacggagacacaagaagccaagcgccaacggcaggcccacaccaagcggacacgcncaccaagccacacacagcaagcaccacgcacgagaacagggagaggcgcaccacaaccgcaaaaggaagcgcacgcgcaaac

SEQ ID NO: 188592 - DNA, 339 bp, Arabidopsis thaliana
ggaaatgggcaaaaaacccccagaaaacaacaccggaccacgcacaattatcccttttcaccaccacaaaacaaccgaacaacggggaacacaggcaagcagaccaccggcaaaaagaaacacaaacaaaccccagcgagcaaaaacccgcagcacgaacaaccggcaaagacacaaccgccgccccagcgacgacccgcgaggccgcaacaagagcgcgggaccccccacaaaacgtgcagggagaaccccagaaaccgcacacacccgcggatgacccacgaccaaagcccaagtacacccgcaaagaacgaaggggacataaaacagagccccgcc

SEQ ID NO: 188593 - DNA, 497 bp, Arabidopsis thaliana
cggcatgacccgccggcaagcgacccacagaagtattttcgcaacacaatcttgccgccgcgcagccaaacggcgccaagacggacccgagaggcgaacaaggggggggcgcgcgcacgacaacaagcacagaacggcgccgccccaacgaaaacgaaaaacgcccgccagcaaacgacaacgcccaagccacacagaggaaaaaaaaacccccgacaggacccgccatgaagaccgcgccgacggcgccaagagcgacccccacgaacccccaaccgaggacacacggccagagaaagcgcacacccaggacagcaggggtgccgagcccaacaagagcacaagcgcgagcacccgatacgacaccacgcatacacaaagaagacccaccggcggcacgacgaaacacgcaactaaggcgaggaggcgacacgagcaaggaaaagccccgacgaggggaccgccaacaagaaaacacggagcgcggcacagcgagg

SEQ ID NO: 188594 - DNA, 872 bp, Arabidopsis thaliana
ggagcccccaacgagacggcggagcaccaccagaaaaccaacgggagcgaccacggaaagaaaagtaaaccccaggggacgccaaaaaaacggaacaccaaaagagcaggggggggaaacaacccgcaaaaaaacacacagcgggaacacccccaacgcagaaaaggaacacaaacaaacgggaagaaacaccgaaacaaccgcacaaaggagaacgaaaagaacgaacagacgagaacaagaaggcaaaaacccacaaaagccacaaagagaaaaccggacgcgaggacaaacgagagaggaaacaacacgaacaggaggagaagaagaaaaccaccaagagaaagaggcaacaaggaggaacggacacaggaggggaaaggagaacaacacccaagaaaaggagaaagaaaagcacgaacggaccaagcgagacaaagcgggacaagagacgagcaggggaaacacaagcggaggggaacaaaaaggacaacaaacagaaaaacagaaaggagaaaaacaaagagaccagacacgcaggacagggcccacacgactcacaacgaccgaacgcgaaaacaacgaggaggcgcacgagggaccagaacaccagcaaaaccggaaagggagaacacgaggggaacagaaaaaacgaagcaccacaaacggggaaaaccgggggcaagaaccgaagcaggaaaagcccgaacaaggcggacacgaaaaaccacaagagaacggaagccagagacaagaagcgaacacagaaagcaagaacaagacgaacaaaaaggacaacaaaggaccacaacacgaaaaagcaggaagagaaacagcagcaggagaggggaagcccaaaggacaagaccacc

SEQ ID NO: 188595 - DNA, 367 bp, Arabidopsis thaliana
gaaaaataggggcccaaaaaaaacccacacggcaagaccagagcgaccgaacgacgcccagcgggcgcacatttagcgcgattcaaagagcgaccggaaacgggaacaagcggggggcagggggggccagggagcccaaaccaccgcgcagagcacaaagaagaggcgacagaaaacaggcgagaagaacagacggcccaggcggagagacaaaccggaagagcgagcgggacgcggaggaagggggacgcggcgaaggggacaagagacccgcggcgaggacggcgagggcggcgaaacggagagaccggcgcgagggggcaaaccgcagggggggcggcaaggcccagggccagacggcccgagc

SEQ ID NO: 188596 - DNA, 765 bp, Arabidopsis thaliana
ttggggtttttgggggaaaaaagcggtgccccagaggtggagaaagtgagaaagagcgatatgatataaagtgagagagaagaagggaatttttagtttttttaaagaggggaaggagtaggtagagtagaaaatggggtgggggggaaatagtaagaggaaggtgaaataaatgtggaagagataagtagaaaaggtgagtgtgtggggtggtgaatgatggtataagtggatgtatttaagggtgggtaaattatagaatataggtggaggtagtagtgatgaaggagtgaagtgtggagaatttatgagaaaattatgagaaagaagttgatagacgttggggggaaatgatggggtagggaggtaggtgaaaacatgaagtgttcgttgtttaagtggtggtaattagtgtaatcgagttagggtaggatgggcatatggtatcgattaagtgtgaaagatatataggatagagagaaggcagtggtttgataaagattaggctaggtagaaggtggtgtttgggagaagaaggatcggaatgttgttggaagtaggtagatgttggtatggtgagattgagagtgagagaggtggggaagtggtggaaagattgagaagtgatgtataaagagaaggtgagggaagagagagaagagaggtgtgtaggattgtatgagaaaggtggattttatttaggaggtatgatgatgatgaatgaagttagtggttagtggagggttgtgtggtttggtagaaatg

SEQ ID NO: 188597 - DNA, 270 bp, Arabidopsis thaliana
gaaacaccttttagaaaccttccgaaaaatttctcggagaatttgccccagcagacccccgggaatcacaacccccaaaaacaagtccgattttaaaagattttaggccgcaaattgaaatggaaaccacctggacaaccacggcagacgggaacaccaccgcacaaaacctgaggacatgggcgaggacgaaacctacaacgttcatctcaggcactcggactggaaacaactgtggtaaaactcctgggcgaaacggcggccagacag

SEQ ID NO: 188598 - DNA, 922 bp, Arabidopsis thaliana
aaggcccccccggggaggtggccgctctagaactagtggatccccctttctgtatttaattccggccgcccgagatgcccccaatggagcgggttctaaggatcaagctaagaaagccccgaacgccaaaaaatactgacctaaaagaaaacaagcctgcaaagaagaacatgacacatgtcactttccacacgccgaacacatcgacccgacctagaaaccctacgccccaagacaccagtctatcctccagctgcccaaacttaatcattacctacacgccctagtctccctacctttcatatgaatcctctccttgaaccatcatcggagcaacacacctcccccaaaaggctctgacatttggtataaatcactaccgaacgcctttatacccattcgactacaatagccctacatacctggcactgactttgggctctctcagcacaagtgctataattccgcctgtacatcctgtgtccctccaatcaccactccgctccactcatgttatccctcacctcaccctctctcacacctctcgaacccatccatgctcatctatctctcctcattatactctgatctgcctatcatctatcttccatatatagcatcctatcctctctatcagagaatcctacacgtacgcatacacactcttctctgccaagcttccactgctcactatacaactccccagcaactacatcccactatagctaacagacactcccattatgcgcctctacaactgatgcgactctattccactcgtgaaataacctcgtccgacctctccttcctcatcccaaactaagtcctttctccgccattcactacactaattcaacaatattcgctcatacaacaccactcactatacttatactccaacacacttcctgtcaaatgatac

SEQ ID NO: 188599 - DNA, 1070 bp, Arabidopsis thaliana
  unsure (1)..(1070): unsure at all n locations
agccccatggggataagggcaaacccgggcccccggaccgggagggagggacgacacagcaccccaacgagaacaacacgcactatgcaatttgaacccccaccaccgagcccccgcccaaccacacaagaagcgagggaggagacaataacacacaacacaagcacacacggcaacgnaacgccacccaccacacgcaacgaaaacacgaccggaacacacaccagggacgacgacgaacaacgacaccaccccagcaagcaacccgcgcaaccaaatagcaccaaaacacgcctgcacacaaagaccacaacaacaacgaaaaaggcaccgggaagcagagaccacgcaacacaaacacacacgggaccaaaacggggcggggcaacaagcacaaacgccaagccaacccaccacacaccaagcgaagacgaacgcgcccgaacagaaaacaacacgcacaggcaccacgacgaagccagaggaacccacacacagacacagaaaacgccacacgcacacaacgcaacgagccgccgccacgcagccaccgcagccgcacggacaccactaggaacaccaccaaggaaaccacacaaccggccaccagaacacgcacgccggcaagcaccagaggaccccgcgcggcaggactaacaccacccagaaaacggacgcaccacaaaaccagcaacacacaccaaaagaaacgcccaaaaccaaaacccacgaccccgagaacacaacacccaccgacgcacaacccgccccacacaaccagaaccacccacatgaggaacacacaacagcgacacacacacgcaccgcagataccgacccgaccacacacaacagccacagaacaaccgaaccccccgaggcacatcaaacccaccaaagacaaacaaggacgcccgcgaacaacagaaccaacgacaccaacaaggcacacaccaacacaacaacccgaacacacgacgacaacacgaataccaccaaaaacaccccaggaactaccgaccgcacgacgaacccccgcgccgccacgcgaaccgcgaacccaaccacga

SEQ ID NO: 188600 - DNA, 479 bp, Arabidopsis thaliana
gggggaaatatgggccaaaaaaaacccccaagcgaagaagacggcacgcacagcaacgcacacaaccaaccacgatatatcgcagaatttttcagccagagcccccaaaaaccgagaagagagaggagaagaaagaggggggaacaaagaagcgcaccgcgtgagcgaaacacaagaacaagcaaaagcagagaaagaaacaaagcacccgcaaggcacaaaaccgggggcacaacaacgcaaaacagcggacaacaggagaaacacaggaaaccgcaaggggacaacacagacacagcgagggagagaccacgagcgcaaggacagcagccgaaagacgcaccagagggcgacaggagcaaagcccagccgcgcaggaacagagacacgcagggcgggccacgagaggaccgagacgcggggaggagcgaggacacaaagcgacaccgccgcgcagcggagcaaacagccgccagaag

SEQ ID NO: 188601 - DNA, 512 bp, Arabidopsis thaliana
agggagaaaaccgggggccccccgaccgagggaaggacaggccgccccgcgaaccccaacgggaacccaaccggatttgcaatttaaccgcgggccgcaccgcacagaaccaaggggccgggggaaaacaactacgccagtaaacgcccacaccacaaagcaaccacaagcagcgacgggaacacgcaagcggacggagcggaggagcacgacgaacggaggagcacaagcacgccgggccaaaggaggcccaaacaccaacaagccgcagtcccacaggcacacaaaaggaacaagaagcacccgcaaccaacgagacgcgaaccacggaagccacagaccacaagcggggacagggcaaaaccccacaaccacgaaggggacagcccacacccaagacaccaaccaccaggacaacacaggagaaccaggagacgccacaggggggaagcgggcacgccagaaaacaaagaaaaacgacgcggccacacccagcaccacggcggagccgc

SEQ ID NO: 188602 - DNA, 449 bp, Arabidopsis thaliana
  unsure (1)..(449): unsure at all n locations
aaaaaaaaaaccttgggganagaaatagggggcccaagaaagagccccacgggggaagaacggaggaaaccaaaggggggacagaagggaaccccaaaagatatataaacggtgtttaccacagcagacggcgagggcagaaagaacagaaagggggggaagggagggggggccacagccggacgagaacagagacaggggaagggaaccgaagaaagccacggaggaagacacagaagaagcaaagaggggaaagaggagggaggaagggggcgaccacagaaggcggagaaacgaaagcacagacggggaaggagggcacagcccggccagaccagaaccaacgggcaagaaagcgaagagcaaggggcggagacagaaaaagggagaacaggcgacaaaacaggcgacgggaggaggcaggaagaacggaagacggaacggggaca

SEQ ID NO: 188603 - DNA, 1066 bp, Arabidopsis thaliana
aaccccggattggggaaagaggaacacaccacccggagggggacaaccaacaaaacaccacaaccagcccccattacaaaggacgacaaacacaaaaaaacaaggggcgggcgaagcaaccaacacagaacaacccacacaacaaaacaaacaagcgaaaccaaacacaccgaagccaaaccgcagaacccagagacgaaacacaaaaaaaccacacaacgcagcgcagacacaccgagcgaaccgcaagccacccaacgacaaccacaacgccaacccacaacgaaagaaacacaggagaaccgaagcacgcacaacaaaacgcgaaccacaaaccaaccgcgcgaggacaaccagcacgagcaaaagccgaacacaacggagcggacacaccaccgaaatcacgccacccacgagaagcacaacccacgcgagcaaacgaaaccaacacccccacatcaagcacccgcctacagcaagacaccaaccacgcaccaagcggaaagaaaagaacaagcgccacggaacagaacagccgcagagcagggaacggagaagacacaacgggcaggacccgaaacgagaaacaatcagcgccagatacaaaagaggaacaagcaccgcaaaagacggccaaaacaccgcaagaagcgacaacagcccacaccaccacccccaacggacagagcaacaaccacccagcaacaacacagacaccaaaggcacagaaacaacacaaaagacacaccgaaggcagagacggaaggaacccacacccacagcgaaagcaaaacaaaacgacaacagacaccacgcacagaaatagaagaacaaagcaacacgaaacagaccaacaacgcaaccgaaggcgccaaagcgcggacaacacgcggcacccacgacaacgagaaccaaaagacgaacaaacgaaaaaacccagcagcccaacccgaccacgaacggaccaaacgccggaaccagaggagcgagcaacaaaaccacaaaagaaaacacccggcgaacacacaaagacacacagagcaccacgcagaccgacacgcaacaa

SEQ ID NO: 188604 - DNA, 1062 bp, Arabidopsis thaliana
cccgttaaggaatagggaaacccggaccccccgcggcggaacgcaacccacaacccgcgaccaacccacggcggccagcactttaccttataagcccgcgcgacaccacaaaaaaacaaccacaaagggccacggggaacaccaaagcgacacaccgggccccccgaaacaccacccaacggcccgaacggccaaaaaggaacacaacccacaaccacgaacccagcgagcacaaacaacaccagcaaacaaaggaccccgacaacacccaacggacaccggaccgccccccgacaaccaacccccacacacaaggaccagcaacggacaccccgcaaaaccgacagaagacgagccaccaaccccacgacaacaacccacccaaaacagcagaaccaccacacacacacgacccgcgccagcactcaacagagaaaccaaaacccccacgaacaaaaaacccaacaccacaacacacagaccggcccaccccaccagcacgcacacacccaccgcaacaccaacgcaaacaccagaacgcacgcgcaacacaccccagccacagcagacacacaacacgcggcaccacgcggcaacacacaagcgcaaccggcacgccccccaaaaacagcaacccccccgaaccatcccgcagaaagggcagacacccgcaacaaacaccacccgaagggaacacaaacggaccaccgggaacgccaacacaggcgcgagagaccagacgccagcaacagagacgcgataaccgcataaaccgcagccgaaccaacacaacagaaccgcgaaagccaaaacacccaccacaaccaaacaagccgaggggcaagcaaacaagcatccacgcgcggaagagaccaacaccaacaagccaagcagaacccagcgcacgcacacacgccaaaccacaacacaaaccagagcacaaccacgggccccccggcgaaaacaaggggccaccgaaaacaaacgacaacgaccgagacccaccacgcgacgcacacccgaggcaaaccaccacagggcgcggagacccaggccacaaca

SEQ ID NO: 188605 - DNA, 856 bp, Arabidopsis thaliana
cgcccccgagggaggcggccgagaaacagaagcagagggacccggattagaatttaagcggggcgccaagacaaaaggggggagggacaaaaaaacagagccacgcaacgagaagaacgaggaaacacgaaggaaccaggaacaagcgccaacaaaacgcgcaaacaacgaaaccaaaagaaagcagcgcacgaaccaacgaccaaaagacgccaacaaaagcaccaccaagagacaaaaaaagcgacgacgcagaagagacaccaaaacagaaccccaccacgacggaaacaacggacagagagaaggcacacgggaaaacaagaaagccaagaccccaaacgaggagcgacagacaacacgacacgcacagaggacacgacgcaccaagagacgacacaacggcacgaggcgacgggcagaaccgaaccacacacagacacacgacaggccacgagggaggacacgaacagagacgaccggggcagaaaaggcggagccgcgcacccggaagaacgaacaaacaacagcaagagagcagaggacagagcacaggacgggcccacacaagaggaaacgcgagaaacaaggacacgaacaaaagaaacaaggaaagcccaccagcacagagcacaaaccacgacgaacgcagcaccgcgcgaccgaagcccacgaacggacaagccgcaagagaccgacaagcgacacaacaccggcgcagacgcgaaccacggactaacacccacccgcagggcgacaacaccacaagcagacgaagacgaaaaccaaaaccagacaacgcaccgcaaggaggcacccagacgggagaacgaccacagccacacacggaaggacg

SEQ ID NO: 188606 - DNA, 354 bp, Arabidopsis thaliana
gcatgcaaagcgtagtttgacaaccgaggcgcaaacaagaccggagttaatttggcagaacaaaaacgggaataaaaccgccaaacggaaacccaagcccagcaaaaagacacggacgaatactacacccacgcggcaaaaagaacacgcacgacaaaaaggcaacgatcagaacacaacacgagacaaaccaacacggccacaacaacaaacataagaaaacaaaaaaagcgcccaacgcacgcatcaccattaccaaggacaccccaactcaaagaacagcaccgaaccaacccacaaacagccaaacagaacaaaatcgcccctcccgaaccgagcgaacccaaagaacac

SEQ ID NO: 188607 - DNA, 453 bp, Arabidopsis thaliana
aaacccccggagaacaaaatgagggccaaaaaagaccccccaacaagaaaacgcagcgcgcccggaaaaacacccccagagcgggaacgaaaaaaacgagcgaatattacaacacacagaagggaccccacccgacagcgggagaagcacgggggggacccgcccagggcaaggagcaggacccggaacgggaaaaccccagactcaacgcggagacaaaggggcagggaagcaaaaaggcagcccccaagcagagcacagagcggggacgcccaaaataaccacaccacggccgaagccaccaaagagacggcgggtacaggcacagaccacgacgagagaagaggacaaccagcgagaggcggggcaacagaacggccaccccgagcgaacggagacatgacaaacagaagccaacgcgaccccgcgacgcaggcgacatgcacgcacccc

SEQ ID NO: 188608 - DNA, 361 bp, Arabidopsis thaliana
gcccgcagagaaacgagcgcacgccccagaccatgtacgacgggatttcccaacgcaccgcgaggcagcccggcacaagagggcgggcccaagggggggcccaccgcgacaggacagaacccaaacaagcacgcccaccaaccccgccaccgcgaaagcacgagacggaggcaccaaaccagccaagaggcaacaaccaaagggcgcaccaagcaaggcccccaacgcagaccaaggaacgagacccgcaacccaaaagcacagacagaggacccaaggcccacacgagccaggaacccaagcacgagacgaaccaaaaaaaccccgggcagagaaaaacgaacgcaacgcaccagaagcg

SEQ ID NO: 188609 - DNA, 479 bp, Arabidopsis thaliana
aaaaaaccccattaaagttaaaaaagccggacccgaggggggaggcggcacaacctataagaaccggagggcccgcagtgtaacttttaaagccgcggaaaaaaacaaaagccaaaacaagggaggggggaagacaaacaggcagccgctcccaccacgagaaagaacaacgccaagaaaaacagaggacaagaggcaagcagcagcgacgaagacaagaaaagagaaaggcctaatcacagcgacaaaacaccaaaaaaaccaaccgccgagaactagctagcaccaagctagggaaaacaacaagggcaactcgaaggaacagcaactctcaaccagggaagccggaagtgaagcaaagaccaaaaactggcggcgaggcaagacgaggaaaagcaggaacaaaacgaccccacgaaaaaggaaagcgctgacaaaacccctgacgaaaagaacgtatcaccaaagcccaagaagac

SEQ ID NO: 188610 - DNA, 738 bp, Arabidopsis thaliana
ttaaagtttaaggaacccacgcccgaccgtgccgcataccactgtagatcccccggcccgctttttatttttttttcgccaccacacatacctcggccaaactggaagggtctggcactaaacccactggcgacacttttcatcttcactgcatctcccagaccacactatgtggaaatgacactctgtcctggaccctgtactaaccacaaaaacataaggaccctttaaacacactcaactacaaaatgcctaacctataagagaccaggagacttgtgttgttcctcacttccgagtttacatacaaaacaaaacatatgctcaaccacccaactgcacatttgctcatcccgggatctacttaccatgagcgtccttcttggagtacaggactcaacatcattcgcacgtgatccatgttagacaaccaccgtcagggagctcttgtctatataacccgtgaagctcctcaagagtgggcccgagtgatactttcaaagaaccaggcctgggtcaaagtccggcttcccacactcttctcacgataggccgggtttggaactaccttaaaagccgtaaaaacaaaacccctaaaacgccatttctgcaaaaacacattttcgtccccccgcccccaatggatcttaccgcaaaccaatatgcccctcccagtggtcttctagggggcataaacgggagaaccccctcaacaatttcaaacagggggtaacacaa

SEQ ID NO: 188611 - DNA, 914 bp, Arabidopsis thaliana
agcgacgggcccggccgccaccaacaacaacaaaaccacaccaagcgggggaagggggtgggaccacccaccgagggcaaggaaccgcaccagcacggaggacaccgcccacgcaccaatgggccacacaacatacccacaagcggagcggcgagaaagggcccaagcacacgcaccatctggcagacagcggcaggggaacaactggaacccgcaacaccaaagacagaccccacaccggacccgaaaagaaaaacgaaccgacccagaacggacaaaccggaggaaaccaagacaaaaaccaaacgagccagcccagccacggccacaaaacaagacgggcaacccaggcgaccaaagaaaaggccagaaagcatcacacccgaaacacaccaagcagccgccggcaacggaacggcacacccaaaaccaccagcgggaaccaggaccacccggggagcaaacaccagagggacagcacagcggaagaaacggcaccccgaccaagacacgaaaaccccgaaacccgaggaaacaccaaggcggagacaccacagcggaccgacaggggcgacacaacaccccccaccaccaggaggaaagggcaggataccgaggccaccgtgcaggggcaacccagagccaaagcaccacaaaccagggcggaggaaacccaccggcccccgcgcaacaagaaccccacacaaaaaaagaagggggaacaccaccggggagccaccacgaaagcacgcacagacacagcgccggggggaagggccaacacgccgaagacgacaagaccaagcacaacacacaaggacaacaaaaccggcacaggagcacaacagaaccaaacagcacgcagcggggaagaacaaacaggggcgaagcgacaaacaacaaagaggacgacg

SEQ ID NO: 188612 - DNA, 403 bp, Arabidopsis thaliana
ggggaaatatacggccccgagggggcccacaaagcacccgcgggccgcgcaccaaacacaaccgacgcgaacaatttaaggggggagacctccaccaacgacaaggggcacacaaaaaagagagccaggggcgacacaagagcagacaagagacaccgcaccggagcaaaaacggggacccacacaaggaacgcgcgagaacacaagagcccccccaaaaagaaagcggccgaggacccaaacggggaagagagcgaacgaaaagagagagaaacaaaaactagggggcacaagccggcgaacgaggaagaggcaacaacgacgagagcgagcgagcgaagagccaggagcgagacccgaacctcaagcagccgaccaccgccgcagaagcgaggcgagacgc

SEQ ID NO: 188613 - DNA, 237 bp, Arabidopsis thaliana
  unsure (1)..(237): unsure at all n locations
ggaaaaaaaacccccgccacaccccgancgacacaagacattgacacactaaaacacccgcattatgattttttaccccccccaccacacaaaaccaaccacaccgaggggggcggggtccacacacaaccaaacacagcgcctccccgccccaccaacaacaaggcgaaacaaccactcaacaccggcgcatacaacccacccgacactacacatgcgcagcccgactactaaacg

SEQ ID NO: 188614 - DNA, 244 bp, Arabidopsis thaliana
cacaaacggaaagccaaaccgaaaagcggagaagcccagaagattaggcgaaaaccggaacggggcaccgacggacaaggcagagacaaggccaagacacgagccaacgaaccaccccgcaagaaacgaggaaaaccccagcaaaccaaaaagcaaagcccaacacagaacaaacccagacgagccgcaaagcgacccaccaacggcgaagaaaagggacgcaaagggagaagaacacaaccaa

SEQ ID NO: 188615 - DNA, 620 bp, Arabidopsis thaliana
gaaaggttaagacccattgactgactgaaaggggacggacagtttttcttttttagaccgagctgattaaacaacctactggggctgtgaaacaagctatggaggtctgggtgaaattgggtaataggtcatgatgggaaaaagaaagctacattataaatcataataccatagctgataactgagaaggaaatattagaaacagaatattttccaatattggatggaaaaatataatgagaaccagaagtcaagaagctgctaaagcctgtaagatataagtgtgtaaaagttatggtgcacagcagcttgttaccgatgcacaaaagacagtgaattataaatatattgtttcatttctatacgagtgtgagtttaattaaagtgtaaggagcttaaggaatgtcacgtataattaaggaatagtataatgagatgtcgcgatcatcgtatcatatggcaataatacgcgatgttgtatatattctgagcatatgaaaaatcgttgatttaccactttataatcgtcgagtaggtccatgtagcggaagatggtagtaagatttaatgcatggatgatatgagcgataaatggattttgataagacggtgtacgtatc

SEQ ID NO: 188616 - DNA, 351 bp, Arabidopsis thaliana
  unsure (1)..(351): unsure at all n locations
aaaccagggagaaattgggggcaaaaganaccccaaagaggcgcaaaagaacacgaggggggacgccaaacgagccgggcaatatccacgccattattgggggacacgcccacaaaacgagcaggagggggggaccagaggggggagagcaaagccaaaaacgagaaccacaccgagacccccaagcgaaaaagagagaaggcaggcaagcaaaaaaagaggggcgggccaaaacaaaagggggacgacgcaaagaggacggccagggagaagcaagaaagacggaagcacacacaacggacacggcgaccggagccaacaacacaaagcaggccggagagaggaaaagcc

SEQ ID NO: 188617 - DNA, 316 bp, Arabidopsis thaliana
agggaatttagggaaatgcttgatatcgaattcgcggccgcctggcttaatagaaggtttaatttagatttttttaagttttgacaccattaaatacacaaaagggttgcctcttgaaaaatgaaatgattgtgaatgcaaaggactgtaagggtgagagccctagatgaggcgctattattagcgaacagagaggtttgtgttttcaatggagagcgagctatccttatgagtggttttggacagagtcaaagtgatgacctggataaaaattatatagcatgatactgaagaaaatgaagatcccccccccccc

SEQ ID NO: 188618 - DNA, 668 bp, Arabidopsis thaliana
acactaccgggagctgattctggagctcgaccgcggtggcggctcgctctataactcaggctcccccgggctgcatgaattcttggccgccaacatgtgtaactttctggtctcgatgcagatctcctggtacaagacgacttgtatcgactatacctcccataactatggatctaccgtgtcgatctaagattctaagctccaatactggcctttacgagccgacgtcctactgggtatagtacaaaatatcgcttgctgatgcatcggttcatttacgattctcattgtactggacaggtcggattcatacgctaagagcataagcttggtgaacccgtacctcttaggacatgtcatgattgtgacaactcttgaagaatctctgaatctggtgccaaacgattcatcatggacctgatcacaacctgcagaagggcaagcttggcttgttatcagtgtatggatcagatcacttgctgcactgagtatgacatacaataaccatcttgcatggcactcaacaacactgacgctctcatcatcacataggctcttagcgcttagctcaggctccggaataggcatttgcgtgctagatgagtcgagcctatatctggtagactatgatataccactggctcgagacagacttagatctgcatggg

SEQ ID NO: 188619 - DNA, 656 bp, Arabidopsis thaliana
ggaaaaaccaaggggcgagacaagagaaggaagaggcattgcggcgaacaagcgaaaggggccaaaaagagggcacacgcaccccagcaaagaaggaaggagggaggaccggagaaaacgaacaagacgaaaacaaagagagaagcgccgggaccggaagagaagcccagagaaaaaaggccaggacaaggcgcgagcaggaagaacacagagggagaacaaaaacagaacagccccgcgaggggggaccgacggcgaaggagggaagcgaagaagaaagggcgaagaccgcacagggaaagagggcacgcgaagcggggccaacccggggaaggagacacgcccaaggggggaccgggccaaagaaagcggccaggcggaaaaggcgaaagggacaaagggaagggggaaaagaaggcacacaaccgcgaaaaagcgaaagggaaaacggaaaacgacaaaacccatggcggaaagggaagggggaaacggcagaaggaggagggcaaagcggccacgccgagaaccgggaagggccgatgcgcccaggggggaaagagagatgcgcaagaagaaacggggaaacaggaaagacggggagacgcccacgaggaccgcaaaacgagaaagcaggagagcaaagaggagagaccaca

SEQ ID NO: 188620 - DNA, 336 bp, Arabidopsis thaliana
agggttaagaacacagggagaaccagtgcagcagcgggcaaaagcgccggaaacaaaagagaagaacaccgcacataaacccgctttattagcaaaaaggaacggaaaaaggacccaaaagccgggcaaaggggggggaacagcgccgaacacacagggaagagggagaaaatagcaggaacaagcggcggagccgaggaaaaaaaaggaaaaaacacgggaaaaacgcgcataaaacaggaggaaccgggaacgaaggcggagaagagatggaagaacacacgcgagaaaatcgaaacacgcggcggagaaaaagggaacggatacggaggaaaa

SEQ ID NO: 188621 - DNA, 450 bp, Arabidopsis thaliana
aaaaacccctgcggccaaaaataggggcccaaaaagagcgccgggagggagagacggccgacagacggagcagacgagagcaagggacgcaatataccacggatgttagcgacccgacgccaacgctagaggaacaagcgggagacagggggaaacgacgcgaacagaggaaagcgcacgaagcacggacgaaacagcgggaaagcgagggggaccgcaacacaccggcgtaacaagggcgcacagcgcgggaaagcggccgaccccggggacccagccgcgcacccgggcggtaaccgaggaaacagcgccgggagagccgacaccaaacgcgagcgaagagaggagacacgcacgacggaaaacaccgcggaacaatcgcagctcgaggcggccgggagaaaacggcgccgaaacgggaacggaacaagagggaggccgccacccaca

SEQ ID NO: 188622 - DNA, 387 bp, Arabidopsis thaliana
aaattgcaagccccgacacactgaacaggaattatttcacaaggcgggcggcgccaaggccaggggagggagcggacagaagcagagggaacggaagaagggaagcccggagaccagacgaaggacccgacccaggaacaaggaaagaaggaggacgccggggaaccccgaccgggaagagggcgcacgccaaggaaggagcaagagacgcaagaaagaggaagcgcgcagggacgcgaagaagccagacgacggaggaggcgacgaacggacgcaccagggccgggaggaaaaaaaggacgggggcaacaaccgagcaaaccacggacccaggggaggaaggacgaaggaaaccgagaacggagagaccatcccgaaagcaaccac

SEQ ID NO: 188623 - DNA, 1099 bp, Arabidopsis thaliana
gaaaagatgtgaaagaaaatcacggaggaaaaaggggcgaaaggaaaaacgattttttccaggtattgtgaaaaatggaggacgaaagtgaggtagaaagggggggaaaagggggtagaatagtaaatactgtgtatatgtggaaaaagaaaaaagaggagataggggataagggaaataggggagaaggagaaaagggtattgagaagtagaagtaaacaaaagggaagaagagagggaagggggggtggaagggagaaatgggaatgggaagggaatgggaaaacgaaaagtgatggggaaaaaaaaatggaatagcaataaagggaataatgtgaaaaaagagaatgggagaaaggaataaggagaagaggaggagaaacaggatgagggaaatggggaaataagggggtagacataaggataagttctgcagatatgaagtaagggaattagagatgaggtgaagagagggacaagagtgtgaaggagaattgagaaaaaaatgggtacgagggggatgaaacgtatggatgaagcggtagatcctacatacaaggttactacaaagatagtggggaaacagatgagaattaggtggggaaagacacggagaaatgaaaaggatggattgagggaggaatagggcaacaaaaaatagagcgagatatctggcgaaaatattaggattaaagagggggcatctagggggaatgtagaggggctagaagacaaggaaaataagaggcgagaatagttgggtaaggatctggtggtgaaaataggtacagaataaggcgggaaaaagaggcgcgaagaattgaggggagagaagataggtggaaaaggtgagaggagatatggagaaataaacatggggaaaaacgaggatagaaggcgggtaaaatattaattgggatatagggggaagtaggataggggaagtcacgggagaaagagtggaaagttgatggggacaaaatagggcaattaaaaatgagtgagtggaaagggcgaatgggactgggacttaaaggataattagggtggacaaggagggggggaaataggggaggcatatgggtggaaagtaagggtg

SEQ ID NO: 188624 - DNA, 724 bp, Arabidopsis thaliana
ttcaaaaaacccttataaggtaacaaaagcggcacaacaccgcggaggcggaacgctcgagaactagcgggaacccttttgccgcatgaaatacgcggccgcccaagaaagaaggagacccagcacacagagaacaccatcaaccaaaccaccgcatcaaaatgacaaatcaacgaaaaccacaacaacgcgaaccgccaaacccatacaacccatgaaagacactcccaataacaaaaataccaaacccaaaaaccggcaccagaacacccgccccaagcaaaggcaaaaatgcaaccgaaataccaaaaaacccaacggaaaccgaaacacacccacgcccgccagcaagagaaaacagcacaccaggggccaaccaaatcccaaaggccccccaaccgaaaaaagcccaaccaaccacagaaaacaggatacggcagaactcctttggagaggtcaaaatcaaaccaccgcacctgacaaaagtcaacgaccgaacaagttcccggaaaagccgtggaacaaaaaagctgggcagatgaacccggggccgccctaaacggaaagccgatcatcgaaaaggcacataaacgaaaaaccgcacccaagacacataaggagggggaaaacctaaaacgacaagaaaacggaaacaccggtacagcacaacaagccccgaaccgaaacccgaagacaaaagaggaactccaccaaaaccccgaaa

SEQ ID NO: 188625 - DNA, 554 bp, Arabidopsis thaliana
aaaatttggagccaccaccgccctggcggacgttttaaaacttagcgaataccccggactgttttaactttttgccgccaaaaatcaaagatgttctggatatatgatcaaaaaattggacactcgcgacattacaccattaagtgtgcaaaggctgtacacgatcctaccaaattgattcaggtccaatccgactataacgataatgacacgcctcaaaacacacgctttacttatatacatgtgatatatggaaaccccgtccactattcatcgggaagataatgacccctacctcgaatctctagatcattcgctccaactgctcaccgtcttcgtatcctctgcagatgctgaagttgcaccagtagagaataactcctgcatcgttaacctaccgcgatctatctgagaccttcgcagataaatttttttagtaaactaatcacggacacctcgcaatctgggggcccatacgctctaaatgtggaaacacacgaaaaattctcctaattgccatcgaacctactactggcacagcttgttacattcta

SEQ ID NO: 188626 - DNA, 1090 bp, Arabidopsis thaliana
aaatttttgaataaatttttgtgtataataatgttataaatctttatatttataaaagatctttagttcatattggaattatattttaaattttttgaataaattatatgttcttaattcatgtatttataaatattggtatatggtcttttaagttaaaacctaattgtgataaattttagtttatatattatattttaatggtatacattggaaattactttgataacattgtttaacatttaattagtacacgataataataatatgtaaattagtgaaagtcgcttaaaaaaagaaatacaatttatctaataatggttttgttataattgtgttattgtattcaaaatatgggttaaaaattaaaaatttgtcttaatttatggttaataatttctgcggatttaatctaattgtgtgaaaatcaaaatgctaaagtgttgtggaattattattggtataaataaattaaattttgtgtataaatatctctaatatcagggtgttgtaatcataaatataatgttgtattttgaaataaataaaattctcctaactttttgattataatcttttttattatttgaatataataagtttcttattaaacataattaatcatataacaatttaatctttttggaatataaatgcctttataaatttttaaccatttttatttaccttaaaatgaatttttaaatggtataaattataaaacctatcttttttatggtaatcctttggaatatgaaaatttctcaagaaaaaaaaattgtataaatttgattttattgatatttataaatttttatttatttaaatgttttatttcgtttatatctgcactatattctattaagtgttagggtatccagagttaactcctaaatttttgcccctttaaatatggggtagctgttaatatttaacattatcaaatggggtctcgtcatattttaattaaaacttttatttataattgtgtgaaaaaaaacattgtgtctgtttatctactcaaaatttaatttcgggcttttggcaaataaataataactaacctttttttactacaaactttttcagt

SEQ ID NO: 188627 - DNA, 611 bp, Arabidopsis thaliana
  unsure (1)..(611): unsure at all n locations
ccccgaacgagcgccgacacagaccgcaacacaaaacaaaaagcccccccatttccgcatatttcaccaacagccccggaacaaaaccgaaacacggggaaaaggggggacacacatacacagcccacgccacaccacnaagaagcaccccgccccaaccacgcgcgcgaagaacggacgcgacacaacacgcgcaagacaacgcgggcagacacaacccacaagcaccccgcgcggataaagatcacgcgacaaacagcgcgtggacaaaagcgcgcccccaccacacctaagaaaaagtgaccaccccgccaccccacaaacggcagaaccccgcacaccgggaaaaagatgggacacccccacccacaatacaaaccccccccccccaagagaaaggaaaaagacaccccacaagacagagggaggccaccccgccccggacagaataacggccgcggcgcacccccgccaacagcgcccacgaaaagaagggaaacacagcacacaacacaccgaaaacaacggagaacaacgcggcgcgcagacgaaacgcagcgagaaagcacaccgaccaagctaaaggataataaatcgaagccaaccacaaa

SEQ ID NO: 188628 - DNA, 551 bp, Arabidopsis thaliana
ggcttgcaaaaccaaagtacaaaagaccgagggggagccgaagagagggaccctgtgaataggggggacaaggaagaagggaagggaggaagaaagaggcaaaaaaagagaaaacaacagggacgaacccaggagcaagagcacgcagagcacacgacccaggacaaacgaggggaccgaaggaaaaaggaaagagccgggaacaaacaaggaaacagcacaagagccggaggacagaaagaacacacatgcaagaaagaggcacaaaggggaaagagagaaaggaccacaggaaaaaggaccaaaaccccaccgggaaccaggggaaagcaaaggagcggagcaagggaaagaacgggaaaaaagagaagacgagacccaggggaacccaagggcaaacgaaaacgcaggaaagagcagggcaaaagaggaaaacgcccacgaaaagaaaaagaaaacgaaggaacgccaaccaccgcagagggcgaacacccaagggaagaagggggacccaaaacaagaagacaagaaagagaacgaggggaaaggag

SEQ ID NO: 188629 - DNA, 580 bp, Arabidopsis thaliana
tggcgccctcacctgcggtggcggacatatatagcaaccagagccaacccctgttattgctttttatttcgcggcacgctattacatgactcatgtttttattggtgcgaacacttcatgaacctcaagatcctgcccggaaatgcattcacgacgaaagcatctaaaaccacagtatgttaacaatgacgcagtcatcacatggcaactgataacataattgcgcaaaaatatatcaacttaggttgaccattataagctttctaactctatgtcatggtcaggtattaattttacatctaccagaactcaataagcacaccccgtgatgcctttcaacaatatattggatggcgcgctgacagattatggcaagctaggcttactatgggatagtcttcacgaccatagatgcacacaatcttaattccaagcgccgcggattccgggtttcctatcaaaaacttttgagccacgcatgagccaccatggtaacctatcctagacggatcaccggctgccccccacattggttgtaatcctggctttcacacctatagtacaccacaaatcccactgt

SEQ ID NO: 188630 - DNA, 1132 bp, Arabidopsis thaliana
ccacaaacgcgacgcccagcggcaggcgatgacattgccgagcaacccagatggggagacacgggcaggagaaagcttgttatgaacgtttgtaagcggacaaaacaaagacaccaaaaacagaatgtgggataaagtgaggagacaagataataaacaaatgaagagaacagagaaagagaaaggacgagacgaccatagaaaggaatataaacacggaaaaccgtgaaacgcccacaaagcggcaaaagccagcaggggacccaccaccaacaactaacaaggcaactaaaccggccaaacaagacacaagctgaaacgcaagactagaaacaacagggcggatacacaacgcaaaaatagctagaacaggacaatctacgacgcaccgttcgatcactccgcggaacacagcacgtagacaccaaatactcgtacagaacatcggtcggagacgaacaatgtgcgcagcgctacacacgacagcggaaacatacgaggagagcagaaaacacagacgcgacgaaatgccgaattatgcgataagacagccggcaacaccctgggcacaaattacacagcgaagaacatggcggcgggcacaagttagacagatgaaacagcttcacgcaagaaacacgcgcggcggcgcaaaccatcgggagccatcacaagaagagagatgagcactactacagagcgacgcacaaaacagcgatgcgaaaatgcgagggagagcaatcgaaacagcaaccattgtgcggaagtaaacccaccgtgcgcggaacacagggaacgacaaaccgcactaaaacggccgagaaacaccgcccacgaaacagcaactacaagtacggggagcaacaaacgaggcaacaaaattaagcagggatatacagcgcacaacagctcgagcagaaaaacaggctgccaaaacgcgaagaacactggcggaggaacaacctccgaaaaaacgccgagagaaaacgcaacaaaaccgaacgcacagaggggcgacaacaaacggggaaaatagcccaccaaaacagcgagtacaaaacagcgaacaaattcgagcgcaaacgcgcggaacaatcatcggggcagcaaggggaagacaaggcgcaaatag

SEQ ID NO: 188631 - DNA, 1463 bp, Arabidopsis thaliana
  unsure (1)..(1463): unsure at all n locations
ctttttttctcttttttttcaacacncccgtatctcttctcccctcatggtcatttgtgcgctcttcctctcttttctctccactctggtattattcctacactcctcatactctttcctcccctttctactttcccccttcggttccctctcctctttctttttctcctctctcttctctcccttctctctcttactcctaatgtccttctccttacctctcttctcttacttctcctccggatgtgtgttgtccatcctttcggtatattggtgcctgcccttgtctttcatgtgtcaattccttttctcttcttcgtcttatcactcttttttgctctccctcccactcattaatttttttcttcttctcttcgtcttcatcgcccgcaactcatgcttctttctcattgtccctttccacttcttgtctcgcttcggctcttaccatgtctaatctcctatccactcatctgactctctccactctcctgtcttctacttatcgcttcacacttactcgtctttcccacttcttatctactgcttttctcatcttatatacaactatatcctntccatcactcactgttcgattcgaaccgtgtccactagttattgctcatctatatgtatctgacctatctgtcactctctactgtgcttgtgtcactacttgcgcctctgcttcattcgaccttccccgtctgctcccgtactatgtatacgtttcccgtctgctatctaatcagtctacgccttctatcatctacattctgatcttgacactataccacgctcggctctgtcctcctgtccgtaggtttccatcataccgcctccatcttccctatgccgtcctcctttgttgtcctattttcactcatcctccttcttctcatcactctctgtttggcgtccaatcgtcacttttctacaacattgcttggaacacattcttgttgtccctcccgtcttgctattctctgcatctctctcttctcttgatatcgcctcgatcatctcacatctgtatcactcttcctctctctctccatgtttttggtcctctcatctgtcccatcctgacgcatgtcgtactcttgctttccgagctcactcgcgctatcctgtattagcgtgcctacgtctctctcttctcttctgtacatgcttatcaaaatcttcctatcgctctcacacatcttctttgctgtgctccttatagtccgcacttacactacctgtcctgcttctgcgctcgcttgctatgtctacctttcttagcgccgagtcactaagattcgctctctctccttatcaagtcactctacatagctccctctgtccgtctaccttctacatgcaatatgactctatcttgtactcagttctactctctcgttctgcacgctctctctactctattgctacatctctcctcttctccatcctcatctccc

SEQ ID NO: 188632 - DNA, 1295 bp, Arabidopsis thaliana
gaaaacaagcggcgaaaaaaacgaggacacacaaacgagacaaccgcacaccagagagacgagcagaaacacacatttatggaaatgcacaaaacgaacccctaacccaaaccacccaaggggagaagagaagacacaaaccgacgacagagaggcaaaaaacagggagacaacaaagagggaacaagagaggacgaacaacaagaaggacagaaacgagagaggacagcaaacgaagagaaaacagaaccacaacgaacacaaagagagaaaacggagggaagagaaagaaggcaacaaaaacagagagaagaaaaataagaagacgggaaaccagagagagaaaaaagagaagcgaaaaccggaagataaagagggaacgacacaaagagagagagaaacggaggcgacaaaaagaggaacaaggagagggaacgaaacagcggagagaaaaggaagagcggaggaaacaacgagagaaaagacgacgagggaagacaacggcgggaaatgaaacggacaggaaacggagggagaaaaaagagagggaaagaaccacggaaaaacaaagggaaaaaacacgagaagaaaagccagagagaagcaggagaaagaaaggacaaagcaagaggaaaacagagagaaaaagggggcagaaaaaggaggaaaacgggcaaaccagcgaacacaagcgggggacgcgagggaaaagggggaaaaaacggaggaaaaacgaggaaaggagggaaaacgacggcaaaaaaggggaaaaaagggggaaaagggcaacaaaacaaaaaaggaaaaacaagacggaaaagggaagaaggagagaaagcacaaaaaaacaggggaaagacggcaaacgcagggaaaaaaaaagaacaagagaggaaaaaaaaggacaaaggaggaaaaaagaaaaaaaagaagcgaaaacaacgaaaaaaaaaggaaaaaaaagaagaagaaacgcggcgaagagagagggcaaaaagacaacgaggagaacaaaagaacagaaagaaaaacaagaagcgggaaaaaaaacagaggaaagcaacaggaaacaagagaaaaatacaaaaggagagaaaaaggggacacaaagaacgaaagaaaacaccgcaaggagaaaaacagagagcgaaacaaacgcgagcagcaaaaagacagagagacgaaacagaagcgacgaaagaagcaaaacgtgagagacaaagagggcgaaagaagaaaacggagagaagacaagtgccgcagcagagcaatgagcgggaaacagacacgagaga

SEQ ID NO: 188633 - DNA, 996 bp, Arabidopsis thaliana
tttttcctggacatttttatcaaaacacagggcgcgaaaaaaaagcggagagatgaggtgtggaaaaagtaggcgaagaacatagacagaaaaaccaacaaacgaagagccaacaaaacccgaacaagcgagcgaagataaaccacgaccacagagacaaacgactgaacaccaaacatgaagaaaacaagcagaacgaacaacaccgacgcaccgcagaaaggagcccaaacacagcaaaccaaagagaggacaacacaataacaaagacacaaacccggcaacagacgaccgccgcaaaaacgcaccgaatatcaacataggaccaactcacgcccgacacagaaacgacaccgcaacaagacacaaagtgcaagagacgaaagtcaaaagacggccgggaagaatgacagacacaggcggatatggcgaagcagcacaaggcgcgaacccccgacgagcagataccgacaggatagcgagaacacgccgaacaagatccacacacgacagaagaaccaccacggacgaacacgcacaaaacacaaagtaaaaagaaacagcataaagcacagagaacggttgaggaaaaaaagtgacgcgacactacacaaggaaggaacgcggactaacgaaaaccgaaaataaacgaaaacggctaaggagagccgcgagggtagaaacgggaaagacacaaagtaagaacggaaacgaaccgacgagaggacccgggatcgaccaccccacacacaaacagccgaccaaagcaagctacaatccgcacaaaaaatagacacacacaggcaaagcaaagaaggcagcgacacggacacacccccaccggaaggagcggagagaaagaaaccaccaagttcgcaaaacgacaaacaaaaccagaggaaacgaaggagaacaacgcagaccgcacacaacacggacagacgcaccaccaaaacagcacgcaccacaacgcggtaaagacaaaactacaacaac

SEQ ID NO: 188634 - DNA, 1207 bp, Arabidopsis thaliana
ccggcacccaaccaccaacgcgacgcgagatggtgcactcgaaaacacaacataaagacgcaacactcagggacaaatacgggaaaaccctccacaatggcacgatctcgaaaagcggggccgcgcgcacagggggagcaagagggaaaatgtgggcactcggcgaaagacgggagacacagccgcaagagtccgacgtcgaccgcgaacaatcaggaacagaaaccccgccgaacacgccgcacaatcacccagccgccacacattagtcacggaggaaaatatgcgccgcaagtatctagtgacggagatacaagtagtcggagcgagtacgtacggaggctaaatagaccaccacagcgtgagagtagatgcgtgatctatgcagaaaaacgccgacgcgcgatgactactacgtggcgtgtaaagatcagagcgtgcgcgcatcagcagacatatgtgacgaataagcatgcacggtacagccgaaacctctcacctgcgcacaatctgtatggcggagaataaactgactgacaatacctgtgcgcgaaaatggggggggacgaaaacaggggaaaaggggcggaccaaacgggcagaacatctgtcgaacacagccggggaaaaaatgcagacgacgaggaaaagagccgggacaagtagcacgaacaggagaaagttcccacgccatcaggcgaaaaagcggggacaactgcggagcacaggcgacaaagaagcggggagacaggcggggaaatatgcagacatataggcgcgcgtcaaaccgacggaaaccatgccggaaggaagcggcggcgagacacgcggcgtgaacacggcggcgcaaaacggggggtaaaaactgacgacataatacgtggtaaaaagagggaactacaaacgcgggcacacccggggcaaaaatggcgggccaattacgggggaaactcgcgcagcacatagcggaggaatgcagggctaacatgggggaacaaccgggcgcagacggcaggaaaagggcgcagtaccgccaagatgccgcggaatccgaggagaactgtggcggcaatgacggagcactgagggataaagtggctaatcccgcggagaaatccgacgtcagcagcgagaacacagggaacagacggggacacataggggcaaaaccgcgcaatcgcgcacataacgcggcaatcgggatgaa

SEQ ID NO: 188635 - DNA, 1046 bp, Arabidopsis thaliana
ggaacgggaggcacaagagagacgcagaaaaagaacaccaagacggggaaagcgcagtttaatgcgaggaagaataagcagacaaagagacaaaataaaagcgcaaaaaggggggggaaaaggggggagagaaacagacagagagaggaaccggcgagagaagaggaaagagaaaaaaagaaacaaagcaaaggagagaacaaaggaagaaaaagccgcggacaaaagaaacccaaagagcacccgaaggaaacgaacaggaggccccacgcaagaaggagaacccaccaggcgggaacgagaaacaaccgcaggaagaaaggagacaccaagagagaggaaccgccaaggggagagcaaaagggaaaacaaccccgccggaggacaaaaacagacaagagaaggaggggacggagcgccgacaaacaagaacgcggagagagaaacacgggcagaagaagagagagagaaacgggcgggacaagagagggagaggacagctggcgggcgaaaggaagacgcgggcacagtacgcagagagacggcgcgcgacacgagggcgagagaacgacaaagagggagagaccgagaggagagagcggtgacatagcgaaatacaggtgagaggaacgacagtgagcggagaaggaagacgtgacagaaacaaaaacacacgcgaggagacaagcgcacgagagaaagaacaaagccgcagaaaggaacggaggaggggaacgacgcaggacagaaaggcagggaccggagacgagcggagaaacaaaacgacgagaaaaaaggaggaacaaaacgggagaaaaaaagggggagaagaatgaggaaaaacaaagggacgcaaaccaacgggaggagcccgggaaagaagacggcgaaaaacgaggagaaaaagcggggagaacgggggaagaaaaggaggaaaaaagcaggaaaaaggggagaacagcaggacaaaaagtggaaagacagcggggcagagggagggaagacggagagacgagagagaaaagcggggggcgaggggaaaggaa

SEQ ID NO: 188636 - DNA, 490 bp, Arabidopsis thaliana
gaaaatttccgcgggccccggccaaaaaaatggaacttgccttcggtggccaaagttgggcaaaggccattgggcaagaaaactggggagcttatgcccacctgaaaaaggcgatggagaaatatattgagaattggaactcagctttacccaacttggttagacggtggcgtgaaagccggaagtcggggtggggatgatgcagcctccaactcaagaggaaccatgggaccagtttttagctctttggtttatgatgaagagtccgaaaatgagttgaaagattgatgccatacacggatttgctagaaaagggagaaagtcgagaatttaactggaaaaggcatttgaaaggcggggcattttccctggtaaaaatggcaaagggggaacaaggtggaaagggtcggaaccacccaatttggcaacttggggggctttataagaacccgttggggcccaaacctttaaaaacaatttggggtccaaa

SEQ ID NO: 188637 - DNA, 1056 bp, Arabidopsis thaliana
ggtaataaagtttgggagtccccaccgcgggggcggggcgctttaagaacaaggggatcccccggggcgggtgggtaatttttggcccgtttgaaccctttaaatttttaaggaaggtaatttaccaaaatttttttttttaaaaagaaggtgcccttaaaacctaaaaataaatattcattattaaaaaacaactccaggttttaaataaaaatttttatttttaaatattaattccaccaacttgggaattcctttttttaaacaaaataaaagggggtttacccccattttttttgttttggaggtgaaatttccaaaattgggttccggaatagggggttaaatgggtgcaaagccaccgggacctgtgggggggaaaccgaacccccaaaaggcttattgttggctttatttaaattttaaaaatttgggtgggaccggaatccattaaaggttggggaaaaaatttcacaaatttccttttcaagtccattggggccaaaacaaaatttgggtgggaaccaattacttcaaaccaaaaattttcccccccaaaattattcccaaattttcccaaaaatcaaaatacctgggaaatttaaaagccaattcggttttttttttggaaaaaattaaggttctcccaaatttttcccaaatttaaaccaaccaggggcaaaaatttttatttggggaaccattcctttcggaaaccaccaataaccttttaacaaaaggcaaatggccttttttatttaaaaaatttcccaaaaaagggggtatttccaacccggcgggaaaacacgttctcccgatgggttttttaaaatttctttcataaggggatttatggaaaatgggttacccggggtaaaacgcaattttgtgggggggaaaaaggggaaaatatagaaaaaccctttggcccaaatttaaccttggcaagctttggaaggggttggtggacccttaatttattgaaaccccgcggcccggaaaattccgggcccggcccaaacccaaaaaatttcaagggcttttttttttttaggg

SEQ ID NO: 188638 - DNA, 329 bp, Arabidopsis thaliana
caaccgcggaagtgagactttctacaccaaacgcgccattttttttttttttacacggcgacgaccctcacacagtggggccactcctgtccccccatcgcagacgcaataaaatcccccccacgaacagataatcacacaaacaaagacgcgtataacaacccttagaacccaaatatacgcatacaatttgtcaaaaatcgcctcacccacgtagaccgatgccacaaacaaacaatactgtacaaaggcacaaccctaacgtgtactcaacgccactcacatcactagcatatcgtaataaattcactccagatacacatccaatc

SEQ ID NO: 188639 - DNA, 1070 bp, Arabidopsis thaliana
  unsure (1)..(1070): unsure at all n locations
tccttaactgtgtgtatcagatgtgtatacatacnctactactccaccacgtctgccagcaatctcgacgtgaggcctctctagagtcctcttggcaagaagatatgttaatacgagccttctgtcaatctaacaccccggctggactaacaaagtaagaaaactcgccacccgtctaatatatgttcgccagaccttactgtcgctacagtatgtacacacaaccggtagagttgtttgccacaatatccagtgactgctgaggatcggtagtacaatggccaaacctctggtgcattcttggaaccaacatgctctcgtttgtaaacagcaatgtgacaataaaccacccggcattgtggcgggataattttctatgtctacacaacctatcttcggctatgtacgtggccctacccaccacctcattttcatcacactctgggatcttcgtgaaaaaataccgaagtattcactagcggaatctccacaccgcgcagatctttatctgtaaccggactagccacaagtaggcgccatgttatatcgtgatataactcatttccgcgactatataattcttccaattggaggtgagcgtacactttgggggcaatttatgacaaacatatacacccccaccctcttagacctcctgtggaatatcctctgaaaaaacttactgattaaaaaattgctgtcctcatctcgcgctcggttagatgcaaagcgaaataatgagggtctaatctacctctactcaattgtgggattattacaactgtctcatgtgacgatcaatgaacgtcttcctattaacacctcggcgagaaatgctaaagtgacatcatcctctctcggcgatacgacaaagacaggcgaggttgataatttagacttatttctctggccaatctgaaacaaccccatatatcggtggtctctcaagtcacgtatttagattagtcctttcgagcaagatactactccgggtcttgcatctatgacagtacttctcgaaaacttacaaatggacgtttgtaaggttaattcacatatcgcttctctat

SEQ ID NO: 188640 - DNA, 1095 bp, Arabidopsis thaliana
aaaaaacacctcttaagtaagaatttttgggggaaaaaaaatgtgggggcatatcaatgtgtgaaagggtgaatactatattgtgggagaaatagatgagaagaaacatttttaaaatggtttttataagggggggacaagaggggattttgaaagtatatagttttggggttaagtaaaattgggaaatggattaaaaggggggaaatgagatatggggtaataagtaggattgaagattgaggtttgaaaataaggaggatgttataatggtgataggtatttgggaaaggggaaatcgggtataaagggatagggaaaagtggaaagtaggcgtatggtgaatgatggagaaattgtaatgttgagattaggggtaattggggaattttggataaaagggaaaattgagagaatggtggaaaatttggggaatagggggaggataggagtaatagggagaaaaataatgggaaatatgtggatatgtagggtagtatagaagaaatgagggtaatattgtaagaagtggtgaatataggtggaaaacgtatgataatttttggaatatttgatgagataaggagtgaatttgggaggatatgtgtagaaaagtgtaggaaaaacggggtgaatatgtgttaagagggaagtttgtgggggtgaagagggggaaagatgtgcataatatgggggtttatgggaaattagtggggaaaaggggggaatatttgtgtaaagggggaaatatggtgagatattggcaggagataaggggtttatggggaatataatggggaaatagggtgaaattggatgggtaaaagagggggaattgtgggataaattggggaatataggagggggattatacgggaatagtaagggtggtatttgtagaaaataaaggatggaaatgtgggataaaatgtggtgtggatattagtggataattttgtggtgaaaaagggatgaaaagtagttggtaacatttggggagattaaggtggggatattgagggtgagatgatgcgaaatataatggagtgaatattctttgaagaatatgggagaaaaaatatattaagaatgtga

SEQ ID NO: 188641 - DNA, 267 bp, Arabidopsis thaliana
aaaaaacctcaacaaaagtttggagcaaaatacgggcgcggcggaccgaaaggggaactaggggaaaccaccgggcagaagtatatccgtgtgacagggaggacacccaccgacggggggcacacggacgcgcaaaaaaaaaccaaaccaggcacatcggagccagcaagcaggagaagggcgcagcaaaggaacaaacaccagcgaaaaaacccgaagaaaagtacacccccgaacaggaccagcacaaaagaacccctcacacag

SEQ ID NO: 188642 - DNA, 988 bp, Arabidopsis thaliana
cggcccttaaaagaggatttggggacaaaaagacggcgcgagagcacgggagaaaagggggcgaaaaaaggggaggaaccgggatatttaggggattttgcagaaagggaggaaaagggcaagactggggagggggggaaggggaaaggaagagggaaaccggaagggaaggaggaatccacaggagacggcaaggggcgggaggccaagacaaggaacgaaacggaggggaaggaaaggaaacgacgaaggaagggggagggaaaagggacagggaagcggcgaaagggaaaaggaaggaagcacaaaaggaagaaaggggagagcaagaggagaggcggtcaaaaaggggaaaacagcgagcagaagggggagaagacaagggtaggacggggagaaacagaggaaagaaaggaagaagaggaaggaggaaaacatagtggacggaaagcggacacgacatcagggattcaagagcgggaaaaagcgggtcgagatacctggcgggaacctcggcgaagagtatgtgcgcgagaacaggagaggatcaggcgggagaagacaacgggcggactagggatggcgaccgaaacggaccggatgagggggaaacgacgggggcggggaaacggccgcagagagacgagagggcaagaaaatggagaaaaaaccgcgggtaagaaagggatggaagaaacatagagggagtacatgcgcacgaatagagagagaaagaagagcggataggcaagggagaatggcgtaggccggaaccaggaggaacaaggggggaaagaagaggggaaatgacaaagggaggaagaagacgagggcggtaaaccggagaaaaagagggcagcgacaggaagcgaagcagaggatgaagacgattgcgggaaagaggagaaagcggacaaaaagaggacagaggggcgacgcggaaaggaagggaagggggaacgacaggaggagagaagttgataacgga

SEQ ID NO: 188643 - DNA, 567 bp, Arabidopsis thaliana
aaaaccccatcgaagtttagcgcccagccccccgcgacgcgcacgccccaccgccaccgggaagccctttccctttttaggcgcagcccaacggcgccctggcgcgcgaaaacgagccaacgccaataacagccccaaaggcagcgatccacacacgccccagagagcacccccaccagcccccgcaaacggcacgccaccgaccacacacccggcacgacccccaccctcacccacccaccctgagccagcccagcgcggctgcccgaaccgcacggccagaacagggaagcagtccccccgagaaccaccaccacgacccgccaacgcacgggttcaccactacgaccacgtgagggcgtgcacacggcggcggccacgcgccggcacgagctggtgtcaagccccgcatggcagacagagaaggagcgggcgagacgaggcatgccggggcagaccacagctcgcaaacgcggtagccactgccaacgggggagcagaggaggcagcgaccctcgcaaaccaacgcctggagcgccgaaacgtcaatgcagagaagacaagatc

SEQ ID NO: 188644 - DNA, 423 bp, Arabidopsis thaliana
gagccacacacccgcgggacggtcgccgccgcattcaagtaaaataagtcgggaaccccacagttgtacggatatttatcaaaacccgggaccgacggcaatacaacgacagcgggtatgcacagatgagtgggacccaaccacacacgaccaatagctcacaaacaaccgctaccccccacgcaagagaggcgaacaaaacgacagctacacaggagcacatgccacgtcacactcgcgcgcatggtgcggaaaaaccgcccgagaacacagagagcgacaatcacagaacacgaggctgcaacaccgcacgagaaaaggaggacgacacacaaggaaaaaatgagtgctaaccaaacatgcgagccaataaaggactaaataccaccgccccaatgaggaaacggagaaataatcaatcga

SEQ ID NO: 188645 - DNA, 853 bp, Arabidopsis thaliana
  unsure (1)..(853): unsure at all n locations
aaaggggcggagaaggacgcagccagggaaactggggacggaggcgaagccggcagacagggaagcgcggggccgaaaaccccgaggaaggacacggggccagcagaaaagggcatgggggacgcgacaaaccgaacaggacacggaaacgcgggagggggacacgccgaaagcgcaagagcgaagaagggaaacagggaatcgggagaaagggggaagcggcccagggaaccaagaggggggcaaagagaacaaagggaagggggcaagcgcggaaacaggaaatcgcgcgaagggagaaacgccagggaaaaaggcgacaaaaggcgaagaagctgaggagagacgggacggggagaaagacccgaggggaaacgttcggggaggagaactgcgtgcggcaactcgggagcacgacgaaggggtaggaaaggagcggcggggaacccaacgacgggcgcggggaacaacgggcagganatacggggtactccgcagaagaggagagcgccatacatggcggaatagagggggaaaacattacgtgaaaacaccgtggaaaagggccccaaggaacggcgcggaaaaagcgaaacccgggggattcgcggggaaatcatcccccaggaagccttagggggggggtccaggggtcacaaccaaaaccgaggggggcggccaagaaaaacgcggggggggggcttaggggtttccacggaacggggcccaccgggaaacgtccccacaacctaaattgggcccgggccccggagaaacaagggagaaagggcattcccggggggaaaacgacggaacacccctaaaagggcccaaaatgggggggggatttttg

SEQ ID NO: 188646 - DNA, 242 bp, Arabidopsis thaliana
cccccccggggggggaacaaaaaacatggatttcctttatgaaaataaggggggggattttttaactccaataaaaaaaaaaagaagttttttaaggcctaaaaaaattcaaactttcgaaaagagtagccaaaaggggaaaccggggccagtaaaacatgaaacaaatggggcgggttttaacccccaaaaaatcaggtcgactccggaaaaaaagtttaaatcccctaaccaaaattttt

SEQ ID NO: 188647 - DNA, 166 bp, Arabidopsis thaliana
tttctttttttttttttttttttttttcccccctttccctttgaaaaaaaggggaaatatttggccaaagttgggaaaggtaaccccaaaatccaaaattttacacctttggaaaagaaaaccccatccttttttggcagaaagaaaaccctacttccaaaaaccc

SEQ ID NO: 188648 - DNA, 374 bp, Arabidopsis thaliana
aaaaaaaacatttgattttattaaaaaaaaaacaaaacttgtaaaatttaacccttaaaaatattttaatttccccccaacacgagggggttaaacacagttaatcacggttaataaacccttaaggctttatttatgggtcccccaaggaaatcttttccaaacccttagaaaaccccccatttttttacttaaaatgtttttaaaaagggggattaccagggggttgcaaattttcttttgccgggtttctttctcggggaagctttcaccgccggttttttccccggggccgcccattaacctttttttttcctttaaattagggccatttgtttttgcttggcctttgggttaaaaaaagccttatttcc

SEQ ID NO: 188649 - DNA, 635 bp, Arabidopsis thaliana
gcgggtacgtgtgtcagccttccgtatttatttatgcttttttcaagtcatggagcccttgctagacatgtgaaaactatctgattcaacgtacatatgtactacgtccaatgtttgcacgataatgcaaagtatgtgacattctgttacatattaagctgtgccaacagcgcgaattctcacatcattacaatagattttgtctgaccaaatggtgcctgatcaaaacacagacgcaacgacaggatggtgaacattagtctttggtatcttggcttctgcgcttctggatagagatttacaaggcatagtgatctaggtcaacgctattgtaagatctatgccccaccggtgatactataggaaagagactggcgatgatttttgaatagatcaggggtgaggatttactaaaacctgcatttggccacttgccttggttttgatttgtaagtcttacaccgcgtataaagctggttaaaggtagaaagaatacccccgcattgaggtgttgcgcatttactagcttttttattatatttccgagggaatgaaacctttgtttatctccggggtagcgcttgtaatcactaaatggtagcagtatccaacatgaatgccagccttttgtctta

SEQ ID NO: 188650 - DNA, 476 bp, Arabidopsis thaliana
gaagagagacggaacaaagccacagagagcagcgcagcgccacggagaaggagaagtaaaaatgacaggaagagacgaccgacgaacgcaaaggagctgataaccagacgcaaaacaggggacacgcaacgagagcaagaaaggggacaaaagcaagaaaagaacgcagcagaggagaaagaagagagagcagcgagggagaggacgaaagggagagcaaaaagaaaggagggcaaagaaaaagaaggccagagaagagaaagggcaaaagcagaagagcgagaaccgagcgacgaaaacagaacaaggggacagcgagagaggacgagcaaaaagaagaagggcaagacagacacaacgacaatacagacacgcgatcaaccgacgtagaggaagaggacaaggcgggacgaggaggatgcagacgaggagacgaaggagaagaagagagcggaaacggaggaggagagaaatac

SEQ ID NO: 188651 - DNA, 641 bp, Arabidopsis thaliana
gccaaaattccggggaaaactcacccgaccgggcccatcctcgaaaggagacgcgggacggagcagatcagattttttatgagcttcaagcgagaccctagcaagacggagcaactactattcaatctcaatgagtacatgaatattccacacaatgaaggagggactccggcacgcaaaatcgtgcaacacccaagccaaggcataaccatgatgtggtcgaccaagggcgccgataagacaagaaccacgaccgatgggaagacagcagggtactcgacgataggcataggaagagacgtcacgccacgggaacagataaggctgtggcagacgcatactccacgcgaagacttacagaaagcagcagacgggaggctgcaagatcatggcgtgatcactaagctgcaagagacgatgctccggaggaaaaatattcgacacgagcctgacgctgagcaaggcaagaagaaaagcccgattggaggagcctcgaataaactggctaatctataaagcaggccgaggggaaggacacctgggtgaaacccacagggaacagggcgaggatcccaaccctttgggtggcgatgccaccagaaaaagaggggccccgcatagtacggggtcttcggaggggg

SEQ ID NO: 188652 - DNA, 571 bp, Arabidopsis thaliana
atgcgtgaggccaaccctggagagggattgcttatcctgggaaccgataagtgcagggtgtgcaaacgggggaggtagggggagaagtggaggtgtgtaaaaatcattaagtgggatatcatatgataaaggtagcgggggttaggtgttgtagtttggctaatgaagcctgcaatgtgtcatcccgtttgtagcccggggttgagagcaaggaagggaggaaaaaactagatagttgatcgagtgagaggagactggggcgacagaggaaggtgtgttacaaatggaggcggtgctctcacgtggtgagaaacgagttacaggaaggtgttctggatctaagcattgtaaacagacagtggcacaatagtatgctatttgatcccatgggattgtggttaaaaggtgggtatatacggggaccggtggagggggatgattgtgggttgcatgtgatcgggttattatttttttagaaataatagtgaggatggttatgggtagagggcattttgttgtaggcaagatctctacttgatagggttagatgaggtcccttaaaggctttaaa

SEQ ID NO: 188653 - DNA, 976 bp, Arabidopsis thaliana
accggagaatttctccgggatacgaacacccacgaccgtaccggatcgtgaatcacttcttacgagaggggcaaatacagtagttatctagcaaaaaggataatagaacttacaacacaacctcgaacaatcactagaagaagagattgggtatatggatgctgtgaacacaaggcacaatacaagagaagaactgacatcagactcaacaccatgcacaatcatgggagacatatgagaggtctacaggggtcccacctcaaaaaggatcttataaaaaagccttgagacgttgaaactccaaagactattcccacctctgattctcatgaggatacttgtgacagagaagaatacggcctagataaagcagaagaaggggaagagctcaaacagacagaaaaatgggcgtccagactaaaggatcgaagattaggatcccgatgatccgaccccgataccactctatagtgcagactaaagtcaatgcactggatcggaatgaacaacattgggcattgcgaaaaaccattgtctagacacccaacccagaattcggttactttttaatcaaaaaaacggacacgttttagggatctgaggagggccgggaccaacataacgcgagaaatagggtctcccccactaccaaagagaaaatggccctctatttctctaaaaaacaaaggtatgagcgggggaaatccctttggaatctagggggggcacattaggagtaaaatcggcccccgcccttactatgactaagggcgccccattgaaaagacctaccgggggcagaaaaaataaaggggccccaacaccactcaatggcgaggaaaacccaaaacaattctccgcaccaaaagggccacttaattgaaacggggactttctttcttaaaaattgtataaaggccccctatgccaaataattcgcccgaggggataggggaggcggttttttcccaatggg

SEQ ID NO: 188654 - DNA, 975 bp, Arabidopsis thaliana
gaaagaaatccggggcaaaaatttcccccgaaaggaacgacccgtacgggggggaaacgacacaacgagaagcgaaccgcaatttcaaaaggaaaggaggagcaacaacacgagaagggggacaagggagaaaggggaggaagccggaagggacgacaagaacgggggaacaggcgcaacaagggaggaacggggaagagagagagcaagaaggagaagaggggcagaacgagggagaggaagagaaaaagaaccgaggggagaaagaaggaggaggaaacgggaagggaaagcaagggggacccccgagaacggaaaaggaggaaccacggaagaagagcgagaacaaaagggggggaaggagaccggcgcagggggagaaacagacagagcggggggacaagggcaccgaggggaaagagggacgaactaatgagagacggacgaaaagggcaggagcgaggaggaaccggcaagagaaacgaaacgaaaaggcgcaggacggaacaacccacaagagcaccaagaaaggaaaaccagggagaaagcacagaaccggcgagacagaacggagcaggcggcagggaggaaaacaacagaaagagagggcacagcacagcgagcgcagcagcaagaaagcccacaaagtaaagaggaacggaaaagcagacagcgaacagaggaggagagaaggcaagaccagcgacagagaagcacggggcagacgaaggaaggaagacagagcgacggaaccagcagacgagccaccagaaacgcagggacacagggaggagaccgcgagagagaccaaaacgggaggggacccccaagaagcggcgagggagacgcgaggacaagcgaggggagagaaagagaaaccggcgagcacaagggggaaagacaccaggaacccaaagaggggaaaaggcagggggcaaaggagaagcaaagggagcaaacaacagaagacagagg

SEQ ID NO: 188655 - DNA, 321 bp, Arabidopsis thaliana
aaaaaaaaaacaccccacgtaaacgaaacagagagaacatcaaaagagaggagaaaagaccgagaaaccgcagaatataaaaacaaaaaaaatctaagaaaagagagacaatcacagaaaaaaaagaagggggggacagaaagagagagaaaaactggagaaaaaggagaggacacacaaacgagagagaaacggcgacgacggaagaagagagaaaatgaacgcaacggacggagacagaggagcacaggacgaagaatacagaggacaaagaagaagtgaacaaatgagaagcgagcaaaaaacagaacacacaaggag

SEQ ID NO: 188656 - DNA, 989 bp, Arabidopsis thaliana
  unsure (1)..(989): unsure at all n locations
tacccggaccgagaatacccggatcgacccacgcgtccggtcggatactcttcagggggcgcgaatgtttttacaaaaggtttttaacgtcaaccaacccggagaatcatggaggagacattcggtaatggatgctgggaaaacaaggcaagaatcacgtgaagaagctaacatcattctcatccactatgcagaatcatgggagagatatgagtggtttatgggggcctcctcaaaaaatgttcctattaaaaagtcatgagagttttagacttagaagacttttccagcctagggttatcatgtggattcttgtgaatgggctagagacgcactaaactgacgcaggataagggaaaactttatgaacaaaagaattggggggcgcagctctaaaggatccaaccttacgacccaaagatgcgacctccaagcactactataggggcgactaagtcctcatcattggccgaagatgttccatcttggagcactggaaaaaaccattgtctaaaaccccaccagtaattctcctcatggaaacaacaaaaatacggcccctttattagagccctagagtagggggtgccaaacacataacaagagacttagtggcccaccactcctcccccaggagtaagggncctcttcatttttcactacagatacaagagtttttagcccgagggaggaggctctttggggaacaatcgtgtgctaacaccatgtagggaggaactcgcgcctctccgcccctctagatacaggccaagagtgcactccattcttaatggccccctccggaggggaggaaaatcagcggtggatcaacacgccacgcccagagctgacataacctgttttacaaacctcccccacaatacagccctctatagcaaggcccgcgccttccttttaaaagatgatgaatgcccctttccatatattttgacctgacgggatacaaaaggggatctttccccctcgaa

SEQ ID NO: 188657 - DNA, 1264 bp, Arabidopsis thaliana
  unsure (1)..(1264): unsure at all n locations
tgccctttgaaagtccctggcaaaaattcccgggacgactctacgcgtaccgagtccatcctaaataggaaggacgctggtaaggtgcatctctgattttttgcgctttttatgagggacactcgcagactgaggaacttactttgatagtacattgttgaccaggatgacccccattaatgaatgaaggactactaccacttatagaacgcacgactgccgggctaataaacattcagttagagattactgcttgacccaaagaggggctgaatagaaaccatatgcacagtaggcgaatgcggatgggatgaaaaattacgcaattggtttacctatgggacctattcgcgcgccatgtttgggcaccatggaaggaatatgggccatagcgttcaaaatcattagtgcacctctgcggatctctgcataacgctcgcgtatctcgtagaacgaagagaagtgttaatgtcggcccacgtcctacaacctgagacgaggataaattaatatcctctagtccgcatataagacatgttccctagggtttagataggtagtttacgttttagacatctggtatttcccagatgggtctcgacacctatagggacttaattgagctgaggcgagttcataggaaccaggccggcctttggagaatccaacacagcgcataaaattgtaacccagcccaagtcaatgtgcacacttgaccttcaacgccaaaagtagaaaagcctcattctgggagctgccagagaacttacaggctccttacagagtctgctcagagtgccgtaaccatagagcattgtcaggatgggagtggaattcatacccaggtgcctgagcactcataggatcacaccctttgagtcactcatactcttataaattatcattgcgagaatcatctgtcgaaaaatattggggggaggagcgcgtgcttctataagagtggagctccgctatggagctttagactatctacccgcgtggtgttgtatctgtccacgataaggagccttattggccggatccttctcctactaactaagacaagtgacgagacccctttaacttatgtccacaaagtgcntacacttgtgtccaccagatctgtgtatcgacttaacctagcgtctcatcttgatggtagctgtgggagaatatcacatcactacccttagcagtgctgggcggccctgacaactcttgataaatgatttcgactatcttgcaaagacatagcaataatcct

SEQ ID NO: 188658 - DNA, 1045 bp, Arabidopsis thaliana
ttgtagagcaccggagatatagacccgtccgagcagagtttttatatgcacgactgcgttttttagacaagaaccgtggagagcatgctactcgccgtgtaagggtagcaccgatggaggagagacccaggcagcgacgcgaaccacgcaaggtcctgatgcgtcggacggggacatgcgactgggggggccgtgatactcaagagatgccgctggcggggcgcccactggccgcgtgaagctccgtccgagggggacccgggggggccaagccaggaacggagcgcgaggggacgggggcgcagggcaggagaatccggcgcggcaaaggcataagcgagggacggccaacgcgagcgacacgaagcagcagcgacaggaaaaggctccagactaagcactgtggctcacacggagagaggagagagtgtccgagtgtaggcaatgacaagcacatagaggaagaggcgaggcactctagaaacgctcctcacgcgcacgtcgactcactagtggtcagtccccgaggacgcagccgcacacacagaggatgtcgtagctaggagctcagctacggactgagttcgacgctcataccggcatattatcgctgatagcacgtgatgcagcacgagaaatgctctctcacacgccgatactccacggtcgtgcgcgaacgcaaacgacacgacacgccaggatgtgagcagggcgaggcgagcggtgaggcagagcacaacctaggcgatcaggcgatcgagcggagtcgcgggcaggcgaaaagtcgcacacagtagtgaaaagccccgaagtgtataacagcgagcagagatgtggcaagaagcgacgagcggggagacctgaagtgcaggcctagctcatggatatagccaatgctacgcgcagtcgaggcatgaggaattcgagccggacccgctccacgagacacgacacccggtcgtggcccagcgcagagtccaccgatgcactggagcacctgagtacagaggatatcgaaatgcgagcgagcgtcgcaccggtcgac

SEQ ID NO: 188659 - DNA, 508 bp, Arabidopsis thaliana
gaaaaaaatccccgacgaagaaatatgaccggaaaaagaaaagccccccgagcagagcagagtagaaatcgtaaacaatcacacgcgcaactatgccacagctttttcagaagcacatcttctatgccaaatcgccaatgagacaaacaaaagggagagacccagaaaggagagaaaacgcacgcaacagacggcgtacagaaacgccaaaaaaacacaagcacaaacaaatagagacacgtgaaccacaccaaagagaatcaaagccagaaacgagccaaaaaactgcaccaaggtacaaagaaacacaaaaagcacgaaacaacccaagagaccagacctcggagtcatacacagccaagcgcgatgcaaacgcgacacaaggagaaacgcgacctaacaacaagtaaccaagtgcaccgcataaccagaagtaccggcagcaaccgcatgaagaaacagcagcggcagcacagagcaagagtcacgtagcagcacgcagcatgca

SEQ ID NO: 188660 - DNA, 227 bp, Arabidopsis thaliana
tccggggacgactcacgctaacgtcgcccttctagaacctagaatcatgacctgtgaaaacactctttatacgtttttttccacagacgctctagaaaaagctgtcggtattcagggaaatacttgtgcagaaaaaccccaaactcctgaatgacaacagaggatagccctttttattgttcctgaaccacaacaatgtaccccatcaaaagggggattacagacgg

SEQ ID NO: 188661 - DNA, 624 bp, Arabidopsis thaliana
caaaacccgacaaccaacgaaagagagaccggacgggggcacccggcagaaacccctgcaacaaccaccaaaacccaaaccaaaaagaagcaccggggatcgcccaccacaggaagcccaagaaagggcgacaggggccccatcaagagggagaacaggcaacaaccatacacgcgggggggcgccgccgaccatacccacttaggattcggcggaggagaagcggaccgaagaaaaacacggcggcgaacaggaacaacaagggtcagaacccaagcggagagagccgcggcaaccaaggacctaggctgaggaccgggaaccgacagagcggacccccaacccacaggagggaccagacccagggcgatggcccgaccaggaaaggacagagaagggccggcaatgaagagctccgggcgaaccggcaagcacgtgaaactggaggaagggcgggagagaatggaccccaggggcgcccgggagcacggaaggagcaaccaatagggagagggagccaggcacaaccgaaggggctccagggaagccaaaccgaaacgggccccggaaaagcaccgggggggcgggggaaaaaaaccccccccaggagaggccaggggaggc

SEQ ID NO: 188662 - DNA, 507 bp, Arabidopsis thaliana
gaacgccgccattggcgaaagttgaggccgtagtctatctttaccattttttctacactttacaccctcataccaaacactataggagcccactgtccacccggctgaaacccccgccacaactaatcaaaccctctccaaaaagcagacctgtggatccaccacccctggaatccgaattcagggcaatggggcccaatctgagcaagacgagttaactaccataagaccgtggcggcgcccccgaacatgcccactgatgacgcgaggggaagagaagcaccccaaataaaaccctagcggcgaacaggtacaacacgggtcagatctcataccgagagatccgcgacatccagctaccttggccgaggatccggattctacagagaggcgctccaatcccaatgagacatcagcaacagttctcatgatcaacctggatggactcaaaccggccgacaatcatgagctctgcgataacctgaaagatggtgaactcgaaggagg

SEQ ID NO: 188663 - DNA, 675 bp, Arabidopsis thaliana
tcggaccagaattcccgggtcgacccacgcgtccgggctgaaacgctacataagacccgcttcatttttttttcgaatttgaacgcaatccaagcaggagacgtggtagaggagagatgtagtcttggattgcgggactgcccggaaggacgcaaatgaaaacggaggcagccctttcgacccctaacgtggacaacgcagacaccgacactgtagaaatgggcgtcgctccagcaagtgactaacaataagaggcgagcgagggaaacttcgatgattattccagaccttgctattgaagagcctacatgcaagtgggaccggggcacctgtcgaggaggacgccctagagaaggaactttgcaagtaacactaaagcttgcgcaggatggagtaatatatcactaatccgggcgatagatccccgcttgtctttcaaggcgtatcggggaccattcataagcttaataacggggacaaagatgacccctatgacgggcccagagaaactaggccttttctggctaggcaagaacctaaacccctgggaaactgcaaactaggggcctgatcacacaaggggggcggggcttggaactcggagaagaactagggggtctggagaggggtctcctattacccagaggacagggctctccggggacctatttgggg

SEQ ID NO: 188664 - DNA, 519 bp, Arabidopsis thaliana
aaaaaagcccccccgacggaggcaaagagcacaagcagaaacacgagcacgacggatatagcacaccatttacagcagcccgccagcggcaaacagaggggcgagaaggggggaaccgtccagaaggccacagcaggaacccccgacacagcccgacagggagaaaccagcgaacacggaacgcaagcccaaaggacccgcaccgccgagagacaaacggagccgaggcgaccggacaaaggacaagcaccgaaaccccggggaggacaacgcgaccagaagcacaacgaaagacaggggggagacgcggcaaaaaagaacaccaggaggcggacggaaacgaccaagggcggacggacaggcaggaaggacagcggggagccgaaaccgcgcgggcgaggaaggaagaaacgcaggagcaggcgacccagcgcgccaacaaggaggcacaagagaccagcaaccgcgacggcgggaaaaccagcgcgcgagggggaccacgccgcagcggaggacgag

SEQ ID NO: 188665 - DNA, 560 bp, Arabidopsis thaliana
  unsure (1)..(560): unsure at all n locations
ggaaaaatgagccaaaaaaacccacncgaaaagggggacagganaaacagagaaaattacacggattgggacacaccaacaaaagaggcggggggaaacacaagaagacagacaacccccagaccaaaaaaaagaaacccagacaacaccacacaagaccacggagagggggaggcgccagcaagagaaagcagggaacgacacacgcgcggggagcgccgaggcgaaacaaccacggatacgaagaggagaacggaagagaaacaagcggcggcgaaaaagaacaagggagggcgggcaacgcgagaagaccgggggaggaaaaacagaggaccaggacgagaaccaatgaacggaccggagcaccacaagggccaggacaggccgaggacgagcagaagaccaaagaggggcaggacagaagacagcggccgaacccgaacccagagaaagagcgagaagggcgcgaggggaaggggaaccagccgaggcccaggaaacacggggagggagcaacaccaggggggggggggaacccaaggggccgcagagaaacgaca

SEQ ID NO: 188666 - DNA, 921 bp, Arabidopsis thaliana
gaccgggctcatcctagaggcaagacaccctatctttcagatcagtttttacacgggttaactacggaatcgttgcagacatgggaccgtggctcaaactctctgtacttctggaggcatccccagaaccaagtgagcaaggattctacttcaacagtcgccccaaagattaccaaatcgggagaaatgctgcccaaaagaacagaagtatgacattggccgtctacccgtggcaggctccgctttttacttccactctggcttcggaaggggtgagatgcatcgggacatgagcccatctgcgcctaagaacaaggcggggtaggatcccccagaagacatcttggatactcaagatggatgagaggtgacgatcctcgctatgagagcccttgactctaacgctagttgaccgaacaaggtctcatgagcgatctggaatcacttcgggacagcccgggaatgctgaatgattgctgcctgggaggagcggtcgcttggttattttgaacttggaaggggtcggccttaaggtatcggggaaactacctatgcgcggaccgagccatattgggggggtcactcataggggagtgggtgtctccatatccccacaggggaaccgcctttgctgggggcactcacatctggggcaccctaccccggagactcttttctagtaggaggggctcttgccattacaccgttaaacagggagacccataggctatttcctccccgtgaggcaaggaaataaaagaatcccgccctacataaacatagggggggcttgtataacccccatttggcaatcctatgcgctatttgcttgatagcaaggtctttttttaaggggaaggccccccagctgaaaaaggggctcttaacatttaaagggggatctcccatctttaaaccccc

SEQ ID NO: 188667 - DNA, 271 bp, Arabidopsis thaliana
tggcccctcggcaggtatctcgggccagaattcccgggacgacccacgcgtccgaggttattctcgagacaggccagaatacctgttaggaggagtttttcaacaggcaaaagggcaacaaaacgctgctagaggtaatgaacgggacgattttacttgggtatataacttcttggagaccaaatcatccgagagtcaccacagtaccaggaaaggatgtgccctgtgttactcgtagcgcaccagcatgagattggagcagtctaagagt

SEQ ID NO: 188668 - DNA, 297 bp, Arabidopsis thaliana
aagggaaacacccgccctttcccaaaaatccccatgaaaaccaagggcgggaaaattttttaaagtctaaaaccctccctactttttaaaaggaccatttttgaggggggcccccataacccccaaatttctttcccatgattctgcaagttgttgaaaaggatgttggcttctccactggttcttggcctggttttcccagcatccattcccaaatatctcctccatgattccccgggtgggtggaaaactttggcctttggtgggaacattcaaccccctgaaaacatcccaaac

SEQ ID NO: 188669 - DNA, 624 bp, Arabidopsis thaliana
agaaaaaaaagaggagagaaggacggcccgacaagaggagaaaggcaggacaagagcccgacgaagcggggaagggcgacgcagaggagaccaacgacggacacggaagaggagagacggaacgagaaagaagaaagcggcgacaaagaacaaggacgagaaagagcaaagagagaacaagaagagagacagggagggaggggagaggatgaagaaagcaaagagacgagcaggcgcgaacacaagcggcaggaacaaggagcccagaggcaagaggaagacaacgaacaggcgagaggaggagagaggcggaggaggagcggcctaacaaacacaaagaggagaggcgggaaggaggggaccaacgcagggagaggggaaggggaagacaacaagagagcgcggacaaaggcggaagaaacaaagcggcggcccaggaaaagaaacagagaccccaggaggaggaggaccgcgcacaagaaagggggcacaaaaaacaaagggcaaacagaggacaaggaggagaagaggcgcccgcccaaaaggggggggcccccaaaagacacagaggggaaggcgcagatagaggggcgcacccgcaaaagacagaaaacaccccggggg

SEQ ID NO: 188670 - DNA, 915 bp, Arabidopsis thaliana
aaggctcagatctatgcttgaccgatgttctgacttcgcgaaacaagcgggaatacaccgtatcttaatctccggctccgatctcgaacgaaaagtcgccattcttggagccaacagtgagaattgtgtcaacacctcttgcttcctcgctgaatgaaaggcttaaaattgctgattaagacaacttttccccctaattcccgctacttacagaaataaaatgcccttaaatcaacattaccaaaggagagttatcggcttggcttgaatagaaatggaaacaaaaaaaaaaaccaccccaaaattcttgaaggggttggtatgagattaacaagtggggtcgaaagaaataaactatgggccgaaaggctttctttggaaaggaaaactggatccttcagtttaaggaatttcccagtttttgggtggttacccaaaaaggaaaagcccctgtggtaatggaacccccaggggggacggaaatgctttttattcaaaaccattttacaatggcctcttcaaaaattggattcaaaaggaagaaccctttttgtcggagctatttccattttgccctctaatttaacttgagcgcaaacgaatgtcggcctttaatttaaattaaagaaacataggcaaacccgcttggggaaacaccttaccgtgggtcccaaatttggcaggctgggggaaaattttttaaaaaaagggttgggtattgtcaccgattgaaaaaagaaaaaattggctttgggagggttaaccaccttgtttgaaagttccttcaaaggggccaggaaatttttttatttttttggaaaagggacaaagtttcaaaagggcgccaaaattaaagggtcccggagaaaagaagggctaaggcttggggttaaaaaataattgcattctttttta

SEQ ID NO: 188671 - DNA, 674 bp, Arabidopsis thaliana
ccataccgcttcccttgacttagactaccggaggaacttccttgtacttgccatcttatttgcaatattatctcaacgactgctccgactcgtaagacgagtaattggaattctaaatggcaggaattggccattaaggatgctctcggacgctgcttgaagcatgatattaaccacacctaacgactgtgacatactagattatcctgcgtgagaaggatgtgaacctgcgtacaaacgatagctagcgtccactccacctgctcagctttgactttttcctgcacaatggactgcatggcactcttgctggtacactcgtcctggtcagagacccgactaacacgacctaagcgcatggtaaaaccaccatgtcggattatgagagaaaaacaaggatttacgaattccatgctgtgagctatccatcgatgtggcgactggaaaaaggggtcacagacctggatgatcgtcaaccgaaagaggcctgcccaatacggaacgaacataaagaagagagtgaaaagggcaaggccctgggagattgacactcacgagaaaaggaagaatgcgggactttgaaatggagattaaacagacaggagagttgctccctaaacaggcccccatagaattttgccttcaaagtgcaacccggagaatgggcccccggg

SEQ ID NO: 188672 - DNA, 1198 bp, Arabidopsis thaliana
  unsure (1)..(1198): unsure at all n locations
aagaggaggagggagggagagagcagagagaaaaagaaagaaagcgagggggagagaagagaagagagagagagaggagagagaaggagagagagagggagagagggagaagagagagagaggagagagaaagcaaggagagagagagaaaagagagaaagaaggagagaggaaaaggaaaggagagaaagagagggagcaagaggagggaagacgagagagaaagagtagagagagagaggagagaggacaggggagagagagaagaggagaagggggggagcaaaaagggaaggagaaggaagacagatgatgagcgaaagatgggagaagacgaacgtaagcgaagagagatgaggggagacgatgaagccagacgtgactgaactgcaaagtatggcgggaacagatacngccagaaggaagtgagatgtagagatatgaggagaagcgcgagagtgcatgtgagagatcgatgagaaggagtgaaaaagggaggagaataaagcggggggaagagagagaaggagaagagggaagagagagacagagaagaggcaggtagatgaagatgaggagcgacgaaacgatcgcgagaaggaagaggggaagaagaagggaagaagaagagagaagaaggaggcgggaaggaggaggagagaaagaggggggtagaaaaagagagaagggaaaagagaagaagagaggaaggagggagaaaaaaaggcggagaaaaggaggagagagagaggggagaaaaagaagagaggagaaagaagagaaagaagggagagagaaggaagaaggaagggggaggaggaaaaaggggaggagggaagagaagggagaagaagagagagggggaagaggagaagaaaagaagagaagggaggcggaggggagagagaggggagagaggaggagaggaagagaaggaggggggataaggaggaagagggaggcggagaaagagagaagggtagaggaaggagaaggagagagaagatgggggagcaagtagggaagaagacaggagagaagtagaaggagagacgtggagaagagaatagaaagaaggaagaagggggtacggaaggaagtgcgtaggagagagatgaganggaaganggggaaagagaagaggaggagaggagaatagaaagttgagagaagatagaatgaggaagagatgaagatg

SEQ ID NO: 188673 - DNA, 1027 bp, Arabidopsis thaliana
  unsure (1)..(1027): unsure at all n locations
gccgggcccccccatgacggccgttgaaagaccctgggaaaaattccggaaaaaatttgggaagagacccccccaaaaaancaaaacccgccccagggaaacccccgaaatcttggcgcctgttttaggacgctccccggggcgggaagaagggcaccaaccggctcgggaaaaaaagccacgcccacagagagaaaggctggcccgaatttaagaagggttaccttaacctaaaagccacacggccgggtatggaccaccatgaaaccccaaacctccccaacagcggaaccctggacccacccccaaggggccgggaacgtgaaaactcccactgggggaaaaaaaccccccccatccggacataaaaaaaggccccgcctaaaaacgaaaggaacaaaccgatgaggaagattatgggcccacctcccaaaaaaattcgcaatcatccaagaaaaaatgggcaaaactccacggaaccccattatgggcaaagggggaggggtaaaacccgggcgcattggggaccaacccccggtaaaaaaaacacagggcgtgccaaatttggaaggcccaaaaaaagaaaaggagggggcaagacacaatatgggggggtctggaagcaaacctccaaaaaggtgcctttcaggggaggggttcacctggggaaaaaaagcacgggcgccatctttcgggcaaggaagggaaaccaaaaaaaaccgggccaaaaccgaaaaaaaaacccccctggggttaaaaagaggaaaccaaagcttgggaaacccgccccaaaaagggggggggaaagggaccataaccccaccgccatggggggcgaaaaaaaaaaaaaaaaaaaaaaagcgcgggccccccccccaaagggaagccaagccataacggtacaccggtgccagggcccaaagaaaaaaaccccttcctggaaggggggaaccaaaaaaatcaaattaaacggggccccctggttttcacaaacggcccggaaccgggggaaaaaccccgggggggg

SEQ ID NO: 188674 - DNA, 1075 bp, Arabidopsis thaliana
  unsure (1)..(1075): unsure at all n locations
ccccaatgacggcgttgaaggccgtcgcagatcccggccggaattcccgggtcgacccacgcgtccgaaccaatccgcttatacgaaaccccgactgtttaccgtccgaatcattcccgcagatggatggcaacgccgcacagagcgctacagtgggaatactgacaacttcgacgcgatgactgaatgaacatgaaaaggtccaccaaagacatgagaagcatgagagctctcgtntgccactagaagcatgcaaccgcttatccggaaggaccgcaatactatacatcacacgcagaatagtgacggaaccacaggggtcgaccagcgtgaaaaccacagaacgcctcagaagcgcgagggccaagaatccccaattcgtactggggaacatggtgacatcggtaggcagaatcacctagccccataaagaagacctggctccaagagcaaatctcgtaacgaattaatggcccccagccgggggcgaaccacctggaatggaggcttcgggccgcaattttgaaagaggagcccgggaaaataacatgacccaaaaactggacccaaaggcccagcgtcccctcgggggcctggaaggcggtacccaccgaaacaacccggggcctatacaaagctgtcaccagaaaagtgggtaagggactcctacaaaacaccccccgctttaagaagcaaaacctgtactcaaagttgtaaaaacaagagcacactttctagggggatcccctaacacactccaagaaggagagaactctatgagtcaacatgggggaaaaaaacaggggagagccctgccataaaaatgggggcccatacgccccgggggggacacgacctgggtttaaaaaggaaaatactccctgtttcctacacaaggtgggaaagcccctgggggccggctcccctcgaacaaggatatctaaccgtgaccccccccccgtaagggatccccacccgggattagaccccccgggaaaacaaggggcccccatacactgggaaacccccatagaggggggcggcaataaaataaattttttcccccccctggttt

SEQ ID NO: 188675 - DNA, 1411 bp, Arabidopsis thaliana
tcccgagacgacccacccgtccgaaatggaactctagagcgggggcgggacgttttttataagatttacgcaaccacaacgatcaattgcatatgtgaaaaacaacaacaatcccaggacatgcccgtgaaagccgtcatgtaaagattaacggcgactattcttaaataagaaaacacatgaaaccccaggggggtgcgcacgcaatctactcaacacagaaccatcgcctgaggctctccctcactaatacggataggcaatactatccgaaacattcacaatttccttcctagagcagctacttagcgaccggatctctcggtgcgcaaatatcttcgcctacacgttcagtggaactcgcatctgccactctgcgcgtacatctgagctttgtccgtagtatcgatatactcacgatccgagcgcgacagaacatatctgagcctcagtggatgacataatgcagataggttcacgctcaatggagatgagatcagaggacgctctatactcagagtagatattgagaggaccttgagagtagtatctacagagcaatgactacgtgcttcaactcggtatgacatactctcctctataccagtactgacgtacgaacacacacacctatcatgtcaccggagagcatagtaacaccacacactaatctataagcgtgaacgcctgtcaggacagcgcagcgaaccagtaatgtatctaaacctagcacagcacggtctctaattattaggctctccatgatcaggggcgtcttcagcgtgactatgagacacccagtaggattgctacactgctagcatgaactacgaagcacaacgctccgatatgacagcggtaaaacacgtgctaaggctcgactacctgtaataatcacgtaaagactacctcggtcactatcaaggcataatatcgcgctctattatggttatgaaacacgacgccacatcatttacgtaacctcgagtaataggtcgcaaatagtctgagcaagacaatcaacagtcatcctactcccaagacgatcccattacgtactgtacgcgccaatgacgaggctcagctacatataagcgggaggacaactctaccgattacgcacgacgatcacgtccacaccgatcaaaattgcctagatgagcagtattagcaccttcctttgtagacgaaggagataccctcttctcgaggacacgacaaattgaggacaagacaatagctattcctaaaatagtgcttctaacactgccccataaaagcaatccaaagatacgaatcgcctgctcacacgagtgtctatttgcacattcgttcataagactagataagccgtaagcgttgaccgctcccgcataggagacacacatgacctgacacatattcggtagac

SEQ ID NO: 188676 - DNA, 284 bp, Arabidopsis thaliana
attgactcttttatttggagttttgaacaacttatcgtttttgaacttaaacaaaaaccctatattcaaaccaatttgccggaggaaagacccgccccctttgagggggaaccgggcccccaattttaaaaaaaaaaggccccggaaaaaaatgggctattcccccccccccccgggggaaaaaatgggaaaaaaaaactcccgaaacaaaagacccccatggatcgaaaccaagggggggcccccggggggaggggaaaccgggggaaaaaaaaacggggggg

SEQ ID NO: 188677 - DNA, 338 bp, Arabidopsis thaliana
ttttttttttttttttttttttttttttttttttttttttttttttttttttttttttttttttttttttttgggaaaaaaccggccctttgggttttcattggttcaccccggtttaacctccccccaaagggtcaaaacccccctgacccaggggggtttttgggggaggcaaaaaacccccccccaggggggtcacctttttccttttccactttttttttagccccccataaaaaccgggctttccacgcaagaacttttccgtttttggaaaaaattgaaccccttggtctttggaagagggggcccaaaccccgtttccatgatttttccat

SEQ ID NO: 188678 - DNA, 305 bp, Arabidopsis thaliana
tttctttttttttttttttttggaaacaaaaggttattttaacaatacaacaacattgggaaaaagaaaaacaaaaaaataaaatacaaaaaacacaacaatgttttcagccgataatcccaaaaaaaaaaaagatacttgttttaaaaacccaaactttttttggctttcattggatttgattttttggggttaagaaccgtttaccttacaaaaccacatttcaagctttaacttcagtcttcttgttgggctcaaacacgaacttgatcagagactctttgatagacatcaactgagggaac

SEQ ID NO: 188679 - DNA, 285 bp, Arabidopsis thaliana
cgggaagtagtttttattttttatttttttcaccgtggacggtactaaagtacaaagtggtaaaaaccccttgtaaagaaaaaaacaagagaggtcaaaacaaactacaaaaatgtaagaaaaaaaaaaagcgaatatatggttactgttatatatttttaatttttttaccttgaaaattagaaaaagaaattaaaaaaaaaactccaaaattttttatttagggcttttccttaaagagtgaagctaatccggtgacagccttaacttctctctccaccgcca

SEQ ID NO: 188680 - DNA, 138 bp, Arabidopsis thaliana
gattctaagccctagtaatattcccaaatgttctgttaagttaaataagccagatgcagtgggggcatcttaaacattgggtttggtctattagatattaaaagctttacaccttaatatttgatcaaatgaactaca

SEQ ID NO: 188681 - DNA, 268 bp, Arabidopsis thaliana
gattctaagccctttttatattcctaaatgagaggataagttaaatgaaccagatgcagtcaatacattttaaacattgggtttggactattagatattaaaagctttacaccttaatattagaggaaatgaactacacatcttacttgccttttggcacttttatgttgctatcttcggtgaccaatgaattctgactcacctcaagttctttcaacagtagcaacaggggtaccatgggattcaccgtcaagcctgactgatggat

SEQ ID NO: 188682 - DNA, 306 bp, Arabidopsis thaliana
gattctaagccctattaatattcccaaatgtttttataagttaaataagtcagatgcagccaatacatattcaacattgggtttgctatattagatattaaaaggtttacaacctattattagatgaaacgaactacacatcttcattgtctgttggcacttacatgttgctctcttcggcgaccaatgaattcgtctcagcacaagttgcttcaacagtagcatcagttgtaccatcgtattcaccgtcaagcctgtctgatggattctcggaatgtttttcctccgtcttcggtagggatgaat

SEQ ID NO: 188683 - DNA, 510 bp, Arabidopsis thaliana
  unsure (1)..(510): unsure at all n locations
ggccgccctttntttttttttttttgctttaaaggctctgattattaatacaaataacatcatcatattgggggttattcaacattaataacaataacttaaatattcaaagaaacaaaagaacatgaattttaaaaggtttttaaatttattatagtaaaaaaataaatgactggcgcttacactgcacaaatgaattacgaaatgaagggaacacataagagacaacaatctcggacacattcataagtgggaaaataattatattaaataaaatacctcagctgcctgctccgttggtcacggtaacgccgccactctccaccttagggggagctgagaaccgccgtggtttaggcaatgcaggcgaagttggatacgagagccgtttcttagctgatgccttgtctgtgaacccttcgttttcctgtgtggaaccacctaatgggctttggggcttgagcctggctcgagcctgatttagttggaaccatgtagctcgggagagct

SEQ ID NO: 188684 - DNA, 498 bp, Arabidopsis thaliana
ttcaaccggagctctgatattgacccttttattctgtttcaaaatctgatatttgcaggctgtaaacttcggagctaactcagaaaatatgcaagtgttggtaactggattggacccgaacgtgatgagagtttcgggatcaaagaagacagtacttacctctaccaatgtgatggatgaaaattccttctcacagccagagaaggttgtaccacatgaaagcttgctagagttggcagaggaggatatgaccgttgttctcccgccacattccttttcttcattcgatttgttgaaggaatctgcaaagataagaatgccaatttctgattcttcttcccatcagaaaactaccactgtgtgaagagaaacaatgacaaggaagtatcaacttttatgtcaaaagtctctttgtggttcaaatctaattacattccataaatgcttataacgtacccttgtgtatatataataatagtctggtgaataaatttactt

SEQ ID NO: 188685 - DNA, 235 bp, Arabidopsis thaliana
cctgcctctctaacagtgcacgtacacaggacataacaaggctcaaggagagaacgagcgcacgagcggccgcgaaaacagcctcttctgaacccaagcaaatggcagagcaacacaatttcttgcaatgcctttgtacataagacactaatctacctcttcatctattttacatggctcagtttcttgcatgtaactgtgaatctgaagattcatcacttgttgattattttcc

SEQ ID NO: 188686 - DNA, 1204 bp, Arabidopsis thaliana
tttggggaatgaaaaggtcggtcccggaaaaggtatggtgagaggagaggatgggagttggatatttggagggatgggtgagtgaaaagttttttttttttttgggggaggaagaggaaaaagagaagaggggatagttgatgggggggggggatgtgtatagaaattatgtaatggagatatatgtttatgtgaggtaaagagaagttatggtataataaaagagagttggtagagtgatataaaagagtagatggtagggttaatggaaaatgatggggataggtatggggtatatgggaaaggatgattgggatagaggggtaagggaagttgggatgatgagtatatagagggagggtgaagtaatgagtgtttaattgagtataagagaagagggtggaaaatgggtgagtatgtgaggagtgaaagtggattagataaagtatagtaggatgaggtggatggagaggtggataaggtatgagatgtgttataaaaatttgggggaaattggttaattagggaggaggagggtattttggaggtggtaattttggggtaggtggggagttaattatttatggaatgtagggagagaagagaggtgagtgaaaatgatggttggggagtgttattaggtgagagaaaagattaaggggtgagaaggatggtgtggggtgatgagtgagaagtatgacagtagagtgaggtatgggggagaagattaatgtaatgtaactaggggttaagtgtagaggattataggaggtggcgtggtagagaagttgtatatgggggaataatattatggtggagagttatagaggaagggattaaggagggattaaaataattggtgggaggagaatatgtgtagggggtgggggtaaggatttgatggttattgaggagatggtaattagggattgtttatgtaggaaggggtgagaatggagataaggaggtggatgtaagataaggtatgtaagaattgtatgtagaataagtgaagtgatatgatggtgaagtttagggtagtgggaggattgatatagtggagaggaataggaagagattgtagattatgtaagtaggagggatgtaattgagatggttaagggaagatggatgatgagaattgagatgtaggggatagaggttaagtaaagtatgttgagtagtaagaagaggtagatgtgga

SEQ ID NO: 188687 - DNA, 666 bp, Arabidopsis thaliana
agaagaccccgaagagaaggagaggggggaaaaaaaattttagaaaaagaagaaaaaggggaggggaaaaggaaaggagagaagaaagaaagaaaagggagaaagaaaaaagagaaagaaagagagaaggagcagaaacagaagaaaaaacaggcgaaagagaggaccgagcagaaagacaaaacaacaccgacgggaagagagaccggggccggaacagaacgcaacgagcgaacagaacaaaagaagagaacggcgcgacaagcaggagaagcggcacgggaaggaaaaaggaaagaacgacacagaaagaaggcagacgaacagaagaaggaggggggaacgagagaggcgagggggaaagacggagggagacacaacggccagcaggaacaagcggacgaacaaaggaaaacaagagaaagggcacaaaaccgaagggaagaagaagagcacaagaaaggcgacgacgaaaaagaagaagccgggagagcagccgagggaaggaaaaccccaaagaaaagacggaaaaggggaagagacggcacagaaggacaacgggccagaaacgggcagacacaagcgaccagggcgagaacgggagacaaaggacagcgggcgaacaaaggaaaacaagaacagaaggaaagagaacggggacgagcg

SEQ ID NO: 188688 - DNA, 952 bp, Arabidopsis thaliana
acttgtttatctcaacatatattccaaatgtgataggttaccgtataaagacaaggaatatatgttagagaacatatacaagtaagaggtcgtgtacaagcaatgaaagaaaaaaacccttcgatattaacacagcgtagagacatataacaatatgaattagagtgataagagaaacatataaacctcggagaattgactacgaaattaccatacatcaggacggatctggacttctaatgtctagcatatactggtcaaataaaatttggagtaaatttttttgcccaaacattttcacagacttgaaggggggacttaatatgtaaattactcaggcgcaatcagaaagcgggaagtctttatatgctagtcaattaactcatgtaccatttactgtacgttcctatagttgcaatgttagtaacctagatataccatatcatcttgtactctccaaaacgagtgctaggtatcctcatataagtgtgtgcatgtacggaaaacacagtaatacaagggtgtccagaagagaatccatctccgctgaactcgtatacaggcggtaagcaccatgcctatctgcggtctttctgatcctcacctgtgtatatgtctcttcccctgaaggtggcgaaatacgtggaatacacccctgggtcaccacagatccgggcttcatggtcatgccgtcaattaatatggttctattctgaagaaactattgggggatctttttgggtccccaaaggttttggatcttgggaattaaatttagaattagtactgcggctccattgctagtgcctatgtcagtagtcagtaggtagaagcttcgcccatcatggtcaatttgtaggcatgcaaagttgcgccatccaatggaatccttcttcaattattttcaggattccacctcatccacttactgggaaacagacgaaaagattcg

SEQ ID NO: 188689 - DNA, 331 bp, Arabidopsis thaliana
aacacatttttttttttgaacacaattcatactcaaatttcggcctatcgttggggatgaacatatgacattaaatttaagcacccacaaagcataataagccaggcacaaagaacaacttattcttcatccacaccaacacagaaaatagtaactactcctcttttattatgcgcattagcgtcatcgacggataaaaccgctttacagaacaggaaacggcactaactgcaggcctcctcaaactaacttatcccaattacgtacaccgaacgacgcagaacgcaggggctcaaagcgaaagcctgactctaaccgtacagtaaaacaa

SEQ ID NO: 188690 - DNA, 699 bp, Arabidopsis thaliana
ttacagtggaagtgagaagggggtatagattgtggattggggaagggagtgtaaattgaatggagagggcatagaggattttatttttttttttaatggaagtgaagggatggagtgaaagagcggtggaagagtggggatgggtgggggatttaagttagtaggatgtaatagaggttggggatggtatgatcagattagtgttataatataatattagattgatatagaaggaggggttgtaatgtgggtattggagttgtgattggtagaggtggaaataggtgttaagagtggagtgtagtggttattattaagtgtgatggtattagtgcgggtaggtgagggaatataagaaagtggggagaggtagggggtgaggagtaaagatggtttagagagggagagaggagtaatggggaggaggtaaggggatgcaaggaataatgtatttggatgagaagaaggtgtgtattaataaggtgaatagtaagtgagatagaagttatgagttgtagagaggttgatgttagagtggtatgatagtgtatgtgagtaggtacgatgttgatattaagtataagaggagagtgagatgttagtggagaggaataggaggtgtgtataacgagagataagagagtaagtgaaaagttggacagagtgtataaaggtgtgaataattgtagataggaatat

SEQ ID NO: 188691 - DNA, 483 bp, Arabidopsis thaliana
cccaacacacgcacaagcacgggagcgcccgacgccaacgcaaccccacaccggcccggaacaacgaaggagggagacacgccgggcgcacagcacggccacagacccccacccaaacgcagccgacacggcagcagcacccgacggaggaaacccgcacggagacgcacagaaacggagccacgccggacgacgcacgcggcggcccggacagagcaacacgccgaggggaccggaggcgggacgacgagcagcgaagagcgggacgaaacggaccgaccggaaccacacccccgacacccaagcacgacccagcaccgaccgggacacgagcaaggccggcacaacgcgcgcacgagagaccaggacgacaggccacccgcgcggacgacgcacccggcccgagccagcacagcaagcaagggcccgagcgacccggagggacacgggacgaccgcgcacgcggacgacgcagcggaaaac

SEQ ID NO: 188692 - DNA, 699 bp, Arabidopsis thaliana
gttgtgatttgggacgcacgcttacgtaagctgggatcctatacagcggacggcctttttggtcgtttttttttttaaccgtgaagaaacggacatttgtgtgctaactcgattttcacatatttatgccccatctacagatgttccaaggctctaccgatatattgagaccataggaccgtgcaaagccggttgtacactacaaattctgttaggagatatatattgacaaacaactaagctactgaaaggtgaatagaaacatctcctattttatttctttacacgcttcgaataactatggctcagctcgcactgagcccgttcacttacacataatgctccgcagactcgttgctcacagaattcttttgggaaggggaagcttgacgctacctaaactctggcacgagaggccttacactactttgctgttcgaaatcggcactgtcttcttctctgcatcttcagctttaatctttttgcgccaagcaacgagcttgtggaactactcaagctccttcaccaggttctatatcgaccttattgggaggaataaagcgattggtcatacctgattattggtccttagcacttattttgaaagagatgagtaaccaaccttgggaggaacagtcaaccttcgtgggcgcttttaccatttggtgtttgctccccccctctcggacgactaaaggg

SEQ ID NO: 188693 - DNA, 1030 bp, Arabidopsis thaliana
cgtccaacaccacgatccaacggcggtttttttttcctcggaaaacaccaaagcgtggggggtttacttaatggtagtcgtacaacttgttgcgctaacattacatttgccgtaggctagtcccacgtattatagcttgattgcgtatatacactatagttgcggagctatgcgggatgagtcgataaggtccagcgcgactacaatattcactccaaacgttgtagggataacatttgtggcctctactcggagttacttggtgaacacaacttacgggcgtggctccgagctctgtattgtacactcatcagaacggagtcttagacatagtccagcactgaatgatcatcgtgcagttatggttcaacaatttgcacaatcaggtctgaaagagcaacttgataatgggaagtctgctagactgtctatgagctgtaatagaagttgaatctgagtccagatctatcaggacaaggtaattcatggctagtactgaactggcgcagtagagccggtttcatctatgtgaggaaacttccttgattgatcccttaagccgagttccacgctagagatatttggcttacatttacgcgtttcacaattcaggtcgttttctgtctcacattctagagattctgattgcttgacgggatactcgctactataacgagagaggatatgtagggaatcacgtccaccttagctgaccggtacgttttattatatgccgggagtgcctccctctccttgattataaactaatcgactcgagagcagcataatagtaatgactccaagcctcggaaagagtacagctgcagtgccggcttgaagtttgcggactagcctgggaactataaatgagtgggcttgatacaacccagtagagtggcagaataagcaagcacgggtacttatcattagcttgtagacgtggattgcaagtctggccgacgagaaccgtttaaggtacactaatgacctcatgcatttactgtcgttatgcgaagataagcgtacgtct

SEQ ID NO: 188694 - DNA, 449 bp, Arabidopsis thaliana
agaaagtagagcggccgccccggcaaaacaccccctttattttcacccccccgagcaaccagaaccccgcagggggggcgcaacgggccaaacacacaaaacgggcccgccacaccacaaacgcccatacaagagccgacgacccacacgcaagacacgcgcccaccccagcccgcgaaaccggacgcgacccgctagccgcacaacacaacaaacgccccgaccgaagaggacaagcccagcagaagaaaccgcacgaaagacgcgcgcaccaccacgaacaacgcctcagacagcccccaccgcgagacgccgccgcgccgaaccgaaggcaacaaagccaagagggcgcacgcagagacaaacacgaaccgccggggcgaggacacaaacccaccccacacacaccagcaacgagcgccacgaccaccacacacgagacggagcag

SEQ ID NO: 188695 - DNA, 917 bp, Arabidopsis thaliana
aagaagacgaaagtttatcttttgcgcgaagacgagaggaagaaccaacagcgagaggggggaggcagaaaagcgacaacagaggcgaaggccggacgacgaagaacaggggcgaacaccacaagaggcacgagggcgaagcgccaccgaggcgcggagcaaagaagaaaaacacaagcaaacgaaaaggcagcggacgcagcgccgacgcagaacaccgagcgagaaagacaacagagagagaaccgcagggacgaaaacgaacaggagggacaaacgaaaagagcgggggaagaggaacacaacggacgaaacagcaccaaaaacgagagaagaaggagcgaggacaaaggacgagacggcgaagggaaggacgacgccgacaacaggcgaggacaaacgacaaaaaaaggcgacgggacgaaaaaacaagacgagcaagaaacgccagaccacggacaagggcaaggcgaaaagaggaggaaagagagaagagcgacgaagacagagcaggtcggacgcggaagaaacgaaacacgaagaccaagggagcacgcaacgagcacagaaaggaacacaacgagagaaggcccagaagtaacccgccgagcggcgaggcagcgaggcgggcaaaacaacgcaagcgggacgaggacaagcaacggagccgcggcgaaccgacggacagaaagcgcagacgaaccgaaagaggcaaaggaggcgagaggagacaccggcgacgccggcacccaccacacgccacggaagcgacgccgaaccacgagcgggagaaggaaaaaatgagacgaggcgatcaagacggcacagagaggcgagcgaacacccagacagggagaaaacgagacgcgagacaacggcgtcaagcaggaaccggacgccagacaggagcaggcgga

SEQ ID NO: 188696 - DNA, 1151 bp, Arabidopsis thaliana
  unsure (1)..(1151): unsure at all n locations
gggggaggggaacacaagagaaaaagacggagagggcgcacacagccacaaagagaagaggcgggagaagcacgcacacggcacgagaagcaccggacggagagacgacgggagaacaaccgacaaagacagcgtgaagaccagcacgaaacacggcccgaggagggagacgacagcggcaccgcggcaccgaagcaggcgagacaaaccgaggcgaacaaggaaccacagcagcagcatcgacgacgggggcgaggcaacaacggaggagaacagaggagacaagggacaagagctacgcagcggagacacgaggtaccagcgagggacgagtggaggagcaggggcgcaacacacgcaagatcgggcgaagcacaggagagaaggtnggcacagggagcaaggagacgaggaaccagcgaaactaacgacaacgcgccggaatgagaacagcccaaacgcagggaggggcgaggaacagcagacatggacaaggagcgaagaaaaaaggcccggagcgcgcgagaacgagagcgggaacggacgggcgagcagcaccgctggtgagaaagagagcccagagaagagcgacggagaagcgcaccgagcagggcacaaggagacaaggaacacagcaggcggccgagaaacacgtgagaaggaggaggaaagacaggccgagacgggacggcaccgaaacccgggagaaggaaaaagcaggcaagaagcagccgggacgcaacgaagaggaggcggaagaaggagaaggccatacgacgacgggcgaagcagcgcgcaggaggagaacatgcagcgcaccggaagagaagacagcgagggagcagcaaacgcaggaagcagcccagaggccaaaaggagagcgcagagagggccgcaccgcgagcaaaggagagagaaacagcgaagcggcggacggagcccaacaggaagcgggccagacgaaacaagcaacagaaggaagaggggagacgaacgcggcgagcaggaggcacaccggcggcacacgcgaggacggccgaccacacggacaagggaacgtgaggcacgaaaggagggacacgaaacgcgggacgaaagaacgcacgccactcggcacgaagggcacccgcgacgacgggccgccggaggcc

SEQ ID NO: 188697 - DNA, 816 bp, Arabidopsis thaliana
gattcgaatgcacccgccgtaagctggaatcctaaacaggggacgcacttcgcggccgcatttttttttagaacacttacatgccgactaaagcgaaaatcgcgtactactcgtaggatggtcaagcgaagaaactacctgtacaagcacggaaaggactgcttcagagaacgggtgcgctcacaatggatgcacaaaacgtctcgaaagctctcactgacgacgaccacccaaagagctcccataatgaccacggcgacctcactgagcggagcaaagctaggtgcccaaaagattggcctgaaggaccaagttcacgcctttaggacgccaccgagcactccggagggctcagcgaactcgggcgggcaatcacgcacgggtacagtagccctgcagccacgggggggtcactcaatggcgggcggagccaaatgtaatggccaccaggacaattggagacgggcccactactagaacttcctaggccccgggatatacaccataaccgggcgcggatagatcgaaatcttctgagcgccacaaagtgcgggcggttgacaacaaaccatatctatgggggccccctccggggacaaagatgttttccacggaaacaaagcggacaaggaaacacgaggaaagaaggcgataaaggaaccgccctccaacttatgggggaagccatcgccctaagcccaattcatgtctagaggtaaacaacgtgctcatacacaagtgcggaatacggcaaaactccataggacggtgggaatgacactcccacgacccaaagggaatattttggtaccccca

SEQ ID NO: 188698 - DNA, 614 bp, Arabidopsis thaliana
aatgagatttggggaaaaacccacccgaccaacggaaacacaaagacagaaaacgagagcgagggacgacaaaattttacaaagacaaagaacgcaccaacacaggggggcaacacaaacacaggccccaccaaagcagaaaggaacaaaaggaaacccaggaacaaagagacaaaggaagcgagaaaacccacacaagaagaagaacaagggggacgacacaagcacaacacaaggcaaacgaggggacaagaaggggaccaggacaaacagaaaggagcacaaagagaggaaacagaggggacaagaaaagaaaacgcgagaaagaggccgcgcacaaaaacaagcccaagcggagcaaaaccgcagaaaaacgcgacagacaaacagaacgcagagcacacacccagaaccagaggaaggggaacaaggcaaaggagaagaggcgcagaaaaaccagcaccagcgaaagaacaaaacgaagacaaaaggaagcaaaacgcgaacaaggcaaaaaaaaggagggcacagcagaggacaaaaccgaggagaataggaaaacaaaacgaaaaaggaaaaagggacaaaaaagagcagaggagaaaaaccaaggg

SEQ ID NO: 188699 - DNA, 661 bp, Arabidopsis thaliana
aacaagcaacatgggtccaataacgaccctgcgctggccacactaaatcaaaaaatggagccacgacgacgacatgcgcatcttacaagcagaaactccaagacatcaacaacaaccataaatgagagcatacgtttactaacatataactcctagaacctagaaggcaccttaacaaagaacctcccgaaagcagatgactacttgcctagatgagcagaagacacaacagcaagtgaaagtgctatagacatgcgaacgataccttatctcggaacctgctgcgccgcgatgaccatacctggcatatccttgccacatcccacgctctaaggtggcgccgacaacactaactgagacgcaaaaaaagatcataacgtggtgaaaccaacgcaaaccgcacgagcttagagagatgccgaggcaaaaggcgaaatgcgacatacaacatcaccaatagaggagtgagctcactctctgaacagccgggggaacagcccgtgaatcgccaacatgattcgtgacagacagcagatattacgaagcagaacctgaatcaatccacatcggggatagaaaaccaactaaaaatgcgccgccactgggaaaagaagtgcaataactacgatcctctagcaatggctaggtagcaaacatagag

SEQ ID NO: 188700 - DNA, 818 bp, Arabidopsis thaliana
aaaaaattttggttaagggagaaaaagacccggaggctagtaaggtaagtaataagagaggggggaagtgaagtatgaagaaagagagaagagattttttttttttgcaagggtgagaagcggtaaaaagaagaaaagggggggggagaggtatttaaagggggttagagaaagacaggataagataatgggaagaagaaaaagagaagtagatgatgattgatgaaagagagagtaagaaagagaaaagtgaaatataaaggaaaaggtaaaaggagggataagaaaaggtatggaaagtgaagaggaggaataagagcatcggaggagatgagagtgaggagaaaaaggggggtgaaaagatagaagggaagggaagagaagggatgggaaaatgaagaggaagtatatggtgatggaggataaatagttgtaataaatagatagagaggggactgaaaagtgtaaaagtgggatatgagagaaagataaacgagaagaaatgcgttatagagaatagaaataagtgaggcaagaatgtgagtgaggtgagaaatattgagagataaataagaaagagatgaatggagtatgaaataatagcgggtgatgtaggaagaggtaatgattggaggagagagtgtgagttgaagcgatgagataaagtatgtagtgtagtaagattgaggacgaaaaaagggttggtgaagattataagaggaggtagtggagatgtagaagtataatacagcggtatgttgtatgtacatatgtagatgaagtaagataaggggtagaaggtaatataagggagataa

SEQ ID NO: 188701 - DNA, 1183 bp, Arabidopsis thaliana
  unsure (1)..(1183): unsure at all n locations
aaaggggggggcggggtgaataaatcagcgaagagaaatgaggagaaaggagagggatagaaaagcaaatgtattataataaatggacgatatgaaaaggagaggaagagggggaaaatggatgaaggggtgaaaaaaaatgaaaaaggataaacggggggagatagtgagggggataacgaggggagaagaaagaaaaaaaggagaagaaaagtataagggaagggtaaagagaagaaggaaggagcgaacggaaaggagaaagggaaggagaatgaatagcggaggaaagcagagcaagaagagaaaaagagaaagtggaggacagagaggaaaaatacgaaaagggaagaaagggaaaagaaacaacgaaaaaaaaagagcgtagagtaggaagaggggtaggaaggaatagaaaaggtcggggagaaatgggagaagtgagaaagaagggaagtgcggagatggtatgagggaggataaggggataacaagagggaagagaagcggaaagtaaacgaacagtctattgatnggagagaagaagattctaggcagagggtaatggtggatggagagggaggaagatgggggaaagcgagcgataggaatatagaagggggtgcaagagcgtgagaattgaatgaggagagagataagtgtgtcagaataaattaggagtaggaggaagaagagaggagaggagagagggggaacatcaggtatcggagaggaaggatgcgagtgggacaggagagagcggggcaggacaagagaaggaagaagtaaaaagaggtatcgaatagcgaataaaagaggagtgagtcataataagggagggaagaaaagaggaagaataatggtgaaacaagagctgggcgaaaaagaggatgatagggagtgggaagacagtgagagagagaaaaggaaatgagacgttagatgagagaaaaggaagggataaatgaaagagagataatcatagggaaatgaaatacctgatggcaccgagaagagaagaacatagggaaagggaataaggtgtgtgaactgagaagatggacgaggaggaaaagtgtgcgagggagacaaaaaagagtagaagcgaaggataaaagatgggacggataagaagcaagtaagagaggggaggaatatgaagggaaagtaaatgaaaggaaaa

SEQ ID NO: 188702 - DNA, 1100 bp, Arabidopsis thaliana
  unsure (1)..(1100): unsure at all n locations
aactaaagcccgggccccctanggagtggaaaagataagaagggttagaggagtcaggcggaaaagtaggaatgggtgagagaagaacaattgttttttttagtgagatgagaacggaaagtgatggagtagctatggggagggaaagagtatagaaaaggagagaaagggaaaagtgaaaaaatgagagcaaaagaaaaaatgtaggaggtaaaaggagaagcgaaagaacgaaagggataagagaggagaaaggggagaggaaggaggaatagagaagagagaaagaaagaaggagagagaaaaagttgagaaggggttgacaaagaataggtgaaaagagattacatgaagaaggggggtgagagaacgggcgaggagggagagagagaagaatgggagaggggaagaaaagagagggtgggatggggataagaggcaaggaaaacagaatatgcgatgggagaagaaagtaggaaagggagagaactgagcagcgagcgaacgggggggacgatgacgaaacgtcactggaaaggcgcggaaggaagaacaagaaaaggagaaaagacgacagaagccacgaaagttgaagtgaacagagaaggaggacgctgagaagtaacgaggggggaagtacaaacgtaaatgagggcagagaagaacgaaagggagaaggggaggggagaaagcagtggatgatagcgagcaagagagaatgggagcggaagggaggagacagtgaggaggggatgtagtgaagaatgacaaaggagattagagggtaagacgagtaggatgagaggagaacgatatagaaggttggaagaatctgaggaaggatgaaaaggtgcagggatgatggagaagatgcactaggggatagagaggttaaattcgtaagcgaggaggaatcaggttgaaaaggtaagaagaacgagcaagcgatcggaagtaacaaggaaggcagagggagtagaaaatggataagaaaccgagacgtgagaaggaagaaaaagaaggacagccggaatagtgcagggtgcagaagaagaccattatcggaggagtatggaggaagagagagaattagaagatat

SEQ ID NO: 188703 - DNA, 1445 bp, Arabidopsis thaliana
  unsure (1)..(1445): unsure at all n locations
gaagggagaggaggagaaaggggaaagagtagaactataagcagaaggggagaggagagaagaagagttttttattgtggaggaaaggaggaagaggaaggaggaagaagagaggaagggacgagggggggggagaaagaagaagaagagggatgaaaagtgaaggagggggaaaaagaagaagaagaaaggagaagaagggggggagagaagaggaaagaagggggaataggggaggagaagaagaaagagggaggtggaggagaaggagaagggagaggaaataggagaaagaggggaggggaggaagagaggagagaggagatgaagaagagagagaggaagaaggaaggggagagaaaaggggaggagaggaggaggggaagagaagagggagaagagagagggggtgagaaaggaaagatgagagtaaggatgaagaaaggggaaaggagggagaaggaggacgagaaggaggaagatagaaagggtaagggaaagatgaaagtagaaggagggaaaagggagaaggagagagagaggaagagaagagagagtgaggggagaagacaagaggggggaggagagaaaagggaagaggaaaggaatggaaagagaataaggatagtagaggggaagaaggaggtgagggagtgtacggtaggaggtgggagagatgaaatgaggagaaggagatggatgtgagagatgaggaagaagagagtgaagaaggatgagtgatagaggtagaaagaagggagaggagagagaggaggagtgaggagcaggaataagaagaagaagtgagaggagagtagcgagcgataaagagagaggatgagtgatggagtactagaggaggagagagagatgatgatagtgagatgaatgagagagatgagagagaatgagagagaacaaagtgaaagagagaggatcatgtatgagagtagaagggagagagagcgataagaagagtgagtgagagataggagtagagaagagaggaatgagagngaagatgagaggatagaaggtgaagagtagagtgagggatagagagaaatgtagagatgaggataagaagatagtggtggaaggtgaggaagagagagagagagaaagggagtagatagtaagagtaagacgaacgagttgtatagggacggggtaatgaagaatatagaaaaggagatatagagacagggatgggtgacggtaggagagagagagagagagaggagatagaggaaagagagagggagtgagatgggagaggtggaagagttagaagaagcgagatagagagaggtgaaaggatgtggagaatatggtagaggaggagaggcagatgggagcggaggaagtaggtagagagtagagaaggggggatgggggagacagtggagggaagagtacaggagagatatgaggatatgagggat

SEQ ID NO: 188704 - DNA, 672 bp, Arabidopsis thaliana
attgggttttgggtgaaaaaatttgcggataggaaggttattttttaaggatttgaatttttattttgagggcgagaatttgttttgtttgaatgaatttttatttataaatttgggggtatattatgattatttaggttttgatttttaatttattttgtgagaaattaaaattgatttggtttgatttttaaattaatgattttgatatgtaagttttttgatataataatatgtttttatttgaaattaatgattttttgattggttaaaataatggtttatttagaatgatgaagataattgatatagtttttgatttatatttttaagattaaattaaattgtattagatattggtagtaattagatatatttaggttgataggaagattttagggtagtaagattagtttgtttttttatgtttgttagtgggatgtagggaggtgtatggtattaaagtgagtataatgggagataaagtttgttttaaagaatagaataaggtaaaaggggagaaaagaagtaagttggggaaaatgggaaataatgattggattaaaagaattgtgaaagaataaaggtgggaaaaagggtttttattggaaaatgtttttgaattaattaatgagggttttttgaaaattaatggttaaggtttgggtttaa

SEQ ID NO: 188705 - DNA, 735 bp, Arabidopsis thaliana
gcacgcgtccgtccgctgggatcctctacagcggccgcccttcgtggtcgtttactttttttttcgcgtagaaaaccatgttttcttacaagacattgccgcaccccgaacaaaccaacgctctactatgttagaggaaaacaaacccaccctgagaatgcatccacaacagcaaagaataacctaagtacttgggacatggaagctttgattaaagataataatacttctgagttaaccccaaagatcgacataccctgacttcatcattttttggcggaaacgacgaaatctcgcaaatctttctgtgtggacgttaagggggtgctggagccacgtggtgtacccaggaaccgaggaagcccaccttatacaatactgaacccggctatcttatccgaggaatacttcttccgccggtaataggatggcagttgcgatctcaccaaaagtgcctgcactaatttgttcaacgtttttgaacgtttatgcagaaatcttataacccctcccgcttgtgaggactaagacagactcgtgtgtttacaccgggaattggcggacgcggtaacctggtgggcgttaccaattttctttccttatatttgcgagcctataccaggggcctttgtgcgtctattgggtgggtccaataaccttgcttcttgcttgatggcgaaaaaagttggttttgagcccattttatcgaggtcccccactatcccaacacttaac

SEQ ID NO: 188706 - DNA, 243 bp, Arabidopsis thaliana
aaatcagcacggagccctataaaaagtatcttgaacaagatgtccggaactgactatgattgaaggtcctgaaatggccaacaaatatctccttctccagacaaaccatgcaagacttggtattatctgcacctatatgtctcacatcattcacttatactctcagcaccgaatataaacgttcttaaaagaacctaatagtttgacttgtctttaacccttaagtcataaaggagggaacat

SEQ ID NO: 188707 - DNA, 114 bp, Arabidopsis thaliana
  unsure (1)..(114): unsure at all n locations
caacaagtgacgattttttttaagatgaacataacatacaancgaacgagcaaaagncccaacaacataaaacgggtttacaggagactatttttagnagtccaactgggccca

SEQ ID NO: 188708 - DNA, 163 bp, Arabidopsis thaliana
ctaaataaaacaaaatataattggtcaaactttaaaccgagcttaaggcttctaaaaccaaagagagggagaaaggtttaaaccaaacttacacccattaaaattggttaccccttatttaaaaaaccagattattttccaaaattgaaaagattccccaatt

SEQ ID NO: 188709 - DNA, 244 bp, Arabidopsis thaliana
ggggcaaaagggtcaacttgaagcgtaaaaaacatattttaatatggcattgactttcccaaattaaatcaacttgacccaaaattttttttttttttttttttttttgggaaagggcggttaggtttcccactttttttacatgggggggctttccctgaattactgcctggggccccgattttggaattttttaataggggtggatcccaaactttttttcctattttcttccttggggtgg

SEQ ID NO: 188710 - DNA, 383 bp, Arabidopsis thaliana
ggccgccctttttttttttttttttttaaaagaacacagttttgtttccccgaatatatataaatagtcacaaaccaacagagaaaaatacactggaaacaaaatgatacgagggcctcacaaagtattagaagacgtctggatggtaccgccccgggatggaactgttttgctgagcttgtttcagatgaagcgtcagagcatagttattcacctctaaagttctcaactgttcctggtattgagtgactagctgcctcagatgctgcaattcctgactttggtcttccgattctctttgccgcttctgctgtgtcactaccgctcgtttcagtaaactgttttcctgtacaatagcttctaattgctgcttcagcatcatg

SEQ ID NO: 188711 - DNA, 490 bp, Arabidopsis thaliana
  unsure (1)..(490): unsure at all n locations
agacagctcgcgaggagcggacgcacaggtgcgcgcgcgacgtgaccgacaccgcaccgacnacgaaaagcagccggcaggccggaacgacgaagaggcgcgaaagagggggggggacgaagcgtaaagcaaccagacgccacccccgccccccgccgggaggggaagtggaaattcgaatgaccgtttggcacanaaaccccccncaacgagtaggacgaacggccccgccgaccgaggcccagcagggggagcagcacccggcagagcatgacaatattttcacgaagaggcgcagcacagagaaacaagaaagcgacgggggacccagcaccgaggcactgaccacgcgacgccccaacaacgcccacaggaccgcaagggcagaaacacagaaacacaacagcgccgccacaacgcggaagagacgaagaccacggaaggaacaggacagcgaggccaagacgaaacgcggagaaccacgcccgac

SEQ ID NO: 188712 - DNA, 416 bp, Arabidopsis thaliana
gcggcaccgggaaaacaagggaacccccaccagggccggcccagcccaccaaaacaccaaccttactcacatttttaacaaacataaacgacccagacaagacacacaacccggcacggcgggccaccacaccaccaccaaaccccaacccccccaccccacaaccaacacaaacagacacccaccgccagacaccgcccgccgcacgagaagcaacgccccccaacaccccccggacgaccacacaacgaccaccaccacaaggacaccccacaccacccacgaaccgaaccccacacaccggaccaccgcaaaaccgcccccaagccactcaccccaaacacggtcagcgccagcacaaacacacccagcacggcgcacacacgcgcgatgaccccgaagcgagcacgccacgc

SEQ ID NO: 188713 - DNA, 231 bp, Arabidopsis thaliana
ccacccggccgccaaaaccagggccgaagcgagaggcacagcacgagtttcaaattttccgaaacgccgagagcccagcaacaacagacggggcgcaagcccgaagaaaaggagacagggagcaccgacaccacacggacgcagggccccaccgcaccgacgaggcgacaccaaaaagacaggggcagcacgcgccacacaacagaggacagccaacaccgcgcccagccg

SEQ ID NO: 188714 - DNA, 231 bp, Arabidopsis thaliana
tctcactattaaactgaaggcgaggggggaattttgataagatagggtgacatttttaaatatggagaatatttgataataagagaagtttattattgtagagtttgtttgttataaagtttatattttggtattagtgactcaataagaaaagatatattaatgtatgttaaccattatcattgaagaagatgggtggaatgtgataattatattattctatgaaggtaa

SEQ ID NO: 188715 - DNA, 157 bp, Arabidopsis thaliana
gacgcaccccacgaacgcgcgcgggcccaaggaccccgaccagtgccaacgagagccccagcgcgcgaacaccacggccagaccgccgaccacacaaacccccccccacccaccccccccgcgcgcggcgccatggacatgcaaagccacccacaaa

SEQ ID NO: 188716 - DNA, 601 bp, Arabidopsis thaliana
aaaaggaagagaaaaaagaagaggaacgcgaacaaagcaaagccaatccagggagaaagtgaattgaaaccttggaaaaacccaggaaaaagaccaaaacacacagaagagaaaagaaaggcacggagcgaaaagaacaaaagagaaacaaaaaaaaacgagaacagacacaagagcagacgaagggaggggagaaaaacaggaaagaaaaagagagagaaaggagggaaagacacaagagagaagggaaaggagaaaagacagcggcggacacaggaacggacagacaacaaagaagcggagcgcgacgcaaaagaccagcggcgaagacgcccgagcaaccaagagaaaaaaacaggaagacaccaacaggccagcccaaagcgcggaagcgcgagcagaacgagaaccaacacggaaggaggaaagaagagaggaaaggcaaagaaaaaaaggagaacgacacaagcgaacgaccaggagaaaagaagcaaaagcacaagggacaaaccgagacgacgaaagagcaggaagcacggcaagcgaggcacagaggcacaaaagcagaaaaacagccgccagaggaagcaaccggaacgag

SEQ ID NO: 188717 - DNA, 1227 bp, Arabidopsis thaliana
cccaggagaaatgcagcacaagcgcacgcgcccgcacgcgccgcacggcggccggaccgagaaaagagcaactttggcaagacccaacagcgacggcgcagaggcgcgagggcgagggaagaagcggagaccgggacagcagagggcggacagacccgcgaacgcagcgagggaacaagaggacggcggccgaagacgacccgccggaaggggcgggcaacgagggctgcacgcggagcagcggagcggcggaggacgccagaacgacgaacgcggccgcgcgccacacgcgagggtacacggacacgaagacgaagacgagacgacgcggcgaagccgacggggagcggcacaggggaccgcagcaggaggcgcagggcggggagacgagcagcagacaggcggcggcgggccgagggaacagccgtcaagcgccagacaagagagtacaatgacgggggcgaggacaagaggcacacagtccgagcggagagcgaggaaacgagacagcgtgacacgcgcgaccgacgagggacatcacggagacgacgccagcaacgcaacgaagagagcccacgccgcgatgaaagagactgactcagcaccgggcacgccacgagacacgcagcgacgcagaaggacgcacagagggaggaccggacacgaggcggatagagcggacctcgacgcaggaacccggccacagcgagagcgggagaagcgacgatgccacccgagggagaacgggaccggactacagccacagcgaagcaccggggacaaaggaggagaaacgcgcctcccggagacaaagcacagcggcgcaatcacggcgccaggcactcgcggaaggaagcggaggcgagcagggaggggagccgcgaggaaagcagaacgcacgctgagggcgaacgcgaagacacaacaacagagaggaagaggaggaagcgacgagaaaggagcccagagcgaagcgagacacgggaacacgctcagacgcaccctgagcaacagccacagaattcggaagggcgggacccaaagagagacacgagcgggacgacgagacggacacaacagcaggcgcgcgagaccgaaacggacagcagacaggagggacccacgcgggagacggcagggcacaaccgacagatgcacgcaaacaaccagaaccaagacgagcacacacgacgcgacagcgcaaaagggcagaggggagaagaggcg

SEQ ID NO: 188718 - DNA, 1094 bp, Arabidopsis thaliana
cgcgaccgcgaagcccggaaccctcttatagcggtcgaaccgtcaaccaataagacgctttttcttttttccacatacccctcggaccactcgggcggagggccctcacgcgaaatacccaaccatctcccaaaacggggaactccgagaacagaaagagccaaagcctcaattggacggatcaaatccggcccaaccgcgaggtctgcaggcctggagcccccgaggaaggacccagggacacgtccgagagacagcacgccccagtttcaccacctctcctgggcagactcagactcaccaaaagacaagaattggaacggagagaagttggtcgtgcgcaccaatagttcgtatgcatgacacagatgaactgctaaaaaacctgcgacctcagagcacgccaccgaagggactccaagaggagcgcgactacaagcggctgtccacaaccgacagtgacggcaacaggcggagagcagcccactaatccagcggagagacagacaaatccacccgcaggaatcactgcgggtaggaaacagcgatatgcaagatggaccaccagacagggcactcgcttaacccctgaagccattgaggattcccctgcggcctaagcaagccgaagaccctggactaacacgggggacgactacgcgagcgacggtcaagagcctagggcgggaaccagatgcacaccgccccgcctccccgcaatgctgtcagcgtgctgtgatccagtgaccagccagagaccccgtaatccgttggtgacaacaacccgcctccttccgcgggcgccaacacaagggtgagaacgaggccagcgcataccatggtgggcagagacgatgcccacgaggcgagtcatacacgctgagtgttgaaactacacaagactgtgcgaacacaccgtagcgagactaggacagaagaatcgggcacagccacgcgcgaacgacgaccgcaccgctgagtctgtgaagagccctggacggcctctgttcaccaaagggcggagacgcgacgctgtgcggaactcaccccgtagcgggcgcggaaacagaccagctgactgggaaaaactgcct

SEQ ID NO: 188719 - DNA, 329 bp, Arabidopsis thaliana
  unsure (1)..(329): unsure at all n locations
acacccttcgatgtcagctacacaagctggatacctagagcggccgacctaacttaataacccgctaattttaccaatattgcaacccaaaataacgggatcccatctgggggcgatggcatacaaaggggagtcggacgccccgcgtcctataaaacatacattcacccaagacacgaacatgggtcaattagtcccttgcaagagagacctacactaatatgcaatcaccctctgaattcgagtaaccccgcctaagcgagtcctcagaaccaaattggtagattgatancagactcactaatgactttacgatatgcacgtcgatg

SEQ ID NO: 188720 - DNA, 1079 bp, Arabidopsis thaliana
  unsure (1)..(1079): unsure at all n locations
gggcaaatcgcgccttttnggagttttacgccacagcaatgcacctctttgtatctgcgacgggctcatatcctcagagtacctcttgtaattttgcacgacaacactttttgaagttttttacgagacagtggcccgcggcactgtgactcccggcggcttaggccacgagcgtcgcgatacccctcgggctggatagaataagcctatatttcgcacggtgttgtctgagctggcgcccgattccccccggtaatctgacattctcaggactcattgggtaatacctaggaaagaatgcctaatgttggctcttgcccaagggaatcgtgcagcttaggctgtcaaactattccggggcgatcggcgtgtggtactattcgatcataagcagtagcacgtccggattaacgcagtcgtagccgctccactgcggaacacacgtcaacctgtcacaaacgcggtctagctcggtgtcatgcttctatgcggccccagtcatagatgtcgacgagatacgttgagtgcgatagcgcggctcgggccgcaccgtgatgcagaacgtagcgtcacataccgcgagagactcgggactctctgtacccgatgatctgtatatatatacagccatctgtccgcaatatccttgaatgtgttgctccacgtgcagcgtgtatctatccaggagttgttcgcgcggtgccgtccggcggctcgcagctcgcaatcgcgtcaggcgatgctgcaaactgtgtagattgtttcctgggaacctagcagaacgtgagcagttgttggtgtgacttcggttatcatgaggactgcgaccagatcgcgaaggaggagtcgacttgatttccacccgctagcgaaatacagacggcaggatgtcggactccattgggggggccgttccgatggattaaagccagctattccgtgggatgaaagacaactcccccctagatgatactcagaacggttagggaacgctttgatgtcctcctcttactgtcttacgccctgaggcgcgcaagagtaaggatctttcggacaaaaccccttttacgagcactggg

SEQ ID NO: 188721 - DNA, 361 bp, Arabidopsis thaliana
tcacgcgagaaagacaacgtaaaagggcacaaaatttttacaatagcaggggcaaggagggggaaaccagaaattacaaaagagaaagaagaacaatacgtgggaaacgaaaaaaggtataattaaaattatgaagaaggtaagagggaagaacaataaggactgtaaaaaaagaaaaataaaggggctcaaagcaaagaagtagacaaaggagacaatcgaggatagagcaggaacgcatgaaaacgagtaggaggaaaaggcgaacggaaggaagaaaaaggtaaaaggaaaggaaagaggagaaaaaaacgaacatttaagaaacgggaagagaaaacgaaaaggggaaaacaaaagg

SEQ ID NO: 188722 - DNA, 245 bp, Arabidopsis thaliana
ctcactgtaatgttatgtttattttcgatgggtaattagtagtgtttttgttttatatgtattagttaatagttattgtatgtttgttgtttttataatttttatagtaaagtattttggttgtttgttttgttgtaatagttttatttctaggtctgtatttgtagaggtatatcatatgtttgatggtaaagttttgatagaggtttagttgttattgggatagattttaaatttggtagata

SEQ ID NO: 188723 - DNA, 943 bp, Arabidopsis thaliana
tgacttccatgcccgcgtccggaatcctgtatactgtacaccgccgccccaattaaaagttttactttttttaaaaccctcacggccaagaaaattggatctagtgggggagccgaccaaggaaatgcactaccttactgagctgtcaaaggaatttaccaagctcaatctgtataaacgcccatttctttaccctagaacgaaaaccaaattccactgcccccattaacacacacaaaaaccaacaccggcttccttcaaaatgcttatcgcaatctccacttatacgatacctaaaccatcactccgcaattcatttatgttccttgcgggaaccaaactttccgttcctagggttatctttaaagctatagcgccactttcttttcatccgggattgtttagacaaaaacagaacccacccaatggtgcccccactcgggtagaaaaaacccatgggacggaaacctggaaggcgattgtgattcttttccacaaaatacaattccggggggaaatgaaaccaagagcccattggggggtgacaaaataacctgggcccctctaagagaagttcccaaggtaaataggcaaaaggtctctgagttaaggggccccaggccgccactccccccttctggaaatcacaccctcttcgcacaccttttgagtttcactgggcacctcccctccttggttggggtaccccctggcacggtaattatacccaggcccccactaataatgttctccccaaacactatccacatgctgggggaaagaaaaatgccccgcccttaaatccaatacgctgaaaaaaaaccctgggggggtttttgcacccacaacagccctatatttggaggggcaaccccccctcgctctttgttcctataaccagcaaaaaggtccccgctcaaggttttaaaccagcccttaaccc

SEQ ID NO: 188724 - DNA, 221 bp, Arabidopsis thaliana
atctctgctcatatctgccccactaagcccccttgtttctacgccaagttgtggggcgaaccttgcgagtcacactacatttcaaacaacgcctacaaaccccgctaagctgtcctacaaccctttattttgcgcactgtactctattgcttttccgacaaacaagtgccccgaaaagcatggcattccatcgaaaggggacccgagagaataagacttgc

SEQ ID NO: 188725 - DNA, 1015 bp, Arabidopsis thaliana
  unsure (1)..(1015): unsure at all n locations
caaccaataggccccccccaaacatcgaaactggggtgggccagaccccccgcccaaggacaaaagatacttatacttttcccgatctccacaatggacatattcaaaacccaatctgtatcaacatcaattttattttcttaaaaaaacaaccaaaaaaaactgcccacatgcccacaaataaaaaccaacacccgcttaatttaaaaatatgctatattgccaatgttgccacctatacaacattttttccgaataaccaatccaccttcctccaaattaaaattcatattttcctgtgccaccgaaacaaaaaaacttacccctttccccaatggaccttccccccttaccatcttgggagaccccccccttccccctttttaaactcctttgttattgggtttctgggcacccacaaaccccataaaacccctttacacccattttgtgtttatcgcacccccacctcccccctttagagaactcctatttacaattgttggttccgtcttccaacatataatntcgtgcccaatttttcgatattctctttccctcccaaataaaccagcccccgggttgaaaaccttaacttcttgggaaacctcggaggtgtttcaaaattaacctgcttccctgggggaaaagttacaccaaaggaaacctcacaaatattaccacccaaatgtccaaaggtctcccctcaacttgtggaactgcgccccccttgaaccccttaataatataaccggttcccccactcttaatagggaatacccctgaaaagggggtaaaccccagcccccacaaataatgcttcccaaatatttttcaaaaactacgggaaaaaatttgcccaaacttacattcctatgggggcacaaaaaagcttttatggctccttggcccaaaattagcccttccctttgaggggcacacccccccttgggttgtaaccctaaaaaaaaaaaaaatttctcccgtccagggtttttacccagatcttaaaccc

SEQ ID NO: 188726 - DNA, 178 bp, Arabidopsis thaliana
  unsure (1)..(178): unsure at all n locations
tcgttgctaggtcctctagagcgttccccgggggggaancctgtgataactacttttatttcctctcgtgcaagaaaattgtttctaacttggcggtttgttcaaggaaatgtactacctttctgagctgtcaaaggaatttacgaagctgattctgtataaacgccaatttcacaaa

SEQ ID NO: 188727 - DNA, 896 bp, Arabidopsis thaliana
atgcacgcgtccgtaaccttggatcctatagagcggccgccccacgcacatcaataccgttttacttctttaataaccccccgcccaagaaaattggacctaaatggcggtccgtccaaggaaatgtaccaccattctgagccgtcaaaggaatgtaccaagccgaacctgtataaacgccaatttcattaacaaaaaaagaaaacccaaaaaaactgtccacatgaacacacggtagaaccaacaacagcttcttcaaaatgctcaccgcaagctccacctacacgttttgtaaaccatcactccgcaatacatctttggtccttgcaggaaccaaacatcccggtcctaagccctcccccagagctcgggcccctctttgtctcctcctggatgcctcagcagaatcagaacctggcaacggggcccccctggtagaaaaatcatggtctccactggaggcatttgatcctccacaaagcacccggtgaaagaacaaggcaccggggtcaaacacccgcccgggaagtccaggacagacagcacccacaagggccaaggccctccacttgggatccaccctctctgaccccactggcataccggagacccccctccagtaggggaaaaccctggtaggggaaaataaccccaagtccccccataaataatggttccacccaataattcatctaaacaacctcggcgggaaagcaaatttctgccctgcgcccgacaacttccacagggggccgcacaacaaaaagccttggagaaagtcgtacctttcggacccaaacaaatccaaggccctctcactatgtggggagggccaaacccccacctttctgggcacggtgcgtaccccctctataacacaccccaatttaacactg

SEQ ID NO: 188728 - DNA, 517 bp, Arabidopsis thaliana
  unsure (1)..(517): unsure at all n locations
cgcgtacgtaagcttggatcctctagagcggttgcccttttttttttttttcttgctaactacttttatatcctctcgtccaagaaaattgtttctaattggtggtttgtccaaagaaatgtactacctttctgagctgtcaaaggaatttacgaagctgattctgtataaacgccaatttcattaacaattcctcatctcaaagataactggccacatgaacacaagttagaaccaacatcagctttttaaaaatgcttatttgaatcttcaattatacgttatttaaaccatcaccttgcatttattttttgttccttgaaggaaccaatctttcccgtcctagtctctcctttagaagctcttgccccttttttctcttcttcctggatgcttaaaacaaatccagaaccttggcaatgcggggcacccctggcaagaattatttattgtccttaactgggnaggcttttgatccttccccaaagctttccggggaaagttttatggtattgta

SEQ ID NO: 188729 - DNA, 630 bp, Arabidopsis thaliana
ccccaagaaggctccgtatgcgccccctcccatttacctcttacgcctcccctggagaatggcgctcccagacccatgaaaatcaaaaaacccctctgggctactgggaggttcatccacactcgaggtagtcaaataatattcaactggggcgcttcacccacctgagagagcgccaaatttatagcaccgtcttcatccccacacaaaagaacgacctcctccggggtggagaaagtactttacatgggtcaaacgggggggctgtcataccaacccgcgacccctggtgcgaagagttcgacgggatcaaaacatgggtacctctaaggggcacctgattcaacagcactcttgggatcctccagcttcttggtcacctaattatcttctattagactcgtgccctttgctgagaggaatccctgcgtccggcgattaaacctccttacccccatcaatccgtgttgtcccctatttcatatagcaaccggtggggtgaacggaactttgtgcctcgcccgggaacacctctcatgtcgtcgtcaaagaacacactgtcgtaggggtgcttcctcgccgcaacatctctgacaactaactgctgaaaggggcaggagcccccctctc

SEQ ID NO: 188730 - DNA, 712 bp, Arabidopsis thaliana
attcgattagttgtagcgtccaagctgaccgtcagggcgcccagcccagttttttttattcgaaggaaggggacacaagctaaatctgcttacattcgagagattgcttgaaacaatatcaagagctgggtcgttccatgtgaagaccaaattgtagcaccgaggctcataaaccccacagacaaaacatgcgatccattggacgtcgatcaaagactgacgtctcttacacatattccagttgaatgggtttccgccgctcggaagccctgttgctcgtttctctaggagtgaaagaccaaacaccgggaagaggagagacctggtgaacttagacaggaagggtatccatcttccacagggagcgatcctcccgtggtgatagtttgggagggggagagagcccactaacggggggcaaagccctggaagaaaggctacggtttgggggagaacgcctggaaaagtggtggtgagaacaaacctgatgcgccttggggccttttggccttttcctgcttctaccctaaaaaaccgaccccctgggtgttgaccccgggaaaattcacggccccggtatccccttgcaaggctgttacccacgcatttttcggcttatacgcggcaagtcctttatttttatagaccctttgggtcgttttaattgcagtggggctcccatatactcggatctgtacccccgtggactgta

SEQ ID NO: 188731 - DNA, 163 bp, Arabidopsis thaliana
cgcgtacgtaagcttggatcctctagagcggtctgccttcttttttttttcttggataactactttaatatccgctcgggcaagaaaattggtttctaaatagggtgggtttgtccaagggaattggcctaacctttcttgaggtgggcaaagggaattttcg

SEQ ID NO: 188732 - DNA, 129 bp, Arabidopsis thaliana
ataacatatgcggctattttgaactctcagtatatggtgttttattcagcgccgtttctctcctttttatgggaaagattctggaacctgtttggggattcacggagtttcttacggttatcgttgggg

SEQ ID NO: 188733 - DNA, 499 bp, Arabidopsis thaliana
  unsure (1)..(499): unsure at all n locations
cgcgtacgtagcttggacctctagagaggttgccttggtttttaatttctagaaacaatatttattgaaatgacaacaagccaacaagtgataatgcagaggaaaaaagaacaatttaaagcggatgatacatatagattacataattggaaatgtaaggaaaggatcgctaaattaggggagacggttttnagaaaaggaaggngaaggaggagggacccccgggaagagatgagccggagggattccagggataagagggaccggatggatgccagggagttcaaagacccgagggagcggtaccaggaaagaaggtggggggtaggcgtactgaaggcagattcaccatagggacagtgggaagaaccagaagaggtggaacaagtcggacaggttgaaacccggggaaaaataagagccgagggacgaagaataaaccgaactgaagggaaagatggaagaataagaataagagaatgcgaacccatataatata

SEQ ID NO: 188734 - DNA, 212 bp, Arabidopsis thaliana
cgcgtcgtagctaggacctctagagcgttgcctggtgtttattcttagttactacttatatcctctcgccgagaaatggacttaaagggaggctcgtcaaagaaatagcctacctctctgctctgccaaggatctacgaaactgattctgtataaacagcaaggtcattaacaaccccttcctcagggggaaacggaccacaagaacacaag

SEQ ID NO: 188735 - DNA, 492 bp, Arabidopsis thaliana
  unsure (1)..(492): unsure at all n locations
cgtaagcttggatcctctagagcagctcgcctttgtgttttttccttgttaacaactttcatagcctggagcgcgagaaaattggttctacttggcggcaagtccaaggaagagactacctctcagagcagacaaggaatttacgaactcgcacatgttaaacgccaatgtcaataacattccctccttagaagagaaagccgaccccgagaacacaacggagaaccagaaacccgcttcttaaaaggggtnataggaatctgcacttcatacagtaggaaatccatgaatactgcctttaatctaatggggcttgcgggaaacaaaggtttccccaactttagaaactcctacaagaggtgcgttgcccctgttagaattcaccacctggatggccttagctcaaacaagcacaaaagcgaatggcgccccctcttgtccaaaaaaaaatgatactccccctagtagcattttgacccctcacccgccccc

SEQ ID NO: 188736 - DNA, 820 bp, Arabidopsis thaliana
acgcgtacgtaagcttggatcctgtagagcggacgccctccgccctctttaatagttttacttttttaatatcctctcgaacaagaaaattgtttctttttgggggtttgaccaaggaaaggccccccctttctgaaatgtcaaaggaattcacgatgttgatgcagaataaaccccaagggcctccacaaaaaaatttttcacaaaaaaactgaccacttgaacacaaataagaaccatcaacagcttcttcaaaatgcttattgcattctccacttatacgttatctaaaccatcactctgcaattcatctttgttccttgcaggaaccaatctttccggtcctagactctcctctagagctcttgcccctctttctctcctcctggatgcttcagcagaatcagaacctggcaatggtgcaccactggtagaattatcatggtcttcactggtggcatttgatctttcacaaagcatccggtgaaagattaaggcactggggtcaattcctggcctgagaagttcaggaacgaaaagtatagaaggccacactcatcacttggatcgccctctgaccctttgtatccgggcctcctttgtaaggtaccctgaggtataaaccagccccatatatgtccccaaaatttcaatagtggggaaagaatatgctggctggaatctttagtggggaaagaaaaccttggaagggccactttgaccacataatttaagccctcatttttgaggggcgcaaaacccacctttgcggctttttgatatccttttacacaacgcaaatatattctctcctgggttc

SEQ ID NO: 188737 - DNA, 206 bp, Arabidopsis thaliana
cgcgtacgtaagctaggatcctctagagcagtctgcctttgtgtttaattccagtttaatacggagttataattctcgatgctggtcccatcagacaactagggttttttctccccaaatgtctcattgtatcccaccccgaaacccaccttctgtttaatagaagccgtggccccaaaaattcctgtagaagaaccaaaagaatc

SEQ ID NO: 188738 - DNA, 413 bp, Arabidopsis thaliana
  unsure (1)..(413): unsure at all n locations
acgcgtacgtaagcttggatcctctagagcggttcgcctttttttttttttttatttcaaacatatcatattgagcaccggacacaaaacatgctaccaaacttccagagatcatatagtgtctctgaaacacgaccctggcttattgcatgacacacacatagtaacactctctcattatcaccgatacagttctgtttntatgcagagccaactccactatggaagagatcaccataccgagcacagttcttgagctctctcaccagacattaccagatccatattacgctgaaggatccactggcgtggacgcataccacacactgatactatgagtcatttgctgttcatataacttaggccagtatttccacttcaactgttcagactccaacataaatgatccacca

SEQ ID NO: 188739 - DNA, 436 bp, Arabidopsis thaliana
caacacggggcgggcaccgcgcggacaaatagcaaccgagagcgggtagcaccacgcaccacccataacgaccagacacccccgccccaaaggagcgccgtgcccacaagacacacccactccgcgaaagagcacaacggcccgaaaggcccagggcctccaaccaccccaaagcgcgcccggcccaaatgggcacgcacacacacacaagcagccccatccctccgatagacggaacggacaacgccaccacccccaaggcaaccaacagtcggggcagcagaggggccccgcaaaacccaagaccaaaaaggggacgccgcacccgccgacagtgcagaaaacaccccaagacaacacctgagaggccatccccacggcacccacaggaggcgcggagacccccggaaaaaaaacaacaacatcccaagagcgg

SEQ ID NO: 188740 - DNA, 499 bp, Arabidopsis thaliana
  unsure (1)..(499): unsure at all n locations
cgcgcacgtaagctaggatcctctagagcggctcgcctgggggtaaaatcccgttacaaagaaaggatccgccacaaagtgggggatttagagcgccctccggagaccaccacacaaagaatgggggggcacacaactctctaggccaatgccctgaaacatcgacccgccagcaatagccgctataggaattggaaagactcccctccacatagaagagagggagaaaagggagaaggggagagaagannaagaaaccactagcccccggagcggggagggggcgccaggcgccccaagcnagacacccgcgcaccccagccaaaagccccaagccacggagggcggcgggccacccgaggcacggccgcgggaccaaaggggcgggggcaaagcgcgcccggcaccacggcgcgcacccccaaaaaaggaacaagagggccgcccgccaacagagccgaccaagagcaagcagcgccccgccaaaacccgcgagccg

SEQ ID NO: 188741 - DNA, 318 bp, Arabidopsis thaliana
ggagtatctcttcaacagatacaaaacgcccaagggctattacaagttatttaaccccaaaaagaaaaagacacaaaacattaacaaaaaaaaaaaacaaaaaagaacaaactaaacacaaaaaaaaacaaaacacaaatccataatagtaaacaacaattcaatggaataggtaaatatcataaatccagaaacctaataaaaaaggttaaaatgccgaaaaaaagaaaaacaaaataaattaacaacataaaaaaaaaaacaatcataaaaacatataaaaagataaaatagacattaaatcaaaacaccaaaaca

SEQ ID NO: 188742 - DNA, 219 bp, Arabidopsis thaliana
tttgatgtaggattcccgcatacgtgagcttgtatcatctacagcggccgacctaagaatacttttttttttttttaaagggatttaattaaacataaagggggggagacactcagacataaaacacttcttaactccatgctgggacctcaaattaacatatgtctctcttaacatcctttgacctcattggctttgccaacctcgccgggcctttga

SEQ ID NO: 188743 - DNA, 441 bp, Arabidopsis thaliana
cgcgtgcgttagcttggatcctctagagcggttgccctttttttttttttcttcttatggctttgagaccatggaatgtagagcccatggaattaagacatacaattaatacccaacacggttattagaggaaacagttgagaccaggactgagagcagagagttttgggttgaaagcgaacattcattcatttctctccttttagggggtagaggcattgagaggaaagagagttcgatgatggagagagagagatagagagggctttcgcgattttaattggttggcggctgggagaaggagatcctagaaaatgggtccgcactagagaaggctgggtggtagtgatacccatgcttggcgaagttctttcgttggtttcaaaatggggccagagattggttttttttccggtaatataaaaaacgttttgtgtttcc

SEQ ID NO: 188744 - DNA, 610 bp, Arabidopsis thaliana
ttcgattatgatttgcatgccgcgtacgtaagcttggaacctatacacggacgacctaaaaaattttttttttttgcataacaccacaaaatgttaatcgcatgagatcccgacatacacttagaaccaccccgtctaactgaaccaacagagagtactaacaatcaactcagagttttaactaatagctcctacattaattaatccctcccatacccctatgtttttacaggaattcagagatacagccagagatacagctccagaaaggtcttctcgggaatctaaatactcagtctctgggacacggataatctaatactcgatccgcctatcaaaatcacgtgccttgcatcccaaagcttacgtaggttccttcccagtctcaaactgtaccatagattgctcttcccactcaactcaaacaacttttgtgttccactacctgcacccttgttcctgggaccagggaccaacaccttcccctccccaagaaacgtctctttgggggtaaacaatacctcatcccattggagctccacaccttttcgctttggcgcgaagagcacatctacttcacagcgagacataaaacaacctttctgactaa

SEQ ID NO: 188745 - DNA, 643 bp, Arabidopsis thaliana
ttttttaaagcgcaccaaccgagcaaaaactcgtttgtgtgcagaggagaaccacatacaaaggacatcatacatagaatacatcttggccgaaagtaaaagctatccggcaaacataaacacactcccacatgtgactgttaattaaacctataccgacgattccggtgggagacacaggaacaatctgatgaccctgcaagcagctaaacaacactcagccctatcgctggcgcgatatcgaaaggtatctagagtaagcacaaacccagacccaagctacaatacacacggccactacctccaacttacagagatactgactccttccatccacatgagatcataaaacactacccacagcatgtgcctttgtgtcataacataatctccgaaaaatggatcacctaaagtaatcaacaaaacctggtcatgcacacaaatactccacccggatcctccgacccatgtcgaccaatggctcgagtactcaaaaatacccctaacacccattcacacaatcggaattcgctctgattgacactcttcaaacaatctcgacaccgtctatgatcaatgcagcctacgacacccaacaagccgttatccaaacccctgttggtacgcgccttcgtagttcccc

SEQ ID NO: 188746 - DNA, 514 bp, Arabidopsis thaliana
caattatgatttcggatgccgtcatccggaaccctttaaaccgcacaaccgtcgcacccaccaacaatttttatattttcacaaaaaatcgacatcaactattgtgtatttggagacgaccccctaataagaaactcacgtataccccactctaatcaagtcgaaatgaaaataccaatcacatatgaaaataaataattttgaatcaatatgaccatctaaaacatacacgttacatcacaattcggcaaatcccgatacgtttaataagacagagacacaccttgttccctaaaaactacttggaactcaggttacaacctcatttaattacacttggcgggcccacgtcaactatattaccatcccctacatcagactggtacttcctagatcattacatcctgctgtgtcaagtaaaccctgatcagagtctagattaatacccaaatatcttatagagcggtctgccatggtcggatcgcacttcagcctcaaatagcaaacttatcat

SEQ ID NO: 188747 - DNA, 606 bp, Arabidopsis thaliana
aagatgaggcgccctcgagcgaccttaggcgcctgctttttcttacaccaaaccagcgacgaccgtccggggaaaaacaggtgctcaaaagacagttccaacggccttacaaagggatccttcccttcaaaaaatgcctgcaagaaaggcgccggtggcaactcgagccttccaggtccgcccttgttggtgtggcctaaaaccatgcaaaccgcgaaatcccctggccccccacatgtctccctcaaaaaaagttccgtgaatggtcctaccaagggtgccttccccctggctctccagggggccatgtattcactcgcgccctagaaacatacccgggatcttgtggatctcacacctaaacacctgaactccgtgtgtaaaaacaatactaaattcgggcccttgtcagttaagaaaaggacccccatccgcccctgggggagggtggtgtaacccagagcacacggcttgtgttagttatttcccaccccccccccacctcttggtgctcattgcccccccccctgttttttatcctccccggggcatatgtgtatggtaaaataactggggaccacaacttatgtttggggaaggtataat

SEQ ID NO: 188748 - DNA, 521 bp, Arabidopsis thaliana
  unsure (1)..(521): unsure at all n locations
acccacgcgtacgataacaagcggctatgcgctacactgaggggatgaaacccgtcttcaccaccgttactctcctttgtatgggaaagttcctggaacctgtctggggttccacggagttccttaagttcatcctttgcggagaactaacttacgtatctctgtgtttaccgaacagccattgccggaccccgctccttagggggggagnnnacccaaagaagcccggagccggctcttatggagcctaggcaggccgctcgggagggttaaagtagataatacctcgaccaggagatattgctgttaaaaataaaaagcaaagcaggctccccctcaatgccggctatgtgtggccactatgccgcaaggctactcccacacctagattcaactagcaatatgttcccccccttagataatgcgggggcacaattatcggccctcggttgattccctttaagaacccgacacgaaggaagacccagtaaacaaaagccttcaaaggggagaaccaagaa

SEQ ID NO: 188749 - DNA, 526 bp, Arabidopsis thaliana
acaatatccaatttatattatcgcatgcgttagccgggatcctgtatagcgtccagcctccacacctttttttagtttttcattttttaaacacactcgaccaaaaaaattggacctggttggtggttaaaccaatataatgtagctcctttctgaactaatctaggtttcttccaatttccctctgcataaaggtccaatttttttttcccaaaaaaaaatctaaccccaaactgcccccttgaacacattttaaaacccgcaacagtttcttaaaaatgcttattgcaatgtccacttatgcgccaccccacccatggcttggcggccatcaattccttttgggggaaccaatttttccgtttctaggtctttcatctaaagcactttgccccactatttttatacttaccgctatgcgttttaaacagaaactcacaaaccaccgcataacttgggtttccaccccgcaatggttcccaaacggagggttgggtctcccctcttataacccttttgttttttg

SEQ ID NO: 188750 - DNA, 468 bp, Arabidopsis thaliana
  unsure (1)..(468): unsure at all n locations
acgcgtacgtaagctagagacctctagagcggtcgccctttttgttaaccttntgaaactacttttataacctctcgaccaagaaaatagtttctaacaggaggcttgcccaaggaaatgaactaccgggctgagccggcaaagagaatcacgaagctgactctgactaaaccccaatggcatgaacacccctccttaacagggagaaaccggccccacgaacacaagnaagaaccaacacccgcgccttcaaagcgcggatagcaatcctcactcatacgaaatcgaaaccatcactctgcaaagaatccttagacccttgccaagaccaacccttgccgttcctaaactactcctataaaagccaccggccccccttcgcctacccgctagcagcccccccgcacaaacagagaacccggacagcgagcccccccccggctcaaacaaaagcagggcccccccccg

SEQ ID NO: 188751 - DNA, 435 bp, Arabidopsis thaliana
  unsure (1)..(435): unsure at all n locations
ccgaagcgggaccccagagcggcgccagggnggaaaccccaaaacaaaggagcaaaggaccagggaagacaagcacccaaggcgagacgaaagcgacccacaaggacgaaagcaccgagaaagacagccgcggaaacgaaagaccggagancaaaacccgtccccccaggaagagaggccgacggaaaccnacacaagacaaaccgaacgaacagggagccggagacgaccaacagagacgcaccaaacacagcgaccagcaggggggggccaccaagcacccaccggaagaaacgcgagccggacccccggacaagagaacacgagcagacgaaagcggccgcaacgaaaagcaggagccgaggccaaacacccggaaacacaaaggcccgggaaaggaggccaccagacgcaaagcaaggggacaaaagaaag

SEQ ID NO: 188752 - DNA, 818 bp, Arabidopsis thaliana
  unsure (1)..(818): unsure at all n locations
cactcatctatagcgagctgttacaattagaagctcgnatgaaacagcatctattgccgctgagacatacctgatagtgaatatcgtgctgtcttgcaataaccactcgtgtgtaagacacaacaacaatgcagtttttgtgccgtcgaacattatataccgaaagcatctcgaacaaatcgcgaatactttgtagggccaatattatataattgtttttaggaccgcatatatttactttttacgcaggaacagagatacccgatacaagggttatctcttcttccgggggaccccccccattcatcatttatgggttgagccaatcataacctgggaagtttgcgcccttgcttagaaaaaccatggtatttcatggccgccaaccttggtttagaaaaaaggcggtgagatggtatggaaagcaaattgcccccacctgtcgggggtggagtccacacaaattttaatttgcttcgaggccaagggtccaccctcttttggggtgtcgcccgtttttacacattaataaataccccccttgcggaaatttgggggggggcacacccttggtngggtggtgtgggattatcgccccccattaaatttattcccccccttttttgcaaatacacgtgggtgttccacacaaaaaaaaggggggagattctttttggccccccaaaaaaaaattgttttgggttttctccgccaaccaaaaaggatttcgaaaaaaggggtccaaccccttcctggggggggctccggggaaaaaaccctggtgatttcggggccccggttttttccagggctatacc

SEQ ID NO: 188753 - DNA, 479 bp, Arabidopsis thaliana
  unsure (1)..(479): unsure at all n locations
gcgccgtagctaggacctcagagcgttctgcctggttttatcccttgtaaaagaaggaccgggcaccgggggagaacaggcgaacaaaatgcaggaggactagcaactccatacacgacaccttcctatggcagcacccacaaggatacagaccctcaggatgaccggaccacccttttcttgaggggggggaaanacaaggaaggaggagaggaccacaccgaaccccagagaggaggggggcagcaaaccacccaaaagcccggccgaccaccaaagggaggcggggcgcgggacacaaaccaaccggaggaaccaaaggggcggccggcccaggacagaaacgaaagggaggcgggggccaccaccacggccagggaagggaaacggcaaaagcaccagccacaaaaaggaacccggacccccagaaaacgccgggggggcaacgcacagcgaagccccaaaacacagaaaagggc

SEQ ID NO: 188754 - DNA, 230 bp, Arabidopsis thaliana
cccagggccaaacccatttgttcccccaaaaaaagcccccccaaaagggccccttggaaaaccttaaaccattgaacccagggtcctttttcagatacccaccatgaaaaaatttttcccccaaatttttaatttcccccccccttttagcccaaaaaccttttagccccataacgcctaaaatttaaaaaaaccccgccccaaggggaccccccacccccttgatttgc

SEQ ID NO: 188755 - DNA, 397 bp, Arabidopsis thaliana
aggaaacgatgatttttctattaataacaataaaacacatcggagaaaaattgtgaaattgtaaatacagagcaaaataagaagtttctctcttttaggaagtagcaacgcagaaagattcccaatttagcaatcccctgttttcccgatcgccttgaacacatcttcttgatacttgaacattctcaatgcccatcacttcatcttcatcttcatcttcttcctcttcctcctcctcctcgtattcttcggtttcttcaggctcaatagtctcttcttcgttctctacaaactcattggagtctttcaagatagagagacggagacgaccattgctacggtcagcttgaaagcatccgttacgaggaggcgcgtttgtggcggtcatgaccaatct

SEQ ID NO: 188756 - DNA, 428 bp, Arabidopsis thaliana
aacacagaacatgagctttactcattttattttattttgaactgatgagctttgctcatttttacaccatttgattaactcaaatatgaagaaaggctaacgtcataggaaacttaatcctcggattccaactctttcttcaccttctaaaatgatgcaaataatcttaaaccaaaaaagtaaaaaacaaatttacaaaaactaacaagattattgatcaagcagagagagacgggaaacaactcccagatcggagaagcgaccgtcgtgactctacgccgtcgatccccggtaaagctccacttgagcttgtctctgcggtggttctccgtggagaaccgtcgaggctccgccgtagaatcctaccaatgacggatatcggatcttcctcttcatcgggactccaagaacggaaacggtggcaaaac

SEQ ID NO: 188757 - DNA, 262 bp, Arabidopsis thaliana
aaatggccaaacccatagtttttttggttggaaatgggggcccattttttttcctttccacccaaattttttaaaaaaggaaacctaattcaaaggttttttttttttaacccctttaagggggatttggcttaaaaatggtaggggggaagggaccaaacccagggggtggtttttggttccaccaaaccgccggggtttgggcaactaaggcagtttaaaccggttgaaagggcccaaaaacctttgttaggggccaatt

SEQ ID NO: 188758 - DNA, 698 bp, Arabidopsis thaliana
cagtaccgcgtccggaatttccgggtcgacccacgcgtccggaccggtctttatcataatagcgagtatgtaaggcttttgacattttaccctactacatgagggaggacaggaatctatcgattgcttactcgccttgatgcctaggacgtgaactatcgtgctcaccctactacagggaaggataccggttggagtcaccacactgcggaggttagactcaatgctactgatctgccatgcagtactacctactgcacaggtcggactggggaagcgttacggatggaaggagaagatgtgacgtgacatttgcccgaagcctggaacgaacgagacctaacgcaagtctggtaagcactacaagccatactcaatgcgcctctggcggcagcgctgatgaaagacctgcagatcgaacagaccatatgacggtttttttagggggagtggaactaaatactcacatctgtagtcgtgagaagcatatgtatgacttgaccagacgttagcactggtaatagagactaccccgaaggtaaagttggttggagaacgaggatacgtgtattatctgtgttaagggaatgttttctgattggcggaaccgagcgcatttgggaaagcaaaaaaggccacattcttccttttcttgccgatttgggcccttctccaaggaagaggaaaccccacacggg

SEQ ID NO: 188759 - DNA, 159 bp, Arabidopsis thaliana
aaaagaaacacatactctgtctcaattcatataccctcacttttgatcagtgagatcacgtacaacgagtgcctggaaagagaagaaagaaacaaaaaaaagaaagagaaatgggataccttttagaagaaaccttaagctctaaccctaaaaccccaa

SEQ ID NO: 188760 - DNA, 314 bp, Arabidopsis thaliana
ggctagtctgacgttgcagtcggtggatggtgacagctcggagataaaaaggacaagtttgtttgaaattaggggggggggatacggaaagcgagagtatggaggaaaggattataaggggatgggagattagaaaggggtaggtagaattgaagagagatgaaaagagggttttgtgcgttttaatttaaacttggtcggaagggttgtgggatggtggattggtgatgaaggggaatagggtgttgaggggaggtgggagggaaaggagagtatgaggggcgaggggtggggggtgtgggaaggtggtaaaa

SEQ ID NO: 188761 - DNA, 1068 bp, Arabidopsis thaliana
gacgaggacgaacgcgagaacggacgcgggcaacacggaatcgagaagaggagaagagacgaccacaccgggacaaagaggtgggacgacacaaaacagaagggtggacacgcgagacgtgagaagcgataaggagacaggaaaggtacacgagacagccagcagcaacggtaaaaagaggagacgagacgaaaagagaggacaagagggcgagaacgacaagagcacagaaggaaagaccgaacaagagtccaacaggaaaggggctgaagacgacaggatgaaagaaaaagagacgaacgggagagcagaactatagagcggccaacatagagaagtacaacgaaggtagcagcgacacaaggcggagaagaagaaccaagtgaagaaaggccggagagaaaagaaatagaaggcacgacgcgacaaacacctggcaggatgactgattaagggcagacgcgaagaccgaatcggaagacagcagagcgcacggaccagaagacgaaggaaggaagcgctcaagccggagtgaggagtgggaacacacagagcacgagaaaccgctacagaagtcaggacgcagagaatcgtagcgtcgtcccaacgcaggatgggaggaacactgaatcggcgggacggcacggaggacaggacgaaggaagggatggacgaacggagaacgaagagtgcaggcagaaggacgccggcgcgaggaaagtcaaggcagaggcgagacggatgacgaacgaacacggacgacgaacgaggaggaggatgaggacggacgtggaggtggaggagacgaaggatgacgacggaggcgatgaacgacgacaaggacgaagaaggacgaaggagcacgaggaggagggggatgaagagcgcggaagacgaggagacaggcgcaggctgacgcggacggaggagaagacgcacgagacgatggagaacaaagaatggaggcgaagacggaagagaccgatgggaaaccgtgacaacggaggccgaagacccatgcgacgaggcaggacaacgtagaagaacgggacgcagaagcagaaggaa

SEQ ID NO: 188762 - DNA, 548 bp, Arabidopsis thaliana
ccacgcgtccgcagcacgctgaacttatatttggccggaaaaaaataattaaacttttactctataccgatctcctatcctagtacatatagatccaagcggaatctatggctcgacgtggattattgatcgcggtcttcgctatcttgtccgtcctgctagacatcttaccagcttctcgtgatcaaggtctcactagacgtactgtcgaccgatcgatacccaagagacaaagcatagttgtcattcagaaaccctagggcaggtttgttgcatagaaaaggttatgatcacgggaaattgagacatgctgagtcaatatgtgtgcccccctttgcaacaagcgaacccctgaaacatgatcctagcatgtttagctagataactgagaagtggaagaaaagcaaatgtgagcgtgagtgtcaaagaaggtcgtgaggcacgctgttaatcttccaagaagagaaaaagggaacccccccgatgaggctctccgatgggtgcctttaggacaaggaatgatagatgaaatgcctctctcgatacga

SEQ ID NO: 188763 - DNA, 661 bp, Arabidopsis thaliana
ttttggaatttgggtcgaagtcaccgtttcgagaaactttataaaattgagaggctttgttgtaacaagcttttttaagttttttgacaacactgggtaggtgtacattgtgtgtagtacaatagatgaaatgtatttttttttttgtaagaattagtttgttttaatttatgattttatttttattttttatttattttttttttttgtagtgatgttttatattagaagtaattttttatttttttttttgttttttttgtatagataattttagttttttagatttatctctaagagttcttggaaattggttataattcattaaatgttgtaaatttagatgcctagttgttgctgtaatttgttaggtatttagtaaatgtattatgaagtgattggtaataagtgctgtgaggagacagtgtgttgttatgatgggtgattaattactggtatttcattagttgttgattttgttgtcatgttgatggatgagtttattatatttatatatttattttattttagtggtgttttattttttagttttgatcagataaagatctttcatgtattagaaatgaggtgtatgaagtgggttgttatcgtggcttgttaatgttgtgtgatgtcgaggttatatgtataggtattattt

SEQ ID NO: 188764 - DNA, 446 bp, Arabidopsis thaliana
ggggagaccggagcccggagaaggagctgcctttcccgcgcggggcgagggggggccgcggaaagagggcacacacgcgcaccgcgaaagaacggcgccggaggggggcgggcacggaaggggggggagggggggggaaccggggggaggaggacgcgcgggggggaccagacacgggccgagacaaggcgccgaagaacgaagagcccaaggagaaggggcgcacgcgggccgcgggcagcgcagcccccgagcaccacgaaaacaggcggcccagacgcgacgccagccccacgcacacacccgccggcgcacaagcggaccaaccaaacggcacgaggcgacggccagagagcagagaggggacgagaggcacgcggacggaggcgcgcggacacgggggaggggggggaagacaggggcggcgagaagcgggagagccaggg

SEQ ID NO: 188765 - DNA, 192 bp, Arabidopsis thaliana
  unsure (1)..(192): unsure at all n locations
aagtaacgtgagccacctaattttttgatatagagagaaaacacaagtgtgtccataaaatgaggatcagcagtaacaacgcaatcatacaaaggaagaagaaagagaaaacatgtccaacaaaagggatgagccggggnatcaggccacagcaaaactaacccgaatcaaagctttttatggagcacacaa

SEQ ID NO: 188766 - DNA, 253 bp, Arabidopsis thaliana
aaaaagaaaaatgaatgttgaaagaacccaaagttcatgggccatatgcctgagacgttggggggccttgcatagtgcaaagtgcaaattatgcccaaggaggtattggctttgctaggccgctaacagtaagggaagcgttgtgtattggttcttaataaacatgctttgctgtgccacttgtgatcttttgacgccgattaaaggagtatcaagatgtgtcttccatgcgagaggggagcagacttgaatt

SEQ ID NO: 188767 - DNA, 381 bp, Arabidopsis thaliana
atgtaaagtatcgtttatttatttgtttttctattttctttcatgtagttaacctcatacaaataataaaaataatgtgacaaaataacgcaaatagacaggaaacaagaagaaaaagaatgagagtgataattagttaatgtgttagggcattaagcaatgagacttgagtgctaatcaaacccctaaacactttctcactctcacattcgatttcacggatcgaattcttcaattccatcattcttttcatcaaactctttacttcttcggtcttcttcttgcttaaaccaatcaagcttttcttttcaacttggttcaactccacgattccttcgtctagtttctcctttttttcggatcgtttcaaaaaccctataa

SEQ ID NO: 188768 - DNA, 947 bp, Arabidopsis thaliana
  unsure (1)..(947): unsure at all n locations
aaagaacgaaaacgacggaagaagaagaaggacgaaaacgaagaagacgcgacggaaagagaaaagaacaccacggagaaaaacaggagcacgagcgagaggacgaaaggcacacgagaacagacggaaaacaggacaaaggaaaacgacgacggacgaagaacacaacacgaaggcagaccaaggagaacaacaacgagaacacaaaaataagcaaaaggaaaccagaagaagacgaaggcgaaccacggaggcaaacacaacgaacaaacgccgcaagaggaacgaaacacgcagaggaaggaccgagagaggcgaagccagccgaccgacagacaaancgagcgacacgaaaacagacgaacacacggacgagagacaaagcaacaaaagacgacgaaaagcacacgcgagcgacgnacaagagaaacgcaaacaacaacgaagagacgggaacaaaaaacaggcagcacaaaaacggagagagacaagcaaaaaaaaaaagagcaaagaagcacaaaaaaagaaaggagagaaaagaagaccaaggacaaaagaagaaagaaaaaggacgagagcaaaaagagaacaagaagagaaaaaaaaaagaacaaagaaaaaaaaagaagcagaagaaagaaagaaaagaagaacgcgaaagaaaataaaacgacagacaaacgagcaaagaaagaaacaacacgagaaacaaaaaaaaacgacgacaaaaaacaggaaaaaagcgaagagaagaagagagaaacagcagacacgaaggcgaaaacaaacacggaccaggccagagaccaagaaaacaacgagaacaagaagaacaagagagaagaaaagaaagacaaaggcgaacccggcacagcaagaagaacaaaaagacaaaaacgaaaagacaaaaagaacaaagacagaacacaaagaaaggaaaagagacc

SEQ ID NO: 188769 - DNA, 725 bp, Arabidopsis thaliana
cactaggagatggatgaacagcaacgaaggtagaaaacaaaaaagggcacgaaaaataggagattttctttacaagaaacgagcagaggagaaggagagtaaagaaggagaagaggaacagaaaagaacagaggaataacgaaagaagaaaagcaaagaacatgagaaaaagaaacggagagcggagaagagagaaaaacgcagggagagaaaaaaagaaaaaaagaaagagcggggaacaaaaaaaaaaactagagaatggacgagaaccgagaaccgagagaggagtaccagaaaaaaggcagggcgacagaaatgaacacccccaaagaagacagaatagaggtggaagagaataaagaaaagagacaaaaaaaaggaaaacagaaacagaagaaaagtaacggaaaaaaggaaggaagggacacagaggaagacagatcaagcgggataacagcgaaagaaaggcaggcagcaaaccgacgaaagaaagcgagtgtacgagaggggaaagagagggtcagagctagatgacgagaaagcgacgagcacagaagagaagcgagcgcgagggaagcaccgaaagacaataaccaaaaggaaaagcacgaactaagagagaaccaaaagaagggacgaaagaggaagacaatgaacccgaagaagaaaaagagcgacccaaaggcaaaagagacgggaacaagctgaggagaaagaggaagagc

SEQ ID NO: 188770 - DNA, 292 bp, Arabidopsis thaliana
gtctcaataatgttcaataatagataacaaaaattctacatcaatacacaacatgaaaaaaacggacaacgcaaagaaagttcagacgcgtgttaaccgccaaatcagatcagcagtttccgttttctttctttagaatccaatgagccagaataaacgctcaagctttctcataatacaacatttttcagactatacttggaggatctccagaccagctacaagcggtacgcgaccaccgagttctgatacaatccaccagtggtgcatgttggaccggttttggctgatt

SEQ ID NO: 188771 - DNA, 1017 bp, Arabidopsis thaliana
cggtacgaaccaaaaaacatgaatttaaatttaaaaagggaaggacagcgagacagtagagaggggggggacgcaaatggcgggaatgaagaaagagtaaggggcggagggagtatgaacgagaatacaaaccaggagaggcagacacaaaaaacaacgaaagggaaaatacaagagagaacgaacaccacgtaactaattgtgaaacaggtggagcgacaagacggaagttcgcagcgacgggaacaaatatctacgggccgaggtgataatgccacgatcttgagaagaagaaaaagaagggcaaacagaagtgacgaacgagaagaggacagatctcgcgcaagataaggacaagatagagagcgcggacagagaacgacgggatgggtgaaacaaacatgagcacatcaaagcatgaagagaacgccaagatgcgaacaaagaagtgtgaaaaagtagggcgaaaacaaaaaaggagcggggacgactaaaggggaactagactagaaccagggcacagacagaataacgaggaccgaaagtagacctgcaggaaacgccgcacaactgatagctccgatgcatagagcgagtggcgagtacgatatccaagagatatatcgcacgagttcaacatggatgacgaaggtcataagtggagaacggagaaacataaacagactgcacagcatgagaaagttgtagaggacaaggcgaatgcgacaggccaggcgacaaacgagcgagacagaattaggacgcagaagacagaacgaatggaatagagcgccggctcaagtgagaaccagtaaaagggtcggagaacatcgacagaaaggaaatgagaacgcagcgaacacgacgaggagacgaatacgcacaggacgaaaagaggagagacaagacacgctacgaaacgtgggcagtggaggaatctgcagctccactcaatacagcaagcaccgatgaaccgcacaaagtcgaacgtacataacaaagaagtagcgagcggag

SEQ ID NO: 188772 - DNA, 628 bp, Arabidopsis thaliana
  unsure (1)..(628): unsure at all n locations
ctatggacgtacgncatgtcaacgcgtgacgataagacttggcatcctaatagcagcggtacgaacctattttttattttttttttttttgtcaaaaatggataaaattaagatgaaaaaaacttggggatgaataacagataataaagaaagtaagataaaaattgaaaattaaaaaaaaaaagaaaaaagaaattatgaaaaaattttagaaatatgaagaaataaacaaattgaaagttaactgatatgagtaataagaaacatatctgacaagaaaaactgaagaaaaaaacgtaaaaaagaaaagaaaacggaaagtaattatcattaaggattgaccataaaatatgtcaaaaaaaaaaatttctgtaaattaacggaaataaccgtaataagggaaaaaaaaaggtcgaaaatgtttaaagaaattagagcaaaaaaaaaattcctatttgctatttgtgaatataaattttgtaaaaaaaacgaatcatgtgtttctcggggaaaaatgtaaaaccgcgaaaaatttccataaaaaaaattttacaccggaaggaattaatagtaaaaacttgggggtggcaaaaggggaagagaactttaaacataatttttaaaaaaa

SEQ ID NO: 188773 - DNA, 1009 bp, Arabidopsis thaliana
cactataacaccagctatggacgatcgcatgtcacgccgtacgtgaagccttggtattcctactagcagcggcacgaccccttttctttctcttttttatacattatttcgacgagcgatccatattgtctttattcacaattatcgataacaacatcatttctacaaattgcactataatataacatatgtcatacaatgcgtcattgacgactcacacaacgactatcaagtacaagagttttatcaccctcacaacttcgtctcatctaagattctctacactcttttatgaacgtcaacgacatattttcgcaaaacttaactcttcgtaggattatactaccttcctgcgtcacggtgcgaatatcacctcttaataccgtatactcgtcgagtactctcattcggtatctcttggcaaattactgctgcatagttgtaagctattaaataatccagtctatcatttatcgaaaaagcatattgtttgacacacacatttcccaccttctttcacgtgaattcactctgactgagcttaaagatttatttggacatataccttgcatattagcatgcgtcaacaatatcattcccggatatagagacctggttactgcatcactttgcaaaaggccactataatggcattttgcgtaatgccttaaagcttggcctcttctcggaggaatctttggtccaacttaatttggtgccctccttccatgatcccttgagttgatgactgactttgatgaaccccatacttctcagacaccaatgtattaactttttgtcacccttattcccaacaaaagctacgaattattctgatccacctcttcattcacatcaatcttaacccttatttcaatccgaaactgtgtaacttccaactttgcaagaggtttcttttccaaacaataacttggatttggcctttgcctctggggtcttcacccaccctttaatgctccattctcaaatactacacactctattattt

SEQ ID NO: 188774 - DNA, 339 bp, Arabidopsis thaliana
accattgcccaaacaccaattaggagggccaacaccctactgagacgacgagcaatacttatagtggccgcgggccggccatatcgacaaggaagcacgcgagttttctattttttccaacgagagatgacgcaggaggtatcgcacacaatagggtgtggggtgttagtacaagcagctcgggtacgacacaagggacacgagccataacccataaagacggactagcgaaccggtgcgaggctcccgacaaccctcagaactaagcagcgcgcacaagtgatgagattaacgctcacgatacgaggagtagaccgcaagcatcgagaatcgtagacg

SEQ ID NO: 188775 - DNA, 335 bp, Arabidopsis thaliana
atctctccgggccccccgttgcgcttcgtttttgtccctaattggccttcctaaactccctttatcgtggaggctgggatttctatgaacattcttagtttcggtattttctcctttttgccccattgggttccgttcctatcgttcggggttctctggcttttcgcagttgcgcactttttgctctcggccttcgtcccccgaactcccttttcttcccaagctttccctcttcgccccggttcagttcatcaacttcttaccacttttccctttccgatttccctaactgctcgctacagccttggacctcttctgccttacccccccttaac

SEQ ID NO: 188776 - DNA, 780 bp, Arabidopsis thaliana
agcttgacgtagcatgcacgcgtgcgtgagctgggatcctatagagcggtcgacctacgctttcgtgttcttatgtgctaaacaaccaaggacagatcttaagtgacattgattttagtttgtgaagttaagtgacatttaccctaactagtcatagtgaaacatcttatgaacgaactattgaacaaacaaattgtctccatataaaaactaaatgatcatggcttatttgatgggaagtcttaacgaaacttttttttttttttgttaagaagttttattttgtcttaaaaaccaaggggctaaatgaatcgatcctgacaggggacatatacataatttggattggacaaccaaacaggggtatactgctctgtgtgaacaaacgcatatcacgaaaatcttgtcggggtgttctattctgactaaacgtgaccccccggttatgatccattaatttaacctcttgcgtttcaactgaagaggaaaattctctagtgatccgactaatagtttcgattagacccgccatccttttggccatggccatgaaatcttttcgcgctgcgggagcacttttggagaatgcgcgttaatgataacccgagaagcccggccagtgtggacgggggtttcaactttgcaagaataaaatctttttgatggggtggtgagttttcggggaggttttaaacctcaaaaggaacccggaccccgggggtggcacccctgaaaattatccgaaacgggtacctgcacgggggaaccaaatttttcttt

SEQ ID NO: 188777 - DNA, 742 bp, Arabidopsis thaliana
cccgttacccatagacgagtcttgacgtcgcttgcacgcgtgcgtaagctgggctcctctagagcggccgacctacgcgtccgtttttatttttttaaggactaggctcgagtagtttgagctgaactcacatgatgctcaaagtttccaggcttgatatgacttgtgcctcgggcaaggaaatctttgcatatcgtgaaacaggagcactcattccgttccataaagaataccagttctttgttctaagatcataattggctgtctttgggtcataccgatatatatatgatgattctttgggtcactcccatactccttcagtagtggccgaggacacgttactcgtaacaagagaggacctgctttaatgagccgttacaggcatttgaaatggttgcttgcacgagtggctagtgattttcatcattgtcgcattaagaccattagatggcttcttatttaacaacgtgggctttgttcaactgggtttttgctcggacgcttgggtcgaccccggaatacgggaccggctcctgcacgcgtgcaagctatccctaaactgagctgtaataggacttggcgttaatctggtgctaggtgtttttctggggtgaaatatgtggatacgatcaatggatttcaccaccactataacggagcccgtggaggccattaaagtcgccaaatatcccctgaggtggtggcctttatattgaagcggagaggacatgactcttct

SEQ ID NO: 188778 - DNA, 334 bp, Arabidopsis thaliana
aacttgacgtcgcaggcacgcgtgcgagagccgggatccaatagagcggccgacctacgcgtacgatttttatttttacggcacaaccaccccgctcaaacgcacggggggcagcagcaataccaccaacggcccccacggcaaggggacacggaatggccctcgaacactatcagaagtcctcacgagacaccaaatctactagtgccaagatgacggaccgcacagctagtttagagacccatcaactatatactacctgcagcttgattggagaggaacgagacgccctagactaaaacccccaatgcaaagagcaaacaccaccccccca

SEQ ID NO: 188779 - DNA, 729 bp, Arabidopsis thaliana
acccatgcaccagcaccgacgtcgcatgcacgcgtgcgtgagccgggatcctatagagcggccgacccacgcgttcgattttttgttttaaattttatccacccgcaagaaagagctgctctccagagggtgtatctaccaagggctcaataaaataaggttcgtcgcttttaatgtaacccatatccaattgccaagcgcaaaaccaatatttcttgtgaaacgctatcgaagtccaatactacaaactggttttagcaacttctcaaagcaattttattggttcaagtaacttgtggtgggatcatgtggaaaagcatgaacagccccataattggccttgaatgagacgttataggctctatgacccctgtggatactatatgtgctctggagattaatatcgcaaatggtatgctgggtttagaaactgcctaagaacctgcaggtgttctttacaacactccgagaaagattatcccaatatactggaattcgagagtctcctgggccacacttggttagggggaagagcgctctcccaagagttcccttcaaactcgggatactcttccccgaagtcaaatttgctggtaagccgcccccctccacaccataaaacgtgcgttcaatcctaccgcggtaccaatttatttggagtttgggcgtttatttctcttgggccgaaaatttatgtatccacaggcgggaagacactttctttatcta

SEQ ID NO: 188780 - DNA, 635 bp, Arabidopsis thaliana
acacagagggtagttgcgcacgcacttgcggtatatctacagaatagcgttgttaacaagacatgagatgaccatcggtacaccggcataccggctggcagatacgatgacccatatctgcggatgatacaatccgatcggtgatgcgtcagcgcccaacccgactgcgttaagctagacattacatgatcagcttgaaaccttgttggcagagctcttgaaaagagacacattttccaggtgacttcagtacagtctagagggcgcacggtcggtgaaaccatgcggatgggtagaaaagtggcatctcaccttgagaatgtgtgtaaggtcgcggtaaacatggaatgaatgcagccggttgcctggaaatggaagatttaacattttcactagatagctcaagcacggagaagtgacattatctcacactgaatatcacaactcgagttctgtagccacagcgtccgctagttttacagacaacgccggtgagaaaaaactacaccctgagtcaggtcttaatgaatttcagtcctttatgctaacagaagttgaattgtgtctcatgacctttagtttaatcgcgaggctgatcttagacaaactactatttgtgaactagtcaactgaca

SEQ ID NO: 188781 - DNA, 228 bp, Arabidopsis thaliana
gttctaaaaatggtcaataattgattacctaggtggtccttcaatacccaacatgaaatgtccggtcagcgcatttaatggtcagacgcgtgttaaccgccaaatcagatcagcagtttccgttttctttctttagaatccaatgagccagaataaacgctcaagctttctcataatacaacattcttcagactatacttggaggatctccagaccagcttcaagcgg

SEQ ID NO: 188782 - DNA, 443 bp, Arabidopsis thaliana
attaggacaccatgccgctccggtaactgcaggcttacggggtcgcctacgtacgttttatttagacaaccgaacataatagattatactacgacacctagaggtttagaccgatctaaatattctccgttatgttaatcatactttgttttgcaaccgtcatcgggttgtagtatccgtgatatgtatcgataagagcccaatggtagtaaactacgcttcaatatggagtcgtaacagaaactcaggactctatcctattaggtaactattatcgtccgatattaggcaaaggatctaaaagaattgactttcagggtatcaattagcggtttcccggagcccaagaaatgtctgtatgatcgtcctctagtgttacgggcaggaaaatcctcgctaccaatgtcacagaccgacaggtctatcatgacattttaattcat

SEQ ID NO: 188783 - DNA, 103 bp, Arabidopsis thaliana
atgaagctgggacaaatgagttccttttgggagatcgatggaatgaaatcaccatcgtccgtttactgaacctgcactcttattataggagtatgatgactta

SEQ ID NO: 188784 - DNA, 611 bp, Arabidopsis thaliana
actataacgagtttgaggtagcatgcacgcgtacgtgagctgggatcctatagagcggacgacctatgcgttcgtttttttttttttttgatctttttcatactgttgcgattgtgttttgccaaaacttaatatgtagacaggccttttgggaaaaatcgggctttttcttttatgtacaaaaggtaaccaccaaaaaaatcatggggtattggtggtcggacattgtgattcctttggaagtacaagaggttttagcctgctctccatgaagatgccctttacgtacggatgggttcttaagaatttatggtagaagaggggttatcacaatagggcggaagcttttacatgcccactcttttttgaggcatctcgcttgggagtaatgaccacagccctgaggatcccctaggtcttggttaaaggagtggaactgctattggctggccaatttcccccatgcacccttagagtagcttgtcttgcaacatttttttgacaccattatgttccacacaccacgatacatattaaccatggttggacaaaaaaaaagaaaaaagattcctattgtcgtgcaccgtgctgtatttgccccctttcccaat

SEQ ID NO: 188785 - DNA, 668 bp, Arabidopsis thaliana
actgactgctgccgctctagctggtccttaacggcgccttcttgtttttttttcaaggagcaagctcccataaggctttggggggcgacaatctctatttttctttgaagaagagactaaacagcttaggcaaaacactcataacgtaaaaaagaacctttcgaccgttatcgggtggtcctgtttctttcagggcatactagaacttcttctttgtcttcctcttcttcctttttcggggatcataagatagaggaggcccggtgacttataggactcaactttgggaatatactggtctctcctggtttggcttccattcatgggaaatcaaggattgcacagcgactttattctaggagcctaccaccacctggactgttcttgctgcggcttaacgaacggtcaaccgcgataaagagcccagaagcctggtgattcagagaaggggaaaaataacggccaccttgtttacacattaatatatgcggaaagaaagtggtctcggcggccaaagccaaacccctttaaaaaaagcggcgttcaaaagcctccgccctacgggggtcctttccatagccggaacgccgggcgggttcccaccccctggggaaattttccccggaacccgggttacccctcgtgcaggggccgtatcccaaaccttt

SEQ ID NO: 188786 - DNA, 880 bp, Arabidopsis thaliana
tgacgggaagccctggaaccgcaataacaggggctcgaaccaacgcgatacgttttttggatatataaactccaaaatactcacagcggaaccctaggaggcaagagtgctgacaaaagaataggaatactatcaaagagcataatccactataccagcagaaaacagagaagtcctcataccagaaggcaaatacgctagagacgcaaaggaggacgatgacatgtgggtagaaaaacgaaaagaagaaatagatgggagtctgaccgctatgcaaaaaaaataaaacgagataaattgagtgcaaatcgtccacaggaataaaagcgagttgagagaacacgcagacactaaagataatacaaaatgtgacaaagaactatggaatgaagaacaaaagagggaaatgacatatatacagggacaactatgggaggtccactccaatatgaaaacatacacggcccggcggataaaacggagaaacatattggacacacggaacgtggaaggagatggtaaggacgatagtaaccgaggcgtacactaattaacagctgagcactagccatgagtaccattcaacaggagagcatgcgtaacatacgggaaagagaaataaacggcggcgataaaacaagaaccgtcaacaccagcattgggagagctaatctatacagaaaacgcaggaaagaaaggaaagcacaaaggatggaaaaaagggacagaacggagggtagtaaaaaacaataacacgatataccataggggaaaacaagacacttgattaaaaccttagcgaaaacaaccggctgagcccactaataaaaaacaattcgaggcataacgcttcataacaaccgaggcgatatgatacaat

SEQ ID NO: 188787 - DNA, 709 bp, Arabidopsis thaliana
cacgaaccagcttgaggtcgcatgcacgcttgcgggagcttggatcgtatacagcggccgacccacgcgtccggtttttttttttgatcatgaggtaggcgacaaaggcgctggttttatttattcaccgacgtaagcatattgaacaataacctcggtaccggatgaaatggttgaattcacctaaaacattcagcaggggaaagatttaccgagaaatccgtagctctgaaactgccacaaaagaagtgcttgattgggactccatacttaacattttggccgagtgatggccatcctcttctacattgcgatataacaggacaacaaactctccatgagaaaaagacaacggggattgttccactctatgattacccaattcaaaaatacggatgcaaccctatgctatgccccatgcccggtgattctactcccggagctaagcccgtagaagaagcgaccggcatcgcgccacacatgggattacatccgtacttctgattggggtcatcatagctaggtgcaaaaaccgggtgcgtcctctgatgaactgttgctcgccctgtttccatcccccggggaaaaggattaccattcacccggccaaaactgaaggacacctttattaaaagccccattgtgttgggatcccagcccccgctaaaatggtaccactttccctagaatgtttcggataataatacaa

SEQ ID NO: 188788 - DNA, 495 bp, Arabidopsis thaliana
ctgcaacatatggccccacgactagcgcctgttttttaccagtcctgtggggaacgcaggggcaaacttggaccaaaaggggagtaaaaacttagcaagtacttagattggcattggttcaagctggacttgggcagataccccagaaaaaactttaagcacaacttttaccgacccaagattgaatttttcagactaacaatgatacgacgttttgcgggccttattcactgccttctacgcttctaatagacttaaaagcaagcaactgcttagcgactatcggaagcaccgatctagcattgatcaaccctcgttgctcaaatcttgctttagaactcggcctctcggttgaaaacatccaaaagttagaacggttacacaggctttcagccagtttactgctccggttcccttaaatcttctaaacttaaatcccgggaatgcatgtaaaatgacctaacacttacgctaataagaaccttttaaaccccc

SEQ ID NO: 188789 - DNA, 627 bp, Arabidopsis thaliana
gtaacataccactgactgctgccgctctagctgatcctaacgcccttctctttttttttgtgtctttcgggttttttgggaaacctcacccagatattgggcctggggtcaactttaattctgtggtctatgggcccgctgctagtcccataatccttttgagttaacgagactaatcacggttcttgacttatttccaggaactggtaaaacttgctctagcatctttctccccctttttacatttctaaaaaggttttttaccaactgggttatttacggggggtagaccaaatggaataaggggtacacaccgccatgaagcttttgtgccacgaacctggcaagattggttcatgccagacgtgtgagcccctttcccccaaaacagacctttcaaacattaacggtaatggggaaccccttttccaatagggaaaacactttatcaacggggttgaatttttcaaaaggccttttttttttctccccaaaggaagcgttatggccttttggtaaaattaaaagggaggaacaagccttctcacaaggcttttgaaaaaggttttaacccccggaaaacccccagccttcccaataattgcccgttggcccagaaacccttaa

SEQ ID NO: 188790 - DNA, 623 bp, Arabidopsis thaliana
cggggagaggaacgaaaggagacctagcaaccacaaacaaaaccacgagacaactttttcactttataacaaaacagaacaaagggacgcccaccccaacaaagcggggagggaggggaacaacaccagaaaacgacagccccaaccagaccaacacagccgacgggacacaacgaccaaacaacacgcccgcacagcaacagggcagacacaccagcacaacgaaacaacaggcaaacagacgacgcaaaaccacagcacgccagcggacacacacagacacaaacaccaaaaacgacgagccaaaaggcacacaatgggcgcgagcgaaccgaaaaacgccggcgccccaaacaataaccagaagccacaccaaaaacagccaccacgcacgccgacacaacagacagagcagacgcaacacaagaccaccaacgccggacgataacagacacaaccagccagaccgaaaagaaaccgccgcgcgcgcagagaaacaaaagacccgacaacgcaaacacaaaacctaacacggcacgcgacacacaagaccacacaccgagagacgccaccagaaaagacagccgccaagcaccagacacaaccggaacccacacaaaaga

SEQ ID NO: 188791 - DNA, 737 bp, Arabidopsis thaliana
ctatgacgtgcgcacgcacgcgcaccgtaagcttgggatcctctagagcggcgcgccccacggaagatttctttctttttttccaaacccacccccacacgcggggagataagaggggatacaacaaaataggtctggccacaccgaattttcgaaatatccgggctgacccgattgaattggatctgggttccaaaaggtcacaagacaaccaggaaaaacaaaaactcattcatacgccccattttcaagtacccttgaaaaagggaacaaatccggggggaaatgttttgattgactccccaccagcaacaggattagctctttcttcgggaaaataagcgaccggatcaaatagatgcgggtctggaattttcagcaccccttccagcatgggggggaggccagaagctgcatatgtaacaagatacccgcctttttgcaccaaaagcaaccttccaggggtgggctcctctgcaacccccctaattatctgcccaaaccttctggaaccattcattgccaggctttgactcccgagggggacaaaaagcgccggaagacttgaccaacaaccagggaaccaaccattattggggggccaacaccccttcttaactggcagggaaacccaacgcaggcttaaatttcaatggcggaataattcccaataaagtccccccgggcgcccaacccccggggcccccaattatccggggaaaagaggggcggaccat

SEQ ID NO: 188792 - DNA, 366 bp, Arabidopsis thaliana
aacgggacacacccaccccgggcgactggaaagagacccctgaaccaaaaggcaacggggcgcaacgtttttatatttacacaccccccagggacacaagaccggaaggcaccgcggcacggggggcaaactctacactcacccgcatgcgggggcaccacccccacccaggaaccaaaaacgctcacacggccacacgcacccccacaccggggagcagcaaacgaactgacaacagacgccggggaacacacccccaaggacgtggacacacacaccagagaacgcgcgggcaccccccaccaaacagacaagaaagggaaacggaactcgtaatggaagcctacctcgaaaacacacgggcgg

SEQ ID NO: 188793 - DNA, 401 bp, Arabidopsis thaliana
atctctgccatttttcacccgtgtaaaaagcgttgttttttaaaagtcgatggggttaccaaattcgcattgattctatagagatttcagaacgatgattcggcagtattatgaggataagcaacgataggttgagactgcgaagatcatgccttaaagattcgtgaaagaagcgcaaagaccgaccctaactaccaacaccggggctaaccgatatgcaccccacaacacaaaacgatcgtagttccgaagtcccatagtttacacaacgttttcgcaaatggatcaacttaactctttctaattattatctgtccccaggatttcgaaggttaccaggtccttctccttcttcttgtaaaaggagggaagacggaggctccttggttattgagctttac

SEQ ID NO: 188794 - DNA, 919 bp, Arabidopsis thaliana
aattaaaacaataacccttagcatggttttctactacaccttgatgagaaaaaaataagagacctttaaaattctatcatatggacgatagccaaaagaatggggtgttcggaattgttcaaacatgtgaaatattcccagaaaaggattatatgcatcaatgaagcttggggggcttggatggaaatgataactgatagcactgggaattgacaggagtggttgggtgaaataccgatggaatccttaagtgagaggccgctccgcgggacctctctattttgtgattttttacaaactattcattcaataatcttgggagccaggagggtcgggaggcaagtcccgatacaaaatggtaaaggttgttccacacatatgggtccaaaatagtcagcgaacaattgtgaaagtatttatctaggaaagttgggtattcccggtgagttagactgggggacaccccaaaaatatgcgaggggcctctccaaaaaaagctgagagatagcgataataacacaaaaagggaagaattactaccactttgtcgttaggggcgggaagaaaaatagggagggtgattcgaaaaagactgttcgcttagaaggcccaaaaatttgtgcgacaaacttttgagttgaaggggtcaagggggggggggggaagaaaataaaaaaatggtttcataaactttcttattttctttggcgagaaggaggggggaaaacaaacatttatgggaggacttaaaatttttattccaacaatagttacgggaaaggaagagaaattgtccatgatgggcactgtcgggggggacccggagaaagaaaacgggttgacttttaaacacagggaaatgggacaccaccatggggggtatgaagccgcggaagggaacataacaacggtgtaaagg

SEQ ID NO: 188795 - DNA, 1251 bp, Arabidopsis thaliana
  unsure (1)..(1251): unsure at all n locations
gtaacccgattttggaagtaaaggggaaccacagacccccgggacgcgaagaaaaaacagaaaggggagaaactcacaaagacccacacaccttttcttctttttggaccaaccaacccacaggagcagaagacccacacacggggggcgggggggaacccaaacagcgaaaaaaaaaagccaccaccaacaccacataccacccggacaaccacagcaggagagcaaaaaaaccgcacaacgaaccaacgcagccagaagagcgaacagagaggggacagagacccaagacagacacagagaaagaccagacaacacaccaaaaacacagagaaggaaaacacacacatcaaccgacagcngaagaaaagcacaccccaccaagaacacacgcaacctgaaaacatatcaaaaatcgggacaaaacagagcagaggcgaaacttaaccaccctacaaacaagcaaagacaacgaacgcgcaacaagcaccccaaccggacagaaaaaacaacaagaacagagcgagcacaaccaagagccctcgagcgccccccaccagctgcagaaccaacagggaaacaacaacactacacccggaggaaacaccacaaccccaaggacgacccacgtcaacaacaggccaacacacatagaacgagacaacacgcacgaccacaaaatcaatcaaccacggaccgagaccacacagacacaatacgaacccccgccaaacgaatgcaacggacacaggcacaacgacatgccaacgataaagcggcaaatggaaaagggaaagccacccaccaggcgacccgaccaataaaccaaataagacagaaccccaacaccgcggacaaagaccgaccaagaacagaccacactcccaaaaaggcacacagagacgcagaaaccagcaaagtgcaccccggggcacaacaaacaggcgccaccagcaaaaacaatacaaccgagccaacgcgcatcaacacagccccgcacatagcagagaaacaaacgacgcaaaatcaataagaaacactacacaccacgagacccaccaacacatcacgggcagtgaggaaacaaatagacaacaagctccacaagacccacaacaacgggcctgctccaacaaaaccgaaaagaaaccctagaacgggcgaaaagatactaaccagaccaagacacacacatctgaaagcgcgaacgccaaacccagactagagcacaacgaacccaaaccaacaaac

SEQ ID NO: 188796 - DNA, 792 bp, Arabidopsis thaliana
tgaggaaggaatttgggcctgaacacgcgggcccggtagaggacggggaagccatattgaaggcgggcacggccccgccagaggaaagttttttacaactttttcgcacgaaaacgacagagcaatatcaccaataggaagcgggggggtaaaagagcaaccctgacagggaacccgtggcgaaaaaacaaaagacatgggtacaaacggcagcccgaacgggaaaaacaaaggtataccgaaacaagaggaggcgaaggaaagagcggacccacgagagccgccgggaccaaagaggcgccgggacccagtcgaataaaaaaccccaaacggacaagcaggcacgacaaggaagcgaacattgacagacgaaacgggagcggaagcacacggacaagaaccagcgcggggcaacgaaaatggacacacgaaggcaaccgcgcagaaaaggaagccaaaagccctaaggccaaataccgaagtaaaaaaaagtccaggggaagggaaagaaaaagagcactaaagacgtcatgtactaccccaaaagggagggggctacagagcgaaacggagaggctaaacctccggagcaaagaaaagaataactgggggaaaggccaccacgattaccgcaggactaggagcgtgggcccccattcgagggggggggaaccgggaggcaaacagaacccaccgcccaagggaaccattaaaaagacaggggtgtacatggacgcgccgtgacccatcgcggtggcgaacacgaaagaactaccggagaagggaggaacg

SEQ ID NO: 188797 - DNA, 1001 bp, Arabidopsis thaliana
aaacagacaccaacagggaacaaagggcgcaaagggggggggcggtccctaaacaagggggaacaaaggaccacccgcaccacacaggacaaaggaaaaaacagcaccagcaaaaaaccaaacgcaaaggggccaaaaaaaaaaaaacaagcccccggggaaaacacgggggggcccggcaagccacagaaaaacagcgagcacgacagcgaacttcagaaaagggagggcagacgcccaaaaacccccctaggaaactgccaacaacagaaaaggggcgcgctcaccggagagaacccccagccagagccatagagaaacaagtcccaaaaggaaaacagacgccgcgcaaagcacaacaccaggcaacactgaggaagagaccaccggagaccaccaccccacaaaaacacaaaaggggggaaagacgctgatccaaaaaagtaacggcgagcccagcgagaacaccgacgcgaacaatgacaataaataaggacaccaggagaggagggacatatcaccggggggcaccaaacccggggagaaaccaaaagaagcaccggcgggcagcttagaccccccaaagaaaaccacaacagccaaagggagaacagacacacacggtgggcgcaagcaacaaagggggaaatcaaagacacgggggacggagaatcccaatgcaggaaaggacaacgccaaaaacggagccgaagggaggggggaagcacaaaggaagaacaaccaaacaacgctacgcagcgactaacccagaagggggggggggggcaaccaacacagtacaggaagaaacgatcgaatcagcaaactacaccacccagggaacatgactgagaagagcagaacaacagaagagaacccaccgcgcacgggcacaaagaccggcggcgagaaaccaggcaaacaacggacagcgcaggggggagaactgccagcaggctcggcgagaaaagcgaggggccccaacccaaagagcgcggcac

SEQ ID NO: 188798 - DNA, 802 bp, Arabidopsis thaliana
ggaataaagggtccacccagcgtacggtggaggaagaagagagaccgcggaaggaaggatggctttaattaagcagaaaagaagcaggaaaatggggggagaacaaagggagtaagcaccggtgagcggaagagaacggggggaagacaaaggagacgtcgcacagcgcagacaataaaaagaaagacaaccagggaagggagaggaaccagaaaaggggggcaaacaggaaagaccacaaccgacgaccaacggccagaagaacgcgtacagggacaaggaagtaagagcaaaagcaaacacaaaaccgccaaacaacacgaacaaagcaacgaggaaacgaaaaaaaacaaagaccggacaacgagaaggcaacacgggaaaacccattaaaagaggaaagtagcagaagaaaaccacactacacccacacgcagggcgaaaacgcaaacggcggacccacaaagcaaggagacagacgaaacacggcggaccaaggcatcgccggaacgcgaaagaccgaaaatagcacaaagcaacgaaccggtgcaacaagcaacgaccacaaacacaactaagaggacagcacaaaataagagaagaggaccaccaaaagcaaccacgggaatacccccaacgagaggcgcgcattggaaaaagcaacccgcacacaaaccccaccaagcggacacgagacgggccgaggacaatgggacagagcccggcccgaaaccctcactcccgcagaccacacacccagccaggagcgctccaaaacaaaaacaaaaacaatccaggagag

SEQ ID NO: 188799 - DNA, 534 bp, Arabidopsis thaliana
ggtccacccccccccgtacggaaatctcttatagacaccacagaaaacacctgtggcccaaagtttcattttttcgtgtaaggtcagtaagaaacaaaccctttactgggggggggaggacaatacttgggaggataaccaaagggctatcccaatgggcaggaagacaccgcgcgaagccacagaggtacaatgaaagattggtttacataacacaaacacttctaccagacactcttcctctgagaccaacttcgcgcggggaagaaaaacctccacacaaatcaactaggcggcaacattgttaggcaaaatcgggcctcgttcgaaagcgaacccaaccatctatactacccactcggcagacggccaaaaacaattttcattcttgaacatcatacaaaacccacgcgggacaataagacatgcaatgataggaggccgacccataactgactatgaaagtgaacacactcatgaacaaaaccgccggcattagatcgatataacgggacgccctccaaaaaacccccc

SEQ ID NO: 188800 - DNA, 146 bp, Arabidopsis thaliana
cgtaccggtttggaattaacgggtcccacccacgcgtccggttgaagaagaagagaaacatcaagaaagtcgcgatggttttattcttatgctaataacttcgaacgatgagggtttacatcgccgcgggattaatgaccattcat

SEQ ID NO: 188801 - DNA, 673 bp, Arabidopsis thaliana
cggggggagggggggggggacaaacacaaacaccgacgccaagcaccaccacccacacacaagaccgagaagcgagcggcccaggcgaacaagaaccccgaacacaacgcagaaacaacaagcgaacaagaccaccacgcaggcgcagcaaaacacacccggcaacgcggccacacacaacgcaaaacaacacgagaagacccacgcaaagagcgcaggaaccgagccaaccaagcacaacgggcggaaggacaccaaccgcgaacagccaccgacccacacaccacaaacagaagcccacacaccggcacccacagaacagggtaacacacaacgccacaaacgcccgccggcacgcaaggcaacgcccacacaaaggagggcacacaaccgtcccacggagagacacgaacaccacgcaaacccaccaccacgaaatagcagcaaaccacccaccacgaccacgcagctcggaacgactgcaacgacaacgacgcacacggccgagggacaacgcgcaacacagagacgccgacacacaacaacgcggcgaccacacacgcaaccaacaccagacccccgacccaccaacacggcgacgcccggcaccgaacaaccaccgaggcagagacgcccggaaccccaagcaggcccgacaacgacgacccagacg

SEQ ID NO: 188802 - DNA, 1193 bp, Arabidopsis thaliana
ggaccaacacccccccggaacaggaacacagcacagccgcagacacagcgcgcgcaaccacgccaactttttctgatttgttaacaacacgcgcgagctcaacaaacaacggcacagggaaacgagggtgcacaaaataccggacacggcagggtaccacacgccccccatcacaaaacgaaaaaaaacgccacgtcctgaacacgcagaaacaataaaggcgcggaacgaacccgtcggggaccggcacgaaaggaggggacgacccagccgggagggacgcagcacgccccagagggggaccaccacaggcgccgcaaccaaaacagggacgcgaggaggcccacgacgccccgcaagtccacccaccaaaaaactagcacgaccaacccgggagtgggaccaaagtacacgcgaatctgtcaccagcacgcacaagaggaggaactcacagcacgcgcgagcggagacacacgagacgcccaggcagcgcacccagaacaacacataccaactcgagggtgagccacgacgacaaggcggcggcgcggaggcgaacaagaggcacagacccacacacaggctaccccaggccaactgactggcgggcggcaacgtcgcaaggacgccggacgcacgcaagaaagaactagccgagagccccgcgacggcagggggctcgacggaaactgggcaaagaacaagacaccgacagcacccagacccagccaaagacgagacccaccacggggcgcggggacacagaccaggcccagcccatacgacgggaacacgctgggagaggcgggaccacagcccgcaaccgcacgggcgaacgcgacgagtcatggcgccggcggcccgtatccacagaaacggcacaggtgccacggcaccaccgccccacccggctcgagcatccactgcgaaacccgcgtcgacaaaaacctcgcacgcggacgcgccccagagactacgccggagccctgacggggaggacacacacacctgaggcgcgcgtgacaaaacacatagcacggccccgcgcggaaaacacaccaaggaccggccgccagcccggccaaacgcagaagagcaggcaccacagacggagccgagcgccgggccgcagaaaacgcggaccgacgcaaaaaacgccggaacgccccgctgggagaaacaacacaacaacg

SEQ ID NO: 188803 - DNA, 1051 bp, Arabidopsis thaliana
gggccccgatgggggattaaagggtaaccaggccccgcacaaggagaacccaagaaacaaaaagcacctccaaagaccacacacttttcttttttcaaaggaacaaaaaccgaccgacacgggcaagggatgggggcgcgaatccaccagaaaaggggaaacacccaacgcggacagacacagagcacaaaaaagcgagcacgaaccacgacaaacacgcgaagaccgacggccaaccaacagacaaagaacaccggaaaccaccgaacggcaagcaaaagggagacacggcaaaaaacacgcagacgcacgaccacaaggcgaatagcagaaaaaacgccgcgcaggcagaaccaacggacacgacagaaagggaccgccaggacacgcaaccgagcggccggaagaccacgcggcgcgggggccgaaaaacaaggcacagggccacgtagagaccccccgaagggggacaggactcaagtagggcggaaagaccaaacgagggacgacggcgaagacaccatgaggcacccgtacggcccgacacacgcggggggacacgacggcaaccgcgagacgccgggcgggactaaaagcacacggggacgcacacacaggacgcgacaagagaggagaccggaacaagacgtccacgtcgcggacactgcacgccaacgcccggagggccgatgagagaaagcagaaagctccacgacacaacacagcagggaggacgagcgagcactaaggaagacccgggggagcatcgactacggacgcagcacaccaacgcagcaagcgaacagctaagacaaccaggcacgacaacaaatcgacaggcagcgacaacacgaatgacaaacgacaagcacgacggcgcgacgagaatgagaccacagaacaagaggcggcaccccgcgtgagacagagcactacgagacactggcacagaggacgaaccaggcgaggaggacgggacgcgcaacaagacggcagaggcgaccgagaagaacgacaccacagagagagcgacgccaggcgacacaacacc

SEQ ID NO: 188804 - DNA, 943 bp, Arabidopsis thaliana
agactttggcccgacacacgcccccatagctaggacacctctaagagcggccgccccccacgaacttttttcccttttctgcaaaccgctaaatcttgcacaaacctcacaaagaggggcgactctttttatcaacgcacaacaccccaccactggggccaatatgggtacaccctctgaacaaatcctgcatggggtcgcgcaataacatctcaccccggggaaggaaaatcaccacctcccaacctgaatgcttttcgccaataaccatttagcataacacattttaccagcactccccaaccataaaggagtgagacgctcctcctcgatgctaccccgatatataaaaaagaaccccacctatatataactccactactgaacataaacaagggccaccatcgagctatctcgtttgtccctcacaacacagaagctccagcactgaaaaacaccggtaacctccatcaacacccattcattatttctccgaggagattgaggccctaaacccacctctcttattgtggcatccggaaccccggccaaacaaagccaaaaggaaaacaccccttcaacattttaaccaggaacaccccgggtcccaaaagaaaaggggaaccaaccccaacacacatgggggtttgcaacaatctctccttccttaccagagagaatccggccgcccctggcaaccaaacaaaaaaaagcctttccacaccaatcccttctctgtcgccaagaaacccaggagcccacaatccccggcaaaggaacctctggcccccttctcacgtcacgcggagaatctcccgcagaaattcaacgaacacccaacatctccgactcaattgtgggggggcccacctagaaccctgtaaaacaacaccccgcaccggcccccagccggaggaagcccttatagccgaaccaaggaaac

SEQ ID NO: 188805 - DNA, 1137 bp, Arabidopsis thaliana
gggcccaatttgggatttacagggtccacaaccaccccggcgcggataaaaacacgcacacgaaagagccacacacccagaaaaatttttgatttttcctcccagaaaaacaaaatgaacgacagaggggggcgcgggaccgaacacaaaaacacaacctggaagcatctaactaaaacaggacagacaatcacaacacgcaggccaccagggacaccacggcaaggggccaggcaaagaacagacaagtctacgacccaccagccccacggagaacaaaaacgaccacgaacgcacaaagagatgccgtggcgcacccaaactctaggaagaagaaagaacaaacctggagaaccattaatccctgacgcagcccggaacccccctaaacgggaaagcctccaaagtgggggccacaaaccgagaaaacgcaggcagccaaactcccgtctcctcccgcgcgcaaacaaaaaggggaggacacacacccatgcgggcggcgggaagaccacacccataccgcaaggcgaaccacggaacagcgccggggcaccgcatcgggacgacccggcggaaccaacacaaagcgcccgcgaggagagacaaagaagcggccaccgacagacagggcggaccgcacgaaccatgcaagacgctcggagaccagacgtgaagcacgagacaaagacaccagcacgcccgactaaagaacggagggacacaggcgcgcgacaagaatcaccacaggccaacagcagaagcgacactacccccactgggagaacaccacctcgacataagggcaacaaaacgcgcggggcaagggaacagacaccacccccgagggaagaggaacaaaaggacggcgcaggtaatgcaaatctgcgcggaacgaaaccggcccccagagcaggcacacaccaggaggagtgcgggataccactaggtcgcgagaaagtgagacccaccacgcacgcaccactgcccaggcgaaacaccacggggcgaccgacgaggagacataggcgggcaggacaaaacaaacagacccataggccacacccttcaacaagcgctcagacaacacacccgctggagtgggcaacggacacacaacatgcggcgccctcccccaac

SEQ ID NO: 188806 - DNA, 1201 bp, Arabidopsis thaliana
  unsure (1)..(1201): unsure at all n locations
gaaacagcgccccgggaaaacgaggaaggaccaaaagaaagcggcacgcacccaaacaagaaaatttttagggatttaaagacaggaggacccgagccaacgaaacaggggggaggaacagggggcgacgcaacaaacaagagggccaccaaggggaaacaccccaccgcgaacaaaaagggggggggcaacacaaccaacaaggacacgcccaaaccagagccaccaaaacaggggccccacccagagaaaaagaaacaaaagacaacgcaaggcgagcacccccagccggagagagaaacccggaaaggagacaccagaaaaaaggctgggcaacacaccaaaagacgagaaaaaaggcaccacgaaaacagaagaggagcaaaacaaaacagaacgcgatgaaacaaagaacaaacaggggcgcagaaggacgccacccgagggaaacaagcacaacacaaccgtgaccgcaagcacgaaaagcaaaagggagaagggaggcaaacccaggagagaacaacaaagacgacacaccaccaccgaaaccacaagaaaaaccaaaaaaaaaacaaacccacaanatacaaatcccccccaaaagaggggcgaacgagagggggtaaaacaaagccccaaccacacancacacacacaaacaaanccacacacacacccacgagggcgaaaagggaagaacccgaaacctcgaggagagagcaaaacgataacgacaaaagacccgggaagacaaaaaaaacggcacagacgcagaggagacgaccccacccacaaaacaagaaaccacacgccacctccanggaagaaagaggcccgacccagaggcaggcaggagaaaacagcggcaaacacaaaggggaaacgccccatcacgcaaaagaacaccgccgggcaaaaaacacgcggacaccccccaccggggaggccggccgacggaaaaccaacacaataacacagaagcgaagcagaagacaacacacgacaaaacgccgcagaaacgagaaaaagagaggggcgaacaacagagaagagtgccccacccacgggcgaaagccccgcgataagaggggcgcacacaacaccgagaaaacccaagaggggccccaccaccagaaaaaaacagggaagagggaaaaccaggaaagacacaccacaaaaacacggaacacaacagaggagg

SEQ ID NO: 188807 - DNA, 729 bp, Arabidopsis thaliana
atgcacgcgccagaagctcggatcctttagagcggccgcccccgcccaccacctaattattgttaatttttatgccaaccccaaacgcaatgtttgtatcgtttgcagtcaaaataaaattccccaaactgcccctctgaactgctgttacatatcgcatagtgatgatacattaacacaacttgtactaacccccactttcctatgcaggtagcatgataaccccaaccaaaacgtgtcccacacatcctgctagatacccgaataatctctgttgcctccacaacaaccttgccacttcgctccaagttaagtttcaagtaagcaatggcatcatttcttgaaaaaaactctgaaagaaactgatggcgcacgctcatcgaacaaaaattatacctgcctcaggttcaggaacacgcctttaccagcacccccataaccatcggctcgcacatgacctctacctcgattttgggttcaaacaccccatcgtgctcccttctttcgggaagacaacattcaatttcagagtccttgtaatcatcacctggttccactctcccccatcacaaccccctgtgcatccctaccacaagcacaagtattcattccttctacacttctaaacagggtttccccaaacaacgaagggggtttttcattgaaacctccttctaggtagggctgacaaactcacaccagaaaataaggttccttacctttattagc

SEQ ID NO: 188808 - DNA, 738 bp, Arabidopsis thaliana
aattcccggttcgacccacgcgtccgctgttctcttgcggaccgcttttgaaaaacggcgacgcattgttttcatttaatcgccggaaaattagaagagaatatgggggcgccggaaactccggctaagtacgtcggaatatgtaaggattccgacgctttcaatcttatgaaatcgatgggtagggaagaaggagaaggacttggtaaagataagcaaggtatcaaaggatttgtgagaggtccgaacaaacaggatccatctggggttggtcttgatcagcctaaaccatgggcatttggagacatctcagttcgattacattctcaagaaattggaagtgcatgctgctcctaccaagactagcgggaatgatgatgattcagatgaggaagatgaatgtgaatatgatgctgtcaaattatgagcctgccaagttgacgaccggtgctaaagtcactcgtccacatggaaggggtaaacctatagagaaagggaagcttggcaattccatactcctgtaaaagatctcgaaggaatactggttaagcgaacctggagatccttctacgcagtctgtgaaactatccaattctagggatttgacaatatatctggggaccaggatgctctttttaaagacccaaacattgagaaggcttctcccactggtggggtttaaaatcggcatgtcctggggtatccctggggcctatttcgccatagaaatcaaaacct

SEQ ID NO: 188809 - DNA, 595 bp, Arabidopsis thaliana
  unsure (1)..(595): unsure at all n locations
gtacccgttttgggaatttaatggggacccacaccaccacgtctcgctactaccactacaaccgagcctcccacatagacaggaaaccacacgttttattgtttatttgagagagacccgaagacagcagcacccatacggtggctcgcggggaggcaagtcaacacacacggagggcatatgcacggacacgaagcacaatggaggcactggaacacccgacctcaaaaacggggggacgagtcgtacgtatgtccacagcactcaaagtccacccatcccggcgcaggacccggctaagcacccaaaacgtcaacatgcgggaaatacgatccaacacccaaaacgggcgagcgcagaacaaagctcgactggacagcggatggacatcagctggaaatgacgtaaaggctaaaccagggtccacacgcgacccctcagatacgggcccccggctagagcaatccaaacagtggcataaaacccacatgggctatcaaaanacccaactgaaacgaaacacggccgggacagggacagagcctgcccaacggcaccacacccgcccaagaggaggcgggcaggagaagcccta

SEQ ID NO: 188810 - DNA, 126 bp, Arabidopsis thaliana
agcggaggggattaggttggttttcacaagggggtgtgagggatgatgatcaactttgtgttttatagggggatgaggtgcggaggtttttgggtttggaagaaggtgtggagtaaggggaattgg

SEQ ID NO: 188811 - DNA, 695 bp, Arabidopsis thaliana
attgggaaaggcccccaccggcgagaacaagcacacccacaccgaatttactacgcacaaacaaaccgcggggggagccaaaacacccagaccgcccccccccgaaaagagaaccgcgcgacaaccagcaagacaacacaacccgagccgccgacccacaacagcccaaccccaaggagagaggaaagagcccacacaagggcgcgccccacaaccaccgcaagaacaccgcacggacgaacgaaacaagcaacccagcaaccggcccgggcacaccccaccccccacccacacacccccaacccggaggcggcccaccaccggcccaaccgacgcccaccggacaccccccgaggaagcgcccgccaacggcacacaacagggcccacccccgcaaccaaaagggcgcccgcccgacccaccccagaggcccgacggcccgcccccgaacccgcaacccccaaaggcacaaccccagcgcaggggcaccggccccaacaggacaacggccaccaacaacccgggcaacgcgggccccacgacaaagcccgaaaccgccccaccacaaggacaacccaaagccacccaaacccaagaggccccaaaggcccacaccccccaaacccggcggggcccgccccacgaccaggacaaaccaccccccgaaggacccgcgcacgccgaacaccggccca

SEQ ID NO: 188812 - DNA, 958 bp, Arabidopsis thaliana
  unsure (1)..(958): unsure at all n locations
ttttgggttcgacccacgcgtccgcctggagatctgctcttacttcaaatgacaccccactcggctcttgattttcttcgttctggggtcaatctcaatccctggaatgtgtcttcaccctcctcagatctttctacatctacttcctgcgaccattcaaaaaccttcgccgatacggttcatgggcatatcatcacctggaccatcagacggaaccggtaaagctttcgcctttcagttagcccagaaaggtcttaacccttatactcagatgctcgtcaacccagaacacgcctccaaagaatgtctcctgaatctccatccaggtatcttaaggcaattaggtcactaacttcacgaatccttcgcaccgtttgcggatgggcttctttcctgggagaatactgcatgaatggtggtgcaacacgggatttatagggaagaagttttttcgaaaaggcatttaagcactggtcttgggcgattttttggatatcatattataatggcctgggcagactgatcctttaatcccctcttagtggcctcacacgctattttttctcaatcgcgaagggcctggcattggaaaagaaggtttggattcccatattaaaacctttggaatttgaaaggaaaccaaaatgtgttggataagggagaccttatctatacaggtgtacccttcatacgccttgtgggttgggcactttaattattgtccttctatagaaagggaaagcacaacgggctgccttctctaatttaaacctctcgggggctctcttcggggtggcctgggctgggcctcaattcatctcctctcntaccggacatccctttccttaccccttcctgcgactaagggccctggggggccccaaaaacaccctcaccggatgggatgtcaggtgtcaaccatacggacggtcctccccactgcttccgagtgtataca

SEQ ID NO: 188813 - DNA, 404 bp, Arabidopsis thaliana
tctgaactatttgcaaccccaaaaaaacccaactgtttagcccccgggacccggccaaggccaacgaacacttccggcaccagcacccttcacagcccgaaaacgtagggccaccacgccaaagttggacccttccctccaaaaccatccaggacacaccctctcatggactggagaacccggcccaaccgtcccccaaacaaccccgtcttcggacaccaacagcccccccatccggaacaaggccccacgcaccccctcaaccacggaccccccccatcacatgcctaaaccccacgcatgcagcccgcgcccaccccacttcacagatcccgggcaacatctcatcggcccctccatggccgcatgactttcccccctacggggaaggtaaaaaaaccccc

SEQ ID NO: 188814 - DNA, 467 bp, Arabidopsis thaliana
tgcgcacggaaagcctccggataccaacaagagggggacgagcctgagtctgagctaccacctgtttttaacatatatcttgcaaaagcacgaaaacaaaacaaaaacgctgtagagtgtgtggctgaatccagccagaaatcaatgttgagaacgtaaaccaggacatgaattgtgacagttctgaaaatagcaagtgaagagtatagagagaagcacaagacaagaaaaaacacttaatagacaattgacgggataaacaagtaaaagacaccagttacagatgtcaagaggcgcgaagacgcgccatattgaggtattgcaagacgagcaagattagaccgatttaacagtgaccaaaaacacaagacgttaagacctgagaatgcaatttattcagggacccaaaccgccttgagaattcatggacttaccctagtggagcagtggtgtataacaaaagggtt

SEQ ID NO: 188815 - DNA, 867 bp, Arabidopsis thaliana
cggagcaatagggtagggcaccgcccgaaagcacgagagggacaaagtaaaaacccacggtttaatttgaacagagaaacaaaagggaataacagaaagacgaacaagggcacacacgcacccaagagaggggcgcggcaccagcaggcgcacggacgcccgcgagcaaaaccgggaaaacagaaaggaacacgcggagggacaaaggaaaaagaaggcaagagaagccaaagaaagaatcgggcggcccaagaaaacgggggcggggaacgaaagaggactaaagcgagcacacaaggcagcggcataaagaggcaaggcaacaacaggggacaggacccggaggacagaccagcggcggcggggaaaagaacaaggcggggaacagaaaagagtacacacggaaaccgggggggagcacagaagcaacgaccggggacgacgaaaaaagggacgcaggcacgggggaaggacacccaggggaggagggcgccggacaccccaacggaaggcagcggagcgcaaagggcggaagaaagaaaaacgggcgaagcaccagcaggccctgctaaaccggtggcacgcccatggcaccaggagaaaaacaacagagggacgggggcactaacacagcggcgcacgcaggggggcaccgggagggcacagagcaaataaggggcagcaaaaacccccgggcggaaaaggaacaaagaatgaaaaagaggagagaatccgccaaaaagagaggaacctaagggaacaaggaccgagcaagggagacggccaccgcgcggggaacgaccaaacgggggcgggagagggaccacaaacacagcggcgaggaaaaagcgggcagcgcgggggaca

SEQ ID NO: 188816 - DNA, 445 bp, Arabidopsis thaliana
gagagcgcgggaagacccaaaggacaaggattccattgggaaaaaccagggaggggacagcgaggagactaagacaggacaggaagatagaacccggaaaaggagcaaagtagggaaagggcggagcagatgaaaaccgaccaagagggaggaaagggaaggaaggaaaaaaaaaaagacgaaaacaaaaagaggaaaaagaggcggacaaaggtgaagaggacccgaggagacacaggcgaaaaacgaagaaagcaagagcccgagaaaaccaacacgacaagagagaagaaaaaaacaataacggagacggagagaaacagacaaaggatgacagggggagaagggcgaagaggaagaagccagaaccggaggaaaacaggcagacagccggaccgggaaaaggcgagaactaacagaggacaaaggcgagaaagcaaagaca

SEQ ID NO: 188817 - DNA, 443 bp, Arabidopsis thaliana
cggggaccagccacccggtgcgagaaacacgatgcaagagaaaacacaatgaccacggcacacccctttgtctgtttttgctacagaaatacacagaacgacaagacccacaacgcgatggggggggaagcatgctgacaatcccaccgaaaggggacaaacagggcatcaagaatcaagcaagtaagaagtaacggtcgaaccaaccccgcctagagcaacaaaaacaggaacatggaactatacaccctacaggagggagaggcgcagcacgcacaccaccgggatagaaacaaacaaagccgaaggatcacacacatcaaaaacccctggcccgcacacaaccgacggaactcacccacagccaccaaaacacacctgcgggcccaaaaaagccaccggggaaccgcagaagaagcccacccacacggcacactgacacg

SEQ ID NO: 188818 - DNA, 589 bp, Arabidopsis thaliana
  unsure (1)..(589): unsure at all n locations
aaaacattttaggatcattttgggagaaaaacttttaaggtgatatggccataaataaaggccaatagaaaaaaatgaaaagaaacctataggggatattaaatgtataagatatcagaagtaagagatagaaggctttagaaaagatagaatatattgttaaacataaacataatagactgagatgggagaacaaatagatataccaatgagggggagaatgaaacctctcaagaaaagagtaatgtcaaactatgggcgacaaagggttaatacaaaggaaatttatggaatgggggttaattataacccaaaatgctttcctttttcttttggggaaaagggggggacaaaaaacggggggtatcataaaaaataaatgaaagggaaaaatgggatggtcacagtaaaagcggggggtaaataaaaggtggggtgaggttttatataaaaaaaaatacgtataattaggaactcaggaataataaaaaaactacgaaagagataaaataatgatgatgacctaaaatgtgaaacatacgggtcaaaaagaatgtatttgatagangaagacgcagcgtatgatcaa

SEQ ID NO: 188819 - DNA, 507 bp, Arabidopsis thaliana
tctgcagtaccggtctcgaattcccgggtcgacccacgcgtccgtatgaaggggacattacaaaatggcacgggtgacacgttgatattaataatccatgaatgatctggtggttgccgcttctggaatgtttgtacccgaattggcagttctcatagaagtgcaagactctagctcttctgaggcctatcggggacatactaccctgtctatgaatggagacagcacagattgcacaagataaatgagggtgacttgtcagaggcaccagcacttcactggaaatgtacgcgttattggccgcacatataggcagtggcattgaatgtcaatcatgatgaccactgtcagctgtggcatactacgccactgtctccaactagggtgtgtcgtgattacatatcacagcacactgcgaatgggtatggcagaattcacgaaccccgcattcatatactaacccgtaataatagcaacctctgaattgcctggtttggcttgcttcgt

SEQ ID NO: 188820 - DNA, 991 bp, Arabidopsis thaliana
  unsure (1)..(991): unsure at all n locations
caaaaaaaaaaacaaagtttttcaaaaaacaaagaaagaaacgcanagaggggggaacaagaaaaagggggaggacccccccaaaaaaaaaggaggaaaaaaaaaaagaagaaaacaaaaaaaaaaaagaaccaagaaggaaaagcacacaccaaaaaaaccgacagacaacacaaaaaaaaaacaaaccaccaaaacaagaacagaaaaggaaggggaaacacccaacaacccaagacgaaaaaaaaaacacagaaggaaaaaaaacccagggcccaagaggaaaaaaaaaagaccccgccaaacaaggcaagaaaaagggccaaagacccaagggaaaaaacagagacaaacccccaaacccaaacacaaaacaaaaaaaggggcgggaacccaaaaaaacaaaaggccccccgacaccctctccccaaaaaagaaaaaaccacaggaaccggaggggcaggcaaaaccaaggacgagagcaccaaacgcagaaaaaccgcaacgataaaagagggggggaccaacccaacaatacctacaaaaaggggcccaaagaaaccccccaaaaacccacatcccccggcaaaaagagacgtctccccaaaaaaaaagacnngngccaaaaaaaaaccacgacgaaancaaacagcaagaccggaaccaccaaaaaacaagcaaaaactccgccagagaacgccaaaacaaacaagcagccagaaaaacaaagcgggaacgcccaaaaagagcagacacaccaaacaagggaggaaaaaaaacaaccaccacccaggaaaaaaaagcccnggggggaaaaaaaaccccgggagcccccaaaacagaggggcgcccccaagggcaaccacacaacaaagcaaaaggccccaaaaagaaaccaaaaacccaaagcacaacacggcagaacaaaaaacaacagaaaaagaacacaggaaaacagaaacggaacaaccaaaacaacaccgaacaaacc

SEQ ID NO: 188821 - DNA, 410 bp, Arabidopsis thaliana
  unsure (1)..(410): unsure at all n locations
tgacttcggttgcacgcatacgtacgctaggatcctctagagcggccgccccttttttttttttttttaagatttttaaaatgaacagagttctctcataatccaaggctttgcctttgatctggttacaaacatttcttatatatttccaccagaagaatgtatacccaaaacttataacaggtttggcattcccaagaaaanaatcccggaactntcaaaagccgaatttttccattaaaggccaacgaaagtttcaaaaccccaaccccaaccaagnaatggaaaaacccacnanaactttaattattaaccaagntntttttggccaatttccaaggaaanaaaaaaaaaaattttccttgggaattttccacaagnccgggggaaagtttttccaaatgggaaag

SEQ ID NO: 188822 - DNA, 662 bp, Arabidopsis thaliana
  unsure (1)..(662): unsure at all n locations
gggaggaggaagaaggggggcgcgcccacagaagaagacacccacatatttttcccgacaaccgcagcgagcgagcaaaacgccaacncgggaggcgggcgccgcagaaaaacaagcagagggcccccccccccagagagccaaaagaggggacccgacacacaacaaagaggggcgagaacccgcacccgcacaacgacaacaggagcagcgcaagggccccgaaaaacccccgccggcgcacagagaaccgcagcaaaaacccgcaggacacgaaggccagggcaccgcgcgaccgggcaaacagcgagggacgccaccaccggaccaaccaaggaggggagggaaggaaaaacgaaagacacaaaggcgcagaagacaaaaacgaccaacagcgcgaacaagcgcgagacaaccccggagaaaacaacaccaaggaaccccccccgtgaacggcacacaaacagagagacgaggacaccgcacaacgagacgagagggacggacaagagagaaggaaagagcgcaggacaagaccaacgacgacagcagagcgccgcgagcacacacccacgcgcggagccagaacaggacagacaacaccagacgaggccacgcacgcgcgcagccgacgcgcagaccacgcaccgcagacaggagaa

SEQ ID NO: 188823 - DNA, 590 bp, Arabidopsis thaliana
cactatcaactcacactttttttgcacgcatacgtacgcttgggatgctttaaagcgggcggcccttccttttttttttgggtgtatcttttatttgaattaggacgaggttcttccactgaattggcaaatctataaaaaaccaaaaaatatccatgaaaaggaaaaaaacgaacaattttgaacactaaacctgtgacatgtggcacatgacacctacccgcgggactctatgatatacttttgactgcctcttattatctatgcacatatgcaagcttttcacgcattccatatgtatactgctgtgcttgcaaactgttatggcttgtaccgctacatccgattacctaaggatttactaccttataacgcttgtatattgcattctatatatcgctgatgaatagttgacaccttcggctggattatgaaactgttgtcaatgtaaacaatgaacccacagctggtaaagaggtctcaaaaaactacctttttgaattgggctcttgtaagaaaacttttcggaagatagcctatcgctgcataaggacttgaggtgatccttcaatactaacactttaaaactt

SEQ ID NO: 188824 - DNA, 416 bp, Arabidopsis thaliana
  unsure (1)..(416): unsure at all n locations
tgtttgcacgcgttcctaaacttggattcttttaaacggcggcccttnttttttttttttttttttttttttaaatttcaatttttacctttttcaaaaaacattaacaccttggttttaaatttacttatacccaaaagttattaataggaaactataccaacaacaaagaattttttaaatataatttttttacatattttagtacttatagtcgtttaaattactcgttctttgatctctttttgaatctattaagatatttagttcatggttgattactcatttgacttgaatttttttcagtttgtgctttaattgacaaatctctttgactttagaagttttttctttatttcaacttaattgctagacacttttacccttgtgaattctgattacattccagattgatt

SEQ ID NO: 188825 - DNA, 271 bp, Arabidopsis thaliana
aaaagagacgacacgcccaaaaaaaaaaacaaacgggaaagagcgaaccaggcaaagcaacgagcacaaagcaaagggacacagaacgaagaagaaaaaaaaacacaaaaacccaacaggaaaaaggacggagagaggagccccacagaaggcgcgaggaggaagacgcgaagagcacagagacaagaccacgagaaaaccggaaagaaccaacccggagaagaaggacacgcgaagccgcaccgaagcggaacaaaagaagaccacaaac

SEQ ID NO: 188826 - DNA, 1122 bp, Arabidopsis thaliana
  unsure (1)..(1122): unsure at all n locations
aagcttggatcctatagagcggccgcccttttttattaaaactttaaatttaaacaacccccacgcaaagaaagaaaacaggggggggggaggtccaaatccatctttatgagctcacaactacaaaacaatcatcagacttgaccccaacaaaattattcatacgcactataaaaacattcaacaaacaccatatacttgctttaacacacgggatttcgaacttggatccttaaaaaaaaattttaagaggactaacatgccgcttagaaaaaccatctgttggaaacccaaacgattttccactaattcctaacccttaacccactctttctttgtatgtgcctcccaatcccccaggagcgcggaaaactgagttgttttccccgacccctataaggcaacagatctcccctggggtcttatattaaaaccttaaactaatttttcacccttcgttgtttttggggtcacctaactccaaaaacttatttgcgaactattgcgtttttaaaaaccatagtttacacagttcactattttatacagttcccacgctataacaaaggttaaacacttccttgacaaactctttcttagccgctacagaggncaaaaccacacactcactgtttaacctctttaagagacttttcttaaaacgccttctatatgtcagaggacctcttctaagtgccctctttacataagaagaaatttcctggcactcacactattataccatatttatatccgaggcgctcttctatatctaaaggccccaacaccattatatttatagacgctcctaacaatacccctataaacggcttcttctatttattacaaaatatactgaaaaggcctatttcctccaataccgttaaatttgaaactggtacccttgtgttaaagggaaacccactctttaaacttttttggtagaacacacaacctttttcttaagacagggagccagcctttacaactcctccatttttccgcaataatttggagacattcacaagcctccaaaaaatgatttgtggctcaaaaaactggggaatttatggtgggaactatacgagagggctttaccaaaaaataacctaataagccaat

SEQ ID NO: 188827 - DNA, 507 bp, Arabidopsis thaliana
atgagcacttgacgttcttgcacgcgtacttaagcttggttcctctagacggccgcccttttttttttttttttttttattgtaactggttcaatttcatccaaatttttttacacaattctttttactatatgaaatttacatttctttcacgaactttacttaacgttataattgtccaccaaaacactttagctatacaacgaattttaaatcacagccctaattgggttttattaacccctcctgtattggactgttaataattctcaacatgattttcgattgacaggagagaagttttgctttgtgaatttgctgctaaacaagttagcaccatacaacatttccggttgtccttggaccttatacttcttggttacagatcacactttgttacagcggatgccttagatcactgaattattcattaatgtgtattgtgcgtttgatttcctgttgttttctgtcatggaacccgattgccattgtgaagattgtccacca

SEQ ID NO: 188828 - DNA, 375 bp, Arabidopsis thaliana
  unsure (1)..(375): unsure at all n locations
ccactatgacgttgcatgcacgcgtacgtaagctgggttcctttaaacggccgcctttttttttttttttggattaaattgaattaatttggtttcctgaaattaccaccccattccggtngttggttttactaagggaaaaaaagggttaaggcccaattgtggttgaaaagcccatgaggcactttggacagttgcgggtttaaacggtacccaccgtgaaaacaacaggatggttcatttcactaacttatccactgacactcaaaaagtcctgcctaccacaagtgataagcgtgtcgacacatctaattccgccaatagccgggaacaatctgttatggggatggcatctacgtaattaaacggaaaaat

SEQ ID NO: 188829 - DNA, 664 bp, Arabidopsis thaliana
  unsure (1)..(664): unsure at all n locations
tgcacgcatacctacgcttggatcctttaaaacgggcggccctttnttttttttttttaaatatgtttaattnaancaaagccaaacttttacaatgaaggttttgggtttgccagggaaatattttaaaccaccacgttattattgtatggtagggaaaaaaaaaattaaaaatattttattttgtcaatttagaaaccccaaaaaattcgggttggtattaccacccaagaaaaggaccagaaggaccaaaaccccaatggcaatatgatggtgagaaataatttgggggtatgcttatttggcttctccattgctcataccgctctatctctttttatcgatccgaagctctttttccgtaaatactttgagtacaacttttggaacgttaatgacttgcctcggagataaatttgaccgagatgtagctggcatggcttcacgaatccttaaaatgcaccacatttagcatcttcttgcatgtcttgaagaagatcttaaatagcccgcatagtgggtaacaccaaaagaacggcgccccttttttctttgatatcccttgaaaataaaaaattggtcgaaactttgaagccattttcaactggtcccattgaacttggtccctttccttggttttctttccaagggtccccaaattttt

SEQ ID NO: 188830 - DNA, 554 bp, Arabidopsis thaliana
  unsure (1)..(554): unsure at all n locations
atcgctttttttanatcactatgagtgtttgcacgcgtacgtacgcttggatccttttaagcgggcggcccttttttttttttttttccctttttttttgaaattctttttttagtaaattgaaagatgatttgtgcaaatttttcacttttattccgcttaaatttattcgtttaggataacaatttgtttaatgaccaaactttatcataaacattatatttgactatgttcggtaaaaaactcccgcaacttacgaccagaccttattatttcgatcttctcacatattacgtctttattgatgctagccattttgaagtgcgtgcgccctgttccatagatccgtggttgggtggactgcttgtggggcttctcggtatctgcccgtaagtattcgattgggtcccataacaccgacactacgaaatttgctttgaaatttccgtgttaggatgtttgcgtggcttttgtttgcgctatattttgaaatggctttaacttatcatggttaacccattaaccttataaactccctgatttgcttttgcgta

SEQ ID NO: 188831 - DNA, 897 bp, Arabidopsis thaliana
  unsure (1)..(897): unsure at all n locations
cacgcacagccacacacaacccacaacaccaacaacacgcacacacacaacagaacacgaaaaacccaaccaacacaaaccgcccacaaaacccacaaacagccaccaacacaaaccccaagaaccccaccaaagacccccacccccagaacccaacacaacacccccaacgcaaccacaccccacaaaccccacaaagcacccaaccccacaaaaaccacccccccacccaccgcaccaacacaagaacacgcaccgcgaacacacaaaaacaccaccacaacccgaacaacaaacccagcacacccacacaagcccaaccagacaaagacacgccacccacagacagaagcacggcacccgacacacacaaggccaaaaacgaaccagcgagagacccgaggacaacacccacgacacgacacagccaacacccgacgacacgacgccacaccaacagccgccacgcgcaaacgacaacaccaaacgcccacccaacaccagccagaaccaaccgcccgcacgacaccccccgaccccagagagagaaccgccacacaaacgcacaaccacgacacaccaaaaaaaaccaccgagcaagagccacaccacaacaggaaaagccagacccaacccccaacagcgaccacagacgcgggagcgcacaccacaaaccaggacacccgaaaacgcaacaacagacccaacaccacacacacaacaaccacaaccaaaaaaaaaacaaacggccacacacccagaagcaccaaacacccacccacccgaaacacaagcaccccgcagcaacaccggacaacagccgcaacaaaaccacagacaaccacccangcacccgcgcgccaaccacacgcacgacaacaaccgacacccccacaa

SEQ ID NO: 188832 - DNA, 480 bp, Arabidopsis thaliana
  unsure (1)..(480): unsure at all n locations
tacgtaaacttgggaacctttaaaaccggaccgcccttnntttttttttaaaagttaatttaaagtaattccaaataaaaaaagttttcaatcaaaaaaaaaaataaataaaaattaaacaaaattttcattacaaatacagaaaaaaacaatttgtcatttccacaaattatttattttttattaaaacatatcaacgttaatgtaacgtataaaataaaaaaaataattaaaaatacaaaataaattatttataattaaaatataattagacaaaaataaatgaatattcgcgaattatttacatcaacttgtatacaataaaatagttaataacattttataaatataaattactttcgacctgtacgatcgagactagtaaatcaagattaaaatgtatagatattctttaattatctaatcaaaataacgaaaaataagtggtctagagacaataatatggtgctatgcgttatg

SEQ ID NO: 188833 - DNA, 181 bp, Arabidopsis thaliana
  unsure (1)..(181): unsure at all n locations
acgcgtctatagaacacttgacgtcgttgcacgcgtacgtaacgctggatcctctagagcggncgcccttnnntttttttttttttttttttttttnnnnnacancattcaaccgcattttttacttttgattcggcaaaatgcaaccacagaaaaggaatttaccagagggtaaccgtaa

SEQ ID NO: 188834 - DNA, 242 bp, Arabidopsis thaliana
  unsure (1)..(242): unsure at all n locations
acgcgtgcatataacagacatgacgtcgcttgcacgcatacgtacgcttggatccttttaagcgggccgcccttcnttttttttttttttttttttttttttggggggatcttaagagtttcatcaccatgtgaagaggatcatttttcaaccttttttattttttttaccaaatccgcggccgggaaaaatggggaaaaagaattcaggttagtttggcgcccaccttccaaaaaccccca

SEQ ID NO: 188835 - DNA, 404 bp, Arabidopsis thaliana
  unsure (1)..(404): unsure at all n locations
gagaggtagaaacgcgtgatgaataacaacatgacgtcgttgcacgcacacgtacgctagcatgctttagagcggccggcctttttttttttttttgaataatttttataaacgtgtgtcccctaaacgcaaaattaaaagatacaaaacaatatatcctctaactcactcacgttcgacggcggactaaagcttgggccgctttgaacgggcggatggaagcaggcccaaaacttcgtctcttgggcnnatcgaggcgggcctaattccgtctgaattgcggcgtggggtnttcaacgcggcccggctcccaaaggcgattttatggcgtgaaaacnncatacatnnttgaagggnaatctgattgggtctcccgaaaatttaaaacgcccctctatcccatc

SEQ ID NO: 188836 - DNA, 487 bp, Arabidopsis thaliana
  unsure (1)..(487): unsure at all n locations
aaaaagtctattatanaacactatgacgttgtttgcacgcgtacgtaaacttggattcttttaaacggccgcccttttttttttttttggaataaactttccaaaattttatataaatacttttcaattaatattaaccctatggtaaaggccaaatacaaatccaataaaaaaattctattagataattgttgaaatacaaaaacaaacaaacttaaattgaaaaattctttataacaaagaatcttttttgggatataaacttatttttttaatgtacaaatccatgcagatctctaaatattggttcataactgtcttgtttagtgtcttgagattgtgttgtaactttgccctggtatcatcttaaattgaataatgaattcagaaagtaagttaatacttcattatcatctacataaaattaagtcattttctaatacgactgtcacggatcacgactagtcactcttgatataatgaagaa

SEQ ID NO: 188837 - DNA, 1148 bp, Arabidopsis thaliana
  unsure (1)..(1148): unsure at all n locations
ccgggggttttttaaagggcggccccccnttttttttntttttaataattaaaaaaaaaaagaagcccccccaaaaaaaagcgagccccacccccacggcctccccggggaaacacaagaaaaagcccccctcctttttttttttatacaaatcaccaccatctctttttttttttttacttactttccttaatatttagatatatcctcactctcttccctccctggcacaaaacacagaagggccgggggaaactcttccgctcttcctccccctcctaanttcttactatctccctcgcgttcgttccgctaccacatatacatttttatttgttttgtttccttctacaccctacattgtgtctggacgtttctcggtgcacgtcgcgctccacccatcccactactctcttgttctttttccgcctccctcccctctcaacctcccgtccggacacaaccactgaccttatcctctttatctccgccgcggcgcgtcgcgcgggttcttttctcctctctctcttataaatcgccgaaacagagtactattctagtgctgtttctttttttttatccatcctccctcgtcttctcgttgccttctctctcccggttatcctcttgttcctcttctctccccctcttctcttctcgcgacctctctacagcttatcccattactttcatctctccctcttctccttctcttttgctcccttgccttcggatatctatcgacgcttacatctttcatccgctcctgcttgtttacatcttctttaggtcgtttctttctctgtcaactcccacttcccctcttgttttggtttgtttattcgacgaatgatctctcccacctctccagcgtgactagtacgcgcttctgttttttttttatctacgatctcaacccaccaccatctcctcacttgtccgcgacgctctactccgcccgtacctacacaaaacgggtcgtctcttctatcctctttgcggggacggcgcctgcccncgttaaaatacaacattttcacttttcttctttctatacccctccctcccttgtttaacaccccaccttcttgctactttttctcctcgcgtgcctcattcttctactctaacatatcccccctttcccc

SEQ ID NO: 188838 - DNA, 422 bp, Arabidopsis thaliana
cctgcagtaccgtcgaattcggtcgaccagcgtcggaatgtcagtgtggaacaggctgaaattgttcacgccttctcaaaatactaaggggggtgtccatgccaagactgaccggcaagatctggaatgtcccacactaaaacgtggtcagaggtcaagatcgacagtgttgactagcggaagtattatgattgggatcaacaataatgattttgtctgatatgtgcttgatcttttagatgctacaggacgatgatcgaacgtatatatagaatgcactcctgggtcacgcactagatatttctctacttacgtgtgggatttgctatagacgagcgctatctttaagaagatcagcgcatgacaacgagctaagagcgtgctgcgagtgactagctttccggtggtgagcaaagtaagag

SEQ ID NO: 188839 - DNA, 468 bp, Arabidopsis thaliana
gcagtaccggtttcggagtcccaggtcgacccacgcgtccgggaaaatgcaccatatattgagaagtactcggtgtgtaataattagctccaatcctcctctcctctggcataactgaataggtggaatccccatggccaagtattatacggcacggtcgggaattttctacaaaaaaacttggtgagcgactcataacgaaggcttggccaagggaggttttttgaatgggatcaaaaataatataatcgtttcatatgtgccagatcacgtagctgtcaccggacccgattcgtttgaattcgagtgatgcactgctgcgcgtcatactcgttatgagtatactgacgctgggggttagctatagacacgcgtatggatttgaatacgaagcttaggacaagcaggtattaaggatctgccgactgcctagcttccgcaagggtagaaaatgtcatgtttgcacac

SEQ ID NO: 188840 - DNA, 482 bp, Arabidopsis thaliana
  unsure (1)..(482): unsure at all n locations
cgaccacgcgtccgcgaaagaacagacncatctatcatcggatccatcaagctagnacaagaacacccaacgcaatcagacgactaaccgatgatccgcaccgagacgtcgggaaactcttaggaatctggtcgcatcaccgcaacacggttctggtttacgagtacatggagagagggagcctgaggaaatttttttttaaggagggggaaacaaagaagatgagatgggggaacaggatcaacggtgtgaaatgggtggggtgagctcttgtgtattcgcttatagatcgggtccccgcgaagggtgagcgcgatctaaggagcgggaaaattcctctacgcgaggatatggactgaagatggctgaatttggcacctgcaaacttcttaaacccgaattctccaatgtggtgccccagtcggtggtacttacaggctttgctacgtccaaaactagcctttgcgaataaaggtgacaga

SEQ ID NO: 188841 - DNA, 505 bp, Arabidopsis thaliana
  unsure (1)..(505): unsure at all n locations
cctgcaggtaccggttccagnagttcccggtcgacccacgcgtccgcatagatttggctcatatttaatatgacactgtctattgatatgacaatagtcctcctcgacgactgacatgtcatacaagactagatagcatatttctgagtttttccggagatactctaataaccttctcaaatgatagcacacaatgccacatgactcaccgtagcagactgtactttagatgggaggtctaactcatgatactctgaccacagcgcctgagcatgacattccattgatgaatgggactaccacagttagcagctcatgctctactgaagagtctcacagtactgcgtgtatatacatgcacgacactgtgtacagaattgactaagcatgccaaaagatacgagcgaggctctactcttgtacaactaatctagactgctacatctgtgacaactatctgagtgagtctgataagatgcgtaaaacagtccaatgggtctccagc

SEQ ID NO: 188842 - DNA, 523 bp, Arabidopsis thaliana
ggcgcctgcgggttccgtttccggaattcccgggtccaccacgcgtccggctaactcaactcaccaagaagtttacatgctaaagaggactcagtggcgctcctgcgatgactctccatgtgaggaaatacacctttggagcttagaaggcagtactactcgaatctaatgcctaattggacaatactcttcctggtggtgcgtaggatactaatattccatataatcccactcctctccatgctgatacttaacattaacatacttcattacttcaatgctataggcttgctcttgctgccttacttgcatgccctactcattctacctatggcccttctttgaccatgtacttgtccgccttcaacgctgctattatggcacactatttgagaagaacccctacattactcggatctcactgacttccatgctccctacgatctacgaccaacggctaattgagagctttgatctcacgaggtacagaacgattcccgtcgatatatctctaaacaaaata

SEQ ID NO: 188843 - DNA, 490 bp, Arabidopsis thaliana
  unsure (1)..(490): unsure at all n locations
ccacccacgcccncgcacaatctcagaatttgggagaagcaaaaggccgcacgagagccccagaagcggcccgccgcagcagtgacgaagagcgggaagggcaaagcctggctccaacccaacgaaagcaccgaccagcccatggccaaagcccagaaaaacaacaggaagccctgggaaggaaggagcttctctttaagaagcgcaccaagaanccacacacaggccacagcgcgcaaaaaagaaaaccgccaaaaaagagagcggcgccactcctggaaacgaggacgaggaagggaaccccgagaagccagggccgccacaaagggcaccgggcgaggcggaggaagcagcgcccaaacggcgacgagaggaagaaagacagagagaccaaaaagacggacaagcacaagacccaagacccggaacagggcgggcaaagggaacgagcncaaaaacaagcgaagcacgaggaaaagaagcacaagaa

SEQ ID NO: 188844 - DNA, 459 bp, Arabidopsis thaliana
tcccgggtcgacccacgcgtccgcgattcttcccggagatcgggaagaaggaaaaatggctttctatggctcttcgataacggtttagcatggtaggaattaacagagggcaggtcaaagactccgctcgatgccaatgaaaagatccttttccacattgtggatttccctctttcttaaccaactctggtggttggccgatttgattataatgattccggaccaagaataattgtggctccttgcctaacaaaaaaaggattcccaggctgggggccaaggactgtagatacccttagaggggagggaaccgcttaaaaagtttagtgactttaggttctggcgcccactaagaatgcgactgctcaggcggatggtttagacttgcatctgcaccaacttatcagtcgggcgctcgtgcctctgatctacatgcctgatcatggctaatgagctctc

SEQ ID NO: 188845 - DNA, 425 bp, Arabidopsis thaliana
  unsure (1)..(425): unsure at all n locations
gaccacgcggcggaagagagaacgtacgggggggagcgcaccacgaagccccancgggggagcaccagcagacgggcacaacaccccacggacgaacccaaagcaggccccaaagagaagggaccaagcgcacacttgctgaaaggggggggaccaaccgaccagaacggaaggaaggacaaancaccggaaacagaggggcgagccgaaaaacaaaacgagaaggccccaggccacgccccagcaaggcgagacggacacncaaaacggggacaacaaacgaacaacaagcaaaaagccaaaggacacgggggccccaagggacccagaaaccggccacagngcaggcagcaccagaaacaaagcgaccccggggaaaccccgggaaaaacagcaaaaaccggcgcggaaaaacggagacaaac

SEQ ID NO: 188846 - DNA, 470 bp, Arabidopsis thaliana
cccacgcgtccggttaattgaggaaacatttgcccggattgtggaacccgcgatgcagaggatctccttgcaatctttggcgaggcacgctaagcagcacgcgtgtaatcaattggcctccattagtgataatcctcgagagcctgggctcggccaacatatcaaacagagccagaggcggaactacttcgtcgtttgagggtgagaacccgctgaggtgatcgaccacaaggagattggtatgtcttagactaacaggcacgaagatctgttccataaggttctacgttaaccctacacactccgagacacttctccaaaactgtaatatgcccgaaagaccatctaagtgccgaagccatacttggtccatgtgggagacacagaacgtgtctcattgtaagaaccatcgaagactaaacgaccccagagctacccatgggaacaaataaaaaccgggtttgacaaac

SEQ ID NO: 188847 - DNA, 418 bp, Arabidopsis thaliana
  unsure (1)..(418): unsure at all n locations
cagagtaccaagccggcaaaccctacaagcaacaccagaagcacccaccggggcgccctaaaacgattcaacggcccggccgacgacaggggagagacgggcaaacccgcgcaaccccaaccggaacgggggggcagaaccacccccccccgacggggagcgttaaatacgaggggggccagccccaaccggccgcccaaccagacaccaagccggcaaggcccgggggaggggcccggnagcagcgacaaaaaaacagccaccgccggccgacccccgcggggagacgcacccccaaaaaggccccgagcacccgcccaggcccccagggccaacacccaccaagccacccccggcccaccccaagcacccccaaccggaggcgcacgaacccaacggacccccacccccccgaaag

SEQ ID NO: 188848 - DNA, 439 bp, Arabidopsis thaliana
  unsure (1)..(439): unsure at all n locations
taccggttcggattcccgngtcgaccacgcgtccgatgctagatatgtcgtatgcatagaccgcatcatgacatgaccatccgttggagttccatgcggtgctattgatatctctcgatggactcaattgtcacgaccatcttactctcttgctcgtagacgaatctacacgcccaatgtatttctatatgatctccagcatgcatgctgacttacactcatctaggttggggcatgctctaaggtatatccaatatgacaacggtccgtggtactttcttcatgttgccgctaagtactgtggttccagttctataacatagatagatgacacgtgctagcttgcttaacgaatattgtcttagcatctatggagacgatcgtatgcgctcgtgacgcatatggacccgattacggatttggactgcgatactactaa

SEQ ID NO: 188849 - DNA, 116 bp, Arabidopsis thaliana
gtccctgagccgtcgattcggtcgccacgcgtcacttttgctgtatggctgaagaacaagctgtgatgatcctagtctgcgagactacactctcatggatctagtctgataacaga

SEQ ID NO: 188850 - DNA, 351 bp, Arabidopsis thaliana
  unsure (1)..(351): unsure at all n locations
actccgcgttggtggcgaccacgcggacgtttaccagatcaacacatcggttgccatcatccctttaaggaccttttaccacagagttctggaatgcatacattatctgcacgcgcacacaagagacatttgnattttctggcggggaaggcaaacagaggggggaccagaaacgccccgggaaaacaacgggaccagcacgagaaagcacgacgacggggcccaaagacccagacaaacaccgaaaccaaaaaaagggggaaaggcgaaacgaggccgggacagagaccgaccaacggaccggaaagccccaaccccgaaagggaggaaaagcacgaacgagccacagga

SEQ ID NO: 188851 - DNA, 174 bp, Arabidopsis thaliana
ttgttttttttttttttttttcaataaacgtactctacaaataagttggttgctaaagaccatacaaattccttcatacaaagggtgggcacttcggaagagttggggttaagaaaaaagaaactgtcccaaaagaccactggttgtttaaaccacaagcttattacactttta

SEQ ID NO: 188852 - DNA, 672 bp, Arabidopsis thaliana
tccggttcgacccacgcgtccgagctgctgaagaacttccgtctcactcctggaagaataacaaacgcaggcctctttatatcgattagtgactccagttgagtgaatcactcactccttcccttatgggcaggagagaagggatcaaggattgaagatctccttgttgcgacctgatcagaatagcaggcttatgctaatacatacgcatgagtctatgccttctagacaagtaatatacaccctctacattcacgagattgtctggaaagagtctagatctttgaaggacaaatcgttccctgtcactacaatcaccacgaggactctctcagtctctgaccggatgacatgacagcattttccgctaactactatcgatgaagagctacttgactcctgctgctactttactaccactcaccatccttacaaggtggaagatatctagcaagtgcacgcaaccgacctgacccgctgtctaatgacatcgatcaacacaagattactaatgaggctcatagccctgattcagtgaaggaattgacccgtctgtctgcaggccgcgctgatatattgtatgcgacaactgaaaacatctgtttcatgcggtagcgatcacatcgaatgaagtggccctgatgagctaaatgttgagaacgcttatgctgt

SEQ ID NO: 188853 - DNA, 641 bp, Arabidopsis thaliana
  unsure (1)..(641): unsure at all n locations
cgggtccggatttccagggtggacccacgcgtccgactgtttaaaaaagctctgcttcccccaaatacggaagatttgctctttttcttagggcgcagaggagactctgggctcctctcaggcccatcaattacgtgaccgaatcctatgaaaccagtcatgcatgttccctaacttattagatctctgggctggtcatgaaagggcagactgattctgcgagtgaaggtcgacaaaagaaagacctcttggagttcgcacacgctacctctgcaacgatcatcgcaaacgaaacgactcgcgagtcactaggatacggatctgtctggatcaacactaaataggacgcacagccggctgactaagccatgaacagaaagtgctctgatggcacgttcattatggttaaatcgaggcagcctgggttgtccagccgcccgagacctctttgcgattgtcttatcgccaatagaggagcttaagcttgtactgcttgtctggtttatgacagaaagtagtataccatgactgctgagtgcatgaggaatacttgctgcaactntaagaccactgccaccggagggtgtgacgcctcgaactgcatgcccacaaagtgctgccgctctcagacatggaccctg

SEQ ID NO: 188854 - DNA, 405 bp, Arabidopsis thaliana
gggtcgacccacgcgtccgaaatcacagatgaatgtgtccccagaaataaaaaacttttttttttttaaatcgacgattccgggtcctactctgcttcctttcgtatgcagagatgacattatggacctccaacccctttgataaccagctctaaaggtgagctgtccaaggaagaggctccatactaaatatttttcacaacccttaatcacccgaacaagtcgcacgtagggaatgtcatatttagaaccttatcgaaaaatttccatttcggatgcactcttgtcacctgaaccaactatgcatacacgagtttaccttctttcacagagctttatagatggctctcctcgtactctttacctattaaaggaacggcaacagccacctccttgactatagag

SEQ ID NO: 188855 - DNA, 558 bp, Arabidopsis thaliana
tagttaacacccgcgcaaaaaaaaccaacccaaacgagactttcttaaagagaacgagcaacacccgggggccacaaaaaaagagaccgcaccaccacgaacgcgcaaagcggaaccccccacaccgaagaaacccccgccacggcaggcccaccacgcaaaaataggacacacggacgaacaaagaacgcaagcacgccaaccgacgaaggaatagaacagaacaaaaccagaccggcagagcgaggaacagcagaacgaccgcgcgtccgcacaaacgagcgaacgacgcgcaacaccgcacagcaacagcgagagcccgaacgcagagaggaactgaggggacaagagcagcggcgcggccacggcacccggcccggcgcaaagacacaacgagagacagggccccaaccaccacgcgaaacaggcaagagggggaagagaaaacaaaccaccacaagacaggcaggcgacaacgacccaagcgcggaaagaaaaggacaaaacacccgcgaaaccagagagcgcacacacgaccaggaccgaagagcccccaac

SEQ ID NO: 188856 - DNA, 762 bp, Arabidopsis thaliana
aggggtggagggagtgtagcgcagggagatagagagagagatgagaagatgggggggatgaggatagagagattgggaggagagagggaagaagagagtggagaggaaagggaaagtgatgggggtgagggagagaggaaagtaggaggagagggagagggggagtggaggggatggagaagagaggggagggaagaggaggggaagaggtgagaagtggagaggagaaggggggggaaaaggagggaagggggaggaagggagagagggaaagagtgggagagagaatgagggggggggggagggaggagaaggggagggagaagaggaaaaggaagaaagaggggagggaagaaaagagggaggaagaaaagtgagaaagaggaagggaagggagggaaggaggcgagagggtaaagaggatgaggagaggaagagtgggggtaatgaagatggagggattggatggggggaagatagagaggggaaaaaataaaggaagagctgtgcgagaagggagaagatgcggagtggagggacgttgagaaagggggaaatgagtgtgagtgaggatgagggagagtaagagttgaagaaaagttaacaaagatgagaggagggagtaaggaaataggaaaggaagatagagggtaagttgggatgatgagagagggaggttgagaagaagagatgaagtcgagagatgagggagagatgaaggagggacatgagaggagagaaaggagtggtgagagaaaaggg

SEQ ID NO: 188857 - DNA, 679 bp, Arabidopsis thaliana
tgcacgtacccgtcctgaattcccgggtcgacccacgcgtccgatctgaaagaatcaatgagggcagataaacagcgaacgacttatttttctaaataaagatccgtagtgaaaccgtgacgggaatttttatcatacatgctcctttttgcgctcaacccctcctaggacacatcttatcaactaatgtgcgttacacccaaaatctctattgtctgacgctttaatttcatggtccctccattgataatgcatcacactcttgaccccaccgataagctttagggtacataactcccgcggccctagagacactgaaacttacccagaagacgctcgctttcttctttctggagctgctgttagatatgctgacttgtaaatgagcatatacaaattctgtgcgtaaacaaatgttggctctggccaagcgagtgccatcatcggtgactagtgactggacatagtgaagtatcagccgtaggactgatcaagcagaatcaccacgtatcatgtaataacggttctacagttgcattacatccacgccatgttgtttcttaagcaattgcaaactcttaaagcctttccctgggcacgaaaatcggttgatcatgacaggaaggaccatttcgaccgtttttagggcaccagggaccctgggtccgttgtgaaaacc

SEQ ID NO: 188858 - DNA, 662 bp, Arabidopsis thaliana
caccggtccggtaattcccgggtcgacccacgcgtccgaaataacagaacatatatttccttggaagctgcccatgattgtgcttgttcagcgccgaatcaggcacaaaatgagagtgctacgggctgctcagtaggtcactctcttcagctaacccagtgctgacatagacgggtgatggcaagagttgagtacgtgccttgtaaaaagtacctgctaacctgaatggaacgaggaatgaaccctggcgtgacgaatgaaagacgatcatgatactgtgataatgacgagcgactctcatgacacagtgcacgacgtccatcgtacgatgcttcgattgatcccacgtgcttatctggagagtccgcttctggagtttgcagatttaattcgtgggatgcagatacaggagttaggaacgcggcttcgaggggacctggctagatcgagtattcgagcctggaataatgcggaaaaggatgtatacaccgctatcctggatgacgaggtctctaagggggatatgccttacaactcatgcacggaagtggtagatttttccgaaggaaattggaggactgttgtacccttaccttgattttgtaaagggttaacttcctagaatggaaagtttcctggggttattggtagtggattacgtt

SEQ ID NO: 188859 - DNA, 932 bp, Arabidopsis thaliana
gttcgacccacgcgtccgctagggggactgagagaagcccccccaagaaaaaaggcgcaggttttcatttgaagggaagaccctgtggaatagcagctcctagagggccagggagaacaccagactacgctactcaggctataggggagaagctagccgcatctcggaatgttcggcgctggaccaagaaaattccttgcccccctctcacaatgcttgagagcggggccccattcagacccacgacacgattcggcgaaatcaccatacccgaccgatggcgcccagaactagtcgccactccaacctattagcataccaagccgtctcaggcttaggaacggccgccaagcgggccttagacgagctataggggatctttggagcacacggttatagtctgtgaagactcttcatatataatatctgctgcgacaagacaaagactcgttggcatgatacaattaatgcatttggcggggaaccgagccggggcaataaaccacaaattgaattaacaagggccagggccctggcctttaagtaaggatattgtggttgacacgcccacatcgccgaacctccctggacggtacgttatagtgcctagtactaccacgcgggcgccttggggctggccagaaggcccaaggctaacctggcgagccaggtgcatcggctcgaaaccagaggtgtcacctgtgggcaccccacccagtggaccttttcataaggggccggattttgggtggccgcgaaaaaaaagttcagagtgcgttgccccccccaaaaattctagggaggccccaattatgggctattggccagtggcaaaaagcagccggcctgagtgaaccgtaagaatgtggggctaaggaaagcggcccattgccgcctctattgcaaaaacaactgttcgatatagaaggccc

SEQ ID NO: 188860 - DNA, 584 bp, Arabidopsis thaliana
  unsure (1)..(584): unsure at all n locations
aatccggttcgacccacgcgtccgcgtatgagagaccacagaagaatcgaccagcggcctcgcaatgctctacattttcagcgacaaggccggggactacgaggctggagtaatgtagcaaaactgcgccggacaactaaacccccaacacggagatccgagagcaatggaatgctccataaaaacccaagcctcaagagtgagtgaatgcggctagagctcaattcgagacccatggggcaaaaacacatagcggggtcgcgccgacacagctttcttccccaggcaggagccgcccgaacaagacccggaagaccctccagaacagtttcgctagttcgacggcaaccagacgatcagatgcatggctggaaaaatcgtaccaaactgaggggaacgtaagcacctagtaagcaatagactgagagccttgaacagaaaaagacataggagcaaccgtgcataaactggagaaacccagtccgtaagagggagccaacaatgatctgaccaggtgggataaaaaaacgctggggctcgcgaaataagatagactctcaaagccntaaaaaagaagaagggaa

SEQ ID NO: 188861 - DNA, 830 bp, Arabidopsis thaliana
tggttttgggggaagattgagggtgaggttatatagtattggtgatttgattgtaaatagggtgttagttttttttttttggaggaagatatttgtgaaaattggattgtgtgtggggagtatgttatataataatgagagtttttttggtgatatgattgagttgtgttattttgttgagttgatttgtagtgaagtataatttttattgattgtttatgttatgatttgttagtattaggatattgtgtttgtttgtttatttaggttttattaagttagatttaatgttaagtatgtagtagttgtgtgtatgagtattttatatattgtggttaaggatgtgtttgtgtgtgtatgaggtgtaagataagttgttttattagtatatgtgaatagaatgtaagggagttgataagatatatattaatatgtatgggtttttggtagataagtgtggattatgtatgtgattgtatttatagattgagaaggttgtagtagatgttgagtggtgtgatgttaagtgtgttgtgagtgggtatgttgtatgtgtttttatttaggttgtttttgaatgtgaggaatgtggtatgttttgtgtgtgataatataggtgagtattagtttataatattttttttgtgtggttataggttgtgtatttggttggtttgtttttagtgaatgttgagtgggatgaatttgtttttgagttttgttgtgttggataatgtgtgtttaatgtggttttattaatgggtattttagtgatatgattgggttttgtagattgtggttatgtgtaaagggagagtagtgtggattta

SEQ ID NO: 188862 - DNA, 207 bp, Arabidopsis thaliana
caggcgtcgacgccacgtcgtaccgattgtgaccatgaaacacatcgggtcgaggataaatccagcagaatgaatcttgtttttatcaacggcaatagagtctgactcagtgaacacctgtataggtcgtacctttcatcagcatcacgatgtcacgtgatcctgcgcgcgtaatacgtcccttcgatggagtaacatataaatcga

SEQ ID NO: 188863 - DNA, 345 bp, Arabidopsis thaliana
caggggaaaaaacacacccgtcccggcgagaaggaagaaaaaaaacacccacgccaaacgacgcggaaaacataggaagagagagtctctctctgacacgggcggagaaaccacgagaagaaccggacaacgcccgccgcaggagaaagaaaagaagcgacaaagaaacagaaaccacaccaccgccacaggcaagaaacgcacaggccaagcacagagacagagcgccaacgggcgacaggccacagagaaggcacagacaaaagtaccaaacactctaaaccatcagaacgaaggagccggcccaagggaaaaagccgccgaggaaggaaaaaggcttccccc

SEQ ID NO: 188864 - DNA, 605 bp, Arabidopsis thaliana
ggagtaccgctccggaatttccggttcgacccacgcgtccgccggggcattaagagattgagactaagagaaaatgggggctacgtttttatttttggggctaaaacaagaagactcgttaggggcaatatcgtcgagcaacactctctcgtccctgacgctcagaatcagggcatgacatagccatgaaagactatttttgtcatgattaccataaaggaagatgtgggtcaagctccctatgatatgaggaccactgagctccagaaggccgggatacactcaagagcgtcttaatgtacgccaacacgaagagggcgtactcacacgagaacttacccaaaaagacaggggatgcctattggtctccgcgagacgaggactggtggcggtggaacatgcaagaaaaacaactgatgctcaaactctggttcatcgctctgagtgtgctcaaccagtggtgagagaggagaattctggacaaaccttgtactacatctgatattctgcagcacagattattggatgtatatggcgcaaacgttgtaactttcgaggccattggcttttaagcgtggatatgctcagcccaatctggttggaaa

SEQ ID NO: 188865 - DNA, 705 bp, Arabidopsis thaliana
accgagtccggccgcgccgctgcggcaaacacacagcccgcacaaacagaaacggattccctttgagagaaacccccgaaggccagccagcaggccacccggaccgacacagcgcgcagccagccagcgagaagcggcaggcacccgcacgacggaaagacggcgccgccgagcaagggtgcggggaccgaaacccgaccacggccggcccgaggcccggccaacacgcccgcgcacggcacacagggcggcggccaccgaacccgcgcgggtaaaaccgcgggcaccaggaaccgggacccccacccgacaggaaacccccgccgaggacgaagcggaccagggggccctgccaaaaaacccggttcgcccacggcccgaccgccaggggcagccacccgcaaccataaggggaccaacaacgcaataccccgggctagagcggacacaagaaagggcgctacgcgggacaagccagaactcgaaatccacccaaccaacgggagagaccccacggcaaaccctgccagggcgcccccacaaggggggacgcaccaaaccgggggccccaagagaaggaccggaagccactcgccaactcccaaaaatcgggaagccaggccaagcccgaggccggcaacgaggccgcggcacaaaagggccccaggggaaccaaaaaggccgcccggaacacacgcccaaaaa

SEQ ID NO: 188866 - DNA, 643 bp, Arabidopsis thaliana
ccgctccgcaattcccgggtcgacccacgcgtccgacacaaaaaaacttgctgggtactgaaagaaaacgcaataaccctttctcaccttattgtaaagcctcaaaatcggaatatcccctttcgcgttacttcccttttagttgactctaattcgccctttactcattatagctctgacgtcagaccaccggctgggtctcttggttcctcggaaccgctacagggtattcctttccaatctgagtttaccaagggggactcctctgctttttgagctgcctatccggcgatctgcataactatcgccaactttaactttggctggttcttcccgagtcttaatctccgctgtatctacttgactgacagagtggtttttttgatctggcggcgccatccgattggatccgcctatggagtttggttgcgaagtccttacttagtaaccaaagctggggaaaaaggaagagtggcggtgatattggattaggtgcactggcgacggcgcttgcattaaacgaagtgttgctgctgggacatttatgcttaccgcccagtcttggggcgcttcgtctagtatggaaaaaagcctagacctcagagaggataaagggttcggcgtttggaccttctggtagggc

SEQ ID NO: 188867 - DNA, 414 bp, Arabidopsis thaliana
tccggatttccggggtcgacccacccgtccgaaaaaagcaggacctcgccgccccccgtttgacggctttcgggcttcttctaaatggcaggaggctttttactagggcaggcatggtctggtcactccaaataaagcataaaaaggtctacccagccatctcaagattgtgattgatatggggacttgggcgcagctgtatcctttatcaggagggctgatccgctaaatgaaacagctccagtacgacccaacaattgcgttgcccagcgctctctcatttgacatagccgaaagaagcgccattttcgaacgagctgaggacagatggcccgattccgttactacctgaagaagcctggctgatgcaccggtcggtggtctcaatgagacgacgcctgttcccgctagatg

SEQ ID NO: 188868 - DNA, 918 bp, Arabidopsis thaliana
  unsure (1)..(918): unsure at all n locations
cccacgccgcggggagaacagacacaccgagggcgcggcccggaaaaaaaagaggagagcccttttctttctttgagacagcggcacncggcactacaccgccaacccaggcccggggcggcgccccaccacggaaacagaccggcggagcgcgaaacaccaccgaacccaccgagaagcacccgcccggaagcgaaagacagccaacggaccgccgcgcacgacacacggaacacacgcaagcccgcccaccaagcacggcagcaccgccggccaccaaaccggagcggcaggcgacgaagaatccaccgcgaacccaatgacgaccgcgaaagaaacagaaccctagcccgcgccagacagccagtgcgcaccaggcggcgcgcacgcgcgcgaggcatcaaccgccacgcccgacgacccacacatccaagcgcaacccgggacggagagccacccgcgcaagacagcatgcatgacaatcggcccgcatgagagggcacacccgacacatcacgggcaccaagaacagcagcggcgcgagatcccggaggccccccacccaccgaggacgtggccacaccgcacgcgcgcgaacacgtgggcggcgcccacgccgcacaacacgcgctaagacacccgccgaaggacgaccggacaagaacgacttcgcggacgcggtgcaaaagacgccgcagcctgacgccagagtgcgcacggcggcctgccgacccgcagatccaaaggacagagacgccccccgcacacagagtaagaaagagccggagagcaggccaaccacgacagagaagacgatcgcacccatgcgagggcaggatgccagaggggacgaaccacaggaaacccccagaagcacagcaagaggcacacaatccacgaatgcagaccaaagccaaa

SEQ ID NO: 188869 - DNA, 446 bp, Arabidopsis thaliana
attccgggttgacccacgcgtccgagctggtgtagggatttagcatcaatgggtgggtcaaaaagcggttattccatgcaaacagatcgacgttattccataagcatggtatggcggctaatgcatgaagttgatgcgctgttgacgtaagaattcggagcagactgagttcggaggtagcttcttaaggtgtaagagggttttgtgggaagagccgtctctggagtagttgggggtggtgttctagagattgggcaaatgtgtgttggaaggacggcttactgagggggctggagagttcggaatgaatctcctgctagtatggttggaaaggggacatgcaggctgagttggctgatcgcaaggcgtgcactgtgaactggatggatgacgtcgggcgaggtagcagactgacaacagagtagcggaattcttagagaagggta

SEQ ID NO: 188870 - DNA, 628 bp, Arabidopsis thaliana
tctgcaagcacccgatcggaatttccggctcgacccacgcgtccgcaatgatagattagatcgaccctaggtggacatacacggttttttttttacaggctcggtgggtgcacaaatccactagggccacgatcacatctagggcaacgctgagcatctagccttccttaaccgtagaaaccgggctgtcgtggcggatctccataactccgttatcataccctcacccccgagtgtgcgcggaggtgcacctgtggtcggtccggatctatccgatcaggccagcgcccaagaacgctattactgtgaggcagatcccacaacaaagatcgatcggcgccttgattgttcacaatgcagcctttgcctcttcttgcggactaactcaccaccaaagggggcgcagggaaacaaactttaggttcgatgacacaaccctcataatggaaggatcatgactacctgcgttaataatgactcagagccgtcacacgatcggtgttgtcatattggatcgataaagccgattaaagcctacgcacagccacccgactaagatttaggttcccaagaaagcttgaaatcttttagcgtgctaacgagaaaacctaggtgaaacatacgaaaa

SEQ ID NO: 188871 - DNA, 1217 bp, Arabidopsis thaliana
  unsure (1)..(1217): unsure at all n locations
tgccgttatgggtatggtgtataagttttgggtattgatattcttattggttttatttattttgagtttttttttttttttgaagaggtgttttggtttggattttttaatagatatggggggggtttgtgttaggaattttttgtgtaatagttttttttttttggttattttttttagagtgtttttttttgttcttgttgtttgtggattttttttaatatattatattttttgatttattttatatttatgaattgtgtgtattaatgagttgatttattgtttgtagtttgttaaataagtattatggattataattaatggttagtttgtaagattttatgctataatgttagttttgttttattatataattgttttggagatttggtaatgtgttgggaatttatatatatagtatatggattttgcgatatgtatgattgttgtggagtgtagatgatttttggtgtgatatactttggtatatgttattattgtgatgattttgtgtattgtagagtgttttgtatattattatatagatgtgaatattgtattagaattgtttgagaatactattgtacttttggattaatatgagagtngtgattgatagattttagttggtattatatgactatagtgtgtagtgaggttgnagtattagggtatgtgattatgtatatggtttgatatgaagattgtagttgtagactattgagtatgtttattgtgggtggtatactgtaatattgtctgttgatagtgtatttacggattattgatgtggttaatgtctatgtgggaatatgatatagattgtgtttgtgttatcagtatagagtggtgatgactattgatgttatgaatagtatatgttgtatatagttatattatgagtaatatggaagatttgagtatatatattatcttgatatattgtgtgtataaattatgatggtgtagttgttaatttaattgtattgtatagttttgtgatagattaagtgtaggtgagcattggtggagttgatagattatatattatagttgttgtggtgtgaatattgtgtgtgattaatatatatattggtattttatttaattggattaataattttgatgttgtatgatttatttgagatagtgtatatttgtttaagatgtttattgttttttattattgatttattgttggtatagatgtttgt

SEQ ID NO: 188872 - DNA, 877 bp, Arabidopsis thaliana
ccacgaccgccccgacactcacgggaaaaagaaaaacacaagcaagacggaggagcaaaagagccgatgttttgttctgtgagaccgagcgggccccagacacgggggggagcccaagggcaagagacaccgccgccgccccgcagtgagcccaacaacccgcagagggcaccgcgcaggcgcagaactacccacagacggaccgcaaaagagagaaacctctggaggggtaaagaagaccccccccgtcacttaggaaagccccgaggcaaaagcggacgggtgccgggggggcgtcggaaaaggaagacaacatgccggcaaacaaaaacagtagccggacggagcgccccagaaggacgggggaagatatccacgccgggcccgaataaggagagggaaggtcaaaagaaagccccccggccgtgaaaaggaagtagatgcccccagggggaagggcgacctaaccgagaaacgtgaacgacggcactagtataacccaagcgccagaatgccgcggcacaaaagggataggggctgaaccacaccgggactggggcatcggccacaaggcggagagacaaagccatcggaatcgagcggcgggagggcccgcccgggagaccagcccccgacaaataagaccggtttgggaatcaccccctagaccgagacgtacccgaaacctttccccacgccaccgggaaattttaaaaccccggataagcgccgcggcggaaggcataggagggagagctagctaatacctcggcaagccaagggaagggagcagagcagctgcgcacaaaagaacacatccttcgaatatgccgaacaagaggggtgggacaaaaaaaaccaaacggggggccccccc

SEQ ID NO: 188873 - DNA, 640 bp, Arabidopsis thaliana
gcggtaccggaccggaattccagggtcgacccacgcgtccgataaaaaagaagaggagttccataaacaaaggccagtttttttattttaaaagcacaggatgtgggaccaaatgtctaacacaccctatggatattcggacgtgaataagcctgctcccattctcaccggcgacaggggcctgtaatggtagatgataccaactcccttcgtgtgacagcatacccgactgaacgagctgcttgaccctagggcgcaccttattcttacgaccattatacgggctaaagatcactttactgtctatgccagcccacccctggagtcatcgcggaatccattgatccctgtgcagcctgaacttggtattccctatgaactgactgacctatgggtggacgggcctcccaaagtcaaagcacgtaatgccccctcagaagaagaacttttgggcgacgatctctctgaggcacccattagcaatgacggccgcctgaagcatgtatgaccctctgaagaaggcttggttcggccatacacacccccatacatatgttatatgatcagctaatctgcctgacaggcgctatctgagaagccagcagccgacctggcgtgagatgatagggagcatcagcat

SEQ ID NO: 188874 - DNA, 696 bp, Arabidopsis thaliana
ggcattttgggtttaggctcgcatcccagctagcgaagaaatatagcttccatcggtatgtaaaaaactattttttttttttcacatgacgttattccatcatcatggtatagcgcacgatgcgtgaaattgatgctgctgttggacccttcatagtgattccacaaagcaggcacattgatggatttcacaaactgtttaagcgctttcctataaaacgttcttcagaagatactggagaatttctgctggtgctaaaaatttcccctctgtcattgcgaagctaaactaatgggatggtagtggtgtgtccataagacgatatctgcgactacaaatgtttcacgtgtgctgcagatgactggaaacccgcgcctgcttgcttaaagtatgattgcctcgcgatgggtgtactcagaagactttaaatgctcgctgctccaatatgcgcttttgacacaccgtgttcacttcagaacatgtgattttgtctgttacccctatggcgttgttcccccctggtgactggtgacccaggtgtttaaaatcgttgccccgtggccccgacttgctttaattcagcgtattttttcctcgccagaactgtcaaacatttattttttccctccccaaaaaatgttcccctctcctaagccgatctaaaagggtgggttttttagtaaaaaaaactatttg

SEQ ID NO: 188875 - DNA, 424 bp, Arabidopsis thaliana
  unsure (1)..(424): unsure at all n locations
cgacgccacagcgtgccgtataacataaagatntagcagccttctcgtctagaatacaggctgagggtattcttttattttcatccgagctcagtgaggaatgacaagataatatcgatgtgggcacaattcttgtaatctcagagatcgaatcattaggcatcttcaccgtaggtaagtcccactaaggtatcgcggcgcatcacacaccgggaggtcgtgttagtgatagttatgtgatcgttaaacctctcgattgctcacaaacgatagttaacgggctgatgagatactacgagtcctcgaccatagcatagtgtcaatacactagtatgtagtgttctattttctagtactatatccacatatgcagcagaaatagattaagttcgtactgcgtcttgatcctggatatcagatacac

SEQ ID NO: 188876 - DNA, 1013 bp, Arabidopsis thaliana
aaatgattagaggtccaggccacagacaccacgccgggcgagggacataaaaagcaatcacgagaaagaacccgttggacgagagggcagcagcagtgttttttattttgctgcagggcgtacgagcagaagtcccaaagacgcgcgtagcaggtgcaccacacgccagggcacaggcgaagaacgacctccgaaagcgacgaggacccgccatgacgcgtgatcacgaagcccaggcaggcatcgcgcagcagagcgtgcaaaccactccgctaggaccgaagacacgacactgaacctagccgaaccacccgaggaggccgggcaaccccaagcaaaaatttagaccccccggggccgccatgagcggaccacgtcccccgaaacgcacaacgcgcaggggcagaccaccaccaataagcgcggccccagaaacccaacgcaacggccgaccagcgaccacatgcgccatcagaagcacaagcatacgcgggcgagcaactgccgcccaaggacacccggagtattgcacagaccccacgtcgtaccgagccacgagaggccacacataacatcggagggatccggcgaaaggaaaaccgcgacacggaagcgcgcgcaccatccaggcgcacacaagaaggacggcacgccgacccccagcccacggaggaacaaaccccgggcgctcggaacacggaaacgcggcatacccagacgatgcacgacagcagcccaacagatgccgaggggcgagaacatgccgccgcgccaggaacgccaatacggaggcgccgtcccaccgggataggcaagggacacagggtccggaaatgagcccgcgccgcagagcaccggaggggaaccccagccgcccgaggattcgggacaccagaagacccttccgacagggtacccaaaaaggggccctgcggcaacaaaggaccaatcggcggcaaggcgcggcctcccgcccccgaagaaaagaccctccagactcccgtcgtaagggg

SEQ ID NO: 188877 - DNA, 363 bp, Arabidopsis thaliana
tgacgacgcgagtagcggttaagaagaggcttcgcgatagtccttaacacgtggcgcggatacctagttccagtgcgccaagaaggctggaatataatagccctacacttaatagccttgtgtctagatagtaggatgagtatttgcgctttccagtcaataaccgcgggtgacgtgctcaagaacaactcgaagtagttcaattttgcccatagttccttgcgtcgggatatatgagctcatgaagcagctacaaatttcgcctctagtttggacttgtctaacttcgatcgtcccttgaaataccaggtgatggctttctctctcatactagaaaatctgtgtagagggtatctttccttg

SEQ ID NO: 188878 - DNA, 680 bp, Arabidopsis thaliana
agaccctttgtagttttgaggagagattggaaggaagagtgtagagaggagataaggagagagggtggagaggaattaggattttggggggaaaaggggtaaaaaaggaagggggtataagagaaaagtgataattattgggtggaaagagataagatggaaagtttagggaagaggtaaggattggatggataagaaagggaaaatagataagtagggaaatggagtggaggggatgaaaagattgaaggaaaggtaaataagaaggggagaaggtgagaggtgagtggatgagtgaatatgttgagaatagaatgatgtgggttggtgaggaatgaatgggggaaatatgaattgtagtgtattgagagattagaagagggtggtagaggtgggtggaggttagtttgagggtgggataagtgtatagggaaggtgtagtaaagagattgaagatgaggttttgtgatgattgagaagagaatgaggatagttttgaatgaagaaaggggaataggtgagtgataatgttaaggaagagtaagggaagagaaaagaaggtggagtgagaggagtgggagaggtgagataaagtaggagtattggaagtgttgtatggtagagatgagtgatgggagattgtttgaagtagagaaagtttgattatgtataatggaagg

SEQ ID NO: 188879 - DNA, 783 bp, Arabidopsis thaliana
ggtagggaccgtagcgtttaggaatgtaaagaatttatgggtaatgattagagtaaagaatatggggttttgggtttagaaaagggtatgtgatgtgtgtttgtaagggggtaggaattgtttagaagtgtggaatgtttttttttgaaattgtttagtaaatatgttttgtgtgttagattatttaagtattttaaggttaagaggtgataagtatgagtgagagttgtgttataaaattgtgttaaatttaaagtttatagaagtgttgtgatttatatgaggataatagtttttgtatgagtatattatttatttttaataagtggattgttattttagaaatttaattgggtagagttattattgtaatagattgatgttttggtatgatatggatgtgtatttaaagtattaaatatttaaattttaataggatgtttttgaagtggggaagaggtagagtgtgagataatgagtgaatgtttatgggagggatattatgagagtttatagggtataattataaggagaggataaagttaagattttagaaggaggagaaattaggtgtgtaatattattgtgtgttagtatattaaatgaggtgaagatatgatatttaagataggtgaagaattgaggttatattttttagagagattgaatatgtacatattgtaatagaattaatggagtttaaattaaatgtaatatattaaatgtaatagagcattgggtatggttgaattaatttgagataacgtgatagtattttagttt

SEQ ID NO: 188880 - DNA, 454 bp, Arabidopsis thaliana
gctctgacaccaagatagaacacgcaagaggcaacgccatgaaaactttttggaacgggaacagcgcggaagggccaagcgaacgagagggccgagcgacggggcgaaaagacggcgggacgagagagacaaagaagcaaccgaggcgggcgaccagcacgacggaatgcagggagacaccgacgagaggaggaaagcaacaacggatagaagccgggaacgaggcaccgcagacccagagaccgaggaggcagcagagagggcgaggggccccaacggggaccggcgccgacctaaacggggcgggtcagggacaggcccaacagataaggctgcaacgcgaggcgccgaaccaaaatgcacggggcagcgaacaaaacacaaagcaacagcgtgacaccaggacgctaggccgccaggggaaacaatgcagaaacgaagatcgaacaaagcc

SEQ ID NO: 188881 - DNA, 958 bp, Arabidopsis thaliana
  unsure (1)..(958): unsure at all n locations
ctaatttgttagtatatgtatacaagttgttttcgagtcagattatcttgtatttttaattttggttagttagtagtgtatttttcttttttttttgtttttattttattttatgttttttttaaatttttttttaattatttttagtttttttttttttttttattcttatttttgtttatatatttttggttttatttttattttatattttttttttattgtaattcctattatgattttgagttattgattttgtttgatttttgttttgttatttatttgccattatttttatgtttatttattttgttctctaacattatgttagcgagttagtatttatgtgtattgtactagatttggtttatatgtttatattgaaatatattatatttagtactattcggttataacatttgtgcattttatataagtttttaatgttgaatatatttgattatgcgctttgatcatttagatattttgttgtatgttgcgtgattgggctatgtttgagttttacgcgattatattatgttaatttgattcccgtggatatggtgattatttatgtatatgacttgtggatgttttttatttggtcttttagatgttattgtgcctattattgtgtcaacatggataatttgagngctatgttctanaatgtttgtcttattagtgtaattatatgtttgattatttgcattttatggactagaatctatgtcgttagtcgtatctatatgatatttgtatttaatatagtgttacgattaaattattagatatgtgttttatttgcttttcgatgtgggtatatgttgagtatagatattttgttgacttttgatctcgtgtttcatttgtttatgtttattattttatttggatagtcagagttacttatggttttttattggaatatttatttttattattggttgttgcgtgt

SEQ ID NO: 188882 - DNA, 1092 bp, Arabidopsis thaliana
acccaccggagttcgagggaacccacccgtccaaaaaaaaaacaaagagtgaccaagagtagaagaagaaaggtttttttttttgacgtgggcgagaacggagaacgaagagaggagagggaacacaagaaaataccgtaaacacacgccggagacccatacgaaggcgcagacggggacaaccagggagaagaacagaggaggacgaaccaaatagagccgacgctacaagataacgcacgggacgctgaaacgagctcgaagtaggaagcaaccagcggataatgacaacccacgaaaaaactacagcaactcgagcagaggggttgacccagaatcgatcagggcaggaagacaaagccgcaaccagactatcgtgcatataatcgacgataagcacgatgcgatacgatccagcacgtgaacaagaacagatggcgtgagaaggtgcatcaatggacgacctcgagagaagagcaagaagagcgcgaaccaaccaaggagcggtatggcactggagcgacgaggctcgagcgacaccaacaagcgggtacggcgtgtcgctacgccagaacgcacgcgggaacaacgaggaccgcgtatcacagcgagtggttacgcggccagacagagtactcgaacccgagtaccgcgtgggtcggagaagcagaccgactgatgagatactgcgccaacacacacgaacgaaggagaacacgcgccgcacacacaaaccaaaacacaggtatgtaacggaacggtacgagcgatcctgaggagagaagaacacgcgcgcgacagttgccgtgagtcaaacctgaccagacacggtagctgcagagtgtacagagagcgaaagacacaaatgagggacacagggtgcagagaaggatcggcgacggacggcgagacgaacatatgtgcgacgggtaacgacacgagcgtagacgcgggccgaaagggagactaacagccgcacacgacggacagtgcgcaccacgacgccgctatgaagagaagaaagagagtgtcagacagtcagggtagatgagagaaacgaagaggcgatgtcagtacaagcacacacatgcc

SEQ ID NO: 188883 - DNA, 331 bp, Arabidopsis thaliana
tccttgcccagtgattgcgccacggcgttagtggaatttcacgttaagccattttttttgagggagtttgacaaggtttctattaaattaggtctactttgtcattagcgcatacctctagctgtcccaggccatgttggcccccctccttcttttcctagttcccgctccacttgttgttcccgggccctttatatatatgggtctcctttagatgagagcccactttgtttcaggtgtttttagcttttgggtaacttccccgatgaatgtgtactgcaccggttatgttttttattcttatacataagttagtcttttgcttttggct

SEQ ID NO: 188884 - DNA, 194 bp, Arabidopsis thaliana
tccggaatttccgggtcgacccacgcgtccgcaaggatggaagaactaggccgcgatcatctgactggatttgtttttctggtgcaacgaccgaggaccgtacacctggtggaggaggtaccgtcacagtaacttagacagctgtcatgcgaggcacgtatctatccctgacgcgtcgatagccctgagggtaa

SEQ ID NO: 188885 - DNA, 526 bp, Arabidopsis thaliana
  unsure (1)..(526): unsure at all n locations
cgtatangcggggatgtagagtaaagatttagaagataattngatgagaagaaaaggaggataatagtggggtgtgaaaggaatttttaatgtttttttagagaagagagaaaatggcatattgagagaaaggatatgaaaggcggagtggagggaagaaatattaaaggaaaaaaagagagagaggaagtaaggagtagatgagagagataagaaagagagggaaggagaaggaggaaggagagaaagagagggaggaagtggaaggagggtgaggtaagagagaaagaagatagataggggtataaaggatgaggaggagggagagggagttaaagggaaaatggagagaggattgtgaagaggtaggagggaatatgagaaaagatagagaggaagtggcggattgaagggaaggtatagtgataggtaatgtaaggaaataaagataggagtttagaggcagagaagtagaggctaatatgtggaagaagagagtatgaggaagaggtattcgcagagtaga

SEQ ID NO: 188886 - DNA, 221 bp, Arabidopsis thaliana
gaggccgacaagccctttaagaccggccagcagaaagccaggcaaagccagaaacagagggcaaggaaaaagcaacgaaaaagaaagaaagcaagccggaaccccacaagaacgagacgagacacgaagagagaggagggcgcaagaggaagcgcagaaaggacagaaacaagcggacgagcgccgagcccgaaacgacgaacaaccagaacgcccggacc

SEQ ID NO: 188887 - DNA, 731 bp, Arabidopsis thaliana
ggcctgtctctccccatgatagcccctctacatacgcgggacgtttttttgcccgggcctaagggattcacacctcattcccctcccattacaagaatcttcctaaatcttgaacaacaacccctgaggctattatatatatcacggttctctctgcatcgtgatttaagagcagggtacgatacctgactattacgccaagtagatttgtatcgacactgaacttcgtaactgcacacaataaataacctcgaccacttctgattcgtatcaattccctctcttcccacctaaccgtaagatatgggtaaaaatatccacggtccgtctgcgactccgctccatattgaaaatccctagaatgcgcactcctgctagctaactacctgccacctctctaagacgggcaaagcgaactattgttccatatatgactttaaacctctataacaaacggactcctcacggatattacggactgcaaataaccgctcgctaccacctctttcgtgttatttcagttgctactctcctcgacgtagctgttacactatgatttccacgaccgatcctttcgatcgagtccttacgtaatttgcacaacctgccgattacaccagcgttttccactcataaaactctctgcgtactacttttgacacgcgcttcagactcgaactactcatctgttgagctacacaattgacttacacatatatgtttcggcatcc

SEQ ID NO: 188888 - DNA, 636 bp, Arabidopsis thaliana
accatctactcgcccacacgacttagaagcgtaacacagttagttatgcattgggcgaacatacatcgtaaatatcaacgaacccgggtaaaaccccaacatagcttggctgggggctacacgagacgccaccagaactccggaaaccaatgcaagtactgactaaactacaactgccaacggtattgggagtaccacatcttgactggaataggacgcacgcaactggatttatgtacaggaaaatggcgacctgaaacgacatagaaatcatgtctccccctagagcatgcgctctacgtatcacaggggaagccaacgaaaccctacaattggcacctacgtagccagtacatcataaaattgtcttcaacgaggaatgagccaccgccccgcacataccaataacccaaaccaatttcctcttcgcggcctttgccagccatactaggcacgaaaaaaacccaatcaagggattcacacacaaaagcccctagaaaagaccattgccgtattaccttggcaccctataaaaacttcgcgggaggaccgcctcacgacaacgagaaacaccagaggaaccgaagacgagtacgggacaaacgacatagaccctacatcacattatacaaaata

SEQ ID NO: 188889 - DNA, 554 bp, Arabidopsis thaliana
tgaacgccctcacgactagcgcttttttttttaagacgctctggaaaatgaccctcttttgtcctaccctaatccccaagccaacctcaaataagggctttggctcaagccccattgtccattggaaaaaattccaaattctcccctgggtttaagacctttccttcacactcactctggcttccactactcttatcatcgccaaatcactatagtcgtgctgtactgaacaccgttcacaactctcccaaactcttataccaacatctccggtaatccccttcttcagaatcaccttaaccaatgctttcaaactatatcattatttgcccaaatgaacatcacacttcacttgaatcagattggagtcttaggtgacatccagtcactaaccaaagacttcagtagtcaaaattttcctctagacgatttcccctctcatttaataaaactcagcacgtttcagatacatacttaaaaaacctgtccaagaattctctataaccagtttccgaaactcgaagcctgtagaacaagccccctcagcgccacat

SEQ ID NO: 188890 - DNA, 169 bp, Arabidopsis thaliana
taaataggaataactgggtccaagaataattgagggagtagaccagaactagaaaaatagatgacaacgattagtaaaaagaaagatagtacgaaaagagagtgtcaaaaatgggaaaggagaaggaaacgggccgcgaaggaatgaaaccgagaaagaacagatacat

SEQ ID NO: 188891 - DNA, 935 bp, Arabidopsis thaliana
taggtatgattagtgggtcgtgggagatatggattgatatattttataagagaaatttaaggtagttgatttaaaagtttttgtttttttgaaaaagatgaatgtgtattgggggaggtttttgtatttgggataattatagtaagtgtatgatatagtttttttgtgtagtggattagtgaattgtaattgattgttaatgatggggtgataatgagatgaggtttgatatggtagagaaatttgattgttgatgttgtattaatagttttatgttattatggtggagtgttgttattgaattattggaattggttaaagagaatgtgtttgtttaattaataaattttgtgttttagaaagtagtagaagtagagtgtaaagaaatgtgtaggtgattgaaagagtgatatatagtttgtgattgtaaagaagatagtggtattttttgagttggtagtggattgtttttgtttggtgtgagggggtgatttttaagtatgaaagattgtaaataaggggaatttatagttggtatagtatttgagttttaatgttattattggattaattgaaaattagagtttgagtaggaggaatgagtatagaaagggggataatgagtttaattaattgtgggatatggataattgattggtttgtgtaatttgatttagagtggattgtgaaaatataatgagattttagtatgtgtatattagggtatttattatgttgatgattataagagtttggggttgggtggtatgatagttaaattaggatatggtaattgtggtgtggatatttaatgaatataagggtatgttgtatatatattgtgatggtgtgttgtggtattataagaagtatggttaatttgatagttggattagagtatagaatgtaagtgatatgtttaatatatagtaaga

SEQ ID NO: 188892 - DNA, 1217 bp, Arabidopsis thaliana
  unsure (1)..(1217): unsure at all n locations
cctatgacgtcgcatgcacgcgtccgtatgctttgatccttaaaatccgctccaccattcgcagctatttttactttaattaccattgacattcgaagtcaaaacatgtaagaatacataaaaggtttacacaactattaaaaattaatggccaacgaattggcattcttgaggaaaaataccagcattctatcattggggggttgcttgtaaagattagcgtacattaagggcccccagtcgttctctggcctgatttgaatcttacgaaatggcagcggttcttttgactgataaaccaaaaaatttatcctcttgtcccggttatacagtaaatcttccctccttcatcatagtggtcgcgcgtcgcgcatcatacatatgatccactatcaacttgtaacaccttcgcactttatccacccatcaacttttttgttcctttcacataataaatgcactggtgcgaaattatgagtagcgccgaatttcataacttatttaaacagctatagaactttccatctagaagacaccgccaacataactctaactgcggtcattaccagttcatctatacttgttaataacaaagaacctcttgttgataaatactatctgcaccattctcgtctaataatctcaataaattttagttttcaaagatcgggcgctctctccgtattgaaactccttcctccttttcttatggcggagtaatccaaacacactctttatgttgtttcacaaaaaccctatttggggtgaatgggtgttgtctcctctctcttagacatgggtggcgcctctgggatcctctttaaagagtttaccccctgaggcatccagcattcttttttcaaatatttcttaggtcccaaggaaaaaaaccccttcacgcgagtctaactctaaccttgtataatcgcgctcttcttttctgtctcataattgtataaataccctcattgcaaaagaccggttgttcataatggagaaaacccccctcgtgttatctaattgaaagatcccttgtctctttatattgaaaaaactctcggttctaccaattgaagagctccctataaaagggtcctcaaattgggggggaccctgggcacccntaaaaatccatctattggttctaccacccagttccacactcactattcgtgttgtcgttaacccgttgatttttttgtaccatcgactttcac

SEQ ID NO: 188893 - DNA, 342 bp, Arabidopsis thaliana
gagcccccggccccgggacagggacaccaagagagcggcgcgcagggacgcgaagacagaaagattttttttttcgggcggagcaaaagagaaaaagaggaggagcaatagagaaaggggggcaacgcaatagaggccccgaagaagaacgaccaccacaaggggcacagaacgaaacaagcggcaccagcgaaagagcccccagagaagcgagaacaaagacaccagagaagggggaagggacgaccgcgacagccgcgcgagataacagccacgaggacgggcaacggaggaaagacacaacgagacaagccaccagcggacacgcgacgacgaaccaaa

SEQ ID NO: 188894 - DNA, 501 bp, Arabidopsis thaliana
aaccgaagattgcacgtcgaaacggggcggaagaggggaagagacctagttcatttgtttacggcaacacacgaggggaaagccagagaaaacgcagaaggcgtcacagaccaataacacaaggcaataagtaaaggcgaccagaaacatggaaaaccaaacgaacaaggaaacaacaagcagatacgcggccacgcagaaccgtggggacgagcaaaaacccgagaacagaattgagacacagacaagaaaagacgagcgcaagaacgcgaaccaaaaacaggcagaccaacacaacgaaaggggagcaacactaccctacggggagaagagagaaaacaaaaccaggacgaaggcgcctagcaaccctgataagaaaaaggcggagagacagagaacaccgcgggggggtggcaaacgtaacctggggaaccaggccgaggtgaaaaggaaaactactcagggaaccaaccctggtaggggaggacggacagacaaaca

SEQ ID NO: 188895 - DNA, 1236 bp, Arabidopsis thaliana
tgaaagacgacccgcctcccgggggccctgaaaccagcggaacgcgcgccgcgccacgagaaaaaagctttttttttttttctcgagaaccgttcatccgacaacgcgccaggggcggcgggggacacacaccataacccaggcatgaccacgcaaccaataatgcgccaaccacccactaaacagcgccacaatcggagtaccgacacctccgagaaaggcgaatcgacaaaacacgcacatcaacaccatgctacgttcaccgccacccacgagcgacaccacaacaagaggcgcggacacccggtcacggctataacagacgcacaaaccgagagcgcacacaaatcccgatccgcacggcacaacgaccaatgagttgttaacgacctactacgcgacggcaagcacggcgacgaaggcagccgcatatcggagagggcacctaccagcgcaagggacttggcgcccgcaaatcgcacgcataccgcaacgagggcgcacggttgcgacaaagcgccgcacaaacggggcgaagaggaataaggaaccggccgagaaataatcgcgggacaagcacaacgcaatctcagaggcgaaaaagaagcccccgtcgcaccccggatgcacaccactgcattcacgggagagcgagaaacactccttgatacaacgcgggaaacaaatgagggggggcacaggatatgcaggaaatacccctgggacggagaccgcaccccaccccggcggaaaagaggaacaccaacaggaagccccgccctcccacatactctacataaaacacacggagggggcgtcatgcatacacacgcacaagcgaaaatagaacccgcgggggacaattttcccgcgacctcgcgtggcggcaaaaaaaccccttacagccacccacagaagatatccggggggcgcctacacgccgcaatttctccagaaaaacgcttcttcgcaaagggaggactcccacactggggggcagcccggcgcgtcccgcatccaactggcgcacgaacgagaggacgcaagccagcgagcgccaaacccatcagcaggacgacacgcgagctaacacaacgcaaaaaagacaacatcaggcactcgaacagccgacgcgacacccgaggagcccaggctcgaagcaacgaccgtaatgcagggctcaccacaacacggtcaagattcgaaacgaattgtacgactccaacgacgctaaac

SEQ ID NO: 188896 - DNA, 1152 bp, Arabidopsis thaliana
  unsure (1)..(1152): unsure at all n locations
tattagggattgatgattggaataatggtgatagagaggatcaagcgcatttttnatttttttggaggcaaggaangaagcagacgcaccaaacacaagtgggctttgggtgaaaacaaagaacacccacgcatgtttcatagacgcacgtattccactggacaatcattgaagggaaggattattcacttaaaacatgccgtgataggtggtgaatgggtaccacggccccgacagggacgtgaatcggtacgtaataagtggccgctccggacgaagaaggcaggacgtgtctaaaagttaagggtcgaaaagaaccaaacggccactaagagatactagcaagtgagtatcgatcattgtgaaggaggaacgtaagagatgcagaggtagaagatatagtatggagacgataccgtgacgcgcccgagttaggacgagccgtactctgcctggaggggatctgacagttgacgtgatatgggcctttaagaagtacagaagtactcaggaataaacggtgcgatatgcgaagaatggagataaacctgatgatggggccaggattataaattattcgtcgataacctgctgcagccgggcagcgtgtaggctagcggtaaacagaagtagctattcctcaatctaggaagtccgcagcgactactcgagagactgtgccgcaatggcagagtggatccgtgagttgagcagaccatgctaggagagtagtgtaagtgcttcgtcccgctagaatcgagatcattcgcttgtgaatccaggggaacaccacgtctactggttatgctggcagatcagaacaacgttgtaatgttaggcagtgtcgtgacaattcgtgtgagaagcgagtgttggaggtaattaagaagacaggcgaaggcaagcagaccgataacagagagagggaatggatatattaatgcgcggattgggtacggtcgaacgcgtaatcgtttacaggaagaatggcagtctgcgtaggggcactagtgaggcgccgccccgagtcagaagtaagcagcatctgtgtggcggataagcttcgccactcacaagaggcgtattggtgcttgtgaatagcgaaggtcgcactgtggcgaacagcacaatgccgggagttagaggctaata

SEQ ID NO: 188897 - DNA, 715 bp, Arabidopsis thaliana
tcatgacccccggggaacggacacccaggccaaagagggacgggggagggaatttgcgaaacggcaaccggagggggaagggaaggagaacacagaagcccaaggacaagcgcagaagcagcaggacgaacacggagacagagagaaggaccgggcgagggggcgcggaagggggaaacgaggaagcgacacacgaaagggaagaggccgaggaacacacgccgggcacaagggaagaagagaggacgcgcgcacggagaacaccaagggagagaggcagagggaccgaaggacgagcgaacgcggcgaaaggacgagagaagaagaggcaaagcgggagagcaggaaggaagagcggggggaagcgacgcacgggaggccggagagggggagagaaagacaaggcgaacaaagggaccgaacgacaggggcgaagggagacccggagcgaagacgaagacggaggccggaggcagcaccggggaggcgaaggccgcccgcagaggcgaaccaccacggggcgcccgaaagcggacggagcgaagagacacgacccggggcacacccaggaggaggagaacggcaaacaaaggaccgaccaagccggaaacgaagcgcggacagccggacgcgcggagagcagaaggagaaggggcagcggcgccaaaccgacgaggaagggcggccacggccgaaagcaggcgaacgcccgggc

SEQ ID NO: 188898 - DNA, 243 bp, Arabidopsis thaliana
ctgatgcgcacgttaaggctggctttaacagcgagctttagcaaaagtcgaaatttaatatttcacttggatattgctaggtggatgggagcgaggaggtaaagagtgtgaagggatgtagtgtgtttaggcgagttaggttgatggatgtcgttataggagagggtggaataacttatgttttaagggtaggaagggggacttggtataggttgggtcttgatttcgttacgcgagggttca

SEQ ID NO: 188899 - DNA, 1021 bp, Arabidopsis thaliana
accagaaagaagcgcaacacaccatttgcattattgcgagagagcgacagagagaaaacaagaaaacacggggggcgggcaaccccaacaggaaccacagagcacacaaccaaaccaccaccgccaggagacggcaccggcgaaccggcgaccgcaaaaaacgcgaaccagtacacaaaaacaagaaaccagggcgagcaaccacacaggaaaagagcgaaaagcaaaacggcaacaagacccgaaaggaaaagagaaccgcgggggaaaaaacaaccagaacaaagacaccccacggggcgcgagcacaatcacaggagaacgaggcagacaccgacacaaaccgcgcaaccggaaacccacgacaacggcacaacggcgccgggataagcgcgcagagcgcgaccgcacccagaaaaaggcagcaccaacgcagacgcggccataaaccagccgccgccgtcgcagccaacacgcggcagacactagcacgacccacaggcacacacgtcacccgcgcccgaccaccacaatagaagagagcagcgggacgcgcaaagcggaccccgaaccaccgaccccgcccgtactcacaggcagacatacggggagggacgcgcccaaacaacagtcgaggcgcacgccagcaccagagacagagaggaagaggcacaccgcaccaacccgacaaacgccaagaagaacacgggcgagcgcaccagcacccgggacagggtaacacagcgacaacaccaagaggggggaccaaaaccacaacaggagggaaagaaacaggatccaagacccacaaaagaaacacccataaagggagaagccaaaactgggaacggggaaaacaggacgggagaaaacagcaaccggggggcgaaaccccaaaagcaacgacgccacgggcccacaacagaacacccacggcgcaccgcccagagggggcgacacacccaggcacccccgaggaacaaggaaaaaacacaaaccaagaccaaaaagagggggcggc

SEQ ID NO: 188900 - DNA, 1165 bp, Arabidopsis thaliana
accttggatgcacgcggcccgcagacgggagcctggaaaccgggcaccgcccgacctatgggccatccttttttttataaaaagaacgcacccggattagcccaggggggggggtataaaggaacaatatataaaagtaggacaagaccaaactacatcagatataacactaaggagaagaccctgatcctgcataataacctcggtggggaaacaaggcaacagatcaccccccgcactgcgaacttgggccgcattgctctacagtgtagaaacaggcaaggaggtcgtaagaactcaacctggaacacagttcataaaggctcacgcaagtaggacacatagcaacacgcgcggagcgtagtaatagtaatccctaaatcaccgtacagcagataaaagcctgcatgcagcacaaagcgtgatgactagagcaatacgtgactccgatgcaaatatatagacggagtctcttgggacaatggagctatgcgtaccaagagcagccaagagaagacaaagagcctacaaataggcgcgcagggcaacaatagtagtcaattcgaacacatcctgagaaggagaaccacaagcatctcttccggaagatggaactgagcacaaacaacataaaaaatagcccgacattccggaacctgaccaccaccatttaaataagggggacataccctcattcgacggcctctcaaagcactaaccccggaatgggacatttcacttacccccatcggatggacaaaaggcataggggcaactatccagcagcctcagtcacctaacgcgccaactaaaccaatatgtgccacactaaaggaccgtaagacattgcactaacacccccacccaggctattgaggcgacctgatacccggtgaaataaaaaacccaaaaccgtgaaaacacgaaactggcaagagaaaaccccaacggcgccacaaaaataacaccactcttcgaaacaagcaaaatgacaacacagtcgcgagggggttgcaccctaccgccaagacatagcgggagaaaacgaaaaccttcaaagagaagccccgggagagttacataactgctcagcgccgcctacaagacgaaactcatctgtgccacaactaagactccacctcgccgagatgaaaaatacacttct

SEQ ID NO: 188901 - DNA, 652 bp, Arabidopsis thaliana
gcgactccgatgaggagctggggaataccactcagagaggcgggactgcgcctcagtggggtgttaacaacatgttgtcgttttataaccacaccgctgggcctagcttcgacgcggacatcagtggagaatagggtgcaccgaggtgcaaccaccgcctacatgcggacatgcggaatggggaagccgactgtgcgcgactgcgcgaagcggggtcggtagaacacgaacctacctgacaaatacaagcggccgcaatagcattgaggggatcagtatatgcgagaagagtggcgatcacaaatcaaacgggggctcgggcgcgacatcactgaggatacgcgtatctacgggctaccgaacgacgagcagagtggtagcctgtatgaacaggagaacaccgcacacctccgagacgacgaagagatctgcgaagctctggaagagtgaccatgcaacaatctgctcactaatggcgcctacatgggatgggccagcgtgactgatgaaggtgacgagaaggctatcgcgcagttgttccgcccggcactcatagtaatgcgcgagtcaggagaccgcatggccgcgtagacacgaatcgcgacgaccggactatgttcgagcgcatgcgggtgacgcagactaggtcggc

SEQ ID NO: 188902 - DNA, 341 bp, Arabidopsis thaliana
agaagagagaggagtgtatgagggacgaagacacacgcaggccccgcgaaaaggggaaggaagacacacgacgcacgggacggacacagaacacgaacagggagacaagacgaggacaaccgtttttatgacgacgcgggagggccagagaccggagagacaacgacacgcgagcgaggcggggggcggagcacgcaaccgacgcgggaaacaaaactgaggagcaacacaacgataacactgacgagacgagaagaagagaacaaagagaggagaacaagatcagaggaagaccgacagggagccagcaggaggacgcccgaacaacccgcgaagacgag

SEQ ID NO: 188903 - DNA, 1144 bp, Arabidopsis thaliana
ctatgggaataccctttttaaggaggccggactcggccccccatagatttattataatctattttgcgttttttctaaacgaagggagtagtaaatctcatttatcctattcgagagaggtaaccttttttgaacctcacttttctcatacggaaccaagggtctacaagggaattcttaaaaaaacctttggagatgataagctcgaatttcgacaaaataataatctgtacgttttgaccacacttataacatttttggtgacctgagtatataaaaacccttgatggccaccaaaagaattaaagccaggcatctcccttataaaaaaaattcccaaataataccccacccttaaaataaactcatatcgtttaggttggcgaaataaacgggtacgagcgctccttaacggacatctattgagcgaagaggtgactaatataatactatctagagggaatgtgagctatagattgtctgtaatcacagaactaactcctctatacatctctattcgctatgctaattgtgtatcctagagttgaccgtcccgctctgctcctcatatgataagcatctaccaactgtgtgaccagctccttgtacataaaggatagaatgacctcacaaaatactttagatgggctctgtgtaacaatcaccccagactaatcacttgctaaatcccgggattccctatagataaaacaacaaccgaaggggcaattatataaaccccctacaattatttttcatctatgggtatgggggaataaagttttcttctatggcgggggataggtggaaaaatacatgagaactacaagacctagatatgtttttacatacccccaaatattttattcgtgtggatccccccaaaaagaaagaggggttaccagcggatgtcacatataagtaacattccacaaaatagagttagacacactccagaaaagtcccttctctctagaaaagtgtggttgcccactttttcccaaaaaaagctgtgtctcaactaaccacaaagaatccgtctctcatattctgggactatacatgctgtatagtaggtgcgacctccttagagggattaattcatataactgtggacgccttgtagaatattagtgataaaaca

SEQ ID NO: 188904 - DNA, 937 bp, Arabidopsis thaliana
cctagcattgtgttatgaggatggtacccgcacacgggggcggagacgcaaaccagcgctgtgggcaccacagagtcacgccagaggagccgccgcccatatcttttttttggagcccgcgagagcgcgaagaacatggcaagactacaccacgagggggggggggacgagaaaagagaccggagggagaggaagcacgccgacggaaaaacaggagaaacggaggaggcgagcggaacgagggcagagcggcgggggaacggaatgacgaaggaaagaaaaggaaagggggagaggcagcgccagagaaggggggaagggcacgaggggggagccgagatcaagaaaagccagcaagagcagagagcgaggaaagtacaaggaaacacgggaaaagagcaaggcgaggcagaaagcagaagactctagcaagccaatcgagaacggtggacaagaagatcgaaggctccgtgaaggcgaaatcgcaggagaagagatagcacacggtgtctattgcgactctactccatgcaaacagagtgggatacgatggcagacgaaggaacgcgagcgcggacgcgacgatagatcagagccagagatcacggcagagagacaatgcaacgaacagatcaggcacgcaccagatcaaacgactataagcactgcgatcagcatcagataccgaggcgtatgagccgcgagcgcatagcgaggccaagcacacagcaagcgcgaggggagatccgcaaaggaaagggggaagatggcgccatgagtaacgtggaactcggtgatatcgcgaccccaaccacgcgcaccaacagaaccgggagaacggtgatcgatccattgaacgacgccaatggacggacacgagctaggaagtacacgaaaaatggaggtcaagacggtagagacagcgtcggtgaactag

SEQ ID NO: 188905 - DNA, 977 bp, Arabidopsis thaliana
gaaaaaaaaccaactatgaatttcgcatgaacgcttacgaaaagctaggtatcttttaaagaggccgacccaattaaaagtatttttttttaagctatgtgggtaaacaaggtagagttggatgtcttacgaagagggaaaaaaattagaacaagctaaaagtcgatactgaaaattattgggaaagttaaaaaacaacatgcttgtaaagtacaattgaaatatattttggaagacgccaacaggaaaaagatgtggttttctttcatgaaaaacaaaagttaggtgttggccgaaatttatgaattacttgaggaacagagtggcgggttaataaaaaaatcagttttttgtaagaagaacatacatttttggtggaaacttgttttagtacattcttttgggaaaaaccacttggttggggaaatgaaaaacgggtcaaaggaggggaacaacccattgaatagcttggtggaaagaaacttatttccacaagattgagggggtgtaatagggaatttccaatttgggacggtctttttttgaaacctttaattctgaagttccatataacattatacttggggggttatgggtaaaaagggtaaatacaaccttaattaatgcggttaataacctggggaaagagtgttttagaaaataatttttggagatcttataaagggactattgtaataacggggaacatgagtgttggggaccggaatactctggggggagattaatacggggaagtcgtgtttaaactgtcataggacgagtatccaatgactgttagcacctcaaaaaatgaagaagtggttatttaataagcatgggcggttaaataaaagtggaaaatgtactgtatctctggtgtgataaatggatattatccctaacaaaattctacacaaaaatacttagcccggaaagtataaaaggaaaagactgggggggccttaagagagaactta

SEQ ID NO: 188906 - DNA, 712 bp, Arabidopsis thaliana
agacgtcgatgcacgcgggcctcagcctgttcctcttatagggccggcccagaccaagatttctttttttggagggcgcaacacgaaacaccgttgtcaggaagaatgggggccctttcgggatgtaagaaatcagtcgaaaaggaccttccgcctaagagggagaattatacgttacctggaaagatttgtgcaaatcaacaaaagccaaaaatcatcagcggcgggggatcctgcccataaaaaaaggattgcgttgtgaccttgaacacccagtaaaagcaggaccgatatagccttcctttcttccccgttttttctacccacggcccctctggctcctttgggtgcatgaattagctttggccgcaccttttgatggtattaccttttcgttaaccactctactaaaacatagccctcttttggcgggagacccccttgggttccccgggcggcgagcggggattagccccggtggtgaaaaccctttccctttctaatttcccccccttattaggggaacctcttgggtggtctggggccccctggctttatggctgggtgggtcaaggaaaaatatacccgcccctgggagggaaataccccttttctgaggtgggggaaatacgtatttaatatctatatcgtctcctatgtagtggctcgcagacgcccctctcttctgacgctcgacgccgatcccgctgcg

SEQ ID NO: 188907 - DNA, 623 bp, Arabidopsis thaliana
cttatgaaacgttgagatgatgacaacgtcgttaacggatgaggcatagggaattcctgtttaaaaaggggagtgagggatcatgtagtggaaggacatttttttatttttttgaagggtagaaagcaaggaataagaaaaatgatcctggtgaaaatcaggaatataagggttggaagaggaggagtgggggtgtgaatacgtaaaatacatatgagaaaacattttggtggcgaagaaaaaaaagggatgtatagagctggaaaagagtattatttattgatatgaaaatttggaggggttagagataagttaatgggagaataggagccacaaagaaaagggaaactaattgacgaaaaaggaggaaatgaaaggtgaggatgaaagaaagcaatgtacacagaagaaaaaaaatggtgtataaataaaggagaaatctcatcggggggagaaaaatgggtatgtatgaaagaaaagggggttttcgagaaagggggagagaaaaaggggaaaaaataagggattttggaggagagaaaaaaaagatggtagaggtgtagacacccctaagggatatttctgtatatattgtaaaagctgataaaaaaacctgtggggga

SEQ ID NO: 188908 - DNA, 1091 bp, Arabidopsis thaliana
cgatgcgcatgaccacgcgcaacggttaagacctgggaaacacaccgggagacgggcacggccaccaatgacagaacaacaatcactagattttttcaacaacaagaggggcacgtgcaccaaaggacagaacagaagagggaggggcaaatacccacagagcaaaacaaacacctacacaacgaccgagcgaccaaagcaggtacccgtgacgccggaacaagcgacataaccaaaacccacaagacataactcgagctaccgaaacacagcggcccgagcaacagaggaacccgtcgaaacagacaggacaaccctacaaacggatgcgctccgaccacgagcccagcgaacataccaacaaactcacccgaacataacaaccagtgggaacaggactaaatgcgcactacaagatctaatgatgacgacataggcatcacagaccgcgaggaccactaagtctcgcagagaacctgaaacgacgagcaccgtatcaaccaacactagtggcgggacaaagagctgcccatgggtagaagccgaaacaggacgcacccccgccaaagagtcttgacattacaagaaccagaccgcacatcctgcgtcgaaggaaagcaccgcagacatctcagagggaaacctcgcacgaagagcgcataccgcatggccaaaaccaacatgggatggccacatggaaaaacagaacaacgggtgggaccacacaataaatggcccaggggaaagggactaatccacacagcaaagagcttactgtgggataaccaatcggagcgggccttataggacccttacccgcgagtccccaaaactatacaagggggtaaggggcagaggcaacagacaccagccttcccctttcaaccgggggcccagattcctcacaaatataggagccacgccaaggccccaaaaacacccagaccgacgaatggggatcaaaaccccccgcgcaaaatatccctggcaaccggggaaaccacaggcccagggcatgaacacccccagaacgtttcagcacacccaaaaaagacgggggaggtgtggacgaacttcgcaagaacaccgca

SEQ ID NO: 188909 - DNA, 931 bp, Arabidopsis thaliana
gagaacaaagcgacgaggagaaggagcggaggcgagagacaggaaaaaaaaagagaaaagaaggggggaggagcgagagagaggaaggggaggaggagaggaaaggaaagaacgaagaaggaaagaaaaagagagggggggagggagagagagcagaggaagcgagagaaacaggagaagggagaggaaaagagagaaagggggagaaggaagggagaggaggagggggagaggagaaagagggggaaggaggagagagagaggaaggaacaagagagaagaggaaaaggagaaagagggaggaagggaggcgaaaagaacaaggaaggagcgaatagaaaggaagaagaaaggggaggaaagagaaggggagggaagcgacgagagagggagagagaaggagagaaacatgaggagagagaaggaaagaagggaaacgaaaaagcagagaggaaagaggagagggggaaaagagagacaaaaacgggggggtgacagacgagaacgggtaggggagaaggaagaggggaagaagaacgtggaagggaaatagaggagcacaacggaggagagggatgcagagaacagaagtaggaaagagaaaactggaagatgagagacagaggaaagcgagataggagacataggaaggagagagacagaaggagaaagaggaggaagggaagaagaaaaagataggagagaaacagacgacaagaatgaaaagaaggggacagggagcgggagagagaaggggcgcggcagggaaccgagagaaacgaggaaaggagagaagagaagagggagacaaaggaggggaagaagaagggctaagggacaaaaagaagagaggagaaagagaggaaggcgagggagaggaaggcggaggaggggaagagaagagaaaagaagagaggaaaggaagagagga

SEQ ID NO: 188910 - DNA, 638 bp, Arabidopsis thaliana
tataatagatgttgatattaactcaggtgtgagatgtatcatgttggatgtgatggtgatatttacgggtctagaagagggttatataatataatattattggaaaatgggtggtgacgcggctatatctaatatgtagaggaagtatggagtccgatgagtattatattttcaatacctattacgatatgtttgtggggttaaaaatttattatgaagcacaagaccttttttatagtgtgagcgggatactgaaaaaaaaatttttttttattcctgattacattgtgaatatgaaagacatccacacgttgggatgttttaaattttattgggggaagtgaaaaaaatattatttttgataatgtgtatataagaggagacttatttctttttatggggggaatgttaaattgaatttctttaaaaagattggggggtgggtctcttcatggaatacattattgttattctcgaggattggatgtgattataatcagaataagaaaagaaaagtatttattaatatggtactataagggggggtgtggggcttaaaaaatgaaatagttccttttttcctaagggagagatgattatgtggcatgtgtgttcttgatccacttctgtatgtaaaa

SEQ ID NO: 188911 - DNA, 655 bp, Arabidopsis thaliana
  unsure (1)..(655): unsure at all n locations
cgcctttcagttgcgccgcgaacgtccccctctggatccctcatagcagcggctcagccctcataacatattaatacaggcgtgcttttttctgtgattcncacgtgcatgacacaattaaacacacacaaattgtcggacacaagttgcgtcattcaaatacgacaagtcaacatctcacatttccacgtacttgtacaaacatctatctaaatacatcaacttaggtctacacagcccactctgaactttcgaatcagatcactcatcacacgattacctatatgcagtagtccacccaccagcattcacgcctcctctcgtctgggacactatcactcggttgttacaccatgaggtcattcgtctctcatccgccatacgtctccccatcgcttgaagcctatttcctcttttgttacacccgcgctattcgctgagcttctgacattctcccatccaacttgactcgacttctgtctcatgaagtcctcgcgcatcgtacatttcagtgcatccctatcccaatatgtgattgaccttttacaatatgggaccgtcgatatattcccccgcctctaagcgatacccacaattactcttgaatttcagcagtaaaaacgctttatctaataacacttcgacgtactcttcg

SEQ ID NO: 188912 - DNA, 696 bp, Arabidopsis thaliana
tcgtggaagcccatagtttggaacacccgaaaagagccaaaagagcgcacaaaacacagtttaaagacgaacccacaaaaagggggagaaggcaaccgcaccccgacagaaaccggaaacaggaaggccccaaggaagaccaagaagcccgagggaggagcaggagcaggcaagccaggagaggacagacagacaacgcacgagacagccccacaccagaggagacaccccagcaggggaccggaagccgcaccggagcaaacagaacacgacacgatcgcagcgagaagaggaagacacaacgcgagaggcacggcgcccccgcctagcggcagcaagaagagcgaacaagcacgcaaccgcaaagaaaaacgccgagcccggagagggcaagaagacaggaaacaaagcacgggatcgacggcagaacagtaccgaacagaaacaacgacgacaaccggcaggcccgcgagaggccgaccaccgaccgaagagcgcgagcccgaccgacaaggaaaccgccagaaacagagcaacggagcacagcaaaggcgaaaacaaaggaaaaaaaaaaacgggaagagagcgggagcaaacagcaccggaacaccccgagagtgagaaaacgaaagagaaaccgaaggggcgcgaggacagcagcacccgggaaaacaacgccgacagcgcaaacaagaa

SEQ ID NO: 188913 - DNA, 764 bp, Arabidopsis thaliana
ctgactcgatgcccgtctaagctggacctctaagcggcgccccacacttttttttttataaaagaccgccttacatagggtattactcgtgcctccggcaccggatcaacattttagtctgaagatatcatatggttgccacccactcttgaattggatagactcatatctacactgtaacacctgaactataaccccccgacttaatatctttcaaaaataccacacccacacccccttaaagctcaatgcttgtcccctatgggagaccgtgctgtcatcctttatcaacccccttctcttctcaggagcatccccccaaaagatcggcaccttattttacccgcgcatccccacatataaccgcctgcacctagcgtgaacctgtcatcccctattccttcaaaaaagaaatccgtgggctccccccccccggtcacatattctctttcactacggcgttcctcttggaatagggggagaaaacccaccgtgggcccccccatcaagagcgcccctctcgtctctgggaaaaacaccaaacccctcccaaaaacaaccaccagcgttttaggggggataggttcttctcctcggggcacagaaaaaccccctcccctgctatagaaactccacacggtcctttaaatgtggggctaataaaagaaatcctcttccaccccccccagaatggggagtttccctctctgtctctctctataaggggggagccccctcacactatttttttcttctcccctcta

SEQ ID NO: 188914 - DNA, 468 bp, Arabidopsis thaliana
acacccaaaacacgcagacacaggaccacacggaaccacgcgaacacgcaaccgcccaccacacagacacaccacgcccaaagcaacgcaccaaccccaaacaaacacacacagagaccgagggggccaaccaccaaagcgaaacggcacaacgaacgcacacacacaaacgaaccaaagacacacggaacaacacaaacccagaaacacagaaaccgacccacgcgacgcgacgacccaaaacgaacgacggacgacacacacgaaacaaggagcaacatacacgaccgcacaccccggaaccaacacgacgacggaacccgaggcagaacagccaagacgccaaacaccaggagcacagcagcggcccccgcaaaccaacaacaccggaaccacaccacaaacgaaaacagacacaacgcaaaggacccgcgaacacccaccaagcaccaaccccaccacgaccca

SEQ ID NO: 188915 - DNA, 706 bp, Arabidopsis thaliana
cttgacttgcagcccgtcgtaactggtcctctatagggcgccccccttcctttttttttaaacacttccccctctaaaggtcttttgaacaaggtgtcaggattccactttcagctaaaaaactcataggcatctttctttcttcctggagttatcgccccactgttttgtctaaactccctcgtagcgccttaaaaaaaccgtgtaaacatggtgctcaccgttacctttcaagccggtctttctgtgagaggcgacataacattatctttatccttatgctctccttggcgtgctttatgttatgggcctactccgggtgtcaccagaaagaagctgtcttggcacaaaatattctccggtccgttctttagctaagtcttaaaagctgctctctttcgtgggaggcctctaaaacggctcttcgttacgtccgtataaaaagaaacatttatggtctctttgccctcgctttcggtaaccaattttgggaaaattttatttgtctcaccatcgtctaatccactggtctgttgccaattactgaaccaacctgggggagattcaagcgctccccttttcgctttgggcaaaaacactttttcgaagctttttccgccaagccgataatccccccgcttgggagagcacctataaaaattcttctacacctttgtcttaggtcacgttctcttaaaagccctcc

SEQ ID NO: 188916 - DNA, 834 bp, Arabidopsis thaliana
atgactttgcatgcccgcgtccgtacgcttgaatcctctagagcggccgcccttattttttttttttttttgttaaaactgacattcaatttctcatatatagtgatctgtccacacgggaaaaaatgaataacactatatctcctttggatttacagaggatgttgtcctttcatctacgcaaaagttcttttgcttcatcggttttttagatgattccacaaacctcctaatcttttactcggcaaaaccctttcctttgtgagaataaatcccatcaatatacctacactcgtctgaggttgctgtcgaataaggagctgcaaaaacaaccattagatttctttactaacagttagccggaaaaaggtagtttatcatcgtcctcgatttactgccgtcctccatactctatacctaactccgagcttgtcataagcaactggtaaaattcacatatgttctgctcccgctaatcatctcgtttcttgttgtccataaaactactccttaacattattaagttatatacctttttaaacaaaaattgtctccaccagaagctcccactgaattgggaacactctctctatttttaagaacaaaatattaaattgacattccggatttaaaagatcctgcccttcgatttttttacaaacaacgggtcaacccagttccattgtgtacattcgatattaataaactacgtgattcttacaacactccttggctttgtgtcttaactttcttctagccccctcttatatagaaataatcccccaggcgtctttttatgaataatatcctccctccaacttctggtccatcatc

SEQ ID NO: 188917 - DNA, 700 bp, Arabidopsis thaliana
gccggcttgaagccgccccaacggggaggacacggagggcgcggcgccgtttgttcaacagaggcaacccaaagaggaagaaccaacagggggggcaaaaccccaaacaggaaaacggaaaaggagacacgagccccagggcgccgcgcggaagaaaagcggcagaaaagcgacgggccaaagagaacaaagagaaagagcccaagccaccaaagaaacaagacaaggggcagcaggggacagcaacccgagggggacaagagggggaaagggcccagccccggcccagcaggggcccagagacccccgcccggcgagaccccggggccaattatacaaaccacggcgcagaccctcccggcggcgggcaaaaaaaagcgccagagccccccaagaaggggggcggacataccaaaagcgggcgcacagcccaacagcggagcacaacccggaacaaaaaccgagcactcggggtgagaaccaacgtaagcaggaagggggagaacaccccaagacccagcgcccccgggccggcgccaaaggggcagccgccggccgaaaaacgcaggccacgagagagacccagcggcaggcgacccacgggaagccggaccaagggcccggccgccgacacaggagaagaaaacgcgacggggaaaacgccgcaaagggaagcgagagacaaccacgcgcaaccgcc

SEQ ID NO: 188918 - DNA, 734 bp, Arabidopsis thaliana
aactaagatttttggcatgttacgacttttcaataagcctggtttccttctgaaagctgtctcccttttttatacaactttttttttaaccgctactaaaattagtagcatgttttttttttttagatactatttttgattgtatttatcttttttttatttttttttatttttttttttaatctttttttgttatataaattattttttttcttttttaaatttttatttcttttattaaatgtaattttttttaatttttttctccctttattatttatattctttttattttttttttgtattttttgttttaataatataatagtttatttttcacatctattatttatattcacttcggttattttatacattaattgaattaaatttcttaacatctcatcttatgatgccccttattataaatgagtacatgatgaataactattaaaatttatatgtattggatttttattattaaggcacgtctcccttttttatttttatataatcgttttatttagttaatagaattattttgttttaaagattatttcttattcctgttctttccactatagatatttcaatcgttttatagttctttttttttattaatgaaatgacattatttgttattatacttatgtacttacatatattttaaataagcttatacctgattttctatagattacaattacgttataggattatggataatttatact

SEQ ID NO: 188919 - DNA, 1067 bp, Arabidopsis thaliana
cgttgcgccatcgtcaccgacgaaaccgtagagactctggtataccagctgagcagcggcacgccaccttatattaatttatttatattattttatattacaatacgctactttacaacacacacgatacgcggtcgaggttgtttccaaacacattcacctatcgttatcacaaccagaaggaaaacacacagcggcatcccgctttatattaataacagcaaagcgtgcccaccccgcacaaataaacaactattcagcccccccccgaggtctacctcgggtccccacacaccaaaaataccctccgtgccatggatcgagggagataacaacacgttaacaaaacaacaattgtacggacatcaaggggcacccaaattttcgtaaaaccgcggggagacaatctttttcgacataaagaaggcacaaacgcgcttcccgaccgagatcgtgaaacaaaaaggaaggaaaaatcttactgccacccccaacaaaaacattaggttgtggcccctcgtatatccgccgggagagttatcagaccgccacaccattgtcaacaaacatcgggggagttgagaggaaacaccaaccacccccattctgtggggtgattctcaaacctttacgaaaacatacccccccccaaggcaaccgcctgcacacataaacaaacacaacctccctttgtcacacacgaaacggcggccaacgtcaaaaagagggggccttaggggtaactacaccctcacaaacagacgacggggcggggctacaataaaaaagcgtccaacgtgccctttgtgcgcaaaaacatacaaaaaccgtagacaccgctcccagaggattttcttttaacctacccaacggcgccttcgaagaatagttcggcgcggcaacgctaggggtactctcaacaggggggaggaagagaaaatatattctccgaacccaaaacagaggccctggaacccaagtgcgcaaaattcacttgaaaccaggaaacaccaacactttggtccgacgcgagacctggtacacctcaaaaggagaaaattacctcc

SEQ ID NO: 188920 - DNA, 1401 bp, Arabidopsis thaliana
  unsure (1)..(1401): unsure at all n locations
gcgatccaactcgctctgaaactcatgtatgtaatatataatagattatgatagtaagggtatgaagggaacaaatatacacatgatagatgagagagcgggaaatcttagtatttttttgaggaagagcaaagcgtaggatcaagatttatgtagaagatgagtgttgtgtgtataaatgtattgtagttatcaggttgagtttctatagttaggggttgctgatgagatgtgatgagtggagagaggtttgattgaggattcgtggtgagatttattgtctattgtatggaattgaatgtggatggtatagagctgtataggatttgaggtgactatcgtgttacgattgatgatttgtttatatttcagtttatcgataaggtgtttatgtctaaatgtacggactttatggtggtaagttgcagtaagatggagtagttaaatgctacgaagatgtaagttatattagatcagttatggtatgcaattgaaaagtaagagtgaactatgaatgataagtagaanacatatgtgcacgttactgagagatagtacggatagaaagtatagatgtatgtgttatacatatgtgatctgagagcaagtgatggaatatagtatggtagcatgtatataattgggtgttatggattctgtagtcgatctgatctgattgtgtatgaatgtatttctcacgtgaacagaaagtgcgatgtagagattcgcgagtatctggtaatgagttgcgaagtgatcggtattgatcgcgagtatgtaggagtaagtgtaggataggatacgagtgagtttgcggatgttagtgctctgatgaatttgtatgtgatggatatgtttcgatagcagcactagagttacgtaagagcacgtgtcgataacagttgcattgttctagcgtctggggaaacgtcacgttataatggatgattgtattcgcgaaaatgacattaactagaatcttgatagtgtatgtataaatccccgaaatgaccgttgaggtggagaggaccctgtatataaaggaaaatatagactagatcaaatgtgggaatcgagggatataaaattgggaaaaatcttgagcgacgaaactcggtggaaaggttgtttacttaaataaaaccggcgaggggagtttattgaggaggatcttctttgttatgattttagggaagagggacgaaggtgtataatggtggttgttatataatataataatgtaggggagagtattgtggggggtaaaaatctggtggttgtatgaacccgtttgctaatctgtgggttaaatttgaaatatcacaatcttgggggtggatatggaaaatcgtatgatatgggggttgtagaggattaatttatttgaggagtgtagtgggg

SEQ ID NO: 188921 - DNA, 1109 bp, Arabidopsis thaliana
  unsure (1)..(1109): unsure at all n locations
cgcccggcaccgcgtacgtgaggcttggataacagcggaggcgccgacacagagctgggcgctttgggaattccggaccgggaccagggagcgtcccaggtttccctatagggagggactagagaagggggagacgacgggcgcaaaagtgtcctgtgtgaaaaaaggattctctctcaaatttacaaaaaataaacaaccgcagaggaaaattggggagcccggggggggtcaagacgagagcctgacccaaaatgaaagaggggggggggtaaagggggccggatgaaaaggtggggaaaaacactgtctgtgccccagggttgagttataaaaaaaaaaatgggggggccccacaccgccccactggngagaaagagaagaccaccctatgtttggcaccaaaaacaaagagggggagccacaaccacgaggagggggcgggnagaaatacaaatcctttctcttctttnccacaccctccatctaaggaagaacggggggggcggtgattctacgactcgacgaggagatgtggggtagacccatttcgttaacacacacaaaacacacgggagggaaacccttgccgaaaaaagagaagagaaagggcaacagccacaaccgcgggggagagaacaccccccacccggggaggtgggggggctaccaagaccaaagggggggggagaagaaaaaaaatcccctccgtgaaaagagaggggggtcgtaacacccccgggggggaggtattaaaaacaaaacgggcccctgccgggggggtctaaaacgagaggggcccccctaacgcggggaaggtgtttttgtacacgaggacggggcatacgccccacggcgacttaccgaataagagggaggggggcccactttcggtggccccagccgcctcaaagcgggaaatatgaattgtgggacgatgcaaaaacaacttaacaaaggggggggggagggggaggaccagccgacgtccaaatacataataaacttacgggcgatgtgggttggaaaaaaaaaaagaacaccgagggggggggttccctgaaccgaagcgtgtccgcttaatccgcggaattgaacaggaggggggg

SEQ ID NO: 188922 - DNA, 774 bp, Arabidopsis thaliana
aacccccccatgagggaaaagaaaaaccggaaacggaaaccacaaacggccaaacgaaacccggaaggaaggcaacgcatacttttcaccgccgccggaacgacgaacgcaaaagcgaggggagacacccagggcccacgcaccaccggcacaaacgcaggccaaccgggcaaagccgaaccaccacatcaacgcgacgacaacaaagccccgagggccaaaacccggcgaagaggacaaacagaaagcggaaagagacgagcagaccgagacgacagaagcagacgaagcacccgcgagacaacgcggagaacgccaatgacgcacggacgacatgccagacaaaacgtcgaggaagggaaaagcacgacgcacacacgaggcacaacggacggcagaagacaacgaccaccaggaaacagagagcccacggaagaacacaaacacacacgacgaacacatcgcacagctacagggcgaagcagaacggaagccaacgccaccagcgcgcaaccgacgcagaagaaaagcgcggcgcgaagccacacacgcaaacacgaaggctcggacagtaaacccggagagacaagcacgaaccgcagggcgataagagagaagacgccggcgcggacacgcaccaggcacgagcgcccacgcgagcgaaacacgaccagcccggagcaaggacgcagcggaacgacggagcgatgagcaggagcacgaccacaagcgggcgacgagcacaacgcacgacaccagcaacgacgcacacag

SEQ ID NO: 188923 - DNA, 862 bp, Arabidopsis thaliana
ctttagttctggtataatttggtgtgggctctcatttgttatttctttttttttttagccagaataccaattctaatatggggatttttaagtcatatcgagtttatatttccttttaattaagttttttatatatacttacgtaaaattagtaattcagcaatcttaaagcgtagtttgttagttggattatgtactttattaatattaagttgtttgtaaattggtctaaaattttcttaagtattttaattatgttgagaacttttcgatgtatacattttactttgggcgtatgtagatatgtagtgtggtgggttaaatcagaaatataaaacaatacctatatttttgtccatacaaacaaataacttttgggtccttttttttttaactcccagaatcttagctcttttaattgctttttgtttaaaaaaagcctttttataaacctccatatattttgctccctgcgattttaataattggaggatgaaaaacacaaaaggggggtgttttacccatcattgttgacttacagatgtatattttaggttgggttcttattgtgagaagattttgggctggagggaaatgtcttttcaaaaaagagtgctcccgcgtatgttattctacaaaagatggtgtgttaggcagtttctcccttagaagatacaaaatcctattctcaaataataatagagctattgtttatgggtactctggtgagaactttatttcgtgatagataactcttgttcttgtgcacatgataagggtatttgtaataatcatcatgatgaggcattcattcttcctagatatctatgttaataccatggggaagataaattgtacatgc

SEQ ID NO: 188924 - DNA, 508 bp, Arabidopsis thaliana
gaggtgttgatgaatacagatgaagaagaagggagtatgaagaactagagtgtggcagaggaagtgagccgaggtatatttttttttgttttatgaaacggagagggaagatcgaaaggtaagatgtcagtggagagagtaattgtgggaggagtgtggaggttagtgtcatcaaggcttcgaatttgaatcatgtgtatacgtaatgctgtagagtgagtacgtcgtcagtgtgatggtagaataggtacggaggtaggtagtgtgggaggataatgggtaaaggatgtgttagagagactgagtatgtgcgaggcgggatggatttatgagtgtggtgtatggtgagagtgtgtgctgtgacgcgttgtgttgtgtgatggagtaaggttgaatgggcggatcggtaggtggaaggcagtgaagaaagtataggaagaaggatgaagagagggtatgaatgaggaagttggtatgatggaggtggatatggtatatgttgtaagga

SEQ ID NO: 188925 - DNA, 261 bp, Arabidopsis thaliana
acccgacttggtttgcacgcgttcgttagcttggaccctttagagcggacgcccttcttagaatttccttttttttttcaatcggctgaaacgtataacacctttaagaaacacttgtacgacaatagttttcctgacttaaagttagtaaaccagcattcctactctcattgcgacacatttcggaagctaacacagatccggcagggatagaaacttcacagatgtccgacgccttaataagataactcttcagtctcg

SEQ ID NO: 188926 - DNA, 271 bp, Arabidopsis thaliana
  unsure (1)..(271): unsure at all n locations
cccgacgtnggcatgcccgcgtacgttacctcgggatcctcttaagcgggccgcccctccccatgtccttattttattacttttatgacccgtcggcttcccacccaccggattcgtcagaattgttcacaaaaactttcactacccgttacgcactcccaacatccaataaccaatctccaccccccacgctaacatatgatccactatcgcctagctctacttcctcacccctctccacaccttcagatacattcttcataatccactc

SEQ ID NO: 188927 - DNA, 406 bp, Arabidopsis thaliana
ttttcttctacaccatagacggtcgcgcgccgcccaacactctctctacacacccatacatcatacatcttcttgtcctcacgaagataagaagctacccgcggctacaaaccacagcacgcgctgattacaaatcccattaagtgatgcgcttgactacatcggcacactttgaggacggtgtggcgcatgctgttccacgacggagcgcactggactatcgagagaacttaatgagccatacaggagtaggtagtcagaacagtacactcctacgtatcattatcagtaccttgaactatgtggcctggctcacctgcacaaagtcatcctctcgtgcgcagctaacaaaataaatatccgtatcgaaaacccggatattacgctcctgtcataccgcgaactg

SEQ ID NO: 188928 - DNA, 747 bp, Arabidopsis thaliana
aggagcgacgaataaaataggtgagtgggcgcaagtttttgatttaaagagaaacaagagtaataggaaaaacaaaaggagggaggtgaaaatgaagcagtaaaggaaagtataaataaagaatggcgatgggatgaattagattagaaaaagaggatgaagaatgaatgtaggaaaaagaacggggataaggaattatggggctagaaggaaaaaacaataatataaagaaattaaatgaagaagataaggtgtgaagataataaaagaaaaggaaaaagtagaataaaaagtaataagaagaaagtaatagaaatatgggatacaaaataataatttcgagaggaagaaataataatgtgaaggcgcaagtgttaaagtttcgtataaagaaaaagggtaaagaagttttataatttagttagaaaaacacaatgatacacatgaggaggtaataatgaagatattaatgataaataacgttaagttgagtaggaaggaagagatcgattgataagaagatctataatatatgaaaagaatagagtggattagcgtatgatcgaataattaggataatgttcatgatatgaaaatcacgagtgtgggattaaaaataatgaaataaaaaggagaaagtagtaaagtagggataagatgcagaagaagatgtagatgggtgatgaaagatcaagatatataatggaaatgaatgaatgatcgagcatgtaagatagaggacagtaa

SEQ ID NO: 188929 - DNA, 1109 bp, Arabidopsis thaliana
  unsure (1)..(1109): unsure at all n locations
ggaaaaatgggccccccacgccccccgaaccccccgcaaaacgcggcccgcaccggancgcgcccacccaccccaacattttatccccacttatccgaacccaagaaaaaacacaccccccaaaaggggggaacacgcggggggacaaacaaaacaccccaaaacgcccccctacccccacccaacccacaaacagcacaaacaccagcgcccccaccgacaccacacacaccgagaagggaagacaaaggccccaccaaccccaaaaccacggaacccggcactcccccccaaaagcaaacgcccccacgaccacacggcacccaaagcaaccccggacccaccccgacaaacccccgtcaccaaagaggagaaccccagcgagaaccaacaagcgaccagccgcccccacaacggaaacaacaccacccggcgcacccgaaagcgccgccacccggccaaagcacaaacacaccccgagcgcacccaccccacaggcacaaagccacagcgcactacagcgcccacccagcccccaagacgaagccaagacacaatcaacaacaagaacacgagcggaacgacaccaaccaccccacaatcgcccccggaaaacaaacacaacccactcgcgccgcacaggtagaacgcaaacaccagcgtcccngacgaagaccaacaccaacagcccccatgcaagagacaacaaccccagcaccataacgaaaacacccaaaccaccccgcaccagaaccccaccccacgcaactcacccagacaaaaaaaacacgcgacaacgccacaaacccccaaagatccccggcccacaccgacaacgccacaacacacccccggcgagggagccaccccatacccccccaccaaacccccaccccaaaacccgcccgccgggaccccaaggagagccccaccgaaccacccacccaccccacagcccgcaccacaaagaacccaccacggccccccggaaaccccaaccccccaggaaaaacacgccccacacccccaacaaaacccacacgaacacccgcccaccccaaaaaaaccaccaacaacccccaacacacacacccccccagccaacccac

SEQ ID NO: 188930 - DNA, 306 bp, Arabidopsis thaliana
cgagtttggcatgacacgcgtcaccgtaagcttgtgatcctgctaggagcgggccggcccttatgtctaattttttttttatttatcgacgcaggagccaccactacaaaccaatagtgatatgggggataaaccagaaagaaggaacacgcttttcaagatagaaacacaactgaagagagatctcactggaatgcaaggacgacgtaaaagacacaaggtgtgtaccaggaatcaattacaacatctgaaaaggcgacgtgtgaccttccttattcggaaaagccaagcccgcgctcaaggggg

SEQ ID NO: 188931 - DNA, 697 bp, Arabidopsis thaliana
  unsure (1)..(697): unsure at all n locations
tcgcatggcacgccgtcaccgtaagccttggggatacctctagaagnncggccccgcccttatnnttttttatttattttccttttgtcaacgagggctacatcattatcactattatatttattgattatggcggttgaacgctctgttctatgaacgtacatgtatccataacctataatagatagcagccctcatgcagtaacacagcgtcgttgacagtcagctgatgtccacagaacggacgatatcataaacggttatatatccggtctcatatgtcttatgaagcaaacaacctctgggctcaccgatctgatgcatttaccgttgacgattctaagacacatgctcttctcactcgcagtaagtacagaatctctgtcattataccttgaacgactcgcagtatcggtgagtattagaacatatccactggacctctggctaagttataatctaccttctagtgaaagagaccgtgcactttgactcattctctgtcactagagattcctgataacacttcatgatcgtttgatacgtaatcgaggttatatactagtgacatattctattaacaccgagaacgcagctgggagacgatcctcaatcattcaacaaggtttcttcaccaattttatcaccagttatgtgatgcacctgccgaagaacagttttagaatgtcttttcaca

SEQ ID NO: 188932 - DNA, 1022 bp, Arabidopsis thaliana
agcgagtcgctcgagctggaccttaagcggcgcctacccccaaaatatttttttgtttttagaaaaccatccaatgttcttagcctgacttgtggattactagccaactcatattaaaacaacaattatcagtaatgatgtttattccaatactcccgcgactgtctccattaaagcaccgagaccttttttttaaaacccaaatgttcacatctcggccggctttttaacattgatctactatacttatagaaaactccaattcttttccgcccactgtagcacctttctatttttctgtgggaggctctcggatttaaaaccaacatgctatgtagaacatctctatgtaacagtggctggcctatttaatctctcccgcctggactctcctaccgatgggtaattgatataacgattctagacccattggtgtggaacttattttacaataccaatggggaatcacaacctcttgttgatcttgatttaatcctcagcttaatgcggctcctcttttattatagcacgattttccacaccacctagtataaactcacgcacacaacacaaaaatgtgaaccataagaccggagtaataacgatacattcgtgcgtgctctatcgagggcctatattcgcataaggaaatgattaacattctgcgatttcgttttctttactctctccaattaagagacccacctcggttcattgaatccacttcctattcacaattaagacattgattaaaaacctactcatttatcacatattcttgtgtataatatctgtggaacacgttggatctatcgggtgactcacctccgcttattgaagcactattttcgcaacgaccctcttatgtgttctatattccgtacgccgagttctggatacttgtcctcttgtttcactcatttattcacaggtttgactttgacatccctctcgtgcgtggaattaatccttctgttggacgtgatcgctactcattctgcgagttaccacggtgattctct

SEQ ID NO: 188933 - DNA, 428 bp, Arabidopsis thaliana
gccggagtacgcgtacgtaagctgggatcctttagagcggccgaccttttacctattctattttttttattttctctgaacagagctcaaatcccattaccagcactattgggtcttcatgaaactagaagaaatccccctcgctttaagattatattagacaccataccttaatccattgaggctacatacatgaaactcaacctcatttgattacaaaaaatagcgtgctgtgaaccacatggggagaaaaaaaatgctcaataatactcctctttacattccgacattaccttcatgatatgagacaaactccctattaacctttacatgtgccgactttatactccaaacacatcgtacaaatatgtttatccagatgtggcgatatatatatcccaaaagtatatgacacctatatatcatgt

SEQ ID NO: 188934 - DNA, 196 bp, Arabidopsis thaliana
gaatgttacgcgtaccccgaccctcgttaacgctctagaacctgctagcagcgttattcaataatctgaacctttttaatgttttttaactaacatcttcactcaccacgccacacaggggtagcgtcgatttaaaccgtgacaaagcactccgggccgacacaaaaggtatctaatcttataacactcaaaccat

SEQ ID NO: 188935 - DNA, 252 bp, Arabidopsis thaliana
gctcggaccctctagagtggacgaccttaatcctatcattgttttttctgtttatttaagacggagaaagtggcatttccaatcaggcatttgggtggcaaaaagctcgacacctattctcttggtcggcatcataatatatcacatcattgtatcgaggtatcaccaaaatcatatcactcactctgcacaatacacgtctcgttataactcatctatcatgcgatacgcacagctcgagtgatatatatc

SEQ ID NO: 188936 - DNA, 682 bp, Arabidopsis thaliana
cgcgtacgcgcgctcggatcctctagagcggccgccctttttttttttttttttttttggattttgagccccattaaacgggatataattgtgcaggggtattgcatcgaacagtgcaaggctccctataccaaaacacctaacaactgaaaaataatacgagccaaagctgagcacttacaggaacccattaatactaaaacgcataataaaatccacacctagagaatccttggcgaactacatcgaatgacctcgaccatagcggcggtcttcaagcactttctcctgtgattctcctaccgagctggagctccttagggatgatggagaccctcttagcgtgaatggctcacaggtcttagtcttgaaacaaacccgcagggcttgtctcagaatcctcttgaagaaatagcaactgggctgttctgagagctcaaatccaacttgaaagcctgacctatgttacgaccctgacggtgtcaatggagcggacggaacaaaagtctcaagggctctttctgataactaaccggccttgcctttaaaggaaaaccaggttcctggcaccggaaaggctaatagacgggttttacccccacaactccccataccgggtaaggggttggtcaacccctataaattttatttcctttggccccggcccctctagaggggtggg

SEQ ID NO: 188937 - DNA, 1176 bp, Arabidopsis thaliana
  unsure (1)..(1176): unsure at all n locations
actatagcacgagctatgactgtcgcatgcaccgcatccttaaagcttggatacctctagagcggcccgccctttattttttttttttttttttttctaacaattaaacctttttttttcttatctgggttatacttttcattaatcccacatataccataatacaatattaaccgaacagtttttttttttttttttcttattttatccaagccgcgcccgggggggtcaccccttagatacatccacccgcacactctggatatacaacacaatacgttccatactaatataaaccactactacagagaaacatgatcgcgccatcaaaaaaatacgcttcacccagattcacacactcatgctcatatacccttatcagacatacttggttacctaccccttccaccctaggataaaactcaaacaggaccccgcgaaactttatttggtatgtgtaacaaagcccccttaagccggctaaaatgctgattcacttcccttacgancacgtaatatcaccgtgcgtatgacgtgagctcctaccctcatatctacgaagatgtaacaacatagtaattcagcacaccacactccatctacaataatgctgtccaattctgttagcagttcgcatacactcttcacatatctcacttacaatcctcatcgacattgttatcacctcacaatctcactgcttctggtgagaagaacaaatatcacatgattctccagactcaagaagaactccgcgcgtctacgtctacgcctacaacatattgtgaggattagacagatttactatctcataagatcgccccattttctatcctgagagaatcacaaagtctgccacttattggtgataagaatattacaacataacgccgcacacaaaaggaataagagctttaaccccctctctctattatattctcaacctccaataatatcctgctcgtcgaaaataaagaaacccaaaaggcctcctctcagtgccaatccagaaaattggcccaacataggtgtaccacatttttcgataaaaagatgactagtgacaaaactcaccctcctcttctttgttatcctctaccatactactcacttctgtcaggaatatgccaccaacaaatttattattcttggattgaacagaatgagctccaacat

SEQ ID NO: 188938 - DNA, 772 bp, Arabidopsis thaliana
gaggtgaaccgcggcagttaccgaggagaggcggacgagtcgcgcacctctttctaggttttttgcgggtaagaagctgataatgagccgcacccacggaaaataagacgggaggacgtggcgtagacacgactacgtcggagaataggatataagcaatcgtgataccgccggaaccgacacagaccgcccaagcgaccagaaatgtcgacaccaaacgacaacagagcacgacacgcagtagcgtgtgctgaaaccacgtgagacgacaacggcaggacagggctcgctacgcggagcaatgttatgacggtagagagcgaaacgaaactcgagggtgagacacaagaatggagaacaatgagacgaaatgcctatcgaacctatgcgagcatgtgcgtcaacggcgtagtgggaaagtagacgacgcggtcgacgccagaacagcaactacatggtgtgataaatatgcaaatgtaaagatcgaaaaatggcggagccacgagaacacgctgacgcgctcgatccggggcgagacggagccgcgaaggcaagaagcgaaacgatagcgagattacgcgacgcggtgccgaaagccatcttagcacggagacagagggccgaaaaacggcaatatgtaccgacgaacatgtagcgctcgataaacaggctgagacattagctgcgtcatcaccgttatgagaggatgacgtggcttgcgcgaacctgccactaccaaggcgaacgaaatagccgatgagccgccggttat

SEQ ID NO: 188939 - DNA, 484 bp, Arabidopsis thaliana
gatgcctctctaactggatcttaagggcgctttattattttttttaaaattgtataataatttgggttttttgttattttagttaaatttttgaaaagttgattattggaaaaagtagggataatgtattaacggaagaaaaattttaatagggaatagagtttaaataagaagtatataaaattatagattaggttttaaggaggtaggattaaaagagtaagatattatagagatattgtaatatattgttaaatgtaaaattttaaaaatatataaaaatagtaaatatagtaatattatgtatgaaaattgatgtaagaattgaatataaataaaataaaaagtgaatataaataagtgaaaattattaattgtggattggataaaagtatgtatgttaattagaagaagtatggaaggaagagagggataatcagaaagattgtagttatataaaaatatgggaagaaataagtaagta

SEQ ID NO: 188940 - DNA, 241 bp, Arabidopsis thaliana
tcttcgctcttccgcggggcgttgtgtttttcacctcgtcccgcttccacacgtggtccccgcctccgggtcgcctgtccccctcctacatcttccctggccgtttacaccccgcattgccggccgaccgccccgccccccgacctctcgtctggcttcggttcactcgcgccgttgcccccgtcctcgtggttcgaccatctcccgcctcgctactcgccgttcctcccccctctttgcc

SEQ ID NO: 188941 - DNA, 315 bp, Arabidopsis thaliana
ccgtcgacgggttccttgacgcttgatatctgaatctctcggtacgcgactccactttttttatttttcacccttaatgatcaagcatgcatgatttgttctctggtatgctaaagattctgatatgccatcggctataccacctacatattcgcaagtattaggattgccgacgcattagtcccgcgtgttgttgacggactatccacagtagtgctgaccgatacatgtaatgcccgtccacagcgtccttattagtgaggtcgttggatatggacctggttgacaacgcagcacaaccttcgccacctagtc

SEQ ID NO: 188942 - DNA, 1268 bp, Arabidopsis thaliana
ttggtgtacgctggagtagacgggtactatacaggggcggcatacgagacggaagaagttttttttttgagagagcacccaccttttgaagagcatgtggttgaggaacagagcacaacacccaaaagacatgtagtaaatgagtctggataagagttggagtggaagagggaagtcctaaaggaactcagcatagggtgaaaggtggagggagatcacagagctatcggggagacaggaaagagaagcgtcggcaacaccgagataagtggagtcacgtcgaactcagatgacggtgtggataggaataagcaagtgatggtcgagatatgacgaaatcgttgacgaaggagaacgattttgcgaccaaggaactacaaacacaatgacgaggcagatgggtaatggccgcgttattacgaatcagcgacaagataggttatcgattgtagaaggacgatgagctagctgaggggtgaacgatgtatgagtgattatcataggaacgttgcatgaccattcatctagagaggagccatcggcgtcctacgtctaatcactaggggtaggaaaccctaagcacgaggatcactatggccacccaacaatcggaggacgatagagtatgtaagaatgagtaggacagagggcgagagaaagatatgactgtcagacgacattttacgagtgaatgctgcgggctatactcttcagagcagaaagtgcgtacgccggtcgagtcacgatgttagatctagaaagtttgaaagggacatcaccgaggggcacctctgatatatattcatgggagatcgtgaggcccgccacgaaagatggggctgacaagcacctcgcgaagtggagggagcgccgacgatgaggttatcataagatggggtggaataatggttgttgctaaatatttatggacacgataagagtacaccacgtcgacgcgttatgatcgggaatatagcccattttgttcctaagaacaggcattaggaagaccgcacgcaaagagaagcctgagactcagcaaatggtgggaaaaattcgaccgcccacaagaccgtgtatatgtgaataacctgggaccgatatgagaattagttcacgagaagcccccaaaggaacgatgaggggggggaaaatagaaaaatgtgcaaaaccatgcgcgtgactgggatccacgagtattaatacccggtaaaagcgtggacccgagtttggaaacgagatcatgacgaaatgagaactggggatgg

SEQ ID NO: 188943 - DNA, 1033 bp, Arabidopsis thaliana
tggggactaatgtaaggaacacggagtgaacgagcgtcatgagacgtgaaatggtcacgcatgagattaatgcaagacggaggatgaaagatgtttatgaatttttggtgcgagaaaacacgcatgtggacgagtcgaaagcggcacgagaggcgtaggagagcgaaacgtcagagacggaaagacaacgtgtgacgtatgatacgcgaggcggagagtgacaagcgtagacgatgagacgtcgtagcaccgagaataccgataaggctgaggaagagcgtccgggaccaagagtgctagagaaagcgtcgatgacgacacttacgaggatgtgcgtgaggtgacatcggacaatagaagagcaggctgcagttcgactcgcggagaaattgcacggactcaatcgtggagagaggtgacgagacagagttcgcgtaagcgaacgtgaggtcgggtaggacagggaaaagtaaagaggagatgaatgtgggacaatctggcccggtgcaaaatgacgagtagggcccatgaggtggctagggcacaagttgctcggcggatataaccagaactcatggagagtgccagaagatgttgccggcgagagaacgcggggctcgtgatagattagaaagggaagatctccggaatcgaggcgaagtgtgatctgtagtcatgattgaacaccagagaagccgtagtagagcatcatcggaatgaatgtagctaaagactgtacagtcgtgcgcaaagactcttatacagggacgatgaggacggttgtccatcgaacggtgtcaagtatgggcacagcagcggacggaagcgtgagcgagcgaggaagaccgactactgacatatgacgggtggggaccgtggagtattcgattagtagcgttacgcgttcacggagagagagtatgtgtgatggaagaggagatgactcgggtgggggagactgcgagataggtgtaagggtagtgacatacgtagtgtcaagtataagcgcagggagcgtacggcacaagatgag

SEQ ID NO: 188944 - DNA, 750 bp, Arabidopsis thaliana
ctgaaccggtatggacaagcatccgcgcaccaagcaaaattacttacagacgtcaaacagggagaaaagaaaaaagagccagacggacgaaagtaaaactcgaccgaatcgtacgcggcataaacgaaacgtgctttccgacaacactcaactagctaaaagcagaaaagtgaagcaatgcatcatgctgtcagagacccatgccagagttccgagtcatgcccctggtaccacaccagtcggtccaataaagagacgccctacaacttccagccccagccactgcctaaagtccgcccgcaggagcaacgacgacctcgggaagaggcccaccgatacacgctcggcttctgggatctattctgcgcgcggaacctccagcagcacagaacaccgggaataacggcaggtaatccagcgggaagacgagaacgacactagggagaaaccgaacaagagggagtacgcgaccgacgcccccgcgagttcgcgcaatcaaatgggcaggaggcaaagacccggataggactacggacggcagctagcgcgacgggcggaggctcgagagctgccataaaacacgagagacagcgatgtaatgcatacagccggacggagggaacgttcacacctgtgatatcgcacaaccccgttctccgagtcggatcagcatctacgggcttgaaacttcccagaatatggcgaggtcagcgatcgacccaaacacgatcgagccaaagaacgccaccg

SEQ ID NO: 188945 - DNA, 705 bp, Arabidopsis thaliana
  unsure (1)..(705): unsure at all n locations
ctggatcctntaagcggccgcccttttctatttcttgtcttttttttatttccaaaacccacggccattgggttttggggaaaaaaattcgggtatctgcctaaacccaaaaaaccaacctgggttccttcacaaagggccttcccggtattttttacccccaacgggttgtcaactttaatttgcgccccagccaaagaaaaaggaaaaccagcttccaggtttcaccttaaaaaacccttgtccagccagccttagtgcgggaccccgcattttcttcacccccctttttttgggggagttaaacccctcccaaaaaccggttttttggccgggagggggaacccttttgggccggtcccctggggtttccccggaccgcattaaaccggtatttggagaaccctcctcgttgggggccggatttccgggttggttcaaattgcccccccggggcttttcctgttggacaaaggagatttttccctattttgactcaaaaaaaacccccttatttttggcttaacccccccgggggaaaacacccccgcttttttttaaagcccggtaaaaaccttgggcctccccttttatatcgggacaagaaaccttttttttcccttaagggaaacacaaaaaccccccttttctcccttttggggagaattttctcttatgagcggaaagaacacttctcccaaagaa

SEQ ID NO: 188946 - DNA, 564 bp, Arabidopsis thaliana
ggccgcccttttttttttttttttttaaattggaataccaacgtttattatgtggtttttttatgtgtgtatatgatatacaaatcaaacaacatatataaggagaagagatattgaatgttgattcttaatttacaggaacatgaagctcgggtctttccggcaatgccatcaatatccgaggcggtgcagtttcttcgtcagacgagaaaccagagagtctagtatccctctcttgcctgcaacgttgtataacaatgaatgacttgaaaaatacataagcaatcaacaagatgcctaatgttctcactaatggtaacatgagcaaagttatcgagaaatcatcgactccacctagtaaaactggaagagaatggcgcaggaagagcagaaggacgaatagcaaggcaattagacggcaacaaatcaagcttgtggggctatgaaatgagtaaagatcatgatcatcatccgcatccccccaggttaggaaataaggattacgaagatctagtccctcgattccccaatcactaccgaagtttatagaaatgcctgtgtagt

SEQ ID NO: 188947 - DNA, 141 bp, Arabidopsis thaliana
tctcttctcagggtggcgtttagggtatttttttggtcaaaagttgcgcctgggcaagtttagtctgaaatccttagttgttgcataaacaatcatcatacacaggtgttattagggggtcttgatgtgctgcagtcacgg

SEQ ID NO: 188948 - DNA, 712 bp, Arabidopsis thaliana
cactatagacgagctatgacgcacgctgccgtcagccgggatcctgtagagcggccgcccttcgtttttttttttgtttttaggtttgaggacagggattggacaacgaaaattatggtggggcagtagaacataacctgatctagtgcaccatgcacaagatgtaaaaaaaacatggcagttgaccccctctctatcaaaggtcctacacagtccgttaacacacaaaagtttacggactctgaaaaaggggaaccttgatttccaatgattgttccgggggacccgttgattatgacacaaactatttttgagaggttgtgaagcatcctttgccgattcaccatgggttctcatcttttggcgccgccgagaaccgtgctaatgtctttggccctcccctatgggtgtgccgtgcggttttttaccaactacggggacctccctctgcagttgccataccgggctttatcaacccctttttttacgtgtgcttctcaaggtacccctaccaagaggcgaacttcgggcggccttttttttgctgctgggttcgtcccccgaggaattgaggctgtttagaaaacgcttataatacctacgtttttttttgtttgtggggcccctatatcttagacccgcctcaaattaatttaactcttgctgtgcccgggaagattcccttgcacaagagctggtccgggttattaaa

SEQ ID NO: 188949 - DNA, 705 bp, Arabidopsis thaliana
  unsure (1)..(705): unsure at all n locations
acaccatctatgacctctgcacgccccctgccctcgtccgtgagtcctggatcctctacagcggccgccctttttttttttttttttttttttnnnggnttttttttttttttttctttttttctttttttcttctttttttttataaaaaaagcccggcccggatctttcatttccttttggcgcccccccgggccccccgggttagaccccctttttttttcggggccccccccaaaattaagcgggccccgttctccccccaacaatcccccaaattccctgaaccaccccaacccttttgccccccaaaaagggctgcaaaacgccccccttcttctgtttaaaaaccccccccaaaccctttttgtggaggggtcttttcccccccgcccctttttttcccccttggggccccaaaaccccccccccctttttcctgagggggcgggaactttcggggcgccccccctatttttttctcccccgcccttcttggaaaccccaccggggtgcccaacgaatcaaccccccccattttttttttggcaaaaaacggaccccccccccaaaaggatttttccccccctttttcctgttttttcccaccccccaatccccttggttcccccccccccccccccatgggcccccccccttttggggccccagcccccaaaccggggggtcccctttcccttcccg

SEQ ID NO: 188950 - DNA, 335 bp, Arabidopsis thaliana
aaaccaagtctttatttatatattaatggaagtaataaaaagggtgctggggaataaaaccagcggcaccaccaaacaaaaaaacagctgagaaaaaacaaaccacatagatcctattgtctatatgtagttactaccatactttaagttgtgcacacactttctctatttccttggcgatggctttactttactatataaaatctgaaccgccgggaaaatgctcgaggtctggatgcccacctcctggccctcttggaggttgtcttgtgaaccggcctggctcaaaacctggaacaccgggtggaccataaggatcaaaacgcgcaccagga

SEQ ID NO: 188951 - DNA, 106 bp, Arabidopsis thaliana
gagaagaagacggggtcacgaggtgtatcgggtgcggacactgtttgctggacttcctgcgagaggcgtgagtacaggctcctcacactctctgcgcagatgtgaa

SEQ ID NO: 188952 - DNA, 238 bp, Arabidopsis thaliana
gaactaacaacttaattaacatttaaaaccaaaccaatggatgcagtaaataatgcagggaaccattaagagaaggctacaagacacaagctacaaactttgatgactgcgcatggaatcagggaaacaccataacacctcgagttttcttttatccttttctcttattgagaccactacgaactcaaccacacacaaactctacccggggtaagctcaggccttcgacatgggaacc

SEQ ID NO: 188953 - DNA, 204 bp, Arabidopsis thaliana
tgacgtcgcatgcaccccgtccgtaagctgggatcctttaaagcggccgccctttttttttttttttggggatcaaaacaagacctttaaaaccttttgggaaaaagaccaaattaacggctactttaaacggaaaggcacaggagatgtgctgtttatttgacgccctcaaacaaagaaaagctactcacacaaaccacatgg

SEQ ID NO: 188954 - DNA, 201 bp, Arabidopsis thaliana
tggacgtcgcaggcccccgtccgtaacctgggatcctttaaagcggccgccctttttttttttttttttgcacaaacacatttcacatatattaaattggagttggaagaaacaaaatgacattaaaggcgacaacaacaatatttttaacaactctatatgtaaaaaacaaaattcaaaatacaacgccatgtataatag

SEQ ID NO: 188955 - DNA, 201 bp, Arabidopsis thaliana
tgacgtaggatgcacgcggacggcagccgggatcctgtataccggacgcccttcgtcctttttttttttctataaaaattccacaatagttttttttctctggtgcagaaaatccacattacgtgacaaatgatgagagcaagatcaaagtagactcttggcaacaaaccagattacaatttttcatggaacaaacacagg

SEQ ID NO: 188956 - DNA, 204 bp, Arabidopsis thaliana
gctatgacgctcgcatgcacgcgtccggaatcctgtataccggacacccgttccccttttacatatttttcatttttttccgcccaaaaggaggccatctcatgcgtatgggagcacctggctctggggcgtaagcacaccctcaaaatgactggagctgagcccctcccctttggacaaagaatacgcatgtccagccgaatc

SEQ ID NO: 188957 - DNA, 195 bp, Arabidopsis thaliana
ttgagctcgcatgcacgcgtacgtaagcttgtatactgtacagcggccgccctttttttttttttttaactaaaaaactgtctttactaaagagaccctaattctccacaggaaagattcagatcagcggagtttactcctgtggtgtgctcaaaaacggttgtccatgttctcgactatgctttgcagccctga

SEQ ID NO: 188958 - DNA, 1132 bp, Arabidopsis thaliana
  unsure (1)..(1132): unsure at all n locations
cttgactgcgcatgcacctccctggctcctatacatagacccctccccngcggggaatttttttttgggacgcaaccacaaagatcactgggggtctaatacaaaatacttctggggcccccccaaattttatttccccatctctttaaaaaaaaggggggcccccaaccccaaaggattccccccatccccaccattttcccggttttctccaaaaaactcacaaatccccccaaacccaattttatggaaaaaaaacctcctcccccctatggtcctgccccaaagagggggggccctccaaagaaaacaatctcccactcacctccaagaaaacacatattttctaaaaacgggaattttttaaaaaaatgtggggccccccccccattcgagcgtggggccccccaagggggttttaaaaaaaatcttcttcccccgaaggagggggatcccccccccccctcccaaaaaatattctttttcctggacaccacgtggtaatggaactgcattgaaataggaatggaaaaccaccccaatacgggcaagaaaaaccttttttgtcaccctaagcccttccccccctctaaaaaagggttcttagatccccggaaacaataaaaaacctcgggaaaaccccccctttttggggggtgcgccccccccacggggggttggcgcccccttaatgaaacaaaaaaataaacccggcgagccccccgggggtgggttctctcccctgagaaaaaaagagaacccctccggctttttttgaacaccatcctggaccccccattgaaaagaggaagggtcccccccctccggcgggttccccttttccccgggggtgggagaaaaaaccaccccctcccctttggcccaccaaatgaaagctttttgggaaaacacccttcccgaaaaaaaaacccgaaacacccccttgcggggggggagcagagggggggcaccacccccttggtgtttagccacgatatctcctcttattctctctaccgggaatacaaagagaggcgccccctagataaaaatttccggcggggggtttttttgggggttatagggctccgccttaaaaaatctcacccacccgaaaaaccacccggggggc

SEQ ID NO: 188959 - DNA, 666 bp, Arabidopsis thaliana
  unsure (1)..(666): unsure at all n locations
ggatttggacagcacccgtacctaggcatggatacatggacggccgnccgagagggggtttttttatcccagaaaaaaaaagacagggggattaaaggggggaacaaaggggaatatacgggggataaatgacacaaagtggatgaaggggagagaaagctgaggagggacttaagaagccaagccaggagatcgaacttgtaaacgtgagagcagtgcgaaaagcgagatttcaatagactgcgttgaccatagggtacgataacaaccgggatgagagaccaccagaaggccgattgcaaaaaaaaggggatctaacttttgaaaaacgcattctgaaggggacggaattggattgcgaaaaggatgtagatggggtactcctccacgaggaagggccaaagtaagaaaagggcctgggggtgtaaaaaaaacccccccttaggaacagaaaggcccggcgacaaaaaggaggaaacccagcaaaaaaagcaaggggggttttttttagaggggatatagaggtcaatcgaatggaaccattggaatccgtaaaaaggggttgaaccgggaaatcccggtagggtcctgaaggttgacagattccccaaaggggggggggaaaaaaactgggggaaaatggaaaaacatgagcagggaaaaaaa

SEQ ID NO: 188960 - DNA, 205 bp, Arabidopsis thaliana
  unsure (1)..(205): unsure at all n locations
ttgcacttccctccttccttaacttgggatctctttaaacggccgccctgccttttttttttttttttttttttnntttaaaaccaaccccaaagctttaacctttttaaatttaccaccctccttgtttaaccccaaaattccttttctttccaattttaaaaccattgcaccaaatcccctagtctttccaaagagagtaata

SEQ ID NO: 188961 - DNA, 856 bp, Arabidopsis thaliana
gcacgcgtacgtaagcttggatcctctagacggccgcccttttttttttttttttatttttattaagagcgttttttacgaaaagtcaattaaggaactatgggacttacaaaaactcattttcaactcgagaaaaggtggaagggagaaaatatgagtatagtccaagttaaaataacggaaattaactgcagaggcaccttacaacaattaaaaggttagaatgaacacaggaaatttataaaagagaaaggtaaataaagactgctaaactttaacagtaaagaaaagagaaggccaaaaacgggaacacaatttcacaaagagaatatggaacactaatggaggattttcttctaattaaggaagatacaaaataagtaaatggggggcttttatataagcatagatcttggctgcaataaacaattttaaaaaaaatgtaggggtttaatgatggggaaaaatatgataaacgatatatgaaaaaccagattatgttattggaaggccaactaaagggtacaactaacggtaatggaatagtggcataaaaaaatctggtgggaaaatcttggggtaaattttgggggaataatataaaaatcggggccctttgggcaaaaactggttataaagcgaaatggcttcttaaaaccccgtgtgggatattaaaatgccttccaataaattaggtaaaagggataacaaagggggacaatacaaaaatttgggcaaataatgtggttccccttaggactttttttaaaggagaaaaaacattatttttaaaatagtgttccaaggtggaggggccaaggaatggataaagcccacaactctaaaacaataccga

SEQ ID NO: 188962 - DNA, 269 bp, Arabidopsis thaliana
cgtattcgtccttacacttgactgatgtccctctagctgacttagagcgcgcattgacttgccgtatttgacgaccgagggtccgcttgcctatgtgagtcccattaaagctgggcgcaaacattttcataactgttccctgtgtgaaatgggtagccgctcacactgccaccaccggcatatccaagctgggaagccttaccgaggttgcaagtcctggggggtggcgcttctaacgaaggtggaagccttttaccttcaaccctttt

SEQ ID NO: 188963 - DNA, 489 bp, Arabidopsis thaliana
  unsure (1)..(489): unsure at all n locations
acgcgtacgtaagcttggatcctctagacggccgcccttnnnttttntntttttttttttttgggggaaataattaacgtataatattttaaagctaatcgaacggcatttttacaatcaccaaataaggaaaacaacaaattactaaaaatgtgaaggaactggtaattatctaaacttccatgtgcttaacagttgatatgccgcgacaatataaaagacctgttttttttgcccaactgaataaatgaattacatgggaaaatatattattaaaaaaaacagaaaattgtgacaagggaaacaaaaacgttaacgaaggtggccccgggggtgatttagttaacaagcaagacaacacgggaaaattatattgtgattgccaaaaaccttttttaagaaatttttaggattatttctcggaccaaaaaatgtagccaaaaagttgtgaaacttacaccaactgaacattaggttgttgtgtgtgtg

SEQ ID NO: 188964 - DNA, 1012 bp, Arabidopsis thaliana
  unsure (1)..(1012): unsure at all n locations
cgtatacaccagcctgattggctgcaccgcgttacgtaagctgggatcctttagaagcggccgcccttnntttttttttttttgtttttttttttaaaaaaaataaaattttccccaaaggtgggtatttttaaaggtttactttggggacccctaaaaaaatttccgggggtccaaattcaaagggggccaaccctaaggttttgcccattcggggatggggtggaatcttgaaaatactgccgtaaaaataaaggaagaaccctccccaggtttccctttggggcttgaggaaattagtttcttttggacacagtttttgagggagcacaaaaactgttcaaaaagccttttttggaccccacgctttttaaagatgttcttgggagggggatttacccccttgtttttttaaaaaaaaatttttaaaaaaaaactattgaggttcccgggaaaaaacaacatttgtggcaagaaaaaaacacggaaagagggtttttttaaagacaggggccggcggacaaaaatgtttttttttttagggcgcccccatttgggggaataaaccgtgggaggacaattcttctggggtggctccccacccgggggttttttggcgctcctataaaaaataaaccacggcggccaccgggtggcctttttgtaaaaaaaggaggatttgttgtttttggaaatctttgacccctctaaaaaaaaaggatgggccctcttgggagacaaaatatcggcggggaggggaaaaaaaataactcctttttaaacaaaaaaaaaaaaattggggagaaaaaaacccctggggaaaaaaacaataaaaacccctttctttaaagaggggagagcgcgttcgaccctctctttgtgaccacaaaatataaatttttttttttctcgggaactaagggagaggggctttccaaaattttttccggggggggaaatatatggggggatgggcgggcctcccaaaaaaatccccccctatggaaattac

SEQ ID NO: 188965 - DNA, 775 bp, Arabidopsis thaliana
  unsure (1)..(775): unsure at all n locations
atagcacagctatgacttcgcatgcacacgtacccgtgcgtgagactcggatcctctagagcggccgccctttttttttttttttttggcaactctatcnaaaaacgcagcaattttaacggggatcaatgtatagctattacgagctatttaaatagagttgccttaaacaaaaaataaaaagagagagagagttgccactctgtttaaaacctaaaccacatattggtttggtaggtactgcttactcaataaaatccggttgaacaaatcctctgcttttctgcttcatttatcatttttaactttgcaaggtgacccatcccactcttcatagaactccttaagatactcttccatgaacttgtgccttttctctgccctccttttacccgcctcagttttcatcagcttctttagcttgaggagtttctcatgaaagtgattaatagtagtttgctcctctctcttaatgtactgctctttgggtagctctgtccggggcttgatctcaggatcatgaagcactctggtcctgcttccaccaaatgttaagcaacgagcaattcctatggcgccaattgcatcaaggcgaacagcatcttgaactaccccaaaatctggaagagactcacagaggggtactcctgctaattcggctttaaaaaccaatccattggtgatcggtaggattcttcgcttcttgggctcttttattcccctattcattctaggaaaattcttcaacaagttttttttttccgaaggggtctct

SEQ ID NO: 188966 - DNA, 1228 bp, Arabidopsis thaliana
cgcctccctacccttggatcctatacagcggacgccctgccctttttttttgggcttttttttttaccagaaaaaggagaccctaacccaaacaaccttggtggattcaagtcttaccaaacagggtgaaccccaattagaaacattatccaacactggtttgcacccgaatatttttcaggaggtgccccccaccccctctagggagccttttcccccaattgccggcgtcattacaggagttgatattacattcccccatacaatctccttaaaccaacataaaaaaaactccccttctgaaagtaattagactttcctcgcaaacactgttaaccccaaatgggcgccctcccccagggaaaataaaatggagaatttcttttatatgtgcccaaccgataaatttcccctatagtcagcgggttaaaaataataaatatgtgtgtccaaattaaacctcccaaatttttttagaaaacacaccgggtctcttgaacaaagcggccttaattctttcagaaaaacagaattaacaccccaagatttcgcgtgttcaaaagaaaataaacttctaatcagatacaatatgtggtagagattatttcctttccaaacacctactaatgggggtcacacccccactaccccacatatattgtttttatttggcaaaaaagggtaccccctccaaaaaattattttggtcttctcccgcctaggcaaaagcgataaatacaatgttgtaatatacacattttagtctgggaaatataggggcaccaaaggtgattctgccatctcaaaacaaaaaaaatacacccctttcccccctatgatgaatttcccaaaagaaacaaaccttcttttctagttttaacaaacaaaaatggcctctccaataaacaatagagtataacaaattcgggtgggacaaaaacatcctccgggggaggaaaaaataaaccacccccccattgtacacctaaaaaaaacttttttattaaaaaaccctcaggggaaaaaaacaccttgggtaatttttcttggaaacgcgagaaaccttccaactacctcccttccaaagccattatgaccctctttttctattgagcaccccaaaaaaaagggcacttaggatattcctcttgtgcgcaagataaaactgttcctctgaaaggattaaccacaatattgtcccaccccattaaaataatatattaaggac

SEQ ID NO: 188967 - DNA, 227 bp, Arabidopsis thaliana
aattaaaaaggttttgggggtacctaaaggttctagggccaaaccttttgggaaaaaaaaagggcccgtttaaacccaaaaagaacccatcccctttaggggcaattttagggctttggttccatggccaaggggaccaaaaaattcttaatccaaacttagggggttcctgggggaaaagccccttgaaatcctttgggggggggcccggtcccttgggctttggg

SEQ ID NO: 188968 - DNA, 149 bp, Arabidopsis thaliana
ggcaaaacggccaaaagtgtttgaattggggggggggacacagttttaaagcgggtacaaaaccggtctagccggtttaatccattaaacagattcttttcatacaggggaatcttccatagctttgatcaattttataggtttttact

SEQ ID NO: 188969 - DNA, 242 bp, Arabidopsis thaliana
gggaatccgatttaagttttataagtttctttgataaggataatgaggcatttttaatgcaaaccattaggttttttccgggattgaaaaaaaaaggcaggcgacccatttcaggttttttttttaatataattcgatgggcttttttgggaaaataaaattttcttcaccaggaaatggggaaaaagggcctgcctgcagttttttaattttcctttggggggagctttttaagcggtttc

SEQ ID NO: 188970 - DNA, 839 bp, Arabidopsis thaliana
gtataattgagtaaccaaaccaggaaagtaaatacggtataacagacccaaatgatgtttgtaatttgttatatctatacaaaaggaaaagatgccacttcagaaaaagggagtaaagaaggcacaaattctgcaaagaaaccaatcttgtcataacttgctagggatcacatcacgggatagctaggtcggctttacaaacatgtcttggggctttgcaatgaacttggcaaactgagatcctttcgtttgtttggtattaccatctttgagtaacttaagcaaattgggtaaaaactgctcaaactttggggatagtgatggcattaaaaaccccaatggaagaaaattcttttgttaggttgatcaaaatgttttgaaaggaacggttgaggatctgacaaaattttttttggaaaaaactttgaaaaatttggtgggcacaaaaacatggcaccaatggggaaatgccttgacaagtttggaagaaaagcctgaatataaaacaaaatacccccggattcccatttgttatttgccgtttgggaatgtggtaaacacaaagtatacaaaattcattaattggggcccaactttgaaaaatttggaggaaaaaaaaggaaacccaaagcaaactttgcgtccaaccaacgggaatgtcgaacaaaggtcagtcattagatatggtttatttcaaagacatatatagtcgggggggagaaaactttattggcaaaacattttctttggacaaaaaaatgggaatatttggcagataatttacaaaatccctccacttcattttggtgggagagaaaacataacaactttttagttta

SEQ ID NO: 188971 - DNA, 781 bp, Arabidopsis thaliana
cacactacacgcttctgcacgcttacctaagcttggatcctgtagagcggccgcccttcgttctttttttttatttttaatttttaacaaacgcgaaacatatccaatttggagattggtgaagaaaacgtacatgaacgatgacgcttcaaaaattaattatacaaccgaatatactataggatacctgttgtttttatgaaatatatacattaacatttaccataaccggcattgaccttgattgtggacgtgccttctgcttggattacggaccacaaataagttaatccaggtacaacccggcaatgcttttgcaatctcagggagacccgttcccacctatagcgtgaccatgactaaaaatacttgtatcttgttcaaactcctaacattttaagttttgacgaagatacgaggccccataaaaatattcataatccttgctagatggaccgataaccagatctatgggagaatttccttatgagatataataaactgcaccatatattgagacgattgcgaagacaaaagtagaacctatttgacgtcctgatgattcacaactcgcaagaaacctttgaagcgtccgaccactaagattgggcaccggaaattccccaaccctatcttgaagacctagttattcttttgaatgttacaaaaccaccctattcataaaaccccggttgttttctaaacggcccaaatattcacgggaaccctcgtctcccttaaaatggtggttatcccaacgtacacactcttgttcctcaca

SEQ ID NO: 188972 - DNA, 715 bp, Arabidopsis thaliana
cagtttaagcacgcgtgcgcacgctcggatcctctaatagcggtcgcccttcgccctttttttttttttttttttttagaaaacaagaaattcaccaattagaggactgggaaaaaacaatcacatattacaggaggggtgaaaaaaccttatcactatgaataacacctgaggaaaaaactttacacacacaaacatatagctactatggtcacaactggttctgacaggaaatgaagacgccattcttgcttgtgacgacgactcagatattcacttttatgacaaccaccctccaaagcctttaggtgattcctctacacatggtgtgaccaataaacacccgtgattatatttttcttgttgcctgcacacacctctgaaagcttaaatgtacctgaccttgctctgcagatccacatattcaaacctaagggaggacccgggctccccaaagatcactgctaggtttctcaccaatatgtggctatattgcacatttatagggaaaatcctgtgagagatttagcttgcggtccctccggtggggaactatcacacgccaaatgaaaggatacacctacgggcaaaatgtttttcccgggatatttggacagcgcctctccggcatcacatgtgccgaaagaaagccgatatatcagggtataacggcgatctgttttcgtcgaattgaagacgcaacaattcaacagct

SEQ ID NO: 188973 - DNA, 596 bp, Arabidopsis thaliana
  unsure (1)..(596): unsure at all n locations
gtgacctatagaggagctatgagcacccgtgcctcggtccgggagcctgtatactggacgccggccgccctttttttttttttttttttttannggagagaattccttttttgttttggaaccgccaaattttttttttttttttccctaaccccaaaaaattaggtttttccgggattaaaaaacgggttttgaaaaccaattttaaaagaaagggaaattggaaccgggggggttttaaaagaaaatgggaaaaaaccccaagagggggacccctttttgggtgccctatttgaaaaagggatttccccaaatttaaatttggggtcaacctttccctttagggggggaggtcaaacccggggcccctttttttccgggggggcccccaatttaattcctttccaaggaacccttattcccggttttggggtttttaaaagccccctttttacttttcccttgggggtaaaaaaaatttttatcgccccgggtttttttgccttaaaaatttcttttaatttaccccgcgggaatttattgggttttttcggggggactcccaccggacctttaaggggaaacgggtttttttt

SEQ ID NO: 188974 - DNA, 638 bp, Arabidopsis thaliana
ctatgacgtcgtcatgcacgcgtgcagctacgtccgtaagcttgtatcctgtagagcggccgccctttttttttttttttttgatatatcaacaaaaacgttattatattttggggttaacggaaaacaatccaaaaaggattggctgtaatttacaacacataagctcgaagcttctccttaaaaatcaactaggtaccgaaggaaccttctttggtggaaccacacgcactcttggattgaattattaaaccgaaaggcatttgcgtctataacaaggaatgagaagggatgggcggctcattcctccagcttacggtgtgtaatgtattcaggcgggaagcgcagataattaagatggggtacgctcctgttttttcgcgacaacctgccggaccataaaaaccgtccgcacgtggtgaggaatacacctcattgaaaacctccatggatgaagtaaaccttctgaagatgggcactaacgaataccggaattgtgttaaatatagtttgtgcccctgggatttcttgggaagaacgccctagtttgcccaccaagcggggtccgtgtatttaccggataaaagaaaaacaaatgccttgggtaaaaaaaaatacagatacttttttccctccgt

SEQ ID NO: 188975 - DNA, 537 bp, Arabidopsis thaliana
  unsure (1)..(537): unsure at all n locations
actatgacgtcgcatgcacgcgtacgtaagctggacctctagacggncgccccnnnnnantttttnataaagaaaaatgcaaagcttaacgggaacaaaagagaacatttcaaacctgacaattttccccaaaataaactgaacaataaaagaaacagtgaccttttgtttcaaacctaaaacctaagaaacatcccctttgaaaacaggaaacgagcaacagcaaaaccaagtaagcagacatcccagtttaaaaaaggaatgtcaaccgtaccaatgtaagcacaatttccgacagagactcttaccaaaaaacacaaccaaaactctacaataaaaaaacatcggaaaaaaacctccgggaaaaaccaaaacttaaaaaaaaaatccccaaattgccagctgggcctgaaaccaaaccttgaacaacccccacttacccccaaaagaaaaaaccccggggaactggggaaaaagctaaaaaaaagcgcttcaccacccacatcaagggaaaataaacccaaatggaaaaacccc

SEQ ID NO: 188976 - DNA, 443 bp, Arabidopsis thaliana
attgtgtaatgattaatgccaagaattgaaatttatcctctgtcaggacaacaaaatccgaaaatgctttagaaataggctagaaatttattaatggaatactgacgcagactggcaaaatttaaatcagatgttcgttagtcgccagataaagtgaatcattatctaaaaatgaagaggttaaaataaggatgtaaacggcgacaacattataaattaattagtgacatgactctacacattacttgtcatcttcagtctagacccagaatgatccatccagaaacaggatctggggagccagatgaaggacaaaccccctcattgagcctggtgacttcactaatcccttggaagagaattaagagaaagtggttggcttctcagttctgtcacccggaccttacaagagaaacggaaacagaattgtatttccaatatga

SEQ ID NO: 188977 - DNA, 793 bp, Arabidopsis thaliana
tgggacctttgaggtagaatttcgttgacactatagacgagcttgacgtcgcatgcacgcgtccgtgagcttgtatactgtacagcgttcgccctttttaatttatttttgtttttatgatttgcaataccgaacagacatattttgggtgtgagaagaagaggaaacatggaaatgaaagatccatgatataaagaacccaaaagccatacaagctaacaccaaattcaccactctctggggttggcatctgttctccaccaccgttggtgctacgccttctcccgccgctggttcctcaccgtttttcaactgcctctcttacatagttgacccatccttttcgattgcaccgtcgtcgttctgggctcccgagaggcaaatctcgcatgctttgccgactttgatcttgaaccaagtctgagtggattggctatgaacaacagacaaatcgtctttacaagaacaccttaattcaattgcacatctaccgctcgtttacactcccaaatgacatatcctgcaatttttctccgggggtgccgtaggatgatcactatgtatgtccgacgacgagggactcattaccgacgacactttcctcgactgatctcctttgtattcatacaatcctccaggcctctaatacaagtaagagttgcatgacttcacatctttacccgcctgaataatataacgctgaccgcaatttccgtccaacagaccttccgaagatattccaaagagcttcctcccttggttctaaattcgatgttcaggtacgtttttattt

SEQ ID NO: 188978 - DNA, 273 bp, Arabidopsis thaliana
tgatgcacgcattgcgctcgtcttggataccttgtataccggcacgccccttcatccctttatctttgttttttttacgtttatttcaaagccccataatagtttctgtttcaataacatggaagccttgtagttgtattcaatacatgaccttcacagttttgtttatccccacacagtctcttaaatattctataaaaaacgttcgccgttttttataaaaacagatatttggatagtcttgacattacgtttatctatatactcctttac

SEQ ID NO: 188979 - DNA, 1068 bp, Arabidopsis thaliana
ggaatctcatagatcaactgggggggggggggactaagacgcggcgaggcgatacgggatgccacattccccacaaaaattatagataatcgtgaaaacagcaccagtaaaaagaagagaggtaagacctaaacgaacatgggaaagaaaagaaggtggaaaagaactggggtggtagcataagtgatgagcaaaacaaagtggggaggaagaagacacaagggggcggatggtcaggaactgaagcttgtagtgagattaacgccgcacacgcatgaactgtagaacactagaacgtattgggggcgcgcgaagagagagaacaaactacacagcgtaagaccgtgactcatatgaaactcgcgacagagagccacaagtgaaatatgagacctatgccaccgttacaggaggcagacggggaggaaagaagaccctggaaactcttcatctctctgggtgaggggaaagggaaaatcgaggcgccaacaagggagtctatcgaagaaaagcattctaggcgttaaatgtacaatgggagcgccataggaatcgaagcacaacccgagatgtgacaagaaacacaaaaggttgggtggggaagccggcaaaaatataccaccttcccgcgcactgtaaggggaaatgagacaagcacacaggagtaacacccgaaagacacatccagtggatgcatgtttcgggggagggcgacacatttgggagaaaacaggggacactgtggaacgcccaaagcgagcggtaattataactaacttatagaccggggctagaggggagaagacaaaaagagtgggataacaaaactcacatcaccctgggtaagagaggtgggtataatataaagaagtcctacattgggacgtttataagaagagggaagactcgaagtgcgtttccgagttgaccacaagggggcggagggaataaaggataccggggatggttctccgcgaagtaacagtgggaattcgtgcaaccaccagtggaaaggagaacacaaaatgcatacgtgtatggacctgggaaggagcattagggggcccg

SEQ ID NO: 188980 - DNA, 1143 bp, Arabidopsis thaliana
actatataatataaatatataaatgatttggtatacaaataagaagtataaatatataaatgtttaggaaaatttaaattatatatagacaagatcaaaacaaacattgaaggttaaaagtttggcaacaaaagaatcctttgagtggcaaacagattagaaaatattagcaagaaaagaaattttttaaaaaagggtacatcaataaacaagagacataataactagaaagatataaataaaccataggaaaccaaaatacagacagaaccatctgagataggtagaaatagtaagctagacaatagtttataataatcaagtagtcattacaatctgaattataggagtacacaataaggacgagaagagttattaatatgttgtaaactctctatacaggaatgataatttacaactaatatacaaaatatatatgggagattatagagcaaaatagatcctggcaataaataattgatgtaccattggcaaaaaataaggtgcatattacttgttacaacataaatataatacgacaaatgtagatttgaaataggatcaattccgagtgacaaatatttgagcatacagacagtagctcatacataaaagactaatgtcattatcgaatgcagtacaagaacacatatcaaggtagtctcaataatagatgaatgagggttaaattcaatagaattattgaatgtattatagacaaacatatacatatgagtaataggacactcgctatataataacagcaaagtcgaatataatcataaatcaaaaatgctcaaacatattacgacttacatgagaattctgcagctgaggcatgctattgaaatcctcacgaaaaaatgaatacaaacaggaggcaatatgcgaggtatccttaatataacgacatcgaatgaggtgaatgcaaaaataaaaacaatcatataataatcattatgaaagaactattgatatagatctaattacaacgtcataacattagctatcgtttctagatgaacagtaaaaataaaaaacttcacagattacattaacaaagatagtacgataagaggagaacgaaactactaataaaaaaatcacttttggatatcatgaaaaaaacgaataaactgtttt

SEQ ID NO: 188981 - DNA, 586 bp, Arabidopsis thaliana
acactatacagagcttgacgtcgcatggcacgcttacctgcacccggcagcctctagagagctcgacagcggccgcctttttttttttcaaggaaagaaccattctacttccccagaatttttgtcaaatcaacaaagttctttagagaccgcaacttatgaaaccttatctggtatccctatgcagcagtcagacttgaaaatacttctggaaaggaaaaccattgccctaagaatacatgctcccattcacttgatacaagcgggatggaagacttctaatacacccacttcgttatattaggaatacgatgttatagacaagaagaaactcgatcaaacgacgcaaagctcttatataagccttaaaactcgaggaggcgcctcatgacgccaagcaggtccaaatgtgatgtcatctgtggaaaatgcccgatcgcgtcctcgatgatctccactggcgatttccctttaatcttctcctgcatgaagtatgcaacggagacaggcactacaaacgccgtttcttgtatatacaaccttggcaagggcacttgccactttgttctcaaaaatattgtctttt

SEQ ID NO: 188982 - DNA, 679 bp, Arabidopsis thaliana
cactatcgattagctttgacgtcgcatgcacgcttactgcagcttgaatcctttaaagcggccgccctttttttttttttttttgatcaacgatttaaacagtttatttaccaagacttacagtaaaatgtacaatgttcaagagtgtccccaacttatgtagtatgtactgtagtccatatgctgaagtcagacatgtcaatccttaaggaaaggaagacgagtacccgtagtccccatgctaccatctgctgatttttggggggatgaagatgtcaacgtcttcttggatgatcggcgaggaagaatctgaaggcgcggattaatgtgagtgctcccgttttcaagtgtgagttggtaattctccaccagttatagctgccaaactattatatttgatggtttaagaagaggctccactggttcactttctttgaatgccattaatgctactgttaaagtgacatcctcaaggagctcgtcctcatgtaaactgggcatgtgctcctgagtaatgtctttgatcataaaataatagggcgactgcttggcaccttgaattaggaaccggttcttggcatgcatcccaacttttccctataggggagttcatattaaaaaaccttaggctttgagggatgggacctttttttttttcccacgtgttgggaaaaaaatt

SEQ ID NO: 188983 - DNA, 876 bp, Arabidopsis thaliana
cgcccgtgatcggacgcccagtacacacgtcgagttctaccaagggcaggcttccaaagtgagacgcgcatccacatttttttaaacgcctttgacagatcccgacacaattaaagtggtggagaaagagcgataaactgcaagaaacaaagcgaagaacggcccgacaacacgcagcgggaaccccgagactgaccaaaaccagtatgaccaaaaaacaacaaaaggaacaacgcagctaatacgacatcccaccaccgtagaacaaatacgaaaacttacgagcgccaaaattactgcacaactactcatacaaacttcatctgtcaaacgcatgagcaacgcgaccgaccctatacagcactctgttaacgaaacaaaagcaaccactcaaaagactaataggcacggaacatatacaggacagaaagcacctgacactgaaccacgctcacagcgcaaacacctacgaagaaataacgccagtgcacggaatagtcatacataaaagtacaaaacagaactacggcgttaaaagcgaacatgttaaacaaattgctttacttaacacatcatacacggtcacagcatgggatcaagcacgtgacacaaccactcaaccagtgacactaacacgtcacgcatccacacgcacacgtcgagtaacaccacagtaacaatttaatcattgtgccagcgcgacgctgcctactctgcacagtagcaagcgtgtctacgcactaatcctaatacaacgctcagtcgagaccactaaagtcactaagaacacacaaaacggaggaaagagaccctcacgcaaagactgtcggacacccctaaggcattagtgacgatgaaacgggctacaacctcaaa

SEQ ID NO: 188984 - DNA, 218 bp, Arabidopsis thaliana
ccagatgtacatgaaaaaacagacttatagcggtttttatttgacccggaccaggggagtgcaaggcacacggcgcttagtgcgggacgcaaagcgagtggacaggagcaaggtgcctacgtggtgcacccggccaaattgttgagagacgggtggaggtcaactccacgctaaaaaagtcggagagtgagccgaggcgcatacgcagggaagagaga

SEQ ID NO: 188985 - DNA, 739 bp, Arabidopsis thaliana
  unsure (1)..(739): unsure at all n locations
tgacactatagacgagctagtgacgccgtccgcaggctggaatcttcatgagcggccgccctggncgtcctttttttttttttttggtgaatcaatttttttttttgagcaaccccccaaacctttagatttgagtttcggataacaaacggtcaaaatgagcccagtacttggggccctggggacaaaatcaaagtggaatcgggaacgggtgaaatctgaggggttcacaagccttgttttagcgcacacctcacaactgttgacggagggactaagtggggaataaggcaaagggttagggtggaaaataaaaaaaaatttcagttgaccaaaggggaaagggtgtgggctgttgaccatttggcctttgggtttgaattttccggtgggccttgagcgcaccaggggcttagggccaagggggagggaaaataacttttacctggggccgaggaacgcccaaagaagcttctcgggaaaagggaaccttggcccttggagaaacgtttacccaattgcccgcgccagctcctttagcttttaagagggcctgggggcctgcccaaaagggggggattcccccccctcccccccttttaggaatccctttattttttttggaaacggattgcccgcctttttttccgagggcttgaatccctccccaggncccttttgggcgggggggaacccgcggagcggcgggaaaaacccggggggaaaaaatggcggggcc

SEQ ID NO: 188986 - DNA, 618 bp, Arabidopsis thaliana
caactgcaggccgggccgcgaacgcactagggcggacgggacaaaatttggtttcaagggcacacgagggcaggggagaggaagcacagaccaccacactggagaggccaaaacagacgcgcgagagacaaagcaaaaaggagcccaagaagccaagaccgcaaggcagcaacacaagcgcaaaaagcccaacccacatggcaccaacgcgaggaacgccgtcccagcaccgggcaaaccgatgagcaacaccaccgcaaggaacaccaagccaaagacaccgacccacgcaacaagaaacagcgaaaaacgcaaaagcaaggaagggaacccaaacacaagacaaaggcaccgcagtaaccagaagaaagcagcaaacgacggacaaaaggaggcgggcgaaagaaaaatcggagacacacaggcagacaccacaggaacagcacacgggaacaaaacgaaaacgacagaaacgacaggcagagaaagaacccggaggccaaaagcgaggacacaaggcacaaaacccaaaaggaaccagcaaaccagaaaccaaatacagacatccacacacgcaaggacgaaacgaaaccccaacaatagaacaaccagccagaa

SEQ ID NO: 188987 - DNA, 632 bp, Arabidopsis thaliana
gacactatcgtatcagctatgacctcgcctggaccccgaccgtagcctggaatcctttaaagcggccgccctttttttttttttttttttttttttattaaccaaaaggctttctttactccaatttggacaccgtggaattttcaaaggcaaacctgaaataaattaaacggcttccaaaacaggggggttttgtgtaacaagccattgaagaccttcccttaagccataatggcctggtaatcctgtatgatctcctagggattcttcaaacacagggggtttgtgacactatacacgggggataaagtgacattcaaacttgcctcatcgatctttttgacaaccttccaaggtgctgtttcgatctctattgctatctccctttgggcggacataatatttgccgggacctgtcgaacacgagacttcagatttccccttatagggacggacatttttggaaaacttgtggaccccctggggagcttctcgccccggaggaggaggaacttctgcctgccctaagaggccccactttcccaaacgaaaataggaagcgcctatctggtcattcaagggaactccgccctggttaaaagggacctttggccaaatggaccccccctgaa

SEQ ID NO: 188988 - DNA, 884 bp, Arabidopsis thaliana
cgtcgcatgcacgcgttacgttaagcttgggatcctcttaaaacgtgccgcccttttttttttaaccccattttttacaactttttctcaactccactctctaatagcgtgaaaattattaaaatatttattaaggcaattatatctcttcatctccctactacctcagatatttctttccttctatattcccattttttcttatttcctctctctaacctctatatattttataaaattcctattttgtatttatttaaattttcttatattcaatgttttagttaattctctcaatctactttcttgttaacttctatattgacagcatttatgattatattctgtttactatattccattacaagtttacatgatatgtgattgactctctttaatcttttttctcttcttttatactcctgattccacatacaacttcattccttccctctttcagtatatatcacgttttttatgagagttatcaagtatacatgacacctcatcaaagtggattacgattaagtgatgattatacttatccttgacactaccgtttcgctaaatgatgatatgatcacatttcgtccttctactttccttctctctcatatatttgtcaaacattattagaattctcgtcattctacgatacttgttcaactctacccatgtataccctgtctaatttctctctcattctgatgcttgaccattattatattcccctcctacttctcacattaccacgtgatatctattatctgatacttacgatcttactctttatactccttactattaccttaaaatttcatgtgctattattaattgtttttactaagtctccatagtttagacatcaatcactatgtctcaca

SEQ ID NO: 188989 - DNA, 374 bp, Arabidopsis thaliana
ctgttgatgatcaaggggagggggtaatcgagctccgtcgcctgatccggctgattcttgagctcctgttgttgttgatcctaatcagtatcatgcgattcttaagagcaagctcgagcttgcttgcgctgctgttgctcgtcgtgtgggaactgtgaaaccggaagattcgagtgctctagctagcaatcaaaaacaagctcaaggctccattgtggcacaaacctcacctggtgcttcatctgatagattttctcccacaacaagcacgcaaaagaaacctgatgttccagccagacaaactagtatttcatcacgagatgattctgatgacgatgatcttgatggagacgcagataatggagatcctactg

SEQ ID NO: 188990 - DNA, 460 bp, Arabidopsis thaliana
  unsure (1)..(460): unsure at all n locations
aacaattnnggaaagcaaaggtgatggcttaaacaaaagaatcgcgcgaaaataaggtagaggtttctttaatcttctttggtcgacgagagccaaaactgacacacaagaactaaacaacaatttagaaccatatcccacaaaagggcttttctctattcttctattctctaattgaatatggttaataaaataatcagataccaatttttgtaagaataaaataaattccccgcaacatgtcctctcggtcttttgctcttcttcccaactctctctctctcttctgtaaattagcctcaacgcagagctgctttcatcttgatctctttcttgtcttttccgcttcagtttctttagtctacaaggcgtttatagaacagaacgtaagcagccgaggtcttgatcttttcttggctgatttggtggacatggctatcatcaaagtcataccatcgat

SEQ ID NO: 188991 - DNA, 1156 bp, Arabidopsis thaliana
gaaaaaaaccccggaaagatttgggagagaaaagagcacattaaggtcgctacagccttgagcgtcgagcgacgagggttttttaaccctttttgaaagcacggagggacaccttgggaaactggggagatacaagcgagaaatggaaatactctcaacaaataaaaggaatgaccaaactcttattgagatgcaaagaatgtgacttccgtagtaaacagcatgattgctcgctcacatatcgtatgcgaccagatcattatacagcaagctaatgaacgtgcatgttatacggatcaatcagatacacaagtggtatacaatcatccctaacaagaagatattcgtaacaggacataaataacaagtataaacaatgtatcactaactgattgcgtatttcaagcggcggagtgcatggatatacgaatatgatagatagcagctcgaactatacgcacataagcaacttatactcgcgaaacataagataaccagcgctaagcagggaacgacatctccggcgagacatgagtagacaacagactgttgaagtgagggtagtgacagacgaactgaacgacgcaacagccaccggacgtgcacagggctaatacagtgtatcgatcaagtaacagaagagcatcagaatggaggacggcactacgtgtgtaatctgctgtcaccaagcctccgtcgagcatatgacagctcaactgagcagagatgcgattaaatctaatatttgagatacagggtatcgagatagttcgtatattatggtagagaataagaataatgagcataacagaagtcagacacattgtactgggacaaccacctgcctcatagccgctgacgaattgtaaaaaggacgatacaaaagaggcggacactagagactcaattgtaatagagtcttggaagaaagctgcgtaccatgcaacagggggaatccaaacaccacagggctatttctcattgaggcgaaaataatattgcaagcgacatcatcccatgtccggctcattaaatagtagatcttgtcaccaacaaatgtgtacaacaaacgcaatcaagaagcctgacacgataggtagatgcagcggagatttgaggatactacgatgcggtacgagacgataaacttccgagc

SEQ ID NO: 188992 - DNA, 662 bp, Arabidopsis thaliana
aaacaaccacgggaggggggcgcgaaggaaccacccggacccaccacacaacagcgcaggggaccgggcggcgcgaggaaagcggcgaggacgggaagaaacccagacggggcggccacagcgcaccggggcggagacccccagaccaagggaaggccgaaaggaagcaaaacgcgaacacaacgggcgcgaaacaagccgcccacggaacaacgagcccgaaaggcaagagaggcaaaccccaaacaagaaaacacgcgaggcgaccgccgcgaaaacgcagccaacgggggggggggagccgccgcagaggagccgacgcgcggaggacacgacgagaaccggaacccgcgctcggacaaggcacgacccacaaagggcggagcaagggcagacgcgccacccgcagcccccacgacgacccccccccccaggaccccaaacgaaaagccacgaagaaagaacagacacggcgcggacaaccagcgcggaacaggccggggaggagaaggaggcgcgcaggcaacaccaagggcggcaacggggcgacgcgccaacccgcgccccgggacgcaccaaacgggcacaacagcgcacacggcaggacgcggagccaccggaacggaaccagcgacagacccgcccagcaccaccgccacgcc

SEQ ID NO: 188993 - DNA, 398 bp, Arabidopsis thaliana
gacgcgcacggcacgcggagagcagggaagccggcggagaagaccgcacgcccccgagcggcacggccgacgcgcccgacgacacaggagaacccgaggcgccgcgagcacacacgccgaaacagggacccggcccacgggcacaaacgaagagacgcagaagggcgagagggcgacgaaccaagacgagcgacagaccacgaaaaagcgcccaaccggcaccggcgagcaggaaacaggaggccaaacaagcccgagagacgaacgacgaaggcggagagaagacaacagaacacccaccgcgcgccgccgcccacggcccacgcgaacccgagcaccacgggcgacggcagggagcgcaagcgacccaacccacccggaggcggcccccgacggca

SEQ ID NO: 188994 - DNA, 636 bp, Arabidopsis thaliana
caacgacgctagaaagggaagagacctgaaccatttttttttttctatacagcacgagaccgatacactgggtcacaatcgcagtaaaagatgggccgcaaaggacatattcgggggaaacaacgacgaggagagagaaagggaagacacaggcaaagaaatgtccgagaacgtgaactcaagggtggagaagacgtatgagacgcacggagagaagctcgttaggctacaggtcaaaaaggagaacataatggccaacgacgaaactaacgagaaagggaaaaggaactggatcgagcacaaagagaaaagggacgggaaccagagagaagcaaggaaagaaggcaaagggctcaggacatgatctagagagacgcgaagaaaaaagatctcacgaagagtatgacttacagggacgaccgagcagttcctaggagtggagaacgcagaaagaaaggagctacggcggaagataggaactatggcctatgggcaagagattgggggaagaacacgggaagagatggatagagtttgaacaagaaggtgacaggaaactggacaagagttgccaaaacaaagcacctaatagaacaggggccaccaagccgaaaaggaatagaaatgtaaaccagg

SEQ ID NO: 188995 - DNA, 309 bp, Arabidopsis thaliana
cgtttcgacccacgcgtccgggtcaaccgcttcaagtggtgggagctacacggcgagaaccatttttttttttcgtcatctgctccaaacgtgacatctggtgtggatgtcacatgccaagatggcaccggcaaaatcctggaaggtgacgacacgtaaaacgtggctcaagctctcaaggatcacagtgctttaatcaaggctgaagggatacagcggatctgggcgagtcacccaacgaaattattactttatactctgtgcactgatgtttagcgcttacttctccacttcaggaagttatcccga

SEQ ID NO: 188996 - DNA, 645 bp, Arabidopsis thaliana
  unsure (1)..(645): unsure at all n locations
gttcagggacagacccacccggnccgaagacaaanaaaacggccggcaggcccggaacgggacgaagggtttagtttctcaaccccgccaggaaaagaaccaacgaaggacggggggaggacaaccagcggcgagcggaacaacacaagcagcccccaaagaacacaaacgagagcagcaacaaacgagcaggccgagaagagcagaaaatcgaacaccgcgcgaaaggaaaggacggaagaccaacaagcccgagacgcccagagcgccacgaaaacgaccgcgcccaaaggacgcgagaaagacacgacgcacaaccagacagaaccacaagaccgcgagacggccgacaccccggaagaaagaaacaggggcccggagccaagaacaaaggaagggaagcaaagggggaaccaggaacgcaccaaaaggaaaaaaacggcaacccgagggaaccccgaaaggacgaaagcaaccgaaggacacaccccgggagacgagcccccaccaggaaaggccggcaaccgccggggagacaccggaagggaggacaccggggccagaaccgcgggcaaccaagggacccgaaacgtcaaaccccaggagagaaaaggcccggagaaacaccacacactgaaggacgcc

SEQ ID NO: 188997 - DNA, 299 bp, Arabidopsis thaliana
ttggggaaaaaaacggcccaccggcaaagaacggacaacacacgaaagaaacggaacagaggcgaagcgcaccttttattttttcagaaaaccaacaacgcaacacaacaacacaaaggaggggggggggcgaacgaagcaacaaagcacacgacgcccccacgcgaagaaaaccaacaaaagcgcaaccggcagacacgagcgacaacgccgcgcaacaggaagacaaagcgcgacaacaacacagcgcggaaagaaaaaccgcgaccggacaggaagacgaggcgagaggaccacca

SEQ ID NO: 188998 - DNA, 289 bp, Arabidopsis thaliana
tagtaactcagcgggccgaggactgggcctatcggttcttatggcggggggcgacgcaaggtaatacgaagggcatgaataaggtaagccgtgctattggactagttactcaaaatgggatggaactgtgagggacgaacagcgggcgtcggagctttaagaggagggaccgaggcgggagagagggccatattcgccctgccgtcgggcaaagacagaggtagtgggatgttggtgcgagggcagcgtccaacccaagccagcaggggctgaggagtccaggaggggc

SEQ ID NO: 188999 - DNA, 1242 bp, Arabidopsis thaliana
gaggagccaattttttttttttttgtggaagccttgaatatagattcatatgtaggaagcattggtgggggtggggtaaaaccgtggtgagagaaataggaagagggtgataaggaggggaggagttatggtaatgaaaagagggagggtaagggatatatggattgattggagtgaaaagaggtaatacgtagggtgggtaggtgagagatattggaaaatgggagggggaggaaaataagaggaagggaatgaggtagtaacgaaactgtgaaagggtaggggatgtgtgggaaaagatgcttgatagacgagatgggttgtaagattgatgagtaagaaggagtaatatgaaggggagatagttgtggatacaggagcgagaaataagcatgatactagaagagagagaatggttgtagtatagatgtgtaagcatgtaggtggggtgataggatgaagatagagtgagatagagacgtgaatacatctgagataagactatttataggacgaatgttagtgtgataatgcgagacgcgaatggagagctgtctgagagtgtcgtagtgatgtatggttatccgtatagtgtgcggcgtaaggcagagtagagatattatttagagagagaagacagtttagatgtgttcatgtgattatgttatgagaaatagacgtatatgtaggtgtgaggagagaagagagagtatatgatggaaagtgaacgaggtatgtagtgagatatagatggatatctgaagtgcaatggtaagtaatattagtatgatcgtttgtgataggatgagtagaggagtgagctgacatttaagcagtgaacatgcgaagagagtagtgagtaatggcataagggatgtttatgtgacggagagagaggatatgacgatcaataagctatttagtggattggagaatatgagagaggatatgtgcacgaaagaagaggaatgaggaacgaagaggtagagagaagtaagagcaagtgtaaggaaatgaaagatgagtagttagacgtgagagttatatgatgtgataagaggagggactatgacagtaggtgaggggcattattcgagtgaatagcgtgtcttatgagaaaggagagaagattgagtataatgtatagaataagatatagagcaagacagaactagatggttgaaatgttagaataggaacatatatatacagaggagtgagtgtgtacgagtggctttgtag

SEQ ID NO: 189000 - DNA, 368 bp, Arabidopsis thaliana
aattcccgtgtcgacccacgcgtccgcgtgacggcagactcccaaagagagaaccccgccagacaaggcttacttttccacaacggatggacccatctcgaactggagatgggccggctcgggagcacgtcggtctcgtgcaaagatcaaccatacctacggcgattgcaacaactgatcgactgtgcaccgctgcgaggattatatgcagacacatagagcgtgacgaccacttgactaactaccctggatggataccgaccatacttgtgaggggggctggtggtactgtggctctgatgaatatctgtatggatatggatgacgtgggtcgccagctatatgacgtgggtatttattgtttggag

SEQ ID NO: 189001 - DNA, 1203 bp, Arabidopsis thaliana
  unsure (1)..(1203): unsure at all n locations
ggcaaaaaaaacgaacggaccgacgggaggtaaggcgaccaagagagaagaagagagaacaggagggaaaaaaggggagaggagagaggaacgaacagttttttaggattttttgggccaaccaacggacaccgaggaaagcaccacgacagaaagcgagggggggggggaggaaagaaggaagaaaaaagaaaggagggggcgcgaagaaggagaggggggggaaagggacgaacggaaaaggggagaggacgagcaaggagggcaagggagggagaagcaagagggagagagggaagggggggaagggaaggagggaagaaaaaggggagacagaaaagagaagaggagagagggaagggggaaagggggaggaagagaaaaggggggaagagggggaggggaagagaggggggcagagagaaaaagaggggngaaggaaggccagggaaatgggagggcagggaaaatggagggaacgggagggggcggggagagtgcagggggatggaagaacgaagaggagaaggaatgagggacagagcggaggagacgtggagcgacaggaagagacagtgaggagagggagaagaagaccagtggaagcggaagaacggcagagaagacggggcaaagcggaggagaggacgggatgagagagaacaacggataggaggagaacgcagaagagggagatcacgagaagggcacgggagatgagaagagaaaggcgagaggagaagagcagagcgcgtatgagaaggagagagggaagacaggagacgcagagatagagatgccagagatgagagaatgaaacaggtagcgcggcaggcgacgagataacgcaagagaagaaacaggacgactaggcaaggatcgatgagcgagagagtagagtagtgcagagtgagagaaaagtaggagcatatgaggaaggggacggacagtaagatggggagagagcggaaggcggaagatcagacgacggagacgggagaagagggtcacgaaggagcagaaaagaagaagcgaggcacaggacgcgaagatgcagcgatgagaaaaaacggagcaagcgagaggggagggaagcaggaagagacagagatgggaaggagaacggggagaggagacgagagggggacgaagaaggagaaagagcagagaggaagcgacgaacaggcaggagatgacgaggga

SEQ ID NO: 189002 - DNA, 723 bp, Arabidopsis thaliana
cggaatttccgggtcgacccacgcgtccgagaggttctacgaggaggaagacgaacaacaggacgatgttttttaagaagaataagcgccatacgagcctgcctacaagcccactgggctcgtctataagaaggcacacaagcccatctctattactgatataagaaggcccatagacgctgtttactgccaaatatagactgacgctggactaaggctgtatgaattgtgacaccaaataccatctgtcgacatacggaggttcactctctgacgacgaagccgaaggaggatcagctcgctctatcaacatagccacccaacaccgtggacgacaccgtttggcccggtagctgcaacacatgtgattactcttggttgtccactcccactgagacatttggcccaaacacaaagacccgattataagcccaacacgttagtaacaaatcactgggtcacgggtgaataaatggttgcgacgaccacacgagggctctcttttccgttgaacctttatgcattgccacggactgaagaccctccagagcaaaaatgggttatattgcgaaggaggccgtaatggaaccttatgatcttatcctgtataagagaatatggaagccgagtatgttgctttactccaaattatatgcgtattaacccgataactgttgctgatcatggggtaagggtagcccatttcacgcctctatatgacca

SEQ ID NO: 189003 - DNA, 645 bp, Arabidopsis thaliana
ttaattttaggggaaaagaccccaccgcgtgcctgcacaatactaatttcgatgctcacatcgccgggaactgccattgtgatatttccaccgcacatcgagttccacgaccatcgtgggagtgggggatcaagcagaatccgcgaagggtcagatcgcagacaatcttggccacaccattgtatctaatgctgacgacaacatagactacatacgcgaagccataaaatcgagcgtattgaaacaaggatcgcccgcaacccacgttccagagtatggaaatccggacattagcacgggggaagaagatgtaactatatcgtggatagaaaccgcgaaaaagtcatcccggcatcaaaaaacttatcacctccggcatctctctcgcggagaaaattatggcggagcccatacatacacatcaacctacttcatagctccgtccatgcgacaacgaccgcccgccctaaagaatgggccgcaccttacccaaactgggggaaaaaaagaaaccgtgaaaaattggcccaaaaccatatttcccccagggaactcacgaaggtatacgcaccccaaaccttgaccaatcacaatccctatttggattgaggctactcgccaagaaaaccttctaccccgatcggc

SEQ ID NO: 189004 - DNA, 675 bp, Arabidopsis thaliana
aatttccgtttcgacccacgcgtccgcgggcaagcagacaagagagtggggtacacggcaagaaacggttttttttagctggaggaaactgaataggggctacagtgtttgtcgagcgtgttaagagacgtcggctagggttatgttgtcagaagcacgtttctgatctacgaggacatgtacggtacaacggtggagacactctgcgacatggctttcctcgcgtacgaatatgatcgaaggtagcggaccaaatttgcagagatgagctgattgtgctgtgagatctatgagcatctcagagtgggatacggcaggaagtgaatcgcgatcttaggcggaggggagctagtagagtgcggggatcttggtgtgagaaatgtcaggtaaagacagtgcaagtgttttaaaaccggaggattatattatggtgagcgctgatagtaaccacggatagggggagaaagagttaccgtggccggtgaggaggaccgggattaatcatcgcgtcatatttgtacagtacactctgttgagtgaacaaaggcaaagaatcgacgggggggaatatcttacaacggtggtaaaagtattaaggaggcccctgggcgaaaaacataacaacctacgaagggggagaagaggagtttgaacgtggggacaacgaatatgggg

SEQ ID NO: 189005 - DNA, 346 bp, Arabidopsis thaliana
attttccgtgtttcgaacaccacgccgttcccggagtgattgacaaacattcatacacatctcgaggtgacttaatgattgcacgattttttttattacgcctggtgtgatactaccccgatgctaatcttttcactgaattattacatgttcctttctatcacaattccggaaattagaatctattgattgtcagaaactactctaaagttattacagtataacatacataaggactcgtgtcaatggactcaagtgacttgaacccaaggctgaactattgaatggttataagatgacttagaaatgtgcgattacaggtcactagcaaaggctggttcccttt

SEQ ID NO: 189006 - DNA, 340 bp, Arabidopsis thaliana
  unsure (1)..(340): unsure at all n locations
aaaaaaaacccaaccagccggaaaacacaaaagaaacagccccccacaacgagacaggacattttatattttaccacncccacccacgacaaacaacaagcacagaacgggggtgggggagcacccgcaagaaccaacaaacaaaggcacgaaccccaaacaaaaaacaagcgcacacacaacaaaagagtacagcacgaagcaaaacagagccacaacagaaacacagagaactagcaaaagacacaccacgcgggacgacaaagaaaacacacacgccagaggaagcgaaccgagcccacaggacgcgtacaacacacaaagcacgagcaaccaccgc

SEQ ID NO: 189007 - DNA, 1084 bp, Arabidopsis thaliana
ccggccccggaccccaagaccgccatgcggcgccggcgcagcaccaccgcacccaaccaccgttatcctcaccccacccgcaccccaacgccccacccagacggaggggggggcagcccacacacgcacacgggcaccccccccccaggccaacaccccccggacgacacccgcaaagccccagccccgccaacccaccaccccgccgggcccccacgcaccaccaacgcgcggaccacggggaccgccacagcgcaccgaccacccgccccgcgcacgcacggaaaaggacgccacagacccccacgccggggccggcagacccccccacgcgaggacgggacgagaacgcaccggacgcaccgccaaagggtcaccccccccccgcacagcaaagagaacgcccgaccgcaacacgcacgacacagcggggcacccagagaagcgaaggcacgccacgcaccgcacgcgaccgagcgaaagccgcaagacagacgcgcgcagcagccaagacgcgcaacgaggggcacccgaccgccgagcaccgaccccggcgacgcccaggacgaccaccggcccacggccgcgcccaccgccaccggacgcagcacccgaacgcagccgcaccggcacccgcggagcccaccccgaaccggaagtgcggccacccccgggcgacccccacggaacagcgcagcgagcgcacgccgcgaaccggccgccgcgacccggccggcgaggaccgcaaccaccgcgacacgacagagccgcggcggcgacgccgcccagcggcagagcgcgcgggagacgaccacaacggcacagaacggcagaaccgcagcgcaagcgcacaccctaccgcagacacccacgacacagcaggcagccgaaacgccgccacgacaacaagcggacgcgcgagcagcgccccacaccgccgccgccaccgccccccggagcagcgaccacaagacgccacacgacaccacagccaacaccagacccggcaaccaccaccccgaccgacgccgccgcgccacagaccgaaccaaccaccgaccagcccgcccgcgaccaacgccgc

SEQ ID NO: 189008 - DNA, 334 bp, Arabidopsis thaliana
cccacccaggggaagccgggccaaggacaggacaccggggggaaccggaaagcagcaagaagcagagcggaggaggagaacgaagcaggacgcccgagcgcggaagcggaagggaagcgaggaagcagacaaacaaaacccaccgcaagagacggagggagagcgaacaggacggaagaaaacggcggaacgccagagagagagacaaaagggacaagcacgccggcgaacaagaacggaaagcacgaggggccacgccgccgcgaaacccaaaagcgcagccacagcaggcagaggagcgcagaaaaagacggaacggacgcgacacgccgga

SEQ ID NO: 189009 - DNA, 735 bp, Arabidopsis thaliana
  unsure (1)..(735): unsure at all n locations
ggncgacccacgcgtccgagaggttctacgagatggaagacgagcagcatggcgatttgtgttgaacaatagtaagcgacatccaaaactgtcttccactccaatgatctcggctacaaaaacgatcgatagccattaatggttcggcatctaagaagttcatgaaacgctgattactgccagctatagcgcgatttttaaatcagagcatacagccatgacctcacaagcttgtctcttacataatcaggctcacatcacacacgacagaggcgttgaagatttggtgcgctctgccactatgtgatcacaactccacacccaatatcctcttacatcgtacttgtcgctcctgcacttactgttgctttgactatcccacgaagagttaaggtcaattatctgtgtcccgtttagtaatccgactcgaaaaaagagtatgctagggtctctggtgaacaagttgttatgtctgccatacgagagctctggtgaacgttggatctgtacttcttgccacgtctgaccatccaccatagattaatggggtattatacgagggagaggtaaatgaacctctttagatttatccgtattatgnggaatattgaaggccgaagtattgtgttttttaccttcgaattatatttttgccattatttaaaccccacaataaatttggttgtttggaattcaatggggttttttttgggggccctttaatntttttttaag

SEQ ID NO: 189010 - DNA, 351 bp, Arabidopsis thaliana
  unsure (1)..(351): unsure at all n locations
aaacccacccccggagnagattaaaaaaagcgacgggaacataaaaccaaaaacacccctttttttattatataccaccaaaccaccacgccacaaaacacaacaaacacaacgaagggggggacccaccaaacagcacaaaaataaagcagagggcggcccacacaacctcaaaacggtagcgcacacaaacaacaccggtgacactaagaaccacaccaaaccacgccgtgacacgacaccacaccacagccccccggtgagaaccaccataccacaacacgtaaacccgcacgaccacaccgcgacatacatggaaagacacacgatacccgcgaacaacacgaataa

SEQ ID NO: 189011 - DNA, 935 bp, Arabidopsis thaliana
ccatctttttttctatcccaggctgacctctacagcgactccacagctggggggtactttgtggccttatctgcacctctctcttctcaccccctttcccctcatcctccccgcccctccggtccctcgaccctctccttctccagcgtaccctcgtcccctcctgcgtcttcctaccttctcccctcccccatcccctcattcccctcctccctatttccctagtcgagccccggctccccctctccccccctgtctcgcccctgccttgtaccgttcctttctcccccgctcgcatgctcccgccccagggcgatcgtgctatgtacgaccctctcttcgtcacttcgtcttagcagcctgctctgtcgcgcacgtgatctccccttgtgggtacgccctcgtcttttggttcacacccgtcgtttgcccgatcgcgcatcgcgctggccatcggctctgacccgccttctcccgacatagtctgacagcgctgcgcggatgtagtcccctctctcgctccgtcttctcactacgtgctctagcgtggccacgacttcgacacccttcggctcgcccgcacttgtgccgcgctccactgtctacacgcgcgcttgcgtgacacttccgcttgcgcgtatcacatccgcccggcctagatagtgcgtcgagccgccaccgagcctcatccttctgctcgcttcgtttgggctctactccccgcctgcgaactgtcgctctctcatgctggccgtattcagtcttagttctcgtacctccctatttcggtttgcgatcgcctccacccataacagcatctgctccgctctaccatcctgcatccccccctgtggcacacgcgcctccctcgacgtcccttgggttcctgtctctcggcctccatcgcccactctctgtctcccctgactgctccg

SEQ ID NO: 189012 - DNA, 682 bp, Arabidopsis thaliana
caatgaccagcatgcacgcgtccgcacgcgtgcgtaagctaggaccctctagagcggccgccctttattttttttttcttgtatttcggggaggaacgaaaaatctctcctttgttcaatacagaaattaaatccagctctttgattttttattgtaggcctctaatttggggtgaaactccgaacatttttttttttttggggttcgacacagacgccagaaagagccacaaaaacagcgaaaaagagaacgtttgtacaatgcattctaacattttttttcccccaacaacaaaaaaattatgacgggggggggcttcttccttttacaaaatctcgatttctccaggatgattctttttcgcagacctcagcttcataacaagaatttttcgccggatctactaaaacctgggggggttttcgcttaaggagagaagaacacccaacaaaacaaacctgaattaaccaaaatccagatcacaaatcaattctcatcagctttcgccatgattggaagtcaactaggacgcggttgataagcacctcgctctttcagatgatgccaagaagggcaaatcaaagaagtcggaagtttttctaaccccctttccttaaacaccccccaattttcaccagggaattagtctttcgtatatccacccccgatccccgggggttc

SEQ ID NO: 189013 - DNA, 719 bp, Arabidopsis thaliana
ttccgggtcgacccacgcgtccgtgagcttgtaggcgaagggagacgagcaagaggcgagtgtgattgtcgagcgagaaagacatagaaaactgagaatcggttcgatgagttgggcaacaaagaggatgattgctcattaaggggatggcgtcgaagaagttcatgaaaggctgagtagtggcagggagagcgcgattatggaatcagagcatacagccatggacctcacagagcttgcagtatacataaggaggtgaaagcaaacaggaaagaggcgttggagattcggggcgagctgcgactatgagatcacaactccacaccaaacatccttgtacatcgtagtcgtcgcacctgcactcgttgttggaaggaatagccaacggagagcaaaggccaataataggagtcgcgtgtagcaatccgaaatgaaaaaagagactgctagggtcactggtgaacaagtggttatgtgggcactacgagagggttggggaagtgtgcacttgtactgatcgccatgggtggcgtgaaatcattgatgaatggggtatataggaggagtggtaggggaccccttttagattattccagtttgagaacacgggcgtggagaaggcgtaacacctccaaaaggggatgccctaaataaccacaacaaatgggccggtggaattacgagcagtcggggggggggggagaatactgtgggggtat

SEQ ID NO: 189014 - DNA, 737 bp, Arabidopsis thaliana
aatttccgggtcgacccacccgtccgagtggttccaccatcgagaccaagaagcacaggaggatttttttttttcaaaaagaggcaccaccacgagtattgactacatgcccaatgggcttctctataagatggcacaaaagcccatttttataactgttcataggttgggccataaaccaattgatgtaccaaagataaactatcgatggcctatggctgatgaaatagacaccaaatccgatctgtagactccggtgggacactctctgccaacgaggccaagggtggcatcagttgttcgatcaacaaaaccaccgtccaccgtggacaacaccgtgggggccgcttgctacaacacatgtgattactcttggaagtccactaacactgagtcattaggcccaaacacaaaaacccaatttcaagcccaaatactttgacaacaaatcaatgggtgacggtaggataaatggttgcaaggagccgcagaggtctctcttgtcccatgagcctttctgcattgccccatactaagaccccttcaacccaaagcggggtgattatcaccgaaccattaataaagcctatgacactatctttactttgaggattgtggaccagtatgtgtgttacatcccaaaataactcgcctttttacacccaaaagttggaggctgcaccataggacggcttccccaccttaattcttccccctccaataaacatatggaacac

SEQ ID NO: 189015 - DNA, 740 bp, Arabidopsis thaliana
caggttcgacccacgcgtccgcgatactttcgataagagggagaaaaggaaaaagggcggctattgtttttttataacgcttcacagtggcgagactcaactgcgggctggtcaaagacgccctcgatgccatcgacagcaccctcttctacatggtggagtgccctctatctatgcagcctctggggatgggcgagaagaccatatcgcttgccaccaagactaacggtgtctctatacctatcaaagagagggattccatgcttgggggccaaggatggaaatacacttgaaggagagggtcacgcataaaaagcttgacgacttatgctctggcgccccgaacgatgcaaactggtcagagtctaggtatcaacttgagtcagccgaaaataatcgacgggcacatgtgccctgtgatctacatgcctgatcatggctattaaactcatatcaaggctggtgggcaagatctggtacacattttaaagtgtgaatgtgctatgggaaacacttatgcagcccattgagaagcattataggcgagtagcatggggtgactaaacccgcttcatgctatgaaagaggatcgacgtctctgaagccttatggactggatatgagagccagaagcctggattctaaaccttgaagaaaataaaaatgaaggggccgtgccggtttttaccggaatccaaaacttttccttcacccttggcaaggccaacggcaattggctc

SEQ ID NO: 189016 - DNA, 867 bp, Arabidopsis thaliana
tttttttagaggagtacttacgaagatatagaaaactcgaaaaggtgggtgctggagtgtgtggttagtatgatggagaagtgtggtagtgtatgtagatagtgtggtagtatagtttagaaaactttgaatttacagtttattatatgttggtttgtgtttataaaatgaaatgagtgttagagtattcacctattgtattaggatgtttttgtgtaatttagtatgtgagagtatctatgagggttgattgtagttgttagatgattagattatatttgtgtagttggttattttactgtcgggtgtttatttagctgaaatgtgatacgattaatcagtacggaagtatcgatgtgtgaaatagtgtacattgtgtattttggtgatagaaatagttcgtaattcagtggaacatttagatatctatgagaatacagtgttccaatggtctagagaagtattaattgtgatactacaaatgagataggatagtctttattgactattgtgagaatgtattgattagatgttttagtgaagtaatagtagagttataatgatgtgttctttggtagtaatgttgtaatattcagagtagtagttggattctgatgtcagtgttgaggtagtcttttttagtgtggaattaatatattattgatgtagaaagtatatatgtgtttgctgtagatggatatagaagagaataaagtatgtagtaatgagaatgattggatgattatagttattctggaggtatctaaatgaagtagatagatagttaatgtgtgtaggttttatggtgtagatggattattatgagggcagggatagagttgggagacgtgagttgttatgtagagt

SEQ ID NO: 189017 - DNA, 226 bp, Arabidopsis thaliana
gcacgccacacgcaacgcgacggtagccattacagtgtgacgctcctaagtcatacagcacggaggatttttatttattatcccatgccctgcaccactaccaccggttctcagggggcgggtgggcgataaccgtcgtcagtaacatctctataacaattgtctcagctcctcaccactagaacacagaagactagcttaggcgatctccctcaactacatggaa

SEQ ID NO: 189018 - DNA, 521 bp, Arabidopsis thaliana
ccagagagaactcaacaggctcactggatgatctagtcactgacattttcctccacgcttcttcgggcaggaatttaagcgacagtgaaacagagagcgtggagttgagttcttggacaagaactggtggacctttaatgagaacagcttctgctaataagttcattgattttgttcagagtcttgatatcgacattgcattggtcagaggatttagtagcagtcccaattctccagcagttcctcctggtggctcgtttactccaagcccgagatccatagcggctcattcggatatcgaatcaaacagcaatagcaacaatcttggaacaagcacttcaagcataacagttactgaaggtgatcttctacagcctgagagaacgagtaacggatttgtgttaaacgtcgttaaaagagagaacttgggaatgccatcgattgggaaccaaaatacagagttaccagagagtgtacagctcgatataccggagaaggagatggattgtagctctgtatca

SEQ ID NO: 189019 - DNA, 695 bp, Arabidopsis thaliana
actttggcttggcacgacgtccgtaaagacttggaatccttatagtagcggcacgcgccttgccattgattacagtttgttttttttttgttccacagctcctcggcattctcaaaaggcacaccttttcccagtattttttttatcctattaaacttgccgtaaagcgtgatggatctactacacaaatgcgtaactcgaagttactagaaacttaggagtatgctcatcttagttcattaatgttacactgcaacattttgtatacctatgtctcttcaataattaatcaaatacacacctgcaaattttaaacatacagcccataattctggtagccacattatgcttatctttcttacacgaaaaacttcataattgacgcgtcttggcttcttaaacacttatgggcggctgcaccttttcgaaaatctcttatgtagtcttcacaatatatgtttttttatcaccataatgcaatacttaactatcctgggaatattcgttgctaatcatcaaatagcttctatattataaataggctctgtgaaaacatatgtatttcctatagataacccttaattcgcataaagtgtacaattcattgtgaggtggccataccctgggataaacaagaccttcttttttgactgttctaatcaaggtaagggggctgacacatcaaattatttacc

SEQ ID NO: 189020 - DNA, 578 bp, Arabidopsis thaliana
  unsure (1)..(578): unsure at all n locations
actaggacgagaggagacacgcggaccggaggaggagaaacaccaggcagggggccgaaaagagggaagagaaaaagattttagaggaagccaagaaggagggcagaaaaaggggggggggcgacaaaagcgaagaagaagaggaagaacacaccagaacaaagggggaacaaccgagaaccacccggaaaacaagacgggggagacaaacaggcaacgggcgagaaagaaaggacagcagggaggacgaggcagggaaaggcagggaaagaggaacaagggagaaaaggggagaacagacaagccaggcaagagagcgacgaacggaggcagggaggaaggaaaacaggaagaaggaagcgaagggaaggagggagagcgaagggcgacgggggaaagagaagaccgaagagaggaggcgaggagaaggcacgagaacaggcgggagcaagaccggggacaccgagggcgagaacgaaaaagggaaccaagggaaggaacagacgcaaaaagaggngacaaaggcgaaagaagaaaagggagagacagacaggaggaaggaatgaacagcacagaag

SEQ ID NO: 189021 - DNA, 963 bp, Arabidopsis thaliana
gaacgatgaaatgacacgacgaacgtaaagcatgggatcctgcaaaaagacggaacgcagctataaaaataaagaaactaaggtattaggtgattagagcgaagagcaaaagagaaaaaatagaaaaagcgagagggggaaaaaacaacgaggaacaaggaggaaagagaagaaacataaaaagcggagacgactaaaaagaagtaaataacaagggaggaagtggggagaagaagctaaaaacaaggggtatgacagtaggcgaaaagaaagaacgggcgcggaattgacatcattgggacgcaaagaaaggaagatggaaaaagaaataggacaaaggggaaaaaatggccacagaagaataaggaaacgtgaaaataggaaaggaaaatcgaagaggaggagggaaaggaacaaaagagggggacaaacgaaaaaagtagagcagaaaggcgcatgtgaggcggagaaggaggaaaaggagggggactaagaagagcgcctccgatcgaccgggcaaacgaaagaagaggcaatggggtgagaaacgatgagggggagaaagaggaggagcaaaaggcacatcgcggaacagaacgaataaacggcgaggcaaacggaactggggggcaacaaaagaattctatccatagacagacgagagggaaaagaccaagcccataatacggctatagacaatcaagggagaaggggaaaactatggggagaggagacacagcagatcagggagaagaagtgaatggaaaaaacaaaaagaggtggcgtaagaaaggaataaaagaaaaaccttagaaaagagaaagggcataaaagaaggaaaaagaaaaatattaaagaagtccacgacgggaaagacgtagaaggggcaaacaaaagaagccgaggtcacgagaaggtctgaaaaaacgacggaaggggggaagagccaaaaaagaggaaaac

SEQ ID NO: 189022 - DNA, 509 bp, Arabidopsis thaliana
  unsure (1)..(509): unsure at all n locations
gaagaagagttgtttgattatctttaagcaaagaggaaactgttnttcnctagatccgatccaatccaatcaaacaaaggatccgattgatcagaaaaaatccaccaaatttctcaagatcgaaacatataattgaagatgagcgacgtatttgaagggtacgagcgtcaatactgcgagctctcaaccaatctctctagaaaatgtcactctgcatcggttctctccaacggagaggagaagaaggggaagattgctgagatcaagtctggaatagacgaagctgatgtcttgatccggaaaatggatcttgaggcaagaagtttgcagccgagtgctaaagctgtgtgtctttctaaactaagagagtataaatctgatctgaaccaattgaagaaggaattcaaacgagtctcttccgcagatgctaagccgtcttcccgtgaagagttgatggaatccggaatggcggatctgcatgcagtatctgctgatcaaagaggaagatt

SEQ ID NO: 189023 - DNA, 576 bp, Arabidopsis thaliana
ctgactcctgcaccgtcgtagctggatccttgagcggccgcccttattattttttttttttttttactaaaaagatttctttatttccaacaacactgatctgcttgatacaagcttctcttctttggatgtgatgaaatttgctgtttttattctttggatggatgtacaattgacttactaattgatcggcatttttttatcaacaactcaagcttttccggagaccaaagagacggatcttatctgcgatcacagctttcatggctgcttttgttgcggacatgacattaacaatggcggtcttcttcccacagctaagagcttccatgtaagccgttcttacttctgtgttcacgtagaacttcctcactccatactaaatgcattcctgatctcattcagtaaacaattttcataccccacaaagacgttaattcagttaaattcatatcaagacccccatcaaaagaaaaaatttcccgccgatttttattagttttttattaccaaacaagaaactttcaaacatgatcgactcataccttgataaggttctaagaaaaaccataagct

SEQ ID NO: 189024 - DNA, 861 bp, Arabidopsis thaliana
caatggggcaaatttggagtagaatgaaggatgtgtataagagtggtgtattagaaagggaggaggatatagtatagataggagtaatgtagattagagagaggtagatgagaaaataaatgggagtgagataatagaggatgtgagaaagatgtaaagtggtagataaggaaatagagtggtaggagtgaagttgttaagtgtgagatttaggataaagaaaggttgtaaaatggtagatagtagaattgaatgataaagattgggggggagaggagagaaaaaggggtggaaaaaaatagtgatggaagattaatgaggttggaagaaaaatttgagaggtagaagaggaaaaggaaagtaatggattggtggtaaagagaggggatttagggtatatgaattatgtggagtggaatgaaagatatgtgaaataatagatggaagattaaggagtgatgtgaaaaaagtgatggagggagaatttatatgtaagggaagggtttaaggataagatatgaaataattgatggaagaaggattaaagaaggaaaggagaatacgagatgagagtaaggtgtgtgaggtaaagagagggggtgtaattgtggtatggaatgtgaatagtttagttagaggtgagtttggtagtgaagaatatagagaaagggatagtttagtatatatataaagttgatgggctttagaacaatagaggagtatgtaaaaagtggaggtatggaagaggaataataaagaaggtggaataggaaactagaagataaggtattattgatagaggtgaaaagaaggagaatgggtaaggaagttagagtgtaggtaggtgtggtgtattatgtg

SEQ ID NO: 189025 - DNA, 459 bp, Arabidopsis thaliana
tctaccaaatgatcagccacgatgacaaggggctatgatttttaaaataaaatcggagggtaacaatagggtcgatgcatgtacatgtaagcattaatagagaaaggttacaaggaaaagaacatatcagatcacaagacaaacctaagggacgggaaaaaatgcatcattacacaaaaacagcggggtattaatacggactacaaagtggcgtatgaatttacactattgaaacgagaaataagagattcaattccaacagcaattaagatatgaagtggatccgataatgaatgcaggggcggctattgtgatgtaatggaggagcctgactcaagggagggagtatgataaaacatttaaggcaaaaggagatatagggagaatttgaaaaaatagggatgaagaatgggctaggaacagagttgggttaaaaggataaaagatccgacgaaaaag

SEQ ID NO: 189026 - DNA, 399 bp, Arabidopsis thaliana
accaatcctgaagcatacatctcttggtcatatgaccctcctgacacctgagcttgtccaagattcctccatctttctctcttggaaccctttcctcccaagtttcctgtggctggaaagcttttaatggggtcttctccataatacaacactctgcgtgttctccatgcctttagacaaccatattgggggccttttttcagaaatacaaaccaagggacctttccactttggtctccctgcgagctttttccaacatgtagcttacagactttgttacttgggggttcttccttctttgaaaaggcttcaccggaaattctttccttgtaacccccaaagaaaagccccctggctgggccttcttttggatttgggtgagggggccctttcccagag

SEQ ID NO: 189027 - DNA, 214 bp, Arabidopsis thaliana
tctgccacatgggagccggcgactagcgtattttgacatggtctttactctgagtcggtagctacagaataccaatgaacggcgtcctaaacgtagtctttctacttccttctcatttggctgtgcacagtttttgactactctttccggtttcaccttactgatcacgtggatcaggcgtcatgctgggagttactgcaggatttaccatctg

SEQ ID NO: 189028 - DNA, 878 bp, Arabidopsis thaliana
  unsure (1)..(878): unsure at all n locations
agcaccagctaccgacgtatgcatgtcagcgcgtcacgtcaagccttgggagtcctgctagcagccggaccgaccgcttccctctcttatatttttatttcttttctcttttctacggcgatgcacacagctgctcgcttctcctagaatgcgcaaagcacaatcagcgacattctcactcgcatactcagcatcgcgaacccttcgtagcacttctttctctctaccctcctctacacatacacaccatgtaccaccttccactccnatacaaaccaggggccacctaggagaacggacaaatcttcctacatcctttcacacaaggcgtggcacncagtttacagagctttccatactaaacccttagttactcagcgcactacaacctgtccgtctccgcagagcgagagatcaacacacgacacccaagacatgatcattttgtgaccntctcccattctgtattcctccaaaggccgcagccgcgaantatagtgcaaccgccctcttttgattcattcgagcctcccccgtgtccacacttccaactttcccaccntncttatagcacaaggaaccccccccggtggacaatctccctcccccttaacagcctcttaactataagccggcaagagcacggctcgcacttacatcgtggcagcagacagtcacctcccaggagtcttcgctggaaagcagaaccaataaacacggtctcccttccaaaaataaacccaccctgccccccctcttgattggacacacacccctagatggcctagggccccccttggtgggcggaccccaaacaaaaccacccccctctgcaaatactcccgttggggaaacaaattctccacccccacccgacc

SEQ ID NO: 189029 - DNA, 163 bp, Arabidopsis thaliana
  unsure (1)..(163): unsure at all n locations
cgatgagtggtgggattaaagaagagaagacggataaggctcttttgtgnagattggactatgaatcagacatttccacttggggaggccaagggatcccatggaccgcccgggtgccaaatgaaatagacctcgacatggtttgttaaccaacccataccat

SEQ ID NO: 189030 - DNA, 604 bp, Arabidopsis thaliana
acagcaacatctgactctcgtttatatagaagcaaacaagaaccctagctgcttgtttttttttaggcatacaaacattctacaatccaatttttccattcagagggcttctgtgaaagattgcggtgatataaaacgcacaaaccaacgaccctggttaattatccccgtatgcattttaggttaagataaaaacataaagaccttggtggcgattaatctaatgctcccggcattcacttttttgatcattgggcgcctccttttcattaccattctaactgagcctcttgcaaaaggcctctgaccctgagttgaaagatccctcgagttacttgggagcctcctccagctactaggtggaagctttgaaggtccactcatattcagaccacgcgcttctcaatcgtagcaacatatggagctttctcagaagcagacacggacttcgccttggttgctgcagaatctccaacggccaacacagacatggtttggggtatccttatgaaagatcacggaatttgccgtgaccctaaaaaagcctggccggccaatcggataggggggaccttggacggtttgccacggccgctctgaaccg

SEQ ID NO: 189031 - DNA, 184 bp, Arabidopsis thaliana
atataaaatacctattcattaatttttcttttggccattccatagaaaatggcttattaaggggaaaagaaccccgaccattgggaatgaaatgggccgagattattcattagaatggtttaaaaaaaaaatttaacttccgggaagcttgggggcttggaggccatgaaactggtgccttgga

SEQ ID NO: 189032 - DNA, 313 bp, Arabidopsis thaliana
cccaaaaactactttaatccaaaaaggggccccaaaacattacaagttccagcccctatttttaaacttaacccgaatagtttaaaccgatcaaacccaccctaagcaaaacatggaaaccggggaagcaagcaacattacctttcacctacccgcctaccctacataaacagaacctcctccaactaaaaatccaccacccgaccccaaattgaaaaacaaagagggccttactgaagtggttttttttttgtcccctccccgactgattttactcaatcaacctcaattactttttgacgtttgggttggg

SEQ ID NO: 189033 - DNA, 372 bp, Arabidopsis thaliana
gggttcacctgcgttatttttagaatataatgctctcctttttcccacgggggagattcaaaccttttgaaacatttcaatggaccaaggagtccaagaaccagattagggttttaggtattcaagatttttttaaagaaaacatagaaccggacaaccatcaacatcatagttaaggcgagtagaacatcataagccttttttgaaggacggtaccagatcatttctggcagaatgttaccgacttgggttggtttggttttcatttcttcagagcttttacatgaaatcgtttttaagttcttgaagcgatttgttgcttgaagcaatgtctttgttggatgtcattttatcagttaccattagtccctt

SEQ ID NO: 189034 - DNA, 632 bp, Arabidopsis thaliana
agacagacgcgaccgaggaagaagaaaaggaggcgacaaaaacaaaaccaggccaagaggttgccggcaaaacagggaacacacaaccccgggagcgacagggaggaccggtacagataccggggggcaacacccaaggacaacgtatcaaacgcaagcagaaagaacaagcggcaacacagagaaaggaaaggagacaaaggaaggaacggagcagctcgcagactaacagataaacacagatgcaaaacacgaaagaatcagagaacacacaccaactgaggggttacacaggacaaacgagaagctcaaagagataatagggcccgacagaaccgcaaagcgagagcagacgaaaggagggaccaccaaaggagggaaccgcactaccgacgacggagctgggagcattataaagaacacaagcagacaaacgtggaaggaagaacaagagacagccaccggcaagaaaaaatgcatgcaccggcgaaaaggacccagagcaaaccaaaccaaaaagcgaacgacgacgaagagacaacccacggaaaaccgggacaagaacgcacgaaaaaaaggcaaaaaaaaacgccaaaagcacggaacaaggaacaaaaaaggggccaacaggg

SEQ ID NO: 189035 - DNA, 265 bp, Arabidopsis thaliana
aacagaaaataccgcgaaaacaccgaccgcggccgccccccgccgcaatatccccccacaacatcctgccgccgtttttttttgcgccacgaccgccaaaccgcggcccaccgccgcggggggcgagccacaggagaacgaaacgcgccgagcggccccgccagcccctccccccaagagggcgcgggaaccaccgcggcgcacgacggccgggcacgagacacaatggcgggggcgagacgccgccacatcggaccgccaccac

SEQ ID NO: 189036 - DNA, 295 bp, Arabidopsis thaliana
cggaatttccgggtcgacccacgcgtccgacaactactagtggaccggggacgatcctactcaccgaagtttttttattctctctacgaaaacttggagatgacgatctgctgcacacatgtgatctctcagacaatgtggattcgtggatcagccatagatgggtatgggggttacaggatgacgaacatgcctcttcttatgtgcatgtacagaggggctacgaagaagccgccataaaattgggtccttagaccttgctatattcagacaaactgcggtattgggttgtgac

SEQ ID NO: 189037 - DNA, 177 bp, Arabidopsis thaliana
gcggccgcccttttttttttttttttttttttttttgaccacaagaaaaattgttttttctatcttttatcaacacaagattatacagaagatctactcacagccaaaggccaacacggtttttctctcttgatccccatactcagctcgctcattagccaggatatcaaacacaca

SEQ ID NO: 189038 - DNA, 1237 bp, Arabidopsis thaliana
agcggaaaagacacagaacagaacgagaggggaagaaacggcaagaaagagaaagggagggcaaaaagcaaagaaaaacacccacaacgggaaatgtgacaccgtgaccacacaaacggaaaaaagggccggaaacaggaagggaggccggaagaaggaagaggagaggattatggagggaggacgaggacaagcgggaagaaagggcgggggggggcaagaaaagagaagcacaaggacgccaggggggagaagagacatcaagacaaagacacagataaccaacaaggacgagcagaggtgaaagaacagattgagcacggggatgaagaagagaggagaagagggcgcgaggggaaacagaggaggaagacgagacgaggaaagaccgacacgaaggaagacacagaggaacgaggcagacgaggagggggagaaagagagaagcaagggacgagacgagagaaagaggaaaaggggcaagacacaagacgggcgagacgaggcccggggacagacaacaacagaggaagagacaggaacagaaacgcgagagagaggaatacaacgaaagacagcagaacgggcaggacgaaaagagaaggaaagaagggaggagaaaaaaaggaaaggggaaagacgtcacgaggagggaacacgccgagaacaagggggaaaaagacgaaggaacagaggaggggagacaggtggagaaacggggcaggggcaaccagacagaaaggaggccatggagagagacgagcgggaagagcagagggaagagagaagggggaagggcagaggggcacagagagccaacaaggggggcgagaagagcggacaagaaagaacacgcagagcagaggagagcaaaggggaaacaagcgccagaggaggagaaagggccggcaagaagagagagaagaccagaagagagacaggggaaaagagaaggagagggagaagagagaaagacgcgacacaaggacgagagggcaagcgggaaacgcaagacaggacgcaggaaagacaagggacgcggagacgcgagagcacagaagcaagacgaagggagagccgagcaacagggacagaccgaaacagagagatgacgagagcaagaggcaaggagaggagaagagacgaaggagacgacgagaaagcgcgaagggaaggcaaaagaaggggaggccgacagaacgaaggcacaagatcaagcgggcaaagaggcggacga

SEQ ID NO: 189039 - DNA, 1122 bp, Arabidopsis thaliana
ttcctggtcgacccacgcctccgagaatacaatagagactctaatatctcctcatgtacaagacacgttttatattggggaagcatgctgtgagctcaacacacaactcgttgggggcgttccgtaaaagactatagggaacctaaaaccacggagcaacaggggcctaacgcaccatggaccaccacataagactgctcactacctaaccgtacgaacatgacaccctgaccctagcaaaaccaccgaaccccgatttgtacctaaacgagattcaccccgttgagagtcgcggtacagccgactgtggcatagcaacagcgaggcgtaatcccctgtccctgtgtccgccggagtttatggcaacgttcactaattccaccccttgttaccggggataacttaccttccagcaagaaatcctggcaacacgtcgccggaacgcacactagtcttgcacaatggaacttatgggaccgaacttaaccctaccaagatagcgtcgactaacataactactgaacgtaaaattgtacaccatactcgcaaccttggcgatcatatctgtcactgagcacctattggtcccacgcagtcgcacagataccgttgaaagattcagccgaggtccacaaaaggctaaaaccattccgaaaggcgaagattcggaaaccgaaccgaccctctccgctcatgctgaacagaccatggggacaataccgtctctatgcccaggaaacttgactattgccggactggaagccactagttgaacaaacgtggtcaaacggccattggttgggcaggacagaccctccgagaaaccttcccctcccccaaaggaaatcctttccatgacaggtgcccataaccttacttggccccaagagaaatactcattgggaatctaaccctttaccctaacctagacagctaccaattgctaaacggcgagcaccacccccataaaactgacagcagagccaacattaaacccaggtacccaacagcagctcgaaaacacagactgtgaccccccttccttgaacgcaaccctagggaccttaaaggaacttaccctgaaccttcagtccccgaaacgaaccaaacccaacacgggac

SEQ ID NO: 189040 - DNA, 330 bp, Arabidopsis thaliana
  unsure (1)..(330): unsure at all n locations
cggaaattcactgggaacggacacaacgcggcccggaagaaaacaagagcgacgagcaagaaagggcacggacgcagaaagaagaaagatattatttttgaggancacacacgcacgcagcagcaagccagcatcggggggggggcggagccgcaaccaacggtacaggaggacaccacaacgccacacgagagagacgacggcaacaacgtccgactagcggcaggcagagagaaaacgactaaccgaccagaaagaacacccgaacgaccaacccatcaatgcagtgctccgggaaggagcgaagcagagacactagaccgccagcac

SEQ ID NO: 189041 - DNA, 1110 bp, Arabidopsis thaliana
gggagggagaaggacgatgaacacgaagaaggagaaagaatacagcatggacgaaagggagacgaggagcgcagacaagacgagacaaggaacggtaacaagggacgcgaacgaaaagcaaggggcgggaggcgaagacggatcacacgcagcgacacacaaaaagaaggaggacagagttggtaggacccgtctgtaagaacacggcaccggaaataccggggcagaaaccacgcgaccggcgagtagaaaaaacctgaagagacagagacacacaagcgaaccacggcaacggagaaaaggagagaaccacacggagaaggagaaaaaaagggagatggggaggggaccggtggaaccgccacgggaggagggaaggcacgaaaggagcggagtaggcggaggaaagtctgacggatacagagaggataaacgccggcgggaccaggaggacacccagggggaaaccagagcagggagaggcgacacgagagaggcgcgatccgagagacaccaagggacaggcgagaagtgataaagaaagagaggcgacaagggaaacgggacagctaccccctgagacctcgaagaagggatgaacgggaggaggaaggcgatggagaagcatccagcaggagagtgaaacgactggaaagcgagcaaggaacaggagggaaaactaaagagagggagcggagaggacaggagggaaagaagaagggatgaattgaacaaacaaaaaaaccgggaggggggctccctcaaggtagggagggatggcaacggcccacaaaccaaagatttggggcccgaaaaggcgggaaaagcgcaaaaaagaaaattggagaaacgcgggaagacgcacctccagcgtgtaacagaggaaagagcggccacagatagataagggaaacgaacacctcgacacacggctaagacgccaaaggaaaacgctcacggaaaaggggagggcacaaaaagagagcgggaggaaaaagaaacaaggggaaaacaaggggggcgacaagggaaaaaaaagaaaaggccccaagcaaaaattcgggagaataaaaagaaagggggaaagcggggataaaataggggagagag

SEQ ID NO: 189042 - DNA, 1160 bp, Arabidopsis thaliana
accggtattgccggacccacccacgcgtccgcgacagggaaaacgccgaaatacgacaagcgtgcactttttttttgttgaccccaaaaactcacccgcgaggatgtgtctagacacagcaattaaaagcgagcagtggcacaaaagacagaagggcgtgcgggaagaagaaaatggtggcattggccggaacaggcattcggagactaaaaccaaactcgccccggcctcgatgactcggagcggagggcaccacaaagatgcatctctacgcgcttaaccccaggtctaaaggaaacaacttcaaaggaaaggcagcggcaacaatataataccggcaccgaccccttgattgtccagtaattatgggcactgaattcgaccacacaaaccgaggcgatgaatcaccgttagccgaggcggggccacaaaaatcccccggacagaagcgctcttcaaaccaggtggtagggaaccatattcaatgggttcaaccaatcccttgaggataggacgactcgaccccgtttagaatcgtgcaactcaccgtgtaacaagtccatccccaatccgaggggtccctaccaaaagacactctgcggcacaccgacagacagtgaaaaccttggcctgggaatgggaaaagcgaaatgaggaacacatacccgcgaagaggcagcgtcttcgcctcttacaagaaacaaggggtcgcaaacctcaccacctgggggataatttcacttgcgttggtagaaaaactcatgtgcacgggagacctggccgacagacgcaagggttcttaaacaaagcgcccatcaggcggttattaagcaggcgcccctcagggggtcagctacacccccccccatggggcaaagacctaccggggctgggtaatacattcggaaggcgccgctatagggccctttcttgtcggaaagactccccagttgtacacccgccctttctacgggaggtaaggaccctttgtcaatgcggtccggcgcggaaaccaacaccaaaaaaagggggcgtaccttcagaccccctttttacacgtgggctataaaagagccgtgaaaagggctgggaccagggaaccatgaaacccgtatccttcccttgcctcggcgaaaaacggacggcctgggctgggtaaa

SEQ ID NO: 189043 - DNA, 187 bp, Arabidopsis thaliana
tgacagggaccggacccacgcgagccgaggaagaaggcggggacgtaacggagagagaggacgcggatggtttcaagaacagaaaagcacgagcgggacgaacgggcggggagagcacccaagggagcagagaggagagcagagggacgtcgcggagagagaggtacgcacaagggcggggcgacgt

SEQ ID NO: 189044 - DNA, 728 bp, Arabidopsis thaliana
cggaattgggggaaaaaacccacgcgtgcgggcaaaaaccacggatgcaccaacacaataccaccaatttttttaaccaccccaggcctacccatcgcacgaggggaggctacaatacatccggggccgccccgagcgccatgcgcacacgagatggaggccaaacaaccccgggaacaaccccaccacccaggagggaaggacgccctcaccgcagggagcgaaagccaccaaagggggcgggacggagactgcccaaacacacgccgaaatagcggccgcgtcgacagccgggaggcacagaaagatagggctgggggacccagcagctaacaaaagatgcccggcactcaaacgccccgccgaagtcgacgccgcggcgtgaccctggactacgctcaagaccaaagctcccgaccccaaactaaaagcaccctgcagcccatgagctcactcctaacccggagcaaacatccaccaccaggcaacacgctggcccaaacgaacaaccggcccccacccaataaaggaaggcccgagggagaaaaacagagcagaaacaagaaagcgccagagcctcccaacgctttaccctggacactgggactccaaccagacatgcacgatacaaaagctccaaaaacacccctgataaccccttgcacaaaacatacctatgacccatccaagaatgccgaccaacgccccgtgaaatgggacatcaggcg

SEQ ID NO: 189045 - DNA, 456 bp, Arabidopsis thaliana
cccccactaggtctggcatggggcccctggggaaaaagcccccatttggaataccttggggggaatccacatttaatcgatcaagcggcggaatgggcttttcctctaacatgcgtttccggcacggggccccctcctatattgacacaccgcctcaaatgtcccaccacatggggttcaagacacaaataggtgcataagactcccggttctcaagcacaattgccccctttgggttaattacaaagggttttttgggggaaattggtatgggaaaccaatgtttgccttggccgtaaatcactggatacctccaccgctaagaaaaagggtgcggtattaaagacggggcgtttggcaacctacagtgcgagacattttacctggggggccccacattactggggaaaccccctatagaaaggggaatttggaaccattctaaaacctcttttt

SEQ ID NO: 189046 - DNA, 1201 bp, Arabidopsis thaliana
  unsure (1)..(1201): unsure at all n locations
aaaattagatgtacagagagaggccccggcccgcggcaaagaaacagacagcacacgagaaacaagggagaagacagagaccttttttttttttttcacaagcacttcaactactgataatgtcgtttgttgttgataaatcatagtcagataatctttcaatattactacgtgtcaacattatgtttatgtacatacacataatctatcgcagttatagactctttcgagtatgtgttcactatattgcttattagaactacattaggcttggacgctgatgagacttaaagaattttaaccaacactcgaaaatagtgtacgcttgagatgcgcactggtatgtgaactttgttttatatgttacgtctgaaaaatcactcctcgtactgatatctagttagattaagaagatcagatgaggaccatatgcacattattatcaaatcattgattagctgaacgtgagctatgtcgacgctatatgcatgagagcgcgttacgctctcagcatggtctctgtcgatctgaatagtgaatcgtttgagtgctgattcgatgcagagagtcagagccatntgtattgtcgaacgtctcataganttatggtctagcgacttgcgacgatatgttctgacgagcacgctatatcgaatatttccgatagatatgtcggtatagttcacactacggtacacctcccttatgattcttaataatattgaatatccctatatttttacactatgagtcgcatgatgaatagtagactctactctgcgcatgaatactgacaagttgtatgattgctcgatattgctgtcgccgctagttattctatctctctgtcacaggcgtccggcataattcgagaacccgttatgctatcgtatgatgttcattcaccctcacaaaatctgtatcactaatctgtgtgctaatgtacgttcgggatgaactatgttgatctctctcgatctgaccttctatccatgtatgactttttataagcatttttcttcaaatatattgtgtattattttctcgaaaacatttggtttggaggtatatttgagcttttctcatgatctttctgactgaataactggatttttggatatatcaatttataatgggtgatagttaatacttatcgtatatttacttgttaatcatttatcattattttgttgttccctcc

SEQ ID NO: 189047 - DNA, 1219 bp, Arabidopsis thaliana
cacatcaagcagggatcgagacccggagatatatagtgtcggcgctccatcccgagacgacaatgacctcgagcacagctagacgggacttgagcgcgagcgatcgaggtacgaataggaagatgacgaggataagcgtgaccataggggaggggaaggagcaagttggttgagaccatcttttggaaacccaccccaccagagattccggagacgagcgaacgcgacatgtgagaacaaggagagacgatgagacagtgacaagcaattttttttttcgcgagactaggacgatgagtacgagatatggaccgaaagggagactgaaataagaagataaattaaattgacggtgcatggatcaacagaagggcggatcaggggactttgtatagacggagagttacagggcgccgtaagataaacccgggagagggacaacaaaaaaattgacgatcgacgacacggaggaatgagtacgggcaatacatgtagaggtaacgatcagggtacgcagagacagcaatggagcaaatgagggagacaaacgaaaactgaacacataggggttagataaggagcaagaaaatgacttgcgaagttatgtgaaatgcgtacaagcgaggggtcgcgtacttaatttacatggtctctgtgcattcaggcatagaaatgtccaaaccctcacttgaggaaaaaaggggcaactagtaacggggataataaagtggtcgaggagaatattaaacaaagacactatcaggcgccataaagtggaccgcagggacatttactttaagttagacttaagcgagcgaaacgtatggactctatgaaggaaacgaaaagagagactatatgtcaatgttaagaaatgcgcgaaccggagatatatacgccaattaggtgaagagggctcgtatgggaaccaaaagcctgcggtgatcgaacaagagtataaatggtatcacggaggcagacggacaaagagcttaacacacagagggcgcagactcaaagtaaatgtccagtaggagcgaaaaatccaaagagcatggctatgtgggacatgacgccaatacggaacttcaatgcgatacgttgtgagacacggaatgtcagctagcgccgttaatgataccgatgcaagggcatgaggaaacgggctgctggtccaagcgcggacaaatatatcaggtcgagcacgaatttatgtaac

SEQ ID NO: 189048 - DNA, 1143 bp, Arabidopsis thaliana
  unsure (1)..(1143): unsure at all n locations
aacaacgcgacccgggcccggagggaggccggaagaacagcacagaaaacaagcgggacacttttttacacgaaacaacgggagatgcaccaaccacatgggggaacggcgaccgaaggcagggagagcaaggccaggacgagcgagacaggcaagacgagggctcaagaagaagaaaatggggacaggagacacgaccgcaagaaacccgggggggacgaggaccagggaacagcaacggcgagggaacaaaaaggggacggcggaagagagcagacgcgccggggacgggcgagaggaagtcgaagaggaaggagagaatccaacagggaacctagccaatcgcaccggcaaacgaatcgctacaaggtgcacggaggcagtgcatacacagatcaccgggggaccacggggagaacccacctcgcacagacgacgtcagggacgacaatcgcaccgtccacccgccaacgagccgcaacgcgacaatcggggcaggcgcaagaccgagggcggaccagcacgcgaaagaaggaaagaacacccgacgaggtgacaacatctcgcacgccaaggcgcacgatgacggaatgcgacggggaacagagcacagaggcgggcaaacgacgcgcgacagcgaccgcagagatgagagagagcaaagcatgaggtgcacgatgaaggacgagcatgaggggagagacacgagacggacgacccgcgcaacgaccggcgccgaggccaaacgggaagaaggcagaggaggcggcagcgccgcacgcaagacacgcagacgcgcggaacgcctagcaagataacgggaacgcgcacacgaggacaatagnggaaagcagagacatggggcagaaagaacgaggcagcgcagaaagagaagacgacgcgacacagacacgaaagaacgacgaccagcgagagcacgacgagagccgacacagcacagactcatacagcgcgacgatgcgagatgcgaaacgacacgtgagacgaaaccgaacggcaacagcgcaaagagcgaaccacgcgccgaggcgagacaacgagaacaggaaaaagggggccgcgcgcacgtgatagagcaggcagccgccaaggggaagaccgcacacgcgacacgcccatgac

SEQ ID NO: 189049 - DNA, 741 bp, Arabidopsis thaliana
ccggaatttcttggtagacaccacgcgtccgaacaaggccctctccatcgaccggccggccgtctccactccttcttttctgactgaccatgcgatggggtgggcgagtctggctgatattgaggtgaagccgagtggggtggtagggggagtgcagatgccgttgcatttgtcgagtttgtatcagtcgaccaggagtcaggtcgagcagttgaccagtcgacagtcgagtcaacagagagaaatgcaactcatcgatcaagccatcaatcgactgaacgggtcgaacgacgacaagctgacggcgtgtcagtcgctgttgactcatctgtcgactgtcagtcattccacaccatctcatgttgcgtgtgttgacctgctcgagcactggctggccctccttcaagagctcgtccaccctccctccccctactgcttccctcttctctctccccacttcctcaaccgccgggaggttcaggccgagttccgtctctccgaagtgttgaaagtccgttacgacgagctacaaagcggaatcgaggcccccgacgacgaggttgaagaaaggttagtcacagcgcgactaagcttgatgggcgaatggcaacaaacgggtaagactggaaaggccggcaattcaaatgggaaagaaaggaaaggtggaaactgctcacgacaattccgagtcaaaacccattcccaacactctggttccaaacggtgatcggatacacaatc

SEQ ID NO: 189050 - DNA, 579 bp, Arabidopsis thaliana
cggaatttccgggtcgacccacgcgtccgatcacaaactgtggactttttccgtctgatgtcgaatattttttttaaaagcggaatgagcgacttcataaacggactccggaaaccctatgctctcggcgacgaacaagctaacttaacgactaaaggtcgtcaaagcatgttgcagggacacatacaactccttgtgaccaaccagtgcttggctcactaaaacatccccatgggatcgcaactggagataagcgaccaaaatgggtgccttctcttttgacttacaaacaggcttacttcttgatactgtcagtcgtttcgctcaatgaagtactaccagaggggctttgtgcagggtctaaccggacaatctagtgtgcagcggatgtgggccatgcatgagctgacataacagtggcgcttgtttctaactgagaaggcgacaaatgtccgcgatggtctaggaaacgccctggttagcatgtgactcaaaatgcgaacaatttttcacccccaagtcggtctgggcaccgtgggcctttccataggaaaaccagattttcttccgtttttttaa

SEQ ID NO: 189051 - DNA, 956 bp, Arabidopsis thaliana
  unsure (1)..(956): unsure at all n locations
tttcggtcgaccccccgtccgatcaacactgccctcttaaacaccaccgccttgctgattacccacacacaaatccccatgacgtctgttgcacaatgaattcgccagaatgcgcatgtgggaacgccacatgttgtcctggctttacacgagacgctgatgcccacttgatgttcctatgagcggggcatcaagatgccacataaaacccgtcgctaaactctctatctccggccacctatgtctaagctgccacaggcctttaggtcatgccttgaccggttgtgcagaaagcctatggcgatgggactatgccacacccgcaggttatttctctctcgcgtgcgttgacaagtacgtagcatacccttgccctaacgaaaaagacgaaagtctttctcaccgttcccaaaccccctcactcctaccttccttggggagccaccttcataagccccaatggggatgcgcgatttccaggctataggtccctccttaccaacaagtgccgccgccctcattttttatgattacatatcgggaaactgcccaccctccacgtcgtcgactattttacacctcacgtcttaatactccgttgtgatggacaccatacaaactcttatttctccacacctagagntccgctcggagcactctgatgctcttctagacccacccgtaagacacacaatgccgtctattggcggatgaggcgctcacccttggtcacttctccaagggtagattccggcctctctatcataaggaggaacactttcccgccagaacgttttctacggttctcacctcactcctactggaaaaggagttcccttactcctccgcgtaagaggggtataaccgtacacctttctccgacccccatattgaccagcgagataccccggcgtcacattttcagtgccacccggacccgatggccccctcgaatt

SEQ ID NO: 189052 - DNA, 1277 bp, Arabidopsis thaliana
  unsure (1)..(1277): unsure at all n locations
agaaaaaaaaaaaggagaggaaaatgtggacgccgtggaagccacgaacggaagaacgggaagacccacgcgaccgcaaaaaaaaacgcagaccgaagacgacaaaagaagaaaaaaaaacacacgaaggaacggaagaggaacaaaaagaggaagaggaagagccaaggacaaacgaagcaaaaaccgggcgtaaaggggcacacagaaaaacaggcaccgagaacacacagggagaagaggagggccgaacggccaaaggagaggcaagaacgagacgggaaccacgccggaacacgggaaaggcgcaaaagagcgagagagtcgacacggcaagtaagccagcgagaggcaaagcgaccacaaagaaaatcggcgaaaagcaaaagcagagagagcgacaagaacacgacatggaggggtagaggaaggacgcaaagacgcaaggaggcgggcncacacaacgtggggagacagaccaacacagacatatgggagggcgaagagcggccgtccggcaccagcaacagaaagcgaggaaacaacacacgagaagcggaggaacggtccgcagagaccggacccacggaactacacaggacacagggagggacaaggccagaaaaagaccaagtgaggaaggcaccagggcacgcaagggaaagagaggacccaaaggcgggagaaagggagaaaagaagcacggaagcgatacccgaaccggggagaaggggaaaaacgaggcagaggcactgaggaggaaacgacagcgggagggaggggaacaaccaggggccccagccaggaagcaaagacaagaaaaggcggccacaaaaacagggagggagaaaaccgccgaaaggaaaaaggggaaaccgggcgaagggagacggcgggcccgaacgcgaggggcaaaaaaaacgaagagccgggaacaaaccgaaaggaaagaaaggggggaacgacaaaggggggcaagagaaagaataaggaacggagaaggaaggtaacgggcacgaagggggccaaggaggaagctacaaaggagtggggcggggaaaaacaacggaagaagaagagacctcgcaggaagagggggacaatccgaacagggggggagggaagaaacaccggaggcaaagagagaaaagagaacccgcaagagaggcggcgacagaaagaggaaaacggggcaagaaggggcgaaggggaaaaaaacaccaccccgggaggaggggaaaaaacagaacggggggaaaacgggaaaaaaagggggg

SEQ ID NO: 189053 - DNA, 687 bp, Arabidopsis thaliana
ggaaaaccggggacggacaagcgaccgaaaaacaagcgactgaggggaggagacgcgagggggatgtttgcgggactgaggggcaaaagcagagggggaagcgccctgagcggcaaagggccactaaaccaccgggagagggcaagcgcaggagccgaggctgcacacaacacgtgaccaccgaccacaaccacaaccggcgacaccggacggtgggcggagcaacgggacgggccaagcctaccgggagggtacacccaggcgcctcacgagacagagggggcgaacagaggacaagactacacgtggcagagcacaaggaagcacggccacgcgacgaacaaggagcggaggcggccgatcaacgggcgggatgatgtgggctactgagagcagaaaagcagacaacggttgggagagccccaaacggacgctgaggaagagctaggaggccgggaggctcttgggaggacaaagagggcaagtaggtcgaaggggaacctataccacgagcggaaccaacgaaagggaataccaccgacaagagaagagaggaacgtaaaccagggagcgctggggggcgcaaagacaggccgggaggaccgtcggggggaagaaagccagagaccagggaggacagcaccctgggcgatgagtccaggaacgaacggaagcccaggaggggcg

SEQ ID NO: 189054 - DNA, 351 bp, Arabidopsis thaliana
  unsure (1)..(351): unsure at all n locations
ctggcatgataagggcaaaatcatggcactggaccatggtgtntgagaccacattggcgtacagcacactgaagccccctctcaaaagccagccatgtagagatataggatataatcgtgactgtagtactcggacgacttgtgcatacctgacattggtctgccaccgtatacgacagaccgtgataccgacagtatactttagtaccgctagagcggttgcagcatggcaatcactaacagcatcccttcttaggtaggcgatatatgtcaactgctgctcttacgccactactcgaagtgatgcgtcataaagcagagattctcatgcttccacgatgtggtagcacg

SEQ ID NO: 189055 - DNA, 1121 bp, Arabidopsis thaliana
  unsure (1)..(1121): unsure at all n locations
gaaaccagctccgacaatgcaggcggactcagacaaaccgcatttttatttgctgcacagacgtccggctgacggcttttagacggtccgcgctaaggagacgtaacctgaaccacacactgctgtgtcttgacctcgacacacagaccgaagcatcactcacatgtatagaacttgctcgtacacggtcttatggaaccgagcaggaggctaacccaattgagcacacgtgggagattccacttaggaaagcaaagttccttacgccattctccaatctgcagaaaggccacttggcaccctgcgaaccccttaccaagcgaagagcactgtctaatctccatcgctcattcaggttgatactcactctagccactcatgcaatgtgagatagtgcgaaagatcatatcnactcaactattggcctattgtgagtctcccgatctaaatgttctatacttacagacgtgtacggacctgtcaaacagaatcatgattcttaatgtgcttgcaaaaagaactcccacattccctcataggtgtggaacacaaatacgtgggaatcaggtgagcctcagaccgttaggtaaacgaatggggcgaagatgacaccgctcctaacattcccacatcttcatgaacgcgacggatcttatttcaccatacagcgtgagaaaacgctattaattctctcacaaccttcggaagatacactaggacgtgaaccctaacaccgctcgtctcggaataacggccttcaaaagtatgttctcatatatcaacacggatgatcttcgggtgatacaatatctgaaattcttcgaaactggattcacttggtaaaccaataaactgagcaacaagggcggatattacaatctgtcagtaaattgaaaaactccgatagtatttgaacgactgtttgctgtgagctccttatccccctacaatccctttacattaacggacggcccccggggtaataccgaaatatcttaaccttgtgcagtgagcatggtgctacctcttcttctagtaacgctcatgcaagaggcctccttattgtacgatcggcgacggctttgacacaatctccctctatgggccttatacgttaacac

SEQ ID NO: 189056 - DNA, 573 bp, Arabidopsis thaliana
ggaactcttggtcgacaccacgcgtccgaaaataacaccgatctgaacactgcacaatgaccaagggattcttgtatttgactggcgcggaacgtacaggatgaggacgtagatggctgttgctgatatatgagccctctgtaaccacaatgaaaccgacccatgcgctaagactccggtccctgtacaaatgacctcgatacccaagaacactacgactctcatccacaacggtacaccgagtggtgaaactgtaatgcaactcgagcccattggtgaggcttggtcccattcagccctcatccttcccgtctggggctcatcctgaggactcttagctaccattttagcgctgacatacatcctgccaaacttcttgatacccatcgtgctgagtgagggcaccatgtgtgcgaattgacttgctgtactgaaaactgaatagtcaggaaccatttacggacgacgtcgaaaaacgagcctcgtaaaacaaagcctttttacggcggggtagttctttggatggcccacttattgccatgaaggtgtatagactgcacgccttgttttatc

SEQ ID NO: 189057 - DNA, 606 bp, Arabidopsis thaliana
ttcctttgtcgacccacgcgcccgcgcacactgaagggttgagcatctaccggcacggagacttcggttatttctgcggaagagatgctcaattgatggagacgaccacttagtattcttgtgcgttgcgaaaaaaccttcaagcctctagcattcttcgatctcaaaggaggcaaaggaatgagtgagttccatgaggttgagctcaaagttctgtgattatgaatgggtatcagaagggggttgagaaccatgctgctaacgcaaactactgtcaacacggacgacatgtgatagctaggaaggaactaacaacctagccgcttagaacagagtgctgggatgatcttacctgcttcgaggtggcaatagggagatcattgaccttttcgaaacccgacacagattaagggtgaaagcgctgatattgggggcaacctgatgcgcgaatttgcatctggcatattatcttataaacttcccaagtgaagaagcctaactttgggagggcaaaaaagggaataatcttggggtgggctctggaccaaacagaggtaccccggggcctggggaccagcaatatcccaaatactagttggaaataac

SEQ ID NO: 189058 - DNA, 742 bp, Arabidopsis thaliana
tttgtcgacccacgcacccgtaccttcccgggatctgacatacgcctaaccgaccagaagacttttttttatgtatgagataatccgtgagatataatctccgttatgaatctggctgataacagagtcatgtctgagtacattgaaacacatccatgggttaagactgctgatgatattcaaccaatcggtgtgacagaggatccgcgatgtcgaacgctacagttgcacgagatgatgctcccagagctgttttgaccactgttgttaggatgccaacacttcatcccctatccttgcctctgatccttaccagaagactcgtgctatattatgggctgtactcatcgagcataagttctactacccatcctgttgggcatgggcaccattgcgccaggaacaagctggaatggagaaggaattgttggaacatcaaaggacgcttgatagatacctaagagacaaaccttattctgcggagaggtcttttgattcctaagccttccatgaatgggatacttcaaatgttgtaaggacctgtaaacatttcgggtatttatgttttccaaccaaagttgtgctattactttgctccccccgtacccacgaacccagccccgggaaatggtgtccaagagattcctttcaagagaccgttttgcgttccacaaaccccgggtgggcccaaaatctttagggaagggggtttaaacgttcctttgcgggaaaggccaaattt

SEQ ID NO: 189059 - DNA, 871 bp, Arabidopsis thaliana
atacatcactgggtgtcgactatgcgctgtacgagtatgatcggcgtctctgatgctgcgttagcgatattatagtgttattatcactcaaccggaaggagagcagattgttgaacatcgtttagaacccaccaaaattattacaggaacgacccagcggacgaatgcaggggcgggaccaaagggttagagaatgggttttttttctgcacgagtggcctggacggggggttgatggacgctgattgtaatgggctgtatcgagcgccagcatctatatgcttgagggtcaaacgatgggtaagcaagggtgtaatcagcggggaagttggcgatgatgctatgcagcgtctacgatgaacatcgaatgtggaagatcagtgatatgatgatatcatagtgggagcgattgtggtatcacaagacgtgaggaagaagctgtttggggatttcgatggtctagctggaagtgctgcgatgtctagctttctgacacaaagagtatatccattacatcgacttgcttcagatacgagatgacacaggcgggctataggaatgcgctttatgaacccttctcgaatagtgaaagtggatgaaatgatgcagcggtgcaaatgcactgataagaaactgtttgttggttcaaaatgttctggttgaaggggttggcaaggacaactgctctgtttacaatgagctctgcgtggagttcgaagtcgaaccatgaatcgctcatgccttatgaatcaatgaagatgtttcacagcactttacgagcagggggacgggtagaaaatggacgtacatttagcaagaggaaaggaaaggaccgtgaatcaaaatcaaaccggaattgggggggcttatg

SEQ ID NO: 189060 - DNA, 591 bp, Arabidopsis thaliana
  unsure (1)..(591): unsure at all n locations
tttaaagagggccgcccttnnttttttttttttttttggttttattttggaaaaccgaaatgatatggtttctttgattagaacacgggcattaactgcacaaaagttaaacaagatttacacaaattttgtcttttgagaatgtccaacaacaatacagctttaaaacacgtctaacggcaatttgccgggtagataccggacctcgaagtttccaggcttttgtagtataccatttttgtaataactaaaattctttaccctttatttgagtttagttatttgagcattttactgcccatttggttttacttcacatcaccagaacaacccatttggaattcttataactaaacaacttaggcgcacgcctgtgaccataaggatctgataaccttttgggtctatatgggggggtggagatttttgtcatcccttgaacgtaacctgggtcatattcgaaatttgaaagtatccttggttcgaaaaccggttttggacaatacaatgttaagattgaacctgcataaagcaatggtgttgaccggatacctggacttacggggagaaatacattcactggggaggaaa

SEQ ID NO: 189061 - DNA, 203 bp, Arabidopsis thaliana
acaacattccctcccgcgcggaagcaaggaggatgagtttgccgttcacctttttgaatagatggtgatggaagcaacatggctctctagacaggaaacacggacgcaaagaaattcacctcaaggggaaattacctattctaggcagcatgtaacagagaatcatagtcaggtttcttcaccaccacgagtgactccaatcg

SEQ ID NO: 189062 - DNA, 641 bp, Arabidopsis thaliana
ctatgatgtacgctgcacgcgtacgtgagtctctgtatcatcgagcgccctcgccctttttttttttaattattttaaatagaaattaccaaactggatatgctgtacatagcaaacatcatatgatcctcacagccacatatatatagctcgtagagattatacctagagactgggctttgttgttctacatacctacccgtctttattcacaactaatactttatgccgtaatcagactctgttgaagaataacaaaccccagttactgtgacaagttgtgctgatatgtagcatctacttgcacccgcctatacaatcctatttatactttttcaagaattcactgatgaatcctcccttctacttcttcagtgattgcagttctcagatccaggactttcagtgaattgatcgattctatcctccctgagtacctgctagagaccaacacttttcattatttgaccgtatgcttgtgcatgacgaagatcatgacctggttatattgatgtcttattgcaaaccaacggagatggaggaattggagcttgtgcacaatatcgagatgaaacctttcgctcctggctggcaccatttgaagaatctgctgaacaatgctggcttggcttgaatatgta

SEQ ID NO: 189063 - DNA, 172 bp, Arabidopsis thaliana
cttgtagaccattgatatgttcttcgaaaaaaccgtacgctcttacgcctttctttctagttccttccatcatttctacttctctagctggactgacttgctgctaccactaaagcttggcattcgtggaaagtagggaatttagggtttttgggtgcgtgcgtgaaaacaa

SEQ ID NO: 189064 - DNA, 720 bp, Arabidopsis thaliana
  unsure (1)..(720): unsure at all n locations
tagacagagctatgactngtcgcatggcacnnngcgtancagtaaggacttgggaaatcctctagaaggcggcncnngccctttttnnttttttttttttatttttaatattattttaatattttatttattttaataatgctatatagttttttgattaagattttttaataaatttgtttatagtgacaaggaaaacatggaacgggggggaaaaaaaaaaaaatggggcgaagcaaaaaaaaaccgcggcccaaggggggggcgccctttaaaaaaacacctaaaaaaaaaggagacttttttgggccgacaaaaaaaaaaaaaaatattttggggggcaaggaaaataggggggggcctgaaaaaaaaacaaaaaaaccaccctggggccccaaaggggacccccatatgtctaaaaaaaaaaaaaaaaaggcgtcccccgcaaggggtcttcccacaaaaggggaaaaggcaagggccaaaaaacccccgcaaaaatggggcactggggggaaaaaaaaaaaaaaggttaaaataactcaaagggggtttaggaaaaaaaaaaaaaaaaccaaagttttttaagggacaccaaaaagtgcggggggggggacccccgggaaaaaatcacttaaaaagagcccctgtagggcttttggaaaaaaaggcctccaaaagggggcccccaaaaaaaaactccccaaagaatttaaaaaa

SEQ ID NO: 189065 - DNA, 310 bp, Arabidopsis thaliana
acttgaaaagagaacctattttgcattttttttgagttattattcccatgtcaaagtataggggggctaacttgtaatgtttggggcggatacaatgaataaataaaagagcttattctttgcctaacctacataatgaacgtggacgacacaaaagagaaagtattatttcgagcagcttctctctttaccatcttatgtgcatacaacaagacgctccaacaaacatttggctggaaccaatctctctgcaaccttttccatagtcatgatgcgtttgtagttgatgaggatgcattacttttccttc

SEQ ID NO: 189066 - DNA, 245 bp, Arabidopsis thaliana
aaaaaccctgggggagcaaatccctaagggtaattgggggtcaaaaacaaatgtttcccgggaaagtaaaaccctcccaattaaaatttcaaatcaaatccccagggtcttgttcaaaccttggtttttttttggagccgttccccccaaaaagggaaattctttggggggttcaaacctaaaatagatcccctcctgcccacaaaagggagtgggttttggggggggaaaataaagagaaaggg

SEQ ID NO: 189067 - DNA, 423 bp, Arabidopsis thaliana
  unsure (1)..(423): unsure at all n locations
gcctgtttttttttttttttttttttttttaaacctcagnaaaagatatttttcgagatcattaaacacaaaacacacatggagcttttttgagctatagaagaacactaaataataatagggttggcctaagatagccatcacaccttaactaaggaacaaaaaaaacccaatttaccaaaaataactcaacataacaaattaaacaaacccggggtaaaagattattgtcgtcaaacaattacaaagagatgtgatttttaataaatactaaaaaaaaattggatgtagtaacttatatatattagatctcgaaatcaaaacccccttatatgaaactctctttctagaaggtcttgaatggcaaatttgtatatcatggcttgtgaggagggcattggtagcatttggtaaagagaccaa

SEQ ID NO: 189068 - DNA, 140 bp, Arabidopsis thaliana
acataaatatttagtatgcacaatttaatatacacaatatcatatgaatggaacaaaggctgcataccttgacgtattctgtgggagttctctaacccgttttctattactagtcccagaagtagattcactttgatcca

SEQ ID NO: 189069 - DNA, 258 bp, Arabidopsis thaliana
cgccggcctttttttttttttttttaaccaggttcttttaaaacaactttttttggcattatggaaatggggtttaccaacggggtaaattaaaccttacttaatgaggccatggtttcaaacttaaccaccccttacccccaaaattaaaattggaaaggttatttaatttaaaattaaccaaggggggggcaggcttggttatttccaaagggttttaggggcaagaggccccgggaccggttttggggggaacgg

SEQ ID NO: 189070 - DNA, 566 bp, Arabidopsis thaliana
gcagtaccgcgaccggaatttccgggtgcgaccacgcgtacgattgtatcgtttagagcggacggccttattttggttcactatgttttgatgaacaattcactctacaggcgacagaagcagttgtgatcgcttgccttaagccagcatttttattggagagagtgatcacggaactagcacatgattcatacttccgcctgggaggtggggactagaatcgctggatgcagagaatttgaaagatcataggcggcgcatataccattgctagaggctggtacgtatccatagctgccggattcaggaggaccgattgcttactcgaattacgattccatgcatctgttccaaaactcatgggctgccactcctgcctcagtgagcgagcgagggactcacgtcgaggcattcacgcacactgaattgattcgctcattaggaggtggtcacacgctcactcacgacctggtgggaaccatcgcggtggaggacgagaagcccgctgtccgtaagctggtcgaccgggtcatggaagcgatactgtgcggtagaagatgactgcc

SEQ ID NO: 189071 - DNA, 161 bp, Arabidopsis thaliana
tttgtttttttttttttttttttaaacagagataaatatccttatttttgatctccacaagttattaattacagcacgggggggggaataataccccaaatgaagagcagttatttaagtatatgcagagcatttaaatacaaacatttatgctttgcttt

SEQ ID NO: 189072 - DNA, 147 bp, Arabidopsis thaliana
catatcataatccatttaccgaacggaccatttgtttccggaaacaaagccaaattggatttgggcgggggtttgaactcatgaaatgcagatagcaataacagtgcagaggctgacgcatgtttatttgtaacagaagcaaactaa

SEQ ID NO: 189073 - DNA, 519 bp, Arabidopsis thaliana
gtaccgcgaccggaatttccgggtgcgccccacccgtccgcttggatcctatagagcgggcggcctttttgtttttttatttattttaaaagaaccggtctctctacaatcgggggttgaagacgataactcttctttgaagacacgatcggggggcggagactaggacacgacccgaagctatgaagttataataacatcgccagggggagtagatgagtgaaatccggaggcaaaagactgaaaaacttttgcgcgacggtgtaaatgtactgtgcagaggacttaatcatagaacttctcatggtgagatggcactattggcacggggttccaaccacagggtgttcttcgccactggaatgagactccccctatgattaaagggggaacgcttaacgggatcccgatgtcttgggggaaggtgcacctacaacaagagaactttttttgcaaaaggacctgggcctagtaacacggaggaccttaaccttaactgaggggcctctcccgtgtcga

SEQ ID NO: 189074 - DNA, 560 bp, Arabidopsis thaliana
gagcggcactgcgaccggaacttccgggtgcgctccacgccgtacgagggatgctttagagcggccgccaatatgtgagcttgcgatggtgataagggtaagacgcagtctacccttaagcggtgaagaggggatcaataccttgaactcaacatctttattggagaaactggtgaccgatttacttgtgactgcagagttaccaacctgtgttttggcgatgcgatgcgtttgctgcggacaagtacaaatgtcgtgggttacgctgagagctttactaaggaatggtgcgtctccatactggcctatgtgagaaagccctgcaccttacaagagatacgatccgcgggatgtgtttcagaacttatgagacaggcacttcttgcatatgtgagcaggttgagaggaccacatgtcagtgagcatacacgactactaggacattccgttacgcttcccttacgaccgtgttgtatcacgggctataggacacgagatactgaacgagtgatacccaatcgcccgggtggagagagcaccctctgtgggcttcaagcttc

SEQ ID NO: 189075 - DNA, 591 bp, Arabidopsis thaliana
gccggaacccccgggtgcgatccacgcgtacgagccaatactgtgatacgcacaggggagacaagagaatcaccggttcatataatgagcacatcggatttaggagcatcacctatcactgatgactgccctttcaatgatcactctaggctacaagaaaatgatgtaaacgaaacacctcacggtttatccaccacgcagcctccaaatagaacctgagagtagtgaaccctaaatacctgggttaagggttcatgatgagattccagagtcagagcgcaacctatatgcagtggatgactgctcagaaaagagtatggtacatgcttctgtggatcaccacagctcttcggcttctgtaaatgaaatttttgatgagtccactgaacttgtggagtgtccctgtggaaaagagccgaggagcctcacacttgaagaagccactgatacaatacttttttgcagctgcattgttcatgatgtagtataccaagctgcagcaatagcactggataaagcaaaagatgcgcctgcggaagaagaaatgttgcattcaacagcgacagtacttggaaagtcgaatgcgatcag

SEQ ID NO: 189076 - DNA, 695 bp, Arabidopsis thaliana
ggaaatttggcgcgaccgacccgtacggaggaagcctctatagcgagagaccacatgcgagctcgcgcatgtttaaagaacgctaccagtataggggcgagcgcagaggaggacatggacgaccgagaaacagcgcctagactggaaaaaacgaggaacaacattaacttaatgcgcgcgagacagagaaaccggagctcgcggcagagaaaaacgagggaaggagcgcagggaaaaccctacgcggcaggtgaagaaactgactaaggaaggggacccccccataatcggcgcaaaaatcgaagcggctgcaaacaaaatcacaaacaagatcctgttgcgactgagagcaacaacctatactaagagagaacggtcaggggcacaacgttgggaattaacacaccaagaaggtccaaaagggggcagacccacaatgtggcgaaaggccgtaacgggccgggattccgaaggctaagggccaatcgcacctctcccgggaaaaaagcagcagcccttcggttggcggtaaggggtccggatatccacaacccaaagggggcacaagaaaaaaggggccctcaaattgggcccaaggcaaaaaccaatggggggaccaaaccaaaaaagggggaaaccacgcctccacaggcagacggccacgtcctcgggccccccaaacgggatgccaaaaa

SEQ ID NO: 189077 - DNA, 574 bp, Arabidopsis thaliana
atcataataccatagtatccaaccaatataaaggaacagactagaacccaaaaggatcatataggcaaacacaaaaacccacgcctatggtaatgaaaaacgaggtgatgcaagtcatgataaaacttaagagcgactccgggaaaaatactaacgaaggtctatatctccccactagacggcgacatgaaacccgtgctccatacaaaaatcaccagtacgagaaactttttcagaactcaacgacagccacctataccgatgtgcacaagggaagggacatagtgctgtaggaattcaacccccaaaaaaaatccataaggttacgaaccaaaatatagccacagggctatgagaccggggaactaaacaagagaaccctatcgcctggaagaaaggggaacctccctgcctatacctcaatcctccaaaaaaaccggggaattgaaaaacaagcgcccttcaaatgggggtaatcgacacaaaacccttgtatgcgggattaggcaaaaagggaggaaatggccctcccccaaataaaaaagggccctgccattcaatcattgtccaagaa

SEQ ID NO: 189078 - DNA, 402 bp, Arabidopsis thaliana
ggcgcgaccacgcgtacgaaggagcctctaaagcggacgccctgatgggcttttactcgcgtttcaatgaactattcagcgtaccagcgggcacagaggagggtaactccaccatggagctaagattctcagtgtagaaattataagcgtccttgatggtgactcggaacttaccaaatacgctctagtgttgaaaaactcgtggtacgaactagtagaaacaacgtgggcccaccaaggggcaagactaaggatggctacctctccttaatgcctgctttagggacccctaatcgcttaaaagaaatttaccatactcctagaattctgcttacgaggcaacttcacgtagacgattccaaattttcttaccctaattaaacctcacaaattttttaaaag

SEQ ID NO: 189079 - DNA, 279 bp, Arabidopsis thaliana
ctctaattaaaattccactacagattattttgcaaagaaatttagacacaagtgggggggggatttgcttagagttagaggagggaaaaagaacataaaacgatgttacagttttacaaactaaacgaacccaccgaagactggttttatcttcacgaaggattaagcctaaagataccgttgtttactctagtttccaatatagccgagacggtgaaggaccattgctaaaacgagcattaatattgcaaagaacaatgcgccttttcccaacaacca

SEQ ID NO: 189080 - DNA, 280 bp, Arabidopsis thaliana
cggaatatcccgagtacgaccccacgccgttcgcttgtcatacacatatcagtagtatagatgtctcgtgcctagaccggtattatttgtatcacagagtggcgatgatgtacgtcacacagaggtcgagcggaaggatgtgctgtccacttatgctctccactcgcatattacgcatcaatacgcagtcaacatatcactaatacttatacgaagcaggctccgcgcattattcattgtaactacctgccaggttggtctaagtatatcgttattgaca

SEQ ID NO: 189081 - DNA, 702 bp, Arabidopsis thaliana
gcagtaccgcctccgaatccgggtcgacccacgcgtccgaaacaagcgaaaactggaactaaatcctacacgggagtttttttcggtcgctatcttagaaaagcgctgggactgcggagctcaagatcccacaccaattcgaggagctccttacaaatgtcaccttcttcagcatgcctagctcataccagggggcgctcctagtagcctatatggcttacgggtcagccagcgacagacggaaaaaccaaaattcaccaccgaaacacgggctagataagagcaaacactgcaaaatgacgccgtgggcgacctcactcccaaggagcctctctccacctgggagcttccatcccactcggggaaccccacaaaatagggggcttggcaaataccgaaagcgggcctaccacaggggcatccccgaaccacacaatccaaagggcacctcgaagaacgcccccagccttattaaaacatttcccctgccctcaaaaaccggaactgcccccaacccaaaaaccttacccggaaacctggggagaaaacttggcccccgaaccaataatcccccgctaacaatgcagatcaaaatggcaaaccccaagtaaaggggaacccacgttatggtcaatccccccaagaagggtggccccccggggacaaactcaattcccaaaggtcgccccaaaacaaaaccgg

SEQ ID NO: 189082 - DNA, 889 bp, Arabidopsis thaliana
cagaatcgcgccccgcaccgcgcagcaaaagagcaggccactaagacgcggggttttttttaagatacaacacgactgcaaactccgccgtcgtgggtttgcgtcacgctaagctatcacatccccaaagccatctttgaaccggtaaatatcgaaacctcaaacccatgtccgagtcagcctgtatagagatcgctctgtgctttccccctagctcgtcccgagagaactatatctcagacatatagtgcaatgtggagcagtgccatgccctgctcctcaatgcgtgacaagatacaccagccaaagatctgcatgagaccaaaggagcaagcacgtcgtatcatgcaaaagggatattcagtccacgttgaaactgaaatcccagtccgaattaaagagaagtcatcgcgaactacggcatgaatcgattacgacaagaccctctgtgtgtagtgtctgccctagtgactacgaataactatcctttcatggcgagagagcaattttccgcccctcacggggcggatagatcttcgggtggcaatccctgaatgtcactgagaccatgccatgaagagcgagctccaccattcggcggcaacgccaaagacaccgcccggacatgggcactgccccctacaagaagatgtacgtggcatactactgcacttctcgcgcaaaaaacagccgacagagggcccgcctgagctccttagcaaatggcatccagaaaagatactatctctagtaggtgggaaactaaaggtgagctatacgccagggaccgcagaggagagaacagggattatcggctaagcctacggggaggctaaaataggactagagctaacaccggtctggaattccggacagtccaaccgacctt

SEQ ID NO: 189083 - DNA, 769 bp, Arabidopsis thaliana
cgaaaggaccagaagaagacagcgaccagaacagcgggacacagcgacccccagagcggcaccggagagcagcgcccaccgggcgccgacgcgcaccccagcggcccttgaccttgagccaaggcacccccccaaacggcggcgcacaaccgcgataaagaagaacgcaacccgcgggcccggcaacaaccggcacgtcggcaccaacaaccgcaaaaccaccacacgccaacaggcgccacggcgcaccaagccaaaacagaaagcacgcgcgccacgaggcagccggagacaacccgaacagagcccccagggcccaaccaggccacacgcccagcaggaaacagccaaagaagaacagagggaccgaacctaggcaaaccgcgggcacccagcgcaacgggagcggcaccccaagaaccccacaacgcaccccaccagggaagcaaccccccccaaagccaccagccacaaaggaacccgaaagaacaaagatcgaccgacgacgagaccccacggggcggacccaagcccacacgcacggagaggacaccgcagaagaggggcagggcacccaacccggaaaacaggccacaaaccacaggaccaaaacggagcaaaaaacagtcccgcgggaacaaagggggcaaaccccggaaccaagaaagcagggacgcggaagaccgcggccgcgaaaacgcgaccacaaacccccccgcgaccaccccccgcccccccaaacgcgcaggaaccggggccggaccgcccc

SEQ ID NO: 189084 - DNA, 214 bp, Arabidopsis thaliana
cgccccccgctgataatggcacggccgcctcattatacgctttttttaagcccctacagcaagctctatctagagcttcctgcccagcttaagattgactaatcaaacccgaagaccaacacatgcaacttgtataaattcatgaaagctccgcgatttcattttactccacacaatctctggaattatatttccaccgcatcacgaacgttag

SEQ ID NO: 189085 - DNA, 733 bp, Arabidopsis thaliana
cgaatttccggtcaccacgcctcgttgaaacccaattagtctcaccgcctgttttctctactttcaccacttagccatcgactgctcctttcactcctcctgcagagcttgcacgtctgactgccccttcttcacctgatgtaccttatgctcgtttcttgacttcctccatggatctcaagaactctggtaaaggtcattacaatgatcttcaagctatcttctctctttatcccggaagtccagccagtgactattagatcaccaatctctcgggcttcgggagatgggttattgtcgcctcaaaatggtaaatgctcaaggagtgattctggcaacacattcgggtatgacacaaatggagtctcaacacctttgcaggagtcaaacttcttctgtcctgaaacttttgccaagttttacctggatcacgacccttcagttccttaacacggcggaagattaagcgtgacgaacgattcatatgtgtatcctacaaatggatatggaaaagggaaccagaataggcataacagaagtcccaagcaagacatggaggagttagaagcttacagggccgtcctttggttttaggtgcaaattaaaacaattccacctagttcacttaggtagagaatcacctgatcgctgaggggaaggggtccttttttaaaccaccattcagacctttaccctctttcccaagcccgaattggaaccaaataaagtcctt

SEQ ID NO: 189086 - DNA, 517 bp, Arabidopsis thaliana
ttcccgggtgcgatcccacgtcgttccgcgtcattggcattaccgaagcagtgtctccgctcgccggaactatctcgttccttttttgtggccgatggcagctacaacgtctttcagtatagatttccctgctgtagatctagagcccgactctgatctctgggctttagtggtcgacgaccctacttctgatatcgccgtacttacgcactcgttcagccgtgatctctaactacatgtatgttatcgccggacctaaatcactggatgttacagtccccctcgctgaacaactgtaatatttgttattgtgactatggtgtacgttgggaagcgacagagtcactgaagcccacacatgcgctggcatcttattccattgtatcacctctggtcagcgagacattgcttcgcgactacgtcttacctacagccttctccgtcttcccctgtcagagactttttcttagcgaattccaggggaggttagactatttttatccggtctgtggcgaat

SEQ ID NO: 189087 - DNA, 989 bp, Arabidopsis thaliana
  unsure (1)..(989): unsure at all n locations
atgcatctagtctcgctcttcgtaatagatctctttatgacatgcctcatacgactgtgggtagcctcctaacagcagcactatactggcacacatctgtattaattcctcttgaagagcaccatcaaggtctatgccccacgtttcgtcgacaattaaccagttatgataggcgcctatcttctgaccagttattaatgacccatatttggagctgcttcattngatttagcttctctgcctaacatggaagcgctgctctttgttggcttcccacccaattggtaagttcatttaagtttcctttaggcccccccattcattccctttgaactactttgcatgtaagcggctcttcacatctattcgtttaattaactgctgcgcttatttcgtgatttagcaactaattgtttgaatgccgtacacctaggcttatggatccactctctttcttcctccatctgaccgattctctgtatacgtgcgcatagtccctcaatgatcactcttttttagagtcatcaaactgtcaattttcttgtatgcctctcgcttctaatggcactgtgcactgcccctttctatcgggatccttagggagcttactggtttattgtcatttttcttccacaattttttggactataataaccggaagttatcacctcatctcacttcaatatactctaacaagagttactagctctattagcactcctggcgcttgtttctacgtatacgtataaccctatctctcttgctcctcatttggcaccagtcacttctagtataatatattgtctctaatatgggaggcgaatgctctttaatgtacaattccaaatattttcttttctggaccggcatcttacgatatttacgtccgtatttggtgagtactcccactgccctttctctccctcctcggtgtcctactcgtctgggaaatattcatctccatactttcttttaaaatcaacttcttt

SEQ ID NO: 189088 - DNA, 1098 bp, Arabidopsis thaliana
cccgccggaattcccgggtcgacccacgcgtccgaccccttgttatttacgggtctggaatttgccaacttcctttttttttctgagagacccgaacacacgcttcctaaaggtgcgccatgagctgcaagatgaaacctcatacacgttgcagaatggagaaaacacatgctccagatgaagatgtccggtttaaccggcaacgggctctgacgattattcgtacattaggcccccccctgctcagcttaggcaaataccataacggcctccaggcggagtgggggtaaggcaaacggccagggctaaactctgtatcttcccggctagaggggtcgttacttttgcccagcccttgtgttatccttagcctgaactagtcaggaaaaaaaaacgtctttgcacggtgtgatctgggaaacattttggaaattttgttggggcgattgtgaaaatattgcgattctcaaaaatatctggagagtgggttactaacactggcgatttctaggtaccttagtgaacaatggtggagggggaaacctactcttgtgccgcgtgaggtttactataaaccttttcgaccttattccaccccgtaactttttgagcctaagtgacgtcattagaggccgcccgccacgaatagacattggggttccctcacccaccgaaaattcgcccgtactttgtcaagaatagttggcaagcaacccgtattaaaactcagaagaagcggtgtgccacagtacaatcaaacgctttgggacctcaataaggcagggaaagttcccaggagaagaactcattgggccctctatggaatttcctgaaaaaggctccgcgggccaggaatcctttttttaaagtaccttttggcaggactctttgtaaccggagcgctaaacccccttgatcaaaccgattaaccccttgggtaaacgcaaaataatggtgtgaacctagcggctgtgtttcgggaccttttaaacaatagggggggaaacaactgtcgcggcattcggtgtggtgagtcttcaccgcgcggtccccctctaagggggcccatcagggccggtggggtgcttttttcgacgc

SEQ ID NO: 189089 - DNA, 123 bp, Arabidopsis thaliana
gccacgcgccgtcgagtcaaagagagggcggcaaatgctataactaccaattttttttatcatggggagcgatgagcacacccgaagtgcttgtggaggatggtggtcatgttatacataaag

SEQ ID NO: 189090 - DNA, 1033 bp, Arabidopsis thaliana
tacacggagcctggaatcttccggatgcgaccccacgccgtaacgcttggtattctcaccatgagacgtcctagagagggagagatgattttcaatcatggctatgatgatcggatctattcattgaggccgtcccgttagtgaaccgtcttcattccgacatccatatgcctcattgtgatgtggtattagcccgtttatttcacggactcttttggctactataccataattggaccaagtcctcgacctccatcggaaggcacctgtaccaactgaggctaggtcttgcctagcttctccggaaaccttcttcgtcagtgtaagctagcttttggtcagatatcttatgcgactttagattaacgcactagctccatatactatccacgtttgctctatggcttgctattgcgcaatcttaacctattatagcacgggtctcaaaactttcccttcggatacccctctcacattttggcctttagaagaggagaggccttccacacctcccccggtggatggtttacgcaaaggactttatttatattgggaatattcttttaacaataataccttagttcaaaagccaacgcccgaatataattataaacctattttattaggcccccgaaattttaggggaacgctttctcctcattttaataaccaatcggcttcttatttggaagacataggagtgtacattttactaccccccaatttggacgcaaaaaaacccgacaaattgttagggtattttttccggcaacaccggaattgagaaaccccctatctacctatgggaacgtggatcaaaggcccctcaccccttggacctttaagtttggaacccctaattaaacgggaaaaagcaatcaaggttgtgaaaaacccccagggggcccttttttacctttggggaaggttcaaagcaataaagaaacccttttaagggggtttttatcccaaattggggggctaaactccaaactgggatcatttttttgaaaatcctttgggcggttttccc

SEQ ID NO: 189091 - DNA, 815 bp, Arabidopsis thaliana
ttccggggccacccatccctacgggtgggaaacgctaaaagaggacaaccaagaatctggaagagcttttttttaacatagattctatacactgactttgaatccaagacagggcaagaacttcttgggccatagatcattctatgagtgatttaactctacgttcaggttctggtggtggggaatgtaattgatatttcatactcgacgagtgcatacactacccaattattatatccgttaggggttattggagaatttataagtgtaatgcagcgcttttttaggaagaaacttcaaacaatactcatcaccacaggtttgcgactaaacgcatctctcttcttttctactgaactatccagatatctttattgtgctttgagattgaaagtttacttatctatctttagaacttgcttaactcttccagctttttcatgggcggccgttctattaggaccaagcttcccggcgcgagcatgcaatttcatatctgttcctttaggccacctaaatttaacttatatggccgttgattaacaacttgggggactgagaaaacccttggcgttaccccgagttaaaattggctttggcggaccaattctccctttcaaccagtttggagtctaataagcccaaataaaagggcccgcaaccccatggtgggtcctttttaaacagagagagtgtgtgcgtcacacaccccatataaatagcgtctcacaacggtggggaatcgctccgcacccttttgatcgagcgtgtggtcgtcctatattttaaactacccacacagaccttcgtgtcta

SEQ ID NO: 189092 - DNA, 383 bp, Arabidopsis thaliana
aaagagagatattttaaaaatcaattgaaaggacaataaaggtgtgaagtttgaacagagaaatggggaagaaccgtttagttacaaacctgtcttgatgagtattttttgaagttacttcctaaaaaaaccacattacacttataaattctccaagaacccctaacaaagataataattgtagtagtaatataacacacgacgattataaaatataaattacattcaccaccaccaaacctaaacgtagagttaaaacactcagagaatgatctctggcccaagaagttcttgtactgtcttggattcaaagtcagtgtatagaatctatgttcttgcttagctcttccagcttcttcattctcatcttttcgctttctccc

SEQ ID NO: 189093 - DNA, 690 bp, Arabidopsis thaliana
  unsure (1)..(690): unsure at all n locations
agccggtaatttccgggtgcgaccccacgcgtaacgcacgaaatacttgtaaaactggtgcctccggttgtgtgccgaaactttttttgtctgtatgggggatcctctggtttaatgggtttgggaagaagttcactctatttagtgtttgaaactttgaaaatttaggaaggagttttatgatactgattaccttgtgttgaggatggagcttgtggctcattgtgctttgccacgacgcctttgtttacacgaattcaactctagttggctacacgccggatgtacaaaacccatcacctcgttccttttacattctgaatttcactggggctagcattcctcgnatgcaactgaattgtctaagctttggcagagggattctaatctattcacgcacgggtatcacaagaaggccaccttccatttacaaagctgttaatatagagattctggaacggttttccggggttcctactgctcctggttatgccatcttagacacttgctttaacctacaaggtatgaagacataagcattcccattatcaaaatgatctttcagggtaacgctgagctaaaagtggatgacacccgctgggcaccacttttgtcaaggccctgaccccatctcctagatttgctttcggccttttagcaaaggtcctgggctttgtatgaaaaagatgc

SEQ ID NO: 189094 - DNA, 762 bp, Arabidopsis thaliana
agcaataccgcacctgaatttccgatgcgccccacccgtacgcatggatacgaacaaggagacaagcgaatgaaaccggttgctttttttaagctctaacagttgttgctatgctgtcagtggagacaactcttcttcctgctaggagtcaacccagagaaaagaagaggaaacctgatgaagattctaatctttctaatggatccggatatggagagcacattcaactgttccagatcggccaatcttgggaccgtactaattatgatcctgtatggtgcaaagagaacggtatgcaggtgcgagggatggtgtttgtcaaagatgttagaagacagctatgtcagattatgcagaaaatattcaaagatcgataggaagttggggccatatggtaggaagagttcaagccgggacgactaccggaagttgaggaaaggcctatgcagtggtaatgcaaaccaaatggctgagagaatgcttggcacaatggatgccggactcttagtttcagtccagctagggaagtgctcccttatctgtttggaagcccaccatgactgcatgatgcctaacttccaatgggaccatgagcttgatttcccacacaacttgccgttcaagaccgaaaggattggggccattaaattttggccatggggtggcctcccccatccaaaaaggaaaggtgtccatgaaaaccttaaaactggttcaggaaaatatttctaaaacgggtggggcctccggggcttccccttt

SEQ ID NO: 189095 - DNA, 245 bp, Arabidopsis thaliana
gggggcacgccacccgccgcacgagacacggagagagagaggccacccggagaagacgacgaaagcttggacgggcaccggaagacgggaaccagcatcagggaagcggaccccttcaaggcggcggcaagcacccagcgccgaggaaaacaggaagcggccacatgggatcaccacaacacggaagcgccacacaggccgttgacgagaggaggagccccggacgccgcgacagcgagaaaccc

SEQ ID NO: 189096 - DNA, 635 bp, Arabidopsis thaliana
cctgaaccccacgagcgggcgcacgagggaaccggcgagcacggagggttagagcgcagcagagggaaaaaagacggagcacaacacgccgacgggccgagccgcggaaaaccgagagacaggcgcgacgaaaagaaacgacgagagccgaaaacaggaagaacaaggaagggccaaacgggacaaggcgcagcgagacggcaaaaacaacggaggaagccaagagccaaacggcgggggggggcccagaaagacccaggaacaaaaaggggaaacacgggaaaaagcagagccccgaggacacgggcgggggcctcaacaagggcaagccaacagggcccgagctgcactataaacaacccgccggggaagaagggacaaaagaacccggggcgcgacccccaaaggggagaaaccgagcggaagacgacgaacacgaaattacgaaacagaaacgccggaccgcgcgaaaaagaggcccgcgacgaggcggggcgcaggcccaaaaggagggggcaacccgaaaaggaaaagagggagccccccaggcccgcgcccaaaagaaaaccacgggggccgaccgaaaagagagggaaaacggccggcacggggcccgcgtgagcgaaagggcgcac

SEQ ID NO: 189097 - DNA, 265 bp, Arabidopsis thaliana
cccggcgccaacattttaaaattatagggggtttaccgcccttcaaatggaaaattttaaaccccgttgtccctaacccgaaaaaaaaaaaaaaaacccttcaacccccgggtcccttacttttttaaccaggaaggttttggacccaaaatccaccctttaacaaaaaaccgggcctttcacaaatttttcctggcattttaccccgggccggggaaaaaacccttgtttttaaaaaggcttctttgctttaaaaaaaggtttt

SEQ ID NO: 189098 - DNA, 1187 bp, Arabidopsis thaliana
gcaataccgcaccaaacttcgatgcgcgccacccgaacctgatccttaaagtagaccaaaagaagaatctcactttctataaaaccacagagactggcatccacaaatgtgtaagatctgttgaagctcgaaactattgccctcttcaaaacgcgctaaagcccctgctcctactcctaccgttcacttctactacaacaacttctcactcacagtcgcaacattctgtccccgacggctaatacaaattacactggtgacaaacccccgtgaaccccagaacactgaccatccacacttgtttggcaatctcctccaaccctaacctggattcaacctaaatctactccacttcgcatatgagatattggctctaactctattaactacatctcagctttttgaaatcgctcttatccgctatactccgtcgcacgtgtcctcttacaacctctaacgtctatccctcgggataaaagcagtgtactcctcttaacccctggtcggtaagactccctcaatcgtcaccccgtagggtctccacctgctaagaacgcctttctgcaatgtaacgtccaaatccccccatgtgtgcacccactaaaagacgacattgcgaactagaactgtccaacaaccagagagcgttcatataaatttggaatccaagggatcctctgcttcgtgcaaaacatgtagtacaaagatgtttatcacagccccccaatcggggaacacctccaaaccaaacctttcaacaccacttcccgcaaaaaatccgagtggtacatacacaccgcaattccttccaatctaatacctcggaattcccaaaaggctatatgatatctcgaatatcctctccaattgaatatccttcacttgaaaggtgatcccatcctcccactgtactacaattgcccatgtctctttttaggagaaaacggaaatactccaaccgtgatctcccgcttttggaacaatcacctattacacactctggggattaccgaaagccccatactatccatatgaggtgcgatctcccccatcgtaaacggtggggggaagccaaccctgcgcgggagatgagcaatacggcacgcctcacaaaagttactttgtggcccaactaaaagagtgatatcacatttatacatgtctgtcctcgcctactaggaaagcgt

SEQ ID NO: 189099 - DNA, 681 bp, Arabidopsis thaliana
gcgggaacgtcggagcgagcccgcgaggcagggagcagagagcggcgaggagagcgggaccttatgccgccgagcgggccagacggggagacaggagcgaaccgggagaacggaagagacgcaacaagaccacgcacgagacgagagacgcacggagggcccaagaggaagacggacggagcaaccaccgaccacggacgaagaacggcgaaagcagctgacgaccgcgacacggaagcaggggaaactagccgggggcagaaaagcacgaggtacacgagacagagggggaaagggccgggagccagcggagggggcgcaacggcggaagaagggaacgcaacgacaggggagagagacatcaaagcaggggagaggagaaagctgacgcgcagcgcgtggagcgatcaaaaaaaggaaggagaaaacgtgcgaacaaccacagttggcgtgccaggagaaaaagccacggacgagaacaagccgaccaaacaggagaaggacaagaaaggggaaggcacgaaaaacaaggagcgaagaaaagggaggaacgaccgggagcgcccgcccgaaacagggaaacgagcaggggaaggggcaaagacaagcacggcaaaggacgcaaaggcacccagaacaaacagggggcgaaccaagccccgcgacggggaaaaccggaac

SEQ ID NO: 189100 - DNA, 769 bp, Arabidopsis thaliana
gcggtaccggaccgggatttccgggtgcgcgcacgcgtacgcgtggatcctctagagcgctcgtccattttcaaaaaatggacttttgagactggacactagctatcagctgttaaatctcccttctgcacggagtgtacgacgtcgtcctagacaaacaacgccttactattcgaacctaaccggggattctccttcgcggacacccaatctcaaaactgaattgtagactcaagcccgttgatatgctcgctgatctcgctcaccttgccgagaacccttctcccgccggcggagactcgctttttggcgctcatcagctgaccgtgcttttcgttttaactcacctgccgatacatgggtgcacacggagcctgcgctgtgctcgtgctgcatagcctcgcggaggccacgagcgcgtgtgagaacacgtggacgctcgcggatgcctgtgggaaagagccgcctttagcggcgagagtgaccaggtcgctcggggccggatacgcgtactatgcgggtgaggtgccgtataacgccgttctcatgggaagaaaagaagattgacgggggacgagccctgatgacatttacccagctgggaatggggaattggggaccggggatagtgggtactgggcgggaaccaattaggcggtcctttgaggattttgagaaaaaagggcgggggtacctggggtatgtttctaaaggggaagggaaatacttccccaaaatttttcgccccgggagaaaaaggtgttaaacg

SEQ ID NO: 189101 - DNA, 626 bp, Arabidopsis thaliana
aaaatgagcgagagacgaagaggaccagagccgggggcccgcccagaggcacgcagcaagcggacgcgagcacgcgacgacagaggaccggaaccgggagaccgcacaagcaaagacacaggcgcgagcgcgatacagacgccagggacgagaacaaaaagcccagagcagcacaccccacaggaggagaacgagggcagaaagcagcaggacccacctagcacgacaagcgagagcgagcacaggcagagcaaggcccccgcacgagaccagccggcagccgcgaacagggtagcagcgagactaggaaagagagaagagggaacgcgcgcacaggggcacgtgccaccaaggggcagaccgcgccggaaggaggcgcgcagccgaaccgggaaacaaagagagcggacggagggcccggccggagggggaccacggaggagccatccccgggcccgaggagacaggcaacgcccgagaagaggccaaaaacggggggggccaaaaaaagggggccccaagaaaagggggccagcaacgggggagccgcgggcgcgccgaccgaagagggaacaacaggaatcgaaggggcaggaacgggaatccgacccgaaacgggggggggg

SEQ ID NO: 189102 - DNA, 998 bp, Arabidopsis thaliana
accggaagccgggcacccagcgacgcagaaagcgcgcacgccacaggacagcagcggctttttacagcgcgggggcgcgaccgacaagggagggcagcggcgcagaacagagggctcaaaaaacccggtggaaaaaaccaaaagggggagacaaacgccaggaccggaagccggaggggtagaaggcaacaggaggaccccgccccccggggaaaacacgcgacagggaaacgaggggccaaggggaacgaacccaaacactggacacgcgggagaagcgagggaccataaccgctgcgaccgagaagaggaacgcgcaccagccgatgcaaaggacccgacaacaccatgcgaaaggaagagcgggcgggccggtccaagaaggaatcccagagaaaccggcgacgcgagagtcaaagacgaccgggggggcgcaaaacaacgggggacggaccacgacggacgacgcgcaacgggccacgacacccgcccaaccaaaagccgactagaagagcggcacaacccggtatcgaggcgacccgggccccacgcccaataggcgagcgtcagacagagagggggagacagcgaaaagatcgcgtggcgaaacatagaccgcgcgaataagagccgcacccaaagaaacgataacggatcgaacaacacgcgccgacccccgcaagagagagtggagacgccaaggagacgagacgcagaggcaaccaccgcagcacaagggtgtccaaggggaaccaggagaccactccacagaccgaaggccggggcagacgggtcgcacacacaacggagcgaggagaggaagcccgcgagacaccccgagaccgcgaaggcaccgcaagaggggcactgaggcaagcaagactaaagctattcgggcggaacaaaacatcgagcacaacccaacacagacaacccaggaattaaacacgcgcgcaaaagcggccacaaaaagagagggaggccgcagagtgagaaaa

SEQ ID NO: 189103 - DNA, 1043 bp, Arabidopsis thaliana
gccagaatttctgggtcgacgcgcccactagcctggatgctgatgaaggggaccctagctcaagagagcgcgtttttttttcaaggccatggcgcggcatccccgcatatgtaatgaccatatcgcatttagttatagtgtgtttaccaatcccatgtcacataaactaatggccggtttcttttcgccgttcagaaccggcgtgttgacatgaaaatttgattacctcgcggtcagtaaaagtttctacattggatttgtgtttttgtcgttctttcctcaagttatcacggttcaacaagactatattgttttcctagaaacgaccgtcttccatttaaaaatatattatgaataaataaaaatggggggacgttctaaaggacccaaggctacttcacggtgcatgcgaggttaaacctctttctatatggggacactaaaattcaattctcttggccaggaatgtatcacaaacgacatgggcctctggggtaaaaaccccctatctccttttgtctccctaatgtttaaaaatcagcctcgtttagcaatgtcacccattttattgcgctattattttggggtatccaaactcctagtgcgtcgattcactctataggccgcgagcagtaagtgggctctccccctctaccaacggtttttcttgtgggccgtttgtctcctcacatatcacggtttgtgttacctctctcctctatggataatatagggaagaaacttatgttagaaacctcgacctctcttataatatttcgggggctctttttatgatccccgagactataggtgggtgggtgtgctatcttcccctctcagtagaatacaccgggattaaatctatgatctattattgctcttattttacttaaaagaaactatattagttgcacacttacccgctcttacttcttatgaaacagaatacaaataatagtaggatctctccttcccttattaaagctctcctttatctggtggggccacaacctttaaaaatagttatccctctattttatggc

SEQ ID NO: 189104 - DNA, 1062 bp, Arabidopsis thaliana
  unsure (1)..(1062): unsure at all n locations
cgtattttggggcgccccacgcgaacgcgtgtatcttatagggtgctcatccattctcaaaaaatggacttttttgactcgccctttagcttccagctgttaaatctccctcctccacagcgtctacgacgttgtcctcgacacgaacgccttactatacgaacctaaccggggattctcctccgtcaacacccaatctcaaaactcaattctcgattctagctccgcttatttgctcgctgatctcgtccaccttgccgagtatccttctcccgccggcggagacatctgtttttggcgctcatcaccctcgccctgtctttatcggttttacctcacccttgcccgatacaatgggtgtggcttaacagggagcgcctggcgcattgtggccttagcggcctggcttagaggccgtactgcagggagaggccgcattaaaaanctggctggtggttacaaaaaacccaccctgtgggaaacgcgcctttcccctgggaattagaccccctcgtttgggtgaaaaagaaaaacttcgggcatcttttttataagacggggtgtgtaagattatttcgcgcaaccctctggtcttcttcctcttcagcggggtggctccgggtctatttaaagcgggcggtgcccctctcatttagcgcgagtcatatggaaaaagggtagccgcctctcctataaattgcccccggctttggattttaaaatccggtttaaacagaaaatgacacgaatgggctttttgtaaccgtcactaacggggggagggccccctctctatgacccaaacatatacccccaagattgggcggtttggggtgtttctggggggtcccggggagttaggctcgcttaccatggccgttaaacccggctaaggagtttcctttggggaatatggaaaatatggggcgcgctccctgggttgttttcccagggggaaggaaaattcccccagattttagacgggaaaagggttataggcctaaaaaatttctctttaccgggctttcctctccggtggtaaaatctcttcctaaaaataaa

SEQ ID NO: 189105 - DNA, 327 bp, Arabidopsis thaliana
aaaaaaaagcctttggggaacaaaaacccgtaaaaatttttggaaaaaaggttccccccaaccgttcaccccccaccaaaaaactttcctcgaccagccaagaaaaatcctttttttccctaaaaaaatcccgaaaagggggccttttaaagggccctggcttcaagcttttggttcccttaaggggggcccaagccccccccaccgggggttttaccgggcccctggttgcttaaaccctttggttgggccggcccccctttttttggacaaaaacctccccccggcctgggaaccaccacaaaagggtttggccctttccccccc

SEQ ID NO: 189106 - DNA, 356 bp, Arabidopsis thaliana
acttatagcaaaaaaaaatcaggggtggggaagagtttttccagattataatcaacccgaattttttttttccacataagctgggaaagatcgaaagagggtaaaattaaaaagacgagtttaccctcatcaaatcggggggggagctgacccgtagggggagaaaacctgaactaaagagttcagggttttaactggcatttccagagccggaatataatcagtggttttttttaaaatcaccggtccggtttgtttaccgaaaccggaaactaaccggcctaaaacacgtactttccggttaacatccggtatactttttttattaaatttaaacaccgaccctttcggttttt

SEQ ID NO: 189107 - DNA, 180 bp, Arabidopsis thaliana
caaaggaaagatcacaatatatatattttaacaagggaaacttcatggggttggtactaaattgaacggccaaacaggaatagaactgcaaaaactggaggctccaaaaaccccaattttattttgttccaataaaccacaaaaaattttaaaaggggaaggaaaatttttctgggggaa

SEQ ID NO: 189108 - DNA, 244 bp, Arabidopsis thaliana
acacattttttgatgagccacgaagctggatcttagagggcgcccttatacacttatttttttttccactccacactcctacatgtcggtggcttttatagaatctctcactccccaaaaggggcccatatcattctcgcgcaaaagaattgcacccccccccaccaatagctaatgaattgttgggaatctaaccgaaccccgtaaacaataacctataccggacaacaacacccttattttc

SEQ ID NO: 189109 - DNA, 346 bp, Arabidopsis thaliana
ttacttgaccgattgccaccgctgtctaagggctccccctttcacaccacgaaggttagcgaaaaaacctgtgacccgatcctggccaactctcactgtccgtaaaacttactcgtgcagacggttttggttaaggtaattcctcctattaatgtttctgcgtcctaccggaattctcccacgaagctgcgagtctaagctaacgttacgcccaatagtgggctagacatgcgcttagaccaggtagattctaccaggctctcttactcctcagccagtcacttcagcaattggaatgatctcccatttggacccccacccccggtgcaaacgctcgaaacaccct

SEQ ID NO: 189110 - DNA, 775 bp, Arabidopsis thaliana
tgaacgcgttcgtcctgctctggatcctctagtagcggccgcccctctttttttcaatcgattttttttttttcttcatctcttcatcctttctcttctttcctgtttggcggggaaaaaaaaacctctaaaccatgcatctctcttaccatcaacacttcttcagatacactctgcgtatccgatttgccccacccgatccccaaaaactttttttattattaaaatatcgaaccgctcaaagctaaaaaccaacatctccccctccccgaaacccgtatttgcctctaatgcttggggaaaaaattcatgtcgtgccaatcccaaaagcccaatagcggcttatgccccttcttcggttactcccgcccttctgggctaaacccacaggatcccaaccgtgagaccaacacccctccaacttatactttgatttcccccccaacccctttttaatgggccccaacaaaatctttttctcccactccgaagggtgggatcaatccgcctcttttggaatgaaatcgcccctcaacatctggggggcgcgagtaaacccaacaaacgccttttccactcccccccatccgccttagataatcgatcgctctacaaaccgtctcattcttctctacgaatccttttataaccatcctattgtcgcgtcttcttctaagcatcttctaaatacactcttcttcgttagtcgtatacggggaatactctcaatactctatccgtagagcactctcccctctcctggcggcagaatagg

SEQ ID NO: 189111 - DNA, 787 bp, Arabidopsis thaliana
  unsure (1)..(787): unsure at all n locations
aaaaccccccganaaaagagttgggcagaaagacggaccaaggagaggaacaatcagagaggcagcaccgggaagagcacaaagttttaggaaagggaagaaaaggcaaaaaacggggggaaacagaggaaaaagagaagacagaagaggggacgaaaaacaggaggggggaacaaacggggccaggcgaaaggagggaaaaaaagaagacccacggagaagagggaaagggagaagaacgagcaagaagggacaaaagccacaagaggaggaaggggaaggaagagaagaagaggaagagggagaggaaagggagggaaagaggagagaaaggaccaaggaaggcggaagaacaacgcacagcgaaaggagaaacaaagaggaaagcggacaaaagaaaagaggaggcaggacgccgagagagacgaggaggacggaggaagaaggggccaggaaaaggacagcgaagcaaaaagagaacgcaaaaggaaaaagagaaacgagaggggaaggaagaaaaagcgacagcagaggcaggaggcgaaaaaagcgagggaagagagaggagggagcggaaaggaaagaagagaagaaggaggacacaacaaaggcaggggagaaaggaaggagcagaaggaagaaagaaaagcaaagggaaagaaagagaggaaaaggggagacgacaacaagagaaagagagaaaaaagaaaggcaagcggggagaagaagcacgaaggaaaggaagggacagaccgaggaacgcagggcagggagggaagggaaaggg

SEQ ID NO: 189112 - DNA, 287 bp, Arabidopsis thaliana
tttgaatgcacgcccccgtaagctcggatactttagagcggtcgcacctagatcactgaatttttttttactaaccaacgcggacattccgacaataacctcttggggggcgttccaacaaaacacaaggtcacatactcctctatgattacaaataagggcgttaatctagatcccactgacagctcctaatcctctcaatgaaagcagacacttaaaattctcagttaattagtaccccccgcccactccactaccctatatttatacgcttgttattatgaggc

SEQ ID NO: 189113 - DNA, 513 bp, Arabidopsis thaliana
ctatgtacgttggtatggcaggcgtacgttacagcttgcgatcctctcagagcgggccgccctctcctttttttcttttctttttttttattttcctctttttctttttttttttcaacaagcaagcgttttactgattgcataaaatcttcatacagaccggatagaaagataaaaccttatttaataaattgcccgccttcgttgaaggaatctacccacggcgacaaaaaatccccacttcaatcggggcaaggacccttcttagggggctcctggggacctctcccgaagggaacaacttaccccgaacaggaactgcccctttaacacataggagaagcttttccaaggagcaagaacgtgaggagccaacctttcttctttaatggaggcccgcgccctctaaacttcttatccctcgagtaggaaagggcggggaaaccttgattttgattttgagggctgtccctacagaaagaaccctttcgttctcagaaggcataaacagtt

SEQ ID NO: 189114 - DNA, 302 bp, Arabidopsis thaliana
aacacctgactgtatgcacgcgtacgaagctggatcttaagggcgccttctttgtcactttttttcgccccgcccgcacacaacgcgctaagaaaagcaagtgccactacacccaaaagacaatcacccgtcagctgaaacggacccccccgcggaaaaaccaaccaagtctgaaggcactgacaaaacaccccaaacccccataggggacaacacccaaagctacccacaccacctccccaaaaaacgaaacccccaactacctgacgacaaccagacgaacacacgttctaaggccgacc

SEQ ID NO: 189115 - DNA, 619 bp, Arabidopsis thaliana
actgatcctatagaacggccgcccttctttcccgccggcttttttccagacaccgcggacgcaacttggcagggcgaaaaacctgccaatcaaacaggagatcatagttcacaaccaacttccgggcccattaactaaataaggaaaatccccgcacctcaggcacacatcagctgtggcatccccattccaccagctaaaactgcatcgagatgcgagtgtggcgctcgtccctctatcttcttcacacgctctttgtgcatctcagccacgaaatgataatccatcactgacgcactggaaaagctcccaaggcagaaacagccgctgaatcgacccatcccaggcacaacctccgcctctggttaacccaactctgagaataccaaacagcacatccacctcgggccatggaccggaatcccccaactcccccggataaaatccgcatacagctgcgagaggcggcgcttgctcccaacatacatattcacacccctccttcgggttccctcaagcatcggacagagaaccataccccccacctggatgccagtgggaacgaagttcatcccaatccgcccaccggtacagccagccaaagaaaatcggaaccccc

SEQ ID NO: 189116 - DNA, 839 bp, Arabidopsis thaliana
acgcaaaacctcacgcatggcaccctctatcacgggaccgacactacgacaaatgaaaactccctattttttttacgttcaaacaatcaccaaaatgcaaggacatgcgcgcgacacatcaaaccacgaaaacagaaaaaggcgaccagcacataaaacacgaaaaagaacgtacctaccacttacaagacaatacacacggggtccgccaccgcaacacccattaacatgagcggagcagggcggaaggagaacccgccgctttaacaggagaaatagatccaacacgaaacgtacattaccaggctagcgacctgaccgcatgctcccaacttcacataacaaaaaccgagggagggagctatactgcgcgcggaagcctccaggacggacatctgagacacactcacacctgcggggacgggaacacaacgcgacacgagcaacagcattccttcaatcccaacggctgaaggactaggctctcagcaactaacccggaggaaaaacgacaaccacatcaccagcaacttttggcgcatcacttacagccaactaccccacgagatacttgggccccctatgaagaggagagcaaacaagcagtcgccctgcattcatgcggatcacgcatctccgcaaaccagacgccatatctcacaacctctaaaaaacttaccacgcctctggcagagaacaactaacacgctaccttaccgggacgccgcgacagtcggagaacactcaactaaactgtgggtgagagaaaaacacacctccacaaaaaagagaaaaattctgccaggaacacccccgcagggggatcccaaaaccaccgc

SEQ ID NO: 189117 - DNA, 650 bp, Arabidopsis thaliana
aaatccaccagctattactttgcatgcaaacctacgcttggatcctttagagcggccgccctttcttctgttaacctctttttttttttcaaccaccgaagggcccccaaaacaaagggaggtttttttctcccaaattaaaaactcccggattcacacgcccatattaaaaacaaagggcggtttttaactcaaccatacgccccgcacctacccatgctgtttattaaatattccatactgccactcttttgtatattatgacgaccactattcctctgcctaaattcaccgctcaaaacaaaacaaaggaacagctccaattcaacaagggtgattttgatgcggcgacccaagtggtatcacaaaaacggcgacaacacaggaggcacggttacaaagcaatgcggggtcttattctcggctcgagtttcacccctatgtttaaaggggaaaaaaatcccgaaaacatccggtttggcgacaaaggaaatatggaaattcacctttgtggacgacaatccaggcaatatcccataaaaaagcatcccatctggacttataaacccatctgtgggcgtgttttacggtctttacgccacgacacccggctttctccctgtgcaccatttgcacttaaatatggccac

SEQ ID NO: 189118 - DNA, 577 bp, Arabidopsis thaliana
  unsure (1)..(577): unsure at all n locations
ccctaggacccactagagcggccgccctacccacaagaaacaaactttttttttgccggaaaaaaaccgcagcaacggcaggggaggggcccaaactgcggaaacaacactccaaataaaacaaccccaccctctagcacagccaaaacacacggggaacccagagcacgccccacagaacacaccaacccaccgaaggggagacaaaaaaaggacaggccgccacacaaaacatcagaccagccagccacatcgcccccgcgcgaagaccaacacccgacaccccaaccagcctgcccgacctgcaaagcccctggaggggggacaaaaccgcacaaacacaacgggctcaaccggcaccacgactacacgcccggacccaaaaacaaccacggcaacaaccccaaaaggcgccgacaaacaccacaaccacaaccaccggcaccccagccacagcgaaacaccaaatactgcacgcaagaacccccccacagacaaaacccccaggaacaaaccanccggcacaaaaggctacacaaaaaaacgaacaaaagggcggcgcaaccggaacgcaaaa

SEQ ID NO: 189119 - DNA, 621 bp, Arabidopsis thaliana
gcacgcgtacctaccctaggatcctctagagcggccgcccttcatttttttctctaatttttttcttacgcccaacctccaccagcgctcaattgttggggggaaaaataaacggcctttaacagcccctgtgaagtgatattataaaacgaattgatccactgttgaaaaatatttgtcccacacaaatgatacatgcgaataatgtcccaaaaatttgcttatctggttctccagtaaaaattgaataagagggaaatagtgtggctgcttcccactgggttggttccatttttcaacttccgtttttcagtttcaaaaagacctggccttgaacactgtcgttcagagtccttgtatgaaagaacaatcctgttggtaaccacaacctcgacttcaactgcaacccgacctccaagaaatgaaacctccacttccgaattcggaaactccctcatccgtgaacaggggacccatctcccgataaaatgatttccacccaacaattggcgtaaagaccccacccgccattcttcccatggatcctcaaaccatctcttcaaagggatgtaatgccacttctccaataagccaccttgaaccgccccaggttgttcaatc

SEQ ID NO: 189120 - DNA, 647 bp, Arabidopsis thaliana
aaaccaagaggagacgcaagcggacaaagggcaggaagatttttaaagacgaagaaaagggaaaagaaaagaggaaacagggaaaaaaaaaaaagaaaaaaagaaagaaaggaaaagcagagaaaaaagaaaaagccaagaagcaccagaacgccgaaaagcacgaaaagggaaaaagaaacgaaaaagaaaagaaagacaaaaaaaacaaaaaagaggaagaaaaaaaagccggaaaactaaacagaacaaagtaagaaaccaagcgacaagcgaaaaaaacaggggcagcaaagaaaaaaaaaagacacgaaaaggcgaaaaagaaaaagaacaaaagcgaacaagacacacccaaaccaggcaaaaaaaaagaggaaaatccaggaacaacccacaaagcagcgacacaacaaaaaaaaagggagagaaaaaaaaaaaccaaaaacaaacaaaagaggaacgaagggagcaaaaaggaaccaaagccaaaaaagcgggcccaaaaaagaagcgagaaacacaaaaaaagcaaccggacgaggccagaaagaaaaaacaaattaagagacgaccacacaaaggaacggggacaaaaaaggaaaaataaaaaaaagcaccacccaagggaaaacagaggcaccaaa

SEQ ID NO: 189121 - DNA, 110 bp, Arabidopsis thaliana
actatatcatgattatgtgggcccgaaaaacaatttggatcacctcaccgctttactatgctgggccctattgtttgcaccaggtctatttgggttcatagtgatttgtt

SEQ ID NO: 189122 - DNA, 257 bp, Arabidopsis thaliana
aaaaggaaaaacggccttttttagaaagcaatatagccttgtaaacccggaatacctggggggaagaccaagaaaccaaaaggcattgtaaaaaataaaccccccccaaagtaatcaagattcaagacaccccccggttttggggggaaaaaaaaaaccgcccttttgtttttgggacaggggttgggtaataaccctgaaactgaacccggttcgtttttaaatttgccggtccccccccccttgcccatgaagga

SEQ ID NO: 189123 - DNA, 308 bp, Arabidopsis thaliana
aaccccaaaaaaacaaactggatggggtgattatgaacaatggggggggggttgtttttccctaccaagaaaccaggggtgaccggccaaaaaacaaaagaaaaggtaaacgaagacttatctcctgttttttacagccaacggccattggggcaaattgggatgaaaagctttgagcaaggccgcaaacttgatagcattctctatgctgcaccacttgagcttccatgtaactaaacccactgttctcttctcttggacctttaatgacccaacaattccttgggttccaattatcatttcaaatt

SEQ ID NO: 189124 - DNA, 128 bp, Arabidopsis thaliana
aatataaccaacactctattacagtattactaatccaatggtgcaaaacatgaaaccggggtatatctgaatttaaggccggtcctaagaaaccctaaaagcaaatacaaccataataagagcagaaa

SEQ ID NO: 189125 - DNA, 224 bp, Arabidopsis thaliana
aatggaaccaacactgcattcccgtttttcaaatacacaggcggaaaacatgaaaccacgtaatatcctaacctaaggccgttcctacgaaaccctaaaagcaaataaagccatcctgggagcagaaaacagagagccaatccaccaacatgacgagacttggagatgacacaacatatgagaacacaacagcttcttcaccaattcatatactatgaacctta

SEQ ID NO: 189126 - DNA, 409 bp, Arabidopsis thaliana
gccgccctttttttttttttttatacgaacttacgacccaataaataagattatgatagagaaagagaaagagaaagaagttgaggatgtgcaaaaacgtaaaccgtagtagttaacaaaagaaaaaacgtggaacacaaaccacaaacccacagctacatgataacattataacaagaacatatgttagaagaaaagaaaaagatacaataaagacgttacataacaaaaaagaagaaaagaaagaactcttcgctcaagtaacggctccgaggaagatcttactggtagtacatgagctgctgcgcgttctggtaaccaccgtcatatattgcctggtttgaaccagtggctcccattgcagcttgtttaaaagcatgttgtccctgcgggtgatgcatcatcggat

SEQ ID NO: 189127 - DNA, 432 bp, Arabidopsis thaliana
ggtgaggcatggaaagcaagatgagccgcaaggggaccaagcgcggagcttttggcgacagagggagagggaaggagaaacgaagaaaggggggaagaagaaagaagagcgggcggaaaaggcggcaagggggcgggcgggggggggcaaggacccaacaggacaagcgaagagacgggaaggagaggcagaagaaccgagaagggggaggaaggggagaacacgaagcgagagccagcggacaaggggggcacaacgcgagaagaacaagccagagaaaggcaagggaagggccgagaaggacgccaggcaagggggagaaaaaaggcaaaagggcggaaagaggacggtgagcgaaaagggacacggagggacacggcaaccgggggaaaccgacgcggccgggggagaagcaagggacagacgggaacg

SEQ ID NO: 189128 - DNA, 398 bp, Arabidopsis thaliana
ctaagtcatatgtccctgcgactaagcgctgtttgttttttacggtttctcttgtaataaatttacgaacataaacggtgtaaagtcaccgtttgctttaaccatttggaaattaactaacagcatttgttgacatgtaaatcacgagggtgaaccgaattttcaatttatgataagtcacgtaactccagttctacttaaagggcggaattcttttccttgtcctttaaaaaccgaatccaagccaatgtgaaaaaccccttacccggaaaccctttgaaatccctttttttaaggttttcccgaaatgcattaaaggccgcccctacctttaaacggttaaggaccgggtaccgaatcgacggctggggttccgtttatggaccataattggtttt

SEQ ID NO: 189129 - DNA, 165 bp, Arabidopsis thaliana
cttgggtacggaacccttacccttaaagggggtaaaacgggttttccacgcttttcccaacttccaaaggccattccaaaccaacttttgggggttggttcaccccacaggttccaaccccccggccacacttggtttcttattttaccaaacaacccaaggttg

SEQ ID NO: 189130 - DNA, 1073 bp, Arabidopsis thaliana
  unsure (1)..(1073): unsure at all n locations
aacacatctagagagggcggaccggatgtttttttttgttaatcacagcgaacgggagcagggacaaaacaacactaccggcagagcgtgtgtgacaggaggagggcccgcaccaatatgccagacagggggactgcagtcatctagacaccatagggagaaagcatagcaccgagaccaagactgaaaccaaacgaaagggatgttcctaaacacataaatgacaaagtattcacactgtgagctctacgataatggacggggtgattcttatagggctgtatgaaccaaactcccagcagatagggtaatcgcagataaattggtgaaagagagaatcagaatggaacacctccccaaatggtgactaagatggcaaggcaattactcagcggcattactgcacaatgtgtataaggctgatgataaagactggtgtgctaagagacccacaaaagacatgttggtggaaatagtaggggtggtggggagaaagacacccaatcgagtgaaccaataagtatagcagcatatccccgtgggttggtctgaaacacagaacccctcgtgctagggggagaaaaactagtctggtgggcccaatgtgaatggggctgaaaacctgccatagaatagacactgcgagactagcctcttatagaggaaaggcgctcaaggggagccnctctgtgtgagaaatcgccaccggcgagccaagaaggccattctacaaaagaggagataggcgcctcacccaggtgcgtatacacttatactacagaggagacacatggtggggcataagtaacatctgcttaggagctgtcaagaaagcacactccttggggaaaaattccacagagggacccagagagcacaggggcgaggggcaacctgtccctggcaatggaaatatgcaaaaatggggggagagaaaccaaaataggggtggaacattgggactccaaaaaaggggttgaataccccgtgggcgaaaaagggggtataggggtttacaaatggaggcccctgtttggggggggagaccacaatagaaaagttggactggggcg

SEQ ID NO: 189131 - DNA, 343 bp, Arabidopsis thaliana
tcatgatgtggctgcgacaacgccctctagatttttccggagtatatttaagactagccccggggctggacgcagattcctaaggtcattaagctgtgtaaaccgccgttaaacaggtgggatccaggaataagacgcgtaaatttagggttaaccagaccgatctggactgtaacagtgtggaaataccgaaccatgaatacggcatacacgaaatcagcaaaaatgagttgcttacttcgctcttgcaccaggactggggaaaccggtagcagacgacgatgtcagccccggaatgccagatcagtactaccatgctctactagtgccaaacccgggggga

SEQ ID NO: 189132 - DNA, 887 bp, Arabidopsis thaliana
  unsure (1)..(887): unsure at all n locations
ttttttttacgcaggaggcagaggaaggagaacacggggggggcggtgttggaacgcgaggggcaaaggcgttatcacattattacagtgaattttgctttttatagggcttgtggtgttgatgttttgtgtgttgaaatgtttattaccttttttttttttagaaatacttttattttgaagaatttactgtttgtttgccatcttttgaaagtagatttttgaggaagaaatctgcgaattatgttggtattgattcacagggaagtgattgatgccatttcgctttttttagcactttttttctgatattggagacacgtggttttgttgttcttgccgctgtgcaatagtggaatcctctttttttttttttttatcctcgtcttttaaaaggatctttttttgttttttgctcccaagaaagggagaacgatagggggatgcatatgttttcttttgttatgggcctcggagggttccttttgggtcaacaagtgggtggtgatnagccagatagcagtgtttgagaaatgaaggttttttatgccatccagggtttcggtttgtggtgggtcgtgttattttatcccattttgtctttcaaatagctttatttggggctctctttggggtttttttgggccgaaacttttttatggctactaatgcaacttggttgtgaggaattcttaagaaaattattgtatgtttgggtggggaattcttgaatagtctttttgtattagtttagtagcgacgcattttttcatgttttttaacatttttgtgtatggctttatattggggtcttaaatcagaacattgaggtgcattgggtactgttcttcatatttacacgttctgtaatggtttttggggctttt

SEQ ID NO: 189133 - DNA, 373 bp, Arabidopsis thaliana
cacccattaacttctcatttgtattttcattattggccaggggatttgggcccaattagttggcttttctaataagaaaaccaaagcttggggggcaaacaaaaccgaaacttttggtttaccgggctgggcaagaccccttttccgaccaatttcattttcaggtctggggttaccccgggtgggccttaacttttcaacaaggcacaaaatagcaatttcatgaaattcttaacatccggcacttaggggggttatgaatcctttttttttacaaaccgggcctgaaaaaaaaaccaatggcttattttttattttcagcaactccccgttttaaccaatttttggtcttttaggggggtcaatcatttaa

SEQ ID NO: 189134 - DNA, 858 bp, Arabidopsis thaliana
cacacgttacctaagaccggaggattctataaaattcggtacgacccttaaaacctaacaaaggaccgagtttttttgatatttaaacgacagaaaacaaagatcaataaaattttgtttgtgctaaaaaaacgaaaagaactcaaatatagagaaaaaaacgaaaaaatatttttcatgagtaatataataaaatattatacacaaggtttataaaaaaaagcttacaaagaagaccaaataaaattgaatacaaggtccaggaatacctaaaaaacttaataagattttattaaaattcactctgaagacaaatatttcttacacgaaaatgatttcaatccacaacttaaaccctcttgtatggcttaaatatataaaaactttgcgaaacttctttatctcaaaggagggggtcaaccacaattttattcacatcgacaaataactgggaggaacactcctcttgctgatactatattaaccgaaagacttagcccctcaaaaaaaataacgtccaaagtaaactccgcgcaagattaaataaaaatctaacttagattggtgtaccctcaaatatgttcatatatctgtattcacccaagataacaagggaaacaaaggaaacattataatggaaagtattgcataaacgtggaaaaaaacatacttaataaccccttttgaattttctaaggtgtcgataaataatattcttagaagacaactattttattaaagaaccgattaatgtacccaattcacataaaaacgaaaaaacgggggtaaaaccgaaaaattgcgaatttttatttggtacaaacaaaattaacttaaatgcgcaaaaatctcgaaaaa

SEQ ID NO: 189135 - DNA, 909 bp, Arabidopsis thaliana
ggcaggcacgcgtgcggaagctgggatccactagagcggccgccccagcaggagagctttttggtgttagagaaacacacacactgcaatgggggcggcgggcgaaagcccggcaacaaagaaaccccacccgagggagcgggaaccaagaaaaaaaagaaggggcaaacacgaccgaggggaaaagaccgggcggacgaaaacccgcgggaaagccaaaaaacaaaaacgcgggaaaaaggatccttgtaaaccaaagcggaggcggagggaaagaccacccccccaccccgggagcgcaacaggagggagagaccccaaaccaaaaagggccagggcccggggcaggcgaaaaatgcgagccaagccgacaggggggaaaggacggagggcaaacaaaaaaacccagagaaaagccccccggaaggagaagaaccaacccataaccacaagggacgggcgaaccaaaacacccaggggccacacaactcgagggcccgcaccacggaggacacactcccgggaaaaaaaaacccccccaaagagggaaaaacaccgccccccagggaaagcgggcgccaaaaagcgggggggatccgaaacaaaaaacaaggggggagcaaaaagaaaaacacggccccctgcccgcgaaggagcccccgggggccgacaacaggcgacggggacccccgtgcacaagaacctaaaagaagtcggtcccgaaaaacagaggacccgagggggaaaaaaacccccctcacaaaaaaggggcgaaaaaaactctgccgggggaaaaagaccgcgcgcggggggcccggaaccccccgaaggggcggccccccccggggaaaaggccccggggaaacgggggccccgggggggggggggcccccccagacggggcaccca

SEQ ID NO: 189136 - DNA, 740 bp, Arabidopsis thaliana
agggcccgactagacgaaggcagcacgcggacgggaggcgggagccccgagacggccgccctagcgggcgggttttccgtttagggagagggcagacggcccggagggggggaaacacaacggggcgggaaaaaagcgggaccgggaaggcgccgggggggccaacccgggacagaggggacaccagccggccgggacgaagggaaacaaagcacgagccagagaccgcggaggaaaagaaggcggccggcccaccacgcagccgggggagacgcctaatagcgaaaggcaaaccgggacggggcagggcaagggcaaagacacccacaaggggcaaagcaccgaggcgacgaggcacccggcaaggggacggcggcaaagagagcagcggagcccgcgccgcgactcggggaagagaccccccaccgacaccggggccaaaaacgaaaccggggggccagaacaaggcgggggccccggaggaggggcccagccgaaccggggggccgggacaaccacgggggcccagggggccagcgaggggggacccaaagacccgaggcccagacaaaaaagcaacccgcccggggggaaccccgacggggaaagagcaaaccacaagccgggccagaggaccacccgggccccagaaacgcgcggggggacccaaacgcccagcagcgcggcgggaaccagaacggggaaacggccagccagcaccccgggggggggacagggac

SEQ ID NO: 189137 - DNA, 567 bp, Arabidopsis thaliana
ctatgacgtccacgcacgcatgcttgagctcggtatcctctagagcgctcgccctttttttttatttttttactgaaagggcaagtcttaacatgaaagcatcccaagaaaactactttacgggcagagtctgcatatactaaccccttattgatacaacacccactcacccggagaagacgtgtatgaaaaagacaactttactgcagacgctcgtttgggctgttaaactgatcatttacctaggaattatacgggtgccacaagcatataccgcggagcatcacttcgcctgggctagagagggaacccgtgaacgcaccaccgaatttatggagatccatggacacgctagaggggccggagcacccaatgaccctacgtcgagctggtggtgacaaggaatcacaggaatgtaaagacgagaaatgcacaccaactcgacagcaatgtggcgggccagtgctatcttacatggggatcaaaaaagcgattgggtccgcccctctcatagattggctgaggcacgccctgtccttccccgaggttttgaaaggtttgcaatct

SEQ ID NO: 189138 - DNA, 415 bp, Arabidopsis thaliana
agtatctctgggcatatagccccacgactacgcgcctctttttttcgcagacacgcggcatgcaaacaaagttccatctacacctcccaatactacaaacgcatatagggaaacacagaaatcatcagatattttaacttatcaactacgcgttctacaggggccgatccacgtaccatacatgtcccaaagagcgatcaatgttggatcctggtagcatcacaaattgcaacaaaaattccaagcctgtatccttacggctactctgaacgtcttcccctttgttccacacactgcccaggggatccatcccctcaccttaatggcaacccaatcgtattaccttccaggggtccaaacctggaaatacaaaagcctaatcaaagtccaccgactggctaacgtggcctcccac

SEQ ID NO: 189139 - DNA, 803 bp, Arabidopsis thaliana
gaaaagtgccacattgcatgttagcgtaagtaagcttggaaccctataaaatcgagccgcgcatttgaactattactataacggtttttaaatttttgcgacacgacgagatgaaaccacaaaatgttgcttttctaagaatacatacaatgaagaatctggggcagacaaaaacacaattaaactagacagaaaaaactatgtttgtaataatagtataaaaatatataaaagcaaaagaattcatgagggaaggctttaatatagggtacaaatgaaaaaaattttaagatgtagctcaactaagcaataaacagtataatattggcgcaacagtttgataaacagtaaaagaaaaaatgacacttcatggaaaaggaatattcccttaaaaaatttgaactagaaatccaatggggagacgagctcctggaaaatatctctgaaaaaagtagtagactatgtggattgataaaacccagaaatattataccctcattcagtatgtagacccgacctatgaaatatatttatagagatttacaagccttaaagtgttaatgatccggaaataatattttaattctaagaaaaactgggagagaggccccttataaacacagggtggggacgaaaagatttattgagtcggaggaaagtgcttaaatagacgtaaaatcactctacggaacgggaagctgaaaaaggattttacaattgacaaacaaattcgttgtctcgtggatatctaatgaaaattatgatacttcatttagaatacggtttccccagtaataagaaaa

SEQ ID NO: 189140 - DNA, 390 bp, Arabidopsis thaliana
tcttttttttttttttggtaattgtattttataaaatggaggagtctccttttcggttgcaaacgtcaaaatagtgaaaacctagacaaacttaagatattgccaaaccttgaatcgtttccagaccaaaacaaaaattctccgatgctcactacgaaaaacagacgacattaatttagctcaaaaaaaaaaatacaatacagggtttgttaatgttgcatccctttctattcagcgctcttagacttcttcttcttcttcttggcgctgggaccatcatcagactcctcttctcctccagctatactcttctttgtcttcttcttatctgacttctcgttctcctctgcagactccatcttcctcttctctttcttcttctttttctct

SEQ ID NO: 189141 - DNA, 329 bp, Arabidopsis thaliana
ggaaaaaccggggatgaataatacatttggccaaggccaactgtttaaaaaaaagaacaagatgtttttgttttcccccaacaaacccggggggggttcagatttttttggttggccaaatttggaaaaggaaaacttgaaggggctgggttgaaacccttataacttatttggggaaccattttggttttcatatgaggcaaaagctttggggatggaaacataccccttaatgcttttaaaggactcagttttccccaaaatcttattgggggcatgaaacaaactcggggggtttgatttgggaaaaaacccaagggggggccccc

SEQ ID NO: 189142 - DNA, 500 bp, Arabidopsis thaliana
cgccctctttttttttttttttttttttttgggcaaatacacaacttttctttcatttattccttggggaaataacaggggttggggaaaaccacatagtcgagtaacatcacaaagggaatattcaatcaaagcacaaaaaaaaaaaacatttagacaaaacacacaaacttgtgtttcctacgcttcattccagagtgtgctactccatgttgactgggggagttgccttgaataaaagatcatgagcaatagtgtcccatggtaatgaaatggacattaagcagcatttaagagggaacatctcgttttcatcataagaggcagtagcagctgctattgcatgtttagctgcgacagatgcaacagaggctgctttacggaaaatggatccgagatcgatgctcttttttgaagacataggtgaaacaggccctaaaactacttggctctgatctgagaaaagcaattctatacaatcattctttaaaccatactac

SEQ ID NO: 189143 - DNA, 726 bp, Arabidopsis thaliana
gcacagagacgaatgcaagaggacgccccagccacaaccgaccgaccaacgcaacggccacggaggagcaacaggcacgacacggacaacaacgaacaaccggcgaaagaacaccccagagggaaggtgatgcttcttgacagccgtagagagagagcgccgaacggcccaccaggacagacaaacctatctttacaccacgccaagcacggggacatagacaaaagacggccacacgcccccataaacaaaggaaactgggcgcagaactgggccaaacgacacacgagcagggcaaaccgcacgacgaaaaggagcccggcagctaacaaagacatgcgaaaacaggacgaggagcggccccaaagcaaccacccccgaccggaaagacggggacgcagaaccacagcagccaccagaaaaggaggcccggaacaggccacaggggggcaacaacccgggagggccccccaaaagggcaaggggaaaaccctcacggagaagaacgcacaaaaaagagaccgcgacgagaaatacgcatcctaaaagaagaaacagggacggcgagcgtgcgaaacacaacagacgcgaacggcacggaggagcgagagtgcaaaaggagggccgcacgacagaagaggaccggacgcgaagtggcaaacggctgagagacggtaacccccgggggggagacaacccgggggcacaccgggtgaacccagagaa

SEQ ID NO: 189144 - DNA, 836 bp, Arabidopsis thaliana
gagaagacgaaacccaggaacaactacaaagagcggggagagagcagaggcgcaaggaggccgaagcagaggcgccgaggggcgagcacgagaagcaaggagagagaagcggccgagaagaatcacacccctaagggggaagctgatgcttcttggaagccggagagggagcacccccgaaggagggaggccccgcggggggcatagtttaacgaggaaaacaaaggggaaggggaagagcgaaacgggggggggagggaacaagaggagcgggcagagaggaaggagccagagaggggggaagagagcagacggcaaaaccgggaggcagagaaagaggaaggcgaaaggacggcggagggagcgcagcaaaaaggagaacacaccagaaagagggagcggagagaggagggaacagcaggggaggaaaaggagaccgagaagagaacccggcgagcggcgaccagagggacaaagcggagacgaacgagcaggcaagggccaactggggtacacccaaagggggcccggggacgcgggaaacccaaacacgggggcaaaggcaccaaaacgagggggaggccctgggacaaggaggggcaagggaataaggaaaagagggcgaagaagagggaaagagacaaaggcaacgaaacaaggccgagagcggaggccgggacaaagaaaggggggagagagcgagtgggcagaggtgcagcaacggacaaaacaagaagaaggaggggacgggaacaagagaggggacccgagagagagggcggcgggggagcaaggggaccgggaggggggaagcgcacaagggggaggaaaaggaa

SEQ ID NO: 189145 - DNA, 1247 bp, Arabidopsis thaliana
  unsure (1)..(1247): unsure at all n locations
ccccccgaaagccgcgcccnccgcgccccgacacccccccttcttcccgcccccccgcacacgacccccccaccacccacacacggcgcgcgggcaccccccaccacccccgcacagccccccccccccncccaagcccccgcgccccccccacccccaaccccaccccgcccccgcccccccgcccagccacccacccccccgccccacccccccccccaccgccccgaccccgccccctcccgcccccccacccgccccccgcccagcgccaaccaaccccccaccccgcccacccgccccgctccccacgcacggcacccccgaccccgccaccccgacccgcccccagaccccgccgaccccagaccacgccacaccaccagcggcgcacgccacgccacctcctgcngacgancgcctcgccatccgtcctcttcatcttgatctctacctccagactcctctgctcctgctcctctactcgttctcgcagtctgtctatacactctgcactctctatctcgtatctgtttatctccttctctcatgctcgtctcgtacctcgatcacagcatatctctcctcatccgcgcgttactctgttgtacgactgacatcgcgttgccttatcctcatcctccatctctgatcatatagctctctcacagtcgctccactcgcaacacctacgtcgccgagtctggttattgatcgctcgtcctcgctgctgcattacgatcacgtatcctctccctactcctagatactgctgcttaatctttatcactcactctgttccactatcatggatttctctgtcttctcgctctcccgtcagaccgttgatctctcacactcctctatctctaattacctcactcctcctctgatgccattctctgtcgcgatgctctctactccctatgtctcctgctatcttcactacactgtgcgcccttgctcccactcctctctccatgccctgtgtctcatgcctttatcactcttcttcccgatctctcctaccagccatctccctctaacctcatcccctcacgcctcttcaccaatcacgtccctctccttctctcctccttccgattcttctctcctccactctctccagcatttctgattatctcctttcatctccttctctcaaatcattctctccctctcttccacatcatctgatatccccctacacacctccgctccctttctcttccaacttcctctcatcc

SEQ ID NO: 189146 - DNA, 574 bp, Arabidopsis thaliana
  unsure (1)..(574): unsure at all n locations
cttgacgtcgcatgcacgcgtgcgtaggaccgtatacactgagacgggctgtnccttttttttttcatttgtttctaggtaaaatactacagggctcttcgaatccacacacatagtcacggacaaagaaaaagcaactcacttgctttcgcactgaccattaacaccatctacaaaaataggcaccttgaagagaccattgatcctgagatacgatttgcgtgagcccttttgtatgcttggatcagggtgtaaaagatcctctactaactctgagcaatgtctacagagtgcaggttgcttcatcctaccttgacttgtccaatctcgacgaggcggactcattttctcgtcaaccgcactcaaagaactttctagagcctcgtacataatgaaatgagctattctagcttctattgttcaatcttgatcggattaaacccgcggaacagagctttaagcatagccagtaggtccattaatctctagacccccggattcttgtacatcttgtatcgggcaacccacgggcccaacacaaagaatattatggttacccgcctctttttgcccc

SEQ ID NO: 189147 - DNA, 923 bp, Arabidopsis thaliana
  unsure (1)..(923): unsure at all n locations
aactatgatatgcacacgcaccgctaacctcggcatcctactacaacggaccgcccacttccacctctctcatttttctttttttcctcatgaccgccgccagcaaacacatctggcattaacatctctcactcttaaaacacacagctcccccaccttgtcaacttttcgaaaacaccttctcattataatcgctatttgacccccttcaagaatgggattccacgactaccctcaactctagacatatctcctcaatggggcaacaaccttcctcgtgaagcttaggcggcccggatagccatcgacaacccatccactcccacttgccgcgatgttgctccaactcgactgaccccttatgaaagcggcaccggcgaccctccttctttgatttctctcaacactccctcaacactttgcgccggtctcggtgcctttctgaccaattggcaatcctcccactattcgcccctgctttctcgtcctctcattaagggatctccgagcatactgtctcctcatctgtcttccactaggtaaccataatcatctaccgcctggcacctcacaaaaactcgactgaattttaccatcaaccacccaactagacataatctcactaccttctccttctatacgctagctcatatggagggagattgtctctattctcnacacagaattctatctctcctctaagactcccgtaacattcttcgactatcacgtgattcatactctattagatggccctcaactgcgttacagtggattcatacccatagataaatcacatccacttgtgcacagagtctgtctgcttccacacttctcaccgcagatgtggcagtggggtggctaccccctctttgtctacttgtccgctctctaactaactttattctatctaccgtacgcgc

SEQ ID NO: 189148 - DNA, 1019 bp, Arabidopsis thaliana
gagactaggacagcacttacactcatagtacacgaccacgacaacactttttcgatatttttgacgcacacaagtaggtaggacgattatgcatgaatccgtatagtcaggtcatgcggcaccccgtaccgagacaacaatgtactgtgtctggcaacacaccgtgcgtacgtctgtgcctcgaccacacgtttataagttaaggcgtatacacaatggcagacaaccacactaccatcgcacatgggtgacaatatagacagaccacagcatcactcaatcgatctggcatgcttcctcacatagaccacacgacaacattcttccaccagcgtatcactctatcgttccaataattggacgatcgtctcacccagcaagtagaatccagctggaatcgataggaccaacatgccttacaacacacgacgtagcgtacgcagtgccatgccgccgcaaacatatacacgccgactctccgtcagtcgagctcagccaatagaacagtgagcctgacaatagctgcgacggtcaatgcaacagcgacacacatatctgtcccggacgcgtccggcacgagctgcgtgcaccgagccagccacgtgattccaacagatcctgcccgtcataccgtggacggacgccaacacctgtctttcagactccaattcgatgggaacttcacatgagcaacaccactatgcattcacttacgatcactagctaacctccagtagcctagaagcatactcaatcatatcatctgactggaacatcacgatcacagatgcaagccaactcccgtctgtaatgcttgctacagtacgaccgaaccaggatgagccgtatcccggccagacattcattgatacagacgtactttccttgcgattcgatctcctacggacgcgggcagccatgctggtcaattcagccgacgagcatgcgacacgcctagtctttacagcctacgcacagctgtagtcgatactagaactcgactgtccgtaaatcactat

SEQ ID NO: 189149 - DNA, 306 bp, Arabidopsis thaliana
ttgcacgcgtccgtaagctgggaatcctttagagcggaccgccgccttccctctcacttcttcttttttttttttcacacacagatacaggacacaaaagaacttgtagcgggtgtctatatacaccataagtgtaatcttgactccctgacaacacagactgcacgacaaagacgtatgacccgtggctggacataaacaatcctatgcgcggcacgtcatgaaacacacccacatacacattacgaatcataatacgaggtcgatataccttgatctgcacgcgacactatctgagactcacgc

SEQ ID NO: 189150 - DNA, 931 bp, Arabidopsis thaliana
aactccgaacgtggaagacacatgtaccgagagcgaaggaaacggataacaagggagcggccggcactaggacgcagcttttttttttccccggcgaaacacacgaagaggaggaggggtgatgacacacaaaacgctgaaagccacaggtgcaaaagcgcagagaataaggaaaaggacaggaccccgaccaatggggccagacgggaaaaggacagaaaaggggacagaacagcaaagcagggctccccgctaactggacatagcgggagagtggcaaatagaaacgcacacagacagcgacataggacaaaaggacgcctggagcgccacgcgaagaatcaccatttaacgcagtgaaaatccgaaacacatggggccatgcaatacacctaataagaggagatccgatacgcatggtgtccacagaccgtggacctaccccctcttgagcaagtcactagtgcgcctacccgacaccatggaactaatggaacatggggtctgtccgaagggtgggctgtaaaaatccaatccaagtagtggaaaagcacaggagccaggccagaataacccaaaaaaggtggaggaaggcaccaaggccttcggaaaaaccaacgcaaggaaccttactgggaggcaatacccgtcacgaagcacttagggaacacggcggcaaggggccagaggtgggacaactggcacgaaaacaatgcacctttgaatagagaaacccaattcaaaggggctccggaccataagagggaccgaaaagggggcaaaaaaacggtgaagagaccaacacaaccttgggaggaccaaaacccggcaagggggagtagccccttggaactaaaatatgagaaagcatacgggggagaaaaaagcatatattgaaacactaatcagttacatgggaaaacgccgactc

SEQ ID NO: 189151 - DNA, 450 bp, Arabidopsis thaliana
cctattatatacttaaggactcgcgtcatctcgacatgcacaactaatgaccaaagcaaatccttgcctgccaacataaactcttataacacaaaaacacactcgtcttctcgtgaccttacccaagaagatctataacatgtcccccgcccccgcatcaacatttccgcatattatggccatctgctctgctctgaacccatggggactccctggatgcttcgagtcccagaccctctaaagtctggatcatacactcacccacgcatgacctctactttcccacctccacatctttttgcaacaagtatcccctgcacgagctgcccctgcccaatgaggcgctctctcacccaacagttggccctcacggcggcaccctttcgaatgcccaaccctatctgtgggagcctcttcgggaaatctcaaactcaccccacttttggacag

SEQ ID NO: 189152 - DNA, 736 bp, Arabidopsis thaliana
tcaatggaagaagcgagtagcccgccatacgtcaaacccggaatacctttaagacgggacggccccaacgcagatttttgtatttcaaggggagctcatctctaccgataccaaggggggcgatcgccttaatatacccggggggaaaccaaaatgcgccattttcgacaaccaacgcaaagggggacaagaaggggtaaaaaaaccgaagccgtcagaagagcccattatagaccagagggacaatcttggaacaaccttcaaaaggaccgaaaactactccgggaacatgtaccccctccctgcgcccctccagggaaccaaaagttgagggagaccccctcgaaagcccatacaacaatgaaaccgggccgaaaaatggcccaacaaaaaccacagccccctggggtgcccacaaaatgacccttttttttcaaaccataaattgattggcctttgtttagaaaactccaccctggagacccaattccaggccctcttcggggacgtggggaaaaaccccctattcgctgcgacagagggggcccccccggagagaatcacaccataggtggggttcccgggaaataccacggcaaaactattgggcgcccgctttcctgcggcgaaagaggggaccccgcacccccaactagaactccacggaatgggacagcgagaccccgacctaatcctgggcagggacgacacatgccgaccaaatgggtacgccccg

SEQ ID NO: 189153 - DNA, 378 bp, Arabidopsis thaliana
gaaccaaccaaggcacaaccgacagggggaccgaaaccggaaaacagggtaccaaaacaggggaacaaaagccaagccacaagacaggcaacggcccaagggacaccgggcaagacccggacgcacaagaagagggacacaaaccaaaaaggacgccccaagacaaaaccaacccagcccaggcagggccgcgaacagggacgaaaacgcaagaaagccaaacacctccaaaacccaggaaaggaagccaaaaaaaacgggagcacggaaaaccaaaagagacgaaggaaggaacagagaggcgaggacacggcacggcgaaggaaagacggacaaacaggaagcacgcgaaaagggagacaagggagaaagccaggc

SEQ ID NO: 189154 - DNA, 421 bp, Arabidopsis thaliana
gccattgtctggacccaaacagagggcctcgagtatatacccacttttaattaagaagccgcgatctacagcggacgcaattaacagacaacgcgattctcgctaatgagttaaagcgctttgggacccaggtactcaatgtccaagtgtgtccatagcccgccccaggtcaacgatgcaaacgaagaggtaacccaatactccgatatttttctccgcttgattcacaacttccgtaaccacagcacaagtgggttcagtgtcaatttacagtcgcaatacctagtgcgtgagatactagataagagagtgtgcaggtcaccatctacgggctgcaagtatacgacttagaaatatccgtcgagcatggctattgagaaggaagagcaaataagcccataacttgacagccactggtgta

SEQ ID NO: 189155 - DNA, 628 bp, Arabidopsis thaliana
tttccattggtatgtggatgcggaataggtgaagtgatggattaaacagtggttgttgagattttattttaaaaggatagagttatatttgatttgttttagatttacatgtaaatttaaattattttattaagttattataatagttagtttattttagtgatgtttaaaaaatattttggaaaggtgtttgtaattttttttatttttgtgtatttgtttttgtttttgtatttaaagttttgtttatctgtaagtatatatattatttaaatattttttttggtgtagtaataatagtaatttgtatcattagtattattcttaattttgatgaaatgtttataagtgaggaagagaatattggatattagtattatcgtataatagtatttaattcaatacattgttattattttgatatgtaagtttgagtatataaaggcgtataaggctttattataagttttgatgtaggtttatatttttttattgttatttactagttttaataaagattttggtttatgtttttggtaattttatgattatgtttgtttttatgatattttaaatttattatttatttttataagagttattttaatatatattttttaaatattta

SEQ ID NO: 189156 - DNA, 189 bp, Arabidopsis thaliana
taacatagaagagtctatgacgtagcatgcccgcgtacgggatcttggaaactatagagcggccgccctcaactaccttttttttttttcaacgccaagaaaggagagttacattacaccttcataagtggggtgggccaccctcaccttattccacattctgtaaacacaacaaaaacagttgttttt

SEQ ID NO: 189157 - DNA, 309 bp, Arabidopsis thaliana
tcgtctatcaagctgcccacgtctacgcctttttttaaaaagctttggctgacaaaagcgcaacaaatcatagaccttcatttgctcgtaggatttctgactaaccattggtccacatagaaaataggagcgcatggggccgtttctttgacatgtactaagaaacagttgccggtcgacccttgacgcgcgttgacgagacgttgggacttctggagcttactgcccagcacgccctggataggttcgcccaatgcggagtaatcagcgaagcagggtaaaccgggtcctagggaacttacccccttg

SEQ ID NO: 189158 - DNA, 546 bp, Arabidopsis thaliana
caaaaccaactggagtaggggcgggggacgggagtgcaagaggacacgatggaaaagaaagaatttacttttttgagaagaagatgggtaaaagggaaaatgaggggaaatagggaagataaatgagaaagaaaaggaagaagtaagagaagaagggaaaagtagggggaggaaaagagaagaaggagataagaggggttgttgaaagaggatgaaaaccgatagaggggtaaatttggtaaatagtgaattgaagttatataattgggagggtgagagacacgaaataggtaaagtatggaagggccaaggaggcaaacttgatttagaatggatggggaggaaggggaattaagcggaacgggacaaagatggttatgaagaatgagatgggcgagatcggaaatatagatagtccgccgagggtagataagaaggtaaagaatgaagatcttaagtgtggtattgtgctaataagttgtggtggttataaacagaggaagaaggggcaaaaggtaggagaaagagaagagagaaatagagtgg

SEQ ID NO: 189159 - DNA, 1004 bp, Arabidopsis thaliana
ctcggcacgcacgaggcccgcagtctaggaaacctctcaaaccggagcgccctccgccctcctagaacctttgagctttaacaacacaaaaacccactttacatacgactgggcacgccgacagcaacaatccgagccacccaaaaacgctcgtcaaaataaatccgaacgcccacagcgcacctcattgggaagaaaccatgccatgcgggatggaaagcgaaccaatggtgttaatgacccaaggacccccgaccccgacaggttcgcacgcaccctaggtcatatggcacgcgagaaatgcagcgtaccatttcaaacgacgagcggccctaaacgccacaacttcgcccgggaaattccgcctcaagaattaccacacaggtaactgggaacacaggctcgcggaaaagggtccccccacgaaccctttccgaagccgccaggtatgccaggaaccccggtggacagtccgataaggcgggaccacaagcatgggaagaaattaacacccagggctgcacgacgacccgatcttgctaaaaagtaaacggacgcctttcgaaccgagaaccagccccaggggggaaccgagcaaaagaacacctccacgggctgctgacacacatacaacaaagctcttcgcactcacaacccttccaggggaaatgggaacgtatacacaccccacaaaggcttgctccgcactcttcgggccaggaagtaggggggaaccctccgagacactcgagagagcgttaccagtccttaggaaaccacattaaacgtgcaagaaacaacccgacacacaagacatcacccgcaaaccaacaaagcggaagcctagtcaaccgatccgcaagggcaggaggcaaaggaaccgagacaacgtgacccaatccacacgaatcaacacggtccaaggcatcaggaaaaatacacccacgaatctgctcacaaaagcgacgatgataattaagggggacactcacagcccacatcac

SEQ ID NO: 189160 - DNA, 271 bp, Arabidopsis thaliana
acacatgagagggagagaaaggggtattttcaaggtcaggagaaggcaacacacaagaaacgaggagaatgtcaaggaacaactaggaggatcgggacgaccaaggctacggacccagaacgacgcaacctagcccggaccagacgtcgaagcaaaccggaccagcaaagacaacatgggcaaagcagacgccctaaacgtaggaatccccaaagggacacaagtcatggaagcatacactgtagaaaaaacgggacatgaaaagaaacac

SEQ ID NO: 189161 - DNA, 125 bp, Arabidopsis thaliana
cgttggtaaaatgctcacattttttatatgtatatatatatatcgcgggtgtgagtgcgactctgatgcatcacacaggatcagcatatctgctttgtctgcttctctggctctatgcacccatt

SEQ ID NO: 189162 - DNA, 370 bp, Arabidopsis thaliana
gtaaacgaattatttattgttttgatgatgattttttaaatgactagatgatctataaccgataagcatatgaattcctaaaacttacatcttgtaggaatccctaaagagtatagtaactatattatatacaacacaaaaacctttttggtacttaagatacaaacatatactatgagctacaatgaaaaataatatatactaatacagaactaatttaagggatcgtagtggtggataaaagcgtcgatctggcacaacatctccagagttgtggtgtgagcaagctgagactttccgagaatatgaaacgcgtgaccaacgcctttgtgcaacacgcgcttgatcacgtcctcattaccatcgcaca

SEQ ID NO: 189163 - DNA, 298 bp, Arabidopsis thaliana
aaaagaaaaaacgggggggcccccatttgtttacaaaattcactttgggtagggggttaaaggattttattccccaatgaaaaaataaataaataaaggccccctacaaaaggggaagtttattttttttaacccctccattttttaaaacaaaaccctttccaaaaaccaaactttatttcccgattccaaaattttttacccaacaccgggggacgggacccctactttggtaaaatttttttaaaaacactttccgggggcccccaaacccccatttttttaaatttgaacccca

SEQ ID NO: 189164 - DNA, 372 bp, Arabidopsis thaliana
gaaagattcccaaaacaccaaacgtcagattacaacatatttacatgaaacctctatgtaatattctcctgacgcttacttaatcaaacacttgcctcggttttgttatgggctttatggctgtccaaccacataatttgggtttctcggaataaagttagccggagccaacttttccccatttttttttttcgtcaaccccatccttgaactcttagcaacttataatggtattatgattattggggatggttttgtttacctatcaatattgtaagaagaggacctcttcaaagcaggaacaagttccttcttactactctcattaatcaagctaccactaaaatactctttctcttccaattttaccct

SEQ ID NO: 189165 - DNA, 275 bp, Arabidopsis thaliana
  unsure (1)..(275): unsure at all n locations
acaagtcgggaaccgtctaaatcttttatnatagttcacgggttaccgtaatacttttcgtgaattttttgtggtttataccacataaacacagtgtctgttctttcatagagaaatataccctttttngtccgaggcagagaaggtaatttatatatagaacagagaatgaaccaaataacaaatagaacccacaaaagaagaatatattaagctacgaaatccccacgagaggaattgggatacggcggtgtatattacctccgtgcgaccat

SEQ ID NO: 189166 - DNA, 278 bp, Arabidopsis thaliana
gggaaaaacccaaggtttttacccaattggtttccttggaaaattttttggggggttttgggcccttttaccggggctttccaaaaagggaaatttttttttgggttttaattttaacccggttttcccggggaaaaagggaataacccggtttaaatgggaatgggtccccaaaacccttggtagctaagtgggttttgggggcctttggggtccctaagttttcccagtttttggttccccttttgggggcccataaaaggcataattccggggaa

SEQ ID NO: 189167 - DNA, 272 bp, Arabidopsis thaliana
ccccacccgccccctttttttttcaaacaaaaaacccctttttttttttccctttttcggggggcattttaaacaacaaacccaaaacccgggttcatttctttttgggtttttaaaaaaaaagggtttgcaaagggaaaatagggcatcccaacctagggccctaaacggttttttagaaaattggaaaaaggtccccccccctcgggaagggaaaaaagcttcccagggtgggaacccccccgggggtgggtcaaccaaaagccccgggg

SEQ ID NO: 189168 - DNA, 305 bp, Arabidopsis thaliana
aaaaagggatgtgaggcggattaatataaaacttttataacctattaagataggcaacctttaaattaaattaaagatttcatctgaaaccattggaactaccgggctcttcatcggaagaagaaaagaactccggcgggactccccttgaagcatgatccgaagaaggggagctcggcaaaagggtcaaaactggtggtctttcttttctcatgaaaacaaagaagaatgggtttggtttatcaaccggttgggccggtggaattatctcaatttgggcaccccaaatggtattattattatgg

SEQ ID NO: 189169 - DNA, 569 bp, Arabidopsis thaliana
cgggttcggagccccgcggcgcacagctgatggctttcctctgcgttttttttcgccaccttgtccggcatgcggtccgacaattaaaccaaccccccatctaccattgttcaattctttctcgacggcatagggggcttgttatctcgctctcctcttctgcctttttctatctacgtgctttccattctcacacttgttgcatctccgtcgacccgctgtcggatcggttttcgcttgatgggctcatcggatttggtgccctaggtccttgtgcgacgaactggaaaaaacgatggcaccaagattactagggttagaaaggtggccgatatagaacacgacgatgaaacatatgtacggaaggttggatcatgttgggtatggtcatggccggggctaaccagatagatattgggatgggctttaaggacttctcttggtttgcggagggagccaaaaccctataattccttacttcaggcacccgagaagtctttgagaaagggccctgcttattgtagatggaaactggcccaatactttggcagggaaaagaatttgttgga

SEQ ID NO: 189170 - DNA, 1004 bp, Arabidopsis thaliana
aggggaaagaagggaccaaacaacccgaaaccggaaagagagggacccgggggccgaaagcgcgcccgagatttttaagttttgacacaagggcaaacacccgagaagaacccgggggggaaagggggggccaaccagagggaaagaaaaaacggaacccagccaacaaaagccgaagcggggagaaagacagagggggatccgcggaaagcaagcaagcaggaagggcagaaagcaggaacaacaccaaggaacggagggaaaacacaaaaaaaagggcaagcgacgaacaaggcgaccgggcggaagggaaaggacaccgaaggaggggcaaggaacgaaggagggcaaaccagcaaaaaaggcgaaaccacgggaaggaaggcagcaaaccggggcacgaaaacgaaaccaagaaagcggggcggacggaaacgcaaacgacaagaaagggaaagggcgcgaacaagggcgaacaagcaaccccagggggacgaaacgaccaagggaagaagacggcagaggccgaaaaagcggcacgcgaacgggggaaggccaaaacctcgcacaaaaaacaggaaccggagaaccaacgggaaagaaagcgagccagcggcacggggagaagaccaagcgaaaaaaagaaaaagagggaacccagagggaggcccagcaagggccccgacgaaaaaccaaaaagggaaagggaaaagggaaaaaagaggaacaaaaaaagggaaaaaaggctaagaaccccgcgagggggggaaaacagaacggggaaaggaaagggaacaaaaggggcgggcccaacaccacaccgaaggaagaaaagaggggggaggcaaaccacgagaaaaccacccggaagggaaagggaaccaaaagagcgagaggcccacggagcaaagaaaccaacaccaggcgaaaaggggggccaaaaggggccgagaagggggaaaggaaaacggacgaaagagcccccgagaaccacaacccggaac

SEQ ID NO: 189171 - DNA, 568 bp, Arabidopsis thaliana
  unsure (1)..(568): unsure at all n locations
gcgaatttttaactatttacaatggggaaggccgcacctcggggttatatttcttggtttaaccaccattaatcacaaatcttaatcaaagaataatggttcaacaatgttcaacctctcgttgctcacatcagacatgtgggctattttgatccgcactnttggttaccacgaaaaggttgattggctctacttcttggcatttgctactacagctactggactgatcatatactcaatgaaggagaaagatgaggaggaacaaagaagtggagaagtggtaagtgagaggaggaagctgttcgatgaggaggatggtgactcgctccacagcaaccttatagatgcttccacctgaaacctaatcaaatcaaagcctctggtttttacttgtctataacattgactgtgacttgtgggatatatgattattatttttcacacttttgggttggaggagtccacaagtttgtacatttctctcccaaactttggtaactgtaaagaaagaaaaatgtatttgatacaaaagatagtttcaaatggtggtagtgaaggtaaaaaaaaa

SEQ ID NO: 189172 - DNA, 701 bp, Arabidopsis thaliana
gagaaaaaccgggaacagaaccacgcgggccgaccgagagagagacaaaccaagggccaaagaaggtttaaaaataggcaacaagacacaaaggcggggaaagcacacgaggcgccaacccaaacaaacaaaaagaggcagaacaagacaaaggacgggggccccagccaagagccccccagaggccacgaacgaggaaggcaaagacagcagcgcaagagccccagcagagacccaacaaacgcagaaacagaacacaaaaaaaaccgcaacccggaagaggcacccccaagggacggccaccgaacaaagggacccaaagaccaccaagaaaaaagaaccgcacaccgacccgggaacaccggcggcaaaaaaaaagaaaaagagcgccgacaaacccccaccgagaggacaaacacaaaaaaaccgacccccaaagcaacgggggaaaaccgaaaacaaccccccggagaatgagtacggacagacccagaaacacaccaacacaaagagccaaaaggacaagaaccgcaagccgaacccgaaacaaaaccaaggggcggagggacaacaaaagggagaggccccaagggaaccgaccacgggggagaaaagacggagccccgcacaacccggaaaaaaccgacccaccacaggagggggaaacagcaagacacagaaaccccccacgggggaaggga

SEQ ID NO: 189173 - DNA, 980 bp, Arabidopsis thaliana
  unsure (1)..(980): unsure at all n locations
taaaaaaggaaatggaggggggtggagaagagagggggtatagatgggaagatggtattgatagaagggaagagaaganttttttttttttaaaaaaagggaaggggagaagaataaagatggtgggtaaaagggggaaggagaaaaaggggggggagatagggagggggggggaataagggaaaagggagagggataagggagtgagtaggagatgagaggagggagtagaattgtgagaaaggaaggaagggaagagtagaaagaaggtgatgggtagtaggggagagggaggaggagttagggtgagaagaaaagaaatttgtaaaaagggggggaggtggagaggaagagagaaatggagagtaaatgtgaagagggaaagattatgagaaggatggggagagaaaaaagaaatgtgggaagagaaagaagaggggtttagtgggaaatggataagggggaagtttaagagaaatgttggaataagggaaagggagggtggaggtttgtaggaagggaagatgtataaattgaagaaagggatgagaaatatagaagtgtgggaaaatgagaggggagggagaatgatgaaagatgagaggaaggggaagagggtgttagagagaagtgtgatgaaagatggtaggggaaaaaaaagaattattaagaantgagggggagagataaatagtgattgttgatgaagagaaaggggggagaaagtaggggtggaaggggagtgaagagatatataaagaagagagagantagaatgggagaataggtggagagggtgaggtaagtttagaatggtattatgagtggaaggtggagaaaaaagtaatgaaaagagggatggggggatgatgaaaaagtgggataatttatgggggaaagaagagttagattggagagatgaaaaggggagaaatagtgtagggggggagaaaggagagatgaaagggaggggggtgaac

SEQ ID NO: 189174 - DNA, 214 bp, Arabidopsis thaliana
tgaccgatgtcaaaaagcttagtagaatttgctgacagactatttccaacacgtctattagcactaacgggtatgaatagataaaaacttgataatctaagggactagctttgtccgacggggtttgaaatatgacacggtaaagatttctagctttttcaagtacaggagagccgggtttatttacgtgcatatgagacgtctcaagtcagaa

SEQ ID NO: 189175 - DNA, 1143 bp, Arabidopsis thaliana
ggagggaagagagaaggagaaaccaagagggggaccaaaaacgaaagggggagacgaccggcaagacgggagacatttttatttattacaacaaagaagaagcaacacaagggaccacgaggaaggaggaggggaagagaacgagacgacaacaggaaaagaaaggacacaagccaaaaaacgaaaaggggacgcgaagagcgaaaaaagaagacgagaggaggagcaaagaaacacggcgagacatcgagacgaaaaggcgaagacaaacaaaggaagaaccgaaagaaaacaagggaaggagaaaaacaggacgtagaccacccgaagacgagagaaaacgaagcgaacccgagaaagacggaggagagaagaccacggagacgaccagaaaagggacaagaaacaagaacaagaagggacgcgacgagaagacagagcagaggagagcaagggacaaacaagacgaaaaaagaggagaagtgcgagaggcagaggaagcgaacagaaaggaggaaggcggggaaaagaggagcacaagaaaagaggaagagagggaagccaggaagagccgagcgaccagacaaaagcacagagaagaaaagaacgaaacacggaaagcggagagaagcggagcagaaacagaaaacagaaaaaaagcggagagcccacgacgagaaagcgacaaaaaaaggagaggaaggcggcgaggaaaagaaacaagcagggaagaagacacagaaaaaagagaaaacagaggcaaggaccacgaaacagggaaaaacgacagggggccgagaggaaatgccaacccgaaaccaaaagggagaagacggcacgggtacaaagagcaaagggcggccaaacagggaaagagggcgaaccatcgaaacgggagagcaccgacacgggcacgaacaaactgagaacgaaagagacaagaagaacaggcaaggggcaaggagaagagaacgcaagggagaaaatagaatgtagagaaagaaacaaagaggacccgcgaggggagaggacggaggaaaagaagaaacacacgggaaggggaagacggaaaagacaacaacaggagagaggggcacagaaaagagaaagcccaaaggaaggggagcagaaacaaggacaaaa

SEQ ID NO: 189176 - DNA, 631 bp, Arabidopsis thaliana
  unsure (1)..(631): unsure at all n locations
cgcgtccccgcgtatacgtggttgatagaaaggaccctcangagcaaatttgccacgggcgctagcgggcttttttgttgatactcttcagaanacacaccgcacgagcgcccgacgactgagatgtgtgtagcgtattaagcagttgtctaacaagggcactcgccacatggaggtatctcgagccggctgtgatcaatttataagcatgaatacttctgtgctaataggaacacgatccagtctcatgtcagtcatttagaggggcgcataggctagagttgacaatattcgctgggaagcgcgtgatgatgcaatttggatctgcaccggttaatatctattcttgggacaaccactgaatgtgaattatgaaaatgaatttttttgttcccacagagaaccgttgcttattgcgatgcaatgagcataagagggacggtgaagattgtgacgaatgctctggtatgctgaaaccgccccccctgccctcttgagaccttgtgtccaagttcagttacctaataatgctgatccacccgctggcaatgaaagggtttaggaggcacctaagtttttggatctggcttgctccccatgatctagaacagagacggcatccctgataata

SEQ ID NO: 189177 - DNA, 605 bp, Arabidopsis thaliana
cttttgcaattttcccgagaacaatctttgaatttatgagaatggaggtctggtctggtaggaatgcgggtcgggcctcgtaggaggacgggagcgttttttttttttttcccacggcccggccgtagacagactttaggtggggggaggtcggacacgtagtaaggagtcgaccactctttcactcatgctcacgagcgtgtgatttttctagggatgcgggatctctttgagttacttcgttaaagttctatacatgattgactttgatggagtaattatgtgtctgtctagaaaggggaaacttatcgtctgttagaaaagggcctatatcgagtgaattggtgttgacgacatcatatgatgagagtaattaataacaacgtatatcagagagtgctggagggcggtaccgagcgcctgttgtagaaatgtatgttgcgtagtagcaacatccatatgatgtacggaatatatgttcgatgcgttaatacagatacggagtagctggtacatagtcaaaggatatattcataagagtcagattgaagcaacgtgttccgtacggcaggatgaacactattgcaacttactcctaccgaagt

SEQ ID NO: 189178 - DNA, 742 bp, Arabidopsis thaliana
  unsure (1)..(742): unsure at all n locations
gaacacgaagcgaacgacgacaggacccctccctcccccagccgcggcccntttgtattgtacactcgtctggagaaccccccaccacagaaggcccgggacgacccacgcgnccgcgcggcgcgacgacacacgaaaagcgcaacgcgcgggattctttttgccggcgagcaggacgcgagcaatacaggcggggggagggaggggaaccacaaggacgacgacgcaaccacgcagaggacacacaacgacgacgaggaccaaacagggggaccagacgggggaacaccaaccaacacacaacggcgtccgaggggcaaacccccaaggcaggacaccacaagcgcgagccacggcggaaccaggaagcgcaacaccaaggaagcggcgacaagacgggcaggagaggacaccagcagaggccaacgaggaggggggagcagcgacccgccggagaaaggacacaacaccacctaccgggagagcacgcgcgccacagcggcgggaggagaacagaccacgaggaacgcgcggagggaaccgcgcagccacggagaaaccgacaccaccaccgagggatggacacacaaggggaaacaggagccaaaaagcgccaaggccttccggtagggcgcaacagcgaaaaggaacccggataaatggagaaagggtccaaagaccgcacacaaacggcgcgcgcgacggcacacaagggccgccggaaggaaaacgaccaggaagc

SEQ ID NO: 189179 - DNA, 672 bp, Arabidopsis thaliana
  unsure (1)..(672): unsure at all n locations
gtttttccacagacaggccaagggacagacgaccgccacatgttgtgtgaagggtgtagaactacgaaaccatggaatgaccgagctcaaatcgctcatcggcctagtctaccatataggctggcgaccggctgtaatttaacgaacgcctaggaggctccccctgtgctacccagccactgcgtgcactcggacgtaatcttccagccgctactgggatcataacaaaccttacctctaaccaacgcgatgacttgacacataacacctactcgcgggccttctctgatgacacaaatgggcatagccttctcctgtatactcacaaagagagctcgttaccaacgcataactaccactggtgataactgccccagtcgatcaacatttcccggaaaaccagggcccgcttagccactcaatgggaaggaccatcgttttcgcctaaagacctttccctccgggttgccccttcccaatggaggaacacgcggccacacctaatagcacacccccccgctaccccgtaaacgtagactcttcaaaagaaagacatgatgatcnaacacgtaagatgtcctccaaaatagcggaattatactccacacacccgcccgacaataaagtggccgcccataaataatggagacgcgcgagcacaacgtcggatta

SEQ ID NO: 189180 - DNA, 313 bp, Arabidopsis thaliana
aaggcaaaagcacgacccaggcccgacacccaccagacaccacaccccaggaaggccagcgcgaggccatttagaattataaggcagcgccccggacacacagacccacaaacggcagagggggaacgccccacggaaaaagaaccggccacaaagccgcacgacaaaggaacccgaagcaagaccacccgagcaccgcccgcgaaccgccacgacaggcagcaaccaagcacgacaacgggaaagcaagcgcaacaaaccgacgcaacgcggcacggccgaccagggggcacccaacaggtccacagaccac

SEQ ID NO: 189181 - DNA, 349 bp, Arabidopsis thaliana
tggactttgtaatattaatagctttttttaggaagagggatttgcttgatgtggtagtgtaaagggttataagtatgagaatataagtagggggtattaaaagtatggtgtcaagggtaagaaatagggggtatgagtgcgaagtatgtaataattagagtaataaaattagtataagattggattttaaatgtaatgaattagtttaaaattagattataatggtatgaagggtatgtactagtataagatgttgttaagaggttaagataattttataattgatgtatggagatatagttcggaaatttggaaatggtttaattggggaaaattaatagaaatgttg

SEQ ID NO: 189182 - DNA, 412 bp, Arabidopsis thaliana
cccgcaaaaggggaacggggacaacagcggagcccagaccccaacagggcaacccagcgggagcgagaggcgacccagaaccaaaaaagcgaggggcgaagacggcggaggaaaaagaggggaaccccaggaagaccacgcgccaagagccaaaaaggaacaggggacgaaggggccgagaaacccgcgagaggcggagaaccgggaggggcgaccagaccaagcgaaggcacggagggagaacagaacaaccgcgcgaacaccgaccgcccgacgacggaccccacaggaagacggagagacggaggaaagaaacggcataccacgccaacgcagcagagacgcaagccaaacacaagaacagcggacgcacaagaagaggaccgaaggcaaaagcacaccccagacgcga

SEQ ID NO: 189183 - DNA, 232 bp, Arabidopsis thaliana
cagaggcccgggcgcagggcaacggacgaggaaggccagcaccaagaaccagggaacccgcgcaacccacaagcgaacccggggggaaaacacaaaacggcgaggaccagaaacaaaacaccggcaagaaaccgaagggcgcagagcgccaaggaaggaaacaacggacaaccgaccgaccaagaaaaccaaacaagaacggaaaacagcacgggaaagccacaaaaggaca

SEQ ID NO: 189184 - DNA, 379 bp, Arabidopsis thaliana
aaaccaacccacgacaggagacgcccacaacaggaaggaagacagcaagaggaaaaccgaagacacgcgagacgggaaagacaggagaagcacaaagaggggaagcagcggagcaccaacgggccacggaaaacggacaaccggagaacaaggagacaagggccccaggaagagaaagaaacaaagagccgaagaaccaggcaaaaaggaggaaaggagagagcgaagaagagaaacagccgggaacagggaggcaaaggggcaaggaaagaagagaaaaggagcccaaaaagggaaggcgagcgaaaagcgacaaacaccggaaaccggacaaagaaccgaaaagaagaaccgaacgagaccaaaccagaggggaagc

SEQ ID NO: 189185 - DNA, 260 bp, Arabidopsis thaliana
ctgcgtcgtcgcgttaggtagttctgcgatgagaattcttcgtctctcgctagctttgggtgacaatgaaccctcgaagcacgatctctcttctaagtatgtacatcgtgctcgttacttatcgctgatgctctttgtctgcctctctctgatcgtgatattattgtacgcgcgtattatacgaacagtggccatgtaattattctgtcttggacatttgtgcgtgactattgctcgaatacatatcctttcttaggtgt

SEQ ID NO: 189186 - DNA, 122 bp, Arabidopsis thaliana
gattctaatatgttgattggtttctctttgttatacaccaaggcatcaattgcagaacgtgtttatttactgtgatgatccataagcaattcattgtaagaaaggcgtgtccttgatattta

SEQ ID NO: 189187 - DNA, 927 bp, Arabidopsis thaliana
ccaaatcccgggtcgaccaccccgctcggccgtcgacccccaagaaagaaccaaaattacacacacgcgactttttatttttttaactccacgatcgcgacacctacctcctattctctgcgcgaaccttcacaacgtgcagatcgctaaaaccccggagttacccaccacaagcctcgtgcagcacaaccagctttcgtcagagggcgaattagctaacaggccccctccgatcactcttcccaacgattgcacagacagagaggacaaaggcactcgcccacgaagaagacatccacgcgcggcgtaacgtggcggctacgctccagcgagaacagcgacacatgttcagcctccctagcagagccgtgtacgtacaaaactttcaaagcctgtcacccttttccttcgacccaaccaatgtccacaccgaccttggagtccgcgcacgtccaggggaaatgccttatactatccacagagcgagtccatacccaaatgattataagaaggagaacgcccccccaaatacaacttaatactacggactatacttataaccaccggctgaggactcctatccctgtaacacccacgcccgaataacaacaaaactccccaggaagaccaaaagacccaaaagcagatcgagtgtcgttcaaccggttgaaattgtgcgcctccaagtgcgttaccccttggaaaagaaaagcgcgcgctttatcacgctcccagtcgtcacggaaggcgaactcacaacccttcataaaacatgtgggacctctaagcccccagaactggccaacgaccactcaacccaaaatcatgacacaatatgcttgaaactcccacacgcagcgtcgccagataacagcacgcgggtctgacacaggtaactgaataatcaagcactcagcgcaaagttta

SEQ ID NO: 189188 - DNA, 1264 bp, Arabidopsis thaliana
cgtcgcatgcacccgtacctaagcaaggatcctatagagcggccgccctctcaaaattttttctttttttattatgaacaccaaccccactcgcaatcaacaaacaacaaagggggggggccacacccaaaagccacaccaccgggaaccccacccaccaccaaaagaacccccaatccatacaaaaaaaaaaacaccccccaaacaactttcaaactacaccaaaacaacctgaagaccacccaccctaacaaaccagcctaacacccacaacaattcaccaaaggaaaacacccccacaaaacccccccacctaaacaatcaaccccagttcccgggccgcaaaaacaagcacaagtgtggagcaccccaaacccacagaggacaacaccatcaaccgaacagaaacgatccccactccccgcaccgaatacccaccaaaaacttggagcttccaaccaaacaccaacctgaagagagcgccaaccacactaatcctagaaaagacactcgcctcacacaccctctccagaacctcaccgtacacaaaacacacacaaccccacacgcaccacgcaacatatctccatcatatcacacaacacacaacgagaaacggaggttgggacacacacacggcccccggaaaactactcatacgacacaacccacctcttcgcccacaacaacgacaccaacaaaccaggacaaactcacaccacaccggcgctccctgaaaacaggcacaagcaacttcgtacgccggctctacaaaacacatagcgccgaacaatatgaacaaaaacacacaacccccctaagcctaaccacaaccaatcccctaccccaaagaccccctgacaaggcaaaccccgtccggggaacattgcccccacaccgaaacaccgggaaaacccacaaagcggccaatacaaaccatgcccaccgcaaaaaaaaaaaaccacccgcacccccggcgaaagccaccaaaaaaacccaccccaaaaaaaaacaacaaacaaaccaaccccgacgagaagaaataaacccacagcccccaaaaaccccaccaaagcaaccaccacaaaacaccccatgcgaacacatcaaaatcccccaggccccaaacccacaaaactcccagaaacgaaccacccggcctacaccccaaaaacacaactaccaccaagccgcccgggggacaacacacccgcgaaaaaaacccaccacacaagagcgcataaaaccttgccaaaaaccacac

SEQ ID NO: 189189 - DNA, 1187 bp, Arabidopsis thaliana
cacacgaccctccctcttggctactcttccagcggccgcccccacctactattttttttcttttttttgacacacagctctctggtataacctatgacatggggttacatttaagagcccctgggggcgccccgatgtctatactttacatacacccgaaccacgaaagaaggagattttgctgcctggcagcctggaattccttggcttttgcttgcggaaccccaaacagacgatgactccctctctcttcaacccttctttcaacctttctaggcaaaactggcactcttgctatttttgtgcgcccatcccaaaatggtaacacgccaaacggtgaccacatcccttctctcctggggtccattcacattacataaaaagcgccttctcgtcaaaataaagtggggcgccccttttatcatatcagaagtcacacgcctcttaaataggttaaggatccctctatcttggtcgctaatactcacgaaggatcggaaccggatcccttatgatccatccattgcgacacaaggaaccggtggcttcttggtcatatattcatgagacacacagtcctaatccatattcctctaatacacttccggactacttgggcgacacgttcctacacagtttctggggggcactcttcttgcaattctggggagaggcccgcatctctccaggaatttttctctacactctttcctcaaggcagtttctcgagttaaaggctctctcttctcctcacgcacacccccacccagtttttacaagaatacccatctctcatgtttctctttcccatggcagggacaccccgggccccccacctgcagcacagggcagggaaacgtaactcacctttcccgtgttaaaaaaactcccctttcaaccccggtttagaaaaacccacagttcactttaattcgccgcgatctcccctctggaggtatccaatagcctctggccgtatagcaaaaccaacgtcaagtcccgccttgtggcacacattccatcttcggtctcaccacgtggccgggaaacaacaaatgttgatctaaacacccgcccctctcaaacaaaaatgttccttgtaaacaattctaccttggggaacctcctaaccctctggtatatcccttcttttcgtacccctcttacggaaacctgagggcgaaact

SEQ ID NO: 189190 - DNA, 527 bp, Arabidopsis thaliana
cccatagacacgtagaacccactgagaaaagacccccgagaggaccggcaaggcgccaggaaggccataataaaacaagccaaaaaagggggacaacaaccaagaagccgagacgacaacccaggacaaaagaaggccacgcggacagagagacaaaagagaagacaaaagggccgggaaaacagccccaagccaacgcggaggcaagagggggggcacaaaccaaaaaagggagcagagcgaccgaagggaacgacaagacgaaaaagacacaagacgaaagcaaaaacgggaaaacagaccaccgcagaaaacaacgaaacgaaaaaaggaaggcacggacggcgaacaaaggccggcggaacagaaggacggccaccgagacacgacaagaaaagaaccagagacagcaaagcacgaccacagggaacaaagaagcaaagggacagaaaggccaacaaaggagggcacgaaaacggaaagagcaaggggcaggcaggggggacgggacggccgaaaaccgccag

SEQ ID NO: 189191 - DNA, 1474 bp, Arabidopsis thaliana
  unsure (1)..(1474): unsure at all n locations
aaccccccccaaaaacctggatcatcgtaaagcggccgacccaaaaagtgacccacctttttttttttttcaaaaccatccccgacccccccactcaacttgtgtgtgtgggtttaatacaccaccaagtacaaacatttcaaatcacctaccttaccacacgaactcatacagctcaatatataataacttcaacttcaatatttcctatctccacttccatacatcatacatcttttcataacgattaccatcaactaactcaacacttatcacttcacattccatctcataacaacgcccatccaccacctactatacatagtgaacactgctacctcacataacacacctatctgctcagcgaactcctctatcattaacacatctcctatcgacaaaactgacacatttcatatctagtcaaagatgataaccatcctactgcaacacgtatctctaatatcctctgatctcagagcgctccaccactccgcgctacacatgatctcacttcatcccacactcacattatacacacacctatacacttacacacgatgccataatgaaccgcatcacacatcatcgcagtacgtcagcatatcacatacatcattaacacgttcacttctatctctccgctcatcaagcgacgaatgaccgtatctncagataactactctcccntcactccnacctatcatcccacatcacggtctccttactactaacaccatancgtcctcttatatgctcctcataacatgcaatcaactatacagtccatatctcatctacaccatagagacgcctccataatacaatatcaacttcatccgaatatagctctcaatgcttcatctctcatccatccgtctcgtaccctacaactgcctacacaatctagcctatatactctgtgagaaatccagtttaccacctcagattcactccgtcaatattatgatagctccacaaagccctctcaatacacacactccgatcatctttttcttactccacccaatcttctcaccacaatatccgtcctccttaacactcacaatacaccgtcccctctttactcccacaatctctcgaccctagtttactctcacatatcccccaattccatcactccctcccaactcgcacctctatatcctaaatacatagcacaaggaatgctcccctctcacactcataatactctatctcgaaactacattcatccttacaacagcaatctatcgtctcacaaacataccgccgcatgcgcgtatatatccatctaccctcacaccacacctatctactttttacctgatatcacaagaccccacctagtacgcgactaatcagtcaagtnatctcttcaacatatgcccgatcttacactcatatcacctatacatgtcactactcagatatcacagacggtagctaactacactgtctcatacacaccact

SEQ ID NO: 189192 - DNA, 1135 bp, Arabidopsis thaliana
  unsure (1)..(1135): unsure at all n locations
agacgtacatgcactcctcccttacctaagctcctatacaacagaccggcccgncccttttattttatttccttattttttttacaccaacccaatatcaatttaacaacaagggggtgggtcactattactgatataaatccttaaaaatccctcccactttaccattcactacatctcacctactacacaaacataaatattactaatctatgcactcacacttttctctcaaacaaaaaaactaaaaatttttcactcttttttccaatcataataaatgagaaaccccgcccatttttcaaattcccctaaacaagaacactcacagcaaccacttcacatttttcattctctcaccacaataaaaagtggcccccctttacattctccccaaaaaactgatattcctctaaaaaacaacatcttttttcttactgctaacacaactttcttctcaataacacacaccttttttttataaataatacctacttccccacaaaaaaaaaaaacatccccttacatatcacactcacccctttttgcgataatcacctttatactcccttacctgaagaactttatccacacttaccttttcttacaaacccccacttaatactccatgtctgacctttaaactactccacgtccaacctttataagaatataatattccaaactctgaccgttatagaccatataactcacatttcactatcccttcaaatactaccaaacaggcatttctcttccgtataatatccttacccaaatatccatctttctattctttaaatcaatataccaatcctatatcttctccactaaagatcaccgtataaccctaattatctccttcaaccactctgtctcattacgagtaatcaataaaataatccctttacacaatcatccacatcacttacctcttattttctcttctccccaaaaatctttcactttcccggccccccccctctttcaatggggaaaaaaacccccccctctcatgttttctatagtcaaaaattattggactaacaacccaatatacacacctcccctacctgtggtttaaaaaataaacacccctattctttccctcctccagactaaataaaaaaaaaac

SEQ ID NO: 189193 - DNA, 1260 bp, Arabidopsis thaliana
  unsure (1)..(1260): unsure at all n locations
cacgcctacctccgctaggatcctctagtagtggacggcctttcctttttttttttcgatttttttttacaccaaacgggaaagctatgtactgggggtgtacatacgtcacatcacgtacatatattcccctatcttgaaactagatggtaactattaaacaaaataggttttgattataaaaaaagacatagagtagacggatactgtttcagacggaatacattgtacaacgcaaaacccttttggcttcttccgctacaactataagcgccttaatttgtgtcttacatatggcggccttttaagcaccatacaatatgggactaggaagagaaaaaccgaatctagaatgagcctttctattgatataggggtagttctaacacaccgccttttcctgttagggctcttttgtagaaagataactctattctcccagaaatttatcgccacacacagattttttgtagcaaaacaaaagaggaattggtacaccttcttattgcgtaatactaaattccaattaacgaacaaaactagatctattgtggatgagaatggtcttcataactacgatttctctctgttgtgctttactttgtgggaacgccaactcgcgagaagacgtgtacaacaaaccaatatttcatctaggggcacatccgcactcataatagtcgttcnaagcaataaaattcgcgcccttctctcttctatgagcgcggaaacaatcacacttatcaaaccnatggttaaccacaagttgaacacaaaccattcttgttagggaacaaataaaataccctctctcttagggcgagcattatattttgtataacagtccatattttggcgcacttctttttggggcatgccttccctagtatattacgcaaataatattattataaccccttcttaacctgttggggtattacacagtggaaatccgcgcacccagaacaacaatatccctttcatagtttgcccaaaccaaaacacaattcttcttctcattaaacactttcgaaactcctgggcgtcttgtgggacaggtattagaccggatacaatatttagttcaaacctcaaatatcgtgcgttttttttcttaccccacatcataggttataaaaaatattctctcttatacaaacaaggtttgtgaatccccgaccttttaaccaaaaccctttttaaagagttacccgggatcgctctaattatcctcaccggataatcttcgtcttggaatat

SEQ ID NO: 189194 - DNA, 606 bp, Arabidopsis thaliana
tagttgcagcacgcatccgttagcatgctatcaatgaacggcctgcatttatttacatctttttttttgggaaattctattaagacagaaaggggtaaaagaattgaaaaaaagataaaaaaggaaaaaggttaaaaagaagaaaacaaaatgcgaaaatagactaaaggactttaaaaaaagttaaagaggatattttaaaaaataaatgaggaaacgagggaaaaaatgatatatgaaactaaaaggaggctcaatcaaaaggaaaaaaggatttgaatgaaaaattggataagggtgcccaatatattattaaaaaaaaaaaggttaaacaaacactttaatgagccggaaaaaaggcaaaattaagacaaggtgggaaattacttgggaagctataaaaattggcgctagaaaaactttaaaataaagggaaatgaaaaagaaaggtgagagtaaaaatattagagggaaaaaattaatagactgtagactcaaagaacaaaatggggtgggaaaaaaatatttgaaaattattagtactaggaggaaaaaaatgttagaaaaaaaagatatcacaggataacaaaatttttaaagattgga

SEQ ID NO: 189195 - DNA, 1052 bp, Arabidopsis thaliana
  unsure (1)..(1052): unsure at all n locations
tttacactatagnaacagctatgtacgttcgcatgacacgacgttacgaaagacttggtaacactataggaagcggccgaccctttaattttgttttgaattttttatttatagaagaaaaaaaaaaataacgctgacgcatgaagaaggacacccaaacaatggcaaggaaacaccaaaaaaattggcgaaaaacagcaaagcttgggtcaaacaaagcacaaaaaaaaggtacacaaagggaaaagaaaataaaaaacggacaaaaaaaagaaaggaaatcccttggtggaaaccaaaaaccaataaaaaacgggaaaaaaaacacctgaaaaaaaacaaaaagaaggaccttcggaattgtaaaagagataccaaaaagaaggtcccagaaaaacaaatttttaggctcaggaccaagaaaataaatcataatttgaaaaaaaatggaaggcatcattgaaaggggggacttccctgaaactggacccaaaaaagcccctaaaatatgccacccagccttgtaaaacacaaaaaagggatgggaaaaaaggggccaaaaaaagggggggccaccccgacaaaaatggaaaacgaaaccccaaaaagaaatcccaaaaagaaaggaatcccaaaaaggccctttttagaatttgctcaggaataaaaaaaacagggaaagtctacaaaaaaaaacttcctaaaaaccgaagaaaaaaaaaaaccgggaggcccaagataaatatgagaaaattggtgggtttctaaaggaaaaaagggaaaaaaccatttggagagaaaaacaaaggggaacaaattggaaaaagaaaaaaaccatgggaaagggcgaaaaagggtaccgggagaaatataggggctctagagggaaagaaaaaacggaagaaaaaaagggttataaccaccgaaagaaacaagaaaaaagccttaataaaaaaaggaggaaaacaaaaggccgaaaagccccaaaaaataataaattccgacccgaaaaaacaaaggagagtgtaccccacccaaccggataaagggag

SEQ ID NO: 189196 - DNA, 1143 bp, Arabidopsis thaliana
  unsure (1)..(1143): unsure at all n locations
taaacaccagatttgttgaccatctcccctggaccttaaagggcgccttttattaatctctactttttttttcctcggcagaacctattttttgattgggggggatccacttaagctatgcgtcagggggtatcaccccaacaatcaccactccatccaaccattttccaatgtatattttttcaatcacttccttgtcgcgtacgacaattaagcgtcatcctcacaatattcattgggcatcatctcccctctgtcttttttagcaattacatacaccgccgttcacccaaaaaaactcccatttctcttgtctggacgtcgcaattctttatcttctccgttacccatcaaaagatacgcgcacggtctctctccttctttctagcccaacctgcaactccctcctttgtgagtatgagacattttaatcaatacaacacccatgggaggtattttttcctttcatgggctatgtacatacaaggtcttccattgattatgtagcaccatgtatataatctttcaaacaacctgtaatgtcggggacccatgtgctctctccgcgttgcatcctttttacataaagtccatgggggcctgattaataacctccccaggtagaatcacaccttgaaaccacacttgaaccctcaatattgtcgcgtggtttccccatctaaattgatcctctaaacctaaagtgatttccgcaatatattctttaaacatcccccaacatacttctcgatgagaagaacaagggactccctcccaaacttccatctccctcagagagggcaaaaccctgtttaacctcacctntggggtcttagatcacaccagagaccctcgatacctaagattgtatagatataactaatctttcatatccttatcgagaaagaacctcccacactgcatcatctatatgcactctacttattcgcactaataaacaagctgtgccatacaccttcaacaatccgctgtactacagacatcccttttattctaggcggacaccccatcttaataacatcatatttaaagcactactgactctcccacatagcggctactacgatagatctctctgaccatataccacactccttagggaatcttaacacaccgcctcgg

SEQ ID NO: 189197 - DNA, 1212 bp, Arabidopsis thaliana
ccccgcggcagggggcaaaacagacaggacgcgcacccccaaccacgaaacgaagacacaaccattaatataattttagacaggagacgaggatacaccaaaagacacaccccaaaacgggggggggggcgcccaaaaccaaaaaacagagagcggcccaccacagccaccaaacgcgaagagacaaaaagcgcaagaaagacgcaagaaacaagcggcgacaaccagaaacaccaacaacccccaagacgcggaacacccgaagaggtagaacgaaaccacactgacagagaaaacgaaaaaagaggggaagacgggaaaaaaaccccaaagccgaacgtaaggggagagcacgcaaaaacggacccgacaccgccacaagaggcaaaaacgggggcgagcaccagcgcaacacaaggagggggccagagcaccaacacacacaaccgaagaagctcaaccgaaaagagaacacaacccgaaacacggaaagagaccaaccgaggaagggagagcgacccagcgcaaacaacgcctgtagagaaaggacagagacgggacgaaacacgaccaacgagaaacgccacgagcgcagctgaaaccacaccaccgcgagagccacgcacagaagagaacacgccagacgcgcgataagagccacgacgagcgaaacgcacacagaaacgaagagcaacacaaaccagacacacgagaacaagacacgcacaacagacaaagcacatgacaagcgcagacaaaaccagaccagaagcgagagcgagtgtgccgaccctacgcgagacacgagtagccgcgacaacatcgcacacacacaactccagcgagcgcaagaaacacgggccacgaccgagagagaaaggagtgaaacaagagaaacgaggccacaggaacgatggcacgcaccgcaacggggccagactaggagaccaacacagaacagccagaccgagcagagcggccacagcacggaaaaaaagcaagacaccacgaaacgacagagagcggggacgagccagcccaaacaccacagcacaccaagagaagcccaacgaaacgagagagagctcagcgccgcacccgaacagcataaccgacaaactacagcacaccacacgagagagcgagtccacatgagacacagcaacatgcgagcaagcacggaggcacagcaaacacccagaagccaaaacc

SEQ ID NO: 189198 - DNA, 907 bp, Arabidopsis thaliana
  unsure (1)..(907): unsure at all n locations
agaaagctcgacgtccatgcacgcgacctaagctggaatcctctaaaccggccgcccttnccttttttttttttttttttttttttaagggaaagcaaaaaggtttgatatagaaggttaacgccaaacaagctttatattataccaacaatgggaaaaccagcaaaaacattggaaaaaaagggtaaaggagaataaaaaccttttcaagggggaaaaaagtaacacttttttgctagaagatatcacgaaaggtgatgctcttcacctgggttagaatatttggtttcaaatatcctttaaagaagaccaacctacctttgctgccatacctttggccgctttttgaaaggaagaatcacgcctgtgcaggagggtaaaccaattcttgaggaggctttcttccatggtggctcttcatgaagccttgtctcctttggattttttgggatccaataggctttcttgatggccttgaattcctttccttaaacttaaaactttttaacccccaaacttcacccaaagggtaccttattcttttcctcgaatcaagaaataaatccatactcttcaaataccgggcttttttttcctctggtcaatgcagatttccaaacccggataccaacctccccaaaggcaaattaggaccgttcaagatattccgcgggtttggccaagcttcggtggttccggggttggcaaagaaacttcatggaagggaaaaataaacccccggtggagcccatggaaataaattcttaattggtcccaaaaacccatttttccaaaaaaaacttttgggctttaaaccccaaaaaatccagaataaatctttggggttccccagaattctggggccaaagataaaaacacctaactagccttttcaccaataccctaa

SEQ ID NO: 189199 - DNA, 466 bp, Arabidopsis thaliana
ttcgttagcctggattcttttaaacgggcggcctttttttttttttttttttaaaaggcgaaggtaaccacggtgacctaaacttaagagttggagggaaaaaccatattgggttcaaaattaacaattgcctaatttttgccttaagaaaagccccccccagcggggccaacctttaaggtcccttttgcctctttacgtgggtgaggacttttctttggcaaggaaccctgcaccattaaacgctaatatgagtacaacggtcccaacttaagcccaaacgaaccccgaaacttaagctttaaagattgtacaaaacttttggcaaccatggttggttaatcggctcttagcgcctcaaatctctgaacgatcctcaccattggtggatccaaccagatcaagcctaataaggtttactttgctacgtttgcaacaaatttttccttataaagaacacactaag

SEQ ID NO: 189200 - DNA, 182 bp, Arabidopsis thaliana
cgcgtacgtaagcttggatcctctagagcggttcgcctttgttttatatcttttttataaaaaagagccaccacaaagaggaggagacgcttacaccaccatcagggaggagcgcctccaggcgaaattgtgctaccgattctatagaagaaacaccacaccgataaatgccacacaaagcc

SEQ ID NO: 189201 - DNA, 479 bp, Arabidopsis thaliana
gcacgcgtacgtaagcttggatcctctagagcttccgcccttttttttttcctttttttaaaaaaaggaacaacctcgatgatggtggtcctcaccacaagtaagaaaggctctgcggacaacattctctaatatgtatgccagaaacctaaccgtagatcccagaaaagcttgggctataaagaggatcctgtggattgtggggtgtgaacaaccctccagcatttcttatgtaaacatactcccctgaaaaccacgtaccccgaaagacctggacactaagcaaaattcgccaaagccacatgggcagccgagaatattacttccttggctgccctaaagaccgaacaagtttccagaccaaccacatcaatgcgtccaaaattcctacttattcagttcttgcagaaaccctacttttattttctgggatagaatagacccaacatattccaacgctattacttccaggcccacgt

SEQ ID NO: 189202 - DNA, 503 bp, Arabidopsis thaliana
gccgctggcccccttccgtagcctggaatcctttaaagcggccgcccttttttttttttttttttttttttttttttttttttttttttcggggaccggattctttttttttataaaaaaataccatttttttttcacttttaaggcggggccccagtggaccctggttccaaaccttctcctaaaaatatgtaaaaaggatccttaatccaaatcctcacatttaaaaaagacgggctctatataacttaaagctctttcagcctttcggtttggaggggacacggatccggtggcccttccgaaatcgccttctttgagagggaataaacccacccatccctccattaaaattctttaacagcagttggaaaatgaaaaacagctcgtgaataagcacatagtctttccaccatgttctcttcaaaggttagtcctttttccgcggcagcagctgctgcaagttcttggatgagtctcgacactacatctctgaattcttt

SEQ ID NO: 189203 - DNA, 365 bp, Arabidopsis thaliana
acgtcgcatgcacgcgtacgtaagcttgggatctttagaggcggccggcctttttttttttttttttttttaagcggaaggaatctcttgtgtggtaacctttagagaccgaaggggagaacatactggctccatggttaacaagtgcccaatggtttcttaaacaaaaggcccaacaagggtgggagaaactcaagtaccccttttttccttttgctgggaaaaatctataatttgcaaaggtagccttcacctattacccccaggtcgtgcgaaaccgacccaaattaagattatccgaaccctcaaactacaggtttaaagattttacaacacctttaggacctatggtgggttcctcagct

SEQ ID NO: 189204 - DNA, 499 bp, Arabidopsis thaliana
tgacggcgcatgccccccttccttagcctggattcttttgagcgggcggccttttttttttttttttgggtttattgggtgaaggcttaacccaggtccaggcggaaccagccaatttccaaacttatttttcaaacccttgaaattatgccaggttggattatattttttttattccgttacccttaacccttttgatttcaccatccaccatttcccctggaacctcactttttggaaccccttttttttttgaccaaacccaaatggcagcccctgcctattaaaaaaaaggatatttggcctttaaccttatttcttgaattcgctgggttagcccaccttagctttattaacccttttcggggagcatacctgcggtttccttccttaaaccccgtattgggatcggcagaatcacccggaaggggagtttttggaggctcattagaagaaaagggtggcaacttctcatatagttgggccttaacatagagag

SEQ ID NO: 189205 - DNA, 218 bp, Arabidopsis thaliana
  unsure (1)..(218): unsure at all n locations
tttttttcttttttcaaaaaacagacatttggccatccggttgaaattggctcataaagaggaaaaggaccccagccattgggaatggaatggtccggagttattcataaaaatggtttaaaaaaaaaaataaacttcggggaagctttttttgttggaggggagggaaccggaccaaggaaacgaaggggggnggccaaacccaaggacccaaagga

SEQ ID NO: 189206 - DNA, 508 bp, Arabidopsis thaliana
gtcgcagcacgcgtcgtaagcttggatctctagagcggccggccctttttttttttttttttttttttttttttttttcttttttttttttcaacccaaagtttggaaaatccgatccctagaatgttggttttcccccgaacccggggcctgggagaacaagacagcccaaaagggttggcttacccaagaaccaggtttttttagaacgtggggggccaagaggggccccaaacccgggggataaggaatttttggaactttgttttttttttctaaaaaaggttccccctggaaaaaaaaaaaaaaagggggggggacaaaacccggggggggggtgggttgggttatccccctcgttttcgcggccaaaaaaaagttctgacaatttttgaaatgggccccggcgcgacccctccatttggggataagtcccaaagtttttaagaaaccacattaaccccccctggggggttccctcgaaaaaaaaaaaattttggccggaaag

SEQ ID NO: 189207 - DNA, 484 bp, Arabidopsis thaliana
  unsure (1)..(484): unsure at all n locations
tcgctgccgcgtacgtagcttggatcctctagagcgccgccctttttttttttttttttttaacaaattaagaaatttatttaatcgggcgtttaatttttccaccaccagcaccacaagaaacaatnaagcaggcggccccctgggtccattcatgaaccacccacacggaccgccaaaccaccaaaaaaaattatattttggntgttgataatgcccaacaccttccaatggaggttgcacctaaggaaactgattcaaactttgcaatacccaaaaaacttggtccagaaatgtttaatattccgggcgggggccgaaattgagtttccttcttttggtggttggaccaccctaacaccctttgcaccacctagaacagcaattttcccaattatttaaaaaaagccacaccttggcgaaggaaggtgtttttttttccaccccccataagatttttttttcctgaaaaagaacccaaaaa

SEQ ID NO: 189208 - DNA, 173 bp, Arabidopsis thaliana
agcggttcggccctggggtaaaatcttttttaaaaaaagaaagaaggcttacactttggaggacctacttgtcccaaggaacggtggaggaaagaaatcattcctacgacattaaattttattgtacacccgcagacaggaaagaaccggaaccaggaccagcaatccaccac

SEQ ID NO: 189209 - DNA, 646 bp, Arabidopsis thaliana
ttcgacccacccgtccgctaaagacggtcgtaggggctcctctgagcatgactgccactttttatttgaacgacgaatgtaccgctcatatcatggcgaggagtttctcgcagctgctgaacacccccaccgtgcctagccattgcctgctcgagaatctcagtagtgcacatggctctgtgcgagacatctgccacgccactatggccgtggctatgacgctccttccacactggaacgagctagcttctatggttacctataccggaaaagctatcgtgtgaacaccgcggcttatcccacggcacgggaaaccaatgactgccactgccgagcctgcatcttacacgaaagatctgcatatgccaaatagcactgatgacgccctccttgcatataccaccatgcgacgaatacctgtccactgcatttgggatgcggtatggaccttccacttatgcgtagaacttactacacctgactcacaggttggtatgcctatgttggtcacgaacgatggatagagaagccgactccaatacgctttcatccttccatgtggctgccagaagctcggcggtatgtcgtcacaaccgacggattcctctatttcacgttggtactcgtgccaaggtaactgacgccg

SEQ ID NO: 189210 - DNA, 694 bp, Arabidopsis thaliana
gccggtcccgaatttccgtttcgacccacgcgtccgccatattatccccttagaacactagatcatgtcgatcgcaccatcatttttgacgacgcccctgacttgcacgatcttgcggggacattgttttcactggcgaccaccattatcgaaacttgtcatgcttcccacgtggatgagacatgctatcttcggagggggcgcctgcttatggaatggctctgacgacagaacaatgtatgcactgccgctagccggcggcactgcactcgactgacctgcattctcggtcgtgttgaatcggaagcacacgtttcatgactgtgacgaagcgggctttgcgatgataggatgagatactattagaaccaacgccgcgcggaaggatcttactcacatcatgagagctaactgcgactaactcggaaagctgaacctgactgataaagtacaggtctgctgcgtatatctgataaaagcgccatgagaaatctatgtgctgctgtacgatatactcgagcaaaagtagatatgatcggcatgatcaatggatgcaagaggatgcgaggctatagaaagtatgatgtatctattcgggcgctttcttttgagaacgctagcttgcgttcttgtacctgaaaaaaatagtgttgaaacttattgggcagccattaaagcacttatccgaatcgtg

SEQ ID NO: 189211 - DNA, 680 bp, Arabidopsis thaliana
gaccaccgtcgggttgttgccagagaacaactgcactacaccccttttttttcctgagaggacaagacacttgtgcgcattattcaacatccagatctcacctctagactgagactgaaccatcctcgttacgaacgggactacacgagcgcgactaaagaccgtactcagagtctcggaagagacatggattgatgcctgcctgttgcagatgtagttttcacttctagagagaagtctgatccgaggggaacttgaatggttttatcagcagaaccgtatcgttgctgtgtcggtcaggactatgcgggaactacattactctagtgtactgtacgaagtagaggattgactatcttgctccccgtaaatgcggtgccgtgtagcgcgctcctgatcagactatcatagtctgatgaacacgaggcggcggggagtttgttgctcatacgttgacgctattagggtttctttatcagggtcacgctccccagaacccgaattctaaatctaaatcacaatcaggagtccggtggaatactattccctggatggggagaaaacttttcttgggaagccgggtttaaaaaccggctttgaatgggccctaaaacgaaaaaccgcattgaattggggccacccagctactcaggcaactttcctcgtctttggggaagaaa

SEQ ID NO: 189212 - DNA, 837 bp, Arabidopsis thaliana
aaaaccccgaaccgggaagacagacaccaagagcgcggctcacgcccagaagacgcgacacggattttttttttcgagcgccacacgacgacacggggccccacaggggggcgacaggcgcccacaaaggggggggcccaccgagtacacgcgaggcgcagcaaaagaacgcagagaggccggcacaaaacgcagaggccccaacccggcgcgggccgcagcacagccccgggcgaaggccccgcgagcgcagaagggacgaggcgggccacatacgccaggatccgggggccacacgcagggagccagacgcagggcgacgcccgccgggacgcgaccctcacgggaggagcgattcgccacatgacgaggacccgagagcgaaagacagaggaacaggaaaaagggtggagggaaagccgccaccaagaaaaggctcacctagtagaacctgggggaaatggggagcagaccccaccgaagtgaagatcgacagccggtcaagcaggagcccggattaaacaggaagcgtcaaaacatggacaggggactgcacagatgtacggggcacccgataggctgatccgggccaaacgcgggagggttgaacggcaacgacagttatgcccgaccgcgacgaaacggagcgtagcagccatcgcgtagggcaccacgtggatggattcatgtacgcccaactcacagcgaatagtgagacggaacacaaatgatgaacgggaaatagtagcggatctatgagaaagagagcacggaagtggagagagcgctaagaatcggaaggcgaggaatcgtcacatggccgcgcggccagcgaga

SEQ ID NO: 189213 - DNA, 798 bp, Arabidopsis thaliana
ccgaatttccgttttcgacccacgcgtccggatgatactagctatatgaaccaaaattgggagatgcgactttttattttttagcctgatggtagcacataccatgctgtattgagcatggcctcaactgatggtactgaggttaaagcagatgagcatcgataagagcttagcaatgattcatgggaaccggctgttgaaaagatttgtgacccacggaggtgagcatccatctgaagtgctcttgacgcttaaagaatgcacttgttggcacatatagtttttggacagataggcttggtggatccatgatcgaattttttgaggtaacactgcgacctgtgcttttattggcaaaggttatggatgtcctattacagctaactatgatagtacaggaaacagatgatgagccattcctgagcttaagaacgtttatggaactaaggacgcgacgttcttctgtatcaaacaccttacctggtgctctgtgctgctccatacatatttagagacccaactgattgacctcctagaaatgtagaaacccgcttgttgtatgaggatacaacttcatctattgccctcgggttatgggctccaagaggcgctcgctcccggcttggattcacgctgatttgcttccacaaggggggcctgacacccccgaaaaataatccctcttgagcctgggtgggactcaaaaccctcattccccctatatattttaccagttgtacaccttggcatgggtctaccctcccaccatggtggtctcttctaaatcaaaaaacacct

SEQ ID NO: 189214 - DNA, 478 bp, Arabidopsis thaliana
ggaatttcgtgtagacccacccgtccgaaaagcactctctttatacctcctttgaccattcttgcgaatttgtatctatctgctcacacattctctcaaacgaagcttgtgaccaacctgacacctatcatagaaccaccgacacttcttgcattgcatgaactaccaaaacaaagattctaccggggccgcgtgtgacaaaatggtcaccccattctctactagtggctctgctgcttctggaacaaagtgaggagctggtggatgctgtaacttatccactcccagatgtacagcgaccactgggactccaaccacgggtatgctcactactggaactacctgcagcgcttgctccgcgcttggatctgctaccaatgcaacttggagtcatggttgtccaactaccgtgactatcaatgcaagtactaactgtgctatgcactatgctaacggctatgccacacatggatggttg

SEQ ID NO: 189215 - DNA, 1008 bp, Arabidopsis thaliana
aaaatgacccaaagaaaactaggccgcacgcgcccgaaagagagaaacaccagacagcccccacaaaaacgaattaaaatttttcaaccaaacacacacggacaaagaaaacgggggaacagcgcacagagcccagcggcacacacaaaccaccgaacaacccacaaagcaccagagaaaaaccgaccagaaaaccacacacacgacaacacggcaaaggaaccaagacccgaacgagaagacccgccaccgcaacaggcagcaggccacgaagcgacacccaacgacgagaggccgtcacatacagaagaccaaagagaacgcgcacaccaacaccacccaaccacgcccagagcccacagagcgaaccaccaccagagccacctatacgacacagcacccaacaccccaacaacgcgccccgcagcacgccaccacacaaaaaacaacacgagacagcacgagagaaccgccaacgcacaagcggagggagggcagacaaagagaacaaggaacaagctaagagagccgaaagccccgacacaccacacgacaacagcaaagaccagggagacaacaccaccagaaaaaaacggagacgggcacagccgcgagactacaacaaacccccagccagacacagacccacaagaccacaagcgacgacggcgcagctcacaccggacgagaggcaacgaccccgacaacaagacaagaccgacctgcaccacaaaaccgcacaccgaggacaaagcgaacagaagcgcacacgacgccacatgatcagaagaacagcaccgccccaacagtactagggccaagcaaaaggcccacacacccatgtagcgacaagctacgaacagaagagacacgcacagcagaggagaaccagaggacgacggagcggagcgcaacaaagcacaaagacgcaaaaccaacagccgacagcagacacgacagaccacacaacacgaggagacaccaaggccgaaccactcaagccatccc

SEQ ID NO: 189216 - DNA, 757 bp, Arabidopsis thaliana
gatactcagttacaatctatgacatcttatgcacgcgtgcgtcacctcgtatcctctagagcggccgacctgccgccctttttttttttttttttttttcaaaaactttttttattttttttgggccaggggctttggttcttttttacactgggttttaccatcttaactttcgctagcgtaacaaccaaaacccccattaaaaatttgacacaaaggttttggcaaaaccgacttaaaggcttgatcaaaatagctgcaacaatgttccttccaagaacttttcggggattgattccttggaacccaaaaaaaaaaaaagccctctttgatgaattgccaaaaagggtttaacccgggggggtaaaatttaccccttaaatggcgggttggggtcaaaactgcctatgcctaatccaaagggtttaaaaacctttatagggggagtgaattatccctggggaaaaaattcctacccgttttgcccaaccggtagaacacccctttttgttctttaagcggggcttacaaaaaaagcgtaattcttttcaaaaaattggaaatttttaaaagaaaccccaggaactatttccttgaagggggagccccaccgctgggggagtttatgccccttagggagggttttatctgagaaaaaagggggggggcctataagctggaaaaatttacgaaaccttttgggaacggagaaaagttcccccttttgggaagggatggaaaaccctccttttttttc

SEQ ID NO: 189217 - DNA, 844 bp, Arabidopsis thaliana
atgcaaagacgatacgccgagatatccatggagaattaggccttcctgctagtgagatgaccgcactacatggttggacatatcacctctctttgctgaatccctccagcaccttacactcaccttacatgattcgatcgtactgtcggcgtccatccacacaacgctcattctaaccactaacctatttgcattaccactagattgttttcatcacatcgaaccataatatgcatctgtggattacatacaaccattacccttaaagctccaagcgcgacgactcatcccttgataacttgagcaccatacaagctccgcgtcccgcacagacgacacctcctgacatgcggaacgcatgcattggatcctcttctaacgagaaatctcctgctgtgtttcatatcttatataacccccccgttctaaccgccttcgattcagttggaccttgcaatccaactgttctctctcagatccctctacggtgcccctcaactacaccccatggaaaccgtactcattcacgccggcaactttacaatgtctaaatttcttggccatacaccagactatggctggtagtcacaatataacagctcctccatttatgattcaatacatccgctttcccggttcaaagaaccgccttcgtgacaggctggcttcaacgaaccattcttacaaggggggtcttgcaccccaaacccttcccccaccctgtgtgttttatacccccctcccttcattctcaaacaccctgtacaccaacccgcaccgggtgtcctcactaaaaactcgggtcccatctcccattctgccagggttgcatcctacaaacatg

SEQ ID NO: 189218 - DNA, 1301 bp, Arabidopsis thaliana
  unsure (1)..(1301): unsure at all n locations
ccggcgggcggacaccgacgagaggacggagagcagaaacggcaggacgacacgagagcgaattaagaaaatttagcggcgggacggagaagaagcaaagacgcaaaacacgaaacaatagagcgggggggggcggccgcacccgtacaccacaacaaaangaccagggaaagacaagacatccagcaacgcggcgagagaagcgagacgcgggtgaaaaagagaatacgaccgcgaacaaaagcaggggcagcgagggcacaaaacacagggaacaagcgacgcaacggacgcatacgcaacaagcgagacgcgagaacaagaaagcgcccgaacgaaggcagcacaggaaagaaagaacagcggcacgcgcacaaggcacaagcacaaggaacgcacggggcgagacacgagcaggacaagaaggcgggaaacaacagcacacacaataggaccacaaaaaaacaggagaggacacgaacgggagacaccgaccaagaaacggggacaacgagaagagcgacgaaagggaaaggcgacgggacgaagcagacaaacaactgagcggcgaagacgacgggcccagacgcccaaacaaatgagagcagaggcggaggaacggggagaaaaccacgccacgaacgaagggacggagcaggcgaataaggggacgcaaccagcggggcgcgaagaaccggaaaacggaggagaggaaacagacggaagagaagcaccaccataacaagagcaaggcagagcggaacaaacacgtaaggcggggagaggcgaggggagagaacaccacgcgagcggggacaaggcaagcgaccacaggagccaggcagcgacaggacggcagagggaaccacacgtgtccgcagaactcggaagggagacgaaaacacctcgagcaaacccagcacgagggcggcgaagagaagaagacagaacgagacgaagcacacaaagccgaaatgacagaaacgacaacaccgagagacaagaagcgacgagcaaacgccaacagacgacgaagccacgaacggggcgcgccgcgagacgcaagagaggagcaaacgacgacatgagacaggcgagcacacagggacacccaccgaacaggaaacgagagccgcccaaacgccgcgcggaccgaaacccacaaacaggcgcaaaccaggaagcgaggaacacggaacaaaggagaacaccgaccggggcccacacacgcccaggaccgcagccacgagcacgagagaaacccagagcacaagcggagggcacgagagcaaacgaagcca

SEQ ID NO: 189219 - DNA, 973 bp, Arabidopsis thaliana
gagaggggaggaaagacaaacgcgaagacgagcaacacaccaggaagaccacgaaccaccgacgagtgacatcagaaagaaacaaaaccgagcaggacagaggaaccataccccacccggaaggagaaaggttgaagatcgaaaaccattgccaaagagcagaagaaacagaagaacgaaggcaggaaagcgaaagagaggacagacgcgacgaccgagacaaaacttcgccgaaaacgagcaccggagagaccaagagagaggggaaaaggggagaacgcaccaagagacaacgccgagagtaaaacaaccgagagacagaaccgacagcagacagaaagaggacggagcgagagaacaaacagagggcaggagggacacagacgggagcaacagaacaaagaaagaacgcccaccgggaaaaaaaagggggagaaccgcgacagaaaggggcgcgaagagaccgaagggacaaaagagaaagagaaagcggaccgaggccagggagaccccccaaggggagacaggagacgcagaaaccaagaacagcagacacaaccgtcaaggcacaggggacaaacagcacgacaacgaaagggggcagccacgcagcgggggggaaaagaccccagaagcgggccccgacgaagaccacgccggcggggggcagagggccacaaagacgtcgaaaaagagcaccgaaacagagagcacataaggaagaagagtacaaaaccgaggaggggagggacaccccagacgagacaaaccagcagcagcgcaacacgacggaggaacgggcagggcccccaaaagacaggacgcacgcacgaagaggaaccagaccacggacaaggcagggaacgcggagaaagacgaggacgatgaaagggacgaggcggacgagcaggacaagacgggaagaagcacgagaaccacgcaaaagagcggaacgccaaaaacgcggaaaaga

SEQ ID NO: 189220 - DNA, 225 bp, Arabidopsis thaliana
aaattatattgaacgatttcgcagtagtgtaaatttccgatttcacctctgaccaagctgactctggcgcttgagcgttcagtgtataaagccggccactgtgagcgcaacaaacggctacattatgccgccggaaaagaggtgattcgactttaaactccaactcggagtactttaagtttctctctgaatcttgtctgatacttgattctagcaaagttcctt

SEQ ID NO: 189221 - DNA, 195 bp, Arabidopsis thaliana
cccaatataaatatatatttactctaatttacaagatagaactccaaaaaaaaaaaaaaaaaattgacccagagataagataaaattcaactgtaaataaagctgttgtgtggagttttctttcattcaattcgaataagagaagcaggcatctcatactgcaaagcaaatgcttcgactcggtttctaagctca

SEQ ID NO: 189222 - DNA, 124 bp, Arabidopsis thaliana
actctccatcttatcaacgaaccaagaagtaaccggttcaatcatgatgatctagtttataatactgacgaggaattcgctgatgtcatgcctagtgtacaaatcggtccaccaccagcctcgc

SEQ ID NO: 189223 - DNA, 130 bp, Arabidopsis thaliana
cttattgtgggcaaccgtcattatacgcgatgccttgctccaggtgataagcgacacacgcttggtgatatatgcccgacatgctgcttcagctggggatggtatagcagccctacaagacgcactaaca

SEQ ID NO: 189224 - DNA, 592 bp, Arabidopsis thaliana
  unsure (1)..(592): unsure at all n locations
cgtgcacactatagcagcgactatgcacgttcgcatggcacgncgttnacgtaagncttggcatccttctagaagtcggcccgccctttattttcttttatttttttttatgttttaatatttattctttaaaaaaaaagtgaataatataattgaccatgccaaaagattatgtttaaagacattaaaccctaaccaaattttaagattagttttacctttaaatggattcaaatttattaaactttcagccctcgaaggcacaaggatcgaccttaacaatttcctttttatttcacatagatatctgccaattattgctggtttataatgaagtggtaatttacaaacatttcttaatagctaccccatgttttaatctgacatgaaggctatatttgaacgatgaaggtatctacattaaatccctttaagctttcaatggtgctttcctacaaggaacctctcaaaagactcccatttttggaacccgtttttaagaggtggtatagcttccccattaaagcccactcctccacggcgattggttaaccccatcgatttccacaccgcataacctttggcggtcttc

SEQ ID NO: 189225 - DNA, 369 bp, Arabidopsis thaliana
tcattatacccttccgtgcatatcactaatactgatgccacttatgaatacgtatactgactcgcggtcccacctacgaattccgaatctcgagtcctaacgttcggcttcgattccgctatctcaaagagcactctctcgaataagccgaatgatattaattttcaagcaagtgtcacgttgattgttcttcgatactttcgtaacatactcatccattcaccggcaggcatcacgtcatctacggtaaggcgcggtctcatggttacaaagatgtctctcatgttaacttatcagccggggcagtctctactacccattgtggatcataatctagaagagaaacaacctcgggtctttcctggtcaa

SEQ ID NO: 189226 - DNA, 367 bp, Arabidopsis thaliana
ggacaagacgtgcaagcacccgcacgtacagccgcgaaagcacggaaccactagagcggacgccacaacgacatagtgagaaacttatagacgcgacgaaagcacgaaacagacacgtcagacgagaaactcagaaacgcaccggcaaaaggccccaacagccaccaccgacacagggaagccacagcatcaggaaggacacaccacagacgagagggacactggacatcgaagcatcgcgaaaacagcgcctgacaggaacctatcgtgaaaacaccacagcgagtagacggacgcagggacaaacgacaccgccatccacataaaccagggaggaaacgcccctgccggacgagcaaacacgcgg

SEQ ID NO: 189227 - DNA, 452 bp, Arabidopsis thaliana
ctatgtacgtgccgaatgccacagcgccacgttaagacttggcatactctagagcggccgcccttttttttttttcctttttttaccagaacgcaatgtaaaaaaagggagaaaaagcgacaccctaacactgaaagcagagagaataaaaatgcgcacgcagacaaggaattgctcggcgtaattaaacgagagccaaattggcaaaagggaagcgtaacactaaaagagaggacacatggatacgtaacgcaatagccgactgagtggcatagctcatgcacgctaccggggccatcatatcggcgactcgtagaagagcgcaggaggacgggcttacgtggagaacagatggagccaacgcatcagacaggccttagctccatttcggaggcagtagctaaaggaaccacaaaggaccacaaagcggtcgcgctaattgcatagtctgc

SEQ ID NO: 189228 - DNA, 526 bp, Arabidopsis thaliana
  unsure (1)..(526): unsure at all n locations
gtgcacactatagtacgtatctatgtacgctcgtcatgtctacgcgctaccgtacagactatgagcatcctccttagtagtcgcgcacgcgaccttcttcttctttcttttctttctttcttacagcatctagacatcactctgacattcaataactaagtaaacacaatgtctttccgtctatattcataactacaaatcaccatcaacgcttagtcactacatctcacgaccgtcatcacaagctttacatcacgccgttagctctacacatataatcctcgtatctcaccagatctttctaaagatcgtgacttctttatatacttgagcngctaggagcggatctcagtggctattaccgacactcgctctcatcatccgtatgtatgacgcgtctgcctattatctaccacctcacctggcgacctatatttatctgatctcgtctagaacatgcctatgaacatactgccttgtctatgatgactactctgacgctaccaactaatagtcttctactcca

SEQ ID NO: 189229 - DNA, 667 bp, Arabidopsis thaliana
gagcgcggcgagaatacgacagtcacgaccgacgcagacgactaacggcggagaagacaccaatcaacacaagcgcggagacagacgacaacccaacgaaagaaagaccaaccctacataaacccaagaaagagggccaagagagtggaaacgcctggaaaaacctgtcggacagagacgtgcaatgccgcccaaagcacgcgaccgaaagcaaggaccctcaagcgcggccgaccagccaatttacgccatattagatgaaacgcagggccaaaacacaaacaccgcgcagaccacaaacgagaaccgaaagcgagaccacaaacaaagcaccaacagggaaagcacgaaaagacaacacgaaacgcaaaaaaaccggacggatacgactatacgaagagcaggaacgacgaaccaagcccgccaaaacaagagaaagagaacacgaaaacacatacgaagaaaaaaagcacacacagggaggcggcaccaaaacaaggaagcgctgacaacacatggggggaaaaagcgaaaccaaacacgcgggcgagacagacagcgaacaaaacaaaacgcagacagagaagacgtgcgatgaacggcacacagacgcgaagtacgcgatagtgctcgacggacaaaccatgcggcacgcccagggaacaac

SEQ ID NO: 189230 - DNA, 399 bp, Arabidopsis thaliana
tctctaccacatgagggccccacgacaagcgccaattttaaaacaaaaaggaaaaaacccgcaaacccgaacgaacaaacccagaacagaggcaaaacagaacggaagacagggcggaaaggagaaaacgaagccggggaggccacaaacggcaaagaaaaaaaggataaggcaagacacaaacacgaggacagaccagggagcaaccagcaaccaacagacaaaacagaacagcagaaaaaaacgggaaaggcgagacggggcccaacggacccggccgacaaacacacagagagccgaacaacgacagagaagcccaaacgggcaaaggggaacacaaggccaaaggaacccggaaggaaaaaggaacggacggacggaggaaggcgggagagcccc

SEQ ID NO: 189231 - DNA, 549 bp, Arabidopsis thaliana
agcacgatggagccgcccggggcccagggcaaggatagtttgaggcgaacaagaagggggaaggaaaagggccaaaagaggagaggggagaaaagggcacgcaggaggaaaggggaggagaagaagcaacggagagacggagaggacgagaggacgagagagaggcgaacggggagaggggaagggagaaaagcggggggagagaaggaagcaacagggggaggagaaaggaaggggcagacgggaagaaagaagagcagagaacagcaaggaggcgggagacccggagaaaggaaccgggggcgagaaaagcggggaccgagccggccgagcccggggggcacaaggcgccaaggaggccagcagaaaagggaggaagcaggacacgcgacacgggagagaccgccacgcgaggcgagcgagcacagagagagccgaaaggggaggggaggaagcaacaagggcgcgggaaggggcggggagcaaagcgggacgagcaccgggcaagggcaccgaaaggaagcgacgaaccaccgcggaagcgcacca

SEQ ID NO: 189232 - DNA, 1076 bp, Arabidopsis thaliana
  unsure (1)..(1076): unsure at all n locations
aacaacggaaaggccggcggccccaaaagaagcatcttaagtttttggaagggagaaacgaagcgaaaactcacagagaaaggggggacgagggagaaaaagagagggggcaccacaaaaacaacaaagcgacaaaaaaagcaaggcccggaaaaaaaaaaagaaaagtcgnaacagcagaaaacacgagaaagaaagaacaaagggaaagacgaacaaacgaaaaggaaggaagagaaggaagagcacacgagacagggcgcgaacagaaaaataagaaaacgaggagaaagcgcgagcgcaaaagcgcaaggaacagagaaaaaaggaagggagaaaagagcaagagagaacggaagcggtgaaaagacagagaagaacacaagaggcgaaccaaacaaaagtagagaacacaccgaagagagccaaatagcgcggtaacgagatgacggtggagatgactgaagagagagaaaaggcagaggagatgacgacgacgagacgatcgtgaagacaacgaaaacgagacagagacgacgcgaagagaaggagatgacaacacacaagcagaagatgaggaggccgaagagcgagaggagaaaagacacaaacaccagaacacggaggggcccacagcgggagaatgaataggaaacgagacacacagaatgccaagcgatcaaaaaaaaagagatcaccaaaatgacaggaaagagagacgtgcaagaaaaaggcagacgagtaaggagagagagacacgaaaaacatgacccgcaagcacgcacacatgagagaggcacgagcgcacaggagagagagaaatgcagaacgaacacccaagacggaaacagagaagaagcacaagagaccgcgggaaagaagacacgagcacaccggaagaaagagagaaagaagaccagaggagaagacgacgaacgacaagcaaagaaaacgggagagcaagaacgcgagacgaaggaaaacgaagaggaaaaaagagagaagagaaaacgagaggagtaaacacacaaaaaagagagaagggacggaaaacgaaaagacaagaacacaaaaga

SEQ ID NO: 189233 - DNA, 378 bp, Arabidopsis thaliana
  unsure (1)..(378): unsure at all n locations
cctgcagtaccggttcgnattccgggtcgaccacgcgtccgatatatagctcgatcagatcattatacgcgacatgtcctctgtaggatcgagacttagatatgaatggtacattcctcatctcatcgagataggatgtcatctcgacgtgacaatgtcatctcggactttaacacatgtagatatctccacgctgacttttgagaacaaatagatctatcatacgaccacgaaatgagattactcactcatacatggatagcacgtctgatccactatgacgcctacgtcattctcatttggtcgaggatcattcgcactctctgctgctgcactagctttgtgcgctactatgctcgacatacacatctgttttct

SEQ ID NO: 189234 - DNA, 173 bp, Arabidopsis thaliana
gcggcacaggtcactgatagctcgcggttgtaatctgggctttcatctaaagagaatcccgtcctgctttcgtgcgtgtagtactccagacacaacgcgagactgagtgttgatagtctaacggacgggaggagcaccgactcttcagtcgtgccacagagggcctcaacccc

SEQ ID NO: 189235 - DNA, 520 bp, Arabidopsis thaliana
gcctgcaggtacccggttccggaattcccggggtcgacccacgcgtcccgggaactccttagggagaagtaaagaaaaagaagaagaatgacccataagaaagacaagggagtcgggaaaaggctccacggggagaaatcctgggcccgtggtaccaaaatggttcctttccattcagggttcagcccaagaaccggggccaacattccgcccactaccacctttacccccaaaggacccttccccttttggaccaaaccttggaccacgggaaaaaggggtttaatcaaagccaccccttttaaggccaaccttaaaaccaccaaagccaacctcaaggtaaagtctaaggcccttcctttcctcccaacaatcccggaaaccgaaaatactggggtcctttacaccgatccgaattaccagaaccctctattggcccgcccttccagaagtaatttctgaatattgagcaggccggcccaattggagaagaagacgtataaccagcgggtggaaaagg

SEQ ID NO: 189236 - DNA, 443 bp, Arabidopsis thaliana
  unsure (1)..(443): unsure at all n locations
aaacgggcagcaccggtgggcccgccggcggccaagaaaaccaaccaggcatgaccacgggaaggaccatngaaatcaagcagcacagacgacaacaacgggagcgcggacacaccgagacccaacaaggaagaccaaggctggacggaaccaaggttgtcttggggcgggggcgcccaaaacaaaggacgaaacaacccaccgcgaaacccgcacgaaccgcaggccacncgaaacaccagggggggaagaacccgaaccaggggccagaaccaaaaaagcaangggccaccggcaccaccaccagagaaaccacagacccgcaaaccggcgggcacaaacaccccaaacaacgccgcggggacaccccagaagagcccacccaaaacgaccaacacgccggaacaccacgccgcacaaagaacacaccccggagccccgac

SEQ ID NO: 189237 - DNA, 312 bp, Arabidopsis thaliana
cacgcgtccggtctatgcgaccccttctccgccgggggtacgcgtgcacatttgtgccgactgcggtgaccgatatgcgatcgcatcctgcactgtctatgatggtcttggtgcaccgtccttgcgatgtaagctcggtgacccatgttttttcctgacgctagaacagagatcccataaggctccctttgtgctccatgctctcgtgcatacatgactgtgctccagtgggcaccggttgtaagggctagaggcgtggacctagtgttctcaatcgactatctgagagacgggtggctctatcactgagcg

SEQ ID NO: 189238 - DNA, 486 bp, Arabidopsis thaliana
cccgcgccacaatatagacgcctttccacagggatcccctcgaacaacagcggccgccgccgtcggagacactaaaatcctcaaaagcaaacccagctccgacctgacatgaattactaccttaatcgcagagaggaccccgacttgcaaaaccgaacaaatccccagtcgtgtttttttttgtagggatcatggaacgcgctaatgccggtgcacatgtatggtacattaaatataaaccgtcatactgttcacgtgacctgcaagagtcaagtgttatctggagacatttgaaggaccgcacctaaactcttcatatcttacaaacaaaaccctacaccatctctctacagaccctgcccccgtctgagaatgagccaagcgatccaccctgagatctagccaaagacatacgatcctcttacatcgccgagcatgacagatatcgagttgcatgtaaatggagcaaaatcacagccgagcgcg

SEQ ID NO: 189239 - DNA, 448 bp, Arabidopsis thaliana
aaaaaaaaaaatcctgggcgacgcagtaccggttcggaagcccgcccgacccagcctacgcaaggcgagagaagtttaaaagaaaaaagtaacaatcccacaatcctccaagtaaggttacggctaacctaatctgaaaacctacgcctacgatcatgacatatctcaggatcccccgtgacagcaagaagaccacaaccaactaccaaaaacaaggacaccgaataccattctcctagatgctaccctgaaagtaagtaagaacagtcgtttcaaatcatcagaagtaaagaactcaatcctaaccaaccagagaaaacgaacaaatcaataaaaccttagagaccaacctatcatgcgatataatgcagcctcaaagactctaccgaaaacaccagataaacaaagcggacagcaataatatcaagagcccaactccaaccaccct

SEQ ID NO: 189240 - DNA, 278 bp, Arabidopsis thaliana
gtgatataccaagaccaacgagaccctttcccacaaaagctggcgggggaccaattcaaatctaatcctattgaaaatcgagcttagtcttattggaaaaacccttcttcacaacccaacacctattgatgcaccactttaagctcttcttttgaccacccccgcccttttctggaaaccaggcccacatgctctatacctcacagaggataggccccagttttagcgagccatctacggatgggtacccttcttacagataacccctgagcacaacc

SEQ ID NO: 189241 - DNA, 396 bp, Arabidopsis thaliana
cccccctttttagtattacactacctataaacccccctgtcacagagccctactatcttcccctggcaatccacgttcaacagttcctccctactccccgaccaaccgaaatccacaaatgcggcgccaagacaattttcttttcgggtgcgaccaacccccgacaacacaccctccaccggcgagcccaacatgcaccgccccaggaacccgagccagcaccaccgccccgccccaggacaagcccccccaaccacacaaccacgcacccccagaccgcacaacaatacaaaaagacccccaaacccccccagacgcccccccgcagaaaaccagcccacccagcagcaccgcacgccacccacggcccttaccctcttggaaggctcaccaaca

SEQ ID NO: 189242 - DNA, 425 bp, Arabidopsis thaliana
cccgactcgacccacgccgttccgtcttatgtctagaacactctaaaaggcctgaactgggcaatctccggtcaccaccatggccggggaagaaaattataagggttgaaccgccatttcgacattggaacaagccgccccctcaattgccaaatccgggccaaccgcccctaccgggtatgccaggctgacggcacctggattttttggtgccttccaagaaacttcttggaccaattccccaacaaaccccgaggaaccggcggtcatttgaaagattgggcgcgggataaaccgttcgctgggtccatgaccttggaggatctggattccctaagtctcttcaaaatatagcaaacctcaaacctcgcggacaaaccactgaagatgatttctgctttgaccgtatgggcctccctggacaa

SEQ ID NO: 189243 - DNA, 399 bp, Arabidopsis thaliana
agctccctagtttggaaagctatcggagtacacgcgtgaccgttctcatatgaccacatgcaccgttcactcagtattgctttttttcttctaggctagtccgtgcacctgcagtgaacgcatatggtcatcgatgagatatcatgcactgagatcttacggcatccagtcacacctcgctgccggtccgaactctgcacccatactcttaactctgtggtgacggcgcaagcagcactgtcgttacaactgccaactgtggctgcattaggtgtatccacgtgccgtgaatcagtgatggttctatcagagagagggacaccaaaattgagagcaaaagggctggactacagttgaacgatgctttgactctgccacaaccctccgatccgggggatc

SEQ ID NO: 189244 - DNA, 439 bp, Arabidopsis thaliana
attaacacctgaatcagccaatggactggagttcgggtgtaacctccgaaaaattaccttaagggccttaccccacaccttgggcctttacacttggagggtaagcctatgaggattccgtaaccaaaggccttagcaaataaccttcgcggaaggcgttttcttacgctgatgttcccaatggcgcagttccctgaaaggattgggatgataaagccaatatccacaatggccgtaacgtgtggatgctgccaccaaagagagcttgagggtctttgctcgacctcttttcgttgactttcggaaacggacaatggattccttgaaggctttcataacgaatcatgaaggagctgtataccgattagcacttggcataggctggatcacaggggagctagaagctgatcaaaacctatgcgcatgggactacctaatt

SEQ ID NO: 189245 - DNA, 461 bp, Arabidopsis thaliana
  unsure (1)..(461): unsure at all n locations
aaccaaaaaaaaaccccaaatttaaccccgaacagaacaacacgaccccaaccacacaaaaaacacaaccaagggccaaaaaaaaaaacaaaacaacaacacaaccccaccaaaaaacaaaaaaaaaacaaacaaacanaaacaaaaaaaaacacacacaaacaaacaccaccacccaccacaacaaaaattttttaaaaagggggaagccaacaaacgacacaacaacagaacaaaaaaaaacaccccgcaacgaaaacaagaacagacacaccccaccaacggagaaaacaaccaaaagccgcacagcaaaccaacacgaagaacccacgacgacaacagccacaccgagcgaagccagacagaagccagacaaacgacacagacaaacaacaaacacacaccgccacacccacgaacaagacggagaacaaacaccacgaacgcaagagagaacacaa

SEQ ID NO: 189246 - DNA, 228 bp, Arabidopsis thaliana
ggggagggtgagggccggaccaacacgcgacagaaggggcccccggggggcccaaaaagcgcccgccaggcgaagggaaaaccggacacacgcggcgggcgcaggccggacccgcgcaggcggaccacgcacagaccaggcacagagaggcagcggcccagaccgcccagaggttttttcttagggcgtgttgtggggcccccgggcagacaagcgcgggacacaaaa

SEQ ID NO: 189247 - DNA, 481 bp, Arabidopsis thaliana
ccaccccagccttccgaggcgttcggatcttttaaaacagaatcaagaatgaaccggaggccggctggaacctccgaaaaattcacataagggcctgacccccaaacatgagccgtaaccactggagggtgagcctatgatgactagggaaaccaatgccctagcaaaaaagctacgcggaaggcgtttttatacagggggggtcacaattgcgcaatgccccaaatggattgggataatgacccctatcacccagttgtgcgtaactgtagatgctgccccctaagagagcttgaaggccattgatccacctctttttgctgacttttcgcgaacggttcatgcactcttcaaaggctttccaaagagaagcgggaggaaccggataccgcaaaacacttggcataggatcggaaccagaggagcttgagctgattaaaacctatgcgtcaagagagaaaccggattttatcgagaacaa

SEQ ID NO: 189248 - DNA, 477 bp, Arabidopsis thaliana
  unsure (1)..(477): unsure at all n locations
gacccacgcgttcgggaaattttaggaggagaattataaggaagaagtaagaagttctgtccagataagaaagagatgggagtgggggaagggctcacggggaaagatacctgggcccgtggtaccagattggttcttttcccttaagggttcaacccaagaaccggggttacacttgggcccaccaaaaccctaattttctcttgtaccatgtcccgccnggaccaaaccaggaaccaccgggaagaagggcgcccaaccaaaggcagagcccattagggccaatctaaaagccacgaaggccagcttaaagttaagctccattgccctccctttcttcccattcatccccgcaaccgaaaacacttggtggccctcattgaacctggactacagccacctttatgagccatccttccaaagtatcccctgatttcgacctgaacggcccattggaggaaaaacctttaaaccaat

SEQ ID NO: 189249 - DNA, 476 bp, Arabidopsis thaliana
  unsure (1)..(476): unsure at all n locations
cccccctncggggaggaatcgacttttacgcaggaaatttcgaaactgcggcgcttatggggcacaatgacccacaaaccaaggcggaaatacgggagaacgtaacaactttcggcttttgtccaaacggcatcggaaacgaaactgctactacaaagaaaacaccaccgcaagaattttttttttttaaggcgttcacacacccaacgggaaagaacactccaagcccactagcttactctgaacattctgccgtatattatcaactttccagtcactctttactctaggactaattatatcttttcaccgctacaacctattcaaaaataaatacactggctttatcacacctttaacctccctagatatactatacttctcgccgaggctttatttatgtagatttgatcacgaaactaacgacatcctgcatacccacaataattaaaatccataaaacatagaagacctaa

SEQ ID NO: 189250 - DNA, 482 bp, Arabidopsis thaliana
ttacattttaagggccgggaaggtagctactgaggagagcgcgacacgggtgcgggggtgacgggaaagacgggtgtatattgtgggagaccggtcgaggagagtgaagaagtaatgtgtgcaggttgtgtggccggctcgcgggccggggaacggggccgtgggcccgagcgagccaagcggagtttttttttttttgggggggtgggagcggacccgcttgtcgctgtcgagtggacagaggggcgggagaacgagaaggagggaagacggagggccggcgggggcggggcgggagctggaggggggcgctggggagctgcggtggcgtgaggggggccgggccgcgcgtgggaatgcgatgccggtctgatgcgacgggggtggcaagtggtttaaacacgaggccggcactggtgcggggggaggagtcggggtgagggtgcggggcgggcgtggggcgtgcgtgtgatacacgcgcg

SEQ ID NO: 189251 - DNA, 467 bp, Arabidopsis thaliana
ccatatctctatactaaaaaaaccacggcgaccatggggggcaccacacaactccaccaatactatgcaaccaccaaaccctcatgtcacatgaaaagccagcttagataaccaaaacaagaatacggccaaaggaaaacaacccaacattttttttctgggctggtaagacagaacagaacaatacggaggaggaaacaaacaaaaaaacaaagaacaccgaccaacaaaagcccggaatcccacgcaaacatgctaaatataaccgaccaccgtgaagaaacacaaaaacgctacacagaaaagcaagacaacccagagccccaccccacaaaacaccccaagcgcaaaaaccaggtaaatcacaccaaaaaccatcgcacacaaacaccccacgtcacataatcaaacaacacaccccccaccgcaacaaccacacaaacaccaacacaacaccaagcaaaaaa

SEQ ID NO: 189252 - DNA, 491 bp, Arabidopsis thaliana
tcccagcgtcgacccacgcgtccggaattacaaatcgatcgctttactcgacgtttatttgtctcatgctggtctagagctgcaccttatatgcttcctccgaccatcacttcgaattgtatgttattttcgccgtgagagagtcaccatggatgcctagacctgaagataggttcgaccttgaatcttaccatcaaaaacttctgtcatcgggcctggatctatgatacttaccgccagcgtccatgcattgactcgttcaggatgttcccgacttcatctcggtttagggccagacgcgtctgctacatcctcaacatcattgcagtgctcaacactatctgcgaagacacgaacaagtatcgcggtcagagcttcaccagcgaccatggccgctacctcaggttcttccacgaaaccgagcgattcgctgcaactgtaatcggctggaggaccagatccgtgtcagataaaggcgagacatgctggtc

SEQ ID NO: 189253 - DNA, 439 bp, Arabidopsis thaliana
  unsure (1)..(439): unsure at all n locations
accacgcgtccgggggaggccggacaccctatagagcggggcgagtcatcgactaggcgcgaccgcacgcggccaaggggaaacatcaaggaaagacaacccaaacagaacatctgcatcaacaatgcaacggaaaattaccagaacgcggggcatacacagcgcgccacaaggaggacagaggctcggcggcaccgccgatcttttttttttcgggggggagacagcaaagaacaaggacacaaaagccaaccgcagggaaaccccggaagcaaacgcgacagcgagcgaggaaacgaaggccggcgggagggcgaaacngcgaaacgaagagggacaagaacgcacaggaaaccaaaccggncgcccccaaccacgacgacccgagggagagaacgagaaccaggcacgccggaacaggaccaacacagccgagccg

SEQ ID NO: 189254 - DNA, 431 bp, Arabidopsis thaliana
gcgtccgaggataacaccaacattcgacgagaggaaatccaacagcgacgattctggtggccgatccagtcagatcagctatacactggcggacacgcaagctgaaacagccccgggcctggaacggacataggagaccggctatgggcggaacccagcctcgcaaacagcgagtttttatcgacggaggcgcaacggcaagaagcaacgcaagcggcgatggcccgccaactgcggtccgaatctgcaagagcccgacgaagacagacttcgacacgctcctcaagcacaaaaacgatgagcaacgaacgaccctacagagcatcacattgagcgagctggtgggggagcccacccagagaaggtgctttcccggaaaattaaaaagcgaaaccatctaaacccgaaaaagggcggcgcccacccaagca

SEQ ID NO: 189255 - DNA, 395 bp, Arabidopsis thaliana
gtcgaccaaattcatttatattcccaaaggacaacatacagaaggtccaagaagagtacaagcgaattaaacggcccaaactaaaaacataattaacattaacatatcatgataattatgagttagcatatgacacgtggagaagacgtatttcccttgaaaccacgcgtcttttcatgaagcaccaccgtctgtaattcgccgctcatctcccaagcgctgattagccgtcgcgtgtcagccctagaacgctggggtcttcattccttctgccgatcttcaatcctgcatgagatagcaccgaaatctaccgggtttagatgaaatcgctttaaaatttctccggaaagcaccaactctggggaggctccaccaccagctacacccaatttgat

SEQ ID NO: 189256 - DNA, 237 bp, Arabidopsis thaliana
ggggtaccagtggtacctgttttggaagaccaaggtggctcaatcttcccgaaggaccgcctagttactaaactaaaataaccaagccataccacgcgggagatggcagaggttctccgtatcaacagacagcgcgtgtgccccattaacgcacccactgacgtcctccatgcatatctgtatcagcggagtttttaggctcaccgacgatcgcgcgaagcaatcatcgctgcgtct

SEQ ID NO: 189257 - DNA, 447 bp, Arabidopsis thaliana
  unsure (1)..(447): unsure at all n locations
gcgtgcgacaaggaagagaggaaggctcaaggggacggggaagccccagcaaaagaaacgacggagacaccggggagggcccgcacccacgaacaacgccaaccacccacaggacgagaagcacgagacgacgaacacagggcgggcccaaccagaacgagcaacgcccgcacgcacacggaacaacagagggnctaaaaaaagagggagacagacccaaaccagacacncggacccgaacggaaacacacacaaccaagagacggggaggcgggaaaaaacaaaggcacccggcaacaaacagcaccaaaggcgaggacgcaaaaaccaaccaaacaagaccagggcancaaaccacacaccaccaacgccagcaacaggcaaaaccacgcgcccacacgacaacacaacacgcccaagcacccccaaagaacacacaacaaccaa

SEQ ID NO: 189258 - DNA, 493 bp, Arabidopsis thaliana
  unsure (1)..(493): unsure at all n locations
aaaagggacaggacttttaacgggggggacccgcgggcacaaaacaagggccggaaanggggaagcaaaccgaaagcaaacgaagaacaacaggcaagcaaaaagcgggcaaggccaaaaaaacgcagggagccacacccagggcaggagacaaggaacacaaagcacaacttttttttttggaggggcgaaaagcaggaggggcaaaaacggaaganaagactaccggaacaacccggaccaaacgcgggggagcagcagccgacaaaacacaggaagaaaaaagccacgggaagacaccaacccaaccaggagcgcgagcgcagacggcaccagaaacgggccagcagacgcccggggccggacgcacgaacagaaccaaaccgacacaaaacgcacccagagcaccaagaaacgcacacacacacacaagcgagcacggacaccgacaacagaccgcccgaagaagacaaaaccccacaacgcggcaaag

SEQ ID NO: 189259 - DNA, 390 bp, Arabidopsis thaliana
cccccccgcgacaaagagacaaccctccggggggaaccggcccaccccaccccccaggggggaacgaccgaccgagcaagggcacagaacagagaccacaggaccagaagaaaaacccggcacgagccccgccccccccaaatagtgaagggggaggccacaacccagaccgacaccaggagccgccccacagggggggggggagagacgccccgccacccgcaagggaccaccgaacacgccgcgaccacagcaagcagccgcgccacagcgacacccaaccccccgagggcaagcccaacacccccgcaagacagacgccaagccccgcacaacgggaccaccccgggagccagcgcgagaaaccccacccgcgcacgcgacgcagaa

SEQ ID NO: 189260 - DNA, 369 bp, Arabidopsis thaliana
cgaccccctccgttgggctggtttcgcagagaaactagactttgcagaagcgcctgagttgcaaatctctcaggaggaaagccacattccggactcgtccacattccacactctcacgcaatatgcccccccaattttttttagcggccccacccccacccaccccccaaaatcccacagttttcccacggccaccccgcctcgcgttgggcgacccttaggcattcaacatatacagaggcccgtaaagcccggcccctacctaacccccccccccgcactccatccatgaaaccggccatcaccagcctccccaaccgctttactaacacacccctaccccgcccacccccccgaccccacaagcag

SEQ ID NO: 189261 - DNA, 509 bp, Arabidopsis thaliana
  unsure (1)..(509): unsure at all n locations
cccccttccngagaaatgggggaaaattttaaaagggggtgaaggcctaatttaaggagctgttttgtggccgacccaggagaaaggcgtgttctgccctcttaacagcaaacttgagactcgcgatatactttattgaggagaccctccccgctcgccaaccccacagggggagccccccgcgcgctattttttttttggggggggagcaccccacccagcgcnagcgcggcgcggagggagacaccggcggcgcgacccccaccggcaccgcgaggaaccaacgagaacaaccgagagcgccgcaacccacccagacgggcgccaccgcaccaacacgcaccacggcccccacgccgccgcccgccgccacccccgcgcggcccggcccacccccccccccgccgcagactcaccaaaggcccagcgcagacaggagcggcgacccccacgacacccaccccggcgagcaaccgccaccaacgacccccaagcgcggccgacgacgg

SEQ ID NO: 189262 - DNA, 495 bp, Arabidopsis thaliana
ccggctcgacccacgccttccgtccatttttccaaaattgcccctcgtttcaccccccaaccaactaagggatcagccccaggtgggttgtaaaacaatcaccattctccttaccgccgtcaggatcattcgggaatatggatgaacaaccgtttaatcccccatctataccattcggaaaacccttagcccaaggcctttgtttacccccctgaacaacctaggcctgtttctaaacgctttgagcaggccaaaccacgcgatgagaaagacaagcttggaccgtttaaacccggtggagggcctccaggaggaatggggaggactcgttctagcggtggaggagctcaaccggtcatagatcagctcgaggagatgctccggatggggacccgcgcgccccgagaatttcgtcctgctgtacgatggtatgctcttgcaaagagtccgccggtgaggatagttgtccgaggaaaaggccgccgaaccgaagat

SEQ ID NO: 189263 - DNA, 349 bp, Arabidopsis thaliana
gcgtaagatctcttgaataataaaatttacatgaatatatatatttgtaaattagtaagaatatttatagacatatttaccaaagaacatcataatgaaaaataattatcctgttttattgccacgatttaagatttagacaatgcagtactaacaaacaaaacaaagacactgcagatatgtcggcaaagccagtgattttgtcttttcttcaaatttcatgttaaccatatgccacattgcttctatgataaacaacaaacagattatacatttctttttggttattttttagggaaatgggtaaagtgcagaagcattcttcgatctccatcatacagagacgaca

SEQ ID NO: 189264 - DNA, 446 bp, Arabidopsis thaliana
acgaaatatctttgaaattaactgtacaaccacaacaagggaagaaaacaaagagaaaaaagactatcaagagtcttctcaatacatgaccgacagaccgagacacacaatcaagagaggctcaaaacaacggaattgcgtcaaataccaaaaaacttataacaaacttcaaacgcaaacgcttctaatcgccaacatgcaacgagatgattgctatgttcaatcaagtatatacccgtactagctttcagctatgggtttgatcttgttcttcttcagctttgcgtgtgcaccaacaacagtattccgaaatagccccgtcttctcctgtgatccatggatgctccgccacagctttcaacgtcatcctctggtttggatcttggcaaaggagaccttcgatcaagtcccttagacgaggattgagtccttccggtattatcaac

SEQ ID NO: 189265 - DNA, 389 bp, Arabidopsis thaliana
agcggccgcccttttttttttttttttttttttttttttattattttttttttttccaacatataagcagggggggtttcagggtttttttggtgggaaacagttgaagaagatttgattattatgttttttccatttagtaaaagacaaggaagcttggggtcaacataaaaattttttaacccatacccttgggtttccaaccagcaattacatcctttgtttccgcccgggtgtccgggaatgattccctcgagaaaacattctccatgtaggatttgccgaagggaagtgaatttggaacagaccagtttttgtaatgtcccaatgcaattttaatggggtataactttggggccaaggacaaatttgttgccgggatctttttt

SEQ ID NO: 189266 - DNA, 470 bp, Arabidopsis thaliana
  unsure (1)..(470): unsure at all n locations
agcnnggaacccccagagcggtcgcccgggggggaaaacccccnacaaacaaaaacgcggcgaggggggggggacaaaccccaccacaaaaggggacncgagaccgcccaaaaacgcaccacaaggaagggggggaacaacccacaaacaaaagagagccaaaccaccgagaagaaattcctcaaggggagaggaaaccacagaagcccgcgggaccaaaaaaaaaaagccgagcccccaaggagcggcgacaaaccaaaaccgcgaggccgaaccaaaccaaaaagggaacagacagccggcggaacaccaagggagggaaaccacccaagcccgcaaaaaacacacgcggacaccgaccccacaaaaaaagacacgggccagccgcgaccggcccgagcaaagaaagaaagggccccaaaaaccccgccgaccccaaggccggacggagggcgagacccacaaaaaaa

SEQ ID NO: 189267 - DNA, 355 bp, Arabidopsis thaliana
  unsure (1)..(355): unsure at all n locations
gacccaagcggnngaaaaaaaaaaaaagatttanaggggagggaaaacccgaaacgaaagagggagcgcaacagccgggggggcccccaccaaacgcgcccgccgcccccacaccgccgccggaacggcaccgcccacgaccagaggcggaccccaacggacagcccccccgcccaaaagccgaaaggaagccgttttttttttcacgggcgcggccaccacgacgccagccaagacccacccgccccgcaaagcgacagaacgcgcgccgcgcgagcaccacacgaggggagagaggccggccccaggaggagaacgcacggcccacacaacgaagacgcccaccacgcacgcc

SEQ ID NO: 189268 - DNA, 508 bp, Arabidopsis thaliana
ctgcaggtaccggtttccggattcccgggtcgacccacgcgtccgcgacctcaaaaatctctcaacaacacacaaaaagatccaaattccaaaatcatcctctccctccatttcggacgaccctctaaattcttttgtctaccggaaaattttcgattggatccaaattttctggcgcctaatttatcgatttggttttctattgtcattttcttttcacaggtcactcgattttctccattttcttttcatttgggactctcttctcgccgtcgccatcaccggagataaattccgtggtgctgcgtttggccttaccaaaatttgagatctcaattgaagaaagaaacatagcgaagaagaagacgatcaaggaattgaaattagattctgatatctctctatcatcttcaatttttttaatttgattgttttcaccaaaaaaacaaaaactatgaacacgacgttacgttacgatccgagacagatctcgaggcaaacgaaaccg

SEQ ID NO: 189269 - DNA, 484 bp, Arabidopsis thaliana
acgcaccccgaccgaagcctggaacccctaaagcttgccgccctttttttttttttttttttttaaaaaaaccctcggccgtgggtaatttgtgttaaatcctttaccattattttaattcaaaaaccggaaaaatcaatttttaagcccaaagaaaaccattgggattttaacatttcccccaaaagggcaaatttcttatttaatttttgaaaagaaccacagggagaatcaaaaaacaccttccttatcctttacttccttattagaaacccaccaccggcccacttctttatggacttttgggttttctcaccaaggggaagtaacacaattggccaccaatttttaaaacatggtggattaaacacacggccgaaacgtgttcttgtgtggccaccatatttccaaatgggaaggtcctcggcctgtggctgggttcaccaatgatacacacagttcttttttacggaacacacggggg

SEQ ID NO: 189270 - DNA, 431 bp, Arabidopsis thaliana
cccttctactggagaaaacccggcaggcggagggagggaaaaaccagctttcggaagttacgccccctgtctatcgctccaacctctttcgggtggagagcgggcaccgttcgaggccgaccttgggaaggaggaaccgggagatacctcctttttgagggggggagaaagaagaacaaggcccccacgaaaccgggcaagagcccacgagggggcccccgcgccaacgggagagggagagggcggggccggcgacgccggaggggggggggggcggaccaggcgcagacgcgccacgcgcggcgggaagagacggagcaagggggggccccacaacagaacgacaagccaccccgagcgagagcgagggggcagcccggcgggccgcgccggggaggaacgagagggcagggagaaagaagaaggaggaa

SEQ ID NO: 189271 - DNA, 469 bp, Arabidopsis thaliana
  unsure (1)..(469): unsure at all n locations
cgaagcnngggaccccagagcggccgccggagggaaacanaccaaaaaacacaacagacaagggggggagaccccaaccaaaccacggaagcaaggaaacacacaaccccaaaaagaggaagaacaacagcaccgggccaagccgcgcaccaccagaaagacgagaccacgccaaaccctctaaaaagggggggaaaacaccaccacgaggcgagagacggaaaccacaggggcggcacacgcagcaacccacacaaaccacagccgaaaaagacgacccaaccaaagaacagcccacggagcaaagcccgagaaagaaagggcgcgggacacgacacaaggccgcacacaagagagagacgccgaccgcacaaggcacgggccccacgcgacccgagcagcccgccacaccacgacaacacacaacaacgcaaagcacaacgacgcgagaaacgacgggcgccacagc

SEQ ID NO: 189272 - DNA, 356 bp, Arabidopsis thaliana
  unsure (1)..(356): unsure at all n locations
ttttagggggggggggaacgctaacccagacaancaagccaaacccgggccgccaagctatttcaaaatggaccggaaccaggtggcattgaccttgaaagcccagattcgggtgggtggttgtgttaatgcggatgatttacgcagagggccaggaaaaattcctccatttgggggggggggacggaaggagccagaccacagcgaaaccaacggaacccaacacacacaccacggcacgagaacgcgaacgccggggggggcgcgggcagccgggcgcggaacgagcaggaacgggggagcgagcgacgagcaaaggaggcgcaccgagcgccggcagaaggcgcgccagccca

SEQ ID NO: 189273 - DNA, 420 bp, Arabidopsis thaliana
  unsure (1)..(420): unsure at all n locations
cccccgaccnaagccngggacccccaaaagggtgcggcccccgggaaagtcccctacaacgaaaacgaaggccgaaaaggggaaacccaggaaaaggctcaccaaccccaccgaggaaaccacgaccaccaggtgcaacaagaaccccaccacaggcggaccaccgagcaaaaaaaacgcgagcgaaaattctgtctttgggggggccacagagccaacggggggcgagagacaaggaccgcgggaaaaaggaggcccacgggaaagaaacccaccccggaggggaaagcacaaacggaaacacggcaggaccagggcgggggcggggggacaacggcgaaacaaacaaccgggcagcggggcgcagaccgcccggcacgcaggaagagcaagcgcggcgcgggcagcgcccagggaaca

SEQ ID NO: 189274 - DNA, 558 bp, Arabidopsis thaliana
  unsure (1)..(558): unsure at all n locations
gaccggaaagcngggaaccccaaaaagggtccgcccggggggaaaacgcccaccaaaacaaaaaacccacgcgagaaagggggggagccccgccacgcgcgcggcggccgcaccgcacggcgagaacggagaggcacgggcggaaaagaagagacacacacccggggagaaacacaacccggaccgacacacacaccggagaaaacggcacccctacaagaggggggggggacgcacaaaccccgccggcaagaaagacgagcagcagagcgacgacggaggggcgggggggggccgaaagcacgcgggcgcccaccgggcggcgacaagcggggaaaagcgggggcggcacggaggagaaccacgaaccgcgagacccgcgcaccccccgcagaacagcgcggccgaaagaacgacagccgcgcacccgcggcgcacagcccacacgcccacgcccaaccccgcgcgagcgccccgacccagcacagcgggccgacaacgcaaacggggaggggccgagccccgccggacanacagcacgagaacacccccccccgc

SEQ ID NO: 189275 - DNA, 541 bp, Arabidopsis thaliana
  unsure (1)..(541): unsure at all n locations
cttagggggaaccacccccaccgaaagcagggaccccnaaagctgtgccgccccggcggaaaactcttccccaatcaccccaaaccgaaaacgagggaggggagccccccaaagcgcaccgaaacgcacgcaacagcaaaacctacggaacaacagaacaaaaaagacaccccaacaaagccggggagcgcaggggccgcgcggaactctttctttaagaggggggggcgaaaaaaaccggcgcgcgggacccacagaaaacagggcaaaaaaaacacggcaagagagagaaaaaagaacccaccccaccgcaaaaaccaccccgaacaacccagaaaaaagggcaccacccggagccccaaagagcaaaaacccggaccacaacaaacgaagacgccagcgcacaaagcacccccccgcagaacccgggcgagaaaagagaagccgagccgggagaagacacgagcgcggccagaaaaaagcagggagccacccaggaggcgcggcgaaaagagaacccgggaccacccccagaaaccag

SEQ ID NO: 189276 - DNA, 411 bp, Arabidopsis thaliana
  unsure (1)..(411): unsure at all n locations
gagggaaaaacccagncaaaggaaaccggccggcaagggcgagcaaaaaccgccggagagagaaaaccccaaggaaagaaaccccccccaggcagaaacgggccggggacaacagcaaaccgaaggaaacaggcacgggacgggatttcctctttttgggggggggaagaaaaacggcaagaggaccaagacaaagcacgcacgaaccgacgcaggcaccgcgccacagaaaaacgagccacacacgcgccgccacccgcgaacggagagagaagccccacccccccccccgccccacagaacgagcccacacaacacgcaacccacacacaccccaaaagaaacaaccacacacacaaacacaaccagcacccaccggcccagcccgacgacgccggcgaaaaaaaccac

SEQ ID NO: 189277 - DNA, 470 bp, Arabidopsis thaliana
cgtagcctgggacccttaaaaccgtccgccctttttttattttttttttaaatttttttttttttaagaaaacctgggtattccatccaattggggtatggcctcattccaaaaaaaggaatggtttgggttaaaaaaacccccccaattccccaaaacccatttttaaaaaaaaaacccccttttttattttaagggggcgggacccaaaccaacaaccagaagggaaaccaaagaaaccccaggaggaccaccaccccccccgggaaagccccccaaaaaaaccccaaagggggcaaaaaacgccccaggaaaaggacacacagacggaaaaggcggcccccccgggggggaaaaaccaaacccaaaaccgaccaaggcgggccaccaccccccaaaaggcccccgaacccaaacaagaaaggggaaggcccccgggccacagcccagacggcccaaaaaaccaaggc

SEQ ID NO: 189278 - DNA, 287 bp, Arabidopsis thaliana
  unsure (1)..(287): unsure at all n locations
agttcttttagggggaacgcacgcgnacgtaagcnnggggacctctagagcggttcgccttggggttttttcttcatataagctttttcttattattacgaaggatatacatctaaaatgggttgtgaagacttctaaagagcttcatgtacaccagtgatgtacataagcatgagtattactttgacagctactaccaaagactaacacatttctattttggaggggaaaagggcggaccagggaagaggagacccaangaacaggggagacaggagcgggacaag

SEQ ID NO: 189279 - DNA, 470 bp, Arabidopsis thaliana
  unsure (1)..(470): unsure at all n locations
cacgcgacgaagctggggacccagagcgtcgccgggggaaaaccccncaacacaagagcgaccgggagggggaacggggccccncaaagggggaaaccaccgaccgaaacgggggaaaagcgggaaggggaaaaaaccccccccgagggggcgccaccccggcaccaagggaccnttcnttgggggggggcaacgggcaccaacacaaaaaacaaaaaccccaagggggcccacggagaggcggaaggaaccacagccagccaccccgcagaaaggaagaaggcaaccaaccggggagggggggcaaaccggcccccgggagaaaacgccggcgccaaaagaaccccaccccaccggaaaacggggggaaaccagggccccgcggaacgggggaaggaaaaacgcccgaggaagagaaaaaaccccgggaacccgacggagacgggaaaaaacggaccaagagaaaaaca

SEQ ID NO: 189280 - DNA, 475 bp, Arabidopsis thaliana
  unsure (1)..(475): unsure at all n locations
accgaaggcggggacccccagagggtttcgccgggggggtaattttncccaaaaccaccctgaatggaaaaaaagggggggccttccaancaaatttaaaatccatcctttggattattaagaaccagttttttttttagtttggaattcccttttcaaaatccggtcggtaggaaccataaaatttcctcataaggggggggggaccaccaggaaaggggaaaggaaaaaaccggggccagaactgggggggggccgagggaaaacccggaaccgccccgcgcggacccccacccccaaaaggaacccccggaccccgcgcgggaagcccagggcccggggcccggacaccaccaggaaaaccgcccccggggaagagccccggcccgccggggaggccccaccgccaccgggacccgcggaaaagcgccggggggaggcggaggggcccaacgcccccggggggcgccaaaac

SEQ ID NO: 189281 - DNA, 224 bp, Arabidopsis thaliana
  unsure (1)..(224): unsure at all n locations
gggncccaaaagttcgggcggccgggaaaccccccacaaaaaaaaagacacccccccaccaaagggggaacaacgaggcgcaaaaccacgcagacccacagcacgcacccaccagcgcaacccgagacgacgccnacacgacgaaaccgccacgagaaccgcgaaccgcccgcgagaacccgaaaaaacgaaacagaaagccgcgacacgaagagcccccgaaa

SEQ ID NO: 189282 - DNA, 215 bp, Arabidopsis thaliana
acctctaagagtgttccggcctttttttttttcttatcttaaaccggcaggtgcgaagtcaccgcaggtgcgagaatcggacacgcgagtccccacggcccacgcctcctcccaacattggcggggtagactcaaaatcccagtctcaccggctaaaacccatcgctttatgacacatagaagagacacccccccttttctttttttttgagggg

SEQ ID NO: 189283 - DNA, 462 bp, Arabidopsis thaliana
  unsure (1)..(462): unsure at all n locations
agcnngggaccccnagagcgttcgccctttggtaaaccttcaagcggaaaagacaatgcccactataggagggcgaccggggagaaccgacccccacaaagcgcggtgcagaacacccagaaaaaacgacaccacccaaaggaaccaagcggaggcaaagaagaacacgccccagcggctttcctatttggaggaggggggaaaccccgaacgcacgcaccgcagccagaacgctgcgatcaaagcgggcggtcgctgcaaagaaacaagcgaaagggccaaaccccaacctgacccggcccctccccgaagaaagaaaaacggncgccgaccgcacaacaacaaacagacagaccgaaggcgagcggaggagaaacggaacggggaacacacaaacacccgcaccgccccccgctacacgacgcgcatagcaaccgcccgcgggagaccaaaccggcactc

SEQ ID NO: 189284 - DNA, 440 bp, Arabidopsis thaliana
cccccgaccgtaagctgggatcctctaaagcgtccgcccttttttttttttttttttttttgcaggaccgaccaaaggggggccccggttttaaaacaaactaggattcccaatccctttccaataacaaaaacttataaaaaaagccgaaatccttcctttttgaagggcttaacagcatgggggagcaaatttctaattacgagggaaggccaaacaactggctaggcacacattctgaaccccggtggcctccgggtttgtttatccgaggttgaaaaaaaaaaaaaaatccgtgatcaaaatccaggtatacaagggcataacagctgcttcaccatagggcccaccccacaaaatccagttgttataccaacaaggggccctggtggaaaaacactcgggatcccaaactgaatcgaggggttataaccattcac

SEQ ID NO: 189285 - DNA, 219 bp, Arabidopsis thaliana
  unsure (1)..(219): unsure at all n locations
ggagttttgggggacgccgcgacgaaggggacccagagcggcgccgnngaaaccaacaactgaaaataacacaagttaaccaaacaatgagagtcaacacacccaacacacctgaaacacagcccaacatacacaaccagaaccacaggaaagattttttgggaaggggaacccccnaacnaaaacnnggcgaagccnncccncacgacagaagagaac

SEQ ID NO: 189286 - DNA, 507 bp, Arabidopsis thaliana
  unsure (1)..(507): unsure at all n locations
gggggggagaagaaaaagaggtttagagggggaggaaaaacgcccagacaacggacaggagccccccgcagggggaggagcacagcaacggggcgcaggaaagccaccagagacccgccagagagccccacaggggagaccgcggggaaaacgacgacacagcgcgcgcgacgagcgccaacccggaagggnctccctaaggggggggcgcgcaaaacagagccgccacgcggcggccgaaaagggagagcccaggggggggggggccggaagaagaacagagagcgcgcgccccgaggaccgcaaaaacagccacagacgggcggggcgaagcgggaggacgcgcgcgaggacgcggggggcggaaagggcgcccggcgaagaccccaagccggacaggagcggggggggagggagaggacggccacagcagaggaagcgcagcagcgaaagcggggccgcgcgcgggaggcgggcggcgaaggaggagggagcacacaacgagga

SEQ ID NO: 189287 - DNA, 477 bp, Arabidopsis thaliana
ccacgcgtccgcaatagactggaatgcttttagaacatacgcaaaggtcgacaacgatgataacagcaggattaaggcaacccaattctctcttctccttctaaactaaatccatcgacaggacacaaccttcacgaacgaaaggggtctctacctcgtcctcttccttagatgctaactcacccgctgctccatttgaggggaacaggaaaggcgcaagccctacagaaagacgacccccgaggcaacaaggaagaagccaggaagaagaagaaaggggcaccccaccaagacgaaagccccaccggccacgaaggaaacaaacccgaaacgaaagcgagagggcacagggaagcacgctagggcacccaaggcagccacaccgaaccggacaaaacggaaccccacggaaaaaaaggcgccaacgacgcagacaagggcgccgacagagaaggcacagaggaacacccgaagggg

SEQ ID NO: 189288 - DNA, 357 bp, Arabidopsis thaliana
  unsure (1)..(357): unsure at all n locations
tgacgtcgcatgcacgcgtacgtaagcttgggatccctctagagcgggcggcccttnntttttttttttttttttttttttttaaaccaatgggagccccggtttcaaaaccaaccttgggtttaaaattccgtttccattcccaagaattattaaaccaaggggtattggagcttttggcggtttttcaggcttggagggtaaatttttttttccccaaaatggtcaaccaatggattggtacgttattttcaatggctttgggactaggttttttttatccggggtggaaaaatccaattaatccggtgtaaggtcccattttccttaggtgtaaattggtcctttaccattttt

SEQ ID NO: 189289 - DNA, 208 bp, Arabidopsis thaliana
  unsure (1)..(208): unsure at all n locations
gacccangctgtncgaagagaaaaggagaatttcaactcggattcaaatatcctgctcgaatgcgggatcaagtaatgatcggcgtagaggctgataagagggatacgcgaagatcgagaggacatagaacggaggtggcagccgagatcttagaggggggggactggaagggagcaaggcaagcggcggtgccgaagggaggagcaa

SEQ ID NO: 189290 - DNA, 463 bp, Arabidopsis thaliana
  unsure (1)..(463): unsure at all n locations
gcgtacgtaagcttggatcctctagagcggttcgcctttttttttttttttttttttttaccacaaaaaaaatcttccccattttattagaatttcgttgggtttaccttaaacttggagcccaaaccggaagggttcagtattcaaccccccattgtaccaaaacttccttaccaaccttggggggattttttttttacgggtgggttgaactaacgccatggttttttatcanggtaaaggactcgtttgtggaacccccattctttgcattcccagaagaaaagtttcatgaaaggacttgcttaattccattcccagctttagcattaaaaaatacttgacccttgaatctcaaaaatattcttaggagacaacatttttttttgataatccaaaattgcccctaaggggtccttctgaagcaacctttatggtgccttgacgtctcattacaatgctt

SEQ ID NO: 189291 - DNA, 482 bp, Arabidopsis thaliana
cgcacgcgtacgtaagcttggatccctctagagcggtgcgcctttttttttttttttttttttttcaaaaacatacttctttgattaggaaaactcaaaaaattaccataggggttgttacccggaagaaggagaagagaaaaggatggcttaaaaacgatctggattaacaatttaccatggggggaataaagtttctttggatgggaaccaccgaacattaaaaggcattaccttaaatcattcaaccaagaattggttttaatcatggagggtggcaccgccaaaaattgggtggatcaaattggatgacttgggccaataccggcgatatttggaccttggcaacctccaccctgggttcaatgttcccgctatggtggacccactgctgcatcctcaaggcccgtctggccaaactcggggtattttccaagtccaagacattgcacccctggttaaagggatgggtgattccgaaa

SEQ ID NO: 189292 - DNA, 440 bp, Arabidopsis thaliana
  unsure (1)..(440): unsure at all n locations
tccgagaagaaaagagaaaggtttccnccggaggcaaaaagccccanggaagccggaacatacaaaccacggcaagaagcccaaaggggaacggcaaaaccgaaaaacacaaccgaanngnaccaaaacctccaggcccgactaaaggacagccaggggcaggggggggagcacaccggtgtttattttccgcggagggcccaggaaaaacgaagagccaggggccaagccaggccaaaagcaaaaaggcagacaccggacggcaggcggggaaccggaaagcggagagcacngctgcagacggccgacaaacacccgaggagcgaaaagaagcaaaggacaggaagggcgcagggagcaccagaaaccacaccaaagccaagccaaagccgaccaacgcgcccgacgaaccgacacaaacggccgcccccggaaaaaag

SEQ ID NO: 189293 - DNA, 467 bp, Arabidopsis thaliana
gaacccctaaaagtgtccgcccttttgtttttttttaattaaaaccttccgccaattcaatttcctaaatcaaaaaccaaaatggtttaccaaatattttaaaataccggaaacctttttaataaatcgtttaaaaaaataccatttttggaaaataattctggaggttcccaaattctcctttaggcaggacggactggaccgactccacacaattctaaatgggacctttcctagggacaacaaaaagtcccgggttttccttaacacttcctttacgggtatccaccgcggttgggtctaattatgctcgggggggaccaaaaccgcctcttaaaacccttaaaagaaaactggaacggggaaccaaaattggctcctttgtgctgtcctaaagacttaccagcgacccaacactcagatctggttcttctaagacccggcggaaaataaatctttaaaccctc

SEQ ID NO: 189294 - DNA, 493 bp, Arabidopsis thaliana
tacccggttcggaatttccggggtccaaccacgcgtccccttggaccagtttaaggggaaagaccaaaactggccttgttaaaccttggtagcttttttggaagaacatgaactggagtccttggcttcttttgcttccattctgcccttttggatttcttaagttatttggaacctaaaaaaaagtttgattgaagggaaggaccttcgcttccaccggttattaagtcaaccattggttttaacacttaggcaaaaaaggggtcttaaaaggtggttatttttggccattcaccggcctcttttttccccaccttcggtggattggcatggcaccggaaagctctttcttggaattggaaagggtgaaaccaaaaatggcgtacctatggaaccagttgaaatcattcctttgaaaattgaaggatctgttcctgtaaaaaaggaagaagtcattcttctcaggccgctcgtaaggggccattctgctcca

SEQ ID NO: 189295 - DNA, 456 bp, Arabidopsis thaliana
  unsure (1)..(456): unsure at all n locations
ggaagaaaacaaaaagccttagccagggggggaaagccgttccacaaagaaaagccccccacgcacgggcccggccgaaaacggcaaagaaaagccccccaagaacaagcaaagcgcggccgaagagggccccaaaggagacaagaacaccgacgaaggcccgcggccagccgccgctccctcnttaaggggggggccccaacgaaaagaccagcaccgccacagcaaagccggaccgccgctgaggcggaacggaacccggacacaacacgccccacacccgaggccccaaaaaaccaaagaaaacgcccagcccccccaggcccccccaaacacacccgaacaaccaacacaaagaccaaccgaggcgccgcccaaagccagcccgagaagccccaaggaaccaaaaaggcccgaccaagccggaagagccacaaggagaccagaggaggccca

SEQ ID NO: 189296 - DNA, 489 bp, Arabidopsis thaliana
gcccagcgtccgaaaaaaaaaagaaattttcagggggagcaaatccggcgaggaaaagagcaacaccttcgttagactctgagatggctccaaacggcggctcaggcgtgccatcccaaagtttagaaccacaagcacgaggacagcctgcaagagagagagagggccggaggcccgcaggaaagggggatttctccttttggggggcggccacggactaacgagcgcgggggcccgcccgaggagcgccaagaaaggaggacggaaaggaacagaatcgagtagcacaacgcccacgcaaaccccggatagcaatgctggcggggagtggctacccgagcgcaacatgccctgctctacaggagccctcaccgggagataacaaggcggcggcccccccggacctggtatgttagtgcgaacagagaagtaggagagacaaacgcggacgagaccagctcacggtcagcgtggttgacgacacgatgg

SEQ ID NO: 189297 - DNA, 211 bp, Arabidopsis thaliana
gtttttagcaattcgcggcccggttcggggtcccagctcgaccccgcgtccgggactataagacagagatgatggtccatttgtgggagtgctgtgtcggtcgaaaataccgcttcagaaggtcaataccaggttgatggtgatgcttcgaatagtagacgggttgttgagcgcagacgacgcacgcgtccctttagctataataatcatc

SEQ ID NO: 189298 - DNA, 372 bp, Arabidopsis thaliana
aaaaacaacaacaacacccacaaaccccacccaaaacaacacaaacccacaccaccaaaacgaccccaccaacaaaacaccaccacccccccacaaccccaccacacaccttttttttttacaaggagcccccgcaacgcgaagcgccagcgccacccccccgaccaagagagcacgcaaacgcaaggccaggaccgacgcgcgaaggcaaccaggccacgccagcgagccaccagaacgaaacagaacagaacgacgacccccccaagcccaacacaacccgcccggacacaacgcaagaccagggagacgagaaacacaacgcggacaacaggccaagcagcgccgaacaccagcgaacaaaaacaccga

SEQ ID NO: 189299 - DNA, 406 bp, Arabidopsis thaliana
  unsure (1)..(406): unsure at all n locations
ccgccgtaccgggacccaagccgtcgcccgggaaaaccccaaccacggggaacccaaaaggggaccgcaccggcccaaaaggaaccacnaaaagaggcnccncaccccggggaccccccggccccacaaaacacacaaccccaggccagactttcttctttgagggggggagcaaaagggaacacccacacaaaaaaccccaacccgaacggcgggcgccacaaagaaaggcaaacaccagagagacggaaccccgaaaggaggaaaagccaccccacccccgcaaacccgagggccacaaaacccccaaaaaaggcgcaaagggcaccaacccaccgcacgcaacccccggcccacaacaaaaccaaagagacaccacaccgacagacgaaacacaccgcagaca

SEQ ID NO: 189300 - DNA, 430 bp, Arabidopsis thaliana
  unsure (1)..(430): unsure at all n locations
ccccgnggggagaggnaaaagggcctcacggggagggagacccagaacccggcggaaaggccaacaaccggcaccacaacaacccgagggagcacgcagcaacgcaagggagcgaccgccggcccaaagagagaccccgccccccggcagccgcacaaacgaagggcccctctaaaggcgggggcgaagggccgcagcgaccgcaacccggaaacagcccaacgcccgcgcgcccgagccgcgccccccggacgaggagccggcgagcccagagcggcgccccccagcccgccgccgagcaggccaggacggcaacggccgaagcgcgcggcacccccgagcgggaggggggcaacgggcccgccgacgcgggggcacccggcgcacacccccccgcccccacgcgacgcaccgagaaccgccggcggca

SEQ ID NO: 189301 - DNA, 467 bp, Arabidopsis thaliana
  unsure (1)..(467): unsure at all n locations
cgcgcacgtaagcngggacccacaagagctttcgcccggggggaaaacaccccnaccggaccaaaagggaaaacaanaggggcncgancaagaaaagacgggaacgaaagccacaacagaggaaacaaagggacagaaaagacgcggagacaacagaaccgcgacacaagagggagcagacaaggcnctgctccatatacgggggggaagccagaaccaaccagggacagagcagcaccagcaacgagaccacccggagaggggcacaaggagacaaacggaaacgagcacgccgcagaaaggaagaaacagaagcaaaaggcacccaaggagacccaaggcagagaaacacgaggagacggaaccgcaagacacgcacacgagcagcgagcgcccagagcggcagccacagagagggaaagagaaagaaaaaaaggaaacccgagaaaggaccaggccgcagaggc

SEQ ID NO: 189302 - DNA, 464 bp, Arabidopsis thaliana
  unsure (1)..(464): unsure at all n locations
ggnggaaggaaagggtcccgggggggcgagaaaccgcngaaacaaacaggacgaaaacccgcccggggaccaagacaaagccccccgcccagggccgcccccccaaacgcaggaaagagagaagccgcacgcgcccccggcaagaaccagaaccnaggaaaacgcgaacacaccacaaacactccctcaaaaaggggggggggaaaaacccgcaaagaggccccaaggcggacaaaagaccagcaaaaagcgcggagggggaaacccaaaaccagacaagacacgacgccacagaaaaaaggaagagacgccgcgaacgcgccgaagcgaaccaccccgcaaaaaccagcaaccgcgaccgaagggaagaagacgcggaggacgccagcgccaaagccgaaccacgccccgaaacggaaggcaagaacggcgaaacaccacggcaagagcacgcgcgcggaggc

SEQ ID NO: 189303 - DNA, 522 bp, Arabidopsis thaliana
  unsure (1)..(522): unsure at all n locations
accccgcggnggagggaagaagaagagaatanggggagggggaaaagcccgccacgaagcgacccgcggcgggggggcgggcagacccggcacacgccagcaagggcaccccaaaaacgcggacaggagagacccccacgcggaggcggagacccgcacgaacaacaacggcagccgggggcgggggcccccctcaaaaagaagaggggggcacccacaaagagggaaggcccaacaaagaaagacaaacaacaccccaaaacgcgggggagcaggaccgcgccaggccccaaaacgacccaccccaacgaaaaaacgcaaagcccccaacaaagcgaaacacaaccaaccgagaacgncaggaacacgagggcacgagaggcaacgcacggaagcccgaccgccgccagcagccgcaggacgacccagacacggacaaacaacaaggagaaaagggacgagacgccaggacgggagggaacgagacacaccccgacaaacccccgcagacggaacaagaag

SEQ ID NO: 189304 - DNA, 405 bp, Arabidopsis thaliana
  unsure (1)..(405): unsure at all n locations
aaagcgaaattaggcgggggggaaaacccggcaacagacagaaaaaaacgggccgcggcggggaggggacacaaccccacagaacgcccgggcaaagaagaggacggacgcgagaccggacacaacgccgcgagacccagacggagccgaaccgcaaaggagcagcctcctcccggaaacgggggcaacagccggaccacgcgcggaacgcgcaaacccccccgaaacgcgagggcgacggacgacagcgcgaaacccccacacagacaaaacaccgaccccgggggagcacacccgaacgcgcccacaaaggcgccaccacggaagaagaganacgaaccagaaaacggaacggagaacccccgcagacggcaaacgcaaaaaccaaccggaaaacaacacgga

SEQ ID NO: 189305 - DNA, 494 bp, Arabidopsis thaliana
cgcgtcacgtaagctgtggatcctctagagcggtcgccctttttttttttttttttttttttatttgtttcttggggatttcaccccaattcttattttttttggaaaaaaacctttcaacaccctttatttggtttcggaggaagggggaaaaacctccccaaatagggggaaccccaaaaagaaaacgtaaatacttttcccgggaggcaccccaaccagaaatggggaaattcctattggctaatggcctaagggggaggatcttcttttaaaaccacttttaatgaactctaaaaaaaagaaccggatggccggggagggaaaacccggcattaggcgggaatcaacgcccccttatggagcgggaccccctcttggttaaaggttcttaacaaagtaggccgtgggctaaaccttttaaaaagggactggctttggaaacccctttttcacaattttaaaggttttttgtgttcttcgacccccgggcc

SEQ ID NO: 189306 - DNA, 396 bp, Arabidopsis thaliana
  unsure (1)..(396): unsure at all n locations
cccgggggggggnggnggnngagtgggggggggggagcggcaaaaacaggcccgccacaagggccgggaacacacagaggcccaaccccgcgaaaagaccgccaacaccggcacacccccgagcgggagagacaccgacccaaccaaccccctcctaccgggggggaaacccagacgcccgaagcgccaacagcccaaaccggggccgggccgcggccgaacaacgagggccaacccaggagccccgcacgcgggaccccagcccccgaagcgccgcgggaagcggcgagcaggaacacccggagcagaggacgaacgggcaaggaagcccggaccgggcggcaaggcggagacgagcacgaccgcgcagcccgcggcacgagcaccaggggcggg

SEQ ID NO: 189307 - DNA, 346 bp, Arabidopsis thaliana
  unsure (1)..(346): unsure at all n locations
caaagaaactcaacgccttccggggaaagcccaggagggccaagccggccttcgaaacctgaggcaacggacccgacgggngnaggcgaatccgacgatcccaaagaaggcgcccggggactccctctcgcacacataaactccccacaccacgcgagcggagccggggcatccgaacaaaggaagcccccacattggccaccacccggccatccgaaaaccccggagccgacccggcccacggaaccaaaaccgagccctaacccaacccaacaaaagaacccacccgttgcggacaaggcacccacccccccacccaacccacaacaccacggcacggaaggaa

SEQ ID NO: 189308 - DNA, 500 bp, Arabidopsis thaliana
  unsure (1)..(500): unsure at all n locations
cgcgcacgtaagctgggaccctctagagcggtcgcccggggggtaaaaacccttgaagaaagacggaccaagaggaacggacggagagacaaagacacgggcaaaaacgacacacgaaagcagagataattcgccagaccgacagagaagagaacgcccgcgacagaaggacccccgcagacggaacggtcnctcctatagaggggggggacaggacaccgaagcacagcaagcaacccaaagcccacagaagacaacagggggggaacccagccaaaaaaagagcgggacgacacaacgcgagagcaaaggaagcgaacgaaagcaaaggacgggagcaccaagaggacacgacagacaaaaanaaaacccggaagaaccaaggaggaagacagagacagaacgaacgaaaaaggggacacaacggacaaacacacaaagcgagaaaggggagaaaggaaaccaaagaaaaaacaagaaaacgagacgacaccaacaaa

SEQ ID NO: 189309 - DNA, 409 bp, Arabidopsis thaliana
ccacgcggcgagaaagaaagaagagggtaagaggaagggggaaaacccacccagaacacaccaccgaggcggacgggaacccagacgcaaccacacgcaagaagacccaacacagcacgggaccacccaacacgcgaccgcaacgaaagacccccaacagaccagaagcgacaaagcaagccagcggccctttatttggaggggggccaaacgcagcgaacggccgaaaagcgaccacgaacaaccaaaaccggagacgccgaccgccaagccaaaaccgccgcgcgaacagcggccgggacgcacaaaacacaccacccgaccgagggcgggaacaggggccggggagagagcagggcaagaggagcgaagagcgcgcacgaaccggaccaccaaggaaaaacacaaa

SEQ ID NO: 189310 - DNA, 466 bp, Arabidopsis thaliana
  unsure (1)..(466): unsure at all n locations
cccccccgtccgggctctacaccgcaggtttactgagtcagaggacgcctccctggggaatgccaccttgttgcacgggcgcctaggttactctctgaagagaaactccaacggcgaggtgtacacaggttatgaccgaggtgattattgcgcttcgttgaaaagcaaaatgcgcgatggacaatcaggttcncttgtttggacaggctcaggacccgacaacagccggagaggaaacctatcaacagnnccctgggaaacggaaagaccactcccggccatgcagttttcggggagaccactcacgcaatgttgctgcggggacacagctaacctgctggctgccgaggttgatcatcacgcttactggaatacagccattctcggatcaaataatgaacctggctggggaacacactccatatctacaacccattgattggactgtttcccgggggtccaccca

SEQ ID NO: 189311 - DNA, 449 bp, Arabidopsis thaliana
ggaaccttagccggggggggcaaacccccaaaggaaggccgggcgacaccagccagggggccaaaccacaggcaccccagcacgggacgagacgaaagaaagagagcgagaggaaagccccacaagaacccaagcagccagcagcgagcgaagcaccaaaccggaagggaattcctctcgcgggggggaaagaaaaacgggagcgacccccagggcaccagcccgcggggaaaggggcggggcggaaccgcgcggggaaccaggcccggccgacaggagaaacacaacccgcacgaaccgggagcgcgcacacccccgcagagacagggcccacaccaaggcaaaaaggcacaaaacggaaagagcacgaaccgacgccacccgcggaggaacaaccgggaaaccacacccgggagcaggagagaaaaggggccggcacagggggaaag

SEQ ID NO: 189312 - DNA, 455 bp, Arabidopsis thaliana
  unsure (1)..(455): unsure at all n locations
cacccacaacggagcaggggaagcaacaacagccncggggagaggagagcaaccagacgggcagaagatgcaccagagccaacccccagcacgaaaccacccaagcagcaggaaccagcagggggacgctgaaaacaaggggggggaanaaaccaaccagagcaccacaagcaaccgacacaccgaagaagcggggcgggcggcagganccgcgcaaacacaagagagccccacccaaccaaaggaccagccaacccacagggcagcgcgaaccaacacgcaccaagcaaaaagaagggaggccagccgccgaaacaagaaggagcaacgaagaagacaggcggggcgcgggccggaagaaaaaaaacagacgaaagcggccgggcgcaagcaaagggaaagaaaacacaacgcaaaggaacgacccccccgccggacccagggcggggaagcca

SEQ ID NO: 189313 - DNA, 355 bp, Arabidopsis thaliana
  unsure (1)..(355): unsure at all n locations
cccccgngnggaggaaggaggaaggtccggaccgggaaaccccgaaaaggaggagacaacccccggggaacagaagagagacccccagggcaaccccaagccggaaacggaaagcaacggccccccgaccacaaagccgaaaaccgaaccaccagaacaccctcttaccaggggggagaacacccgaaagagccccagcaaccacaacgcgcaaggggcggagaggccgcgaccccggaaccccccgggcagcccccgaccccacaccccaccacccgccccaacgcccccgccggcgcgcaaagagggccccccgcgagacacacgccccgcgcgggagcaggcccaaacggcc

SEQ ID NO: 189314 - DNA, 513 bp, Arabidopsis thaliana
cgcgtacgtaagctgggatcctctagagcgttcgcccttttttttttttttttttttgacaatacgtttgaattcgttggatgaggttatattgatcacttacaataggatattgaatgtttactagttttttttatgtctggtgtaccgtagtgcttaatctatggacacgctgagaggtggaaaacagcctccattttgggggggaaggacaagccgggggggggcaaagacgacgaagcaaagaagggcgcccggggacgacccccacgggcggaacaccgcccaaccaccaccggagcaggaaagaggagacccagaacggggggagggggccacgcagggggggagaagaacaacacgaaaaagcgggaagcgaagagacgggaggggacaaagaaagcaggcagcagaccgagggaggaccaagggaaagcaccaaggaggcagaagggaggaaccaaaacaaaacacgcaccacagcaccaagacatcgcgaagaacaagaaaaaa

SEQ ID NO: 189315 - DNA, 496 bp, Arabidopsis thaliana
  unsure (1)..(496): unsure at all n locations
ccgggaagacaccacgcgcgccggggaggagaacaaccccaaacggaacgccggcaaggggcgcacacaacacccagcacagaagaccacgagccggaacacgccgccgcccccccaggaacnaccagcgacgggccgcgccagcgcgcccctccctaagacgcagggagcagcaaagcaggagagggacacaagacgagaaacacgcacggcacgagagggggagcgagacagacacaccgagacacaaagggccccggagagccgacggcaagaccaacaagcagccggggcgcgaacgacaagagggaaacccgccccgggcgaaagagggagcgacccgcgacggccacagcggacccacgagacacggaaacgacaccaaggccaaccccgaaagggccggaaccagccacccggcgcggggacgcgcgccacacaccccgcgcgcgccacccaggacacccgacaaagacagcacagcgggaaagggaag

SEQ ID NO: 189316 - DNA, 491 bp, Arabidopsis thaliana
  unsure (1)..(491): unsure at all n locations
cgcgtacgtaagcttggatcctctagagctgtcgccctttttttttttttttttgattaagaactactccgtattattgaaaatactctgtatattcttgaggcttttgaaagcatgggacgaaaaagtaagaaatacaaatagtactccagcatgagcatgcgtctcgaaatatgaaattaagnttaccctcccttctgagccacagcnntatgacaaggatnaggcaaatacgacccttcatgtgacacaaagtccacaataaaaccaaatgatccaacaatcatcatagagatgctcaaaggattagtatcggtgaatgagtagcttatatgcatccggattcttcaaataataactcgacctcagacttacggactccttttatggcaactaaaagcttttgtccgagcaaatagcggagaactttgactttaaacaaagcttaacagctattgagagcgtatccagaaaactgaacaatgaaaaaa

SEQ ID NO: 189317 - DNA, 496 bp, Arabidopsis thaliana
gaggccggacccgccccacccgtccggagggacattgggggagtaaggagagtttaaattgggaaaaaaggggtgggtttggggtgagcgttaacagtaatgaaaagctggggaggtcacatatggagaaggaggggagactaaaagccttttggtcaaacatagctcagcctactactttggagatggaacccattaacaacttttttagaactcgatgctgttctctctcacgcacgccaagtctctcagcctatcatcatcgaatggatggcttcttggtgtcgaaaatgtatttacttgaagcctaagttggagaaattagcggcagaatataataaccgagcaaagttttactatgtggatgtaaacaaggtccctcaaaccttggtgaaacgaggaaacatttcgaaaatgcccactattcaggtatggttactttcttggaatacatgcaactttattgttttgagtaccttgcgatgcatttgacaat

SEQ ID NO: 189318 - DNA, 433 bp, Arabidopsis thaliana
  unsure (1)..(433): unsure at all n locations
acaaaacaacccccagacaacaaaggccggggaagaacaaccaaggagacccccccgaaggggggcaaaaaaccggacccaaccaagggaggcccaaccccccagagaaaaccaaaaaaaaaacacaagggccactccttttgtttttaggagggaaaaagaacgagggccaaagccaaaaacaccaaaaccggaacccggggaaaaaggcgggaaaaccacgaaagagacaacgcccgaggcacgcgcgcccaccaccaaaacacaggcacggggaaaaagccccccccccccaccgagaagaaaagggcaacccncgcaaccccaagaaaaggggacccaaagaggggccccccaaaccccaaagccccacaaagagaaacacgccggaagaaaccagaaaggagcggaggaagacaaaggagaaccccca

SEQ ID NO: 189319 - DNA, 411 bp, Arabidopsis thaliana
  unsure (1)..(411): unsure at all n locations
cacaggaccaccaggcgcgaaagcaccgaggagaagagcggacccgaggaaaagccaccaacgacaaaaacgcaggagaggaggacnaagccgccggacaggaaaccacagagacagcccgaaaagggacattttttctgcgggggaggggggagaccaccccacacgacactggggacgaagacaaggggaaacggcgggggaggcacgcgccggcgagaaagccgcgccccggacgagcgcgcacaccgaggtacgagccgaaaacgcaactgagagaagcggaagccgaccaaaaacgcaaagggaaagggcacacccggcgccccggagacgaagaaaggggaaaccacccccacgcgccggggaaacgccccgacgcgggggcatgggaccccggcacaagcccag

SEQ ID NO: 189320 - DNA, 526 bp, Arabidopsis thaliana
  unsure (1)..(526): unsure at all n locations
ggggggggggggnggggggggggaaaacacttttggcaggagagggggagaaacccacacccaaaaagcaacggcgagaccgcccgggaggaggagaggggcacacacgggaccgccacagggcaaagcgcaaacagggagaagcacgaccgcggaaaaaaacagacgcagacgaaaccgcgaccgacgcgcaaggagcacacgcccgcgcagagaagaaatcctccttttgggggggggggggcgacccgaacagcgccccaaagcaaccgcagaccagccgcgaagaccgcccgacggggaccgcgcgacgcaagaacgggacccgcggacgcggcacgcacgacggaaaaacccaagcggcgcgaccaccgagaacccggcgccgggaaaccggcaaggcggaaagaccgcgcgccaggacgcgaaccaccgcggcaagaggaagcggggcagacccgcggcagggaggcggacgagacggcaggacggccaaaccccggcgcgagcgaggggcgagacgccg

SEQ ID NO: 189321 - DNA, 475 bp, Arabidopsis thaliana
  unsure (1)..(475): unsure at all n locations
gacccacgcgtncgggatctctaaaggagtatcggaggaaccgagaaaccgaggaggccaaagggactgccggctccgcagacggttccgactatgcgggaagaagatggagctcacagggcagcgagagaagaacaggcagacgaagctcctgcacagaagaaacgcggcgcactacacagacaacccgctcattacagacgaagccgccgaagataacgcccggaagagccacaccggccgccatgaccgacacccacacgcacacgccgaagaacaacgccgccacaccgacgagactacaacgtgccgaaggcgccacccaggagaccgcgacggacgggacagagccaagcagaagcgaccctggaaccgccccggcccgaaggaccacaaaaaatgctccacgcctgcggccccccatacacaccccccccccgcggcccccgcgcgcccgcccccccaccccaggacc

SEQ ID NO: 189322 - DNA, 567 bp, Arabidopsis thaliana
  unsure (1)..(567): unsure at all n locations
gttagctnggatcctctagagcgtttgncctgggtgagtattcctttggtgggtatttcgaacccggagaggggggtgatcttttttggaggtgagggcgcgcctggataccccgagtggttggcgggcccgattttaccgaacggcggggccgtggtggctacaccgcgaccccgggcggcggcggtgcccttcggcgccttttgtccgttttaggagggggcgcccgancgggggggaggcggaggcggggcgggggcggcgagcaggggacacaagccgcgcaccgaagaggggcgggaggagngagagaaaggaaccgaagaccgggcagccacggaagagggcgcggggcagaggngagggggaggcgggggccggcgggcgagcgggggagcgacggcagcaagcgggggcgcggaggacgggcggcagcgaggcacggcggcgagccggcccgagggcgggaggagggggcgccccgggcgcgaagggggacccagagcgcggcgccgcggccgcggcgcggagccgcgccagcagccgagagccgcgggcgcggcgaga

SEQ ID NO: 189323 - DNA, 481 bp, Arabidopsis thaliana
  unsure (1)..(481): unsure at all n locations
ccccgggnggggggaaaaaacaacggtttaaaggagcagggaaaccccaacgcaaggagcgaagagacaaacggcgggccaagagcgaagggaagcgaacagaggaacccacaccacaacgaccacagacgggaacgcccacaaaaccagcgaccgccaacagagggcgaaggggaaccgacgcaacaacgctccctaaagaaaggggggggcggacaagaagaggacgcgaacaacaccacacaacgcgcacgaaggcgcggcggccagcacaccggaacaaggggcgcggagaccacaaaggccaacacggcgcaaccacgagaagaaagggacaggcagacccaacccgcccaacaacgggaaaccacagggaaagagcccgcggcggccccaaccgggaagaaaagagagaaccaccccgacgaagaccgcggaaaagacccgccacaggaaacagggaccgaacaccaaaaggcgg

SEQ ID NO: 189324 - DNA, 476 bp, Arabidopsis thaliana
  unsure (1)..(476): unsure at all n locations
cgcgcacgaagctgggacctcaagagcggtcgccctttgttaaaacccttttttttttaaacaccaaaaggcaaacacgcggaaaaagcgagaacaaaggaagagcccggaggacccacaagggcaaggcagaggggaatcaaaagcacaccccggccaaaaggaaaacaaaaacgncccggagggtttttaatcttgagaaaaaacaaannccggggaaaggggacggaaaaaaccccccgaccaaaaagaaagggggaaggcgtgaacaccggggggtgccctaagagagaaaaagaattccgcactccccccttgaggaacgcctaaaaggaaaaaacgaaaaaaaaaacccttccccgggagagcaacggggggaaacccgtaagagaaaaagaaggacccgacgcccttttcccccccaaaaaaggtaaagaactccgccacaaaaatggcccccgcggggggtctaaaaa

SEQ ID NO: 189325 - DNA, 494 bp, Arabidopsis thaliana
  unsure (1)..(494): unsure at all n locations
cacgcgtacgtaagctgggatcctctagagcgtccgccctttttttttttcttttttccggaccaacagggtaaactataacgggctcgatcaagcaagatatctaatgaaagccttataatgatgtttcaaatgggtctgagaatatcacgattataacatgacgttttcacacacagaggtcngaacaacaaaactgtcgtccctctccaagcgggagccgccaagaacctaccctgggccaagagcaaactccttacacggggcaccaccccacaggagggagcacattggaaacgcaactgtaccagcgtaagctgcagccttagcctgtaactatggaaccaagggcttgcagagccccccttaggtgcaggacacttaggtttccaggagcccacacatccgaaccagattctgcgccctcacaatcctgagaaacgacaagtggttcctcttgccatgagccccccatatcttctttttgacaacaa

SEQ ID NO: 189326 - DNA, 444 bp, Arabidopsis thaliana
  unsure (1)..(444): unsure at all n locations
gacccacgcggncgagagaaagaaaaaacattcgaggagggagaaacccaggacgaaaccaagaaacgcggcgcgggccccgagaggcgcaacgggaggggccgacgggggcaaagaagcacaggagcaacgagcagacgaacgaaggcacacaccgggaggacaagcccaagaggaggggcgatctttttcgggaggggggggggaggcaggacagcgaacggcaaaaggaacaacacgccggccgaaaaccccgggacgagaacccaagaaggaccacgccaccgccgggaccaaggcgggcggcggagaaggcgaagcgcgaggccgagacgggaacgagcgggaaagagcgaacacaagggacgccggcaaaaccaacgggcaccggggcgagcccacagacaaaaaggaaagaggccaggcagacgcgacgaaacaaaa

SEQ ID NO: 189327 - DNA, 442 bp, Arabidopsis thaliana
caggtaccggtctcggattcccgggtcgacccacgcgtccggtactaatcagagcatgattatgacgatgtggaagatggcgactacataacataaataaagtggcctctttagcgatgggatactgcgtatgatcagcatgcgctggcatgtgacaggatgccaaaccggacagaccgcgagattatacatcattacaatgccatagaggagctgtcctttcctgagacgttctcatcaacataatctggtacggagagaatacaccagtcacatgagcactgggagcataatgactagcttgcctatgaacttccaggataccgaccatggctcatagtccgtcaatcgccacatggaggaggaccgcggataattattaccaattgcggatgatgaccactacacgtgggctaagtctgtccatgcgagaacatatcct

SEQ ID NO: 189328 - DNA, 452 bp, Arabidopsis thaliana
  unsure (1)..(452): unsure at all n locations
cccccngcggggaaagaacggggtccgggcgcgaaagccaccagaacaccacaacccaggggcaacggacaagaccaggggaacagagcgggaacggcaagccaaggacggaaccaagaagaggacaaccacagcccgaccagcccgaaaaggaaaggaccctcatacgggggggggggaagagggaggcaacggacagggcccaaaacaagcccgaccagcggggggagccaccacacgaacccccgagaccccaaaccaacagacccccaccccgaccccacgagacacggacacccgcaaaacgcgaaacacgcccgcgcaaaaacaaaaaccgcacgcaagaaggacaggcccccacccaaagggccgcggacgccgaagaagccccggccgccccaagcgacgagaccgagagccccgccgcaccgggaaggcacagacaccaaacc

SEQ ID NO: 189329 - DNA, 476 bp, Arabidopsis thaliana
  unsure (1)..(476): unsure at all n locations
gccggggggaaattcctcttacaacaaagggaaatccataaattgggcacctttaacgtgcccacaaatggaaaccaactatcaagaggaaccactaattcctacaggagatcccaaggcaccacctgcacgccatctgagcaccccgggcacgaaatattcctccttttaggcggggaaaaacaccgagaaacccacaacccaaacaaaaacaaagaaccaagaacacaaagcgcagcgcaacgccaaaagagagaaaacaaaacgcgcaaagaaacaaccaaagaaaagaacaaaccaaggaaaagcaacccacacaagggcacaccaacgccaaccccacacacaacacgcccacaggagaaggaacaaaacacacagnggaaaacaccacacaaacaacgcagaacgcccaacaacacacgagacaccccgacgaaccaacgcaccanccccaaccaccagcaaacaccaaa

SEQ ID NO: 189330 - DNA, 260 bp, Arabidopsis thaliana
  unsure (1)..(260): unsure at all n locations
cccacgggngggaggagnnaaaacagagtccagaggggggggaaaaccggcagaagaaagaaagacgaagacccggggagagcgcagcgcacaaccaaccggcgggacgcggccccacaaagacagagcacagcacccgcacgccgaggcccaacgagggagaagaaaaccgcgaggaaacaagaccacgcgccaagagaaacgacctccaacggacgggcggagggcgaagagggagagcaccgcgcaaagccgggcag

SEQ ID NO: 189331 - DNA, 451 bp, Arabidopsis thaliana
cgccgcgccgtaagctgggaccttagagcgtgcgccttttttttttttttttggggaatacgaaaatgagaaacagacgggtttaagagatgcgaaaacgagatggagagttcataaatagattgtggataccacgtacactaattcgtattcagaacagaccccagaaagaagctgtcttaggttttgacggagccaggaacaaagagaaggcccaagacacccccttaaacggagaccccccagggggcgcagagttcacaaggagctcttcagcatgagcagaagactaacctttccaatagactcgaggacaagccgacccagcctcgagcggggccgtttgagcgccctagagcagatacatcttcgagggggttagggaggccaagagggcaggatactggccaagggatgtaccatccgttcagaaccaccgagagcagtatgg

SEQ ID NO: 189332 - DNA, 500 bp, Arabidopsis thaliana
aggtcccggtctcggattcccgggtcgacccacgcgtccgaaagaatttcttttttctacatgtgcacaaaacattggatttgatgggatatgccgcgatggctgtctccaccgaatctgctcttccactaattctgaccattgacccgggcgcatcagctgcgactcacactattgatcggacactggcgtgcactactaagcgttgcactaccggaatgactgtcaaggtgggtgacctcatgacttcatgtatggatcacacgacaccgtggatgtctacgacaatgccgcatttgatggctgtgacacctcctgcttgactgagacccctgcttatggagacaccagactcactctaagaactgagggagtcacctatcttcatctgttgacacacctgatgcactgcagttggctgcttccaagctacaccactagatgctgcatccattgctcgcggacctctggccactcacacgcaacctgatacgactacg

SEQ ID NO: 189333 - DNA, 487 bp, Arabidopsis thaliana
  unsure (1)..(487): unsure at all n locations
gggnnnaaggggaaaaccaagccggggcaggagaagacccaaaaggaaccccccaagggaggcaaagaacggaccacacaaaggccgggggcagagaggacaacccacgcaaaacccggacaccggaaccgaccggccggagggaacagaccggcaacgggacaaaaagccctcctcccgcgcgggacaagaaagggcgacaacgccgcaacacaacaccaccaaaggaaaggaaccgcaaacccaaaaaacccagccaaaagcaccaacccggggcccaaaagcgaagacggggacacgcgcaccgccaacaacaccagaaaacaagacaccggcggcgcaaaggagaaaaaaccgcgacgagaaaacacgcaacaccccagcggagaacagcagacgcccacggcaagcagcggccaaccgggggcccgaaaaaacggaacaggacagaacaaagcggcgcgagaaccggaaaaaaaaaaaagac

SEQ ID NO: 189334 - DNA, 335 bp, Arabidopsis thaliana
cgggctttgaagggcccggcccgaccccccgcgctcccagcaggagcgagcggagaggcctggcgccggccagagaatagcgtgtggtgacgcgcgacaaacggcccggaggaacaaggaaagaaacgggcaagccacaagaaacagggcgccgagtcgagtacgagcaggagccccacgggcgttcgaacgagcacgcaacgccgtaacatacccgcccgacgcgcaggagcagcggagccacccaccctccccccgcacggagaaagtccgacagaagccgcaagagggcccccaacaccgcgcgaaatacgccagagacgataagacccgag

SEQ ID NO: 189335 - DNA, 483 bp, Arabidopsis thaliana
  unsure (1)..(483): unsure at all n locations
cgttcacagccggaggaaagacccgaccagaggaancacccggcgcaggaagcacagaagagaagagcggaagcgaaaaagacagcaacaaccaccaacaagcgcgcagaggaagacaaacgccgccgccacagaaagcaccgcaaacgccgggcgaaaggactctttcttttgcggggggggagcaaagccgaggagcccgaagcgaagcgagagacaccaacagaacccggaaggaggcgagccgacaagccgagagacagcgccgcacacccaacccccgccccacaacggccgcgacacgccgacaacaccacaaacgacccgccgcggaaggcgcgaccgaacgaagagagagggagcaggcggccaaccagacgccaacaagaaaaaagaggccaaacacacaaggaccgaaaccccgcgcgaaaacgggcacgacggagagagaccgcgagaacgccacagggcgggagagggcga

SEQ ID NO: 189336 - DNA, 517 bp, Arabidopsis thaliana
ccgcgtccgtaagctgggatcctctaaaggggtccgccctggggccttttttataattagtatattacttctttgttcgaggccccgggcaattggtttttggcgcccagaaaatatcaacctttagagaaaaatcccaaaaacacaatctacattttgcgcgaacaccaacaaaatggggtgccacagggccccggcgcatcaaaaattttttttttctaaaagggggtgggggacccaaaaaggaaacttggggtggcttttttttaaaacacggcgctcgccccacacaagtatatactttgagatcttttcctgtggggggaggtattataaaagggggacccaaaatttttttttttttttaacccgggtgtggtggggtgaaccgctggggcccgccctcgtggggggggaaaaaaaaaaataaaaaaggcgtgaaaaggggggcttgaagaaggccacggtgtattaagataaaaaacccctatgtgccctgaaagacacgggcggtatg

SEQ ID NO: 189337 - DNA, 505 bp, Arabidopsis thaliana
agtaccggtcctgaattcccggggtcgacccacgcgtccgatcggaagtatggaaagggaccggttccaccggaaacatcggcggcggcggatgattattcgtcttggaacgagactggtgtcaccggcatgggcttcggttttaagcgtgtcataaaaaattccaccagcccggccgtcaaaccagaacctgattaatcggatccaccttcacccgacccagatccacccagaagaagacccttttgaagccttagggaaaaaccattggggtaatgggccggagaaattccgcaatccaagaaagccaccccgggtttggttcggaccttccaaaccggagaaggagcttgtttaaccttataaccgacttgccttcaattccaaaggcaccaaggttaaccggaccttccttgaccgggtccaaggccttactaccaccacacccttttttaatgcaccaggaggagttagggattcctggaactcacctcctcctcaacct

SEQ ID NO: 189338 - DNA, 478 bp, Arabidopsis thaliana
  unsure (1)..(478): unsure at all n locations
cccacgcgtccggggaaaattaagatnccattgcgacgaagagaagagcgccggattcaaagaccacccaaatacaacatcgaagcaccgagctctttccagcaactttcgttttattcaaccatctggaacaccaatcatctcacactgatcgaatgagaagccctcccccgtctctgctctccctcaccgtctacgtcgtcgtcggagacatcnctcgcagcaacgatctctcccatcttgctgaacacatagcccttgacctcttcgccaggacattggaagctgggacattgatgagagagctctggactctcatggcatctagaaacgaagacgtcctttctggtatcgacgccctcaaaatcaaaatcaacggttgcccgatccttcctactcaatgtgatgagaagttagattgcacgggactagaccacaggcgaacggtgaatgattcccccgatgggcaagtttgaaa

SEQ ID NO: 189339 - DNA, 479 bp, Arabidopsis thaliana
acgcgcacgaaagctgggaccctcaagagcggccgcccggggggggaaaacccccagaaaaacaaccacagagccacggagggggcccggacaacacccacccgggcggaccccgggcgcgcccgggcaaaagggcgcacccgacacgaacccccgccccgcagagcggagcaccagaacccaccaccaaaccctcccaaagggggggggaacaaccccgcgccccccaaacccaacaccgcacacagcccccaaaaagcggcggagccaaacacaaccaaaacaggcggcaccgcccccaaagacgcaaaagcgcgagacggagcacggacgcaccaaccccaccgcgaggcccgacacccgacccagcccgccccgagccgacgaaaaccgcgccggcacccccccagacgccggcgcagcgagaagaaccacaaacaacagaagacacaggccccgccgaggcacaccgaccggag

SEQ ID NO: 189340 - DNA, 452 bp, Arabidopsis thaliana
cgcgtacgtaagcttggatcctctagagcgttcgccctttttttttttttttttaagaaaaaaatgcaagctattaaacgattctaggactttacacaaagggtttgtgttagaacgaagaacaacaaagctagctttacaagtctttagcaaaaaaaagagaggattttgctagcaaaaagagctcttgctcatttcgcgaatcaaagaaaaaacagatgatcccagacattgagcaacaaatccagattgaacatccatagatcagagataacgaaaccggaattatcttggagaaaggcataatatcaggactttacagaatactgtaccaaggagaacacatcttggtaggtcactatactcgaatcatacatgggcttctcctactggtagaatatctcctaactagttaaaacatcatttttaccatagttggacacttatattaa

SEQ ID NO: 189341 - DNA, 204 bp, Arabidopsis thaliana
gacccacgcgggcggagacctcctttgacacctttcactcgtgggcgtacctcatcaagagagagcacatccattgtatgtaggacaacaccctgttgtggttttttgtacttgaccatgcctcactcttgcagagtttattgcctctcattgttcatcatattcgcttctcgagtttagcctcagtagcccacgtgttagcgc

SEQ ID NO: 189342 - DNA, 484 bp, Arabidopsis thaliana
  unsure (1)..(484): unsure at all n locations
gaaagaaaaaacctttcggggacgggaaaaacccaaacgcaacnaccacaaaggacacaggcggccgggcgcgacgaagccacacccgccagggacaagaagcacacacagaacgcaagcgccaaaagagcaccaaccaaggcgaagaagaccaaaccccggagaaaacaccaaaacaggaagcgacacagcgagctcctcataaaccgggggggcacacgacaacagaccgaggaagaggccccaccccccgggaagagccgaacacaggagccacaacgcacacccgacaccccaacccaccggaaacccacacaacgccaaccaaacacccgacgacaacaacaccagaagaagcaagacaccagcaacaccgacggcgacaacgacacagaccccggaggcacgaacaaagcacaccacgcaacaaccagccgaggcacgcaccaacccacgggcacaggcggggcacaagaagaaccgg

SEQ ID NO: 189343 - DNA, 471 bp, Arabidopsis thaliana
  unsure (1)..(471): unsure at all n locations
cgcgcacgnaagcngggaccctctagagcggctcgccggggggtaaaacccgaaaaacacggcaccaccctcaaggcgggccaaatagcgggaggcccgacaggaacggccaaggagacaaaaaggggggacgaggacgactgtgaagggggaacaccagacacaaaggaaggcgcaggcgaacatctccctctagaaggggggggaggnggccagcgaaggacagggcgcgaagcaaccgcccgagaggcggagcggacaacccccaagggaacacgccgccaccagagccgggaccccaaaaaaggggaggcccggggggggccagcaccccccaccaaggggccgggaccccgcgggggagaggcccaaaccaggccggggcgaaaaaacaccgcaaacccggccgcggggagaggcacggggggccagccagagcggccaggaggaaccgggccaaacggcgggggg

SEQ ID NO: 189344 - DNA, 447 bp, Arabidopsis thaliana
acccagcgtccgaaaaatgaagcttatttttcacatgcaggtaaaccccttgaggatacaggaacacagggcactgcagccaaaaaagagccgttaacggtgcccctgcccaaagcgactacaacaggtttgacgccgctcaatcctccgacctgcacccgagaaaacaaaggaggcgaagcaacttcctcctatgcggcagccgcaccaaacaacccaaaggccgaaacaacaccaaacacgcgacagaggagaaaacagcggccacacagccagcggcgaagaaccgaaagggacggatcggcaggaactcacttcaacgccgcacatggaacacacgaccctcttacggaaaagaggccacatgaacgaccgaacaaggacgacagaaaagcataaaacaggctcaagattaccaaatgctggaaaccttcacggaaacatgga

SEQ ID NO: 189345 - DNA, 389 bp, Arabidopsis thaliana
  unsure (1)..(389): unsure at all n locations
ccgtaagctgggatcctctagagcgtccgcccggggggaaaaacccnnnggnggnngggacccaaaaaaagccaaaaacancgggggccagcagcaaaaaaaacaaggagaaagcccgggacaaacacgacaaaacacccaaaaaacccgaaacagacaaagaggaaccaggaancancacccctgtttgtatcgggggacacaagaacggcaaaaaacaaaacgaccaccacccccgcgagagaaaccacgcgccgggcaaacccaaaaaacagcaccaaccggcgaacccggggcgcggccaccaccaccgcagaaccgggcacccccaggcggaaaccgcgaccaaaaaaccaaaacaaannccaagacccggacggaaaccaccc

SEQ ID NO: 189346 - DNA, 456 bp, Arabidopsis thaliana
ccgggggggggagaccaaagaccgtcgcgggggggcaaacccccagaaacaaacagcccagccgcggagggggacccaaccgcagcgcaacaaacggacacaaaaaaaaaaaacgagcggagcgcgacgccaacaaccagccgcaacccaaaaaaaaccccaaacggccccagaaacccttcatttgggggggcggacgaacgagccaaaaaagcgcgaagcgacccacaaggggagccgcaagccgcgggaaggagaacccaccaaaccaacaaccccccggccacgggacaaccgcggagcccaaagcgagagcacgcgcggacgagcgagacgagccggcgcgcagagagaaggacaacgaggcaaaaaacgacggggaaggagagaacaaagacccgcaagagaaaagagaaggagaagagcggagaagccacacgcgcgcgaaggacacaa

SEQ ID NO: 189347 - DNA, 257 bp, Arabidopsis thaliana
  unsure (1)..(257): unsure at all n locations
cggagcggacttcgggggcgccgcgccagacacaccacaaccngagaagacggatcacgcgaggagtccgcgacacaccaagaaaccaccagtggagtaggcgcccgacggaacgcccaggcaaaccaccggacacctaagggacagcacgaccagacgcgcacgaccagcggattgaaaatcgggccgctaggtcaccgtcggcggtacgaaggagacggagtagcgccatcacataacggcccgatcaccccaca

SEQ ID NO: 189348 - DNA, 415 bp, Arabidopsis thaliana
ggagagagaagtgaggggagaggaaagacaagacaacagccggcaagagcccgaaaccgcgcacacagacacaaacaaaggagaaacacacgggaggaacacagggacgagcccaccgccaaccgacgagcccaccaccggcagaaccccgcaaagcagagaagaacgactccctccgcccacgggggggacaaggagcaacaaacgacccgaaaccaaccgagacagccgccaagaccgcgaaagacgaaagggccgaagaccgacaaccgacccagcccgacagaaccaccagacgcagcgaacacgaccgcggccaccagcccggcaggaaaaagcgcgcccccgagagacgggagaaaagagacagacggaaagagcagagacgcaccgaacaacgaaacaagaagaaaag

SEQ ID NO: 189349 - DNA, 371 bp, Arabidopsis thaliana
  unsure (1)..(371): unsure at all n locations
ccccgggngggggngggngggcgattgagggggggaaaaacgcggaaaaagaggacgacacccaggaggagcaaaaaagaagacgaagaggagagcgacgaaggaacggcgggcacccgagcgncgaaaagccaaccggaaaaaaggccgaagcggagcaaactttctcttttcggggcgggaggaaaccccacaacgcgaggggggcgaagacgaggaaaacgcaagaccagacggcaggccacaaagggggacagcaaacaccgcgacgcgcagcgagccgaccccccgcacacagaaaagcgcccggcggacgcccgagggagcgccggagaccaaacaagagaagcaagagcgggaaaaaaaacgag

SEQ ID NO: 189350 - DNA, 566 bp, Arabidopsis thaliana
cgcgcacgtaagctgggatcctctagagctttcgccctggttgttaattccttataaatgacatattcataaatgagacagggggacattgccgataggaaattgcgctcatgagaggagaaaaaggaacagcagaacaagtgtggaaacggaaatcgaggcagcagagaatgggatacagaaatgacacgaggaaaaggaaaggaaaatttcctccgtattcgcgggggggccgcgaaagacaaaagaacacgggacgcagccggggacaggaccgggaagacagacggaaaccggaagaacacaaagagaacggcaccccagcgcgcacacccacagacgcagaaaaccaaaaagaccggcagcacggccgcgacaggagcacaggcagagcgagaacccacaggcggcgcgccgcccgagggggcgccgacgcgaccagggcgagcgaacgcaccaggaaaacacgccgcggaccgcgaacacccagccagcagcgcggacagacccgaaagaacaacacgaaggcacaccaagccgaacacacgcggcaacgaaaaccgcca

SEQ ID NO: 189351 - DNA, 466 bp, Arabidopsis thaliana
  unsure (1)..(466): unsure at all n locations
accacgcgtccgggacacttcactgcgcacctcggggatgacacgcgcgcaaccctagcaagaccaagtgcggggcctctaacaggaacctaacatctctccatggcgtaaccggacacgaagggcaacgagataggccacgcacttgtatgggaagaccaagcacaaagagagaagcaaggtcaacggtcctctccacgggagagagcgcacgaaaggccagcgccaggaagagacgccacccccgacgcaaccgagccaccgccggnggtggttaaccgggccgacaaggaaggagaacaccggaggaggaggcgggaaacggggaccggncgggaaacaagggaagacagaacccgcaaggagcccaagccgggccggggggcggcccgggacgcgggagccaccaggcnggagaaaaggccgcggcggaccacccgaggcggggcccagcaagggggcaagg

SEQ ID NO: 189352 - DNA, 384 bp, Arabidopsis thaliana
  unsure (1)..(384): unsure at all n locations
gggggggggggggnggnngaaggctttagggggagagggaaagaccagaggaaaaaaaacaagaagaaaaaaaagagggaagggaaaaaaaggacggagagggcaagccacggaacagaacggcccaaaacacgcagcgcaccaacgccacacccgcaaacaaaggccaagccgccgcacacaaaaaaaaccttccctacggggggggaaaaaagacaaacgggggaacgcaccccaacggccggagaaacggcaaaacggggagcggcaagcggacaagcgaccccggcaccaacgggagcgcccgaaggcgcggacgccgcggcgaggggaagggggcggcgcggagacgggagaggcaggaggacgaaccccgaggcgggc

SEQ ID NO: 189353 - DNA, 452 bp, Arabidopsis thaliana
  unsure (1)..(452): unsure at all n locations
gccccggggggggaanaggggagactggcgggggagaaagcccaacccggncccccgagaaggccggcaagaggagcccccgagaggggggggaaagcaccaggcggggaacaccggagggaagcgggcgacaccccagagaggaggaagacacagagaggaacacctaaaaacggggggcgacaccagaaaagaaccgaaaacgacgcaaccccccaaaaagggggggcggaggacaccgcccaaggagaccacgccccacacaaaagggcgccccggacgcggaaaaaaaccgcggcgaaacgacagacgacacagccggggccacgcgcaccccaacggggccccaggcagggcggggaaaacacccgcgccgcgcgccgcgagcacccgccgcaaaacccagacccccgcagccgcgagaggagcggaggcgcccacggggggccagc

SEQ ID NO: 189354 - DNA, 493 bp, Arabidopsis thaliana
  unsure (1)..(493): unsure at all n locations
cccgcccggaagccnaggaacccccaaaacggtccgccggggggggaaaaaccnnnnggagggaggggaaaaagcccgaaggaggaccccaccaccaaaagagccacaaaaggccccggaaaccaaaagaccccccccaaaggaaaaacggaaggccaaaacgcggaagccaacaaaccaaaaccggaaaaaatnttcnaaaagggggggggaacgccaaagagaccaaggccggcaccacacgggccagccagggaaggcgcggggaccaaccaggaagagaacccacccacnccgacacgggggcagggacaacgggaccaaccaccggcgggaaaaacggagagcacacagcaaaccaaggaccaaaagagaagaaacccacggacaagagggacggagggaagaaggcaaccagggcaaaagaccaaggcaccagggaggaacgggcagaagaacggagacccccaaaaaaagcccaagacagccccaa

SEQ ID NO: 189355 - DNA, 512 bp, Arabidopsis thaliana
  unsure (1)..(512): unsure at all n locations
tcatgcgataacacacactcttgcgattgactttcgagagcatcaagaacgatagacacctgttctgcagatccttaaagttgtgttatgaactatcctagcatcattacaaggtcttttcgacttgccgcaatgtttcttccggcaacagactggcttaccttgggagatgcaatagatcctaaaaatacgatcggttcctagcggtgtgacacgcgaacngggaagcgcccctttacatcgccatgggacgccgatattccgcgttttgacaaagggcactcatcactctatggggaaccactcctctttcctaggctggcggtgacctctaacccattggcaatcaccccaattaattccaacttctttacctaaaccgcctaattctccagggtacccatcccatttggacctgggctacttgatcggtcgagtcccggattgcctacctcagcgtttgctgcttgccatcttaccggggtccccngagctcctgcaccggttcgctg

SEQ ID NO: 189356 - DNA, 479 bp, Arabidopsis thaliana
ccgcgtccgtaagctgggatcctctagagcgtccgccctttgtttttttttttttgaataaagaggcttcatgggggagcaggcccaaattctaatcattggggcgaaaaagcggtacaaaagcgtgttttttttttgaaaggaaggggggaaaaacaacccaaagagtgggtcacccacaagggaaacttaataatttttccggggagggagctgaaacagaaaaggggaaatgcaaattggctagaggaatagaggcgggggacccatttttaaaaccacttttttggaaccctaaaacaatggacaggttaggcccgggagggaaaaaccgatattagggcgggaataaccccacctggtcggggaggaccacctctggggaaatgggctgaagaaaaggagaccggggccctaaacctttaacctgggctcggttttgggaagggcttttaccaaattcaaaagggtgttggggg

SEQ ID NO: 189357 - DNA, 317 bp, Arabidopsis thaliana
  unsure (1)..(317): unsure at all n locations
ggggggggacccccctatgcgggtcctgctgctcggcgggcgctctggctccttgtgtgtagatcatcgacctaggatgtcgctctgttctctttcgccgctcgcatcccggctcctagcctgctcggactcccacggcaaccagttccnttgctctccgggggggggaacgccggccccgcagccagacccacgccgcacaggacccccnaacgggggggccgggaccgacgcccttctggcgcggccacccccggagccgaacgtcccgacccccccgaggcggcaaagccgcccgggcgacaagcaagccgacc

SEQ ID NO: 189358 - DNA, 465 bp, Arabidopsis thaliana
cgcgcacgaagcgggacctcaagagcgtgcgccggggggaaaaccctaaggaaaaagggaccgaaggggcgaggaggttctaaggcccggaggagccagcgcaggagacccaaaagcacaagaaggcacgagacagacgcagaggccaggccggaaaggggcaaagggagggaccaaagccacgcttttaaaagggggggggacgggaggagaggaccagacaccagaggccacgggcgggggagaagggagaggggaggaaacaaaggagggcggaagggggacgaggggacagggaacaaagacagaaagggggagcacgaggaagccgaccgcggcggaggcgcacccgcgacggagccgcggaaagaccgagggagaagaaaacggcaccaaaggcacaacgccgggccccggggcagcaaaggcgagagggagaggccaaggacagaaaaagcggcggcc

SEQ ID NO: 189359 - DNA, 208 bp, Arabidopsis thaliana
gtagacgaacgtcattttttccgacactggacacattatacctttaattaaatattttacattacatgatttacttaagagtaatatatatattcctagccccacaagagatatacctattacaagagagaattagcacgagattatatcaggagcgttcagagactcaatcatgacatggcgaggactctaatactgtaatacatat

SEQ ID NO: 189360 - DNA, 179 bp, Arabidopsis thaliana
tctttttttttttttttttggatttgagagttaatttttttgcaaacgaaaacggtttgacgagtgggggttttctttaagagacttggggttttctaaacaataaaaaacacgaaaaccgtcctcaaactaaacacttatacaatgctgtactcccatatgacaatggtcgagccgat

SEQ ID NO: 189361 - DNA, 291 bp, Arabidopsis thaliana
agactctaaagacaataattgcattggataacgtaaactttacttggtggatttgcttggctaaatcaaagtctctcccgaaatggaaccgaagaagaagttacacaactagataaaaataagggatctttctaattcaaacttcagacttttctctaaagcttctgcttcatcctctcaattgcaccacgcaacgtctcttcgactttacagaacgcaaacctaaccaaattcttcccttcttctggattcagataaaagacgctcgttgggatcgaaacgaccccaact

SEQ ID NO: 189362 - DNA, 481 bp, Arabidopsis thaliana
cgccgtcgttagcctggatcctttagagcggtcggccctttttttttttttttttaaccaaaaggggacctaccctaattaaagggaaaatggcggtccgacccaaaaggcttcaggggatattaaacccaggttttttggtccgcagcctttaaaaaaaccagaattctgccagggctcaaaaaaggccgaccttctaccattttaatgaggggtttggcaggggagctcttttccttcttcttcctcctcctttaaaaagcagcaccttgggaagcctcttaagtaccaggggtctcgaaggtctctcccactacaggatctgggacatcatcatcatcgccctcttctgggatggtggctgggacatcacctgcacctgaagctggtttctggaatggctctgctagcttcttcaggtggtccaagttatctggtccaagttggctgataatctgaggaagaatgtctggcaattttt

SEQ ID NO: 189363 - DNA, 463 bp, Arabidopsis thaliana
  unsure (1)..(463): unsure at all n locations
gcactataagacttgacgtcgcatgccgcgtcgtaagctggatccttagagcggcgcctttttttttttgacactgttttgaacccacaccaaaaaaatctactcgacagaacagatacacaaagcttattccacaaagcatgaccaataaatggttctttctataatcaacgatgcataatcaatttataaggaatgcaaagaaacaaaaggaatcatcagtagaatttgagagctacaagggcgatgctgaagaagacaagagatggtgagagtgcgtaggcggatgaaggagtctcanaaggtcgactggtgcttcctccgtcgtctgatgttggagctccaccgtcnacggatggtgtaaatggtcgggttgtatcaaactggggtgtctgagctgcccgagttggctctggaacaatggatccgtctctggtctggaacatcgatgtccaaatgtagc

SEQ ID NO: 189364 - DNA, 511 bp, Arabidopsis thaliana
ctgtgggggcccgcgcgcgcgcgcgaacgctgggcccctatagagggccccccgggggtggtttttttaaaccggaaggcttattggcaagcgaacactggtaaaaaaagactcctccattcaaaacattgtggatggaacaaaaccgcaacctccatatcgctgaagtgattttcgcaaaaggggctgggggagcccccccgacccatttttttctgggggggagaacccactaaaggactccaactctataaaaaggtatcggccaggccttcccgggagggccccccacaggccccaagagaggggggccgctggggcaagcttagtaatagcataagccccttccggacttacacccggaaaaaaagccgcacccaccttcctcccctccactacaagaaagctccccattttcgggctgaggcaatgcccggtccacggggccgcaaacaccgcgcgttctgcgagggtgtcaccgaaacaaggccaagacgaaccaatagctgca

SEQ ID NO: 189365 - DNA, 457 bp, Arabidopsis thaliana
gaagtgaagtttattacattttacgaataggagttgctaccaatttcacatgagagatttaacatttacattcactactctcaaaaaggtacaaatgtcaaggaggactaaactcaagccttgaggaaatggtatttggattcaacgtaactctctgaatcccataagaaagacccaaaagccacagcttccaaaaccaacatcgcaagtccagagacactcagagacagaacctcgtcgttagaagtatcgagctttccatcctcgagtatccttatatccggtcgtccaaagagcgcctgagtctgcttctcaatcagagtcatggcttctttagaacgtatcgtggcatatctctgaagcgtatccgagtccaaatacgtaacatatgatctcaatccataagacgatgactcatcttcatttctttgtatcgcgtattcatcgggatcatatt

SEQ ID NO: 189366 - DNA, 105 bp, Arabidopsis thaliana
aacacctacaactgctttgaaagttgaaattgaaaattgaatttcgggtggcaacctaccttgtcttagaccatatcttcaaatgcccgagatgggcattctgaa

SEQ ID NO: 189367 - DNA, 161 bp, Arabidopsis thaliana
aagaaaaacttttatatattaatatgaattacacggggatcttacctcgtgtggtgatcattactcactatgcgaaacgctacactctctatattaggtatttattaatggctccagggacttatcaacctcctacccaacatacatactgaatagagatg

SEQ ID NO: 189368 - DNA, 149 bp, Arabidopsis thaliana
gtgaaaacatgctctatgcaccaatgacatcatctctccagagcaagagaatcatgcaggcttatcaaatgtttgatatatctacaaaggattattaccaaccacttaagggaggaaaagcaagagttagctttgataaaaataactta

SEQ ID NO: 189369 - DNA, 141 bp, Arabidopsis thaliana
gtaaatctaattattttgttttctactactcaggttcatattttaaccattacccgaaaaggcggaccttaacggaactacagggggaaggaaataaatattacgctgattattggtgctgtatggatttgtccctatggt

SEQ ID NO: 189370 - DNA, 113 bp, Arabidopsis thaliana
ctctggcaaacagaaatttatgttgtctactacgaacgaacacaaagtatccctttcacacaactcccaacagagatgggtgcaaacgtaatgacaaatcacaatcaggacac

SEQ ID NO: 189371 - DNA, 369 bp, Arabidopsis thaliana
tttctttttttttttttttttttttttttctttcttttttttttttttttttctatttttcccccctttaagggcttgtaaaagcttaaaattcatcccccaaccattttaaacagggcgggggggaaaacaaaatccaaaagggccggggggtctcctataaaaaaagcttcaaaaccaatctgaatcaaaggcaactttcgttgaaaacctaacggcccgacgtttgctttcttgatcccggaaatcttcctaatcttcctttttttttttttcactaagcattccttttttgaccaaaaaatttccccgcttcgggggggaaaaatcccccttggcccctaaattttgaaacccgacaagcctttc

SEQ ID NO: 189372 - DNA, 225 bp, Arabidopsis thaliana
aaaggctgtttttaccttaaaatccttacccccaccattttatcctgaggcggggggaacacaaactccaaaagggcgggggggcctcctttaaaaaaagctcggaaaccattctgaatcaaaggcgactttccttgaaaacctaacggccccccgtttgcttttttgatcccccattgcttccttatcttcctttttttttttttcactaaactttcctttttt

SEQ ID NO: 189373 - DNA, 809 bp, Arabidopsis thaliana
gcgcgtacgcatccgtggatcctttaaagcggccgcccttcatcttgtgttgtaattttttttttaaaaaacccactccgatcatttattttacatcgggaatatgtgaaccagaggttgtattcccaaaacataatttaacaagctatctcttttcatctaatcttccctcttatgtttatatgaaaccgtattaaagatccgccccagccaatataacgccaaacgaatccctagattcgccactttttttaaatactgcatctttatatacaaacactaacctgattaaaacagttaaacggggaccggcgaccgaaactgatcttcattttcctcctttctcttacctctatctctgtcttaggagaagatgaaaaacaaaaacatcttcatttactttcaaaaatggtgcgcaacaatagcctgcagcaggtcttgaatcaaattcctcctctgttaggcatttggcgaccaaaccattacggaatctctatgtacaccttgcttattgttggttgtctactaatccatggaagggatgcctcgagttttgaccagccaccggtcaagcaatcaaatccttctactctaactgtaggcgaagttgagttccaaatttcattctaacacatccacggggaagactaccatcgattgaggaagaagaacggaagatgggaacaccccgcatgcccgaaatatgtgcttgtaacggaaaatgaagaatttttgggtggtacaattgggaattgcgagcttttcttcatccctctaaaaaccgatgccacatctttgcggccctcata

SEQ ID NO: 189374 - DNA, 1331 bp, Arabidopsis thaliana
  unsure (1)..(1331): unsure at all n locations
ggggggaaagaagggggaggaggggggagaagaataggggaaaagagaaaagaggtgggaaaagagaaaaaaaaagaagaatgagagaggtgaggaggaaagaggagagaaagggaagaaagagaggggagaggggtatagaagaagggaaaaagaagaggaggtgaaaaagagggaaaggagggaagagaagggaggggggaagaagagaagagagaagagggaagaaaggggggagaagggggacaaaggggaggaaaagaaaggagagagggagggagaagagtggaaagagaaaaaggggagataagagcggaggaggaaggaaaagagaaagcgaggaagaagaagaagaagaacaaagcgacaagggcgcacggggagaaacgagagaggaggatgggcgatcgatcgaccgaggagacaaggcgagaaagaaggagacaggataatagaagagagaaacgaggaggaaggaatcgaagagggaaccgagagaaaagaggagacagggagagagcggcgaagagaagcaagggggggacggcgagaaagctagagcagaacggagtgagaggaanagacgagaggaagggaagagaagagtggatgaacaggagagcagagagaggagacagatagagataagacaaagagaaagcatagcgaacgggagcaaagcagcgaagagaagtgagaggacggacagcagagaagatagcgagccgtactacgggatgagagagacaagacgagngaaaagtgataaaggaggaaggagcatagagcaaaagagtagaacgatatgtacataagaagagaacgggagaggaccagacgaatgagagagaacggagagaggaagagacgaganggcgcgagaaaggaagcacgcatcgagcagaaggcgcaaaagaggagagacaggggagaggcagagcagcaaacgagcggcagaagaaaagaagaagagagagacgaaggaagcgaggagaagaggagagaagaagggagagcagaagcgagagaaaaaacagaagaagaggagacaagagaagcagaaggagggcaggcgactaaccgaagacaagacgagaagaagaaaggggaagcgacagagaggaggacagaaaggaggagaagcgagatgaagaatagtcactggagagcaagagagggagggaggacgaggaagaacgcggagaggagcatgaggaggacagaaccacgaagagagaggagaggccacaccaagcggaggcacggacgagaaagaaagaggaggagggaggaggagaggatagatcgaggaagaaaggaaagccagaagg

SEQ ID NO: 189375 - DNA, 341 bp, Arabidopsis thaliana
  unsure (1)..(341): unsure at all n locations
tttttggggggggggatagtctcgaaagaccaaaaggccaagtgcacggcggaacttgttcaagaaagagaaaactcgcacggtttcggtaagggggtcgggttatagaacaacaaaaccacttccagtctctccttgcaccagagcccgccgaagaatttttttctttggggggggggaaccccccggcgccggggcaaaagggaaaacacgcaacgcggggcggagggaganaaggggccccggagcgacgaggacggcgcaaacaaccgaggggggggcgaccggggaggggagggggccccaggggaccacccagggccacccccggacccgggggg

SEQ ID NO: 189376 - DNA, 335 bp, Arabidopsis thaliana
  unsure (1)..(335): unsure at all n locations
cgcgaacgaaagccgggaccctcaagagcgtccgccctttttttttttttttttttgaaaaaattgagatcttttgggcggaaaggctctttaaacggccgtaagctttgctgaggccgacgcaacaaccctgcaacaaactaagaatttatgctgttggattatgcctaacaagcgacataataagtggacagttatcaagaaacgccttttttctttttttncggggattcgcgcaacagggtccacaataccgatgcggtgtgctacatcggtggggtgagctaatcagaaggactttcaactgcgctatgccgcgggagaccggctccccc

SEQ ID NO: 189377 - DNA, 451 bp, Arabidopsis thaliana
ccccgggggggaaagggggaaccctggcggggggggaaagccccgacaaaaaacgggggcgaaaaggggccaccaaaaagaaaaagcccgaaccacagaccacggggaggggccctccaagaggaagaaaacacacgggccccaagaggaacacgaacggcggggaccccctcatacgggggggggagacacccccaggaggacgggcgcaaaaaaaacacaggaacgggcgcgggggcgacgccaagaaagaagaaaacagaccaaggcaacacaaagaaacgacacggagaacaaagaaacccgaggagggggaaacaagaacggagaaggagggacaggcaaacgcagcgcacacggacgcggagaacaagccagacacacccaaacacgaaagaagaagcgacacgccgagagacagcaggaggacacagggaaagagcgaaaaaaa

SEQ ID NO: 189378 - DNA, 264 bp, Arabidopsis thaliana
  unsure (1)..(264): unsure at all n locations
tcgacccacgcgtncgggatccaccacccacagcccctgatggtagcagacactgatgccccattctagtcatgcatccagacaacgtctgcgtctgacgcatgagctacatgatctgcttcgttgatgcccgcttgctctaactctggtgacccctgagtagagctacaccccaaagggcgtatcttaagagtgatggggtgttcttttgctttaactataatatcactgtcaaagagttcactttacgagaagatgatcgac

SEQ ID NO: 189379 - DNA, 332 bp, Arabidopsis thaliana
ccggaccgaccacgcgttcggagacccgttactggttttagaatttcacgttaggtggaccatgtcatccagcggataatcccggggatgagaagctcgtttactgccgaaccaggcgcacggcatggaccaaacttcgtatcctggattggacggaggaacctggggtcaacggcagtggggagccgcccataagatgtttctcctcttggaggggcaagcctaaaaggcccccccgtggaccctcaattaccaaaatttttcccggccacggggaaaactatcagtaatgggtggcccgttcttagaaggcccaattccaaatgtccaaa

SEQ ID NO: 189380 - DNA, 540 bp, Arabidopsis thaliana
  unsure (1)..(540): unsure at all n locations
ggcgaaacccaacgaactacaagaaaaaaagaagaaaacaaantttttttttttttctcaaaagccttgtacggggggaagcacacgaacgaaagcnngggaccccnaaagcggccgccccgggaggaaaaccccnaaccaaaaaacacaagaaacaaacggggagggccaaccacaaccaaacgaagacccacccccaacgccaaaagaaaggagcgagaaaaccaccacacgacccaacgggacggaaaaaacccaccaaagacaaaaaacccttttttntccgggggggggaaanccagagcgggcgcaaccccccagaagaaaaaaccccaggaacgaaagaaaccggagcaaaaagacagacgccgaagagcaaccccgcacaaaaaccaggcaggagcccggcacgaagcgccccgccacgcagaaagcaccaaaacaaacgaaacagaaagcgcgaaaaacgccaaaacccagcaacaacgccgacacccggaaacccacacgacaaggccacgccaaacacacccgacccca

SEQ ID NO: 189381 - DNA, 485 bp, Arabidopsis thaliana
  unsure (1)..(485): unsure at all n locations
ccggncggaaacaaaagaaaagctaacacgggaagaagaacggcaaacaanacggcgccccccagagggggacccccccggcaaaagcaacagggcgggcatccacggcgagaagacaccgctacggaccggacccccaaaggcaaaacgacaaacggccaccctcctccttgagggggggaaacaacccaaaaggcgagcccccaaacaaaaaacaaaaacangggaaccgggccacccacccgaacaaaaagagcggggaacnggcaaaaggaggagagcgacacgaaaccggaccagaagagacacaccggaacaaaaaaaaaggcaacaacacgcaacggaaaaaccggaaaccccgcaaaacagagcacgaaaccaaacagagcaccacacccaagcaacaggcaacaaggcgccaaacggcccagaagccaccaaccacccccccaagggagagaagaaacagcgaaaaagccgaaaaa

SEQ ID NO: 189382 - DNA, 331 bp, Arabidopsis thaliana
cgcccttttttttttttttttttttaggtatggggagacaaggggggaggtttttgggaggaacgtaaccgccatcgagacggccaaagcccaaccacatgaaacaggttaagaaaacatattttaaatcccatactggcccccacctatgagtttcacaatttcatggtttttttggagggctaaaactcccggagaccgcgggttagaaagcagaaaactcaccatacttcttggggagagagccaatggtttcccttatcaatgtccgccatacggcggacgcccatatagatggtggtcaggcaatgtcaaaatcctaatctggaat

SEQ ID NO: 189383 - DNA, 445 bp, Arabidopsis thaliana
cccgggggccgggaaaaaagaagacattttcggggagcgggaaaacccagcatggaacaccaaaggaccttggcggaggggggaaaaaaaggggccagaaagacctacgggcgaagaagaaagcaggaaaaggggaaaacgaagcgagaagggggaagcaaacgaaaaagaaaccggagggttccttctttagggggggtgggaaaaacaaggaaacggcgggaaacagcaaaaaaacaccagagaaccacgagggggcgaaagagcgagagaaacagaaaagagaagggcagaagagagaaccaggaaggggcgagcaaggcgagcaacagcagggccgagagcagagcagagcaacgacaggaccagaagaggaaaggggaggaaagagacaagaggaagagagaagaaagagaggggcgcaccgaagaaaacccgccgaagg

SEQ ID NO: 189384 - DNA, 483 bp, Arabidopsis thaliana
ccccaaaagcggtcgcccttttttttttttcttaaaaaaaaaggaaagagaatctatcataggcatacccagggtatgaaaaacatatatcgaaaccacactgagatcggctaagccaaagacaggaactacaagggcgccgaaatgtgttcatacggactgaagaaccaaattacttccttttgcagtgggagagaccaaacttctacctgcatgggctcgtacgtataaggacacacaaccagggggtggacatcgccagggaacaaccctgaactctctcgatgaaaataagaagttgcttggaattgaattcgccctacctgtgctgcctcgaccatgtaggaggagctgtatggattgcgtatacaggagtatacggtgcccgtgcctctggttgtgctagtgacatgcaatgcagccatcatcttaaggactggcctcgaggcttttggctagacacccattcgagccaggacaaag

SEQ ID NO: 189385 - DNA, 459 bp, Arabidopsis thaliana
ccgggttccaaccaagccttccgcttaccgatggaggccgttctgcctacgtcatgcttatggtggcagatcttatggagcttgttaggattataatccaaaccctggtgcagatgatcatagagggcctgctatatgtaccctacacgggatctagggcagtgaactgaggctacatttaagtttgaaggtggcttttttctatgaccagtaacctctgtattggttatcgcgtatttccccattcaggcggagaacttaacttgcaaaaatccgtcgaaggaactttaaaattttaagacggacaaaactgaatactggaactggttcgctggaacacttgcattagaaagagaatttggtgactatcacattatgaccaaacccttgcttcactgtgcgctgacgagaatactcatgatgtccaggatacaaagaaagaagctgctccgaatacag

SEQ ID NO: 189386 - DNA, 338 bp, Arabidopsis thaliana
  unsure (1)..(338): unsure at all n locations
acagcagccggcgcaagaacaaaaaaaaaaaaaacgtgaagcaaaattttntttttttcccaccaacaccctctttcgggggggaaaccccaccgaaccgnaagccangggaaccccccnaggagcgtgtccccccccggggggagcaaacccccaccnaccaacaaaaaaccaacacccgccaccaccaaggcgggaaaccccaggcgnccaaacccagacgcgagcgcaaccggcgacaccagaagaagacccccgaaggcgaccagagccagcgaacccccaccccgggagaagacagagcgaggcgcgcgaggagcgagcaaggagccagcagg

SEQ ID NO: 189387 - DNA, 486 bp, Arabidopsis thaliana
  unsure (1)..(486): unsure at all n locations
gagggggaaacaaccgcgccgaaagcngggagcctccagagcgtccgcccttttttttttttttttttagacgggcgtaaaatattttattcttagctaccttgctaccaagcccaggcacaataccaataagagcaccgttggtccttagaatggctacggtgagaatatcatgaaaagagtagatctgtggaacacagcctttttattccaacaggtaaaaaataaaacaggccttgctcagcgagttcagatcggattagaccaatgcctgaacacgtcccaaccctgggcatgggcttctgtcttggcctcggaatccacttcaaacgttacacctcaaacctcaaccgaactgaatacggttggccccggatcaaagctatatgagggatgcggtagctcctaaaacctccaaaggaggtaaagagacatcctgcagggattggggcaagggattaaccaccgccctcattgacagtcgaa

SEQ ID NO: 189388 - DNA, 204 bp, Arabidopsis thaliana
  unsure (1)..(204): unsure at all n locations
gacccacgcgtccgngtngctctgatacactttgcgtgatcgggaagatgaagaaaatcgttggccgattactcgacaagaagcgtgagcgaaaacacaccgatggctatccatgggtacaaggagggtaggatcaggatttgtagctctctaaaagatagcgtttctttggccgaactcatttattaccatctcgtgtaatag

SEQ ID NO: 189389 - DNA, 485 bp, Arabidopsis thaliana
tcgggaattcccggggtcgacccacgcgttcgggattgagaaaacgtacggagtaaaaatggagatttcgttgagcgtcggagagacctgtagctaaataaccaccggggaggcgggtgccaattagaaccagaagaagttctacgtcatgggttgctattgatgataaccaaaaccggtttcatggctcggaatggtgatggcggttaatgctaaacgctggttttaagggccaacccggaaccgggtcaggaaggcgcttactttcgttgctttgttgtcaccccaggtaccttcgatttatttaatcttcttgttgaaccggtttttgcggtttttccaacaaatccgaggccggatcaattgaggaagccccatgatcatagtccaacaacctttttacctcggccattggagatatgccgaggcaaaatggcgaagacagagactatgataggggagggagatcctaaggatatgatatg

SEQ ID NO: 189390 - DNA, 491 bp, Arabidopsis thaliana
  unsure (1)..(491): unsure at all n locations
ggagacaaagggaaaaacacttcaagggggcgggggaagagcgccnagaacaacaccgcagccaagccagggaaacccagaaaacaaaacccgagggaaccccccgaacaaaaaaaccacccggaggagggagacaagaaggccggggacccagcccagggccaaacaacccgagggaatcctcctaaagggaggggaacccccccggcggagagggaccgagaagaaacccaaaccnaaggacggcgaggggagaacccggaaaaaaaaacaagaaccggaagacggaccaccacgaaacccccggccgaggaagaagggagcaggaaagccggagggaacccggccccggggagggcggggaaccgaaacacgcaagccgggcggaacaaacacggcccagcccaaaaggggcccaagcacgcagggaagggccagcgcaggaccccaggaggggcgacgcccccaacggaacaaaaggaacacggaaa

SEQ ID NO: 189391 - DNA, 505 bp, Arabidopsis thaliana
gtaccggtctgggaatgccgggtcgacccacgcgttcggttgactctattcacattgttttggaaagaaccttaacccttcattaagagtgtcttggagagtatccttattatggtcttgaaaaaaagacccgagatgggcctgaaggtggacttggatttgatttaaaccaggaatgccagttgaaccacagatttaaagaggtttaaagctttgaaaactgtttctggccttttcaaagaagaagattttattttttccttggaacaccggagagttttgctttcaccgtttgggaaaatggttccggataccagggggggggttggcccccgttgggcgttgggcctggaaatttgattgaaaaagcccattacttcccccttccggggatgggggtctggttgggggagggcgaaaatttagttgggaccttttaagggcagcttttttcccaaaaaaaaacctcaccttttacaaattaagattccccaagttttggggg

SEQ ID NO: 189392 - DNA, 495 bp, Arabidopsis thaliana
cttgacgtcgcatgcacgcctaccttagcctggattctttagagcgggccgcctttttttttttttttgggttttaaattcctttaattattttgaaaccaaattccccgaagccaatggattctttttaaccggggaaccaattaacctttaaatgggggggaattccttaaaaccgactcctttaccatatttatatatttatatatatttggatttcctatcacgggtggtttttcaggttggggcaccgacttctgtctcatcatgctgattaactctgatgtacagaggctggagcatacgccgcagcaaaagatacactccatacaagtcctaaaacaactcattatggcttcggggttgacgcccttggagtttgtctccactgctgctgccggaggatcacccaccaccgcatctctagtcggataaccaattggtggcggacttgtgtacggccctgatgaagtctctgaaggtttttgcacggaa

SEQ ID NO: 189393 - DNA, 399 bp, Arabidopsis thaliana
ccacgccgttccgcacaacaccagggcaaaccgtgggaaataactttttcctgacaaaccttttgaagaagacatttttggttatggttctacggcggtgccggctcctattaaaacgggaacctttacttggggtttgcaaaccctccttctttaggaaaccttaatcatctggttcgtacgggagctcccttattatagaccttttatttgagccctaccgttgactgattctcaagggcggcttagcgtggaagcttataatcaattgggggtacgctaattgtatgattcaagcttttgaagcttgtatggtgtgctttgtgccaaatctggaccctatacaacgggggagacccctctataggatcactcttgcgttactcctccgtgcaacga

SEQ ID NO: 189394 - DNA, 467 bp, Arabidopsis thaliana
ttccgatttttttggaaagcgcatttattcttcatccacaatcatttcaacccttttaaggggaacaatgaaacctttttcttgcttggtaccgtggttcgtagaatggctttgaaaatagggcctggcaggcactctagtggcaatgtactaaccgaggaggaagaacccgttgaaacttttttttttcggagattggtgctggtaaagcttccgaagttagctgaacagggtcttgtaaaacatccggaagggtcatctgacgaggcaaaggctgctggggcaccaccatcggcttcagctgattcggccccgaggttgccagaagacaaaatcctaacctctgcggttgaggcaggtgtggctgcaatcgtcagttcgattgctggcaactgcaatgcgcgtggaatgacccagtcagaggtccaaaactaaggagatagtccgatcgatggacttgagctgag

SEQ ID NO: 189395 - DNA, 519 bp, Arabidopsis thaliana
ggggcccgcaggtaccggtctcggattcccgggtcgacccacgcgtccgctcttatattcaagcttcgattgggtctaagtaacagaggtggttaatcgaagatcttttttctcttttgagattaatagatccgtattagatccttacttctgttttgtagttgttggaaaaattcagatgaagctaatcttcgagtttcattcgacttagtttcagtttccggcagaatcgatggcttcacggcgaaggatgatagatggaaaactttcgtctcctcaggttacatgtgtattcgatgctaacacgtgtctgagatatattagcttgatccaatcttcttctctaaatgtaatgttgggccagttggacttaaaatagtctctgtaaaccgttttttgttgttgggcttttgctcgttcgttgtatgttatgttcatcttaataaaatcgtcacttgtgaaaaaaaaaaaaaaaacacaaacacacaaagggggcggccgctctagaggatccaagct

SEQ ID NO: 189396 - DNA, 482 bp, Arabidopsis thaliana
acgtcgctggcccccgtccgtagcctgggttcctttaaagcgtccgcccttttttttttttttttttttttttttttttttttttttttttcccataaaccggaatttttttaaggaaccggccccattcgtttccccccaattttgtaaagggcaccaaccttttaattgccaaaccatggcttgagggccccccgtacctcctatggttttaaccggggcccatttaaaaaccaaaaacccttttatttacccttaacacctggaacgggacttgttgcttttgcccccacttgatggctccccctccccagcaagatctttttgaaaaaccccaaccttggattgccaaaaacaagggaatcgatttttaaattttcaacggcttcacaaagtttctcctttggatctccccaatacacctttgctacaaccttcacttttttagccctagagagagtttcaagaacttcaaaaccctc

SEQ ID NO: 189397 - DNA, 415 bp, Arabidopsis thaliana
agggggaagccccccgaccgaaggctgggaaccctctaaagggttggcccttttttttttttttttttttaaaaaggttgtttcctttaatatagactcaggcaaaacggtgaaacctgagccgggtaatgcttgttagataaatggaaaaaccgtctcggttaaacaaaattaggccttgaatggtattaggctttaaacgaagaaaaaattttttttgttcgccctgttaaaccaggcggacagggccaccaaatatagcaaggaaattgcatttggggtcgaggaccacgaagcatgtttttagtggcacaacacgaattggtcttttctcccattacgagaagggatttgtgccacgtccacccattaaccgaggggtacaccggggacaaaacttgtgctagggtttttg

SEQ ID NO: 189398 - DNA, 473 bp, Arabidopsis thaliana
  unsure (1)..(473): unsure at all n locations
accccgcgtccggggttgtgannngtctgtgggggggggaaagatccaantgaaccttatcagagccatttgtaagaggtctttttggataggaagggaacaatcggagaaacggacttcgtcttgtgttttgcctcaggactgggggaggtggaccaacaggtggataaaagcgaacgcgtttcctcttttggggggggggagccccgcgccaccggggggagccgagaggaaagggaagccgcaccgcgccggggaccggagccacacagcgggcccgacccgagagacaacgaccagcgcgcggaaaaggcagagggggcaccagaagagagggcaagcaacccgaacaccggagagaggggacggcaggggggggagacccccgaccgagaacccagacgcagccaaaaaaggaacaagaaggggccaagaacaccccgagacggaccgaggaacggccacgcccaggg

SEQ ID NO: 189399 - DNA, 381 bp, Arabidopsis thaliana
ttttttttggctctcttgaaaaatttttttacggggccaggccccctaccccaaacctggagcccctataggggggcccgcccctttatttaagtagtttcgcggcgtgcacgactattttcataaaagagagaccatataaatgcataatcgcggttattacgttgattcaagacagaatcatactgacgatgcgtcgaataatgactcgtcgttaggtctgaggcattaagaaacggtaggtctcatacggatcttttgtaatggcgtatcttgtgaacaaatcgtcatgtagatcccagccgaagtattgggagcatagtggaggatcttccttcccgagaccatagacgcgttacacatcgatacattacagaatca

SEQ ID NO: 189400 - DNA, 484 bp, Arabidopsis thaliana
cgtcgcatgcacccttccgtaacctggaatcctctaaagcggccgccctttttttttttttttttttaagcaattttacttatttatttaaaacgacccatgaaggccatacacttcctgagccaatcaacaaccataaaaaacaagactttcccaaggccagacccacaaggacatcaaatcgatttaacaaaaaacacaaaaccacgactccttctataaggcgacctgtacatataactagcgttgctactccatgtggaagccttcaagacctcattcactggctgtgaaccgctctccaagcagccgataagactccgagtcaagcacgctagcatacctaggacacgggttactcacatttgagctatcaaacatctaaggctgctgcgcttgagtcattcctgacatttctagtgcctggagatcaggacgtattgaaaggacaagacctgacgcaagaggatgaatagttgttaca

SEQ ID NO: 189401 - DNA, 487 bp, Arabidopsis thaliana
ttccgggttcgacccacccgtccggaacagcgggaaggcttttatcctttccaaagttactggattctggaaggacgggtggggtcaaattgatcttgttagaacggagcaggctcttaccatatctctgtctagttgggcacccacatagacgattgagctcatggaggacacaggttggtttgtgactgagtttccgattttacaggacgacattgaggctaaagcgaataagttgactcctgactggaacacctctcctcggcccgattgcgatctttatagttatcaacaccagcgtcttgaacgtatatctcagctgcggaggactgtgccttttcaagggcccgggcttcaagcaatatgttacaactgtaagtcctcctgcaacagtgcttgtgctttcaatacaacctggtccccagacacatgatatttaaaaattgactcatgcgcgacagctttttatgtttaagagctcacatgt

SEQ ID NO: 189402 - DNA, 480 bp, Arabidopsis thaliana
cccttccgtaggcttgattcttttagagcgcccgcccttttttttttttttttttttagcgggttaaaattggtgcgagctgaaaaattgatttcccgcctcgctaagggcaaataaagcagaaaacctgcagagaaggattgcttcttgaaagcggagacggtgacaaatgtaaaggcattgctgcaaaggttgcacacggtgattgctgcaacaaagtatttacacattagctaactaaaaaagtgaatgactctaatgaagtcctacataaatgagaagatctatccgatgtcccaattcattctatacacagacgttttgtacactaggttgacaaatttgaacgaaagacgctgctatatcatgttcagtgagcatttactataactcggagtgtctatcgttaactatagttttgcaacataggatagacttcgcgcaacctttgattcgaacttgggactactaacacgggaa

SEQ ID NO: 189403 - DNA, 500 bp, Arabidopsis thaliana
gcaggtaccggttccggattcccgggtcgacccacgcgtccggctattttcacgttatttttgagggaggtttcatggagatcaacacgaatctatgacggactggagcacctggttacgagatgggctgccgagctcgccaactcaagcgtctcttatgtgggttcatcctaatgatttattagcaaatgctagatattataaaacgggaatctgattgtttgtatttgcacaatgctactgacgtgcagagttcgtatgtgagatggacgagtcgtctgtagacacactactcggacaatgtcactctgatttgatgtgctgactgaagatagaagaggggaggatatatccagcacgggactcggacatggtgaaatcctaaacgatagcgaggctatttcatgagactagtgtcatagagtgagacacttatatggcccttctaccagacggaggactatcgctgcactacgagggacatgcattgtatgacacat

SEQ ID NO: 189404 - DNA, 492 bp, Arabidopsis thaliana
aatttccgggtcgacccacgcgttccgggaaggtacatcgtattttacatcatccttcccggatctttccaacctgaaccggctgattactttgaacaccccaaggccagctttttgaccatcggccttggctgagtatttaaattcgtagtcaaggaactaaaccatcttttccaatgcccccatccgatgtcggcatttgcttttttttttagccatttagtggtggaactaacttgcacacgccattccatgcgaatggctagatacgtctttgcttgcaaattaccacaattttgttaacctcctaggaggaacgcgatggagatatccatcgagatatgttcggaaggcaaaagaccttaccagtttcaagtacatgggtggggcattgagtctgagcagtctaacaccctgttgggtgagctttgtttctgaaggcatatagattatcccactgccgttgcacgaagggttcactgaatcgatcta

SEQ ID NO: 189405 - DNA, 463 bp, Arabidopsis thaliana
  unsure (1)..(463): unsure at all n locations
gggggaaccccccgccgaaagcngggacccccaaaccgtccgcccgcccggagaagcccaacacacaaaaccaccccggggcaggggcgggcgggaaaacaaaaaaaaaccaggcncacaccccaagacggaaaaacgggaccgcggggcccaaagggcaaaaaaacaaaagcccacgggaggcgccaagacaacccacacaaatttttttttctgttccgaagaaaaaacggcggaaagcggggcccccccccaaccaaaaacggcctagacgcactcagcctcggatcctccccaccctgaaaccgtcgggggggcccccacccgaaaaacaccggcgcgcacagaaccccgggcggcgtcccatcccggacagcacagccccgcaaaacacagcccccggggcctgacccacttttctaccacgagcgcaaacggaaggagccccccgccgggggcccct

SEQ ID NO: 189406 - DNA, 469 bp, Arabidopsis thaliana
ggacccccaaaagggttcgcccttctttttattttttttctttacagcccctcgaggaaggaaaggcggaaatttaaggggttcgaaaaccccaaccccggaattgcccgaacacggaatctctccaaacccacggctctgtgtgggcaaaggccaaggacaagacgacttcaaaatcttttttttttggagggggaaaaaggaaccgaggcgcccccggcagaaaaacgcccaaacaaagaagagtgggggggcccctttcgggcgagcaggaaccctggccatcgctaagcggtaccgtgagactggggctccttacccccgccaccgggggctacccgggaacggccttcgggttctccctgccccaagggagcccaatgggggggggccgcgcaggaccgccggagaaaaggcgctcgtggcctgcgtggagccttctcggggcgcggtgattttccccgcctac

SEQ ID NO: 189407 - DNA, 388 bp, Arabidopsis thaliana
gctggacaaagggaagataaccagggccgcaaccaacaagggatgccgaggggtatagggcccaatgtggaactgtcggggagaaaccagggcaaattgcacttttttcttagggggggggacaccggggaaaaagggaccccgggaatttttagcctgggtggagacgaccccccccccataagaaaaggggccggcaaacacacagggggagggcccgggactgcggtgggctccaccaaccggaggggaggggcctggcaacgcagcaattggaggggccgacccaaagcggagtgggacgcgggcccaaaaccccccccaaaaagcaccggagccaggaatatgccgcgacggggggcaaggggggcgctctaaaaactacgcc

SEQ ID NO: 189408 - DNA, 469 bp, Arabidopsis thaliana
ttaggactatgagacttgacgcctgccgcgtctagctgatcttaacgcgcctttttttttttttgggttgttgacttctatgataccgctcgccgagatgaacagttcttctgtcctcatgaagagaaagaaacaaaatagaaaaaaaagaagcagaaaaaagcctaggaggaacaatgaatttagaaaaccaaaccatgacagaaaagtctgcgggattctctggttagctctaggtgatgatatgatcaagtttcgtcctcactggctttgtatgaagggaaaagaagataatctaaaagattcgccaaaagacacagatcgttcaccgtgatggctcgcctacaatatcgtggtaaaacaaaaacgattgtactaagtagcaattcctctgtttggttgtctcttgttcacactgtaactgccaacataacctggagatgaacttctagctgaaacatctgaagaa

SEQ ID NO: 189409 - DNA, 436 bp, Arabidopsis thaliana
ccggcccgaccccccgtccggaaagggccaacattgtttacggattacttaggccccttgaaagggatcacattgacttccggaatcaatgggctcctattggaatggtcgatgaaatagagcagcctatttgggtacgcggttgatttatcataccaaagacttaccagttggcagatattttttttgttgaagtgttaatgggtgcttgaccagtctgctgactctaaactccatgagggctggtgctccatccttttgtgttaaaacgttgatgttaactgtatcactaatgcgtatggttgggagtaaggaaaaccgtgtattgctataatgcttgataggcgagaggcgcaacaccatactggtatatggaagttgctgagtttggtttaaaaacccttggcacgattaaggctatcgagcacatgaacca

SEQ ID NO: 189410 - DNA, 491 bp, Arabidopsis thaliana
  unsure (1)..(491): unsure at all n locations
cccgcgtgcgggcctgagagaggnttttttggatggaagaaactcgtcattgcaattaggggaaaatgggttctctacattcatacactgctgtacatcggaaagaaacatggaaagaaaacgacggttaaaactgaagaccgtgttcacgtgctgcagcaacaagagcctcaatacgtccatggtttttttttaccaccagggagaaaggctacctaggagacacctggctccaagcaagaaaaggctatcactagcccaactttcttcggtacctcaatggatggaccagaggtgagaccgaactgtggagagatcgggttgtgctagggggaagctgggactaaggcgtggcctgagagggtgataaattactcagacaataagatgcttggtggatgcgaaacacgatacccctggttcttgggggtggacgattgacctaagtgccagtacacgaggggggggcgacactaacgtaactgatggac

SEQ ID NO: 189411 - DNA, 473 bp, Arabidopsis thaliana
gagcccccagagctttcgccctccttttttttttttttttaaatggtggggggagaagcacagcggattgattagaacagaagatggtacaataaaaataccccggcctagttaaggattgtatcacacgcacttgtttttaaatgcactgggcgccccgctcaatggaaagggaaactttactcctttacgggggggacgggaacacccggggactccccggcagggaccaacaccctggggtgagcgggggcagacacacttcattttttagcatggcgttacgcctcaacaagatgccgccgatccagcaggctgaaaagctgaacagtccaccgggccccgccccccctaagactttgaacctgcattaggggtgtatcccatcacaaaacacaccgtcctcgacgtcactccaaatcttggagccggagaccgccccgaaatacaatttcccctctcggggaggcagg

SEQ ID NO: 189412 - DNA, 372 bp, Arabidopsis thaliana
gggggggggaaaagccttgtttatgaggcgtgcgcgttgacgcgcggggccgtctgcggagaacgctaccataaacctcgcgatgagcactgggtacttctgagaggaagtacggggacatcctgcaccaaacgggcagaagaggcgccaagaatttccctcccttggggaggggggccggcggacgcccgaacccgaggggcagcaagcaggcacgaacacgcagcggcgggggcagaggcagacggcgcccaggggagcgagaagaggaagagccagagaagccaccgcggcaccccacggcgacccgagacacggacgcggcgcccagacgcagcgccaggcgcagaagtgagagccaacaaccggcac

SEQ ID NO: 189413 - DNA, 496 bp, Arabidopsis thaliana
  unsure (1)..(496): unsure at all n locations
ctatgacgtcgcatgcacgcgtaccgtagctttggatctctagagcgcccgccctttttttttttttttttttttttttgaggnnaanggaaggcaaagcgccctatttgattacaacctaaaaaaaccacccgggtgcctaaggcctccgtttttggctttcttagggaccacaaaaccgaaacaaaacaaaacaagggttttgggggaaccaaacccgagcgatgcgaacccctttaagaccagtgtggggggaagatgaattccctgaacccggggggccctttagttttcttgggggaggatgaaatgctcaagcatgatcccccccgacaagtgggaccaccattgtctctaaatcaagacgagggacttgcgggatcgcttcctccaaagaaaagctgtaactgcactgattctacttgccaatgaccttaaactccatatacttttttgaggaaacaatcttagacaaggctcctttattagaaccagg

SEQ ID NO: 189414 - DNA, 503 bp, Arabidopsis thaliana
ttgacgtcgcatgcacgcggtacgtaagcttgggtccttttgagccgcccgcccttttttttttttttttttttacccgggtcccaactctggagacaccagggaggagaaatgaatacccttgcttgggatcgaaaaggacataccttggtacttggccgaaggccaaaatcaaaaaacaagttgacttgggcttaacccatccctcattttatatcccacccaagaaacccttggggggtttggcgcccccaatttgaacatctcgaaacggccatgaaacatcgctctgcctgagccacgaaaccggggggctttcctcacaaaggaaccgtaaccccaagggtggtttaacatggctcaacccacactggggggacccggtggtccccaatatttacaatgcttaactgtgtgtcccgaccctgacattcaactacaattggcacctgtgttgacacaggctgggcattgtggatgacaattttttactttaagcaaag

SEQ ID NO: 189415 - DNA, 446 bp, Arabidopsis thaliana
acccttccgggaaaaccaaaacgaaggttgggcaaatgggggacttctatttatcaaatggaatagggcgcgttacccttatgaaagtggggcgagggggcttgaagcttgaagaaacctcccaattactcagccgctggcctgtggtcattttcggaacatctccaaggcgtccaatgtggcctttctctattggagacctcaacggggcccaccacaacggattggtaaggggggtaacaaactctgctggagggacacgacatgcattttcatctgtggcaccctcatggggaacacctgattaggagcgggcttcacatcagcaataatgcccggtcgggtaatatcgactactcaatccgacaccctcatgcaaccgctactttatacttggggagggggattggacaagaagggaccttggtagggctacaccggtcctg

SEQ ID NO: 189416 - DNA, 465 bp, Arabidopsis thaliana
ggacccccaaaagcggccgcccttttttttttttctttttttgaaccaaacagggaaggggggggaggcgccgttaacacacaccaagatccccaagaaggaaaggaaagagacccaccgccgggggataggctcagtccaacaataaggactgggcagggcagcgacgagaagcacttttttacagcggggaaggcccccaaaactgacacatcgtagaaacgggaaacggaacctacgagtacgcaaaccgagcaccagacccgctaaaaccgagcggaagggcggcgggggaccccccaggggaagcgctcgcggacgaaggacaaacccgcacgggggaagagcaaagagaggccccggttccagggggagagaacggaacgaggcgggccgcgaacaagaacgaaaaacgcccacgggagaaacacaaccagaacgccggaagggaaagggagacggaca

SEQ ID NO: 189417 - DNA, 391 bp, Arabidopsis thaliana
acccgcgtcggaaaagggggaaaggttaccgagggaaaggccgggaaacaccccggggggaagccggcggaccttcaaaccaaccaaggcacacctccgaccaaaaccggcgccttaaagggacgggggaggtggggcccgcacccagagaagagaaggggccggggtgtcctccttaaaggggggggacccacgggggggggcgacggaaagaaaaagccgggccgaaggaagcggggcccgccccaaacaagaagaagcgggggaaacgagaaacccccacgggggggcgggagccgcagcgaaaaaacagagaccccgggcggagaggagggcgacccgacgccgaaaagggggggacacagggcacacccccaccccagacgagaaa

SEQ ID NO: 189418 - DNA, 107 bp, Arabidopsis thaliana
gtctataacaatgttttgaacaaatttttatctaacgacaacgctggaaacacatgaggtgcctaaccatcacactgacgaaaagtaagaaacttataccatgacaa

SEQ ID NO: 189419 - DNA, 344 bp, Arabidopsis thaliana
aaaacgatcattttatcggatttgaaaagtgttttaaaaaactgacatttttgtttatttacctatgaagatcaaaatctaaaggaagcgaaataaggaattttaccaaaaaaaaggaacccaaatacttagaccggaaccttgatcttgatctaaaccttcttcaccacaatcataaacagacctatccaaaaccaaccgatattccaagtatgtctgaagcaaaccaccttcttccggttcatcaaacccgccggaaccacattcttcttcacatattcggagcctcaaatcattttcctgggcggtggattcagcaaaccaaggatgacgacttcggagcg

SEQ ID NO: 189420 - DNA, 143 bp, Arabidopsis thaliana
ctccgttgtcggcatcctaggtttgctagctccaccgccgtcgaagatgatttgaggctccggggatgtgaagaacgatgtggttgcagcgggtttgatgaacctgatgatgctggtatgcttcagacatactagcaagatca

SEQ ID NO: 189421 - DNA, 357 bp, Arabidopsis thaliana
  unsure (1)..(357): unsure at all n locations
cgcgtacgtaagcttggatcctctagagcggctgaccagggccggacactgccggccgcgccatgcaccgcgtggtcaccgacgagaacagcgatccgaactcgccgctgttccgcaagaacacgctggatgagatgactgttggccggacagagaagccggtacgcggcgccgtgccggaaaaaccggctcttcccggtgctaccaaccggaatgacgatgccatcatccgccgcgagcgcagcggcatcggctcctatgaggacgcaaacgatgcgcgcaagaagcgccgaccgggcaaaacgggacgtncggggcgggagatcagaatactcacccccctctgggctggcgacg

SEQ ID NO: 189422 - DNA, 402 bp, Arabidopsis thaliana
  unsure (1)..(402): unsure at all n locations
taaaaagaaaacgggacaactaatcaaatcgagccggggaagggaaatttgagttcctcatgaagtggggacgggccaccccgnggaaccaaaaccaaaaaacgcccccccgcgccaaggggggggggggggacccccccccgccccacaagagggaaaccgcancaaaaaaccaacaagaggggggccgggcggaagacacccccccggaaaaccgaaacccccaaaacaagacgagccgggacccacccggacacccaacccgccggaggcggggacacaaaaaaaccccacaaaaaacgaacggcacacggagaaagaagaaaccaagccccaaaacccccggacacggcgggaacccaaagcggccgcaacgcccaacgaaaaagacgaacccgaaac

SEQ ID NO: 189423 - DNA, 277 bp, Arabidopsis thaliana
  unsure (1)..(277): unsure at all n locations
cgtaagcnngggacctctagagcggtcgcccggggggggaaggccccgaaaagaaaaaaaagaganggggaagggggcaagatgacaaaagaaagcagaaacgcgcgcnagacacgacgcacgacgggaaacagagaaaccgacacaggagaccacacggaaaacgcctcgacgccaaaagaaaccctgcaagagagaggacgannaacgcacaagagcgaaaggagacaccccgggagacggaaagggaggggcccccccacggnggacaaaaaga

SEQ ID NO: 189424 - DNA, 494 bp, Arabidopsis thaliana
  unsure (1)..(494): unsure at all n locations
agcnnggatcctctagagcggttgccctgggggtttaagtctactcatactaaacatggtttcccattcttattaaaatgttgcttgcaagttagaaataacagaaatccaggccctcaaaaagaaaacagaaacaattgacttgggaactatgcgatatgggtacaagaaaaantcgatctcctaatgcaagtttgaancccncgcccccccacaggcacttaaaaagcaagtgcacgtactttggtgtcaaaatcgccaccacgttattccgagaaccaggaagatacaagggattcagaagaatctttatataaagctcatgcaccctcttgaaagaaaccttttgatgccgtcctcattccgtgaatcatgaaggagcatcagtcgggtatggcctgcggtaacatatacctgacacaaccagatcggtaaacctgttcactgacttcaggaacatggcacttgtagcccatgctaggtcttggacaaca

SEQ ID NO: 189425 - DNA, 404 bp, Arabidopsis thaliana
  unsure (1)..(404): unsure at all n locations
cccgaaagcngggacccccaaaagcggctgcccggggggtgagagaccccnaaaaaaggangggaaataagataccaggaaanagggccgcacagtaacaaaaggccctccaccaacaaacggaacaagtaagggaagaggctaaaggagggccaacacaaaacgcgaatgaagcaacccccgagggaaacaaccctcaacaggggggcgcaaaggnaaggacaagcngagaccacaaacaaagacaccccagacgggngaggagagggccccccacaagcaaaagggcccacgcagcaaggaacgcaaacccccgaagggcgccaagggcgaaaacngcgcggcccccccgcagcgccaccaaaaaacacgcgccgaaaaagcgcacaancccagcagccaac

SEQ ID NO: 189426 - DNA, 555 bp, Arabidopsis thaliana
ggaagatggcaatcgtttccaaggttttaggaaacggttgtttcttggttagattacttggttcctcactgaagttcaaggggactaaatccgatattcgggttagacaatcttggcaagataacgagtggatcatgattggacagggtacatcaagattaagcgcacacacctttacaggagaactaaggataaaggtggatgcaagcggccactacctttcatttggcaagaatatctaacctgttgacccatgacgtgccatgtgtgcatgcaggcgccggtacacatatcgcgagcctgtacctccttggggctggacctttcccgaatctaccctccgaccagttgtttacccgctccggcgtggtttgagttacacgcgctttactcacaacatagccgacgcgccaaaagtgattcctatagctgttcgtggaagaaacggcaccgtttcagggaaatcaatccgtgtgacgcacgctaggtgtgatcgtctctctctcggagtccacgtggaaattactaacgttggctcgagagatgggacgcaca

SEQ ID NO: 189427 - DNA, 226 bp, Arabidopsis thaliana
cactatcacgataactcatttaatattatacaaagttcaaacattgactgacccccatacaaatgcgtaatatataacaaaaccaaaccaatcgaccacatgtatcgcgagaactcttaatagtgaaagaacgatattcagacaacttacaaagattcttgtgatacatttaggtcatcggatcaggcagccgaaactttatccgtcaaaaacgagttcttgagag

SEQ ID NO: 189428 - DNA, 221 bp, Arabidopsis thaliana
acctaaacatcgacttggttttttagcccattaaacataatttgatcattttatacaattattttggccaatggttgattgcgggagccgcaaacaaaaaataccttgggcaatttttgaaggttccggttcaaaagaaacttttatttactctcccaaagaggggactggggcggaattggagggccggtgcacaatattccaggggggcggggccaaaa

SEQ ID NO: 189429 - DNA, 208 bp, Arabidopsis thaliana
aagctctgtttttttacccgttccccattattaatttctgacggttaaaaaggactcccaaccacaatgaataaatgatccaaggggattttatggcttttgcaaattttgctttgaagcaataaggcaacaaatcgacattgaagtcccttccacaatgcgcactatgcacaagaaaagacctctcaaaagcaaagcaaaagggggg

SEQ ID NO: 189430 - DNA, 452 bp, Arabidopsis thaliana
gaagcagaagatgcaaaatcaaaggccgtcgaatttcaagaaatcatcgaaaggtatacgtttactaattgcttaaggcatttgtaatcatatttctgttctacagtcagagttcatgagtattgattgtaaattccagattacatacgaacctgtcaaaccttgaatccgaaaatcaggttttgcgtcagcaggctttggccgcttcaacaagcgttgaagagattggagagttaaacaggtacggtcctgtgagctgagcagttttctcagcctagtagattctttttcttctatcaggcatagctcttatcagcctgaaggataaggttgcaattctagagtcagaaaatgaaactcttcgaagacagacagagtctgcagaaaagacaatgcctcctgcaagagtttttgcgtcttgacttttatggcagagaaccatgtaaaacaat

SEQ ID NO: 189431 - DNA, 407 bp, Arabidopsis thaliana
aacaaaagaacatgattttatttctgtgtatttagaatatatgcagtagatgtattaaatgaataaaaacctggtctatatttagtgattttgtggctgtgtctcatcttgggtcttggctttactccttagcatctcagtgaagttgcctctcatgatacgtctgaatctcgtgtcttcacttgctgcagccacaacctttggtgactcgggtccctgacctgtcggtgatccaggtgccgtgctttccgttgcttctttcttccccaacaagcctccttctccaaacaagctcgtgacggatgatgcaatccccaagtgagcacccatagctttactaattgcttcaaatgtcccacctgatctctccttcattatgatctctaacgcttccttgtgagctggat

SEQ ID NO: 189432 - DNA, 235 bp, Arabidopsis thaliana
  unsure (1)..(235): unsure at all n locations
gatcggcaagaaaatgtcttgaattcatttgtctataaatcaagccgngacattacgtgtgggagagttatcaagccgtgacattacaaataaaaagaagaaggacgtagaagaaacaataaaagaatgaattaagtaagaatcatttttaactttcaccaaaaatttgtgacccctttatctgtctttagctctcagaagaaacatgaacaattagctccgagagattcagtct

SEQ ID NO: 189433 - DNA, 517 bp, Arabidopsis thaliana
gaattaccgggaccacccacgcgtccgatcgtttgcttcgctgattaggagaaattcctgcgttttttttttttagccacttaacacctcccaccgcgtatactgcaggtggaggactaggagcactatctatggggattctaaaataagtgcctaaagtgctatgacttgtaaagaaatggtcgcgccatgcctataactgagatctatgttttgttgccgaatgtctgttcataacaaacatgcccatctaccattcactgacctcttgtcggggcgctcaacggagtgcaccttcgaagtgttaccgggtgatataaaacccgtttcagacaaaacttcttgctctctgaacgaacggttggcttctaccccttaacgtcattcatccaacgggtgtgagcttcgtatattccaacaaagcatgacctttgtgctagttcacttgaccatccccgactggagggagttacttccactctttgagtatgctctctctaagcggccttaatatgat

SEQ ID NO: 189434 - DNA, 579 bp, Arabidopsis thaliana
tttgaaacaacacaaaggttttaattcctcactgggtttattctttatgagaactaacagggggagagaggattgtgtttaacgcctaacagtataaccagaattgatttggtcaatccgtatttggacgtcatcaaagaactaaatgcaaagcaccgtacaagaataataggtaagctcagtcaatacatgatgtacatctattaccttaatgacataaagattatttgaggagttcatgccgagtgcactaaaactgaagattttgggagacaagaatagtgttactagacattagctttgtgaaaggataaaaaatttatgtattattaaaaaacattagtggctcaaatatacaggatgtggtgtatgtgtcaaatgttataagatttgaaggataaaaagtttattatggaaaagaaaaaaactatacgggcggcctcttctaagaggatacaattttttaccatcggcttggcttagcgaacatttggaagctcataatatttgtaggcaaacctaaaaaattagagtttaaattgggaacggtcatattttacaaaacgcagaaagaaacag

SEQ ID NO: 189435 - DNA, 731 bp, Arabidopsis thaliana
cgcacggcgagcgtaaagcgagcaaacgacgccggcgagccccgggcgcaaccaccgcactaccgcgcaccgggggcacggaaaagcgcgcgacaaccaagggagaaacaggagaagacgcgggaacacggcggccgaaaggacgccggacgaccaaaagagggaggaaagacgacaacgggcgacagggacatgcccgcccgttcagggcaggtcatccgcgccgccacggcgcaaaccccggacggaggcccaaccggacaaaagaccgcagcgcacggaggcacacaacgggccatgctgacggggcgaacaccgcgtgggccaccgggcggagcaaaccatcagggacggcaagtaggccactgcagccaccccccggagtccagcagcagaaccagccgacccccaagaattcaggcagcctctcccaacgagccgagggcagcagaatacgaagaaggcggccgtgaaaacccaagaagcagccaaggtgaaaggggaggacaaacccaccaccaggaggccgccttcggccatgctacacacgatcgcaagcaaggcggccaggccctcaccaaacagcgccgggggcccgaggctgccacgggggcccaccgcacggcctccggagggggtgccacaaacacccagccgaaggccgccacacggggcggacccgccccccgagggcgtaggggggcgaaagcccacagagaagtctaagcacc

SEQ ID NO: 189436 - DNA, 512 bp, Arabidopsis thaliana
agaaacaggaggcgggatctcagagtcatcacagaagagcaaggggggggaaagaaggcagaggcaaccgaggcaacatgataatagaccacagaggaaagagcacaagaggccgaggaagaagagaggggcgaacaagcgggaaggaggcaacaaaaaagggaggaacggaggaagagagcgagaagaagggcggacacgtgagggcagacgaggggccaagggcaagccagaccgtaggcgcgggagaacacaaaatcagaaagataagcacacgcaagcggcccacagaaacaaaagagggggctgaaaaacaggggggaggggacaaccgaaagaggagagagacagaagaactagacgtccaacaggcaaagagccgaggggcaagggcgctcagagacgccgacgaagaagaagcaacaccgacagatggaacaagtaacgagagcagaagaaagcgagaagcacgagatagcaatgcggaaccgtaggagacaaaaaagcacgac

SEQ ID NO: 189437 - DNA, 588 bp, Arabidopsis thaliana
cggcccggattccggttcgacccacgcgtccggtacaaaaacttagacggggccgttggaattttgccctttttattcctgctgggccgagatcccaagcaaatagcggagttagggtggccagaaattgttcgagccatactgagatcttgctcggcttttgcaaagaattactggagagaacggctcatatcagatatgcgacttcagcaaatgcctctctcatgaatggaccgcacaggtgtactatgcaactttgagaatcatatcgagaggcatggacgattgtgtacgctattgtggaacgcctatggagagaaatctgctttaccgacctgaaaagaaatgctagcgttgtcagatggcacagatattagctgtatgcccaatcttgtcgtgatactatgtaaggcaccttggatatgtctacagcgtgtctctcggaacgatggtcatagaactctccggctaaggaagatgtgcgcgatagagagaagatttgagtgagaaatttcgctaagttttggctagacgaaaaattgcgtcttttactaggtgagagcacgacccttatattgaatttgggct

SEQ ID NO: 189438 - DNA, 161 bp, Arabidopsis thaliana
ccgtcccggattcccggtcgacccacgcgtccgatcgcattaagattttcaattgtaaaccctaaggttcttcctttttataagcttttggccggacattgccgtacccccagtggtccggggtacgtcgggaagtaacttattttgtacctgagacactt

SEQ ID NO: 189439 - DNA, 414 bp, Arabidopsis thaliana
aatatatcattaacgcttggggattttttattagaaactccgatatcaaccccatatttccagattgacgttttttaaacctccaattttgatactctacaaaagggaggtcaaaagataaaagaaagaaactacaaaatttcagctagtcaagaagaagaaaagaggaaccaaacaacattttattggtcctactattttaaaaggacccgtataaagtagcaaaaggggcttgtcatttctgcaaattcagcttgaccttctccaacactttccataatgcagacttagcttcttctagtgtctcaacaccatgaccttcctcaaatgctagcctttgtatgttaaactgagcaccttgacgaacccgtacatctattcctttgctatctattgaaatgagagcagcatcgt

SEQ ID NO: 189440 - DNA, 648 bp, Arabidopsis thaliana
cgcccgcccccccccttgacgtgcactggcgtctgcggtccgcattcccgggtcgacccacgcgtccggtctgcttgatttctagatgacactgaggagcatacgtggctttttacttttacactgcatacagaggaccgctctaaggcgtggtcctagaactctttagcggcaggccaatacctgtgccagagcccgcgaagagtgcctatcttcaggcttgaggtccagactcttaacactatctatggcaacagagaaggtaatgaggcagtcttgattagtttttatacagaggaaacctctggttcattagctgaagatcttcgcagttctcaatgctcctgagattggtatggatccatggcgttaggacccttgatcgtatatccaagagtgcatgcgagcaaaacacctgtgacgatgccaatactatatcgatctggggactatccagacttcatctcaagacatacagagatgcccctcaggtgtactgaaatagtaaaactggcattgttggcttaatatggctcagtgaggtgaattgttgacctaatgctattgaggacttgattggcccccgtgttaaatgtaccgatctaactgacgctggcgttctagaaaaatgctttaacttatggtcat

SEQ ID NO: 189441 - DNA, 288 bp, Arabidopsis thaliana
aaaatttgaatgtccgttgcagtaccgggtaccggttcggaattccacgggtcgacccacgcgtccgatcatgattctatacacaatcagcagggagaaaatcgtgcacttaaacgaatgccttgtacatggccactattgcataagagcaatatacttggactagcatgacaatatgaaatactcatctgtgcagcgaatctgatttgtactaacatactacgaatgacgcagtcatttcagcatgaatgcaaataatgatacctcatggagtagacagcaaaagag

SEQ ID NO: 189442 - DNA, 206 bp, Arabidopsis thaliana
aggtgaccttagagacttgacgtcgctgccgcgtcgtagctggatctctgagcggcgccttttgtttgggttttaacaggcttagtttattgaacgaagggcgatctttatcctatccaaatagttgtacatagcaccacgtccaaaagatacgataccaagactgttacctctcataacgtgaagaagggtggccgcttgctcct

SEQ ID NO: 189443 - DNA, 486 bp, Arabidopsis thaliana
ccccttccttagcctggaatcctttaaagcggccgcccttttgtttttttgtttttgagaatgggctttgttaactttaagaaacgtgcccggttcttgaaactcagaaagccggacacaggaactaaaaacgggaatggggttcagggattcttcggccgtaaactcttctaagggaattgacagagaccttacaccattctacgggttttaggtaaacaatgtctttttccaccgctgaagcacaaaccgcagtttgctttggaggttatgtttaactcaaattttagctctgaatgagatcccatgttatacaagcttttgacaactctgtgaagaagggcgacctttgactactttagccaaggctatgttctaatcacgccgacgtaaggtgatctatgctctacccactctacggccttgaccccaatatgctccaaatctacggttcgggtttgacggattgctgactccagagaacac

SEQ ID NO: 189444 - DNA, 400 bp, Arabidopsis thaliana
  unsure (1)..(400): unsure at all n locations
aaaaaacttataacttccaatgcccccttccttaagctggaatcctttaaagcggccgcccttttgttttttggttttttaaaaggagttgagtatatttaacaaacggacgcctttacatgacatgtatcaagcggggtcaagaaccaactacaggaaatncgttcatggacttttaggagtcatcatcatctagagaaatggacgaaaactttaacctatgctaggggtttgatggaatacattccattttccagcggctgaggactaacacggatttttcttttgagggctttccctatggcaacttaaagcctgcagtggctcgcgacgtattaacgctttgtacacattattgacgtcggcgacgtgtcactacattgaccaaggctgggtctaa

SEQ ID NO: 189445 - DNA, 417 bp, Arabidopsis thaliana
gcccccttccttaagctgggatcctttaaagcggccgcctttttgtttttgggttaaaaaaaaccttcagaagatttggaacagagggatgggcttaaacattggggccacgacgtttttaggaatgggaatggttaacccatacatagactttgatcacacagcataggcgatagatacggatttggaggctcccttttacatgggcgggaatgggaaacattgtagtcatcaaaaggtgatgtaatagtggaacctttctcataaacccaaactgtcgcctgaactatacttacagacggctccttctataaagactttgggtgccgatggtggatcttttatgcatgggaaaaatacaccaatggttggatcgaataacctgacagactggatgacttgcgaaatggataacct

SEQ ID NO: 189446 - DNA, 469 bp, Arabidopsis thaliana
  unsure (1)..(469): unsure at all n locations
tacgtaagcttggatcctctagagcggcctccctttgggggtgaggtgtttaaaaaacaccaaaaagcacaaaacccgcaaaaagcataaagctcgggggttaagttacaacacacccccaatccgaggaaaaggtttaaaaaacactgcaaactgttggaaaataactaacaggtcagcccaaccgattactanatagggggggcgcngcgaaaacacagggccctgggggaatagacatctccgggcagaaggtataaaagtgaccctaggggctccaattgtaccggcaaacgcggcaaattttctccaggggaaaagttacggtcaatccctcggagtggattcttaacgaccgactacaccaccgctgcatcaacaagggcgagggctcttcaaacccgctccaaaagcgggggccccggggctcctcagggtcgggcatcccaacaagacccctcaaaaaacc

SEQ ID NO: 189447 - DNA, 489 bp, Arabidopsis thaliana
gacgtcgcatgcacgccgttacgttagcttggattcctttaagcgggccgcccttttgttttttgtttttttaaaaggcgctttgaatttctaacggagggagcttcttaatcccaaatcactcggggggttgatgaccacccccaaaggactccttacataacctttttaaaaaccacctacctttaaggaaaaataggcaaggtctaacttttgcttggggtttgaaggaaccactcgcattttccgcagctgcgaaaaaagagcaatttctttaaagagcccatcccctagcacaattaaaagcttcaattggctcggccctaacggacgggttgccctcatccattaccctctgttccatgtcaaaaacatatccaacggcttgactagaaaccgggatagaaaggatgcctctatccatattagacaaggccgggtacttgagcttgctctgatcccaccagtcacgaacatcaaactcctgac

SEQ ID NO: 189448 - DNA, 486 bp, Arabidopsis thaliana
  unsure (1)..(486): unsure at all n locations
gacttgacgtcgctgcaccgtctaagcttggatcctctagagcggccgnccttttgtttttggtttattcaatctttttgaacctttacactggacctgggtgacctccacccacattaggcattagctatgcaaaattttttatataaacatacagccgacatcctgacatctctgaaagctgacacatcatagttttttgtgaggaccgtccatacatctctcgtaaatggtaaccgaattggctggatccgtaactgatttatcaagagctttaacatgaaattttatacaaattctcaaaaccattgggtgctccaagcaatgtcttcatttgatgacatataataaccgaccttcatgccttggtaactcctcatttatgattggatctccttctcaaacctttctaaccctggactatcctatttctacatcataagaggatccctatgtgccctaaatgcgaaattcattgttaatctc

SEQ ID NO: 189449 - DNA, 353 bp, Arabidopsis thaliana
  unsure (1)..(353): unsure at all n locations
cgattgtttggtgactatagagacttgagtgctgccgcgtcgtagctgatcttaagcgcgctttgttttggtttaaaggaactttatatgggaactctattcaacacacgcggtatagacttcgacaactgactactacatagacttcttgtacacacgtgggagaatgactttatcaactttatggaggtaggaggatcttcagctctgcttagctgccgaagaacaagcattcttctgatgaagccttttggtagaccatattagatcctaaattggctactgcttcatgtacttctacaactaatccatgtaggatngtgttcatgataaatacttagtgcacggctgca

SEQ ID NO: 189450 - DNA, 485 bp, Arabidopsis thaliana
cccttccttaacctggaatcctttaaaccggccgcccttttgttttttgttttttgaaaattgcctgtgaaattttaaaaaagggaacctcttcttgaaaaacacacaggggggtcaagaactaaccacagaaaacagcgtcgatgaaccttctagaaaaacaacaccttttaaagatattgaagcaaagcttcacctttcctacggattggagggaaccacttccattttccacacctgagaaaaaacaagcattactcttaggaggccattccttagcccaatttaaagcctccattgaactcgcaccttagagacgctttgtactaatctattaacatgggttacatgtcaactacatagtcaaaggctgcggctgaaaccgcgatcgaaaggatgtctatgcccatactagacaaggaccgggactccagcttgttcagattccaccattcaggatcatcaaactgctgaaccctgggaac

SEQ ID NO: 189451 - DNA, 414 bp, Arabidopsis thaliana
tcccatgcccccttccttaagcttggatcctctaaagcggcctgcccttttgttttttgttcggaataattgggtaactgattttggaaaaaactgcgtcttgaaagcttgtttaacattgaacaattgagcctaaacaaaaagagcttttctctattgcatagggtactacctttgccctcctcctatgatgcatccatattgactcttgcttgagcgctgagaatcacaacgaaccttcttgttgataacgcacccttcggcgggatcctaatgccttaccgagagatacctttataggatcctaatctcttactatactcactcactcactagaaggcttactcatagatatcatatattaacctaaccggaacctcagctgactaatactactgcggacttcatcatata

SEQ ID NO: 189452 - DNA, 494 bp, Arabidopsis thaliana
  unsure (1)..(494): unsure at all n locations
gggaggnngggagccccaaaaggggtggcccgcgtggtcaaacccctttttctaggccgaaagggaggcggaggagagaaaaaacaaaggggaaaaagacccaacccaaaaacggggggacaaaaaaagcggaaaacaccacggccagagggggaaggagaaccaacgccgtaggggaaaccttcctccggcggggggggcaaaccgagagaaaaaaaagcggcgaacagaaaaagacaaacggcgcggggaccaacgcccgggcgcggaggaggacaaaaagcagagggcggaccgccacgggcccgcgggaaaaagcacgggaacggggcccccgaggaacccccccaaaagaccccaaggagggggacccccccagggggggccgggagaaacaagggcccaagggacaccgcgggaggagaacaccggggaagagagaaaggaaaggggacccccgcgggcaccagagaaggagcaccgaccaccaagac

SEQ ID NO: 189453 - DNA, 457 bp, Arabidopsis thaliana
  unsure (1)..(457): unsure at all n locations
agcgggacctcagagggtcgcccggggggaaaactgctgaaaaaaagagccaccacagcgggggaggcagaccccgacggcgagctcacaggggcgcccgaacacgcggagcaccacaccggggcgacagaacaagaagaacaccaggagcacatcctcaaaaggagcggaccccagacggaaaagagggagggggaaagacccacgccccccggggcagagcaacccacccgcagcaccgaagggccagagcaaagaagaaaccggccccggacaacacaaaagaacaggggccgccgcggaggggagaacgagagggccaccggaacgacccagcgaaagccacccgagccgagccaacgcgaaagcgcgccnnngcccagacagacagnagcgccgacgagaacaaccaagagggggaaccaagcgcggccgccagcccaagcaaggaaagaca

SEQ ID NO: 189454 - DNA, 173 bp, Arabidopsis thaliana
ggagccccaaaaggggtggcccttttttttttttcttttttataaaaccttaaaattacctccaagaggctgataatgggtccttccaaggagagcgttaaaatttattttggaccggatttataccctaggaaccctgccacagctcattgaggagggaaccggccgggcag

SEQ ID NO: 189455 - DNA, 543 bp, Arabidopsis thaliana
tgacactatagaggagcttgacggcgcatgccccccttccttagcctggattctttaaagcgggcggcctttttttttttttttttttttaaaaagaactggttttccattccctaaaagggaaacccacaaaccaccgacgaaaatgccccccttggtttggaaattccaatggatttaaaaaaacaaaattactggacttttaaaagaaccccgcaaacagaaccttttttttttggcgggacaaggaaaccaaaaaacacccgtaacattaaactggtttctcttagttcatgaagttccgttcttggggtctccaagtatgtcccttaatcttggccgtacataagcccttaacccttgagcctcctgtaaaatagaaacacccactcgataatccatctggagtcttgctccagaagaagaaggctaatttttgcttgagtttgcgatagaaaacgtgccatataaggctaaggcaaaggtggatcttgtgggcccgaccataatccgtcatggggacgattttgacaccctgaaatg

SEQ ID NO: 189456 - DNA, 471 bp, Arabidopsis thaliana
  unsure (1)..(471): unsure at all n locations
cccgccgngncggagcnggaccgttggcggcgcaaccccnnaaaaaaaagaagcccccgcggcgacaagaaaccccgccaagcccagacccgaggagcccacacccgcggggccgaaacgcacagaggagcgcgacgaggagaagaaccgaagccacgcggcgccctccctaagggggggggaacaaacaggaaggaacagaagagggaaaaaaacgaccancgcagaccagggagcaagaaacccacaccacaagcgaagggagaaggggaacaagcaaagcaggccaagaaaacacgnccaaaagaggaggaacncgacgcggacaacccgcaagaacccggccangaccacaacggacgagggagaaacacccaacacgagcagaggacaagacaccagcgccacggccaccgagcgggggaccaccngcgagagaacacccgagagagacgacggggggggacgaaa

SEQ ID NO: 189457 - DNA, 482 bp, Arabidopsis thaliana
  unsure (1)..(482): unsure at all n locations
acgcacgcgtcacgtaagctgggatcctctagagcggtcgcccttgtgtttttttttttttcaataaaactcagtcgccaccacagagaggacttttgtcggatgccagatctggagtcaaaacactctggaacccgtaaacatgggtacgtatagctggcgacaagaaacgaacacacccccgacgacgcaaactcccgtgataaagngggggcggaacacagagagaagcccgcnaccggacccacccccaccaacggctggggaccccaccgaaggagagcggggaaggcgcggaacagaagccacgcgaccagcgaggacaggaaagcgcggaacgaaaaaaccgaccgcgcccggacaaccaaggagaagcaccagcacccgcgccgagaagaaccaggccagaccacgcccgacgacaaagagccaaaacacagagccaccccgaaagccgaacgaagacgctcccccgcggaccg

SEQ ID NO: 189458 - DNA, 519 bp, Arabidopsis thaliana
atgcccgcctaccttagcctggattctttagagcgggcggccttttttttttttttttaattggaacctaattatttattccaaatagaaattcaccccaaattccaaggttggcatttttggggaccaacccaaacccattccttggcccggccaaaccttccaacagtttttacccttaaaccaccacagaattttgtttaaaccaaaattttaacacacacagttaattccttccaaaaaacattcaccgaccctttgaatcaatcaaatgatattcccacccccaacaaacaaaacctttaaccaaacagacaattctgagtttctgcccgacctttcggggcttgtgctcttccatgacggttcgatcagattaaacgaatgctccttgatgattacaacttttttttttcacaacgaaatgaatcaatcattgttgctttcagaaaaaaaagccaagagatgactaagaatatacgaagcagaagattacacgtgataatatatattatgctc

SEQ ID NO: 189459 - DNA, 314 bp, Arabidopsis thaliana
cgggtgggttttttgagaaaaaaacccccaatttttcccggggggttaatttaaccaccaaaggaggcaacttaggggtaaaccaaatttcaccccctttttaggggggttgaaaacccccaccccctggttgggttggaaaagttcaaagatttgggaaacctttttcaggaaggccttggtttaaaattccccctttggggtaaaaaacaaggccctttatgggtttcatttaaggattcagggggcgccaggggtttttttttttttaaaaggggttttggttttattttgggggctaataacccccttgg

SEQ ID NO: 189460 - DNA, 332 bp, Arabidopsis thaliana
aaaattgaagttagggcggttaaaaatgttacaaaactgattatgcttctctaaacacattaccccaaaaaaaaaaaacagaacattttttaaaaattaacactcaaaaattacatttgtaatgcttgagaagcctattggcttcccttaaaccactatagtaggccccatgggttggggagtaaggggttctatgtgttgcttcccctgcaaacatgacttgaagctcatgaaccttggcttgatcatgaccattgacctgaccaacctttttattaatctttggcaatggctcagccattgcgtctaggtcatccccgtttgatccaacc

SEQ ID NO: 189461 - DNA, 508 bp, Arabidopsis thaliana
aggactatgacgtcgcatgcacgcgttcgttagcttggattctttagagcgggcggccttttttttttttttttttttttttaaagggaagaccccttttaataaaaccaaagaaaccgggcttaatttttgtttaataaaaaaaaaatgccggatattttggaatggattaattattgccaagccccttgaaatgggttaaaaaggaattctgcccgggaaaaagcgggggttttggaaaaaaggaaccggggtttttgtttttttcggcgtaagagcgaccagggaggcttattgatgggcccggaagacgattggtttgaaagcagaggttgttacaggttttccctgggggggcaaattccgaaggaggaaggcttgctcgagtccaaggcctgccaatccgtttaagggggttcatttggcgggcccttggtatacaatttcggagttttattcggaatccagttatgaaaggagtggacttggcccaaagattttggatctt

SEQ ID NO: 189462 - DNA, 514 bp, Arabidopsis thaliana
aggggacactatagaagatcttgacgtcgcatgcgcccctaccttagcctggatcctctagagccgcgccgcccttttttttttttttttttttttttttttttttttttttttgggagggaaattccaaaggtcttttttttttttcaaaccggaaaaaaaatttcgggccttggttggttggccattaatttcccaaaagggaaattttccaaagggggggttacccaaaaaattcttagccagaatattggttttttggggggtggttttttcccctcccaaaattttctgaaagaacaaacctttaattcctttttttaaaaacagggggttttttgggaatttggccctgtgggaaaaccccaggatttaaaaaagttgggctaaaaccttttctggttttaataacccaaccaggggctgctccaatcgggtttggcggccccggaaacccttttccgggggcactggggtccccctcaacggcctttttcatggggacccgtttccc

SEQ ID NO: 189463 - DNA, 514 bp, Arabidopsis thaliana
cccgcccttaacccggggcctcctaaagggtcgccccccggggaaattctttttttttttagggccaccaatggcgggggggagccatggagacctcgaacccccctgccgtgtgaatcccagaccggcaacggggtttgaatgggtaaaatttctttacgggcgcaaaaaataggggtggagggcccaagtttccctccttttgagggggggggaaaacccacccgaaaaaggaccaaaacggccagagccacctggggagatggcgcaggaaacacctctggctcgggatgaacaagatttccatgccttgaaaagaaacctatcttgtttcatcccaagcatgctttgcggtctccgggaccgggttttggctcttgctgggtccgtggaccgccctcccgggctatcccccgggatagcacagtgcccaaaaaaagaaaatggccactaaaaattcgttttatagaggggacgtgcctcttttgacttttaaccaaggggggcaatttgg

SEQ ID NO: 189464 - DNA, 1343 bp, Arabidopsis thaliana
gaaaaaatggagggggggagcggaaaataaagaagggaggggagaggaggaagaaataaagggagggaagaagtatgaagaataaaaagtgagaaatgatatataacataatatttgggaacgagagggggggaggacaggaataaggtagcttacactacatggtacaataggaggggagatagtaacgagcaaaacgaaagtagtactaaacaatacttaataaaagtgacgttcaaaagattgatgagaaaggagaaaaacgcaaggtagaataaatagagtgaaaagggaggaatttatgggacaaagaagaaaagaagggatataatgtagtagtgaaaatgaaaaaaagagataaaagagaaagaggtaaggcagggaagaagataagagactgaacgaaggaaggagaaaagagaggaaaaaaagaggcacgggggaggcaagaaagagggtggggaagaggagagagatgtatgcgatagaggaaggaaagtaagatgaagagaatttaggtgaaaacggagtgaaaaaggggaaaaataacgaaggattaaagaactagaataaaggtaatatagtagtggatatgatagacgaaagaataagtggacgaaacaagcgagatcggatataatagttgaacaaagtagagggtcgggtagtaactgagaaattacatcgagtaatagagcgagaccaaaataggtatggagtatataaacaattctacgaggaacgagataatggaatgatgaacatggacgagaacaaagaagaaggtgaaataacatggagggaaaccgaatacgtgagaataaaatatgcggagaaagatgaggggagaaaaagaggaggaaaagtagggaagaaatgagaggagaagggtgaaataggagggaaaagcgagagaaaaaaagggaaaaaattgagaagaaacggagaaaatggggaaaataggaaaaaagagagaaaacgagatgacgaacgagatataatgggaaaaataagggagaaggaggaataagagtggagaaaataggggggagaaatggagagaaaggggggaaaaaaaatgggagagagaaggaagcgaattaagagtaagatcgagggttaacgggaggtaagaagtggggaaaatgaggaaagagagggggagaaatgagggacgtaaagtgaggaaaataaggggggaaaggggggaggaagggagagagaagagtgggaaaagtgaggaaaagaggggagaataaattggatgtaaatagagggaaaaaggtaggaggtaatgaaggggacaaaaagtggtaaataaatggggaaaaagaggggagaaa

SEQ ID NO: 189465 - DNA, 658 bp, Arabidopsis thaliana
ttcccgggtcgacccacgcgtccgggcgatattaacacatgaattgtacgacaatgtcaggtttatgttgaaaccatctgagaagcccggatctggtgcacgataaacctgaacatattcagagagaacacatatacctgctggctcacttgacgaatcccctaggggttaatctccaacatgacccagaccacgtgtgtccgtctatgcctgggcacacaccacccaatgatcaggtaagaaactttcaaggataccaaagagcgcggattcttcaccaacacgtattactctacggaaggatggtataaagaaaacgaatatctaccaaatgtgggatatgtttaactactactacacaggtgcctgattttgaagaagacttattagcagcgttaatttcattaataagatattcctaaaaaaccctaacctgtgttctttttttggtgggccatcttcggaatcggagctttggtgtgtcgatttggtcttctttctgagcgaaagcgtgtctcaagagaaagagctcttcttgtcttatattgttagacatgttcgaatgtcgattgtatattttgtgtagctattcctggggcctctcatttccttttgaggtaaaaaaaaaaaaaaagggtcggacattttttaaagggac

SEQ ID NO: 189466 - DNA, 571 bp, Arabidopsis thaliana
  unsure (1)..(571): unsure at all n locations
acgggggcgaccacanagggccaaaaaacgcaatcgttaagtaactcccccccaagcgtcagggggggaacgcccccgcccgtagcctgggagccccgaggggttggcccttcgttttggcgtttttaagaggggggacccaagccgaccgggggggccgaaaaacagagcaccagggaggtcggaaaacgaacaagcgcacgggcgctgaagcgccgacggcggggggggccccccaacgggcaagagagggcaaagggggcgggtttttttcttggggggggcgggaagagggcggaccacgccgaccagcagtatcctggaaggcagggggaactcaggggccgaggcccaggggggtgcagggcgcgagagcgcgtcggtcccagaggaaacgcccgcagccgcgccgggagaggcgggggcgggacccgcggacggggccgaagggccccgggggcgcagacggggccgcgatggagggggcgggcggacgcggggccggcggccccagcggacaggtccggccgggcgggggggggaggggcgggggcccccccctgcggggcca

SEQ ID NO: 189467 - DNA, 451 bp, Arabidopsis thaliana
ccccgaccgtaagctggagacctcaaaagcgtgccgcctttttttaatatctttgtttagggaaaaaagggccacctttgtgatcgcaaaaaaacaaaacccaatcacgtgtggaacgataaatacggccggtgctcaaacacacaaagaggatggaggcaacacacacacaatggccgaacctacaacagagtgctcttcagaaggcgggaagaaaaaagcatacacgaacacaaatattccgcgagaaaaaaggaaaacgcaaagggaaaaccactcaacaggagcggggcgcgtaaacacttcatctgataacgcaccctgaagcaccccaaacaaaagggggtggaacttgactcccggaaaaaaccgttccggaccaaatgcggcccgatagcttgagacagcccacagaggcaacgggtcaaaacaacaatgataaaaccagggg

SEQ ID NO: 189468 - DNA, 501 bp, Arabidopsis thaliana
ttgacgtggctagtgccccttccgtagagctgggtatcttttaaagcggccgcccttttttttttttttttttttgggggagtacgggcacttttttattagccacaaaagaaacaccggtaacgttgaatgatggtatacctgggtgtcttatataagaatctgattacattgccacgcgcctcaatggcgtatggaactctgagacttaacctctaaggagaaggtaagtatgatggccggacaaaaataactccgaaattatggtggtggaggagatttggacccatgatttggggggggctctacctcttctgctgaaggcgagcctggagcaccccattctaaaggattggccttttcctccgttaagaaccgtctccgacaaatcggtccctacaggatatccgggtcaaaaaaaatacgggctatacggcgactaagaagcacgtgccccgctttggacgggataacgctgtcggggctacaaactggttagga

SEQ ID NO: 189469 - DNA, 248 bp, Arabidopsis thaliana
ttgcggaaacactatcacactaaaaagaaaaacatactaaaaaattctacaccaccatactactaaccttgcactaaggatgactacaaatctcctacaccaccatatggctacagttatacaccaacaccatcatggtcaagagagacatggacagtctaatacacaagaataagacgctaagtataactctgaaattgaaagtgaggaattggacaatacaagaaaacaaaagaagcgagatttcg

SEQ ID NO: 189470 - DNA, 1426 bp, Arabidopsis thaliana
  unsure (1)..(1426): unsure at all n locations
caacggaaacagggggggggggccgaccaacttgggggggggaaggcgaacaacgggagaaacgcagcagtgttttaaatttttaaatgggaaggcgcggaaacggcatatccaaaagaagttggacaagcgcaacggccgacaaccgccacacagtcgaaaacacgaaacaccgaaaaacccaggaaaacgcaggaacaccgcgcgacaagcgggaaaaacggcgaaaaatcacccgtacacgagggaaatcacgaggcgcaaatcggcgaacaaaccgcgtaaatagacagcaaaagtgtagggagaaaagacgcgaaaaatacgttgatgctactcaaacgcgatagagacagtggagacagagctcgcgtgcatattgaccgcgcgacgtcagtgcgcgataaggtgatgcacaacatactcggggaagataaagacgggacgacactatagagngcagaaaatacgaacgagatacacacacgcgctcaactaccggaaggttaataatcgctgaacaatactaaggatcgacaaatacgacgagcaagatacctgcggcagtaaaaccccgtcggtacaacatcgcgtagacgatatgatcgggtataaataaagcagggggaagattattctgtcatcgcccgtcctcgcgcaattccaactgcactctccgacaaactgcgggaacaatcaggagagcgtccaccgaacagtcagaagagagctttctgtgcacaataagatacctcgacagaataggatctactccgccagaagtgataatggcagacacactacggacagagatcaatcagacgaatgaataatatgtggngactcgcaccatggagccgatatcaacaccgcgcggtcacgaagatatctgacgtcaagtcgactggagataacatctcactgactaagcacactgcggccggaggtaatactatccgcagtgctgcgcggccgaagaatgacgtcgcacgaacaccctgagagcaagcgccaggactcaacttctgctatgaaacactgcgggaacatgtcagcagcagcaacaacccaccacattgtgggcgaaaataatgcggtgaggaagacggatccacatagtgcgaaacaactcgcggctaaattcgggcagaaaattacgggaagcaatggcgaagcgaaaaggcgcgaacaaagggccggcaaactagtggggcaataactggaaggacactgagggaaaatgggggataaaaattcggcggaacaaattcgcgagacatctgcgagacatatcgcgctataatccggggacaaagaacacggctaaaccgacgaaaataggtggcactaagcggcgaaaaaaccgaataactggcgcgaaacacgggagaaagtcggtgaagaaccggtgcaacactgggaaaac

SEQ ID NO: 189471 - DNA, 537 bp, Arabidopsis thaliana
ccccttccttaagctgggaccccctaaaccgttcccccttttttttttttttttttttagggaaacccaaacccacccagaaggggacgggtcccgagagacacacgtgccaaatatgtgttccaattaaaacacgggcgcgattcttgtaagaaagggagtctaattctccacgacgacccaagaggggaagggggaaggcgtttccctcattcttggggggcggaggaaaaaaaaagcggggggcggcgcggaacttaaagcacatacgagggggggagagagaaacggcccccacctctggtggaacggccgacaccaatcgttcgttggaggacaggcgaaaacggcccctccggcccccgccccccggcaatgtttaggttcttacccccttttggatccggggggcccctcaatgggaacatgggaccccttaataggaaaggtcggaaagcgtttttcccgaaaatcgactcgtgggaggtctatcttcgataggacgagttttggggggccaaccagcgcgcggaccgc

SEQ ID NO: 189472 - DNA, 988 bp, Arabidopsis thaliana
  unsure (1)..(988): unsure at all n locations
attcggcagatacccgagaagaaaaaagacgggtgcggagctcgcacgcgcacgagaccgacggcgaggtcccggagggagcgagcaacaggggttttaggaattttcgcaccaaaaatctacccagaggaaaccggacgaagggcaggaatgaaggcacacaccctagcatccaaaatcaaaataaaagcaaacagcgtgggcaaacaggagacgcagctcggccccacacccgagataggggtagaagcgggaacgacggagaaaggtaagagaagacccacgggagggggacaagcgacaggaccggcgcgcgggaaacgagggccagcgaaccatggagaagggaaagacggcaaccccggaatgcgcaggaaccaaccgacgaacggggcgcacgaaaaggcggcgcgcagtgggggaaaacggaggagatagaaagtgaaagagggcgcgcgaaggagcgaagaaaaatagccggggggaaaccgaaacaaagtggcgcgacgagggcgacgaaagaggggggaaactgaagggaaaacgccgggaaaaaacggaaagaggctggcgcacgggggtgaaataggaaggaagtagtggaaaagcacggtgcaaccgacccggcaactggctaagcacccgacaccctcgggagagaaggtcggagggatcatcggaccaacacgacgaagagagctatgatgagacgacactcgcaacaggcgggaacggtgggacgcacgagggacgctcccacagaacgggcgagaactgcgcgggcaaacaccagaagcntcatcaggaggaatagacacatgcgggagaaagacggcggccaagacggagggatagaacacgctgcgcgcaacacagaacggcaacgtaaggcgtgtgaacaaagagaggcggccggtgcgatccagccgacgaaatgcacagagcaagagaaaagagcagggcgcaagaagcagacggcggcacgagt

SEQ ID NO: 189473 - DNA, 501 bp, Arabidopsis thaliana
  unsure (1)..(501): unsure at all n locations
acccgtacgtaagctgggatcctctaaagctgccgcccttttttttttcctttttttaggcaaaatgaaaatttattagatgggaatatcacgaagacacaaaagcaaggatgaaatgaaataaaactgggtggcttatataagaatctcattacaattccaagtaacacgaaggggaaggagaagctttccctccttttaggggagaaggggaanaggaagggggaggcggaaacactgaaacatacggggggggaggagaccgcgagcccacctgaggggaaggggagacagaggggggcggaggagaaccnaacaacaccccaacccaggagccccccacccgaacccgggaaggcccccgcgggacccagggcggggccacacgggcaggacgggagcccccgggcgcaccccgcggaacaaccgccccccgcccccgaccgcacgggccgaagccgcggaacgcccacggcgcggccccaagacgaggcgaccccg

SEQ ID NO: 189474 - DNA, 472 bp, Arabidopsis thaliana
cgcgtacgtaagctgggatcctctagagtgtgccgcccttttttaattcttttttttgggcatagtgtgattgtcggtggtgggatgtttaagactaaaaaccgcggggacaaatgttataacaaaccgggtggattcaggtttggggggcgaaccacattgaggggccccggacgcccgtggaagactcttcctccttttgcggggggggaaggaagaaggggggcgcctgcagaaaagaagaaaaagggggggggggggggaaagaaggcgtaggggggcaaaaagaccctggttctttgtttgccacgagcattgtccgtgtgtgcgtggtatgtggccaggaggaaattggagaggaacgggggatttgttggttcggctttaccgcgaggggatctgggaaggctcctctttggaggggctcgcaaggtttttggtggtggagcacctggcacgacggtgagggggc

SEQ ID NO: 189475 - DNA, 475 bp, Arabidopsis thaliana
aggacgtcgcaggcacgcgtcacgtaggctgggatcctctagagcggccgcccttttttttttttttttttaaaaaaggaattcgaaatcactatactcgcccgcttggaatgggcaaaaaacgtggaagacatcctgacaaggaagggacggctaaaaccgggtacaaggtcggccgaaaattggacaatatcatcgtggcaccagtttatttaaagccgagatcgcacgttctttctaagtttgccaaccctaataccgaaggcccttgttcaggttaatcgctatggttgtaacttcggaggccatagcctggaactggtccaccattggccttccgtgccgggtaaaagccttgagcctcacgggaaaggaattagccgttctggactaaccaggcccttgctgacatgggacttactggggaaaacttggtgcgaactcacgatgaaactccgggatctgttcttgagct

SEQ ID NO: 189476 - DNA, 1091 bp, Arabidopsis thaliana
ctgcagtaccggtccggattcccgggtcgacacgcgtccgaaaacctaaaagaacattcatcagaaattatctttttcgagtatctcggtcgaggggggtgcggcaagctaactccacatctactatccttactccgaatcatccattcctattcaataccccccataggatgttcataatccaatctctaatcacaaagaaagtaagatccccagcctcatccttgatacttccaccccacattcaccgcgattcatatgactacaagatataattgtaaccataattgtaacaatcatgagttgcccaatggtttggtacaaattgacatctccttaagcgactatccccattctagttgtacaattcgcaaaactcttacaatctattgattcccttcaaaggattactccccatcatattagttcaacatacaaataaccatactattcactttcaattggtaacatatcttctatagaatgtttccaaccgtggctatacttctagcacaacctcctcattggctaagtaaaatctacacatacactctctcaccgtctctatttgcgttcagatatttctctttattaccattatcgcagagttaacagctgcgcaaatagaaaaaagtttctcccatttccatgaaaatgttccagtaaacttaaaactaatcccaacccagtcccagttcaattgttaaatctccaatttcaaaactggaattcacaagattcaacccattgtagcctattcacctaaaagcaactcttatttcgaccgaataatggtccatttgtcttcattatagggaccttgctccttagtttcccttcaccccccggaaaaaaatgtatccaaacaaccccaatatggttaaactccctctccttccaaacacaactttctccctgttatctacaaagtaccataaatatggacaatgactaaaaacatctaagattcgagattatctctgttcttattcccgtgtacaataaaccccaactttaggtgctctccaaataatatccttaggctattaggtaccactacttcttcataatataaagttgcttcatcaatt

SEQ ID NO: 189477 - DNA, 381 bp, Arabidopsis thaliana
cccctacctagcctggacccctaaagacggtcgcccttttttaattcctttttttccgccaacggggcactttggagcgaaaaaacaaaagccgaaccccttggaaccataaaaaaagccgggcgcttatacaacaaagggggagggggcccccacaccacaaaggccgaacggccgcattttctcctttaagggggggaaaaaaaaggaatcccgaaccaaggtttttcccttgaaaaaaggaaaccccaaggggaaaacccttattgggcgcggccaggaaaacccttccttggaacagaaaccaggaccgcccccaaaaaacaaggggggggaccccgaatgcccggaaaaaccatgcccgaacaaatgcggcccaaa

SEQ ID NO: 189478 - DNA, 99 bp, Arabidopsis thaliana
ccttcactatcaaccttgctcaaacagatgatgagagatgcttttgatgccacttctcctctggtcttctcatctgttatatttgcctgtggcctatac

SEQ ID NO: 189479 - DNA, 495 bp, Arabidopsis thaliana
cacgcgcacgtaagctgggatcctctagagctttcgccctttttttattttttttttattgaatgttgactaggtgatttgggtggacagcaaaacaagctggttataatcgagggtttgagacagaatggtgcacatataaattcttggggatgaaaaaataatgttaaattccggcagcccgtgcgggccgttttgtctatttaagagggggcggcacgagcgacaggggaaaggacaagcaaaggcggagcacaaggaggagcgcgccccccacaagagagaggaaacgaaccgcgcggggacaaggcagacaggcagggaggcagaaaggaggcggaggacgaggagagacccggccaccggaggagggacagaagaggaccgggggcgggcacggcggagagccagacggacgacgaacgacccagggccagcccgcgagagcgccacaaggcgaggcgaaggagggagcgcgaccggccacaaaagaag

SEQ ID NO: 189480 - DNA, 443 bp, Arabidopsis thaliana
ccccccgcgggcgggcggggggggggggcgagcgagagagcgcaaccccggaagcgaagagggagccccgacggaggcgaaggggcggaccggggaaagacaacacagggggggccccaagggggttccctccttttgggggggaccaccaggcagccccgggagacagaaaacaaatgagcccgccgagcacgaacaagcgcgggggaccgcaagacggagcgagagaaggaccagagggagggaagagggggccaaacagaagaaagagggagcccaacaccgcccacacacaacaagccggggggcgaacggggcggggcccgggacgccggcccaccgggagggcgacacgccaacgggcgcaagcaccgaaggaacagagcccggaggggggggggggccaccaggggggggagaaggccggaaagacgacgagggaa

SEQ ID NO: 189481 - DNA, 441 bp, Arabidopsis thaliana
  unsure (1)..(441): unsure at all n locations
cctaaagcgttcgccccttggttttattcttgttagacggggggcccttccttaggaaggggcccccgggaccccgggtctacccgcccttaccagaatcagcctcatcccactaacccgttggggcctgcacgcataccccacccccgggggtccgggggggccaaaatttcctctttggaagggggggcgcaacggccgcgggcaaccgggaagaaggaagggagacggtgcggagcggcgcccgcgcgggggcacacaagacagccgcgcagaggggaaccaaaagagagacgccgcaacaaacgccnccgcggaacgaaagagcccaaaggccgggcggcaagaagccagagcggggcgacgcccgcgcggggcgacaaaaccccaacgcgaggcgcacacagcacacgggaaggacaccgggaggccgggggcaga

SEQ ID NO: 189482 - DNA, 269 bp, Arabidopsis thaliana
aaaaaacgacgaagcacccagaaaggggaccaacagagaacaacgaagcggccccaaaaccagaaacaagcgcacggaagacaaaggcaagcgcggcgcacacaaaaagacgaaagaccaagagcagaaccggggcatttttttttttctaagggggcgaaacaaaagaagaaacagaccggaaaaccaaaagaggggggccacgaacccacccaacacaaagggaacaccaaggaaagcgggagcacaggaccgacccggaaaacccc

SEQ ID NO: 189483 - DNA, 551 bp, Arabidopsis thaliana
  unsure (1)..(551): unsure at all n locations
cgtaagctgggatcctctagagctttcgcccttggtttaaatcctctttttaaagataagggcgggaatcagagagactttcctataaagcttgattcaaagccaattatgagagagaaactccacactccccaaaacaagatactacatctcctttggccgggaggaaacaaaaaaaaccctccctcctactagaggggggagggggaacgcacacggccacaaggggagaaacacccgccccgcaacacacccggccacagacaccaggaacgacagccggcaccaaagagaaaacagcagnggaccagcgacaaaagagagcccgaggaaagaaaaacaacacgacccacagcgaggcacaccccaaaacgagaagagccgccagaaggcgaagcccgcaagccacaggacaaaaaaccgcaagaccaccaaagccacccaaggacaggagccgaagaacgggaccagcgggcgagaacagaagacagaccgaagaagcngaggggcgcagcggcgaagcccgcgcgacgcccgagagaacgagaaag

SEQ ID NO: 189484 - DNA, 502 bp, Arabidopsis thaliana
gacgtcgcatgcacccctacctaagcttggatcctctagagcgggcggccctttttttttttttttttttgattcaacaataattagttttaacaaccttaccaataaaatatttaatccttgtcaagccttactttaattctaacgtccaagaaaaggatcctagcttatgaattccaagcggggggttcccatttgggaacttttttcaggaagaaccttcccattacctttgaatccaaaatcttaataagccccccccaagtaaccactttttggagctccaaaccgaattgaaattccacccttgtaagaccttaaagccttaccaatcaaccggtgcccaaagtcacccgtttaatttaatagggccaattcaattagcccctgtccccccatttccgaagaacgcattccatgcattccttaacctaaaagcaccagtgctacatttttttggcgccaaactggattcggccttgattagcacttgtattaacct

SEQ ID NO: 189485 - DNA, 455 bp, Arabidopsis thaliana
cccgtacgtaagctgggatcctctagagcgtccgccctttttttaaatccttttttttgaaaattttttttttttttttttttttttttttttttttatttaaaaccggaatggccccttttcattaaatatcaaaagggaccaaaaagggcgggccataacaaagtcaaaacaccggcccacaaaatttgtggttcttgaggctggaaaaaaaaaaaaaccccgaccccaggaacccagacaacccgggaagcgggccccacccacaaacctgggggaaggcaacaagggcacagcgcgggacaaaaacagggaccggcccaacagggaggggcccccccaccagggggcaaaaaaaaacaagggcgacaacaagggggcacaaaagcggcaccccccggagaccaaaaccacacgggacaagcggggaggccccccaaaacaaacccccccag

SEQ ID NO: 189486 - DNA, 390 bp, Arabidopsis thaliana
aaaaaaaaggagaagggggaagaggggccccacggccgaagaccccccccagggagggcagagagacacacaaacacacagcagaggagcgccaaacagagccggacggacacagagaagagaaagcgagttttttttttggggggggggaaccacacagacccgaccggcgaaggaaaccccccgccccaagaggcgcggagagaccccacgaaaaggggcgagccggggcaaccaaacccaaggggggaggggacaacaccacgaccccccccacaagagagccccaaccacagaaccaccgagaacccaaagcggcgccaaacaggggcgcgggaggagagggaaagcaggaaccaaaaaacacaagagacgcggacggagacccgc

SEQ ID NO: 189487 - DNA, 498 bp, Arabidopsis thaliana
  unsure (1)..(498): unsure at all n locations
ccccgcccgtaggcngggaccctccagagcttccgccctttttttatttttttgtctagaatatagagttatttatttccgcggtgacagtccataagctgagatacctggccacagctcaggcaacgggtcaagcggaagacggtgcctcgcgcatcaggggttgggggggggcagacgtaggaggtttttttttatggggaggggcaggacccccaggaggacggaggagcgaggagcggcgcgcccaggagcccgggggcgcccaaagacgaagaaaaggcagggcccccgagcccggacagaagaaagcgcgcgggaggcccggagcgaaggcgggacagccgcaaggcgaacccggcgcgcggagaggggcgcccgggagcaaagggcgcgcggcagaagccagaagagcgcgcggagcgcagacggagaagcggccggcgcggaagggacccagggccgcgaggggaggggcgaaaacacgcgagcgcaagc

SEQ ID NO: 189488 - DNA, 411 bp, Arabidopsis thaliana
  unsure (1)..(411): unsure at all n locations
gcctctaaagcagttcgccgcgcttttttttattctacctcaaaacagtggatggcaggaaggcggagcacgctgcttcctcatatgagggcgcctgagccaccaatgccaccgagatctcttccttttgaatgacacatcaaaggaacacacgctcggcgcggcttaaacaactcaaaaaacccaccagaggaaattttttttttagagggggggagaagcccagggagcccaagccgcggggccgggagaaaccagaacgccnagaaggggaagcaaacgggaacgaacccaggaagccgcgcggagcaccaacgccgacagggccagcgagccgcgagacgaagccccaacgaaaaggagacagcgccgccgcagagccgagggaaagagaacgaggacaagacaagg

SEQ ID NO: 189489 - DNA, 541 bp, Arabidopsis thaliana
aagggaacttttaaagaactttaacgtccatgcgccccttccttaacctggatatcctttaaaccggccgccctttttttttttttttttttgagacaatggaccaccctaaaaaaggtcctcaaaggatgcaggaccttccacacaaaaaaagaagagggttaaaccatctcattcaggggctcaaatccgtttatatcctatgtcacaacagatattcacacagttcgcaatctgtctagaggagctatgtagatgggtcatagtattagggagattaaagctaaataaaaggcgaagggcaataagaagtaacctggagagatgtttttagagcctttattgcccattagcattgttcttctagagttcctcgttctcctgacgcagcgcatagatccttgactggagaatactgatcatagcttctgcactcatcatttcaagcttgaaagtttctctttcaacagacatctggtgaatctccttctggagatcattaaccttctcttcaggagatgcaagtggagtttgaggaggc

SEQ ID NO: 189490 - DNA, 220 bp, Arabidopsis thaliana
gagcccgaaagaagagagggaacagacgcagagacaaagaaagaagggccaagagaacagaaaagggacacaaggaagagcgacgaagaccggacctataataaaaatagtacaaggacgacgccacgaaggaaacaacgacgacacgaacaaaaagcgaaaaggaggcgcgcgagcacaaacaggcaccacatacaaaggacagcaaggagaacacacg

SEQ ID NO: 189491 - DNA, 365 bp, Arabidopsis thaliana
caggaccccgaagaagcagaacacagcgagacccaacagacaacgacccagcaggaaaccaaacggacacaagccgccagcacaaccgagggagcacgcacactctttaaaatgtaccgaacagaacaaaaccacgacaagaccgcaagcacccagcacgcaagacacgaaacaaacgccaccagagaaccaaaacgaaaagaaggcgcacacaacaagacaacgacgacacacgaaccacaacaacacagagggagacagacgacgaaaacccacaacaacttgaactggaacgcacacgacgaaggacaccgaatgaacacgcatagcaataagcaacaccacacacagccagacagaacgcg

SEQ ID NO: 189492 - DNA, 1081 bp, Arabidopsis thaliana
attaaaaaagaacccaccaaaacaaccaaaaaacccaccacaaaaaaaccttttatttcaaaccacacccacacacacaagggggaggaagacaacgaaagaaaggaacggaaacccaaaaatacccccaaaaaaccaaaacccccccacaaaaacgccatacccacacaaacacaatgcccaatggcaaaccaaccaaagcacaaaaggttcaaacgcaaacaaacgggcaacatacgaacatacaaacgcccccaactctcccagcaaaaccaaatgacccgtgacacgcaaaaaagcaaatgggaaatgcaattatatcaccataaagggaagaaatcagcgaacaacacacacggcacccctcgataaaacaacaccggaccgaacaaaacaaagcctaggccaccccaacgaaaaaacagccaaggaaaacagaacgaccataagaccccacgaaaacgcacaacaacccagccacaggacacgaaaacacagggaccctcaaaggcaccaccccacgaaccacgtcagtgcgacccccaaaacgaaagagcttaacaattccacaaaaacacttaaaaccgacccaacaaacacacggggaaagaaaaataacacgcactaaccacctcaaagaaccagacaacgacatgatccccacatactccaaaatacaaagtccataacgtgaacacttcacacaaacagcaccgcaaaatacaataatacagagatcagcaacaacaaaaccacaggactaacaaacccgccaaagacacaccaatagcacacccacacaaacacaactcgacgctatcacacaaagccccacccaactaggccaccacaacaaataatccgcaacaataaccaacctacacccactcaaactaaaaatccaacacaaaactagtcacaccagcacaacagaatgatgacccagagttccaggcacaaaaatggcaccagtaaagaaacaggagacatcacacatcttagaacacatcatcagccacaaaaccaccacgggacccaaaacaaaaccaacacctactgccaaacccatcacgcaaatgaa

SEQ ID NO: 189493 - DNA, 640 bp, Arabidopsis thaliana
gcgacgcgacacgaaaggcaaggaaccgagcaaaaaggaggagaacacaaaaaacgcgggaaacatgaacaaataacagaaacaaaacggacgagaacaaaaaacaagagagcgcggagaagaaacggagaacaccaagaagcgaaagaaaaccgggaccccgaaacaggaccccgaaaaaaaaaacaacgaaagaaagaaaagagggaaacagaagaaaggaagtgagcaaaaaaaaaacaaaaaaaccggggaacccgaggaaggaaaagaacgaaacaagaccaagcgagagcagcagcagaaaaaaccgaacaagacagaaccggaaaggacaaagaagggaaggaagaagaaagggaacaaaaacaaggggaaagaaacgacgaaagacaaggaaaaaaaaaagacgaggacggacagcaaacaaaagacagaaaagcaaaaacaaaaagcacgagaaaacacaaaaaaaacaaaggacaccggagagaaacaagcacggaaacacaggaaaaaaccaggacaggggaaagaaccaaaggaaagcaccgggaaaccagaaaacaaacacggaagaagaggaagaaaaaccaaaacacctcgcgggcgagaaggacaaacagaccggggaagcgag

SEQ ID NO: 189494 - DNA, 1037 bp, Arabidopsis thaliana
agggggttggggaaagggaaccccacggaaagagccaaacaggggtcaaccgggcagacgagcccatatacgacgccaccaacgcgcgccaccacaccagggggggccaccggcggaaaaagagggggcccccaaaaaaccgcccacagcaaagacccagaccaggggcgaaagggaaaaggcgaggggcagaaggcagacaggcgagcaccagaacgaagggcgggaaagaaaaaaggggggacgaacaaggaaaaccggagacgcggagcggcagaacgagcgagaagggacaacaccccgacaggcgagccacagacaaaagggcagcagagaggaggagcgaaccccgcagcggggaaacagaaacggacaaacgacggcggaacgccgcgagcacccgaggcgagaccggcaccaacaaacagcacacacgacaagggaggcgagacagaaaggagcgggagagagcagggacagggcgaagcacagaccgcagggaacgacaaaacagcacgcaccgaaggggaccaagaaagcaagcagaggcggcaggaagcgggaacagacccaagccgcggaagccacaacgcagacgcccgcgggcgacggaaggacaacgagcggacgagcagggaaaagcaccacgccggacggaaagaccgaccagagagcgccgaaacagccggcaccaggagccgaggcccaacaaggacgagcgcgcggggaacgcacaggcaggcgcgcacacgcgggcaaacgcgacggacgcgcaggcgaggcacaccaccacaagcccggacggggcgaacgcagcgaaccgccaggaggcgcaccgggcacgcaaacgcgacacaggagagggcccgcagcaaccggcacaacgcgcccgaacaggcaaaggggccagggcacgcgcgcggcggccaccccgcgggccaaaaggaccacggggaacgggcgacaaaggaacgccgcagcaacggcggcagggcgcagacacgacgccgaggacaccgcgcagcgaaactgaacgc

SEQ ID NO: 189495 - DNA, 401 bp, Arabidopsis thaliana
gaaccggaaagtaggaggagcccaccccaagccgagggaaccagcgaagcggacggggcccaaaacgagcgaaacactttttttttttcaaaccactacaacttatccaccacaagctggggaggagaggagaatgacgacgacatgcccagctctaaaaaaggcgcaatcggactgcaatgcgatgaactgaagcagacgacggctcagaaacgctctacgctaaccgtactagatgacatcacaagactccccaggcgcctcaccccggaagacctacggagagacaagatagacacttatcacggccgagcggaaaggtaccaaaggcgtctagtaatgaaactacgcgcaacacatatcacataatgatatacctggtggcgcaaataaagctcaga

SEQ ID NO: 189496 - DNA, 392 bp, Arabidopsis thaliana
aaccggaaccgggaatacccgggacgaccagcgcacaagaaggcgggcgcgcaagggacccaaaccagagccgtttatgcggaggagaaccgacgaaacgaagcgagagagaacaggcccgcagagaggcacaatggaaggacagggcgccgaaaaccgccgggaacggcacccgcaacggggacacgagaggcagacgaagaccgcaacgagaccagagccgggaaggggacgaccgaggaaagagacagagggaacacgagcaagccacgaccgcatcacgacccgaggcaggcggaggcggccacgcacaaggcgacaagaccaaaaccccggggaaaggaaacccggaaccccgggccaacggcggagggaaacacccggcgaaaaac

SEQ ID NO: 189497 - DNA, 1123 bp, Arabidopsis thaliana
  unsure (1)..(1123): unsure at all n locations
ccccgcccaaagaaagaaaaacgtgaaggaaggaaaaacaacacgagcgaaaacaaacaacacccaacgaggaaagacgacaaaacgaggaaaaacaagaccagaaagcagcacgcacaccaacccgccgggaaacggatgaatgcaaggcgtgggaagaaccggagcgagaagacggagcgcgcgcacgaaagccgggggccgctacagcggacgccacgcaacgcacgcgtgcaagcgacgacaaagaccaacgaaagagccaccaaaaggcaaaacactggccgacgaaacacaacggagagaccgaggaaaacccaggcgggcaccccaaacaaaagacggcccagcagcaccagacccaccagaacggcccagctggaagagaaaaagccgcaaggaggggccccgccaacacggaggcgaccccaaaactcccgaaaccaggagaaggccgcccaaggacccaagaaaaaaagagagcgaaaaaagagggaaccgccgcccccccgaggaggacggccggcaaaaaaagacggcgggcgggcagacggaagggaaaaccgccggcaagccggcggaacccgcaaaacaaccaaggcacaagcgggcccgccgaagaagacccccgacacaccacaagaacggccctacaccgcaccaccacaaaaaacccgcaaagcgcaggacccaccgacgaccgacccgggcctgaaaaccccccccggacgcaaaggacccctccaaaaaaaagccgaggagagaggccacccccaccggcataaggggtggaagcacccgcaaaaaaacagggtgggcaaccccgaacggagggcaaacccaagccggaaaccccccgaagagaaagaaaaccacatgaaaacacaaggggggagggaacagggggacccacaaccgataaggntcggggagcccaacgacgggcccccaggggaaaacggaaacgggggagacaaagacgggacccctcaccccgggaaccggaagcggggaaagcaccccaaaccgcgaacaccgaaaaaaaaaaagggggggccacctccccacaggggaaacaccaaaaaaccagggggaaaaccaacaaccaaaccggaaaaacccc

SEQ ID NO: 189498 - DNA, 1082 bp, Arabidopsis thaliana
aatttgggaaaaaaaaagaaaccccaaacgaaggagggggaaaaagcaagcgaaccagagacgccaagagggaggaagggacgctttaaaagatgcagccagaagaacgaacacggcaatcagagagagcgcaggggggcggggcaaaaacaacaagaaaaaaggcgcaagaagagcgacaacggagaaaagaagaaggcagggggagaagagccgaggcccacgagagaacagcgaagaacgcgcagagaacacacagtgaagagagaaaaaagcgaacagcgcgcaaaagaggggaacgaggcagcatgcatgacaacaacagcacagacaggagaccagagagaccagacaacgagcgaggaggacagggaccaagggagctaaccgagaaggaggaccactgagagcaaagcagaggaaaacacagagcagacgagagagcagcgacgcaagacagaacaaccgatacaagacagacgcggaggagacgcaagcagaggaacacgaagacaccaacggaggtggcacatgaggaaggagagaacgagacaagcaggacacacaaaagggacacaaccggaaaaggagaggaagcgggcatacaaaaaacaccaggaggagacggaggagaacaagcgaaacggcgagagacgacacagagggcgggacagacagcggagacaaaggggccgagacgccgaccagaaaacggagagaagggagcaacgagaggaagaggggacaaacaacagcgggggaaaaacggggagagcaggggcaagaaaaacgcggcagagaaggggcaagaacagagacgggaaaagaagaagagactcagagggagacacagaggacggaaaaggagaaaaagaaacgaaagccgacggacgcagcaagcgcgagggaggaggagcgaggaaaaagacagcgcggaggagaggcgagagcacgcgacgcgagagacagaagaagcaggcgcagggggagaagaaacggggcggagacacccagaaaaaccgagagggagagaaaaaagacgaagacggggggacgcgcgagaggaacggacaccaggagga

SEQ ID NO: 189499 - DNA, 812 bp, Arabidopsis thaliana
gcaaccgagcagacggaggaccaggacacacacgccgcaagagacagagcagcgccaccaacacgagcaggacacaaaccagacagcggcagcacccgccaacagggagaccaccgcaccccccaaggagaggcccaacaatggatggcccgtgccagaggacccgaccggaatcccgggtcgacccacgcgtacgacaacaggcggacgaagatgggatgccgaacgagacaccaaatgtattactaaggggggagaataaccaaccggaccaagacaaaacaagccaaggcgagacgacttgcaacaagtaagctggcgacgccgcgaagccgcagcggaaagggggggaggggggaagaccacacgcggggtacgaacgagcccaccaagagagaaaaggaaacaccacagggagaaagcaaaacacggggggagacagaagacgcggggcgcagccgagaagagcgaggcagggcaggagggagaagcaaagggccaaagaggcgggagccagaggatcaccaagggcgaaaggggaacatgccaacaacgaagcgagagcagaggagtggatgagtgacaggggcacgggagcagaggatacgggagacaggccaacggggaaaaagatacaaaagacacgagaggtaggaggggggactgaagccgcgtggacataggacagaggaggcgccgacaagaagcgggagggggcatggggaagcccgggaagaataggaagagaacggaggaaaaggggatcgcagcgagcaaaaggggaagcaaggaagggcgcaacaaatggaacc

SEQ ID NO: 189500 - DNA, 333 bp, Arabidopsis thaliana
aaggcaaaccccggatacagggatacccagggttaaaaaaaagggtttttaagggggccgccaaccaaaaattagtttttttttttttgcgaaaagggaaaaaatgggaaaaccccaggtaaagcttttactttttaaagaggccgggactggactgggccaagaattttggtgcccttgggaaccagtttggcatggaaaaatttttaacccccgtttggaaccggggtgggcccaatggccccttggcctcagggtttaaagaagggccaaaagccggggggcttcgcccaactggggggaccaaaattggggcaaccctttttttttttg

SEQ ID NO: 189501 - DNA, 644 bp, Arabidopsis thaliana
atttggttgtactaccgtccctaccaccgcaatcacccgccttaaagttctaactttttttttctatggcaaagactggaaggattggtggtcttaaacatagattacgaatatcctcatcacacctttatcgcccaaaggatctaccagatggctatatacatacaatcattgcctagccatataccactagctattgtacgtaccgataaactgtattggttacaaaattcagtccgaccaagagccgtggagttgactgtgcggagcctgtatcagctttgcgtgggcattggttgcaagatcttcattcttggatactgcaccggcggtctataagaggtgccataaacccagccgggacttctgggtcattcttacccccgaaaggttttcgttctaaagggcgggagtctttacctgggtggctcgcgagatttggtgtcgctaatctatgttgcgagggtgggggacatgcttgaaatcggcctattatatcagaaaggctctactaaatcacgttacttggaacttgcatgtttaaccatcatttgtattggagggttcaaattcacagaacactctatctgtctctagaatctgccttgggactccgagggaccttttcacctcaactattattc

SEQ ID NO: 189502 - DNA, 787 bp, Arabidopsis thaliana
  unsure (1)..(787): unsure at all n locations
taccgctccggaattcccgggtcgaccccacgccgtccgacaaacaacatttcttgagattggcgccggagtcaagggagagggttgtagagcgactccaacggcttgagtatggtttctaccgggcatactcggaccggccatctattgggcttaaaggtgaagcagcacgaacggggtactcgtccgggctttgaccgttgttacccaacgactgagagacggtgctgatctgagtctctatcagcaacaacaccttaaagaggagatccaagtcttgtgccggcagggatgtaaggggtacccgtataaggcggtggggaatcatttcaccgccgccatacgtcttcatatgttgttgcaagggaacgacagacagattggggagtaatgacttgcagacagcgcgcttgggtttgtcggtcacagctcgcaagcaggcttacttcgacagagggcttcgctgtatgagccatcacactttcactctgggacaaaatgatctggagtgggggactcctctgtgggtggtaccccagactgtattaccgacgtggtgacagtggatatggagcaatgattnngcgccgatttcccaaagacaatgtttccttcatgtcaccgagcctggttccttctttccttgagacacgtttcttatataaaacgctttgataggtcttatattggcagagtccttaaaacaggagattccccagcttgggctacaccccaagcgattctcgcatgtttgaaaggggagtacactttctcaagttttttttac

SEQ ID NO: 189503 - DNA, 1200 bp, Arabidopsis thaliana
  unsure (1)..(1200): unsure at all n locations
ttttgatttggcatacacgcgcccggaatctgggatccttcacagcgaccgaccttcctatttattttttttttttttttaaacaacaggcaatcacctacagggcgggtgtatcgcttcggtccgcccccctggggggtatttcaccattaaccgggaagataatttatgaattcggggggcgggcctatcagaaaagcctccctcgcgtattaaacttttcgaaagaaaattcttctatcaagcgnnccatttttcttcctggtacaaaagaccataatcgactgacgctcaatatgttaatattacggtagatgctactactaactggtggttagcgtgaccataatatatctcacagtaatactgcacgtagtctacaatacattcacaaactaatgtcctatttgctgatcgtatcacggtactgtcaccataccacccgatatgtcctatcttgcacaacaacaaatgaatatgtgttatcatctaaggtatgcggacttcatggtaaattacacacctcctcttcctatacaacagagctctgtcggtggtattatatgtatgctaacaagatcctccataatagcgtcgcacatcttctcggtcgggtcaatctttcttatatataactagctgttggtgagactatattatacctgcctcatacaaacactatttactggtatacactagtcacgcagagcgtctcttaaagtgtgggtcaatgcggcagaacatatatctctactatgtgtgagagaatgccactacctcttgagcggagcccatcatatagtgtctccgccaactgatggtttaacaaaatataagcctctccatcaaccacaatttatttttgggtaaaagaacaagtaaatcttttttgtggtgaccattctcgagaatacaaaaattcctagacggagatatggccttcctctccccgggttatttataccatcgttgagggtgatcctatcggcgtggggccacaatttaaaattatatgagctctgggcccccacacaatcctagacccttgttcgttctccctccgttcacaaaatccaatattatttttttcgattaatatgcccccgtcatggctgataaatgaataaggattgggtcaccactatctggcctactatttcctggggagccaaacacaccacggctcttcttctttgaaat

SEQ ID NO: 189504 - DNA, 1259 bp, Arabidopsis thaliana
  unsure (1)..(1259): unsure at all n locations
acacccgcacagtattttttttttattttctcactacgcggaactccgcaccctcactaatacttcactatctctgggtcctctatactgatacaactactacatcaacaacctataccaaatatttctttaatctctaataatctctctatatcgcctaacactaatattcaatacttatactaagtctaacacctatacaattcatcgtaactctggatcaatccgagcatgtaatcgcatttgagatcgttctcgatccacctacactacacttcntcgtagatgctctaccacattatattgactattcactattctcttattcgcttgtctttactcaattaccatatatttatctacatatcactcaacaatccaatcagtccatattaacatgtatagcaatattactctatctaactacctatatctcacagactgattctgtacaccacgatgtacatagcaagatctacactcctcatcttgcagaacatcccatactcatatcataatcattcagaacgttagactacactactgaatacatctacatcactcgacaatctagacggttataaactccatcttatacgtagtcgctacacctatgtgtactatataatacaatcccgtcctatgcatcgagacgaacatcgtcaaatcatctgagcacttgcattcatcttagtaacaactcaatacatcatcttcggtcagatgatcttctactatcataactcaatgtctataacgccatcctaaatacacctcatttctacataatccttaacatctctcttacatctttcctctcacatctacacatctcgctatcgacaacgccgtaatcctatctctcaatatccgcgttcctataaatctactgctaattcgaaattaaccacctcctactgttttcatatcacaacttgtccttttctgcacatgcataaacacttatccataacttccaatctttaattatatcagccttgtactattaaaatctatcgtcgctccatcatgaccaatcaacgtgtataactacactctcctttatactctcattaaatacaccccacactttctccaataaatgtacacattcattcctaaatttaccacttattataagttcaatgactaaactctcccttacacatccataatacttatatactgatgcaatagacataattttctttccactcctacaacaatttcaccatgtatctacctaatataccttcccc

SEQ ID NO: 189505 - DNA, 239 bp, Arabidopsis thaliana
agaatgggtggggtgggattaagacggttggatggaaggagtttgggtagagggggtggggtgaggagaaatgggttagggaggaggtatggaggtatggaagggatgcactgggtggaaattggctatggtggtggtgtggtgggggtggactggggtaaagggaggtgggattgggtttgggtggagattggtctagttagggatttaatggagaaagttgggggaacggaacaaat

SEQ ID NO: 189506 - DNA, 1000 bp, Arabidopsis thaliana
  unsure (1)..(1000): unsure at all n locations
aggataagaacatggagaaaatatttattaattttttagtttgtttaatgtttgctttttttttttaaatattatttagtaacataggttttgttgatatttatggaagataagataatcttattttattaatagttatttctaaggtatttatttttgttgaatattatttatatgacataatataataatcttttaggtggaaaatagtttattaatgtttcaatcattttgatgttatattttgttaatatctatctaagttgaataaatgtagaatttttattggtaggggtgattagcgttatgtatattctgtatgaatttataaatggtggtgaaaatgtttttattatttatatgacatatatattcgtttagttttttattcttcttagtgagataattatcttatgtttggtggattgacattttatactttatttcattgtgacttctctgtattgttaagttttcgtgctcgatataagtgtctgattacttaattagagtatggtgtcagtgatctgatatgttgatttactatggtagtttgtgagaatctcacattatatttatattatggtggcaagctctatatacatgtgactatagtgtagttatttcaacatgtgagatttgtttgaattttctgcgtctattatgaatagtttatacatatatatctttngtgattggtatactcacatctgttattgctgtgtctagtaacatggaggctcatatctgtgatgattatacatatctaatggataaattattattatattgaatctactacttcatctattttttttcatgtatatcttaaggtggggtttcctattatatatatgttattccttcctctgttaagacttttaataaatgtgtgtgtatctgatatcaattagaggagatgggagtacatccattttttgtggtgtgttggcatgagagtatttctttatcataaatgatgtagctataattatatggc

SEQ ID NO: 189507 - DNA, 1421 bp, Arabidopsis thaliana
  unsure (1)..(1421): unsure at all n locations
gaacagcagagcaaatccataccagtgcacgtatgtgaactggcgcgcaccacccaccgagttagggcgcacgacttccatgagaaactcgaagaactgcgcaaggtatccacttattgacactgctacactacaactacatcccccagggaggagcaacccattggaatggccctttccctatnggaaccagggcccactatggcgggctcagagacaataccacaactcagacacaaacaaaatccagagcatcgtaatagcataaaagcgtaagaacggcaccacaatttttttatttttcgtcccacaacaggcggcgacgcatacacattgccccaacaaggagagtgtcaatcactgcagtgcaaccataacgctcagcacatacatcgccaacctgagccgcactgaatacacagcctagtaacgcccagacagtaaaccgtgggacgaaataaaaaacgcactgagcaagctcgaacatgtcactggcgagaaaaaacacatctgaacggacataaacagaggggggagcgaaaaaacagcgccaagaaggtgaagaaagttcgagaagagggggcaagacggcgcacggatggctagacatgcggtcaagaggaaaaagaaaaatatagtgatgcgtcaacgaattacgcagccgacaaatatcaacttaaaagcggacggacgagagactctaggcgcacacaagaaaagtctggaaccgttgcgacccacacacggtatcgaaagacgacgacagcatcaatgagatgtcgacgaaagatacgcacgaacgaccgacaaagattagccacacagacaagtaaaaatgttctcaggaaacacaggtagaatcgcgaagctagacaagtatcacaacgtggctcgcccgacgctaataataaagtgtcgctgcctgataaaggagccacccacaaggagagctgagcgatacagggtgcaagctcaggaaagatgctgtagagaatcagccgcaaatacaggatggacacgcgagaaatgatggtaacagcgaatattgctcagagcgatcttatcggagcagcaacgcactcacgcagcgaatcgatacagtagatgtaataggtactgtgtgcgcgtcacctagagaaagacaaagacgagcgtacaccgcactacttcgtactatctgtactatagtagtagcatggagtgaggtaacacgacgctaatatacatcatcgttcgtcggggatagcgcatactgcagcagagctgacacacacgagagcatgacgaaaagacgttcatgcaacgatggggtgggcacgagacgaagcatagtcatactcacgtagcgagcagtggtcaggtctgtgtacgcaatgtgtcgtcgcgagtagcaatgaagcagatccctacatatcccgcag

SEQ ID NO: 189508 - DNA, 748 bp, Arabidopsis thaliana
  unsure (1)..(748): unsure at all n locations
ggacacggacacgcgaattacccgggatcggacccacggcgtccggacgtgtagcatactgaatgttagtcctgctgggatagcgcagacatgcttttattttactctgcggnggagagatctgtccatctggagaggagagagtaatgagctagccctctggaaagaacgcacgctacgagtgcactatcatggcgcattggtgcatcacagaggagttaggctaaagccagagtctggaccgaactaacagcagttcgagtggcctgtagaacacaacggagcgtaagcgttgatgtacaagtcgccagcgacaggaagcacacattggtggacggaccgtcactacgtaaacagacctacatcgaccagggagggcttaagaccggacacttagcacaccacctcacgatgcgcacgtgatgggtggaatatacggcgctggagaggaacagcatcgagcggatggggggcatcacatagctggcgaatcagcctacatgtaatcaactctcgtcaaggaaaggagcatgctctttgcgtactccccaaaggagcttgggccagtgtccaggaagaacaagtggggaagtcccctggtggctgttaagtgaagcgtttcaatttgttaggcttcctgggaactgaatcctcttgggtgctactcttgggggggtgctacagctacaggtgcctgagaaacagctggggctcagcacgtccagactatttgcggaacctggttagc

SEQ ID NO: 189509 - DNA, 1030 bp, Arabidopsis thaliana
acggcgggcgccgaaaaaaaaaaacagagacgaacgtggagggaccgaagaagcgacgtaggaagcgggacggaaggaagacgggaaccaaccacattgagtcagccgaagaggaggagaagcaagcagcgcaggacgcgaacagcaaataaggcagagggcagcgaagaaacagagagaacgcagacacccgaaccaaagaggggggggagacaatgtatgacattccaatggaccaagccgggagaaaaaagaggaaggggaaacaaacaggagaagaacaggagaggagaaaagaaggattattttaccgggcggcacgaagaaagaaacaaggaggggagagaaaagaagggagaaaaaagaagcaaggaaagacaatgagggggggaaaagagggaggaggaggaacaaaagggggggaaaaaaaggaagcgggggaggccacaacggcgacaggcgaagaaagagccagaaggaaaaaaagacgagacggggaacagaggagacgaagggacgaaagggaagggggaagggaagagggacgcagaggtaagaaaggcagaaggaggcagaaagggaagcgaggaaagaacggcgaggggagcagcagaaaaaggaaggaggacaacacgatggggagcagggaaacgaaaagcagagccaacgagaaagaagacggaacacacgagacgaaaacggggcagaccaaaaaatacacacaggcgcggcagagaaaacaagagtgcaggaggaagacgaaaagaagggagcgagagcgaaacacgaaaaaggagggaggaagaaaacaaaaagaggagacgaggagagagatagcaaaacaaccgtgaaccagaaagcgagaaacaaaagtggacgagaacgaacgaggcaaagagagaaggaaaggaacggcagaggcaaacagacaacacgcagggagagaggcggcaaagacgaggatgaggagggaagagaggatggagagaaaagcataactgagcacaacagagcgaggacagccgacgac

SEQ ID NO: 189510 - DNA, 201 bp, Arabidopsis thaliana
acgtttatcgtgagccgcaccaacctatcacatccgaaggtgtctagtctctcaacagtcacacatagtgggcttctgcccagcacatggatcgcgagactggaacgacgatacacaccacgggcgcagtcaatcaacgattcatcgctgactctgctcatgtcgacaacatataattatgatgcgtgccgcgcactccat

SEQ ID NO: 189511 - DNA, 200 bp, Arabidopsis thaliana
cccgggttcgagcccacgaccgtccgcagtaggtactgggcaaaggaggtagacgttcattagtcacagctccagctgagtggttattgtattttattgactgcgtactagcagacgacgcgcagacagtgatagtcatgtccgagttcctgatgagaaggatcggagcaatgaatcccactcctctagtatatcatgca

SEQ ID NO: 189512 - DNA, 798 bp, Arabidopsis thaliana
acaacgaacacaccagaacaaaaaatacaaaaaaaacaaaatacagaaaaccaaaaaaccaacaaaaaagacaaacacaccaaaaaaaacaagaaaaaaaaaaagaaaaggacgagcaaaaaaacaaaaaaccaaaacaacaccccccacagcgagacaaaaatgatgacattgccagggccggagcgaaggcagggaaaacccagacatccaagacccggccgagagaaaacgcagaagaaacccaaacacagccaccacactaaccgaaactgaaacagagaagcaaagagatgcctcaggaggagataacgccgaaaaaaaagaaggctagcgaagactacaacaaggcaagacccgctagcaccgccaagagcggagccgacaaaaacgaagaagaagcggataaaaaagaagcggaagaaaggaagcacaataacaaatgaacgagaaaggacccactggttaacacgaaaaaaaacaggaacttccaaatacaccctgaaacaaggaaccaaagccaatgaccaaagaaagagcagattcagaagcaacaaatcaaagaaagaacggcaaactaacacctgaacaagagcctgaagactaacattgagaaaaaacaaaggcgaagaaaggaaagagagaccccgaagctcgaaaaaacagacggcgaaaaggacacaatgctgggaaagagaaaacttgccacgcaaaacacaggaaagaaaacatggcgaaaacgcaaaaaaacacacagccaatgtaacacgaaaccacagagaacagaaaaacagaaac

SEQ ID NO: 189513 - DNA, 130 bp, Arabidopsis thaliana
aacgaaagaattttaaaacctcaaagctttgcccaaactcatagttggtcaatgatataagcagaatctccattgtccacaatgcagctgtgaagagaaactgactaaaacaaaggaaggaagagcttgg

SEQ ID NO: 189514 - DNA, 196 bp, Arabidopsis thaliana
cggccgccctttttttttttttttttttttaacgaaagattttttaaacctcaaagctttgcccaaactcagagttggtcaatgctattagaagattctgcattgtccacaatggagctgtgaagagaaaccgactaaaacaaaggaaggaagagcttggggccaacggtggaaaagaaccaccgagggcgctcaa

SEQ ID NO: 189515 - DNA, 436 bp, Arabidopsis thaliana
tcgcgacctcggaattccgggtcgcccacgcgtcaggaataaacaattaacgaatatggacgcgaatcgccgggaggggtgaagagcggacttggatgacatgtgcttgaatccgatgattgaccctacgacttatgattggcttagaaaggcttcgggtctacattgttgaagccttcggattcacagaggtgttgcattttaagacgtgagtattgtaactagccgtccgggagactctatattgtcttcgttgcagcgtgtctttttaaagtcagcctgattatccacagaagcggtccaacgagaaatcagctttgatactgccattcagcactctgctcgggggataggtggagagacataggaagctgggcatggggttcatggtgggtttggaacacctgggtcgtggttctgtgaccttgaataaaag

SEQ ID NO: 189516 - DNA, 377 bp, Arabidopsis thaliana
gggaaggaaggccgacgggcgaaagggaacagcaggagttaaaaacacccccacagcgggaagaaaccggaaaagcggagccccggcaacacaagagggcacggcaaagaaacaggaaacgaaagcagggagaggaaagagaacaaaccacagacaacaagaccaaaccaaacaagaaacagcaagccgagggaccacgaaaaaaggggacaagacggaacaaaaaacggagcaggccaaaaaaaccccggaaacgaaaaagaagggaacagcccccagaaaaaagaaaccaggcacaagcgccaaacgaaaaaaaggggacaccgacccgcaggggcagaaaaaacaaacaagacagaaaaagcgggggaaacagc

SEQ ID NO: 189517 - DNA, 984 bp, Arabidopsis thaliana
aggaggagaaaaaaaaggggggaggggggaggaaggaagaaatgaagggggaagggaagagagacagaagagaggggaagaagaagagggggaaaagagggaaaagaagggggggaaggaaggaggggaaagggaggggaggaaaagaaagggggggggggggagggagggggggggggaagaatgggaggaggggggaggaaaggagaggggagggggaagggagagaggaagtggggaaaagggaggaaagaaaaggagagaggaagaaaaaaggagaaaaagaagaaccaaagaacggaggaggaaccgacggagggcgcgacataggcaaacgcaggaggacgaagcaaccggacgagagcaacgagtggcgagaccccgcaacgaacgagggcccccacacggcgcagagagaaagaaggaaggccggcgacgacgcggccgaggagaaacggagcagagggacgccccgagactggggaagaggaacccggggagacaaacgaacgaacgaggccggacgggggacacgaagcgggacccgcgacaccacaggccagcaaaggagcggggagcaaaaagaggcagccgggagcgggagagcacgccggacgcacaccggcaggggcaacgacagagaagacgaccgggacccaaccaccacaagagcgcgcccgagccccacagccaggcaggccccgacccaagcccaagccgggcagcaacggagggagacccgcccgcccgcgccaaaaagagaggcaggggcgcggaccagccaagagagcgcgagcggcgaaaccccgaagcggggggggcgcgccaagagaagcccggagccgacggccccgcggaaaagaacagagagggaggcaggcccgcgcccccgacgaaggcagggcagccgacgccgcaacccgcgcgggcaggggggggagaaccccaggaccaggacggacggcacagggcaagcccgcaaga

SEQ ID NO: 189518 - DNA, 735 bp, Arabidopsis thaliana
actaccgttatgcggtaagctgggccggctcgcgggtccgggttcggagttccacggtcgccccacacgtccatttttatcaggaaacagccggaaactcatcacgggtgaacggaactggggtgtaattcatccccaaatggatgacaagaatgtggcatcttgcgtcagacttttcgtcactttcttctctcagattcacagactggattgatttccaggtgtgttactggctactatctagactctgagagaggtttcttatcttatactccactgctctgatggaagactgagaacctatgttactagagaagagaactgaggaactaatctcggtaagtggtattatcacggactctactgacaccggagatttctcctactcaaggagaacgatccattagacaggatgaacaaggtccttcttagtcgtattctcctgctgatactcaaggacaaggaccaccatctatggagcgagaccgctaccatctgaatcagttcgtaagatcttgcaatataggagtattccatgaggaagtgctgtggattgcgatctaggaggaatatttgtcggttaactctctgtatagagattgtggacgacactaccaaggatagtgtcatctacgttagtatccctggtggatcaggtgcagatgaagagctatattcgatactgttacgcacatccaggctgatgtgtccactgttagcgttgggctagacttt

SEQ ID NO: 189519 - DNA, 750 bp, Arabidopsis thaliana
accccccctgggtcgattgtatcgataagcttcatatcgaattcgcggccgcaccacgcccaaccgaaggtacattttataattgctgaaaacgaacacgaactccgagaagtgagcggtaacaacagagggtaacccgaaccacaccatgagacaacgatcatgaaccgagtgcacgagacacgaaccagccactaatgatcggagaacgaaaagcttagaagctcacaccacgacaacgaacaaccaggcgaagagacaccaccttctggacgttaaactgcgtcgcaggactacacacggcatgccgatcaccagtgcagaagaaactccggggggacggcgggaaccaagcccagagctgaatacaagccatgccatgagcgacggagcatgacgcaacgacccaccaagctatggcaattccggagaggaggttgagccaatatcagcacacaacactagcgacgaagcacacgatgaagcgatccctcgtttcggaggggacgctgcgcaagggactgcccatactagaggcgcctactcgacatgaagaaacctctgccgcaagaacgggatggccatacaaactcggatctaccccatggactcggaaaagctgcacgaacggaagaccttatggccgaaggatctaccacaagggggagggggacccaaggtcctgccactcctagccagtggggacctggataccgcatagccaagaccgggggacggaactccctcccg

SEQ ID NO: 189520 - DNA, 809 bp, Arabidopsis thaliana
ggaggggggaaagggggaaaagggagtgaatttaaagagaaaggaaaaaagggggggggggaaagggggggggaaagggggaaggaagggggggaaagaagggggagaaaaagggaaaagggaaaaggaaggggagggaggagagggggagaaagaaaggaggaaaaagggaggaggaaggggggggaaaagagggaaagaaaagcggggagggcaaagaagaagagggggaagagggggccagaaaaggggaaaaggcgagaaagaaagccccgcccagcgccaaagagggggggagccccccagggaggcgcaaactaccacccgggggaggacacgggagcaccgagggacagcaaacgggggccacccgggaaaacagaaagccacgggggagacccccaaggaagggggcacggggaggcagggagccaaacaaggggcgcacaaccccacaagagggacacgaggcaggggggaacacggagagacgagggacaaaaaaggaagcgccgcgggagaggaggggggaacacgggcgagcgaaacgagaagagacccacgggagacgccccggcacggccaggcggagaacggggagcggccgagagaacccgcgggcagacgacggcaaggcgaacaaagacgaaaaggggcggggaagaagccgcgaagcggcgagcccgggggcagaaaaaacccacagccggcggaagaagaaacacccgaagagaacgcaggggaccccagagcagggaggggggaaagcagaacagaaaaaggaaaagggcggaccaacaaacggagga

SEQ ID NO: 189521 - DNA, 682 bp, Arabidopsis thaliana
ccggtctcggaattcccgggtcgacccacgcgtccgaggagagataaaaacacaaatctacacggagatctatggtgattttgaaggctggccgaggaagaggtaaaagaggcgggggagctatggaagaccatcagttggtcaaatagactccccctggaaaagagcccaactccacctttcatggaattggcattcaaggagaagggcctcccgggggctacaaacttagatttcaaaagccctccgcgaattcaccaaagggcgagtatgccccaatcttcaaggagccgtaagggagtggtacaaccctcagccagcgccgcgaaagacatgaatgagagctccctccgagaaatgaaccctttatacgttttccaagacaggtttaagcccttgaatggacccccacgcaggagctggtttcacaaaccaaaaaaaacaaaccccgcctttggaaacatagccaaagtttaggcccttgctggcctcggtcggaaataccgcgtggcataaaaaccatcaaaaaaaccttggaaaccacggggggcttcaaagattcgtggcctgagggacaaccgctgggctttatgtcacctggtggacccatgctcttggagaaaaaagcaccacaggttcctttctccccccccacaaaaaccaatcgcaaaaaaaccttttg

SEQ ID NO: 189522 - DNA, 1083 bp, Arabidopsis thaliana
gaattttttgggggaaagatagttgcccgagaaatatattatatgagtaggtgatgtgaataactgtgataagatagaaggcattttttggttttttttgggagagggtaattaggagaagtagataaaagtggtgttgggggaaaaatgatgaatatgtaattattgtatttattgtatataggaagtgtaaggtatgtggtgaattgtattgttttatgagttatatggatgattagtttttttaataagttgatatagttgttttttttgttataattgagttatgtggtgtatttttgttggtatatgtgatatatagttgtatttaggaatgttatgaggttatggatggtaagttataggataatatttattatattgtaggaagatgggttaaggaaaaataaaatggttggtgaattcggaaataatagtaggtttggtaagtataagatgtgggtgtataagtgtataaacgatttatgtgattatgatgataggtaattgctaatagtgaatgaacttaagtgagttgtattagggatattattatggggggagtagtgatgaaaatgtaatgttagtgataattgtatatagtagcatagtttatatataatggagatagaagatgatttgaaatagatttaagtttgagtttatattatttagtggtcgtgaaatgtatggaagatgactgggtgcaggataagtttgtcaactgtgaagtaaaaatatgtgatcttatattgaaggtgtattgtggtgtgtgtagagttcttcaaaggtgtggactatatagagattatgatggtcaagtatagtaaatgaattgtgataagtgatggagtgtggtaacttgaagttaaatgatctttagaaatgtaggtagatgtgatgttgatgtaatgtggatattattgataaaatttgtgaaatattgtgtgtaatgaattagtaatagttgattgctatgaaaaatagttagttgcttgaactatataatgaaaaatgtatgttgtatgagaatgtatattgtttaattgggattgtgggattttttattgatatgttggtaga

SEQ ID NO: 189523 - DNA, 481 bp, Arabidopsis thaliana
ggcgggcccaaaaagcccgggtgaacgcggaccccgagggggaaaaccgggcaaagggaaaggggaaacaacagggccacaagaggggccacagagaacaaggggaccaagcgcgaccccaacccacgaacagggggcccggggggggcaaaaacccaacaaaccggcggaccaaaaccggaccccccagcccacaacccaacgggcaaccaacccaaccctcaaccgacgagcgccaccccacccaaaaaaaacggggaagcacggcgcccacaggggggcgcgcacccccaaagacagaggagccaaaaagaccccgagcgcagaggccagacaccgagagcgcacacgcaccgaaaggcgccgggccaggggcccccaccggcaggccgaacaccagggggaccgcaagaacacgcgcgccgaagccaaagcccgcgccgacggccaggcgcacgggacaggagagcgagaggcacac

SEQ ID NO: 189524 - DNA, 677 bp, Arabidopsis thaliana
gccggcgcccagcgcaccacgcagggagccccaccgaattcagatatataagacaaccaagcaagcagagcaaagaggagagggcgaaagccggcgacatgaaaaacacgactgacacggaccgcgaaacatcaaaccgccccgaataaagcgacaacgaacgcgataaacgccaagcaggggacatgagcatctgaaagaaacaaggggaaaccggctctcgagccggcacagccagaaaccacagaagcaacccgaccgaggacccaagaggatgcaacaccgcgcacgaacaccagtgaagcatagcagaccgcaccacaaacaggcaccccccgcgccccaacggccaatcccgcacagacactgacagaccgcagaagcggccccagaggccggacgaccacccacaagaccagaagcccgcacgggagggaagcgcaagagacccggaagagcaccgtcggcggacgacgccacaggccgacgaccagcgacaacccgacccgcagcggccgccaagccgcgaggggcaccggcccgcaagcccaacccaccaaggcagggaaggaaaacggacgccgccaccgcccgacccacccaaggacacccaaccaagcaccgcctcggcgcccagaggacggacacgcaccgaagcccggaacaacccaccgacc

SEQ ID NO: 189525 - DNA, 654 bp, Arabidopsis thaliana
acaaataaacaaaacccggccccgcaccgagggggagggccacacacaaacaaagggaacccctttgcttttaggaaacccagacacaacgaacgacaccaagaacgggggccccccacaaaaaaaagacaaacaccaccacacaacaaaaacaagaaaaccaacaaaacagaccaacccaacccacgaaccaaccaaaaaacaaccaaagcccccccccgcaaaccaacgcaaccccaaaaaggagggaaacaccaacgacaaaaagaccaccaaaccgcacccaggccaacacaaaaaagaagcgaccccaagccaaaacgaagcacaaaaacaaaccggcaaccccgacaaacaaacaccccccaggaacaaacaataccaaacagccgccaccacggaccccccactgcgcgcgggggaacaaaaaaaaaaaggcgcgaaaccacaaaacaaaccccccccaaacaagccgaggagcaaaaccgaaacccgaaacaacagagacaacgcgaacaccacaaaaacccaacaccaaggacacaggacccaacaaaacccacggcgcacaagacccacaacaaaccccaaaacaacacccacagcaccacccgcccaacgaacacaagcaagaccgagccgcaaaacacaaaa

SEQ ID NO: 189526 - DNA, 375 bp, Arabidopsis thaliana
gtgaagtgaaaataaggtaagttaaattggaaaattgttttgaaagatataagagggaataaattgaattttattaataaatatgaaaattggataaaaatgtaaagtaatattagaatattataagaataaaattgtggaaaataaagaagttttaaaagaaggaaataaagtttatttgatatggtagttaaaatatttaaaagaggggaaaagttatatgaaataaatttgtggataagtatatgaattataagggattttatgaagaaatgttaatatcgtaaaaatttattataaaataatgtaggattggtttgaatttatattggagaggttgatttagattagtaaatagaaaaatgttttatattg

SEQ ID NO: 189527 - DNA, 375 bp, Arabidopsis thaliana
  unsure (1)..(375): unsure at all n locations
ccnccattggcgattagagcaacccgcccgctcntgatgatcaacgagcaggctatcaccagaagcaccacggcatatatttttttttcaagacaaccgaaaggcctcgcttaggcggtggggccatcaaagtgatgctaagcgctctgcttgtacatacaagagctaccttgtaaggcatgtataagactaagccgcctaggtgataaagagctttagaccaagctccccgaacaggagcatgaagaaagctgcattatgagtaggacgtcgagatcgactgcgcccgtagacgggcatcgcatcagctagcctcgcctcgtacatggctagtcctcgcgtaacatgcaacgatagccaagcgtaaaacgtccg

SEQ ID NO: 189528 - DNA, 694 bp, Arabidopsis thaliana
ccgcacttccgggttgacccacgcgtccgcagaccgtttacagagaggaacctgccgaagctcaaactaggcttttatatattccagcatcacaagaggcgctggatggcttgctgcagacgtaaatagcttctttagcaacgactgctagctttcctacgacatcggaggacctctttagcaccgcaggtcaactacgctcaacagattaagtgcgcgcctttcaacctagcccgatcctattttgcatccgttcaaagggggtgagataactctgtctcatcattcagaacaaaatctgtaatccatccgaacctcccttcttaaaggggcctaaataagatcttcaagcctatagacacctcattcaaaaagagcaaatatttagcaacagagggaaccataacttagtgccattcgccagatttggataaaaccacaaccagaagactgccattcttgacgccaaagctcgagtgaaccaagagccaccatgttgccacccctttaaacggcaacattccgaaaccaaaggccagggagctttaaatttttggaggggaaaaatatttccgggcaacggcaccaaagaattcggaaacagcccccacacggactctcgaaaccgcataccgacttaggacaataacgggaaatgtccagccaacccgccaagctcattcgggggaaaaac

SEQ ID NO: 189529 - DNA, 769 bp, Arabidopsis thaliana
aaaggaagagaaccagggtacaaacgcagaccaaacacttttaaggtcccaaggccgacggacaaccaaaaaaaacggaaccacaaaccgaaaaccaagaaagaacctcaataaaaaagccgaaaaacaaaccgagaaaatgacacacagagggacagaaacaaaaccagaaagaacaccaaacggaataaaaccagaggaaccaaaaaagagcaaaaaacaagacagaccaacacgccaaaaaaaaacccaaagcgcaagaaccaaaaaaacacaaaaaacactgaagcaacaaaaagagcaggaaacgaaacaccaacaaaggacacacgaagaaaaagggaaaaagaaaccgacaagccaggaagctacgaaaaaaaatcaaaacaaggcaagaactaaaccacaaaaggcccgcaaccagcaaacgaacacaaaaaacaaacaacaaaaaaccaaaaaacaaaaaaaaaagaaacagccgaacgcaccagacgaaaaaaagacaacacaaggaaaaaacaaaagaacaccagaagaaaaagagacacaaccaaacgaaaaaaacacaaaccaaaacaaccaaaagagaaaaaaaaaaaaaaaaacggaaaaacaaaaaaaaataagaagaacgacagaaaaaacaaaaagaagaaaaagagaaaaccctaaaaaaacagcgaacacacaccggacgaaaaaaaagaaaaaaaacccacaaataaaaccagaagaaaaccaggaaaaacaaaaaagacatcacaaa

SEQ ID NO: 189530 - DNA, 645 bp, Arabidopsis thaliana
  unsure (1)..(645): unsure at all n locations
accccnaatttttttttagaggtaaacccgaccctggttaccgatagtgttgcgtcaacaaccctgctataggtcggggaccaacacattttctttttacaaccgcgaaacctgttagttttcccagacatgagtgggaacttcatcttgcatatccccgaagtaattgtgatcaggacattcacttcctcaattgtaatggacctctatctctaaccaatactatctgacttactcactaactctaacaaacttggagagactaggatgtcgtgcccggcccgtcaaccctgggatcacagaatctacctcgtcgaacaacaacgaagaaccgagctaatgctcgaattgtaacaccttccggcctggggaacacggaaggcctcgttttccaactagggccctgaacggaaatcctatcacccttggggtggctatcccaaatccttttgaagacccttttcatcagactgtgggggtgcttccaatatgggggaaaaatatgttcgtgcagtataatcacccgattagacttctttatgccaccatctaaaaacgccggctctgcctcaggccagctcgcccgcgtttgtcgtcgtgaccctttcactaaaattctctccgctagtctgctacaaatttttc

SEQ ID NO: 189531 - DNA, 1323 bp, Arabidopsis thaliana
  unsure (1)..(1323): unsure at all n locations
tttttttttttttgacagaaggaatgagttgaagtgattatttgatgtgtgtaagggttgggggggggtgttgttttgggagaatgtgtgtgttggtatttgttgtggattgaggttattgagttgttggttggtgatggtgaatggaggttggttgggttgaggggtttaatgtgtgggtggagggttttgtgggtggtatggggggataggtggttggtgtttggatggtgggttttgtttagttggatgtagttgttatttatggtgtaaagggattgtttatgttatttgtgaatggttttttgttatgtatagtgattaggagagtatgttgtgtttggtgtatgtgttatgtgtatgtgaaagtgttgagaattgttagtgggtgttgagtgagtgatggtgttgaggatggaggtggtgtgtggtatatgtagtgatgagagttggtgtgatagtgagataagatgttgatgagtgagtattgtgatgatgatgatgatagagtatgatgaaagttttaatagatggttattgtacgtgagtggtgatgatgtagntatgatggtgatggtaagaggttggagggtgagttgtgttgaaagggataatgtgtcgggatggtgacgtgttatgatgtgtagattgatgtgtgtggaggtgtatgttagtgggtgttagggtggagtgatatgtgtgttgcttaatgattaggagtgtgtaagtgtgattggatttagtggagtgagtgttggataaataggataagttgtttatgaggtgggggtgtagtgatggtgagatatgatagagtagtgtggatttatatgttgagttagttggtgtagatgaagatagttttggggtgtggtttttagtttgtatgtgtggagtatgagaattatttttgttttatatggtattggagttggattgagtgggtgtggtagtagtattgtgagtgggtgtttgttagtgttttttgtggtgggttattcttaatgtgtgaatgttatattatgttgtgttgagtagggagtttatagattggggatgggattatgggatgtttgagtagatgttgtgtagtgttgctttattagtgattatggtagatatatataanttgagatgttggcggtagttgatgttggtgtgatatttgtatatagtgtatgttgatttgtgtagatgatagtgagtatgagtgtgatgagatagtatatgatgaagtggtgaggagtatatggatgataaggatgatgtagagttagagtaggtgggtgtagatgatggtgttattattgagtatgtgtgtat

SEQ ID NO: 189532 - DNA, 1080 bp, Arabidopsis thaliana
  unsure (1)..(1080): unsure at all n locations
gaggggagaaaagagagaggggagagganagggaccggggggagaagaaaatatttttttttttgaaggagggaaagaaagaaaaggaactgaaataagggggtgggtatttaaagaaaggaaggaggggtataatgaatttagggggagcggaggggattgtgagttttttggttggtggggggagagagaggaaggtggatgatgtgttgggaagggataggggatatgaagttgagaggagattgtgttgggatggaatgagattaggtgatatgatgatatgggtatgaaggataggtggggatgattatgtttggagtgatagggagagggggatagtaatggttggtgttgaaaattttaagtgagaagtaggattaggtgatctgtgggggttttatttgtgggtatattaaagagggttaacaatgagagttggcgggataatttcgtggattgggattgggttatgaggttaataaggggagagagaagtagggtttgtggtgatgtgtatttttcgaaataaggtgtaagtagaggtgtaggtatagatatggtgcaaggagattatgtggttggaatgtgactaagtggtgagtaaagatggagtnaggagtggggagtgagtggaataggggaagttatggaaatagggagtggttgtatataaagtgtagagatgttacgttgtatgagatgttatatagtagattcgaaggatgataaagtttatttggagaagatggatatattgaatgatgtgagaaagtatgggagcatgaattgttatgattatgtagtgaatttgtaatatgattataaggagaatgggagtaagtgtatatagagtgtgtgtaatagagagggaggttatatagagtggttattaatgtatttagaaggtatggtatgtgagtgatggatgaatttatatgtgtggaaagagttttagaaatgggatggatgggaaaagtggggattgtttagagggaatggtgtagtgtttgttggattgtaataagtgtggagtgggaatggtgttggtgtggtaaagttagaaatagttggtttagt

SEQ ID NO: 189533 - DNA, 1015 bp, Arabidopsis thaliana
ggaaaccccccccgggcggggaaaaaaaggaggaggcaatgccccaggaaaagccgttatttttcgacgcaggcgaaaaccacaaccacaaacgagggggggggaaccacacaacgaggggggagcccccacgaagaaggacacagggcaaacgaagagggcacacaaccacaaagcacacgaacgcaacggaaagggaggaaaaaagaaagcacgcccgaaggggtggggaaaaacaaacgggagaagaaggaagcagaggggacaagggagcccaaaagacaacgcggacacgagaagggacggtcgaaaaaacgcgaacagaaaagaacaaaccagccaaaaccggcaagaaaagggaaaaaaccaaggagggcgaagggcgagcgcaggagaaaagaggcagtggggaaaaaccgcggaggaagagcaggaaaaaccaaccggggggaggacacaagcagggagacaggaagcacaccggagataacagggcgcgggcaaatcaccacgaagcaagggggcaccgcgcgaacggcgaacacagacgccgacacggcgaacggagggagagacgaagaacaaaggaagacatcgaggacgaagacaacgagacgaacggagagagagcggggaacccccgccccgaaggcggccgcaccgcccgggtggacgcgaaccaaaaaccggagaaaacacacgaagaagaccaacaaacgcataacaaaaggagcagaacacgcggagaacaccggacagcaaaaagccccacaagaagggccccccaaaaaacggaaacgcggaagagccagacaggcagcccgatcgggggagaaaacgcagcaggggggacaagaagggaaagaggagaaacgaagaggcgcacaagacaaaacccgaaaaaagaagggagaagacgggcccaaacaaagacgagggaaaacagaaacggccccaaacacgaaaaaaagggggcagagagcacacccagaagacacgcaagagaaaaaaaaaa

SEQ ID NO: 189534 - DNA, 601 bp, Arabidopsis thaliana
  unsure (1)..(601): unsure at all n locations
tcatacttcacctacttctcaattccactcacccagaacccccatactccactccatacacctatccctcttcccatttcctattacctctctcttatcccttctcaatcatcccatccactacttctatcctctatctcactttcccatctcctcctatactcgaccaccccaacatttccctttccttttgaaccaacaccccccttttaaatttncggggnncccctccccacccgctctctccaaaagaattcttctcccaacaaaaatactacctggcgtctcttttatggactccctatattcttctctctttttgccccccacaacacagtggtcttttccaccaaaatatattcttaaacggggagaaattttcacattccccctttaacaccaaatatcccaaagggattctcacctctgttttgccttgtgctttcccccaaatgggggcccgctctccacgaagacaaaggcttcccctcttttgtctcgtaaaacaaaacaccttcgcaaagaatagtcttaatcctcttggttctttttagcaagcggctaatctcatcgaaaaaggcgtgtggttgacctttttcaa

SEQ ID NO: 189535 - DNA, 987 bp, Arabidopsis thaliana
aaacaaaaagaaaagaagggaaggggctcgcaagagaaaaataaaggagagagggggacacagggagggaagaaagtggagaggaaaaaaaacaaggagaagaaggaaaaccaagggaaaggcgaggaaagagaaagagaggagagacagagagggagggagcagaaggaaaaagggagagacggagggaaaaaggggcgaaaaaaggggagaagaaaaggaaaaagaagaagaaagtagtgaaaaaagagagaagagaaagaggagacggtagcaggaggaagagagcgaagaagaaagaacaaaagaagaagatgagaatagtagaaggggggagtgaagagtggagaagagcaagggagagaaacatacgaggagggggaagagaaaacacaatagggagggcggcaaggaaaatgagaggagataagcaggcacattaggagcgacgggaggagagagataaaagagagaagagaagaggagggaaggagaacgaaagagggcgagaaaaagacctaggcgaacaccagggggaatgaggaggagctgatatacaggagaagtctgagtgcaagcaaaaagagggacaaaacaaaaacaagagggggaacagattggaaaggaaggcccgggggaaaagaaaagaggcagatggaagaaaaaaagagggaagggagaacgaaaaagggggggggtaaaaaaaaaaaaaagggacatgaggccggggggaggcgggaaaaaaaaaaagggcgaaggaaaagaacgggggtgggacatcaaatcaagagaaacgaggggggcaaaaaacggtgccctaaaaaaaaaaaaaaaaaaaaaaagagcggggccgggactaagaaggaaaccaaaggttaaaggacggcggggcaaggggaaggacaaaaagttctttgtaaaaggggacaaaccaaaaaatacaaatcaaacttgcgcggggcggtattaaaaaaaaggcccggggaa

SEQ ID NO: 189536 - DNA, 1057 bp, Arabidopsis thaliana
ccaccccgccgggctaataaggaaggccgttatataaagaggcacacaagcccacccctatttttttcacgccaaccaaaacacaactcaaaatgaggagcggcaaggaaccaaatccacggggggcgggaggaaaacacaaagtacgaaaacgggaaaaaaagcggggggctacacccgaaaaaaggcttgaaaggggggccagcccaacaatctcccccgtatgcggaccaagcccggggccggtgaacaaagccaaaaaagaagggcccccgcacacccgaatcggcccccttcccaaacaagattgagcccagccccggaaaagggaaaaaaagggaacgccaccccaggaagcgggcgcaataaaaaccgccggccggggtaggcggggtagggaataaacaaccgagccaaagggggagggaacaccgcggcatcaacaaatatagggccccaagggagccacccccaaagaccgccccccggggatcccccaattaacgagctttagaaaagtaacccacatcacccatattgcttcggcacaacggggaacggcgcgggcataaccccccccgggcaaaggcgtccaaaaaaaccgggggggccaccccaattcaagggggtccccggataataagtgggtgacaaaagggaacccttcgaaaaaaccaaaaaaaaacggaggacaaggagacgaacgggtttcaacggaagggggggcccaaaaaaaaccccggaaagaaaccggcacattacgcgcccttaggaacgggtggggaggccccacggcaatctgaaaagaggggggcaccccaaaagagcccccaaaacaagggaaacgaaacaaccgtcaaacccttaaggggcgggaccaaaatccccttaggggaacttaattcagggaaaaataggggaaaaacaggaacgtgcgtaaaaaggaaaaaaaaaaggggccgcccgaactctaaaacaaaaagaagggaacccccgaagatcctaaaaaaaaagaaaaaaaacccccttaccaaagagaagggcgggcacccttttc

SEQ ID NO: 189537 - DNA, 703 bp, Arabidopsis thaliana
gttgtaccggtccggaatttccggtgtcgacccacgcgtccggagagacggacagcacatattcaaattgttgttgatacacaagtttcatgctcgacacctgtgcccaacacgctgcgggccaggccgccaacgtccatagtgctggattcaggaacgatggagatctatcccacaaggacccgactgcaatccacgagggacaagatcccatctccatgcatatcgaggagagtgctggaccataagatgccatgaatgcgttcacagcctgcgaagacgctaggttgatcgcttgcgacgctcatccaagacctcctgtggatctggtcacataccgggatcggggatccaggcgagctttgtactcgactgtgtaatgactggactgggcgagcaaaggtcatctctccacctactaaactgtgggttgatgattgaacaaccctggatgtttattgctaggaagctcattatgcatcgaaaatttccgatggcattgatcttctagcactggagaacaacgtactcatttaaatgatagaaaggacccgcctcgtgtcttgtaagattgttgtcctccacgtcctatcccttatggggcggggcggttctgggggaacccaagtcttgccttccgcagtgcaacgctcctaacaaaaacttatgttttttggtcgtccccaccccaaattcaaatatc

SEQ ID NO: 189538 - DNA, 910 bp, Arabidopsis thaliana
ttttattttttttttggagcgctccggcttcaaaacacaaccaataggtggtggggtgtttttctttcgtaaaagggggtgtgtttccacaaaaaacaactttttttcttttttttccttcacggctagactcaaaggttttttaagaaatttttaatatttctaaaagaaaaccaactgaggggtcagtcatcatccttaacgggtggaacctaaacacccgtgaactataaaactcctcccaatcctttctttggtttttttccccacaggacgacatggccgatattaaattttaagggtggatccaccccttgtgtcccttattcgaatgatttttacctctcgaaaggtatctataatttctctttatttataatatacccggtgccttaaaacgtttctcccggtgggggctttttaataaagaccccccgtttgggcccaggaataaaaatttcccgaaaagaaaggttttttaacccagggcccctccaaaaaaacggggttttttttccttgaaaaaagggccctgccaaaagaaacctttgggagggagaaaattttttggtgaaaacctggatctttttaaaaaaaggatgtccccccttcttaagtaaacctcaggtattctttttttcatcgcgcaataattgtgtgttggatcatatctcaaaaactctttggtttacccacccccccttaatattatgaaaattgtttcctctctcacttacttttcttctgggcaccataacacgcgagcgcattagtgagaacctatctatacatctttggtgtggggcgccctcttaagactgtctcaaatcccccgctccctcccctctaatgtcgaagtacccaaagtttttttttttaggtggcggcctaaaaaactaaaaatatgtgg

SEQ ID NO: 189539 - DNA, 862 bp, Arabidopsis thaliana
  unsure (1)..(862): unsure at all n locations
ccacccgtccgaagaatatctttaattgccggcactatcaactctgtgctcttttttttcccctnaaacattgcttacgttccaagggttctaaatcactttagtgatggagttctacatcaccacaaactatggccatctttttgttgaattagagaagatcgagctatggaactccacggagtagttctcctttggaatattctgcttatttctctgagtcgaacagccagacccttgttacatacaaacctgaacgcctcgtatgcgtatacacacagttgtacacggacgatctatatcgtgttagcagtacccttcggtggcgacttacatgcntcgtcatctgggtatgttcctactcacgtatcgacattatcgacgtagtgccgacatctagactggctctaagaagactcaacctatacgacgctaatcacacgagtccactctgagcattctttgtgtggttcagactaaagaacactgttaccttgtaagcagattttagtttttcattctcacatctcataagatctgtgataacactgaatctgatttctattctaagatactactgtctaacaaccacgggttgagctgatattgtagtaggttattcaagtaaggaactaaattcacattagtctagatatcctcccttacgtaggtaacgtccctccgttttgtcaagttagctagtatatcggagccccccaaaaaactccagggggtaatcgataattgctttacagcagttttggggggcaattaacccatattttacacgcgaactttatttttaattaaagaagcaattatttcaacaatgtgaatagagtccaatggtctggatttctga

SEQ ID NO: 189540 - DNA, 556 bp, Arabidopsis thaliana
agctattgtatagatagaaccttaagtatagacattcttgactgtcttttagacaaagaaaagattttcaactagaccgatattagtatttgctgatgagctgaatttaaagagaatactcagatttgattataacactaatattgatgttaatatcgagacatttgttaatggatacaacttattactatgaacctaacgtgctttctaggtatataaggatggagtatgcactgatacttgaagatactgaaatatgatacaaatattcattaattatcttgggtattcaatgacgctagatagttgaagaagatatcgtttcttaacaaatctaactgtgcctattgaggtgacatcttgacatctgatactaagtacatttggaataaaaaatatgatatctttagtaatcactgtgttatgatatacagactgtttgtgaatgtacggcatgcatgactcatgtggctaatgttatatgaacaaggtgcagggatgataagcatatactctgcatatttgtggctcgtgcatatctagacaatgtaaatat

SEQ ID NO: 189541 - DNA, 409 bp, Arabidopsis thaliana
  unsure (1)..(409): unsure at all n locations
aacgccccacacaccccgaccgcccgagacaatccacacagagcgcacccaggcgccgccacaaccccgccgaaaaagccccaatacaatagcccacccaccccccccacgccagaaaagggggcgggaggccntgcggccaacggcgcgccactcccaaaacagcgaaccgggcgcaaaaccaagggccaccaacacgggcaacaccgggccccccacgggcgcccaaagcccacccggtgagacccgcggggccccaacaaccgcagagcgccgcccgccaccggaaacgcccacaccgcgcacccacgccaacgagggggcggcccactcaaaaggggccgccccacaacggcaccaccgccgccccggccccaacaacaacaaacacccccccaccacccgcgga

SEQ ID NO: 189542 - DNA, 397 bp, Arabidopsis thaliana
gcggccgccctttttttttttttttttttttttttttttttttttttttaagtttaaagggaagttttattcatttgtgggataggggagaatacaaagacgttaagacaaaacaacaagaagaagagacgaccaagcccctttagatagacgaaagaagagaagcaacaatgggggaaatcacatataacaatatttttggatcacggtttagttcttgcgaagcacgatgaggtactgcattccgggtttggagttatggaggcgaaaaatctgttcgcgtgccttgacctcaacaagctcaaaggctttcctcatgacttcgactccaaaatgtgcggaaatgaaagcaccataaaaggccttgaaagagatggccaatgtcttggggtcaaaa

SEQ ID NO: 189543 - DNA, 335 bp, Arabidopsis thaliana
aaaaaaaaaaagatttttggaatgttccctaaaaaagtttgcctttcaaaaatgaactgggaaaaccgaacattggaaaaccattctttttttttaactttggattttttacattttgaacccccccggctcaaaaacaacttggaataggggtttttaaaaccccccaatgccaaaaagggtcagactttaaaatctttttttaacccctgggctgaaacttttccaaactagggcccccttttggggggtgggactcaaaccctttttcgaaggttgcaccttttgtttttttaaaagggcccccagattgaatcccctttttttttacgggg

SEQ ID NO: 189544 - DNA, 521 bp, Arabidopsis thaliana
aaacaaaagtgtttaagacttttcaaagttgtaatatgagagaggaaaaaggagattttgtgacaattctaagtcttatggaaaccgtaatacaaatcctctaacgcactaagttcagattttaaccaaaggtgcatgacgacgattaggcagaagagaagattgtcctcctcacacaatttgatttctttccttttcaatgcttttttaagcactttgagacttttggagtattttgttgaagggatctgatcatgtcctcttcataatgtatcccaggattaaaccgattaggccgaccagaagaacgtacatgaaagggattccaccactcttacttgtcttgctttcgcgcctcaactggtccaattcttggtgaagcctgttgttcagttgaaccgcagagttcttttcctcggtgagttttgtgaccagagctcttgcctcagatgaattatcctgagcatcaaccctgtctgcgctaaatcttggagcagcagtaaaatcagaagcattcccat

SEQ ID NO: 189545 - DNA, 235 bp, Arabidopsis thaliana
aatctcaagagacttttgactcagtggtttttcccctgtgtgaaaaaatcctaggctttcgtggttaagaaacaatcatcgtaaatgggagacagttcctcaaccatcgttggacccagcggaatcctggggtatattagctacaggctttgctacaagttctttctgcttctaagaccgaattgaccgggtggcgcacttgagcttatcacattcgggcgagaggatttgtggc

SEQ ID NO: 189546 - DNA, 268 bp, Arabidopsis thaliana
aaaaaaaatctacaaaacgcataaaggcattaccggaaaaaacgatattacttataaaagacaaacacacgaacaaactcatacacgcctacctgagagaacactgaacacctctgtggcctacaaaagcaaaaaaaccaccacttcatgcagcctaaacgacatcgtgtaagggtgggtactctgtagggttattctctactctttttcaagactagtgttgcgtgtgagagatcacatgccgtaagtgggaggagagctccttggt

SEQ ID NO: 189547 - DNA, 402 bp, Arabidopsis thaliana
gcactccaattcaatctattgtgtataacatatagtttatatacacacaacataataatcccaggcaaaatggtaaaactaattaatataacttgtctcaaaaagaaccggccaaaaaaaactaatgccttacagtagttttacatggacacagagatgctccagcttctactctctctttttaacagttcatgttcccggcacagcttttgtgaacaagaagaagccgattctgagcccaacctcttatagtcaacgatcgtttgaggccataccagccaataaatagtcaacgttcagtcttaagtgtgtgtatttcacttgtgaggtcgcagttcaagcttataagctcgtatttccatgggagagatcgagacacgtccttcccgtggctgtgaacta

SEQ ID NO: 189548 - DNA, 206 bp, Arabidopsis thaliana
catcaccctcttagctggtttttccagagatgcagggttttacccgatacatatatgacatatctaactaacatttttatggaacagggggaaggaagatgagactgtgcggaccttaattaagttggttatgtaccaccacatggggcatttgtgtgaatgttttgagtaacattttgacaagccggacgttattctggccaagg

SEQ ID NO: 189549 - DNA, 526 bp, Arabidopsis thaliana
  unsure (1)..(526): unsure at all n locations
cccccgggcgaaaaataagaaaaaaaaaaaaatcccaataggacgacaacccacttaagggagaacaacgccgccccccggcgggggcgcgtttagacgggcgcccctcgcgcaaaaaataccgcccccgccaactacacaataatggggctacccatacacggctactggacatatcaggaggatacatctacacaattgtcctaattcggaacaacactacaanaccacactatttttaggagggggcctacaagagacacagcgtcaacgtaaatattgctgaccggggaaacccggcgacctgtcgcacccgagagctatgaggggggtgccaccaccttcaacgacctcaactactggcccctactctgttgatggaagaaaaacagacacatcaccacccccatgcggaccatcacctcctcgcccctcagcacaccgcgtagagggagatgacacaacatccggacacccaaagggccgaagacactactctaccagcacagctcccagagccccactt

SEQ ID NO: 189550 - DNA, 469 bp, Arabidopsis thaliana
  unsure (1)..(469): unsure at all n locations
gcctgcgggaccgggccggaatcccgggtttaccacgcgtccggttgcttaagcagactacggttcttgccaagggagtttttttgtgttttattggagaagtccaacacaaaaagccgttccaaaaagatcaccttccgaatagcctaaggctgaattttccccaaaaaccgaagaaacaccaatccctccactcgngggtccaggaacccaacctcctacccattgggagtaatccgaaaaacctcctgggaaccgaaagtaacctctttgaattcgaacccaggttccccaccaaaggaaacgaggacctttattcaaagaattgaccttaaccgaacaacgggtacaaccgaaaatcgggccaaggccccggtatttatcacctaaccaaccaggtttaacgggtccggggaacggatccgctaaaacaaaaccccaatgccacagcctaaggagaaatctgggc

SEQ ID NO: 189551 - DNA, 407 bp, Arabidopsis thaliana
  unsure (1)..(407): unsure at all n locations
gggggcganctataaccagcggaggcaacgggcagaaagaaaacaccggccgcaaaggcacgggggacaacccagacacagaccaacgccacgacgcnacgagaagagacggcgcaccangagacagaccggaaaagagacccgccggcagcacgagggcgagacaacgacgaggggagcgacccatgtttttttttgccaggaggaggaagaacaccagcgaccaggagccatcaacaacaaagaagcaaggccagcagcgaagagacgcgggaggacacgccggaccgccaggcagaggcaagaaggaccagctgcagggaccgacgaagagggaaagcgcgacggagacaccacaccagccggcgcgaaacacggagcagcagacaccaagagaccaacagaca

SEQ ID NO: 189552 - DNA, 497 bp, Arabidopsis thaliana
  unsure (1)..(497): unsure at all n locations
cgggggcngcccggggggggggccccgcattacagggggggccccgggccggaagaaaccgagggccgccggcatccggacagaaaggagcccaaaaccggtcaagccgccacaccagaggcagaagcaacaggggaacccacaccacccggagaacgaaggcccccacacacaacggaagccagcacaatgctcctttaaggggggaacggccaacccacaggggggaaagagagcaaaacgaacggaacccaggggggaaagggaggcccgaaaggccaacagagggccccgcggagcgagagaaggaccagggcaaacgcaacgggccacagcagaacaaaaccaccacaaaacgcacacaagggggggccaccccaccaacaacaccaacagggccacagagagaccaccaaccgcgaggcgcaaaaacgccccccgcaaacggagccgacaccaggaagagggaacacaggagagcacgggggcgcgccaaa

SEQ ID NO: 189553 - DNA, 582 bp, Arabidopsis thaliana
  unsure (1)..(582): unsure at all n locations
agctccacacgcggnggcgggacgctctagtattagtaggatgccccggtctgcaagaaattcgcggccgcgttaaactctctgtaagactagtgacgttacatatgtcttgacgctgtaaacaaaaagacctcgagaaggctgacgggcctcggccggccacgggggcaagggctaacgcggagtcctcccgaaagggcttccctcgttacaaggtgaacccacttagaccttgcactcttctcccataaactacaatctccagtatagcttgtggatcacctctagtctgcaagcatttaccgggatttcccacgcccccattggatggtccctccgggaacacgcaacagcaccatcgggcggaacagtggaggtacgcgtgttttcaaccaaagcgctcgctttattgggatgcgcgcacaattggcaccaggtccagaacggtacctgtttccctgatgcaagcagactggatgcatgcgtcagtttgagagatgccagaatggcggatcgcgcgtccaacggcgatggaacgaacaaccgttgttgctctcaaagactgctcgaggttctaccagc

SEQ ID NO: 189554 - DNA, 520 bp, Arabidopsis thaliana
  unsure (1)..(520): unsure at all n locations
cgccgcagccccccggcgcgggagtcccggttttgacacaggggccccgcgcaccataataaaatgggcccactacaacatcttataccccgctgaatgggccctgaaaaaacgtttcatccgaccctnccgcgggaagccgctagacaatctggggcactcggacactccttatccctgaggccaggcgggcaggattttttttttgcggggggaagaaccccagacatttgtgccaagggccctggggaggcgcgcctccggcatccctttaccacgctgcagcctccaccagagaatgcaaacacgacggcctcggaggtcaggccccaagaggagcggtgaagttactccacagagagctgagcttccctgcgcacaataggccagcaggcaagaggagggaggtccccaattccagtcctcaggtctcgcaccctggccaggactcggtacaagcatgcaggcccggcgtcttgcagtctctaacgggatgtgtgaggagactccgagagcgcag

SEQ ID NO: 189555 - DNA, 535 bp, Arabidopsis thaliana
  unsure (1)..(535): unsure at all n locations
ccccggcaaaccccgnnccggaaacccccggttaacccggggggcggggcacccaaaaagacnagaccaccggaccgagacaaacaaggggccacaggggaaccccaccgccaaaaccccgaaagcagggcccnccaaaaagcgagaaggggcaacaccgcggcaaacaacggggacagaaggacagaggacaacttttttctagagggggggaagcanaaaacaacgccccccaanaaacacaaaaaacaccccgaaaaaaacaggggggcggcccaaaggaaagactctctagagctcaagccaacccacaccaaagcgaaacggcccccaagggaaccccccaaaagggcaggcgcnccaagaggaccccgaaaagcggccaagaagccaaagccacaaaacccagccacatctcatggagcaaacagggaagaccgggcccagggcacaggcaaccgcaataaccccaacacaccactacaccaaaagaaccccgcgacaaaaacaaccaaatcacaacgccaaccccgaa

SEQ ID NO: 189556 - DNA, 535 bp, Arabidopsis thaliana
  unsure (1)..(535): unsure at all n locations
cccaccgggggggggggcccccaattccaaggggggcccgtgcccagaaaaaaaacggggccgcccaaacagaagccaagaaaaaggaagaggacacgagcaaggcccaaggcacacccgccacccgaaaacgcacacaaaaccgaccacaacaagaacgcgcaaaaaccccaggggacgcaaccttttttttcccgggggggcaagccaaagcgcccagagaccaacaagaaaccaaaacgccccccagaggagcggggacaagacccaacaagcgagacccccccccagaaaaaccagacagacacgcaccgaggacacccccgagaccacgggagcaacgcgaaggagggcacacccacaggcacggacaccgaaaaaggaaaaaagaaaggaaacccccgcaaaggcaagcaaggcccaaaaagccccagaacgcagagaagcaaggcaccacacacnaccaagcacgagcagcagacacaggcacacccccgaggcaacgccacgacagagccagaaccacccgcacccc

SEQ ID NO: 189557 - DNA, 419 bp, Arabidopsis thaliana
tccaacccacataagggaaggctgcgccgctgccgggtcccggtccggaatccccgggtacgaccaaggcttccgtgacctgagggatttttggacccctgaaaaaacgggattgtctggagcacggttcttctcactctaaatggaaaggtcctgggaacctgtttgggtttcaacgactttccttaagaccttgtatgaggtgaactgccttacaaatatttttatccactggacggccattgccttatactatataacgaggctggaagaccacttatatacgccctgagaaggtggaacagtgcattgccaggcctcatagtcaggataggcatatactaccggaccggcacactttgctgcgaagatataagcaaagttgttgccctaacttatgctaatattgtttataactt

SEQ ID NO: 189558 - DNA, 288 bp, Arabidopsis thaliana
agggagctcggctgtggccgaccgggcggcggcgtctatactacccgccccccgccctgtaagagtccggcggcgcacacaattttcgtcagctgtcgtcttagctatcaggtccgtctacaaagccctatgcaacagttgcgctatctgagaggctacagcattacactatgcacatatattttgttaaaagacaaatttaactcctgttaaatgagctcacgagaggaccattcgcacgtctacaccttcttgccatctatcacattgaattgaccctgatgcgta

SEQ ID NO: 189559 - DNA, 537 bp, Arabidopsis thaliana
gggaccccagaaaaaaaaaaaaaaatccctagttcgcaccccccctctaggggaacccgccggccgcgcgcggggcggcgccctgacagcggacgcgcgcctgaaggaaccggggcgccgactcggagaggacggggcacgacccgccaccagccaagcaaaagctgcggccaaaggaaagggcagcaccagaagaccaacggggacgacgcgaaagggaggcagcgtttttttacgggggggcctaccgacagagccatcggcgagagaaggagccgcgaaaggagcacacgctgtcgaggggaggccgccaagagcgccgctagggggtgccgcggagctccggggacgcccagggtcggaaccggccgcgcccattccgtacgacccaacacagagccatgcccatcgggaccaccaccaacacaaacatcacgagaccgggcagcgacaagaccagcccccccacacatagcggccacacagccgcacaagcggacacccggcccggtcaacatccaccggcgacgagcatca

SEQ ID NO: 189560 - DNA, 549 bp, Arabidopsis thaliana
cagctcgatatgaccctctctaagggagcagagctggctgcttcaccgcggtgggggacgctctagaactaccaggattccccgggctggaagaattcgcgggcggcttcaacttttttttacttcttcagatatgggtaccttttcgacgaacttaacaattaaaattcttttgtactttggccgcaaaattcttacttgttattccggcgggtaacttcggttccacggggggcacaattgggttcttggcggttcttggttcggtttaattttcgggtaggtttaaccctttcaacctattggccattttggatttcaacaaaaaaaaaacgaattcggttttggggaaggagaaattagggccacacgtgggggggcgttttaacaaagttagcgtcgaagatggcgaaaatgtgcggcggcgtcggcgaatctttaaccgtaacgatccgatgtcagcttccgacggaagatctcgacgcgctcgtttcaattacttccgatgaagatctagtgaatctaatcgaagagtacgatctcgtttcc

SEQ ID NO: 189561 - DNA, 487 bp, Arabidopsis thaliana
  unsure (1)..(487): unsure at all n locations
cgccggcaggcaccggccgggaatccccgggtatgacccaggcgtccgtgaactgaaagaatggacgggccctaacaaaggctgtaattcatgggacgaggttctaaatggcgcattcagaaccgcactggaacagcctggcacctttgtaagacctccttttccataactattagaaccgaccggaagagctcttgtcnnatcgnggggcggnggacctggaagactccaaacaaggagagggggaccaacctaaacagggcgaacaggaactggaagaaaccacgctcgatcccacaaggagaagggagggcttgtggtacctattggccacctaaccacgacggatgatggtcaaccttataagatgacatgctaagacgatgctgcctgactttaagtctatgctaaaaataaggccacggacccgcatattactcttgttgagagagcctgcatataccataagttaagaccggcagtggta

SEQ ID NO: 189562 - DNA, 176 bp, Arabidopsis thaliana
gctcaaaaccgcaagggactggggtaatgcacaaaaaccagcagcgaacagccctttgggaccaccaaacaaacccgggggccaaacacctaaccgcaaagccaccaaggcgtcgcacatcaggaaccagaacccgtgccctgcaagccacacaataaggcaatgtcagaaccgcc

SEQ ID NO: 189563 - DNA, 184 bp, Arabidopsis thaliana
ttggttaaatgacccctttccaactcgcaaaccatcatctgtgtggatcaaccctggaacacaattctcttttttatggaacaaaaacaaatatcagcaacggttgcgtggtgtcccgaatgacaactaacgcaccacccaatttctcattaataaacctatgcaactagtaggcaatataaca

SEQ ID NO: 189564 - DNA, 828 bp, Arabidopsis thaliana
atttggggtataaggggaacccccccccccggaggtcgcgggcccagcgcgaaaacaggcacacaacgacgccagggcggcattttttgttaaagacacaaacagccgaaccggacagcgcgacacaaagcggagggagagggggccaccgacagcggaacacagagaaggaaaggccgcccggagcacagagacaggagacatgggtactaacgcgaggcgcagagaccacaacggagaggggagacaagcggccgcaacacggagtagggaaccggcgaaggcacaccgggagagaccggccgggacgcgacccgcgggaaggggacggcgaaaaacgaaaaccgcaggggcggagagggcaccagggaaacggaacaggagaaagggcgcgcgggaggaaaccaaaccgacagcgccaccgacgggagccgcaccggggcaccacaccaagcgaaagggacacagcaaaaggggacggccaacggcgagaggggaccggaggcacaaggcgagaaggcaggagcaaagagcaagccacaagggcggaaaggcgaggcggccgccgagataagcgaagccggcaccgggcacgggagacaggaaacgggcaacacgaaaaaggacgcgagcgggcgcaggaggcggagggcaacgggcacagcgcgagggcaaagggaaccccagaaaagggaactgcgcaagagggccaaggggagacacagggaaaacaaacggaggcaaacggccgaaagagggccacagggaaggacgcgagaccgcgccaaagggcgaacacgacgaaccccgccgaacgcggagaaggcc

SEQ ID NO: 189565 - DNA, 349 bp, Arabidopsis thaliana
ctgccttggtagacctggagtgagtgagataaattttttagagtacagcggggcataaatgttaaacggacgatgataatggtaaggaatccaggaagataaaggagtaagggtttactcgatttaaagatgagtgaatgataagtggatacattgcatattatgaagttgatcaggatgtgggatacttgaatgcgactaactaattgaacagaaatataggccttattcttatgatggaacgataggttttacgactccttgaaagtgtaaagagttatagattatttagacgtatttttcaattggttagttaaccgggtaaaagagagttaggttttcatgtgta

SEQ ID NO: 189566 - DNA, 830 bp, Arabidopsis thaliana
gtttcggaattaaccgggaacgactccccgctgcggccatatgaaccacatagcagaacacgcagcccggcgaacgtattttttatttttcaacagcgaaagcgacgcccgcaccacccacgtgtggggatggcatagaccacacgagaattacatatgcgccgcacccgcgctggaagaacccaaaatcaaggcgctctagcacaacagacccatgcgctggatttcaatgcacgaacagtagaagcgcgaatcgctcggtacagtctgcatccaagcagcctccgtacgaagcggaagtgatctctttaccattactcggtacgaaccggcaatgccgagagtagcacaaaccgatatatgccagatgtacaaagacagttccaccgggcataggcatagtgagcaatcctgaaagcaaacgacagcctacaagattatatacctggcaggccggcataaacacacgcgatacgacactgggacaagtaataccgataccagctccataggcgaaggccataatttccaaaacgcacaggttacttagcgactttcataaccaccaaccaggattagcctcgctccataaacagacgacacgagcaaaagggaaagattgtccccctgcagaactaaatagcagccaaatgaaaagaaaagatgcccgagggcttccagatttacaaacccacccagaccccaacacgccgggagcgggtcggcaggatagccacgactttctaataggattatcccaagcttcttaggcccccaaggaccgggctgtaactgagcaatcggacaacgggacccaacatctgctccct

SEQ ID NO: 189567 - DNA, 593 bp, Arabidopsis thaliana
agtgaaacgcgcccgccaccgggcccgattccctaggtccacccacgcccacgaccaacttttttctttttaaccgccaccagaaactacttagacagatctggctcctatcattgcacaaaaatggcttgtgactctacttcctgcagcgatctatatctatacggtacagtcgagtacaggactctccttcggctctcaatgggcctagcacatgatctcgtaactatatggattgggtgggcatggccctaaagatgaagccgcactgtaagctcaaggatcgctgttatattacctgctgaagggcctgactcagttttagccctctatacgtcatcgcccttgagcccaagcctgggtttgccaggacctaaaggccttccgatgtttccactttgcgagtgacactctcttcttctgggcacgggacaatcggccccgtggagaaacggcaccctatacgcacgccctaatcgcgttaccctcggcgtggtctaactatggggagtgatcccacatccctcatagacatctctgaaacaatcgccattcatacgttagtgtccccaccatctgtgtagtgcacactt

SEQ ID NO: 189568 - DNA, 1048 bp, Arabidopsis thaliana
ccggtccggaatacccgggccgacccacgcgtccggaacaaccaacactaagcaaaaaagaaaaccccaattaccatagaaaccaccggcaaccacaaaacaccaaaggggaagcgggaggccccgacacccgaacaaaaacccccaaaaggggcagaaaccaaagggcccaaaggacaacccaccgcacagccggcggaagggcacaaccccacaccaaacccaccccaaaaccaccccggaagggggaaacccatacccccacaaaaagggacgaacccccggaaaacacgagaaggccccagagggaaaccccccgggaagaacccacaacccccagggccggaagggaagacaccggagcaccccggggaacgaaaacccccccccaagggcacaaaaataaaaaagggaacaacgggggaacaaaaccccgaaaaacagggaccaagaagcgacacgggccaacaacgcgcactgaaagaaaggccccccaccagccgaaaaccaacaaagccacaaacgcaaagggcaacagcaacgaaaacacgcaacacccaccacgcagcacaccaaggaggaaagacgacaaccccacgggggaaaaacaagacacgccacaaagaccacacgagcgaagcgcggccagaaacaaagagagagggcagaggagcaaacacggaaagaacccccgcacaaccacccaaaccaaaaaacaccccccctaaaaacggccgcgcccccccaaaggggccaccaaagcccaaacagagcccccggcagccccccccacccacagagaaaacggaacgacgaaacccgaaaggagcaacccgacaggcaacaaagcaaaaccaaacgggaaacagccacccgggaaacgcaacgaaaacgacaaccgatacaacccgaaacccgacatacgaagacggggcgacgccaacaaaggccggcgacccacacgcacaacggaggagccgcccccaccgagagaccagacgacacgaaaaacggaagcaagggcacagacggcgagggacacaacaac

SEQ ID NO: 189569 - DNA, 942 bp, Arabidopsis thaliana
  unsure (1)..(942): unsure at all n locations
attaataacttcttacatancataatataggctatcttaaattccaacactttttatttaataaaaataaataccctattttttttattttaataatacaaaatgtcaataaaataccaataaatttatatatctattatatttatacatatctctgttgtgtattggatagaatcatatgattcaagcgaaggtgaggttaataggaaaaatgtctttttgaaaataggtgggtgttagaataaaaattatttctcatatactatatatgaaaattggttaaattcgttttaaaattttgtggtggactttatataaaaagtaagtctcaaatagaatttttattggggggggcttttgtgtgatcttgttgttgatggatttgaaattttttggtgtttttttataaagttttttttgcttcaaattaggtaaatggaattgggaagggggatttattaggtatattatgtcgatcagagtaatttgtgaaataaggaatgttgtgtttagatcactgggtgattattacttgaaatgaagttttttggatttgaataaaggttaacggtgtagatatttagatggggaagagattttaaaaaatgttatcgttattggtggaacctcgatttttttttggaaagaggaattatgagatgggtgaagtgataaaggtattgggaaaggaagaaagaacctgggttttttgtttgatgggaatttagaatgttttggggggtatttttttggggaaaaaaaaatgggggatataggaatatgttataatgcgaggggtcaatggaaggaaattgcgttaaagggtgaaagttatatttgttttttgatagggggttatattaacaagagaggggtaattgctatacggttatttggaattgcggagggtgagagatttatacagtgggagtataagaatgg

SEQ ID NO: 189570 - DNA, 934 bp, Arabidopsis thaliana
aaagggcccaaggcggggagcgaggaaagaaagggggggggggaggagaaaggaaggaaaaaaaggggaaggaaaaggaaagaggaactgagagagcgaggaagaccaggaaaaagaagagagcagacgggagaaaagagagaaaaaggaaaagtggggcggggaaacgaacagaaacgaaacacaaaaagggggggaaaaagaaagcagagagggggaaggatcgagcaagggaaacagggaacaagagagggagacgtggaaaagaaagacggcggaaacagggggtgaggaagaaacagagggaacagaacgaataagaggcaacgggggagggagacaagaaccagagggtagaaacccgggaagcaaacaaaagaagacgaatcggcgaagaggaaaacgagaacgaaggttagagaagggagggcccaaacaggagaaaaggccgggaagggaaatagcagagaaggcccaaaacaggaggccgaggaaaaacggaaagggaagcgaaaggggcgggggaatgggaaagcccgagggaggggaaagacgagaaagagaacaagaaggaacaaaggagaaaagcgaacatgtggggaacaaaaagggaaatgggggagggaaacggggaggaaaaaaagagaaaagggacaagcaacgggggaggagggactgaggcaaggaggaaacgcgaggggaatgaagaggaggggcaaggaggagccaagggggaaagcaggggagaacgggaaaaggaggggagaaaagggagaagcgctagggaataggaaaccagaaaaaggcccaaaaaagaaaggcccgggagggaaagaacgagcggagggggggaaaaaccaaaaaacggacggaaacgagaaaggtgagggaggagaggccaacaaatggggcagaaaaaagaaaaaggggaggg

SEQ ID NO: 189571 - DNA, 605 bp, Arabidopsis thaliana
acaaaaccgagccccccccgggggggggcccgctctagacctagtggatcccccgggctgctttttttggggcctccccccctgttgtcaaaaaccttgcaaccggccaatacctcccacagattcgactcggagactcaccggatccagtcaagctcgtagccgatctggccggctcaattctctggtttgattggccctcaagacatgtttcctcgtcaaggaacctaatatccggtagctctagcggctgcttaaaggcaaaagttggaaatgaacgagtatcatcatcatcatcatcgcggaaagaccaaaacgccgattgcgaattacttgtttaaaacgacgcctttgggattacggcgagaggagagcttttcagtgacgtcatgtcggatgggtctgttactttctccggaaccgttgatctacttttcgcttgtactccaccgtggctgttacgtgggctcgctagtggagcccaatggagtatggggcttatgatgggccccaaatttcacttccctttcacaaacttggccgggggaaaacctatacgaaaccgttaattccgggttttaacctgggttttaacccctggttcg

SEQ ID NO: 189572 - DNA, 1042 bp, Arabidopsis thaliana
  unsure (1)..(1042): unsure at all n locations
gcggagcgagggacaacagcggcaacctaagcagcacgcaaggtttttggattttcaaccagccgcacgggcggggaacggcacacaccagggggggagaggaggaagcaaaaaagacaaagcagacggagggagaagaccagaaaaaaaaggaaacaggaggcgcacccaaacaaggaaagaaagacaccaatggccaaaaagagcgaaaggaaaagaagcgaagcaggacaacccaaacgacgaaagaagggaggggaaccaggaacgggaaccgcgacgaagaacaaacccacccaagaagacggacacgccgaccaaccaaagaaggacaaccaaaacggaaccaagacaccaaaggaaaacgcgagaagaaacagcataagacgaaaccgaacaaaaaaacaaggacagggacgacgcgaagaaaagcaaaaacacaggcccagcgggaaaaaaagggcaagaccacgacgcgagaaaaaaggaagggaaaaggccagacgaaagacaacccagaaaagaccggcgcaaaaggcggagacccagagcgagaagagccgcgaacaccagcganatgagtgccgaggcagggaaaaacccacaagaggggaaagacgacacaaagggccccagacaagagaggcgaaagaggccagccagaaaaaacaccaagcaaggaagaaaaaagacagaaaggcaaagaggaagggaaaaaaaagcgaaggacaaagggggacaagccacaaacgcacgaagggaacaacgacaggagagggaaacaaacaggaaaaccgaagaagagggaaagaccggagaccagaaacgagggctagagaccacaaaagagaaaaccgcagggggaaggaaaaccgccaagaggccaaggaaaaaggaccgagggggaccgaaggacaaacgcgcgggggaccggaggaagaggccgggaaaccgcgacccaaacaacccaggccacggcagaaaacaaagggcgaagaacaaacaaaggggagaccggacggaagaaagaaccagggccaac

SEQ ID NO: 189573 - DNA, 670 bp, Arabidopsis thaliana
ccaatacacggccgcagaaagaggacaaccacacacaaaagtattaggttataccacaaacgaacccgaacaacaacgggggggaagcacagagagaacaagccccaaagcccaacagacgagaacccaagaacaaagacccaacaaacacagccaaacgaaccagaagcaccacaccaacagacaaacggcggagaccccgacagagacccgccggcaacaaaacccggacaaccgaccccaccaccaacacacaccagaagaggcgaaccaagaacccggcaccgaaccaagacacaccgaaagcagaaccaccgagaaaaaaacgcacaagaagagagcccaaccggaaaagagcaccgagacacaccaacccacaaaacccccaaaaccagacacgagccacaaagcggaaagacaccaacggccaagcccccgcaaacagaaccagaaaagagaaagcagaacaccaacgcaagaaccaccaaaaaccaaaaacaacaacggaggaaaaaagaaccgacgaaacaggacccaccgagcgcaaaccccagggcctaaaccgacaaaagggaccaggcggaaccagaaaaccaccgagccgaaaaccgaaaaaaacggccaaagacacagcacacccagaaaaagaaacacgaaaaacggacaacac

SEQ ID NO: 189574 - DNA, 470 bp, Arabidopsis thaliana
aggcccacgcgccggggcaaacagacacggaccgagcaccggctttttgggattttaaaccggggcccccccccaaccacgaaaaaacagcgggcggggggggcggccaaagcacagcgggagaccgccacccccacggccccccaagcaccgaacggcaagagccgacgccacaacgaaaagcgggggaccccaacaaaacagcacggcgcacgacgagacaaagcacacaggcagcgcaacaccagcgccgacgcgccgaagagcagagcgcgaagggaagcacgcccaccaggaagccacgggcccgccccgagaccacggggccacaaccgcagaaaagggggccgccagacgaaaaccccagcgaccacggagcagagcccagacccaagcacacggcgagacccgggaacgcccccacgagaaagggcccgcagcacaccaacgaagaaggggaccgacagaca

SEQ ID NO: 189575 - DNA, 509 bp, Arabidopsis thaliana
gttaatttaaatatgccgtacctccaccgaggtggcgggcgctatacaactattggatccccctttttgtattaattcttggtcgtaaatttgtagacaatggcctgcgatatctaaaatttctctattcaaagatggattcaaaaatgcctcttcacttatgcacctaatatcgtgaaacagcttatcaatgattatgtgattaaattgaagccatggaactgtacctgcaccataagctccttgatctaaaagtattttccaccacttggggtaaatctgaactcaacacctatataaggataagtgcaccattgcccacatacctcttctctagaaaaaccacctacagtcttactccctgcatatacgtattactcttatcgtaccaagaaaaattccaagctttatattaacgtgcaacacttgtgttccaattcccttcgtaggtgataggaaattaactcactcggaggaattccttcatgtaaaaaaaccataatctaact

SEQ ID NO: 189576 - DNA, 754 bp, Arabidopsis thaliana
  unsure (1)..(754): unsure at all n locations
catacaagcataacacaattacaaatagctgagtgttgtgggngtaaatcctaaatatatgctacactcaagcaaactatctctgtcagaaatatacatactcttacttcaccgggattgattcattataaatatcaatagatgcaaccttataaatatcatcgcaaatgacaaatagctagacatcgagtcgaaatatcttcttatggtctttctaccatatctgtatatatcgttgccatgcgatcctacccaggttgaatcatagatatcacattattgtttacccgcaatacatacctggctatctactttccttccaccattcctaacacgcgaccacactctngctcataacctgatcatttgtctaacaaggagagtagatccaattactatctgtattcaagctgaagcacaatcaactaggttatcaatggacattcatataaagtatacctatcaacgggcttagtgccgaactttcatatggcctaattacgtgaattgattgcacgggtcctctactgtggattcctttctatgtgtcaaccatcactctatataatatactcctgcattctcgaacctccagtacatcgtataatgcaatacataatttatggatgcttaccacctccaaaagttttatactccgaaaaaagactagtcctctattataccaatattcttattcatctcataagatgtcactaagagcatatctcgccctttctgaattaatctcccccca

SEQ ID NO: 189577 - DNA, 276 bp, Arabidopsis thaliana
  unsure (1)..(276): unsure at all n locations
gaccccaacccagtataggggaaagnacanaaccgacgccgcagggccgagacaccaacgggaggacacgcaacacaaagaccagagacaacggcttttatctttataaccggaacaagacgccacagagaccacccaggggcaagcacacacagagccacaagagcagcccgcgccccaccaaaggccaaacgcgacacctgcagccgcgaagaagaaccgacacaccaggaccccggccggaacacaaccagcgaacgaggacagcgcgaacca

SEQ ID NO: 189578 - DNA, 730 bp, Arabidopsis thaliana
aattcggattccacgaccacgcccacgtgctcttgaatcctcttaacacaacgccccagacaaatttttctttttcagccaagggctatctcataataggccaagcgcacgctaagtgcgctataccggtcgctcgagctatctggtgatgattacgcgccagaagcactccacggaaggcgtcatgtgcctgacaccgacgattgggtggatgttccaccggcaccaagaataagcgcgtcattcacgtttatcctgcctcacagagctgtggagaagggacgacgaaaaacggacgagtatacacagattggagcgcagcctcacattgaaccggcgttgacacaccactcccatcatatatagaggtcggcaacacgtgaagcgtgaacgacgcaattccacatatgactcgctgaagaccccttagcggcacttcctccatgaccgaccggattacaaccctctccatcgatgagtcgcacttcggcgcagacgagcgccctgctaagggggcccattcgcacaagctgcatcattaaagaaccctggcgaacgaccggccaagcgcgtcgatagccgcgtttttactagaaccaactcttacgatgtggctcaccacataggtgaaattttctgggcacatttgcaaacccacaatgaggatggccggaggactggtgccctgggaccggaggaaggggtatatgacaaatcctggcaaaaaccc

SEQ ID NO: 189579 - DNA, 534 bp, Arabidopsis thaliana
ggtaaatacaccaccacccgcgggctgacagccaaaacaaaagctgtatggtccgaaccaacgaagacctaaagccatctcttttttgtgcagcaaccggagtactatcgcccgcgccgaccaagcgcgaggaacaccatctgataaaatattgcagcccataacacatgtgctatgtagcatatctcgcctatagcaatctaggcatgcacacattagatggagacatgggctcccgggtgtgtccagacacaccacgccacctcacactgcagtagcgacaccagactacgccaataccgcctcgtgtcatctcacagtaacacctcaaccacgggctgcgtactgctcctctacgcaattttccgcctgggatcactcggccagtcgccaatggcactacaaacagccaactctcctgtcaaagcgattactggaccctacattacctacaagcaagggcgttctgcatagtatcccctagcacctacatagctgtgaaacacgcaacttcaatacatgaaccaacggtgt

SEQ ID NO: 189580 - DNA, 524 bp, Arabidopsis thaliana
ccccaaaaaattatgggaaagactgagacccgcctacctggtccccacgaagcggaaaacagcgggaacgaccaaacgacaggcgcgtgttttttttaagaaaaaaggaggccgccaacgacacaggaaggggacaagggaaccaacggagaaggaacaggggccgcaaaacaaaacagcaggagaacaagcgggcggcacggcagccaacgcggataaagagcgcccagcgaccacgcggccaagaaccgcaacgcgaaacggaccggcaaggacaccccggagaagagcagagaggggccgaccaaacaaccgcacgacgcgagggaggcaggcaagcggccgagggcacgcgacgcagaagacgcgacaaggcaacccccaaaaaaacgagacgccgcaccaaacaggcggaccaagggcagcccgaggcagacgcaaaaagaacaagaccccgccgcccacggccagacggggaagcaagggccgagggatgaacgggaagacaccccaacgcccccgca

SEQ ID NO: 189581 - DNA, 322 bp, Arabidopsis thaliana
atacaaaataatgttatagacatatgaattctataacagaattgaaaagaccacagcttggtgtcattccaagattttgatatgagcaaaccctttgattcagaacgagggttctaatatttatctgccttaattctcttacaattggttcactccgaaaggaacatgatcgctaaggttattggaatcatctccgatgtaacacaaattagggttcccccaaacaccaagtctccttcccattctctcataaaagtacctagagaattccaactctccgctgatgttatttccattcacgtaaagcgcgctgagactaggc

SEQ ID NO: 189582 - DNA, 393 bp, Arabidopsis thaliana
ggtcgtctccgtcgcgtcctccgtatgagttcttctcaagggtcactttttctaaatctgtccctaaatgggatagtcgccttaagtgcaatctgtactactaccgaacaaactatttcatcatgatcgccgttatacttggattgggagtccttacaaggcctttagcgatcttcgctgccctttagacagcattaaatttggcattgctaaatgacagctctgcaggttcttttagtgagaaggcgacacgaaccgtcagaagattctctccacagttcgctgctaaaatgagacctcctttgacacctgtcactcgtgggcgtccatcatcaaagagagcaatccatgtatgtggccaaccccgttgggatgttgtcttgacatgctcac

SEQ ID NO: 189583 - DNA, 168 bp, Arabidopsis thaliana
gggataggcggccaaatttaaattttgttctttggttcttatgtttgaattggaattgattcgtgaaattgtgtttgtatgatggggtttttggtggatccgcaaaaggagggaggtgaacattcatggggttactttagaagtttggttagaaggaaacatttccac

SEQ ID NO: 189584 - DNA, 353 bp, Arabidopsis thaliana
aaataaaattagtacatattttttaaattgggaaattacaacttatagtacagaagtaaaacatatacaacaccaagaatccaattcgaatatggaagggtatataattacgaaccaaacacattagaattcctccttttccatctcctgtactcacacactttagaaagtttacttttcaagcattttatttttttcatactaataacataatataattacgtataaaacacaatattgcatgcatgcaatattcttcattcagtcgtcgccaccaccatatcctccaccatatccaccgccttcaccggatccttctccgataccggatccacctcctccacctctacccc

SEQ ID NO: 189585 - DNA, 371 bp, Arabidopsis thaliana
cccccttgaaaagggctcccccttttttgttctctatctccatggggggaagaaaaaaattttcagtataaacttttgaaatagggggtaccatcaagttaaaaaactttcctagcaaaaaataatgtttaggaaaagtctccgcatttgtttcagggccaaaaaaaagattcaaagatcaaaaaaactttgccgccaaatccccagagaaaaagctttaaggaaaacaaaaaattcgttataaaattgaccttttttggggatgaaacggtttttcttgatagctttttcaacgaacactcaagccttgaatagctgcaccaaatgatgatgatgcctgaaaaccttcctccgttaccttattcgattcg

SEQ ID NO: 189586 - DNA, 340 bp, Arabidopsis thaliana
ggggacaacccccctgggttttacattgggggccaaaaattttttggcaaagggattttttaaacaaaaaattacttttttccccccccatagggggtttaaaccccttttggttttccctttcacaccccccgggggggggaaatttttaaaccacaaaagttttttttttacggggaccctcccacttttcaaaaaaaggcccctgggctttttttaaaaaacggtttttttataaaccccttgggtgccccttggggatcttttatgcctttgaaaaaaaccccccttttttgggttgaaattacctttcaaaattcatttttttggaaaagggaaa

SEQ ID NO: 189587 - DNA, 197 bp, Arabidopsis thaliana
gccaaacaaagatcccacttatttgggttttttactgggggcaaatagtgtaaggcactgtttccactatcctttcaccttttggggttacaacttgtaacttacaagttcagggcttgcaggacaatgagactatcacacatccaattttagattaaacccacatgctgagatccatcagtcgtaccaattttttt

SEQ ID NO: 189588 - DNA, 219 bp, Arabidopsis thaliana
ggaatggtagattaagcattgtttattgggattatatatcaataacaatgattaggttaatacaaattagaatacatgggggatgatacaatacaaatacattgcaagtttacatattattccttcacttatattatactttggaaaatctccagtagaagctaaagctctctggcattattcttcttttaagccaagtttatatgattctttttttac

SEQ ID NO: 189589 - DNA, 737 bp, Arabidopsis thaliana
aaactactaagacaaagccgaccacccgggcgcctttaaactaaggacccttttattttccgcccaggtttaccttcaggtccgaaaaggaaattggaccttgggggtcctaaaatggatgacaaacaggcactaaaaaactgaaaaaagcatcactcgccgaattacccttcgccacttggaaaatggcaaggtgtccccaccacttggccccatacctaaaaattaacttagattttccacctccgagcaagcattgctgctgaagaagtgattttgctaaaccattcttactgatctctaccaaccaaaataatcttggccagtttacacaacccactcggggtttcggcagttgttgctaaaaaattcaaccccccttgggatccaaataaacccattggccctttaatttttctacccttatataaaaaggaatttggggaaaaccccactttacccaactatttgttaagaacctcaaatcaacttaccccgaagtaccctctaaccacctctattccgaataaaaaatttcacccctcctatcaatattttatattaatagaaaacctctaaaacctaatgttgccccaaggaaagagcccccaaaaaattggcccctgataatggtttttaataataaaaaatcgatattgccctacaatataaaagcacagaattggtttccttgtagaccccctcaaaaataataccctccgtggctatttaccacc

SEQ ID NO: 189590 - DNA, 440 bp, Arabidopsis thaliana
agggaacagaacagaaaggcaaccgatcgcgaagcgcgacgactcggaccaggagcggaagcgacacgaagcgacagcgaaggaagcccgaggacacggcacggaaaagacacacacgcacggaaacgaaggacaaccagagagagaacgaaagaacaagcgcaggacgcacaccaagggacccacaggcgacgaacgctcagagagaacccgcaagaagggaggaaccaaagcgaagagagcaccacagaccaccaacagcacacaagacggacgcacgacgcaaaacgggaggcagggcggcaaaacggacggggcaccccgaacaaccgagcgaaccaaacagacgaagacggacgacggagacacgcgaaggaaggaggacaacacggaagaaaagccgagaggaccaacgacaagacggcagcaacgaacgaagg

SEQ ID NO: 189591 - DNA, 501 bp, Arabidopsis thaliana
gcaaacttggggttaggaagtcataagtggaggttaggtgtagggattttgttgggaagagaggaatggggggataatggggggtgggagaggagggtagagggaaatggtagaggataagggagaatgatgtaggtgaggggagggggagaaggggagaggggtagggaaaagaaaaagggttgtaggggggggaaaggtggagaggggggggggtgaatgggagagaagaaatggagaggaaatgtgaggaggagagagagtggtgaagagggtgtggaggaggggggggaaaggaaaggaatgtggggggtgtagagtgaggttgatgtgggaggtgagagaagatatgaagagtgagtggaagtgaaggagaaggagagaagggatagaggaggggtgggtgagagatggatatagaggagaagaggttgtggtgttaagatggagaaggaaaaagagaggattaaagtgggaagaaggggaagtgagaggtgattt

SEQ ID NO: 189592 - DNA, 1069 bp, Arabidopsis thaliana
gggaaggaaatatagggggaacaacggggagcaacaagggaaggatgcagggacgaaaagagaggaggcggacaccgaaaaaagcactgggaatgaggaaaaggagcaggaacacaaaaacaaggggaggagaaagaaggagaaaggacgagaagaaaggaagaaaggagaagaagaaaagaaggcgaaaaaaaagaggggaggaaaaacgaggaggaagaaagaaaacaaaaagaaaaggaaaagggagaagcaagagagaggcaagaagaaaggaacgccaggaaagaagagggagagaaggagaggacggaagagagggcgggaagagagaagaggcaaaggaaaagacgaaaacaggcgagggggaacgagagaggaacagcacacggggaagaggacaaaagaagaggaaaggggaggaaagaaagaggaacggacgagagaggaggaaagaacggagacggaaaacgacgaatgagaagcagaagggagcgacgaaaccgaggagaaaggcaaaggacaaagagcggaaaagcaaacagaggggagagaaggaaggagaggcgaaagcaaaggcagaaggcaccgaacagaagggaagaacggggcggagaatcagagaggagacagagaggaccggagaggaccggcgacaggggatgaaacgaaagagacagaaagtcgcgacgaaaaagacgggcgaggaagagagcaacgagagacgagagagagacaaggcgagcacagacaaaagcaggcgaggagaaaagaggcagaggagagaggacgcagaaaagagggaggaaaagacagagcggagaagacagaagggcacgcgagaaaggaaaggaacaggaacgaaaaagggcgagaaaagggagcagaaggaggagacacaaacagggcagagagaaagaggaccaaaggaaaaagggaaacagagaagaagggaaacggagggaaaagacggaccagaagaacaaagagaaaaaaagaaaaggagagaggggaacagagaaagggagaagaacggaaaggaacgaggcgagacacgaagaaaaagagg

SEQ ID NO: 189593 - DNA, 1029 bp, Arabidopsis thaliana
  unsure (1)..(1029): unsure at all n locations
ccctttccaaagttaacaaaaactgcgagcctccctcgtggtaggcgggccggttttataaactagggatcccccttttttttatattttcgcgccgcggcattttacccgtaagaaatgtggttataaagttaaataacgaaatttgacatccattcataaagtataatctcgggtaaatagacattatccttgtgtcattggtcaaaaaagacattaatgttaatataaatctttcttcttcacagatgactgcttcttcttcttatattgtttatagatgcacttgatgaagcctcattttcacggaagccctcaacaaccgatatgagtttacggtattgaacccgtgcttttgtgggttgaaccctctacctaacacgagtaaaagccttttgatacctttcctctgtgttggtttcttccctctttaagataatcaaactcttctttcctgggggatccctagggcacatattttgattacacggggggtccgggttccaacggtttttggtgaccttgcttttttcggttttaaatacccttccttataacccaatttacaccttttggcgggtgtttacctaaccctcccataacaaaggtaatattttacccttcgcgaggtatagaattgctcccgcgtcacatgtatcccctaattagactggaacctctggtggttccgcggtcggtaactcttgtgtttatatacactctgggacacctcnctcaggcctagtgatgataggtcttctcttcttctcatctatacgcgatatacctcatctccgcactagatattctttttaactcatcatcactatcctttttcttttctcttcgtgattctgtttaatatagaaaaaacactcccttttttcttctctatgtttttntctccacccccccccagaaagatttccttcttctggcaatatgtttgggggtgagccccccccctctccttagaaaaaagatctccccccccgcctctcggggtttttttaatttttttgataaacc

SEQ ID NO: 189594 - DNA, 529 bp, Arabidopsis thaliana
ccaaccgcaaaccaccgactttttccctttttttccccaaaccgactcgaatactgcccgtgggaaatatgccaacaaccaaacccctgaaaaagccccacctcccctaacgggccatcaaaaacccgcgagacggaggacttgagagcagccccacccggagaatcgatggaccaccgtgaatggaaactgcacaccgggacccctgagccctcccctctgaggagcagcgcccaccataccgatttggccaaaagcgcaaacacagcgcccaaccgaggcacggaatcgggaataccacttacccgcacgaagaactaacataactggcacgcatgccggcgaacggaagccccgccgagatcccagaaacggcgtcctttgctgcatggcccaccgcatacagcaggacaccgccccttctatgcaacacgccccaacagacccgaccgccgcgaagacccaaaaatccaacacccctccctgcgacgcaccccaacaaacaccaacgcctacccgaacggccaat

SEQ ID NO: 189595 - DNA, 295 bp, Arabidopsis thaliana
gaaaataggacccacacgacccagacgaagcacacaaaacaaggggaacagcaagcgaaacagatttatcacaattttcccacgaagcaacacgaaagaccgcaacacaaggggcacgaggggggcgcaacaacaggaaaaaaaaaccgacaccacaggaacgcagagaccaccagcacagtaaagacaaacaaacggcccaagacaagcaaacaaagccacaagagacaagacgaaggacacaaaccaacacacacaaacgacccacgaccacacacaacaccaaagcagcaac

SEQ ID NO: 189596 - DNA, 390 bp, Arabidopsis thaliana
tcgaattcgcggccgcgacgtctcgccttaccatacaatttaccattgttctgacaagaaaagaggacctatggggatggtgcagaagatggtgttgcggcccgaaaaagccgctgcagaaaccgacctgcacgacgtcggcctacaccgcctgccacacgtcctccaagcctcccagcctctggctgtcgccccacccgcagtaccggatcgccactagcacgatcacagccttcccgaacattgccgaccgccccccaccccggagacctgcccccgacgcccacgcgcacttcgaagctcccccgcccctccccgcccagcgggccaccccccacctctccactggccgacccccgccatcctcccgcacacctcaccgcccggggc

SEQ ID NO: 189597 - DNA, 563 bp, Arabidopsis thaliana
aaatggtgtaactacacttaatatatcttgttttttcaacccatttttttttttaaagaaagcaatggaacccactttttgatattgattctaaaaaaatttttttacctgtttaaaaatatgttgaaaaaaccccctcaacaattggtttcccgcctgaaactctccattttttgcttttgttttgaacccctgttgttttttgcaaattcagataaattttttgaattgaaaagccccaatctggaacttgtcccaatttaagcgtttttaaattcgggtactcatgtaagagggccattccattttattgagaaagatatcttcaatctcggaagggaattgatgtataacaacagtgccattcattatttttatatctactatacttttttcttatcatttagtttttcttctttggttatcttatactttaatctgttggttgaataacctttcttttgttgagaaaggctccttttcttttaactttcccctgtttggaaaaaaaggtttttcttcgaagttttttttatccacaccttatataattttttttaatt

SEQ ID NO: 189598 - DNA, 659 bp, Arabidopsis thaliana
  unsure (1)..(659): unsure at all n locations
gtgtattattttattattgtaatattgggtttgtgtattattgttgttttatgtgttgttagtttatgttttgtttgttgtgtggttgttggatgagtttatgttggttaatggtgtgattattgtaagttggatggagtttgtattggtagtgtatttgtggttgattggtttaagtgttttttggtgttatagtattgttttgttgttgtttggtttgtatgtttgatgtgtgatgagtttgtgattgattattttgttggtaattgattttgatgtgatagtattatttgtgtatgttatgttgtgattgtagttgatttgtaaatggtgtgattgtagttggagttgatatgaaaagggtaagggaatttgatgatatgtgatatgtattttttgttggtgtaatattgcggtgggttgtggtaggtatacgtgttgtggtatgtagggttatgttaatattactagtgtttagtttgggatgttgtaggtttaataggtagagtatgtaggtagtgtttgtgttgttatagataaatgtgatgggtttgggattatgtgngatgatctatactttagattgtagggtatgtgagggtagtggatgtgggtagagatgtgtattggtgaatgtattgtaatttattgattgagat

SEQ ID NO: 189599 - DNA, 995 bp, Arabidopsis thaliana
ccaggggaaggttaggcaaaaaccgcccaaacgaagagcggaaggcgaacgggcaaacgccaagagtttcaaacacatagagcgaaacaaagaaacgacggggggacagggaggagaacacaaggaagcggccagcccagcggcccgagacaagggaaagaccagagacaagaagacaacaagaaagacaagacgaaagcaaaaagaagggaggagacacacagaaaccgacgggaaggcaaaacaaaagcacccaagagacaggaacgccaccgcgagggccgagagaaaacccagagacaagaacacggacccgcggaagaggacaacagaaacacagccagagggcacagcgcaacacgcgcggcaacgcgagaccgaacacacagagcgcaaagcgggaaacaagagcgaggaccgcgacacgcaaccgagaacgagagccgaaggcgaaagggaaggggacaagaaagaagaaagaaaatagcaaacgcgtaacaaacacgcagggaggaacacggaagaacacggaccacgacgacccggaagagcgacagagagcaagggaaggcagcaaaagcgcgggcgaagacacaacacacagcacaagacaacgggaccaagagcggacgacaaaaggcggacggaagcaacgccacaggcgcgaggagacgagaacatgccagccgaaggcacacaaggcggcgacaacggacaggaaccaagccgcaaaccaaggaacacccagacaacggaaagcagcacgtagaggaacaaaacgacaagcaggaacgaggaaccgcatgaacgagcgcgatcgaaaacaggacggaccacgaacgcacacacgggagccagagaagagaccacggagaaacaacgccagcggacacacaacacgggccgagcggcgcaacgcggcaaacaggacgggcgaaaggccgccacgacggccgaaacagagagagagagagaaaaggcggcaggcgaaaaaa

SEQ ID NO: 189600 - DNA, 771 bp, Arabidopsis thaliana
ttgcaaaaacccttaataagggtacaaagctggagctacaccgaggaggacggacggtcaaaaactggggaggccattttagtttttagaaagggggacaaataaaaggggaaatggggcattaaaaagagatggcggaagaaagagaaaaaaatgaatggaaataatggaataaagaagagaaacaagagtaaatagaggatgggaaagaaggagaaaaaaaaaaagataaaaggctcgaggcaaatgattaatgcgaggaaaagaaacggaaaagaaaaaagagatctaaggaagaggattaaaagaataaaagagacgatgaaggaaccagaagaggatagagcatgagtaaagaaaagagtggataaagagtgatataagagagatgaaaaaaagaagaaagacttagctaacagagaggatgaagaagaaggaggaagggacaaatagagtagaaggaaaaaagacaattgtgaaagatgaaggacgggtagaaggaagctgttgaaagttaataaaagggatgaagaaccgatgagtaaaacatcgagaggatagagagtcgggagggagagaaagagggaaagaggaatgatgaggatagtgcatgagatgaaaataagagaaataaaacaaaagagagagtggaaaagaaaaaatagagagcataatctacataagtgagggcagaaataggtgaagtgagggagaggtaatgacggaaagtagaatggaagaaaaagaaaaaaataagaaaagcgggggaaa

SEQ ID NO: 189601 - DNA, 528 bp, Arabidopsis thaliana
aaaaattttccagggtagaaaggttgggcccaaaagagtcaggagaacgttgagcagtgaggcgaatcggagatatagaaagtacacaaaatttttttcaccttttttaacagagaaaagagggaaaaaagagtgtgaaattgggaaaagaggcgagccaaggagcgaatagagaaggggagaggagagagtaagaactatggaaagtaggagataagggaaaggagaaaagagaagatagagaagagttttgaatctgaaagatggagggaattggaagaaaattagaggaagggaagatgaggaggagaaagtaaaagggcgataaaaagaaaagtacaaggatggatgaggaacgaaggaagtggaaaatagggaagagaaggaaaaaaaaagaattagtgaaaataaaagaggggaatgaaaataagtaagggattattggtgggagacaggggaaaatagggaaatagtaaatatgggtgataacaggatgtgggacaatggataggaaatgagaaagctagg

SEQ ID NO: 189602 - DNA, 705 bp, Arabidopsis thaliana
gcaaaaccctacaagtacaaagcgggctccacgcggggcggcgtctaaataaggaccccttctgttttttccggccgcttacttgttagcagaagaaggcataataaaagctatgttcccgacaagtttaataacattttatcaaacacacaacaaaaaatattgtggcaatattagaaccggaacaaaaacctaagcggttttagattgggccagacgcaatccttgatgactggttcagagtttgcttttcaaagagatcataccatgtgtgaaggatttctatcaacatttcgccctaagaacctgcgatgaccaagtctggatttccttcctgtttccaacgtaccttcgagctaccgtcgaatacttggccaacagcttgggagacccatttttgaggcaaccggcgtttgcaattggggctcctgtcttatgcacgctgctggtagctgccccagcaaaactggcccaagacccccctttgggggtaggcttcacccgtgtggttttttgggggggcaccaagcccatttaaacagatggcgcccccctttcatggggccccttcggggggggttggggatattaaacaaaatttttttggaataggggccatttttaaagccctttcacaaacactttttgggctcacacccgggggggggtttcaaaggggggagggtgcccacataaaatggggcc

SEQ ID NO: 189603 - DNA, 615 bp, Arabidopsis thaliana
gggacaaaaaggaacaacaacgattagtgaagcaaatgtggggggctaagggaacatgggtgttagaggcataaaggaaagagaaggaaatggaaaaggagaagagaaaggcttagataaaagaagaactgaatgaaagggcttggtaacaagaatagaaagaagacagatattggaaaaagaaaagacaaaagggaaagaaggaggatgacaaagactaagtaaagagcagacacggcttcattggaaaaaatttgagataaacaagaggagaaacaggggggttaaaaaggatgagaaaatatacgaggggaaaccaagtagataatatgaacagagtgggataaaaaggtcacggaaaaaaaggttaagggaagaaatggatagaaagggcgtctttagagcaaatggagaaaaatcaaatggtgaaaaagaaggtaggctacgaaaggcgatggcacacaaatgggaaaaggcgagataagggggaagaaaaatgccgctgagaaactgattaggcgtgggggagaggcggcatatattttaacggcgggactaaaaagaaaaaatttagttaaatactcggaatctaacatagagagaggtggagaaaag

SEQ ID NO: 189604 - DNA, 971 bp, Arabidopsis thaliana
accctacaaagtaacaacacggagctccaccgcggtggcggacgctctagaactacggatcccctttgtttcagtaattcgcggacgcctcaccggtcatcaaaacatggtggacacctatcttcattacccccgccacccccaaaaccaatggaaaaaaagctacctcttccgagcagtccacaggcatgcataacgggacacaaggttgccttcaagccaagttgatttcacgcggaaagcaaagtagcgcttggaaaactcccaaaaaaactaaggttgagtgaaaaaaaaaaatgggggttctaagatgacaccttccccacgggattgtgaaccacattcctatccagtcggtgaattctggggatggaaacaagggctcaaccaatgggtgagggccccaagggggaaaagaggggtcttctgtgttcacaacagtgcggaaaaatactacgggctattgtcgggcgctacaacaatacacgcacgactttttcccggaagtcgctctggcgggagatttatatacaacgaggaggcgacaacaaaccaatcgcatatcggtgtggttgtggcgaaaaggtgcggccaatcttaagtaggaaataaggttggaataaaataaacaacccaatacaccccggagaaacaaacatacccctcgtcggggcggtgggatggcgattcaaacccccctttaccactctggccctgtttttaaaaaaaatacctttctcttcttcaattaaatcaccgcgggaaattctctatttcctcccaacccaaaaaaacccttatgtctgggggaaaaggaggtattaacctgaacatttcgaaagtaaacctgatttaaaaaagggtggggggttgaatactggttaacattacaattgtattaagttttggagggggccccatacggacgtttttaacctttggggagggtaaggaaaaaaaactcttttttt

SEQ ID NO: 189605 - DNA, 524 bp, Arabidopsis thaliana
gaggctgaaacccggaagcagaaacgaacatgcgcacagcccacgccccgcgatccgagagaccacaaagggccgcaacgggcaccggacaaccacccgggcccgaccccccagacccacaccggacccccccgcccgcaacccccccccacggcgcacccgcccagcccgcacacgaccccaaggcaccagacccacaggaccgcaccacggccacccgccgcgaccacccccaaaacgcccccccagcaacgaccccgccacggccaggacgcgccaccacggcaacagggcccgccccaaccggcgcccagcgccacggccacaccaccccagacccccgccacccacgccacgaccgcaccgcgaacaacccccacagcagggcgacaaacaacccggcccccagaccccaaccagcacggaaacaaccgccggcaacccacaccagcggacccaccccccaaacacccccaaacgacacccagccccggccacccacccccacaccgcaagcacccgcc

SEQ ID NO: 189606 - DNA, 501 bp, Arabidopsis thaliana
acctcctgaacttatcctataacggacaaaagctggagctcccgcactggccgccgcggtagaccttctggatccaccggactccccgaattgccggactccccggaccaaagaaacaaaggtgcttgctcctccttctattcggactgattcgcatctgttggatatcgcaatcctgcttctcttatgtcttctttcctacatttttggtctatgtctcatggaagcagaaaagccatacggatcatcatccttaccaccatagaagacactagggccttgattattccgacaggaggaccttctctggtcatggcgaactccagcacgacgatttaatggagcaccgaggtcttgccgctctagaatcactccgagactttaactatgtctcaagacgccggccttggcatgctgcttagctcttgtagtccgatgaaaacgcactcttattctaacctaactggatctgaaacaccgggatcatatctgacctcatta

SEQ ID NO: 189607 - DNA, 383 bp, Arabidopsis thaliana
aacaaggaaccggcccggggacaaagccttggtacggcccagaggcgggccacgggcacaaaggaaggaaaaagccccaagaccgcccagaaaagacggacaacaacgagaccgggaaacccaaaaacacaaccgcgcaaccaaaacgcgaagccacccgagggaacacggccgcaaagagaaccaccgagaccacccgaaaaaaggcgacacaaagcggacaaggaaccccacaggaaaggccaaggccaaacgaagcccaacaacaccgcgcagggggacaaggcaccagaaacgacaggaccagaaccggaaaggaaacgaaccacagaaaagaccgaacggaagccgaaaagccaaaccccaagaccagagacacaaaa

SEQ ID NO: 189608 - DNA, 943 bp, Arabidopsis thaliana
  unsure (1)..(943): unsure at all n locations
aaagagaggcgggagggacgaagcgagaaacacggggggaggcgggggggggagaaagaaaagggagggagacgcaccagcgaaagaaggaggacggaggaacccaggaggaggggggaaaagggggccgcaggagcgcgcgaccaacaagcgcgacggggacgtgcgggccaccagaaaaacaggggggcgggaaaggcgccggaggcgagaagacgaggacgaagcgaaggaagaagggaaaggggaaagcgcggcgcacgcaagggggcaagaagaaaagccggacgcccgccccggaagcccgagacgggggagagaagagccacagggggggaggccacggaagacaagaacgaagggacaaccacgaagatgggggggcaggggccaaacgcgaaccatgaaggacggcgaagggagaagggagggagacggacagcgagaacggggacagcgcgcaagaataaaccaccgggggccaccgagaagacaggggcacaccgggaagggggcaaaaacacaaccaggggggaaaacaagggagcaacggggcgaaagggggacagggggcgaaggggcccagaaagaactcgccaccgaccgggcggagaaaggaggccgaggaagacgccgggaccccagaagcgaaccaagagcgcggagaggagcgcaaagacgcgatcgaggggagcggacggggtgaaaccaaaacgggagcaangaagaaacaagagacgcaaaaagacagcagggggcgaagggggccacaaacagagaggcccgaaggggggcggncaaaaagggagagcgggacaaacgggcggggggggaagacgcccgacgcagaaaagggggaggacccaaggaggaagaaccaggcggagaagcgaaaaaagaacagcccccgacggcggggggacagacaaggcgagggaggacg

SEQ ID NO: 189609 - DNA, 247 bp, Arabidopsis thaliana
  unsure (1)..(247): unsure at all n locations
ttacactactcactatagcggaaagctggtacgcnttgcaggttcaccggtccggaaattcccgggtacgacccacgcgtccggggaaatgctttagtgattacctgaaaaaacacgtttttgtagtcgttgtatatgaggttaactctgtttgagatgaatactgccatgagaaaactatcatcaaccttctcattgatggacactttattgtaatttgggacattttaattagccttctatcata

SEQ ID NO: 189610 - DNA, 904 bp, Arabidopsis thaliana
  unsure (1)..(904): unsure at all n locations
ggcggtcccgtgtcgcggaattcccgggtcgacccacgcgtccgatgcacggccggctcaccacatgaacgaacgcggttttatagatgttcgagctgaggttaacagtgtgagagaggacttctacttccatatgaagagcatcagagctcctgattgacgcgccagctatatgctggtcttgtgaacctgctagtgtattcgctgccgaggccctgatgcgttcaaagcagctcatgtgtggtagtcgtcattagtagtaaccagcgtgtgggagagagtagaagtctcggtgtcattcggtacgcgacgtgaattgatgccagcgttcgcattctcgcgggaatatgctagaagactcttttcaacatcggactggagcccgccaccctcagagctcatgtgttgnaatttcgctagaacagatcgtcgattgtgacactcacagtnacatcgtgtgaaaattgacatgggatcggaggcgcaatattttggaggaggcgagtagaaaacatcacgactgccatgctgtgcacgtctccttgcgtacggaggctactgcaagcactggctgagtagccggaggtgcctgtggggccgtgctgtctaagcggccgtgcaccacagttcacaagagtctccaagaggcaatgtgtgtggcgcgagttctggtatcaaagagtgcgctagtccggggacgcaccgatgggactttcgaagacttgcggacggcgatatacataactttgccgatctggacatggaagaggtaccgattaccgtcgggaggtaacaggtgcatcaattatttactcagtcaatcgagaggccaccataccttcccggtggctataaaatgtatggcgtgctgctcgacaatagtttggttgggggcactctcggt

SEQ ID NO: 189611 - DNA, 1129 bp, Arabidopsis thaliana
  unsure (1)..(1129): unsure at all n locations
gacaaaacaatctggaaggcataccaaacgatagaaggaggagagcgccttctactatactagtagggaagccccctttttttctggctttttaaaaagcaagagcagagctcacacaaacaaatttgtgaagtgggtgagaaagaaaaaagatgtacttcccaacaaaccaaaaagtaggatacattataaaaataggcaagggatgatcattctaaaataaaccacaacaacagatctttttttattacaaaaaaacataggggggaaaagaagacgctaaagaaaaggaagaaaagacccatgaaaaaagagaccaaaatgcgaaaaggaaacatcaataacaagctgaggtaaacacaaaaaaaatatttacaaccgaaatgtattatgactaaaagaacaatagagggaaaaaaaaaataacataacacaatcataagagagtggcctccgaaaggatatagaaaagagacaagaggaggagactcacacacttaaagttgttgaggaagacatactgcgatattcacaaagaggagacaaacaaagcatgataagctcacctttaatagaagataggacggatgcgaatatataanccactacatgtagtgtgttctacaaaaataaatgggggaaaataaaaatccttagaaaacaaaggagataaaaatcgtgttggtaattaaatacactctgggacagagtggattacgaataaaaacacggacaatgttatgaatcaaattatatgatcgaaacccaaaggcatagggaagaatttgattactcaaaaaaaaaaacgagggttaaaaaaaaacaccgacgtaataatttttattggaaagacggaataggaaagaatcacgctaatcgggggaaaaaataaaaaacatccggcgggaataaaagaaaggctagcggggtcgtaaaaaaaaaaaaattgtgaaaaagaagagagaatgatcttccagtacaaagaaaaaatatcataataaaaaaaaaaaaatacgagaggggaacaaaaaaataattaatctctagtggacatatggaatgttaataaacaaatcgctttatttgagatctcagcaaagaaaaacagatatggagaaatcaataaatg

SEQ ID NO: 189612 - DNA, 1126 bp, Arabidopsis thaliana
  unsure (1)..(1126): unsure at all n locations
cgaaaagcccgggacgacccacgcgcagcgagacaccgagcggaaacagcaggaccaagcggggagagaacaaatttctaagacatttcaaacagcagcaccaaccaaaagcgcgaccgcggggagaaaacagaccgaccgcaggaaaacgaaaaggcaacgcaaacagcgaacgacgcgcgccaagaaccacggcaaagggaacaacgagcagccaggggagacgaacgacccccgtgaaagcaacaccaacgacagcagaacccgaacaccgacaagccgcagaaacagacgaaaccgcgcgccccagagaaagggaacccaccggaacgagggaaaaacgaagggggacacgaaaacgaccgcagcctggcgagaggagaacgagagaacaggcgaaacgcacaagcaagcagggaaggaaaccgagaggggcaccgaaggcagggacggcacagagagcacgggcacggacgaggcaggcaaacaggggagatgacaaaaggacaaaaacgaagagcggcccacggaacagaggacaaactgagaccatgccaccgcaaaagcacgagacgcgaaagaacaaccgcgggacgggcgaaaaagctcaaccacgtggagaaacgaccagcagcgcgaagacggggcgcgacacgagacaaacagaaaagcaactagagagacccgggaaaacaacgggtcactccgcgagaggactaagaacggcaaagcgtgcagacaacacaggcgacaacgcaacgccaccgcaaggacgcagacgcggctaaccacgccgacacaaaaacaacacgccgagggacgcaacacgcctaggagaccacagacacgagagggcggcacgaggcgcagcggcggcgcacagaacacaacaacgcagaacgccagagcacgcacggctgaacgtggcgacgcaaggcgcgnggacgcacccaacaacgcagggcggcgacaactcagaactagaaaaaagaagaggcggaaacacggaagaccaagctcggcgaaacacggagaaacgcgcggagcgccgcacaaagcggcggaaccggagacaagcagaaggggggggaaagcaacacaaaaatcgcgaaacagggacgccagc

SEQ ID NO: 189613 - DNA, 204 bp, Arabidopsis thaliana
aggaagttggaaaactccgacgcgactgtcccatcgatcgacggtttttccgttttattccccccccaccccacccccctttgggtccgacgatcacaacactttctagaatctaatcgagtcgcatacagctagccgacgtgcaatcgcaatatcttaactctctcaagataccacccttagctggcatatctgtagacttgg

SEQ ID NO: 189614 - DNA, 791 bp, Arabidopsis thaliana
taccgagattgggtgctccaccggggggggggccgctggaaactagcggctcccccgggctgcgtgtattttttggccgctgccgagatttatcgtccttctgtgaaactctccggagagagatgaaatctttcctcctgtatagacaagcgatccaccgtatttcactattatcttcaaaaaccccaactatctgcagaaacttctccggcattacatacaccatttctcactctgatcgtcatctaagaagctgcgacggacaaacccgattccaaagtgtcgaaatccctagacccattttatcattcaatcgatattggcactttactcgcgagtcccgactcagggaatccagtgccgccattgacgactcgaatgaccaacaggaagatgacgaagatggaacaacaaaggagtttctgtcacgattcggttggataatgcgggggaaagggtcacaagcttacccagattgtgacaagaagatgattgatggtttgcttctgcttattgttgagaaagtcgcggtaaaaatccaaagaggcgggattcaataaaggtgggataagcttccaccttcaccggcggtgggaaggttaaacgaataagctatgggcctacctatctggggaaagttagttaaattccggcggtttggaaagaatattgggagaacaagatgagggaagaaaaggtgtgaaagattgggagccaattacgtttccaacttcttccctgcaaagggaatgggacaacgtgggttgggttttggctggggaaaaaaaaat

SEQ ID NO: 189615 - DNA, 821 bp, Arabidopsis thaliana
atcacgaaattgggagaccccccacgcgccgcgggcgcgggcggcggctcagaaaagatgacgcgaaccccccccagcccgcacggtatatcgctttacgcgaaaacaaccccaaagcacaacacaggtgggggacggagagaaagaaagaacaacacaccgccaaaccaaatacaccacaagagaggaagacaccacaaggaggagcgagcgagcccgacaaccacaacgccgcagaagaaagaacaaaaaacgaggacgacggatgacgtagccccactcccaggtggggacgcaaaaacacacacccgcgagaaaaaagaggaaccaaccaaagagcgggcgagatgaaggacgaaaaataccacgggacggaacgaaagcaaaacaacaacgcagcaaagcgaccggcgagaacacacgccaaacagaacatagcgtgccaaggaacgaaacgaacaaaacaaagccagacgcccataaaaagacagaacgccagtgctcgccccctagcgaactggaaaccaacgcccacccactcgacaccaacgaaagcaaaaaaaaagacgggaacccggccaacaacagcagggcaaaatgccaaccggcacaaaaataagcaacgagaaccctcaacagacaaacgacaggacgcgcgaaaaccacggcggaccggcacaaagaacagcaacacccaacaccacccggcgcacaggcccgcaaccccccacaagccacaaaagcaccggtgcggaccgaacgcaagggcaaagagcgcgtaagacaaaaaccagaacaccccgagaaaaccgaaggcgacg

SEQ ID NO: 189616 - DNA, 202 bp, Arabidopsis thaliana
agcagcggaggaaagaaaacagagacaatagggccagaatgaggcgagcaaaactataataatcgcattacggaagaggaggccaatagcaacaactcagacaggaaggaagaaaagaagacaataagcaaagagacgtaaaacaaaaaggtacaacaacagtctaacctatgaaggaggaggcagataacctgacaatatc

SEQ ID NO: 189617 - DNA, 729 bp, Arabidopsis thaliana
tgcggaattcccgggtcaacccagccttccgatcaactgtcgaattaaggttatggctactgtttccactcatgtttaatccttcggacagggtccttaatcccatgttgctagatccttgaggagaatcagaactcactcggctcaagattctcatctctcatcgacattcggctaactcaatattcctatgctagggaactactagcagagcactacttgtaggacagatctgacgttaattacctactcgaggctttgcagatagatcgacttactctggactctatccgacaaaacaatcggtcgataaagctatgatcttgcagtgagataccagctcgaattgatctcaagagtgatacctaccgttacctaggccgtgcttgatcgtcgatgtcgtccagtacgcgacgccgttaccggtgcaggaggcaacgcaagttatgtccttgttggggagcactggcatgagatgagaacctatatgggatttggctgtcgatctcaagcgcttgctgctgatgacgaatgttctcataggctaactgcggtactgatccagacaacctgctgagcccaacatgtataaaggcgaaactatatggatctaataggaaacagaacggtaccgaacagcacatggctgcttcgttagatagtcgagacgctggagttgaacataacgttaaatgagactcaagcccagcttgcttaaatgacattgat

SEQ ID NO: 189618 - DNA, 663 bp, Arabidopsis thaliana
ggccccccctcgggtcgacggtatcgataagcttgatatccaatcgcggccgccatcgttacacaaagtttgctgttttaataaaatttaataattactggaatgagttccaaacatcactattgtgtggctttcacgctaaaattatacattcttataccacacccacagacttttttttttctttcactaccaaagatagagccctgacgtggactatcttaaaatttcttgcggaatgctctaccaccccctatgatagagaaggggggttccttcaaaaaacccacctgaatggtatcaacgaagattattaccacccctatgtcctcggggaaacgcctccccacacccctgtctatattcttttgatcacaataactaccctcctcgtttctttgtcccctcctgcaaagtcatccttaccaaacttccggccattgccgtttacgggtggctctgaacgatggccacacatctgtggggctcatctgtgccctagtccatcgaagccaatattgaaacttttttgtggggggactcgagctccccataccggatccccacccaagagccgtcttttaaaccgcaccccggcattttatcctttcgtgtaccaaaggggacgccttggtttaaaccttcctcccctctttttaaaaa

SEQ ID NO: 189619 - DNA, 505 bp, Arabidopsis thaliana
acaaaagtggatcccgcgggcggttaacagacccggcgcttttttttggcacccgcattcgggtgtgaaataccgcacatacgtagaccaggatgagtgtccatctgggaaaaaaacgggttggtcctagggagaactctgtgaagaacggcggcgtcggggtcttactgagggcttctaccgtatctaatgaccctgaagagcttcaaatactacccaaaacctcttgattagctaattgggcttcaacttaccgggctttacccttcgggtaacaagaatgccagcacttactgtagggcgcttaaaccacaaccttcttgggacggttcaaagggaccgctatttttaaacccaacagggtacttatggttggacaggacttacccccggagggggtccacctgacataaatttgaaatgaactatggcatgcctttcccggaaaaaccgggcaagggcaggaaccaatggttggagaataatggctaggttttagcaaata

SEQ ID NO: 189620 - DNA, 765 bp, Arabidopsis thaliana
acaaagtctggagctccgccgcggcggcggccggtctacaactttagactccccgggcctcctttatttttttgtcccctgccattcatcaaacctgtgtcgccttgagatatccacctggagcagggggctgtactatcttccgtcatgaggttcaggactgaaatcatcgaccacctcggttagagggcgcgaattctcgcactcttgatcttaggatcatcctgcctcggaatccacttttgtgatggacgaatacactatctttcgtgctcttggactgccttcatgattgcagatattcgttgcatacaccttgttggtaactatggatcttgtccctactagaatatttggtgacccttttaagactgtctgtcatactctgttccagctccaagatggatgatgccacaactcctacttcactgatataaatccttcttggctctggtatctggggctgctgttatcataccctcggcactattaagcgttctcggttagattgccctttaccgaggcgtccttagttttccttacccaggtttaagaacctgtttttttagatttgggccctacagtcaaaggtgatctcttgttccccgggaactctgttggcagctaccatgattcatctgtggaaatctgccgccgggggtttttcttgggaacccgggctctcccttttttcattgtaataagggtctcaccttggcccaaggggagcctgaatacgaacgattcccaaccccgaaaattgca

SEQ ID NO: 189621 - DNA, 451 bp, Arabidopsis thaliana
aaaccaaggaccacggccagggggcgcaaccgggccttcgtccccacaaaaacgaaggaaaagaaacaaacaggaaaaacacgacacaaaccaaacccagaccgaaagaccccgaaacacaacaaccggagaacaacaaccacagaacaaccaacaaaccacaaagcaagacacgacgccccaccaaaggaaaaaaacaaagcccgaacacggacacaagcgcaggacaaaaagaccacaaagaacaaaagacccaaacccccgaccaagacgaacacgagaacaaaagcaccaaaggccgaaagacgaagagcgcccacgcgaaaggacgaaaacaacagggccaaaacggaacacaacccacgacgaaaacaaaaaacaaaccggaaaaaaccccaaaaaacgaaaaagccaccaacaggacacacaacccacaaagcaaaccacgagc

SEQ ID NO: 189622 - DNA, 713 bp, Arabidopsis thaliana
ggaaaaagggagcaaaaaagcgcccacgaaaggagcaccccacgcgacaaaaaacagccaaaactaaaccacttttacaccgaaagcaaacgcacggacaaaagggccagcaaaaaacccccacagcacccaccaccccccaacccgccaccaccacccccaacacaaccaaccccgaacccccccccaaccaacccccgcccaaccacccccccacccccacgcacccaccaacacacacaaagccccccaacccacccgcaccacccaacgcacacaacaccccaccagccacaacaaaaccctccacgaacggccacaggacacccacacacaaacccacagaacccccccacagccccggaacaaacaccgacacacagcaaggagacacaacacccacgaacgaaaaagcaccccgcacagacccagaaaccgccggcgcccaacagcaggcacggcagcccagccacacccaccgacccaacctagcagcaaaacagccaccgcgcgcaagacacacaacgacagacaaacccccaagacaccccgaccaccggaaaaccgtacctaccaccccggcccaaaacgaaacaagaacaagcggcacaaaccgaacaaaaaaacccaaccgacaaacgacccccacggcacggacaaaaaggcccgaacacaacccaccccacaccagcaaggacaccaaacaaccaaca

SEQ ID NO: 189623 - DNA, 328 bp, Arabidopsis thaliana
  unsure (1)..(328): unsure at all n locations
taaggtacaaagctggaactctccccgcggggccggcgctctagaactctttggaacccccggctccgcgtgtttgcgtgtctcctgagacgtacctcatttgttcgnaagtgttatttgtattccgatggtacccaggttctcgagtatccatcgattgatagacccttaaaaatatgatctttactttggtttctgcagatctgagtgaagaaagctattacttgggctttgtcaggagagcggcanccagaggagcacctgttatataaagatactggctttattagaccgcacctaattaggtgccacggataactggcactgc

SEQ ID NO: 189624 - DNA, 1017 bp, Arabidopsis thaliana
taacttatattttgggagttggttaatacataatatcaaaatggtcaagacaatgactatgcacaaatgttagaaatgaatttttattataaattaaatatataattaaaaaaaataaaaattttttttattgaaagagaaataaatagaaaaagttttctttttaaagaaaatttttttaatagaaataaatctggtaaatttggattagtatgttcaaatcaaataattgttgtgaggaaattaaatttatcataattaaagaaagataattatgtattattttatagattgcttttgaaataagagaaataatacgagtgtgattttttcttcattagtcaccacagagaactattataaaattgtgtgtatttgtttttatataataaatttataatatcagtaaataagagaaatatggaggtttgttttataaatatactacgtagaattgtaaagttaagaatggggaggttataaatatttatgatattgttaatgattaaattagttagtaatattatttgtattaaagagttatttatattaatatgctatatttaatctaaaagaatagtttgggtatgggatatataaataaatagagtgtattaagataaacatccgttataaaagaggatgtaataattaatatttagagagatgagtattattattgattaataaaaagaagattttaaagttggagtcaacatatataaataatcgaaaaaatgtaatgagatgatatttattattagactttataattttattacaataatttgtgttataaaagaatatataataaatgtgtacgtgcatcttatatatatgatgattataaaattaatatatatgggaagatgatggagtaaaattatttatatatttgtaagaaataaaagctaaggtgtatatatttaattatatagtaatatattttgttaaggcgggggggtataaaaaatattaataaaaattataatggtgttgtgagtatagtaatataag

SEQ ID NO: 189625 - DNA, 556 bp, Arabidopsis thaliana
tattgaacacaaccaaagggtactgaccttccctatggaatggaggactccactcgctagtcacccaagaacgacaccccgcgttaaaagtgcagaaagaacactgcggctgacacggctcgaagcgggatacttacatgggaggattcattcataaaattaaccggatgcatggggggccccttaacacatacccaccattgggaaacagcaccaaacattaagtctccctgatcgcctaacaccaacacacatagcaccccccaccggtgaaaacccattgaccaattgccaaaaaccctaactatgctgaactaagcaccatgaagcaacgagccacccgaccattctccctatcggggaaacgcgagcacgaaagatggtctaacaatccattaaaagttgtcttcgccgatgaccgtcaaaaacccatggactctctccaccgtaaaccacagcaaatgctacatggaggtccatgcataaacgcccgcgacccccgtaattaatagtcacgcgcaccacagcactcccaaacaaccccagggtccaggct

SEQ ID NO: 189626 - DNA, 817 bp, Arabidopsis thaliana
cccccaaaaaaattcagtggaacaaaaagagaagccaaacgggaaaagacaggaacgaacgaaggagcgaagggagcagaacaagcatttttttggaagttttttttttttgaaacagtaagcgtcatctgaaggagttatatctaattgggggtggttttatgggattatgtaaagtgttcatttttgtaaagtatgaaagtataataaatttttatttaacaattttgtgataggtttactggtatttttttatatttttggttatatttgtcagttttttggattaatgttttattttgggtatgtaatgtaaatttatagggaatatttttttttaattatcatattttgctgggttctatggcgttgttgatttttttattatgtattgaagttatatatatcgtaggttttggtggttttatagaaatatagttatatttttaaatatgatttgaatatttagtgagttagtattagaggtgtttaagaatatttggttttataaataaaaaagattattgttgaaaaggctgaataaggaatggatttgggtttcgtataatatttaaagaggtaaggatagagaacataagctctagttgaggtgaatgtagcatatcagtaataaagggttttttgataaataattggatattatgtattgattgggttatatatgggaatgttaatgttgggtttgagagggagtgtaggataaaatgaatattgggcttaaagaaattgtgggtgttttgatatgattagaaaagactagcttttatgtgtgataagttgggaggtttctcttgga

SEQ ID NO: 189627 - DNA, 329 bp, Arabidopsis thaliana
acggcctggataagcttgacaacgaactcgcggccgcatgtcaataccaagagactaacaacatacagttgtgaccgacttttataaccacaccgcccttcgcgcctcggaaaacaagggacaacatcggcccggaccaccctacaccgcacaagaacccgccactccctgccccggaaaagcctttactgcacaagaaggcagcccccaccaccaaaagacggggaggcatctagggaaacaaacaccgcccaccatggcgtctcaaacgtcaaccccaaaggcacccccaccccaaattgacccccacacgcacaaaacaccggcgg

SEQ ID NO: 189628 - DNA, 958 bp, Arabidopsis thaliana
acctgccctgtgtgcaacttcccgtaatatctcactggttctaccccggccctgacattttttccttttttgacaccgactttttgagttccactttgtcgctcttctgttagggataactcgctctatgttcttaaatcttttcctcatcccctcaggaaatgttcttcctattatctcagtcattagggctcttccggagtattgataggcgcgctgattataactcctcggggatgctctttcggtctacgaatgcttatggcttcctaccagaatctactatcccttggccaagggcgccatgctagcactttattttccggagaaattttttcagaccagctttggaccgccccttaaattaactccataacccaccggcctggtcttgagtacgaaatgcctttagataactagcgaattatggcacttataactcctccttctgggttggcaatattacaacatctgtaggcccatttcgttgttattaatcacattatcccgaaaataaacatatagaacttatttttattggacctcacattgggactcaatttttcctacttttatgcaaaaccccccgggctctttcaccctaaactcaacatggctcacttttgctcatcttattcactttgtcgcatttctagttatcctatggtatggtccgagaatcaatgatagcaccattaacactgattccagaccattacttcctcccttaagctctcgttttctaggggattcccttccgagttctcagatcgggtgttcccccaggtaatcctccccgcttgccccgcatacttgccaaggactattcccaagcttttaaccctattttccttgtagtatgagacctttatcttttcctgtcaaaggtgttcctgctcagcgggtttgaaaaaccacattttatccccttttgtttactaatactctcattttaaac

SEQ ID NO: 189629 - DNA, 475 bp, Arabidopsis thaliana
  unsure (1)..(475): unsure at all n locations
agcaggaagacagaagancggtccgacgggggggaaagccgcagaaaacaaaaaagacgcgcaaagcgggggggccagcacagggccgcccggcgcggcgggcccggagacagcacaggacacagcacgcccgaccccgagaacggcggggggcaccgacgccaccaaccccaaggagaccaggcgaagaaaacccctcctnccaggggggggaaccagaaccaaaggacgcgccccgccacgcggcaaaaaaagcgacacaacacggcaagggcgggaggcccanccaggcgaagagagggggggcgaacgcgacacacgcgagngcaacgcacgacgaagagaacggagaggaaacgacggggcgcgggagcccagagggaacgggaacgacgaggacagagaaaggaagacgggacgcggagacgccgagacgcacaagaagcacacgcacacaacgcaccccagcgaacac

SEQ ID NO: 189630 - DNA, 414 bp, Arabidopsis thaliana
  unsure (1)..(414): unsure at all n locations
cccccgngggggggaaacaaaaagtttcaaacgggacatccaagcaacaaacgaccgaggcgaagaccagtttggggccggacacgcaacgcagaaaaccggataccgtttgtcccagagtagaaggggagcaagcaggagcggaccaaccggtaggcctttcttctttaaggggtgcaaccgcgcaagaaaaaacagggaaaaaaaaagggaacggaggggggggccccgccgcaaaggagcggagcacccaccgaagccaacggggaaaaaagggcccccacacgggcaggcacaggcgaggagacaccccgggaaaagaaaagacccggacggaaagaggaaccgacccaagaaaaagagagccccaaaagacaaaagagagagacgaggcagcaaaaaaacaggccagaa

SEQ ID NO: 189631 - DNA, 511 bp, Arabidopsis thaliana
  unsure (1)..(511): unsure at all n locations
ggggcgaaaatttccagggggggaagggccggaaaaacacacaacgggncagaccaaaggggagaacaaggccaaaacgaacaagcacgcgcgaaccaaggcacccagggggcaacccgccggaagccacccaccccgagagccgccacagacgggaccagaaaccagacccctcccaagggggaggggcgcaacaagcacaacaccaacccacaaaacaccaccgaaaaggggggggggaggcacccgcggacccagaagaaagaccgggagccaacgaaaacaaaggaccaaaggggaccgcccacaagaaaaaagccgacgagaaagacaggaaccacacggaccccccaaacggacccccccgccaaaaacacaaacagcacgcccagcacaaacaaacaccaaaaccaacccacaccgagacggcggcaaccccccacgggacaaaccaaaagagacgcgcgccacaccccaccacgaacgcgcaacacaccacccaacacccaca

SEQ ID NO: 189632 - DNA, 520 bp, Arabidopsis thaliana
gacgtcgcacgcacgcgtacgtaagcttgggatccctctagagcgggccgccttttttttttttttttgatcttgaatacatcgtcagatgtttgcccatttttggttatttcttatttaaaatgtcctatttaaagacttgttggtgtgtttaaaaaaaaaaccaagggatccaacttttgagaatctaaaaaacatttttcaatcatcatcatttttgactctggcttttcactttcttgtgctgagcccttgagttcttttacccttctcttctcgttgcctttcatggctttccaatagatagaaaatcaacttatcaatctcttcagggtgagataatgagcggtgggagacatcaaaatgccatcaccctgcaacacgggactaacattcccgggcttcttggcccttgggctccaaaggaatgcgccaacaccccatttcttggtggaaaatggttcgttccggagatttattggttacaaactcagtcccaaggattcaaacctgtttcctc

SEQ ID NO: 189633 - DNA, 467 bp, Arabidopsis thaliana
ggggaattggggggcggaacccccccctgggggtcgacggtatcgataggctggttatcgaattcgcggccgccaaattcaaaattaaattggaaaaataagagcacaatatgtcaatgatgcccgtatccaggtcaccagttgaagcgggactctcttcatttacggtggaatttaatggtttagtacactatctactataaacgagggaacatactatttttgcagggtggagcggcaaagacgggaaccaacaatagggaaaaggatcgacatgtgggtgtaaggaaaaacacgagatttatacatggcgtatactctctgaagcctttgaacaacgagggcgtactcccataacttgccattagctcgcttatgttattccagtctaagcccctggaaggtagtaaagaatctacgaagacgaattgtgggacgggattcttcacgatctccacagatgatgc

SEQ ID NO: 189634 - DNA, 494 bp, Arabidopsis thaliana
ataggcgatttgggtccgggcccccccttgagggtcgcgggattcgattagcttgatttcgaattcgcgggccgccacttctaacttttttcaactttttaaattacctaactggcattattaatattttccaatttggggtgattcttaattgggtgttgccattttttccatttaaggtttcatttttttgggttttttggtggtgggaaaagtttttgtcccacgggttgaaaagaacggggccaccagaatttggattccgaaatgcctttggtttaagtttaaaataaaaattaataaaggtggtcttttttttttttccgggaccactgaacctaacaccaccgtggccctccattctgtaagacctgcaattggaaggcattttttggtaatcacgaatttggaaaccaggtagtggtggattggagatagggttcatttactggcagggggtttggatttttggtggtggacatattgggaaagct

SEQ ID NO: 189635 - DNA, 545 bp, Arabidopsis thaliana
  unsure (1)..(545): unsure at all n locations
cgcccccccctcgagncggagggatcgattagcctggtatccgattcgggggccgccacttcttacttttttcaactttgttaattaactaattggccattattaatatttcccaattggggtggtacttaattgggaagagccattttttcccattaaggttttaattttttgggttttttggtggagggaaaaggtttggttccaccggttgagaaaaaccggtgcaccaggatttggaattcggaaatccgttggtttaagttttaaaatagaattaaataaggttgttctttttttttcttcgggacactggaactaacaccaccgatgcattacactttgtagagactgcaaatggaaggcatcttttggtaatcccggattttgagatcaggtagtggtggatttgagatcaggtacatttacttgcaaggtgttttgaattttggttgtgacataatgggaaagcctgcagggtggttaaaaagtgtactactgtggaaagaaaccatctaaatctagtggttctaaagataaggaga

SEQ ID NO: 189636 - DNA, 467 bp, Arabidopsis thaliana
ccccctcgaggtcgacgggatcggatagcttggatatcgaattcgcgggcggttcacttcaatctttaattcggctggtcagaaccgacccttctggacccgtccaatcggtcccatctaaatctggtcagctttctaatcttcatacagctactggggtaccttctcacttcggtcggaccgcttcgcttttttttttagttcgggatctaggggaattttccggaccaaattagaaccgtcctacttaaggctgaccggttcattttcgagacctaaccatggggtaaggaggatgatctttttggccatggatgggatggaggaggaaataaggttggtacctgggatgggagagaaattgagatctggagctttgagggggtggaaaagagcatggaaggggttgaatcaagctgaagtgggaacgggttggcaggttttctttaccctgggagagcttaagt

SEQ ID NO: 189637 - DNA, 455 bp, Arabidopsis thaliana
accggttgatgccgagcgaccacgcgtcgatcgggcggaatgtccgccgaaatacttctgatgcaccgagcgagtatatttctcatttacagactgatgagtcagtattgtgctaggccactatctttcaagaaatggcggacatgaccacacagcgttattgtctttactgtatgcagagaagattcgtgatcttggctcttgctatcacagtcctgaatgcgcgtctctataatagtggctggctacggagacataagatatgcgagttcggaggtgttgctagtccatcatcttatctcgaaacagaagctgtgctggcgactgtctacacggaggtgatgatcactctaggccgaactccatcatatgtgagacacctcagatgtgcttggatatactaggacactatgaatatctgatacatcagtgctgagaagatacctacaatcgct

SEQ ID NO: 189638 - DNA, 467 bp, Arabidopsis thaliana
gggggccggacccccccctgaaggtggccgggatccataagctggttacggaattcggggccgttttaaaaacgagcttatctggcggtgggagcaaccataggcctaatggtgtccttaatcaagccccctaaaattaaagttaaaaccccaaaaagctgtttttggatttatgattatgccagataaactcggacctggtctctttttactgtggagggcagtcctgcttcatttggcccatggggaggccacagaggccttgcctgggagaagggaatgtccaccacagtaaagcagttaatattagcccatgtatctggaatagactccttccaatttgagtttgacaaaaccgttaggtaggttggccctgaaaacctgggaggaatggggggcaagcagttagaaaaggtcaattttgattacccacatgagtttgtgatttcagtaaagggaccctacgg

SEQ ID NO: 189639 - DNA, 505 bp, Arabidopsis thaliana
cccccccctggggtgggagggcataactaacctggtattcgaattcggggccgtttaaagaatcacttaatccgaaggtgggtatcacaataacttaatgtgtccttacttaagctcccaatattaaaattaaccccaaaactgatttgagtatatttgcggatactggactgtttctgcaagtgtgaggaccctgatattttttcaagggggaggccagagaggccttgcctgggaggagggagtgtccaccacagtaaggcaattattattagcccgtggttctggaatagactccttacaaattgatatgacaaaatcggttgctcggttagcactgaaaaacggggaggaatgggaggcaagccgttggataaggccaaattgggtcacccacatgagtttgtgattccaggaagtggaccctacgggagctcagacgtctggtgaactatatgtgtccgatcactgacttgcgagagtaaccgcagacaatatggaccgt

SEQ ID NO: 189640 - DNA, 502 bp, Arabidopsis thaliana
ttttgggagatttgggacccggcccccccctgtaggtagccgggatccctatgcaggagacgcacttcgtggccgttttcacaccagaagggggccggtcaaattatttggaaccaaaacctgaaagcgtgggtttgtacatatctgctatgatcccatcacgaaaattatcgatccttgtgtaaatgaccagaaggatatgttgtgccatatgtggttttagcttcgtgtctgatcgaaaattgatgacattgagctcatgagtaacgcttttgtgacctgtgtgaagcagtctcgcctcattgaaagactgcactactacacaggatgatcattgctttgtcatctacccacactgtcgacaggtaccgtgattagatcctgcatcatgtaactcttgttgaacaggatgaaatgcatcaggatctgagacaggaatggtcctctcatgctctacttatccagcatgatggcatacctctgacaagggcagattctttga

SEQ ID NO: 189641 - DNA, 319 bp, Arabidopsis thaliana
  unsure (1)..(319): unsure at all n locations
aaccgatttttttttccgggagcaagcngaaaggaccaacaggaccaaaccncacccaaacggggaagggaggggcacccaggaaaaaccaaacaccaacggaccggagccacccggcaggagcgacaagacccccccgaaccacagaggcaaagggcggaaaaacaaaaggcaagcgggaacggcaccggaccccccggggaagaaaaccgcacccccgaagaaagcaaaacngccacaggcacagaggaacaacccaccggccacgagcacaaggagacacaccccccccacaaaaggacacaaaaaggccggaagg

SEQ ID NO: 189642 - DNA, 355 bp, Arabidopsis thaliana
  unsure (1)..(355): unsure at all n locations
aaagaaaaaggccggcgaaaccaggggggagaccggaaaggcaacaccgggaaacaaacggccgaagaacggggaaacggacaaccacccccaacacgaagagaaaaacgccagggagaacccaggggcgncagaaacgcaagacagggcggaaaaaaatcgctgccttcgggggggggggaaccaagccggaagggaacccggcggaacgaaaaaaaaaggcccccccggcgaggggggggggggggcaccccccccagaaaaagaggagaggccacacccgcggacaaccccaaagcgcgcgcgacggggggcccccagccggacggcccccgcagagaaaggcagcacgcag

SEQ ID NO: 189643 - DNA, 472 bp, Arabidopsis thaliana
  unsure (1)..(472): unsure at all n locations
agccaagccacnacggggcggaccatcaacagacacaagggccccgccggccacccagacaaccagaaggctaacaacgaccaccacacccaccacaagcaaccggcgggagaagacacaggcagcaagttcctctctcgggggggaacaacaagaaaggagaaccaacccgaacaaaccgaacgcaacgagggcgggaaggcgccaacggaagcggaacacccacacaccccacgaagcaaagaccacaaggggaggaacggaagaggcgcaccgccgcacacggcaaccggcacgaccggccaccaccccacagagaaccaacgcgagaccgcagcagcgcacacagggggcgccgcccacgaaaaagccacacagaacagaacgcaacaagacgaaccgccaccagagacaaaaccggaagaagacaaccacacgcaccggaagaacacaaaaagaagagaccaaaaac

SEQ ID NO: 189644 - DNA, 363 bp, Arabidopsis thaliana
  unsure (1)..(363): unsure at all n locations
ccccctgaggtgacgatgaagctgtatcgatcgcgcgcataagctatgtattgatcactgatatttccagactcagatgcatattttcttcatcaaaacgtaggcgctaagacggcgatactgtgtctaggctcttgactacgtctgcgctcgtctggctgagggttccacggattcttgcgcgcactgcatgttgtccacggtattagatggcgaagatgtcgcacacngaccgacaatatcgataagtttcgtgacatctctgtgtctactgtcattctgtctgagtgtgcagaagtctgacgtgaagactagagagagaaccatgcgacatgtttacgatagtgcggaactgataacatt

SEQ ID NO: 189645 - DNA, 462 bp, Arabidopsis thaliana
ccctcagggtcgcggggatcgatagcatggttacgcattcgggggccgtccggtttaacccgaaaggcattggccttctcagaatatggggggaacggcttggagaggggcctaatccccgggggggtaataaacccggcggtgggcaagagggaggaacctttgaaggtgccgaacaataacgggtttcttatttttgcgggggtaacaggacccaccgccggctataggcccggaggtaggaacctgtgctctggagggggtcgttggattagtaaaaggaaggggaaaaaatgtactccacacctttttttggaggagaatcttacatcggattttggttgaccaacttttggacaatggtgggccattgctggaaaaggaaggctgcatattcttcccggggcagaaaaaattccgtgaacacagcgttacattcccttcaacttccgatggaagtgt

SEQ ID NO: 189646 - DNA, 296 bp, Arabidopsis thaliana
catttggcctcaaacccagagagaagggggagttcataatgtgaggagtgggagccaaagcccgggaagggagacaggtccgtgcctggcggagatggtgactctggagttgtttcttcgaaccggggtggagatggaggggcaggtatggagagggcaagggactctaccggggtgatcccgaggcgcacacataaatatgttggacagggatcatcccagggcgcgggagaacgaagaaacgtggtgaaggaatgacgatgattccgctaaaacgggatgtcggcttgaacggc

SEQ ID NO: 189647 - DNA, 428 bp, Arabidopsis thaliana
cgggtcgctagcgggttcgaactccggccggccttgtcaagcaaacatgcgcagatgaggccactcggccagacaagggggtgtgagaagactcgtgaccaagtgtcaacaagaactgaatgtcttacacaccgagactgaccaagaacgaggaatatttcttcacggggggaaaaccacggggctggccgaggcaagggaaagaaccggggggggagagccggggcccgaaggagcgaagccggaaaacacgcccgggaaagaagcggggagcaaaagagggacaggggggggccaagcggggccggacagggcagcaacccgaggaacccgccggaacaaagcggaaaagggaccctccggaccgccggagcccagcggttttcgggcccgggggggacctggggcaaagggggccgatgggggcc

SEQ ID NO: 189648 - DNA, 471 bp, Arabidopsis thaliana
  unsure (1)..(471): unsure at all n locations
caagccagacatcgaatacgaggccgccagatttcaagggagacggcgctgcatatgagggcaacccaggtcacgccaacggcgtagatgagaaagaccgagtgaacccgccgccacaaagaaccactgactgcaaccggacactgcccagaccgaaagagagcacacngacgaactcttagtgccgcgacgagaagagaaggcgccacgacgaaagaccacgcggacctcgcggggagcagagacggcatagacatagaccagcatagtcagagcgagaggagtactagcagcaggagcagataatgccgcgcatgacgaggccaggacgacgagcacacagccggatccgaggggggaaggtcacgggcggagccccagagccacgtgggtgcctgcactcagggccgacatgtaggacacacagtggcgaagggcacgagcgactagctcagtgcatacgggaccgga

SEQ ID NO: 189649 - DNA, 452 bp, Arabidopsis thaliana
  unsure (1)..(452): unsure at all n locations
gggagagggaaaagcaggtatcggggggggggaaagccccgcaacaaaaaaaacccggccgacagcgggggcacgcaacgggcgcacccggggccaaggccgagaggccgacncggccgcccccccgagacaaccaagcggcagcggacaccgaagcgcaaaagacaacaggcggagaaaacccctcccttcgagcgcgagggacaagacagaggggacaccccacggcaagaaaaaaagaccaccccacgggagaggggagggcggcgccaccgccaaaaaaaaccgcagacgcccggcacgaaggagcccacaacccagaccgagaagagacgaccgccagggngagaacgaagacgaccagaaaggacacgccaagggagaacagaagagccaggcgacgagaacggccgaggcgccgcggagcgcccacgagggacgcgccagccgcc

SEQ ID NO: 189650 - DNA, 475 bp, Arabidopsis thaliana
  unsure (1)..(475): unsure at all n locations
ttaggcgttggtccgaccccctcgagcgacggttcgtagctgattcgatcgcggcgcaattcgggatttatcggtaaagatcagagaagcatattcagcacttcagagctcaattcgcttcttcaccatcgaaaccacatatctcttgatcagctggtacaagtcgcagatctgagctgctagtcatttttgcgatatttccgcgcacagatagtaatagaataattaaaaagaattcaaaaccgtcgagctctgtcgttcatggaggcttctcaacctcgtcccttcaaacccaagaatttcgcacagggagaaaaccaacacatgatttttntatcgttctgcagtcattcacccgtccacccagatccaaagccaacacaccaccttcttctcaaggtagtcactttgaaacccatgattttcttcaaccgttagaatgtgttggtgctanagaagacgtaagtaggataac

SEQ ID NO: 189651 - DNA, 536 bp, Arabidopsis thaliana
cgggccccccctcggggtcggcgggattggttagcttggtttcgaattcgggggcggccaattcgagggtttttattgggaaaaaggttccgagaaaggcttattcaaccacttcagaagttaatttcggttttttaacccttggaaaccaacattttttttggattaagtggttccaggtggaaaatcggagctgttagccatttttggcgatatttcccgcgcacagattagtattagaataattaaaaaggaattcaaaaaccgtcgaagctctgtcgttcatggagcttcctcaacctcgtcccttcaaaacccaagaatttcgcacagggagaaaaccaacacatgattttttatcgctctgcagtcattcaaccgtccacccagatccaaagccaacaccaccaccttcttctcaaggtagtcacttgaaaacccatgattttcttcaaccggtagaatgtggtggtgcttaagaagacgtaaggaggaataacttttccactaccggggtcgaaaaggccacggcccct

SEQ ID NO: 189652 - DNA, 513 bp, Arabidopsis thaliana
agggcagggtcaacctggttatcgattccgcggccggccaacacatccattaaaatggctggaaactttttaagtaaacccggggaagttctccttcttttgctctcaccttactcaaaattatggacggggaaattaaaaaaaataaacctaaattgaaacattaagtaaaacccaaatccaaactccatctaatactcctgatattttgagaaaaaaggatgcatgatgcgagttctgttggaacccgcatatcatcggttaagctaacgaacctgatgcctaatcaataaagctgctaaagggggttagcttgagtgaccggaatataaacacattgcatatgatctttgagaatcatgctgggctaatgctaccttaaaaggtagtttttagacataggctctgtctttacgcgttagacataaatctgcaaaaccgggcggtgatcttccaagttcccgttctacagggctgcatctttggccctgtgagctccacactatgcgaggg

SEQ ID NO: 189653 - DNA, 504 bp, Arabidopsis thaliana
  unsure (1)..(504): unsure at all n locations
cggggccgcccaaaagattgcaagggggcgggttccggaaaaaccccgggaccgggaggcgccgggcgggaccccaggccaaggcgcatagaacggggcgcccccggagaagccaaaagccacgggcctacaaacgccaacaaaaaaagccaccaaggaccaacatacgggaccagcgggcggctttttttcccgggggagaagagcccccacgacggggcacccaaaaggaacccaaaacggagnccagacagccgacgaagacaaaaaccagccgccaacaccgaagagagaaaccacacagaacgcgcatcagggaagagctccaaccaaaccagcgcccggaaaagcacaggaacccgcccccaaaacgcacagcggaggcacagagcgaagccgcaacgagcgcacgaaagctagacaaccccgaaacgggagcaaaaaccgaacccaaggcacgagaccacgcacagaggcccagaaccgacaacccaacgaaacgca

SEQ ID NO: 189654 - DNA, 505 bp, Arabidopsis thaliana
gaaaaaaagacggcttttggtttaacctcgagcctctccgtgaaggggaaaaaacacgccgcaatctcagcctcagcaacggggatagcccttctggcctccgggaccgaatcgtttttttagccgatgccgccggccgaatcagccgcggtataagaaatcaaccaaagaaacctagtttttttagccggccgccgctatggacattccctcgttctgttaatccttacgtaacccgaagaaaaccaaccccggagccgccggaggagacccttgagttcctcgtaaccgaagatggattaccacgccacagatagatctcgccggatatacatgcaaagatttcggaatggacccgaccaaaagaagcaaaccaaggtaaaaaaagagcctaggagtcctcaaacctatgcaagagctagatggagacgattttagatacccatcccaaaatccaacaaacctaaaatgctcctcaatgcaacgccgcctgagataacatctt

SEQ ID NO: 189655 - DNA, 541 bp, Arabidopsis thaliana
  unsure (1)..(541): unsure at all n locations
gcctgcaggtaccggtcctggattcccgngtcgaccacgcgtccgatacaacgcgcactgatgtttctcatacagcgcatgctcatcggtagactctcacagcgaattggaggtgatcagaggccgatatttatgtaggtcggagagactatgcgttgtatagaccaggcgtaagttacggagatactacaggtggtgccatttttgtgcacgatatgcgtcgattctcaaactcttgatagacgcgggagttctttagcttgtcatgggcattctcggcatgancagatgtctatgagcacgtgctcagtgcagatacatgcagtgtctgtgtgttactgctagtggcncatcggatcgaggagctaatcatactgaaagcattcactgttactgatcagtacgcatttggagttcacatgctggaggtagcctgagagaagagaccggatcacccgttctggtctagagaactatgacgtatgagcagctgcctatgtgcgtgctggaatacagtccttacacttaaggctactgacct

SEQ ID NO: 189656 - DNA, 517 bp, Arabidopsis thaliana
cccctcgggggtcggccgggttcgataaagcttggatatccgaacttccgcgggaccgccctgtggggttaagtaccccccaggaacaaaccatgtagtggtaaaatcctttttgtcttcttttccacaattttctttttgcaaaatttgatgagtggtccaatcttttagtggagaggaacattttgggggttttaggagctttttttattgacgggacattagaaccactcggtgctacccactttctgagcttaccatgtctcctttctctatagacctgtctgaagaaaaccatttccaacaatattcccaagatgtacaactggtgggtttcagtttgaaaacccgcgggggccgtaacccggccttataagcggctgtcccaagggagaatgcagaatagggttttccctccgatgagggtgaaaattgggcggcaccggtaagtaagttcaaagggcacatctcccgtaggttgggccagagatattcccaacccgaaggagccgggttt

SEQ ID NO: 189657 - DNA, 527 bp, Arabidopsis thaliana
  unsure (1)..(527): unsure at all n locations
gccgaaccgaanccgcggccgcgggaaccatccagcagggaaagcgtggcaacccaagaaaaggggcgcccccagacagaggaaccgcggccagcagcgggagccaacacccccaccgccagccaaacacacacacccacgaggcgcaaccagaggccgcacaccggccagcaaacgcaggcccacaacaacggtttttttacccgaggcaaccgcccccgaacagagacgcgcggcggaaaccaggccacccaaaccacccgaccgagacccgcccagcacaacacgccccccacaagcccggcgaggacccgagaacgacacgccaccacaacaaagagaccaacgcccacccggagagacacaccaccccagccagaggagaccaccgaccggcccgaccaccccgccaacggccaaacaacgacccccgccgcgcacagaaaacaccacacaagcaacacgccacgcaaaccaagaacaacaccacaccaagcacgaccccaacggccaccgcaaaaacggcg

SEQ ID NO: 189658 - DNA, 497 bp, Arabidopsis thaliana
agcctggtcctttagaggggccgcccttgcggccgtttttttgccctgggtctggctgtttggaaccctatggggctttccacaaatctgtgtctggggttttttagccgactccacaatttcagagcttgttttttggaagttcttggagaacaaggagaaacttatcctgactttcccactattaactcctcgagttcgtttcttaaaatgggctaaaggttaatgagccccttattgccgagacctgagtacggtgaccttggggctccagaaatcattccctccagggtgtcacctataagatagaaactacccgggtaaggaagggcacttctggtaagggggggacagtcctgaacgagactctgcgaattctactttgatggttgtggcaaaggccttaccgcgaatctcgatcttccttatcacttaaagctgtgtttatggtccttgatgggggtagggttcatgggaccgtattgcatgatgacccg

SEQ ID NO: 189659 - DNA, 245 bp, Arabidopsis thaliana
cccccccgacggtcaacacgggatcccactaagcattttattcccaaattcggcgcgcctctttaaataaacacatcacagggagccagaaagaagcgggcaccctacttaattcctctaccctctttacctaaaaatacccataaagaaacaaggagaacaccaatataccataaaacacaaaacacacactttacatatctctcaaaacacttggcctccatatgggtgcaatatattttttt

SEQ ID NO: 189660 - DNA, 514 bp, Arabidopsis thaliana
  unsure (1)..(514): unsure at all n locations
gaagcaaggtttcggggggggcgggggaggcccctancaaaaaaaaaaagcacagcccaaggaggggggccagttttcaaagcagcccaccgggcaacgcccccaaaaaaaagcgaggggccgcatccaccacaaacaaaagagggggagggggccccgaggccaacgagacgcaagcaaccacgatgacagatttccctcgcataaaaggacgtggggggaaaccacaccaaaagggagaacaagacgagagaaaaaaaaaagaggcgacccgcacggcggcgggggggggcaggcgcgaccacaacaaaaagaaagaacaacgaccgccancacaaaaaccagacacgcccgcgagaaccacagcaacaacaagcagacgcacgggaccgcgacggagggaacaaccaagaggaggagaaacgggaggacgcagaagccgacacaggcggaagaggcacgnacgcccgcgcgcgggacggcccaccacaacggggacagacacacaaaaaaa

SEQ ID NO: 189661 - DNA, 507 bp, Arabidopsis thaliana
  unsure (1)..(507): unsure at all n locations
cccccggggnagaggggaaggaaaagcaggttccggaaggggggacagccgcggaaaccaaacaaaccggcaggacaagaagcaccgtagaagccgggaaggaccacgcccaaaaggaaacgggggccaacccccgggccaggaaagccgggcgcacccggcggaaaaaggaaagcgaagggaaaacgcttcatggggggggggggacaacccggggggaacccagggcaaaaaaagaaggggaacagggggggggggggcaccccccgagaaacgagggnccgccacacaaaggcacaagcaaccaccgcgcccagaacccggaagaanaccccaaagaaggacaaacacgcggacagggggcggggcccccaacagcacccagcgggggggcaccaccaaagggccgcagggccaaccacggaacggcgcaaaagaaaacgcaccccacagagggaacccacccgcccaaccgcagcgcaacacacagaagcaccaagacgcgga

SEQ ID NO: 189662 - DNA, 241 bp, Arabidopsis thaliana
gcaggaacgaatcgggccgccgtacccccaccagacccaggcaaagaccagtcggggccgtccggagcggagacaacgatagcccggaccaaaatggagggaataagctggggctaaccaaccggtaccctccttaggtggaaaggcctccagcggtggaagcttgaaccggggtaaaaagggagtggaccgaggcggaatcccctctcctaaaaggggcggtgccaccaccggaagccgt

SEQ ID NO: 189663 - DNA, 463 bp, Arabidopsis thaliana
ccctcgagtcgcgggtcgaaagcatgtatgaattcggggcgcgttttgactacaacatttgcatcacttatgctatgctgtattatactcttgctatagagaataagagttacctggacaaaacgtacggacacattaagaagtggtcagagaatttgtcacacttttgtcctgtgtatggacgacatagagcttcccgtctctgatcacaccttaaatgtcctgtgcagtttcatagagtttctcattggattcccagcgcgtgcaatgtttgagagaaccttttttttggagcttaagtcagtgattagaggatctggtgtgtaatcgagcacgacttggtctttctcgtacattggttccactgcggaggagcgctggacctggataacctttaagatcttctccatgggaatagatcctgaaatgatggaccgccttatgacagccccatcggtttggt

SEQ ID NO: 189664 - DNA, 524 bp, Arabidopsis thaliana
cggggccgcaccgggggggggcccccggttctcccggggggcccggtccggaagaaataccgggccgccaccacacgcaaaattcctttgtaaaaccccaacttgggtcaaggagagacgaaccacccggggctaatgaattcgccaaaggcgaaaccccgggtctggcggaaacgagaaaccccccttcctccttaaggggtgtggcgaagggaaagcgcggatatattacacacgggcccttaacgcggggggaggggctccagaccgggacaacaggggccccccgaaaggcgcacccttttgtaggccgcaaggggagcggcgtggacggaccccgtccccctcgggtgcggcatacacccacccggccacacgacccgcaaactcgcccctccagagcgcccccccaacagcccccgccagtgacgggcgccatcatggcaacgcagccggtccctttctccatccaacggcgccaaccccgcacggcttccagcgttcgcgcgtgaggctccctcgga

SEQ ID NO: 189665 - DNA, 489 bp, Arabidopsis thaliana
  unsure (1)..(489): unsure at all n locations
cccggggggggggccgtctattttaggggacccctgtcctgagaaattcgcggccgcaatcaagggcagagacaccagctgatttgagtaaaaggttcacagatgattcaatcaaaaaggctttatctcagttgcaattaactctatgagagaaccaaggcagaaactatcatatttttcttgttagagaggggacancnccagcacacaccggaaccaagagaacaccgcggaaaacgaagacgggcacaagccaagcctcagggccccganangcaacccccacaacaaagcccccccgcagaccagcagagcgaccgcaacangcgacagaggcaagaaaaccaccggacaagcgagcgcaaaaacacgcnacgnccaccggacaccccccaagaccccagacccccgcccaccgcagggcaccacagncgaacacagagacgaacnccccaacagcaaaaacacgccccaccgacaaagaagaac

SEQ ID NO: 189666 - DNA, 561 bp, Arabidopsis thaliana
  unsure (1)..(561): unsure at all n locations
gcccgcggaaccggngcggaaccccgggatgacccacggcgccgagaccggccaggaacaaaagccgcgcgaaagaagacgacgataaggccagaggacgagcaagagacccagaaacaccgacagtggcaccccagaaaaggaggcaaaaggggacggagcccgggaaacgcgcgggaccagaagccaaaaaaaagttcctttgngagcgggggggggcagcaaacaaacggagggggccaggcactacgcaaagagagcagggagcgcgaaacaagaagaacggaggcncggcccggcagcgaaagacacaaccacccgcaacccgggaggacccacaagaaggcgggaaaacgcaacacgncgggggagagggaggcggaacaccccaagacagccgccgagaaaaaccgcccgccaaaagacaggagcgagagagagagacggacaaccacgaacccaacccgcgcggagcgcgacacaaaaagggggaccggaacacaacacaaaacaccaacccacagcacgggagggggcccccgcgcgggaaccgcaacggac

SEQ ID NO: 189667 - DNA, 427 bp, Arabidopsis thaliana
  unsure (1)..(427): unsure at all n locations
gccccaaaaaaagggccggcccaggggaacgacaccccaccaggccgaggaaacggaaacaaaacacgcgggagaaacccaaggccgaaacacggcaaagagcccacccacgcgagaggaccnatttttcgcgggggggagagcaggacacgaaaaaccaagaaaaaaccccccgacccagggaagcaaggcaaaaacacacaaaaccccccccaccgaaaaaaaaaaaagaccaaccaacggcccccaccccgaggggcccccaaggagcacagccccacccacacccccaccgccccgggggggccccgccaaagaaaagcccacgaaaacccccacagcggccccacaacaagcgccaacaaaacccgcacccacaaggcagaaaccccccaccacgcgcaacaacccggacggacccgccaaa

SEQ ID NO: 189668 - DNA, 511 bp, Arabidopsis thaliana
  unsure (1)..(511): unsure at all n locations
gggagccgaccgcgggggcggccgctctattttaggggagcccccgggctggaggaatccgcggccgcctttcatatacacacataggggaaacaccatccacatgagacaggacaagatcttattttgatgtgatcaaccccaattcatcaaccatatgaaccaaattcaagctgataatcgattttttttttttgcaagatgagcgcgaggaagaacacagcgcggctacgaggaaaggacnccggaacactccgcactaaaggggccctgaacccgagaccggaacctgcaccggaaactcccatcgctcgttgacaagctaattttttattcggccttgcagaactttcatgaaaccagacgaagacttggggtctttttttattgcctcttgaaactttttgagagggtttatatggatttagaggnctaactcttcctcgcagtaggtttccttgggataactcaacccattgagacaatcttgccatgcacctgggaacaaaca

SEQ ID NO: 189669 - DNA, 522 bp, Arabidopsis thaliana
tacccttattaggggacaacccggggctcacgggggggggggcgctttaaaactaagggattccccgggctggaagaatccgggggccgaaaaaattccaaaccaccagccgaataataatatatttggcaacacacaatttaatacctcaggctaacttggccagccaaaggccaaaggattttataatggaggaataagacgataaaatctttgttagaccatttcataagctcaaggttttggctcctgcctgtccacagagatcctaaagggccaacgagaaatggccaaagctcctgaggacttaatatatctataactgggcagctaacaggttcagcagcaccaaagtccttggttgcaatgagtttccatgtaacagtgtctgacttgttaggtgcattggcctttaagtgtgggattgaaacagaactgaagctagatgatgatgaggagactgggatgttggggacatcagctcgtaggactgtaacgttatgattaggggctctagtaatg

SEQ ID NO: 189670 - DNA, 179 bp, Arabidopsis thaliana
ggggcggggacgcccgagaacaccagggcgcccccaggcccgaggaaaaagggggccgccagacccaaggcgcccaaggaaaacacggccagggcgccccccagaaacagcacacggcagccaaccacaacccagccgggaaggccggacccacaaaaggcaacaggggaacccccaaa

SEQ ID NO: 189671 - DNA, 171 bp, Arabidopsis thaliana
cagctcaacacctcttagggagccgctgtgctacggggggacgttagaactgagtccctgctgagaatttggggcggaaccaagtggcctcaaacacggcaggcgcgctcgtagctgtccctgattcacacttcagtcgatgcgctggatattgtccggggaacatctaat

SEQ ID NO: 189672 - DNA, 475 bp, Arabidopsis thaliana
cggggggggacgccggagttcaccaggcgtccccgggctgtaagaaatagcgggcggcggaaattttaagaaaaataactaaaacatcaaagggccaataaggtgtggcctaatggtacttcttaacaaacccatctaccaagggaagggttaagcattttacaacgggattcacacttgctattaaggtgggggggggaaaaccaggcggaggatattaaggcttaataataccccaattaataaaaagccaggcaacaatgaaaaatcacccttcacggggaaatcctcctcgggaggttaaccctttggaagaagcacccagctaaatgcgaaacaaggatttggaccggacctccggtttgtgataagaaaagcttagacaaaactcggtggtaccacgtgagaactatggttctcccttcttttgcgccctctgaaaggctgcccggaagccgccagactgaagggctca

SEQ ID NO: 189673 - DNA, 525 bp, Arabidopsis thaliana
  unsure (1)..(525): unsure at all n locations
acgggggggggggcgcccgaaatccaccagggggccccgggccggaagaaaaagggggccgccgaaacccgggaaaacatcccccacaccaaggagaaaggaccacgaaaacgccacctgggagaggggaaagcgacccccaggacaaaccacccgcaaggcaagcaaccagaaggaggggccccgcctcctccaaaaaggggggggcggncgcccgacaaccgccggacggcgacaaaaaaaggaccagacccgggggggaggggngggagaaccccgaaaagaaggacccgcccccccggagaggcccacggaacccgacggcagaccagaaaaggacgcacggggacaccgaacccggagagggaanaccgagggccacggggcggcaacggcggaggccccaacgcaccccgggacgaaagaaaagagcaccaccggcgcaacaaaaccagcgcgggagccggacccacaccaacccgacacgaagccaacaaacagncccccaaccccggagggcaagcc

SEQ ID NO: 189674 - DNA, 506 bp, Arabidopsis thaliana
  unsure (1)..(506): unsure at all n locations
accggggggggggccgntcaatacaaggggagccccgggcctgaagaaatacgcggccgccagaaaccgagaccattaaggcaaaagacgggaaccacccacaagcattcggcacaccaaaaagggggataacggcgattagaacattcatgagcaacaacataacggaccagacctttctttttgaaggggggaggcganaaagaaacgaaggcccaaacaaaaacacagaaagaccgaggagaggagcccaaagaaaagaccagagccaccaagagacgcgaaaccacaagaaaaaacgggaaacgaacccagagcgcacccacgcgagacgcccaagcgcaggccgcaaaaaccggagaacgaggcgcacagccaaggcccacccaaaggggggaaagccacgggcaaagagcggacaggagacaccgacagagaacgcccaaagaaccccaccgacagcaagccacagaacccagccacacggccgcccggaaggcccggaa

SEQ ID NO: 189675 - DNA, 354 bp, Arabidopsis thaliana
  unsure (1)..(354): unsure at all n locations
accgggggggggccgcccaaaaccaagggggccccgagccggaggaaacgcggccgccataaagggcgaatcccagggcggccagacaaacgaccaaaacgcgcagggaacaggcacccagacacccggcgaaaaccagaacccccgacccaaaacaaacagccttntttgacggggacgggacccccccaaaacaagcaaacccaagagaaaagacccaccaaccgggggagcagacagagccaggccagacaagggagggccccacaccggaacgacacacagaggaccaggacgccgaacgacccccgagaaccaagggccccgagacgaccaacgcccaagaacccgcaa

SEQ ID NO: 189676 - DNA, 431 bp, Arabidopsis thaliana
  unsure (1)..(431): unsure at all n locations
cctcataagggacaaagctgagctcaccgggtggcggccgcctagactagtgatccccggctgaggaatccgggcgacagtcttgatcgagatctttgcgcgagagaatcactctgattgagtctgactatctctgaggaggtgaggctgaatcatgaacaactggtagaggtgaatttagctgattgatcttgatcatctggatcatatactatangatgacaaaagactatagttgttagagagactaagatgagatatcctcatagcagcagctgtacgaagatctgtttcctgctcatatgtgtccgagagaagacagtttatcctgaagagctcagatggtgatgaacatcactgctactatctcatcctgaagctcttgatctacctactttataaaccacacacattcagcatcttgattgatc

SEQ ID NO: 189677 - DNA, 513 bp, Arabidopsis thaliana
gcatgacgcgcctgctaggtacgcggtgcggaatcgctgtagtatgataccacgcgtccgcggactgcaggaatacgtgggcgcgagatgagagatgatcttgctcctaccacaggacacactgtcggtgagctatacatactgttctgcatcagggcactgactatcaagaatgttcatactggtacgtttcatctcttgcgacttctatgcggtgtcagtctcccatcaaagtgctacgattgatggagtgtgccttctatataacctatctttcgttagagctgataacacgcttactatgcagctgagttgagctgactgctacggttctatgagactctacagtgtatacgatccagatgtggtcgcggtactagataccactacattgcgggcgaggttctcgaacacaaccgatgtcttgacacggaccatacaggttgatgccaccatatgagctgctgcttctgctgacaacttggtggagaagttcactgtatacagacacag

SEQ ID NO: 189678 - DNA, 540 bp, Arabidopsis thaliana
gccaccgccccgcggaggcggccgctcgataacagaggcggcccgcgcgctgaggaaaacgcggccgccacggcacagcacggttcgaccccgacgggacgcgaccaccaaacgccccctgacactcaactccaccaaccaccccagcagaacaagccacacccaaagcggccccacagacgccacagcccactccctctcagagggggggaaaacgaaccgaccagaaccccgagcgatacaaaaaagacagaccccacgtcccgcgcaccaagagccaaaatcacgaaccacagagccgaacccgcaaagaactcaagacaccggcaacccagaccacggaaccccgggacaaaacgcaccagcgggcgggaagcggcccacccaaaaacacccgcgcgcccccgaaaagccggagcacgaaaaacagccaaccgggaggcaaacagcgcaaaaccctccacggacgaccgacaacagacacccaaaaacccaaaaccgggcccaacacaacggggcccggacggaacaagccgcaaa

SEQ ID NO: 189679 - DNA, 464 bp, Arabidopsis thaliana
  unsure (1)..(464): unsure at all n locations
ggggcgccaccggggggggggccgntctgatttaggggagcccccgtgctgcaggaatacgcggccgccatacaccctgacactttaattcctcatacgaggaaaagaccatcaccagcgcgtatgcgtgtatacaaaccagcctattattggagagataaagaccacacggagggacaggcgaagcggggcttcctttttaggggtttgcccccacgggcaaacacacaaagggaggaggaaagccgccccgcagagacggaggggggagaaaacacggcagaacggggccacgaggaggaggagcagcgcacacaccgccggggagcaaggggggcccaaagggaccagccgggancgaggcacaccccacaaagacgaagcaggcccgaccagaggacgggggaggccgacacacgcgcacagagagagggacaacacgggggacccccgggggagggcgc

SEQ ID NO: 189680 - DNA, 536 bp, Arabidopsis thaliana
ccggggggggggacgcccgagtaccaccaggaggcccaggcccggaagaaaacgcgggccggacaaaagccggacaaacaaaaggaaaaagcgcaaaaacccaaaaccacaaacaacaaacagcaggtcgagacacggcccaaccgccaacaagacaagccaccccccccaaccgcgagggagggccccctcccaaaaggggggacacaggcaccaccacacgggcccccgaaaaaaagccaccgccaaggggggggcaaagccaccagggcaacaaaaaacgggcaccgaccccaaggcaacacgcgcccccaaccacaacgagagaaccgggggcacaacccgcgcccggaaacccacgccgcaaaaacgacaacaccgcgggcgaacggaccccgaacggggacgcgccacgcgcccccgggcacgggcgcccccccaaccaaacccaaagaaaacgacccacaccccgccacgccacaaagccagaggccccccaccgaccgccccgccggcccacccccggccccgcccga

SEQ ID NO: 189681 - DNA, 549 bp, Arabidopsis thaliana
ttcagctcgcaataacccttacttaaggggaccaaagctggagcttcaacgggggggggggcggtctagaactaggggatcccccgggctggaaggattcgggggcgggaacccacttcaattttttttaacataattaagtaatttaattggaccattttaccacacttttttggggagtttaagttccaataaaccaaaaatcttaatctggttataccttggaggactttaagctaggaggctccttggaagggcattaccagggtatcgaaaatagcattctgtccaaacgtcttcctgaatctctcaagcaattctcctccatcatttgcctgagctgcgcaatcagccgcttcctttgccattccaatacgagcataagcctcgcctctttccacaagatcagacagtttggggatgtattttagagcttccgctttctcatctgcatcaatgcatgcctccacaaatggacgaaaccccattggtggtctcttttccttcgaaaacttttcaagcgctgcccagtctttgattgtagcgaga

SEQ ID NO: 189682 - DNA, 535 bp, Arabidopsis thaliana
  unsure (1)..(535): unsure at all n locations
gggggggggggggccaccaattaaacaggggggcccaaggccccaaaaaaaaangggcgccgataacccggggggccacaaaggcgccacacagaaacagccaccaggaaacaccggcaagcacacccgacaaaccaacgaccagagccgacaaagacccaccgcggacgccgcggcgcgcgttcctaaaaaaggggggggggcccgccccacacgggcgcaacgacacaaaacaaaaacagcaccaccgaggggggggggcggggcacaccaccaccaaaaacaccccgcccgcgcagccggagaagggcccgcgcaggaccaaggggagcgcaccccgcaacgcacaaccccgcggcagggacggcaggcacccgcgacggagcgcggggccgcccccgcacgcccacacccccagcagcggacgcagggccgacagacacgacgagcgcacgcgaggcgcgcgccgccaccgacgcgaccccacaaaacgcccacaccccgagagcgcgcacgcgcacaaccgaggcgcagg

SEQ ID NO: 189683 - DNA, 218 bp, Arabidopsis thaliana
  unsure (1)..(218): unsure at all n locations
gagcgccaccgcgggggggggcgctctagattcagaggggcccagggctgcagaaaacgcggcccgcgggaancaacacagatgaaacaacccaaagaaggaccacaacaaaagacaacaggaaggagagaacccacagggcggaagacccgggacggccgagagaagtgtgattaaagagttgggacaacnggcaagaccgaaaacgacgcagaaac

SEQ ID NO: 189684 - DNA, 485 bp, Arabidopsis thaliana
  unsure (1)..(485): unsure at all n locations
ggagcnccaccgcgggggcggacgctctataactagaggcgccaccgcgctgcaagaaatcgcggccgccacaggacgagacccgatatacacccatcaccaaacggacaccgcgacaccgacccatcgcagcaggacacgcccacaagacggggccactagaccgaccagaaaaagacgcggaaaccgatgctcctaacgggggggggaaacccaacgaaagcacgaacgacaaaggggacacccgaaccgaaccagggcgccccacgacggaaacacccgccacacacgcccccgcgacgaacccgacgacgagcgcccccacaaacggcggggaccacgagagacggggcacggcccggagcagcgcaaccaacagcacccacgacagcaccagccagggccaaggaaacaggagacacccgcacagcagacggcaccgaaagcgacaaacggaagggcgggacccccccagaccgaacgga

SEQ ID NO: 189685 - DNA, 483 bp, Arabidopsis thaliana
gggggccgccataacaggggggcaccgccctgaagaaaaagcggcccgccccgacaggagcgacacaagcacagcacaaggactgggccaacgaagaccaccagagcgaaacctcgaagccgccgacaaaggtggcagcgccggcaacggccacccacccgggggccccccctccccaggggggggggcaagccaaacgcgcccccagcgcgaaaaaacaacacagccccccaggcgggggcgacaacgacacccccgggggagggccccgcccgaagacaccagcggcaagcgccgcccacgcaaccccgccgccgccgacccccgacaccgcagcgacgcccccgccccgcgacacccccacgcccacccaggggaccgacgcgccacagccccccgggccggcccgaggcccagccccggagacaaaacgcacggcgggcccaccagcaagccaccgccgcaacaagccaccgcagtaca

SEQ ID NO: 189686 - DNA, 153 bp, Arabidopsis thaliana
ggagcctccccggggggggggccctttaattacaaggggttccccgggccggaagaaatccccggccgccattccccaaaaatctttgaattcttcaaacattttatcagaatcaccgacgagattccgagcccggcagggagagttggacca

SEQ ID NO: 189687 - DNA, 450 bp, Arabidopsis thaliana
  unsure (1)..(450): unsure at all n locations
aagaaacccgaaagagcggacacccccgccaaaaaaaaggcccagcccccgcaccgcggcgaggagcgcagcacacaaagcgggggaccgagagacggccaacaagagactttttcctccgggggggggagcaacccaaagcggcgcccaagccggaaacaaaacacccaccacaancgggcggggggggaaaccccacaacaaaaacaaacaaaccccacaggagcccagcccgcccacacgccgcccacagacgcgaacccaccgacaacaccagcgacccacagccgagacgcccgagcaaagaaaaagaacccggaggagcacacgccccaaaagacacccccgccgccacccagacacgccccgcgcggacccgccaccgcacgcagaaaacaacaccggacagcgacaccggggaccacgggcgaagaagaaccaccccacaac

SEQ ID NO: 189688 - DNA, 243 bp, Arabidopsis thaliana
tgaaccgggggggggaccgctgtgtacaaggggcgccccgggccggaaggaatccgggggccgctaaaaaccgggaattgttgtcactatgtgtatgttgattacgagtcttaagacctcaccaccgcccaaacgaaaagattttaacgaacaaaaacagggtcaaaaaaaaaagaacccaccttcataattgggggcgggcccgggaaaaaacaaacctcccaacgggaaaaaagaaaaaat

SEQ ID NO: 189689 - DNA, 268 bp, Arabidopsis thaliana
gaccccaacgaggcccgcaagaaaaaagccacaacggggggggggggaaaccccccaaagagacgcggcgccgcacaagcccacgagccagcaccgccccccagaccccaccagccacgccccgacccagaagaccaagaccagaagcggaacaaccacaaccagagcccgcacaagaaccgagccgacaaaccaaaccggggacgaacagagagggaaaccgcagcaagacaaagacgcggaacggagcgggccagaggaacaaagg

SEQ ID NO: 189690 - DNA, 518 bp, Arabidopsis thaliana
aggggaccaaagctggagcttcaacgggggggggggcggtttagaactaggggaaccccgggctggaagaattcgggggcggcttttaaggccttccccaggaccggagaattttttttaatttggaggaatttcctttcaatttggcaagaaccaaccaaggatatggcatggcaaaaatctttaagggcattatttttttaatttaataatccatggccaggattaagagttccaccagttggatccatacatacatagaacctccttgggccatattcttttggtggtggcggttccacaaaatcttaacccatctggtgaggaaggatggtggcctgtggcaatctcattttctgagagcatctgatgtgagaagtcccatctgttcagtaggatggttcattggtggattctggctccacacattactcagggtggatggtaactctagttgctccaatatcagttcattttccactgatcctgagattaactcatctgtctcaccaatcact

SEQ ID NO: 189691 - DNA, 499 bp, Arabidopsis thaliana
  unsure (1)..(499): unsure at all n locations
aacgggggggggggcgctccaaaaccaagggggcgccccgggccggaagaaatcgggggccggcgcaaaagcaagggcggacctttcctccaaccccttaagaaaaagggaagaacacgggggaccgaacgggcagaaggcgaagacccaaccgggccgcacccaacaagggccaaggccaacatgtcctcccaaagggggcccgggacggggggacccaacggggcaaaaaaaaccagggaaacgcggggaaccgaaagagccaagaaacagggggagaacgcccaaaacccaccaacccaagggcccggccggagacaccgcggaaccggggcccccggaccaggggaccaggaaggcaaaaccgggggacacccaaaaagccgggagaggccggcgagcgcaacccacacagccccnaaggaagccggcgcgaacgggcggacaagccgcacaacaccgcccaaccaagaaaaacccccgaccccagaaaaaggac

SEQ ID NO: 189692 - DNA, 480 bp, Arabidopsis thaliana
  unsure (1)..(480): unsure at all n locations
ggggngggggccgcgcaatacaaggggagccaagccccgaagaaacgcggccgccaaaaaagagagaggaacagacaaggcccgagccccgccaaaggacgccaggagccaagcacagccaacaagagccaagaagcgagaacacaccgcccgggcacggcgggccttcctccttaggggggggagagacaaaaaggcgacacaaaaaaaaaaaagaacaacgaaacgggcgcgcgagcccaccgagggacaccggaaacacaggcaacacgcagcgccacagacccacggaggagcgcagggaccaccggaaagaccaggccgccaagaagaaaggaagagcgcggacaaaccccaggcccacaagcccaccccacgcgacccacacaagacccccggccccacgccccagacacgcaccacaacgcaaaaccagacacgcacagcaggaacccgagccccggagacacaaaacaggaa

SEQ ID NO: 189693 - DNA, 364 bp, Arabidopsis thaliana
ggagccgcaccgggggggggggccgcccaaaaccaaggggacccccgggccggaagaaatccccggccgccacaaccacaaacaccaaataacggcggaacacggccaacccgaaacgcaggtggccaaccacccaatgcgcgccaccacggcccacaccggcagcccgagcgacaagcccggcccccaaaccctggaataagggtgcgcgaaaaccggagggcgagggaagcccaacaacgaggccagaacacaggaagggccaccgggaacaggcaagccccaagagcgagcgcggaagagccaaagaaccaccacaccgcgggaagggcggacgcaccccccggaagagaaccaccggacc

SEQ ID NO: 189694 - DNA, 497 bp, Arabidopsis thaliana
gccgccgcaccggggggggaatccccgttttcacacaggcgcccgtgtcctgtaggaattggcggccgctcgattcgctaaccagtttaaaagcccgaagagtgggtcccattagggctaactagcagcctatggtttcaaccagtgctacaatcaacaacaacagcaacaacaaacacgaccaaagcattcctccctgaagaggctaaccccaagacccgccccaaccggccgacgctacaaagggacccaggctgccgcagcgcgacagggcacaacaaacccccccaaaaggggccccgaaacacaaaaccacagcccgccaagaaaaacgcacagacaagaaaaaacccggcaaacaccaaaaaagacgggccaggacacaacccccaacaccaccgggggaaaaaaaggaacgagacacacaccacccccccagcaaccagcagaaacacacaaacgccaaaggaacccccccagaaacggcaaacaaccac

SEQ ID NO: 189695 - DNA, 443 bp, Arabidopsis thaliana
agctcaccggggggggggcgctctagatcagtgggagccccggtcctgaggaaatcgcgggccccctactcctactcttccttctttctcctgaactgatacgaatcctcactcttttttctctacaccaatgggatttccaaaacctcaacctttttttcgaaaaccggaactagccgtctattatttcgagcacaaaccccccaaagcctcactttggataataaaatggctcccctaatggaaatggcttggatgggtatcagccagactcgcgaaaggtcagcaagcgactccgcccgttccacaccagctactccagaaactctcaaattcttaaaagcttaaatcttttttcgcactttgaaggccctgcgcaccgctttgaccggagaggaggaaaaaaggcgcgcctggacgacaatgagggattgctatcaacc

SEQ ID NO: 189696 - DNA, 519 bp, Arabidopsis thaliana
gctctaaacgactcacctagggagagcatagggacgcctgctgcgccgcggtgcgggagatcgctgtagtaagtaccaggctgtccgcgggctgcaggaattcgcggccgcctaattcttacacggatatgcctcatgatataggatgaaactgaaagtcgttgtagaagattatgtatatgagatcgagttagtcctgagactaaagagtcttatggtgcacaccacattctcttggacgaacaccaggcaccaactacaccgagacagatgtgaaggttggatattgacatctggtatcttaagctcacgatgtatgcatgggcacggagctatttcatgagaagagctgtgcagactcgtaccgtaatgagacaaatctgcatgaggttgtttagcgactctgaaccatgcgttgcaaactgggggaagtgacccgagaggttgatcctgatgagcgagcatcaacatactccaacgtgggcaggtgcactagaaaacaagtggctggtgtactgt

SEQ ID NO: 189697 - DNA, 797 bp, Arabidopsis thaliana
  unsure (1)..(797): unsure at all n locations
gtgacatggatagattggttcagtagtgtcactctcccaatcctctccaagggaggggggggacactttgaaagcccctttggatttaggaccnaacccaggtttttggttttaagngagacccgcaccggggggggggggggtctgaatctagagtatcccccgggctggattaattgaaggccgggacaattctgacgaataaaaaccatatctaccaatcacaaaccctagatgtttgttatcttcttcatccgaagattctctttgatctgtgtctccttccttctgattctcccatttcatttcattgattcttttgattcgattctattcgagctcaattttgtagatcagaacccagaatcgaaattgggataacttggacaatatgcttggtaacttgttgatctgaatttgagtgaagaagacatcgaattcaagtttggtgtgggagattgtttttaatggagtgatgatgatttaaaggggaagggaaagggaacgatgactggattgggtgttcgatccagtagctatggttccttggagaagacggtacttaacggcgtcgttttacctatccagatcactaccacgacgcgttccaaaccatttgagatgccgaaaagattgaaaagggggtttgggcccttggggccccgcgggaacccttcccccccatttggtttgttaagaaaagggggtcccaaaccaggtttggggagggaccttggtgcgtttccccaggggaaacctccgctcttttttaataccaggccaggaattggggctaa

SEQ ID NO: 189698 - DNA, 132 bp, Arabidopsis thaliana
gatagtgataacgaaatcctaattccatggccgacaacttttgttcagtgagttacggtatcttattcgagcggacgtcaaacaatggacctcttaacgccgttaataaaccaccgtctaaagatcgacaca

SEQ ID NO: 189699 - DNA, 1097 bp, Arabidopsis thaliana
aaccggggccgggggttttgggtgtttgagaagaaaaacccgggggcccaggaaaaagagggagaagggggggaaggaatattacaagcataggagggaagggaaagcggttttttttttttaagaaggaggagagaaaagaaaaaaaagagagggggggggtttgaaagaaggaaagggggggtaataaatggagtattggttgatttattaatgtattgttaaatagaagtgtggattgatattgagataattgagtgggagtagaagttgtagtgggtggggtattgaaaagggaagggatgaagtgggggatttgatttaaaatagagatgaatggtatggattggtgtgagggaaaaaggtttgttgaagaattttaatattgtttgtgtttatatttggggtgttgtatgaggggaggatagtgatgtattagaaaggtagtatatgggaggggagaatattatgaatgtgatttggaatggggaggagtaagagattttgatgggggtaagatatgatagggttggttggttagggttattagttaatatgggaggtgggtatttaagtagaaatatagggaagttagtagatagattaatgagggttggagtgatattataggaggttgtgttgagtttaattagggatgggtgattagggtagtagatattattgtaggggaagttaatattggatagaagggttgatagaattgtatttaaggtgggaaataattgaaaggtgtgttattggtaaaaaatgtgggaataatataagtatcggatatgagtgttgtattatgggtaggatatttttgtgggatttttgaaaaatatttaattagtatgatagatgatagagtatttgtgggatagttggattaagtttgttgtttgctttgttgtaaggtagagggaggttatgtaggatttatgttatggttggatggtgagagaagataggagttagttatgtgggggtagatagtggtggttatatgtagttggaatggttggagtggttgtggaaattaggaagatgtaggtgatgtgggattaaggaggaggagggtttgattatggtgtggt

SEQ ID NO: 189700 - DNA, 1095 bp, Arabidopsis thaliana
cccccccgcggccggcgagccgccctgagaacatagtaggaccccccgggacggtatgtaattttgacggcaccgcctatcaccaagggggacccagcttggggggcaggggcaaaccagtccgagaaacaggaagacatgacgcgctggactagacttcatctcatagctgacgctttaggaataaacaggaccagctacatagacgaacacacacatgctaagtagctgaaaccgccgaagagaggggtccacacgtaggtcgagaaacgggcctacgaggacccccaaaaccaacatggccaaagaagaaaaatgtccttgaacccccctaagcacataggaaaaacggaccccccagggggagatttccggagcgaaccccacaacctaacccaaaattggaagaaaaaaacgccctacccttggtagaattgtggaggtccccgggcgggagcacttaaaaagccccagtccggtataacgggcccttcacctcaatcaactgggcgaagaccctaaatgcacccctccccgggggcacaagaaccccaaggccctcctcagagaaaaaccggaacagcaggggcctccccgcgaaccggcgcatccggcagccccagggtcagcacttaaagctagaggcccacccctaacaaccacacgagcctacacactaagggcggctagggatggctacaggaacgggcccatcggcggaaaaaccagtcacttctggtacacccccaaatcgctactcacagcagaaaattcttaacccccactatctgtaccacagggaaaaaatcgggactcaaaccaggcagctctctgaacggaactttaaacggcctgggcacacaccaataggaaaaacgggaatcctggtcacccacccaccagggccattcgaaacacagcaatccttttagctggggtgaaacacatacctcccagggcatccatgcccaggctcacacgcgggcaccagggcactcgaaacacaaacaacattaaggggcccggaagagctcaaccgtaccgagaaggcaacctcaaacggtccaccccgggcacccgggaactccaaaaaac

SEQ ID NO: 189701 - DNA, 1210 bp, Arabidopsis thaliana
cgagcccgcggcacgcgaggacgaacccagggaccccaaagcgagagaggagtgtacgtattattcacaggagagacacgcacaaccccccagggcgcggggggcccaaaagcagaaaaacaagcacacggcccgcaaagaacccgaggcgacacaccccaaaaaccggggggcaaacccaaaggcacccacccgacacgagcgagagaaacaagcaccgacgagggaaccacagcaaagcggaccccccagcagaccgcgggcacgacacacaccagacacgcgaggacaacacaaaacgaaaggaaaccgaacacaccgacgagagccggaagcgcaaccgaccagggcgaaaacaagagcaacggacaacaaacgaagcaggacaacccccgcgacaaaaaccgcccggagaccacgcagaatcgaacaaggcaggccgcgaaacggaacggggaccagcaaaacagacaccacatagcggaagcaaaccggagcgggaaacacgacccaagaggccacacggccccgcagcgagagacgcccggaccacacaaacacgaccgaactcgcggacagagccacgacaaacacacgggcgccggcgccgacacaaccgaccaacgcacgccgccgaggcactacgaaaaacgaccagggcgcgccgccagagaaggacaccagaacgacaccgcgccaccaagcaacgacgacggccgcacccaaccaccggggcaccggcaacaagccaacggaacgacaactcgcgacggaacagcaaaacccgggaacaaaccaccaggacggcccccaccccgcaaccgcgcagacgggcggacccaggcgaccacggaacacggcacaaaaaaggactaaaacaagacccccgcacgcggcgccgcaaggcgcacagaagcagaccaaacacagccagccaaaccagcaaggagcacccaaaacgcagcaatccaaaggccgcgaacacgggcacgaaagacaacgaaaccccacacaaacgcgacaacggcgcgcagagcaaaagacaaggaggggggcccagacaggcggcggccaacagggggaccaacgcccaaacacccagcgacaacacaaacccgaaaccgaggacccaagcgcccccccgaggacagccgccagccaaagaagcgcggcgacgcggcggggcggacaccgcaacccgcaacccaac

SEQ ID NO: 189702 - DNA, 229 bp, Arabidopsis thaliana
acatgaactgccataaattttccccaaaggctaaaccggaggtggaaaaaatacgatatgatcggaatggttaggtgtaaagagagcactcctaccataaaacttcggtataaccgctgaaaacctataggtaagcgcgaatggcttttgacagtgaaaaggacccaacgtaccttagcaacaatgcaaagctaagaatgaataccatgtaaaacaatcttctgtgcat

SEQ ID NO: 189703 - DNA, 854 bp, Arabidopsis thaliana
cgatttgcttgatatcgaatccgcggccgcggctgatgtcgctgctgctccggtggtgaaggatataacctattaccgataaggaggttactattcctacccctgtggcagagaaagaggaagttgctgctcctgtctctgatgagaaggcggttccagagaaggaggtgactccggagaaggaagccccagcggcggaagcggagaaatctgtttcggtgaaggaggaagagacggttgttgtagctgagaaggttgttgttttaactgctgaggaagttcataagaaggcacttgaggagtttaaggagcttgtaagggaggctttgaacaaacgtgaattcactgctccggtgacgccggttaaggaagagaaaacagaggagaagaaaacagaggaggaaactaaagaggaagagaaaacagaggagaagaaagaagagacaacgactgaggttaaggttgaagaagagaaaccggcggttccagcggcggaggaggagaaatcatcagaggctgctccggttgagaccaaatctgaggaaaaacctgaagagaaagcagaggtaacaaccgagaaagcatccagtgccgaagaagatgggaccaagaccgtggaagcaaatcgaaaaaattatcgtctcttgtttcaccaccctgaattccgcccgtaaccaccctgtccggggttagaaaacttgtccccccggttggctgaaagccagaaaccccagtgggaagccccgggaaagaaaagtcctttcaattcttggggggaagtttcccaacttaaccttccaaaggaacgaagaaagaattcctggacccttgaattccctcaaacgcaaaaattt

SEQ ID NO: 189704 - DNA, 920 bp, Arabidopsis thaliana
cgctcaatacttaccatttggtacagcctacctcatgggagggtttttttattttattttatccacatacgtagcgcctacaatagggcatcacacggtgtttgtttggatatggtagtggcatgactactgactaaactaggtgaccgtgtacacttacatacaactcacctgattcgctgagttttagtctatgtaggtctggcgagtacaggacgactaggtttaggaacattgatataatatcaggcggtcgccagtggtaaatgaatctacttcttatcatactgtaaacatgactctgggtggccgacagcttcttgcgagctatagacgtctcttctattggcactagcgataggatgactcttgtcacttgttaaagtttaacccggtcttgtgtaaagggttcttgggaggtactatttgtagatggacctcaatcgggcattggccccgttctcttgtccaatcgtattgaaccatgggtggtcaccatctgtatttacgatcgccaggaaatgccttttcccttgtagtcgcggggggccttcgaaagactattgccgcgggacgtcatttatactcgactttcttcagatgccggttgacgaagtttttttcatcgggatagacacttgggttccataccattctgggagcaaatcagtgcacagatctttcaaatcccatgtttatatgggacgcttggttagcagtgttacccaaatttctttaaaaatgcacaagggccttttgtcataccccctattttatttggttggcaaaaaaaaaataattgtgcctttttgttagggaaaagccaacccccccattttaaccgtgtcccgttttcaaaacggaggctttgatatcccccccttttagggtaggggtttcgaccaccttaaaatcttctc

SEQ ID NO: 189705 - DNA, 1019 bp, Arabidopsis thaliana
aaaaaagcccaacaaaggtggcccaccgggacctggcaggggggcggaaccaagtggaccccggggccgcctgtacccctgttcagccggcaccatcaggcccgaggagaaagcacaactaagggatcccgcacagaccccagaggaggcgcacagaacgcccgacgaccaccgagaaaacagagccggccataccgaccaaggtaacacacaaaacggccgggggagccgcacgagaggagcgagaacggaggccgaaacaaactagggggagccagggccccccagaggagggacttgggaggaaaaaaccaccgcgaggcaaaccgccgcccgaaaaacccaggggagtaacccttcgcgggccgggacacccacacttctaatgaccaaagggggcaaccccaataggaaagacacatgcgccccgccaggaaaagccctccctttacaaccggcaacgcacggccatgaagacaacccccccgggccgggaaccctggcaagagcactggggaaaatgccccaacggcgggaacacctccttaatgccaagcccccaccttgttcatggcccgcatctccctaaacgggccaaccagggcctcggcccggcaaaacccaattccaaacaccgacccatacaaccccttccatgaaggggaaccaccacagccccacgggtcgccgccacagaacacagaacgcccgaaaccaaatccaggaggcttctcacatcccggaggccacaactacgcaggggggaccttcacaatggcgaccagggacaacacgggaacacccgaaaaagcccccggggccatcctggggggatgggaaaaaccgcgccccctaatggacaccgcgccacggccacggaaaagaaggtttcggggggggggacaaaaaacccccaaagatgggggaaaccacccccaccaatttaggcgggggggaaccccaattacgagagcccacggcccaacccctgggaaagaagggaacccggccctcacccg

SEQ ID NO: 189706 - DNA, 558 bp, Arabidopsis thaliana
gtccgcgaccgccgggcgggttcagggtgagtcagcgctgaaggtttatctttttacagagaacgcgcgtagctcatagatccgcggcgagagggtactaggatataatatgctaagagacaacaacgtagatagggcgtatatatcaaacgaggtgacgcctgaaatggtaacctctcttcctttgtaggaacattaggatcacccatcagatacaacatcgttgtcgcaggtgaaaatgccgatgtcgtaaccgttgaggaagttaacaatagaggctggaagtgaaaaggtctttgctttggtggcattgaagaagaatgaacctaccgttgctgtgacctcacccacaggcaacagaatacaggaccacagcccatacgggacaactaccctgtatagtgagcagagctgatgattgactatgcttctcggggaggataagtacaacagagattccggcgaagcctgcatcagaggaggataaatcatatacggtgttccgcctgaatcccaaatcaacagagcttgcgatgagagcatgcacacttcccccac

SEQ ID NO: 189707 - DNA, 702 bp, Arabidopsis thaliana
cctgaggttagcaggaacgcctgcccgaaccggacgggggacgctaggacgaaccagagccttttcttccgttttagagccgacccacggcagatagtaagcgtgtggaacggatgcactggtcccacacaacacaccagaggagggcgaccagtggagcccttcgcctgaagacaccctatggcgccccaacgtagggcacacacaaaacaccatcctacattgcctcctcgaagaagcgtctagacatgctaaggacaaaggagccgagactcaaatccaacgcgcccacggctctgagcgaccctacgacatcccgcaaaactaagcatccgggctcgacctagcccgaaccaataccgggcaaccccaaaggatgaagccgcccgaggcaccaacccagagagccgcttctggaaccatggcaagactggcagagaaatgaaggaaaagccgggataccccaaagcaggggaccgtctttatggaacgcggcgcatgaaaacatcgggaggggcgaaaaactggaggggtagccctatcgacccaaaaagaccaaagcattccagctggaaaacacaatccgcaaccattcaaaaggcttcccgggaacaaggcttgaatgagttatggccggggcacaaatcccaccccccccgcccaacatggctgcctggaaaaaacccctgtgcacgtaaaaga

SEQ ID NO: 189708 - DNA, 1091 bp, Arabidopsis thaliana
  unsure (1)..(1091): unsure at all n locations
ccctcgatttttgaattatcgaaacctctagacactcgaattcgcggccgccttcttcggctcctcagcaaacaattttttttttttagcctcctggggcctagtacacattttgataggtggtatgaagccaccctaacccccgtcttcgctgctactagttccccctacttgacggaaactctatggataaggcgaacaaaccgctgtggttaaaattggtgaagtaaattttgcactcccgtcctggaggactgaaatgattaaacgataacggctccggcgtttcttctataccgtgccgaagcgggtgaaaagagagcttggcacatacatcatcctgtacccggtcctcacctcacggtgccaacataagagccaaactctggcacgctcagtaacatctactaattaatcctacttactcctcaataactgacctgctcctctggagagaaacacctattgcggcagtaccatccgcttccctaacactgtgagtacgngccgaacaccctctaggatcaggcggccttttctatacttacagggtatatcccacatggagcgtcagtactagatacctcatcccccgcgcgtaagcatctggaaccatgtcagcccttgtctttactactgagggaatgcacactccacctttttcatataatatacacaataccctagtcctcttctcacaagagtgcaggcagatcgaatctcatcaccacggggtaatgctcataaataggaagacgccgcaaaatctctctatcaaccgtgtgcgccccctcacctcagcctgtgtggggctgccaaccaaaacctcatctcgtcttttgtggtgcgccaggcaaagacccactattttgggtacgggccttttctacaaatccccactccaggggcctactcctcctactctttctcttaatacacaagaatcgtctgcaacctttgcccaataatccctctttccttaaacccccgacaacagatggctgcgaaaacctattttctggggcgctctggcgccgtacggaataaaaaatgcgccccggacctgtttataccggttccccacctttagg

SEQ ID NO: 189709 - DNA, 781 bp, Arabidopsis thaliana
aaccttcgaaaaagcctccggaggatggcccgaaggcgcgcccaaccctggagggcggtcttagggggaaggtaagcgccccacagttttttgacactttttcccggacaccaaacaagccccgagttgtactggggggtagtccagtgtcacccaggtttacacggactgatcaacgaacactagagagtcacccaagcaatactcacaaaccaaagcaggtccacagccgcgacaaacgctcaccacaacgcgaacccagtcaataccgtaaacaagacaagctagaacgaaaggaggagcaatactatccactaggatcaaatcgacgaatccatacgtcaaccagcagcgtaaaaccgacaactcttgaagatcacacagaatcagacccccgcacaaggcgataccacccctctacatgccgaagcgcagaaccggctgaacgtaatgtgaacatacccagttatggggagatgggcacatgggagagaaaccaacaactcaggacgacaggcccagggtccattaaggcggccgcacgctctgaaatgaagcctcaaaggcaggttccccgaaggatcaggtacggcaaacaaggtccacaagacgaaagaccgccactgctacagacgaagacacccatgtcctgcgaacactgagtttcaggattgagagcacgcgtcaagcgacccattgccagttaaggcttattgacaccatctggccaaacgaacagtcagcgtgctataggaggtcgtaacacgctcaaccatgacga

SEQ ID NO: 189710 - DNA, 298 bp, Arabidopsis thaliana
cggccttaaggagggctctccctttaccgttttataattatgtgaaaatatctgataaccactgggtaaatgatgatgacaggtatactctaactgatattttttattttcactaagccaagacagcacttagtgcattcccagatacatagtgtactgattcctatcgtgcgacaaatctcgaatgacacatgatgccatatgtaaccttctttccactggcactacggttagaaatcttataacagattctcagccaatggatatcaattagtaatggctcattaaggtttcgacc

SEQ ID NO: 189711 - DNA, 698 bp, Arabidopsis thaliana
aggtcgacgttatcgatacgctagccctcgaattcgcggccgcgcttaagcatattaatattccccgtttttttctcttataaaaacatacaatcagaacctaatgcttaagggctgcccaacattcttccgacctgaagaacgattcctccccccataccccgtgctttccccgttccccaattctacattccaccaacccccttagaaacctcttaccatagtcttccttacccttacaaacccttaaacccccccccggctaccctctttcctctgtcctccccccccaaataccgcgaatttctcttcggctcgcaaattccccctttcccaacaacaagggacctttccccctgcgcaggccgaaatcctccctcgagcaaatcttcgtgcccgccgccgagcaggaccacttcttccatacattcgtcaaaaaccacccctcgcttgctggaaaactccccccttcctcgcgacatcctaccccccgcggattgtccgtgacccctttggaatttttgaaacctttcaaaaaccgccccaaatccacacccggccgggaaaaaccctcggttctcccgcacgggggcggctccctaacctgcccctctaccccgaatttgcactttttcccgactgaatctcgcgcaaaaccctaaacatccttcttctccgaaaacccggataaaaaaaaa

SEQ ID NO: 189712 - DNA, 940 bp, Arabidopsis thaliana
tggataaccttgccctcgaattcgcggccgcctcatgaggaacttcagaaaccagctatttttttttgttgctccggcggtgaacgacaaacctattaccggtggggaggttactatacctacccctgtggcacataaagaggaagtcgctgctcctgtctctgatgagcaaggcgggtccagaaaaggaggtgactcccgagaacgaacccccccctgcggaagcggagaaatctgtttctgtgaatgaggaatagaccgttgttgttgctgataacggtgctgtcttaactgcttgaggaagtttctaacaacgccctcgccgcaggtcaatgagctctgttttggaggctttcacccaacgagaagtccctgttccgctcactccgggcaaggaaccaaaatcccaggtgacataataccagcggtggaaactccagacggaagagaaaccccccaggacgaaaaaggcaagaacacctcctccctgcaggtccaagggtttgaagaaaaagaaaacccggtcggttcccacccgggcgggagggtggtgttaaaatctctccaaaaggcgttgctccccgggttgacaaaccccaaatcttgatcggagaaaaacccccgatagaaaaacatcaataagggtaaccacaccccctaacaaaggccattccccctggccccttattaaattattgggaccccctccttaccccgggggcaaggcaaaattcttaagaaaacttctataccgacttgtctggtgttccaccccacaccctctcaattatccccgcctccgtgccccacccgtgtgcgcgggtgggtacgatataactcgtcccctccggatgatctttgtgggcccacaaatccgcccgttgtgcacctccccggccaaaaaaattctcttgcgaatctctgggcggagaggtttccc

SEQ ID NO: 189713 - DNA, 938 bp, Arabidopsis thaliana
aaaatgcgcccccccgaaaaaccgaaacaaaaaacttttaagttacacccgacacgacaggcctctaatcccggcagcttgacaatttccgagctaataaaccagcgcccttgcacaagcaggagacatacaccgcgacctcaagaccggcccaaggccgcacaccgaccgcgcacaggcgaaaaaggaacaccgacaacaaacgaaccagaactaatggaaactcctactctaggagctatccccaaataaagcttcccatccgtaagaggagtaaaaaaggcatcaatcgacgcgcggcaagccctcacggaagaagccgaaatggcaacgcaccgcacacgaaaaaagaacccaaatggccaaccggccccttgggatggcaaaaccagaggaccacaccaaaacaacaacgaaccaacaacactgcccagaacacggaatgaagaaggcgccacaacctcaaagcccccaaccacgacaggaagagaaaccaacacccggacacctagcccaagagggtaaagaggacaacgcgcaacgccgcgccgactaaacaacaaccagtcgacaacaaacaagccacgcttccaagcacacagtcaccagcatacaaccaacatcaacaggccccacaacagactgactgaccccacagcgcaaacaccgatcagccaacacaaatcaataccacacttcggcaacaaacaacaacaccgaccacagcaacaccacaacgccccacaagagtggcgacgtgccaccactctcacacccgaaacaccgccagaaacaacaacacaaccccaccctgacacacaagcacaacacctcgcaaccccccaccagtgccgcatagcacaacgagacaacgcgcgacaacagagacaacccaaggaagcacgacgcgggcaaccccacacaccaccgactcaaat

SEQ ID NO: 189714 - DNA, 947 bp, Arabidopsis thaliana
aaaaaaagcctacgtatagatgtgacgtcaactgtagtctggaccgcattggcgcgtggcgctctccaaacaacaaggaaacgcttttttcccggttttttagtgggaagggtcgaccaccccttttggcccgcaggctaacttcggccacaataagtactaagcttttgaccctctccctacctcgagagaaacctagacaatgtctgcgtgggtgcccaactttggtgagatctttatgtctcctgatggatgacaccataacgggcgctcaactatacgccccaatgctccccgacgcaaaggcacttaatcacctcggagtccaattccctgtttgacgttgtacccgaggcaacagtgtcaacgtttaggaagaccggatgatcctagttggggcactttacttctcaccgataatcggcacgtatcattgatggtccgaacgctatacctttggcccctacagataggacgtcggacgagtctcgactccgcaatactggacaagctatcattgccaaagatgcggataccgtgtaaaacagtattactgcaccatcgatatcatatcttaccagtgtttcccttcgccgtggccctcttggaaatttgctaaatggcctattacgggaccactttgggtagcaataaatgccgcgcacatcttgattatacctaaaggtcgaaaaactctcggacggttcgtgtattttggccacattatttacgacattttttcctgtaccaaacatttaactggccaattcacgcggaaggcattcctccactttatgctaggctcaaagcgaacggccatcttctcattctgcccctttgagatctcagcaaacactcgtcgcaacttggattctatctatccatctgaaaaccccacacactcattctagagccgtccaaacactgttgctcctgcttcaggtagt

SEQ ID NO: 189715 - DNA, 445 bp, Arabidopsis thaliana
taaggaacaccccgcccaccaagacacggaagccagccgacaccaggcagcaccccaaacccttttcgttttttacacacggaacaagaaaaaggcccaaaagaaacagggcgcaacgcaaccacaacgcgaacaccccggggaaagccaagccaaaaatcaagcacgcacaggaaacaggaaaaacccgcacaccggaaaaccaaaaccccaagaacacagaagacggggcactcccacaacaacgagagggcagaggggacaaacacaccccgcaccccgcacaaagacacgggaggaacccacccagaaccgatgcgggcagaccacgacctgcacaacagaccccccagagagggagggcccggccacgaggccacaacaaaagggagaaagggcgaacaccgggacgggcaggaaaaagaggaccaccgccgcgagaaaa

SEQ ID NO: 189716 - DNA, 1068 bp, Arabidopsis thaliana
gtggacgttagggaaaagctagccctccaatacgcggccgcctcaagaggaaggacagaaatcggcttttgctcttgttgctccggcggcgaaggagaaacccattaccgaggaggaggctactataacctacccctgtggccgagaaagaggaaaccgccgctcctgtcctatgacgagaaggcggcgccagagaacgaggtgactccggagaaggaagccccatcggcggacgcggagaaacacgcttcggtgaaagaggaacagacggatagcgtagcctgagaaagcccgttgcacgaaccgctgaggaaggctaaacaaaacgccccttgagggaggccgaggggagctctggcagggggaggagctttgatcccaaaaccaagaaaatatcgacctggttccccgggtccaactaccccgcgaatatagcggagaagcagctataacacccaggcaggggacgcaaacgaaacaacaccaccgaggcgctgggtaaaaaccccatatcaggacgggaacagcatggcaatctccccccgcagcgggaggcaatgcaaacgaggaaagacaagtacccaacccgctacctcggagagtgattatagggtgtcggaacacaaaaaaaagaaaaaacctcacggttggggctttcaccacgcccgggccgccgcgaggggaggcgcaagaaataaatcaaattccacaacagggcttggccatctccgggggcgggagccaccccaaagtaccctggtaggggatgaaaacacaccctgcaagcagagcacaagccaacctaggtttcggcccacccccgaaaaagagagcgttccccgcggcccctgcggaaaaaacgggaacccccccgacaccgcgggaacagccacatcaaagaaatccgaatctggtggtgggacacccccgaccttgcaatacccgccggtgagccaccccgggtgggaggggcaaaaaacaccgccctccgccatgctcgcggggcaaaaccaccggcgggaaaacccggcaaaaagagaaacccgacccctgcggggcgagtctacc

SEQ ID NO: 189717 - DNA, 1055 bp, Arabidopsis thaliana
agtaaagggaacacaagctggcagctcccaccgcggagggcgcgccgctactacgaactagatggattcccctagtgtctgccattatattcaccggcacgcacaaccatcttcccacttgccgaaattcgtgggagatcacataacaaattcattccttctgcatatccaaatgcataccgacatttctaacaacacaaatccagttcttctaaaagtccgaattacaaacagaaataaacaaaactcgcttaacttccgggagcacatccaaatctctctcagtaatacgcaatacaacctacacactcccaaagcgttctattacgaccacgcattttcgattccaccggtcaccacttttactatagatagcaggcacgcctctttcagaacaacaggagatactaccgcttctgtcccccatgcctcacatttgcaacaatcctccaaaagagcattcatccggcaatagctgtaacacatcgctggacaatgaacacacctatacatcagaactcgcggatctaaagaaaaactcgggcctaacctctgaaagccctcttgacgcctctaaaaagcaattccttctgcaaagtttccagagaacatccttcacgctgaccatgcctttaaacaaaaccatcccctaaaaaaggaaggcttttaaagcccacctaaacctggagacctattcgttcaccttaaacaaatctcatctcttactgcgtggaaaatcccaatctagctggccacaaacccaaagaatacgctcgggaaaacctatcaacaatcaataataataaaaaccccacccccaaaaaaggctgggaaggggcactacagccctctcctccacgggacccttccacacagctacccttctcatactcccaaacatccctttctaaccagaaccctccaggggaaaaaattggctggacaacaatgggtttttcccacaactccatttataatcggaaaggtcaagtgtcaacaccgaggggaaaaccgggcgaaattctttccccacccctagaaaaatacgccgtaaa

SEQ ID NO: 189718 - DNA, 917 bp, Arabidopsis thaliana
  unsure (1)..(917): unsure at all n locations
ccccacaattaggctcttggttctctgtcaaagagcccccacacacaccatatgtccctgacacctgacccaataacctttcgcacaattcacagtaacaccccaccattcgcacaccccgagacagtcgcccatcgtcacaacaaaatgcacaacacactctctcatcgactctccatatgcgctactactcgtacatgacagcagtggaagaacaataatcaccgccatacctagaagcagcgctggaaaacccctcacattttaccaacacaagaacaacntcggctactattcttgggcaaaaaagacttcgaacgtgcaataaactactacacattacttcccttctagccatcgaacgcatcaacctcaccaactgttacccaaacgccaccgaccccctctctaaccaaaacctccccgctttcttacaagcactccccgaaagggcaacatcctcaccccacaccttcttcgcaacggaaatggtcggtccctccaacgcattgtaaacccatgactcttcctctcaaacaccaaatcccatggggctatcgaaccccaaccttccttggaggccaaccccgccgaacctctaaccaagaaactttgggctacacctcctaaaccccctactctgtaaccccctccgggaccccaaataacgagtgccttggagaggaagaaccacccaccccggtcccataaggtatccaccgggggatcctcctctaaactctaagtcccccgcgcggtgctccgcccctccggcccccaacaccaaaaaccctgatcccgccatcggactatatcaacggactcaacacaacacccctacctcgcggggcggaacaccaactcccgaatctattaagaacattctcactcgacacctctaatcttcccctacccgg

SEQ ID NO: 189719 - DNA, 759 bp, Arabidopsis thaliana
tggaaaagctagccctcggattcgcggccgcgctaaagcgtgtgcacatgatgatctttttactgttttaacaatgaagagagaaaatttgaagcgtcaggtgtgttgatggtctcgatgatcgataaaggtgcttttccagacacatgaaaactggaatcatgcgcatcactacttatggagacattttggtgactggggcattgggacttggctcgcgcgcgtcggatggtcgatcctcgaatcgaggtctctgcaggaatatctggccaatgtgctgtgctcggctgatcgcgtgaatctgtcggtgggcgtcatagaatattgaatgaccgtgggaattgccttctctatcaaacttcgtttcgtgcctttacttaaaccactgacgcagctcctccaacggagactgtgaattccttgggaggacccatcgcgtctagcggttggcgttattatgagcctcaaaccggagtgttttagagaccggtagaagcgatacgcgctgctttgaactaagagcgtctgatatatgagtgccttgacccatcaacgaatgcttttactgtttctcatgagtgggagccgatttgggcagacccgggtatccaggtttggctaaaggtgggggttggtacaatactatttttggtcgctccggtgaacatttgctctcctccctcccacggaaggggtgtggttaaacaccaccttttcggacaaagctcaactttttcgcgcgcatttggttatctcttt

SEQ ID NO: 189720 - DNA, 577 bp, Arabidopsis thaliana
cggagacgcacgaggggcgagcgctctaaacaaaggaaccccatttttccttttttccgggcctgaatcacaattgggaacggagacaacgaaaaaaaatccacaaactcaacaactaaaacacgaaacaaaaccatacaatcatcgacacaaacgtacaccacaaaaccaaaaaaagacctactgtaaagaacgggaccagagcaaaaacaacgtcgcagaaaaccaaaaaccccacagaaaaaacgaaccagaacagcccaaacaaaacaatccaaaaaggtactcgtgaacgcatagcgccctctgggtcaacaaaaagatcccacacacaaaattaccctccagaaaaaacccccaaaaatagcacacaggaaataaccctcaggaaaaacaaggaagcgtcccaatcccccaaaaacaagcataagcatggaccttgaaacaataactaccgccggccaaaataccgtaaaccagtcgacaccaccaagggcctgcaaaaaaacctttaaaagactcttaaacccaaataagaaccccagggggaaatacaccaggaagcccaaaaattacc

SEQ ID NO: 189721 - DNA, 857 bp, Arabidopsis thaliana
cctagatatagaatgcgggccgcaatctataacataggattgccggagtgttttggtattaaagaatttaatcgtgaaaatgaggaaaaaggatataaaccgataaactctcctaagtagaaataaaaaacgatcaataaactcaaaactgaaattacaataaaggccaaaacaaaaatgaaaaaccttaggaagatcacaaactaaaaagcaatgaaaaagatagggaaaaatgaccacaagttaagagacatttggatgaaactagtaaccaacgagcattcacaagaaaaatctgaaaaaacctaatatattaaaaaagctaggccaataataataaaaaggtcatgggaaaaggccaaaaagattaaatgggccacttgctaattcacgccccagaaaggccaatacaccttgaattattttcaaaggaaaatctcaaaaaaaaaacccccaaatgcaaaaagaaaattcttaaccgcttggaaacaagaaggcaataccaaaaacggcgagaaaattccttactcaaaatgaatggtcaaaagaaaactttatctttgggatttggggggaaacagtaaaaaatactccgcttggtattgattgaccaactgaggaataaacctctattaagggaaaaatttgcctgtttaaaaaaattaggcagttcaaggattaaaaattttaataaaaccgttttgaaaaaaaaacaattaaaaactttaaattaaaagaaggaattcatggggaaaggaacaattctacacaaatgttataaacccccaatgggtggaaaaccttaaaaaaaccgtaaataatttaaaacataataatataaaaaaatggactcaatg

SEQ ID NO: 189722 - DNA, 505 bp, Arabidopsis thaliana
aaaaaggccaccaaagcgggggccccaccggggcgggggcgcggtgtgtggacttatcgggatacccacccggacccggcagtttatttcgattgttctccaacagaccccggaactcacacctatggacacgagagacagatcaacataacacccatattacgaatccatcaccagagactagaatgagtcccaaacaaccttctcctatatacagaaacccaataggtgcgatacaccacaccagacaaccgttgaaggccactaagggtattacacccacaggattgctttggaagagacggaactccataccaagcgagaggagaaatggctgctacgtcgagcagagcctactatcatagccggcactggaaccggcgctacccccgcgagtttctcgactgattgatactacacttcttctacgttaactctgcggaaaccggtcgtcagaatcggatgaaaggagaaacctgcctgtggcaggaccgatgaggggtac

SEQ ID NO: 189723 - DNA, 620 bp, Arabidopsis thaliana
tagggaaactggagccgctggctggacccggtcgggaattcccgggtagacccaggcttccgcgtcttacaataataagggtcaggaagagacccttgactaagtgtgcatgtccaagagtggtaaagtcggtaatcccgctaaccgaaaatgagtctatcggtatctatgctggtgcgacgacacacagtctctggaaagtaaactttgtattgggatacgacacccttttggtcgatattctgcggaacgtactgcatgctgagctcatgcatcgctcctaggcctgagaggacttaatctggctctgcagcttcataaaagagaggatgtggtgcgcattcagtcagtacttgcagagactggagtcttgtcagagcttgcaacgtactctcttgcacctaacaactgctggtgacagatggtagcgctcatgctactgtgagccatgaagcattctggatgatttatgatcgccgagcctgagacacctggacacctaggtgtggaatacatgggacagttgatcacagtactatgtgactctggactgctaacgagtcaacaaacacttcgactgtgttgtcacagtcaggtgcgaccttgacatccgcagactt

SEQ ID NO: 189724 - DNA, 651 bp, Arabidopsis thaliana
gcagtaccgcgagcggaattgtcgggacgacccacacgtccgattcggggaacgaattagtgaagaaaaggaaccgtggcatagtctacctctgtttgagtggcctagcaggaaaacgacctgggtacattacttactatcgttctattgatcattggatagaaaaaccccctctgttaagaacacattctacttccatatcatcctcatttacttgaaatcctacggacagtactgaagaaacatctgaaagacctctacgacagagtcaagaacgccatgaacgtgctgcttgatcagaaagactacgggggctgccttcagtctgcacatcgatagacctgaatacttcgaacagtgacgaacgtcgacttcaacagatcaacatctctttgggacagactagaccgacaaatgctacatgagcgtaaacctcaccgagatgatgactgatcgcggggaccctaaggctgacatgttactgatgtatagtactaacagttcattacaccatcttcgacgctgaactgcacacatggaaaacctcactcgtagagcgctctgcaactgatctatgaccgtgtgacacgttgacctctactgtctgatgctgtcataccagagaccgcttactagattgatcatgcttgt

SEQ ID NO: 189725 - DNA, 314 bp, Arabidopsis thaliana
caggacggcccggcacttacgactttttttcgccaaagtatagaaaccactgactttctagaaacttttaacccgcaaacacctagaaaatatccacaccacctaggaatcaggtacctctcatctaattcggtaccaggaacttccctctagcaaggaatccccgtacccacgggacaacaccactccggtaaaacgcactacggcacctctaaccaacggagcagacaaaataagttataccaggccttaagttcttccaggccccacttcagcgcttctagagaaaccaagaacaggtagcactactcccc

SEQ ID NO: 189726 - DNA, 968 bp, Arabidopsis thaliana
  unsure (1)..(968): unsure at all n locations
aaaggcccagaagcnggagcccccaccgcgggggcgcgcccatagaggacccaaggaagcccccggggcagcacgtatatttcgccggatgttatgaaccacccgcacaacaacaggacagggaggaacaacggaggaacaaaggagaacgcggaagcgacaacaaccccccgacaacaccacacgacgccacgagaacacccacacgccacaacgaacaaacccaaagagccacggcgcaagaaccaccagaggcacaaacacacacccacacaagcacaagcgacaaacggccggagaaacccaaggcggccgaaaaccggcagcccaccccgacgaaggcaccaaccgcaagggaacgcgccacacaaagagcgaaggacccaccagagggaaacagccgcgacgaaccccaccacaaaaagaggcgcacgaacaaagagaccgagagacaccaccaagaacaggcaacaacaccgaaaacgggcacaacacgcacacaaaaacaccaccggggacggcaacaaaggagaacaggacagtaacacacaaaccgacagaaagccggaaaacacgaaaaaccggcacgtatcaaaaccacgagacgcggcagaccagacacaccgcgccccacgacaagaacaacccgaaccaaggcacaacgcacaagccgaccagccgcgggggcaccaggacatgagaaacaaacaaagcgaacacgacaacagcaaacgacaaccgccaccccgcgagacacagcaaggaaccccacgggagacaagcccacgaccaacgaacgcaaaagcaacgaacgacaaccggaaaaccgaccaccaaaaaccaaggcggcaaccaaccgaagacaaaccgcacacggacgacggccccccaacaccaaccgcacccacacacacccacaaacaaaggacaagcacagaccccccacacaaaagacgccacggacaaac

SEQ ID NO: 189727 - DNA, 859 bp, Arabidopsis thaliana
ctaaaggggcaccaaagctggaggccccacacgcggggcgcgggccgctctaggaactagctggatacccaccggagctgccatgtatttatctgcggtttttatgacatggacgcgaaacagctcgcacatgagtgaactactgtaagtgacagggcaaccacactaaggaagacatacatatcttcgcgacagcatcacactataggtgcggaagaaataacttactatgtagaatagacaatacgctcatacatgccctgcatccagatgcgtcactgggagacggaccgcccactcgtccacacttagggaggcagctgaagaaaccgccgatggtttcagcgcaacgcaaagccgaagactcggatacacagcagcccgagaccttacgctgtatgcccttgtcatggcgagacccgttcggctatccctgtgcaggtcaccatccttaatggggcctttagggggctgagaggcactggcttcgagctcgattctaagacggacaccattgtggactagcggagagccctggtgagcgcaacggaggcctctcaatcgacctctcgactcgatgaaacccaacaaatgctggtgactggcggtttgctattcggaccaggacccgagaaatgagcttgtgggagtccgtcgccattcggaaattcctcaaggattggatttagcacttgaaggagttgggaagtgagaagaaaacggcattaggcctcttgggggtcccgtcttgcggaatcatgggggcgataaggctcgactagaaccccatttgcgggtttaaaacgaattttgccaccgtatcggcttgcggggtgatacaaaataatacccttttgaa

SEQ ID NO: 189728 - DNA, 398 bp, Arabidopsis thaliana
  unsure (1)..(398): unsure at all n locations
acgaaccccagacgcccaaacgaaaaaaaaaataaacaagaggcccaggttttaatttcgaaaggcacgacacaacaacaagggggggaaggaggggcgatgaagaaacagaaacaggcaccgaggacacaaggggacaaggggccgcaagaagaccaacacaaggcgggaaaaacaagaaaaagagggaccaaacgcggaacgaaaaaagcaaaccaggcaccaacaagcgaaaaagaaaaagaaggcaaccacaacaactacggcgctggagggggaaaccaaaagaaagagccgggggatgacataaataaaaattcaccaactcggataggggagggaaaaaaaaaaggntcttcctactcgctgagaacgggagaaacaggaagaccggagaa

SEQ ID NO: 189729 - DNA, 405 bp, Arabidopsis thaliana
  unsure (1)..(405): unsure at all n locations
cccaccggggggggggcccctataaccagggggggcccgggccgaaaaaaacggagcgccagaccgcgccagaaacggcggcaacgaggccaagcagccaaaccccagcccagacccgcacgaaagcgaccgggcggggaacgacgcgcagcgccagaacaaggcccaaagaaataggtgaataacggggggacaccnccaaagcccagcaccccggaaaaacaccaaaccccaggacgacggagccggggaagcccaagaacgaaaacgcgagccacacgcccccgcgcaagccaggccgaaaccaccaggggggaaccgaaccggacggcgagggacgaccacagccacaagcggcgcagagggcagagacaaagagaaacggaaaaaacgaggaaccccaaa

SEQ ID NO: 189730 - DNA, 402 bp, Arabidopsis thaliana
  unsure (1)..(402): unsure at all n locations
actcctagggacaagctgactcacgggggcggcgttaacagggatcccggctgagatcgggcgtttttgatttaatacttctcacacaacaccccatccaacaagcaaaccacccattgagatcaatactatatacaactatttttaaattgttccaataacaatactttttgtcttctgattggatcaagatcaactttattgatttgacctgagagcacttcttttcttggagtctggttgtcgattgtgatcacaatctntcccggttcacccaccttaaaagaatcggttatcaccggttcatcggttgatccaatcttccgtgtcttagagacgatcacagcatagcttccttcggtggttggctcanactgagctccgtagctcacatcagcaccc

SEQ ID NO: 189731 - DNA, 266 bp, Arabidopsis thaliana
agctcccgcgtgggggcgcttatactagggaccccggctgcagaatcggggcgctttttagttttattcatgtctcacaacgagacaactcgatgccatgcacagcaaacccagcacttgtgaattcaagagacgtagtcgtacagctaatttatgagagacatggattcccgattgacaaagcacatttttccgcgtctcgctggattggatgtacagacagacctttattgagtttgaacatgaagcacttgctttttcaggag

SEQ ID NO: 189732 - DNA, 476 bp, Arabidopsis thaliana
  unsure (1)..(476): unsure at all n locations
ctcaggcgtcccgtcctggatgaatgaaggaggccgctgcgtcgtgttgctgcctcagcttgagatgaaggaacacgtgctctaccgtcaaaaacagggatgttttttagcctgatttctggggcggaaaaaaagggtcttatcagaccaggaaagatttcgtggatagaggggtcaagcggaaaccccaggaggcgggggaacaccacacaggcagcngccaaaggcgacgagccnaccaacacaaagcccagcaacccagaccccggagagaaggacgcgggcgcaaacccgggggaggggaagngggaccaaccagacccaaacaaaggaacgaaagggacgagcgccaaagggggagaccaaagggcgaaaccaccaaagggcaccggccccagcccagcccggaacccgggaccaccgcagaacccccgagaaacacacgggaccaggacaacggaaaggacccgggcgca

SEQ ID NO: 189733 - DNA, 153 bp, Arabidopsis thaliana
gcgcggccgcggggcggcgctcgagacacaggcgcccggctggagaagcgcggcgcggcaggctgagctagctagaagaagaccgactcagcgcacacacggagggtgtagctgacgttggagcgacaagagggtctatcagaccaaagagag

SEQ ID NO: 189734 - DNA, 133 bp, Arabidopsis thaliana
  unsure (1)..(133): unsure at all n locations
acacccacctaaggggactaccgcggagcgcacccggtggcggcgncgagaacacaggagccccgggctgcaggaaaacgcggccgccagaccaaagagacccctgagaaaagcaacatggacacagaacagc

SEQ ID NO: 189735 - DNA, 170 bp, Arabidopsis thaliana
  unsure (1)..(170): unsure at all n locations
tcgctctagtaactaccaggactgcccgtgctgcaagaatccgcggccgcctacttcaatcttttagagagaggaacacgnagaagtcttgtcgacacggattctctctgtgaactgccgtccaaagctctgagtctttgcccggtattatatggctttggtagcaaaga

SEQ ID NO: 189736 - DNA, 491 bp, Arabidopsis thaliana
aattgaccctcactaaaggggaacaaaagcctggagcttcaccccggtggcggggcgctttaataactagtggattccccgggctggaagaattcgcgggccgcgttttttacgaaacatatcttatttgggtaaaagcggaaccacacccaaaaatgcattggccctggttttatccataaaaaaggactaccctgccggcgattttcggtagacgcctctttctaaagacgtgcttttggttaccactaatttaaatccatccgtataaccaccacttggcttttgctttttgccccaaaaggattgtttacaacggttgaaggccccgttggatccgaccctgggattccctataatattgccatttggttcccgggtctttttggcaggcattaatcaataagggttctgaatcagaatgcgccttagccggatcttaaacggaaactggttcgagatggaacctgaagttcaagatcttgagggga

SEQ ID NO: 189737 - DNA, 527 bp, Arabidopsis thaliana
cagcttatacgactcactaggggagctggtcgcctgcagtaccggtccggaattccgggtcgaccacgcgtccggagatgtaataagaggagcagatatagagcgatcatcattgtgagagtcatctacggtggtggagaaccaccagatgcatacatcaacgcctgttagcggcggtggtagagaagagtatcaagatatacgtgtcttagcatagagtgtggagagaattagtcatatgccaatgatcagctcacgtcgagtctgtcaactgagcatactgtgaggtcacgagtacgatgatcttgccgtagtagtggctttacggtagctgatccttctatcgtttctagccctgaaactggatctgctcgctcgagttactcctcttgtagatctatgaacttcgtatcggtatactctgaggtatcatgttgctttgagctgatgatggacattccgttggtggttgacgaagagatttaacattggtatactcaatgggttcttaggttatgggcgttggt

SEQ ID NO: 189738 - DNA, 342 bp, Arabidopsis thaliana
agcgtccgtgaccggaataggcgccccacaatgggagacacaaacaaagaagactcgtagtacctttgcacaaggttgtgctgagccacaaagactgggactcggcgaccaaggccgatttttatcaaaggggcccgaacgggctaaacgtaggcacttacggggccccagccaggggcagacgaaggcaataaggcagccgaaagaaaacgaactcggatcttgttcaagatgaagcgtcgtaacccaaaatatctaggaacaaagaccaatagtgggaagagtggctacagattggacaaccctaacccgcgccaaagagggaatggaaaaccccctatc

SEQ ID NO: 189739 - DNA, 187 bp, Arabidopsis thaliana
gagctccaccgcggaggcggccgctctttactagaggacccccgggctgcaagaatacgcggccgccgagagaagagggaaccctacaacatgagacacaaagggcacagacagcatacgagaagacgaatgatctcaacgcatacctaaaacagaccggcgcctaatgccgcacggcctggaaaag

SEQ ID NO: 189740 - DNA, 120 bp, Arabidopsis thaliana
  unsure (1)..(120): unsure at all n locations
cggccagcaagaaaacgcgggcgccaacagccagcaacgacacagagcagaccaggaaagaagagcaacacagngaaggacncaccgcccccgagagcaaacaaggaagcacacgggaca

SEQ ID NO: 189741 - DNA, 362 bp, Arabidopsis thaliana
ggggaaaaaaaccggttttttggtttatgaaaaaaaacccaagggttggaaattttccctttaaacaaggttttttttttcttttccccccccgaagccaaggcgggggccaaatcccaaaaaaactggggtccctttccgggaacaaagttgggggggaaggcccccgccttgttgttaaccgggcccgcccaaggggcaaaaggggtttttttgggccccttccccgggaccaggggtttaaccaaaaatcccaaccttgggaaccttgccccttttccggttttgggccccttcccctttaactaaaaaaatgcccttggggggggggcccaaccccagggggccaaaccccccccggg

SEQ ID NO: 189742 - DNA, 438 bp, Arabidopsis thaliana
aaatgagaaaaatgaatattactattcaacgtaacgtagtattggtttcatacaaaaggtaaaacgacgtaaaatgaggattctacattttacaatcatcttatactggaaaggcttttgcctatatgtattacggcatgttaatctcgatattagaacacttgcatttgcgccttttcttctttataccaaccagcaagaaagaatgtaaagatttcatactcaggaagccaccattaactcggtttagcttgttgaatctgctggagaagtgcagctgctagctgtaatgttgcttgaagacgcttctgtggattagcctctgtttcttcttgttgttggctgttgctactttgtatctgtacattttgattttgtggagttaccaattgaggtatgcttggtgtctgcgcatgttgcaaatggctgaaacttgct

SEQ ID NO: 189743 - DNA, 328 bp, Arabidopsis thaliana
gagagtaaagaattttttattgggttttactggaaattatatctcgaaaaacaaaaggggtacacacggagataaattttacagaagtggaacagataatgatacacagttcacacagtaacgaagcagaacgacttcaatgacaagacgaaaacccaggatgtgataatagttcatatttcttcttcaaacaggtaacaagcccgacccgtatgcgaatacagctcggatctgttttgtggaggttcttctacaccaggaacatgcataccagggggatgctgatacatttgaaccggaccgggtggggtcatgtccataataaccc

SEQ ID NO: 189744 - DNA, 405 bp, Arabidopsis thaliana
  unsure (1)..(405): unsure at all n locations
tttnttttttttttttttttttttttttttttttttttttttttttttttttttttttttttttttttttttttttgggttaaagggcccttttttttaaaaccaaactcccagggggcggggcttccccaacttggcgagattccctttttcccaagcgaaaaagggcccttaatttcccaatttattggggccctttttccccaaaatggtgaatgaccaattggggaaaaaaaaaaacttattggggggctaaaccaaaattttaacatgccctttgaacatttccccccttggccccggggaattcaaaggcccaagccccaccccgggggcgcaccggaaaacaatctttgggctttaaacggggccttttaaaggacccttaaaaaaaaaaactccaaa

SEQ ID NO: 189745 - DNA, 359 bp, Arabidopsis thaliana
catcaaaggaaagtagaaaagctttatttcatgcaaattaacaagagtaacaaaatacttaaatacatatataggataacatcataaaacgaaaaagatagcaataacacaagttacacaactgataaaaaacagggaacaatgatgtttctgtagaagataaaaacgactttaattccattgtttctacataagctcgagcatgtttgctttgcctggaggacgttccatcatgcggttttgctgttgctgttgctaaggtaaaagaatggtatttagaatcgataaattggacgaaagcgcaatgccacaaaatttcttggtgacagttaaaaacttcgacatattgagtaccattt

SEQ ID NO: 189746 - DNA, 107 bp, Arabidopsis thaliana
agataatattattgttatatgaccttatatccatgaaattacaagacactgaagacgcatcgccgccgtcaacttacaagcaccatcccaaatggtggaaatcaacg

SEQ ID NO: 189747 - DNA, 323 bp, Arabidopsis thaliana
acttgaaccagcctatgctcggggctgaaagaatcaaaagatcgaatctttcttaatttagataactcaaaatgacgagctgattctcaaagcataaacctttgtatacagacaccaaactaaagttgaatgtctccgaagagattcggattaatcgacataatatgcttctctgcattgttcttagctcatgagagatctcaagcaccaattgttgctgaatcttttccacaatatcagacacaacaccttcagattcaccaccaaaatccaaccaaagacatggctttattagatcagtttccatgatctgatccaatgat

SEQ ID NO: 189748 - DNA, 424 bp, Arabidopsis thaliana
  unsure (1)..(424): unsure at all n locations
tggacgcagtccgttcggattcggctcgacacgcgtcgagagtgaaacagcttcttcgagctgatggaacacagctatgaacctgctagttgagagagaacaaccttgccgtacctactgaccagctgattccgtgtgagagcgagacttcatctggagaagatttggagaaattttgggtcgagtgatccatggagggtgtagtgagatgacatgatggatgatctgtgagatgatttcggagaaaacgctgtattcttcactatccagatcatgacccaaaaggagcagtcctcatccanaaacgacgatctcattcgattctgagacggatactttcaggcgacataataaatcttttataatgtatttggtgttaaattggtagtatgaatgaacaggttcaatgtaagtaatctgtgtt

SEQ ID NO: 189749 - DNA, 247 bp, Arabidopsis thaliana
  unsure (1)..(247): unsure at all n locations
aaaaggagcggcacaaaaggccgagaaggcggcgcaccccaagaagacggagggacacgcggacgcccaaaaaagcaaacgaggacgcacacagcgcgcggcccccctccaaaaagagggaggcgaaancncacaacccagaaagaaagaagcaaaaaaagccacgcgggagagggcgggggggggggcgccccccaaaaccaaaaaaggaaccgagaaaagagaacgcacggaaaggagaagccca

SEQ ID NO: 189750 - DNA, 455 bp, Arabidopsis thaliana
aaacgaaataaaccatacgaataatttaaatgtatatatgtacaagttaatcacaaagaaacataaccccaatgacagccttttttctcaagctaaaaactaggtaagcaatcaccgaactaaagtccaatgcctaataaacctaatgatcttatgtacatgtatattatatacgaactaattacacgattaaaaacactagacgagtaatcaatatgccactcttcaatcacaattaacaaataaccttttcccaaatttagctagtatataaatcttcccagaagatcaagtcatcaagaccatcacacgctgacttgctaccatccatcattgccggattcatcatcattggataagaagatatctctggcgttgcggttgtgttcacatcggaactcaaaccggtttcttgagacacactcacaagagaatgctccaacttgatcatacct

SEQ ID NO: 189751 - DNA, 371 bp, Arabidopsis thaliana
ccccacgagagcagggagaggagaacagcccaaggagaggggagcgccacagacgggcgacagagaaaatgacccaacagggcgcgaacaccgacgaaggcgaggaccaaaagcgaggcggaaggaggccctcccctgtggagccggggagccagcaccgcgggcggaacagacgagcaaaaaaaaaaacccccccccacggggaggggggggggaggcccccccaccacgacaaaacaaagggacgcacgcgggcaaacaaacacaacgacggcgggcgagaagaagccacgccagaacgagagcggagcacgagagccccccggccgagcacgagggacacacgggcacgccagcgacggggcgccagg

SEQ ID NO: 189752 - DNA, 306 bp, Arabidopsis thaliana
aacaaaaaaaaaacccaaaaatgggtttatgtttatttcaacccctttgtttttaagggttcggcaaaattaaaaaaaagggggtcccttttaaaagcttcaagggggggaccctttttgggaggctcaaaggaagggaaatttttgaatttcttccccgggttggcccatacaattgccaaattttttttgctcacccccgcgggggttttgccttttccggggggggttttaccttcccccccggggattttgttttttattttgtaaacaataccttttttgggccccccccttttgggcccc

SEQ ID NO: 189753 - DNA, 372 bp, Arabidopsis thaliana
cgtatgaatgataaatggttgtacccaaagtttgtttcatccctaagcttgaacttcctctttgcactgagggtcctgaagcctgccgtactaccccaagatttagtggagaggctgatgaagtgatgtatggacacacatgtgctgtgatgcatttgttgcgggatctatcgcactagcatgatcttcctgttcagacaagagcactgaaaagctctatgttgcgatgctgcgggcataacccgtaagtgaagcgcaatcccgccttccaccaagagctgactgagctctctcaagccgcgttacatcatacatccatatagaacgttgtcccaacgattcgcagctgctttgtgtgaaaatgggatatga

SEQ ID NO: 189754 - DNA, 333 bp, Arabidopsis thaliana
acgaccaggtcaagctggatccgaccggcgactaccgccgccgcacgttcggcgccaccaacctgtctgccgccggcatctggaagctcaacgatgcagttgacctgcgcatcggcgtggacagctccgagcgtgctccgaccaatgaagagctgtacgccgccggcgcgcacatcgccacccgctccctggaaatcggcgatgccaacctgaagaccgagcgcggccagcgcatcgagctcggcatccatacccacagtgatcgcctggacttctccgcgtcggtctaccagaccaggttcaaggacttcatctatctggccgacaccggca

SEQ ID NO: 189755 - DNA, 271 bp, Arabidopsis thaliana
tccttttttttttttttttttttttttttttttttttggtggaatcttttttacatttcttgtttgttttttctttttttttaaaggggaagggaaggttttatcactgtctcctaaaaaaaactgtaagttcaacaattaccccctttttcttggggagcaaataaaaaagcggtgggaaacaaaaatcccaaatacttattccttttgggaaaaatctaaacttgaattagggaaaaaaaagcttaagcccgttctccacaaatttttt

SEQ ID NO: 189756 - DNA, 489 bp, Arabidopsis thaliana
  unsure (1)..(489): unsure at all n locations
gcagtaccggttcgggattcccgactcgaccacgcgtccgatgcagatgtgcgtgagagcactatgtgcaagtcatctacgctactaggctgctntgtctgcctagacgactgatggagcttgcgtcgggtcgaataagcgttactgaagtcatcatcactctctgcgaaactggctgattgctcatcagcagatcctgaagtatctggtatgtatcgcccatcttgaaggtgtcgctttggtaattgagttaagctaaacatgacagaangatctgatcttcttatttgatatnccacgcgagaagttcgctcgtggagatctaggctctaattatgtggctacaacgattacagccagcaagccattagccatgctaattcggtcaagtagagacatggctttgctatctgtgcagcaattactatagttgaaggacattctgctggatgcagtgcgacacaaggccgtgatccacgattgcatgca

SEQ ID NO: 189757 - DNA, 188 bp, Arabidopsis thaliana
gcgcacgcggtcgggaccagacacgaggcatcacgggagcgaagcgccgaaggccaagggccgagacttggttaaaggggcggaaagggagaaggggacgggacaaagccggagagcgagaggaccgaaagcggcccaagaaacgggaaacaggacagagaaacgggaagaaacccgagaggaaaacg

SEQ ID NO: 189758 - DNA, 244 bp, Arabidopsis thaliana
cgacacgagcacggcgtccgttcgcggccgcaggatctacgcgcaggaaccctagacacccaccgacccacggtcaccgactgccaactgcagccgcagacgggcctcagtcaggacagagcccccggcgataaagcggcaccagagccgacgcccgctctacaggagaaactctgtccgcagcgacgggggaggacaacaagcacggcaccaacccagacacaaccgcgaagaggactccaga

SEQ ID NO: 189759 - DNA, 466 bp, Arabidopsis thaliana
ggcagacacgagccagacgtccaatgcgagcacgagtttcattgaaatgggaggtaaggcagctgacagacagagcagagacgcggagtgaagagagagagctagaccgccaaccggtgaagcatggataaacggcgctccgagcatgcgcacaaagacgcgacgagcgagtcgtagtgacacaggcaacggcttctgaccttgtagacggccaccaacacccgctgagctacagagcaagagcagcgaagactacaagtggggaaggagatgggccagtggaatgccggatcggacaaccatctgagtcctaaagaatcaatagcccaacggaacagttggacctacaggaagaagagaacaaaacgctaagggcagcctaacacacgaaagcactggagctgcagatctcgataaacaggttcggggacagcggaagactactacaactctagcctcaagagga

SEQ ID NO: 189760 - DNA, 276 bp, Arabidopsis thaliana
aaagcaaattttttaaaggggtataaatccttcaacccccgggggaacaaagggcaaacttggaaaaaaagacccccaaaaaaaactaaaccgcccccggggggaaagggcctttttcttggaaattggaaaacgggaaaacccctaagggccctggggcccccgggggaaaaaaaagcgggattttaatcctgggtttggggcctttaaaccctttgataaagggggtaaatcctaacaaccaaattggggacggggtccaaaatccagtaaaaa

SEQ ID NO: 189761 - DNA, 190 bp, Arabidopsis thaliana
gaagaaaatacctttcaagggttggatatgtatagcttataattagtatctctgcaaatgaagcgggagcaatgaagctcctaacacaacagaccagatttagaataaatttttataaggaaaaacagactccacacagcctttgctatgacacaccaaatcactactcatcaccttaataaaacatata

SEQ ID NO: 189762 - DNA, 131 bp, Arabidopsis thaliana
acttcagctgccgagtcttctcctctctctctatcgctcaagtggtttctgcttcgctggttttgtcttccttcgacgactcacttttgcagattctcataaattcttcaaagctttgagtcttttttcag

SEQ ID NO: 189763 - DNA, 332 bp, Arabidopsis thaliana
aaaaaaaaaaaaaaagtttttttaaaaaaaaaaatcccggggggtcttttttttgccccttggggactcaaacccggggtttaaggattaaaatttgttttcaaacaatttttttttccttctaaggctttttggggggagtttccccggggggaaaaggggtaaaacattttttttttttttccctcccccaccctaaaaaaccattttgtttaaaccggttttggcccttgggcttctgggggggggacaaagcttgataaaaatttttttagggcggccagggtttccacaaaaaggcttaaaccggggcggggtttttcctccccccc

SEQ ID NO: 189764 - DNA, 320 bp, Arabidopsis thaliana
caaaaaaattcccctttgggaatttttggaaacaaaacaaaaaaaattttgtttgaatgaacctcccttttgaatttgtaacaaatcccattctaagatttgttttttttttaggaccccccccaaaaaaagaaaaaaaggcccgaaggggaaatcaaacagttttagggacccggtttttgggcggtttaattccttttgaggggttccaacagtgggctaacctttttcaagcaagtgataaaaaggccgggttttccctgggccgtaccaagggggctttttccaaaggcccccagcgtttaaaccgggggccaaac

SEQ ID NO: 189765 - DNA, 320 bp, Arabidopsis thaliana
aacaaaaaacccccaattattttcggttcggaaaccattttacaaactttttttaaaaaagggcccacaacgggggaggggaacaccttaaccctggcaataaattttttacctaaaaattttgggcattagaagaaacccctttggggggagatttaacatattgggccgaccctttgggcataaagttacgggcgggttttttaaaaaaaacagggttttaaaaaaatttttaaaccttttttttatgaagtcggaaatggggaaaacgataattttgtgggcaacccccaccgctttgtccctttcccaatgggggc

SEQ ID NO: 189766 - DNA, 119 bp, Arabidopsis thaliana
gagtttctagggtttctggattcggtgcttcggacattctctgtctgaatttcaatactaaatcctgatcaactcaatgatgctgggtctattgatcaaacccttatgcaatccatgga

SEQ ID NO: 189767 - DNA, 759 bp, Arabidopsis thaliana
ataaacttttaggaaagccgcgccgccgcagtccggccggaattcccgggtcgacccacgcgtcttttgtgtttagacagaagagatgagactctttgatgcaggcttgaaggctagaacgcatcagctacagacggacaattgagacagagaaagactgaagatttgcacccgactacaaagatgtaccaggcgggaactgggcgccactgcggaggatggacaggatgttcctctttgccggaggcaggtcccaaattgagaagcgatataacttctctttactctttactgtaggtttatgtgttgatttcaacattacctggtcgcccctagttttttttctttctttgttgattgactctatttgaggctcgttgttctagagctccttattttttaacctataacaggaatgtttgcctatatgaaaatcctttctttccaggtcaaaccatttagggcggccgttttaaaggaatccaagctttactttccgcgtgtcatgggtaaccgtcttagacttgtttcctattggggggctcacccttgaatttccgaaaattccaactagggcccgtcatgctttttatacacagcggattcgtgtgaacggggggagaaaactcccctgtggttttttttccccacatttttaaatttcgccttgggtgcagaatctattccccccctttttaccccattctggggcgttatttagcctgtaataagagccccgatccggatgggccctttccc

SEQ ID NO: 189768 - DNA, 523 bp, Arabidopsis thaliana
  unsure (1)..(523): unsure at all n locations
ccctccactaaaagtgtaacaacaagcctgggaggccttccactcgtcggntggccgggcccgtcttctaagaaacctaagtgggaatgccccgctctgtgcctggctttttaaanttcccggcgggctccggctataaagtcaaaaccccccctttaaattattgggccccatacccttttaaccccatgtattaccctgagaaaaaaatccttacaagatcatttttcgttcgcttttttctactggtcaattatgaaggggccgctccagtgcccgtgcccgcatacaatgctctctgatgcccacagttccttcccttcattaccccggcttgccactctccttgacccgttcttcagggacaccctttttccccatggctttgcattggggaggggataatatccccaccctcttgggcaccgggtgcttttttatagtaacaatatcgccactcccgattgcagctaacattcttatggcgaaccctgctgtcacccccattttttacctcgggggt

SEQ ID NO: 189769 - DNA, 279 bp, Arabidopsis thaliana
actaaagcttaacataaagtctgagagactaccacgcgacgcgtggcagggccggctcgtagaactcagtgagatcccaccaggactgcatttatattccttttcgcatacagtcaacaggatacacgaaggagcgaattcgggtctatgccttcgcaacaattgatatccatccgacatgccggaaagtttttcgactccagttctccgataaattaaacatctgtggtctacaggcacaaatataacagtaaaccttgtctttgagaacacccttta

SEQ ID NO: 189770 - DNA, 502 bp, Arabidopsis thaliana
atcccgggtgcgaccagcgggcgagccaggaacaagtcctaggaacagaggggttttcctttcaaagaggggacgacaaagacaggaagctcaaaaaacgacattgcgcccgacgacgacttacggggaaaaccaggagaacaccaaggtaaggaactaggggaacgggtttaggaatgttcttaaatgaaggccttcctggtagcaaaaataaggtacaaaaaaaggtcagggagagacaggtccgagctattaaaaagcgagggaaaattggccaaaatcgtgggaaacagagaacagaaggaaactacagcggaacacgggggggatgccctacaagggggtaaatagaaaactcgagatgtagggggggtttggaaaaagaagtttccccaaaaattaataaaagatcaaatctccggaagcaaacagataagggtgttttaaagaaaaaccggggggtgagggaaaaaaaatttgggactcatgtgaaaaatacgag

SEQ ID NO: 189771 - DNA, 615 bp, Arabidopsis thaliana
tctcgaattgacccatccacccacgcgtccgatacacagcaaccgaaacacctcgaagacaggcaaattttatatttattccaccaaccaactctctcgtaagggcgactttggcacgtctccaagaatcaacccgctactaagactgctcttaactatagactcactactgaagccgaacccatttcaccgtgctgacgaaactgaactcaaggtatcgagagaccagtgcttactggatgagtactgaagcttttttaaagaaaacaccttccatgcatgccaaccaactcatcacggaatactccaatatttgcaaaggtcctaagaaccaatcttgtgtacgtttacctggacgatgagccatgtatgttgcttggttatgacacatcgctgatggtacgagcatctctgtcaatctgatgaccaaagtgaagaaaatagttcatcacggtgactctggaaaagttgcacacagatacattaactaaaatgtgatcatgaaggactaacgtacagatctctacttcctaaaaaaaactaacccagaagtcaatacaacattttcaactatgccgactattacctgaaaatttcctgcataacggtgagtat

SEQ ID NO: 189772 - DNA, 297 bp, Arabidopsis thaliana
gacccgcgagtcgcgagacagagaggacaccgcaaaacaaaagagttttgcaataaaacgcgcgcaaagaaccacaagaccccaaaggaaggcgaacaacaaagacggacacaaaaaaagcaaaacgccccgggccgacaacctggaaaagaagaagcgcgaagacgcgcgagaagacatcagagcacagcgccagacgccgcggagcagcacgaagacgacggccgaggctcggccaccttgtcgcccacgacaacgcgaagaagcacgccggcgtagactaaaaacgaacggggc

SEQ ID NO: 189773 - DNA, 1180 bp, Arabidopsis thaliana
caaccgggcccctttttaggatatattttcgccgcaaccagtcgcaggccttttgggacgacgtcgtgtgcccgagatcgaaactccgaagatcaatacgaccagcacggttttgacgctttttttgacgccggcgtggggccgacatgtcgctacgacgacgctatgatatcgcaccaccacggcccgcgtggacgagagctggcgatgactttggattttatacatgtcgtgcagtcagactgcgaccgagctatcagcctattaacgcctcttactgtgcttatgaggcactgtgaaccgctatgcgggctgcacagattacttaccgtctatgttaagtcgtcccgcgctcccaattataaatcactttcttggcttccgtcgctccgcctgcagtcgtgtaactaatccgtacggtcccctgatcttcgtctcaatgatccggatatgcctgttcatcacgctgctccgcgtacctgtgtcgctcgttaaatgcgccgacgttcaacctgttgaactcctgaagtcctcctctctgagcctccagtgcccgttacctccgcgccatctcgacggacggctatactctcgtcagccatgttatactcgccacacatcactcgtggactgtgtaggacaatcaccttctcctggtagaagatccaacgtcctcagtgtttgcaaccaacttacgctagatactcgcaagtcgagcgacaggtcgtcaatagatctcgagtgtacattcgaacggtctgataccgtagttcagcggcgtgtacacgtgcacagcttcgattcatgataacccatagtctcctgtctgatatctctaacttgctgctcgctcgatatggacgattccagtattcttctgcttaaactcctgctcgggctgactagttcgttcgacggtactgagtaggcccttctcgctgagagtcgagaggggggtatcacaggactctggcgcgctcacaatatctcttgaactatacttccacgccacatggcagcctccatatatatcgatggagacttgcgtgagcacgtactatccgctttactcgacgttgagaccggtatcgcaacaccctacacgtcgggtgtatatatgtccggtgtccaacttaacagttaggtggtccgctgaactgatcgcaacggaactggtctt

SEQ ID NO: 189774 - DNA, 619 bp, Arabidopsis thaliana
gcccccgaattagcgggtcgacccacacaatcctgatatctcatacccgacgcttagcctctcaaatggaggttacctcttatcactttaatctccactaccagatcttcaaagaaccttaccttaacttgctactctaaggcgaccctaccagcttgtactcttagacgtgaaagaatagctcggcgacatagcccttagtacttcttctcaaggaaaaactctcaccgcgctactacacacaagtattgcttgaaccttagacaccccctgatttgatcatagcctttcaacgatttgacgatcacatgcaccgtgttgctgtcgctgcgggatcagtgatagctgtcctacatagacaaattgctgaaaagaaaaggaaacttaccagccaggctggaacgaaaacaggtgggcttaaacagtgcttataatcagtcacaacctcaaggagatggagaccaatggaatccccatcatcatcatatgcggaatataaaggcttgggtagacaacttatatttttagcatgaagaataggcgatctgctccatgaggcactatgatggcacatacaacaggcttaactcttgagaataaatacgctgtggcccatgtg

SEQ ID NO: 189775 - DNA, 691 bp, Arabidopsis thaliana
acccccccgagcggattgacccgacgacccagacgtacgataggagcccgcacagaagcctaccacccgggtcagttatcctttttacggagagcacgactacgccgcgccacatgcccagggggcacatcatgcggaccacgccccaggaccgctaggcggagaggaagcagatcaagagagcgcctgacgatgaaaggctcgaccggaagggtggacagtccaacgatctagcaggagcggacagcaccaccagcgggccgaaagcaaagcagcggcggacagcgcgacggaagcgagcaacgccccaccgaggcacgatggatcgagccaccggcgcgagtagccgtgccgccaggatgaacaccaacagcgcagcagccggacgccacagggcaaacgcaaagaagtccagcggcgtcgaatgacgaccaccaggcacgccgggtggcagtcgacaggcaggaccaccgcacgggaaacctcacaggacctggcccgcatcgaaccaatacagctggggccactggtccgcaatccacccggggcggggcgcgaggatccaaggcaattgggaaccgccaaccccccagaaggcccacaccgggaccccacagcaacatgggggccgcgacaaaccggcccagaaggcaaccgccctgcgccggcatgaaaccagccggagcccccc

SEQ ID NO: 189776 - DNA, 490 bp, Arabidopsis thaliana
tgtagctggaggtggtgtacgatcaccatcccgtcctagctactgtacttctagtaaccggtttcagagctcgatagtgatagaacatattgacatgtatgctctatttgcaagatgatagcgtatgatagtgcaatttttgtatgggcgcctgggaccaatgactcggcttgtggacattattttttcacttaatcccaatatactttgtgacctttagtctacaaggacgtgggttctaggattactctcgcccgttccggcgcccgttgctatataaaaccgtacacccgcggggacactgtccgtgaaactttcttattccgcatgtgcaaatgcctccgggccgctttttacatcccccgttgggttattaccagccaaacacatggcgttagttctcgattctctccaaaaagttgaccttgtccgctctttcgcttagcaaagaaaaggctccataacctcttttactcttcccagggtgggg

SEQ ID NO: 189777 - DNA, 682 bp, Arabidopsis thaliana
  unsure (1)..(682): unsure at all n locations
cagcacccncgagaattttgcatcatcctgctttcgatattcatgcgccgccaaccataccagggactgcgttttctatttagaacagggagtgatactaacccctgaatctggggttgggaacaaaccggattggaaacggttaccaccctcttccggttactttccctgtgaaaacaacgatgcataaagaccggctactgatgtggctctatcaaggttaaagatggatttcaattgcatcgttccgcttaagaataagaactgatttgggagaccatgcctgttttccgaccatgagatacatatttgagtcagtgtgcccaatccagttgaagtttttcttcttccaccattgccaattggttcttcaggtactgtaaaggctttcaggaatctgtagagtttagacctgattattagcaagtagacaaggtaactactccatcctggatactgtttgtaatattgttttattgtttcacatgccttaatatcggcttacgatgacaaaccacgattgtttgttacacaagagcacatggtttgtaatgcactatacttatgtatcaaaaaaattcttaataccttgggcggccactctataggatccaaggttccgtacgccttcttttatacttcaatagctttaactaaaagcttccctaattacaattcacta

SEQ ID NO: 189778 - DNA, 1094 bp, Arabidopsis thaliana
taacctagccgtgaacccccagccgggtgtggtctttctatgtctataacaccagagttttttattttttatccgccttccttcgaccgcgctggaagatggagacggcaaccctacatgatcaaaaccttaaaatcctttgcgttacgcttttccccccgggttatggaactgagctgtgtccatgaataccaaacatatctgccactcgttataagaagtccagatcccgccttttcttgggtcctgaaaaaaattgaatcatccaacattgggttgcaaaataggaaaattgggaatttttgggtttgagtaggatctttgcgccccttttcttactgacccattggtcagacctttctggcctaccttgtctgagtgttccttgtgtttatcgagccttcccgccgccttgccagttagacgcatgtgaatcgctcggaataataactgttcttccactctgtgtcgccgaatttgtgaaattaatcacgtgtgggcgagagcttaatcctctgtaaatatgagtgtgggtcgactcgctctcgtttcggttacaaccgcacttatccaaggcgcgccgggaagtagtctctgttcttataattggcagagccacgtatattttttcccgcataaacatggtcaccctttgcttccaacaaccttggtttttacaaagaaaggttgttgatccaaattccctcttgtatgaatcaggagtcgaaaacccacagtcaatttcttcccaccaagccccacccttagaggcaaattggggcagccacgccaaacgttgccataccattccaaccctgcatttgggttggggaataccaataccccttctaccccaaagaggaattccttcaaccttggctaatctctggccattttcccggagatatttaccccttcagcaattactgaatcccgaccgaaatggccattcttctccgacgaaggtgttcgatccccgcaggtagacggtctcccctcaaacctccatctttgttgagtggaaccatcgtgttaatcgttgttcttcggccgaccttggtcgcttgccattaagccggggcgttgttgctccc

SEQ ID NO: 189779 - DNA, 491 bp, Arabidopsis thaliana
gcttgatatcgaattcgcgggccgcaagaagtgaagtatcaactatatacgatttaacgaggtagattctgggattggtatgaaacacagcttcaattatggccccccagggttctaagatatacttttaaacttttttaccacggcaaagttttttaaccaaccctggttttaagttaagtgccagcaagcttttttttgacatggggaaagatgtccccggtaagattttggttggacacgggcattggatatttttcgggcagcttccagcgagctggttgttattgtttgggcatcctttcccatagaatcattggcttttgggaaacctttttaataagagatgttccgttgaatcctccgctagtcaaaaaactaacagtggatccttccgaccaaggatatagacattgcaggcgaccaatctttgtccagccccaactagtttccaatgagataccattgaaacatatgaagttaccgtatag

SEQ ID NO: 189780 - DNA, 375 bp, Arabidopsis thaliana
taaccccaagggtaacagtataacagaaagcctcgcacgcgcgcgcgcgcggcgcgctgctcagaactagtaacaagcgggcggcccttttttgtttggaagacgcggccgcaccacgcgcagaggatatgggtccttctctgcacaacctacaaggaagaagagcggctaaagccgcagggatcaccaggtccgccaaagtggagagtgacgaatcttatatgctggaacaggcataacaatggcaatcatctacccgggatcaggactgactggcccataccaaggaaaaagcccactcataaagaaggcggcttgcgtctagaggaggacaacacgagcggcaacggatcacggattatgcaacggagcgat

SEQ ID NO: 189781 - DNA, 363 bp, Arabidopsis thaliana
ctaactcctggtaaagggagcagaagctggagcgtgacggcggtggctgtcgatctagaggtatcccacgcctgttgttttcgaggccgcttccgggtgcttagtatcgggtcagatctacatgcggatccggagaccctgagaatgaaacacttcataactgagcgagtgcgtgcgactccgaagctcttcacctacgttctagcaggtttcatcgctctactcggcttgacttgcctctactacggctctttgttggctcccggatccagaaagtccgatgagttcgctggatctaatataccgcgttcgtaccggaatttgatccttgcggtatcgatgatattgcgctcgcagagcgcc

SEQ ID NO: 189782 - DNA, 171 bp, Arabidopsis thaliana
gctagcgtccgatgcgggcgggactgttgatatcatcttattatacacgtctgacagcctggccgatctatactggagactctctttactccgccaggacttaagcacttctatgtcttaacactatcaaacataaggaatggggccctggaaaaaatatccaataaccaa

SEQ ID NO: 189783 - DNA, 476 bp, Arabidopsis thaliana
aagttaagcattgaagctgccaagctacgatccgcgggtcgcgagatcgcctggtataaataccaggctcaccgcggcactttttttattttcttaggctcgcctacaacacattcgactccaatcgtagagagggtaaatcacattacgacacacgacaagacagctccacttctaccaaactcgtacgcactgctactcctctcagtacatacatgggaacactcaacccgtgttagattgcatctctcccctcgtggacatgcagaactcagaacgtgctacgctacgataacgggccataatcatcctgacgcggctacctacgctgccctcaacagactccatctcaatctcagagcaaagactcgacgcagctcttacacgaatcctgttaacccatactcaccttcactttgcactacttaacgcgactcgattccaagaccttttttcatcccgactctcggtcgaca

SEQ ID NO: 189784 - DNA, 402 bp, Arabidopsis thaliana
  unsure (1)..(402): unsure at all n locations
tgaccccagtgtaacattaagcatgaagactgcaccctggctacgcgggtgcgcggaacgctcttagtaacataccagcgcgccncccttttctatttttgatgttcgccggcccgcactcatcgcgctatgcgggctggcctgcttaaatgctatacggaccagccttcgacccatgaacatgcgctgcgtcttaaacgaacaagaccgcctgctctattctaaccccctatgcgcgattgctggacttgaaatcaagaccttactctgcatgaggatcggggatgctgcgttgccccttgcttgactgacaaccgactcttcttctgatgcttacttacccccgcggtcccaagcactctcacctgatcacttgcacaaccgctggccgagtcccaccta

SEQ ID NO: 189785 - DNA, 114 bp, Arabidopsis thaliana
atcgaattgcgggggccgcaaatctatatcccaagggagaataaggacaagggaacgatattaaccagccactttgattaaaccggcaccaaccttatatagcttaccaaagat

SEQ ID NO: 189786 - DNA, 321 bp, Arabidopsis thaliana
cccattgggaaaaaaaccccaaggtaacaatatgcgggaaaccgggacccgtggaagggcggaccgcttgaagaaacgaaaaggaagccccggggcaggttagaaattgaaggacgaaaacgccacaagacaaaaagatgggggacgaaacgaacgaggaaggaaaacaaacggatggaagcaaagcaggagaaaaaaccaacgaagaggaggtggggagaaagaacacaagtggggaaaagacggcaaaggagggtgaaatgagattgggaaaagaagagagaggagagaccaaaaacagggaacaaggacgaggaagca

SEQ ID NO: 189787 - DNA, 472 bp, Arabidopsis thaliana
  unsure (1)..(472): unsure at all n locations
aacccctaatataagaggttaacaagaagccaggcagcctcccacccgcggctggtcggctcgcctactagaacctagtaggactccccacttttcttgttttttaatttcagcggcgcggccgaaagaccactaattgtattgtgtgtgagtcacatagatcaggtgttctcttaaaccaacaacaagctgggngtaaatacaacatgagcctctttagcgcacgactacactacatcaccacatacaaaaaacaaactatccgaatgagtctgtgcactgcgcgggcacatacacgaatggtatcactccgtccaatgcgcacaaagcctctacagtcggaacgaagactaaaaggccacctatcacagaaccctaaacccaaagttacaatatgactgtgtacaagaagctttcactgaacactagagagacacacaactccaaaacaagactgtcaagcactaacacc

SEQ ID NO: 189788 - DNA, 339 bp, Arabidopsis thaliana
cccctgatcgcggatgtagtgttcgatcgggcgcacgctttaaggtatgtacgttggggtgagtttggagaactgcgtcagcctttgcagttcgctcaaccaagaggaggagagtgtacgtcaaggcgcttgttagtagtcgtgaacacgttacgaaggaatggaaagggaacattacctccgtgggagatagttgcgcaagtatgctgctgcatcttgagcattggtcatggaatatactaatacaacactaggtggtatggtagttctggcaagggctatactcttatacatattaagctgctcagtcagcatagcaagaaaacattggtgtctaga

SEQ ID NO: 189789 - DNA, 309 bp, Arabidopsis thaliana
  unsure (1)..(309): unsure at all n locations
caaacaacccattaaggaagctgaagctgctgctgcacccgggccaatcgctctataacatacagcccccttcttttgaattcgggccgctagactnatcgtttatggagaataatctgccctacaacaccgacccagggatgtacaatggcggaactggctaacgtgacgagcttattacccaagctatacaaagaggggggaacacccagatgaccagacaaggaaaccatacctcacttaccaacaaggcggggtgacacccaaggcgaagccaaccaatgacttcctcatggaaaagatcccgac

SEQ ID NO: 189790 - DNA, 377 bp, Arabidopsis thaliana
  unsure (1)..(377): unsure at all n locations
gtaacaggaaggcacggtttttttaagatattttttgcccgagctcgctatagaggtcagctgaggaanaacttggggagttgtggttttcagacaactacgatacggcccgtctaacgcgtatggggtgccaagctcttgtaattcggacgaagagaaactatgtgtttttatataggatatagtccgagataagggcactaaaacgatgggatggagtaatcagagggatttgtgagcacagcaggtgattttgtgtccgcctaacttgctgcggtgccattgctgtgtagttcattgacatgcaggtatcgtctggtactcgcggccggaagagtgtgaaatgaggagcttgatggaggacctggtggtaaccc

SEQ ID NO: 189791 - DNA, 425 bp, Arabidopsis thaliana
  unsure (1)..(425): unsure at all n locations
gggggccggggggcgcccaaacttttcgagagggggcggggaagagggcgnccaaaaaaaaaaaaaggacggcccccnccacaggggagagagagaagagcccgccaaaagcgcacgagcgaagccgaacaacaccggacccaaacggcgaaagcgccgggggaaagagcaaagcacaaacaagcgcacccgaaaacaataccggggagcgggggaaaaaaaaactccctcaggaggggagcgcggacaagaaagaggagccgaacagcaaaaaaaaaagccagacgggcgggggggggaggaggacccacaccccaaaaaacaaacaagcgagagacccagaaaccaccggccaccgcacacacgagaaccgggagaaacggagcagggcgcgacaacgagagaaaaaccaccgggcagcagag

SEQ ID NO: 189792 - DNA, 469 bp, Arabidopsis thaliana
cggccaagtttttaaacttttccggacccgcccaaagggaaaggggctccctgggagggccccgggagggacccaataggcaacaacgaggcgcgctccacaaaggggcgggggacacaaaggaagccacaccagaggggggaggccacaaaaactccgaagagcgacttcataggcgaaaatacaccccaaaaaacgcaaaaaccaccacaaacagaacatgaaaaacctccgcgcgcccctccgggggtctacaacaagacgaacacacctagggaggaggcccaagaaagagggggcgcaccggcagaagcacaccgaacaccggggaaggacaacacatcccaaccacccccaccacagaggggggtggggaacacccaaaaaaaaagccaacgcgcaaggaggcagcgctacagagcaccacaaccaagaagataccgcggcgacgaccaaaaagccaccacac

SEQ ID NO: 189793 - DNA, 487 bp, Arabidopsis thaliana
  unsure (1)..(487): unsure at all n locations
gaatcgagagcgcggccgcgccagtgagcgagaggagcccagcccccagaaagagagggaggagagagcacaagaggagggcgagagcagacacagggaagacgcgcagggcgcgatacacaccgggagagagcgccaacagacgcgagagcgcgagccggaacgacaacgatctgggacgagcggggnaaagcccctcgtacngaggtggcgacgcagaagagccgaaacgacganacaaaggacaccaagaggaggggggccggggaccacccacggcgaacggagaacgccagacgacgacccacagcaggaaggccacaaggccgaggcgcggaccccgaagaaaagggggcacgagggcccaaccacgcccagcggcccacccaggcaacaaagcggggccccaaggcgggggcgcaccccaggggaaccccacggacgaagccagacagacacgacagggcaacgcacgagacccggcaag

SEQ ID NO: 189794 - DNA, 367 bp, Arabidopsis thaliana
ccctacctcagtgtaacattagcaggagctgcaccgcggagggggtcgctgccgatctagaactccggctgccttttgttgtttgaggtcgccaccgcaaaacactcagtgtgggagtgctcgtcgccacaatctacacgcagccgacacaaataaggatgaaagaacgcctagacacattgacatatctaccaaacctagaaatggcctcgatcttttccagtgccaccgacaggggacatctaatagaaccaaggtcttgtttgttatgccagccccgcgctctttgtaccgatctgcgactctatacgagccgcctcaacgccacctgttatatccgttaacgggatctccaatcaagccggag

SEQ ID NO: 189795 - DNA, 460 bp, Arabidopsis thaliana
taacccatgtgttaaatgaaacaggaagctgcgacctcggacgcgcggctggctggtacgaatctagtaacatagccggagtccctccttttttagttttgagattcagcggcacgtcttttcttgagtaaaggtggcacgtattttagacaattataacaactatcccaccacgctccaaaaatcttacatgggcaatagcaaacacaccaacaatactcaaagtctgctttcatgcgctcgacccatgatctcagaaaccactccgtcatattgcttacaggtttaacaaacttatcattctctacgtacatcagtaaagacaatatcatggagcaccctctatactggtggagaaaggatgaagaaagatatttctgggatttacatattcaaatgaacacccacacgatggttggctgtgaccctatactatgcaccaaatgctccaggtatgagt

SEQ ID NO: 189796 - DNA, 263 bp, Arabidopsis thaliana
ggacgcggggcgccgactaaacacggcgccccttttgtagacgcgggcggacaagcacgggtcggcagagcaagaacgagcgaccacccaaagccccacggaccaagctccgcggaaaacaccagcgacgaacagaacgcccaccaaaagatcgaggaatcgcaggaagaacgctgccaccgacgccaaaaaggggaagactacagccggccgcaacaaggcgagcccgaaccggaccactgcacgaagacagaaaagacaac

SEQ ID NO: 189797 - DNA, 508 bp, Arabidopsis thaliana
cagtaccgggtcggaattcccggctcgacccacgcgtccgaatcgctgcccgctaggcagactgcatggatttcgtcttcgagagaaagcgtttagacgcaagtaatcaagtctgagttagtgattgttgtcaccgggacttcttaacagagttgaaccgcttctttccgttgtataggtgggaactggatgacaatctcacgcataatcatagaactttttttgcaactattgcatggatgatgcacttgagtctctcacgagcatgagcttggaactcactgtcatgataatacagaggcggtatgattgttgcaggagcgctgttcaaaccatgaacgtacagttttttactctgagatgtgactagccaaaagaggcgcagaaagctagaggtcgttttaacaaatgagtcaacacaaatgaatgatgcaatgattatattgaatcagctattcagctcttgtgcagtgtaacatggctttggaaaactggtggatggtttgta

SEQ ID NO: 189798 - DNA, 297 bp, Arabidopsis thaliana
  unsure (1)..(297): unsure at all n locations
gcccggtatcgaattgcggggccgccacgattacgggagcagcagctcccagtagacagagagacgtttaacctacagcccaaccttgtgtgggttgagcttatatttgacccccttttgataataatcgcctctccatgtagcaacaaagacactgttgctaaggcgagaatttttttttataccaggccagggagccccaaaacgccccgtcnggcaagcccccaccggaaagacgccaaccngcgggacaaagacgcaaaaacagcgcccaaggaaccaaccccccaggccaac

SEQ ID NO: 189799 - DNA, 378 bp, Arabidopsis thaliana
taaattagctgaagcgccctgctaccggcggcggacgcctataactaccggctccccttttctgtataattcgcggccgcccaaactccactaggggtggggctgcgaaacacacgcggacacctaactgctaagcacttttgcatcataacatcctctaccagaactacaagaatcccgacacttctcaatacatgactgggtgtcacagatgtacgtggctctcggatcagaacattctatgaggtacgacccgtatgccctaggcctccaaccgcaaggctgcacgctgtgtgtaacccacttgagcgcgattcccgactaatctaacccagtctgggcagcgctacctctcctctatttttactcttgcgatgc

SEQ ID NO: 189800 - DNA, 265 bp, Arabidopsis thaliana
ccgaaaggacgaaaacggcacaaaggggagggggagcaacaaaggcggaaagacacaccaaccgaacacaggaaaaagaaaaaacagctcgaaagcgcaggcaaagaccgagagcacaataagcaaccaaacgaaagagcggaacacaccagaaaggggaagagaaacaaacaaggagccaaagacgggccaaaggacagcgcagacacaaacaagacaagaagaaggcgacaccgacccagcgcaagggagcagagccagggga

SEQ ID NO: 189801 - DNA, 460 bp, Arabidopsis thaliana
aagctaggtataccattggggggcgctggatatgacaggtgattatcacattcaaaggaataaagaccatggcaaccaaaggatcccacagctttattctcttttcgacaaaacaggctggcatcattatttttagtagaacaactttccttcccaagatgaatggtaagagagacccccattatctcgtttgctactatggaagagaaccaaaagggggtaccgggagcaccattctatgatgttccttgcacaaaaaatttaaaacctggaatccgggatggcaccaaaggccaagttttgcagcgaaagggaagaagaattccaattcggtcttgataaatacttcaacgagaatgttcttgtggggggggaaccgagtcggttcggacgtcaaaaagttatacgcctggaacttcgtttaaaaaaggaagttggcttcgtgattcggcctgagaag

SEQ ID NO: 189802 - DNA, 502 bp, Arabidopsis thaliana
  unsure (1)..(502): unsure at all n locations
cccggaactaaanggggggccgcccccttcacggagagggggaaaccccctncaaaacaaacgccgcccccaaaggcggggcgggtcggccacgaacaccaacaagaccgccggccgaccagcggagagagactccaccacaacaagccgggcgaccgacccgccggagcccacaccagcaaaaccaagaaaaggctgaacccgggggggcgggaaaggcaccgccgggcagaccccaaaaaaaacacccccaccacgacagcggacccagggcccaccgccaaaacaccacccccaccgcaaccagcgcaccacacgaccacacacacgcgccggccacccacgcagcccgcccccccaccccaagacccccccccacgcccacaagaccgcccccccccacagaacccaccagggcgaggagccccacagaacaagcaaccaccccccaccaacacacccacggccgcccaccacccccccagaacgccccccacccccc

SEQ ID NO: 189803 - DNA, 258 bp, Arabidopsis thaliana
  unsure (1)..(258): unsure at all n locations
cacacctgacaaaaaaaaagcaggaaaaaccacacttttccagctttgaaaaaagaacggggccggtcactcccatacacacatgcaggcggggagggaacaagaccgcaaacgacanaagacacaacgacccgtacccgagaaacagacagccgcagccagaggagaacacagaaaggggaacagaagaacacacaaccgaacgcggagacagagcgcataagcccaaaccaggaaccaggcgagagcagcaaagca

SEQ ID NO: 189804 - DNA, 446 bp, Arabidopsis thaliana
aatggaacgaacccagtttaggggaagacagcccggacccgaacgcggcggaggagagccccaaaacaaggggggagacccggttcagttttaaaaacgagggcggccaacacgggacacggagaggggggcacgcacaccaagacggaacggacaccccgcgaaaaaaccgccagacgagggggaacaggcaggcagaacacagcaaacacaccggacccacaccgaaggcgaccagacagcaggcggggcaaacagggaacggagccaaggacagacccggaacacaaccgggccaagccagaacacacccaccgcgggcgcactccccgggcccggaaccgaacgcagccgacaaccgcacacgccagctccaaaacggaaaccaacgagcagcccacgccaccgtagcccaagcggccgacgacgaagcaccgaggcacgga

SEQ ID NO: 189805 - DNA, 481 bp, Arabidopsis thaliana
  unsure (1)..(481): unsure at all n locations
acacaggggagccaaatccagtagaaacaagggcgcccaagcgggngggaagccgccggacagaaacgcagcagcgcgaaaggatgaccagaacccagagagacaagacgaggccgaccacgccagaacgcggagaacaaaaaccgacagactcctccccacaagagagggaganagaaccacgaggaccacccagccaacgaaagagggaagcccccggggagaaagacgcgcccccgacagtgaagaacagagaccagccccccgcgaggaacagaccaagacggcgcgggaggagccaaaagaccccgaccccccaggccaaacgcccgacgcagcaaaaacaaagccaaggccggaggccccagacccagcacacagagcagccaccacgaaagacccccacggaagcccccggacggccggggaccaccaggacacggngaccgccggcaggccccagaggacccaaccccccacg

SEQ ID NO: 189806 - DNA, 192 bp, Arabidopsis thaliana
aacaaacccatttaaagtataacaaaacctggcatctacactcgcgagtggctggctcgcctactagtatactatgatggacgcacccacttttttttttttttgtacatcacggcggcaccgcttactacatacgataaaaacctttggatcagtggactgataacgacatcctactcatagatacgtgat

SEQ ID NO: 189807 - DNA, 386 bp, Arabidopsis thaliana
cctgatcgagacaaccagctgtatcgatcgggcgcctctacacagagagcccaccgagagagcgacgcgccaaagcgcgtgagaactctcttgttagacaccctatagacctgtcagggtcatagagactctacatccacggaggcgcagactcactagtcctagtcagatgacaccgtacgaaagttttctgacgagaggcagacacgcaggacatcttctgactgggctcagcttacgaccaccgtaacacaacgatgcgaccaacccgctgaagacgaacagagtgggatgaaccaacagccacgcgagacatgccggcaggtcaaaaatccaggcggggttaagacagacaacatcggctagccaagttgcagcggagcccc

SEQ ID NO: 189808 - DNA, 505 bp, Arabidopsis thaliana
  unsure (1)..(505): unsure at all n locations
gctagctatcggatgcgcggccgccctgtatatgcaccgaacgaacgtcctagattataagcttctcagtccatgcatactcagatcggttagggctcgttgattctctttttgattacgaaagcttaagatctcttttcggaggattttggggttatccatctatggtggatcgcaaatcggncgtcctccaactgcngctctncgaanagaaangggaccagtgctgacagaagcccaacaccagcggcttacgcctactgacatttgngaaaatcttcagaaccatgacaagcctcatataccatcagaagtccccacccgacccggcaggggtccacttattttttcctgatacgaaagcacctgacatatttctagaaagaccggccatcacctggagggaggaagactcatgggaaaaacccttacacacgcctcctgaggagccccaagggacgaaagcatagatgcgcctccattgttacctacccaccatggggaa

SEQ ID NO: 189809 - DNA, 352 bp, Arabidopsis thaliana
aattagcagagctgcccctggcggcggtggctgtacgaattgaggtaccgcatgcctgttttgttttttaagtcgctgtcgattttcattgaaggagaattgtacataccgcacaaaagcattaccgcaaaaaacgagattgcatatcgaaaaccaacacacaaacaaacttatgcacgcatacataagacaacactgcacacctctttggcctacaaaagcaaaaaaaccaccacttcatgcagtctaaacgacatcgtttaagggttgggtactctgacttcttgttctctcctctttttcaagacttgtgttgcgtgctagagatcacatgccgtaagtaggaggagag

SEQ ID NO: 189810 - DNA, 221 bp, Arabidopsis thaliana
ccccccgggtgagggaacaaggtggatccatggggccgttattctttagaaaaacccagagaaaccccgctcacacaaaaagaccagggtccaccacatggggaaaaccaccgggggactttttgagaaaaaaccaaggggaagcccaacctaaggttttatccggaccacacgggggaaggacctccacaaagccttccatggtgaggccccagagacct

SEQ ID NO: 189811 - DNA, 276 bp, Arabidopsis thaliana
  unsure (1)..(276): unsure at all n locations
ggggcggcgcttctactagaggagcaactccctgaagaaacgcggcccctttagagatcaaatgtcactccagaaaaaaacctacgagataacactgcacaaccagtgccaaacacatgggaactgcactatataattcactgcaaacagagaataagaacgttccttctttgggggggtgccggagananacgagacccaccgagaaaagaaaagccccggncgccngcggggagggggaccgacgaccagacaagagacgggggaagaacacaa

SEQ ID NO: 189812 - DNA, 511 bp, Arabidopsis thaliana
tcgaatggggcggccggcgggtttttaacaggggggtgggagtctaataaagaaagaaaagggccgccattaggaggagaaattgatcccacacgcaagggggatctgggcctcccgacattgtatggagccacatctcccaaaccagacctcccggagcaagacagaagacgagcgaccgggaagcaggccgtttttttttgtggcgggggtaacccgaacagcccctatggccaactaggaacgcagaacccctatgggttccgactatgcacatgcgacacctcttgggtgtcctcgaacgaagcaccattatacgtcacttggtgcggtggaccaaaccggaagagcacagtacctcttacactctgacccgtttctaaaagagggcgccattaacggaggtcgaccagcgaccgatgcaaaacacaaaacgaccgggtctaaaaacaacggcgtcactaggcacacgtgtggattatggccggagaacaagagtattctctaactc

SEQ ID NO: 189813 - DNA, 508 bp, Arabidopsis thaliana
  unsure (1)..(508): unsure at all n locations
aggagctgaccgaggtggcggccgctctagtactagaggatcccccaggcctgcaagaatcgaggccgncgaggcatcagactctctgataaaggaaaagcacaaggagaagaagcacaagaaggataaagaactgaaagaaggaaaagagaaaagggaaaaagaacaaaagcaaagacaaacataaggatcgctcctgagagcaaagaggaacataaagataggaaagacaaagatcgagataaagaaaaaagcagaacttcagaggacagaaaagctagctgggagttttgccaaacaccggggacagagaaaaacttgtaacaaatacccttgaagagtattggaaaccgaaagtctaaagttatacaggacctggaaagaaggttcgggaatgaaaaaactacagaaagtaaaagtccaacgaaaaactgattctccttggggaagttacagagaataacattccctgctcaattacctaaaaccacccggacaaaagtggacg

SEQ ID NO: 189814 - DNA, 497 bp, Arabidopsis thaliana
  unsure (1)..(497): unsure at all n locations
cccccccncgctgacaagggaaacaataagctagatatcgaattcgcggccgcgctttagaaatgctcatatgaccatgatgcaaggagtggaaagttcgcgtaacgacactcatgagaaagccatctcacatgcaaagtcgcaaccaattcaacaagatggcgccttatattcagataccgcctcttctaatgaatataatgcaggtcaaggtgatccatatgtagcggaatgcccaggcgaaacatggatattaccgaagggaagatgcatcacaggattgactgctgtgctagtgcatcatatccctgtggatgggaaaacagctatatctattttcagtggaaaattcgccaagtgcttccaagttactgatactctagccaatcaagctgatgataaggtcacggaggcaagattttcaactgattctttgcaaaagttgctgggatgatgcgcgagattagtctgtctataaagaaaaggggacagcagct

SEQ ID NO: 189815 - DNA, 536 bp, Arabidopsis thaliana
  unsure (1)..(536): unsure at all n locations
atggaggggcggcgactctttgcaacgggggtccgcttcggtcaaaaaaaagaacgacgaacgcgtaacttgcgtccctgtctcgcgagcagctatgttgctccttcctagaagagacacgaacaagcaagcctggtagaatgatcagagagtctggctagcagtggtcgacagtgcgtacaagaacccgcgagacggcttctttctttatagggagggtgagaccaggggagaccgagccagcacggaagcagggaagcgaaccgagaggccgccgggcgtgggcgaggggcaaggccgagacaacaccggaagagaaccgaagnagggtgggaggaggcgggcaagaccagagcgcgcgcgtgcaacgcgcctgcagggaagccgagagcgcaggcgccttggaggcgccagccacactcggaaacagcaggggggatctctgatgcggacgaaggcgaacgcctcgaaggcgctcgcgcgacttgggaccgattgatcactagaggcatggccaagacaaatactcggaacaa

SEQ ID NO: 189816 - DNA, 186 bp, Arabidopsis thaliana
  unsure (1)..(186): unsure at all n locations
tggagctgcacgnggtggcggccgctctctaactagaggatgcaacgccctgcaagaattcgcggccgcctcagactgatgtattttgtatcgggccttagatccgtgcggcccacaatgaacgagcgcattctatcctctccaatattagttttaacaagtgacatcgactgaacaggagaacag

SEQ ID NO: 189817 - DNA, 468 bp, Arabidopsis thaliana
aaggctggaaccgatggggggccgcccattaacaatggtggcctaggttcaaacaaattctgggccagagagggcaataatttataacccaggccgtttattgtcctccacctacctactaaggaacacttttaacttccccttctcaaagccttcaaggaggctccctggaacccaggaccgctttctcttttcaggggggttaaagaacccaccagttccatggaagaccataaaagggtaacactgcctgccccaacccaaagccggcaacccctaatccgcacacttctttgccaagtacccggaactgggttaaagcaacaaaacaggacttggcacactctccacatctctattacctgggatgcatcacctgggaaccgcaaccacactccctatagctagaggagaaccctttataaccccactccaattttcgtctccacaattcttataaaacacggg

SEQ ID NO: 189818 - DNA, 531 bp, Arabidopsis thaliana
  unsure (1)..(531): unsure at all n locations
agctgcaccgcggtggcggccgctctattctagaggatccccaggcttgcaagaattcgcggccgctccagaggcagcgaccttccggccgtaacacaagcacaggagcaaacaaggatggacgcatcaagggatgagggcctcatgggaaacagagacattgaccacggctaaggaagaggcacgnactccctccttagaagcggtaaaacacccaactaacaccgggacaggcaacaaattcccaagcgggaggtagccccttcgggccaaaacaggaagcccgccgggaaaaccaccagaaaccacaactacgggccacggaccggccccggggtgcggaactccagccgcgcagtaaaaagcccaccacaccgagtcgaagggtggacaacggcctaccaccagcagctagaggccaccgcaaagggactggcacccgtcacgccacaaaacccctaaacaacccgaggaccatgccagtcccccaacacccccgacatccaagggcctcggaccagcaccccggcg

SEQ ID NO: 189819 - DNA, 380 bp, Arabidopsis thaliana
agcctggtttcgatgggggcgcgtttttaccaggggtgccatggtttttgaacaagaggacttaaaaacgggggccttcctggcatgagaagcaaagcacaatcccatttgcgggattgtggaagggctctggagaggaaggaaccttgggggagggaccaccgagcggtttctcttttaggggggtgaaaaacaagggcaggacgccaagacacgcaaggcgcgcagggacaggcccggcaaaggcaaaagcagaaaacggggcggggcacccagccgggagggaaaccacaagccggcggggggccggggccaacaaccggcaggcccggggaaacgcgggaaagaccaaccccggggggagaaagcggaaaaccagg

SEQ ID NO: 189820 - DNA, 473 bp, Arabidopsis thaliana
aagcctggatccaatggggggccccctttttcacatgtgaaaccaccggtttcaagaaattccagacggttgataccggggccaaacataaaaggggacgcagggaacctgaagaacgaagggtgcggttttgcctaactagcccacatttgaaccatggggagcacgccgaaagtgccccccagagtttctatttccgcacggatggaaacgacatagaacatgttctctaaaccttaaaggagggactgtctgccttaggaaccacacaataggagcattctatcacggttgccaaaacaaaaaattacattctgcccaaacaaggaacacattcaaaggctcaacaaatccttagagaacataaccgttgtatcgaaagagactaatccgttttgcaaaaaagaatagtggcccgggctagaacaactctccggcaagaaagggatccttctttttccaaacaaaacact

SEQ ID NO: 189821 - DNA, 440 bp, Arabidopsis thaliana
agtgcaccgggagggagcgctctatactagaggaggcaagccctgaagaatcgcgggcgccaaagcgcaggacgagagagcactaacaacgagacacacggaacaacaaagaaccctgaaccccacaggcacgaaccgggaaaagaaggcccagccaaaaggggcggccccttccctaggggggaacaaagaacaagaagaccgaaggaaaaaaactcaaacctcggaccggggaagaaccacccaaaacaaagggcaccaacaacacggaccggcaccaagcgcgaaacgaaccagaactaggtcaaaagcagcggcggcccaaagaccaacaaaggccgcagacaaattacccagcacgcgaaccaagggagcggaaaggcacaagacgcaaacagaacggggaccgccaccacgagaaaacaccaccgggacggaca

SEQ ID NO: 189822 - DNA, 180 bp, Arabidopsis thaliana
aagcctgtatccaatcgcgggcgccctgatttaaccgggcccgcctgtcttgcagaattccaggacgcctcacaatggctctcttgtcacaaaggccttcgttctaagacttatacccacctccagagccaggaaaggcacatttggacacgttacaggggaccggcaaaggcctaccaa

SEQ ID NO: 189823 - DNA, 410 bp, Arabidopsis thaliana
gcccccccttgattgcgacgggatcgattagcttgatatccaattcgcgggcggcgtatcttaactggggtagaacccacccttggtgaaaattggacccacccaaaaacccctccaaatgggcttggtttaaaaagccccaccttaaaaggcttaaccgatcaaaaaaaagccagttaaacaactttaggttggctaaagaggctaggtcatggtcaactattttaatccgacttctcgaacctaaggacacactcctctgtgaaaaggggaagcattttggccattccaagaggcactggaaccaccggtttcaccaccacctcctgggtacatgtggtcaataatgggtttgaaaagcctctcacattctttaatctggtttgcaaacaaataaccctaagaaaact

SEQ ID NO: 189824 - DNA, 428 bp, Arabidopsis thaliana
cgaattgcggggcgcgggtttctaaaatggggaagaactagtcctgcagaaacaggcgactcagctggtcagggagcttggaacagggcattatcagccgggatctaaacccatgaagtatcaagccgaaatcccttacaagagcgttggaattacccgccacaaaggacatcgagtggattattatagacgacatttgttgaaagcaacgttgctctttttgtgccaaaaagaagagctctacaaaagacctttcgctgtgtggaggggaactgagttccacaaagcaaaccaagcaattgaactggagatccaacggggaaacgatacaatggctgggaatgcttccgaagccataggcaccctctactagcagagcgaagaaaggttcccaactcaaccctctgagtggcccgggacagaacctg

SEQ ID NO: 189825 - DNA, 496 bp, Arabidopsis thaliana
  unsure (1)..(496): unsure at all n locations
gaagctggatatcgagtgggggggggcgatctattagagggggaaacaatcctcctcatagatacaacggacgaacttggggcttgtattatgtgctgagccagaatcaacagatgggtgaaacgatgaactattcttgtatatgtctagaacgagctctgacgacaacagagtgcattccggaaatacgcagtgtcctcaattgcaggggggtacngcaggaaaagaggcaccagaaagggaagacagggacagaccgggggagagaggcggccaaggaactgaagaacagacccagcgggaaggcgcgaccagacgggaagcggagaagggcatcgaaacagaaacacagccgagcgagcgaggaacacgaagagaagaagccaggagggggagaggggacagcagagaagcagcgagaagcacacccggaaagagaggacgccgcgggaagagcgggaaagagccagaacgagccgcagagaaagaccagcag

SEQ ID NO: 189826 - DNA, 457 bp, Arabidopsis thaliana
  unsure (1)..(457): unsure at all n locations
caggagctcaccgggagggagcgtctatactagaggagccaggcctgaagaatcgcggccgctcagtcggaaaaaaacagagaagaaaaccctacataccaccaaaaaatataactgctctctctggcacgcctgcaaaaaaaccggcagcaacaataacggacaaaagagaaggcgcctttgatagagagggtgcnaanacagaaagaaccgctgacctctaaaagaaacgcagagatgagcgagggggcggtctctgtctcaaaagagagaggctgaagaacacgccaaaaaccatgcccaaacccatgaaaaaaaccaaagccctaccccccctctatcggagcaagggacccccacctgaggctctcccatccgaccaccaagagaaaaaagactcgacctctacatctaaaaagccaaaagaaacaggcctcagccccaaaaggggcccggt

SEQ ID NO: 189827 - DNA, 468 bp, Arabidopsis thaliana
  unsure (1)..(468): unsure at all n locations
gagctgcaccgcggtggcggccgctctatttctagaggagcccaagtcctgcaagaattcgcggccgcctacctcgacgtcatgttcgagatgaagagcctgttccacctagagagatacggcgatcttcgtctacgtgatcaacaacggcatagcctatgctcactcggaccaaagctgggcgacactccttcaagaaaggggatgacaccccgcnaagaaacacacggccacaacaaagaccacacaaaggacgacaagccggggaacagagaacgcgcaagaggagacacaagagcgcgcaagagcacggaacacacagagacgacaagcgaggagacacggacaaagcccccgaagggacgcgccagaacacggacagcaacgaccaaacgggccaagccgcgaagacacggccacaccaaccaacgccagccaccggacggaaccaccgaggcagcagcccga

SEQ ID NO: 189828 - DNA, 537 bp, Arabidopsis thaliana
  unsure (1)..(537): unsure at all n locations
gggccgaagctttccaaggggggccaaatctccctgcccaaaaaataaccggccgcggaacccaggggcggggccggaaaacctgcaaagacccgctaccggccgggaatgcttaccgacacgcatctgtgatgggttggggacaccaatcggcgacccaccctagggacaacaccgggcgcccagaggggaggaggatttcctcaatttaggaggggggtgcncgccccccccgaccccgccccaggaagggcacaaaaaccaaccccaanncaaggaaagacaagaggacaccggagaaaaaccagaaacccacaaagcaacggggccacacccccccagaaaaagcccccaacggcgggaaaccccagaacaaagaggcccccgcacgaggaccccggggaggccccccaccaaggcaaggcggacggggaacggggcccgaaaaaaacaaaagacgggcacgggaacngaggagcgcccaaacaaccgggaggaagagccccgccccaaccagaccccaaccgcccagggaag

SEQ ID NO: 189829 - DNA, 259 bp, Arabidopsis thaliana
cccccctccggtgcgaggggataaataagcttgatatccaattcgcgggcgctcagtttttaccaagggaacctctttcatcttcttcacccaaggggccaagaaccaaggcatgatggagatcgaagaatgcagattcactttttcttgggttggagactttcttacgaaccagaattggaaggacattaaggcttaggtaaagcctaaaccgggaactttcttgggttacgtttgagatccggaacaactgatttga

SEQ ID NO: 189830 - DNA, 513 bp, Arabidopsis thaliana
  unsure (1)..(513): unsure at all n locations
acccaggcgtncgattgggggatggcatgttttttagcgttgagggcactctttttaaacataaaccctgaggattcgcgccttcgatatccacacatacatgaaaatcgtcgtgaatcgaccgtcctgtttgcacaccataggatcacgccagattattggggatttggggatcagccagatgtagtaataggccctaaaggaggacggttttctccttttgggaggtggaacgcccaggcggaccgccaacacggcgccataaaacccgccgccggcgcccgaagacacatcacacaccgacgacacccccaggccgacgggacgccaacaggcaaaacctcacccccagaccggagaaaaccgacacccccaaccgcgcaccaggcctgagtccaacaccaagcttggatccaaagctacaaagagcgccaaggtttaagggcggagcggagcatacccgcgcccgtgcgaaatcttaccgttctcctgacataaccacccccccgctgc

SEQ ID NO: 189831 - DNA, 455 bp, Arabidopsis thaliana
gtggggggccgctttttcggtggtgcgaaagtctttcttgatctagcccgctccccgaccgcgggggcgttggaatgcatccgacaacaactgtgcaggggccgcacggcgcgtcatcttcccccggcctgcttcatcgacttatcccccacagcaccagacccaccactctcctcattgggggggggggagcgggcacgccgacaaccaccacaccgaaagctctcgacggccggcgggttggaggtgactctaaccaaaattgtgtgaccactgaagtcccctgacctgacaagtcctaagaccaaaccgatcttctcgggcaacctcaccctgcgctttacaataccaccccccgctccgcgatcctatacgtactccaatcgtgtacgagtctcgccgtcacaggtgcaccagccaatcaacagccgcgcccgtctgtaccacacgccgca

SEQ ID NO: 189832 - DNA, 163 bp, Arabidopsis thaliana
gcagttccatggggcgcctttaactgggatcacttctttagataccaggcgctggacgaagtcatgaggaagatcacatctgcactgaactctttcatggttcggggacttactccgagcgaggatcggaacgaccttaacggctgggtgaatgctccacccg

SEQ ID NO: 189833 - DNA, 494 bp, Arabidopsis thaliana
  unsure (1)..(494): unsure at all n locations
gaccgggggggggggccgacttacaggggggcgaggctccagaaaacaggccgcccggacaccgcgcgcccagaacagaagcgaggcacgcgccaaggcgacaaagaccgctcgaacaagaagaagccccgcggcacacacaccggccagaacccgaaccagaggtcccgtgactaagggggggggaggaccaaacagcacgccgcgaaaaaaaaccccgggacggacgccagcggcccaccccccgcaaccgaggaccaaacccccgcgggcgcgacagccacggcacggcgcggcgagacagccgcccgggagaagcgaagcggagcaccaaccccagcgaccgcccgccccaacagcccccacggaccccaaaaacgagacccgagggcccccaacgaccgcacacccacaggagggccgccacgaagaagcgaaggnagacgcacgcaggcgaccggcaaaaagaacgcccccgccaggggggcgcgcga

SEQ ID NO: 189834 - DNA, 205 bp, Arabidopsis thaliana
  unsure (1)..(205): unsure at all n locations
taaagagaaggcaaaaaaaaaaaaaaaaannaaagacgctggttgccgacgccccccctcggatgcgacgggataacttagcttgatatccaattcgcgggcgctctattttcatcaatggaagctcttgtatcttctaccaccaaggtcctctagaaccgagtcatgaacgctgccttaaaaagcaagatcactctttcttggt

SEQ ID NO: 189835 - DNA, 476 bp, Arabidopsis thaliana
  unsure (1)..(476): unsure at all n locations
ggaggaggggggcgnacgacctcaggggggggagaagccctgaagaaaaagaggccgcacaaggaggcgggacggccaagcaaaaagagacgaacggaggagcaagaagaaggaggggagggaacatgcgccgggagaaaaggcgcggggaaacaaggaaagggagacgggaagaagaaagagaagaaaggcacctttaacaagaggggggggtgaannaaganagggagagagacgcgtaaaagaaaaaaaacaacgcccccgaaggctggggggagagggggggaggccccactaaaaaaaaagaaaggacgcacgaagagaagtaaaaggagaggagagggagagagaagaacgcgaaagagcaggctnacgcaggagaagcggccgcaagggacgccgagaagaacggggaacaagaacggaggagacgcagaggagaaagagagggagagaggaagagcggggcacaagca

SEQ ID NO: 189836 - DNA, 516 bp, Arabidopsis thaliana
aaccctccctaaagaggaacacagctggagctgcaccgcggtggcaggcgctctattactagtggatgccccgtgctgcaagaatttgcaggccccaaaatatatcccaaaccatacaagattttttcttggtaaattatatttagctaagaggaacactttaacttggctttataatcaacaattacaaaattcagacaaaaacgcactcatataacttcttccttagtctctggttaagcctccgagtcttctctatccatttggaactcttcaagttcatggtgtttctcactataccatttttgctcaatccaatgaaattcaaaattttggatcaaaagaaccaaatgaattctttcaaaactaaaggagaagaagcaattcatggctgtgcccgggatatacaaaatggccacaagggtcacgactgaacaagccattcatgcattaaagaagcttgcttgtccttcttttcgaccgttctcctgggaacatcttcatgatccatcctaa

SEQ ID NO: 189837 - DNA, 454 bp, Arabidopsis thaliana
aggagataagggggacattttacggggggagatttatgttgtaggccctccaaatcaaataacataccgaaggccgaagatccctggaagctcgtgaatacaaatctgtgcagtgtttaggtggcctccagagatcaagatctgcgccgagaaccattttttttttggggggggaagccagcaccgggaaccacgcgcgccgagcaaacgaccaccgacggggaggacgaaccggagcgagaacacaaggggcgcagagcagaacggaacaagagggcagacaagaaggaggcacagagcagcgaggggaagggaggacacgaccgagcaagacagccgcggcaaccccgagcggcgagggccgaggaaaccaaggaaaggacaaatcgagagaaagagagcagggagcaggcgggggaaggccaaggccgcgggcagacccacaaaccggaga

SEQ ID NO: 189838 - DNA, 473 bp, Arabidopsis thaliana
  unsure (1)..(473): unsure at all n locations
gaggcggccgctctattcnagaggatccaaatcctgaagacttcgggccgctaagctctccgacagttctacggcttaagaattaattgaagagaggtgatgagaggtacttactgatatacagatctgttcgatcccaaaacccaaaagggatccgagacgacacatcctctctcttagggctgtcgaagcgannaaaaaagccgctgttaacgacagtaacttctctgatcgtttgcttcggatccaaaatcttgggagacccttcgattctcagtctgaagtagaggggagacgagtattgttgattggggctcgtctcgcaagaagaagaagaaaagatctcatgaaggaacctggggttaacgatttcagacatggaggcatgtccagaagagccaaatttaacctgataacaaccttgacttggatgggatgtcctggtggtgaaaatccctgttgatgaaggagga

SEQ ID NO: 189839 - DNA, 187 bp, Arabidopsis thaliana
  unsure (1)..(187): unsure at all n locations
ggaaggaagaanagaggacacccccggaccaaaaaccaccacaagaaggccagagggcgcagaaagagcagacggccgggacagagaaagcggacgaagcccccgccaccagaagcccaggcgaacccagaagaggagaggacaacaacccgaggccaaaccaaacacccggggacacacagaagag

SEQ ID NO: 189840 - DNA, 451 bp, Arabidopsis thaliana
gggaacaacacaaccccccgtccaatgggggggccgacttttcccggcgtgatgaaatctgcaccccaagaccctggccccttgggtgcctcaaagaaagcaaaaaagcaccgggttaccctgtctttacggacaaactccccttttacttgtccacctgccgtcgaatacataaaccaccacaagggcagaccccaggtttattattttgcggggttccaccacagaaacccccaacacccaaagaaagaagcagcccggaaaacccaaaaccggaggaaacacccagacgcaccgcagaccagcaccaacccgagagaggagaacacccaaaccgaccacaaccaaacgaaccggaaacaacaagacacaccacacaaacgaacccccccaccaacagcaaagaagaaaccgaagcaaaaagagagggagaaacccgcccccggcaaaa

SEQ ID NO: 189841 - DNA, 484 bp, Arabidopsis thaliana
taccctcctaaggacaacctgactcccgggggcggcgtctatctagggatcccgctgagaatcgcgcgcttgccttatagttacattcgtttgctagtcagaaaatctaaactttatcctccttgcttctggaatctgggaggactttaaggttcttcttgtccaataattaatctctttccaattgtggattgtgtatcattcattgtcatcatctaatcttcttcttcttctacttacgagtttggagaagttatccgccattgaagcatttaaaatgcccgagaaaggaatgattttcccgccggtaccgagccaattggtgattttacaggccaagccctctttttcataggcggcttggtgctcttacagcactcgtctgcttccttatgttagtcgtttggagtattgcccggtgttcaattcaaagcttcgttcaccatggagattcaatgcttactctggtcgaataagtccttct

SEQ ID NO: 189842 - DNA, 174 bp, Arabidopsis thaliana
ggccgcagcacgagagcaaaaagcaaccacccgcaactagaaagacaacagccgccgcaagacgaccaaacacccgaagaacacaaccaacacacacgcaggcacaggcaaacaccgcgcgccgaagaacaagaccaccgagaacgacaaacggagcccgagacaagcatgaca

SEQ ID NO: 189843 - DNA, 209 bp, Arabidopsis thaliana
tttgagccattgaaaaagcgctgggctttggggcagccaagcatacgtcatgacaacagtacttgcaagcccggtggagcctcaattttgggaaacagaaccgcccaacggcaccaacgaaccaccacagcacaaaaagggcccgaaagggtttcacgacacactcgcgaacccacaagaaattgagaaactgaacaacacgcagggaa

SEQ ID NO: 189844 - DNA, 430 bp, Arabidopsis thaliana
cgaggggggggcgccgattcaagagggggcaaagctcgaagaaaacaagggccgcggacgaaaggacacagcaaagacggagagggcggcgccccaacaaagcgaacagcaccaccgccaccacggcaaagcggcctaagaggcagaaaagcacacacaaggaagggaaaaattcctttccaggggggggggagaaacggaaaagaaaaagaacgaaaaaaaacacggcaccaaaagggaaagagaccgacgacgcccggaacaagagaaacgccaaacggactaagaaccaagagacgaagcgagaaagagagacgcgcgagcaacgacgaaacagaagaggccacaagagggccgaccagcgcagagatagccgggacgcagaccggcacctaacgaggcggcgacagcggaaaccggaacaagaggc

SEQ ID NO: 189845 - DNA, 459 bp, Arabidopsis thaliana
agtcggatggggggcgcttcttggctgggggtgcaattctctagaataaagctgggtgattgctcgtccgtctattctacaacaacgatgtgtatgacgggcagaatttcgatggcgtttgtacttgttatgttgtcggcggcggggttgaataggcgccgcgggggagggggtttccctactttcgggggggacaaggaccgcgacaggacatgtacgcgaggataaaagggggaggggtaggggcagcggagcgcccgcacccgcatacggagctcgttaggggggaattattgatccaaaggtttgacggacgccctgtgccggccgcgatggggggtccagattatagacggaggttggggctggtggagaggcggtggtgagtggtgaacatcgtgatggccagagcggttccagtgtaagcagtgtgatggacggaagaggaggtgggatcag

SEQ ID NO: 189846 - DNA, 803 bp, Arabidopsis thaliana
  unsure (1)..(803): unsure at all n locations
gctgcttccccggcccgtaccggacctgaattgccgggtcgacccacccgtccgacctttcttaagctgatcgcacaaagggagactgaggagatgcttgggacgatggggctctcctaaatgaagagcacggtcctttgggacgaggatctaacggtatcgtcgcacgaaacctagaatcccagactccacactagtgaagtcgtagatctacatgaacgtgaacctacttcgttgcttgagattccaaacgtgtctcgatccccgtgacatataccaaacatgtacaaatcgattctacatacacagtctttgaacagcaatttgcccctccaagaacaattcggccttcgaattgggccgaaagcttgtaacccaactgggtggcagcttttctttgaagccaaanctgccctttaattggtcttcacagggacccaataaccccaggccgttacccctgcgtaacaccccctttttgagaccatcgtaaagctgggtcgtttaaccccgaactccctcccaaaaacggaacccgttgacccatgaatcactgcggctcccatttggaacagatccaaggccttttgccttgcattcgtctttgggagctacccgggttgttccccccttcaactggaaggggaccccatcccatgcgtcttgacattctattcaaattcggactaaaaaaaaaaccgggaacccctttagtttaatacccctccgcacaaaaacgggtaaaaggtttcccgggttccgccatttccacccactggaatttacttcccacttttaagagt

SEQ ID NO: 189847 - DNA, 1029 bp, Arabidopsis thaliana
  unsure (1)..(1029): unsure at all n locations
gccctgcagtacgggtctgtatncctgntcgacctacgcgtctcgaagagtctaagatatnggngcccnctntcgtgcaacgttgtattgctgctttgtacaatgagctgattgttcttgaggaactttgaccttttgcgttatctggcctacggtattaccttcactccttcttttttccttcctcttccttcctttcttattatggtctccttcgggaaggaaatctttctttatctctttgcgtgtctcttggttgtcccacttttgttacgcactctgcgaggccattgttctcgcccctattcccgcctctcgcataatgttcttccccaatatctttgtctctgctcatgtctccccatcgcgactaccttattctgactcctactcattatgtccctcgtagtctgtcanttgtacactctgatcgttggaattgcctaaattactctttgccaccctcctctctatagtccgtctctcttcttctatctcacaatcaaacctctcgtttgttgctcgtggctctggctatatcctttgcatctcgtcacgaccctcctattctccggtgcttcgcccctccccccctgcttatccttgatattcctctcatcatcttgtcgtcctaccctctctctgttgtttctccaccttgcctacgatctgtcttctccgcttgcttactaactatcacattcactgggctctccgaccatcctctttcggccgtttttcctctctatccaccttctatcttcttatgctccttctctcgactctccttccttccttgaactctnctctccctattccgtaggtcctctttatcaccttcactttctacttttgttacgagattttcctccttctcccatttcaatagctcttctctcccatctctcgtataccacatatatctcccctcctccctctgaccttgcactatcactaatcttttttcttgcgttttgtttctatgccgtctaccttcactcgtgtgttctttattatttctcctaggct

SEQ ID NO: 189848 - DNA, 931 bp, Arabidopsis thaliana
  unsure (1)..(931): unsure at all n locations
ggaggtgagcgagccggctctataaactaagtggatcgccccgggtctttttgtgtaattcccggtccagcattgcttccaatcagatgaatgggtgtcagattattcataatgctctcatttagcttagaggattccatatagacttccttcattctataagccattcgaaaccatacacatgggtgtaaccctgggcaaaggtttggacactctcttacttgggtacaacatctcccacataatggctacaaaaatttgcgtccaacaccgagtagcgaaaagttattaaatgaggtcgactcattgtacaaacttaaccaaacggtatttccgacattttggggaaaaaaaaattcactctggtggagcaaccatgtatggccacagtctactctctgtgtataaccgaaatactacaaacgcttaaccacctaaagaaattaggggagagtggacacataaacagtgcaattatatggcccgcagcattaatctcctgggagtgtctaacactatacagggtgtcacacatactggtgcgctccatgacatatgatagacgcctctacttgatacctattgagacatgtgtgtggctttcctcaatacatatgtgggagttgtttgctacagagagtgacaccgctccntgttggaaatcggacaacaattggaatctccgtatatatcaagcggctattcagtatcctcggcgcttattttccaaaactgttcaaaccggcgggtgcggggtaataacttacgtaatcccatgccacattttggctactctacatggtgatggtgcgtcctttgagcgggaaccctaatcaaagactaagagccttcaatggaaatgggagatccccttgtgacttactcgtacttgcccccccggaactcaggggggaaactcttataaacgacc

SEQ ID NO: 189849 - DNA, 435 bp, Arabidopsis thaliana
acttgaaaacggagtttggtaaagaccttatgtggagttgtatgaagttttattttggaaaataaaattatgatttattaagatatttttagtaggttttgttagagaagaattttgattgtggtagtgggaatatttgttatttaaggaggtatatggttgttaaagatatatagaagttaatgatgtttggaagtagttgagagggttagaatattgttggatagtgtggttttgaaagtagttaagagggaaattaaatgtttattaaagggttattgtgaggataagtaggagttttttttataagttatgtaaaaatatgatgagagagtttgttgagtagttatatattatggtgtaaggagggaagtgatggtatgtagtgtttatttaggtaagataagtagttgtttgaaggttgtttggttgaag

SEQ ID NO: 189850 - DNA, 1042 bp, Arabidopsis thaliana
tggggcccaaaagacgccccagcggggagcaggaagaaccacagggaagaccgagggagaggggcatattgggcgctttttttcgaacgagacagagagaacgagcaacaggggccacaggaggaagaacacaaacaagcaacaagaaagacaggaaagaagggggaagcgaaagaggcagacggagcggaaaggagggaacagggaggagacgaagggggacaggcagacgaggccaggcagaggagaaaagcgaggaaagaaagaagaggggagcgagaagagcaggagagagagagcgaccgagagaccagggaggagacagcgggacgacagggaggagagaggggagtagaggcgagagcagagacgacgagcgaggagacaggcagagagagaagaggcgagaacgcaagagaacgggacgaggacgacgacgcgcggcgcggaggagcaggagacaacgacaggcgacgaaaatcaggaagagcaggacggacaaggcgaggacgaggacgacgagaggcacgcggcggaagaagcgacggcagaggacgcgaagagcacgacagacgaggagcacgagtggacaagagagagaagacgcaggaaagcgcagcaacagaagaacgagacggcaccaacacgagaaaagaggagggcagagagccagcgaggcgaagacaaaaggacgggcgacgaggagcagcgagcggcagagagaacgacgggcgagccggggagcggagaggcgacaacacgagacaagcaaggagaggagaggccacgcgagacgcgacccagagacgagagaagcgaggagagacaggcgggggcacagcagacgcgaggagcaagagcgcacgcggaagagacaacagcaacgacgcgcgcgagacgagaaggaagcgagagacgagagagggcaaggagaggagaggacagaggagagggacagaggagagagatgagacagaggcgaggagaaaggagaggacggcacacagaagagcagagcagacgaagaagagaagacgcagag

SEQ ID NO: 189851 - DNA, 845 bp, Arabidopsis thaliana
atcgaaccccccggccgcccatttcacgaaagaccaagggagtcctattttgtctttttacagagaactcttatcaaaccgttaaacctatctttgaccttgagagcacaaaaatactacccacccaataagcatcagtgaaagcacttctgtgtcctgggttgccacatttactttacagagattatagcagaccaactgtatgccgatataagcctctgtttctccacgagttaaagttatcatgacaaaaacctccgtaagacgagaatgagcctcgatctttaagatcatcattaataaggaactgaactgtggaccgacattcaactaaccagcctctcagacggctgactaccagaacctccttagtaaagagttaatggagtagctaggtggcgccaggcctcctgaactgatatatcaatacctaacggtgacctttgtccttatggccttacaaacacatactattctcccagtcccgaaaagtccgaaagatctgcttacaagggcctaaacctctaagcttgatacatctcgaatggccaaccacacatccttccttggaattgcagtactggattagccttcgcgccccatatgagttctccccaacgcacgcacctacaaagctataaccaaaccttcttacactgaggtctttgccccggtgctatttcccttgtaggccacccctaacgacatagacctggggtcaacagcaaattctctgctcagactcccaagaaaaacccaagatttccccatattgtcacataaataccaccaacccgatggcctatatgctaggcccccgaaaaaccaaaggcccgttcaaagaa

SEQ ID NO: 189852 - DNA, 837 bp, Arabidopsis thaliana
aagagggacacagaaggaacacagccgcgggggggggcagaggaggcgaaacacgggaaaacaggaggagaaacgcgaagagcaaagcgagagaagagacgcacgggaacacgggagacacgagggaaacagaaggaggccaaagaacgggacgaacgacaagacgaaagcgagacaaaaaggaaaagggggaagggaaaaacggagagaacaggggggagaaaaggagaacgaaggagagagagagaagcgaggaagaggagaagagaggggaaagagagaagaggagagggaaggagagggagccagagaggaacgagccggaagggagagagcacgagcgaggaacgtgcgaagcgagcgaaaaaaaaaggaagaaaacgaggaacaaggcagagagagagagaaagagagaggagatgggacgagcgcagaagagaagagacgggcaaagacggcaagccaggggacaaggagagacaaggcagagagaagacacagcagaggcaacaggcgggaagcgagcacagacggcagaggagagcacagaaaagaggagagaggacgggcgagaagagaagaggaaaaccagcagacagggcagaggagagaggagaggagaacacaaacgaagaaggagccaggagacagcggagacgcgaaaggacacggagcgtacagcgagaaggacagtagacaggagaaacgagacgaaacgcggagagcggccacaagaagagcaggacgggacgggaggacgggagccagacgagcgagccagaggagagaggacgggaaagaaggagacgcggaggcagaagagaaagagcagcagga

SEQ ID NO: 189853 - DNA, 1054 bp, Arabidopsis thaliana
acggagccggaagagaaacagggcaaccgggcagacaagaggcgacagagttttggagacggaccacgcgaaaccaagggcgaaggcgaggggggggaagggggggacaccgagcgaggggaaccaggagcggcgcggagacaaaggaacggggaagagggcaggggaaaggaagcgaggagggacccgcacaaaacgcggagaacgcaaggagggggggaaggaggcagaagagggggcaacgggagcggaagcggggaagggaaaaggcgggaacgcgggcgggcgcgcacggaagaggcgcggggggagggccgcgaaggcacggagaaggaggagagagaagaggaaaaaagagggcgaggggaaggagaggagcacgggggcggcggagaaggaaggcagcgcggaccgggagcaccgggaagcgagccggagaagagagagacgaggacgcgaaggcgcgggacggacgagagaaggcgaagacgcagaaagagagcggacaagagagcaagcagggcagaggccgagagcacggcgaacgacagaggggccagcaggaggggaggcgcgcaaaagaccaagagggggagcggagacgaagcaacgaggaggcagcaacaaggggaggaacgagaagaagcagaggacgcgaacgggccgacggaggagaagcagcacacgagactgacaagacgacccggagaggacccgaacggacggggggagagaagagagcggagaggagaggagaggagaggccgccacgcagacagcgcgcgagcggggagaagagcgagagagagagaagaaagagacagaggcacagaagaggaaagcgaaaaagagaaagcggacgcacggcgcagaggaaggggagggagacgaacaggggcggaaagagaggcgacaccggaaagacaagaggacggcggaccccgagaggcgagcgccgcaagccacggggaggacgcaacagagccgcgcgagggcggacagacacagcaaagccgacacccgcaagaggggagcgaggaacgaggagacacaa

SEQ ID NO: 189854 - DNA, 611 bp, Arabidopsis thaliana
  unsure (1)..(611): unsure at all n locations
caaccccgatttnggggttaaagagaacaccccgtagacgaaggcggagggaagacggaacagaaagcgcagcaggggaggagggcaggacaccgaaatatattttggagcacgaccggcgaaccacaacacaacgaccgggggggggcggaccacaacgcaaacgaacaccaaacggaaacaggcaggacagggtacgacgacgagcagagggagacaggccgcccgcacgcagacaacgacgggcgaccgcaacgaaacaaacgagcgagaggcagcaggaaaacggggaggggaaaaacggagggacacgaggagagacgggcggcgacggaacgaaccgaagagcgaaagcagaacagacgcaagcaaggagcagccaagaaaaagcggccagggaggaggacaaccgggagcggagaaaaagcgacgggacaggggcgcgacaggggggagggggcgcaagaccaggacgcgaaccgccggaacacagcgacaaaacgaggggagcgacgcgaggaaaagagcagaagaacggcaggaggcggggaggagaacggcgcgacgacagggcagcaaggcagaagagcgcaaccgcgaagagagctggc

SEQ ID NO: 189855 - DNA, 390 bp, Arabidopsis thaliana
aaaacccccccccccgcggagtgggcgattccggttcttatgtaattcagatgcaactcccaccgcgcgcagctttttatttttttggcccgcgggcagaaattaaccacacaggcaagggtggggggtactgctctaggaacatataagcatccgccagcagctactagcatacgacgtggaagagctacgatggcagcacgataacatgccaacgagattcgcacaacatggtcaaggagctctccacatcgaacaagctaccctaatgacagagagacgaacccctcgccccaccgcacggaaggtgtcaaacgggcccagaggcaaatatactcacggtgacttccactcgccggtaaattccgcggaggatatgagttcgtctac

SEQ ID NO: 189856 - DNA, 612 bp, Arabidopsis thaliana
accaggaatgggcaaggccccgcaaacaacgcaggggcccagagacttaaacaaaaaacggccaggacgcaacacacgcacccgccgggcgaacaaaaacagcaaaacgagagaacaaacggaagcacgacagagcaaaacgacaacacacgaggacaccccgcagaaggacgagaccgaacgggaacagccccgcacgggcccgggagaggaaaggaacggggcggcagggcgaaacgggagacaccaaaaacaggcccacaagaccgagagagcaccggcgcggcaagaagccccacccacaaggcaaacagacagcagcgcgaaagaggagacaaacagacaccacggacgcaagcccacaacgggagggcgaaagagcgagaaaagcaaaaggacgaaaggagacgagaggaagaacccaaccccgccgaaacgccgagagaggagacgcgagagcaagaacagcaccggagaggcagaagaaacaaagaaaccggagggccggagccggcgacagggacaccacgaaaaggggagagaaggacaagaaaagaggaaggcaagggcggacagagaaaccgaaggccggaggcccagggaaccaggaac

SEQ ID NO: 189857 - DNA, 665 bp, Arabidopsis thaliana
  unsure (1)..(665): unsure at all n locations
agaaaaaacggagcgaggagggaaaagaatattggaggatgagttagtgggatgaaaagagttttattttagggagagggagtgtagggtattatattttgagggtgatattagagaataggtggaatgttttttaaaaggataaatgtattataatattatatttttatggtagttttattgattttaagtttttaattgaaaatgaaaaataaaagtgtttgtttataagtttaatagagagtgagattgatattttgtaggtatgagggaaattatagtggggaaatgggaggggggtggagagtagagtgagatttgaaaggtgaanaatagtgtttaagtaatagtaagaataatgagaatgaaagatattattttgaatgaattgtgattatgatgaaatcttagatgtaaagatatatttgtgagaatatattaattgaattaataaagagaaggtgattaaataaagaggtagattatatagttaggatttaaatgggttgttttaagattggaggaaatagaatagataaaggaagaataagtatgggtgagtaatttagtgaagtagattggaaaatagattatgattatagtttttgtttggagtagaaattaggaaaagtagtattgaaagaaggataattatgatttggaag

SEQ ID NO: 189858 - DNA, 588 bp, Arabidopsis thaliana
aaaaaacccgagaggaaccacgcaaccaacccaacaacacaccaacgtttctccagcatccgcacccccacacaaaagaacgccggggggccaagagcgggacaagcacaaagcagagagcccccccaccgccagcccaaaggacgcaaccacaacaaacaaccgacacgcgggagaacacaacagaacgaaacacaaccgcgccccaacaaagccggccacacgcgcagccacagcacgcaacaaaaagccggcgcccccaaaacccaaaaaccaagatcaaaccacgacgaagacacggcacaaacaacgaacaaagacccaggcagagaccaacaagccaaaaacaagcaccaccggcaacggagcgacagacgcacgcgcgcacgaagacagaagcgagagccgaacgcagacacgcacacagacacgcgcgcacccggccacaagaaccgcacggagacacagcgcgagggacaaagagcaaaccacgggcaccggaacataccgagcaacacgggaccacgacacagagaaagccgagaacacgcgcgaccgacgaagcacacacagcaccaccaagcacac

SEQ ID NO: 189859 - DNA, 767 bp, Arabidopsis thaliana
ggggaattgcagccatgacccacacatccgaatctctggcgccgacctgtgtgaacactggttttttcctatttcatgccgagaacatgagcgctaagctttaatgtctcaaacggaatagcggattgtcacatggataacgcgcctgttacatagacctaacatacaccttctgctaatgccatacactggtgactaatcaagtgctgtggtaccgcgcccggagcttgttgatctgactatggatcctcggcgagcgaacacaggagcgaccgttacagatgaaacaccgtgaaatgctttgcaataagaggcggatcctacagggatcctagcagtggggatggacgggctctttatgcgaatgaccgacccactgaacatgagagtagtttgtttgttcccggcctaggggccaccacgcgatgcagcagcagtcgcttcagctacagcttcatgagagaggaatattagaggcctcccctttttgctgactatactgagaccaaaccctatgaagcaccttgagctgaaggtacttggcattgcattaccatattgttggaagagataaaacgcatctaatggttgtagacacccttggaagacttttttgcggtaagagcgggtcccccttaaacgaaagaaaaaataatagggtggggcccttcttatggggatcccaaggttttaccgtccggccgggcctttcccgaggcccaaataaatccctcatattatttggggaacccccagaaccccagaac

SEQ ID NO: 189860 - DNA, 689 bp, Arabidopsis thaliana
aaccaacccacatagggatagctgaaactgcagctccaaccggtgcggagtcgctgtagagctcaggaccccgcgttctggttgtactacgcgggcgaacccaactatatatcatcacatcgcccgcatatcatacattctttggttctacgtgacacaacgaacaggggcatgacagcaagatgcaagctgaacatgggcacacatcagctcacaaaggtctacacggtgctacacgattctgagccacgggaccctggatgagatgatcaattgatggtgcggaaggttccttacaaggaatatatgagctaaggtgaaacttctgggcaggctaaaaaagctgagaggatatcctacaggtgaggtgggagaacagcaatttgacaggccctctatgcttttacccaactcactggacggacggaggaaccgctgatttgatcaatggtgccaccacgcgcagagtaaggcaacggttggactctttaatggatcagtgagacaacagccgcttaacatggttgctgcctgaggatacacaatacgctgaaatgccctccgttctcacgttaaaatgaaaacggcagatacaaaactgggtcccggaataaaaagattcccaatctatgggtattgtatgcaaaaaagacctttaacggcttcgcaacacatatgtaaggaacccc

SEQ ID NO: 189861 - DNA, 717 bp, Arabidopsis thaliana
gaaggggactgtcgggattatcttcacatccaattcacggccgccttaggctcaccctaaagtacaccaagatttttgaatctttgtctggcaaagaagccacatgattgaagtcttacgggttttgattcgataaggaccataatgtgaacaacatgaggacatactatattaagctgccaccagatgaacaaaggtaggctgctatgaacctggttgacgagtctaccggtacagaacaccgacccagccgagaggatttactggattgaacatgctgccgtagccacggtcgaagacaccatcgaaaactgccaaaacaccgttaaatgaagcgtgatgtgcatataggcccataaacgaccccattggtggaagctgctttcagcattgtcccaaatgcaccgatacaacctttaacagacgcgtctaggataatgctgatgatgtcaccctgtcttcggacactacactacaagtactgtcaaaaccgatcacaatacctgcacatcaccagcgcttcgtgttggcccattacagcccttcgttgaaagccgctgccttttttatggtgcttgcccaatctgttcaggatcttgatattcggaagaggtgggcattcacattggtggctacagccggtgaagacccaggggttagtcccggcctggataaagggtggtttttaataaacattatgggggtgggggaccattt

SEQ ID NO: 189862 - DNA, 638 bp, Arabidopsis thaliana
acaccacactccgggttagcattaagctggaggctccacacggggtgcgcggatcgctcgtagtaactacgtggactctccccgggcatgtattgtaatttttcggtgcgccctggcttggaaacgctagtaggtgtagctgatgtacagaactgtacctattaagggttactatggtacctattgcgactgtatgagataatctcatgctgaggatatgtacaggtcgctagtgtggcagtcaataagcaggagtctagggcctgtcacgtgtatgattccacagtcgatcctaaggtcacaaagcagtacgctgtgagttgaacagaagcaacacgtattgtcaatatcttttctactgatgatagacgcaacacatgctggtgtactggcaggcgcataatacatctgagcatgcagaagctccacagattcacgacgacacttatgggattatacttgcagatccaaatcattctcctgcaaggcactgcgtgagcaatagaatcagaattgcagaggaccaatcaacacagttgtctggaaccctgtattcttgaccgaaacctatgttgactgacatttgttcagaagtacaattcggggagtacaaaatctaatggctgtatgtatgcgta

SEQ ID NO: 189863 - DNA, 587 bp, Arabidopsis thaliana
  unsure (1)..(587): unsure at all n locations
gtgagattgtatgccataaagctctgcactatcgtaatttcgtcggcacgaccccagaatctgagcagcagcaacncactttttatttcaccttttttttacaactaccattctcccagcaaaatcattgagtgatgaattagttccgtctaatcttcgagagcactggggagctaacctcaagatgaacacaactggcaattactaaactgataaacactcgctggagaatagcgcgaatgaaagaacaattgtctccgacagacctgtgcccagattcttgttatcgaacaaatgattggccatagatctgtctgatcggcagatctgcacccgctggcattgtagattaacatgcatcattccccagttgtggcccgctcttgtctacgagctatgagaaggagaagatgcggaatcaatccttgttcctcagctgcagaaaccaagatacaaagaggcctcagaaggtgacgtcctgtctatatcctgtgtgactaacagaccgaggagtggccttatcttgatgtaaggcacctgtctgagcttcaaactacaccttcatgacaggcagaaaaattttccat

SEQ ID NO: 189864 - DNA, 587 bp, Arabidopsis thaliana
actgaaaaccccaccgcgagaggggggaccgacgcggagtaacaagaaggaacccccccgaggacccccattgtaaatttttaccggccccgacggccaaggaacaccaccccgacaaaacgcacagggcggcgggggatacaacaccaaaaccaacgaaaaacacaagcagaacagagacgccacaacaaccgggaaacgacccacaacaaaagaaggaacggcaaccgaagaacaacaagaagaaacacgcctcacgagacacgaacgaccacaaaagccaaacccagggacgaacatcagaagaaacaacgagaccccgaacagcgaaaagggcaaggacaacacaaacacacacgcacaaaaacaccagcaacgaaacacgaacgccaacaacaccaccgacaaaggcgaaaaacgacacgacagaccaacgcacccaacggcgcgacacagacatacacgggcgcgggacaaccacccgacggccagcaccaaaaataggcacggaccggccggaacacggggccgagacaatgcacgcaccccaagcaagacgtaacggtaatccaactagcacgcgcaca

SEQ ID NO: 189865 - DNA, 778 bp, Arabidopsis thaliana
agccaaacccaacgaaggggcgaagacaagaacgatttcgtttcagacgagcagcagagagaccggaaaacgcaagacaagggcaacaggaaacccggatgcaaaaccccaggaaacgagggagaagagggaaaaccacacaccggaggccgccggggagcggccgagaaggggaaccagaccagaacgaaccacaagagagaagagacggccagggagcctagagcgcgccgaagctcagcaacaggactgcaggggacaccgccatggaccgagccaccaagagcgggcgcaccagggacatccgccaccggagaaggtatgaccaccacacggcagaaaacaaaagcaccgagggcacccatgaagcccggtgccggaaacctatgcacacatcgagctccagggggggcgccaataggcaacaccacaacccctcgaagaagcacctggaacaaccgggggacgcccgcggggaccgccgaaccaggaggcaccaccccacacaccgcaaggaccttacaaagcccgagccaagatgagaaacactcgggggagacagcagagggaaaagggcacggacccccacaggaccaccacaaaggggactcgcgaccccaaaatccagaggggcggggtgcacgggcctaccacccgaggggaggcgaacaaaccccacaaaaggggccggcacggacattgggcaccgagatcgcccaaaccgggttaaccaccgtctccgcgagagaggtgcggccgacctccaaccccggggcgc

SEQ ID NO: 189866 - DNA, 703 bp, Arabidopsis thaliana
gggttagcagaagctggagcctcgaccgcggtggcggtcgttgtagaactagtggatcccccgtttttgttttttaattcgcgccccgagcgatttgtataggtgactactgggcttgcgtcattctattcacaaacaacggaagcaatgtttctcctccactgcaagcatatcagtctcgatgataggcactagattcacccaattgcatcgtggaatacctattgcggggagactggcagccttcatccgatagctcatggactgctccgacactagcagagtcgtcattctctcttttaccaagtaacactgcttttgtcccgatctcggccgcgacagctttccagcactcactagatacacgagcgtctcttctcctggctctatggcgtccacttagtctttaagtctactactatatcctgttacccttggcacctgtattttactaagactaggtgagtcctactatcgcctgctcgatgctttttgcgcgacaacttcccgttccccttcgcaattcacatttgaacacacatctattatcttggtgaaagacgattcccctgcctacgcatcggagaatcccccttacccctctcacactctcgtccctaacaccttttttctcttcactcgatccgcttccctgtcccttgcacccctggaagtcccttcaactcccagcaccccctctctt

SEQ ID NO: 189867 - DNA, 884 bp, Arabidopsis thaliana
aagtcttgcataatcgtaatattggcggtccgctcaaaggaaagtacaacccgcaaacattttctcactttgttgggacacagtgaaaaatagcgtgaacaacagtgtaggattgacaagaaactagatgaaaaagcgcagatatacctaaacataacatgaatcaacatataaattacagcgacgggtgcgcacacaaatgaaattacatgggaaacagagataagatcttatatgaagactgagcatgtatgcatggctgaaacaatcaggtccaagtacaggcaaacctacaagaaggtgttaaacctcaacataatgatgctttatttcgtgagacacagggacgacacggatacatgtgcccttgttgccatataaaatactgagagctaaatggagaagtaaggctggatgagctaaacaaatcgaacagtcagcacacgccttacggctttctaagaatgacaagacctggggaaaggggggctttttttaagaggcttgggatgcggtatctaccacaaccaccaacaggcccccaggacaaccacattagtctgaaaaggggccctggacaacaggcgcctcaaatcaagaaggggcaccacacatgcacagaaacacggccatccaaaaggggaccaggcacgtaattattctggcatggccactaggcgcgctgcggccagactagtggcatcactcgtaggaacagggggcccagacacctccctctgaagagtaaaaccctggaacaccccacagggctcaattcaatccccccggggatattgcgtacccagttaaaaaggcttattgcaacaaggtattttggcccaaactgaactgggcctttttctgcctaaacaggttaaagaacg

SEQ ID NO: 189868 - DNA, 515 bp, Arabidopsis thaliana
  unsure (1)..(515): unsure at all n locations
aaaaaagcggagctcaccgcgtggcggtcgcttagaactagtggatcccccgtttttttttattcgcggccgccaaagagcatgattctcattgggtcttagaagaaaattacaaggacggctgcttggaaagcttataaccgctgctccactcaatgggggaggtccggaggaagcatatcggcttttatcttgacttaaagactctgatggtgctntaccaggggttatgggtgcattgcatttatcacctgacctaaggacggaacagattgtggtgccatatctttgtcaagcgaagagatagccatctgtcggcttctgcaagtcgcccgtcttcattcttgagctcaaggtctgcaagtgttagttgaattaccatttccttggccccagagatgcttcttttttcatgagcctcccaattttcatatttgaagctcttgcacatgataaagactctttcaataacttccttcactgatacctcgcaagtagttctcccaggcttttta

SEQ ID NO: 189869 - DNA, 736 bp, Arabidopsis thaliana
gccaaaaagacatcgccaaaggaggaagtgagagagacaggagagagggtaagaggagcaacaacgggtttttcccggtttggcgacagagcccgcacaggacgcccccagagccagggggggaaaacacaacaagggcgggcgcccaaaacacgagcacaaaacgaaggggcccgcgaccgggaaagccaccggcagggcacaagcagaaaaggcgggacagagcaacacaaccagacagacgggacggagcggagacagggggggagccccagaccggacgaagagagcgcgcgcacccgagcatgcgcacaacggcgcaagcgggggacgggcaaacgggagaaaggcaggcaaggccggaacagggggaaacggcgcccagaaggagggacaacacgcaggcgggcacagaagacagacggcacagcaccagcggaaagcaagaagcaccggacagaggacagcaaggaggccgggcaaggacccggcaagcaaggcgccggcaggaacgaggcgaaacgcgcaagagagaacggagataaagggcggagaaaacggcggaggacagcaaagccccgaccgagggggccccgaaaacgacgggggagaaggacacagcggcccgcgcaaacaacacaccaagcaccggagaacgagccacggggcagcgggaggacccacaaagaagcaccgcccggcgacgaggggcgcaacacaccagccagacgggaga

SEQ ID NO: 189870 - DNA, 960 bp, Arabidopsis thaliana
tttttgggtttttaaaaaagtaaaacccccctaaccccaaaaatatggtttacaaattactaaaaatatatatataacatgggggagaaaacattatcaagctttttttttttttacacgaacaatagtggaaaaaataaataaataaacttttaggatttattattaataaaaaaaaatatatatactttaataaaaataatatactatattaaaatataaaataataaataataccttaaaaatatttatattacaaaaacatatataaataaaaattaaacttaacaaaaactctatataaataacttattacactataatttatattaacttacaattattattatattgaatttattatttaatctataataataaaatttaatatatctatttatatctcttatcaaacaataattaatcaaatttaataatttatcttaaactcattctctcacctcaaaatataatacattaatcttaattaatcaaacctaatagaatagtacagtaactacataaacataatttctgatcatatacataatataaaaacttaaatatataatacaaattaatctctcccatttatttataaaaattattactaataatatatgtataaaaagtataagttattgattaataaaattaaaatattacttgattctattaaataataattatataatataacattgaatctatatcattcataaaaaaatttatttaataattttactaatctatatcacaaaaataattcaataatttttaaaacaacattaattaaactataactctataagaatttaatcaaataatagtatcttaaatccttccaatacgtactttaataactatatttaatacaaaatttaatacaacatcaattatataaatattatcattttatgaagttaattaatacactacgtaatattcatattcatataa

SEQ ID NO: 189871 - DNA, 1357 bp, Arabidopsis thaliana
  unsure (1)..(1357): unsure at all n locations
ggggaaaataggggccccaaagagagccccagagcgggggacgggagaaacgagagaggcagagagagagacagaagctgtttacacgcggtttaggaagaagcgacaggcacacaaagggaagaggggggaggagggggcgggggacaaaagacaaacgccggccgcaggaccgccagccccgccaacacacggagaggaccggagcaccgcgcacacgagagggcccccggcgcagcagagaggcggaggacagaaagacagcgagcaagcggcacgaagggacaccaacgaggacccgcgcagcaagcgcaacacgacagccgacacacgagcaggcggcagcacgggaggaggacgaggcaggggagccgcggcggcaacacgacgaggcgacaagcgagccgacgcgagcagaagaagagaggaggagaagagagcaaggaaggaagcggaggaagaccacacagagagatgcagcgaaaggagcgaagcgagagagagatgaccacacnagacacaggcggcagcgagggaagtacgcgaacgcggcagaggacgagatagaggacggcgcatacgcaaccgcggaggcacgggaagtagacgacgcgacggcgcagcgagacgaggaggcgacacgcggacgagcgcaagacaaggagacaaggaaagcggcagccagagaagggcaggagagggaggagagcacgaggaggaggacagcgacggcgaggaaaccacaggggacaggagccgagggcgcagcgcgagagcaagaagcgcgcgaagaaaaacgggagcgacgaacacggcgcggagagagacagagagcccgagaccaccggcgcaagagaagcggggaacaaggcgcacagcagggcccggcaaagcggaggacggaccagcgcgcgagggaagacggaaaaggcgaagcaggcggggggaggcaggggagagccgccgcagacggccgcggaacgaagaggaacgcacggcgaggagacaaggagaacagagaagagaaaggaggggagcgcagggaagcggagagggaaagacgacacgcggagaggccgacaggagaaggggggaccaacgcggagggagagaaggagcaccgggacgacaaaggcagcagggagagaaggcaacgcgcccaccagcaaggggcacgcaacacggcgggacgaaggccgccgaaggacgggcgacgcggaacaaagcggcggacaggcgcacgccagaaggaagcgaccgaggcaaggccgaggcacgacaagggaggaaacggggacgggcgcaacacatgccagggagaccggcagaagaacgagagagccgaaacgaaggcccg

SEQ ID NO: 189872 - DNA, 439 bp, Arabidopsis thaliana
taggggttgaaagaaaaacccgagaccgaggaaaggcggcaggcgagaggagagacgacgaaacaagccgggcagccccacgcgaatcgatttgtaaagaacccagcgaaagaggaacgcaccgcaaaaaaaagggggggggggaagacgaaacaaccgagaaaaacggcacacaccgacgaaagacaggcgagaaacaccgagcgcgaaaaagacgaaccagagccccgacacgcaaaagggcgacacaccggacaaaggcaacgcacacgaggacaagcgaaacgaacgacacagcgcaagggacggacagagaacaaaaaagccacgcagacacaacagggcagggcgacaaaggagaacgagaagcagcggctaacgaacgagccaaagaaagcaggcacggcgaaggacggcgacggcgcacgcacgagacgga

SEQ ID NO: 189873 - DNA, 1188 bp, Arabidopsis thaliana
gaaaaatttgggcccaaaaaaaagccccagagaaagagacaggagcccaaggggcggagaggaacgggcgaagtataaagaccattttcaacggagaaaggagacaggaaaggagggggaaggggggggacgacagcaaaagaccggaacccgaccagagggagagaaaggggaaaacaggaggcgaaagggcaaagaagagccagcaggggcaggcgagaggcaaaaaagcagagcgggacgaggagcggagaagcgaagacggggcacggggaggaacgaaagaaggagggagggggaaaggcagggagggagaggaaggagaacaggcagccgcaacacgagaagacgcgagaggagaggaacaagacggccacggaggccagagccgccgagacccagaccagaggcgcagcgagaagcgagagaagaggagaggcacagcgcagagccagcggaagacaagagacgcagcgcaagggcggcacagagccggaagcggaagggagaggggaaagaagcgacgagaccagggaggagaagaagcgcagacgcgacgcggccaggtgcagacgagaccgaaggacgggaacagacggaacgggaagcacccaccaaccgaagggccgacagacacacggcgaggacacagcgaacaagccgacgagcagcacacaacacggagacagagacgcagacacaggacgggcacccgagcagacgacggcgagaggcggacgagcgaacacgagcgcaagagaaagagccgagaccgagacgaggaaccgacagaagaggaggacgcgaagagcagaggaccgtagacgacaggagggcagaccggaagcgagggagaacacaggagagggccgcacgacaggcaagagaaacaacggagacaggcaccgaggagagacaggaggcgagagagagacaaacgaacgaggagaaacgagcacagaggcgcagaagcgaagacagcaggcgacgaggcgccaacagagcaaacgggacgacgagaggaacgcgacggaggcaccgacaccacggcaggcacacaacagcggacgggacgaggagacacggcgaggacgcgatcgggcagacccgagcggcgccgggacgaggaagacgaagcaaggcggagacgaaaggacggcaagcgaaggagagaagaggcgagacaaa

SEQ ID NO: 189874 - DNA, 571 bp, Arabidopsis thaliana
cttggaaaattgaggcccaaagctcgccaacgaatacgcggccgcgtaaaacccttcttcctgaagttttccccatttcaaaaaaactggtgtataaataaaaatccacattgaaggcagaagaatatctacctctctctctcaatctgtctgactctgctctctctatctcccattgaatatagaactttctatcaagcacataagaccttgaagaataatcataaagtttccaaccgaaagtttgtacaaaggaagaagatagcctttccttttcttctgctttgctccagaggagactagagagacctatcagttcagtttgtgttggatttgacggcgaactgaaacgagaaaatccacgtacgaagcacccacccgatcccctgtcctctaccatatacgattggaaacaacatattcccaagctggatctccttttcttgcaccaattctaatggcgcaaggttaacgaacctttcttttggccttccctttattttccattttcaccccacgggctgaatctaggaaaccttttcctcttctggaaattagcacccttgtgact

SEQ ID NO: 189875 - DNA, 740 bp, Arabidopsis thaliana
acggccaaacaagacaagaggaagcacgagagaaaacaaggggaaagcaattttcgatattaaagcgggacgaaaagcgagccaaacaaaacgggagggggggccggaaagcacagcacaagccaggacgggaaaggaggaagacaggcgacgagagaagagcaggagcagaaaaacggcacgcagacagaagaacgaccaaagggggagaggggacgacgggcgaagcggcgaaagaaagacgcagcacaaccgagggaagaagacaaaacgcaacacagaccaacgaagagcgaaaggcacggggcagagaagcgagaaaggcaagaacaaggagcgaagcgagaaggggaggggagggagggacgacgagacacccaagcacagacgaggacgaacgaacaaggagagacacgcaggcgagagaagcagcagccggaagaggacgagaagggggcgacaaagcgagcggagaaaacaaaagagaagggagaaaagcaacgagaagagagggaacaggaaagagaacgagagggggaagcggagacaagcgcgagagaggaggaggggacgaagcgcaagcgggagggagcggagcaacgggaggaaaaagaagggaaaagaacgaaaagagcgaggaggacagaagagaaacgcgggcaaggagaaacagaagcgggagagcgaacccgagacggagagacgacgcaaaccaaccaagggaacgcgaaaacgaaaag

SEQ ID NO: 189876 - DNA, 987 bp, Arabidopsis thaliana
  unsure (1)..(987): unsure at all n locations
ttggtcgatgtatccataagcttgatatcgaattcgcggccgcgtcgatttaaaattctatgttttgtatcttttccttgacaatcgggtaacagcgaaaaaggagcagttagtgaaggaggagctggaaaaggtgacattttgggataaaacattaattactgggggttttcgaaaatcctaacactaaacttgaatgtgttttctctgatatttgcaggtgaaataagcaggtacacatacaaccgacatctgggtcttaccaccggattacgtcaaaaattatacagaccggattgagaattttgaggaagtgactgctcccttgctgaagaagcttctggagaatcgaaaaagtccacaagcagaggaagtggtaaaatgaggatataaggcaagttcatgtcnccttccacttctatctttattttccattcttcacatttcatttatactcatatatcatcagtctatatctttcaaagtattctaccccctctttttttatcttcattctttctaatcttctatccctgaacattactacatatttttctcttttaatactcacctgatcactcattttttttatctgtcttcttggctgttactgcttgaatcttataactattgaatttagcttttttactatgtctatacatatatgacttacacgtcccgtctcaactactctatttcgtccttcgttgactcttcatctcttacacagtacattacactatcatctacgccttcacattcatctgttacactcatacatcaccttatctgtctcctcatatgattgggtcgagccttatataggattactncgctatgttaatataggctattctccctacgtacatcactgctatactcaatatctctaattcatattcactatatcattacactagatcatcattatctgtcttgtgacacatttatttctttttgttctaaatcaataattaatctcgacat

SEQ ID NO: 189877 - DNA, 942 bp, Arabidopsis thaliana
acccaaatttgcctttccgcaacaaccacaggggggaggcaacacggacccaacagcacgacgaacccacaagcagaaaacaacaaaaaacgaaaaaaccaagcaacacccgaaaacggacaaagacgacaggcagccgccgaagaaaacacgaagcaaaacgcacacagaaacaagcgaagaacagcaaaaggaagcaagcggaggcacacgacagaaacccagggagcgaggaaacaaccaagcggccacagcgagcgagaagaaacacccgacgcaacccgacagcgaacgtaacaaaacagcgccccacgagaaagccctcccaccggtggaagagagcagccccaagagacgacgcaccacaggaccacaacaggagagcttagaccgcggagggaggctacagaaggcagcatcgcgaaatatgagcaatcaggagaagccacatgacacaccaccgagagaggccacagacaatagatacacaccggaaaggacgggaacgacacacaccgaaccacacccaagcgagacctacggaggagaggaagcaacaaccacctaccccagagacccaaaaagggactccaacacacgcatagccacagaagagcacgacagagcccccacacacgcgggaacgacacaggaaggagaacagcgcccgcagacaaaagacacagggacagccggccagacaacgaccgcggagggcgagaaagagcgaacacccaagagaggcagaccagcaaaaagactacagcaaaggaggacaggggggaagacgaacagagacaacggagcgcaaaaagacagagacgcaacaggacgacacagggggagcaatagagaggagaccccgacaggggaacacagaagggagagataccgaacaaacgagcagccaccgcacaaccacagcgaaagcgacccgagggc

SEQ ID NO: 189878 - DNA, 321 bp, Arabidopsis thaliana
acgctattgtatttaaagacaggaccggaaacaaggaacacgaaaggggggcggcggcgagacgacgagcaaacgagagcgcggccgacagccagcagacgcagcgaacggcaagccgcacgcacgcgacaagaagcgcggaacggccaaccggccgggacgaacgccggacacaggcgaccgaggcacagaaaaagcacgcgacgccgaccaacgcgaacgcgaagggggccaagaggcaacgggcgccaatacgtcagacgaggacacgacaagaacggaagaggaaacacgcacgaacccaaccaggcgcccaaacac

SEQ ID NO: 189879 - DNA, 561 bp, Arabidopsis thaliana
aaacccttggggaaaatatggggccccaaacgaaccccgaggaacgacgaaaaacagcgcaaaacacgcaaccacaacgaaattttacacaaattggccccgccacccagagcaaacgccacaggggggggacaaagggcagagagacaaaaaaaaacccccccacagggcgacccggagaaaaaccgcaaaaacgggaggcagcaaagggccaaaaaaggagccgagccgggacggcagccccagggagaaaacaccgagcagaaaccaagggcgacaaaccaaaccaggggccgcccaggaagcccagggagaccgaagggcgcaacgggaaaagcagggcacaaacacagccaccaccgaaccaagacggaaccaccgagggggagagccagccaaaccggagcggagccgccacaaggcagcacgaacgacaaaaagaggaccgcacacccacaacagacggagagccaacaacagacgggccacgaggaacgacaacaacccaacgcgacaagacccagcaccacggacgagacgaccaaggcgacacccgagcag

SEQ ID NO: 189880 - DNA, 292 bp, Arabidopsis thaliana
gcggcaagagttgacggcgctttttaaccaccatagtgtacataattgagcggtgaaaaaggcacggaagggaaggatctgggggaggggtctgtgagcatggtaggggaaggaggagaagatgaagggagatgatgtggtaagtggatataccgcaaggggtaggcaaagggcggcgagcatgagattcatactctggggtctggcgggcccgaccgaaacggagtattcgaagtgatgggagtcactttgtgggggcaatgtaggtgagctcgtcgaagggagtctgatc

SEQ ID NO: 189881 - DNA, 887 bp, Arabidopsis thaliana
  unsure (1)..(887): unsure at all n locations
aaaacnattttagggttaagaaaaaacataaatcttttatttgngcttggtagaaaaggaaataaaaaaaaggggaaacccccccctctgtcttgaaagagaggggggggaggagagaaaanaagatgataaggaaaattaataaaaaatcgaaaagaaataccaaaggaatgtctaaaagacaagatgttgagtagagagacaggcaaagggaaagggatcatgaacacgaaaaaatcgtaacacattcagagcataaagagaaacgattatatcggaaggaaggagggcttagtcgagagacggcagagaatagagagacaagccagcgaacatgagttgaagtgagggaagatgaaggataaatggcgtcgtcacgtgtggaacacaagaaaataaaggcggaggtggtcagggaagactatgggaaaaactgggatgggagacaagaggaagaccgagatacgaagaacatgaggaacgggtaatggatacataagagtgttataagaagaaggcgagaggaagaggaccaattaggggaggtaaaaataagcgggagagcgacgggagaaaaataatcaagctacaagggggagagaaaatcgcgaaaaaggggaagggcgaccgagacctgcttaagggaacgagggcgacaggcaaaatccttgggcagggaaaaacgaaggtacgtgggaggagaaaagtaaggtgaaataaagagaaggggagcaatgtactaaggaagaaaaggaagggaatgggagaggtgacaagaacagttgacgggacagagtcacattacatggaagacacggggagcatagcgacggatgggtaagcgaagggggaagaagacagggataaaaggaagagacgtgggaaga

SEQ ID NO: 189882 - DNA, 620 bp, Arabidopsis thaliana
aacgaccccgcggccgcgttgctttcatcgccgctgatgaccaggctttttccctgtttagctctggctgatgaatgcaaccaggattcttaaaaggtgactttgagtcttggactttgcgaccgggaaggcaacaattccgcctaagaagtgttgcgacgctgttgaagatatcaaagaaagagacccaaagtgtctgggtttcgttatacaacaagcgaatacaggaggaccagccttgaatgatcttggtgctcaaagacaaactattcaactccacttcttgtagctccaacgtacttccaatgccaagtttagattactactcgtcgaacatcgtattcaaacatgcacacaacaccggggaccgcagaaaagttcggcaactcagctacttccctgattagggaggatcatcttccgcacaggaaggtctaccccacccttttggttctcagcccctgccgccttttgatatgggccggtcttccttttggttccttgggaccccttatgggcccttaaagagcctattggtttatactccattctcaagggggcattgggctaaacaaccctctactttccatctataacatgaaaatatgtctcgggagctc

SEQ ID NO: 189883 - DNA, 480 bp, Arabidopsis thaliana
tctagaaacttagtggattccacccggtttttttttttaattcgccggtcgcatctcaaaggcaccctgtgtgacgcttctagctgcgcatgattttaattccggatgttagactctgcacgatgcttgatacgtaacaagcgaacatgccgcatattgcttcaatgtcagaaaactgttgcttcgacttatacgtgctgccagacatgaccctcatcctacgggcaatggaacggacccttttcactaacctgaggtcggaaatcaccctgatcctgcttattaaactagaccaattttcgagtttcactcggggatccattatgaatcccgccttcagtggagtcgtcatttaccatacaccccttgctgggcatcacaccaaaacggcaaccctgccagggtaaatactgccccgtgaactggcaacataattgcaatccgctaccaccattacgaagtcttctatttcggcaataa

SEQ ID NO: 189884 - DNA, 844 bp, Arabidopsis thaliana
agacaacgccgggggcagggggccccagaacacagaacaccgccactaacacagcaaaaaaaacccgacgcggccgcccacacaacaacacccccaccccagaaccccagcggccaaacacaggcaaacacaaacaaaagaaacacaaacgacaccccgcacagaccgcggccaaaagagcagccccaacaacagagcaacaaccgccgaccaacacaaagcaaccccagacgaaacggagccacccgcgaggcaaccaccacgcacccaagaggaaagaacgacggaagaacgccaggccgaaccaacgaaggcggcgacacacccaccccgcgcacgccccgacgcacgaaccgaaaatctgaccaccacacccagagcccgaccagaggcacggacgcaaccgccggcaccgaaggacaagagacgaacccgcagaacaggctccactccggaaacagcgagcccaccgaagaagacaaccacggacgaggcgaataacacgcgacaccccggggaccacgacaagacgcgacgaacacgcacaagaaggaagagcgcgacacacgtacccgacagcgagccgcgaggcagcgcaagagccacgcacccacacaaacacccacagcacccacaacaaccaacacccaagcgacgcaaagagccccaaaaccagaaaaaaaacagcaacggacaaccgaagcccgacacgacccaagacccccacaacgcaaggcgatagccaaacacctagagacccaacagagacccgcacgcgtcagacgctcacgaagaacgcccaaaaccccccgcagccaaatagcctcgcagacaggacgcggaa

SEQ ID NO: 189885 - DNA, 1166 bp, Arabidopsis thaliana
cccccccattgaaaaacctgaaggaacccaatgcaaaaagaaccctaagggaaatagaggccaaaacggaaccccgggaagaccacaggacaagacaggccacaagagaaaccacacttttccacagggtgccaccggaggaaacaaaaagagaaggaggacccaggagaacaccgaggcgaaagaaccgacagaaggcacaagcaaacggcaaacggaaccagaacgcggacgaaggcgaacgaaaagaacgacgaaaagggaagccgggggcacaaggaacggcggaagcaaccggcaggaaggagcggacgaagagaacggacggaaagaaccgagcaagaacaaagacaaacgacagcaaaatcaaggggcgcgaacagaacaaaaccactgaaggcaaaaggacggcagggaaagccaagacaaagaggacaagcccctgtacgcacacaggcaaagcgggaaacgagggcaccaaacagcacccaccgcgcccgagagacagcagataacacgagaaggcggaacacgcgcacgagggcagaagacgaccaagagaagacgaacagcacgaggacgacgaggcacaagaaagaggcgaagccgagggacgcggggcaaacctagcaggcggcgctcagcaacaagccggctagccacacaacactcgaggacgaagggaatagaggacaaaggcactcgaaagggggaaagaagggccaaaccaaaggacaccgagggagggaaaaaaaggaggggagggccccaaaccccaagagcaaagaggggacaaaaaacacgcaagaaccaagaacgcggaaggagaggcccccccggaaaaacgaagagggcgcccggggaaagaggcacaaaggcaagagggggcggagggacaaaaaacagggggcaaacccaaaacagagaacggacaaaacaaccacgagggaaagggacacaccaccaggaaacgaaccaagccgggggcgcaggccaaaaccgaacgagcaagcaaaacaggggggggcgcgccgaccaaaagggcagccaagaggctacaccaacgcagggccaaagaggaaagcccaaaaacaacgcaacaaaaaaccggagaaacccaaaacaccgaaacccaaatcgggcgccacaaacgagaaccaccagga

SEQ ID NO: 189886 - DNA, 490 bp, Arabidopsis thaliana
aaaaaacctttgggaacttttgggcccaaacggcccttcgggaagggcctgagaacatgtggcgcagatgaggccaaccagattttttccaagttttttaccaagcgagacgtgtctgcggagagggtggagatggtggactagagaaaggagctattcagacggggaacgaatggctaggggagctcggaatgcggcagaattacgtggaggggttgaggaggggagagggggtgtggcaaaaggggagcgcctgaggaagggtgcaggacggggggagggaagggggaaggagatgggcggtggtgagagcggtgaccgagggatggatagcgaaggtgtggagagggagaagcagggaagagggacgtgaaggtcaggatgaatacacggaggagagagggggaagggaaagccgaaaggggaaggggtgcgcaggggggcgggggcagcaacgggacggggggcgatataaagggaggtgaaaggg

SEQ ID NO: 189887 - DNA, 214 bp, Arabidopsis thaliana
aagaaaccccccggggggacgtataattacacatcacggtgttttttttgccgcccactcaaacacttgggttgctcttacacgagactacaagctcattggcaatttagcatagaggcaaggtcctccctacccacactcgtcaggctggaccgacatatcactttccttacaaggatatcacgacagttaatatttaggtttccctggcagt

SEQ ID NO: 189888 - DNA, 296 bp, Arabidopsis thaliana
cggacgggagacgacccaagaccgacaacgcagaacagcatacgcaagccggcaccggcatttgaacttttaaaggacacgggccacgccacgcgaggcaagagcacaacaagcgcacggggcaaacggaaccggacgacaaaagccaaatatcgaggaccaaagacaaggccgaaccccccaagcaatcgcgccaagaatgacccggggaaaataagagaccccaaacgaaagggcacctgcacggcgcggggggaataggcaacaacacagaacgccgcacgggaccaggccga

SEQ ID NO: 189889 - DNA, 524 bp, Arabidopsis thaliana
  unsure (1)..(524): unsure at all n locations
ggacgattggagcgaaaagctccatatcgaattcgcggtccgatatctaaaaatagagtgcaacaattttatatatattttttcacgagccanacggggcaacaggaagagcataaatgattgggtaggtcagcctataaaccgcaaaagcaatttcctagtacacatctcatcgacggtggacatcgacctcgttctttattctaatctacttctcgtagtgcgaccaggcagaattctacactttaggaccagtaggagttgtaataagacttatcaatattcattaacaactaattagtaagtgaagaaccgtagaaccacaattaactatcaagaccgccctatgatgctagcgcttatgtgccaagcatatcatcagctatctgttatagtcgtctaatttccaaccctatgtgcatggacgatgagtatccgcttgagtgactacggtaactatcgctggtatagacctccatattgccctcttatctcttgccaatatgaggtcatgacacctcatc

SEQ ID NO: 189890 - DNA, 379 bp, Arabidopsis thaliana
  unsure (1)..(379): unsure at all n locations
gaaaccancgacccctgacgagaaacaacgcaagagaagcggaagacgcgtacggaagaaacagttttttttttattacacacaacgagaagggtacaaacgagaacgacagggagtgggataccttacacaccaatcaaccgcgcggaccccaacatgagatccaaacggtgaaacgagaacacgaagaccaaaagatcacatgcgattagcaatacgagcgtcacaaggtatacgaataacgtacgcatggaccacggctactacgcatcggactccacaacaaaacgcgaccaatgctcacacgccagacgaggacgaccacatcaaggacgaaaccggcgtgacacgcaaggattcgcaaccccgcgggcgacat

SEQ ID NO: 189891 - DNA, 783 bp, Arabidopsis thaliana
  unsure (1)..(783): unsure at all n locations
aaccccaaatttgggggaaaagagaaaccccgaaggccagagaacggggaccaaggaagagaagcaagaaccagaagaagcccaagttttacttgttaagacgggaagaagaaaagaaaaagggggggggggcaaaaaaaaaaaaaaacaacgggaagaggaggaggagaaacaaaaagcaagaagagaaaaaaggaggagcaaagaagcaaaacaagaaggaaagaggaagagaaggaaagagagaaagaggaaaacaacgaggagaaggaaggaggaaacaggcggcaagaaaacaaagaggcaagagaaagggcgggagagaaaagcaagaggggaccggaaacaacaaaagacggggacgaccagtaacgggagaaacagaaacgagaacgaccaaccgaacccacagaagggggaaaaaaggagaaggagcaagacgaaaaggccaacgcagaacagaagaaaagaagaacggcacaaggcaacaaagaggagccgacgcgagaacacaagagtcaaaaaaagaaaagagcggggaaagggcaggaaacaggaagcnacagagacagagaaaacaacacagagagaaggacgagcaagacgaaagaacagacgggaagagcaaggggcgggcagacaagaggagagaagcgagcggcgcacaaaagaacagcagggaaacaaaaacaagagcggaaagaaaaacgagagaagcgaagagagggcaagccgcggcagacgaaggcacacgagagggaaaggcaaagcaagcgaggccaa

SEQ ID NO: 189892 - DNA, 1180 bp, Arabidopsis thaliana
aaaaaaaaacctaaaggggggaaattttagggacaaaaaaggaagacccaaaaaggggaaagagtggggggagaagggtgggggattgttaaaagatgaagggagttttttagacacgattttaagagagagagaaagaggagtgagggggagtgagggggagaggggagaaaaagagagagagggagaagggggaacgagaagggagaggaggaagcagagaagaggaggcaaggaagagggagaaaagggaaaaaaggagggaaaaagaaagagagaaaagaggggaagaagggggagaaggaggagggcagagaaaagagaagggaaaggagaaagaggagaaggaaggggagggaggaggggaaggagaagaggggaaaggagagaaatagggaaaggaaaaaaagagggaaggacaggaggaaaggagagaaagagaggggtagaaaataaaataaagaaggggggagacggaatgaagctgaatggaggacggaaggagaacgaagagaggagagagaaagaggagacagagacggaggaggatgaggagaggggggcagtagagaagaacgacagcggagaagcagggagacgagacaggggaagtaggtgaagtagaataagaggacgagagagaaaagggagaggagagtagtaaagatgagagaaaacgaaggatgaggagagagctgagaaagagagggaaaggagggaaagaggaaggaggaggtagagggaagaaaagaggaacgagagagaagaacgagaagggaaatagtttctatagagagaagaatgagaacagaaaaagaggaggtggagagatgcgtaaggggaacgaggtagaagagaggggaagagagaggagagtagaagggaggagaaagagagaaaaaggacggagaagagaaaggaggagaagacagaaggataaagatgaaagcgtggaaagagaagacggaaatgagaagaaggaattgaaggagagaagaaaagagaacgggagggaagagggaaatcttggaagagagaagagaaagagaacaggagaaaatgagaagagagcgaggaagaggaggtgggagagagaaaggaaagggagaggaggagaaagctatgagggaacaggaaaagagatgagaagcaagagagaaagagcgagaagggagtgggg

SEQ ID NO: 189893 - DNA, 821 bp, Arabidopsis thaliana
gcggaccgagtatattattttgtgatctacatcttatacaggatttttttcaagtttttgtggagcccagactatgacataccggcaggatctggactggtagatcctaagaaccgaatatgcgcacgagcattggcatacaccttatcaactattacagatggtaacaatgtatattccagagaaactcaacctctgaccatcaccgcataagtcttccgtgacggagctaacaaatggtgtagaataggatactggtgcttatcataataccacgaaaaaggaatggtgtctatagaccatgaaagttagcctgctaaattgcgcctgtagatatctagacctggctctattccgtaagggcgcaaactccatttctttattctaggagagctccaaaaaatagctgggtggcgttcatagatataaactttgcctagctgacatccttgtgatcaccccttcggcctctcgttgagcggtatttcaacacgtagataaccaatccctttgaaccttatagaacacctaccatgaaacctggcaagcccatgaattggacctaactgcagacttatcatttacccattgcattttggtgcctatgaagccttgacatcactctagtttctaatcttaggttcacccctagtgtatgaaacaactcggctatcacatacccctcaatagcctacggcacccacttttcgagatcgccaacagacaaacggtcgattcggaaaacaggcacgtcttcaacttgtattgccatattcaagagctcatatgtgctgccttgcagtaacggtggctcatcatac

SEQ ID NO: 189894 - DNA, 1195 bp, Arabidopsis thaliana
agcccaaaacccgagaagaaaaaccaaaaccaagaaaaccaagtttccaccttcaaggagcacgagacaaggaaccacgggggaaaagggggacaaccgaacaacgagcccccacagccacacaccgccgacaggacagcgacacaagacggaggacaacaagccggacagaggagcaacgacagccacagaagcccgacccacacacgaaagaacccgaggcgacgagacgccccgagcggaccagaggaccgccctcacgcgacaagggcacgcccgagcggccgcgacgacagaccggcgccagcacgcgccgcgaacacagcacgagcacacacagcaacaccgacaaggagaaaccgaacagcagagcaacaagaacagcccagcacccgagcaacacgcagcaccagaacaaacgacacgaggacgacagccgccgcgcacgcccacgggcaccagaccacgggacagagcacggcacaggacaggcacccgaccaaccaaagaccgcacaacaagacaacacggagcccaggcacgcacacaccgcgcccacgacgaaacagaccacgaccgcacagaacaaccgagccaaccgcacgcgagggacacccacccacagacacaccaccgacaaagaaaaacgcgagcaacacacaacagaaagccgaggcagcgaaggaaagagacagagccacccaacaaagcgcaggggcacgccccgcaaacgaccgcccaccacaagccacagacgacagcacacaccaaaacaccacagcaaagcagcacccccacagaccaaagcgaacacgacaagacgacgcaggagcgagacacaccgcgaccagaaaacacacgaccgccacacgccgcaagccaccacgccgccgctcagacacacacgcacgagaacacagaccacgcgacgcacaacgccaaacgacaggcgcgacccacgcacgccgcgccgcacccgcaccgagacccgcccacacacaacacccagccgaacgcaaaagcgcagcacccagcagaacacaacagacgagcaaaagacgcacgcacacacacaccgagacagcgcacccacgcgaaacgggaagcggccagcgaaccggcaaccacagcacaccgagccgaacacaccgaacctcagacacaagaggagaaccacacacggcacacggcacga

SEQ ID NO: 189895 - DNA, 511 bp, Arabidopsis thaliana
aaaacgacccacgggggggcgtctaaggcgatcccgtttatttcacttgcatatcttcaggggtttcggataagccaccagacatcaatctaagccttaagcaccaacaaagcctaaaccgctaggactatccatcctttcttgactaccttcaatacccatgcctctgctgactttgatcctagactaactgaatgtcatatcgagaattttagacctatttacgactctacaccatctggctatactaaagctcaaatggtaccactatgcacagagttgctccatcgacaccgcaatctctcatctttttctgcgcctcccgccaaaacccgcaccgcttaaccaagcgctttgcaccactgaccccaagcaccatacaaaccattcccaaaacggttcttctaatcgttccttgacaaccccgtacttgggtaccactgcccaaccccatggcgccctactggcgcttcctctttggcccccttggacaaccttacacccacaaggt

SEQ ID NO: 189896 - DNA, 839 bp, Arabidopsis thaliana
gaacccttgggagaaattgggcgccaaaaacacccccgcgcgcgaaacacaaaacacagcccagccaggacatgacaacaacgaaaacttttccccacctttttaggaaggcaaacaacaccacacccggacgatacggcagccaggggaggccaacggacgccccaggcgcctccccgaggcacaccccgcggaaaccggtcatcccgcctcctcagccgccccgcatgcgcccgcccgcccagaaaagcaaggccgggccgacaataaaggagaacgccaactccacaaggcaaaataccgaaacgctcttgcccgcgacgacaatcaccaccccactccaacgaacgcaagcaccgccactaacacggacgccccgtgcccgccaacccccgccaaacgggacacagaccccgtcctacaaaaaagaaaccgcagaccccgccaccaccgacccacgggccgacgacaacgcaccactaccccgcacgacgaacaagacccacgcgcaaaccagcggcaaggcagcacagactgaacccaacgccgccccgccagaaaaagcaagtgccccgggcgcgagcaatcactcacaagcgcgcgcaaggagaagcgctcggagacagcgcaacaaccgcggacccaacgactcgatcaactcaaaacacacccagggggacaaacaaacaacggaacagcccacaacaatctcctcagagaagcacccacgatacaccagagaatccaagcaacccccgggaaacgacactccacagagaggccggaacgcccacacacgacatcacacgaacacgacgagagcagacacgcacacgacc

SEQ ID NO: 189897 - DNA, 955 bp, Arabidopsis thaliana
aacccccggggggaagaaggggcccagaaaggccccagacgccgaaacgaacacatcagagggcacagacaacccccgccgcgaatataccgcacatttgcacggcacccccccgccccgaccacacaccgaggcgacaccggggcgacacaccacgcgaccagagagagcccacgggcccacacccgcgcagcaacacaccgaccgagcagagacacgcgcaccgacgagcaacggacgcgaagccagaccagcaaagccgcacagacgcagagccagcccgccacgcgcacgccaccgagaccgacacacgaccagccagagagccacgcgcgcgcagacggcgaggcgccggcacggccagaggagaacgcggcccgcgagacccgaacaggcacacaagcacacgacacagccaaaagcagacgacaaccagcgccaccaagcacggcgcacaagcagcacccaggaacgacgcgacacacacactgcggcacgcgcggcgcgcaccgcgaaccgcaccacgacgcacgatgcaagcacacacacgacacatcgaaggacgcgcgacacaccacatagcacgacacgagacaacaacgcagacgatgagaacacaagctagcgacgacgagcgcgcacacagcaccacgcgcaggaagccacaaccacacatacccacgcgacgcagacaagaagggcgccgcagacagccgcgaagacagcaacagagcacgcgcagacgaacgaacgcacagaccgccacgccgccgcgacagagagcacgacgcgccagacgagcacacgcacaccgcggcacaccagccgccgacggcgcagccgtcgcacgaaacagacataccgcgaacgaccgacaagacgccggagaggagcaccaccagcaacagcaagcagccacgcgcgcaccgacacagcgccaccacgaacgcgggcg

SEQ ID NO: 189898 - DNA, 1123 bp, Arabidopsis thaliana
  unsure (1)..(1123): unsure at all n locations
tttttgatttttttgtagagaagtgattaatatgttatttttgtgttttattaataatgtttgtggggttttatttttttatattataattattattaatttttttttatttttaattaattattttataattgtggtgattttatatttttttattttattgtttttattttgatttttttttttgtgtgtatatttttttgtggttttttgttagtatgtattagtagtttttttatgtttttattttttttatttgtttattgtttaatgtttagtgtattgtaattttagtttattagatgtattaagattttaataatattgttatgttgtttatatgatagttgattataagtatgtcgataatttgtgtttttgtgtttttgtaattttggtatttttgggtgtgttgcatatatgtaaggttgtaataggtatcataattatttgatttgttagagctatgcttattgttatataatatgtttgttaatattgtgttgttatgtatatatggaatagtgttatgtttgatatgaaggataagtaagtataatatagatctattgatatatgatgtatgtgagttaataagtattgtattggattataattatttggtaatatatttgtattattgataaattatatttatatattgatgtgatgttataggttaaggatatattttaatattttatangttgtgaatgtcttacttgtgagatattatatttatagatgaatattnatcttatttgtgtggtatatatttgtgttcgtaagatttgtgttttatgttatatattattgtggaatattttattaagtttgtacgaattatgttgatgatgtattgattaagttgttcagtgggtcataagtaatgttactttaaattatatagttatagtatttctgtgatgttctaatttgctatgtgattattttgagagttaatttgtttttttgttataattttagtatctttttttgttatgtatatatatgtgtgtttcatgtttaatgtagttgattttatattataaattatagatagatatctattaatttttttgtttgtttgtttgtatttttattatataaattatgatttatt

SEQ ID NO: 189899 - DNA, 1208 bp, Arabidopsis thaliana
gggaattttgggggcgcgaaaagagggagccggagtgaagaagagagaataagtgaaacagtaagaagagagcggagaggagagagagaatattgttaagagatatttttaagtgaggggagagagtgagaaaaggagaagaggggggtgaatggggggggaaagaaagaggggaagaaagaggagggagtggaagagaggggaaggggaaggaagaggagagaggaaaggagaaggagggagaagagggagggaggaaagaggggaggaggagaaggaaagaggggggagaagagggggaagaagagagaggaaaggggggggaggggaggaagagaggggggagaaggagggggaggcagggaggggagaaaggaaagaaggaagggagggaaaagagggggagagtaggagagaagagaagaggaaagagggaagaggagggaaggggaaaggaggggagagaggaggggaaagagaggggaggaggaggggggaaaggggaaggagtgggaagggagaatgggagagggggagggaaagtggggaggaggagaggggtgtaaagggagaggggaaagagaagaagggaaacgagaggggagagaggaacgaaaggaagaacggagaggagaagaagatgggggatgaggaagcatcagaaggagggtagagagaagaaaggaaagaagtggaagcggagaagaagggagaagagagaggacagagtgatgagggtgacggtctgaggagtaggaagaaaacaaggtaagaagagaggtgcgacaggagaagaggagcataaggagaagagaggaagaagacgtggatatgtaagagaaagatgtgaccggagaagaggagacaagtagagacagtgagaaggtgaagaggaggagagagagaggaagtcgagagtgaaggaggtgagtaaggaaagagggagggaagaagtagagatatggggaggaaatgagagaaggagagaaattgaggagatgtgaaaaggaaggagaagaggggaagggtggagaagaggggagaggagataagtgaaggggagaaggaagagggagggagggaaggagagggaagaaaagagaggagctcaggtgaagagtgtagggagtgatatatgaagcacgaagagaggagagaggagaagtgaagaagagaggagaagagaggagggaaaggggaagatgagg

SEQ ID NO: 189900 - DNA, 794 bp, Arabidopsis thaliana
  unsure (1)..(794): unsure at all n locations
aagtttaagttaaacgggaaaccccaacccgggaggaaggaacgaaagtagaaagaagaaggggcggccaaggaacatgcatgtaattttgaggaacgaaggggaaaaagaaaaagaaaagagacgggatgaagaacaaaaaaaaaaaaggagaaaagatgaaaaggaaaaaaaaaaaaagaaaaataacagaaagaaataaaaaacaaaaaaaaaaaaagtgaagaaaaaagggaaagagaaaaagaaaaaaaaaagaaaaaaaaaatacaagacaaggaaaaaaaaaagaaaaaaagtaagaaaaaaaaaaaaagaaaaaataaaaggaagaggaaagaaaagaaaaaaagagaaaaataaaaagaaaaagaagaagtgaaagaaaaaaaaaaaaaaaaaaaaaacgaaaaacaaaaaaaaaaggaacaacaaaatagtaaaaaaaagaaggaaaaaaataatagaaaaaaaaaaaaggtaagtaaaaaaaaaggaacaaaagaaaaaagaaagaatggacgactaaagaaaagaaaacataatgattttagtgaaacatagaaagaaaggaaaaaagaggggaagaaatagagagtggaaaaaaccgaataagggactagagaaggaaaaatngagagaataaaaagataaaaaaaaatatagaaaaagaaagaaagaatagagctagcaaggagatggaagaaagaaagaaacgaatagataaagaacgaaaaatccacggagaaggagaaaaaaagagaagtaagtaaaataaaaaaaagaaaagaagg

SEQ ID NO: 189901 - DNA, 719 bp, Arabidopsis thaliana
ttcatgaacaaccctataagttacaaactggagctccaccgggggcggcgtctagaactagggacccccgtttgattaattgcggccggcggacggaatttgttttcattttttttaatttcacacatcttaattattcttcgcgcccaaatcaatataaactatcgaaacccgcactacaggggggcccccttcaatatccctaactgataactaaaaattactggaccacattaacaacttatccagaaaaatctgacccacaacaaaaaaccttgactaaattcccttttgcaacaggcccaaataaaaaagccaacctaacaatcttccaattgtacccaaacaaaatgctcaggggacaacttctcccccaaaatatttcctaaaaattcaaacttctaacatacacgttaaaattaaacggttaatttttctaaaccccaacacgtcccctaaataatatcctaataaacaacccttttttataacactcaaaactagcaaaatcttcaccctttcttatataaaggatgtctcataaagcatctattacctttaccccaataatcttgtgtcaaaacacccaatattctactccatacttacttttatataaaagatatactccgccggggataaccatacatcataacaccgattatacaaaaatacgcgggacctattataaaacatatacaccacggcatcatatatat

SEQ ID NO: 189902 - DNA, 1054 bp, Arabidopsis thaliana
ggggaaaaaaacccaaggtaaaattttgggcccaaaagactggcagaaaagaaaaaaaggaggaaggaggggagagagagaaggggagaggaaattttgacaaggttttttaagaggaggaggcaggggaagggaacgaggggggaggggggggaagaaggaaagaggaagaggagagaaaaaagagagcaaaagagaggagggaaagaaaaagagagggaaggaagaaggggaagaggagaggagaaaagggagaaaagggcgaagaggggggtaagaaagagggagggaaagaaggaagaagggaggaaaagaaatggaggggagacagaaaagggaggaagaaggggaaaagagaagggagaaaggtggagggggaaaaaaggagaagagaagggaagggaaaacaagacgggaagagagacggcagggggagagagagggagaggaggggaggaaaagagcgagggaaaaagaaagggagagaaatagagaagaaagaggggagagaatacagaggcggtgaaggcagaacaaggagagaaagaacaggggaagagggggaacggaggaggagaggggagaagaaaagaaacaaaaggaagagggaaagaagagagttgggaagaaggggggagaaggaggcaggaaatgggagaggagaaaggagaacgccggcaaaaaaaagaagcggacagagaggagaacaagggaaacaaggcgagggagtaaaaaggaaagagaagacgagggtgaagaaaaagaacgaacgatagaagggggagaaagaagcaagacgggggacaaaccgagaaaaggtagaagggagacgggagggaaagaaaattaacgggacgagaaaagaagtcacccgggaaacgaacaaaaaggaggatgaggagagaagaaacacagaggccaggaggaggagaaactggaacgcaagaagggggcacacgggaagaagaaaaaggaacgaaagggggagaaggaggagaacaccgcagaggagggggggaggaaaagaaaggagcaggaggaaaggcgaggaaaa

SEQ ID NO: 189903 - DNA, 1081 bp, Arabidopsis thaliana
aaagccttggggaaaagggcccaaaaaacccaaggaggaagggggagaagggggacgcaagcaacgaagatttagacaatcagggagagggagaagcaccacagggggaagggggggaaaagaaaagaggaagaaagagagcaaagagagaaaaggaagcgggagaaaaaagaagggaggcaacaggggacggaaagagaagggggacgaggcgaaggcggaaaaagagggggggaggaggaagaaagaggggagaggaaaaaaggacgagagagaagaaaaagaagaaagaaaggagaagagaaggagagaaagagcgaagaggacagcgagagagggcgagagcggaggcagacagaggagcgagagagaacaagagagagagacgagagagagagaggggcgaaaagagagaggagcgaaagaggaggagcgggaggaaacagaggagagggaagagagacaagacatgagagaaggcagagaggaggaagaacagaggcggcagaggagaaagaaccaagagaaaaaaggggacaggagggacagagggagcagacaggacacgggaaagagagccgagagaagagaggcgagagagggagcaagagagagagacgagcgggagaccagggaagagagacacagggagaaacgagcgagacgaggcaagcgacaaaagggagacaagcaccaagagagagaagaggggaggagtgaagagacgcgcgggagaggcaagcagagagagcagaccgacgcagagagagaagggaaagagagagaagcgagaagagagagcagagaggagaagacagagacagagaaagacgggagaggaggacgagagagcagggaaagaggagacgagggcagcaaaagagcgagggagaggggagagagacaagcaacgagagagagggagccaccagaggagaggaagacggggcgaaggaacgggggagagagggagagaggagccagagaaaggagaaggaagaagagagagagaagagagcagagagacggggacgggcagagggaagggaaacacgggggggaaaagggagcagaggacgcg

SEQ ID NO: 189904 - DNA, 670 bp, Arabidopsis thaliana
caacccatgggttaacaaaccaccaaagaagggcaggcaacaccagcggagcaacattggttaaggaagcagcaaaaaagcgggggggcgacacaggacgggcgccaccaagacgcaagaagcgagacacacgcagcacgccagaccaacagaagaaacgcaaaacgccagccacgcgcaacgagaacaaagccagaacgaagacagggaacgaagagaggcggaaacaaaaaaccgaggacagaacgccgaacgccgcgaggaaaagcggccaagccaacaagaagggacacagagcccgaacgaccggaggaccgacagcggggacacgaaagagccacgccggcagagagaagacaacgacgcaacacaagcgcacaggacaagagcacaagaggccacgacaagaacacgaacggcaagcacgacacgacacaaacgaacccgaccacgacgcgaaaccgaacaaccggccaccacgacgggagcagaaaacgaaagcggggcaaggacagccacgagccagaaagccacagcgacgcagccagcggaccccccaccaccacaaacaccagcaagagtaggaccggaacgacggacgggcgcgccgaggggcaaggcccaccgcagacgaggacacgaccagccaaaccagggacaaccagaacac

SEQ ID NO: 189905 - DNA, 893 bp, Arabidopsis thaliana
  unsure (1)..(893): unsure at all n locations
aacaacctataaggttaaaaactgactaacgggttggttatctcaactatggaccccgctttctttttccggaccaccaaattaactatacggtgggatcacttatgcccggctactccttatccaaggcacactgggacaccataatccaacctagtcctcaccaactataccatatcactcaaaccaagatactcactccgaaacataatgtacaaaattcttataatacacaaccaccataaactaccggatgacctcttttgctacggtgatcaagaaagactataactcctgtgaccatcacacagtaatcccgataatcagtttataaaacgaaccgcttgacacaatcccttctgctacacaatacctcctcctatcctcgctaagtctgctcaaggcataatgctacatcctagtggtgttctaacttgtaacttgcagttacacgtcgtaatattaattcaaggataatacaataacaacgtggctcaacaattccagaccatatgcaatcatcccccaaatcactatctccccgccattttctgatcacttccagtcactatgtcacaatcttgcggactacaactacataactagaataatagccattcaatgggacgcctcccatatagtcttcacccatccacgtataatatgatcttcacattattaatccataatgttaactatgccttccnatgtcccccctccttcaggcatcctgccctccattgcgtattctacacaaaactctaacatcttttactcgctacccaatagaaaaataagtaatactttaacatagactttactctcataattcctctcgtgtcacacgagtatctttcataattctcatcttactatctgttcagtaaatataa

SEQ ID NO: 189906 - DNA, 1407 bp, Arabidopsis thaliana
  unsure (1)..(1407): unsure at all n locations
aagagggagaggagagagggacgcaggagaggagagaaagagagaggaaaaaagaaattgttgggcgatgttaaacaggacgggagaaaagaagaaaacgcaggggggagagcgggggagaaaacagggaggagaaagggagagggaaggaaagaaagacggaagagaaaagggagagagaggagagaggagagggaaggggagaggagaaggagaaagaaagggggagagagcaagaaaagagaagagagaaagaaagagagaaacgagagaagaggaaaagagcaaaagacacgagaaacgaaggaaggaaaggacgagaggaaggagaaggagagcagaacgagggacgaaggaagagaagagagaggaagaggacgcgaggtgagaataaacgaaaggagaggagacgagagaggagaaggaggggacgaggagtatgcgagaggagatggaaataggaggaaggaaggacgagtaggaggataagatgtcaggagacgtgcagcgaagaggagatgagacgaacgnagagagacggggatagcagggacaaacgagagaagaagataagagcacggagaggaagaggacatggagcacggagcaacgagacaggaagcggatgagagagagacgacgaggagggggaaggagaaagaggaggcaagagaacgaggagaagaggcgagagacgagaagagaaggggaagagaagagaagcagaagaagacaaaaggaaaggaggaggaaagaagaagaaggggagaaagagggaggaaaaagagagaggggggcacgggaggaaaaaggaggaggagggcgaagagaaggaaagagcagaaggaaagagaaaggaaaaaagagaggagcgggaaagggaaaagagaaagcgagagagaaagagggaggagggagagcagaaggagaagaaaaagagaggacggaaaaaggaggacgagggaagaagaaaggagaggagaagtgaaggcacggaaaatgtaaggacaagagagaagaggagaaggggaaggagaaaggggcgaaggaagaagaggagaaggacggaaagcagaggaagaggagagagagaaaggaaagagaggagaggaatgaagagaaacggaggaggagggagagagaggagcacaagggaggaagggagagagaggagggaagaggagacaaaagaaaggaggagaggcacgaagcaggaggggggcgaggtgcaaaaggcgaggtagaggaacagggagcaagaggaatcgaagcgagaggacgagagagagagagaagaagagagaagaggaggaaaagaggagaggagagaagaacacagagaaaaggagcagagaagggagacgacacgaggaaggaagcaagcagaggaagagcgcgagcacgagg

SEQ ID NO: 189907 - DNA, 574 bp, Arabidopsis thaliana
  unsure (1)..(574): unsure at all n locations
ggaattctgccaagaacccggccgccaaaaacgcaagcctccactagacatttttcgtttttcnccttccctatctcgagtgtggctttggtactactctccgactgaatcttgcagcagaataacgcttccttctttgggattatcgcccggtggaaccgctaactaaagaatagatcagaagtcagctcgcgaaagggctatggcattactcttcgatattgctgattaggctcatttgggctcagagctaaggggatccctagaagcgcgaggactccttacgtgcacaccgaacagctaagggactggatcacaaccaagtcatcttgacttggcccaaagcttcgtgatacaaaaactatgcacttctcttacttgagccagataacctctcggaaccctgcttccaaaggggaagcgcagaaaactccgacctcttactttaaagggaacatgggattaccgggtgaaatccccgcacgaactgtggggaaacccggccttagcctggaacacagcccctgggcatcttggggaagggaaccacatccagccgtaaaacccgggggct

SEQ ID NO: 189908 - DNA, 923 bp, Arabidopsis thaliana
  unsure (1)..(923): unsure at all n locations
aggaaagctgccatcgaatccggccgccaaaatagcgagcatgccgagacttatttggttttaccccacgtgcatatggagtggtgctggggattacagacggaacaacattcgggcagatattgcgatagctggaagccgaagatcgacctgtagaaacccaccaccacgcaacgcaaaaaaagctaggggagaagggccataggctagactacaggtcaacgcttatggtgctgacagcacctcgaggcccacagggagacctgaaagggctgagatgtccatagggaataaccgaaaaactcatgtccatggaatgagaaccaaactctatgctggactgtgggcccatagctatgacatggccatctcgtaggcccatgaacaaaccttatgaaagtttcaccaagcacgggcaaccccccgatttaagagcggggaagaatcccctagaaggaaaatcctcacagaaacttctccagctgtaaaccaaangcacaaagatcgcgcatccttcttcctgggggaagagaatactttatcaccctggcaccacgaccacaaagtgtggtggtctttaccatcccttagtttatctcttagtccctcaagctcaagtctagagagacttatggcgccaacacaacgacgctcagggggaacccacaattctcaagacctcgtaataattgtggggtcctcacttcatatgtcgccaaccccgcgcacacatattagcggagaaaactctctctaccacagagaaaaaaacgttcaaaatcgcctcggacccccgtgtgaggtttcggcaacccccccactaaaaaagagggatcaatttcccgggagtaaccccaagcatcgtcttttcggcaaacgtgatctagaacccgggtgggtagaaatctcgcaagcccggggtt

SEQ ID NO: 189909 - DNA, 1241 bp, Arabidopsis thaliana
ggggccccaaaggagcagcccccgaaagaagaacagcgatcggacgcaagacgagatgaggacgcaacgatggaggaacgagcgaatgttttattatccggcacgtcttttcggaaacaaagcccgcgtgggacggcacaacgaacaccgaatgagggcgggcagggggcggaacgcctgaggagagaagggacatggcagccgcaagaggagacagacgaatgaaaaaggacacaccggacagagagaacgaagacagcgcgcggcgcacgatgaaagcgcaccaggcccggagagaggaagcgagcgcacagcccgagcgagaagggagaggaaacgacgtcgagcggacaggaagagaagcgcaagaggacgacgaaaacaagccagaggcaaggagacaccgggccacagggagagagcgagagtgcgaagcaacagcgggagggagggagagaggcaacgcagagagagggaaagcaaagacgagaaagagcggcgacaggcagcaaagccaacgcgccaagaaaaaacgagcaggagggccaagagggcaccggcgcagagacgacccacccacgtgacgggaacggagcggaagaccaaactgtgcacgaggccggccgcagagcaagcaggcgcgaccgaagagaacaatggcaagcagcatctgtgactgcaccggaacaaggtcacgaaggcgcgtacgtgagaccagcaggcggatcgcgacacagtggatagcgatcgcactgcaacatacggcgcggcagaacgaacgaggaacagatcgcgcgaatactcgaacatgacgctggggaagatcggacatactgcgatgacggcagagggacgaagacagatgcataagcgcaacgctcgctcgaagaggagcatcatcgacgaacagacacatgacagcgctagtaccatcacaggggcggaaacgcaacgaacggggcgactgaggagccggaaaacaaagcgcagaaagagacaagaggccgaccggagcagggggcaagacagctaaggggagagcggaggagcaaggcggagggacgggcgaagaaaccagaaggcagagggaggcaaccacggacgccgagaaccgcgcggaggaggagagcgaagcggcacccccaagacagaggcagcgacaggaggaaagcaacgagggaggacaaagaaggaagggcaggaaagaagaagcaaggacacgacccggaagagggacagcc

SEQ ID NO: 189910 - DNA, 1003 bp, Arabidopsis thaliana
aaagcatcgccatcgaatccgcggccgcgtttcctcctcaatctaccgtttcgccgttttctccgccatatcctcaggctaatcaggaatggggcaacccaaattgggggaatcaccaacatgggcacaccccctcaagctaatagcaacgtcgaggactgggctgagaaagccaaagaatgggcagctgctaacaaggatcagcaatcacagcatctctgtcacccgaaccacaccctaagcggtacataggtctaaccaaccaaccagcactcccacctccatgtggtaatccaaggatttttccatatcaaccacgggcaagtttcccacggtagataagggcttatcacggcagcaatcagtcaagttctcccagtctgcccacccccacaaaacaccagtacccggaggagaataattcccaaaatttaccgcaacccagggaaaaccgaggaagcttttccctgggagctctggaattgcccccaaagaaaaaaccctgggcctacccagaatttctgtcaaatatcaatccaccacaggaggggtgcccctaaaaaggcgaattgcctccctggtacaccaaaaacaaagctcctgggacatattaccaaccaccaaacccatggaagggggggccattaaataatccatattggccccctggcaatgggcggggggggggaaaccctggtttccaacccaccggggggggcacgaccacttattgggcccaaatcacatggcccatttacgagtggcgagaatcccaaattctacgggcttgggctccccacccctaagactaaaaccttttcaggggggaaatcacaccaaatgtcgctatggggactaacccccccataacaccacaccaagtggggagtgtgatcctatttcctcccaaaaatacctttcattttgggggcaaactaaataaccctcaaccatggacctcatcctaatgggccccaacccccctggtcttggggtcaaaaac

SEQ ID NO: 189911 - DNA, 993 bp, Arabidopsis thaliana
tttagggtaaaaggaaacccgaacccccagccgcggacggcgggccgccactagaaacgaatcggaatcggcccgggtttttaattttaagacgcggcccggaactacaacaactccaccgggggggggggcacaattcaacaagagagggaaacgcaccacccgaaaagacaaaatggaattacgaaacccggcccaacccaccccgcggaccccccccgcctcgcgaacgaaatccctaaaacgcagacaaatgccaaaccaagcacacaagtcgcaacgccccacaccgcccgcgccagcggagaaaccacccgagcagggggcaccacaaggaccaaaaagaagaacacgcaggcgtaaggcacctcggaccccaaccaagggacgggcccccaccaccccagccaaagggccagccgagaacagcaacacccaaacaagcggatacccaacaggggctggcggcccaaaacaagggaacacaataccccggagaaggatcctcggcaaaaaaagcgccctggggagacccaagacccgcgccgacacagaggacccacgagcgaagcggaaaccaacacacaaacaatgacgacccgaacagaaccaggtaatgcagcaccaaggttccgccatacacgcatggccacaccattccgaccgaaaaaagggagtgccacaccctggacccacacctggcaaacccccacactaagcggaagtagacccaccccgagagactccgacagacgcagcgaacaaaagcgagaacagaccccaacgggggcaaacaggaaccccacctacttgggcgaacgagccccccgccatacacgatgattcgcaccccggacctctaccccgccgacaacaccgtgaacagggagccctgactgaaacgtcggccagaggacaccccttaggggaaccacaccgcgccggcacagagacacttctcagaaccatgcggcacaaccgcagacacagtag

SEQ ID NO: 189912 - DNA, 1218 bp, Arabidopsis thaliana
  unsure (1)..(1218): unsure at all n locations
ggggaattgtctgccaaagctacacatcgaattcgtggtcgccttgtcgggaccggagagagtttttcctattttgcttgggaaccctacgcacatctgtcttagtatatggagtgtacactgtactagctgccccctactggacttgcgcgtcccaatctctagtactacgcatcaccttatgtgtagtagaatctacgcatgcatgaccctcgtgatctgtccgacagtactaaaacttgttctcaggaacacagacagcagatgctggtatggctgcaccacagtggaaaaccctgcctctcattgcatttacaaatccctctctctgtgaatgggcactacataccacttacaaccaactacacgctttatgcaatctctggggatggacatatgaaccccgggtgagacacaacaaaccatttgcccgcaatcgtacctaggtaaaggcgacaatatttactgttgttctgacgttcttcttggatcaacaaacccggttcgagtccggtggcaccaacgggcatagtgttcctgtatccacctttttacatccacaaaacccaatttgggggatttccattcttccctcccctccctggggggaaaagtccaagtgacacctcacggcctaggggagaaaagggtagccattcgtcctcattcgtttccccatcagggcgcctattattagagcaatcaaaaccctcttgtcctaacccccgctagggagagcccaatctcctattaacggaaagaattcccctccctggccaccaagcgaaattttttggccatcgagagntactggtctcctgcggcaggaattggaccctcgaggccatacccccctcacagtttgggagaaaacacgcctcgtccaagttattaaggggctaacccatattaccggggaggcttttttagcccctattcccctgtaagatgtgccaaccccggccaacaaaaagaagctcggttttcacacaccaaaagggtgggccccccccccttttggggggtgtaacgcttgtaatagccctccccgcgggtagtatcgccttacggggacaaactgaagctctgggagattatgggcgctctccctatagacaccccctaaaggggaactgggccaaacccaccggggccgggtgttctcttcgaacccccttcggggttcacccatattttccttgaaggggggggtcccct

SEQ ID NO: 189913 - DNA, 295 bp, Arabidopsis thaliana
gatggaaaatctttgttgtatatatttttttctcattacaagctttagtggtatcatgctgatcacgtttgatctctcgcaaaactttgaattacagaaaaagaaaacaaaaaaaaagttgcatattaggggttaagaagacccataaaatgagagagaaagatcaaactttataaagcaaagctctgttttgtagttcatcatcacagagttagcttctgtgaagtcgtcaaattcacctgcttcagatgtaaagctgccaacaagccctgccatgtgtctgctgatgtggcac

SEQ ID NO: 189914 - DNA, 266 bp, Arabidopsis thaliana
ctcaaaaaggataaatggatttttcggggggagttttcttttctcaaacccaacaaattccaaaatttttcatcttatcatgtttgaaaggtggaaaaaccccaaatccaaattttttacgttttttaaatcaaaaatcaaaaacgggaaaaccgaataaagggcttaatagacttaaacgggccactggttgttcttccggagctgaaaaagcttaaaggcccagttttcaccttttttttttggaactcttttaagggtttttg

SEQ ID NO: 189915 - DNA, 208 bp, Arabidopsis thaliana
cgggggtccatcatctatggcagattttgtagagcaactgtttcgctgtttactgggagatgaacaacttatgtcaacagtgggaaattcacaccattggcaggtgaggatttccgatgtaagttatgaagagcgggaggatgtttatggtgaactggaagctagaggcttatcgggcgactctttaaggaaactaccatgctatata

SEQ ID NO: 189916 - DNA, 317 bp, Arabidopsis thaliana
atctcttacccttattatatgggatttttttgaaacgactaaagtttaaaaattgccaaacgctttaaatccataaactcctcaactttttgcataaaaacatgttatgcatctactaatgacaagggaccaacaaaggtcctagagaatttaccacttacgtgatgacaccctaaacaacaattaaatactcatactaaaatttcaaattctcaaactaaaatttaaatttcctttcccgtggggtttaacaatgacccgacataagaacgagtcgggcgctccggtaccaaactggcccgtggagaccttggagg

SEQ ID NO: 189917 - DNA, 958 bp, Arabidopsis thaliana
cctgcctgtttgcttttttgcaggacacggccgctgggcagttctattcctggaccgctccgaccaatcggtttttccagtttttatctccaagaataagaccataacgcgctgccggtgggagtgcattattattgacacatgtgcctggacggcgacgactggaacactggggcaatccagatggatacatttcttctgggccctaatggctgagatgattaccgtgcgccgcgaccctgcaggacatagcaaagcttgggacctggtcccggcgtgtttatcatacggttcagacttggctagaaacactgtggcgcatttaccgaacgttaactcaccctttgttggtacataccccttttattcgccaagctggtcgtatatactccgaaacaaacaatgcccctgcaagtggttgccccttcccccaaccagttatggggcaaaaccatttttgtggataatatgggccgccctgcactgcgcgtagtaaatgatcccattaccgtcattattggtggcgggtgatatttcaccacccccgcaataccgtcttgggatgtcggccctcaataaagacaccgccccccccttgctaaagctgggctctattttaaagcctcccggaaaggcatccttgtgtgggccctatccccccccatatgttgtgacctggcttacatcattggcccaggcggcaccttttgtaggcccataattatctttttagcgtttcctttcccattgccctttaactccggcccccagttgtgcccggtctttttcccctgtgacaaaccttgaatatgggggggggctttccttttcggggttcccttatttcagatggttgtaccggccactcttggaccccacaaaaaacttagtatctgggggtgaagggtttccacctttaaggggccccattcgccctggaaaaaacggttttttcctc

SEQ ID NO: 189918 - DNA, 516 bp, Arabidopsis thaliana
  unsure (1)..(516): unsure at all n locations
gggggtggcgtgtcctgncgtgagtgatggtgttgtgggttgttgtgcggttatgtgtgttgcgtgcccggtatgggttgtgtgtgggttgggtgcgtgtggttgctgtggtggggtttgtctggggtgaggtgagtgtggtgtgtagggtgcgttctccgttgtggcttggagtggccgtgctcggtgtttgcgcctttggtgggtggagtgtgagggaccggaagcgtggggtgcaaagaggttgggctgctaaagcgcgcgccttgtgctgtggtgtggcgtggtgtgttgctcgtggtcgggttgngttgttcggggggggtggtttgtggtcgggggtgcgtggtggtgtgtttttggtgggtgtgctgtggtgtgtggtgttgtgtgtgccgtgcctgttgtgttttggctgtgttgccggtgtgtggttgtccgcgggtgttgttgtggtcgtgtgccgcgctctgtgttgtgtgcgcgtggtgcgtcgttgtgtgcgtggtgtgtgtg

SEQ ID NO: 189919 - DNA, 385 bp, Arabidopsis thaliana
tgcgcccccttcacgtccatgcgacatctttctcaggaaacgccgaccagttgctcgtgtcgtcactccagcatcttcaatggacgaccaccctgtaaagcactctccccctggacggtccaaatggcgcctacgtccactgtcatgccccctgcccgatcaacagtgtgttccccaccctgctctgcacgttgcttgaactttctcgtttccctcaatttttcttgcctttctgcatttcttccaccccttcacttgtcaaactaacataactccaccatgccaggaagtcggcccctctgcgtgtacaagctcttaacatcaccttcccaaagcgccgcccggtaactaatttttctcctatctgacatactagctgctactt

SEQ ID NO: 189920 - DNA, 716 bp, Arabidopsis thaliana
tacccgggatcctctagagtcgacctgcagcgccaccaaccgtcttcctggccccgccaccgccgcagtcgtcgtcgccaaggtccatgacaacggccggcgccttatcgcggcggcgcgcgcgggaggaggacggcgcagcttccaccgccgcttgggatacgccgcggcggccgcaaacgcgcggcgtggcgcgatccatgcgtgcggtgggggcgctagattctgttgctgcaacggcgcggcgcggcgcagaggaattgaagggggtagttgagacttgagagtacggtgggttgggggaggtttatggcccaggagggactatgacgggtgggccccgtaggggtttgggcaggtgctccatgcggcgggcgcggggccagggagggatccggtcatggggaggcggacgacaaggagagacaaatgcccgggaaatggctgccgggtgcgcggcgggtgcgggggggcgaggcccgaggcggccggatcgagtgcggcgtgctttccctaggccgaaatggggctggatggtctttccgaggatgggacgctgccgggggcatctactaaccgcccggaatgtctgggtacacccccgcattcctctttttctctttgccggcattcttaaacccacctgccatgggcacctgccatagcccttggtgccggacacctccatggggagttctttacgacctgcgcttgtc

SEQ ID NO: 189921 - DNA, 759 bp, Arabidopsis thaliana
ggcggggatgcgtagagtcgagctgcaggcgcgcgagaagaagctgctgccgaggaaggcgatcggcaggacgcgtgctgcgcgcggctcagcggaggagtggaagaagctgtgggtgagggcggcgtccagacggttgcgggcgcaagaagcgggtcgaagggctgcgggagtaactggggggggtggaagatggggggcgcggggtggatggggtgaagcgcggtgcgagtggaggccgtgggtgcaggcggagcgggggaatagggaggagggggatgaggatgttgtggagcgcgagagtaccggcgggaggcgtgcgttgggcgcggtgcgaggcgcgcgaggggagggaggttgggggcgttgcaggcggtgtggtgtaggagtgggtgctagttggagtgcgtgcggggaggcgaagaggggcggggcatgtgcggcgatcgggagggaggtgcggcagcgcgaggaacgggaagaagaggatggggcaggtctttcgagtgaggctttgagggggatgggctggtgcacgagcgcttctgcgagtgagctgattgcggaggggagaaggaaggggggagcgagaaaggggaggaggaagagaggggaaactggggggcggaagaggggcggggagtggtaggggcaggaggatgcaggaggacggggagggcaggggagagtgggggttgtcgagtggacgagcagaacgcgagccggcagagagaagcagcgaggaagaaggcggggaga

SEQ ID NO: 189922 - DNA, 739 bp, Arabidopsis thaliana
gtacccgggatcctctagagtcgacctgcaggagaccgcgtgcagcaaagcaaccgattgatgcgcaagaagaagatttggagcgcgagcgagaggaagagaaatgcaagaggggagaatgaggcagcctcgatccgtagctctcacctatcacaatgtacgtatatgggcttgctgtttgccggagcttgagttcctcttccccctccggcgccttgttccttgcttccttctcctcctcgtcaaacaggacagagggctaactggtggcggtggctaattatgtgagaggattagtgtgagacaaggcccatatatagacagagggggagcagctgagctgatgagggtcgctgtcgctggcggtgtggacttctgggtggcggggcggggcgcgggggtgcgcgcgagaacgagaagccgacccaccaaaagacgattagttttgtggcggttccacgtgttgtcggggatgggatgtcagagttggtctcactcggaagtcggaatcgcggtggcgctaggctgccgcggcccgcggtcagtggcatggctggcaaccgtggatcaaaaccagcgatgctgctgcggttgcctgactccgcaagtcccgtatccagccgtgtcctcgggtagtcccagaaattttccaaaattcttcgggtccggaaccacttgctgaaggggacccccgcagtgctttgccaaggccttcggcagtcaaatcctttgggtccat

SEQ ID NO: 189923 - DNA, 175 bp, Arabidopsis thaliana
ccaggggagacttcctcatctttacgtggggagaattaacaaacgcgttctttaatagtccaacaaaactaattctccaggcttatattacaaaagatgttaaagggtacaaaccaaaacccgccttgagtatttttcttaatgattcccaaaggaacaggaaacttactttgta

SEQ ID NO: 189924 - DNA, 206 bp, Arabidopsis thaliana
aaaaagaaaggtttgattgaatttaagacaaaacagttgaaggtggacactaatactagagaaagcattgggaaagctaggagaggtagaacaaagttttttgtaacttccggagaataagaatgcatttgtttccaaaaagatgggatcttttttgccttttggggcgatacatttaagtagacagattttggaatggccatggg

SEQ ID NO: 189925 - DNA, 127 bp, Arabidopsis thaliana
cacagtctatatctatgcgaatataacgggaaaatcctacaaatcgagcaatcgttgatttccagtgaaagagactttaccaaatcccagacgaccaatctgattcaaccattaccactctctctgg

SEQ ID NO: 189926 - DNA, 225 bp, Arabidopsis thaliana
aaactcaaaaacggcgtaaaacttatttaagatggggatcataagttttacacccaacaatctctctaatcaaatcgatacggagacgacggacggacggactggtgggacccttacaagttgtaaaactagtttgtgtttgtgtttttttttttggttcttttgtcccgagaaaaaaacaaacgaactttgaaaagcgactagcgggagagaccacgaaagaaa

SEQ ID NO: 189927 - DNA, 267 bp, Arabidopsis thaliana
ggtgtatccccaaaatcccaggtttgggggaaaagaaatcaagacaaagggggcccttggcctttttattggaaacttacattccacatttaaaccttttttttataaaaatgggaaaagcttatgtaatccccccaaaccaccgcgttttttaacccccgcggggggttatggaatggataatatgtccccccttttttttcccccgagacgggatcttttttgggggaatcgggttcatatttcgggtttttatataccccaaaa

SEQ ID NO: 189928 - DNA, 354 bp, Arabidopsis thaliana
caaattattctttccactcttggtcggatacagatggaaatccaatagaacttttttacaaactaaaagaatcataaatgttgggaaagaaaaaaacatgaagaataataacacatggattgagctcttcaataactagggtccatgtcaatgatgtccatcttgaacaacatatgaatcagtcatatcgctggcaaattgctgtccaactagaggcgacatccctgggcctgttccatgctctggggacgtatttggtacagtactgttcgactgtgacttagcattttgacgctttttccaaatagctgcaaacgctgacgcgagaactgcaaaggcggaggcgaacgtaac

SEQ ID NO: 189929 - DNA, 364 bp, Arabidopsis thaliana
  unsure (1)..(364): unsure at all n locations
atgtagaaaaangagtccaaggctctgggctgggaagttctgtacatagaaataaacttacatagaagtaacagtgacaacagaaaaatgctgcaaactcatctatcattagttgcagagggagagcaaaatgagacaagagaatcgatgacttttcaatatgattaggaagaatgacacaaagccgctttattcactcttgtttgggccacttcattcgccatcctaaagctacacagcactcatattgcaaccagtatcaatatcagtaaaagcgaatgcatgagctccgtgctaaaacctgttaatcctctgtaaaaaatctagcttgttccatcccaggtggcgataaaggagggatggc

SEQ ID NO: 189930 - DNA, 313 bp, Arabidopsis thaliana
ctgttagttgataaacaattttttacattttattggttcaaagttcaaaccattgtttttacactttattccacacactatacacatgcaagagagatctaaggggcagttgtatgattggcggtgaagtcaggctcggtgggtttttgaggtagcaaaggaagagtgtagcgaggaggaaggttggagatattgtgcctcagattgtgaagcgcgtttgatgcgaaacgcgacgcgtaaagagcgcctccaaggctcaaggacgacgacacggttgcagcattgtgttctttatcttgactagcgagcgctt

SEQ ID NO: 189931 - DNA, 253 bp, Arabidopsis thaliana
ggggaaacaaaaacatttccaatggcattatatacatctttaaacattaaaaaaaaacttacaatataaaaaagcttcccaatttttctgctaaattcagcgtggctttaaatttaacatctttgaacgaaacagagaataaaacaaaaggtgccgaaaaaattaagagaccaaaaatcttttgacaaaaaaaaaaagttttcgttcgggcacgcggtttttttcacgagcagccaaaattagaaactttttt

SEQ ID NO: 189932 - DNA, 212 bp, Arabidopsis thaliana
gagagaagctaattgtaattttcccccaccggaaaaatttttcaagacacttgaaaccccttgcccccgttaaaagctaaaaacttaccccggggggggaaaataaagggtactaaaaaacccaaacgacttgaaggaaataaaaaattgcccatttggcccaaattggcgaaacaaaacataaacccgggggggaaaaaaaaaaatttttt

SEQ ID NO: 189933 - DNA, 298 bp, Arabidopsis thaliana
cagccaaataaaacattttttcccagaagttgtgcaggaatcaaaagagtcagagcgacgacatactgacaaacatatttgattgcttactactaaaaaacaacttcccaagtaaagagaatgatcaacacaaacactaggcttctctgtactctctcttcacatttaggctccttgttctttcgctttccattacctcaggcacggatcatcattttgcagatgtttcttcctttcaatgtctttgaagcttcctcagcgaaagcttgagctgattctgcttcggcttctgctgcct

SEQ ID NO: 189934 - DNA, 186 bp, Arabidopsis thaliana
aacaaaagaaaaaaaaatttttttacaccaacttcttctttaagcattacaacattttttattttttggggtaacttccataaaaagagcatatgatttagactttcaatacccctagaaaagcctatgggcccttattacctgagggactcgaacaaaatttttcagggggtcaggaaaagattt

SEQ ID NO: 189935 - DNA, 246 bp, Arabidopsis thaliana
aaagaaaaaagaggtttggcctttgaaaaaaaatggacaaaaaaaattggtggataccaatttaaagaattcggaatctgctacgggccaagggggtttttcattcccatttaaatggaaaaagattttccctgcccccaacgggggatttatttacagaatcattttttcacctttttttgccctcccaaagaaacaaagaacccttggtttcccctcacacattggatcccccaaaccttcttt

SEQ ID NO: 189936 - DNA, 147 bp, Arabidopsis thaliana
aagaaggggcataaaacaattcattttttggcaattagccccatttggaaagaaaaaaaaaatgggggggcttttaggccaaagggtaaatgggttaaaagacaatccttgcaaaaacaccacggggctcatgaaaggccccaaggg

SEQ ID NO: 189937 - DNA, 429 bp, Arabidopsis thaliana
tggttcgagtagggttcataaatatagtgaaaaccaccgtttggtgatacttcgtcgtcctcgacactctcagattcatcatcgaacctgatggcgaataatcctccgcagtcttctggtacccagtttcggccgatggtacctggacagcagggtcagcattttgttcctgcagcttcacaaccttttcacccttatggacatgtacctccaaatgttcaaagtcagcctccacagtattctcagccgatacagcagcagcagctctttccagtgagaccaggtcagcctgtgcatattacatcatcctcacaggctgtatcagttccgtatattcaaacgaacaagattctcacttctggatctactcaaccacagccaaatgcaccttcaatgacgggctttgctacatctggacctccattttct

SEQ ID NO: 189938 - DNA, 419 bp, Arabidopsis thaliana
  unsure (1)..(419): unsure at all n locations
aaaaaattacaaaatattagggggtaattgtgaagagtttgtccgacaaaaaaaaaatgtgaagagtttttaattatgagacacccttatcaaaaatatctccaccaaaacatttaaactaaatgtatcaaacgggctgctccgcgtccatcaggatcggttcacaataggcattagtttttgataaactgcgacagttcagttcgctaggattacggataaaaaattacgtctagatcgctttattaaataaaggggttcttactattggaggnggacttaattctttctctatcaccttaccataaaaatctggtagatttaaaaactaataattatacaatgtggtaaaatcggatagcttttacaaaatgttgtaattatgaattatgatgacaaaaatccctttagatttttac

SEQ ID NO: 189939 - DNA, 264 bp, Arabidopsis thaliana
cgacccacaagggagaattttataaaggcatgattcttactaaacaatgaaaagtaccatcgcagagttcgaaagttgggggaaaacaaaccaagggtcataaagagagaggggaagggaacatccaggattggcccgcaccgaaaagaaaaggttcacccaaaaagaaggggaagggaaacaacatcctttagtccaaaagggtacataggggttttaacctgggaaccatcaaggggactcactggctttaggggaaggacg

SEQ ID NO: 189940 - DNA, 328 bp, Arabidopsis thaliana
tatctcttctggtgtccgggggtggtccatgttaatcaactcatcgtccaaggcattcaaaacccgacaaaacatgtcgatcacaacagcacctttgcacaaatgaagcatgaaatcaagaaacaccgaggaccaaatcaaagggtactcataatagatcaaagtagccaaaacctgtgcaagcttgtttttaacaaaaggaggtccttccacaactctaccagcattctcattatcaataacctccaaacaagccattgaaaacactgatttcctcacataactcttctcatccaagctcatagatccatatttaacccttaaaaca

SEQ ID NO: 189941 - DNA, 402 bp, Arabidopsis thaliana
aaaataaccactacggtaatgtgagaggatttctatacagcaacagctcttatctttgctaatcatattcttaattattttaaacagcttcattaatcgctaatgctttatttttgtcgacattcgttcatttaataattaattaatgcagcttacttttattcatacaaataatataaaatcataaaacgacgaagtaagagacacagagcagaaaaagcttacactcatatcactgagcttctttggcttcgccaatcgccattgttgtttcgaaatctaattactgcttctcaaaacccttttgttggcttttgttttcggtgtcgatcattgcttcaatctctttcctttcgatctgaatcatctgatctctgatcttttcgagatctcactaatagg

SEQ ID NO: 189942 - DNA, 410 bp, Arabidopsis thaliana
acaaccagtaaccacatagagggggatcatttatagtgtatcaaaccgtaatcaaaccaattcttgccaccaccaaaacctaatcactagtccatcacgtttacaatgctaatgatacctaaaacagtgtcaccagaatcaaatactaactaagtatttttaaacatgcagaggatggaagaaactcaccgacgaatctgcaaaattgatctgcggccgggactagatggaacgatcggatacgtcacatcgtcggcagcgccgccgcaaggagacatgatccatggtgagagtaatagtagtaagaagaaaagatggcggaggaaaggacatctcggcggcatggtccggatcaattatggagaatccgaacagagatagagatgatgatgatgatcagctgtgaaaaa

SEQ ID NO: 189943 - DNA, 234 bp, Arabidopsis thaliana
tttcttttttttttttatggaccaaaaagatgttttaaactggtacggcacaaactttgtacgattcttcttaatttgaggagttaatgccactactatacgttgccctccctttttttttcttctttttctgctttcctcaaattttgttatcttcagtattcctcatgacgtgattcatttaaagacttcactctttctaaaattagtacccttggaacattggaggtggtg

SEQ ID NO: 189944 - DNA, 363 bp, Arabidopsis thaliana
gcagcaagcgtaggatggcttatgctacattgtgtcacacaagcatcaatagttacatctgctatagcaactacagcacttcctgccacaagacaggacaaagccagtgcaagatgcagattcgagtgaagccataacaccatcatggagatcatagcaagaaaacctaaaatcgaatcgaacaaaaaaaaattacatctttcattcattaagaagcaaagaaactaactttcagtgaatttaccggctaatatgaaatcagggtcgtctcctgtaacccaaaactgggacaacatcagtcaacaatccccagagaggtttaataatccaaggaatctgaatcaaaccaacgtaaatctgagc

SEQ ID NO: 189945 - DNA, 265 bp, Arabidopsis thaliana
aaaaaaaaaaaaaaaaagaccggttccccaggggccgattttttttccccaaacaggaatccagggcccaaaccctttcccttaatttatgggcttttttcgggcaaaaaatttgggggcggccggaacccgggaaaagaaggaagggggcttctccccctgggtatgggggaaggggcctttaattttttaaacaatggggcaactttttccccaaagggggcgtttttttttttaaaacttttttcccacttttttccaaaaa

SEQ ID NO: 189946 - DNA, 281 bp, Arabidopsis thaliana
  unsure (1)..(281): unsure at all n locations
gcacattcttctaagattcaattacttgtataaacttttaaactcttccacttttggtaattcgaaaagattattcttaccttgttcattatttcgggatttcttcaatttcttacatggcttctatgatgagatcacctgttaaccatctaaatatcaatgaaaaacttgcaaactacctaaaaattatactaacactttcacgtttcataagtattagtcttaacgttttatcccatttgccgtttggnggtttctcaactttttacattagctcaacc

SEQ ID NO: 189947 - DNA, 548 bp, Arabidopsis thaliana
aataattgacaattcctgcgacctgcgtgtgtctccacttcaggtcttgggatccaagaagcggagaaaagagccaaagagtgcgaatgatatgattacaccatttgcatttcttttagatgtgtctaatgcagaagtcccaactttttcatatttggaaagtttctataattcaactcttattcttttttctctttttttttgtgtgtatacactatgaaccatcagatttgagcaaataattaatctgatctataacgaatggataataatacgtatgaaatttctacaaaatatttatggctattttttttttgtcaatgaatttgtggctaatatttatcaacctatatcgataacctatatattgaaaattatatcaacctatatattgttgagaaaataaagaacaaataaccttatcgatatatactacaaaagtaatgatcatatcttatgttccaaataaactgtaatcataccgagtacaaaaaagacatttaaaaaaaaaaacgtaatcatttgagccaaataaactgtaaacatgt

SEQ ID NO: 189948 - DNA, 240 bp, Arabidopsis thaliana
caaaaccaaaaggggtttcacttcacacaataggtaaacaaagggcgaagactttgtaatgatcccgttgtaaaagtaggtcgccaaaacagatgagaaactaacccctaacacttatgagtaatttttaagttacggtccctgtttccacgttggggaccgtagtttttgtttttgccccgatcatggtcatagtcataggcacgctccttgcctttttccttttttgggtttttgttt

SEQ ID NO: 189949 - DNA, 379 bp, Arabidopsis thaliana
tctcaagattcgtcggaggatgaagtaactgttgaagtcaatgggtttcatgttcttccttcacaagtaagtactaaataatccaattctatgtgctcgaacaaaaatttatttatcatctctttaattttaagataattcgactatacttgaccatttttggtttacattttacttgatcacaggaaaatttggtcagtcaaatgttaaaaaaacatccagatctgacttcaaactttgatttaaagaatcaacaacttaagaatgcttacatggatgtcctcgtcgacataagtgagacattgtcccagtcgacaaaggcactttcatgggaagacctagataaagcagagagtacgcttttttgatcttacgaaag

SEQ ID NO: 189950 - DNA, 274 bp, Arabidopsis thaliana
ggggaccaaaccccttttggattagggaaaaaggttccccctaaactttaaaaaaacttttttggggaggaaaaaaagcaaaaaaacccccgaaaccaagaggtcccatggggccccctaaacacccagatttggaaaaatattcgtttccataaataaaaagccctttgattcccaaggttttcgaaaaccagttggattttgggtttttttttttttgggaaaaaccccggggacgacacccccaattgaagggaagggtcggaagggggct

SEQ ID NO: 189951 - DNA, 152 bp, Arabidopsis thaliana
ggaaacacgcagtcgcatacatgtaatttgccaattgagtcggttgaaacggatcaaagaaaatatgagtattgggtgccttacacgcgatcgaaccaggcttgcaacttgtcaattgacctccatcataaacgttaggacaacatgggctt

SEQ ID NO: 189952 - DNA, 345 bp, Arabidopsis thaliana
tttattctttcgtttttttgttatttgaaaaacttttaatactttagatgttattttttatacaaaacatgagatgcatttgaagaatttttggtttattatacattaagctgcaaatgaagacagttgaagatgtaacaatatgaacatgtatgagagttatgcttctggacttttcaactaagtaggggggagtttggcacatcatacaaagtacaaactagtaagatggttgcgtgaggaatgaaaggaaggtgtctcgtatgtctacttcttgtgggttaactcagaggagcaatggggtctatccatccttcataatctttgggagaaccagcaccaggc

SEQ ID NO: 189953 - DNA, 192 bp, Arabidopsis thaliana
aaacccaaggcaggcaagaaaataaaaaccagttgcatcggatctctcattgatgttattacccttggcgggattttatttgaaaggggggatgaattaaaaaagggcatcatcaaagccggacgtaaaagtccggacggtgttacaaaaagaaacacaggatttggtaataaaatgagcttcaacacacgt

SEQ ID NO: 189954 - DNA, 258 bp, Arabidopsis thaliana
tctattttttttttttgttgttttatgtcttttttttggaaaaaggaacttttcactgattataattgagtttgacaggaaaaagaagattctactctttaaaattatctaaccacaaaagcgagtatttaaagggttggtctttttctttttttccattgaaataacaagactttaagggtttgcactctggagagtccactcctttccaaaagactcaatcctttgacgttataacgagtaaacccaatgcaccta

SEQ ID NO: 189955 - DNA, 352 bp, Arabidopsis thaliana
catgtcgggcattttatttgactcttaggagtacatgctgtatttatagattaaataatagagttcaagctcattaaatacagtccgttgaggatacaatgcttcagaacttgacgccacggaacagcttcaattgtttcttgaagcgcttagcttggccaggggtgaactcgttcatgcaagcatcgtcagtgtagtccatgaagttgtggatagggtcaacaccatccgcagggcagctgtcagagccaacagggcatccgaaggcggggccagcttcagcaggggtatcggccacgcggtcacccttgccatcacatcctccttggaaggtgtggtagagaccaaccca

SEQ ID NO: 189956 - DNA, 156 bp, Arabidopsis thaliana
cgggagtgtcggctctgttatcatcttctgaagaaattgaataacagagtctaacattataatgtagaactacaagatggaatgatcagattacatataagcttatttgggtaaaactgagactaacactaaaccccataagagaggaagtatgaa

SEQ ID NO: 189957 - DNA, 211 bp, Arabidopsis thaliana
gcatgcatctttttcttacattttgggaacaacacatggggaatacacatggacagcacaccacagaacatcaatgtgtaaagaaagatcccctccttcatcatcatttacacatcctttttataaagcatgatgaaatcgttcctgctcatgattggtcaatgcagaacaactgctaactgcttctctgtggatagggtgctgttgctgc

SEQ ID NO: 189958 - DNA, 103 bp, Arabidopsis thaliana
gaatcatgattctctgttttaaccaatatcaagcatttttaagagatcacaccatgtcacaaagtagatagcttaaatatgatagaaacacaagagcaagaac

SEQ ID NO: 189959 - DNA, 204 bp, Arabidopsis thaliana
acaacatcataacagaaagcttatttaaaaaactttggcttgggagtttgatccgcctaaacataataaaatgtttgttccaaaaagaaacttattacaaaccctttcatttgtttacaagatttcagacatttttttttccgggggggacttttcaggggtgagctgacgcttgagtcatttcccaaggatgattttgggcta

SEQ ID NO: 189960 - DNA, 337 bp, Arabidopsis thaliana
atcaacaagaagccattagtcttccatcatcattttataataacatgttactttcactacacgttaaaattcaaaacctaacaaagtttttggggcacaaactcaaaaaccaataaaacaatgattccaaggttaattcccagatggtcttccttgggcaccattagaatcttgaggattattgttaccagggcctcccattgatcctccaaacatttgcatcattgatcgtaatgcacccgataaatcttccggcatttgctctgggcctccgagatctatgttgatattcccgcctacatgtatctcaggctcatctgcaccatttttggtacca

SEQ ID NO: 189961 - DNA, 173 bp, Arabidopsis thaliana
aaaaaagataaggcatgactttgttttgattcaagaaataaaaacccaactgtggtacaaggggcgtataaaaccaaacgatttcatttactgtggttataaaaccctttggggggaattttgaccaacaaaatgttaatttggggggggggttttactttccacctttcccg

SEQ ID NO: 189962 - DNA, 292 bp, Arabidopsis thaliana
cttaaaattctcattttcataatcatgattcatacatatccagagaaatcataaaagagaagacatgttcttttctttttcttacaaacgtttagaaacacgatacacaaagcaggtcagagatttggatatatgtacatatagaaatgatctcgtatgaggggggagttttgttttcagccatggacgatgagtcgtttgccgcaggtggaacagagatgacgacgtttggatttattagagagaggaacgaagcagaatctccactggctatttacgtcaaccacttgaa

SEQ ID NO: 189963 - DNA, 387 bp, Arabidopsis thaliana
ggggcattaaagaacttccattaggcatacactagctaaagacatctcacaaacggtttcgagagttttagttcagccctacaacatctctcaggacgcgggaacttcttttttagagttgtagagaaaacgtcttctgatacaactgactaacaaagtcagaagaaatcactataaatcttacaatggaaccttgcccagcacgttgctcttgaatttccatatcttcatgagtttcttcacagtagatttggtatatcgactggtgctactaaaccacacgtctcacatctgagattgaaaagaccattgccctcctccgcgagagctgtgtcaggacttttgcagcagacgcagattacgaacgcatcaatgtatttccggaac

SEQ ID NO: 189964 - DNA, 238 bp, Arabidopsis thaliana
ccaggaaggccaatccaacttcaaaaatctttatggatacctttttttcatgtatccatctagttctagtcttggggagatatatccaggactaaatgagtgttttttttgcacctgataaataaaataaaaggtgtttgggaggaagctttttttgttgtagcaggattcaaatggaagagcttttccatttttattttaccacctaattggccttggcagtttgaagcatttccac

SEQ ID NO: 189965 - DNA, 175 bp, Arabidopsis thaliana
cgtttgcttggggaaaatgataacattaatttcagccaaagcaatatatacagaaaaaagtagagagagtgaatcaattttggtggagaaagagaagattggagcatccgtacgtgtacgcatacccgcaaggtaatggccgctcgggagctctgactccacaagccggaggagt

SEQ ID NO: 189966 - DNA, 456 bp, Arabidopsis thaliana
aataaaaatcataagcctcataagacaagtttgctttgaaattggttcagtatacaaatagaagataacaagtatacaatgaaaaatgagcgtttgaaggtaaatactgagtacaaatattcctccaaattcacaattgagggtgatgtttgcctagaatcataacaagccaacttttctctgaatcaccattgagcatcctgtgggaacaactcagaaatgaagcctagaaaaagttacaatacaattatatcaaattcaagaatacagactgacctagatcataatgaaatagaagcccctccaattatctaatgacaaacagaagagtcatggaaacctgttatgagatgccccagcaggaaatgaattggagcttcagctactgcgtctgcatatatataagcaagtagccaagttctgcattcagccattcacattttagggtacttaaac

SEQ ID NO: 189967 - DNA, 1788 bp, Gossypium hirsutum
acaaacttgagaaatctttgagaaaatctgaaatctattccagcattttcttatagcgattagtttgagaatggaggcgaagctgatagagaggctggaagccgcggtggctcggctggagtctctatcggccggtggaatctcggataggggattaccggacggtgttgatgaggtgtcttcggatccttcggttttggcgtttgacgatctgatggatcaatatgcggctagggtttcggctgctgccgagaagattggaggtcaagtgctggatgtgactaagctagttctcgaggcattctctgttcaaaagaaacttcttatcgagatcaagcagactcagaaacctgatatggcgggcttggtcgaatttctcaaaccactgaatgaagtgatcttgaaggttaatgctatgacggaagggaggcgatctgatttcttcaaccacttgaagagtgctggagacagtctttcagctttagcatggattgcttacacaggcaaagattgtggtatgagcatgcctatcgcacatgtggaagaaagttggcagatggctgaattttataacaacaaggttcttgtagagtacagaaacaaagatcagatccatgttgaatgggccaaagctttgaaggaactgtatttaccgggtctgagggattatgtcaaaagccattatcctcttggcccggtatggagtgcttccggtaaaaaggcatctagtgctccgccaaaagctcctccaccaggggcccctgcacctcctccccctccacctgcttctcttttcagctcagaaccttctcagccttcttcatcaaatccaaaacaagggatgtcagctgttttccaagaaattagtagtgggaatgtctctgcaggcctgaagaaggttactgctgatatgaagacaaagaaccgtacagatagaacaggtgttgttagtgccagtggaaaggaaacacgttcaagctccccttctttctcaaaagccggaccacccaaactagagctgcaaatgggtcgcaagtgggctgttgagaaccaaattggaagaaagaacttagttattgatgactgtgatgccaaacagtctgtgtatatttatggatgcaaagattctgttttgcagattcaggggaaagtcaacaatataaccattgacaaatgcactaagatgggagtggtatttaaggatgttgtggctgcttgtgaggtagtaaactgcaatggtgttgaggtgcaatgtcagggttctgctccaacaatttcagtggacaacacatctggctgtcagttgtacttaagcaaagactctttagggacatctataacatcagcaaagtcaagtgagatcaatgtgttggtgcctaccggacctgatggtgactggggggagcattcattgccgcaacagtatatccatgtatttaaggatggtcaatttgaaactaccccagtgtcgcactcaggagcataaatgaggcctatttgaattgaaaacttagctttcctttgggggaaaaacaattatattctttcattttcttggatacatacctatgggtgaattttacttcttccgtacggctgtttatttattttaacacacatatcatttggtcatcatctgtattatttcacaactacagtttgaatctcttccgtaacctgttttttggctggtgtgttttgttttattggcgatgatgagttgggaatttttgcaaatattactgttaagtttctaatgttctactttcctttggatttttattaagt

SEQ ID NO: 189968 - DNA, 575 bp, Gossypium hirsutum
cccacgcgtccgatctgattattttctccataccagcataaatcaacaatggcaaagctcgcagtttacttagccaccctggctctcattttgttccttgccaatgcttcaatcacatctgtgacggtcgaaagcgaggaaaaccgggatagctgtgaacagcagataaggaagcaagcccacctgaagcactgccagaagtacatggaggaagagtggggtggcgaaggcagcgacaatatagccggcgggtacattgactcatgttgccagcagctagagaagatggatacgcaatgcagatgtcaaggtctaagacatgcaacgatgcaacagatgcaacagatgcaagaacaaatggggagcaaacagatgcgagagatcatgcaaaaggttaccaagaatataatgtccgaatgtgagatggagcctgggaggtgtgacacgccatctcgcagtttgatttaaacaaaatatgttctcaagaataaatgtaatgtctcccttagttactctggtgttttagctgtactcgctctcttcatcacaataaaaagcacataatcgtgtgcagt

SEQ ID NO: 189969 - DNA, 2289 bp, Gossypium hirsutum
cggacgcgtgggctgagtagtttctttgcttcactgatttgttctctcgattcaaacactagggtttgatcgataattttatttataatttcctttacttcaattgcaattattcagatattcaaaatccaagctattttctttcatttaatctgaaattgattggattttccttttaattttgtttaatttaatctaagaaagaagggggaaaaatgccggcagtttacggatccagattgacgactttcgaggattcagaaaaagagagcgaatacggttatgttcgtaaggtgtctggaccagtcgtcgttgctgatggaatggctggtgctgccatgtatgaattagtccgtgttggacatgataatctaattggtgaaattattcggttggaaggagactctgctacaatccaagtttatgaagaaacagctggcctgatggttaatgatccagttctgcggacacacaagcccctgtctgttgagttgggaccaggaatattgggaaacatttttgatggcattcagaggcctttgaaaactattgccaaaagatcgggtgatgtgtatatccctagaggagtttctgtcccagctcttgacaaagatgctctttgggactttcagcctaaaaaaatcggtgagggagaccttctaactggtggagacttgtatgctaccgtctttgaaaacagtttgatgcaacatcatgttgccctgcctcctgatgcaatgggaaagataacttacattgctcctcctggtcaatattctttgaaggataccgtgctggaacttgagtttcaaggtgtcaaaaagcaattcaccatgcttcagacatggcctgtacgtacacctagacctgttgcgacaaaacttgctgcagatacccctctgcttactggccagcgtgttcttgatgctctattcccctcggttcttggtggaacttgtgctattcctggtgcttttggctgtggcaaaactgtgattagtcaagctctttctaagtactcgaattctgatgctgttgtctatgttggttgtggggagcgtggaaatgaaatggctgaggttcttatggatttccctcaattgacaatgacattgcctgatggtcgtgaagaatctgtcatgaagcgcacaacacttgtggctaacacttctaacatgcctgtggcagctcgtgaagcctcgatttacacggggatcactatagctgaatacttcagagatatgggctacaatgttagtatgatggcagactcaacatctcgatgggccgaagcattgcgtgaaatttctggacggctggcagaaatgcctgctgatagtggatatcctgcttatctggctgctagattagcctcattttatgaacgtgctggtaaagttaaatgccttggtgggccagaacgtacaggtagtgtgacaattgttggtgctgtttctcctcctggaggagatttctctgaccctgtgacatctgcgaccctcagtattgtccaggttttctggggtcttgacaagaaacttgctcagaggaagcatttcccttctgtcaactggcttatttcatactcaaagtactcaggggcactggaatctttctatgagaaatttgatcccgactttattagcattaggactaaggcccgagaagtgcttcagagggaagatgatttgaatgaaattgtccagcttgtaggaaaggatgctctagctgaaacggataagatcacactagaaactgctaaacttttaagggaagattatcttgctcagaatgcttttactccatatgacaagttctgtccattctacaagtctgtttggatgatgcgcaatattgttcatttcaatgctttggccaaccaggcagtggagaaagctgccgggatggacggtcagaagataacatacagtcttatcaagcatcgtctaggagatctcttttatcgtttagtgtcacaaaaatttgaagacccagcggaaggagaagaagccctggtggcaaaattcaaaaagcttaacgaggatcttacggctggtttccgtgcattggaggatgaaactaggtgaacaaaaagttaaagattagactttctccctacctatcctagtccagatttctctctcttgtgtcttgctatatgcatgtcgtgctggcgttgtagctttttgttggcatgaactctagagtggtattagctgcgaatttgttatttattactttctggcctttccctttttgacagcatgaaactggatccttatttttatt

SEQ ID NO: 189970 - DNA, 2402 bp, Gossypium hirsutum
cggacgcgtgggtccgagagtagtcatttttctttgcatcactgcattttctctcgattgagcctctagggttttgaaagatacttagtatcttttttttccttctctactataatcgaatcgactctactagtttcatcagatcttaaaatatccaagctgaactccttcactcgatcaaaactttatcggataagtttcattcttgtctaatttcatttgagtaagaaagggacaaaaaaaatgccggcagtttacggagccagattgacgacgtttgaggattcagagaaagagagtgaattcggttatgttcgtaaggtgtcaggaccagtcgttgttgcagatggaatggctggtgctgccatgtatgaattagtccgtgttggtcatgacaatctgattggtgaaattattcggttggaaggagactctgctacaatccaagtttacgaagaaacggctggtctgatggtgaatgatccagttctgcggacacacaagcctctgtcagttgagttgggaccaggaatattgggaaatatttttgatggaattcagaggcctttgaaaactattgctaaaagatcaggtgatgtatatatccctcgtggagtctctgtcccggctctcgacaaagatactctttgggaatttcagccgaaaaaaataggtgagggggaccttttaactggtggcgacctttatgctaccgtctttgagaacagtttgatgcaacatcatgttgcccttcctcctgatgcaatgggaaaaatcacttacatagctccccctggtcaatattcattgaaggatactgtgctggaacttgagtttcaaggtgtcaaaaagcaattcaccatgcttcagacatggcctgtccgtacacctagacctgttgcaacaaagcttgctgcagatactcctctgcttaccggacagcgtgtacttgatgccctattcccttcagttcttggtggaacttgtgccattcctggtgcatttggctgtgggaaaactgtgattagtcaagctctttccaagtactctaattctgatgctgttgtctatgttggttgtggagagcgaggaaacgaaatggctgaggttcttatggatttccctcaattgacaatgacattgcctgatggtcgtgaagaatcggtcatgaagcgcacaacacttgtggctaacacttctaacatgcctgtggctgctcgtgaagcctcaatttatactgggatcactatagctgaatacttcagagatatgggctacaatgttagtatgatggcagattcaacatctcgttgggcagaagcattgcgtgaaatttctgggcggctggcagaaatgcctgctgatagtggatatccggcttatctggcagcaagactagcctctttctatgaacgtgctgggaaagttaaatgccttggtggaccagaacgtacagggagtgtcacaattgtcggtgctgtttctcctcctggaggagatttctctgaccctgtgacgtccgcaaccctcagtattgtccaggttttctggggtcttgataagaaacttgctcagaggaagcatttcccttctgtcaactggcttatttcatactcgaagtattcgggggcattggaaagtttctatgagaaatttgatccagattttattagcatcaggacaaaagcccgagaggttcttcagagagaagatgatctgaatgaaattgtccagcttgtcggaaaggatgctctagctgaaacagacaaaatcacacttgaaactgccaaacttttaagggaagattatcttgctcagaatgcttttactccatatgataagttctgcccattctacaagtccgtctggatgatgcgcaacattgttcatttcaatgctttggccaaccaggcagttgagaaagcagctggtatggatggtcagaagataacatacagtcttatcaagcatcgtcttggagatctcttttatcgattagtctcgcaaaaatttgaagacccggcagaaggagaagaagctctcgtggcaaaattcaaaaagcttaacgaggatctgactgctggtttccgtgcactggaggatgagactaggtgaacggaagtttaaatatttgactttcctggccccaatgtttcaactgttgggcttaaatcactaggctctcgctttctctgtttccgtgtccttgtttatctgggtagatgcatgttgtgcaggcgttttagcttctgttggcctgaattctatagtgctctaactttgaattcgttattatgtattattattgtttgcactttccctttttgacagcaggagattggaaccgtaatttattatttcatgtattttttgcaataaaaatgttcatttattaaaaaaac

SEQ ID NO: 189971 - DNA, 1036 bp, Gossypium hirsutum
cccacgtttctttctaccatttcacacgggttgtggcgtagtttaagcagagagggtgcgcaggataaagctattcaccattgtttcaacatgaaggtttgtaataaaaatttgtttctatcagcattgctttgcattgctgttgcaggagttttgggtcaagctcctagtaatcctcctacgtctacgccggcgccacccacaccaccggcttctactcctcctccgacgactcaagcaccgcctacaccaaccgccactccgccactggtttctactcctcctcccacttcatcaccgcccccagtgacagcttctccacccccagtttcaactcctccacccagttctcctcctcctgcaactccaccacctgcttctcctcctcctgcaactccacctccagcttctccacctcctgccactcctccaccagcttctccacctcccgccactccaccacctgcaaccccaccgccagcaactcctcctcctgctaccccaccaccagctccattggcttctcctccagccacagtcccagctatctctccagtacaaacaccattgacatcgccaccagctccgccgaccgaggccccagcacctaccctcggggctgctacgccaggtccagctggaactgacacgagcggagcaaatcaaatgtggaccgtacaaaagatgatgggaagcttagccatgggatgggctctgctcaatctgatggtttaaaacaaaagagtgcctcacatttgatgcaatagctctgtaatgtttcattcaattgcttatttcggccttgtttttctcgtattttatgggctgatgtctcatatgggacttttctactatacgtatatgagagcctacattactttaccattatattgtattctttgagacattattattatttttttaccttttgaggacactctttttttgtatttgaaggaatttattgtttattttgtttggaatatgtttggttggatttatacgattcatatatattatataaaagtaattatgt

SEQ ID NO: 189972 - DNA, 814 bp, Gossypium hirsutum
  unsure (1)..(814): unsure at all n locations
cggccgcgtcgacctgatttctacgcctttgtcggaagcggtgagttccgacaaacaggacatttcacacgggttgtggcgtagtttaagcagagaggttgcgcaggataaagtctcttcaccattgtttcaacatgaaggtttgtaataaaaatttgtttctatcagcattgctttgcattgctattgcaggagttttgggtcaagctcctagtaatcctcctacgtctacgccggcgccacccacaccaccggcttctactcctcctccgacgactcaaccaccgcctacaccaaccgccactccgccaccggtttctactcctcctcccacttcatcaccgcccccagtgacagcttctccacccccagtttcaactcctccacccagttctcctcctcccgcaactccaccacctgcttctccacctcctgcaactccacctccagcttctccacctcctgcaactccacctcccgccactcctccaccagcttctccacctcccgccactccaccaccagcaacccccccaacctgcaactcctccttgctaccccaccaccagcttccattggccttctcctccatgccacagtcccacctatctccccagttacaaacaccattgaacctccccaccagcttccccccgaccgaggcctccagcacctacccctcggggctgctaccccatgtccatctggaaaatacactagcggatcatatcaaatgttgaacgtacaaaagatgatgggaagcttanccatgggatgggctctgctcaattctgatggtttaaaacaccctctc

SEQ ID NO: 189973 - DNA, 645 bp, Gossypium hirsutum
  unsure (1)..(645): unsure at all n locations
cccacgcgtccgcccacgcgtccgtaacttaatagaagttgcaggtagaagcgtggggatttactttgtaaagctgatgtatttcaatcttttaggtcaatgcttttagagaacgaagggcacttgccttgacactgaatgataccaaaacagctgtgaacaggcttcatcggatggtggacgttttggttggcatcatcatagtggttatttggctcctcatacttgaaatcgcctccagcaaagtccttgtttttattagctctcaactgcttctaggtgcattcgtattgtgggaacacctgcaagacggtattcgaagctattatattcttgttcgttatgcacccattcgatgtgggtgacaggtgtgaaattgatggagttcangaaagaattcattttgaagattgatgacagaagccacgacggtagtatttctactccttccggtggagcaactgccggcgatggaggtaagatttggggtgagccaagctatgatttttgcaaagacggtgagaaaatcaacattaactggaaaaaggagaatgccaactcctcctcctgctaccccaccaccagctccattggcttctcctccagccacagtcccagctatctctccagtacaaacaccattgt

SEQ ID NO: 189974 - DNA, 1109 bp, Gossypium hirsutum
  unsure (1)..(1109): unsure at all n locations
gaaggtccacccaggcccacgcacacacacaagtaaagcattagcaaccatagccatggcttcctcaccaaaactcttctctatgtctatcctcttcctttttgccctcttctccatgcaaatccatgctagagagtacttcagcaaattcccaagagttaacatcaatgagaaagagacaacaaccagagagcaaaagcacgagaccttcgttccccagaccacccaaaagccagaagaacaagagccaaggttcattcctgaaacccaaaatggttatggcctttacggccacgagtcaggctcaagccggcccagtttcaccaccaaagaaacctatgaaccctatgtcacccctgttagattccaccctgatgagccctataacagcatccccgaatcctccaacaataaagacacttactactacaacaagaatgcctacgagtccactaagcagcaaaacttgggcgaggccattttcaccgagaaaggatggagcaccaaggaaaaccagaacaacaactactacaacggcaacaatggttacaacaatggcgaagcaaggcatgagcgatactaggtacttggagaatggaaagtactactatgacgtcaagagtgagaacaactattatccaaaccggttcgacaactcaagaggagttgcttcgaggaacgagttcaatgagaatcgttacaacaacatgggaaggtaccaccagaaccaagaggagttcgaggaaagcgaggaagagttcgaaccctgatcacctgtcgtacagtatttctacatttgatgtgtgatttgtgaagaacatcaaacaaaacaagcactggctttaatatgatgataagtattatggtaattaattaattggcaaaaacaacaatgaagctaaaattttatttattgagccttgcggttaatttcttgtgatgatctttttttttattttctaattatatatagtttcctttgctttgaaatgctaaaggtttgagagagttatgctctttttttcttcctctttcttttttaactttatcatacaaattttgaataaaaatgtgagtatattgtaacttcgcggccgcnaccgcggtgg

SEQ ID NO: 189975 - DNA, 1320 bp, Gossypium hirsutum
cattccgtcggcttataaggcctaagtcaatgctcaaagcttccccaatactatcccctggtgaaaacgcgtgggcaaaaatggatggttattgtagcagaagggtaatcatgtttttggtgtttgcatttgcagcaataagcagagggtatggacaagaatcaaccactcttgttcctgcaatcatcacctttggtgactctgtggtagatgtgggcaataatgactatctccctaccatcttcaaggctaactatcctccttatggacgggactttgccaacaaaaagcctactgggaggttttgcaatggaaaattagccactgacatcactgctgaaactctggggtttacaacttatccaccagcttaccttagcccagaagcatcagggaagaaccttctgcttggagccaattttgcttcagctggctctggctatgatgacaaagctgccatggtgaatcatgccatcacattgacccagcaattagagtatttcaaggaataccaggcaaagctagcaaaggtagcaggcagcaccaaatcagcatccattaccaaggatgcactgtatgtattgagtgcaggaagcggtgacttcctccagaactactatgtcaaccctctacttaaccatgcctatactccagaccagtacggctcattccttattgataccttcacaaacttcgtcaagaacctctatgggttgggagctaggaaaattggggttacctcacttccaccgttaggttgcgttccattagcaagaacattgttcggttaccacgagaaaggatgcatctccaggttcaataccgatgctcaacaattcaataaaaagctcaacgccgcagcagccaatctccagaagcagcatcctggtcttaagattgtggttttcgacatattcaaggcactttacgacattgttaaatctccctctaactatggttttgttgaagcaacaaaagggtgttgtggaactggaacagtaaagacaaccgcatttttgtgcaatccaaaggcaccaggaacttgttccaatgccagccaatatgtattttgggacagtgttcatccatctcaggctgctaatcaagtccttgcagatgcattgattgttcagggcattgccctcatttgattctgttggggcctttctcaactcttctaagcctgcctgccactactcttttaccattaccttattaaaatttgattcatattgcaccctaccccctttataatcatgtgtgccacaaaattcaatgtctttgaaggtactttttatttacttttgtgacattattatt

SEQ ID NO: 189976 - DNA, 743 bp, Gossypium hirsutum
  unsure (1)..(743): unsure at all n locations
cccacgcgtccgaagcaaagcattagcaaccatagccatggcttcctcaccaaaactcttctctatgtctatcctcttcctttttgccctcttctccatgcaaatccatgctagagagtacttcagcaaattcccaagagttaacaccaatgagaaagagacaacaaccagagagcaagagcacgagaccttcgttccccagaccacccaaaagccagaagagcaagagccaaggttcatccctgaaacccaaaatggttatggcctttacggccacgagtcaggctcaggctcaggctcaggctcaagccggcccagtttcaccaccaaagaaacctatgaaccctatgtcacccctgttagattccaccctgatgaaccctataacagcatccccgaatcctccaacaataaagacacttactactacaacaagaatgcctacaagtccactaagcagcaaaacttgggcgaggccattttcaccgagaaaggatggagcaccaaggaaaaccagaacaacaactactacaacggcaacaatttaaatggcgagaagcaaggcatgagcgatactaggtacttggagaatggaaagtactactatgacgtcaagagtgagaacagctattatccaaaccagctcgacaactcaagaggagttgcttccaggaacgagttcgatgagaatcgttaccacaacatggggagggtacaccanaaacaanaagagttcgaggaag

SEQ ID NO: 189977 - DNA, 655 bp, Gossypium hirsutum
  unsure (1)..(655): unsure at all n locations
cccacgcgtacgaccacgcgtccgcccacgcgtccgtccacgcgtccgccccaatactatcccctggtgaaagtgaaaatggaggtttacagcagaaggctaatggttctggtgtttgcatttgcactagtaagcatagggtacgcgcaagagtcgaactcgaccactctggttccagcaatactgacttttggtgactcagtggtagatgtgggcaataatgattatctccccaccatcttcagggctaattaccctccttatgggagggacttcgccaaccaaaagcctactgggaggttttgtaatggcaagttggccactgacatcactgctgaaactctggggtttactacttatccaccagcatatctaagccctgaagcatcagggagcaaccttcttattggagccaattttgcttcagctggatctggctatgacgatagagctgcctctttgaaccatgctatcacgttgagtcagcaagtagagtatttcaaggagttacaggcaaagctagcaaaggtagctggtagtancaagtcagcagccatcatccaggatgcactctatgtattgagtgcctggaagccgtgactttctccaaaactactatgtcaatcctttggttaaccatgcctatactccaaat

SEQ ID NO: 189978 - DNA, 464 bp, Gossypium hirsutum
accatgagaagggatgtgtgagcaggttcaaattccgacgctcagcaattcaacaaaaagctcaacgcagcagcaaccaatctccagaagcaacaccctgatctcaagattgtggtttttgacatttacaaggcccttcttgatgttgttaataccccttcaaactatggtttcgtagaagcaacgagaggctgctgtggcacagggactgtagagacaactgaattcttatgcaatccgcatacactgggaacttgtcccaatgcctcccagtatgtgttttgggacagtgttcatccatcgcaggctgctaatcaggtccttgcagatacattgattgttcagggcattcccctcctttgattcgccaggacaccgtgtctacttgccctttttaaactgtactaagatctgtcactactcctttttctattatcttaatcaaaaagtgactcgtattgtag

SEQ ID NO: 189979 - DNA, 598 bp, Gossypium hirsutum
gtgaaagtgaaaatggaggtttacagcagaaggctaatggttctggtgtttgcatgggcactagtaagcatagggtacgcgcaagagtcgaactcgaccactctggttccagcaatactgacttttggtgactcagtggtagatgtgggcaataatgattatctccccaccatcttcagggctaattaccctccttatgggagggacttcgccaaccaaaagcctactggtagagccaattatggctagtcggcctctgacataactgcgctaaactctggagcattctcaccaccaaagaaacctatgaaccctatgtcacccctgttagattccaccctgatgagccctataacagcatccccgaatcctccaacaataaagacacttactactacaacaagaatgcctacgagtccactaagcagcaaaacttgggcgaggccattttcaccgagaaaggatggagcaccaaggaaaaccagaacaacaactactacaacggcaacaatggttacaacaatggcgagaagcaaggcatgagcgataatagttgttctcactcttgacgtcatagtagtactttccggaagaattc

SEQ ID NO: 189980 - DNA, 599 bp, Gossypium hirsutum
acaaaaccctccaaaaaagactttgtacggaatgtcgcagttgttggagaaggcgaaggacttcgtggtggataaggtggccaacataaagaagccggaggctagtgtctcggacgttgatctgaaacatgtgagccgtgagtgcgtcgagtatggcgctaaggtctctgtctccaacccctacagccattccatccccatttgtgagatctcttacaatttcagaagtgctggaagagggatagcatcagggacaataccagacccggggtcattgaaagccagcgacacaacgatgctggacgtgccagtgaaggtaccgtataacatcttagtaagcttggtaaaggatattggtgcagattgggacattgactatgaattggaattgggtctcaccattgatcttcctatcgtggggaacttcactatccctctctctcagaaaggagagatcaagcttcctactctcagtgacatcttttagatttatcattagtatgtcgctctcatactcataaaacttgtgtgttttcccttttactcatgctgtaacatgaagaatatatcgaactatactaggttgtttttcttttaat

SEQ ID NO: 189981 - DNA, 764 bp, Gossypium hirsutum
aatcatcactatcacaactcacagcaatattatcacaagcagcagctaaaaaaaaaggcaagaagaaaaatggcgtcagagcaatatcaagctatgaggaatgcaccacaagaggaaaaagaagagcttgatgcaagggcaaagcaaggggagactgtggttcctggtgggactcgtgggaaaagcttggatgctcaaattaacctagctgaagggaggcacaaaggaggggaaacaaggaagcaacaactaggaacagaagggtaccaagaaatgggacgcaaaggtggtctgagcaactctgatatgtctggcggtgaacgtgcagctgatgaaggtgtcaccatcgatgaatccaagttcagaaccaaaaactaaatatcatctcccacgacagaaccctagctactcttttttatatatagaccctaataatgtatgtttgttttaggttttaggaagaactgaaccagtttatatgtaacaaaacgctggacatgtttaagctttagcttggtgtctgtaatctaagctatagccctgttgacggtttgttttagtgttattaggactaaaccagtttacatgtaaaaactggacatgtttaaagcttagcttggtgtctgtaatctaagctggagcttagttttttactgtttgttttagtgttttaaatgaggactaaaccagtttatatgtaagaactgggcatgtttaaagcttagcttggtgtgtttatatatggacctagtgttttaactgtt

SEQ ID NO: 189982 - DNA, 676 bp, Gossypium hirsutum
tcccacgcgtccgcccacgaaagagcaggaaaacaagaaaagcagagccgcatcactttttgctagctaagctactgtgggagttattgttcttcagaacagcttctgcagtagctaataataacgttatatattatataaattttatacatcctttttaccctacgactccatatataagcaagtaaaaataaatatggctcgctctgtttcttcctttaagttccttggtgcttctgtttttgatgctctttatgtctccatatcaaggagaggttactcaggtgcaccgccggcggcagtgacggctagctttggtaggcctggagcgatggggaaagtggaacgaagatatgcgatgaaagagtcgtcgtcgtcggagacaagggcttattcttcagcttgggcgcctgaccctgttacggggtattaccggccggagaactgtggggctgagatcgatgcggcggatctccgggagatgatgttgaatcacagggttagatcacagtagaaacttgccaccgcatgtgatcaccgtagcagagcagagccagaatgttttgcagatgtttgggtgcctttgtattttgttttggttttgagttcaaaatcttttatcttaatagtcggtagttttttcgcataaagagtgtagtgtgctgaactttaagct

SEQ ID NO: 189983 - DNA, 667 bp, Gossypium hirsutum
cccacgcgtccgcaaagagcaggaaaacaagaaaagcagagccgcatcactttttgctagctaataataacgttatatattatataaatattatacatcctttttaccctacgactccatatataagcaagtaaaaataaatatggctcgctctgtttcttcctttaagatccttggtgcttctgtttttgatgctctttatgtctccatatcaaggagaggttactcaggtgcaccgccggcggcagtgacggctagctttggtaggcctggagcgatggggaaagtggaacgaagatatgcgatgaaagagtcgtcgtcgtcgtgacacatgggcgttattcttcagcttgggcgcctgaccctgttacggggtattaccggccggagaactgtggggctgagatcgatgcggcggatctcccggagatgatgttgcatcacagggttagatcacagtagaaacttgccaccgcatgtgatcaccgtagcagagcagagccagaatgttttgcagatgtttgggtgcctttgtattttgttttggttttgagttcaaaatcttttatcttaataatcggtagtatttcttatttaaaaaaaaaaataaaaaaagcggagttggaaaaaaaaaaattttttttggggtaccaaaaattaatttatt

SEQ ID NO: 189984 - DNA, 722 bp, Gossypium hirsutum
  unsure (1)..(722): unsure at all n locations
gttcaacacataatgatggataaagctgcagatatatggaaccgaatttctaagggtggatatctttatgtttgcggtgatgccaagggtatggcaagagatgttcatcgcactttgcacactattattcaggagcgggaggatgtggattcatctttggcggagtctaccgcgaagaaactccagatggacggacgatacctcagagacgtgtggtgatgggtataatttcttgtagcgttctttcaccagttcatctcagagaaaaaacgggtgggtttgatagtgatggcagaaagctaaactggtttttcatattgggagaagatctgctagatgttagatcttttttttttctatttaaattttctaaatcttgaaataatactctaaatagaaggatcaattgtttttggactttgccccgccattggaagttgtaataaggaacagtgtgatatagctagtttacaagcatgtgaaaaacatatttaaaaaacttcttgtaggttataatattttggattgtcagcatcattccactctttgtactgacataaataaataaatttgcacaataaaactggatttctgtcgcgatggtgaaagtggaactataatattcgatgaaagagttcgttctcttctgagacaagggcttattcttcagcttgngcgcctgaccctgttacggggtattaccggccggagaactgtggggc

SEQ ID NO: 189985 - DNA, 1855 bp, Gossypium hirsutum
cggacgcgtgggcggacgcgcggcgtagatatggcgattaacccttctttgctctttctttcccttctttttctcttcaatggctgcctagctcgccagaccttttcgtcacagcagtcccaaaatgagtgtcaaatcaataggctccgcgcctctgcaccccagacccgaattcgctccgaagccggcaccaccgagtggtggaaccccaactgtcaacagctcaggtgtgctggtgtatctgtaatgaggcagactattgaacctaatggccttgttttgccttccttcaccaatgctcctcagcttctctacattgtccaaggaagaggtattcaaggtattgtgatgcctggatgtgccgaaacattccaggattcacagcaatggcagcatcaaagccgtggcaggttccaggaccagcaccagaaagtccgacggttccgccagggtgacatcattgctttgccgcagggtgtggttcactggagctacaatgatggcaatgagcgtgttgttactatcaatctacttgacactggcaacagtgctaatcagctcgacaacatccctagaagattccatcttgctggtaacccagaagaggaacagaggcaactgaggaggctagcacagcagatgcagggaagaagtgagaggggggaggagtctgaggaagaagaaggagaaggagaagaagaagaagaagaagacaaccccagccgccgcagccgccaccaggaggaggaggagcaggggcgggaaagctcatcatgcaacaaccttctctgtgccttcgacagaaacttcctcgctcaagctttcaacgttgaccacgacatcattaggaaaatccaacgtgtacgaggaaatagaggcaccatcatcagagtcagggacagactccaagtcgtaacaccacccagaatggaggaagaagaacgtgaggagcgccagcaggagcagcgataccgccatacgagaggagggtctcaagataatggcctcgaggaaactttctgctccatgaggatcaaggagaaccttgctgaccctgaacgtgccgacattttcaacccacaagccggtcgtatttccaccctcaacaggtttaacctccccatcctccaacgacttgagctcagcgccgagaggggtgtcctctacaacagagctggtttgattccacaatggaacgtcaacgctcacaaaatactctacatgttaagaggctgtgccagagtccaagtggtgaaccacaacggcgacgcagtgttcgacgataacgtggagcaaggtcagctcctgacggtgccacagaactttgcgttcatgaaacaagcaggaaacgaaggagccgaatggatttccttcttcaccaatagcgaagccaccaacaccccaatggctggaagtgtctccttcatgcgagcactgccggaggaagtggtggcagcgtcgtatcaggtgtcaagagaagatgcaaggcggattaagttcaacaacaaaaacacctttttcttcactccttcacagtccgagaggagggccgatgcttaaactccagccgatgccaatgcaatcaaaatcagggggatctttgtagggtaacgtaagtaggaagtaataaaaagagttgcagagctatgtccgccatggattttgttgttgatcgttgaggtactgaaagattagggtttagaggatgaataataaaagaaagaatcttacaaggcggccctttcattcatataatcggtcgaaatgttacaacttcaatatatgtaactttgtattatcaaaaaaaaaattaataattatattaatttaattaactaattatcttttataatta

SEQ ID NO: 189986 - DNA, 1048 bp, Gossypium hirsutum
taacaccgttattctttctctattctacctgatttgatttgatttgattttgtaactgatgggacgatcaccttgttgtgaaaaggctcataccaacaaaggtgcctggaccaaagaggaagatcaacgcctcatcaactacatccgtgtccatggtgaaggctgctggcgttccctccccaaagctgctgggctgcttagatgtggtaagagttgcagattaagatggataaactacttgaggcctgatcttaagagaggaaatttcactgaagaagaagatgagcttatcatcaagcttcacagtttacttggaaacaaatggtcattgattgctggaagattaccaggaagaacagataatgagataaagaactactggaacacacacatcaaaagaaagcttataagcagaggaattgatccacaaactcatcgtcctctcaatcaaacggccaataccaacacagtcacagcccccaccgaattggatttcagaaactcgcccacatccgtttccaaatccagttccatcaaaaacccgtctctggatttcaattacaatgaatttcaattcaagtccaacacagattcccttgaagaacccaactgtacagccagcagtggcatgactacagatgaagagcaacaagaacagctgcacaagaagcagcaatacggtccgagcaatgggcaagacataaatttggagctgtcgattgggattgtttcagctgactcatctcgggtatcaaatgccaactcggccgagtcgaaaccaaaggtagataacaacaatttccagtttcttgaacaagctatggtggctaaggcggtatgtttgtgttggcaattaggttttggaacaagtgaaatttgtaggaactgtcaaaattcaaattcaaatggcttctatagttattgtagacccttggattcatagggtcatctttttcttctttctttctgtttttaggagataaattaatgcttaattattaaaaaattgcctgcccactgtaatcaaagcaaaattataaaacaaact

SEQ ID NO: 189987 - DNA, 870 bp, Gossypium hirsutum
cttactcgtccgaaataattattgcatccgtcctttcccttcaaacaaaacacccccccctacatatatgcatatcccaaagttgttctcttaatcggaattatcatgggacgatcaccctgttgtgaaaaggcacataccaataaaggtgcctggaccaaagaggaagaccaacgcctcattgactacatccgtctccacggtgaaggttgctggcgttccctccccaaagctgctggactgcttaggtgtggtaagagttgcaggttaagatggataaactacttgaggcctgatcttaagagaggaaatttcagtgaagctgaggatgaacttatcatcaaactccacagtttacttggaaacaaatggtctttaatagctgcgagattaccgggaagaactgacaacgagatcaagaactactggaacacgcacatcaaaaggaagcttataagcagaggaatcgatccacaaactcatggtccactcaatcaacccaccaacaccaataaatccactgaattggatttcaggaacgtacctaaagcttcaaaatccaactttgctccaaacccatctcgggatttcaatttcaatgaatttcaagttaaggccaaagcagaatccattgaagaaggaaactctagcagcagtggaatgtctactgatgtattaacaacaacaacatcatcatctggaggacaagtttgcatgttatagtcaagagttagatttggagctatcaattgcgattagttcatcctgaaagtactacaactcaaccggggtttcaactgctaactcagcccaatccaaacctccgttagacaaaagcaatatccagatcctgggactggctatagcggt

SEQ ID NO: 189988 - DNA, 696 bp, Gossypium hirsutum
ctttatttttcactttccgcacacttagcttaactaagcaagctcgtaagctgttttcatcaatggccgaccgtgaccgctcttaccggacgtttgaccaggttgttcgtggtgatagaacgaactatcaaagcggaccatcaacaacccaagttctaaccgtcctcaccctccttcccatcggcggcactctccttgcattagccgggctaaccctcaccggcaccgtcatcggcctatgcgtggcaacgccactcttcgtcatcttcagcccggttctgctcccagctgccatcgcggttttcatggctgtggccggtttcttgtcgtccggggcattcgggttgacggggctgtcctcgctctcctacgtatttaaccgcttcagacaggcgactggcaccgagcagctcgacgcggaccgggccaagaggggcatgcaagatatggtggggtatgtgggacaaaagactaaggaaactgggcagactatcgaaaacaaggctcatgagggtggtaggacatgaatgtgaaccatggaaggttactttgcttgcttgtaaaatgtacttttaagtgtttttcattttcgagaagtcttttgcctttgcgattttcgtgcgtgttcattttatcttcttctttttctctagttgtgaaataatgggtaatatagtaatatattagatttgtggt

SEQ ID NO: 189989 - DNA, 800 bp, Gossypium hirsutum
ctctttcttttccggtcaactgtcaaagtttctctctctctctctctctctctattgttgaagttcataagcttttgtatcaatggctgaagtccgtgaccgcaacctgcctcaccaagttcaagttcacccacagtaccgtttcgacaatacaaccggaggcggttacggtgcaaagaactatcacagtggaccatcaacaagccaagttctagccgtccttacacttctccccattggtggtacactgcttgcattagccgggttaacactggccggcaccgtcattgggctgatgctagccacaccgctgttcatcatcttcagcccagttcttgtcccagctgccattgccattgccatggcagtgacggggttcttgtcgtcgggggcgtttgggttaacaggggtggcgtcggcgagttacgcgcttaaccggctgtggtacgcaacagggacggagcagctagatctagaccatgcagagagacggggacaggacatctcagactatgtggggcaaaagacaaaggaagttgggcagaagattgagaacaaggcacatgaaggtcaagttggaaggacttgaagatgataacaaggcttttgggaataaaaaagaatgtaggtttttttttttttttggggggggggggtgtggggttgtattatgttgttagtgtgcatgtgttgttaagtgaatgatgtgggttttgctccaattccatgtatgtttcctttttatctcttaatcacgcttgtttttttactctaaataaaatatactctactttttaagg

SEQ ID NO: 189990 - DNA, 1497 bp, Gossypium hirsutum
gtcgattccggtcgcccacgcgtccattttttttaccagatctgttacactctgaattatttaagcagcacgtcacaagggatctagagcaaggttagtgaccttgggttgagtgtagagatgaggaaaatcatgggtgccaaagttcttttcttctttgctttgctttccttttcagctgtctcggcatttgcacaggatgaggaagaccaaggtcttgttatgaacttctacaaggattcttgtcctcaggctgaagacattatcaaggagcaagttaagctactgtacaagcgacacaaaaacactgctttttcttggctgagaaacattttccatgactgtgctgtccagtcatgtgatgcttcactgctgctggactccacaagaaggagcttgtctgagaaggagacagacaggagctttggcctaaggaatttcaggtacattgagaccatcaaagaagctgtagaaagggaatgtcctggagttgtttcttgtgctgatatccttgttctgtctgctagagaaggcatcgtttcgttgggaggcccttacattcctctcaaaactggaagaagagacggtagaaggagcagagcagatgttgtggaggagtatcttccggaccacaatgagaccatctctggcgttctcgacaggtttgccgccatgggtattgacacccctggagtcgttgccctcctaggagctcacagtgtcggcagaactcactgtgtgaagctggtgcatcggttgtacccagaggttgaccctgccctcaaccccgaccatgttccacacatactccataaatgccctgatcagatcccagaccccaaggccgtccagtatgtgagaaacgaccgtgggacacccatggttttggataacaactactacaggaacatactggacaacaagggtttgttgattgtggatcaccaactggcgtacgacaaaaggaccagaccttatgtgaagaaaatggccaagagccaagactatttcttcaaggagttctcaagggccattactctcctctctgagaacaatcctctcactggtagcaagggtgagatcaggaagcaatgcaatcttgcaaacaagcttcactaaaatgcctcgccaaagagaaagccgagagtggccgaataaaatggttgtttacttgtttcttttccaagagacaagtttgttaatgtgcagtgagtaatggtgcaatggtactagtttgtaacgatcgacccattgcatttttttttagcataagccaggttgccttctcttgatgttggtcatgggcgtagtggatgtagggatggatgtaatgtatgtatgtaaggatggtgttgactgtgtatgatgcatgaatttcaaagatttaaaagttatgatgattcatgcataatcccttccttctccattacgatgcaatactatgagcaatattattgtatttggatcaatttaatggggaagagacggggaggcacc

SEQ ID NO: 189991 - DNA, 489 bp, Gossypium hirsutum
atcctgttcaaatgccgaggatgattttagaccaaggtcttgttatgaacttctggaaggattcttttcttctttgctttgctttccttttcagctgtctcggcatttgcacaggatgaggaagaccaaggtcttgttatgaaacttctacaaggattcttgtcctcaggctgaagacattatcaaggagcaagttaagctactgtgcaagcgacacatatacactcctggttgttggcgggaaaggtaggcagatgccagttcattacggttcaagcaagcacaacttcgtcactgtttcatccccgattgcaactcagcttcctcaagctgcaggcatggcatactctcttaagatggataagaaagacgcttgcgttgtcgcctttatcggtgatggcggtaccagcgagggagattttcatgctggtttgaactttgcagcagtgatggaagccccggttatttttgtttgtcgcaacaatggct

SEQ ID NO: 189992 - DNA, 429 bp, Gossypium hirsutum
gtgtcatggatcctcatctatatctgcacacgttatgcattcgcgcgggccattactctactatctgagaacaatcctataactaggtagcaagggtgagatcaggaagcattgcaatcttgcaaacaagcttcactaaaatgcctcgccaaagagaaagccgagtgtggccgaataaaatgtttgtttgctcaggttcttttccaagagacgagtttgttaatgtgcaggtgagtaatggtgcaatggtactggtttgtaacgatcgatccattgcatttttcttttagcataagccaggttgccttctcttgatgttggtcatgggcttggtggatgtagggatggatgtaatatatgtatggaaggatggtgttgactgtgtttaaaataaaatattttatagttttttattaaacttcctacaat

SEQ ID NO: 189993 - DNA, 1982 bp, Gossypium hirsutum
  unsure (1)..(1982): unsure at all n locations
cccacgcgtccgatggcttacacttctttgctttcttttagcgtttgcttgcttgttctcttccatggctgctgtgctcagatagatctcgtcactaaccatcaccaggatccaccttgggggcagcctcagcaacctcagccacgtcaccaatcccaatgccaactccagaacttgaatgctcttcagcctaagcaccggtttaggtcagaggctggtgaaactgagttctgggaccaaaatgaggatcaattccagtgtgctggtgttgctttcctacgtcataagatccagcgcaaaggacttttattgccttcatttaccagtgctcctatgcttttctatgttgaacaaggggagggtattcatggggcggtcttcccaggttgtcccgagacatatcaatcacagtcgcaacaaaatatacaagataggccacaaagagatcagcaccaaaagctcagacggttgaaggagggcgatgtggttgccttgcctgctggagtagctcactggattttcaacaatgggcggtctcaacttgtgttggtcgcacttgttgatgttggcaatgatgccaaccagctcgatgagaacttcaggaaattcttccttgctggtagtccacaaggaggtgtggtaagaggaggtcaaagcagagaccgaaaccaaaggcaaagcagaacccagagaggggaacgggaggaggaagagtcgcaagagagcggcggaaacaatgtgctcagtggctttcgcgacaatctcctggcgcaggctttcggaattgataccaggctagcaaggaagctacaaaacgaaagagataacaggggagccattgttagaatggagcatggatttgagtggcccgaggaagggcagaggcgacaaggacgtgaagaggagggagaagaagaaagagaaccgaaatggcagaggcgacaagaaagtcaagaagagggatctgaggaagaagaaagagaagaacgaggaagaggaaggagaaggtcaggaaacggcttagaagaaacattctgctcaatgagactgaaacacaggacccctgcttcctctgctgatgttttcaacccacgaggtggtcgcatcaccacagttaacagtttcaatcttcccattctccaatacctccaactcagcgccgagaggggagtcctttacaataatgctatctacgctcctcactggaacatgaatgcccacagcattgtttacatcacaaggggaaatggaaggattcaaattgtgtcggaaaatggagaggcgatattcgatgagcaggttgagaggggtcaggtcataaccgtaccccagaatcatgcagtggtgaaaaaagcaggaaggcgagggtttgaatggatagcattcaagacaaatgccaatgctaagattagtcagattgctggacgtgtctccattatgcgaggattgccggtggacgtgctggccaactcctttggtatatcccgggaggaggccatgaggttgaagcataacagacaggaggtgtcggtttttagcccaaggcaaggctcgcaacagtagatcaaacaactaatctaggtgtacgtacgtacgtaattgcatcaacaataaaacccagatcccaatatctggattcggaataaatatatatataaataaaataaaacatggccttaacaggcatgcaactctagtttctactctacaacttgcatgtatttatatatgtgcgggagcaatgttttgtaatccagctaaattaaataaaagtaatagtaaacaaggtttttcttctttaaaaaaaaaaaaaaatnnttaanaaaaaaaaaaaaaaaaaaaaaaaaaaaaaaaaaaataaaaaagttataaaataaaaaaaaataaaaaaaaaaaataaaaaattaaaaaanttttntggggccgccccttttagaggacccaagttaaaattatcctaaataagatataaaagctttttt

SEQ ID NO: 189994 - DNA, 2063 bp, Gossypium hirsutum
caaaatacagagcttatcgtaatcatggtgaggaataagtcagcttgcgtagttttgctcttttctcttttcctttcctttggcttgctttgttctgccaaagactttcccggaagaagaggcgacgatgatcctccgaagaggtacgaggactgccggaggcgatgcgaatgggatacacgtggacaaaaggagcaacagcagtgtgaagaaagttgtaaaagtcagtatggggagaaagatcaacagcagcgccaccgccctgaagatccccagaggagatacgaggagtgtcagcaagaatgccgacaacaagaagaaaggcaacgaccacaatgccaacaaaggtgcttgaaacgattcgagcaagaacaacaacaatcccagaggcaattccaggagtgtcagcaacattgccaccagcaagaacaaaggccggaaaggaagcaacaatgtgtgagggaatgcagggaaaggtaccaggagaatccatggaggagagagagagaagaagaagcagaagaggaggaaactgaagaaggagagcaagaacaaagccataaccctttccacttccatcgcagatcattccaatctcgattcagggaagaacatggcaatttcagggtcctccaaaggtttgcttcaaggcatcctattcttaggggcatcaacgagttccgcttatctatcttagaagcaaaccccaacactttcgttctcccacaccattgtgacgctgagaaaatttaccttgtcaccaacggaagaggaacgcttacgttcttgacacatgaaaacaaagagtcatacaatgtagtaccgggagttgtagtcagaattccagcaggaagcactgtgtacttggccaaccaagacaacagggaaaagctaaccatagcagtgctccaccgccctgtcaataaccctggacaattccagaaattcttccctgctggacaggaaaatcctcagtcatacttacgaatcttcagccgtgaaattcttgaggctgtcttcaatacacgaagtgagcagctagacgagctgtttggtgggaggcaaagccatcgaaggcagcagggacagggaatgttccgtaaagccagccaagaacaaataagggcattgagccaagaagctacttcaccaagggagaaaagtggcgagagattcgccttcaacttattgagccaaacccctcgctactccaaccaaaacggccgcttcttcgaggcttgcccacgtgaattccggcaactcagggacatcaatgtcaccgtttcagccttgcaattaaaccaaggatcaatctttgtgccgcactacaattcaaaggctacattcgtgatccttgttaccgaaggaaatggatacgttgaaatggtttctcctcatcttcctaggcaaagctcatttgaagaagaagaagaacaacaagaagaagaacaagaacaagaagaggaaaggagaagtgggcaatacaggaaaataaggtcccagttgtcgcgtggagacatatttgtagtcccagcaaacttcccagttacattcgttgcatcccaaaaccagaacctgcggatgactgggttcggtctttacaaccagaacattaacccagaccataaccagaggatcttcgtggctgggaaaatcaaccatgtgagacaatgggatagccaagccaaggagttggcctttggggtgtcatcgaggttggtggatgagatattcaacaacaacccacaagagtcttacttcgtgtctcgacagaggcagcgtgcatctgaataaagagttagaggcaataataaccacatagtctcgtgtttacggactaatgtgaaattttctagttttaagcaggcatgtaatgaaataaaaatggtgacctatgtaaaggaggagacccttgttttgtagtgcaataacttgtatgaactttttgagtgccttttttgtctttctatgttaaggaataaaacgttaagtccttaagtcaaaaaaaaaatgtgacccttcattggggggagctttacaaaaaaaaattcttgggggggcgc

SEQ ID NO: 189995 - DNA, 763 bp, Gossypium hirsutum
gtgacagtgtcactctagaacaggcatgaacgcagggtcgggctggtaccggaactgccggcctggacaaggcgcgtgctctggaggaggccaacgccgacctggaggtgaagatccgtgactggtaccagaggcagcggcccgctgagatcaaagactacagtccctacttcaagaccattgaggacctgaggaacaagattctcacggccacagtggacaatgccaacgtccttctgcagattgacaatgcccgtctggccgcggatgacttccgcaccaagtatgagacagagctgaacctgcgcatgagtgtggaggccgacatcaatggcctgcgcagggtgctggatgaactgaccctggccagagctgacctggagatgcagattgagagcctgaaggaggagctggcctacctgaaaaagaaccacgaggaggagatgaatgccctgagaggccaggtgggtggagatgtcaacgtggagatggacgctgcacctggcgtggacctgagccgcattctgaacgagatgcgtgaccagtatgagaagatggcagagaagaaccgcaaggatgccgaggaatggttcttcaccaagacagaggagctgaaccgcgaggtggccaccaacagcgagctggtgcagagcggcaaaagcgagatctcggagctccggcgcaccatgcaggaccttggagatcgagctgcagtcccagctcagcatgaaagcatccctggagggcagcctggcagagacag

SEQ ID NO: 189996 - DNA, 724 bp, Gossypium hirsutum
tacttatagtaatcatggtgaggaacaagtcagttttcgtagttttgctcttttctcttttcctttcctttggcttgctttgctctgccaaagacttccccggcagaagaagcgaggatgatcctcaacagaggtacgaggactgccggaagcgatgccaattggagacacgtggacaaacggagcaagacaagtgtgaagacaggtgtgaaacgcagttgaaggaggagcagcagcgtgacggagaagatcctcagaggagataccaggattgccgacaacactgccaacaggaagaaagaaggctgcgtccacattgcgaacaaagctgcagggaacaatacgagaaacagcagcagcagcagcctgacaagcaattcaaggagtgtcaacagcgttgccaatggcaagagcaaaggcccgaacggaagcaacaatgtgtgaaggaatgcagggaacagtaccaagaggatccatggaagggagagagagaaaacaagtggagagaagaagaagaggaggaaagtgacgaaggagagcaacaacaaaggaacaacccttactacttccatcgcagatcgttccaagaacgattcagggaagaacatggcaatttcagagtcctccagaggtttggtggccaacattatttacttaagggcattaaccaggtccggattggcattttaggaggcaaccccaacactttcggtcttccacacca

SEQ ID NO: 189997 - DNA, 1240 bp, Gossypium hirsutum
atttaccttgtcaccaacggaagaggaacgcttacgttcttgacacatgaaaacaaagagtcttacaatgtagtaccgggagttgtagtcagagtcccagcaggaaacactggggtactgggcaacccaggccaccagggaaaggttattattagaagggtttaacggcctggtaattaccctggacaattcgaggaattcttccctgctggacaggaaaatcctcagtcatacttacgaatcttcagccgtgaaattcttgaggctgtcttcaatacacgaagtgagcagctagacgagctgtttggtgggaggcaaagccatcgaaggcagcagggacagggaatgttccgtaaagccagccaagaacaaataagggcattgagccaaggagctacttcaccaagggggaaaggtagcgagggatacgccttcaacttattgagccaaacccctcgctactccaaccaaaacggccgcttttacgaggcttgccctcgtaatttccagcagcaactccgagaagtggattcctccgttgttgccttcgaaataaacaaaggatcgatcttcgtaccgcactacaattcaaaggctacattcgtggtcctcgtcaccgaaggaaacggccacgtcgaaatggtctgccctcacctttctaggcagagctcacactggtcctcccgagaggaagaagaacaagaagaacaagaagttgaaaggagaagtggacaatacaagagagtgagagcccagttatcaaccggtgacctatttgtagtcccagcaggccatccagtcacattcgttgcctcccaaaacgaggacctaggattgctcgggttcggactctacaacggccaagacaacaagaggatcttcgtggctgggaaaaccaacaatgtgagacaatgggatcgccaggccaaggagctggcgtttggggtggagtcaaggttggtggatgaggtattcaacaacaacccgcaagaatcttacttcgtgtctggacagagtcggcgtggatttgatgagaggaggggaagtaataaccccttatcgccgttcctggactttgcacgcttgttctaagtagtagttttgttagtaaggcatgtaatggtggaataaaataagggtggcctatgtaaagaggaagagccttttttgttgtgtgttttggagtccttttgttttaaggaataaaataagagggaaatctttacttttcctttaacat

SEQ ID NO: 189998 - DNA, 1395 bp, Gossypium hirsutum
tgacacttttaatccagctcagtcaaaagagcgcgctggcgccggtccggcgcttcccgtatcagccttcctgagcaccttcctttctttcagccaactgctcgctcgctcacctccctcctcggcaccatgaccacctgcagtcgccagttcacctcctccagctccatgaagggctcctgcggcatcgggggcggcatcgggggcggctccagccgcatctcctccgtcctggccggagggtcctgccgcgcccccagcacctacggcgggggcctgtctgtctcctcctcccgcttctcctctgggggagcctgcgggctggggggcggctatggcggtggcttcagcagcagcagcagctttggtagtggcttcgggggaggatatggtgctggcttcggtgctggcttgggtggtggcttgggtggtggctttggtggtggctttgctggtggtgatgggcttctggtgggcagtgagaaggtgaccatgcagaacctcaacgaccgcctggcctcctacctggacaaggtgcgtgctctggaggaggccaacgccgacctggaggtgaagatccgcgactggtaccagaggcagcggcccagtgagatcaaagactacagtccctacttcaagaccatcgaggacctgaggaacaagatcattgcagccaccattgagaatgcgcagcccattttgcagattgacaatgccaggctggcagccgatgacttcaggacaaagtacgagcacgaactggccctgcggcagaccgtggaggccgatgtcaatggcctgcgccgggtgttggatgagctgaccctggccaggactgacctggagatgcagatcgaaggcctgaaggaggagctggcctacctgaggaagaaccatgaggaggagatgcttgctcttcgaggtcagagcggtggagatgtgaacgtggagatggatgccgcacctggcgtggacctgagccgcatcctgaatgagatgcgcgaccagtacgagcagatggcagagaaaaaccgcagagatggggaggcctggttcctgagcaagaccgaggagctaaacaaagaagtggcctccaacagcgaactggtacagagcagccgcactgaggtgacggagctccggagggtgttccagggcctggagattgagctgcagtcccagctcagcatggtatgaaggacccggtacagcagcagcccccaagccaccagtaatggccaccaccccctcaacaagccacaatctagttgcacctttcttttctcaggatgggaccagatgactcatgggacccattatatagacagagaaattaagccctagaatagtgggctagcttttttccatattgtctggcccgtcagtaccccaact

SEQ ID NO: 189999 - DNA, 915 bp, Gossypium hirsutum
aaccatctcactatgagggacgctggtgcaccctgctgcccccccgcccaggccaagcaagcttctgtctgcacctgctctcaatcctgctctcaccatgagcctccgcctgcagagctcctccgccagctatggaggtggttttgggggtggctcttgccagctgggaggaggccgcggtgtctctagctgttcaactcggtttgtctctgggggatcagctggaggctacggaggcggcgtgacctgtggctttggtggaggggctggtagtggctttggaggtggctacggaggtggccttggaggtggctttggtgggggttatgctggtggctttgttgattttggtgcttgtgatggtggcctcctcactggcaatgagaagatcaccatgcagaacctcaacgaccgcctggcttcctacctggagaaggtgcgcgccctggaggaggccaacgccgacctggaggtgaagatccgtgactggcacctgaagcagagcccagctagccctgagcgggactacagcccctaccacaagaccattgaagagctgcgggacaagatcctgaccgccactattgaaaacaaccgggtcatcctggagattgacaatgccaggctggctgcggatgacttcaggctcaagtatgagaacgagctggccctgcgccagagcgtggaggctgacatcaacggcctgcgccgggtgctggatgagctcaccctgtctaagactgacctggagatgcagatcgagagcctgaatgaggagctggcctacatgaagaagaaccacgaggaggagatgaaggaattcagcaaccaggtggtcggccaggtcaacgtggagatggatgccaccccgggcattgacctgacccgcgtgctggcggagatgcgggagcagta

SEQ ID NO: 190000 - DNA, 810 bp, Gossypium hirsutum
atggtggcttgggtggtggcttgggtggtggctttggtggtggctttgctggtggtgatgggcttctggtgggcagtgagaaggtgaccatgcagaacctcaacgaccgcctggcctcctacctggacaaggtgcgtgctctggaggaggccaacgccgacctggaggtgaagatccgtgactggtaccagaggcagcggcccgctgagatcaaagactacagtccctacttcaagaccattgaggacctgaggaacaagattctcacggccacagtggacaatgccaacgtccttctgcagattgacaatgcccgtctggccgcggatgacttccgcaccaagtatgagacagagctgaacctgcgcatgagtgtggaggccgacatcaatggcctgcgcagggtgcctggatgaactgaccctggccagagctgacctggagatgcagatcgaaggcctgaaggaggagctggcctacctgaggaagaaccatgaggaggtgcggttgctgctggcttccggggtgggaggctggtttggtggggttgccagatgcacccagggccaggagaggagtctgctgagctgactgcctcctgccatcccttcccaggagatgcttgctcttcgaggtcagagcggtggagatgtgaacgtggagatggatgccgcacctggcgtggacctgagccgcatcctgaatgagatgcgcgaccagtacgagcagatggcagagaaaaaccgcagagatgctgaggcctggttcctgagcaaggtggggctcgggccctcagtgagcctgtagcac

SEQ ID NO: 190001 - DNA, 377 bp, Gossypium hirsutum
gtcgccatatgcgatgtcagcatggttcgtggataatctattcgcagcatgcatacaaatgtcttccttcgtgactcaacatagacagcgtgcatctgaatacaagagttaaagccaataatatccacatagtctcgtgtttactggactaatgtgaacattttctaagttttaagcaggcatgtaatgaaataaaaatggtgacctatgtaaaggatggagacccctgttttgtagtgcaataacttgtatgaactttttgagtgcctttttttgtctttctatgttaaggaataaaacgttaagctcttaagtcaaacaaaaaaagaatctagatatgaggctcaagtgcagataacatatcttaaacgctggct

SEQ ID NO: 190002 - DNA, 720 bp, Gossypium hirsutum
ctcgacagaggcagcgtgcatctgaataaagagttaaaggcaataataatcacatagtctcgtgtttatggactaatgtgaaattttctagttttaagcaggcatgtaatgaaataaaaatggtgacctatgtaaagtaggtgaccgttatgctggcagactatgtgatgctggtgcttgtgatggtggcctcctcactggcaatgagaagatcaccatgcagaacctcaacgaccgcctggcttcctacctggagaaggtgcgcgccctggaggaggccaacgccgacctggaggtgaagatccgtgactggcacctgaggcaggccccggggcccgcccgtgactacagccagtaccacaggacgatcgaggagctgcagaacaagatcctcacagccaccgtggacaatgccaacatcctgttgcagatcgacaatgcccgtctggctgctgatgacttccgcaccaagtttgagacagagcaggccctgcgcctgagcgtggaggccgacatcaatggcctgcgcagggtgctggatgagctgaccctggccagagccgacctggagatgcagattgagaacctcaaggaggagctggcctacctggagaagaaccacgaggaggagatgaatgccctgcgaggccaggtgggcggtgagatcaatgtggagatggacgctgccccaggtgtggacctgagccgcatcctgaacga

SEQ ID NO: 190003 - DNA, 547 bp, Gossypium hirsutum
cccacgcgtccgcccacgcgtcccctgaaaaccctttcactaaatattgaagatgcagtcaatgaaggatgctgctgcctctgctaaggccggcatggagaaggccaaggcctccatgcaggaaaaggtggaccaaatgaagacaagggaccctaatgagaaagagatggcgagggaaaggaaagaagagagacaagaagatgcagagctgaggaaacaagaggcccgccatcataacgccacggctggccatgctggtggtggtggtattggtggtactggctacaccacagctgggtacaacataggcgacactggtggctatggcggtaccggtggacatgacaaccgtgggtaccccaccgcaggtagtgggtatgatacaggcaggcaagatgacctcagcagtatggggtttggcggagatacagagggtgcttacggtacaacggggaaccaagacttcccaaatgcggcgtctaacaatgctgggactagaaccaacacccgcggaggtacccaggatgatccttattatcgatcctat

SEQ ID NO: 190004 - DNA, 644 bp, Gossypium hirsutum
ctgatttctgataaaaactcttttttacttttttctttccaatcaataatagttggactgcaacagcagtaacagagtagataccaagtctaacaatggcgaatcctaagctcggtcgaagtcctagcatgagggaccgcgtggaggacacgctttctgctcatcgtaacgagctcgttgctcttctctccaggtacgtggcgcagggaaaaggaatactgcaaccgcatactttgatcgatgaactggaaaatgttgtaggcgacgacaaagctagagagaagctaagtgatggtccctttagcgaagtccttaaatctgcacaggaggccataattctgcctccatacgtggctatagcagttcgcccaagacctggtgtttgggaatacgtacgagtcaatgttcacgaactcagcgtggagcaactggatgtgtccgaatatcttcgcttcaaagaagcacttgcagatgtgggggaggacaaccatttggtgcttgaccttgattttgagccattcaatgcatcctttcctcggcccaaccgcttcttcatccattggcaatggcgtccaattcctcaaccgtcacctttcttcaaacatgttccgtaacaaagattctttggagcctttacttaattt

SEQ ID NO: 190005 - DNA, 1211 bp, Gossypium hirsutum
tagatcgcgggcggccgctcgcgatctagaaataataacaataattctctttctgtttctctggtttaaacatgggtatgggtttaaggaatggatttcttttgattttatcttgtgttgttacactttccctctcagttttggggcgacctgccactttccttgaagattttagaatcacttggtctgattctcatattaggcaaatcgatggagggagagccatccaacttgttctcgaccaaaattcaggctgtggatttgcttctaaaaggcagtatttgttcggacgtgtcagcatgaaaatcaagctcatccccggcgactccgccggaacagtcaccgccttttatatgaattctgttacagatgctgtgcgagatgagctagacttcgagttcttgggaaaccgtaccgggcagccatatacggttcaaaccaatatctatgcccatggaaagggtgacagggaacaaagggttaacctttggttcgatcctgctgcagatttccatacttactcaatcatgtggaaccatcatcagattgtgttctatattgatgaagtgccaattagggtttataagaacaatgaagctagaaatatcccatacccaaaactccagccaatgggagtttattcaacgctgtgggaggctgatgattgggcaacaaggggaggtttagagaaaattgattggaccaaagctccgttcttagcttattacaaggacttcgacattgaaggatgtccggttccagggccagtaaactgtgccacaaacagtaggaactggtgggagggcactgcttatcaagcccttaatgccatggaagctaaaagatataggtgggttcgtatgaaccacgtgatatacgattactgcaccgacaagtcccgttacccggttaccccaccggagtgcatgtccatcatctgaaaatccaaacccaagtgacgtttcgtgtcctattttacgtacatatgtacctccctttatacaaataatagagccatgcaaaaattgggttttaattgtaaagggaaaaataagtgtgcattgcatataattgtgaaagtaaaaagtcaattcctatttgtctgtatttggtgcattctgttttgtgccaataaaagctttcttcaaaagatgtaatttattaatttttaacttttagttctcaattaaaaaaaaaaaaaaaaaaaattc

SEQ ID NO: 190006 - DNA, 1660 bp, Gossypium hirsutum
cttcaacactccgtctaagggagagaatccacaagcaaaggcaatagaaaatggcagaaaacgaagacattcagcctcttgtttgtgacaatgggactggaatggtcaaggctggatttgctggagatgatgctccaagagctgtattccctagcattgttggtcgccccgtcacactggtgtgatggttgggatgggccagaaggatgcttatgtgggagatgaagctcaatcgaaaagaggtattttactttgaaatacccaattgagcatggtattgtgagcaactgggatgatatggaaaagatctggcatcatacattctacaatgagcttcgtgttgctcctgaggagcaccctgttcttctcacggaagcacctctcaaccccaaggccaatagagaaaagatgactcagatcatgtttgagaccttcaatgtacctgctatgtatgttgccatccaggctgttctctctttgtatgccagtggtcgtacaacaggtattgtgctggattctggtgatggtgtttctcacactgtgccaatctatgaaggatatgcccttccacatgccatcctccgtcttgaccttgctggtcgtgatctaaccgatgccttgatgaagattcttaccgagagaggttacatgttcaccaccactgctgaacgggaaattgtccgtgacatgaaggagaagcttgcttatgttgccctggactatgagcaggaactggagactgccaagagcagctcatctgttgagaagaactatgagttgcctgacggacaagtcattactattggagctgagagattccgttgcccggaagtcctcttccagccatctttcattgggatggaagctgctggaatccatgaaactacctacaactctatcatgaagtgtgatgtggatatcaggaaggatctctacggtaacattgtgctcagtgggggttcaaccatgttccctggtattgcagaccgcatgagcaaggagatcactgctcttgctccaagcagcatgaagattaaggtcgttgcaccaccagagagaaagtacagtgtctggattggaggatctatcttggcatcactcagcaccttccagcagatgtggatttccaagggtgagtatgatgaatccggtccatccattgtccacaggaagtgcttctaagttttgtaattgcttttgatggtgatctacattttgcatttagttggctttttttgtgtgcggtgtcaagtgaactccaaagtctggtttatgtgggggaagttagggatcattgtaggatggtgtacttgatattgacgtattattattttagcctttcaccgtatcaccaccattaagatgatgggtcctatggagatggcggtgggcggacaattggtgcttaattccttccttacaatccatctttgaaccatgttgctgcttaaaaggatgtttggagctggagactggattgtggtgcttttttattttattttatttaatttaatattcaagggttttgagaacattaatgttaatagctattattgtacgagatttttttttaaaaattagtgtcagtttgcggtcaaacttctatggaacttatatttaatacctggttttggaatattgtgtatccttttatgctttg

SEQ ID NO: 190007 - DNA, 1497 bp, Gossypium hirsutum
ctaaagaatcgttctctccataaaaatttgaaaggccagtattgattcccattccctttaaatatttgatttttggcgtttctttcacatcattcccttgtctttcgaaatatttcctcgctctctcttttatcctcactttctcagccatcaaagacacccttttcttttcttaaggttgtaaaagatggcagatggtgaggatattcagccacttgtttgcgacaatggaactggaatggtgaaggccggatttgccggtgacgatgctccgagagccgtgttccctagcattgttggccggcctcgtcacaccggtgtgatggttggtatgggccaaaaagatgcatatgttggtgatgaggctcaatctaaaagaggtattttgacattgaaatacccaattgagcacggtattgtgaacaattgggatgatatggaaaagatttggcatcatacattttacaacgagcttcgtgttgccccggaagagcacccggttttacttaccgaagctccccttaacccgaaagctaaccgtgagaagatgactcaaatcatgttcgagaccttcaatgtcccctgctatgtatgttgccatccaggctgttctctcatttatgccagtggtcgtacaaccggtattgtgatggactcgggtgatggtgtcagccacacagtgcctatttacgagggttatgccctcccacatgccattcttcgtcttgacttggctggtcgagacctcactgattacttgatgaaaattctgactgagcgtggatattccttcaccaccacagccgaacgggaaattgtgagagatgttaaggaaaagctgtcttacattgcccttgactatgaacaggagctagagacctcaaaaacaagttcatcagtagagaagagctatgagttacctgatggtcaggttattaccattggtgctgaacgtttcagatgccccgaagtgcttttccaaccatccttgattggtatggaagctgcaggcatccatgagactacatacaattcaataatgaagtgtgatgtggatatcaggaaggacttgtatggtaacattgtccttagtggtggtacaaccatgttcccgggtattgcggacagaatgagcaaggagctttctgcactcgctcctagcagcatgaagatcaaggttgtcgctccacctgagccaaagtacagtgtctggatcggaggctccatctcggctcccccccatcaccttccagcagatgtggacttcccagggtgagtatgatgagtccggtccctccattgtccacacgatatgctcccaaatttacgactcactctatggtgagttacctttcctgtccactcgggcttttcctgtcctgtgtcacttcacccactggtccggttgattctggaaatgcaccattgacggagggttcttctttcgaccttgacttcctactacccttcccctctgccctgaatcgtgaagccccc

SEQ ID NO: 190008 - DNA, 964 bp, Gossypium hirsutum
  unsure (1)..(964): unsure at all n locations
ttcagatgcataagtgcctgttatctttcacttctaacacattgcatttacgcctccagcagctgcaccacggcagaaggagcagagggaaaaaggataaaagcatcgtcgtgttctcgcttcttcaactctgtctctacgtctctgaacctcctcctttcgttcttttcttattcagtattgtaaaagatggccgatgctgaggatattcaacccctcgtctgtgacaatggaactggaatggtgaaggctggttttgctggtgatgatgctcccagggctgtttttcccagtattgttggtcgaccccgacacactggtgtcatggttgggatgggtcagaaggatgcctatgtaggagatgaagcacaatccaaaagaggtattcttactttgaaatatcccattgagcatgggattgtcagcaactgggatgatatggaaaagatctggcatcatacattctacaatgagctccgtgttgctcctgaggagcaccctgtgcttctcacggaagcacctctcaaccccaaggccaatagagaaaaaatgactcaaatcatgtttgagaccttcaatggtaccctgctatgctatgttgccatccaagccggttctctccttggtatgcccaggggccgtcaaccggtacttggtttggacttggattggtggtgagccccacagtccctatctatgaaggctatgctcttccaatgcatnttggcgtctcactactgngccnnngatctcactgatgctctatgannatatagngagccctgggtatttctttcacaactacngctgacgggnaaatgggagnaacatgaagggagaactagcttacatngctcttgactagaccaagagntgaagacagcaaaaccanctttgcgntgagaaaagctatgagctacctgatggacaggtattacaatgnggctgaaccgattcgtgtcaa

SEQ ID NO: 190009 - DNA, 1199 bp, Gossypium hirsutum
  unsure (1)..(1199): unsure at all n locations
cccacgcgtccgcccacgcgtccggaaaactaaacgccaggctctaaacgcgggtagcagttgaagaaaataacctcaaataacgtgaaatctcttaacacaaaatttttttttgaagattgtagaagatggctgagggtgaggatattcaaccccttgtctgcgataatggaactggaatggtgaaggctggatttgctggtgacgatgctcctagggcagtgtttcctagcattgtcggtcgtccacgtcatactggggtaatggttggtatgggacagaaagatgcgtatgtaggcgacgaggctcaatcgaaacgtggtattttaactctaaagtacccaatcgaacatggcattgtcaataattgggatgacatggagaaaatttggcatcatacgttttacaatgaactacgtgttgctccggaagagcatcctattctcctcactgaagcccctcttaacccgaaggccaatcgtgagaagatgacccaaatcatgtttgaaaccttcaacgtctcctgctatgtatgttgccattcaggctgttctttccctttatgccagtggtcgaacaacaggtattgtcttggactctggtgatggtgtgagccatactgtgccaatttatgaaggctatgccctcccccatgctattcttcgtttggaccttgctggacgtgatcttacagattccttgatgaagatcttgactgagagagggtactctttcacaacaactgcggagcgagaaattgttcgtgatatgaaagaaaaacttgtntacgttgctcttgattttgagcaagaattggagactgccnagagtagctctgccatcgaaaagagttatgaattgcctgatggcanngtgatcacaatagggcgggaaggtncccgttgccaaaaagtactcttncagccatctctgattggaatggaagctgctggaatccatganactacttacaactccatcatgaagtgtgatgttgatattaggaaggatctttacggaaactttgtgctagtggtggatcgacatgttcctggcatgctgatagatgacaggaatcactgacttgccctacagcatgagatcaagtgtgcactncgagagaaatcanggtggattgagacatttacattttagacttccacagagtgttcaaagcagttatgatcagccccttcgtg

SEQ ID NO: 190010 - DNA, 683 bp, Gossypium hirsutum
tccctttcgtccgcccacgcgtccgcccacgcgtccgcccacgcctccgcgagacgcgtgggaggttccgttgtccagaagtacctcttccagccatctctgattggaatggaagctgctggaatccatgaaactacttacaactccatcatgaagtgtgatgttgatattaggaaggatctttacggaaacattgtgcttagtggtggatcgaccatgttccctggcattgctgataggatgagcaaggaaatcactgcacttgcccctagcagcatgaagatcaaggtggttgcacctcccgagagaaaatacagtgtctggattggaggatccattttagcatctcttagcaccttccagcagatgtggatttccaagggcgagtatgatgaatcaggcccagctatcgttcaccggaagtgcttctaatttgaatgtatcggaagcctacatttttcagtcatctgtctgtgtgagttcagtttgttggacatctgaagctttggtttttatcaatggacgaaagtctatggtatatacagtctgtctctcattagatttcaggttttagattccaaaagtacttttggcatggagtggcttgtatggatttcgaacttgagagttgctttggtctttattatctttgtaatacggccaagaaatttcatctctggata

SEQ ID NO: 190011 - DNA, 843 bp, Gossypium hirsutum
  unsure (1)..(843): unsure at all n locations
gacccagcgtccggatggtcngtttttaccaccggtttgaacgncacagatgccccgaaatgcccgcccatttatacaagagtggggtggaagctgctggcatccatgaaactacctacaactctatcatgaagtgtgatgtggatatcaggaaggatctcgtacggtaacattgtcctcagtggtggttacaaccatgttccctgggatattgcggaccgtatgagcaaggagctctctgctctccctccctagcagcatgaagatcaaggttgcggcaccaccagagagaaagtacagtgtctggatcggaggatctatcttggcatcactcagcaccttccagcagatgtggatttccaagggtgagtatgatgagtcgggtccatccattgtccacaggaagtgcttctaaatttacaagtcatttaatggtgagttacattttctgttagttggcttttcgtgtcgtgtgtcaagtgaactcaaggtcgggttgatgtgggaaatggattattgaaagagggttgtactttgatcttgatgtaatattagcctttcattctgctgtgatttgtgatgcccgctggtgtcactgtgatagagatgatgggtctttggagctggtggtcggcagacagatgggtgcttatttccatcctttccatgcatctttcaaccatgttgctgagtagaatgtagctggagagattgagtcgctttattatactatttttcttcacatgaaaagcttccaccccctgctgataaacatgaacgcagttcgctattgtacaagaaattttaaataacgaagggaatcttgtttattactgggttttg

SEQ ID NO: 190012 - DNA, 842 bp, Gossypium hirsutum
cccacgcgtccgcccacgcgtccgaaaaaacactctggttgtggagatggcacaggcaatggcatcaatggctggtttacgtggctcttcacaggctgtcctggacggcagccttcaactcagtggccaaacccgcttcaacattcctagcaacaaccgagtggctgtgggtaggtctggtttcactgtcagagctcatcagacaccggccgagcctgagactggacgcagagccatgttgggtcttgttgctgctggtttggccactggctcctttgttcaagctgtgcttgccgatgccagaagcatcaaggttggcccacctccccctccctctggtggactgcctggaactctgaactctgatgagccaagagaccttgttctgccatacaaagacaggttcttcctccaaccagttactccagctcaggcagcacagagagcaaaggaatcagccaaggacattctgggtgtcaagaacttgattgacaaaaaagcctggccttatgtcatgaatgatctccgtctcaaggccgagtatctccgctatgacctcaacaccgtcattgctgccaagtccaaagatgagaagaaaactctaaaggacctcaccaagaagctcttcagtaccatcgatgatcttgaccatgcagccaagatcaaaagcacccctgaagcagagaaatcttacgctcagaccatatctagtctgaatgatgttcttgccaaactgtgctaaaagaatgcttaattgtattttgatgtaagatagctttggtcatcgtttgtagacacactttcatttttatgctatctgaaagaacctttaccacttaacg

SEQ ID NO: 190013 - DNA, 553 bp, Gossypium hirsutum
ctccagcagctgcaccacaactacagagaagagagtaaaggggaaaaaaagcgtcgtcgtttttgcttcttcttctacttcgctctctctccttctccgaagttcctctttcgttctttcatttattcagtattgtaaaagatggccgacggtgaggatattcaacccctcgtctgtgataatggaactggaatggtgaaggctggttttgctggtgatgatgctccaagggcagtttttcccagtattgttggtcgtccccggcacactggtgttatggttgggatgggtcagaaggatgcctatgtaggagatgaagcacaatctaaaagaggtatccttactttgaaatatcctattgagcatggtattgtgagcaactgggatgatatggaaaagatctggcatcatacattctacaatgaactccgtgttgctcctgaagagcaccctgtgcttcttactgaagcacctctcaatcctaaggccaacacggagaaaatgacgcaaataatgcttgaaacgtttaatggtcctgccatgtatgttgcaa

SEQ ID NO: 190014 - DNA, 536 bp, Gossypium hirsutum
aataatcggaccaaacattataaaaaaatataatcccacatttggatacttacctcatttttgcaagacatttgggttgcaatggcacaagcaatggcatcgatgactggtttacgtggctcttcacaagctgtgttggaaggtagtctccaactcagcggccaaacccggttgaacgttgctagcaccaacagggtggctgtggctagacctggttttaccgttagagctcaacaggtccctgccgagcctgaaactggacgcagagctgtgctgggtcttgttgctgctggtttggctactggctcctttgttcaagctgtgcttgctgatgcacgaagcatcaaggttggcccgccttcaccaccctccggtggattgcccggaactttgaattccgatgagccaagagaccttgatctggcgtacaaagatcggtttttcctccaaccattgactccggcacaagcggctcagagggcaaaggaatcagccaaagacatccttggtggcaagaccttgatcgacaaaaagca

SEQ ID NO: 190015 - DNA, 468 bp, Gossypium hirsutum
cccccaaagaaccggttcctcaatctctctaatcctcactttcttccccatcaaacacaccttcgattttcccaaggttgtagaagatggcagaaggtgaggatattcagccacttgtttgtgacaatggaactggaatggttaaggctggatttgctggggatgatgctccccgagccgtattccctagcatcgttggtcggccacgtcacaccggtgtgatggttggcatgggccagaaagatgcatatgttggtgatgaagctcaatcaaagagaggtattttgactttgaaataccctattgagcatggtattgtgagcaactgggatgatatggaaaagatttggcatcataccttttataatgagcttcgtgttgccccggaagagcacccagttctccttactgaggctcctcttaacccaaaagctaatcgggagaaaatgacccaaattatgttcgaga

SEQ ID NO: 190016 - DNA, 471 bp, Gossypium hirsutum
cccacgcgtccgttcagtttcagcgtctctgtcaacaacaagttgttttttattttcttcctattttttttttttttgcttaaacaaggttaacaagagatggcggatgaggatattcaacctcttgtgtgtgacaatggaactggaatggtcaaggctggttttgctggtgatgatgcccctagggcagtcttccctagtattgtcggtcgtccacgccacacaggtgtcatggttgggatgggtcaaaaggatgcttatgtaggtgatgaagcccagtcaaagagaggtatcctcactttaaagtaccctatcgaacatggcattgtcagcaattgggatgacatggagaagatttggcaccatactttctacaatgagcttcgtgttgcccctgaagagcatccagtacttcttacagaagcaccactcaaccctaaggcgaatagggagaagatgacccagattatg

SEQ ID NO: 190017 - DNA, 722 bp, Gossypium hirsutum
  unsure (1)..(722): unsure at all n locations
ctaatttgagatccaatttaacggacctagtgaagcctgaaccggtttccttttcccatttctcgttttcggcggatctttaaaccctaacaagaaccaggcttctcttcaatcagaggaaaatcatacaaggttctaatggctgccaacaccaccccagctggaatagacaaagagcaggccttcggcatggcggaaacggagatggaatatagggtaaaactcttcaacaggcttggacaaacatgtttcaacaagtgtgttgacaaaaggtacaaggagtctgagctaaacatgggtgaaaatagttgcattgatcgctgtgtttcaaagtattggcaggtgaatagcatgattgggcaaatgctgagtgctggaggtaggcctccaatgtaagatgcggccatcttcgattctcaattctgatttacatgtaaaagccatggctttgtcttgctggttgcctgagaatgtggagactgaaattcagcttacaacatgtctttaatgtgttatgaaatcacattttgttctgataattgtagcagttttgtattacttactactatacaataaggattttggtgttgaagagcttcttggttactggttaaattttttaaagaggaattgccatttgaattcatnnnnnnnnnnnnnnnnnnnnnnnnnnnnnnnnnnnnnnnnnnnnnnnnnnnnnnnnnnnnnnnnnnnnnnnnnnn

SEQ ID NO: 190018 - DNA, 443 bp, Gossypium hirsutum
gcgttcggccaagccttcggccaacccgtccgctgggtcagggctctaatggctgccaacaacatgccggctggaatagacaaagagcaggcctttggcatggcggaaacagagatggaatatagggtagaactttttaacaggcttgcacaaacatgtttcaacaagtgtgttgacaaaaggtacaaggaatctgagctaaacatgggggaaaacagttgcattgatcgctgcgtttctaagtattggcaggtgaatagcatgatcggtcagatgctcagctgctggtggtcggcctccgatgtaaaacacagtcattgtcatcctcccatcttgaattcgtttaaaatgtaaaacaaggctaagtcctgcaattgacattagcaatttatctttggttgggacagctaatcaaaacctcttataaaccaagctttcatcca

SEQ ID NO: 190019 - DNA, 586 bp, Gossypium hirsutum
  unsure (1)..(586): unsure at all n locations
ggctacattttgcatttagttggctttttttggtgtgccgtgttaagtgaactcaaaagtctggtttatgtcggngaagttagggatcattgtacgatggtctacttgatattaatgtactattattttagcctttcaccgtatcgccaccattaagatgacgggccctatggggctggcggtgggcggacaattggtgcttaattccctacttgcttaccttccatctttgaaccatgttctgcttaagtggatgtttggagctggagaactggattgtgctgcttgcttattatttatttaatattcaagggttttgagaacattaatgttaatagctattattgtacgagattttttcaaaaaaacgttagtgccagtttgcgcggtcaaacttctgggaaaattatattcaatgaaatcatattgtgaatcctttttgttaaaagcattgatcgctgcgtttctaagtattggcaggtgaatagcatgattggtcagatgctcaatgctggtggtcggtcttcgattgtaatcagagtcattgtcattcttcttccatcttgaattcgttaaaatgttaaac

SEQ ID NO: 190020 - DNA, 462 bp, Gossypium hirsutum
cggttgccccacggggaagagggaaaacctggaaagggggatataacgcgtcggcgctttcgcttcttcttctgctttttcttcttccctctctctctttctcagaagctcctctttcgttcttttgttcagctcaggtattgtaaaagatggccgacggtgaggatattcaacccctcgtctgtgataatggaactggaatggtgaaggccggttttgctggtgatgatgctccaagggcagtctttcccagtatcgttggtcggccccgacacacaggtgtcatggtggggatgggtcagaaggatgcctatgtaggagatgaagctcaatctaaaagaggtatccttaccttgaaataccctattgaacatggtattgtcagcaactgggatgacatggaaaagatctggcatcacactttctacaatgaacttcgtgttgctcctgaagaacaccctg

SEQ ID NO: 190021 - DNA, 712 bp, Gossypium hirsutum
  unsure (1)..(712): unsure at all n locations
cccacgcgtccggagagatgttaaggaaaatctgtcttacattgcccttgactatgaacaggagctagaggcctccaactcttgttcatcagtggagagcaatgtaagctatgagctacctgatggtcaggttattaccattggggctgaacgtttccgttgccccgaagtcctcttccagccatccttgatcgggatggaagctgctggcatccatgagacgacatacaactcaatcatgaagtgtgatgtggatatcaggaaggactctatggtaacattgtcctcagtggtggtacaactatgttcccgggtatcgctgacagaatgagcaaggagatcactgcccttgcccctaagcagcatgaagattaaggtgggttgcaccaccagagaggaagtacagtgtctggattggaggctccatcttggcatcccccgagcaccttccagcagatgtggatttcccaaggccgagtacgacgagtccgggccatccattgtccacaggaagtgcttctaagttttataagttctttgatggtgagttacatttgcatttacttggctttatcgtgacctgtgtcaaaattgaaatcaaggtccggattacatggagaaagtgttgaacgagggatcactgaaggaggatgtactttgatcttgatgtactattatggctntcatttgcttccacaaccattgagatgat

SEQ ID NO: 190022 - DNA, 461 bp, Gossypium hirsutum
  unsure (1)..(461): unsure at all n locations
cccacgcgtccgcccacgcgtccggcggacagaatgagcaaggagctttctgcactcgctcctagcagcatgaagatcaaggttgtcgctccacctgagcgaaagtacagtgtctggatcggaggctcgatcttggcttccctcagcaccttccaacaaatgtggatcgcaaaggctgagtatgatgaatcaggtccagcgatcgtccacaggaaatgcttctaaaatgcccataccatgaaagagagaagtactgtttcattgtttcttgatgcagcttggaactttgctttgttctaatggatttgttatccttctgtgtgttttcatgttggagtgaaacaatgaactttgagaaagccagtgatttgatttttgttccaattctttgaatctcagacaactttttctgatctttntactataatttccatcgcatactgtctccactatgttacatg

SEQ ID NO: 190023 - DNA, 690 bp, Gossypium hirsutum
cgaccacgcgtccgcccagcgtccgaaggaatcactgcactggcccttagcagcatgaagatcaaggtggttgcacttcccgagagaaaatacagtgtctggattggaggatccattttagcatctcttagcaccttccagcagatgtggatttccaagggcgagtatgatgaatcaggcccagctatcgttcaccggagtgctttaattgaatgtatcgaagccacattttcagcattgctggtagtcagtgtgacattagcttgtttataatgagaagtatggttcagctgttataattagttaatcaatcttgctgtgtgagatactaatgtgcttattggtgcatcttgattgtacatgatctagcctttcattctgctgtgatttgtgatgcccgctggtgtcactgtgatagagatgatgggtctttggagctggtggtcggcagacagtgggtgcttatttccatcctttccatgcatctttcaaccatgttgctgaatagaatgtagctggagagattgtgttgcttctttattctatttttcttcaatttcatattcaaggctaccccctcccctcttcaaacattaatgtcaatagctattgtacgagaaattttaaaattcgatgggaattatatttaatacttggttttgaattcttaatgtgaatcatttttatctg

SEQ ID NO: 190024 - DNA, 716 bp, Gossypium hirsutum
tggagatggcacaagcaatggcatcaatggctggtttacgtggctcttcacaggctgtcctggacggcagccttcaactcagtggccaaacccgcttcaacattcctagcaacaaccgagtggctgtgggtaggtctggtttcactgtcagagctcatcagacaccggccgagcctgagactggacgcagagccatgttgggtcttgttgctgctggtttggccactggctcctttgttcaagctgtgcttgccgatgccagaagcatcaaggttggcccacctccccctccctctggtggactgcctggaactctgaactctgatgagccaagagaccttgttctgccacttcatagacgggctccttcctaccgaccacttactgtccagctcatggattggatcgaccatgactcaatgaggttgctgataggatgagcagggaaatcactgtactacccaatatcagtatgcagattagggaggaacaacatccagagagaatatacatggtgtgattgggaggatccattttagcatctcttagcaccttccagccgatgtggatttccaagggcgagtatgatgaatcaggcccagctatcgatcaccggaagtgcttataattcgaatgtatcggaagcctacatttatgagccatctgtctgtgagagttcagtttgttcgacatctgaagctttggtttttatgaat

SEQ ID NO: 190025 - DNA, 496 bp, Gossypium hirsutum
  unsure (1)..(496): unsure at all n locations
ttgctcttgctccaagcagcatgaaaatcaaggtggtggcacccccaaagagaaagtacagggtctggattggaggacctatcttggcatcactcagcaccttccagcagatgtggatttccaagggtgagtatgatgagtccggtccatccattgtccacaggaagtgcttctaaatttacaagtcatttattgagatgatgggtctttggagctggtgggcggcagacaaatgggggcttatttccatccttcccatgcatctttcaaccatgttgctgagtagaatgtagctggagagattgtgttgcttctttattctatttttcttcaaattcaaggctcccccccccccaccgcaaacattaatgtcaatagctattgtacgagaaattttaaaattcgatgggaattatattttatacttggttttgnnnnnnnnnnnnnnnnnnnnnnnnnnnnnnnnnnnnnnnnnnnnnnnnnnnnnnnnnnnnnn

SEQ ID NO: 190026 - DNA, 331 bp, Gossypium hirsutum
gatgagcaaggaaattaaagcattagccccaagcagcatgaagattaaagtggttgcaccaccagagaggaagtatagtgtttggataggaggctccattttggcatccctcagcaccttccagcagatgtggatttcaaaggcagagtacgacgagtctgggccatcaattgtgcacaggaaatgcttctagagaagagctatacatacagtacacgttttgtatcacagcaaagcttataaatcaagtgggtgctttcttttcttttctgctccgttaatttatttcccccccttttctttttttctttttttttttttgccctctttg

SEQ ID NO: 190027 - DNA, 1223 bp, Gossypium hirsutum
  unsure (1)..(1223): unsure at all n locations
atctgggtatcgggcccccctcaaggtctatggtatcnatacgcttgatatctaattcgcggtcgcgtctaggtcagccaattgtttgagctagctagctcttactcaaatggcaaccaaaacgatgatgttgcaaatattttcacttttcttctttttgttcagtatctgcaactccattttccttggtgctaatggagatgacaatggtggttggcaaactgcccatgccaccttctacggtggtgctgatgctaccggcacaatggggggagcttgtggttatggaaacctgtacagtcaagggtatggaacgagcacagcagctttgagcactgcacttttcaacaatggcttgagctgcggtgcctgctacgagctccggtgcaacaatgatcctcaatggtgcattagtcgaaccataaccgtgacagccaccaacttttgtccccctaactatgctttatctagtgacaatggcgggtggtgcaatcccccacgagaacactttgatttggccgaaccggcattcttgcggatagcagaatatcgagctggaatcgtccctgttatgttcagaagggtgtcatgtgtgaagaaaggaggcatcaggtacaccatgaatggacattcgtacttcaacatggtgttgataaccaacgtgggaggggcaggggatataacgtcagtgtccatcaagggttccaaaacaggatggctacctatgtccagaaattggggccaaaactggcagagcaatgcttaccttaacggccaaagcctctctttcaaagtgactgccagcgatagcaggactatcacaaactacaatgtagtgcccgctggttggcaattcggacaaacttttgaaggaggccagttttaagacaatattatagtgtccgtctaatattaaaactggaattgacatattacttatataaggcacatgagcgttttatgccgaggtagcaaagtggcgcccgctggctttatgtgtgaaataggcgagcaagtgccattagcctataatatacacatttcctatagtgaaccaaactattaagtttgaactctagaggtgatatccataatgtctgaaatttgtttgttgatgattgaccatgatatttatggttttcattattgaaatacctttttttataatttataaaaaaaaaaaaaaaaaaaattctgccgccgccacccgcggtggaatctca

SEQ ID NO: 190028 - DNA, 928 bp, Gossypium hirsutum
tttttggtaagcagtaactggcacatgcattatgaacaatgacttggttacggtgccgagctacgagctcaggtgcaggaatgatcctcaatggtgaattagtcgaaccataaccgtgacagacaccaactattgtacacctaactatgctttatctagtgacaatggcgggtggtgcaatcccacacaagaacactttgatttggccgaaccggcattcttgccgatagcataatattgagctggaatcttacctgatatgtatacaacggtgttatgtgttaagaaaggaagcatcaagtacaccatgaatggacattcatacttaaacatggtgttgataacgaacgtgggaggggcaggggatataacgtcagtgtccatcaagggttccaaaacaggatggctacctatgtccagaaattggggccaaaactggcagagcaatgcttaccttaacggccaaagcctctctttcaaagtgactgccagcgatagcaggactatcacaaactacaatgtagtgcccgctggttggcaattcggacaaacttttgaaggaggccagttttaagacaatattatagtgtccgtctaatattaaaactggaattgacatattacttatataaggcacatgagcgttttatgccgaggtagcaaagtggcgcccgctggctttatgtgtgaaataggcgagcaagtgccattagcctataatatacacatttcctatagtgaaccaaactattaagtttgaactctagaggtgatatccataatgtctgaaatttgattgttgatgattgaccatgatatttatggttttcattattgaaatacttttttattataatttataaataatgagtcatttctttttacaaaaaaaaaaaaaaacaatcggaacagaaaaaaaacttgaggg

SEQ ID NO: 190029 - DNA, 800 bp, Gossypium hirsutum
  unsure (1)..(800): unsure at all n locations
attttctgggtttttaatctcagcaatggtgtttttaactcaactcctctctctaacagatggccgtgatattggtgtttgctatggtttgaacggcaacaatcttccatctccaggagatgttattaatctttacaaaactagtggcataaacaatatcaggctctaccagccttaccctgaagtgctcgaagcagcaaggggatcgggaatatccctctcgatgggtccgagaaacgaggacatacaaagcctcgcaaaagatcaaagtgcagccgatgcatgggttaacaccaacatcgtcccttataaggacgatgttcagttcaagttgatcactattgggaatgaagccatttcaggacaatcaagctcttacattcctgatgccatgaacaacataatgaactcgctcgccttatttgggttaggcacgacgaaggttacgaccgtggtcccgatgaatgccctaagtacctcgtaccctccttcagacggcgcttttggaagcgatataacatcgatcatgactagtatcatggccattctggctgtacaggattcgcccctcctgatcaatgtgtacccttattttgcctatgcctcagaccccactcatatttccctcgattacgccttgttcacctcgaccgcaccggtggtggtcgaccaaggcttggaatactacaacctctttgacggcatggtcgatgctttcaatgccgncctagataagatcggcttcggccaaattactctcattgtagccgaaactggatggccgaccgncggtaacgagc

SEQ ID NO: 190030 - DNA, 358 bp, Gossypium hirsutum
attagtagtaattctctgagtgttattttgttcagacaacatccaacaagtttgaagtggcaactgtcaagcccagaaaattctcggaaaattctagtacttgccgttttgaagcagtggaggagaaacttaatgagttgctggattctgaggggggacatttttcatggtcaatctgttctctgtaatgggtggttcctgggtcccaactcccaagcaggtcgcttaaatttagtgtttctgcttgtatgtttttattagaagaggcagtttgcatgttgtcttttacaagtaataataataaatcatagtgcatttgttttaaaaaaaagtttattttttaaaatatttaaaaata

SEQ ID NO: 190031 - DNA, 363 bp, Gossypium hirsutum
cccacgcgtccgtgctttttcttagttttcctttttgtcccttgtttatttgatatttccccctcatggccgccgctgatgtcgagttccggtgcttcgtcagagggctcgcatgggccaccgacgaccgggccctcgaagaagccttcagtgcgtttggtgaaatcgtcgaatcgaaggtccgtttgttgcaggtatcggactccagatctgacttgatccgacccgatctgggcgcccctgtcatatgatctgtgatccttgttctgttcttttgtgttacttgttacttgatactactctcttgttactattctcttttaaaactctcaccgatcattaatgatcgtgagactggaagat

SEQ ID NO: 190032 - DNA, 316 bp, Gossypium hirsutum
ttcgcgtccagcgcgagcttcgaaagggaatcgggttaaaattcctgaaccgggacgcggcggctgacggcaacgttagttccgttacgatacgtgcatgaagacacacaaattggagggtatcatataccatcaggaagtgagattgctgttaacatctatggttgtaacatggacaagaactattgggaaaaccccgaagaatggaacccggaaaggttcctcgacgagaaatacgacccattggatttgcaaaagacaatggcgttcggagctgggaaaagggcgtgtgccggttcacttcaagcaatgttgc

SEQ ID NO: 190033 - DNA, 479 bp, Gossypium hirsutum
cccacgcgtccgaaaactcattacatattcggctttctttctatatcccttgtctgtttatatttgagagcttgaattatggctttgaggaactttggcttcgattctccactctttacaatcctggaagacatgctggacatcccggaggagcgaagataagtcccgaaacaacccatctcgagcctatgttcgagatgcaaaggccatggctgccactccagctgacgtgatagagtacccaacatcttacgtcttcatcgtggacatgcccggcataaatcacggcgagatcaaggtgcaggttgaaaacgagaatgtgcttgtggtgagcggggagcgaaagcgtgagaaagagaaagatgagaaagaaggggtgaagtatgtgaggatggaaaggagagtgggcaagtttatgaggaagttcgcattgcctgagaatgcgaatatggataagatatctgcagtttgtcaagatg

SEQ ID NO: 190034 - DNA, 682 bp, Gossypium hirsutum
gaaaaaaagggcggtgagaccgtgagattagccagcaaaagcattgttccctctcccattctcaacgcaatcatcgccacccacttctcccatcctctcaatcccacaccccccaaaaggtctcagatctagattttttttttcaaaacctacccttcttccattccccctttcgcttccattctctctcagccctttccaatttccaaatatggccgccagtactccttcgtcccgcgaggaattcgtttacatggccaaactcgccgagcaagccgagcgctacgacgaaatggtcgagttcatggagaaagcctccgcttctgccgagagcgaggaactcagcgtcgaggaacggaacctcctctccgtcgcttacaagaatgtaatcggtgcacgccgtgcttcctggcggatcgtctcctccattgagcagaaagaggagagccgtggtaatgaggatcacgtcactctaatccgcgattatcgggccaagatcgagtctgagctctcctctatctgtggcggtattctgaagctgctcgactccaggcttatcccttcggctgctgctaaagactccaaggtcttttatcttaagatgaagggcgattatcataggtatttggctgagttcaagactggagccgaacggaaggaagctgctgagagtactctcact

SEQ ID NO: 190035 - DNA, 444 bp, Gossypium hirsutum
ccggaagccgggttacggtgcccaactgcgcgctaacctagaacccacaaagggtgttggacgattttgaggacagcagtgacgatgaagagcaagaagtgacgaagccatctgagcaagacatgaacaaggcagatggaaatgctaagcaggcggagcaaggtgcggggactatggaaaagaaggaaaccgatgtaagcacatgatgtgattgttagctgcccgatataacaacaaattctagtaaaaacctataattatcaaaagtgtgctgtttgtatgaactgattgagggcataattcaaggttctatggtgacaatttagaaatgagatattcatttcgtgttgggattattttagtacgatgattataacctaagcagacttggtaattccaatatcggtttcgtgtttgtgaaatttggtgtgtcataatcgtatt

SEQ ID NO: 190036 - DNA, 476 bp, Gossypium hirsutum
tgactgatgtgccttttggagttctgttatctggaggacttgattcatcattagttgcttccatcacagctcggtatttggctggtaccaaggctgccaaacaatggggaagccagctccattctttctgtgttggcctagagggttcaccagatttgaaggctgcaagagaggtggcagactatttgggcactgttcatcacgagtttcacttcaccgttcaagatggaattgatgccattgaagatgttatttaccacattgaaacctacgatgtcaccacaatcagagcaagtactcctatgtttctaatgtcacgaaagatcaagtcacttggtgtcaaaatggttatctccggtgaaggctccgacgagatttttggtggatatttgtatttccacaaagcaccaaataaggatgaattccatcaagaaacatgccggaagatcaaagcccttcacctgtatgattgcttg

SEQ ID NO: 190037 - DNA, 506 bp, Gossypium hirsutum
cggacgcgtgggttaatattagggtttcatcatactttaagaaagacagagagaagccggcacttctgaagagcagcggaagaagcaatggcgagaatcaaggtccatgagttgagacagaaatcaaaaactgagcttttggctcagttgaaagatctcaaagctgagctcgctcttcttcgtgttgccaaagttaccggtggtgcacctaacaagctttccaagataaaggtggtgaggttgtcaattgctcaggtgttgacagtgatctcacagaagcagaaggctgcactgagggaggcatataagaagaagaagttcttgccccttgatctccgtccaaagaagaccagagccatcaggagaaggcttaccaagcatcaggcatcgctgaagacagaacgtgaaaagaagaaggaaatgtacttccccatgaggaagtatgccattaaggtgtaggataagatatttgagattctattttgaaatccgtttgtgtttactta

SEQ ID NO: 190038 - DNA, 450 bp, Gossypium hirsutum
cccacgcgtccgaattttttcccttaacctttttgaaaaacataaaacatggtaaaggttcgtttagttgtgttctcattggctttggtgctctcaatccaattcgtagtgggacacgacgagaaggctttagatgaggcagcatccccggaagctgaagatgcaggtttaagttcaggggcagctaaacttgttgaaaactttaaaagctctgctggagatgattcccagagtgtggatgggccaacttctgacttagctgatgagattgcagcttctccagaatcagaagttgaagttgatactgaatctgtcgatgggccacattctggcttagctgatgagattgcagtttctccagaatcagaagcagaagttgctactgaatctgtcggcgggaggaagcgtaaaatggcatagtggaccgcgatgatgtttagaaagcaacat

SEQ ID NO: 190039 - DNA, 721 bp, Gossypium hirsutum
ctttatttatataaaggaaaacaatatttcttgcttagtccttctttgggttgtttttttctttggtttttcctcagatttctctcccgtttcttaaatttcatcgccttcttcttcttcttcttcttctttttatatctttctttccttcttgtttatatatagagagctgaaaccagttctgggtttgctttaaaccacaataaaaatggcttcttcactctcttttccatgccccaagatctcttcttttttgaaaacaaaccagcaaacccaagctcacaagggttctttgtctcttcctccaacttcaaatttcaactccaaatcttgcttgtcatttggatcttcaatccgcgtacctgcattttcagcatctcagtggcctaatgatgggaagcaaactacagtcttcgcaagccatacgcagcttaacgaggttgctgcagagaaatcatcaaattctgtagcggttgttgacatgaaacctaaagttgcattgcctgaggaagatgataaaagatccgcagagaaggctattccagatgctgcggcaatttcagaattcatggcacaagtttcagaccttgtaaaacttgttgattcacgagatattacggagctgcaactgaagcaatcggattgtgagcttgtcataagaaagaaggaaagcttgcagcagctggaatcagcatctccaattgtcatgcagcagtacatg

SEQ ID NO: 190040 - DNA, 644 bp, Gossypium hirsutum
cccagctcctaatcctgttgttgccaaaccaaagccggcgccaaaacccaaattcactccaacccctggtatattctttgcttctcttttaaatgatttccccataaacattgttggacctactcttaggaattaggacacaatctgctattgatgaaggaacatttggttctgtttctcattatagtagctattaaatttcaagatctgatagtgggggaattttttgtttatttggcagctacatcgtctaatccaattaccatagagcagatgatgacaactttctggtatgccaagggaaaaacctactactggtattccacaattgtgaccaacaaggcttacaagacactgaaggatctcaagctttctatatcaaagctttatggtcctctatggggtctctccaagtctggcaattcttatggtttcccaacatggctcaactctctacctgctggaaagagtattgagtttgtatacatccattctacttctcctgctgatgtctcgggtttcaagctacaatttggcttaagaatgaaaggaccaacaacaatgctatagcagagttaaaaatccactctgtttcctgggttattgtggtgcttagagttgtgcagtataccgaatacctatcc

SEQ ID NO: 190041 - DNA, 405 bp, Gossypium hirsutum
tcgatcagattagggttgagcagatatggccaagtcaaagaaccacaccgctcacaatcagtcttacaaggctcacaagaatggcatcaagaagcccaagaggcaacgccatacttccaccaaagggatggatccaaagtttttgaggaaccagaggtatgcaaggaagcacaacaagaagaatggggaatctgccgctgaggaagagtaaatttaaatggaaaagaaaattatcctttattaaagtttttctagttagggctgttttactatcttctatggaatttagtgttaaatttacgctcctttagtttttatattgttgttttatgggattgttgattatatttgttagaaaagatctgaagttgtgagcttattaatatcatgaacatgttttgagct

SEQ ID NO: 190042 - DNA, 657 bp, Gossypium hirsutum
cggaaatcctattagggttttagacctttttcaagattcgaaaggaataagcttcagcgtccaaatcgggaggaaatggtgaagggacgccaaggagagcgtgtcagactctatgtaagaagaaccaccttgggttacaagaggtcaaagtcgaaccagtacccaaatacttctttgatccagattgagggagttaacaccaaggaggaagtagcttggtatgcaggaaagcgcatggcttatatatacaaagctaaggtgaagaagaatggctcacactatcgctgcatttggggaaaggtcactagacctcatggtaacagtggtgttgtccgtgctaagttcaagtctaaccttcccccaaaatctatgggagatcgagtcagagtcttcatgtaccctagcaatatctaagcttgctcgatgccgaacggcttgtgattgactgggtggagtttcataatagccttttctgtgtgtttcgacaaacttattcaacatgttttgtgtttatttttggtttgcttaagatggtgtatgaaataagacaatcagcattttgtttacacatattttcttctctcaaggatttttacttaaatttgaagattttggataatcattcattttttgggaatctattgtcatctttggtct

SEQ ID NO: 190043 - DNA, 478 bp, Gossypium hirsutum
gcgaaatgagcatagctttaaatagaaaccaggaatctccacagacaaacttttgagtcttaagcacctcattgtgaagtaaacaaaaatgttctcattacagagacaacaaaaagaaaattgtaaaagcttccgactaacaatccatcactcagcagtttaaactgaagcaccctttgatttcctcggagccaactgagtctccggctcttttttgacggcttcctctttctcagacaggatcagttcaatgtgacacggtgaagacatgtaggggttaattcttccatgtgcacgatatgttcggcgcctttgcttctgtgcttggtttacttggatgtgagatacgataagtgaatctacatccaagcctttcacctcagcattgctctcggcattcctgagcaaatccagaatgaattttgctgatttcacaggccaacggccttgtccattagaatggcgattcttcggacgc

SEQ ID NO: 190044 - DNA, 506 bp, Gossypium hirsutum
ttaatttatttcttttgtttcttttccattcggaggacctagttagtgcctcagcttctctttactctgtaatggcgaagtcaaagaatcacacggctcacaaccaatcttacaaggctcacaagaatggaatccaagaaacccaagaggcaccgccacacttccaccaaagggatggatcctaagttcttgaggaaccaaaggtatgcaaggaaacacaacaagaagaatggagaatcagccaatgaagaagagtaggcttttagtggggtaaaagaaaattctagcctgggttagggttttctaattatggttgttttgtttgtttcaatggaaattaaggttttgtttttttcaacattagcactattttgatgattatctttgttataaaatatttgaagctctgagcttatcaatattgagaacatgtttcgagtttatctactgtttttttttcttttaaatgttaaaaagtaccaattcattgaattggcattggaaaa

SEQ ID NO: 190045 - DNA, 615 bp, Gossypium hirsutum
ctcactcgtccgcccacgcgtccgcccacgcgtccgcttttttccttaaccttttaaaaaacataaaagatggtcaaggttcctttcgttgtgttcttattggctttggtgctctcaatccaattcgtagtgggacaagatgaggaggctatagatgaggaagcatcccgagaagccgacgaggcacttttcagtacagggtcagctaaactcgttcaagactttaaaaactctgctggagattattcccagagtgtggatgggccaacttctggcttagctgatgagattgcagcttctccaaaatcggaagtaaaagttgctactgaatctgccggtgggatgaagcgtaaaatggcataatagaccccgatgatgtttagaaagaaacatcagacctaaagttttttaaagaggtggctaaagccgtaaaaaaataataaaaacaatgcaaaaaaaataaaagcaacatccatggtttttgtaaaatatgtcatgcagtaatatacttttaaaaataaaacaatttggtttaacatttgttcgcacatttttttgtcacttattttctcaataatatacacgttcccaatagatatatttagttttcatttt

SEQ ID NO: 190046 - DNA, 896 bp, Gossypium hirsutum
gtatctcctaaaactaaagcaattctttatctcaaccaaaaccttctcagcaagttgataaatccctggcaattcctcccttgctccgacattcaagatctatactttaaatcccctaagcttttctttcacctttgataactgtctgagtctctatcgaaatcccatcaaaactcaagatgaaggcaaaacagatgaacttgagtggctatcagaaaacctggattgattgctttatttgatgttgatggcactcttacagcttcaagaaaggcggctacacccaagatgtcggagcttatgaaggaactgtaaaaggttggtactgatggagaggtgggcggatctgatctaacttagatatctgagcaacttgggaaatcagtgattaatgactatgattatgtattttctgaaaatggacttgttgctcataaagatgggaaactcattggaacccagagtttgaagtcgtttctcggagaagataagctgaaggaatttttaaacttcacattgcattatattgctgacttggatatcccgataaaaagggggacattcattgaattccgaagtgggatgcttaatgtatctccgattggacgtaactgtagccaagaagaaagggatgaattcgaaaagtacgacaaggttcacaatattcgcctgaaaatggtgtctgtacttcgagaaaagtttgctcacctttaacttgacattttcaattggagggcaaataagctttgatgttttccccgagggctgggacaaaacatattgcttgagatatcttgaagagtttcaagaaatccacttctttggggacaaaacttacaagggaggtaacgatcatgaaatttatgaatcggagagaacagtaggacacacagtta

SEQ ID NO: 190047 - DNA, 719 bp, Gossypium hirsutum
gttcattttgtctttgcgccggtcttctatctcctcgactcacttcccagccaaaggtaagccatggttaagcataacaatgttattccaaatgggcactttaagaagcactggcagaactacgtgaaaacttggttcaaccagccagcaaggaaggctagaagaagaattgcaaggcaaaagaaagcagtaaggatctttccaagacctactgctgggcctcttcgctcctgctggccatggccagaccttgaagtacaacatgaagttgagagctggaaagggtttcactcttgaagagcttaaggcagctggtatttcaaagaaacttgcacccaccataggtattgctgttgatcaccgtcgtaaaaatagatctcttgaaggtcttcaagccaatgttcagaggcttaagacctacaagggccaaacttgttgtcttaccaagatgtgctcccaaaatttaaggctggtgattctactgtcgaagagcttgcaactgcaacccaagtacaaggatcatatatgcctatttctcgtgagaagccttcagttgatcttgtgaaggtcacagaggagatgaagtcattcaaggcttataacaagctccgtgtggaacgaatgaatgagcgccatattggtgccagattgaagaaggctgctgaggctgaaaaagaagataagaagtaacgttgtttgatgtgttctgggatttaact

SEQ ID NO: 190048 - DNA, 603 bp, Gossypium hirsutum
  unsure (1)..(603): unsure at all n locations
ctcaatttttcttgcgccgtcagtatccctcccagccaaaggtaagccatggttaaacataacaatgttgtgccaaatggccatttcaagaagcattggcagaactatgtgaaaacttggttcaatcagcctgcaaggaaggctagaagaagaattgcaaggcaaaagaaggccgtgaggatcttcccaaggccaactgctggacctctacgccctattgtccatggacagactttgaagtataacatgaagttgagagctggcaagggtttcacccttgaagagcttaaagctgcgggtatttcaaagaaacttgcacccaccatcggtatatcagttgatcaccgtcgtaagaaccgatctcttgaaggtcttcaagccaatgttcagaggcttaagacttacaaggccaaacttgttgtcttcccaagacgtgcacgcaagtctaaggctggtgattctactgcttgaagagcttgcaactgcaacccaaatgcaaggaccatacatgcctatttcccgtgagaagccttctgttgagctggtgaaggtcaccgangagatgaagtcattcaaggcctacaacaagcttcgtgtcgaacc

SEQ ID NO: 190049 - DNA, 786 bp, Gossypium hirsutum
attcataaaacatcccttcccgtcttcagccggaggtaagtcatggttaagcataacaacgttgtgccaaatgggcacttcaaaaagcactggcagaactatgtgaaaacctggttcaatcagccagcaagaaaggctagaagaaggattgcaaggcaaaagaaggcggtaaggatctttccaagaccaacttctggacctcttcgcccaatcgtccatggccaaactttgaagtacaacatgaagttgagagctggcaagggtttcactcttgaagagcttaaggctgctggtatttcaaagaaacttgcacctaccattggtattgcagtcgatcaccgtcgtaagaacaagtcccttgaaggtcttcaagccaatgttcagaggcttaaaacttacaaggccaaacttgttgtcttcccaagacgagctcgcaagtttaaggctggtgattcaattgctgaggagcttgcaactgcaacccaagtccagggatcatacatgcctatttctcgtgagaagccttccgtggagcttgtgaaggtcacagaggagatgaagtcattcaaggcctataacaagcttcgtgtggaacgtacaaatgaacgacacattggtgcccgattgaagaaagctgctgaggctgagaaggaagacaagaagtaaggttgctttctttgaggactatgttttggtatttgacttgttaaagacattagtttttgtttttggattgtcaggtgagtttaaagccagctttagttatcttttcatattttgttcaaa

SEQ ID NO: 190050 - DNA, 1238 bp, Gossypium hirsutum
tctggggttcagacccttgtcgccaagtttttaatgttaggtaaagctggtcaccatacaccagttttcgagaagtaccgtcagaaggcggagtacttcatgtgttcattgatcggaaagggtagccgtaatattcagaagactcccggtggtttgatttacagacagagatggaacaacatgcagttcgtgacaagcgcttcgttcttggcaaccgtctactctgattatctaacttcctataggggaagcttgaagtgtgctgctggcaatgttgcaccatcggagcttctttcttttgcgaaatctcaggtggattaccttcttggagacaatccaagagctacaagctatatggttggctacggaaacaattatccaagacaagttcaccaccgaggttcttcgattgtttccatcaaggttgactctaaattcatagcctgccgacaaggttatgcagcttggtatacaaggaaagcaagtgatcctaatgtcctcactggtgctgtggttggagggcccgacgcctatgataacttcgctgatgaaagggacaattatgaacaaaccgagccagctacctacaacaatgctcctcttcttggcatactagctaggctcgggagcggtcattctggttataaccagctgcttcccgaggctgtcccagttcctaaaccagtagctgctaaaccgaaggcagagccgaaagccaaatcgactccaaatcctgccacaacttctagtccaatttccatacggcaaaagatgacaacttcctggaatgacaaaggaagaacttattacagatattccatagtgatgaccaacaagtcttccaagacactaaaggatctaaagctgtctatatcaaagctttatggtccaatatggggtctcactaaatctgggaattcttatggtttcccagaatggctcaactctttacctgccggaaagagtcttgagtttgtatacatccatgctgcttctcctgctgatgtctctgtttcaagctacaatatagcttaataatggaagacattgcaaaaaaaataaagggtaagttccaacatggttctggggttgtggtgttagaatttgtgcagctatacagaatgcgtcaaagaaaaaggttttcctttttttttttcttcgctgtttggggattttcaactttacttgttgaatgggttatttaattaaggttctaccagatatttagtggaagattg

SEQ ID NO: 190051 - DNA, 535 bp, Gossypium hirsutum
tgaacccgtcggctgccggcgcactgctcgagctgctcccgcggcgagagcgggtcgccgcgtgccggccgggggacggactgggaacggctccctcgggggccttccccgggcgacgaacagtcgactcagaactggtacggacaaggggtgaacagaaatggcgaagtcaaagaaccacactgcccacaatcaatcttacaaggctcacaagaatggcatcaagaaacccaagaggcaccgccacacttccaccaaagggatggatcccaagttcttgaggaaccagaggtatgcaaggaagcacaacaagaagagcggtgagtctgctactgaagaagagtaaatttttaatggcaaaagatctagctttgattagtgttttccaattgttgtttttccccccggtggaattgagtgttcgtttactataatcaccttagtttgaaattgtattttgggattgttgaatctcattttcaaaagagaattgaagctgtgagcttattaatattaaagaacatgttttgagctt

SEQ ID NO: 190052 - DNA, 1322 bp, Gossypium hirsutum
gtttcttcttcttccatggcggatcctagcaactggtcaactgtatccgccgaagatgaggcgaagtatggcttcacgcgcgaggagatgtactcgagtaacctcgctggcaccgtcaatccttacgaccgtcacttgttcctccgccataggtcctataccgattgggcttcccgcgttgaagaggactccctacctaagcttttctcctccactcttaagtctcgcaaaaacgacatccctgttaagacactgttgacggttattgaaggagagcaatctgatggagatgtgctgaatttccctgaaatgatcaaattcaagggtttgaccgaaggtgaactggatggctttgttgaggatgtgcttgtgaatggcaaaccatgggcttccggagtgcaggaaacgtttactgggtcttatgtctttgggtgtgctcatggtaatcgtgacaagagatgcggtgtatgtggaccgatcctgattgaaaagctgaatgaggagattgcattgcgaggattgaaggatcaggtgtttgtaaatgcttgctctcacattggagggcacaagtatgctgggaacttgattatcttcagtccagattccaagggaaaaattacaggccactggtatggctatgttactcctgaagatgtacctgaattgctggataagcacattgcgaatggcaaaataatagaacgtctttggaggggtcaaatgggggtttctactgaaagtggtgatggcacagggaaacagaatcttccaagtgggacagatgtgaagaaaaatgagaagcctgaagagtcaactgttcaaaagaccagggaaaatgtcggcggttgttgccagggtgctaatgggtctagctgttgcatgactgctagctcggaagtaagtgaaacaaagaaaactgaagaaacaacaaaagctcatggaaaaaaggggctgtgcggtttgacaagttgggtaggatcatgggatcaacgtgatgttcttacagcgagcagcggtggttggagctgtggcaaccgttgctgtggcttatagctactatagaaggtcaggctgaattaaggacatgtaatccaatttcgtactgtttgctcaagggttgtacacccctgttttttggttgcggaggcaatggtgacaataaaataatcctccaaacgacaaacttcattaggggatggatacaaatagtcatattacttttattttgatatctacttgcattgagatgtttcagtagatgcaattagacatttggaatgcttcagctcgataccgaaattatgagtagaaaaatgcttgct

SEQ ID NO: 190053 - DNA, 1229 bp, Gossypium hirsutum
ctgaatgggaagttctgtgtgattattgatatatccatgtggtgaaagtactctgattttggttaaagatagaattatattcatctgtgttacctagccttacatgaagggaaattgagttgtagtcttttaagtaaataggttctatgagactgattaacagaattttaatttgcttattggttgatggtttatgagactgataaaaagatgtgttggatatattctctaatgatgtcataactaatttcttgttcatttattgtcttagttaatttgatgcatgctggttctgaataaattttttttcttttgatttttctgttttgggttagcttacaggatttaaagattgtctttggtcaatcgtttgataattattaccttatacaagtgctgtttgattttcctttttcaatgttgtcatagtgtataaatgttgagggttaaatattttagaattaaaagcaaattgacatgatatatatagcaattataatattatttaattaatattatacaattaatataaaatgaaattaaaagcaagatgtttgggagtatgattcggtacttttcaacgaaaccgcaagccgaaaatgaagccaatcgagttgaaaacgtcgcctgagcaaacgcagaccataagcagagtgtcacctttgacattctcaaggagcatgggcccctcaccgtcggtgatacttgggaacgaatcaaggaggttggactgagaggacttacaagcaagaggcacatgaagatcgtgctgagatggatgagagggagacaaaacttacaagggaggtaacgatcatgaaatttatgaatcggagagaacagtaggacacacagttacaagtcctggtgatacagtgaagcagggcaaagctctcttcttaagcaacccttgaacgataccgcttttcttcttggtattaccgagttgtatcgagtggtttatgggaaaaaatatgtggcaagccgggtgctggctcaagtatgtagtttttatattattcaggaatagttcaaagtgggtaaattttgggtatttagaacttgcagaaaaaatgggtataacatgattctcttttactatcatttgagggaatcatgaattttggacattcactttattaaggttgcagcaatttatatatgtatttatatatacactgaaagccggcaggatgaactgctcaataataaatatgatctgtgtctta

SEQ ID NO: 190054 - DNA, 482 bp, Gossypium hirsutum
attttacttattccgcgaatcggacgcggggcacggaccctctttttggacccaaggccggcttcggccggccgatccgggcggaagacattgtcaggtggggagtttggcttgggcccctcacctgggacttgataacgcgagtgaactaagatgaggtatcaccgaacagaaaactctggtggaacaataccctaatggcttgcaaaatgcctgattattatcactaatactaaccggccaagtatgagataatggaacaatggaggatcgatatgtggaggtaggaatatggattcagctataataggggcacctgcgatgagaaaagggcttttgccatgggagcttttttttggcctgaccaactttaaattacatatatacatgtatgtatatcatgcttgattgggagattgtgtgattagggaagtgcttgcaaaagggatgcttttatttatgctttggtgatattgagatgt

SEQ ID NO: 190055 - DNA, 735 bp, Gossypium hirsutum
  unsure (1)..(735): unsure at all n locations
ttccacgcgtccgccgttaccgattttcccgaatccgaccccgaatccgccatccttctccccagcgagaaaccccactttgaaccccccaaattactcgacttcaagcacgatgatgatgcctccggcgtcgcctccgttcctttgaccaagatcagttttaaccctgtcaaccgccaaggggagcgagtcagactctatgtaagaggaaccatcttgggttacaagaggtcgaagtcaaaccagtattcgtacacttttattaatccaaattgggggagttaccactaaggaggaagtagcttggtatgccggcaagcgaatggcgtatatttacaaagctaaggtgaagaagaattgctcgcactatcgctgcatttggggaaaggttactagacctcacggtaatagtggtgtcgttcgtgctaagttcaagtctaatcttccccccaaatctatgggagatagagtccgagtcttcatgtaccccagcaatatataagttgtctaaatgcctgacggcattcgatcgatgactcaagtgactgtgccttttcaccaagttttacaaactttgtcgaaatgttttgttttttttcnaattggcattttggttgtttactaccatagaaaactcgcttttgtcccaaatgtctcttctatctcggattttttgcgtgtttgttcatggacttcgaagttttgggtaatcaatcatttatggaacttgatagc

SEQ ID NO: 190056 - DNA, 1054 bp, Gossypium hirsutum
  unsure (1)..(1054): unsure at all n locations
ctgggaacggttcatcatgagtttcacttcactgttcaagagggaattgatgccatcgaagatgtcatctaccacatagaaacctatgatgttaccacaatcagggcaagcactccaatgttcttgatgtcgcggaacatcaagtctttaggggtgaagatggttatatctggtgaaggctctgatgagattttcggtgggtatttgtacttccacaaggcaccaaataaggatgaattccaccacgaaacctgccgaaagatcaaggcccttcaccagtatgattgtttgagagctaacaaagcaacatcttgcatcgtgattggaggctcgagtcccattcttagacaagcaattcatcaatgttgccatgtctatagaccctgaatcaaagatgataaaaagggatgaaggacgcattgagaagtggattcttaggagggccttcgatgatgaagagcatccctatctgccaaagcatatcctttacagacagaaagaacagtttagtgatggtgtgggttatagttgataagaatggtctcaaagcacatgctgaccaacatgtaaccaataagatgatgcgtaacgcatttaacattttccctcacaacacaccaatgacaaaagaagcttactactacaggatgattttcgagagattcttccctcagaattcggcaagattgaccgtacctggaggagctaccgtagcatgcagcactgctaaagcagttgagtgggatgctgcctggaagaataaccttgacccttcaggcagggctgccctgggagtccatctctctgcttacaatgccgagactccactcagcaacatgccatcccaggttatcgacaatataccacggatgattgaagttcccggagttgctatacagagctagtacctgcctacaggaaggaaagcagaacacatgaattgaataattcagagtagaatttgtggcagatatccatgaaacttcataattctctgatgtgtactataagcgatgtttatgagtaactaaaacaatntctgattgtttgatca

SEQ ID NO: 190057 - DNA, 1202 bp, Gossypium hirsutum
  unsure (1)..(1202): unsure at all n locations
gtactagagtagtaaaggcagcagcaagatggaagtgccctttttcccaacccttttctcctgtatcaaagacttggtggtgcaacaagccttgttctcaaccttggaggattggctagtgaagcatcccaaaatcctccagttttcatgggaaaatggccaaacaccagcctcctctcaccgcttcctcaccctcactgtcttgtcttacatctctttcaccttcgttctctcccaactatctcgcccttcactttcacgtccactcctcaaatcaatcgcagccgtccacaacatcttcctccttaccctttctttcatcatggccctgggttgcctcgtttccatcttctcccaggtgcctaacttcaacaccctcgtttgcttccctaggggtacatccccatcgggccctctctttttctgggcattacattttctacctctccatgattgttgaattcatggactcccctctgatcatcctcaccggatccatgaataggctacccttccctcacgtttaccaccactccatggtggtcatcatgtgttatattcgcttaaatattgctcactcctccgtacccatggtgctgatcaccaactgcgtggtgcatgtcgtaatgtactttcctattacgctgtgtgtggcaccctggggatgcacgcccaagtggaagaaaaaatggtganccggattttcaactagtgcagttccggttatagctttttgatcatggccatgcttgtgttctaccacttcactgcttctggctgctctgggattctgagttggtgtttcaatggagccttcaacgtctctcttctctacttgttctcagactttcatgccaagagttactccaccaatgccaaggtcttcaagggtaactaataattaattaaaccaacttttttttgtttttccatttcgtttccattgttacatgtantaattgtttcagagtgattccgttcaagctcatgaatctggtatagaatcttaattgtgaaagctggtattgtcaaaccaaggaggatggagttcatgttccatttattttattgattgaatgaataagtaggataaaacatttgtgtacctctttccaaggcttttgtgagttgagccttactgtttgatanttgaaattcgaaggacggttttatttggtgaatgtttcgaagtttccganatc

SEQ ID NO: 190058 - DNA, 1289 bp, Gossypium hirsutum
aaactccctcccgaaatctcagatctaatattttttaaaacctaccatctctttcgctatctgcctgtttccctttctctctatctgattcctatcgacaatggccgccgccgccacttcttcaccccgcgaggaaaatgtctacatggcgaaactcgccgagcaagccgaacgctacgaggaaatggttgagttcatggagaaagtctcggcttgcgccgcccactacgagggactcaccattgaagaacgcaaccttctatacggcgtttacaagaacaggatcggcgcacgctgagcttagcggcgcatcatctccttcatcgagcacaaagtggagagccgtggtaacgaggatcacgtcggcggtatacgtgattaccgggctaagatcgagtccgagcttacttcgatctgtaacgggatcttgaagctccttgacactaggcttgtcccctcggcttcctctggagattccaaggtcttctatcttaagatgaagggagattaccacaggtacttggccgagttcaagactggagctgaacggaaggaagctgctgagagtactctcactgcctacaaatctgctcaggacattgccaacgccgagttggctcctactcacccgattcgacttggactggcactcaatttctctgttttctactatgagattctcaattctcccgatcgcgcttgcaatctcgccaaacaggcatttgatgaaccgatagctgagttggatactctaggcgaggaatcgtacaaagacagcaccctcatcatgcaactcctccgtgacaatctcactctctggacctccgatatgcaggatgacggggctgatgatattaaagaagcaccgaagcgtgacgaggaggagcaacaacaaaagccacagcagtagtgagagactgagagtcagcccggctcttactttcaattatataatttgccaatttagggtttcaattcaaaatgaaacttctaccgatttgatgtgtttttgatagaagaagatttggtgctacttaagcaattcttgcctttgttttaactcgatcgtccatgtactcagttttttgcttcttttctttttttaaattttattttagcttctttgtgcccctgaatgctctctactatctgctctgagcatatatctgcttttattcttcacattgtggaatggaaatgaatgattcggaagtcacaatgggaaattgggaatttactgctcaaaaaaaaaaaaccaaaaatcaaaaaatttatatacaacaacataa

SEQ ID NO: 190059 - DNA, 629 bp, Gossypium hirsutum
cggaatcgagagctccaagtgggccatttttggtaagcataactggcgatgcgggatgaaccggaagccgggttacggtgcccaactgcgcgctaacctagaacccacaaagggtgttggtcgattaagacagcaggacggtggtcatggaagtcgaaatccgccaaggagagcgagtcaggctctatgtaagaggaaccatcttgggttacaagagatcaaagtcgaaccagtacccaaacacttcgttgatccagattgagggagttaacaccaaggaggaagtagcttggtatgctggcaagcgtatggcttatatctacaaggccaaagtgaagaagaatggctcacactatcgctgcatttgggggagaagttactagacctcatggtaacagtggggttgttcgtgctaagttcaagtctaaccttcccccaaagtctatgggagatagagtcagagtcttcatgtaccccagcaatatatgagtagtgtagatcgacgactcgaatgacgctctaccatttcacttttgtttttatgaacttagtcaaagattttgtgtgctttgaatcagtcattttgtttctttgggatggtgaaatataagacttatttatctttacat

SEQ ID NO: 190060 - DNA, 652 bp, Gossypium hirsutum
ccttctcgtccgcccacgcgtccggtatatttagggcggaaaacagaaagaggccggcgttgtcgtccctgcagcagaacagcaaaagaagcaaagcaatggcaaggatcaaggttcatgagttgcgacagaaatcaaaaaccgatcttttggctcagttgaaagatctcaaagctgaacttgctcttcttcgcgttgctaaagttaccggtggtgcacctaacaagctttctaagataaaggtggtgaggctgtccattgctcaagttctgactgtaatctcacagaagcagaagtctgcattgagggaaggcatacaagaagaagaaattcttgcctctcgatctccgtcccaagaagacccgagctatccgcagaaggcttaccaagcaccaggcatctttgaagaccagaaagggagaagaacaaggaaatgtacttaccaatgaggaagtatgccattaaggtgtagggtaggatctctcacattctatttacatatcgattcgctctttactttctagcatcgtcttccgtaaaacccgagttgtgattttgtttcaatcttcatgtttggaaactcttttttgtccccttgtttaaaaccattattctggtctttttgattgaatggtaatttatggattttttt

SEQ ID NO: 190061 - DNA, 1273 bp, Gossypium hirsutum
ctggaataggcagccgaccgcatgttgatggcacgggtatgtgaggcaaacggagattacgaggcggctcttgagcaccttgtcctagccagcatggcaatgatagccaatgagcaggagaatgaagtacgcttcaattgatgtcagcattggcaatatttacatgtctctatgtcgctccgatgaggccatcttctcctaccagacggcactaacagtgttcaaatcatcaaagggcgacaaccacccttcagttgccttcgtctctgtacgacttgcggatctataccacagaacaggaaagctccgagaatcaaagtgctattgtgaaaatgccctgaggatctttgcaaaacccgtgcctggaaccacagcagaagagatagctggtgggttaaccgaaatttcagccatatatgaatctgttgatgagcctgaggaggctttgaagctcttgcagaaagcaatgaagttgttggaagacaaacccggtcagcaaagcacaattgcaggaattgaagctcgaataggggtgatgttttacattcttgggaggtatgatgagtcaaggaactcttttgagagtgcagtaacaaagcttagagcaagtggggagaggaagtcagccttctttggggttgtcttgaaccagatgggcttggcttgtgtccaattattcaagattgacgaggctgccgagttgtttgaagaagcacgagcaatactcgaacaagaatgcggcccatgtcatcaagataccctgggagtattacagcaatcttgcagcaacttatgatgctatgggaagggtcgaagatgcaatcgagatattggagtatgtactaaaattacgagaagaaaaacttggaatagcaaatcctgattttgaagacgaaaagaataggctggctgagctcctgaaagaagcgggcaagccacgcaacagaaaagcaaaatcactggaaaatctcatcgatccgaactcaaagaggacggcgaagaaaagaggggacgaaaaaaatggggtttcagaaatttgaaaggaaggcatttcccaggtcgtatctaatctgtttttccaacttatatccacattctgtatcatggaagatcatgtatagtgttacaagttgtaatttcttgagctttctgtttttggagctttaagatttcatattttttttcccttaacctttttactattgttatttgtgttattgaatgtctgtgatgtgctcttgaaatttggaaaagaccaatgttcgtttgagtg

SEQ ID NO: 190062 - DNA, 805 bp, Gossypium hirsutum
cccgaatcgccccacgcgcccacgcgtccgcccacgcgtacgcaatcatccatttattcttttctttcaactcaaaggcccaagtggtattagaatcatgggtgttgacacttataactatgactctacctcccctgtcgctcccgacaggctttgcaaggccttcgttcttgaagctgacaagggtctggcccatagctgcccctcatgcaatcaagagtattgaggttgaagctaatcctggccctggatgtatcgtaaagatcagactttgtttcatgccttgcattccactatatgaggcacctggttggaggacatgttgaaaacaaattttcatacagctacggtttgattggaagtgggcctcttggggacaagcttgagaaaatcaactacgagaataagtttgaggcagctgtaggtggaggaagtgtgtgcaagagctcgatgaaattttacacttttggtgactatgtaatcactgaagatgaaatcaaggctctcattaaagggagtgagggagtttacaagcctggttgaagcttatctattggctaatcctgaatcctgcaactaggatattggttgctttgaattctgattcttggttttaaagagtggtcattgcttttaatggtgtgtttttttatattttctttttcctttttaaaacctaaattgtcttctaattatttacataagagtggtggtgatcgagcttttgtcatcttttattttcattacagtcaaagaatttgggttgtcttttgacatatatagaaataaaataaacaaataaact

SEQ ID NO: 190063 - DNA, 741 bp, Gossypium hirsutum
caaacatccatacttcttctatgcttctctttcttttaaacttagaaacaaaacaggtagtagcattagaatcatgggtgttgccagttatgagtttgaggtaacctccccaattgctccagccaggcctttcaaggctttttgttcttgaggctgccaagatttggcccacggctgccccttatgcaggcaagagtgattagctcgaaggtgatgctttgtcctggcagtattgtaaagatcacctttgttgaacgcctttcataccaatatattaagcaccttattggaggacatgacgaaaacaattttttcatacagttacagtatgattgaaggtgggcctttaggggacaagcttgagaaaatcagctatgagaaccagtttgtggcagctgcagatggaggaagcatttgcaagagctcaataaaatattacaccattggcgactatgtaatcaccgaagatgaaatcaagactctcattaaagggagtgaggtagtttacagggctgttgtaaacttatcttttggcaaaccccgatgcctgcaactaaagatatagcttcctttgaattctcatgcatgcttttaaagggtggtgtgattataatggtgtggttttgatattttattttcggccttgaactctaaactgtctttggagtattccaataaaagtgatggtgatcagactttggtcatcttaattcatttttaatatagagtttgagttgaagc

SEQ ID NO: 190064 - DNA, 776 bp, Gossypium hirsutum
caaaaatggctagactcgcttttctcttcacctttactttcctcctcttcaccttctctcacgcccgcttcatcacatctgaatcgccaacatgatgtcacccccgaaaaatccgttaccgattttcccgaatccgaccccgaatccgccatccttctccccagcgagaaaccccactttgaaccccccaaattactcgacttcaagcacgatgatgatgcctccggcgtcgcctccgttcctttgaccaagatcagttttaaccctgtcaaccgccacttcccaaggcgtcccttgattccgttccgtcacaagcacaactgccgtttccataaacgcttcatgcctttgaatccacgcttccatcagaaacgcttcatttcttacggcaacgacatgatactgtccgacgagagaagttttgacccagagtcacgcggtgttgttcgccagatcgaggccagctggggcagttttgacgatgatggcaccgagtctaagcatcatgtaggttttatgaagccagatcaccatgaccacgagcaccatgatgaagaccatgaccacgagcaccatgatgaacatgatcatgaggaagagcatctccatcagcaccatcaccttcttcaccaccgctatctccaccgtggataggaagattgggatgagacagatgatcatgagggcgggttccttggagaattcccgcgggtatttgatgcattttggaatatctcctgcgccgtgaaatttccccttgccagatctattgaatg

SEQ ID NO: 190065 - DNA, 1304 bp, Gossypium hirsutum
ttggtaccaaggctgccaaacagtggggagctcagctccattctttctgcgttggcctagagggttcaccagatttgaaggcagcaaaggaggttgcagactatctgggcaccgtccatcatgaatttcatttcactgttcaagatggaatcgatgccatcgaagatgtcatctaccacatcgaaacatatgacgtcaccacaatcagggcaagcactcctatgttcttgatgtcaagaaagatcaagtcactaggtgtgaagatggttatctctggtgaaggctctgatgagatctttggtggatacctgtacttccacaaggcaccagataaggatgaattccaccgggagacatgccgcaagatcaaggcccttcaccaatatgattgcctgagagctaacaaagcaacgtcagcatggggattagaggcacgagtccccttcttagacaaagaatttatcaatgttgccatgtctatagaccctgaagcgaagatgataaaaaaagatgaaggacgcatcgagaagtgggttctaagaagggccttcgatgacgaagaacatccctatctgccaaagcatatcctctacagacaaaaagaacagttcagtgatggtgttggttatagttggatcgatggtctcaaggcccatgctgcccgacatgtgacccgataagatgatgttcaatgcttctttcatatttccctacaacacaccaactacaaaggaagcatattacgagcaggatgatttttgagaggggtttccctcagaactcggcaagattgactgtccctggaggagctagtgtggcatgcagcacagctaaagctgttgagtgggacgctgcctggaaaaacaaccttgacccttcaggccgggctgccttgggggttcatctctcagcttatgacgcagagactcccctcagcaacaagccatccaaggttattgatagtataccacggatggactttcctggagtggccatacagagttaatgcctgcctaactggaagacaacagtatgtatgaattatttaataaaatgagtaggagctgtggcatgtccaaatgtatgaagtatttaataaaatgagtaggagatgtggcatgtccatcaaacttccgaatacattgttgtataatataggtgatatttacgagtactaagagattctgtgatcgttgcatcatcttttgttatcatcaacctattggttctttgtgttaagtgtgtaatcaatattttgtagtggaagttaatcatgaatgagaatcttcccttttgttggtgtc

SEQ ID NO: 190066 - DNA, 842 bp, Gossypium hirsutum
gtttctctttgcgcctttcttctctcagccgcagcactgatattgcaggtaagtcatggttaagcataacaatgtcgtgccaaatgggcacttcaagaaacactggcagaactatgtgaagacttggttcaatcagccagcacgaaaggctagaagacgaattgccaggcaaaagaaggctgtgaggatctttccaaggccaactgctggaccccttcgccctattgtccatggccagactttgaagtataacatgaagttgagagctggaaagggtttcaccctcgaagagcttaaggctgctggtatttcaaagaaaacttgcaccgaccattggtatcgctgttgatcaccgccgtaagaacaaatcacttgaaggtcttcaagccaatgttcacaggcttaagacctacaaggccaaacttgttgtcttcccaaggcgtgctcgcaagttcaaggctggtgattcacctgccgaggagctcgcaactgcaacccaagtccaaggaccatacatgcctatttctcgtgagaagccttccgttgagctcgtgaaggtcaccgactacatgaaatcattcaaggcatacaacatgctccgtgttgaacgtacgaacaaacgtcatattggtgctaggatgaagaaggctgccgatgccgagaaggcagacaagatgtaaggttaccctttttggggacagtgttttgttatttggcttgctaaaaagaccttaaattttgtattcattttgtcaagtgaactgagacagctttagaaaactttggtattatgacagtaatccattttgttgagcattttattaaattgagaagtttcttgc

SEQ ID NO: 190067 - DNA, 849 bp, Gossypium hirsutum
cccacgcgtccgcccacgcgtccgcccacgcgtccgcccacgcgtccgattcattcactcatccctttcttctcttctttcaactcaaagaaaactcccaagtaatattagaatgcgatgggtgttgtcacttataactatgagtctacctctccagtcgcccctgccaggcttttcaaagctttttctcttgaagctgacaaggtttggcccaaggctgctcctcaggcagtcaagagcgttgaggttgaagctaatcctggccctggaagtattcgaaagatcaactttgctgaaggccttccattccaatatatgaagcaccagattggaggacatgacgacaagaatttgtcatacagttattagtttgatcgaaggtggacctttgggggacaagcttgagaaaatcagctatgacaacaagtttgaggcagctgcaggtggaggaagcctttgcaagagctcgatgaaattttacactgttggcgactatgtgatcactgaagatgagatcaaggctcaaatcaaagggagtgaaggagtttacaaggctgttgaagcttacctcttggctaaccctgatgcctgcaactaagatatatgttggttgctttgaattctcataacttgaatttaaagaatggggtgcttttggtattttcctttttagtcttaaaactttaaaccgtctttccgattgtcttaaataaaaaatggcgggggggatttgatctttcgatcatcttttggtttattgatggaaataaaataaatttttaaactagggaaaaaatttacctagtatatattttatagtttacatgaaagagattacaaattgttctt

SEQ ID NO: 190068 - DNA, 794 bp, Gossypium hirsutum
tcgcccacgcgtccgcggacgcgtgggctgctcgctcttagtttccctttttgtcccttgattatttgatactcccccctcatggctgccgctgatgtcgagttccggtgcttcgtcggagggctcgcatgggccaccgacgaccgggcccttgaagaagccttcagtgcgtttggtgaaatcgtcgaatcgaagatcattaatgatcgtgagactggaagatcccgaggctttggattcgttactttccgtgagcgagtaagctatgagggacgcgatcgaaggaatgaacggtcaaaatcttgatggaaggaacataactgtcatacgaaccccaatcgcgcagaagtggatgccggtggcggaggatttggaggaggaaaccggtggttacagccgcggtggaggcggcggcggattgggtggtcgccaaggaggatatggtggcggacgccgtgaaggtggatacggaaacggtggggggtatggtggtggtgggtacgaaggtggacgccgtgaaggaggatatggtgacggcggatctcgttactcaaaaggcggcggtgcatctgaaggcagctggaggtcttaaatttagggtttcaaagtgggcttgggcctatattgttatgggtttggtttgggtttggtagttggtaattctaaagttactctgttactgtttggtttgggttctctcgtttttgatcgaaggtggtactggtcttcttaaagccataaaaatggaatgaagtatcttcttttcaaaaaaaaaaaaataaaataaaataaaa

SEQ ID NO: 190069 - DNA, 1501 bp, Gossypium hirsutum
cccacgcgtccggaaggccaacattgaagagataagattatggtgaaaaactaaacataataaagtccctcataacattcttcgactggcggtcattgatgtagcccaaagataaacataaccaaaaagaaaaatgggttttggtttccgctactctccttatagtcttcacctattatcgacggagtccgagtggattaagggccaaaacctccgccacccttcggtttgttttgtacggtcacaccctacatcgggccgcctttgccgtccgtgctagttcatatgccgatgatgctagttttgtccgcgaatactgttgcatctccatgtcgaggtattttggccatggatgaatcatttgctacatgagggttgcggcttgcctcgtttggtctcgagaataccgaagcaaaaccggcaagcttaaaccgtacccttctcgtggtttgcccctggcctcggtaacctaccatctcgggaaggctatccttttcgaaggagaactctctaccaatctaccatcgatgggaaaaaagaatggtcgatgttctttgttgagcaaaatattgtccctggtatcaaagttgacaagggtttggttccactccctggttccaacaacgagtcatggtgccaaggtcttgacggtctttcatcccgcacagctgcctactaccagcagggtgctcgtttcgccaaatggcgtaccgttgtgagcattccaaatggtccatctgccttggcagttaaagaagcagcttggggacttgctcgctatgccgccatttctcaagacagtggattggtcccgattgtggagccggaaatcttgcttgatggtgaccatggaattgataggactttcgaagtagcgcagaaggtttgggctgaggttttcttctaccttgctgagaacaatgtaatgtttgagggcatccttcttaagcccagcatggtcactcctggtgctgaatgcaaagacaaggccaccccacagcaagttgctgattacaccctcaagctcctccacaggagaatccccccagctgtccctgtgtaatcatgttcttgtctggcggacaatgcgaggttgaagcaaccctcaacttgaacgcaatgaaccaatctccaaacccatggcacgtctcgttctcgtatgccagagctctccagaacacttgcttgaagacatggggaggcagacctgagaacgttaaggctgctcaggattcacttcttgtccgtgctaaggccaactcacttgctcagctcggcaaatacaccggcgagggagaatcagaggaggccaagaaaggaatgttcgtaaagggatatgtctactaagctgctgcaaacaaagctttagctgagatgatggagatttcatgataagggttccttcctctttgtgttgaatgttttatagcttttggagactactttttgttctggattccaatgtactgttaaataaccttcttgctgatgagattactat

SEQ ID NO: 190070 - DNA, 1077 bp, Gossypium hirsutum
cccacgcgtccgcccacgcgtccgcccacgcgtccgggcgggattaccctgtttattttaagcatatcaataagcggaggaaaggaaacttaccaggattcccggagtaacggcgagcgaaccggggagaagcccatcttgagaatcggtcgccatcggcgtccgaattgtagtctggagaagcgtcctcagcgacggaccgggcccaagtcccctggaaaggggcgccggagaagggtgaagagccccgtcgtgccccgggaccctgtcgcaccaaagaagggcgctgtctacgagtcgggtttgtttgggaatggcagccctaatcgggcgggtaaattccgtccaaggctaaatacgggcgagagaccgatagcgaacaagtaccgggaggggaaagatgaaaaggactttgaaaagagagtcaaagagtgcttgaaattgtcgggagggaagcggatgggggccggcgatgcgccccggtcggatgtggaacggcgagagccggtccgccgatcggctcggggcgtggaccgactcgggtcgtggcggcggcccaagcccggacgctttgatacgcccgtgggagacgtcgtcgcctcgatcgtgggatttagcacgcgccgcctcggcgtgcttcggcacctgcgtgctccgggcgtcggcctgcgggctccccattcggcccgtcttgaaacactgaccaaggagttctgacatgtgtgcgagtcaacgggctagaaaacccgtaaggcgcaaggaagctgattggcgggatccctcgcgggtgcaccggcgaccgaccttgatcttctgcgaaggagttcgagattgaactgaaaaaggagcctgagtcaatgacagagcaaccgaaggagaataccactgctgttagtgaagagaagaaaccagatcttgaggtctctagctcaaaggaaagtgtatgaattcctaaaatcatcgtcttgttggtgaaatttctcaattcgtatgtctgttgtatcgatgaacatcgaacaaataattttgaatgtagatcagttatgttagtgattgctcacaaaaaaaaaaaaaata

SEQ ID NO: 190071 - DNA, 640 bp, Gossypium hirsutum
gtcaatgaacagtgggtcataggctcatcgaggcactcctgccaaaatgttggcccccgatgaacccatgcccatggtgcgattgtcccaagcttcccttttgggatcaacggctgtggcgtacactgtgtacaccaatcgaaaggtcatcacgatttcgaaacccaatgcgttagacacgcccacacctgatgacaacccaaaagcgggtacagccaggtcgccggtagcgaacttaagcaacaggcaagcgacggttgagcctaggagttgggcgatccagtaaagaatgccgcgcaagagagtgatgttcccgccaacaaaagcaccgaaggtgacggcagggttgacgtggccacctgagatgttggcgccaacggagacagcgacgaaaagaccgaagccatgagctagagcggcggctacgagaccagccggggtggttgctccgttgtcagtcaacttgttaaaggccattcctgagcccgatccagcgaaaacgaagatcaaggttgagatgaactcagccaaagcagccttgagagcatcggggtgagtagcctcttcgggccggccaaccgctatgtttctgatcggcatatttaccttgggagctggagattggaaatgggaatgttga

SEQ ID NO: 190072 - DNA, 1644 bp, Gossypium hirsutum
ttcacgcgtccgctcaatcatccacttcttctcttctttgaactcaaagtcccagctaatattagaatcatgggtgttttcgagttaatgattaatgaaactacctccccagtcgcccccagctaggctcttcaaggcttttactgttgaagctccaaaggtttggcaccgcggctgctcctaatgcacccaagagtattgagggtgaagctaattctactttcggatgtatcgtaaaaatcaactttgttgaaggcttttcattccaatatatgaagcaccaaattggaagacatgatgaagataatacttcataccggtaccactttaatcgaaaagtgggccctttggggggataaactcgaaaagattagctgttacaacatgtttgacgcaactgcaagtggaggaagtatttgcaagagctcaatgaaattctacacttataggcataaatgttatcactgaagacgaaatcaaggctctcattaaagggagtgagggagtttacaagcctgttgaagcttacctcttggctaatcccgaagcctgcaactaggatataagttgcttaatttgaattcttatgcttgcttttaaagaggggtttgattttaatgttgtgcttttgatattttctttttcatcttaagacatatattgctgttgttcatgaggagaaacctgaagaagtggtcaaggttggagaaattgcaacagaaagaggtaccggctgttgctcctgcagcctaacactgtcgatgcataaccaaatgacgcagtgcctgaagcaccatcccgagaaccccacgctccagaaactgaagccacagttgaaactgaatcaaaggagggtggttaaagagttccaaggctgtgactgaggagccagaaggggagaaaaaagaagaagagactcctaaggaaacggtagcagagccagttgccgaggagtcccaggagtccaggagtccaaggagacttctgagccaacagttgaagaaaccaaagaaagcacagagtctacagaagcagcagcagcagcagcagcagcagcagcagaagtaaaagcagaagccgaagccgaagccgccccagtggaagcacccaaagaggaagctgcaaaggaagaagaggaaccagctgaagctcaagctgagaagactactaccgagtaaaataagcttgtaagatggggagtcaatggaagcttgtgtagtgcgcttactgttagctaagtttgcatgttgaaatcaattagtttctattctagttgaataaggacgtgatagtattaaggtggatgaggccttggtactggggcatggaaatgacccaccaatgatagcttgcctattggctaaactaacatgcaattggcatatggcagggagagagagtttaaaaaaagttcaagccaggcttttgggggggggggggcatttttcatgttcaatctgttctctgtaatgggtggttcctgggtcccaactcccaagcaggtcgcttaaatttagtgtttctgcttgtatgtttttattagaagaggcagtttgcatgttgtcttttacaagtaataataataaatcatagtgcatttgtttataataaaaaaaacatgagaaaatgtaaaaactaaaacag

SEQ ID NO: 190073 - DNA, 2332 bp, Gossypium hirsutum
  unsure (1)..(2332): unsure at all n locations
gcgaggtctatcgggtaaagccaatgattttaggcatcgggggcgcaacgccctcgacctagtctcaaactttaaataggttggacggcgccatttcttcgttgaccctggccacngaatcaaaaactccaattgggccatttttggtaagcaaaactggcgatgcgggatgaaccggaagccgggttacggtgcccaactgcgcgctaacctaaaacccacaaagggtgttggtcgattaagacagcaggacggtggtcatggaagtcgaaatccgctaaggagtgtgtaacaactcacctgccgaatcaactagccccgaaaatggatggcgcttaagcgcgcgacctatacccggccgtcggggcaagggccaggccccgatgagtaggagggcgcggcgggcgcctcataaccctagtcgcgagccccggccgaaccgcccttcgttccaattcttggtggtagtaccaaatattcaaagaagaactttaaaggcccgaagaggggaaaggtttccatgtgaacggcacttgcacatgggttagtctgttcctaagagacgggggaagccggtccgaacagcgcgtcacagcgcgagcttcgaaaggcatatgggattaaaattgctgaaccgctacacggcggctgacggcaactttagggagtccggagacatctgaagccgcctcgggaagagtcatcttttctgtctaacggcctccccacccttgaaacgggtcatccagacgtatgggtccatcggtcggaagagcaccgcacggcgcgtggtggtccggtgccgcgcccacgacggcctcttgggaaaatccggaggggaccgagtgccgtcccgcgccccggtcgtaccctcataaccgcattcaggtctccaagggtgaaccagcctctggtcaatggaacaatgtaggcaaggggaaggtcggcaaaatgggatccgtaaccctcgggaaaaaggatttggcttctgagggctgggcacggtggtcccagtcccagaacctcgtcggcttgccggcgcactgctcgagctgctcccgcggcgagagcggttcgccgcgtgccgggcggtggacggactgggaacggctccctcggtggcctttctcgggcgactaacagtcgactcagaactgttactgacaaggggaatcctactgtttaatttaaacatagcattgcgttgtgtcctgttgattgctacgcaatgtgatttctgcccagtgctctgaatgtcaaagtgaagaaattcaaccaagcgcgggtaaacggcgggagtaactatgactctcttaaggtagccaaatgcctcgtcatctaattagtgacgcgcatgaatggattaacgagattcccactgtccctgtctactatccagcgaaaccacagccaagggaacgggcttggcagaatcagcggggaaagaagaccctgttgagcttggactctagtcgcgacgtgttgtgtaaatgggacttgagaggtgtaggataagtgggagctgtttgtttgaaattgaaataccactacttttaacgttattttaacttaaattccgtgaatcggagggcggggcaacggcccctcttttttgtgacccaaagggccggcttttcggcccggcccccgatccgggcggaaagacaaattgtcaggtggggagggtttggctgggggcggcaccaatctgttaaaattataacccaggtgtccaaagatgagctcaacgagaacagaattctcgtgtggaacaaaagggaaaaagtctcgtttgatactgatttccatgtcgaatacgaaccgtgaaagcgtggcctatcgatcctttagaccttctgaatttgaagctagaggtgtcagaaaagttaccacagggataactggcttgtggcagccaagcgttcatttagcgacgttgctttttttgaaatccttcgatgtcggcttctttcctttatcattgtgaagcagaattcaaccacagtgtgtggatttgttcacccaccaatagggaaacgtgaagctgggtcttagaaaccgtcgtgagacaaggttagtttttaaccctaactgatggccgcgtcgcaatagtaaattcaaacctagtaccgagagggaaaccgttgattcgcacaattggtcatcgcgcttggttgataagccagtggcgcgaaactaccgtgcgctggattatgactgaacgcctctaagtcagaatccgggctagaagcgacgcccgcgcccgtcgcccgattgccgacccgcagtaagggcctctgggcccccaagggcacgtgtcttangtgcagcc

SEQ ID NO: 190074 - DNA, 1940 bp, Gossypium hirsutum
tctcctttctatcgacacacgacccttccgttacctctcaagctctctcttcctgtcttcgtctacttcgcctctttctctatggatccctacaagcaccgtccatcaagtgctttcaattcaccattctggactaccaattctggcgctccagtttggaataacaattcatctctcactgttggacccagaggtccaattctccttgaggactatcatctggtggaaaagcttgccaactttgacagggagcggattccagaacgtgttgtccatgctaggggagcaagcgcaaagggtttcttcgaggttacccatgacatttctcaccttacatgtgctgattttctgcgagcacctggagttcaaacccctgttatcgtgcgattttcaaccgtcatccatgagcgtggaagccctgaaaccctcagggatcctcgtggttttgcagtgaagttctacacccgagagggtaattttgatcttgtgggaaacaatttcccagtcttctttattcgtgatggaatgaaattccctgatatggtccatgctcttaagcccaaccctaagtcccatattcaggagaattggaggatccttgatttcttctcacaccatcctgagagcttgcatatgtttactttcctctttgatgatttgggtgttccacaagattacagacacatggaaggttctggtgtaaacacatacactctgattaacaaggctggcaaagcacactatgtgaaattccactggaagcccacttgtggggtcaaatgcttgctggaagatgaggcaatcaaggttggaggagctaatcacagccatgccactcaggatctctatgactcaattgctgctggcaactatcctgagtggaagctcttcatccagacaattgatcctgaccatgaagataaatttgactttgaccctcttgatgtgactaagacctggcctgaggacatcttgcccctgcagcctgttggccgcttggttttgaataagaacattgacaacttcttcgccgaaaatgaacagcttgcattttgccctgccattgtggttcctggaatctactactcagatgataagttgctccagactcgtatattctcctactctgatacccagaggcacagacttgggccaaactatctgcaactcccagccaatgctcccaagtgtgctcatcacaacaatcaccacgaaggttttatgaatttcatgcacagggatgaggagataaattacttcccttcaaggtacgatcctgttcgtcatgcagagatgttccctatcccacctgctgtttgcactggaaggcgagagaagtgcatcattgagaaggagaacaacttcaaacagcccggagagagataccggtcctgggcagcagacaggcaagaacgattcatctgccgctgggttgatgccttgtctgatccacgtgtgactcatgaaattcgcagcatatggatctcatactggtctcaggctgataaatcagtgggtcagaagttagcatctctcctcaatgtgagacccagcatttagacatggagttgcggaggatgagtaaaggactgaaatgtagaaaggccatcatctagttgtttcggaagcataaacttattgttgatccttttgatctgtgtgccataactgaaataaagtctcatatactataagttttacgcttatggtcctaattaataaatgccgttttatgtgttaaaaaaaaaaaaaaaaaaaaaaaaaaaaaaaaaaaaaaaaaaaaaaaaaaaaaaaaaaaaaagaaagaaaaaataaaaaaaaaaaggggccgtgcgtctacgggataaccgctttagatacgctatcttgcgaccaaaattaatattatatggaacacttaaataaaattaattgggcgaaatttttaaacgtactcactt

SEQ ID NO: 190075 - DNA, 1000 bp, Gossypium hirsutum
  unsure (1)..(1000): unsure at all n locations
gggacgcgtgtgcgaaccaatcttgacagggttgagactacttagatgtctagacacaggagccttcgggcggcggaggaggagggctttcaattcaccattctggactaccaattctggcgctccagtttggaataacaattcatctttcactgttggacccagaggtccaattcttcttgaggactatcatctggtggaaaagcttgtcaactttgacagggagcggatttcataacgtgtttgtcatgctaggggagcttgcgcaaagggtttctttgaggttacccatgacattttttaccttacatgtgctgattttctgcgagcacctggagttcaaaccctctgttatcgtgcgattttcaacctgtcatccatgagcgtggaagccctgaaaccctcagggatcctcgtggttttgcagtgaagttctacacccgagagggtaattttgatcttgtgggaaacaatttcccagtcttctttattcgtgatggaatgaaattccctgatatggtccatgctcttaagcccaaccctaagtcccatattcaggagaattggaggatccttgatttcttctcacaccatcctgagagcttgcatatgtttactttcctctntgatgattggngtgttccacaagattacagacactggaaaggttctgtgtgtaaacacatacactctgattaacaaggctggcanagcacactatgtgaaattccactggaagccnacttgttggggtcaaatgctngctgnaagatgaggcatccaaggttgaggagctaatcacagccatgccactcaggatctctatgactcattgctgctggcactatctgagtggagcttttctncagacattgtcctgacatgaggataattgacttgaccctctgatggctagacttgcctgagacattgcccgtcaccggtggcccttgttgatagaccttgcactctgctgatgaacactgcttgccccgccctg

SEQ ID NO: 190076 - DNA, 1943 bp, Gossypium hirsutum
  unsure (1)..(1943): unsure at all n locations
ctcttagctgttttcacaaaggtttctttatttgtatttacaaaaacccaagttctagccatggctgcatctttctcagtgccttcaatgataatggaagaagaaggaagatttgaaactgaagttgctgaggtgcaagcatggtggaactcggagaggttcaagctaacccgacgaccatactcggctcgagacgttgtggctttacgaggcagcctcaagcagagctatggctccaacgagatggcaaagaagttatggacgactctcaagacgcaccaagccaatggcactgcttctaggacttttggtgcacttgaccccgtccaagtaaccatgatggctaagcatttggactccatttatgtctctggttggcaatgctcctccactcacaccaccaccaacgagccaggtcctgaccttgctgactacccttacgacaccgttccaaacaaagtcgaacaccttttctttgcacaacagtaccatgaccgcaaacaaagagaggcacgaatgagtatgagccgggaggagcgcgctcgaaccccttatgtcgattacctgaagccaatcatagctgatggtgatactggctttggtggaaccacagcaaccgttaagctttgtaaacttttcgttgaacgtggtgctgcaggtgtccacatcgaggaccagtcatctgtaaccaaaaaatgtggtcacatggctggtaaagtgcttgttgctgttagtgaacacattaacaggctagtggcagcgaggttgcagtttgatgttatgggagtcgagacagtgttggtggctcgaaccgatgctgttgcagctactttgatccaaaccaatgtcgacaccagggatcatcagtttattcttggtgcgacaaatccgaatcttcgggggaaaagtctggcaaatatgttggctgaaggaatggctgctggtaaaaatgggccccaacttcaggccattgaagataattggctagcaattgcacaacttaagacattctccgaatgcgtaatggatgccattaagagcatgaacataacagaggatgaaaagagaaggagaatgaatgaatggatgaatcattcaagttatgataagtgcctatcaaatgaacaagcaagagagattgctgagagattgggacttcagaatcttttctgggactgggatttgcctagaaccagagaagggttctataggtttagagggtctgtaatggctgccattgttcgcggttgggcctttgcacctcatgcagaccttatttggatggagacatcgagccccgacatggtcgagtgcaccaggtttgctgaaggggtgaaatcaatgcaccccgagatcatgttggcttacaatctctccccatctttcaattgggatgcatcgggaatgaccgatgaacacatgagagacttcattccaagaatagccaagcttggtttctgttggcagttcataacgttagctggtttccatgctgatgcattggtgaccgacacatttgcgagagatttcgccaggagggggatgctagcgtatgtggagaagatccaaagagaagaaaggaacaatggagtggacacattggctcaccaaaaatggtcaggtgccaacttttatgatagatatctcaagacagttcaaggaggtatatcatccacagcagccatgggcaaaggggtgactgaggagcaattcaaggaaacatggactagaccaggtgcagggaacattggaagtgaaggcaatctggttgtggctaaggctagaatgtaagacaagcaaaaatgagctgaaggatggtctattttggacttgggagaataacccaattcttgaattttggaattgggacggaaaaaaaaaaagtggtaataaaatcatttgacaatggatcagtctgggtattntcgtttctttttggtttc

SEQ ID NO: 190077 - DNA, 1783 bp, Gossypium hirsutum
acgcgtccggagctcccttcggcacgtactaaattatcttctttctcttctcttaccatggatccttacaagtttcgtccttcaagttcctttgattccccgttctggactaccaattctggtgctccagtttggaacaataactcatcacttactgtgggagcaagaggtccaattctccttgaagactatcatttggtggagaagctagctaatttcgacagagaacgcatacctgaacgtgttgttcatgctagaggagccagtgcgaaagggttctttgaggtcactcatgatatatctcagctcacatgtgctgatttccttcgtgcccctggagtgcagaccccgctcattgttagattctccacggttattcatgaacgtggtagtcctgaaactttgagagacccccgaggtttcgctgtgaaattttacactcgagagggaaattttgatctcgtggggaacaatttccctgtgtttttcatccgtgacggaatgaagttccctgatatggtccatgctcttaaaccaaacccgaagtcccacattcaggaaaactggaggattctggacttcttttcgcaccatcccgaaagcttgcacatgttcaccttcctgtttgatgacatcggtgttccacaggattataggcacatggatggctctggtgttcatacctacacactaatcaacaaggctgggaagtcacactatgtgaaattccattggaaacccacttgtggtgtaaaatctttgttggaggatgaagccataagagtaggtggtgcgaatcacagtcatgccacacaagatctttatgactcgattgcagccggaaactaccctgaatggaaactgttcattcaaataatggatcctcttcatgaggataggtttgattttgacccacttgatgtaaccaagacatggccagaggacatcttcccattgcagccaatgggtcgaatggtgttaaacaagaacatcgataacttctttgctgagaacgagcaattagccttctgcccttccctcattgtccctggcatctattattcagatgataagttgcttcaaactagaatcttctcctattctgacactcaaaggcaccgtcttggaccaaattatctgcagcttccagctaatgctcccaaatgtgctcatcacaataatcaccatgaaggttttatgaattttatgcatagagatgaggaggtgaactacttcccttcgaggtacgatcctgttcgccatgctgagaagcaccctattcctagcaccgttttgagcggcaaaagagagaagtgcattattgggaaggagaacaactttaagcagcctggggaacgataccggtccttttcagctgacaggcaagaacggtttattaatcgctggattgatgccttgtctgatccaagggtcacacacgagatccgcagcatttggatctcatactggtctcaggctgacaaatctttgggtcaaaagattgcttctcgcctcaatgttagaccaagcatttgatcgatgatattgatggaatcccagctctttcagatggagaaaagtgcttccttgcgcggttgtgccgatatactagttatattgttctgaatacttgcattctgcaatcaaataagatcatgtactataccaattctatgactcaaaacgtctgtaacaagatgtgttactattttgttttatgtgtacgttttgaaatattcaattcctctactttttaatgccaacttctctctagttcttctgt

SEQ ID NO: 190078 - DNA, 413 bp, Gossypium hirsutum
gtttgtgaggaaagtaatgaatttgttttttctaagttcaagttgattctaagagtttctagttagtgcattaaaatatgaagttgaagatatgtcatgccagccagtattgctggtgaagttcttcagttggttctatatgatttggggagggctagccccatgtcaaagcataagcaaaagcaacagatacgtgaaatgataaaatcaagaggttgaataacggttatattatatgacaggtccaattctccttgaagactatcatttggtggagaagctagctaatttcgatagagaacgcatacctgaacgtgttgttcatgctagaggagccagtgcgaaagggttcttcgaggtcactcatgatatatctcagctcacatgtgctgatttccttcgtgcccctggag

SEQ ID NO: 190079 - DNA, 2010 bp, Gossypium hirsutum
ccttaagggaattcggcacgagattttcaaaattccagaggtttttagtaaccaaatatgattggccttgggagttacggttacactgcaccatcttccaaaaaaatcaacgcctacgatgttcctcaaggcgttgatattcgtggtcgattcgatgaagaattcgctaagattttaacaaaggatgccttacaattcgtcgctgatttgcagagagagttcaggaaccatattaagtatgcgatggaatgtcgcaaagaggcgaaaagacgatacaatgaaggggcgttgcctggtttcgatcctgcaacgaggtatattagagaagggaaatggacttgtgtgccgtttccgcctgcggtggctgatcggagggtcgaaattacagggccggtggagaggaagatgatcatcaacgctcttaactcgggagctaaagtgtttatggctgattttgaggatgcactgtcaccaagttgggaaaatcttatgagaggtcaaataaacttaaaagacgcagtggaagggacaataacgttcaacgacaaagcaaggaacagggtttacaagctgaataatgaaatagcaaagctatttgttcggccacgaggttggcacttaccggaggctcatattttcatcgacggggagcctgcaactggttgtctagtggattttggcctttatttttaccacaattatgccactttccgcaacactcaaggtcaaggctttggacccttcttttatcttcctaagatggagaattcaagggaagcaaagatatggaatagtgtgtttgagaaggcagaaaagatggcaggcatagagaaaggaagcataagagcaacagttttaatcgaaacactaccagcagtcttccaaatggatgaaatcttttatgagctcagggatcactctgttggtctcaactgtggccgatgggattatattttcagttacgttaagaccttccaaggtcacccggaccggttgttgccggatcggggtcaagtcggtatgacccaacacttcatgaggagttactccgatctcctcatccgaacctgccatcgacgtggcgtccatgccatgggcggaatggcagcacaaattcccattagggatgatccaacggcaaatgaagcagcctttgaacttgtaagaaaagataaacaaagagaagttaaagcagggcatgatggaacatgggcagctcatccaggtctcatcaaaacatgcatggaagttttcaccaacaacatggggaacactccgaaccaaatcgaaaccgtcaaacgcgattacgcttccaacttaactgaagatgatttattacaaaggcctcgaggtgttcgtacgatggaaggcctccgtttgaacactcgtgtcgggatccaatacttagcagcttggttaaccggttcaggttcggtcccgctttataacctaatggaagatgctgcgacagccgagatcagtagggttcaaatttggcagtggttgaaatatggtgttgaattagacggtgatgggcttggggttcgagtgaaccatgtgtttgggcgagtggttgaagaagaaatggctcggattgaacgtgaggtcggaaaagagaagtttaagaaaggaatgtataaagaagcatgcaagatttttactcgccaatgcactgcttcaactttggatgattttttgacacttgatgcttataattatatcgtcattcatcatccaaaggatgtttcttctaagctttgatgaagctttccatgaaagcttagaattatggggtttgagtgaaaaaaaatagtgccattgctaaataagcaaataatcataattgtggtttttacgggaaatggttcaataaggtatgttttatttcaatgttgggttttaatgtattatttgaaagttttcatttaagtcattagacttataaaattgtagtcgtttgactttttctgtttgtaccgcttgcaccaatagaaagttctcttttccttc

SEQ ID NO: 190080 - DNA, 1600 bp, Gossypium hirsutum
cccacgcgtccgcgagaatcatcagaatcagaaaaaagggaaaagggtgattaaagaaaagactcccatccccactgattctggccttgcttcccaacacgtagcatctaaccataacgcctgaaatccaccactcctctatttatttcaaaaccacttggattaaactccccctccgctccattccactctcccaaaaccaacacgccttctttgcttcgtgtttcatcaacctggcgttaaactgctttctttaaagccagcaaaatgggtgccggtggtaggatgccaattgacggtataaaggaggaaaatcgaggctcggtcaatcgagttccgatcgagaagcctccgtttacgctcggtcagatcaagcaagccattccgccccactgttttcgccgctccctccttcgatccttctcctacgtggtccatgacctatgcttagcctctttcttttactacattgcaacatcatattttcactttctcccacaacccttttcctacattgcttggcctgtctattgggttctccaaggttgcatcctcaccggtgtttgggtcatcgcacacgagtggggtcaccacgctttcagagactaccaatgggttgacgacaccgtcgggttgatccttcattccgcccttttagtcccgtacttctcgtggaaaatcagtcaccgccgtcaccactcgaacaccggttccatggagcgtgacgaagtattcgtgcccaaacccaagtctaaattatcatgctttgcgaaatacttaaacaatccacccggtcgagttctatctcttgtagtcacattgactcttggttggcctatgtacttagccttcaacgtttcgggtcgatactatgatcgattagcttcccactataacccttatggccccatttactccgatcgcgagaggctacaagtttacatctccgatactggtatatttgcggtaatttatgtactttataagattgctgcaacaaaagggctggcttggcttttatgcacttatggggtgcctctacttattgtgaatgccttccttgtgttgatcacctacttgcaacatactcactcggcattgccgcattatgactcgtccgaatgggattggttgcgaggagcattgtcgacgatggatcgagatttcggggtgttgaacaaagtgttccataacatcaccgatacgcatgttgctcatcacctcttctcaacgatgccacattatcatgcaatggaggccactaaagcaatcaaaccaatactcggcaagtattatcctttcgacgggacaccgatttacaaggcaatgtggagggaggcaaaagagtgcctttacgttgagcctgacgttggtggtggtggtggtggtagcaaaggtgttttttggtatcgtaacaagttctaaagaccgaccaactgcctgatagctggccggcgaaatcaacgtaaaacgtacttattagactagtgttaactagggaagttaataattaatggtaggaaaatgtggaatagttgcctagtagttttatgtattaagtgttgtattaataaactatatggtagaaaaaaaaaaaaaa

SEQ ID NO: 190081 - DNA, 721 bp, Gossypium hirsutum
  unsure (1)..(721): unsure at all n locations
cccacgcgtccgggtttttgcttcaaggtaagagtcgattgattcttcgaaaaccataaacgaaaccaaatatggcggagaaagcaatcgagtcggttcaatgctttggccggaagaagacggcggtagccgtaacacactgcaagagaggccgtggtttgatcaagatcaatggttgtcccattgagcttgtcgagcccgagatcctccgtttcaaggccgtcgagccaatccttctcctcggccgtcagcgttttgccggcgttgacatgaggatccgagtcaaaggtggaggtcacacttctcagatctacgctatccgtcaaagcatcgctaaagcccttgtcgctttttaccagaagtacgttgatgagcagagcaagaaggagattaaggatattttggtcgggtacgataggactttgctggtggctgatccgaggaggtgcgagcctaagaagtttggtggaagaggtgccagggcaaggttccagaagagttaccgttgaagaactgtcatggttcgttttgatgttgttcttagtgaaatgatatggttatgcttgttttgaattaaggttttattatatggatttaaattagctgtgactgagtttctgaatttttggatgtttgttttggttgcttaaatttatagataaatgcttaagactgttattgccttttttnnnnnnnnnnnnnnnnnnnnnnnnnnnnnnnn

SEQ ID NO: 190082 - DNA, 852 bp, Gossypium hirsutum
gcgtaaagccacccaaaagcaccaaaaacacaaacagcgaagagatataattgaaagaaaagaaaaatggttctgctagagaaactttgggatgatgtagtggccggtcctcaaccggaacgtggccttggccggctgaggaagatcaccaccaccccacccttgtccaccaaagatgaggcttcatcaatggcgatgccgacgagtccgacgacacctgggacaccatcgacgccggtgtcggctcgtagggacaacgtgtggaggagcgtgttcaatccaggtagcaaccttgcaaccaaaggtattggcgctgaagttttcgacaagcctcaacctaactctcctactgtttatgactggctttacagcggggagacccggagcaagcatcaccgttgattaggcggtggctgacggcggcggatggtagcaaaaccactagcagaaggttgctgctactgaaggagcaggatttgcatgtaaatatatatatcgtcctttttaaaagttcttcaatgggtcaattaagtagtagtagtagtaagtaagatgtttaaaagagtaagcggcagcgcagggtggtcgatgaccttatgtcattcaagatcccggccgtgagcggcggcagctgctgctatattaaattattattaaataaagggaaggggtattgtacgaatgatgttgcgttagtatgtgatttgaacatcaatttattaattaattttggggttcttaaaaaaaaataaaatcctattttctattacttagttttactttctataattttatattattatctataactttttgggccgtccttttttgtggggcccccgttttatttaa

SEQ ID NO: 190083 - DNA, 643 bp, Gossypium hirsutum
  unsure (1)..(643): unsure at all n locations
ctcacgcgtccgcggacgcgtgggttttgggcggaatatggcggaaagagcaccgatcgaatccgtacaatgcttcggccgcaagaagacggcggtggcggttacccactgcaagcgaggccgtgggcttatcaagattaacggttgtcctatcgagcttggtgagcccgaaatccttccgtttcaagggccgtcgagccaattcttctcctcggccgccagccttttgccggcgtcgccatgaggatccgtgttaaaggcggaggccacacttctcagatctacgccatccgtcaaagcattgctaaggccctcgtcgctttctaccagaagtacgtcgatgagcaaagcaagaaggagattaaggatatcttagtcgggtacgataggactttgctggtggctgatccgaggcggtgcgagcccaagaaattcggtggaagaggtgctagggcaaggttccagaaaagttatcgttgaataagatttatggtttgttcgcgaaacttcgttttgttttacaagagatactatgtttatgttcattttgaattaagttttgcgacattgagctcctttcatcaatgacttggaatgcaatttttcggcnnnnnnnnnnnnnnnnnnnnnnnnnnnnnnnnnn

SEQ ID NO: 190084 - DNA, 448 bp, Gossypium hirsutum
cctactcgtccgcccacgcgtccgcggacgcgtgggcagatttcagcaaagagtaaacgcctcgtttccgcaaaaaccctagagagaacaaaatggcggaaagagctccaatcgagtccgtacaatgtttcggtcggaagaagacagcggtagccgtaacctattgcaagagaggccgcggtctgatcaagatcaacggttgtcccatcgagttagttgagccggagatcctccgtttcaaggccgtggagcctatccttctcctcggtcgccaacgtttcgccggcgtcgacatgaggattcgagtcaaaggtggaggtcacacatctcagatctacgctatccgtcaaagcattgccaaagccctcgttgctttttaccagaagtacgttgacgagcaaagcaagaaggagattaaggatattttggtcaggtacgataggacttt

SEQ ID NO: 190085 - DNA, 578 bp, Gossypium hirsutum
ttcgaggtttttttttttttttgttttgcaccatctaaatatgaacactcccttttaataatgatgataataatagtaatataataataacaaaatttgatcctaatttatcttaagcatgcaagtgccatgcattattacttaccataagctttacataaatatattcaaaaacagaagagatataattgaaagaaaagaaaaatggttctgctagagaaactttgggatgatgtagtgggccggtcctcaaccggaacgtggccttggccggctgaggaagatcaccaccaccccacccttgtccaccaaaggtaaaaacaattagcttttgcattacatcatttgtattgtggacatttaagtttcactctgaaattgaatcttttcattagatgaggcttcatcaatggcgatgccgacgagtccgacgacacctgggacaccatcgacgccggtgtaggttcgtagggacaacgtgtggaggagcgtgttcaatccaggtagcaaccttgcaaccaaaggtattggcgctgaagttttcgacaagccttaacctaactatactactgattatg

SEQ ID NO: 190086 - DNA, 469 bp, Gossypium hirsutum
cttttctctctgcccttcgcgtgaccattctaaagaggtcatcgtaaattcgagtacaaagcgctaaccgagatgagagccaagtggaagaagaagcgtatgaggaggctgaagaggaagcgccgaaagatgagacagagatccaagtagatgcgccttggactgaattagttttgccctgacaatcccttgtcttcataattatcctgcatatgttgcatgaagttgtgaagattgaagggtattttcaggcaaccttatctgttttgtcttctatatctcggttaaagttttaagactgtttgagatgtttgtctagtactattagatattatgttggggatttgtggtttgatctgtgtaagcagttatcttaacatcctaaatgtttgaaattgaaacttttgttcttcttatatggtctataatatgcgagatagattgtttccttaaaaaaaaaaaaaaaaaa

SEQ ID NO: 190087 - DNA, 1110 bp, Gossypium hirsutum
  unsure (1)..(1110): unsure at all n locations
tcttccacttgagtagccggctctcgcaacaaaaccagactttgagctaaaacagccgcatttcatttctccaagatggctagagggttgaagaaacatttgaagaggctcaatgcccccaggcattggatgcttgacaagcttggtggtgcttttgcacccaagccatcgtctggtccccacaagtccagggaatgcttgccattgatccttattttgcgaaaccgattgaagtatgctctcacctatagagaagtcattgctattcttatgcagaggcatgttatggttgatgggaaggttaggacggataagacctatccagctggtttcatggatgttgtgtccattcctaaaacaaatgaggacttccgtctactttacgacaccaaagggcgatttcgtctccatgccatcactggcgatgaaaccaagttcaagctctgcaaggttcgatctgtccagtttggccagaagggtattccatacctgaatacatacgatggtcgtactatccgttacccagatcctttgatcaaggctaatgacaccatcaagcttgaccttgagagcaacaaaattgttgatttcatcaagtttgatgttgggaatgttgtcatggtcactggaggaaggaacagagggcgtgttggagtaattaagaacagggagaagcataagggtagctttgagacaatccatgttcaagatgctgctgggcacgaatttgcaactcgtctaggcaatgtcttcacaatcggaaaaggaacgaagccatgggtgtcgcttcccaagggcaaaggtatcaagttatccatcatcgaggaagctcggaagaggcttgcagcccaaaatgcagcttgaactttaacatgagatatccagatacgtcttgttttcacctaaagagtaaaatttggagaactaatttcttcttgcagtttaaagtgtttgtgttgtgggtgatgtcatagacttttattttatagaatattttgatgttttcttgattatcaaccctgcttttttcaaactaatctttgtatgctttttgcttaaactaatattttatttatgtttnnnnnnnnnnnnnnnnnnnnnnnnnnnnnn

SEQ ID NO: 190088 - DNA, 923 bp, Gossypium hirsutum
  unsure (1)..(923): unsure at all n locations
ggcatcttcctaaagaacgctgaaggctctcagcggaaacagcttcttccagaccaaccgaaatggctagagggttaaagaaacatctgaagaggctcaatgctccaaggcattggatgcttgacaggcttggcggtgcatttgcacccaagccctcatctggaccacacaaatccagagaatgcttgccgctcattctcattctgcaaaacagattaaagtacgctctaacatatagagaagtgattgccattcttatgcaaaggcatgttatggtagatgggaaggttaggacggataaaacataccctactggtttcatggatgttgtatcaattccaaagacgaatgaggacttccgcctcctttatgacacanaagggtcgtttccccttcatgccatcaaccgtgaataaaaccaattttaactctgtaaagttcggtctgtccaatttggtcaaaagagtatcccctaccttaatacctacgatggacgcacaatacgctacccagaccctttgatcaaagccaacgacaccatcaagcttgacttagagagcaacaaaattgttgatttcattaagtttgatgttgggaatgttgtcatggtcactggtggaaggaacaggggacgtgttggagtgattaagaacagggagaagcacaagggtagcttcgagacaatccatgtacaagatgctgctggacacgagtttgcaactcgtctaggcaatgtcttcacaatcggtaaaggaacaaagccatgggtttcgcttcccaagggcaagggtatcaagttgtcgatcattgaggaagcgaggaagaggcttgctgctcaggctgctgcttaaacctatcatatctggagttttttttttgtcaaagacttgttggatgaatgctggctggtcctgtcctagctt

SEQ ID NO: 190089 - DNA, 950 bp, Gossypium hirsutum
cggacgcgtgggcttcaaagaacgctttaccatcaaaaccagctagctaaatcaaccgcatttcaccaggatggctagaggattgaagaaacacttgaagaggctcaatgcccctaggcattggatgcttgacaagcttggtggtgcttttgcacccaagccatcatctggaccccacaaatccagggaatgcttgccattaattctcattctgcgaaacagattgaagtatgctctcacgtacagagaagttattgctattctcatgcagaggcatgtcatggttgatgggaaggttcggaccgataagacttatcctgctggtttcatggatgttgtgtccattcctaaaacaaatgaggacttccgtctcctttatgacaccaaagggcgtttccgtctccatgccatcacgggtgatgaaaccaagtttaagctttgcaaggttaggactgtccagtttggccagaaaggcattccatacctcaatacatatgatgggcgtactatccgctacccggaccctctgatcaaggctaatgacaccatcaagctggaccttgagagcaacaaaattgttgatttcatcaagtttgatgtcggaaatgttgtcatggttactggaggaaggaacagatgcctgttggtagttgttaataacagggtgtttcacatgggtttttttgataactattcatttttaggttgcttcttggttatgagtttgctactatgatttgtttatttgttcatattttgatatggatcgtaattcattgtgtttatcttgtttatggtcaatggttatatagttttccttttactgtagatgtcatgtaattttttttttttccttttatttctaaattgtttcttaagtatatttatattttatattatctattttttattaattttatatattatttttttcttatatatttttcttt

SEQ ID NO: 190090 - DNA, 536 bp, Gossypium hirsutum
atcaagctagaccttgaaagcaacaaaattgttgatttcatcaagtttgatgttgggaatgttgtcatggtcactggagggagaaacagagggcgagttggagtaattaagaacagggagaagcataagggcagctttgagacaatccatgttcaagatgctgctgggcatgagtttgcaactcgtctcggcaatgtcttcaccatcggaaaaggaacaaagccatgggtgtcccttcctaagggtaagggtatcaagttatccatcattgaggaagctaggaagaggcttgctgcccaaaatgctgcctaaactttagcataagacatccagatatgtattgctgcagtagtttattctaaagattagctggagctgtttatttatgaagttgtgagcaaaattttgagaactatttacttcttgcaatttatcttttttttctgtcgggtgatgttacctactttaccaccaggctttaaattatcgaatactcggctgtttcatgaatattagtgcttttgttggttaaatga

SEQ ID NO: 190091 - DNA, 389 bp, Gossypium hirsutum
tccacgcgtccgattttcttaagaaagaacaactttcagcggaaacagccgcttcctccaacatggctagagggttgaagaaacacttgaagaggctcaatgcccccaggcattggatgctcgacaagcttggtggtgcattcgcgcccaagccatcgtctggaccccacaagtcgagggaatgtttgccacttattcttattctgcgaaacagactgaagtatgctttgacatacagagaagtgattgctattcttatgcaaaggcatgttatggtagatgggaaggttaggactgataagacctaccctgcaggttttatggatgttgtgtcaattcccaagacaaatgaggacttccgtcttccttaatacccttaaaggccgttt

SEQ ID NO: 190092 - DNA, 1670 bp, Gossypium hirsutum
  unsure (1)..(1670): unsure at all n locations
cggacgcgtgggcggacgcgtgggctgaagctgccaaagctcgagaattcaaaccgaaacaaaaaagaaaaagagctcttaaacccccaaaatacgaaaagaaaaaatggctttgaattttaatgccatcgcctcgaaatctcagaagctcccttgctttgctcttccaccaaaggccacccttagatctcccaagttttccatgatctccaccattccttctggctccaaagaggttgggaatctgaaaaagcctttcacgcctccaaaggaggtgcctgttcagatcacccactccatgccgcctcacaagattgagatctttaaatctttggagggctgggctgagaacaacattctgactcacctcaaaccagttgagaaatgttggcaacccgccgactttcttccagatcctaattctgatggatttcatgagcaagtcaaagagcttagggaaagggcaaaggagatcccagatgattactttgtagttttggttggtgatatgatcaccgaggaagccctttcaacttatcaaacaatgcttaataccttggatggaactcgtgatgagacaggtgctagccttaccccttgggccatttggaccagggcttggactgctgaagaaaacaggcatggtgatctgcttaataagtatctctacttgtctgggagagtggacatgaggcaaattgagaggacaatccagtacttgattggatcgggaatggatcctcatacagagaatagtccttaccgaggattcatatacacttcgttccaagaaagggcaacttttatttcccatgggaatacaggcaggctggctaaggagtatggggatattaacttggctcaaatttgtggtagcattgcctcagatgagaagcgccacgagacagcctataccaaaatcgttgaaaagctgtttgagattgatcctgatgaaacagtcctggcatttgctgacatgatgaagaagaaaatcgccatgccggctgagttcatctatgatggcagagattataacttatttgaccactactcagctgttgcccaaagaatcggggtttacactgctaaggactatgttgatatagtagagcacctggtggatcgatggaaggtgaaggagctagctgggctttcagccgaggggcgtaaagctcaggactacttgtgttcacttccttcgagaattagaaggttagaggagagagcgcaagaaaaggccaaggaagcacccagtgtcccattcagttggatatttgatagagaagtgaaactttaggtcatgaaatacagttaagactcctgcaatgcatttgaggaaacaaacacgaagaaagctgaatgccaacttctctttatatatccgatgtaatagaggttgtatatgtaacaggaggaattgcgtggctttggttagggtagcacatgttttctggatgtgttgtgtccttaaaaaataaatccgatagcggcagctgtgatagttttagatgtttgttttcataatgtctgttatatcgttgtacgagtagtatgtgttgtttttgttgaaacaatcttcatatcttagtgataaatgataatgctgtgtagtcatagtttttagtttgcaataaaaaaaaaaaaaaaagggnananaaannnnnnnnnng

SEQ ID NO: 190093 - DNA, 886 bp, Gossypium hirsutum
  unsure (1)..(886): unsure at all n locations
cccacgcgtccggattactttgttgttttggttggtgatatgatcacagaggaagcccttccaacttaccagacgttgcttaacaccatggatggaactagtgatgaaacaggtgctagcctttctccttgggccatttggacgagggcatggaccgctgaagaaaacaggcatggcgacctacttaataagtatctctacttgtcgggaaaagtcgacatgaggcaaatcgagaagacaatccagtatttgattgcttcaggaatggactcgaagagcgaaaacaacccatatctgggagcgatctacacatcattccaagaaagggcaacttttatttcccatgggaacactgccaggctcgctaaggagtatggggacactgacttggctcaaatttgtggtagcattgcctcagatgagaagcgccacgagacagcctataccaaaatcgttgaaaagctgtttgagattgatcctgatgaaacagtcctggcatttgctgacatgatgaagaagaaaatcgccatgccggctgagttcatctatgatggcagagattataacttatttgaccactactcagctgttgcccaaagaatcggggtttacactgctaaggactatgttgatatactaaagttcctggtgaacaaatggaaggtgacggagttaactggactttcagccgatgggcgtaaagctcaggattatgtgtgtggacttccgccaagaattcgaaggctggaagagagagctcaaggaagggccaaggaagcacccanggttccattcanctggatatttgataaaaaaatccagctctaaggcttttttaagttttctgatgatgaaaaatggtgatttcagtttcctgcaacagaat

SEQ ID NO: 190094 - DNA, 697 bp, Gossypium hirsutum
  unsure (1)..(697): unsure at all n locations
ctcgtgccgaataattaaaagacagaggagtcgataaaggtaaaagccgtccaaaacccaaaccaggaaagccaaacgaaaagaaaaaatggctttgaattttaatcccatcgcctcgaaatctcagaagctcccttgctttgctcttccacgaaaggccaccctcagatctcccaagttttccatgatctccaccattccttctggctccaaagaggttgggaatctgaaaaagcctttcacgcctccaaaggaggtgcctgttcagatcacccactccatgccgcctcacaagattgagatctttaaatctttggagggctgggctgagaacaacattctgactcacctcaaaccagttgagaaatgttggcaacccgccgactttcttccagatcctaattctgacggatttcatgagcaagtcaaagagcttagggaaagggcaaaggaaatcccagatgatactttgtagttttggttggtgatatgatcactgaggaagccctntcaacttatcaacaatgcttaataccttggaggaactcgtgatagacaggtgctagccttacccctgggccatttgaccangctngnactgctgaagaaacagcatggggatctgcntantagtatctctactgtctggaaatgncatgagccaatggagacatcagtactgatgatcggatgatcn

SEQ ID NO: 190095 - DNA, 408 bp, Gossypium hirsutum
cccactcgtccggccaatgaagcacccagtatcccattcagttggatctttgatagagaagtgaaactttaggccatgaaatacagttaagactcctgcaatgcatttgtggaaacataacacgaagaagctgaatgcaaacttctctttatgtatccgatgtaatagtggttgtatatgtaatagggtagcacttgttttctggatgtgttgtgtccttaaaaaataatgccgatagtggcatgctgtgatagttttagatgtttggtttcatatggtctgctatatcgttggacgagtaggatgtgttgtttgtgttgaaacaatcttcatatcttagtgataattgttgagtagtcatagctttcattttgcaaatgacattgtgaagaaggaaaacatcaaaat

SEQ ID NO: 190096 - DNA, 2047 bp, Gossypium hirsutum
gggtttaccaaacaaaaaaaaatcatatttgattttatggttcgcaaatcgcagtagatctcactttgtagtttatccccttctgtctctttctttccctgcttcttgtgaaacagaaaaacacaaaaaataactacaaaatgggtatggcagaaaacactaacggaatggaggagggaacactggagattggcatggaatatagaactgtttctggagttgctgggcctttagtaatccttgataaagtgaagggacccaaatatcaagaaattgttaatattcgattaggggatgggacaaccagacgtggtcaagtccttgaagttgatggagaaaaagctgttgttcaggtttttgaaggaacatccggaattgacaacaaatatacaactgtgcaatttacaggagaggtgttgaaaactcctgtctctttggatatgcttgggcgcatttttaatggctctggaaagccaatagataatggtccacctatcttgcctgaggcatatttggatatctctgggagttctattaatcctagtgagagaacctatcctgaggaaatgatacagacggggatttcaacaattgatgtcatgaattcaattgctagagggcaaaaaatccctctcttctcagctgctggtcttccccataatgaaatcgctgctcagatttgtcgtcaggctggtttggtgaaacgtttggagaagactggagatctgcttgaggatggtgaagaagataattttgcaattgtgtttgcggctatgggtgtaaacatggagactgcacagtttttcaaacgtgactttgaggaaaatggctcaatggagagggtgacccttttcctaaacctggctaatgatcccacaattgaacgtattattactcctcgtatagctctcactactgcagaatacttggcatatgaatgcgggaagcatgttcttgtgatccttacagacatgagttcttatgctgatgctctccgtgaggtgtctgctgcccgagaagaagtacctggaagacgtggatatcctgggtacatgtatacagatttggccacaatatacgagcgtgctggacgaattgaagggagaaagggttctatcacacagattccaattcttactatgccaaatgatgatattacacatcccactccagatcttactggatatatcacagaggggcaaatatacattgacagacagctccataatagacagatatacccaccaatcaatgtgcttccatcgctgtctcgtttgatgaagagtgccattggtgagggcatgacacgcagggatcatgctgatgtgtctaaccagctgtatgcaaattatgctatcggtaaggatgtgcaggccatgaaagctgtggtaggagaagaggccctctcctctgaggatctgctatacctggagttcctggataaatttgagaggaaagttgttacccaaggagcatatgacacccgcaacatcttccagtcactcgatctggcgtggactctcctccgcatatttcctcgtgaacttctccaccgtataccagcgaaaactcatgaccagtactacagtcgagatgcaggtaattgaaggaggcaaagtgatgcccttagattgcctcctgcttggtagtgtttaaaagaagtttatttaccatcagcttcatctgctcgaataataattgttgaattccagttaggtttccccatgatagctcttgggctagtaaaacaagtgatcaaatatgacttcttttatctagaggaaaccagggggggataagaggaggaactataaagcccaccttgtgttacttgttattctatattcctatttattttttcaatatttgtaattcagtagatttggatttctatatccatatccaaacactgaccgagaccagtgcatcccaactgcattagctgcttttcttctcttcaatttattttcagagttttgctttgtatttgtattggtttttatgtgaagatgaaaataagggagacggtggacgacttgtgcctgtt

SEQ ID NO: 190097 - DNA, 2014 bp, Gossypium hirsutum
ctttactttatttgtcgtttactgtttcaatttttgatttttacacattcttctcccctcctatcctctgctcaatcgatctgttcacatcaactttgctatatcttctcatttttggatcaatttctcctttcgcgctttgaagttgatttcttgaagatgggagcggaaaagaacttcattgacatggaggagggaactctggagatcgggatggagtatagaactgtgtctggtgttgcgggaccattggtcattcttgacaaagttaagggtccaaagtatcaggagattgtcaatattcggttgggggatggaacaactcgacgtggtcaagtcctggaagttgatggggagaaagcagttgtgcaggtctttgaaggaacatctggaattgacaacaaatacacaactgtgcaatttacaggggaggtattgaaaactcctgtgtcgttggatatgcttgggcgcattttcaatggctctggaaagccaatcgataacgggccacctatcttgcctgaagcatatttggatatttctgggagttctattaatcctagtgagagaacctatcctgaagaaatgatacagacagggatttcaacaattgatgttatgaattccattgctagagggcaaaagatccccttcttttctgctgctggtcttccccataatgaaattgctgctcagatctgtcgtcaggctggtttggtgaaacgattggagaaggctggggatcttcttgaggatggtgaagaagataattttgccattgtgtttgcggctatgggtgtaaacatggaaacagcacagtttttcaaacgtgattttgaggaaaatggctcaatggagagagtgacccttttcctaaacctggctaatgaccccacaattgaacgtattattactcctcgtattgctctcactactgctgaatatctggcatatgaatgcgggaagcatgttcttgtgattcttacagacatgagttcttatgctgatgctctccgtgaggtttctgctgcccgagaagaagtgcctggaagacgtggatatcctgggtacatgtatactgatttggccacaatatatgagcgagctggaagaattgaagggcgaaagggttccatcacgcaaattccaattcttactatgccaaatgacgatattacccatccaactccggatcttactggatatatcacagaggggcaaatatacattgacagacagctccataatagacagatatacccaccaatcaatgtgcttccatcgctttctcgtctgatgaagagtgccattggtgaggggatgacacgcagggatcatgctgatgtgtctaaccagttgtatgcaaattatgccattgggaaggatgttcaggctatgaaagctgtggttggagaagaagctctttcgtccgaggatctgctatacttggagttcttggataaattcgagaggaaatttgtgacgcaaggagcatatgacactcgcaacatctttcagtcacttgatttggcgtggacactgcttcgtatatttcctcgcgaacttcttcaccgtatacctgcgaaaactctcgaccagtactacagtcgagatgcagctaattaaaggtgacacaaattcctgtcctaaattgccattgcctctatctccataatggttggtctagttttacaagttgcttgtttgcccttttttttttcttctcctgttttaattcataagttgcctgccatctgctcagataataatggttgaataccagcgagaatttgcagctcttctgcttgtaagcagagataccaaataaatattcttttggaacggtaaaatatggggataggaatttttttgttatttacttttggcaaccaaaccgatttggggttttactttacattgatgagaaaatacagtccatcaccagtgaattttagctgtttttcttttggggttttactttacattgatgagaaaatacagtccattaccagtg

SEQ ID NO: 190098 - DNA, 883 bp, Gossypium hirsutum
  unsure (1)..(883): unsure at all n locations
acttgctcaaatagaactgtccaactcaaactagagatatcttgtcattttgggtaattttctctcattcgcattttccaaaacataatcgagctttgaacttgaagatgggtgctgaaaagaatttcattgacatggaggagggaactctggagatcggaatggagtatagaaccgtgtccggtgttgctggaccattggtcattcttgacaaagttaagggtccaaagtatcaggagattgtcaatattcgtttgggtgatggaacaactcgacgaggtcaggtcttggaagttgatggagagaaagcagttgtgcaggtttttgaaggaacatctggaattgacaacaaatacacaactgtgcaatttacaggagaggttttgaaaactcctgtgtctttagatatgctagggcgcatatttaatggctctgganaacccattgataatggacctcctattttgcccgaggcatacctagatattactgggagttccatcaatcctagtgagagaacttaccctgaagagatgattcagacaggcatatcaacaatngatgtgatgaactcaattgctcgtggacagaagattcctctnttttctgctgctggtcttcctcataatgagatagctgctcaaaattgtcgtcaagcaggtctcgtaaagcgattggaaagtctgatatctccttgtgatcaggaaaaaattantttgccatgggttgctggcttgggggacatgggaccgctcattttaagaagatttgtgaaatggtcttggaagatgactttttgactgcaatgccctcttgacgatttaccttgattgctaaatgcgaattgtttaatggacatgtcgttttcatatgtcttccattt

SEQ ID NO: 190099 - DNA, 930 bp, Gossypium hirsutum
cggacgcgtgggcggacgcgtggggttttgagtgaggaaaaaatttctctggaaacaaagcaactatcaactacgtttacctcagatctaaaacaccctcgtctcagatccactaaattcaccatgtctactactttcagcggcgatgaaacggctcccttcttcggcttcctcggcgccgccgccgctctcgtcttctcctgtatgggagctgcatatgggacggctaagagcggtgtgggtgtggcttcaatgggtgtgatgaggcctgagttggtgatgaaatccattgttccagttgttatggctggtgttttgggtatttatgggttgattattgctgttattattagtactggcatcaatccaaaggccaaatcgtattatctttttgatggttatgcccatctttcctctggtcttgcttgtggacttgctgggctttcagctggaatggcaattggaattgttggtgatgctggtgtcagagctaatgcacagcagccaaaactttttgttggaatgatccttatcctcatctttgctgaagctttggctctttacggcctcatcgtgggcatcatcttgtcttctcgggctggccaatctagagcagagtaaagcgctggtagagctgttttagtagtattcttttattacttatcgtgtttattatgattggacatcaagtggtgggtttaatgagcagtgtctctttcctcttggtagaagtagaattgagttctctctctaataaattgtatggttattgtttggtaagtgtatttgcagtgtgtggaacactattaattttggagagataatatatctatgtatttaatccatagcttttagatggttggtggatatatttatttttggtacgtatcaatattgatgtatcaaaacatatcacactacttgttaaac

SEQ ID NO: 190100 - DNA, 886 bp, Gossypium hirsutum
atcagaattagattgggataaaagatcaaacaaagctatccactcctttttctcagatccgaaacgccgtcgtcttagtcggaaccacttcgatccacaatgtcttctactttcagcggcgatgaaacggcaccgttcttcggcttcctcggcgccgctgctgctctcgtcttctcctgtatgggagctgcatatgggacggctaagagtggtgttggtgtggcttcaatgggtgtgatgaggcctgaattggtgatgaaatctattgtaccagttgttatggctggtgttttgggtatttatggcttgattatcgctgtcattattagtactgggatcaatcctaaggccaaatcgtattaccttttcgatggttacgcccatctttcttctggtcttgcttgtggccttgctgggctttctgctggaatggcaattggaattgtcggcgatgctggtgtcagagctaacgcacagcagccaaagctttttgttggaatgatccttatcctcatctttgctgaagctttggctctttatggtcttattgtcggcattatcttgtcatctcgggctggacaatcccgagcagaataagataactcaagtgctgcatagtattctcttattgattttatctgtagcactagaccgaaaaccatttcgatcaatatcaggttagttatggttggacagcaagtgccgtgttcgcacacaaatattgatgaacaatttttttttggtggatgctcttttcctctttgtagtagtagaaattgagtttctctttaagtcttaataaaatgttttggagcttttccttacttgattctttttcagcactgtatctttttataagttgaaactaactaatgggttaatttga

SEQ ID NO: 190101 - DNA, 658 bp, Gossypium hirsutum
  unsure (1)..(658): unsure at all n locations
cccacgcgtccgcccacgcgtccgcccacgcgtccgcaaacactgccttgaaggaaagcaactccgagagtttcgactgttctcagatctaaacgacaacgtttccagatccacaatggcttctacattcagcggcgatgaaacggctccgttcttcggctttctcggcgccgccgccgctcttgtcttctcttgtatgggagctgcatatgggaccgctaagagcggtgtcggtgtggcatctatgggtgtgatgaggccagaattggtgatgaaatcgattgtacccgttgttatggctggtgtcttgggtatttacgggttgattattgctgtcattattagtaccgggatcaatcctaaggcaaaatcgtattaccttttcgatggttacgcccatctttcatctggtcttgcttgtggccttgccggtctttctgctggaatggctattggaattgttggtgatgctggtgtcagagctaatgcacaacaaccaaaactttttgttggaatgatacttatcctcatctttgccgaagctttggctctttacggccttattgtcggcatcatcttgtcttcccgggctggccaatctagagcagaataagataccggnggaattggggtagattcttttatttgcttatattgg

SEQ ID NO: 190102 - DNA, 1063 bp, Gossypium hirsutum
actactcaactttctctctgaattcctccaagttaggagtttggagagtggtcaccgctgaagcaaaacaaatttcttgggggaaaagaaaatggagttttccatgatttttatgattagcttctctgtattgattttgtgctcctcactggcatatggtcaagttgcaatgagcacaaacccgacaccgtcaccctcaccagcaccggcaccgacaccggcatacacaaatatcaaagacttactctctgtggcaggtccatatcacaagttcctgggctacctcgagtcgactaaattaatcgacacgttccaaatccaagccaacaacacggttgaaggcattacgattttcgtaccgaaagacagcgcattcaaggctcttacgaagccttcattgtcaaatctaactgatgatcagttcaaatcagtgctcctttaccatgccttgccacgatactatgcccttgcggacttcaatgacctaagtgagaaaggccctattagtacacttgctggtggccaatacactttgcaattcaacgatgagtctggtaccgtccgcctcgattccggatggagcaaaacaaaagtcactagcgcagtacatacgtccaagccagtcgcagtctatcaaatcgataaggtccttcttccggaggccattttcgggaccgacatacctccgacacctgcacctgccccggctcttggtattggcccatcagctgacactccatcagcagcaaaatccgaagaaactggttcctcatcaaagccttcgttttcgggttcatcatctcctaggatcatgatgaactcgggcatttggactcagctggttttggcattcttaggtggatggctggttctctttttctgagacgttataattttatgttgaaaggggggcacatatggggttctcaattttctgtgatttttagaccccattttctttcatatatatgttactgtgtgttattataaaaagaatgttattgtgtgttaagaatatggttgtgttataattaccatttcaattttaatggagttttgcctt

SEQ ID NO: 190103 - DNA, 759 bp, Gossypium hirsutum
  unsure (1)..(759): unsure at all n locations
aaaaaagaggggacccccgggcctggggaatttcggcccaagtccaaatctattccaccaccacggttgagggcattacggggttcgtaccgaaggacagcgcattcaaggctcttacgaagccttcattgtcaaatctaactgatgatcagttcaaatcagtgctcctttaccatgccttgccacgatactatgcccttgcggacttcaatgacctaagtgagaaaggccctattagtacacttgctggtggccaatacactttgcaattcaacgatgagtctggtaccgtccgcctcgattccggatggagcaaaacaaaagtcactagcgcagtacatacgtccaagccagtcgcagtctatcaaatcgataaagtccttcttccggaggccattttcgggaccgacatacctccgacacttgcacttgccccggctcttggtattagcccatcagctgacactccatcagcagcaaaatccgaagaaactggttcctcatcaaagccttcgtcttcgggttcatcctcacctaggatcatgatgaactcgggcatttggactctgctggttttggcattcttaggtggatggctggttctatttttctgagatgttataattttatgttatggggttctcaatttactgtgatttttagaccccattttctttcatatgtatgttactgtgtgttactatacaaagaatgttattgtgtgttnnnnnnnnnnnnnnnnnnnnnnnnnnnnnnnnn

SEQ ID NO: 190104 - DNA, 639 bp, Gossypium hirsutum
  unsure (1)..(639): unsure at all n locations
cctcgtgccgcgacgcccagcaatagtactactactccaagcaagtattttccttacacgtttgtttttcttgtgattaatcgatatggctagctcaatgtcccttaagcttgcatgtgtggtggtgttgtgcatggtggtgggtgcacccctggctcaaggggccgtaacctgtggtcaagtcacaagctccctcgcaccctgcattaattacttgacagggaatggtgctggtgccgttcccccaggttgctgcagcggcatcaaatctctcaactccgccgcccaaacaacaccagaccggcaagcagcttgcaaatgcatcaaaagtgcggccgccggcatttctggcatcaactttggccttgcaagcggactcccaggcaagtgcggtgtcaacatcccttacaagatcagccctagcactgactgcaacagcgtcaagtgaagttttggcatggaaagttcaccagctagtggaagccaaaataacgatagctacagaataaatatggatgttaaaattccagagttatgcgttgtgtactatgccgctttatgcgactacgtaatataatctttatctacaaattagtatcaaaaaaaaaaaaaaaaaattttacaaccgggcgggggnnn

SEQ ID NO: 190105 - DNA, 691 bp, Gossypium hirsutum
  unsure (1)..(691): unsure at all n locations
accctcaacccctaaccacgcaacaatcagcaatactccaagcaaccattttccttacaagtttgtttttcttgtgattaatccatatggctagctcaatgtcccttaagcttgcatgtctgttggtgttgtgcatggtgatgggtgcacccctggctcaaggggccataacccgtgctgatggcttagtcggcctcccacgctgccttccttttttgtcagggaatggtgatggtgctgatgccacaggttgctgtgccatcgtcatgaatgccttgggatcgctctgtggtgatacataggaaccgatctagcttgaaatcgggttcggatttgggtggaatttcaaattggtgtgttatggaatcccaacttaatcgtgtttaagggtgggatccaattgtgtgatacattacagagcatggttgtggattgttttctcatatgttttgattgacttgcttgctacattggatgatttgataaggtgaccagtttacctgggtatccaaccatcatcggattactttttaataattttttgtttcttgtttatgttgtctgtctttttgtttcttgatctataatattatatttggccaaatttctcattttccagatgtagcttatatatatattcaataaagtatattggtttagcnnnnnnnnnnnnnnnnnnnnnnnnnnnnnn

SEQ ID NO: 190106 - DNA, 1442 bp, Gossypium hirsutum
acccacataatcgaacatatattatgataagaaacaactctatcactttctttgagataaatatttgttgctctcctgctcctcctctctctatacacaaaactgacccccaactattttataaatcaaactgagaggaaaataatgccccaacatgtaatgaaatcaaatctaccaatggcctattattttttagatggtatcagcttcagaccggcttgctctgccgcggtggtgtcgcttcccgtggtgacgcctgcctccaaacgtgactggatcgaaccttttcagtctttcggcttcgcggggattgatcacacactctacaggtggaactttgtatctggtctggtcatagcagtaagaatatgtcatgtgcttcctcctaaagctatccattttgcttctttgtgatggggtgatagtggcagaaagttccaaactttgagaggtggtgtcacacttcttcgacgaaaattcaatgggatccactgcgcagccgtggaggatcaggtcggaaaattccgctacgtaaggagcgtatttgtaattgactctatatttgccaccattagtagcccaatcagacccatcccatattgtagcatacaacgacatcggcttagagggaaagtccccacccattgcagctgttcttttaaactctctaatggggatgttgtctatataaaatatgatttgagaatcagtccagagaatagtgtactgatggaaatcatcagcagggtcgaaccaaagattgtatctttcttctctgccaacactggtgcttccattgccgtaaatattggtctgaatcctccaatctttgcctctgatgttacccaagaactcaaaatctatttcatcgtggttcttctcgaacatatcaccatttgacatatagaaagcaaccacaactccagcagtataatcagcaggtaactttattgaggcactgaagtaaccatgcaagtaaaggtcttgagacacaaatccagaccctgttctctcattcaaagacaagtgaacagctttaccatctctatggagaactagattatcatctccaaacaactgactatacccttcatcaaatgacagaattggtatcctttttccaaacccacaaacaaaaacagaaaccaaagtcaaaaccagaaacaaagaaggtaacttggtcatcgtattatcccttgaatctctttttttttccctttgatatatggtcgtatttttgttgctctagcaccctgagattatataagacaaagataagagtataaaagaaggatgattttttatatgtattatgagaaaataataaatgtttgagaaagaaagaagaaaggaataatctctagagctatgggaggggggcgatggagagccggaaaaggctattgaaatgaaagcatagcgcaggtcattggcgagtgaga

SEQ ID NO: 190107 - DNA, 638 bp, Gossypium hirsutum
  unsure (1)..(638): unsure at all n locations
agggcgtnncccgtgcgnaatatggttacgggcntctgttcaagtcnacggtatcgatgagcttgacatcaaattcggcatttgccttacacgtttgtttttcttgtgattaatcgatatggctagctcaatgtcccttaagcttgcatgtgtggtggtgttgtgcatggtggtgggtgcacccctggctcaaggggccgtaacctgtggtcaagtcacaagctccctcgcaccctgcattaatttcctttgaaaggggacagtggtgctggtgccgttcccccaggttgctgcagcggcatcaaatctctcaactccgccgcccaaacaacaccagaccggcaagcagcttgcaaatgcatcaaaaattccggcgccaaccgcggggaactccaattccccccaaaatgaatcctaataagcccgcccactgggcgtccttttaaaaactccttaacgggaaaaacccggcgttaaccaacttaatccccttggaacaaatccccccttccccaactggggttataaccaagaaggccgcaccgaatgcccctcccaacaattgcgcaacctgaattgccaatgggacacgccctgtaaccgcgcattaaaccccgcgggtgttgttgttacacccc

SEQ ID NO: 190108 - DNA, 655 bp, Gossypium hirsutum
  unsure (1)..(655): unsure at all n locations
gtattggtctggatcatgccaatccccgcctcggaggccaccgaagaactccacatgaatttcatcgcgcttcatctcgaacatatcaccagccgacatatagaaagcaaccacaactccagcagtataatcagcatgttaccttatagaggcaccgaagtaacgatgcaggtaaaggtcgtgagacacgaatccagacccagttctttcactctaagaagagtgtacaacgcggccctgtgggcgggggtacaagannnnnnnnnnnnnnnnnnnnnnnnnnnnnnnnnnnnnnnnnnnnncggcatttctggcatcaactatggtattgcaagcggactcccaggcaagtgcggtgtcaacatcccttacaagatcagccctagcactgactgcaacagcgtcaagtgaagttttggcatggaaagttcaccagctagtggaagccaaaataacgatagctacagaataaatatggatgttaaaattccagagttgtgggttgtgtactatgccgctttatgcgactacgtaatattaactttatctacaaattaatatcactcgtctccatttcccattttatatcaaaaaaaaaaaaaaacgtcgacgcggccgnnnnnnnnnnnnnnnnnnnnnnnnnnnnnnnnnnnnn

SEQ ID NO: 190109 - DNA, 374 bp, Gossypium hirsutum
  unsure (1)..(374): unsure at all n locations
ccggcattcctggcatcaactatggtattgcaagcggactcccaggcaagtgcggtgtcaacatcccttacaagatcagccctagcactgactgcagcagggttaagtgaagttttggcatggaaagttcaccagctagtggaagccaaaataacgatagctacagaataaatatggatgttaaaatccatccatagggatagcagaggagttatcctaatttagagttgtgcgttgtgtactaggtcgctttttgcgactatgtaatattatctttatctacaaattaatatcactcattattttgtgtttcttctaaaaaaaaaaaaaaaaaattctgcggccggaattcttccnnnnnnnnnnnnnnnnnn

SEQ ID NO: 190110 - DNA, 426 bp, Gossypium hirsutum
gcagaattttttttttttttttttgagtaatcatgattttcattattatttgtccttttttttgttgatataaaatgcttgagagaagggtatattttttttttttttttagaagaaacacaaaataatgagtgatattaatttgtagataaagatagtattacatagtcgcaaaaagcgacctagtacacaacgcacaactctaaaattaggataactcctctgctatccctacggatggattttaaacatccatttttattctgtagctatcattattttggcttccactagctgatgaacattccatgccaaaatttcacttgacgctgctgcagtcagtgctagggctgatcttgtaagggatgttgacaccgcacttgcctggtagtccgcttgcaaggccaaagttgatgccaggaatgc

SEQ ID NO: 190111 - DNA, 402 bp, Gossypium hirsutum
cactgaagtaaccatgcaagtaaaggtcttgtgacacaaaccccgaccctgttctttcgttcaaagacaagtgaacagctttaccatctctatggataactagattatcatccccaaacaactgattatatccttcatcgaatgaaagaattgggagcccttttccagacccagaagcaacaatagaaaccaaactaaaaaaaaccaaaaacaaacaagaacccagataaggtaacttcatcaccattttttaaaaaaaaatcctctctggaatatgtggttgtaaatttagggtgtttgaaaataaagattatatatgaagagaaagagtattatggaagaagagcgggaagagattgttgagaatgaaagaagaagaaaggaataataatatgaataatc

SEQ ID NO: 190112 - DNA, 344 bp, Gossypium hirsutum
cggcattactggcatcaactttggccttgcaagcggactcccaggcaagtgcggtgtcaacatcccttacaagatcagccctagcactgactgcaacagcgtcaagtgaagttttggcatggaaagttcaccagctagtggaagccaaaataacgatagctacagaataaatatggatgttaaaattccagagttatgcgttgtgtactatgccgctttatgcgactacgtaatataatctttatctacaaattagtatcactcatgtctccattccccttctttcaagcatcttatatcaacattcacgtgatccatatttcattccttaaaaaaaaattaag

SEQ ID NO: 190113 - DNA, 294 bp, Gossypium hirsutum
cggcatttctggcatcaactatggtattgcaagcggactcccaggcaagtgcggtgtcaacatcccttacaagatcagccctagcactgactgcaacagcgtcaagtgaagttttggcatggaaagttcaccagctagtggaagccaaaataacgatagctacagaataaatatggatgttaaaattccagagttgtgggttgtgtactatgccgctttatgcgactacgtaatattaactttatctacaaattaatatcactcgtctccatttcccattttaaaaaaaaaaaa

SEQ ID NO: 190114 - DNA, 420 bp, Gossypium hirsutum
gcgtagatactcacaaaacaagtctctgtagctttaacaagaaatggcgaaagaattcacggtgccgccggtggtctgcccctccggcagcggagtcaacccttccgttggaaacatcaaccaacgccgcgtacccactgctccattccaaccctcacgccctccttcctcctcttccgctttacccttcatgtctttcgatatgggttcggccacatcgtcgtcggtatccttaggcggttcaatctcctcctccgcagcaaccggatccgcttcattcgaagacgaagagccccttctcgatgaactcggtatccacccggatcaaatctggtacaaaaccagatccatcctcaaccctctgcgggggaactcgacggcccataaagactccgacttatcaggccctatctttctcta

SEQ ID NO: 190115 - DNA, 300 bp, Gossypium hirsutum
agcaatagtacttctactccaagcaagcattttccttttcttgtgattaatcgatatggctagctcaatgtaccttaagcttgcatgtgtggtggtgttgtgcatggtggtgggtgcacccctggctcaaggggccgtaacctgtggtcaagtcacaagctccctcgcaccctgcattaattacttgagagggactggtgctggtgctattcccccaggttgctgcagcggcatcaaatctctcaactccgccgcccaaacaacaccagaccggcaagcagcttgcaaatgcatcaaaag

SEQ ID NO: 190116 - DNA, 464 bp, Gossypium hirsutum
ctccaagcaaccattttccttacaagtttgtttttcttgtgattaatccatatggctagctccatgtcccttaagcttgcatgtctgctagtgttgtgcatggtggtgggtgcacccctggctcaaggggacgtaacccgtgctgatggcgtagtcatccttccacgctgccttcctttattgatagggaatggtaatggtgctgatgctgatgttgatgccccagcttgctgcgacatcgtcaggggtctcttgagctcgctgctctgtggtggtgtttaggaaccgatctagcttgaaatcgggttcggattcgggtggagtttcaaattggtgtgttatggaatcccaacttaatcgtgtttaggggtgggatccaattgtgtgatacattacagagcatggttgtggattgttttctcatatgttttgattgacttgcttgatacattggatgattcgat

SEQ ID NO: 190117 - DNA, 821 bp, Gossypium hirsutum
  unsure (1)..(821): unsure at all n locations
ccgggntggaangangcgtcggcgctttcttattctcaatatcacaaatcctcctataaaaaccaaactcctaaaccctcatactccactccgctcatcttcggtcgctccgccgtttcgcatttcgtctttctctctccaatggcttctattgctggttcatccatctccatgcaacctcgcccctttgctaaaggcagtgtttctgggttgaaattgggttcatttatgaaccagggaagaagcaccctctcatttacgatgcgtccaatgcctgctcgcttgcagatctgctgtgctgccaaacaagagaccgtggataaggtatgtgaagtagtaaagagacaattagctttagacaatgacaaaccaatcaccggtgaatcaacatttcttgatcttggagctgattctcttgatacggttgagattgtgatgggacttgaggaagaattcggaatcacggtggaagaggacaatgcacaatccatcacaactgttcaagatgctgcagaacttattgagaagctgtgcagtgagaaaagtgcctagaaaacaaggatcgcagttggttggtttatttgccgatatttgatattcacatactagaccgcaaacttgggggaaatcatgtgtgaacttttattatgttgaatatgtaggaaatttcgtaataaagttgttgggattcttagttaaattgtggaacttaaaatgtgtcatttcgttttaccgtagtggtttatgtagaagttttttgtttaatcaagctgcatatctcggttgagggttctatttatgaaaaaacacccccacacatt

SEQ ID NO: 190118 - DNA, 1114 bp, Gossypium hirsutum
gtggaaagccgataacgtcaacgtcgtcaagaacagaagaaggaacgaagcaaaggcagctcttattctaatacaacacgcttaaggaaaaatcgccaaataaaataccactaccctcaaggaatctacagatctctgtccctctttctctacgtctcaaaccctaattccttaatttttacagaagatcgggggtttaatcgcggagaatcaaccatgtttaacaggcttttcgggaaacccaagcaggaagcaaatgctctaaccacgttagacaaattaaatgagacccttgaaatgcttgagaagaaggagaaagtacttgcgaaaaaggctgctgctgaggttgaaaaggccaaggaatttgccaaagggagaaacaagagagcggctatacagtgcttgaagaggaagagactatatgaacagcaaatagagcagcttggaaacttccagcttcgtattcatgatcaaatgataatgttagaaggtgctaaagccacaactgaaactgtagatgcattgagaactgggagctgctgcaatgaaggcaatgcagaaagcaacgaatatagatgatgttgacaaaacaatggacgagatcaatgaacaaaccgaaaacatgaaacagatcctagaagcactgtcaactcctattggagctgcagctgattttgacgaggatgaattggaggcagaactcgaagagcttgaaggtgctgagttagaagaacagcttctccagcctgcaacaacagctcctgcagcaccaattcatgtgcctgctggaaggcaaccggctcggcctattcctcaaaagcacacagccgaggaagatgaactcgccgcattgcaggctgagatggctctttaaggcttacagtagagaactgatttttttttttgcggggcctacggaaaagagacgccctatttgtattactgaatgtgcgcattttatgtttgacaaacaatgtacaaaaattatttgtactttgcttccttcaaaaaaaaaccattgattctaagtccttgtacctatattgacttggcttcgtatggcaacaaacttgtgacaaaatcctattggaaaatgccttttgtgttttttagc

SEQ ID NO: 190119 - DNA, 1664 bp, Gossypium hirsutum
accactccgtaaaccattgcgttgtggctttgcatattggactgcgctgatatagggatccgctataaatagtgtcagttagcgttctacattcttcatcaagcacgaaaagcgaaatacacaagaaaaaaaaaaaaaaaacaagtgatctgataaattgaagactttatttctgttaacatccattatgagtactgctggtcaagtcatccgttgcaaagctgcggtagcatgggagtcggggaagccactgtcaatagaggaagtggaagtggcaccaccgcagaaggatgaagtccgtattaagatactcttcacttctttatgtcacaccgatgtctacttctgggatgctaagggacaaaaccctctgtttcctcgcatactaggtcatgaagctggagggattgtggagagtgtaggtgagggggtgactgatctaaagccaggtgatcatgttctccccatcttcacgggggaatgcaaggagtgtccccattgcttgtcagaagaaagtaacatgtgtgatctcctcagaatcaacactgataggggtgaaatgattaatgacggaaaatccaggttttccattaatgggaagcctatctaccacttcctaggcacctctactttcagtgaatacactgttgtccatgtcggccaggttgccaagatcaatcctgaggctccgcttgataaagtttgtgttctaagctgcggaatgtccacagggtttggtgccactgtgaatgtagctaaacccaaaaagggtcaatccgttgcaatatttggactaggtgctgtcggtcttgctgctgctgaaggagcaagagtttctggggcttccaggatcattggtgtcgatttgaaccctagcagattcgaactagccaagaacttcggtgttacggagtttgtgaatcccaaagatcacaacaaacctgttcaagaggtcattgctgagatgactggtggaggagtcgaccgcagtgttgaatgtaccgggagcatccaggccatgatttctgcatttgaatgtgtccacgatggttggggagttgcagtgcttgtgggggttcccaacaaagacgatgcattcaaaactcatccagtgaatctactgaatgaaaggactctcaagggtactttctttggcaactacaaacctcgaactgatattcctgctgtcgttgagagatacatgaacaaggaacttgaacttgataagttcatcactcactctgttcccttctctgagattaacaaggcatttgagtacatgcttgctggcgagggcctgaggtgcgtgattcgcatggatgcataaggattggctggccatggatgaagggctttttgttaagtatatgtgcattttaagggaataaataatgtaatataatgctacatcgttgtgctgtttttaatggtaaatttttatcttatcatgcatttctatgatcctctctcagttgctttgctctgcatgcttcttgttggagatagaattttcaaaaaatcattttaatttgttttagaaaatggaacatattgctgagcaaggtttgatgggataatccctaataacatgaaaatgtcatatgtgtaagatgtctaaacgaaacaaatggatgacatgttggaattaaaatgaaagattatat

SEQ ID NO: 190120 - DNA, 675 bp, Gossypium hirsutum
cccacgcgtccgcccacgcgtccgcccacgcgtccgcggacgcatgggtggacccacgcatacatggacgcgtgggtcaagaggacattgctgagatgactggtggaggagtctaccgcaaggttgaatgtaccgggagcatccatgccatgatttatgcatttgaatgtgtacacgatggttggtgagttgcagagcttgtggaggttcctaacaaagacgatgcattcaaaacacatacagtgaatctacttaatgaaaggacttttaagggtactttatttggcaactacaaacactaaactgatattcctgctgtcggtgagagatacatgaacaaggatcttgaacttgataagctcatgtctcactctgttcccttctctgagattaacggcgcgttggagtacatgcttgctggcgagggcctgaggtgcatgattcgcatggatgcataaggattggctggccatggatgaagggctttttgtcaagtatatgtgcattttaagggaataaataatgtaatgtaatgctacatcgttttgctgtatttaatggcaaatttttatcttatcaaaaaaaaaataaaaaaatataataaaaaaatatattaataataataataaaattaaaaaaatagtggtttggtttggaaattatattttaataatt

SEQ ID NO: 190121 - DNA, 747 bp, Gossypium hirsutum
gatcattggcattgatttgaaccccagcagattcgaacaagccaagaaattcggtgttacagagttcgtgaatccaaaagattacaacaaacctgtccaagaggtcattgttgagatgactggtggaggagtcgatcgcactgttcaatgtacggggagtatccaggccatgatttccgcatttgaatgcgtccacgatgggtggggagttgcggtgcttgtgggtgttccaaacaaagacgatgcgttcaaaactcacccagtgaatctgctgaatgagaggactctcaagggtactttctttggaaactacaaacctcggtctgacattcctgctgttgtggagaaatatatgaacaaggaacttgagctggataaattcatcacacacactgtgcctttctcagagatcaacaaggcatttgagttaatgcttgcgggtgagggactgagatgttgtgattcgcatggatgcataaggaatggatagcctggattgatcatccatggatgaagggcttttctgtagggtttggatttcctcatagtttacggacacaatatacaccacctatttaaatatttttaaaagtccttgtttcttgtttaatcaattacccctaaaaaatttagtggctaaaaagttgtctgagattttacatactttgagcttgagtttttccttttgtatatgcacatgtgcaaagtgtgattaaggaaataaataaagtggtacatggttttgct

SEQ ID NO: 190122 - DNA, 1027 bp, Gossypium hirsutum
  unsure (1)..(1027): unsure at all n locations
cccacgcgtccgcccacgcgtccgaagtagagcttctttctagctatatccttatcagctttcaaagatggcaggaatcgcctttggtcgctttgatgattccttcagtttggggactgtcaaggcctaccttgctgagtttatctcaactttggtgtttgttttcgccggcgttggctctgccattgcttacaacaagttgacaactgatgcagccctagatcccgatgggctagtcgccattgctgtttgccatggatttgctctctttgttgcagtggctatcggtgccaacatctcaggtggccatgtcaaccctgcagtcacttttgggttagctcttggtggccaaatcaccatactaactggcatcttttactggattgcccaacttcttggatccattgttgcttgcttcttgctcaaggctgtcactggtggcttgacagttcctatccacggtcttggagctggagttggagctattcaaggagtggtgatggagatcatcatcacatttgcattggtttacacagtgtatgcaaccgcagctgacccaaagaagggatcactcgggaccattgcacccattgccatcggcttcattgttggtgccaacatcttggccgctggtccattctctggtggatccatgaacccagctcgctccttcggaccagcagtggctagtggcgacttcaacggcatatggatctactgggtgggaccactgatcggtggcggattgtctggtctcatctatggaaatgtgttcatgaactctgaccatgcaccattgtccaatgacttttaatcaagttattctcaggacagtctaatttgcttaatttgatcttttaatccattgcttagtgtaataaaatggcacttcttgttgttctttcctcttttagctttgggtttggttttgttttgttattgtttgtaaagttattgtcgccaatcgttgctatcgtggaaatgaatgaggtggttttttttttatttccnnnnnnnnnnnnnnnnn

SEQ ID NO: 190123 - DNA, 633 bp, Gossypium hirsutum
  unsure (1)..(633): unsure at all n locations
ttttatcgcgtccgcgcttttcagccgcagccatggtgaacgtacctaagaccaagaagacctactgcaagagcaaggagtgcaggaaacacactttgcacaaggtcacacagtataagaagggcaaggatagtttggctgcacaggggaagcgtcgttacgaccggaaacaatccggttacggtggtcagaccaaaccagtgttccacaagaaggcaaagaccaccaagaagattgtgctaaggctgcaatgccaaggttgcaagcacgtttcacaacatccgatcaagaggtgcaagcactttgagattggtggagacaagaaggggaaaggaacatctctgttttaaacgtgttattcatggtatcttgttatgtttgctttactttatatggagtagtttgaacttacaagactgtaatggaattttgttaaatttgcttagtttcttctgatgatgttttgcagttttctaactgttaccaaatgtttcactggcaattttgagttcaatttgttttaaaaaaaaaaaaannnattaaccntaaaataatttattttttttcttattatattatattctttttatttctttttttatttctttactatcatttttttttttaaatttt

SEQ ID NO: 190124 - DNA, 558 bp, Gossypium hirsutum
cccacgcgtccgcccacgcgtccgcgaaaaagagctcgggtcatctctcaccagccgcagccatggtgaacgtacctaagacgaagaagacttattgcaagagcaaggagtgcaggaagcacactttgcacaaggttacacagtataagaagggtaaggatagtttggctgctcaagggaagcgacgttacgatcgcaaacaatcaggttatggtggtcagaccaaaccagtcttccacaagaaggcaaagaccaccaagaagattgtgctaaggctgcaatgccagggttgcaagcatgtctcacagcatccgatcaagaggtgcaagcactttgaaattggtggagacaagaaggggaagggaacatctcttttctagatgtgatgatattcatgtcaaattttatgttatgggtttttacttggaacttaacgcagaatggagttttgttaagtttggtattagtattctaatgttgtttttaagaggatattgtgttttttaaggttaatggcattggtcacactcatcgatagcaaaaaaaaaaaaaaaaaaa

SEQ ID NO: 190125 - DNA, 951 bp, Gossypium hirsutum
tttcacgcgtccgctttactatctttcctcctcaagaaactctctactacccagtataagccatgagtcgtcatcctgaggtgaaatgggcacaaagaaccgataaggttttcattacggttctattacctgattcaaagaatgcaaaagttaaccttgagccggaaggagtgtttaatttctctgctactgctggaactgacaataacacatatgagttgaagttggatctttttgataaggtcaacgtggaggaaagcaaaattaatattggagttaggagcatattctgcatcttggagaaggctgaaaaagtgtggtggaaaaaattattgcgcggggatggcaaagccccccattacgtcaaagtggactgggacaaatgggtggatgaagatgaagacaagggtcttggtgatcttgacttaggaggaatggacttctcgaactttgggggaatgggcggcatgggcgacatgatgggcggcatgggcgatatgatgggcggcatgggtgacatgatgggtggcatgggtgtggcatggatgagtttgaggacagtgatgatgaagggcaagaagtgacaaagccggatgacaaggccgaaggagatgcaaagcctgaggagcatggcatcggatcttcagagaaaaaggaggctgaaccgagcacgtgaaatcattttagctgaaacccgaaatgctggtaactatagttatgggtgatattttgctctttccctgtcatggatgggggagaggggatcaaagcctgatgtgtttttaactgcgtgagattaaaaaatttgcggaaaagatatgtgttgttgtgtcaggtggagaaacagtgttagctctttgacatgacttaggatggatggtgtacctgtacctttaaatttgtttgatggtgatcatttagatatgagataatggatttcatccttgttgc

SEQ ID NO: 190126 - DNA, 521 bp, Gossypium hirsutum
ggagtggccgcctcctaatttacagttctcaggttctctcgattcagccgtagccatggtgaacgggccgaagaccaagaagacttattgcaagagcaaggagtgcaggaagcacacattgcacaaggttacacagtataagaagggtaaggatagtttggctgctcaagggaaacgccgttatgatcgcaaacaatccggttatggtggtcagaccaaaccagtgttccacaagaaggcaaaaaccaccaagaagattgtgctgaggctgcaatgccagggttgcaagcatgtgtcgcagcatccgatcaagaggtgcaagcactttgagattggtggagacaagaaagggaagggaacatctcttttctaaatgttgtgttcttgttcttgtgtttttgttggttttgagttcaatgctagtatggaatttttgtccaagttttgatttttaattttctcatgttataaaaacattaatgtgaaattcacattttattgttaaaaaaaaaaaaaaaaaa

SEQ ID NO: 190127 - DNA, 1346 bp, Gossypium hirsutum
ccacgcgtccgcccacgcgtccgttcaaaaccaactaaaaacatggcaccacaccttaatattgttccttccatgtttgtacttttattattattcatttcagcctctaaagttcaatcagatgcttttgatgttgttgccaagtttggcgcaaaagctgacgggaaaacggatttgagtaagccatttttggatgcttggaaagaagcatgtgcctctgtaactccatcaacagttgtgattcctaaagggacatatttattatcaaaagtaaacttagaaggtccatgcaaggctcctattgagattaatgttcagggcactatacaggctccggctgatcctagtgctttcaaagaccctaattgggttagattctatagtgttgaaaatttcaaaatgtttggcggaggaattttcgatggtcaaggaagcattgcttatgagaagaatacagatccccacaatcgtgaatttcgttccaaacttcccgttaatataaggtttgactttctgaccaatgcattgatacaagacataactagcaaagacagtaaactattccacattaatgtttttgcttgcaaaaacattaccctcgaacgtttgaagatagaggcaccggacgagagcccaaacacagatgggattcacatgggcaaatcagagggggtcaatattattgcctctgacattaaaactggtgatgattgtatttctatcggagatggcactaaaaatatggtcataaaagaaataacttgtggaccaggacatggtataagtatcggtagtcttggaaagttccaaaatgaagagccagttgagggaatcaaaatctcaaactgcaccatcactaatacttcgaatggagctcgaatcaaaacttggccaggcgaacatggtggggcagtatcagaaatacattttgaggatattaccatgaataatgtctcttcccctatcctaattgatcaacaatattgcccatggaataaatgcaagaaaaatgaagaatccaaagttaaactaagcaacattagcttcaagaacatccgtggcacatctgcgcttccagaagctatcaagtttatttgcagcggttcttcgccatgtcaaaatgtggaacttgcagacattgatattaagcacaacggagctgaacccgcaacatcccaatgtttgaatgtcaagcctaaaactagtggcaaattaaacccgattccatgttccggccctgtcccaaaaaccccttagcgccaccgcttaaagcataccaacaaattcaatgcaattgtaattaatatatttattcatattacataaaaacagttctttttcatttt

SEQ ID NO: 190128 - DNA, 1532 bp, Gossypium hirsutum
  unsure (1)..(1532): unsure at all n locations
cggacgcgtgggttcaaggcacgaggtctcctctccataaatctctctctcaacgcagagcgaataggcggagacttccaagaatctatcgcatcagctaatcacgctctaaagaatggatcaggttcaacacccatctatcatgcagaaggtagcaggccagctccttcgttctagccattctcaagattttcaaggttataatgggtctttcaggagtcctgctctataccaaaggcgtgctgcatatggcaattactccaatgctgctctgcagcatcctgtccgggcttttggagacctgtctatggttccatcaacagcttctgctatttgcgttcaggctcctgctgagaaaggatttagcagctttgctattgatttcctcatgggtggagtttctgctgctgtatcaaaaacagctgctgcaccaattgagcgtgttaagcttttgattcagaaccaagatgaaatgatcaaaagtggaaggctctctgaaccttacaagggtattggtgattgtttcaagcgaacaatcaaggatgaaggatttggttctttgtggagaggaaacactgccaatgttattcgttatttccccactcaggccttgaactttgccttcaaggattacttcaagaggcttttcaacttcaagaaagacagagatggttactggaaatggtttgctgggaacttggcatctggtggtgcagctggtgcttcttcccttctctttgtctactccttggattatgctcgaactcgtcttgcaaatgatgcaaaggctgcaaagaagggaggagagagacaattcaacgggcttgttgatgtctacaggaaaaccctaaaatctgatggtattgccgggctttaccgtggtttcaacatttcatgtgttggaatcattgtttaccgtggtctatattttggaatgtacgactctctgaagccagtgcttttgactggaagcatgcaggatagtttcttcgctagctttgctcttggttggctcatcacaaatggtgctggccttgcatcttacccaattgacactgttcgtagaagaatgatgatgacttctggtgaagctgtcaaatacaagagctcgctcgatgccttctctcagatcttgaaaaacgaaggtgccaagtctctattcaagggtgctggagctaacatccttcgtgccattgccggtgctggtgtgctcgctggatacgacaagttgcagctcattgttttcggaaagaagtacggatccggtggtgcttaaatttagggtggtactatctcccttcttttgttatgttttaggttttaaagatggcgatgaaaagctcgacacattgagaaatttatttcggcaaaaaaaaaatcattaataattcagatttagggggggaagttactccctaaacgatttttacatttgggatgtgaaattttgatttaccccatctcggatttttggtttggttttaagaaatgaagtgatggatgttttatttaaaaaatnnnnnnnnnnnnnn

SEQ ID NO: 190129 - DNA, 1532 bp, Gossypium hirsutum
  unsure (1)..(1532): unsure at all n locations
ctctatttccccatctccctgtctcactacattgctctgattcttgttcacgtctagcttggcattttctgtttttctcaatggcaatggatgcttcactgactatgtgcaagtcggtcacatcacctcctggcttattcttggggagaagtagagttattaggagttcccagtgtacctttatggtgggaagcaggatcaactttcctcggcagaaagctcagtcaacccaagttagatgtaaatctagcaggtgtggaggagctcttggtgctaaatgccgtgctgagaaaattttggtggcaaatagaggagaaattgctgttcgtgttatccgaacagctcatgagatgggaataccatgtgttgctgtctactctacaattgataaggatgcacttcatgtgaagctggctgatgaatcagtttgcataggcgaagcaccaagcagtcaatcgtatttattgattccaaatgtcctatctgctgcaattagccgtaactgtactatgcttcatcctgggtatggtttcctttctgagaatgcggtttttgtagaaatgtgcagagatcacaggatcaactttattgggcctaaccctgacagtattcgtgttatgggtgacaaatcaactgcacgagaaacaatgaagaacgcgggtgttcctactgttccgggaagtgatggattgttacagagtacagaggaagcaatcaagcttgcccatgagattggctttcctgtgatgatcaaggccacagccggtggtggagggcgtggaatgcgtctttgctaaagagcctgatgagtttgtgaagttactgcagcaagccaaaagtgaagctgcagctgcatttggaaatgatggagtttatttggagaagtacatccaaaatccaaggcacattgagttccaggttcttgcggataaatatggtaatgttgttcactttggtgagcgagactgcagcatccagagacgtaatcaaaaacttcttgaagaggctccttctccancattgacaccaaagttgcggaaggccatgggtgatgcagcagtagctgcagcagcatctattggttacattggtgtaggaactgttgagttcctattggatgaaagaggttccttctacttcatggaaatgaacactagaatccaggtggagcatcctgtaactgaaatgatttcctctgttgacttgattgaagaacaaattcgtgtagctatgggggaaaaactgcgctacaaacaggaagatattgtgctcagagggcattccattgaatgtcgtatcaatgcagaagatgcatttaaagggttcagacccggaccagggagaataacatcgtacttgccatctggaggcccatttgttcgaatggatagccatgtttattctgattatgtagttcctccaagctatgattcattacttggaaagcttattgtatgggctccaacaagggaaaaagcaattgagcgcatgaaaagggctcttgatgacactgtaattacaggggttcctac

SEQ ID NO: 190130 - DNA, 1592 bp, Gossypium hirsutum
ccgcccacgcgttcgtgcctctcctctccacaaaacagttgaaaatatctctctcttcactttcttctcttttcaacgcagggtgaaaggcggggaggccgtagacaatctctcttgcgctcttctcgtagaatggatcagattcaacatccaactgtcatgcagaaggtagctggccagctcctttcttctagcatttcccgagattttcaagggtatgatgggtctttcaggaggcctgccctataccaaggacattttgcatatgggaattattccaatgctggaatgcactatcctattgttccatcaacagctaccgccatttgtgttcaagcccctgcagagaaaggatttaccagctttgccattgatttcctcatgggtggagtttctgctgctgtgtcaaaaacagctgctgctccgattgagcgtgttaagcttttgatacagaaccaggatgaaatgatcaaaactggtaggctctctgagccctacaagggtatcgctgattgtttcaggcgaacaatgaaagatgaaggagtggtttctttgtggaggggtaacactgctaatgttattcgttacttccccactcaggctttgaactttgccttcaaggactacttcaagaggctggtcaacttcaagatggacagggatggctactggaaatggtttgcaggaaacttggcatctggtggtgctgctggtgcttcatcacttctttttgtttactctctggatccggctcgtacacgtttggctaatgataacaaggctgctaaaaagggtggtcagaggcagtttaatggtttagttgatgtctacaggaagaccatccaatctgatggcattgctggtctttaccgagggttcaatatctcatgtgttggaattattgtttaccgtggactttactttggaatgtatgattctttgaagcctgttgttttggttggtggattgcaggatagtttcttggcaagtttcttgctgggttggggtatcacaataggtgctggactggcatcttatccaattgatacggtacgtagaagaatgatgatgacttctggagaagcagtgaaatacaagagctcgatggcagcattttctcaaatcatcaagaatgaaggtgccaaatcgctgttcaagggtgctggtgcaaacattcttcgtgcagttgcaggggctggtgtgcttgctggctatgacaagctgcaagtccttttccttgggaagaaatatggatctggtggcggctaatgtggaaggtgattctgctgccttaaagaatgatctagcgtcccaagtttgaataattttggaaggacaaagtgcttatgatggtccccgttcccagtaattaggaatttaatatgaaaaagttggtgacgaaaaatttacttgagcttttgagtgttacattacatgtgtttagttacaagaccatgtggtttttcttttggtttttggttgacaataattacaacactgatttcatctgtagtatatgaatcggttttcttttgatttgttttgctttcaaaaaaaaaaaaaagtcgacgcggccgcggtcgacgcggccg

SEQ ID NO: 190131 - DNA, 660 bp, Gossypium hirsutum
gtttttctcaatggcaatggatgcttcactgactatgtgcaaatcggtcacatcacctccttttcctaggacgaaatcttccaaagctccgatgccccgttaaatgcttattgtgattttacgtatggggcttattcttggggagaagtagagttattaggagttcccagtgtacctttatggtgggaagcaggatcaactttcctaggcagaaagctcagtcaacccaagttaaatgtaaatctagcaggtgtggagtagctcttggtgctaaatgccgtgctgagaaaattttggtggcaaatagaggagaaattgctgttcgtgttatccgaacagctcatgagatgggaataccatgtgttgctgtttactctacaattgataaggatgcacttcatgtgaagctggctgatgaatcagtttgcataggcgaagcaccaagcagtccatcgtatttattgattcccaatgtcctatctgctgccattagcccttactgttctatgcttcatcctgggtatggtttccttgctgagaatgcggttttggtaaaattgtccgaatttcacaggatcaactttattgggcgcttaacctgaacatattcgtgttaatgggtaacaatccactggcccaagaaacattgaagaagcccgc

SEQ ID NO: 190132 - DNA, 1177 bp, Gossypium hirsutum
cctataaaattaaaacctaagcctggggtgcttcagttagagagaatttgaagaacaagaatggattctgccatagctcagaaaacatgggaattagaaaacaatatacttaccgtcgagacacctgacccttcatcggattctatattctactacgacgaggcggctcaagccaagttccagcaagagaagccttgggccaatgatcctcactacttcaagcgcgttaagatctctgcgctcgctcttcttaagatggttgtccacgcccgatctggtggtaccatagaggtgatggggctgatgcaaggcaagactgacggcgatgctatcattgtcatggacgcctttgctttgcctgttgaaggcactgagactagggttaacgctcaggcggatgcctatgagtatatggtcgattattcccagaccaacaagcaggctgggcgattggaaaatgttgttggatggtaccattcacatcccgggtatggatgctggctgtccggtattgatgtttcaacccaaatgctttaccagcagttccaggagcccttcctgccggttgttttttgacccaacaaggactgtttccgctggaaaagttgagattggagctttcaggacataccctgaaggatataagcctcctgatgatcctatctctgaatatcagaccattcctctgaataagattgaagactttggtgtgcactgtaaacagtattatgcattggacatcacttatttcaagtcctcacttgattgtcacctcctggatctgttatggaataagtactgggtaaacaccctttcttcttcacctctcttgggtaatggagattatgttgcaggacaaatttcagatttagctgaaaagctggagcaagcagagaaccaactggctcactctcgcattggcccactaggaccccctcgaaagaagttgcaggaagaatctcagcttgctaagattactagagatagtgcaaagataactgtggagcaagtccatggtttaatgtcacaggtcatcaaagacattcttttcaactctgtacgacagtcgagtaggtcccagaacgatcagtctgctcctgagcctatgatggatacctaattctaacatcctgccggatgaaatggttaccttgagcgtgagacaccagttttttac

SEQ ID NO: 190133 - DNA, 1179 bp, Gossypium hirsutum
  unsure (1)..(1179): unsure at all n locations
ttgctcccatatttgtacaagctccatcagttattggttttactggttttatggcccgccccctcatgggaggagtgtctgcacctctttccaagacagctgctgctccaattgagcgggtaaaacttctaatccaaaatcaggatgaaatgatcaaagctgggcggttgtctgaaccatacaagggaattactgactgctttgccaggactattaaggatgaaggtgtcatttctctttggagaggcaacactgcaaatgttctcagatacttccccacacaggctttgaactttgccttcaaggattatttcaagaggatgttcaacttcaagaaggacagagatggctactggaaatggtttgcagggaacttggcatctggtggtgctgctggtgcttcatcacttcttttcgtttactctctggattatgctcgtacacgtttggctaatgataacaaggctgctaaaaagggtggtcagaggcagttcaatggccttgttgatgtctacaggaagaccttccaatctgatggcattgccggtctttaccgtggtttcaatatttcatgtgttggaatcattgtttaccgtggtctatactttggaatgtacgactccctgaagccagtgcttctcactggtgatctgcaggatagtttctttgctagctttgctcttggttggctcatcacaaatggtgctggtcttgcatcgtacccaattgacactgtgcgtagaagaatgatgatgacctctggtgaagcagtgaagtacaagagctcactcgatgcattctctcagatcttgaaaaatgagggagccaagtctttattcaagggtgctggagctaacatccttcgtgccattgctggcgctggtgtgcttgccggatatgacaagttgcagctcattgtgttcggaaagaagtacggatccggtggtgcttaatatctctttttcattttttacttgtttatgtttagatggtgatgaaaagctcgactacccagaaatttatttcggccaaaaacttcattaaataattctagtttagtcagagagatgagagagggtgttttaaaccctaactatttatattctcatatggaaattttgattaagaaatactggtggctaatgcccccagcccctgtcggatttttattnnnnaaaa

SEQ ID NO: 190134 - DNA, 519 bp, Gossypium hirsutum
ccacgcgtccgcaataaatcacttgcctcgtttccatcgacaacttctctatatctctctcttctctctatttccccatctccctgtctcactacattgctctgattcttgttcacgtcaagcttgacaggtagcactgaagctttggcttaaatgggtatttgctattgtaggcattttctgtttttctcaatggcaatggatgcttcactgactatgtgcaaatcggtcacatcacctcctggcttattcttggggagaagtagagttattaggagttcccagtgtacctttatggtgggaagcaggatcaactttcctaggcagaaagctcagtcaacccaagttaaatgtaaatctagcaggtgtggagtagctcttggtgctaaatgccgtgctgagaaaattttggtggcaaatagaggagaaattgctgttcgtgttatccgaacagctcatgagatgggaataccatgtgttgctgtttactctacaattgataaggatgcacttcatgtg

SEQ ID NO: 190135 - DNA, 464 bp, Gossypium hirsutum
ggcacgagcgtcattccactgggttggcatatatgcccactgtttctcccatatttgtacaagctccatcaaaaaaaggttttactggttttatggtggatttcctcatgggtggagtttctgcaggaattcggcacgtggtcaaacagcttcctaggcgacctctctggtcactattttaagttgtaagcatggcagatggatcaaagcgtccatcagtgttccataaaatgcatggacagtcctatttcatttccaggcttacgcctagcttgcctgctcagaattataacatgactggtgcctataccaatggaggaattcatgttgctttacagccatcacgtcattccactgggttggcatatatgcccactgtttctcccatatttgtacaagctccatcagagaaaggttttactgggtttatggtggatttcctcatgggtggagtttctgctgct

SEQ ID NO: 190136 - DNA, 3405 bp, Gossypium hirsutum
  unsure (1)..(3405): unsure at all n locations
tttcactttctggtgttcagtcataagttacccattattttatctgtttttctagcgatttcttggtgtggggcatcacggaattcacttccaaagagataggatttgattcatcttttgttttccgggtttgggtttgggttcggcggattcttcgccacaaattatttttatccttttacaccgcaaaataataaatttcatccgtaattgttcctttctttttcctgcctttcattggttcataatttaaagttttggctttggtagtcaagtaaaaagacagagatggcaggtagaaaagtagagaagatggcttcaatagatgcacaactaaggctattagcacctgggaaagtctctgaggatgataagttggttgaatatgatgctgtgctactggatcgttttcttgatattcttcaggatttgcatggagaggatatcagagaaacggttcaagaatgctacgagctttctgcggagtacgaaggaaagcatgatcctaaaatattggaggagcttggcaaggtacttacaagcttggatcctggggactcaattgttgttaccaaatcattttcccacatgcttaacttgggaaacttggccgaggaggttcaaattgcatatagacgaaggattaagttgaagaaaggagattttgctgatgagagttcagcaacaactgaatcagatattgaagagacgttcaagcgacttgtggggcagttgaacaagtcccctgaagaagtttttgatgctttgaagaatcagactgtagatttagtcttaactgcacatcctacacagtctgttcgaagatctttacttcaaaaacacggaaggatacgtaattgtttgacacaattgtatgctaaagacattacacctgatgataagcaggaacttgatgaggcactacaaagggagattcaagctgcttttcgcacagatgagatccgaaggaatcctcccaccccacaagatgagatgagagcaggaatgagctacttccacgagacaatctggaaaggtgtaccaaaattcttgcgtcgtgttgacacagctttgaagaacatagggataaatgaacgtgttccatacaatgcccctcttattcaattctcttcatggatgggaggggatcgtgatggaaaccccagggtaactcctgaagttacaagagatgtctgcttattagctagaatgatggctgctaacttgtacttctcccaaatagaggatcttatgtttgagttatcaatgtggcgttgcagcgatgaacttcgtattcgtgcagatgaactccataggtcctccaaaaaggatgcaaagcattacatagaattttggaaacagattcctccaaatgagccatatcgcattattcttggtgatgtgagggacaagctgtataatacacgtgaacgtgctcgtagcctgttggccaatggattttctgacattcctgaagaagcagcatttaccaatgtggagcagtttctggagcctcttgaactctgctatagatcactctgtgcttgtggtgatcggccaatagctgatggaagccttcttgatttcttacggcaagtttctacctttgggctttcacttgtgaggcttgatatccgacaggaatctgatagacatactgatgtccttgatgctatcacaaagcacctggatattggatcttatcgagaatggcctgaggaacgccgacaggaatggctcttatctgaactcagaggcaagcgccctctattcggccctgatcttcccaaaacagaagaagtcgctgatgtattggacacatttcatgtcatttctgaactgccttcagacagctttggtgcctatataatctcaatggctacagccccatctgatgtgcttgctgttgagcttttacaacgtgaatgccatgtaaagcaaccattacgggtagttccattgtttgaaaaactcgctgatcttgaagctgctcctgctgctgtggctcgtctcttctctatagattggtacagagaccggatcaatgggaaacaggaagtgatgataggttattcagattcaggaaaggatgctggccgtctttctgcagcatggcagctatacaaggctcaggaggaacttgtaaaggtggcaaagcagtatggtgttaagcttacaatgttccatggccgaggagggacagttggaagaggagggggacccacgcatcttgctatattgtctcaaccacccgatacaattcatggatcacttcgtgtaacagttcaaggtgaagttattgaacaatcatttggagaggagcacttgtgcttcaggacgcttcaacgttttactgctgctacacttgagcatggaatgcatccccctgtctcaccaaatccagaatggcgtgcactcatggatgaaatggcagtagttgcaacaaaggaataccgttctgtagtcttccaggaacctcgctttgttgaatacttccgcctagcaacaccagaattggagtatggtcggatgaatattggaagccgtccatcaaaaaggaaaccaagtggaggcattgaatcactccgtgcaatcccatggatctttgcatggactcaaacaagatttcatttacctgtgtggcttggctttggggctgcatttaagcacgtcattcagaaggatataaagaatctccacatgctccaggagatgcacaaccaatggcctttctttagggtcacaatggacttaattgaaatggtatttgccaagggagaccctggaatcgctgccttatatgacaagctgctagtgtcaaaggaactctggccctttggagagaacttgagagctaactatgaagacactaaacgacttgttctccaggttgctggacacagagatcttcttgaaggtgacccttacctgaagcagaggctccgacttcgtgatgcttacatcacaacccttaatgtgtgccaagcgtacactttgaaaaggatccgtgaccctgattatcatgtcaaggtcaggcctcacttatccagggaatacatggaatcaagcaaggcggcagctgagcttgtgaaacttaaccctacaagcgagtatgctcctggtctggaagacacccttattttgaccatgaagggtattgctgctggaatgcaaaacactggttaaaacttgcggattgttgtttccttgtgttgttatgctccttagtttatttttaatggatgttgctttgcgtcaagtaaaccttttatattactattattatcggttgggttaatttcatatttggctcatatattactaagtgttgtcagtctggtatctctataataatacatattaacatgatttcccattcnnnnnnnnnnnnnnnnnnnnnnnnnn

SEQ ID NO: 190137 - DNA, 910 bp, Gossypium hirsutum
  unsure (1)..(910): unsure at all n locations
gatttgctgaatatttccgccttgctacaccagagttggagtatggtagaatgaatattggaagcgcgaccatcagagcggaagccaagtgggggtatcgaatctcttcgtgcaatcccatggatctttgcgtggacacagacaagattccatctccctgtttggctcggatttggagctgcatttaaacatgtcattcagaaggacattaagaatctccttatgctgcaggagatgtacaatgaatggcctttcttcagagtgacaattgatttggtttaaatggtctttgcaaaaggagatcccgggattgcagccttatacgataagcttcttgtttctgaggaactctggtctttcggagagcggttgagaaccaactttgaagaaactaaaagccttctcctccagattgctgggcacaaggatctgctcgaaggggatccctacctgaagcaaagactccggctacgtgattcatacatcaccactctaaatgtctgccaggcctacacactcaaacgtatccgtgacccaaattacagcgtgaagttgcggccacatatctctagagagatcatggaatcaagcaaacctgctgatgaacttgtcaaactgaacccaacaagcgagtatgcccctggtttggaggacaccctcatcttgaccatgaagggtattgctgccggcatgcaaaacaccggttaaaccaccgacctgctacaccaggtgtgcttatagttcttttaagtccagagaagatgatttattcatcagagactgatgtcttttcggcgaaaacctttcttatgggtaaaccaaagaggcggatatatttttaaatgctctttaaagctgtatgattatgctgttatgnctttaagactcngtttattatatatatatatgt

SEQ ID NO: 190138 - DNA, 1184 bp, Gossypium hirsutum
gaaaaataaaaactggttcagcgacagagttggcttcatttctcttacctgtatcaaataccacccaaacatcgtcgtcttctacactcttctctggtaagttcatcgaaagatcaaatcaagatccctgccaaaatgaacgacgctgatgtatccaagcagatccagcagatggtgagattcatccgccaggaagcggaggaaaaggctaacgagatctctgtttccgctgaagaggagttcaacatcgagaagcttcaattggtggaagcggagaagaagaagattaggcaggagtacgagaagaaggagaagcaagttgaaatccgaaagaaaattgagtattcgatgcagcttaatgcatctaggatcaaggtccttcaggctcaagatgatgtggttaatgcaatgaaagaatcagcatccaaggaccttctcaatgtgagccatgatcaccatgtttacaaaaggcttttgaaagatctaattgttcagagtttagttagactgaaagagcctggagtcctactccgttgtcgcaaagaagatttgcatttggtggagtctgttctggattcagcaaaggaggaatatgcttctaaagtgaatgttcatccaccagagataatcattgatgatgtccatcttccccctggcccttctcatcatcatggttttttccatcatcatgctgaggctcatggacctttctgctctggaggtgtagtcatagcatctcgagatggaaaaattgtgtttgagaataccctggatgcacggttggatgttgcattcaataagaaacttccagagatccgcaagtggctttttggtcaggttgctgcttgaaggctgaagatggtattgtttttctcagcagcttttgtcatcggccatagagcatagtgattaagttatttgttccatgtatttgctttctcatattgttctccccgaatagtttatttgtttgataaaagtcagtgaaactcttgttcgattggtccgtatatcattttctgggattgtgaaagtactgtttttaaataatgaataaaatttgaaatgtttgcttattcacttttcggtaagcaagttttaaaaataaaaattataaatgtgttttaattataaagttttaaaaatgtgtttattggctttagcgttaaattttttttatccat

SEQ ID NO: 190139 - DNA, 601 bp, Gossypium hirsutum
gcatgtataaaaactggttaccttcactgttcgctttcatttttttttatcttttctgatcgagaatcagataaaaatatcttattctacaatattttccgatcaaatcgagatccccgcgaaaatgaacgacggagatgtttccaggcagattcagcagatggtgagattcatccgccaagaagcagaggagaaggctaacgagatctctgtttcagcggaagaggaattcaacatcgagaagctccagttggtggaggcagagaagaagaagatcaggcaagagtacgagaaaaaggagaagcaagtcgaagttcgaaagaagattgagtattcgatgcagcttaatgcatctaggattaaggtccttcaagctcaagatgatgtggttaatgaaatgaaagaatcggcagccaaggaacttctgaacgtgagccgtgatcaccatgtgtacagaacgcttttgaaagatgtaattgttcagagtttggtcaggctgaaagagcctgctgtcttactgcgctgtcgcaaagatgatgtgcccttggtggagtctgtcctggattcagcaaaagaagaatatgcttccaaagtgaatgtc

SEQ ID NO: 190140 - DNA, 1028 bp, Gossypium hirsutum
tcttaaccgtcttgtctcccaggtcatttcctccttgactgcgctcactgaggtttgatggtgccttgaatgtcgatgtgactgaattccaaaccaacttggttccctacccaagaatccacttcatgctttcctcgtatgctccagtcatctctgctgagaaggcttaccacgagcagctctcagttgctgaaatcaccaatagtgcctttgagccctcatctatgatggctaagtgcgatccacgccatggaaagtacatggcttgctgtttgatgtaccgtggtgatgttgttcccaaggacgtcaatgctgcagtcgccaccattaagaccaagcgcaccattcagtttgtcgattggtgtcctactggattcaagtgcggtatcaactaccaaccacccactgttgtccctggtggtgatctcgccaaggtccagagagctgtttgcatgatttctaactccaccagtgttgctgaagtcttctctcgcattgaccataagtttgatcttatgtatgccaaacgtgccttcattcactggtatgttggtgagggtatggaagaaggagaattctcagaggctcgtgaggatcttgctgcattggagaaggattatgaagaagttggtgctgagtcggctgagggtgatgagggtgaagatgatgagtactaagaagtacctgtgattgagtgtgcgtatgatgtcttttattacctgttgcttccgtgttatgcaagcttctattctttgaagcttgttaaagacttgaaatggtttactgtatgttatgctttttcatgttttatttgtgtttgggttgaaacttgatatttttgttgtctgtattggaagtaaattgttaagggaacttgtaaatgcccaacaggtataatggattcatgtggttatttgaccctaggtgtggaccaatcaattgggcaatttcaacggttaattcttctaccaattttgcccggttttgagatgaaaaaatgattagctcagtttgtaactttgtacatt

SEQ ID NO: 190141 - DNA, 442 bp, Gossypium hirsutum
  unsure (1)..(442): unsure at all n locations
tccgccattttttcggaccaggggttggcccacacatcgggtggttcccaaggagccaaaatgctctaatcgccaccattaaaaccaaccgcaccataaagttcgtcgatgggtgtcctactggattcaagtgcgggatcaactacgcaaccacccactgttgtccctggtggtgatctcgccaaggtccagagagctgtttgcatgattgctaactccaccagtgttgctgaagtcttccctcgcattgaccatatgtttgatcttatgtattccaaacgtgccttcattcactggtatgttttgtatgttttttaattatgttaattttcatattctcnnnnnnnnnnnnnnnnnnnnnnnnnnnnnnnnnnnnnnnnnnnnnnnnnnnnnnnnnnnnnnnnnnnnnnnnnnnnnnnnnnnnnnnnnnnnnnnnnnnnnn

SEQ ID NO: 190142 - DNA, 1354 bp, Gossypium hirsutum
cggccgcgtcgactggaagaattcgcggccgcagaattttttttttttttttttaaaactgaaactgatcgtttctttatttgaatgtctgaagaaaaccaaacatcatcattgtcggaatacaaaggaacgaacagagcagaaaatttagacacacacagatagccacacagcagtatataactaggcaaaagttgcgatgaactcattgagaaggcagatggctttgctggcgtattccctgaacacaagtatgaaatcgtaaagattttacaagaaaagaagcatgttgtgggaatgaccggagatggggtgaacgatgcacctgctttgaagaaagcagacattggaatagcagtggcagatgctacagatgctgcaaggagtgctgcagatatagtcttaactgagcctggcttaagtgtgataatcagtgctgtgttgacaagcagagctatattccaaaggatgaaaaactatacgatatatgctgtttccataaccattcgtattggtcttggttttgtgcttctagctctgatatgggaatatgatttcccacctttcatggttttgataattgcaatccttaatgatggaactatcatgaccatttccaaagaccgagtcaagccatcttcgaccccagacagttggaagcttaatgagatatttgcaaccggcgttgtcattggaacctatcttgctttggttactggcctgttttactggattgtaattgatactgatttctttgagactcacttcaacgtaaggtctatatccgacaacaccgagcaaatttcctctgcagtatatttgcaagtcagcatcattagtcaggctctcatctttgttactcggagtcgaagttggtcattcgttgaaaggcctggtgttctcttgatgtgtgcattcgtggttgctcaactggtggctaccttaattgcagtatatgcacatattagctttgctgatatcagtggcattggatggggatgggctggtgttatatggttatacagtttagttttctatgttcccctggatatcatcaagttcacagttcgatacgcattgagtggagaagcctggaacctcctattcgacagaaagactgcgtttacttcgaagaaagactacgggaaagatgaccgggcagcccaatggattctgtgctcagaggagcctacagggcttgatggctgcagacttggatttcaatggaagaagatcgagaacttctttgatagccgatcaggctaggcggcgtgctgaaatagccagacttggggagctacacactttaagaggtcatgtagaatcagttatgaggctaaagaatttggaccgc

SEQ ID NO: 190143 - DNA, 659 bp, Gossypium hirsutum
gaagttccagaaagaaccaagaagagccctggaggtccctggacattttgtgggctgttgcctttatttgatcctccaagacatgatagtgccgagaccatccgtagggccttaaaccttggagttgatgtaaagatgattacaggtgaccagttggccatcgcgaaggagacaggaagaagacttggtatggggacaaacatgtatccttcttcatctgggttgggtcgtgaaaaggatgagagtgaagctcttccagcagatgaactcattgagaaggcagatggctttgctggcgtattccctgaacacaagtatgaaatcgtaaagattttacaagaaaagaagcatgttgtgggaatgacccgagatggggtgaacgatgcacctgctttgaagaaagcagacattggaatagcagtggcagatgctacagatgctgcaaggagtgctgcagatatagtcttaactgagcctggcttaagtgtgataatcagtgctgtgttgacaagcagagctatattccaaaggatgaaaaactatacgatatatgctgtttccataaccattcgtattgttcttggttttgtgcttctagctctgatatgggaatatgatttcccacctttcatggttttgataattgcaatccttaatga

SEQ ID NO: 190144 - DNA, 1855 bp, Gossypium hirsutum
ccccccgcgtccgcccacgcttccgggagagcctttttttttgtgtagcgattctcagttagtcttttctttaagcttacagcttctctccagagttttataatgggtaaggagaaggttcacatcaaccttgttgtcattggccatgtcgactctggcaagtcgaccactactggtcatttgatctacaagctaggtggtattgacaagcgtgtgattgagaggttcgagaaggaggctgctgaaatgaacaaaaggtcattcaagtatgcttgggtgcttgacaagcttaaggctgagcgtgaacgtggtatcaccattgatattgccctgtggaagtttgagaccaccaaatactattgcaccgttattgatgcacctggacaccgtgactttatcaagaacatgattaccggtacctcacaggctgactgtgctgttctcattattgactccaccactggtggttttgaagctggtatctcaaaggatggtcagactcgtgagcatgctttgcttgcttttacccttggtgtcaagcaaatgatttgctgctgcaacaagatggatgccacaaccccaaaatactcaaaggcaaggtatgatgaaattgtgaaggaagtctcttcttacttaagaaagttggttacaaccctgagaagatcccatttgttccaatctctggttttgagggtgacaacatgattgagaggtctaccaacttgactggtacaagggccctactctccttgaggctcttgaccagatcaatgagcccaagaggccttcagacaagccactccgtctcccacttcaggatgtctacaagattggtggtattggaactgtccctgttggtcgtgttgaaactggtgtcttaagcctggtatggttgtgacctttggccctctggtctgaccactgaagttaagtctgttgagatgcaccatgaagcccttccgaggctcttcctggtgacaatgttgggttcaatgttaagaacgttgctgttaaggatctcaagcgtggttttgttgcttcaaactccaaggatgatcctgccaaggaggctgccaacttcacctctcaggtcatcatcatgaaccaccctggccaaattggaaatggatatgccccagtccttgactgccacacctctcacattgctgtcaaattttctgaacttttgaccaagattgacaggcgatctggtaaggagcttgagaaggaacccaagttcttgaagaacggtgatgcaggtatgataaagatgattcccaccaagcccatggttgtggagactttctctgagtacccacccttgggtcgttttgctgtgagggacatgcgtcagaccgtggctgttggtgttatcaagaatgttgagaagaaggacccaaccggtgccaaggtcaccaagtctgctgctaagaagaagtgaaccgtgctggctaaacctaatgaagtttccgcagatggagtattttattatcataataatagtttgatagactttatcatttatgatatagttggtcttttgcttggttttgcatgttatagtgtggtgccattgttgtctggtaactgttctcagtattgggtgcttgacagacggtggcatatctatgggtggtctctagcgttacctggttttgtttaatttactactgtatcttgtcattgtcaagaggtgcccccttggttttccaaggtggcttgaaacttttgtttatgattttcgttgaagttgcggaattatttattatggaaaaacaaaaacagttttacaaaagttaaactttttaccttgaaaattgaaaaacaaaacctttaaaaaggggccgcccctttt

SEQ ID NO: 190145 - DNA, 1890 bp, Gossypium hirsutum
gttcgtccatggcgctttttggaagagttggtggaggcatctatacgaaggctgctgatgtgggtgctgatcttgtaggcaaggtggaaaggaacattcctgaggatgaccctagaaacccagctgtgattgctgacaatgtctgggataatgttggtgatatcgctgggatgggatctgatctttttgggtcctatgctgaatcatcttgtgctgcacttgttgtcgcttccatctcttcttttggcatcaatcatgaattgactccgatgttatatcctctcatcataagttccgttggtatcattgtttgtttaatcaccaccttatttgctactgatttctttgagatcaaggctgttaaggaaattgagccatcattgaagaggcaacttatcatatccactgttctcatgactattggaattcgggttgttagttgggtagctcttccatcttcctttaccattttcaactttggagatcagaaagctgtcaagaactggcaactattcttatgtgttgctgttggtctttgggctggcctaattattggttttgtaaccgagtactatactagcaatgcatacagccctgtacaagatgtcgctgattcctgcaggactggagcagcgactaatgttattttcggccttgcgttgggttacaagtcttgcattattcctatttttgctattgcaatcagtatttttgttagttttagctttgctgctatgtatggcattgctgttgctgcccttggaatgctgagcaccatagctactggattggctattgatgcttatggtcccatcagtgataatgctggaggcattgctgagatggctggcatgagccacagaattcgagagagaactgatgctcttgatgctgcaggaaacaccactgctgctattggaaagggtttcgccattggttcagcagcccttgtgtcccttgccctctttggtgcctttgtgagccgtgctgctatttcaacagttgatgtattgacccctaaagtttttattgggttgcttgtcggggcaatgcttccttactggttctctgctatgaccatgaagagtgtgggaagtgcagctttgaagatggttgaggaagtgcgtcggcaattcaacacaatcccaggtctcatggagggcactgctaagcctgactatgctacctgtgttaagatctctactgatgcttccatcaaagaaatgatcccacctggtgcccttgttatgctcacaccccttgttgttgggatcttttttggcgtggaaactctctctggtgtcctcgctggatctcttgtctctggtgtccagattgctatctctgcatccaacacaggaggtgcttgggataatgccaagaagtatattgaggctggtgcttctgaacatgcaaaaactcttggtcccaaaggttcagatccacataaggctgccgttattggtgacaccattggtgaccctttaaaggatacatctgggccatcgctgaacatcctcatcaagctaatggctgttgaatctcttgtctttgctcccttctttgctacacatggtgggctgctttttaagatattttaagtgaagacaaacatcggctactagtctaccatttccgattcctgtctgttattctcttataattttcatttttaagtatatttaggtcgtagcacattttgactctagagatcatttcctctttaaagtcgtattggtagtaaaagtttaccctttgttacaacgacattgttgttgttgttgatgatgatgatgattacggtccatctaggaaaaggccggaacctcgaaaccacattgttactattattacttgtttgttcaatgaaaaaatgtatttttgctttca

SEQ ID NO: 190146 - DNA, 1114 bp, Gossypium hirsutum
  unsure (1)..(1114): unsure at all n locations
caatctctggttttgagggtgacaacatgttcgagagaactacaaaccttcattgggtggggggtcctactctcgttgaggctcttgaccagatcaccgagcccaagaggccctcggataagccactccgtcttccacttcaggatgtctacaagattggtggtattggaactgtccctgttggtcgtgttggaaactggtgtcctcaaacccggtttgggtgttacttttggttctactggtctgaccactgaagttaaatcttgttgagatgcaccaggagatccctccccggaagctttccctggtgacaatgttgggttcaacgttaagaacgttgctgttaaggatcttaaacgtggttttgttgcttcaaactccaaggatgatccggccaaggaagctgccaacttcacctctcaggttatcatcatgaaccaccctggccaaatcggaaatggttatgccccagtcctcgactgccacacctctcacattgctgtcaaattttccgagctgttgaccaagattgacagacgatctggcaaggaactcgagaaggaacccaagttcttgaagaacggtgatgcaggtatggtaaagatgattcccaccaaacccatggtggttgagactttctccgaatacccaccactcggacgttttgctgtccgtgacatgcgccagaccgttgctgtcggtgtcatcaagagtgttgagaagaaggacccaactggtgctaaggtcaccaaatctgctgccaagaagaaatgagagattattgcagagataattatatcagttttcattacagctttggacaattatcttaaatttggactttaaatttactttttgtgagacttgttgatttgctttttaaacaaattctagttttatgtttcaaggtttcaaatatcaaggggtatatattatatcgattgcttccaatagcgacagataatcacagnccttactgtctttttagtggctctcactgccaaagtgaggaatttacatactatacctttagttgacgagacccattaaaaagtgttaatgactgtgantatgtgatcatnaaatcagtaaatggctgtaaaaaaaaaaaaaa

SEQ ID NO: 190147 - DNA, 952 bp, Gossypium hirsutum
  unsure (1)..(952): unsure at all n locations
ggcagagcccttagctcttagcccagttcttcattttcattttcttgttccttccttcgccgtctattgctttttgttacctcgatttcaagtgaatcagaatgggtaaggaaaagactcacattaacattgtggtcatcggccacgtcgattctgggaaatcaaccaccactggccacctgatttacaagcttggtggtattgacaagcgtgtgattgaaaggttcgagaaagaagctgctgagatgaacaagaggtcattcaagtatgcttgggtgcttgacaagctcaaggctgagcgtgagcgtggtatcaccattgatattgccttgtggaaatttgagaccaccaaatactactgcactgtgattgatgcacctggacaccgtgactttatcaagaatatgattactggtacgtcacaggctgactgtgctgttttgattattgattccaccactggtggttttgaggctggtatctccaaggatggtcagactcgtgagcacgcattgcttgcttttacccttggtgtcaagcaaatgatttgctgttgcaacaagatggatgccactacccctaaatactccaaggctaggtatgatgaaattgtgaaggaagtctcttcctacttgaagaaagttggatacaaccctgacaagattccattgtgttcccatctctggttttgagggtgataacatgattgagaggtctaccaacttgactggtacaaagtggccctacancttcttgaaggcttcttgaccagatcaattgagcccaagagggccttcagacaaagcctctccgtctaccacttcaggatgtgtacaagattggtggtattggaactgtcccggttggtcgtgttgaaactggtgtcttgaagcctggtatggttgtgacctttggtcctaccggtctgaccactgaagttaagtctgttgag

SEQ ID NO: 190148 - DNA, 635 bp, Gossypium hirsutum
cccacgcgtccgcccacgcgtccgcccacgcgctcagcgctctccttctgtttctggtcaagccaatctcaaaagactccccttttagctcacagctcctctcttgagtactataatgggtaaggagaaggttcacatcaacattgtggtcattggccatgtcgactctgggaagtctacaaccactggtcatttgatctacaagcttggtggtattgacaagcgtgtgattgagaggtttgagaaggaggctgctgagatgaacaaaaggtcatttaagtatgcatgggtgcttgacaagcttaaggccgaacgtgaacgtggtattaccatcgatattgccctctggaagtttgagactaccaaatactactgcactgtcattgatgcccctggacaccgtgacttcatcaagaacatgattactggtacctcacaggctgactgcgctgttctcattatcgactcgaccactggtggtttcgaagctggtatctcaaaggatggtcagacacgtgagcatgctttgcttgcgtttacccttggtgtcaagcagatgatttgctgctgcaacaagatggatgcaacaactccaaaatactccaaggcaaggtatgatgaaattgtgaaggatt

SEQ ID NO: 190149 - DNA, 694 bp, Gossypium hirsutum
cggccgcgtcgactccaactccaaggatgaccctgctaaggaggctgccagcttcacttctcaggtcatcattatgaaccaccctggacaaattggaaatggatatgctccagtccttgactgccacacatcacacattgctgttaagtttgctgagcttttgaccaagattgacaggcgatctggtaaggagcttgagaaggaacccaagttcttgaagaatggtgatgctggtatgattaagatgattcctaccaagcccatggttgtggagaccttctctgagtacccacccctgggtcgttttgctgtgagggacatgcgtcagaccgtggctgtgggtgttatcaagagtgtcgagaagaaggacccaaccggtgccaaggtcaccaagtctgctgctaagaagaagtgaagaggccaaaaggttttagccgtgaagcagattgagtgttttatctttggttatatgtggtttgaagtttttgcctgttttatgtaggatttttaaagtttgagatgctttggtttgccaaggcatcttagtcaagttttgtgtctgatcttgcggaactatactttgttttttctatatatttgtctgtttcatttttctaaaaaaataatttcatttagacctacaattttgcgataaatgctgaaaaatttattgaacatcacgtcgacgcggccg

SEQ ID NO: 190150 - DNA, 629 bp, Gossypium hirsutum
ggggatgatcctgcaaaggaggctgccagcttcacttctcaggtcatcatcatgaaccaccctgggcagattggaaacggatatgccccagtccttgactgccatacctcccacattgctgtgaaattttccgaattgctgaccaagatcgacaggcgatctggaaaggagcttgagaaggagcccaagttcttgaagaatggtgatgcagggatgataaagatggttcccaccaagcctatggttgtggagactttctctgagtacccaccacttggacggtttgctgtcagggacatgcgtcagactgtggctgttggtgtcatcaagagcgttgagaagaaggacccaacgggtgctaaggtcaccaaatctgctgccaagaagaaatgagattgcatttgatagtatcagagccttttgattttggttatctttgtagtttggtactttgcagttttttagaccaattttgatgtgtgttcatttggttgagactgtcatctgcccacggattgtgtgtttgctttttccgtgtcaattgtagttgaattccttcaaagaatgcttggtggagatgtccttgttttcttaatgttatgatggtcctaagccttcgattttcaact

SEQ ID NO: 190151 - DNA, 614 bp, Gossypium hirsutum
agcagctaatttcacttcccaagtcatcatcatgaaccacccagggcagattggaaatggatatgcgcctgtccttgactgccacacctcccacattgcggtcaagtttgcagagttggtgaccaagattgacaggcgttctggtaaggagcttgagaaggaacccaagttcttgaagaatggtgatgcaggatttgttaagatgattcccaccaaacccatggttgtggaaaccttctctgagtatcccccactgggtcgttttgccgtgagggacatgaggcagactgttgctgtcggcgttatcaagagcgtggagaagaaagatccatctggagccaaggtgaccaagtctgctgccaagaagggtgggaagtgaaccgtgcgggtttcagttgatccaaccgaactatttcatggctactacaataaaacattgcttctcattagtaggtcagccatcattggacgattagttgtgtgttttgatggtcatagttttaagtcatcaccatcttgtcgaggatgttgttcacagaactgggttcttgatagacggtggtgaggcttttgtgtttataattactctcacagacggcaggtcgacgcggccg

SEQ ID NO: 190152 - DNA, 669 bp, Gossypium hirsutum
gaacaagattcttgctcgaaaacctatactctctgatagctctcttcttcgagccgctaggtcgtgtagcggttctcagcttcaagtctcttcttttagcttgacagcttctctccagtgttatactggataatgggtaaggagaaggttcacatcaaccttgttgtcattggccatgtcgactctgccaatagtcatacctacaacggggcacttgatctacaagcttggtggcattgacatgcgtgagattgcgaaggtttcgtgaaggaggctgctgacacgaactataggtcattcaagtatgcctgggtgctcgacaggctggagggctgtgcgtgagcgtggtattttaccatcgtgatctacctgtatatatcttcaccacctacttctattgacatgtttataagcggattgacatcttaagtttaatgagtacatcgcttctgaaacttctagtttaaagtgtggttactattttgcttgactctttgtcataattactttttttctataatgtctctttatttatatcatttgtttgttatactagattttaacttggtttattccttccatggatgttcctcttgctgatgattctaatccttgtataatcgtgatcatatctttatttatctcggttattcctttttttgatgtacc

SEQ ID NO: 190153 - DNA, 521 bp, Gossypium hirsutum
ctgagtacaaaatagaactagaggcttgctctaaaaactatactctctgattatctctcttctgctttgtcgccacgatttcagcttcagatcgcttctatttcttagcttgaagctaatactgcagaatgggcaaggaaaagactcacattaacattgtcgtaattggccatgtcgactctggaaagtcaaccaccactggccacttgatctacaagcttggaggtattgacaagcgtgtcattgaaaggtttgagaaggaagctgccgagatgaacaagaggtcattcaagtatgcttgggtgcttgacaagttgaaggctgagcgtgaacgtggtattaccattgacattgccctgtggaagtttgagaccaccaaatattactgcactgtcatcgatgcccctggacatcgtgactttatcaagaacatgattactggtacctcccaggccgattgtgctgtccttatcattgactctaccactggaggttttgaggcaggtatttccaaggatgga

SEQ ID NO: 190154 - DNA, 430 bp, Gossypium hirsutum
tttgatccctcgtctctggcgtccagattgctatctccgcatcgaacacagggggtgcttgggataatgctaagaagtatatcgaggccggtgcttcagaacatgcaagaactcttggtcccaaaggatcagaaccacataaggcagctgttatcggtgacaccattggggaccctctaaaggatacatccggaccatcactgaacatcctcatcaagctaatggctgttgaatcacttgtctttgcacccttcttcgccacacacggtggactgcttttcaagatattttaagtaaaagaacacaaaaacggttccagtctctgccggttctcttccaaatctccttttttttttctcgtaagtatagttctagtgtgtagcacattttgacaatatcctcttaaaggttgaatctatagcgaaaattt

SEQ ID NO: 190155 - DNA, 428 bp, Gossypium hirsutum
ctcactctctcttctctgccgatttctccgttcttcaaaatttaagttttttctgctaaaaagttgctatgggtaaggagaaggttcacatcaacattgttgtcattggccatgtcgactctggaaagtcaacaacaactggtcacttgatctacaagcttggaggtattgacaagcgtgtgatcgagaggttcgagaaggaagctgctgagatgaacaaaaggtcattcaagtatgcctgggtgctcgataagttgaaggctgagcgtgagcgtggtatcaccattgatattgccttgtggaagtttgagacaaccaagtactactgcactgtcattgatgctcctggacatcgtgacttcattaagaatatgattacgggtacttctcaagctgactgtgctgtccttatcattgactccacaact

SEQ ID NO: 190156 - DNA, 603 bp, Gossypium hirsutum
cgcacgcacgaagtcccgaattcgacccaccgacccacgcatccgggttcatcatgcccttgtgtcccttgccctctttggtgcttttgtgagccgtgctggtatttcaacaaatgatgtattgacccctaaagcctttatcgtctacactagtcgaacaacgctcgctctctggttttctgctatgaccatgaagagtgtgggaagtgcagctttgaagatggttgaggaagtgcgcaagcaattcaacacaatcccaggtctcatggagggtactgctaaacctgactatgctacctgtgttaagatctctactgatgcttcaatcaaagaaatgatcccacctggtgcccttgttatgctcacaccccttgttgttgggatcttttttggcgtggaaactctctctggtgtcctcgctggatctcttgtctctggtgtccagattgctatctctgcatccaacacaggaggtgcttgggataatgccaagaagtatattgaggtatccataattttactgacttccatgagccgctcctttgattggcgtttcaaaacaatagttctatatttatgcttttggattttggtgttgaatgc

SEQ ID NO: 190157 - DNA, 468 bp, Gossypium hirsutum
  unsure (1)..(468): unsure at all n locations
gggacatgaggcanactgttgctgtcggcgttatcaatagcgtggagaataaagatccatctggagccaaggtgacgaagtctgctgccaagaagggtgggaagtgaaccgtgtgggtttcagttgatccaaccaaactattttatggttactacaataaaacattgcttctcattagtaggtcagccatcattggacgattagttgtgtgttttgatggtaatagttttaagtcatcaccatcttgtcgaggatgttgttcacagaactgggttcttgatagacggtggtgaggcttttgtgtttttcagagtctgccgtctgtgagagtaattataaactttgaatggtgtcttgtgttcccattatttatggcaatcagctcaggagttttaaggtctggtcctgggcttttctgcttgaatgtgttctatcaaacatttatatacagtcaaaacttgtttgttt

SEQ ID NO: 190158 - DNA, 585 bp, Gossypium hirsutum
  unsure (1)..(585): unsure at all n locations
ggaattcgggtcgacnacgcgtccgcccacgcgtccggattgacaggcgatccttgtaaggagcttgagaaggaacccaagttacttgaagaatggtgatgctggtatgattaagatgattcctaccaagcccatggttgtggagaccttctctgagtacccacccctgggtcgttttgctgtgagggacatgcgtcagaccgtggctgtgggtgttatcaagagtgtcgagaagaaggacccaaccggtgccaaggtcaccaagtctgctgctaagaagaagtgaagaggccaaaaggttttacccgtgaagcagattgagtgttttatctttggtaatatgtggtttgaagtttttgcctgttttatgtaggatttttaaagtttgagatgctttggtttgccaaggcgtcttagtcaagttttgtgtctgatcttgcggaacaaaactttgttttttcaaaaaatttgtctgtttcttttttctatttaacaagtttcattgcctagagaggtaagggccctctggatttttatttcttnnnnnnnnnnnnnnnnnnnnnnnnnnnnnnnnnnnnnnnnnnn

SEQ ID NO: 190159 - DNA, 521 bp, Gossypium hirsutum
  unsure (1)..(521): unsure at all n locations
ctcacgcgtccggcacttcgaaggccggcgaggggtaaggtcacatcttgaccatggctgggaaggtcgtagagctcttgaccaagattgacagacgatctggtaaggagctagagaaggagcctaagttcttgaagaacggtgatgcaggtgtggttaacatggttcccaccaagcccatggttggtggagaccttctccgaataccctccacctcggaaccttttgccgtcacgtgacatgcgccagaccgttgctgtcggtgtcatcaagagtgttgagaagaaggacccaactggtgctaaggtcaccaaatctgctgccaagaagaaatgagagattattgcagagataattatatcagttttcattacagctttggacaattatcttaaatttggactttaaatttactttttgtgagacttgttgatttgctttttaaacaaattctagttttatgttttaatgtttttcaaaaaaaaaanttttttttttaattttattaattaataataaaa

SEQ ID NO: 190160 - DNA, 538 bp, Gossypium hirsutum
atcccgagctaaacagccttgattgaagcggcacctcataattccaatagcgatgagaacagttgacattatgactacttgaaagaataatcgttattctgactgctcttccatcttcctttaccattttcaattttggagaccacaaagctgtgaagaactggcaactattcttatgtgttgctgctggtctttgggctggactaattattgatctgggaactgatatctatactatcaatgcatacagccctgtacaagatgtcgttgattcctgcaggactggagctacgactaacgttattttttggccttgcgttgggttacaagtcttgcattattcctatttttgctattgcaatcagtattgggtgcttgacagacggcggcatatctatgggtggtctctagcgttacctggttttgtttaatttactactgtatcttgtcattgtcaagaggtgcccccttggttttccaaggcggcttgaaacttttgcttatgattttcgctgaagttgcggaattatttattatg

SEQ ID NO: 190161 - DNA, 810 bp, Gossypium hirsutum
tccacgcgtgcgccgacagataataaagcgtttgtctcagatttcagaagatggcccgtaccaagcaaacagcccgtaagtcgactggtgggaaggctccaaggaagcaacttgctaccaaggctgcccgtaaatctgccccaaccaccggtggtgtgaagaagcctcatcgctaccgtcctggaactgttgctcttcgtgaaattcgaaagtaccagaagagtactgagcttcttatcaggaaattgcctttccagaggcttgttcgtgaaattgcccaggacttcaagactgatttgcgtttccagagccatgctgttctagctctccaggaagctgcagaggcataccttgtgggtctttttgaagacaccaacctttgtgcgatccacgccaagcgtgtcacaattatgcccaaggacatccagttggctcgtaggatcaggggagagcgtgcttaatttccatgtgtgtggatcagtcgcttagaaagaagaaactattgtttatttttaggcaaatgtattggttttttgttttttctaatcatcttttaagccatgatggtagtggtaggttcaatgtgatgtgatgatgaagtggggcgtctgatatgttaatggacaataactcatgtctggtatagtcttgtttaaatgtgtttttgcttaatcgaaagttgctttgccacacagtagtggctttggttgtttatttgttgcgagtaaaacttgcttaatcgtgtcagttcttgatttggcttaagaaaatgttttatttgtaatggtaattaatcggccttttagtgaa

SEQ ID NO: 190162 - DNA, 1041 bp, Gossypium hirsutum
ttctgattcttttaatttgtttttgtatttcatgtagtttaagttgaattagggaaataggggaggtaaggttgaatttatttataattagggcactctgattctgttctgagtgcatttaggaccttcgacttctgttttaaatcctattctgattttcttttttggcttagaagttttctagcttgaagattagggcttttgggaattatacagtaattatctaagatctggcttttccgtgttatgtttggtagttaatgagaaaatgtaacttgttttatattttttaattgtcttctgaaattattcatatctttgcagagatggcccgtaccaagcagacagcccgtaagtcgactggtgggaaggctccaaggaagcaacttgctaccaaggccgcccgtaaatctgccccaaccactggtggtgtgaagaagcctcatcgataccgtcctggaactgttgctcttcgtgaaattcgaaagtaccagatgagtactgagcttcttatcaggaaattgcctttccagaggcttgttcgtgaaattgcccaggatttcaagactgatttgcgtttccagagccatgccgttcttgctcttcaggaagctgcagaagcataccttgtgggtctctttgaagacaccaacctgtgtgcgatccacgccaagcgtgttactataatgcccaaggacattcagttggctcgtaggatcaggggcgagcgtgcttaatttccaagtgtgttaatcacacacttagaatggagaaactattgtttgttgttaggcaaatgtgttgtactatttttttatgtttatttttaatcctcttttaggacaagattaaatgataggtttatcttagtgcgaggttccatgttatgatgaaatggggttattgggggaaaatggagctgttttttataggatagaactatgtcgggataattggttaactgcttctatgaaaataggactcattaaaaaataaaaatagaataataataaaatcaaggtgattattattaacacctgt

SEQ ID NO: 190163 - DNA, 679 bp, Gossypium hirsutum
  unsure (1)..(679): unsure at all n locations
ccctcgtttccgtaaaaaaaaaaaaacaaacagggagggtagatttaaaagaaaggggggagtaccaaaagagtactgagcttcttatcaggaaattgcctttccagaggcttgctcgtcaaaaatgcccaggatttcaagactggcccgcgtttccagagccatgccgttcttgctcttcaggaagctgcagaagcataccttgtgggtctctttgaagacaccaacctgtgtgcgatccacgccaagcgtgttactataatgcccaaggacattcagttggctcgtaggatcaggggcgagcgtgcttaatttccaagtgtgttaatcacacacttagaatggagaaactattgtttgttgttaggcagatgtgttgtactatttttttttttttatgtttatttttattcctcttttaggccaagattaaatgataggtttatcttagtgcgtaggttccaatgttatgatgaaatggggttatggtggagagtgtgatgtctgatattttaatggataagatctcatgtctggtatagtttgttttaatctgcttcctaatcaaaactagtgacttcgaattnnnnnnnnnnnnnnnnnnnnnnnnnnnnnnnnnnnnnnnnnnnnnnnnnnnnnnnnnnnnnnnnnnnnnnnnnnnnnnnnnnnnnnnnnnnnn

SEQ ID NO: 190164 - DNA, 810 bp, Gossypium hirsutum
cccacgcgtccgcggatttcagtattctctcattctttacccggaacacaaacaaacactaagaacaagaaaatggcaccaaaagctgagaagaagccagctgagaagaagccagcggaggagaagaagacggtagctgagaaagcccccgccgagaagaagccaaaggcaggcaaaaagcttcccaaggaaggcggagctgcggccggagacaagaagaagaagagggtcaagaagagtaccgagacctacaagatctacatcttcaaggtcctgaagcaagttcaccctgatatcggtatctcaagcaaagctatgggaatcatgaacagtttcatcaatgatatctttgagaagcttgctcaagaagcctctaggctcgcgaggtacaacaagaagcctaccatcacttccagggaaatccagaccgctgttaggcttgtacttcccggtgagcttgccaagcacgccgtttctgaaggtaccaaggccgtgaccaagtttacttcatcttgaaaaggctatttgttgatctgtagttggggttagggttaggaggctgctttttaaattagatcggtgtggtttttatgtttatttttctgaaatttccgcatatttattttgatatatggtttgtattagcgagatggatctactcgatcctgatatggctattgtagaaattaatgctattaacgacaacttaatttcttggagcttgtttttggctagtttttaaatttatttttttcttagataatttcgattaaaattaaaaattttagtttcatcaaattctttactaaa

SEQ ID NO: 190165 - DNA, 836 bp, Gossypium hirsutum
cgaatttcagcattctctcattctttacccggaacacaaataaacactaagaacaagacggtggcagcaaaagctgagaagaagccagctgagaagaagccagctgaggagaagaagacggtagctgagaaagcccccgccgagaagaagccaaaggcaggcaataagcttcccaaggaaggcggagctgcggccggagacaagaagaagaagagggccaagaagagtactgagacctacaagatctacatcttcaaggtcttgaagcaagttcaccctgatatcggtatctcaagcaaagctatgggaatcatgaacagcttcatcaatgatatctttgaaaagcttgcccaagaagcgtctaggctcgcaaggtacaacaagaagcctaccatcacttccagggaaatccagaccgctgttaggcttgtacttcccggtgagcttgcgaaacacgccgtttctgaagggaccaaggccgtcaccaagtttacttcttcttgaaaaatgtgatttgtggttagtgttagggttttcattttaacagtagatcgcgttgtttttctgtaccgttgtgaatcattctgctcttctgttatatgattccgtgtgtattttgaagatggatctgctcgatcctgatttgaacatgttagaattgaatgcaattaaatactaaaaaaaatatatattattataaaataatataaactgagggggcccgtacccaattgcctttgtggcgattacatcatggcgtgtttaaacgcggaatgtaaacctggttcccactaatgctgtagaatccctagcactgctatacaaaagccacgacg

SEQ ID NO: 190166 - DNA, 744 bp, Gossypium hirsutum
ccctcgcgtccgcccacgcgagcgagcacgcgtgcgcccacgctgtgcggttcaattctctcatcccttgttttccttctaagccaaacgaaatctaatcatttttgaaaaatggcaccaaaagctgaaaaaaagccagccgagaagaagcctgcggaggagaagaaagccgtagctgagaaagccccggcagagaagaagcctaaggctgggaaaaagcttcccaaggaaggcggagcggctgccggagacaagaagaagaagagagttaagaagagcgtcgagacctacaagatctacatcttcaaggtcctgaagcaagttcaccctgacatcgggatctctagcaaagctatggggatcatgaacagtttcatcaatgatatcttcgagaagcttgctcaagaagcctctaggctcgcgaggtacaacaagaaacccaccatcacttccagggaaatccagaccgctgttaggcttgtacttcccggtgagctagcgaagcatgccgtttctgaagggactaaagctgtgactaagtttacttcgtcttgaagaaggggatttgtacgtttgtctttttagttagggtttgctttaagttgatgtttggagattgtgtattggaagatggatttactcgatcctgatgtgattatatagtagatttaaatggaattatttcacaatttcgcattatttctaggcatttgttcgtttttctaattcaactaatgggagatt

SEQ ID NO: 190167 - DNA, 746 bp, Gossypium hirsutum
gacccacgcgtacgcccacgccttcggtaaatctcgctcattttttcgtcttccactcaaaacaaaccagaagaggatctgccatggcgcccgaaagccgataacaagcctgctgagaagaagccggccgaggagaaaaagactaccgtcgctgagaaatcccctgccgagaagaagccgaaggccggtaagaagcttcccaaagaaggcggcgcggccggagacaagaacaagaagaaggccaagaagagcgtggagacctacaagatctacatcttcaaggtccttaagcaagtccatcctgatatcggcatctcaagcaaggctatggggatcatgaacagtttcatcaacgatatcttcgagaagcttgctcaggaagcttctagactcgcgaggtacaacatgaagccaacgattacttccatggaaatccagaccgcagtttggcttgtacttcccggtgagcttgcgaaacacgccgtttctgaagggaccaaggccgttaccaagtttacatcttcttgaaaaatgtgatttgtggttagggttagggttttcattttaaaagtagatcgcgttgtttttctcttccgttgtgaatcattctgctcttctgttatatgattccgtgtgtatcttgaagatggatctgctcgatcctgatttgaacatgttataattgaatgcaattaaatactaaaatttagcgtattttcttgctttttataataattaatatataa

SEQ ID NO: 190168 - DNA, 906 bp, Gossypium hirsutum
ctaagctctcgtttctcaaatttctctctcattcgcttttcttccgtttggctcaaattcaaaattctctcgcggatccctctgcgattatctccaaagggatcaacaggtagagaggataaatggggctgtcattcgctaagcttttcagccggctttttgccaagaaggagatgcgaattttgatggtgggccttgatgcagccggtaagactaccattttgtacaagctcaagcttggagagattgtcaccactattcccaccatcggatttaatgtggaaactgttgaatataagaacatcagtttcactgtctgggatgttggtggtcaggacaagattcgtcctttgtggaggcattacttccaaaatacacagggtctcatcttcgtggttgacagcaatgacagagaccgtgttgttgaggccagggatgaattgcatagaatgttgaatgaggatgaactgcgagatgctgtgttgcttgtatttgcaaacaagcaggatcttccaaatgcaatgaatgctgctgaaataactgacaagcttggccttcattcccttcgacagcgtcactggtatatccagagtacatgtgcaacatctggtgaggggctttatgagggcctagattggctttccaacaacatagctaacaaggcctgaagctattaagaagatttttgctatgtgggaagttctggaagcaggggggagcattatctcgtcttattattattatttttcaatcattctccttttccccctcatttttcatctgagaacagtcggattgttcgatatgcctttatttgcattttgtgatgatcattaatttacgtgggaacttatggctatattggcactaaaaaactggctggttggatatataattcctttggat

SEQ ID NO: 190169 - DNA, 975 bp, Gossypium hirsutum
  unsure (1)..(975): unsure at all n locations
tctcactctttgcctcttctgactgttggctaataatggctccaaagaaggctggagtgagcaaaagggtttttaacaaaggttcatggacagctgaggaagatagaagattggctaaatatattgagattcatggtgcaaagagatggaaaacaatcgccattaaatcaggtttgaatcgatgcggcaagagttgcaggttgagatggttgaactacttgagacctaacattaagagaggcaacatatcagatgaagaagaggacttaattattaggcttcataaactgctgggaaacaggtggtctttgattgctgggagacttccagggcgaacagacaatgaaattaagaactactggaattcccatttgagcaagaaaatgataaaccatgatgtcagaacagaacaaacttcctcctcggaacaaattgtgcctcacaaagcatgggaaactgtccagatggaagaagaagaggtagtaaaaggaagtgatgaaattgaaaactctgaattcagcattgatgtggacgaattctttgacttctcaacggaaggttgctttggtttggattgggtgaataagttccttgaacttgatgaccaacaggatccattagcaatggtataataagtttgtaattaacatgtttccttgaataaataaataaataaagagatgttctcaggcattatctcgtcttattattattatttttcaatcattctcctttccccctcatttttcatctgagacagtcggattgttcggattgttgttatgcctttatttgcattttgtgatgatcattaatttagttgggaacttatggctaaattgtaactaaaaaactggctggttggatatataattcctttggattnnnnnnnnnnnnnnnnnnnnnnnnnnnnnnnnnnnnnnnnnnnnnnnnnnnnnnnnnnnnnnnnnnnnnnnnnnnnnnnnnnnnnnnnnn

SEQ ID NO: 190170 - DNA, 901 bp, Gossypium hirsutum
cggacgcgtgggtttgcgttggtctcaagctctctctgcctctctttctaccatttgcttcaaaatcaaatccaaaatctctctgcgattttctccaaagggatcagccattagggaagagaaatggggctgacgttcacgaagctttttagccggctttttgctaagaaggagatgcggattttgatggtgggtcttgatgcagccggtaagactaccatcttgtacaagctcaagcttggagaaattgttaccaccattccaaccatcggatttaatgtggagactgtggaatataagaacatcattttcactgtgtgggatggtggtgggcaggacaagattcggccgttgtggaggcattacttccaaaatacacagggtctcatcttcgtggttgacagcaacgacagagaccgtgttgttgaggctagggatgaattgcataaaatgttgaatgaggatgagctgcgagatgcagtattgcttgtatttgcaaacaagcaggatcttccaaacgcaatgaatgctgctgaaataactgataagcttggtcttaattcccttcgacagcgtcactggtacatccagagcacctgtgcaacatctgggtgaggggctttataagggcctggattggctttcctacaacttagctacgaaggcttgaagctattaagtagatttgtgcaatgtgggaagttctggaagcaggggggagcattatatcgtcttattattattatttttcattctcctttccccctcatttttcatctgagacagtcggattgttgttatgcctttatttgcattctgtgatgataactaagctagttaggaatttatggctatattgtaaatagtgaactgaatggttggatatatcatacctttggat

SEQ ID NO: 190171 - DNA, 1151 bp, Gossypium hirsutum
cggattttctttccccgtgtttggttgcacagaaagtgagagaaagttttacttttgattttgaaactccgatgagaaaaccttgctgcgataaacaaggcaccaacaagggagcctggtccaagcaagaagatcaaaagctcattgattatatacgtattcatggtgaaggctgttggcgttccctccccaaagctgcaggtttgcaccgttgcggtaaaagttgcaggctgagatggataaattacttaagaccagatatcaaacgtggtaactttgctcaagacgaagaggacttaattatcaaactccatgctctccttggtaaccggtggtcactgatagctggtagattaccaggaagaacagataatgaagtgaagaactattggaattcccatataaagagaaagctaatgaagatggggatcgatcctaataaccataagttgaaccaatatcctcatcatgttggtccccttaaccccaccaccaccaactccatggatgtggcatgtaagcttagagtgtgttcaacagacaatgatgatgggatctcagatgctgcaagttatctcgaagacgcaacaccgcccactggtatatccaacttggaccttgatctcacaattgcttttccttcgagtcctatcaagaatattattgaagaaagccagcagaaaacagcatctattgtaacaaatgatgaagaagaacaatatacagtccctacccttcttcttttcagatgagacaaaaaaaaaagcctcacacatgtggagattcgtgcaaaagacctaaaggcttacgaaggcaacatgcacgccattgtcaaattcttttggatgatggattgaaaccatatccttgtccattagaaaggaggaagataagctaaaactgtattattgtgtataaatttggtagaaagaaagatttcaacttaagaattaggatcaaataactgaatgaatgaacgaattgcagataagttgttaggaggttttcaatcaacttatctgcaattaatttggtggagctgatgtaggatgatgagttcatcgtacatgaactgaacctttgatatttcaggctctaattgtctgtttgtatgcgtaaagatattcttcaatgtgagatcagctaaaaaa

SEQ ID NO: 190172 - DNA, 1896 bp, Gossypium hirsutum
ggaaaaattatttttttaaaaaaagaagcagaagaaacaaaaggtaggggagcgaacaaaaaagagtaaggaaaagcagtactttgatcgccagccctagaagctaacccatgcaccagctgcttgtataaaaagctttacattttgcaaaagaagggatttcagcacgaaattgaagttgtttttaaaaaccatggttgccactgctgtgacatcggcgtttttcccagtcacttcttcacctgactcctctgactcgaaaaacaagaagctcggaagcatcaagtcgaagccatcggtttcttctggaagtttgcaagtcaaggcaaatgctcaagcacctccgaaaataaacggcactgtggcgtcgacgactcccgtggaaggttccaagaacgatgacggtgcaagttcccctcctcctaggacgtttatcaaccagttacctgattggagcatgcttcttgctgctatcacaaccattttcttggctgctgagaagcagtggatgatgcttgattggaagccgaggcggcctgacatggtcattgatccgtttggcatagggaagattgttcaggatggtcttgttttcagtcagaacttctcgattaggtcttatgagataggtgctgatcaaacagcatccatagagacactaatgaatcatttacaggaaacagctattaatcattgtagaagtgctggactgcttggagaaggttttggtgcaacccctgagatgtgcaagaagaacctaatatgggttgtcactcggatgcaagttgtggttgatcgctatcctacttggggtgatgttgttcaagtcgacacttgggtcagtgcatcggggaagaatggcatgcgaagagattggcttgtcagcaatagtgaaactggtgaaattttaacacgagccacaagtgtatgggtgatgatgaataaactgactagaaggttatctaaaatcccagaagaggttcgaggggaaatagaacctttttttatgaattcagatcctgttctggctgaggatagccagaaactagtgaaactcgatgacagcacagctgaacacgtgtgcaaaggtttaactcctaaatggagcgacttggatgtcaaccagcatgtcaataatgtgaagtacattggctggatccttgagagtgctccattaccaatcttggagagtcacgagctttccgccttgactctggaatataggagggagtgcgggagggacagcgtgctgcagtcactgaccactgtgtctgattccaatacggaaaatgcagtaaatgttggtgaatttaattgccaacatttgctccgactcgacgatggagctgagattgtgagaggcaggacccgatggaggcctaaacatgccaaaagttccgctaacatggatcaaattaccgcaaaaagggcatagaaatccaagtaatctcattgctgtgtgtagtatctatcgtgctcttttcggatttatatacatatattccttatgattattagtcttcctttgagaaaaaaaaagggggttgtaattaggcttgtttaggagtcgggttttcgtacatagccttgtaaggctcagctcgtatgacccgagcctcggacacggattttgtgaagttgggcccgtgccctaaccagcataggctctttccatggaaaggtgggtctgcttttgaaaaattgaatagccatgtgagatggctctctccctacattatgggcttttaaccagttagagaccgggtagtttaggataaaatttatctttaatttgggaggatttgtatattttttttgcctttattttaacctaaatttgcttataattatttggttttatatttaggtattgaatcaatgaagtttttaaatttt

SEQ ID NO: 190173 - DNA, 770 bp, Gossypium hirsutum
gacccacgcgtccggcgaagaagagatgaaggaaaagtaatggtagatcgcaagcgctagaagttaccgagaagactttatagatccctatgtaacgcactactttctccattttgcgttttttctccactacatttcccttttttattttggttgagtatcggaaagagggaatttcagcggataacagaagttcattttaatttataaaatcatggttgccactgctgctacatcctcattctttccaatcacttcttccccggactccattgactcaaaaaacaagaagcttggaaatggatctactaaccttggaggtataaagttgaaaccatctgcttcttctggaagtttgcaagttatggcaaatgcacaagcccccccaaagataaatggtaccacggttgtgatgactccagtagaaggtttcccgagcgaagatgctgcaagttccccacctcccaggacgtttatcaatcagctccctgattggagcatgcttcttgctgctatcacaaccattttcctggctgctgagaagcagtggatgatgcttgattggaagccaaggcggcctgacatgctcattgacccatttgggatagggaggattgttcaggatggtcttgtttttcgtcagaacttctcaattaggtcttatgagataggtgctgatcgtacagcatccatagagacgctaatgaatcatttacaggaaacagcgattaatcattgtaaaagtgctggactgctaggagatggttttg

SEQ ID NO: 190174 - DNA, 1018 bp, Gossypium hirsutum
cgataaataaaaaatgagctttcttcaggccttgtcagttttccttttgtttttgtcgtatgtagtcgtaggatcagctgagcagtgtggaaggcaagcaggcggtgctctttgccccggtggtctatgttgtagccaatttggctggtgtggcagtactgctgactactgcacagttcctggttgccaaagtcagtgcagcggtagtggccctgcccctgggcctggtgggctaaccaatcttatatcaagagagacgtttaatcggatgcttttgcataggaacgatggggcttgtcctgcccgtggcttctatacatatgatgctttcattgctgctgcccgttcctttcctgcatttgctacaactggtgaccaagctactcgcaagagggaaatagctgccttcttagcccaaacttcccatgaaactactggtggggcagggtgggctgcaccggatggtccttatgcatggggatactgctacaatagggaattgaatcccccttcatcttattgcgcttcggatccaaattacccttgtgctcctggtaaacaatattttggccggggtcccatgcaactttcttggaactacaactacgggcagtgtggaagggccataggggtcgacttgttaaacaacccagacctgctatcaagtgatcccacaatttccttcaagtctgcgttttggttttggatgactccacaatcaccgaagccatcttgccacaatgtgatcatcggagcatggtcaccctccagtagcgatcgcgcagcaggtcgggctacagggtatggtgtgatcacaaatattatcaatggaggccttgaatgtggtaagggttggaatgcacaggtagaagaccgcattgggttctataagaggtattgtgacattcttggagttagctatggtaacaatcttgactgctacaaccagaggcctttcgggaatggagtctcggtggactcaatgtagctttttggctcaaatgaaagtaaacgtgca

SEQ ID NO: 190175 - DNA, 1180 bp, Gossypium hirsutum
cggacgcgaagactcaatgatgtctacaacacacttgctagtattcctacttggagtggtgactctcaccactcccacatttggtacctatgagtcaccaaattatgggaaaccccctactcctgtattcaagcctcccaaggtgaaaccaccaccatatgaacctaagccaccagtgtatgaaccaccaaaaaaggagaagcctgaacctaagccaccggtttatgcacctccaaagaaagagaagcatggacccaaaccaccaatgtatgaacctccaaagaaggagaagcctgagccaaagccaccagtttatacacctccaaagaaagaggagcctaaacctaaaccaccagtatatgaacctccaaagaaggagaaacctgagccaaaaccaccgatttatacacctccaaagaaagagaaacctgaacccaaaccacccgtatatgaacctccaaagaaggagaagcccgagccaaagccaccggtttatacacctccaaagaaagagaaacctgaacccaaaccaccagtgtatgaacctccaaaaaaacctccaatgtacgaacctaagccaccaaaaccaccggtttatacacctccaaagaaagagaaacctgaacccaaaccaccaatgtatgaacctccaaaaaaacctccaatgtatgaacctaagccaccgaagccaccggtttatacacctccaaagaaagaaaaaccagaacccaagccaccaatgtatcaacctcccaacaacccaccaatatatgagccaaaaccacctaagccaccagtttatgcaccaccaaaggaagaaaagccaaaacctaaaccaccagtttatgagcctccggcacatgagccaccatacggtcactatccaggacatccacctttggggaagcctcaatagaatgctcccatcgactagccattcccaacaattgagctactagaaaaattagtatttataataagaggaactgccggctgatgttctgttttattcttgtatggaatgtagtaatgttttctttcatgtttgaagagagaccagttgctcatggctgtactcattcgaatgcttattctatatcttcttctttctcaatgagcaatatcctgatgatttcaaataaattccaaaccccaattgcacgtttacaagaaggaacga

SEQ ID NO: 190176 - DNA, 1640 bp, Gossypium hirsutum
acctttaaagcgtccgccccttttatccttttgttttttttttttttttttttgttttatggtttttttttttagacttcaagtgccattaatatattatagcaaaattctcaatacatttttgcaacacgacactgatacaggacacaaactcagaataaccaaaaaaaaaaaagaacaaataaagggagaccatagaaaaaaacaaacaagataatgaatagggcactatatgaatgagattagaagcattctggggatgaaaatagagtataggtgagcagcaaggcaatattattcagtactatggataagcaggcactgagacaggcagcagggctgaacttaagattggggcttgtcccacttgaggggcttcacaacttcccaggtgaagtctgggtcgtcccttccaaagtgtccgtaggcagctgtcttcaagaaccggccattgccacccctcttgaggtccaggttgatggtgatcataccaggcctaaagtcgaagttctccttcacaatttggaggatttccttgtcaggaatctttccagttccgtagctgtctacaaagacagacaagggctcaggcacaccaatagcataggagacctgcacgatgcaccttcgggcaagcccattagctacaatgctcttggcagcctgcctaacaatgtaagcaccactcctgtccaccttggttgggtcctttccagagaaagcaccaccaccatgggctccccagccaccataagtgtcaataatgatcttacgaccagtgagacctgcatcaccgtgaggaccaccaatgacaaagcggccagatgggttaaggtggaagattgtcttctcatcaaggtacttctcagggatgacaggcttgatgacatgctctttgaggtcagcagcaatttcatcgtttgtaacagtctcatcatgttgggtggagatgaggacagtgtgaacacgaactggaaccatggcaccattgtcattgtagtactcaacagtaacctgggttttaccatcaggccttagccaggggcaggtgccattcttcctaacatcagtaagacgtgcaccgagcttagttgcaaggacatggctaagaggcatgaattcaggggtttcatcagtggcataaccaaacatatggccctggtcaccggctccaatctcttctggacgctttgtaaagtggccatggacaccctgggcaatatcagggctctgctgctcaatattaaccaggaccttgcagttgtcagcatcaagacccacatcatcagaaacaaatccaatggagcggcatgtgtcacgaacaatcttctcatagtctacgttggctttggtggtaatctctccaaagaccatgaccatgttagtcttggtgcatgtttcacaggcaaccttgctgtcagggtcctgggcaaggcaggcatcgagcacagcatcagagatctggtcgcaaagcttgtcagggtgaccctcgtttacagactcagatgtgaatagaaaggtctccattctagttctgggacaaagaaatccgagcggatctgagtctttggttgtaagagaaggaagagtgttgagcagaccagaactataaagcagcgcccacgcgtccgcccacgcgt

SEQ ID NO: 190177 - DNA, 1256 bp, Gossypium hirsutum
ttattggtaaaaaaaaagcttttgtggtttaactgtgtgggaacggtaacacaaggcaagggaaaagggcggtattccaaaaaaaggttttatttagggaaagatttacagaacccaaaacctcgaacaggttgttctcctttttggttctgccaccgtaaggacagagcatgttccaagttttcatttaagaagaagagttcttcagaacccattccaccaaagttgagatgccaaatccagttgccacatgcttttattcattcaagacaggcccagccatgtcaatgtgcatccactttactttttcatcaacaaattgtttcaagaacagagctgcattgatagcaccgccttgacgaccgccggtatttaccatatcagcaactcctgatttcattgattcccaatagctttcctctaatggcatcctccaaagtttctcaccactagcctctgaagcttgaaataactcctttgctagatcatcattgggtgtgaagacgcctgcaattgacggtccaagagcaacaatacaagccccagttagtgttgccaggtcgactatcttctagacaccttggttgcaagcatataccaaagcatctgcgagtgtaagcctgccttctgcatcagtgttattaacctcaatagtctttccattagatgctgtgagaatatctccaggtctcatacccgttccacttatcatgttttcacaagatgcatcaatgaaatgatcctcaactccagaaggtttgatttgcccgagagctttcgctgcaccaaaaactgctgcagaacctcccatgtctatctttcatggtttcgatcgaggaaccaggtccagtcttgatattgtagccaccactatcgctagtcaacccttttccaactaatgctaacttggttttaacaggtccgcttggtggtttgtagcataaatgaataaaatgaggaggatttgcagatgctgcagcaactccgagataagatcccatcttcaattccctgcattgctcttcggtcaagatgtttgcagacagaacatcactgtacagtgaagcaatctttgaagcctctgcggctaatgcagcaggggtaagtacgttggctggtgaattcacaagctctcttccaaatattatagcacaagaaacaacttcagcatacttgatcttcttctctatctctggtccagttccaagaccaagaatatccagagatttaagcggacgcgtgggcggacgcgtggg

SEQ ID NO: 190178 - DNA, 783 bp, Gossypium hirsutum
  unsure (1)..(783): unsure at all n locations
nnnnnnnnnnnnnnnnnnnnnnnnnnnnnnnnnnnnnnnnnnnnnnnnnnnnataatggatttttttttaattttttttttttttttatttttattaagtttttaatttttnatntttgattaaggtagccaagaattccattaagcaatcataagaggaagattgtttacttccagtggcatcaatataagcaaaattctcatacatttttgcaacacgacattgacaggacacaattaaaggtgaaagagaacaaataagaaaaaggaaaatgaaaatgaatggggggcatcatatgtatgagattagagacattcgaggacagccaaagctggattttaagactgaggcttttcccacttgaggggcttcacaccttcccaggtgaagtccgggtcgtcccttccaaagtgtccgtaggcagctgtcttcaaaaaccggccattgccacccctcttgagatccaggttgatggtgatcataccgggcctgaagtcgaagttctccttcacaatttggaggatttctttgtcaggaatctttccagttccatagctgtctacaaagacagacaagggctcaggcacaccaatagcataagagacctgcacgatgcaccttcggcatgccccttagccagattgctcttgatagcctgcctgcttatgtaaggtgcttgcctgtccaccttggtagggtcctttccagaatcagcactgcattcatgggcgcccgagcggcttttggtgtccataatgatttaatgaccagtgagacttggt

SEQ ID NO: 190179 - DNA, 678 bp, Gossypium hirsutum
ccctttaattacaaatgttttattcatgaaatggatctcacggtacccaacaaacaaaggttttcaatccttctcaagttcttcatttaagaggagtttttcagcacccattccaccaaagttgagacgccaaagccggttgctacgcgcttcttttcattccagacagggccagccaagtcaatgtgcatccattgtactttttcattcaacgaactgtttcaagaacagagcagctgtgatagcaccacctggacgaccaccggtatttaccatatcagcaactcctgatttcatagactcccaatagctttcctctagtggcatcctccaaaatttctcaccactgatctctgaagcttcgaatacctcctttgcaagttcatcactaggtgtgaagacgcctgcaatcgacggtccaagagcaacaatacaagccccagttagtgttgccaggtcgactatcttctcgacaccttggttgcaagcatataccaaagcatctgcgagtgtaagcctgccttctgcatcagtgttattaacctcaatagtctttccatttgatgctgtgaggatatctccaggtctcatacccgttccacttatcatgttttcacaagatgcaacaataaaatgaacctcaactccaggaggtttgatttgcccgagagctttcgc

SEQ ID NO: 190180 - DNA, 885 bp, Gossypium hirsutum
ggttgcaaaatacagtatcatccacattttattatatattacaatattggagaccaacagcctagaattttaagcatcataatgtagtgaatgaaacaacaactgaatcccatgttgtggcttgagtgaaagacgtggtgcaggtgcgtgaacataggtaggggagacggtgaaagtatagcgttgcagaatcatggaaagtgcagttttcacttcagtgattgcaaagctcatgcctacgcaagatcgaggtcccaatccaaaaggcataaatgcagctgcattgtacttagtagctttcgtatccatcagcaaccttgtggctgaaaagattacatcatctcccatagtcaaggatcatggtaaagtgctatgattcgcatgtcgacctatgaatgtgtaggcaggacaagttttctaattggacttctcttcatacttctcttatcacgccacttaaaggaggataaagccgtaaagtttcattgataatcatggtaatctgttggagaaaaaaaaatctaaaaggcaatataaatggtcactgttagttttcaagctattgaatttgtatagtttgcttaccgtctttaatttggccatcccttcagaatctgggttttgattaccaaagacctcaatcacctctgctcttgctttgtcttgccaatcggtgtgtattgctaaaagcagggttgcccatgcaagcaaggaattgactgtttcatgcccagcaaaataaaaagttttacactcatctaccaaatcttgtatcgaaagtctgtttttctcgtccgcctcatgataagcattaacaagtaatcccagaaaatcacagccgaaattatcagcttctccggtcactaccctcttttcccttttttc

SEQ ID NO: 190181 - DNA, 435 bp, Gossypium hirsutum
aatttaaatccatgcaaataacttaataatgttgcagcttgttaattccaatgccatcaatataagcaaaattctcactcagttttgcaacaccgacgctgataaaaagacacataaatcaaaacaagcatcgataaaagaagaaatagaaaatgaaaatgaaaaagggcattataagtatgagattagatatttccggtaggagctacgaaacatcgggattattcagcaccgcggatgagaaaagcacggggcagtacggacggggggacttcaagattgaggcttttcccatttgaggggcttcacaacttcccaggtgaagtcggggtcgtcccttccaaaatgtccataggcagctgtcttcaagaaccggccattgccacccctcttgaggtccaggtcgatggtgatcattccaggcctgaaatcaaa

SEQ ID NO: 190182 - DNA, 526 bp, Gossypium hirsutum
acttgctagtattcctacttggagtggtgacttctttttactcccacatttggtacctatgagtcgaccaaattttacgagactcggggcgtcctctattaagcctcccaaggtgaaaccaccaccatatgagcctatagccaccggtgtatgacacctccaaaaaaggagaagcctgaacccaagccaccggtgtatgccacctcctaagaaggagaagcctggacccaaaccaccagtgtatgaacctccaaagaaggagaagcctgagccaaaatcaccggtttatgcacctccaaagaaagagaaacctgaacccaaaccacccatatatgaacctccaaagaaggagaagcccgagccaaagccaccggtttatacacctccaaagaaagagaaacctgaacccaaaccaccaatgtatgaacctccaaaaaagcctccaatgtacgaacctaagccaccaaaaccatcggtttatacacctccaaagaaaaagaaacctgaacccaaaccaccaatgtat

SEQ ID NO: 190183 - DNA, 796 bp, Gossypium hirsutum
  unsure (1)..(796): unsure at all n locations
cccacgcgtccggtactttagaaaaaagaatctactgcgtctccaaatggcccttcgatcgttagccaccaggaaaaccctaaccttggctctcaactccaccaggctggctcagtctcgagccttgcagaccttctcgctccccgatcttccgtacgactatggcgcactcgagcccgccatcagtggagagatcatgcagctccatcaccagaagcatcaccaaacttacatcactaactataacaaggctttggagcagctccatgacgctatccagaaaggtgattcttccaccgtcgttaagttgcaaagcgccatcaagttcaacggcggaggtcatatcaaccactcaattttttggaagaatcttgcccctattcgtgaaggaggaggtgagcctccacatggttctttgggttgggccattgataccaactttggttcattggaatcattgattcaaaagatgaatgccgagggtgctgctttgcatggctctggttgggtgtggcttggactgggcatggagttgaagaggcttgtggtcgaaaccactgcatatcaggatccacttgtgaccaacgggccaaatttagttcccttgctggataatgttgggagctgctattatctcagtacagacgtagacagatacttgagacgtatgaggcataaatgaaattgcagtaatgtcgaaaagagttctgaggtgtgaagaataaagcacttgcgagtgtgcaaaaatccggaaatatgtggtngtgagatattagccatgtaaaaaaaaaaaaaa

SEQ ID NO: 190184 - DNA, 909 bp, Gossypium hirsutum
gaaaaaaagatctactgcgtctccaaatggcccttcgatcgttagccaccaggagaaccctaaccttggccctcaactccaccaggctgctgcctctgtctcgagccttgcagaccttctccctccccgatcttccgtacgactatggcgctcttgagcccgccattagtggagagatcatgcaactccatcaccaaaaacaccatcaaacttacatcactaactataacaaggctttagagcagctccatgaggctattcagaaaggtgattcttccaccgtcgttaagttgcaaagcgccatcaagttcaacggcggaggtcacgtcaaccactccattttttggaagaaccttgcccctattcgtgaaggaggaggtgaacctccaaaagcttccttgggttgggctattgacaccacactttggttcattggaatcattgattcaaaaaatgaatgctgagggtgctgctttgcagggctctggttgggtgtggcttggagtgaacaaggagttaaagaacctcgttatagaaacaactccaaatcaggatccactcgtgactaaagggccacatttagttcccttgcttggcatagatgtttgggagcatgcgtactatttacagtacaagaatgttagaccagattacctgaagaacgtatggaaagtcatcaattggaaatatgccagtgaagtgtacgagaaagaatgtgcttgagattgggcccttttcttagtgaatgaaagttaataatctcccttgtgacgaccttggttttgggtttttgcttgttcgtttcaagcttctttcatgtgtagcaaaaaatgatacgtcattgcgtgagatgaatttcaatttaggaaatgcgataacgtcagtctcttgaaatatggtttaattttt

SEQ ID NO: 190185 - DNA, 974 bp, Gossypium hirsutum
cccgcgggtacggattcgcgattcgcgccacgcgtccgacttgcgactcttaaaagaaattaaccatggcaacgagtgatgccgaagtgaaagttttgggcacatgggcgagtccattcgtgatgagggtaaggattgccatgaacatcaagtctgtggcctatgaatttcatcaagagaggttatgggaaggcaaaagcgagcttctcctcaaatcaaacccagttcacagaaaggtccctgtcctcattcatggtgatgacaccatctgtgagtctctcattattgtccaatacatcgatgaggtttggccttctgctcccattcttccttctgatccccatgaacgtgccaccgcccgtttttgggctgcttatcttgacgacaagtggttcccttccttgagagctattggtatggctgaaggagaggatgcaaggaaagcagccatagggcaagtggaggaagggctgatgctgttaaaggaggcatttggcaagtgcagccaagggcaggcattctttgggaaggatcaaattggatatctcgacataacatttgggtgctttttggggtggctaaaagtgacagaaaaaatgagtgggatccagctgcttaatgaaatcaacactcctgctctgcttaaatgggctaacagattctgcaatgatgccgccgtgaaagatgtcatgcctgagaccgaaaagcttgcggagtttgctaagatgcttacgggcagagtgagagccactcccacatcttgaattgccaaagggagccatatttcttggctcttgaccatattttacatgcaagtgtctcctttccggcttttctaaataaaagtatggcatttttaccccagtccctacttttggagcgtttgactgtagattatggcaaagaaatccaagttggatttcactgaattaaagggcggccgatttatagaaatcaggtttacagaccctacc

SEQ ID NO: 190186 - DNA, 568 bp, Gossypium hirsutum
cccacgcgtccgcccacgcgtccgaggttggaccgttagatgcaactagaaacttattggatgctgcagattaaagcggtgaggagtgttataaagtgtgaagtttcatctcttgggttctccttcaatttatatataaacacctatagagtgaagacatttgtgactcttaaaagaaattaaccatggcaacgagtgatgccgaagtgaaagttttgggcacatgggcgagtccattcgtgatgagggtaaggattgccctgaacatcaagtctgtggcctatgaatttcttcaggagaggttatgggaaggcaaaagcgagcttctcctcaaatcaaacccagttcacagaaaggtccctgtcctcattcatggtgatgacaccatctgtgagtctctcattattgtccaatacatcgatgaggtttggccttctgctcccattcttccttctgatccccatgaacgtgccaccgctcgtttttgggctgcttatcttgacgacaaggtatatgcatttgtgctttattcatataaaaagaagttattttttatgtgataattttt

SEQ ID NO: 190187 - DNA, 433 bp, Gossypium hirsutum
gcattattgtcggcatcatcttgtcttcccgagctggccaatctagagcagaataagatgctggtggaattggttagtattcttttatttgcttatattggtatattaccatatgaaaaaagagtattcgatcgttctcgggttagttccgatttaaacagcaaatccagggttggtattattagtatttaatgaaaagcaactacttttgagagttcatttagcggttgctcttttcactttgtagaagtagaaatgagtttctatgaataaattgacaagaacctttttatccctgtttgaaggttattttcatcagtctatatctttgcttctgaaattgaaacttttctctatggaagttcaattttggagataatgccttaatctgttattatttttttaatgatccgtgtttgatacatattcggat

SEQ ID NO: 190188 - DNA, 626 bp, Gossypium hirsutum
  unsure (1)..(626): unsure at all n locations
aaaaaaaggcattcttccaatcaaacgatttcgatctctgatctgagatggtgcgcatgagcgatnganaagaccctntacagcgcctaaatgccattgcggagtaccgaaagaaactccttcaacacaaggagtacgagtccagggttcgtgcaggtagggagaatctgagagctgctaagaaggagttcaacaaaacagaagatgatttgaagtctcttcagagtgttgggcagatcattggtgaagttctcaggcctcttgataatgaacgcttgattgttaaagcaagcagtggccctcgttatgttgttggttgccgcagtaaagttgataaggagaaactgacttcaggaactagagtgggtcttgacatgacaacacttactatcatgccggcacttcctcgtgaagttgatccagttgtttacaacatgttgcacgagggatccctggtaatgttagctactcggcttgttggtggtttatctgatcaaaattcgagagctggagggaatctattgagctccctctcatgaatcctgagcttttccttagagtagggattaaacctcccaagggtgtccttctttatgggccttctggtactggcaagacattgttag

SEQ ID NO: 190189 - DNA, 1343 bp, Gossypium hirsutum
gaagaattcgccaaaccacgctaacccaaaacacaagaaaaagaaagaaagaaaaaaaaaaaggaataccccttaccttcatagagagaacaaaagaaacaaagcaaggtatttcttttcttttcttcacctgtaaaatggcgacggcgagtacttggatattgtcgctaaaggtatttttaatttctaccggtatattgggtatagttttaggacttaaaatctctgttccattggttttggaattctctgtttctcaagctccgttatggtggagtggtttccgttcttggctcaagcctccatatctttacgtcgtcatcaacggaatcatcatcacaatagcagcatcgtcgcggtttaaccaaaacaacggcgagaaagatcagatggagcagatgcaaccgcggccgaagatctcggaggatcaacaaccaattgtggagtatgatacaaagagcgggtggggctccgacgcagtggaatccagtgatttcgtgtacgaggaaaatcagagaggagaagaggtggcaaccagggtttccgaggaggagagcaatgtggcggttgaagatgacagagatggaaacgagtttgttatctctaagtcggagtggattcctccaagtagaacggattcttcggagattccgttggatgctctgcttatacaggagaaacctgctccttcttctagattcggtcaccggaaacctgttaaagtcaatcccgaaggtgggcgagcgttgaaagcggcgaagccaaaacggcatgagacgctggaaaacacttggaagatgataacggaggggaaatcaatgccgttgtccagacacttgaagaagtcggacacgtgggagaatcacggccgtgatatcaacgtggaggcattgaccagctcccctctgatgaagaaatcggaaacgttcagagaccggaccaattaccagctgccacccgaacaagtaagctctttcccggcttcaggaaagctgagaaaagaaccgtcgctgagtcaggacgagttgaatcgtcgagtggaagcttttataaagaagtttaatgacgagatgaggttacagagacaagaatcacttaatcagtacatggaaatggttaaccgtggaagttagccactaaacacaatagtccaatatcttctgccataaccctcaagagaagaaaagaatatatattagattaacttttgggaatatgttttgctccaataaatttaaaaaggttggagatttgaaaggaaaaaaaaatttatgcagggttttatgtttttggtggtttggcgaattcttcgaagatttcataggaatttactgaactcttgt

SEQ ID NO: 190190 - DNA, 6124 bp, Gossypium hirsutum
  unsure (1)..(6124): unsure at all n locations
ttttacctttgctacttttctttttcattgatctcgtctccttttgctgtcttaaaattaaatcaaaaccaccattcctttctatttcagcgtctacttttattcaaaaacctcccgagttctcatcgattgaactcgtttcaactcggatgctagggtttttccttacagttatctgaatttgtgtgacttatatataccgaaatgtctcgagctgaggagctatgggagcggctagtacgggcggcgttaagaagggaaagatttgggatgggttcagtaggacatcctgctggtggaattgctggatacgttccttcatctcttaataatagagatatagatacaattctgagagttgcagatgaaattcaggatgaagaacctaacgtagctagaattttatgtgagcatgcctattcacttgctcaaaatctggatcctaatagtgaaggcagaggtgttttacaattcaagactggtctaatgtctgtgatcaagcaaaagctagcgaaaagagaggttgggaccatagataggagccaagatgttgctcgcttgctggagttctataggctttatagagagaagaacaacgttgacaagctacgtgaagaagaaatgatgttgagggaatcgggtgttttcagtggcaaccttggggagttggagcggaagacattgaaaaggaaaagggtttttggaacgctaagagtattggggatggtattggagcagttgacagaagaaatacctgcagagttgaaacgggtcattgaatcagatgcagccatgactgaggacctgattgcttacaacattatcccattcccactggatgctcctaccataacaaatgctattgtgtcattccctgaggtacgagcagcagtgtcggcattaaagcactataggagcttgccaaaattgcctagtgatttttctattcctgagacaaggagccctgatcttatggattttctgcattatgtttttggatttcagaaagacaatgtttctaaccaacgtgaacacgtagtgctcctcctcgccaatgaacaatctagacatggtattcctgaggaacctgagccaaaattggacgaggctgctgtgcagaaggtgtttctgaagtctcttgataactacatcaaatggtgcaactacttgtgcattcaacctgtttggagcagtctggatgctgttagcaaggagaaaaaagtactctttgtttctttgtatttcttaatttggggtgaagctgccaacattagattccttccagaatgcttgtgctacatatttcatcatatggcgagggaaatggatgaagctctaaggcagcagattgctcagccggccaatagttgttctaaagatggtgtagtatcattcctcgatcaagttatcactccgctttatgatgttgttgctgcggaagccgcaaacaatgagaatggccgagcaccacattctgcttggagaaattatgatgattttaatgaatacttttggtcacttcattgttttgatcttagctggccttggcgcaaaacttcatttttccagaagccagaaccaaggtcaaagaatccactgaaattgggaggaggtcaacatcgaggaaaaacttcatttgttgagcatcggacattttttcatctttaccatagttttcatcggttgtggatatttctcgttatgatgtttcagggtcttacaatcattgcattcaataatggacatctgaatgccaagactttacgggaagttcttagtcttggtccaacttttgtagtgatgaagtttacagaaagtgttttggatgtcatcatgatgtatggcgcatattcgaccacacgacgcctagctgtttccagaatttttcttcgatttatttggtttggtgttgcatcagtcgttgtatctttcctttatgtgagagctttgcaggaagagagtaaaccaaattcaaactcagttgttttcagattgtatttgattgttataggcatctatggtggtatccattttttcataagtttccttatgcggataccagcatgtcatcgtttgaccgaactgtgtgatcagttttctttgattcgctttatcaagtggatgcgtcaggaacagtactatgttggacgtggcatgtatgagaggactactgactttattaaatatatgattttctggcttatcatcttgagtgggaagtttgcatttgcttattctttccagatcaagccactggtgaagccgacaaggacagtcatagccatggataacatagaatattcttggcatgatttcgtatctagaaataaccataatgctgtgacagtggtttgtttatgggctccagtgatagctatgtatctgttagacatttacattttttatactgtcttatctgctgtgtggggattcttgcttggggcaagggatcgtctcggggagattagatcgttggatgctgtccaaaagctatttgaggagttcccagatgcttttatgaagagactccatcctgttagggcttcggcatcctcttctagtgaggttgtggagaagagcaagtttgatgctgctcgtttctctccattttggaatgaaattataaaaaatcttagggaagaggattatttaactaactttgaaatggaattactttttatgcctaaaaatactgggaaactccccttggttcagtggcccctttttctgcttgccagcaagatatttttggctaaagatattgctgctgagagtagagattcacaagatgagctctgggaaaggatttcaagggatgagtatatgaagtatgcagttcaggaatgctattatgccctccgatatatacttacagcaatactggaagctgaaggaaggacgtgggttgagaggatatatgagggcattgaagccagtataacgaagaagactatcagtgatgattttcaactaaacaagctgcagctggttatttcacgtgttactgctctcttaggaattctgaatcaggctgaaaagccggagcatgaaaaaggtgctgttaatgctgttcaagatttatatgatgttgtacgacatgatgtccttgccatttatttgagggaacactctgatcagtggcagagcatattaaaagctaggactgaaggtcgattatttgcaaagttgaattggcctagagatcccgagttgaaagcacaagtgaaaagattgtattctctattaacgatcaaagattcagcatcaaatgttcccaaaaatctcgaggcgagacgtagactggagttcttcacaaattcacttttcatggatatgcccccagcaagacctgtgcaggagatgctgtccttcagtgtttttaccccatactattctgagattgtgctttatagtatgaatgaactgttaaagaagaatgaagatggaatatctattttgttttacctccagaagatatatccagatgagtggaagaattttcttgctaggattggccgtgatgaaaatgcagcggaaacggaactttatgatagtcctagtgacatccttgaacttcgtttttgggcctcttatcgaggacagacactggcaagaactgttcgtggcatgatgtattatagaaaggctcttatgcttcaaacctatttggaaagagaaaatgctagagatacagaggctgcactttctagattggagacaacagatacccaaggttatgagttatctcccgaagctcgtgcacgggcagatcttaagtttacatacgttgtcacatgtcaaatatatggaagacaaaaggaggagcagaagcctgaagctgctgatattgcattgctgatgcaaagaaatgaagcccttcgtgttgctttcattgatgttgttgagacactgaaggatggtaaagtgcacactgagtactattcgaagcttgtgaaagctgatatcaatgggaaagacaaggaaatctatgccataaaattgcctggagatccaaaacttggtgaaggcaaacctgagaatcaaaaccatgcaattgtgtttactcgaggaaatgcagttcagacaattgacatgaatcaggacaactattttgaggaagccttgaaggtgagaaaccttttggaagaatttgaccgtgatcatggcatacgtcctcctactattcttggtgtcagggaacatgtatttacgggaagtgtctcttctttagcttcttttatgtccaaccaagaaagcagctttgtaactcttggtcagcgtgttttagcaactcctttgaaggtccggatgcattatggccatccagatgtttttgatagggttttccatataacaaggggtggtatcagcaaggcatctcgtattataaacataagcgaagatatttatgccggcttcaattctactttacgccaaggaaatatcactcatcatgagtatattcaggttggcaaaggacgagatgttgggctcaatcagattgctttatttgaagggaaggttgctggtggtaatggtgaacaggttcttagtcgagatgtatacaggcttgggcagctctttgacttcttcagaatgatgtcattctacttcaccactgtgggattctatttttgtaccatgttaaccgtgctgactatatatattttcctttatggaagggcttatttggcactttctggagttggtgaaacaatgcaagagcgagctcggataatggataacgctgctcttgaagctgctctaaatactcagtttctgtttcaaattggtatcttttcagctgtgccaatggttttgggcttcatcttggagcaaggtttcctaagggctattgtcagttttatcacaatgcagttacagctttgtactgttttcttcacattctccctgggtacaagaactcattattttggtcggacaatcctgcatggtggtgcaaggtatcaagctactggtagaggttttgtggtccgccatattaaattttctgagaactacagactatattctcgcagtcattttgttaaagggctagaagttgtgcttctgttggtggtataccttgcatatgggtataatgatagtgcattgtcctacattcttctatcaattagcagttggtttatggctctttcatggcttttcgcaccctatttgttcaatccttctggatttgagtggcaaaagattgtggaggacttcagagattggacaaattggctattttacagaggcggaattggtgttaaaggagaggaaagctgggaagcttggtgggatgaagaaatggcacacattcgcaccatgagaggaagaatatttgagactattttaagtctcagatttttcctgttccagtatggcattgtctacaagctaaatgtgcagggaacaaatacgtcgttgacggtttatggcttttcctgggtcgtacttgccgttcttataatcctcttcaaggtattcaccttcagccagaagatgtcagttaatttccagctgctactgcgtttcatccaaggagtttccttcatgatcgccatagctggtgtagctgttgcagttgcgttaacagacttgtccatccctgacatatttgcttccatcttagcatttgtgcccaccggatggggaatcctctccattgctgcagcttggaaaccattggtgaaaaagacggggttgtggaaatcagtgcgatcaatggcacgattatacgatgctggaatgggaatgattatattcgttccagtagcatttttctcatggttcccgttcgtctcgacattccagacaaggttgatgttcaaccaagctttcagcagaggtttggaaatttcacttatcctcgctggtaacaatcccaacactggcctctgatctttttgattactatatatttccaccatatttgtttttaatcacctccctgttcagattaactttagaaattcaacactcaaaatatttgaagtgttcaatttttagttagtttttttttttcaatttaactacttaggatgtaaaaagaaaacatgtttggcattatttttttgtttagtataaaatatggtttcataaaattttttnnnnnnnnnnn

SEQ ID NO: 190191 - DNA, 1075 bp, Gossypium hirsutum
  unsure (1)..(1075): unsure at all n locations
aaagttttcttttataatctttctattctctgaccaaagatcatataaaatctcacaattttccagcaatcgctaaaaaataataaaaatctcaaatccgatcccatggcttctcgtcggcgtatgctgttaaaggttataattctcggtgatagcggggttgggaaaacatctctcatgaatcagtatgttaatcgtaagttcagtaatcagtacaaagctacgattggagccgattttttgacaaaagaggttcagtttgatgatagattgtttacattgcagatatgggatactgctgggcaggaaaggtttcaaagtttaggtgtggctttctatcggggtgctgattgctgtgtacttgtgcatgatgttaatgtcatgaagtcctttgataatcttaacaactggcgagaagagtttctgattcaggcgagtccgtctgaccctgaaaactttccatttgttgtgttgggaaacaaggttgatgttgacggtggtaacagtcgcgtggtttctgagaagaaagcaaaggcatggtgtgcttcaaaaggaaacataccttactttgagacctctgcaaaagaaggattcaatgtcgatgctgcttttgagtgcatagccagaaatgctctcaagaatgagcctgaagaagaaatctaccttcccgaaaccattgatgttgctagtggaggacggccacagagatctacaggctgcgaatgttaaatgagtcattggatggatcttgttttgtcagagttgcaaaaacagctgccaaagatttcgcatttctatcagttaatattgcaggctctgactattagtaataaactagtgatgacataagacttggatttttgtatcataaattggttagaaaagtaaagttgggttgatcctcctcttgttgatttttcattcaacttccaactaaaaaaattcatgtttaaaagtaattgtaccatgcctcctacttactacgctgtgatcactcatattctgtaataataaaatatggagcttctgttgnnnnnnnnnnnnnnnnnnnnnnnnnnnnnnnnnnnnnnnnnnn

SEQ ID NO: 190192 - DNA, 679 bp, Gossypium hirsutum
aggaccggcccgaccgacgcgtccggccacgcgttcggctaccttaacacaacttaccaactcaaaaaccccaagttttcactttcaaaaaacttcccacattcaccatgtctggcacgtgcggcaactgtgactgcgctgaccgcagccaatgcacgaagaagggaaacagcaacaccatgatcgttgagactgagaagagctacatcaacaatgttgagatggatgctccagctgagaacgatggcaagtgcaattgcggtactggctgcagctgcacagactgcacctgtggccactaagccaacatacaatggtcatgcttcagatcatggcatatatagggatctaaataatgaatttaaggttgaataatttgtctgttgtagtttgtgtggtgacttatatctgtcagttaacctttgtatcctttactatgatgtaatggctatgcttatggccttatctggttaatgaagtatccttactataaaaaaaaaaaaaaaaaaaaaaaaaaaaaaaataaaataaaaaaaaaaaaaaaaaataaataaaaaaaaaaaaaaaaaataattataaataatattatataaaaaaataaaataaaatataataatattaaataaataaaaaatagggttgtcctttttaaagatccatagttttctttctcttactt

SEQ ID NO: 190193 - DNA, 1918 bp, Gossypium hirsutum
ccccccccgggcgcccccgccttcaattcctcatttcaagggagagagtgtatcagtgtttcttcccctcttttacttaatttctctccgccatggctctctccgtcgagaaaaccgccgccggccgtgagtacaaggtcaaagacatgtctcaggctgacttcggtcgtctcgagatcgagttagctgaggttgaaatgcctggtttaatggcttgtagaaccgagttcggccctgcccaacctttcaaaggagccaaaattactggttctcttcacatgaccatccaaaccgccgttcttattgaaacccttaccgccctcggagctgaagtccgttggtgctcttgcaacattttctctacccaagaccacgctgccgctgccatcgctcgtgactccgccgctgttttcgcttggaaaggggagaccctccaggaatactggtggtgtactgagagagcccttgattggggtcctactggtggacctgatctgatcgtcgatgatggtggtgatgctactttgttgatccacgaaggtgttaaagctgaggaagtttatgagaaaactggtcaactcccagatccggcttcgactgataacgctgagtttcagattgttttaaccattatcagagatgggttgaaagcagatcccaagaagtatagaaggatgaaggagagattggtaggtgtttctgaagaaactacaactggagttaagaggctttatcagatgcaggccaatggaaccttgttgttccctgctattaatgtcaatgactctgttactaagagcaagttcgataacttgtatggatgccgtcactctcttcccgatggtttgatgagagctaccgatgtcatgattgctggcaaggtcgctgttgtctgtggttatggtgatgtcggcaagggttgtgctgctgccttgaagcaagccggtgctcgtgtcattgtcactgagattgatcccatctgtgcccttcaggctctcatggaaggacttcaagttttgacccttgaggatgttgtctccgaggctgatatctttgtcaccacaactggtaacaaggacatcatcatggttaaccacatgaggaagatgaagaacaatgccattgtttgcaacatcggtcactttgacaatgaaattgacatgctcggtctcgagaattatcctggtgtcaagcgcattaccatcaagcctcaaaccgataggtgggtcttccctgaaaccaacaccggcatcattgtgttggctgaaggacgtctcatgaacttgggttgtgctactggccaccctagctttgtcatgtcatgctctttcaccaaccaggtgatcgcccagctcgagctgtggaaggagaaggcaaccggcaagtacgagaagaaggtgtacgttttgcctaagcaccttgatgagaaggtggctgctcttcaccttggaaagcttggggctaacctcaccaagctcaccaaggatcaggctgactacattagcgtccccattgagggtccttacaagcctcctcactacaggtactgaggagagaatacgagagagagagagggagagagttggactagaaaaaggaaccatacaacgggatggtttgattgtttgtttttactaaaatttattgatgatttgtggttagatggttagattttgattttgataggagtttgcgtgttggaatgaatgctaagttttggtggaaaagaaatgaggtctctgcttgaaaaaaaccaaatggggtctgaataaggtgatggggattgtgtgggagatgatattcgccatggtgcagtccaatttgctgcatctggttttcattattaatcaaaaaaatatatttccccgccgggggcaagatcgcctctgggtggtggggcgttctctcgttccgcttt

SEQ ID NO: 190194 - DNA, 1480 bp, Gossypium hirsutum
gtaaagaataaatttggaaccctaagggggccccccgatttaaggtttgagggggaaaccccgggaaattgggggaaaaggggggggaaaaagggaaagggcgggggctaaggggcccgccaaaattaacgttaaaagggggggaaaccccaaaccccccccggtttaaaggccccgaaaagggggggttcccttttccctttaagggggggaaaattttgggagggggaattgggggggcctttttttttttaaacccccttggggaaagggggattttttccaaggggtttaatttgggaaaacccgggtttttcccctttaaaaatttttaaaaaaccgccccggggggggggttaaaaaaaattattttggggggaatgggggtttccccccgggggggcccccgaaaatttttttttttttttttttttttttttttttttttttttttttttttttttttttttttttttttttttttttttttttttttttttttttttttttttttttttttaagataaataaatagcatgtaataaaaagacaatttgttcatcaaaataaagagttaaagtcacgaatgagacgttatgatgatatgagactgctactcaaaacactactaaacaaaaccagaaccaaaacgctttcgaatacaaaagaacactaccacttaaaagcaaaataaataaaaatagaaagagatagggaaagggaaggggaaggggaaggggaaggggaaggggggctttaagttttaaggcactccctagattcacaaggactctgcggtgtaatcagccgcaactcatctccgtacatgataaaaattaaggcattccacgggttcatatattctagagaaggaacagcagcaacagccatcattgatcacaacatttcttgcgaccgtcggacacagcggccaacctttctcttaaattcatctttcctctctctccactccttagcagcttcaacattcgcaggagattcatcattagggcttgaaagcattgatatgatactcaatacaatactttcaactgtatggactggcatccagcgctcacttgcaagctcgtaaccatttggatcatcacctggaggatgaagaattgatatgcaaacacgcccatcaggataaacattaggatgccaaatctctgatgtaaatttcactgttggagggctgtttggataattgggtggaaagctcatgatggcattgaaaaatcccccttcataaagagtatcaggtggtccgataattgtaacactccattcaaagatattgttttcatcaaccaatccggccgagaacccatcaaccggattcttacaaagatctttgagctgtttttgaaggaggaggctggcttgagatgccatataaacaaacaaaagaaagaatagtgagggttctagagagagagggagaggttaaaaaagccctgcgatttgaagagagaag

SEQ ID NO: 190195 - DNA, 858 bp, Gossypium hirsutum
  unsure (1)..(858): unsure at all n locations
ctcaacgctatctttttgttccttttccaagggagagtgtgatctgttcttcttcacttcatttcactaacccatggctctttccgtcgagaaaaccaacaccggcatcattgtgttggctgaaggacgtctcatgaacttgggttgtgctactggccaccctanctttgtcatgtcatgctcgttcactaaccaggtgatcgcccagctggagctgtggaaggagaaggcaacaggcaagtacgagaagaaggtgtacgttttgcctaagcaccttgatgagaaggtggctgctcttcaccttggaaagcttggggctaacctcaccaagctcaccaaggatcaagctgactacattagcgtccccattgagggtccttacaagccccctcactacaggtactgaggagagaatacgagagagggacagagagtgagagagagacagggagagagttggactagaaaaaggaaccatacaacgggatggtttggtttttactaaaatttattgatgatttgtggttagatggttagattttgattttggtaggagtttgtgtgtggggtggatggtaagttttggtggaagagaaatgaggtctctgcttgaagaagaccaaatggggtttgaataaggtgatggggattgtgtgggagatgatatttcgccattggtgcagtccagttttgctgcatctggttttcaattaattaatcaaaaaaagaggcgactttccctttctaaaaaataaaaaatatgactaaannnnnnnnnnnnnnnnnnnnnnnnnnnnnnnnnnnnnnnnnnnnnnnnnnnnnnnnnnnnnnnnnnnnnnnnnnnnnnnnnnnnnnnnn

SEQ ID NO: 190196 - DNA, 543 bp, Gossypium hirsutum
gttgtttcgatatttgtattaagaatcgccctttagtgatcagtgaggtgaagaaaaatgtcttgctgtggtggaaactgcggttgcggctccggttgcaagtgcggcagcggctgcggcggttgcaagatgtaccctgagatgaactttgctgagcaaaccacaaccgggacacttgttcttggcgtggcaccccggaaagtgcactttgatggagctgaaatggaaactggggctgaaaatggctgcaaatgtggagataactgcacttgcaacccttgcaattgtaaatgagaaaaaaaagctaagcatattatggaagctgatctaaataatatatgatgtatttgggtttttactattagaataaagcagctatggttcattaggtgttttgcttcttgtatccatggttgcttggtttgtgtatgtgtgtgtgtatatagtgaaatgaaattattttaactagctttgttgtgttactgccatgttatataactgatgaatgaatgaaggaaagctctatttgccttttgcttaaaa

SEQ ID NO: 190197 - DNA, 723 bp, Gossypium hirsutum
  unsure (1)..(723): unsure at all n locations
gaactttcaaatggtattttacaaggacatntaagattcatgagccacatctttcccttaataaattaaggcacttacgtcggttacggatgtagagccgaagcaccagcagcggcaaacctggatcataacatttcttgggaccgtctcacgcagcggttgacctttcctcnngaattcatctctcctctctctccattcctttgcagcttcaacattcgcgggggattcatcgttagggctggaaagcattgatatgatactcaacacaatactttcgactgtatggactggcatccagcgctcacttgcaagctcatagccatttggatcatcacccggaggatgaagaattgatatgcaaacacgcccatcaggataaacattaggatgccaaatctctgatgtaaatttgactgttggagggctgtttggataatttggtggaaaactcatgatagcattgaaaaatcccccttcataaagagtatcaggaggtccaataattgttacactccattcaaagatattgttctcatcgaccaatccagccgagaacccatcaaccggattcttacaaagatctttgagctgtttttgaaggaggaggctggcttgagatgccatgtaaaagatgagagagagagagagagagctgagacaaagctagctctgggatttcaagataggaaaagtaaaagaaaatttataagcagacactcc

SEQ ID NO: 190198 - DNA, 430 bp, Gossypium hirsutum
ctcgctcattgctatctttttgttccttttccaagggtgagtgtgatctgttcttattcactccatttctttaacccatggctctttccgtcgagaaaaccgccgccggccgtgagtacaaggtcaaggacatgtctcaggctgacttcggtcgtctcgagatcgagttggccgaggtcgaaatgcccggtctcatggcttgccgagccgagttcggccctgcccaacctttcaagggagccaaaatcaccggttctcttcacatgaccatccagaccgccgtcctcatcgaaaccctcaccgccctcggagctgaagtccggtggtgctcttgcaatatcttctctacccaagaccatgccgccgccgccattgcccgtgactcggcagccgtgttcgcctggaaaggtgagaccctccaggaatactg

SEQ ID NO: 190199 - DNA, 588 bp, Gossypium hirsutum
gtccgcccacgcgtcctgttttcgatttttgtattaagagtcgccctttggtgtttttctaattcaatcagtgaggtgaagaaaaatgtcttgctgtggtggaaactgcggttgcggctccggttgcaagtgcggcggcggcggcggctgcggctgcggcggttgcaagatgtaccctgagatgaactttgctgagcaaaccacaactgagacacttgttcttggcgtggcaccccggaaagtgaactttgatggagctgaaatggaaactggggctgaaaatggctgcaaatgtggagataactgcacttgcaacccttgcaattgtaaatgaggggaaaaaaaaaaccgaagcatattatggaagctgatctaaataatatatgatgtatttgggtttttattattagaataaagcagccatggttcattaggtgttttgcttcttgtatccatggttgcttggtatgtatagtgaaatgaaagtattttaactagctttgttgtgttactgccatgttatataactgatgaatgaatgaaggaaagctctatttggcttttgcttacaaaaaaaaaccccttttt

SEQ ID NO: 190200 - DNA, 847 bp, Gossypium hirsutum
cgggtcgcccacgccttcggccaaggcttccgcccacgcttccgcccacgcttccgcccacgcgtccgcccacgcgtccgggggcgcgtccgtttgacaatgaaatcgatatgctcggtcttgagacctatcctggtgttaaacgcatcaccattaagcctcaaaccgataggtgggtcttccctgaaaccaaaaccggcatcattgtgttggctgaaggacgtctgatgaacttgggatgtgccactggacacccaagttttgtcatgtcctgctcgttcactaaccaggtgattgcccagctcgagctatggaaggagaaggcaactggaaaatatgagaagaaggtttacgtattgccaaagcacctcgacgagaaagttgctgcacttcacctcggcaagctcggagctaagctcactaagctcactaaagatcaagctgattacattagtgtgcctgttgaaggtccttacaagcctcctcattacaggtactgagggaagagttgatgagtttttatcaagaaagaaaaaacatccggatggtttgattgtttcttgttttactgaaatttcatgatggttaggtttttgttttatttttagagttttttttgtgtttgggtgatgggaaagtgcctgggggtgggaaaatgatgtgggatttggtatcttcttgtatgaagatgaccaaatgggtttgaaataaaaatgttagggatgtgtggaagattatatagtatttgccattaatgcagtcttgttttgctgcattgcttttttttaaagcaattttattttatatacttcaataccaacatgggatattcactaaaatttgatac

SEQ ID NO: 190201 - DNA, 691 bp, Gossypium hirsutum
cccacgcgtccgcccacgcgttcgcgaccagtatggacaagttgaagacttggttggatgagaaggaggctgatatcttcgtcaccacaaccggtaacaaggacatcatcatggttgatcacatgaggaagatgaagaacaatgccattgtttgcaacattggtcactttgacaatgaaatcgatatgctcggtcttgagacctatcctggtgttaaacgcatcaccattaagcctcaaaccgataggtgggtcttccctgaaaccaaaaccggcatcattgtgttggctgaaggacgtctgatgaacttgggttgtgccactggacacccaagttttgtcatgtcctgctcgttcactaaccaggtgattgcccagctcgagctatggaaggagaagggcaactggaaaatatgagaagaaggtttacgtattgccaaagcacctcgacgagaaagttgctgcacttcacctcggcaagctcggagctaagctcactaagctcactaaagatcaagctgattacattagtgtgcctgttgaaggtccttacaagccttctcattacaggtactgagggggacagttaatgagtttttatcgagaaagaaaaagcattcggatgggaaaatgatgtgggatttggtctcttcttgtttgaagatgaccaaatggtttgaaataaaagtgtt

SEQ ID NO: 190202 - DNA, 893 bp, Gossypium hirsutum
gcggactaccaacttaccaagctcctaggactgagacctttcgtgaagaggatcatgatgtatcagcaaggctgattagctggtggaaccacacttcgaatagccaaagatttggctgaaaataacacggacgctagtgttacagtgaaatgcatatgcaccgccttgagacctatcctggtgttaaacgcatcaccattaagccttaaaccgataggtgggtcttccctgaaaccaaaactggcatcattgtgttggctgaaggacgtctgatgaacttgggatgtgccactggacacccaagttttgtcatgtcctgctcgttcactaaccttaagaatcgccctgctgcgagcagtgaggtgaagaaaaatgtcttgctgtggtggaaactgcgggtgcggcttccggttgcaagtgcggcgcaaccgcttcggctgcggcggttgcaagatgtaccctgagatgaactttgctgagcaaaccacaaccgggacacttgttctttggcgtggcaccccggaaagtgcactttgatggagctgaaatggaaactggggctgaaaatggctgcaaatgtggagataactgcacttgcaacccttgcaattgttgaatgagaaaaaaaagctcagcatattatggaagctgatctaaataatatatgatggttaggtttgggtttttacttttagagttctgctttgtgtttgggtgatgggaaagtgtctggggatgggaaaatgatgtgggatttggtctcttcttgtttgaagatgaccaaatggtttgaaataaaagtgttttgaaggatgtgttgaagaatatatagtatttggcttaattcattcttgttttgctgcattggattttttaaagcaatttcattttat

SEQ ID NO: 190203 - DNA, 870 bp, Gossypium hirsutum
acaaatgaccatttcatgataaaaaagcgggactcacaaagaacgtttgccaacaaacacttaccaaaaaacgcttttgaataccgggaaactgttttcagagtaattacattactccagtcaaaaccaaaacaaaaaaagggagagtttttaagtaaagtgttgagatttttttctcttatggccattctacaaggacactcgcagtgttatcgaccaaagctccccacacaatcaattgaaggcattccctgggtactcaaatattgtcaagaagaagcagcggcaatggatcataacatttcttgggaccgtctcacgcagcggctaaccttcctcttgcattcatctcttgtctctctccattctttttgcagcttcaacattcgcaggggattcatcgttagggctggaaagcattgatatgatactcaaaacaatactttcaactgtatggactggcatccagcgctcacttgcaagctcgtagccatttggatcatcacccggaggatgaagaattgatatgcaaacacgcccatcaggataaacattaggatgccaaatctctgatgtaaatttcactgttggagggctgtttggataattgggcggaaagctcatgatggcattgaaaaatcccccttcataaagagtatcaggtggtccgataattgttacactccattcaaagatattgttttcatcaaccaatccggccgagaacccatcaaccggattcttacaaagatctttgagctgtttttgaaggaggaggctggcttgagatgccatataaacaaacaaaagaaaagaatagtgagggttctagagagagagggagaggttaaaaaagccctgcgatttgaa

SEQ ID NO: 190204 - DNA, 776 bp, Gossypium hirsutum
  unsure (1)..(776): unsure at all n locations
gaataccggganactgttttcagagtaataacattactccagtcaanaccaaaacaaaaaaagggagagtttttaagtaaagtgttgagattttttcatatggcattttacaagaacactcgcagtgttatcgaccaaagctccccacacaatcaattgaaggcattccntggtaactcanatattgtcaagaagaagcagcggcaatggatcataacattttttgngaccgtctcacgcagcggctaaccttcctcnngaattcatctctngtctctctccattcttttgcagcttcaacattcgcaggggattcatcgttagggctggaaagcattgatatgatactcaaaacaatactttcgactgtatggactggcatccagcgctcacttgcaagctcgtagccgtttggatcatcacccggaggatgaagaattgatatgcaaacactgcccatcaggataaacattaggatgccaaatcgtctgttgtaaatttcactgttggagggctgtttgggtaatctggtggaaagctcatgatggcattgaaaaatcccccttcataaaaagtatcaggtggtccgacaattgtaacactcccttcgaaaacattgctgtcatcaaccaatccggctgagaacccatctaccggattcttacaaagatctttgagctgcttttgaaggaggaggctggcttgagatgccatataaacaacaaacaaatgaaaaatatagagaggaagcagagaaaagggtctgggaaatgaag

SEQ ID NO: 190205 - DNA, 709 bp, Gossypium hirsutum
  unsure (1)..(709): unsure at all n locations
ttacattactccagtcaaaaccaaaacaaaaaaagggagagtttttaagtaaagtgttgagattttttcatatggcattttacaaggacactcgcagtgttattgaccaaagctccccacacaatcaattgaaggcattcccctgggtactcaaatattgtcaagaagaagcagcggcaatggatcataacattttttgggaccgtctcacgcagcggntaaccttccttnngaattcatctctngtctctctccattctnnngcagcttcaacattcgcaggggattcatcgttagggctggaaagcattgatatgatactcaaaacaatactttcaactgtatggactggcatccagcgctcacttgcaagctcatagccatttggatcatcacccggaggatgaagaattgatatgcaaacacgcccaccaggataaacattaggatgccaaatctctgatgtaaatttgactgctggagggctgtttggataatttggtggaaaactcatgatagcactgaaaaatcccccttcatatagagtagtccaaggtatcataaatgataatctcagttttttgatcatgcttttaacgattagccaaaacccgataaaccatcccgactcagcaagcccattgttgccacccaaaaccccagagcagtcgttaaggacaaattcgtaaagcccatatccagtaacaag

SEQ ID NO: 190206 - DNA, 511 bp, Gossypium hirsutum
  unsure (1)..(511): unsure at all n locations
gattcatcgttagggctggaaagcattgatatgatactcaaaccaatactttcaactgtatggactggcatccagcgctcacttgcaagctcatagccatttggatcatccacccggaggatgaagaattgatatgcaaacacgnccatcaggataaacattaggatgccaaatctctgatgtaaatttgactgttggagggctgtttggataatttggtggaaaactcatgatagcattgaaaaatccccccttcataaagagtatcaggaggtccaataattgttacactccattcaaagatattgttctcatcgaccaatccagccgagaacccatcaaccggattcttacaaagatctttgagctgtttttgaaggaggaggctggcttgagatgccatgtaaaagatgagagagagagagagagagctgagagcgagagagctgagaaaaagctctgggattacaggaccgcaaaaataaaagaaaatttataagcaggcactccg

SEQ ID NO: 190207 - DNA, 383 bp, Gossypium hirsutum
tcccacgcgtccgcccacgcgtccgatcagaatcagttgcaaataagatagagagagagagagagagttggactagaaaaaggggccatgcaacgggatggtttgattgtttgtttttactaaaatttattgatgatttgtggttagatggttagattttgattttgataggagtcatgcgtgtgggatggatggtaagttttggtggaaaagaaacgaggtctctgcttgaagaagaccaaacgggctctgattttggtgctggggattgtgttggagatgatataaatgcatctggtggaaccaagtttgatgcagttggtgttggcttacttagtctacttatcgaagatgtttacttgccaatggatcttattgactac

SEQ ID NO: 190208 - DNA, 624 bp, Gossypium hirsutum
  unsure (1)..(624): unsure at all n locations
ttttcctcgtcgccagtgtcttgaaagaaaaaagaacaggcgaaagtcagaagccctgttacgtaatgaggaacagaagggttgctcaggtgtccactagcgacgacgaggatgaagtaccgatgactcgcagacggtctcggtccgaagataagagaccagaaaggaagaggaagaaaatgaagttacaagatgaagacgatgaagaggtggatgagcagatggaatccaataagaaggtttacgtattgccaaagcacctcgacgagaaagttgctgcacttcacctcggcaagctcggagctaagctcactaagctcactaaagatcaagctgattacattagtgtgcctgttgaaggtccttacaagcctgctgactacaggtactgaggagagaatacgagagagagagagggagagagttggactagaaaaaggaaccatacnaacgggatggtttgattgtttgtttttactaaaatttattgatgatttgtggttagatggttagattttgattttgataggagtttgcgtgtgggatggatggtaagttttggtggaaaagaaatgaggtctctgcttgaagaagaccaaatggggtctgaataaggtgatgggg

SEQ ID NO: 190209 - DNA, 1293 bp, Gossypium hirsutum
cggcattgcgtgcgggacccacgcgttcgcggacgcgtgggcggacgcgtgggcggacgcgtcggcggactgtcgacggcttccatcaacggttggtgccttacctcctcttcttcctccaccaccacctcctctttttccgctcgtcgacgacctacattgcggccttcggtcgtcgctagccttaactcttctccttctcctccgactcttatccaagaccgcccggttttcgctgcccctgttcctttgctcaccccgagagaagagatgggaaacaagtcctacgacgaagccattgaagctctcaagaaacttctcagtgagaaaggagaactgaaagctgaagcagctgcaagggtagatcaaataacagcagagttaaacacaacatcagctgacggcaaaccatctgactcttctgttgagagactgaaagaaggcttcgtttacttcaagaaagaaaaatatgaaaagaatcctgctctgtatggtgagcttgccaagggtcaaagccctaagtatatgattgttgcctgctcggactctagggtctgcccatctcatgtgctggacatgcaacctggtgaagcttttgtggtccgtaatgttgctaacatggtgccaccatatgaccagattaaatatgctggcattggatctgctattgaatatgcagttttgcatctcaaggtacaagaaattgtggtgattggacacagtgcctgtggtggaatcaaggggcttatgtctttcccatttgatggaaacaactcaactgatttcatagaggattgggttaagattggaatccctgctaagaccaaggtgctagctgaacatggtggtgagcctttgggagtccaatgtacacactgcgagaaggaagcagtgaatgtatcccttggaaacctgctgagttatccatttgtgagagatggattggtgaagaaaaccctgggaatcaagggcggttactatgacttcgttaaaggaagtttcgagctatggagtcttcagttccaactttcaagctctctctctgtatgaaaacacaccaaaccatcaccattgacaccatctttgttccttaactaccaatcctttttcttacaatgtactatgttcatgtctttatcgtctattacaataaatatagatgatagagatcacctgccgcccgccgtctgcggtggtggctgcggtggctctttccatctataaattctcctttgaagaggtgttcattattcggttttaattgaattaatcggtagaaatttacttcggttc

SEQ ID NO: 190210 - DNA, 1170 bp, Gossypium hirsutum
taaaccaaatcaaagcaatcacccagaattcataaatcctatcttcctgcgggtcaaatgggggaaaattaggtgaatcacaaatgacaagcccttaacttacctaccaaccaccatctgcccatccaggaggccccaagtcttactcttcgtgctatgttgaaatgctgatgtcctatgtctatgccatttatgctttgatataaaaggcatcaccactctttaatttctcatttcacttacaaactcaaccatctttgccctttcattgcttccttgcctgccttaaacctccttcaagcatagccatgactactgaaatggtaatggttgatgaagtcccttttcctccacaaatcacaactaccaagccactatctcttttgggtcatggaattaccgacattgagattcactttttgcaaatcaagttcacagcaattggggtttaccttgaaccagaagttgtaggacatttgcaacaatggaaggggaagcctgggaacgtgctagctgaagatgatgacttcttcgaggctcttattaatgctccagtggagaagtttctgagagttgtggtgattaaggagatcaaaggttcccaatatggagtgcagctagagagtgctgtgagggaccgattggcagctgacgacaaatacgaagaggaagaggaagaagccttggaaaaagttgttgaattcttccagtctaaatatttcaagaaggattcagtcatcacttaccattttccagcaaattcagccactgctgagattgcattcacgacggagggaaaggaggaagcaaaaatcaaagtagagaatgcgaatgtggtcgagatgatcaagaaatggtacttaggaggaacaaggggagtgtctgcaactaccatttcctccttagctaataccctctccgctgagctttgcaaatgaacccatgccgttttgttaccaagtctttcctactaagaaccatcctgtttgttgtgctttctctaccaataaattatgatatgattggagttttcgcttatttacagatccatttccttcactcccatgattgagtgaagcccaaaaatgaaaatgccagacaatttgctttcatgttttcagatgtgcttcattgcctataaaagcaaccgcattgcacaaaaaaaaaaaa

SEQ ID NO: 190211 - DNA, 936 bp, Gossypium hirsutum
gtatggtgagcagaatatccgtcgtgcagttcctttggctcttggtcttctttgtatatcaaacccaaaggttaatgttatggacacattaagcaggcttagtcatgattcggattcagaagttgcaatggctgcagttatctccttgggtttaataggtgctggaaccaataatgctcgcattgctggcatgcttcgcaatctttcaagttattactacaaggatgctagccttctcttttgtgtgcgaattgctcaaggtttagttcatttggggaagggtctattgactcttaatccatatcattctgaccgctttttgctatcaccgactgcacttgctggtttggttacaatgttgcacgcatgcctcgatatgaaagctatggtactgggaaaataccattatgtcctctacttcattgttctggcaatgcagccaaggatgttgatgaccgtcgacgaaaacctcaaacctctatcggtcccagtccgtgtaggtcaagctgttgatgttgtcgggcaggctggtcgacccaagactatcactggcttccagacccattccactccggttcttcttgctgccggtgatagagcagaactggctaccgaaaagtatattcccctttcacccatcctggaggggcatgttattttgaaagaaaacccagactacagagaggatagttaagttaaaaagcaagaactcggccgctacttccatggttggtgattgtaatgtgacaccgttttcaaacaaagtttcgaactttattattatttttttcatgataaaagttttttaagtcagaacgactagatatgaaaatgttagttaaaccaggcaagctttcttttcggccgctgtttataaaaaaaaaaaaaaataagggcggccgtcgcgatctacccacgcgtccgcggacgcgtggg

SEQ ID NO: 190212 - DNA, 936 bp, Gossypium hirsutum
cggacgcgtgggctgcacaaaaaaaatttctctctcgtctttagggagggaaaagaaagtcaatattttttactaaatccctgtaaattcgccaaaaagacttaaaaatccataattcgttgtcttcccgtaatggattttagtcagcctcctgttgaaaattatgccaaccccaagacttgtttctttcatgttctcttcaaggctgcagcattggctttttacatcctttcagctctctttttcaacagctttgtgatcatatttgtggtgactgttcttctttccgcccttgatttttgggtggttaagaatgttagtgggcgcatattagtcggtttgaggtggtggaatgaaattaacgatctcggcgagagtgtatggagatttgaatgtcttgaccaagagtcgttggctcggatgaacaagaaagattcatggctattttggtggaccctttacctttcagcggttgcgtggattgtgcttggaatattctctctcataaggtttcaagctgattatctccttgtcattggagtttgtttgactctcaacattgccaatatcgtcggcttcaccaaatgtcgcaaagatgccaagaagcagattcaacagtttgccacccagaccattgcctcaagattttcttccaccttacaatcagcatttagtgttgtttgaaatagtcgatagtaatatacaagaacgaaaacggaagaaaatgcagtagtagacgagagaagttaacaagtgtggcatgtaaaaaaaacgaggcgtatcgaattgccgattttcgattgtttttttctttatggtacatctaatgcttttgtataatgaatcacacagtaaaactttgtgataacaatggtctttctgcaaaggttacattcctacaattacaatcttctttgagatttttttttcttctta

SEQ ID NO: 190213 - DNA, 439 bp, Gossypium hirsutum
ggcgacgtgggcggttcgctgcccgcgacgtcgcgagaagtccactgaaccttatcatttagaggaaggtgaagaatattgatgtgcttatgcaaaatcatctattttgaagatcggttcaccgtgtgagggtatgcccaccctcttttcctatatccttcctatcgttctttatttgtgaggtttgcgaaattatgcatgtaataggcctaggatcttttcatgctattaatggaataaatttagagttgtgtttgcatgtcatttttgttagaaatgcttgtcttttacttttgaaagatgcttcataagaacatgaatagcctaataagctatcctatttttcatgtttaaaactgtcatatctatgggtgttgaaagattgtctaaaacctttttatgctgtcaatggagtgatattttagattcccccccccca

SEQ ID NO: 190214 - DNA, 2368 bp, Gossypium hirsutum
gattacccagttgagaaggtttcctgttatgtttctgatgatggtgctgctatgttaacatttgaagcactgtctgagacatcagagtttgctaggaagtgggtacctttctgcaagaagtataatattgagcctcgggctccagaatggtattttgcacagaagattgattacctgaaagataaagttcaaacatcatttgttaaggagcgcagagctatgaagagagagtatgaagaatttaaagtccgagttaacggacttgttgcaaaagcacagaaagttcctgaagaaggatggattatgcaggatggtacaccatggcctggtaataacaccagagaccatccaggaatgatccaggttttcttaggccagagtgggggccttgatgctgagggcaatgagctgccaaggttagtttatgtttctcgtgaaaagcgtccaggcttccaacaccacaaaaaagctggtgctatgaatgcacttgttcgagtgtcagcagtccttactaatggagctttcttgttaaatcttgattgtgatcactacataaataatagcaaggctttaagggaagctatgtgttttctgatggatccaaaccttggaaagcaagtttgttacgttcagtttcctcaaaggtttgatggtattgatcggaatgatcgatatgccaacagaaatactgttttctttgatataaacttgaggggtctggatggcattcaagggccggtttatgtcggtacgggatgtgttttcaatagaacagcattgtatggatatgaacccccccttaagcccaagcatagaaaaacagggatactatcttcattgtgcggaggttctcgtaagaagagttcaaaatcaagtaaaaagggatcagacaagaagaaatctggcaagcatgttgattctactgtaccagtattcaatctagaggatatagaagagggtgttgaaggggctgggtttgatgatgaaaagtcattactgatgtcacaaatgagcctggagaaacggtttggccagtctgctgtttttgttgcctctacacttatggaaaatggtggtgtccctcagtctgctacccccgaaacacttcttaaggaagcaattcatgttatcagctgtggatacgaagacaaaacagactggggaagtgagattgggtggatctatggttctgttacagaagatattcttactggattcaaaatgcatgcccgtggttggcggtcaatttactgcatgccaaaacgcccagcctttaaaggttctgctcctatcaatctttcagatcgtctgaaccaagtgcttcgatgggctcttggttctgtggaaattcttttcagtaggcattgccctatctggtatggttatagtggtaggctcaagtggcttgaacgattcgcatatgttaacacaaccatctacccagtcactgctattcctcttctcatgtactgtacactgccagcagtctgtctgctcactaacaagttcattattccacagattagtaaccttgcgagtatatggtttatatccctctttctttccatctttgcaactggtattttagaaatgaggtggagtggtgtgggaattgacgagtggtggagaaatgaacagttttgggttatcggtggtgtgtcggcacatctttttgctgttttccaagggcttctcaaagttcttgctggcattgacactaacttcacggtcacttcaaaagcatcagacgaagatggggattttgctgaactttacatgttcaaatggacaacccttctcatcccaccaaccactctcctcatcataaacttggtgggggttgttgcaggaatatcgtatgccatcaatagtggctaccaatcatggggtcccctctttggtaagctattctttgccttctgggtgatcatccatctctaccccttcttgaaaggtttgatgggacgccaaaaccgtacacctaccattgttgttgtatggtcaattctgcttgcctccattttctctttgttgtgggtgcggatcgatcccttcacaaccagagttaccgggccggatgtagaacagtgtggaataaactgttgagagagaacctataaagactgaagatttgttttggtgtcactaagcttccaatgccaaaggtttgtttagttgtaatttgtgtatttcagttcacatcatgtgcagaatatacggttgatatatatatgtcatcttgtttctactttgatgtaaatattttggagttgggacataactttatcgatttgtgctttctctcaagaaaacactacttcgtaaattaaatattattattttgtttttatcttactatatttttttt

SEQ ID NO: 190215 - DNA, 1426 bp, Gossypium hirsutum
gaaataaaaaaaaaaggcatttctttcatcttaaagagacagcgaggaagccacgaagataatagagtgattttcaatctccattttaagggtgtggaacaatgggtgctggaggcagaatgtcggttccaacgagtccaaaaaaacccgaattcaactcactgaagcgagttccatactcaaagccacccttcactctgagtgaaatcaagaaagccatcccaccacactgtttccagcgctccgttttacgctcattctcatatctcctttacgactttatattggcctctcttttttaccatgtggccaccaattacttccctaaccttcctcaggctctctccaacgtggcttggcctctttattgggccatgcaaggttgcattttgaccggcgtttgggtcatagcccatgaatgtggccaccatgctttcagtgattatcaatggcttgacgacaccgtgggccttatcctccactcttctctcttagttccatatttctcttggaaatatagccaccggcgtcaccattctaacaccggttccctcgaaagggatgaagtgttcgttcccaagaaaaaatctggtttaagatggtgggccaaacacttcaacaatccaccgggtcggtttctgtcaatcaccattcaacttacccttggttggccgctttacttagctttcaacgttgccggccggccttacgacaggttcgcttgccactatgacccttacggccccatattttccgaccgggaacgactccaaatctatatctctgacgccggcgtcctcgctgtcgcctatgcgctctaccgtctcgtgttggccaaaggggtaggttgggttattagcgtttatggggtgccattattggtggttaacgccttcttagtaatgatcacgtatttgcaacacactcacccatctttgccgcactatgattcctcggagtgggactggatgagaggagctttatcaactgtggacagagattatgggattttaaacaaggttttccataacataaccgacactcatgtggctcatcatttgttttcgacaatgcctcactatcatgccatggtggccaccaaggcgataaagcccatattgggggaatactatcagttcgatgggatgcctgtctataaggcgatatggagggaggcgaaggagtgtctctacgttgaaccagatgagggcgacaaggataaaggtgtgttttggtttagaaacaagctttaaatatttgcattttaccttaggcatgttctagtcgttgatgttttaaggatattttagccgacatacttggttttcctttttgggactttttagctttgtatttgcagacaataatcttgttcactattaaataatggtagaaataaatacacagcatggattggcaataaaaa

SEQ ID NO: 190216 - DNA, 657 bp, Gossypium hirsutum
cccacgcgtccgaagaagctgctgttctctctctctctctttcccatagtttcacccatcttttaatccatcgctcacaaaattatgggtttgaaggaggaattcgaggagcatgccgagaaagttaagaccctcccggccgccccttcgaacgatgacatgctcattctctatggactgtacaagcaagctactgttggaccagtgaataccagccgtcctggaatgttcaacatgagggaaaagtacaagtgggatgcatggaaggctgttgaagggaaatcaaaggaggaagcaatgggggattatatcaccaaagtaaaacaactgtttgaggctgctggaagttcttgatgtgtgtgtgtatgaccaatgaaactggtgtaatttcaagcccttgtcggttacttggggttttcattactatgaataaattatgtactctttttctattgctatatgttatttatagtagaaactccttgatttacttttattcttgtggttattacaaaggagatttttacacaaggatggtaatggaacggagcgagagcaattgcatgaattgtctcatccatttatatatgttatgttatgaatgtcacattgttaccatgtactctttttcatgttatttccaatggtgatgaaccg

SEQ ID NO: 190217 - DNA, 568 bp, Gossypium hirsutum
  unsure (1)..(568): unsure at all n locations
nccacgcgttcggccacgcgttcgcccacgcgtccgagaaatttcaagaaactgctctctctgtcttaacgctataatcattgaagaaaaatgggtttgaaggaggaattcgaggagtatgcggagaaagctaagacccttccccagaacactaccaacgacgacaagctcattctctatggactctacaagcaagctactgttggaccagtgaacaccagccgtcctggaatgttcaacatgaaggaaaagtacaagtgggatgcatggaaggctgttgaagggaaatcgaaggaggaagcaatgaacgattatatcactaatgtaaaacagctgcaagaggctgctgctgcatcttcttgacgtgtgtgtgagaatagaaaatggtgtaattttcaagccctttgatacctatgggtttgaaaaggtctaaaactatgaataagcaatgtactatgttttattgctattaagttatattaatgaattatggtttatttaaagtcagagtgtaaagtttttattgtacttatagtatgaatgtgttcaaactaatcgatgattatgg

SEQ ID NO: 190218 - DNA, 528 bp, Gossypium hirsutum
ggttggttgttgaagggaaatcaaaggaggaagcaatgggggattatatcaccaaagtaaaacaactgtttgaggctgctggaagttcttgatgtgtgtgtgtatgaccaatgaaactggtgtaatttcaagcccttgtcggttacttggggttttcattactatgaataaattatgtactctttttctattgctattatgttatttacagtagaaactctttgatttacttttattcttgtggttatttcaaagtagatttttacataatcatccatttatgttatgttatgaatgtcgcattgttacgatgtaacctttttcatgttatttctaacatttaataaggatggtaacgaaacgagatagttatatggatattggcttgtcttatccaattctgttttttgtttgcattgatgttgaaaatattcacgttcatacatgttggatatatatgtgtaactccacatgttttatactgttccaccttattttatttttattaatgagatttcgatttaatat

SEQ ID NO: 190219 - DNA, 1247 bp, Gossypium hirsutum
aaataagccaatttcttgaccatttcttcaccttccaaagggctaacacacatcaaaaatcagttgattgttgataatttgaaactgagacgaagacttcaatggcgtttccagtagtcgataccgagtatctcaaggagatcgataaagctcgtcgagacgttcgcgctctcatcgccttgaagaattgcgctcctatcatgcttcgcttagcgtggcacgatgctgggacgtatgatgtgagcactaaaaccggaggtccaaatggctctataaggaatgaagaagagttcactcatggcgccaatagcggcttgaaaatcgctattgatttttgtgaggaagtgaaggctaaacatcctaaaattacgtatgcagacctataccagcttgctggtgttgttgctgttgaagtcactggaggtcctaccattgactttgtacctggaagaaaggattcaaacatttgccccagggaaggccgacttccagatgctaaaagaggtgcacctcatctgagggacatcttctatcgaatgggtctttctgacaaagatattgtggcattatctgggggtcacactctgggaagggctcatcctgagagatcaggttttgatggcccttggaccaatgaacccctgaagttcgacaactcttactttctggagctgctaaaaggggaatctgaagggcttttgaaacttccaacagacaaggctttgttagatgaccctgagttccgcaagtatgtcgagctctatgccaaggatgaggatgcgttcttcagagattacgccgaatctcataagaaactttcggaacttgggtttactcccacttcagctcgctccaaggtaatggtgaaggacagcactgtattggcacagggtgctgtgggggttgctgttgccgccgcagtggtgatcctaagctacttttacgaggtccgcaaaagaatgaagtgaaagccatattactcttttctagaacagaacatccgttacaaatttagcagaacttagaccaatcatctggctaatagttatgtagttcatgttttctcctacatgatatcgcgtcctatgaaccgtattggcagtaaaagatcgacacaatactaaggtcatctatttgaagtaaataacatggataaatgctctcgagccacttcaatccatgacatttctgttacgaaatgctttcatttgtagttaggggggataattaaagctacaaattgctct

SEQ ID NO: 190220 - DNA, 3269 bp, Gossypium hirsutum
tctgtggaccctttggttagcatattgtttgtagcattgggtttttttctcaaggaagaagaaggagaaagataagtactttttttgagaatgatggaatctggggttcctgtttgccacacttgtggtgaacatgttgggttgaatgttaatggtgaaccttttgtggcttgccatgaatgtaatttccctatttgtaagagttgttttgagtatgatcttaaggaaggacgaaaagcttgcttgcgttgtggtagtccatatgatgaaaacctgttggacgatgtcgagaaggccaccggcgatcaatcgacaatggctgcacatttgaacaagtctcaggatgttggaattcatgcaagacatatcagcagtgtgtctacattggatagtgaaatggctgaagacaatgggaattcgatttggaagaacagggtggaaagttggaaagaaaagaagaacaagaagaagaagcctgcaacaactaaggttgaaagagaggctgaaatcccacctgagcaacaaatggaagataaaccggcaccggatgcttcccagcccctctcgactataattccaatcccgaaaagcagacttgcaccataccgaaccgtgatcattatgcgattgatcattcttggtcttttcttccattatcgagtaacaaaccccgttgacagtgcttttggactgtggctcacttcagtcatatgtgaaatctggtttgcattttcctgggtgttggatcagttccctaagtggtatcctgttaacagggaaacatacattgacagactatctgcaagatatgaaagagaaggtgaacctgatgaacttgctgcagttgacttcttcgtgagtacagtggatccattgaaagagcctccattgattactgccaatactgtgctttccatccttgccttggactacccggtggataaggtctcttgttatatatctgatgatggtgcggccatgctgacatttgaatctctagtagaaacagccgactttgcaagaaagtgggttccattctgcaaaaaattttccattgaaccccgggcacctgagttttacttctcacagaagattgattacttgaaagataaagtgcagccctcttttgtaaaagaacgtagagctatgaaaagagattatgaagagtacaaaattcgaatcaatgctttagttgcaaaggctcagaaaacacctgatgaaggatggacaatgcaagatggaacttcttggccaggaaataacccgcgtgatcaccctggcatgattcaggttttccttggatatagtggtgctcgtgacatcgaaggaaatgaacttcctcgactggtttacgtctctagagagaagagacctggctaccaacaccacaaaaaggctggtgctgaaaatgctttggttagggtgtctgcagttcttacaaatgctcccttcatcctcaatcttgattgtgaccactatgttaacaatagcaaggcagttagggaggcaatgtgcttcttgatggacccacaagttggtcgagatgtatgctatgtgcagtttcctcaaagatttgatggcatagataggagtgatcgatatgccaataggaacacagttttctttgatgttaacatgaaaggtcttgatggaatccaagggccagtttatgtgggaacaggttgtgttttcaataggcaagcactttatggctatggtccaccttcaatgccaagttttcccaagtcatcctcctcatcttgctcgtgttgctgcccgggcaagaaggaacctaaagatccatcagagctttatagggatgcaaaacgggaagaacttgatgctgccatctttaaccttagggaaattgacaattatgatgagtatgaaagatcaatgttgatctctcaaacaagctttgagaaaacttttggcttatcttcagtcttcattgaatctacactaatggagaatggaggagtggctgaatctgccaacccttccacactaatcaaggaagcaattcatgtcatcagctgtggctatgaagagaagactgcatgggggaaagagattggatggatatatggttcagtcactgaggatatcttaaccggcttcaaaatgcactgccgaggatggagatcgatttactgcatgcccttaaggccagcattcaaaggatctgcacccatcaatctgtctgatcggttgcaccaggttcttcgatgggctcttggatctgttgaaattttcctaagcaggcattgccctctatggtatggctttggaggtggtcgtcttaaatggcttcaaagactagcatatataaacaccattgtctatcctttcacatcccttccactcattgcctattgttcactaccagcaatctgtcttctcacaggaaaatttatcataccaacgctctcaaacctggcaagtgttctctttcttggccttttcctttccattatcgtgactgctgttctcgagctccgatggagtggtgtcagcattgaggacttatggcgtaacgagcagttttgggtcatcggtggcgtttcagcccatctctttgccgtcttccaaggtttccttaagatgcttgcgggcattgacaccaactttactgtcactgccaaagcagctgatgatgcagattttggtgagctctacattgtgaaatggactacacttctaatccctccaacaacactcctcatcgtcaacatggttggtgtcgttgccggattctccgatgccctcaacaaagggtacgaagcttggggaccactctttggcaaagtgttcttttccttctgggtcatcctccatctttatccattcctcaaaggtcttatgggacgccaaaacaggacaccaaccattgttgtcctttggtcagtgttgttggcttctgtcttctctcttgtttgggttcggatcaacccgtttgtcagcaccgccgatagcaccaccgtgtcacagagctgcatttccattgattgttgatgatattatgtgtttcttagaattgaaatcattgcaagtaagtggactgaaacatgtctattgactaagttttgaacagtttgtacccattttattcttagcagtgtgtaattttcctaaacaatgctatgaactatacatatttcattgatatttacattaaatgaaactacatcagtctgcagattttacccgttctaatgtttatgatatataatattgtacctaaatacatttcatgctgattatgtatg

SEQ ID NO: 190221 - DNA, 2784 bp, Gossypium hirsutum
aaagtaggtttggtaagcaacgataatgggggaaatgatcctcctgaagaagatgattatctcttggctgaagctcgccagcctctatggcgaaaagtgccaatttcgtcaagtctgataagcccttaccggatagtcatcgtcctccgattcttcatcctcgcatttttcctccggttccgtattctaacacccgcctacgacgcttacccgttatggctaatctctgtcatctgcgaagtttggttcgccttctcctggattctcgatcagttccctaaatggttccctattactcgcgaaacttacctcgatcgcctctccttgaggttcgagcgtgaaggagagcccaatcaacttggcgccgtcgacgtcttcgtcagtaccgtcgaccctctcaaggaaccccccatcataacggccaacacggttctatcgatcttggccgtcgattacccggtcgagaaagtgtgttgttatgtgtcggacgatggtgcttccatgcttcttttcgattcgttgtctgaaacggctgagttcgcgaggagatgggttccgttttgtaagaagcataatgttgagcccagggcgccggagttttatttcaatgagaagattgattatttgaaggacaaggtccatcctagctttgttaaagaacggagagccatgaaaagggaatatgaagaatttaaagtaaggatcaatgcattagtagcaaaagctcagaagaaaccagaagaaggatgggtgatgcaagatggcaccccatggcccggaaataacactcgtgatcatcctggaatgattcaggtctatctaggaagtgccggtgcactcgatgtggatggcaaagagctgcctcgacttgtctatgtttctcgtgagaaacgacctggttatcagcaccataagaaagccggtgctgagaatgctctggttcgagtttctgcagtgcttactaatgcacccttcatattgaatctggattgtgatcattacatcaacaatagcaaggccatgagggaagcgatgtgctttttaatggatcctcagtttggaaagaagctttgttatgttcaatttccacagagatttgatggtattgatcgtcatgatcgatatgctaatcgaaatgttgtcttctttgatatcaacatgttgggattagatggacttcaaggccctgtatatgtaggcacagggtgtgttttcaacaggcaggcattgtatggctacgatccaccagtctctgagaaacgaccaaagatgacatgtgattgctggccttcttggtgttgctgttgttgcggaggttctaggaagaaatcaaagaagaaaggtgaaaagaagggcttactcggaggtcttttatacggaaaaaagaagaagatgatgggcaaaaactatgtgaaaaaagggtctgcaccagtctttgatctcgaagaaatcgaagaagggcttgaaggatacgaagaattggagaaatcgacattaatgtcgcagaagaatttcgagaaacgattcggacaatcaccggttttcattgcctcaactttgatggaaaatggtggccttcctgaaggaactaattccacatcactgattaaagaggccattcacgtaattagctgtggttatgaagaaaaaactgagtggggcaaagagatcggatggatttatgggtcggtgacggaagatatattaacaggtttcaagatgcattgtagagggtggaaatcggtttattgtgtaccgaaaagaccggcattcaaagggtccgctccaatcaatctctcggatcggttgcaccaagttttgagatgggcacttggttctgtagaaattttccttagtcgtcactgtccactttggtatggttatggtggaaaactgaaatggctcgagaggcttgcttatatcaacaccattgtttaccctttcacctcgatccctttactcgcctattgtactattccagctgtttgtcttctcaccggcaaattcatcattccaactctaagcaaccttacaagtgtgtggttcttggcacttttcctctccatcattgcaactggagtgcttgaacttcgatggagcggggttagcatccaagactggtggcgcaatgaacaattctgggtgatcggaggtgtctccgcccatctttttgctgtcttccagggcctcctcaaagtcctagctggagtagacaccaacttcaccgtaacagcaaaagcagcagacgatacagaattcggtgaactttatctcttcaaatggacaactctcttaatccctcccacaactctgataatactgaacatggtcggagtcgtggccggagtttcagacgcaatcaacaacggctatggttcatggggtccattgttcggcaaactgttcttcgcattctgggtcattcttcatctttacccattcctcaaaggtttgatggggagacaaaacaggacgcccaccattgttgtgctttggtccatacttttggcatcgattttctcactggtttgggtacggatcgatcccttcttgcccaaacaaacaggtccagttcttaaacaatgtggcgtggagtgctaaatggtgttttacaaacctttcttattattttattttccctttttgccactactgttgatttgctgtgattctaaaagggatttatcttgtttgtaaaaagtctcctatgattttgttggttcaatttaatttctatatggtaaaaaaatatttctttaaattaactatataaaaaactcgcta

SEQ ID NO: 190222 - DNA, 1185 bp, Gossypium hirsutum
cctgtccaaaattgctatcactctctcgtttcttaccagattcagaaagaaataaaggaagaagaagcaatggccactcttacagtgcccacgacagttccttcggtgtctgaagattgtgaacagctaagaaaagccttttcaggatggggaactaatgagggcttaatcatagatatattgggtcacagaaatgccgagcaacgaaacttgattcgaaaaacctacgctgaaacctatggagaggatctcctcaaggcactagacaaggagctctcgaatgactttgagaggctggttttgctttgggctcttgatcctgctgaacgtgatgcccttttggctaatgaagccaccaaaaggtggacttcaagcaatcaggtccttatggaaatagcttgcacaaggtctgccaaccaactgcttcacgcaaggcaggcttatcatgctcgttataagaagtcgcttgaagaggatgttgctcatcacacgactggcgacttccgtaagctcctcctacctctagtgagttcatacagatatgagggagaggaggtgaacatgactctggcgaaaacagaggcgaagttgcttcatgagaaaatttcagacaaagcttacagtgatgacgatgtcataagggttttggctacaagaagcaaggcacagatcaatgcaactctgaatcactacaaaaatgaatatggaaatgacataaacaaggacttgaaggctgatcctaaggatgagttccttgcactactaaggtccacagtgaagtgcttggtctatccggaaaagtattttgagaaggttcttcgcctagcaatcaatagacgaggaacggatgaaggagctcttacaagagttgtttgcactagggctgaggtggatctaaagatcatagcagatgagtaccagcgaaggaacagtgtcccactgactcgtgccattgtcaaggacactcatggagactatgaaaaattgctgctggtacttgcaggacatgtggagaattgaatctgatatcatgagacaatttcctggtgaataaatgtttatgaccaaactataatggtctagtgtggttattgatgttttcctgtttttctatgtagtattgcgagttatatgctatccaagaattcgaagtctatttaaaaccaaaaaaaaaaaaaaaaaaaa

SEQ ID NO: 190223 - DNA, 1288 bp, Gossypium hirsutum
  unsure (1)..(1288): unsure at all n locations
tttcacgcgtccggtgattagtactttattttttgccaataaaattattttctatgcactatataaagtaccttagccaattttcctcatcaccatcgtctgctattcttcacaaaaaagaaaagaaaaattacagtgaaaatggcaacccttaaagttccagctcatgtacctgccccttctgaggatgctgagcaacttcgtaaagcttttgaaggatggggtacaaatgagcaattgattatcgacatattggctcacaggaatgcagctcagcgcaatttgattcgtaaaacttatcgtgaagcttatggggaagatctccttaagtctttggatgaggaactttcaagtgactttgagcgagctgtggtgctgtttactttggaccctgcagagcgtgatgcatttctggctcatgaagctacaaagaggttcacatcaagccattgggttctcatggaaattgcttgcactaggtcttcacatgaactgttcaatgtgaggaaggcgtatcatgctcgttataagaaatcccttgaagaagatgttgctcaccacactaccggagagtaccgcaagcttttggtccctcttgttagtgcattccgatatgagggagaggaggtgaacatgacattggcaaaatctgaggctaagatacttcatgataaaatctcggacaagcattataccgatgaggaggtgattaggattgtatcaacaaggagtaaggcacagctcaatgcaactctcaaccattacaatacttcattcggcaatgctatcaacaaggatttgaaggctgatcccagtgatgaattcctcaaattactaagagctgtgatcaagtgcttgaccaccccagagcaatatttcgagaaggttctacgtcaagccatcaataagttgggatccgatgaatgggctcttacccgagtcgtcacaactcgtgcagaggtcgacatggtacgtattaaggaggcatatcaacgaagaaacagcatccctctcgaacaagcaattgctaaagatacttcgggtgactatgagaagtttcttcttgccttgatcggagctggagatgcatgaaccgtcttcggtattaagttcctctgtatgaatgtctagtttgccttatccgctatgacttaataatttatgcttggtttttcatcgttttcattatctaaagcattgcttgcttccatgatagaacattcaaaataaaatgattgagttcgtttacggttttnnnnnnnnnnnnnnnnnnnnnnnnnnnnnnnnn

SEQ ID NO: 190224 - DNA, 662 bp, Gossypium hirsutum
gtctgctattctttacacaaaagaagaagggaaaaattacagtgaaaatggcaacccttaaagttccagctcatgtacctgccccttctgaggatgctgagcaacttcgtaaagcttttgaaggatggggtacaaatgagcaattgattatcgacattttggctcacaggaatgcagctcagcgcaatttgattcgtaaaacttatcgtgaagcttatggggaagatctccttaagtctttggatgaggaactttcaagtgactttgagcgagctgtggtgctgtttactttggaccctgcagagcgtgatgcatttctggctcatgaagctacaaagaggttcacatcaagccattgggttctcatggaaattgcttgcactaggtcttcacatgaactgttcaatgtgaagaaggcgtatcacgatctttacaagaaatcccttgaagaagatgttgcgcaccataccaagggagactaccgcaagcttttggtcccacttgttagtgcattccgataccagggagaggaggtgaacatgacactggcaaggctcgaaggcaaagatcttcgtgagaagatatcagaccagcagtacagtgatgaggaggcctccgattgaacacaaggataaggacaataaagctacctgaacattaaa

SEQ ID NO: 190225 - DNA, 479 bp, Gossypium hirsutum
gtcagcacaagcgatctgactatggtcttcctgaagataaattcatttttgcatgtttgaaccaattgtataaaatggatcctgaaatctttaacacttggtgtaatattcttaagcgtgtaccaaatagtgcactttggctcctcagattcccagctgctggagaaacgagactgcgagcatatgctgctgcacaaggggtacagccagagcaaataattttcacagatgttgcaatgaaacatgaacatatcaggcgcagtgctttagctgatctctgtctcgacacccctttatgcaatgcacatactactggcacggatgtgttatgggctggtttacctatggtgactctaccccttgagaaaatggctacaagggttgctggttcactttgtctcgctactggtttgggggaggagatgattgtgaacagtatgaaggaatatgaagaaagggctgtctcgttggcattaaat

SEQ ID NO: 190226 - DNA, 726 bp, Gossypium hirsutum
  unsure (1)..(726): unsure at all n locations
cccacgcgtccgcaaggatttgaaggccgaccctgaagacgaattcctcaaattgctgagagctgcaatcaagtgcttgactgtccctgagaaatattttgagaaggtgctacgtcaagcaatcaataagctgggaacagatgaatgggctcttactagagtggtcgccactcgggcggaggtagacatggtgcgtattaaggaggaatatcagcgaagaaacagtgtgaccctggaaaaagcgattgctggagatacctctggagactatgagaaaatgctgcttgcgttgattggagcgtggagacgtctgagctgctttcctatgttgtgttgttggtatgaaaatttagtttgcaatttgaggtgtgagttatgtttgtttggttgtgggttgtgtgaacatggcttttgtatgccgctgcttccgtgttagaacgttcaaagatgatgtgtttgtggatatatttcccaataatacgagagttaggtgttgctgcggtacttgattagtatcagatatgttaatgtcgagttagtcgaactaattttgaaataaaagaagaagaaaaagaaaaagggattaaggtgagcacttcatggaaaaagaaagagatgtgttatggtaacaatttaagatgggtgtcaaacgctacataacgccagttttgaaacatgaacacggatacagacaattgaaaatttttatgtataaatatntaataa

SEQ ID NO: 190227 - DNA, 1945 bp, Gossypium hirsutum
tcgcccacgcgtccgcggacgcgtgttcaagagcaaaccaaaaaaaggctgcaaattcagcttttcaatatttgcttttgatcaatcgaaatggcttcacaagtttctcaaatgccttcttcatcacccctttcttccaataaggatgaaatgcgtcccaaagccgattttcagcctagcatttggggagatttcttcctcaattgtcccgacaagaatattgatgctgaaactgaaaaacgccaccaacaattgaaagaagaagtgaggaagatgattgtggcaccaatggctaattcaacccaaaagttagccttcattgattcagtccaaagactgggtgtgagttaccatttcaccaaggagatcgaagatgaactagagaatatctaccataacaacaatgatgccgagaacgacctctacaccacatcccttcgattccgactactccgagagcatggattcaatgtttcatgcgacgtattcaacaagtttaaagacgagcaagggaatttcaagtcatccgtgacaagcgatgttcgaggattgttggaactttaccaagcttcctatttgagggttcatggggaagatatattggatgaagcaatttctttcaccagcaaccatttaagccttgcagtagcatctttggaccatcctttatccgaagaggtttctcatgctttgaaacaatcaattcgaagaggcttgccaagggttgaggcaagacactatctttcagtataccaagatattgagtcccataataaggttttgttggagtttgctaagatcgatttcaacatggtacaacttttgcatagaaaagagctaagtgagatttctaggtggtggaaggatttagactttcaaagaaagttgccatacgcaagagatagagtggttgaaggctatttttggatctcaggagtgtactttgagccccaatattctcttggtagaaagatgttgacaaaagtgatagcaatggcatctattgtagatgatacatatgactcatatgcaacatatgaagagctcattccctatacaaatgcaattgagaggtgggatatcaaatgcatagatgaacttcctgaatacatgaaaccgagctacaaggcactattagatgtttatgaagaaatggaacaactggtggctgagcatgggagacaatatcgtgtcgaatatgcgaaaaatgcgatgatacgacttgctcaatcttatcttgtggaggccagatggactcttcaaaactacaaaccatcattcgaggagtttaaggctaatgcattgccaacttgtggttatgccatgcttgctattacatctttcgtcggcatgggagatattgtaacaccagaaacctttaaatgggcagccaatgaccctaagataattcaagcttccacaattatttgtaggtttatggatgatgttgctgaacacaagttcaaacataggagagaagacgattgctcagcaattgagtgttacatggaagaatatggtgtaacagcacaagaggcatatgatgtattcaacaagcatgttgagagtgcttggaaggatgtgaatcaagagtttctgaaaccaacagaaatgccaacagaagttttgaatcgtagcttaaaccttgcaagggtgatggatgtactctacagagaaggtgatggctacacatatgttggaaaagcggctaagggtggaatcacttcattactcattgaaccaattgcactttgaaatcgtattaaattttcctcttcatgttccttaaggaatagttattaagttataattaataatgttttataatattcatatatatattataaaagaaagtttaaatcaactgtctttgtattcatttccttgtattgatccaataaagttcttttcaagctttcatttgtgaaaaaaaaaaaaaaaaaaa

SEQ ID NO: 190228 - DNA, 913 bp, Gossypium hirsutum
gagaaaaaacaatgagcactgcaagatttatcaagtgtgtcacggtcggtgatggagctgtggggaaaacttgtatgctcatttcatataccagcaatactttcccaacggattatgttccaacagtatttgataactttagtgccaatgtggtggtggatggcagcacagtgaaccttggcctatgggacactgccgggcaagaagattataataggctaaggccactgagttatagaggagctgatgtgtttttgttggccttttctcttataagcaaggccagttatgaaaacatctacaaaaagtggatcccagagctaagacattatgctcataatgtaccagttgtgcttgttggaaccaaactagatttgcgagatgacaagcagttcctcattgatcaccctggagcaacaccaatatcaacatctcagggagaagaactaaagaagatgataggagcagttacttatatagaatgcagctccaaaacccaacagaatgtgaaggctgttttcgatgctgcaataaaagtagctttgaggccaccaaaaccaaagagaaagccttgcaaaaggagaacatgtgctttcctttgaatattggatcattattacagtcaaaaacagttaacaaaagctgttgcagataaacactgaatctgctatagtttgtttttggtttacatatgttccacgtgaaactatgaagcatctctaagaaaacccaaactatcatatcaacccatcgatcaatgaatcgatttcaattttcgcagtataagttccttttaatcctttctttttacttcattttataacgaattctatggataatgttccctacaaacatgtcattacaatgtttaattataaattccattcttctattttactaaaaaaaaaaaaaa

SEQ ID NO: 190229 - DNA, 2865 bp, Gossypium hirsutum
gttatttttagtatcagcattgtcttttttttttctttagttttgccttgttgaaagcattcattatttacgttaagttcaaagaaatggctgatcgtgtgatcactcgcgtccacagtctccgtgagcgtttggatgagacccttcttgcccacaggaacgagattttggccttgctctcaaggatcgagggcaaaggaaaaggaattctgcaacaccatcaaattattctagagtttgaagctatccctgaagagaacagaaagaagctcgctgatggtgcattttttgaagtattgaaggctagtcaggaagcgatcgtgttgcctccatgggttgcacttgctgttcgtccaaggcctggtgtttgggagtacattagagtgaatgttcacgcccttgttgttgaggaactcactgttgctgagtatctccacttcaaggaagagcttgttgatggaagttcaaatggaaactttgttttggaattggattttgagcccttcaactcatcattcccccgcccaactctttcaaaatccattggtaatggtgtggagttcctaaatcgtcacctttcggcaaaattgttccatgacaaggagagcatgcaccctttgctcgaattcctcagagtccattgtcacaagggcaagaacatgatgttgaatgacagaattcagaacttgaatgctcttcaacatgttttgaggaaagcagaggagtatcttggtaccctacctcctgagacaccatgtgccgaattcgaacaccggttccaggaaatcggtttggaaagaggttggggtgacaccgcagaacgcgtgctcgagatgatccaactccttttggatcttcttgaggcacctgatccttgcacccttgagaagttcctcgggagaatccccatggtgttcaatgttgtgattcttactcctcacggttactttgctcaggacaatgttttggggtatcccgacaccggtggccaggttgtttacatcttggatcaagtccgtgccttggagaacgaaatgctcaaccgtatcaagcaacaaggactcaacattacccctcgtattctcattattactagacttctccctgatgccgtgggaacaacttgcggtcaacgactcgagaaagtatacggaacggagtactcggatattcttcgagtacccttcagaacagagaagggaattgtacgtagatggatctcaagatttgaagtctggccatacttggaaacctacacagaggatgttgctcatgaaatctccaaagagttgcaaggcaagccagatctgatcatcggaaactacagtgatggcaatatcgtcgcctccttgctcgcacataaattgggtgtcacacagtgcaccatcgcccatgctttggagaagacaaaatatccagattcagatatctactggaagaagcttgaagacaaataccatttctcttgccaatttacagctgatctttttgcaatgaaccatacagatttcatcatcaccagtactttccaggaaattgcaggaagcaaggacactgttggtcaatacgagagccacactgctttcactcttcctggtctctaccgtgttgtacatggtatcgatgtgtttgatcccaaattcaacattgtttcccctggtgctgatatggagatatacttcccttacaccgaagagaagcggaggttgaagcatttccatcctgagatcgaagaccttctttacagcaaagttgagaatgaagaacacttatgtgtgctcaatgaccgcaacaagccaattctgttcacaatggcaaggcttgatcgtgtcaagaacttaaccggactcgtcgagtggtacggcaagaacgcaaagttgcgtgagttggctaacctcgtagttgtaggtggtgataggcgaaaggaatctaaagatttggaagagaaggctgaaatgaagaaaatgtttgagctgatcgagaagtacaacttgaacggccaattcagatggatatcatctcaaatgaacagaatccgaaatggtgaactttaccgatacatttgcgacacgaaaggtgcctttgtacagcctgcattgtatgaagcctttggattgacagttgtggaggcaatgacttgcggtttgccaacattcgcaacctgcaacggtggaccagccgagattattgtccatgggaaatctggtttcaacattgatccttaccatggtgatcaagctgctgacatactggtcgatttctttgaaaagtgtaagaaagatccatctcactgggataagatctcccaaggaggcttgaaacgtatcgaggagaagtatacatggaagatttactcggagagactattgaccctgacaggagtgtatggattctggaagcatgtttccaaccttgaacgccgtgagagtcgtcgttaccttgagatgttttatgctcttaagtaccgtaagctggctgaatcagttccattggcagaggagtaaattgaagctgttaaataacattgggccggtttttcttggagaataatattctgttttgtaatttcaattggagaagctcctttgtatttcatcttgtcttttccttttccttttttcgccggcattgtttgaacatggggttgtgcgcccgtcaattccagttaaatatggtgacttttgtttttcaaaatcctatcttttttatttttatttttttaaacgcttatagccattagcgatgctttcagatgtacaaataaaaaaataaaaaaattgagtatttctaaataaaaaaaaaaaaaaaaaaaaaaaatagactaaaggaagaaaaaaatacaactaaatcatgaaaggcatgcac

SEQ ID NO: 190230 - DNA, 652 bp, Gossypium hirsutum
ccttctcgtccgggcttcaacattgatccttaccacggcgaccaagctgctgtgatccttgtcgacttcttcgagaaatgcaagacagactcatcttactggaccaaaatctctgagggaggtttgaaacgtatcgaagagaagtacacatggaaaatttactctgagagactattaaccttgaccggtgtctacgggttctggaagcatgtgtccaacctcgaccgcctcgagagccgtcgttaccttgagatgttttacgctcttaagtaccgtaagctggccgaatcggtacctttggcagttgaagagtaaattgaagttgccggggaaagaattgggagggatttccgagttcttgagaataatctttgttgttttggcattttgatccaactcttttgttttctctgttcttttatgtgtatttgtctttgttcatgttttgggcattgtttcaacatctgggcgttgagcccatcaattctagtaaagtaaaacatggcaacttttgcttcaaaaaaaaaaaaacaccaaacaatgatgctttaacggattttaaacccgacattggctactatagacttcgatgaacccatggtacaccgacggcgaatcctacaacagtttacatcgttaaaaggggggcctt

SEQ ID NO: 190231 - DNA, 948 bp, Gossypium hirsutum
cccacgcgtccggttacatgcatgcctttcttttcttactgcacgaatggtaatatcgaggacggctctctgtaacataagatggggagtctcacattgtacgattgcccatgctttggagaatacaaagtatccatattccgacatctactggaagaagctcgtggataaatatcatttctcctgccaatttacagctgatcttttcgctatgaaccatacggatttcattattaccagtacctttcaagaaattgtctgaagcaaggacactgttggtcaatacgagagtcacacttttttcactctttctggtctataccgtgttgttcacggaattgatgtgtttgatcctaaattcaacattgtgtcccctggtgccgacatgagcatatactacccttacaccgaggagaagaagaggttgaagcatttccattccgagattgaagaacttctttacagcaaagttgaaaatgaagaacactggtgtgtgctaaacgaccgcaacaagccaattctatttacaatggcaaggctggatcgtgttaagaatttaactggacttgttgaatggtacgggaagaatgctaagttgcgtgaattggttaaccttgtagttgtcggtggagatcggagaatagagtccaaggattcggaagagaaggctgacatgatgaagatgttcgagctcattgagaagtacaagctgaacggtcagttcagatggatatcatcccaaatgcacagagttaggaacggtgaactttaccgttacttttgcgacacaaagggtgccttcggccaacccgcattatatgaagcctttgggttgactgtcgttgaggccatgacttgtggttgccccgttgtaattgcatggtgactgccgaattttgtcaggaataccggttacatgtcctttccggagccaatgtgtatctttca

SEQ ID NO: 190232 - DNA, 427 bp, Gossypium hirsutum
cccacgcgtccggttcatttgattttctgggttttttccccccgttatttttagtatcagcattgtctttttttcttctttagttttgccttgttgaaagctcaagttcgaagaaatggctgagcgtgctctcactcgcgtccacagtctccgtgagcgtttggattccacacttaccgcccacaggaacgagattttggctttgctctcaaggattgaaggtaaaggaaaaggaatccttcttcaccatcaaatcattcttgagtttgaagctatccctgaagagaaccgaaagaaattagctgatggtgcattttttgaaatactgaaagccagtcaggaagccatcgtgttgccgccgtgggtggcgctggccgtccgaccaagacctggtgtttgggagtacattagagttaatgttcatgct

SEQ ID NO: 190233 - DNA, 715 bp, Gossypium hirsutum
  unsure (1)..(715): unsure at all n locations
cccacgcgtccggtttctataaaaacccgaaccagaaaaccctaactcgtcgttgttattttctctcgaagagccgctcctcaccttccgaaccagacaggcgcagatcctctcagcccagcgaccatgacaaagagaacgaagaaggccggaattgttggcaaatatggtacccgttatggtgccagtttgaggaagcaaattaagaagatggaggtgagtcaacacagcaagtacttctgcgagttctgtggaaagtatgcagtgaagagaaaggctgtaggaatctggggctgcaaggattgcgggaaagttaaagctggtggtgcttatactttgaacactgccagcgctgtgacggtgaggagtactattagaaggttgagggagcaaactgagagttgagctgctgctgactacgttatgttcacaactttggtatgatgttcgtgtatgtgttggctacaaaccagttgagtcattttgttgacaattatggcgcttagttcttaattttatatcttaactctggtgttggagctttatttaagttcaaatatttgagtattcttgtttcatgaatgtcttgttactttgcatcaaattaagttggtctttgtcggcgttctataatgctgcatatttagcaataatcgggatcaggtattttgctcgaaaatgacttcttttgtttattattgtnnnnnnnnnnnnn

SEQ ID NO: 190234 - DNA, 503 bp, Gossypium hirsutum
gtcgagcgcgcgtacgcggacgcgtgggcgacgagccgtttctcacttcagcgaccagacagtcagagatcctcccaatcaaacaacaatgacaaagagaaccaagaaggctggaattgttggaaaatatggtactcgttatggtgccagtttgaggaagcaaattaagaagatggaggttagtcaacacagcaagtacttctgtgagttctgtggaaagtatgcggtggagagaaaagctgtcggtatctggggatgcaaggattgcgggaaagtcaaagcaggcggtgcttatactttgaacactgctagcgctgtgactgtgaggagtaccatcaggaggctgagggagcaaactgagagctgagccaccactggtgattgatttatattctactttcataggatgttgttttgcatgttttagctatgagacttaattgagacctttttttgacaatgatgttcgtgctatgtgttctcatttttttatctgagtctgg

SEQ ID NO: 190235 - DNA, 473 bp, Gossypium hirsutum
agccgctctgcttctcggaccacacaccttctcaacctaactacaatgactaagagaacgaggaaggccggaattgtcgggaaatacggtacccgatatggtgccagggtgaggaagcaaattaagaagatggaggtcagtcaacacagcaagtacttctgcgagttctgtggaaagtatgcagtgaagagaaaggctgttggaatctggggctgcaaggattgcgggaaagtcaaagccgggggtgcttatactttgaacactgctagcgctgtgacggtgaggagtaccattagaaggttgagggagcaaactgagagctgagccaataacattagcatacccaactttcgtaggatgtttttgcatgtttaatctaaacgtattgaaatctttcttttgacaatgatgttattttgtatcaggatctggtgttgaaactttatatgagatattgagttgttggtttcttc

SEQ ID NO: 190236 - DNA, 1124 bp, Gossypium hirsutum
gtccgttcgaccttccatcccctctccctgctttgctctgaaaagtccaagtttttctccaatggcgaccgtctctccaactcctctgttgaaagatgagctcgacatcgtgattcccacgattaggaacttggactttttggagatgtggagaccctttttccagccttaccatctcatcattgttcaagatggtgatcctaccaagaccatcaaggtccctgaaggcttcgattatgagctttacaataggaacgacatcaacaggattttgggtcctaaggcttcttgtatctctttcaaggattctgcttgtaggtgctttgggtacatggtttccaagaagaaatacatctataccattgatgatgactgctttgttgctaaagatccatctggcaaagacatcaatgcatcgtctgggaaagacatcaatgcattggagcagcacatacagaacctgctgagtccatccactccatttttcttcaacactctttatgacccataccgatccggtgctgacttcgttcgtggctaccctttcagcctccgtgagggtgttcccactgctgtctcacacggtctctggctcaacatcccggattatgatgctcccacacagcttgtcaagccactcgagaggaacaccaggtatgtcgacgctataatgacgattccgaagggaaccttgttccccatgtgcggaatgaatctggcatttaaccgagaattgatcggccctgcaatgtactttggactcatgggagatggtcaaccaattggacgatacgatgatatgtgggctggctggtgcaccaaggttatttgtgatcacctcggatggggagtgaagaccggacttccctacatttggcacagcaaagcgagcaacccgtttgtgaaccttaagaaagaatacaaaggaatttactggcatgatgagttgattccggtcttccaatccgttgcccttccgtaggactgctccaccgttcagaattgtccttgagagttcttgcaacgtattgcatataggctgggtaagactacttaatatcttgtgatgccatttgactggtttggcctgatatgactgattcttagggcaattattgcatttt

SEQ ID NO: 190237 - DNA, 1425 bp, Gossypium hirsutum
tttcttacgcgtacgctcgcccctcccttcctctctgcttttactttgctaagtccaagccttcgacaatggccgaaccctctaccatttcaccagctcccctcttgaaagatgagctcgacatagtcattccaaccattcggaacttggactttttggagatgtggaggccctttttccagccttaccatctcatcattgttcaagatggcgatccttccaagaccatcaaggttccggagggcttcgactatgagctttacaataggaacgatatcaacaggattttgggtcctaagtcttcttgtatctctttcaaggattctgcttgtcgctgctttggttacatggtttccaagaagaagtacatttataccattgatgatgactgctttgttgcgaaagatccatccggcaaagacattaacgcactggagcagcacataaagaaccttctttgtccatctactccgtttttcttcaacactctctatgacccgtaccgagctggtgcagatttcgttcgtgggtacccattcagtctccgcgaaggtgttcccactgccgtttctcatggcctctggctcaacatcccggattatgatgcaccaactcagcttgtcaagcctcttgagagaaacaccaggtacgttgatgctattatgacaataccgaagggaaccttgttccccatgtgcggtatgaatctggcattcaaccgagaattgatcggccctgcaatgtactttggactcatgggagatggtcaaccaattggacgatacgatgatatgtgggctggctggtgcaccaaggttatttgtgatcacctcggatggggagtgaagaccggacttccctacatttggcacagcaaagcgagcaacccgtttgtgaaccttaagaaagaatacaaaggaatttactggcaagaagagttgattccgttcttccaatccgttgcccttccgaaggactgcaccaccgttcagaaatgctacattgagatctccaagcaagtgaaggcgaaactcggcaaggtagatgactacttcaacaagctggctgatgctatggtgacctggatcgaagcatgggatgagctgaatccatctggtgcaaaatccgccgagctgtccaatggtgcttcgaagtaggcttgttcagtaagcagctaacatattgtttagcagccctaggcttgtttggggatcaccgacacttgccaaagctccattgcttggagtgcttattttgcaggttggaggaggatggacacattgttattttatcatattattactgagtttagaacaataaaaaaatggatggctttatggcttcttatgtatttggcactagaaattgatggcttatatcttaaattatttttatttatacaatgattgggattgtttctttttg

SEQ ID NO: 190238 - DNA, 1188 bp, Gossypium hirsutum
gcgtccgcccacgcgtccgcccacgcgtccgatccattgttaatttttttatttgatcgtaattcctggtcgggaaaaaaaaaaaagaagggtgaggggagcctcctgaaattcttcttatagctgtagaaggagcttaagtgggatttcaggtgcgaggcaaggtgttagcaagttggagagatcaaggaaccgtaacgtacatattcactaggaaggtcattagtactacacgcgtagggttctcaggatagatttgtctatgttgcaggagggtgaaagtggagtagagtttattcttttttattcaattgacctaatattttcttcacaagaaaggtattttcatgatacaaggttggtgcttcttaggtgataacttcaagtaccagagaaggaacttaattccgagtgcttttcattgttgatatggttatatagagtgacacttgtaggaaggttgtaaaatggcttttgtttcagaggaagaaaaaactgaggattaccttttcaagattgtactagttggtgattcagctgttgggaaatcgaatttacttgcaagatttgctaggaatgaattctacccaaattccaagtcaaccataggagtggagtttcaaactcagaaattggatataaatggaaaggaagttaaggcacagatctgggatacggctggtcaggagcgcttcagggccgttacatctgcatattaccgaggtgcagttggagctcttcttgtgtatgacatcagcagacgacagactttcgatagcattggtagatggttaaatgaacttcaaactcactcagacatgaacgtagtcaccattttagtaggcaacaagtcggacctccgggatgccagggaagtatccacagccgaagggaaggccttagcagaggcacagggtttatttttcatggagacttctgcacttgattcctccaatgtagcggctgcatttcagactgtcgttaaagagatctacaacatattgagccggaaagttatgatgtctcatgagctcaagaagcaggacgcaccattggatgggaagaccgtggttttacaaggggatgagaaccaagaacgtgctactgagtcacccaaatcgggtggttgctgttcatcctgatgcttatccattttaacgattctccatcaagtttccactgaagttc

SEQ ID NO: 190239 - DNA, 633 bp, Gossypium hirsutum
cccacgcgtccgcattacttcgttttgttttttttgctttgctctgaaactccaagctctcatcaatggcggatccagcgactatctcaccagccacgctgttgaaagatgagcttgacatcgtgattcccaccattaggaacttggatttcttggagatgtggagaccctttttccaaccttaccatctcatcatagttcaagactggcgatccttcaaaggccatcaaagttcctgaaggctttgattacgagctttacaacaggaacgatatcaataggattttgggtcctaaagcttcttgcatctctttcaaggactctgcttgtcggtgctttggatacatggtttccaagaagaagtacatctataccattgacgacgattgtttcgttgctaaagatccatctggaaatgctaaagatccatctggaaaagacattaatgcattggagcagcacataaagaaccttctgagtccctctactccgtttttcttcaacaccctttacgatccataccgagctggtgccgattttgttcgcgggtacccatttagtctccgcgagggtgttcccaccgccgtgtctcacggtctctggctcaacatcccggattatgacgcaccaact

SEQ ID NO: 190240 - DNA, 613 bp, Gossypium hirsutum
  unsure (1)..(613): unsure at all n locations
attcaccaagtcctttctcctattaccctttcccctctccctttctctctttcctctgcacctgaccctatcaaaggaacccagctttccatctcggtaccagacgacgatgttttgaactccttcttcatcgttttctctacttccccttcttcttctgctctccaatggctatccccgccgcaaacgtttaacaaaaaaacacccttttgtttatacccaatgccagtgtatccacgcgcgttatgtctttttaatttgtaaccaagattatcaaggtccctgaaggcttcgattatgagctttacaataggaacgacatcaacaggattttgggtcctaaggcttcttgtatctctttcaaggattctgcttgtaggtgctttgggtacatggtttccaaaaagaaatacatctatatataccactgatgatgactgctttaggatgccacttgattttctgcaaggagacaagttttgtgaagcagcagttagttacattcagcctcttctaacaaagggggttccatctttattttcagatctttctcctttgtacaaccactatggcaagggaactgctggagttgcacttgctggattgttangat

SEQ ID NO: 190241 - DNA, 695 bp, Gossypium hirsutum
cccctctcctgtttgctttgaaaggccaagtttttctccaatggcgaccgtctctccaactcctctggtgaaagatgagctcgacatcgtgattcccacgattaggaacttggactttttggagatgtggagaccctttttccagccttaccatctcatcattgttcaagatggtgatcctaccaagaccatcaaggtccctgaaggcttcgattatgagctttacaataggaacgacatcaacaggattttgggtcctaaggcttcttgtatctctttcaaggattctgcttgtaggtgctttgggtacatggtttccaagaagaaatacatctataccattgatgatgactgctttgttgctaaagatccatctggcaaagacatcaatgcattggaacagcacatacagaacctactgagtccatccactccatttttctttaacactctttatgacccataccgatccggtgctgacttcgttcgtggctaccctttcagtctccgtgagggtgttcccactgccgtctcacacggtctctggctcaacatcccggattatgatgctcccacacagcttgtcaagccactcgagaggaacaccaggtatgtcgacgctataatgacgattccgaaaggaaccctttgtcccatgtgcggaatgaatctggcatttaaccgagaaatgatcg

SEQ ID NO: 190242 - DNA, 820 bp, Gossypium hirsutum
ctatttgctcagagagtaatggatcttgctgagtatcgaaagaatctttatgattacttagtgactaagatgaacgacattgcaccaaatttggcatcgttgattggggaagttgttggggctcggttgatctctcatgctggtagtctcacaaatttggccaaatgtccctcttccactcttcagattcttggtgctgagaaggcccttttcagggcactgaaaacacgagggaacacacctaagtatggtctaattttccattcatctttcattggtcgagcatctgcgaagaacaagggccgaatggcacgctatcttgcaaacaagtgttccattgcatctcgcatagattgttttgcggagcggggcaccactgtctttggggagaaactgcgggaacaggtggaggaacgacttgaattctgtgacaaaggtgttgcacctcgtaaaaacatcgatgtaatgaaatctgcaattgaaagtactcagaacaaagatactgaaatggaagaagtggaacctgaagaagcttccgcaaagaaaagcaagaaaaagaaagtccaaaacccgaagatgctccagctgctgctacaaatggagatgccttggaggacggtaaatcggagaagaaaaagaagaaagagaaacgaaagaaggagcaagaggcgcatgaagaagatgggaaaacaaatggcgtaaacgagcaggatgggacagccaagaaaaagaaaaagaagagtaaagatgaagcagctacaaatgaaaatacgaagaagaagaagaagaataagaagagccatgagtgaaattaatcact

SEQ ID NO: 190243 - DNA, 1728 bp, Gossypium hirsutum
gcctgcccacgccgcgcatctcaaattgttatctctgaaggtgtcttaataaacgccttcgatttaccttcgatttccatttacttctttattgctacgtttttgaatttttagtaagcgaaaatgagagagtgcatttcagtccacatcggtcaggctggtatccaagtcggaaatgcctgctgggagctttactgccttgaacatggaatccagcctgatggccagatgccaagtgacaagactgtcggaggaggtgatgatgcttttaacacctttttcagtgaaactggtgctggaaagcacgtccctcgtgctgtctttgtggatcttgagcctactgttattgatgaagtgaggactggtacttaccgtcagcttttccaccctgagcaactcatcagcggcaaggaagacgctgccaacaacttcgcccgtggccactacactattggcaaagagatcgttgacttgtgcttggaccgtatcaggaagcttgctgataactgtaccggtcttcaaggtttccttgttttcaacgctgttggtggaggcactggatctggtcttggttccctccttttggagcgtttgtctgttgattatggcaagaaatccaagttgggtttcactgtctacccatcaccccaggtctccacatctgttgttgagccctacaacagtgtcctctcaactcactcccttttggagcacactgatgtggctgttcttcttgacaatgaggctatctatgacatttgcaggcgctctcttgacattgagcgacccacttacaccaatcttaaccgtcttgtctcccaggtgatctcctctttgactgcttcacttaggttcgatggtgccttgaacgtggatgtaacagaattccagaccaacttggtcccttacccaagaatacacttcatgctttcttcatacgctccagtcatctctgctgagaaggcttaccatgagcagctatcagttgctgaaatcaccaatagtgcctttgagccctcatctatgatggccaagtgtgatcctcgccatggcaagtatatggcttgctgtttgatgtaccgtggtgatgttgtgcccaaggatgtcaatgctgctgttgccaccatcaagaccaagagaactattcagttcgttgactggtgcccaactggattcaagtgtggtatcaactaccagccacccactgtcgttcctggtggtgatcttgctaaggtccagagagccgtttgcatgatttccaactcaaccagcgttgctgaggtgttctcccgcattgaccacaagtttgatctcatgtatgccaagcgtgcctttgttcactggtacgtgggtgagggtatggaagaaggagaattctcggaagctcgtgaggaccttgctgcacttgagaaggattatgaagaagtcggtgctgagtcaggcgagggtgatgaggaaggtgaagatgagtactaaataagtaatgtttgagtggagggcttgcattttgctacccaatgatttgtttccttttatcgtgtgtttttgcttattctattgtgtgaacttcgactcttctaagctttgttcaagactatatggactgcaatagatttgacgagtagttcggctaagtttctagtgttccattgctgaaaagaatttaaatttgttgatattaaaaatatttttttaaaaaaatatttaataaaaaaaaaatttatatta

SEQ ID NO: 190244 - DNA, 1751 bp, Gossypium hirsutum
cggacgcgtggctttgagaactatattctctttctaaaaatacaacaaaatattaattaggatatatggcaggtgattcagggaagaaggaagagatgtcaaaggtgaaaatcatcagcacaagtcatgtgaagcctggaaagatgataggaagaaaagaatgtcaattggttacttttgatctcccatatttggcattccattataaccagaagctgttgttttacaagtgtggggagtttgaggagaaggtggaaaaactcaaggatgggctgagagtggttttggaggagttttatcagctagcaggcaagcttggtaaagatgaggatggggttttcagggtggaatacgacgacgatatggacggtgtcgaggtggtggaagccaccgccatggagatcggcatcgaggaactggcggctgaagacggcactgcctctttcaaggacttgataccctacaatggtgttctgaacttggagggccttcacagacctctcttgtctgtgcaggtaaccaagttgaaagacggagtggcaatggggtgcgcattcaaccacgccatccttgatggaacttccacttggcatttcatgagctcatgggcccaaatctgtagcgggtccaactccgtctcagtctcgccgtttctcgagcggaccaaagtccgaaacacccgcgtgaagctggatctctcgctcccacctaaccctgtcaacggtgacgccaaccaaggcccccagctgagggagaaactcttcaggttttctgaagctgccatcgacaagatcaagtcaaaagtcaactctaccccaccatccgactcctctaaaccattctcaactttccaatctctagcttatcacgtttggcaccacgtaaccctagcacgtgaactcaaacctcaagattacacagttttcactctcttcgctgattgtcgtaaaagggttgatccacccatgccggaaagttacttcggaaacctgattcatgccatcttcaccgtcacggcagccgggttattgtcggctaatccaccgcaattcggtgcatcgttggtacaaaaagctatagaagcgcacaacgcgaaggccatcgaagaacgaaacaaggagtgggaagcagcaccgaagatattcgagtacaaggatgctggtgtgaactgcgtggcggtggggagctctcccaggttcaaggtatacgatgtggatttcgggtggggaaaaccggaaggggtgaggagcggatccaacaacaggtttgatgggatggtgtatttgtatcaagggaagagtggtggacggagcattgacgtggagatcgccttggaagctggagcactggagaagctggagaaagataaggagtttgtgttggaagtttaaatcaataatcaagaccattgttatcatttgtcttgtctttcgtgattttgatcacaacaaatgttatgtttgttaacatttcttacgctatccccagattgctactcaaatctactagcttggatatgctgagctgtcaatcacaacactgaacttacctgttatgttggtaatgctgtcttttactacgattcaaacgtatgtcatgtctgttctagaggagaaataccacattttcttatatacattcacaatcatctatatctatttataaactgctgagaagacgctgacaacaacttcgcccgtggccactacactattggcaaagagatcgttgacttgtgcttggaccgtatc

SEQ ID NO: 190245 - DNA, 651 bp, Gossypium hirsutum
cggacgcgtgcgtttgcttagaaggtgtcttaataaacgccttctttcttcttcttcttattcctttattgctttttcgaatttttcttaatcgagaatgagagagtgcatttcgatccacatcggtcaggccggtatccaggtcggaaacgcttgctgggagctttactgcctcgagcatggaatccagcctgatggtcagatgccaagtgacaaaactgtcggaggaggtgatgatgcttttaacacctttttcagtgaaactggtgctgggaagcacgtccctcgtgccgtctttgtggatcttgaacccactgttattgatgaagtgagaactggtgcttaccgccagctcttccacccagaacaactcatcagcggcaaggaagacgcagctaacaactttgcccgtggtcactacaccattggcaaggagattgtcgacctctgtttggaccgcatcaggaaacttgctgataactgcactggtcttcaaggattccttgttttcaacgctgttggtggaggtaccggatcaggtcttggttctctccttttggagcgtttgtctgtcgattatggcaagaaatccaagttgggtgtcactgtctacccatctcctcaggtctccacttctgttgttgaaccttc

SEQ ID NO: 190246 - DNA, 539 bp, Gossypium hirsutum
cccacgcgtccgcccacgcgtccgggaggtgtttatttatccgacggcagtgataacgaatggggttattgggattcgaataacgggaaagacagctccgatacttattatcagaaaatgatccaagctaatcctggaaattcgcttctcctcagcaattacgctagattcttgggagcggctcggggggatttagtgagagcagaagaatattgtgggagagcaatcttggcaaatccaaatgatgggaatcttctctccatgtacgctgatttaatctggcaaactcataaagatggtcctagagctgaaacttactttgatcaagccgttaaatctgcccctgacgactgttttgtactagcatcatatgcacgatttctttgggatgctgttgaggaagacgatgaagaggaaaaggctggcgaaaaatttagtaatggatcagatcaaagttttttccatggagctcctcctttggctgctgcttcttaagcctcgtggtgtgaaataacttgtatttaagcttttttggactt

SEQ ID NO: 190247 - DNA, 335 bp, Gossypium hirsutum
taaactagggatccccggctgaagtttgccctcgccctttctttgctttctcgaatttttcttaagcgggaatgaggcagtgcatttcgattcacatcggtcaggccggtatccaggtcggaaacgcctgctgggagctttactgcctcgagcatggaatccagcctgatggtcagatgccaagtgacaaaactgtctcggaggaggtgatgatgctttttacaccttttttagtgaaactggtgctaggaagcacgttcctcgagccgactttgttgatcttgaacccactgatatttattaaattagaactggtgcttactcgcagttctttt

SEQ ID NO: 190248 - DNA, 806 bp, Gossypium hirsutum
gaccccccacgcgtccggcagaaaatatctcaaatctcctcctcctcctcagaaatcttagtatcatcaccatggcctcaaatcccaaggtcttctttgacatgactatcggtggtcagcccgctggtcggattgtgatggagcttttcgcagattgcactcctcgcactgctgagaacttccgtgccctctgtaccggcgagaaaggcgtcggccgcagcggtaagcccctccactacaaaggctcctctttccatcgtgtgatccctaactttatgtgccaaggaggtgacttcaccgccggaaacggtaccggaggtgaatccatctacggatccaagttcgctgacgagaacttcatcaagaagcacactggtcccggtattctctcaatggctaacgctggtcccggaactaacggatctcagttcttcatttgcacggctaagactgagtggctcgacggaaagcacgttgtgtttggacaagttgttgaaggcatggatgtggtgaaagccattgagaaagttgggtctagcagtggaagaacttccaagcccgttgttgtcgctgactgcggacagctctcttagagaagaaaaagagaactatgtgttaagctgggatgttgtctaatgtctagaatatttaatgtctgtcatttagactcttttatggtgctgtttttatcgtcactgggtttggtggttttcaagaacttgctttatgtagtttttatgattaactaccattaaataagatactctttttcatcatcaagctaactcttgacgatggatcttaat

SEQ ID NO: 190249 - DNA, 1665 bp, Gossypium hirsutum
cccacgcgtccgccggaaggcgtcttgatacacgcccccatttattttatttttcaaacaaattttcccttcaattttcgtataatttcctaggaaaagaaatatgagagagtgcatttcagttcacatcggtcaggccggtattcaggtcggaaatgcttgctgggaactttactgtctcgagcatggcattcagcctgatggccaaatgccaagtgataagactgttggtggaggagacgatgctttcaacacctttttcagcgaaactggtgccgggaagcacgtccctcgcgccatctttgttgatctggagcctactgttatcgatgaagtgaggactggtacgtaccgccagttattccaccctgagcaactcatcagtggcaaagaagatgctgccaacaatttcgctcgtggccattatacaattggcaaagagattgttgatctctgcttggatcgtatccgaaagcttgctgataactgtactgggctccaaggcttcttggttttcaatgctgttggtggtggtactggttctggtcttggatctcttctcttggagcgtctctctgttgactatggaaagaagtcgaagcttggtttcaccgtctatccttcacctcaggtttctacatcagttgtagagccttacaacagtgtgctgtccactcattcactccttgagcacactgatgtcgctgttcttctggataacgaagcaatatatgacatctgcaggcgttctttggacattgaacgacccacttatacgaatcttaaccgccttgtctctcaggttatctcatctcttaccgcatctttgaggtttgatggagccctgaatgtggatgtgactgagttccagactaacctggtcccatatcccaggatccactttatgctttcttcttatgcccctgtcatttcagctgagaaggcttaccatgagcagctatcggtggctgagataaccaacagtgcttttgaaccctcttcaatgatggccaaatgtgacccacgacacgggaagtacatggcttgctgccttatgtaccgaggagatgttgtgcccaaagatgtgaatgcggctgtggccaccattaagaccaaacgcacaatccaatttgtggattggtgccctactggattcaagtgcggtatcaactaccagccaccaactgttgttccaggaggggaccttgccaaggttcagagagctgtctgcatgatctccaactcaaccagcgttgcggaagtgttttcccgcattgatcataaatttgatctcatgtatgccaagcgtgcatttgtgcactggtatgttggtgagggcatggaggaaggagagttttccgaggcacgtgaagatctcgctgccctggaaaaagattatgaagaagttggcgctgagtctggtgaaggagacgaaggggatgaggaggagtattgagggatgtaccgttatccgtttgctactgtgatgtattttcttgttgattttggatgtgtgttttcagggttgaatacctcggataatgtactagtttttggtattttctatgaataaagtgcacggtaaaattataagatcgaagcccttcagattgcattttattctttttactcaaaaaataataaattaatctttttaagattttt

SEQ ID NO: 190250 - DNA, 591 bp, Gossypium hirsutum
  unsure (1)..(591): unsure at all n locations
ccctcgcgtccgcccacgcgtccgcccacgcgtccggatacacgccccctcttacttatatcattcaataattttcatcaacaaagaaaaatgagagagtgtatttcgattcacattggtcaggccggaattcaggtcggaaatgcttgttgggaactttactgtctcgagcatggcattcagcctgatggccaaatgcctagtgacaagactgttggtggaggagacgatgctttcaacacctttttcagcgaaaccggtgccggaaaacacgtccctcgagctatatttgttgatctggagcctactgttatcgatgaagtgaggactggaacataccgccaactgttccaccctgagcaactcatcagtggtaaagaagacgctgcaaacaattttgctcgtggccattatacaattggaaaagagattgttgacctctgcttggatcgtatccgaaagcttgctgataaatgtactgggctccaacggtgcttggttttccntgctgttggaggtggtactggttcaagtcttgggtctcttcccctcagcgtctctcttgttgatatggaggaaatccatccttgt

SEQ ID NO: 190251 - DNA, 636 bp, Gossypium hirsutum
tttttaatctcctcctcctcctcagaaatcggggggtcattttcatggccttttgtggcaaggactcctttgacatgactatcggtggtcagcccgctggtcggattgtgatggagcttttcgcagattgcactcctcgcactgctgagaacttccgtgccctctgtaccggcgagaaaggcgtcggccgcagcggtaagcccctccactacaaaggctcctctttccatcgtgtgatccctaactttatgtgccaaggaggtgacttcacggccggaaacggtaccggaggtgaatccatctacggatccaagttcgctgacgagaacttcatcaagaagcacactggtcccggtattctctcaatggctaacgctggaccgggaactaacggatctcagttcttcatttgcacggctaagactgagtggctcgacggaaagcacgttgtgtttggacaagttgttgaaggcatggatgtggtgaaagccattgagaaagttgggtctagcagtggaagaacttccaagcccgttgttgtctgcatgatctccaactcaaccagcgttgcggaagtgttttcccgcattgatcataaatttgatctcatgtatgccaagcgtgcatttgtgcact

SEQ ID NO: 190252 - DNA, 338 bp, Gossypium hirsutum
ttttcggtggtaataaaaatctaggctttggagcaattcccgccatcgatgacaaactcggaaggcgagtctgtgagctgtgtagggtagccgagataagcactcaagaccaagttcttcaggtaaacccggaagcaactcggttgaaaactcaaatgtcttcatttcttaaagttttaagagggtttagcttttgtgaaatgccaggaactccattgattgaatgtggaatgttgatttcctgcttgggtatgggattccaactttgataaaaatgtatatgtattttatctaaatagtttatatatatatctcaggctttagtaaaacatattttt

SEQ ID NO: 190253 - DNA, 381 bp, Gossypium hirsutum
ggcccccaaaacattttctcttcgttattttccaaatccctaaaaaaacccccggaaagcctaaaacctaaaacaaggctataatcggaagcttgtttcattagatttggaggaataaaagaaaagagtagaaagggggaatggattcagatcaggggaagctgtttattggagggatatcatgggaaacaagtgaggataggctaaaggagtactttggccagtacggcgacatcttgcagactgttgtcatgagagataaggtcacggggagacctcgtggctttggatttgttgtcttctcagatccgtacgtcatcgatactgttcttcaagaaaagcacaccattgatggttgaacggcggagagatgcttcaaga

SEQ ID NO: 190254 - DNA, 408 bp, Gossypium hirsutum
  unsure (1)..(408): unsure at all n locations
ggctcgtgaggaccttgctgccctggaaaaagattatgaggaagttggagctgactctgctgaaggagatgaggaggatgagggagatgagttctgagcgaaggtcagggacgactacacctttacgactatgatgttgctttagatttcaatgtttttttttttttttgggttttggcaactttgggtgatatttccagttcatggtattttcaataaacaagtttatcaaggcttttactatgccaggaactccattgattgaatgtggaatgttgatttcctgcttgggtatgggattccaactttgataaaaatgtatatgtattttatttaaatagtttatatatatatggctttagtaaaacagaattcaatttagttatnnnnnnnnnnnnnnnnnnnnnn

SEQ ID NO: 190255 - DNA, 1748 bp, Gossypium hirsutum
  unsure (1)..(1748): unsure at all n locations
tgcactcactgggtctctctgtgtactgtcttccccttttccatttctcgtaaacaaagtccataacattcgtctctcagatcctttcctcttagatcatcaaatccattcctttttttcaccaaaacatgagggaaatcataagcattcatataggtcaagctggtattcaagtcggtaactcatgttgggagctttactgccttgaacatgaaatccaacccgatggaatgatgcccagtgacacctctgtaggtgtagcaaatgatgctttcaacactttctttagtgaaactggttcagggaaacatgttcctagagctgtgtttgtggatctggaacctactgtgatcgatgaagttaggactgggacttaccgacaacttttccaccctgaacagcttatttctggcaaagaagatgctgccaataactttgccagaggccattatacaattgggaaggaaattgtggatctttgccttgaccgtgttaggaagttagctgataactgcactggtttacaagggtttcttgtgttcaatgctgttggtggtggaactggttctggtctgggatctttgttgttagaacgcttgtcggtggattatggtaagaagtcaaagcttgggttcaccatctatccttcacctcaggtctcaactgcagttgtggagccttacaatagtgttctgtccactcattcccttcttgagcacacagatgtggccgtgctcttggacaatgaagcaatttacgacatatgccggagatccctcgatatcgagaggccaacttacaccaatttgaaccggctgatttctcaaaccatatcgtccttgacgacttctttaaggtttgatggagccattaatgtagacattacagagttccaaaccaatcttgtgccatatcctcggatccatttcatgctctcttcttatgcgcctgttatctcagctgagaaagcataccatgaacagatatcagttcctgagatcacaaacgctgtgtttgagccctcaagcatgatggctaagtgcgatccaaggcatgggaagtacatggcttgctgcctgatgtatcgaggagatgtggtgcccaaggatgtgaatgctgctgttgctaccatcaaaacgaagaggaccgtgcagtttgttgactggtgcccaactggtttcaaatgcggtattaactatcagcccccaactgttgtccctggaggagatcttgctaaggtgcagcgagctgtttgcatgataagcaataacacagcagtggctgaggtgtttgcacgcattgaccacaagtttgatctcatgtactcgaagagagcttttgtgcattggtatgttggagagggcatggaagaaggtgaattctcggaagcccgtgaggatctggctgctcttgagaaggattatgaagaagttggtgctgaaggtggagatgatgaagaggaaggtgaagaatattgatgctactatcgcaatatcatttattctgaatatcagctctgtggtaaggtattcctatcttttgctctgtgtagcactgnncttctgtgtgctgnatatggttaattgngcccatcatttgcctaaggcttttatgctattcatgagtatttttaaagtggtgcaaaaaaaaaaaaaaataaaaaaaaaaaaaaaaactcagggggcggacaaattgctctaagaggtatcattatgtgcggtttaactgattgaaaactggtccaatac

SEQ ID NO: 190256 - DNA, 668 bp, Gossypium hirsutum
gcaccttatcagccttcagttgagttcactcattatcctttgccttcatagttccgttccattttccctaacaaacctgcatcagatccgatcagatttaactcagatccatccgtatcgggtcttctaaattccagatctttacttttctcgagtaaaggaagaaagaggaagggagagatgagagagattattagcgtccacattggccaagctgggattcaggttgggaattcatgctgggagctttactgtcttgaacatgtaatccaccctgatggaacaatgccgagcgacacctcaatgggcgtcgcacacgatgctttcaacactttcttcagcgaaacgggttcgggaaagcatgtgcctagagctgtctttgttgatctggaacccactgttatcgatgaagtccggaccggcccttatcgccaacttttccaccctgagcagcttatttccggcaaggaagatgctgctaataattttgccagaggccactatacaattgggaaggaaattgtggatctctgcctaaatcgagttaggaagttagctgataactgcactggtctgcagggctttatggtgttcaatgctgtcggcggtggaaccggttctggtcttggatctttgttgttggagcgcttgtcggtggattatggaaa

SEQ ID NO: 190257 - DNA, 850 bp, Gossypium hirsutum
cccacgcgtccgcccacgcgtccgcccacgcgtgcggctgtgtttgagccttcaagcatgatggcaaaatgtgaccctaggcatgggaagtacatggcatgttgcttgatgtatcggggagatgttgtccccaaggatgttaatgctgctgtcgctaccatcaaaacgaagaggaccgtgcagtttgttgactggtgcccaactggtttcaaatgcggtattaactatcagcccccagctgttgtccctggaggtgatcttgctaaggtgcagcgagctgtttgtatgataagcaataacacagcagtggcagaggtgtttgcacgcattgaccacaagtttgatctgatgtactcgaagagagcttttgtgcattggtatgttggagagggcatggaagaaggtgaattctcggaagcccgtgaggatctggctgctcttgagaaggattatgaagaagttggtgctgaaggtggagatgatgaagaggaaggtgaagaatattgatgctactatcgcaatatcatttattttgaagatgatgggttcaccctgtgagggtatcctgttctttcttattcgtgtgaggtttctcaaattatgcctatggaataaatttagtcatgtttgcttgtcatttttttgttgttagaaatgcttgtcttttacttatgatgctccataagaacatgaatagccttacaagctattgttctgtttttcatgttgtaagatttgtctaatgcctttttatgctatcaacggagtgatattttatgtttaaaaaaaaaaaaaaaccagtggatgagtatgattcttcaaaataaataaaccgtgggtgagtatgatt

SEQ ID NO: 190258 - DNA, 1016 bp, Gossypium hirsutum
aaaatggaaataaaattagctcaactgtacttatttgtagctacttgactttaaccacaccactttttgtgatgtaccttcaaaacctaacactattatttttccccaagtttttgtagcaaatcattgtcatgactctcctctttttctggctctctcatggaagctattaaatgacaaagctctcatcattctccaccatgtttagcagccaacactacctttcgagatcgagacattggcttattctgtagcttaaaactttatatagcatcaatgttgcgggggctttagttgatatggttggaggagttgaggtgtgagtaaagctaattatataaatatagcttaaacatctgcatcagctatgaatagaggggttggtgttattgtagattatacagaacttgaagatgtatcctactctttaatatcaagtttactggtttaacgtctggcttcaaatgtggtattaactatcagcctccaactgttgtacccggaggagatctcgcgaaggtgcagcgagctgtttgcatgataagcaacaacacagcagtggctgaggtgtttgcacgcattgaccacaagttcgatctcatgtactcaaagagagctttcgtgcatgggtatgttggtgagggcatggaagaaggagagttctctgaagctcgtgaggatctggctgctctcgaaaaagattatgaagaagtcggagccgaaggtgtagaggacgaagaggatgccgaagactattgatgttcgtatgctgaaatatttacttttgaatatcagctctgtgtgtaagggtattcctatcttttgctcttgtgtagcactgtcttcctgtgtgccgtatgattgttaaattgtgcccatcatttgcctaagggctttttatgctatcaatgaagtaatatttatagctgcgcttgccatttcttgctataaatgtgtcttctatttatgaaaggtgttccataaacaacatttatggttgctgtaagattgtcaaa

SEQ ID NO: 190259 - DNA, 4058 bp, Gossypium hirsutum
  unsure (1)..(4058): unsure at all n locations
cacgaagtcaaaacggcacctagtaaaatcacgaattgttttttttttctgcaaaattggttcaaaatgcatttgatccttgagtttggtggaggcttagagcttttatgtgtgagtaataaagttcacaatgtgaattttgatctgcctaaaggaactgataagttaagcatgaaggattaagtagcttggattcgtaccaatttgatcaaggagagacctgaaatgctcatgaaaggggagtctgtgtgagtgttttaaaagtttagtctttgaattaggattgtaattctccgttgaaagtttagtcttggaattagtatttcacttgaattccccgttgaaagtttgaaactgagaaacacagttgagtttgggttccttttttttgttatatgtatgaagaacaaagtttccttggttttttctgttgtttacttgatttcataccgtctaatttgatataagaaatggataataacccacaccaaaatccttacccttatcaccatggataccctcctccaaatcaagatccatatgcgcctccgccatatcaatacccttataactctccccaataccctcctgcactgcatatgtatccacccccagtccatgcccttgctgcagctcccattgactatggacattctcattcttattctggaccaattccttatcaatattcacacccaatacctccaaattcttcccaacctgctccccaatatcatggtagttttcagtatggttcaacttttaatccttaccagcaatccctatctggtcattacccacctccaaaaagtaacccgcaatcatcctccacttatcagcagccttcacaatatcctcctcaatcatcctcctcttatcaacaacctgcacaatatactcctcctgaaagtaattctgagctcctctccacacacattagcttctctggtcataaccggcaagacagtacaagttccttagcagcaaatacgggaagtgcttcacctctttacccgcatttggatcatcagttgagtaattccgagctcctctccacacacaatagcttctctggtcataacaggcaagacagtacaagttccttagcagcaaattcgggaagtgcctcacctgcttacccacttttagatcatcaattgagtaatatgcatttgtctggtagccatccatcagctcctgcatcacctctggcacctttggggcctccattgcctgctgctacttcaacacctgattatgcaagtgaatctagtaattgggaggggcttagtttaggccgagctgattcggctaatcactctacttttcccataatgattcatttaatggatcacaaaaagggcagggtatgcagattgtacctttccagaaaggttcattgagagttttgcttctacatggaaatttagatatttgggttcttgaagcaaataatcttcccaacatggatatgttccataggactttaggcgatatgtttgcgaatttttcttcaaatatctcaaaaaaggttggagggcgctcggacgagaagattacaagtgatccttatgtcacaattgcagttgctggtgctgttataggaaggacttttgtgatcagcaataatgaaaaccctgtctggatgcaacatttcaatgtccctgtcgcacatcatgccgntgaagtgcaatttgttgttaaagacagtgatattttggggtcagatattataggagttgtagcaattccagttgagcagatatacgcagggggaaagattgagggaacctacccggttctgaatgctgctggaaagccctgtaagcctggagcggttttgaaattatcaattcaatacacaccaatggagaaattgagcttctatcatcagggtgttggagcaggtcctgaatatgtgggggttcctggtacatattttcctcttcggaaggggggtaaagtgactctttatcaagatgcccatgttcctgatgggtgtcttccaaacataaaactcgatcaggggatacactttgtgcaaggaaagtgttggactgacatatttgatgctattcgtcaagccaggcgcttggtttacattacagggtggtcagtttggcataaagttaggctggtacgcgatgttgctcctgcttcagattgcactttgggtgatattcttaggtcgaagtcccaggagggagttagagtgctacttttgttatgggatgatcctacttcaagaagcatattggggtacaaaacggaaggaataatggctacccatgatgaggaaacacgcagttttttcaaacactcttcggtgcaagtgttactttgtcctcgcattgctggaaaaaaacatagttgggtcaaacaaaaggaagttggaacgatttatacacatcatcagaaaactgtaattgtggatgctgatgctgggaacaatcatagaaaaattattgcttttgttggtggccttgacttatgtgatggtcggtatgataatccagatcatgctttatttaggacacttcaaacatatcataaggatgactatcataacccaacatatacgggttctacggttggttgtccaagagaaccttggcatgatatgcacagtaaaattgatggcccagctgcatatgatgttctggtcaactttgaggaacgttggttgaaggcagccaagcctcacggacttaaaaaattaaaaaagccctttgatgatgctttgctgcggatagcaagaattcctgacattatgggagtttctgattttactgagaatgagaatgatccagaacgttggcatgttcagatttttcgctcgattgattcaaattctgttaaaggctttccaaaggatccaaaagatgcaacaagcaagaatttggtgtgcggtaagaacgtccttattgatatgagcatacatacagcatatgtgaaggccattcgtgctgcccagcatttcatttatatagagaatcagtatttccttggatcctcttacaattggagctcttataaaaatttaggtgctgacaacttaattccaatggaaattgctcttaagatagccagtaaaattaaagcaaatgagaggtttgctgcatatgttgttattccaatgtggccagagggtgttccaacaggcgctgccactcaaaggattttatattggcagaacaaaaccatgtcaatgatgtatgagactatttacagggctttggtagaggctgggcttgatagtacttgcgtgccagaggactttcttaatttctattgtcttggcaatcgtgagcttgatggatatcaacctcctattgacgaaagtcctaaggctgccaatactcctgaggctcttagtcgaaaaagtcgaagatttatgatctatgtccattcaaaaggtatgatagttgatgatgagtttataatagtgggatctgcaaacatcaatcaacgctccatggagggtaccagagacacggagattgcaatgggagcttaccaacctcaacatacttgggcagcaaaacgttctagtccccttggacagatctatgggtataggatgtcattatgggcagaacatattggagtagtcgaggactgcttcgctcgaccagagagccttgagtgcgtaagacggattaatcaaatggctaaactgaattggagacaatttgcggcagaggaagtgacagagatgagagggcatttgctaaagtacccggttgaagtggaccccaagggtaaggtcaggccccttcctggatctgaaactttccctgatactggaggaagcgttgtcggctcatttcttggcatacaagaaaatcttacaatttaaccaaatttgttactatatctactatacaaataaagtttcgatactataaatgaaatatttatttatactatatagttttaaaagtccgttttatacaaatttgtatagtcaaatccataacaaattttgtacttgcctatattcatcgtttcaaatagaaataatctttgttcttttgttaaaaaaaaaaaaaaaaaaa

SEQ ID NO: 190260 - DNA, 927 bp, Gossypium hirsutum
ctttgatgtcttccagttttacttagtccttcatcttcttcttcatttcagtgtttttgggtttgttttttttcctactgttttggacaataattgaagcaagagataaccttgggggcggggcggcggagggagaggaacatctctgaaattactttcacttttgccggtgggtgcaaaatgagtgcatcaaggttcatcaaatgtgtcactgttggtgacggtgccgtcggcaagacttgcatgctcatctcctacaccagcaatactttccctactgattatgtgccaactgtctttgacaactttagcgcaaatgtggttgtggacggcaacactgttaatcttggattgtgggatactgctggccaggaagactacaatagattaagacctttgagctatcgtggagcagatgtcttcttgttggcattctctctcattagcaaagccagctacgaaaatgtttctaagaaatggattccggagttgaggcattatgcacctggtgttccaattattcttgttgggactaagcttgatcttcgggatgataagcagttcttcatagatcaccctggtgcggtgcccattaccacagcacagggtgaggaattgagaaagctaattggggcgcctttttacattgagtgtagttcaaaaacacaacagaatgtgaaagcggtctttgatgcggccatcaaagtagttctccagcctccaaagaagaagaagaaaaagaagagaaaggcacaaaaagcttgctcaatattgtgatcatgcaaagaagtgatattggtgccagataccatgaacaattagccatttaatctgttagtctctcaccatatctattatctcttctctctgagaaaatagctccttttggtatgttatctgaactgacagaactagggaactttctac

SEQ ID NO: 190261 - DNA, 406 bp, Gossypium hirsutum
  unsure (1)..(406): unsure at all n locations
accaagttatcaaacccaaccaaacctaaatctattagtggagttggttagaatcagggcatttctggtattacttggggctagctttggtgataatattattggaccaataagccattggaggtcaataattggcgattctactccttatgacttgcttgaagattgcacgagtggtcagcatgccaagtttaccatcttcctgtgatactatcaaaacaaatatttttatagtgtatggtattttggtttgatgtgcagttttagcatttgttttggtgggtttactctatggtttcttcattgctattatatgtggccagaggatcaacgagcggcattatcatgttcttgcaaaacaggaattaacaaaggtatgtcgntaaaaattgattagaaaatcctg

SEQ ID NO: 190262 - DNA, 970 bp, Gossypium hirsutum
attttagcagggtttttaagactggaaaaggcaacctcagaacgatgtcgtatcaatgagttggaagttacaacgccgtcggttgggacattggccatccctttccctttgtacatccctgtccttccttccttccttccttgcctttaagatgacaccccagtcgtaaaagggctctaagcctcgtccgcgttttcctcatttccctttactcgttgaccgaaatttctcgactcaccgtgttcacaacctctagatctgttacttcctaggcccgatttcataatttcaagatctgcttccagcatctaaacgcgaccgtttccggaactcaactcggagattcaatttttaagggtttcgaatttggatgtgcttgtcttttatttggtctactggaaatgtcgattttgcccaaaggtgattcagttcatattcgagaagtttggaacgataatctagaagaagagtttgctttgatccgtgaaattgttgatacctataattacgtagctatggatactgagttcccgggtgtagttctacgtcctgttggttctttcaagaatatcagtgattataactaccaaactttgaaagataacgtggatatgttgaagttaatccaattagggctcactttctcggatgagaatggcaaccttccctcttgtggaactgacagctcttgcattcggcaatccaatttctgcgagttcaacataagcgaagatatctttgctagtgatcccattgagttgttgcgccagtgcgggattgattttaagaagaacaatgagaagggtattgacgtgaagcggttcggcgagcttctgatgtcttccgggattgtgctgaatgatggtgtgcattgggtaacttttcatagtggatatgactttgggtatttgctaaagctattgacttgcaggagtttgcccgataatcaagcgcgattctttgatttgat

SEQ ID NO: 190263 - DNA, 1904 bp, Gossypium hirsutum
gcgaatggatagttgagagacacacctcaaaaaggatctagaaaagagaatatctcatccttttattttcatttcgtcttcttttcagctcaaattcatcatcgaaattacttgtagttatcagaatggggacaataggcaaaactactacggccactctttttctttgtcttcttctgtttcctattgtcttttccacgcctaatgacagattggttagaattggactcaaaaagagaaagattgaccgaaacaatcggatggctgcacaccttgaatccaaggagggaaaggcatctgaagcttttcttagaaagtatcgtcttcatgggaacttgggggaatcagaggacattgatattgtggcactaaagaactacatggatgctcagtactttggtgagattggtattggcactcctacacagaacttcactgtgatatttgacactgggagttctaatttgtgggttccttcatctaaatgttatttctcgatagcatgctatttccatcgaaaatataaatcaagccgttcacgtacctacaaggctaatggtaaaccagcggatatccaatatggcactggagctatttctggattctttagtgaggaccatgtaacagttggtgatcttgtagttaaacatcaggaatttattgaggcaacaaaggagtccagcttaacatttttgattgccaagtttgatggtatacttggacttggatttaaagagatttcagttggaaatgctgtgcctgtatggtacaacatggtcaatcaaggtcttgttaatgaaccagttttttcattttggcttaaccgcaatcctgaggatgatgttggcggagaagtggtttttggcgggatggatccaaaacattacaagggggaacacacttatgttcctgtaacacagaaaggatactggcagttcgatatgggtgatgttctgattggtgaccaaacaactggactttgtgccagtggctgcagtgctattgttgattccggaacttccttgttgactggacctacggctattattgctcaagtcaatcttgctattggtgcaacaggggttgtaagtcaagaatgcaagactgtggtttcagaatacggagaaacaataattgacttgctattatcgaaggaccaaccactgaaagtttgctcacaaataggtttgtgttcatttgatggaactcgagatgtaagtatgggaattgaaagtgttgtgaatgagaatgctggaaaagcctctggtaatgtccatgatgcaatgtgttctgtttgtgagatggcagtcatatgggtgcaaagccaacttaaacagaaccagactcaggagcgtatacttgattacgtcaatgagctctgtgaccggttgcctagtccaatgggagaatcagttgttgattgtaacagcctatctgctatgcctagtgtcgccttcacaattggtggaaagatacttgagcttacccctgagcagtacattctaaaagttggtgacggagagctagctcaatgcattagcggattcggtgctctcgatgtaccgcctcctcgcggaccactctggatcttgggcgacgtgtttatgggtaagttccatacggttttcgactatggaaacatgcaaattggatttgcagaggctacataaagtaatcacttcaacagttacacccctttggtatgtataatatgcagtgctaagtattactcttataaaaataagagagtgggatttagtatgtaatgataatttgcatgtaaatatattgttgcttgtggtaggagcttttattaggaaagaattttacttactctatacttataattaatgatgcaactgaattttagcttttatgagagctaaggttacatatttttatga

SEQ ID NO: 190264 - DNA, 892 bp, Gossypium hirsutum
  unsure (1)..(892): unsure at all n locations
gagaaaaaatcttctgatttttctgagtctttttcttatcttctgtttggctcctgagaaagtgttttaagaagaacaatgaatgcattagtggcaaccaacagaaacttcaagctagcagccaggcttcttggtttggattctaagcttgaaaagagtctcctcattcccttcagggaaatcaaggttgaatgcaccatacccaaagatgatggcacattggcaacttttgttggctttaggattcaacatgacaatgctagaggtcctatgaaaggaggaatcagatatcaccctgaggttgaccctgatgaagtgaatgcattggcgcaactaatgacatggaagacagcagttgcaaacatcccatatggtggggctaaaggtggtataggatgtaaccctggagagttgagcaaatccgaactagaacgcctcactcgagttttcacccagaaaatacatgatcttataggaattcataccgatgttccagcacctgatatgggtactggtccgcagacaatggcatggatactagatgagtactcaaaattccatggtcattcacctgctgtggtgactggaaaaccgattgatcttggaggatcacttgggagagatgcggccactggccgaggggtgctgtttgcaactgaggcccttcttaatgaacatggcaagtccatctctggaccaaaatttgtaattcagggttttgggaatgttggttcttgggctgcacagctcatctgaaaaagggaggaaggttgtgcattaatgattaacagggccatatgaacgcatggcatgatattcctcatgctaaactgtgaagatacaaggttcaaggttcatgtgggattcatgacccgaatagtctgtcagactn

SEQ ID NO: 190265 - DNA, 714 bp, Gossypium hirsutum
  unsure (1)..(714): unsure at all n locations
gatgagtactcaaaattccatggtcattcacctgctgtggtgactggaaaaccgattgatcttggaggatcacttgggagagatgcggccactggccgaggggtgctgtttgcaactgaggcccttcttaatgaacatggcaagtccatctctggacaaaaatttgtaattcagggttttgggaatgttggttcttgggctgcacanctcatccatgaaaagggagggaaggttgttgcattaattgatataacaggggccatcatgaacagcaatggcattgatattccctcattgctcaaacatgtgaaagaaaacaagggtatcaaagggttccatggtggggattccatcgacccgaaatcggttcttgtcgaagactgtgacatactcatcccggcagcactcggaggcgtcatcaacagggaaaatgcaaatgagattaaagcaaagttcattattgaagcagctaaccatccaaccgacccagaggctgatgagattttgtcgaagaaaggagtcattatactgccagacatttatgcaaactctggaggagtcactgttagttactttgagtgggttcagaacattcaaggtttcatgtgggatgaagagaaggtgaacagtgagctaaagacatacatgaccaaagggtttaaagatgttaaggagatgtgccaaacacacaactgcgacctccgaatgggagcc

SEQ ID NO: 190266 - DNA, 508 bp, Gossypium hirsutum
accagctaggaatcttgcaggaaatgtaccttcctacacaactcgccaagtggagagaacctatgcatccgcagttgcgtcttcagccatagagccatcggaggatgctgttgctacgctggtgtctatgggctttgatcagaactcagctaggcaggcacttgtgcatgctagaaatgacatcaatgctgccacaaacattcttcttgaagcacagtcccactaattgaagcatagaattgctggcgaaaagtggatgccgggatgttatttcatcggtataaatgcataatcacacatatagtggatggcaaccgatttgcttgcctccgggggttatgtggcattccaagatttcactatggagtagtattttcttcccattttgctctcacgtatttctggtagtagcagtaatcatacaccaatgcaactcaaaacttggggagttcttttttttttttgaaattgtttaccctcatgcaaatgcatgcgtcttaccaaaagg

SEQ ID NO: 190267 - DNA, 487 bp, Gossypium hirsutum
aagcagaagagaaagggactaagatctgaccccatttctctttccttcgccaaaaaccctttttcctctaaaaagggtctccttatcctcccttattaatctccctaaagggtttttcattttctagtggtcgatgggtgttgaagttgtgggatcagaaatggctaaagtatctgttgacaaagcaactgaagttgagaaatcacttgttcatgataaggaaaatgggaaacttgacaaggatccggttcatagcgagcccattaaattcggttccaatattgaggaatcaaataagggagaagagaaaaatgcatctgatgccaactttccgagcgatgcagttgttgagtggcctgcgcctaagcagatccactctttttattttgttaggtatcgcccttatgatgatccgaagataaaggccaaaattgatcaggctgataaggaggtgcaaaagtggaataaagccaggtttcagcttact

SEQ ID NO: 190268 - DNA, 397 bp, Gossypium hirsutum
gccaaatgtttctcaagaaactgaaccaatcttgaatgaagatcattcttctgtccatgatgaacaagaaagccaatcatctggcgaagttgagtctgttaatattctcctagctgagaatagagatgttcatcatgatgtggttgagatcattttgcgagatggagaaaatcagctgggaacggaatcaaatttgtctggagctccaccaatttctcttttggaattcaattccagggaaattcattctagaacagagatggttacagaggattctagcagtagctcaagttcgtcgtcgtcgtcttcgtcattgtcttcatcagagacagatgaagagatatctgatgtcaaggaagaacgttttgcaagttttgaacccagagatcatgaaact

SEQ ID NO: 190269 - DNA, 421 bp, Gossypium hirsutum
cccaattcgaaaatcaaccttcacctccaccaatccacctcggccgatccacctctggtcctccgcggctccacccaattccagaatcagaggttagagcggtgcttctacatcttctacctttgaatgtcaatggtatgttaacttttattcctttccttacactgtatttcttcctccttacactgatccatcattcatttccttacactgtatttcttcctcctttaatctctcaatccctataatcaaatcaaaaaagcaaatcaaattaaatcccacaaaaaagtgaaactcagaattaaaacaatatatatatttagaaaaataccatctttgagaagaagcatgcaaagaggaagttcacgtttaaaggcatcaattttcttcatctcatcttccaatctttaaagataatccg

SEQ ID NO: 190270 - DNA, 694 bp, Gossypium hirsutum
gcctgccgtccggactgatggtggccgaccgtgcgtccggctttcgtagataactacacttttcgcactgatctgtttgagatcaagaaagtaagtgacatcgaaccgtcgttaaaacgacaactgcttatctccaccgttctcatgactgccgggattgctgtcgttagcttctttgcattgccgtcagaattcactctcttcaattttggaactgaaaaggaagtgaagaattggcacttgttcttctgtgttgctatcggattgtgggctggactcattatcggttatactacagaatattatactagcaatgcttacagtccggtgcaggatgtagcagatgcttgcaggacaggagctgcaacaaatgtgatttttgggttggctctgggatacaaatcggtcattatccccatatttgccattgccatcgctatttacgtgagctttagcttggctgcaatgtatggaatcgcggtggccgctttggggatgctcagcactatagccaccggtcttgcaatcgatgcatatggtcccataagtgacaatgctggcggtattgcagaaatggccggaatgagtcacaagattcgcgaaagaaccgatgctttagacgctgcaggaaataccactgcagctattgggaatggtttcgcaatcggatcggcagcccttgtttcacttgctc

SEQ ID NO: 190271 - DNA, 431 bp, Gossypium hirsutum
cctttctctgtcttctactcattaatcaaatatccgggtcgttccttcctctcccaaacaacttcatttctctcttcttttgtgggaaacccaaaattattgacatgaatttggatctatctttggtataaaattctttcctttatacatatttataacaacttccaatttatttccctttattttccttcttctgcgaaataccatgggaaacatcggaagtagcggttcacatggctggcgtaggaacggcagtcgccggaaccaccctccgacgccgcatccgccgcaaccgcctgctccatctcaacctcaacctgaaatcactgccaatcgctacgtctttgccgccgccacgccttaccctgcccagtaccccaacacgaaccctccccaatactatcaatatccaggctactaccagcctcagc

SEQ ID NO: 190272 - DNA, 597 bp, Gossypium hirsutum
attacttacaactaaggatgcgggagatgcagttactttactacaatcattagctagctcaacatttgacagcagtcaactcgtattgtcagcttgtatgggttacgaaaatgtaaatgaacaagtattacttgagttaagggagaagcaccggtcagttgtaaaagctgcagttgatgaaagattaagggggcttcaaatttggagggaatcacagggccgggcatctaagctatatggttttaagcatgattctatgtcatcgcttaggaaaacaagtaagacaggagaattggttgattcaaaaactaatggagatctttcacgttccaagtccgaatcaatgaatgaggatgaaaatcttctttgtctgacaggagatgctaagtcggattctgttccagatcttcaacagcaggttgtagggttaaaggtcgagttgtgcaggttgctggaagagaaaagatcagctgttctcagatctgatgaactggagacagcattgatggagatggttaagcaggacaatcgacgccaattatgtgctagggtagagcaattagagcaagaagttggtgagcttcgtaaggcactgtt

SEQ ID NO: 190273 - DNA, 835 bp, Gossypium hirsutum
  unsure (1)..(835): unsure at all n locations
caaagctcggctgctaacccctgtgctcaaagctatgccttacgtgaaagctcaaaagtccaaggcgtacttcaaaagatatcaagttaagttcaagagaagacgagagggcaagactgactaccgggccaggaaccgtcttatcaatcaggataagaacaagtacaataccccaaaatatcgtttggttgcaagatttaccaataaggatatagttgcacaaattatacatgctagtatttctggtgatatagttcttgcagcagcttatgctcatgaacttccccgctatggacttgaagtgggccttaccaattatgctgcagcttattgtgttggactcctcttggctcgccgaacactgaagcaactggagatggatgctgagtatgagggaaatgttgaggcaactggggaggacttcactgttgaaccagcagagaccaggaggcctttccgtgcgctccttgatgttggtcttatcagaactactactggtaaccgtgtttttggtgttctcaagggtgctctggatgggggaattgatattcctcacggtgacaagaggtttgctggatttaacaaggacagtaagcaacttgatcctgaagttcaccgcaaatacatttacggtggccatgttgctgcatacatgaggactttaatggaagatgagccagagaagtaccagtctcacttcagtgagtacattaagagaagcattgagcctgacaccatagagggaatgtacaagaaggttcataccgccattcgtgcaagtccagaagcaaagaaatccgagaaggcttctccagggacacaagngtacacctga

SEQ ID NO: 190274 - DNA, 502 bp, Gossypium hirsutum
aaatttttcccggaagatttggggaagtacaaaaaattattgacctgtgggactttgctgggggtttaaccaggcaattgaatgggtctgtaataccttcagaacgtccaaatgcatatgatgttggagatgtggaatccccttggaattgttggtgtaattacggcatttaatttcccatgtgctgttcttggatggaatgcctgcattgcactggtgtgtggaaactgtgttgtttggaaaggtgctccaaccactcctctggttacaatagcaacaacaaaattagtggctgaagttttggaaaagaataacttacctggtgcaattttcacatcattttgtggcggtgctgaaattggggaagcaattgcaaaagatcgacgcattaatctagtttcatttacagggagttcgaaggtgggtgtaaaagtacaacaaacagtaaatgagaggtttggtaaatgcttgctttgacttaattagtacttcgctattattt

SEQ ID NO: 190275 - DNA, 615 bp, Gossypium hirsutum
  unsure (1)..(615): unsure at all n locations
ccctttgatcatcaccatgtgtaacccaactcaacaaacccatctttatttccatcttctagacccagaaaaaccctatctttcaggatcagagatcatttatggaacttaatcagtgttgcgggtagcttttcctattatcttaaccaggtctcattctctattcacggtcaatcatttccatgcttttcctcggtcatctcggcgacatagaactcgccgccggttcattagccatagcatttgccaacattactggtttttcagttctatcaggtctcgcgttagggatggaaccactttgttcacaacctttcggtgctcaaaaacccaaacttttatcattaacccttcatcgctacattgggttttttattatttttttcgattttaatatcattttttggggtgaacatggtttatatccttgtttatcttcatcaggatcctaatattactcgtaatggtcaaaatattttgttttttgccttaccggatttatttacacaatcattggttcatcccatncgcatttaccttgtgcacaaggaatacccatncgtaactttatcacactcatctcaccgtcctcattggccatcaattatactcgtg

SEQ ID NO: 190276 - DNA, 413 bp, Gossypium hirsutum
cggaccaagtcaagtttttttggctttgttgggtcaaaggtttgggttgatcaggaactactttctttgcacgttcagtagaggttcctgtcaactccttttgactgtaatgagtaacagtatcgaagatgattcattttctaagcctgttggaagatggtctgtttactgttatggtgtgggtcacatgctaaatgacatcacttctgcatgctggtttacttatcttctattgttcttaactgagatcgggctctcctctagggatgctgctattgtcatgctttccggccaaatagccgatggtctagccaccatattttttggtgaactgattgacaggtttggacatttcaaaatatggcacggtgcatgagctatcttggttgctgtttctttttcttcggtttttg

SEQ ID NO: 190277 - DNA, 450 bp, Gossypium hirsutum
gctgacttgaagtttatagtgattaagagtctacccaggcgtcagggttttattccttctttaccagaaaaaacatatgcgggagacttgcgacatcttgtgttggagttaaataaccaatcaaagtttcctgtcaagaatctaaagatgaagatcagcaacccgagatttctaaatgctgggaatcagagttatttaaatgtagaattttctgcttgcttagaaaagaagttgaatgttgagcaaagcgttgggcatgctaatgctaagaaaatgttgcagaatgtgttccattttcctgaggacatatcagtgcaggaggaaacatcattatcttggcctctttggtttcatgctgctgttcctggcaatatttctttgtacattactgtatattatgaaatggaaaatgtatcaagcattatgaaattccgcactctacgtatgcat

SEQ ID NO: 190278 - DNA, 461 bp, Gossypium hirsutum
cccccggcttgaaggattccggcccaaggttggttcaggagaggataagaggaggagtaagcgaccttggtctaactcttgaagggttcctttttcttcatgctctttttatagaaaaagggcgtcttgagacaacttgggctgtcttgaggaagtttggatataatgacgagttaaagctcagggatgatattcttccagttccaaccaagcatgcccctgatcagactgtggagctgacaaatgaagctatcgactttttgcgtgggatcttccgattgtatgacagtgataatgatggatctttgcaaccttctgagtttgatgatatctttgtaactgcaccagaaagtgggccttgatgacaactctggatccttcatattgtttggctaacttgatttgcattggatatggatgtgatccaacttcagtcctttctgttactaggagaagatctg

SEQ ID NO: 190279 - DNA, 407 bp, Gossypium hirsutum
gaaaagtagaagaagaagcacaaaaagcagaagaaagaggaagaaaatggggattctattgaaactgcaaatggcaaagaagactcggttcaatttgatgacaaggagaaggtggtagtgagtggaaaaaacgctgaagaagcgaaatatgcgccgttgaaatcattttctaattctaagttaccaaaaaatgttttggattgctgcaagggtttttctagcccatctcctattcaagctcacgcctggccctttttattggatggtcgtgattttattggaattgcaaaaactggatcaggcaagactttggcatttggcgtacctgcaatgatgcatgtattgaaccagcgaaatggtaaatcctcaagagggaagaatccgctttgcctcgtactttctcctac

SEQ ID NO: 190280 - DNA, 1221 bp, Gossypium hirsutum
gcaaaagccaacctgcaatgtgccttctttgggttttcgaaattgggcaattgacctttttttttgcctataaaaacccatcaaaaacagatcaatttttcatcatctcttcatcaactcaaagaaaaaattgagtgtcagtttgaaagtgttcttcagatatggctatgaaacaagttgctaattctgctatcaaagcaattgccaattctgggtcatcctctcttcttaccagacaactccatgcttctccagggagcaaaaagattgttggggtgttttacaaggccaacgagtactttacgaagaatcccaactttgttggttgtgtggagggagccttggggttgcgcccatggctggaatcacaggggcatcagtatattgttaccgacgacaaagaaggaccggactgcgaacttgaaaagcatatccctgatctccatgtgctcatatcgaccccattccacccggcttacgttacggctgagaggatcaagaaagccaaaaacttgcaactgcttctcacagcagggattggctccgatcatgttgatcttaaggcagctgcagaagctggtttgactgttgctgaagttactgggagcaatgttgtctcggttgctgaggatgagctaatgagaattcttattcttgttcggaattttgtacctggttatcatcaagttattactggagattggaatgtcgcaggcattgcttatagagcttatgatctcgaagggaagacagttggaactataggtgctggccgtatcggcaagctcttactccaccgattgaagccattcaactgtaatctcctatatcatgatcgagtcaagatagatccagaattggagaaacagaccggagctaaattcgaggaggatcttgatgcaatgcttccaaaatgtgacattattgtcataaatatgcctctaactgagaagacaagagggatgtttgacaaagatcggatcgcgaagatgaagaagggagtcctgattgttaacaatgctcgaggagcgatcatggatactcaagctgttgctgatgcttgttcaagtggacacattgcaggttacagtggagatgtttggtacccgcaacctgctccgaaggaccatccatggcgttacatgccaaatcaagctatgactcctcatatttctggtaccaccattgatgcgcagttgcgatacgctgccggagtcaagg

SEQ ID NO: 190281 - DNA, 446 bp, Gossypium hirsutum
gggagacgttaaagagtactggattaacgacggagtttgggggtctatgaacattttgaaggacgagcatgacggagtgatttgcactcccctcaccattaaaaatcccacatgccaagggctgaaaacctgggattctaccggtttggacccacctgtgatcccaatgattttcgtttgaacgggtttcaaatggccagaactagacctgaatgattgggtggtatttcaaaacatgggggcttatccttcatcacgtgggaacgatttcaatggcttcaaaacctcagctattccaacttatatcctggttcttatgccacccgtaagacaagaaaaatatgcgggtttgggctaatttggcttgccaacttatatcttcttgcaatcatgacacgatcaaagataatttagcttatgaaataatgtcctatcttactataatc

SEQ ID NO: 190282 - DNA, 939 bp, Gossypium hirsutum
gaaaagaagtccaaatctttgtaagttctcccccttcttgaatggcagcttatcgacgattggtttcagttctctgttgcctctccttgctgggctcatttgcttcagcttccacaattagccttccttctgattctcgtaaagtctccttgactttgtattacgagtccctttgcccatacagtgccaatttcattgtcaattacctgcccaagctcttcaatgaggatctcatttccatcgtcgatctccgcctcgttccttggggaaacgctaagctcaaaggcaacgacacctttgattgccagcatggccctactgaatgcttgttaaacactgtggaagcttgtgcaattgatgcctggcctaaactgaatgaccatttcccgtttatctattgcgttgagaatttggaattggagcgcaagccccttgaatgggaatcgtgctttaagaaattgggattggaatcaaagcccgttaatgattgttataagagtggactggggcaaaagcttgatctacaatatgcagctgaaacaagtgcccttgaaccacctcatacatatgtaccttgggttgttgtggatgggcaaccactttacgaggactatgaaaactatataagctatgtgtgcaaggcttataaaggtgctaatatgcccaaggcttgtagtggactgaccttcaatcaaatctacaataggaaaactatccatccagtttgctataaggagataccaccattaacattgtcatcaagaaccatatcaactgttatgtcatggatacggaagatagtaacttctatgtaattgtttcagttttaaggatgcatttcaaaccttgttaatataattatatatctatgtattgacggttaactgttaagcactatgctgaagtttatgcaagttgtgcttaactgcttttgctagt

SEQ ID NO: 190283 - DNA, 427 bp, Gossypium hirsutum
taccggttcggtataaaacgtcatggattcctcaggcttgaagaattccgcaccaaaatggttatactccgttgcttttgcaagccaaaatggggggaacctaaattgcccggtggttccttgttaatgggcctttaattgaacccaaagctattaccggaatgaccccgttccattaacctgtttgcaactcgattcaatcaaacaaccatgcaactgtcaagacactactcgagtacaatgcccattgtagtgctgacgatgatgagcgtatgacacctattaaacatatctcgaaaggccctggaagcgagaagctacaggaattattacataggcatcttgaagagcagcgaaagagatgggcattggaagcatgccgcgaggcataggctaagatggatgagctcgagaaaaacctttcaaa

SEQ ID NO: 190284 - DNA, 420 bp, Gossypium hirsutum
ttccggaccggcctaacctatcatttaatcacatgagttatggcatatctccaagactcgtgtttacagaaaagctgcttgtattggatttgagtttcaatgatttatcaggccctcttccggggaaaattgctgaggcaactgaaaaatcaggccttgttcttctcgacctctctcacaaccggttttctggtaaaatcccattgaagatcaccgagctgaaaagcttgcaagcattgtttctttctcataatcttcttacaggggaaatcccagcaaggattggaaatttaacttatctccaagtggtcgatctgtcgcataactccttatcaggttcaattccattagatattgctgggtgttttcagttacttgcattgatactcaacaacaacaatctttccggtgaaattcaac

SEQ ID NO: 190285 - DNA, 775 bp, Gossypium hirsutum
cggccgcgtcgaccaaacctcccactggcttcgcaggttatggttaacaccggccaatattcttttttctcgtcttccagagttgcattttagacaattagacagacataaaggaaacagagaacgaaattatggcttccatgtctttctctgcaactattccgtctcctcttcttgatttttcccaaacgaaaaagaacccagttttttcttcatcatggccttccatgtctttctcaatcccttccatcaaatcctcgcttgggtcttcaaaatcagcctttttccaaaatgggttctcgttgctatcgcttactgcttctgggtttgtctttaactctagatcttcaggcatttatgcaagagcagctacggataaaaccctatacgactacacagtaaaggatattgatgggaaggatacccctcttagcaaatttaagggaaaagttcttttgattgttaatgttgcttcaagatgtggtttgacaacatcaaattactctgagctttcccacatatatgacaagtacaagaatcaaggatttgagattctagctttcccttgcaatcaattcggggggcaagagcctggatcaaatcctgatattaaaaaatttgcttgttccaggttcaaggcagagtttcctatatttgataagcctgatgtgaatggaccgaatacggctcccgtttaccagtttctgaagtcgagtgctgttggttcttttcggtgacctgatcaagtggaactttgagaagttcttggtggata

SEQ ID NO: 190286 - DNA, 1083 bp, Gossypium hirsutum
  unsure (1)..(1083): unsure at all n locations
ttttctctctctacactttcactttctctctctagaaaccttctctctaaacagtttattatattttttttccaaatcctttataaaatcaccagtaactctctgatttgaaaactgaggggttttttttttctgcaatttttttggaactgaaggtttactaatggttatggaggataacgaaggaaataagaagagagcccgggaagagtcagaggctaactcggtgcccaatacaaaactcgctcgagttgactcggacaataataagggtcccgactccgactctcccgaggctactcgtgtagaacctgatcctgatgatggagaagataatttgccggaaacaaggcatataccggaggaattgctgaacatcctcgacgattcagatccggttagtggaccagatccggcgattcagggacttgattcggtcatcaggagtttcgaagaagagatcttaattccggaacaggtggctttaccggaaacggtattggattccggcgagtcgaggccggagttagggtttctgtttgaagcttcggatgatgaactgggtttgccaccgagtttaccggcggttgaggtggagcagagatttgagaccgcctttgatgtggatgaaggtggagggtcaggtggcgttggatttggggaaatgatggggaatgagttcccgattccgatctacgaaccgtttgaattcggaatcggcgttgactcagataccaataacagtttccatagtaataataccggcgatttcgtggcgttaggaggtttgtttgaaccggcggctgatatttcggagctgacgtggcggcctgaatcactttccgccttgtagtgaaaattaaataaataaaaaacaaccgaaacggttcggtttggctccgtatacatcacgtggacatattcgtttttttttttgggggtaattacataaatatacatgtggtctagatttagttttaagcctgaaatataagttcttaatggtaataatacgacatttatttaaccatcttccgtctatttgtaatttaaacttaacactngtgataaatttaaatttta

SEQ ID NO: 190287 - DNA, 613 bp, Gossypium hirsutum
  unsure (1)..(613): unsure at all n locations
gaccagactaatttgtccttaaaggaaccgaaaaccaaattttggcctttttaaaattttgggggaccatttcctcttcttctcttgaattttcccaaaccaaaaagaacccaattttttctttatcaatggccttccttgcttttctaaatccctaccataaaatcctcgtttgggtctcaaaaatcaggctttttccaaaatgggttctcgatgctatcgcttactgcttctgggtttgtctttaactctagatcttcangcatttatgcaagagcagctaccgttaaaaccctatacgactacacagtaaaggatattgatgggaaggatacccctcttagcaaatagaggggaaaagttcttttgatcgccaacgcctctccaagatgaaaactgacggcttcctttttttctgcaatttttttggaactgaagatttactaatggttatgggggataacgaacgaaataaaaagagagcccgggaagagacagaggctaactcggtgcccaatacaaaactcgctcgagttgacttggacgataataagggtcccgactccgactctcccgaggctactcgtgtagaacctgatcctgatgatggaga

SEQ ID NO: 190288 - DNA, 964 bp, Gossypium hirsutum
cccacgcgtccgcccacgcgtccgttttttttactgtgttttattttctcttgtactaaaactgtttggtcggcaagaaaactttagaatcatgggagtgccggaaactgatccattggctcaattgagcttgccgccggggtttcggttttatccaactgatgaagagcttttagtgcaatatttatgcaggaaagttgcagggcatcatttttctctgcaaatcattggcgaaatcgatttatacaaatttaatccatgggatttaccgagtaaagctttgtttggtgaaaaagagtggtattttttcagtcctagagacagaaaatatccgaacgggtcacgacctaatagagttgcagggtccgggtactggaaagctaccggaactgataaaattattacaacggaaggccgtaaagtgggtataaaaaaagctctggttttttacgttggaaaagctcccaaaggaactaaaactaattggattatgcatgaatatcgactcattgaaacttctcgtaaaagtggtagctccaagttggatgattgggttttgtgtcgaatatacaagaagaattcaagtggtcaaaaacctttgtcaagtgtttcaagcagagagcaaagcacgaatgggtcatcatcatcgtcttcttcacaactggatgacatgcttgactcattgcccgagttggacgatcgtttctttgctttgccgcgcgttaactcgttcaaaacgctccaaaacgatgtgaaactggggtttcaaagtctgggtatcgggaatttggattgggggagtctttggtgggcttagctcggtgcctgagctggtaccgagtggacaaactcaaactcaaactcagagtcaggggattactagttatggaaatagtaacgtatatgtcagcacaatgccggctacacttggaaaatgacgtgtcgacaaatagattgtaacttg

SEQ ID NO: 190289 - DNA, 538 bp, Gossypium hirsutum
tgaagaatttcggaccaggacctttttttaataattccttattctaatagctcttggttgggcctaaaacaaaactactcgttaattttactggttggttgtccagaaaattttgaaacatggtagtcccggaaactgatccattggctcaattgagctctaccaccgggggttttcggttttatccgaccgatgaagagcttttagtacaatatttatgcaggaaggttgcagggcatcatttttctctacaaatcattgcggaaattgatttatacaaatttgatccatgggttttaccaagtaaagctatatttggtgaaaaagaatggtatttttttagtccgagagatcgaaagtatccgaacgggtcacgacccaatagagtcgccggttccgggtattggaaagctaccggaaccgataaagttatcacgaccgatggccgaaaagctggtatcaagaaagctctggttttttacgttggaaaagcacctaaagggactaaaacgaattggattatgcatgaatatagatt

SEQ ID NO: 190290 - DNA, 747 bp, Gossypium hirsutum
cccacgcttccggatatttttgaacaagcaaataaaagctctcactacctaaccttcaaaaccccctcgcggctcctttgtggattagaaaactaaagatcaaaagataggcaactaggaaaaaaaaaaagataagtgaaagatgtcaactgcttcttcattgtgttcatcaactcagattaatggctttggagggggacttggggttctaagaacccatgtttctcaacccaagacactttctttcacaagaaggagaatttctacggtagtgaaggcaacatctcgagttgataaattctcaaaaagcgatatcattgtttctccatctattctctctgctaatttcgcaaagttgggggagcaggtgaaagcagtagaagttgcaggctgtgattggatccatgttgatgtaatggatggccgatttgttccaaacattacaattgggcctcttgtggttgatgctttacgacctgtgacggatcttccgctggatgtgcatttgatgattgtggaacctgagcaacgagttccagatttcatcaaggctggagcagatatagtcagtgttcactgtgaacaatcttcaaccatccatttgcatcggacgcttaatcaaataaaaggtctgggtgctaaagctggagtagtcctaaatccggcaaccccacttactacaatagaatatgtactagatgtggttgatctagtcttgattatgtcggtcaaccctggctttggtgg

SEQ ID NO: 190291 - DNA, 479 bp, Gossypium hirsutum
tgtggtgagattttaacatacaaaaaaaaaaccaaaagaaaaactaaggctctaatttccaaactccattacagattagatataacggagagcagtttttgataagaaaagagacggtaaaaggaaattaaagatgtcaacagcttcttcattgtgttcatcaactcaagttaatggctttggagggggacttaggcttctaagaacccatctttctcaacccagttccttttcttttactaggaggagaactgctacagtagtgaaggcaactgctcgagtcgataaattttcgaaaagcgatatcattgtttccccatctatactctctgctaatttcgctaagttggaggagcaggtgaaagccgtagaagtggcaggctgtgattggatccatgttgatgtaatggatggccgatttgttccaaacattacgattggaccctctgtggttgatgccttacgacctgtgacagatc

SEQ ID NO: 190292 - DNA, 408 bp, Gossypium hirsutum
aaaagatcgtcttccatatcatcacagataagaagacatatgctggtatgcacgcctggttcgcactaaaccctgtatcccctgcaatagttgaagtgaaaggggttcaccagtttgattggttaacaagagagaatgttcccgtgcttgaagctgtagagaaccatcatggcattcgaaattattatcatggcaatcatcttgccggggcaaatctctccaatactactcctcgaacattcgcttcgaaattgcaggctagaagtccaaagtacatatctttactcaaccatcttcggatatatttaccagagcttttttcaaaactttacaaagtggtctttctagacgacgacatttgaattcagcgtgatttatctcctctttgggagattgacttatggggaa

SEQ ID NO: 190293 - DNA, 708 bp, Gossypium hirsutum
attggacgagtcccatgatggctgaaggacttgataataggcatattcgaggagcaaggtcaaatgggcacctaatgcaacctaatgcaggggtgtttgggtcatctggaaatggaagcttgtcacgtaatggaaaccattacatgtggaacaaactccaactcgccccagcaaaatctgccaactgccatggtttggccaaattcaccatcgtttgttaatggcattcatgctaatcgccttccacatatcccagcatttcctagggctccttctgtaatgttgaatgtaggatcacctgtacaccaccacattggctcagcgccaccagttaattctgcattctgggacaagcggcatccttatatcggggagtctcctgaaacttcaggttttccccttggatctcttggaagcgtgggctttcctagtagctcgctatcacatccggtggaatatgcttcccacaacattttttctcatgttggtggaaattgcatggatttgacaaaaactggtggggtacgctctcctcagcagatgcgccaccttttccctcgcaggaaccctattatgcccgcatctcttgattctcctaatgatcgtgtcagaaacttttcataccgcagaaatgaatcaaattctagtaatgctgattaataacaatatgaacttgatattgaccgaatcatacgccgggaagacagc

SEQ ID NO: 190294 - DNA, 902 bp, Gossypium hirsutum
cggaccaggtattaagggtaccttaggttccctatttggatggctcaccatcttttagtttaatctcggtcccaaacctatcatggctgcttgaaaacccacaacacttctagatctaggttaaaggccaatttatccccttattggtcaaatggatggaattaatcaaccatcaacctttatttaaataggatgaggttcaattcccggaatccctggcacatgctcatttaacagaccatgtgctattgctttatcattggtatcaatcatgtttgctacattttaccatgttaataacgcatgatgcctgaactacggggcccaccattcgtctagctaaaacactgactgatctttttatgtaaaaaagccgtagaagcaagtattggtttgttctttgaagatcaggagcaaaaccttcctgagccctgtaaatactctgcatctctgggtatattgatgatacaagcattggattagatatcaatgatgtgcagttaattatccaggaaaatgattggcaaaagcagaacattaaaaggtgtacgattctcttctaggggttcttcgacaggttcaaacaccttgggaagtgctgctactgatagtcaaagcacgggagatgaaactctaactcaatcagcagaagaagtacctggaagtccagctgaggctactaagggtactaagagaaagcgagagcctacaaacatgaaagatatatggaaccttcaacctggaactcgtatagtagtagatgccaaccaatatggccagcttattgggaaggaagcgtccaaattggctgaatttctctgtacaattgcaaggactggttctatttgtcctttgaatacaaaacattggaaacatctttctaaatatgtgttggaaaacat

SEQ ID NO: 190295 - DNA, 1525 bp, Gossypium hirsutum
  unsure (1)..(1525): unsure at all n locations
aaattaataagagccttttggctctcaaggagtgtattcgtgccctggacaatgatcagatccatataccattccgtgggagcaaactcactgagagtgctccgtgactctttcgttggcaactcaaggactgttatgatctcgtgtatttctccaaatgcaggttcatgtgagcacactctcaatactctgagatatgctgatagggttaaaagtctttccaaaagtggtaatcccaaaaaggaccaggctgtaacttctttaccaccaggtaatacggatgcttcttcagcatcttctctgccagctcccgcagatttagaagtcgtatatgaacaacaacaggaagccaaagttgttgatacaagtcaaagggttgtagaaaaagatgtttatactgttgactttgataaacagctgtcaaagtttccgtcaggttactctttcaacaggagagaggaaagtggattgacttctgggccaacaggtcgggagagatttgaagtgaataactcctacggcagctcaacaaaaagagtttactcatcaaattctcaaaactcagctgatacagaagagaaactgcagaaggtgtcaccacctcctagaaaagtgactagagaagaaaagtcagataagatgaccgggatcgtagctaagaaagacgggggaggatctgatttgtccactacaaagtctaggcaggcgaatgctgttagttatagcgatgctgataccgttggacatagacaatatgatcccgagcctcccactgatgagaatatcaatgcaatacttgaggaggaagaggctctaattgctgctcacagaaaagaaattgaagacacaatggagattgttcgtgaagaaatgaagcttctggctgaggtggaccaaccaggcagccacattgacaattatgtgacccagctgagcttcgttctttcacgcaaggctgctagtctggtgagtcttcaagctcgccttgcccggttccagcatcgactgaaagagcaggagatactgagtcggaaaagagttcctcgttgatgccagctctttgttctctgctttcattgctgcatcagactctgtccatcgatgcacggagctgcattagggtcttgagaggaaattcagcagtgtgcaaagatcctgatcctatttcccccagcatcaaacgttgcagatcgcgtttccttcaaacgcaatggcaaagataattcacgtgcagatacttgtgtgatgcttgatttatcaaaatgtgtattgttttagatgaatctgataatgttctggttgaagattgaatggttttggtggccttctgttgtttaaagggcgacaagaaaatgctttctttaaaatcatttctaggaaatgggagagaaaaaaaaagaagggaaaataaggtttttgtttttcccctttgtttattctgtacttttgaaactatatatattctgttttctcacctcanaaagcaccttgtgaatgttatatagacccagtagtatgtagtagt

SEQ ID NO: 190296 - DNA, 958 bp, Gossypium hirsutum
atttatgagcgacaaccggaagtaaaagttgttgatactggtcgaagggtagcagagaaagatgtttatactacagactttgacaaacagccctctactttttcgtcaggttaccctttcaatgggagggaggaaagtggaaaggcttctggcccaacggatagggagagatttgaagtgaatagtaattatggtggttcttcgagccaaagagtttattcatcaaattctcaaaattcagctgatacagaagagaaagtgccaaaggtgtcaccacctcgtagaaaagcaactagagaagaaaaaaaactggaaaagtcgaggaattgggccaagaaagatggaggaggatccgattcgtctgcttcaaactcgaggcaggtgaatgctgttaataataacgaaactaataccattggacatagacaatatgatccagaagaaaaacaggaaaagacgaggaattgggccaaaaaagatggaggatccgatttttctgcttcaaacttgaggcaggtgaatgctgttaataataatgaaactaataccgttggatatagacaatatgatccagaagaaaaaccggaaaagacgaggaattgggccaagaaagatggaggatctgatttgtctgcttcaaactcgaggcaggtgaatgctgttaataataacgaaactaataccattggatatagacaatatgatccagagcctcccactgatgagaatatcaatgcaatacttgaggaggaagaggctctaattgctgctcacagaaaagaaattgaagacacaatggagattgttcgtgaagaaatgaagcttctggctgaggtggaccaaccaggcagccacattgacaattatgtgacccagctgagcttcgttctttcacgcaaggctgctagtctggtgagtcttcaagctcgccttgcccggttccagcatcgactgaaag

SEQ ID NO: 190297 - DNA, 626 bp, Gossypium hirsutum
gagccaaggaagtggccatctttgcctcagcttctgagtctttttccaagtcaaacataaattgcagcatcgaagatagtcttgctcgttttagagatgttgtttctgctgctagagagatctcacttccagttcgagggtaccgtcattccaatgctcgaaaatgttatgaattttgtcccaatcgataatcttgctgtccactttcatgacacttatgggcaagctctgtctaatatcttaacatcactccaaatggggatcagtaacgtggattcatcagtttcgggtctcggaggttgtccatatgctaagggtggttccggaaatgttgccaccgaggacgtggtttacatgctcaatggacttggaatagagacaaatgtcgatctcgaaaaactcttggtggccggagattttatatgcaagcatttgaggcggccacctagttcgaagacagcacttgcgttgagcaatatgaaggctaactccaagctttaaggtacaaaccataaaatacttgtcatgctgtaaaaggccaagatatgcatctaatccttatacttcagtaaaattcgaaatttaatccttgtacttaaaatattaaaaattaacatttacttata

SEQ ID NO: 190298 - DNA, 658 bp, Gossypium hirsutum
cccagactcactttgttgtcgtgtgtatatacagatatacattatagaagcaaaagagcccatctctatatagactacctcaggatctgcaacatcggtacccaaggtactgactttcgctctgaattcctctgggtcaggaatttggagagtgatcactactgaatcaaaatcaaactttggggggaaatggagttttccaagatttttacgatatgtttttctgtattgctcttgtgctcctccttggcctatggtcaagcaaggagccctcctgcccggtcgcaatgagcccaactccagcaccagccccagcaccggcaccggcatatgtaaacctcacttatttactctcagtggctggtccatttcacactttccttgactaccttgagtccactaaagtgattgacacctttcaaaaccaagccaacaacactgatcaagggattacagtttttgtaccaaaagacagtgccttcaaggatcttaggaagccttcattttccaatctcagtgatgaccagcttaaatcacttatcctttaccatgccttgcccagattttacacacttgcagacttcaatgaactcagtacaaagggctccataagtacccttgctggtggcgaatacactttgaatttcacctatgattc

SEQ ID NO: 190299 - DNA, 437 bp, Gossypium hirsutum
tgaaaacacatcagtggtctgtcaaacttgaggagtctcacttttcggagaaacagtgcaatcactgcacaaggaatggcctagtaaacctgatgaagctggacctggaaaaatgtcctgggattcatggggggcttattcacatcaaaggtttgacaatgttagagtctcttagtattaaatggtgtaattgcataacagatgctgatatgaagcctctttcagggcttacaaacttgaaaagcttacagatttcctgtagtaaggttacagattttggcatcacttatttaaaaggtctgcaaaatctttctgttttgaacttggagggctgcccagttacagcttcgtgctttgatactctttcagtgcttgtatctctggtatatttgaatcttagcagatgccaattatccgatgatggatgtgagaagctt

SEQ ID NO: 190300 - DNA, 991 bp, Gossypium hirsutum
atgacaacaatacaccaccacggggcttttgcttcttcgaattctcctccatctcacggtaaaaagatctcccttcccctctctttctctccggcggcgatctcaaatcaccggtaaatcgcaccgtaacgcccgattactcgtcacctctgtgatctcctctgacacctcgtggtttcagtttattctaactcgtcgccatcatgaatcccgaatatgattatctgtttaagcttttgcttattggtgattctggtgttgggaaatcatgtctacttttgaggtttgctgatgattcatatctggatagctacatcagtaccattggtgttgactttaaaatccgtactgtggaacaggatggaaaaaccatcaaactccaaatttgggacactgctggccaagaacgctttaggacaatcactagtagctattatcgtggggctcacggtatcatagttgtttatgacgtgacagaccaagagagtttcaacaatgtcaagcaatggctaaacgaaattgaccgctatgccagtgacaatgtgaacaaacttttggttgggaacaagtgtgatctaacagaaaacaaagttgtgtcatatgagacagctaaagcttttgctgatgacattgggattcctttcttggaaacaagtgcaaaggatgccactaatgttgaagaagctttcatggccatggctgcttcaatcaagaataggatggctagccaaccaggcatgaacaatgcgagacctccaacggtgaatatcaaaggacagcctgttaaccagaactctggttgctgctcttcttaaatgaaaatttagttttagttggtccatgtgatgatatttgtccttttgtgttatttgttgcatgtagttgggggaaaaaaaaactagtcttatttttatttcatttgatagtaaaagatggttctacatgatttttatattcttatctttttttgttatattaaatactcaattct

SEQ ID NO: 190301 - DNA, 320 bp, Gossypium hirsutum
ctccaatgcttaagccaatccattaatccttcccaagatgtttccaccattctcttctgcaacaccaacccttcttacgcatcagttttgcaagcgtacattcgtaacgctcggttcaacacctcttcgacgcctaaaccggtcatcatcatcactccattggaagaatcccatgtttccgcagccggaatctgttctcagaaagtccgttttcagctcaaaattcgtagcggcggtcatgattacgaagggttatcttatgtttccgataaacccttctttgtactcgacatgtttaaccttcggtctatatctatcga

SEQ ID NO: 190302 - DNA, 758 bp, Gossypium hirsutum
  unsure (1)..(758): unsure at all n locations
caattttcttgttggatttgaagcagtaatccttttccgaatcgttgaattcctctgtgaaaatttctgatcggtgtttcatcgctccgttgaagaatgccgtcgtcgccacgaaagaattagtaaaacggaaaacaaacggataaaactagaatgcgaaccatttgcgacgtctgcgacagcgccgccgcgatcatattctgcgccgccgacgaggctgctctctgccgttcctgcgacgaaaaggttcacatgtgtaacaagcttgccagcagacatgtcagagttggtttagccgaccccagcaatgtcccacgctgtgatatatgtgaaaatgcacctgctttcttttactgtgaagtggatggtagttccctttgcctgcaatgtgatatgattgtacatgttggaggtaaaaggacccatgggaggtatctcttgttgaggcagagagttgagtttccaggggataagcctggtcgtttggaggaaccaggtttacaaccgctcagtccggatgaagtaaggaaggatctgaatcagcagtcaaagcttgcagtgagagagaaccggcaaaaccgtggagtctctcatgttccattgcttgatgataatgctaagggtgatggagaggtaggaaatgagttgattgatctaaatgccaggccacaacaggtgcatgggcaagcttctatcaatcaggagcaagccatggatgtttcgagtggcaataatcatgactctancagtgggatccc

SEQ ID NO: 190303 - DNA, 801 bp, Gossypium hirsutum
  unsure (1)..(801): unsure at all n locations
ccccaacaatgtctcttcactcttctctcaccatgtcattgctgtctttctccttcttgttgctgtttacttttagtgccaaagctgttgttcctccatctgaaacttttaggtttgtcaacgacggagaatttgggccgtttgttgttgaatatgatgcaaattaccgtgtcataagcatagctaatgcccccttccagcttgcgttttataacaccacccctaatgccttcacccttgcgttacgcatggctacaacgcgttccgagtcgctcttccgatgggtttgggaggccaacagggggaaccctgttcgcgagaacgccacgttctctctcgggactgacgggaaccttgtcttggctgatgccgatggtcggattgcttggcaaagtaacactgccaacaaaggtgtggtagggttccaattgttgcctaatggtaacatggtgttacacgattccaatggcaagttcatttggcaaagttttgatcatccaactgatacactcttggtgggtcagtcccttagagccgaaggggcgacgaaccttgtgagtcgggcttctgctcaaacaatgtcacggagcctatacctggtgatgggagcctaaacgttgttttgcagtacaggggatgaactctcctaaccacttgtctatntcaaatatccgtttggccaagtcacagatgtacttacaactggacactaatgtcgaggaacnatgatggttgttatacgtntgtagactccagcgctactcncatcggaccgaattatttgtaggcgaattacaccat

SEQ ID NO: 190304 - DNA, 1509 bp, Gossypium hirsutum
  unsure (1)..(1509): unsure at all n locations
agcggatccctgcgactttacgattctacaccaggtgtttttcagcagtacttgttctaaggctcggactacatttctcattataaatgtggagaaatcttgttctactttccattccatgcaacactaacttttagattccctttccattgcactgctctttctttctatagaattagtcactcctgttctagatgaaggttctctccccaattcttgcttgcctagcgcttgctgtggtggtaagccatgctgctctctcacctgagcaatattggagctataagctgccaaatactccaatgccaaaggctgtcaaagaaattctacatccagaactgatggaggagaaaagcacctctgtaaatgtaggaggtggtggtgtaaacgtcaatacaggaaaagggaagcctgggggtgacacccatgtgaacgttggaggcaaaggagttggagtgaacacgggaaagccagggggtggcactcatgtgaatgttggagacccttttaattacctatatgcagccagtgaaactcaaatccatgaagacccgaatgtggctcttttctttctggaaaaggatatgcaccccggggcaacaatgagcctgcatttcactgaaaatacagagaaatcagctttcttaccttatcaaactgcccaaaaaataccgttttcatctgacaagttgccagaaattttcaacaagttttcagtgaaacctggatcactgaaggcagagatgatgaagaacacaattaaggagtgcgaacagccagcgattgaaggagaggaaaaatattgtgcaacctcactggagtcaatgattgactatagcatttccaaactagggaaagttgatcaggcagtctcaacagaagtggaaaaacaaaccccaatgcaaaagtatacaatagcagctggagtgcagaagatgacagatgacaaagctgtagtgtgccacaagcagaattatgcatatgctgtcttctattgccataaatcagaaacaacaagggcttacatggttcctttagagggtgctgacggaacaaaagccaaagcagtagcagtctgccacacagatacatcagcatggaacccaaagcatttggcttttcaagtcctaaaagttgaaccaggaaccattcctgtctgccatttccttcctcgggatcacattgtttgggtccctaagtaaaagtcctgaagagtagattcatacactatagtttcttcacagtgtgcattaaaacagcttaaagcaatatccagtttgttctataataatatacccacaagtttagtcatgtaaaatctatccatgaatcatgttcttagtaatggataaaatgatattactttctgtatcacaagggtttggtgataaatgtattagtattttaagtaacttttcagaaaaaaaaaaaaaaagtcgacgcggccgnnnnnnnnnnnnnnnnnnnnnnnnnnnnnnnnnnnnnnnnnnnnnnnnnnnnnnnnnnnnn

SEQ ID NO: 190305 - DNA, 682 bp, Gossypium hirsutum
cttccattagacccaaaatgccgcttcactcggcggtagcattgttttatgccgccgcttctcttttcgcacattgctggcgccgaagatccctacaggttctacagctggaatgttacgtacggtgacatttaccctcttggcgttcgtcaaacgggtcttctcataaatgggcaattcccaggccctgatattcactctgttaccaacgataacctcatcatcaacgtctataacaacttaaacgaatcttttctcctctcctggaatggagtccaacaaaggaggaactcgtatgaagacggcgtgtttggcacaacctgccctattccaccaggaaagaacttcacatacatgcttcaggtgaaggatcaaatagggagtttctattactacccatcacttggattccacaaggcagctggtggttatggagggatcaggatccttagtcgcccacgaatcccaggccccttgcctgacccagccggggattacactgtgctcattggcgattggtacaagtccaatcacacggttttgcaagctcatctggatggtggtaagaagcttcctttccctgatggagtccttatcaatggtcgtggacctggtggtgcctccttcaatgttgaacaaggcaaaacctacaggcttaggatatcaaatgttggactgcaaa

SEQ ID NO: 190306 - DNA, 736 bp, Gossypium hirsutum
gcttttagattccctttccattgcactgctctttctttctttagaattagtcactcctgttctagatgaaggttctctccccaattcttgcttgcctagcgcttgctgtggtggcaagtcatgctgctctctcacccgagcaatattggagctataagctgccaaatactccaatgccaaaggctgtcaaagaaattctacatccagaactgatggaggagaaacgtacctctgtaagtgtaggaggtggtggtgtaaacgtcaatacaggaaaagggaagccagggggtggcactcatgtgaacgttgggcgcaaaggagttggagtgaacacaggaaagccagggggtggcactcatgtgaacgttgggcgcaaaggagttggagtgaacacgggaaagccagggggtggcactcatgtgaatgttggaggcaaaggagttggggtgaacactggaaagccaggaggtggcacccatgtgaacgttggaggcaaaggtggacgagtatctgtacacaccggacacaagggaaagccagtaaatgttaatgtgagtccgtttgtttacaactatgcagccagtgaaactcacatccatgaagacccgaatgtggctcttttctttctggacaaggatctccacccggggcaacaatgatcctccatttcactgatcatacagagaaatcacctttcttaccttatcaaactgcccaaaaaataccgtttttcatc

SEQ ID NO: 190307 - DNA, 675 bp, Gossypium hirsutum
cttcatacaaaactgagttatatctttcgtttcttccccttgcaaaatccccagcctacccaacacagaaaaaagaccaaaagattttttatggccgttgtttcaagtgctcattcaactatcttctctaaaacctccctttttcaccacataaatggtttcaaacgcttctctttttgcttacccttttcttcctctgccgttgcttctctttcttctaagaaaaaatggagacaacccgtggcttcctccatgttagagcttggtggaatcaaaattgccaaagatgatgtggtgagggatgacccgacaaacaatgttccggacacaattttttcgaaactgggcttgcagctccacagaaggaataaccattctcttgggattctgaagaatggaatatatgaatattttgagactaatgtcccatatatgtttcacaagtttgatgatctctggccacatgttttagtttaacacgattttgatgatagtctcttcccgctgaacatgttaccccgagtattatggtcatattatgtgactcttaaatggctcaggggtgtacaatgccactcaacaaactttttttaagggcgcacacttttctgttaagcggaggttcccccagaaatatttatcaccccaaccccggtattaaagaggggggggttt

SEQ ID NO: 190308 - DNA, 1073 bp, Gossypium hirsutum
cccacgcgtccgcccacgcgtccggttttctttcgccgttctaaatcacagaaagctttgaagaagaagcttttggaggtgcaaaacatggggccgaagaaaggtggaaaggtggctgtgcccgccaagaagaaacaagagaaggttgtcaatccgttgtttgagaagcgtccaaagcagttcggcattggaggggctttacctcctaagaaggatttgcatcgatttgtgaagtggcctaaggttgttcgcattcaaaggaaaaagaggatccttaagcagaggttgaaggtcccaccagcattgaaccagtttaccaagactcttgacaagaaccttgcaacaagtctgttcaagttgctcctcaagtacaggccggaggacaaggcggccaagaaggaacgtctcctgaaaaaggcccaggctgaggctgaaggaaaagcccccgagtctaagaaaccaattgttgtgaaatatggacttaaccatgttacctaccttattgagcagaacaaggctcaattggttgttattgctcatgatgtggatcccatagagttggtagtgtggcttcctgctttgtgcagaaagatggaggtcccctattgcattgtcaaggggaaatcacgtttgggatcgattgtccacaagaaaactgcttccgtcttgtgcttgaccacggttaagaacgaggataagctggaattcagcaaaatactcgaggcaatcaaggcaaacttcaatgacaagtacgacgagtacaggaagaagtggggtggcggcatcatgggctccaagtcacaagcccgaaccaaagcgaaggagaagcttcttgcaaaggaagctgcacagaggatgacataaaggaattaatagaccttttgccgcagttcgtgtttttgattaaatagtcttttgtagtaaggtacgatcgattttcgactcgggtttactctcttttccggaggaacattcatatacttttgtggttgaactttctaaatgcctagtttgttgtttgtgctgaagttttgtgattttctaatgaattgtcaatcaatgtttttattttt

SEQ ID NO: 190309 - DNA, 413 bp, Gossypium hirsutum
  unsure (1)..(413): unsure at all n locations
ttgtctacaagaaaactgcatccgtcttgtgcttgaccacggttaagaacgaggataagatggaattcagcaaaatcctcgaggcaatcaaggccaacttcaacgacaagtacgatgagtacaggaagaagtggggaggtggtatcatgggctcgaaatcacaagccagaaccaaggcaaaggagaagcttcttgcgaaggaagccgcacaaaggatgacttaagccaaccattactccctttggttaccaagtcaaatttactcctttgcccgaggattacttatatattttctagtttaactttcaaaacatcgagtagctgctgtttgtgatgtaactctgtgccttttcttaatgaaaattatgcccaaaccatcnaacaaaaataaaaacgtataaaaaaattaaacc

SEQ ID NO: 190310 - DNA, 398 bp, Gossypium hirsutum
gaggcgtccgcccacgcgtccgcccacgcgtccgcccacgcgttcgttttcctccgccgttagtaaaagcttggaagaagactaacgtggtgcaaaaaatgggccccaagcgaggtggaaaggtggccgtcccagccaagaagaaacaagagaaggttgtcaatccattgtttgagaagcgtccaaagcagtttggtattggaggggctctacctccaaagaaggatttgcatcggtttgtgaagtggccaaaggttgtccgcattcaaaggaaaaagaggatccttaagcagaggttgaaggtcccacctgcattgaaccagttcaccaagactcttgataagaaccttgcaacaagtttgtttaagttgcttctcaagtacaggccagaggacaag

SEQ ID NO: 190311 - DNA, 960 bp, Gossypium hirsutum
tcgttcacgcgtccggctaaccatgagctacttaaccatttcccaaatctcctccctcctcttctttagcgtccttttcatttccgctcatgcagcgcgctttgaaatccgcaatgagtgctcctacaccgtctgggcagcagcctctcctggtggtggccgtcgcctagaccctcggcaaagttggaccatcgatgtgcctgctggcactgctatggctcgtatttggggtcgaaccaattgcaatttcgatgccagtggtaggggtcattgccaaaccggtgattgtggtggactccttcaatgcaaaggttggggtgtacctccaaacaccctggctgaatatgcacttaaccaatttggaaacatggatttctacgacatttccttagttgatgggtttaacatccccatggtgtttggtccaactaatggcggttgtcacaacattcggtgcactgcagacatcaacggacaatgcccgaatgagttaagagctcctggtgggtgcaataacccatgcacggtgtttaagaccaatgaatattgttgcactcaagggtacgggacctgtggtccgacccgttattcaaggtttttcaaggaccggtgccgtgattcatacagttatcctcaagatgatccttcgagcacctttacttgccctgctggttccaattacagggccgtgttttgcccccggcgttcacctatatttgatggctgtaagtagtacctagatacatacagggaatatatctcggtcaattaatctggccttggactaaaaataaaaagtaattgagcttcaaatgattcatcacatgtgttacttgattatttactatggttgtacaaatttgttaaattatactctagacattccgtgttaatgtttatccaaatcacatttaatattcttcaacttccttacttatatatttatggttactagattag

SEQ ID NO: 190312 - DNA, 617 bp, Gossypium hirsutum
ccacgccgtccgctgtgattttatgagacacatggacctaccaacctcttcttatcatttgacaacctcttaccttcaaggaggctctgtgagctggagcagaacagatgtgcctcgttacacctttgccacactgacaatagttctctctttccgacacctgtttatccgtacattgtgccgacaaaatatgacgtgctgattgaggatgactttcctttgcttgattacaccacagggtcgcgttttgcccccgaggctcacctcatatagagatggtcggaagtaagagccaagaaaaataaagggatcatctcttggtctagttaatctgcgccttggaactaaaaaataaaaaagtcatttggtcttccaaatgatatcaaacacgtggttctacttggtttattttacatatgttttgtttaataatattgtgcagtttcaacagcacaagacgtcacaagttgctatcatctttcatcaaaatttccaactcataaatacccatataaaaaagttctttggcaaaaaagcaaacaacctacgacatccccacctggacgtaataaaaatatcttttttgtttttcaataaacaataaaatttttttttat

SEQ ID NO: 190313 - DNA, 629 bp, Gossypium hirsutum
cccacgcgtccgcccacgcgtccgcccacgcgtcccgttcgccatggtgtttggtccaactaatggcggttgtcacaacattcggtgcactgcagacatcaacggacaatgcccgaatgagttaagagctcctggtgggtgcaataacccatgcacggtgtttaagaccaatgaatattgttgcactcaagggtacgggacctgtggtccgacccgttattcaaggtttttcaaggaccggtgccgtgattcatacagttatcctcaagatgatccttcgagcacctttacttgccctgctggttccaattacagggtcgtgttttgcccccgaggctcacctcatatagagatggtcggaagtaagagccaagaaaaataaagggatcatctcttggtctagttaatctgcgccttggaactaaaaaataaaaaagtcatttggtcttccaaatgatatcaaacacgtggttctacttggtttattttacatatgttttgtttaataatattgtgcagtttcaacagcacaagacgtcacaagttgctatcatctttcatcaaaatttccaactcataaatacccatataaaaaagttatatgaacttatattatttcttttatggga

SEQ ID NO: 190314 - DNA, 452 bp, Gossypium hirsutum
  unsure (1)..(452): unsure at all n locations
cccacgcgtccgcccacctttccctttcagtttcctttggtgttttaagatatgggaactcaagctcctccagaaaatggttatggcagaagcaacagcttggaagagaaatcagcaaaggagaaagcaatcgatgagtggctgccaatcacctcatcaagaaatgcaaaatggtggtattcagctttccacaatgtcaccgctatggtgggagctggtgtcctcagtctcccttacgccatggcagaactcggatggggtcctggtgtgactgttctaatcctatcatggattattaccctatatacactatggcaaatggtggaaatgcatgaaatggttcctggaagacgtttcgatagataccatgaactgggtcaatatgnccttggtgaaaaacttggcctctacattgtggtgccacagcaacttattgttgaagttggtgtctg

SEQ ID NO: 190315 - DNA, 922 bp, Gossypium hirsutum
gcgttcttttttaattgtaaaacctaaataatttccagttcaatgacaaatccataatatcaaaatttcacatagaaattggcatctaacattagtgcctcaaatttcgtgttatgggtaaaattcaattactagggctataagatgtatttcatttgtatgcaaattttacacatgatctttggttccaaaaattttggacagcgaaaaagtaaatgttccatttcattcaagcattgcaaaaaataatggattattaaagcataaagtcgacaacaatgtgatgtatgaagactatgttaaagaagctcctccaactccattggaatcattactttgtacctgctatttgtaagctatatcatatcaatttatctgggattctcactgcagctccccgacaggggcctcattgagccataggaaatggatgaaatcatacagttttgcacttacgctcaccttgtatggtgttgggtttaatctcctgacgtgatcaggcctcatttgctcaagctgtttgatgcaatggtccctaatatcctgcagagctggtaactcttcccttactttacttgacttcccaggccagtaacacttcagaagttcttccacgcgctgtggtactacatatgctcttttggattcattaaaagggtggcgacatagaatacgttctcccacctttggacatggttcattttcccctgtcattatatctaccagcgaatatccttcccttccatataacctgtaacatcgttttttgcatggtatagagaccttggatacatcctctgaaagtttgatgcgtggctgattattgatctcaacaagcttgaaaacacaacctaaagctgcttgagcatagcaagtgaccaaataggttaatattccataacaatccacctcatgaccctgc

SEQ ID NO: 190316 - DNA, 399 bp, Gossypium hirsutum
tgttctagcggaaaaggaaatgttccatttcattcaagcattgcaaagagaataatggattattaaagtattaaagacaagacaccaatgtgatgtatgaagaactatgttaaagaagctcctccaactcgattggaatcattactttgtaccttgtatggtgttgggtttaatctcctgatgtgatcaggcctcatttgctcaagctgtttgatgcaatggtccctaatgtccttcagagctggtaactcttcccttactttacctgattttccaggccagtaacacttaagaagctcctccacacgctttggtaccacatatgctctttgggattcactaaaagggtgacggcatatgattcgttctccaacctttggacatggttcattttcccct

SEQ ID NO: 190317 - DNA, 416 bp, Gossypium hirsutum
gctcttaccttttcctgatttacctatcaacggttggggggatgtggttatagcgtaaaatgtttaaagaccttcatgttatatggctaattccttggtgtagatactgtgaccaaggtgtctcatcagtgcaagtggcttatgcaaacattgcttgactatgaaatgagtaaatgctaatactacttgatcgccttttagcatttattagcttattctggcgcacctatattgctatctccacagtgcatgtatgcatgcagagtggtgcatacacatgcatgtcgggtgtctaatggtttagttcttgcattgaaggctatcggtaggtttcctggaccaaattctatatgatatcttgctaatctcacttctgtaaacagcatcaggtaagatctttctcctttacgtgcata

SEQ ID NO: 190318 - DNA, 425 bp, Gossypium hirsutum
tcggaccgaacccaaaccggtgccttgtgacttagaagttaaagctagccgggttagaaaagatgatatctcagtcttgcgtcatcaaaataagggtgtgaagaaagccgatgaagctgtaattggcattggacaaacaaatgctgagaacattaacagcgtctcggaaatggactctaataatgacaagcaaaggttgaaatctgcttatgaatggagggaaagagcacggaatatcaaggaggcccaggtttcctcatctcttgaagaaaacaaggataagtatgtgtcagctcaagtggtgaatgagtctgttgaaactggaaggaaaccagaagctgcttaagccgtctgtagtggacgggaaaggaagcactcagagaacagttcaccaggttaaggtaagtcagaatatggagaggaaa

SEQ ID NO: 190319 - DNA, 400 bp, Gossypium hirsutum
attccatttgcttggtctcactaaccaaatttacgagggttaaacttagggtagtggaattatttaaaggaagttttaaggcccattttgagaagatttatgagtttatgttagaggttaggacccaaaatgttggaacaacacatactattatctggataacaagatgttttaaaggatgtatgtatgtctgtaggcatgcaaagatgggtataaggatggttgtagaaggataattgttttagatggatatttcttgaatggctactttggaggttatctactggcaactattgggatagatgtaaataatggcatctattctattttatatgttgcgattgaaattgaaaaccaaacattatggtgctggttattggagttgctctcattagacttg

SEQ ID NO: 190320 - DNA, 638 bp, Gossypium hirsutum
tttcacgcgtccggaaatacatggccccttcaccaggggagtacgagagaggactatttgctcacactgataaacctgtcagcacaatcatttgtgatgatccggtttcggggctggaaattgaggtcaaggacggccaggggatcaagttgtccaatttatctccttcttcttttggcttcgtggttgggcatcctctcaaggcatggagtaatgggagattgaaagcggtgaatcatagagtgatgatgagcggagataaagatcgatattcaatagccgccttcgccattccaggtgagggtaccataattaaggcacccaaagagcttatagatgagcaacatcctcagctttacaaggactttaatttcatggacttctttcgttttgccttttccgaccgcgcaaagaacatcgaatccggccaacaactccacgcctttgcttctctctcaccaccaatttccgattaaaaacatgcccgctttgacaagttaaagcccggttttcgctcaaaattgaagttacatataataaattgagtcctttaccatattactataatcatgattttcgttcttgtactgtattactatgttataatttgcaataatcgcgcaattgtatcgtgttaa

SEQ ID NO: 190321 - DNA, 697 bp, Gossypium hirsutum
ctttgtgtcctctctgtgtgcttttcttcactgtttgttccccgtcaaaatattgtgtcacaggaagaaaatcccaatttccacgagaaattttaaacaaaaaaagaaacccaaaaatggacaaagaaaagaaattaaaacaaacccaagaagaagaggaaatggaattcaaagactgtgaaaaccatagccaacaagctcaacaagaagaagaagaagaagaagaagaaaaaatcgagataggcgatgaaataattcgaagcaaaattggtatcatgagagcacttgcagagagagatgacccatcagttaaggaagtggatgattttatgatacggagattccttagagctcgtgatttggatatagagaaagcaaacaccatgttattgaagtatttgagttggagaagaacgtttttgcctaaaggattcgtatctgaatcggagatttcaaagcagttggctgataataagctttgtatgcaaggagttgataaacaaggtcgacctattgtcgttgctttgtggtggtagacagaggcctacgaaagggaaccttgaagaggttaaacgctttgttgtcgatggtttacagaaaatttgtgccagaatgccaagaggacaagaaaagttcgtggcgatcggagatctcgaaggatggggatattcgaacagcgatattcgtgcatacgtcc

SEQ ID NO: 190322 - DNA, 404 bp, Gossypium hirsutum
gctcgagattaaatgcccccctcctcaaactacagcacgtttgttggataaacttgttgggcattttctagaagagacgtgtgtgaatcctactttcatcatcaaccatcctgaaataatgagtcctttggcaaaatggcataggtcaaaaccagggctgactgaacgtttcgagctgtttatcaacaaacatgaactttgcaatgcatacactgagttgaatgatcctgttgtacaacgtcaacgatttgctgaacaactgaaggatcgacaatctggtgatgatgaagctatggctctagatgaaacattctgtactgcacttgagtatggattgccgccaactggtggttggggattgggtatcgatcggctagctatgctattaacagattcacagaata

SEQ ID NO: 190323 - DNA, 638 bp, Gossypium hirsutum
gcggagtttgtgaagcagtggattcaaaggggcctagaagttgggaccagataaaagtgccgggacttcacccttctatgtccatgagtgatcttatgaaccacattggacaccgtctttcagaacacatgacctccgaaaatccatcctctgaaaatagaccagactgccaggaaatgctggaggatattgcacaataccttctgagtgacactcaatttacaacagcctctgatgagaaatccctcatgtcaagggtgaattctctgtgttgtcttttgcaaaaggacaatacaacaggcacaagctcacaggcaaatggagaaaattacgatggaggtgatgatggaaaagatgttcagctaaacagaagtcatgggtttgagtttaatattacgggcaaggatgatgtgaaggcttttgaaggggaaacaaaggaagtgtctagtagcaggcaggcgccaggcatgtcaagaaaagactcgtttagtgagttgctgcttcatcttccccgaatcgcatcgctccccaagttcttgtttaacatttcagaagaagatggagagagacaagctagataagatagttttcttgtttatagactgtgtaaaacaaatgataagaaaaaatattaagcg

SEQ ID NO: 190324 - DNA, 396 bp, Gossypium hirsutum
caggaaaaagggtttggttttagccggtaacccccaatggcgggaaaaaggaaatgccaccttagttgccaattcctcattggttggttggtcaccatcattcatttggtcattggtatgggttattatttgggttccttccaaaccctcttctgaaaaccctaatttcaaaccaaggccgcgtccatggcggagaagcaatctcggaattgaccggaaaattcgatcccaaataccgccacagtttctctgatctcctcatgcactcttattctgagattggggcgttttcgcatttttatcacattgatggaaagccatgtcaaactcatattaacaatgctgtgaattcagatcgccagcttcagttccgaatgcaaggaatatctgcaattg

SEQ ID NO: 190325 - DNA, 464 bp, Gossypium hirsutum
gcggccgttctaaacctagggatccccccggcttgaaggattccggaccaaggtgaaagtcagtgcgcgagcatagaggtgttctccctaaagttttatcccaagtgcggcaggtaagcccctctagatttgcttctttactagattgcacaatgctagatgctctgctttcttaagatgcccttaacacccttcttgagggatttcctggatgaatggtgagcttctaagtgaaaagtaaattgagaatttaatatgctagacatttattttccccatctgatgcatggagtttgatatggtgctggcagcagcttaataccatattctagatgccaaatcgataacagaattttctgtatatgttatattggttgaaaatagaagaaattgtatttttctagtatatttatattcatttggtatataaatttttgtgtctgattttaccttcgatgagcata

SEQ ID NO: 190326 - DNA, 391 bp, Gossypium hirsutum
caaaggtctcctgaaagacgaagaccatcttactctaggcgtagatctcagtctcgttctccttatcggcgcgggtcacctacacctgtgcgccgtagatctcgttctccttatcggcgcaggtcacctacacctgtgcactgtagatctcgttcacccatccgacgttatagatcaccatcacctattacacgtcgtagatcaccattgtccattcgacgtcgcagatcaccatctcttgtacggcgtcgtaggtctccctcacctatgctccatggatctcgttcccctgtgcgtcgcagatctccttcacctatacgtcgtaaatccccattgcctgtgcgccgtaggtctccatcacctgttcgacgaagatcaccaccttccatgc

SEQ ID NO: 190327 - DNA, 410 bp, Gossypium hirsutum
ggaaggttgtaggaaagatttcttttattgatcttgctggcagcgaaagaggtgctgataccactgacaatgaccggcaaactaggattgaaggtgctgaaataaataaaagccttttggctcttaaggagtgcattcgtgcgctagacaatgaccagatccatatacctttccgtgggagcaaactcactgaagtacttcgtgactcctttgttggcaattcaaggacagttatgatctcctgtatttctccaaatgcaggatcatgtgaacatactctcaatactctgagatatgctgatagggttaagagtctttccaaaagtggtaatccaaaaaaagagcaggcggtaaattcttttcaaccaagtaataaggatgcttcttcagcatcgtctctgttacctact

SEQ ID NO: 190328 - DNA, 1321 bp, Gossypium hirsutum
acaaactccaaaaccttaaaaatcaagagctatttgacccgatatgtcttccaactcgcagaaggaatccactgctactggtgaaaaatcgaatttgacaacggagggcgaaagctcaaaacctgaaacctccacgggagagtcaaaaccagtacagggtggagcttcacctgataccatgcctggaatggggttcaccccacctaatcccttcgatttctcagccatgagtggccttcttaatgatccaagcatcaaggaactagctgagcagatagctaaagatccttcatttaaccaaatggccgagcagctcactaaaacgtttcaaggggcagcagctgaagagagtatgccgcagtttgatccacagcagtactattcaactatgcaacaggttatgcagaatccccagtttatgaccatggctgagcgccttggtaatgcattaatgcaggatccagctatgtctagcatgcttgacagtttgactaatcctcaacacaaagaccagattgaggaaaggatggcacgtattaaagaagatccatcattgaagcatattctagatgaaatagagactggtggtcctgcagcaatgatgaggtattggaatgataaagatgttctgcagaagttgggtgaagcaatgggtcttgcagtttcaggggatgcagccacttctgctggtaattctgcggcagatgaagaggatgaagcaggaaatgaggatgagtcaattgtacatcattgtgctagtgttggtgatgttgagggtctgaaaactgcactatcctctggtgctgacaaggatgaagaagattcagagggaaggacagcattacattttgcatgtgggtatggcgaggtgaaatgtgcccaaatccttcttgaagctggagcaaaagtggatgctttggacaagaataagaatactgcacttcattatgcagctggttatggaaggaaagactgtgtggcccttctacttgagaacggtgctgctgtcacactccaaaacatggatggcaagactcccatagatgtggccaagctcaacaaccagcatgaggtgcttaagttactggagaaggatgctttcctgtgagttggagtgtcggcagcagccatgtgtattgtgtgggtcctagcatgtgataggccatttcactgtgctattagacaaaaaccaatttgctttcatttcgtatgcgggttatgatcacacagtcacggctcgactagttgtccatgctgtctggttgctacatgtaacatttttttttccctctctaaatattaattttacaattgattttct

SEQ ID NO: 190329 - DNA, 599 bp, Gossypium hirsutum
gagatttcggctttgacaacggacaccaaaggtctgaaatcagaaacatccaccattgacagcaaaacttcgaaaccagaagcttcccaaccagctcaggctggagcctccccttccaatatgggacctgggtttgtcccccccaatccgtttgatttctcagccatgagtggccttcttgaggatccaagcattaagacactagctgagcagatagcaaaagatccttcatataaccaaatggcagagcagctcactatgatgtttcaaggggcatcagccgaagagagtttgcctgagtttgaaccacagcagtactattcgaccatgcaacaggttatgcagaatccccagtttatgaccatggctgaacgccttggtaatgcattaatgcaggatcctgctacgtctagcatgcttgaaagtttgtccaatcctcagcaaaaagaccagattgaggaaagaatggcacgtatcaaagaggatccatcattgaaacatattctagaagaaatagagacaggtggtcccgcagccatgatgaggtactggaatcataaagaagttctccagaagttgggtgaagcaatgggtcttgc

SEQ ID NO: 190330 - DNA, 536 bp, Gossypium hirsutum
  unsure (1)..(536): unsure at all n locations
cggacttttgggatgcactcaaatccttcttgaagctggggcaaaagtggatgctctggacaagaataagaacactgccctccattatgcagctggctatggaaggaaagactgtgtggcccttctactcgagaatggtgctgctgtcactctccaaaacatggacggcaagactcccatcgaagttgccaagctcaacaaccagcacgaggtactaaaattactggagaaggatgcgttcctttgaagcgtgaagtggtggggatgcgaatggtatgtgtatgtttgggtcttagcatgtttgttataggcatctgattttattacccagctattggacaaatttggttgtaatcatggctgaacggcatgatatgctgtctttgctttggcctggttgcctacgttttgcaaattttatttagtgggtttttttaagaaaaagaatcatttcctgaaatagtttctgcatgggaaataatgggagtatttggaccagagaaactttatttaagaattcttttgagtcctgangc

SEQ ID NO: 190331 - DNA, 507 bp, Gossypium hirsutum
agaaaacaaagaaaagaaaagggttttcctccattttctacttatctttttcattttttcttcattttaatttcgaatttagggaaaaatggccaatttcatcgaatttccaatctaatttcccattaatattttttattttaaattctcgtttctaaacttagttttgtttcggtcatttcaaccatggcttccaattcgaagaagcccgctactgctgatgagaaatcggctttggaaacggagagcaaaagttcaaagtctgaaacatcctccactgagaagaaaacttcaacacctgagccttcaactgggggttcacagccagcacaagcaggggccttccctcccaacgctatgcctggtcctgggtttgtcccacccaatccatttgatttctcagccatgagtggccttcttaatgatccaagcatcaaggaactagctgagcagatagccaaagatccttcatttaatcaaatggcagagcagctcactaaaacgttt

SEQ ID NO: 190332 - DNA, 500 bp, Gossypium hirsutum
  unsure (1)..(500): unsure at all n locations
cccacgcgtncgcccacgcgtccgaatttatctttcccagctttcaaagcaacccttctttgctcctttgctctcctaactgggttttaaggattccaccctccaatcaagctatttccctatggcttccaatttgcagaaggaatccacttcttccgatgagaaatcgactttgacaacggagagcaaaagttctaacccagaaacatccaccgccgagaacaaaacttcttccactgggccgtctcaaccagcacaggctggagcttcccctaccactatgcctgggtttgtgccacccaatccttttgatttctcagccatgagtggccttcttaatgatccaagcatcaaggaactagctgagcagatagctaaagatccttcattcacccaaatggcagaacggctcactaagacatttcaaggggcagcaactgaagatagtatgccgcaaattgatccacagcaattcctttcaactatacccccaggttttt

SEQ ID NO: 190333 - DNA, 399 bp, Gossypium hirsutum
ctttatctcagaaaacaaagaaaagaaaagggttttcctccattttctatgtatctttttcatttcgaatttagggaaaaaatggccactttcatcgaatttccaatctaatttcccattaatattttttattttaaattctcgtttctaattttttttttcagtcatttcaaccatggcttccaattcgaagaagcccgctactgctgatgagaaatcggctttgaaaacggagagcaaaagttcaaagcctgaaacatccaccactgagaagaaaacttcaacacctgagccttcaactgggggttcacagccagcacaagcaggggccttccctcccaacgctatgcctggtcctgggtttgccccacccaatccatttgatttctcagccatgag

SEQ ID NO: 190334 - DNA, 848 bp, Gossypium hirsutum
ctctgtcttccaaagaatttaagataaggggtaggaaatgagtgaaaattaagtaagatgatgataatggaatgggatcaacagcaagagaaccaaagccaaaaccagagagaagatagtgtgaatctcaatgtgaacaatggagtaatgtatgtgaaggtgatgacagatgagcagttggagactctccggaagcaaattgctgtttatgcctctatctgtgagcaacttgttgagatgcacaagaatctcactgcccagcaagatcttacaggtgggagactgggaaatctgtattgtgacccattaatgacatcgggcgggcacaaaataagtgcgagacaacggtggacaccaaccgctgtgcaacttcaaatactggaacgtatatttgatgaaggaactggaactccaagcaagcaaaagatcaaagagataacctcagaactaagccagcatggccccatttctgaaaccaatgtgtataactggtttcaaaacagacgagctaggtctaaaaggaaacaagtaatggttgcatcctccagtaataacaacaataatcataataatgcaggtgaatcagaggtagagacagaagttgagtcaccaaagacaaaaccagagaatcttctgcttgtatcagagggtcaaggtcaacatcatgatgtgtgctttcagaacccagagataacttctcaactgcatttcttgggtgtaggagatgaccatatgtctgctaaaagaatggggggaagctaccacatttatgaccaagcatggcagggtgagtgagtgaatgagtgaggcaaagaaactacatagcatgcatgctttgacatagtaaa

SEQ ID NO: 190335 - DNA, 445 bp, Gossypium hirsutum
attttcagaagccaaaggtcaaagacgaaagatgcagaggcttctttctctgaaacaagcttcatcatcagccctctccagttcctgttcttcacttctccattcgcttccgtacaaaaccttctcttccgtcgccagcttaaccccccaaaaccactttataagctctgcattctcgaaccaatggcgatcgaagccttgttttactggggaaactcagggttttctctcatacccaaattttccaaagcgtttttggttttatttctcaaatacccatcagaagttttcaagcaaaagtcttttgggttgcagaagtccggtttttcagacctcagattcccaaaagcagatttggttttggtccgaatcgtggtcttctgaagagccgttggagattattggtccaaaagttttcagcaagtgatatggttttgggccctgt

SEQ ID NO: 190336 - DNA, 937 bp, Gossypium hirsutum
attcatacatgatggctatcaagagccaccattgctgcctcagctttatctttttgttattaccattactcctacagcttcattctgtcaaaggtaatctccagttgaactactatgctcaaagttgccccaatgctgaagagatcatcaaacaacaagtcatcaagctctacaacaaacatggaaacacagctgtttcttgggttcgaaatctcttccatgactgcatggttaagtcatgcgatgcatcgttattgttagagacggtgaatggaattgaatcggaacaaaaatcagataggagttttgggatgagaaatttcaagtacgttaagacaattaaagatgctctggagcaagaatgtccaaggacagtttcctgcgctgatatcgtctctctttctgctagagatggcattgtcttgcttggaggaccacgcattgagatgaaaaccggtcggaaagatagcaagagaagttaccttccagaggtagaaaataccatccccaaccacaatgattcaatggagttggtgctttcacgctttcaatccattggcatcgacacccaaggagtagtagctttactaggagctcactccgtaggtcgagttcattgtgtaaacttagtacacagactctaccccacagttgatccgacattggaacctgactatgccgagtaccttaaagggaggtgtccgacacccgaccctgatccggaggcggtgttgtactcgagaaacgaccgggaaacgccgatgattcttgacaatatgtactacaagaacttgttgaagcacaaggggttgctggtgatcgaccagcaactgacctctgatcccactacttccccttttgtggagaaaatggctgctgataatggatatttccatgacccagttgccagagctgtgctgttgttgtcagaaaataa

SEQ ID NO: 190337 - DNA, 1702 bp, Gossypium hirsutum
  unsure (1)..(1702): unsure at all n locations
gcgcccacgcgtccgctcgtcgttgaagcgaaagcttatctcttttcgtctctgaatctgatcaatcaacacctgaaaaggaaaacttacaaacaacaactactactagtctactacccagcactagaagcagctcgtagccagccatggatgaagagtacgatgtcatagttctaggaactggtctcaaggaatgcatcctcagcggtcttctttctgttgacggactcaaggttctgcatatggataggaatgattactatggaggagagtctacatcactcaacctcattcagctctggaagaagtttagaggaaatgataagcctcctgctcatttgggctctagcagagattataatgtggacatggtccctaagtttatgatggcaaatggcactcttgtgcgtgttcttattcatacggatgttacaaagtatctttacttcaaagctgtggatggtagctatgttttcaataaagggaaggttcataaggtgccagcgactgacatggaggcactcaagtctccacttatgggaatatttgagaagcgtcgtgcacggaagttcttcatatatgttcaagattatgatgaaaaggatcctaaaactcacgagggaatggacttgacaagggtgtcaactagggcactaattgcgaaatatgggcttgatgataacactgtggatttcattggtcatgcattggcacttcacagagatgaccgctacctggatgaacctgcattggatactgtaaaaaggatgaagctttatgcggagtctcttgcccgttttcaaggtggatctccatacatatatccactgtatggattaggcgagctgcctcaggcttttgcacggcttagtgctgtttatggtggaacatatatgttgaataaacccgagtgcaaggtggagtatgacgatgaaggcaaagtttgtggtgtcacatctgaaggtgaaactgccaggtgtaagaaagttgtttgcgacccttcctacttgccaaacaaggttaggaagatcggcaaggttgctagggcaattgctattatgagtcacccaattccaaacaccaatgattctcattctgtgcagattatcctgccacaaaagcagttgggtcgtaaatcggatatgtatgtcttctgttgttcatattctcacaatgttgctccaaagggcaaattcattgcatttgtttcaacagaggccgagacagatcaccctgagagtgaactaaagcctggaattgaccttctaggtcccgttgatgagatattctttgatatctatgacagatatgaaccagtcaacgaaccttctcttgacaattgtttcatatcaacaagttatgatgctacaacacattttgaatcaactgtcagtgatgtacttaacatgtataccatgataactggaaaggttcttgacctcagtgtggatttgagtgctgctagtgctgcggaagaataattaccctgaagcatggtatttgccaatgtttgtgcttgtttaagcttcttaacagtgttgaatgttgctggtgggatttatgtctattacaccatgtttttttttactactcaagacactatatttaatgatttgatgatatttaaacgtttgttggagctctgtgtttttagatgaaatacatgaaaacgtctctgctaagcctattttnnnnnnnnnnn

SEQ ID NO: 190338 - DNA, 943 bp, Gossypium hirsutum
  unsure (1)..(943): unsure at all n locations
ctctcgcttctcattaaaacagggaaagaaaagcagcgtaatgggtgaagaagtgaaggtttttggatactgggcaagcccttacagctacagggcagagcttgctttgaagttgaaaggtgtttcttatgagtacataaatgaggatatctttggcaacaagagcgatttgcttttgaaatacaatccggttcataagaaagtcccggttcttcttcacaacgggaaaccaattgtagagtctcttgttatacttgaatacattgaggaaacttggaagcataatccctatttgccacaagatccttatgacaaagctaccgctcgattctggatcaagttcatcgacgaaaagtgctttcctaccctttggctagctgcatggagcgccgagaatgagcgagaaaaagtgacgaatgaagcttgcgagtatctgaaaacgcttgaaagtgcgcttaatggaaagaaattctttggtggagaaaccattggaatggtagatattgttgctagctctgttgggtatttcattagggtcactcaagaaattatggggcaaaatctgctgtcagctgacaaatttccccaattattccaatggtctgaagatttcgcaaattgcagcattgttaaggaaagtttgcctccaagagacaaactacttccctttgtcaaaggtctcattgccaaatatcagcaagataatgctaaggcctaagccctcccaatgaacgtctttcacaatgattgtcgcatgcattttgccatttttgtatttgctgcttttgtgtgtaatgacctacttgcttttatgtttcgagtgaaaaaataaattaactcattgtactcttaaataaaattggttattaagttatcaatgagtttttccattttnnnnnnnnnnnnnnnnnnnnnnnnnnnnnnnnnnnnnnnnnnnnnnnnn

SEQ ID NO: 190339 - DNA, 452 bp, Gossypium hirsutum
caagtaataaaaagtggggtagcatcaatattgatatgggtgaagaggtgaaggtttttggagcatgggcaagcccttttagccgtaaggtagagctggctttgcggttgaaaggtgttccatatgactacatagaagaagacttgaataacaagagctctttgcttttgcaatacaactcggttcataagaaagtcccagttcttcttcacaacgggaaatcaattgcagagtcgattgttatacttgaatacattgaggaaacttggaaaacctatcccatcttgccacaagatcctaacgacaaagccatggctcgattctggatcaatttcattgatggcaagtgctcgtctgccattaggaaagttgcatttagccctgaggaggagagagagaaggcagtggaagaagcttgtgagtgtttgaaaacactttaaagggcactgaat

SEQ ID NO: 190340 - DNA, 482 bp, Gossypium hirsutum
  unsure (1)..(482): unsure at all n locations
ggacatcttcagggcaaagattgtggatatctcagagcattcactaactattgaggtaacaggagatccagggaagatggttgctgtgcaaagaaatttaagcaagtttgggatcaaagaaattgctagaacaggaaagattgctcttagaagggaaaaaatgggtgcatctgctccattctggcgattttcagcagcttcatatcctgatcttgaagaaacagtacctgataacgctcttgcaggggctagaaagcaatcagtatttagcgaggccgatgtttctggatggggagacgtctatccggtggagtcgcctgatggctttacaatcaatcaagttcttgatgctcattggggtgttctcactgatgaagatacaagtggacatcaatctcatactttatccatgctcgtaaatgactctccgcggagtctaaacctngttacaggttgttttgctcgaagagggctatatcttc

SEQ ID NO: 190341 - DNA, 663 bp, Gossypium hirsutum
cttctgttacgatggcggctactaccttctctccttccttctccactccctcggtcaattcttcctccagagcccacaaaactttaaccaaccctaatctaggctttttggcctcagtttcgagatccttgaggtctctcaaagcaaccaggctgactactgataatgcttgtggctcagctatggcctctcgtatggtctccgttcctgccgtccagacacacatatctctcgattttgagacctttgtcttcaagaaggagaaagtctccctcgctggtcaggacgagtacattgtgagaggaggaagagatttgtttaagttgctgcctgacgctttcaaagggattaagcagattggtgttattggttggggttcgcagggacccgctcaagctcaaaatttaagggattctcttgctgatgcaaaatctgatatcattgtcaaggttggactcaggaagggttctcgttcttttgatgaagctcgtgctgctgggttctctgaagagaatggcactttgggtgatatatgggaaactatttctggaagtgatcttgtgttactgttaatttctgatgctgcacaggcagacaattatgagaagatattctcctacatgaaaccaaatagcatcctggggctttcacatggctttcttc

SEQ ID NO: 190342 - DNA, 951 bp, Gossypium hirsutum
  unsure (1)..(951): unsure at all n locations
cgcaggtaccggtaccccgggcgcgccccgcgctcctgcaaattcccttcttttcccctccacccaagcctaaaaaatcatggcgacagctcaaatcagcaaaaaacgaaagttcgtcgctgatggagttttcttcgcggaactcaacgaggtattgaccagggaactggctgaggatggatactctggagtcgaagtcagagttactcctatgcgtaccgagatcatcatcagagccacccgcacccaaaacgttctcggtgaaaaaggtaggaggattagggagcttacctcagtggttcagaagcgattcaagttcccagaaaacagcgtcgagctttacgctgagaaggtcaacaacagaggcctttgcgctattgcccaggccgagtctcttcgctacaagctactcggaggtcttgccgttcgcagggcctgctatggtgtactgagattcatcatggagagtggtgccaagggatgcgaggttattgttagtggaaagctaagagcacagcgtgccaaatctatgaaattcaaggatggatatatgatctcttctggtcatcctgtcaatgagtatattgactctgctgtcagacatgttcttttgagacagggggtgcttggtatcaaggtcaagatcatgcttgactgggatcctaagggtaagcaaggccctactactcccctacccgatctagtcacaatccaccctcccaaggaggatgaagaaatcaggagagtagagcctgagccaactaatattgaggttccagttatggcttaaatactgttttggttgacatctttttgatttttggaagtatgtgagtttcttagttctatgtagctaaaagtttggcctcaaagaccccagcattttgtgggttcttctttntgtactctaatgtttctcctactatagntattacgtaattggtaattttc

SEQ ID NO: 190343 - DNA, 1174 bp, Gossypium hirsutum
  unsure (1)..(1174): unsure at all n locations
cgaggggaaatgtatacaaagcgatatttttacggttggaggctacgattgggcgatttacttctaccccgacggtaaaaatccggaggatagtgcgatgtatgtttcggttttcattgccttggctagcgaaggtacggatgttcgagcgcttttcgagctcacccttgttgaccagagcgggaaagggaagcataaggttcatagtcactttgacagagcgttggagagtgggccttatacgttgaagtacagaggaagcatgtggggctacaaacgattctttagaagaacaactttagaaagttctgactacattaaggatgattgcctaatcatgaactgcactgttggagtagtcagaactcgccttgagggaccaaaactgtcttctattcctgtaccgccatcagacatgggtcagaatcttagagctttgttagaatccgaagttgggtgtgatataatgtttcaagttggtgatgagacatttaaagcacataagttgatccttgctgcacgttcacctgtttttaaagcacagtttttcgggctcgttggagaccctaacttggataaaatagtagtaaaagattttgagccttctatcttcaaggcaatgctcttgtttatttataccgacaagcttcctgatgtacaagaaattgtagactccacatctatgtgtacatctgccaacatggttcagcatcttttggctgctgctgatctgtacaatttagatagactcaaagtgttgtgtgaggcgaaattgtgtgaagaacttaatgctgatacggtggcaacaacccttgcacttgctgagcagcaccattgtgcacagcttaaggccatatgtttaaaatttgctgcaactccgtcaaacttgggagcggtgatgcaatcagaagggttcaagcacttggaggaatgttgtccatctttgttatcggagatgttgaaggcctttgcatccagcgaggaaagctcgagtctgctttcaagtcggaagaagagtgtcagcagtgtatacgggtatggatcttgcagcagaaggtccggcagcagaaccgatgaatcccaatggcaggcgagttcgaaggcgttgattggcaatcaacgntaagtgtgttggggggtgtttctgggggcataccattgaaatatttggagt

SEQ ID NO: 190344 - DNA, 1153 bp, Gossypium hirsutum
gacagggctacactctatcttaatacacttggtggtgatggtgcagttgttgaaactgatgaaggtgtgaaggagtttctctttggctccctagatgtccctcgggtgaacctcgagagcagtctgaaaaattatgagccgtctgaagaggcttttgacattaattccgtgccaaaggatgtcaagactcagccacttgctgagaagaaagctacaagtaaaaaaccaaccggtcttggtgctcctccccctggccctccatcaactgttgatgcttacgagaagctgctttcatcaattcccgagttcgcaagctttggcaagctcttcaagtcctctgcacctgtggagttgacagaagcagaaacggaatatgcagttaatgttgtcaaacatatttttgatggtcatgttgtgtttcagtacaactgcactaataccattccagagcaattattggagaacgtcactgttattgtggatgcttcagaggctgaggaatttgctgaagtagcttcaaagcctttaagacaacttccatatgattcacccggacagacctttgtggcatttgaaaagccagagggggtctcagctgttggaaagttttcaaatatgctgaggttcattgtaaaagaggttgatccaagtactggcgaggctgaggatgatggagtagaggacgagtaccaactggaggaccttgaacttgttgcagccgattacatgttgaaggtgggtgtctctaatttcaggaatgcatgggaaagcatgggtgcggactgtgagcgtgtagatgaatatggccttggcccaagggaaagcctggctgaagctgttaatgcagtcatcaatcttctaggcatgcaaccttgtgagggcacagaggttgtccctaacaattcaagatcacacacttgtcttctatctggagtatacatcggcaatgtcaaggtgcttgtgcggctgcagtttggacttgacggtccaaaagatgtggcaatgaaactcgctgttagatcagaggatgaagctgctagtgatgcgattcatgagatcgtacctagtggctaagtttgtatccatcggctgttttttgcctccaatctggcttctatatataaattttcttgtgattttatatgatattgga

SEQ ID NO: 190345 - DNA, 709 bp, Gossypium hirsutum
  unsure (1)..(709): unsure at all n locations
gccagttgctgcagcaaaggggtgccaagaacaagatgagcagctggacaatgttgcagtgggtaaggacctggatataggcatgcctagaaatttagatttacaactagagtgtccagttgaggtcccaatcagaacagttggagctaaacagattaacctgcttgatatgagctccagtaaattcagtgaacagattgagaaaaggcagctggacctcaatagtgaaagcccatcaaacaaacaaaagtctgaggctgctaatcaaactggaactacatctaagactactgatcttaagaaggaaattgcagagaatgaggtttcaaacaggctttccaagatccctgatgtcaatgataaaaccatcaatgattctaaagaactaccatctgttgaacttgggttgaagagacttagaggtgttaaagatgctgggactgtagttagggatgagcggaatgttttgagacgatcagactcttcagccttctcaaggtatattctgatcgatgcaataaggtccggtgtcacattgaagctgctgactgatgaattagaatgacagaaagtagatgcatacgaactatggtttgactncatcaaggtaattgtgcatacatgatgctcacatacatgttgcaaaccatgataataagtgttatcctgaactgcctatattcgcatgaagaactaggnctcagttgan

SEQ ID NO: 190346 - DNA, 978 bp, Gossypium hirsutum
cctggatataggcatgcctagaaatttagatttacaactagagtgtccagttgaggtcccaatgagaacagttggagctaaacagattaacctgcttgatatgagctccagtaaattcagtgaacagattgggaaaaggcagctggacctcaatagtgaaagcccatcaaacaaacaaaactctgaggctgctaatcaaactggaattacatctaagactactgatcttaagaaggaaattgcagagaatgaggtttcaaacaggctttccaagatccctgatggcaatgataaaaccatcaatgattctaaagaaccaccatctgttgaacttgggttgaagagacttagaggtgttaaagatgctgggactgtagttggggatgagcggaatgttttgagacgatcagactcttcagccttctcaaggtataatactgcatcaaatgcaaataaggttcccgttgtcaacattggaagctcgtctgcacttgatagtaatttagaattgacaagaaaaggatcagtatgcaataacgaatctcatttggttaatgaacttcccaatcaaagctcaaatgtcggtagcaataacattgatatgggctccacaactaacaatgcttttgccaaagcagcagttgataagaataagtcagctgcatcatccactgtcagatctttgcacccatcatctattttccagccaatgaaaaatgaccttttaagtgctactcagaaagttgtatttgacaaggctgatgatgtaactactacagcagaactggctcaagctagaggcattcaccacgaactgcaaatgctacatccctcaaaccattatgatcaacatcaccatcttactcatggtatgcaaaagcagcagcagcggcagccaccagaacatgatgatttatctttgaaaaaattggctgcagatgctcctctttgtggatcatcaaatgtgttgggtgggct

SEQ ID NO: 190347 - DNA, 420 bp, Gossypium hirsutum
aggagatcgagatcaatagcaggaaagtgggggcgagtgcgagagggaataggaattatgcggtgatttttgatgcggggagttccgggagtcgagttcatgtttattgttttgatcagaatttggatcttgttccaattggctctgaattagagctttttgaacagcttaaaccgggtttgagctcctatgcaaaagatccacaggctgcagcgaagtctttactttctcttctagacaaggcagaaagtgttgtgccactagatttgcgatcaaaaactcctgttagagttggggcaactgcaggtcttgagggcactagaaggagatgcagctgacagaattttgcaagcggttagagaacttctgaaagatagaagtaccctcaaatctgaggcaaacggtgttaagattctggat

SEQ ID NO: 190348 - DNA, 1215 bp, Gossypium hirsutum
ttccacgcgtcctcttacattacctacaaaatctttgctttccctttttttttttttttgccaatggcttcttcaccaaaattcatctcttacttcttccttttagccctcttctccgttgaaatacatggtagggatttttttagcaaaatcccaagtgttaacacaaatgagaaagaggtgaccaacaaagaagaacaaaccactttggggaagaaggagcaagagccaaggtttgtccccgagacccaaaatggctatgggctttacggtcacgagtctggtcagctccctcctagcaccgccagtaccaaagaaacctatgaaccctatgtcacacctgttaaataccaccctgatgaaccctacaatagcatcccagcgtccaaaaccaacaacaaagactcttacttttatagcaagacaaatgcgtacgggaacactgagcagcaaagtgaagccaggttcaatgagaaaggatggaccaccaaggaaaccaacaactacaatggcaactattacaatggtaacaatgaggccttgttcactgagaaagggtggagtactaaggaaaaccagaatagcaacaactattacaatggtaacaatgaggccatgttcactgagaaaggatggagtactaaggaaaaccagaacaacaacaactattacaatggtaacaatgagtacaacaatgttgagaagcaaggtatgagtgatactaggtacttggagaatgggaagtactactatcgtgtgggttctgagaacaactactacccgaaccggttcgagaactcgaggggagtcggttcgaggaacgagttcaacgagaaccgttacaataacatgggaaagtacaatcagaatcaagaggagttcgaagaagagttcgagccatgaaaccatacgtatatgctaattaattagcaaaatgagagtaaagaattaaaggctttatttattgggttttgtgttttactttgtgatccttttttattttatttgcagggtttgatagtatcctttgcttttgatattgaaatgctaaaagatatgataatggagccttatgctttttacttttcttaaacaatgttatgcaataaaaatgtaattatatgttccaatattatatatatcttcttcctattttaaaaaaaaaaaaaacaaaaacaataaaaaaaaaaaaaaaaaactcgagactagttctct

SEQ ID NO: 190349 - DNA, 410 bp, Gossypium hirsutum
ggaacataaagttgcccttttttttctttttggtgtgaaacaagttccaatggcggagtaattgaagacattaaccaacagatagtcagataaaaacctccaataaaccaactagctagctgtgttctttcttctgctctcttctcatggtggagtccctccaaaggtatgctgttgtcaccggggcgaacaaggggattggactggccatatgtaagttgttggcctctaaaggggtcatggtggtcttaactgctagagacgagaaaaggggtctcgtcgctcttgaaaagctgaaaggaatccggtatctctggtcatctagtttttcaccggctcgatgtcgccgaccctgctaccatcacttgtctagcagactttgtcaaaaacaaatttgggaagcttgatat

SEQ ID NO: 190350 - DNA, 623 bp, Gossypium hirsutum
ttcttttgcaacaaaatgggcgcatatgttttctaactttgggatataatgaaatctaagttcttgaaaatgattatttatgctttgaatatatcgggtgattgctctgataatcgatctgtcgcattctgtgttttggcactttgttgttaccattcttgagtcacccaatatatctagaacattaaaacccatagaaattcctcttgtggcttgatatcctacatgtgcctccgccgtaaacggagaggggacaccggagtgaagaacttacttggatgccaagacttggccccccatatctcttactatcagcctcgacgtagatctagaagactgttggttaaacgccgcatcaaaataaatagccacagttgctctctggtcatcttggttaggtcccttgtctgcttccaagattatccaaagtctgcaacaaaagagacaacactgcttgacggtcccttgactaaacacccagtctctacttgatcgggagggagcattgaagtatgtcggttttctaatggaaagtgctaactttttctttttgttaaaaggtctgaatgactcaatctgtcaccctctgctctttaggacttctttgttttgcattcaactta

SEQ ID NO: 190351 - DNA, 529 bp, Gossypium hirsutum
ggaaaccggagtgaagaacttacttggatgccaagactttgccccccatatctgttactatcagcctcgacgtagatctagaagactgttggttaaacgccgcatcaaaataaatagccacagttgctctctggtcatcttgtttaggtcccttgtttgcttccaagattatccaaagtctgcaacaaaagagacaacactgcttgacggtcccttgactaaacacccagaattggtagtgggggtattaaaaagataaataccagagccagaaggaagtcccattgaagcaagaagaagtaaattactaatcatagttaacatgcaagaacattgacagggcattttgcatacctctgggagctttacctcgtctaccaccgtatcttcctgctcctacgttgaagcttttagctaaagtttcagtactcaaagaggaggttgttcggctcgaagagcaggtcatacactttatgcaggacttgtatcgagaagttgtctggtaatcattgttgaaatggaaaatgga

SEQ ID NO: 190352 - DNA, 1015 bp, Gossypium hirsutum
aaaagaaaccatccaagccccaacaaacaaaacagctcctcgttatctccaatttcaaaatcaaaatcaaaatcaaaatcaaaatccaaagatctaaatctaaatccgtctcctctcctttctctttctttaaccttacaattaaggaaagaagatgaagagagtcttcggcgttaagaaagacaaggaacccccgccttctatccaagatgctaccgatcggatcagtaaaagaggggatacggttgatgagaagttgaagaagctagatgctgagttgagtaggtataaagagcagataaaaaagacaaggcctggccctgctcaagaggctcttaaatctcgagctatgagggttctcaagcaaaaacgaatgtatgaagggcaacgtgatatgctttataaccagacgttcaaccttgatcaagttgcttttgcttctgagggtcttaaagatgctcagcaaactatgacagccttgacatctgccaacaaggagctgaaaggaatgatgaacactgtgaagattccagatatacataatttgccagatgagatgatggacatgatggatatgagtaatgaaattcaagagaccttaggcagaagctataatgtgcctgatgatattgatgaggatgaactcatgggcgaacttgatgctctggaagcagacatgggaactgaagctgatggtgttccctcttatcttcaacctgataaggaggaaccagatttggatgcagagctcaatttgcctacagctccatcaggaaatgcaacagcagcagctggcagggccaatgcccaggttgaggatgaacttggtttccctgctgttcctcgagcatctgtccgcagttaaaacatttgctaatatatatactgtaagatgaagttggatgaagcacgtccttgtaaacatattgtgcagaattaactttcaattactagtgcaatttaattgatttttaatttttcgggttgggagctatataatattataactgatttg

SEQ ID NO: 190353 - DNA, 413 bp, Gossypium hirsutum
gtttgagggacacccattcattgtggaagctggtgttagtgtgggtggaaaagatgttaaacagggtttgaatattttccgatttgcaaatcgaattccgcttctttttgagcaaggtggtgatgttgtcacgaggactgcgctaaagagaatcagttggaataattacaagatcaaccaaacacaagataaaatcggtgtctttgtgagtattgtaagcacgaaaattccatttaaagggactggaaaggagtacatcggggatgatatcagcgaaatagctagtgctgtcaaatctgcaattcagcaatgctgcatccaactgaagtcgaaaatagtaaagaaaatgcaggcgcgagaacagcaagagagaaaacgaaatttgagcaagtatatccccgatgccacaaatg

SEQ ID NO: 190354 - DNA, 436 bp, Gossypium hirsutum
aatcacctttacaagttgggttgggagctcaagatcacctccaagcaaaaacgtcttctatatcacatttaaatggggcaactgtggatgactttctgcctcctggctttgaaggatctcgttctacagatcaaatgcagattaacttgacagatatccttgtcgtcaaatggagatgtcctctcagatttgtattggacttgaattggcaagtggttgccggagaggaaagtaaagaggcagatgttcaaaaccaaagagaactgagagtgcttgaagctgtttatccacgcccatctgcaattcctacaaatccttctgtctcagctgacatggcaaactgtcagtatgatgataagcaaactcctcaaatacccatcactcccattgaagacgatgatgccgcaattggaacacaatccaatgccttagcacc

SEQ ID NO: 190355 - DNA, 730 bp, Gossypium hirsutum
  unsure (1)..(730): unsure at all n locations
tacccattcaaggtaacacccgttaagtcttagacgaaaataacctgcctctcttcttcccaaaattcactccagatttcttcttccccaaatcaagcatccatttgcccttcatcttcatctcccgtgaaatctatcagtaccagcaaagtactgaactcctcatcagaaactgcctttggaaaggctcgttcgtgaatttgcccaagcctttttaaggtggacagacaagatcaatggtgttattgcttcctcttcttctttggcttgttcgatttgtttcctccacccacagttgagcgtcttgtattcactaaatcactataattatgtcaggtgttttagaatcaaatgtttcttcccaaacttctcaaggaaccaaaaggaaatagggttccagaagaagatgcagcgttggtttcctgtatggtggacttgcacaatgttggaacctttaatgatgatatgaggttcaaagccggttatttaaacgagttggaaaaaatgttagaaaaggctttaccccattgcaatgttgaaggctagacctaatattgaatcgaggattatggttcctgaaaagggattgatcaatcgtgtatgacatgcttaatggtcaaaacaatagcggttttggttgatacataggcaactgtgtctgaaaatgcgtggactctatttatgccttagaaaccgcattaaaaatgagtcctatcagcactctgcttan

SEQ ID NO: 190356 - DNA, 972 bp, Gossypium hirsutum
  unsure (1)..(972): unsure at all n locations
cctttttgtccgaaggaaaactcagttttgcttcggtgttgtttctcccaatttcttttgccctgttttaccctcccaacccgaaagccaccttcaccctctcccttccaacatcaaacagaatcgccccttacattttccttcttctgtcccgttaatttttctgcttgtttattgtttaagctccaggaaaatcgaagaggcctcatcgttttcgagcaggaactagggctctgacaaggtttttgatctcaaaattctgacaaggttgcctataaagccaatcccaagtggaaatctgcctcctaattttgatcctgttgaaggatgcaagcttaattctctgcctctgaaagtgtgttattgcttcctattgaagcggcttgtttgattgcttcctccacccacagttgagcgtcttcttttcactcaatcactataattatgtcaagtgtttcagaatcaaatgtttcttcccaagcttttcaaggaaccaaaaggaaatgggttccagaagaagatgtagcatcggtttcctatatggtggacttgcacaatgttggaacctttaatgctgatacggggttcaaagccggttatttaaacgagttggaaaaaatgttagaaaaggctttacctaatacaatgttgaaggctagacctaatattgaatcgagaattatgttactaaaaagggattggtcaatcgtgtatgacatgcttaatggccaaaacaatagcggttttggttgggatgagcataggcagctcgttgttgctaaagatgcggtttggaactcttatttaaatagttataaaaaagccggtcaattcagacatcgtagtttcccttactacgaccaacttactgccatctacgcaagagatcaagcgactgggaaagatgctcaaacagccactgatgttattgaagaaataaatgttangatgtacatactgcagatattaatg

SEQ ID NO: 190357 - DNA, 378 bp, Gossypium hirsutum
tgatagaatagctcagttggagctttcgttgcgctgctcccaattgcttctgccctgttttaccctcccaacccgaaagccacctccaccctctccctcccaacatcaaacagaaccgccccttacattatcctacttctgtcccgtcaattgttctgcttgcttattgtttaagctctaggaaaatcgaagaggccttatagttttcgagcaggaactagggatctgacaaggtttttgatctcaaaattttgacaaggttgcctgtctcaagatttccttgatctccatcctttctggataaagccaatcccaagtgaaaatctgcctcctggttttgatcctggtgaaggctgcaagcttaattctttgcctctg

SEQ ID NO: 190358 - DNA, 798 bp, Gossypium hirsutum
  unsure (1)..(798): unsure at all n locations
taagaaggagaaggtcttgggaaagataaacaagggatcaaaggtcacgttagagttaaaaacaagcaggatactaccggtattggattagataagccaaatccgtgggcttttgatacagctcagtttgatagtattctcaaaggattgaaagtgaagcaagcagtgcaaaccaacgatgaagctgaaaagaatgaaaatcaagtggaaacaaagagggatgagcctaatgacactgaagaacaagttgttaaggctacccggccgcagggaagatataagaaaagagaaagagggaagcttgtacatgcatattcttcgaaggatcttgaaggaattcttgccaaaaaggttgaggagtcacacaggtaaatcctgacgtggttgctgaaatggaggtcatagagacaactgaaccaaatgatttttccactgagggaattaaagtggaaagtgtttctccagaatggtggggctttaaattggatttgtttctgagagttttctgggagaaactacccgacggaaatcaatanaaactggagaggctaaaaattctactgagagaactgtattttatgaagatgaccaagagaatctctaccaacttgtgcagataagccacaactggaaagcaggtctggcattaagaccgacccaagaagtnactgagtcacttcacgggaaaagactcttcccccgattaggggggtggatctcatgagtgctcagcaaancatgctgaatgctttaacgagaagtgtgacccaactaggtgaaaaatgtacggtttttcgt

SEQ ID NO: 190359 - DNA, 544 bp, Gossypium hirsutum
accgaaagtcaggatgttcctactggaggagacacatctgaaagcgttcctccagaatggtggggccataagtatggatttatttctggaggttttctaggagaatctaccaggaaaaaatctaacaaaactggagaggctaaaatttcgaccgggagaactgtttgtttcgaagatgaccaagagaatctctacaaacttgtgcaagataatgccacaactggaaagcaaggtctgggcattaaagaccgaccaaagaaagtagctggagttcgctttcaggggaaaaagacatcattcagcgacagtggtggtgaggattcggatgatgttggtcctccagctaaacggatgcgtgacaatgcctttgaaaccgagaaagccggtgagcccaaactaaggttgaaaaagctgtgtaaacggcttctttgtcaggtacctggagattcattaaagctgaaacagctgaaaattcttattgatgaacagtcaacttcggttttttccagcttttctacaaagaaagatgctattgcctacttaa

SEQ ID NO: 190360 - DNA, 1673 bp, Gossypium hirsutum
tgttttttggggtttcctttatgtgatctcttattggataaatgaggaagagaagtagttccaaggatgatgcagctcagtattaagagggttcctactgttgtttcgaattaccaaaaggatgaggcggaagagactgctcgccggagcggtggatgtgggaaagaattgccttagaagctgttgcattccaggagcaaagcttcctttatatgctttcaagaaggagagtgaaaaagatgcatttgaaactgataacaaagagcctccggttgcttttcttgattctctcgttcttggggagtgggaggatcgcatgcaaagagggctctttcgatatgatgttactgcctgtgaaaccaaggtgattcctggtgaatatggctttattgcccagctgaacgagggccgccaccttaagaagaggccaactgagttccgtgtagataaggttctccagcccttcgatgggaacaaattcaacttcaccaaagtcggacaagaagaggtgctcttccagtttgaagcaagtgaagatggcgaagttcagttcttcccaaatgctcccattgatgttgagaatcacccaagtgttgttgccataaacgttagtcctattgaatacggacatgtgctgttgatccctcgaattcttgaatgcttgcctcagaggatcgaccgtgagagctttttgcttgcgctctatatggcagctgaagctgggaatccgtactttagattgggttacaacagcttgggtgcatttgctacaatcaatcacctgcacttccaggcttactacttggctgtggcctttcccattgagaaagctcctaccaagaagataaccactctgaatgatggagtcatcatctcagagcttttaaagtatccggtcagaggtgttgtctttgagggtggtaacactcttcaagacttgtctgacacagtgtctgatgcgtgcatttgccttcaagagaacaacataccatataatgtcctcatctccgattgtggaaagcggatctttctccttccacagtgttatgctgagaaacaagctctcggggaagtgagtccagagcttctggacacccaggtgaacccagctgtgtgggaaattagtgggcatatggtgttaaaaaggaggaaggactatgatgaggcgtctgatgaaaatgcttggaggctcctggctgaggtttctctctctgatgagaggttccgggaagtgaatgcactcatctttgaagtcattgccagtggcgaagatggcattgaacatgatgctaagagtctgcctaaggagcccgatcctaaagctgaatccactgaagaagaaagcaccatcaccaaaacctcccaccgcgctatggtgggtgggacacaagaatgcgttgttctgcagtaggaactggcattccacaaacagaaccatgtttcatccatgttatagtttctactaagcccgtttggcatgtatgattgtgtatggcagtggtagcctaaataaagcaaacatagtttgcggtggtgtaagtttatcattaaccttggacttgttgatttgatgatgtattatgattggatgatgtaaaataccaaataatgtttgtgtattttgagctgtcaagtaaaaaaaaaaaaaaaagggcggccgccggacgagagaa

SEQ ID NO: 190361 - DNA, 622 bp, Gossypium hirsutum
gggcggcccaagccgtccggcttttatttttaaaaaaaaaagaaaaaaatttactttctactacgctccttttgttcgctcgggagaataatttggtggtggtggtggtgtttttcgtagtcgacgttgttgttctttgtgggttttcattttatttgaatttttattggacaaagaaagaagttgtagcaagatgatgctcaggattaagagggttccgactgttgtttcgaattaccagaaggatgagacggaagagactgctcgccgcagcagtgggtgtggaaagaattgccttagaagctgctgcatcccaggagcgaagcttcctttatatgctttcaggaaactgaacaatattgagagtgaaaaagttgtgcttggaattgagaataaagatccccctgttgcttttcttgactcgctcattcttggggagtgggaagatcggatgcaaagagggctctttcgctatgatgttactgcctgtgaaaccaaggtgattcctggtgaatatggcttcattgcccagctgaatgagggtcgccaccttaagaagaggccaactgagttccgcgttgataaggttctccagcccttcgatgggaacaagttcaacttc

SEQ ID NO: 190362 - DNA, 1908 bp, Gossypium hirsutum
  unsure (1)..(1908): unsure at all n locations
ttttggggtcctttttcttattttcccgtactttctctagggtttcattcttttaatgtttgagttacctcctttaggatttgggatctgggtagttctcagctttagtagtttacatttgctgattctcagaagttgtgttttttttttggggggtatagagaaatagatcatggcaaaagtagatgaaccacagccacatccaccaaaggagcagctgcccaacatttcttactgcattacaagtccacctccatggcccgaggccatccttcttggtttccaacattatcttgtgatgcttggaacgacagtgatcattccaacttcacttgttccccagatgggaggtggaaatgaggagaaagcaaaggttatccagactctactctttgttgctggtttgaacacattattgcagtcactgtttgggtctagattgcctgctgtgatcggagggtcttatacctttgtcccaacaacaatctcaattattcttgctggtcggttcagtgacagttcagatcctattgagagatttaaaaggataatgcgggcaactcaaggtgccctcattgtagcttccactcttcagattgtccttggcttcagtggcctttggcgtaatgttgcgaggtttttaagtccactttcagtcgttcctttggtatctctagttggttttgggctttacgaatttggctttcctggggttgccaaatgtgtggagattggactgcctcagctaattcttatagtatttgtctcacagtacgtgcctcatgtgataaagtctggaagaaatgtctttgatcgatttgctgtcttgttttcagtggtgattgtttggatttatgctcatttactcactgtgggtggagcttataatggtacagcaccaaaaacacaaacaagctgtagaactgatcgttctggtctaatagatgctgctccatggataagagttccttatccctttcaatggggagcgccatcatttgatgctggtgaagcctttgctatgatgatggcttcttttgttgcccttgtagagtccactggggcttttatttctgtgtcaagatatgcaagtgcgactccaatgccaccatctattcttagccgtggtattggttggcagggagttgcaattttggtgtcgggattgtttggaactgccaatggttcctcagtttctgtagagaatgctggccttttagccttaacacgagttggcagccgaagggttgtccaaatctcagcagggtttatgattttcttctctattcttgggaaatttggagcagtctttgcttcaattccagcacctattattgctgcattgtactgcctattctttgcatatgttggtgctgggggtcttagttttcttcagttttgcaacctcaacagcttccgtacaaaatttatattaggcttctctgtttttatgggcttatctgtgccacagtacttcaatgagtataccgcaattaatggctatggtcctgttcacacaagcgcaagatggttcaatgacattgtaaatgtgccattctcatcggaagcgttcgtagcgggatgcttggcatatttcctcgataacacattgcaccgcaaggacagtgggattaggaaggacaggggtaagcactggtgggacaagtgtccgatccttcaagggtgattcgaggagtgaagaattttattccctccccttcaacctaaacaaatatttcccatctgtgtgagatataatggaggtattgtcattttaagttgtaaaatctcaattgccctttgtggacgacatcattactatttaattccatgttaattgtattacacgctatagcagttggtgtttccctttataagaacacttcacatgactaattcccatggnna

SEQ ID NO: 190363 - DNA, 834 bp, Gossypium hirsutum
  unsure (1)..(834): unsure at all n locations
gcactcccttgctctcccccacatttcatttcatcttttttctcttatcttttaagcttaagtcttttgtgcagatttccttatctttagttcaactttgtcccttttatatcagtgtctacacatagaaatagatcatggcaaaagtagatgaaccacagccacatccaccaaaggagcagctgcccaacatttcttactgcattacaagtccacctccatggcccgaggccatccttcttggtttccaacattatcttgtgatgcttggaacgacagtgatcattccaacttcacttgttccccagatgggaggtggaaatgaggagaaagcaaaggttatccagactctactctttgttgctggtttgaacacattattgcagtcactggttgggtctagattgcctgctgtgatcggagggtcttatacctttgtcccaacaacaatctcaattattgtggctggtcggttcagtgacagctcagatcctattgagagatttaaaaggataatgcgggcgactcaaggtgccctcattgtagcttccactcttcagattgaccttggcttcagtggcctttggcgtaatggtgcgaggtttttaagtccactttcagtcgttcctttggtatctctagctggttacgggctgtacgagtttgggtctcctggggttgccaaatgtgtggagattgggactcaaagagggctctttcgctatgatgttactgcctgtgaaaccaaggtgattcctggtgaatatggcttcnttgcccagctgaatgagggtcgtcaccttaagaagaggccaactgagttccgtgttgata

SEQ ID NO: 190364 - DNA, 760 bp, Gossypium hirsutum
  unsure (1)..(760): unsure at all n locations
cccgaattgaccgcacgcgtccagcccacgcgtccggacacagtgtctgaggcgtgcatttgccttcaagataacaacatancgtacaatgggctcatctctgattgtggaaagcgcatcttcctcctccctcagtgttatgctgagaaacaagctcttggggaagtgagtgtagagcttttggacacccaagtgaacccggctgtgtgggaaattagtggtcatatggtgttgaaaaggaggaaggactatgatgaggcgtccgacgaaaatgcttggaggttacttgcagaggtatctctctctgacgagaggtttgatgaagtgaatgcacttatctttgaagccattggcggtggcaaagatgcaattgaaaatgttgaggagcctgataccaaagctcaatctattgaaaaagagaatggcatcaccgaaacttcccaccatgctatggtggctgggacacaacaatgccttgttctgcagtagcatttcattaatagaaccctgtaccttgcaggtactgtttacacaatatcagtttagttggaatttctatggattatggctggcactggtagcctaaataagcaaactcagtttgcactgttgctatcgactttgttgaaactgctatatgcttattggcttcatgatgtactacttgtttggatcatgaaaaatacaatttaatgttcgctattattatcattaaaaaaaaaattcctgatcccgatgctaaaaaacctgaagattggga

SEQ ID NO: 190365 - DNA, 390 bp, Gossypium hirsutum
  unsure (1)..(390): unsure at all n locations
gtcgatcaactcatcgataaagggagagaaaaaggggaaaatccgatttttgttttaattggggttttgctatggctgcaaatattaatacggctaatttcaatacctcttccgcttcagtgacaactgttaatcactctcccagtagccctaaacaatcacatcgcgctacgagggcgggttcttcgactaggactggaatcggtcgtcgagaacccgacccgatcgccggtgttccgttatcgccttcgtcttcttcgtcgtcgccaccgccattaatagctgcgactgagcagccacctgttgtggcggtggttgaggaggaaggcggngagaatgcgggttctgggtctaatggaaatgcgggtaagaggcccgcttggaacaaac

SEQ ID NO: 190366 - DNA, 423 bp, Gossypium hirsutum
gatttttgaaggtcatattctcatagttatgtgtcaggcatgattaccagacatggttacttaaagaaaaatgacaagtcggcagtaacatagaatcatacagctcaaggaacagtgcatcgtaaattttttggtttgtcttttccttttggtcccactaacctttcaattctttactttctggttatttccaggtttatttacatactgctcccttgtgccacattggtggtttgtcctcagccatggccatgctaatggtaggagcttgccatgccttcataccgaagtttgaagctacactagcccttgaagccatagaacaacaccatgtgacttctcttattactgtcccagcaatgatggctgatctaatctcatcagtcaggctgaagcgaattcagaagggatgtgacagtgtga

SEQ ID NO: 190367 - DNA, 1019 bp, Gossypium hirsutum
  unsure (1)..(1019): unsure at all n locations
aggattggagcgtgcacacatgggtatctttactgagttgggagtcctgtatgccaaatatcgtgcagagaaacttatggagcacattaaattgttctctacgcgtctcaacattcccaaactgataagagcttgtgatgagcagcagcattggaaggaacttacctatttgtatatccaatatgacgagtttgataatgctgcaactactgtcatgaaccactctcctgaagcatgggatcatatgcagttcaaagatattattgtcaaagttgctagtgttgagctctattacaaggctgtccacttctacttgcaagaacatccagatctcatcaatgatatgctgaacgtgcttgcacttcgtgtggatcacactcgtgttgttgacattatgagaaaggctggccatctacgtcttgtgaagccatacatggttgctgttcagagcaacaatgtatccggcagtaaacgaggcattgaatgagatttatgtggaggaagaagattatgatagattaagagaatctattgacttgcatgataactttgatcagattggccttgcacaaaagattgagaaacatgagctgcttgagatgaggcgtgttgctgcatacatttacaaaaaggcgggcagatggaagcagtccattgccttgtcaaagaaagacaaccattacaaagatgcaatggaaacagcttcacagtctggtgaacgtgaacttgccgaggagttgcttgtttactttattgaacagggcaagaaggaatgctttgcatcatgcctctttgtctgttatgacttaattcgagcagatgttgctcttgaactagcctggattcacaatatgatcgacttcgcatttccatatctgtggcagtttatccgcgaatatactgcaaagttgatgaactatcaagatagatgaagctcaaaagaagtaagctaagagcagaanagaagagtcatgcacacagacattttgtagtactactctgcttgcttgacgcatgca

SEQ ID NO: 190368 - DNA, 503 bp, Gossypium hirsutum
agaaggctggcagatggaagcagtccattgcattgtgaaagaaagacaaccattacaaagatgcaatggaaacagcgtcacagtctggtgaacgtgaacttgccgaggagttacttgtttactttattgaacagggcaagaaggaatgctttgcatcatgcctctttgtttgttatgacttacttcgagcagatgttgttctcgagctagcctggattcacaatatgatcgacttcgcattcccatatctgttgcagtttatccgcgaatataccggcaaagtcgatgaacttatcaaggataaaatcgaggctcaaaaggaagtaaaagccaaagagcaagaagagaaggaagtgattgcacaacagaacatgtatgctcagttgctacctcttgccttgccagcacctccgatgccaggaatgggaggaggttttgctcctccaccacctatggggggaggaatgggaatgcctccgatgccaccatacggtatgccacaa

SEQ ID NO: 190369 - DNA, 414 bp, Gossypium hirsutum
ttggggatttactctggttctacttgcaaacaaggagagatcgaagctgtggttattgccaccggtgtccatactttcttcgggaaggcggctcaccttgttgataccactaaccaagttggtcatttccagaaggtcttgacagcaatagggaacttctgcatatgttctattgcagttgggatggtaatagagataattgtgatgtatccaattcaagaccgggattaccgtcctggaattgacaatcttcttgtccttctcattggtgggatcccgattgccatgcctacagttttgtcagttacaatggctatcggttctcataggctatcccagcagggggcaatcacaaagagaatgactgcaattgaggaaatggcggtcatggatgttctttgtagtgataagact

SEQ ID NO: 190370 - DNA, 877 bp, Gossypium hirsutum
  unsure (1)..(877): unsure at all n locations
agaaaaacccagacatggcaaccaatggaaccagtgatctcaaaaggaagcaaggaatagtatcatctctttgcaagcacttctctttggatcctaaggctttttcaagtcaagtccctggaaatgatattaaggccctgtacataaacattttgaagtcatcagggaaggagtcaccgcaaaataatgatgaggtgatgaagtggatagcttttgcagacagctttcccagtgattctaaggcatgccatggtggtttgaatgaattaaacaccgacttggctaaaaaatctgtacttttgggcaatggatttacaccctcagaagctgatgttattgttttttcagtcatacatagttcaatgattgccctttcaactccagagaaggagaaattgccacatgtgatgcgatggatggattatatccagaatagtgaggatcttggtgcactttttgagaagatattgctggagaagcctgtttttgagcctcagatagcaaaagctgcagctaagcccgaaataaactcaatggctaaagggactgttcaaaacacaaaaattacagacaagccagacacagaaaaaaatgcaaagaaaagtgatctccgcgatgccaagaaaaagctaaggagataaggaactgtccagagagaaagccctgaaaagagcatctgataagacaaagacttatgcattactgatttcccgtgtctatcgaaagatgaacacctctctgaagtactggtagntcaatttgaagctaatcaaggtgtaggtggcaattgtcaaaatgaaattgtggcgtgcaagtaactgagctcattattaaaaaggtcttattatgtttaaatatataatacatagatataaan

SEQ ID NO: 190371 - DNA, 506 bp, Gossypium hirsutum
cccacgcgttcgtggacgcgtgggcggacgcttgggcaaaaattgtatacaagccaggtgctgaaaaaaatgcaacgaatagtgattccgcggatgccaagaaataggctaagggagataacgaagctgttccagagaagaaagcacctgaaaaagaagcatctgataaagacaaagaactcagtgtctgtttactgaatatacaggttggtcttatacgtaaagcatggaaacatccatctgctgatagcttactggtagaggagatagatgtcggagaggcctaagtacgaccggttgttagtggattggccatgtattgcagtccagaagacttgacgaatcgtcgtgttgtgctgattacaaatgtaaaacctggaaagctacgagatgtgatgtcagagggactggtgctttgtgcttctaatgaagatcataccaaggtagagccattactgccccctgaaggtgctaaacctggcgagcccatttcattttcagggatt

SEQ ID NO: 190372 - DNA, 463 bp, Gossypium hirsutum
cccacgcgtccgagaagaagaagagagatgaaaatggtttctattgagttatcaccggagttgattcccggtttacctgaggaaattggactcgattgtttgattcggtttcattattctacttacagagtcgcagctcgagtctgccgacgatggcaacagcatctccaaagcagggagttgcactatctcagaaagcaagccggatatacccgtaaagcggcttgcttagttcaattactcaataacacctccgattctgctgggtcaaagccggttggtccgcccacatacggccttacagtttttgatcctgtgagtggaatctgggatagaattgacccggttcccaagtacccttatggtcttcctttggtttgccagatagcaagctctgaaggaaagctagtggtgatgggtggatgggacccctcaagttatgacccagtgcgggatgtcttca

SEQ ID NO: 190373 - DNA, 442 bp, Gossypium hirsutum
ccaaaattcagagaaatgggacctctcaactcccaaatcaccatttcaaacccttctttcatcaatctggttctcatggccattccatctctagtcaccgttgaacatatctagaaacacaacccaccagctttgagacaggcgaaggcttctgcatcaaaggccgagccaaccatcacgtgcagacgagacttggagaccaaaacttcccctttcacatttcgtaccacaatccccgaagcctacttaaaaccctggcagtcaaacggggcatcaaaattgattttaaggagctgccctaaggtgttttccaattctcattctcaccaacaaaggtttttattcctgtttaaccaaaacgatcacaagccacaaccagaaaaaggtctttggcgctttgtgtatcttccaaatacccaagcacttcgtaccgagaacacac

SEQ ID NO: 190374 - DNA, 405 bp, Gossypium hirsutum
  unsure (1)..(405): unsure at all n locations
cgcagattttacttttatataaacatttatgcatgagcgtgtgttataacttaatcagttgctcattctgatatatgtatctttttcctttgtaagttatcattttatagcgtttgttgtctttggtatgcctatgcaccactatggtacataagccttaaagaatcaacatgagctggagctagaatggttagaaccttgcttggtttcagttcatccttttcggtccatgatttcccctgaattttcttttgctcaaattatgacatgttaaaaagtcaacaattgtgtatctatctacttggaaaaatatcatttggtctagaacatccatattcttaagctcagttcccttacatggtcacatcacaaaaaatttgntgtggtcataacagagtacgagtt

SEQ ID NO: 190375 - DNA, 1130 bp, Gossypium hirsutum
cccacgcgtccgttctactccatcttcactccccctcctcacccaaaccctacaaaatggccgccgccgcgcgccctcttgtctccgtccaaaccatagagtccgacatggctactgatgccactccaaccgttcctctcgctgatgtgatgaaagcctcgattcgacccgacatcgtcaccttcgttcacgacaatatatccaaaaacagccgtcaaccctatgccgtctccaaacgcgctggtcaccaaacttcagctgaatcctggggtaccggtcgtgccgtctcacgtatccctcgtgttcctggtgggggtactcaccgtgcaggccaaggtgctttcggaaacatgtgtcgcggtggacgcatgtttgctcctaccaagatctggcgccgctggcaccggaaaatcaatgttaaccagaagcgttacgccgttgcttccgccatcgccgcctccgctgttccttccctcgtcatggcacgtggccaccgcattgaggctgtaccggagatgccgctggtcatttctgatgctgttgagagcgttgagaaaacctcgggtgcaatcaaggttttgaaacagatcggagcatatcctgatgttgaaaaggctaaggacagccaaggaatccgacccggaaaaggaaaaatgaggaatcggaggtacatttcccgtaaaggtcctttgattgtttacggaactgagggagctaagcttgttaaagccttccgtaacattcctggagtggaggttgccaacgtggagaggcttaatctgttgaaactggcacctggtggtcaccttggaaggttcattatttggaccaaatcggcttacgagaagctggactcaatttatgggtcatttgagaagccttctgagaagaagaaagggtacgtactgcctcgatctaagatggtgaacgctgatctgggtaggatcatcaactccgatgaggtgcagtcggtggtgaagcccattaagaaggagatcaagagggcacctttgaagaagaaccccttgaagaacttgaatgctatgctgaaatgaacccatatgctaaaatggttagaggatgtctttttagccaggccaagggttaaactataaggtaatttgcagaag

SEQ ID NO: 190376 - DNA, 695 bp, Gossypium hirsutum
  unsure (1)..(695): unsure at all n locations
tttctctcgcgtccgcccacgcgtccgggtgaatgctgatcttggtaggatcattaactccgacgaggttcagtcggttgttaagccgattaagaaggagatcaagagggcacctttgaagaagaatccactcaagaacttgaatgctatgctgaagttgaacccttacgcaaagactgctagaaggatgtctcttttggctgaggcacagcgtgttaaggccaagaaggagaagcttgacaagaagaggaagcctatatctaaggaggaagcaaccgcaatcaagtcagctggcaaagcatggtatcaaactatgatctccgacagcgattacacagagttcgagaacttctccaagtggttgggtgtgtcgcagtaaattttagtttctgcggagtggttgtatcagttttggttttcggtgtttttgacatttttatttcatttgatgatgtttggagttttggaagtaaaattagtggaatggcatggaccctatttctcttttcatttagccatctccaccatgttttcactctttatgattaggggaatagtttcaatgaaaatgagaactagcattgaaatagtttacaagactggttggtcagattattatatttatgttattgaaatgttgctttgcagtgttttatccattacttggactgtttcctaaataaagntttttcttc

SEQ ID NO: 190377 - DNA, 785 bp, Gossypium hirsutum
  unsure (1)..(785): unsure at all n locations
atttcccgtaaaggtcctttgattgtttacggaactgagggagctaagcttattaaagccttccgtaacattcctggagtggaggttgccaacgtggagaggcttaatctgttgaaactggcacctggtggtcaccttggaaggttcattatttggaccaaatcggcttacgagaagctggacacaatttacgggtcatttgataagccttctgagaagaagaaagggtacgtactgcctcgatctaagatggtgaacgctgatctgggccggatcatcaactccgatgaggtgcagtcggtggtgaagcccattaagaaggagatcaagagggcacctttgaagaagaacccactcaagaacttgaatgctatgctgaagttgaacccttatgctaagactgctaggaggatgtctcttttggctgaggcacaacgcgttaaggctaagaaggagaagcttgacaagaagaggaagcccatttctaaggaggaggcaaccgcaatcaagtcggcaggcaaagcatggtatcaaactatgatctcagacagtgattacaccgagttcgagaacttctcaaaatggttgggcgtatctcagtaatttagttcttccttaagaaattatggcagacaatcatttttatcagttttgttttaatgtttttgacatgttatatgttgatggccttttggaatagtttcatttatcttgaagacaaggattaaatagttttcttccattctccttttatgataattttgagatgttggttgtgtgccgna

SEQ ID NO: 190378 - DNA, 514 bp, Gossypium hirsutum
ctcaaaaaccctagctgctcagtgctcacattttctcgcattttatttaattggctggtctgccctcaaagcccaaaaccctaacaatggcagccgccgccgcccgtcctctggtttcggtgcaaaccatagagtccgatatggctaccgacgctacgcctactgttcctctcgctgatgtcatgaaagcctcgatccgaccagacatcgtcaccttcgtccacgataacatttccaagaacagccgccagccttacgctgtctccaagcgtgctggtcaccagacctcagctgaatcgtggggaactggccgtgccgtctcccgtatcccgcgtgttcctggtggtggctctcaccgtgctggccaaggtgcttttgggaacatgtgtcgtggaggccgtatgtttgctcctactaagatctggcgccgttggcaccggaagatcaatgttaaccagaagaggtacgccgttgcctcggcaatcgccgcttctgctgttccttcactcgtgat

SEQ ID NO: 190379 - DNA, 455 bp, Gossypium hirsutum
cccacgcgtccggttgaacccatatgcgatttctgctaggaggatgtctcttttagccgagggacaacgtgttaaagctaagaaggagaagcttgacaagaagaggaagcccatttctaaggaggaggcaacagcaatcaagtcagcaggcaaagcatggtatcagactatgatctccgacagtgattacacagagtttgagaacttctctaagtggttgggtgtgtctcagtaattttagtttttgatttagatatttgttgcagtcaatgttgtcaactttgttatggtgttgtctttttagttattttgatgttttgagttgtgggtggaaggaaaattagtgaaatatcatgctctaatacgcttctgttttgtcctcctcccctgttttcgcattctatggctagtggaatagtttctataatatgagaacaagaaattaatcagtttac

SEQ ID NO: 190380 - DNA, 444 bp, Gossypium hirsutum
ggtgtttcgtagaaaaagagaaaaaatcaaattacaaaatgaatatcttcaggtttgcaggtgatatgactcatttgatcagcatcttagtgctgctcctcaaaatctacgctaccaaatcttgctcaggtatttcgctgaagacgcaggagctatatgcgctagtatttttgacccgctacttggatctattcacggattttatatctgtgtacaacaccatcatgaagctggtctttattgccagctctctcgccattgtttggtgtatgagaatgcaccgagtcgtgaggcgttcctatgacaaggacctcgatacatttcgtcattatttcctcattttggctagcctcattttggcgcttttggtacacgagaagttcacctttcacgagatcttttgggcattttcaatctacttggaagctcttgcgattcttcccc

SEQ ID NO: 190381 - DNA, 442 bp, Gossypium hirsutum
ggactcggttgttgatgtaggaaacaacaataaccgctacactatcataaaagcagacttccctccttatgggagggattttttgaatcacaaaccaaccggaagattctgtaatggaaaattagcctcggacttcactggttcttaatcccataaaaccctttttaacaccatcttgaatttgcttgctcatttttatattgtttcatcttacaaattggttttgttttgttagctgagaacattggcttcactgattacccaccagcttatctcagcaaaaaggccaaaggaaataacctgttaattggagccaattttgcatcagcttcttctggttattatgagactacagcaaagttatatcatacactttcattgagtaagcaattggagaactacaagcagtatcaaattaatatggtggccattgcagggaaat

SEQ ID NO: 190382 - DNA, 443 bp, Gossypium hirsutum
caagaggctgtttcagcagtgagaaaaaacagaggaagaaagaaaagaaaaagaaatagagaaaaggagaacagaagggtcaaagtaactcagatatcaaccgttatttctcatattcatttctgattcctaccaaactgtttctggaggcttaacatctcatttgcaaattggatgtgactgcttcactgtagattgtcaggattaattgtcgatgtctttggagatttagcagtggtagcatcatctgctgcttgggttgagaaatacaaatcaaaagttaaagcatgcatcagtagcattgatgagattaatcatatacactggagaccttctgttgaaattttaaaagaagaaggaatggatgcagcagatctgaaagaattgcatccatccacttgtccccagagaactaaagtattagaaaatggaataatctatgc

SEQ ID NO: 190383 - DNA, 411 bp, Gossypium hirsutum
aattaactggtttttgtcagtagaaaaacccttgtgctgggataattgttgggctttttttagagaaatttactgttttcttaaggggaaattaaaatttaattttttcattgcagaaattttttgggtccagataaaatttctcggtttgattattttctcgagaaaactagtgggtttgtttggtctctgagaaaaccattgtttccctggagtgaaagatcggggtttgatttagaaaacaaagcagaacatttattttggagacgatctgcttgtacctgggccatggcggtttcaacaatagctctttacgcgagtccaccgggcagcgtatgctctacgccacaccatatcaacattaattcctgtgatttcgacttgaattcaagatcttcatcttcaactccc

SEQ ID NO: 190384 - DNA, 1064 bp, Gossypium hirsutum
cccacgcgtccggggttttctattccctccccactccaacactttaaaaactaattaggtgccgactgctccgttctttgtagcaaagcaaagtttgtgaagcatggccgtcgggaagaacaagaggatttccaagggaaagaagggaggaaagaagaaggcagcggatccttttgctaagaaggattggtacgatatcaaggctccttcagttttcactaccagaaatgtgggaaaaactctcgtcacccgtactcagggtaccaagattgcttctgaaggactcaaacaccgtgtgtttgaggtttccctggctgatcttcaaggtggtgatgaggatcatgcttacagaaagattcgtttgagagctgaagatgttcaaggaaaaaatgttttgaccaacttctggggaatgaattttacaactgacaaactgaggtctttggttcgtaaatggcaaaccctgattgaagctcatgttgacgtgaagacaactgacaattacactttgagaatgttctgcattgggattcactaagagacgcccaaaccaggttaaaaggacttgttacgctcagtccagccagattagacagatacgccgaaagatgagggaaataatgactgcccaggcaacatcttgtgatttgaaggaactggttcaaaagttcatccctgagatgattggaaaagaaatcgagaaggcaacatctagcatctatcctttgcagaatgtgtttattcgtaaggtcaaaatcttgaaggctcccaagtttgatcttgggaagttgatggaggttcatggtgactactcagaggatgttggtgtgaaactagagaggcctgctgatgagacaatggctgaggctcctgcagaggttgttggagcttgaacgaagaacaatagtccatgaatgtcttgttttttttgcttctaggagtttttgctgatcatttttaatttgtcgtataactgttttattaaatttttctatggttttgatgttaaaaggatatgtttttttctactaattatttagtaaacaatttgttaccttttggtt

SEQ ID NO: 190385 - DNA, 457 bp, Gossypium hirsutum
gaccggaccgactgcccggcccacgcgtccgaggaccaaaagggtttaatctgctgtgcacgttgtagctcaccacccaaactttaacaatggccgtcggtaagaacaagaggatttccaagggaaagaagggaggaaagaagaaagcagctgatccatttgcgaagaaggattggtatgatatcaaggctccatcagtttttacgagcagaaatgttgggaagactcttgttacccgtactcagggtaccaagattgcttcagaaggactcaaacacagagtgtttgaggtttcactgggtgatcttcaaggaggtgatgaggatcatgcttacagaaagattcgtttgagagctgaagatgttcaaggaaaaaatgttttgaccaacttctggggaatgaattttacgactgacaagctgaaggtctttggttcgtaaatggcaaactctgatcg

SEQ ID NO: 190386 - DNA, 475 bp, Gossypium hirsutum
cccacgcgtccgaagaaattgagaaagcaacatcgagcatctatcctttacaaaatgtgttcattcgtaaaggcaaaattttgaaggctccgaagtttgatcttggaaagttgatggaggttcatggtgattactcggaagatgttggtgtgaaaatagagaggcctgctgatgaaacaatggctgaggctgccccggaggtcattggagcttgaatgaaacaccccttgaatttgtgtgttcttttctttctgatttcaacagatttgatgattttgtttaaaactaggagaaattttccatggttttgatttgatctctaggatatggttttgcagattgatattgagctagacaatctggtgtattagaaagccctactctctctatatatgaaatttattatatattggatgctttatagcaataaggacattttcctccgagagttgatctccaatgcttctgatgcgtt

SEQ ID NO: 190387 - DNA, 576 bp, Gossypium hirsutum
cggacgcgtgggcggacgcgtgggtttggattcataaaagcaatccatcaaaatgagttatataagctgagataacgaaaaatagggttttgaaatctttcccaggtttaccagcagcctgctctctttctcttttgtagctaaccagcagagagcttcaaccatggccgtcgggaagaacacgaggatttccaagggagagaagggaggaaagaagaaggcagctgatccatttgctaagaaagattggtatgatatcaaggctccatcagtttttacttccagaaatgtggggaagactctcgttacccgtactcagggtaccaagattgcttcagaaggactcaaacaccgtgtgtttgaggtttcattggctgatcttcaaggcggggatgaggatcatgcttacagaaagattcgtttgagagctggagatgttcaaggaaagaatgttttgaccaacttctggggaatgaattttacaactgacaaactgaggtcattggttcggaaatggcaaacattaatcgaagctcacgtggatgtgaagacaactgataattacactttgagaat

SEQ ID NO: 190388 - DNA, 340 bp, Gossypium hirsutum
ccggagatgattggaaaagaaatcgagaaggcaacatctagcatctagccattgcagaatgtgttcatccgcaaagtcaaaattttgaaggctccaaagtttgatcttgtgaagttaatggaggttcatggtgattactctgaagatgttggtgtgaaaatagagaggcctgcagatgaaaccatggctgaacctacccctgagggtattggtgcttaaatcaagatttcttgaattttatctctttgttttttcgtactaaaaatttctgtcggtcgttttcattttgttggaagcttgagttgaacttgttcttggttaccctttttcttatttaatc

SEQ ID NO: 190389 - DNA, 977 bp, Gossypium hirsutum
  unsure (1)..(977): unsure at all n locations
gtgccttgcaggcggacttgcacttgcttcgcttgctgactccactcttggccgcaaagacatgctcttattctcatgtctcatgatgtctttttcttcaatcttcaccgttttttcacccaatatttggatctattctgtcctgagattcattaacgggtttggccgcgcaactgttggaacttgtgccctcgtgttatcaaccgagctagtaggaaaacggtggcgcggccaggtcggcgttgttggtttcttttgttttactttagggtttctttcattgccggtaatggcatacgtaaatagaggttcttcatggagaacactgtatctgtggatttcggttccaacaattttgtactgtatattagttcatttcttagttcatgagtccccaagatggctgttcgtccgaggacgcaaagaagaagcagtgttaacactcaagagcatggctcaggctaatcaaagtcccataacaatgagcttctccaatgtcctaatcgagcaggaatcatggaatgtagatatttactccacaatcaagatactgttgaacaagaggtgggcggcaaaaaggctagcggccgtgatggtgggaggttttgggatgggatgggngtactacggcatgccattaggacttggaaatctatccgtcaatctctatttgggcgtcacattaaacgccttatccgagttgccagcgtcactcattacattcttccttatagggaaaatgaaaaggaaagactcattgttgggtttcacattattaagcggggtgtgcagcgtgttgtgtgtggtggtgggtaaaagggtcnnctaatttacagtatgcaatgggagctattaatcttctttaatggctgctcggcctttaaatggacctgatatccccattaatgtgttccgaccttgcttaagactcggatatcactgggagcaaaacctttttggggggtgtcctcctctcc

SEQ ID NO: 190390 - DNA, 409 bp, Gossypium hirsutum
cagtgggaggttttgggattgggatggtgtactacggcgtgccattaggccttggaaatctatccgtgaatctctatttgggcgtcacattaaacgccttatccgagttgccagcgtcactcattacattcttccttatagggaaaatgaaaaggaaagactcattgttgggtttcacaatattaagcggggtgtgcagcgtgttgtgtgtggttgtggggaaggtgtcgccaagtttacagatagcaatggagctgatatccttcttcagtgcctgctcggccttcaacatgtcactgatatacacattagagctgttccccacatgcgtgaggaactcggcaatatcaatggtgaggcaagcactggtgtttgggggggtgttcagcccactgctcgtggccgctgg

SEQ ID NO: 190391 - DNA, 428 bp, Gossypium hirsutum
cacgctaccattttatctgtctctttctctccattgatttcattgcagctgaaaatctctcccaaaataaaaaaccccattttttcccctatttcccaccttttttgcatttttttttgctcaatcttttcgtttctaaaacacccattttaaaaaaatatatacttatttggtttttagaaagcggttttagccttttagggagggttctcaacatttccaatggatgctttacttcttgggtcctctactggaggactttctttgttcatctctggaaagagtagctggaggagtaaagacttgaaggctgtgcattttccaaatgttgctaaaaggcagaatcaaaagcaaagagtcaaaggttctgctatacgagtgcaagtgccaacaaacaagtcatataacctcattggaaacttttatac

SEQ ID NO: 190392 - DNA, 429 bp, Gossypium hirsutum
cttgcctcctcacttctctgcttctttaaaaccctcaaaacacacccatatagcttcatcgccggtccaatttctttaccaaagacctcgcttttcaaaacccttttctgggttttctccatctaacctttccttccctctgaacagcaaaaactgtccacaaaggtggactttcaaggcttctctttcagcccaggaatctgctcgcactgaaaatgtaaaagcatcagctggagaagattttcccagtttaaaggccatgattagagtttacagggaggcgcttctcaatggagatgataggattgtatctgaaattgagagtagaattagcattttagaaaacgagaaggatggattggaaaaacaagttttggaattgtcggcagagataacctctgggaaagagaagtatatcccgttacaagc

SEQ ID NO: 190393 - DNA, 1035 bp, Gossypium hirsutum
ctacgatctagtgagtatcatgatcgcaatgctcagtactataggattcaagaggatatgggaatgcggaaggtacacatatacgagtttagtcgattgagcatggtctacacacttctcagcaagcgtaagcttctctggtttgtgcaaaacggtaaagtagacggatgggatgatccccgtttcccaactgtccaaggaattgttcgccgaggtctgaaaatagaggccttgatacaattcatcttggaacaaggggcatccaaaaatctcaacctgatggaatgggacaaactctggacccttaataagaagatcatcgatcctgtttgtcctaggcatacagcagtgattgaagaacgacgtttgttattgaccttaactaatggtcctgataagccatttgttcgcattatccctaggcataagaaatatgatggtgctggagagaaggcaaccacttacactaagaggatatggttagactatgctgatgcagagtgcatctcagtggatggaggaggtaaccttaatggattggggaaatgccatcgtgaaagaaataatcaaggatcaggatggaaacataactcagggggtaggtgttttgcatcttcaaggatctgtcaagacaacaaaattgaagctcacgtggcttgcagaaactagtgaacttgtaaacctttccttggtggagtttgattatctaataacaaagaagaagctggaagaaggggaggatttcctagatgcactaaacccatgtacgaaaaaggagacagcagcaattggagattccaacatccgcaatttgaaacaaggagagatattgcagctggagaggaaaggctacttcagatgtgatgttccctttgttagaccttcgaaaccagtggtgttgatcgcaattccagatgggcggcaacaaagcatgttgaagtaggtcttttaccctatctttattctgatctgtagagtgctgggaagatcctccaactcttttctggctaatacttggacatgcgtatctatgac

SEQ ID NO: 190394 - DNA, 404 bp, Gossypium hirsutum
ctccgacggcgtctccgattatgccaagaagcttctcgagattaaatttggcgatccctttacttttatatttatatccatattttcatagaaaattacgatcctcacagtcggttactttataatttttgaaaaaaccacaaaaatgatttgcattgatgctctgtaattattagctttacagttattgctctgttagttcactgacaaaatttataaaaagtttttgcattgctcttttgggataataaacagaagtttgaatttttaacatttgttttaacttcatttttcattttgcaatggtggttaattgagcaggctgatggttggattgtggagaatattagtttattggtgaatccaaatcatgttcggcccaaaaaggttttggggtgtttata

SEQ ID NO: 190395 - DNA, 386 bp, Gossypium hirsutum
gaattacctcattgatgaagcaagaaaaccataatgagatgagattcgacatcatctagtaagcttgaaagtgttatttggcctggaggaactatgaacattccgagaggttggtctctacatggcaagaggctgaggattggtgttccagcaaataatggattcagagaaataattagcgtgactcgtgatccccgaacaaatgaaactactgtaactggatattgtgttgatgtgtttaaggaagccgttcaaagtttaggttatgaagtacattatgattttatcccggttgaagatgccagcggaaaaattgcaggaacttacgatgatcttatccttcaggtttattataagaattacgatgctggtgtgggggatacgac

SEQ ID NO: 190396 - DNA, 1576 bp, Gossypium hirsutum
gtagaggaacccagaatcggcctcgccctcgtccgcggctctacttattcttttttctcttagatgagtacaaccatggcgaatcacaaacggttccctaatttcctatctcttattctcctctctctcgtcgccatcgcctctgctgaagttttcttcgaagaacgcttcgaagatggatgggaaagtcggtgggtaaaatctgactggaagaaagatgagaacatggctggggaatggaattacacttctggaaaatggaatggagatcctaatgacaaaggtattcaaactagtgaagactacaggttttatgctatttcagctgagttcccagaagttaacaacaagggtaagactctagtcttccaattttctgtcaagcatgagcagaagcttgactgtggtggtggctacatgaagttgctcagtggtgacattgaccagaagaaatttggtggtgacaccccatacagcatcatgtttgggcctgatatctgcggctacagcaccaagaaagtacatgctattcttacatacaatgggacaaaccacttgatcaaaaaggaagttccttgtgagactgaccaactcactcatgtttatacattcattctccgtccggatgctacctacagcatccttattgataatgttgagaaacaaactggtagcttgtacactgattgggatcttctcccaccaaagaaaatcaaggatcctgaggccaagaagcctgaagattgggatgacaaggaatacatccctgatcctgaagacaaaaagccagagggttatgatgacattccaaaagagattcctgatcctgatgctaagaagcctgaagattgggatgatgaagaagatggtgaatggacaccctcaacaattcccaaccctgagtacaagggcccatggaagccaaagaaaatcaagaaccccaactacaagggcaagtggaaggcaccaatgattgacaacccagatttcaaggatgatcctgatctctatgttttccccaacttgaagtatgtcggtattgaattgtggcaggtaaaatctggaacaatgtttgataacatcttagttgccgatgatgtagagtatgccaagaaactagctgaagaaacatggggcaagcagaaggatgctgaaaaggcagcgtttgaggaggcagagaaaaagagagaggaggaatcaaaggatgacccagttgattccgatgctgaggatgaagatgatgccgatgatactgaagggcacgagtctgattccgataccaaatcagacgatgatgacaaggaagatgctcatgatgagctctaagcactgcaatgtctcgctgacaattcggtttggagataaaaacgcctaaatttttccctaccctttattttaaaaaaagagttctagttttaggagtttcctgttagaggaaaaaggaattgaatgcttcaggcaaaagaactttcactgatgctttcttaatatgattttaactgtctgaacaaaggcatgctctttttcttttttatgatcactagatatttttactattcaagttccccggtttatc

SEQ ID NO: 190397 - DNA, 689 bp, Gossypium hirsutum
tttcaaactgaaacaggcgctgatgcttcaatttttcatcttcaatcaagaataaaatctagggttagggttagcgaaagagggtaaacccgcaaaatggaaggctgggacccgaatacgaagtcgacgctgacccagatcccgctattgacgacgaaggcgggccccagagacggagcggcatggactcagaggcttaaagaggaatacagagctctaatagcctacacccagatgaacaagtccaacgataacgattggttccgtatatcggcagccaatcccgaagggacccgttggaccggcaagtgttggtacgtccataatctccttaagtacgagtttgatctccagtttgatatccccgttacttatcccgccactgctcccgagctcgagttgcccgaactcgatggcaagactcagaagatgtacagaggagggaagatttgtctgaccgtgcatttcaagccactttgggcaaaaaattgtcctaggtttggaatagcacatgcactgtgtttgggacttgccccatggcttgctgcagagattccgattctcgtcgattccgggatgatcaagcataaggatgatgcggccacttcgaatgagtcttagcatttctgttgttgaaacgtttaaggtgtaccttgagtttcaaaaataaatgcttatacgattttaca

SEQ ID NO: 190398 - DNA, 1053 bp, Gossypium hirsutum
cccacgcgtccgcccacgcgttcgcccacgcgtccgcagaattcggattcccggaataaagtatctagggtttgcaaaagaggtgaaacccgcaaatggaaggctgggacccgaatacgaagtcgacgctaacacagatcccgctactgacgacgaaggcgggtcccagagacggagcggcatggactcagcggctgaaggaggagtataaggctttgatcgcctacacgcagatgaataagtccaacgacaacgattggttccggatatccgccgccaatccggaagggacgcgttggaccggcaagtgttggtacgtccataaccttctcaagtacgaattcgatctccaggttgatatccccgttacttatccggccactgctcccgagctcgagttgcccgaacttgatggcaagactcagaagatgtacagaggagggaagatttgtctgaccgtgcatttcaagccactttgggcaaaaaattgtcctaggtttggaatagcacatgcactgtgtttgggacttgccccatggcttgctgcagagattccgattctcgtcgattccgggatgatcaagcataaggatgatgcagccacatcaaatgagtcttagcatgccgatgctgggatgatcaagtataaggattatgcagcctcgtcgaacaagtcttagcatattggatgttaaaggcgaagcttgagtttttcctaaataagcgcacgggcaataattatacaatttcattgacaaattaatctgtcttgtgatgaattgataatgtcgaagcctcttgatttcttacttttgaaatacaaataggatctaatactgctactgaatacttattgtcaaagattgaactgaatgtgcctatcaaagattagctctcttcctaagtcgtcggtggcttctccactccttgaaatttgaatcaaatttcgcattgtttttcctataattgttgtcaaggcgtgcgcctaggttttgcgtaaaatccaagatcggccaagttaaatgatgataattttcttttaccaaaagacat

SEQ ID NO: 190399 - DNA, 440 bp, Gossypium hirsutum
tacttgatcttccttcaagaattaaaattacagtttggaagatatcttggaattttctaactacgtgagctaatatgctacttagaagactgacgaacacgtcagtatgtcctcgctgtagttcaggaactgaaactatggaccatctcttccgggaatgtcctgggttttctcacaaagctcgactcctcagcatcaaatcttttgtgttgcagtatgggccatctgtaaaaatatggacaaagccagtggacaaggtagtcaaaatcaatttcgatgcagcgtacgacggtagacaaagtaaagcggctattggggttgtggcccgcgataaggagggttcagttcttctatcatgcacggaggttcatcaaggagttccctcagcctttggggcggaagcaatagcgtgtcggaaagccctccagatcggcgttaac

SEQ ID NO: 190400 - DNA, 857 bp, Gossypium hirsutum
cccacgcgtccgcccacgcgtccgcccacgcgtccggggatgacaaggaatacatccctgatcccgaagacaagaagcctgagggttatgatgacattccaaaagaaattccagatcctgatgctaagaagcctgaagattgggatgatgaagaagatggtgaatggataccttcaactattcccaatcctgaatacaagggcccatggaagccaaagaaaatcaagaaccccaactacaagggcaagtggaaggcaccaatgattgacaaccctgatttcaaggatgatccggatctctatgttttccccagcttgaagtatgttggtattgagttgtggcaggtgaaatcgggaacaatgtttgataacatcttagtcgctgatgatgtagagtatgccaagaaactagctgaagaaacatggggcaagcagaaggatgctgagaaggcagcatttgaggaggaagagaagaagaaagaggaagaggaatcgaaggatgagccagttgattccgatgctgaggacgacgatgatgatactgatgatggtgaaggaagtgagtcggattcaagcaaagatagtgctgaggaagatgcagtacaacatgatgagctataaagcaagaggaatacagtatttcgctggcaatttggttgagagctttaaacacaagtgcttaaattttcctttagtatctttttaagatgtagtcttattagtttttatttagataaaaaaagaattgaatgctggcaagagaaaagtttgagtgacgcgttttaatatgatttcattaactctgcctaaacgaagcgggcgttttatgacgaaaccaaattaatcaatgttttgaac

SEQ ID NO: 190401 - DNA, 572 bp, Gossypium hirsutum
catcgaatcttttgtgttgcagtatgggccatctggggagacaggaacaatagattgcataaaaaagatggtaaatctggaaaagaagtagggagatttgttcatagctatatttcagatcttgatgcagttggtaaaaataggttgcaatcttccatacctgtaaaaatatggacaaagccagtggattccgatgctgaggacgacgacgatgatactgatgatggtgaaggaagtgagtcagattcaagcaaagacagtgctgaggaagatgcagtacaacatgatgagctataaggcaagaggaatacagtatttcgctggcaatttggttgagagcttaaacacaagtgcttaaattttccagtagtatctttttaagatgtagtcttattagtttttatttagataaaaagggaattaaatgctggcaagagaagtttgagtgacgcgttttagtatgatttcattaactctgcctaaactaagatttatccaatggttttgaacatttcaggctcgtatgttgccttttacttttcatttcttttttttgaattgaagagagggca

SEQ ID NO: 190402 - DNA, 370 bp, Gossypium hirsutum
caaaactcctcctcttagaaacaatgactaattcagactttggcttgcttttcattgtcgggattttagcaactcaggcaatgtctcgcactgtgtatgaatcagccattgcagaacatgagcaatggatggttaagcatggtcgacattacaagaacaaagctgagaacgataaacgctttaagatattcaaggagaacttggaatatattcagaactttaataatgcaggaaacagaacatacaagttgagtattaacaagtactcggacttgacacatgacgaattcgtcgcagctcgtaccggatacattaatccaggcaacacaatgacatctatggaaacatcgtttcgctacgccgagtttac

SEQ ID NO: 190403 - DNA, 407 bp, Gossypium hirsutum
aaaaaacccaaaagcttattctactgatctgtgtttcttcccaactaaagccaagccagttcttgtttgttcttcttcttaaaactctcaaatggataaaagtggtccaaaatcaaagcacccagaaccaggaaaccaaggaaacgatgagaaaaagagcaaaaagggattgcgactattagctcgagcagggaagtgagaagctccttcagctagtctcaaattactctatggtttcaaacttgaaaagataagcatagagaaatgtcgatcacccacactaatttcctgtcctgaacagttctatggtgatgataaataatttgtttgtgggatgaacttgcctaatgtcttataggtttaatagaaagctcatctgtgaaatttgtttgcgtaacctcccttac

SEQ ID NO: 190404 - DNA, 437 bp, Gossypium hirsutum
caatatcgtttctcgagatccaaatccatgccgatctcggagctcgctttatttcttgaaaagagatggcggctgccgtttgattcgacggaaacctcgttcgaccgccgtgaaggcggtgcttgattcggcaactatagaggagctaggtcttaaagaatctgatatgagaaatccggcgatttcttctacttatcggaggtctatgttgccgaagccgaatcaaacggtgttggaagctcaagcgaggatttgtactggacctacgcagactagaccgctctcggaagaacaggcgtttaaggttctggatacaattttgatatcagttaggggggaattaaaagatgaagaacaagtctcaaaagcacagattggagcattctttgctggaatgactatccgtgcaaattcctttccagaagagactcaatgga

SEQ ID NO: 190405 - DNA, 433 bp, Gossypium hirsutum
gaagagttcaaagaagcaccaaatttacagcaaggaattccaggctatgttagatggtttagatgaagaagacagcttagaagaaggtggtcaagcaacagagaagaaaaggcgtttatctatgcatcaagttaaggctttggagaagaatttcgatgtgggaaacaagttagaaccagagagaaaagtgaagttagctgaagaattggggttacagccaaggcaagtggctatttggttccaaaaccgacgtgctcgttggaagaccaaggtgttggagaaagattatgcaatgcttaaagctaattatgatgctcttaagcttgatcatgacaatcttgaaaaagaaaaactgggtctaattgcaaaggttagtgtttatatttcaaaccccattttatagttttttaagggtaaatgttatataagtgtt

SEQ ID NO: 190406 - DNA, 435 bp, Gossypium hirsutum
atcatggaatccatgagacaggatgagcctgattttgaccgggttattgagcttgtgagggaagtgagggatgaaatatgtgagctggctcctcgaagttggagagaagaaataactgatgctattgatttggaaattcttgcccaggtgctgaagtcaggcaacctggacattcattatcttggacggattctggaattcgctttgatcactttgcagaagctatccgctccagccaatgatgatgaaatgaaggccgctaaccaaaggttattgaaagagttggctgagatatgtggagccagagagaactcggataattctcctgccctcgcaatgatcaagggtctacgttttgtcctagaacagattcaggttcttaaggcagagataagcaaagctcgtataaggttgatggagccattgttaaaggga

SEQ ID NO: 190407 - DNA, 685 bp, Gossypium hirsutum
aattccttctcttctcctttaatccctaaatttttatccccaagttcccaacccatttgccaccgaagacaccgaccggaccacctggtgcatcgccctcgactaacccctctgttgcgtcgccgtcgtcgtcggtctctactgccacagccaatcgcaatgatgcgtgctcaagaggccgatcctatcaatctggaagtacttcttgctcttggtgtgagtcatacaaatgaattggaacagactgctgctttaaagtatctgtatggatggttacgtcatcacccaaagtatggtactcttgcgccactggagctgctggtttttcatactttgacatatgcactagatttgaagccaaactatgtgcgtgcttgggcaaacatgggtatcagttacgccaaccaggtttgagtttttgttggatgcatggtccaggattagctgaattcatgcatagtgacgacttgtttgagctaattgctgatcttaaagtgtacattctatcattattttgttctatttgtattttgttagatttctggtgtagtatgataagtccggtattttgtttgattgttattgataaactttttatttggtgggatatatatttatatcatagatgttattcttcttttcaatattttgataatgaattttaattttttttattaaacaaaaa

SEQ ID NO: 190408 - DNA, 947 bp, Gossypium hirsutum
  unsure (1)..(947): unsure at all n locations
tatttttttaatattagtttcagcataaagcaagagtgaagcctcngtttgggtcagtcaaatagctgcttacactgggcatgatttctggcgtcttgttgcgaaatgactagaatagtcctttgttaactgaggatttcgtatactaacggaatgatattagtgtattatttatgattaattacaataatgacaggtgttgaacatggagagcatatcatctcactttactccacgaacataaaaggaatcagtgacaaaaaaccaaatcaaacaaaagacaactggatagccacaaatcaagccagccaactcaagtttcctggctacaaaagctccaaatcctcatcaagcctgagtaaatggtgtcactcccgatgttcatttccatgtaggtcaaccggaaggcaactgctcagaattcaactctttttgcttgaagcttcatcagagctagtaacatatgatacaacaacagttatgtcatcaagttttccaccatagtaacggaacccagcatcttgagcagcagttgagaaaggagtttgtctatctttagcctgtgctcgttctcgtgccaatgctgctattttctgagcagtcacttcaggcccaaaaccagctctcagtgcatgaaccaccaccgcagtaatttcattattgtacaagttatcaaacagtccatctgtgccagcaatgataacatctcctggagcaacgggaactgcaaagatctgaccggagctaggtaaatcagcattatttccactctcaagttgatatgtgaagttaaaatcatgctgctgaacaggggatctaaatatagtacatccatcccgaaccaccataaaaccactgtcccccaagtttatagcatgaagtccctggtctccaagtgtcggaagggttggcggacgagtgggcggacgcgtgggcggacgcgtggg

SEQ ID NO: 190409 - DNA, 719 bp, Gossypium hirsutum
gtagaaggggagcagggagctgctatccatattgttctagttgactccaacactgcgcgtgttgtaacaaccggacctgaagcctctatgaagctagatgttgtggtgcttgaaggtgattttagcaatgaggatgatgaagattggacacaggaggaatttgatagccatttggtaaaagagcgtccaggaaaaagaccactgctgacgggtgacttgcaagtgaccctgaaagagggggttggaacactaggagacctcacttttactgacaattcaagttggataagaagcaggaaattcaggcttggcttgaaggttgcttctggatactgtgagggtatacgtgttcgggaagctaagacagaggcttttactgtcaaggatcacagaggggaattgtataagaagcactacccacctgcactgaatgatgaagtatggagattggaaaagattgggaaagatgggtcatttcacaagaggcttagtgctgaaggaatattcactgttgaagactttttgcggcttgttgtcagggatcaacaaaagctacgaaatattctgggaagtggcatgtcaaataagatgtgggaagctctattagatcatgcaaagacttgtgtgctgagtgggaagctttatgtttactatactgatgattcaaggaacagcggtgttgctttcaataatatctatgagttgaatggccttatttc

SEQ ID NO: 190410 - DNA, 771 bp, Gossypium hirsutum
cgcggtggtggacgatctaaactacggatgcctgcaagcgtcgagagagaataacagagggaaagcttaagcaatggcggccgaggaggacagcggagagttttacctccgctactacgtgggccacaaagggaaattcgggcacgagtttttggagttcgagttcaggccagatgggaagctccgatacgctaacaactccaactacaaaaacgacaccatgatccgcaaagaggtcttcctcactccttccgttcttaaggaatgccgccgcatcatcgccgacagcgagataatgaaggaagatgataacaattggccagaaccagaccgtgttgggcggcaagagcttgagatagtgatggggaatgagcacatctctttcacaacttcaaagattgggtcccttgttgatgttcagagcagtaaggatcctgaaggtcttcgcatattttattatctggttcaggatttgaagtgctttgtattctctcttatctcactccacttcaagatcaagcctatttgaagaatgaatgatgatattgaaatcctccactatagaggggagagtggtgtgtctgtcacaattggcgtttctgcgtttgatataaagctttgttttccatttccttttgttctcttgaattgatgagctaagtctgtgtatggtttggttgtgtgagtaatttttttggaattacataatgtcactctgtttctgttgtgaaagcttttatgattgtgcaaaaaaaaaagtcgacgcggccg

SEQ ID NO: 190411 - DNA, 380 bp, Gossypium hirsutum
caaaagctttgaaatctttactctctttcccagagaggcagggaaaaaagagcttttgtattattttctttaaatttcatcaatggcggtggagaaaactttgggggagaagcttttcagtattttcgaaaaatttcatcacaagctgttaccaattgccggatttcatcaacgactattcaaaatcgaatctcgaagaatgccgggaaaggtacggccgaaatggcaccggatccgggagatcttaacggtgccggtaatggtgtgttcaagcggtttcttcataaaggatctgcggtttcaccggcaatgaggacgttaccgagggggaaagatttgattgagaagttgaaagagattgatatgtcgaaagatcggat

SEQ ID NO: 190412 - DNA, 645 bp, Gossypium hirsutum
accattttccgtgaaaaaaagggatgcaactgtagttgcaaagctaaagaaagggaagaagcatgaatatccatggcctgcagatccagatccaaatgtgaaaggcggggtcctaactcatctctcccatttcaagcctttgaaagaaaagcaaaagcccgttactttggattttgagaagccccttgttgaaatcgagaagaagatgattgacgtgaggagaatggcaaatgaaactggtttggatttcagtgatcagattatattgttggagaataagtatcaacaggctctaaaggacttatacacacatctgacccctatacaacgtgtacacattgcccgacaccccaatagacctacattccttgatcatatatttagcattaccgataagtttgtggaacttcatggagatcgatcagggtatgatgatccagctattgttactggtataggaaccatcgatgataggcgatacatgtttatcggtcagcaaaagggtagaaacactaaagagaatattcaccgcaactttggaatgccaacgccccatggttacaggaaggctttacgcatgatgtattatgcagatcatcatgggttttctataggtacttttatcgacactcctggggcttatgc

SEQ ID NO: 190413 - DNA, 446 bp, Gossypium hirsutum
tagccgatcctctgcactacttcaatacgagcaaagcttcatttcactaggctgatggcatattacgtaatccttttatctgacattttgttcatttattattagctgccacagcaggagaattcatttgattgtggtctgttcttactccactatctggagctctttttagctgaagctccttctaacttcaatccattcaaaataaccaagttctccaactttcttaatttggattggttcccacctactgaagcatcaaaatcctggtgcagcagtgaacgagttagatgtggattccaaaatggttgagaacatggagtctcaagataataaaactgtgtcatcagatcaaactctcggtacggtgctgaaccagttggatcgggattccgacatgattgagaatgaggctagttgtgatgaagtgcaaacaattattgacg

SEQ ID NO: 190414 - DNA, 917 bp, Gossypium hirsutum
  unsure (1)..(917): unsure at all n locations
attcaccacgagctatggattaaaaatgcgatgtccgtaagctctctatcagtgttgcttcgtgcagcgatataccttgaaacaactgttgcttgtcgacttgatttggagagaaggatggccttgcaattaggacaggctgttttggatgatctcttgattcctgcatattctgttaccggcgatacattatttgatgtggacaccatgcagcggatcctgacgaactacgttgaatatgaaactgaaggccaccattttggatacaaagaagatgatgagtacatttctcccccaccaagtgacatggaaagggtgggaaagctaatggagagctacctagctgaaatagcatctgaccgtaatctacctatctcgaaattcatcggtcttgctgaactcattccggaacaatccagggtaacagaggatgggatgtacagagccatagatatctacctcaaggctcaccccactataactgacttggagaggaagaaagtttgcagcctaatggattgccagaaactctcccgggaggcctgcgctcacgctgcgcaaaatgaccgtcttcctgtccagaccgtggttcaagttctttactacgaacaacaacgccttcgagacgtcatgaacggaagcatgttcaagtggaacttccccttccatatcttccagagtgaattttataccccccaccagatatccccccagtttcggatgaactttcgagcttgaaacgagagaacgaggacttgaaactagagctagtaaaaatgagaatgagattgaaagaaattgacagaccatcatccgctgttccgtcagcagcaagcagtcctatgggaatattgtgcatcatctgatagcctncttttgcagaaatcattcatgatcagttcttagaactggacccn

SEQ ID NO: 190415 - DNA, 406 bp, Gossypium hirsutum
gtagagcagagacatatcatagtggttgaccatcatattaaaatatgtggtcttgattccttaattttgtctcattagtttcttttgcttggttagaggcatcatgcagtcctgtttctggttggtgataaaatctttgaactatcattcatttcccactggatttaactttgctcaatggttctgatagaatgattatagaaatcactgctgcaagtaagctttggaagtacaaaaccaccatcttttccttcttaatacgagaccccaaccatggttacttccttttgagatccatgcttctttcctggaactaattttgcatggttaaatgatttatctaggcaattttttttgtcattaaatctaattcggcttaaacttactgctaacagttttctaagcc

SEQ ID NO: 190416 - DNA, 917 bp, Gossypium hirsutum
gtacatgctatcttttttatattcgagcactcgcatgatagatttaagtatagaatattccaataatacttgtacaagctaattaaaaaacattaagacataagaatcgtgtaaactctgcttatttacaccaatatctaatattcagcatgattggtattacagtcccagtgtgcaacaccatagtgttattaggcgactaaaaatatgcagcaaccccagttgtttgttcaattttattgctgagattaatgtttgatcttcggcttcttcacaatcatcacagagcaatgagcatggtgagaacaataatcactcacactgccaagaacagccctctttatagctccataaccatggctaccaacagcgagaatggaggcatggtgtttttctacagcgtcacagagaacattccttgcatcaccttccaccacttcaactacggcatcatgtaccgatttgctaaggcagagttccttggctttctcaacaaccctggcagcgatcttcctcaaatccgcatccacatagggcaatacatcagcagctccaggtccggcgagaccaacagcagaagaagcagtaggcttggcatgaacgatgacgagcttgaaaggaggattggaagcgaaaggagcaaagaagtgatcgaggatccactgcagcgcgtacgtactgtgctcgctgtcgtcgattccaacaaccatggcttgcttctccgtcgttgttgccatcgtggtatgtctcttggttcttgtgtcttggaattgcaaagggtcggtttgatccttctttaattttgggggttttgtaggaataaggaatttattgagaaacacagagcacaaaacaacgtgcgggcaaatgcgtatggcgtaaggcgtaagcgtacgaacgcgtgggcgtacgcgtgg

SEQ ID NO: 190417 - DNA, 360 bp, Gossypium hirsutum
tgaaggtgatcatcatcaacagcagctgaggagaggaccttggactatagaggaagattcagtccttgttcattacattgctcgacatggtgaaggtcgatggaattttcttgcaaaacatgcaggtttaaggagaacaggcaagagttgcaggttgagatggttgaattatttgaaaccagatgttaagcgtgggaaccttactgctgaagaacagtttttgatccttgaactccattctaaattgggtaacaggtggtccaagattgcacagcatctgcctggaagaaccgataatgagattaagaattactggagaacccgtgtgcaaaaacaagctcggcagcttaacatcgatgc

SEQ ID NO: 190418 - DNA, 746 bp, Gossypium hirsutum
atgctttcctgagacatgtgatcatgtatatctctttgataatgattatgaagatgcgagagacgtatttgggaaacctatgcggggtagatttccctatgatgacaaagggcgaattatcttggaggagggctaccttgtctatgaatgcaaccgtaagtgtagctgcaatataccatgcccgaatagggttttgcaaaaaggtgtacgtgtaaaactggaagtcttcaaaaccgaaaataagggctggggggtcagggctggtgaaccaattctgagtggcacattcgtgtgtgaatatgttggggagatctttggcgagcaagaggcaaacaataggcttaccaggtatggtagagatggttgcaactatatgttcaacattggttctcaaataaatgatatgagccggttgattgaaggacaagcacgatattttattgatgcatccaaatacggaaatgtttcccggttcatcaatcatagctgctcgccaaatcttgtgaatcatcaagttcttgtggaccgcatggattgtcaccgagctcacattggtctctatgccagtcaagatatatctgtaggtgaagagctgacttttgactatcgatatgaactcctgcctggtcaaggatatccatgtcaatgtggagcttctacatgtcggggccgcctttactaaaccctcagtgagcactacgggatctctatggcatctaaagttttgctttttgagttcacaaatg

SEQ ID NO: 190419 - DNA, 419 bp, Gossypium hirsutum
gcagctgccaaaggtggtgtgaccaagaagaaaagtggacatgctgatgaagatcactcccctgaacatagccaggctgatgagaatgaacgggttgccggtgatgatgacgacgacgatgttcagtggcaaactgatacttctcttgcggctgcccaacaacgcatccaagagcagttgagtgctagtactgctgatatggtgatgctctctaccgatgaagagaagaaaaagtcggttaaaaagtctcccgagcctgagaccaaggttcatgagaatggtggtggtgctcatgatgaacttgctgatgagataaaggtatacttcaagaatggatcggctccaaatcagcttagatcctatctaggatcacttactggaacctgcaaagaagtcatggatgctctatttatagcact

SEQ ID NO: 190420 - DNA, 429 bp, Gossypium hirsutum
gtttttcgaaatttccggttcaagctcttcgaattctgtggatttggcgtagaatttcgaatttcgctcgtcataaatcacataaaattttctgatccaaaaacaaaaggaattcgtcgccgtagatggagctccctcaatcccggcctttcggagctgaaggaagaaaaccaacgcatgactttctgtcactgtacagtcattcaagtgtccaacaagatccaaggccaccttctcaaggtgggtacctcaagactcgtgatttcttacaactagaacaacaagggaatccaagtgccaagaaggaaatatcagtagaggtagcgactgttgaaatgccaacaccgccgtctgtggaacatattcttcctggcgggattggaacatacagtataagccacgtttcctaatttaatcctagggttccaa

SEQ ID NO: 190421 - DNA, 1995 bp, Gossypium hirsutum
  unsure (1)..(1995): unsure at all n locations
cttttcttctcttctcttgtcttctctcctnnnnagcccactttctgatgctattggagatagaggtaccaggctgctgtaagaaaggtgccggtggcgcttctcatgaggatgacctcaggggtgtttacttggtttggcaggacctcacggtggtgttgccaaactttggtaataaaccaaccaaaaggttgcttcaaggacttagtggatatgctgagcctggcagaatcatggccattatgggtccttctggttccggaaaatctactctgctcgactctcttgcaggtagacttgccagaaatgtggtcatgactggaaatatccttttaaatggaaagaagaagagactagagtatggtgctgttgcttatgtaactcaggaggatgtgatgttgggaactctgacagtaagagaaactttgacatactcagctcatttaaggcttccgaccacgttgagcaaagaagaagtgaaagacattgtggagggaacaatcatggaaatgggtcttcaagattgtggtgacacagtgattgggaattggcatcgaagaggaataagtggtggggagaagaagagacttagcattgcacttgagatcctcacgatgcccaaaatgttgttcctggatgaacctactagcggccttgacagtgcctctgctttctttgtggttcaatctctccggaacatagctcgcgatgggaggaccgttgtctcttccattcaccagcccagtagtgaagtttttgcactgtttgatgaccttttcttgttatctggtggtgaaactgtttattttggggaggcaaaaatggctgtccagttctttgctgaagctggttttccatgcccaagtagaagaaacccttcggatcacttcctccgatgtataaattcggactttgacgccataactgccacattgaagggttctcaaagacttcgcgataaaccaacatcctcggatcctttcatggagatggcaacagcacagatcaaggctgcccttgtcgaaaagcaccgggactcaaagtacgcgaaaatggctcgagctaggagtcaagaaatatctaaaattgaaggacttgaggtagaaacaaatagtggaagtcaagcaacatggtggaagcaacttacaacattgacaaaacgatcatttgtcaacatgtgtagagatgtaggatattactgggcaaggattgtgatatacatacttgtatctatttgtgtgggaaccgtcttctatgatgtcggatatggcaatactgcaatccttgcccgagtagcctgcggtgcatttatcacaggtttcatgaccttcatgtccatcggaggttttccttcttttatcgaagaattgaaggttttcaataaagaaaggctgaatggatattatggagttgcggcttatacactttccaatttcttgtctgcatttccgttcctagttacgatttcacttatcacaggaaccataacattttacctggtgaaatttcgatccggattttcgcattatgccttcttttgtctcaatatcttcttcagcatcgctgcgattgagagcctcatgatggtggtagcttcgatggttcctaattaccttatgggaatcgtaaccggtgccggaattatcgggattctaatgatgacatcaggcttcttcaggttgctgcctgatcttcctaagatattctggcgttaccccatttcgtatatcaattttagctcatgggcacttcagggggcgtacaagaacgatttcataggcctggaattcgacccattactaccagggatcggaaactaaccggagatgaaatcattaccaagtactttggggtgacggtagaccggtccaagtggtgggatttaacagcagtggtggtcatccttatatgttaccgccttatcttcttcatcattcctgaagatgaaggaaaaggcttcaccatttttgcaagaaatttatgcaaaaaaaacac

SEQ ID NO: 190422 - DNA, 1240 bp, Gossypium hirsutum
  unsure (1)..(1240): unsure at all n locations
tttaggaaagcatcttcaagtttcaagctttggggttctgttctttttccttcatcttctttctttctttctttctctttacatttgggaagcagaaggaaaaaagcaaagatgaagcttttgtgggtttgggttgttttaccatttgcttttgctcaactggttactgccttctttgattttaatgaaactgagctgtctcttatcgagtctttggaatatggagtctctaaaatcaattataatcctctcatggttggcctcactcttattcatactgctggtgctaaaggagctgtgtgtctggatggaaccttgccggggtatcattggcaccgtggatatggatcaggagcaaatagctggctcattcaattggagggaggaggatggtgcaataacattaaaacttgtgtgtaccgcaaaaagaccagacgcggatcttctacttacatggaaaagcagataccatttactggaatattaagtgaaaaagccgaagaaaatccagactttttcaattggaaccgagtaaagcttcgttattgtgacggtgcctcttttactggggacagcgaaaataagggtgcacaattgcaatttagaggccaacgtatatggttagctggaatggaagatttaatgtcaaaaggaatgcgctacgcaaatcaggctcttctttcggggtgttctgctgggggtctggcagcaattttacactgtgacgagtttagaggcttgtttccaagaaccacaagagttaaatgccttagtgatgctggtctattccttgatgcggttgatgtctctggtggtcacacaattaggagtttatacagcggcgtggttggcttgcagggcgtgcaacataacctgccacgtatatgcaccaaccacctcgatccaacttcgtgtttctttcctcaaaatgtaatcaaccacatccggactccactgtttattcttaacgcagcatatgattcatggcagattcaatccagtattgctccaccatcggcggatccacatggttattggcatgattgcagattgaaccatgcaaaatgctctgcttctcagctccggtatttacaaggcttccggacacagatgcttaatgctataaaagggttctcaatgtcgagacagaatggattatttataaattcatgttttgctcactgccaatcagaaaggcaagacacatggttngctgataattctccttgaattagaaaca

SEQ ID NO: 190423 - DNA, 933 bp, Gossypium hirsutum
  unsure (1)..(933): unsure at all n locations
agactccttattgctttccttgccctctcttaaatctataaataactcctaaatatccagcaaatctccatatccaaacacacaatttcaattccagcagggaaaaaaaaaatggcgacttccaccatgaaaacaagcttcatagccattatcctagcgggaatggttgctggaatggtgaaagctcaatgcggcaacacttgctcggcgaccgagtgttgcagtcggttcgggttttgcgggacgggagacgatttctgcggagtgaattgccgagggggtccttgtgttaacaatggggtctccatagctgccattgttacgcaggaattcttcgatgggatattgaaccaggcggcttccacttgtgtaggaaggagcttttactcgagaggggtgttccttgatgctctcaattctttcactcagttcgcaaggattgggtcggttgaggattctaggcgtgagatcgctgctttctttgctcatgctacccatgaaactggaagtttctgtcacattgaaaaagacggtggagcctccnaggaatactgtgacgagacaanaaccgattatccatgcaacccaagcaaaggttactacggtcgtggaacactgcaactaacatggaactacaactancggacanccggttccgatatcgggttcaacggcttaaaacccaccggaaaccgttggccaacgaacctctttatcttccttcaaaggctgccattttggtttttggaataaacaatggtggccaggcgttgattaaacccaaagggtccccggggccactaattccaaccccattaattgggagaacctttgaatgcccaccgggtgttggattccgaacttaaagatttcagttctccggaattaacttactaaccactccattatttgttagccccacttgggggttta

SEQ ID NO: 190424 - DNA, 398 bp, Gossypium hirsutum
gcggcttccacttgtgtaggaaggagcttttactcgagagggggggtccttgatgctctcaattctttcactcagttcgcaaggattgcctcggttgaggattctaggcgtgagatcgctgcttcctttgctcatgcttcccatgtaactggacgtaagcatctcttcttgctcgtaatcttctgattaaaacctgtcgagacacgtcccgtatagggtttgaagtgcctatgctgggttttatgtctaatgttgtctttcacccttgtcgacaacatgaggaggtgactggctcacaaggtctttttcttaatgagcgaagacacgccttctctgtgaactcgtaaccttctcgagctctcaacagagtcaaatgccaaatgtgttgagagctccac

SEQ ID NO: 190425 - DNA, 420 bp, Gossypium hirsutum
ttttatttgatttggaccaaacaaacattaatgtggagatcaaatttaattaatttaaagttttgaaaccagtcaataagcagcatgaaggctgaaggcagggactggcaaattttaaggagtcttaacaacatgaaacaagattttatgtctttaggaatggaggcttttgcttcttcagtgggtatgggctcaaacaaaagtagcaaataaagaacccatcctctacaaggactcaagctttggcgttcctagtgaagtcgatgcaagtttggcaactgcaatcggtgaacctacagatttcacacccaaagcacacacaggaagtacaacccttgcatgttggagaacgggtgcagcccctgtataccctgcgacttgctcgttcttcttcatcatcacaagttattctgtcatatg

SEQ ID NO: 190426 - DNA, 408 bp, Gossypium hirsutum
gagagaactagtctcgagtttttttttttttttttttactttctcaattaaaagattaatatgggagcattacattaatatggatcctttttggaagtatacaaccatcatcctgaccatcatatgccatcataatatgatggtaagtaccagcacgcatatcatatcatatcatatcatatcatttcctaaccaacatgctacactgtttagaatacgaacctaaagctatttcgatatagcagacggaaagaaccaactttatacaatggctagctgggatgtgtgaatctcccatcggatgaccactgaaaaaggaattaaaagaaaaaacatgaggaattcaaacttgaagacggctatgagcatggagagtaccagaacagcaacagcatgcgcgagaaactg

SEQ ID NO: 190427 - DNA, 693 bp, Gossypium hirsutum
tcagtttcaaacaagggcttgattgcaattgcagagaactgccctaatttgacctctttgagcatcgagtcttgccccaagattggtaacgaaggccttcaagctatcggaaagctttgccctaagttgcaggctgtctgcgtcaaggactgccttcttgttggggatcatggagtttcaagcctgttgtcgtcaacatcttctctcctttcaaaggttaaatttcagggtttgaatatcacagacttttctcttgctgagattggtcactatggcaagtcggtgacaaatctaatgcttagcggcctagaaaacgtgagcgagaagggattttgggtcatggggaatgctcaaggcttacaaaagttggtctctttgacgatcacatcctgccggggggtaacagatgtgagtcttgaagccatgggaaagggatgtgcaaacctgaggcagatgtgccttcgctggtgttgctttatttcggatgacggattggtggcttttgccaaatctgcaggttctcttgagtccttacagttagaggagtgcaacagaatcacccaatccgggactattggtgtcctctcaaactgttcgttaaaatcccttaccgtagtaaagtgcatgggaattaaggatatatcctcggaagttcctttgtcgtgctgcaattcccttaaatcattgtcagta

SEQ ID NO: 190428 - DNA, 984 bp, Gossypium hirsutum
  unsure (1)..(984): unsure at all n locations
ccgcactgttgctgttattgggcccaactctgatgtcactgtaacaatgataggaaattatgcaggagtggcatgtggttacacgagtccattgcaaggtatttcaagatatgcaaggaccattcatcaggcagggtgttcagatgttgcttgcggcacaaacaatctgtttggagcggcggaggttgcagcccacgaggcagatgcaaccgtactcgtaatggggctcgaccaatctatagaagcagaattcagggacagggtagggctgctcttgcctggacgccagcaagagcttgtttcccgagtggctcgagcttctagaggtccaaccgtgctggtcttgatgtcaggtggtcctatcgatgtctcattcgctaagaatgatcctcgagttagtgccattatatgggctggttatccaggccaagctggaggaactgcaattgcggatgttttattcggaacaaccaatccaggagggaagctgccaatgacatggtatcctcaagattatgtagctaaagtcccaatgacaaacatgggaatgaggccatcaagaggctaccctggaagaacctacagattctataaaggtccagtagtgttccctttcggacatggcctgagttatacaagttttaaacactctttagccttagctccaactgatctctcggtacttcttgacaccaatctttttgccaccaaaactactcacattggcaaggcatgccataagggtgaaacatgccaatgtgattcactttcctcctttntacatgaacgtgaaacactggcatatggatggaactacacattgctgtttctcacgccactgctgacaaaatgtcctcgaacaagcattgtagttcccatgggtcacgtgcgccgtctaaacacgcgtagatcatatatgctgcacaccctaacgttgcagaattggatcagaatncatggtccatgttacccctggttcaactc

SEQ ID NO: 190429 - DNA, 919 bp, Gossypium hirsutum
ggtcttgatgtcaggtggtcctatcgatgtctcattcgctaagaatgatcctcgagttagtgccattatatgggctggttatccaggccaagctggaggaactgcaattgcggatgttttattcggaacaaccaatccaggagggaagctgccaatgacatggtatcctcaagattatgtagctaaagtcccaatgacaaacatgggaatgaggccatcaagaggctaccctggaagaacctacagattctataaaggtccagtagtgttccctttcggacatggcctgagttatacaagttttaaacactctttagccttagctccaactgatctctcagtacttcttgacaccaatctttttgccaccaaaaactactcaacattgtcaagcaatgccataagggtgaaacatgccaaatgtgattcactttcctccctttttcacattgacgttgaaaacactggcaatatggatggaactcacacatttgctggttttctccacgccacctgctggacacaaaatggtctttcgaacaagcaattgataggtttccatagggttcacgtcgtcgcccggtcttaacaacgcgtttagatcaatattcatgcctgcaaacaccttagcgttgtcgatgaatttggtattcgaagaattccaatgggttcacatagtttacacattggtgatctcaagcattctatttctctccaagcaaatttggagggcatcaaggtctaaatgctcaacagagttaaaagaacaatataaaaaaaagatccatactaattacaaagttaatatttattaatcttaagctttctaaagaaatctctctcaaataaaatgagataaaaaccttaaaagtttgtgagaagttgaaataccactacacttccaagggaagaaagtggg

SEQ ID NO: 190430 - DNA, 532 bp, Gossypium hirsutum
ccggaaactgatcctaccgttttattcattcactcttttctgcattattctcccgatgaccatgttcgttccagaggctgagcttcctgcatgggttgtttgttacatccctgctacaatgtcgttccttaacatccttccggcaccaaaatccttcccgttcattgttccttaccttcttttcgagaataccatgtcggtgaccaagttcaatgctatgatatctggtcttttccaactcggcagtgcatacgagtgggtcgttacgaaaaaatccggacgatcttcggagggtgatcttgtttcattggttgagaaaaagccaaaacaccatcgggttggatcagaacccaatcttgaggaaatgaaagctgatctccagcaagaacaggaacaaaaggctcgtaaaaagaagcataatagaatatacacgaaggagctctctctggcgttcctcctcctaacagcttcagctaggagcttactgtctgcacagggtatccatttctatttcttgcttgttcaaaggata

SEQ ID NO: 190431 - DNA, 413 bp, Gossypium hirsutum
gtgtgaattctgtgcagttcccagaccctgaggagccaaagcaggcggcggagcagctattggtagtggcggtggtggttgttgttgttgttgttgttgcagcaccaccagcgtggacgcttctggtaacgtcaagggaaggttagtaaaaagagggccaggtggttgtggttgaaccattgctgtcagatgcagctgctgcggtggcggaggcagcggctgtaatggtggaggagacggtgcagcagcagcagcggcagcgttaccacgtaataaaagatcaagccgtggatataaaggccaagacgatccctccgccgtggccgattccgaccgataccgttttttcatggactcgatcttgttcttacactgcgtttgagtcttgggcgacttggtacaattggctcgag

SEQ ID NO: 190432 - DNA, 857 bp, Gossypium hirsutum
  unsure (1)..(857): unsure at all n locations
aagtcatttaagacagtaagactgcatggaggactgatgaagaatttgccagagaaatgctggctggagttaaccctgttataatccgtcttcttcaagaatttcctccaacaagcaacctagatcctaaagtatatggtaatcaaaacagtgccataaccaaggaacacattgagcacaacctagagggactaacagtagaagaggcactgagaaccaacaggttattcatattggatcatcatgattcacttatgccgtacctgcggaggataaacactacgacaaccaagacttatgcgtctcgaaccatcttgcttttacgcaatgatggcactttgaagccattggtgattgaattgagtttgccacattcggatggggatcaactaggtgctgttagcaaggtttacacacctacagaacatggagttgaaggttcaatatggcagttggctaaagcttatgttgctgtaaatgactctggtgttcatcaactcataagccattggctgaacactcatgcaacaatggagccattcgtgattgcaacgaaccgacaacttagtgtagttcatccaatttataagcttctctatcctcacttccgggacacgatgaacatcaatgcttttgctaggcagattctgattaatggaggtggtgtcctggaattaacagtttttcctggaaagtatgcaatggaaatgtcatctataatttacaagagttggaatttgtttgaccaggcacttcttagagatctcaagaaaagaggagttgcagttgattataagagttcaccaaatggtcttcgtttgttgataaaagattatcatatgcgtgacgactgagan

SEQ ID NO: 190433 - DNA, 894 bp, Gossypium hirsutum
cccacgcgtccgcccacgcgtccgcccacgcgtcccgctctctgtagccgccgcctgcgtctctctcttcatctctctgaaccaaaaagtctttagcttttcgcttcgagagagaccatgttggtttaccaggatctcatctccggtgacgagcttctttctgactcattcccctacaaggaaatcgagaatgggatgctgtgggaagttgagggaaagtgggttgtgcaaggagctgtcgatgttgacattggtgccaatccttcagccgaaggtgctgatgaggatgaaggtgttgatgaccaagctgtgaaggttgttgacattgttgacactttcaggcttcaggagcaaccccctttcgacaagaagcagtttgtcgtgttcatcaagaagttcatcaagaacttgacaccaaaactggatgcggaaaagcaagagtccttcaagaaaaacattgagggagcaaccaagtttttgctttcaaaattgaaggaccttcaatttttcgtaggagagagcatgcatgatgatggatgcttggtgtttgcttactacaaggatggtgctgttgacccaacatttttgtactttgcatatgcattgaaggaggtcaagtgctgaggtttgaagcaaagaaaaaaaaagtggttgctgaagaatttagtcctttttattattgcttttgtctcttattttcagtactctgctaaagacataaattatttatggtttttgatgtttttgatttaattgtttgttgttttatcatggaatggtttctatttttatgggttgactaaacaagaatttaactctttgttctattactacttaattttattggaaggaggtttttgggacatattaaataaaaaatttattatttaatat

SEQ ID NO: 190434 - DNA, 1093 bp, Gossypium hirsutum
  unsure (1)..(1093): unsure at all n locations
gagatctctctttgtttatttacctccaaaaatggcatccccttgcccgctaactttgattttgctttctattttcgctttctcggtctccattgctcactccaaaactctcaagagagatgtaaaagccttaaatgagattaaagcatcacttggatggagagtggtatatgcatggattggagatgatccctgtggagatggtgatttaccaccttggtctggtgtaacatgttcgactcaaggagactatagagttgttactgaactggaagtctatgcagtatccatcattggtccttttcctattgctgtaactaatttattggatttaacaagattggatctccataacaacaagctgactggcccaattcctccacaaattggccggctaagacgacttagaatgttaaatttgaggtggaataagctccaagatgtccttcctccggagattggggagcttaaaaaactagcccatctgtcattgagctttaataattttaagggcgagatcccgaaagagcttgcaaatctacccgagctccgttatctctatcttcaagaaaaccgtttcactgggcgaattccacccgaattgggcactttacaaaaccttaggcacttggatgtcggtaataaccatttggttggtaccattcgggagcttattcgtattgaaggctgcttcccagttctacgaaatctatatttgaataacaattatttgaccggaggagttccggctcagctcgcaaatgtgacaaatttggagatattatacctttcatacaacaagatgtctggagtgataccaacggcactcgccgatattccgaagctaacatatttgtacttggatcataaccaattctcaggccgaattcccgatgcattctacaagcatcctttcttgaagaaactgtatattgaggaaacgcattccgctgngcgtaacccatttgtgcaccanggtncttgactttcgaccagattcttgttaagtaaaaactgtcagacacaagcctgtactatcaatctatgccctgattctagtatcaactatnatattgactgaganttgactatn

SEQ ID NO: 190435 - DNA, 462 bp, Gossypium hirsutum
caggtgttcaaggtgaacagccgctggccaatgtatcattgtatgtttgagcaaaaaggactttggcttctcgcttcgagagaaaccatgttggtttaccaggatctcatctcgcggggacgagcttctttctgactctttcccctacaaggaaaccgagaatgggatgctgggggaagttgagggaaagtgggttgtgcaaggagctgtcgatgtatgtcattggtgccaatcctttacccgcaggtgccgatgaggtttacagggccttgtgattcttgttggtagaggctattactgcttatgttaatgttcacatatttatgaatatctagttctttttttttgattgtcattgcttttcggattcgtgtgagggtctaaacaattttatttattcttgtaatatagttactttctagaattgatttttacttgttaaattattacattatttttttt

SEQ ID NO: 190436 - DNA, 371 bp, Gossypium hirsutum
gcgcccacgcgtccgcggacgcgtgggttgtaataccactactgctaacgtcttttcatttatttggagctaaaagtgtttagctcttcgcttcgagagagaccatgttggtttaccaggatctcatctccggtgacgagcttctttctgactcattcccctacaaggaaatcgagaatgggatgctgtgggaagttgagggaaagtgggttgtgcaaggagctattgatgttgacattggtgccaatccttcaaccgaagatgctgatgaggattaaggtgttgctgaccaatcttggaaggttgcccacatttgttgactctatgaagctttttgagcaggctttttgttgacacgaatacaatttttt

SEQ ID NO: 190437 - DNA, 432 bp, Gossypium hirsutum
aaggaatcgaaatccaaagccaaaaaccttcttccaagtgttccttcgtacaccgccaaatgtacaccttcagctaccactcaatttcgccaataaacaacaatcctttcaaatgccaaaggtactagcatcattactcgatctcgtaaccctagaccgaaccgaaagagacgatggcgaagcataccgccgttggctggggtcatcaccactaccatcacttacagaaccgttggcttttggctcttctcttaatgctttcggtttcgacggtgatcgcttttttcatgagaagcgctttcgattcgtgtgatcggactgtttcaggtgctgttgatggtattggttcgtctcggcatgttattcaagtcgctgagaagcgcaccgcgccgatcgcggctgtgaagccgagtccgcttagctttatgaagt

SEQ ID NO: 190438 - DNA, 437 bp, Gossypium hirsutum
gcggaattctacaggaagaagcttgctaggcgacttctttttgaccgcagtgctaatgacgatcataaaaggagtattctgactaagctaaagcagcaatgtggtggacagttcacctcaaagatggagggcatggttacagatctgacattggcaagggaaaaccaggccaactatgaggactaccttaggagtaactcagctgctcatcctgggattgatttaacagttactgttcttaccacaggattctggccaagttataaatcatttgatcttaatcttcctgctgagatggttaagtgtgtggaggttttcaaaggattttatgaaacataaacaaaacacagaaagcttacctggatttactctttgggaacttgccacattaatggcaagtttgagcagaagataatcgaactgattgtttcgacata

SEQ ID NO: 190439 - DNA, 452 bp, Gossypium hirsutum
  unsure (1)..(452): unsure at all n locations
aggcaacaagaatnncgatccatccgccatggaagacctaatgaagcttttcgagatcgaatcttacaaggcatgggcagctttggagctagaggaagacaaacaagtgaaaggagctgaaataaccatgcaacaagcagaggattattttgactcggtcatggaaaccgccgcggatgagttcaggcgattccaggaagaaatggaacgcgaggcaaaagctgaactcagtggtgttgatgatactgctgagacagttaaaaaaatggggggcttgatggaaagttaaatttctatttttaataatcttttatatttactcttttcttttcaattaactttccctgctagacaatcacagcttagcgaaagccgaaaaaacagggatggcggcggctacgacgagcagaacggcttcgcggatgggagctgangatgagaagctagtgttc

SEQ ID NO: 190440 - DNA, 613 bp, Gossypium hirsutum
agaggaagagtagctcgtaaagaactgcggaagcttaagatggctgctagggagacgggagctctgcaagctgcaaagaacaaactggaaaagcaagttgaggaactgacatggagattacaactggagaaacgaatgagggttgacctggaagaagctaaaacacaagaaaatgcaaaactgcagtctgctttgcaagacatacaacttcagtttaaagaaactaaagaattgcttgccaaggaacgtgatgctgccaaaaaggcagctgaggtagtccctataattcaggaagtttcggtggtggaccctctgatgttggagaagcttacaaatgagaatgaaaaactgaaagcattagtgagttcgttggaaaagaaaattgatgaaacagagaaaaagtttgaagagacaaacaaaataagtgaagaaaggttgaaacaagctttggatgcagaatcaaaaatagttcaattgaagacttgtatgcacagtcttgaagaaaagatttcagacattgaatttgaaaaccaattttttgaggcagcataccctattaaatttctgaagaatgcttgagaaaggaaaggcagagatgtgtcttattacctac

SEQ ID NO: 190441 - DNA, 410 bp, Gossypium hirsutum
taatagcaaaggcagtggtggggtgtacaagaaagctagggttcagacgtcttcaagccaaccacctttgaaagtgagaaaggagaagcttggagatagaataacagcacttcaccagttagtttccccatttggaaagactgacacagcatctgtgttgttagaagctattggttatatcagattccttcaaagtcaaattgaggctcttagctccccttacttgggtactgcatcaccaaacatgagaaaccaacaatctgttcaaggagaaaggaattgtgcatttcctgaagatgaaggacaggaaaagcaagagcctaagccaaaggacttaaggagtagagggctgtgcttggttcctgtatcatgcacccaacaagtcggaagtgaaaatggtgccgactact

SEQ ID NO: 190442 - DNA, 737 bp, Gossypium hirsutum
  unsure (1)..(737): unsure at all n locations
cccacgcgtccggaaatatggaagagttgatgtctctggtcctaatgagtgtcctgaagagggcaggctacctgctgctggacccccttcgcctgccgatcatctgcgagaggttttctaccgaatgggattgaatgacaaggaaatagttgcattatctggtgcacacacgcttgggaggtccagaccagaacgtagtggttggggtaaaccagaaaccaagtatacgaaagatggaccaggagcaccaggaggacaatcctggacagtgcaatggttgaagtttgacaattcatacttcaaggatatcaaagctaaaagagatgaagatctgcttgtgttgccaactgatgctgttctttttgaagatccctctttcaaggtatatgctgagaaatatgctgaagatcaagagacattcttcaaggattatgcagaagcccatgccaaacttagcaaccttggggccaaatttaaccctccacaaggcattgttttaaatgatggtgctgcaccataaaagttggccgccaagtgctctgacatgaaaggattaaaaagaaagacaagtttcttggttattgaagtggggtcgtgtgttataataatacaaggtcacatgttacaacttttttcgaagtccaaaactgaaagaggaaagagaaaataaaattcaattcgagtgcttttgaattgaagagagagaagcagaagattggagtagtanaaggagtatt

SEQ ID NO: 190443 - DNA, 973 bp, Gossypium hirsutum
gagataattagattatagtactcgtaagaaaataggaggaggaaaagaggggtgaaaggaaaagaaaagaggctttttcatttttcccacctgaagaaacgaaaatcaaacagtcttttttctcaatccctctctaacaatgagtctcttcggtcttggaagaaatcagagaacattccgccccaaaaaaagtgcaccttctggaagtaagggcgcacagcttaaaaagcacattgatgctaccctgggcagtggaaacctaagggaagcagtgaggctacctcctggggaagatttaaatgaatggctcgcagtcaacactgtggatttcttcaatcaggtgaatctgctctatggtaccctgactgagttttgtactcctgagaactgtcctacaatgactgcaggccctaagtatgaatatagatgggcagatggcgtgcaaatcaagaaacctatcgaggtttctgccccaaaatatgtcgaatatctaatggactggattgaaacacaacttgatgatgaatcgatatttcctcaaaaactgggtgcaccatttcctccaaacttcaaagatgtagtgaagacaatattcaaaagactgttccgagtatatgcccacatctatcactctcactttcagaaaattgtgagccttaaagaggaagcccatttgaacacatgctttaagcatttcatactttttacttgtgagtttgggctggttgacaagaaagagctagctccacttcaagagctcattgaatccatcatagtcccctactaattacaggactggactttggatatactgatgatgtttctttcttcttctttttttctttttttttttctttattttagggatgcaaagtcaaataaattaagagactgttattgcagacgacttaagaaacaagcgtctctaatttatatctctgcgttataaatgcacgttcatatgtcatgttcc

SEQ ID NO: 190444 - DNA, 607 bp, Gossypium hirsutum
aggaaaaaggccttttcagcttttcaagtctcccacctgaagaaaggcaaaaaaaaaaaaaggaatctcctcctctctctctctctaaccatgagtcgcttcggtctgggcagaaatcaccgaacattccgcccaaaaaaaagtgcaccctcaggaagtaagggtgcacagcttaaaaagcacatcgatgccaccttgggcagtggaaacctaagggaagcagttaggctaccccctcgggaggatttacatgaatggctcgcagtcaatactgtggatttcttcaatcaggtgaatctgctctatggcaccctcactgagttttgtactcctgagaactgccccacaatgactgccggccctaattatgaatataaatgggcaaatggtgtgcacatcaataaacctatcgaggtttccgccccgaaatatgttgaatatttaatggactggatcgaatcacagcttgatgatgaatccatatttcctcaaaagcttggtgtagcatttccttccaacttcaacgaagtcgtgaagacaatattcaaaaaacggtccgagtatatgcccacatctatcactcacacttccagaatattgtgatgct

SEQ ID NO: 190445 - DNA, 549 bp, Gossypium hirsutum
ccagttctgggtttgccttaaaccacaataaaaatggcttcttgactctcttttccatgccccaatatcttttttttttgaaacaaaccagcaaacccaaactcacaagggtttttttgtctcttcctccaacttcaaatttcaactccaaatattgcaggcgtttgaagagttatcgcagtgtggtaccaaggatgaagggcttccgttggatgaattctgtgatgcttgttctttggtttctggtctttttaaactccctcggtctcgccttcaaattcccggagatggagtacgtcgccaagctgtggatttcttcaatcaggtgaatctgctctatggtaccctcactaagttttgtactcctgagaattgccctacaatgactgcaggacttaagtaagagatataaactagattccttttgcccttttcaataaatcgaaactccctcaacttgaatttaggctctttatctcttcgagctagatgatactgtattaatttatttttgttaaagttatatatatttgccttattttttttttg

SEQ ID NO: 190446 - DNA, 625 bp, Gossypium hirsutum
cgaagaacttgcggatgaaaaatacgagagcggctacgagaaaaacaactacaattacaacaacaacaacaatggctacaccacaagtaagtacaacaacaatggctacactctcagcagcgacaacaacaatggctacagcgggaactacaacaccaatggctacaatgacaactacaacaacaatgggtatgagacagagagacaaggaatgagtgacaccagatttgtagaaggtggtaagtattattacaatatgaagaatgagaagtactaccctaatggatatgagttttcatcaagcaagggaactactaaaaatgaaggttactatgggaatacagagaactccaatgagttcaactccatggaagagtttcagaacaaggaagatcagtacatggagaggcaagaagagtatgtgccctagatatttgattatcatgattcaagaatgaaaaaggaaacaggagtttgacatatatagtggttcatatatttaaagatgaggaagattgaagtttatgaagtctttcctgtgttttattattttatagcattcacttgtgtttgcacaatagttcatgctttacaaatcaaaatggatccaagactatacagtttc

SEQ ID NO: 190447 - DNA, 1577 bp, Gossypium hirsutum
tctcgctagccttccaaatgtgactgagaagggcttctgggttatgggtaatggtcatgggctacagaaattgaagtctttcactgttaaagcctgccgtggagtgacagatttgggacttgaagctattggcaagggttgcccgaatttgaagcagttctgcctcggcaagtgtgccttcttatctgataatgggttggtgtcttttgccaaagcagcaggttcactagagagcttggaactggaggagtgccactgggtcacccaatttgggttttttggttctcttattaactgtggtgcaaagttcaaatctatctctcttgtgaactgcttggggatcaaggacctaaatgtaggattgcctcctctaccaccttgtgagtcccttcgatcgctgtctatccgtaactgccgggggtttggtgatgctagcttggctgcgttggggaagttgtgccctcaactgcagaatgtggagttgagtgggcttcatggaataacagatgttgggtttttcccattgctcgagagttgtgaggccggtttggtgaaggttaatctcagcgcccgtcccaagttgggtaacatagttgtttgtaagatggctgttctccatggtcggactctagagatgctgaatcttgatggatgcaagatcagtgatgcgggggtggttggaattgcagagaactgtcagttgctcagtgatctcgatgtctccaagtgcacaataaccgactctggaattgcagctcttgctcgttctaatctgatcaatctgcagatcctatctgcgtctggttgcaatctggtctccgacaaaagcctgccatcacttggaaaattgggtcagaccctcttggggttaaatctacagcagtgcaaggcaatcagcagtggtgcagttgacctgctagtggagcagctatggaggtgtgatatccttttctaaacgatgttgcagtatgggattgtcaacaactcgggttttgacccttcgagaagcttcagaatagcctttgttagtattagcagtttgtgtagtttttgggtccatcatctatgggtcttccattgtccagtactcagtccccttttccagggaatacggccattttccttgtttcttttttgcaagtctctttacatcagagatctgttaccaggttttgaatcccaataatgggtgtttgtttcttcatggccggagttccctgagaatatagtcgctgctgggttccggattttagggaatcttttcttccttcctcgtaaaggttttagtctgctgggtttctggtgtttttgctgagcaatgttcatttctgcttgagctaagctttttgttatttgttactgtctttcgtccatcatagttggttttaccgagtctcccacgtttttgaactcaaatgttctacacgtgatggttgggtctttttcttttcttacagtggcggattgaagatctcgagtcattgtagttatggttcgcttttggcagttcaaagtgtgggtctagctttcacgggctttggccatggcagcagtttatgtagtctgccatgacaact

SEQ ID NO: 190448 - DNA, 572 bp, Gossypium hirsutum
gccaaaatcttcaccttttaaagccttcaaactttccaaaggaagccatggaaaggcttctttactcctcttctccaactcctttggagatctctcgaaagccctctccttttctctctcgactcgccagattcgactctcctactctgggcttcgttccttcgctcactcgcccccaactcaggcgattcatttctatttcatgcaaggccgaaaataacccatctcacttctcttatcctctatccaatcccagcaatgaattgccttcactcggttctccgcgagtcgactcggcaaatgggtcaacacccacttccaattttctcaagctttttgcaattaaagcttctgcacaaagaaaggcaatcacagcagggacatatatagcactctctgccattatcatgttcttaatccaaccaatttttgtaccaacagcttttgcaacctttcaagctggtgctaaagccggtggaactgcatatgctgcaattaggggtggagttcttcgtactgaattactaagtaatgcatcgactggtttccttgctggttggttacattcccta

SEQ ID NO: 190449 - DNA, 820 bp, Gossypium hirsutum
cggacgggtctcttttgattgcacaaaaccaaatcttctttgctttgctattttggttcgttttgctaagaactggctaacgcacagcaaaaaaccgtggaggaaaccaacaagaaccaagcggtggttcttgccctctatgaagccttaaacacacgagacgtcaacaccgttcaccaaatccttgctcccgacctagagtggtggttccacggtccacccactcaccagtttttgatgcgcttactcaccggcgcttcatccgacgatcctttccgtttcgaggtcgaccctgtctcagtcaccacctttggatccaccgtcatcgttgaaggctgtgataacagccgttcgatctcctgggttcacgcttggactgttcgtgatgggataatcacccaagtgagggagtatttcaacacttctctcaccgttactcgccttagagactctccaccgtcagcttgcagttcttcgacggcggagattgcgccagtgtattgcccttacgtttgggagagtagtctttccaaccgggtggggaaatcggttccaggtcttgttcttgcaatttagtttcctcctcccacgtgtggctaagataacagatgttagttccatgagttgagtttggtctggtgttaaaaattattgtgtctggactgtcaatttggtaacttattagtattgttgtgtttcaagtgttgtcttccaatgcaattggatttagtgaagtgtgtggggtccggtatgagaagagttcctccacctcctcattttcagtgtttccattgtgtaataaaaatctgctatcttcttc

SEQ ID NO: 190450 - DNA, 802 bp, Gossypium hirsutum
  unsure (1)..(802): unsure at all n locations
ccggtacggaccggccgggacgaaccacgcgtccaaacgttccgaaacccaccaaaataatgaccacttcgttgcttctatctcttttattcagctttgtaatacttgcttcagctgccaactttaaccaagacatcgatgttacttggggtgatggcaggggcaagattctcgaaaacggaaaccttctcactctcaccctcgacaaattctccggctctggttttcaatccaagaaccaatatctgtttgggaagatcgatatgaacattaaactggtcccaggcaactctgctggcactgttaccacttactatcttcgttcggaagggtcgacatgggatgaaatcgacttcgagttcttggggaacctaagcggagacccatacatagtccacaccaatgtatatacacaaggcaaaggtgacaaagagcaacagttctacctttggttcgatcccaccaaagacttccacacctactcccttctttggaaccctcaacgtattatcttctctggttgatgggactccgatcagggagttcaaggacttggaatcgatgggcgttgcgttcccaaagagccagccgatgagtgtgtattcgagtctttggaacgccgataattgggccactcgaggtggccttgttaagacagattggagcaaagctcctttcactgctgcttacaggaattacaaggctgatgcatgtgtctnggtctccgggaaatcatcatgttcctccacctcgccctttcaaaattcatggcaatcgcaagaactggatataacgagccaat

SEQ ID NO: 190451 - DNA, 690 bp, Gossypium hirsutum
  unsure (1)..(690): unsure at all n locations
cgtccggcagaattccgcaccagggaaccctctacttgacaaataaaatatgaagagttcattgctagtatctgttgtaatcagcttggtaatagttgcttcagccgccaactttaaccaagacatcgacgttacttggggagatgggaggggcaagattctcgaaaacggaaaccttctcactctcaccctcgacaaattctccgggtctggttttcaatccaagaaccaatatctgtttgggaagatcgatatgaacattaagctggttccaggcaactctgctggcactgttaccacttactatgtaagttttatcatcatacttgtctcttattaacattagaactctgtgttgatatgtggggtgacaattgcagcttcgttcggaagggtcgacatgggatgaaattgacttcgaattcttggggaacctaagcggagacccatacatagtccacaccaatgtatatacacaaggcanaggtgacaaagaacagcagttctacctttggttcgatcctaccaaagactttcataacctactccttctttggaaccttcnacgtattatgtacgtcttcttttacaatcccattttctaaaacgtttcagttcgatatgttcatttgttaattgggatcttttgatgttacagctnttctgtgatgaccccaattgagagttaag

SEQ ID NO: 190452 - DNA, 1005 bp, Gossypium hirsutum
cttcgcttcatgggcgggcgcatccactgcttcctcgaccagagcaggtttggcctcagcctttttcttcttctttgggaccgtgtcttgctcctcgagagcagtggagtttgttatttgcccaataagtgaatctgctgcagggttgtaggtcttagcaggagttatcaacccagcccccttcttccggtccttgtcatagacttctatcttcggcttgcctttagctgaacccgcagaacggcccaattctttgccttcaagtgcccttaatcttgcttcaagcttggctcggttctcaagtcccatggaattatcttggtcatctccaagagcatcacaacgaattgccaatgcagcctttgcggcaagtgacctggaaatcttccccttgtgttttggtgctgcctgaccaaccaaggatgcatggtagatgagtccgtatttgggagtcgaatgctttgtcttcagagctctgaagagagccttctccgcacctagaatctgaacagtactaccaggctgtttggcaagatttattaagctgccaccatgagcaatgagacgagcaccaacaagttcaccgacaagagcagtcaagtttggtgcaacagtgttcatcctgctctttaaataatcatatagctgagctcggtattcagaaagattgagaacctgatcacataaatctttgatatttgtcagatcaaggtcactaatttcagtccccatggatatgactgctgcctcctttaattctgtctcaaactcttctggtaatacctctgagaagtcgagcttagcagcattagcacggtcacccattagttttactgccttggcatacatgatattgtcttgtatgatcttagtaagctctggaaaatgccaaccataccattcacgaaccctcattgcatatgtgttgagctctttatcaaggtcatcaagcaaaccaatggcttgaacaatcattgtatcaaccttatcagcactgaactttag

SEQ ID NO: 190453 - DNA, 413 bp, Gossypium hirsutum
atgacaggtttgtcttcccattattgattatgttcttatatgataaattgcatttatcatgttcaagcctgttgcctcatgcgcattaaggcattagtaattcttaaacatgcttctaaatccatgttgtaagaattaaaatgtaatatgtagataatgcttgtagtaacaagacacttatttatctccaatttaatatgcatattggagtacgacttttcaaaatccataagattatttcatgatccgtttcatcttttgcttctctatcatgaaggcatttcatgcgctgtagctcaatatatgactacctaggaggcatggacacggacatgtttttggacataccagaatatgtatcagactgagtcggatacaaaaaatataaaatgatattatttctaaacggagtc

SEQ ID NO: 190454 - DNA, 1108 bp, Gossypium hirsutum
atcacccctaaattccccaccactttccctctccacctccacctccgcctttcctcctccgccacctgtctccgtcacagccgatcttccccgttcttaacagcaacaacaacaactcgggtggcggcggtggaaacgatgagaatggaaaacacaggggtggtgatgacgagaatgcgggtgataagaacaggaaagaggcgatgattgtactggcggaggcagggaggtcaacggagagtctgccgaaggacttggcggcggcgatccaggctgggaggatccctgggtcggtcatagagaggttcttggggcttgaaaaatcggggcttatgagatggttgatgcagtttggagggtttaaagaaaggcttttggctgatgatcttttcttagctaaagttgcgatggagtgtggtgttgggatcttcaccaagactgctgcagaatatgaacgtcgcagagaaaactttttcaaggagctggagatcgtttttgctgatgtggtaatggccataattgcagatttcatgcttgtgtatcttcctgctcctactgtttctctccggcctcctcttgcagtcagtgctggagctatttccaagttcttctatagctgccctgataatgctttccaggttgctcttcctggtacttcgtattcacttttgcagagattaggagcagtaatgcgtaacggcgcaaagctttttgcagtgggcaccacttcttcgctggttgggacagccatcacaaatgctttgattaatgctaggaaggccgttgataagacatcggcagctgaagttgaaaatgttcctatactatccaccagtgttgcctatggtgtatatatggcagtttcgagcaacctcaggtaccaagtgctggctggtgtaattgaacaacggattctggagcctttgttgcaccagcacaagcttatgttgagtgcaatatgctttgccgttagaacaggcaacacattcttgggttctctattgtgggtggattatgctcgcttggtcggtattcagaaggctcacgaagaggacacagcagcataggttgaggttggaaccaaccagttatggtggttttccccatc

SEQ ID NO: 190455 - DNA, 419 bp, Gossypium hirsutum
gttagatcacaacaactctgctacgaaatgatttgggtctttcatcgttaatccttttatagataaatagaatatgcattttatgtgttcgctgtttcgcctgttccattagctgtttaatggtggagatttgcttccctcactatgatgtgtagtattaaagagatttgtgaagaactaagcatgttttatcgattcgaaacatattttagaagattccaagtagtgactagaacactgtgaatgaaatggcaaaaatctttcagcagcttaatttttagaaaattactaacattttatgaatttgtataaactatgaagctatctttctctgatccgacacatatctggatatggatacgagggtatgatgttctaagagggctccaagtattcaatactgacacctgggtctgaat

SEQ ID NO: 190456 - DNA, 1250 bp, Gossypium hirsutum
  unsure (1)..(1250): unsure at all n locations
tcggtcgcgtgggcggacgcgtgggcggacccgtcggtttgctctgtatattgaaattttctttctcgattttctatttagccaaacaagatgcagatcttcgttaagactctaaccggcaagacgatcactctcgaggtcgagagctccgatacgatcgacaacgtgaaggccaaaatccaagataaggaaggcatccctccagaccagcagcgtctgatcttcgccggaaaacagctcgaagacggccggaccttggccgattacaacatccaaaaggagtcaactctccacctcgtcctccgtctgcgcggtgggatgcaaatcttcgtgaaaaccttgactggcaagacaatcactctcgaggtcgagagctccgacacgatcgacaacgttaaagcgaagatccaagacaaggaaggcatccccccagaccagcaacgtctcatcttcgccggaaaacaactcgaagacggccgtaccttggccgactacaacatccagaaggagtcaactctccaccttgtccttcgtttgcgcggcgggatgcaaatcttcgttaagacgcttaccggaaagacgatcactctcgaggtcgagagctctgacacgatcgacaacgtgaaagccaaaatccaagacaaggaaggcatcccgccagaccagcaacgtttcatctttgccggaaagcaactcgaggacgggcggactttagccgattacaatatccagaaggaatcgacccttcatctggttttacgtcttcgaggtgggatgcagattttcgtcaagactttgactgggaaaaccattactttggaggtggagagttcggatacgatcgacaatgttaaggcgaagattcaggacaaagaaggaattccaccagatcagcaaaggttgattttcgctgggaaacagttggaagatggaaggactttggctgattacaatattcagaaggaatccactctccaccttgtcttgcgtcttcgtggtggtttctaagctctcctatgaaaatgaggtttctggattttatgtgaatgattgtgatgtctggccctgttaaggcctcataaataaacctaaactattttatctatgttttatcttatgtaatgatattatatgaataaaaattacatgtttaccttaannnnnnnnnnnnnnnnnnnnnnnnnnnnnnnnnnnnnnnnnnnnnnnnnnnnnnnnnnnnnnnnnnnnnnnnnnnnnnnnnnnnnnnnnnn

SEQ ID NO: 190457 - DNA, 1338 bp, Gossypium hirsutum
accgattcaagctcttctcaaatcttttttcaatcaactctctccaaagatgcagatcttcgtcaaaacccttaccggcaagaccatcaccctcgaggttgagagttctgacaccatcgacaatgtgaagtctaaaattcaagacaaggaaggcatcccaccagaccagcagcgtctcatcttcgccggaaaacagctcgaggacggccgtaccttggccgattacaacatccagaaggaatctaccctccaccttgtcctccgtcttcgtgggggtatgcagatcttcgtcaaaaccttaaccggcaagaccatcaccctcgaagtcgagagctccgacaccatcgataatgtgaagtctaaaattcaagacaaggaaggcatcccaccagaccagcagcgtcttatcttcgccggaaaacagctcgaggacggccgtaccttggccgacgcgtccgaccacgcgcgcgtttctattttgttttctcttcctccaattaagatgcagatcttcgttaagaccctgaccggcaagaccatcaccctcgaagtcgagagttccgacacgatcgacaacgttaaggcgaaaatccaagacaaggaagggatcccaccagaccaacaacgtctcatcttcgccggaaaacagctcgaagatggccggaccttggccgattacaacatccagaaggagtccaccctccatctcgtcctccgtctacgtggtggcatgcagatcttcgtcaaaaccctgaccggcaagaccataactttggaagtcgaaagctctgacaccattgacaacgtcaaggccaagatccaagacaaggaaggcatcccaccagaccagcaaaggctcatctttgccgggaaacaactcgaggacggtcgcaccttggccgattacaacatccagaaggaatcgactcttcatctggttctacgtcttcgaggtgggatgcagatcttcgtcaagactttgaccggtaagaccattactttagaagtggagagctcggatacgattgataacgtgaaagcgaagattcaggacaaagaaggaattccaccagatcagcaaaggttgatttttgctgggaaacagctggaagatggaaggactttggctgattacaatattcaaaaggagtccactcttcaccttgttcttcgtcttcgtggtgggttctaagccttaaggtcttccttaatgtgggttttctggttttacgtgaaggattgtgccctttgatggccttttaaataatttctagtctttgtttaccggttgcatctatgtatggtttctctttgaatggaatttgcatatttacctat

SEQ ID NO: 190458 - DNA, 827 bp, Gossypium hirsutum
ggctccacggcggtggcggccgcgtcgacggaagagagagagagggaggaaaagatgcagatattcgtgaaaaccctaaccggcaagaccataactctcgaggtcgagagcagcgataccattgacaacgtcaaagccaagatccaagacaaagaaggaatcccaccggaccaacaacgtctcatcttcgccggaaaacagctcgaagatggccgtaccttggctgactacaacatccagaaagaatcaacacttcatcttgttctgaggttgagaggtggaattattgagccttctttgatggctttggctcgcaaatacaaccaagacaagatgatttgccgcaagtgttatgctcgtctgcatccaagagccgtgaactgccgcaagaagaagtgtggtcacagcaatcagttgaggccgaagaagaagatcaagtagacactgactggtgttatcctgtctgctttaaaagaaattgaatgtcagactaggaaaatatttccattgagttcttttgctattattctattttgttgagattttgtttgtgggttctggatttgatgttccaatgtatgtttggacaatcttatgtcttttgtcttggaattttgataaggaggtggaaattttaagtaatgctagttttagaaatattatttaaaaattgaaaaaaaataaaattataaaaaaaaaaaaaataaaaataaaaaaaataataaaaaataaaaaatttttaattataaaatatttattaaatttgggggcggcctttttagaggatccaagtttttttacgcgggcatgcgaagtaataacttttt

SEQ ID NO: 190459 - DNA, 764 bp, Gossypium hirsutum
  unsure (1)..(764): unsure at all n locations
aattttctttctcgattttctctttagccaaaaaagatgcagatcttcgtcaagactctaaccggcaagacgatcactctcgaggtcgagagctccgacacgatcgacaacgtgaagaccaaaatccaagataaggaaggcatccctccagaccagcagcgtctgatcttcgccggaaaacagcttgaggacggccggaccttggccgattacaacatccaaaaggagtcaactctccacctcgtcctccgtttgcgcggtgggatgcagatcttcgtgaaaacccttgaccggcaagaccatcactctcgaggtcgaagagctccgacaccatcgacaacgtcaaggccaaggatccaagacaaggaaggcatcccccccgaccagcagcgtctcatcttcgccggcacaacagctcgaagacgggccggacaccttggccgactacaacatccagaaggagtccaccctccacctcggtccttacgccttgcgtggcgggcatgcacaatcttcgtcaagacgcttaaccggcaagaccatcaccttctgaggtcgagagctccgacaccatcgacaacgtgaaggccaagatccaagacaaggaaggcatcccgcctgaccaaccagcgtttgatcttcgccggcaaagaactgggacggcgccttaccgttcatatccgaagatcgatttcattggctggnntcagtganacgactgtagaattgcggagcatctctttatggactcgatcatgtacgaa

SEQ ID NO: 190460 - DNA, 1203 bp, Gossypium hirsutum
gcaccggcccggacacggtccggaatgtacccacgcgtccgtctctacaaacccatatttcccttggaagaagatgcagatctttgtgaaaacccttaccggcaagaccataacactcgaggtcgaaagctccgacaccatcgacaacgtcaaggccaagatccaagacaaggaagggatcccacccgaccagcagcgtctcattttcgctggcaaacagctcgaagacggtcggacccttgctgattataacatccagaaagaatccaccctccacctcgtcttacgccttcgtgggggcatgcaaatctttgtcaaaaccttaaccggcaagaccatcaccctcgaagtcgagagttccgacaccatcgacaacgttaaggccaagattcaagacaaggaaggaatcccacctgaccaaccagcgtttgatcttcgctggcaaacaattgaggatgggaggaccttggctgattataacatccagaaggaatcgacccttcaccttgttttgaggcttcgtggaggcatgcagattttcgttaagacattgactgggaaaacaatcacattggaggtggaaagttcggatacaattgacaatgtgaaggcaaagattcaggacaaggaaggtatccccccagatcagcaaaggctcatctttgctggcaagcaattggaggatgggaggactttagctgattataacattcagaaagagtccacccttcaccttgttcttcgtctccgtggtgggcagtgagaagttaattcttcttctgtctttgttctagcttaagatggtcacaaataagcctttaggaaagtgcctattttcttatctcttaatgtaacatgttaatctaggtagaccttctgtttggaataaaagtttggtgatttcgaaaaaaaataaaaaaaaaaaataaaaaaaataaaaaaaaaaaaataaaataaaataataaaaatatataataattttaaaaagataataaaatgtaaaagtaaatgatttttaaatgtaataataaaagaaaatttaaagaatttgaactcttttcatcttttttgttgactatttaaaatggtttatgttttagtagattatggaaattagcttgtataaccttttatattttttttatttataatgtcaaagaaactttattttttgcctgttttttacataaaaaaaaaatttaa

SEQ ID NO: 190461 - DNA, 923 bp, Gossypium hirsutum
gctcttctcaaatcttttttcaatcaactctctcaaacgatgcagatcttcgtcaaaacccttaccggcaagaccatcaccctcgaggttgagagttctgacaccatcgataatgtaaagtctaaaattcaagacaaggaaggcatcccaccagaccagcagcgtctcatcttcgccggcaaacagctcgaggacggccgtaccttggccgattacaacattcagaaggaatccaccctccaccttgtcctccgtcttcgtgggggtatgcagatcttcgtcaaaaccttaaccggcaagaccatcaccctcgaagtcgagagctccgacaccatcgataatgtgaagtctaaaatccaagacaaggaaggcatcccaccagaccagcagcgtctcatcttcgccggaaaacagctcgaagatggccgtaccttggccgattacaacatccagaaggaatccaccctccaccttgtcctacgtcttcgtgggggtatgcagatcttcgtcaaaaccttaaccggcaagaccatcacccatcgaactccttgagctctcatcgccggcgataatgggaagtctagaaaggattaaaacttcagcatcccaccagaccagcagcgtcttatcttcgccggaaaacagctcgaggacggccgtaccttggccgattacaacattcagatggaatccaccctccaccttgtcttacgtcttcaagggggaatgcagatctcagtgttggtgctaccacaaacttacaggatgtcgaaaatgatatttttcccaataagaacgagtttgacgatggtgatattgatgatgagattgatccgacattgaaggaaaaaattgatagggaggtggaagattttgcccgtagattgaattcagattggccggaaagaatgcaagaaattctc

SEQ ID NO: 190462 - DNA, 603 bp, Gossypium hirsutum
cccacgcgtccggaaaaagaatttttggatcaaatagagaaacataagcggcataagagttttaaggaaaatgcagatcttcgtgaaaaccctaactgggaagaccataaccctagaggttgaatccagcgacactatcgacaatgttaaggctaagatccaggacaaggaaggtatcccgccggaccagcagaggttgatcttcgccggaaagcagcttgaggatggtcgtacacttgccgactacaatatccagaaagaatcaacattgcatctggttctgaggcttcgtggtggcattatcgagccatctttgatggcattggctaggaaatacaaccaggacaagatgatctgccgcaagtgctatgctcgtctgcacccccgtgccgtgaactgcaggaaaaagaagtgtggacacagcaatcagttgaggccaaagaagaagatcaagtagattacatatctcgacggaggattatacttttattatcagatttctggttggaaactattgttctattaccagacatctttaatttcgtttagcttgaaactctcttgtagtttatgttcttccatttgtacttgaatgcaagttct

SEQ ID NO: 190463 - DNA, 671 bp, Gossypium hirsutum
cggacgcgtgggatttgtttgctctgtatattgaaattttctttctcgattttctctttagccaaaaaagatgcagatcttcgtcaagactctaaccggcaagacgatcactctcgaggtcgagagctccgacacgatcgacaacgtgaagaccaaaatccaagataaggaaggcatccctccagaccagcagcgtctgatcttcgccggaaaacagcttgaggacggccggactttagccgattacaatatccagaaggaatcgactcttcatctggtcctgcgtcttcgaggtgggatgcagatcttcgtcaagactttgaccggcaagacgatcaccttggaggtggagagctccgataccattgagaacgtgaaaggcgaagattcaggacaaggaaggaatcccacctgatcagcaaaggctcatctttgccggcaaacaactggaagacgggaggactttggctgattataacattcagaaagagtctacacttcaccttgttcttcgtctccgtggtggccactgattattctaacacaaccatcttgccttggtttcaagttttaaagtgctcgtgtgtctttctaacttggatttctgggtcttgtcccctttgtaatacttttacttctcctctggaataaaaaagttggttttcttttcc

SEQ ID NO: 190464 - DNA, 683 bp, Gossypium hirsutum
ttccacgcgtccgcccacgcgtccgcccacgcgtccgcctaatcaggttgtcagtatactttgttagattcagatacagaagcagaatcagaatcagggtttgaaaaaaaatgcagatcttcgtgaaaaccctaacagggaagaccataaccctagaggtcgaatccagcgacactatcgtcaatgttaaggccaagatccaggacaggggaggtatcccgccggaccagcagaggttgatcttcgccggaaagcagctcgaggatggccgtactcttgccgactacaatatccagaaagaatcaaccttgcatctggttctgaggcttcgtggtggcattatcgagccttctttgatggcattggctaggaaatacaaccaggacaagatgatctgccgcaagtgctatgctcgtctgcacccccgtgccgtgaactgcaggaaaaagaagtgtgggcatagcaatcagctgaggccaaagaagaagatcaagtagattggatatcttgatggagttttaaagtcattcaatttcagatgttctgtttggaatttgaatggtgtagtgctaataacagatcttaattaccttctaagttgcctttgatttctttaagcttgaacctctcccttgttttatgtcattaattttgaattttatgatatgatattggagttcttt

SEQ ID NO: 190465 - DNA, 721 bp, Gossypium hirsutum
cccacgcgtccgcccacgcgtccgttgacgcgtggggcgcggtgggatgcaaaggttcgtgaaaaccttgactggcaagacaatcactctcgaggtcgagagctccgacacgatcgacaacgttaaagcgaagatccaagacaaggaaggcatccccccagaccagcaacgtctcatctttgccggaaaacaactcgaagacggccgtaccttggccgactacaacatccagaaggagtcaactctccaccttgtccttcgtttgcgcggcgggatgcaaatcttcgtgaagacccttactcggaaagaccatcaccctcgaggtcgagagctctgcgacacgatcgacaacgtgaaggccaagatccaggacaaggaaggtatcccgccggaccagcagaggttgatcttcgccggaaagcagtttgaggatggtcgtacacttgccgactacaatatccagaaagaatcaacattgcatctggttctgaggcttcgtggtggcattatcgagccatctttgatggcattggctaggaaatacaaccaggacaagatgatctgccgcaagtgctatgctcgtctacacccacgtgccgtgaactgcaggaaaaagaagtgtgggcatagcaatcagctgaggccaaagaagaagatcaagtagattggatatcttgatggaagtttaaagtcattcaatttcagatgttctgtttggaat

SEQ ID NO: 190466 - DNA, 539 bp, Gossypium hirsutum
tttcagtataaaaccctaacaatccgccactaaagcacagcttaaatataaagaaaaaaagatgcagatattcgtgaaaaccctaaccggcaagaccataactctcgaggtcgagagcagcgacaccggcgataatgtcaaagccaagatccaagacagagaaggaattcccccggaccagcaacgtttaatttttgctggtaaacaacttgaagatggccgtagattggctgattacaacattcaaaaagaatcaacgcttcatcttgttttaaggttgagaggcggaattattgagccttctttaatggctttggctcgtaaatacaaccaagacaaaatgatttgccgcaagtgttatgctcggttgcatccgagagcagtgaactgtcgcaagaagaaatgtggtcatagcaatcagttgaggcccaagaagaagatcaagtaaaccatgactgacgatggtggtttatgtcatttgcttcaaaagaacttgaataccagacttgtcaaatattttttttcccatttggttcttt

SEQ ID NO: 190467 - DNA, 603 bp, Gossypium hirsutum
cggacgcgtggggtctttatacaagctttcttcaatttcaacattcaagattccagtgtttgcaaggatgagttctactagcagagcatggattgttgcagctagtattggagctgtggaggctctgaaagaccaaggtatctgcagatggaactacacagtaaggtcagttgcgcagcatgccaagaaccatgtgaggtcagcttcacaggccaagaacctctcttctcaatcctcagctgcaatttcaaagggactgaacaagtctaaacaatcagaagagtctttgaggacagtcatgtacttgagttgttggggtcccaactgagccttaaatctgtcaaaatcgcttacaatttagaagaaacatcctttatttgggtgaatcattgactcgtgagtgcaagctttggtcattcagaagagggttgaacgacgactgagcaatcaaacacattgaggcttttgcaggcagaatcatgtaataaggtccaacatgtcaacaacaagctcagatcatattctcaggccaacatatttcctcctcctgcaattgttccaaacatacatgtatatgtataaagttgtagtatgttagatgac

SEQ ID NO: 190468 - DNA, 624 bp, Gossypium hirsutum
  unsure (1)..(624): unsure at all n locations
gagagagagggaggaaaagatgcagatattcgtgaaaccgctaaccggcaggaccataactctcgaggtcgagagcagcgataccattgacaacgtcaaagccaagatccaagacanaggaaggaatcccaccggaccaacaacgtctcatcttcgccggaaaacagctcgaagatggccgtaccttggctgactacaacatccagaaagaatcaacacttcatcttgttctgaggttgagaggtggaattattgagccttctttgatggctttggctcgcaaatacaaccaagacaagatgatttgccgcaagtgttatgctcgtctgcatccaagagccgtgaactgccgcaagaagaagtgtggtcacagcaatcagttgaggccgaagaagaagatcaagtagatcccgactggtgttatcctgtctgctttaaaagaaattgaatgtcagacgaggaaaatatttccatttggttcttttgctattattctattttgttaagattttgttttgggttccggatttgatgttccaatctatgtttggacaatcttatgtgttttgtcttggaaattttaagaacactgttttagaaatattatttaaaaatgttagtgtt

SEQ ID NO: 190469 - DNA, 483 bp, Gossypium hirsutum
tcgaatttactctgtggaatcagacaaattacaaataacgtttggtaccctgtgtgctcgccgagtatttttgggtggctgtttattataatcaaaaacaaaattctctgattaattgagtgtaagcccgcattgtgggacaaaaatctccaagtataagcccttattctgctgattatatcttattgatttgcatttcatgattaagagggttctggatttgatgttccaatgtatgtttgggcaaatcttatgtcttttgtcttggaattttgataaggaggtggaaatttttagtaatgctagttttagaaatattatttaaaaaaaaaaactgagcgactaaaaaagaagaaaaagaaagagttaataaatataaaaataatagagaagaacttcggctccaaaataaaaatgatctggctggcatgcatcaaagctaacatcgatccgtctttgaggtagataaaaaaatatacataa

SEQ ID NO: 190470 - DNA, 418 bp, Gossypium hirsutum
gaagatcgaagacccggagattgtacacgggctagcaagtcacagcaagaaaggtgaagattttacgttgcttaaaacagaatgccaaagagcgctaggagatggtttcaccacattctcggtttttgggctctttgacggacacaatggatctgcagctgctatttacacgaaagagaatcttcttaacaatgttctaagtgccattccggcagatcttaatagagatgaatgggttgctgcccttccgagagctttggttgcaggtttcgttaaaacagataaagattttcaacagagagcaaaaacgtcaggaactactgtaacctttgtgatattagaaggatgggttgtaacagtggcatctgttggtgattcctgctgtatatttgaatcagctgaaggtggaatatatcac

SEQ ID NO: 190471 - DNA, 668 bp, Gossypium hirsutum
cttagttcaaagagggtccaatcgtttcgaactataagagaagaagaagttgcagcaatgttgaatcatattgatatagcttcctcgtcatcagcccctgtaaatcttaaaaaactatcacttttgttagcgaaccacgttgtatgtcgcgttacatttggtaaaaaatacggtggcggaggtgacggtggtacgaacagattcgacagggtgttgcatgaagttcagcatctggtgggagaatttgttgtgtcggattactttccgtggatgtggtgggtgaataagttgaatggtatggaaacaagagttgaaaagaacttcgaagaacttgacaagttgtacgatgaagtaattgccgatcatgttgctccgacaagaactaaagctaaccatgaagacattgttgatgttcttcttcggttgcaaaaggatgcacgtcaacttatcactcttaacaatcagcaaatcaagggtgtcctcacggacatgttcatagcggggactgatacgacagcatcaagtctggtttggaccttcaccgaattgataagaaatccaccatcaatggagaaggtgaaatatgaggtacgaaaagttggcaatggaagagacaaaattgaagaaagtgacattcccaaactacattacttacactcagtcataaa

SEQ ID NO: 190472 - DNA, 408 bp, Gossypium hirsutum
ggattagtggggaacaaaaaaagctatcattttgtagtctgcaattatgcttttagttccattgaaattgggctcattccaccactcagtaacaaagcggaaactctttctctatatgcaaagggaactttggctgcatgctgtgggaggagtaatcttgccgctgcccaaagctgcattgccttttggttgctcctgcattttggaactagggagactgcagtctgagtaaactattgtagaatctccctgctttggtttcaaccagttggtttcttgccggagaaaatctgttgacggctccagtacagttggcttataggagcttgttctggagttcaaatgattatagaaatctgttgaagtacaataagattctgaagtttgctctttcagtttccatataaa

SEQ ID NO: 190473 - DNA, 721 bp, Gossypium hirsutum
  unsure (1)..(721): unsure at all n locations
atttttctctctttctctcttccatttctctctctctatttagtggtgttgggttcttctgttcttcagaaaggaagcgtctcttcttgttcagaacaaaaaagaaaagccaaagaaaagagggagagtatagagactcaagtacaaaagagcaaaaaaaaaaaaaaacccaagaaaccaaataaataaaaggaagggtgggggcaaatagacaacgtacaaacactcttactttttagtgttttttttctttctttcttgttgttatgaggcttcctttgggaagataagtttcatttcctttcttgggggttttctttaaaaccttttgtttttgcttttccttcttggagttcttttccagtctggtttgttcggccatggccggtagcaatgaagtcaacctcaatgaatccaagagggttgttccattgaatacatgggtcctcatttccaatttcaagctagcttacaatctacaacgccgtcctgatggaaccttcaaccgagatttatctgagttccttgaccgtagagtccctgccaatataaaccctgtcgatggggttttctccttcaacatgtcaacggtgcaccggtcttctaacgggggttatcagccttctcgttgatgagctaatgggcatggagacttgagaaccttgacacactgaaatggtctgtctgggtcttcacgtgaagctcactatnctcgtatagg

SEQ ID NO: 190474 - DNA, 416 bp, Gossypium hirsutum
gccgggattacatgggtcctcatttccaatttcaagctagctgacaatctacaacgccgtcctgatggaaccttcaaccgagatttatctgagttccttgaccgtagagtccctgccaatataaaccctgtcgatggggttttctccttcgaccatgtcgacggtgccaccggtcttctaaaccgggtttatcagccttcttcgttgaatgaggctcaatggggcatggtagaccttgagaaacctttgagcacaactgagattgttcctgtcatagtgttcttccacggtggaagcttcactcattcctccgctaatagtgctatctatgacaccttttgtagacgcctcgttagcctttgtaaggccgttgtggtgtctgtaaattatcgccgatcgcctgaacatagataccc

SEQ ID NO: 190475 - DNA, 422 bp, Gossypium hirsutum
tatgtctattcttttatacactttggggccttgccatgttggtttaatgtgatattttggaagggtttttggtttctgttactttccatattgaaacttgtcttcaagtcatagctaacatctctaccagcaatttattgctgtacttgtgggatgtaacacataatgtatattgtgaaggatttttgactctaccaatgctgacttggagaattcaagagttccaagctcttctgagttaaaaactaagcctgatggttgggaaacaacatcaaaagctcctgatggaaacgtgtgggagatgtcacagagggaagaagatattctcctcccaagaatttgatcgccgaattgcttactgtaaattccagatagctagttttattaagactcacatatttagccggaggagacctattgat

SEQ ID NO: 190476 - DNA, 1371 bp, Gossypium hirsutum
  unsure (1)..(1371): unsure at all n locations
ttttntnaaccaaaaacaaacacaaaaatttacattctgatagtgtcagagtttcaccagctatgacaatctcttcaacagaatatccaagtgtaagataaattgatcaactcgatgataggattatagatcataagttcataacccaacccattcccatgtatgcttttggtaccccccccccaaatcaccaaaagaacagtagatgcaaaagatttctgtaaaggatcggcaactacctgacaatgtaaagggggagaggagaggccgaaaagcggagtatcttgaatcagttatggaatgtagcagcttcagaggaagtaatcaggcgttctacgggtaacatcaggttctcctctccttggagctggctcaaactggatgaatgactggttcttgcaatcatcaacttccaagattgatgccatgttcccacagcgataacaataatttggggcgctaaatatagtaactaccttttgttcatgcgcccagttaaatccatccataaccagttgatgagctctagcaatcaactttaagctgtttgtatggttgaactgttcagatatatcctgaccaaaagtatatccagcgccacgtggcgagataccccaaccgcatcgatcatctggatcagaccacaataaatcacacatgggcccttcatgaggaacctcttgaacacgatcaaagtttcttacattatccaaggtttcaattgacggggacaacccaccatgcagacaaaatatttctgactccaccaaagcagttaatggaaaatagtcaaaaaggtctgtaaagatcttccaaacattagcacgaccatactttctcagacattcgtcgtaaaacccgtaaacttgagtgatctggcgactttcatgatttcccctgagaatggtaatccgctgggggtaacggacttttaaagccaccaacagcgtaacagtttcaacagaatagtacccacggtccacataatctcccataaacaagtagtttgtatccggacactttccccccaattcgaaaaagttcttgaagatcatgaaactgcccatgaatatcaccacaaattgtaacaggggcttttacaggctggacattgctttcttccattaatatttcctttgccttgtcgcataatgctctgacctgctgctccgaaagtggcttacattgcatgagctgcgagatctgttcatcgagatcgagggctgagtctgttggtgcgcccatatttgataattaagtagcaagaatagagcgtgtaaaaaaaactttatgcggattagggataaccctaaccctagtttggtttgggaaatgttactttttcttctctctacactctttatgtctctt

SEQ ID NO: 190477 - DNA, 393 bp, Gossypium hirsutum
taagcgccaaccagcatgacatacaaagtaaccccacatgaccaaacatctgcaatcttcccatcatattcttttttggacaagacctctggtgcaatataggctggggttcctacagttgatttgggctgggaatgtaacacactcgacttagagtagccgaagtcacatatttttagtctgggtgtactgcttccatctaatagagtgttttccagcttaagatctctatgacaaattttcattgcatggcaataactcactcctgatatcagttgttgaaagaaaaaccttgcctcatcttcaccaaatctaccagcgttgcatattctttcaaaaagttctccaccagctgcatattccatgactatggcaagatgagttggtgttaac

SEQ ID NO: 190478 - DNA, 648 bp, Gossypium hirsutum
tatttttaatatttttttaatgattttttattttttttttttaataataaaaattagattaaatataaatataaataaaatacaagtccaaatacagcatcttgtttgcgaacctaaacaacgctgaaaatgcaaaggtcttttataaaagacaaatcgctaagttttgaactaggaattctaatacctcggaggcgacaatgcacaagtttaaaccttcataaactacactctcatttagacaaggtgcacaagatgccgatgaaccttgattgcagcaccaaaacatgactcagcagctctactactcggcaaatctggtacgctaattctctagtgtgacatagaacaagtgcagcaacttgcccagcaacaggctcaatttgctgaagagttgatagaacaaaaacagctgttttccccattccagattttgcttggcaaatcacatccattcccagaatagcttgagggatgcactcgtgttgcacttcggaaggatgttcaaaaccagaatccacaatagatcgaagcagctccggtttcagcagaaagtctctgaatcccgaactgtgaattccaacataccccttcttagcagaatcagcagccttagtggaggcagagtcaggggctttttcatcataa

SEQ ID NO: 190479 - DNA, 446 bp, Gossypium hirsutum
gaagatgagaaaaggcacgggcgttgataggatcggaaactgaacaaatgtaaccaagtattgcaatgcctgcatataacttagagaagtcctttgatgctttcaattcaaccgccagagaatccaaaacaccagaacagaaagccgaagtatgcgcctccatatccaagaatatccttttgctgaaaagaatctcaattgtcttcaatgtgggtataataaccctgtcacatcgcttatactgttggagaatccaaaggatgtccgtgggtaacttgcacaatttgagttcttcattaacatcttgatcgacattaagatattccagaaaagctgacagtgatgccttcctcaaagaatcttgcaagccaccccctgaaataactaaaccagacagcactggtctgctataacaactgaattgaagtaattgaacaaatcgcgga

SEQ ID NO: 190480 - DNA, 593 bp, Gossypium hirsutum
taaatataaaaattaatgaatttaaatttaatacataaacattgattcaatatgtaatttaatacataaaaaaaacacacacagacacactcacaaagtattactatttctaaaacaatattcattgatgaagccaaagtattgcaatgcctgcatataacttagagaagtcctttgatgctttcaattcaaccgccagcgaatccaaaacaccggaacataaagccaaagtatgcacctctacaataaaaggccataatttgctcaattgcgtgttcaaccattttgcctaaaaggacaacatagtgtaaggcagtaagcaactacactgcataaaatcttaacaccaaaatggaaacacctttttctatacctaacacatgcaaatgtatctagtctttgagatgcatattttatgccttgtcgcataatgctctggcctaaacaagataacacgaaaacagagttacaaccaagtataacccagatgaaatagggaagaaaaacgaggagttctattaatcaacctgagaacaaaacaatacaagtaaaacgtagaaaagtcctgcagcgaacacataaaagttctcaga

SEQ ID NO: 190481 - DNA, 708 bp, Gossypium hirsutum
  unsure (1)..(708): unsure at all n locations
aaaataataataatttattaatatttttatttttatttttttttttttttaatttttttttnntnaatgaatttaaatttaatacataaacattgattcaatatgtaatttaatacataaaaaaaacacacagacacactcacaaagtattactatttctaaaacaatattcattgatgaagccagagtattgcaatgcctgcatataacttagagaagtccttcgatgctttcaattcaaccgccagagaatccaaaacactggaatagaaagccaaagtatgcacctgtaagcatactcatggagatggggctgtaaagtgtacgaccagacaatggctcatttaggaagaatgcaacataaaatatgccacataccgttactcgaattttttctgcttcatccattacttcttgaaagttcaaacccgggcttctcacaggcctggacattgctttcttccatcagtatttcctttgccttgtcgcataatgctctgacctgctgctccgaaagtggcttacactgcatgagctgcgagatctgctcatcgagatcgagtggtcaagtctgttggtgacgaattggcgcccatgtttaatttttcagttggaagactcgagcgtggaaatcgttatccggatcagggataaccctaaccctattctggattgagaattttcttccctctttttgttttaactttc

SEQ ID NO: 190482 - DNA, 515 bp, Gossypium hirsutum
ttttattaaaataacaaatttataaaaaaattacctgattataacaataacataaaaaaattaatgaatttaaatttaatacataaacattgattcaatatgtaatttaatacataaaaaataacacacacaaacacacaaagtattacaatttctaaaacaaaatttcatcctcgtgagaaaagaatgccaattcattatcacctctcattaatcaaaggaaaaagatcaaaaaaaaaaaagaagaagaaacaatatacaacagagggctggttcaagcttatgtgaagccaaagtattgcaatgcctgcatataacttagagaattcctttgatgctttcaattcaaccgccagagaatccaaaacaccggaacagaaagccaaagtatgcacctttgtcagtatcaaacccatcaagctctattagtagctgattcaaagtagtttctcgctcctgagtggctgcattatacaagtggtctgttgtttccttgaaaatcccggacgcgtggg

SEQ ID NO: 190483 - DNA, 489 bp, Gossypium hirsutum
  unsure (1)..(489): unsure at all n locations
cggcggtcgtctagaactagtggagtncccggctgaggcgcacctgattcactgagtaaaggaaacattaaccgaaatggtcttggactcggagctaatcgcccgactctgggagttcttaggtgaatcggacctcaacaccacaactacagcaatcgtgcggcggagattggaggaagatttcggtattgatttgacggacaggaagaagtttattagggaacaggtcgatttatatctccaaaaccagttcgaaaatgccgaagaacaacaacaacaagaacaaaatgaagatgatcagacggataagattaaatcagaggaaaccgacggctctgattcggacgacgaagaggaggagccggaaagagcgaagaacaaaaaggctacctcaaagaaacggttaaaaggagtcaatagtgaaggtaagagaagaggaagtggttttaacaaagtaagcagactttccccacaacttcgggaactttt

SEQ ID NO: 190484 - DNA, 658 bp, Gossypium hirsutum
  unsure (1)..(658): unsure at all n locations
gcgtccaaatgggtgttggccattcctccctttcttcttgttcggttgactcactttgtattattgcttttacagcacaaccaaaaacaagctctttttccaattccaaccggcaaaagcctctctttcccacaaaaaaacactccccttttgctgttctaaaaattgggactttaaactgcgcgagagtagctggggagatggaaatcggaaagggtattgctgcagcaggaaaacccattgttgatcttcatggtattgatgacggcttgattcaaaagattgtatatgatgctcttgtttggagttctcttcatggccttgttgttggtgacagaaatgatcagagatctgggaaactacctggtgttggcatggtgcacgctccaattgctttgatgcccacgtcatttccagaatctcactggaaacaagcatgtgaactagctccaatttgcaatgagctaatcgatcgtgtaagtttagatggaaagtttctgcaagactccctagctaggacaaaaaagtggatgcttttacctctagacttttagacattcattccnagatactagaaatgaacaagaaagaggaaattcgcttgggtttgcatcgatcaaattacatgcttgatgagaaaactaaattactcctccat

SEQ ID NO: 190485 - DNA, 436 bp, Gossypium hirsutum
atttgcgctgtagcatcagttgatgaagtttattcgcaacaggggctcctggatacaagggacaataatatgattcccctttgtcaaaggtttctatcagctttaattccagaagaagatattgacagtggaaatgaagacctcccatttgatagttatgaaactggatttgagatggatggagaattgggatgcaatggtttgacttgtattaacttccaatctactgggcatgcttctttcgatggttataggataactgacaagccagaacatgatgatcctgaaattgatatgttgggaaacataggaactaactcaaattttagtcattcccggaatggcagtttcccagaccaacagatgcccggcatggtttgttcagaactccagtatgagagtatgacaacaaatgagaaactcattttggaggctc

SEQ ID NO: 190486 - DNA, 1104 bp, Gossypium hirsutum
  unsure (1)..(1104): unsure at all n locations
gcttattctatctggtgcagcacctctttcaactcacgtggaagagttcttgcgagttgtggcatgttgtcatgttctgcaaggatatggtctgacggagagttgtgcagggagttttgtctctttacctaatgaattgtcaatgcttggtactgtggggcctccagtaccaaacatagatgtacgcctggaatctgttcccgaaatgaattatgatgcccttgctagcacaccacggggggaaatttgtatcaaaggaaatacattattctcaggatactacaaacgtgaagacctcacccgtgaagtattgattgatggatggttccacacaggggatattggtgagtggcaacctaacggaagcatgaagattattgatcggaagaagaacatttttaagctttcacaaggtgaatatgttgctgttgagaacctggagaacatttacggtctcgtgtcagctattgattcgatatggatttacggaaacagctttgagtcgttccttgttgcggttgttaaccccaataaggaagcacttgaaagctgggctgctgacaataacgtaagtggtgacttcgagtccctctgtcaaaaccccaaggccaaagagttcatacttggggagctcgcaaagactggcaaagagaaaaagctgaaaggttttgaattcataaaagctgtccatcttgacccaatgccattcgacatggaacgcgaccttctcactccaacatataagaagaagaggcctcagttgcttaaatattatcagagtgtaatcgatgagatgtacaagagtgcaaacaaaccaaatgcttgataaaatgcttccaaaggcgtcggtgatatgttagatgatatggggttaaaacttgtgtattctttggtagtttggactgtacatgtagttccttcatcatcagaatttgtttaccaaaaaccaaattccctttgacacaactttgggaataatattacttggtaagttgtttaatgacccaaatgttaaaagttccaaaattacttatgatccggttttcaagacaactatttatggagttattgattatgatttttttttnaaaaaaaaaannnnna

SEQ ID NO: 190487 - DNA, 1166 bp, Gossypium hirsutum
ttatatttttttttctgctcttcgggtttggctttagatggtaaccaagaaagaaagcgggaaccggcacagcttcctttgctacttctctatttaaagcctcctataaggtgttatttctctattttagtgcctattatccttttattatttttgctctctctttgtttttgagatctgtgtgtttcttcaagcttcttgaaagcgtcattttggttgagaactggaaaccgctgctgtgatggctccaccaattgagactacagtcaagtcctctgactctcactgcgctccacatcctcctttgaatgaaaggatcctttcgtcaatgaccaggaggtccgtcgctgctcacccatggcatgatcttgaaattggacctggagctcctacggttttcaactgcgtgattgaaattgggaaagggagcaaggtgaaatatgaacttgacaagaaaactggtttgatcaaggttgatcgtgtgctttattcatcagttgtgtatcctcacaactatggtttcatccctcgtactctttgtgaagacaatgatcccttggatgtcctgattattatgcaggaaccagttattccaggatgctttcttcgcgctaaagctataggtctgatgcctatgattgatcagggtgagaaagatgacaagattattgctgtatgtgctgatgatcctgagtatcgtcactacaatgacatcaaggaactcccacctcaccgtctggctgagattcgccgcttctttgaggactataagaagaatgagaacaaggaagttgctgtcaatgacttcctgcccgcctcaactgcttatgaggcaatccagcattccatgaatttgtacgcggactacattgtggagagcttaaggcggtagttgttcatagcattccgtctttatagtatattacatagttatgaatatgtgtctgctatatactgaagtactgtcatgcatactgcattcacctacgaagtaattgtgtgcttatcccctaaaatacattttcattttctggatggaagaaagaaaaaggtttgaagttatgataattttgcaatgatgctgaccataattttggatatttctcattgtaatggtaatgcctataattctttttcctttttgtcatttgattctcttgattttt

SEQ ID NO: 190488 - DNA, 1116 bp, Gossypium hirsutum
gcgtctaactatgaactacggatcctgcaggcatagtagaacgcgccgcgtgggaatctatgaccactaatccaatggcatgggaaggttcagttaacccaagggtgaagcaaatggagcaagctcagaattgtctccttcctatgggtattacgtcagagaacgttgctcatcgctttggtgtgacaaggcaggagcaggatcaggctgcggttgaatctcacaggaaagcagctgctgctacagcttctggtaaattcaaagatgaaatagtccctgtggccaccaagattgttgatccaaagactggtgatgagaaacctgtcacaatctctgttgatgatgggatccgagctaacacatcagtgtcagatctgggaaaattgaaacctgtattcaagaaaaatgggaccactactgctggaaattctagtcaagtgagtgatggtgctggagctgttctgcttatgaaaagaagtgttgcgatgcgcaaaggactgccaattcttggtgttttcaggacttttgctgctgttggtgtggatcctgctatcatgggtgttggcccagctgtggcaattccagcagcagttaaatctgctggtctggaacttgatgatgttgatctttttgagataaatgaggcatttgcatcccagttcgcatattggcaaaagaagttggagctcgatccacaaaagattaatgtaaatggaggcgcaatggcaattggacatccattgggcgcaacaggtgctcgttgtgttgctacgcttctgcatgaaatgaagcgtcgtggcaaagactgccgattcggagtggtttcgatgtgcataggcacaggaatgggggcggcagcggtcttcgaaaggggtgattgtgttgatgagctgtgcaatgcccgaaaagttgaaactcacaatctcttatctaaggatgcccgataggatacctagttttcttgttaaaaatatcctaaatcgagttggaaaatttaataaagcaatgtaataagtcaccgatcatgttaccccagaaaagagtagtattcagacgttctggctattatctttcataaaattatatctcaactttataataagtgtcaactttttt

SEQ ID NO: 190489 - DNA, 728 bp, Gossypium hirsutum
cccacgcgtccgatttttcctgcattttctccctcgccaaacagaaatcttagttcatttctagacgcagcgaacgatggagaaagcgatcaaccgacagcaagttttgcttcaacaccttaatccttcagcttcttctttttcgtcgcaccaaaacaactctgccctctctgcatcggcttgtttagctggagatagcgctgcttatctaagaactaatgtatttggagatgatgtggtgatagtagcagcatataggaccgcgctttgcaaatccaagcgagggggtttcaaggatacttatcctgatgatttacttgcacctgttttaacggcagtgatagagaaaacaaatttgaatcctagtgaagttggggatattgttgtgggaacggtcttggcaccaggatctcaacgagctagcgaatgtcggatggctgcattctatgctggcttccctgaaactgtgcctgttagaactgtgaacaggcaatgctcatccgggcttcaagcagttgctgatgtagccgcagcgataaaagcagggttttatgaaattggcattggagctgggttggaatctatgaccactaatccaatggcatgggaaggttcacgtaacccatgggtgaagcaaatggagcaagctcagaattgtctccttcctatgggtattacgtcagagaacgttgctcatcgctttggtgtgacaaggcaagagcaggatc

SEQ ID NO: 190490 - DNA, 693 bp, Gossypium hirsutum
  unsure (1)..(693): unsure at all n locations
ggcaaacaatgacggagaagcaacaagcgggaagagcactggattctctcgcgtcgcccttaatgaaagaatcctttcttcgatgactcgaagatcgattgctgctcatccttggcatgatttggagattggacctggtgctccagcagtttttaactgtgtggttgaaattggaaaaggtagcaaggtcaagtacgagctcgacaaaaccagtggtcttataaaagttgatcgtgttctgtactcatcagttgtttacccacacaactatggtttcatcccaaggactatttgtgaggacagtgatcctatggatgtcctgatactgatgcaggagcctgttttgcctggttcttttcttcgtgctcgtgctattgggttaatgcctatgattgatcagggtgagaaggatgacgagattattgctgtatgtgctgatgatcccgagttccgtcattacacagacatcaaacagcttcctcctcatcgtctggctgaaatccgccgcttcttcgaggattacgagaagaatgagaacaagaaagttgatgtagaagactttttgccagctgagactgctattgcagccatcaagtattccatggatctatatgcatcttacattgttgaaagtttgangaagtgatcatctntgcgactatttggtaanaattacagtaanattttgggtct

SEQ ID NO: 190491 - DNA, 499 bp, Gossypium hirsutum
caaaaaccaaattccctttgatacaactttgggaataatattacttggtaagttgtttgatgacccaaatgttaaagttccaaaattacttatgatccggttttcaagacaaaaaaaaaacccacgcgtccggcgtccggggtgagaaagatgacaagattattgctgtctgtgccgatgatcctgagtatcgtcactacaatgatatcaaggaactcccacctcaccgcctggctgaaatccgtcgcttctttgaagactataagaagaatgagaacaaagaagttgctgttaatgactttctgcctgcctctactgcatacgaggcaatccaacactccttgaatctctacgcggactacatagtggagagcttgaggcggtaattgtcggttcaccgtgccccgtctatatacaaatatatatattaatatgaatatgaatatgttgctactatacaagaaattcatcggctccttgtgcgggcagaaacaccctg

SEQ ID NO: 190492 - DNA, 436 bp, Gossypium hirsutum
ttttctttgctcctccttaagtgtttctatagggttttaattcgttcttctcattacctctcttttaacctttctcttttttgcttgctctctttgtttttcgagatctgtgcgttttcttcttttcaattagcttcttgaaagctttattttcttaagaacaggaaaccgctgaagagatggcaccaccaattgagactccaaccaagtcctctggctctcaccacgcttcacatcctcctttgaatgaaaggattctttcatcgatgagcagaaggtctgttgctgctcacccatggcatgatcttgagattggacctggagctccaatggttttcaactgtgtgattgaaatcccaaaaggtcgcatggtgatgttatgaactcgacatgaaaactggtctgatcaaggttgatcgtgtgctttactcatcag

SEQ ID NO: 190493 - DNA, 431 bp, Gossypium hirsutum
ggatgtcttgatcattatgcaggaaccagttattccaggatgctttcttcgcgctaaagctataggtctgatgcctatgattgatcagggtgagaaagatgacaagattattgctgtctgtgccgatgatcctgagtatcgtcactacaatgatatcaaggaactcccacctcaccgcctggctgaaatccgtcgcttctttgaagactataagaagaatgagaacaaagaagttgctgttaatgactttctgcctgcctctactgcatacgaggcaatccaacactccttgaatctctacgcggactacatcgtggagagcttgaggcggtagttgtcggttcaccgtgccccgtctatatacaaatatatatattaatatgaatatgaatatgttgctactatacaagaaattcatcgtctccttgtgc

SEQ ID NO: 190494 - DNA, 424 bp, Gossypium hirsutum
tagtcatttgcctattgagtacatacaatgcgatgttttagatgaagaagaaacatgtgataaattatcaaagcttaacgatgtgactcatgtgttttatgttgcatgggataagagatcaactgaagatgaaaactgcgttatcaatggtactatgttacggaacgtgttgaaagcggtaatcccgaattcacccaagttgaaacatatatgcttgcaaaccggtcgtcggcattacaccggtccgattgatttgtacggaaaatatcatgctcagccccatgatcctccttttcgcgaggatcttccgaggcttaagtcgtcaaacttgtgttatacgctcgaggatgttttgttggaagaagtgaagcagaaggagaacttgacatggtctgttcataggccgggattggtttttgggttt

SEQ ID NO: 190495 - DNA, 759 bp, Gossypium hirsutum
ggcggcagctccatgtctctcaaaacgcaataccaggtgctccgttgtcttcttaatcgaccccctttagctccatacaatgatgccgtcaactgggttgttttcatctgatggaatcatttaaaaatcaacacacttggattctctttcatttcacatatttgctaaaccaccaaccaccctccaatcctccggatcttaacacacagttccataattgttgtgtgtgggaaaacgaaataggggattcatggaagagaggcatattctgtttgggaaatatgagatggggagattgcttgggaaaggcactttcgccaaagtctactacgcgaaggaattaaaatcgggtgaaagcgtcgcgataaaggtcatcaacaaagctgaggtaaagaaagaaggcatgatggagcagatcaagagggaaatctctgtgacgcgtcttgttcggcatccaaacgtagtggaactcaaagaagtcatggcgaccaaaaccaagatcttctttgttatggagtacgtccgtggcggtgaactattcgccaaagttttcaaaggcaaactcaaagaagaggctgctcgtaagtacttccaacaactgataagcgcagtcgatttctgccatagcagaggtgtttcgcaccgggatttgaagcccgagaaccttctattggacgagaatgaagatctgaagatctctgatttcgggttgtcggccttgcccgagcagcttcgcaatgatgggctcctccatactca

SEQ ID NO: 190496 - DNA, 1681 bp, Gossypium hirsutum
gggcaagcccacttgtgctgacccaaacttacttaaacgcaccattctgtggcaatggcaccttaatgggtatattgtatcacattgtgagtccgttggtgtaatgtaggagactcagcatttcactgttacaccagcaagagtctgctgcagctactattaaagcaggtttggatttggattgccggccgtttttggccatatatacggatttggctataacggagggtttgttaactgtaactgatgttgacatggctttagcgaataccgttactgtccaaatgaggcttggcatgttcgatggtgaaccatcagctcaaccgtatgggcatctcggtccgagacatgtgtgtaccccggatcataaacaactagccttggaagctgctaggcaaggcatagttttgttgaagaactctgggtctttatttgccgttgtctacttcacgtcatcgtaccgtcgcggttattgggccgaattcagatgtcacggaaacaatgataggaaactatgcaggggtggcatgcgattacacgagtcccttgaaaggcatttcaagatacgtgaggactgttcatcaagtaggctgttcaaacgttgcttgcaaagcaaacaatctgtttggattcgccgaggtcgctgcccgccatgctgatgcgacagttctcataatggggcttgaccaatcgatagaagcagaattcaaggacaggaccgggttgctcttgcctggataccaacaagagctagttaccagggtggctcaagcatcgaaaggccctactattttggtattaatgtcgggtggcccgattgatgtctcgttcgccaagtacgatcgtcgagtaagtgccattttatgggccggttatccaggccaagctggaggaacagcaattgcggatattctatttggaacaacaaatcccggtgggaagttgccaatgacatggtatccacaatcttacgtagctaaagtaccaatgacaaacatgggaatgaggccatccccaggctatcccggaagaacctaccggttctacaaaggtccagtcgtgttttcgttcggtcacggcttgagctacacaaactttaaacaatcattagccttagctccaactgatctctcagtgctcattaacaccaatttatttgccactaaaaactactcaacattatcaagcaatgccattagggtgaaacatactaattgtgattcactttcattacccctccacattgatgttgaaaacactggcaacatggatgggactcacactttgctccttttctccgaaccgcccgctgctgtaaaatggtcaccgaacaaacaattaataagtttccatagagtccatgtcattgctgggtcgaaacaacgagtgaaaatcaatgttcatgcttgcaaacaccttagtgtcgttgatgaattcgggatccgaaggatgccggtgggtcaacatagtttatacattggggatctaaagcattctatttctctccaagcaaatttggagggcatcaagaattagaggataattattatcggtattattattagttccactgcatttccaaagggaaaaaaaagtggtcataattgtacaagtttttaggcatttgagtcttcaatctattttgtttttgtttcttaaataaaagaacaaatattgattg

SEQ ID NO: 190497 - DNA, 403 bp, Gossypium hirsutum
tgcaaacgattacaccgcatatgatcttgataattgggatggtgtggaccgataccattgcaatgccagggttagcaagcaagacctggctgatacatatgatgtgccattcaagtcttgtgtggtggaagggaaagttgcaagtgtaatgtgttcttacaatcaagttaatggcaagcccacttgtgctgaccctgatctactcaagggtacaatccgaggtcaatggggccttagtgggtatattgtatcagattgtgattcagttggggtaatgtatgatactcaacatttcacggctactccagaagagtctgctgcagctgccattaaagcaggtttggatttggattgtggaccatttttggcaatccacacagacttggcagtgaggagggggttg

SEQ ID NO: 190498 - DNA, 441 bp, Gossypium hirsutum
gaaagaacagctcccgagcaaccagcgccgccctatttgccacaaaaccctagcgtacatactccacagacattgtcgtttactctcggcatccatggatattgaggctgagatccgtgcactgcagcttgactctgctgaagataataatgccacgctcattcctgaagatgcaaaaccagaagaagttgaaatgacagataaggtggaggaggaaggtatgacggatgaggttgatactaaatctcagccagtccaggctgagccaaaagtgaaagacaaggaagtagctgatatggattgtgcagaagtaccagatgaaatggaatcacaaaagaagcgccacttgaatgtggtctttattggtcatgttgatgctggcaagtcaacaactggaggccagatactcttcctcagtggtcaggttgatgaccgtacgat

SEQ ID NO: 190499 - DNA, 594 bp, Gossypium hirsutum
aaagcagcttagtgcagaaggaaattacagtgaggaagagcttgaggagtacatgcaatctcacaagaaactgatgattgattcattatggaagcttaatgtagctgacatagaagctactctttctcgtgtttgtcaaatggttctccatgatcaaaaatgcaaaaaggaagagcttcgagcacgagcaaaagggttgaaaactcttggtaaaatcttccagagtgtcaagtcaacaaatggaaatgagagtgatcctgtgctaggcaataatgcaagacataaattagatggagttgagccaagttataacagtggttctccaaatgtatcaacaaagtcctcatcccgggaagaactatctccttctccattggcaccacagagcccatacgtggaggcccctaactttgttaatgctcaattgccgaggccaacagcaccgcctggtgcacaaagacatccatgaattacctgaagagatggagaggctttgattcgtaaaggtatacgcttgtattatacagctatatcatcttgtatcaatattgtgggtgcagctacaactggcaaaaggttttttttttttccctc

SEQ ID NO: 190500 - DNA, 1053 bp, Gossypium hirsutum
gcttctgataccaaatcacctggagatcatatgtcccacgcctacgacttatacaagcctaaccttgatagtgaacatccggttgtcgatgggaaactttctaagacatgctatctcatcgctcacgatactagcgtcaaacatttctgtcgtgtgtatgagaaaataaaaggcaaacggttctctctttctgatgctgcgtacttcgtatcccattctccgtataacaagctcgtgcagcaaaagctttatctcgtttgttgttcaatgacttcttgaggaatgccagttctgtcgatgaaattaccaaggaaaaactggctccattttcaactttgaccggtgacgaaagctaccaaagccgggatcttgagaaggcatcccaacaagcttcaaagtccctttacgatgccaaggtgcaaccaactaccttgataccaaagcaagttggcaacatgtatactgcatctctttatgctgcctttgcatcccttattcacatcaaacacagtgaattggcaggaaagcgggtgattttattctcttacggaagtggtttaactgccacaatgttttcattgcgattccatgaaggtcaacatccctttagcctatcgaacattgcatcggtgatgaatgtagctgggaaattgaagtcaaggcacgagtttccccctgagaagtttgttgagactatgaagctcatggagcataggtatggagccaaggatttcgtgacaagcaaagactgtagccttttgtctcccggaacatactacctcaccgaagttgattccatgtaccggagattctacgcaaagaaagacggggactttgctgcttgcgataacggttccggtgccaacggtcattagcggacagatttatcatgcccccaatgcaatgaagaaagcatttgtgttagatgtgtttgtgagtaccaaaatactgggttcctgtgtatgttaaaaaagcaaaaatagtttgattcagcatcaatttcagcttaagttttctttttattttatcttgtaataagttatttttctagag

SEQ ID NO: 190501 - DNA, 884 bp, Gossypium hirsutum
ttttcgcgtccggttctctgtgcgaatttcggggatcaaatactctttcacaaaaaggagagaatataagtaattaattaacacaactttttttcgttgttgttgaaaaagctcatcttttttttgatagttagagtgagcaatggctaagaatgtgggaattcttgctatggaaatctacttccctcctacctgtgttcaacaggaagcattggaggctcatgatggtgctagtaaggggaaatacaccattggacttggacaagattgcatggccttttgtacagaagtggaagatgttatctctatgagtttaacagctgttacttcactccttgcaaaatataagattgaccccaaacaaatcggccgtcttgaagttggtagtgagactgtgatcgacaagagcaagtccattaagaccttcttgatgcaaatctttgagaaatctggaaacactgacatcgaaggggttgactcaactaatgcatgctatggagggactgcagctctatttaactgtgtcaattgggttgaaagtacttcatgggatggacgatatggccttgttgtttgtactgacagcgcggtctatgctgaaggacctgcccggccgactggaggagcagctgcaattgctatgctaatagggcctgatgctcctattgcatttgaaagcaaatttagggggagtcacatgtcccatgcctacgacttttacaagcccaaccttgctagggaattccgggttgtagagggaaaactcttcacacgcgcttcaggggctttagacacgggtataaaccttgtgtcaatgctcgagacctggagagcggcattttccttttcgaggctgctacttggatttaattttcttttatagc

SEQ ID NO: 190502 - DNA, 851 bp, Gossypium hirsutum
cggccgcgtcgaccatcgattctctgccgatacttgctggatcaatatcaactcatcagaaagagaaaaagaatagatttttttcaatcaataaagaagaagacttcctttttgtattgttgacatagcggttctctgtttactttggagtgagaatggcaaagaatgtgggagttctagctatggaaatctacttccctcctacctgtgttcaacaggaagcattggagactcgtgatggtgcaagcaaaggaaaatacaccattggacttggacaagattgcatggccttttgtaccgaggtcgaagatgttatctcaatgagtttgactgctgttacttcactccttgaaaagtatacgattgaccctaagcaaattggccgtttcgaagttgggagtgagactgtgatagacaagagcaagtccattaagactttcctaatgcaaatctttgagaaatgtggtaacactgacattgaaggggtggactcaacgaatgcgtgctatggtgggactgcagctctattcaactgtgtcaattgggtggaaagtagttcatgggatggacgatatggtcttcttgtctgtactgacagtgcggtctatgcaggtcgaaaatgctaggaagcacctatgtcttctggagcagccacaagatcaaactgagttacagaagttgcaggccgtggaaaagcatctttgcaagtgtacagatgctcggagaattagggactggaagagtgcattaagggaaactgatgctgccattgccactggagctgacttttctcctcagctttttatgtgtagagtggaagcccttttgaaactccatcaactcgatgatgc

SEQ ID NO: 190503 - DNA, 592 bp, Gossypium hirsutum
gtggaaagtagttcatgggatggacgatatggcattgttgtttgtactgacagtgcggtctgtgctgaaggacctgcccggcctactggaggagcagctgcaattgctatgctaatagggcctgatgctcctattgcttttgaaagcaaatttagggggagtcacatgtcccatgcctacgacttttacaagcccaaccttgctagtgaatatccggttgttgatggaaaactctctcaaacgtgctatctcatggctcttgatacttgctataaatacttctgtcacaagtacgagaaactagagggcaagcaattttccctttccgatgctgactactttgtatttcattctccatataataagcttgtgcaaaaaagctttgctcgtttggtgttcaatgactttgtgaggaatgccagttctgttgatgacattgctaaagaaaaattggctccattttcaactttgaccggtgatgaaagctaccaaagcagggatcttgagaaggcatcccaacaagtttcaaagcccctttatgatgccaaggtgcaaccaaccaccttgataccaaagcaagttggcaacatgt

SEQ ID NO: 190504 - DNA, 1772 bp, Gossypium hirsutum
  unsure (1)..(1772): unsure at all n locations
aaacggcccttccttttcctttaatatcaacggttctcattcacttattctcctctttataaaccacatttcacttccacctgcttgcttacctatttgttgcgataatctcgaagcttccttttccgttttagatctcaaaattcaaaaggctctctttttcatctcatggctgctactattgtctccgtcaaagctaggcagatcttcgacagccgtggaaatcctacggttgaggttgatgtggaaacatcgaacggtataaaggctagggccgcagttcctagcggtgcatccactggaatttacgaggctcttgagttgagagatggaggttccgattacctcggtaaaggtgtatcgaaggctgttgctaatgttaacacaatcatcggccctgcattgattggaaaggacccaaccgagcagactgcaattgacaatttcatggttcaacaactggatggaacccaaaatgagtggggttggtgcaaacaaaagctcggtgcaaatgccattcttgccgtgtcccttgctgtttgcaaagctggagctgaagtcaagaaacttcccctttacaagcacattgctaaccttgccggtaacagcaagttggttcttcctgtccctgctttcaatgtcatcaatggtggttcacatgcaggaaacaaacttgctatgcaggagttcatgattcttcctgtaggagcatcatcctttaaggaggccatgaaaatgggtgttgaagtctatcaccatttgaagtctgtgattaagaagaagtatggtcaagatgcaaccaatgtcggtgatgaaggtggctttgctcctaatatccaggagaacaaggaaggacttgaattgttgaatactgccattgctaaagctggttacactggcaaagttgttattggaatggatgttgctgcgtctgaattttatggaacagataaaacttacgacctgaacttcaaagaagagaacaatgacggtaaacaaaagatctcaggagatgctttgaaagatttatacaagtcattcgtagccgagtatccgattgtgtcaattgaagatccatttgaccaagatgattgggagcactactccaaactaaccaatgaaatcggagaaaaagttcagattgtaggagatgatcttttggtcaccaacccaaagagggttgcgaaggctattgccgaaaaaacttgtaatgcccttcttctcaaggtcaatcaaattggatctgttaccgaaagtatcgaagctgtgaaaatgtccaagcaagctggatggggtgtgatggccagccaccgcagtggtgaaacggaggatacttttattgctgatctttcagtcggtttggccacgggccaaattaagaccggagctccatgcaggtctgagcgtttagccaagtacaatcagcttctgcgaattgaggaggagcttggtgcggaagctgtctatgctggagccagcttccgtgctccagttgcaccctattaagatgcttgtttagatgataatttgctgagactggatgcgtgcggcagagcttcagtggtttattgtgaccctaaaacatgtttcaataattttgatagcaattttgtacttgttcagaattatatcaatctccgtgttatttttgttggactttgcctgcatatatgctcgctattttcataaatacatgatgcttgaaatggaaaanaaaaaaaaaaaaaaattannaanaaaaaaaaaaatataaattaattaattttatattt

SEQ ID NO: 190505 - DNA, 475 bp, Gossypium hirsutum
aaaaaacttgcaatgctcttcttctcaaggttaatcaaattggatctgttaccgaaagtatcgaagctgtcaaaatgtccaagaaagctggatggggtgtgatggccagccaccgcagtggtgaaactgaggatacatttattgcggatctttcggtcggtttggccacgggtcaaattaagaccggagctccatgccggtctgagcgtctagctaagtacaatcagcttttgcgtatcgaggaggagctcggttcggatgccatctatgccggagctagtttccgtgctcctgttgaaccttattggagttggtttgatgataaagtttgttgcgactggatgtgcgcgatagagctctacttccaatgaataagttataataacacatagtgggttagtcaagactttttctttttcaataattttgacggaaattttgttccaaagaaacataaaattatgtcgacaacctc

SEQ ID NO: 190506 - DNA, 662 bp, Gossypium hirsutum
  unsure (1)..(662): unsure at all n locations
cttggatgtatgaaagacgaacaactgcgaaagcatttgcgagggatgttttcatgaatcaagaaacttcccctttacaagcacattgctaaccttgccggtaacagcaagttggttcttcctgtccctgctttcaatgtcatcaatggtggttcacatgcaggaaacaaacttgctatgcaggagttcatgattcttcctgtaggagcatcatcctttaaggaggccatgaaaatgggtgttgaagtctatcaccatttgaagtctgtgatcaagaagaagtatggtcaagatgcaaccaatgtcggtgatgaaggcggctttgctcctaacatccaggagaacaaggaagggcttgaattgttgaagactgccattgctaaagctggttacactggcaaagttgttattggaatggatgttgctgcgtccgaattttatggatcagcagataaaacctatgatctgaacttcaaggaagaggtgatttgtgatacaagatattctcagtcattgcagctttatgagattctgtttatatatgattaccatatcattttagatatatattcaagttgctgtgtatatgtcgngtctatattctattgttcggcatgtgcagaaaaatgatggttcacaaaagatatcaggagatgctctca

SEQ ID NO: 190507 - DNA, 450 bp, Gossypium hirsutum
ggattgattaattttaaaaatcttccattattgttctctcagtctccctttgggtttagatctcataaaagctctaatctgatggctgctaccatcgtttccattaaagctaggcagattttcgacagccgtggaaatccaacggtcgaggttgatgtggaaacatccaacggtaaaaaggctagagccgcagttccaagcggtgcatccactggaatttacgaggctcttgaactgagagatggaggttccgattaccttggtaaaggtgtatcaaaggctgttgctaatgttaacacgattatcgggcctgcattgattggaaaggatccaactcagcagactgctattgacaatttcatggttcaacaattagacggaactcaaaacgagtggggttggtgcaaacaaaagcttggagcaaatgccattcttgctgtgtcccttgca

SEQ ID NO: 190508 - DNA, 713 bp, Gossypium hirsutum
aatatccttgagctttacactttaggccgtaaattaggacagggacagtttggggttacttacttatgtaccgagatttcgactgggattgaatatgcttgtaagtccatatcgaaaaggaagttgatttgcaaggaggatgtggaggatgttaggagggagatccaaattatgcaccatttggctggtcataagaatatcgtgacgatcaaaggcgcgtacgaggatcctttatttgtgcatatcgtgatggagctttgctccggaggcgaactgtttgatagaattatccatagggggcattacaccgagaggaaggcagctgagttgactaagatcattgttggtgttgttgaggcttgccattcacttggggttatgcatagagatttgaagcctgagaatttcttgttggttaacaaggatgatgatttctcactcaaggccatcgattttgggctctcggtgttctttaaacccggcgaagtctttactgatgttgttggaagcccatattatgttgctcctgaagtactcctcaaatgttatggaccagaagcagatgtatggactgctggagttatactctatatattgctaactggcgtgccaccgttttgggcagaaacacaacaaggaatatttgatgctgtgttgaaaggatatgttgacttcgactccgacccgtggcccctaatatctgatagcgcaaa

SEQ ID NO: 190509 - DNA, 763 bp, Gossypium hirsutum
cccccccttttttttttttttttttgggtttttttttggtatcagaattttccgcagaactgaatcattattttctatatgtttaccgtatcaataatagatgatctgatgaactataaatggacacaaaaaattcatagtacggttatagttttgtacattccagtcgtatgctcctttatctcaatccccccaatatatacgttattttgaagcattccccttaaaaaaattgcgagtggtgtcggatcgtccaaccatgttctaaacatcatcttccgtagaaggaactgtgggtgacagtggcaattgaatcattatcagctcggttgaggggatagcattcgttgtcacttgtctcattgaattccatcttttcatccaaaaaaggtggattagtaggtgcagagaggtcttcatctttctttgttagcaagtgtagtaccttcgacattgatggccttagtgatgggatctcttgggtgcaaagaagtccaatttgtaccactctgaaaatttcattcctaaagttgctgccatggttgtcattgtgtaacattagatttgggtcataaatctcctccacagtccctaactgaaagtgtctccaagtaactgttactatgctgtctgaatattctgttgctttgctcttgttgttttgcttccctgtaactatttcgagtaaaagcaccccgaaactatagacatctgctttctcggttaactggccatgggctaggtactccggagccatatatcc

SEQ ID NO: 190510 - DNA, 1074 bp, Gossypium hirsutum
tctaccacgcgtccgcccacgcgtcgtgccatttcgtggtttaagggatttttttcattcgtttcttctcacgctcgattaccttacaaaaagagaaaatgaccaagtgttacccaactgtgagcgaggaataccagaagtcagttgaaaaggccaagaggaagctcagaggtctcatcgctgagaagaactgtgctccactcatgctccgtttagcgtggcactcagctggaacttttgatgttaagaccaagaccggaggtccattcggaaccatgaagcatcctgctgagctcgcacatgctgctaacaacggcctagatatcgccgtcagacttctcgagccgatcaaggagcagttccctaacctcacctacgctgacttctatcagcttgctggtgtcgttgccgttgagattactggtggacctgaaattcccttccatcccggaagagaggacaagcctcacccaccacctgagggccgtcttcctgatgctaccaagggttctgatcacttgaggcaggtgtttagtgctcaaatgggtctcagtgaccaggacattgttgctctttctggtggccacactctgggaaggtgccacaaggagaggtccggatttgagggaccatggactaccaaccctcttatctttgacaactcttacttcaaggagcttttgtcgggagagaaggaaggccttcttcagctaccaactgacaaagttctcctgtcagatcctgttttccgtccattggttgaaaaatatgctgccgatgaggatgccttctttgctgactacaccgaagctcacctgaagctctctgagctaggatttgctgatgcataagctgatggttgcggaatagaatgaagccaacaacatttgcctccacaaaatgaatgtattgggttttgtcatctctcagtagtttatgggcagttgttgcttgatgaatatgggtatttgcagttttattttgttgaacatgttgaattgagtttgtgggagatttcgatggactaactaaaaagctctttcgtaataaataatatacaatttattccatatc

SEQ ID NO: 190511 - DNA, 1129 bp, Gossypium hirsutum
  unsure (1)..(1129): unsure at all n locations
ttcattcgtttcttctcacgctcgattaccttacaaaaaggttattttcgatttgagttcggatctgaattttgaaactttttagatttgatttcaatgttcttctgttaatacgaatttactttcattttaaaataacccacagaaaatgaccaagtgttgccgcaactgtgagcgaggaataccagaagtcagttgaaaaggccaagaggaagctcagaggtctcatcgctgagaagaactgtgctccactcatgctccgtgtagcgtggcactcagctggaacttttgatgttaagaccaagaccggaggtccattcggtaccatgaagcatcctgctgagctcgcacatgctgctaacaacggccttgatatcgccgtcagacttctcgagccgatcaaggagcagttccctaacctcacctacgctgacttctatcagcttgctggtgtcgttgccgttgagattactggtggacctgaaattcccttccatcccggaagagaggaaaagcctcacccccctcctgagggccgtcttcctgatgctaccnaaggttctgatcacttgaggcaggtgtttantgctcaaatgggtctcanntgacancacattgttgctctttctggtggccacactctgggaaggtgccacaaggagaggtctggatttgagggaccatggactaccaaccctcttatcttcgacaactcttacttcaaggagctcttgactggagagaaggctggcctgttacagttgccaactgacaaagttctcctttccgaccctgttttccgtccattggttgacaaatatgcagctgatgaggatgctttctttgctgattacactgaagctcacctgaagctctctgagctaggatttgctgatgcataagctgatgatgattgcaaaaataggaagaagccaacgacacagatgttttaggttttgttttctctctaaagttggcttaaggaatgaatttggggaggtttccgagacaagcttttttcgataattttattctaaactcacattccccatcttcttgttcgtagctggtgcattttctttcttagtggatgctccatagatatgtttggtgaatgcattccttaaag

SEQ ID NO: 190512 - DNA, 518 bp, Gossypium hirsutum
gcttgtgctcaactcgtgtccatcgcgtggctttcctatcttcatttcttcgcactctccgacgaaagaaaccagagaaaaatgaccaagtgttacccaaccgttagcgaggagtaccaaaacgccgttcaaaaggctaagaggaagctaagaggtctcatcgctgagaagaactgtgctccactcatgctccgtctagcgtggcactcagctggaacttttgatgtcaagaccaagaccggaggtccattcggaaccatgaagcaacctgctgagctcgctcatgctgctaacaacggtctcgatattgcagtcaggcttctcgagccgatcaaggagcagttccctatcctttcatacgctgacttctatcagcttgctggtgttgttgctgttgagatcaccggtgggcctgaagttccattccatcctggaagagaggacaagcctcacccaccacctgaaggtcgtcttcccaatgctaccgaaggagctgatcacttgaggcaggtgttttc

SEQ ID NO: 190513 - DNA, 620 bp, Gossypium hirsutum
  unsure (1)..(620): unsure at all n locations
gccatttagtggtttaagggatttttggccgttctttcggccttacgctcgattacctcacgaggagagaaaatggccagagtgttgccccaactgtgagcgaggaataccagaagtcagttgaaaaggctaagaggaagctcagaggtctcatcgctgagaagaactgtgctccactcatgctccgtctagcgtggcactcagctggaacttttgatgttaagaccaagacaggaggtccattcggaaccatgaagcatcctgctgagctcgcacatgctgctaacaacggccttgatttcgccgtcagacttctcgagccgatcaaggagcagttccctaacctcacctacgctgacttctatcagctcgctggtgtcgtcgccgttgagattactggtggacctgaaattcccttccatcccggaggagaggacaagcctaccacacctgaggccgtttcctgagctaccaggttctgatcactgagcangtttaatgctaaacgtctcatgactgacatgtgctttctgtgccaacttggaggtgcccaagatagccggtttgagacatggctccacccttattttgaatttcttagactttgcgaaaatgagctt

SEQ ID NO: 190514 - DNA, 585 bp, Gossypium hirsutum
tttacgcgttcgcccacgcgaccgcccacgcgtgcgacttgcggcaggtgttgagtcatcaaatggctcttagcgaccaggacattgatgctctttctggtggacacaccctgcgaaggtgccacaaggagaggtatggattcgagggaccatggactaccaaccctcttatctttgacaactcttacttcaaggagctctagactggagagaacgacggcctgttacagttgccaactgacaaagttctcctttccgaccctgttttccgtccattggttgagaaatatgcggctgatgaggatgctttctttgctgattacactgaagctcacctgaagctctctgagctaggatttgctgatgcataagctgatgattgcataagaggaagaagccaacaacacaatcctacacagacgttttaggttttgttttctctctaaagttggcttaaggaatgaatttgggtggttttttttgggaagattccggagacaagttattctcgacaatttcttctaaaatcatattccccatcttggtcattgcaaaaaaaaacaaatcatcttgtgctattgagat

SEQ ID NO: 190515 - DNA, 424 bp, Gossypium hirsutum
tgatgacctgacaaattcacggatacctgcaaaattggaagagacaggtcactttgaatccaacttctcttctcgtggtagacccgatgttcaattggcttgccaagatgttataaccaggaatgaagataccactggaaaaactagagtgcttaatgaagagaagttaaatttttctcagaacagccaagattcacgtagacgagcagttttgtctcacaagagaaaggcacttgctttgaagagagatggaaaactggaagaagctcgggaagaacttcgacaggcaaagctgttggagaagagtatggcagaagatgacactcctccaaaattcggttctaatgatgtgtcagcatctgcatccactgtttgttctggtgcagcaattgagcaaggtacactagctttcgctccgaaacca

SEQ ID NO: 190516 - DNA, 432 bp, Gossypium hirsutum
gaggctgaaatgcttctggtagagaaccttggatcatttgagccaaatcacgagttcattgagaaatttctcaactataaggaattgctacctgctgatgtgattgagattgcttttcaaagtcgatatgacagaaagttaacagagttgggcagcggatatgtgaactccagcaatgcaagtgttgctaattttgacccagaagttggagttggcctagatggttcctccacggggggaggcatgaagaaagggaagaaagggaagaaagttagtccagctgttttgggattcaacgtagtgagcaaccggattatgatgggtgagattcagacagtagaagattgagaaatctggacttttttttgagagatcataacggatttttgagacgttgggtcagttgtaaatacatttgggttttactctttt

SEQ ID NO: 190517 - DNA, 425 bp, Gossypium hirsutum
gtgtattcagtaaaggaaatatgttggcaatattcagcaaagggttagtgaatccaccccaagagctgcagagtccagcttcactcacttcatcaatgaagcctaagcttccctttgaaatccttaatggttttgtctcttcaaatcccaccaacgctttttcaatgcggtttggatcttcggcttctttggcttatgttccaccccacaatccttcctccacttataaaaggttgtttagtggagtggatgaaatgcattgcatattcatgggtaatttgaacaatctatgtagcctcttaaggcaatatggtctatcaaggggcaccaatgaagcaatgttcatcattgaggcatataggacccttagagaccgtggtccatacccaccacatcaagtcctcaaccacattgaaggtagctat

SEQ ID NO: 190518 - DNA, 407 bp, Gossypium hirsutum
cgagaagagccaaattataaaaaatggctgctcctataacaatgctgattctttgtacatcttttttatcccttagtttactttctactgctttcacttctcgagattacgctgatgctcttgaaaagtctattcttttctttgagggacaacggtcgggtccgttgccgtctaatcaacgcctcaaatggaggggtaactctggtttgtccgacggtgcttcttatcacgtggaccttgtgggtggctattatgatgctggagataatgtcaagtttggccttccaatggccttcaccacaacaatgttggcatggagtgttattgaatttggcggttcaatgcatagtcagattgggaatgcaaagactgcccttcgatgggccacggattatcttctaaaagct

SEQ ID NO: 190519 - DNA, 998 bp, Gossypium hirsutum
cccacgcgtacgcccacgcgttcgcccacgcgtacgcccacgcgataatgtctaccacacacttgctaatattgctacttggagtggtggctctcgccactccctcttttggtacctatgagtctcccaactatgggaagccccctactcctgtttataaacctcctaaggtgaaacccccaccttatgaacatcctgtttataaacctcctaaggtgaaacccccaccttatgaacataagccccctgtctatgaaccaccaaagaaggaaaagcctgagcctaagccaccagtttatacacctccaaagaaagagaagcctgaacccaaaccaccagtatatgaacctccaaagaaggaaaagcctgagcctaagccaccagtttatacaccaccaaagaaagagaagcctgagcccaaaccaccagtatatgaacccccaaagaaggaaaagcctgaacctaagccaccagtttatacaccaccaaagaaagagaagcctgagcccaaaccaccagtgtatggaccaccaaagaaggagaagccaccggcttataagcctccaaagaagccaccagtgtatgagcctaagccaccaaagccaccggtttacacgccaccaaagaaagagaagcccgaacctaaaccaccagtacatgagtctccaaaaaaaccgtggtgtgttcagtatacactccatctgtgaaggccaaatcctaaatacccattggcttggattccaaaaaaccgagctttttattttgtccagaggaaaataataatccatgctcatgagataggagttaccctaaactcatgtcttgttttttgtatggaataagagaatggtatacttgcaaagggctttgggaaggccaatggaatgggatgcaatgttttgtattttaattggaaagaccttttttgaaaaaatattttttcaacgccggtgtggattatataaaatgttttcataagagctgcctttcttaaaaaa

SEQ ID NO: 190520 - DNA, 931 bp, Gossypium hirsutum
cccacgcgtccgcccacgcgtccgcccacgcgtccgggctactacccatttgctaatattgctacttggagtggtggctctcgccactccctcttttggtacctacgagtctcccaactatgggaagccccctgctcctgttcataatcctcctaagctgaaaccgccaccatatgaacataaacctccggtctatgaaccaccaaagaaggagaagcctgaacctaagccaccagtttatacacttccaaagaaagataagcctgaaccgaaaccaccagtatatgaacctccaaagaaggaaaaacctgagcctaaaccaccagtttatacaccaccaaagaaagaaaagcatgaacccaagccaccggtgtatgaaccaccaaagaaggaaaaacctgagcctaaaccaccagtttatgcacctccaaagaaagaaaaaccagaacccaaaccaccagtttataagcctccaaagaagccaccagtgtatgagcctaagccaccaaagccaccggtttatgcaccaccaaagaaagagaagccagaacctaaaccaccagtatatgagtctcccaagaaaccaccatatggtcactatccaggacaccctccattggggaagcctcaatagagagatcccatcggctagccatcccaagaactgagctactatggctatatagataaattagtatctatgcaataagagctgcttcctactcatgttctattttctcttgtatgtcatgtagtaatgttttcttttactagcgagaatgctcatggcagtactcattggaatgcctattctatgtcttcttatttctcaatgagcaatatcctgatttcaacagatatattccacatgcaaactgcaggattacttatcatagaaaaaaaaaaaaaaaagggcggcgctcgcgatcga

SEQ ID NO: 190521 - DNA, 1128 bp, Gossypium hirsutum
cccacgcgtccggctcaatgatgtctaccacacacttgctaatatttctacttggagtggccgctctagccactccctcttttggtacctatgagtctcccaactatgggaagccccctactcctgtttataagcctcctaaggtgaaacccccaccttatgaacataagccacctgtctatgaacctccaaagaaggaaaaacctgaacctaaaccaccagtttatacaccaccaaagaaagagaagccagaacccaagccaccagtatatgaatcaccaaaaaaggaaaagcccgaaccaaagccaccagtttatacacctccaaagaaagagaagcctgaacccaaaccaccagtatatgaaccaccaaagaaggaaaagcctgagcctaagccaccagtttatacaccaccaaagaaagagaagcctgaacccaagccaccagtgtatgaaccaccaaagaaggaaaagcctgagcctaagccaccagtttatacaccaccaaagaaagagaagcttgaacctaagccaccagtgtatgaaccgccaaagaaggaaaagcccgagccaaagccaccagtttatgcacctccaaagaaagaaaaaccagaacccaaaccaccagtttatcagcctccgaagaagccaccggtgtatgagcctaagccaccaaagccaccggtttacacaccaccaaagaaagagaagccaaaacctaaaccaccggtacatgagtctcccaagaaaccaccatacggtcactatccaggacaccctccactggggaagcctcaatagagagatcctatcggctagccatcccaagaactgagctactatggctatatggataaattagtatctatacaataaaaggtgcttcctactcatgttctatgttcttgtatgttcttgtatgttatgtaggaatgttttcttttactagcgagaatgcttatggcagtactcattggaatgtctattctatgtcttcttatttctcaatgagcaatatcctgatttcaatacaaatattccaactgacgactgcaggattacttatcatagacattcttgtattcctgcaacccttgcaattgtaaatgattagagaccaaagccaaag

SEQ ID NO: 190522 - DNA, 605 bp, Gossypium hirsutum
gcgctgagcctaatccaccagtttatacaccaccaaagaaagagaagcctgagcccaaaccacgcggtataggaacccccaaagaaggaaaagcctgaacctaagccaccagtttatacaccaccaaagaaagagaagcctgagcccaaaccaccagtgtatggaccaccaaagaaggagaagccaccggcttataagcctccaaagaacccaccagtgtatgagcctaagccaccaaagccaccggtttacaccccaccaaagaaagagaagcccgtacctaaaccaccagttcatgagtctcccaagaaaccaccggatggtcactatccaggacaccctccattggggaagcctcaatagagagataccatcggctagcaatcccaagaaccgagctattatgactagctaaatagataaattagtatccatgcaataagagctgcttaatactcatgttctgttttcttgtatgttatgtattaatgttttcttttactagcgagagtgcttatggcagtactcattggaatgcctattttatgtcttcttatttctcaatgagcaatatcctgatttcaacaaaaaaaaaaaaaaaaaat

SEQ ID NO: 190523 - DNA, 1099 bp, Gossypium hirsutum
  unsure (1)..(1099): unsure at all n locations
cccacgcgtccgcccacgcgtccggctgatttagtttaagaaaacatttccttagagcataaaagaaaagttacgaacatgccgggtgtcaatcctgaaattgagttcccagccattgagttccgttcatcggatttgaagcgaggaaccgaaggatggaaccgtttgtgcaagagggttcaagaggcttgtgagactttcggttgtttcgaggtggtatatgaaaaggtatcgacgaaactccgagaggatgcgtttgggttgatgaaagaaatggttgaggtcccagtggagacgaaacagaagaacactagtcccatgccttaccatggttgggttggaccatgcaagcaggtttctgtgttgtatgaaggctttggagttggagatgcctccaactatgactctgttaaaagttttgctcaacttatgtggcctaatggtcacccacacttttctgacactatacataccctagggacgcaaatggaggagctgaacaagttaatttggttaatgctaattgatagttatggattaggggatgactcactgaagatgaactacacaacgttggtgcggatgatgaaatacatggcccctccaccaggggagtatgagagaggactctttgctcatactgataaaccagttagcacacttatttgtgaggatcaaatttcaggattggaaattgaggtcaatgatggccaatggatcaagttgactaatttatctccttcttcctttgtttttgtggttggagatcctctcaaggcatggagtaatgggagattgaaatcagtgaatcacagagtgatgatgagcggagacaaagatcgatactctatagcagcctttgtcattccaaatgagggtactataatcaagacacccaaagagcttatagatgaccaacatcctcggcttttcaaggacttcgatttcatgganattcatgaagtcttcttttgcttttcgatctgcagcactatgacacggagtgctcatgttttgtggctttacacggttcaataaatagctatttgccagtaaagtggatcgtttataagtcacatatatgagccttctcgactgt

SEQ ID NO: 190524 - DNA, 939 bp, Gossypium hirsutum
  unsure (1)..(939): unsure at all n locations
tgcagctgtacggaactaggacgagatttattcttagaaaacatttccttagagcatagataaaataagataaaaattaagaacatgggtgtcaatgctgaaattgtagtcccagtcattgagttcctgtcatcggatttagagcgaggaactgatgggtggcaccatttgtgcaagagggttcgagaggcttgtgaaacttacggttgtttcgaggtggtgtacgaaagggtatcaaagaaagtccgagaggagatgttcggattggtgaaagaattggtccaggtcccattggagaggaaacaaaagaacgctagtccgttgccttaccatggctgggttggaccatgcagtccaagttccttggtggaataaaggctttgaacttgaagatccctctaattttgactctgttaaaagatttgctcaacttatgtggcctgttggtcacccacccttttgtgacacttgtacacacattggcgacacaaatggaagagttgaacaagttaatttggttaatgatatttgaaagttacggattaggagagaaatttgagtcactaatgataaactataaaacattggtgcggatgatgaaatacatggcaccttcaccagggagtatgagagtggactctntgctcatacggaaaagccagttagcacagtcatttgtgaggatcangtttcagggctagaaattgaggtcaaggactggcaatggatcaagttatctaatttatctccctcttcttttggcttcctggttggagatcctctcaggcattgagtatgggagattgaagcggtgatcatanatgatgatgagcgagatnaagatcgtatcaataccggctctgctttcagtgagggtccatattaagtacccaaagagctattgatgacaacaccttaatttacaagacttaattcatg

SEQ ID NO: 190525 - DNA, 678 bp, Gossypium hirsutum
  unsure (1)..(678): unsure at all n locations
gtgttaggtaatcatttcctttagagcatttaaaaaggaaggttagaacatggctggcgatgctgagattgagctcccagccattcagttccgttcatcggattctggagcgagggaccgatgggtggcgccgtttgtgcaagagggttcgagaggcttgcgagactttcggctgtttcgagggtggtgtacgaaaggatatcaacagatgttcgagaggaggcatttgggttgttgaaagaactggttgaggtcccagtggagaggaaacagaagaacgctagtcccttgccttaccatggttggcgttggaccatgcagtgcaggttctttgttgtatgaaggcttcggacttggagatgcctncaatatgactctgtnaaaaagttntgctcaacttatgtggctggatggtcacccacgcttctgcacactgtacataccatggcgactcaataggggagtgaaccagttatatggtaatgtaattgatagctatgatangagaaaatggagtcagtgatgataactacaaaagctatgcgggtatgaaatcatgcccctcacctgggagtacagagagacctttgctatctgataactgtagccaatctttgtgaaatctgttaggctgaaatgagccatgtggcatggatagtgttattcctnttctttgtt

SEQ ID NO: 190526 - DNA, 741 bp, Gossypium hirsutum
  unsure (1)..(741): unsure at all n locations
tttccttagagcatagagcatagttaaataaaagtttaaggacatgggtgtcaatgctgaaattgtggtcccagtcattgagttcctgctcatcggatttagagcgaggaactgatgggtggcgccatttgtgcaagagggttcgagaggcttgcgaaacttacggttgttccgaggtggtgtaccaaagggtatcaaagaaagtccgagaggagatgttcggattggtgaaagaattggtccaggtcccattggagaggaaacaaaagaacgctagtcccttgccttaccatggctgggttggaccatgcagtcaagtttctttgttgtatgaaggctttggacttggagatgcctctaattatgactcagttaaaagatttgctcaacttatgtggcctgatgatcacccacgcttttgtgacaccgtacacacattggcgacacaaatggaagagttgaataagttgatctggttaatgatatttgaaagttacggattaggagagaanattgagtcactgatgataaactataaaacattgtgccgatgatgaaatcatgggccctcaccagggagtatagagtggacttttgtatcagaaaacgttacacagtattgggaggaaatttaggctanaatgagcaggtggccagggtcagtgtaataatccttttcttgtttgggttgaacttaggatggtatggaattacctaacttaagtgatagggaaaactata

SEQ ID NO: 190527 - DNA, 848 bp, Gossypium hirsutum
ttgtttcctgaaggtcacccacacttttgcgacactgtatattccatgggaacacatatgggggaacctaacaaggtaatctggttaatgctaattgatagctatggattaggagaggactcactgaagttgaactacacaacattggtgcggatgatgaaatacatggctcctccaccaggggagtatgagagaggactttttgctcatactgataaaccagtcagtacacttatttgtgaggatcaagtttcaggattggaaattgaggtcaacgacggccaatggatcaagttgaccaatctatctccttcttcttttgtttttgtagttggagatcctctcaaggcatggagtaatgggagattgaaatcagtgaatcacagagtgatgatgagcggagacaaagatcgatactctatagcagcttttgtcattccaaatgagggtactataatcaagacacccaaagagtttatagatgaccaacatcctcggcttttcaaggacttagatttcatggagttcttcctttttgccttttccgaccctgcaaggcacatcgacaacggggagttgctccatgtctttgctggcctctcaccaccagtttccaattaaaatcatgctcatatagacaagtaaaagtttggttttggttttaaattaatgttacaaataataaattgagtcctatactcgagatctacgttctcgaactgtattaccatgttatattttgttataattgtgtactactaaatctactatgttgagtaatgttggttttatgaaatcaataagattgcagttcatggactgaacaagacgcctactcattgaacttg

SEQ ID NO: 190528 - DNA, 559 bp, Gossypium hirsutum
tggagcaagctaacgaatgtatctactgcgtactatgtatcagtggtcgaagatcccgtcaaggcttgcagcagggggaggtggtaaccagtgaatcacaaagtgatgatgagcggagacaaagatcgatactctatagcagccttgctcattccaaatgagggtactataatcaggacacccgaagagcttatagatgaccaacatcctcggcttttcaaggacttcgatttcatggatttcttcctttttgccttttccgacccagcaaagcacatcgacaacggggagttgctccatgtctttgctggcctctcaccaccagtttccaattaaaatcatgcccatatcgacaagtaaaatccagtaaaatcaatgttacaaataataaactgagttctatactcgagatttgcgttcttgtattgtactactatgttatggttagtaataatttgtattaaattgtaattggtaccaaaggttactaaatctattgtgtaaattgagtcctatttatatgtgcttttcaattatttaattatataaaatttataat

SEQ ID NO: 190529 - DNA, 383 bp, Gossypium hirsutum
cccactcgttcgaaagaacttatagatgaaaaacatcctcagcttttcaaggaattcgatttcatggacttcttcctttatgccatttctgacccagcaaagcacatcgacagcggtgaactgctccacgcctatgcttctctttcaccaccgggttccaattaaatgcataccgatatcaacaagtaaaagcccaattttagtattaaattaatgttacaaataataaatggagtcctatacttgggatttccattcttgctatggcttaccatgttgccgcctttgtttgctcgcctatgggctttacttacatgcaattggcatatggcagggagagagtttagagaaggttcaagcaggaattggggggggggggacat

SEQ ID NO: 190530 - DNA, 348 bp, Gossypium hirsutum
ttatcattttacttactctaagaatataaacttggtggagtattttttaaaaaatcaagcacatgggtgttgatgctgaacttgcgatcccggtcatcgagtttcggaccggttcgcgggatttggagcgagggactgaaggatggcaccatttgtgcaagagggttcgagaggcttgcgagacctacggttgtttcgaggtggtgtacgaaaagatatcgagagaagtccgagaggagacgtttgagttgttgaatgaactggttgaggtcccgttagagaggaaacaattgaacgttaatcccaagccttaccatagctattttggaccatgtagccaagcttctt

SEQ ID NO: 190531 - DNA, 422 bp, Gossypium hirsutum
gtttcatctgaatattttgacttcgatttcccccgaggaacatttgctcctgttgaggatgactattatttactcttggatcggtctcctcgaaaacaagttccacttgggccaaatcatcaagccaatgttccatcatggggtaggcacataaagaatattaagtttgcacagaatgaagcatctaaagctgcagatattgacaatgaagataataagatggggacatgtatcattccattgccagatttagatttgtctgctaacagcagtgataaagttggtgctggaagattcgactgtagttgcctggataggggctctttaagatgtgtgcaacagcatgttacggaggcacgaaaactactacgaaaatcccttgggcatgaaaaattcgtgaaacttgggttttataacatggg

SEQ ID NO: 190532 - DNA, 436 bp, Gossypium hirsutum
tctttgaaagatcatatcctcgtatctaccatggttaactgcaaataggcttttgtagtaaatttgtcgatattataggctacctcaatatccgaatcgaatcgtttcaacggagaaaaacatctaaacggtttcgtttatgcctttgatctctatttatgaacggtttcgattgttttagatgggaacgaactacaaggcagcgctaattccgcaaaggatacgggatacaatccatggatggggcaaagcagcaaggagaaagaggaggctcggacgtttcaccgatgattcaaccatacatacggaaactagcacggtaatgtcactcgaggaagatgaccaccagttgatcgatattcacgaagatgacaaggacacatacaatgaggtagagttgcaaccgccaccaaacgttacatccactccttccccg

SEQ ID NO: 190533 - DNA, 445 bp, Gossypium hirsutum
ggaacaagcagttcactatatcaagaaaatattgcgttcactctcttgatgatcttaacatacagcgagcttagtcacagaggaaaatgatgatgcgattttcacttcaaaaagtgaagaatttaccggctttaaggcctcaggttttggcttctgcgagtcctcgtttctctactgctgccgaatcttcttttaatcaccgtaatccttcgagggttcctaatcttataggaggtgcttttgttgattcgaaatcaacatcaaccattgatgttataaaccctgcgacacaagaagttgtttcacaaattcctttaactacaaatgaagagttcaaagctgcagtggctgcagcaaagcaagctttcccgtcatggcgaaataccccaattacaactcgtcagcgtattatgttcaaactccaagagcttattcgtagggatat

SEQ ID NO: 190534 - DNA, 1641 bp, Gossypium hirsutum
tctctcctaaataccaacatccttccaacgctctctgcgaccattcccacgccctttccccttgttttctccgcccccattgtttctttcctctcttttatattctcctccccactttctcttccttcttcacctcccattttctctccttttccttcttccctccccattaggaagaaaatggctacagctttctcaccttccaagttcgctgcccaaccattccctctcaacaccacttctcaaaacaaccctcttacaatccccactatcgcctcacccttcctcggatccacccgcaaactcatccgcctctgttcttcttccaatttgaatctccgccgtcgatctggtaccgtcgtcgccgtctccgatgtcgtcaaggaaaacaaatccaagtctacccccaatctgttaattacaaaagaggaagggttggaattatacgaagatatggtattaggaagagcgtttgaagatatgtgtgctcagatgtattacagaggcaaaatgtttggtttcgttcatctttacaatggccaagaagctgtttcaactggttttattaagctcttaaagcagcaagattccgtcgtcagcacttaccgtgatcacgtgcacgccttgagcaaaggcgtccccgcacgtgctgtcatgagtgagctcttcggtaagaccaccggctgctgccgtggccaaggtggatcgatgcatatgttctcgaaggagcacaatgtgctcggggggtttgcttttattggtgaagggatccccgttgccaccggggcggcttttacctccaagtataagagggaggttctgaaagaagcggattgtgatcatgttaccttggcgtttttcggcgatggaacttgtaacaatgggcagttctttgagtgtttgaatatggcggccttgtggaagttgcccattgtgtgtgttgttgagaacaatttgtgggctactgggatgtctcatttgagggctacatctgatcctcatatttataagaaaggaccggcgttcgggatgccgggtgttcatgtgaatgggatggatgtattgaaagtgagggaagtggctaaggaagcaattggccgggctaggagaggagagggtccaacgttggtcgaatgcgagacatacaggcttagaggacactcattggctgaccctgatgagcttcgtgaccctgctgagaaagctcactatgctgccagagatcccatcacagcactgaaaaaatacctcattgagaacagtctggccagtgaagcagacttgaaggctatagataaaaagattgatgaggtggtagaggaagccgttgagtttgcagacgaaagccctgttcctcctcgaagccagctgctcgaaaatgtatttgcagatccaaaaggttttggaatcggacctgatggccaatatagatgtgaggacccaaagttcactgaaggcactgctcaggtctaagctttcaaaataggaggttgatcaaaactatttttgtcaacttatttattatttcatggtcacatatgtttagtttgtggtagcagtcacgcgttcacttgattttagtgtttattgcgtaccaagtattgtgttccttaggttgcctatccatatgaaaatttgggg

SEQ ID NO: 190535 - DNA, 553 bp, Gossypium hirsutum
cgccactttagtttaggctctccggccacatatatatgggcagtctcttttatattctcctacccactttctcttccttcttgacctaccattttctctccttgtgcttcttccctccccattaggaagaaaatggctacagctttctcaccttccaagttcgctacccaaccattccctctcaacaccacttctcaaaacaaccctcttacaatccccactttcgcctcacccttcctcggttccacgcgcgaactcatccgcctcagttcttcttccaatttgaatctccgccgtcgatctgggaccgccgtcaagaaagcaaatccaaatctacccccaatctgttaattacaaaaaaggaagggttggaattatacgaagatatggtattaggaagagcgtttgaagataagtgtgctaagatgtattacgataggaaaatgcttggtttcgttcatctttacaatggccaagaagctgtttcaactggtttcattaggctcttaaagcagcaagattccatcgtctgtacttaccgtgatcacgtgca

SEQ ID NO: 190536 - DNA, 656 bp, Gossypium hirsutum
caaccgagggctccggtgatgtcggatcaaacaaaagcaaccccttcttccaatcccactgtcgttgatgatccttacaagcgcctcgaaatcattcttaaccccaatggctcgcttacgcgcaaccctaataggtttcccaacacttcagccacacctgatccggacccaactgtcccggttctctccaaagatgtcactatcaaccaaacgacacacacatgggctcgtgtgttcctccccaggcagaagccgcttgatacgaacaagttccctctcatagtttattaccatgcaggaggcttcatccactgcagtgcggcatccacgatcttccatgttttttgctcaaacatggcgttggaactccaagccatcgtcgtgtccgtcgactatcgtcttgctcctgagcataggcttcctgctgcttacgacgacgctattgaagcgttgctctggatcaaaaccacccaagaagagtggttgacacaatacgcaaatttcaccacttgtttcgttatggggtcgagttcaggtgctaacatagcctaccatgcaggaatacgtgtggcggaagaagccgactgtcttcgaccctggaagatccgagggctaatattgcaccaaccattcttcggcgggtccgtaaaggttga

SEQ ID NO: 190537 - DNA, 744 bp, Gossypium hirsutum
atatctcctcttcttataaatgcccacttctttttttctttttttgtcttgcttcgtttaaagggtgtgaggagtatcaaaggaagaacattgggagagaggggagacaagaggaaaggaagtgttggccgttttggctgtcttccttgttgagtgttattgtttctttcttctttgcttacatggtgcgagtcatacagagaagaaataagattaaaaagacagggaaatagataatatttatagacagatagattgcataaaaaacaatagacaatgtcggcttacagagacaaagatccccgtattcatggcatccaatccaagattcgtgttgtccccaatttcccaaaaccaggtattatgtttcaagacataactactcttttactggatcctaaagcattcaaggatacagtggatttgttcgttgagagatacaaagggaagaacatttcagttgttacaggtatagaagctcggggttttatcttcggtactcccattgcattggaaattggagcaaagtttgttcccttaagaaaaccgaacaagttgcctggtaaagttatttcagaagagtatgaactggaatatggaagggattgtctggagatgcatcttggagctgttgaacccggtgagcgggctttggttgttgatgacttgatagcaactggaggcactctttgtgctgctatgaagttactggaacgcgctggagcagaggtagttgaatgtgca

SEQ ID NO: 190538 - DNA, 605 bp, Gossypium hirsutum
gaaaaagtaggattaaactctttcacgtcacttcccccatatcactacaatttcatctctagactcggtttcccaaagattagaaactctatcaccatgccacccgccccatcggcatccccaccgacaccatctcatcccaccactcaccacgtccttcaagccctgttagcctcctcacgtcccttccttcgtggcgagcttcaacatgtcgacaaaaacttgcctaatttggtcgccgtcttgcgttccgttggtgccggcgagtgttggcacaagcacggcagctttttagagcatctggtcgatatctatcggattctcaaaatatggaaggcgcaagactccgtttgcctttgcggtcttttccactctgcttactccaactcttacgtcaacctcgccatattcgacccttcaaccggccgcgacgtcgttcgaggccacgtcggcgacgctgcagagcgtttaatccatttgttctgcgtcgtccctaggcaacctttgatccacgatgaccttttgttcaaatatacggattcggaaatcgtcgaacaccttgcggcctccgaggtttcgttgaagaacgccaaagaaaagggcgt

SEQ ID NO: 190539 - DNA, 1407 bp, Gossypium hirsutum
cggcgcgtggggaagcagccagccacagcattcgccgcacggcatcagtctcatcaggcggggaagaatgtctcacaggaagtttgaacacccaaggcatggctcccttggatttcttccgaggaagcgagcttctcgtcacagagggaaagtgaaggcatttcctaaggatgacccaagcaaaccttgcaagctcactgcctttttgggctacaaggcaggcatgacacacattgtccgagaggtcgaaaaacctggatctaagcttcacaagaaagagacatgtgaagctgttacgatcgttgaaacccctcctatggtgattgttggggttgttggttatgtcaagacaccacgtggtcttcgcagcttgaacaccgtttgggctcagcatctgagcgaggaagtcaaacgtaggttctacaagcattggtgcaagtccaagaagaaggctttcaccaagtactcaaagcggtacgagagtgaagaagggaagaagagtatcgaggctcagctggaaaagatcaagaaatatgccactgttgttagggttttggcccacactcagattaggaaaatgaagggattgaagcagaagaaagcacacctaatggagatccaagtcaatggtggaactattgctgacaaggttgattttgcttacaagttctttgagaagcaagtccccattgatgctgttttccagaaggatgaaatgattgatatcattggtgtcacaaagggtaaaggttatgaaggtgttgtcactcgttggggtgtcacacgtctgccccgtaagacccacagaggtctgcgtaaggttgcttgtattggtgcctggcatcctgccagagtctcctttacagttgccagggcaggtcagaatggataccaccaccgtactgagatgaacaagaaggtctacagggttggcaaggttggtgatgagacccactctgccataactgattatgacaggactgagaaagatattaccccaattggtgggttccctcactatggtgttgtgaagagtgattacctgatgatcaaaggtggctgtgttggacctaagaagagggtggttacactccgccagtctctgattaaccagacatctcgtgtggctctggaggaaatcaagctcaagttcatcgacacctcatcaaaattcgggcacggacgtttccagactacacaggaaaaacagaagttctatggtcggctcaaggcataagtctgcgaagtggtcaggaattttgggctattgtatgtttaggttttgctttacttcatgcttagtatgtcttattctctattcctttttgaaatggaacagtttgggtttcttttgttctgtcagtctggattggatgtttgaacttctgaggattctcaacagttttt

SEQ ID NO: 190540 - DNA, 616 bp, Gossypium hirsutum
  unsure (1)..(616): unsure at all n locations
cccacgcgtccgcccacgcgtccggtgcgagcagccgcagccagcaagcagcagtagcaacagcaggagcggaagaatgtctcacaggaaatttgagcacccaaggcatggttcccttggatttcttccaaggaagcgagcctctcgtcacagaggaaaagtgaaggcattcccaaaggatgaccctaccaaaccttgcaagctcactgcctttctggggtacaaggctggtatgacacacattgtcagagaggtcgaaaaacccggatctaagcttcacaagaaggagacatgtgaagctgttacaatcattgaaacccctcctatggtgattgttggggtggttggatatgtgaagacaccacgtggccttcgctccttgaacaccgtctgggctcagcatctgagtgaggaagtcaagcgccggttctacaagcactggtgcaagtccaagaagaaggctttcaccaagtactcaaagcaatacgagagcaagaagggaaaaaaaatatnaatgctcaccttgaaaaagatgaagaaatatgccacgtttatcagggtcttggcccacaaccaaattatgaaattgaagggattgatcccaatnaatgcccct

SEQ ID NO: 190541 - DNA, 539 bp, Gossypium hirsutum
gggatatgtccgtggggttaacgtacaagaagaaacacatattccagtgtgccttcattcaaggccgcgtaatcggtactatcttcccagctccatgtgaaaaccttggtagatataatgaagaaagacaacttgtgaaacgctccacggcccagaacataaccgatatagattatgacatatgagaagacatcgtttcaccagcagttagccattcttttgtaggatcaaaatctcaaaggcttagaactgtatgtcttggagaaatggggcttggttatttttctttggtccctttctcggctcgctattacttgtttgattcatggagttatgcaggggaagattttaaagtagttttatacatttttcatcatcttgctgaaattcatattcatggtatgttgtttcccctgcaaaaaaaaacaaggataattttgattaaaagcactatcaaaagaatagtacctatctgatgctgatttccagaatgattatttgcttgaaatcatcgtcatcaataaaaaaggggcggccct

SEQ ID NO: 190542 - DNA, 604 bp, Gossypium hirsutum
gaaggttttgcagcatgatcttttcacaaatgatgtcctttactctgaagttgtttttgatatgagttcactgaagcaagaacttcttcctctagtaccattgttttgtcaatcattactagagatgggtacaaaagacttgacctttgtgcaacttaatcagttgattggaagaaaaacaggcggaatatcagtttatccatttacgtcatctatacgaggcaaggaagatcccagtagccatatcattgtccgaggcaaatcaatggctgggcgtgctgatgacctatttaatctgattaattgtgttcttcaagaagtacagtttacagaccaacaacggttcaagcagtttgtgtcccaaagcaaagccagaatggagaaccggttgagaggtggaggtcatggaattgccgcagctaggatggatgcgaagttaaatgttgctggctggatttctgagcaaatgggtggagtcagttacctggagtttcttcaagcactggaagaaaaagtggataatgactgggcaggaatttcatcatctctcgaggagatccgtaaatccttactttccaaggaaggttgcttggtaaacatgact

SEQ ID NO: 190543 - DNA, 420 bp, Gossypium hirsutum
ccagatcgagggaacgactttagtttattatctcttgatgaaaatgcctttgcacaagaaactcgacgtgcctcttttggaggagcaactgaaattagtccttgccttcatgccaaacgaatagtgatagctggaatccctgtgaaaaaagagatggagcttacatcgtcagaaagctctgaccagagaaactggctggacagagcaccacagttaaatagattcaaggttccaattgtggcggagaggctaatggactacgatctggtcttagagcagtatctacctccatcttcaccattgcttgctggattccgactggatgcttttaatgcaataaaacctcgaattacccattcaccttcttcagatacagatatctgggacacgtcagaaacatttttagaagatagacatatc

SEQ ID NO: 190544 - DNA, 699 bp, Gossypium hirsutum
  unsure (1)..(699): unsure at all n locations
gttctccgtctccttctaaatcttgattgatccaaaaccaaagggaaaaaaatagggcttttttcttacaaaagttgggggttcgaagagcataaaacgataatatgccttcgttacctctcagatcgattttgctcccattaatcccttccttaaccccttttcatgctggtttaagttcccatcgtttgaaacatcttgaaaagagtgatcggcgtggtaatcttagttaacgttttcccctcaaaatcattagctctcttttgactcctttactttctctccttttttcctctctgttttctgtcttcccctagagtcgtccgtttcttttgaggctattaccgtgcgacacgaaggaatctagtttgctcagaaagaaaaaagaaaaccctggagatttggttcgatcttgaactgggattgcttttttcagaggttttaagatcttgtattgatttcacttaccgcagctttcttaagaaaggcgtagcttgcctttcctgtattccttggtagtggaaatggacatattgggttctggagaggtanataatctaactgacataaagcatgctaccgtccgtacttgtctcaccgatgttaatgaatctaactataccaacaccagtaaagtggaagagttgctcccaacagacgcagaatagcaaacctcccctcaagtgtgtagctaaatca

SEQ ID NO: 190545 - DNA, 436 bp, Gossypium hirsutum
aaaacatttatggtttcaactagtaattaggaatttgcacaatgcgtgtatatgtatttcattttcccctattagatatgctaaacctttatctttatattgcaagatagctcatgttctgttgattttgattctattacttcattaaaatatgaaactcatttttggttcatctcagttgctgattctctattaatctttaatgtaagtttttgatcgactcattgtttatatgcttaaattgccgtttgctttcttaatgatgctaatgctatttcattattttattttccttgggtgggttaatgtctgttctttgcagagatgttattagtgaaaactgccaaaactgtaattaatggcaatatatgctgataccaaatttctttttctagttggttaaccatcgaggaactatacgagcattttgctgttt

SEQ ID NO: 190546 - DNA, 1526 bp, Gossypium hirsutum
tcgcctacgcgtccgctccatttatattttctctacaggtttcatttagatttcgtttacatctgatttgaaaaagttttgatttgattttcgaagtttttgatttggttgtcaaattttcagagagaaaaacaaaaaaacactcccgaaatggcacgcaagaagatcagagagtacgattccaagagattgttgaaagaacatttcaagaggctttccggtagagatttgccaatcaaatctgcacaaattacggaatcaactgatttcaatcagctagtagagaaggagccatggctttcgtcacagaaactggttgttaaacctgatatgttgttcggtaagcgtgggaagagtggtttggttggcttaaatctggattttgctcaagttattgctttcgtgaaagagcgccttggcaaagaggtggaaatgagtggatgcaagggacctgttacaactttcattgttgaacctttcatccctcacaatgaagagttctaccttaacgttgtctctgagcgacttggttgcagcattagcttttcagaatgtggagggattgaaattgaagagaactgggataaggtcaagaccatatctgtcccaaccgggtcgcttttgacatcagaaacttgtgctccacttgttgcaacccttcccttggagatcaaaggagaaatcgaggagttcatcaaagtgatctttaatctgtttcaagatctcgatttcacattcctcgaaatgaaccctttcacgctggtcgacggaaagccttatcctttagacatgagaggcgagctggatgacactgctgctttcaagaacttcaagaagtggggtaatatcgaattcccattgccttttggaagaactatgagtgcaaccgaaagctatattcacgggctagacgagaagaccagtgcatcgttgaaatttacggtgttgaaccctaagggacgcatttggacaatggtagctggaggaggtgcaagtgtcatctacgctgatacggttggagatcttggttttgcttctgagctcggaaattatgcagaatacagtggagcacccaacgaagaggaagtattgcagtatgccagagtagttattgattgtgcaaccgcagaccctgatggtcgcaaaagagccctcgtaattggcggaggaatagccaactttactgatgtcggtgctacatttaacggcattatccgagccttgaaggagaaggaatcaaagctcaaagccgctcggatgatgctatacgtgaggagaggaggtccaaattaccagaggggcctcgcgaaaatgcgggcacttggagaggaaatcggaatccctatcgaggtttatggtcccgaagctacggttcgggttcatgttcggtctctgttttttttttctccgtttcaagtgggtcattttcattagatttcccttttgccatgttactgaaacatttggaatttatttgctgaaaagtgaacatgaaatcttaggcataaatggcatttgtcagcaat

SEQ ID NO: 190547 - DNA, 525 bp, Gossypium hirsutum
gaacgcagtagctctaactacctccgcctgtctttcaacgagaagagaacaagaaaagaaactaagaaatggcacgcaagaagatcagagagtacgattccaagagattgttgaagcagcacttcaaaaggttttccgcctacgatttgcccatcaaatctgcacaagtgacggagtcaactgatttcaatgagctagtagagaaggagccatggcttttgtcgcagaaactggttgtcaagcctgatatgttgtttggaaagcgtgggaagagtggtttggttggcttgaatcttcatttcgctcaagttactgcatttgtgaaagagcgcctcggcaaagaggtggaaatgagtggatgtaaaggacctgttacaacattcattgttgaacctttcatccctcacaatgaagagtactaccttaacattatcttcgagcgtcttggttgtagcattagcttttcacagtgtggatgaaattgaaattggattagaacttgtgacaagggttaaaacccttatt

SEQ ID NO: 190548 - DNA, 655 bp, Gossypium hirsutum
cgacccacgcgttcgtccacgcgtccggttaaaaaaaaaaatctccaagccaaaccatttctccgctggcatttgcttacaacaaaaaaaattcaaattgaagaatgcctgtatttgcttcaagagttgggttcaggagacacgactacaagaatagatcaaaggaacgaaacgatgaccgtaaagacaaattgtccgaagtgttcaagagctatgctgctaatgggctgctagacaaggaagggctgaaagacgcttttctacatctagatgctgccatgccgtaccggcaagccgaagacgccctccgtgtcgtcggcaaaacctataacattaacgtcgaggaggaaaccgagcttaacgcccttatcgactatgcttacaataagggttacgggtcttcaatttgattagctaatttataagctaaatttctttttctttttcacttttaatcatctaatatgtttttttatatatatttaagtttcgtcccaaaagacgttattatagaataaaggtttcgtggcttatgatggtgatgtagtttttgcatgtactttgcaaagactataatatatatatgtttgtgtagcaatgaacatgatgatgttctttatcaattataaagatctgtgttgaatgttattattat

SEQ ID NO: 190549 - DNA, 490 bp, Gossypium hirsutum
cccacgcgtccgcccacgcgtccgcaaaaaagaaatctccaacccaaacccttcctccgccggcatttgtttgcaaaaaaaaaaaaaaagaagttcaaattgaagaatgcctgtattttcttcaagagctatgttcaggaactacgacaagcatagaaagcaaaaaagtgaccctaaaggcaaattgtccgacgtgttcaggagctatgctgattctaatggggagctaaacaaggaaaagctgaaagacgcttttctacatctggatgctgccatgccgtaccggcaagccgaagaagccctccgtgtcgtcggcaaaagctattacattaacatcaaggatgaaaccgaccttaacacccttgtcgactatgcttacaataagggttacgggtattcaatttgattagctaatttataagcttattttctttttctttttcacttttaatcatctaatatgttttttttaaatatatgtaagtttcgt

SEQ ID NO: 190550 - DNA, 410 bp, Gossypium hirsutum
gcgagcagacaacgaggcctggaaagcaacggttggtcttcaaatcaaacatcacctgcatcgcaatggttttcttcaaaagcagcaaagaaggataggagcaaatggtttagagaactcgtaaacactcctctatcactcctaaaccagttggttaaattatttgcatagcctactctgattgctgttatttgtgggaaaattagtctacattctttaagctgatcttcaactgcttcctacattgttttagccttgggaagaaagttcgcgagatgcacacgagtttggaaaacttgttctgttttagaacttggatccagcttactcttcagcagaagtggagggtcatcctgaagaattaggatcacttgttgaagttttaaagagtggaatggttacaagtgatt

SEQ ID NO: 190551 - DNA, 656 bp, Gossypium hirsutum
  unsure (1)..(656): unsure at all n locations
accctatcgtgccttgacttccttgactgcagatccacctccaccgatccacctccagtcctccacccacttccagaatcaagcgtttaagggtttgtttcttcccgaatcgccaagtagaagcaagcatacaagaacgaggagtttggtataggcattaggtaccagattcactcaatttgtacagcctgtatttcagaggtgcataaatatcatccagactcaacaattggctaagaaacaatcgacattgaaatcgatttggcataccttagcttcctttcctgcatcaagctacctccgtcctccatcgatccacctccggtctacctctggtcctccacccagttccagttccagaaaatcaagggtttgtttattcccgaatcgccaacaaattcgtatttaaggtgaaaaattatcaaatttgacaggatgagcatgaggtagcagatacaaatattaaacggcagaaggtgctttatttgctacatgaaattctgcctctgcttcgacatatacaacaggagcaacatgctgactagaggtggaagcagtatcaggtgtgcaatgacagacatgacataatgtatcaatgatgatgataggatcantgattggatcactcagcttttgttcaagagaaactgtgtttn

SEQ ID NO: 190552 - DNA, 426 bp, Gossypium hirsutum
aagaagaaaagggggaagaaaaatgctgcaactatgggggatttatcccgactttaccctacttttgaaaccatggtatgagataggctggtctcccaatatttccttaatcgaagggaggaaaaccctaattttgtctctcccaagagatgaaaggaagggaaaaatggtgttttacttcaaagcccgggcagaagctagcgattacaatatggcttcatcgaagatatatgttcattggcagggaagaggaaagtaaagttctataaatactggagcaatacaatttagctttggcagtatcatctatatcttacatcccccaaccgtcgaagttcactgaattgatatgcacacaagattggttgcagatgcaatcagatgggtacatgaagattggataaccaggaatgtagcagatgtagt

SEQ ID NO: 190553 - DNA, 1861 bp, Gossypium hirsutum
tcttctgagggtgttaaggaaggcctcacaagtgtatcggtgggagggactccaccttgatttttgatcgcagatgatggttggcagcagattgaaagtaagcccaagggagagtgattgtgttgtacaagaaggggcgcgcagtttgcgagtaggttgactgggattaaagagaatgcaaagttcaaaaagaatgaccaaaacaacgaacagatctctggcctaaaacatgttgtagacgaggccaagcagcatcataatgtgaagaatgtgtatgtgtggcatgctttggctggctattggggtggagtcaaacctgcagctgctggtatggaacattatgatacagcattggcatatcctgttcagtccccaggtgtgatgggcaaccagccggatatagttatggacagccttgctgttcatggccttggtttggtgcatccgaagaaggttttcaacttctacaatgagcttcatgcctacctggcttcatgtggagttgatggtgtgaaggtcgatgtgcaaaacatcatcgagacacttggtgctggacacggtggtagagtatctcttacccgcagttacgttcaggcccttgaagcgtcaatttcccgaaacttcccggacaatggatgcatagcatgcatgtgccataacactgatggaatctacagcaccaagcataccgctgttgttagagcttctgatgacttttatcctcgtgaccctgcttcacacactatccacatttcctcagtggcttacaacacacttttcctcggagaatttatgcaacctgatcgggatatgttccatagcttacacccagctgcagattaccatgctgctgctcgtcctgttggtgggatgtgctatggttgggtcaggtgattaagcctggcaaccacaattttgagctcctgaagaagctggtccttcctgatggatcagttctccgcacccaattgcctggcaggcctaccgttgactgccttttcgctgatccggctagagacgggattagcttactcaagatttggaatgtaaacaagtgctccggtgtggttggtgttttcaactgccaaggtgctggttggtgcaaggtcaccaagaaaacccgaattcatgatgcatcacctggtacacttacaggttctgtttgtgccaacgatgttgatttgatcgctcaggttgccggtgcggactggaatggggagagtgtggtttatgctcatagatcaggagagctggtacggttacctaaaggtgcttcagtgccggtaacacttaaggttctcgagtatgaactattccacttctgtcccgtcaaggaaatttccaacaccatttcatttgcaccaatcggccttcttgacatgttcaacagcagcggtgccgtggagaagttcgaagtacaaatgacatccaatgagaaactgcagttctttgatggcgaggtttcctcggagttgacaacttcactcagcaacaaccggaatccaacagcagcgatcagtctcaaagtccggggttgtgggaggtttggtgcatactcatctcagcatccgttgaagtgttgtgtggacaatgccgacactcacttcaactatgactcagccaccggattggtgacacttacattgccagtgccatcggaggagatgtacagatggcacgtagaaattcaagtctaagtttagcttcaggttattttattaggccatcatattaaaagtcattattgtattgagggagatttcatggctttctagtctagtctagtctagtggtaatacgtaattggggtcctctaccgtgctgtagctactttctcttaaataaaattgcctctctctcg

SEQ ID NO: 190554 - DNA, 434 bp, Gossypium hirsutum
atttggagtatgtgaagagagaaaaaaatggacaattccaagcatttcttctgaaatatgtaaatagttgggttgtaagcatctattgccataaggtaattaggttgtccgctgccacccaggattaccccagatccatcatctgcaatgttcatggagttaatcccaagttccttgagataggcaaggaaaggtttgagcaacaacatagcagtatccaccaggccttcaccaaaggtgcttactacattgggaagatgatttggaacaaaggctatggggagctacttaaactacttaatgatcaccaaaaggagctcgctggtcttgagattgatctatacggcaatggagaggactccgatcaagttaaagaagctgctaacaagctgaaactgacaggtagagttcatccgggtcgtgatcatgctgat

SEQ ID NO: 190555 - DNA, 436 bp, Gossypium hirsutum
ccgtttcgagaaaccacaagcatgatgtaccacccaaggggaatgtgggtgatggctttgagatgaaacctgttgatgtggaaatgggagagggcaatcactttgattgtgagttaagggaggaggtcaatcgtaagcgtaggagaccacctaaaatgaagggcagtgagaggagtgatcaatgtaatagcaaggtaaaggaaggtatgatccgtaagcgtggaagaccacccaagctgcaggctggtagtaagggtttgaagagtaggcttatagatgggagaaaaaagttgggtgggctaagaagaggcagaaaaaagttgagagggaggttgaaatctaacattcctagtacttcattgtcagagaagaaactgattgcataagattcaaatcttaagaggtttctatctgctaataaggatatatttgatga

SEQ ID NO: 190556 - DNA, 448 bp, Gossypium hirsutum
ggcggcggctgctgcttctcaggcagccgcagcctccgttcccgtctctgatgacgtggcggttgtagaaggttgtattgacaacgatagtgtacagattggggattcatatgattccaagacatcgtttttgatctccgatgggagcatcactgttcatgctggtgaaagattaggtcgcggtatagttactgatgcaattactactccagtggttaatacttctgcatatttctttaagaaaactcaggagcttattgacttcaaggaaaaacgccatacaagttttgaatatgggcggtatggaaatccaacaaaatttattggtggacacaatgatgtccttgctggttgtataagtggttctgagaagttggttacagaaattcgtactttgcatcatattttgggtggtactctcaacccaaatgctgcgtatctaatcatc

SEQ ID NO: 190557 - DNA, 1177 bp, Gossypium hirsutum
gattcagttaagggttcgcacatgtgggacatagacggtaatgagtatatcgactatgttggctcttggggaccagctataattggtcatgcggatgacgaggtgcttgaagctctggctgaaacaatgaagaaaggaaccagctttggcagtccttgtcttcttgagagtgttttggcagagatggtaatctcagctgttccaagcattgaaatggttcgatttgtaaactctggtacagaagcatgcatgggtgtgctccgccttgcccgcacctttactggccgagaaaagataatcaaatttgaaggttgttaccatggccatgctgatccatttcttgtcaaggcaggtagcggagttgctaccctagggctccctgactctcctggtgttccgaaagcaaccacttctggaactctaactgccccttacaatgatatatcggctgttgagaatctatttaacagtaacaaaggggaacttgcggcggttattcttgaacctgttgttgggaactctggcttcattccgcctaaacctgacttccttgaggctctacaacgcttaaccaaggcaaatggcactctcctcatatttgatgaagtgatgactggatttcgcttgtcctatggcggggcacaggaatattttgggattactcctgatttaacaaccctagggaagataattggtggtggtcttcctgttggtgcatatggaggaaggagggagatcatggagatggtggcaccagcagggccaatgtaccaggctgggaccttgagtgggaacccattggcgatgacagccgggatacagacccttaagcggttgaaagagccaggaacatacgaatacttggataagatcaccggacaacttgttcaaggcattttagatgctggaaaaaagacaggacacgcaatctgtggggggtatatcaatgggatgtttggatttttcttcacagaaggacctgtttacaactttgacgatgcaaagaagagtgatacggcaaaatttgccaggttttataggggaatgctggaggaaggtgtatacttggcaccttcacagttcgaagctggatttacaagcttggcacatactcaggaagacatccaaaagaccattgcagcagctgagaaagttcttagcaagatttaaggtactt

SEQ ID NO: 190558 - DNA, 421 bp, Gossypium hirsutum
acagtgtctgatcataacggtgttctcttctcgacagagaggcatacacgtaccaaggagtcatggtatttgctttgcctggggaacctggtctgaccgagttggccggggacttcaaaattcattttcatgatcgccaaggagatttttactgttggctaaacacaacaatgatggaaaacagaaaaattctgaataccagtgatcttgattggtttgacaagaggaaattaccttcccctggtttccaggttgaggttgtgctagcagattataatgaccctgttccgtcgaacccaccaaccaaaactaccacaactaagccagatgaaagttcaggcaccagtgcagccccatcaagcaacaataacaacaaagatgatgtgttctcagacggtgaggaagaagagtctgccacatc

SEQ ID NO: 190559 - DNA, 767 bp, Gossypium hirsutum
cggacgcgtgggtttgtctaagggctgggatacccgaattgctgttttctcccccccccacaaaaaaaaaaaactccaaatctaaagagagactttcctctcctccgatcctttattcgtcttggtttatgagctcgaaggagaaacccactctcggtggtacgcggattaagacccgcaaacggaatattgctgcgcctctggaccctgcagcatttgctgatgcagtagtccagatctatttggataatgctggtgatctggaacttgttgccaagaaccttgaatcttctgatcttaacttctcaagatacggtgacactttctttgaggttgttttcaccggaggccgcacacaaccaggcacaatcaaacctgatgagggggagcgccacccttactctgtaatagagtgtgaggctaaacgtgaagccattttgccatctgtgatctacatacagaaaatcttgcgtcgaaggccttttctgataaagaatcttgaaaatgttatgcgaagattcttgcagtccttggagctgtttgaggacaatgaaaggaagaagcttgcaattttcacagcacttgctttttcccagaagctatcagggctgccacctgagactgtgttccagccactgctcaaggacaatcttgtggtcaaagggctagttctttcattcataacagacttccctccagggagtttcctggtggaattattagcctttgaacgatatatatttccatttcctgaatccgaaggaatc

SEQ ID NO: 190560 - DNA, 977 bp, Gossypium hirsutum
cccacgcgtcctctattttctgtcagatttcttttttctctctcaaaaatctctcaaatccaatactctccgctcctctgatcttttcttcgacttggtttatgagctcgaaggagaaacccactcttggcggtacgcggattaagacccgcaaacggaatattgctgcacccctggacccttcagcatttgctgatgcagtagtccagatctatttggataatgctggtgacctggaacttgttgccaggagcattgaatcttcagatcttaacttctcaagatacggtgacaccttctttgaggttgtttttgctggaggccgcacacaacctggcacacttaaacctgatgaaggggagtgccacccttactctatcatagagtgtgaggctaaacgtgatgccattttaccatctgtgatttacattcagaaaatcttgcgccgaaggccttttctgataaagaatcttgaaaatgttatgcgaagactcttgcagtccttggagcttttcgaggaaaatgagaggaagaagcttgcaattttcacagcacttgctttctcccagaaattatcagggttgccacctgagactgtgttccagccattgctcaaggataatcttgtggcaaaagggctagttctttcattcatgacagacttcttcaaggactatctggtggataatagccttgatgatttaatttctcttctgaagcgagggaaaattgaggatgatctcctgccggttttcccctccacaaagcgatctgctgaagggttctctgagcattttaccaaggcagggttggtacccttggttgaatacaatgagaaaaaaaatatttgaggtaaaattgaaggaaatgaagtctgctttgacaacacagatagtagaggaatctgatatgtctgaagtcattgaaactgtcaaacaacgtgttaaagatgctaaattacctgatattgaggttat

SEQ ID NO: 190561 - DNA, 649 bp, Gossypium hirsutum
  unsure (1)..(649): unsure at all n locations
ccgggaagaacacagatacatagaaccaagaaacagaaaaacatgggttctgaaaagcaagggtttatatggttatcagggcttttgtttctaaatatccttgccttatccacagctgaagtcctttattacgagttttttttgcaagaatcccagttcactaagctgtgtagcacgaagagcatcttgaccgtcaatggcagctttccagggcctgagattcgggttcgcagaggggacacagtttttgtcaacgtccacaatcaaggaaaccatgctgtatccctcaagtgggagggcgttaagggttcaattgatggttcgaatgagttgattcagccagggagaaacttcacttacaagatagagttaaagggtgaaataggaactctatggtggcacgccaccagtgcttgggctgcggcaaccgtccacggtgcctttgtcatttcgccggcagcgaatgaagactatccttttcccgcacctacttctgaccaaacaattatactttgggcaatggttcaagcaagagttaacagaaggttgataaaccatagcttctgccgagcagatgctacactatcnatgccatcccgagaaactatgatgcagcacgatcaactttgagatcaatagatacgagccn

SEQ ID NO: 190562 - DNA, 442 bp, Gossypium hirsutum
atctaacttcttgtgatagctttggataagaacttataacatatgaattactacgtatagcttgctaggaagcctttacttgaccaggtacttgtggaacctttggaattagagtatagatatgcttcattgaaggtttttggtgcaatcaatggtttaactttattcaagatatcttctaatttggtctattgatttaagattgttttgtgattttttgatcctgtaaagtcctcatttctgggtttgacaaagttttctaggaagagatagatgtacttaagtttggttccaataagtgttactttatatagataattcatttctgttccctatgttaccatctaagacatacaaaattgattacgtacatgcttctcgggctaagaattgatacatgtgtgtatgcatgttagatatctagtttttaaatatggtgaag

SEQ ID NO: 190563 - DNA, 393 bp, Gossypium hirsutum
ggaaattctcgaggtgacccaagttaccccaacctttaactcaccaaaatgaacgactgagttccgtcttccactcactttctccgacataatctggttcaagtttcctcctgttgagcgcctcttcttttaccaattcgacgagttaacccctgcctgtttcaactcagttatcctcccaaaactcaagcgctctctttccctcacactcgtccattaccttccccctcgctggcaatctcaagtggccaccaaacgaacctaaacccatcattttatacactccaaacgatggagtttccctcacagttgcccactccgatgccgactgtaacatactctgcagcgatggggtctatgacgctgctgagttgcatgctatcaaacctgacc

SEQ ID NO: 190564 - DNA, 517 bp, Gossypium hirsutum
gtaatggagaggaagaaacccaccgattccaactggaactctaagttgaacatagccatcatacacccagatcttggcataggtggagctgagagattgattgttgatgcggctgttgaattggcatcccatgggcacaatgttcatattttcacagctcatcatgataaaaatcgatgctttgaggaaacccgtgccggtatctttccggttactgtgtacggagacttcctgcctcgacatattttctatcgccttcatgctgtatgtgcatatcttcgctgcatttttgttgcactttgtgtgctgttcatgtggccttcgttcgacgtcatactagcagaccaggtctccgttgtcgtcccgttgttgaagcttaaacgatcaaccaaggttgtattctattgtcattttccggatcttttacttgctcaacatacaactttgttgcggaggatatatcgaaaacctattgatattatagaagaactgacaacaggaatggcagatatgatac

SEQ ID NO: 190565 - DNA, 811 bp, Gossypium hirsutum
gttggcttgtggacggcgtcttcgtttatgttttctcgcggccatcacaagggtctctctggcactttttctcgtctatataaactcaagcagagtcgctcttagaacccatcttcatagcattttctagagagaaagagagagtttcttattagctgctgcggaaggtttattttctttaccaaagaataaaagctttttctgcagtagcgttcaagtttttaccaatccaaaatttcaatttaaagaaaaaggagaaaacagaaatggctcgctctttctcaaacgctaagcttttctctactttcgttgtcgatggaatctctaacgttatctccagacgaggatatgcggcggcgtcacaaggaattgtgtcgagtggaataagaggaggagcaggaaggagcgctgctgcggtagtcaagaaaacaggggaagagatgtctggcggagctaaagagaaggtttcatgggttcccgacccggttaccggatgctacagacccgagaactgtgccaacgagatcgacgtggcggagctcagagccaccctctttaagaaacactttaaaaaaaaaaaaaactcctagatccccctgaaaatgagattaacccagcatgcttttcaccgaatattaagtctaaatggttttatgccggcaaaccccaggggggatttagaatgttttaagtggatcccccaaaaagaagctttccatggtggcgccacttttaaaatgatctgggctacttctaacaccttcattttttcgggaggacttcttggggttccttatataaaagggggggg

SEQ ID NO: 190566 - DNA, 874 bp, Gossypium hirsutum
  unsure (1)..(874): unsure at all n locations
nttttcaaccccttgttatattaaaaggcctgctttaaaacctaaaacagcatncggtttaaaatggcattctccatagtgcattgaggtagtggctttgatagcaggcaaaggatgtcaagcatattggacgagttttccatccagtgtaacacgccgtaatgtacgctcnaaggnnaatggtacggccccctgaggttttttttttttttttttnntnnntcttacgtttcttttttttaatagatttctagagagtttcttcttcttcttcttcttcttcttcgctcctgtagaaagtttatttgctcttcaacaataaaaaaaataaaaaaagctttcctacagcagcgctcaagtttttatcaatccagagtttgaatttgaattgaacaaatcaatattaagataagagaaatggctcgctctctctccaacgctaagcttttctctacttttgttgtcgatggaatctctaacgttatctccagacgaggatatgcggcggcatcacaaggaattgtgtcgagtggaataagaggaggagcgggaaggagcgctgctacggtggccaagaaaacaggggaagagatgtctcgcggagctaaagagaaggtttcgtgggttcccgacccggttaccggatgctacagacccgagaactgtcccaatgagatcgacgtggccgagctcagatccatgctcttgaagaagcactaaataaccaagggtgacctggttgcttgctcctctgtccttttgtcgacgaaatagattttaagatttgatgatgtaatatttataataaataataatacttaacatttttaatcaattttgttgacttgctaaaaaaaaaaaaaaaaaactcgag

SEQ ID NO: 190567 - DNA, 681 bp, Gossypium hirsutum
cccacgcgtccgcccacgcgttctttgagagtttcttcttcttcttcttcggtcggcttcgctcctgtagaaagtttatttgctcttcaacaataaaaaaaataaaaaaagctttcctacagcagcgctcaagtttttatcaatccagagtttgaatttgaattgaacagatcaatattaagataagagaaatggctcgctctctctccaacgctaagcttttctctacttttgtcgtcgatggaatctctaacgttatctccagacgaggatatgcggcggcatcacaaggaattgtgtcgagtggaataagaggaggagcgggaaggagcgctgctacggtggccaagaaaacaggggaagatatgtctggcggagcttaaaaaaaggtttcccgggggttcccaaccccggttacggaatgctacagaacccgaaaactgtcccaatgggaacgacctggccgaacctaaatccatgctcttgaagaagcactaaataaacaagggtgacctgattgcttgctcctctggccttttgtcgaccaaatagattttaagaattgatgaagttataattataataaataataatacttaacatttctaatccaaatgacataaataaaacttcagggggggcccggtaccccattgccttaaatgaagcgattacaattag

SEQ ID NO: 190568 - DNA, 419 bp, Gossypium hirsutum
gttcacagccgtcccatatttcagtgtgttgatcaactttctcagggagcatcgcagtctcaaaatgagtctcggcataaagacattcccatgtttcagagaattttgatgaatggcaatgggtctttcaatcattcttcagaattacagggcaattcaaatagtcaggctgggcaagcacaaaatatgcacactttagatggaagctcgaagattcccaatgtacttgagcggcagttaagtttacagaatgatgccaggtctccttcacagagttttgggtctcatgaaatcgcttcaaattacagcttagagaataagcgaggcatgagagagaagcatggaggtagcttatataggagccgtagccagaaagagcaagacaaacttctgcttggtggagctgattgtgctgagac

SEQ ID NO: 190569 - DNA, 498 bp, Gossypium hirsutum
  unsure (1)..(498): unsure at all n locations
cccacgcgtgcgtgcatcctttactcatcacttcaagtctttatctcccctcttaaaacaaaaaccatggttcaagaaaagaagctagtccaggacgtatctggttggctaagagtctatgatgatggctcagtcgacagaacctggactgttccccctgaggtcaagttcatggctgaaccagtctcaccccatgaacaattcattgatggtatagccactcgtgatgtcaccatcgatcaaaattcaggcctccgggctcgaatttacttgccggaggaggaaaatcccaagtttccgatcatacttcatttccatggcggtggcttttgcatcagccaagctgattggttcatgtactatcagttttacactaggttagccaaatcgattccagctattgtcgtctcggtttacctcaggccagcacccgagaacaagcttccggcagcttgtgacgatggctacgccgctctcctttggcttaaatcgntatct

SEQ ID NO: 190570 - DNA, 414 bp, Gossypium hirsutum
atcggttactaatttaatcggtggatttcgccgattggtaatccccccattttgcccagattaggcgccgcataggtttaccatccctgttataccctctcatctgcttcccctttgtttctcttctgttccttctagcctctgccgattttcttgttggtaagttaatcccctccagatttccttgttgctgaagccttagttgcagcttcttcaagctttcgaactgcactttctgatttccttgttgcttcttcctcatcgcactgtgcccggatttcttcatttacagataaatatgtcaggtgttccacaatcacatgcttcttctcaagctgctcgaggaagcaaaagaaaatgggttccagaagaagatgcaaccttggtttcttgcatggtggatttgcacaatgt

SEQ ID NO: 190571 - DNA, 722 bp, Gossypium hirsutum
gcgaaatgtgttgactgtcaccttgcaaaacccagattaccataacagatgcaaaatctgatcggtgaacataagaaaatggagaccatgggaaaacttctaatcctgcttacagcttttttatgcctctacctcttcgttgctttgctcaatgttttctacaagtattggtggatacctcaacgggtacagttcatcatgaattcacaaggaatcagaggacctccttatgaatttatccatggaaacaacaaagaagctgcccaaatgctcatggaagcatctaccaaacctatgggcttgacacacgatatatttcccagagtcgtgcctcatgtttactcctggatcaacaaatacgggagcacttttcttagttggaatggaattcgagctcaactgctaattacagacccagaactggtcaaagaggtccttaaaaacagtgaaaaagcttttcgaagacaatagcttataattcttcgacaggctataggcgactgccttgcttaaccgaacgtgttaattgtgcaggctaagaaactgacattatgcctatatgagagagctaaaaattgactcagcttagtgtatgatgaaccttctgataatgaaatttgaggcataaattgatgtctatagtaatttgctctgaatgtacgaacgtcttgtgattcttgaggatatattgattgtacaatttaatctctaattttagaaag

SEQ ID NO: 190572 - DNA, 398 bp, Gossypium hirsutum
attgatgatcctgtaaacaagcatgctcggagggtcgggtcatcagttgcagtttatggaagtttgattgtgatgctggtatttttgccagtcaagtttgctatgaagatggcaccatctatcttcccacttgatatatcggtatctgatccatttactgagatcccagctgacatgcttctctttcaaatatgcattccatttgccattgagcattttaaattgcggacaacattcaagtctcttctccgctactggtttactgcagttggctgggcattaggcttaacagagtttttacttcccagacctgatgagaatggtggccaggaaaatgctaatgtagaaccaggtcagctagatagaccacaaattgtgcaactaggtggacaggaaca

SEQ ID NO: 190573 - DNA, 406 bp, Gossypium hirsutum
ctccattcgatttggcttctttcgattacgaggaagatctgcatgcagttgggatggattccatgccaaagcaggatgtttcaatctggttccagtaacaaaagtctcccccacttaagtgctaatgagcaccagcaaaaaagcccttttgttttttacttggtttgtttttctcctgtttgtagatgtagaagtttagcaagttttaacaggttttcatctgggcttcaataaaaaaacctggaaagcccccatgatcctgcaatcccgttaccgatttacaaatagaatgcgattgtctcataaataagttagtgttattatttacctgggtttttatttctaccatatgatgttgggatagggaatctgtcatgtaatggtgggaagatgatgagtggaaact

SEQ ID NO: 190574 - DNA, 481 bp, Gossypium hirsutum
tgggcagctcacgctaaaatctgatgttgacagttgcgggggagtctttattgagcttataaccgggcgcaaggccattgataatacacgtgctccgggagagcagaatcttgttgcatgggcacgaccacttttcagagatcgtaggaagtttccaaaaatggctgacccactactacaaggtcgttatcccatacgaggattgtaccaagctcttgcagttgcagcaatgtgtttgcaggagcaagcagcaacaaggcctctaataggcgatgttgtgacagcacttacatatttagcatcgcaaacctatgaccctaatgcacctaacaatcaaagcaacagagttggtccgtcaactccaagagtcaaggatgatcgaaggagtatggcagacggtctggacagccccgagggtcgtggatggcatcatggttctccttccacgcatagaaattcacctgattacaggaagaggaat

SEQ ID NO: 190575 - DNA, 1841 bp, Gossypium hirsutum
cccactcgtccgcggacgcgtgggcgaatcgcaaccatcaaggatcatccgcgaaatttcactctatggcacccataaagggcattctttccttgcaaagggcatctttgttaagagcttgcggtgaaaggtggaaactaggcactagatcatttagtactcaaggagcaacaactgctgatgctccacaggcacctcctcctcctccaccgcctgaaaaaacccattttggtggtctaaaagatgaagaccgtattttcaccaacttatatgggttgcatgacccttttctcaaaggtgccatgaaacgtggtgactggtatagaaccaaggatttagtactcaagggtgctgattggattgtgaatgaaatgaagaaatctggacttcgaggacgtggtggtgctggatttccatcgggcctcaaatggtcttttatgccaaaagtatctgatggtcgtccttcttatcttgttgtcaatgctgatgaaagtgaacctggaacctgtcaggacagggaaattatgcggcacgatccacacaaactattggagggctgcttgattgcggcggttggaatgagagctacagctgcttatatctacatcaggggtgaatatgtgaatgaacgtaaaaaccttgaaagagcttgaaaagaagcttatgaagctggactattgggcaaaaatgcatgtggttctggttatgattttgatgttcacgtccattatggtgctggtgcctatatttgtggtgaagaaacagcacttttagagagccttgaaggaaaacaagggaaacctagattgaaacctcctttccctgctaatgctggattatatggttgtcccaccactgtcacaaatgtggagacagtggctgtttcgcccacaatactgagacgtggtcctgagtggtttgccagttttggaaggaagaataattccgggacaaaattgttttgtgtctcaggtcatgtcaacaagccttgcacagttgaggaggagatgagtataccacttaaggagttgatagagaggcactgtggaggtgtcagaggtggatgggacaatttacttgcagtaatacctggaggttcatctgttccacttttacccaagcacatatgtgatgatgtcttgatggattacgatgcactcaaggctgtccagtcaggactgggaactgctgcagtaattgtgatggataaatcaactgatgttgtagatgcaatcgcaaggctttcatacttctacaagcacgagagttgtggacagtgcacaccctgcagggaagggactggatggctctggatgatcatggaaagattgaaagttgggaatgcaaagttggaagagattgacatgcttcaggaggtgaccaagcagattgaagggcacacaatttgcgctttgggtgatgcagcagcttggcctgtgcagggtcttatactgcattttaggccaaagctggagagagaggattagagagcgtgcagaaagggagttgctggaggcttctgcttaatctctgctcagggattacctgtgcaagtggccattatggaataaaattgaagtacccaaaacttggagaataggtgactctcaggcatctggtgttgtggaagtgttttatttgttatctcctaagctgttgtgttaacaacatttcactgttttagaaaataatgaatgtctccaatgtctgggcagggatacttgtttctcatagcatccacaacgtttcttttttggcccatttgatgaacatggttaatgatctgtattctttttatttctttttgggaacatataatgggatctgtatttttcttatga

SEQ ID NO: 190576 - DNA, 1429 bp, Gossypium hirsutum
  unsure (1)..(1429): unsure at all n locations
cccacgcgtccgcccacgcgtccgcccacgcgtccgcccacgcgtccgcctcactccgccatcttcaataatttcttccgttgatctttgttagagattagctttttaatttttcattatgggaaagatcaagatcggaatcaatggatttggaaggatcgggcgtttggttgcgagagttgctctccaaagcgatgatattgagctcgttgctgttaacgatcctttcatcaccactgaatacatgacctacatgtttaagtacgacagtgttcacggtcaatggaagcatcatgagcttaaggtgaaggactcaaagacccttctctttggtgaaaagcctgtcacagttttcggtatcagaaaccctgaggaaatcccatgggctgaggctggagctgagtatgttgttgagtctactggtgtttttactgacaaggacaaggctgctgctcacttgaagggtggcgcgaagaaggttatcatttctgctcccagtaaggatgctcccatgtttgttgtgggtgtcaatgagaaggaatataagcctgaccttaacattgtctccaatgctagctgcaccaccaactgtcttgctccattggctaaggtgatcaacgataaatttggcattgttgagggtcttatgaccactgtccattctattactgctacacaaaagactgttgatggtccttccatgaaggactggagaggtggtagagctgcttccttcaatatcattcctagcagcactggagctgccaaggccgtcggcaaagttttgccagcactgaatggcaagctgactggaatggctttccgtgttcccactgttgatgtctctgtggttgacctcactgtgagacttgagaagaaggctacatatgatgaaattaaggctgctatcaaggcggaatctgaaggcaacttgaagggaattcttggttatgtggacgaagatttagtctcaactgacttcatcggagacaacaggtcaagcatttttgatgccaaggctggaattgctttgaatgacaactttgttaagcttgtgacttggtatgacaacgaatggggttacagttcccgtgttatcgacttgatccgacacatgtctaaggcttaagtgagtgagtgattgtgctttgtgtatccaagctttagcaattttaatttagaagagatgttatgagagaataaacgaattgtacggagcatatttttgtgtgaagaagggttgtttcagttttattacccaagtacttgaatgtttcaagtttcattgcagttgtttttctactttaatgcatacgtggtgattatggtttctctacttaaaagaaataatggtgggacctaaaaaaaaaaaaaaaaaataataataaatattttaataannnnnnnnnnnnnnnnnnnnnnnnnnnnn

SEQ ID NO: 190577 - DNA, 902 bp, Gossypium hirsutum
gcggtgtcaccaatacttcctctcatatataaacttaccccctttttactcattttttcctctcaattctcacttcctttacctccgttcttttgccgtcgtattttttttccagagatttgttcttttcgcttctttcgttatggggaagatcaagatcggaatcaacggatttggaaggatcgggcgtttggttgccagagttgctctccaaagtgaagatgttgagctcgttgctgttaacgatcctttcatcaccaccgattacatgacctacatgtttaagtatgacagtgttcacggtcaatggaagcaccatgagcttaaggtgaaggactcaaaaacccttctctttggtgaaaagcctgtcactgttttcggcatcagaaaccctgaagaaatcccttggggtgagactggagctgattatgtcgttgagtctactggtgttttcactgacaaggacaaagctgctgcccatttgaagggtggtgcatagaaggtaatcatctctgctcccagtaaggatgctcccatgtttgctgtgggtgtcaatgagaaagaatacaagcctgacctttacattgtatccaatgctagctgcactaccaactgccttgctccattggctaatgtcatccatgacaaatttggcattggtgatggtcttatgaccactgaccatttcattactgctactcataaaaccgttgatggtccttaatgaagactgtacaagtgtaaagctgcttatattatataattctaacagaatgtactgcactagtattgtcaaatgtttatcatgaatgtaactgtactggatgctatctattccatattaaattttaattgacttcgtttgcataaaaagctatttaaatacactccttctagtgaag

SEQ ID NO: 190578 - DNA, 925 bp, Gossypium hirsutum
  unsure (1)..(925): unsure at all n locations
cactcacttagcgcttcaccctccgatctctctactccttttatcgtcttcattaaggtttgatttcgtttctccgtcatggcaaagatcaagatcggaatcaatggattcggaaggattggacgtttggttgcgagagttgctctccaaagcaatgatattgagctcgttgctgttaacgatcctttcatcaccactgattatatgacctacatgtttaagtacgacagtgttcacggtcaatggaagcaccatgaacttaaggtgaaggactcaaagaccttgctctttggcgaaaggcctgtcactgttttcggcatcagaaaccctgaggaaatcccttggggtgagaccggagctgattatgtcgttgagtctaccggtgttttcactgacaaggacaaagctgctgcccacttgaagggtggtgcaaagaaggtggtcatctctgctcccagtaaggatgcccccatgtttgttgtgggtgtcaatgagaaggaatacaagcctgacctccacattgtctccaatgctagctgcactaccaactgccttgctccattggctaaggtcatccacgacaattttggcattgttgagggtcttatgaccactgtccattcgattactgctactcaaaagactgttgatggtccatcaatgaaggactggagaggtggtagagctgcttcgttcaatatcattcctagcagcactggagctgccaaggctgttggcaaagtgttgccatcattgaaatggcagctgactgaatggcatnncgtgttccacagtgatgctctgttgtttgactcacggtaggcttgaaagaaggctctagaagattcanggcgctatcaggcgactgaactatttgaaggatcttgctantanataaaactgggtcactgacttgttggacacc

SEQ ID NO: 190579 - DNA, 650 bp, Gossypium hirsutum
  unsure (1)..(650): unsure at all n locations
gganngacgcgtccgcggacgcgtccgcccacgcgtccgcccacgcgtccgctcggctacgtagatgaagacttggtatcaactgactttgttggggacagcaggtcaagcatctttgatgccaaggctggcattgcattaaatgacaattttgttaagcttgtcgcgtggtacgataacgaatggggttacagttctcgtgtgatcgacttgatccggcacatggcttctgcctaagtgagtgattttggtgaaccaaactcatttcataatggactttttaataatagcctcgttcttcagctttagcaaaatatggaagagatgctatgggaataataatagaaattgctcgggattctgggagtttctaattttacactgtaattgtgttctgtctgaaacacttgtaatatatataattacaaggaaccaaacaaacaaggcaaggctaaggtaaacttgggttcaagaagctaaacattctatttagcatcaaaacgtaaagaatttaatttacttgtttaaatctnnnnnnnnnnnnnnnnnnnnnnnnnnnnnnnnnnnnnnnnnnnnnnnnnnnnnnnnnnnnnnnnnnnnnnnnnnnnnnnnnnnnnnnnnnnnnnnnnnnnnnnnnnnnnnnnnnnnnn

SEQ ID NO: 190580 - DNA, 1130 bp, Gossypium hirsutum
cgcgtccgaaattatcagtgcattaccactttgatcaatccttaatttcccaatttcttctgaaaccctaatcctaaattgataccccaacttcggtgttccaatggccactgaggaaccaactgtcgccgtggaatctgcgcctgagccggcggaagagaaccccgctgaggctacagccaatcccaaatctggcaaagcaaagaaagctaaagagcccaaagccaagaaggctgcagctcctaggaagccacgagcttctcctgctcatcctccttacgaagagatggtcaaagatgcaatcgttactttgaaggagaagactggatcaagtcagtatgctatcactaaattcattgaagagaaacagaagaatcttcctggaaattttaagaagcttctgcttttccatttgaagaagcttgtggctgctgggaagttggtcaaggttaagaattcgtataaacttccttcggctaaggcttccaagccggctacaactgcttctgctcccgctaagaagaagccggctgctaagtccaaacctgcttcgaaggccaaggaagggaaacgtgctaaaacaacttctaaatccccttctaagacaaaggctaaagcggcggctaaaccaaaggctgctcctaaggctaaatccaccgcaacgaagacgaaggctgtggctgctgtgaagccgaaggcgagtgcatctgctaagccaaaaaccgtagctaaatcgaaggcgaagccaaaggaaaagccggctaaggcttcgaggacttcaacaaggacttctcctgggaagaaggcggctgtccctaaagctactccgaagaaggctgccgcgcctaaaaaggctccttcgaagagtgctaagccgaaaagtgtcaaatcaccggcgaagaaagctacgacgaggaggggaaagaaatgagaagggaggctagtcgaaataggggtagtcttgtaaattggagtgatgtacagtgggtgtatatggatccatgtatacccacgaaatataacattcagatctcttttttaatatttttatttgagttggttcttttttttttggtgagtttaaaagttgaaacagttgttagatgtaactttcagttgaatgtatttat

SEQ ID NO: 190581 - DNA, 772 bp, Gossypium hirsutum
cacgcgtccgctttgatcaatccttaatttcccaatttcttctgaaaccctaatcctaaattgataccccaacttcggtgttccaatggccactgaggaaccaactgtcgccgtggaatctgcgcctgagccggcggaagagaaccccgctgaggctacagccaatcccaaatctggcaaagcaaagaaagctaaactgccttgctccattggctgtggtcatccacgtcaagtttggcattgttgagggtcttatgaccactgtccattcgattactgcaacccaaaagaccgttgatggtccatcaatgaaggattggagaggtggtagagctgcctccttcaatatcattcccagcagcactggagctgccaaggctgttggcaaagttttgccagcattgaatggcaagctcactggaatggctttccgtgttcccactgttgatgtctctgtggttgacttaacagtgagacttgaaaaggctgctagttatgaagatattaaggctgccatcaagaaagaatctgaaaccaacttgaagggaattcttggttacgtggatgaagatttggtctcaacagactttgttggagattccaggtctagcattttcgatgctaaggctggaattgctttgagcgacaaatttgtgaagcttgttgcttggtatgataacgagtggggttacagtacccgagtgattgacttgatcagacacatggcttctgttaactgagtgattttcgtgtaacagtcgttacatcatgg

SEQ ID NO: 190582 - DNA, 525 bp, Gossypium hirsutum
catcactctttttattttcactcacttcacctgagattttgttttcttttgtttttcagtaatggggaagattaagatcggaattaacggatttggaaggatcgggcgtttggttgcgagagttgctctccaaagcgaagatgttgagcttgttgctgttaatgatcctttcatcaccactgattacatgacctatatgtttaagtacgacagtgttcacggtcaatggaagcaccatgagcttaaagtgaaggactcaaagactctcctctttggtgaaaagcctgtcactgtttttggcatcaaaaaccctgaggaaattccatggggtgaggctggtgctgaatatgttgttgagtctactggtgtcttcactgacaaggacaaagctgctgctcacttgaagggtggtgcaaagaaggtgattatttctgctcccagtaaggacgcccccatgtttggtgttggtgtaaatgagaaggaatacaagcctgatcttgacattgtctccaatgctagctgcac

SEQ ID NO: 190583 - DNA, 612 bp, Gossypium hirsutum
  unsure (1)..(612): unsure at all n locations
aacaagttcacactactcttctcaacaacatggaaacagcatctttttgcaacgcaacaacacacaattttattacttcatctctacccattaagaggatagtcaaacagcttccaaaaccatgtcaaactcaaactcatcattgctgtcactcggggatgccattaggttttagtggtttgcagggtcatggtttaaatattaagccaaagcagcgttatggtgatgcagtagcagcaaggtgtgctacttgggattcagggcttttggctgagttagaaagagaactggaggctaaagacgaagaagaatgggtgaaagtgggaaggctgagagagaaatgcaaggaaaggaagggaatggtggagttgttggagtgtttggaaagggaagcaatacaaggggaagaccatggaagagaagctagtgattacaatagaagagcccagatctttganaagagttccaggttttncangctctcnaagcacgcacccaactacttactctcaaactcttgatcccctgtccttntaatgggatggagggactctatctccaaatgaaattagggaccccaatgttttcccctttggaaaatggatactggga

SEQ ID NO: 190584 - DNA, 630 bp, Gossypium hirsutum
ggcccattccatctgaagaagcaaaatactctttgcgttcttccacaagttccaggaccaacaaaatctcgttccaagctcctttaagttcccaactacctcagaattttaagaaacttgttgtgcatacctggagccaaaattttcgtgatgcaacccatataataagtgcaccattgagactacctcttgagtcagaccaagttcttctgaaagtcatttatgctggtgtaaacgcaggtgatgtgaactttagcgcaggccgttattttcaaggaaccaagaaagaccctggatttgaggcagtgggaataattgctgccattggagattctgtaagaaatttggaagttggaactcctgctgcagtcatgactattggatgttatgctgaattcatgaaggttccttcaaagcaaatacttccaattccaagacctgacccggaagttgttgctctgcttacttcaggattaacagcatcaatcgctttggaagagcttggtcagatgaaatctggaaaagttgtccttgtaactgctgctgctggagggactggacaatttgcagtccagcttgcaaaactggcaggaaataaagttgttgcaacttgcggaagaaaagaaaagg

SEQ ID NO: 190585 - DNA, 400 bp, Gossypium hirsutum
cacaactccccctcaattccatcgctagggttttctcattttttgttttaaatttttttattttcagagaaaaaattaacataagcgtaaagtgaaaaaggattattctgaggatttttttatataattatactatttaaatttttttttttgtatggaaaattgtcaacaagtagaatcgggcacggctctgtgtaagcgcggtggtggtggtggtggtgatgctgagaataatagtgatggtttgaatcgaggagtggagcttatgaacgtcgatcactgccggaaggttccgttgacggaagattcgaatctcgtcgatgtcgcggttcgtggagatggtggtggtattggggaggtgaaattggggaagaagtcaaagtcgttgagatgaaacgga

SEQ ID NO: 190586 - DNA, 491 bp, Gossypium hirsutum
  unsure (1)..(491): unsure at all n locations
aattcccggtcgcccgcgcgtccgcttctcttcaacttcattacaacactcttctaagaagagaagggaaaaagggaaggtgcctgctttccgtcattcccgattccatggcttgtaaaatctcaaattccctgttcctttgcttgggtcctagtcaaaggccaattaggagccaaacaattgctattcattcttctactgcaagtatctgtcatttgaattgggacaatcttcttgttaagggaattaaccataggaagggtataattcccttaagaaggaataaagtcatacaagctgtggcggttccagtaagaccatcttcagcagacagtgctgagtacagaaaacagttagcggaaacttatggattcaggcaaattggagagcctcttcctgataatgttacattaaaggatgttatagacacccttccaagaaaggtgtttgagattgacgatgtgaaagcatggacttcagttntaatatct

SEQ ID NO: 190587 - DNA, 825 bp, Gossypium hirsutum
aaagattctttgtagcctttacttaatttcctgagagcccacagatataaagggcatgcattgatgttgaatgatcggatacaaagtataccccgacttcaagctgctttggctaaggcagaagatcatcttgctaagctttcacctgatgcaccatattctgagtttgaatacgaattacaaggaatgggttttgagagaggatggggagatactgcagcgcatgttctggagacgatgcatcttctcttggacatccttcaggcacctgatccctctatattagagacattccttgggagagtgcctatggtgtttaatgttgtcattctgtctccacatggatacttcgggcaagcaaatgtattaggtttgcctgacactggtggtcaggttgtttatatactggaccaagtgcgagccttagagaatgaaatgcttctaaggataaagaggcaaggacttgatattactcccagaattcttattgtgaccaggttaatacctgatgcgaagggaactagttgcaatcagcggctggaaagagtcagtgggacagagcatactcatattctgcgagttccttttaggtcagaacatggagttcttcgtaaatggatatcaaggtttgatgtatggccttatctggagacttatgcggaggacgtcgcaagtgaaattgcagcagagttacagggtattccagattttattataggaaactacagtgacggaaacctggttgcatctttgttggcttacaaaatgggcgtcacacagtgtaccattgcccatgctttggagaaaacaaaatatccagattca

SEQ ID NO: 190588 - DNA, 441 bp, Gossypium hirsutum
  unsure (1)..(441): unsure at all n locations
ggataattctggagttcctcccttggccttcaccataacagggccgccagtaccatttgtattgtgccctgtgtacaacattccagcagaaacaggagctccagatgcatcaacaagccattttggttgggatgagggtttggataacaatgattcttgtcagaattttgaatcatctgcgggacttgatcaatctgaggtgttaagtacttctagttctacaagaaatgcttcatctctcgagccagtagagcgtaagtcagacattctcaatggtgacattgctagccattggcaaaacttgcaatatggacggttttgccaaaattcacaatatcctccacctctgatttatccttctcctgttgtggtgccacctttatatttacaaggtcattttccatgggatggtcctgggagacctnctncatcaaatgtgaa

SEQ ID NO: 190589 - DNA, 767 bp, Gossypium hirsutum
cccacttgtccgttaaattttcagacccaaaatggctcacttcattacttttctactggtactgtcactttctcttaccttctccttgctccctgaaacagcttcagctcaactaagacaaaattactacgctaaaacctgtcccaatgtagaatccattgtaagaaacgccgttactcagaaattcagacaaacttttgtcactgtccccgcaactatccgcctcttcttccatgattgctttgtccagggttgtgatgcttcagtaattattcaatccaccggcagcaacaaagccgaaaaggaccaccccgacaacttgtcgttagccggtgacggtttcgacaccgtcatcaaggcgaaacaagcggtcgatgcggttccgagttgtagaaacaaggtttcatgtgctgatattttggcaatggcgactcgtgatgtcattgctctgtcaggtggaccatcttatgcagttgaattggggaggttggatgggttaagctccacagcagctagtgtcaatggcaagctgcctcatccagatttcaacttgaaccagctcaactctatgtttgcagcacatggactcacccaaactgacatgattgctctttcagctgcacacaccgttggattctctcattgcagcaagttttcaaaccggatatacaatttcagccgtcaaagtgcagtagacccgacattgaaccgagcatatgcgacccaactacaacaaatgtgtcctaaaaatgttgatcccaggatag

SEQ ID NO: 190590 - DNA, 390 bp, Gossypium hirsutum
gacgcacgcgttcgcccacgcgttcgcccacgcgtccgctcacccaaagtgacatgattgctctttcagctgcacacaccgttggattctctcattgcagcaagttttcaaaccggatatacaatttcagccgtcaaagtgcagtagacccgacattgaaccaagcatatgcgacccaactacaacaaatgtgtcctaaaaatgttgatcccagaatagccattaacatggaccctaacacaccacgtgcattcgacaatgtttactacaagaacttgcaacaaggcaagggattgttcacttccgaccagggtttgttcaccgacaagagatcgaaaccagtcgtagacgcttgggcggctaattcgaatacatttaactccgctttca

SEQ ID NO: 190591 - DNA, 767 bp, Gossypium hirsutum
ctttctcttaccttctccttgctccctgaaacagcttcagctcaactgggacaaaattactacgcgaaaacctgtcccaatgtagaatccattgtaagaaacgcggttactaagaaattcagacaaacttttgtcactgtccctgcaactatccgcctcttcttccatgattgctttgtccaggttcttttaaagagcacaaccattttccagtttttcaccatgttggagctgatgttattttatttatatatataacaatcattatgttgttttcagggttgtgatgcttcagtaattattcaatccaccggcagcaacaaagccgaaaaggaccaccccgacaacttgtcgttagccggtgacggtttcgacaccgtcatcaaggcgaaacgagcggtcgatgcggttccgagttgtagaaacaacgtttcatgtgctgatattatggcaatggcgactcatgatgtcattgctatgtcaggtgtaccatcttatgcagtacgaattggctaggtacagatgggttaagctcacacagcatcttagtgtctaaggctatgacgtctcattcagacataagactggaaccaccttatctatatgatcataccacattgactcacccagtactgacatgactgcatcattagttgcactcactcactgactctatcgttacaaccatttgtcacaccgcttatacagtttcagccgtcagagtacattatacccgacattgaaccgagcatatgcgatctaactac

SEQ ID NO: 190592 - DNA, 406 bp, Gossypium hirsutum
tacaaacaagagagttaaagatattgaggtttgtgttccaattgtttatggaactattgctttttatctcggtcgaaaggctagtgagtcgcaatcacataagtggactgtttacgtgcgtggggcaacaaatgaagatcttggagcagtgataaagcatgttgtatttcaacttcatcccagtttcaataaccctacaagaattgttgaagcaccaccttttgagttatcagaatgtggttggggtgaatttgaaattggcattagcattttcttccatagtgatgtttgtgacaagcatttggatttgtgagttgtttatttggttgctcacttgatttgatgccttgtttactaactaggctctgtatttgtaggtatcacatgttgaagttggatcctgaaa

SEQ ID NO: 190593 - DNA, 438 bp, Gossypium hirsutum
cagccgtccaccactcccaccgtaatcaagaaacctcggccacgaggaagagcacctcaggtcgattatgatcatctgaactgggtgcttattaaatggcttattttagctactctacctccttcaactttagagggaaagtgggtagccaactcctttaaatttttgaatccctcaattccactattggccaggtgagaaggacaagggcagtattccccggaagttttcaggaccttgagagaagatgttagagcatcttttggaacaggtttcttccaaagtctcgattgctcttgatttctggacttcatatgagcaaatattttacatgagcatcacatgtcagtggattgacgaaaactggtccttccgaaaggtgcttctcgatatatgtcaggtaccttacccttgttccgactccgaaatatataactc

SEQ ID NO: 190594 - DNA, 806 bp, Gossypium hirsutum
ccaagagaaagaaaaggctttaaaggaaaaggagactggaaatgatgcttataagaagaaagacttcgagacggctattcaacattacaccaaagcaatggagattgatgatgaagatatttcatacataaccaatcgggctgctgtttatttggaaatgggcaagtatggagactgcattaaggattgtgagaaggctgttgaaagaggtagagagctcagagcagactataaaatgatagcgaaagctttgactaggaagggaactgctttggtgaagatggcgaaatgctcaaaagattatgaaccagccatcgagactttccagaaagctcttactgagcatcgcaatcctgacacgttgaagaaactaaatgatgctgaaaaagccaagaaagaactagagcagcaagaatattttgatccaaagatagctgatgaggaccgtgagaaagggaatgaaagtttcaaacagcagaagtatccagaggctgtgaagcattataccgagtcattgagacgaaaccccaaagatccaaaggcatacagcaatagagcagcatgctacacgaaattgggcgctttgcctgagggattgaaagatgctgagaagtgcattgagctagatccaacattttcaaagggttacacaagaaagggagctgttcagttcttcatgaaggagtatgacaaagctttagaaacataccaagaagggttgaagcatgatccgaataaccaggagttgcttgctggtgttagaaggtgtgtcgaacagattaacatagctagtctaggtgatttca

SEQ ID NO: 190595 - DNA, 416 bp, Gossypium hirsutum
attttgcaacccatgtgtgttgtgaatctcttactaactatggatttagacgatgagagggttgcaaaaagaaggaaaaccatgcttgaagatgatcgtggtgttggacagcagacgacaactgagatggaaacccttccccatgaaatcatcgtcgacatactgtcaaggttgccgataacatctttggtgcaattcaagttcgtatgcaaaggatggcgtgctttagctcaagatcctctccttgctgatatgccaactttcctggaaagctccgaccactaatccatgcctcatccttcactgcgattttcccatccgaaaccagctctattccgttgatttatcggttcacaatcacgacagggacatggtaaaaagattatatgtgcctttccaaacatcgatgcctgaat

SEQ ID NO: 190596 - DNA, 401 bp, Gossypium hirsutum
  unsure (1)..(401): unsure at all n locations
nnnnnnnnnnnnnnnnnnnnnnnnnnnnnnnnnnnnnnnnnnnnnnntagaaagttttttcaaaaaaaaagaggctatgtcaaatcacttcattataacttgaaaagatccgaccagcaagaaatatatgattatgaagtacttcaggcctacataatattaaacttctcatgtctaatctaaacgcaataaacagttgctacccagaatagaagaaataagtaaacaggtgaaagcaagtcccaaaagctagctgtttttagctctaaaatgtctgtttggagatccaaccaaatggttctgctggatttacagcaaccatgagaaacaactctgagcactacactagtttccagatttcttcttcctaaaattgcacttccattacccttttgaagatt

SEQ ID NO: 190597 - DNA, 442 bp, Gossypium hirsutum
cattgattattgttccaacctcaaaagcacaagcaatacagagaagtggacgtgcagggcgtgaaggacctgggaagtgtttccgtctctatcctgagagcgagtttgaaaagcttgaggattcaaccaagccagagattaagcgttgcaacctctcgaatgtcattttgcagctcaaggccctgggtgttgatgatatatttgggtttgacttcatagagaaaccctcaaggacagctattaaaaagtcattggaggagttgctcttgctaggtgctttaactgatgaattcaaactgtcagatccagttggtcgtcaaatggctcggctcccattagatcctgttcattctaaagctctcatcctagctagccagttcaagtgcctggatgaaatgttaattgctgctgcaatgctttcagtagaatctattttttatga

SEQ ID NO: 190598 - DNA, 496 bp, Gossypium hirsutum
gtttgggatagggatctaaagagttcaggtcttttcatggagaaaataggccccggttcggctccaaaggttttcctcttgtctaattctataagttcttccggagcaaatattagtactggtgtttttaacatgactgttatcccaaaaccctggagggctagcatgttagcagcagctctacaacgcaccatgggtgttgggaacaaagggaatccctgtaatgggcagttacctagcttgtctcttcgaaatcttcttcttgggagaaaaattctaatcgtagatgacaacaatgtgaatctaaaagtagctgctggtgcattgaagaaatacggagcagatgtggttagtgctacaagaggaatagaagctattgagctgctcacaccacctcaccagtttgatgcctgtttcatggatatccaaatgccggaaatggatgggtttgaagctacaaggagaattcgggatatggaacataatatcaataatc

SEQ ID NO: 190599 - DNA, 1143 bp, Gossypium hirsutum
aaaaggtgaaggtatattatagctttgcgacaatggcgagacgcgtttccgtttggcttgctttggctgtaatcgcatgctctctaacggcgatctcagctgaagagagcggcgaatcgaaagagtttgtcttgactttggatcaatctaatttcactgacaccgttagtaagcacgatttcatagtcgtcgaattttacgctccttggtgcggacactgtaagaatcttgctccagagtatgagaaagcagcatctatattgagtaaacatgatcctccgatccttctagctaaagttgatgccaatgaggaagcaaacaaagatttagcaaatgaatatgaagtcaggggttatcctgactcttaaaattttgagaaatggaggaaagaatgttcaagaatacaaaggtccacgtgaagctgatggtattgtggagtatttgaagaaacaaagtggtcctgcttctgctgatatcaagtctgctgaagatgccagtgattttattgatgaaaagaagatagtaattgttggggtgttccccaaattctccggtcaagagtttgacaactatatggctcttgctgagaaattgcgtcctgattatgaatttggtcatactttggatgctaagtaccttccccgtggcgagtcatcagtgactggccctgtcgtcagacttttcaagccttttgatgaactctttgttgacttcaaggattttaatgtggaagctctagagaagtttgttgaagaatctagcattcctcttgtgactctctttaacaatgacccaagcaatcaccccttcattatcaaattctataacagtccccttgcgaaggctatgttgtttgcaaatttgagcaatgaaggagttgattccttaaaatataaatttcgtgaagttgctgagcaatacaaaggacagggtattggtttccttttgggagatcttgaggctagtcaagctgccttccagtattttggagttcaagaaagccaggtacctctcatcatcattctggagaatgatgggaagaagtatttgaagccaaacttggaggctgatcacattgcaccatgggtaaaggattacaaggaaggaaaagttccaccatatgtaaaatctgaacctattccg

SEQ ID NO: 190600 - DNA, 418 bp, Gossypium hirsutum
  unsure (1)..(418): unsure at all n locations
cccacgcgtccgcccacgcgccgnggacgcgtgttcggactcgtgttttgacgcgcgggggggaacatgcccggctttatgcaactaaattgggggagactcacatggagaaatggtgcgcttggctctctccactggccctggatggtcattttactttaagaaagttgaaaaatcagccatggagattgaacaagttgttcatatttagagtgaaagcaatcattctgcatgaactagtagttattatataatattagcttcaagtaaataatgctgagagaactgattgttaagattgccttgtttgaagcagcagcatgtatatatatatatatgcttgcttacaaggtttgtctctcagagtccttctctttgtactcttttcagcttaatgaataaactgtttacttatttt

SEQ ID NO: 190601 - DNA, 433 bp, Gossypium hirsutum
tgcatttacgggttgcagtcatagtttgacagcagaagaagatgatgagctacgtaggatgcgttatgaagtcagccattggaaggagaaagagattaatgggacagagagaaggttgctcggtggttgtccactaaccccgagggagacttccctcttgcttagagcattgggtttccctccaagtactcggatttacttggtagctggtgaagcttatggaaatggaagtatggagcctcttaaggaggattttcctaacatcttctctcattcctcccttgcaacagatgaggaattgaatcctttcaagaaccatcagaacatgttggccggtctagactatgttgttgcccttcagagtgatgtatttgtttatacttatgatggaaacatggcaaaggcggtgcaaggacataggcgatttgagaac

SEQ ID NO: 190602 - DNA, 393 bp, Gossypium hirsutum
cagatatctcccttttgcagtactatttattcaagtgcgtcttaaattctgaaggctttgctcattattataaatttgttcatacaatgtctctaggcgtggaccctgcatgaaaataaccaacttttgagccttcttgatccaaaattagtggagtttgatgaagatgaagctctccgagtgataagagtagcacttttatgcattcaagcatcaccatcaatgcggccacccatgtcccgtgtcgttggtatgcttgcaggagatattgaagtgaccaatgttacaacaaaaccaagttatataactgactgggattttaaggatgtcacaggcacctttatggatgaatcgcaaacatccattccatctgaccatagcggcagcgacatc

SEQ ID NO: 190603 - DNA, 898 bp, Gossypium hirsutum
  unsure (1)..(898): unsure at all n locations
caccattgggtggttgatttttatgaaggcaagccctatcaaattcaagtcttcaatggaaccacttctgcaagtctttgtcagcctggagtcaacacccgatgcggtatttcgtactgatgcggttaagtatgctttaattggattaatgagggatcttagaggaattgcaatggccacaaacagtcgtagaacatatggtcttctattcgactggctataccctgcgcacatgccacttatcttgaaaggcattactcactggactgacgcaccagaggttaccactccgttgttaaaattcatggctgagtttgtcttgaacaaagcacaacgcttgacatttgactcatcttctcctaatgggattcttcttttccgtgaagtcagtaaactaattgtggcatatgggacaaggattttatctcttcctaatcctgctgatatatatgccttcaagtacaagggaatatggatttcactaactattctggcaagaggtcttgctggaaattatgtaaactttggtgtttttgaactctatggtgatagggcactctccgatgcactcgacattgctctaaagatgaacattgtcaattcctttggccgatatattgggcatttcggaagctaacgagggcgtacttctcgttctgggaggttctattcaacagccacattaactttatattgaatttagatgcagcaaccttcatgcatattggtggttcccttgaatctggtcttaaggccctgatataatatttcatccatgtgcggcactgttgatatttgctgcttctattcacaacataacttttggagcaccatcttacttgtctgtcaactggcagcttttgaaaccggcctagtgtcccaaatttgagaccttttn

SEQ ID NO: 190604 - DNA, 390 bp, Gossypium hirsutum
gaaaaacagaaactactttgatacagttcaaacacgtaaagagaggagaaaaagaagggcgtttgacttaccagatcaaagttgataacaagattgatagtatgagtcgaaaaatagagcttctttgagtctgctgtgagtgtcaattgaagagcaggggttgaagagcagaaaacgagcaaagttttctacaaattgggaaagaaattaatttaattttcaaggataaaatggtaaaataataaataaaagtaagggtgtttttgtctgttacagtgccaacagctcagttaattcatccactgctactattttctctagctgaaaatcagctgatcagtgtggttgaaaagaaaccccactgcattgacacttgaaaccaaacaacac

SEQ ID NO: 190605 - DNA, 909 bp, Gossypium hirsutum
ttctcgcgtccgcccacgcgtccgcagaatcaggaagcttgacggcagctgaggctaaagttcataagatcggtactcttccaaattatggtttcagtttcaagtgcgatgaacgggctgagaaaaggaaagagttctataataaactcgaggaaaaaattcatgcaagggaagtagaaaagagcaatttgcaagccaagtccaaggaaactcaagaagcagagatcaagatgcttaggaagaccttgaacttcaaagcgactccaatgccaagcttctatcaggagcctccaccccctaaggtggaattaaagaagataccacctacaagagctaaatctccaaagtttggtcggaggaaaagctcaactccttcggactctgatggtaacagcagtagcgatcaccaatcaggccagctaagtctggatgagaaagcatttcagagcacctcttctaaagtaatttctcctgtcaatgcaaagaagccacagcggaaatcacttcccaaactgccttctcagaagactagtctgtctggttcaacaaatgacgaaaagacatctaatacgtccagccagaaaaaggtaaatgcacctaaagcatctaccgagggaaagatagccttgcctaaagcaataaatgaagaattatctccaacccaactgcagccagcagtttctgctgctggttcagatgaaagtcagcgagacattgatcaagtggacttggttcaagagccgattgcactggagcattaagcatggcaatggtttcaagtggatgttcatatacaaagttcttgacctgaatttgcctaaataaggacgtctaagactgaattatttgatgatcaaggcataaaaaagattatacattaccggttatgatgttgtcttctccgatatc

SEQ ID NO: 190606 - DNA, 666 bp, Gossypium hirsutum
  unsure (1)..(666): unsure at all n locations
ggaagaaaggacctattcataaagctgaaggagacacagaatcgtcccccacggcagccgatgccaaacctcttagggttggtacccttccaaattatgggttcagtttcaagtgcgatgaacgggctgagaaaaggagagagttctacactaaactcgaggaaaaaattcatgcaagggaagtagaaaagagcaatttgcaagccaagtccaaggaaactcaagaagctgagattaagatgtttaggaagactttgaacttcaaagcgactccaatgccaagcttctatcaggaacctgcacctcctaaggtggaattaaagaagataccacctacaagagctaaatctccaaagcttggtcgaaaaaaaggctcaattccttttgagttcgatgctgctancaatagcagtcaccaatcaagtcggcgaaatctggatgagaaagcatctcaaagcatctctgccaaattaatttctccaattcaatgcaagaagccaccacgttaaatccttcccaaactggcttctcagaagaactatttggctgggtgcaccaatgaagaaaaaacatctaagggatttgatcanaaaaaagtaactgcttccaaacaactgctgagggaaaataacttctcccaaacaaccttatccaattcgacaaata

SEQ ID NO: 190607 - DNA, 1106 bp, Gossypium hirsutum
cccacgcgtacgcttccaaattatggttgcagtttcaagtgcgatgaacgggctgagaaaaggaaagagttctactataaactcgaggaaaaaactcatgcaagggaagtataaaagagcaatttgcaagccaagtctaaggaaactcaataagctgagattaatatgtttaggaagactctgaaattcaaagcgactccaatgccaagcttctatcaggaacctacacctccaaaggtggaattaaagaagataccacctacaagagctaaatctccaaagcttggtcggaggaaaagctcaactccttcagacattgatggtaacagcaataacaatcaccaaccaggccggctaagtctggatgagaaagcatctcagagcatctctgccaaagtgatttctcctgtccatgcgaagaagtcacagaggaaatcacttcccaaactgccttctcagaagacaagtttgtccggtgcaaaaaatgaggaacagaaatccaaggagtctgatcaggaaacgacaactaaaccgaaagcaacatctaaagtaacaagggaggagagtaccgcatcatcttatttgaaaaatgaagaatcatctccaattcaacaactggaagcattttccggagctaattcaggtggaagtcagcctgacttagatctagggccagtgattggagacttgggtccggagccaattgcggtggagcattaagtatggcaatggttttaagtggacactagtatataaagttctcgacctcattttgcataaataaggacgactgagactgaattatttgatgatcaaaggcatggaaactggaaacttctacattatgagtgatgatgatgtcgtcttttgtcttctccgatatccagcagcttcggtaggtttgcaaaggttgctgaggttgtttgcagcattgtatgtcctaatttatgttgttcaaggatggcttattttgtttctgaagttgtctgctgttggccaaacctgcttaagtccatttatattgtgtaaattgctctctgtttgttctatgaaattagtgtcttgctatttgcagagaatgattacctatctaatttacatttttt

SEQ ID NO: 190608 - DNA, 776 bp, Gossypium hirsutum
gaactttaaagcaactccaatgccaagcttctatcaggagcctccacgccctaaggtggaattaaagaagataccaccaacaagagctaaatctccaaagcttggtagaagaaaaagctcaactcctttggactctgatggtaacagcaatagtggtcaccaatcagtccagctaagtctggatgagaaagcatttcagagcacctcttctaaagtaatttctcctgtcaatgcaaagaagccacagcggaaatcacttcccaaactgccttctcagaagactagtctgtctggttcaacaaatgacgaaaagacatctaatacgcccagtcagaaaaaggtaaatgcacctaaagcatctaccgagggaaagatagccttgcctaaggcaacaaatgaggagaataacactttatctgatgtaacaaatgaagaattatctccaacccaactgcagccagcagtttctgctgctgattcaggtgaaagtcagccagacattgatcaagtggacttggttcaagagccgattgcactggagcatttaagcatggcaatggtttcaagtggatgttcatatacaaagttcttgacctgtatttgcctaatttaatgactactaatactgtaatattttatgatcaattgtttaaaaatgtttttacatttcccgttcatgattgtttttttctctattttataactattctctttttaatttcatttttcttttgttatgccttttttttttattaattttttgattattttttttt

SEQ ID NO: 190609 - DNA, 586 bp, Gossypium hirsutum
  unsure (1)..(586): unsure at all n locations
ctctctcagaaacaagaacaaaagcaaaactctccctaaatcttttgtttctttttcttcagcagtgataatggttgagcctgcaacagcaacccaagcagcagctccggtgatgcctcagctgaaagatgagcttgacattgtgataccaactataagaaacttggacttccttgagatgtggaggccattttttcagccctaccatctcatcattgttcaagatggcgatccttcaaaaaccatcaaggtccctcctggttttgactatgagctttataacaggaatgatatcaacaagattctgggtcccaaggcttcttgcatttccttcaaggactctgcttgcccgtggtttctggttacattggtgtctaagaagaaatacatttttaccattgatgatgactgtntgtaagttcttttattntcttttttcttatggatctttacatgctctgttggaaantagatctnntgatntcttggatgatcttntaggttatcttgtataatancaattctactatatggtcatatgatagaagggttggggctcttttaagatatagtaatacattctatn

SEQ ID NO: 190610 - DNA, 520 bp, Gossypium hirsutum
gctcaaccaataacaatattaaaggccattccgtatttcgcaccataataattccaaaacaaacaaaaaagacacccaaaaattctacttttgcgagagagaaatagcgacgctctggattccacctcctcccgtccttggcgacggtgtttatgccgcttctttttcagcttgtacctgacttggatttagagggatttagtttccttttcaagacatggaacaagtgtgcttctggtcaaattgctaccttttccgagtgtttttcttccaagaagtactcgattggcggttccttgcccgtggagattttcttttggtttcctttgtcaattgcacttagttctcagtctccttttaacactcaacacaggagctggaatgctagttttttctgagataggtgttggatttttagcacatttccgcaatgaattgatgacaaaacatccagatgaggattttgggaaaatgcttttaaggtctgactctatcgataggcagtttaaagttgcatgct

SEQ ID NO: 190611 - DNA, 806 bp, Gossypium hirsutum
accattatcactggtacttggaagatatcctaggatttcaatacaagcagcatttgccaagcaaagcttttaatcctctacactctctcaaaaaaaaaaaaaccaaaaggtgttttgctggcaattagtaaaggagacgatgttacaaagcacattgcaaacaaaatgcaggcggtgcactggattccccaaacatccatctttcagtaaattccaggaacgatcttatagggaaccttgttgcagtatagtttccagtacttaccatatttggaccggcaccggtcatcatccctcttggctcggtcgaataagaggatggtaagaaacacgacgtagaagtatggcagaaaatggttgaataaagccggaacagtccaaaagaatgcagctaatatttctggcacgtaatggaaatgacgagccaaaccccaccatcctgatgttaaaagaacgcctggttttggtttccccgcatgttgttgtgtaggtggcttcaatctttgatggagcttttccccaaattttgcatttgcccttccttctgcgaaattcttgtctttgcctatcacaatcatagttgatatatatgcaaagaatgccaacgacaagaatatatagtgcaagctgcattccaaggtttaccggatggttgacaaggtacatccctggtgaagtatacacggatggaacccaaaccaagcaaccccagcaaatatagaatccagctcgatcgtgtgcaatgtccattgtgttccagtaaccagcttcccaccaaaagaactttgtaacatacacaagcatca

SEQ ID NO: 190612 - DNA, 702 bp, Gossypium hirsutum
ttctttctctgcactgaactagtattagcagcaatggaagttaatgcaatatggttgctgctgctattgccttgctcctttcctggtttcctcatttcatcatgcatgggaaaccagattgactacctcaacaggttggttgcatcacgcagatcctcgaaccctcctcgcccagagtcatgggctcagctagatgatcaaggaaatagtcatagctctccagtgtttgtaggatctcagaaagggttgatgcaagctgacaagatcgacaaactgccgggtcagcctgaaggggtggattttgatcaatatgcaggctatgtaacagtagatccggtggctgatcgagcattgttctattatttcgtggagtcaccggttacttctccgaataagcctctggttttatggttaaatggaggtccaggatgctcgtctttaggatatggagccatgcaagaacttggacctttcagagttaacagtgacggaaaaacgctttacagaaatgaatatgcatggaacaatgttgcaaacgtgatattcctggaatcaccagccggagttggatattcttattccaaaaattcctcagactatacccaagtaggtgacaagagaacagcagaggactcctatgtttttctcctcaactggcttgaaagatttccccagtataagacccgacatctctttataacc

SEQ ID NO: 190613 - DNA, 1465 bp, Gossypium hirsutum
agccgatgttctgcactaattcaacacgaggccgcgcctggagattatcaatttgaagccttcttcgaatttcctcattcaagatgcaaattttcgtcaagaccctcaccggaaagaccatcaccttggaggtggagagttctgatactattgacaatgtaaaggccaagatccaagacaaggaagggatcccaccagaccagcagaggttgatctttgctggtaagcaacttgaggatggccgcacgcttgctgattacaacatccagaaggagtccacactccacttggtgcttcgcctgcgtggtggaatgcaaatttttgttaagactttgactgggaagaccattacattggaggtggagagttcagataccattgataatgttaaggccaagattcaggacaaggagggaatcccaccagaccaacagaggctgatttttgctggtaagcaactggaggatggccgtacccttgctgactataacatccagaaggagtccaccctccacttggtgcttcgtcttcgtggtggtatgcagatttttgtgaagacccttactgggaagaccatcaccctggaggttgagagctctgacacaatcgataatgttaaggccaaaattcaagacaaggaaggtatccctccagaccagcagaggctgatatttgctggaaagcagcttgaggatgggaggacccttgcagattacaacatccagaaggagtccaccctccacttggttctccgtctccgtggcgggatgcaaattttcgtgaagaccctgactggaaagaccatcaccctggaagttgagagctcagacacgattgataatgttaaggccaagatccaggataaggaaggaattcctccagaccagcagaggctgatttttgctgggaagcaacttgaagatgggaggacccttgcagattacaacatccagaaggagtccaccctccacctggtccttcgcctccgcggtgggatgcaaattttcgtgaagaccctgactggaaagaccatcaccctggaagttgagagctcagacacgattgataatgttaaggccaagatccaggataaggaaggaatcccaccagaccagcagaggctgatttttgctgggaagcaacttgaagatgggaggacccttgcagattacaacatccagaaggaatccactttgcacctggtccttcgcctccgcggtggcttttaagtgtggtgccgaacacctgtccagttattgttgatgtgttaagtttgtatgtgtgtgggtcgtatgctaatgtgagctggccactaggctggggaagcttacgagtaaaaataattgcttttatcaacgcttttagttgttctttaggtttcaaggttctatggcattgaataaatatgtttttgcattttgcagtcaaaaaaaaaaaaaattatataataaaattaaataaaaag

SEQ ID NO: 190614 - DNA, 637 bp, Gossypium hirsutum
acacggtcctggatgaccggagctcgtcccactctttcagtcgtcttctcttttagtcctctcgatcccaaagcaagctctcgattccgaatctctcccagaagatgcagatctttgtgaaaacccttactggtaaaaccatcacccttgaggtggaaagctccgatactattgataatgtcaaggccaaaatccaagacaaagaaggcattcctccagaccaacagaggcttatttttgccggaaaacaactcgaggatggccgaactcttgccgactacaacatccaaaaggagtccaccctccacctagtccttcgtctaaggggtggcatgcagatatttgtgaaaacccttacgggcaagaccatcaccctcgaggtggaaagttctgatacgattgataatgtcaaggccaagatccaagacaaggaagggatccctccagaccaacagaggcttatctttgccggtaaacagcttgaagatggccgaaccctcgctgattacaacatccagaaagagtctaccctccaccttgtccttcgtcttcggggtgggatgcagatatttgtaaaaaccctcaccggaaaaaccatcactttggaggtggagagttctgataccattgataatgc

SEQ ID NO: 190615 - DNA, 709 bp, Gossypium hirsutum
  unsure (1)..(709): unsure at all n locations
ggattatcaatttgaagccttcttcggaattcccccttccgagatgcggattttcgtcaagaccctcactggcaagaccatcacccttgaggtggaaagttctgataccatcgacaatgtaaagaccaagatccaagacaaggaaaggggatcccaccagaccagcagaggcttatctttgctggtaaacagctggaggatggccgtacccttgctgactacaacatccagaaggaatccacactccatttggccctccgatggaggggtggtttccaaattttggtcaggaccctcaccgggaagaccatcaccctggaagtggagaggtctgataccattgaccatgtcaaaggcccagattcaagacacaggaaggcttccccccagaccagcacaggctgatcttcgctggttaagcacctggaggatggccgcacctggctgactacaacttccagaaggattcccactccattggtcctccgatgagggtggtttgcaaattttgtaagaccttaccgaaagacatacattgaggtgaagtctgatcnatgacattgtaagccaaatcagacaggaggcatccccgaccgcaaagctgactgtgtagcactgagatgccgccatgtgatcacatccaagtccctctcatggttnnctctgagaagcaattgtagactgctgaaacttcctgaggaagcaaccn

SEQ ID NO: 190616 - DNA, 540 bp, Gossypium hirsutum
cccacgcgtccgaatttcaaagccttcttcaaagcttcaagatgcaaatttttgtcaagaccctgaccggcaagactatcacccttgaggtggaaagctccgacaccatcgataatgtcaaggcaaagatccaagataaagaaggaatcccaccaaatcaacagaggcttatctttgctagtaagcagctagaatatggtcgtacacttgctgactacaacatccagaaggagtccaccctccactgggtcctccgtttgaggggtggtatgcaaatctttgtcaagaccctcaccggcaagaccatcacccttgaggtggaaagctcggacaccatcgacaatgtcaaaggccatgatccaagacaaaagaatggatccctccagaccagctggggcttattttttgtggtaaacagtttgtggatggccgtacccttgcttgctatcacattcagaaggattccactctccatttggttcttccgattgaggggaggtcattcaaaatttttggtaatgtaccctttacttgtaaatg

SEQ ID NO: 190617 - DNA, 865 bp, Gossypium hirsutum
  unsure (1)..(865): unsure at all n locations
cccacgcgtccgcccacgcgtncgcggacgcgtgggcggacgcgtgggcgaacgcccattacttcgggggttgagagttcagataccatcgaccatgtcaaggctaagatccaggacaaggagggtattcccccagaccaacagaggttgatctttgccggtaagcaacttgaagatggccgcactctcgctgattacaacatccaaaaggaatccaccctccacttggtacttcgtcttcgtggtggtatgcagatttttgtgaagactcttaccgggaaaaccatcaccttccgtggaagttgagagctccgacacgattgacaatgtcgaggccaagatccaggataaggaaggaatcccaccagaccagcagaggctgatttttgctgggaagcaacttgaagatgggaggacccttgcagattacaacatccagaaggaatccactttgcacctggtccttcgcctccgcggtggttttaagtgttgtgccgaacacctgtccagttattgttgatgtgttaagtttgttatgtttgtgggtcgtatgctgatgtgagctggccactaggcaggggaagcttacaagtaaaaataattgctttttataaacgcttttagttgttttttaggtttgaataagttcgtttttgcattcaagtttctctcttgttcgaatttacatgaaggtgctaataatctattattaagttattaatggatttcagttttgttctatatttttttagtctctgttggttctctgaaaaattgttttcatgtaaagtgtttttaaaattttttttagtttttttatcttgtgttattttttattatattaccttgtgtataattttttttg

SEQ ID NO: 190618 - DNA, 923 bp, Gossypium hirsutum
cgattaagtcggcaatctctccctataaataaatcaacaaattcccccaatttcccatcaaaatccaattatttcaatagtcttctcttgattccaaatctctcctagaagatgcagatctttgtgaaaacccttactggtaagaccatcacccttgaggtagaaagttctgatactatcgataatgtcaaggctaaaatccaagacaaagaagggattcctcctgaccaacaaaggcttatctttgccggaaaacaacttgaggatggccgaactcttgctgactacaatatccaaaaggagtccaccctccacctagtccttcgtctaaggggtggcatgcagatattcgtgaaaactcttactggcaagaccatcaccctcgaggtggaaagttctgatacaattgataatgtcaaggccaagatccaagacaaggaagggatcccaccagaccaacagaggcttatctttgccggtaaacagcttgaagatggccgaactcttgcggattacaacatccagaaagagtctacccttcaccttgtccttcgtcttaagggtgggatgcagatctttgttaaaacccttactgggagaaccttacccttgaagggggaaattcaaacctttgcaaatggaagggccaaatccaaaaagggaggggttcctcgataaacaagagttaatttttccgggacaaatctaaaatagggtgcactttggattttaaccttcaaaaagatttcccttccactggctttgtatgggggggaacaaaattttgaaaccctcccggaaactttcttggggggaagactctccccattgatatttaggcaatatatgaatgggggcccccccacccaatgttttttcgggaaactttaaaaggcctttttggtaaatactaaagaaacccc

SEQ ID NO: 190619 - DNA, 362 bp, Gossypium hirsutum
gagattatcaatttgaagcctcctccgatttcccccttccagatgcaaattggcgtcaaggccctcaccggaaagaccatcacattggaggtggagagttctgatactattgacaatgtaaaggccaagattcacggcttggaaagggcatcccccctgaccagcaaaagggtggtcttcgctggtaagccacttggggatggccgcacgttggctgattacaacatccagaaggggtccacactccacctagtgctttcgcctccggggaggatgcaaatttttgttaaaaatttgactgggatgacccttacattggaggttgagaggtcacataccatttataatctttaggcaaaaat

SEQ ID NO: 190620 - DNA, 553 bp, Gossypium hirsutum
atccaagacaaggaagggattccaccagatcagcagaggtggatttttgccggaaagcagctcgaggatgggaggacacttgcggattataacatccaaaaggagtcaaccctgcacttggtgctgcgactgcgtggtggaatgcagatttttgtgaaaactttgactggaaaaactattacattggaggtggagagctcagatacaattgttaccgggaggcccaggtttcaggacaaggagggtatcccacctgaccagcagaggttgatttttgctggaaaagcaactcgaggatgggaggacgcttgcggattatagcatccaaaaggagtcaaccctgcacttggttctgcgccttcgaggagggatgcagatattcgttaggcccttgactggtaaaaccccataacactggatgtcgagagctcggacaccattgacaatgttaaagcgaagattcacgacaaggagggaattcctccagaccagcagaggttgatttttgctggaaagcagcttgaggatgggaggacactcgcggactataaca

SEQ ID NO: 190621 - DNA, 812 bp, Gossypium hirsutum
tctaaaggagtttctgatatgggagtccatgccttcattgtgccaataagggatctaaaaactcaccagccacttcccggaattgaaataaatgattgtggccacaaaattggcctgaatggggtggataatggagcactgagattccgttcagttagaattccccgagataatcttcttaatcgatttggggatgtcacccgagatggaaaatacacaagtagtctccctacaataaacaaacgttttgctgctactcttggtgaacttgtaggtgggagggttggccttgcacattcttcagttggtatcctcaagattgctgtcactattgcagtacgatactccttactacgtcagcagtttggtcctccaaaacagcctgaagtcagcattcttgattatcaatctcagcagcacaagctcatgccaatgttggcttcaacttatgcatttcattttgccactcagtatttggtagagaaatattcagagatgaagaagacacatgatgaacaactggttggagatgtgcatgctctttctgcaggcctgaagtcctatgtgacatcatttacagcagagtcattgactacctgcagggaagcctgtggaggtcatgggtatgctgctgtcaaccggtttggtacccttgaggaatgatcatgacattttccacacatttgaaggcgacgatacagttcttttgcaaaaggtaactgcaaatttaatgaagcaaatcaaggacaagttccaaggtggggctatgtgtgtcacatggaactacttgagagaatctattaacacatact

SEQ ID NO: 190622 - DNA, 1235 bp, Gossypium hirsutum
  unsure (1)..(1235): unsure at all n locations
ctttactttaaaaggcatgacgggcaagcagtaacttgcgaagacttctttgctgccatgaaagatgcaaatggtgtggattttgctaacttcttgctatgtttagtcaagaaggacccccaactcctgggcaacctgttaaagaaccgatgttcattccagtagctgttggtctactggactcaagtggaaaggacatgattctatcttctgtgtatcacaatgggacattgcagtctgttgcaagcaacaatcaaccagtcctcagcactgttcttcgagtaactaagaaagaagaagaatttgtgttttgtgatatattcgagcggccaattccatctctactgcgaggttatagtgctcctgtccgtcttgaatctgatctctccgacagtgacctatttttccttctcgctcatgattcggacgagtttaatcgctgggagtccggacaggtgctggcaaggaagctcatgctcagcttagttgctgatttccaacaaagcaaaccattgaccttgaatcccaaatttgttcaaggtctcaaaagcatactttgtgatccaagcttggataaggaattcatcgcaaaagcaataactctccccggtgaaggggaaataatggatatgatggaagttgctgatcctgatgctgtttatgctgttcgaaccttcattagaaaggagcttgcctcacaactaaaatctgagtttttaagcacagttgagaacaatagaagctcagaggagtatgtatttgaccatcctaatatggcccgacgtgccctcaagaatactgctcttgcatatcttggttcccttgaagattcagagatgacggagcttgcactgcatgagtacaagactgcaacaaatatgacagaccaatttgctgctttgtctgccatttcccagaaaccaggtaaaactcatgatgacgttttggccgacttctataccaagtggcaacataactacctggttgtaaacaaatggtttgcccttcaagccatgtctaacattcccggtaacgtcgaaaatgttcgcaaactcttaaatcatccagcattcgaccttcgtaatccaaacaaggtttactcacttatcggaagaatttgtggatctcctgtgaatttcaccccaaggatggttccggctacaagttcttgggtgaaatantactacaacttgacaagctaaatcctcaggttggctctcgcatggtgtcagcgg

SEQ ID NO: 190623 - DNA, 574 bp, Gossypium hirsutum
cccacgcgttcgattactacaggatgctgtttctatggctcatccggataggacacatgcttggattaagatggacaacttctacacacagacggattatgaaaagggggctgatggtgacaggatgtacaaaacacttctaggaactcaagggttccgaaagggtatggatctttactttaaaaggcatgacgggcaagcaggaacttgcgaagacttctttgctgccatgaaagatgcaaatggcgcggatcgtgctaacttcttgctatggtattcacaagctgggactcctgtagtaaaagttacttcatcctacaatgctgaggctcatactttttctttgaagtttagtcaagaagtacccccaactcctgggcaacctgttaaagaaccgatgttcattccagtagctgttggtctactggactcaagtggaaaggacatgattctatcttctgtgtatcacaatgggacattgcagtctgttgcaagcaacaatcaaccagtcctcagcactgttcttcgagtaactaagaaagaagaagaatttgtgttttgtgatatattcgag

SEQ ID NO: 190624 - DNA, 404 bp, Gossypium hirsutum
aatctctgaaggtgacatataaagtaaatgctcaaagtgtggaccaatcagaactagttgtacgttccattactactttagaatatattttctaataatgcgacctaagctatgccctgtctcatccatatattgaaaatgtactgatctccctgacttgcacaacattaataagaacactgcaccaaagaagcctgacaaaaatcccaattccacggttagaaagaaccagtcaactttgtcttgatcctctcgatttttcagtacaccgctgccggtgccaaacctcacatcagtggaactctcacttagtggtggcccaaagagcttggtgccaagaaagctgtaagcattcaagctttgcagctgagttcctgaagggatttttccagtaaatttgttgt

SEQ ID NO: 190625 - DNA, 437 bp, Gossypium hirsutum
gttttaatcttctgtttctttttaaagttatttatagctcgagcttatgaaaaaaatggcggaaaaaggtaaaaccgatcatccggctttgcttcatggaaaatacgagcttggtcgaatgttgggtcacgggacttttgccaaagtttaccatgcacggcatgttacgacggggaagagcgttgccatgaaagttgtgggcaaagaaaaagtgatcagagtcgggatgatggaacagatccagcgagagatttccgtcatgaatatggtgaagcatcccaacctagtccagttgcacgaagtaatggcgagcaaatccaagatttacttcgccatggaactcgtccgaggcggtgaactcttctctaagatcgtccaaggtcgactcaaggaagatttggccagggtttatttccaacaactggtttccgccgtcg

SEQ ID NO: 190626 - DNA, 357 bp, Gossypium hirsutum
agaaattgcaatgggtgaagaaactgagtgttgcagaacaaaaggaccaggatatgaaactccactgaaagccatgtctggtcctaaagaagctcttctttatgttacttgtgtttatactggaacaggaagagagaagcctgatttcttggcaacggttgatgtagatccgaactcaccaacttattctaaagtcatccacaggctatctatgccgtatgtaggtgatgaactacatcactctgggtggaatgcttgcagctcttgccatggtgatccgtcggccgatcgacgttttctgatccttccttcattggtatcgggtcgtgtctatgtgattgacacacaaaagaattc

SEQ ID NO: 190627 - DNA, 454 bp, Gossypium hirsutum
ggtcccaaactctgcaagctaagacgtggcaaaatacgaggtgcaaggcagagatattagcccaccctttgtacgagcagctactgtcggcgcacgtgtcgtgtcttaggatcgccacgccggtggaccagctcccgaggattgacgctcagctggatcagtcgcagcacgtggtggccaagtactccgctctcggcggcgcagcccagggcttggttgcggacgacaaagaactcgatcagttcatgacgcaatatgttgtattgctatgttcgtttaaagaacaattgcaacaacatgttcgggtccacgcaatggaagcagttatggcatgctgggaaattgaacaatccttacagagcttaacaggagtttcaccgggggaaggtacgggggcaacaatgtcagatgatgatgaagaccaagtggagagtgatgcaaatatgtttgatgc

SEQ ID NO: 190628 - DNA, 708 bp, Gossypium hirsutum
gtggcatcagatcctagtgatgctaatacaaacagtactactttgttctcggatgatacagatgagaggtcccggaagagctctaatccagagatgggaatttcaactcatcaagaagatgaatctgctgctgctactgtcgagcctcctcagtctgattcaccagaatgccgtcctgatgttcctggaataagtgaccgtcgaacagggcagttttcatctgttccaaagaagagtgagctaaagattggcgagtcatctgccttctttacttatgtgaagtcaagtgcagtaaaaaccagcagtactcaagtggcaacccctaatcatgaaagtgctgctcaaaataagatcagtgaggagaatctcccgcaacctggtgaacaagtggttactgataccagagtacatgagaacggtgaaacatgggaaaacaactcacaaggtgatgactttcgtagcagcagtagtgttccggattccctttccttggagaggtcttcgacccctgcatcaatggagttctcacaacaaagggattttaaggaagacaagttttctccggcacttgtgcctctagaaatgaaactcaacatgatgtatccggtttacctacacaaagtgcttatctacactacatgccgggagttctaaatcaagttatgatgccatcatcgacccatttgtttcagaacaacctccatgaca

SEQ ID NO: 190629 - DNA, 426 bp, Gossypium hirsutum
tgaatgttaagatgattactggggatcagcttgccattgccaaagaaactggcaggaggcttggaatgggaacaaacatgtacccttcatcttctttactgggccaagacaaggacgcttccattgctgcccttcctatagatgaattgattgagaaggctgatggatttgcaggagtgtttccagaacacaagtatgaaattgttaagaggctacaggagagaaaacatatttgtggtatgacaggagatggtgtcaatgatgcccctgctttaaagaaggcagacattggaattgctgttgctgatgctacagatgctgcccgaagtgcttcagacattgtccttactgaacctgggctaagtgtcattatcagtgcagtgctgaccagcatggctatttttcaaagaatgaaaaactacacta

SEQ ID NO: 190630 - DNA, 463 bp, Gossypium hirsutum
ctcacgtttccgcccacgcgtccgcccacgcgtccgcccacgcgtccgggagaagtcataaactctcacactgccccctcctatataccttctttggcttttcctttttttccatctgatacaatacttttatcaaagtctgttctttttccattcttgagaaggagaaaacaaataaaggtgatagatcaactcaagcaaaggacactcttttaatcccactcattcttgggtcattgatagatctctgcttgattttctacaatcctttttttttctttacacgaaagagacaactcagaaacaagatctaccaggatttagacattggctttagagaaaaaccaagacaatgctgcctcagaagcaagctgaagaagcaatagtctcaaacttaaccgagatggagcttgaaaccagagaagaagagaaagatgaagatgaacaacaatcattgtttagt

SEQ ID NO: 190631 - DNA, 806 bp, Gossypium hirsutum
  unsure (1)..(806): unsure at all n locations
ttccattgagtgctgttgaaaaccagaacttagtggctgcaccttcgaactttcgactatcctggtatcatggacccaatctgttagacgcgattgattccttccaacctcctactagggagttttcaaagcctctaattatgcctatatgtgatgttataaagtcaccttcacaggggcaggtgtctgcatgtggcaagttggaggctggagctgtaagaagcggatcaaaggttttagttatgccatctgcaactatagcaaccgtgcgttccttggagcgtgattcccaagcttgcccaattggaagggctggagataatatagctgtcagcctgaatggaatagacggaaaccatgtgatggctggcggtgtgttatgtcatcctgattttccaattgcatttgcaaaacatttggagttgaaggtgcttgttttggatggtgcaactccaattttaattggttctcagttggagtttcacatacaccatgcaaaggaggctgcaagagttgcaaggatatcatctttacttgattcaaagactgggaaagttgcgaagaaagcaccccgctgcattcttgctaagcagagtgcagttgttgaggtgattttgcaggaagcgatttgcgtggaagagttttcgaaatgcaaagtccttggaagggtgtttcttaagacattangaagaacggttgctgtgggcatcgtgacccgaatagtggaggagcagtaatagttgccaaagtgtggtcaaagactcatacacacttaaaacacatacttgggcagcttttaaagcact

SEQ ID NO: 190632 - DNA, 960 bp, Gossypium hirsutum
  unsure (1)..(960): unsure at all n locations
cacactttcatttcttgttgaagtcaaacaaggaaaagaaaatcattcagctcagattcatggctacgcttatgacaaatctgctgctcacggcatgcattgctcttttcttggtatcagctgccaccgccgtcggcgactcccccttcatcatcgctcacaagaaggcatcgctcaccagactcaaatccggcgccgagtgcgtctccgtctctatcgacatctacaatcaaggcttctcgacggcatatgatttgagtcttgtggattatagctggccccaagatgcatttgatgttatcagtggaaatatttctcagtcatgggagaaacttgacgctggtggtattctatcacattcatttgaattagaggccaaaaaacaaggcatgttctatggtgccccagcagttatctcttttcgcattcccacaaaggctgctctacaggaggcatattcaacttcaatcttgccgttagatgtccttgcagaaatacctcctgagaagaagtttgagtgggctaaaaggttgctggctaagtatggatctcaagtctctgtgatatcaattgtgggtctattcatctacctgatggttaccccatcaaaatccagtggtttgaaagcaagcaagaagaagcgctaagtatttgtagctgagctgaatacgtgagcttttctttcaatatgcagtttccagaaagttttttccttctattcttttgctttgtgttgttttgttctgttgtcggacactttagaattagatggaccattaactgagttagaggtgcaaagatgaatcaactnaattctcactctcctagcaccttgacnttgattgaaacagtgtaatgcttaaaaatagaagcgaggacctgatctttgtaatcggatgtcacgcttttgaatatttacgcgnnaaaaaaaaaaaaaaaaaaaaaaactttcgtggccga

SEQ ID NO: 190633 - DNA, 1153 bp, Gossypium hirsutum
gcctcttttgctttcttctctttcttctccatattttcctctgtggagaacccatccccctcctttagggtttagcagttaaaaagagaaaagcaaaagtatggcgaccgccactgtccccgccgccgcaaggcagctttctcctaaagaagccgacatccaaatgatgttggccgccgaagtccatctcggtaccaaaaactgtgacttccaaatggagcgttacgtcttcaagcgtcgcaatgacggaatctacatcatcaaccttggcaagacctgggagaaacttcaacttgctgctcgtgttattgttgccatcgagaaccctcaggacatcattgtccaatctgcaaggccctatggtcagagagctgtactgaagtttgcacagtacactggttgtcatgcaattgctggaaggcacactcctggtaccttcactaaccagctccagacatcgttcagtgagcctcgtcttcttatcctcacagatcccaggactgaccaccagcccatcaaggaagcagctctcggaaacattccaaccattgctttttgtgatactgactcaccaatgcgatatgttgacattggtatccctgccaataacaagggaaagcacagcattggttgtcttttctggctgttagctaggatggttcttcagatgcgtggtacaattgctcctggacagaagtgggatgtgatggtggatctatttttctacagggagcctgaggaagctaaacaacaggaagaggaggaagcagttgctgctcctgattatggactccctgctgcagattttggaatgagtgctttaggaactgaccaatggccctcccaaatgggtgatcagtggtcagctgatgtggttcagccaccaatttcgggtgtccctgcaattaactggggtgatcaagttgctgttagcgctgatgtttgggatcctgcaagtgctccaccacaaatccctggccctggaatcgatgtatctgctcctgctcccactggctgggagtgaggttttcttatttttgcaaatgtttttcctattgaaaaaaatttgttattgtgatggtatctgtgattttgacacgggttagtttgtagtttccatagacttgaatgacttgctagagatttttgtttt

SEQ ID NO: 190634 - DNA, 522 bp, Gossypium hirsutum
accggcgcggagacccaggcgcgacgcgcacgcgtccgatttgtttctcgtcctcttaacgatatcctctgtttgcagttaagaaaagcaaatcatggctgctaccacggtcccagccgccgcaaggcagctatctcctaaagaagccgatatccagatgatgttggctgccgaggtccatctcggtaccaagaactgtgatttccaaatggagcgttacgtcttcaagcgtcgcaatgacggaatttacatcttcaaccttggcaagacctgggagaagcttcagcttgctgctcgtgtaattgtcgctatagagaaccctcaagatatcattgtccaatctgcaagaccctatggtcagagggctgtcttgaaatttgctcagtacactggttgtcatgccattgctggaaggcacactcctggtacattcactaaccaactccagacatctttcagtgagccacgccttcttatcctcacagatcctaggaccgaccaccagcctatcaaggaagcagc

SEQ ID NO: 190635 - DNA, 471 bp, Gossypium hirsutum
  unsure (1)..(471): unsure at all n locations
acgcccacgcgttcgtgagatttcaggttccggctcagcttcggcttcgggttcaggggcagccacaggaaccggtggagggttgtactctagtgatgggtcggtgaggatggttggggtggcgggttttttaaggaaggaccacgggaggggggagagtccggttaagagtttgcaggatgcttttcgggacttaaatgctctcatgagtaaagctaaagagatggtgatgctaccggaataattgagacaaaagcttttgtccggaacgagttctcaaacaagtggaacaaatgatgaggatatgggttcaaaggaagagatgcaagattggttgttgagtgttggcataatatccccagtcactaaagagtctgcaggtgccctgtaccatcaacaattgtcccgtcagctggcatattttgggagaattccactggagagagcangtggaatgatcaaccttataga

SEQ ID NO: 190636 - DNA, 440 bp, Gossypium hirsutum
caagttacggcaccgaggccattccaccattgctttctttctgattcaatcttcaataagttcccaatatggctgggaaattaactacaggaaatatcactggtattgagaaactgcatattgttggtggagctgaagatcgtactgctattacaaacggcaacgctgcaaagaataaacctctagttgtttgcttcggtgaattgttgatcgactttgtaccgacggttggaggggtttctctggctgaagcacctgctttcaagaaggctcctggtggtgctcctgcaaatgtggctgttggggtatcacgattaggaggatcatccgctttcgtaggaaaggtaggtgatgatgaatttggctacatgttagctgacattttaaaacaaaacaatgttgacaactctggcatgcgatttgatcgaactgcaagaact

SEQ ID NO: 190637 - DNA, 1051 bp, Gossypium hirsutum
tgacaaagattgatctgatggataagggcactgatgcagttgatatattggaaggcaaatcttaccggctgaaattcccttgggttggtgtcgtgaatcgctcacaagcagatattaacaagaatgtggatatgattgctgctcgacgtaaagagcatgagtatttttctggtacgcctgagtataggcatcttgctcatagaatgggttctgagcatcttgctaagatgctttcaaagcatttggaaactgttatcaagtctagaatccctggcattcacgcccttatgaatgggacaattgctcatcttgaaaccgaattgagtcgccttggaaagcctattgcagctgatgcgggtgggaagttgtacacaattatggagatttgccgtctttttgatcaaaatttcagagaacatttagatggggtgcgtactggtggtgataaggtttacaatgttttcgacaaccaacttcctgctgctttgaaaaggttgcaatttgacaggcaactatcaatggagaatattaggaagctcattactgaagctgatggcttatcaaccacatttaatagctcctgaacaaggatatcgtcgtttgattgaatctactttagttactatcagaggtccagctgaggctgctgttgatgcgactcattccattctgaaggatctggttcacaaggctatgagtgaaactccagagttaaagcaatatcctgcactcagaggagaggtgggaaatgctgcgatcgagtctcttgaaagaatgagggatcagagcaaaaaagcaacacttcaactggttgatatggaatgttgttaccttacagttgagttcttccgaaagcttcctcaagacgtggataagggtggcagtgctacgcaatctatatttgaccgatacaatgactcctacctgaggagaattggtaggttcatatacacaaaaagtttgagtatggatctcaattgtttgaaacttaatcgaaggatactattattcaatgtattttatttctgataatgggtttctaacaatgtat

SEQ ID NO: 190638 - DNA, 416 bp, Gossypium hirsutum
tgagatttgccgtctttttgatcaaaatttcagagaacattgacatgaggtgcgtactggtggtgataaggtttacaatgttttcgacaaccaacttcctgctgctttgaaaaggttgcaatttgacagacaactatcaatggagaatattaggaagctcgttactgaagctgatggctatcaaccacatttaatagctcctgaacaaggatatcatcggttgattgaatctactttagttactatcagaggtccagctgaggctgctgttgatgcgactcattccattctgaaggatctggttcacaaggctatgagtgaaactccaacgtcaggggattttcaaggggattttcaagggaacaacagaccacctgtataatgcaaccactcaggagcaggaaactactttgaat

SEQ ID NO: 190639 - DNA, 439 bp, Gossypium hirsutum
aactggttgatatggaatgttgttaccttacagttgagttcttccgaaagcttcctcaagacgtggataagggtggcagtgctacgcaatcaatatttgaccgatacaatgactcctacctgaggagaattggaagtacagttttgtcttacgtaaatatggtctgcgctactttgcgccactcgattccaaagtccattgtttattgtcaagtccgtgaagctcaaagaagcctgcttgactttttctacacggaattgggtaaactggagcaaaaacgattatcagcgttactgaatgaggatccagcaatcatggaacgccgatccgctcttgcgaagagactggaattatataggagtgcacaagctgaaatcgatacggtcgcttggtccaagtaagagtgggtaaaattagatccatggggcatggtattggg

SEQ ID NO: 190640 - DNA, 702 bp, Gossypium hirsutum
ccagataagtcaaactgaagtcatagaagaaaaacatggagagcccaactgcaatgataagctctttgaaagtagccaagaacaagaaaccgaaaccggtcgtgtcaaatggagtgtttactcgacttttgttgcagcagcttataagggagcacttgttccagtcatcgttctctgtcaagttctcttccagggactacagatggggagcaattactggattgcttgggcaactgaggaaaatcgcaatgtatcaagagaacagttaataggcatatttattttgttgtctggtggaagctccatcttcatactgggaaaggccgttttgctggcaactattgctgtagagacagctcaacgtctgttccttggaatgataaaatctgttttccgggcaccaatttcattctttgactcaaatccctcaagtcgaatcctcaacaggtcatctaccgatcaaagccacctttgacacagatatttccttacagattagtcggggctgtgcattttgctttatttcagttggtcagtatcaatcattccttatgtcccatagttgcctggcaaaattttcctttttttctttggcatcctaatatctacctatggttttaaactatttttttcaactgtaggaactaccttatagttgtatttaaaagtccattttaatatttcttaaactttcaaggccag

SEQ ID NO: 190641 - DNA, 588 bp, Gossypium hirsutum
gcttttattgctgtagagacagctcaacgtctgttccttggaatgataaaatctgttttccgggcaccaatttcattctttgactcaaatccctcaagtcgaatcctcaacaggtcatctacagatcaaagcacgttagacacagatattccttacagattagcggggctggccatttgctttaattcagttgttcagtatcatcatccttatgtcccatgttgcctggcaaatcttccttctcttccttgccatcctcagtatctccttctggtatcagaactattatattacgactgctagggagctagccaggatggttggaattagaaaggctcctattttacatcatttctcagaatctatcacaggcgcaacaacaattcgttgttttggccaggaagacaggttcatggagaaaaacttgagcttaatcgatgattactctcgtgtagccttccataactccagcacaatggaatggttgtgtgttcgaatcaattttcttttcaacttcgttttcttcctggtgttggtcatcctggttagcttgccgcggtctgctattgaccctagcttggcaggatt

SEQ ID NO: 190642 - DNA, 437 bp, Gossypium hirsutum
gtcctgcccacctcaccaccatctatcagctgatatagttaaactgtaggccgagggttgacttgttgagcatactcgccgtccctccctccctcctccgcctatcttttatttgccacaaccgcaaaatcctatccaacaacaacattcatcgctgcatcacttcaactcttgcctttactcctcttttccttttcctaatctctgttgtctctttggctgcctgcaatagccaatttttactattccttttctcccttcaccttcgtccaattctacctacttggatacttggaaaatttgattccttttttgttttacttttatgattttttttttgtgaaatataactccaataatgaaggagaaggctgagccagtccaaaagctatatacaaggatgcggttatggggaattcctgatgaatatgtgatcg

SEQ ID NO: 190643 - DNA, 951 bp, Gossypium hirsutum
  unsure (1)..(951): unsure at all n locations
cccacgcgttcgaaaacagggcatttccattaaaccaacaacaacaacaaaaaaccaaacacccagagttaaccaaaagagaaaatggtcaccaaagtctacattgtatactattccatgtatggacatgttgagaaactggcccaagagatgaagaaaggagctgaatctgtcgagggagtggaagtcaaactttggcaggtagcagaaacactaccagaagaagttcttgggaaaatgggagcaccaccaaagacagatgcccctatcataacaccagatgagctgacggaggcagatggtgtgctatttgggtttccaactagatttgggatgatggctgcacagtttaaagcattcatggatgcaactggtggtctatggagaacacaagcccttgctggtaaacctgctggcattttctacagcactggctcccaaggtggtggacaagaaactactcccttaactgcaatcactcaactggttcaccatggaatgctatttgtgcccattgggtacacttttggtgctggtatgtttgagatggagaaagtgaaaggtggaagcccttatggtgctggaacatttgctggggatggttcaagacagccctctgagctagagttagggcaagctttccaccaaggcaagtattttgctggcattgcaaagaagctcaagggaacaacagcttgggagatttggctcatctaaatgccagatatatatctatatatatatatagatattcagctgtataaatatgtgtttgtttttcttgccttttcatttttactttgttcaagactctctccatagaataatctttgtatgcttcggttgggattgtatttgttgtcacaaaacttacattgtttttcttccaagtctaaatcaaatggatttgttatctcgattaaacttnnnnnnnnnntttnnttttttttt

SEQ ID NO: 190644 - DNA, 1028 bp, Gossypium hirsutum
caaaaccgagagatatattcccaaacatgtctaaagcctgcttgcttttgtttctcgttggagtggtggtttttatcatcactccttctctagctaaccaacatcatgataatgagcttcccaaggggaagcctttcccaggtgagaagcaaccacaacacaagccattccctgaacaccgaccgccaatacacagtggacctggcggtaaaggacaggagccaccacatggggaaaaacctcctcatagaaacttattgagtgtggaagttgagggcacacataaacctccacgacattcaggtggtaaacctccaagacactcggggggtaaacctccacatgttgaggggttccctaccgataaagcacccatgaagccattccctggtgaaaaaccatccaagggtaagggaaagggagcacctcatgaacccaaacctcctcatagacacttattgagtgtggaagttgagggcacacataaacctccacagcactcaggtggtaaacctccacgacattcagggggtaaacctccacatgttgaaggattccctggtgacataccattcaagggtaagggaaagggggcacctcatgaacccaaacctcctcacagacacctattgagtgtggaagttgagggcacacataaacgctccacaacaatcaggtggtaaacctccacgacattcagggggtaaacctccgcatgttgaaggattccctggtgacaaaccatccaagggtaagggaaagggagcaccttatgaacccaaaccttctcatagacacctattgaatgtggaagttgaggacacacataaacctccacgacactcagggggtaaacctctcacatgttgaaggattccctgacggtaagccatccatgaaaccattccccggtgacaaaccatccaagggttagggaaagggagcacctcatgaacctaaacctcctcatagacacctcttaagtgagccacacaaatatgttataccacccaaagggtaggggagag

SEQ ID NO: 190645 - DNA, 656 bp, Gossypium hirsutum
ccaaagtaccctttccattttccctttatttcctttgccgcccctagggttttattacattccccacatggcttctgcagatgtcgagtaccagtgcttcgtcggaggtctcgcatggaccatcaacgaccgtgctctcgaagaagccttcagtgcttacggcgagatcgtcgattcgaagatcattaacgatcgtgagactggaagatccagaggctttggcttcgttactttccgtgatgagaaatctatgaaagatgctattgaaggaatgaacggtcggagtctcgatggaaggaatataaccgtcaacgaagcacaatctcgccgaagcggcggcggcggtggtggtggaggatttggaggaaacggtgggtacaaccgtggaggcggtggatatggtggtcgccgtgaaggtggatatggaggtggtggttacggaggtggacgccgtgatggtggtggatacggtgacggtggatctcgttactcaagtggcggcggttcttgggcttaggttaaggcgttttaggatttgagtgagcttcggctcttattttacggtttaatgggtttgtttgttagtgtgtggtttctatcgatattttttcttgtatcatcaagagttttaaaacataaaaatggaatgaagtata

SEQ ID NO: 190646 - DNA, 549 bp, Gossypium hirsutum
gtttggctctcaaccaagcttgcaattttgcagcctcttcttcaacccgttcaagccgattaaccctcagctttctgttttcggaagttactactttacctagtgatggcagacggtcacgagagtgacaagaatattgagatatggaagatcaagaagcttattaaagcacttgaagccgctagaggcaacggcaccagcatgatatctctcataatgcctccacgtgatcagatttcaagggttaccaagatgctgggagatgaatttggaacagcttcaaacatcaaaagcagagtcaaccgtcaatctgtgttaggtgcaatcacatctgctcagcagaggctcaaactttatagtaaggttcctcccaacggacttgtgctctacactggaacaattgtgactgatgatgggaaagaaaagaaagtcacaattgattttgagcctttcaggcctataaatgcttctctttatctctgtgacaacaagtttcacacggaggcactgaatgaacttttggagtcggatgataagtttggctttatt

SEQ ID NO: 190647 - DNA, 517 bp, Gossypium hirsutum
aaagaaacaaaccccttttattttgaaaaaaaaaatccgaagaccctttttccaaagacaagggggaaatgtgcaaatccaaccctagggcctgcctgaaaactttgtttgcaaaagccagcgccctctatttccagctccgtttctccaacagttccgttcccaccgccgcaccgtcgatttccacctcagtttctccgtccatggctgcaacggactctcctctaacgaccaaggtttgtatcattgggagtggccccgccgctcacacggccgctatctacgctgctcgtgctgagctcaagcctattctttttgagggatggatggctaacgatattgcgcctggtggtcagcttaccaccacttccgacgtcgagaacttccctggattcccggatggtatcatgggttcggagcttatggagcggtgccggaaccagtcgcttcggtttggtactactatctttaccgaaactgttgacaaggttgatttttcttcgtctgcgtataagat

SEQ ID NO: 190648 - DNA, 765 bp, Gossypium hirsutum
  unsure (1)..(765): unsure at all n locations
aaaagaaacactatgagtctttccgcaggaatggtgtaataatttcggttcacgacttcgtttatgtcttagctgaggagaataaacgacttgttgcctatttggaagatttgtatgaggtctctaggggcaacaagatggttgtggtacgatggtttcacaaaattgatgaggttgatattgaccttcatcacaattataattgcagagaaattttcttttctcattgtcttcaagatctcagtattgaatgcatagatggattggctactgtccttagtcctttgcatttcaagaaatttttgaatgaggcaacacacactcggctggagccatttgtatgctgcaagcaatttgaaaatgatgttaagccttttgatgtgactcaagttaagggttactggaaacaagatatacttagatatatgtatggtctttctccttcaaatgattgtgtgactcgtcagcaacgtgctgacgacctgaaaactgtttgggatgttgatgacgatgtttggattaggcctagaaagagatattgtcgatcaaaggatgattatatgcacatgcatttcagtggcagtagagagtcattggatacatcatttgcagatgtgcaagactttcacanaagcaaaaatggaaatgcatcattcaatttcagtgttgggattttgcgttcctgtccactggtgaggctaancgatttcttctcaccattaaccggaggtttcgaagttgagtgctaactcaagatatggtttg

SEQ ID NO: 190649 - DNA, 797 bp, Gossypium hirsutum
  unsure (1)..(797): unsure at all n locations
ttgtattgccgcatatgaggcgaccggaaaccaaattcatctaactcttgagagaggtcttccatcaatgagtggagacttcatatcaacgcatctgccatatccatcattatcatttgacaccgttcattgtgctcaatgcggtattgtttgggacaagaaacaggggattttccttatagagatagatcgggtactcaagcctggaggttattttgttttaacctcaccaacaagtaagccacaaggaagttcaacaagtatgaagaaaagaaacatgttaacaccactggaacaatatactgaaaaaatttgttggagtcttattgctcagcaggatgatactttcatctggcagaaaacagccgatgctcattgctattcttctaacaagaagaacgatgtacctctttgcaaagaaggatatgatgcaccctattatcaggccttggtaccatgtatttctggaacttccagcaaacgctggattcctattcagaacaggtcctctagctcagattatgagctcagcggagcttgaacttcatggagttagtccagaggatttctttgaagacttgcaagtttggaaattagctttaaaaaactattggtctttgcttacaccattaattttctctgaccatcccaagaggccaggagatgaagatcctttgccaccatttaatatggtacgcaatgtgatggacatgaatgctcattatgggggtttgaatgctgcatttctggaggaaanganatcggtgtgggtgatgaatgttgtgcctgttanggct

SEQ ID NO: 190650 - DNA, 426 bp, Gossypium hirsutum
cagaaatggaagaagaatcttacaagaaatctgaaggatgcaccattaaggaatgccaagacatgattcaaagaagtctacggactccaatggtgaaatttttgatggagcatatggagaaaacagggtgtaaggtaggagataatttcatcaaggcagttaattgcaataggaagatgggtggaggctatgttcgtggcgaaggagtaattatctttatgctcctttatgttagaaatattgctttaaattaatccaattaaaacagtttcttgatcagttaatgcaatatgattagtggtttattttaatagatgccttctctctacatgattttgtgtgtgtgtttctagatagtggtgtgtagcgaccaagtgaagatacaagatgatgtcaatcaaatagttatacatgagcttattcatg

SEQ ID NO: 190651 - DNA, 578 bp, Gossypium hirsutum
tgttattccattgatgccccaacttagaagttcttgagactaggaatgttataggagatagaggattagaagttctcgctcgaagttgtaagagactaaagaggcttagaatcgagcgaggtgctgatgagcaagaaatggaggatgaagaaggtgttgtttcgcaaagaggggtaatggctttagctcaaggatgtctcgaattggaatacttggctgtttatgtatctgacatcaccaatgcatcattacaatatattgggacatactcgaaaaatctgtgtgattttcgtctggttttgcttgatcgagaagaaaggataacagatttgcctcttgacgatggagtccgtgatctattgaggggctgtgaaaagcttagaagatttgctctgtatcttcgacctggtggtttaacccatgtgggacttggttatattggacaatatagttcgaaagttagatggatgcttctgggatatcttggggaatctgattcgggccttttggagttctccaagggatgccctagcttgcagaaactagaaatgaagggttggtggttcagtgaacgtgca

SEQ ID NO: 190652 - DNA, 723 bp, Gossypium hirsutum
tcccacgcccacgcgtccgctaaaacaagtgtttctcttcttcttcatgttctcgatcatggcttcttcttcttctttctttgttaggtgtttccctttacttttcttcttcttcttctcacatgtccaagcagtgaaatcaccaattcatcctcgggatgttctacctttattgccgagacaggtttcatggccgatccttaattcacttaacagtgccatcgaccttttaccagcctttgtcggttctgtttcgtcccaaaaccacatcgtgagctggaaaggtgcgtgcttttatgagaacaccgctaggatggagttccataacaagagtggcagtgagttcggtggtggaactctccatatcaaggttagcaaagcccatagttggacgtgtctggatctttatctctttgcaactccatatcgtgtaacttgggattattattttctatctcgggagcataccctcgagattgacaagtgggaagacagagctgagtatgaatatgtgaaaaacaaggggatttctattttcctgatgcaagcagggatgcttggaacacttgaagctctatgggaagtcttcccattatttactaacactggatggggtgagagtgccaacctcgggtttctcaagaaacacatgggggcttctttcgaatcacggcctcagccctggtacaccaacattagtgttgatgatatacattcgggaga

SEQ ID NO: 190653 - DNA, 1035 bp, Gossypium hirsutum
  unsure (1)..(1035): unsure at all n locations
cagcttaaattcaaactttgaatgatccatttcacttctcattagctttcgtttttttgttctttttaccctgttttcgtttctcattttcctctttgctagctctttgaatctctgagggaagatatggcggccaatgggaacggagtttcgacgacgccgaagagttcgttggcgaggattcagacgcagaagaacggtggaatctgtcatgacgatagcgggaagcctgttaaggctcagacgatcgacgagcttcactctttgcagaagaagagatcggcgccgacgactcctcttgacggcgttcagggtacctttgccaccatttctgaagatgagcgccagaggcagcagctccagtccatcagtgcatcgttggcgtcactcactcgaggaacagggccgaaagtggtgagaggggacccggcagggaaggttcaatcggtgtcgcatgtggcgcaccaccaccatatcgaggcgccaaccattagcgtcagtgacagttccttgaaattcactcacgtcctatacaacctctctcctgcagagttgtatgagcagtcgataaagtatgagaagggttctttcattacttcaaccggtgcactcgccaccctatccggagccaaaaccggtcggtcaccgagagataagagagttgttatcgatgacaccacccaagatgagctttggtggggaaagggctcacccaatattgaaatggacgagcataccttcgtggtgaacagagaaagagctgttgattacttgaattctctggacaaggtataaagggtatcatagtaaattagttntacttggcttgatttcgaatttagtaaacaggtttttggaagagatgatgttgatggagggtatggtcatatggatcattttgcttttagtttcaacagttgtactagggcatcctaatccatgggagagcattttgtcatgttatttggatcctctagatgtatcatcgagtttcattggaaatagaatatgttattatattcatgaatcggatta

SEQ ID NO: 190654 - DNA, 1165 bp, Gossypium hirsutum
agccttccgccaacgcttccgcccacccgtccggttatcgatttctactacccaagatgagctttggtggggaaagggctcacccaatattgaaatggacgagcataccttcatggtgaacagagaaagagctgttgattacttgaattctctggacaaggttttcgtgaatgatcaattcttgaactgggatccacagaacagaatcaaagttcggattgtgtctgctagagcttatcattcattgttcatgcataacatgtgtatccgacccactcctgaagagctggagaatttcggtactccggacttcactatatacaatgctgggcagttcccgtgtaatcgttatacacactacatgacatcctctactagcatagagcttaatcttgctaggagggaaatggtcatcctcggcactcaatacgccggggaaatgaagaagggtcttttcagtgttatgcattatctcatgcctatgcgtcaaatcctctcgttacattctggatgcaatatgggaaaagatggagatgttgccctcttctttggattgtcaggtacgggtaagaccactttgtctaccgatcacaacaggtatctgatcggtgatgacgagcattgttggagtgacaatggtgtgtcgaacatcgaaggtggttgctatgccaagtgtattgatctttcaagggagaaggagcctgatatctggaatgccattaagtttggaactgtgttggaaaatgttgttttcgatgaacatacgagagaggtggtttatggtgacaaatcagttacagagaatactcgtgcggcctatccgatcgaatacattccaaatgctaagataccatgcgtcggtcctcatcctaagaatgtcattcttttggcatgtgatgcctttggtgtccttccacctgtgagcaagctgagcctggctcaaaccatgtaccatttcattagcggttacactgctctggtggctggcacggaagatggtattaaggagccaacagcaacgttctcggcttgcttcggcgcggcgttcatcatgttgcatcctaccaaatatgcagccatgcttgctgagaaaatgcagaagcatggtgcaacagggtggcttgtcaacaccgggtggtctggtggaagctacgggtctggaaac

SEQ ID NO: 190655 - DNA, 873 bp, Gossypium hirsutum
agtaataataaaaagtttctaaacagaaattgttttaagcaaagttacaattttcaaacacactaccatatgacatcgcctgatccaaccgtaatgtctaggcagggtttggggtgttacaaatggcctttgttaaagagtttgaagataaatgcattagattgagacactgtttggaattcccttgcccgtaagtccaccttcactagttggatacaacaatgtgtatggcatattgaccggaccaacacggttcttcaattgctcgtcattgttcatctctacaatccgttcctctatctcggtaagccgctttctgaattcatcaaaagctgcaagtggggtttcgtctgacgtccattcagggttggctctctgccccagataaacctcatctgacgaatgccttgataggatttctatcaaggatattcccaaaagtgtctgcagttgcgcagttattgttttcaagaaaaccttgtctgggttggactctagttctgtgtattctggtgttcctttctcaggcatgaaccgacgacttatggtcgggcggtttggaaggtagcctgcataaggatattggccaaagttaactgctgcatggagagccgaagccacccatatgataatggtgcaagaatcgatcaactcttctcgagtctgcattttaggccaccatggctcatctttcttgtcgccatggccctcctctcggagttctttccaccaggcttgaagttcagagtcttgttggaccatttcgtcggtcttgtagtagaaggagcaataatctttgacccaattttcaattgcaaaccaaatctccagtccatcaacagcatatggataatcttttatcaacaaaccctc

SEQ ID NO: 190656 - DNA, 632 bp, Gossypium hirsutum
cggacgcgtggggttcatctaagtccaaggagcggtagctgcaaggttatggggaagaagctagacgcgttgcttggaagagggttcaagccctacaagttgaaatcacttattagtgttgccctttctcgtctttccgttttcaagaatcggcgtcagattcgcagcaaccaagctcgctctgatgttgtggagctccttcagctcggccaccatgatcgtgctcttcttagagcggagcaggtggtgaaggagcaaaacatgttggacgtgtttgttatcctggaagggtattgtaatctcctcattgaaagactccatctcattgaggaagacagagaatgccctgatgagctgaaggaggcaatatgtggcttgctctttgcatcttcaaggtgtggagattttcccgagcttcaagagattcgtgcaatcttcacgtctcgctatggcaaagaattcgttgctcgtgccattgagttgcgcaacaattgtggagtcaacactaagattatacagaaactctcaaccaaacaaccagacttgcagagcagatggaatgtgctcaatgagattgctgctgagcatagcattgccctacaactccgtgaaacctctgtttccgctaccct

SEQ ID NO: 190657 - DNA, 960 bp, Gossypium hirsutum
aaatatttgctacgcaaattatagaatcctttcgacaatcctccgtgtctcagccaaaagctaccgccatgggaatcgttggaaatctctctccacagcagcgccaatctttcgactctcaaggttttcttgtgattgaatcatttgcgagccctgcagaaattgaagctatgaggaagagaatggacggaatgcttcaggcctttgaccctaccaccaccgcttctattttctccaccaaaaatcaagtaaaattgaccagtgaatacttctatgaaagtgctgaaaacatttcctttttctttgaagaaaaagcaattgatgattatgggaaatttaaagcaaccgaaggaactttctattaataaagtcgggcatgcgttacatgagattgatccagttttcaaagaattctcttgctctgagaaggtttcgagtttgcttttctccttaggttacaagaagcccgtgatcattcaatcaatgtatatctttaagcaaccaggtataggaggtgaggtaactcctcaccaggacaactcgtttctttatactgaacctaaaacttgcactggtctgtggctagctctagaagatgctacagttgtaaacggctgcctttgggccattcctgaatctcaaaaaaatggtcttgttagaaggttcattaggggtgatgatggagtttactttgataggccgtccccatcgtatgaccagaaagattttgtgcctattgaagtaaaagctgggtctttggttgtaattcatggtgaccttattcatcaaagttttgaaaatcagtcttcaaattcacggcatgcatacagcttgcatgcggtagatactgatggctgcaagtgggcagaagataattggatccgaagaaaagttgaacctaagcccctttacgcttctggacagacttgagagttcgtccctggtaattgcatggagctt

SEQ ID NO: 190658 - DNA, 430 bp, Gossypium hirsutum
gtttatggatgccgctgcatcagaattgttcagcaacaagaagcgagcaatagaatcctttaacagccaaccagtttcaggaattgcagacgtcagtgtttctccttggcaaaatgcttcctgttttcagtcggtttctggcccatttggtgaccacctatttggatctgagtccatacgaacagtcaacttggttgataggaacatttcttctgttgaaactggaaatttgaatatgggaagaaaggattttgaggatcaatatggtagtggttcatctgcggctttgtctatgtcccataccattgaagatgcctcttcatgtctcagttttggtggattaaggaaagttaaggtcaatcaagttagggattccaacaacgacatgcgaacattaatgctgcacccgtattgctgatgatttaataac

SEQ ID NO: 190659 - DNA, 766 bp, Gossypium hirsutum
gtttcgattgtagtaaaacattttccgaaaaaagttttcagtctttttcagtgtttgtttggctgaaaatattttcctcacgtaaaatcaattacaaacacgagaaaaagaagccttaattttggaaaatgtcttaccgtttctaattcggtaagatattttcaggaaaattagacaccgatcttccctttcccttccctttccccttcccctatccttgacacctgatcttatgcttgccatcagctaacaccgattctcaacaccagacactagcgttcatcaaccttttttctatgttttgatttcggagcaataattgagggaatcagaaaatggagaaaactgatggaattgggaacgaaaatggaagcacagaagaaaagcaaagtttcaaagatggatcaatttgtgggtataattcgcttcaccacctcttgagcgcaaatctcaagcctcaactctaccaggaagtcagccggttgcttctggggctgaattgcggaaaaacacttgaaactattgttccacctgaatcagctaaagccctctcttcaaaacatgattttgatcttcaggctttcaaattttctgctgacaaagagttgttaagagaaccccgggtagtaagggtcggtcttattcagaactccattgctctcccaaccactgctcccttttcagaccagaaaaaagctatctttgagaaattgggaccaataattgatgctgctggtgcttcaggagtcaacatactatgcttggt

SEQ ID NO: 190660 - DNA, 488 bp, Gossypium hirsutum
caaggaaaccagaatggtcggtttaattaccccaaccggggggaaaattccattgccccgaaaacccaagggttcttccgaagggttcgtccacggaggttaattcaggccctaaaatcaggccgaaagcgcttatcattggacaccaggtgaatattcctgtactaccccttgttggtcccgagggacggaggaggctaggttagccgaaagatggttatcggttcaaggacgcaaggtgcccctgctttttcagggtaagaaggggtagagaaaatgccccgagccaatgttcgagtaccaggcgctacggcgctgaagtaacccatgctatactcccaggaaaagctcgaacgaccttaagttcacgctccctgggaaggagagacaggattctgtttacagtgggcttcaggcagttgatttgaactctgagcttgtttgcattcatgattctgcaagacccttggtgagatctggagatgtaa

SEQ ID NO: 190661 - DNA, 436 bp, Gossypium hirsutum
gaagattaaggttcttctcaaaattcatgttgtttgcttagagaattggccacgagctgctccccacgaatgccaaaatttcctccattaaacagaatgctagacgggactgctagtgaagaaattgttattcatgcactcaaaagactgcctgaaagcccgtgccattcttgccttcggtggttcgatggtaggctccttgacatagagcattgtcgatgtattgattggcttgaagatgctatgggatttttagacaaaaaagcctttgaagatttaatcacgactctttggaatggttagaacaatcgcaataattctatctttcgagggaaagaggaagaggcttggattgtttgggatagagcgaagatacttagtgatgacttccgtattcacaacacggttaacaagccgctccttcccttggacccta

SEQ ID NO: 190662 - DNA, 470 bp, Gossypium hirsutum
cggacgcgtgggcggacgcgtgggggggtatcgattttcggaggcagccatgtttgggtggaccattgctctttgtctaactgcaacgatgggctgatcgacgccattcatggatccaccgccatcaccatttctaacaattacttgacccatcataacaaggtcatgctattgggacatagtgacacttacaaacaagataagaacatgcaagtcaccattgcctttaatcactttggagaaggccttgtacaaagaatgcctagatgtaggcatggatactttcacgtggtgaacaatgattacacgcactgggaaatgtatgcaatcggtggcagtgctgatcctacaatcaacagccaaggcaatagatttcttgcaccaaatgatgcagacaacaaagaggtgacaaaacatgaggatgcgccgcaaagtcattggagccattgaattggatatcaaaagggatt

SEQ ID NO: 190663 - DNA, 407 bp, Gossypium hirsutum
cggaccaaccggcttattgattcccttcaacggttccaccgccggcaccatttctaccatttccttgacccatcatgataaagtcatgctcctaggtcacagtgactcttacacccaagaccagaccatgcaagtcaccattgccttcaaccgttttggagaagggcttgtgcagagaatgcctagatgcaggcatggatattttcacgtggtgaacaatgattacacgcattggataatgtatgcaatcggtggcagtgcaaatccgacgatcaacagccaggggaacagatttcttgcaccagataaaatgaataacaaagaggtgactaaacgagagaatacgccgcggaaaaaatggaagaaatggaattggaggtcaagaggggatttgatgttaaatggag

SEQ ID NO: 190664 - DNA, 1602 bp, Gossypium hirsutum
cccacgcgtccgaaggacttgatggggaagtccctaatgaagcgtgtgatgcagacctggcttcctgcaagcaatgctctcctggaaatgatgatctttcaccttccctcacctagcaaggctcagaagtatcgtgttgagaacttgtacgagggtcctcttgatgatatctatgccaatgctatcagaaactgtgatcctgagggtcctcttatgctctatgtttcaaagatgattcctgcttctgataagggcagattctttgcttttggtcgtgtcttttctggcaaagtctcaactggattgaaggttaggatcatgggtccaaactatgtacctggggagaagaaagacttgtatgtaaagagtgtacagagaactgtgatttggatgggaaagaagcaggagacagttgaggacgttccttgtggtaatacagttgccatggttggtttggatcagttcatcaccaagaatgctacattgaccaatgagaaggaagttgatgcccacccaattcgtgccatgaagttttctgtctcccctgttgtccgtgttgctgttcagtgcaaggttgcatcagatcttcccaaacttgttgaagggttgaagcgtttggccaagtctgatcctatggttgtctgtaccattgaagagtctggtgaacacattgttgctggtgctggagagctccaccttgagatctgtctcaaggatttacaagaagatttcatgggtggtgctgagatcatcaagtcagaccctgttgtgtccttccgtgagactgtccttgagaggtcttgcaggactgtgatgagcaagtctcctaacaagcacaaccgtctgtacatggaagctcgacccttggaggaaggtcttgctgaggccattgacgaaggtcgtattggtccaagagatgatcccaaggttcgttccaagattttggccgaggagtatggttgggacaaagatcttgctaagaagatttggtgttttggccctgagacaactggtcctaacatggtggttgatatgtgtaaaggagttcaataccttaatgaaatcaaggactctgtagttgcggggttccagtgggcatcaaaggaaggtgcgatggctgaagagaacatgaggggtatctgctttgaagtctgtgatgtggttctccatgctgatgctatccacagaggtggtggtcaaatcattccgactgccaggagggttttctatgcttctcaacttacggccaaaccaaggcttctggagcctgtttacttggttgagattctagatcccttgcacgggcctttgggggttttacaggtgtttaacgcaaaccgagcactgtttctgaggaatctaggggccggtacccctttctaaactttagggcttccttccatatttgattcttttgattttcaagtttttggggctaaccttcggaaggttttccaaaatggggtttatacccgggttagaggtttagttccttggaccggttctcagctatagccttttttatatatccttaaggaaggtttggatgccttatcccccttctttgttcaggaactcttgggtgaaatccattttgccctt

SEQ ID NO: 190665 - DNA, 1160 bp, Gossypium hirsutum
  unsure (1)..(1160): unsure at all n locations
cccccgcggccgccctcccggccggtaatgagtaagtctcccaacaagcacaaccgattatacatggaagctcgacccttggaggaaggtctggctgaagccattgatgaaggtcgtattggtccaagagatgatcccaaggttcgttcaaaaattttggctgaggagtatggatgggacaaagatcttgctaagaagatatggtgttttggccctgagaccacaggtcctaacatggtggttgatatgtgtaagggagttcagtacctgaacgaaattaaggattctgtagtcgctgggttccaatgggcatcaaaggaaggtgcaatggccgaagagaacatgaggggtatatgctttgaagtctgtgatgtggttctccatgctgatgccatccacagaggtggtgggcagatcattccaactgctaggagggttttctatgcttctcagctcacagccaagccaaggcttctcgagcctgtttacttggtcgagatccaagccccggagcaggcacttggtggtatttacagtgttcttaaccagaagcgtggacatgtgtttgaggagatgcagaggcctggtactccactttacaacatcaaggcataccttcctgttattgagtcctttggattctctagcactctgagggctgcaacatcaggacaggctttcccacaatgtgtgtttgatcactgggatatgatgtcatcagatccattggaacctggttcccaagcagcagcccatgttgctgagatccgtaagaggaagggattgaaggagcagatgaccccactttctgagtacgaggacaaactgtaaggttgagaataactcagcttctgccgctatattttctgctgcaatttagttttgtttcggtgtctgtctcttaatgttcttgttagtagttttggggtgccttcacccatactgtcttatcatgcaaggtcatttcagtcctttttagacgcctttttacaatgtacttcgccctccatctgtgttgttaatttttattgtttcgatgaaatgtatttgagtcaacattgatcgtcttaaacctatatttttctttaccttcnnnnnnnnnnnnnnnnnnnnnnnnnnnnnnnnnnnnnnnnnnnnnnnnnnnnnnnnnnnnnnnnnnn

SEQ ID NO: 190666 - DNA, 510 bp, Gossypium hirsutum
agagcaagcacttggtggtatttacagtgttcttaaccagaagcgaggacatgtgtttgaggagatgcagaggcctggtactccactatacaacatcaaagcataccttcctgttatcgagtcatttggattctcaacccccctgggggctgctacctcaggacaggactttcccacaatgcggggttgaccactgggatatgatggcatcagatccattggaacctggttcccatggcagccaaccatgttgctgagatccgtaagaggaagggattgaaggagcagatgaccccgctctccgattacgaggacaagctgtaagctaagcaacaaaataataattaattgaagaggttacgttacccattttatgcaatgctgctagttagttccttctatattttgttgtccatggttcggactttttagatggtttttacaatggacacaattgttatgtttttttgtattcaaatagacaattggctttgttaatgtttttgacct

SEQ ID NO: 190667 - DNA, 429 bp, Gossypium hirsutum
cataccttcctgtcattgagtctcttggattctctagctacttgagggctgcaacatcaggacaagctttcccacagtgtgtgtttgatcactgggatatgatgtcatcagaccccttggaacctggctctcaggcagcagcccatgtcgccgaaatccgcaagaggaaaggattgaaggaacagatgaccccactttccgagttcgaggacatactgtaagctaagagagagtaactgtgattgtgcggcataaccttcgctgcaatttaggtttggtttctgtctgggtatattttggtagcatggatgctttttcacccatatgatgtaccgtcgtttttagacccttgtgttttgatgatgatcatgatgtactacaatcgacattgcgttgaacttttttatacatctcttatcttcatatgcc

SEQ ID NO: 190668 - DNA, 440 bp, Gossypium hirsutum
ccacagaatagccattcctcacgtctcagtttcaacgtgtacccttctcccttcctcacgtctgaaacctctttttttttttctttttcccatttccttctagcctcttcactaactttacccttcctcacattgaagctctatcgatgcattcgccctctcaggttatgccatattctatttttttaattattattttgatcatcttccaacagatcggcttcagatgggtgaggtagtctctacaattccaacgattgggtttaaggtttaatgtagagctgtacaatacaagaacatcaagtttcaagtatgagatttaggtaagttaaagttaataaatcggaaatagcagctaatgtagtttatacaaatggagttcaatttaatttatcgaatcattgaaatttaccttaattcttttacttaaaattgaatca

SEQ ID NO: 190669 - DNA, 567 bp, Gossypium hirsutum
acttgccacactaaaactaaagtagcttaaacgctccgctcgttccgtaattagtggtagcaattgctaaaggaatcaacagggaagaaatgggtattgtttttactcggatgttctcctctctgttcggtaacagagaagctcgaattctcgtactgggtcttgacaatgctggcaaaactactattctctatcggcttcagatgggtgaggtagtctctacaattccaacgattgggtttaatgtagagactgtacaatacaacaacatcaagtttcaagtatgggatttaggtggtcagacaagcatcaggccatattggagatgctatttccccaatacacaagcaataatttatgttgttgattcaggtgacactgatagaattggaatagccaaggaagaatttcatgccattttagaggaggatgaaccttaaggggcaatagcccttatttttgctaacaagcaggatctacctggtgcgcttgatgctgctgccgtgaccgaggctttggagttgcacaaattaaaaaaccgtcagtgggcaatatttaaaacatgtg

SEQ ID NO: 190670 - DNA, 410 bp, Gossypium hirsutum
gttgattcaagtgacactgatagaattggaatagccaaggaagaatttcatgccattttagaggtattcttatgtctatactggctagtcgtgtttgcatacagagattgagcagggggtgacacaagcaattattcgctctgctattggctttaagagggacccatggcctaaggtttcggacaatgcaaaggaccttgtaaagaaaatgcttaatcctgatccagagcagcatcttacagtacagaaagtgcttgaacatccatggctacaaaatgccaagaaagcacccaacgttttgttgggtgagactgtgaaagctaggctcaaacaattttctataatgaacaagctgaagaagagagctctaaggggccctggtgctggaactagctctaacttacctcctg

SEQ ID NO: 190671 - DNA, 835 bp, Gossypium hirsutum
gtgtgagggaggagagttgtttgacaggattgttgcaaggggacactacactgaacgggctgctgcagtggttatgaggacgattgtcgaagttgttcagatgtgtcataaacatggagtaatgcatcgttatctcaaaccagagaattttctgtttggaaataagaaggaaaatgcgccattgaaggcaattgattttgggttgtcagtcttctttaaacctggtgaacgattcaatgagattgtgggaagcccatattacatggctccagaggttcttaaacgtaattatggtccagaggttgatgtctggagcgctggagttatcctctatattttactttgtggtgtgccaccattctgggcagagactgagcagggggtggcacaagcaattattcgctctgttattgactttaagagggacccatggcctaaggtttcagataatgcaaaggaccttgtaaagaaaatgcttaatcctgatccagagcagcgtcttacagcactggaagtgcttggacatccatggcttacaaaatgccaagaaagcacccaacggtccgttgggtgagactgtgaaagctaggctcaaacaattttcttgtatgaacaagctggagaagagagctctaaggggattgctcccatttgcaccacctttgactagtttttattgattatatgttgcattattaaatgttttccagggccctggtgctggaactagctctaacttacctcctgtaggtgcaattgctgatagtcagtcaggcatgttctatttttcttgctcctgattttgtctggtcatttattgcaatagtttattttt

SEQ ID NO: 190672 - DNA, 615 bp, Gossypium hirsutum
aattggatgcattatacaaatcgcttgcagaacagtacacttggtcatctgcagttaagaggataccgcttgattttctgcaaggagacaagttccgtgaagcaccaattagttatattaagcctcttctaacgaagggggttccatctttattctcagatctttctcctttgtatgatcaccctggcaaggcagacatgttggagcaacttattcttgagttggagcattcaattaggggggacgggagataccctgataggactgagaaggagcccccttcaacacttttgtggattttgttctttttggctcagcattatgacagaagaggacagtatgacgttgctctttcaaagattgatgaggctatacagcacactccaaccgtaattgatttatactctgtcaagagccggatattgaaacatgctggtgatttggtagctgcggcttcattggcagatgaagctaggtgtatggatcttgcagaccgctacataaacagtgaatctgtcaagcgtatgttgcaggctgatcaggtggctttggcagaaaaaactgctgtgttgtttacaaaagatggggaccagcacaacaaccttcatgacatgc

SEQ ID NO: 190673 - DNA, 521 bp, Gossypium hirsutum
cccacgctttcggtttttaccacgagagaatgtgcaattggccacagaatttgatattgtcaagtcggatcctgcgactgggattgcaataaatggtacctctgaacacgtccgcgcctcggtcgaggctagcctgaagcgccttgatgttgattacattgatctctactaccagcacagggtcgacactaaaacaccaatagaggatactatgggggaactgaagaagctggtagaagaggggaagataaagtacattggtttatctggagctagccctgaaactataagaagggcacatgttgttcatcccgtctctgccataaaaatgaagtggccgctttggactcgcgatagcaaggacgaaataatccccctctgcagggaacttgggattgggatagttccatatagcctgctcggtcgtggtttcttcggtgcaggactgttgcggaaactgtgcctgcaattagttttcggatggagaacttggctcaaaagtatggaggcacccctgcaca

SEQ ID NO: 190674 - DNA, 953 bp, Gossypium hirsutum
caagggatttttttaatatgcaaaaaacctttcatctggcggagatgagaatcttcatccctgccctcatttcatgcatttacacaatgcaggaccatcatcaggtgtagcccaagcatttggatacatgaatcacatttaccctaacaccataacctatggccattatggaaacaccaatggagggggttctggttctaggttttggatcatatggctactctgcctggaagaaagggcaagggtgctataatgctggtaacaacaacaaatctaggggtcttggttatggaaaagagaatatggatggtttaaatgagctgaacaaaggacccagagtgaaggggagtagcaacaaggatggttttggaactgcaacactagctgctaaagatcagaaccttccattgactgagagcaataaggagaacagtgtttctcttgttccagatctgggacagttcgggcatagaggattttccggatgggtattcaaacgccaagtttttcgttattaaatcatttagtgaggatgatgtccacaaaagtgtcaaatacaatgtgtgggccagcacatctaatggcaacaagaagcttgatgcagcattcggtgaggccaaggagaagcctgatggctgtcctgtatttctattgttctcgggtaataccagtggtcaatttgttgggtgttcagagatgggcggccaagttcttttttaacaagactcttgagttctggctaactggacaagtggactggttgctttcctgtgaagtggcacattattaaggacgtgccaaacactttgctgtggcacataacacttgagaacattgagaacatgcctgttactaatagtagggacacccaagaggtttattttgagcaggggatccaaattcttaaaatttttaaagatcattcctagtagacgtgcattcttgattgattt

SEQ ID NO: 190675 - DNA, 1268 bp, Gossypium hirsutum
agatctacaaaatttgcgcatatcactttcccctctgctgcagtatttctctgaccggtgcgcgatggtgtttttgaagggagtatcagcgctatccaggctaaggtcacgtgttaaacagcattccagtctcagcaactctgttagatggcttcaaatgcagtcctcttccgatcttgatcttcattcgcagttgaaggaattgattcctgaacaacaggagcgcctgaagaaactgagggcagaacatggaaaagtgcaacttgggaatattactgttgatatggtcattggtggaatgagaggaatgacagggttgctttgggaaacctcattacttgacccagatgagggaattcgctttaggggcttgtcaattcccgaatgtcaaaaactattaccagctgcaaagcctgatggagagcctttacctgagggtcttttatggcttcttttgactggaaaggtgccaagcaaagctcaggttgatgctttatctcaggaattgcgtgaccgtgctgttgttccagattacgttttcaaggccattgatgctctacctgtttcagctcatccaatgactcaatttgcaactggtgttatggcactccaggttcaaagtgaatttcagaaagcatatgagaaagggatttcaaagttaaagtattgggagccgacatatgaagatgctcttagtttgatagctcgtgtgccattggtcgcttcgtatgtttatagaaggatgtacaaggatggaaaatttattcccatggatgactcattggactatggggggaatttttcgcacatgttgggatttagcagtcaccaaatgcacgagcttatgaggctttatgtcaccatacatagtgatcatgaaggtggaaatgttagtgcccacaccggtcacttggtgggtagtgcgctttcagatccttatctttcctttgcagctgcattgaatgggttagctgggccgcttcatggtctggctaatcaggaagtgctactttggataaaatctgtggtagatgaatgtggagagaacatatccaaagaacagctgaaagactatgtctggaaaacactgaacggtggaaaggtcgtcccacgatttggtcattggagtgtggcgtaaaactgatccaagatacatgtgtcaaagggagtgtgctttaaagcacttgcctgatgattcgctgttccagctggtttcacggctttatgaagtggtggctcccattcctactgaattaggggagggtaac

SEQ ID NO: 190676 - DNA, 946 bp, Gossypium hirsutum
gttgattgcaacaagtgttgcagctaggggtttagatgtaaaggagcttgaattagtgattaattttgatgtcccaaatcattatgaagattatgttcaccgtgttggtaggactggtagagccgggcggaaaggctgtgctatcacatttatctctgaggatgatgcaagatatgcaccggatctcgtaaaagctttagaactctctgagcaagttgttcctgatgacctgaaagctctcgcagatggctttatggcaaaagtcaatcagggacttgagcaggctcatggaacaggttatggtggaagtggttttaaattcaatgaagaggaggatgaaaagagaaaagcagcaaagaaagcacaagcaaaagaatatgggtttgaggaagacaagtcagactctgaagatgaagatgaaggggtgcggaaggcaggtggtgacatctcacagcagacagcacttgctcagatagctgccatggctgctgcctccaaagctagtactgctttgatgcagaatcctctatcatctggccaactgcttcccaatgctgtattgcctatttctcttcctggtgtacttggtgtctcaatgcctgggactgcagcagttgttcctggtagtgggctgtctggtcttccaaatgaagaggctgctcgaaaagctgcactgcaagctgctctcaatttacagcataacctagcaaagattcaagctgatgttatgcctgaacattatgaagctgagttggagatttatgaattcccacaaaatgctcgatggaagggtacccacaaggaaactttgggcccaatatcggaatggactggagctgcctttactacgaggggccagtatttcccacctggtcggatcccaggaccaggagaacgcaagctttacttgttcattgaaggacctactgagttatctgttaagaga

SEQ ID NO: 190677 - DNA, 1066 bp, Gossypium hirsutum
cccacgcgtccgcgcctttctttatttatgttataataataaaaaggaaaataaaatcttctcctttggatctattggcttataattaattgtaagaaggaagaaattagaaaaagaaaaatggttctctgataaaaatttccgtttgtttcctgagcaaatctcgggaaggaataccctttttttccccctgttgttaactcgttgtgattgtgaagctttctttaaaagaatcctagttaactcgacgcgtttacccagaaagaggtgaagatgtcaactcctgcaaggaagagattgatgagggattttaagaggttgcagcaagatcctcctgcaggaattagtggtgcacctcaagataacaacattatgctttggaatgctgttatatttggacctgatgacaccccatgggatggaggtacgtttaagctgactcttcagtttacggaggattatccaaacaaaccaccaactgttcgttttgtatcccgaatgttccatccaaatatttatgctgatggtagcatctgtttggacattctacaaaatcagtggagtccaatttatgatgtagctgcaatactgacatctattcagtcattgctttgtgatccaaatcctaattcccctgcaaattctgaagctgctcggatgtttagtgagaacaagcgcgaatacaataggagagtacgtgagatagtcgagcagagttggactgctgattgatctctcatgttggatttccatagtcagaacaaagcgtggatacattaggagagcatgtgagactgtcaagcatagttggactgctgattgatagctcaacgtttggtttggtttctatggaacgtcaaaaatagtccaatgtcgtgtctaaataacattgaacaccgcaaatgtgttgcaaactactttgtctttattatgttgtttgtgttaagaaaatgaacgctgttccttgggcagcatatttcatctagtactccaagcataaataaaccctaagtcccaagtaaatcaaacttgaaacttccattgggaagcttcttggtgatgattt

SEQ ID NO: 190678 - DNA, 416 bp, Gossypium hirsutum
gagaagtatgatgctaaaggctggacagagaaaggggcgcataagtatggtagactgaatgaacagtcatggtgggagaagtggggagagcattatgatggaagtggatctgttctcaaatggacagataaatgggctgagactgaattgggaactaaatggggagataagtgggaagagaagttctttgccggtattggctcgcgtcaaggggaaacatggcatgtatctccgagtggtgaacgtatgtatagtcatttcattttctgtgtgtgaattgtgacgcttttacaattttccaaagttttttggtttctagtttaggttgtacataatatctcataggttggataagtaaaccctatttgaatatccttaagcaaaaactattctatatatttgtaaaaagtttgcat

SEQ ID NO: 190679 - DNA, 380 bp, Gossypium hirsutum
taacagcggtcatctcgtgcttaaagaccctaaaggcaaagagctatggaggtctcaacgccttactgatggttctcaagtgtcccatgcagccatgctcgacaccgggaacttcgtgatcgcaagcaaaaactcgaccaacatatgggagagcttcaaatatccaactgacaccatcttaccgtcacaagaacttgatatggctgaccatcttttatcaactctggttgaaacaagttacagtaaggggaagtatcagcttcgtttcaataatgaatctttcatactgaatcaaatagatatgttcacaggaaaaccttacgaagcttactttaatttcgggaacggttctcggttggtcttcaacgagtcaaggcata

SEQ ID NO: 190680 - DNA, 872 bp, Gossypium hirsutum
gttcatatttcgtcaaaccaaaaatcaaaccccataaattatttcatggaaattgggtcttcccaattctttgccgctgaagttcttgcttataacaacaccggcatcatcaccggcaccggcggaggagacggcggcaatttttattggtttcaggatatggaagatgacaagaaaaggagtggaaacaacgagtttatggatttacattcttcgatttcgctattcgatgctgaaatgaagcacgagcaacttcagtggtttactgatcctgatcaaggaagaggagctgtttttgaatcgaattacagtgaaacgaatgattatttcgatcaaattcaaagtcattacactgaaatcgatgaatttgatgattcacggaagaaacgcgcgagaaaatcaagttcaccggtatctgttccggcgacggaggagtcaggtccatcgcaatcaggcggtacaggacgcacgcgtccggtgaaagacagatctaaagactggtgggagaagtgcaaccacccggattttcccgacgaggaattcaaacgcgcgtttcgaatgagcaaatcgacgttcgatatgatttgtaaagagcttgaatcaacggtgatgaaaaagaacacgacgctccgcgatgcgatcccggttcgtcaacgcgttgcggtctgcatttggcgtttagccacaggtgaaccgctccgaatggtatcaaaacggttcggtttaggaatttcaacttgccataagctagttttagaggtttgtgccgccattaaaactgttttaatgcctaaatatgtccaatggcccgatgaaaacaaattaaccaaaaccaaatcggagttcgaatccgtcaccggaatcccaaacgt

SEQ ID NO: 190681 - DNA, 406 bp, Gossypium hirsutum
cctcacgccaccgccgccccatttttgatttttttttttaaagtctagtgggagtaataatttattcgaattattagcagtagtagttataatttaccggtagtaatttctgttgggttttttaccgtgtaaagagtgaaatggagcttttcaccggcggccgggaagctttccctcaacacgtggcgccatttcctgatttaacggcgattatggaaccggcggaggacttgatgatgagtgatcatcgacctactctgccaccgcgaaagctgcgtccgattaggtacaacgggaggtcaccggcgagctcacaagcggaggatcactcggagtttgctgaggcggttgaacttgtcggtgatgaggtgtgcgcgataaatggaagtcctttgactacttgaca

SEQ ID NO: 190682 - DNA, 360 bp, Gossypium hirsutum
gatttggtttacagcaacctttgctgtcatgcaaagtgcaggggcacagatccagcaagaatatgcatctactatgggtctacttcttagttatgctctaaacattacaagtttattgactgctgtactcaggcttgccagtttggctgaaaatagtttgaatgcggtggagcgtgttggtacatatatagagctgccttcagaagcaccacttattattgagaacagccgtccccctactgcttggccttcattcggatctatcaagtttgaggatgttgtacttcgttacaggcctgaactttcgcctgtcctgcatgggttgtctattacaatttctcctactgacaaggtatgcat

SEQ ID NO: 190683 - DNA, 430 bp, Gossypium hirsutum
gttaaaattaagtgtgtttggagatgggttcactgttgaacagtcatacagcagattttttgaaaatatatggggattatttgggtgattctaaagaaagaaaattatttgagacgctcttagcaagaattttttccaagactgtttaggttgtcaggaaataaggatgtatccatgtctttgtctttgatctgtttcttttgattaggttgttgtacttggacatccatgaggtctggatagttatatgggaggaaaatgtttgaatccactaaccatgttgcaaagtcctttgtgcaagtgggaaaagaagatgtatatgtgtgattgtttgagtgcgcatatgtatatgcgttggacgcaatactaattggatagcaatgtaatagaattctgtacattcattttcttgattttgaaatatgtcaca

SEQ ID NO: 190684 - DNA, 444 bp, Gossypium hirsutum
aagaaagtaagaaaaaacactaaaacctccctgaaatctgagtccaggacataaaatatgaattcaaatcacttgcttcttgaagagcccataagaatggcttccattcttgagccatcaaagcctagtttctttcctgcaatgactaaaattgtggggacacttggtccgaagtcgcgatctgttgaaataatatccgattgtcttaaggctggaatgtctgtggcgaggttcgatttttcgtggggtgatattgaatttcaccaagagacattggaaaatttgaagactgctgttaaaagcactaggaagctttgtgccattatgcttgatactgggggtccagaattgcaagtagttaataaaacggagcaccccatttcccttgaagcagatacaaaagttatcctcactccagaccaagataaaccagctacttcaaat

SEQ ID NO: 190685 - DNA, 429 bp, Gossypium hirsutum
  unsure (1)..(429): unsure at all n locations
catttgtgttgcttgatacccgagacaacagctacattgttgcgcgagatgctattggggtcgcatccctctacattggctggggacttgacgggtcggtttggatatcttccgaaatgaaaggattaaatgatgactgtgaacactttgagtgctttcctcctggtcacttgtactccagcaaaacaggaggatttagaagatggtacaatccaccatggttctctgaggccattccatcagttccatatgatccccttgttctaagacgtgcttttgaaaatgctgtgatcaaaagactgatgaccgatgtaccttttggagttcttctatctggaggtctcgattcgtcgttggttgcttctatcacagctcgatactgggctggtaccaagactgctaaacattgnggaagccagctccattctt

SEQ ID NO: 190686 - DNA, 416 bp, Gossypium hirsutum
tagagagaggaaggagatggttgccataaaaattgtccgtggagttaagaagtatcgtgaggcagccatgatagagattgagatgttgcaacagcttagaaaacatgataaaggtggcaaccgttgtgtgcaaatacggaactggtttgactatcgtaaccatatttgtattgtgtttgagaagcttggaccaagcttatacgattttctacgcaaaaacaattatcgctcatttcccattgatcttgtccgtgagattggcagacaactattggaatgtgtagcattcatgcatgatttgaacctgatacacacagacttgaagccagaaaacattcttctagtctctccagagtacgtcaaaattcctgattacaagggtgcattgcgatctccaaaggacagttactttagaa

SEQ ID NO: 190687 - DNA, 578 bp, Gossypium hirsutum
  unsure (1)..(578): unsure at all n locations
ttgagtacgagaaaacacccatctttaccgtgaagtagttcagaagatcgacggtcgattgggtcctaattatgcgatggatgctgcatggtgctctacgattgagcggaaagctgagcagaggaaagaaaagctcgaaagtgaactcaatgcttataggacgaatttaattaaagaaagtataagaatgggatacaatgattttggtgatttttactatgctcatggtgcattgggggatgcttttaaaagctatgttcgaactcgcgattattgtactacgtcgaagcatattattcagatgtgtttgaatgcaattcttgtgagcattgaaatggttcaatttagtaatgtgactagctacgttagtaaagctgagcaaacacctgaagcacttgatcccccacctgttgctaagctatgttgtgctgccgggttggctcatttggaggctaagaagtacaagcttgcagctcgtaagtttttggaagttggtccataattggtgaattcatacagcgaagttatcgctcctcaagatgttgctacctatggcgggctatgagcactngcaagct

SEQ ID NO: 190688 - DNA, 908 bp, Gossypium hirsutum
agatatttggtggtgtaggtattgcttgtttgcctgttgggcttattgcttcatttatacgccgtccaaaggctgttatcactcgctcacaatatattaaggttttcttttcctttcagttgcgtatgatgctgcgatattaagcaatgcactagagttggaaaatagtattgatatttgcatattttgttgtaattgccaatggtcatagttttaattgatgttgtaggaagcaactgaacttggtaaaagggcaaaagaagtgaagaaagctgctgatgcccttcatcaggaagaaagaagtggctctaagggtagaaaatggcgtaaaaatgttaaggctgtggaaaaggagttgcttcagctagaagaagatgtaaaacttttggaagagatgtatcctcaaggagaaaaggctgaaacttcctgggccttgactgttcttggatacttggcaaaacttgtgttgggaatcttagggttgattgtttcagtggcttggatcattcatattgtcatataccttctgagtgatccaccgctttctcccttcctgaatgaggttttcatcaagctggatgatatatggggtcttctgggtacccgtgcatttgcattcttttgcttctaccttctgcttgctgtgattgctggagcaatgatgcttggcctgcgattggttttcattacaattcatcctatgaagtggggagctacgctaatgaactcttttctgttcaatgtggggcttattcttttgtgctcaataagtgtcatacagttctgtgccaccgcatttgggtactatgctcaagcaactgctgcccaggaaatattcggccacacattgcagtctcttcgtggaattaaatatttgtacaagtataatgtatttcaaatcgcattca

SEQ ID NO: 190689 - DNA, 730 bp, Gossypium hirsutum
  unsure (1)..(730): unsure at all n locations
gttatcaagtcttcccctttatagcacacaactactatcacaaataccatttagattctatatatatagatagatatatagatatggagggtgcaaaggaacaattacaagctcctacatatggagatttaatcaccatacttagcattgatggtggtggaataagagggatcatccctggaaccatacttggtttcttagaatctcaacttcaggaactggacggtgaagatgcaagactagcagattacttcgatgtgatagcagggaccagcaccggcggcttggtgacagccatgctaacttgtccgaacgaaaagaatcgaccattatttgctgccaaagacatcaaagacttctacctaactaattgtcctaacatatttcctcaaccaggatgtccattgttttctcgaacaacaaaagttatcaaagctctatcgggaccaaaatatgatggcaagttcttacataaagttgttagagacaggctaggagaaacaaggttgcaccagacattaactaacgttgttatcccaacatttgatgtcatgcatctccagccagccattttttcaagctatcaggtgaagaaaaaacctaatttggatgccttgctctcagacactntagactagcttgaacctagtgacaactattccagccatactaaatcaaacgcattgggactaagattactnattgatgtgtgtgataaccactatgcagg

SEQ ID NO: 190690 - DNA, 733 bp, Gossypium hirsutum
  unsure (1)..(733): unsure at all n locations
cttcgatgtgatagcagggaccagcaccggcggcttggggacagccatgctaacttgtgcgaacgaaaagaatcgaccattatttgctgccaaagacatcaaagacttctacctaactaattgtcctaacatatttcctcaaccaggatgtccattgttttctcgagcaacaaaagttatcaaagctctatcgggaccaaaatatgatggcaagttcttacataaagttgttagagacaggctaggagaaacaaggttgcaccagacattaactaacgttgttatcccaacatttgatgtcatgcatctccagccagccattttttcaagctatcaggtgaagaaaaaacctactttggatgccttgctctcagacatatgcattgcaacctcagctgcaccaacatatctcccagcccattactttaaaatccaaaccgacaacggggacgtgagagaatataacctcatctgatggtggtgtggcttgcaaataacccgactttagtggcaatgggggaagtgagcaaggagatcattaagggaaaccctgactnttttccaacgaaacccatggattatggggaatttctggttatttcattggggactggctctnaaaagacgaaaagagatcaatgctaacagtcgcgaatgggtatgtaggtggctaaccagcgtggntcacgccgttgtggagttttactaagctatgagactgtanacttacctt

SEQ ID NO: 190691 - DNA, 944 bp, Gossypium hirsutum
  unsure (1)..(944): unsure at all n locations
ctaagatattcaaccaccatgaatgattcttcactgttctgcagttcatcaaatcacgaagaagaagctgacgttttgcaagccatgcatttagcttccatttcatcactccctttcactttgaaagtcgccgtcgatctcggcttgttagatattatagccgaagccgccgacactcctcctggtatggtgtcggttgctgagatcgtctctaagcttcccaccaataatccaaacgccccttccattgttgatcgaatgctcaggcttttggccgctcactccatcttgacctgtgatcaaatcactggccaagatggcctgacccaaagatcgtatggtcttgcatcaatcggtaaatacttcgttcaaaatgaagatggagtctcctttgctgctttgcttcgtctccatctcgaaaaatacatcctcgaatgctggaaattcttgaaggatgtgacattggagggaggattctcatgcaagaaagcttttgggaagcatttgtttgagctgctggcggatgatgatgatatgtcgaaatctttcaatgaagcaatgtcaatttacacaactttaataatgaaccaagttcttgaaacttacagaggatttgagggtgtgagccaagtggtcgatgtgggaaggtggagttggtaccaaccttaagctcattgtttcaaagcatccacagattaggggcattaattttgacctaccccaagtcattaaagatgcagttccttgcccaggggttgagcatgtagcaggagatatgtttacggaaattcctaaagctgaagttatnttcatgaagtcgatgcttcatgaatggggcgatgatagatgctnngaagtactcaaagtatngtatgatgcattgcctgaanatggtanaatgtatcggtggaatccatataccggaatacagagacagacttatn

SEQ ID NO: 190692 - DNA, 1981 bp, Gossypium hirsutum
tctagaaccacgtggatccgcaggaattcaggactagtttacgaggatatatgagattggcccccggagcaaaactggtggacttggtgatgtcctcggtggacttcctcccgcaatggctgccaaaggacaccgtgttatgacagtgtgtcctcgctatgatcagtacaaggatgcatgggatacaagtgtgttagttgatctaaaagtcggagacaaagttgtaactgttcggttcttccactgctacaaacgtggagttgatcgtgtctttgtcgatcaccccatgttccttgagaaggtatggggcaaaacagcatccaaaatctatggccccagagcaggtttggactacgaagacaatcaactgcggttcagcttgttatgccaggctgctttggaggcacctagagttctaaatttaaatagcagtaaaaatttctcaggaccatatggggaagatgttgtctttattgcaaatgattggcacactgctcttcttccatgctatttaaaaagcatgtaccagtcaaggggaatctatatgagtgccaaggttgctttttgcatccacaatatagcctatcaagggagatttgcctttgaagattactcacttctcaatttgcctgatcaattcaagagttcatttgacttcatggatgggtatgataagcctgtcaagggaaggaaaatcaattggatgaaggctggaattttggaatcacacagggtattgactgtaagtccatactatgcccaggagcttgtttccggtgaagataaaggtgttgaactcgatcacatcattcgtaaaaccggcatcactggaattgtgaatggcatggatgttcaagaatggaaccctaccactgacaaatacatcagtgtcaaatatgatgcaacaactgtaacgtatgcaaagcgattattaaaggaagctcttcaagctgagctggggttgccttgcgacggagatgttcctttgatcggattcattggtaggctagaagagcagaagggttcagatatcttggcagaagctattccgaaattagttgctgaaaattgccagattgttgtccttggcactggcaaaaaggccatggagaagcagattgaacagctggagatccaataccctgacaacgctagagcagtagccaaattcaatgtcccattggcccatatgatttttgcgggtgctgattacattttggtccctagtagattcgaaccatgcggtctcattcagctgcatgctatgcgatatggaacagttccgatagttgcctctactggtggacttgttgacacagtcaaggaaggattcacagggttccaaatgggagctttcaatgttgaatgtgatgaagtggatccaagtgatgtgattaaggtggtaaaaactgtcaagagagctcttgcaacatatgggactcaagcactgaaagaaatgatccagaattgtatggcacaagatttttcatggaagggaccatcaaggttgtgggagaagatgttgttgagcctcggggtggctggcagtgaacctggcattgaaggagaggaggttgctcctcttgccaaggaaaatgttgccacaccctgagcataatcagaaggcaactatggataaagcttagtaacctgttttcttagacaaccaagtccaagtacctgtctactctcgatagccattggcttgaccggcggaaaacaaactgacctgccatacgtgaagtcagtagtgctatttttgagggtgaaaagtcaggagatagtatgatatatatccatagttattagcagctaatgggtgttagtaatgttgtcaagaacttaaaaagagaatcagtttctctgcatggttttatgagtagtgagcaatgtgaaataagataaaatgttcaacttctacttaaggtgtcttcttacgtgaatgaatgcttgcatcatatttgagctttatatatgtcct

SEQ ID NO: 190693 - DNA, 660 bp, Gossypium hirsutum
tcttttcacgcgtccggtgaacttcagtgaccacgccacttcaacaacttccatcactcctaacccagctgcactcagtgagtgaaccatctcgagttcttgagctttcgatcaatggcaaccctgacaacctcacactttgtttcgacatgttctcatttcagcagccatggagcagacactaaggccaatcttgcacaggttggtgccaggaatcaagccatgactcacaatggtttgcggtctttgaacaaggtcgataggttgcggatgaggaccaccaacgcaaaggctgtcgttacgaaagccatgaaacaggcagatcacaggcctttgggaaaaattatttgcggaatagggatgaatatagtgtttgtgtcagctgagtgtggcccctggagcaaaactggtggacttggtgatgtcctcggtggacttccttccgcaatggctgcctaaggacaccgtgttatgacagtgtgtcctcgctatgatcagtacaagttcatgggatacaaatgttgttaatgatctaaaagtcggatacaaagtttaacttgtcagtatttcactgctcaaacctgagtgaacgttcttggtcatacccatgtccttgaaggttgggcaaactacttccaatttgccccatacggttggcta

SEQ ID NO: 190694 - DNA, 506 bp, Gossypium hirsutum
tccacgcgtccgcaacttccatcactcctaacccagctgcactcagtgagtgaaccatctcgagttcttgagctttcgatcaatggcaaccctgacaacctcacactgggtttcgacatgttcacatttcagcagccatggagcagacactaaggccaatcttgcacaggttggtgccaggaatcaagccatgactcacaatggtttgcggtctttgaacaaggtcgataggttgcagatgaggaccaccaacgcaaaggctgtcgttacgaaagccatgaaacaggcagatcacaggcctttgggaaaaattatttgcggaatagggatgaatatagtgtttgtgtcagctgagtgtggcccctggagcaaaactggtggacttggtgatgtcctcggtggacttcctcccgcaatggctgccaaaggacaccgtgttatgacagtgtgtcctcgctatgatcagtacaaggatgcatgggatacaagtgtgttagttgatctaa

SEQ ID NO: 190695 - DNA, 588 bp, Gossypium hirsutum
  unsure (1)..(588): unsure at all n locations
cccacgcgtccggcttataggaagcctgctcggagttatcatccggatgtgaacaaagatcctggggcggagccgaagttcaaggaaattagcaacgcgtacgaggtcttgtctgatgatgagaagcgatctctgtatgacaaatatggggaggctggacttaaaggcgctggtatgggaatgggggattttagcaatccttttgatctgtttgagtcgctattcgagggcatgggtggtcatgggcggcatgggcatgggtggacgaagttccaggaatagagctgttgatgggcaggatgaatattacagtcttgtattgaatttcaaggacgcagtttttggagttgagaaagaaattgagataacccgactagaaagctgtggaacttgcaatggttcaggtgcaaaacctggaacaacaccatccaaatgtaccacatgtggtggccaaggtcaggttatctcatctgcaaggactccgttgggtgtcttccagcaggtaatgacatgctcttcttgtggtgggacgggggaaatttctaccccatgcaatacttngtctggtgatgggcgggtaaggagaac

SEQ ID NO: 190696 - DNA, 876 bp, Gossypium hirsutum
ctcaagcatagccagccagctgccagatctgctaagtcgatcaatcgataaaataaaatccagatttcaagaaactagtacttttttttttctgtaaatctgtttcgttgtgttgagaggaggtagaactagaagaggcaacaatggatgcttttagaaggcaagccagcaagctcagagaacaagttgccaagcaacagcaggctgtaataaagcaattcagtggaactggttatgagagctcagatgttgtagttattgatgagattgagatgcaaaggcatcaacaactggacaaattgtacaagtccactcgttcagctagggattttcaaaaagaagttattaaagctgcagaagcatttacagccatcgggtataagcatattgaaacagggaccaagttctctgaagaatgctgccgatatggaactgaaaacagtgaaaacatcaacgaaaatattcttgccaaagctgcagctatttatggtgatgggtgtaaacatgtagagaaggagcaagaagatttgattaagttgttatccgaacaggttttggatcccttgagagcaatgagtgctggtgctcctttggaagatgctcgtcatcttgctcaacgctatagtcgaatgaggcaggaagctgaggcactggcagcagatatttccagaagacaagcaagaataagagaagcgccaattcctgaaaatgttgcgaagttgcatgctgctgaagcaaagatgcaggaactgaaagcaaatatggcagttctgggtaaagaagcttctgctgcattggctgctgttgaagcacagcagcaaagactaactctacagaggcttgtagctatggttgaaggggaaaagacttatcatt

SEQ ID NO: 190697 - DNA, 541 bp, Gossypium hirsutum
gattacgccggcgccgccgtgctcggctggggagacgggtattacaaaggggaagaagataaagagaaagcaaagtcaaaagcttctttatctacaatcgccgagcaacagcatcgtaaaaaggttctcagagaactcaactctttgatttccggttcaaccgccaacactgacgacgccgtcgatgaagaagtcaccgacaccgaatggttctttttagtttccatgacccaatctttcgttaacggcaacggacttccgggacaagcttttttcaattcatgtccagtatgggtcgctggatcggaccgcttagccaattctacgtgtgaaagagcgaaacaaggacgggttttcggtttacaaacgatagtttgtataccgttggcgaatggtgtcgtggaattggggtcatcggaattcattatccaaagctccgatctagtgaataaggttcgagcgctgtttaatggaattgaagctgaaacttggtctatgagcaacaacactgacgacccatcatcgttttggattagtgatc

SEQ ID NO: 190698 - DNA, 378 bp, Gossypium hirsutum
gcaatggctcctggcttatgtggacttgtcgagggatgcgatggctttggatcctccagatttcattggtggttgtgaggtgcttgagagggctttgaagctgttgcaggaggaaggtgccagcagtcttgctctggatttgcagtcacagattgatgagacattagaagagattaccccacgttgtgttctggaacttctagccttgccccttgatgatgcatatcggacaaagagagcggaaggtctttatggtgtacgcaacatattatgggctgttggtggaagaggagctgctgcaatcgcaggaggttttacccgtgaaagatttatgaatcaggccttcttgtgtatgacaacaactgaacagggtgatct

SEQ ID NO: 190699 - DNA, 474 bp, Gossypium hirsutum
ctgaatgaaagtgaaaggaaaaagttggctgaggagcttgaagagaatgctgttcaaaatagtgcactacatttggctgctttggagcaaaaaagggctgatgaaaatgtaatgaaattggctgaagatcagaagaggcagaaggaggaacttcacaacaggataattcagcttgagaaaaaattagatcaaaaacaggcattggaactggaaattgagcaactgcgaggatcactgaatgtaattaggcacatgggagatgaagatgatatagaagttcttgagaaagtggatgcaagtcttaaagagttgagagaaaaagaggcagagcttgaagacttagaagcattaaaccaaactcttattgtaagagagcgcaagagcaatgatgaactgcaggatgctcgcaaagaattgattaatggattaaaagaaatatccacccgttcacaaattggtgtcaagagaatggga

SEQ ID NO: 190700 - DNA, 429 bp, Gossypium hirsutum
aagaatcataaccacacttacaaactgacattgaaaatttgaagttggaactttgatatttacaatactaactaaaacatcatatcctttgttatttaagaaaaaaattaatacctattctgaaccttaaaaattttattttggaaaaaaagtcccatatattcacatgtttaccccttgataataggctaaatgtctattttgatttgtattatagtgaaattttcactttcatatctatactacagtgatactctcacctcgagccttttattattatccaaatgttcacatttgataagtgagattttttttttaaacagaaatggtgaaggagctaaagtgatgaacatagtaaaagtaaagagataaactaaccgaaaataagaatttctatataggacaaaggaaaaaataaatattaagcct

SEQ ID NO: 190701 - DNA, 450 bp, Gossypium hirsutum
gaggggtcatgttctaaaattgtaccatatttactgaatagtgctgctgctcaaacacagtccttcgcatatccgcatgaaaacattgatcaaccaagcccagttgttgcatccaaagagcacctcgcagatgctaaactttgcagctattctaacttttgggtccatgagaagaaagctgatagccttttcgagtccagaagagtggagaattcactgtccaggcagaatgttgcacctctattacttcatgatcagtcaagaaacaatagtcagaataagcagagtcagaaagtggaacatgattctaggcttagattgcttccaagcttgggcagtcctgaggctgagaaatcaggaaaagcatacgatgaatatctcttgctgcctagaatacctcgttctgtacatgatgtcaagaccatgagaatatgtaccactattgattct

SEQ ID NO: 190702 - DNA, 400 bp, Gossypium hirsutum
gatcttacgccaaggcgcataacagtttcatgagtgacaattaatatattattaatttgcaaactgttcattctttacgagtgaataattttccaatatatgcagacactgactgctattgagctttttgtttacagttatgctgcaaggtgccttaggttcctattttgttgcttcttatgttataattctctttggcagacttgtgtcctgtgctgaaactgaaattcatgcctttgcatatatatcaatggagactgcaaacccaagtatttaaaatttgtcactcttgtaaaccacttcccattaatatgtcttgcttagtggaaccacctttgttgaacttaatgcgtacatgtaagcatttagtaagtgcattgatataactgtgaaactaact

SEQ ID NO: 190703 - DNA, 434 bp, Gossypium hirsutum
  unsure (1)..(434): unsure at all n locations
ccgaagtcggaaatgaaaaggttgacaagcgaccatataaagaattaactctaaggcctaattctcctaaacatccttccggccgaccccaaccgagcacgactcccagaactctaacattaaaccaaacttcaaaagagctgtcgcctattgctggagaaaacccgaagctggcaatgagctcagagaccacatgtcttaagaagaagcttgaattggaaaaaaaacctcgtcgcactcgtccagcatcagagcagagcagaagcagaaggcaatcaagcagaatacaagcagaatcaggcttgccgcattggatgtccagggataaatcccacgatttgcaacgacgcgatgatcaaacaagtgatatcagtagtgacatgacagatntaagccaccaaggggatgcttgttcaatgcaattcaagagcaat

SEQ ID NO: 190704 - DNA, 357 bp, Gossypium hirsutum
atccgatatttcctactggtgatatgtcctggcaggctggggtttcttctgcacaacagccatcaaggcttttcccagctaatcattctctggaattaaggtcagcaccagtggtacataatgcaaattctgaaaacccgaatgtcataagtcatgttccatctttgctgcaaaatggaggttctggtccaagaacgggcagttcatcaaattctaatccttttgctgatagagatgtaccacgtgcaagacacaaatcaagaagcatggctagaaacatattacatcatcctatgtttgttcctgcaccagaattaagaactttggttagaaatccaattttaagcagtggaaata

SEQ ID NO: 190705 - DNA, 1045 bp, Gossypium hirsutum
  unsure (1)..(1045): unsure at all n locations
gtcatttctctcttgtggttcaaacgtagccttccacgatactgtactaaatttatcgaggtatgcatcatgctctgtgctgaccacggtccctgtgtctctggtgcgcacaacactatagtgactgcaagagctgggaaggaccttgtgtccagtcttgtgtcaggtttgcttacaattggtcctcgctttggtggtgcaattgatgatgctgcacgatactttaaagatgcttacgataggggtcttacaccttatgaatttgttgaaggcatgaaaaagaagggcatccgtgtgcctggaattggtcacaggatcaagagaggggacaacagagataagagagtagagcttctccaactgtttgctcgcacaaatttcccatctgtgaagtacatggaatatgccgttcaagttgatacctacactctctcaaaggctaacaaccttgtcctcaacctggatggtgccatcgggtcacttttcttggatcttcttgctggtagtggaatgttcacaaagcaagagattgatgagattgttgagattggctacctaaatgggctctttgtgctagcacgatccattggtttgattgggcacactttcgatcagaagagactgaagcagccactataccgtcatccatgggaagatgttctttacactaagtgagagaacattacgagcagtaggtgcaaatctcctcgagcattgttgttactggagtccttttgtctgcatttttatggggtatggttgtttggttcttagattattgtttgtaaggcaaggctaaatggtggatcaccatcatttctaagttgtattcaaggtccacataggagaaaaaaaatctcaaaaatgctgcgtgattcgtttttagtttttttaccagtttcacggataaataagacatgtcttgcacattgtattgtaatattttatgagaaatttcgaaattaggaatcatctattctcggattatacaataaggtagttgaagttaaannnnnnnnnnnnnnnnnnnnnnnnnnnnnnnnnn

SEQ ID NO: 190706 - DNA, 1678 bp, Gossypium hirsutum
cgtttctctccatttcctttcaactgtctctcttcaggtggaaaggattgcatttactctcaggtccctttgagccgaagccatggccactggacagttattttctcggactactcaagcgttgttctacaactacaaacaacttcctattcaacgcatgcttgattttgatttcctttgcgggagggaaacaccatctgttgctggtattattaatcccggtgctgagggatttcagaaactcttctttggtcaagaggaaattgcgatcccagtacattctaccattgaagcagcatgtactgcacacccaactgctgatgtttttatcaactttgcatcattccgaagtgctgctgcttcatccatggctgctctgaaacagccaaccattcgagttgttgctataattgctgaaggtgttcctatgtcggacaccaagcagttgattgcatatgcacgttccaacaataaggttgttattggcccagctaccgtcggaggaattcaggctggagcttttaagattggtgacactgctggaacaattgacaacattgttcaatgcaagctgtacaggcctggatctgttggctttgtctccaaatctggtggtatgtcaaatgaaatgtacaacacaattgcccgtgttacagatggaatctatgaaggtattgcaattggaggagatgtcttccctggctccactttatctgaccatattttgcgatttaacaatattccacaggtaaagatgatggttgtgctcggagagcttggtggacgagatgagtattccttggttgaagccctgaaacagggaaaagtgaacaagccagtggttgcttgggtcagtggaacttgtgcacgactcttcaagtcagaagtacagtttggtcatgctggagctaagagtggtggtgagatggagtctgcccaggcaaagaatcaggcgctaagggaagctggagctgttgttcccacttcatatgaagctctggaagctacaatcaaggaaacatttgagaaactggttgaagaagggaagattacaccggtcaaggaagttaagcctccacaaatcccagaagatcttaacagtgctattaagagcgggaaagttcgtgctccaactcacattatttcgaccatctctgatgacaggggggaggaaccgtgctatgctggcgtgcccatgtcttccattgtcgagcgaggtcttggtgttggtgatgtcatttctctcttgtggttcaaacgtagccttccacgatactgtactaaatttatcgagatatgcatcatgctctgtgctgatcacggtccctgtgtctctggtgcgcacaacactatagtgactgcaagagctgggaaggaccttgtatccagtcttgtgtcatgtttgcttacaattggtcctcgctttggtggtgcaattgatgatgctgcacgatactttaaagatgcttacgatagggggcttacaccttatgaatatgttgaaggcatgaaaagtatggcatccgtgtacctggaattggtccaggatcaagataggggccacagagtttaatgaagtgagcttcttcacttgttgctcggcatattttcttttgtgatatcatggtatagcttgtcagttgaacttacctgttacatgctacaaccttgcctaaag

SEQ ID NO: 190707 - DNA, 667 bp, Gossypium hirsutum
gtctcgtcttttcttttcctttcgtaaggcgagcgagccactgtaatcttttcctttcgttacaactttctcttcaggtctctttgagtcgaagccatggccaccggacagttgttttctcgaacaactcaagccttattctataactacaaacaacttcctattcaacgcatgcttgatttcgatttcctttgcgggagggatacaccgtccgtcgctggtatcattaatcctggtgccgagggatttcagaaactcttctttggtcaagaggaaatagcgatcccagtgcattcaaccattgaggcagcatgcgctgcacatccaactgccgatgtttttattaactttgcatcatatcgaagtgctgctgcttcgtccatgtctgctctgaaacaacctaccattctagttgtagctataattgctgaaggtgttcctgaatcaaacaccaaacatctgattgcatatgctcctttcaacaacaaggttgttattggcccatctactgttagaggaattcaacctgaagctttaatataggtgaccctgttgaacatatgtacaattagtcattgcagctgttcaggctggatctgagtgtatagacctaatcagaggtatgtaatgaaatgacaacatattgcctgtatcaaatgaattataa

SEQ ID NO: 190708 - DNA, 550 bp, Gossypium hirsutum
tacaaattggtaaccagtagaccttggaaaccccaaattattgtcctcataatctccataattatatccttcaaccctgtccttgtagccggtgatatgatgggagtaaaggttttaagcttttaactggtttacatggaatctttgtggtgtgggaagccatagcttctatttttgcattctcactctctgttgtactatgaaagccttcccttttcctccaatcaccaaaaggagatgctttttaatggtgtctttatcttagttggaagttgctgacaggcacataaccctaactctaaagccccgtatctccctttagttaaaaagctgatctacaagaacccaatgaaagaaagcataagccctcactttctttatatatcagctgcagctgcgcccatctttgcttagccaaaccccgagtttcaagcaaacaagccaagggattttaattttgtttcattgatcagcagcaaatgagagaggtgaactttgagtaactctttttatataagtttttggtgatgatgcaagctaaaacagcaat

SEQ ID NO: 190709 - DNA, 437 bp, Gossypium hirsutum
aggaaacactactctttccagttcttccccaaacactgccactccttccatttcatccctctctttgatctcaaaatagattctccaacttttagggtttttgaactgctcaaaaacctattggtagtgtttctgctctactagcgatggggaaacgaaacaccatcgtcatatcctcatcagacgatgaagattacgagccttcttcgaggttgacacggagctaccagaagcccaaatccacgtcttctcttactcgtaccaatcctagtagagccaaaaagcctcgtctcccgggctctcgcttaaccaagcaatccagcaatgtagatgagatgagactagcctttagagatcttgatgaagttttgaatgggttcaaggtttctgccggttctagaaggagcaatccaaaggaattgtgggttgataaacat

SEQ ID NO: 190710 - DNA, 942 bp, Gossypium hirsutum
atttgaatgcttatacatcgaggtagcttaccacttattacgctaaagttatggatagagatgtatttaaagcgttggatatattggctgatattttgcagaattcgaagtttgaggaacacaggattcgtagggaaagggatgtgattctaagggaaatggaagaggtcgagggtcaaacagaggaagttatttttgaccatttgcattcaactgctttccaatacactcctcttggtagaactattctcggacctgctgataatattaggacgatcaccaaagagcatttgcaaagctatattcagacacactatactgctcctagaatggtcattgctgcatccggtgctgttaagcatgaggaaattgttgaccaagtgaagaagttgtttaccaagttatcgtctgatccaaccactggttctcagttagttatgaacgaaccagcaacttttactggttctgaggttagaatgatcaatgatgatgttcctctggcgcaatttgctgttgcttttgagggagcttcttggacagatccagattccattgcgctcatggttatgcaggcaatgttgggttcgtggagcaaaaatgctgggggtggaaaacacatgggctctgagctggcacaaagagtcggcattaatgaaattgcagaaagcatgatggctttcaacaccaactataaagatactggtctttttggtgtctatgctgttgccaagcctgattgtttggatgatttggcctatgctattatgtatgagacaaccaagctagcttatcgtgtttcggaagctgatgtcattcgtgctcgtaatcagtttaagtcatccttgatgcttcatatggatggaactagtcctgttgctgaggatattggccgtcagctacttacgtaccgtcggagaattccatttgctgaattatttgcta

SEQ ID NO: 190711 - DNA, 683 bp, Gossypium hirsutum
tccacgcgtccgcccacgcgtccgcccacctgcgcttttctttgtaataatcgaactcccctcccgtcctctttcccgatttgtcttcttcattgccccgccatggcttgtgttagcttcgctaaactcaacgcgccgtcatcctcttggatcggtggccagcagtctctccctcaacgctccggatcatccgctcggctcgccactcgcagagtctcactcccgatccgtgctggcgcttacaccgacgaactcatcaaaaccgccaaaactattgcttcacctggtcgtggaatactggcaattgatgaatcgaatgcaacatgtgggaagagattatcttctattggcttagacaatactgaacccaaccgccaggcttacagacagcttctgctcacaactcctggcctcggagaatatatttccggtgccattcttttcgaggaaacactttaccagtcaactacagatgggaagaagtttgttgatgtcttgcacgaccagaaaatcgtacctggcatcaaagtaaataagggtttggttcctctacctggatcaaacaatgaatcttggtgccatgcttggatggtttgtcatcaagatttccgatatctccaacaagtctcggttgccaatgagaccatattagcatcttgagcctatgtctgctgttagagcac

SEQ ID NO: 190712 - DNA, 628 bp, Gossypium hirsutum
aaccgccaaaactattgcttcacctggtcgtggaatactggcaattgatgaatcgaatgcagcatgtgggaagagattatcttctattggcttagacaatactgaacccaaccgccaggcttacagacagcttctgctcacaactcctggcctcggagaatatatttccggtgccattcttttcgaggaaacactttaccagtcaactacagatgggaagaagtttgttgatgtcttgcacgaccagaaaatcgtacctggcatcaaagtagataagggtttggttcctctacctggatcaaacaatgaatcttggtgccaaggcttggatggattgtcatcaagatctgccgagtactacaaacaaggtgctcggtttgccaagtggagaacagtagttagcattccttgtggtccttctgctctggctgttaaggaagctgcatggggacttgcacgttatgctgccatttctcaggacaatggtcttgtgccaatagtggaacccgagattcttctggatggtgatcaccctattgggaggactcttgaagtagctgagaaagtttgggcagaagtcttctactacttggctgagaacaatgttatatttgagggcatcttactc

SEQ ID NO: 190713 - DNA, 1100 bp, Gossypium hirsutum
  unsure (1)..(1100): unsure at all n locations
cgtccgagtaccgtttgttttttctttcgacccacgcgtgcggaggattaggttattgaaataagcaagaaactttatgttcgacccgggattggagtccgagccaagctgagaaccaaacactcgggtcatttcggatccacctcgggtgagaaaggtaagttcgggttgacaacgatccagattttaagggttgttaaaaagcttcaggattcggggatgcttgattgtctgcaattgctacacttccatattggatcccaaatcccttcaacagctttgcttcaagctggtgtcgtcgaagctgctcaaatctattccgaattagcccgtcttggtgctgacatgaaagttattgacattggaggcggccttggaatcgattacgacgggtcaaaatccggtaattctgatctctctgtttcttatggccttcaggaatatgcttcagctgttgttaatgctgttcggtttgtctgtgaccgtaaatctatcaagcatccaattatctgtagtgaaagtggtagagctattgtttcccatcattctattttgatatttgaggccatgtctgctactgctcctactaccccagcaatgaaccaagttgaccttccatttattttggagggtctctcggaggatgctcgtgtcgaattgttggaacttgagccaggcagcaatgagacatgagacggagtcctcggttcgtttatgctgatcagttgaagcaaagatgtgtggaacagttcaaagaagggactttggggattgaacagcttgcccctgtcgatggcttatgcgacttagcttctaaagtggttgatgcatctgaacctgctaggacataccatgtcaatctttcgattttcacttcgaatccctgattttttggagatttggtcagattattttccatagtcccattctcgatggatgaaggcctgaatganggggatatctgattaacccggacatgatggagattgtagttcatagagtaacaacttgctttcatggttgaaagaaaagggtgggcacaggtgcaggcgccatntaagttttggtgctacangaacctttgggtcaccttgggccag

SEQ ID NO: 190714 - DNA, 653 bp, Gossypium hirsutum
aggatgctcgtgtcaattgttggaacttgagccaggcagcaatgagacatgagactgagacctgtttcgtttatgctgatcagttgaagcaaagatgtgtggaacagttcaaagaagggactttggggattgaacagcttgccgctgttgatgggttatgcgacttagtttctaaagtggttgatgcatctgaacctgctaggacataccatgttaatctttcgattttcacttcgatccctgatttttggagtattggtcagatttttcccatagtccccattcatcgattggatgaaaggcctgaagtgagggggattttgtctgatttaacctgtgacagtgatgggaagattgataagttcatcggaggtgaaacaagcttgcctttacatgggttggaaggtaatggtggtggtagcagtggtggtgctaatgggcggtactatttggggatgttcttgggtggggcttaccaggaatccctcggtggagttcacaacctctttggtggcccaaatgtggttagcgtgtcgcagtgagatggtccatatagctttgcggttacgcgggcggcgcctggtccgaatgtggggattatctttattgattttattactccatctatgtttgaaatctatatccgtgttgag

SEQ ID NO: 190715 - DNA, 813 bp, Gossypium hirsutum
aacctgtgacagtgatgggaagattgataagttcatcggaggtgaaacaagcttgcctttacatgggttggaaggtaatggtggtggtagcagtggtggtgctaatgggcggtactatttggggatgttcttgggtggggcttaccaggaatccctcggtggagttcacaacctctttggtggcccaagtgttgttagcgtgtcgcagagtgatggtccatatagctttgcggttacgcgggcggcgcctggtccgtcatgtggggatgtcctccgagtgatgcagcacgagcccgagctaatgtttgagaccctcaagcaccgtgcggaagaattttgtggacaggaccatggcaatgaaggcacccatgctgctttagttagcaccattgctcgttctttccacaacatgccttatcttgtagtggcatccccttgttcgttgactgccatgaataacaatggcttctactattgcaatgaggaagattacaatgctgctgtcgattctggggctagtgaggacgagcagtggtcctattgctacgcctgaggcagtgttctactatttgctttattgcatggtttgccagtccttgaatgtctagttattttagttttttgttccctttttaatgttcttcttttactgttaatttccatcgcttgtaagcagtgattgttagcatgcatacaaggtgtttagcaccttgtcgggtagaagggatgagaaccgaatccaatcctttctgtaaatccgggattttatgccctctccatgcttcttttaagccgactttattagtttttttt

SEQ ID NO: 190716 - DNA, 1135 bp, Gossypium hirsutum
tctccctaaagtttatataaagaccagaagaacaaccaagtagagccacagcagcgtcccaagcattgcaatcaaaagagaaagcgcaaaggcgagggtctattttcttcacaaactacaatggcttccgagtctttagtaaccaagaggctagatggtaaggtggcactgataactggtggtgccagtggtttaggagagtgttcagccaggctatttctcaaacatggagccaaggttctgattgctgatattcaagacgaattgggccactccctttgcaaagagcttggaactgaaaacttcagctatgtccattgtgatgtaacatgcgaatctgatgtcgaaaatgccgtaaacttagcggtctccaagtatggaaaactcgatatcatgttcaacaatgcaggccttattggtgacggtgaagtcagagtgacagacgccagcactgacaacttcaagagagtgttcgatatcaatgtcttgggtggtttcttgggagccaagtatgctgccagggtcatggttccggccaagaaaggttgcatactattcacatcaagtcttgcttcaaaaatcagcttcggtagcccccatgcatacaaggcatcgaagcatgccgttgcagggttgacgaagagcttggccgtggagttaggtgagcatggaattagagttaattccatttcacctcacgcaactgtgaccccattgttccaaacaacactggggatgctcgataagaagaagggagaggagatgattgcggcttcagcagtgttgaaaggcaccgtattggagcctgaagattttgcacatgcagcactgtatttggcaagcgatgaggctaaatttatcagtggtgtcaacttgccagtcgatggagggtatagtctcagcaatcagtcatggaagatgggattcgcagcacttttttggataaaccaacaagtcctctgctttactccttggacaaaattttctttaataaggaaataaaagttacccaaaactacgctacttgtaataagattgtattgtcgatcatctcatttaatgcttttgatgtgtactttctttaccagtaccacttatatcgttttgaaagattaaacgatgtcaatttcattcc

SEQ ID NO: 190717 - DNA, 706 bp, Gossypium hirsutum
  unsure (1)..(706): unsure at all n locations
gctaaaagctcaatttgagcaaagtatgaaggaagctgcagataaatctcagggtgcaaatgtatgcattaaaaacttagatgatagtattggtgatgaaacattgaaggaacttttttcagagtttggtaacattacatcttgcaaggttatgcgtgaccctaatggaattagtaagggctctgggtttgttgcattttcaactcctgaagaagcctctcgtgctcttgctgagatgaatggtaaaatggttgttagcaaaccactttatgttgcagtggcgcagaggaaagaagagagaagagcaaggctacaggctcagttttctcaaatgagaccaattatcccctcagttgctcctcgtatgccaatgttccctcctggtgctccaggtcttggccagcaatttttatatgggcaagcacctccagctatccttcctccacaagctggttttggttatcagcagcaactgcttcctggagtgaggcctggtggcccccctgtaccaaacttctttgttcccatggtccagcagggccagcgcccacggggacgacncggatcaggtccatttcaacaggctcaacaacctatgatgcctacgggaagtggccatcgatacccacctggttgtaatgtgccgggtccagtgccggatgctggggctggacagcctatgcctcttcgacctgtgggtactgcg

SEQ ID NO: 190718 - DNA, 672 bp, Gossypium hirsutum
  unsure (1)..(672): unsure at all n locations
nnnnnnnnnnnnnnnnnnnnnnnnnnnnnnnnnnnnnnnnnnnnnnnnnnnnnnnnnncccgcgccatataaaaaccgcccacccccgcccaaaaaaaaaaaaaaaaaaaaacaacaccctccctcccccatcctatctccacattattctccccggccctccccctaaaaaccctcttttttaacaactccaaaaaccaaaaaccactcccactcctcacaaaaacctcctattacaccatgagacctcttgctatcccctccgttgctcctcgtatgcccatgttccctcctggtgctccaggtcttggccagcaatttttatatgggcaagcacctccagctatgcttcctccacaagctagtgttgggtatcagcagcaactgcttcctggaatgaggcctggtggcccccctgtaccaaacttctttgttcccatggtccagcagggtcagcagggccagcgtccagggggacgaggaggagctggtgctgtccaacagactcagcaaccaatgccgatgatgcagcagcagatgatgcccagggggcatgcctatcgttacccccctggtcgtaacatgcctgaagttccactgtctaaatgttggtggaggcatgctttctgttccatacgacatgggtggcatgcccttgcgagatgctggtat

SEQ ID NO: 190719 - DNA, 441 bp, Gossypium hirsutum
aacacagcccgcattattatcattgttgttgcttcagttggtggaattcccatactaattgcttcctccatctgcatcattcggagggccagaaagaccccacaacaattacttagaactgatgatgatgaggtcattagggctgactccttgcagttcgactttgccactgttcgggcagcaactaataacttttctgatgcaaataagcttggccaaggtggatttggagctgtttacaagggtcaacttccaaatggagaagaggttgctgtgaaaagactagccagggattctggacaaggggacctggaattcaagaatgaagtcctcttagtggccaagcttcagcaccgcaatttagttaggctccttggtttctgcttagaagggcatgaaaggcttctcatttatgagtttgtgcccaacactagccttgat

SEQ ID NO: 190720 - DNA, 535 bp, Gossypium hirsutum
ccctttcgtccgctccatctcaattcaaacaaacccattaaatttatctgatcaaatccattatcaacaatggcttctctcaaattccccattgttctcttcatttcttctcttcttctccactcttctctagctgagatgatttgtgaagatttgcccaaagacgtgtgcgcgttttcgatagcctcatcggggaaaagatgtgtgttggaaacggcggtgaagaaagacggcgacgtcgagtatcaatgccggacgtcggaggttgtggtggagaggatggcggagtatatcgagactgacgagtgtgttgctgcttgtggcgtcgatagaaactccgtcggcatttcatcagattctcttctcgatcaacagttcaccgccaagctttgtacccctgcttgttaccaaaagtgtcccaatattgttgacctttacttcaacttggccgccggtgaagctttggtttgcaggtgtatttttgcctgatctttgcaacgctcagcgatcgaacccacggtggagcatggtggag

SEQ ID NO: 190721 - DNA, 510 bp, Gossypium hirsutum
aaacaccttcttcattagttcatttccattttatgagcaatccatggagtttcttaaaaccctgttttgtttatttgattttaatggtttttgttgtctttttggcagctgagatgatttgtgaagatttgccgaaagacttgtgcgcgttttcgatagcctcttcggggaaaaggtgtgtgttggaaacggcggcggacaaaggcggcgacgtccagcatcaatgccggacgtcggaggtcgtggtggagaggatggcggagtatatcgagactgacgaatgtgttgctgcctgcggcgccgatagaaactccgtcggcatttcatcggattctcttctcgatcaacaattcaccgccaagctttgtgcccctgcttgttaccagaacttgtcccaacgttatcgacctttacttcaatttggccgccggtgaaggtgtgttttttcctgatctttgtaacgctcaatggtcgaacccacggcggagcatggtggaccttatatcgagc

SEQ ID NO: 190722 - DNA, 415 bp, Gossypium hirsutum
cttagttgttgccactcagctggtggaagaatctatggtgaagcttgatagaatttgtagacaagaaaatgtgatgtcgatttttgctcgctcctacggcctaacaggtttagttcgaatcagtgtgaaggtaacatgttcttggcattgactatctcaccatggtgacatcaatatctcactgataaagctgaatatcagcaagaacaaatcttgaaaatcgtttgaacttatataggcctagaggaaatggatggttatttaatatttttcaagagtctagtatataggtaacagacaaaggaaatatctcgaaatgatgatcaagttttgcttgttgcaggaacacactgtaattggatcaaagcctgaccattttctagatgaccttcagttaaataatccatggcctgag

SEQ ID NO: 190723 - DNA, 612 bp, Gossypium hirsutum
  unsure (1)..(612): unsure at all n locations
cccatctatcgccatattatcctgcgttggcttggatttcccccaaactagaactcgccaactgaaggaacagacgatcgtcctcttcccgcaatggcggatgctcaaactgaaaaacccctttccctttccgagcaatatgcacttcaggagaaagaggaaaaatcagatgtgactacaaaaccagcagaagcaaaagaggttgaaaatcctgtaaatgcagccactggttctggggatgttgtaactgagaaattggaggagacttctgccgatccagttgagggaagcactgaggcccctcctcctgctgctgaagaaagcactgaagcaaatcctgctactgggaacagtggtgaagatgctgcagaggaaaactcgggtgactctgaggaaactccagagataaagcttgagactgccccagcggatttccgcttcccaactacgaaccaaacaaggcattgcttcacacgatatattgagtcccacgttgggtagctgcaaaganaaagtgctcanagtggataagtttgcaaaattatcggcttggggtctggagatgatngatcatggatgagcaaggagatggactttcaggtcctttgatga

SEQ ID NO: 190724 - DNA, 544 bp, Gossypium hirsutum
  unsure (1)..(544): unsure at all n locations
ttttctataaacaaggcattgcttcacacgatatattgagtaccaccgttgtgtagctgcaaaaggagaaggtgctccagagtgtgataagtttgcaaggtattatcgtgccttgtgtcctggagaatggatagatcgatggaatgagcaaagggagaatggtacttttccaggtcctctctagatgagatggtacccctattgttatccgaaaaatccctgttttgacttttttttccctctgttatatcaaaccgtaacagttgaaccacagatgaatttccaggatgaaagcagaatttctcaggaaatatccaatttgaaaaggatgagttaataataaaatttggcgtgtaccctagcttagactagatcaatggaccatacaattgtgttgctcataaatggaaattcattgctcatcggttcccatgttggaacccgttttatttctttnttttttgtctggtgcagccagcattcagtttcaggttatagcgtaactcttactataataaaaaagaatgtaaacttgtgattagtt

SEQ ID NO: 190725 - DNA, 1231 bp, Gossypium hirsutum
  unsure (1)..(1231): unsure at all n locations
cgaggttcaattaattaacaagaatggctctttcagctgccactcttctcactgcccttgcggtactctgctctttctttttcattctattttacatctcatcaagcaaaaatggaaaaggaaaaggaaaagggaaagccattccgggtccgcgacccttgccaattattggaaacctccacatgttaggcatgcttccacaccaatccctttatcacttggccaaaaaatatggtcctatgatgtccataaggctaggcgttgtgccaactgttgtcgtttcatcccctcaagccgccgagatatttctcaagacacatgatgctgttttcgcaagcaggccaagacttcaagtcctagaattaatttacaatggcaaaaggggcatagcattcacggaacttggaatcatattggcgtagtgtgaagaagatttgtaatatgacaatttttactgcatcgaaaattgaatcgtttgcatcaacgaggaaggaggtgctagcacatttcattgaatctttgaaagaagctgcatcagcaaaggaagtggtaaacattagtaagaagattggggcgcttaatgaagagatgactttgagaatggttttggggaatgtgaagaagtatgagggatttaacctcaaggagcttattgatgagcttactcacatagcaggagctttcaatcttgcagatgttgttccttttctgggtgctttcgacctacagggactcaaagcacgtacaaagaaactcggtgaaaaacttgacaaagccctcgagacgatcattgacgaccatgaacaacataagcaggatgatttcgtcggtacactgcttaaagagttaaatcaaccaatgaacaatgatggtgatataatggatcggaatagcatcaaagccataacaatagatatgatggtgggtgccttggacacttcagctggcacattggagtgggcattatcagagctcctaaggcatccaagggtaatgttaaaacttcaacagaagtagaaagatttgtcggaaccagagatggttgaggaaatgatttaccaaaattgagtacctaacctttgtggaagaaattcttggcttcttctgttgacctttgctagtcctgtgagtattggaaaatattattgatgtgttactccaacaattagggctaatgaactttggcatggggagaccatactggccaatagctaagatttctcaggttctn

SEQ ID NO: 190726 - DNA, 709 bp, Gossypium hirsutum
aatgggtgagatatttggagatatgaaaatgaagaaaatggaaagtgatgaattctcctttgaaaactccattaatgcttcaatagcttcttcatcagacttggttgatgatgctacatcttctgcatcatcatcgaatgggccactttatgagttatccgagatgatggctcaactacctatcaagagagggctatcaaagcattaccgtgggaaatcacagtcattcacatcgctagcaaacgtgaagagcattgaagacctaccaaagaaagtggttcgtgtaagagctaagatgatgaaatcatgcaagagctatggatggggattagatggtcatcatcaccataacaaggtgtattatagccctaaggctaccatatcaaagaagggttcaagttcaacaaggggtttgtttatgtcttcttctctagctacccatgacccctataaggggttaatgtggaattattaacccctatttacctcttttgagacactccccttttggaggggtttttttttttagcatgtggctcctggataataatatggggaagttatattgaacctaaaattggtggggttctaagataccccatgtttcaaaatccaattttcgagtggtataatatttttatcctctactcacaataattttctctcatattccccctgggatttcttaataaaatctttatatcacgcg

SEQ ID NO: 190727 - DNA, 925 bp, Gossypium hirsutum
cccacgcgtccgtttcgatcgtcccaaatttgacttgatttcctctttccatcgaagagtttagagggattcagaaaatgcagggaggcagaggtggaagagatcctttcttcaattttggtggtgaccccttcggtggtgacctcttcggtggtgacacccttcctgtgggtcttgggggccctttggatggaattggttgggtcctagaaaatttaattctccaactttctttgggagggaagggaacctgtcatttgatgaccccccttttatcacacgcccccttttggaagccatggtttgattcaaggcttctttggccctcggtcaaagtcccttttatcggatatgccatccgactgggtttattgagcgtcaggctccagagccaaagagaccaaggggtctgattattgaagaactaaattctgatgatgagaaggaagaagcagataccgggatgaaagggaatcctaggaagcatggtaggtctaatgccgaaccttatggtgggttccagatgatgaagctggacaatctgagagaaggaacaggcatttgcagtatatgaatggttacaatggttgtatcaaatcagcagcagctcagcctcaaactagttagttgtgttcagagctcactggcacttatgatgcctgatgagctaccctacttattataacatgagggatgagtgaggaattctctgaaaagcaacaaccgtccactttgggctgcagtcccggttttaggacttcataggtgctcttttagaaactctctttgtgttgtcatctaccctctattatatgaaatcttttgaattctgcatatattatgctttttgcctgtcttgtaatgtctcttatgcatttctcttctgttcttatgtctatctacttcttcggatttgatctatccg

SEQ ID NO: 190728 - DNA, 1256 bp, Gossypium hirsutum
  unsure (1)..(1256): unsure at all n locations
agagcatttagggtttcgatagtcccaaatttgacttgatttcctctttccatcgaagagtttagagggattcanaaaatgcagggaggcagaggtggaaaaaatcctttctttaattttggtggtgaccccttcggtggttttggggactttggaggatttggtggtcctanaaatttattctccaacttctttggaggaaggaacccatttggtgacccttttttcacacgcccttttggaagcatgtttgattcaagcttctttggccccggtcaaagtccttttatggatatgcatccgactgggtttattgagcgtcaggctccagagccaaagagaccaaggggtccgattattgaagaactaaattctgatgatgagaaggaagaagcagataccgggatgaaagggaatcctaggaagcatggtaggtctaatgccgaaccttatgttgaggttccggatgatgaagctggacaatctgagagaaggaacaggcatttgcagtatatgaatggttataatggttcgtatcaaaatcagcagcagcagcagcaacagcctcaaactagtagttttgtgtttcagagctccactgtcacttatggtggtgccgatggagcttactatacttcatcaaaaacaaggaggactggaagtgatggaattacttttgttgaaggcaaagaagcggacaccactgcgggccaagcaagccaccgggtttctaggggacttcacaacaagggtcattcagttatgagaaagctgaactcggatggtagggtggatacgatgcagaccttacataatttgaatgaagatgaacttcctggttttgaagaatcttggaaaggaaaagcccaaaagcgtctgcctggctggtccgggagttttattggccatgataacatagggactggcagcagtggacagaacgggcaggctggtcggggaggatgggcacttccctctactgagtcttctcaaccaaaagggaggatgatggtagatgcaagagacaggtccgggcctttgcatagcgaacacactaggatgaaaggatcagcagattttaaagataagagttctcactctcgagggaaacgtagggactaagttggagtgagtctaacaccgagatgatcttgtggtgcagaaggcattgccttccctcttatatatatatgtatgtagtattgtatgttgttgccatgttttcctagtttagagcttttatgattcatgcgtct

SEQ ID NO: 190729 - DNA, 907 bp, Gossypium hirsutum
cccacgcgtccgggacgacataaaagtttatattgcatttattcgaagatgttgaagaaaaagttgaccatggatgagatccacgatatctgcggactacgtgtcattgttgaaaatgaggaagactgttatgaggctttgagagtagttcaccagttatggtctgaagtgcccggaaagctgaaggactatataagtcgccctaaatttaatgggtatcagtccttgcacacggtggtgatgagtgaaggtacagttccacttgaagttcaaattcgaacaaaggagatgcatctgcaagctgagtttggctttgcagctcactggagatacaaggagggtgactgtaagtactcttcatttgtacttcagatggttgagtgggctcgatgggttgtgacttggcattgtgaaacaatgagcaaggaccaatcgtcaatatgctacattgattctgtcaagccaccctgcaccttccctactcattccgatgattgcccgttctcttataagcctcactgcagccaggatggacctgtctatgttatcatgatcgaaaatgataaggtatgtttcttaaatagcacttcattgctttttcaggttgagcctgtagtcatgtcggtgcaagagtttccggcaaactcaacaatgatggatttgctggaaagagctgggcggggtaactcgagatggtctccatatggttttccagtgaaggaagaattgaggccaaggctgaaccatgagccggtaagcgatgctacatgcaggctgaagatgggtgatgtggtggagctaacaccagccattccagacaagtctttgacagagtacagggaagagatacagcgcatgtataaccgaggtctttctgtttccagtactgggcctcctgctagtaaca

SEQ ID NO: 190730 - DNA, 975 bp, Gossypium hirsutum
cggacgtttctactcacacggacgggagggagacgagaaaaggaagacaacgatggtgtctctgaagttacagaagcggctcgccgctagcgtcctgaagtgtggccgtggcaaggtttggcttgatcctaatgaaatcaatgaaatctccatggccaactccaggcagaatgttaggaaacttgttaaggatggttttatcatccggaagcctaccaagattcactcccgatctcgtgcacgcagaatgaaagaggccaagagaaagggtcgtcattctggctatggtaagaggaagggtaccagggaggcaaggttgcctacaaagatcctttggatgaggagaatgcgagtactaaggcgtttgcttcgtaagtacagggaatccaagaagattgacaagcacatgtaccatgacatgtacatgaaggtgaagggtaatgtatttaagaacaagcgtgtcttgatggaaagcatccacaagtccaaggctgagaaggcaagagagaagacactctcagatcagtttgaggccaagcgagctaagaacaaggcgagcagggagagaaagatggccagaagggaagaacgccttgcacagggacctggtgtgaaagcagcacctgcagctgcaccgcaacaggccgagggagttaagaagtcaaagaagtgaatgaagtaatgttttgtttttctctgtaggagtttgaatgcaaaactcggttttcattttgtgttttagatctttagttttatataattatagaattttgatgaaaccactgagctgttataagaaatggaagatgtttgtggtattgtttattagtataatgtactattatgttgaatgtgctatgaattatttctgatcttacaacttttgtttactataatctcattatcatgtcctaaaaagttttctttttgggtcatattgtttttttgactttataatatttagcaatatttcat

SEQ ID NO: 190731 - DNA, 863 bp, Gossypium hirsutum
cttgtttcttatccttctccgctacctaagacagagagagggagagagagagagagagagagaaacacagtgagggagaaatggtttctctgaagctacagaagcggctctccgcgagcgttctaaagtgtggaaaaggaaaggtttggctcgatcctaatgaagtcaacgagatctctatggccaactcccggcagaacataaggaagttggttaaagatggttttatcatcaggaagccaaccaagattcactctcgatctcgtgctcgtcgcatgaaggaagccaagagaaagggacgtcactctggatatggtaagcgcaagggtacaagggaggcaaggttgcccacaaagatcttatggatgagaaggatgcgtgtacttagacgcctactccgcaagtacagggaatcaaagaagattgacaagcacatgtaccatgacatgtacatgaaagtcaagggtaatgtgtttaagaacaagagagtcctcatggagagcatccacaaatccaaggctgagaaggccagagaaaagacattggctgaccagtttgaagctaagagggctaagaataaggcaagcagggaaaggaaacatgctaggagggaggagcgattggcccagggacctggaggagtagagaagccagttgcagcaccacctgccgccactgctcaaccagctggtggttccaagaagtccaagaaataaggaggccatctggcgaagaagtgtgagccatgaatttagaaacatgtccaagtggtttttttgtcgagccagtctgctgttttggtcattatgaacttgttttaagttggattaaggtttcatgattttgttctcagtttccatgct

SEQ ID NO: 190732 - DNA, 397 bp, Gossypium hirsutum
ctcgtgccgttcgatttttttttttcacagaatccggaaaacagcaatggtgtctttgaagctgcagaagcggcttgccgctagcgtcctcaagtgcggtcgcggcaaggtctggctcgatcctaatgaaatcaacgaaatctccatggccaactccaggcagaacgttaggaaacttgtgaaggatgggttcatcatcaggaagcctactaagattcactcccgctctcgcgcacgtaggatgaaggaggccaaaagaaagggaagacactctggatatggtaagaggaagggtaccagggaggcaaggttgccaacaaagattctttggatgaggagaatgcgggtactgaggcgattgtttcgtaagtacagggaattcaagaagattgacaag

SEQ ID NO: 190733 - DNA, 416 bp, Gossypium hirsutum
atgtacaagagagttctcatggagagcatccacaaatctaaggctgagaaggccagagagaagacgttggctgaccagtttgaagctaagagggctaagaataaggcaagcagggaaagaaaatttgctaggagggaagagcgtttggcccagggacctggaggaggagaaaagccagttgcagcacagcctgcggcagctgtgcaatcagccgtgggttccaagaagtcaaagaagtaaaaaaaaaaaaaaaagtaagatttcttactgaagagtactgatcgaacgtgacttttagatatttagtaatgtcttaagtaattttgttgagccaatgttgtgtttttttgggttgatatgaacttttgttcttttaggcggattaagctttaaatgtttattattattatcagttt

SEQ ID NO: 190734 - DNA, 976 bp, Gossypium hirsutum
  unsure (1)..(976): unsure at all n locations
ctgtggagtccgcttcttcaggttcaggtgaggttggacctgttatgaaaggagggcaatacggtgcgtttggtgcggttaccttggagaaggggaagcttgatttgtctcagaagcagtctacttctagccctgagcttgcaactgggggaggtggtggagatattggaaagaaaattaatcatggaggtggagatgggggtgatgatgatggagatgatgatgattattttgatgactttgatgatgatggtgagggagaggaggggggactatttagaaagcgtatgtttcttgaagagctctttgatcgaaaatttgtagatgctgtattgaatgagtggcacaagacgatgatggacttgcctgctggcttccgacaagcttatgaaatgggattggtcagttcagcacaaatggtaaagttcttagcaattaatgccagaccaaccaccagtcgatttatttctcgaacactcccacaagcaatgtctcgggcatttattggcaggatgcttgcagatcctgcctttttatacaggcttcttttagaagaggttgctactattggttcttctgtttggtgggagttgaagaatcgaaaggataggattaagcaagaatgggatctagcacttatgaatgttctcacggtagcagcttgcaatgctcttgtagtttggtctcttgctccttgtcgttcttatggcaacaccttccggtttgacttgcaaaacacgttgcagaagcttcccaacaatatatttgaacggagttacccacttagagaatttgacttgcaaaagagaatccattctcttttctacaaggctgcanagttgtgtattggtggataactgctggagcagtacaaggttctttgtcaaatattttgcccagtaaaagaaggaaagtatctgtgacaatccgtccatgagtacaatgcgctggtatgngctttcttgacttatccaan

SEQ ID NO: 190735 - DNA, 723 bp, Gossypium hirsutum
tcgcccacgcgtccgcttttccatccatttcttactcactctgtctctcccaactttgggccatgctagatctgccccttctttcaatatttgaaaaccaagaaactaattttaatttgaatcatgttgcggtacgactccacctcgtcatcagcgggaagtagcagtggcagcttatcatcctcctcctcctcgtccaagccaccgcagcaagatattgatggactactcgccggtgctggttataaagtccggtcgtcggagttacgacaagtagctcaacgactggaacgactcgaaaccgccatgggtaattcgcctgcagatttctctcaacttgcctccgatgctatactctataacccttctgatctggcctgctgggtcgactcgctgctaactgagttcgctgagcctcctcccacttgctcctccgacttcatcgtggatcccgtaaacaatcaaacggtggtaaacagcgcgtggaccaccgccgaacctcatacaccgcaggtgcaccagaatattacttatgacgagcaacagagtttggataatcagttgacggttgtcacggccatggaagaagattcgggtataaggctggtccacatgttgatgacttgtgctgagtgcgtccaaagtggagacctctcattggctacttcattgatcggcgacatgcaagggttactgactcatgtcaacaccgtttgcggtatc

SEQ ID NO: 190736 - DNA, 656 bp, Gossypium hirsutum
  unsure (1)..(656): unsure at all n locations
cggactcgtgggtttggccgcataaaaaagaagcagctttttccattaatttcggagggaaaaaaacgggggaaaaatctgaaaatgtctctgatgaacaatctatcaacttcaatgatttcttcatcttcatctactttcttggctccaaccagtttcaattcaagaacccagagtgtttcagttccattgaaaaacatcaatatagttaaatgtgttgccactcctcaggaacaacaaaatgcttacaaaactaaagtttctcgcaatgcgaacatagctaagcttcaagctggttacctgtttccagaggttgccaggagaagggctgcacacttgctcaagtacccgaatgctcaagtgataagccttggaatcggtgatactactgaacctattccagatgttattacgtctgcaatggctaagaggtctcatgcattgtctacgctggagggttacagtggctatggagctgaacaaggtgaaaaggcattgagagctgcacttgcttcaacattctatcgcaaccttggcattgangatgatgatatttttgtctcagatggtgctaaatgtgacatatctcgccttcaagttgttttcggatctaatgtcacaatggcagtgcaagacccgtcatacccggcttacgt

SEQ ID NO: 190737 - DNA, 675 bp, Gossypium hirsutum
gcaaaccagttaataattaaaaaactacttttttttagtgaaagaaaacacccagaaaaagcctttcttttttttttctttatcaggccataatcatttcacaaagactcctcctttaatatcataggaaggaagaaaaaaacactaaaaagtccgatccccttcggggggtcctcggttcattctccaatggcagactccaagatgtatatttctcaaacagagcttgaaaaccacaaaaaacccaggagatctatggatctctatacagggaaagatctacaacgtcactgaatggagtcgagaacaccctggaggagcacttcctttgctgaatctggctggccaagatgccaccgatgcctttgtagcctatcatcctggcttagcttggcaatatcttgacaagttctctaccgggtattatctcaaagattactctgtctccgaggtatccaaagatttcagaaaacttgctgctgagttttcaaaaatgggtctttttgaaaagaaggaacacgggacaggcattttgctttgcatcatagcattgctgttttctatcagtgtttacggtgttttatgctctaacagcgctttggtgcatctactttcgggtgctttactgggattctcatggatacagagtgggtggattggacatgattccgggca

SEQ ID NO: 190738 - DNA, 924 bp, Gossypium hirsutum
  unsure (1)..(924): unsure at all n locations
gcgagagagaatttcaggctgaagttgagatcattagccgcgtccatcacaaacatctcgtctcattggtcggatactgtatttctgggacaataagaatgcttgtttatgagtttgttccaaacaacaccttggagtttcacttgcatgggaaggggcgactgaccatggattggccgacaaggatgaaaattgctttaggatctgcaaaaggactggcatatcttcatgaagattgtcatcctaagatcattcaccgtgatattaaggccgctaatattctgttggatttcaagtttgaagcaaaggttgctgattttggactagcgaaaattgcttccgatgtcaacacgcacgtcttcaccagggtgatgggtacttttgggtatttggctccggagtatgcttcaagtggaaaactcacagacaagtcagatgttttctctttcggagtcatgcttttggaattgattactggacacagacctgttggctcttcttacagggaagacagtctggtggactgggttagttattaactttggtctatgattgtctatgcaattacacacaaacacgcataatatcatctgcatattcttctctgactctctgaaccagttccggaaaggaattctggatttacatttcataaattctttattaagtaaatctgatttggcattgcaggctaggccattgctcacacaagctatggaggatggaaactatgatagtctggctgatcctaaattacagaaggaatataaccacaatgaaatgactcgtatggttgcttgtgctgctgcttgtgtgcgacattcagcaagacgtcgtcnccggatgagccaggtaactggtgtagtaaattttctnttaaatgtcatttttagtattgaaggtctgctaagtctggttgatggt

SEQ ID NO: 190739 - DNA, 1438 bp, Gossypium hirsutum
gcttgtgattgtttcatcttcttgttcctggaaaactatggagtaaggaagctggaagcattttttgcagtgcttattgcaactatggcagtctcatttgcttggatgtttggtgaaacaaagcccagtggcactgagcttcttcttggtgttttgattccaaaactcagctccaaaacaatcaaacaagccgtgggagttgtgggttgcattattatgcctcacaatgtgttcttgcactctgctctcgtccaatcacgagaaatcgatcacacgaagaaaggccgagttcaagaagctctcaattattactcgatagaatctgctgctgcgcttttaatttcgtttataatcaatctgtttgtcactactgtctttgccaaggcattttatggcacagaagtagccagtactattggtcttgtgaatgcagggcagtatcttcaagacaaatatggaggcgggttgttcccgattttatacatttgggctatcgggttgttagcagccggacaaagtagcactattactggcacttatgctgggcagtttatcatgggagggttcttgaacttgaagttgaaaaaatggctaagagcattgatcactaggagttttgctattgttcctactatgatagttgctcttgttttcgatacttctgaggcagcgctagatgtcttaaatgaatggcttaatgtgcttcaatcgattcaaatcccttttgctcttatcccactactttgtttggtttctaaggagcaaatcatgggtactttcaagattggctctgtgctcaagacaattgcatggctcgtggctgtactggtgatagtgatcaacgggtaccttttatttgacttcttctctaacgaagtcactggcgtaatgttcacaagtatagtgtttgcatttaccggcgcatatatcgcatttattttctaccttgtttcttggggttttgcttcatccgcttggcgccgcttgtcaccctcgaaataggcagggaatccagtgatcaatcttacccttctcaagccacgagatcagcctatcgagttaggatcaatcaaacttcgctttcatagatgaatttctccagttaaaagcgtatgttcctttttggaaatgcatactcatatagggacttttatgtacaaagttcagtttagtaagctttgcatttttctggagtattcttaaaaaaaaaaaagcttgtaggttccatgttatggcgttaaagaatgtactgatcatatcctgctcaatgctataacactaaacattcatttgaaaatatttgaaggtaccaaaactatgtaactctttttattattataaataatgcagccataattttggttcaagctagctatatatgtgaaccagctttgaacaaatatgtaattcaattgttttgctggtttgccattcttct

SEQ ID NO: 190740 - DNA, 430 bp, Gossypium hirsutum
ataacatgcttgcttcaaccgctgctgatgatgaaaaggagaaaagcaatataagctctagtaattctggcaagtcaaagaataagaaagagcttgatttgcctcatgggtcttcaaatcgacttgatcagcttgaacctgagccggtggctagtggccttgaacgtgtgaacccttgccaaaaggaagccaatggtccatgtgttttagagaaggaatcacctctgcagttaaatgtttgctccaatccagaggtggcaaagcaaccctctgcttatccaaaagttaaaccgcgccgtgggttagcgaagaccataaagcccattgaagatgaagatattctcagaaagcaaccacaaatgttggagattgataggactagtgacactaaatcagaagtacagcctatgttttcttcagacccgtgcct

SEQ ID NO: 190741 - DNA, 866 bp, Gossypium hirsutum
ttctcatctaaccttctaatgcttcaacaagtgtaaaacaatgggggaccgctttcggtgaatgataaatgagaatctgtgcgttaattaatttaatcctgtaccaacaggttagtgacagtgtgttttagaagcttgtatgccatatggcatcgtcgccctccccgcatcgctgatgcacttcctgcattctctccacggacttgcaaatgccactgcagctccaatcaaaagatgcgccacatggattccctgcttgagctttccactcgcaatccaagagagtaccacagcagaggcttcgttcgtcgatatgctcgacatcaagaccaataaaccaagaacctaaagagacgtcttcgtttgcatatctatgaagtatgtgccgattgacggagatgtaggttgccaagcctttggacactgcatatatttgtccggttgcatgcctgaagtatttgtttccctcctcaccaaatttccaatattctggctcatggtatttgacccctttctgtgctagaacaggtccagatttcatgcaaccgatataaacacggggttttgatctgtgacgggccaatgtagaacccagccatacccagatttacatgtacatcatcgtcagctttaatataaaagtctgcatcccacttagcgtcggctgtggaaaagtatatttgggttttcgatgataattcatggtaaccttctatgtgattcaggcgcagaaaatccttgtattgctcctcttcagcttcgatccctcgatccaaaataccacccggggttgcactgtgtcctatgacaaatcgcattataattcccttctctttctccaacctctttaattcctccccgtgagg

SEQ ID NO: 190742 - DNA, 365 bp, Gossypium hirsutum
cggagaatgatagaggggaatatgtgcgttaattaatttaatcctgtaccaactgtcccggagacaatatgataggcaaaaatcagggcagatggtgctttgattgatgcaacatacacaaacatattactaaccaggttagtgacagtgtgttttagaagcttgtatgccatatggcatcgtcgccctccccgcatcgctgatgcacttcctgcatcctctccacggacttgcaaatgccactgcagctccaatcaaaagatgcaccacatggattccctgcttgagctttccactcgcaatccaagagagtaccacagcagaggcttcgttcgtaaatatgctcaacatcatgtccttttaac

SEQ ID NO: 190743 - DNA, 1485 bp, Gossypium hirsutum
tgtctaaccatcatttacacagccaaagatgtgtaggatcattcggaatcacccctcagcacttcagatataccgaaacaagttgttggagtctgggcaggtgacagatgacgacattggtaatataagtcagaaggtcagtacaattcttaatgaagaattcttggccagcaaagattatgttcccaaaagacgggactggctttctgcttactggacgggattcaagtcacctgaacaaatttcacgtgttcggaacactggggttaaacccgagatattgaagaatgttggcaaagcaatcacaacccttccagataattttaagcctcatagagcggtgaagaaggtttatgagcaacgtgcacagatgattgagacaggggagggccttgactgggctatgggtgaagcacttgcatttgctacattactggtagaaggtaaccacgttaggttgagtggtcaggatgttgaaaggggtacattcagtcatcggcattctgcgattcatgatcaggaaaccggggaacagtattgccctctggaccatgttatcatcaaccaaaatgaggagatgtttactgtcagcaatagttctctttctgagtttggtgtgcttggattcgaattgggttactcgatggagaatccaaattcattggttatgtgggaagctcagtttggtgactttgctaatggtgctcaagtgatatttgatcagtttataagtagcggggaggcaaagtggctgcgtcaaacaggtctcgttgtgctgcttccccatggttatgatggacaaggtccagaacattcaagtgcacgactagagcgttatcttcagatgagtgatgacaatccttttgtgatacctgagatggatccaactcttcgtaaacacattcaggagtgcaactcgcaggtggttaacgttacaacacctgctaattacttccatgttttgcggcgtcagatacacagggaattccgtaagcctcttattgtgatgtcccccaaaaacttacttcgtcacaaggactgcaaatcaaatctctctgaatttgatgatgtccaaggccaccctggttttgataaacaaggaaccagatttaagcgacttataaaagatcagaatatgcactccgaccttgaggagggtatcagacggttggtactttgttccggaaaggtgtactatgagcttgatgatgagcgaaagaagaacaatgctaccgacattgctatctgtcgtgtggaacagctttgcccattcccttatgacctaatccaacgagagcttaagcgatatccaaacgcagagattgtttggtgccaggaagaaccgatgaacatgggtgcatacaactacatcgcccctcgtcttgccactgcaatgactgctttgggtagaggaacctttgatgatgtcagatatgttggccgtgctccatctgctttcactgctaccggcttctatttcatgca

SEQ ID NO: 190744 - DNA, 550 bp, Gossypium hirsutum
atttacacagccaaagatgggggggatttttaaaaaacatttggggggactccacaaatcccgaaacacgttgttggagtctgggcaggtgacagatgacgacattggttatataaatcagaaggtcacaacaactattaatgaaccattatagtccagcaaagattatgttcccaaaagacgggactggctttctgcttactggacgggattcaagtcacctgaaccaattgcacctgttccgaacactgggggtaaaccccggattttggaaaatggtggccaaaccattaccaccctttcaaataaatttaaaccctattaaaccgggaaaaaaggttattaaccaagtgccccgatgattgaaaccggggaaggccttggctgggctatgggtgaagcacttgcatttgctacattactggtagaaagtaaccacgttaggttgagtggtcaggatgttgaaaggggtacattcagtcatcggcattctgtgattcatgatcaggaaaccggggaacagtattgccctctggaccatgttatcatc

SEQ ID NO: 190745 - DNA, 787 bp, Gossypium hirsutum
gttacaggcaaaaccccagcaaattcccccctttggaataaaagaaatagaagacatggtgaggcaatcgaggttgatcctttcactacttggcgcagttttggtgttgctggtgattggaaatgctctgaggctagccaaagccaacaattcagcctccgcctttgtccaaaacgccatcttctccaacaagatcgttatgttctccaaatcctattgcccgcattgcatgcgtgccaagcgcattttcgctgagttaaatgagaaaccttatgttgtagagcttgatctccgagatgatggagctgaaatccagtatgtcatcctggatttggtaggtcgtggaactgttccacaagtgtttgtgaatggcaagcatattggaggctctgatgatctcagtgatgcagtccataatggtacattgcaaagccttctagctgcaagttaatgtaagaaagaaggaaataaattgacttgtgaactgtaaagctgcctgtggattagaagatcatttctgggttgtgaacttagtacgttcactgcaagattttgttgagtgcgctgtgataatggcatgtctctttgaggttatcttatatttcatcttcatcatggaagagaatgactatgttttaggtctaaagttcattgtaaatgtaggtgtggggagggagcagtgactttgatttagttttcacataatcttacttactgtcaatggatcccttttttctattttgttgtttcttggtataggcatgctttctttgaagtgggattttta

SEQ ID NO: 190746 - DNA, 421 bp, Gossypium hirsutum
atctcttcaacaatccaagatgttgtttcctcccctacttgtggttgcttccatattcagtgcttgctgtcttgcaacttcaactttaggagctacacttgcaaaagacgaagtggaagctttggaaagcataggtgaaacattggggaagacaaactggaaatttagcgtggatccgtgcagcagcggagacgagagttgggcaaaatttgcagaaaaaggtgcatactatgttaataatgtcacttgtgattgcagttccagcccctgtcatattgtccgcatagtgctgaagggacaaaatctatcaggcactctcccaccacaggtgaccagacttccttacctgcaagaaattgatctcagtcgtaactatcttagtggctccattcctcgtcaatggggttctatgcagcaactt

SEQ ID NO: 190747 - DNA, 772 bp, Gossypium hirsutum
atctacttgaaccatttgtctttcatttctgtttgccgtcccaattgcttttcattctcccgccaggaaaccttatattatatgaatatttgactcttgttcttaatcttttccgtatatttttgtttgtctttcttatgggattgatttttatcattatttcaatttccatcgtctgggtagcttctctttggaagattttcttctcccattcaaaacccacatttttaaatgaaggtacacctttgcacaaaaaaaatgtcttgctggttgttgcgcaccctgatgatgagtccatgttcttttcacctacaataaactacttgacttcaaaagggcacaatctttacctattatgcttgtctattggtaacgcagatggcatgggaagcagtagaaaagatgagctttatcgtgcttgtgtagttcacaagattcaacttcaacaagtgaacgttttggaccacccacaattgcaggatggttttggtcaattctggatccatggtttactggcaccgatcatacaagacgaggtttacactcatgtgattgatgtgattattacatttgatagctatggtgtctcgggtcattgcaaccatgggtgatgtgcattatggggtacccaagttcctgcgtgattctttcaccggggatatattgaagcctgggaacttgtgagtttaaatataatgcccaagtatagtggactgtttgacatttggatgtcaaatttaaacgtcatgcaacatccaagtggtgttatgcc

SEQ ID NO: 190748 - DNA, 384 bp, Gossypium hirsutum
cctttcccatatccaaatcactactatctcattcagccatcccagagtttccaaattcgtctctgggtctttctcttcatcccttagtctcaaatgggccgtaggctaaacgacccagaacactcccgtttcagcctctctcatcctgctctcggtggctctcttctcctgtgctttggtctatgcagttgtctcgactttcttgaaccccaatgtaggttctcaagattcgagctttgagtctttcgaaatggtggcgagtggtgatttgggggagaggaaggacgagtgttgtagaggcatcgagaatttggagttatggggtccagctgtaaagtggggatccgagttcaagttcaattcctctgtggaaatgtgtcaggc

SEQ ID NO: 190749 - DNA, 607 bp, Gossypium hirsutum
cggaccagccaacttaagaggggacctaaattggttaggcccaagggcttttgcaaaaaaaatggtttaagctgggtccggggtgctggtagcttaatggatgaccagaaccttaactgaaaacattccgggatggggaactttgttcaatgcccgtccaggcgatggaaccgtcagtgttcttgtggcaacttttttgttcgtaattcccaacaagaagcgaaagggagagaaattgatggactggaacgaatgcaagaagctgccatggaacattattttgttactaggggctggtttcgccatagccgacggagtccagtcaagcggactcgctgatcaattatccaaaactctagattttctcgaagaggctccgtatttagctattgcccccgcggtgtgtttaatctgtgccataattaccgagtttataacatcaaatgatgctactgctacccttgtgcttccacttttgattcaaatggcaaaaaccatgcatgttcacccattactccttatggtccctggagcagtgggatcacaatttgcttttatttttgcgacggcaacaccttcgaatatcattggattcgcgacgggcata

SEQ ID NO: 190750 - DNA, 648 bp, Gossypium hirsutum
  unsure (1)..(648): unsure at all n locations
cttgcagccattctccgaggatccaaatcagcccacagtgttataggcactccagagttcatggcaccagaattatatgaagaggattacaatcaactcgttgatgtctactcttttggcatgtgtgtgttagagatgcttacatccgaatatccatatagtgaatgtgccaatccagctcaaatttacaagaaagtgacctcggggaagctaccaggggcattctaccagattcaagacttggatgcacagagatttattggcaaatgtctagtaaatgcttctaacagactatcagcggaacaactattgcttgacccatttctcgctaaggatgaagcgacgaggctggggagtccaaagctctttctaaatcaaagtgaaatcgagaaattgcacctcaacgataatccacccagaacagacatgaccatcacggggaagcttaacctgcaagatgataccatctgctttaaagttcagaatgcagacgnnagggatctactggaacatctactnttccttgatatgngggaagatacgcatgnngatgtgcactgaaaggtgaaagactngagataccatgggatcactggaatgcgaatgatgatgtgaaatcagtctatcccatggaaaatcgactcctaa

SEQ ID NO: 190751 - DNA, 706 bp, Gossypium hirsutum
ccagattcaagacttggatgcacagagatttattggcaaatgtctagtaaatgcttctaacagattatcagcggaacaactattgcttgacccatttctcgctaaggatgaagcgacgaggcttgggagtccaaagctctttctaaatcaaagtgaaatcgagaaatggcacctcaacgataatccaccgagaacagacatgaccatcactgggaagcttaatcctgaagatgataccatcttccttaaagttcagattgcagatacagagggttctactaggaacatctactttccctttgatattgtggaagatacgccattggatgtggcaactgaaatggtgaaggagcttgagataaccgattgggatccacttgaaattgcagaaatgattgatggtgaaatttcagctctagtcccacaatggaaaaaatcagacctccctagacatcaagcccataatacatataactaccaggaagatgatgatgatgggtgtcatcatccgttttactctttctcctcctgttcttcatcccaaatgtctgtcttgatgtcacatggctgcgattggctccgagatgatgataccagctctcagagctcttcgcactcaggaatttattccaactttagttacttgtctggagatgaccacaatcctgatatgagccctacaacaacagcacgcaaacatgtcagc

SEQ ID NO: 190752 - DNA, 450 bp, Gossypium hirsutum
tgttccaggccttatcgcttccccttggttgcacgcgaaaatgacctgcaatcctggtctggctggtggttcatctaaaagaaaaaggatgaacagctttgcattgctatcacgagctaataccaagaacaattcttccacgaagcaggctcatcaaggactcagccaagtggttatttggaataagaaagactcattacagcaggatgtgctatacacaaatgatagttctactcagagatcatacggtaacaatgtgagccttcctccttgccgaactagtacaggtcgtgctagtgatgcaatgactagtaggaacaaagtaagagagatattacgcctattccaagacatctgccaaaagctcttacatgaagaagaatcaaagataaacggagaaggaaagactcttaagagggtggatttcctagctgcaaagattctcaaaga

SEQ ID NO: 190753 - DNA, 434 bp, Gossypium hirsutum
gccgtatgtccggagagttgggtcgcggagaccttcggttggaaagtaacgcaggtggtggcgctacccaagtatctaagaaggttgatttgtctcaggttttgtcagcaatgcttccttttgttgtcgctattaccgctgttgctgctcttgttcaaccttccactttcacctgggtatctaacgacttgtatgctcctgcacttggtgggatcatgttgtccattggaattagactttcatttgatgatttaacacttgcattcaaaagacctttaccgctatctgttggatttattgcacagtatttgctcaaaccggcacttgggtttttagttgcaaaggcattttgtttgtctccgacattctatgcaggctttatcctcacatcttgtgttgcaagggctcaactgtctagctatgctagctttttg

SEQ ID NO: 190754 - DNA, 380 bp, Gossypium hirsutum
ctctctggactgcaggagtgaaagcttattgttcagttctggtggaacttcttatatgcaagatgcaaattctggccacaaagtaatatacactttgcaggaattggagaccgcacttatggcacctgatgagaatgaagacttaaccacccctagtgtttcccacggagaaagtagtagaccacagactgcaggccagcgatctagggcatggagtcgggggcgccaaggatctttggcacttctgcctcagacatcctttgtctctaagcataggcaatcgactgaagtttctcatgttgaaaaacgccagaaatcaatagaggatttctcttggctgggtattccacccggcaatctgaagcagttgctgattgctt

SEQ ID NO: 190755 - DNA, 614 bp, Gossypium hirsutum
tgagagcaatgagcatacttggtttttccaaagcggaaatccagtaccgaggtgtcaaggcttgtgacatctccataaaaccgagcctaccttcagtgttgatgttcaatattcctgatgcctgagtgatttgcaggccccggcaaagatcagtacatacacgattggtcctttcccaacattaagaagtgaaaaaccaaaattgaaggtcaaagttcgtttgaatttgcatggaattgtgtctgtggactcagctacactcttggaagaggaagaagttgaagttctagtttcaaaagagctggcaaaagaagatgctaagatggagacagatgaaaagcctaatgatacttctgcccctggtgccaacgagacagatgttaatatgcaagatgccaagggtacagccgaggcagctggggtcgaaaatggtgttcctcagtctggagacaagcctgggcagatggagactgataccaaagttgaggctcccaagaagaaggtgaagaaaacaaatgtcccggtggcagagttggtctacgggcaatggtgtctggtgaccttaaaaagcagttgagaaggagtttgaatggctttcaagatcggttatggaa

SEQ ID NO: 190756 - DNA, 1003 bp, Gossypium hirsutum
agcaagttcacaaaaacgaaacccaaaaaacagagtcaacaaagatattcgaaccaagttcacgaaaaacagagccccttctctgcatagacgcgatggccactcgcttttacagttgttctctgattccagcaagacccacctccggatcagtcttaaacaagtacagtttgttgccaaatcctcgtatctcaatcacccgacgtcatactacccttgtttcttcttcttcttcttcttcatctttcacacttcgagcttcagtttcatcagctgctacttcaactgcagtcgatggaaccatctcctccaccaaaccttccaagtctttgcctttcagagtgggtcatggattcgaccttcatcgtttggagcctggctacccttggatcattggtgggattgatattcctcatgagggaggctgtgaagctcattctgatggagatgtactgcttcattgcgttggggacgcaatattgggagctttagggctacctgatatagggcaaagttttccagactctgatcccaaatgtaaaggagctccatcttcagttgtcattatagaagctgtgagactcatgcatgaggcatgttacaagattggatacctagatgccaccttatttctttacagaccgaaactgagttcacacaaaggagttatcagagccaatttgtctgagcttttatgcgccgacccatatgtcatcaatcttaaagccaagactcacgagaaggttgacagccttggtgagaatcgaagtattgcagcacacactgtggtcttactcatgaggaagtagagtactggtatcgtatagcattgttgtttactgtcatagacaactccctgtattcagttggatccgaacttgagcaataattatatgtttcgaccggccacagtttccaaatcggtcattggtctatgaaagtttgtcaacgactcaacattacaaagataaatttattttaaaattccatgtgttcaattcct

SEQ ID NO: 190757 - DNA, 408 bp, Gossypium hirsutum
gaagaatattttagcactagtgatgtggaagtggctgcatcagacctcaaagatcttggctcaagtgaatatcatccttattttattaaaaggcttgtctccatggccatggacaggcatgataaagagaaggaaatggcatcagttctgctttcttcactctatgctgatgtcatcagcccaccccagattcgggatggttttgggatgcttcttgagtctgctgatgaccttgctgtggatatactagatgcagttgatatcctcactctgtttgtatctcgtgctgtggttgatgagatactgcctccagctttcatcacaagggcaaagaaaacacttcctgaatcttccaagggatatcaggttctccaaactgccgagaagagctatctctcagctccccac

SEQ ID NO: 190758 - DNA, 1826 bp, Gossypium hirsutum
aaaaaaaatggtttagatataaatttgtatatatgcgttatattttcatttcacttgacgagcttaggtaatttgttttgaaggtgacaaacaacagcacaccacacagcagcgcatttagtcttgttcttgttcttcttctagttgtttccaatggaaaagctggaacacctcaaatctgccgtcgctgctctttctgaaatcagtgaaaatgagaaaaacggattcatcaaccttgtctcccgctatctcagtggagaagctcagcacatagagtggagtaagatccagactccaactgatgaagtggttgttccttatgacaccttgtctccctctcctgatgatcctgctgaaaccaagaagctcttggacaaacttgttgtcttaaagcttaatggaggtctcggaaccactatgggatgtactggtcccaaatccgtcattgaagttcgcaatggcttgacttttcttgacctaattgttattcagatcgagaatcttaattctaaatacggatgtaatgttccgttggttctgatgaactcattcaacacccatgatgacacattgaagattgtcgacaagtatgccaattcaaacattcaaattcatacttttaatcagagccaatatcctcgtctggtggctgaagattttactccatttccttgcaaaggccagcctggcaaggatggatggtatcctcctggtcatggtgatgtgttcccagctctaatgaacagtggcaagcttgctactttcttatcacaggacaaggagtatgcatttgttgccaactcagacaacttgggtgctattgttgacttgaaaatcttgaaccatttggtcaaaaacaagaatgaatactgtatggaggttacacccaaaaccttagctgatgtgaagggtggtactcttatttcttatgaaggaaaagttcagctccttgaaattgcacaagtccctgatgcacatgtcaatgaattcaagtctatagagaaatttaaaattttcaatacaaacaatttgtgggtcaacctgaatgctatcaagaggcttgtggaagctgatgcactcaagatggagatcattccaaacccgaaggaggtcaatggaatcaaggttcttcaactggaaactgcagctggtgcagcaattaggttctttgatcatgctattggtatcaacgtacctcgatcgcgattccttccagtgaaggcaacttcagatttgcttcttgttcagtctgacctttacaccttagttgatggatttgttatccggaataaagatagagcgaatcctacaaacccatccatagaattggggcctgaattcaagaaggttggtaacttcttaagtcgattcaagtcgatcccgagcatcattgagcttgatagccttaaggtgactggtgatgtttggtttggtgctggcattgtgctcaaggggaaagtgagtatcgctgcaaaacccggggtgaagttggagattcctgatggagctgtaattgagaagaaggaaattaatgtccccgaagacatctgagagaggcctgtctaccagcttaagtttccccgattttggtgtgttgcagtagataacgaacgcatcttttatataaataggaagtaaaataaaataaaaaaacctggaacagaagtagtatttgcgtttcatatcacatatatatgttgtatgtcttgcgggagtttcccttgaattactatttttcgaggtatgatgaaaaacagtgttctgaatgttgtatctactttttacaccaaacaacttagccccttttaaaaaaaaaaaaaaaaaaa

SEQ ID NO: 190759 - DNA, 1518 bp, Gossypium hirsutum
ctattgccgtgcttgacaagattgcaatgtctattgatgtcaaagaccgtgccacaatgttgggacttgtgaagagctgtatagggacaaagttcactagccagtttggtgatctgattgccgatttggcaattgatgcaactcaaacagttggagttgaccttgggcaagggctgcgagaagttgatattaagaagtacattaaagtagagaaagtaccaggtggtcagttggaagattctaaggtcctcaagggagtgatgatcaataaagatgtagttgcgcctggccaaatgaaacgaaagatcgtcaacccacgtattattcttcttgactgtccccttgagtataagaaaggggagaaccaaacaaatgccgagttggttaaggaagaagattgggaagttcttttgaaaatggaagaagaatacattgagagcctttgcttgcagattctgaaattcaaaccagacttggtggttacagaaaaaggacttagtgacttggcatgccattatcttagcaaggctggtgtcagtgcaattaggagggtgagaaagactgacaacaacagaattgcaaaggcatctggagctgttattgtgaatcgtcctgacgaattgcaggaatccgatgttggtactggagctgggctatttgaggttaaaaaaatcggggatgagttctttgcattcattgttgattgcaaagatccaaaagcttgtacggttctcttaaggggtgctagcaaggatctcctgaacgaggttgaaagaaatttgcaggatgccatgtctgttgctagaaacataattaagaatccgaaacttgttcccggaggtggtgctacagaattaaccgtttctgccacattgaagcagaagagttcatctgttgaaggcatagaaaagtggccgtatgaagctgctgctcttgcttttgaagccataccacgtactttggcacaaaattgtggagttaatgtgattcggactatgactgctctgcaaggaaagcatgcaaatggtgaaaatgcatggattggcatagatggcaacactggtgccattgctgacatgaaggaaagaaagatttgggacgcatacaatgtgaaggcgcaaacatttaagacagcgatagaagcagcatgcatgcttctacgaattgatgacattgtaagtgggattaagaagaagcaggctcctggagctggccaaggtccatcgaaacccaaggtcgagactgaagcagatgcggatggtgagcaaattcttcctgattgaagatactgaatcacttaaactcacccttcgctttcaaactgtttgatgaaatgatgggtttgttttgttgaagatgttttaagggatttgttgagcatcttgttgcttgtatttttgagaattttaatctgtggttggcgttagcttttaagtcattttatctttttactatgtcatcctaatttaccttcaattccttaaatgcgtgaagttactaaaatagttattttaaagt

SEQ ID NO: 190760 - DNA, 1415 bp, Gossypium hirsutum
acttattttgatgaatccttcgcttggagtactgctgattggagctgttcaacctttcttggattattttgttgctgatttcgactggtctgcggcagtgtagaagaaagcatcaatttcttggagtgcttgcctggcttgttcaagccactagctatttttaaaatattggaatctttgctaaatttgttattatctgcaggtttttaggctttgcaccagcttgtaagatatcgtacggtttcatctggaaatgtcattttcaatggaagaagtggaaattaagcattctggagctgaagagcttagctatcagcaacaaaatgaaagcttcgaagcatttgaagaagaggcgaggggatcattctcatcacagtcaggtggaaaccgtgtggataaacaagaatcaaatgatgcagaagcaactgaattgctggacaaggggtttatggagtatggttgcccacattatcgaagaaggtgccggattagagctccctgttgtggtgagatatttgattgtcgtcactgtcataatgaggcaaagaacaatatcaatgttgaccagaagctcagacatgatctcccacgccgtcaaatcagtaagattatttgttcgctatgtggcacagaacaagaggctcaacaagtttgcatcaactgtggtgtttgtatggggaagtatttctgcaactcctgcaaactttttgatgatgatacatcgaagagacagtatcattgtgacggttgtgggatctgtaggattggagggcaggagaacttcttccattgccacaagtgtggttgctgctattcaattcttctgaaaaaaagccatccctgtgttgaatgagcgatgcaccatgactgtcccatatgctttgagttcttgctcgaatcgagacagaatgttactgttctgccatgcggacatacaattcacacaaattgtttcaaggaaatgagggaccatttccaatatgcctgccctctgtgctccaaatcggtttgtgacatgtcaaaggtctgggagaaaattcgacgaggagatcgcagctacaccaatgccggaacagtaccaaaacaaaatggtctcgatcctttgcaacgattgcgagacaaaatctctagttcggtttcatgtcctggctcagaaatgcccgaattgcaagtcatacaatactaggcaaacacgaggctgaagtggcttagagtgggatgtagaaaccgacttggatggcatattttccaaatcgatgcatcaagcattgggttctggttaagcttctgcaacgtgtattggtaccagtcgtggcgcatggttccttcgggggttcggtttagtgcttggtattttcaattcttttgtagatgattcaatcaataggccaacaaataagcatttgcttttatgt

SEQ ID NO: 190761 - DNA, 714 bp, Gossypium hirsutum
gtctcctaatgggcaatctgaacaaactgcaaatggtgggttctcttcatatacaaacaacctctcatctgggcggaatcagaaccttcatcccttccctcatgtcatgaatatgcacaacgcaagaccatcatcaggtgtaggccaatcatatggatacatgaaccacatgtaccctaacaatgtgacctatggtcattatgggaatgccattagaggcggttctgggtttggatcatatggatatgatgcccggaagaaaggtctagggtggtataatgttggtaacaacaaatctaggttccgtggttatggaaaagagaatattgatggtttcaatgagctaaacaaaggacccagagtaaaagggtataagaataaggatggttctggaaatgcaactctagctgtcaaagatcagaaccttccattgatcaagagcaatgatgaggacattgtttctcttgttccagatacagagcagtacaatagagaagattttcccgagagttattcagatggtatgtttttcgtcattaaatcctatagtgaggatgatgtccacaaaagcatcaaatacaacgtatgggccagtacatctaatggcaacaagaaactcgatgctgcattccgggaggccaaggagaagtctgatggctgtcctgtatttctactgttttcggttaataccagtggacaatttgttggattagc

SEQ ID NO: 190762 - DNA, 515 bp, Gossypium hirsutum
gagtggtcgatcagaaagggattttcacagatgtttgtattggatggcctggttcaatgcctgatgatcaagtgtttgagaagtctgctttgttccaaaggggtttgaaggatgtttggattgttgggaattctgggtatcctttaatgggttgggttttggtcccttatacacatcaaaatttgacttgggctcaacatggtttcaatgaaaaaatgggtgcggttcaaaatgttgctaaagaagcatttgctagattaaaagggaggtggtcttgcttacaaaggagaactgaggtgaagcttcaagagttgccaatggtgcttggagcttgctgtgttctgcataatatttgtgagacgaacaatgaagatatggaccccgaattacagtttgagctatttgatgatgagacgatagctgaaaataacttgaggtcttctaatgctgtgcttgctagggataatattgcccataatctgttacaccggtcttggtggaactagtcttctgta

SEQ ID NO: 190763 - DNA, 429 bp, Gossypium hirsutum
ctccaactccacagcaaaagccacccaaatattaaaggtccatggatccttttagaagcttcttcagttgttttttcggttcaagtaaggtggcgtctcaaggtgacaatactccaccaacatccagcaacgttaaagccaaatcgaaggaaagaaacagtaagaaaagccctccgatcccgatgacttacttccccattggaaccaggtttagtcgcttgtgaagggttccaactacagtttcttttcatcttccacattattaacgaatcaaccatgtttcgtcgagggaagtactgagttactctgtgattctttcttccatttagtgggaaaaggaattaagtttggaattgagcaaaggctaactggtgtgcaaataagctggtttttttttagatgtatgattgaagaaattaatagtatatt

SEQ ID NO: 190764 - DNA, 1168 bp, Gossypium hirsutum
ctcttctctaatacacccactgtaaaaaaaagagagaaatttgatcagacggtgaaaatgggtggccttgaaactgagagaacaacaacaggatgggctgccagagatccttcaggagtattgtctccttacacttacactcttaggagcactggtcctgaggatgttttcgttaaggttatgtgctgtggaatctgccacaccgatcttcatcaagccaaaggtgatcttggcatgtcaaactacccaatggttcctgggtactactagaactgttttctttatgtttcctagcctgtttctttatcttcatgttcatgaatcaatgaatttcttttggacatttttggattgtgaatttattactttttccaggcatgaagtggttggtgaggtgttggaagttgggtcagatgtaagcaagttcagagttggtgatattgttggcgttggttgtattgttgggtgttgcagaaactgccgaccatgcgactcagacaatgaacaatactgtcttaagaagatctggtcgtacaatgatgtttacactgacggaaaacccacccaaggtggctttgctggttccatggtcgttgatcaaaagtttgtggtgaatatcccagaaggaatggcaccagaacaggtggccccgctgttatgtgcaggggtgacagtttacagcccattgaatcactttggtttaatggggagtgggttaaggggaggaatattgggacttgtaggtgtagggcacatgggggtgaagatagccaaagcaatggggcatcacgtaacagttataagctcatctgataagaaaaaagtggaggctttggagcatcttggtgctgatgactacttagtctgctccgacgctgaagggatgcaaaaggctgctgattcacttgattatatcatcgacactgtgcctgtttttcacccacttgagccttacctttcattgttgaaactcgacggcaagttaatcttgactggtgttattaacacccctcttcagtttgtttcccccattggtcatgcttgggagaaagtcgattacagggagttttattgggagcatgaaggaaacagaggaaatgcttaacttcctgtaggaggaaaatttgacctcaatgattgaggtggtgaagattgattatttcaacac

SEQ ID NO: 190765 - DNA, 465 bp, Gossypium hirsutum
cccacgcgtccgcccaaatattcccactgtaaaaaaaaagagagaaatttgatcagacggtgaaaatgggtggccttgaaactgagagaacaacaacaggatgggctgccagagatccttcaggagtattgtctccttacacttacactcttaggagcactggtcctgaggatgttttcgttaaggttatgtgctgtggaatctgccacaccgatcttcatcaagccaaaaatgatcttggcatgtcaaactacccaatggttcctgggcatgaagtggttggtgaggtgttggaagttgggtcagatgtaagcaagttcagagttggtgatattgttggcgttggttgtattgttgggtgttgcagaaactgccgaccatgcgactcagacaatgaacaatactgtcttaagaagatctggtcgtacaatgatgtttacactgacggaaaacccacccaagggg

SEQ ID NO: 190766 - DNA, 439 bp, Gossypium hirsutum
gccatggctgatgaaagtgtgatggttaaaggaaatggtaccatttttctagctggaccacctcttgtcaaagctgctacaggagaggaagtgtctgcagaggatttagggggtgctactgttcattgtaagacctctggggtttcagattattttgctcaagatgaaatgcatggacttgctctcgggaggaatattgttaagaacttgcacttggctgggaagcaagggatgttgagttcatctccacccgcaaaccttgaatttaaagaaccattgtatgatgttaaggaactccgttccattgcaccagtagaccacaagcagcagtttgatgttcgatcagttattgctcgaattgttgatggaagtgagtttgatgagttcaagaaattgtatggaactacacttgtaacaggttttgctagaatttacggac

SEQ ID NO: 190767 - DNA, 376 bp, Gossypium hirsutum
gtttgaactgatgtctcctgttgagtctgtgaaaagggttttaaacatattgcgaggcatttttcatccaaaagggattgttgttcctgatcctgtccaggctgtttgtacccggtggggaaaggatcgcttcacgtatggatcctactctcatgttgctattggttcatccggggatgattatgatattctagctgagagtgttggagatgggagagtcttctttgctggtgaggcaactaataagcagtatcctgccacaatgcatggagcctttttaagcggcatgagagaggccgctaacatgcttagagtggccaggaggaggtcattggttctatctgacaaagttaataacgacttggagaaatgtgat

SEQ ID NO: 190768 - DNA, 509 bp, Gossypium hirsutum
tgccgtcatggcggctctctccactgttccacacctacagatccactgctcaaagaccgagtcagactcagttcataaacccattactttcccttcaaaaacaataagacccatcattcatgtcccgaaaaaactggtcttttccccaaagagtgtcgacgataagatctcaaacagcaatttccttgccaatggacccgttccttcaactccaactcgttcaaaggtgaggcggcatacgatttcggtgtttgttggggatgaaagtgggatgattaataggattgctggagtttttgctagaagagggtataatattgagtcacttgcggttggtttaaataaagataaggcactttttaccattgttgtgtctggtactgatagagtgcttcagcaagttgtggagcagttacaaaagcttgtgaatgtttggaagggtgaagatctctcaaatgagcctcagggtgaacgtgagctaatgctaataaagtgaatgcagacccaaa

SEQ ID NO: 190769 - DNA, 1592 bp, Gossypium hirsutum
gccctgcaccatgtgaagggtcttgtgtgcttggtattattgagaatcctgtgtccatcaaaagcattgaatgtgctatcatagacaagggatttgaggaagggtggatggtgccacgacctcctctcaagagaacagggaaaagcattgctgttattggaagtggaccatctgggttggctgctgctgatcaactaaatagaatgggtcactctgtgactgtgtatgagcgtgctgatagaattggagggcttatgatgtatggagtccctaacatgaagactgacaaggtagatgtagttcagcgacgtgttaaccttatggctgaggaaggagttaaatttgtcgtcaatgcaaatattggaaaagacccgtcctactcccttgaccggcttcgagaggaaaatgatgccattgttttggcaattggagccacaaaacccagggaccttcctgtaccaggacgagatttatctggtgttcattttgcaatggaattcctacatgcaaatactaaaagcttgcttgatagtgatctccaagatggtaactacatatcagctaagggcaagaaagtagtagtcatcggtggaggtgacactggtacagattgcattgggacatctatccggcatggatgtagcagcattgtaaatcttgagttgcttcctcagccaccgcagacaagagctcctggcaatccttggccacagtggcctcgcatattccgtgtagactatgggcaccaagaagctgctaccaaatttggaaaagacccaagatcctatgaggttttgactaagaggtttataggagatgataatggaaatgtgaaaggacttgaggtggttcgtgtgcgttgggagaaggatgccagtgggaggttccaattcaaggaagttgagggctcagaggaaataatcgaggctgaccttgtcctgctagccatggggttccttggccctgagtcgacactggcggaaaaattaggtgtggagcaagacaatcgatcaaacttaaaggcagagtatggccgcttcacgaccaatgtggatggagtctttgcagctggagattgtcgacgcggtcagtcgttagtcgtgtgggcaatctcagaaggaaggcaagctgctgcacaagtcgacaaatacctgactaaggaagataaggacacaagtgtagagggtgagaaccaagattccgtcaagcggcaccaagaccttccccaaaagcagcaaactgtcatgaaatagatgatccatcagattgttattgtttgcgacattgagctgaaatggaacccgaatccaatacattccgaaggaaattggtatttacatggatgaccagagtgggaattaaagcatgaatcttttgcggttaaaccagcaagggggatatatgctttaatctcccatcaaagaacctacaagcaaaaatcaataaacattcatggggctgagctgatatttaggagattgagggacattttgtcttttctcatgtctttgttatctttatttatagtttttattcaggttcagctctcatcgttttcttgaaaggtacaataatgtatagttttgtctctt

SEQ ID NO: 190770 - DNA, 361 bp, Gossypium hirsutum
tcctcgcgtccggatccatcagattgttattgtttgcgacattgggctgaaatggaacccgaatccaatacattccgaaggaaattggtatttacatggatgaccagagtgggaattaaagcatgaatcttttgtggttaaaccagcaagggggatatatgctttaatctcccattaaagaacctataagcaaaaatcaataaacattcatggggctgagctgatatttagtagatttagggatattttgtcttttctcatgtctggttatctttatttattgtttttattcagctttgtttgtaaggttcagctctcatggttttcttgaaaggtacaataatgtatagttttgtttctt

SEQ ID NO: 190771 - DNA, 590 bp, Gossypium hirsutum
tttttcgttgcttgattccatggggagcaaatggtggcatgtatttgaaggaggttgatcgtgttcttagaccaggtggttactgggtactttctggtccaccaatcaattggaggaacaattacaaagcatggcagcgtcccaaggaggagcttgaggaggaacagcaaaagattgaggatgttgccaaactcctttgctgggagaagaagcatgagaagggtgaaattgccatttggcaaaagagagtcaatgatgagtcttgtcgtggtagagaagatgattctcaagccaaattctgcaaggctgaagaggctaacgatgtctggtacaagaaaatggatgtgtgcgttactccataccctgatgttagtagttcgagtgaagttgctggtggggaattgaagccattcccagagaggctatttgctgtccctcctagaattgctagtggaagtgttcctggagtttcagttgagacatatgaagaggacaataacatatggaagaaacatgtcaatgcatataagaaaatcaatagacttattgactctgggaggtatcgtaatattttggatatgaatgcctga

SEQ ID NO: 190772 - DNA, 547 bp, Gossypium hirsutum
acaagtctcttcaatggtgggtgaaccaaagttgatagaaaatagggtgggaaaacccgtctccacagatggtttatttcgttttattaaatcagtcatttccgatgaacaacaagaagaaacaggcccattttacgtgctggatttgggtgctacgaggtccctagtcgagacatggttccataatcttcccatggttcaacctttctatgcagtcaaatccaaccctaaccccgctttcctcaaagaaatggcagctctcggcaccggctttgactgtgcaagccttcctgagattgaaaccattttatcgcttggggtttcgcctgatcgaatcgttttcgcaaacacatgcaaacccgagtctcacatcaagtatgcaactaaagttggcgttaacttagccactttcgactccaactgtgagctcgaaaagataaagaagtggcacccgaaatgtgaactgttgatccgaatcaaagtcccggaagccagtggttcagcattcatgttcggttccaaattcagtgcactccctgaagaaatt

SEQ ID NO: 190773 - DNA, 621 bp, Gossypium hirsutum
gcaatttgcaccaagcaatcagtggttcatccggaccgtgaatagagtttttgagcatgcgggagatctggtcaatattaaggtagcacatagtttgatgcggttgattgctgagggattcggagaggatgatgataatgcagatagtaaattgagatcatctgctgtggagtcatatttgcgcattcttggtgagccaaagttgccatctgttttccttcaggtaatctgttgggtattgggggaatatggaacagctgacggaatgttctctgcttctgacattactgggaagctgtgtgatgtggcagaggcttattctaatgatgagactgttaaggcatatgcaactacagctctcatgaaaatatatgcgtttgaaatagcagctcgtaggaaagtagatatgctgcctgagtgccaatctttaatggaagagttattggcttctcactcaacagatttacagcaacgtgcctatgaactgcaagcagtgattgggcttgatgctcatgctgttgagtgtattatgccatcagatgcaagttgtgaagatattgaggttgatagagacctttctttccttaatgattatatccaagaagcaatagaaaaaggtgc

SEQ ID NO: 190774 - DNA, 451 bp, Gossypium hirsutum
ggctagtttaaggttgttcttgtgtttctttctctttactgcaagttctgtcaacattgtatgcagccgtagtctgcaaaaagatcatatcgccttgtttgtctttggggattcagtgtatgatcctggaaataataactacatcgacacgattgctcgggcaaattattatccatatggtgaaaccttcttcaaataccccactgggaggttttctgatggtcgtttaattccagactttattgccgagtatgcaaatttaccactaattccaccatatcttcaacctgggaatcatgaagttactactggggtcaactttgcttcagctggagctggtgctttgtctgaaactaatcaaggattcgtgatagatttgaaaacccagctaagttatttcaagaaggtggcaaagcagttgagacaggaactaggtgatgcggaagccatg

SEQ ID NO: 190775 - DNA, 2119 bp, Gossypium hirsutum
cccacgcccacgcgtccgctgaaaactaattgaaatcgtcggctgtctctcatttccgttcctctcgggcttccgccaccgtcgacacccaaaatggaggctcaccggctatcttctactaaacctgttcaatctctcaagccaacgaaaaagattcctttagaggaagataccggtaaagcctccgacgcactgccgcttcccttgtacctaacgaacgccctgttcttcaccctcttcttctcggtggtttattttcttctttcccgttggcgtgagaagatccgtacctccacacctctccatgtcgtcaccttttccgagatcatcgccattctctcatttttcgcgtcctttatttaccttttgggtttctttggaattgacttcgttcaatctttggttttccaaccatcgcctgacgtttggattgccgaggaagaggatgatgaagttctgcttgcaaaggaagaagcccgtaaggtcccttgcgggcaagctctcgattgttcgcttccgcctctgcctcctgcggcaccaatcgtgaccgttcagaaggtgttcgatgaaaagcctgtgacggttctaacggaggaagatgaagaaataattaaatctgtagtggctggtacaaccccttcatattccttggaattgaaattgggtgattgcaagagggcggctgcaatcaggcgggaagcgttgcaaagattaacagggaagtcgttatctggattgcccttggatgggtttgattacgagtcgattttagggcagtgttgtgagatgccggttggctacgtgcaaattcccgttggaattgccgggcctttgttggttaatggaagagagtactcggttcctatggcaaccacggaagggtgcttggtggctagcactaataggggctgtaaggctattcatttgtctggtggagctacaagtgttctattgaaagatggtatgactagagctccatgtgtaaggttcggtactgcgaaaagggcagctgatttgaagttgtatttggaggaccctgataatttcgagaccttgtctgttgttttcaacagatcaagtagatttggcaggctccagggtatcaaatgtgcaattgctggaaagaatctgtatattagattcacttgcagtacaggtgatgctatggggatgaacatggtttccaagggagtgcaaaacgttttggatttccttcaaactgatttccctgacatggatgtcattggcatctctggaaactattgttccgacaaaaaaccggctgcggtaaattggattgaaggacgaggcaaatctgttgtctgtgaagccaccattaagggtgatgtggttaggaaggtcttgaagacaagtgtggaatctctcgttgagcttaacatgctgaagaaccttactggatcagctatggctggagctctgggtggatttaacgctcacgccagtaacatcgttgctgcaatctacatagctaccggccaagatccggctcaaaacgtcgagagctcgcattgcatcacgatgatggaagctgttaatgatggcaaggacctccacgtctctgtcacaatgccttccatcgaggttgggactgttggtggtggaactcagcttgcatctcaatcagcctgtttgaacttacttggagtgaagggtgcaagcaaagagacaccaggagcaaactctaggacgctggcaaccattgtagcgtctgctgttcttgccggggagctgtcgcttatgtctgcaatttcagcaggacaactagttaagagccatatgaagtacaataggtcaagtaaggatgtgtccaagggttcttcatagcgaaaacgtaatggtagcctgaatatttgggggtaaagttgcaatgtcccatggttagaaatgtaccaaggaaacaaatccctttgtaataagttaaaagcagacatcttctccttgtaattttctttatttaatttgtattttggttctttcctttcttctataatattatttaattttttttttttaagacgaagtcaggccatgtaacctgagaatactgtaaaatgacagaattgttaatgaactttcttttttcaaaaaaaaaaaaaaa

SEQ ID NO: 190776 - DNA, 850 bp, Gossypium hirsutum
gctttgaagatagtattagcatgctggtttcttctgcagtcccagagggtaaaggagtatcgtcttccgccgccgtggaagttgctagcatgtcagctatagcagtcgctcatggattgagcattagtccaagagagcttgccctactctgccaaaaggtggagaatcacattgtaggagccccatgtggtgttatggaccaaatgacttcagcatgtggtgaggcaaataaactacttgcaatggtttgtcagcctgctgagataattggtcttgtaacaattccaagtcatatccgattttggggaatcgattcaggaatacgacacagtgttggaggtgcagactatggatctgttcgaataggagcctttatgggtcgaaagattataaaagctacagcatcaactaggttgtctcaatcaatgtctactgctaatggggcatcccctgatgaagtggacaatgatggactagaattacttgaagccgaagcttcattagattatttatgcaacttgtcacctcacagatacgaagctctttatgccaatctacttcctcaatcaatgcttggtgaggtgtttttggagaaatatgttgatcatggtgatacagttacagtaatcgataagaaacgaacatatagtgtaacagctgccgctaagcatcctgtatatgaaaattttagggtcaaggcatttaaggcactgctgacatctgcgagttcaaatgagcaacttacggcacttggagagctgttgtatcagtgccactacagctatagtgcatgtggtcttggttccgatgggacagatagactggtacagttggtgcatgagatgcatca

SEQ ID NO: 190777 - DNA, 451 bp, Gossypium hirsutum
gttgaacaaattagcagcagaaccaaatgcatgaagctttaagcgaacagactatatctatacactagtactgatatcaaggtaaatggacttcttggatcctgtgtaggcgttgtgtttatctagctcaaccatttctatgcttgtgaatggaatctgagcaagcggattctcacaaaatggattttaacgcgacggaggaagaggaatttggattctcaagaaactatttcttagcaaaagaaatgggcagttctgggaagaaatctgctcctaaactcagtgatatcaatgtcgttgacgaacaggtattttgcctcattgaatccccatctcaaaaaaagctttgctttttttattcttttaaattttgctggtttaaaattgcatcaaaacgacattgcagatttaataaatagttacaaaagtttatacccaaaatgggtttttg

SEQ ID NO: 190778 - DNA, 1004 bp, Gossypium hirsutum
  unsure (1)..(1004): unsure at all n locations
agccgattctctttggaaatttggtagaagaagtggtagtgggtaagcatctttaaaaaagcttacttttttcccccttcatttccattctcatcattttctcttttgttttcctctttttccaatatcatcaaaaaccagccctaacagagcagctgaacctaacatcatcatcatccatggcggcaccgatctggctatgggctttctctgtagccctaactctggttccgtctgtttttggaaactctgaaggagatgctcttaacacgttgagaaaaagtttgaccgatccagataacatactccagagctgggatccgaaccttgttaatccttgtacttggtttcacatcacttgtaaccaaaataatcgagtcactcgagtagatttaggtaattctaacctgtctggacatttggtacctgagcttgggaagcttgagcatttgcagtatctggagctttacaaaaataagatccagggaaccatcccaactgaacttgggaacttgaagagcctcattagtttggacctatataacaacaacatctcagggaccattcctccttcactagggaaattgaagtctcttgtatttttacggcttaatgacaacaaattaactggacctatccctagggaacttgtcggtatttcaagcctcaaagttgttgatgtctcaaacaatgacttgtgtggaacaattcctaccagtggaccatttgagcacattcctttgaacaactttgagaaaaaccctcgactggaaggtcctgagctgctggggcttgcaagctatgacacaaactgctcgtaaagggcatgttgacgctataaagctttgaattagatatgaatccgcatgaagtaatatgtaaatctgtataccagctcgactgtattagcatctgtaactcaattaccctactcctaaaatgttgaagacgactagtattggtgaatgtaacggtagcgacaagtttcctttctgtgtgcnnna

SEQ ID NO: 190779 - DNA, 483 bp, Gossypium hirsutum
gcagaatttcgcaccagccaaaagagttccatgtttttcgctgccatttccaaagccgattctactttagaaattttgatacaagtaaagtaatagaatcttaaagaaaaaaaagtgctaaaaaagctaactttttttttctttctattgttccttctttactctgggttcgtttttcaaagcataaaaacctaatttctaacagagcagctgcaactatcatcacccatggcggcaccgatctgggtatgggctttttacgtagccctaactctatttccttccgttttgggaaactcagaaggcgatgctctttatactttgagaagaagcctatcggatcctgataacgtgctccagagctgggatcccacccttgttaacccttgtacttggttccaaatcacttgcaatcaagataatcgagtcactagagtggatttaggtaattcaaacctatctggacatttggtaccacagctc

SEQ ID NO: 190780 - DNA, 457 bp, Gossypium hirsutum
gttatctggacctatccctagggagcttgctggtatttcaagcctcaaagttgttgacgtctcaaacaatgatttgtgtggaacaattcctaccagtggtccatttgagcacattcctttgagcaacttcgaggaaaaccctcgtctcgaaggcccggagttgttggggcttgcaagttacgatacaaactgctcgtgaagaaaccgattgatgctacaaaagtttcgaatttaaatatgtagtcacaagattttaagtgtattatcagagtataatggggtaattgtggaaatgcaatctcgtataagtatctgtaaatcagaatttattagcatatgtaacaaaaactatcatgctcttcctatgatgttttcagacaaactagtatttgatgtaatggtagcgacaaggttacttcttgtgtgcaaaaaaaaaaaaaaaaaatttttatttttt

SEQ ID NO: 190781 - DNA, 513 bp, Gossypium hirsutum
accatatgccgcgttccattcctggccatgatgtaaagcaggcttcttccatgccaggcgcagtgacttatttaaggataaaacaatcccgggttgaatgaaaactagttatcgctcttcgcccatgcaacaaaccaccatcaacagcatcaacatcttcccctaaatccatctctttcaccccgaatgacatgaacacaacacaccattggcccaaagtttcatgagtctgattaactcccaaaaaagctgatgaacatgcaaattttagactaaaatcacttaagtcccactcataaccagcataaataccacaagaacaggagataggatagtgcaacaagagtaactgcaagttaatattagaggaaatgcatattcgttctctcacaaatgtgcccaataatcttttgatatccaatgtcaagagaataaatgaatacttatgccaatacattcgatgcttcaagcatgttggtatcaaaaatatgtttaaaagtttcccagctttcc

SEQ ID NO: 190782 - DNA, 754 bp, Gossypium hirsutum
ccgatttgtaatcccttccaaaagaaaggattagctaatcggtcctcttctaccctccaagccgttgcagcatcttcttctttttttcatttttcttcccatttccttccaaccttctccctccttttcatgcttctatcctgaccaaccctttaacaaaccctaacaaccctcaacaaggccttcaattacgaatcgtatgaggtaacagagtaacagagagtagcagcaatggttcccaagttcgtgctactcctggtcatacaatgggttgtgttacctatgtcacgggagatggacctgatcaacctcagccaaggatggctttcacaggagatgctctgttgataaggggatgtgggaggacagattttcagatttttacattaccgaaagagacattgctatatccagctcatgactacaaaggattctcagtaaccactgtgggagaggagatgctatataatccacgcttgacaaaggataaggagactttcaaaaacatcatggaaaatcttaacttggcatatcctaagatgattgatgttgcagtgccagcaaatatggtttgtgggttgcaagatttggaacctaaagccaactgaggctttgctggatcatccataagtgtgcacagattttagttgtattataattctggatcttaatatcactggatatgctaaataaaatggctagagaagccacgtgattgcaaggaatccataaattatatatatactatatcata

SEQ ID NO: 190783 - DNA, 782 bp, Gossypium hirsutum
cttctagattttgcttattaaagctttgatttgatcgtttcctcgatctcatttaatatttttaaaattaatctcaaacccaaaccaccccattcagcggactcgacaatgctgcttaacgtgggtacttccataagatcagctactcgattttctcctttcattataacccattcttctccttcatctccttcttcgttttgtttcagtttctctccaaagcaaaccgtctcgtttactctacaatcatcgcaaatggcgtcttttactacgttatctcaatcgcctccaaagctattgtttcgtcagttgttcgagaaagaatcatctacttatacttaccttcttgctgattgttcccaccctgataaaccagcgcttttgattgaccctgtagacaggactgttgatagagatttaaatttggttaaagaattggggctgaagcttatttatgctatgaacactcatgtacatgctgatcatgttactggaactggcctcatcaagggcaaggtgcctggtgtcaaatccgttatttcaaaggccagtggttccaaggctgatgtttttgttgaagctgtgactaattctattttgggatctctttctgaggtcggctattctgatatacattggtgtgtacctatcatcgtactgtcatatatcatactatgtggtttaacggaatctttttatacggattggagactttttgtggtaatcaatttatattagtttcttattttacattaatttattaattagactagttatctccg

SEQ ID NO: 190784 - DNA, 714 bp, Gossypium hirsutum
  unsure (1)..(714): unsure at all n locations
taaatttggttaaagaattggggttgaagcttatttatgctatgaacactcatgtacatgctgatcatgttactggaactggcctcatcaagggcagggtgcctggtgtcaaatccgttatttcaaaggccagtggttccaaggctgatgtttttgttgaacctggtgacaagatctcttttggggatctctttcttgaggttcgtgctactcctggtcatacaatgggttgtgttacctatgtcacgggagatggacctgatcaacctcagccaaggatggctttcacaggagatgctctgttgataaggggatgtgggaggacagattttcagggtggaagttcacagcaactctacaagtcagtgcattcacagatttttacattactgaaagagacattgctatatccagctcatgactacaaaggattctcagtaaccactgggggagaggaaatgctatataatccacgcttgacaaaggatgaggagactttcagaaacatcatggaaaatcttaacttggcatatcctaagatgattgatgttgcagtgccagcaaatatggtttgtgggttgcaaaatttggaacctaaagccaactgaagctttgctggatcatccataattgtgcacagattttanttgtattataattctggatcttaatatcactggatatgctaaataaaatggctagagaaaccacgtg

SEQ ID NO: 190785 - DNA, 516 bp, Gossypium hirsutum
gagaccttcttcatcgagtctaaagccgggaaataggtaatctacttaccaacagatcattgctgaacttaaaactcaacaatggcactttgtttctgagtcaatctgtagattccatttcctcaaatgggttgctgtgtaagcaccaacacaggttcccttcgtgcgaaagaatcacatttgcaagtgggtgttgaatccaaagctccaccgccttcggctgaagaagaaactgtgaaggaagtcttatctgaaaccccaaaacccaaagctcccatctttaccccacaacaaggagagagcaagcaaacccagattgagaaaccggtctttgtcaagatccaagagaaggaaagcctcaatttcaacgtcaagaccaaaccaaaatcacctgtccttgaagagtcagcttcggaagaggtttccgagatttgcagcgtgagtttaagtgaaagcctttccactattactgataggagagatgaagaagatgaagtgaggcagctaaaggtgttc

SEQ ID NO: 190786 - DNA, 431 bp, Gossypium hirsutum
agatgatgcacgagccctgggttctttgagtgtgttggctacattgttgcaaaccaaggaattggatgaatcaatgctagatggtcttggtattcttcctcagcgcaaacagcacaaaaaactcttgctgcaagctttggtaggtgagggctcaggtgaagagcaacttttttcttttgaaagtggctccgcaagagatagtattagttctgagcttgatggatatttaaaaaagttgaaggaacaatatggagtgtctattgggggagcagcagcaagccctcgtatacgtagaaaccaggtccttgatgcattggtcaaacttctttgtcgatcagatatatctacagaaattttatgggatggtggttggcttttgcgacaattgcttccttatagtgaggccgaattcaaaagccatcatcttaaat

SEQ ID NO: 190787 - DNA, 436 bp, Gossypium hirsutum
gtagtctcgagttcactcattaatatgtatgtaaaatgtgggcagctagagattgctcgtactgtatttgatcaacttggttccaaggacttgatttcctggactgcaatcatgtcaggttatgccatgagtgggagaactagagaggcaagggaactctttaatatgatgccggaacggaatgtaatctcatggaatgcaatgctagcagggcatactcgtttgtctcagtgggaagatgccttagaatttatttttcttatgcggagaatgactaaagattttgaccatgtgacgcttgttctaattttaaatgtctgtgctggcctgtcagacgttgaaatggggaaaaaggttcatggatttatctaccgacatgggttcttttccaatatatttgtaagtaatgcacttctggacatgtaccgaaaatgtg

SEQ ID NO: 190788 - DNA, 763 bp, Gossypium hirsutum
gcttttcgaggtcttgtgcaaggtccatcatgcaaatctggtagagctgatcggctatgctgcaagtgatgatgaactcttccttatttatgaatatgctcaaaagggttcccttagaagccatttacatgatcccttgaacaaaggtcataccccactttcgtggataatgagagttcagattgcactcgatgctgctagaggcctggagtacatccatgagcataccaaaacacattatgttcatcgagatatcaagtcaagcaacatcttgcttgatggttctttcagggcaaagatttcagattttggtttgtcaaagcttgttgggaagacaaatgatgaggaagcaacagcaacgaaagttgttggtacatttggttatttggcaccagaatatttgagtgatggacttgcatcatcaaaaagcgatgtgtatgcatttggtgttgttctgtttgagattatatctggaaaggaggccatcatacggactgaaggcagtgcgatgaaaaacaccgaaagacgttcattggcatctattatgttagcagctctccggaacacaccagactcgttgagcatgtcaaacatgaaggactatattgatccaagtatgctggatctttaccctcatgattgtgtcttcaagatggctatgttggccaagcaatgcgtggatgaggatcctattgtacgaccggacatgaaacaaattgtgataaacttgtcacagatcctattatcctcagttgagtgggaa

SEQ ID NO: 190789 - DNA, 823 bp, Gossypium hirsutum
  unsure (1)..(823): unsure at all n locations
cggaaccaccggcgatgatactactcgtaaaagagggattgctgccttcttggctcaaacttcccatgaaactacaggtgggtggccaactgcaccggacggtccatacgcatggggatattgctatgttcaggaacagggcaaccctggagattactgtgttccaaatcaacaatggccttgtgcccctggtaaaaaatattttggccgtggtcctattcagatctcttacaactacaactatggtccagcaggagaagcaataaaggctaatattctgaatgaccccgatttggtagccaaggacccgaccatttctttcaagacaggtctttggttctggatgactccacagtcaccgaaaccttcaagtcacgatgtcatcaccggccaatggaagccatctgcagaagacacggccgctggtcgggtccctggatacggtgtcatcaccaacatcatcaatggtggcatcgaatgtggcaaaggatccaaccctcaagttgaggatagaatcgggttttacaagagatactgtgacatactgaaagtgagctacggtgacaatcttgactgctacaaccaaagaccctttgcttaattatgcactttaatccatcgtatcatgggtggggtaataaatatatgaaagaatagcatttacaaatcaaattatatttaaaataatcatgctattgtactacgactatatatagatgcatcttccgtggagatggaataagataaatattcaattttnaaaaaaaaaaaaaaaaaaaaaattatattaaatataataatttataaataagggcgggcggtt

SEQ ID NO: 190790 - DNA, 1122 bp, Gossypium hirsutum
atctgccactgcttctgagaagcaagcagtgagtactactgcgattcctaaagaatcggccagtgttgaagaaaatggtactagcaaggagagccctaattgtgaagatgctaatctgccagaaagtttggagcacaaccttcctgataatcctttcgcatctcctaccaaagcatccggggagttcttgtctgcattctccaatgctgaagcagatcgggatgtttcagtctcggcttcttctgtcaacagtaactgggtctcttcaactctacttcctgcaaataatgctttagagattgcatccttcaactctttcaactgtcaaatgcccaggttctcgtctggacatggtaccattggtatgtatgccggcacaggcggcccgacttgccctgttggtatttagcttcctatgctgaggaagactgaaggtataaatcaaacacaaaatttcacatcggagatcagagatctatagagagccaccaccaccaccgcactacaatcagaaccaccactcaaccgttactcgtaatcatcgtcaatactatacttactaccatacaaaatgcgtacataaaaggcagtgaaggaagtgggtcagccattcctttattttgttgtaatattgttatctattgtttcagtagtttggaccacaggtaaaagcatagaagaagaaagaaaaaaaaaaggatcacacagtcaatgtgtagttgtaactccccttggaactgtaatttctttcccttatttttccagcagtgatggtttccctggaagaaacaaggaaaaaaaaccccccttattttagtttgttcaatttttttcctagccttgttagttcatgtttgttagggtgtaatcaaaatcctcttctgtacagagcatctgcactcaaaagaagggaaacaacactcgaagaggtagaaatagtaaaaacatgcatatatggtattgtagggggaagacatctatcgagggaatcatacatctcagttcaaagttgtaccttgatcatgatctactgttatgagatagagaattcactagtaaaaagcatcagaatttctaacaaaaaaaaaaaaaataaaaaataataaaataaacctttaagct

SEQ ID NO: 190791 - DNA, 382 bp, Gossypium hirsutum
aaaaaagaaaatccaggaagtgagtcaagagctaaattcagcaatgtttccgtccaaccaccagttttcgggtcaaccgagggcgttagctgttgttgaaaccaccacaacttcgattcaagtggatctgaacgaagcctctttggtttccagggatgaagtgcaaaatggaggattttcagaagccaaatccatcatggagagctccgagaaacttcaagatgatcttcgaacgttgggaatgaaaatcaagcagcatgaggatagcttagaacttctgagggatcaggagaaccaattagatgataccatacttggtatgcaaggtatgcttggcaagtatcattcttctaaaacgcatgcatgacataaaattcacttg

SEQ ID NO: 190792 - DNA, 1338 bp, Gossypium hirsutum
caaaagcctgatgtgtttaggggaactgtacgttatgcaagtgtgcatgctcatttgggtaggacaggcagtcgaagggatgaccttgagtcattggcttatacactaatatttttacttaggggaaaacttccctggcaaggttacattggggagaacaaaggatttcttgtttgtaagaagaagatggcaacttctcctgagatgctttgttacttgtgccctcctccttttcaacaatttcttgagattgtgaccaacatgaaatttgatgaagaaccaaattactcaaagctcatttctcttttccgtaatagcattgatttcaattcatcaatatgtcctatccaaattgatggagctattaagctgggtcaaaaaaggggaagagcactttttgagctggaagatggtgagcagcttaggaagaaacttcggctaggttctcctgcttctcagtggatcacagtatatagttccagaaatccaatgaaacagaggtatcactacaatgttatagattcaagactccagcaacatgtggagaaaggaaaagaagatggcttgtatattagctgtgtagcttcatcattgaatctgtgggccattgttatggatgcagggacaggtttcacatctcaggtttatgagttatctcctatctttttgcataaggaatggataatggaacaatgggagaagaattactacattacttcagttgctggtgcttgcaatggcagtgcactggttgtaatgtcaaagggtacaccctacacgcaacagtcctacaaagttagtgacgtatttcctttcaaatggattaattagaagtggaaagaaggcttctctgtgacctcaatgaccgctgcaggcagcaaatggggcattgtcatgtcccgtaatgcaggctatcctgcccaggttggtgaactcgatttcctttatccaagtggggggattcatagaagatgggaaaaaggatatcggattaccgcagcagctgctacagaggaccaagctgcattcatacttagtgcgtccaagagaaaatcacaagatgtaatgcaagaaactttgcgtacatctgcttttcctagtacccatgtaaaggataaatggttgaaaaatctgtatatttcatccatttgctatgggaggacagtgtcctgaagtttggtattcggaagaagcaactgcagtttacaagttaaaaggcaggtaaactatcccggtctattattcaaggccttgaaattaataacagttgatgagtcttgtaaagattccatctgattgcgcattttgtcccgctaatacttaatgctttgaatcaaa

SEQ ID NO: 190793 - DNA, 1194 bp, Gossypium hirsutum
ataaaatcaaggtagtcgccactcgccaccaggaaggggaaaattcccttgtaaaacactttgctttcgatctgagaatttgccaagagaaatcaaatcctatatcttcaatttctgatagaaaattcacgccacgaggcataggttattgaaaaatctgcaagtacttgaatttgtgtgaaggaaagatgcaaaatcaggatggagcggtagctgatagggaaaaggaatctgctgtatccattcccatttctgaagttgatgactgggcaaatttcgcagatgatgatatcatgcagcaacaatctgccattcatgctgaggaggccaagaaaattccatttggtggtgacaagggaccactctctatgttggcagctgaatatgaatcaggaagtcctatattgctagaaaaaataaaggtgcttgatcagcaatatgctgccattagaagaacgcgaggagatggaaactgctttttccggagttttatgttttcataccttgaacatattttggaatctcaagaccgtgctgaggttgatcgtatcaaaggcaatgttgaagaatgtagaaagacgcttcagagcttaggccacacagattttacatttgaggactttttttcgttattccttgagcagctggaatgcgttcttcaaggaaaagaagattccataagtcaggatgagttaatactaaggagtcgagatcagtcaatttccgactatgttgtaatgttcttcaggtttgttacttctggtgaaatacgaaagcgatcagagtttttcgaaccctttattttgggagtaaccaatgccaactgtggaacagttttgcaagtcatccgtagagccaatgggtgaagagagtgatcatgtgcacattactgccctttcagatgctctgggtgtgccaattcgtgttgtgtaccttgatcggagctcttgtgacattggcggtgttagtgtaaaccatcatgatttccttcctacttcgggcgataagtcaaatgctaaaggtggtagcactgttcctgtcaagccttttatttccttgctatatccgccaggccactatgacattctctatccaaagtgatgcatttgcattttctggttgttaacaatgtcctaatcagtggtcctttgggggaaaatttaccttgcaagctgacgtgtgactgtaatgcaa

SEQ ID NO: 190794 - DNA, 393 bp, Gossypium hirsutum
gcaagatctgttgtcaactgagattgtcaaccgtgggatcgaatcatcgggaccgaatgccggttcgttaacgttctcggttcgggttcgaagacgactacctgattttcttcagtcagttaacttgaagtatgtgaagttagggtaccattatttgatcaaccatggtatatatttggctaccatacctgttttggtacttgtttttagtgccgaagtgggtagtcttagtagggaagagctttggaaaaagctttgggaagatgctcgttatgatctcgccaccgtgctgtcttttttcgctgtttttgtgttcaccgtttccgtttacttcatgtcacgccctcgttccatttatctaattgatttcgcttgttatcgtcctcacgatga

SEQ ID NO: 190795 - DNA, 425 bp, Gossypium hirsutum
caccaggagagatgatcatgacgaatttgactactggggacaaagttgtgctttattttcaaccatgtggctggtttggagctggtcgttatgaagtggatggttatgtttataatgctgctgaggaacctaaaatattgatgacagggaagtggaatgagtcaatgagttatcagccatgtgatatggaaggagaacctcttcagggcacagaattgaaagaggtgtggcatgttgctgatactccaaaaaacgacaaattccagtttacatattttgcacacaaaccgttcttgggtgacttcgaagtcatcaacatatctaccgatggtcagttgcgcaccctttctaatacaagctatgattgttacaacacaccatggaatcggttattttactacttcttgctttctgaattttcaata

SEQ ID NO: 190796 - DNA, 710 bp, Gossypium hirsutum
gatttttggacgaacttgggttgattcaccaggagagatgatcatgacgaatttgactactggggacaaagttgtgctttattttcaaccatgtggctggtttggagctggtcgttatgaagtggatggttatgtttataatgctgctgaggaacctaaaatattgatgacagggaagtggaatgagtcaatgagttatcagccatgtgatatggaaggagaacctcttcagggcacagaattgaaagaggtgtggcatgttgctgatactccaaaaaacgacaaattccagtttacatattttgcacacaaaataaatagctttgacactgcccctaagaagttgctagcatcagactctcgtctccggcctgatagatttgcacttgagaagggtgatttatccaaggccggttctgagaagagcaggttggaagagaggcagagagcggaaaagaggacacgagaggccaagggacatcagtttactcctagatggtttgatttgacagatgaaatctcagccacaccttggggtgacctggaaatctatcgcttcaatggcaaatacactgagcatcgggctactgtagatagctcagacggcattgatgaggttgacttggcttcaatcgagttcaacccatggcagtatggtaacttgtcaactgaataggtattggtgttctaatgtatacttctaaaacttg

SEQ ID NO: 190797 - DNA, 438 bp, Gossypium hirsutum
atgccctctatgcattttatcatgaaagaagaccagaatcttttgtctgccctccaactcctgagtggaaaagatcttctgatcttgatctcaatggtgaagcaactgcagatgatgatgatgatgatgatgatggagctccaactgcattacctgttagagggcatgcacaattcccgggatcacatccagtttcactgaacaggtcccttatatgtttggttttattcttttttcttagttcttctttattctggtttttgattcttcattttgttgaaattagtgcattatctcttagaactttgttcggcctttaagttattttcttactaatgcagcaattttccttgttaagctagtagagattaaaatgccttgagattgcaactggatgttaaagtgctaaaatatgggttcaaaatttttctgaaattt

SEQ ID NO: 190798 - DNA, 455 bp, Gossypium hirsutum
gcaactagaagatggccgtaccctggctgattacaacatccaaagggagtccaccctccatttggtgctccgccttcgtggaggaatgcaaatctttgttaagaccttgaccggaaagacaattactttggaggttgagagttcagataccattgacaatgtcaaggctaagatccaggacaaggagggtattccgccagaccagcagaggttgatctttgctggtaagcaattagaagatggccgcaccctggctgactacaacatccaaaaggaatccaccctccatttggtgcttcgtcttcgcggtggtatgcaaatatttgtgatttgtgaagactcttaccggaaagaccattacttttgaggttgagagttcagataccattgacaatgtcaaggctaagatccaggacaaggagggtattcccccagaccaacagagattgatcttt

SEQ ID NO: 190799 - DNA, 431 bp, Gossypium hirsutum
gctagcttctctcttctatggcggtggcttacagccttcttcccttgttttttttttccctttatataaattatattaaacaatctcactgaaccatcgtcggagaatcagtccggacggtgattgtggctccggttgccggcggcgaggcgaggtgtagtgtttttattgttgtcgcaatcgcgttgaaggaaaaccgagagtttttttgaattgatcagcagaaacaggaaatgaatgggaaccactatggatttagaagtacggcggcggcggcggcgagggtatatataaggagacatcaccggcatggctccggagagaatcagtgtagttcagctcttgttaagcacttcaaagctcctttctctctgtttgcaagaaaagctgcaatcacttttcctggggcttccgcacgcgatctttcttct

SEQ ID NO: 190800 - DNA, 594 bp, Gossypium hirsutum
ctgctgtgaaaccttggtctaccgggctaagcggacagctgcagaaagcatttgtaaccggtgtaccaaagctgaagagatcagagctggaagcagcctgcgaagatttcagcaatgtgattagttcttcaacagttggcactgtgtacaaagggacactgtctagtgggattgaaatatccgtggcctacatccctgtgaaatttgccaaagattggtcaaggaatttagaagcacagttcagaaacaagattgaaacattatcaaaggtgaaccataaaaatttcgtcaacctagttggatattgtgaggaagacgagccttttacgaggatgatggtttttgaatatgctccgaatggaacactttttgagcatttacacattaaagaatccgagcacttggactggacgaccaggttaagaattatggtgggcatggcttcctgcctagagcatatgcaccagctgaaccctcccataccgcataccaacttgtcgtcagctgctgtcaatctaaccgaagactacgcggccaaagtctatgatccgttctcctggaacgagataactgcagctgagagtgaaactgata

SEQ ID NO: 190801 - DNA, 823 bp, Gossypium hirsutum
attgcttcccacaacattttttctcatgttggtggcatggatttgatgaaaaatggtggggtacactctcctcagcagatgtcccacctttaccctggcaggaaccctatgatttcaatgccgacgtctcttgattctcctaatgaacgtgttagaagcttctcacaccgtagaaatgaactgaattctagtaatgctgataagaaacaatatgaacttgacattgaccgcatcatacgtggggatgacagcagaacaacacttatgattaaaaacatacccaacaagtacacttcaaagatgcttctggcagccattgatgaacattgtcgaggaacttatgattttatttatttgccaattgacttcaagaacaaatgcaatgtgggctatgcgttcatcaacatgattgatccgcaacagatcattcctttccataaggcatttgatggcaaaaaatgggagaagttcaacagtgaaaaggtggcgactcttgcttatgctaggatccaaggaaaggctgctcttattgctcatttccagaattcaagcttaatgaatgaggtataatcgttgccgccctattctctttcatactgatggcccaaatgccggtgatcaggagccctttcctatgggtaccaatattcgatcaaggccagggagacctcgaacatctggcactgaggagaaccaccgccaaagtagttcttcaactttagctaacggggaggaatattccaatggggcagaatcattgggttcttcgaaggattctgattgagcagtctgcttatccagctctaactttaaaaaacccttt

SEQ ID NO: 190802 - DNA, 438 bp, Gossypium hirsutum
gcttccaacaaagattttcatgtcatctttgctactaattgctataagaaaatgtttccaaacagcttataaacctccatcagaaagcgacggtggtattgcgacagctgcagtggtcggtattgtgggcggagcaatgtttgctgctttgctgattttaggcatcctttggtggaagggctgtttaagacagaagagaactttggaacaaggtatttaggcagaatatcattgtactctgttgcatacactagtcgcgcaacgtctttattttacggttttccgttcttttttatattgatattcgtcacaattgatatgttatgcgactaaaaacacgtttgtgattgcaatttaaaccctgccatcccttataataggattaacatgttccacagatctaaaaggtatagagttgcagacaacttcctttacctt

SEQ ID NO: 190803 - DNA, 392 bp, Gossypium hirsutum
aatgcatgcaggttgtccagtggtttgttaaaagaggttgtcgagacatggagctctgtctggccctcactgccgctacttccagcagccaagttggtgtggctgcatatctcctcccccatgttcctaagcatgtcctaacggccctcagcatcgaaattcttaaggctgcgggtgaacgaagtgggggatctcttgatggtgttgcgtttctcctccactctgacttcttaggtgatgctgctgctacttatgctgttgcagacagcattgcaaagtctgatgatgaggctgttgctcctgagctgagagcatttgttcaagaacactggtcagaggcagctttcttggatggattaaagcaagggcaagaacattacatgaagctgatg

SEQ ID NO: 190804 - DNA, 623 bp, Gossypium hirsutum
  unsure (1)..(623): unsure at all n locations
tcatcagtgtgctctatatagaatatagaagcaggaaggagaaagagaatgtcagcttcaaaaaccatgtcatccagtggtttgaagtgcttgatgggttgctgggtccatactggaaggcagctggacttgctttcaactgtactttcctcttattcggatctgtcatacaactcatagcttgtgctagtaatatttactacatcaatgacaagctggataaacggacatggacctacatctttggtgcttgctgcgcaaccacagttttcataccatcctttcacaactatcggatttggtctttcattggccttgggatgactacctatacggcctggtacatggccatagctgctgttcttcacggccaggccgagggcgtaactcacagtggtccaacaaagctagtactctacttcaccggagctaccaacattctctacacctttgcggcatgcggtgactgtggaaatatgcatgcatgtgaagcctcaaattcagtgcatatattgttgcacatgtacgttttacctacaatnctctctnatcgtgtctgtcattgggaccactctaacatncatgcctttcttctctagaccgttccggagcgcgtatctatg

SEQ ID NO: 190805 - DNA, 380 bp, Gossypium hirsutum
gaagaattgatagtcagagtactatgcccatttgacgggattgggcgtgtcattggaagggcagggagtactatcaaaagtataaggcaggcaagtggtgctcgtatcgacgttgatgatacaaaggctgatcgcgatgactgtattataactgtaatagctacagagtcacctgatgatttaaaatccatggctgttgaagctgttctattgctgcaagggaagattaatgatgaagattacgaaactgtaattatgaggctcctcgttccatctaaagttattgggtgtattattggaaaaggtgggttctattataaatgaaattcggaagagaactaaagctggtgtacgtattttaaaaaagggtaaacccaaat

SEQ ID NO: 190806 - DNA, 512 bp, Gossypium hirsutum
gcttgttcagctaattttgattttcttttggcaactgagacagacgatcaagagttagaaatgctaagggctctggtgaggaaagcagcttcaacttcagcttttgggagtgcaaattcagccccatgtcttattgctaatccaatccaccacctacagaccaaacacttctccataggaatcctccctgatggggtcaatcgtagctccgacaattttgtccagaattccgatgccatggaacgtctcttgtctgaccttcaatcccatatcaacaaggttcttgctggaggaggagaaactgctgtgaaaaggaacaggagcagaaataagcttctccctagggaacgaatcgatcgtcttcttgaccctggttcttctttcctcgaattgtctcagcttgcagggcatgaattatacgaagaccctttaccatcaggtggaataataacaggaattggtccagttcatgggagactttgtatgtttgtggctaatgacccgactgttaa

SEQ ID NO: 190807 - DNA, 392 bp, Gossypium hirsutum
gtctaactaggatccccggctgagaagcggacgaggaaacagatggctccgtccggctggggggccgcaatcgatccccagatctacccttgaatgaggatgatgataaaattagaagtgcggtggaagtgaagaaaaacgggggagcatttcaaccattccagaaagaaaaaactgcagagatgagtggtcaatctgcaggaggaaaaaccaatggctcagctacaagtacttgtacaacagaaagtgggagtagaggaggagaagccaactgtgcaaattcaagtgaaacagatgagaaagaaggtcaggcttcgagaaagcagacgcggtggtgggcaccggagttgcataggcgcttcttgcatgctctccaacaactagggggttct

SEQ ID NO: 190808 - DNA, 435 bp, Gossypium hirsutum
agtaacactaatggttgtgatgatatcaacgaaaatgaaccagatgctaaaagatggtaagcttggatcatagccaaaaatgaaaaacagattctcccattaatgggttcttgttttagcttacgcttttgtgattttttttttttgcaggaaaggtgaaaatgagaatgagggtatggtaggttgtggtagcaaaactgtgaaagagcctagaatagtggtgcaaacaacaagtgatattgatattcttgatgatgggtatagatggaggaaatatggacagaaagtagtcaagggaaaccccaatccaaggttagtcattattctccacctaattgtctactaataggaagcctggatgtgcagtttattcaactaaaattgttgacttcgtcaaaatcttttatacaggagctactacaaatgtacgacaat

SEQ ID NO: 190809 - DNA, 628 bp, Gossypium hirsutum
gctcgagatcctattatgggtccattgcctctctgagtcccagtttccgatccgtaatcaggagcggagagatctacaagtcaaggaggcagaagggtgttactgaacattgggttcacttttcttgtgacctccttcaatgggaggcatttgatccaatccaatgcaagtggatgcatttgccaccgatgcctcccaatgggtgtttcatttttggggacaaggaatccttggccgtgggaactgagttgcttgtatttgggaaggaactgaattcccaagtgatatatagatatagtattttgacaaattcttggactttcgggactagtatgaattctcctaggtgcttgttcgggtcagctagtcttggagagattgcgattttagctggtggttgtgattctcagggtaacatcctgagcactgcagaaatgtacaattccgagactcagaagtgggagactctcccaagcatgaataccccaaggaagatgtgcagtggggtatttatggataagaaattctatgtaattgggggaactggtggagtgggaaatgatgcaagggttctcacttgtggggaggagtatgatttagagttaaaaaaatggactaaaattcctaa

SEQ ID NO: 190810 - DNA, 558 bp, Gossypium hirsutum
tttccacgcgtccggaaccatccatggctaattgctccttggcactgctttagccaatgcgttaaagaacgtggcattgccttcaagaaagctcatgggcgtgagatatgggatttagcatcaagggatcctgatttgaacaagctttttaataatgggcttgcttgttcatccaaggtcatcactagtgtaatcctgtcgagttacaaacaagggttgagctccattggatcattggttgatgttggaggtgggattggaggcttaatatcagagatcgtcaaagcatatccacacatcaaaggtgttaattttgatttgccgcatgtcgtctcgacagcaccaacatacaatgcagtctcccatattggtggtgacatgtttcatgacgccattccaaatgctgacgcagtcattatgaagtggatattgcatgattggactgacgaggaatgcataaaaatattaaggaattgtaagaaagcaataccaagagagaatggaaaagtgatacttggtgaaataattttgaaagaagatggaagtggagtgtttgat

SEQ ID NO: 190811 - DNA, 439 bp, Gossypium hirsutum
ccggcatctcctccttcactgttttccttcaatcgcttctctcatttcccatttctacctacatctccgccaccaccacctccgcctctgaatgtcttgttacaatgcatcaaggaaggtgttaaattggaccactgctatcgtccatacagatttattgagagtagtatctagaagacttgttttggcaaccaagacgcagtcaataacgaccatggcagctcaagaggaagaatgtaagggtaatgtgaaggcacagttagcaaaactatttgaagtttcacttaaagtaacagttccgaatgaggcagatgttgacccattgatagctgcctgcactggcaaatttggtgattaccaatgtaataatgccatgggcctttggtctaaaatcaaagggaagggtactcagtttcctggccctccagctgttggagag

SEQ ID NO: 190812 - DNA, 444 bp, Gossypium hirsutum
ggttaaggaaagtatgcgttatcaagatgcttagcagtgctactttggataaagtatatagtcttcgccgtcaagaagtacgagaaaccataggttatttatatagtaaggccggttcgcctgtaaacgtgggagagcagatgtttttaactatcttgaatgtggtgaccaatatgatatggggcgggtccatggaaggggaggccagggcgagccttggtgcagagttcaggcaagtcatctcagaagtaacagaacttttgggtctacctaatgtttcggatttcttcccggcgttggccccgcttgatttgcaaggtgcagtgaaacgtgtccgaaaatcaacggagaagttggacgcaattattgataagataatcaatcaaaggttggaggagaagcaaagtgggcacacagtagaggaattcaaggactttctacaat

SEQ ID NO: 190813 - DNA, 397 bp, Gossypium hirsutum
gacggattccgcattttggctgcttcaccaccgatttctagtccattgcaaaagcaaagattaggtaatcggtgtctcatttaccctccccttgccgaaatcgactccagccgaccctttccctcccagcgaaccaaacctctagccgatcccgatttcaactttgcatctttctctgattcgacggtgtcagatcttcggacggcttgaattagtaaactccgccttctgagtaacctatttctttcctctctgcatgcgattggttcagttcttggcaaatcggcatttcggttcttgccggttatgggttttttttcattaatttttttgggtggtgatcattgcaggttctttgctccagcaggtctttatcgagctcctctccgatttcctc

SEQ ID NO: 190814 - DNA, 774 bp, Gossypium hirsutum
gttcctaaaaccccattgtctcccactcttcattacattattctctttgtctttgtcctcctgtctaggcagttacagagagcatccattacacccgaaaccctatcatccatattttcacacctttggcgtttctaacaaaccaaactaccctactctaaactctgcagacctgttcaactataacattgaaattcgaacgagtgctcccaaagtagtcaatgtagatgatttcggagctaaagctaatggaagagacgattctcaggcatttaagaaagcttggaactatgcttgttcttcatctcaaggggctattatggtggtccccaagaagaagatttatcgtcttaagccaattaacttctcaggaccctgcaaatctcctcttctattgaagatctatggaacactcgaagccactgaggatcactcggattaccaagataatggaagacgatggctttactttgataatgttgaaaatttacgagtcgaaggtggaggcatcatcgatggtaatggcaaaacatggtgggaaaagtcctgcaaagtcaacaaagccctcccttgcaaggaagctccaactgctgtaaccttcaatgaatgcactaacctgagagtatcaagtcttcgtataaaagatgcacaacaaatgcacgttatatttcaaaaatgtgtgaatgtaaaagcatttaaccttttggtgacggcacctgggaacagtcccaacactgatgggcccaaatgcatgtgaccggaacccagaatatt

SEQ ID NO: 190815 - DNA, 444 bp, Gossypium hirsutum
gagaattagtcggattttgagagagtgaaacaaaatgagtatcagctgcgcgttgaaggtggttccgattgtgcttctgttggttcttttcgcgttagcgaatgccaagaaatcagctgatgtgaccgagctgcagatcggcgtcaaatataagcctccatcatgtgaattccaggctcataaaggtgatagagtaaaagtgcactatcgggggaaactcactgatggaaaggttttcgattccagttttgaaagaggtgatcccattgagtttgagcttggtagtggacaagtaatcaaaggatgggaccaaggattgctggggatgtgcgttggtgagaagcgcaaattgaaaatacctgctaagcttggatatggtgaacagggttcaccacccaccatcccaggtggagcaacgctaatatttgacacagagcttgtttc

SEQ ID NO: 190816 - DNA, 416 bp, Gossypium hirsutum
gggcaatgaaaaggagggatctcttgttgcggcgctattggagaagagaagatgatggaacatatgttatcctctaccactcagtgtttcacaagaattgtcccccgcagaaaagctatgtccgtgcctgccttaaaagtggtggatatgtcatatctcctgtgaatgaaggaaaacagtctgttgtaaaacacatgcttgcaattgattggaaattctggaaatcttatcttcgaacttcagcagctcggcctattaccattaggatgcttgagagagttgctgcattacgagaattattcagagcaaaacaagtaaaatatccttcggacaatctttcttctggagagttgatacggaaagttaggttgcaccagagtgtggaggatggcgcaattgatatgtgtacacaaata

SEQ ID NO: 190817 - DNA, 636 bp, Gossypium hirsutum
ctaccaaagatattgaggttgttagtgaagatcatttaactgatggtggccaaaattctgattcccaaacttcagatgtcccttcgaagactgaccaagagaggccacaacaccctcaaaaagagagttcacaacatgtaattgctgattctcatgataacttcgaagctaagttgaaagaagttgatgttaaagtcgaaactcctgtgaatcaaaagaaatcacaggagcaaaatgctgatactccacaaacggtagtccaggaccaacttgatgaggctcaaggactgcttaaaaccaccaattccaccggtcaatcaaaagaggcaagactagctcgggtttgtgctggactttcatcccgtctccaagaatacaaatctgagaatgcacagcttgaggagcttctaattgctgagagggagctgagtaaatcttatgaggctcgtataaaacaactgcagcaagatttatctgtatctaagagtgaagtaaccagggtagaagtcaaatatgcttgatgctttggcagcaaagaactctgagatagaggcacttggcaattctatggatgcactaaagaaacaagctgctttatctgaagggaatctggcatcacttcaagcaagcatggag

SEQ ID NO: 190818 - DNA, 506 bp, Gossypium hirsutum
  unsure (1)..(506): unsure at all n locations
ctcattttgatcttagcagagatctagcttgtcaccttttaattatttcaacgccgtatatagccgacgccgtccgataaaatctctcgccgccggtgtatggaaacaccgtgggtacatctctagtgcacggttttattacagattcattactcatggcttcgtggcttaaagtcgctgaagatttatttgaagttgtagatcgaagagcaaagctagttgctaatgatctgtcggaggagccacctgattctcaaacacaaggttcttcagcagaaaaaacaaagccaagggcaaaggcacaaaaaagactttctacaaaaagatctcccaaacctagtgatactataaacaagcaaactagttcagaagtactaaaatcttatgaggctcgtataaaacaactgcagcaagatttatctgtatctaagagtgaagtaaccagggtagagtcaaatatgctngattgcttggcagcaaagaactctgagatagaggcacttgtc

SEQ ID NO: 190819 - DNA, 1237 bp, Gossypium hirsutum
cttgcacactgactaaacttgttctgagactggaagaggtacagccttcaaaagttgaagttaacaaagcaaccacacaggcattgctgatctttgtctctatgctgcaattagggccatctccctggtcttccacacccaattgataatgattctaatgataggattgttctgtgcataagattgttgtgcgatactggtgatggcatcaggaaaatatggttgcaatcttgccgccagagttttgtaaaaatgctttcggagaaacagttgcgagaaaccgaggaattaaaggcaaaagctcaggtttctcatgcacaaccggatgaccttattgacttttaccatttaaagagtcgaaagggtatgagtcagctggaattggaggatgaggttcaagatgatttaaaacgtgcaactggagagtttgtcaaggatccagatgatgcaaataagctcaaccgcattcttcaactgactggatttagtgatccagtatatgctgaagcatatgtcactgtccatcactatgatattgttcttgatatcactgttatcaatcgaaccaaggaaacccttcagaatttgtgcttggagttggcaactatgggtgatctgaaacttgttgagcgtccacaaaactataccctagctcctgaatctagcaagcaaataaaagccaacatcaaggtgtcttcaactgagactggagtcatatttggcaacattgtttatgagacttcaaatgtgcttgaaagaactgttgttgttcttaatgacattcatattgatatcatggactatatttctcctgccgtttgtaccgatactgcattcagaactatgtgggcagaatttgagtgggaaaacaaggttgctgttaacactgtaatccaagatgagaaggaattccttaatcatattatcaagtcaaccaacatgaagtgtctcactccaccatctgcgctagatggtgagtgcggattcctggctgctaacctgtacgcaaaaagcgtatttggggaggatgcattggtaaatttgagtatcgagaaacaagcagacgggaagcttagtgggtatatcaggataaggagcaagacccaaggaattgctcttagtcttggggataaaatcactttaaaacaaaagggaggcagttgatttgcttgcagtatttcaacattatcaatttgttttctcccaaaactgttgcaggtatattagttctcgcatt

SEQ ID NO: 190820 - DNA, 775 bp, Gossypium hirsutum
  unsure (1)..(775): unsure at all n locations
tcgtccacgcgtgcgcccacgcgtccgcggacgcgtgggccttaatcatatcatcgagggcgacgaatatgaagtgtctcacaccagtatctgcgctagaggatagagtgcggatccctggcacctgacctttacgcgaagtgtgtttggggtggatgccttggtaaatttgagcgttgagaaacaagcagatgggaaacttagtgggtacatcaggataaggagcaagacccagggtattgctcttagtctcggggataagattactctaaaacaaaagggaggcggttgatctgtgggatgttgacatcatttgtttaaccaatactggtagtcattctggttttcgcttttgtcagctgctgcctgtctcaatctcctttgaaatgcaaaaaattattactgatctaaaaatgcaggtactttgcctgcattttaaagatagccgccttcatttttgttgtgttctctgtatctaggggtggtaccgatttcaagagatgacattgttgtatttgcagttacatatttctacagtaaaaaagggtcattgaacatttgttaaaaaaagatacttctttttggcgatgttaaaacaggattatcttttcgcggattctcgaaattgatagtattgaattcggagcttccttttgaaaaaaaaaaataggataaaaagatagaaacacaaaaacaaaaaaatatccngaaaaaaaattcattaactattccgatttaaaagtaggaaagttccacttaaaccctttttaaaatt

SEQ ID NO: 190821 - DNA, 868 bp, Gossypium hirsutum
gttttgttttgatggggcatttgaggtttctaagatgtagtattagctttttcaaattccaaattcattttcagaattcatcattttttaggtgatagaatcaagaggatacagggctcagtgactcagtcctgcagaaatgatgactgaagaagatgatctatatccatctagtgttaagatgagataccccattttcattttcttcaaggatgtcagacatgttttcaaactggacgaactgggatcagagatagcacaaattgctttgcctgcggcactggctttgacagccgaccctattgcttctcttgttgacacagcattcattggccaaataggtgctgtggaactggctgctgtaggagtctctattgccttattcaatcaagtctcaagaattgcaatattcccccttgttagcgtcacgacctccttcgtggcccaggaagatacaattggaagagtgagctctgaagcacaaggaagtgattacgtggaaacaggttcctgtgtagatactgaaagcaatgaagttaataccacaaaaagaatgtatcgagggtacatatcggccaaaaacacttggaagcagttttgatgttgttaaaattgagccggaaagaaggcatatcccatcagcttcatcagcactggttattggtggcatccttggtctccttcaagccttattcctgatttctggagcaaaacctctattgaacttcatgggaatcagttcagattctcccattgctaaccctgcacaacagtacttgactttaaggtcactaagggcctcctgcccgtcttctttccttaaccattgcaggtgtcttttgaggatttaaagacacaaaaacttctt

SEQ ID NO: 190822 - DNA, 770 bp, Gossypium hirsutum
gcgaacagcggattcattccacctctatcccagacttcttgtacttcgactgcatctttagactttgaaattgctatttctcaacttcccctcagagatttcactcatcagatttgtgcttggggttttcctcatctcttagttaaaaccatggattttagccatttaaatcgtgggcagatgactctgatgggatctgcgttttgtgtggtgctttcgttgcatttcacactgcagcttgtgtcacagcatcttttttactggaaaaaccccaaggagcagaaagctatacttattattattcttatggctcctatatatgctgctgtctcctttgtgggtttatcggatattagaggaagcaaagccttcttcatgtttctggaatctgtcaaggaatgttacgaggcttttgtgatcgctaagttcatggctttgatgtatagttacttgaatatatctattagcaaaaatattgtacctgatgaaattaaaggtagagagattcaccattcatttcctatgaccctttttcagcctcgaacagttaggctgaaccaccatacactaaagcttctcaagtattggacatggcaattcgttgtcatccgcccagtgtgttctgtcttgatgataaccctgcaacttcttcagttttatccatcttggttgagctggacattcacaatcatcctcaatgtgtctgtttcattagcattatactctttggtagccttttaccatgtctttgccaaagagttggaacctca

SEQ ID NO: 190823 - DNA, 424 bp, Gossypium hirsutum
aaaaggggtagcggtttgcttctttttcattgtcttttgtccattatgaatcacgtaatttcctatccagattttccctgtaatttctcctatcatggataatcaatgtaatatatttcttatttttgtccttattatcttctttctttccccctaaagttgtttagtggtttaaagctggcaagaaaatttgtttctcgagagagaactaaaatcctatatatgtagtaggaaaaaaaaattatcaaaatagatggaatagcaagtgatgatggtgaaagttggcatgctttgtggaggagccagcacgctatgtagatttcttttgtgtgtgtgtgcaattagccgacgacgaggcctaactgactttaaaacagatctctccagctccttgacaatggatgatctttctcatcggatttct

SEQ ID NO: 190824 - DNA, 906 bp, Gossypium hirsutum
  unsure (1)..(906): unsure at all n locations
ctcatacttactctttgtctttcagaaagatttgatacattccgaaccctactttgtgctgatggatgctctatgattgatcgaagaatgggtatttatggttatcctattgaaattcaagcacttttctttatggcattgaggtgtgctttatcaatgttgaaacatgatgctgaaggcaaagaatgcattgaaagaattgtgaagcgtttgcatgctttgagttatcacatgcggagttacttctggcttgacttccaacaactaaatgatatttatagatataaaactgaggagtattctcacactgcagtaaacaagttcaatgttattcctgattctatcccagactgggtatttgactttatgccaacacgaggtggctactttattggcaatgttagtcctgcaaggatggatttccgatggttttgtttaggtaactgtatagcaatactatcttctcttgcaactccagagcaatcaatggctattatggaccttattgaagcccgctgggatgaacttgttggagaaatgcctctaaaaatagcttatcctgcaatagaaagtcatgaatggcgaattgtcactggctgtgaccctaagaatacaagatggagttatcacaacggaggatcatggccagtgctgttgtggctgctaacggctgcttgcatcaaaacgggaaggccgctgattgcaagacgtgcgattgatcttgccgagacacgtttgttcaaagatagctggcctgagtattatgacgggaagctcgggagatatattggtaaacaggctangaagtaccaaacatggtcaatancaggatatttagtggcaaaaatgatgctggaggacccatcacacttggggatgatttcattggaagaggacaaacagatt

SEQ ID NO: 190825 - DNA, 392 bp, Gossypium hirsutum
cctcaactcgtcgattgtgttagcactatcagctcggggattcaaaatacaagcggtcttcgggttatcctaatctaagatcgcgttaataccgggtgttcacattatagaagaaggtgtaagatcagagcaccttgttgcaatgaggtttcttattgcagacattgccataatgaatctaagaattccccggaatctagtcctcttaagcaacatgacattccacgccatgaagttgaaaaggtcatttgctccctatgtgacacagaacatgatgtacaacagtcttgcatcaattgtggagtctgtatggggcagtacttctgtggtaactgtcaattcttcgatgatgatgtttctaaaaaccaatatcactgtgttgaatgtggcat

SEQ ID NO: 190826 - DNA, 612 bp, Gossypium hirsutum
aggaacaaccaactaagctagcccagtcaccccctccccaaaggaaaatatggcgccaaaatcgttctcatttccggggattttccctgcacttctcgcctcctcacttgctttactcctattaccgactccaatcatagccgtccacgactaccacgatgctctccgcaagagcattctctttttcgaaggccaaagatccggcaaactcccacccgaccaacgagtcaaatggcgccgcgactcggcattgcgcgacggctccactgctggcgtggacttaacgggaggttactacgacgccggggataacgtaaagtttgggttcccaatggcgtttaccacgactctattagcttggagtatcatagatttcgggaggaacatgaggccggagttaaagaacgccgttaaagcggtgaagtggtcgacggattatctgttgaaagcaacggcaaagcctggagtggtgtatgtacaagttggagatgcgtactcagatcatagctgttgggaaaggccggaggacatggacacgcttcgcacggtgtacaaaatcgacaatgcgcaccctggttctgatgtggcaagtgaaaccgccgctgcattggc

SEQ ID NO: 190827 - DNA, 376 bp, Gossypium hirsutum
caggaatccccataatcgtcactgaggggagatccagcgcgatgcctagctttaacacctgcagacctgcaaaggctcctactgcaaatggggatggaacatttgtgtgcagtacagtcgttgttgcaaggagtttccctgaccggccataaaccaccagacccgatgccgaattaaaacttcttttatcaaaagttgcgtcgaattgaatcgtcaccctaacaatagcctctcgttgactgtgacttctacccgtattcaaggtacattttctctccattaaacctttgatttcagctatgtatgaatttgttcctcgagctccagatgaaccacagtccacaacaaaatattttacatgttcagaagtactcgt

SEQ ID NO: 190828 - DNA, 444 bp, Gossypium hirsutum
ctggaatctgtttttagaataatatatgctgttatttgacggtatatgtatcaagatgtatatttcacagccttaccttaagcagcaatcttcatgtgattagacattatgtcattggcttaacaatgtctatgtaaatccttactctagttttttctgatatttctcttgaagatggttgttgtatgtgggggatcatatagacgtggaaaagctttctgtggagatttagacattgtaattacacatcctgatggaaaaaggtttaaattctaattccttctttggcttctgtccttacttgtcctagctaactgactttgttcaaaagctaattattttacttatctgcttctaaactgcattctactaatcattttaaaaagaaaaaggacaagtattacatgtttttgttaactctattaattagctacgaaagtaaac

SEQ ID NO: 190829 - DNA, 386 bp, Gossypium hirsutum
aatatgtgctttcttttatttctcatttatttgtgttgtagtcgtgtgacaagagttatccaaatccattacaaaataatccagcttattcagttgtcgagcagtactttgttgatgaggatgataccgtcactgagaagattgttgtgcacaaggaaagtgcaagaggggtgcattttcgacgcgcaggacctcgccaaaaggtgtattttaaaccagatgatgttaatgcatgcattgtaacatgtggtggtctatgtccttggctcaacacggtcatcagggaaatagtgtgtggcctctatcacatgtatggtgtccgaaaagttcttggaatcgatggaagatataagggtttttatgcaaagaacactatcaccttaaca

SEQ ID NO: 190830 - DNA, 750 bp, Gossypium hirsutum
gtttgccgcttttacagcaactgaggccgcaacaggttcctctcggtatcaacactggggctacaatccaggccgtgaacactgggttatcaggtggtccgtacatgaacccggtttcgacgcgggttgttcagccgcacgacccggaaaagaaaatgatgaatcaacttcaagatctggagaaacagctgttggacgacgataacgacgaaggagacgctgtttctgttattaccaataccaacagtgagtggtctgaaacgatacaaaacttgatcggttcaaccggcagccctaacaacccgattgccccatcacctacatcaaccacttcatcgtgctcgtccacgtcatcgacggcttctccagcttcaccttgttcaaagcagacaatattggatgccgcagctgctatttccgagggaaaaaacgacgtcgttaacgagatcctgacccgattagctcaagctgctaactcaaaaggtagctcagaacagaggttgatggagtgcatgctatcagctcttaaatcgagggttaactcggttgaaaacccaccaccggtggccgagttgttcagcaaagaacacgctgcttcaactcagttgctttatgatctgtcttccttgctttaaactcgggttcttggctgctaatcaggcgtatcctccatgccactttagacaaaccaagctgtaataaagttcatggtggtggatttagattatggggtaggggggcagacatgaa

SEQ ID NO: 190831 - DNA, 391 bp, Gossypium hirsutum
gagatatccaggggaagttcattttcatcctcttcgagagctcttcaaaatctacattcatagcttctgatgctgatggaactgtacctttcttctggggaaccgatgttgatggccatctggttcttgcagacgatgaggagaccgtgaaaaagggctgtgggaaatcttctgctccattcccaaaagggtgcttcttcacatcctctggagggttaaggagcttcgagcatccccagaacgagttgaaggcagtgcctagggtggatggttcaggtcaggcctgtggtgctacgtactgtgtggatacagagacgaagaaggaatcaaccggaatgaagaaagtcgacagtgctgcgaactggtcgacaaactactgagcctcaaaacg

SEQ ID NO: 190832 - DNA, 819 bp, Gossypium hirsutum
atctactaacatcagctgaaacattgctaaaatacttttacgagaaggttttatcgataacgtaaggaaacatcgggaacgcaacagatattttttggttttaaccctacgacatagacggaatggaaaaggaccacatagaacttttttaaatttacgacggatcagtcgaccaggtctacgaatctattctaactatcaacaaattcctaggattttaggcgggatggggattgtaattctttctacttctcggggtataatgacagaccgggaggctcgactagaaggaatcggtggagaaattttgtgttctatatggtaatctgtccggtatacgaattgtatccgaaactctccatttgtgcaaaaaaaaaaagaaaaaagcacgggttgtctaatagaactcctcctgccctacggtagttgatacgtcaaggaagttttacctggaataaaagaacaaaaaaatggattcataaaggtttaatttaataagtaaatcactcccactctggattcttttagataatgaagatctgattttaggttatgtttcggaagagttttaccaacgtgggatagagtcaccaaaagtgaagtaagtgcttatgattcaaccaggggggcgtataatttatagacttcgcaccaaggattcgaacgattaggtagttttttcaacttcaagatttctttcggggggatccaattcaaatttcaagaaagttattttcttccaataagcgaattcggaaaaattttaaggaataccacctatgaaaataagggcttccgttcgtaaaatttgtgaaaaat

SEQ ID NO: 190833 - DNA, 619 bp, Gossypium hirsutum
tggcggccgctctagttcttacgcgtattgtccttccgcacgaattcggttttaggctcttggaatcgatggaggatataagggtttttatgcaaagaacactatcaccttaacacctaagtttgtcgatgatatccataaacgtggaggtacgattcttggaacttctagaggaggtcatgattctgtcaagattgttgaccgcattcaggatcgtgggatcaatcaggtctatataatcggaggtgacgggacacataaaggagcagctgtgatttttgaggaaataaggcgacgtggtttgaaagtagctgttgctggaattcccaaaaccattgacaatgacattccggttattgacaaatcatttggtttcgatactgcggttgaggaggctcaacgtgccattaaagcagcacatgttgaatctgaaagtattgggaacggcattggacttgtaaagctaatgggacgctatagtggtttcattgcaatgtatgctactctagccagccgagatgttgactgttgcttgattccagagtcaccattctatcttgaaggaagtggtggactttatgaatatattgagaaacggctcaaagaaaatggacattat

SEQ ID NO: 190834 - DNA, 418 bp, Gossypium hirsutum
cgcaggtatttttcttttctttttatttggttgggaagttctcttatttcggcattcaattgatgaatcttctttttcctttttcatgtcggtttcctttgttgatagatagttcgaaaccatctgttaatgctaattatggtgttgttatctagaatttattagagaaataagaaaatttaagtgaaagaaaaattaaacatggggtggtcagtaatattccttgtgtttcgatatgtaaataagttgaatcaaattattatggcttgatcaccaagtttgtaaataagcatgcagggatggaaatggctcaactcatatgtggaggttgtcgaacatttctaatgtatacatgtggagcagcaagtataaaaatgttgcaccaggtacaatttaatgattttgtgcatgtgatata

SEQ ID NO: 190835 - DNA, 427 bp, Gossypium hirsutum
atggttttgagggttttttaatagttgattggtggatatagagtagtgggtagcggtgagatggataaaaccgcacaagaaaaggagcctaaaacacttcctgctagtagttctcaggagccatcttcaaccactaattcagctggtccagcaaatgcagactggtcaggatttcagcaggcatattctcccattcctccacatgggttcttggcatcgagtcctcaagctcccccatatatgtggggggttcagcatattatgcctccatatggtaccccaccacatccttatgttgcaatgtatcctcatggtggaatatatgcgcatccatccattcctccaggatcctatccttttagtccttttgctatgccttctcctaacggcattgttgaggcttctggaaatactcctggaaacatgg

SEQ ID NO: 190836 - DNA, 896 bp, Gossypium hirsutum
ccctattcaagccatgacttttgatgtgattcttgatggcactgatttagttggccgcgcacgaaccggtcagggtaagacactggcctttgtgttgcctatattggagtctttaacaaatggccctggaaaatcgtcaaggacgtctggatatggaagggcaccaagtgttctagtacttttaccaaccagggaattggctaaacaggtttttgaggactttgaagtttatggtgaggcagtggggttgacatcatgttgtttatatggaggtgctccttaccacgcccaagagatgaaactgaagagaggggttgacatagttgttgggactcctggacgtgtaaaggatcacatagagaggggcaatattcacttaggttcattgacattccgagttcttgatgaagcagatgaaatgttgagaatgggatttgttgatgatgttgaacttatattaggcaaggtagcggatgcaagtaaagttcagacagttctttttagtgccaccttgccagactgggtgaagggtattgcttcaaggtttcttaaaccaagtaagaagactgttgatctagttggtaatgagaagatgaaggctagtaccaatgttaggcatattgttttgccctgttctaaatctgcaaggtcacagttgatcccagatattatacgttgttatagcagtggtggacgaactattatatttactgagacaaaagattctgcctctgagcttgctggcttattgcctggatcccgggctttgcatggtgacatacagcaggcccaacgtgaggtcactcttaatgggttccgctcagggaagttcatgacattagtggctaccaatgtggcagctaggggattagatatcaatgatgtgcagttaatca

SEQ ID NO: 190837 - DNA, 450 bp, Gossypium hirsutum
gcacccagtgaactgaaaaaagaaaacccggaattttaaagacaaaaaaatgccttcttctccgttgattcttctctcaaaaaccatgattttcccagaccaaaaatcaaaccttgaagacctcaagctttcagtttccgatcttcctatgctatcttgccattacattcaaaaaggttgcctctttactcgcccttcaatccccattaattcactgatttcccttctcaaacaatccttgtccaagacgctgtcgtttttccctcctctcgccggccgtttttacacagacccaaatggttacatttacattacttgtaacgacgccggcgttgaattccaccatgccaaatgtgacaccaagttcatccgtgacgtcatcggtcctgttcatgtaccacaagtggttaaagagtttttcacctttgataaaacggtgaggtatcgagg

SEQ ID NO: 190838 - DNA, 762 bp, Gossypium hirsutum
  unsure (1)..(762): unsure at all n locations
gaaaaaaggagtcaataagcaaaacagtataaagaaaaagtaccgaaatggctgacgttgctccgggaaatgccggcggtcacttcggagattttccggcgtttcatacctacggcggtcaatttattcagtacagtatttttggaaacttatttgagatcacgtctaaatatcggcctcccatcacgccaatcggtcgtggagcctacggcatcgtctgctcggtgttgaattcggagacgaatgagatggtagcggtaaagaaaatcgccaacgctttcgataatcacatggacgctaagcgtacgcttcgtgaaattaagctcctccgacatttggatcacgagaatgttatcgcaattagagatgtcattcctccgcctttgcggagagattttactgatgtctacattgccttggagctcatggataccgatcttcaccaaatcattcgctccaatcagagtttatctgaggagcattggcagtatttcttgtatcaaattcttcgaggactgtaagtcatacattctgccatgtcattcatagagatttggaacccagcaacctcttgctgattgctaatgggatcttagatttgcgactcgtgctggcttgcctactgctgagaatgagtatgacctgaatgttgtcacgaggtgtttgagcaccgagatattcgtaactctgagactactctgcggcctatctggtcggactgtgtgctctattgatcctgngatggatactctgtcgcggcag

SEQ ID NO: 190839 - DNA, 1071 bp, Gossypium hirsutum
cctcaacacattaaaaaaaagcaagtcaacagaatacaaaagggccaacgttgctccgggaaatgccggcggtcacttcggagattttccggcgtttcatacctacggcggtcaatttattcagtacagtatttttggaaacttatttgagatcacgtctaaatatcggcctcccatcacgccaatcggtcgtggagcctacggcatcgtctgctcggtgttgaattcggagacgaatgaaatggtagcggtaaagaaaatagccaacgctttcgataatcacatggacgctaagcgtacgcttcgtgaaattaagcttctccgacatttggatcacgagaatgttatcgcaattagagatgtcattcctccgcctttgcggagagattttaatgatgtctacattgccttggagctcatggataccgatcttcaccaaataattcgctccaatcagagtttatcggaggagcattgccagtatttcttgtatcagcttcttcgaggactcaagtacattcattctgccaatgtcattcatagagatttgaaacccagcaacctcttgctgaatgctaattgtgatcttaagatttgcgactttggtctcgctcggcctgccgccgagaatgagtttatgacggaatatgttgtcacgaggtggtatcgggcaccggagatattgctaaactcttcagactacaccgctgccatagatgtctggtctgttggttgcatcttcatggagctcatgaataggaagcctctgtttccaggcaaagatcatgtacatcaaatgcgtttattaactgagctgctcggcacaccaactgaatccgatcttggatttctccggaacgaggatgcaaggagatatatcaggcagctcccagcacatccgcgccaatcactagcagaagttttcccacatgttcatccattggccattgatctcattgacagaatgttgacatttgatccgaccagaaggattactgttgaagaagcattggcacatccttacctcgaaagatacacgacatatctgatgaacggtctgccccgaccatt

SEQ ID NO: 190840 - DNA, 842 bp, Gossypium hirsutum
cttcttctttgctaaagaccatcgaatccttccctctctttccagtttcccgatcaacacaacatggctttcgatggttttgtctccgacaataccaaagacatgcaaacccttgctctaaacgaaccaccgccatcagctgctgacatcgatcattgggaaagagctaaatgcaaggccgagataatggggcaccctatgtacgaccagttgctggaagctcatgtcgcctgtctacgtgttgctacgcctgttgaccagctcgctcagatcgatgctcagttagctaggtcccaagatgtgttggctaagtactcctcggccgctgctgccgccggttctgctgaagaagaactcgatcacttcatggcaaattatgttctattgcttggtttcttcaaagaccaattgcaacaacatgttcgtgttcatgcaatggaagcagttatggcttgttgggatcttgagcaatcacttcaaagtttaacaggtgtatctccaggtgaaggcactggtgcaaccatgtctgatgatgaagatgaagttgtagatagtgataccagcttgtttgatggaagttttgatgggattgacagcatggggtttggccccctcgtcccatccgagactgagagatcactaatggagcgtgttaggcaagaactgaagcacgagctgaaacagtgttacaaagagaaaattgtggacattagagaggaaattctacgtaagagacgagctggaaagctaccaggcgatacgacctcgtttttaaaagcttggtggcagtcacattccaaatggccttacccaactgaagaagacaaagcataattagtaca

SEQ ID NO: 190841 - DNA, 693 bp, Gossypium hirsutum
tagtcgttggcgcgtacttgtacgcgtacacggccttcaatgaaattacggctttccttgtattcatgcaattaatgttggattatcatatcggagcagctagtattgcccgtagcttagctagctacgtggctaccattttcgagctcatccctgctttgaaaggaaacatacctccctgggttggtcatggtggtcaagaattctttggaggaactttgtctatcaatatcctggctccgattcttcttgccgtgttgactgttatcctctgtcttggtgttggagaatcttctgctgttaattctttcatgactgcagccaaggttgtcatcgttatttttgtcattattgttggatctttcaaagttgatgtagataattggtctcctttcgctcccaatggtgttaaacatatatttacgggagcaaccgtagtattctttgcatatgttggatttgacgcggttgctaattctgctgaagaatcaaagagacctcagcgtgatttgccaatcggaattttgggaagtctgcttgtatgtgttattttatacgttggtgtttgcttagtgctcaccgggatggtaccttacaacctccttggcgaggatgctcctttatctgaagcgtttacatccaagggtttgaaatatgtttcttatttgatcagtattggagctggtgctgggc

SEQ ID NO: 190842 - DNA, 425 bp, Gossypium hirsutum
aagactcaataaaatttcactctctccactttaacgcgggggctcagcccctcttctctctctattcgctcctcttttcgtgattttgccccagcgggtcaatttgggggcaaagctaaatctttcctcgaaaccctagattaatgtccgcttagggcatgtccatatcccctctcgcatcttttattgatttattaattggtaaacaagtcgaggttattgttcgagaggactttcgaatatggcgaatgtagctgcgcatggtgcattaacttctgctttcgttgcaaatcggtggggatgccctgaaagttggtccaacagttaaaaggaagaccccttcggaactcataggggatcagttaaagcgaaccaatgttgctgagcttgttagtaaatctttggccccaagtgagaaggataat

SEQ ID NO: 190843 - DNA, 748 bp, Gossypium hirsutum
aagagatctttttataagaactcttccaaggattatttcgttattattatttctacaatctaaagagacagagcaatgggaaaaacagagcaaaattcagttcttttaatcccaattttcttctttttattaacaatatcattgcctgtctctgtttatgccaagaaaccagtggcgattcctcgaaaagaagacgttcctcatattaaatgtcaagtttgtgagaagatagcatcacagttggttcaacaagttcaatcgaaacataacccagatctctcccaagaagatctcagaatatcaaatcattgagattgcggagaatgtttgcaatttgaagaaagaagaagctgattggattttgaagattgatatagttgaacaaggggataaattagagctagtggaacaagatgctgaagggatttgcaatacagagtgtaagacaattgagagaacttgtcaagaggttatggggtattctgatactgatgttgctgaatatatatacacgtcgaaacctgatgttgagtcattgacgaattatctgtgtaaagacttatctaaggcatgcaaaaccaagcctcccccactaccaaaggataggactccgggagaaccttttgtaccgaaaccaactaaataggctgaaatggaaaagatgttacgatccatggagggtattccatgagcacccaacatttcaaaaggattctagggaggagctaatgtacatgaagaatttcgg

SEQ ID NO: 190844 - DNA, 400 bp, Gossypium hirsutum
gagaagattgagtcatgtgagaaaagttattaaaggaaaggggcatgaaggtagtgcctgggtgtgcatcaattgaaattgatggctttgttcatgagtttgtgatgggagattggcatcatcccgaggcaaaggagataagacaggctttgagggttattgctgagcgagttagtgatgctgggtatgaatctcaggtttctgatgtgttacacaatgttggtaatgaagagaaaggaatttatttgtgtgagcatagtgagaggcttgctattgcttatggaattttaaagacgaaagcaccagtgccaattagaatagtaaagaatctaagagtttgcatcgattgtcatgaagtgacaaagatcatcagtaaaatctatgagcgtgaaataattgt

SEQ ID NO: 190845 - DNA, 455 bp, Gossypium hirsutum
ttaagatgctatatgatgggcgaccagtggatctaactcctgaacaagaggaggtggcaacaatgtttgcggtagtgcaagagactgattacatgagtaaaccacagttcaagaagaatttctgggaggattggagtaaattactggggagaaaccatgtcattaagagcttggacaaatgtgatttcactccaatctatgagtggcatttgcaggagaaagagaagaagaagcaaatgagttctgaagagaagaaggctttgaaagaagaaaaattgatgcacgaggaaaagtatatgtgggctattgtagatggtgtcaaagagaaggtaggaaatttcagagttgaaccacctggacttttccgaggtcgaggagagcatcccaagatgggaaagttgaaaagacgtattcgtccatgtgacattaccattaatatcggaaaggatgcccca

SEQ ID NO: 190846 - DNA, 1298 bp, Gossypium hirsutum
gcttaaaacacactgacctcagaaagagcacccaaaagaaaaaacactgatcaacgaaggatttctagggttttttttcggtatcagcaagcgatggcaatggctgctctcagacgcgaagggaggcgtttcgcccctctgatctctccccgtccaattactgctgtccgatcctctcctatcgttcccactcacgaagatgagggtccgattggtgttcgttatatttcaacccaagtcgttagaaaccggatgaagagtgttaagaatattcagaaaattacaaaggctatgaagatggttgctgcctcaaagttgagagcagttcaaactaaagctgagaattcccgaggcctctggcagccatttactgcacttcttggtgatcttcccagtgttgatgtcaagaagaacgttgttgtaaccatctcttctgacaaaggtctctgtggtggaattaactctacatcagtcaagataagcaaagggatctataagttgaactctggccctgaaaaagaaacaaaatatgtaattctgggagagaaggcaaaggctcaattggttcgtgactcaaagaaggacattgagttgatcataactgagctgcagaagaatcctttgagctacactcaggtctctgttcttgctgatgagatcttaaagaatgtggagtatgatgcgttgaggattgtcttcaacaagtttcactcagtagtttcatttgtgccgacagtctcaactgtattatcacctgaaattgttgaaagggaagctgaatctgggggaaagcttggtgatctagactcgtatgaagttgagggtggtgagacaaagggcgaaatacttcaaaatcttgcagagttccagttctcttgtgtaatgttcaatgcagtgttggagaatgcttgtagcgagcaaggagcaagaatgtccgctatggatagttcaagcagaaacgcaagcgacatgcttgatcgcttaactcttacatataacagaacccgtcaagcatcaattaccactgaactgattgagattatatccggagcatcggcattggaaggttgaacaaaaagaacaagtgctatgttttcgggacagtgatgaaataaaatccgagtgaacaactgctatgttcggacttgttcatggtgctactttgtgaaacagtttggtggagctagtgcgaataatgacctatccattgtcaagtgcaatgtaaatgtgattttatttttgatcgatcattcattgacatcagaataagttggtaagcatttagagattggacgaat

SEQ ID NO: 190847 - DNA, 627 bp, Gossypium hirsutum
aaaccggagtcccgatcattttattaggaacagtaaaacacttccctactggagctggtagcaattacgtcaaaacgcccaaacgcgtgggaaaaaaaaacactttcatccacgacagcaaggatttctagggtttcgtctgaatcggtaagcgatggcgatggctgctctcagacgcgaagggaggcgtttcgcccctctgatctctcctcgtccgataaccgctgtcagatcctctcctctctatcctactcttgaggatgagggtcctcttggacttcgtcatatttcgactcaagttgttagaaaccggatgaagagtgtcaagaatattcagaaaatcacaaaggcaatgaagatggttgcagcctcgaagttgagagcaattcaaacaaaaactgagaattctcgtggcctctggcagccatttactgcacttctgggcgatcttcccagtgtctgatgtaaaaaacgtttggtgtcacatctctcaacaaggcttggggggaataactctactctgcagatagcagggctcataagtgacttgcacaggctgaaagaacaattgtatttggaagaggcaagttatagtcgatctaaagactgatatctacgacgcagatc

SEQ ID NO: 190848 - DNA, 791 bp, Gossypium hirsutum
  unsure (1)..(791): unsure at all n locations
gatatttctattttgggttcttttttacatgaggcctgatagtctaaacgtttattcttgtctttggatttttcttatgtagcccgtttcggcaataagagttgccgatagtctaatctggctagggtttgtgtcatttgatgctacttgattattctcatgagatccatgaattttttttatgctagttgattaatgaaaattttggccacttgggcactttatgcttaaaaaaaagaaaaagagaaaaataaacaaagaactttgtcattgatacacgaacaatttctagggtgtgtccgtatcggtaaccgatggcgatggctgctctcaaaccccaagggaggcgtttcgcccctatgatctctccccgccctattactgccctccggtcctctcccctcgctccctctctccaggatgagtgtccccttggagttcgttatatttccaccccagtggtcagaaaccctatgaggagtgtctagagtattcacaaaatcaccaaggctatgaagatggttgcagcctcaaagttgagaccaattcaaactaaagctgagaattcccgtggcctctggcaaccttttactgcacttcttggcgatctacccagtgctaatgttcaaaaaaaccttgttgtgaacatctcctcagaacaangtctctgtggtgaaattaattccacatcagttcaacattaacaaggggctccaccaattgaaatccggttcctgaaaaaaaaaacaaaatattttattttttgggaaaagaaggcacaggctccactt

SEQ ID NO: 190849 - DNA, 407 bp, Gossypium hirsutum
gttgatcacgggtacttcaataacagtgaaaagtcgggtactgcatatggaaaattatctgcctatatgtggctacttcaatcattcagatgttgcatatggaaaatttgcctgtcctgtgatatctatttatctacataggatagtttgtactctcacaaaattataaaataatgacatgttcagtcgatgaaattgctgatcccaggttactgctgccctcgcacaagctggcctcgagtcctctaacctcatcgttggtatcgatttcacaaaaagcaacgaatggacaggtgcaaggtcattcaaccgcaaaagcttgcatcacatcgggaatggccaaaatccctatgaacaagctatatcaattattggacagagcttatccgcttttgatgaggataact

SEQ ID NO: 190850 - DNA, 426 bp, Gossypium hirsutum
ctgggacattctgatagctttaacgtattaaaagtggtggggaaggacattgttgaggcaattaagatgggtgttgatccacttcctgttcatagtggtctggggggtgcctactactttaggaatcccacaggtgagaatgttgctatcgtgaagccgacagatgaagaaccttttgcaccaaacaatccaaaaggctttgttggtaaagcccttggtcaaccaggtttgaaacgttcggttcgtgtgggggagactggtttcagagaagttgttgcctaccttctggaccatgattattttgccaatgtgccaccgaccgcgctggtgaagattactcactcagtcttcaacattaatggtggtgtgaacagaaataggcctcacacgaatctggttagcaagattgcatcgtgccatacagtt

SEQ ID NO: 190851 - DNA, 952 bp, Gossypium hirsutum
gaagaaagaaaaatcagaaacaattactactagtattattagcttgatatgatatatttacgtttccagcttttgaccatccgttctaacaatagcaaaagaatctccaacccaaacacgacatgtgtccccgaagctcatagtttgctgtctctgcagttttcccattgaaatcgagggattacgcccccaggcccaaagccaaattctcccctttctttctctaatatagtttttttcctgtagaaaaacacaagccaatatctttgcaaaaggaagatagtaatacgggacatgaagagttgtgcgtgtttttaccgcccagtgattgtggccaaatccatcgaccagaaagacatgagctttgtatcgacaaatagagtggcgttcggtgctggggttttatctcaagctacaacaaccgcaaggtccaagggttcaaaggttttggctgtcagagcttctgctgttgattcctatgggagctcttccgattttgttgagcgtatggaaaaagcttggctcatctctcagcaaccgaggccagttgtttgttcttcatgcaactccaaggggcacgttgaatgccagtggtgtagaggtacaggcttctttatccttggggataatatgctctgccaagttccttctaggaataccacttgcgtgatttgtgctgggaagggatcaacgtgcttctctgactgcaaaggaactggatttcgggctaagtggttgggtgaacctcctctttccaatagtatataatttctctgttattgtctgttgccaaatgttgtaagttgtaaaaccaccataaaatttatttgttttgcccgttgaatagcgtaccttctttgtctccaaattgtaatcacaccatgtattcgtacaatcttatctccttataaatgagagaagaaacaacaattgttacttattgattgaaaaa

SEQ ID NO: 190852 - DNA, 727 bp, Gossypium hirsutum
cccacgcgtccgatagatatggcttcggctgtattcattgagccactacctgttatggggtttgttgctcagctactaggcaaggatttattgtcaaggccattgtctgattccgatcgtgtgaagattaaaaaggcactcagaggagtgaaagtcgaggtaacccatagagggaatgtacgtagaaaataccgtgtttcaggattgacttctcagcctactagagagttagtgtttcctgttgatgataattcaaccatgaagtctattgttgaatacttccaagagatgtatggctttacaattcagcatacacatctaccttgtcttcaagttggaaaccagaagaaaggcaaattatttacctatggaggcttgcaaaatcgtggagggacagcgatacacgtaaagattgaatgagaggcaaattactgctctcttgaaagtcacatgccaaagaccgagggatcgggagcatgacattttgcagacggttcaacataatgcttatgatcaagatccttcgcaaaggagtttggaataaaattagtgaaaaactcgtttggtcgaggcttgattcttcctgccccttgctgaaattcatgaacttgaaagaaaggattgttgctcagtgggcatggacatgattgacagaatgttacggatgctggagcatggctgtttactctacaacgtcagaatgtgctcaggtttgatgactgctaag

SEQ ID NO: 190853 - DNA, 1066 bp, Gossypium hirsutum
aaaactttaaacaggatgacttaatcatgaataaaagattagtgtttgtattgcagatttaaaggcaacatgggagcaggcggaaagacagaaaaagtgcaagcttttttgcccataaaaaatttgaaataggtctataaggccagttgttgaagaagaagcagatcaatggcgaaggagttggaaggattcaatttcgagcaaaggcatggaaaggcgagggtgagagtgggcagagtttggaggagcaaagatggatgccgccacttcatggtcgaatggaatgttaacatcagcttgctttccaattgcgttgccgcttatgtccgcgatgacaactctgacatcgtcgctactgacaccatgaaaaacactgtttatatcaaagcaaaggaatgttcagaacaactttcagcagaggagtttgctattctacttggcaagcacttcacatcattttatccacaggtttttactgcaatagtaaagatagtggaaaagccatgggaacgcatttctgtcaatggccaaccacatgaacatggctttaaactgggatctgaaaagcatacaacggaagcgattgtacagaagtctggtgttttacagctgacttctggtgttgaaggcctgtctttgctgaagacaacccagtccggatttgaaggattcatcacggacacaatacacagcacttcctgaaacacgagaaaggatgcttgcaacaaaggtcacagatttttggaggtattcttatgaatatggctctaacataccttaaaagtcgctctactttaatgagcaatacttgaatgtgaaaaaagcttttggtgatacttttttttgggctcctgaacaggggtgatataatgcctctttttatagcaccttttttcagatggcaaaggctgtactttgcagggttgttggcaaattattaattaactataaaaagcccaaatccctttttaaccggggaatatataacaaggttcccgcgcttttttaattcatgagaaggttattttccccgggaaacttcgggtcttaaaattctttgcccctg

SEQ ID NO: 190854 - DNA, 1681 bp, Gossypium hirsutum
  unsure (1)..(1681): unsure at all n locations
cccacgcgtncggtttttctctcgtatactgtcgttctttgcggtttgaagataaacccgattattcctatttgaagaggcttttccgagacttgtttttaagagaagcgccccccccccctttttgttgatctgttggaggcttggagttgtcaatttagtaaatcccttagctttgaagatagtgttttgtttttgtttggcttgagaatggataatgtgattggtggtaagttcaagcttggaagaaagattgggagtggatcttttggagagctttatttaggggtaaatgtgcaaactggagaggaagttgctgtcaaactggaatctgtgaagaccaagcatccacagcttcattatgagtcaaaattgtatatgcttcttcaaggaggaactggtattcctcaccttaagtggtttggagttgaggcggattacaatgtcatggtaattgaccttcttggacctagtttggaagatctgttcaactactgcagtaggaaactctcattaaaaactgtgttgatgcttgctgatcaattgattaatagagtagaatatatgcattcgaggggttttcttcaccgtgatataaagcctgacaacttcttgatgggcctaggacgcaaggcaaatcaggtatatatcattgactatggtcttgcgaagaagtatagggatcttcaaactcataagcatatcccatacagagaaaacaagaacctcacaggcaccgctcgttatgcaagtgttaacactcaccttggaattgagcaaagccgcagagatgatttggaatcccttggttatgtgcttatgtatttcctgagaggaagccttccctggcaggggctaaaagctggcacaaaaaagcaaaaatatgataagattagtgaaaagaaggtatcaactcctatagaggtgctctgtaagtcatatccgtctgagtttgtctcgtattttcaccactgccgttctttgcggtttgaagataaacccgattattcctatttgaagaggcttttccgagacttgtttataagagaaggttatcagtttgactatgtctttgactggactgtattgaagtacccaaagattggtggcagctccagagggcggcattccagtggaagggcaggtttagctgctggaccaaccattgaaaaacccgaaagaatctcagtgggaagagagattcgggatagattctccggtgctgttgaagcattttccaaaagaaatatttcaagttccagtccccatcttgatcattctagacacaagactgttgatgatggggctttgtcaaagcatgcgctccctgattcagataaaagatgcagttcttctcgatatggtagcacttcaagaagagctgtagtagcaagcaggcctagttcatccgttgaagccaacgacgcatcgcaaaaccgactaacatcaagtggtggccgcatgtctaccacacaaagaattcaacttgcctttgaatctaagacatctagccgagccacccctgttagaggaagccgtgatgatcatcctcttagaaagtttgagttcctctcgattaggaaataatggcattgaatgtcaatcctgactcaatgtttccaagaacttatattctcactctgtatatgggatatctcaccagaatcactggccctacagc

SEQ ID NO: 190855 - DNA, 429 bp, Gossypium hirsutum
gaattctacaggacgcttttgtattgtgtagggtgtttcagaagagcgggtctgggccaaagaatggggagcagtatggggccccttttattgaagaagaatgggaggatgatgaggcagtttttgtgcctggtcaacaagatgcatctgcccatgaagaggctgccaacgaagatgcttttgttgaagtgaatgatattgatcagaatcttgacgttggcaatccatctgaaaacaatatccttccgttgaacggctattgtggggaatcaagcaaccatgtggaaaattcaagggagttcagtgaagacgatcaaaacccacgaaacagtatgcatgagaatgcattcctcccttccagtttctattatggcgaatcaagcaactgtggtgaacattcaatggagttcaaagaagattatcagaagc

SEQ ID NO: 190856 - DNA, 776 bp, Gossypium hirsutum
  unsure (1)..(776): unsure at all n locations
aaacattcattgctatcttcataactcttccattcctcatcatcgtcttctagtctggatctcttgcccaacgaccttccgaaggcgagtcatgcaaattcggttctccttgtaccaggtaagaggtgactccgctctctaaagcttcttttgcaatctgatgggcacgtatattatctgatcgggggatatgcttgaactctattgtttgaaaatgaatgcacctcttctgaatatctcgaataattacttctatgactgatttgtctgtttctgttgtttgacacttcctgattactgttattgaatcccctctgatttgtaattcacgaaaacccaataaaatctctaaccgaattgcttccaatcctgcatatgtttctgccgcgaacggagatggcacattattgtgaaggactgactctgatgccaaaagttcatcaacacttcnngagcagatctgggagttcgcttgtcgacgcagcgtcgaatatatctaatcattgggtgcttctatgataaaatccgttcatgtactaccgattctgagtccatatagcataagcatacaaagagtcacttgctctagttctgcgagtaccagcttatcccaacaacgcgggcacaagcttataccttntgtctaggtacaggtgcaatattcaaatcgccattgatggatttgagagtgggctcaatgtgaaattttatcactgatagctccgatagaaaccgaattagccccaggatccatgtcctcaatgtgatagatatta

SEQ ID NO: 190857 - DNA, 796 bp, Gossypium hirsutum
gtcttctagtctggatctcttgcccaacgaccttccgaaggcgagtcatgcaaattcggttctccttgtaccaggtaagaggtgactccgctctctaaagcttcttttgcaatctgatgggcacgtatattatctgatcgggggatatgcttgaactctattgtttgaaaatgaatgcacctcttctgaatatctcgaataattacttctatgactgatttgtctgtttctgttgtttgacacttcctgattactgttattgaatcccctctgatttgtaattcacgaaaacccaataaaatctctaaccgaattgcttccaatcctgcatatgtttctgccgcgaacggagatggcacattattgtgaaggactgactttgatgccaaaagttcatcaacactccggaggcagatctggaagttcgcttgtcgaacgcagcgtcgaaatatatcttaatcattgttgtcttcctatgataaatatccgttcatgtactagccgatttctggagtaccatattagccatagagcatagcaaaagagtcgactctgctccttagttccctgcagaagtacccaggtaagccaatcccgaaactcaggtattgagttgttggtaacccatgaaaggtttaacatctgccaagcttctaaacttgtaagacattgtctaaatatgtgcgagcagtctttatcccccaaacaaccgcgggggcagcaagcatttatgagcacccttctgctcctaaggtttacaagtgtgtggcaaataattccaaaagatacgccaaat

SEQ ID NO: 190858 - DNA, 671 bp, Gossypium hirsutum
cttgcccaaaaaataaacattcattgctatcttcataactcttccattcctcatcatcgtcttctagtctggatctcttgcccaacgaccttccgaaggcgagtcatgcaaattcggttctccttgtaccagcgaacggagatggcacattattgtgaaggactgactttgatgccaaaagttcatcaacactccggaggcagatctggaagttcgcttgtcgaacgcagcgtcgaaatatatcttaatcattgttgtcttcctatgataaatatccgttcatgttctagccgatttctggagtaccatattagccatagtgcatagcaaaagagtcgactctgctccttagttccctgcagaagtacccaggtaagccaatctctttatcccccaaacaaccgcggtggcagcatgcatttatgagcacccttctgctcctaaggtttacaagtgtgggcaaataattccaaaagatacgccaaattgtatttgtgatttctgtaggaagttgtaggctccaaagtttgctgtaaaaattttttaatccgatctgtaatataatgctactaggatttagcgaagaatcctgtgatagtttatatggcgctccgaatggtgaattccccagattgttccgccttccaaactagacggtcaacatagttcat

SEQ ID NO: 190859 - DNA, 1455 bp, Gossypium hirsutum
ataaattttcttctcgttcccgttagccccccacgaacttaggcaaagcagaggctagagagatgtcggcggcggcggcggcgacaagccgagcgactcgacggatgggagccgaggatgagaagctagtgttcgaaacgacggaaggaatcgagccgatattgagttttgatcagatgggactaaaagacgatctcctccgtggaatctacaattacggcttcgaaaagccatctgctatccagcagagagccgtcatgccgataatcaatggccgcgacgtcattgcccaagctcagtctggtaccggtaaaacttccatgattgccctcaccgtttgccaagtggttgacacagctagcagagaggttcaagcattgatactgtcacccacgagggaactggcttcacaaacggagaaagtgatacggacaattggtgatttcatgaacatacaagcgcacgcgtgtattggaggcaaaagtgtgggtgaagatataagaaagctagaaaatggagttcatgtagtgtcgggaactcctggtagagtttgtgatatgatcaagcggagaaccctacgtacaagggctattaaactattgattctcgatgaatctgatgagatgttgagccgagggttcaaagatcaaatttatgatgtttaccgacatcttccaccagaacttcagggttgtttgatatctgctaccctccctcatgaaatattggaaatgacgagcgaatttatgactgatcctataaggatccttgtgaagcgtgatgaattgactctggagggaattaagcagttttttgtagcagttgaaagggaagagtggaagtttgatacactatgtgatctttacgacacgttgacaatcactcaagctgttattttctgcaatacaaaacgaaaggtcgattggctaactgagaagatgcgtagcaataactttacggcatcctcaatgcatggagatatgcctcagaaggaaagagatgcgattatggctgagtttcgggatggtgcaacccgtgttcttatcactacagatgtttgggccagggggctcgatgttcaacaggtgtctctggtgatcaattacgacctgccaaacaatcgagagctttacatccataggattggacgttctggtcgattcggacgaaagggtgttgctattaatttcgtgaaaagcgacgacatcaagattcttagagacatagagcagtactacagtacccagattgacgaaatgccgatgaatgtcgcagatctgatatgagaaatgctttcataagtgcttggaccggaacttgaagggtacggttgaacattttccatggtgttggtgtaatcgaatcatctatcttgttgcatgtttgtgtgtgattgggtttggatgcttacgcggaggtcgaattactgaatgttttttcgaacagattaagcat

SEQ ID NO: 190860 - DNA, 506 bp, Gossypium hirsutum
cccacgcgtccgcgttctggtcgattctgtttaaagggtgttgctattaatttcgcgaaaagcgacgacatcaagattcttagagacatagaacaatactaccgtacccaaattggccaaatggccatgaatggcgcaaatctgatattaaaaatgctttcattagtgcttggaccggaacttggaaggtaccggtggacatttttcattggggtggggtaattcaattaatctatctggtggaatgttgggggggaatggggttggattgctacccgaaggtcaattaactgattgtttttcgtaccaaattaaccttttaactatcaaaacacagtgattttcgtgcttttgttcactgttgtatgtatgtgtagttggattgctcaaatttctatagttttatttattattaccaagagtttgttagggattttaaagggttttgaagtctcgtccctcttcttcaccatttatttttatggttttggagtttgaatttgttc

SEQ ID NO: 190861 - DNA, 425 bp, Gossypium hirsutum
  unsure (1)..(425): unsure at all n locations
atagagagcatgttgaggattggattcagaaacatcattaatggcttcatatgtagagcctcacttcctcagagcttttataacagggaattatcgacacaaaccggaaggctgaaaggcaaaatagcattgatcactggggcagcaagcggtatcgggaaggcagctgcagcaaaattcatcagtaatggtgccaaagtcgtcattgctgatatacaacaccaactagggcaagcaacggcgaatgagcttggacccaatgctacttttataccctgtgacgtaacgaaagaatcagatgtatccgatgctgttgactttaccatctccaaacacaaacgactggatgttatgtataataatgctggggtaccttgctacacgcctncgagcattgtggaccttgaccttgccgtttttgacag

SEQ ID NO: 190862 - DNA, 450 bp, Gossypium hirsutum
caccaataagttttttagaaattaaaaacttgtctgggttgccaaattgcaaatcaaatttcgattgaatcagacacaatttcttttttcaattttataatgaagaacaaaagggcgagaacgagtgtggacaaggcggtggttgatgtttggcaacgggaagttggggaactctccactaggaatttcgcccaccggcttgccgcttctgaggatcttgtgctccgactcgagatttacaagaaactcaaaaagcaccgaggttgtgtgaacactgtgagctttaatgctgatggtaacattttagtatctggttctgacgataagagggttatactatgggattgggaaactgggaatgctaagcttactttccagtcaggccatgtcaacaatgttttccaagcaaaaatcatgccttactctgatgatcgcagcttggttacctgt

SEQ ID NO: 190863 - DNA, 415 bp, Gossypium hirsutum
aaagaacttttcctccccagtggatctttcagcatatgatggttttgagttgcgcttaaagggtgatggttgtcggtataaactaattgttcgcactagcactgattgggatacggtgggttatacagcaagctttgacaccattggaggccaatggcagtctattcgtttgccattctcttcactgaggcctgtatttcgagcacggactgtatctgatgctctacccttcaatccaagtaatgtcgtatcatttcagctcatgttcagcaagtttgaatatgatgggaaactgaatcccacttttgtagaaggaccttttgagcttccactctctaccattaaagcatacattaaggatcctatcactcccagggttgtacacgtgagctttgcaggagttactagaccggac

SEQ ID NO: 190864 - DNA, 1274 bp, Gossypium hirsutum
acctcctcagtaagtctggctcaaataaaccagacgactcaatgggggaggaaccttcatggtaacttctgcaatttctatctccccagttttcaccttcatactccaaaattataaatccccgcttccccaattcctctttctccccaaattcaattttcgtctttccttaacctctctcatcttccaaactaaaaccaaacaaccagctcaaagcttgcaaccatggccttccgccttagcaacaatcttgttggaatcctcaacttcataaccttcctcctctcgatccccatcctcggagccggcatctggcttagtcgagaaggcgtgacggaatgcgaacggtttttggacaagcccgttatcgtaatcggagtcttcctcatgctcgtctcacttgcgggactaatcggcgcgtgctgtcgcgtcacttggctactctggctttacctagtcgtcatgttcctcctcatcgtgctcggcatcgtcttcaccatctttgctttcgcggtgacgaataaaggtgctggagaagctttgtctgggaaagggtacaaggaataccgacttggtgattactccaactggttacagaagagagtcactagccagaagaactggaataagattaagagctgtttggctgatagtaaagtctgtactgatttccgcgataagtatctgaatgcttctgcctcggagttttcccagacgcatttgtccgccgttcagtctggttgctgtaagccatcaaacgactgccaattcacgtatgttgggccgacgaactggaccagagggagtgcggaatccaacaatcccgactgcaatttatggaataacaacttgaatactctatgcttcgactgccagtcatgcaaggctggatttatagacaacctgaggagttcttggaagaaggtggcgattgtcaacattgtgttcctcatcttcctcattattgtctactctgttggctgctgcgctttcaggaacaataggagagacaattattatgagcagcagacctggaaaccttgagcgaatctttgttcttagtttccgattttggatatgggtacacgtacgttgggtctgggctgctgtatttgcttcctattgttgtctgcaaatccagccttgcatgactggcagtcgaagcatagagtattcaagttgttattccataaattgcagtcggaattgttggattccgcactccctctggtccagtttgtcggtacaacatacgtgaattggcagtcgtttga

SEQ ID NO: 190865 - DNA, 590 bp, Gossypium hirsutum
tcgcccacgcgttcgcccacgcgttcgcccacgcgtccgcccacgcgtccggaaaatctttccagtttcaattttctcacaacaaaactgaaaatgtcttgctgttcaggaaaatgtggctgcggcgctgattgcaagtgtggcagtggctgtaacggatgcagtatgttccctgacataatagagaagactacaactgagactattgttcttggtgtggcaactcagaaaatgcactttgagggatctgagatgggagttggggttgagggtggatgcccgtgtggagacaactgcaaatgcaacccttgcacttgcgggaagtgaacaacaaagagaagcagagtggcctttgtcattttaactaaataaattctattactttagtatgtatcagcaaatcttcatgaggatttggttcttaattatgtgtaatgtggcttttctgctatgtcagaatgtattatgatatttaagaaagtttgttttctattgaaagaatggcagttctaaaaaaaaaaacatcaaaaaaaaaaatatataatatttctttaatttatttacaaactttaatttataataatattaag

SEQ ID NO: 190866 - DNA, 582 bp, Gossypium hirsutum
  unsure (1)..(582): unsure at all n locations
ccctcgcgtccgcggacgcgtggacaacaaaaaaaatctttccagtttctattttctaaaaacaaaactgaaaatgtcttgctgcggaggaaactgtggctgcagctctggttgcaagtgtggcaatggctgtggaggatgcaagatgttccctgacataatagagaagactacaactgagactattgttcttggtgtgacaactcagaaaatgcactttgagggatctgagatgggagttggggttgagaatggatgcaagtgtggagacaactgcacttgcaacccttgcaattgtaaataagagggggggaaaatgaacaacaaagagaagcagagaggcctttgtctttttaactaaataaattctattactttagtatgtatcagcaaatcttcatgaggatttggttcttaattatgtgtaatgtgggcttttctgctatgtcagaatgtattatgatatttaagaaagttttttttcaattgaaagaatggcagttcctttctctttgactaaataaaaaaaagaaaatatgattacatacatnnnnnnnnnnnnnnnnnnnnnnnnnnnnnnnn

SEQ ID NO: 190867 - DNA, 1638 bp, Gossypium hirsutum
gccggaaaaatctctgtcttaacacagagtttggcaagcgagagaaacaaaatccgaagggaatcccaatttcttcgcttttcatcttctctcgcttccatttctccgtttttcccccctccggcaatggctatcgattctgattctttcaaacaatcacttctccctagcttcctttactcttctgctcccaactcattctctctggatcgactcctcaacgccaacagccctgctttctctgcttcgcgctccactatacccgatgctcctgcggcctcttcctcgccatcgatcaaggcgagaactttcatgatcccctcccccaatgagcccgggaagaagatcgagatgtattcgcctcagttctacgctgcttgtacctttggcggtatccttagctgtggtctcactcacatggccgttactcctcttgacctcgtcaagtgtaatatgcagattgaccctgcaaagtacaaaagtatctcatctggttttggagttctactaaaggagcaaggagtgagaagcttcttccgtggttgggttcctacccttcttggttacagcgcacagggtgcttgcaagtttggattctatgagttcttcaagaagtactattctgaccttgctggacctgaatattttgccaagtacaagactctcatctatcttgccggctctgcatctgctgaggtgattgctgatgttgcactttgcccctttgaggcagtcaaggtcagggttcaaacccagcctgggtttgctaggggtctgtctgatggtcttcccaagtttgtcagatcagaaggtgctctcggattgtacaagggtattgttcctctttggggccgacagattccatataccatgatgaaatttgcttcttttgaaactattgttgagatgatctacaagtatggtattcccactcccaaggagcagtgcagcaaaaatctgcagcttggtgttagttttgctggtggttatgttgctggtgtcttctgtgctattgtttcgcatcctgctgacaaccttgtctccttccttaacaatgccaaaggagcaactgttggggatgctgtgaagaagcttggattatggggtctgtttacccgtggtcttcccctccgtattgtgatgattggaactctaactggagctcagtggggtatctatgatgctttcaaagtgtttgtggggctgccaactactggtggtgttgctcctgctcctgcggctgtggagcttgccaaggcatagaatgttggaaatcctgttgtcatgggggacaagtaaacataggattgctggaatggtttgtcaagctggtggaaggatattcttttttgcgttgagaacatttttatcaagtcgctctgttttgaaaaaaactgttggttctaggagaggatggttttgatctcatcctccaaactacggagactaattatttttgtaatagttagatcataaatgaaatttcatttgaagatcaatcccccccttctgtagcagttaaaaataaggagcagatgcagatggggacgatactgcttactttaccttgttaagcaagctttttaatgtaatattgagaacttttgttcggctttctttaacaaaaaaaaaaaaaaa

SEQ ID NO: 190868 - DNA, 609 bp, Gossypium hirsutum
cttaacaatgccaaaggagcaactttggggatgctgtgaagaagcttggattatggggtctgtttacccgtggtcttcccctccgtattgtgatgattggaactctaactggagctcagtggggtatctatgatgctttcaaagtgtttgtgggactgccaactactggtggtgttgctcctgcacctgctgccgtggagcctgccaaggcatagaatgttggaaaacaagtaaacataggattgctggaatggtttgtcaagctggtggaaggatattcttttttgcgttgagaacatttttatcaagtcgctctgttttggaaaaaactgttggttttaggagaggatggttttgatctcatcctccaaattacggagactaattatttttgtaatagttagatcataaatgaacaacaaagagaagcagagaggcctttgtctttttaactaaataaattctattactttagtatgtatcagcaaatcttcatgaggatttggttcttaattatgtgtaatgtgggcttttctgctatgtcagaatgtattatgatatttaagaaagtttgttttcaattgaaagaatggcagttccttttaaaaa

SEQ ID NO: 190869 - DNA, 633 bp, Gossypium hirsutum
cgaaaagaaggggtaaaagaacttcaatagtttgagtttagggtttttagatcgaagattatggggcgttttgctcttctccttttactagctttcgcttcatttcaagccctttgcttcgccgctgatgatgatacggtcttttatgactcatttgatgagccttttgacggacgatggatcgtgtccgataaagatgattacaaaggtgtatggaaacattcgaagagcgaaggacatgatgactacgggcttcttgtgagcgagaaggcacggaagtatgcgatagtgaaggagctcaatgagcctgtgagtctcaaggatggaagcactgtgcttcagtttgagactcgctttcagaatgggcttgaatgtggtggtgcatatttgaaataccttcgtcctcaaaaggttgattggaaggtttgggttttttcacagtatattgcttactttttattgttggacttaaaaattggggtcccatatggtcactttatttgagttttaattctatagtggtatttttatcaatatttaatattcaccttctgcgattttatgtattagtgtcctggtattgagttgtaatggttaatttgtttgtataatatataagtttttcttctattg

SEQ ID NO: 190870 - DNA, 560 bp, Gossypium hirsutum
cgttttgaaggggtaaaagaacttcaatagtttgagtttagggtttttagatcgaagattatggggcgttttgctcttctccttttactagctttcgcttcatttcaagccctttgcttcgccgctgatgatgatacggtcttttatgactcatttgatgagccttttgacggacgatggatcgtgtccgataaagatgattacaaaggtgtatggaaacattcgaagagcgaaggacatgatgactacgggcttcttgtgagcgagaaggcacggaagtatgcgatagtgaaggagctcaatgagcctgtgagtctcaaggatggaagcactgtgcttcagtttgagactcgctttcagaatgggcttgaatgtggtggtgcatatttgaaataccttcgtcctcaagaggctggatggaaggctaagggatttgacaatgaatccccttactctatcatgtttggacctgacaaatgtggagccacaaacaaggttcacttcatcttgaagcataagaatcttaaaagtggggaatatgtcgaacatcatcttaaata

SEQ ID NO: 190871 - DNA, 822 bp, Gossypium hirsutum
  unsure (1)..(822): unsure at all n locations
cccatctctacttccatttcatctgccatcaatttgctctgaagatcatgttggctatttttcacaaggcatttgctaatccaccagaggagctgaatagtccagcttctcataaatctaccaagaagcctaaacagcctgaagaaaccctaaatgatttcctatctcatcaccctcacaacactttctccatgagctttggcaacgctgctgttttggcttatgtccgccatgaacgtgctgcttcagttcatcagaggttgttttgtgggtttgatgacatatactgcctcttcttagggagcttgaacaatctatttatgctgaatagacaatatggtctttccaaagggagcaatgaggcgatgtttgtgattgaagcatataggacactgagggataggggtccataccctgctgatcaggttgttaaggatcttgaaggaagctttgcctttgtgatctatgacagcaagactggaaccgtgtttgctgcactggggtctgatggtggagtgaagctgtattgggggattgcagctgatggctctgtggtcatatctgatgatttagatgtcattaaagaagggtgtgccaaatcctttgctcctttcccaactggattcatgttccacagtgaaggggggctgatgagctttgagcatccaatgaacaaaatcccgcattgccgaggtaacagagtaagatgaatggggctnatttcaggggagttacaggaggattgatatccgtgtgggagcgacaatgggcggaccggagccattattgttgtaaaggagggaccattgccttgaaggcggg

SEQ ID NO: 190872 - DNA, 699 bp, Gossypium hirsutum
  unsure (1)..(699): unsure at all n locations
cggcacgagaaaaaattccttttttttcaatcttctctccctaaaaagcgtccatttttttcctctttaaaatccctctatttctctctttcttcacaacaacaacaaaaaagtttcaattcaatctcaattattcatgtcggaggacaagggtcgtccattaccgaaattcggtgaatgggatgtcaacgatcctgcatcggctgaagggtttaccgtgatttttaacaaggcaagggatgagaagaaaacaggtggcaaacccgagtcaccagcaagagctgatgctcacggtgaacccggaccggatcctagcaaaccccagagtaagaaatggctttgctgcgttcaagcaccccccgctgaatcttgatgaaagtccggcacgtatacgagctttcacaagtacattcaagcccctcaccatggattcttaaacaaagataagatttacttatggtgggagggggagaaaaaaagataaacacacatactgtatctatatgtactaatttggtgggttattgtattattagaagctaagctgagtttatttgttggtgtcatttgccttgttcatgttataagctgtaaagcttgtattgacattcttttcttcatatcatacgagggattcgcgtgtttgtcnaatttttaattttttttaaaatttttataattttaatattttataatttt

SEQ ID NO: 190873 - DNA, 683 bp, Gossypium hirsutum
  unsure (1)..(683): unsure at all n locations
cttgaaggaagctttgcctttgtgatctatgacagcaagactggaaccgtgtttgctgcactggggtctgatggtggagtgaagctgtattgggggattgcagctgatggctctgtggtcatatctgatgatttagatgtcattaaagaagggcgtgccaaatcctttgctcctttcccaactggattcagggtccacagtgaaggggggctgatgagctttgagcatccaatgaacaaaatcagggcaatgccgagggtagacagtgaaggagtgatttgtggtgctaatttcaaggttgatgtttacagtagagttaatagcattccacgagtgggcagtgcaaccaattggactgatcactgggattcccattaattagtatttaaaaagaggagagagaagcaaaattaaacataagagagatgccatgaatatgctctagacaaacaccggggtttcttctgtttttcatcctagttgttggtttttcttttggtacttttctatgttatatgttggttgtgttggtttaatttctttgggatattatagtttcaatcttaattccaatttattaaatgtgtacccaatatccaaatcaatgcgtttgtgatccaaactgtcctttggtcccaatacatattatgattnttcaaattaaacattatcattatttcaca

SEQ ID NO: 190874 - DNA, 1776 bp, Gossypium hirsutum
cataaattattatatgtatcaaggaggaacaaattttggccgaactgctgggggtccattcattgctaccagctatgattatgatgctcctcttgatgaatatggactaaagaggcaaccaaagtggggccatttgaaagatttgcatagggctataaagctctgtgaaccagctttagtaaatggagatcccactgtgattcgacttggaaactatgaggaggctcatgtatttaattacaaaactggaggttgtgcggccttccttgcgaattacaacccaaattcttacgcaaaagttgcctttaggaacatgcactacaacctacctccttggtccatcagcattcttcccgactgcaagaatactgtgtataacactgcaagggttggtgcccaaattgctcggaagaagatggttcctgttcccatgcatggaggactctcttggcaggcatacaatgaagagactgcttcagatgctgacagttcattcacaatggtcgggttgttggagcagataaatacaaccagagatgcaactgactatttgtggtacacaacaactgttaagattgacccccatggaaggattcttgaggaatggaaaatctcctgttctcactgtcttttcagccggccatgctttgcatgtttttgtcaatggtcaactatcacgaagttcctatggaagtctagaattccccaaactaacattcaaccaacgcgttaatctgagagctggtgtcaatacaatttcgcttctaagcattgctgttggtctccccaatgttggtccacactttgagacatggaatgccggtgttcttggccctgttacactgaatggtctcaatgagggaaggagagatctctcatggcagaaatggtcttacaagattggccttaagggagaagccttgaatcttctttcgctaagtggtagttcatccgtggagtgggcacagaggtcttttgtctcacaaagacaaccactgacatggtacaaaacaactttcaatgctccagctggaaattctccattggctttagatatgggtagtatgggcaaaggccagatttggataaatggaaagagcattggacgccactggcctgcatataaagcatctggaaattgtggtatctgtagttatgccggaacatttaacgagaagaaatgtggaactaattgtggaggggcctctcaaagatggtaccacgttcctcgttcatggctcaacccaacagggaatttgttggttgtgtttgaggaatggggtggagatccgaatggaattactttggtacgccgagaaactgacagtgtctgtgctgatatctacgagtggcaaccgaacctaatgaattacctgatgaaagcctctggtaaagtcaacaaacccctaaggccaaaagtgcatttagagtgcgatgctgggcaaaaaatctcagcagttaagtttgccagttttggaacaccaggaggagtctgtggaagctaccgcgaaggaagctgtcacgctcaccactcttatgatgcttttactaggctttgtgttggacagaacttctgctcagtgactgtttcacccgaaatgttttggaggagacccgtgtccaatgtgttgaagaaacttttgggaggtcatttgagctgttgaacctttgaatctttgatagaactaataatttctttattcctacctattctccgatactgtgtttaagtcattagatgctatcatttattgctttactggtgaatagaccaat

SEQ ID NO: 190875 - DNA, 593 bp, Gossypium hirsutum
  unsure (1)..(593): unsure at all n locations
gcgaaggaagctgtcacgctcaccactcttatgatgcttttactaggctttgtgttggacagaacttctgcacagtgactgtagcacccgaaatgtttggaggagacccgtgtcctaatgtgatgaagaaactctctgtggaggtcatttgcagctgatgaacacatcagaaacatatgaaagaaacaaatcattttctctatatccaacccgtcactccgtattcttgtctttcaagtaaacttaagatcgcaaccatttattttggcttttactgggggaagttgtacaattatacaacacgccccttggcaaaaagcttattagatggtgaagtgattgcagaataagctctatgtatatacccaaatacgtattcctgcatgatatatagaacacccacaaagcaatggaaatccgtagaactgcgcatgaacanagcccgagtctgccanaggtcctggtgnttagataacatgaacgtctggttctggataatagggattgcttgaagtctattattgaacaattggaacatctatatgtttgtctgaagatataatctgtcttcttagaaaaaaaaaaaaaaaata

SEQ ID NO: 190876 - DNA, 503 bp, Gossypium hirsutum
gttatttgcagctgatgaacacatcagaaacatatgaaagaaacaaatcattttctctatatccaacccgtcactccgtattcttgtctttcaagtaaattaagatcgcaaccatttattttggcttttactgggtgaagttgtacaattatacaacacgccccttggcaaaaagcttattagattgtgaagtgattgcagaataagctctatgtatatacacaaatacgtattcctgcatgatatacagaaaaccgaagaagcaatggaaatccgtagaagctgcgcattgagacaatgtacccagtccatgcgcaaagtgttctgttgtttaggataagcagggaagcctctggcttctggtagtaaatgagtggattgtcttgtagtcttatatatttgaacaatctgggaagcaatcttatcattgctttgtttctggaagataataaaatcatgtctttcatcaaaaaaaaaaaaaaaaaaaagggcggcccgctcgc

SEQ ID NO: 190877 - DNA, 421 bp, Gossypium hirsutum
gcaagtttcaatggcaaaggcaaacattctcttggttttcttgtgttcactgggattgctactgcttgggggtgttggagtggaaggaaatccgaattacagagatgcactacaaaaatcctttctcttcttccaaggccagagatcaggcaagctgcctgccaatcagaaagtttcatggaggtccaactctggtctttctgatggctcccttgaccatgtagatttgactggtggctactacgatgctggagacaatgtgaaatttaacttcccaatggcattcaccaccacaatgctttcatggggtacacttgaatatggaaagagaatgggtccccagttacaagaggcaagggcagctatccgttgggcgactgactatctcctaaaatgtgccaattccaagcccggaaagctc

SEQ ID NO: 190878 - DNA, 426 bp, Gossypium hirsutum
cggagacggagaaacatttgcgccatgagaaacattacaagtatattagctctcatgatgttgcttattgggctcggagttttgatcaggacctcgtgagagcttgtagggatcattatcacaagaggtattggagagttggacttggtttagcgtttaggcttgttgctttggagcctaacttcaggaagctcctaggggatactctcaactctgcctacaagataaccagtagccgattgatccttttggactacgatggcactatgatgcctccaacttcagtgaacaaggggcctagtcatgaggttatttcggttttgaatcgtttatgcgatgaccccaaaaacattgttttcattgtgagcggcagggaccgggataccctgagccaagtggttttcttcatggtgagaaatgggtatt

SEQ ID NO: 190879 - DNA, 636 bp, Gossypium hirsutum
ctcttttcccaacttgtttccctctctcttcataccttttcaaactcttcaaataccagcaaacgatgcccattcccttctgcattatccttctcttctagccttcttttccttcctttttcttttcttgggggtggggtatttcaacaatggcgaaggctgctaatgttgacaaggtgaagcggttaagaggttgggtgcaaaactacgattggggaagatgtggggcggaggcacaggtggcaaggctattggctttgaattccggggccgaggttaagcccgataggccttatgctgagttttggatgggaacacatgactcggggccaagttttttggctgatggctatggagaaggtcaaaatgtgggtttaaaagagtggattcggaagaatccgaatgtgcttggtcataaggttttggaaaaatgggggcccgatcttccttttctcttcaaggtactttcagtggcaaaagccctttcaatacaggctcatccggataaagaattggccaaagaattgcttaagttgaagccaaatctctataaggatgggaatcacaaacctgagatggctttggcaattacagagttcagggccctttgtggattcattactctcgaggagctga

SEQ ID NO: 190880 - DNA, 924 bp, Gossypium hirsutum
gttccatccatcaaaccatataatataatattccttatatgtatatatatatattattctcttgtttctttgaattatttcccaatattttctcattatctatttcttctctaattccttagaacacccttttgactcttttacagcttttgaactttctctttaatttgatttcattttttgttcatcttatttcatagatccaatacttacttctttcaacgtattaaacaacaaaatattgaattgaagctctagatctaaagcatatattggagccatgtcttttattggtacccaacaaaaatgcaaggcttgtgaaaagactgtttacccagtggaacttgtatcagtagatggggtccctttccataagtcttgcttcaaatgcagtcattgcaaagggacactaaagttgggtaattactcctcgatggaaggtgtcgtttattgcaagcctcatttcgagcaactgttcaaggagtcggggaatttcaacaagaatttccagtcacctgcaaggtcagctgagaagttaactcccgagctgacaagatcacctagcaaagccgccagcatgttttccgggacacaagaaaaatgtgctacttgtggcaaaactgcttatccactcgagaaggtaacagtggaaggacagtcgtaccacaagtcatgtttcaaatgctctcatggtggctgccctataactccatcaaattatgcagcacttgaaggcattttgtattgtaaacatcacttctcccaactttttaaggagaaaggaagctacaaccaccttatcaagtctgcatcgattaagcgcgcagctgcctccgttccagaagcttaaatccgtgtgttaatatccatatcatttcgattttttccttctttcctcgtgattgccggtgtgtttgatttatg

SEQ ID NO: 190881 - DNA, 627 bp, Gossypium hirsutum
  unsure (1)..(627): unsure at all n locations
gtacccttcttcaacaccaatctcctctctctctctctctctctctattttgtttgatagaatacccagaaaaccccttcagtcttctagctctcaatttctttttattttttaccttcttatttcatagatccagggtgctcttcttcttagttcacattggcatagataaaggaccgtacggtcagatctaagccgtattctagcgatgtcgtttaccggtactcagcagaaatgcaaggcttgtcagaagaccgtttatcctgtcgaacttttgtcggctgatgggatcccttaccataagtcttgcttcaaatgcagtcattgcaaagggacactaaaattgggtaattactcctcgatgaaggtgtcgtttattgcaagcctcatttcagcaactattcaagagtcgggggaattcaacagatnttcagtcactgccaagtcagctgagagttaactccgagctgcaagatcacctacaagctgcagcatgttttcgggacacaagaaatgcgctactgtgaaaactgttatcactcagaggtacgtggaggcgtcgacacagtatgttcaatgcttatgtgctgccatactcataattgcgactgaagcatgatgaactcc

SEQ ID NO: 190882 - DNA, 582 bp, Gossypium hirsutum
tagttctccagtaaccaacaaaggtcccccacataaaaaacaaaaaaaaaaaggggagggtgaagaagaagaagaagaagaggagatttaactatggcagaaacccagagccgtggccttgttttcgccgggaagaagagaggaacaggaaccgatgactttgacggggatgatattttcgtggctaagaaatcaatgttgcccacaatggcatcggaaagcgaccctgccgctgcattagccaacgctcgccatgaattcggtgaacatggtggtgttaacatgtccattgaagcctccgccaccttcaccgtcatggaacctgagaccatgcgccgtatgttcgccggtgaactcggtcctgatcgtgatttcttcatctatagccgtcattttaaccccaccgtcttaaatcttggccgtctcatggcagccctggaaggaaccgaagctgcttattgcaccgctagcggtatgtctgctatatcatccgtgctgttgcaactctgcagcagcggcggacacgtagtggcatcgaggaccttatacggcggcacccatgcactcttaacacatttcttt

SEQ ID NO: 190883 - DNA, 558 bp, Gossypium hirsutum
ggaaccctttccccctcgcttgcccacctccgtttcctccaaaacctctccgtcgccgataacaagcttaccggtcctatcccgacggagctcgctgtcctatccaatctccgttacctaaacctttccaacaatgttttcaatggttcctttcctacccagctttcccagctgaaaaatctacaggtactcgatttatacaacaagtaacatgacgggggagttgccggtttccgtcacggagcttcccaatttgcgtcacttgcatttgggagggaactatttcagcggtcagatcccgtcaagttacggccgttgggagcatcttgaatatttagccgtttcgggtaacgaactcagcggtaaaatcccacccgaaatcggcaacctaacgaagctgaagcagttgtacattggctacttcaatagtttcgaaggtggtttgccgccggaggtcgggaacttgtcggaacttgttcgttttgacgccgctaactgcatgttatccggtgaaataccgccggagatcggtaagttgcagaagctcgacacgttgtt

SEQ ID NO: 190884 - DNA, 785 bp, Gossypium hirsutum
gttaagcaaaactaataaacatcaacaataaatcggaattccccagcagcaatggctactccaagtgtagagtatttgcctcctccattggatgctactgcacagcaacccgctatctttgatggaacaatcaggttgtatctggcttatccttgcccttacgcacagcgcgtgtggatcgccaggaattgtaagggtttgcaagacaagattaagttggttcctttgaaccttcaaaatagacctgcttggtacaaggaaaaagtttaccctgaaaacaaggtgccgtccttggaacataatggcaaagtcattggggagagtcttgatttgattaaatatgttgatagcaacttcgaagggccgtctcttctacctgatgatgctgacaaaaaggagtactttgagacgacgttatcacacatggacgaatttctagggctggtgtatgctacatttaaaggagactcaacaaaggatgctgatgctgcttttgatcacttggaaactgctcttgcaaaatatgatggtccattcctcctaggcaacgagtttactctggcggacattgccttcattccttttgtcgaaaggttccagatctacttatcagaggtgtttaattatgacctcacagcaggcaggcctaaagtggccgcatggattgaggcggcggacaagatcgatgcctataagcagacaaagaaaactgatccaaaagaattagtggaaatttataagaagatattctcaccccagaagtgaagatgaaattggcaccatgt

SEQ ID NO: 190885 - DNA, 406 bp, Gossypium hirsutum
ccaaattaaaagcttaaaccaacaaaaaaaaaattgaagcgggcacactccaacaatggctaccgaaacagtagagtctttgcctcctacattggaagctaatgctgagcaacctccattgtttgatggaactaccaggttgtatacttcttatccttgcccttttgcacaacgtgtgtggatcaccaggaattataagggattgcaagatgagattaaacttgttcctttgaaccttcaaaatagacctgcttggtacaaggaaaaagtttaccctgtaaacaaggtgccatccttggaacataatggcaaaatcattggggagagtcttgatctgattaaatatgttgatagcaactttgaaggaccttctcttgtaccaaatgatcctgacaagaaaaggacc

SEQ ID NO: 190886 - DNA, 1334 bp, Gossypium hirsutum
ataaagagcaagttgttactcgaatgaaagctgctggggctagtaaacaacatggacaggaagacatattatgttcccttatagctgatgcatgcatccaagtctgccccaagaaccctgcaaattttgatgttgataatgtccgtgtgtcaaagcttgttggagggggtttgcataattgtacaattgttagagggatggttttaaaaggtgatgctgtgggaagtataaagcgtatggagaaggcaaaggtggctgtgtttgccagtggcgttgattcatctgccactgaaacaaaaggaactgtattgattcactcagctgagcagctagagaattattctaaaactgaagaagctaaggttgaggaactcatcaaagcagttgctgattctggtgccaaagttattgtcagtggaggagctgttggtgaaatggcgttacatttctgtgaacgttacaagttaatggtcttgaaaatcagctcaaaatttgaactgaggcgtttttgccgcactacgggaacttctgctcttttaaaactcagccaaccaaagccggatgatttgggatttgttgattcaatttcagtcgaggaaattggtggttctcgggtcactgttgtgagaagcgaagaaggtggtaacaagattgccactgtggttctacgaggaagtactgatagtatattggatgatcttgaaagagctgttgatgatggagtgaacacatataaggcaatgtgcagggacagtcgaatggtacctggagctgcagctactgaaattgagttggctagaagattgaaagagttctccttcaaggaaacaggattggatcagtatgccattgccaagtttgctgaaagttttgaaatggtaccaagaaccctagcagagaatgctggtctcaatccaatggatatcatatctaagctgtatgaaaaacatgcatccggaaataccaaagtgggtattgacttggggggaggtgactccgaggatggtgtttgcaaagatgtgtcaaccctgaatatttgggatctttatgtcaccaagtttttcgctctcaaatatgctgctgatgctgcctgcactgttctacgggttgatcagattataatggcaaaaccagctggaggtcctggaaggagagagcagcctgcaggaatggatgaggactaagtcttctaatctgcaacatgatatgccattcctttctttttttctcatcagggctggttcggactttgttaggcatcttcggagatgctaaaaaccctttgaaacaaagttttgcttttgttttgaaaattgttatggttctgtgttttc

SEQ ID NO: 190887 - DNA, 834 bp, Gossypium hirsutum
  unsure (1)..(834): unsure at all n locations
gtaattcccaccgagcggcgggtataatcctttgcagacgaatcgaagcggcggagggctgaatctcagtggatcgtggcagcaattgcgtgagccgctatagttacgattccctccagcctagattcttataattgtgtttcccctctgcaaaggctttattcttcattcgcttcgttgaatttctatcttcttttgatctgaacggagtttggtaatccagttttcgtcttctgttgattcaggaaatcttagtttttgaattgcgtgactgaatgatctaatggagtctaaaggtgggaaaaagaagtccagtagtagtaagtctttattctacgaagctcctctcggttacagcattgaagacgttcgaccaaacggtggaatcaagaagttcagatctgctgcttactccaactgcgctcgcaagccatcctgatatactcacaagcgtgccgtctgaccactagtagtggttaataaaactgttatttgctttgttagttagttttagattatttccccgaccaacttcttcctcttctctcttcgtggctggtttctttacattgcgttctcctgatttggcgactttgtaattcggataaagtttgcagtccttggttgaatcacaatggcagtgtctgcaattggatttgagggttatgaaaaaaggcttgaaatttctttttttgggcccggcatctttgtctgatctcaagggaagactttgggacctatcagaagccgttggaggaaatctagccccgtaatgcccatgttctattttacaggcgagggccctgtcctttggcaaacctttggccaccaaan

SEQ ID NO: 190888 - DNA, 1536 bp, Gossypium hirsutum
gttgaatttctatcttcttttgatctgaacgcagtttggtaatccagttttcgtcttctgttgattcaggaaatcttagtttttgaattgcgtgactgaatgatctaatggagtctaaaggtgggaaaaagaagtccagtagtagtaagtctttattctacgaagctcctctcggttacagcattgaagacgttcgaccaaacggtggaatcaagaagttcagatctgctgcttactccaactgcgctcgcaagccatcctgatatactcacaagcgtgccgtctgaccactagtagtggttaataaaactgttatttgctttgttagttagttttagattatttccccgaccaacttcttcctcttctctcttcgtggctggtttctttacattgcgttctcctgatttggcgactgtgtaattcggataaagtttgcagcccttggttgaatcacaatggcagtgtctgcaattggatttgagggttatgaaaaaaggcttgaaatttccttttttgagcctggcatctttgctgatcctgaaggaaagggtcttcgggcacttaccaaagcccagttggatgagattctaggtccagctgaatgcaccattgtttcttcattatctaacaagcaagtggactcctatgtcctttctgagtctagcctctttgtctatccatacaagattataatcaaaacctgtgggacaactaagttgcttcttgctatcccacccatcttgaaattggctggcagtctatcccttgctgtaaaatctgttaggtatactcgtgggagttttatattccctggtgctcagccatttcctcaccgaaacttctctgaagaggttgctgttcttgataactatttcgggaagcttggcgctggtagcaaggcttgtgtaatgggtgggctggataaacagaaatggcatgtgtactctgcatctgcagaacctgtgaccgccactggcccggtttacactctagaaatgtgcttgactggtttggacagggataagccgttcggttttctacaaagaccaatcaggctccgcagctgtgatgaccattaattctggcataaggaagatccttccagagtctgagatatgtgattttgagtttggaccctgtggttactcgatgaatgcgattgaaggtgctgcaatttctactattcatgttaccccagaagatggatttagctatgcaagctttgaagctgtgggatataatctgaaagataagaatctgatgcagttggtcgggagggtgttgcaatgcttcaaaccgggtgacttttctgtagcagttcacgttgatgttggtggtgatcagtcacttgagcagagctgcctgctggatgtaaaaggataccgttgcggagagatgggcattgaagggcttggaaatggaggttccatgatgtaccagaaatttagcagcactggtggctgtggatcaccaagatcaactttgaaatgctgctggaaagaggaagaagagggagaagagtagttgaaaata

SEQ ID NO: 190889 - DNA, 507 bp, Gossypium hirsutum
cccactcgtccgcccacgcgtccggcgagaagtgagaaactattgtaaacctctcataatattctgagcttttttctctttttgtttcctataattttgatctgagccaaggttgataatcgagtttttataagcggttgatcctggcattccaaaatttgaattgtgtggctgaatgatctatggagactaagggagggaaaaagaagtctagtagtagtaagtcattattctacgaagctcctctcggttacagcattgaagacgttcgaccaaacggtggaatcaagaagttcagatctgctgcttactccaactgcgctcgcaaaccatcctgatattcgtaacgcaagtgcccccttctgaccactgttaaagtggtcaatttatttttatttgctttattacttagtattaatatctatcttcggccggcttcctccccctctctccttgcaactgttttctttgtatctacgatctcctcacttggcgtctgtctacttt

SEQ ID NO: 190890 - DNA, 712 bp, Gossypium hirsutum
ctctgttatggttgcagagagagccaaactgaatcaatctctaggcatttgcttctccaattccaatcttctttttcttttcttttttactaataagtcgtgagaaatgccagcaaaaccagggaatgatgatcagcagatagaccgtggggctcaaagtgtgttgcagtcaactgcctactctgaaccctggtggaaaggagttgggactaacccctttggtgaagctgcctcgaagtcgccttctgtagaacaactaaatggttcagtggcaaatggagatgtgcattcacaggctcatggggacttgggcaatgaagatgggagaaacagacaagatcgccaacatctcaaacacgttccttccacaacaccccttactttgggtgaacaccatgaaccaaattcccaaatggaactagttggtcactcgattgtcttgacatcttatccttattcagatcctcagtatggtggaattctgacttcatatgggccacaaatgatggtgtcaccacatctatatggaatgcatcatgctagaatgcctttgcctcttaaaatggaagaggagcctgtttatgtaaatgcaaagcaatatcatggcattttgaggcgaagacagatacgtgctaaagctgaacttgaaaagaaaagccattaagttagaaaggtaaaaatggtattcttttagggggctttcccccccatt

SEQ ID NO: 190891 - DNA, 426 bp, Gossypium hirsutum
cttactttgggtgaacaccatgaaccaaattcccaaatggaactagttggtcactcgattgtcttgacatcatatccttattcagatcctcagtattgtggaattctgacttcatatgggccacaaatgatggtgtcaccacatctatatggaatgcatcatgctagaatgcctttgcctcttaaaatggaagaggagcctgtttatgtaaatgcaaagcaatatcatggcattttgaggcgaagacagatacgtgctaaggctgagcttgaaaagaaagccattaaagttagaaagccataccttcatgagtcccggcatctacatgctatgagaagggctaggggttgtggaggtcgttttcttaatacaaagaagcagggtgatgatgttaccagccccacttcacacaaaggcatgaattca

SEQ ID NO: 190892 - DNA, 950 bp, Gossypium hirsutum
cccccccttttttttttttttttttttttttttttggtaagtaaaactttaatttgtaattcaaacttacaaatacttattagcagacaacaaagaaactggaaaatacagaggaaaaagtacaaatacttcataggattcccgtcacttgttgggtgcctttatgtaaccaacatgggaagagttagaggttttagcaagggttttcaactcattagcgatccaacatttggatgtttccctgtggtaaaagtaccccaaacacttgcaatcagaggtgcatttcctcccacaatcactctcctttatcccttctccttcgttgtactggctcatgaaatggtcaactccttctagcttgtagtagctgaaaccattcggcctacaattcaccttcttcggctgacaattctggctccaaccgagtaatccgtttggtgacgggcaagcaacgcattggttctcctcacagagtccaaagttcccacacctctccggcagttcgcattcagtgccccatattgagtccctagagaagagagtgaaagtctcttcccatgcctgtgaatcaaccttgtcatagtaggtaaaaaccctcaggtttccatcgatcccgagtcgaagaatcgacaatgtgctgttgtatttcggccttgtcaagatgagatttccggtcccgatggacgagttagccactgtgtagtctaacaaaacgttataagcaaagccatcatttgtttcctcaacatttagtgtcacagtttgtaaagtaccatcttgtgtacttggccaaacagatgatttgaagtagacaagtggtttaggagagttcattcccttgtactgcaaaaccaactgtttaggctccatcaccaagctataggctccgtcaacattgttttgagcagaagcccggctcacaagctttgtcgcccctccgattctaagcg

SEQ ID NO: 190893 - DNA, 393 bp, Gossypium hirsutum
ttagaataagatattgacattaactttttagctacgggtcagacaatggagagactgagatctcacgagactggtatttttaagaagaagccagctgatttgatgcaaatctttaaggatgtacagtctaaggtgagtgatgttgttcttggaaaggaaaaacctgttgaagagtcaaatcctgaatatgagaaacttaaacactatgtttttgagcttgaaaatcatttggctgaagctcagaagcatgcttatcgtcttgtaaagagacacagagagttggggcaatcactatctgattttggtaaggcagccaagcttcttggtgcttgtgaaggacaagtccttgggaaggcattttctgatcttggggccaaatctgaggtgctatcg

SEQ ID NO: 190894 - DNA, 441 bp, Gossypium hirsutum
atacctattattgtgtcgggaaatatgaaaaaaaaaaacctagttttgttaacttgctacttgaaaaaggtttaggccctactgaatttattaagttctttgatagaaaaccatgttatacattcctttgttctttatataaagtaatggaacctttttttctttcctaatatacacaaggaaaaaattttaaaaacacggatccttgtaagaactgttatgcagaatgttagcacttgagtaatgaatctcaatatgtgtaaattaaatttgtgttctctctggaacagaattttgaaagttatagactaccctttttcttgtccatcaaggggcctttatgaatgattccttgtttcctaaactagcatttggtctttctcatttctcctctcattgctttaattccacatggtttagattatcctttaactactttct

SEQ ID NO: 190895 - DNA, 976 bp, Gossypium hirsutum
cgtttttcctctaggctttttgtctttttctccttctcaagagtgattcagaagcgacttgtgggaggaaagaagagttttcagaaggcgggttcttatggaatgcttgccagaaggattgtggagactgaaatgccaatcatggttcagatacagcaattgatccgaggagcgaaaaatgctgtgtcactcgctcagggagtggtttactggaaaccacccaaacaggcattggataaggttaaagcacttgtagaggagtcttcagttagttgttatggtgctgatgaaggtcttcctgaacttagagaagcattgataagaaagttacgtcaggagaacaatttgcagaggtcttcggtgatggtcactgcaggagcaaatcaggcatttgtgaatcttgttctaacactgtgtgatgcgggggactcggttgtcatgtttgctccatactatttcaattcctacatgtccttccagatgacaggtgtcactaagatattagtaggtcctggttatccaaagactctttatccagatgcagactggttggaaaggacattgctggaaaccaagcctgtcccaaagcttgttactgttgttaatcctggcaacccatctggaacctacattcctgagccgctacttaagaggatctcagatatatgcaaaaatgctggttgctggctggttgtagataatacatacgagtattttatgtatgatggtctgaaacactcgtgcgtggaaggagatcacatagtcaacatcttttctttcttcaaagcctatggaatgatgggatggcgcgttggatatattgcatacccacagtagtggagggccttgcaactcaacttctcaaggttcaagacaacataccaatctgcgcttcgtaatttctcacgactagctcttactcatagaagtggactgatgggtcgcgacaagtaagattgtgagaatcagaatagtt

SEQ ID NO: 190896 - DNA, 1139 bp, Gossypium hirsutum
  unsure (1)..(1139): unsure at all n locations
gtttttccttctataactcacaacacttttttttttctctcaagctcgctaacgttttcagcacacactcaattcatttttcatgagactctacttacatttttataagcatagtaaatcgacttaaactttatcatgccttaccgtctaagattgttcaagctgctgccatcattatcctttgtccttgatttttcatgaaattcggcaggccacgttttctatgaggttgaaagccaattggataaaaattctttggctgcaattttccggctgaaagtcggtttgttttctaacacagcctatataaagccattgtttccatactacttgcactcattactcatggaatcccactttgattcccatgttgagcaacataacgaagatgagtttcagaaatctttcaaagagatgatttctactctccctaaagggaacagctggggtcttcccgatcatctatatcagtatcaagatttttggttcacctcacctttcctacaaggagtcctgttagctcaacaacagtttgaggctcaacccactgatatcatactttctagtgcccctagaaccggcacagcctggttaaaatctctcactttcgctactattacaagaacttcatacgatgattctaccacccctttgcttttcaggatgcctcatgatgttgtgcctttcatggagcttgatcatgctcatttttccgctaatcgacatcttggaattcctctcttggccactcatgctccttattctttcttacctacatcaataattgattctggttgtaaaattatttacatttgcagggaccccaaggatacatttgtttcaatgtatcacatctgtaccaggtatgcgaaatcccaaaacactcaacccatagaacttgatgaagcgtttgagttattttgtgaaggcgtgagttggtacggaccttattgggaccatgttctgggatactggaaagcaagcttggaacatccggacaagttatgttcttgaattatgaagaaatgaatgaagatctgttggatctagaatttgcggagtttatagtgccttctaacgagacagcnnaagggtcctgaagtttttaggatgattgaataccnnctgaggaaatggga

SEQ ID NO: 190897 - DNA, 583 bp, Gossypium hirsutum
ttgtaataattgaggtaatgattttttctttttctttttctttatattttcattttagtatttctttatattaaaaaatatcattccatcccactgcctccttattaaagaaaaagaagagtggcagcctatttacaaagcaattaatccttgtaatatagtatttgcactcattagcctgtccctcatggaatcccatcttgagaaacaaaatggagatgtgcttcaaaaatctttcaaagagatgatttctactctccctaaaaagagttgttggggttttcctgaagatcaatatcaatatcaaagtttttggttcagcccgccttttctacaaggagcattgtcggctcaacaacaattccaagctcagccaactgatatcatcctttgtagctttccaagaacaggcacagcctggttaaaatccctcactttcgccactattacaagaacttcatacaatgattccaccacccctttactttccaagatgcctcatgatgttgtgccttacatggagttcgatcatgcccagttttccactaatcgacatcttggaattcctcttttagccactcat

SEQ ID NO: 190898 - DNA, 477 bp, Gossypium hirsutum
  unsure (1)..(477): unsure at all n locations
gcgcccacgcgggcggccacgcgatctggacgacttcattttcttcttcaatggcagtgtcagaaatctcgcgatgtacgtatcatgtattcttgagttttagaggtgaagatacgcggaaaagtttcacggatcatctttacacagctttggtgcacttaggaattcgaacatttagagatgatgaggaaatcgagagagggaataacataaaagatgaaattgaaaaagcaatactacaccactccaaaatttctatcgttgttttctcaaagaattatgctgcatccacatggtgtcttaacgaacttgtaatgatattggagcacaagaaatcctctaaacatattgtgttgccagttttctatgatgtggatcccagtcaagtcaagaaccagacgggaagttatgcagaagcatttacccaacatgaacaaaacttcgagtccatggtacanagatggaggaatgctttaa

SEQ ID NO: 190899 - DNA, 800 bp, Gossypium hirsutum
cccatgcgtccgcccacgcgtccggttctcaacgaatcgatctcccgagagtgaagaagatacagagtacaaactagatcgaggtcttctgataaaagcttcaaattgatattgtctgggtagattgcttcttggtaaccaagatggttgtacttgcggcttcaattgtaagcaagtctggaaaagtgcttctctccaggcagtttgtggacatgactcgcataagaattgaaggtcttcttgctgcttttcctaagttggtgggaacaggaaagcaacacacatatgttgagactgagaatgtgcgatatgtttatcaaccaatagaagctctttatttgcttcttgtaacaaacaaacagagcaacattcttgaagatttggagactttaagactgctctccaagctggtaactgagtattcttactctctagatgaggagggtattggcaagactgcttttgaactgatctttgcttttgatgaagtcatttgtcttgggcacaaggaaaatgtgactgtcgcacaagttaagcaatactgtgaaatggagagtcatgaagagaaattgcacaagctggtattgcagagcaagattaatgaaactaaggatgtcatgaagcgtaaagctagtgagattgataagagcaagattgataagaataaaggtgataaaggagggttcatgtcaatgggctctggaagaatagaaagtagctttagtgatttgagtatttctagcagcgcaagcggctttggaagtggttctgggtttggtgggattaccactgatctcgat

SEQ ID NO: 190900 - DNA, 441 bp, Gossypium hirsutum
ccaaaacgccaatattgtaatgggagaaatataagtcctcctacggtttctcttcgcggactcgccctcgatctcagcgaaccgatctccagagggaagaatatactcataagtataagcaaattagatcgaggttctctgataaggtcttcaatttgatattggcttggtacttgcttctccaaaattcaatatggttgtacttgcggcttctgttttaagcaagtctggcaaagtgcttgtctctaggcaatttgtggacatgactcgcataagaattgaaggtcttcttgcagcttttcccaagttggtgggcacggggaagcaacacacatatgttgagactgagaatgttcgatatgtttatcaaccaatagaagctctttatttgctacttgtaaccaacaaacagagcaatattcttgaagaattggagactct

SEQ ID NO: 190901 - DNA, 799 bp, Gossypium hirsutum
ttcgagcttttctctctctctctctctctctctctctctctctcgcctcggtcgtttgttttcttttcatttctttaggagggtggtcaatatggggtcttcgattttgccagatctcggagctgagatcttgatccccgtttgcgccgttattggaattgtcttttctcttgcacaatggcttcttgtttccaaggtgaagctctccccgggtcgagactcgggttcccccggtaacaacggtgcgggtgggaaaaacggctattccgattacctcattgaagaagaagaaggtcttaatgaccataatgttgttattaagtgtgctgaaattcagaccgccatatctgaaggagcaacctcatttcttttcactgagtaccagtatgttggcattttcatggttgcttttgcaatcttgattttccttttccttggctcggtagagggtttcagcacaaagagccagccttgcacttatgacaaatctaagatgtgcaaacctgctcttgccactgctatattcagcacagtatctttcttgctcggtgctgtcacttcagtagtttctggctttcttgggatgaaaattgctacctatgctaatgctcgaaccaccctggaggcaagaaagggagttgggaaggcatttattactgcattcagatctggtgctgtcatgggctttcttcttgctgcaaacggtcttttggtgctgtacattgccatcaacttatgcaagctctactatggtgatgactggcgtggtctttatgaggcaatcactggttatggactt

SEQ ID NO: 190902 - DNA, 408 bp, Gossypium hirsutum
gttctttaccatctgctcgtagcttcttatttcgtttagttagaatggaggttgtattttcgccaatatggggccttcgattttgtctgatttcggacccgagagcctgagcccggtttgcgccgtgattgggattgccttttcgctcgtacaatgggttctagtttccaaagtgaagctttctccgggccgggattcggtgaactatggttcgggcgccaaagacgggtactccgattacctcattgaagaagaagaaggtcttaatgaccatagtgttgttcttaaatgtgctgaaattcaaagcgccatttctgaaggtgcaacttcgtttcttttcaccgagtatcagtaccgtggcattttcatggttgcttttgcaatcttgattttccttttccttggctc

SEQ ID NO: 190903 - DNA, 973 bp, Gossypium hirsutum
aaaataaaaataatcacctcagcacactgttactccctcagctctgcgcgaaaccctaaagcaatgcctcccaaagcagctaaatccaaggaagcaccagcggagaggcccatcctcggccgattctcttctcgtctcaagatcggaatcgtgggactgcctaatgttgggaagtctactcttttcaacacgctcactaagctttcaatcccagctgagaacttccctttttgtacaatcgagcctaatgaagcccgagttaatgtccctgatgagcgattcgaatggctttgccagttgttcaagcccaaaagtgaggtttcagctttcttagaaattcatgatatacctggactggttagaggtgctcatgaagggcaaggattgggcaacaacttcttgtctcacattcgtgcagttgatggcatttttcatgttttacgtgcatttgaagattcagacatcatccatgtcgatgactctgtggatcctgtaagggatttagagactattagtgcagaattaaggttaaaggatattgaatttatggaaaggaagatagaggatattgaaaagagcatgaagaggagtaatgacaagcaattaaaaatagagcatgaattgtgtgaaagggttaaggcatggcttgcaaatgaaaaaaatgttcgccttggggactggaaagcagctgatattgagatattgaatacttttcaattgcttagtgccaagccggttgtttatttggttaacatgactgagaaagattaccaaaggaaaaagaacaagttcttaccaaagattcatgcttgggtgcaagaacacggtggtgaacctatcattcctttcagtggtgtgtttgagagaaaccttgctgatatggaacctgcagatgctgcaaagtattgtgaggaaaacaaggtgcaaagtgctcttccaaagatcatcaagactggtttctctactattaatc

SEQ ID NO: 190904 - DNA, 729 bp, Gossypium hirsutum
  unsure (1)..(729): unsure at all n locations
gtaatgcctcccaaagcagctaaatcaaaggaagcaccagcggagaggcccatcctcggccgattctcttctcatatcaagatcggaatcgtgggactgcctaatgctgggaagtctactcttttcaacacgctccgtaagctttcaatcccagctgagaacttccctttttgtacaatcgagcctaatgaagcccgagttaatgtccctgatgagcgattcgaactgttagttgccttcagagctctgggatttgttcgtctccagattggatctaagataatgcatctaaacctggaaaatcacaatattttatcaaagaagttcttgttgatatctaaaatgatgtatttccgtgcactgcagagcagttttataatttgttattaagtgatgactctagttttactaatgagtattgtgcagtacggaaggatacaaatatttcgaagggtaaaaagcgtaaggctacaccaagcaaaaactttggttttgtaggcggttgctatantcatgatgcaacagcagataatgatgtactgtcaccatcattatatggcttacaataatcatcattaccattatcaacaatactaacagcagctgcagcaaaaacaaaaatagcaaccagggtgtaatttaaatgaggttaaaacgatctgggttggtgaccttgttcattggatggatgaaacttatatccacggttgcttctctcatattggcgag

SEQ ID NO: 190905 - DNA, 694 bp, Gossypium hirsutum
ctcgtgccgaattcggcacgagtatctatataaagagctagctcagctgtaatggagaaaccagaaacagtccaattatgcaaacgatggctatcttttctacatcaatggctgctatgctccttcttctagggctcttcgctgcaaacttggatcctactgctgcacagattggtgtttgctatgggatgcttggcaataatctcccaaattcatgggaagtcattcaactttacaaatcaaacaacatccggcgattgaggctctacgatccaaatcaacaagcattacaagctcttagaggctccaacattgaagtaatgttaggtgttccaaatgatcaacttcaaaacctcgctgacccttccaaagcacgatcatgggttcaatcaaatgttgtagcttactggccgagtgttcggttccgatacattgctgtcgggaatgaagtccctcattcatcttggttagctcaattcgttttgcccgccttagtgaatgtataacgcggttcgacggccggttggagagtcaatcaagtctcatcgcattgattgacctgatcgggtctcgatcctcatcgcgggcgttccggggaccgtagtcgattggcccttatagccattacatggctgacacctgctgcacattacctactagtattagcatcaggatttactcatagccttacacc

SEQ ID NO: 190906 - DNA, 1199 bp, Gossypium hirsutum
cccacgcgtccgcccacgcgtccgcccacgcgtccgcccacgcgtccgtgcaaacgatggctatcttttctacatcaatggctgctatgctccttcttctagggctcttcgctgcaaacttgtatcctactgctgcacagattggtgtttgctatgggatgcttggcaataatctcccaaatacatgggaagtcattcaactttacaaatcaaacaacatccggcgattgaggctctacgatccaaatcaacaagcattacaagctcttataggctccaacattgaagtaatgataggtgttcacaaatgatcaacttcaaaacctcgctgacccttccaaagcacgatcatgggtgcaatcaaatgttgtagcttactggccgagtgttcggttccgatacattgctgtcgggaatgaagtccctccttcatcttggttagctcaattcgttttgcccgccttagtgaatgtattcaacgcgggttcgatcggccggtttggagagtcaaatcaaggtctcaatcgccattgatatgaccttgatcggtgtctcgtatcctccatcggctggtgcgtttcgtggggacgttaggtcgtatttggaccctatcataggccacttagcatgggctagaacacccttgcttgccaacatttacacttacttcagctattcaggcaatccaagggatatctcacttccatatgctcttttcacatccccttcacctgttgtatgggatcaaggacgtggataccaaaacctattcgatgcaatgttggattcattatactcggctctcgagaaagccggacagggagggctcgaagttgtggtatcagaaagtggatggccttcagccggtgggttcgggacatcgatcgataacgcggccacttatctatcgaacttaataagacatgtccaaggaggtaccccaaagaggccaggaaaagccatagagacatatttgtttgctttatttgatgaaaaccttcgaaccaggtcctgaattagagagacactttgggtttgttttcaccaaacaagcaaccaaaatatcagcttctttttggtggaggaaggcatttgggatattgcttctgaggaatatatagggaactctttctcttaagtcttgatattgtaaaatctaccaagcttgagaaattggcggccttgcgttggggttttcg

SEQ ID NO: 190907 - DNA, 668 bp, Gossypium hirsutum
aaaggagataccagaagaggcaggaaatgttcagaaacaaggcggaaggcaaaaaacacgacaaacatcagcaggtcgggaaagaaagagacagataaaacgctcaagacaaagtttgatagcaaacattataggactattaagaaacagaagactattaggaacagagaaaaatctatcactataaaacccagcattgttaaccctcctccccactctccagctccaaacatcaccagggtttggccaatctataggagcataaggtaatccttcgccggaagtacacggtggaaccggtggagtagggaaatcgttctctttaattacaggaggaaaaccattatctccattcggaaaatcgttcctcgaaggctcttctttcggaatagacggaatggaagccggtccaccatagtaatctgggaatagatcttggtgaagatcaatatgaagaggactatccatatcagaacgagtttcatggattgaggatgcagtaggcatatgaggaggggtacccatacgaggaggtgaaggaattgacatcattagaaccgaaattcctcgttgacaattttattaattaaaagaaaaaaggaaagctgatctgggaattcgagaactgatgtcctaaaggaaagtggttttgtgtgagatgagtttat

SEQ ID NO: 190908 - DNA, 739 bp, Gossypium hirsutum
  unsure (1)..(739): unsure at all n locations
gcaccaaccgccaanggggacacccggcagggaggcncccaaggcgcagggatcccccaaacaaacgaagcaaaaaaagcaaaaacatcngcagccgggaaacgcgacagganaaaacgcccaagcgngggcnngcncgaaacaannncgganngnnnggaaacngaagacnnnnnggaacannganaaattnatcaananaaaaccnagnanngnnaaccntcctccccattttccagctccaaacatcaccagggtttggccaatccctaggagcataaggtaatccttcgccggaagtacacggcggaaccggtggagtagggaaatcgttctctttaattacaggaggaaaaccattatctccattcggaaaatcgttcctcgaaggctcttctttcggaatagacggaatggaagccggtccaccatagtaatctgggaagagatcttggtgaagatcaatatgaagaggactatccatatcagaacgagtttcatggattgaggatgcagtaggcatatgaggaggggtacccatacgaggaggtgaaggaattgacatcattagaaccgaaattcctcgttgacctggtttttcatttttattaattaaaagaaaaaaggaaagctgatctgggaattcgagaactgatgtcctaaaggaaagtggttttgtgtgagatgagtttatagattaatttaaaaaaggaatttattaaaaaaaattagaaaaccc

SEQ ID NO: 190909 - DNA, 638 bp, Gossypium hirsutum
  unsure (1)..(638): unsure at all n locations
attgaatcctctttatgtatacttttttaacatccgcttagcttcccaacattttcaattttcaatttcctattttgttgttgaaaatctgaaaataaaaaaaatgtcggtatcaatgtcaaaaccttcaatctcagcttcaatccccattccaagacctcgtaaaccctcctcattttcacaactcaaaatccgatgcgaatctttagattcagcgtcgaatattgatgtcaaaagaccgcaatcctcttcgttatcggcggctgggaagctgatggattcggattccaaaaacggctcatacccgggtggtatgggtccttttacgggcagagaccctaacgtgaagaaaccggagtggctgaggcaaaaggctccgcaagggctgaggtttgacgaagttaaacaatctctctcgcgcttgaaactcaatactgtttgtgaggaaactcagtgccccaacattggagagtgttggaatggaggtggggatggcattgcaactgcaacgataatggtgcttggggacacttgcacccgaagttgtcggttctgtgcggttaaaaccancaggaaaccgccaccgcctgaccccatggagccagaaaatacagctcaggccattgccagttggggtc

SEQ ID NO: 190910 - DNA, 758 bp, Gossypium hirsutum
ctcactttgaatactcccattttcttattgattttgcagatcggttctctaatccttttttcgggtgtagcgttgtttatacgtttggttgttgttgaagaagtgctactaccatggctacaaagaagagcgttggggacttgaaggaagctgatttgaagggaaagaaagtgtttgttagagtcgatctgaacgttccattggatgataacttcaacataactgatgacacaaggatccgtgccgctgttcccaccatcaagtatttgatgggtcatggctctaaagtcatcctctctagtcatttgggacgcccaaagggtgtcactcccaagtacagtttgaagcctcttgtgccaaggttatctgaactccttggagtcgaggttaaaatggcaaatgactgtattggtgaagaagttgagaaaatggtggctgcattaccagatggcggtgtattgctgcttgagaatgtgaggttctacaaggaggaagagaagaatgatcctgaattcgcaaagaagctagcttctctcgctgatctctatgttaatgatgcatttggcactgcgcacagagcccatgcttccacagagggagtggctaagtacttaaagccttctgttgctggttttcttatgcaaaaggaactcgattatcttgttggagctgtggcatatcccaaagcctttgctgaattgtggtgttctaagttcaccagattgaggatgaatacttgccaggtgtattctatctgg

SEQ ID NO: 190911 - DNA, 1437 bp, Gossypium hirsutum
  unsure (1)..(1437): unsure at all n locations
atttgaaatgtgatttgaagtgcttaagcagggatatcctagcgagtatcatggctcgtctagatggttcaaccctggcctcagctgcctgcacatgttctgaccttcgaggcatagctcgaaaccaaaggttatggaagcaattgtgtaattccacatggccttccactgcactcgacgaagcccaacaccttatttcatcatcaacggatggttttcgcagattctatgctgataagtcatcctctctagtcatttgggacgcccaaagggtgtcactcccaagtacagtttgaagcctcttgtgccaaggttatctgaactccttggagtcgaggttaaaatggcaaatgactgtattggtgaagaagttgagaaaatggtggctgcattaccagatggcggtgtattgctgcttgagaatgtgaggttctacaaggaggaagagaagaatgatcctgaattcgcaaagaagctagcttctctcgctgatctctatgttaatgatgcatttggcactgcgcacagagcccatgcttccacagagggagtggctaagtacttaaagccttctgttgctggttttcttatgcagaaggaactcgattatcttgttggagctgtggcaaatcccaagaagccatttgctgcaattgtcggtggttctaaggtatcaaccaagattggagtgattgaatcactcttggccaaggttgatattctcatactgggtggaggaatgatgtttaccttctacaaggcccaaggatatgcagttggatcttcacttgtggaagaagacaaacttgatctagcaacatcactccttgagaaggccaaggcaaaaggagtctctctcttgctcccctctgatgtggttgttgctgacaagtttgctgctgatgctaacagcaaggtggtgccagcatcagggatcccagatggttggatgggcttggatattggacctgactccatcaaaaccttcagtgaatctttggacactacccagaccattatctggaatggaccaatgggtgtgtttgagtttgagaagtttgctgccggcacttgaggcggttgccaagaagcttgcggaactcattgggaaagagtgaacacaattatcgggagagggtgacttgtttcactgtggaaaagctggcttgctgacagatgaccacatctttactggtgggtgcactttgacttttggggcaaccaattcctgagcctggtttaatgacctaactttaattgccctntagcgtttgacttgtcactgtgatggggtagatttaaccaaagattttataactagtgtaactgtagggcttgatatatggtgttatctactaagcttaatgtgattattttgatatgtaaaaattcttgtttatatggtctcttattcttataattaggcctggctaccat

SEQ ID NO: 190912 - DNA, 584 bp, Gossypium hirsutum
gtgattttttggacactacccagaccattatctggaatggaccaatgggtgtgtttgagtttgagaagtttgctgccggcactgaggcggttgccaagaagcttgcggaactcagtgggaagggagtgacaacaattatcggaggaggtgactctgttgcagctgtggaaaaagctgggcttgctgacaagatgagccacatctctactggtggtggtgccagcttggagcttcttgagggcaaacaacttccaggggtccttgctcttaacgacgcttaaacttttaattttgcacctctttgctttttttgaacattgttcactgctgtaatggtggctagtatttttatccaagagtgaattttagtagagctgaggttgtagaggctgatagggtggacttgttataaataatttggtttctcctcattatccatcagagatgcatttgaattggatgtcttttttgttatcttgattgttaatgataaaattgcagtagtgcttgttctattaaaaaattataaatattaaaaataatataaacaaaattattatttttttttattaatattttattaa

SEQ ID NO: 190913 - DNA, 620 bp, Gossypium hirsutum
cccacgcgtccgaaattaagctactctttttctctcgttactctttttctctcgatcctgcgtttcttttcactgtttagatatatccgcctctctcatcttccgttgtttatacgtttggttgttgttgaagaagtgctactaccatggctacaaagaagagcgttagggacttgaaggaagctgatttgaagggaaagaaagtgtttgttagagtcgatctgaacgttccattggatgataacttcaacataactgatgacacaaggatccgtgctgctgttcccaccaccaagtatttgatgggtcatggctctaaagtcatcctctctagtcatttggttttcgcccggcgttgaagaattagtcaagaagctgaaggcaaggaataccgatgtttatctaatttccaggggcttctgccaaatgatcaatcctgttgcatcaatccttggaattctacaagaaaacatttttgccaatcagctgctctttggaagttctggggagtttttgggattcgatgctaatgatcccacttcgaggagtggaagaaaagctacaggttgtcaactaaatagaaatgttaagggatacaaggaactagtcatgattggtga

SEQ ID NO: 190914 - DNA, 530 bp, Gossypium hirsutum
cccacgcgtccgcttccctctcatcctttgaaaatggagtccttagctatgggaaaaaagctactaacatctgttctcgtaggactagtagttgcttcagctataacccaaaccgtgttggctcaaaactgtggctgtgcgccaaacttgtgttgcagtcaacatggttattgcggtcagggtaacgattactgtggcactggttgcaaagaaggcccttgtttctccaagtctcccactggtgcttcagttgcctccattgtttcacctcagttcttcaacgggataatcaaccaagctcgtgcggattgtgcaggcaagaaattctatacacgacaagctttcctgactgcacttgattcctttcccgatttcggaaaattgggttctgatgttgaatccaagcgtgagattgctgcattcttcgcccatgctacccatgagactgaattcttttgctatacagaagagcaggataaaagtaatagctactgtgaagccaatccaaagttcccatgtgcaccagggaa

SEQ ID NO: 190915 - DNA, 409 bp, Gossypium hirsutum
gccaaacccaaagcagaagaaaaacctgtagctgagcctgagcctgagccaaagaaagaagaagaagaaaacaaggaagagaaaaaagaagaaaaagaggaagagacacctgctgctgaaatttcagaagaacccaaggtagaaacggatgcacccgccgctgttgaagtcaaggaagaagagaatactcctcctccaccaccaccagccgatgctcctgcggccgaagtggttgtagtggaaacagaggtagctgaaaaagcgaaagccgtagacgatgatggcgccaagacggtggaggcgattgaggagtctgtagtcgctgttgccgctcctacggcagagaaagaaaaggaggagccctccgccgaagtggctcctcaatccgaagagaccaaagaagcccaag

SEQ ID NO: 190916 - DNA, 442 bp, Gossypium hirsutum
ggcataagaaacgaggtacgcgaaagggaagagggaataaactgagcccccaaattcagagaattgttggagatgctacagttcactatggaaatggtcgtttcaaagaggccatatctgttctgaaggaaggtgttcaacttgaaccaaaatttcctcatttatatcatatgcttgggctttcttataaagcccttggtgataataaaagagcttttcaattctacatcatagctggacttcttaagccaaaagatcctgatctgtggaaactgctttttacctggtccatagagcaagagaatgttagtctgacctgccattgcctttctaaagcaataatggcagatcctacagatattagtttaagatatcttcaagcatcactttatgatgagctcggtgattaccagaaagcagctgagtcatttgaacaaattca

SEQ ID NO: 190917 - DNA, 908 bp, Gossypium hirsutum
tcaagttcaaggattacaattgtaccgttgagtactaccgatctcctttccttgttgtacaaagcaggccgcctgccgggtctccgcaaaacatcaagacaacccttaagttggatcgaatggattggaattcatttaggtggaaagatgccgatttgttggtcttcaacaccggccattggtggaactacgagaagaccgttagagggggatgttactttcaagtcggggaaaaaatcgaaaccaagatgaccatagaacatgcgtatcagaggtctttggagactgtgatgcagtggctacgcaacgaggtgaatatgagtaagaccaaggtctacttccgcactttcgctcccgtacatttcagaggaggggattggagaaccgggggaagctgccacctcgagactttgccggagctgggaacaacattagtgccatcggaaacttgggagcttctcgaaatagtaaaggatgtgttatcacctcactcaaacacatcccatggaataaaattcgacatattaaacatcactcaaatgacagcaccaaggaaagacgggcacgcgtcgctatactatttaggtcccaaggaaagcccggctccgattcatcggcaagactgcagtcactggtgcttacccggagtgcccgacgcatggaacgagctactctatgctgtgttcctcaagcaatccaccaatcacacattcaactcatcatcaacattatgaagcaacaaaggcgtgtgattctccattgttgaaacctcttaatttaaatacaccatcatcacctatacagaaagatagaagaaatttttacaatgaattttggaataggatcacaggttgttggtccatcattttggcagtgttagaaaatgtaatatttgattgaaggacgct

SEQ ID NO: 190918 - DNA, 1232 bp, Gossypium hirsutum
ttctttctttccaatacaaagcttcatattatcttttttagttccgacaaaagaaaacgaaaaaaaagaagaagaaatacaatcgttttctttttgaagtcgggttttagtttttggggtgaaaaaaatgttgggagtatttagcagtgcgatagtgtctccgccggacgagctggtggcggccggttgccgaactccatcacctaagataacggcggacgctctggtgaaacggttccttgagacgaactcctccggcgtgtccatgcacatcggagaccatgtccaattcgcttattctcaccataaagagtctcctttacagcccagatcatttgctgtgaaagatgaaatcttctgcttgtttgagggagcccttgataacttggggagtttaaagcagcaatatggtctggcaaagtcggcaaatgaagtgattttggtcattgaagcttacaaggcccttcgtgaccgagcaccttatcctccaaaccatgtggttggccatctaattgggagctttgctttcattgtctttgacaaatccacctccactttgtttgtggcttctgatcaatttggtaaggttcctctctattggggaatcaccgccgacggatatgtggcctttgctgataatgctgaattgctgaaaggtgcctgtggcaaatctcttgcttcttttcctcaaggctgtttctactccacagcagtaggaggattaagaagctatgagaatcctaagaacaagatcactgcagtgcctgctgaagaagaggagatatggggtgctaaattcaaggtggaagggccaacagttgttgctgccacagagtagtcctttgctttctccttctaaatctatggatccatgggaatataggagctgcaaatgcatagcatatggatcagtctccatgtgaataactgagtcccagtacttgtagaatgggaaatgaaaagaagaaaataaaaaaagaagaaaaagaactgtttggttatgagaaatggcagtaactttctgtttaggtagctttatgttaaaactagcttttattcctgtttcgtcctttgtacatcataatgtcagcttcaacttctagtctaataaaagcttgtttaggtccaatttatctaaaaaaaaaatttttttaaatatatatattattactttaaaaaattaaaaaaaaactcggggggccgtcccattgcctatagggcgtttaattacg

SEQ ID NO: 190919 - DNA, 437 bp, Gossypium hirsutum
agttccgacaaaagaaaacgaaaaaaatagaagaaatacaatcgttttctttttgaagtcgggttttagtttttggggagaaaaaaatgttgggagtatttagcagtgcgatagtgtctccgccggacgagctggtggcggccggttgccgaactccatcacctaagataacggcggatgctctggtgaaacggttccttgagacgaactcctccggcgtgtccatgcagatcggagaccatgtccaattcgcttattctcaccataaagagtctcctttacggcccaggtaaaaaaaaaatcatatatggtattggctgttggatgatctcaatcgttgaaaattaattatgaattcaaacttcagttgatcatcgagtgctttcgaacgaacctaggaattactataatttgtttaatcgaataatttacgattt

SEQ ID NO: 190920 - DNA, 369 bp, Gossypium hirsutum
ttaagaagctatgagaatcctaagaacaagatcactgcagtgcctgctgaagaagaggagatatggggtgctaaattcaaggtggaagggccagctgttgttgctgccacagagtagtcctttgctttctccttctaaatctatggatccatggaattataggagctgcacatgcatagcatatggatcagtctccatatgaaagtacttgtcgagtgggaaatgaaaagaagaaaaagaactgtttggttatgagaaatggtagtaactttctgtttaggtagctttatgttaaaactagcttttattcctgtttcgtcctttgtacatcataatgtcagcttcaacttcgagtctaataaaagcttg

SEQ ID NO: 190921 - DNA, 207 bp, Gossypium hirsutum
cccacgcgtccgcccacgcgtccgcccacgcgtccgccctcgcgtccgataaaggcctgttgggttgtgagaaatggcagtaactttctgtttaggtagctttatgttaaaactagcttttattcctgtttcgtcctttgtacatcataatgtcagcttcaacttctagtctaataaaagcttgtttgagggtcccaaatttcatct

SEQ ID NO: 190922 - DNA, 764 bp, Gossypium hirsutum
  unsure (1)..(764): unsure at all n locations
cgtncgaacaattttgtcttggccaagagccgccaaagtgagagtgatttgtggtcatttgaagctttacagaggcccgtgtcgtgaccgagcactcttattcctccaaaccatgtnggttggcccatctaattgggagcctttgctttttcattggtctttgaccaaatccacctccacttttgtttggtggctttctggtaagtatttaaaatagggtctcaacctactttntaaaaaannaatggtattattgacttntaanngtgcttgcttggttggtgtataacaaacaagtgagggtggaatgatattgacaggatcaatttggtaaggttcctctctattggggaatcaccgccgacggatatgtggcctttgctgataatgctgatttgctgaaaggtgcctgtggcaaatctcttgcttctttccctcaaggctgtttcttctccacagcagttggagaactaatgagctatgaaaaccctaagaacaaaatcactgctgttcctgcagaagacgaggagatgtggggtgctacatataaggtggaagggccaacagttgcaggcaccgagtctcctatgctcagtttctaaatccatgtgagaaatggtagtaactctgtttggaacatatatatatatatatataggttttgatcttctgtacagctctaacttgtagtgtaatacaagtttgagggtcctaaatttgatatagaccttattaaataagaaactacaaaggacttcatttct

SEQ ID NO: 190923 - DNA, 395 bp, Gossypium hirsutum
acagtttggttgcttaaagcttcacgcatcttcggctctcatggcggcctcgctgctcttatcctggacagcgcccaacccagaagcgatggttcccaatatcggggccaataaatcgtctttcctctccggcaccaagctcttcttgttgacgaagccccattatcgaaagcccactgctcaaaaatgcttcaaacctccctttgccaagtcaatcgaccacatccccaagcaattcatagaacaaaatctcaaagatggattgatggaaaattataaaaatgttcctggatatctctatggtcttagtccttcacaaatggacatgttcatgacagaagataatcccgtccgtcgacaatccgaaagtgttaccgaggaaagtatttcatctg

SEQ ID NO: 190924 - DNA, 665 bp, Gossypium hirsutum
cgcgtacgcgtgcgtaaaaactggcctaactttggagataattttggatctgaaacagagagagagagtatgaatcgccaccacgatccaaaccctttcgatgaagaagaagtcaatccattttcgaatggtggttctgtcgcacctgcacgaccactggcatccgaacctttgggttttgggcagaaacatgatgctactgtggatatacctctggattcaatgaatgattctaagaaaagagaaaaggagctcgcagcttgggaagctgatcttaaaagaagggaaaaggatataaagagaagagaagatgctgtttcccaagctggtgtttctgtagatgataaaaattggccaccaattttcccgattatacatcatgatatagctaatgagataccggttcatgctcagaggctgcaatatcttgcatttgcaagttggcttggcatagttctttgccttgtttttaatgttattgcagtgattgtctgttggattcacggtggtggtgttaagatttttttccttgctgtaatctatatgttgcttggatgccctctttcatatgtgttgtggtacagaccactttaccgagcaatgaggacagatagtgccttgaattttggttggtttttcatgttctacttgctccaccttggaat

SEQ ID NO: 190925 - DNA, 409 bp, Gossypium hirsutum
gcatatttcaatcgagaaatgtccaccatgtttttgagatctctgctattgcctctcatggccctggctacatggtcacacgggatgagccgagggcaacagcgaccttcctctttagacgctgcatccaacacactccaataccatggaggccctctcttgaccaagccgaatggcattaacgtttacctcatatggtatggagggttctctctgaaagacagaaactccataactgatttcttcgcttccttcgcgagccctggtcgtcgccaaggaccctcggtttcgacatggtggagaacgatcagtacatacaaggataaaactgggaaacctgtttccgacactgttagacttgtcaaacaagttggtgatgtatattcttcggggaaaaccctgaagcgcg

SEQ ID NO: 190926 - DNA, 769 bp, Gossypium hirsutum
  unsure (1)..(769): unsure at all n locations
cggacccgtgggggcggccctgaggcgtcgcgttacgtttgcgataacttgttgagcgactttcgagccatgacagccgaatcggaaggagctgtcaccgctgagaccattcaaagagcttttcgacaaaccgaagaagggtttacggcccttgtgtcggagttatggagtactcgaccaaatatggcaacggtcgggacatgctgtctggttggggtaatatatcagcaaacactttttattgcgaatctcggtgattcacgcgttgtgctcggcaagaaagttggcaacaccggaggaatggctgctatgcagttgtcaactgaacacaatgctaatatcgaggctattagacatgaactcaaggaattacacccgactgatccgcaaatcgttgtcctcaagcatggagtttggcgagtaaagggcattattcaggtttctaggtcgataggcgatgtttatatgaaacacgcacagtataacagggaaccgattaatgcgagattcaggcttcctgaaccgatgaacatgccgttattgagtgccaatccaactatcatttcccatcctctccacccaagtgattctttccttatatttgcttccgacggtctatgggaacacttgagcaacgaaaaagctgtggctatcgtccacagtcatccccgtgcgggcagtgccaaaaggcttgtcaaagctgccctacaaaaaacancccggaaacgaaaaatgagatattcggatcttccanagattgacaagaagg

SEQ ID NO: 190927 - DNA, 789 bp, Gossypium hirsutum
caacgcctcctgtatacccaagtcctcccgttgtgaagccacctccagtggagaccccttgtccaccaccaccacctgtgctatatccaccacccccggcacagcaaacatgccccattgacactctcaagctaggcgcatgtgttgatgtgttaggtggcttagtgcacattggtatcggcagcagcgccaaggacacatgttgcccagtgcttcaagggttgctagacttggatgctgctatctgtctttgtaccacaatcaaggccaagcttttaaacatcaatatcataataccaattggccttcaggtcctcatcgactgtggcaagactccacctccaggattccagtgtccagcataaggatagtacccctttttggacaataacatcatgttcatctcatgacaagaagttataattgtcgaaaatttcgagtttccccgtaaagatatattgaggcatgacaagatgtgctgatgtatttcttagtaggtagtgttccgagttcctagggaggagttgtgcttccaagttttctattatgtttttaatttgatttaatcgccacttacatttgtggtgctgctttttctttcaatgttattttgatgatacaataaagtgtccaaaaataggcattctataaaatcccgtgtttgacattaaatgtcatatgtaaatgccttaagggctcattactgtaagtgcccgaaaggcttctttcaattacacacgtcccaacttatgatggtaaaatttcaatttttatctttttactatgttc

SEQ ID NO: 190928 - DNA, 465 bp, Gossypium hirsutum
caaacaccccgccgcagcaaccatctaccatccatcttctcattctactctttacctaccaagagtcaagaaacctcaacaatcaacaactaccaactagatttggattaagtcacccaaaaccaatcaaccaaccaagcaaccgagaagcaaaaagaatggattctgattatggcattcccagagaactttctgatcttcagaaactccgatctcaataccaaccacagctccctccttgcctcgagggaactactgtcagggttgagtttggtgataccactacatctttagacccggctgatgctcataccatagcccgagcttttcctcacacttatggcaagcccttggctcactttctcagggcaactgccaaagtacctgatgctcagattataactgagcatccagctattagggttggacttgtcttttgtgggagacaatcccctggtggccata

SEQ ID NO: 190929 - DNA, 659 bp, Gossypium hirsutum
attgctcgttacgccccctcagcgtggattagggattccgcttgcttttcatattttcttttccatttcttgtcctcatcaagcttccgagtctcccacgtttcccttccagggaaagggaacaaggagttttggtaaaagaaggaacaagacccacactctctgcattaggtgtggtcgccgtagcttccatctctagaagagtcgttgctctgcctgtgctttccctgctgcccgtaactggaaatgtaggtggagtgtgaaggcaatccgaagaaagaccactggaaccggtaggatgaggtatcttcgccatgtccctcgcaggttcaagaccggtttcagagaaggtactgaagcagcaccgaggaagaaggttgcagcagcttcggcttaagttggctatgaggttgttttgatgaatccatctattttagtaaaagttttatgggaacattacatgagaaatgtcatttattgcattggattcttttaaatattggtagcttctattttcatgtagctgcttaggctattgttgcttgacacttaattactggatatttttgtggacgaagttaatcatgtgcttgtttcggttatgatgcccttcatctcttttcaaattatagtcttctttattcgagtattgttgtttg

SEQ ID NO: 190930 - DNA, 437 bp, Gossypium hirsutum
  unsure (1)..(437): unsure at all n locations
gtctcccacatttcccttccagggaaagggaacagggagttggggtaaaagaaggaacaagacccacactctctgcgttaggtgtggccgccgtagcttccatctccagaagagccgttgctctgcctgtgctttccctgctgctcgtaagaggacatataactggagtgtgaaggcaatcagaagaaagaccactggaaccggtaaaatgaggtatttgcgccatgtccctcgcaggttcaagactggttttagagaaggtactgaagcagcaccgaggaagaaggttgtagcagcttctgcttgaggtattacaagatctgcaaattgcgcgagggtttgggcatagcaaccaataatgctgctgaatatcgtgccataattttttggttgctggcttgatggcttcttcgttctctatgactntcaaatggttg

SEQ ID NO: 190931 - DNA, 701 bp, Gossypium hirsutum
atcgctttttatttctcttttatttctctttttccacccattgatctagttgtatatttgaaaatgaaattaaaaaaagtggtaatgtacagggaaagagaacatggagttttggtaaaagaaggaacaagacccacactctctgcattaggtgtggccaccgtagcttccatctccagaagagccattgctctgcctgtgctttccctgctgctcgtaagaggacatgtaagtgcctcatgcgctttttctttgttatcaagatcgtgaaggcaatcagaagaaagaccactggaaccggtaggatgaggtatctgcgccatgtccctcgcaggttcaagactggtttcagagaaggtactgaagcagcaccgaggaagaaggttgcagcagcttctgcttgaggtattacaaggttgttttggatgaagccttctttttttaggaaaacttttacgagaacatttttcttgaggggtgtcattacattgaatgctttagctgtttttagtttatgattatggagttgcattaaattttgaacaaggatgaatgctttagtttttctctagtttatttttgaggagttgcttcaaattttgaacgaggatggacaaggctattgttggttgacacttagttacttgatacatttttttgggatgaaggtaatgtatgttcttgtttttggtaaaaatgat

SEQ ID NO: 190932 - DNA, 451 bp, Gossypium hirsutum
ctcgtgaagaaaaaggagaccataaaccactggtatagatggaaactacgaagaaaacaatggacattatcacgattgatagcttctaattaaagtttggaaagtggttatgaataattccagccaaaagaatggaaattacaagcatattaccagaagagtgcctgtgtctgatcatatcgttgacttcgccggaagatgcatgtcgatcggccatgatttctcacgcttccagatcggttgcaaaccgtgatgaagtgtgggaaaggtttctgccgtctgattgtagatcaatcatttcaggatcatcatcatcatcattgctttcgctgggaaagaaggatgtatatttccatctctgttttcatcccattctcattcaaaatggtaccatggtaaaccccaaagctcactccttaatctccatctccatcggtttttattcgattta

SEQ ID NO: 190933 - DNA, 449 bp, Gossypium hirsutum
gggaagtggaaacccttgaactccaaattttaaagcatttgaagaatttgcactaacgagatggaaattgattccgagtcggaaaaaccaagtgttaaaatcccagaagaaggcggttcaatgcaaatgaattcctcggaaaaaaagggaggcgatgatgaaaaagagcagcttgctggtattatggacaagttaaatatcgagtcatcttcttccggcttcaagaaaaaaccagtaattatcattgttgttggaatggcagggagtgggaaaacgacgttgcttcataggcttgtttgccatactcaagcttcgaatattaggggttatgtgatgaatcttgaccccgctgtaatgacccttccatttggtgctaatattgatataagagatactgttaaatacaaggaagttatgaagcaattcaaatctggacctaatggtggaat

SEQ ID NO: 190934 - DNA, 449 bp, Gossypium hirsutum
tgagaaaagataacgatattcacaagaaaaaagttgaatttgattggtacagcttggagggcccggctgggatgttaagcttggaagaagggattcaaagaccgccagcttttctgctgcgaatagtggtgtcatcccacctccgaccgccacccttagtcaactcatcaacagattccaagcgcgaggtctttctgccaaggacatggttgctttatctggtataatagaccattctttcctcccctgcactgcactactttattatatctatacatctcttctaagctaaattgctttatggtgccgagccaggggctcacacaattgggaaggcaaggtgcgtgcttttcagaggtcgcatatacaacgagacaaacatcgatacttcatttgcgaaggcaaggcaaagtagctgcccaagaaccagcggatcaggggacaacaat

SEQ ID NO: 190935 - DNA, 615 bp, Gossypium hirsutum
aaacacctctgcacttttatcttcttttataatttgtcaagtataatattatacatatcgagactagagagaatggctttttcttcttcatttactgtcatgtgtgttgtggtggcttggatgatggcggggagcagtagctatgctcagctctccactagtttctactctcaatcatgtccaaaggtgttgtctacagttgagtcagtagttaaatcagcagtgtcaaaagagaagcgcatgggtgcttctctcgtccgcttgttcttccatgactgctttgtcaatggttgtgatgggtcaatactcctagacgacacttcttctttcacgggggagaaaactgcggctcccaataataattccgtgagaggtttcaatgttgttgatgacattaagcccaaggtggagaaagcttgccccggtgtagtctcttgtgctgatatcttagcccttgcagctcgggactccccgttgttattcttggagggcccggctgggatgttaagcttggaagaagggtttcaaagaccgcagctttgtgctgcgatatggggtcatccactttcgacgcacctagtcactatcatgattcaacgcgagcttctgcaagac

SEQ ID NO: 190936 - DNA, 1312 bp, Gossypium hirsutum
  unsure (1)..(1312): unsure at all n locations
ctcattccacaagtgtttcttcgtcggagtcggagagcagtccctaggaacaattaaaaagaaccgaaaaaaaaaacacagattaagacagaagcatggccagccagctcgtaggaacaaagagagcttgtgtcgtgggtggcagcggattcgttgcctcattgctggtcaagttgttgctcgagaagggttacgccgttaacactacagtcagggaccctgacaaccagaagaagatctctcaccttgtaacactacaagagttgggagacttgaagatctttcaggcggatttaactgatgaagggagctttgatgcccctattgctggttgtgaccttgtcttccatgttgcgacacccgttaactttgcttctgaagatccagagaatgacatgatcaaaccagcgactcaaggagtggtgaacgttttgaaagcttgtgccaaagcaaaaacagttaaacgtgtcgtcttgacatcatctgccgcagctgtgtctatcaacacactggatgggacagatctcgtcatgacagagaaagactggaccgatatcgagttcttatcatcagcaaagccaccaacttgggggtaccctgcatccaagacgttggctgaaaaggcagcttggaaatttgctgaagaaaacaacattgatctcattacagttatcccttctctcatgactggtccttccctcaccccaattgtccccagcagcataggccttgctacatctttgatttcaggcaatgaattcctcataaatgctttgaaaggaatgcagatgctgtcaggttcgatctctatcacacatgtggaagacgtatgccgagcccatgtttttctggctgaaaaagaatctgcatcgggtcgatatatatgcagtgctgtcaataccagtgtgccagaactagctaagttcctcaacgaaagataccctgacttcaaagtccctaccgattttggagatttcccctccaaacccaagttgatcatttcctcagagaagcttattagcgaaaggttcagctttaagtatgggatcgaggaaatctacgaccaaaccgtggaatatttgaagtctaaggggctgctcaagtgaagcgctctgacgcttccccaatgattatggtgtttgattgttgtgttattgtgataatattcgaataacttcatgttctacacatgaaggcaaaaccgtgtggcgtttgtcatccattttgattatgaatttctatcacctcatgtccttcaatcccatacttaaagctgaaccnnnnnnnnnnnnnnnnnnnnnnnnnnnnnnnn

SEQ ID NO: 190937 - DNA, 458 bp, Gossypium hirsutum
  unsure (1)..(458): unsure at all n locations
accgcggacgcccgtgggcggacgccgtgggcaggacttcgtgggccggacgacgatgggggattattgggcgtnttgggccgctcctaaacccgaagtggtggatcactttaccttcagnnagaagctnnntattagcngaaagggattcacgcgtttatagtattgggaatcgacgggaaatctactgaccaanaaccgtcggaatatttgaaagtctaaaggggcgtgctctaaggtgaagcgcgtttgaccgctccccacaattgattatgggtgtttgactcgttgtgctcattgggataaaatattcgaataacttcatgctctacaaatgaaggcaaaaccgtgtggcgtttgtcatctattttgattatgaatttctatcacctcatgtcctacaaatgaagcatgcattttgttctaataacacaacagtaaaacaccataataattgg

SEQ ID NO: 190938 - DNA, 436 bp, Gossypium hirsutum
aatggattcaaactaaaatagacggctatggagttgcaggggcagtcgagcgtgtaggatggtggtcgccaacaattataagaggtgatgaccgtgaagcagttcacattccaaaccacaagttcactgtgaatgttgtgaggaacattagccagaagactcattggcgcatcaagaattactttgccattagtcatttggatgttaacaaaatcaataatgtagtagcagacatgcggaaggttttagccaaaaatcctcaagtagagcagcaaagattgcatagaagagtatttttggaaagtatcgatccacataaccaggctcttttgatattggtatcttgttttgtgaaaacttcacatatcgaaagaatacctctgtgttaaagaagccataatgttggatcttctcagagttattaaccatcatcgtg

SEQ ID NO: 190939 - DNA, 835 bp, Gossypium hirsutum
gagtcaccaatcatgttgcttaccggacatcagagttctataggtaccgtgaagttcaatccagctgggactgttgttgcatctggatcgcatgacagggaaatttttctgtggaatgtccatggagactgcaaaaacttcatggttctcaaagggcacaagaatgcaattttggatcttcattggaccactgatggatcccagataatatcagctagccccgacaaaactttgagagcatgggatgttgaaacagggaaacaaatcaaaaagatggcagaacattcttcttttgtgaattcatgtcgtccatcacggagagggccacctctcgttgttagtggatctgttgacggaactgccaaactcatgggatatgcgtcagagaggtgccatccaaacatttcctgataaataccaaattacacgccgtagttttttcgatgcatcatataagatcttcaccgatggcattgacaatgatattaatgtttgggacttacgtaaaggtgaagtaacaatgacacttcaagtgtatcaagacatgattacaggtatgagtttgagtcccgatgtgttcctaccttctcaccaatggtatggattgcaaactctgcatatgggatatgcgcccttatgcaccacagaatcgttgcgtaaagattttcgaaggccaccaacacaatttcgaaaagaacttgttgaaatgtggctggtcaccagatggaagcaaggtcacagccggtagttcagatagaatggtctacatatgggatacaacatctcgacgcatcttgtacaagcttcctggccacacaggatctgtgaatgaatc

SEQ ID NO: 190940 - DNA, 435 bp, Gossypium hirsutum
ctaacgttgaaatgcctcatcattatataaatggtggttgggatgagccttcccaccatattgtgcataagaggggtccaagtttgctgaagttaactgatgaacctgcagagttagcaaccatgcgagctgagcttcatcgacgaagtattgcacaaatgaggattaacaatcgatcgatccaagacatgcaaatatttggagatccttcaggagttcctattgtaattatggaacgtgtaataaatgcacctcgtcgtactgttagtgatatatcattcttgaagaattttgacgtcatgcatttagctaccacaagcactgttcttgaagctgggaagagccaatctagtacaagtgctgcacagagtgggcaagacttgaagatcgttgtctttgagcatggttttcaagggcatcatctggatctgcgac

SEQ ID NO: 190941 - DNA, 444 bp, Gossypium hirsutum
ggcgaggcccacttccagagaaaagaaaagaaaaacccatacgagttttcgtatataaacccgccgagttaacccgcttcattacctgactcagctaccactcagtcccaacgcaaaagaaaagaaaaggaaaaatagaaagaaagatgcaagtcctttcgaacgctcgcaatctcgctagggttttaggatctcgaacaattcttttcaattctaatcaactttacctctcatctttgattcaatctcctagctcttctcttcaatgccaacttcacagtgacgcttcctcagggattaatggaagctgttattatccaatgcctctgcattcaatttatccgatgatttcaaggacatttttttcgacagaagctggaacagttaatagcaatccaactgaggcagttaaggaactctatgatgacatgcttcaatctgtaa

SEQ ID NO: 190942 - DNA, 655 bp, Gossypium hirsutum
tcaacttttcaggtgttcttggtttctgagtattgaaggaattctctgtggttctttttaaagctaaagagttcagcttttggggttgatgccttgttggtttcttggcttatattgaagaatttttgtgttcaaagtccatttccttggtgctttatcatggattccccacagtcagttgtttcaccattcaagaactctgttgtagctgagcctgagaagcagaaaaccgagtttttcagtaggaactcgggtggtttgttgtcaaatgggtccgaggttaacaaaaaggaagagaattccattggtgttcttgaggtttatgttcatcaggcaagagatatccataacatctgcatttaccacaagcaggatgtgtatgctaagctttgtctcacctctgaccccgaaagcacggtttccaccaagatcatcaatggtggtgggaggaacccggtgttcaatgataatctacgcctcaatgttcgaactgttgattcctccctcaaaatcgagatattcatgatgagtagagtgaggaattatcttgaagaccagttgttgggatttgcattggtgccactgtctgaagtgctcctcaagaatgggaagttggagaaagaattctctctttcttcaactgatctgttccatt

SEQ ID NO: 190943 - DNA, 769 bp, Gossypium hirsutum
gttgccaaccctatttttcccttgttttgtacagaaacaagcgaattttcttttttgttttaaaaaatttgaaaagtaaaaccgtagaagagattgatcaatccaattctgtggctctctttctctctctcttcagagagttcttctttgaatgtctccgatctcttattttctatcagttgaatgcataaataaataaaaatcttcagaagttttctcaaatttcagatctaaatcatagaagtactttttcatttccccgtaacttatccgaagagagataaagagaaaagaggtagataaatcgagaaaaaaaatgatcacaattccgtatttgaccgctttaaccacgtatttcagctatggccttctcttcgcgtttggccaattccgtgatttcttcaggaacatcttcgattggtggcacgccagcaatcttgagggatatgcgccgatctgtttaggacttgaagatttctatattcggcgcttgtatcttcgtattcaggattgtttcggaagaccgatagcgagtgctccagatgcttggtttgatgtagtggagcgctactccaatgacaataataaaacattgaagcgaactgacaagataagcaggtgtcttaacttgggatcatacaattatcttggcttcacagcagcctgaatattgcacgccccgtgtaattgattcattatgtagattttcggcaagcacttgtagtactcgtgttgaaggaggaactacaacactgcataaagaactgga

SEQ ID NO: 190944 - DNA, 650 bp, Gossypium hirsutum
  unsure (1)..(650): unsure at all n locations
gtttttacatggcttttggtttggaattacgggtcgatcataggatggttgactgaatcagtttcgaaattgggtttttgttttgtattgtaagcaattgagtgaattgggattataaatccataaatgggttttggatttctctgtctttgttgtttcagaaagtgtttttgtttgtaatttatgcttttggctggtttaaaatagtttaactattttggagtagcatagggatattgcgttgccaggtatcaaattctacactgtgcttgtcacaggttttcagtgagaactcttcattagtatctaagctatgacttaaaatttgtcataggatggatgatctctttatagtcaatcatccaggatagatgtttaaagtctttggtctctagaacattacttggactaataaactagctttatggttaaaagggtgtgttccttacatctgtaagtgttttcattttcttaatttctgttcgaagctgtttggagatctcatgtcttccggataacatcctatctganaaaagtgcttcngatttatggtatcatatttatgcactttttgagatgtgctttcttttgcgtaatgatttaggtactagattctatttataagatagctgcagactgatgagaataan

SEQ ID NO: 190945 - DNA, 408 bp, Gossypium hirsutum
  unsure (1)..(408): unsure at all n locations
cttatcctgaggatctgagtctagagtgtgggaggagttccaagcaatctgtagtttatactgagtctgctgtaagccctgaaatgtttgatatggtgctactaaattgtcaaagtgtaaccgagcttcaaaaagttttgcaagatgaaacgagcaagaatgtgcaacagaacggacaattgaaaggatctaatggtggaaaggcacgtgggaagaaacatggtggtaaaaagaacatggtggatttgagaactctcttaaccctttgtgcacaagccgttgcagccgatgattggaggagtgctaatgagctaatcaagcaaatcaggcagcattcttcacctatgggtgatgggatgcagaggatagctcactatttcattgatggcctanaggcacgcttagctg

SEQ ID NO: 190946 - DNA, 1143 bp, Gossypium hirsutum
  unsure (1)..(1143): unsure at all n locations
attctattttgtttctatcaggataataaagaaacttgtcagtccatcaccatgatacttccatccaagtttcaagatgaaactgaaaaaagtgacaaatcttcaccacctttggatgtttcggttgcattccctcaagcaactccagcatctgtttttcctccgtctgtttctgattattatcgatttgatgatctattgagtcctgaggagaagaccctccgaatgaaagtaagagagtttatggaaaaagaagtagctcctataatggcggagtattgggagaaggcagagtttccattccaaattcttccaaagcttgctgatcttggaattgcaggctttaataccgagggttatggatcccctggtctctccatcactactagtgctattgcaaatgcagagattgctagagttgatgcaagtttctctacatttttattggtgcattctgtaggcatgcttactattgcatcatgtgggtcagaggaacagaagcagaagtatttaccttctttggcacagttaaagacgatagcttgttgggctttgactgagcctgaatatggaagtgatgctagtgctgtaaatacaactgcaagaaaggtagagggaggttggataattgacggacaaaaacgctggataggaaacagcacttttgctgatgtgttggttatttttgccaggaataccacaaccaatcagataaatggatatattgttaagaagaattcccctggactgaaagctacaaaaatagcaaacaagattggagtgcgaattgtgcaaaatggtgatattctcttaaagaatgtctttgttcctgatgaggaccgattacctggtctaaactcatttctagatacaaacaaggtactggctgtttcacgagtaatggttgcgtggcaacctattggcatatcaatgggtgtctatgacatgtgtttgaggtatctgaangagaggaaacagtttggagctccattggcagcatttcaacttaaccaacagaaactttctctaatgctaggtaatattcaagcaatgacccttgttggttggcgcctttgcaaattgtatgataagggtaaaatgactcctggtcatgctagcttgggaaagtcatggatcacattt

SEQ ID NO: 190947 - DNA, 484 bp, Gossypium hirsutum
  unsure (1)..(484): unsure at all n locations
gttctgtattatctcgtctactacgttttccattttcgggccgatccgtagctcttatttcagcaccatgactgttcactcccagattcaagatgaaactggcagaagtgtcaagccttcttattttaactcgccacctttggacgtttcggtcgcattccctcaggcaactccagcatctacttttcctcctcttgcttccgactattatcaatttaatgatctattgagtcctgaggagcaggctctacgtaagaaagtaagagagtgtatggaaaaagaagtagctcctataatggcagagtactgggagaaggcagagtttccattccaaattgttcccaaacttggtgctcttcatatttctggtggtactatcaagggttatggatgcccaggtctctccctcactggaagtgctattgcaatggcagagggtgctagggttgatgcaagtngctcaacttttatcttggtgcactca

SEQ ID NO: 190948 - DNA, 984 bp, Gossypium hirsutum
cccacgcgtccgcctgtgagtaaaggaaattaaatttctttaatttttttctctttgtcgacctaagtctcttttatttgcttctttcaccatgaccaagcagcaggctaactggtctccttacgacaacaatggaggatcttgcgttgcgatcgctggagctgattactgtgttatcgccgccgatactcgaatgtcaaccggttacaatatactgacccgagagtactccaaaatctgtaaacttgcagataaatgtgtcatggcatcctcaggatttcaagctgacgtgagggctttacaaaagcaactggcagctaggcacttgatttatcagcatcagcacaacaagcaaatgagctgccctgcaatggctcaattgctttccaacacactttattacaagcgtttctttccttactattcttttaatgttttgggtggccttgataacgaaggaaagggttgtgtcttcacatatgatgctgttggttcctatgagaaggttggatacagttctcaaggttctggttcaacgctcatcatgcctttcttggataaccaactgaagtctcccagtcctcttctattgcctgcccaggatgctgttactccgcttgtggaagctgaagctattgatttggtaaaaactgtttttgcatctgcatccgagagagatatatacactggagacaaactcgaacttgttatcataaatgcagctggtatccgccgggaatacatggaacttaggaaagattgattaatctccattctccaaactgggttaccacctcttatagatgtgtgagttcttgaaattgatggaatgactcttacaatgtgtctgatgcttgtactgcaactatttccttgcatttggatactttaaaatatggattgcagttgaattttatcttccgtctgttagacgaaaatagtctttcatggatggtatgttgcatgactagtctttggtgttct

SEQ ID NO: 190949 - DNA, 579 bp, Gossypium hirsutum
  unsure (1)..(579): unsure at all n locations
cccacgcgtncgaggagatattttttctctctctaataatttccctcctccctctctctctctctctctctaaaacgacgcctctctggaagtacgccaatcgatctcctcgatcttctcgcttttaattctaaaataatttgaaaattttaacgaatcacgaaattagattccctcataaatccaatacttcgtcggggcgaaatggtttaaggttccattttttaaaatctgtggttgaaatcatcgatggctagttctgggaaccgagaatttgttgatgatcatgtggatcaaaacggcgacgaatcgatcgattcatcatcggacggagttaccgagacctcctgtagcggtgaatctggagcggcttcgagacaaaacagcgagacaatgaatgaaatcggactcacggaaagattaaccgacatatttgttgatgaaaacgacagagatttgttgcttcaacaaagcaatcgagatgatagggttcttcaatggttgcaagctttagatatgcgattaatcggcgctagtcgaaacgatgagagactaaagcctatgttgaaagtcaacgtc

SEQ ID NO: 190950 - DNA, 355 bp, Gossypium hirsutum
ccgcagcctagaaaacacaccttatggcagacaacttcagatgttactgatggtcaagctagcatacataggcaacattttctgcagtgtccccaagggttgttaaacaaacattttgaaaaactggtccaatgtgatatgcgtttgaactgtttaagcagacagccagagataattttggattcaccgtactttgaatcacgaagttctgtgtttgaggatcccagtgaacctaaagggcatgactatggccaaggggagactggtaaaggatctactagctctggcttccagaatatagcatcacctgttgcagctcactcctcgactttggagattgagaaaggggattctg

SEQ ID NO: 190951 - DNA, 670 bp, Gossypium hirsutum
gcggcacagcaagccaatgagtggagcgcagattttattctcaaaaaaccaacttcacttcccatttcctagtcttccacgatgactcccctccacttcttcctcctcctcctcgtccgcctcctttcgtcagctgctttaatctccgccgccgccgccaccaccgcatatccttccatcccgggcaccgattccacaactgattgtggcctatccggaggagacgagaatccagttcccatccgtcgcgaagtctacggtaacggcaagatattcgacatcagccataggtacaccgtcgacatgccgtcttgggaatccaaggacggcgtgggacagttcctatggttgcctaaaagcatgaagaacggttccctcgctaataattcggagatgaaactcccaactcacaccggcacccaccttgacgctcccggacacgtcatcgatcggtacttcgatgccggcttcgatgtcgataccctagatttggaagtacttaatggtcctgccctgttgatagatgttccaagggataaaaacattactgccgaggttatggagtctttgaaaataccaaagggagtacgtagagttcttttcagaacattaaatactgacaggcggctaatgtttaagaaagagtttgatacaagctacgttggattta

SEQ ID NO: 190952 - DNA, 447 bp, Gossypium hirsutum
gagatcttaagtgtgacaacatctttgtcaatggccaccttgggcaggtcaagatcggcgatcttggactagctgccatccttcgtggctcacaacaagcccatagtgtcatagggacccctgaatttatggcaccagaactatatgaagaggattacaatgagctagtggatatatactcctttggaatgtgtgtattagagatgcttacctctgaatacccgtatagcgagtgttccaatcctgctcaaatctacaagaaagtgacttccggaaagttgccagaggcattctataggattcaagatgaggaagcccggaggtttatcggaaagtgcctggagaacggttccaagaggttgcctgctcacgaactcttgcttgatccatttttggcctctaatgaaggcaatctgctgtctgtcccaagagtcctgagccaaaagc

SEQ ID NO: 190953 - DNA, 876 bp, Gossypium hirsutum
  unsure (1)..(876): unsure at all n locations
ttttgttctaattcacaaggcaagacaaactgttaagaaagtgggtaggtactaagagcagattttctattgcaactttgtttcatttgggtttcattgcttgggttaactcatcatcaaaagttgaagaaatcattttaatattgagcagcctgttcaacaggttggccagcattagataaagctcccttgcaaataattgaaggagctaacaggaaatattgagatagaaaagaaaaaggaaagggaaactatgacacacttcgttctagttcatggtatgtgtcatggagcttggtgttggtacaagattgtgtcgctgctcaaatcaggcggccaccgtgtcactcccttggatcttggtgccagtggaatcaaccccaagaccatcactgacttggcttccttgtccgattatgcggagccattaatggcattaatggcctctttgcctgaagacgagaaagtgatactagtgggtcacagttacggtggggttatcatttccttagccatggaaagcttccccatgaaagtattggccgctgtttatctcacagcttttatgccgaatcatgattcttctattgcgactggagtagctgagtacttcagaagggttatggcggagccgctcttggatttccaggtatgttttgatgatggatcagaaagtccaccaactcgcccctaatttggaccaaaatacacggagacnaaggtttaccacctctcaccaaaagcggatataaaattgggtttgacgttgatgaaacaangaaaattattcctcanagatttancaaacgaatcgctgctaagcaaagagaaattcggatccatccatcgggtttatatagtntgcaaagatgattt

SEQ ID NO: 190954 - DNA, 444 bp, Gossypium hirsutum
cagaagactttagacttttcattaaagcgttataaagataagcgagattatcatttcagactccaagatcaaagcggtatttacgggaccttacattttggataaaaatgggtgatcatctggttttatgtgtggaccgtcttataacacctgaaagtttgcaatcaatgcaagaaactgaggctgcaggatcttccggtgaaagttcttctcaatcctctgacccaaatgcttgtgctattggtgttaaggaagtggaagaacatggttgctgtgatgaagaagaaccacttatacagacagctgaatgccgtatctgccaggaggaggactgcattaagaatttggagactccttgtgcttgtaatggtagcctgaagtttgctcacaggaaatgtgttcagcattggtgtaatgagaaaggtgatataactcgtgagatct

SEQ ID NO: 190955 - DNA, 409 bp, Gossypium hirsutum
ggaatgcggatgttgaagaggggagtagcaatgatgggtcagatagagtgcggaaggatgagggaaggaaaactgggaagaagactatagaagagttgcgggaagaacgcttgaagagggagaggcgggagaaggagagggaaagagcattgttaatcgagaagaacaaaacaaataggactgtgaaggacacaaggttttccaggaggtgaatgagcttgcagaagttaaagctcagcagtttcatctttctaaatgttcaaattgcagtcatttgaaattggggtctaactggccttttgatatttgttagagcagcatataaatttactccatatttaatttcacaatatattttgtaagagctacgtttgatgcttatgaatgaaagttaacttttcttcaaaaa

SEQ ID NO: 190956 - DNA, 831 bp, Gossypium hirsutum
tgtcttagcaacaaagtttgtctataaaaaaatcagctctgctatcgggatacaaaagactgccaaaagcggaggtggaagtttgccaacgcatattgaaaagttttatgaggcggttggtctggaagtgcagaatggatatggcttaacagaaacatccccttgcattgctggtcgacgaccctattataatgttcttggttctgttgggcatccaattccactcacagaattcaaagttgtagattccgaaactggtgaaatcctcccacctggctccaagggcattataaaggtcaggggaccgccagtgatgaaaggttactataagaatccattggctacgaggcaagccctagacgaatatggttggctaaatactggtgatataggttggattgctcctcatcattcagtagggcgaagtcgtcgatgtggaggtgtgatagttttcgaaggacgtgccaaggacactattgttctttcttctggtgaaaatcgttgaacctttagagatcgaagaagctgccttaaggagtactcttattcaacagatcgttgtcatcggccaggatcaacgacgccttggcgctgtcattgtcccaaacaaagatgaagcactcctggcagcaaaagaggcatctattgtagatgcagatgccgtcgatcttagcaaggacaaaattacaagcatgctatatgaagaattgaggaagtggacctccgagtgttcatttcaaattggaccaattcttgttgtggatgaaccttttacgatcgagagtggcttattgaccccaaccatgaaaatccgaagagaccgagttgtgg

SEQ ID NO: 190957 - DNA, 441 bp, Gossypium hirsutum
cttcctttggtactcaagaaaaagcaagagatgggtttttcaaggaaagagtacgagttcttgagcgagatcggattgagttctggcaatttgggatgttttgtgaatggcacctggaaaggaagtggccctgtggtttctactcttaatcctgcccataatcagaaaattgccgaagttagtgaggcttccatccaagactatgaggaagggatgcaagcttgcagtgaagcagcatagatttggatgcaggttccagcccctaacagaggtgacatagttcgacaaatacgtgatgcattgagatccaaactacagcagcttggccgccttgtttctcttgagatgggaaaaattcttcccgaaggaattggggaagttcaagaaatcattgacatgtgtgactttgctgtgggttaagcaagcaattgatgggtctgt

SEQ ID NO: 190958 - DNA, 447 bp, Gossypium hirsutum
aaacagcatctccaactctaagtttcaattgcattcctttgtttcttttttctagcttttctatcaatggaatttcgttatgttccaatcttcgctatggcgcttgttcttgctgttggagcaacgagacatgtcgctctaccagcagagatgtactggacgtctgtgttcccaaacactccaatgcccaaagccttgcaaaatcttttaatcccccctgctgctgctggtttgtttgcaattttcttttcttttccccaatgattgagtagacatatataattcaggtaagtcttctaatgctctagatatctctctgcaaatgagatgtacgaaatcacatgaaagctgctttggctaatatgatcaaaaggtataaaggaatattaatcccacgatacgtcacagcttataggatatatgaaaacgcagcaggcaattcaaagc

SEQ ID NO: 190959 - DNA, 761 bp, Gossypium hirsutum
ttccacgcgtccggcgtttgcgtgtcttctcatctctgctttttccccctttttatctttcttcttctttttcttcttcttcttcttcttcttcttactccagccgactttttccggcaaaacggtgtcagatctttgtgatctatagccggaagtttcatttcgagttcgacgatctcatccttcgatctttccactttcttcagcctaccatgaatcccgaatatgactatcttttcaagctacttcttattggagattccggtgttggaaaatcttgccttcttttgagatttgctgatgattcatatgtagaaagttacataagcaccattggggttgattttaaaatacgcactgtggagcaggatgggaagaccattaaacttcaaatttgggacactgctggtcaagaaagatttaggacaattactagcagctactaccgtggggctcatggcataataattgtttatgatgtgacagaccaagaaagcttcaataacgttaggcaatggctgagtgaaattgatcgctatgctagtgataatgttaacaaaatactggttggaaacaagtgtgatcttacagcgaataaagttgtgtcatacgaaacaggcaaggcacttgcagatgaaattggcataccttttatggaaactagtgcaaaagattcaactaatgtggaacaggctttcatggccatggctgcttccatcaaggacagaatggcaagccaaccagccatgaacaatgcaaag

SEQ ID NO: 190960 - DNA, 430 bp, Gossypium hirsutum
cgatgacctggacgacgaggatgcagaggaagaagaagctagcgcctcctcgagtaaacctgctaagccagaggattataatgatgaagagtgggagattaagtcttccattgggagggactgtactcttgattacgaggaagaggaagatgcatacgataaagtggcagttggaagggataagaatggagatcgcctttacatgaaagatgtgaatgactatgacatagatgcggattcttgcaacacacttccaactacgttcaaggatttcagtagagatccacgtgccaatcacatcgctgcaaaacttaggctcatggaagatgaagaagctactaagagaaggcttgaagaagatgctgaagctgctaaaaaaatcgattcattgcatgtgtctgatagtgatgcagctgtgggtgttgaggct

SEQ ID NO: 190961 - DNA, 674 bp, Gossypium hirsutum
attcgatgtgccgtcagtcctatcagctatgggcttattggggttccgaaagattataccgggattaaggaagacattttcagagcagcagtgaacaaaagggtgtcgcacaacagaaactgatgatgaattgagacatggatcgaccgattgactggcagagatagaaacaacatggctttcattggcagtgctaatagccgaaagacactcactgaatggttttctccatgtgagaaactaggaattgctgctgagcatggctacttcttgaggctcaagggagacgtggaatgggagacgtgtgtaccagccggggactgtgcatggaagcagattgcagaacctgtgatgaagcaatacatggagactactgatggatcctacatcgaagataaggaaactgcccttgtctggtgttatgaggatgcagatccggattttggatcatgccaagctaaagaacttcttgatcatctcgaaagtgtgctggccaatgaacctgttacggtaaagagtgggcagaattttgtcgaggttaagccacaggtacagaaatatatttccaaatatggtacaatacttttcttttttatcagtccacattgagccggaaatcaacttatcgaatcagtgattgccaagcaaaatgagtatggttaggtctactgaaa

SEQ ID NO: 190962 - DNA, 839 bp, Gossypium hirsutum
aagacactcactgaatggttttctccatgtgagaaactaggaattgctgctgagcatggctacttcttgaggctcaagggagacgtggaatgggagacgtgtgtaccagccgtggactgtgcatggaagcagattgcagaacctgtgatgaagcaatacatggagactactgatggatcctacatcgaagataaggaaactgcccttgtctggtgttatgaggatgcagatccggattttggatcatgccaagctaaagaacttcttgatcatctcgaaagtgtgctggccaatgaacctgttacggtaaagagtgggcagaattttgtcgaggttaagccacagggtgtaagcaagggtctagttgcaaagcgcctactctccacaatgcaagagaggggtatgttgcctgactttgttctctgcataggagacgacagatctgatgaagacatgttcgaggttatcataagttcagtattggggccgttgatcgatcccagagcagaagtgtttgcttgtactgtgggtaaaaaaccaagtaaggctaagtactacctggacgatacaggtggaaatctgtaggttgatgcagggtctggcttctgtttcagatcaaatgcattcggtgttggcttagctagcgaagggaaaaaacgaaaggtgcactgctcttctttgtgtttgtaaactctaatatttgctcaccttgttttgcaatgtacatcatcttagtgttactaaaagaaactgcttgcaagcgaatacttttttctctgtgttctttgttttttcttaagctgtaaatatgcgcttgcgtgatgaaatccagtttcccc

SEQ ID NO: 190963 - DNA, 684 bp, Gossypium hirsutum
cggacgcgtgggcggacgcgtgggtaatttcgcgaaaatcctcaaatatcttgttcaaaaagaaaccctaaatcatgggtcagggaacaccgggtggtctgaaccgacaaggctttccaggggatcggaaacaggatggttccgataagaaggagaagaaatttgagccggcggcaccaccggccagggtgggccgtaagcaacgaaaacaaaaaggacccgaagcggcggcccggcttcctactgtgacgccgcatactaagtgtaagctccggctgttgaagctggagcgggtcaaggattatttactgatggaagaagaattcgttgctaatcaggaacggctcaagccgcaggaagagaaagccgaggaagatcgatctaaagtcgatgatttgagagggtcgccaatgagtgtgggtaatttggaggagctgatcgatgagaaccatgcgattgtttcgtcgtcggttgggccggagtattacgtggggattttatcgttcgtggataaggatcagttggagcctggatgcgctattttgatgcacaaataaggttctttttagtgctgggcttctgcaagatgaaagtgatcccatggtatcagtgatgaaggttgaaaaggctccatttggaatcctatgctgatataggaggtttggattctcagatacaggagat

SEQ ID NO: 190964 - DNA, 419 bp, Gossypium hirsutum
accactcgtacgatttttttcaaaagatcccacagccatctcataatctgagccgagtgtcggaggcctgaaaacgaaccctaaacgatgggtcagggaacaccgggcggtatgaataggcaaggtttcccaggggaccggaaacccgatggctctgataagaaggataagaaatttgagccagcggcgcccccagccagggtggggcgcaagcaacgaaaacagaaaggacctgaggccgcggctcggcttccgactgtaacgccgctgacgaagtgtaaactgcggttgctaaagctggagcgggtcaaggattatttactgatggaagaagagtttgtggctaaccaggaaaggctcaagcctcaggaagagaaagccgaggaggatcgatctaaagtcgatgatttgagagggtc

SEQ ID NO: 190965 - DNA, 470 bp, Gossypium hirsutum
acccacgcgtcgcgtccgcgatactcaacggtgttttgtgattaaaaaaactaccaagattgtggcaaaacaagatggcttccctgcatgaaccatggctagtggagaacgggttgaaggggtctagcaaggagattcgccatggcaggactgcacacaacatgtcgtcttcgtcgttgcggaaaaaatcggacctgacgcttgtttccaaggttcggtatgcaatgcttaggcagttcctcgccaatcttcaagaggtcatattagggaccaagctctccgttctcttcccagctattccattggccattgttgctgagtgttatggatttggaagaccctgggtgtttgcattaagtttacttggacttacaccattggctgaacgagtcagctttctcaccgagcaaattgcttattacactggtccaacagtgggagggcctgtgcatgcaacatgcgggaatgca

SEQ ID NO: 190966 - DNA, 430 bp, Gossypium hirsutum
agaagacataaaagtgaaacaatgccctatgatggagcagattatcaaaggagcagaggaaactgaaatggatatactcttgttacccaagcttcgggagataagacttaagtcatgttcaaggttgacaagtttttgtatgggaagtattaccctggaatgtccatctttaaatgaaatcgcagtcaaagattgcccaaagatgtatgcaatggcatctacaagggagcaagaggatatagagatagttggcagagaaaagacaccctttttcaatcataaggttttgtgtgcccgcttgatgttcttgaacctatcatcaactaacataaaaaaattatggcctgataaaccagactgggctatatcctctaatgttcttaacttaaaatacttatctgtgaagcgttgccacaatttggaatatcta

SEQ ID NO: 190967 - DNA, 479 bp, Gossypium hirsutum
cgccacgcgttcgacctggtgctggtacctggagtgcatatgacatgccgagagctcgaggacatcgctagtgtgatttttaaaagcatgctgagatgattcatctggtttatgaatttgcaccttgcaaattttctgtttcagcagttatccagtgatgttggagttccctgagctcatgatatgcgatggtgatgaggatgataactttgccatggtgtgcaacagcttgttttagctgtatgacagaatccattgaaggaagaggggtttcttaaggtctcaagcttttatttactctagctattatgaatggagatagtttgagatgttttctagacatcatgtgaatcaatatcttcttattcccattttgtattgcatactatgatcccctttcccacagccgggccagactgctaaactcaaaactgcaggttgtgcttcttcctgaactttgtggtgcattcttaacccag

SEQ ID NO: 190968 - DNA, 760 bp, Gossypium hirsutum
aacccatttccctctttctctgtccatccatttctccctcgtgttcttctttttcttcttttttatcctctcaaagacctttttgtgttgcagaatttactcctttttagttttgtggactatgccaaaagctggggttcttcctggttaactaaggcctatttttgggtgggttgaacttatatcagtactagcagattagaggttctctcaagtttcagacatatttgagttcctatcttggaacaatgatgatgtttgacgagatgggaatttgtggggatatggatttcttcagtgctccacttggggaaaaagatgtggcagcctcacaaattgaaccagaggcgacggtggaggatgattatagtgatgaagaaattgatgtggatgaacttgagaggaggatgtggagggaccaaatgcgtctcacacggcttacagagcataattagtgtaacgacgggattgatattgcttaaccgcggctgtcccatgatcaggcgaggagaaagaacatttcgatggcacacgatgggattttgaactacatgttgatcataatcgacgtttgctaagcgcacggttttgtttatgggattattccccaaaaggggaagcccttcactggggcttctgacaatcttcgggaatggtgcaacgatctactctcgtttgatcgtaatgggtcctgctgctttctgctcgttttcccgcagattatcccatcccctgccacgaatgatggccgttacctccc

SEQ ID NO: 190969 - DNA, 687 bp, Gossypium hirsutum
atcctctcaaaatcctttttctgatgcaaaatttactcctttttagttttgtggagtatgtcaaaagctggggtttttcctggttaactaaggcctatttttgggtgggttgaacttatatcagtactagcagattagaggttctctcaagtttcagacgagatgggaatttgtggggataagggtttcttcagtgctccacttggggaaaaagatgtggcagcctcacaaattgaaccagaggcgacggtggaggatgattatagtgatgaagaaattgatgtggatgaacttgagaggaggatatggagggacaaaatgcgtctcaaacggcttaaagagcagaataagtgcaaggaggggattgatattgctaaacagcgcctgtcacaagaacaggcgaggagaaagatgtgggggttctcacggcagaataagtgcaaggaggggattgatattgctaaacagcgccgatcacaagaacaggcgaggagaaagaagatgtgggggttcacacggctgtgatcaagcatatatgctcgttttctttagttttggaatgggtcagaagatttctttctgaccattttcaaattttttgatgttgtaaaactatataacatatggattatgatgtagaattttattttaaccttttcttaatataagttaattatgtttatgtag

SEQ ID NO: 190970 - DNA, 422 bp, Gossypium hirsutum
accagttgtttgtctcgttggtctcggtctctttgcacgaggcttcccattggtaatttttctttgaacactttaatgcttggttgggacaaataatatgctgatataaataatgcagttaatgtatgatacagcttggtaactgcgtggaaatcggcctgcctatgcttattctactgattatttctcaacagtacctgaagcgtgtcccctcgagagcccatctaatactcgagaggtttgccttgcttatttgcattggaattgtgtgggcttttgctgctatcctaaccgtgtctggtgcttacaacaacgttaagactgctactaaactgagttgccgcacggatcgatcttacctaatgtcttctgcaccttggtatggtcataacgtgctgttctggctgctttaatcgcgttcg

SEQ ID NO: 190971 - DNA, 651 bp, Gossypium hirsutum
  unsure (1)..(651): unsure at all n locations
aaatcacaaaagtatcaccactaaacccagttctctgctacttggatttggaacccggattattttgactcgtttgtccatttccttttgaatattcatcgagatcccaaaaatcccatcaacaactttgtttttccttttcggttttattccgttttctccacgttcaaacgtctcaaaacgaattacacatatctcgaagaaatgcaggaattcaagaccatcaagaaaaaaatgtggatgttttcttgttaaccttcacatttgcttcaactatctcccctactcctctcgcgtaatggaagctatcatcataacagccatagcaccgatcatcagaaacaacaagaagaaagtcgttaaccaacacaacttctctctgcaaaagctctccttctggtttgctcccaccacacgtccacctggtctactctctttcactcccggctcctanaatataaaaaacgaatagggaaaaaaaaacaaagaattctgctntgtnnttggnttttgtatggctgttactctttaacaacaactttcatccggaattgtattctgtatcttgatcattttacgccattggtctatcatgaagctcctgtgggtttgtcgtctcgtgcccattctggttgatctaaatganactgg

SEQ ID NO: 190972 - DNA, 385 bp, Gossypium hirsutum
gcagtttggtgttacctacttagtgactcacaaagaaaccgatcagcaattcgcttgtaaatccatcgccacccgtaagcttatcaaccgtgatgacatcgaagacgtccgccgagaagtccagattatgtaccatctaaccggccacaggaatattgtggagctgaagggggcttatgaggatcgtcactccgtgaatctgataatggaattgtgtgcgggaggtgagttgtttgaccggattatagcgaaaggccattattcagagagggaggcggctaatttgtgccggcagatcgtgacggtggttcataattgtcattccatgggggttatgcatagggacttgaagcctgagaatttcttgttactgagtaaaagggga

SEQ ID NO: 190973 - DNA, 1382 bp, Gossypium hirsutum
  unsure (1)..(1382): unsure at all n locations
cagctatcttacatcggtggagagactaagatactggccgctgatcgaaacatcaaattctccgccatgatctctaagctctccgctctctgcggcggcggcgacggtgatttttcgttcaagtaccagctccctggtgaggacctcgacgcacttatttcggtaactaacgatgatgatctcgaacatatgatgttagaatatgatcggctttatcgagcctcggccaagccagctaggatgcggcttttcgtgtttccagcgaccggttccgtgaattacgggagcgaaggggccaaattggaccgtgagcggttcgtggaggctttaaattccggtacgactccgggaggcgagaaaaccgctgcgatcccgcaaagcaatgtggatttcttgtttggacttgaaaaggggatggctccacctccgctggttaaaatccgtgatcccgtggcggaaccggtgatccaaccaccgccacctccggtaccggaagtcgttgggacggatcatgctttgagtccangtgaaattcngagacagatacaagaattgcccgggcttcaaattccggatcaagaacatctactatgaattacagaggcttcaaattcgggatcaagaacagctcgctatgtataggaagaagactgaagaagctgcttctttcccttatacaggggaatactacgcccagaagttacctgaaaaaccacaaccggtgaccgtacaacagcatgtgccagcgacagccggaatctggccggataaacaaatttcagccgggggtttcccagcaaccgtagcggcagccccacgaccaccaccgccggcggatcaccctgtttacatgatcccagctccagttccaggatcggctccggccaacctctatcacgcacctccaccagttccagctccagcacctgcacctgcatcagcatcagcagcaccacaaatggttcgaccagtaaccggacaagccggtcaaggctactacaccaacgtacagagaatgcctcatgaagtttaccgggagcaacccgtttacaacatggtggcccaacctcaacctccgcccactcaacaccagccgatatcaacgatgccacaacaggtggtaaggccgccgagcagcggtgtaacagatgctggatatggacacgtcgcagcgttcgacagacaggcttactatactgcacagggggggtgtcgtgcctcctcagtatcaaggcgttggtgtggcggttagtggtgacaaaagaggcaacgtcgacggcaaagtggtatataaagtttcacaaggttcagtttaatttctaaaattatgaaaggtttttcgatatatctgtgaggttaattgggattattacgtattacta

SEQ ID NO: 190974 - DNA, 652 bp, Gossypium hirsutum
gacctttttatcgatatatagactccgccataagcattcgtaacttcgccgccgttgattattatcttcaaaaatacgctgcggcaactaagtgagttggtgcgaagatgagtcgtggtgcagcagcgggacccaaggggaagaagaaaggagcgtcctttaccatcgactgtgctaagccggttgaagataagatcatggacattgcctcactcgaaaagttcctccaggaaaggatcaaggtaggtggcaaagccggtgctcttggcgactccgtcactgtcacccgcgacaagaccaaaatcaccgtcacctctgactccaacttctctaagcggtatcttaagtacttgaccaagaagtacttgaagaagcacaatgtccgggattggcttcgagtgattgcttccaacaaggacagatctgtttacgaactccgctacttcaatattgccgagaatgaaggggaggaggaagaatgaacaatcagttccacattttttttctagtttactgctttattatttcttaggaacgtcttttatctatttaaggtgtcatgttctgcttttttccttcagaccttactctaatttgcaatgaaattttgattgctgatagtaaattttgctataaaaaagatgcatttttc

SEQ ID NO: 190975 - DNA, 706 bp, Gossypium hirsutum
gtaacttggccgttctatatcttccacaacacagaggcagctaaggtaacccatctctctctgcgttcctcgttgtctttcctccttcctttctttcttgttgatttggctcagtgacagctcagtgagttggtgcgaagatgagtcgtggggcagcagcgggaccccaggggaagaagaaaggggcctcctttaccatcgactgttctaagccggttgaagataagatcatggacatagcctctctagaaaagttcctccaggaaaggatcaaggtcggtggcaaagccggtgctctcggcgattccgtcactgtcacccgcgacaagagcaaaatcactgtctcctccgactccaacttctctaagcggtatcttaagtacttgactaagaagtacttgaagaagcacaatgttcgggattggcttcgagtgatttcttccaacaaggatcggaccgtttacgagctccgatacttcaacattgcggagaatgagggtgaggaggaagagtgaagaccggttcagctttttctctattcatcacccctttgtttggtttatttgttatgaggaacctacattatcaatctcaagtgtcgaatctttggacttgattaggcttgtttttgaaccctaaactgttttcaatgaatatttggttgctcatagtattaaataattttgaaagaatttctttattaatt

SEQ ID NO: 190976 - DNA, 662 bp, Gossypium hirsutum
cccagcacaaggacatgctccggccaccgtctaccacgcgcctccacaagttccagctccagcttctgcaccagcaacgcaacaaatggttcgaccggtaaccggacaagccggtcaaggctactacaccaacgtacagagaattccatccgaagtctaccgggagcaacccgtttacaacatggtggcacaacctccttcaccatcgactgtgcgaagccggttgaggataagatcatggacatcgcttctttggagaagttccttcaggaaaggatcaaggctggtggcaaagccggtgctctaggtgactccgtcactgtcacccgcgacaagacccgtatcaccgttacctctgactccaacttctctaagcggtaccttaaatacttgactaagaagtacttgaagaagcacaatgtccgggattggcttcgggtgattgcttccaacaaggaccgtaatgtttatgaactccgctacttcaatattgctgagaatgacagggaagaggaagaatgagcaatcagttcagttacttttctctgttacctatctggtttattagttctgaggaaacttgtttgtgtcaaatcgttggacttgtttgggtttgctttttgacccttggctttattttcaatgaagttttggttgctgat

SEQ ID NO: 190977 - DNA, 555 bp, Gossypium hirsutum
gaccggtaaccggacaagccggtcaaggctactacaccaacgtagagagaatgggatccgaagtctaccgggagcaacccgtttacaacatggtggcacaacctccaccaacccaacacccgccaatatccggcatgacacagcaaatggtgaggccgcaaagcggaggagtaccagattcttcatacgcacacatggcagcgtacgacaggcgagtttattatactgccccagggggtgttatggtgccgcctcagtatcaaggcgttggcgtgccggttagcggtgaaatgagaggcagcgccggcgccggcggcgagattaaagtgggaaatataggttcacaaggttcagtttgatttttttttttattattatcaaaggttcagtttgattgattatcaaagaatttggaagtatatttcattagtttcaattggtattacaatacctgttgctatactaagtataatttaagttatttccacttgaatcactgtgttttttgttttttgtttttttatgctatacgaccttatgattttgtccatactc

SEQ ID NO: 190978 - DNA, 438 bp, Gossypium hirsutum
attttgagaagataaaagcaaaagaaatcgacggattttggatcccattgtttgacgaatttgcaaattcctgaactgaattcattttgatatggtgatacggtttgaattagcatcaaatttgatgttacctaatgtttacataatatatcttaattttctccatttatatcgtcttctttttgttttggataaggccagttgaaattgtatatcggctttcagttgatttttcatatggggattaacttttatgcaactttactttcattcttatctgtcatttaagttttagggatctttggtacttgatgtactatttttgggttaaggaatttaaatcctaaaacgatataatgtttttgtttgttggctacaggagtgtataagaacaatggttatttgatggtttcatgtaatggaggtctcaatcaaatg

SEQ ID NO: 190979 - DNA, 786 bp, Gossypium hirsutum
cagaaagagaaccttgggtgttttcttccgcttgagttatctccatttgtccctgcaatttgaggtaagccaaagccagcctctttgcttctcttctttacgagtattaatactttttattaaattagaaatcggtcgttccttttttccccgaaaagtctgatctttggaatgaactcatcagccgttctcagaaggcaaaaactcttaaagctcataaaaaatctacatatctttcatccctggtgcccaaaacacaaaacccaccaaaacccatgtgctcaaatacataatctcttcaagggtttttggggtttcccaggagttcaactcaatccaccaagttccccgagtaccagatgccctctgtcacttggggtgttgttcaaggcaaaaaagagaagctagtgaaccgtgtcaggatctgtgattatcttaagaccttaggaattatccctgatgaattagagaatctagaattaccctctactgtaaaagtgatgtctgagcgtgtccagtttttacagaaacttggattaactattgatgatatcaacgaataccctttaatgcttggctgcagtgtccgtaaaaacatgatacctgtattaggttacttggaaaaagtcgggattccaaagtcaaaactaggggagtttgttaagaactatccgcaggttttgcacacaagtgtggttgatgagcttggtcctgatattaagtttcttaaggggcttgatgttgagaagcaagatattggatatggtctacagaagtatccataac

SEQ ID NO: 190980 - DNA, 403 bp, Gossypium hirsutum
attccttctgcccctttattgcctgatgatgctgcttggggtaggggtaatcagtctagtttttccggggcgaatggctcagagttcattaacaaacccgagaatttctacaatgcatcaaggataagtggttaccccaattggtcccctgatggcgaacgtattaatggttctggtattccaggtttcattgataaataccctccatttagcgggatgacttcttcagaatggcttcggagatacagagaaagtcgcaatcctgatcatgccaacagccatgtgcagcctctcaactattacgctcccgggaaccccattcccacacatgatggttcccgtgttggtcttttcaatcaatacggagttccatctgttccaaatccaacaatttacacagaga

SEQ ID NO: 190981 - DNA, 702 bp, Gossypium hirsutum
aaagagttgtcaatctgttgattaagcaacaatactgggaaaggagagtctaaggacataaggatcttcgtctctgatgtgtgattgtttgaagctatggattcaactggcaaaacccaattctttcggtcgagttccctaacggcgggagaacggatctgtgcatctgctttcttaccggtccttatagtgatcgatttcttgatttatgcaacgtctaattgctttggatgccggccccgacccatgatatgcatctatgagttcactgatcttacccggctcgctcatgaatcccgattttcggtgaatgaagtcgaggcattgtacgaacctcttcaggaagcttgagtacctcaatattccatgatggattaattccacacggatcagtctttaattatcctttttctctaatacccttagtgcaccaatatctttccttaccttgctttcataacctttattcgtataaattatcacatgtcgtctattctttttgtatgtatatcgtctctattcctttaacctagtttcaatcaatttacactttaaaactcttattaatcttctcatcattctcaatatttttctcttccttcctaggctttacttatccattaaacattatcttctcttgcctttgcctttatttctccatcttgtattctaatcacatttcctttacgctaaaattatacg

SEQ ID NO: 190982 - DNA, 412 bp, Gossypium hirsutum
gttgaagtctgaagaatgcttgagaaaggaaagggagagagtgtctcattacctgcattcaagcagtgagacaaaattgttagagaaagtgcaacatgagttgttggtcacatatgcaaatcggctacttgaaaaggagcattcaggatgcagggccttgcttagagatgacaaggtggaggatctttctaggatgtacaggctttattgtaaaatacctcgaggcttggagcccgttactaatgtattcaagcagcatgttactgctgagggtacagccttggttcaacaggcagaagatgctgcttcaaatgctccgggtgtgcaggaacaggtccttataaggaaaataatcaagctgcacgacaagtatatggcatatgtgaccgactgttttcaaaaccatactctc

SEQ ID NO: 190983 - DNA, 446 bp, Gossypium hirsutum
attcagtttacgatctacacacggtggctaccaaaagcatcggtcctccattcattcacgggtcacttttcctgcgggaaatccgatcctggaacctagtgtggagatgaattttactagtaaactacttctaggttcccatggcaggctttacaggaatgctttgaaaatgcctgcattaattttggatgagaaagagaaaaaggtctcgaggtttatctctagtaatggattagttgaagatccatgtgccattgagaaggaaagagctttgatcaatccttggacatcccaggagaaggaaatttttatggataagttggctgcctttgggaaggacttcagaaaaggtgcttcttttcttgatcacatgacatctgctgactgtgttgagttctattaccaaaatcacaaatcagaatgttttgagaaaacaaagaagaatg

SEQ ID NO: 190984 - DNA, 1154 bp, Gossypium hirsutum
gacaaagcctatatgcattggaaggcatgccttcggtgatcagtaccgagcaactgatgctggcattaaaggagctgggaaacttaaacttgtttttgttccagaggggccgggcgcgtgggctgaacatgaagttttcaacttcactggtgaaggaggagttgcactggccatgtataacacagatgaggctattcgggcttttgccgaggcttccatgaacactgcttatcagaagaagtggcctctttatcttagtacgaagaatactattcttaagaagtatgatggaagatttaaggatatctttcaagaggtttatgaggctaactggaaatcaaaatatgaggctgctgggatatggtatgaacaccgtctcattgatgatatggtggcatatgctctaaagagtgaaggtggttatgtttgggcatgcaagaactatgatggtgatgtccagagtgatttcttagcccaaggttttggatctcttggattgatgacatctgtgctggtttgcccagatgggaagacaatagaagcagaagctgctcatggtactgttacacggcatttcagagttcaccaaaagggtggtgagaccagcacgaacagcatagcatctatctttgcttggacgcgtgggcttgcacacagggcaaaattggatgacaatcctaaactcttggatttcactgagaaactagaggcagcttgtattggaactgtggaatctggaaagatgaccaaagatcttgcactaatcattcacggctctaagcttgctagggacaagtacctgaatactgaggagttcattgatgctgttgcagcagatctaaaagcaagactttcttaagcataaatttgaaaatggtcgaaaatggaagggggtggttttgcgggtttgcaggaaaaataataataataaaaagcatcagtggaggtggcgtggatgaggtgaggatggcggtgggcatgggtggtgtcaatagatgaatttaatcaccattttatgagatacagagacgagcactctctcacttgattcatctcatttttatgttttcaagggtttcgatttttaatgtaacattatatttaaggatttggattttggttaaaaaaaaaaaaaaaaaaagtcgacgcggccg

SEQ ID NO: 190985 - DNA, 656 bp, Gossypium hirsutum
cggggcgacccaagccgtcggccaacccttccgccaacgcgtccggttaactggaaatcaaaatatgaggctgctgggatatggtatgaacaccgtctcattgatgatatggtggcatatgctctaaagagtgaaggtggttatgtttgggcatgcaagaactatgatggtgatgtccagagtgatttcttagcccaaggttttggatctcttggattgatgacatctgtgctggtttgcccagatgggaaaacaatagaagcagatgctgctcatggtactgttacacggcatttcagagttcaccaaaagggtggtgagaccagcacgaacagcatagcatctatctttgcttggacacgtgggcttgcacacagggcaaaattggatgacaatcctaaactcttagatttcattgagaaactagaggcagcttgtattgcaactgtggaatctggaaagatgaccaaagatcttgcactaatcattcacggctctaagcttgctagggacaagtacctgaatactgaagagttcattgatgctgttgcagcagatctaaaagcaagactttgttaagtataaatttgaacatggtaactactcctaaccatcaaagttcgttgtgcttgttttgcccccttcaccttgtatag

SEQ ID NO: 190986 - DNA, 1389 bp, Gossypium hirsutum
cttttccgggattggaacattgggcaggccaaatccacagttgctgcttctgctgcagcatcaataaatccctgtttaaaaattgaagctttgcaaaaccgtgtcggtcctgaaactgaaaacgtattcgatgataccttctgggagaatttaacagtggttattaatgcattggataacgtgaatgccaggctttatgttgatcagaggtgcttatatttccagaaaccgcttctcgagtctggaactcttggtgccaaatgcaacacacagatggttattcctcacctaactgaaaactatggtgcttcaagagacccacctgagaaacaagctcctatgtgcacagtgcactcatttcctcacaatattgaccattgtctgacatgggctcggtctgagtttgagggtctactggagaaaactcctgctgaagtgaatgcttatctgtccaacccagttgagtataaaactgcacaaaggactgctggcgatgctcaggcaagagataatttggaacgtattcttgaatgcctcgagaaagagaagtgtgtgacattccaggactgcatcttctgggctcgtctaagatttgaggacttctttgtgaatcgtgtaaagcagctgatttatacgtttcctgaagatgctgcaaccagtactggggctccgttctggtctgccccaaaaagattccctcagccatttcagttctcagtagctgatccaagtcatctgcaatttgttatggctgcttctatcctgagggctgaaacatttggcattcctattcctgattggattgagcatccgaagatgttggctgaggctattgagaaactaatagtcccagactttgagccgaagaaagatgtaaaaattgtaacggatgagaaggctactacactctctgttgcatctatagatgatgcagcagggatcgatgaactcatcttcaagttagagctttgcacgaaaaatttgccactagggttcaagatgaaacctattcagtttgagaaggatgatgatacaaactaccatatggatctgatagctgggcttgcaaatatgagggccaggaactacagcattccagaggtggacaagctgaaagccaagttcattgctggaagaattatccctgcaattgccacttccacagctatggccactggtctcgtctgcctggaactttacaaagctctggatggaggacacaaactggaagactaccgtaacactttcgcaaaccttgcactgcctctattctctatggcagagccggttccacccaaaaccatcaaacacagtgacatgagctggactgtttgggaccgatggatcctgaaaggcaacccaagtttgagagaactcatccagtggctg

SEQ ID NO: 190987 - DNA, 386 bp, Gossypium hirsutum
cccacgcgtccggaactttccccgaaagcctcgaataactactatgttaaataaaaagagctacattgggtaaataaggtgagacgttagattgaactaagaagtatgataacttagatgttgatgtttcctgtttctctaaagagcgagtatgggggacaaagctttatgtttctgcctgtaaggatgggtgatttgccttggatcatatgatgaaaaggtatattatgttgttaatggcattggtgtgttttaacctttgatgcgaacaaatacctcattgcgagcacatttcgttggcatgcaatttatcttttttgtgatcaaaaaaaaaaaaaagtgagggttaaaaaaaaaaaaaaaaaaaaaaattgaaaaagatctaa

SEQ ID NO: 190988 - DNA, 442 bp, Gossypium hirsutum
acaatgttgagaaggtattgtcagtcctaaaatctgaatttgctttctttgttgattttgatgtatcaaaacagcgaagcagtttcatagtcatttaggaaatcgttaaggaaaaagaaagatttatgaaaggttacatgctccctgtagcatactgggttctttatatggtttgttggtaaaatgttacttttttactatataaacgtgcatccaaggatcaaggagtctatacgtattgattttcaccctgcaaataggcaaatgtggaaattgggttactgattcagagagggatggactgggttgactttagttctttgattctctccctctcggaatggttttattgtgagtaaatctgacttaaaaaatgggaaacaagagaaagggctaagctactgaaatatagcttcttggtacattactgtgttgggatact

SEQ ID NO: 190989 - DNA, 1381 bp, Gossypium hirsutum
  unsure (1)..(1381): unsure at all n locations
ctttctttctttctcatcttcattccccttcattgtcagataatccaaacagcagaaattgaacacacagagagaaattatcagagatggggatttctaagagattgctctcttcgtttgctttgcttgtaacgtgtattttgcttttcgtttgtgtcaaggcctcagcagagaaaacagagctgaattcaaggctcagtgaagaaaacaagttgcagggcttgaaaaactcatcaatggaagaggggttggaggatgagcaatggataaatgagcactcagtcgacaatccagaggaaattgcttcaatggtgcatatgagcataagaaatagcacagagaggaggaaattgggatatttctcatgtggaacagggaatccggctgatgattgctggcgatgtgatcggcattggtatctcaggcgaaagaaccttgccaactgtggcattggctttggacgcaacgccattggtggtcgtgatgggaggtactatgtggtgactgaccctagggatgacgaccctgtgaaccccaaaccaggcacccttcgccatgctgttatccaggaccgcccactttggatcgtgttcaagcgtgacatggtcatcaggttgaagcaggagcttataatgaacagttttaagaccatcgatggtcgtggtgccaatgtgcatatcgctaatggggcctgcatcaccatccagtatgtcactaatattatcatccatggaatccacattcatgattgtaagccccaccggcaacgccatggttcgaagctccccatctcattacgggtggaggaccatggctgatggggatggcatttccatctttggggcaagccatatttgggttgaccataattcactctctaactgtgctgatggactcattgatgctataatgggttccactgcaattaccatctcaaacaactacttcacccaccacaacgaggttatgttgttgggacatagtgattcttacgtaagagacaagcagatgcaagtgaccgttgcttataaccatttcggtgagggtcttatccaaagaatgccaaggtgtagacatggatattttcatgtagtgaacaacgactacacccactgggagatgtatgccattggtggaagtgcaaaccccaccattaacagccagggcaaccgataccttgcccctttcaaccgctttgctaaagaggttacaaagagagtggagagatcgaagagtaaatggagacattggaatnggaggtcagaaggagacatgnttttaatggagcatattcactcattcagagccgagccacaccagctcgctaagccttagctacagccaatcgcttcctagttgcacataactcattgcagcgcct

SEQ ID NO: 190990 - DNA, 732 bp, Gossypium hirsutum
  unsure (1)..(732): unsure at all n locations
cccaaaccaggcaccctccgccatgctgctatccaggagcgtccactttggatcgtgttcaagcgtgacatggtcatcaggttgaagcaggagcttataatgaacagttttaagaccatcgatggtcgtggtgccaatgtgcatatcgctaatggggcctgcatcaccatccagtatgtcactaatattatcatccatggaatccacattcatgattgtaagcccaccggcaacgccatggttcgaagctccccatctcattacgggtggagcgaccatggctgatggggcatggggctctagtgctttggggcaagccatatttgggctgaccataattcactctctaactgtgctgatggactcattgatgctataatgggttccactgcaattacgatctcaaacaactacttcacccaccacaacgaggtcagaatattcacatcggtttatcaatattgaactaaatttatgtttttaaacgactaaactaattcgtccaagtacttcgatgataggttatgttgttgggacatagtgattcttacgtaagagacangcagatgcaagtgaccgttgcttataaccatttcggtgagggtcttatccaaagaatgccaaggtaaaaaaaaaaatataaaagcatccttaaaattggtcgctactgtaatttctcttttttaaccttgactcaaccatctttgccaaattcatgggaagtcattcaac

SEQ ID NO: 190991 - DNA, 1056 bp, Gossypium hirsutum
cttcacctttgctcccactcctccactgactttcaccaccaccgtcactagcggcgccgtcacaaaatgtcgtcaacggagtctctcatcctccaactccatgaaatctctgccgttaaattcggtaacttcaagctgaaatctgggatcttctcccctatctacatagacctccgtctcatcgtctcttacccttccctcctccaccaaatctcccactccctcctctcctctctccctccccaaacacactttaacctcatatgcggtgtcccttacactgccctccctatagccacctccatctctctcgacacctccatccccatgctcatgcgccgcaaagaagtgaaagactacggaactgccaagtccatcgaaggtgtttacgaaaagggtcaagcttgtttggtggtggaagacctcgtaacgtccggtgcatcggttctcgaaacggcggcaccgcttcggtctttgggtatcaacgtaacggatgccgtcgtggttatagatagggagcaaggcgggagggaaacgctggaggagaatgggattaaacttcatgcactttttactttaactgagatggtcaaggttttaagagctaaagggaagctggaggaagagatggaaagtttggttatgaagtttttggaggagaattagaaagtacccgtgcctaaggttgagaaagtgaggattaagtgtctggtgtatctagacaggcttaatatgtttacaaatccaactggtaaaaagcttgatgatattattgtaataaatagagtaatctttggagtttgatatgttgaagttgtgctgaattgttgtattcgttataagttgattttaatttgtctatagaatacattttggataatactggatccctcatgattatatatagtgtgtagtatgtgaaaatacttaatatatttaaactttgtttgaatatgtatattttactgatcgaagggatattaaatatatggtgaatgatctgtttaataggtagtattgaatatatatagatttatgatagtttctataatatgg

SEQ ID NO: 190992 - DNA, 1184 bp, Gossypium hirsutum
cgtggttatagatagggagcaaggcgggagggaaacgctggaggagaatgggattaaacttcatgcactttttactttaactgagatggtcaaggttttaagagctaaagggaagctggaggaagagatgggaagtttggttatgaagtttttggaggagaataagaaagtacccgtgcctaaggttgagaaagtgaggattaagtgtctggggtatcaagaaagggctaagatttctaagaatccaactgggaaaaagctgtttgagattatggttaagaaagagagtaatctctgtttggcggctgatgttgccactgctgctgagttgcttgatattgctgagaaggttggacctgaaatttgcctattgaagacccatgttgacatattccctgatttcactccagagttcggatctaagcttcgcgcgattgcagaaaaacataacttcatgatatttgaagaccgtaaatttgcagacatcggtaacacagtaacaatgcagtatgaagggggtatcttccgtattttggaatgggctgatattgttaatgctcatataatctctggtcctggaattgttgatggtttgaaattgaagggtctgcctcgtggtagggggctgttgctacttgctgaaatgagctctgctggtaaccttgccacgggggactacacagctgctgccgtaaaaattgccgaacaacactccgattttgtcatcggtttcatctcagtcaaccccgcatcttggcccggtgcacctgtaaatccagcattcattcaggcaacccctggagttcaaatggtaaagggtggcgacgccctcggccagcaatacaacaccccgtattcagtcatctttgataggggtagcgacataataatcgttggtcggggaatcattaaggcagcgaacccagcggaggcagctcgtgagtaccgtcttcaaggatgggaagcatacatggctaaatgcacttaagagggtatcttatcttttaaatatgttacgtccctaataacataagggccaaattttgttgaatctatctatgattttgcatcattggcttgttatatttgtaatacttgttgagggagatctctgggatcccattactgttttcatccttgtttgctgagggctatatatatgcaatttcttctatgtttttttc

SEQ ID NO: 190993 - DNA, 1247 bp, Gossypium hirsutum
  unsure (1)..(1247): unsure at all n locations
cccactcgtcctgtcacgcgtccggtacatcttcgctttgagattagatccaaaattcccctttcatcttatttccgattccccaatttttcctgaaaccctaatcctaatcccggattcttctcgtctacatcgtctagcaaatggcaaccgaggagccggcagtcgtggcagaccccgcaccggagacggaggaggacaagactgctgagaccaaagctacttcaaaatctggcagagcaaagaaaaccaaagaacccaaaaccaagaaagctgcagctcctcggaaaccacgggctgctcctactcatccaccttacgaagagatgatcaaagatgcgatcgttactttgaaagagaggacaggttcaagtcagtacgccattgctaagttcattgaagagaaacagaagaatcttcctggaaatttcaagaagcttctgcttgtccatttgaagaagcttgtggctgctgggaagttggttaaagttaaggcttcgtataaacttccttctgctaggtcttcgaagacggctactgctgcttctgctcctgcaaaaaagaaaccggctactactaagtcgaagtctaagcctgcctcaaagcctaaggaagggaagagtacaaaaactactcctaaagcaaaggccaagacaaaaactacttcgaaggctaagagtaagccggcggctaagccaaagcctacttctaaggcgaaggctgctccagccaagactaaggcagtggcttctgtgaagccgaagactactgcagctacaaagtcaaaagctgcagccaagcctaaggacaagccggttaaggcttcgaggacttcaactaggacgtctcccggaaagagggctgctgctcccaagcctgctgcgaagaaggctcctgcggctaaaaaagctcctgcgaagagtgtaaagccgaagagtgtcaagtcaccggcgaagaaagccccgtcgaggaggggaaagaaatgagagaagagagggtggtcaacataggggtagttttgtaaattcgagtgaagcttagtggctgtatttgggtccatacccatgaaaatatgacatcggatcttatctgttcttgaacttttcttcgaggggttgttttttttttgttgttgttgattgacgctaaatttctaaattccttagtttttaaagcagattttagatgtaatttttcagttgaatggattatgagatgaaatcagagctccctgatattttatcnaa

SEQ ID NO: 190994 - DNA, 528 bp, Gossypium hirsutum
ttattaaatccctacattttcccccacccttttctttaacgagtaattctaatgtttaaaagaaaaaaaacatctttttcccctctatcaccaatcctagtccttaccatcatcatcattatcaccaaccaacctcaacaacaacaacagctgcctctgcctatcattttcatttgattataaaaacaatttgtttccatttgtttttgttttctgtagttgggttcttttgttttctggggcatattattaatttataatattattatgtgaaaaaagaagatgaatatttttgctattgcgagaggatgagagtgagagagaattatgcgaaccatttgcgacgcttgtgaaagtgctgctgctatcgtcttctgtgctgccgatgaggctgctctctgcggtgcttgtgatgaaaaggtccatttgtgcaataagcttgccagccggcatgttcgggtgggtctggcaaaccccagtgacgttccttgctgcgacatatgtgaaaatgcacctggtaatatgcag

SEQ ID NO: 190995 - DNA, 423 bp, Gossypium hirsutum
tcttactcctcacatagcaaaagggaaagtaatatagtgtcaacgtcattggttttgagagggaaaaaggaagggtgaaatatggctggttacagagcagaggatgactatgactaccttttcaaggtagttttgatcggtgattcaggtgtggggaagtctaatttactctccaggttcaccaggaacgagttcagcctccagtccaagtctactatcggcgttgagttcgctactcgtagtttgaatgtggatggcaaggtcattaaagctcagatttgggacactgctggtcaagaaaggtatcacttttactattcccttgccttgctttcctttatttctgatctgggtatctttagttctcttctgattttgcaaggaatttggttttgttcttattgaacttgaggaaagaaagcg

SEQ ID NO: 190996 - DNA, 539 bp, Gossypium hirsutum
cccacgcgttctctcaaagttcactacttgtgtgcagacaaaaatggcttttgctgggtttttcttgttgggtttactttcaatggtctcagctgttcatggatatggtggtggatggactaatgctcatgctactttctatggtgggagtgatgcttcaggcacaatgggtggtgcttgtggttatgggaacctgtatagccagggatatgggacaaacaccgcagctttgagcacagctctgttcaacaatgggcttagctgtgggtcttgctatgagattaagtgtgtgaatgatggcaagtggtgcctgcctggttccattgtggtcactgctaccaatttctgccctccaaacaatgctctcccaaacaatgctggtgggtggtgcaaccctcccctgcaacactttgacctttctcagcctgtcttccaacacattgctcagtacaaagctggaattgtgcctgtttcttacagaagggtaccatgcaggagaaagggagggataaggttcacaatcaacggccactcctact

SEQ ID NO: 190997 - DNA, 383 bp, Gossypium hirsutum
cccacgctttcgctccctccgctatcgtgcgcccatcggctgctaccccctctgggtttttccaatggcgactactctgcaactatgtcgtttctgcatccgcaccgggtctgataactttggtggaagatccggcgctattccttcccggcggaagccgatctccgtccgatgctccggcgattcagattcgtcctcttccggtgccggggatcccgataacttcgatgcaaaggctttccggcgtaacttgacgaggagcaagaattataatcggaaaggtttcggacacaaagaggaaacgctcgagctcatgaatagagagtacactagtgatattataaagaaattgaaggaaaatggaaacgagtatacatggggaa

SEQ ID NO: 190998 - DNA, 357 bp, Gossypium hirsutum
cttcactagcagacatgtattatcaccatccagtcaaaggatacagaacatgaggtgaatagcgaagatggtgatggattcaaagggcgaatgaatatcttaaaaatcatgattgcattagcacacaataaattactcatggacgtggagatctgaacaaatccttgtgatagcgtggcaaacaaaacacattgtgtatcatggtccaagtgtcgtaaagaacagatctcattgttcggagttgaaaaatcttttcttttccgccgttgccaaatcgagacatatatggcgatatatctcaacacctgcaaaactgagatattttcataagactgcgagattgatacggttagatat

SEQ ID NO: 190999 - DNA, 525 bp, Gossypium hirsutum
ctcataacggtcgaattgcatctttgattttcgttaaagagtgtaagtcagggtcgccaatcgaagactcgcaacggatcgacaaaattgaagcacgtttaaggaatgttttgaaaggagatagcgatattcgtagcgcgaaaaccacggtttctatggccgtaactcataccgaaagaaggttgcatcaaatgatgttcgcagatcgtgattacgaacggaaaccgattttggaacataagtcggagttgtcggctgtcaccgtgcaaaactgggtggaaaggggttattctgttgtgaatgttcaatgcaaggaccgaactaaactcctgtttgatgttgtttgcacattgacagatatgcaatatgttgtgtttcatgccactatcaaaacatcaggcgataaagcatatttggaattttatattatgcacagagacggaatactggttagttcagaacccgaacgacatcgtttaatccaatgtttacaagctgcagtcgaaagaagagcatccgagggtg

SEQ ID NO: 191000 - DNA, 396 bp, Gossypium hirsutum
atcagtcttcttggtccacaactttggaatctgaaggaaagtcggatcatctacttactatggaagaaaatacagaaaaattggatcaatcttcttggtccatgacttcagaatttgaagggaagtctgatcatctagttgcaaaggaggtatcctctagtaaagttggggttcaacgacattcggaaatagcaactattgatttatttcttgatagatccatcagttgcattcctggtttaagtaaaaggcactctcgccagctagaagaatgtggcttttacactttgcggaaactgttacatcattttcctcggacctatgccgatttacagaatgcacaaactgagattgatgatggccagtacttgatttttgctgggacaattatgtcgt

SEQ ID NO: 191001 - DNA, 398 bp, Gossypium hirsutum
ggagctcaatggcttgttgttagccggcgaattcatccacgtccatactggcagatgtgtgtgtttctatgtatgggaggcaatagcactacatggatgaacactgcagttctggttacttgtatgcgaaacttcccgaaaaatcgaggcccggtctcggggatccttaagggctatgtcggactcagtaccgcaatcttcacggatatatgcacagctctgttttcttcggacccttcaacgtttctcttcattcttgccgttgttccggccatcgtttgtcttaccgctacatttttcctccacgaaatcccaaccccgactttcaacccgagcgaactccggcaagaaacgctgtattttcacgtcttcaatggcattgctatcatattagccgt

SEQ ID NO: 191002 - DNA, 657 bp, Gossypium hirsutum
gtcgtcccttgggttccttttaggtggtttttaattttaagtttataaacgatagctgcccacctcattgccggcgccatgtgtggcttagccatggccatttcacaaatcacccaatctgaaaccaaaataaaacgctattaaaataatatatttatttgattgttttatattactaaaatgccagcgcccagcttatagcccgtaataattgaatcaaaaaacatgttgagaagacccgcagcattgctacgcttttcaatcacagccagtaatctgtgggctttattgggattccgatttgccccaaagttggcctcttgtacggcacttcaactggtctgcatcttcaactgctggctatagaaccagaaccagattcagggccatgtcgacatctgggaattcaacgcctgtaattgataaagatgatacaggtatttcaagattttaaattacttaatgcagtcgatgatagtttggaagagtaatttttgaagtgagagaagctatggattctgccctcttggttcagtgcttagagctcaatactcagtgcgacacaatgttaaaggtgtgggatcaaattgctattagcatgcaatctgtgaactgttgcaggaaggattggttcacatctggccaatactgatcttt

SEQ ID NO: 191003 - DNA, 1414 bp, Gossypium hirsutum
  unsure (1)..(1414): unsure at all n locations
caggtcgatctttcaaacccagacgccacttcatcttctccttcttcttcgtcttctttgtacccttctttggacatgaaagatttagccgaaaacctcttccccgacgacgccaccgccttgcacacccaccaagattctgcagaacaactcctcctcaaggttcctggtgccatcgttcaccttattgagcgagaaaccagcgttgagcttgcttgtggtgatctctgtattgttagtctccttcaaggcggcaacgttgttgctgtttttgctcgccttggtgacgatattcaatggcctttggctaaagatgagcctgttgtaaaacttgatgcttcccactatttctttactcttagagtgccatcgaatgggtcgtttgaagacggaaaagattctaatcaaaccgaggatgttttgaactatggtctgacaatagctgcaaaagggcaggaaggtttgttgaaggaacttgatacaatcttggaaacttacagttgcttttcggcgcaacaagtcaaagggatagagaactggaatcttgtggatgcgagaaatgtggcgcccgaagagttgaatacaaaggaaaaaagggacttaatcgtgggaagttcaatggcgtattggacgactctggcgcccaatgttgaagactatagcgggtctatagcaaaggcaatagcatcggggtcagggtacgttgtgaaggggattttgtggtgcggcgatgtcactgttgataggttgaaatggggcaatgatttcttgagtaagaggataaagtcaggttcaacctctgagatctctccagaggccttgagaaggatgaaaagggttaagaagttaacaaagatgtcagagaaagtggccactggaattctttcaggtgtggttaaagtgtctggattcttcacaggttcaattgttaactccaaagttggcaagaaatttttcaacctgctgcctggagaaatcgttcttgcttccttggatggatttaataaggtttgcgatgcagttgaagtagcaagaaggaatgtcatgtctaccacatctgtggtgacaacaggacttgtttcacaaaggtatggagaaaaggcaggaaaggttacatatgaagggcttgatgcggcaggacatgcaattgggacagcttgggctgtgtttaagattagaaaggctcttaatcccaagagtgtcttcaaacccacaactcttgcaaaagctgctgcacaggctaatgctgctgaattgaagtccaaaaataacaagtaaacagagttgctttttagtttgaacaggaagacaaaaacagagatgcttgtaggactgcagttttccaaaggttgagaattctcaagtggattgtatttgtactttgcaattgatgtgaattactatgcatcttang

SEQ ID NO: 191004 - DNA, 847 bp, Gossypium hirsutum
tcctcgcgtccgcaataatcttcctttacaccaaatctgcaaccaaacccaggagctgaattattgaattccctcccttgaaagcgatcatggatctagcgccggaggagcttcagttcttgtcgttgaccgatatcctgagggaatccgttgcaatccctaaaagatcccccaaaaccttctatcttatgaccttagctctcattttccctctctcttttgccattttagctcactcgcttttcacccatcctatcttaaatcaactcgcttccgatccgctggcagacccgtcccagacccgccacgagtggactctcctcttaaccttccagttctgttacctaattttcctctttgccttctctcttttatcaacggctgcagttgtatttacggttgcatctctctacacgtcgaagccagtctctttcacttccacgatctcagccatacccaaggtttttaagcgtctttttataaccttcacatgggtttctctcttgatgtttgtttacaatgccttgttgatcggtttcctggtcttgtttgtcattgccgttgattcccggaatgcctttttgtccttcttctcttttatggtgatcttggtgctgtttttgggcgttcatgtttacatcacggcgctttggcatttggccagtgtggtgtcggtgcttgagccgatttacggccttgcagctatgaagaagatctacgagttgttgaaagggagggcgaagatggctttcattttggtttttggatatttggcaatttgcggggtgattgggggtattttcggaagtgtggtggtacatggacgagatcgatatggggttcttct

SEQ ID NO: 191005 - DNA, 311 bp, Gossypium hirsutum
gtccagtgcgcaccgcattgtctcccatcctaggcagggggagaaacaataatcttcttctcaatcttgcaatggtgcatatggatgattcggcaagggcattcaagcatcggggagaagatgattgcgcagccatcgagggctacatggaacaatatggcgtaacggcacatgaggcttatgatgaattcatcaagcatatagagagctcctggaaggacattaacgtagagtttctgaaaccaaccgaaatgccagtacctggtctaaatagaagtctcaaccttgcaagagtgatggatgtgctttac

SEQ ID NO: 191006 - DNA, 431 bp, Gossypium hirsutum
acatgctgttattgagttaactagaaaggctgaggaaataaccaaagctctgaatcttgaccatgttcttgaagtttctaacaaacagtgcccttgttacaattcaatgggagaagctgacattgacaacaataagctaaggaaagcagcttctcgagaagatgccactgacaactatttatattgtccaaaagctaaagatattgagagcggagatttgaaacatttccaaaagcactgggctaatggtgagcctgttattgtcagcaatgtccttgagaatgcatctggtttgagctgggagccaatggttatgtggcgtgcttttcgtcaagtaacaaataaaaaaagtgatcaccaattggaagttaaggcacttcattgcttagattggtctgaggtaagtgtcaatattcaccaattctttaaag

SEQ ID NO: 191007 - DNA, 962 bp, Gossypium hirsutum
cttcactctcctttacttttaagttcttttctttgcttgatttcattttgtagccaaaaaaaacatggggttctcactgaaacttcagtattgcctagtttctgtcatggtgctattacctgcagtgtgttactctcaggactatttcgtcaagtccagagcaacttactacggcagtcctgactgcttaggcactccaagtggagcttgcggatttggagaatatggaagaagtgtcaatgatgccaatgtcgccggggtttccaggctctacaagaatggaactggctgcggtgcttgttatcaggttaggtgcactaaccctcaaatatgtgctgataatggggtgaacatagtggtgaccgactatggcgaaggcgacaacaccgatttcatccttagtccccccgcatatgcaaggatggcgcgaccagacaccgcggcacatctgtttgcttacggcgttgttgatgtagagtaccaaagaatcccctgccaatacggtggttacaagacccaggttaaggttcatgagcatagcaaatacccaaattacttggccattgtagtgttataccaagctggttaaagtgaaatcctatccgtcgatatttggcaggaggattgtaaagaatggataggaatgacgagggcatatgtggaccgttttcgacatggcaaatctgccatcgggagacatcaattttgatgttcccagtgcggggcatcgccggattgacattgttgcaggcaccgaatggaattcctaaatactggaaagctggagttgcctatgaaactgacatttaactttatttactaactgagacttctcttagtggattactttctcattatagtgggtctgaattggtatatgttctaattggtagtaataattggcaacaaatgctcaactttgctatactgattacttcttatatgattgggattgtatttag

SEQ ID NO: 191008 - DNA, 740 bp, Gossypium hirsutum
cctataattatttgatctgtgaaaacacagaattttgtgagggctattatctcgttttgggatgaattaagtgaataaagtttagttctctttgcgcgtgtcccgttctcttctccaatcctccaaaacttgaacttaaaaccccattttagttgatcccaaagttgacccctttttttgtttcagtatagtaatataccaagcctttgcttaaatggaggttaagctatggaacgacaagcgcgagagagaaatgtatgagaattttgcagagctgtatgccattatcaaggcaacagagaagcttgaaaaagcttatgtgagggatattatttcatcatctgaatatgagactgaatgccaaaagcttattgcccatttcaagaccttggcttcaacactcaaagatactgtccctagtattgaacgttttgcagatacatataaaatggactgtccggctgctataaatcgtttggtgacctctggggttccagccacggtggagcaccgggccgcggcggctgcctcagcgactacctcggctgccattgtggctgaatgtgtgcagaattttattactgccatggattcattgaaactcaacatggtggctgttgatcaagtatatccattgttgtctgacctctcagcatcactcaataagcttggtattttgccacctgatttcgaggggaagatcaaaatgagggaatggatttcaaggttggctaaaatgg

SEQ ID NO: 191009 - DNA, 441 bp, Gossypium hirsutum
gcgaactctagtgactcctaagaagaagtctgaggagttagggatagccacttcggggaaaagatctgagtcttcggatgttaatgctgccgtttcagcggagcacaacgatttgccaaatttaggacttgattcttccaaaagcagggataaattgaacaacagaagctctgctccatggaatgataactcaatttctgtcacttctccagaaagtaccattgaggctaagaatgtgaagaaaacttctgcttccgatttaaaagttgatagcactggtacaatgtttggcaataatgcagggtctttactagattgtggaaaaactcaggattctcaaatgaagactgcacacaaggatctcccaaagttcaccggtgctgcagtgtctgaggcaccatgtgagggtttgctaaagccttcatctaattcctcgggaaa

SEQ ID NO: 191010 - DNA, 430 bp, Gossypium hirsutum
catctttcttcagtttgggttttgtggccatctttcttctggagtagtttcattatagttcagcgtctcccccacaagatcgaagaaatcgagatttggactaagtacggggaaatataaatcaaaatgatcgattcgcgttgaggtaagttcatatggttagtctaagtgatcgattattaaatttgaattgagatgatgttttattttatatatatttgttatttaatcatgactttatgcaagtacaagattagattgaaggatcaatcgtgagaaatgcagggtcaagcacattcgtactacaactcatgatgaattgatggaaaagaccatggttggaccatggcagtgagtgtgccagtgtaagaccatgtctgggacgtggcatcggcacggacataggagagccagtgtaagaccatgtctg

SEQ ID NO: 191011 - DNA, 610 bp, Gossypium hirsutum
cggacgcgtgggttcttcttcactttgaggttttcttgcaagagttgagaggtgagaccaagtggttttggattacaacagagaaaccaaagtaacgaaaaagatggatatatatgggatcttgggtaaccgagattcgaagctaggcaaaatcaagcatacccaggagacgacaataagctcaagaccctttttaccctttcgccttcttctcttacactcttttttcgattcaatagttaaatttatagctggaaaagagaatcgattcaaatttttcaacaaattcatgatttttacagaaaattttatttaaagttctctcttttccccctttttacctcattttctttttctgtgttttgagatattataacaagaataataataatttgtcatagtagagataaaatttgggttcgtgtttgattgatcgatctgtcgatggaggattctgcgagcagcgatgaagattactaatattcttccaatcgagattccctcgacagtctcgagaatgaggattctaatttacaatgggccccttcaaagggtcccactaccaaggcagaggagctgctagtcgtcgaatttgatcgattctttttcc

SEQ ID NO: 191012 - DNA, 443 bp, Gossypium hirsutum
gacattgacaacacggccttttaaaacattaaggcttttcagtctggctatctttgaatatttcaagcaatcaatattttatgtttttgcaaagggcggttggcttttgcttttaaacactctaatagcaactcttggaattttgcttgtgaccattgaaggtcctcatgaaaaggtaatattttaggttatcaatgtattacatctgtctttctcattgttttcttttgatgcacaacatacatctgtaagtatttgaggtattttatttgtttagagttaattacttttttgcactattttctccgttgaatcatgcaattaaaagatgcaattggtactattagtttgtgtgtgggttgcggtggggagggtaagagtgggtgggttgtgctacttcatattgcctcatgattaaatttacatttggacctttttacttt

SEQ ID NO: 191013 - DNA, 942 bp, Gossypium hirsutum
cgaggggtttttccgatgtcaatgttcagactgatagatctcagttagcgcgaggcgcggtccgtttctttccgacccggatgactcggttcgggttgaggatggtggtgaacgtgccccggtttctgacccgccggttctgaattctctgctgcgattggaacggacggactcggactcggatcggttcgggcacgatccgatgcagccctttaacgatgattcagctgatgtcagcatgcctagtaacgctccgccgttgagaagagtcaggccacaaacagaccgcaatgattcgaatcgtttaccttcctcgaacactgccgtaaacaacattgacagcagcgaggacgatgactctcctctggcgcgtcatgtaacgcgccaactgggagcggtattggcagaggagagggcgttgtctgcaagagaagcagcggaagcagccgctgcggcggtggaacaagctgcagtgacagtgaacaatgctccaccagcgtccgaggaaccggtgaggatgtcattaatggaattattagaagaaacaagccaacaaatggggctgatgggatccagttacatcataagcgacgccggtgaagagtatgagaaagaggaagtgacggatgaagacgaagacgaaaaagaggtggtgcaaagcagcggtgggatggagcacgcttgttgcgtttgcatggttaggcataagggtgctgcgtttattccatgcgggcatacattttgtcgtctctgttcaagagaactctgggttcagcgagggaattgcccactttgcaatggctccatcttgggaattcttgatatcttttaatctatatttaaatccgcgttatcgtttgttcttcataacaattttatctattctttttcttcattatcagcagggataacaatagttcatgtcttctagtttccaacttt

SEQ ID NO: 191014 - DNA, 406 bp, Gossypium hirsutum
aaacaaccaaacacagtcctacattttaggagtttttgtttttcgaatctgcggcggagataatgatgcacagatttatttcggtcaggaggttattttcggaaactaaatgttctcttccttgccaactacgacgacgttgcttctctcaggtggctcgaaatgagattgataacagggatgatcttgttcgtaaaatgcctccttttgattactcttccgcttccttacaccggtccttccgccgacgagatcctttccaaacgcacaggagtatcttagcccctccatgttttacttttacaccaaaccgttgaacatagtggacgggaggatgcagtacttgttcgatgataagggacgaagatacctagacgcatttggagggattgctactgtgtgttgc

SEQ ID NO: 191015 - DNA, 336 bp, Gossypium hirsutum
gctgttttaatctattaccttctagaaaatatgagagagtaactgtgtatgttaattgaagaatgaaaatgactgacaactactgccaagagttgggtgcgtgggtgttataggaaggtatagtgcactctagggagggaactcaagttcaaaccctggagataaaattgttgttgggaggagcaaccatgaatctcgaaagtattagtcttcatggactgtaaaacagacaagaatgatacattggtcataccaaaagaaaatgaccgactactatattgcctcaaccatttttgtaggtctgcattcaagctgatgagtggttattaatcaatg

SEQ ID NO: 191016 - DNA, 428 bp, Gossypium hirsutum
gacaaatttggacttgtccgtgatgtgtcatttcaacatcgaataaaaatatactttggtgcaaaatttggtagctgccaggaggcccagaaatttcgaatttacagaaacagtaccacttttactttggacggtcacttggttatagagacatcacaagagatcagtgatgtaccatatggagattatttccgtgtagaggggctttgggatgtagaaagagacaatgatggcccacaagaaggctgcgttttgcaggtttatgttaatgtggcttttagcaagaaaactgtttggaaagggaaaatagtgcagtctactcttgaagagtgtcgagaagcatatgcaacgtggatagacatggcacatgaattgttgaagcagaacattgataaacaggaagggtaaaagcctctgaaagctcaagt

SEQ ID NO: 191017 - DNA, 1607 bp, Gossypium hirsutum
  unsure (1)..(1607): unsure at all n locations
ggtccgaccgcacgcgtccgcccacgcgtcccgtcttgtttaaaatataagaaaaaaaatcatacgcaatgagcactgctggtcaggttattcgttgcaaagctgcggtggcatgggaggcggggaagccactatcgatagaagaagtggaagtggcaccaccccaaaagcatgaagtccgtattaagattctcttcactgctttatgtcacactgatgtatactactgggagtgtaagggttacactcctctgtttcctcgtatacttggtcatgaagcctcagggatcgtggagagtgtgggtgagggtgtgaatgatttgaaacctggagatcatgtgctccctatcttcaccggagaatgcaaagaatgtcgccactgtctgtcagaagaaagcaataacatgtgcgaactgcttaggatcaactgcgaccgaggtgttatgcttgctgatgggaaaaccagattttccatcaacggcaagcctatctaccactttgttggaacctcgacctttagccaatatactgtcgtccatgttggccaggttgccaagatcagtccaaccgcccctcttgataaagtctgtcccattagctgtgggatatgtacaggttttggggccactgtgaatgttgctaaacccaaaaagggtcaaactgttgcagtttttggactgggtgccgttggtcttgccgccgctgaaggtgcaagggtttgtggggcttctcggatcatcgctgttgatgtgaaccccagaagatttgaagaagctaagaggtttgggattacagaatttgtgaatccaaaagactacgacaagccagttcaagaggtgattgtggagatgaccggcggaggagtggatcgcagtgtggagtgtacagggagcgtccaagccatgatttccgcttttgaatgcgtccatgatggttggggtgtttgtgtgctggtgggtgtgccaaagaaagacgatgcattcaaaactcatccaatgaatctactaagtgagaggacccttaagggtgctttttatggcaactataaaccacgcactgatattcccatggttgtcgacaaatatttgaacaaggagctggggctggatatggacaagttcatcacacactctgtgccttttgccgatattaacaaggcattcgactacatgctccagggtataggtctgagatgcatgattcatttggatgcttaaggaaatgttgctgctgtatatttgcccatccaaggatcaaaactctaatgttttgtcctactatgtgttatattatgtgcctacttaagctacctttcccggttatcaagagtgcctatatagaactctctctctctcaaaaaaaaaaaaaaagagaaaagagttctttatatggagttttatattatatgctgagagaataaattatcttgtaaaagcttgctttgttaatgaaataaatttctattactatgattttccaaatacgaaaaaaacccaagcaaatggcggcccactttgatcaataaaatnnnnnnnnnnnnnnnnnnnnnnnnnnnnnnnnnnnnnnnnnnnnnnnnnnnnnnnnnnnnnnnnnnnnnnnnnnnnnnn

SEQ ID NO: 191018 - DNA, 695 bp, Gossypium hirsutum
ggccgaccacgcgtccgcccacgcgtccgcccacgcgtccgggttgtcttcaaatatttgaacaaggagctggggctggatatggacaagttcatcacacactctgtgccttttgccgatataaacaaggcattcgactacatgctccagggtataggtctgagatgcatgattcatttggatgcttaagagagagttgctgctgtatatttgcccaaccaaggatcaaaactctaatgttttgtcctactatgtgttatatttatgtgcctacttaagctacctttcccggatatcaagagtgcccatatagaactctctctctctaaaaaaaaaaaagagagttctttatatggagttttatattatgtgatgagagaataaattatccttgtaaaagcttgctttgttaatgaaataaattcctattactatgattttccaaaaaaaaaaaaaaaaaaaaaaaaaaaaaaaaaaaaaaaaaaaaaaaaaagggcaaaaaataaaaaggaacaaaaaaaaacatactcatgcctgcaaaataaaaaaaaataatataggggggccgttttttaataaacagacattaattcttccaccttcgggactgggaaatcctttttttttgcccaaataaaaaaaattgcggcgcagtcttttttacccagccgggggaaaaaaaaaaaagcccccac

SEQ ID NO: 191019 - DNA, 369 bp, Gossypium hirsutum
cccacgcgtccgcccacgcgtccgcccacgcgttctttcacgcgtccgaaaaaaatcatacgcaggtgagctctgctggtcaggttatgccccgcaaagctgcggcggcatgggaggcggggaagccactatcgatagaagaagtggaagtggcaccaccccataagcatgaagtccgtttcatgattctcttcactgctttatgtcacactgatgcatactactgggagtgttagggtttcactcctctgtttactcgtatacgtggtcatgaagcctgaaggatcgtggagagtgtgggtgtagggcgcgaattatttgtaaccttgagatcatgttctccctatcttctcctgagtatacatatat

SEQ ID NO: 191020 - DNA, 326 bp, Gossypium hirsutum
cttctctcgtcttcaagttttttcgacggaccaggcgattaaataagatggtgaagaaaaaggaaagaactttaaatgagaccgaatcatcaattgatttgaagtcattgattcatgaaagtgctttgttctttgacaaattggttgagttaatccctgctaggttttatttacctgatgaaaaggataaaccttggtttcagggtcttagcaaggccgaaaaggcttctgctaagaaacaagctagagaaaacattaagaaagctaggagagataggttagatcctgagaaatcatcaaaaacgactctcgatttggtgaaagag

SEQ ID NO: 191021 - DNA, 548 bp, Gossypium hirsutum
tgcaacaatcccttttcctcaccctctttcccgcgcaaacatattccaaaggaaaaacaagctttgaaaaaccgccatttctctcataaatttgttttattcctttcgtttaccaaaagatttaaataaaaaaggagaaatttatacgaaggaaaggtgcgtactgcgcacttttcctaatttctctgattttgaatttgtcttttttcctttgattgaagatttttatgtttttttgggctcgctatgtcgatgaattcgaggattttcttccgttttcttgtttggtggatcttcttcagcttcttttcaggattgatttcatcggcagtagttagattggattcaattgaaatatacaacacgcacgactggataacaaaaccgacggtttatttcgtctgcaaaggagagaacatgacggttttgccagatgtcaccaaagcagatactgtctatactttcaagggtgaagaatcttggcagcctcttacagaactcaaaagcaagaaatgcaagcggtgtggattctacgagaaggacacatt

SEQ ID NO: 191022 - DNA, 423 bp, Gossypium hirsutum
cccacgcgtccggcactgtccctcttttcggatcaattcatagttcagacactcaacgtaacattcctcgtctacctcttggccatcaccctgaccctttgtgctcttgcggtgctagaaatcaagtggtccggcattgaactggaagagtggtggaggaatgaacagttctggttgattggaggcaccagtgctcatcttgctgcagtgctccatgggctattaaaggtgattgccggtatcgaaatatcattcaccctgacatcaaaatccgctggtgatgatgtggatgatgattttgctgatctctacatcttcaaatggacatcgctcatgatacccccactcaccatcatatttgttaatttgattgccattgcgtacggagtcctgcgtacggtatacagtgatgtacctgaatgg

SEQ ID NO: 191023 - DNA, 345 bp, Gossypium hirsutum
ctcacctacacaatggatttctcaacattctcaatctttcgcattttcatccttcctctcctttgtccttctcttggttcttcttcggcagttcgagaccctgaatctgtcgtagctgaagttcataagagcataaatgcttcgaggaggcacttgggttacttgtcatgtggaacggggaaccctattgatgactgctggaggtgtgaccccaattgggagagtaatcgtcaaaagctagctgattgcggaatcgggttcggaaaggacgcgattggcggaaagaccggtcgaatctatgtcgttaccgatgccggtgacgatgaccctgtaaaccttaaaccg

SEQ ID NO: 191024 - DNA, 465 bp, Gossypium hirsutum
ctgacgaattcagcacgagatttcgatttgattgaagaagaagatttagcggttcgagtgcaagcgattcgtgggcttcctttgttttgtaaggatacaaaggagtacatttctaaaatagtagacattttagggcaactccttactgctgatgagattgtggagcgtgatgctgttcataaagccttaatgtctgtattaaggcaggatgtgaaggaacttattggaataattgaagggcaggctgatttagatgcacaatttgacgtctctgatgcagatcatattgataggttgatatcgtgtctgttcatggctattccattttttgtgaggggtgcacctggcagcaagtttctcaactacttaaacaaacacattatacctgtttttgataagcttcccgaggaacggaagctggaattgctcaaagctttaacagaaattttctcttacacaacacca

SEQ ID NO: 191025 - DNA, 1074 bp, Gossypium hirsutum
ttcacgcgtccgcccacgcgtccgcaaaacctaaaagatcgaaaagactcaaagacaaagaaagcggccatggagaaggaaagagagcaacaagtttacttggcaaggctcgctgagcaagctgaaagatacgatgagatggttgaggccatgaagagtgttgctaagttggatgttgagctgactgtggaggagaggaatctgttatctgtgggatataagaatgtgattggagcaagaagggcatcctggcggatactgtcttcaattgaacagaaggaggaggccaaaggtaatgaacaaaatgtgaagaggataaaggattataggcaaagggttgaagatgagctctcaaagatatgcaatgacatactctcagtcattgataagcacctcattccatcttcctccaccggggaatcaactgttttctactataagatgaaaggagattattttcgttatttggcagaatttaaagcaggagatgatcgtaaagaagctgctgatcagtcacttaaggcttacgaggctgccaccaccactgcaaattcagatttgcctccaactcacccaattagacttggcctggctttgaacttctctgttttctactatgagatattaaattctcccgagagggcttgtcatctggctaaacaagcatttgatgaggctattgctgagcttgatagccttaatgaagaatcttacaaggatagcacccttatcatgcagcttcttagggacaacctcaccttgtggacctcggatctgccagaggaaggaggtgagcaatcaaaagcagatgaacctcaggctgagagttaattggatgaaagagtattcttttaagactgggcttgtcgagataggaaaggggcttgctgctagagtgacctgctttcaactcatggtagtagtaccaggatttgttacctatgacatggttcgatttgtttatcagatgttttcggactgttgttctgtgttctcttctgtttaaacataattgaatcggttactttatagtctttatgacttacttccttatgttcaattttttgttgtctt

SEQ ID NO: 191026 - DNA, 406 bp, Gossypium hirsutum
ctaactcattctcgatcttattactctccttaccgctacggtgagatattggaattaattcaaatccttacaatccattttcaaccaacctaaaaccctagcatttgccgagatccgaattcccaaaaaatggatgctccgcaaggcggatccgacggcgactaaaccaatccttcctcttctcctgtctccgttgtctccaatttctggaaagaattcgatctggagaaagagataagtgtgcttgatgaacaaggactcagaatagctgaacatcaggattacagccagacttataggcggaagctcgctgagagtacaagagatttcaagaaagctgcgccagaggaaaaattaagtttatttaattcattacttaagggctaccaagaagaagttgataatc

SEQ ID NO: 191027 - DNA, 711 bp, Gossypium hirsutum
gcaggggcaagccacaaccttcgtttgagcagacaaagccagctttgccagctcttgagcgccttatcaattcaaatgatgaggaagtcttgacagatgcatgctgggctctgtcttatctctcagacggtactaatgacaaaatccaagctgttattgaggcaggtgtatgcccacgacttattgagctcttgcttcatccatccccaacggtcctcattcctgcccttcgcacagttggaaatattgttacaggggatgatatgcagactcagtgcattattggccaccaagctcttccctgcctcttgaacctgttgacaaatacctacaagaagagtatcaagaaggaagcttgctggaccatctcaaacatcaccgctggaaatgtagatcagatacaggctgtaattgaggctgggattattgcccctctagtccatctccttcaaaatgccgagtttgagatcaagaaagaagctgcttgggcaatttcaaatgctacatctggtggtacccatgaacaaataaagtttttggtgagccaaggttgcattaagccattatgtgatcttctgaactgtcctgacccaagaattgtcacggtttgtttagaaggtcttgaaaacattttgaaggttggtgaagcagaaaaaaatctgggtcacactggagacgtcaatctctatgcccagttaattgatgatgctg

SEQ ID NO: 191028 - DNA, 499 bp, Gossypium hirsutum
  unsure (1)..(499): unsure at all n locations
ccggnccgggaggcccggggcgaccctatcttcctcccactcttccttttttttacaaataccaaatggtcaaacccacaggcgatctttggctttaaatcaggagccacaacaacaacagctgctgaacaaccccaagctacccacatccctgaaaaaccaggcactcaagcaccatggaagccagtggttccaaccccaagtgccaagcctgccccaaaaagtgacaccatccttggcaaaccatatgaagacataaggttgcactacacaattggtaaagaactgggaaaaggtcagtttggtgtaacttatctttgcattgagaattcaactgggaaacaatatgcttgcaagactatatcaaagaggaagttaatcacaaagaatgataaagaagatatgagaagggagatacaaattatgcagcatttgagtgggcaacctaatattgtggagtttaaaggtgcatatgaagataagttatcagttcaccttg

SEQ ID NO: 191029 - DNA, 1093 bp, Gossypium hirsutum
gttgttttccccttattttcctaacagagccttctcaaaaacgacattcaacaatggcgaattcaatggcgaagtctttccttcaagttgcagctactgaagaggttgtttctcctctcagagttgtccagatcgaaggcctggtgatattgaaaataatcaagcactgcaaggaattttcacctgctctggttaccggccaacttcttggattagatgttggcattgttcttgaagttactaactgtttccctttcccgatccgcgaggaagatgaggagattgaagctgatggagctaattatcagcttgagatgatgagatgtctaagggaggttaatgttgataacaacactgttggatggtaccaatcaacgattttgggttcatatcagacagttgagctcattgagacttttatgaattatcaggagaatattaggaggtgtgtatgcattatctacgatccttcgaggtctaatcaaggtgtcttggctcttaaggctttgaagctatctgattcttttatggaactttaccgagctaatagctttactggagaaaagttgagggagaaaaacttgtcatggatggacattttcgaggaaattcctatcaaagtctcaaattctgcccttatcagtgcctttatgactgagctggaatctgacacaccagttacacagtgtgattatgaccgtctgcaattgtcaagcaatccatatatggagaggaatatggaatttttgattgaatgcatggatgatttgtcagtggaacagcagaagttccaattttactacaggagcctgtcacgtcaacaagcccagcaacaggcatggcttcagaaaagaagggcagataacatgcaacgaaaagctgctggggaggatcctttgcctgaggaggacccttcaaatcccatcttcaagccaatccctgagccatcaccgttggagagcttcctcataacaaatcaaatcgcaaattactgcaaccaaatcaacggggtttctgggcagagcttcaacagattgtatttaatgaaatcggtgcacgataactgaaacttgcaatgtcgtctgcaattttt

SEQ ID NO: 191030 - DNA, 680 bp, Gossypium hirsutum
cccacgcgtccgtttttttcttaatcaaatctggttcagttcgcataatagtaacgcataaaagtatggttgggaggattttattactagttctttttatgaatgctgcctttttcatagtgggtgcggtaccagaaacatgccctgctgatctcggtggaaaatgtggtgaagatggtgaatgggaaggggaatttttccctggagttcccaaaattaagtatgagggtccttctagcaagaatccactttcatacaaatggtacaatgcagaagaagtgattctcgggaagaaaatgaaggactggttgagatttagtgttgcattttggcatacatttcgtggaacaggtgccgatccttttggtgcacccacaaagtattggccatgggaagatggtaccaattccattgctatggccaaaagaagaatgagagccaacttcgaattcctaagcaagcttggagttgataggtggtgtttccatgacagggacattgctcctgatggcaaaacactaaaggaaactaattcaaacttggatgaagttgtggcacttgctgaagaacttcagggggacaagatccgtccactgtggggtactgctcaactatttatgcatcctcgttacatgcatggtgctgctacaagctctgagttgggtgtttatgcctatgct

SEQ ID NO: 191031 - DNA, 390 bp, Gossypium hirsutum
ggcgacttaaatttggatcaaagtgaggcatacagtaggcttgctacgcctgaatgaacaatgaggaagtatgctacgtcttggggcatcgacaaagtaccccggatacgtcttggggcatcgacaaagtaccccggatcccttaaacacatattgagctcaaaaaggtcatcaagaagtaggtacagagaagctcaagctgcgatatctggggcaccctagtttccattttggctcattttgaatattgttatctttgattgccttattcttttcaagatacatcccaataaatgtccttcttattgcatcgatatctttgattaacccattcatgttgagttaattgccttattggtgcatttgtaatctttgatcaacttatttgct

SEQ ID NO: 191032 - DNA, 436 bp, Gossypium hirsutum
  unsure (1)..(436): unsure at all n locations
gtttattttcagattcagcgtctcatcattcttctccatcttctccatcttctccaccagatctttctcaggccagatggtacaccaaagggtcaaaatctttgtcttcaatattctcttacatcatcccatcactaagctatgctgagtctaaattggataatcatggaggtgaactaaagccggttccttcgcttcctgttagatggaaaaagaaatttgagacacgacatgaagtcctggatagtgttaaagaatacactacttgtacaactgaagaattaaaaaaggcttgtgaagataataaaaaaatttggactcatagtaacaataagcaaattgctagaattagactttgtagtgagaataacgactgtgtttctggaacgagtaccagctctgatgaatttcatgaagcangagaagaacagagtcc

SEQ ID NO: 191033 - DNA, 434 bp, Gossypium hirsutum
attcaaaaatcaacaccatgggctcttccggtgaatttcgggtagattctaacccggattacgatcacgaaagtgaagtaaaggcttttgatgatacaaaagccggtgtgaagggaatagtagattcaggtgtcacacaaatccctcgtatattcatagatcaaagccttatccttgagaagaataacaccgattgttccaataatcagctaggtgtcccgatcatagacctccaaggcatcggtggagactcggctcgccatgccgaggtgattaaccaagttcgaaatgcttgtgcggattggggtttctttcaggtagttcaccatgggattcctgcaagcgttttggatgaaatgattgatgggatccgtcggtttcatgaacaagacaccgaggtgaagatacagttctatacacgcgatgcaactcgc

SEQ ID NO: 191034 - DNA, 424 bp, Gossypium hirsutum
caacaaacaagacgtcagctaagatgaatatgggcaatgctaatggggaggatgctattgaggcactccaagcacaagctcacatttggagacatgctttcaacttcgtaagcttcatgtctctaaaatgtgcacttgatttaggcatccttgatatcattcatgatcatggcaagcccatgactattacccagctggttgctgcgctacagatgctcaaccctactaaagcatgcgacatttataggctcatgcgcattctagttcactcggacttctttgcacgccaaaagctagacaatgatgctcaagaagaaggatatgttcttaccaactcttctcgtattttgctcaagaataatcccttctgcataacgcctactttgaaggctacaatggatcctattataacaaagccttggag

SEQ ID NO: 191035 - DNA, 417 bp, Gossypium hirsutum
ggcgacgatatcgagagatgatacaggcttgtcaaccacctatcgaatgaagcaatgctggccttagtcaaggtaatgaaactgaaccactcacataaacatcgaatacttgagcctaacctcgacttggcctaggccagcggcagcatgtaatacggtcgaaccacgcttatctctataagccaatacatctttgtcgtacccatgaagaagctccattgaaagctttaaatttcctcctctagcagcatcatgaacagctttgcttgtgatcctccacttataaacagaaggtatttccccgatgtgctctgtgaacccttctgcattagctgtcataaacctcggtgagactgcgaagccctatataagcgtgaaaacctttaaagttttgcccctggcagcatcataaaagat

SEQ ID NO: 191036 - DNA, 434 bp, Gossypium hirsutum
ccatgatattgatgttgatgatttaaaaaataatacacggtatactggtggctattctgagggaagtcgaactgttaaacttttctgggaggttatgaatgattttgagcccaaagaacgttgcatgctgctaaaatttgtgaccagctgttcgcgagctcctttattggggttcaaatacttgcagccggctttcacaattcataaggttgcaagtgatgctcctctttgggctgcaatcggaggttcagatgtggagcgacttccatcagcttctacatgctataacactctcaagcttccaacatacaagcggtcaagtactctgaaagcaaagcttcgttatgcaattaattctaatgctggatttgaactttcttaaggacctgagatttttaactggcgcagaataggtggtttaccattatcactag

SEQ ID NO: 191037 - DNA, 432 bp, Gossypium hirsutum
cttccgaaaacctggaatctctaaatcttttaaaatttctcccaattatttatcgcggaatcgatttcccaaaatccccaaatcaggatacctttgattttcgtcgaagtccctttgattctcttttttttttcattttcattttcatttatcattgaaagaaaataaaagaggaaaaaaaaacgttctgataaacttgaagaagagatggcaaaatcgttgaagccagcgtcctccgatgaagaactgtacaatggttcgagttcatcgaagaggagctaatgaacgctcatgtcaacggcgaagaagaccatgaggaggagattgaagctgttgctcattccgccgacgccttcgacaaaagattaaaatctaaaatattaaaatcttgaagttttttattttagctaaaattttattagctttttatat

SEQ ID NO: 191038 - DNA, 613 bp, Gossypium hirsutum
gaatctcttgccttatccagataaacataatgattcatactcagctacaaaggcgttgggagaggcattggtcgtcaagtcaaatggagttaacgggcttctaacttgttgcatacgtcctagcagtatttttggccctggagatgggttgttggttccatctttggttgcggcagccagagcagggaaatccaagttcataattggtgatggcaacaatgtatatgatttcacttatgttgagaatgtggctcatgctcatatttgtgctgaacgagctctagcatctggaggagaagttgcagaaaaagctgcagggaaggcatattttataaccaatttggagcctatcaagttttgggagtttgtttctctaatacttgaaggtcttggctatcagaggccaaaaataaagattcctgccattgttgtaatgccaattgcacatattgtggagtggacatatcggctattaggcccatatggtatgaaggttccacagttgacaccttcaagagttagaaatctgacttgcagcagatcatttgattgttcgagagcaaaggatcagattggctatacaccaattgtctcactcgaggatggtctgcgt

SEQ ID NO: 191039 - DNA, 399 bp, Gossypium hirsutum
cataaaatcatgggtttctcccatattgatgccttgcatggagggaggtgacgaagaaggggcaaaagcgaattacgcagccacgttttgcttttatgaccaagagtgaagccgatcatcttgaagatggctaccgatggccaaaatatggacaaaaagctgttaaaaatagtccatttcctaggagttactatcgctgcacaaacagcaaatgtacagtgaagaagacggtggaacgatcctctgaagatcccaccatcgtcattactacatatgatggtcaacactgtcatcatagtgtcggtctcccccgtggtggactcatcagccatgaagctgcctttgccggtcagtttactcctggagtctctcaattttattattcacaaggggtacagt

SEQ ID NO: 191040 - DNA, 605 bp, Gossypium hirsutum
  unsure (1)..(605): unsure at all n locations
cttatgcaatatggttgttgaagctggtggaaagaatggtgttgttcccggtgacagtactacatttaagtaccttgaggataaaacaacggtgccgtatgaaccagtttacagtgatgcgcaagcaagttttctttctgagtacagattcgatatctcgaaattggagcccttggtagctaagccacactctcctgataaccgtgctttggctagggaatgcaaagatgttgaagtcgacagagtttatattggatcttgtactggtggtaaaactgaagattttcttgctgctgctaaagtctttctagcttcaggaaagaaggtcaaggttcctacattccttgtcccggctacacaaaaggtttggttggacttatatactctccctgtacccggatctggtgggaagacatgctcccagatatttgaagaagctggctgtgacacacccgcaagccctagctgtggtgcttgtttgggtggcccgaaagacacatatgcacgtatgaacgaagcaaaggtctgtgtctcaacaacaaaccggaacttccctggtcggatggngcacatagaacgccagatatatcttgctttttcgtata

SEQ ID NO: 191041 - DNA, 697 bp, Gossypium hirsutum
  unsure (1)..(697): unsure at all n locations
ggaagggtccgcccacgcgtccnaaaaaaagagtctaacaatttatggttaaaattgtaatcttgagatctgatcggaaggttgtggacgagagaatgagctctaagaggaaggtgttgcagggtaacacgacgaggacgcgtgtagggaagtacgagcttgggaaaaccttgggcgaggggagctttgcaaaggttaagttcgctaagaatgttgagactggcgagtgcgtcgccattaaaatcctcgaccgtgaccaagttctccgtcaccgaatggtcgaacagataaaaagagaaatatcaacaatgaagcttatcaagcatcccaatgtcattaaaatatttgaggttatggcaagctagacaaggatttatatcgtcatcgaatttgttgatggtggcgagcttttcgacaaaattgccaagaacgggagacttatagaggatgaagcaaggagctattttcatcagcttatcatgctgttgattactccacagtagagcgtctacctagagatttgaagccagagatcttttctgactcgttggggtcttaaattcagatttggttggtgcttctccagcagttcggaagatggtgtttaactgttgcggactcaatatgttgttcgagggctaaaataaggttgaggtcttctctgattggtcttcgggtattccttgttcaatgcggt

SEQ ID NO: 191042 - DNA, 828 bp, Gossypium hirsutum
cgcgtccgcccacccgtccgcccacgcgtccgttctctcgtccgaccctttcttcccactcgggtgcgactcacttcttcacctactctgcgagttaactcactgactccccgtcttccatcaccatcgactcgtcctcgtcgagttatcaaagttgcagcagcactcgacagcgattattcatccaagaggagtagcagcaatgagcaaagggaaacgataatgttacctggttgtgattataaccattggcttatcgttatggagttccctaaagaccctgctccgacaagagaacaaatgattgagacctatcttaacactcttgccactgtgcttggcagcatggaagaagcaaagaagaacatgtacgcttttagcaccactacatatacgggattccaatgtaccgtttcggaagaaacctcggaaaagttcaagggattgcccggggttctttgggtgttaccggattcatacatagacgtcaaaaacaaagattatggaggtgataaatatgtcaacggggaaataattccatgcaaataccctacttatcaaccaaaggcaagaaaagaatccaaatatgtgagcaaaaaatacgagagacgaaaagacggccctcctgcaggacagttccgaccaaagcaagcagcaagtcagtcggaatcatcgtcttgacaaggtaccagaaatgctgtttcgagactactcatacttatggtggtctaaagtccaggttttcatcatgcaacttagttgctctcgtttgttattcatcaatgtttcactgctaggaccggtaaataatattcgagctgatatcaa

SEQ ID NO: 191043 - DNA, 396 bp, Gossypium hirsutum
tttttcttcttctacgtttctcgcttttttttttgttttcaatggcgtctctcttaaacccttcgactcttcttccacccacaaaaccctttcttcccactcgttcccgactcacttcttcacctactctgcgagttaactcactgactccccgtcttccatcaccatcgactcgtcctcgtcgagttatcaaagttgcagcagcactcgacggcgattattcatcccagaagagttgcagcaattaacaaaggggaacgaatatggtacctgggtgggaatataaccattggcttatcggtatggaattccctaaagaccctgcttcaacgagagaaccaatgattgaaacctatcttaacacttttgctactgtgcttggcaacatggaagaag

SEQ ID NO: 191044 - DNA, 425 bp, Gossypium hirsutum
  unsure (1)..(425): unsure at all n locations
atgctttatatggataattcagttctatttttcttttggttagggttagtaaggtgaccttaaatgtggtaaaggtaagagggaggatgctcaaaggatggaaagttttccctttaaaagataagcaaatgaatatatctatatcttgcatgtgcagtgccataacattgtctcagcttcataccttctggtattccaacccaagtttccggggaattttaaattacctgcactggactctaatttccaatttccataagtcttgccttttggtcaacatcatcttgctttatcacaaccttataacaagtttatattgaatttttatgcttcatttaagtgatactcactgnttttcgagcattacatctttcaagaaggatcatacaagtctttcctagcatggcgtttttaggataggaaaa

SEQ ID NO: 191045 - DNA, 429 bp, Gossypium hirsutum
tctgctacggttctccaaaaactctttgggaaacccttaagccggtccccccataagaaaagcagtggccaagggcagcaacaagctaaccaagctcttatcggttctaaagaagctgaattcattcaacagcaagcaaagccgcacccccacgtcaaccgccgcggtggcggcttccgatatcatctacaacgaagaaagctctgccgatctccaccctgtctacgttgggaaatcccggaggcggtaccttattagctccgacattatcgacaaccctttgttccgtgagctcgcggaacggtccggtgaagacgatgacgccgtcatcaacgtgtcgtgcgaggtgggtttgttcgaacacttgctttggatgctcgaaaatgctgatcctcaacccgagtctttggaagagctggttgagtttta

SEQ ID NO: 191046 - DNA, 545 bp, Gossypium hirsutum
taacgatgtgagggatgctttggggagcttatctaggcgtgggttggaggtgagattgcctggtcatcataagggaaaatctaatggttcagtgcttgagttgaatgatgagcccatggttatccagaatagccgctgggcgagccttccgccagagctgttgcgtgatgtgatcaagagattggaagcgagtgagagcaactggcctgctcgcaagcatgttgttgcttgtgctgcagtatgcaggtcatggagggaaatgtgcaaagaaattgttagatgtcccgagttctccgggaaaatcacctttccagtttctctgaagcagcctgggtcaagggatggaaccattcaatgcttcattaagagagacaaatctaatttaacttatcaccttttcctttgccttagtcctgctttgcttgttgaaaatgggaagtttcttctttctgcaaaacggacccgtagaactacttgcacagagtatgtaatctctatggatgcagataacatatccagatctagcagctcatacattggaaaac

SEQ ID NO: 191047 - DNA, 490 bp, Gossypium hirsutum
gcgaagaagtgcaaggttcaagatagtgactatgagcgtgatcgtgaccatgatagagaccgtgatcgtgatctagaccgagagcgttatatggagagggagcggcatcgagagcgtgagcagtaatctgtgagcctgatcgtgaccattatagagaacgtgacacgcatcgcgatcacgaccatgatcgtgattatgattctcaatgggatcgagaccgagatcatgatcgcgaccgtcgttacagtgatcgggacatggatagagatcatgaccgtgacgacgttcatgatgaacggaggagttcaagattcaaagacagtaggggatggaaacgatctcctgatgatcgtgatgatggtaatgatactaaatctcgaggtaccaaattacactactctgacatggaaaataaatcatcaacttctgggagagttgaagtagatgctgatgggggaaggtctcagtcacgaccagccaatttagatgc

SEQ ID NO: 191048 - DNA, 538 bp, Gossypium hirsutum
ttgaacaccacaaagaacttaaacgccacactgttcgaagaactgaaagcgggcatgcagaactcaagtgagtatgccagcaacagtttggccatcgctgctaaattcttgggtttgttgaccaatttccgtatcccgattcaccggaggttgcttgggttccaaaaagctgcaccttcagagttcccagcttgggttaggcccactgaaaggagactgttgcaggagtccaagcctaccccaaatgtaattgtggctaaagacggttccggccatttcaggacgattaacgaggcggtgcaattggtgggaaagaagaaccaatcgagattcgtgatctatgtgaaggaaggcaagtatgttgagaatgtgaatctggataaacacaggtggaatgtcatgatttacggggatgggaaaactaaaactataatttcccgcaggccgaactttggtgatggaacttgcaactttgattccacaactttcaattgggcaagaaagggattcattgccaaggaccttaaggtcggaaacc

SEQ ID NO: 191049 - DNA, 974 bp, Gossypium hirsutum
gcgtccacgcttgcggactgactaagatttcaactgtctctcactctcctgttttgctgcctttaccaagagagaatgaaaccaaaatttctgtttctcttccttgtattatgcagtctcactatagacaacgttttagcaacctcacttggaactcatggcaaaattcccgacaatgaaacaatataccgagtctccaagcaacggtgttgggggttgtattggagagtcactagagttcctattcactcacaatttggtgagggcaaccaaatgggagccactcttgttttgggatttccagcttgagaaatatgcccgatggtgggcacttcaaaggaaagcagactgcaagctacagcattcgtttccagagggagatttcaagctgggagagaacatatactggggcagtggctcggcgtggaggcccagtgatgcagtgagtgcctgggccgtggaagacatatattacgactatgcaaccaactcgtgccaggagggacagatgtgcggccactacacccaaattgtttggaagaatacccgacgaattggctgcgctcgagtggtttgcgacactggagatgtgttcatgacttgcaattatgatccgccgggtaattatattggcgaaaggccatattgatatggttcaatattccaattctaaggggtacttcactatacttgttcaatattttcgaaaatttgttctcacgatgctatctcactacttcattaaagctaacaagttttccgaaaactagtgaacaagtatattaaggtactcaatagaaatatatatatatatatgaatttgatgtgaacattatagtaatgttgttaatatgtatgccatttgagtgtcgacatagctatatcatataggaggtaaggagtgcaggctaaattctgaactcgtcatctctatccatgagacgtgatgtgatggttactcatttcgtccctaa

SEQ ID NO: 191050 - DNA, 420 bp, Gossypium hirsutum
cccacgcgtccggttgattttctgcagcataaaacaatgcaaatgatgtatgacataatttacaaggcattggtggaaactggacttgagaatagatatgagcctcatgattttttaaatttcttctgtcttggcaatcgagaagtaggagattctttggttgctagagatgccactgcatcaagcactcctcaggtaaatagaccgtttcagctctctttaatattccagtcttgctcatccatgagaaaatatgaaccaaatggtggtaacccaaggccctggctaagaagaaccggcgctttatgatttacatccactcttaagggatgatagtggatgatgagtatgtcataataggatccgcttacattaaccagcgctcaatggaaggcacttgagacactgaaatagcaatgg

SEQ ID NO: 191051 - DNA, 1039 bp, Gossypium hirsutum
cctacgcgtccgcccacgcgtccgcccacgcgtgcgcgcactcgtccgcgtgaattgcccgacatgtgcttgtggctgtcagaataactcaactgaatctgggagttgtgtaagcgaaaggtcttcacatttagcttcagctgttccgggcaaatctaccaatgcaccacctttgcttcagtgtacgagccatatgtgtccagttcgaattcactggcatgttaagctcaactacaaggaatactggcgtgtgaagatcacgatcaccaatttcaattacgcattgaactacagtgagtggaatctagttgtgcaacaccccaactttgacaatcttacacaacttttcagcttcaattacaaaccattaactccttatgctggcttaaatgatactgccatgttatggggacttaagttttataatgatttcctcaacgaagccggtcctcttgggaatgtgcagtcagaactattattcagaaaagatgcatcaacttttacttttgaaaagggatgggcttttccacggagaatatatttcaatggtgataactgtgtcatgccacctcccgatgcctacccttggttgccgaatactggtttgaagccagttatctctctgtttcagccagtcatgacgatcttggcgtcatgtgttttcttatgggctaatatgtgatgaatgctgtctgcggaaaccgctaaaactatttgttcgacatcctgcaatttgcatctggtttcatattatcacactgaagcttttggtgatcgattcaatggtgttggaatagtttggtgcggcaatgtaacacgctaaagagtggatcaaggtgcacaatctctggtccctatagcatgtggtgtattatttatatgttggggtttgtaatttacaccatttccttttggagttaactgctttgttgtatgtttcattcacatcatacacatgatcgatttatttgtagaatatccttggaacaagtttatagcattgtattcaggaacatctctgagaaattatagtgatata

SEQ ID NO: 191052 - DNA, 511 bp, Gossypium hirsutum
gacgttcaattctgtgagagggcctagaaactttaccctgggagcaccaggtccaggatatacttgtggacctgctaagattgtgcaacccactaagtgcatgacggcggattgatggagaataactcaagctatgatgacatggaatgttacatgcacatattcccaattcctggctcaaaagactcctacatgtggcgtctcgctctcttccttctataataacactatcgtgaattgcccgacatgtgcttgtggctgtcagaataactcaactgaatctgggagttgtgtaagcgaaaggtcttcacatttagcttcagctgttccgggcaaatctaccaatgcaccacctctgcttcagtgtacgagccatatgtgtccagttcgaattcactggcatgttaagctcaactacaaggaatactggcgtgtgaagatcacaatcaccaatttcaattacgcattgaactacagtcagtggaatctagttgtgcaacaccccaacttt

SEQ ID NO: 191053 - DNA, 784 bp, Gossypium hirsutum
ctcaaggacactcctgctacttatgctatagtcgaattcttcgctcattggtgccctgcttgcagaaattacaagcaccattatgaaaatgttgcaaagcttttcaatggacccaatgctgtgcatcctggaattgtattgatgactagagtagactgcgcattaaagataaatagcaaactttgtgataagttttctgtgagtcactatcctatgctattttggggtcctcctacaaagtttcctgctggctggagctctaatcaagcgaaaagtaaattacatgtaattgatgatgggcggacagctgaacgcttgcttaattggatcaataagcaaataggcagttcatatggtctggaagatgaaaaatttgaaaacgagcatctttcatcaaatatttcggatcctggacagattgctcgagctgtgtatgacgtggaggaggcaactgcaactgcctttgacataattctagaacataagatgattaaatcagaaactcgagctccactcattaaattccttcaacttcttagtggcccatcatccttccaggagagtgtcggaaaggaagcgcataagtacttgtcaacttgaataactgggcccatttaaatttgtggtcattaaaccagccttatggttacccccagtacatgataagggtgcctcccaatttccatatttgtggaaagggtggtccccgtggatattggatggtttgtcgtggcaacaagaacgattcccggggctttaattggggtttatgggttttaatgca

SEQ ID NO: 191054 - DNA, 392 bp, Gossypium hirsutum
gttatattctctttctctctctcatttataccttttggggttgtggcagtctcatagcctagaagaagaagaaaagtctcatcttttatgttgggattctaaagggttggagatacccaaaatttaaaggggaaagagagagatgggttcatgtgcatcagtacataaaagctcgcaagagtcagccatgaaaggtggactttctttagggtctaaaacagaccatatcatcatcccaccttcacctggtaaagagaaatctgatgctgtcaatggtagttaagatgaaactttttttgattccagagcatatttggattcggattgggatgaccatttcttaagtgtcagtggtgatttcacttcatcttgaggtaattcccctgttcacc

SEQ ID NO: 191055 - DNA, 630 bp, Gossypium hirsutum
attaatcattatcgccctttctcgaccaagaatcgtcggggggtacgacaacagcgggtccaagaggttttgcttttaaattccaaggatccttcagttacgccctttgttgatgagatacagagccgaattttgtgccattttcaagctactaaagaccaggaaggtggtccggacgattccagcttcataattcgatcgagttctcaaaatttgtcatcaaggttttcacagagtcaaactcaggatgatgaaggtaaattagaagagaaacagagtcttgaaaacccaaatggctcgaagattctcccatttgaatttgttgcattggaagcatgcctcgaagctgcttgcagctgcttagaaaatgaagcaaagacattggagcaagaggcacatccggccttagataaattgacttccaagattagtactctcaatttggagcgtgttcgccaaattaaaagccgattagttgcaataacaggacgtgtccaaaaggtaagggatgaattggaacacttgctcgatgatgatgaagatatggccgagatgtatttaactgagaaacaactacttgaaaattcttcaacctcgtctatgaatgagagggatgatatggatgatgac

SEQ ID NO: 191056 - DNA, 582 bp, Gossypium hirsutum
  unsure (1)..(582): unsure at all n locations
cccaaaaatgaggaagtttttcctcttttcgtcancggcctaaaccccgaaggtgacgccggatccatncggcccgaccccgcttcgttccctaaccaaactctcccttccaccaccgncaccacagccgccggtcatcggaaaaaagggaccggtgttcgagcatggcttatactggactcgacatgccaaacccagatggtggaagccggaaaacatgctatcatgagacgtacgggtttgcctgctcgagatcttcggatcttggacccgctgttgtcgtacccatcgacgattcttggtcgagaaagggcgatcgtgattaatttggagcatatcaaggcaatcatcacggcgcaagaggttttgcttttgaattctaaggatcctgcagttactccctttgttgatgagatacagagccgaattttgtgccattatcaagctactaaagaccaggaaggtggagttgatgattccagctacataattcgatcaagttctcaaaatttgtcgtcaaggttttcacagactcaaactcaggatgatgaaggtaaatcagaagagaaacagagtcttgaa

SEQ ID NO: 191057 - DNA, 425 bp, Gossypium hirsutum
aagccaaaaacccttttaataataattatataatagaatggtcgttccaataattaaattcaccagtgcaaccaacacacatctacgatataggatgaacactgaaacacctttttcttcctttccacaaagtcaaaagctaaggtataatatttttattttaagctgttgcaatgggagcagtagcttccatcgctttcatggcttcaaaccttggttccttggcctggaatttcagtcctgcatacagtttcatgtactcttcaaacacaaatttggggtaaacctgtttgttcttttccccagcttctttctccaccaacgccggcgccggatagatgacagcgtcgctgccggggttgtagaatgaagctaaagacatccgagttccatccgtttgggctatgactcggtgctccacactc

SEQ ID NO: 191058 - DNA, 782 bp, Gossypium hirsutum
atttagcagatatttacaacagttggttatggaatcgcttggcgaggagtttgatctggatggtcaccgggtaaatcaaggaatttctgattatggaaataaatgaagcacagatcagcacgcctatatccaacaactgagggagggtgtgcacaatttctctgcgacctttatcgaagttctacgtgatagaccccctggtcatgattgggagcttgaaccgggtgttacatgtggtgactacctgtttggaatgctacagggcacaagatcagctctgtatgcaaatgaccgagaatccatcactgtcaccgtccaagaggtgacacctagatctgttggggcactcatagcactttatgagcgagcagttggaatttacgcctcgcttgtcaacatcaatgcttatcatcaacccggtgtggaagctggggaaaaaagctgctggtgaagtattagctctacaaaagcgggttttagcggtgctcaacgaggccagctgtgaagaccctgccgaatcattgacgcttcaagaaatcgctgaccgttgccatgccccggacgatattgaaatgatatacaaaatcatcgaacacatggccgccaatgaccgagcactaatcgccgaaggggactgtggttcaccatatagcttaaaagttttcctcggcgaatgtaacgtcgatgaattatatgcgtaagtgaatgaaaactcatgtcctcttttaagcttgtactttccacagagaggaaaaaaaaaaaaaaaaaactcgcggcacgag

SEQ ID NO: 191059 - DNA, 310 bp, Gossypium hirsutum
  unsure (1)..(310): unsure at all n locations
gcaatttcatatatctgatcgtccatgggaggttctgaggaatgcagttagtaagacatacaatcgtatcactgatctaaggaaagagatttcatctctgaagaagagtgttgtatctgcagaagacgctgcatctaaggcaaaagcagatttggaggctgctgagtcaaagcttaccctagtggaaggtgaacctgttcttggtgataaccctacacagttaaagcatttaaaatctgtggcttggaaagaccaatgaagagacagtatccatgcatgactctntagaagccaaagaggctctttttgc

SEQ ID NO: 191060 - DNA, 395 bp, Gossypium hirsutum
ggtttttcttgggaaaaattaaagaagtgagtacatatgcttggtggttggtgcggagagctaccgccgccgcccgatgaggataaccaaccaagcagtaacgccacggtatggtcacagcagtacacagatggctcctcccactctccgcaagccgttctccggctttgctccgccgcagactatcctcagatcccaagacaaacccataaaccctattcccaatacaacaacctcttcttccgtttccatctccgtgtcgccttcccccgtggcggttgcacccgacggaatggtgcaacatcagcctgcacttgtgggcgtcacttccagtgtaatcgaagagtatgacccagccaggcccaatgattacgaggaataccggagggagagga

SEQ ID NO: 191061 - DNA, 477 bp, Gossypium hirsutum
gtttgtgtgggggattccctctgccattttctggagatggtgatatcataggggaggtgatgaattgatctctgcttagaaacgaaggatcaatacagatgggttcttgtgtgtctagacctgaaggctgtgttggccaaaggtcgaggtcttctaagaagaagagtcgtaaaagacggaaaacctctaagaaaagggcgccttctcgtctctccgacggttcctctgataatgtcgatcgtcgctcttccttcaccaacccaacttttcaaggttcttgttttttttatatttggcatttgctatttggaacatgggagctaaaggagtgctctagaacatccctcctggacccaattttgatgggatcatgataggattatgaccctgttttttatatattgggacaataattatcactgttattattattttacttgttcaccatgtcatgtttaaatatgggcaacattactg

SEQ ID NO: 191062 - DNA, 412 bp, Gossypium hirsutum
gatctctgcttagaaacgaaggatcaatagagatggggtcgggtgtgtctagacctgaaggctgtgttggccaaaggtcgaggtcttctaagaagaagagtcgtaaaagaaggaaaacctttaagaaaagggcgccttctcgtctttccgagggttcctctgataatgtcgatcgtcgctcttccttcaccaacccagcttttcaagatacgttgtctttaaatggtcttgaaggtgtagcttcatccaatatttcatctctaagagatgctaattatggagaacattcctctttagttgaccagatgcagaaaccagggggtctgtcaactggtaattctgcacgcaactctgctagtgaggctgctagaatttcaaatagtcaaatcttatgttcaaaggatgttaatcc

SEQ ID NO: 191063 - DNA, 477 bp, Gossypium hirsutum
gctctagatctagtggatcggtgggctgcacgagttgggttcgagtcgagttaatatgttatttgggcttttatggaggatatgtatattcggccaagctatagtcttggtgaatttttcatatttgtgattttgtgaaaaatagactaaattgtcaaagtgtgaaaatgtaagggctaaaatgtaaagtgccctaaatatgtgttaatggattattttgcatgaaatgaatgattgaatggttgaatttaaattgtattagatcaagaacaaagaaaatcgaacttagatcgagggaagtccaaaatagttgaatagtcgactcgtttccatctgaaattcgtacgaggtaagtcaaaatacaattacgtgttaaattgattgaatgttgtatatactagttataatctgtattggacggctatgagagcctgatgaatgaattccgagtaaatttcgataatatgctagtatttg

SEQ ID NO: 191064 - DNA, 660 bp, Gossypium hirsutum
  unsure (1)..(660): unsure at all n locations
cacgtttntttgtccatcntgcgatcgtccatcactcttngcttcagcaccagaagaaatcctctgcaacagataagtattttccccattcttaatgtcttcagtagcaataagatgagcaaccttgttagcttccctattgagaaagcgaaaagcacaatatctgcaactcaaactcattttttttgaatcttcaatatacacagcaatttcagatctatcttctttcttctcttgcagcttttgaatcactgacctagagtctccctcaacttccacgcccttcaggccgagttggaatcccagatctagtgcctgataacacaccaacacctcggccgcaaaagcagacgatcaagaacaacagaaaatcgaacttagatcgaggggagtccaaaataattgaatagtcgactcgtttccatctgaaattcgtacgagttatcttagctgctgaaggctcggggatagtcgaggattgtcaccatactatcgaattcattttggtacttttgaaaagtgtaaatatttttaagtatagcatgtataggatagaatgtctatgtatttaagttttgatatgtatatatgttatgccatgagagttggctagcaaatggtatgtttgtgcttagttttggtaaatggtttgtgatgctt

SEQ ID NO: 191065 - DNA, 572 bp, Gossypium hirsutum
gtcacgcgtccggtcgaccgaaaaccctaattttcggaggtaaggaggaaaagaagaaatggcggtgccgcttctaagtaagaaaatcgtgaagaagagggtcaagaagttcaagagaccctcagagcgaccgcaaaatctccgttaagacaaactggcgtagaccaaagggtattgattctcgtgtcagaagaaagttcaagggatgtactttgatgcccaatattggctatggttcagacaagaagacccgacactatcttccaaatggctttaagaaatttgtcgtgcacaatgtcggagagcttgaactgttaatgatgcacaacaggacatattgtgccgagattgcccatgatgtttcaacaaagaagagaaaggagattgtggaacgggcagcccagcttgatgttgtcgttatgaacaagcttgctaggctgcgcagccaagaagatgaatgagattaagcttgtcttttatgtttatctttgagctttgtttgcgtttcttataaatttttggtaattttgttgctttagatgtggcgataacattctcaaccgggatttggt

SEQ ID NO: 191066 - DNA, 580 bp, Gossypium hirsutum
  unsure (1)..(580): unsure at all n locations
cggnnccggaaacccgggccgacccacgccttcgcggagggccagttttgttcccaccacccgcggtttttccagttccaatagcgtttatttaggtggttgcagttaaaaggctggtggttggactaaggggtgggtcggccggtccgcctcacggtgagcaccggtctgctcgtccctactgccggcgatgcgctcctggccttaattggccgggtcgttcctccggcgctgttactttgaagaaatttgtcttgcacaatgtcggagagcttgaactgttaatgatgcacaacaggacatattgtgccgagattgcccatgatgtttcaaaaaaaaaaaaaaagggcggccgctcgcgatctagaacctctagtaccagaagatctcccttgttatgctttgcatcggtgtctctcgcagctgaaaaacaaagcattggtagatcgcctctactgtattccgctttcttgtcgttgactcaaccggactcgacagagtcgactcaggatggacatttggcaacggcaggtccgttcggcgaggagagagtcctagttggtgaggttctggttaggaa

SEQ ID NO: 191067 - DNA, 453 bp, Gossypium hirsutum
ccagctattggaattcagcacgagcctttctgtttttagcagagaaaaatttcaaaggaaaaggtgagcatcattcggtgtcgatcgaaccttcatacaaagaaatacgaaaatgtcttcaacacccattaagcgtccaaaatccaagcataattcatattcaaaaaattcttcactgaactccatactcgaaccaccccatagcttattcccttcaaaaggcgagttcttgcgtctcattaccgtacttgcaatcgcatccgctgtagctctctcctgtaattacttccttaccttatttaccttcacctctaaacccttttgtgatagtaacttagaccccatcgattcattctcagattcttgtgagccttgtccaagttatgggaaatgttatgaaggcaaattggaatgtatttatggttatagaagacatggaaagctgtgtataga

SEQ ID NO: 191068 - DNA, 643 bp, Gossypium hirsutum
  unsure (1)..(643): unsure at all n locations
gccaaagcctgccattgacccttaacaattcattcatcaaaaaaagcttttcctctccattttccattccatatttgttctgcgctctctgtttctgttgttgtgttttaggatttgagagatcatggcgtcgcaagaatacttggacaagatgaaggtccgtcaggagtatcggaatctctggcacacggatctcatgagcaccattcaacgcgaccctccttattgctgcttggctttttggtgtggcccatgtgtatcctacatgctccggaaacgagctctttataatgacatgtcaaggtatacatgttgtgctggttatatgccatgcagtggtaggtgtggtgaaagtaaatgtcccgagttttgcctttgcactgaggttttcctctgctgttgtaactccgtggcttcaacccggtttctgctgcaagatgaattcaacattcaaacaacaaaatgtgacaactgcatcattggtttcatgttttgcctgcaacaagttgcctgcatattttccatagttgcaatgattgttggaagtgatgagcttcaagatgctgcacaggtgctgaactgtttggctgatatggtttattgacggtctggcatgtttcagacacacatagattggaatggn

SEQ ID NO: 191069 - DNA, 430 bp, Gossypium hirsutum
cggacgcgtgggttagacctgaaagctcatcttccctttcgttaaactccaggtctgctttgtatcagttactcacaaagaccgattattgcataggatcaaagctattgaagtcttcttctcggtcggaagcacgagttcatcggaaaaacaaagtgtagcaaagtccggactttaactctccatctcttcacattctccgttacctcttctttcttcatccaccaatcctttcaacgcacgcaagaccttctctatccagtattgggggatttcatgccgccgtcctttcatcgccaccctggattatagttagcgcatcaccttcaatacaaatatcttggaagcttatttccttagccacagtaatggcttgcaaacacgcccttgcctcggccatgatcggatctgagatattctcccatggaaa

SEQ ID NO: 191070 - DNA, 796 bp, Gossypium hirsutum
  unsure (1)..(796): unsure at all n locations
gggaagcaatatgaatcttcaacaaaattcggacaggatgaaggagaagacatcgtaccaaaaactttccctgtttgtgacgatcgtcattcagaattgattccctgcttagacagacatttaatataccaaatgagattaaagctggacttgtctgtgatggagcactacgaacgtcactgccctcctcctgaaaggagatacaattgcttgattcctcctcctccaggatacaaggtcccaattaagtggcctcaaagcagagatgaagtatggaaagcaaatattccccatacacaccttgcacatgagaaatctgaccagaactggatggttgtacaaggtgaaaagatagtatttccagggggaggaacccattttcactatggagctgacaagtatattgcttcaattgcaaatatgctcaactnttacacaacaatntaaataatgaaggaagaatacgacagttttatggttggtcnggtgtccaagttttggacatatnctcttcttcgatatatacaatgtcatagcaccatggagtgcataaaccaaatcattgccctgaagagaatcctgctatctgtgtttaggaccanagctcctacccagcgatattgactgctactgnctcctgagatgatgcttaaaggagggtattctctgactaacccgcttaaccgagggtatgccttattccagatttgccaacaaaaaatatttgtttgaaaaaaaatcctccgcccattttggattgaagaacctttgttgcaactacaaattttttgaaaag

SEQ ID NO: 191071 - DNA, 440 bp, Gossypium hirsutum
  unsure (1)..(440): unsure at all n locations
atgatgaacaggaggcctgctttttcaatatgagtagctatgaaggagagactgaaaaccgtcttgcattgtgggaggactttgagttgcgagggttcttgcctcttgctcctgcacactccattttggacttctcaaggaaatgttcctttgtaagcgatggcaataaggaaaggaaagcccgtgtcaagagaattttggccgctgggaaggctctagctaatgtcataagggttgatcagaaaactgtttgttttgattcaaaagctaagaaatttcttattggtgttgagccatttgcagatgtcacagtgagcgccgctacccctgtggtaacgaatagtgaggtgcatgaaaccccctctgagaacattactaatattggaaatgttcagccaatcccacaacctagaacggntggtgaagaagatgacgatgat

SEQ ID NO: 191072 - DNA, 1037 bp, Gossypium hirsutum
  unsure (1)..(1037): unsure at all n locations
ccttgggaagatttatgcacatgcatcattggggaatctgcagaaagcttttggcacgttgcatgagtttgaagctactcatggcaagtccactaacgaagcagaagacctgttctcacctttcacctctntatatcccttggttgtggcttgctccaagaatgggtttgagactttggattcagtatattttaaacttgagaacttaagtcgtgcagacccttcatacaagtctggtgccggtctgaattggataattttgggatgtgggaacatatgggatatcgagcgtgcctaccaaacatttgatgcaataagttcctcttttgggttgacccctgacattcattcatataatgctctaatctatgcatttggaaagctgaagaaaacttttgaagcttcaagggtgtttgagcacatgctgagcttgggtgtgaaacccaatgctaagtcatattcgttgcttattgatgctcatctcatcaatcgagatcaaaaagctgctctctctatgattgacaagatggtgacctctggatttgtaccatccaaagaaacactaaaaagggtcagaaggcgatgcatacgagagatggactacgagtgcgatgataaagttgaatctctggctaagaaattcaggatcaggatgggctctgaaaatcgcaggggcatcctttttgatcttgactatggcactgaatatgcatcataggcaagttatgcagtcttaaggcttgggactacatgatgcttgaaattatcaagagcgacaattgggggttaaccaagttccgatgaagtaatcaacccatttgttattaaatttttgtcaattctgagcctttggaggataaatatcgtgttcttagcttgtgatttcccccctctaatatctcaattctctttttttcaccctttatatgctttctgaggaatangaacagaaaaaagttaggaaaaggtattcgcatgttgaacaataaatgtcttttctattttgcaccttttaattcaataatttcgcagaaaat

SEQ ID NO: 191073 - DNA, 405 bp, Gossypium hirsutum
catactttcaaggttgtaggaaagtgaagaaatggtgaggatttgttgtattggagctggttatgttggaggtccaacaatggcagtcattgcactcaactgtccctccattgaagttgtcgttgttgacatctcggttactcgaatctcagcctggaacagtgaccaattaccaatctatgagccaagtcttaatgaagtggtcaaacaatgcaagggaagggacctgttcttcagcaccgacatataaaaacatgtcttcgaagcagacataatctttgtttctgtaaacacgcccaccaaaacccgaggtctcggtgctggcaaagctgcggaccttacatattgggaaagcgcaccaaggatgattgctgatgtatcaaaatccaacaaaatcgtcggcga

SEQ ID NO: 191074 - DNA, 406 bp, Gossypium hirsutum
tagcacacatccatagcgtgacggaaaagagaaaacttgggtttccttacaaattagtccctctccatctaatttcatagtttccacccaaaatcttttatttccaagtgaaatcaagtgtctagcaatatcaaaagtttagttttcaagatagaattcatgaattcatggatggaggtgggagaaagttaagaaagtgtaagaagtcaaggtgacaaggtaagagatcaagagttctcttgtgaattttgtgatttattgaagtagaaataaaagagtaattttttgtacttctagagttctacttattttcaaaagactaaattgaattatgtgatgaaataagtgcgatgtgtgtgaatttaattaaaaattaaagggattagtgtaaaggacttcatgagag

SEQ ID NO: 191075 - DNA, 412 bp, Gossypium hirsutum
aacaataacagaagcaaaaaagaaaagggttctttgctcactaagttttattcttgttatcatttcatttgatcgccaaaaaaggaaaagcttaatccaaattgaagaggaaaaaaaaagggtgcaccatggatcatgcagctgatgcccatagaactgatttgatgaccatcactcgccatgtccttaatgaacaaaccaagtaccctgaatctcgtggtgatttcaccatcttgctcaatcatattgttcttggctgtaaattcgtttgctcttctgttagcaaggcgggtcttgccaaactatttggacttgctggagaaaccaatatccagggtgaagaacaaaagaaattggatgtgctttctaatgaagtttttgttaaagctttgattagcagtggaagaacatg

SEQ ID NO: 191076 - DNA, 649 bp, Gossypium hirsutum
  unsure (1)..(649): unsure at all n locations
aggaagtcaagcaagtacccaaaccttgttcgctggtacaattctgtttctgcagaatacagcgatgccttgaatgaagttactgcatggtatgttggcaaaaaaggattgggaaagcaggtggcagctaaaccaaaagagcaaaagagtgcagatggaaatagttctgataaggtgaacttaggtagcaggccctcatctgaaatagatcttccttgtgctgaattgggaaaggtgcgattgagatttgctcctgaacctagtggttatctccatatagggcactctaaagcagccttattaaatcaatactttgttcaacggtaccaaggtgaagtaatcttgcgctttgatgataccaatcccaccaaagaaagcaatgaatttgtagaaaatcttataaaagatgttgagacattgggcatcaagtatcaaatgatcacctatacttncgattacttccccaagttaatggatatgggctganaagttgataaaggaggggaaagcctatgtggatgatcaccacgtgaccaatgcagaagaaagatggatgcattgatcanatgtngagcacatgttaagagaattaagtatggaggaatgatgctgctctgaagaagtgcatgtgcttctggaacttgaatcn

SEQ ID NO: 191077 - DNA, 424 bp, Gossypium hirsutum
ccctcgcgacctctgagttttcaacttaaaatttcttggttttcctcaagaaggaagaagatgttgcaaatagctttcagctcgtattcatggctgttgactgctagcaaccagaaagatggaatgttgttcccagtagctttgtcatttttggtagccatattgggaatttcactgtgccacgtatggaccataaggaagccaaagaaagacatcgccccattaccgccgggtccccgtgggttgcaaatagtgggatatcttccatatcttggaactgataatcttcacttggtgtttacagatttggctgcagcttacggtcccatctacaagctttggctaggaaaacaaattatgcgtagtcattagctcggcaccactggcgaaagagttgttcgtgacaacgacatcacattttctg

SEQ ID NO: 191078 - DNA, 694 bp, Gossypium hirsutum
ccttgtccgggctctaataccccttcacaaaccaaggggcgtggccgatgtaccaccagcagttgtcttactgcatcacgcagtttgtcgagaaagactgcaaactagctgatactgctataaggggattgttgaaatactggccaattactaatagctcaaaggaagtcatgttccttagtgagcttgaagaaattctggaagctactcagcctgctgaatttcagagatgtatggtacccttgttccaaaatattgcacgatgtttgagcagttcacactttcaggtagcagagagggctttggacttgtggaataacgatcacatcgagagcttgattagacaaaaccgcagagttatactgcccattatattccctgccttggagcaaaatgggcataaccattggaaccaggttgtacagagcttgacgcttaatgttcgcaagattttttctgataccgatcctgagctattcgaggaatgcttgaacaagtttcaagaaaatacagaaaagcgggaagagatcaaaacaaaacacgaagcggcctggaagcgcatagaagagattgcggtatcaaatgctgcaaatggtgaagcagttcttgttcctcatgtcgtagcttcagaaacatcatgagtacccttggtgatttgactggactctagtcaagtgtctatttcttttatcgt

SEQ ID NO: 191079 - DNA, 866 bp, Gossypium hirsutum
  unsure (1)..(866): unsure at all n locations
caggcaactagagtaacacgttagagtattagaggaagctaaggcgagagactcagagctccagtcattgcatgaaactttaacaagggattcagaacttaaactccgagaagtaatggaaaatttcaacagcaaggattctgaaacaaaatctctgttcgagaaattgaaaacatttgaagatcagataaaggtgtatgaagaacaagttgctcaagcagctggacagtctgcgtcttcaaaagaagaaatggatcagagcttacagaaattggcttctctagaaagcacaaatgaacaactcaaaagcaagatatcggagttcgaaaataaagctcttcagtcttcctcagagaatgaacttttggttcagacaaacattcagttgaagggcagaattgatgagcttcaagaattgcttaattcagctctttctgagaaggaatcaactgctcaagagactgcttctcatatgagcacgattaaagaattatctgaccagcatacgaaggcctcagaacttcgagcagaagccgaatcacgaattgtggaagcagaagctcaattacacgaagctattgagaaatactcgaagaaagaatcagaatccaacgatctgattgaaaagttgaatgcgcttgaagtccaaattaaaacatacgaagaacaagctcatgaagcatccacaattgctgtatcccgacaagtagaggttgaagagactctttccaaattaaagcagcttgaaagccttgtcgaggaactgcaaaccaagtcggcacactttgaaaaggagagtggaggacctgctgaggcatatttaagcttactcaggactagccgaatcgagtcaaactcggtgattn

SEQ ID NO: 191080 - DNA, 707 bp, Gossypium hirsutum
agttgctagtcgcctgaagatcacaatagtaggtggctgtatacccgaacgctgtggtgataagttgtataatacttgttgtgtctttggtactgatggaaagctgaaagccaagcatcgcaagattcacctttttgatatcgatattcctgggaagattacctttatggaatccaaaacccttactgcaggggagactcctactgttgtggacacagatgttgggcggattggtataggcatctgttatgacattcgctttactgaattagcaatgatatatgctgcaagaggtgctcacttgatatgctatcctggagcatttaacatgacaaccggaccattgcattgggagttaccgcagagagcaagggctgtggataatcagttatatgtggcaacttgttcacctgctcgagatactggagccggttacgtggcttggggtcactcaacccttgtaggaccttttggagaagtcctagccacaactgaacatgatgaggacataattatagcagagattgattactcaatacttgagcaacgaagggctaatctccctttggcaatgcaacggcggggtgatctttatcagttggtagacatccggagagtcagtgctcattgattagagaagagaagcatgtgaatagctatgagtcatggtggggatgtaatataaggtgcaactttactaaaatcat

SEQ ID NO: 191081 - DNA, 1160 bp, Gossypium hirsutum
caaagccttttctcttctcctctgaaatctcgctctaagatttcgtcgtttatatttctccatctggattttgattgagctctctctcctttcgtcttaattggtttcactatgtcttcttatacccctaagaacatcctcataactggggcagctggttttattgcgtcacatattgctaaccggctcataaggaactacccggactacaagattgttgtgcttgacaagcttgattactgctcgaacctgaaaaacctccttccttccaagtcatctccgaactttaagtttgtgaaaggtgacattggtagtgctgaccttgttaactacctccttattaccgagtctatcgacacaataatgcactttgcagcccagactcatgttgataactcgtttggaaacagctttgagtttaccaagaccaatatctatggcactcatgtcttgcttgaagcttgcaaagtcactggtcaaatcaagaggttcatccatgtcagcactgatgaggtttatggtgagaccgatgaagatgctgttgtaagaaaccattaagcttcgcaacttctcccaacaaacccgtactctgctacaaaagctggtgctgaaatgcttgttatggcgtatggtaggtcatatgggctgcctgtgataacaacccgtggaaacaacgtttatggtcccaaccagttccctgaaaagttgattccaaagttcattctcctagcaatgaggggaaagactcttccaattcacggtgatggttctaatgtgaggagttatttatactgcgaggatgtggctgaggcatttgaggtcattcttcacaagggtgaagttggtcatgtttataatgttggaacaaagaaggagaggagagtgattgatgtagccaaagatatatgcaaacttttttcaatggactcggagacaagcatcaagtttgttgaaaacagaccatttaacgaccagaggtattttcttgatgatcagaaattgaagaacttgggatggtctgagcgaactgtgtgggaagatggcttgaagaagaccatagaatggtacactcaaaatcctgattggtggggcgatgtgtctggtgcactgcttccacacccgagaatgctgatgatgcctgtcgagagacaatttgattc

SEQ ID NO: 191082 - DNA, 384 bp, Gossypium hirsutum
gtgaccctaggttgttcaatatttatactatttccgggaggagctgacgttagtccttacagcaaaggaagagaaagtacagtttggggcgtttctctgatggttgggtatcttgggtttgatggttttacaagcacattccaagataaatcatttaaaggataccatatggaaatacacaatcaaatattctacacgacatcatgttcttgtattctcagcttgacaggccttctattacagggacatttactttcagcaatagattttgtttatcgccacagcgattgttttcttgatattgtattactttctactgtagccacagtcagtcaattcttcatttcttacacgatacgtacatttggtgccattgcatttgct

SEQ ID NO: 191083 - DNA, 1376 bp, Gossypium hirsutum
gggggccgcgtgcgggtgatctttcaatcatgggttctcttcagtatcttctctccattccattcttagtttgcgttgttgctcctgggttagcccaacagtcgttccgccccaaggccctggtcgttccagtctctaaagacccctcctcacttcaatacctcaccactattaaccaaaggccaccctttggtcctatacgcgttggggtcgatctcggtggcccctacttgtgggttgattgtgaacgggcttatgtttcatcgactcaccggcctggcaggtgcgggtcagcccactgctcgctggctggagccaatgggtgcggagattgtttcgatggaccaaggccagggtgcaacaacaatacatgtgctggcggacccggcaacaccgtcactaacaccgccggtcctggtgagggtgcacaacatggtgtctctctgcaatcaactgatgggaggaatcctggcagagtggtaaccgtgcctagattccttttcgcttgtgcaccaacttccctgcttcaaggccttgctaacggtgttgtgggaatggctggtttcggtaggtatagaattgggcttccttcgcaattctctgctgctttcagtttccgaaggaaattcgccattggtctctcgtctgccaatggtgttattttcttcggtgatggtccctatgtgttcctccctggagttgatgcatcagaatcgcttactttcacaccgctcttcattaaccctatcagcacagccccttctttccctctcggtgaaccttccgccgagtatttcatcggcgttaagtccatcaaagtgaacgaaaaacccgtctcactgaatacaacgttactgtccattaacagcgaaggtgttgggggcacaaagattagcaccgtgaatccctacactgccctagaggcttccatcttcaaagctgtgactgaggccttcattaatgaagctgctgctaggaacatcaccagggtggctggtgtggccccatttgaggtatgtttcagctcaagaaacattgtagggacacgtttaggagcagcggtgccatcaatagacctcgtgttgcagaacgagaatactttttggaggatttttggagcaaactcgatggtcaagtttagctgggaagtgacgtgtcttgggttcgtgaatggtggctcgaacccacaaacttccattgttattggagggtaccaattggaggacacttttcttcagtttgatttggcaacttcaaagctggggttcagctctacccttttgggtaggcaaactacttgcgccaatttcaacttcacatctaatgcttagatggcatacggcagaaataaattttacaaattataatgttgtgag

SEQ ID NO: 191084 - DNA, 638 bp, Gossypium hirsutum
cagaaagcttccttctcatccgctgaagcattcagcttttcttgttccacatgaaatacggaaaagctcttcttccatttctcaaattgtcactttcaatgaaaaaattcttgttgctggggcaaacacattgcttaaacctagaacatatgccaaatattttgcatgggggtttcctgatcgcagcttgagatttatgggctatgaccaagatcgcctcctttcaacacatgagaatcttcatggtggtaaccaaatgcagtgtgctggtgttagtcatgatggtcatattttggtgactggggccgatgatggtttagtttctgtttggagaatcagtgaggacggcccccgtgcctctagacgactgctgttggaaaaagtgctttgtggtcatacagctaaaatcacatgtcttcgtgtcagtcagccttacatgctggttgtgagtggatcagatgactgcactgttatcatatgggacctaagctcattagtatttgttaggcagcttcctgagttcccagcaccagtttctgcagtttacgtgaatgatttatctggggaaattgtgacagctgctgggattctgcttgctgtttggagcatcaatggggactgtctagcagtaattaata

SEQ ID NO: 191085 - DNA, 473 bp, Gossypium hirsutum
cggacgcgtgggcagcagtccaaatatacttaggtcttgtttttgggggaagggttgagaaatgcttgtgttgttcgagactcccgcgggctttgcccttttcaaagtattggatgaagggaagctaaacaaagttgaggacttgtcaaaagaattcttggctgcagattcagcaggaaaggttgtctcgttgcaagccttttccaagttcgaaaacacagcagaagcattggaagcagcaacgaaactacttgaaagcacgcccagcaaaggtttgcgcaagttcttacgtgctcattgtgatggtgaaacactaggagtggctgattcaaaacttggaaatgcaattaatgaaaaactgaaaattgattgcgttcacaataatgctgctatcgagctgctcacaggggtgcgaactcaatcgacacaactcatctctggtctaggagcacaagattagtctcctatgagtc

SEQ ID NO: 191086 - DNA, 1216 bp, Gossypium hirsutum
tagggacgagctcctctgtgccgtgtcttgcgggtttcacttcacagctagcaaaggatctgcaagatggaaagcatgaatagcttttggcagttaggagatgatctccggggacaatctaaagcctcagaggatcacaaatggttgatggttgcctccaaactggctgaacagacgaggataaagggtgagcgaatgaacaatctcgatctttcaaagggtccagctgaagtaaggacaagggataaatttgggttccatgaagacaacaaattcgagaaccttaacttcaatatgttgaacttggactccaagatcggagatagtgtaagcaaaagttccttccgaaatggtatttacaacaccaatgctgtttaccagaaaaataacagccacaacattgggaacctgtctggcaacaaatatagcggcaacaatcatagcaacaaagatgtcaataataacagcagcaccaactccaacaacacaacgagaacagcaatgcaaacaatgctgttgacaaaaggttcaagactttgcctgcagctgagacactcccgagaaatgaggtgcttggaggatacatctttgtttgtaacaatgatacaatgcaggaagatctaaagcggcagctatttggtttaccgccaagatacagggactctgttcgggcaatcacacctggcttgccattgtttctctataactacaccactcatcagttgcatggtatttttgaggcagcaagttttgggggttctaacattgatccaactgcttgggaagacaaaaagtgtaaaggcgagtcgaggtttcctgctcaggtgagaatccgtattaggaaactctgcaaggcattggaagaggatgcgtttaggccagtcttgcaccactatgatggccccaagtttcgtctcgagctctcagttcctgagacgttggatctattagacctttgtgaacaagcaggctctccataagccaaaagttatctgagtgcaaatgtgctagggttaagggcttaaggctgcctgcttttcgcagattttccatagagcgcaagctgtgggttaaagaccagttggtgaatcaactcatgaaaagtgggaaatggcgttagccagctgaataaaattgcgtttgtgtcttgtgaaagatactttttgtaaacttttgcattatattcttatgtattaaaaatcctatatagatagac

SEQ ID NO: 191087 - DNA, 575 bp, Gossypium hirsutum
tgcttatacggattctcacctgagcaggaaagtatgcaaggcattggaagaggatgcttttaggccagtcttgcaccactatgacggtcccaagttccgtctcgagctctcagttcctgagactttggatctaatggacctttgtgaacaagcaggctccccataaacaaaatgctagccgagtgcaaatgtagtagtagtagggtttgtgatgcacgtttccggagatttttccatagagcgcaagctgtggtgggtgttaagtccagttggggaaaaagtaggaaatggcattagccacatatgaataaatgcgttcatgtcatgtgaaagatgcattgtaaaacttttgcattaatatgctatgaattaaaatcctatcagatatatttgcaagatgtcaaaaggaaatggcaacgacgtgtaatgttcaagtgcccaacaactgaaggctttgatgtctatttttgtgcttataatatgaaccttctgctgtctttttcaattaaaaaaaaaaatttctaaattttgtttactattcttttttttttctcaaaatttttaatctataattt

SEQ ID NO: 191088 - DNA, 705 bp, Gossypium hirsutum
ggttttcttagcttctaaaatacttttaaatctgcatgtttaatgctaaacattgaagttgtattttgcttagttggatctgcaagatggaaagcatgaatagcttttggcagttaggagatgatctccggggacaatctaaagcctcagaggatcacaaatggttgatggttgcctccaaactggctgaacaaacgaggataaagggtgagcgtatgaacaatctcgacctttcaaagggtccagctgaagtaaggacaagggataaatttgggttccatgaagacaacaaattcgagaaccttaacttcaatatgttgaacttggactccaagatcggagatagtataagcaaaagtaccttccgaaatggtatttacaacaccgatgctgctgaccagaaaaataacagcctcagccgtgggaacctctactgccaacaaatatagtgagcaacactcagagcaacagagatgtgaacaatgacagcagcgccaagaataacagcacaggcgatgagaacagtaatgcaaacgatgccgttgacaaaagattcaagactttgcctgcaactgatacactcgcaataaatgaagagcttggaagggacatatgtgacagtaacaatgatacgacgcaggaagatataaagcgccagctattaggcttaccaccaagatacagggactctgatcgggcaattac

SEQ ID NO: 191089 - DNA, 667 bp, Gossypium hirsutum
gtaactgtggacagtacactttcagtgaagcaccaagcaaaggttcctgtgcctgtggacaattatcaaagaactgataacagctccacttcccaaagcctctgtgttctgaagccaaatgagagggtgccattttctgggaagcaaatcccacacagatattctcttgcatctcgtaatgctttggataatgcagaatggaactcaaaatccaggaagccaattgaaacatttgaaaaggagctggtaatgacatcggatgaagcatcaatgaagaattcacggttaccaaaaggatattgttatgttcctgtcgattgtcttcccaaggagaagcacttcacacgagataccacttctgatggacagttggagcacaatggttaggctttgtcaatacaccggttgtggattgccttatggaagggtgacggcccatctgtgcctaatgtaactgttttctgtgcggaactggaggtgtatgttgatgaaggcagttgagtggcagaagcagtggagagatgttgattagggccagtgtggcctcaatgccatatgaaccgcgtgatgtgactcgggatggggaagctttggcatatcatttgtggtatatctcacaagagtaactgtacagagggtgagaatttcattccatcaaagtttgcct

SEQ ID NO: 191090 - DNA, 441 bp, Gossypium hirsutum
gcttgtttatgagtacgttgacaatgggaatttagaacaagggcttcacggacatgttgggccttgcagttctcttacatgggagatccgtatgaatatagtgcttggaactgccaaagggtaaacgtttggttaactgataatgttagcacaccttgaattgtccttggttttttcctccatgtttgctgacaatgatgttgtctgccaaaattgaaacttgatttaggttgacatatctgcacgagggactcgagcctaaagttgttcatcgcgatatcaagtcgagcaatattttgcttgacaagcagtggaatccaaaagtatctgactttggcctagcgaagcttttgggttcggaaaggagctatgtgacaactcgcgtgatgggaacatttggatttgtggctcctgaatatgctagcactggcatgttaaatg

SEQ ID NO: 191091 - DNA, 1293 bp, Gossypium hirsutum
ccgtcttcaaacacttcgaatcgttttccaattactctgacaagatgcaaatctttgttaaaaccctcactggcaagaccatcaccctcgaggtggagagttcagacaccattgataatgtgaaggctaagatccaagataaggaagggatcccaccggatcagcagaggcttatatttgctggcaaacagcttgaggatggccgcacgctagccgactacaacattcagaaagaatccacccttcacttggttcttcgacttcgtggcggcatgcaaatctttgtcaagactctcactggaaagacaattaccttggaggttgaaagctctgacacaattgataatgtaaaggcaaagatccaagacaaggaagggatcccaccagatcagcagaggcttatctttgctggaaagcagcttgaagatggtcgcaccttagctgattacaatatccaaaaagagtccaccctccacctagtacttcgtcttcgaggtggcatgcaaatctttgtcaaaactctcactggaaagacaattaccttggaggtggagagttcggataccattgataatgtgaaagccaagattcaggacaaagaaggaatcccaccagaccaacaaagattgatttttgctggaaaacaacttgaagatggaaggactcttgccgattataatatccagaaggagtctactctccatttggttctccgccttcggggtggtatgcagatctttgtaaagactcttaccggaaagaccatcactttggaggttgaaagttccgataccattgacaatgtgaaggcaaagatccaagacaaggagggtatccccccagaccagcaaaggctcatctttgctggcaagcagctcgaagatggtaggacattggccgactacaatatccaaaaggagtctacccttcacttggtgttgcggctgcgtggtgggatgcagatctttgttaagactcttactggaaagactatcactctagaggttgaaagttcagacaccattgacaatgttaaggcaaagattcaagacaaggaagggatcccaccagaccagcaaaggctcatatttgctggcaagcaacttgaagatggcaggacattggctgattataatatccaaaaggagtctactctgcatcttgtccttcgccttcgcggtggtttctaagtaaggattgcttgccgttgttggtggcctttttttggcttaaataatgtgtgtggaagcttatttgggattattattagctatgtggttttcgaactttcat

SEQ ID NO: 191092 - DNA, 524 bp, Gossypium hirsutum
atgctactcgtaccatatttttcttgactccgagcgggactctcaagccagtcgccattgaactaagcctccctcacacctcaccaaattcccgatccaaacgtgtcgtcacacctcctgttgatgcaaccacaaattggatttggcagcttgctaaggcccacgtttgctccaatgatgctggtgttcaccaattggttaaccactggttacgaacacatgcatgcatggagccttttatattggctgcacataggcaattgagcgcaatgcacccgatctttaagcttttggatccacacatgagatatacgctagagatcaatgccctagctcgccaaagcttgatctgcgctgatggtgttatcgagaactgcttcactcccggtcgctactgcatggagatgagtgctgctgcttatcggagccattggcgcttcgacagggaaggcctgcctgcggatctaatccgaagggtaattactgagtaatcttttggtgttttatcaatattgagacgaaaa

SEQ ID NO: 191093 - DNA, 434 bp, Gossypium hirsutum
ctatccatctgcttctgaccctgtgtttgtgccaaccgtgtcgcagcatgctggtgcggcgggtacaataaaatgtgaaattggatgccaacatgaagctactgaaataaacaatattcaaggaaacaaacatgttcctgatgatattgatgtatctaagactgagaaaacagcatttgaggttccagtctcaatacatggaaataagtcccccagtaaatcgaaagctgctgaacaggttaaggaatccaatcctatggagtccacctcactccaagtggtcacatctgaggttgcatctctcactgttaaagacatttctcaatatattgccgattcaaaggttccagatggtcaacatgttacttttcccacccacttccaagtctctgaaaatggcttaacttttggaagctttgatactagttttggac

SEQ ID NO: 191094 - DNA, 688 bp, Gossypium hirsutum
ccgcccacccgtccaaaaatcttccttttttttaatgcatccaatgagacctgagcctcggcttcatgtctttctggtttcatttccaggccaaggccatgtaaaccctcttcttagattcggcaagcgcctcgcttccaagggtttgcttgtcacactatctacacccaaaggcttcggcaaacagatggctaaagccaacaacatcactgacgaccagcttatccctgtgggcgatggctttctccgatttgaatcgttccaggatggttgggacgacgacgacccgagacgcgcacacctcgaccaatacatgcaccaactggagctcgcaggcaaaccagcgatttcagcgatgataaagagatacgccgagcaaaaccgccccgtttcttgcttcatcaacaaccctttcattccttgggcatctgatgttgctgaaagtctcggcatcccttctgcaatgctttgggtgcagtcttgcgcgtgtttcgccgcctattaccattacaatcatgggttagtgacgtttcctactgaaactgatcctgaatttgatgttcagttgccgtccatgccgcttctcaagcacgatgaagttcctagctttttgcacccttcaactccttttgcttacttgaggacggccattcttgggggtaagatttaagaaacttgataagcaatt

SEQ ID NO: 191095 - DNA, 616 bp, Gossypium hirsutum
actgtaaagaatataatatagatatgagtgatctacagtgcctgtctccaacacatgagccacgtgtttctgatcacatggagcagatcaaagatatgataactcagattataaacaaagactttggatatgttgttgacggcgatgtgtttttcgctgttgataaattcccaaattatggcaagttatctgggcagaagctggaaaacaatagagcgggtgaacgtgttgctgttgactcaaggaagcgtaatccttccgactttgcattatggaaggctgcaaagccaggtgagccatcttgggacagctcatggggacctggacgacctgggtggcacatagaatgtagtgcaatgagtgcgcattatttaagcttcaaatttgacattcatggtggtgggcttgatttgatttttcctcaccatgaaaatgaaattgctcaaagttgtgctgcatgctaagagagcgacgtaagttattggatgcacaatgggcatgttactaataacaatgagaagatgtcaaaatctgtgcgttactttttcacaattcgtcagattactgagagatatcatacactggctgtgcgatacttcttgataaatgcacacta

SEQ ID NO: 191096 - DNA, 1110 bp, Gossypium hirsutum
tcttcttctttttggtgaagtgttattataagcttgatacttgaaagtataatattattatcatcggcaacatgtcatccgaatcggaagagcagcagctgagcaagaaagccgccaaaaaagaagctgccaagctggagaagatgcgccgccgccaggaagccgctgccttggcctcagcggcttcttctctctccgtcgaggaggaggactcctattcctccaactacggtgacgtcaccctcccggagctcaaatcttgctccaaaccagatgctggcaattggagcatggcaatttcttccatggactggactcgtgtcggagcccttacccaagagctgaaggagaaggaggtgcttataaggggacgagtccacacaacacgaccagtgtcgaagaatatggcgttcgtggtggtgagggagaggggatttaccgtgcagtgcttggttgctacgcatgaagcgggagtgagtcgtcagatggtgaagtttgtagctgcactcaatcgagaatccatcattgatgcaatcggtatggtatctgtccctgggaatcccatcaagggaaccacccagcaggtcgagattcatgttagaaaattgtattgtgtgaataaagctatgcctaccttacccattaacgttgaggatgctgctcgaagtgatgctgaaattgaagctgctttgcaagctggagataagcttcctcgtgtcaatcaagatacacgcttgaactttagggttcttgatattaggaccccagctaatcaaggaattttccgcatccagtgccgaggtggaactatatttaggcaattcttgctgtctgagggttttgttgaaatccacacccctaagctgatagctggctctagtgaaggtcttgatgttgaaatggagatcaagaagcattactctgaggtgatggacattgtggaccgattatttgttaccatgtttgatagtttgaatgagaagtgtcggaaggaacttgaagctgtagggaagcagtatccctttgaacctctgaagtacaagccgaagaccctgcgacttacatttgaagaaggagttcagatgcttaaggatgctggtgtggaagttg

SEQ ID NO: 191097 - DNA, 421 bp, Gossypium hirsutum
gtcggatcttctgcctcggtccagattgaaccggctggatagtcctgaggaagagacaggcaagataattttagaagacggcactgaagtaacagtctctgaattaactgatagggttttggcttctgctttgaccgaagatgactcgcccgagttgaagttaaacgagtgctgctgtgatgatagaaacttggtcgatgttgctacttcaactgaattgaagtcaaacgcatgctgggtttcgaatgttgtcgatggaggagggaattatggaattaaagggattaggccaccgggtttaaagccgccgccggtgatgaagctaccggtagtcgatagcgcttgctcaacttgggatctgtttagggatttcgcccccgaagatgatagaaggtgtatagttcaggttcacttacattca

SEQ ID NO: 191098 - DNA, 1238 bp, Gossypium hirsutum
  unsure (1)..(1238): unsure at all n locations
atattggttctctttctggagcttctggcaaattctctgttggtgataaagtaacttgtaaggttgactatgataggcggacgttgattgctcctaaccatacttgcacgcatatgttgaacttcgctcttagggaagtgcttggtaatcatgttgaccagaaggggtccattgttcttcctgaaaaattgagatttgatttttccgatgagccaaacagagacggagccatcaatgctgatcatttgagaaaaattgaagctattgtgaatgagcaaataaaatctgagttagatgtatattcaaaggaggtaacccttgctgaagccaagcgtatcaactgtttgcgagctgtctttggagaagtttatcctgatccagttagagtagtggcagttggtaaaaaagtggaggaccttcttgctgatccagaaaacaaagaatggtcatcaatttcatcggaattatgtggaggtacacacataacaaatacacgggaagcaaaggcatttgctcttttatctgaggagggaattgctaaaggagttcgaaggataactgctgtcaccactgagagtgctttgaaggcaatggaattgggtggcctgcttttgaaggaagtagatgatgcttccaatatggaagtaagcttgctggaaaagaaagtggcttctctaaaaactactgtggattctgcatcaattcctgctgcccagaaagctgatattagggccaaaattgcacaacttcagaatcaactgaaaaaagcacaaaagaagattgctgaacaaaatatgcagagagctgtcgcgacagcaaccgaattggctgaagttgctgccaaagagggaaagactttctgtgtcactcgtattgatgttggtttagatgcagctgctctccgcgaagcggtttcaaaagttattcaacaaaagggtatgccggttatggttttcagtattgacgaaaccacaaacaaggctgtcgtttatgctggtgtacccgagaaatctgaacagagcaagctattggaagtatcacagtggttgacaaatgccgtatggcctctaaaggggatgtgtggcaaacgcaatggcggtcttgctacatgacacggaacggatggttcacatgttaatgaagccatggacttggcaacttcatttgcttcaatgaaattaatatgaanaaattttctgcaactttcgtctctgacatggaataagcattgatccttc

SEQ ID NO: 191099 - DNA, 473 bp, Gossypium hirsutum
gaaaaataacccagtttttgtttcccattttcattgtacatttaacgaccctttccgtcaaggtgatatataatacatatatacacacacactcttctcgtcattataaacaaaccccagttttaaggcagagagatatatggccagagaggggcaaaagaacaccatgttcattgaacaaaacactggcgactatgaaaatggtgaccttcaaaagaatttggatgatgatggtcgagaaaaaagaactgggacttgggttactgcaagtgctcatattatcacagctgtgattgggtctggcgtattatcactggcatgggcgattgctcagctaggttgggtggttggaccggcggttcttatagctttctccttcatcacctacttcacttcaacccttcttgctgattgttatagagctcctgatcctgttcatggaaaaagaaactatacttacatggatgttgtta

SEQ ID NO: 191100 - DNA, 420 bp, Gossypium hirsutum
gcaatgcaaaatggcgctttcaatcgcatcgggtcggagtagcaaggaatcatctttccaattaattggggatgctgcatacgaggctgatctgctctttaccaattgcttgcaaacccctgtcgaaacactcccctgttttcccttcatgggatacaccgttgccggagaagccacctttggtaactcacctgaggctgagagtgagacctttgccttgtcacttggaatgctgtttttggagacttttacgtactttattatattcaagtatttctgtatcagatctttcgaattgctcctttcttcatgctttggggtctccgtagaaataccgatcaattcttttctctggggagtacatgtattactggtatttgccattgacttggacttgttgagagtaaaagctcgaaattt

SEQ ID NO: 191101 - DNA, 1237 bp, Gossypium hirsutum
cccacgcgtccgcccacgcgtccgcccacgcgtccggcactgtccatgatgtcgtcctcgttggtggttccactagaattccaaaggtccaacaacttttacaagatttcttcaatgggaaggagctttgcaagagcatcaaccctgatgaggccgttgcatgtggtgctgcagtccaagctgctatattgagtggtgaaggtaatgagaaagtgcaagatctcttgctcttggatgtcactccattgtcttccggtttggaaaccgctggtggtgttatgaccgttttgattccaaggaacaccaccattccaaccaaaaaagaacaagtcttctcaacctactccgacaaccaacctggtgtgttgatccaagtttacgaaggtgaaagaacaaggaccagagacaacaacttgctcggtaaatttgagctctctggcatccctcctgctcctagaggtgtcccacagatcactgtctgctttgatatcgatgctaatggtatcttaaacgtctctgccgaagacaaaaccactggacaaaagaacaaaatcaccatcacaaacgacaagggccgactctccaaagaagaaattgaaaagatggttcaagaagcagagaaatacaaatccgaagatgaagaacataaaaagaaggtcgaggcaaagaatgcattggaaaactatgcatacaatatgaggaacacagtgaaggacgaaaagattggtgccaaactcccagcagctgataaaaagaagattgaagatgctattgaacaagccattcaatggctagacagcaaccaactcgccgaagccgatgaatttgaagacaagatgaaggagttggagagtatttgcaaccccatcattgctaagatgtaccaaggtgccggcggtgacatgggtggtggcatggatgaggatgttccggctggtggaagtggtgctggtcctaagattgaggaagttgactaaatcattgattttcttcacctggtttctctattgttctcttatgttttttgggatttaaactgtttggttttgttgtttggtttctaatcggattgaaatgaacttttatagggtttgttccttttttgggatactctatcagtagcacctgtgattgttgtgttttggaaaacaggtcccttttgaacttattaaagattatcaaacactttcttttaaaaaaaaaaaaaaaaaacaggctgcctcttttagagaatcca

SEQ ID NO: 191102 - DNA, 781 bp, Gossypium hirsutum
  unsure (1)..(781): unsure at all n locations
aaaaaactttgctttgaatctttgataatggaagccaaatggctggttcttttttcagtggcggcaatgctgatggcactggccaactgccaggaatctgtgaagccattggtgaagatggtaaagggcaagaagctgtgtgacaaagggtgggaatgtaaagggtggtcaaagtattgttgcaaccataccatttctgattacttccaaacttaccagtttgaggacctttttgcgaagcgtaacacgccggtagcacatgcggttgggttctgggattaccattctttcattacggctgctgctcagtatcagcctcatggatttggtaccaccggggaaaagctccagaatatgaaggaagtcgctgcttttcttggacatgtcggcagcaaaacttcatgtggctatggagtcgctaccgggggaccattggcttggggtctttgctacaacaaggaaatgagccctagcaaattgtattgcgatgattactacaaatacacctacccttgcactcctggagtctcttaccatggccgtggtgccttgcctatctattggaactacaactatggagaaacaggcgacgcattgaaggtggacttattgaaccaccctgaatacatagaaaacaatgcaaccttagctttccaggcagcactctggagatggatgacaccggtaagaacatcatcgttgtccacaattttgttgcactgtaacctcataacaccttgccaacggttcctgttggcttattaggttatgaataatatgn

SEQ ID NO: 191103 - DNA, 1248 bp, Gossypium hirsutum
ttcactcgtccgaagaagaaaaaacccagtattctgtcatcactatggaggccaaatggctgctatgttttacaatggcagcactaatggcagtgtcaaatggccaggaatcagtgaagccattggtgaagatagttaaaggcaagaaactttgtgataaagggtgggaatgtaaagggtggtcacagttttgttgtaaccaaaccatttctgattatttccgaacttatcaatttgagaaccttttcgctaaacgtaatacaccggtggcacatgcggttgggttctgggattaccattctttcattacggcggcggctcagtatcagcctcatggttttggtaccaccggcggtaagctccagagcatgaaggaattggcagcttttcttggacatgtcggcagcaagacttcatgtggttatggagtggcaactgggggaccattggcttggggtctatgctacaacaaagaaatgagtcccagcaaattgtattgtgatgattactacaaatacacctacccttgcactcctggagtttcttaccatggccgtggtgccttgcctatctattggaactacaactatggggaaactggagaggctttgaaggtggacttgttgaaccaccctgaatacttagaagacaacgcaaccttaggctttccaggcagcaatctggagatggatgacaccggtgaagaaacaccaaccgtcggcccacgacgtgtttcgtcggcaactggaaaccaaccaagaacgacaccttggccaagagggttccaggttttggaaccaccatgaatgttctttatggtgaccaagtttgtggtcaaggtgatagtgattccatgaacaatatgatctctcattacctttattaccttgaccttttgggagttggccgagaagaagctggtcctcatgatatgctcacctgtgaagaacaagaacccttcactgtttctccttcatctgcaacatcatcatgaataaaggaaacaaactctggtatatgcggatttatttcaatttgcgtgaatcccacaatggattgctcttaacaattgtggagttttacagcagtttgtgttggttgtataaattttgagactctctttttcttctttttactatcaaattgcagctaatagtatgtgattgagtggtctatatgtctattcccaaaacatgaaatataaaattggggtttttttttccgaaaaataaatttatttcggttttt

SEQ ID NO: 191104 - DNA, 613 bp, Gossypium hirsutum
  unsure (1)..(613): unsure at all n locations
tcacgcgtccggtcgccgagtcgaagaggattcaaacccctttccccacagcaaaaatgaagtacaacccgcgtgtctcctcctctcgccgcaagagccgcaaggcccatttcacagcaccttcttccgtccgccgcgtcttaatgagcgcacccctctcatccgatctgaagtccaagtacaacgtccggtctatgccggtgcgcaaggatgacgaggtccaagtggttcgtgggacctacaagggacgggaagggaaagtggttcaagtgtaccgccgcaaatgggtgatccacatcgagcgcatcacgcgcgagaaagtgaacggttccaccgtcaacgttgggatcaacccatccaaggttgtcatcaccaagctgaggctggacaaggataggaagtctttgctggatcgtaaggctaagggacgcgccgctgctgataaagataaggggactaagttttcagctgaggatataatgcggagcgtcgattaaggttgtctcttgtcttctttatctgtctgatgttgcaactgttaaacttgattgttgttcttttcttatgttaccaattantcatacaatgaagaatgtgggattttgtaaacttt

SEQ ID NO: 191105 - DNA, 579 bp, Gossypium hirsutum
gtttttaaaccactgggcagaagaacaaaatcaccattacaaatgacaagggatggctttcgaaggaggaaattgagaaaatggttcaggaagcagagaagtacaagtcagaggacgaagagcacaagaaaaaggtggacgcaaagaacgcgttggagaactacgcatacaacatgaggaacacagtgaaggatgagaagattggtgccaaacttgctgcagcagataagaagaaggttgaagatgcaattgacgaggccatccaatggttagacaacaaccagcttgcagaggcagatgaatttgaagacaagatgaaggaattggagagcatctgcaaccccatcattgccaaaatgtaccaaggcgctggtgctgacatgggtggcatggatgaggatgccccagccagtggaaccggcgcaggccccaagattgaggaagtggactaagaaatttctctccattcttttcgacccttacatttgttcctttagtcgtttcatgttggtttcttttttattggactttagacatgtttttgaggattttgtttgaagccaatttttgagtatttta

SEQ ID NO: 191106 - DNA, 1515 bp, Gossypium hirsutum
cccacgcgtccgcccacgcgttcgtttacgcgtggggccgttcgtagctgattgtcagttttcgttatttttcttctttgttctttacattcttttcgtctacacaacagatagttagtaatggccggtaaaggagaaggtccagctatcggtatcgatctcggtacaacttattcttgcgttggtgtttggcaacatgaccgtgttgaaatcatcgctaacgatcaaggtaacagaacgacgccgtcttatgttggttttactgataccgagcgtttgatcggagatgcagcaaagaaccaggttgcaatgaacccgattaacaccgtcttcgatgctaagaggttgattggtcgtagattcactgattcttcagtgcaaaagtgatatcaaattgtggccattcaaggtcatagcaggacctggtgacaaaccaatgattgtcgtcaattacaagggcgaggagaagcaatttgctgctgaggaaatctcttctatggtccttattaagatgcgtgaaatcgctgaggcttaccttggttttacagttaagaatgccgttgttaccgtccctgcatacttcaatgactctcagcgtcaagcaacaaaagatgctggtgtcattgccggactcaacgtcatgcgaatcatcaatgaaccaacggctgcagccattgcttacggtcttgacaagaaggcaaccagtgttggtgaaaagaatgtcttgatctttgatctcggtggcggtacttttgatgtctcccttctcaccattgaagagggtatctttgaagtgaaggccactgccggtgacactcacctcggaggcgaagatttcgataaccgaatggtgaaccactttgtgcaagagtttaaaagaaagaacaagaaggacattagtggtaatcccagagctcttaggaggttgaggactgcttgtgaaagggcgaagagaactttatcgtccactgctcaaacaaccatcgaaattgactccttgtatgagggtatcgatttttactctaccattacccgagccaggtttgaagaacttaacatggatctattcagaaagtgtatggaaccagttgagaaatgtttgagggatgctaagatggacaagagcactgtccatgatgttgttcttgttggtggttccactagaattccaaaggtccaacaacttttacaagatttcttcaatgggaaggagctttgcaagagcatcaaccctgatgaggccgttgcatgtggtgctgcagtccaagctgctatattgagtggtgaaggtaatgagaaagtgcaagatctcttgctcttggatgtcaccccattgtcttccggtttggaaaccgctggtggtgttatgaccgttttgattccaaggaacaccaccattccaaccaaaaaagaacaagtcttctcaacctactccaaccaaaaaagaacaagtcttctcaacctactccgacaaccaacctggagtgttgatccaagtctacgaatgtgaaagaa

SEQ ID NO: 191107 - DNA, 776 bp, Gossypium hirsutum
gaaacaggcgacgcattgaaggtggacttatggaaccagcctgaatacatagaaaacaatgcaaccttagctttccaggcagcactctggagatggatgacaccggtgaagaaacaccaaccgtcggcccacgacgtgtttgtcggcagctggaaaccgaccaagaacgacacgttggccaagcgggtcccggggtttggagccaccatgaatgtgctctatggagatcaagtttgtgggcgaggtgatgttgacaccatgaacaacatcatctctcattacctttcttaccttgacctaatgggagttgggagagaagaggcaggaccccatgaagtgctcacatgtgaagaacaaaagcctttcactgtatctccttcttctgcatcatcatcatcatcatcttgatctggttttggatttgatattgggtgattcatttcttaattagcctcgtatatctccattgccaatggaagggccactataatatatatatatatagattatttgagaaattcagtgtgttaatccatattacccttaaaaaattatggatgctgtgtaaattttgagacacattgtcttcacttcaattgtaattgattaataagtgtgattgaatgagtcacatataaccattgccaaaacttggaatatatgatttatgcagtcatttttaaaaacactagttcgtcttattttaatgcatatgatattttttttctgtaaaatgcacgcaaaagatgtttcttattagtattatttgaaatata

SEQ ID NO: 191108 - DNA, 774 bp, Gossypium hirsutum
cgtttgtttcctacggagacacttctcatgggaggtgacatatcacaagcactgcccatcatgttgatcttgtcggtggttccactagaattccaaaggtccaacaacttttacaagatttcttcaatgggaaggagctttgcaagagcatcaaccctgatgaggccgttgcatacggtgctgcagtccaagctgctatattgagtggtgaaggtaatgagaaagtgcaagatctcttgctcttggatgtcaccccattgtctctcggtttggaaaccgctggtggtgttatgaccgttttgattccaaggaacaccaccattccaaccaaaaaagaacaagtcttctcaacctactccgacaaccaacctggagtgttgatccaagtctacgaaggtgaaagaacaaggaccagagacaacaacttgctcggtaaatttgagctctctggcatccctcctgctcctagaggtgtcccacagatcactgtctgctttgatatcgatgctaatggtatcttaaacgtctctgccgaagacaaaaccactggacaaaagaacaaaatcaccatcacaaacgacaagggccgactctccaaagaagaaattgaaaagatggttcaagaagcagagaaatacaaatccgaagatgaagaacataaaaagaaggtcgaggcaaagaatgcattggaaaactatgcatacaatatgaggaacacagttaaggacaaaggcaccaagttttctgctgaggacattatgcagagtgtcgatt

SEQ ID NO: 191109 - DNA, 686 bp, Gossypium hirsutum
  unsure (1)..(686): unsure at all n locations
gcgacgccaacgcccgtccgcccaccgcccgtctcgcgaagaacaataactctatctggtactaaaagaacaannnaatcaccatgcacgaagagtgtactaagggcctgacttcttccannaagaagaannattgaaannagatggttcaaggaangtcagagagatacctaaatccgnnaagatgaagaacataaaaagaaggtcnngaggcaaagaatgcannttggaaaactatgcataccaatatgaggaacaccagtgaagggacgagaagattggtgcctaaactcccagcagctgataaaaagaagatcgaagatgctatggaacaagccatgcaatggctggacagcaaccaactcgccgaagccgatgaatttgaagacaagatgaaggagttggagagtatttgcaaccccatcattgctaagatgtaccagggtgccggcggtgacatgggtggtggcatggatgaggatgttccggctggtggaagtggtgctggtcctaagattgaggaagttgactaaaacattgattttcttcatctggtttctctattgtgttctcgtatgttttttgggatttaaaccgtttggttccttttttgggatactctatcagtagcacctgtgattggtgtgttttggaaacaggtcccttttgaatgttatgaaatgctc

SEQ ID NO: 191110 - DNA, 428 bp, Gossypium hirsutum
aattacgcttacaacatgagaaacacagtgaaagatgaaaagattggttcaaagctctcaccagatgataagaaaaagattgaagatgctattgaagaagctattcaatggttggatagtaaccagttggctgaagctgatgaatttgaagataaaatgaaggaattggagagtgtttgtaaccctatcattgctaaaatgtaccaaggtgctggtggtgatatgggtggtagtatggatgaggatgctcctccgtctggtggaagcggtgctggccccaagattgaggaagttgactaagtaattggtctgggctctattttaaattagattcgcttaaaatacagtttattgcttgaacttgggtaattgattttgatattggtttttagacttgtttttcaatgagatgacttttaatcctttat

SEQ ID NO: 191111 - DNA, 432 bp, Gossypium hirsutum
gaggagttacgagagttacgtggtggttatgaaagtgagcgcgccaatcgcgacgcatcgtgggttgaaacgtgccgcgattgatttggttacggtgttggatattagcgggagtgcgatgaggttgcagatggtgaaacgggcgatgcggttgattatctctttgctcgacgagaaagaccgtttgtcgatcgtgattttctcgtcgagctcgaaacggttgttgccattgaaaagaatgagttccggcggacgacgatcggcgaggaggatcgtcgatgcgttgggaagtaaccgacaagggatgagtgtcaacgacgcgctcaaaaaggcggccaaagtgttggaggatcgtagagaaaaaaacgccgtcgccagtgttatgatcttatcggactgtcatgataaacagtcacagtccaatcccactaa

SEQ ID NO: 191112 - DNA, 430 bp, Gossypium hirsutum
ccatcccaaggggcaaaaaacagagcacattattttgttcggaatcttcacttttggttcattttgacaactgcgaatggcttctttttcattgaagtgtggttcatatttttctgtgttcaatgagactatgttgagctcccattccaagaaagcttcctggttttcgacatcatgcacttctttagattccaaggcttcttcatcatcaaaaaagtttcctgctttaacctttgatttttgggggaaaccacttgtcgtcccagatcagaatggttcaagaaactgcaccaccaaacctgaaaacaaattctctgttcaagtatgtcaaaaaaccttgctttacttttggattttaaaggtttttcttttctgggttcaatttggtttaatagattgggctggaagctgatgttaaagcaattgattt

SEQ ID NO: 191113 - DNA, 474 bp, Gossypium hirsutum
gttcaatgagactatgtttagctcccattccaagaaagcgtcctggttttcgacatcatccacttctttagattccaaggcttcttcatcatcaaaaaagtttcctgttttaacctttgatttttgggggaaaccacttgttgtcccagatcagaatggttcaagaaactgcaccaccaaacctgaaaacaaattctcggttcaagctgaaacaaactgtgtgagccgatgtattagatggtgggaaaaaaatcttaaacccaacatggtcaagatccactctgctcaagaacttgtatgttccttacaaaatgctggtgatcgattggtcattatcgacttctattcacccggttgtggtggttgcaaagccctccatcctaaggtctgtctgcgggcattatttttaacaaaaaaaaaagtcttggtttattttccgtgtgtgtaacgtattgtggtggttgggttatgttt

SEQ ID NO: 191114 - DNA, 424 bp, Gossypium hirsutum
tctgcttctcgttctttcgttcttctcttttgtgtgggctcgtgctccgcatccaagtttctctctgagccaggctctttacacttatgttattctgatagtatcaccacttttggttactgaaatgcgggcatctcaagtgtgctattattttttgttcagtttataagtcccgagtctgattctctgggctgaatgaacctgcatgcctttactagatattgccagcgctcaaccttccttgccaggtcctctggttccagcgaggggtcaaaccctttttttatggtcagctggtatcaaaatcatggaaatcctctcaattgccaaacagggtgaatcatagtgtgggacacctggagaatccaagtgggagacttcagattaaggctgttgctacccttgaacccaagggctctgttcc

SEQ ID NO: 191115 - DNA, 378 bp, Gossypium hirsutum
ccaccatcttctttcaaagagcataaatttttccacgtgcgccactgaatgcctttttgatctcgatttttctgccaccaatatcttgccataatgccttctaattcaacacatagagacttaggaattagggaacatgccatcgtataggttggaatagcttgaagaatagcttttataaacacctctttccccccttgagatagatgccttacactctagttatcaatccgttgtttcattctgtcctttagggtctgaaaagacattttcttctttcttcccatcatattaggcagacctggatacctttccaggttattagaactacgcactccaagaaccctagatataactactttatccccttcttgcgta

SEQ ID NO: 191116 - DNA, 926 bp, Gossypium hirsutum
gtgaagcctataccaaacttatcaaaagatggcttgggtgctgcatttcctttcttttatatagaacctaaaaagtatgagtcagttctgagaaagtacttccctgaggaaaagggtccaataaccaacattgaccccataggaaattctcctgttattgttgggaaagattctctcaaaaaaattgctccgacttggatgaatgtgtcattggcaatgaagaaagatcctgaaacagataaagcttttggttgggtgcttgaaatgtatgcgtatgctgtttcgtctgccttgcatggtgtgggtaacatcctgtacaaagatttcatgatccagcctccttgggatacagaaataggtaacaagttcatcattcattacacatatggatgcgactatgatttgaagggtaggttaacctatggaaagattggagaatggaggttcgattaaagatcatttgatacttgaagcaccaccaagaaaccttcccctgcctcctcctggtcgttccggaaaggggggtgacactggtgaaaatggtaaatgaagccacctcaaacattccaaattggggttcatagaaaagggaaaaaggaaggttaggggtgcaattgcaagatataggcaaggagggctcccttcatttcagttgtcagctgcagatattgggttggtcatgggtggggaagaaagaaagggagtgtttggttatatgttgctgtttattctaaagtaatcttgcttggaatttccttccttgagtgtgagcgtaggtacaaggatgcgatacatttactaaggcgattgcttgattgcttcacctgtgatgcaagaaggggatattggaccgtaagattatctgttgatttggagcatattggctgccccaatgagagtctttcaatcgctgaggctggattatt

SEQ ID NO: 191117 - DNA, 694 bp, Gossypium hirsutum
  unsure (1)..(694): unsure at all n locations
actttgcttttttgctttgtttgtttagtaagaaaaattgactttcctgggaaaataaaaaaacaaaatatgggtagaggtagggttcaactaagacggatcgagaacaatattagcagacaagtaacattctcaaagagacgaagtggtttattaaagaaagccaatgagatctcagttttatgcgatgctgatgttgctttgattgttttctctaacaaaggaaagctctttgagttctcttctgatcccagcatggagaggatcctagaacgatacgaacgacaaatatatgccccaactggttctgaatcacaggcaaattggtctttggaatcttccaaactcatgtcaactattgaagtcttgcaaaggaacttgaggaactttcgtggagaagagcttgaacccttgagttcaagggacctgcaacttttggaacaacaaattggtaattctctgaagcgaatacgaactagaaagaacaaactcatgaatgaatccatttcagtgctgcagaagagagaaaagacattgcaagaccagaacaacatgctagctaanaagcttaaagaaaaacagcagacaccgacagaacatgcacaacatgaagtgcaacanaaacttgtccaaaactcaccaccatcaacatccatacaaccaccaacaccaccaccggctgaacancggtttc

SEQ ID NO: 191118 - DNA, 406 bp, Gossypium hirsutum
ctgataagccgttgatagaatggggagtgatagcaagaccaatggacgtggcggcggcgatggcggagtacagatgtcagcatcggtgaagaaagtggtgcagaaccttaaagagattgtcaataatagctgtacggactgggagatctacgccgtccttagagactgtaatatggaccctagcgacgccgttcaacgcctcctctcacaagatacctttcatgaggtaaaaagcaaacgggagagaagaaaagagatgaaagagacacaagaacaaaaaactcgagccaacagtcgtgcatctagtcatggtgttagagatggtagtgaacattcttttgggcggagcagatcaatgctaatctccaatgagcttggtaaagctgcatgcaagaaagagaatgtc

SEQ ID NO: 191119 - DNA, 428 bp, Gossypium hirsutum
cgatcatatgccgtgcgaggatcctaggcgtaatagtcagctcagtagggagatgaatttctatagagaaaggcattgccctttgcctgatgaaacgcctctttgcttgatccctcctcctcttggctacaagattcccgttcagtggcctgaaagcttgcacaagatatggcattccaacatgccacacaacaaaattgctgataggaaaggtcaccaaggatggatgaaagaggaaggtccttactttattttccctggtggtggaacaatgttccctgatggagctgcatcgtatatagagaaacttggacagtacattcccataaccggtggaactcttaggacggccctcgatatgggctgtggggttgctagttttgggggttcaatgttaaaagaaggcattttgacactctcatttgctc

SEQ ID NO: 191120 - DNA, 1067 bp, Gossypium hirsutum
ttctcttccctaaaattttcccagtctcaaccaaactctctctggtgacccttcaaaagaatcaccgccatggcgatgcaaaccggagtcggcttttcgaagattttgatccttgccggcgcaggttacaccggtacgatccttctcaagaacggtaagctatcggacatgttaggcgaattgcagtctcttgtgaagggactggaaaaaaactggggaccaatcagatgattcagatgcccttctggctcaggtgcgtcgtctctcaacggagattaggcaactggcctcagcacggcagataactgttctgaatggggattccggcgttaagttaacctctctggtaatccctgctgctaccttgggggcattgggttatggttacatgtggtggaagggcatttcgttctctgatcttttctgggtcacaaaacgcaatatggcgatggctgtggagaacttaacaaaacatctggattctgtctcagatgctctctctgctgcgaagaagcatttgactcaacgcatccagaacctggatgataaaatggaaacacagaaggaaatctcgaagagcattcaaacaagtgtggaagaggctcatatgaatctgtctaacattgaatatgatttggatgcactgcagagaatgatctctggtttggatggcaaaattggttcattggaatacatgcaggatcttgctaatgctggcggtgtgcgaccttcgtaatatgggtgggtggaaagaaagcatacatgcctgaagctctgcacgagccacttaaactttctgggaaatcttgtgctttactttgcataggaacttcagctctgaggggtctgaaagatgttggcaaattttcatctggaaatatgaatgattcatgatagaaggtttgtgaaagaagctttgataatttgatgatagtcaagaaccttttatagacgttaatctaggtgtgtggctgggtttataataacttattttgcatgtggtttgataattcctatcttaatagagatatcttatgtatctatgatatttgtggacttgtaaaacg

SEQ ID NO: 191121 - DNA, 446 bp, Gossypium hirsutum
cagacactattttacagttgtctagtgtttgaaaatggggatatttgcagggattgaactatgttggttcaatgtgcttttcagattacgcatttgttcctgttgcttctaacgcctctcacaacacacacacaaacgcctctcacatttctgcttatttttagggttcattttttcttcttttattaacctaaatttcatttctccatcccaaaaatccttggatcaggtaacttttccaataaagatcattcagttttttcctttaaatgtttttgtaggttaaaaatcaaatttttttaaccgtccatttgttcatctaaaacttttttgatccctgggtttggtcttatattaattaaaaatctttatatttgcttcaaattaaaaatctcttctgcatgaagaaacgcagcaaaattatgaattgtatttttccgggaatc

SEQ ID NO: 191122 - DNA, 690 bp, Gossypium hirsutum
gcttattcaactctgtgtttcttcccaactgaagccaagccagttcttgtttgttcttcgtcttaaaactctccaatggataaaaagtgtccaaaatcaaagaacccagaaccaggaaaccaaggaaatgatgagaaaaagagcaaaaagggattgcgactattagctcgagttaaacctccggagattttcttgaaatctataaccaaggatgttaccaatgttcagattacatacccttgtaggttctttttcttgttccttactagtgcaacatattttgttttttatatctcaccaaagttacacttgccgacactattttcacagttgtctagtgtctaaaaatatggatatttgcagggattgaactatgttggttcaatgtgcttttcagattacgcatttgttcttgttgcttctaacgttttgcagtttaaatgcatggcttgtacggcgaagattacgacatacagccttaagggaagtgagaagctccttcagctagtctcaaattactccatggtttcaaaacttgaaggataatgatattgaagtatggaaccaaggattcttcatgtcacccaatagagcttggacaatatattttttgatgtattaaagtggctgcagttatggctatatatagagagatagcatagaaaatgcgtcaccccactaattctgtct

SEQ ID NO: 191123 - DNA, 545 bp, Gossypium hirsutum
tccatgcgtccgcccaaggctcctgaaaatggagcatccatatgtgcccagggatctgcaactgcctggatatgttcccgtctccctttctcagtccaccattcttaccgtctatggtctctcttccctgctcgtcgtctcccttgtttggttcctctctgggcgatcgcgcagcatatctaaacttgatagattgttgatgtgctggtgggctttcacgggacttacacacataattcttgaaggatattttgcattctcccctgaattctataaagacaagactggattttatctggctgaagtttggaaggaatatagcaaaggtgattcaagatatgcaggaagagactcagcaattgttgctgttgaaggaataacatcagttcttgaaggtccaccttgccttctagcagtgtatgctattgccaaaggaaaaggatatagctacatactccaatttgccatctctctgggacagttatatggcacatttgtatatttcataacagctttaaaccttaggagggtgataacttttctgc

SEQ ID NO: 191124 - DNA, 490 bp, Gossypium hirsutum
ttttctctttttacttctaagttctctcttgagtcaccggagctgctaaaggatggagtccaacggcggcggcgcgtcacctatccgtcgagaaatcgaagctttgaaggaagaaaaagcccggattgagcaaaggatttcggtcctcgaagctcagctccaagaagaagcttcattagcacctcagcagcagcaaaacgacggcgtctgcaatggtttttgtccttcggaaatatcctccgtcgatgccaatctggctcacgggttatcggcggatagtatttaccgttacagccgtcatcttttgcttccttcttttggagtccaagcacaatcaaatctcttgaagtcttcaatattggttgttggagctggaggtttgggttcgccggctttattatatcttgcagcttgtggtgttggtcgcttgggtatcgttgatcatgatgttggtgagcttaataatatgcataggcaggttattcacact

SEQ ID NO: 191125 - DNA, 399 bp, Gossypium hirsutum
gtgttttgctatagaagaacatatctgggtttattttaattctctttgagttcaatgcaaggagaatttttttttacttttgagtaatttatcttcttggtgtggtttacagcacaatcaaatctcttgaagtcttcaatattggttgttggagctggaggtttgggttcgccggctttattatatcttgcagcttgtggtgttggtcgcttgggtatcgctgatcatgatgttgttgagcttaataatatgcataggcaggttattcacactgaagcatatattggtcagccaaaagtgaagtctgctgctgctgcttgccgctcgatcaactccaccatacagattgttgaacacaaacaagctttgcgcacgtttaatgctttggaaattttgagc

SEQ ID NO: 191126 - DNA, 1435 bp, Gossypium hirsutum
ttcacgcgtccgcccacgcgtccgcccacgcggccacaaaatcaaagaggaaaaacaaaaagcaaaaatggagaaatctcagatctggttggcctttggagccatggccttgttattggcatcggcgacggcggatgacgtcgttgtactaacggaagatatcttcgagaaggaagtcggtcaagatcgaggagctctcgtcgagttctatgctccttggtgtggtcactgtaagaagcttgctcctgagtacgagaagcttgggtcaagttttaagaaggctaaatccgtcttgattggaaaggtggactgtgatgagcataagagtgtctgcagcaaatacggtgttcagggctacccaactattcagtggttcccaaaaggctctttggaacctaaaaaatatgaaggaccacgaaccgcagaggcccttgctgagtttgtcaacactgaaggagggaccaatgtgaagatagccacattaccatccagtgttgtagtgctaaatgctgataattttgatgaggttgtccttgatgagaccaaagatgtgttggttgagttttatgcaccttggtgtgggcattgcaaaaaccttgctcctacctatgaaaaggtagcattggcattcaaaatggaagaagacgtagttatagctaatctagatgctgacaagcacaaggatctagctgaaaagtatggagttagtgggtttccaacactgaaattcttccctaaaggtaacaaagctggcgaagactacgacggtggcagggatttagatgactttgtttctttcatcaacgagaaatgtgggaccagtcgtgatgcaaaagggcagttaacttcaacggctggtattttgtcaagtttggatgcattagtgaaggagtttgtggctgcttctgccgacgagaagaaagtagtcttctccaagattgaagaggaagttgagaagctcaagggttctactgcgaggcatggaaagatatacttgaaagctgctaaaagctgtttagagaaaggtgctgactaccccaagaaggaaattgagcggctgcagcgcatgcttgacaagtcactaagcccagcaaaagctgatgaattcacgatcaagaagaacatcctatcaacatttgcatcttcttagatcaatgtatttcacctcgtctagtgctgcggtgggttcaagtttcatcgacgttttcaaggactgggaacatcttagcgttttatgttttgggtatctttcagcagcaaatcgctaggccttgattaggacttgagcaccatttgcgtgccgcagcaccagtaactagtaaaagttcttatgatggaattctctcctaaaactagttttgaccagtgatttcactcggcatttattcgaatttttgctcctgtttttactattatagatttcctggaaacttat

SEQ ID NO: 191127 - DNA, 614 bp, Gossypium hirsutum
gggagattcaaacagaggaagaagaagaagagaaaaaaaaaatgaagtctcagatctgtttagcctttggaactttggccttgttattagcttcagctttggccgatgacgtcgtcgtactgaccgaagcgaacttcgataaggaagttggtcaagatagaggagttctcatcgagttctatgctccttggtgtggacactgtaagaagctagctcctgagtacgagaagctcggggcaacttttaagaaggctaaatccgtcttgattggaaaggtggattgtgatgaacataagagtttatgcagcaaatatggtgttcaaggctacccaactgttcagtggtttcctaaaggctctttggaacctaaaaagtatgaaggaccacgcaccagttgaggcacttgctgaatttgttaacactgaaagagggactaatgtgaagatagccactttggcatacaatgttgaaaagctaaatgcggataattatgatgagattgagcttgattaaaccaaagatatgtgggttgagttatatacaccttggcgtggccattgcaaaaaccttgctcctacctattaaaaagtagcaacggcatttaaatttgaaaa

SEQ ID NO: 191128 - DNA, 429 bp, Gossypium hirsutum
ctctaacaataatactatccacagttcaaatttatcctttgacttaagtttaaaagatgaggctggtatgatcggctttgaccaaccataaacaccaaaccaggaaacgtatatggtggcttttattttttttatttttttattttttttctttcaatttgtgttttctaagaaacacataggaaagaataaatagagatcgaggaatattttaatttttttggttaggatattttttggttcatattctctggtaatagaatcgaagaaggtggaagtagaagagagaaagcggattttctctcttctcttctacctttgtgttttttttcttttggttctcatgacggcataattcgtagtttttattccaattaattaaggtttggttttggtgaatatctaagatcatgaatgtgatgcgtcgtc

SEQ ID NO: 191129 - DNA, 717 bp, Gossypium hirsutum
cgacgaactggtaagaggaaaatttattctacttctaacccaaaaccccaagttgtctcttctgccatatctcacttcagtagggaaaacaaggagagtatggataaaatgaaactagctcaatggggtgagaaattgaaaactggtggagctcaaatgagtagaatggttagtgggaaaatgaaggaaattctacaagggccgacacccgaatcgaaacttgtagatgaagccacattggagaccctagaagaacctaattggggaatgaatatgaggatatgttctatgatcaatagtgaggagttcaatgggaccgaaattgttagggccataaaaaagaagatatccgggaaaaatgctgccagccaaaggttgagtcttgatttgttggaagtttgtaccgggaattgtgagaaggtagcttccgaggtggcttcggagaaagtgttggaagagatggttaagatgatccagaatccgcaaacatatcaccagaatagagaaaaggctttggacttgattcgtgcttggggacagtctgatgatcttgcatacctacttgtgtttcaccaaacttatatgagcttgaaagacagaagcgcacaactgccagtgagatgatgatgatgagaactcgtctgccttgtaccagacattggaatcttatatgggagagccattgtctacccctgaaaattatcctgctgattacac

SEQ ID NO: 191130 - DNA, 1309 bp, Gossypium hirsutum
aaaatttctccatttttttcaccttttcctccttttaggtttggtaatttctttttcgttttcaaattaaatttctcactttctatatgtactcctaatcttccaccaccctcacttgctactatagccttccattgcccttttcttctcttcaactccacctgctaaaatgcaccaatttccggtgcttctcagcctcatcgcagtgtctgtactgctgatggtaactccagtcattggataccgtccatggcctcacttaaaacccaacagctccgatttaacgtttggaagctccaagaaattcgagggctcatcagagttcgtccaaatgagataccatatgggaccagttctcaccgccaacatcaccgtacacatagtttggtacggccgatggcaaaaatctcagaagaagatcatccgtgagttcatcaactcaatctccgccgttgatgccaagcgcccttctgttgccggctggtggaagaccgtacaactttatacggaccaaacgggcgccaacatctcccatactgtgcatttaggggaagagaagaacgaccgattttactcgcacgggaaaaaactgacgcgcttgtcgatacagtcggtgataaaaagcgcggtgacagcgagtacaaagccgttgccgataaaccccagtagcgggcttttcctcttgctcacatccgatgacgtgtacgtccaggatttttgcggccaagtatgtgggttccattatttcacattcccatccatcgtgggttacacgctcccatacgcatgggtggggaactcggcgaagctttgcccgggggtatgcgcttatcccttcgctgtgccgaaatacatgacggggttcaagccgttaaagtcacccaacggtgacgtaggagtggacgggatgataagcgtgatcggacacgaaattgctgaactggcaactaacccgttggtgaacgcttggtatgccggccaagacccagtggcaccggtggaaatagcggatttatgtgagggtatttatggaactggaggtggtggatcttacacgggacaactatttaacgataaagatggtgccacgtttaacatgaacgggatcagacggaggtacttggttcagtgggtttggaatcatatcctcaattactgtactgggcctaatgcacttgatcagtaatttttattttgaaattaaaatattttagggttcctttattttggcattttgaggcttattaaatatggacttttgtaatatttataattcatatattattccttatatgaggatttgaaagaa

SEQ ID NO: 191131 - DNA, 1083 bp, Gossypium hirsutum
  unsure (1)..(1083): unsure at all n locations
ggaaattcataatatattattatattataaacatttcttaccattcaactccctctttgtaacggcagcaaccaatccaaaagctttaatttattcctcgtcacaattttgctagcgttaccggcggtcggatacaacccactctaacccaacccttctggatcaatggctacgcttacacgtgtcccattggtattttccagcaacagggttgcaccagctccagctgcttcattaaatcacaaatgtaattgcgtggcgtcatcatcacccttaacaagaaaacttccacattgttctactccctcttctcttagcttcaaccctttttcatcttcattcccttctttctcaacgcgacaaaacaagggttttaggagaacatctctggtagtagcttccatggctgatctcagcactgtgctcgtcactggagccgctggcagaacaggtcagatagtttacaagaagctgaaagagaggtcggatcagtttgtcgtgagaggactcgttagaactccagaaagcaaggagacaatcggtggagcagatgatgtgtttgttggggatatcagggataccacctctctggttcctgccatgcaaggaattgatgcactcataattcttactagtgctgttcctagaatgaaacctgggtttgatccgacgaaaggcggaaggcctgagttctattttgaagatggagcatatcctgagcaagttgactggattggtcagaaaaaccaaataaatgttgctgaggaggctggagtgaagcaaattgtgttggttgggtccatgggtggaacaaaccctaaccatcccttgaacagcttgggcaatgggaacattttggtctggaagaaaaaggctgagcagtatttggctgactctggtgtcccatacacaattatcagggctggaggactgcagaataaagatggtggcatccgaaaactacttgttcgggaagatgatgagcttcttcagactgaaacaaaagcaattgccagacctgatgtagcagaagtctgcattcangcactgaaatttgaggaagccanatttaaggcgtctgac

SEQ ID NO: 191132 - DNA, 559 bp, Gossypium hirsutum
gttctagatctttctagacttgaagatggctgcctagagttagattttggaatgttcgatcttcatggaatcttcaaagaggccattaatcttataaagcccattgcatccataaagaagctatctatgactatgatcctggcacctgatttgccgatgtttgctattggtgatgagagacggcttatgcaaactattctaaatgttgtgggtaatgctgtgaagttcacaaaggagggttacatttcaattatagcttctgttgcaaaaccggagactttaagagactggcgacctccagaattttacccagtgtctaccgaaggccacttctatctaagagtgcaggttaaggattcaggctgtggtgttctcccacaagatataccaattctctttaccaaatttgcacagcctcaaagtggaaatagcggtggtgcggggcttggacttgccatttgtagaaggtttgtaaatttgatgggacgccacatatggattgagagtgagggccttgactaaggttgctcattaacgttccttgtcaaactttggatct

SEQ ID NO: 191133 - DNA, 1778 bp, Gossypium hirsutum
cccacgcgtccgttctactactttttggtttctcagctttttcctgtttattttcttttcttgttttgagttgcctgtttgggtagagagaaagtttttgagtaccgaagaagctgagaaagttacaatggcggtttcaaacaactgggctttcgcttctttagctcttctgtttttgcttcttgttgccgcaatggctactgtacggaccggcaacgtttccagcaatgtggaaacagagaaggtgcagagctcaaagaactccacaatggcagctaggtcagaggaggtcgagccacttaacgagcatgccgttcctgacccagaggctgtagcagccgaggtggaatccatcattgacatgaacattcgcaatgtgactgaaagaagaaagttggggttcttcacatgcggaacaggtaaccccattgatgattgctggcgttgtgacccaaactggcagaagaaccggaagagacttgctgattgtggcattggttttggaaggaatgcaattggtgggcgtgatggacgtttctatgttgtcactgaccctaatgatgatgaccctgttaaccccaaacctggtaccttgcgtcatgctgtgatccaggacgagcctctttggattgtgttcaagagggacatggttattcggttgaagcaggagctgattatgaacagttttaagaccattgatggtcgtggggtgaatgtccatattgctaatggggcatgtatcgccagccagtatgttaccaatgtgatcatccatggtcttcatattcatgactgtaagcctactggcaatgctatggtgagaagctcaccgtctcactttgggtggaggacaatggctgatggcgatgcaatctccatcttcggttcaagccacatttgggttgatcacaattctctctctaattgtgctgatggtcttgttgatgctgtcatgggctcaactgccattaccatctccaacaaccacatgacccaccacaatgaggtgatgttgctagggcacagtgactcctacacaagggacaagcaaatgcaagtgaccattgcctacaaccatttcggagagggacttatccagagaatgccaaggtgtaggcatggatatttccatgtggtgaacaatgactacactcactgggaaatgtatgctattggtggaagtgcaaaccccaccatcaacagccagggtaacagatatgcagctccaacaaacccatttgcaaaggaggttaccaagagagtggatacagctgaaagccactggaagagctggaactggaggtcggaaggagacttgctgctgaatggtgcatatttcactccatctggagccggagcctcagccagctatgccagggcctcaagcttgggagccaagtcctcctccatggttggatccatgacttccaatgctggagctctaccctgccgaagaggcaggcaatgctagatagtatatcccccacccaatcaattaaaatggttgaaaagccagccatttactagctctttcccatcattcaaaaagcactaccaatcaaatatccatattctctgtagtctatcctccccatctaccagcatcatcgcatattctgattttaagtgtaaatttattcatttttacacattgtcattattttgtcctacccactctactcattttgtttgtcaatctgtgcaacctgcttcaactctagtgaactaaaaaatccatcttaagagcaggtacgcaagcgttgtccttggttcccttt

SEQ ID NO: 191134 - DNA, 420 bp, Gossypium hirsutum
aatgactacactcactgggaaatgtatgctattggtggaagtgcaaaccccaccatcaacagccagggtaacagatatgcagctccaacaaacccatttgcaaaggaggttaccaagagagtagatacagctgaagggcagtggaagagctggaattggaggtccgaaggagacttgttactgaacggtgcctacttcacaccatctggagctggagcctcagccagctatgccagggcctcaagcttgggagccaagtcctcttccatggttggagccatgacttccaatgctggtgctcttccttgccgcagaggcaagcaatgctagtattatccatcttttccccaatcaattaaattggctgaaaatcagcctttttacaatctggttgattttccccctctttccatgattctt

SEQ ID NO: 191135 - DNA, 679 bp, Gossypium hirsutum
aaagagcccaaggtggatggtgaacttatttatgccgatgcaaagattgatagactcggcgaaattgaagaattcattctcataccaaatgttgctaatcttcaaaatgttggtgaccgcttgttcgatgaagccctatacgaagctgcaaaaataatatttgcgtttatatcgaactgggccaaattggctgttacactggtaagacttaaacaattccaaggtgctgttgatgcagcacgaaaagcaaacagtgcaaagacatggaaggaggtttgctttgcttgtgttgatgcagaagaattccgattggcacagatatgtggtcttaacatcatcatacaggtggacgacttggaagaagttagcgaatactatcagaaccagaggatgcttcaatgagttgatctctctcatggagagtggtttaggattggaacgtgcacacatggggatctttactgagttgggagttctgtatgccagatatcgtcccgagaagcttatggagcacattaaattgttctctactcgtctcaatattcccaagctgataagagcttgtgatgagcagcagcactggaaggaacttacctacttatacatccaatacgacgagtttgacaatgctgcaactaccgtgatgaaccactctcccgaatcatgggatcatatgcag

SEQ ID NO: 191136 - DNA, 863 bp, Gossypium hirsutum
tattcagtccctccacctacaagctatactggtggacctacatcataccctccatcttatggtggccctgcgggtggctatgctggtgagggtttgagtgatgcacggactggtggtcgtggtggacctcctggtggatatgacggtgggtatggttctggtggtcctcgaaatcagggaggtggttatggtggtcctcctgttgaagcaccagctaagatcaagcagtgtgacggcaactgtggggattcttgcgacaactcaagaatatacataacaaatttgccacctgatgttactattgaagaattaagagacctttttggcggcattggacaagttggaagaattaagcagaagcgtggctataaagatcaatggccatggaatattaaaatatacacagatgagaaaggaaaccagaaaggcgatgcagttttgtcttacgaagatcctcaggctgcccactctgctggcggtttctttcacaatcatgtcatgagaggctatacgatcggcgtggctatggcagagaagactgcgcccaaagtacatgatcatggaggtggtaaaggtggctacggaggtggtggcgacaggcgcagggatagttacagagatggtggttctgggccagataggcatcactatggcggaaatcgttcacgcccatactgagagtctctcagcttcaagtattttatgcactaaaaatgtggtctaagggttctagttgtgttgcattgacggaattgttcttgaacaggagactaaaaaaggcaactggattaactccaaattgcttgctgctaaggtaggttgataatttcaggtgagtgcggctcttacatttaccttttttc

SEQ ID NO: 191137 - DNA, 501 bp, Gossypium hirsutum
gcagagtgggcagcctgaggatcttcataagacaaaactgctggcggtttctttcacaatgatgggatgagaggctatacaatcggagtggctatggcagagaagactgcgcccaaagtatatgatcatggaggtggtaaaggtggctacggaggtggtggcgacaggcgcagggatagttacagagatggtggttctggtccagataggcatcaccatggcggaaatcgttcgcgcccatactgagaggctctcagcttcaagtattttatgcactaagaatgtggtctaagggttctagttgtgttgtggtgaagggagtgtccttgaacaggagactaagaggtaggttgttcacttgtctgggcaatacccctttgttctccttttcctcctttgtctagtgttagcctgggggttctttctttctagttgtctcatatgattgaattcgcctcaatgttttatatgaggcaagtggattaactcctaattgcttgc

SEQ ID NO: 191138 - DNA, 443 bp, Gossypium hirsutum
ggacaacaaggatattggcttggacaggaaggaaggggctcaaaattcaagaaaaactgatttgatctctaatgaagaggagtggtcaattgttcaaggagccttgcagatactcactgttgcagactgtctaacaagcaggtcttcggtctttgaagcatccttgagagctactctggctagattgggcgcaactttgtcactttcggtatttggttcaagtttggataataaccagctacatgttgcaaatgacgatggaaatggggagccaccattaggtggaagagctgccttagatgtcgcagctgtgcggcttgttgatgttcctgagaaggcccagaaactgtttaaccttttagatcagtctaaagatccccgattccatgcacttcctcctgcatcccaaagggtcgctgcatttgctgaagcagtgaatgaac

SEQ ID NO: 191139 - DNA, 1695 bp, Gossypium hirsutum
ttctacgcgtccgcccacgcgtccgcccacgcgtccgctctcgcccaataagaaaccaaagaaaacctttgttaaaccaaaaatggctctcaccaactcctccattcttcccaccaactccatccttcaatctcagccatcaacgccgttctctaaggctaagccattgtctgtccttcggatctccgccgtccattcttctgactcgcctaagaaccccgtcgtctccgaaaaatccgtcaagcagcccgctactgctccactcgccgctaccaaatctgctaccgcgcccaccactgctccaccgaagaatgcggttcctgggaaatggaccgtggatagctggaagtcgaagaaggctttgcagttgccggagtatccggatcaggcggagctcgagtcggttctcaagactcttgatgctttccctccgattgtcttcgctggagaggctcggagtcttgaggagaagctcggggaagccgccatgggaaacgcttttctgttacaaggcggagattgtgccgagagtttcaaagagttcaacgctaataacatccgtgacactttccggatccttcttcagatgggtgccgttttgatgtttggtggtcaaatgcctgttatcaaggtgggaagaatggctgggcaatttgcgaagccgagatcggacccattcgaggaaaagaatggagtgaagctgccaagttatagaggagataatgtcaaccgggattccttcgatgaaaagtctaggatccctgatccccaaagaatgattagagcttactgtcaatcagcagctactttgaatcttttgagagcctttgctactggaggttatgctgctatgcaaagggttactcagtggaatttggatttcaccgaacacagtgagcagggggataggtaccgtgaactagctagtcgtgtggatgaggcccttggattcatggctgcagctggacttacagttgaccatcctatcatgacaacaactgaattctggacttcccatgagtgcttgctcttaccttacgaacagtcacttacccggcttgattctacttctggccgttactatgattgttctgctcatttcctgtgggtcggggaacgaacaagacagttggatggtgctcatgttgagtttttgagaggagttgctaatccccttggaattaaggtgagcgataagatggatccgaatgaactagtaaagctgattgaaattttgaaccctcagaacaaagctggaaggattacagttatcacaagaatgggtgctgagaatatgagagtgaagcttccccatctaattagggcagtgcgtcgtgctgggcaaattgtcacttgggtcagtgaccctatgcatggaaacaccatcaaggctccttgtggtctcaaaactcgccccttcgattccataagggctgaagtgagagctttctttgacgtgcacgagcaagagggaagtcatcctggaggagttcatctagagatgactggacagaatgtgacagaatgcatcgggggatcccggactgttacattcgatgacttgggttcacgctaccatacccactgtgaccctcgtttgaatgcctcccaatctcttgagctcgccttcattatcgccgagcgcctcagaaagaggaggatcaactcacagcaactgcaaccactaatcacagg

SEQ ID NO: 191140 - DNA, 418 bp, Gossypium hirsutum
cttaatttcaaactcttgtactcgctagatttgttgggttatcgattatgtgccagaagtacccttttcttcattttcaatgtcaaagcctaaatagcgccgccgtcgaaccatgatcgttagaacgtacggtcgccgcacccgtggtttaaccaggactttctccgactccgtaaacgactacgtttccgactcccctccactctctcaagaaacggtgccgtctgaggacgtgtatagtttccctttcgccactcaagagtcatcttccttttggccatcatcacaagaattcaacgacgacgtttaccagggccgggtaacgaccgggttggaagcatcccaccgtgggttccggttccaccatttgggaaacgacctcgtagggagatctaagaagcagaaacaaagccagggt

SEQ ID NO: 191141 - DNA, 946 bp, Gossypium hirsutum
gtttgagagagaaaaatcagagccatagatttcgaatcctgtgtttcttttcctctctttttttctgctagatctagcagtatctaagtctattttcttttgttctcgttttgggttctcttgagaaggcaaaacggcagagaggaggctttgttgagcgttgttttctctctgttggtggtttcggttgcgctttggaagagctaagggaggttgattagtgaatttatgtcggctgagtttgattttgctttgattggggctcagttgcagctctgtttttcatcttctacaacaactgtctgtgctcgcttgttcatcaccgctttgttggctggttcttgcatgattctctgcttctataggcagagactgaatatcgtgttctcgactgtttcgatgcgtttgagacccaaaaagagttgttctggagttgagtgctttggaggttttcacataaaacaacgatttttttatcttttcttgtttctaagaggggctcatacttgatacagctttcatagttttcgactttgtcacccttttttgtcatttgattttgtttaaatagttgtctacagtttttccgggtattttgaggggggttttagttgagttttaccgagttttgcttccaaaaatgttagagcatcgaaaacaaaccatgaatctgagttaagtccggcaaaaagccttaaaaacccgaatcaaccatgagtgaagaagaaacccaaatgactaggaaagttcgagtcatcttccatgatccatatgcaaccgattcatcttcaagtgaagatgaatccgagggaagtgctgctagaaaggctccaaggggaaggcgttttgttcgtgaaattagagttcctgttttaggcttggctcctcatgtaaagcctcttgaatccgatacatcttcacaagacagttactctaaaacccctac

SEQ ID NO: 191142 - DNA, 779 bp, Gossypium hirsutum
gccctttctattggttcttttttgggttttcagacagtattggcttgggaggaaaatgactatccttatcgagaagcctgagctagtgtctcaatcagactgccagattcatgtggatgaaagtaaggaattggtgttggatggtggattcccagtgccgaaatctttgtcaggagaaggatttttggcaccagaggtcaattcatttggcaactcctttagggattacaatgcagaaagtgaaaggcaaaagagcgtggaggaattctacaagcagcaacatgttaaccagacatacgactttgtgcaaaagatgagggaagaatattcgaagctgaatagaatggaaatgagcatatgggaatgctgtgaattgctgaatgaggtggtggatgacagtgaccctgacctggatgaacctcaaattcagcacctcttgcagtcggctgaagctattagggaagattatcctaatgaagattggctgcatttgactgccctcattcatgatcttgggaaggttcttcttctacctaaatttggagggcttccacaatgggctgttgttggagacacatttccgcttgggtgtgcttttgatgacgccaatattcatcacacgtatttcaaggaaaacccagattacagcactccctcttataacactatgaatcggcatttactgggatggctgtcgccctgaaaatgttacaatttcatgggggcatgatgattacatgtttttggtagccaaggaaaatgaactaatctaacttcag

SEQ ID NO: 191143 - DNA, 1428 bp, Gossypium hirsutum
gctgaatttctcagttgttggttggttgattgattgttgttgtggttgaagaggatgtgggctgcttcatgtcttgcatcttgttgtgcggcatgtgcctgcgatgcatgccgcacggtggtttcggggattagtcggagatctgcaaggatcgcttattgtggactttttgctctttctcttgttgtttcgtggatccttcgtgaggttgctgccccgctgatggagaagctcccttggatcaaccatttccataaaacacccgacagggaatggtttgaaacggatgcagtgctgcgggttagcttgggaaactttctgttctttactatcctagctttctcaatggttggtgtgaaaaaccagagggatcctcgtgatgctgtgcaccatggtggatggatgatgaaaattatctgctggttcattttagtgattttgatgttttttgttccaaacgagattatcagcttctatgagtcagcatcaaagtttggcgcaggactgtttcttttggttcaagtcgtgcttttactcgactttgttcatggatggaatgacaaatgggttggatatgatgagcaattctggtatgttgctctactagttgtttctcttgtttgttatttggcaacatttggcttctcgggacttctcttccacttgttcactccatccggacaagattgtggactcaataccttctttatcgttatgaccttgactcttgttcttttgtttgccatagttgcactgcatcctgcggttggcggtagcattttgccagcttcagttatatcactgtactgcatgtacctatgctatagtggacttgcaagtgaaccgagagattacgaatgcaatggtcttcacaagcattcaaaagcaatttcaactggtaccttgaccttaggtctgcttaccactgtcctgtcagttgtctactctgctgttcgtgctgggtcttcaacaactttactctccccaccaagctcgcctcgtgcaggaaagcctttgcttgcaatggacaaggcagatgaacacgaagaaaaagagaagaacaagccggtctcctattcatatgccttcttccacataatcttttctcttgcaagtatgtactcagcaatgcttttaaccggatggtcaacctcggtcggagaaagcggcaagttagtcgacgtaggatggccatcggtgtgggttcggattataactgggtgggcaacagcaggtctctatgtatggtctctagttgctcctattcttttcccagagagggaattttaggtctccaaagtaagttattggccattgttgcaataaatttagtttatatgtgtgtgtgtgatttgactgaccaagatggattaaaaaaaaatattatgtgcgtctcaaaagagaagttgaatatatgtgtgattaatg

SEQ ID NO: 191144 - DNA, 476 bp, Gossypium hirsutum
ccttctctttcgcccacgcgtccgcacggcatccgcagtgggtgttcatttatcatttttcatctaaatcttgatccgaaacaaaaaacgtcaaatcggtgggaatagcaatgggttttgagaagatcaaggtcgccaatcccatcgttgagatggacggagatgaaatgaccagagttatttggaaatcaattaaggataagctcattcttccctttgtggagttggacataaagtactttgaccttggtcttccacatcgtgatgctaccgatgataaagttacaattgaaagtgcagaagctactcttaagtacaatgtcgccatcaagtgtgctactattactccagatgaagctcgtgttaaggagtttgacttgaagcagatgtggaagagtcctaatgggactattaggaatattttgaacggcactgtctttagagaaccaattatttgcaaaaatgtccctcaactt

SEQ ID NO: 191145 - DNA, 994 bp, Gossypium hirsutum
gtagtttttttttttctttttttaattagaaaatatattagtctatactaatcattcttatttcacaaatgcgagcaatgaggaataaaagaggcaacccacatgcaaactaaatccaaaatcaaaggttccttttcctgatgaggtgtaactaaaatatccgagtgaagacgtactgaaattttgcacgacaccaaaaaataagggttcacagtttgaatccccttaactcatgctgcatgggatgatagtttataacaaagcatttctctcatagccgactgatgactgcttccacctctgaaggggtgtacagatggtatatcggtgctactttggcaatatcaacattgttgggagtcaccttttcttccattacttgctttaaaatggacagagcaattgtttcagcttcttgaagagttaggtccttgttgtattgctcttgcaaagagctatctgcaccttcagagccagagcctatagcttttgcattgcattgccaaaatgtgccagatggatcagtatagtataagctaggcccgttctcatcatgaccagcaatgagaagtgataccccaaacggccgggacatggattcttcatctccttcaccaaatcgaagggccagatcacaaagagcttgtgttgtggactctacggtcattggctcaccatatgagaatctgtggttctgagtctcaactcgtgcatgttcaacaagtgtacgggcatcagcaatcaacccactcatagcacatcctatatgctcatcaatttccataatcttctcaacactgctgggttccaacaatggtgaagtaatacgcttctccacagccaaaacgacaccttctttcgtctttaacccaattgcagttgaacccagctgtatttcaatcagaaaaagcaaaaacccattgatattagaacacgcccaaaaaaaattaggcacaaaaaatgataactgtttcaggagtttttcacagaaaac

SEQ ID NO: 191146 - DNA, 1040 bp, Gossypium hirsutum
cgagaacataatatccaattaaaaaaggttcttttttctgatctggtgtaattaaattatccaactgaaagagtagatgagtttagtgccacaccaaaaataacgtttcacagcttgaatcccaagaaacaaatacaagcttctccccctcaagtcatgcatcattatgacagtaaagcaggttgttgcatggtaagatcgtatgatggcagcgcattctcataggcgagtaatgacagcttccacctctgaaggggtgtatagatggtatgttggtgctactttggcaatatcaacattgttgggagtcaccttctcttccattacttgctttaaaatggacagagcaatagtttcagcttcttgaagagtcaggtccttgttgtattgctcttgtaaagagctgtctgcaccttcggaacctgagcctatagcttttccattgcattgccaaaatgtgccagagggatcagtatagtataagctaggcccattctcatcatgaccagcaatgagaagagacaccccaaatggacgggacatggattcttcatctccttcaccaaatcgaagggccaggtcccacagagcttgtgttgtggactctactgtcattggctcaccatatgagaatctgtggttctgagtctcaactcgtgcatgttcaacaagtgtacgggcatcagcaatcaacccactcatagcacatcctatatgctcatcaatttccataatcttctcaacgctgctaggttccaaaagtggtgaagtaatacgcttctcaacagccagaacgacacctttttttgtcttcaacccaattgcagttgaacccagcttgatcgcctcaatagcatattccacctggaacaatctcccttccggagaaaatgtgttcactccacggtcatactcagtcctggtgagaaacatgtttggatcgacttgatcttattagatctaccaaaacttgtgacaaagggtgacattcagcaacgagaaagcttagcgatgatggtatttttcgtcggacgcgtggg

SEQ ID NO: 191147 - DNA, 586 bp, Gossypium hirsutum
aagaaacgaaaagaaaaggaaaattaaaaaccctttgcttcccctccccgttgtttttagttttcttttggctaaagaaaattatggaaccgagtcagacgatcgaggatgaatcacaaccatccatcgccagcgtgacccgtcgcatccaacgtttgtctcttcaccttatcccacttccgttcctccaacgttcacctcagctggacatgctgacatgcgccaaggccaataagcaggaggtcgacgtagcctccctttcaagctacatgagagggaggcatagggaaattcaagagaagatttttgatttttttaactcaaggcctgatttgcaaaccccgactgagatttcaatgaaagaacatagggagctttgtttgagacagcttttggggttggttagagaagcaaagatcaagccttttagatatgttgttgaagatcctgctaagtattttgctatttctgaggcggttgggagtattgatatatcacttggtatcaaatttggtgtccagtatagtctttggggaggttctgtgttgaacttatgcactaaaaaagcaccggataagtattttga

SEQ ID NO: 191148 - DNA, 948 bp, Gossypium hirsutum
ctctctctccacttcctcttcaataggctttaggaaggggaaagtagaaacaaagaaaacatatggcaagtgaggcggcggaggaagctaacgtccctgcagcggctgcggcggaagcacccacaacagggaccgagaagcaaccacataagcttgaaagaaagtggaccttttggtttgataaccaatcaaagcctaaacaaggcgctgcttggggttcctctttacgcaaagtttacacttttgacactgtagaagaattttggtgtttgtatgatcaaatattcaagcctagcaagttgcctggaaatgctgatttccacttgtttaaggctggaattgagcccaaatgggaagatcctgagtgtgctaatggaggaaaatggtctgtcactagcaacagaaaggctaatcttgagaacatgtggcttgaaagtttgatggcattgatcggggagcaatttgatgaggcagatgagatttgtggtgtagttgccagtgttcgccaaaggcaggacaaacttgcattgtggaccaagactgcaacgaatgaggctgctcagatgggtattggaaggaagtggaaggagatcattgacatcaatgataaaattacatatagcttccatgacgactctcgaagggaaagatcagcaaaaggtcgatacaatgtttgaaccatttgcaggtttctttgttcagcagtgtactctttatttgttacctattttgcatgtgagtttatgttatgtgataccaccaacaatcaagttccatgttagagacagttttgatattttaacacattgagaattttaccctattccttggatacttaatttgctgaatctcatagcatatgatgattctgggggccattagaattatgtacttggcaatgtttttggtgcttaacttggaaggttgaactagtttcagtttgagtcc

SEQ ID NO: 191149 - DNA, 595 bp, Gossypium hirsutum
  unsure (1)..(595): unsure at all n locations
gcggaaaagaaaagaaagaaaaatacagaaaaagaagcatatatggcaagcgaggcggcggtggaagttaacgccatatcggcggcggcgccagaggcggcagcaacaacaggggcagagaagcaaccacataagctcgagagaaagtggaccttttggtttgataaccaatcagggcctaaacaaggcgccgcttggggtacctctctacgcaagggttacacatttgacaccgtagaagaattttggtgttcgtatgatcaaatattcaagcccagcaagttgcccgggaatgctgacttccacttgtttaaggccggaattgagcccaaatgggaagatcccgagtgtgctagtggaggaaagtggtctgtcactancaacagaaaggctaatctcgagaatatgtggcttgaaaccttgatggcattgatcggggagcaattcgatgaggcggatgagatttgtggtgtagttgctaccgtacgccaaaggcaggacaaacttgcattatggaccaagacggcaacgaacgaagctgctcaaatgggcatcgggaagaaatggaangagatcattggtgtcnacgacaaaa

SEQ ID NO: 191150 - DNA, 345 bp, Gossypium hirsutum
tttctttttttttattgtttttttttaataaataacgaagtatacaattcaagaaatccacttccccaagtcagagatacattcaagcaaaagcttttagaaaagaagccacaaaggggacttctttagagggtctctgtaaaacaggttttggattatatctacattaaaccattctaccaaaatggaactgaacctctctattaacttgaactcgaatactaaacctacttaattaagaacgagaaggataaatgatccacgaatacatatgttacagatatcactaacgaatgtacccccggggggggggggaaagggtattcgatactgagtatctggtaa

SEQ ID NO: 191151 - DNA, 763 bp, Gossypium hirsutum
  unsure (1)..(763): unsure at all n locations
aaaaagaaagtttttcgatctattgaatcgcggagcgtcggaatacacggcaanctgtcctttgtcccgagctacaaaatcaacacccccaaagtatatcacttttctttctttacaatcttcatttgttcagatttttgaagttctcataccatgggtgacagtcagtattcattttctctcacaactttcagtccttcgggaaagctagttcagatcgagcacgccttgacggctgtcggttcgggtcaaacatctcttggaatcaaagctgctaatggggttgtaattgctaccgagaagaagttgccttcaatcttggttgatgaaacatctgttcagaaaatacagtgtctgactccaaatattggagttgtttacagtggcatgggtcctgattttcgagttttggttcggaaaagtaggaagcaagcagaacaataccataggttgtataaggaaccaattccagtaacacagcttgtaagggaaactgcagctgtgatgcaggagttcactcagtctggtggtgtaaggccttttggtgtatctctactggttgctggatatgatgacaatggtccacaattgtatcaggtggatccatctggttcctatttctcatggaatgcctcagcaatggggaaaaatgtctctaatgcaaaaacatttctggagaagagatacactgatgatatcgagcttgatgatgctgtgcatattgctatgttgactctccnacaaggaatttaaagacaaatcc

SEQ ID NO: 191152 - DNA, 444 bp, Gossypium hirsutum
gagcagtaaagaaaatcagctcattcaagctactgctttattaaaggagaaagatgaatatgctctgaaagtacaagatgagttgaatgatacaaagatgaagttctctgaagctgaaactgtcatagaacgaattgcagaactcacaaaccgactagttatctcagttaaggatgaagacaataatgtgttgaggcctgttgatgatgtgagcagcgaattaatgcatcagctggtagataggccttctagtgattttggattgcagaaaaagcaacttgaaactgaactcagattcactaaagagagcttaaaagataaagaaatggaagttcttgctgcacagagggctcttgcaataaaagatgaagagctcaaaatggttcttggaaggttggaggcaagagaaaaagaactacaaaggctgaaggaagaaatgattga

SEQ ID NO: 191153 - DNA, 413 bp, Gossypium hirsutum
ggccatgccggtggagatggagatggaggagagaggaaaagtcggggctttgataggaaaagccacgaattcgaccgctgccgaggttgatccacgtcttctcaaagcaatcaaatcagtggtgcgggtctccgattcggagctacgactcgccgcccataccctcatggacctcatgaaacgcgatcattcccaggagaccgcagcaaggatagaacgagagaggaggggaagagagagaaggactagggagattttacagaacaagtttgaaacgatgaaaacgaattttagttctgttaaagaagaaatacaggctacagttgatgagattggagaatgtttagatattgttcgcactaaagaggaaagcgtgccacacgtcttattggatgacgaagattttgtagagt

SEQ ID NO: 191154 - DNA, 806 bp, Gossypium hirsutum
  unsure (1)..(806): unsure at all n locations
gctctctttcattaacttaagaattttaaaagaaaaaaagtatcgtattgttgattaaacctgcttggttaatcccagattcagcttgggataatacgaattgcaattgctgaattgttgttggctagaaagggtgaaagaggcagagaagaaatcagacatgttgcagtgcatatttcttctatctgattctggagaggtgatgctagagaaacagctaactgggcatcgcgttgacagatcaatatgtgattggttttgggatcatgttatttctcaaggcgattccttcaagtcacagccagtgattgcttcacctactcattatcttttccaagtagttcgagaggggattacatttttagcttgcacccaagttgaaatgcctcctttaatgggcatcgagttcctctgcagagtttcggatgtcctctcggattatcttggtgggctgaatgaagatgtgataaaggataactttgtaattgtttatgagcttctggacgaaatgatagacaatggtttccctctcacaacagaagcaaacattctaagagagatgattgctccaccaaatattgtcagcaaagttctgagtgtggtgactggtaatagttccaatgtaagtgatacccttcctggggctacaaggtcttgcataccatggagagcagcagaaccaaaatatgcaaacaatgaagtttatgttgatcttgtcgaagaaatggatgcagttataaacagggatggggcgttggtcaaatgtgaagtttatggtgaagttcgagtanattcccatctatggt

SEQ ID NO: 191155 - DNA, 420 bp, Gossypium hirsutum
tcgcccacgcgttcgggaagcgcttggaaaagcggtagagtctattagaaccaagagatcgtttgaagccttcttccttaaagcttatgcattggccgactctagcatggatttttcatgttcttcaacagttatctcattgcttgaaaatgccttgaaatgcccctcggataatcttcggaaaggtcaagctctgaacaatcttggaagtgtgtacgttgattgtggaaaattggacttagcagccgattgctacattaatgcccttaaaatacgacacaccacagcccatcaaggccttgcacgagtacattttctcagaaacaacaaggctgcagcatatgaggaaatgactaaactgattgaaaaggctaaaaacaatgcatctgcctacgaaaagaggtccgagtactgtgaccg

SEQ ID NO: 191156 - DNA, 416 bp, Gossypium hirsutum
cccacgcgtccgcccacgcgtccgcggacgcgtttgtttccgtggtccagggaatgcctctgggagaagcctctgaccaatatttttggtttggccgaccccaattagttcttcatctgattcattttgcattatttcaggttttcattagttctacttcaattgattcttgaatataagtgtagctgcccttgaacaataaatgaatatgggattaaaatcctaacttcgattgttcttgtttggatacgtaacttatgtgcatgggaacattatgtaaagaccatgaaaaaacttcttccttgcttagtttatatatgaggggttctgattttaataaataacaaaaactaacattgaaggtgtgtgatttccttcttggaggtcaacccagctagaaagtcctttggttaatg

SEQ ID NO: 191157 - DNA, 871 bp, Gossypium hirsutum
cttctcttttgttccactcgaaccccaaaactgtgtttataatggggggaggggaagggtctgcagcaagggaagcactcaggcataaatttattgatgaagttgtaatgtgtgatattgatgaggaagtggtcaatttctgccgcagatacctgactgtgaaccgtgatgcattttgcaacaaaaagcttaaccttgttatcaatgatgccaaggctgaactggagaagaggactgagaaatttgatatcatggttggagatttagcagatcctgttgaaggggggccttgctatcaactttatacaaaatcattttatgagaaaattcttaagcccaaactcaatgaaaatggcatttttgtcactcaggctggcccagctggaatattcactcacaaggaggtcttttccgctatatgccacacaatcaggcaggttttcaagtatgtgttggcatacacagctcatgtgccatcctttgctgatacatggggatgggttatggcctcggatcaaccattctccattggtgctgaagaaattgacaagaggattgctgaaagagtagatggtgaattactctacttgaatggctcttcattcctttcctctgcaaccatgaacaagactggttatctatcgctgttgaacgaaacccaatgtctacactgagggaaaatccgagatttataccaggacatggattgggtaaccacctttgaggtttgcaggccttaatcttggggagaagtttgttgtaaataaaagaaaaaaagggaaaggttgcaattaaaagatagcatcaaaaagacttttgcttcaaacgaaatgagtcatcaattgttgaaagaagttggtttttaattttt

SEQ ID NO: 191158 - DNA, 436 bp, Gossypium hirsutum
tttaaagtccagtttctagatgaaatagggacatttggaaggaaaacagaggatagccaaatttgaacatcaataataaggggaaagcaagttttgaaaaacagagtaaaagggggaaaaagttgagaacaaatgggagatgttattttgtttgtcgataatttctcatcgaattcttcaatttcactctgtagaatttgccatgaagaagagttggaaagctttaagagcttggaagttccttgtgcttgttcaggcactgttaagtttgctcatagagattgtatacagagatggtgtaacgagaagggaaacacaacttgtgaaatttgtcttcaggaatatgaaccaggatatacagtaacagttccttcaaagaaggctcagctgattgaagatgctgtaaccatcagagatagcctacaaattccaagaa

SEQ ID NO: 191159 - DNA, 354 bp, Gossypium hirsutum
caaagtggtatcaacaggggcgattctgatttgaagagatgccccaacgctctggggcatatcacaagaccataagaggtggttagtattctctggtgctaccttgcaaaggggacaatcaactctaacacgcaaggacctttgcttcagattacagtaattaggcaaaaagttgttgaacaatctccatacatgaactttgattcttttggtacgcgcatagcccataaagacctgtaaaaatccttgtaacccacattattaggattgatgtaatttgtgtttagaagatgttctgtaattaagaccctgtatccgctttttaaaaaaaagaaaaagtttggtgtaataata

SEQ ID NO: 191160 - DNA, 1584 bp, Gossypium hirsutum
gggggggccgcacgcgtccggtcaatcatctccctctacaaaagacaaaagctattttctgaaatctaccatcttttgatcaaagcaaaaacaaccagaattcaatggggaagaaagctgtgttgattggaatcaactatccaggcacaaaggctgaactgaaaggctgcataaacgatgtgaagagaatgtacaaatgccttatagaacgctatggattctctgaagaagacatcacggtattgatagacaccgataattcttatgatcagcccacagggaagaacatcagaagggctttgaatgatcttgtgagatcggctgagcctggggattttctgtttgtgcactacagtggccatgggactaggcttcctgctgagactggggacgatgatgatactggctacgatgagtgcattgtcccctgcgatatgaatctcatcactgatgatgatttcagagagttggtggataaagtcccaaaaggtagccgcattacaatcgtatcagattcatgccacagtgggggattgattgatgaggccaaagagcaaattggtgatagctctaagccccaaggttcagaaccagaatcagaatcaggttcaagtgggttcaggagcttcttgcaccacactgtactagatgcatttgaatctcgtggaattcatgttccttctagattacgccaccgcgaccaccaccatgataaggaagaggtggatgacaggggagtgaatgaagactatgatgacagtggctacgtcaaaagcagatctctgcccctctcaactctaattgaaatgctcaagcagaaaactggcaaagatgatattgatgttgggaagctaaggccaaccctttttgatatgtttggcgaagatgcaagccccaaagtgaagaagtttatgaacatcattatgaccaaactgcaggggagtggcgatgacggtgaagggggtggtttcatggggaaggttgggaatctggcactacagtttcttaaacaaaagctggatgatgacgaaggatacggtaaaccggcacttgagactgaagtgagtagcaagcaagaggcttatgcaggagctggtaagcactctcttcctgacagtggaattcttatcagcggctgccagaccgaccaaacttcagcggatgccagcccatcagggaatgcaagcaaagcttatggagcacttagcaatgctattcaaaccataattgccgactcagatggctcaattactaataaagagcttgttctgaaggccaggcagatgctcaaaaaacagggcttcactcagcaacccggcctttattgctgcgaccatcatgtcagagctccatttgtctgcgaatactaatcttttatctgcaagcttcagaaacaaataaagtctatgatttggtcagagaattgttgttgatgagattgtactgcttgtctcactttcgatttatccatatatttacagtttgtgtgcttctggacattgaatggattttaaacaaaaaatgatttatctattgcagctataacttgaacaaaaaaaaaaaaaaaaaaagtcgacgcggccg

SEQ ID NO: 191161 - DNA, 412 bp, Gossypium hirsutum
tgtaaacaagcctttgtatgccgttttcttcttctgcacatttctttctggttcttatattctcaatgattgaacttttaatatggaagagatggataaggcaattattggaatcatttttcacagaccatttggtcgtgaatattgctgtccttagttttatgcttcatgccatttttggttatgcttttgtagtttaattcctaaactcaattatatgtagaaccctattacacgagtcatgttgaaatttctagcaaatcttctgtaagagttcatccatgtgtttgttcttaccatagccagggggttcttggttgttggcttgttgcagagtagttctgtaaattttgtccttgctatgtatcaatgttcatatctcgacgaattaactaaataaattgataaaata

SEQ ID NO: 191162 - DNA, 539 bp, Gossypium hirsutum
gaaaaacgaaaaatcaaatgaaaaaacagtattgaagacgaactctttcgaccaagaattcttgctgccataatcggagaaacggcattaaaattggtgaaggttttgaagagaagacgaaaatggatgctgccaagaagaagtacagtataatagtaccaacgtataacgagcgcctcaacattgctctcatcgtctatctcatcttcaaacatctccgggatgttgattttgaaataattgttgtggatgatgggagcccagatggtactcaagaagttgtgaaacagctgcagacactctatggtgaagatcgaattttattgagacctagacctaagaagcttggattgggaacggcttatatacatggtttgaagcatgcttctggaaattttgttgtaatcatggatgctgatctgtcacatcatccaaaatatttgccaagcttcatcaagaagcagtctgaaactggtgccagcatagttactggaacacgatatgtcagaggtggtggcgtgcatggatggaatctgatg

SEQ ID NO: 191163 - DNA, 1117 bp, Gossypium hirsutum
  unsure (1)..(1117): unsure at all n locations
catcagcgttacaatcagttgaaaaatggtggagatgaagaggcagcaacccttgttttcgtgtggacggaccgtggttattacaggagaagaaggcctaagattctctctttccttttactttctcttcttgcttgtggcttcatattggctcctcacttctttagcttttcttctgctttatctcatctctatttttttggtgtacaaaatgacggccttgctggtgatttatatgtaaatgctcctctttgttcttcaatctctaatggttcagtttgctgtgacagaagacattttcgatctgatatttgttttatgaaaggtgacataagaacacattctcccagctcttcggttttcctttattcaccaaaaaactagcgacgatgacgcttcaagtacggttgatggtgatgaacttcaacacgaaaagatcaaaccttatacccgaaaatgggaaacgagtataatggccaccattgatgaattgaaccttatctcaaagagacgaaattcggacgttgaccattcttgtgacgtaattcatgatgttccagcagttatcttctcaactggaggctacacaggcaacgtttatcatgagttcaatgatgggatcatccctctgtacatcacttcgcagcaatttaacacggaagtggtgtttgtgatccttgaatatcatgattggtgggttatgaagtatgctgacatccttccacatctctccagtatccaccaatagacttcaatggagacaatcgaacccattgctttactgaggcaataactgggcttagaatccatgatgagnctactgtggaccctattttgatgaagaacaatgagagtttggtgatttcgaaacttcttgatagacttaccggcccagattacagttgatcganagcccagagagaacttagtggcatactacccaaaaggatgccatcacaagaaacaaatgtgactgcctgaagctaacatactaccaaattggaagcccagaatgggtagcgttagcgacccacgattcaattctgatattagacccttggcaggcccatttttgtaaacctgggtttttttaagtattccctaagaaaagctgaac

SEQ ID NO: 191164 - DNA, 517 bp, Gossypium hirsutum
cttcgtcagagatatacaagacattgcctattagggaagagcttttgcgtgcctttttgaatgcggatttaatcgggtttcatacttttgattatgcaaggcattttttgtcgtgctgtagtcgaatgcttggtcttacttatgaatccaagagggggtacataggtgttgagtattatggaagaactgttagtatcaaaattctccctatggggatacacatgggtcagctggagtcggttttgagccttccagagactgaagccaaggttacagagcttcttaagcagtattgcgatcaagggaagacaatgttgcttggggtggatgatatggacatatttaagggtattagtttgaagctgctagcaatggaacaactacttttgcagcatcccgagtgtcaagggaaggtagtgctggttcagatagcacttccagctagaggccgaagaaaagatgtgaaagaggtgcacgaagagacatattcaactgtgaagcggattaatgaaacttt

SEQ ID NO: 191165 - DNA, 814 bp, Gossypium hirsutum
cgaaaatcaaaagcagccatcatctttagatcagagacacaaaaaagggctttgacggttgttgaagaagaaattaaaaggtaaaaaaaagaaaagagctgctgttttttgactaagattgtgattgtcaaaattgatgctgaggatcaaactgggttaattcattcatggagatttgcttaatctattctgtttttggttaacgagtgattttgcttgatcgagtgattgtttgctgttagaagacgaaggtgttactagtattatcaacgaattctatcgaaaatcgagtgctttattgacaagcagggttcggtttagatgcaaacgtctcagaaacaccaaactcgggtcaatatccacaggttgtatcaccaacctgttaaggatgttgatcaattttggttgcctcatattctgatattttacaacaatgcatgtttggatattgccccgcattgacctggtgtgtcctatcaaaccttccatgacgagatcctcttctcttgaaatcttcaccggtgctaatttcaaggttgcttattatttgccttttgcctaatagtattaattaaagtgatttctttatgttctctggtatcttatctgtgatgtctgatccttatttttctctctctatactactatgtttctccgtctgtggatttattgttctgatgatagtaattgcctgaacccatgtacttgatgtgtatatatgtatctgagtcttaattttatttatgtgtttattattttttatcctatgggttactattcatttctctctatctttatcttagtactggatccg

SEQ ID NO: 191166 - DNA, 580 bp, Gossypium hirsutum
ccccccccctttttttttttttattttttttttttttttcggcaagagtaacccaatatcaaataatcgaccaaacctcattagttccatctttaaaaccaaattcaaccatccaattttcccgtacttaaatttaaacaataagctttcacgaatcagtgtccatatatttacacagatttaggttgaatttgctcgaagtcaaaaacctcgaacataaggcgtctcacatctggcttaccatacacagtgtatgataggccatggagggcctgctgaacagcagttgtggcagggttccggagtcttcgattgttctcatacgcatcttgaacttgctccgagtagatcataaaacgatgcagatacttttcccgcaaatacctcccgcagaacttgttcataagaacacggcgatgcttctcttgtagccatcttccaggggcgtctagatgcttcatcagcaacctctccgccataaccagatcctggatcttctggccgacatactccaaccgctcaaagcaaaaccgaggatgttcaaacttgtattttgatggatgcataaaacaaagctgta

SEQ ID NO: 191167 - DNA, 437 bp, Gossypium hirsutum
  unsure (1)..(437): unsure at all n locations
gtgagtttaaaaaatcaacacttggaaaaggtttcgctgttaatacttgcgcaactaaagaatttgaattgtttataatacgccatccttgcttagctaaaagtgaaacattaaattgagccatatttctgaagcccaatccaccctcttctttaggacggcataagtacttccactgacaccaatgaatacctctcataccatgcgttttttgccaccaaaatttagcaaaaatattctcaaattctcctcaaagagtctttggtaataagaagcatgacatagcgtacgttggaatggcctgtaacaccgatttaataaagacttctttacctncttgagataacattctagtactccacccatcaatcctggtagcaatcttttcttttaaatgctgaaaggattttttctttcgtcgaccaaccatgtttgga

SEQ ID NO: 191168 - DNA, 578 bp, Gossypium hirsutum
ccaaaatcgacgtggagtgggtgcatgtaatcagcgaatgctgggctaatcctttgaaaggatttatgagggaagatgagtatttgcaaagcttacattttagttctctgagattgaaagatgggtatgttgtcaacatgtcacttcccattgttttggctattgatgatgagactaaggagagaatcgggtcttcttcccatgttgggttggttggacctgatggagacttgatcgccattcttaggagcattgaaatctacaagcataacatagaagaaagaatagctagaacatggggaacaactgcaccaggtttgccatacgtggaggaagtcattactcctgctggaaactggctcattggaggtgacctagaagttttgaaacctataaaatataatgatgggcttgatcactacagactttcccccaagcaactcagaaaggaattcgataggcgtaatgctgatgctgtttttgcttttcagctaaggaatcctgtgcataatggacatgcactattgatgaatgattcctcggagacgacttctagaaatgggtttcaagaatccaat

SEQ ID NO: 191169 - DNA, 1100 bp, Gossypium hirsutum
  unsure (1)..(1100): unsure at all n locations
ctgccgtaagctttttatttttatttaaatgtgtgcatatttggaagggaagataatccaataagttgcttacacaattctgacacgcaccaaatatggagcattgattctcttggcggaaaaagagaaaaaaaaaaaacccagatttacaataattggaaaaattaatttgtttattagctgtaataaattcagtagtccctggctgttataaatacatttgaagagcaagaggaagggaagaagaagaaccaagcaaagttgaaagaaaagagtgataaacatggtgcctgacaacaataggaatgaggttgaggattataagttaactgttcaagtccctgaaactgcccatcaagttagcactgattcatggctccaggccggttttgtcttgacaactggtgttaacagtgtatttgtgttgggatattctgggacaatcatggtccctcttggttggataggaggcatagtcggtttgcttttagccaccgtgctgtcgctgaacgccaacatgcttgttgccaagctccatgaacatgggggaaagaggcatatcagatacagagatcttgcagcacaaatatacggtaggagagcctatactattacatgggcaatgcaatatatcaatctgttcatgattaacattgggtttctcattttgggtggttctgctttaaaggcttgttttgcccttttcaattatgagcacaccatgaagcttccatactgtattgccataactgggtttgcttgtactttgtttgccatatcgacaccgcatctgtcagcttaagagtatggtggggatgtcaacagttctcagtttgatatatattatcgtggcatgtgtgcttgcggctaaagacggagctaatgcaccaccccgagattatagcatacatggggaatcttctagcagaagttttacaactataggagcatctgcaaatcttgngtttgcattcaatactgnnaatgttaccagaatacagtaggccagatacaagtcatccttcactgctcatcatanaacctttgaaactgtnncttacactatgatagttgcttgaaagcaagccttttttgtcatt

SEQ ID NO: 191170 - DNA, 669 bp, Gossypium hirsutum
  unsure (1)..(669): unsure at all n locations
cccacgcgtccgaccacatctgtcagctctaagagtatggttgggatgttcaacagttcgcagcttgatttatatcatcgtggcatgtgtgcttgcagctaaagacggagctaatgcaccaccccgagattatagcatacatggggaatcttctagcagaatttttacaactataggagcatctgcaaatcttgtgtttgcattcaatactggaatgctaccagaaatacaggcaacagtgaggcagcctgcagtgaagaacacgctgaaagctttgtactttcagttcaccatcggagttgtaccgatgtttgccattacccttatcggctactgggcttacggagcttcaacatccacatacttgcttaatagcgtaagcggtccactttgggtgaaggcggctgctaacatttctgccttcctgcaatccatcatttgtttgcacatatttgcgagtccaacttatgagtatttggacaccaagttcggcattagaggaagcgccttgcagcttaacagcctgtccttcagaattgcagcaagaggcgggtacctcgttatcagtacactggtgtcggctcttctaccgttcctcggagatttcgaaagccttacggnggcattgagcacgtttccactaacatttatcctagcaaaccacatgta

SEQ ID NO: 191171 - DNA, 537 bp, Gossypium hirsutum
cggacgcgtgggaaattccacattttcttcactgaatgcagcagctaaacaagggccgctctctttgcctcgcttatccataccctgtcagtgcctgcgtcagctcaaagcagagatgggagaaggaaagggctcaacccttgtgcaccttctggtggtagtccttagcttggtcgcatttgggtttgccattgcagccgagagaagaagaagcgttggcactgttgttaaagatgacataacaaattctacatattgtgtctacaactcggatgttgccactggctatggagtaggtgctttcttgtttcttctttctggtgaatcgctgttgatgggagttacgaagtgcatgtgttttgggaggccattagcaccgggtagtgatcgagcttggtctatcatatattttgtctcatcatggttgactttcttggttgcagaagcatgtctaatagcgggtgcaactaggattgcttatcacaccaagtatcggggaattgatttatgcccagtatttcttctgtgaaacattga

SEQ ID NO: 191172 - DNA, 389 bp, Gossypium hirsutum
cgaatcttcatttctactttcgtcaccagtttttagggtttcttgatccggtgctttgattctccgtttcgtcttcctacctcgacggatcaagattcctctctttgtttttggacaaaatcattaagtttgagctaaaccttcaagttagtggctgaaacagcagcctcaatttgaaacttgctagttctgaatcaggtggtgcttgacatacatggatcttgtagacgggcaagaagatacatgagtgtgtttgatattgcagcttaatcatcgtctcccatagttaatcgtagcactgtccagtaataattcagtaatagcttgtggatataattctcagaaggctgcttgtacacattcagaggatcctttgtatccatgctggc

SEQ ID NO: 191173 - DNA, 677 bp, Gossypium hirsutum
attgaggtggccaaagttattttcgccattgttatgctcttgttccagtctcggcataagaaagttggggaaaaatctcttctctcagtttctgcactagttcaggctgctcgaaataatgttcttcttgcagttccagctctactttatgctattaataattacctaaaattcatcatgcagctttatttcaatcctgcgacagtgaagatgcttagcaacctgaaggttttggtaatagctatcttgttaaagatgatcatgaaacggcggttttctatcattcagtgggaggctcttgctttgttgcttattggaattagcataaaccagttgcggtctttaccagagggtactacttcatttggtcttccggttgcaactggcgcatacttgtatacactaattttcgttactgttccatccctagcatctgtctttaatgaatatgctttaaagagtcagtttgagacaagcatttaccatcagaacttgtttctttatggatatggtgccattttcaatttcctagccattcttggaactgcaatttttaaaggtcccaatagcttggatatcctgcagggacattcaaaggctaccgtgctcttaatatgcaacaatgcagcccaagggatcttatcatctttcttcttcaaatatgcagatacaatctt

SEQ ID NO: 191174 - DNA, 1394 bp, Gossypium hirsutum
cttccatatccaacaagagcatttgatatggctcagtgttctcgatgcctaataccatggactgcaaatgatggaatgtacttaatggaagttgatagagtcctgaggcctggtggatactgggtgttgtctggccctccaattaattggaagacctactaccaaatttggaagcgaactaaggaagatcttaaggctgagcaaaaaaagattgaagagttagctgaacaactttgctgggagaaaaaatatgagaagggagatattgctatttttaggaaaaaagttaatgacaaatcctgccgcaggaattctgccaatatgtgtaaacctaggggttcagatgatgtttggtacaagaaaatggaaacatgcataacccctttccctaaggtaagtagtgcaagtgaagtggcaggaggggaactgaagaagttcccagctaggctttttgctgtccctcctcgtatatccaaaggacttgttgagggggtctcagttgaaacttaccaagaggacaataagctttggaagaagcatgtaaatgcttacaaaaggataaatagattgattggtactgcaagatacagaaacgtgatggacatgaatgccggtcttggaggatttgcagcagctctcgaatcacccaagtcttgggtgatgaatgttgtgcccacaattggcaaggacaccttaggtgtgatctatgagagaggtctaattggaatatatcatgactggtgcgaaggtttctctacgtatccaagaacatatgaccttattcatgctaatggtgtctttagcttgtatcaagataagtgtagctttgaagacatccttctggaaatggatcgcattttacggcctgaaggggctgtgatattccgggatgatgtcgatgtcctaaacaaggttaggaaaattgctggaggcatgagatgggacaccaagatgaatgatcacgaggatggtccccttgtgccagagaaaattctagttgcagttaaacagtactgggttggtggtatcaaaggaaacagtacatccagtgctgaataaaccaacatcaacaggtcaagtagttcaaggtaaaactaaaaagcaaaggttaaaatctcgaactgatgatgaagttggttcagacagagggactaaagagttccgatcaacaaccctcaaaaagatacctaagttgctacattgtgttattcactatgtagagaatatacacaattatgttagcttgtaatcctgtgtgattttgggaggaaattgtgttttgtccttcatctgtgtagctgcccaaataattatgtcaagatacaagaaagcatagtgatgaatgacaataaacaattctatttattcgtacaaggaaaactgatttgtaaaac

SEQ ID NO: 191175 - DNA, 422 bp, Gossypium hirsutum
cgtatgtgtatatacgggtgaccgacaagtgttgggggctgaatatgcatgaacctatcatttgggcattggttgatctctataacaatcttcatctagagcaaattcctcaaagttccaatggcactcaagttgacccagagatacctgttgacctgacacatatttcagaggtgaggctcaaagctgtcattggagacagcacccgcccaaaggcctcatggagttctccgtgtgcggagtcctatactttctgctcgtggaaacgcatttagaattcaggtgcatctaaggagggtgatgcgcaaagacagattcatgcggagaagttccatagctcgtgcagttgtaaaccgtatttggcaagatttgattcataaccctcttcacttggtattttcagtagatgtacttggtatgac

SEQ ID NO: 191176 - DNA, 492 bp, Gossypium hirsutum
tgaaaactccatactgttttgaagatgactgcaccaaggaagacccactgtcacaggaaaacttccggaagttagcgatgccattgccctactcgaagcagcatcattcaaagcttgtttgctacataaccaaagagttaatggatacagagaacccacctcaagtcctgcctaacggctatgtctacagctctaaggctctcaaagaaatggctgagaaaaacaatggtaaaattacatgtccgagaaccggtctggtctgcaattattctgacctggttaaggcctatatctcataaactacactatcaacactgcaaaggtaaaaaagaaaactcttcctggcctgtttcctcttaatgttagtgctaaattttatgcatcatctgtagatatttctcttttgctttcgaaattttcggaacttctcattgtaatcttcttgcacctttaactcgttcacctcatgtaaataatgcatccttttttttt

SEQ ID NO: 191177 - DNA, 861 bp, Gossypium hirsutum
  unsure (1)..(861): unsure at all n locations
gaaaagcctgaatctttcaggaaatcatttaagtggagtaattcctcttcaaggttcacgtgttaatgaattacttgttatgtcatcttatccgcaaatggagtctcttgatctctcctacaattctttgactggtggtttgccttcagagattggtaatatagctgccctcaaactgctgaatcttgcaaacaatgacttatcaggccagctgcctagtgaattaagcaaacttagtaatctggaataccttgatttatctggaaacaactttaaaggaaaaatccctgacaggctttcaaccagtcttaatggatttaatgtgtcctataatgatctgtcaggtcctattccggaaaatttgagaggctttcctctatcttcattttctccangaaacaggttgctaattttccctcatggcatgccatcagcaaactctgctcaagttcagccccctgatcatgctggacatcataactcaaagagcgatgttagagtatcaattattgttgcctcagttgtagctgctgtaatgattgtttttgtattattggcttatcaccgagcgcaagttaaagaatttcgtggaagaagtggatttagtgaaacaactactgcaggtgatgctaagttggtcaggttttcccgaccttctgttttcaagttccactctaatgttcaaacaccacatacttcgttgagcttttcaaatgatcacttgcttacttcaaaatctaggtcattgtctggactgcaagaatttgttgctgaaattgtagagcatgatgcacctgagagagccacaacctcttcggcttatgtgaatactaatcttctagataatgagccaacaacatc

SEQ ID NO: 191178 - DNA, 401 bp, Gossypium hirsutum
gtaccttccatcgttttgataaatttaaccttaagtataggccttgcggtcaaagtaggctcagggaaattttcctcaagcaggataatcttatccaaggtcgattccttggggagctgacaaagcaggtcttttctgatcttgccgcaagcaaataccacatggctgaatacagaatatctatatatggcacgaagcaaagtgagtgggatcaactggctagttggatcgttaacaacgtattccacagtgagaatgttggctggctaattccgatccctcgactttccaacgtatacagagcagacggggactgctacaccatctcagagcattcttgacaacatcttcattcctctctttgaggttactgcggatcctgattcacatcctcagatgca

SEQ ID NO: 191179 - DNA, 386 bp, Gossypium hirsutum
cgaagtttggaagtgtcacaatttgattaatttaggattagatcttgcattttttgaaactcttacaactttagatgtctggaattgcaatgggatgtcaaaattgattacatcttccaatgcccgaagtttggtgggccttgttacaatgaggattagagaatggtaaatgatgagagaagtagtttgcaagcgacggggatgaagcgtcatacaagattgtttttagagtgctgaaacgtttggagcttcattgcttacaaaacctcacaagcttttgttcagggaattacaccttatggtatccatccttagaacaggttactttgagccagtgtcctagaatgaagaacttctatcaaggagagctaatcacaccaaaactg

SEQ ID NO: 191180 - DNA, 437 bp, Gossypium hirsutum
cacttctctagtcaaattcaaattctaaatccaacccattgattatatcttcaaataatcaaaacccaaatttccttgcacaaaatttgatccaaatttgtacctttttttttgaaagcagcatggaatccgaactcaaggatttgaattcgaaaccggctaagatccaacaacccgatacgacacatgacgacacttcctccaaagacgaccgccccttactcaaagccgactcctcatccaccgtcgccgccgccgccaacatccacgagctcgagaagaaattcgctgcttacgttcgtaacgacgtgtacggtaccatgggacgtggagagctcccattgaaggagaaaatcatgcttgggatctccctcgttacgttgcttccccttcgaatcgttttgggatgtcccttgtggttggatattatttgattt

SEQ ID NO: 191181 - DNA, 1449 bp, Gossypium hirsutum
  unsure (1)..(1449): unsure at all n locations
tccacgcgtacgcccacacgtacggcagggtgtgcatctataaagaagaaatagattgggaaagcctcacatttcgcccccttcctattttcactcttttcagtcctaaccaaaggcggcccctcaactctcttctcctttagcaatatctttccccttcactgtttcaactcaaagaaatggcggaggagaagaaggctcaatctgctggggtttggcctacggttaaaccttttgtcaatggtggtgcctctggtatgcttgctacctgtgtcatccaacccatcgatatggtcaaggtaagaatccaactgggtcaaggatcggcagcaactgttaccaagaacatgcttagggaggagggtgttggtgccttttacaagggtctatcagcaggactgctcaggcaagctacatacactactgctcgattgggatcattcaaaatgttgacaaacaaagcaattgaagccaatgatgggaagcccttacctctatatcagaaggctttgtgtggtctgactgctggtgctattggagcctgttttggcagcccggctgatttggcacttattcgtatgcaggctgatgctactttgcctgttgctcagcgcaaaaattacaccaatgcattccatgcactctatcgtattgttgcggatgaaggggttttggcactttggaaaggtgcaggccccaccgtattcagagccatggcattgaacatgggaatgcttgcctcttatgatcaaagtgttgagttttgcaaggattcgcttggcttaggagaagctgctacggtgctaggtgcaagtactgtttcaggtttctttgctgctgcttgcagtttgccttttgattatgtcaaaacacaaattcagaaaatgcaacctgatgcttcgggaaagtatccatatagcggctctttggactgtgccatgaaaaccctcaaggctggaggaccattcaaattttacaccgggttccctgtatattgtgttaggattgctccgcacgtcatgatgacttggatattcctcaaccagattcagaaggcagagaaaaaaatggggttgtagagcgttgtcacttctcagagacgtggagtaatgctggactaattgattgcgtcaaataaaatcctggatttttgctggttctggctaatcatgcaaattttgaaatacatttcaagtcaatgttgtcttatttttctgattaaatattttagggtgagataggaaaaccatttgcatcccagagttatgatttgattgctcatacttctgattaaaaataaatgtgtaccaaaccaagttcaaagcattaaatctttatatttttcatctgcttggacaggaaaaaaaaaaannnnnnnnnnnnnnnnnnnnnnnnnnnnnnnnnnnnnnnnnnnnnnnnnnnnnnnnnnnnnnnnnnnnnnnnnnnnnn

SEQ ID NO: 191182 - DNA, 1631 bp, Gossypium hirsutum
taccctccttccgtttctgttttcagcatcgattactttttatttttttcagagcctccttcaccaacctccgctctgttcagcccgtgatcttttgatctttctccatggctaccatttccaagctcgctaaccccaacccagtcgcttctctttcattatctttcaaacccagatcttcttcatcgcttaaatgcttcgttgggttccctaccaggcctgctttcagctctaagctggtttcatcttctagcttgtcctcgataaacacccaccctttcaggggctccttggttgtcaggtgttctcttgctgatggaaacggtagttcagtgaagacgactactttgcatgatctgtatgaaaaagaagggcagagtccatggtatgacaacctttgcaggccagtgaccgatttgctgccactgattgcaagtggggttagaggtgtaactagcaacccagcgattttccagaaagctatatcttcatcaaatgcttacaatgatcaattcagggaacttgtgcaatcaggaaaagatatcgaaagtgcttattgggagttagtggtgaaggacatccaagatgcctgcaaactttttgagccaatctatgaccaaacagatggaggtgatggttatgtttctgttgaggtttctcccagacttgctgatgatactaatgggaccattgaggcagccaaatatcttcataaagtggttgatcgtcccaatgtgtacattaagatccctgcaacagcaccatgcattccttcaatcaaggaagttattgcgaatggcataagtgtgaatgtcactctcatattttcgcttgctagatacgaggctgttattgatgcttacttggacggccttgaggcttctgggttgagtgatctctccagggttactagtgtagcttccttctttgtcagtagggtagataccctcattgacaaaatgcttgaaatgattggaacaccagaagcccttgatctccgaggaaaggctgctgtagcacaagcagctctggcatataggctctaccagaagaaattctccggtccaagatgggaggctttggtgaaaaagggtgccaagaaacagaggttgctctgggcttcaactagtgtcaagaaccctgcctaccctgacaccctatatgttgctcctctcattggacctgacacggtctcaaccatgcctgaccaagcactccaagccttcatagaccatggcacagtttcaaggacgattgacgcaaacgtgtctgaagctgaaggcatctatagtgcacttgagaagttggggattgactggggcaaagtcggttcacagctggaagacgagggagtggagtctttcaagaagagctttgacagccttctcgacacattgcaagagaaggcaaacactcttaaatttgtgatttcttagatttgctgtcactgcaaacacaataaaaacaagcgggtgttggttcctgctgtaaaagaaagttggtgagcgagcgttatgtgagacgttgaatattatgtaatatgaagcagcgagtgtttgtttaatggaacttttgttttgtgctttgctttatggctcctgctgatcaatgaagatgaaaaaaaaaaaaaa

SEQ ID NO: 191183 - DNA, 433 bp, Gossypium hirsutum
gcaagctgggatcccccatgaggttctcaatgcaaaaccggagaatgtggagagagaagcagagattgtagcacagagtggtcgtctaggggcagtgactattgctaccaatatggctggccgtggaacagacatcatcctaggtggcaatgcagaatttatggccaggctgaagcttcgcgagatgctaatgccaagagttgtcaaaccagctggaggagtctttgtatcagtgaagaaacctcctccaatgaagccatggaaggttttatgctcattttcaatatgaaaatattttggtattggtagatgaatttaatttagattagggttgctattccaggtgaatgagaagttatttccgtgcaagctatctgacaagaacaccaagttagccgaagaagctgtagagttgtctgtcaacacttggggc

SEQ ID NO: 191184 - DNA, 436 bp, Gossypium hirsutum
gctcattcctctcctttcttttccagatctctcggcggcgcgcaaccatacctccgctcgctgctgctctcgttaatctttcaacgatttctccgagctttttttattgttgaacaaaaatcacactgcaaccgttacaactcagacagaggaagaaaggcatctttttttttttaattttgttttgaagttggtgttatcatggaacctgctacagggaagtcgagtcttttcaggaatattctggcgcgtgctcttattttcggtgttcctatcatggtcttccgatttgcttacgtggtcagcatcaccggcgaatcttgcactctcagtagcttctgcttcttctccttgcggcagaatctcaacttcatcgtccccggtgccagtgtctccgccatcgtcgggaacgacgccgtttctcgctccgatcctc

SEQ ID NO: 191185 - DNA, 363 bp, Gossypium hirsutum
ggagccaatctgaaaaatctagatctaagcagcgcatgagtcagctctgtcggaattgggattttagtcggacatgttcccaaacttgaaaatttatctttatctcacacagcaatcgatgatgttgccttgtcatatatcggcttgatgccttcacttaaggttatcgacttaagcaacacaaacattaaaggtttttttctccagctaggcactgagtcgcatgtggatagcacactaacagcacttcaaaatcttagttatctggagagcttaaacttggagcatacacaagttagggatccggatttgctccctttattgagttgcaaaaacctgagccatttgtctctcaaatgtgcg

SEQ ID NO: 191186 - DNA, 545 bp, Gossypium hirsutum
  unsure (1)..(545): unsure at all n locations
cccacgcgtccgattntattgatagtctctgctttttagtccgcaatgagctgagatgtgatgtcatgtgtcaccagacaaaatccttcaaaagagtactaaccagtgaagcatttgctattatcatcgcgtccgaaaacacccaggtacagaagcactaacattttctctttggcttaccaaccttggatctgaaatggcaaagtcacccgaagaagaacaccctgtcaagacctttggctgggctgcaagggacccatctggtcatctctctcctttcaccttctccagaagggtaactggtgaagaagatgtgaggtttaaggtgctgtattgtgggatttgtcattctgaccttcacagtatcaagagtgaatggggctcctccaactaccccatggttcctgggcatgaaatagtaggggaagtgacagaagtaggcagcaaagtggaaaaggttaaggtgggagataaagtgggcgtgggatgcatggtcggagcttgccacagctgcgacagttgtgcaaacgaccttgaaaattact

SEQ ID NO: 191187 - DNA, 392 bp, Gossypium hirsutum
attgtgaggtagatgcctcaccattatttcttgatacaattgatcgatcagcaagacttgcttgtcattgaagctttgcattgcgtgacttaaaatcttttatcactgagtttagctcttgctttgaaattgcatttctgaaaagtaaaagtgatccgtttatcactattgaccagatcttagaaacatgtcaagctcaattagtttacttgtttatctcccctacttggaagttttactgtttaatctcagatgtgtgtttctgatcagctcaagaaggcacaccttcttgtctgtatggtagcccacaagccaaataatcggactgatgctcttgtgaaaatattggcattctttaattgcctatttgaaatgtaggaaatttgtttggg

SEQ ID NO: 191188 - DNA, 548 bp, Gossypium hirsutum
atccggcaaaaggaggattattcagagcgggttcaatggagaacggggatggaatagccgttgggtggttagggcaccctatctttagagataaagacgggcgtgaactttttgtacgtcgtatgcctactttttttgaaacatttccggttgttttggtagacggagacggaattgttagagcggatgtcccttttagaagggcagaatcaaagtatagtgtcgaacaagtaggtgtaactgttgagttctatggcggcgaactcaatggagtgagttatagtgatcctgctactgtgaaaaaatatgctagacgtgctcaattgggtgaaatttttgaattagatcgtgctactttgaaatccgatggtgtttttcgtagcagtccgaggggttggtttacttttgggcatgcttcgtttgccttgcttttcttcttcggacacatttggcatggtgctagaaccctgttcagagatgtttttgccggtattgatccagatttggatgctcaagtggaatttggagcattccaacaacttggagat

SEQ ID NO: 191189 - DNA, 1136 bp, Gossypium hirsutum
cattactctcgattccacttaacgcaaatagttcgagtttcgtaatcaatggctttaccgaaccaacagactgttgattatccgagctttaagctcgttatcgtcggcgatggaggcactggaaagaccacatttgtgaagaggcatctgactggagagtttgaaaagaaatatgagccaacgatcggtgtggaggttcaccctttggacttcttcactaactgtgggaaaatccgattctactgctgggatactgctggacaggaaaagtttggtggtcttcgagatggttactatatccatgggcaatgtgctataattatgtttgacgttactgcccgtttgacatacaagaatgttcctacctggcaccgtgatctttgcagggtgtgcgagaatattcctattgttctatgtggtaacaaggttgatgttaagaacaggcaggttaaggcaaagcaggttacattccacaggaagaagaatctgcaatactatgaaatctcagccaagagcaactacaattttgagaagcctttcttgtaccttgcccggaagcttgcaggtgatcctaatcttcactttgtggagtcacctgctcttgctcctcctgaagtacacatcgacttggctgcacagcaacaacatgaagctgagcttgcagcagcagctagccaacctcttccagatgatgatgatgatgcatttgagtagagaagagaataacaatattagctttttcactgccactgcctgaagtttggggtctaaaaaaacaatttcaatctccttttttcattaaaattttcgaaaaaattatatgggtgcagggtgcaggcagagtctggtgtttgtcagctatatttgagactacagtttttaccatttagaccagtttcttttgtctttgtttttttcttttgggttattggatttgtgttcccttcagcatggattttgcttttatagtaaaatccctttcctttataagaaccaacaaaaagaattccctaataaagaatgtcccctttccttaaaatgctacatcgattttgtcttgtttttattaggtttattcatcgtttgggcctgttataatacacattcattaaataaaaatatcgaatttaacaatt

SEQ ID NO: 191190 - DNA, 1196 bp, Gossypium hirsutum
tcgcccacgcgtccggattcgctctactttcgccaaacaaacgcaagatttgtagattcatttctattgtctatccgcctccgaatcaatggctttgccgaaccagcaaacagttgattatccgagcttcaagctcgttatcgtcggcgatggaggaactggaaaaactaccttcgtgaagaggcatctaactggagagtttgaaaagaaatacgagccaaccattggtgtggaggttcatcccttggacttcttcactaactgtggcaaaatccgtttctactgctgggatactgctggacaggagaagttcggtggtctcagagatggttactatatccatgggcaatgcgccataattatgtttgatgtaactgcccggttgacatacaagaatgttccaacatggcatcgggatctttgcagagtgtgtgagaatattcctattgttctatgtggaaacaaggttgatgtaaagaacaggcaggttaaggcaaagcaagtcacattccacaggaagaagaatctgcaatactatgaaatttcggccaagagcaactacaattttgagaaacctttcttgtaccttgccaggaaacttgcgggggatcatataacattgtatttgttgtgcaattaatgttttaatgctgatgcctcgatcaatgtctaaaattggtgttgttttgatgattctagtgatcctaatctccacttcgtggagtctcctgcacttgctcctccggaagtacacattgacttggctgcacagcaacagcatgaggctgagcttgcagcagcagccagtcagccccttccagatgatgatgatgatgcatttgaatagagaggggtttgagttgccagagagccatcaacaatttctgctgctttttcattttcactcccgtctggatgtgtgctctctcattttcgtatttaaattgcaagtagggaggagtgacggaggatgaatttgtagtgtaggattttacgaatataattgttgttatggtggatctttggtcgtgttttcgacttttgctttttgttgttatggattttgctgcctttagtgaaatccttatgtgatagttatctatatgtttttgaatatgaaattcttgagaagaatattggaattcccatttgctctcattttcattcggtaaaaaaaaaaaaagtcgacgcggccg

SEQ ID NO: 191191 - DNA, 347 bp, Gossypium hirsutum
caggaagaagaatctgcaatactatgatttatcggccaagagtaactacaaggtcgaggaacctttcttgtaccttgctaggaagcttgcaggtgatcctaatctccacttcgtggagtctcctgcacttgctcctccggaagtacacattgacttggctgcacagcaacagcatgaggctgagcttgcggcggcagccagtcagccccttccagatgatgacgatgatgcatttgaatagagaggggtttcgccttgccacagagccatcaacaatttctgctgctttttcattttcactcccgtctggatctgtgctctctttaaaaaaattttcgtatttaaat

SEQ ID NO: 191192 - DNA, 604 bp, Gossypium hirsutum
cttggggggactctctgttggcgtggcagagcggcctacctcttcctcttcctcttcctctacgacaattaaaacaagaaattcaaatctctcaatggtttttttattcacatccatattcattaaaatctgagattagattattaccacttggggtttttctaatggcgttgaatatggattatgaattaaagaaagattgtcacgatggaattgtcgttaatggcggaagcgatggccttttactctcacatgccaacagcaacaagctcattatcgataccgatcccgggattgatgatagcatggcgatctttatggcatttcaaaatccagaatatgagatcttaggtttgaccaccatatttggcaatgtccaaaccgaagatgccactcgtaatgccttacttctgtgtgaaatcgcagggcgtcctgatgttcctgtagcacaaggcagccccgagccgcttacgggtgggaggccgattgttgccgactttgttcatggctctgttggactggggaatatattcctatctcctccaaaaactagcaaatctgataaggctgcctctgaatttttagttgagaaagtttctgaata

SEQ ID NO: 191193 - DNA, 515 bp, Gossypium hirsutum
cgaagtggtcgaaatgaaatgggatatggagatcgaggaaatcgaagcagttctcgagaaaatctgggacttacacgacaagctcagcgacgccattcactccatttcgcgagctcacttccttaactccatcaaagccctaaaaaaatccgacaagaagaagctctacgacgatgtcgtagtcggcgcggacgataacaggactggcttcgtgttcgtcaaggaatttagaatcgacgatggtgactccgcaattcaagaggccaagagtcttaatgatataagaactgctctcgagaatctcgaggaccagctcgaatttttccacacagtacaaatacagcagcgtgttgagagagatgctgccattgcacgattagaacaaagccggataattcttgcattgagattggctgagcatcatggtaagaaatacaaagtaattgatgaagctctagctttcgtgggagacgtacacgatgccagccgttacatctcacctaaaaacctttact

SEQ ID NO: 191194 - DNA, 438 bp, Gossypium hirsutum
  unsure (1)..(438): unsure at all n locations
ccggtagggagggaagaaaggaagagataggaaattggtggggtttccaaaaggtcggagaagggtgaagaggttgttagagatggaagtaacagccagagggtggaggaggagaaggcggaggaagaagaagcagctgctgctgccgccgcctttgcagctaaagcaagagcgaaaaggaagtcttcacggccaaatccacggctgagtaacccacccaggcacgtccacggcgaacaagtcgccgccggctggccatcttggctgtcgaacgtcgccggtgaagccatcagcggctggactcctcgccgtgctgattcttttgagaagattgataagattggtcaaggaacatacagtaatgtgtacaaagctagggatactttgactgngaaggttgttgcattaaagaaagttcgtttcgataatttggagccg

SEQ ID NO: 191195 - DNA, 737 bp, Gossypium hirsutum
aagacgcctatccacccctttttctattttatttacaaacgccaaaatccccaaagcttcacttcccataatctgcccccatcatggacgttgatcctcgtctatacgaacaaattgcagtcaatgataatgacatccacaacatcatcatgtcatatcttgtgcacaattgctttaaagaaaccgtggaatcgtttattgcttgtactgggatgaagcagccttctgattatcttgaggacatggaaaaaagaaaaagaatttatcaatttgctttagagggtaatgcacttaaggcaattgaattgactgaacagctggcaactaacttactagagaaaaataaggacctgcattttgatcttctaagccttcatttcgtcgagcttgtatgctctaggaaatgcacagaagctctggaatttgcacagatgaagttgaccccatttgggaaggagcaaaaatatgttgaaaagcttgaagattttatggctctgcttgcatatgaggaacctgagaaatctcccatgtttcacctgcttagcttggagtaccggcagcatgttgcagagagcttaaatcgagcaattcttgctcatggaaaccatccaacctacacggcaatggaaaggctgatacaacaaacaacagtagttagacaatgcttaaaccaagagcatgcaaaggatgggccaccgccattttcgttgaaggactttctaaaaagctgaacagtg

SEQ ID NO: 191196 - DNA, 416 bp, Gossypium hirsutum
  unsure (1)..(416): unsure at all n locations
agcgagagattaggaagaggaagtatgaggagtcattgcgggatgctagaaggaattatcaaagtatggcaaatatgtgggccagtttagctcaggattcaaatgttgcaactgcgcttggattggtgttctttgtgatattttataggacagtggtgcttagttacagaaagcagaagaaggattacgaggataggttgaagattgagaaggcagaggcagaagagagaaaaaagatgagggagttggagagggaaatggaaggaattgagggggaagatgatgaggctgagcaagggggaggtgagcagaatccttatttgaaaatggctatgcaattcatgaagtcaggagcacgtgtgcggagggcacanaataagagactgccacagtatttggagagaggagtggatgtc

SEQ ID NO: 191197 - DNA, 1424 bp, Gossypium hirsutum
ttattttgcaccaggtccgtgtggagattgaatcactttttgacggtgttgatttctccgagccactgaccagagctcgctttgaggagttgaacattgtcctgctcagaaagaccatgggacctgtgttgaaggcgatggaagatgctggtttgctgatgagccaaattgatgagatcgttcttgttggtggaagcactagaattccaaaggttcaacaactcctcaaggactactttgatggaaaggagcccaacaagggtgttaacccagatgaagctgttgcttatggtgctgcagtacaaggaggcatcctgagtggagagggtggtgatgaaacgaaagatattcttctccttgatgtggctccacttacccttggcattgagactgttggtggagtaatgaccaagttgattcctagaaacactgttatcccaaccaagaagtcacaagttttcaccacttatcaggaccagcagactaccgtctccattcaggtctttgaaggtgaaaggagtctcacaaaagattgtaggttgttgggaaaatttgatcttactggaattcctccagccccaagaggaacccctcaaatcgaagttacatttgaggttgatgcaaatggtatcttaaacgtcaaggccgaagacaaaggcacaggtaaatcagagaagatcacaatcaccaacgacaagggtcgtttgagccaggaggagattgagagaatggttcgtgaggccgaagaattcgcagaggaggacaagaaggtgaaggaaaagattgatgctcgcaacagcctggagacctatgtctacaacatgaaaaaccagattaatgataaggataagctcgctgacaagcttgaatccgatgagaaggagaaagttgaaaccgcagtgaaagaggcacttgagtggcttgatgacaaccagagtgccgagaaggaagactacgaggagaagctcaaggaggtagaggcagtatgcaacccaatcatcacagcagtgtaccaaagatctggtggagccccaggtggtggatcaactgaagaagatgatgattctcatgatgaactttaaaaaactggtaatgccattttgattgctgaaacaagcaaagaaaagcaaagggtgagaaggatgagagcataggtaggtgagatgaggatatactgtaattgttctccatggtagaagttaaaaaagggagaagtatatccccctttgttcggatgttatttttgggtgaatgaatacgttttaacggatattattttttttttgttttcatgactctctcccctgcaacttgtgatctcttttatctatgattgaatctggttctcttgatccaagaaagaaaaattcagtaaatgtccatggtagaaaatgttagtatttcaatttattacgactgctata

SEQ ID NO: 191198 - DNA, 419 bp, Gossypium hirsutum
ttgtttaatttgcggaggaggacaagaagctgggggaaatgattgatgctcgcaatagcctggagacttatgtttacaacatgaaaaaccagattagcgataaggacaagcttgctgacaagcttgaatccgacgagaaggagaaagttgaaacggccgtgaaagaagccctcgagtggctagatgacaaccagaatgccgaaaaggaagattttgaggagaagctcaaggaagttgaggctgtttgcaaccctatcatcacagctgtatatcaaagatccggcggaggtcctggcggtgctgcgtcaaatgaagaagaggatgattcacatgatgaactctaaaacaaaaatcttcgatggctactgccactgaaaagtgattgagtttattagagttaggtgtaatgaggatactgg

SEQ ID NO: 191199 - DNA, 553 bp, Gossypium hirsutum
  unsure (1)..(553): unsure at all n locations
tttacgcgttcgcccacgcgtccgcccacgcgtccggaaagttgaaaccgtagtgaaagaggcacttgagtggcttgatgacaaccagagtaccgagaaggaagactacgaggagaagctcaaggaggtagaggcagtatgcaacccaatcatcacagctgtgtaccaaagatctggtggagccccaggtggtggatcaactgaagaagatgatgattctcatgatgaactttaaaaaactggtaatgccattttgattgctgaaacaagcaaagcaaagcaaagggtgagaaggatgagagcataggtaggtgagatgaggatatactggaattgttctccatggtagaagttaaaaaagggagaagtatatccccctttggtcggatgttatttttgggtgaatgaatacgttttaacggatattattttttttgttttaaaaaaaaatatatattataaaaatatatattattatttaacnnnnnnnnnnnnnnnnnnnnnnnnnnnnnnnnnnnnnnnnnnnnnnnnnnnnnnnnnnnnnnnnnnnnnn

SEQ ID NO: 191200 - DNA, 639 bp, Gossypium hirsutum
cccacgcgtccgggacaagaaggtgaaggaaaggattgatggtcgcaacagcctggagacctatatctacaacatgaaaaaccagattaatgataaggataagctcgctgacaagcttgaatctgatgagaaggagaaagttgaaaccgcagtgaaagaggcacttgagtggcttgatgacaaccagagtgccgagaaggaagactacgaggagaagctcaaggaggtagaggcagtatgcaacccaatcatcacagctgtgtaccaaagatctggtggagatagatgtattagaaaataacatggaagacagggaacaaaaggaagattcgaaggcagctgatgcaaatcatccacaagttgaatgtagcaatcgccgtggcagaagcagtaccaacctgagtgattcttggaaggaggtatctgaagggggccgactggcttttcaagctctcttctccagagaagtactaccacaaagcttttctcctcctcatgacagaaagaataaggagaagcaaaagggaagtgtaggtgcagatgagcaaaatccagatcagaataatggagagacatcaattttacacttctccagcgaggcatgccaatcttgttctgaccatcaaggagtcgagaaaa

SEQ ID NO: 191201 - DNA, 788 bp, Gossypium hirsutum
cgggcgggccagccgtccgaccacgcgtcccattcatttcaatggctgcttttgcttcttcttcgtcctcctctctcctcttctcatctccacctaccaagttcccttcaccttctctatatcctcctctacgcttgtctcttcccacttcttcttttctctcttcttctctttcactttctccttccttccatgcctaccccaccagctctagacgatactctgcttcttctttcactatcagggcctctgctgcagagaagaagaaggtccttatagttaatacaaacagtggcggccatgcagttatcggtttctactttgccaaagagctgctgggttctggccatgaggttaccatcttcactgttggagaagagggctctgataaaatgaagaagccccccttcaacagattctctgaaattacgagtgctggagggaagacggtgtggggagaccctgcagatgttggcaaggttgttgcaggggcaacctttgatgtggtgttggataacaatggcaaggacttggacactgtcaggccggtggtagattgggcaaagagctctggagtgaagcaattcttgttcatcagtagtgcaggaatctataagccaaccgacgagcctcctcatgttgaaggggatgttgttaaagctgatgctggccatgttggagtcgagaaatatgttgcagaagttttcagtagttgggctgtattccggccacaatacatgattggatccggtaacaacaaagactgcgaggagtggttctttgatcga

SEQ ID NO: 191202 - DNA, 448 bp, Gossypium hirsutum
caatgaagattaggatgatctagaagatgattcagaacggtttaatgaaaaccggtcctcaggaatgtgaataatattttctatcaaccaagaggttttttagtgcaaaaagattggtggcaatatcttgctatactatgaggctttacttgtttgtgaagttggctacttggtttaatggcccacacttttccaactttcatcagtacgaggagagcacctatacaagtttcatcagtagaggagagcacctatacaagtttctttccttctttctatctaaaataatgtataaacatcaaatattatatcaatagctattatcacagtcattcattatatgagcttgaatttggaatctcaaattttttggcgcttttctaattgaattgatgttattaatatggataaatgacaatagcctggaatctgtatcttgcttctttgc

SEQ ID NO: 191203 - DNA, 633 bp, Gossypium hirsutum
cccacgcgtccgtgcacgaattatgaatgccatacttgtactgcctgagctggatgcaggctccttttggcatgatgaaagtggtttccaaggtatctatgatgttgagcattttatccagacattgaagtatgatgtacaaattgtggaaagcatacctgaaatccgacaaaatggcaaaaccaagaagataaaagggtatcagcttcgccccccgagggatgctcctatcgagtggtatacaacagtcgctctcaagaaaatgcaagaacatggtgctatttatctgactcccttttcacatcgtcttgctgaagaaattgacaatcccgagtatcaacggttgaggtgtagagttaactatcatgctttgaggttcaagccaaatattatgcagttaagtgagtcaatagttgataaactccgggcacagggtcatttcatgtcgatacatcttcgttttgagatggatatgctggcagtggctgggtgcggtctttttgttatcattttatatctatggtaattcattcacagttgccataggttgtctaggctatgcattcattttgcttggggctttgtgcctgaatagccttagctgtaacattaagaaatataaaatctttcatc

SEQ ID NO: 191204 - DNA, 605 bp, Gossypium hirsutum
ctgctattagcaattaaagtttcaagcttaaaaatgggtatggtatggtcctgactgcataagctactgtccctagcattggtatgtttcgcgccagaagtatttgtgctcgattctcaacccatttcaagacaagacccttctgcagcagcatcaaagatggcaagaacaagaagaagaacaacatcgacattgttgatggcaagattgaatcaaatgtgagcactttcaatgagtcgtatcgtcagcttgacaatcttgacttcttgactgctgctaagatcctcttcactcatcctccaaagaaaaagaaatttgggctagatttccatttggtgcagctcttctttgcgtgcatgccttcattggctctgtacttggtagctcaatatgctcgctatgaaatgaggaaaatggaagcggagctagaggagaaaaagaagcacgatgaagaagaagaaatgaaaaggaagcaagaagaagaggagaaagataaagaggtgtaccaaattgcgcctaatccagagcttttcgaggtaaaaaggagactaggtaagctagaggaggcagtaaaggaaatcgctgctgagtcaaagaaacaatcg

SEQ ID NO: 191205 - DNA, 408 bp, Gossypium hirsutum
cagcgaggaagagtttaagtacttgcttgttcagcatagacagccggttgagcctgagcacatgtcgtttcgatcgagcgaggatgatggtgttgacgtgggatcgatggtttcgttcggggatgagtcttttgaggagtcagcacgtatggatagtgtcagccgaacatcagaggagtgtatcatcgatttggttcatcctgatgtgattcatgacctcaaattcattgccaattcaatgttcatgtcgaattatgatcatgagtgtcgccaagcgtatgtcatagttcgaaaggatgcattggatgagtgccttttcgatctggagatcgagaaatttagcattgaagatgtgctgaagatgaagtggggtacctttgattcgaaaatcaagagatgggttcgagc

SEQ ID NO: 191206 - DNA, 685 bp, Gossypium hirsutum
ttctcttcgtccgcttggtcttaccttagtctcttcccttcgcatctcaaagcttcccattcacactcggttcttcgtttttgacgagctaactcactcagtcagttactcgttctctctttggctcactcgctcgatctctctctagatttttccgattacaaatggaggatttcgatatcccggcggcggaagacatgatgaacgaagatatggatcttcccgacgacagtcccattctgaaagtcggagaagagaaggagatcggaaatcaaggcttgaagaagaagcttgttaaggaaggtgaaggttgggagtatcctgaaatcggagacgaagttgaagttcattataccggggacgttgctggatggaacacagttcgattcaagccgtgatagaggcactccttttaagttcactctcggtcaaggacaagttattaaaggatgggatgaaggtattaacacaatgaacaaaggtgaaaatgccatctttaccattccccctgcacttgcgtatggcgagtctggttcaccaccaaccattctccctaatgcaaccctccaatttgatgtcgaattgttatcttggacaagtgtccaggatatttgccaacatggtgggttttttacaaagatacctattgaaggtgacaaatgggacaatccctaggaccttgatt

SEQ ID NO: 191207 - DNA, 441 bp, Gossypium hirsutum
gcatccttggttaggttccgtgagaaaaggaaagagagatgttttgacaagaaaattaggtatacagtacggaaagaggttgcacagaggatgcaccgtaaaaatgggcagtttgcatctttaaaggaaagtactagtacttcaagctgggattcctcgcaaactgaccttcaagatggtactcctcgtccaaaaactgttgtccggagatgtcagcattgtggtgttagtgaaaataatactccagcaatgcgtcgtggtccagctggtccaaggactttatgtaatgcatgtgggcttatgtgggccaattagggaacgctgagagatcttagtaaaggaggaaggagtatttccatggaccaaaatgaacctgaaacaaaaattgatgttaagccttcaattatggaagggaacttccctggtaaccaggatgaacat

SEQ ID NO: 191208 - DNA, 418 bp, Gossypium hirsutum
gtgtctgcaaggttttggcaggaaactaatagccggtgagggcggttgcaggacccaggttcacctttgtcttcgagcccgggttctagaattggttcaccagctaagtttagtcaaccaaaaagggtttcttgtgatggtgcagtggcttctcctattaggggttgtataagacctgcttctcctagtaagctttggacatcttcggcttcatctccaactccatcgaggggactaagtcctggtcgggttagaaatgcagatggtggtaaagagatgattgggaatgctgttaataccccttcaattctcagctgtcccggtgatattcggagaggaaagacgggagaggatctaattttcgatgctcatgcattgaaggggccattttttataacggctacttgcaatggagatt

SEQ ID NO: 191209 - DNA, 697 bp, Gossypium hirsutum
tttagaagaaaaaaaatggagagaaaatctcaagccaaaccaattctcttcttctttgttttagtttcggcactaatcgaaacttcctacgccggtgacatcgccatctattggggccaaaatggtaacgagggtaccctgagtgatacatgtgccaccggcagatataaatacgttaacataggtttccttaacaccttcggcaatggtgccactcctggactcaacttggccggtcactgtaatccagcatccaacggttgcacctctcttagcggtgaaataaaaagttgtcaaaaccaaggaatcaaggtcatgctctcccttggaggtggcgcgggaagctactcactcgcttctcaagaagacgccaaaagcgtagctgattatctatggaacaacttcttgggcggtacctcgtcttctcgtccgttgggtgatgctgtgttggacggaattgattttgatattgaggctgggtcaggtcaatattgggatgaccttgctcgttctttatcagcttatagtagccaaggaagaaaggtgtatttaacagcagctcctcagtgtccatttcctgatgctcacttgggaactgccattaatacaggtctctttgactacgtatggattcagttttataacaatcccctggctcaatgccaatacgcttcgggcaacaccaaagacattttga

SEQ ID NO: 191210 - DNA, 1527 bp, Gossypium hirsutum
gttgaggatgccggcaccccatctgccggccagcagaaaaatgcttcttctgtctcaaaatttgatgaaaaacatgttgcctttgtaaagttctcagagaagcataggaagttgttaaatgcttttatccgccagaatcctggcctccttgagaagtcattttcactcatgctgaaggttccccgctttgtcgattttgataataaacgtgctcacttcaggtccaaaataaagcatcaacaacatgatcatcatcacagtcctctaagaatatcggttagaagagcttacatacttgaggattcttataaccaactacgtttgcgatcaactcaagatttgaaggggaggttgactgttcacttccaaggagaggaaagtattgatgctggcgggcttacaagggaatggtatcagctgttgtccaaagttatatttgacaaaggagcattgcttttcactacagtggggaatgagtcaacattccagcctaaccccaactcagtctaccaaactgaacatctttcatacttcaaatttgttggacgagttgtgggcaaagcactttttgatgggcaactcttggatgtccacttcactcgatctttctacaagcatatattggatgttaaagttacttaccatgacattgaagcgattgaccctgattacttcaaaaacctgaagtggatgcttgagaatgatattagtgatgtcctagaccttacttttagcattgatgctgacgaggagaagttgatattgtatgaaaggacacaggtgactgactatgagctgattcccggtgggcggaacattaaagttactgaggagaataaacaccaatatgttgatttagttgctgagcatcgtttgacaactgctattcgtccacaaatcaatgcatttttggaaggattcaatgaattaattcccagggaattaatatctatttttaatgacaaggagctggagttactgataagtggtctaccagaaatagatatggatgatatgagggcaaatacggagtactctggttttagtgctgcatcacctgttatacagtggttttgggatgttgtccaagggttcagtaaggaggataaagctcggcttcttcagtttgtgactggtacctcaaaggtgcctttagaaggttttagtgcacttcaaggaatttcaggttcacagaagttccagatacacaaagcatatggcagccctgatcacttgccttctgctcatacctgtttcaatcaattggatttacccgagtatccatcgaaggaacatctaaaaaagaggttgttgcttgcaattcacgaaaccaatgaaaggttcggatttggttaaggttcaaggtggtaatcaaacttatggtgtaaataaagatatataaatgcacaactgaaacgggattggtatcttgttatggggggtataagaagacttggaaccgacttctgaagtgatacatcatgtttatatacttactgtacagtcgcaaattgactatttagaagt

SEQ ID NO: 191211 - DNA, 781 bp, Gossypium hirsutum
ctctctctctctgctacgccgcctttgcttccctttctctgaataaaaaatcccaaactgaccaaaaaaaaacagagcatttagttttttctttcaattaagagttcaagctggcgatcgaaaatcgagaatccattgtccgtgaaatcaagcccaagaacagaagaatcatgggtgctggtgggcctgatgaagaagacaacaggtggccgccatggttgaaacctttgttaagggaacatttctttgttcaatgcaagcttcatgttgattctcacaagagtgaatgcaatatgtactgcttagattgcatgaatggcgctctctgctctttctgcttagcttatcacaaggatcatcgttatatccagataaggaggtcttcataccatgatgtgataagggtatctgagatacaaaaatacctagacatatctggagtccaaacttatgttatcaacagtgctaaggttgttttcatcaatgaaaggcctcaacccaggccaggaaaaggtgttaccaacacttgtgaggtctgtgatcgcagccttgtcgattccttccgtttctgctctcttggctgcaagattgttggaacatcaaagaatttccacaagaagaaaaggcagccaggtatgaacatggcagcattagactctgaggattcatacagtagcagttgccatgagaagattaacaacaaagtgcagagctttagaccatcaacaccacctccaactcgaactgccaaacgaagaaaagggattccccacagagcacc

SEQ ID NO: 191212 - DNA, 430 bp, Gossypium hirsutum
ctctgctcgccgccttcacttctctctctctccctctctcgctctaatctcactcagcctgctaaaacagagcattaccctttcgagttcaagacttcaagctggcgatcgaaaatcaagaatccactgtccgtgaaattaagcctaagaacagaagaatcatgggtgctggtggacctgatgaagaagacaataggtggccgccatggttgaaacctttattaggagaacatttcttcgttcaatgcaagcttcatgctgattctcacaagagtgaatgcaatatgtactgcttagattgtatgaatggcgctctctgctctctctgccttgctcatcacaaggatcatcgctatattcagattaggaggtcctcataccatgatgtgacaagggtatctgagatacagaaatacctggatatttctgg

SEQ ID NO: 191213 - DNA, 450 bp, Gossypium hirsutum
gaaatttcttacttaaaaccaaaaaacaaaaacagagcatccactctttttttcttgagtttcctttgtaaattagttcaagctggcgatcgaaaataaagaaaccactgttcgttaaatcaagcccaagaacagaaggataatgggagctggtgggcctgatgaagaagataacaggtggccgccatggttgaaacctttgctgaaagaacagttctttgttcagtgtaaacatcatgttgattttcacaagagtgaatgcaatatgttctgcttggattgcgttaatggcgctctctgttctttctgcttagcttatcacaaggatcatcgttatatccagataaggaggtcttcataccatgatgtgataagagtatctgagatacaaaaatacctagacatatctggagtccaaacttatataatcaacagtgctaagatcgtttt

SEQ ID NO: 191214 - DNA, 450 bp, Gossypium hirsutum
gcggaccaagccgtccggttttggttctttctgttttgccttctctgctttgctctgaaacgttaaaacagactcgttaccctttgagttttcccctgttgttttctttcaattacttcaagctggcgatcgataatcaagaacccactgtccgtgaaatcaagcccaagaacagaagaatcatgggagctggtgggcctgatgaagaagacaacaggtggcctccatggctgaaacctttgttaagagagcatttctttgttcaatgcaagcttcatgctgattctcacaagagcgaatgcaatatgtactgcttagattgcatgaacggcgctctctgttctttctgcttagcttatcacaaggatcatcgttacattcagattaggaggtcttcataccatgatgtgataagggtatctgagatacagaaatacctggacatatctg

SEQ ID NO: 191215 - DNA, 432 bp, Gossypium hirsutum
atgcacagaaagattgcatccaaagaccacaagctggtgtattgggtggctggtgctttatctgctctttctgtattgctggtgaaaaaatctagacgcagcgaacttgctctatatgttcttccacgagccacagaatcgttgtggtatatttcagtaaatcggcaccttcttcctgatgttaaaaattctgaggtggcgttattttgtgcatgcatgggaggaatcatgtactacctagaatatgaaccagatagcatagcaccattccttaagggtcttatccgccggttcctatctagcagaataagcaaccccggcagttcatttgatcggacagcttcctacacctacttgcagactcttgatgccatgaagaagccaaaaccagaggataatccacagctagatacttcagctcctaaacaatac

SEQ ID NO: 191216 - DNA, 424 bp, Gossypium hirsutum
gggagttggtgagactgcccaagggaaagaaggcaatggggggcaaatgggtatatgcggaggaagaatttcctggtaaaaatgaaattcgatacaaggctagattggtagcaaagggttacgctcagaaagaaggaatagactacaatgaactgttttctccagttgtgaagcattcgtctattcggattttgctagccttggttgcgcaatatgatcttgaactagttcagcttgatgtgaagaccgcgtttttacacggtgatttggaagatgaaatctatatgactcagccagatggattcaaggttgctggaaaagaaaattgagtttgcaaactgacaaagtcgctttatggattgaagcaatctccgaggcagtggtacaagcgatttgatcagttcatgaaagggcaaaggtacac

SEQ ID NO: 191217 - DNA, 627 bp, Gossypium hirsutum
  unsure (1)..(627): unsure at all n locations
tttctctccgattattccgtctgaacccttatatctttctgtgtgtaaaacaaagtttgtaacttcctatctcagcaatctcgttctactcttgaaccatgtcggctgctgaatcagctactgcaattcacagaaaccaagttgatctcttggattttattgattggtctggagttgaatgccttaaccaaagctccagtcaccctttgcccaatgctctcaaacagggttatagagaagatgaaggcttgaacctagagagcgatgccgatgagcaacttctgatttatatccctttcactcaagttattaaactacattcctttgttgtcatgggatccgaagaggatggtccaaagacagtgaaactttttgcaaacagggagcatatggggtttagtaatgtcagtgacttccctccaagtgacactgttgttttatcccangataatctaaagggaaaacctgtaatcgtgaagtatgtcaagtttcaaaatgtccgtagcttgacaatatttattgaagacaatcagtcaggtttggaaattacgaaggttcanaaaattgctttgtatggatcaacggtggaaacgaccgacatngaagggttgaanaaaattgangatc

SEQ ID NO: 191218 - DNA, 485 bp, Gossypium hirsutum
ccgctctagaacagtggatccccagtggctgcggcattacgaatcgggggcgagggttcacgctaacatatgggatagacttcacagaaacttgggcacctgtggcaaagcttaacactattcgagtactcctaagtttggctgtaaattgcgattggaaattacaccaacttgatgtaaaaaacgcatttcttaatggcaagcttgaggaagaagtctatatgcaattgccacctggctcaaagtctattgaaggtagcaacaaggtttgcaagctcaacaagtctctatacgggttaaaacaatcacccagagcttggttcgagaggttcactaaagtcattcttcaaaatggctacaagcagtcccttgccgatcatacgcttttcatcaaggtaacttctacaaataagaaagctatcctaattgtgtatgtggatgacatcattcttactggagatgatgaggaagagattagcaatttg

SEQ ID NO: 191219 - DNA, 449 bp, Gossypium hirsutum
tttctgttgggaggtaaaaatgagtaatcaatccaggtttttttgtgatatgtggcaattatatagaagttgcactctggctttgttttccctccatccagtttgacactgcttaggttgcaaaactgttggtgtgaaccacgattgcatgaggtttatgtaaaaagaaagtgacttttcctatggttctcagctcaggactgatattcttcgaccaccccacgagttcgaactaatgcttagttgttaggaaacttgtacttgttggcttaaacgcttagcatagggcctcatatatgtaaacgaacaatttattctctgttaatgttgatgttggaggggaagtctggggttaacatgagatccatggttctggtagtcttatttgttaattatcacattcttatattcctgcaggacatcacatggttgaaatctattacaaactt

SEQ ID NO: 191220 - DNA, 442 bp, Gossypium hirsutum
cacacttcaactctgtctccagatctctgtctcccccttcgctttctctgctgaaactcaaataaaaataaattcgtgaacaccatgtcagtctgctcgtcttcttcttcttcttcttcaacaggtaaagcttggatagttcacagtattttagctggcacagcaattgcggtagccattggtgcccgtgcctatctgggtcgggctaggaagtttcggacacgggtcgtgggaattatacccgccagatatgcatcttctcggttcgaaagcaagcctttggttcatatccttgggaaacccatgatccagaggacatgggagaggtcaaaactggcgaccacactgaaccatctagttgtggcaacagatgatgaaaagatagcagaatgctgtcgaggatttggcgctgatgtgatcatgacatcagagtcttgtcaaa

SEQ ID NO: 191221 - DNA, 661 bp, Gossypium hirsutum
cccactcgtccgcctaacctcacctcacctgtatcattctcactcattcactccttcacagttgaaaaaccctttaattttaagaaaggatattttggttatatactgagaaatccaacttcttttgtatctttatccttttggtacttcaattatcaaaagaaagaaaagcatcaacaacaacaaaaaaaagcccatacacttaagtgaaaaaccagacaagagagaaaacaagaaaaatgggtgttctggatcatgtttcagatctgtttgactgttctcacagttccaagcacaagaaacgtaagcagttgcagacggtggaaatcaaggtgaaaatggactgcgaaggatgcgaacggaaagtgaaaaaatcagtggaagggatgaaaggggtgacacaagtggacgtggagcggaaggccagcaagttgacggtcgtcggatatgtggacccgaagaaggtcgtggcacgagtggcgcatcggacggggaagaaggtggagctatggccctatgtgccgtacgacgtggtggctcacccatacgcccccggggtttacgataagaaggctccggctgggtacgtccgcaacgccgaggacccgcaagtgtcgcatctcgcacgtgctagctccactgaagttaggtacaccacagc

SEQ ID NO: 191222 - DNA, 471 bp, Gossypium hirsutum
gtgaaaaagagaggtgttttttctttttgaaatttgagattacaaaaacacgaatgagctgagcttctgattattgtcggaagcaagtggagttcagctctctttgaagactcgaatatcgcaataaactgtgaagatttggggatcaaagctcaaagggtaaaaagtacctccgttagatctttaccgtcaaacgagagaattaaaaaaaaaatgtcggttcaagagtacctcgacaagcatatgctctctcgcaaaatcgaagacgccgtcaatgccgctgttcgagctaaaactccggatcccgtcctcttcatctctaatcatatgaaaaaagcggtttcttcagtgataacgaaggtaaaagctcggcagattctcgatagtagaaggattcctactgttgaagttgagttgtacactaacaaaggggtgttccgtgcttctgttccttgcggcgactctactgga

SEQ ID NO: 191223 - DNA, 484 bp, Gossypium hirsutum
ccatggggccgcacttaataacagcagtagccaaattcgatctcttatcatcaacccctagtttctcccctttaattgtaggcttgatctgccctttcgcactcaaatattgcatcaatttaagggttggtgttgctcggctttacattgatttaatccatgcaggcaggctcttcttttttcagttgaatcggatagtccttgaagctgatcatcaaccagcagcagctccggccggtaatggtagcagatggcaacgagctctccggttagtttgccggaggataataacccatgcgagaaggtcgccgccagcgttagaattcgacgtggctagcttccatactctcaccatgctttcactgtaagcactcagattctatttcagggtgagaaacataagaatcttatatgatccgaaaaaccagaaatttagttttcatatgagtgtatatatctaggtttcaaatctctttaaaggttt

SEQ ID NO: 191224 - DNA, 516 bp, Gossypium hirsutum
  unsure (1)..(516): unsure at all n locations
tctctttcccaattctgggatttttaaagaaaatacagttgcaggtgttgggtaagttttgcaggcttcacgattccactagaaagggggagaaacagttgaagaaaattcccctttgtcgtataaattggagaaacaaacaaataaggggccttatatttgtggacataattagtttggtcctctaatgcatatgcgggagtgatgcttctgcttggatttggtgttatggagaggcactgtcgctgttataaattaagttataaacactattatgtgcatgaaattattgaaaggatgtaatttgtcttattgtagcagtggacattgaatgagagtgaagagtatggcatgtgcttaggtgcagcctgcacgtctccttttgcttttactagcctttaccatgctcccaactaatgggggttgacatgatattccgattcataataataataatattattgaataacctccnnnnnnnnnnnnnnnnnnnnnnnnnnnnnnnnnnnnnnnnnn

SEQ ID NO: 191225 - DNA, 642 bp, Gossypium hirsutum
cgccaacattggggttttattctctccttttttttaaaaaaaatttcagtatggaagaatctgttaagctcaggagggatagcgccatggatgatccatctttcaagctttcatgcatgtattttatttgatcctcatatagcgctatccatcctgagtttcatcggttcttcttgcttgctgtcgctccgttagctgaaaaaggaacacacaaaaatcttgtgggttccacgaatccactagaaagggggagaaagtgttgaagaaaattcccctttgttgtataaattggagaaacaaacaaattaggggccttatatttgtggacataattagtttggtcctctaatgcacatgcggaaatgatgcttctgcttgtatttggtgttacggagaggcactgtcgctgctataaattaagtaataaacactcaagctaaaaataaagaaacaagaaatgaacacaaatacaagaacaaaaaaaataaagggtgaaagaaacatgcaagatattacagagctttattcaaactaaaatgaatcaaccgtgttgagggataacccggaccgaacaaagctagaaggaaaggctgttgcggggcgctcttaacttacttacttttgaaggtagggaccgcgttg

SEQ ID NO: 191226 - DNA, 404 bp, Gossypium hirsutum
agggaatagggttaaagcagttgtgataggtcttggtgcgggcttacttcctatgtttcttcatggatgtatgcaatctatgcaaattgagggagtggagctagatcctgttatgcttaaccttgcaagagactattttggttttactgaagataaacgaatgaaggtacatattgctgatggcatccagtttgtccgggactacagaaacttattttcagctggcaatgaagtgctcctttcttccaacggaagttgcaaactttcagatgctgaaagcagaagtaccgctattgacataattattggtgatgtggactcttctgactcaagctctggactgagatgtcctgctcctgattttgtggaagattcttttcttcaaaacgtaaaagatactcttt

SEQ ID NO: 191227 - DNA, 722 bp, Gossypium hirsutum
cttttggtagcgtgcgtgtcttctactctcgctctctcttcgcgttcccttttccatccagctaagtattctcaggtttcttcttccttcctagcttgcttgcttggctccgtttttttattaaaaaattcttcgtatagatctggtttagatctagggtttcttttggttctttgttactgctcggctgtttatgtgcatgtccgatctgcagttcgtaaaaccgtttcaatgattttagattttctatgaactctatcctcatgcgtcgaatccgtattcttcactcgttctcggtcgtcttcctttactggttctacgttttctcatgaattagcatctctttgttcatcgatcttcttatcttgatctaacccgactattaaaaacttcaaatctctaattgccattcaatttgttaattccaatttaaatactcttcccggatataaaaaaacttttcttctatggctgctgtgcaaaggccagcgagttcttctgattccgacgagaggaaaaggaagagaatgctgtcgaaccgtgaatccgcgaggcggtcgcgtattatgaagcagaagcagctcgaggatttggttaatgaagtgagcgcattgcagaaagataacagccagctctccgaaaagatcaacgtcacaactcagcgctacgccgtgatggaatgtgccaacaacgtgttgagagctcatgcaatggaattgacc

SEQ ID NO: 191228 - DNA, 1041 bp, Gossypium hirsutum
  unsure (1)..(1041): unsure at all n locations
ctcaacttaaagaaaaagtgaagatgaccagatgggtaagtttaattgtatccagaaactgaaaaatcagcagcagcaggcaagtgcgagtagatcaatagataaagcatcaaaaggaacaaattcaagcaatcactcaacaaccatgtcgattgggaattcaagcaacagtgtttcaaagctatctgcgaaggctaaatatgggtttattgatgataacttctcaacccttcaccaggttacagcagcattaagaggttctggtcttgaatcatctaatctcataatcggcatcgatttcaccaaaagcaatgaatggacaggccaagtatcattcaataaccggagcctacatgcaattggtgctgcaccaaatccatatgagaaagccatctccataattgggaaaactctagctccattcgatgacgacaatttgataccgtgcttaggttttggtgatgcaactactcatgatgatgaagtgtttagctttcacagtgatcactcatcttgccatggttttggagaagttttggattgttacaagaagatagtcccaaacttgagattatctgggccaacatcatatgcacctgtaattgatgctgccattgacatagtggaaagcagtggtggccaattccatggtctggttatccangcagatggccaggtcaccacgaagtgttaatacaagtaacaatgaaatgagtccacaggaagagaagacaatcaatttcattggtaatgcaagctcacacccacttgcgattgtactgggtntggtggcgatggaccnntggaagantgaagaaattgatgatagatccctgacgtgacttcgacaatttagtcgttacttaccgagtaatgcgaaaactcagtccgatgaaagaactggtttgacttgtgtattatgaaacgttcaatcaggtggttgactggttatgccccaactgaaacaaagaggccctcctccgttctcatgtctgtttggatttgtctctatattattctgtgtgtattatgcttatgaag

SEQ ID NO: 191229 - DNA, 698 bp, Gossypium hirsutum
  unsure (1)..(698): unsure at all n locations
ggaaccaccttcgtaagcaatggcttcgtcaagtgtcgtgactgctcaaatatcaaatcaacttggaaccaccgattggaagaagtccatcccttcactctcccttggtaacttaaacttgaataaaaatctagctggtaagcagtttttatcattgtcagctcctcaaaaatctgggctgaactataaatccctacgtgtaaatggtctgttcggaggaaaaaaggaaaatggtgagaagggtgatgatgcaccttccaaggcaggaattcttgggaacatgcaaaacctctatgagacagtaaagaaagcacaaatggttgtccaggttgaggctgtgcgagtgcaaaaggaacttgccgcagcagagttcgatggctactgtgaaggtgagctgattaaggcaactttatctggaaatcagcaacctgtacgcatagagatcactgaggcagcaatggaattgggtgcagaaaagctatctcttttagttaatgaagcatacaaggatgcacaccaaaaaagtgtccaggccatgaaggaaagaatgagttgaccttgcccaaagtttaggtttgccaccaggtctcagtgaagggattaaaacaactatgatctctccactaacaccctgaatggaactttctgaaggaaatgatgccacnattgatctccttgaactggcacccagaattacc

SEQ ID NO: 191230 - DNA, 416 bp, Gossypium hirsutum
gaactgcttaatatatggagaaatcccagagtatattggagatgtgaagaaattgaaaaccctggatctcagctataataacttgaccggagaaattcctggatcattccacaaattgacaaaagcagatttcttgtatttgaccggaaatcagctcactggttcagtgcctcagtggatcgtggaaagaaatacaaacgcggatttgtcttacaataatttcacatgggagcctgcaagtccaatagaatgtcctcgagggagtgtgaacttggttgagagctactcaacatcagtagataaattgctttcctatcttggtgcacaagtagggttccttcatgtctaaggcacaagttcccatgttctgtctcatctaaacaatataagtactcattgcacatcaattgtggagg

SEQ ID NO: 191231 - DNA, 1580 bp, Gossypium hirsutum
  unsure (1)..(1580): unsure at all n locations
aatacccgactcactatatgggaaagctggtnacgcnnctgcaggtacccgtgtccggtaattctccgtggttcgatcccacgtccgtccgcttcttgcacttcacccttttcttcccttgtgttaagacgctaatattagattcaaatatcgattagcaacgattgacaatccatataccttttgtttacccagtttgtaaaatcaatctttgaaacccatattcccatttttttattgaaagggaattgaattggagtcggagatggagaacaaccagcaatccttttggcaattcagtgatcaacttagggtccaaaattccaacttggcgaacctttcgctcaacgattcgatatggagcagtggttacgtttcgaagaggcctgacgagaggaggaattttgatatcagagtaggcggcgaactgaactccgtcaacagcttgaagccgaaggtcaccgatttcaactctttcagcaacgatgggtggaaaatcggagccaccagcaacgccaacatcgggttcggtccgattggtccgattggatctcagaaaaacgttggggtcaacggtgggttcaacaaagggatctattccaaaccanggaacaacaacaataacttcaatgttaatttgaaagggaacaagaacaaaggagaagataatcatggaaccaagagtgggaagaagaacagcaacaagaaaaacaataacaacaacgacaataacaacgaaaacaaggatgggaaaagtgctgctgataaaaggtttaagacactgccaccatctgaatcattgccgagaaatgaaactgtcggcggctatatttttgtctgcaacaacgataccatggaggagaatctcagaagacagctctttggtttgcctccacgttaccgtgattcagtccgggcaataactccgggcctgcctctgttcctctacaactactccacccaccaactccatggtgtttttgaggctgcaagctttggtggaacaaacattgacccaactgcctgggaggacaagaaatgccctggcgaatctcgattccctgctcaggttcgcgttattacaaggaaaatctgcgagccacttgaagaagattcatttaggccaattctccatcactacgatggtccaaaattccgccttgaactcaacatcccagaggcgctttccctgttggatatatttgctgatcaacaagattcttgtatttcttaagcaacaagatgcttgagcaaaacttaaacactaggcatatcgatacaaatacagatacacacagagataatgaagagaagagtttgaagaataagtagagaaaaatagaaattatatttgtgaaagtacctttgttagatgtaaaactgtttttttcacaggctttgctgtgattgtttttcttttcttttctttcttttttactgtttggcttatacataaataatacctgaaactaagtgataaacatcgacttattttgtgatgttacttaatataagtttgagattttgttgtattagaacttgttttcaagctatgaatctaaaactacaattattggtct

SEQ ID NO: 191232 - DNA, 1041 bp, Gossypium hirsutum
cggacgcgtgggtccaaaaatgatgatcggagaatcaatccaaccaaatcccaccatcaaaatccccgtaggggacccattcaacgatccgacggctagctttcactccgttaactttaactacaacaatgcagtcagtagtccttgccccgtcgattacctcgggtctctccaccgttacctaccgtcaaacgactacgagtccgattcgctgagtgatgattcggacttacctgttgatgcattctcatgcgaccatttccggatgtacgagttcaaggtgaggaggtgtgctcgtggaaggtcacatgactggactgagtgtccgtacgctcaccctggtgagaaggcccgaagaagggacccgagaaagttccattactctggaactgcttgccccgattttcgcaagggaagctgtaagaaaggcgattcatgtgaattcgctcacggcgtttttgagtgttggctccaccctgctcgttaccgtactcagccttgcaaagacggtaccagttgtcaaagaagggtttgttttttcgctcacacaccggagcagcttcgcgtgttgccgcagcagagtccgagaggaaatgggtccgcttcagctgatttggattatgttggttcgcccatgcgccatcgtctagagtttggttcttcaccaacttctattctggcttcacctccaatatccccaccttctgagtcacctcctatgtcacccagtggctcatttaactcggagagtgaacttgctgcttctatgcgaagtttgcagctgggtaagtctaaaatgaatggtgcttgttcctggggcctgcaaatgggatcgggtttcagttctccacgtggttccacactccgacccggtttttgcagctctccttcaactccaactcgtacgccgactcggtctagcctcggtcagtttgacatctgggaattcaacgctgtccaagaggaacctgcaatggaaagagtggagtctgggagaaacctgagggcaaggatgtacgcaaaactgagcaaagaaaattc

SEQ ID NO: 191233 - DNA, 440 bp, Gossypium hirsutum
cttatgcgtgatttatgcttgtcaaaggccaaacaacaaaattttatgcatattattggttctctcccatcttctacgtattctagaccaacacctgtaagcaagatccgtagatgtgctatccatttggatcaaaacaaccaagatcctggtttgccagaataccagaaaaatcctaaccttaggtccttattctttttccgtccaaaaaaacatagaatacataatgagcgccttttgaaatctgtgtttgacaaattcaaattgcttaaagtgttggatcttgaaggaattaaaggacttgaggagaaattacctgaagatataggatttcttgttcagatgagatttttaagtctgaagaaaacacgtataagagaattgccgacatctttggtcaatctgattggcttgcagactctgaacttgcaaacaattga

SEQ ID NO: 191234 - DNA, 910 bp, Gossypium hirsutum
ttcattcgtccgaaaaattcaaaatagtttcaaaaaattttctttccatttctcctttttggtggctgcttttttccccttattttctctccataagaagtctttttctcttcattctcccaatatcttcatttgaagcagctatgtcttttagaggaggaaatgcatcatcgggcatgggagtggctgaacacagcaaaagcacgtacctggaactgcagagaaagaaggtgttccgatatgttatcttcaagattgatgagaagaaaaaggaggtcatagttgaaaagactggaggtccgacagagagctatgatgatttcgcagcctcattgccggagagtgactgccgctatgcagtttatgacttcgattttgtgacttccgagaattgtcagaagagcaagatcttttttattgcgtggtctccttctgtttcgaggatccgttccaagatgctttatgcaacatcaaaggacaggttccgaagggaattggagggcatccattacgaaatccaggcaaccgacccgactgaaatggatcttgaggtgattagggagcgtgcacattaagtgtccgctcccagaattcacatgcttaggaaaacttcctagaggtacctttagggttgttttatggttcaattaaattgcagaattaagtcgagttacccgtctctgacatagtatgtcgttatcattattaaataacgcctgagaaggctgattaggaggaggatcagggttggaacatgggaggaatgttgggactttggacttctcattgccatgatgcttctcaggtgaaaaggagtgtgattattatggatattgactcttattcgtggaatggtatttcaatctcttgtgcttttcatctgaaacttttctaattaattgaaatataa

SEQ ID NO: 191235 - DNA, 584 bp, Gossypium hirsutum
tcttccacgcgtccggcggccgccctttttttttttttttctttaaactacagctgccctcaccttgtggaatttgtgtcttctgaatctatacttgtttcgaacattactttccttaacgcacctgcatataacattcatccagtctattgcagccatgtgcacattcatcacataacggtctatgcttcgccaggatcaccatatactgttggtatagtcccagattcttcggataacatttgcattgaggactgtagcattagtatgggtcatgatgcaattgccctcaaaagtggctgggatgaatatggcattgcttatggcatacctaccgcaaatgtccatatcaggagggtccaacttcagtcattctcaggctcttctcttgccttcggtagtcaaatgtccggtggcatttcggacgttcaagtgcagcagctccacctctatgactcattaactggtattgagtttagaacatcaaagggtagaggtggttatattaaagagattgctatatcagatgttgacatgctgaacattaaaacggcattttgtgccaatgggcattttggatccca

SEQ ID NO: 191236 - DNA, 409 bp, Gossypium hirsutum
ctctctttcttccctccctattttcttcttctgcagagtgggtggctttggaagtgtggattgacaatgtcacaatctgaagaaactcctgtccctgacgctatgcctaccgattcaacctctcacttacggcttcaatctcccgatccggggtctacttcgagtcccgacctctcaccgtatgatcttaatcactccgctgtagaaaccgagcacgaagaaagcagtctccaacagcagctccagaatctcgatttgaaggaggaagaagtgaagactgataggaaagatgacggagagagagaaagcaacaacgatgccgacggaaacgctgctgaagacgaggacggcgagaatgaggaagaaagaaacgataacgagattgatggtgaaaacgtgaagaaaagtg

SEQ ID NO: 191237 - DNA, 543 bp, Gossypium hirsutum
cacctgcatcaatgttgatgaaggttgatcacatcttaaacctatttcgctatgattgccatatatatgtaaaattgcgccgaaagcacatatcttaggaagtgaagcgctgaaaactctgaaaagtttcatagctttttcatctctctaatagcgtacgcttttgtgcccattcgcaatgcatagaattgtattgcaaagagaaatcagaagcagagcttcccacaaggctctttcttggttcagttcttctaatctttttaggtctgttcattctttaccttttgcaactgtggaagccgaagggatatcgggttctcaacctgctgaagtacaaaacttggtgcaaggtaaatggactggatctgcagcgtggaacacacttgtggatcctctgaatggagaaccgttcattaaagttgcagaagttgatggaaatggaattcagccatttgttgagagcttgtccaagtgcccaaaacatggtttacacaatccattcaaatcacccgagagatacttgttatatggagatatatctgc

SEQ ID NO: 191238 - DNA, 447 bp, Gossypium hirsutum
atccatagctcatcaaagcattaattgataactggaaacgtggtgttgagtgctcgactgctagttgccaatggtgaagactgatctgcagaagattcaagttcaaccacaaccatcaaagctaatgaaggcattaacatcacccacaccaccaccaccatcctcatcagcatgcaaaaagaatgaaatataagggtgtaagaatgaggagctggggttcttgggtgtcagagattagggctccaaatcaaaaaacaagaatctggttagggtcttattctacaccagaagctgctgcaagagcctatgatgctgcacttctttgcctcaaaggttcctcagctaatctcaacttcccaatcacatcctcacattacatccctgaccctgacacccctttgtctcccaagtcaatacatagagtggctgctgcagctgctaatagtt

SEQ ID NO: 191239 - DNA, 728 bp, Gossypium hirsutum
gagaggttgtgtttccaagagttcctgatgtattgcaacgactctgtgtttcttgtacacaaatcttcagaggccctggatttgtccctcctgcttctgatgtaaacaagctatgcgatattcttgataagatgaagccagaagatgttgggcttagcaaaagtctgcagttcttcaagccaacgggtgctgtgaatgggactccaagggtcacttatactaccatttaccaatgtgaccagttctcgttgtgcattttctttcttccggaaacggctgttattcctctccataaccatccagagatgactgttttcagcaagcttttactggggaaaatgcatataaaatcatatgattgggtcgagcctaaagactcaataccaccctccaaattgaggttggcaaggttgaaagccaatagcgtgtacacggccccatgcaacacctcggtgttgtatcccacaacaggaggcaatatccatcaattcaccgccgtaacaccttgtgcggtgctcgatgtactcggccctccctattctaaagaagacgatcgcgactgctcctattacaaagatttcccatactcagctttctcaaatgagggagaaactacaagagtgagtgaagaagagagagagggacttggatggctagaagaaattgaagcaccagagaatgcaatgatggatagaattgactgggtcctcaaattatagaaaactact

SEQ ID NO: 191240 - DNA, 496 bp, Gossypium hirsutum
ccctcgcgtccgaaaagctttagatctgaagtaaagtaaaagcccagaaatctgtgcttaaaataagatctgggttgcgacttctgctgctaggtgtatgtcatttagtctggtaaagtgctgtttctagctggtcaagaaggctaggttgaagtggtcgagtaaatggcagtaacggatgcacaaaaccctcttctaggagaaaccacttgtggctctttactgcagaaactgcaggaaatttgggatgaagttggtgaaagtgatgaagagagagacaagatgcttcttcagatagagcaagagtgcttggatgtgtataaaaggaaggttgagcaggctgcaaaatcaagagcagaacttcttgtgaccttgtcagatgccaaactagaactttccacacttgtatcagctcttggagacaaaagtttcattagcattcctgagacgacattgggaacaatcaatgaacaacttgctgctattgcaccagcac

SEQ ID NO: 191241 - DNA, 1333 bp, Gossypium hirsutum
  unsure (1)..(1333): unsure at all n locations
tccacgcgtccgcccacgcgtccggaaaaactcggcaaacgccataattaaagattttgtcgttttgctctcgatctctccgcccaaatcttgtagacgccaagcagataaattttgtgattactcttttctttctcagatcccttcgaaagcgattcttcttcttctttttattctttttaaattgaattgaagttgctgattcgaaatgagtacggccgaccttctcagcatcgagcctttagagctcaagtttccttttgaactgaggaagcagatctcgtgtgctcttcaattgtcgaataaaactgataattatgtagctttcaaggtgaaaacgacaaatccaaagaagtactgcgttcgtcccaatacgggggtcgttttgcctcgatccacatgcgatgttgttgttaccatgcaagcgcaaaaagaggctcctcctgatatgcaatgcagggacaaattcctccttcaaagtgtaaaggtaaatgatggtgcatccgcaaaggatataactgcagaaatgttcaacaaggaagctgggcatgtggttgaagagtgcaaattgaaagtggtttatgtttctccacctcaaccaccttcacctgtacgtgaaggttcanaanataggtctccaccaaaagtttctgcttctgacaatgggcatgcaaatgctgctgagtttgctgcagctgcaaaacaattctctgaggggcttgaagctcaagataaatcttttgaggcaagagctcttataacaaagctgactgcagaaaaaaatagtgcaattcaacaaaataaccagcttcgccaagaactggagctcttgaagcgtccaagcagcaaaagtggcggtggcgtgtcgttcatggttgtcatcctcatcggcttgatcggtataattatgggatatatcatgaaaaaatagtcagaagcaactatctccgacaatcttactgcatatattccctctcctttccttcatctgaacaagtatggtgaaggaaaagggaaggggggaaaaatggtcttgggctggtgcattttattagtggttagttttgtgacattagcgaaaacttgttaaaaggtgggtgtggatttgttagtcgcacttttcattaacatgcattctttctataacttaaaccagtgaatttatcatcacatcatcatcatcatcttcctattcctttctttttggtggtaaatttgtcagattctcactagaaactgttaatgattgtactcaagtggtcttttttttgccttttactatttggttctcatttatcattacagaacataaccagattgaagtattgttttg

SEQ ID NO: 191242 - DNA, 1693 bp, Gossypium hirsutum
  unsure (1)..(1693): unsure at all n locations
agagcgttgacgtatactcnanctacagaatcnactaatacgntagttaccaanctcactatatagggaacaaaaagccctggagcnntccactcgcggtggggcggctccgcttctagaaaacttttgtggattcctcnnccgggcttttgcaggaaaattcgnnngcacgaaggcgggagccaaatgtggttcngnnttttggtattctcgctgctccgggttnnntttcgatangnncagttcttcttcttgttnnnttgttcaattccccaaaaannagcaaccaaccgaacgaacatnngaacctagaagctcnnaaatctcttaagaagtccccatttataatttatnnccaccactgaaanaagtttggcctggcattggagttgaacctggnnaggcttgtaatggcgaacggtgaatagggtttcttaggatcnagcatgtggtaccggtgggcggcgttggcggcggcggcatttttgttccaatgcttaccttgattgttggatttgataccaaatctgccgctgctatttccaaatgcatgatcatgggggcattagcattggcagtttgggataatcttatagagtcccatacgacacatgaaatgcccaatattttcgtccaaaattggtcttttttttcaccccattattgaagaccctggtaaacacttgtggggtttcgcttagagcggcgtttcccctttaggggcaattatggggcgcaaataatacacttttttaagaacacctttatagaggttttataatggggttttaaaatggtagaaaaagaaccactttgaaataaagaactcccctcctcaacaataatttgttgaatattcccgggggataatcgctgatacaccccgtctcacacctgtgtgtcacaaaaaaagagaataaacacgcgaataatctggtttaatatatgggggaagaggttggtactggctacagtttgggtacttttcacggttattcaagtcatcaagaatgatgtggttccctgtaccactttgtattgggtattgtttagcttacagttccccatagcaacactggtttttggatatgaagcaactaaattatacaaagaacataagaagagaatgagcactgggaatgctgaaacagtttgtggagcttcaattcaatggagtccattgaacattgcattttgtgcactttgtggcatcttgggaggcactgttggtggattgcttggttctggtggtggattcattttgggtcctctcctccttgaaattggtgtgattccacaggtggctagtgcaacagcaacattcgtgatgatgttctcttcatccttgtccgttgttgaattctatttgcttaagaggttcccaatgccctatgctttgtacttgatgggagtatctattttggctggtttctggggacagtatttcgtgagaaaactaataacaatccttaggagagcttcacttatagtgttcatcctatctggtgtcatctttgcaagtgctctcaccatgggagtcataggcattgagagaagcattcgaatgattcacaaccatgagttcatggggtttttagatttttgcagcagtcaatgatcgttgactaagtaaggatgttgttggtcatcaccttgttgaccaatcccaacatattcaatgtctcgtaagaat

SEQ ID NO: 191243 - DNA, 827 bp, Gossypium hirsutum
acacaacataagttattctggtttttggtggttgcggcggcggcggcggcggggtttgggttccaatgcttaccttgattgttggatttgataccaaatctgccgctgctatttccaaatgcatgatcatgggggcatcagcatcgtcagtttggtataatcttagagtgccgcatcccacaaaggaagtgccaatcattgactacgatttggctcttcttttccagcctatgttgatgcttggcatcactgttggggtttgccttgagcgtcgttttcccttattggctcattactgtgctcatcatcatactcttcttaggtacgtcttcaaggtctttctataggggtattgaaatgtggaaagaagagacaattttgaataaagaactcaccaagccacaagaatcttttgttaattccaggggtgaattactgatagatacagagtacgaaccatgggggccaaaagaagagaaatcaaaactgccaatactgtgtttcaatctaaggtggaaaaggcttttggtactggctacagtttgggtacttttcacaggtattcaagtcatcaagaatgatggtggttccctgtaccactttgtattgggtatggttttgcttacagttccccatagcaacactggtttttggatatgaagcaactaaattatacatggaacattagaagagaatgagcactgggaccgctgaaacagtttgtggagcttcaattcaatggagtccattgaacattgcattttgtgcactttgtggcatcttgggaggcactgttggtggattgcttggttctggtggtggattca

SEQ ID NO: 191244 - DNA, 400 bp, Gossypium hirsutum
cccacgcgtccgattcttccgactttgttttcttctcctttctagaatttgatggactttagctggaaatttaactgtaaaaaataatcacccaaatgcatatgaatatcaatgttgaagatcctctaaacatttaaatgtcaggtttgaggttcctcagcttttactgaaatgtgcagtgggaaccattgctcgggctatgatcttaacattattgtagagattcagtattgttagcgatgcaactagtatcaaatgatagtcgaaaagaagatatttcagaaagagagcccatcttatgccagcccgatatttcacaaacatctgaagaatgtgaaattacagctgttggaggggattgtattattgttagtgaagatttggaagaaattaatgttga

SEQ ID NO: 191245 - DNA, 928 bp, Gossypium hirsutum
gcttgttttgggctcccttgttgaaggagaacccccgacggttgatagtgttaagataaatgatgaacttgatttaaggatagccagtgttcttcaaagtccagggcattgttatgagggtggcttttggacagactttgtaaagcatgatgtctcagacgggaaaagacatgttgccattgttacaactgccagccttccatggatgacaggaactgctgtaaatccactttttcgggcagcatacttggccaaatcggcaaaacaaaaagtcactctcttggttccgtggctttgcagatctgatcaagaacttgtttatcccaacaatctcacttttagttcaccagaggagcaggagaactatatacgtaactggcttgaagaaaggactggatttaaagctgattttaaaatctccttttatccaggaaagttttcaaaagaaaggcgaagcataatacctgctggagatacttctcagtttatcccatcaaaagatgctgatatttgtattttggaagaaccagaacatctgaactggtatcatcatggtaaacgctggaccgacaaattcaaccatgttgttggtatcgtccacacaaattacttggaatatagtaagagggagaagaatggtgctctacaagcttttcttgtgaaacacatcaacaattgggtcaccagagcgtattgccacaaggttcttcgtctttctggtgcaactcaggatctaccaaaatccgtgatttgcaatgttcatggagtaaatccaaagtttttgaaaattggggagaaagttgctgaagaaagggagcttgggcagcaagccttttctaaaggagcatacttcttaggcaagatggtctgggcaaaaggatacaaagagttgatagatttgctggcaaagcacaagaatgatcttgat

SEQ ID NO: 191246 - DNA, 595 bp, Gossypium hirsutum
  unsure (1)..(595): unsure at all n locations
ctctctctctctctctctctctcatttaacctttnctccgttatattcagataagcggtaattcgccattagcgaaactctctctttcgcttttgtcatgcgtttcttaggaagtttgattctttgaaccctctgcttctttttttttctttttaaactgtttacctgaagagagagtgggaggtgaaatggcgtcgggattctctgggggtggcccagatttttacggtgggttagccggcagatcggtgggtaacactggtaccatcaacaacaaccaaacgactgcaccgtaccggacacaggttcccggaatgttcatggacacaacgtctcagatcgtgaaccgagcaacgcctggtttcatcgggaagcgaacactagcggattttcaaacgcaacaagcactaaacaataatcccggtcgtctttttctccgttcggttaagcccagaacttaccagcatacttctccgatttctccgttatctccaatcgatttaccgtccaacttgtcgcctgatgttatgagtaatttctcatctccttcttcttgcatgtcgcagcgttatggtttgccgcttttacagcaact

SEQ ID NO: 191247 - DNA, 1051 bp, Gossypium hirsutum
cccacgcgtccgcccacgcgtccgttccaagctgttggctaagcttttcgacggggtggcttttactcacgtgatgcatttggcggctcaagctggagtcaggtacgccatggaaaaccccaactcttatgttcatagcaacatcgccggtctcgtcacgcttctcgaaatttgcaaatccgctaatccccagccagccgttgtctgggcctcctccagttccgtttacggtctcaacgaaaaggttcctttctctgaggccgacaggaccgaccagccggctagtttgtatgccgccaccaagaaggcaggcgaagaaataacccacacttataatcatatctacgggctttcagttactggattaagatttttcaccgtgtacggtccatggggaaggcctgatatggcgtatttttcgtttacgagaaatattctgcaggggaagcccatcaccatttatcggggaaagaatcgggttgatttggcacgagattttacctacattgacgatatcgtgaaaggctgtttgggatcgttggatacatctgggaaaagcaccggttctggtgggaagaaaaaggggaacgctccatataggatttttaatttggggaatacttcgccggttaaggtgccggagctggtgaacatcctggaaagacatttgaaggtgaaagccaaaaggaatatcgtagatatgcctggaaacggtgacgttccattcactcatgcgaatatcagtttggcccaaagagaattcgggtacaagccctcaaccgatttgcaaaccgggttgaagaagtttgttagatggtatttatcttattatggttataacaaccgtaaaggtctacaataaaatttatttttggttttaaatgtaaggattttcttggtttcccgttagaatgaaatagaaggtaacgggaaaaaccggaggaaccgcaagttaaaaacaagagaaagacgaggattccgtattcttttcttgggggagcagtgaaaaaaacacttgccggtatttcttgtcagttctttatttttttct

SEQ ID NO: 191248 - DNA, 505 bp, Gossypium hirsutum
aaaaaaaaaaaaaagaaaaaaagtttaaacaaaatttatgttgaaaaatgctcttttcatcgatcgccaaagagcaaccgcgaacccccgtcgatcgcaggagagagggaatcgggataaatggggaagaaaaggaagtcgatagcgacgagcctcgatgaggttgatcggactatgtacgcctccttttgcagcgccgctaactccttgtctcacctttatactcagaccatgaatcagcaaaaactctccttccaagctggcaaacgccatggccttggaaaaatctatcagtggatttggagaccacaagagggaggatcaagagttacaacaatggatatcctcagttaccttcatgaatgaactggaccattgtgaagagccatcaacgtcacctatagcacctagcgaacagcagtattcccagcctgcaatgccattcattgaatacctgtttcatggtctttacaggctcatctggccaaactgttttgctaggtaa

SEQ ID NO: 191249 - DNA, 1530 bp, Gossypium hirsutum
tttagattggggattggtccacccgaaatcacacggctttgaaaaaggcacttgatgccggaaaaggtttagggatgccaaatggagttcttattaatggcaaaggcccttaccgatataatgatactcttgtacctgatggcatcgagtatgaaacgattaacgtccatccagggagaacttatcgccttcgagttcacaacgtgggaatatcgacctccttgaatttcaggattcagagccataatttacttcttgcggagagtgagggatcatatacggtgcagcagaactacactagcttagacatacatgtagggcagtcatattcgtttctgctaaccacggatcagaatgcaagtagcgattactacattgtagcaagtgccaggtttgtgaatgaatcgcagtggaaacgagttaccggtgttgccattttgcgttattctaattcgaaaggaaaggcatccggtcccctccctgatccaccgcaggatgaattcgacaaaaccttttcaatgaaccaagctagatctatcagatggaatgtatctgccagtggtgctcgcccgaacccacagggatcgtttagatatggttcgattaatgtgactgaagtttacgtcttgagaaacaaaccaccagagactattgatgggaaaagacgagcgacactcagtgggatatcctttgtcaatcctgctacaccaatccggcttgttgaccagtataagattaaaggagtatataagcttgattttcccaataaaccacttacagggccacctaaaatggaaacatctgttattaatgggacttataggggatttatggaagtcattctacagaacaatgacactaagatgcatacttatcacatgagtggatatgcatttttcgttgtcggaatggattacggtgagtggtcggagaatagcaggggcacatataataagtgggacgggattgcccgctccacaacacaggtttatcctggtgcatggactgcaatcttgatatcacttgacaacgtcggagtctggaaccttagaactgaaaacctcgactcatggtatcttggtcaagaaacatatgtcagggttgtcaatcccgaggctacaaacaaaactgagttgcctatgcccgataatgccctcttttgcggtgccctaagcaaattacaaaagccgcaggatgtatcatcgtcattggcaacatcaatcatagagggtagatcaaaactgttctttacggtgctgatgattgcctcgacccttttcctcatttcccgctaggtgcttttctttcgggatggtctgtgcttgtccgaacacatgcttcacacgtaaggtttgtgtttgtatgtttaggcgtgcgggtgtagtgttgctgatatgaatctttggtgattttgataagttctattaatttttttttccttttttgggttttggttcagaatgttgttaatgcattgcatcaagggtttccttgtttaatttattgggagcataccattcttttagtacc

SEQ ID NO: 191250 - DNA, 722 bp, Gossypium hirsutum
accttctcctctaattattgttttgctttttatatttattgtaaatacattttttaaaatttacctttggttggtgggaagggtaaatttttttggcttataaatatcgacgcctgtgccaattggcatcccagcaaaacaaagcatcaaaaccccaagagtttcacctcaacaaaacacctacaaagcaaatatgccaattgagagctcttccactaatggcccaaccgtctgtgtcaccggtgccggtggcttcatcgcctcctggattgtcaagcttcttcttgaaaaaggttacactgtcaagggcactgtaaggaacccagacgatcccaagaattgtcatttgagagagcttgaaggagcaaaggagaggctatctcttcacaaagcttaccttcttgattaccaatctcttaaggaagccattagcggttgcgatggagttttccatactgcttcacctgtgactgatgatcctgaacaaatggtggagccggccgtgattgggactaagaatgtgataatggcagcggcagaggccaaagttcgacgtgtggtgttcacatcttccataggtgcagtgtacatggaccccaacaggagccctgatgtggtggtcgatgagtcttgctggagcgaccttgagttttgcaaaaacaccaaggtcacttggattcttccttttaattactgcttaagggcaactctaaacttttcct

SEQ ID NO: 191251 - DNA, 672 bp, Gossypium hirsutum
gtctatctcttcacaaagcttaccttcttgattaccaatctcttaaggaagccattagcggttgcgatggagttttccatactgcttcacctgtgactgatgatcctgaacaaatggtggagccggccgtgattgggactaagaatgtgataatggcagcggcagaggccaaagttcgacgtgtggtgttcacatcttccataggtgcagtgtacatggaccccaacaggagccctgatgtggtggtcgatgagtcttgctggagcgaccttgagttttgcaaaaacaccaagaattggtattgttatgggaaggcagtggcagagcaggcagcctgggaaacagccaaggaaaaaggggtggaccttgtggcgattaccccagttttggtgctgggtccattgctgcatccaactgtgaatgccagcattgttcacatcctcaagtacttaaccggctcggcaaagacctatgccaattcagttcaagcctatgttcacgtcagagatgtcgcattagcacaccttctcgtgtatgagaatccctctgccttcggccgctacctctgcgctgagagcgtcctccaccgtggtgaagtggtggagattttagccaagttcttccccgagtatcccatccctaccaagtgctcaaatgagaataacccaagag

SEQ ID NO: 191252 - DNA, 442 bp, Gossypium hirsutum
ctgtgctatatagttgcttgattgtctgtatgtagtggttgttcctgtgttgaagataccatatattgctgcattttgttgcattttcaaatggattttttctgttgcagattttaaatcttctattatatacccaaaatttcaaaattttatgcccatatattgagacataagtataaataaacttatctatgtgtggctgattatctttaatattagtaaagcctcttattgtttgtcatgaatcaagtgactgacaccacttgttagtgaatttttttttaaaaaaaagcatgttaaatcttagtaaatataagaaatactttatataccttttaacttcatgtgttgaaaggcatgttatgatcttaggtttaatcatgtgtacagaactgtcttctgcagattgtgggttttagtgaatggatattgtcttgatgag

SEQ ID NO: 191253 - DNA, 515 bp, Gossypium hirsutum
gtgacgactaccattctgtcatctccttcttcaccttccaaggtgtcaaatactgtttccaatcaggtttataagcatcaaccgttctctgcaaacatgatcaaagaagtggagcatatggcatccaagtctctggtatctgattttggtgctgctttatctccttcactgcctgagcagcaatgccaggatgatgaacaagaaccagagttgattggaaaagaaaatgttcgagcacccaacatatttacatcacgttgggcttctgatagtgatgatgaagatggatctctaactgaggaaaagattaggaggagttcgagtcttgagagtggagagcttgaaagagaggagttggaagtagatagggtacagtctgatcaaagaagcagcagtgtactgtctgcttgtgaggatggaggcatggactgtaagttggactctgttgatgtgatggatattgatgacatgcgtgatgaagatgctattgttgatcagccagatttaagtgttga

SEQ ID NO: 191254 - DNA, 438 bp, Gossypium hirsutum
ctcatatccactttggaggaaatttctgttgtgggcgcccaataaacatgcagagactccaacaattgcgttcaacaggcgagtacagtgacattagcatttacattgagggtcaaggtctcattgctcgggctcataaagtcattctcgggttatatagtgtcccatttacaaagatgttcacgaatggaatgtgtgagagcaactcacctgaggtttgtttaagggatgtgtctccagcagcattgaaggctatgcttgaattcatgtactgcggggatctcaggattgaggataatgaggactttggtaccttgttactccagctccttctgttatctgacaaattcggaatctctcttcttcatcaggaatgctgcaaaatgcttttagaatgcctctcagagggacggagttctagtggaagatggtcataca

SEQ ID NO: 191255 - DNA, 438 bp, Gossypium hirsutum
gacactttttgatatcagtggaaacctcatgtccggatcgatccccagatttaatcaaagtgtatgccccggcttttcctccttgagttacggacttctccaaacccgtgatccagtatttgtgtatttgtcattatttgcatataaaacgcggcatgcaatggtttttccattttctggttcgaaagctgtgttgattcacaattttggtggaaatagcttctctggttcactcccagggctgccaggtgtaccaacaagattggagaagcagattgattatgcatttttagctggcgggaacaagctcactggatcatttccgggaagcttgtttggaaactgtaataagcttcatgggttgattgctagaattggatagcaagaacaaattgtccggtcatattccatttggaatcagtgcaatttgcagatctc

SEQ ID NO: 191256 - DNA, 1045 bp, Gossypium hirsutum
cccacgtctcttcttctctctttttctcattcattctttagtttcaatatcaaagcaaaaatgggttcttcttgtaatgttgtttcaatggccttactggcttgtttggtgttgaactccttggtttttgttgcccactggtggtgacttttaccaggatttcgacctaacatggggtgacagaagaggcaagattttcaatggtggcaagctcttgtctttgtctttagacagggtttcagggtctggttttcaatctaagaaagagtatttgtttggaaggatcgatatgcaactcaagcttgttgctggcaactcagctggcactgtcactgcttattatctgtcatctcaagggccaacccatgatgagatagactttgaattcttagggaatctgagcggtgacccttacattttacacaccaatgtctttacacaaggcaaaggcaacagagaacaacagttctatctttggtttgaccctacaagaaacttccacacctattccatcatttggaaaccccaacacatcattttcttggtggataacacccccattagagtcttcaaaaatgctgaatccattggtgtaccattccccaagagccaacccatgaggatttactctagtttatggaatgctgatgattgggccacaaggggtggattagtgaaaactgattgggcaaaagcacctttcacagcttattacaggaacttcaatgccaatgcttgtgtctggtcaggaacaagttcatcatgtgctaaaactaactcggtctccgccggtgcatgggaaacaaacgaacttgatgcaccaggaagaagaagattaggatgggttcaaaatatttcatggtttataactattgcactgatgtgaaacgtttccctcaagggggtccaccagagtgtaaacgcccaaggttctaaattcaaacctgttccaccagtgtgtaaaccccaggtctaaatcaaccttctttttcagtataatccttttcatacttctacatgatcagtgatagtatatatatatatt

SEQ ID NO: 191257 - DNA, 933 bp, Gossypium hirsutum
gtttttaatgtatttctttgtgtatgttttgcagctgtcatctcaagggccaacccatgatgagatagactttgaattcttagggaatctgagtggtgacccttacattttacacaccaatgtcttcacacaaggcaaaggcaacagagaacaacagttttatctttggtttgaccctacaagaaacttccacacctattccatcatttggaaaccccaacacatcatgtaagaacccatcaaataatgtcttctactttgtcttttgccttaataacattagctactttttgtctttttctcagtttcttggtggataacatccccattagagtcttcaaaaatgctgaatccattggtgtaccgttccccaagagccaacccatgaggatttactctagtttatggaatgctgatgattgggccacaaggggtgggttagtgaaaactgattgggcaaaagcacctttcacagcttattacaggaacttcattgccaatgcttgtgtctggtcaggaagaagttcatcatgcgctaaaactaactcggtctccgccggtgcatgggaaacaaacgaacttgatgcaccaggaagaagaagattaagatgggttcaaaaatatttcatgatttataactattgtactgatttgaaacgtttccctcaaggtgttccaccagagtgtaaacgcccaaggttctaaaatcaaacctctcctcctttccatgtaatatattctttttttcactactttcttactatgtattcaagttgcactcaacttgatgcttggggatggatggaataagttgctattattattattcttttttttatgtatttttatttcgttttgttgcttcttaaatcatcttgaaaatagatgtaaattccctgtttctgataataaaattttcctcttttttagtac

SEQ ID NO: 191258 - DNA, 501 bp, Gossypium hirsutum
  unsure (1)..(501): unsure at all n locations
caaggggtggattagtgaaaactgattgggcaaaagcacctttcacagcttattacaggaacttcaatgccaatgcttgtgtctggtcaggaacaagttcatcatgtgctaaaactaactcggtctccgccggtgcatgggaaacaaacgaacttgatgcaccaggaagaagaagattaagatgggttcaaaaatatttcatgatttataactattgcactgatttgaaacgttcccctcaaggtggtccaccagagtgtgaacgcccaaggttctaaaatcaaacctgttccaccagagtgtaaacgcccagggttctaaaatcaaacctctcctcttttccacgtaatatattctttttttcactactttcttactatgtattcaagttgaataagttattattattattattattctttttatgtatttttatttctctttgttgcttcttaaatcatcttgaaaatagatgtaaattccctgtttctgatnnanaaa

SEQ ID NO: 191259 - DNA, 776 bp, Gossypium hirsutum
  unsure (1)..(776): unsure at all n locations
cccacgcgtccgaaaaaaaatggcttcgtttcatatgattacaacccttctttttctgctaacaataatgctgggtgcatcaaatgctcaactcagtgccaccttttatgccaaaacctgccctaatgtgtccaccattgttagtaatgtgctgcaacaagctcaaggaaatgatatttggatattccctaagatcgttcgccttcattttcatgattgttttgttcatggttgtgatgcttcgttactgttgaacggtacggacggtgagaaaacggcgaccccaaacctttcgacggagggatatgaagttatcgatgatatcaaaacggcgttggagaaagcttgccctcgtgtcgtctcatgtgccgatgttttggcacttgctgctcaaatttctgtttctttgggtgggaggtccgacatggcaagttccgttagggagaagggatagtcttgactgcgcaccgggaagggaccggtagtttcccgaccggccacgagagccttggctatattgcaaccttgtcaagagcgtgggatttgatnctatgatctagtcgttttgtcgtggtcacacattcgaaagggctcaatntcgcgttcatggaccgatctcacttcattacaaaacgggaaaacgatctacctaacgcgactatgcaaccctaaaccacagtctaaagcgggaaccttaaattacgatnataacaagttgtacttncacaagctttaacctcaaccaaggatgtacnaccagatgttctatggctaag

SEQ ID NO: 191260 - DNA, 690 bp, Gossypium hirsutum
cgaaggacaggcttgccctgcataggctacgtgaggcggctgaaaaggctaagagtgagctttcatctacatcccaaactgaaatcaaccttccattcataactgctgatgcttcaggtgcaaaacatttaaatataacgctaaccacatccaagtttgagggtctagtcagcagcctgattgagaggactagaattccgcgtaagaattgtttgaaggatgccggaatatccctcaatgatgtggatgaagtattgcttgttggaggaatgactcgtgtccccaaggtgcaagaaattgtatcagaaaatatttggcaagggctccaagcaaaggggttaattcctgatgaggcagttgcaatgggagctgctattcaaggtggtatccttcgaggtgatgttaaggagctgcttctgttggatgtaactcctctgtcacttggtatagaaacacttggaggaattttcaccaggttgatcaacagaaatacaactatccctacaaaaaaatcacaggttttctctactgcagcagacaaccagactcaagttggaattaaagttcttcaaggtgaacgtcacatggcagctgacaataagattttgggtgagtttgatcttgttggtattccacctgcacctagagggatgccacaaattgaagtcacattcgacatagatgccaatg

SEQ ID NO: 191261 - DNA, 437 bp, Gossypium hirsutum
  unsure (1)..(437): unsure at all n locations
tgaaagtggctttagccaatattcaaagatgcccacgctgactcagatggtcgggcagttgacactggatgtttcctaagatactcagactcccccttctttggtgctaactacaccattgacctgaaacccttcttgaaaaccagaaatacaactaaaagggatgctctgattggaggactggttggaggtggaggtcttctgttgcttataactttattattgttttgggttagaaaatcaagaaacaatatggcagttcctcaagaggatgtagaggcgccacctgagttacaaggtccgttgacttacacttacaaagaattgaattttgcaacgacaagatttagtcaacanaataaattaggagaaggtggttttggtgaagtatacaagggtatattgaagaatggaagggtggtagcagtgaagaaact

SEQ ID NO: 191262 - DNA, 1091 bp, Gossypium hirsutum
gaaaacagtagtgtgggctctaatgattctctgacccacattttaagccaccctggtttaaaacctgtgaaacgtagcaattactctgtctctgtggggcagagtgtgtttcgtcctggtaaggttggccatgcacttaatgatgatgcattagcacaagcattgatggatggcaggtatcagactgaggtattacagaattatgatgagtgggctattgatttaagaaagcttaatatgggtacagcttttgctcaaggtgcttttgggaagttatacagaggtacatataatggtgaggatgttgcgattaagatattggaaaggccagaaaatagccctgagaaggcacaagttatggaacagcagtttcagcaggaacttatgatgcttgcaacactaaagcatcctaatattgtgcgatttattggggcttgtcgcaagccaatggtttggtgcattgtcacggagtatgctaagggtggctcagttcgacagtttctaacaaggaggcagaaccgtgctgtgcctttgaagttggccgtcaagcaggcattggatgttgctagagggatggcctatgtgcatggacttgggtttattcaccgggatttgaagtcggataaccttctaatagctgctgatagatcaataaagaatgcagaatttggagttgcacgtattgaggtgcagactgagggcatgactccagagactgggacataccgttggatggctccagagatgatacagcatagaccctacacgcaaaaagtagacgtgtatagttttggaatagtcctttgggagctcatcactggcttgcttcctttccagaacatgactgcagttcaggcagcatttgctgtggtgaacaagggtgtaaggccagttattccaaacgattgcctcccagtgctgcgtgagatcatgacacgttgctgggacacaaacccagaagttcgtcctcccttcactgacattgtgaagatgcttgaaattgctgaaacggatatactgacaaccgtgcgtaaagcccggttcaggtgttgcatgactcaaccaatgacaattgactgatccagaatgga

SEQ ID NO: 191263 - DNA, 418 bp, Gossypium hirsutum
  unsure (1)..(418): unsure at all n locations
cggacttgtgggactagatcctacaagagtcgttgaaatgcttaatgatcggccttcatggtatcatgattgccgagctggggatgttacaaacgtgttgtctcactggaaatggtggatccattgaactgcttcatatgccagtaagctcattaatgtcaaatctatcctacttttccaactaactctatgtgaatatttgggacaaaccagagatctaagtatgtgtatttaaattgttcaccatacccaattattgatggtatatngagcatgtgagtacatacgctatccccacaaatttcaacttccaagacctggttctgatataaatccaagaaaagaatagcataataaatagtatagtggtaaattattaggaaaataaagaaaagcatttctattttcgggatccaag

SEQ ID NO: 191264 - DNA, 720 bp, Gossypium hirsutum
cttttagaaacacaccaaaaagtgaaagaaaaacatggctgccgcttcttcttccactatcctcttcaatccgttgacttctcagctctgcaactccaagaagaagccttgctctgacccttctgcctccactctcaaactgggtctttttggacacgccactaacactgccgctgcatctctgagattcaagaagcttaagtatgggaaaggatactcttctggtttctctgttgtgtgtaaagctgtctcggttaagcctgacaccgagatcgaagggcttaacattgctgatgatgttactcagcttattgggaaaacaccaatggtgtacttgaacaatattgtgaaaggctctgctgcagatattgctgccaagcttgagatcatggaaccatgttgcagtgtgaaggacaggatagggtacagtatgatttctgatgctgagcaaagaggacttataacacctggaaagagtattcttgtggaacctacaagtggaaacacaggcattggccttgccttcatagctgcctcaaaaggatatagactgatcttgacaatgccagcatcaatcagtttggagagaagagttctactgaaagcatttggagctgagcttgttttaactgattcagctaaaggcatgaagggggctgttcagaaagctgaagagattgtgaaaagcacacacaacgcctacatgcttcaacaatttga

SEQ ID NO: 191265 - DNA, 613 bp, Gossypium hirsutum
gtgaaactcaattggaactaaaaccttggattttgtgctgccgggaaaccaaagtttgaaagcggcaatggccaagacgccgatagggctagaaccagtggtgggatccctatcatcctctaagaagaaagaatacagagtcactaatcgactccaagagggcaaacgccccctgtacgccgtcgttttcaacttcatcgactctcgttacttcaacgtgtttgccactgtcggtggtaatcgggtgacggtataccaatgcctcgaaggaggtgttatagctgttttgcagtcttatgttgatgaagataaggatgagtctttctacactgtaagttgggcctgcaacattgatggtacaccatttgtggttgctggaggtattaatggcataatccgtgtaattgatgcgagcaatgagaaaatacacaagagttttgttggacatggtgactctataaacgaaatcaggactcagccactgaaaccatcacttatagtgtctgcaagcaaagatgaatcggttagattgtggaatgttcatactggaatctgcattctgatatttgctggagccgggggaacccgcaatgaagttttgagtgtggatttg

SEQ ID NO: 191266 - DNA, 695 bp, Gossypium hirsutum
  unsure (1)..(695): unsure at all n locations
gcaggcccaacaaaaaatcgggaaacattttaatttcgttgtttcaagtccttcgtagggatagcaaatttgatttacagagaccaaagggggggaaatggcgatcacactgaacaatggatttaagatgccagtggttggtttaggtgtttggcgtatggatggaaaagacgttagagacctcatcatcaactccatcaagcttggttatcgtcattttgattgtgctgctgactacaagaatgaagcagaagttggtgaggcattgtctgaagcattcaaaactgggcttgttaagagagaggacctctttattacaaccaagctttggaattctgatcacgggcatgttcttgaggcctgtaaagacagtcttaagaagcttcaattggattatctggatttgtatctagttcactttcccgttgctgtaaagcacactggagtcggtcaaacggacagtcctttggacaaggatggagtcctggacatagacacgactatatcgttggagactacctggcacgcgatggaagacttggtttccaagggtttagttcgtancatccggatcagcaactacgacatctttttaacaagagattgcctancttactccagggtgaagcctgctgtaaaccaaataaagacacatccttacttccaacgtgattgtcttgtanaatnttgccaac

SEQ ID NO: 191267 - DNA, 657 bp, Gossypium hirsutum
ccttccagggagtaatcttcaactgattcgcctacggtcggctcttaatgctagagacattccagctgaagacttcaacctgctgcctgattttggtgtgcagcagcaacagcgggtgaacgagttatctagcctcagtcagccatctatgagttctaattctatgaatcgatctggtcgattgaaaaccctgaccccatcaaatctcgaagatctattttccaccgagagctcttcaccccagtactctgatcaagcattggcagcagttgttttctctccttcccataaatctgccgttctcaatcaatttcagcagcagtcaagcatgctatcacccattaatacaaatttttctcctaaaagtcaggagcatccgctattgcaggtgtctctatctggtaggatgtctcctcggaatgtggaacctatctcgccgatgagctctcgagtttcaatgttagctcaacttgagaaacagcagtttcgctgtctaagctctagggaacttggctctgactctcctgccagtatttcttccccagtaaattcttggtcaaaatggggatcttccaatgggaagcccgattgggctgtcaatgcagatgagttaggcaagcatcatgcttcatttgagctcagcaacggagatgagcc

SEQ ID NO: 191268 - DNA, 507 bp, Gossypium hirsutum
ttcttaatcaagtaaatcttggtaataaaagatatcatacatttacttaatcaaggaaatcttgtaatgaactcaaagcaataagccttagagaaaaacttttgagcaggttccaacaatagacgtatcacttgcttctcataatccacacacagcaagccagactcggatagaagatcataaaatgtgtgtgatgatatgatagcatgcagttttgtcctattaatagtattaccacacacccctgctgtcataaggcgtaataaatatgtgaagactttgatgtaaactaataaataaggttcttctgagtgaccatcaccctgaaaactatggagggtggttagcagaagagaaaatccagtggcttcaccaaagactctctgagcaccattatttactcctagaatgcgccacaaggttcccattgtatcacattttgcatcactttgaagtttgtattgatgtcctgaatcacttgtaaccattccactctttaaaacttaa

SEQ ID NO: 191269 - DNA, 432 bp, Gossypium hirsutum
gaaacccaataaaatatgctcatcttcagtaatatagccatgctatgtaccatcccgccagctattgcaacaacagaaccctagtacagtcagggcctcaagggcatagatgaatgctactacagcaggctcagaatgagaaattaattcaagagagagcaatatgcggatttgctttctcaagcaataatgcattttcttaatcaagtaaatcttggtaaaaaaagatataatacatttatttaatcaaggaaatcttgtaatgaactcaaagcaatgagccttagagaaaaacttttgagcatggcttcaaatttgaacagcagatttagtgcctacatgctctgcatgagaataagagtaaaatccagtatgtcatcccggacgcgtggacggaagcgtggacggacgcgtgggcggacgcgtgggcga

SEQ ID NO: 191270 - DNA, 256 bp, Gossypium hirsutum
  unsure (1)..(256): unsure at all n locations
nnnnnnnnnnnnnnnnnnnnnnnnnnnnnnnnnnnnnnnnttttattttcatctttgtttttatgactttttttagaatcaaaactaaaataaataatacatatgcaaggtaataaaatatacaatgtattttcttaatcaagtaaatcttggtaataaaagatataatacatttacttaatcaaggaaatcttggtaataaagtatcctgaagcatggcttcttcaaaatcatcctcataacgatacatttgtcc

SEQ ID NO: 191271 - DNA, 430 bp, Gossypium hirsutum
aataaaaataattgaatttaatttaagattttaaaatattaatttattaccccattaaaattccaaaagttagactttttaagtaaaattaaaaatttagatccaaaactaaattaaataatacgtatgcaaggtaataaatcatacaatgcattttcttaatcaagtaaatcttggtaataaaagatataatacatgtacttaatcaaggaaatcttgtaatgaactcaaagcaatgagccttacagaaaaacttttgagcatggcttcgaatttgaactgcagatttggtgcctacatgctctgcatgaaaataagagtaacttaatctgttcaaaccatagtgaacatggcaaagataagtacatccgttcaactttttaagattgttttataatgttatagtaaattaggtgtcttataatgttat

SEQ ID NO: 191272 - DNA, 394 bp, Gossypium hirsutum
aatttcacttctttttcattctccataactctttttatcggaggctctttcgtcttcttcttatctaacaccttcttctctcttttttggtttctgttttgtcccttttctcctctctgtacacagcagaaaacacagagcatcattaatggcagccaacaaatttgctaccatgttgcataaaaacactaataggatcactcttattcttgtctacgtcttactagaatggattctgatcgttctcctccttttgaattcactgttttcttacctgatcatcaagtttgctgattactttggtcttaaaaggccctgcctttggtgttctaggcttgatcatatctttgagccatcaaagtacaacaaatcttatagagatcttgtgtgtgat

SEQ ID NO: 191273 - DNA, 754 bp, Gossypium hirsutum
cccacgcgtccgcttcgtttcatttttttttcaatcaatattttctttcagatctcaagctttcttgttagtgagtaagcatgtctcatcgtaagttcgagcatccgaggcatggttcattggggtttctcccgaggaaaagagcctctcgacatcgaggaaaagtgaaggctttccccaaagatgatcctactaagccatgcagattaactgcattcttgggttataaagctggaatgacccatattgtgagggaagttgaaaagcctggatcgaagcttcacaagaaggaaacttgcgaagcagttaccattatcgagacaccgcctatggttgttgttggagttgttggatatgtcaaaacaccgcgtggtcttcgtactttaggcactgtatgggctcagcatttgagtgaggaggtgaagcgaaggttctataagcactggtgcaagtctaagaagaaagctttcaccaagtattccaagaagtttgaatccgaagatggtaaaaaagatatccagtcacagcttgaaaaactgaagaaatattgcactgtgattcgtgttttggctcacactcagataaggaaaatgaagggtttgaagcaaaagaaggctcatttgatggagattcaagtcaatggtggaacaattgctcagaaagtggactttgcttacggtttctttgagaaacaaattccaattgatgccgtgttccagaaagatgagatgattgatattattggagttaccaa

SEQ ID NO: 191274 - DNA, 422 bp, Gossypium hirsutum
ataaagcgaaaatggaaagagcaaccagcgaccgacgttgcgtcgcaccttcctcctactctgaattatgtccaaattttttttgtcttttcgggcaattctatttccttttaggcttaacaaaattctgatcttagggtttcgaatttctctcaagatctgccttccattatcacacctttgtagcttcgcgttattctgctcacgagcaggtggcgatgatagaatgcagtgtttgccattctaaaatagcaccaccggctagcaaatccatatccagggcttacgacaagcaccgtacctttgtttcttccaaaactcgtttcctcaatgttcatttcggtgctggtgactgccttttggtcggttttcaacccatattggtttatatgtcaaaggtggatggtggcttcaagtatagt

SEQ ID NO: 191275 - DNA, 678 bp, Gossypium hirsutum
aagaaacccaccgggaggaaaattattttcttttttctcaggatggtgctcctcatcagaacagattatggctattacttcgatctcgacgaattggtcagctcttttccgcttctcaaaccactcgaaacattcactctctttaccccaaagtaccatttctttacggttttcccgatccagtctcagctgcggaaaacccctttcaattcgagcaaccgccgttccagcggcgcctacagcggaggggttggcaccggctattacgttgaccgatgatgctttgaggcacttgaataagatgagagcagagcgtgatgaggatttgtgcttaagaattggggttaagcaaggtgggtgttcgggcatgtcttatacgatggattttgagaagaggtctaatgctagagccgatgactctatcattgaatataacggatttacgatcgtgtgtgatccaaaaagccttctcttcttatttggaatgcagttagactacagtgatgctcttattggtggaggtttctctttcaggaaccccaatgctacccaaacatgcggttgtggtaaatcgtttacggcagaaatgtgaaatcatatgtacaaagacagtccatccgtttcatgtaatgcaacatacaaattatgcctgtaaatctttcatgtttaactgacttc

SEQ ID NO: 191276 - DNA, 448 bp, Gossypium hirsutum
gtttgatgcatagaggaattctatctgatcctcatcgatagcttgtaaaaaatggccagcttttacagtttcttaggatattaaaggagaaggggaagagacttttcttgctgacaaattcaccgtattactttgtggatggagggatgcagtttatgttggaggattcaacgggcaacagcgattcatggaaggagctttttgatgttgtaattgcaaaagccaataagccgggtttctacacttctgagcatcctttccgctgctatgacacagagaaggatactctagcttttacgaaagtggatacattccttaaaaataaaatatattaccatggatccctgaaatcttttctccaaataactaagtggaagggcccagaggtgatatactttggtgatcacctatttagtgacttgaggggcccttcaaaggctggttggcg

SEQ ID NO: 191277 - DNA, 1339 bp, Gossypium hirsutum
ctttttctttccttttcctctctaaaaccctaatttgatctccaaataccttcgagatctccaagcttcgtcaccccaaaatggccacgacacgcagatcccttcctcttctgagaaccctcatagccggaaaaacccaaacccgaaacgtgacgtacatgccccgaccaggagatggagccccaagacccgtaacgttaatccccggagacgggatcggacctttggtgacgaacgcggtggaacaagtgatggaagtgatgcacgcaccggtttacttcgagaagtacgacgttcacggcgacatgaaacgggtaccacaagaagtgttggattcgataaagaagaacaaggtttgtttgaaaggagggttaagaacacccatgggaggtggagtcagttcattgaatatgcaattgaggaaagaactggatctatacgcttcattggtcaactgttgtaacttacccggattgccgacccgccatgaaaacgtggatatcgtcgtaattagagagaacactgaaggggaatactcgggtcttgaacatgaggtggtgcctggtgttgttgaaagccttaaggttataacgaagttttgttccgagcggattgcgaaatatgctttcgagtatgcttatttgaacaatcgaaagaaggttactgctgttcataaggccaacattatgaaacttgctgatggattgttcttagagtcttgccgtgaagttgcaactaagtatccaagtatcaagtataacgaaatcattgtggacaattgttgtatgcaactcgtttcgaagcccgagcaatttgatgtcatggttacccctaatctttatggaaatctggttgcaaatacagcagccggtattgctggaggcaccggtgtcatgccaggaggcaatgtgggagctgaatatgccgtgttcgagcaaggtgcttcagccggaaatgttggaaaagaaaagatagtagagcaaaagacggcaaatcccgtggcattgcttctctcctctgccatgatgttgagacatctccagtttccttcatttgccgatcgactcgaaagtgcagtgaaacgtgtaatctcagagggccagtatcgaactaaagatctcggtgggcaaagcagtacacaggaagttgttgatgccgttattgctaaactagattgattactcgtcttcttcttcactatgggttttccacagtaagattttcttaagttggtatatctcattcttacattttcagaataatatttttttttcgaaatactcgaaaatcaaacttataacaaacaacaaacaactgttgagttgtgaaccattttaca

SEQ ID NO: 191278 - DNA, 417 bp, Gossypium hirsutum
  unsure (1)..(417): unsure at all n locations
attaaatcagaaagatagtgtctgaaatggcaggaaaaggtgcagaagacgttcgagggggtgtatctccttacaggatttgtccattgggagctcatgtcgatcatcagggtggaattgtttctgctatgacaattaataagggaatactattgggatttgttccttctggtagcactgaggttgcattacgctcaggtcaatttaaaggagaagttaggttcagagttaatgaaaaccataaaccaagacagaccattagcaagggtgaagagattaccgcagataaatcttctccgtcaccagatgaatttgaatggggtatttatgctagaggagccttgtatgcattacaaagtagagggaaccatcttgctcagggaatcattggctacatctgcngatctgagggtctgg

SEQ ID NO: 191279 - DNA, 512 bp, Gossypium hirsutum
ctctcttcctcctccaccatcatcatatgatacacgtctaaagcatctgggcgctgcaaaaagtacacaatctcccacttcctcttttacactcccttcatttttggtctttgaaaccccataagcccttttcactcctttttatactctcattttacgtttatttcttctttctttcatagatccaggccttcttcttcttcttcttcttcttcttctatcaaagttaatataggcaaatataagagaagaaatcgaattaaagtttatctgtggaactagataaagaacagtacgatttgttttgatccaaagcacattcgagccatgtcgtttattggtacccaacagaaatgcaaggcttgtgagaagactgtttatccagttgaacttttgtctgcagatggagttccttaccataaatcttgcttcaagtgcagtcattgcaaagggacactaaagttggctaattactcctcaatggaacgtgttctttactgcaagcctcattt

SEQ ID NO: 191280 - DNA, 980 bp, Gossypium hirsutum
cttggtggcagtatcagttctgtgatattttcatcgaagcggtcaaaccttactttgctggtgataatccagctttttcctctgaaaggaaatttgcacaagatgctctttgggcttgtttggaaataggcctgcgtttgcttcatccatttatgccattcgttacagaagaactgtggcagcgccttccaggagtaaagagccacacaaagaaagaatctataatgatgtgcgattacccgtcaccaattgagagctggacaaatgaaagggtggaatatgaaatggaccttgtagagtccactgtaaggtctcttaggtcacttcgggccgagctgcttgctaagcagaagaatgaaaggttacctgcttttgcattatgtcaaaatgatgaagtggcgaaaataataagatcttgtgaattagagatcttaacccttgccacgttatcgactttcaaggttctactaagtggtgtggatgatgctccagctggatgtgcatttgaaaatgttaatgaaaaccttaaagtttatcttaaggttcatggaaccctaaatgcagaagcagaacgcgcaaagattaagaataaaatggatgaaatactgaagcagcaggagaagctgaagaagatcatcagtgcatcaggatatcaagaaaaagttccatctcacattcaagaagagaatgcaacaaagctggcaaaacttctccaagaatttgagtttttcaagaaagaaagcgatcgtttagaatctgaatcgcagcatcaaaagtaaggttaacccctcccttttgagtttctcgattcgaatgataatttgaatggcattacactatctcttcttttttatgattgttttgttactgtctaaacctcaccaatacttttgtttatttttaacatttgatgcttgccatgtttggcatacaagaggttacccagctagttaatcgtatgaaaatttcccactttgctt

SEQ ID NO: 191281 - DNA, 641 bp, Gossypium hirsutum
gttttaatgaggaaaaagagtgcgacgcttaaggttgggaagaaagatatagctgatctgcttgctaatggccttgatatcaatgcttatggcagagttgaaggatatatagctgaattagtgctttcgtcttgctatgattttatagacaagtgttgcgatttcgtgacgaatcatgtttcagtcatgcaaaaactgagtgattgcccagaagattgcagggaagctgtctcatctctaatgtttgcagcgtgctagattttctgatttgccagagttgcgtgagcttaggcatatatttcatgaaagatatgaaaattcactggacgtattcgccaataaacagcttgttgagaattcagcttcaaatccttccacaatggagaggaaagttatggtaatgcatgatatagcatcagagttttccataaaatgggattcaaaagctttcgagcgaagaatgtctgaacctgttgtgatcccacagccacaggaccgaactaaaaaatacgggtctttccatgtcaatggtgaagataataaatcaaattatggaaaacaggaccgacttaaaaaatacgggtctttccatgtcaatggtgatgataataaatcaaatgatggacaacaggaccgactta

SEQ ID NO: 191282 - DNA, 443 bp, Gossypium hirsutum
tagatatacaagcttgaaatggaacagaagagattagaagaggatgcctttgtctataattggctgcaagagcaacttaaactatcaccggcttacaagaaggtagagctcatacctatattctaatagcatagtaaagcttatcgtaaaattttgttaatgctgttgtctgtttagttctcaaggaaggataactgagcataattgcccaaattattgcaaagtaaagcttatttgtctcccatcactctgcttttggcttttattcttagtggcttcttgttaaccttgaaactctatgcatggaactttattttgttattacctatctgtccgtgcaacttaacagctattatcatgtggttgaatttggaatataaacaaccttttcggtttggcttcaactctttaagttgcagtttggtacgacacttaatttaaca

SEQ ID NO: 191283 - DNA, 611 bp, Gossypium hirsutum
  unsure (1)..(611): unsure at all n locations
gtttttagttaaagttttaatttttgttatcaaagttttgttctttactatcttttttttctcttcttgttcgtgagaaaggaaaaagcagaaagagaaaatgagcaatgctcatcaagaagctattaagcaatttctttccttgatggaaactgttgatgagcgaatgaagagcacatttcagaacatgcaccatgggtatccaactgaagctgtagtccggtttctcaaggcgagagattggaatgttcagaaagcccataaaatgttaattgattgcttacaatggcgacttcagaatgagattgacaacatattagcgaaaccaattatccccgccgacttatatagagcggtgcgagattctcaactagtaggagtgtcaggttactcaaaggagggtcatcctatcattgccattggtattgggcttagcacatacgataaagcttccgtgaattattatgtacaatcacacattcaaatgaatgaatatagagatcgtgtagtattgcctatggccacagaaaagtatggacgacatattagcacttgtttgaaaatcttggatatgactggctngaaactttcggcgttgaaccaaataaagc

SEQ ID NO: 191284 - DNA, 618 bp, Gossypium hirsutum
ggcttgcaatcatgacggcttggatctctatcttgtcggactatttggtggataccattgagggggcatctgatgcgtgggatgtgccgattgcttttattagtgttatattgctccctataattgggaatgctgctgagcatgcaagcgccatcatgtttgccatgaaagataagctcgacatatccttgggagtggccatagggtcatcaactcagatttctatgtttgggatacctttttgtgtggttattgggtggatgatggggcaagaaatggacttaaacttccaacttttcgagacagcaactctgttcattaccgttatagtcgtagccttttttctgcaggaagggacgtctaactacttcaaaggactaatgcttatactttgctatctgatagttgctgcgagtttcttcgtacatgaagatcctcccacagatgatcaaagtaagcaaccgggaacctgatgaatgacacagttgaatcgagatatggaaattcggagcccttgaaagatgcaagaggcaagaagcaagaacccatggagatttgaaacatgtttgtcccacatggtgtaaatagtactgttgacaggcagatattccatttttt

SEQ ID NO: 191285 - DNA, 436 bp, Gossypium hirsutum
acctccgccgcttttgctactttccaattttcccaggttctaggcatggtggtgtggcttaaagtggctgttataaacgaagaaggaactcaagctatttttatcagactatgaatgtcatctgaaagatatctccataaatgtagatggatcattgatgctttccgagggaaaatcatgtctgaagttgaagatgcgattatcaagaagatcaaagaaggaataataaagcttgactcattgttgcagtcgcttccaaaacaactgcaagttaatagtattggtgcattgaatgtgactttcatggatgaccctttgtttactaattcttccgtagagcttgaaattaatggtttattcaacagagcagatgaaatttcagtttcaaactattacagtaaaagagcacggaatttcctttcttgcaatggtttct

SEQ ID NO: 191286 - DNA, 908 bp, Gossypium hirsutum
caaacccttttcttttgaaaaaaaaaacacccaagtgaatcctgggggcatttgaaaactgtgaaacttaaaccggtgcttcaacttgtgctgttgcaaccataactagtgatgagattgtggggaatgggatgagtacttgcatcgtttctgcttcagataataaaggctttggaggcgcagctattgatgttattaatacaggtgatggtggtcagaagttagcaaaccaatcaaaggctgaagagtctctcagcgtttctcttcctgcagatctttctgttgagaacccaccaatttctttatggccgcctttacctactccccagaattcttcaagccagatgatttctcattttcctggaggccctccttcgcacttccccttctatgacatgaatcccatgatggggggtccaatctttgcctttggaccacatgaggaatcatcggctacccaatcgcagtcccagaagagtagcacaccagcttcaggtcccttagggacctggcaacaatgccattctggagtagattcattctatggtcctccaacgggattcacaggccattttatcaccccacctggaggtatccctggggttcaaggcccaccacatatggtcgtgtacaaccattttgctccagtcggacagtttggacttagtttcatgggtacaacctacatcccatctggaaaacaacctgattggaagcacaaccctgcttcctctgcagtcggtgaaggtgatgtgaacaatttgaatatggctgcttcgcagggtaattctagcaacatacctgctcaaatgcatcatcttccccctggccctgggtcacctgttctgcccatagcatctccactcgctatgtttgatgtttctcctttccagtccaccccagatgtg

SEQ ID NO: 191287 - DNA, 1521 bp, Gossypium hirsutum
ctggatttccctaacatagttatcaagggaagtgagctgcggctcccattccaggcttgcttgaaaattgagaaatttggtgatctaattctgaaagctacagagccacaaatggttttgttcaacatctatgatgactggttgaagagtatctcatcatacactgcattctcccgactcattctgatccttcgtgcgcttcacgtgaacaatgagaaggctaagatgttactgaaacctgataagacaatcgttactgagcctcaccatatttggccttctctaactgatgatcaatggatgaaggtcgaagttgctttaagagatctgatactttccgactatgccaaaaagaacaatgtgaatacatcagccctgacacagtctgagattcgtgacatcatccttggagctgagattactccaccctctcaacagaggcagcagatagcagagattgagaaacaggcgaaggaggcaagccagctaacagctgtgacaactaggactacaaacgtgcatggagatgagctcattgtcaccaccacaagtccctatgaacaagcagcatttgggtccaagacggattggcgtgttagagcaatatcagctactaatctttatcttcgagtgaatcatatatatgtgaactcagaggacataaaggaaactgggtacacatatatcatgccaaagaacattttaaagaagttcatctgtatagcagatctcaggactcaaattgctggatacttgtatggaataagccctcctgataatccccaggttaaggaaatccgatgcattgccatgccaccgcaatggggtactcatcagcaagtcaatcttccatcagctcttcctgaacatgatttcttgaatgatctggagcctttgggatggctccacacacagccaaatgagcttcctcaattatcgccacaggatgtgacatcccattctcggatattagagaacaacaaacagtgggatggagagaagtgcataatcttgacatgcagtttcactcccggttcttgctcattaacagcctacaagcttaccccaagtggttatgagtggggacgggttaacaaagatacaggaagcaaccctcatggttaccttccaacgcattatgagaaggtgcagatgctcctaagtgatcggttccttgggttttatatgatacctgacaatggtccgtggaattacaatttcatgggagtgaagcatacagtgagcatgaaatacggggtgaaactggggacaccgagagagtactacaacgaggaccacaggccgactcatttgcttgagttcagcaacttggaggaaggtgagactgcataaggagatcgggaggatacattcacctaagtctgggttcatgtcaaccttgttcgttgttgattctgtagcttacgcctgttaacactttgtgcccgaaatattagtagaggcctgacgtttttgtttgaatagctgcgtgtactttatataccatttgtaacaatgctg

SEQ ID NO: 191288 - DNA, 1516 bp, Gossypium hirsutum
aaaaaccacaccactggcttatagaccaccatgaaatagaccttcgatctaacacctttccttttcatttcccctttccttaaaaacaagctcaatcaattcccccattaaccctaaacgaaaatcagctgaaaaaaaaaccatttatttttcttcagctctaagcgacaacaacaatggctgacttcaagaaagccactgctttgattctcacagtggctttgcttgtgaatctcgctttaatggttgatgctgatggtgatgatgataagaagattcgagtcaggaaacataagggtgagaagcagtgtatacaaggatgggaatgttcctactggtcgaaatattgttgcaacaaaacggtttcagatgtcttccaggtttatcaatttgaggacctgtttgctaaaaggaattcgccggtggctcatgctgttggattttgggattaccattcttttattttggctgcttccatttatgagcctttgggttttgggactactggtggtaagcgtatgcaaatgaaggaagtcgcggcttttcttgctcatgtcggcgccaagacatcttgtggagatggtgtcatagacggaggaccgttggcttggggtctttgcttcaagagagaaatgagtcctagccaggattactgtgatgattactacaaatacatgtatccatgtgcccctggagctcaatactacggccgtggtgctttgccaatttactggaactacaactatggagctgctggcgatggtataaaagttgatttgttgcaccaccctgagtatctcgagcagaacgcaactattgccttccaggctgccatctggaggtggatgaccccaatcaagaagaaccaaccttcagcacacgacattttcgtgggtaactggaaaccaaccaagaatgacacagaggaaaaacggggtcctacttttggctccaccatgaacgttctctacggagattacacttgcgggcaaggcgatatcgatcccatgaacatcatcatctcccattaccttcattaccttgacttactaggtgttgggcgagaggaagcagggccacacgaggagctaagctgtgccgagcagaaagcattcaacccaaccccagctccacctgctgccagtgcttcctgatctttggttcagccaatttcattgttaaaatgcagttgtcaatgaagggtaatttaataagagagctgggcaattaggttgttgtaaaatcatggtctatgtcggtgtgagaaaagggcccatcaatttcatgatattatatatagttgtatacgtttgatttgctgctgttaggtggtctttataatttgcttttttgtgtgtgtgtagattttgatatatttgatgcttgttgtgctgtccacgacattcatataaaattgtatgtattgaaccaccatttttattcaatttaacacataaatcatttatttaaaataaagaaataatataatttgtttatataaaaaaaggggcggccg

SEQ ID NO: 191289 - DNA, 656 bp, Gossypium hirsutum
aaattgttgaaatggataagcaactgcaccgatgacgtgtggaacacggggaattaatcgctagtgctgaaggagcaaacaaattggtggaggaaatgcatggaaaagcgaaggaactagaggatgaaatcgagaggcaaagtagagcaatagaggaagcagcggaagagaaaagagaagctatacgacaactctgcttctctctcgaacattatagagatgggtattataagcttaagcaagcatttacggggaacaagcgagtccctattttggcaacatgaacatcgcaatgtttcttgtttaacatgagaacgaaacaatcaacaaagcacattcaactccggtcacatcgatcaatgggtcgagaggatgaacttcgtgggggttctgtttgtgtatcactttaagcttcgctaggccttgctgtcaagtgtttcatcctgtttctgtacatgcatgcccatgcacatgttatcagggcccaatgaggtacacgtcttgctatactgcttctcaaattgtagtcattgatcaattatgcattgaatcaagataagttgacaaatatatatgtatatatacagggtgggagaaatccatcctattatatgttgcatggatcctatatttatatatattaaatgtcattatat

SEQ ID NO: 191290 - DNA, 391 bp, Gossypium hirsutum
gccggatggctacaaggaagttggggattccggtgagataagagttccttccgttgctccgaaagcgtcaagagcgaatagcgagaggaggggttcgaatcgagggatttattccaattcaacaaaggagaaagggcctgggagcatggaattcacgatggaggaaattttgaaggccacgaggaacttctcccctgctttcaagattggacagggtggatttgtgacggtttataagggaagacttgatgatggaacctttgttgctattaagcgtgctaaacagagtgtatacgataagcatttaggtgtggaattccagagtgaaataagaacactggcacaagtggaacacttgcatttggttaaattttgtgggtatttaaaacat

SEQ ID NO: 191291 - DNA, 646 bp, Gossypium hirsutum
cccacgcgttcgtgggtgaattcttcttattacactccccgatcacatttcttgcattggccagatctgactcccccccccctctcccttttccaaaaagagagagttcccctctccatctaaaaaaatggaatatcgatcgagatctatccacaaatccccctccatcatgatctccgccatcctcttcctctctctgatccacacctctcattgcttctaccttcctggtgtcgcccccgaggacttccaaaagggagatcctttgaaagtgaaagtgaacaaattgacctctataaagacacaacttccttattcatattattccctccctttctgtccaccaaaaaagatagttgacagtgcagaaaatctcggggaagtgcttcgtggtgaccgtattgaaaactctccttatgtgtttaaaatgcgtgagccacaaatgtgttctgttctttgccggattacacttgatgccaaggctgcaaagcagtttcaggagaagattgatgatgaatatcgagtcaatatgatcctggataacctgccccttgttgtccccattagaagattagatcaggcttcttctactgtttatcagcttggctaccatattgggcttaaaggccaatatgccgggaacaag

SEQ ID NO: 191292 - DNA, 904 bp, Gossypium hirsutum
ggagaacactggtggaatggccgcacctttgttcttatcgtcacaacactcggcatcttctctccattggcatgtttcaagcggatcgattccttaagatttacatccgccttatccgttgctctagcagttgtgtttcttgtcattactgttggaatagcaattatcaagttgattagcggaactgtaatgatgcctagattgcttcccgatgtcactgatttgacctcattctggaaactcttcaccgtagtccccgttttagtcactgcatatatctgccactacaatgtccacagcatagataacgaactggaagattcaacccagataagaccggttgtgcgaacagctctggctttatgctcaactgtttacataatgacaagctttttcggatttcttctatttggtgacgccacaatggatgatgtgcttgccaactttgataccaaccttggcatcccctatagttccctgcttaatgatgctgtccgtgtcagctatgctgctcacctcatgctcgtatttcccattgtcttctatccactgcgactcaacatggatggcctcctcttcccttattcaagtcctctagctcagtctaatacaaggtttgcttgtattactgccggactcgtagcagttatcttcttgggtgcgaatttcatacccagcatctgggatgctttccagttcactggagcaactgctgctgtttgccttggcttcatttttcctgctgcggttactcttaggaatcaccacttcatagcaacaaagaaggacaagatgttagctcttttcatgatgggccttgccgtattctcgaatgcggtagccatatacagcgatgcatacgccctgtttaagaagaattcaggagcaggacccaaggcatgat

SEQ ID NO: 191293 - DNA, 510 bp, Gossypium hirsutum
ccttctcgtccgcttctttgttgctatgaagtggtgattcctaagagtaaccgcagcaggaaaaatgaaggacaagatgttagctcttttcatgattgtccttgccgtattctcgaatgcggtagccatatacagcgatgcatacgccctgtttaagaagaattcaggagcaggacccagggcatgatccatctagcagttcccttggttgcacaaaatgagattttatgtcaccatatccttgaagacacctggagttatctttcgatatccaattcgaaaatccaggtgttcggaggaggtttgataagctatataataagatgtagctttgcttccaatgtatgaaagttagattgtgtggggaagtgtatgaagttcatacatcataccccctcccccctcctctacttaggttgtgtaagacattaaaacatgttgtaaaatagcaaatatagcatatttcagaaaaaaaaaaaaataaactaaaatttgaaataaataagtaat

SEQ ID NO: 191294 - DNA, 1104 bp, Gossypium hirsutum
  unsure (1)..(1104): unsure at all n locations
gaacaactgagcaagttaaggctgcactagctgcctgcaatgatttgaagttggatggccttgtaattattggaggtgtaacatcaaacacagatgctgctcaacttgctgaaacatttgctgaagctaaatgtccaacaatggtggttggtgttcctgttacactgaatggagacctcaagaatcaatttgttgaaaccaatgttggttttgatactatatgcaaggtcaattcccaactcatcagtaatgtctgcactgatgctctctctgcggagaagtactattattttatccgtcttatgggaaggaaggcatcacatgttgccctggaatgcaccctccaatctcatcccaatatggtaattcttggtgaagaagtggctgcatcaaagcttacactctttgacataacaaagcaaatttgtgatgcagttcaagctagggccgagcaagacaagaaccatggggtcatcctcctgcctgaagggcttatagagagcattcctgaagtgtatgcgctattgaaggaaattcacagtttgctcaggcaaaatgtatctgctgataaaatttcttcccagttatcaccttgggcatctgctttgtttgaatttttgccacatttcataaggaaacagcttcttctccaacctgagtcagacgattctgcacagctatcacagattgagacagagaaactactggcgcaccttgtagagaatgaaattaataagcgcctgaaagcaggcacttacaaggggaagaaattcaatgctatttgccacttctttggctatcaagctcgtggatccttaccatcaaaatttgattgtgactatgcctatgttcttggacatatctgctatcatattcttgcagctggtctaaatggttatatggcaactataaccaacctaaagaatcctgtgaacaagtggcgttgtggtgctgcacctcttccagcaatgatgactgtgaagcgctggtctcaaaatcccaatgccgcgtcaattggaaaacctgtttcatcactctgagattgaaggcaagctatanatctgaacaatgcacaggttttgctgagattctcgaattctgacc

SEQ ID NO: 191295 - DNA, 1283 bp, Gossypium hirsutum
cacagattgagacggagaaactactggcgcaccttgtagagaatgaaattaataagcgcctgaaagcaggcacttacaaggggaagaaattcaatgctatttgccacttctttggctatcaagctcgtggatccttaccatcaaaatttgattgtgactatgcctatgttcttggacatatctgctatcatattcttgcagctggtctaaatggttatatggcaactataaccaacctaaagaatcctgtgaacaagtggcgttgtggtgctgcacctcttccagcaatgatgactgtgaagcgctggtctcaaaatcccaatgccgcgtcaattggaaaacctgctatacatccagctactgtagatttgaaaggcaaagcatacgagatgctgagacaaaatgcagcaaggtttttgctggatgatatctacagaaatcctggacccctccagtttgatggtccaggtgctgatgctaaggctgtgacattatgtgttgaagaccaggattacatgggccgcatcaagaaactgcaggaataccttgacaaggtccgtaccattgtgaagcccgggtgttctcaggaagttctgaaagctgctttaagtgtaatggcttctgtgacagaggttctgtcagtgatgtcttcatcgtcatctggcggacaagccctttgagaagaaagcagtgattgtaatggtgctctcgttttccttaatgatcctaaactgtttgtgagaaactgaattttgaggtacccctgttttcatcccgtccggatggaagatattttattggtttctgaaaagagataatatattaataacaaatcgttaagtgtctacgcatgttaacggtattcagcggttagaagtggattttaagcgggctgatggagtctttgtttaattcactcttattataataatgaaaaagacatgttcaaatagattttaagaggttttttaatgggatggtacggtcaaatcttatcataggggtgtaggggtgtagataaacagagcgatgaactgttcgtgaattattggtataatgtttgtttattaagctaaataaacgagcatgaacaaattttttatgtttgtttaatgaacgaacacgaatagatgtgtatttggtttatttatgctcatgaacaaatttgtttatcaatttgtctatgacttgtttatttattaatgttataaaaatttcattttggtatgtattttttatttataatataatgattaatatttatatttgactattctatattt

SEQ ID NO: 191296 - DNA, 1103 bp, Gossypium hirsutum
aagatttgactttttggagacccctctttcgttcaagtttttcaaaagatcttcatctcaatctccgatccgattcgagaggtttttcattgttttttttttttttggtgttgcgcgtcgtcgatggctgctccaccagcaagagctagagctgattacgattacctcattaagcttcttttgatcggcgacagcggtgttggtaagagttgccttcttttgcggttctcgagatggttcccttcacgaccagctttatcaccaccattggtattgattttaagataagaaccattgagcttgatggcaaacggataaagctccaaatttgggacacagctgggcaggagcggttcaggacaatcacaactgcttactatcgtggagccatgggcatcttgctggtctatgatgtcacggatgaatcctcgttcaacaatattaggaattggattcgcaacattgaacagcatgcatcagataatgttaacaagatattggtcggaaacaaggcagacatggatgaaagcaaaagggctgtgccaacctcaaagggacaagctcttgcggacgagtatggaatcaaatttttcgaaacaagtgcaaagactaacctaaatgtggaggaagttttcttttcaatagcaagggacataaagcaaagactcgtcgatactgacttaaaggctgagccttcaacaattaagatcaataaacctgaccaggcagctggggctggtcaagctgcacaaagaccggcttgctgtggttcaacctaagggagctcaaacctggtgggacacgtattggatgttaaaaactacttttcttcaaaaaatggaggggaaagagaaaactaattgtggtgactggatgatgagtgcctgtattttcttattgtcattctttataacttgttttagggtgtgaggatgtagtgtttttctttataattgtttgtgtcatgtgaagaacataaccttctgtttctcccccatctctcggctccttcatgtcaggaagcctaagttctgactgcttgcaagactagttcatttgttggtagggaaggaaatggaaaatggaagtggtttctttatatt

SEQ ID NO: 191297 - DNA, 413 bp, Gossypium hirsutum
gaaggtccttcaactttctgtgctttcattccttattgtgatattgtcattgaatggggcaactttagctcatccttatggagatttccttcattgcctttctcttcgtatatcaaactcttctactatttctaaagttatttacacccaaaataatccctcgtattcatcagttttgaatgcttctattcataatactaggttcgctacacccaccacccctaaaccctatgccattattacaccactcaaaacatcccatgtccaatcaacaatttattgttccaaaaaccatggcttccaacttaggattcgaagtggtggtcatgatgttgagggtgtttcttatgtttctcaagttccatttgtcgtccttgaatttttgggtcaactttcgagatgttaaagttgac

SEQ ID NO: 191298 - DNA, 490 bp, Gossypium hirsutum
caagggaaaattggattcactccaaccagcacaactacaagccttattccaggctctacaactctgagtttttctccaggcaccacagctgggatgttttctctaaacactacaactacacgcttgactccagctgatatgactaaaaaatttcctccattgggtactactactagctttacctcagctagttcaactacaagcttcactccagttggtctgacaacaagctcaatcgcagctggttcaaactcaagcttttcatttggcctttcaaccgcaaattttacttcctccagtgcaacaaatagcttttcttcatctaacatgacctcaagctttgcatctccttggagcactggagcattctctaatagtcagagccctttcttgtttggaactcagagctcagtttcagtggacaacaatgcagcagatgatgcagatgatgaaaatgagttgccacagccaagcagtccatcagtgaaga

SEQ ID NO: 191299 - DNA, 444 bp, Gossypium hirsutum
cctattgcaagtgatcttactttctcaaggtactggaattgcttgaggaagcaaacatttgttttggaatcatatataagcacggttaattggctaatgaatagagcactgtttttaacccacttctatctgtcatggggatttgttgcaccgtacttcatggctatggttcatgttgcagcagcactacaaatctatataaaagattattcatatggcgaaacaacctgtacttctggtggattgttattggcaatttggctagctatatgtaccttcacggagctactttctatgtggaacttaacaaggattgaagttcaactatgcaacattttatctccagaggcacctaagctctcacttgattattacaactggagcatgatttttgttgcaatgctggttgataattttctatacccgatctctgcattctggtcg

SEQ ID NO: 191300 - DNA, 718 bp, Gossypium hirsutum
tttcagtgtttgcgggtgttggagaacgtacaagagagggtaatgacttgtacagggaaatgattgagagtggtgtaattaagctaggtgacaatcaggctgagagcaagtgtgctcttgtctatggtcaaatgaatgaaccccttggtgcctgtgctcgtgttggccttactggtttgactgtggctgaacactcccgtgatgctgaagggcaagatgttcttctctttattgacaacattttctgctttacacaagtgagatggtttattgtggaagctttggaaacattttacattacggctccgtttggaagctaggaaaacattttctggaaaatattgtcctggttttacggtgtttggcagcttgaaaatattttacacttggaaaatggattccaagacacgggtaaaatgacttgcaatttggggataatgtcttaccgatttcttttcagggaggcgattttccatctccttcatccaggtaaaatttctctgattcttccgttcttgaacttcttatatttcttccctttttccttggttcgtcgcatatatatgctcttctcaggcaatacacgctgctatttcgtctttctcaggcaaagctcttttttagggcaagaaagaaactttctatggaatccattgattacccatttggagaagaattgaaggtaataccaaactaagccagtgtgggaaaaacaaaa

SEQ ID NO: 191301 - DNA, 732 bp, Gossypium hirsutum
gtttgcaagatatgcgttttgagaatggatcaccattgcacatggataaataattgcgtcggccatgccaactacaaggtcttcttcatctgtgtcgtatatgcagtaattgcttgcatctattctctggttttactcgtgggtagtctaactaatgattcccaaaacgacaagcagcaaagtgcagactctttcagaatcttatacgtgatttccggattgttgcttgtccccttgagtatggccttaagtggtctcttaggttggcatatctacctcattttgcaaaataagacgacaattgaggggtgagagccacatggcttcaagagagagcagggaacgtctataagcatccatatgatctcggtgcctacgataatctaacaacggtattgggttcaaatatcatttgctggatatgccctacatcaaggcacataggtaatggtctccgtttccgaacagcctatgatggcttaccagttgcatcaacatcaaaatgaagtttgcgtgttacttgtggtaacatgagggcttcaaatatccccagttttcaagttgtagcctataataccgtcacctcctggtagtccaggacaaagaagccccggtggcgccagcaagtgataatggaggaggatctgaaaaaggacctatagcaaggctgtttcaaaaagtaatttagaaataggattaatggggttttttactaatatgtcataacaatgt

SEQ ID NO: 191302 - DNA, 412 bp, Gossypium hirsutum
gcaagcacgagtttcatcttcagtgcattcttgaatggtggcaaaggagttctcagtgcccgatgtgctggcagccaatcagcctgaaagatccaaccagccaggagttgcttgaggctgctgaacgtgaaaggagttttaggtttaatccttctagaaatgcagccatatttcatcatccaacgctggtcgattttgaactacagcatttgccattggggacaaatgatgctgaacttgatgagcgcataatccagcacttggctgctgctgctgcaatgggacgagcacgtcacattgcatggagggaaggtatgaggaataggtcatcaattcaaggtcgtcctcaattcttggtattttcaacacatccaaatgcaccttctactgttcctatatcctcactagttgc

SEQ ID NO: 191303 - DNA, 493 bp, Gossypium hirsutum
gtgcgtgcttttatgagaacacggcttgggtggagtgccataacaaaaccggcagtgaatttggcggtggaactctacatataaaggtcagctacccccatagttggacttgtatggatctttatgtgttcgcaactccgtaccgcgtaacttgggattattattttttgtctcgagagcatacgctcgaaatcaaggaatggcaagataaagctgagtatgaatatgtgaaaaacagggggatttcaatttttctgatgcaagcagggatgcttggaacacttcaggctctatgggatgtgtttcccttgtttacaaataccggatggggtgagaattctaatattgggtttcttgagaaacatatgggggctacttttgaagaacgacctcagccgtggtttactaacatcagtgtcgatgatgtacactcgggagatttccttgctatatctaaaattcgtgggcaggggggtggtttcgagactctcga

SEQ ID NO: 191304 - DNA, 884 bp, Gossypium hirsutum
  unsure (1)..(884): unsure at all n locations
aaagatgttaatgatgtattatgtatggtatttagatcaacaccttctagtttgagggatttcatcaagtggattgtacagattcggagacaagatgatggcagtaccgttttaagtaaataggagaaaggaagggttgcactcaagacttgtctccaaactttgctcaagaggangactgagcaatgcctcctttacaggtcagtttcttgtttctttgtcatggatggatgtatttacaggactgagcaatgcctcccatacacaatttagcaattttggaagctctcattcttctaattcagctcagcatcagtcagtctctgtgaatgagcagttggaagagaagtggtatgctagtccagaggaaatcaatgaaggtgtttgcataattttatctaatatatacacgtttggtgtgctgctttttgagttgctttgtcaatttgaatctgagagagcacatgctgctgcaatgttggatctatgccataggatttttccttcaacttttctatcagaaaatctcaaggaagctggatttgtcttagactacttcacccagaaccttctttgcgcccaacaaccaaggattatcctacaatcgagtacttaatagattccagaagatttgcagaaaaatgcgtatccattaaccggatgatctgaatcagaatattatgcattttcttgttatcaaagagaaaagctagcatgcttgaattatgagaantgctgcttgagcgattttagagtgtnaaaaggtgaccctntatgtntcttgattatgggataatattttattcaataacctaatttgttatttaggaaatataaaattttttttctcatanacatatattattatagaaatcggtggggct

SEQ ID NO: 191305 - DNA, 408 bp, Gossypium hirsutum
cacgagcagtgttgggatggggtcgatacaaaaaccgcctacgcacgctttacagtatatcaaagagagctcgccattatcaagagcaaataaaaagagtgtttttttttttaagtttaaaactaatggaacgcgctccttattagatcataattggatgaaatctcgcttattttaagctggttttgcgctatctttctatttgcagctctgctcctacaaacaaggtttgaacgatgtcccggcctctgcctctgcatcgaggtgtatccggactgcggaacttgagtaacagcaatgatttttgggattctgaagtgaaagatttaacggataaggaagatttggatagaaatcgtgcttctgatcagagctatttatctctcaagtttcctttttctttaactt

SEQ ID NO: 191306 - DNA, 440 bp, Gossypium hirsutum
gttgctaacactttcgggtcatttgctttactcgtactgtttgcgttgggtggcttcgtcctgtcacgagaggacataaagggttggtggatatggggttactggatttcaccaatgatgtatgggcaaaatgcattgatggctaatgagttccttgggcaccagtggagtcgagtccttccgggttcaaacgtatcactaggagttgaagtcttaaattccaggagtttcttcccagattcatattggtattggatcggagtacggggattgattggcttcgtattattgttcaactttgtctttactgtggctctttcctatctagccccctttgagaaggataaggccgtaatatcagatgaacctgaaagcggtaacctatcaagtcaatggggctggagttggtggaagcattcagttaacaaaccatgaaagca

SEQ ID NO: 191307 - DNA, 415 bp, Gossypium hirsutum
  unsure (1)..(415): unsure at all n locations
catatattttcattgcaatattcttagcagaatcaaacctgacatggagttttcaaaggtttctaccctagctcttacttgtctcgtggggttagtcttggtccttccctcccatgcccaagactcacaacaagactacctcaacgctcacaacacagctcgagcggctgtcggcgttggtcccatgacttgggacgacaccgtagctgcctatgcagagaaccatgctaagcagcgcatggctgattgcaaccttgtgcactccagtggacattatggtgagaaccttgctgggggcagtgctgacctctcgggaaccgatgctgtaaatatgtgggttaatgagaaggccgactacgattacagctctaacangtgcgcagcaggtaaggtttgcgggcattatactcaaatg

SEQ ID NO: 191308 - DNA, 461 bp, Gossypium hirsutum
atttcttaagaaagtgatagatactgaagaaaagagaaagtatggacggaattcaacacaaaacggtgattgtcaatggcatcaacatgcacatagccgagaaaggggaaggtccattgattctcttccttcatggcttccctgagctctggtactcgtggcgcaaccagatcaacggtttagccgccctcggctaccgtgctttggcgcccgacctccgcggttacggcggaacagatgcaccagattccgtcgccgattacacttgctgccacgtggtgggagacctcatcgcgcttctggacacagtggcgccgccggagaaggaggataaggtgtttgtcgttgggcacgattggggtgccatcattgcttggtacttgtgcttgtttagaccggaccgggttaaagctttgttcaatttgagtgtgccggttattccttatgatcctcggtttaaa

SEQ ID NO: 191309 - DNA, 563 bp, Gossypium hirsutum
cggacgcgtgggaaaatttttaatttttttctgggaatgtgcagttcaagataagatagctttacacgtttcccaattcagcaatccatttctgcaaccaaaaacacgaagcactccatcaatttataaactcgaagcaatttgaagaaatcccatcactcatttcacctccaatccttttaaaaacagggcattcaatatgcaggagaccaataattctcgagtcaaccaacgaattgcaacaatctcggctcatctcaacccacccagcttttcccacatggagggtagttcgggtttgggtcgagctgactgccgagccgaaggtgggtcaactggtttcaaggtggcgattttgggagcggcaggtgggatagggcaaccgttatcattgttgatgaagatgaaccctttggtttctgctcttcatctttatgatgtggttaacactcctggtgttactgctgatattagccacatggatactggagctgtggtacgtggatttctggggcaacagcaattggaggaggctctaacaggaatggaccttgtaattattc

SEQ ID NO: 191310 - DNA, 407 bp, Gossypium hirsutum
ggctgctggtggatttggaggcatcaggatcctcaggaggcccaggatcccggtccctttccccgaccctgccagcgatttcactgttcttatcggagactggttcaagactgaccataagaaactgcaagccaagctggataggggtcataaacttcccttccctgatggtattctaatcaatggtcatggtcctaatggtgcattcttcacagttgaacaaggcaaaacttacaggtttaggatctcaaatgtggggcttcaaaattcactaaatttcagaattcacggtcataaaatgaagctggtggcagtagagggaacccacaccgttcaaaccatgtatgagtcacttgatgtccatgtgggtcaatcctattctgtgcttgttaccatggatcaatctg

SEQ ID NO: 191311 - DNA, 1101 bp, Gossypium hirsutum
  unsure (1)..(1101): unsure at all n locations
tcgcccacgcgttcgcggacgcgtgggattttgcccatttcactgctctcccctagatcgtctccaagagagagatctccttacagctaccgtacacattcacacacacattcactgaatgggtcgagtcatccgagctcaacgtaagggtgctggttccgtcttcaaggcccacacccaccaccgcaagggtcctgctcgtttccgcagcctcgacttcggtgaacgaaatggctacctcaagggtgttgtcaccgatgtcatccacgaccctggtcgtggcgctcctttagcccgtgttgtcttccgtcaccctttccgttacaagaagcagaaggaacttttcgttgccgccgagggtatgtacactggacagttcgtctattgtggtaagaaggctactcttgtggtcggaaatgtattgcctcttagatctatccctgaaggagctgtcgtttgcaacgtcgagcatcatgtcggtgatcgtggggttttcgctagggcttctggtgattacgctattgttattagtcacaaccctgataacgacaccaccaggatcaagcttccatctggttcgaagaagattgttccaagtggttgtcgtgccatgattgggcaggttgctggaggtggtaggactgagaaacctctgcttaaggctggtaatgctttccacaagtatagagtgaagaggaactgctggcctaaggttcgtggtgtggctatgaacccagttgagcatccccacggaggtggtaaccatcaacacattggtcatgctagtacagttagacgtgatgctccacctggacaaaaggttggtcttattgctgcaaggaggactggtaggctcagaggacaagctgctgccactgctgccaaggccgataaggcttaataggatactactagttgttttggcgtttatattgacatcaatgactgttaaagcacatttaagctagaaattttgtttgaaatttcagatatggtactgttttggagtttggatgacggttgtttatgttttgagtttgggtttttatgtgaaagtgttttatgccagtgtttccaaannnnnnnnnnnnnnnnnnnnnn

SEQ ID NO: 191312 - DNA, 1160 bp, Gossypium hirsutum
  unsure (1)..(1160): unsure at all n locations
antcacgccacgtctgtccgtcccacgcgtccgcaanccccttctatctcctttttcactaacgctctctctccccatcgtccgcctccaagagaagacagagaggtctcctcacaaccaccgtaatgggtcgtgtcattcgagctcaacgtaagggtgccggttcggtcttcaaggcccatacccaccaccggaagggtcccgcccgtttccgcagcctcgacttcggtgaacggaacggttaccttaaaggtgtcgtcaccgacgtcattcacgaccctggccgtggcgctccgttagcccgcgtcgttttccgccaccctttccgttacaagaaacagaaggaattgttcgtcgccgccgagggtatgtacaccggacagttcgtgtattgtggtaagaaagctacccttatggttggaaatgtgttgccccttagatctatccctgaaggagctgtcgtttgcaacgttgagcaccatgttggtgaccgtggggttttcgctaaagcttctggggattatgctattgttatcagtcacaaccctgataacgacaccaccaggatcaagcttccatctggttctaagaagattgttccgagtggctgtcgtgcgatgattggccaggttgcaggtggtggtaggaccgaaaaacctctcctcaaggcgggcagtgcataccataagtacagggtgaagaggaactgctggcctaaggtgcgtggtgtggctatgaatccagttgagcatccccatggtggtggtaaccatcaacatattggtcatgctagtactgttaggcgtgatgctcctcctgggcagaaggttggtcttattgctgcgaggaggactggtaggctcaaaagacaagccgctgccaccgcagccaaggctgataaggcttaancgtagggtattacttattgttttagttcttttggcatttatatttaggttcattttgtttgaatttaataatgcttgtgttttcaatttggattgcttattcccaagttctttcatcacttgatgctaatttttccgatccttggttctctcatgtaaccttccataatgctgtttaccaaagcacttggatgttgggganactgtanaggcgaaaaggtggcctatggaacccgtatcataaaatatttc

SEQ ID NO: 191313 - DNA, 457 bp, Gossypium hirsutum
tggtgtagctatgaaccctgttgagtatcctcatggaggtggtaaccatcaacacgggggtgatgctagtactgttaggcgtgatgctcctcctggacagaaagttggtcttattgctgctaggagaactggtaggctcagaggacaagctgctgctacagctgccaaagctgacaaggcttaggcttaggcttaggcttaggatattacttgctgtaattttagttcttttggtcttcagattttacattcaagagtgtttaagacctttatgcttgaaaatgtgtttgaattatcagatattggtactgttttgagttgtttgagcaatgattttgtttttgattcggatttttacccatgtttttggtatttgttggtttcggcttttaccccctgttttatggtcgagttttttgaatcgagttattaggtatgaaatattttggatttttgt

SEQ ID NO: 191314 - DNA, 540 bp, Gossypium hirsutum
cccacgcgtccggtttttattctctagagtcttcccttgtccctgttaaaatctgtcactgtgatcattaatggccaccgctgaacctgaagttccagtcactgagcagcagcccgcggcagcagaggagccaaagccggcggaaaagcctgtgaaggagaagagacccagagctccaaaggagaaaaagcctaagcaacccaaatccgcagcacatcctccttattttcagatgatcaaggaggcgcttttggctttgaaagagaagagtggatcaagtccgtacgctatagcgaaatacatggaagagaagcacaaggcggtgcttccagcgaatttcaggaaaatcttaggtcttcagcttaaaaactcagctgccagaggcaagctgataaagatcaaggcctcttacaagctctccgaagccggcaaaaaagagagagcccctgttacgaaagctaagatggagaagaaagcttaacccggcttcaaacccgaagaaagctgaggctacaaagaagccaacaaaagagagtcggg

SEQ ID NO: 191315 - DNA, 646 bp, Gossypium hirsutum
tgagagctatacgctgaatatcacttccgtacaaggatttgaaacctttatgtcaagcttaaagaataaaacatttcgcccaagtaaggaaggtagcggagtggatcttggttttaagttgtgtagacaattaccaaagcagggatggtggtcaaccaggcttgcactgagttgaatcaggcatggatggagtctggtgtatctgaggatgcagtttcaggtcatatacagttgctgattccgggagaaactgcttgttttgcatgtgcacctcctttggttgtagcatctggagtggatgaacgaacactcaagcgtgaaggggtttgtgccgcatctttgccaactaccatgggagttgttgctgggcttctagtccaaaatacgctaaagttccttgttgggatttggacacgtttctccctacttggggtacagttctcttaaagacttcttcccaacaatgacaatgaagccaaatccccaatgttcaaatgctgcctgtctggagcggcagacagagtacattcttgcaaagccagccagggatgctgcagcgaaagccaagatggaggctgaagctgctgccgctactgcagcaggagatatgccactccatgttgataatgagtggaacataagcgtt

SEQ ID NO: 191316 - DNA, 1566 bp, Gossypium hirsutum
  unsure (1)..(1566): unsure at all n locations
gattcttagcgttttctgcttcgttgtctctctgctcgaaatcttcttcattctcattctctctccactgaactcttgctaaacggtatcgttttagtcagtctttcatcaatggcgaaagaaccggttcgcgtcctcgttactggagctgcaggacaaatcgggtatgctcttgtacccatgattgctaggggagtcatgttgggtgctgaccagcccgtgatccttcacatgcttgatatcccacctgctgcggaggctttgaatggtgtcaaaatggagttggtggatgctgcttttcctcttctaaagggtgttgttgctacaactgatgttgttgaggcatgcactggagtcaatgttgctgtcatggttggtggtttcccaaggaaggaaggaatggagaggaaagatgttatgtcaaagaatgtgtctatttacaagtctcaggcttctgccttggaacagcatgcagctcctaactgcaaggttttggttgttgctaaccctgccaacaccaatgcattgatcctgaaggaatttgcaccttcaatccctgcaaagaacattacctgtttgacaaggctggatcataacagggcactaggtcaaatctcagagaaactaaatgtccaagtttctgatgttaagaatgtgattatttggggtaatcattcatcaactcaatatcctgatgtcaatcacgcaactgttatgactccatctggagaaaagccggttcgcgagcttgttaaggatgatgcatggttgaatggagaattcataaccactgtccaacaacgtggtgctgcaatcatcaaagctaggaaactctcaagtgcactatctgctgctagtgctgcttgtgatcacattcgtgattgggtccttggaactcccgagggcacatgggtttccatgggggtttactctgatggttcatacaatgcaccagctggggtcatctattccttccctgtaacttgtaagaatggagaatggacaattgtccaagggctggcaattgatgaattctcgaggaagaagttggacttgaccggagtggagctgaccgaggagaaggaattggcatactcgtgcctctcatgaatgcattcatcatttccataatctgtttggaagaggagtggtttgccttaataggattagctgcagttttgaataaaaaaccgttctagatgaactgttagtgattggtaagcgacgtcctctgatcgagatcttcattatacttgtcacttgttcatggatattttggatattttaccgtaatcccggattttatgctccaattttaaatgggttaatcgacactgttggtgaccattgttttttttgtctatctagtgtattgtttactgtgaatctcaaaaaaaaannnnnnnnnnnnnnnnnnnnnnnnnnnnnnnnnnnnnnnnnnnnnnnnnnnnnnnnnnnnnnnnnnnnnnnnnnnnnnnnnnnnnnnnnnnnnnnnnnnnnnnnnnnnnnnnnnnnnnnnnnnnnnnnnnnnnnnnnnnnnnnnnnnnnnnnnnnnnnnnnnnnnnn

SEQ ID NO: 191317 - DNA, 439 bp, Gossypium hirsutum
aggcgtgcgcccacgcgtccgcggacgcgtgggtaaatttctacttcactctctccacttaactcttccatctgtacgggatcgttttgtgtggtctgcggtctccatcaatggcgaaagaaccagttcgcgtcctcgttactggagctgcaggacaaattgggtatgcccttgtacccatgattgctaggggagtcatgttgggtgctgatcagcctgtaatccttcacatgcttgatatcccacctgctgcagaggctttgaatggagtcaagatggagttggtggatgctgcttttccccttctaaaaggtgttgttgctactactgatgttgttgaggcgtgcactggagtcaacattgcagtcatggttggtggtttcccaaggaaggaaggaatggaaaggaaggatgttatttcaaagaatgtgtttattta

SEQ ID NO: 191318 - DNA, 398 bp, Gossypium hirsutum
aagcagcttgccttaaccacatttccagagaatcctctgacgttagacgccttgctaatttctacaaagaggtaatttctttagaaaatttctttaattctcttttgttttaaaggtttttagctgtttttatacgttaaaaaacgatcgagcatttatgtttttgctttagatctttgggttcgaggagattgagagcccagatttcggggagttcaaggtaatatggttgaatcttccgggatcttttcccatgcatttaattgaaaggaacccactcacgaaacttcccgaaggtccgtacagttccacggcggccgttgctgaccctagtaatcttcctagaggtcatcatatttgcttcaccgtttccaatttcgattcttttgttcagtctc

SEQ ID NO: 191319 - DNA, 432 bp, Gossypium hirsutum
acatagtacgactggaccaacggcttcttgatgctccagtggctgaagatggagagaattggagtgttggacaaagacagcttgtttgcctggctagggtcctcctaaagaaaaggagaattttggtgttggatgaggcaacagcttccattgatacagctacagacaatgtaattcaggagacaataaggaaagagacatgcagatgtacagtcatcactgtggcacatcggataccaactgtcatcgacaatgacttggttttggttcttgataatgggatgatagtcgaatacgataagccaaagatattactcgaggacaaatcttcttggttctcgaaattggtggctgaatttttgagatcatccaagagcaaccaccctaagaatctggtttgaaggtatgtggacagcttttagaactcaaatg

SEQ ID NO: 191320 - DNA, 1148 bp, Gossypium hirsutum
cccacgcgtccgcccacgcgtccgacgacgtttacaggggaaacaaacagaaacgaagaaattccaactctttattctctcaattttttcccacatccaaacagctacattgattgaatttgaaactcaaaagaaaaacaaaatgagtgtaatcgatatattgacaagagtagatgtgatctgcaagaggtacgataaatacgacgtcgaaaagcagcgtgaccaaaatgtctccggcggtgatgcttttgctcgcgcttacgccgcagtcgaagccgacattgaatccgctcttgaaaaagtggaacttgcttccaaggagaaaagtaaggcatctgctgttgcagtcaatgctgagattcgtcgaaccaaggctcgattgcttgaggaggtccctaaactgcagaggttggctgttaagaaggttaaagggatttcaaccgaagagatgactgctcgtaatgatctggtcctcgcattgccggataggattcaagctatacctgatggaactgctgctcctaaaactggaggcgggatgtcttcagcaccttcagcttctcgtactgaaattaagttcgactcagatgggcgatttgataatgaatactttcaagaatctgagcagtcaagtcagttcaggcaggagtatgaaatgcgaagaataaagcaggaccaaggtttagatatgatttcagaaggtttggatactttaaagaacatggctcatgatatgaatgaggaattggataggcaagttcctttgatggatgaaattgaaaccaaggtggataaggcagctggtgacctaaagaataccaatgtcagacttaaacacactgtcactcagctgagatccagccgaaatttctgcatcgatattgtcttattatgcatagttttgggaattgctgcctatttatacaatgttttgaagaaatgaagcgataaaaggataagtcgatccgttcccttatgttctgtcatcttttcttgcattgtcttccatcttgagggcttgctaaggtggtcgatctcgtatttgatttgtttcttttgtgggaatcattggtcacactggcataatgtgagtttatctatatattatgtgatttacagagatggattatcacattattttaaaatga

SEQ ID NO: 191321 - DNA, 396 bp, Gossypium hirsutum
gttccgttaccaatattaacggcgaaagaaaagaaggcaattgcttttcttttcttttcttttcttttcatccaaacagcttcatttatcggtagactcatcgaagctaattagacaaaagaagaagaagaagaaaatgactgtcattgatatattgaccagagtagatgtgatctgtaagaagtacgacaaatacgacgtcgaaaagcagcgagaccaaaatatctccggcgacgatgcctttgctcgccaatacgctgctattgaagccgacattgaatccgctcttcaaaaagcggagcttgtttccaaggagaaaagtaaggcatctgctgttgcggtgaatgctgagattcgtcgaaccaaggctagattgcttgaggaagtccctaaact

SEQ ID NO: 191322 - DNA, 410 bp, Gossypium hirsutum
gctgatgagagcgtcagctgagttgcttgggaggggaaccgtagggacgacgtacaaggcagtgcttgataatcgtacggtggtgacggtcaagaggctggatgccgggaaattagcagccacgacgaaggaaatgttcgagcaacacatggaatcagttggcggtttaaggcatcccaatttggtccccctcagggcttatttccaagccaaagaagagaggcttcttatctatgattttcagtccaatggcagtcttttctccctcattcacggatcgaaatcaacaagggcaaagccactccactggacgtcctgcttgaagatagccgaggacgtagcgcaaggtctctcctatattcaccaagcatggaggcttgtccacggcaatctcaagtccactaacgttc

SEQ ID NO: 191323 - DNA, 881 bp, Gossypium hirsutum
caccagtaaggagtggatcagggccgtccatttctactctgccgttttccaagatctgatatccgagggtttgctctcgcctcactccaagtctctctgcgtggagactcccttgggacaggaagtgttcgcgttgaaagagatcggcgtggagaactccatcggtattttcaagaaagcggccaagcctttggtggttaaaggtgaggggcatcagataccgttcgatgataattcttttgacttcatattctccggcggagctcgcctcgacacatctgctcgcccggcggatttcgcgtcggaaatagctcggaccctgaaacccgaagggtttgtggtggtccacgtcaaggctaatgatacatacagtttcaactcattacttgatttgttcagttctttcaatttagttaaaacgatcgacatggctggtttcgattcatcaatgccttatattagagagattgtgttgagaaaagatactgtaattcgtaaccatgggggtagaaagattcccgatggtgtttccggtaataagtgctcggttccggggcacaaacgggaattggtccaaaaagcagagccgcttattgaggaagagccattgaagccatggattaccttgaaaagaaatattaacaacgtgaagtatttgccatcaatggttgatataagtttcaagaaccgatacttgtatgttgatgttggggctaggagttacggttctagtattggaagctggttcaggaaacaataccctaaacagaacaagacctttcatgtatatgccatcgaggccgacaagactttccatcagcagtatgaatcgaagaagaagacggtcacgctgttgccgtatgcagcatgggttaagaacg

SEQ ID NO: 191324 - DNA, 417 bp, Gossypium hirsutum
  unsure (1)..(417): unsure at all n locations
ggtgaacttccctgatgagactccacgtaccactccagagcatgctgttaaaatgaattctcagaaacctctttccgggtcaaatttgagttctgttcaatcaagtctcaacccagatttcagttactcgaacaaacttgagcagggctactatgataccgtgggtttcattgaagagaagtcactaatggatcagtttgcatatgcagaccctgttagagctgctgtagatgatgggttaaaaccctttgctgaacctgagaataccgcttcgtattttaactcagatcagggaagtaacaactttgacagttccgaccttgtctggggcgaacagggtgcccagactcctgaaatatcatcctctcttgaacctactctagaggtcaacgagtttctggacaacgcanaccctac

SEQ ID NO: 191325 - DNA, 723 bp, Gossypium hirsutum
cccacgcgtccggctattcccacatccagaagagatgcaaaggaaattggctgccaaaggtaggcatatggtgacaattgtggatccgcatattaagagggatgagtcatttcacttgcacaaggatgcttcccagagggggtattatgtaaaggatgcaactggcaaggactatgatgggtggtgctggccaggctcctcctcctacccagatgtgtgaaatcccgagattaggtgcatggtgggctgagaagttctcctatgataattatgtcggttcaactccttcattgtacatttggaatgacatgaacgagccttctgtgtttaatggacctgaggtgacaatgcccagagatgctttacatcttggtggagtggaacatcgggagttacataatgcctatggatattacttccacatggcaacagctgaaggccttctaaagcgtggagatggtaaggacagaccttttgtcttgtccagagcattctttgctggaagtcaaaggtatggagcagtctggactggtgataattcggcagattgggatcatctcagggtttcagtcccaatggttttgacgcttggtcttactggaatgacattctctggggctgatgttggtggattttttggcaatcctgagcctgagttattagtgcgttggtatcaacttggtgcttattatcctttctttagaggtcatgctcatcatgaca

SEQ ID NO: 191326 - DNA, 479 bp, Gossypium hirsutum
tcttttgctcatcaacagagcagcatgcctacatcagtgatttcaagtcagagcatgcatttaggagtactagcaactgcatctcatgccgtttcaacacaaaccctctttgttgtctactataggccaaggacaagtcagttcattattgggttgaacaaatatttagaggctctgagcaataagtttacagttggcatgaggtttaagatgagatttgaaggagaggattctcctgagagaaggttttctggcacaatcgttggggttgaagacttttctccttactggaaagattcaaaatggcgttcattgaaggtacaatgggatgaacctgcctctataccaagacctgacagggtttcaccatgggagatagaacccttcgctgctcctattccaccaactctgggtcaacctgttgctgctaagaacaaaaggcctagaccaactgctgaaattcctgctctagatttatc

SEQ ID NO: 191327 - DNA, 433 bp, Gossypium hirsutum
caaacagggtcgaattacaattgagaaaaacgcaatgggtcaaaagatgatgatgatggcggtccttgtgatattagggacgatgatggcagcgttcacggttgcgcaagagacttgtgcgcagagcctggtgccttgtgctccttaccttaacaacgccactgcacaaccgcaggatgattgctgtaatcctatcagacaagccgtggatactcaacttacttgcctttgcaacctctttaacgaccctactttgctttcatcttttaacgtctccgtctctgaagctcttaggatcgctcgtgagtgtggtgtcactacaggtctcaacgcctgcaacaatgctacttctcccacgtctgctccacccccgccaggtgaaagtggaggtgctgataggatagtattgaccggaatcaccactttgttctta

SEQ ID NO: 191328 - DNA, 476 bp, Gossypium hirsutum
ctgtaactggctctcgcattaaacacctaggtgaggaaaattccagatcgcgatctgcccactttcactatcaatggcgaagccaaggctttcgcgcgttccggcccggaaatcttcatcgtcaaccatgtttctaactctgctcatcatgttcaccttcctggttttgattcttttggcgctcgggatcctttcaattcccagcagtaactcccgcagttcgcacaaacccaacgatttgagctcgattgtgcataacgtcgtcgacaaaaacgattatgatgagggggtaggagagcaatgggttgaagtcatctcctgggagcctagagcttttatctatcacaatttcttgtccaaggaggaatgtgaatacctaattgaccttgccaagcctcatatggaaaaatcaaccgttgttgatactgaaactggcaagagtaaagatagcagggtgcggacaagttctggaacat

SEQ ID NO: 191329 - DNA, 657 bp, Gossypium hirsutum
gccctcatcgtcaccattacagagagcgtgagtgagtgagagacactgcaagcctttactttaccaaacaccatggatgctgctgagagctggtcgagaaccaaatgggtcttccattttatgcttatattcgcacatttctctcttctatcactagctgaagatggtctggtggccaatggggatttcgagacgccaccgtccggcggcttcccaagcgaggcaatatccgatggagcccccgagatccccagctggagcacgaacggtacggtgaagcttgtgtccgccggtgaaaaagtgagcggcgggatgctactcatcgtaccccgaggcaggcacgccgtcagattgggcaacgacgcggagatcagtcaggaagtgacggttgagaaaggatcggcgtacgcggttacgttcagtgcggcacgcacttgcgcgcagatggagtcactgaacgtgtccgtaccacctgcatcgcaaacggtggacctgcagacattgtacaacgtgcaagggtgggacccttacacgatttcttttgaggcgcaggaggataaagcccggttgatttttaggaatccgggaatggaagatgacccggaatgtggacccatcatcgatgatatagccatcaagaaactcatcacccctgat

SEQ ID NO: 191330 - DNA, 437 bp, Gossypium hirsutum
catagatgctggatttgagctaaagctatgcatatacatttctataatttcaaatttttaagtgtgtttcggtaaaaaaaataaaattaaattgtttagcattttaaagtgcattgtgattgttcatttatgtttgcatgcatttatatgtgccttgccgcatctttcttctttatagaatattataaatctataaatatattgattgttagttttattttatagatataggccgactcattatatagaatattagatatataaaaggtttttggatatacatagagcctttatcagttaatccttttcatatttattctatatatatctcatttttctcattcctttaaatggcgccagatgaaaaaaaaaccctcaaatttaagtctatgcaactatacaagtttcgctcttgttacaaggtattatttaatttc

SEQ ID NO: 191331 - DNA, 1206 bp, Gossypium hirsutum
  unsure (1)..(1206): unsure at all n locations
gtccggccgacatgtatggacccaaaactaacgaaatgcttagtgcctttccaccagaatttcgttagttatggttggaaaggcattgaagcatttgccacgagagaaggtacagttggctacaaaattcggtgttgaaagcatgggtccaggtggtccggttatcaatggcactcctgaatttgttcgttcttcacttgaggctagccttcaacgccttgatgtggattatattgatctttactatataatcagagttgaccgcaagactcctatagaagataccatggaagaactgaagaagttggtggaagagggaaaaataaagtacattggtatatctgaagctagccccgaaactataaggagggcacacgctgttcatcctcttactgccgtacaacttgagtggtcgctctggactcgtgatgttgaggaagaactaattcccctttgcagggaactcggaattgggattgttgcatatagtccccttggtcatggtttctttgccggtaaagcaaaggaggatacctctaatagttctctggaagtgttcccaaggtttcaaggagaaaacttggagcaaaataggatcctatattcgaaagtagagaagttggctgaaaagcatggatgtacaccggcacaacttgcacttgcctgggttcttcatcaaggggatgatgtttctcctattcccggaacaaccaagattaaaaatctagacagcaacattgaatcagtgaaagtaaagctgacaaaagaagatttgaaagaaattacagatgcgatcccaatccatgaggttgcagggggtacttatcctgaaggtttaaagcaattcacttggaaatatggcaatacaccaccaaacaagaggacctaggtttagaagcaaagcttcatgggtgttgggatgaatggatttcccaagaaactgcagccattgaaagattgatgagttactaaagtttggattgtcattaatggagggttcagtatttatgatgttgttgtgtcatattttgtatcgtgttctttttagttgtttgaaataattaagtgtaagtgtttacttggacgaatagagttgtagctattgtttaatcaatgtatggttttattggtctatatagttcttgatctctctggtctctnnnnnnnnnnnnnnnnnnnnnnnnnnnnnnnnnnnnnnnnnnnnnn

SEQ ID NO: 191332 - DNA, 810 bp, Gossypium hirsutum
ctttgtttgtagaagacagaagaagaagaagaagaagaagaagaaaaaaaggaaacaaaagatggcaattgagattcctagagtgaaacttggaactcaaggatttgaggtttcaaagctgggatttgggtgtatgagtcttacaggtcacgatcattcagtgtcagatgaagatggcatagccatcattaagcatgcagtcgaaagaggagtcactcacatcgatacagccgacctcgtatggacccaaaactaacgaaattctggtcggaaaggcattgaagcatctgccacgagagaaggtacagttggctacaaaattcggtgttgaaagcatgggtccagatggtccggttatcaatggcactcctgaatttgttcgttcttcacttgaggctagccttcaacgcctcgatgtggattatattgatctttactatataatcagagttgaccgcaagactcctatagaagatactatggaagaactgaagaagttggtggaagagggaaaaataaagtacattggtatatctgaagctagccccgaaactataaggagggcacacgctgttcatcctcttactgccgtacaacttgagtggtcgctttggactcgtgatgttgaggaagaactaattcccctttgcaggtttgttcttctatcttcaatcatcggtaactttttttttattcgaatatagatatattcaaatttttatatatttggagggatataaatatacccttttgctcaaatatattgaaattcacttattgattggcttttctcaaagtatcaactggttt

SEQ ID NO: 191333 - DNA, 700 bp, Gossypium hirsutum
  unsure (1)..(700): unsure at all n locations
tatccacctgcattgcatgatgaagtgtggagattggacagaatagccaaagatggagcattacataagaagttgttgaaagctgaaattgtgacggttgaagattttcttcgacttcttgttcgggattcacaaaaactaagaaacatcttgggaagtgggatgtcaaatagaatgtgggagaacacagtggagcatgctaagacttgcatcttgggaggaaagctttatgtttattaccctgatcaaacacataacactggtgttgttttcaatcacatttatgaactcagaggtcttattgctgatggccagttcctatctttggaatcacttaaccacaatcaaaagctttttgttgattccctggtgaagagagcatatgaaaattggcatcaagttattgaatatgacgacaaggttctcaatacccttagaagtacaaaggtagcaaatccgtcagctgcaccggtaaacgataacaactacgatgcagattactatgccacaactgctcaaaagagtagacagcagtatatcacctcagagccaagtccacaatgcccataataatatacccacccaaacagtcatcagtttgattgaatttnccttntgaggtctgatcagaatgcagcattgacaatgaaatatcagaaagcattattactagtaccacnaccataagtacatgccaatn

SEQ ID NO: 191334 - DNA, 696 bp, Gossypium hirsutum
  unsure (1)..(696): unsure at all n locations
cggacgcgtgggtctgaaactcaccttccatattatttaaactaaatacaggagtcatttgttttgggggaatgcctgagaaaatggcttgttttcaatatatagtagctgctctatgctttgcagttttacttgagggatcgttatcaaaagctcaactgaccccgacattttacgatgaaacatgcccaaacgtgacagccattatccgacatgtgctcgtgaatgcttcgttttcagatccaaggattggtgccagtctcatcaggcttcacttccatgattgttttgttcaaggatgtgatgcgtcgattttattggacgatcctgtgaatggtgagaaagaagctattccaaataataattcagctaggggttatgaagttattgatgccatgaaggctgccttagagagtgcttgccccaacactgtttcctgcgctgatattctcgctattgcatctgagcaatctgtcagcaccctgccgggcggtccttcgtgggcagttcccctaggaagaagggatgggttcacagcaaaccggacactcgccaactcaaacttgccaggtttcaacaatactctcgaccgattaaggaacaggtttacaatgtgggcttacaccagcttgatctatagcctgctgtgctacactttgcnnactatgttaactttacatcgatgtcatnttacgg

SEQ ID NO: 191335 - DNA, 1121 bp, Gossypium hirsutum
cccatgcgtccgcccacgcgtccgcccacgcgtccgtccacgcgtccggtcgattttattggacgatcctgtgaatggtgagaaagaagctattccaaataataattcagctaggggttatgaagttattgatgccatgaaggctgccttagagagtgcttgccccaacactgtttcctgcgctgatattctcgctattgcatctgagcaatctgtcagcaccctggcaggcggtccttcatgggcagttccactaggaagaagggatgggttcacagcaaaccggacactcgccaactcaaacttgccaggtttcaacaatactctcgaccgattaaagaacaggtttagcaatgtggggcttaacaccagcattgatctagtagccttgtctggtgctcacacatttggcagagctcagtgtttaacttttaccagtcgattgtacaattttacgggagtgggtgatacagatccgaccttgaacaccacatacttggaagaactacgccaaatatgcccacagggtggaaatagtagtgtgttgacaaatcttgatcccacaacacctgatggtttcgacaataactacttcacgaatctacaagttaatcgaggcttgcttcgaagtgatcagaatttattttcgactgagggtgctgatacaattgaaattgtgaataggtttagtagtaatcaaacagctttctttgaaagctttgtggaatctatgatcagaatgggaaatataagccctttaacaggtacggaaggagaaattagatcaaattgccgcgccgtgaattcagcaactatcagatccaactcagatgctgctctcgtcagctcaatataatatttgctgaactgaaggctaagaaaaatgggcagaagagaagctattttcctactcaaaatcaaaacgaataatatatctgaactctttaatgcctacaataaaaccctacgacgcttgttgattgtaaaaataaaattaagcacgatgcatggcaaaacactgtactaaagacatggcgaggacgttacaaagaatgttcatgctgcacaaaaggctctttgggtgcgtgcaaaagcgaaactctctggctcaacttggaaaa

SEQ ID NO: 191336 - DNA, 352 bp, Gossypium hirsutum
aggttatagtattacgggaaacaactttctttgtgcggcttctgaacatatatgcacagatgtttcttatccattaaatgtggcaggctcagtttcgtcttctcgagtcagtggaaaccatcattggctgctttctgttgccataggaattggttttgcatttgtggtttccgtgatgctgcttgcttgttgggtgcgttggtacagatctcggattatgctaccctcatacgtgcagcacgattatgattttgaaattggtcatataaagaggttctcctatcgtgaactgcaaatcgccaccagtaattttaactccaaaaacattttaggacaaggaggatatggagtt

SEQ ID NO: 191337 - DNA, 1589 bp, Gossypium hirsutum
caacaatttaaataatgaaggaagaatacgaacagttcttgatgttggttgcggtgtcgcaagttttggagcgtatcttctttcttctgacattatagcaatgtcattagcacccaatgatgttcatcaaaaccaaatccaatttgccctggaaagaggaattcctgcatatcttggtgttctagggacaaaaaggctcccttacccgagcagatcatttgaacttgctcactgttctcgttgtaggattgattggcttcaaagggatgggattcttcttcttgagctagaccggttacttagacctggaggctattttgcctactcgtctccagaggcttatgcacaagatgaagaggatctcccgatatggaaagagatgagcgcccttgtggaacgtatgtgttggagaatagctgcaaagaggaaccaaactgtcatttggcaaaagcctttgacaaatgattgttatatggaacgagcacctggtacaaatccaccgctctgtcggtctgatgatgatccagatgcagtttggggtgtgccaatggaagcttgtatcactccttattccgaccatgatcagaaagccaagggaagtgggttggctccttggccagcgagatagacatctcctcctccaaggcttgctgattttggttattcaaatgaaatgtttgaaaaagacacggaaacttggcgccagcgggtagagaattattggaatctcttgagtccaaagattgaggccaacactttgagaaatttgatggacatgaaagcaaacatgggatcttttgcggctgctctaaaagagaggaatgtttgggtgatgaatgtcatccctgaggatggaccaaacacacttaagttgatatatgacagaggcctcattggcactactcataactggtgtgaagccttttccacataccctcgaacctatgatttactccatgcttggactgtcttttctgatattgagaagaaaggctgcagtgccgaggatttgttactcgagatggatcgtattctccgtccaagtggattcgttatcatccgggacaaacaaccagtgatagatttcgtaaagaaatatttatcagctttgcactgggaagcagtagcaacagctgattcagataatgaaggggatgacattgtttttatcatccaaaagaaattgtggctgacaagtgaaagcctcaggaattctgaatagagtatttcaaccctcacagtttccccctttcttatttcatctgcagctccaaagagattaagaaggccaggcattattaaaatgcagtaaacagtttcattttgtagcattaaacaaatggttcacattatttttttgtttacctttttttttctttttctttttaatgaattacttgacaagccataaactggtcattgtgatctataggctattattcaattttttttctctaatttggtgttgttcaaagctactttagctgatggcaaataaccatatacacataatttgtaatgctgaacggcataatcattatgggttttaactactaagttcttccataaatgaatattcttcttatcaa

SEQ ID NO: 191338 - DNA, 435 bp, Gossypium hirsutum
ccaacaggaagtttatcagttcaatgtgccgactttcggccctggtgtggtgtttgatgtggattactcaataaggcaagagcagttccggttctttacggaggcccttcgagttaataaacttaagggttatgtagatcagatggttactgaagctgaggactacttctctaaatggggggatagtggtgaggtggacctcaaatatgagttggagcatctgattatcttgacggctagcaggtgtcttttgggtcgagaagtacgtgataagcttttcgatgatgtgtctgcactctttcatgatcttgataacggcatgctccctatcagtgttatcttcccttacctgcccatccctgctcatcgccgtcgtgatcaagcttgaaagaagcttgcagaaattttgcaaatatcatttcctctcgtaaaaat

SEQ ID NO: 191339 - DNA, 517 bp, Gossypium hirsutum
cccacgcgtccggtggaggttttttgcaggattgaaaatcaatgtcaagttcatctccttttcttctttttcattgccttaacctctagggcactagcttgaaacctttttttttctttttccatttagttttgggggtgtgtttaatggctatggagatgcagagcggggggaagatgatggggttcttggttatcttgttggttttgtttatagagatggcagcacccactactgctagcagaaacagcttttctacccaaattcttgaggttcaaaaccagttgaagctcttgaacaagcccgctgttaaatctattaagagtccagatggagatataattgactgcatcaaactttcacatcaaccagcttttgaccatccaatgctcaaaaaccataaaatccagatgaccccaaactttcatccggaaggtgtttttggtgaaaacaaagttgcttcaaagatgaaaccaggttcatcaaggaatgttacccagatgtggcacttgaatgg

SEQ ID NO: 191340 - DNA, 416 bp, Gossypium hirsutum
cttctctcatcttcacttgccttccctttaaagcttttgggaatttgggtaaattttacagggtaaataatgacaagctttatatcgactcactgttgtaattggtcggttggagtgtcggaacacgtttgcagcagcaggggaagatttcataagcctccaggactcagatgttgtggtccatattttcatctcggtgggtttagtttttcccggggtcaggctcaatgctttgctgctacttcctctcaaagtcgtgggagatgtggtcctatcttttccggcgccgtcgatgatggtggcgctgactcgggtgatgctgaggatggggatggacagaaagaatcttcacaaagcgaaaaccaaggaacaaacggcgatatacttcgggaaaaccttgaacgaatagttggcac

SEQ ID NO: 191341 - DNA, 383 bp, Gossypium hirsutum
caacaaatgaaggaaatccttcaccatatctatcttcatttggccgactaagaaaatcaaaacccgaacctctcttgattttccctcaatcgatcctagcacccctctcttaagcaccgatctgcctctatcaatggtgacgaatagattcgggcttcgagggacgacaatctcgaccacgagattccttctacgcttcagtttcaacaaagaagacggaatctcttagcacatccgcaaggtaaatctattgttttctctttgtttttaaatgcgaaaaactaatggaatcgaaagataaaagaagaaattaaaagtattttattccaaaaacaccttttcaattttgattccttttttcaatctcccttcccccgatttaa

SEQ ID NO: 191342 - DNA, 523 bp, Gossypium hirsutum
gaaatccttccctatatctatcttcatttggccgactaagaaatcaaaaccctaacctctcttgattttccctcaaccgatcctaacacccctctcttaagcaccgatctgcctctatcaatggtgacaaacagatttgggcctcgaaggacgacaatctcgaccacgagattccttctacgcttcgatttcaacgaagaagacggaatctcttagcacatccgcaaggtacggaggcaacgtgacggggtagttggcgcgtacggaggctattggtggcgcagctgctgctagggctagggtttgctgcaaacatgatttaggttttgggccctttttgggcttagggttttattagttttgggttttaaatttgggtttgggtttgtaatgttttgggttttaaatttggacatttaatggactgttaatatttggatttttttgtttatttttgcttttgtctgatttgggcttattgggcccggtcaaatttgggcatttacaattataattatataat

SEQ ID NO: 191343 - DNA, 399 bp, Gossypium hirsutum
aaaaaatagatcttatggtggtggtaatcaatcaccaagacccaaattatgaaatttagtcaaaaggaaggttttgagaaagagaaagacaaaggaggggagggttctttatgaatttgattacctgaaatcacttgctttgaggtgttttgggatgggttctgtgttttccttttatgttgtgtgattaaaaatgttggggttgttgaaagcatgtttcttttttgaggaaatatagggcagttatagaaaggatgggtgtcggtcatcaatctagggaagtagtggaggaaaattcaccacggaagaagaaagatggagggctagacgaaacaggctgctgcgttaattcaaggcttatcggacgcagcatgtctgccatatcaacacttgataact

SEQ ID NO: 191344 - DNA, 586 bp, Gossypium hirsutum
cggacgcgtggtggtgagcgaaccgctggagaagaaattcaagaagttgatattatttccgcaattgaattcgataaaactggggatcatcttgcaactggtgaccgtgggggccgtgtggttctttttgagaggacagatgcaaaggatcatggtctatcaagaagggatctagaaagaacggattatccaattagtcggcaccctgagttgcgttacaagacagagttccagagccatgagcctgagtttgactacctcaaaagcttggaaatagaggaaaaaatcaacaaaatcagatggtgccaaacagccaacagtgcactgtttctcctctccgccaatgataaaaccatcaaattttggaaggtacaagaaaagaagatcaagaaaatttctaaaattattgctgacccttcgaaagctgttggaaatggaaatgttgctagttcaagtaattcaaatagcccaaaatcttttcttgcaaatggagtctcccccgacagatcctgcaaccatttgggcaatgacatctctttcccaccaggaggccttccatcgctatgtttacctgtggtaacaagtc

SEQ ID NO: 191345 - DNA, 377 bp, Gossypium hirsutum
cctagggtcgtcgaagcttagactacttcagtaaagtcttcatttttaggtaaaaaagaaacacacaaatggttgtgctgtcatcggcaacttcaatgagaaccaaaaaaaccaaagcagtagggattcccgtcgttgatctttccctcgataggtccaccgtatcggagctaatcgtcaaagcttgtgaagactatggtttcttcaaggtcatcaaccatggcgtacctagtgatacaatatcgagacttgaagacgaaggggttcgtttctttgacaaggaagcaggtgataagcaacgtgcagggcctgcaactccatttggttatggtttaaagaacatcggtcttaatggtgataagggtgaacttgagtac

SEQ ID NO: 191346 - DNA, 797 bp, Gossypium hirsutum
  unsure (1)..(797): unsure at all n locations
caaaaactctctcattttatcactgccgctctgccagcagccgcgccacactctacagagagctcatcaaccatggcggaacagaccgagaaagcatttttgaagcaacccaaagtgtttttaagctcaaagaaatctgggaaagggaagagaccaggaaagggagggaaccgcttctggaagagcattggtttgggcttcaagactcctcgtgaagctattgaaggaacctacatcgacaagaaatgcccattcaccggcactgtttcgatcaggggtcgtatcttagctggtacttgccatagtgccaagatgattaggacaatcattgttcgacggaattaccttcattatatcaagaaataccaaaggtatgagaagaggcattcaaacatccctgcacatatttctccatgcttccgtgtgaaggaaggggatcatgtcattattgggcaatgcaggccgttgtcgaagaccgtgaggttcaatgttttgaaagtgattccagcaggatcttccggtggtgggaagaaagctttcaccggaatgtaagcttttctatggtagtccatggttataggaaccaatagagaagataatcaaagaaattaagttcttaaactgcatttagctttgaggatattttactgttagaattgttttctttttttgggttattttcttgttttgattttgtcgaattacgaaatccggaattttgaagatatctttatttaagtttggctttggnnnnnnnnnnnnnnnnnnnnnnnnnnnnnnnnnnnnnnnnnnnnnnn

SEQ ID NO: 191347 - DNA, 895 bp, Gossypium hirsutum
cccacgcgtccgcccacgcgtccgcccggttttcatttccccttcgcaagtagccagccgtttcacacactcaagaagagcgagagctcgtaaatcatggcggaacagaccgaaaaagcttttttgaagcaacccaaagtgtttttgagctcgaagaaaggtgggaaagggaagaggccaggaaagggtgggaatcgcttctggaaaagcattggattgggcttcaagactccccgtgaagctattgaaggaacctacatcgataagaaatgccccttcactggcactgtttcaatccggggtcgtatcttagccggtacttgccacagtgccaagatggtcaggacaatcattgttcgacggaactaccttcattatatcaagaaataccaaaggtatgagaagcgccattcaaacatccctgcacatatttcaccatgcttccgtgtgaaggaaggggatcatgtcattatcgggcaatgcaggccgttgtcaaagactgtgaggttcaatgttttgaaagtgattcctgccggatcttctggcggagggaagaaagcttttactggaatgtaaggtgtaactgttttcaatcatagttcgggttgtaggaacataaggagaagacattaaaatccctgaactgcctctagatatgaagaacctgggactattagatgtttttatgtttttgtttttcctttcctattacttgttatgtttggatttgtcttgttatgacaactggaattttgaaggtatcccctattctagtatgatcctgttctctgaaaataagataataaagagaacattaaaaatgctgctacaaaaatcaaaaatgaggatggtcttctgacatatggatcatcatgtgttgtaaaaaagattcttt

SEQ ID NO: 191348 - DNA, 522 bp, Gossypium hirsutum
gtttgccggcactgtttcgatcaggggtcggatcttagctggtacttgccatagtgctaagatgattaggacaatcattgttcgacggaattaccttcattatatcaagaaataccaaaggtatgagaagaggcattcgaacatacctgcacatatttctccatgcttccgtgtgaaggaaggggatcatgtcattattgggcaatgcaggccattgtcaaaaaccgtgaggttcaatgttttgaaagtgattcccgccggatcttccggcggtgggaagaaagccttcactggaatgtaagctgcgagtgttattctgtgtttttgtctggggtcgtaggagcctatgtttcactgttagatttcttttgttattgtttttctttccatttactttttatgtttggatgctgacatctggaattttgaagatatcacttgaatatgcttgaatttttgcattactagtatattcccattttcagatgctgaatctattatttaattatgatattatggatg

SEQ ID NO: 191349 - DNA, 433 bp, Gossypium hirsutum
  unsure (1)..(433): unsure at all n locations
gtgaaacctagacccatcatcataatctcaaaaaccctgaatttccccccttttccatccccaattttcaaccccaatccaaaaaccatgtcttggtcttgcaccaaatgcactttcctcaactccccatcccaaaccgccgcttgcaaagtctgtctctcacctccgtcaccgtcaccgtcttcgccgtctaaatgggcttgtaaagcttgcacttttttgaacctttacaacaaatccaactgtgaaatctggggtacaaggtcttgtctttccagtttcgatgatttgaaagttacgaactttaacgatgaagccgattcctctgttgggtctgttttcttgcctttgaagccttgtaataaaaagaagatcagggaaccaaatctgggtaatgaagatngtatcgaattgngtggttttcgtggcatta

SEQ ID NO: 191350 - DNA, 435 bp, Gossypium hirsutum
gtcccccagaacttttgttgggttctacagattatactgcggctgtggatctttggagtgtcggctgcgtgtttgctgaacttcttctcgggaaacctatcctgcaaggacgaactgaggttgaacaactgcataaaatttttaagctctgcggttccccacccgacgattactggaaaaaatccagacttcctcatgcaactctattcaaaccacaacaaccttacaatagttgtcttcaggagacctttaaaattttaccgtgcaactgctgttaacctagtagaaactttgctttcagtggagccgtacaagcgtggaactgcttcctcagctcttgcattagagtatttcacaacaaagccttacgcatgtgatccatcaagcttgccagtatatccacctagcaaagagatagatgcaaaacatcgtgaa

SEQ ID NO: 191351 - DNA, 399 bp, Gossypium hirsutum
  unsure (1)..(399): unsure at all n locations
gtcaagacctccaccgatccacctccggtctgtttgttgattcccgaatagccaagtagaagcaagcatacaagaacgaggagtttggtacaggtacgggtttgctcatcttattcggtttcctcgttttcattctctttaagatacttcatttcttctgaatcaatggttacaattatgttatcttccttgttaatgacactttgggaaggaaattatattaatgttgttgttgttgatgaatccttgtgattgtatgatcaaatatggctaatcgaaactttcgaaccgncagaaacccaactgggtttggttgattatatgtttatatctggaaataaaggccttatgggtaattcctaatttcgtcccaaaaaaacccaactgggtcaactcctt

SEQ ID NO: 191352 - DNA, 747 bp, Gossypium hirsutum
  unsure (1)..(747): unsure at all n locations
gcgcccacgcgtccgcgccatgaacggggacgatattgcggagtggagtactgattttaaggcgggaaactcgggcatctaccccctcaccatcatacccgaaacccatcttgaatatttgttgtcaaaggctgcgtcaacatagatagttgctgtcgtacttcttgtgttctgtctctgacgtatgttatcacctaagttggttcctggagctccatatcatccatgcagcacaacaaaaaagctgacacagttgactgttgcctatggtaaaaacccagggcactgtctaaacacatggttgctatcttcttctacacttcgacaccggggacatgagctatctaaagccactcttcttagtcttaaattctttagggtagggataaagttccatgaaagactccaaatagtgatggcaattttgaaaggaaggcgtagactccataatttcctatagaaattttttgtttcgatctgtactaaataagcattaggatctgtagttgcctattgtaatagtttataggcacttctgactgtaaattggccagaatgttctcctcgccaaacttgaaagtcgccatgttcttcttctgccaaaggaatttgcagaatcttttgtggaatattttctaaaaaggtattttcaattaaatcagctttccactttgnnnnnnnnnnnnnnnnnnnnnnnnnnnnnnnnnnnnnnnnnnnnnnnnnnnnnnnnnnnnnnnnnnnnnnnnn

SEQ ID NO: 191353 - DNA, 716 bp, Gossypium hirsutum
ttgtaatgtaagcaccttcttttagtatacaagaaaggcaacaaagaaaccccagaaaaatgagaactagcaaccatttgatagggttactaaacttcttaacatttttgttgtcaatagtaatattgggtggtggaatatggctaagcagccgagccaacagcacagattgtctcaagttcttacagtggccattgatagtaataggagcttcaatcatggtggtttcgttagcaggttttgcaggcgcgtgttataggaacaccttcttgatgtggctttacctcttcgtcatgttcttcatcatcgccgccctcatcggcttcataatctttgcttatgcggtgactgataaaggctccgggcggccggtgttgaacaaaggttacttggagtattacttgcaggactactcagggtggctcaaagaccgcgtggtggatgagagctattgggctaagattagttcttgcatcagggattccaaagtttgtagcaagacgggcagaacctttaatggcgtccctgaaacttatgacatgttttctatgaggaagctttcccctattgagtctggttgctgcaagccacctacagaatgtggctacgtttatgtcaacgagacactatggaactccggtagtgggctagctgcgaccaacctcgactgctcgcggtggagcaatgaccaacagatgctgtgctaccaatgtgac

SEQ ID NO: 191354 - DNA, 1340 bp, Gossypium hirsutum
gacaaagcaaaaaaacacatttgtattgaactttagttacaagcaagcaccaaaatggatattgagagtgacacaaataataagagctttacatataaacatttttttctttgacttgcaaaacacaattatatcatatcatatcatatctcacaggccccctctcaaactcaatgggagatcctcctcccttacccttcatataaaataatacacacgtttatggagtatgtaaaagaacatatactatcataatgtcattaatgagtgcatctagcatcaaaatatggggattatttgaggaacattttacttggacgcttggttctgcatctgatgaccctgtggttttgtctggcatgctgatgacatgattcgtaagcgtctagcaatctctgtgaatgaaggtcgaaccacgggatccggagcccaacactgctccattagtagcttcacattctgggtcccagtagcttggtacgggtggcctgagcgtgttgctatcgatgcctcctattattgctccataatgcatattggcatacggttcctcgccagtaagaatctcccatagaacaataccaaatgagaacacatcgaccttttcagaaaccttgctactactgccattcaacagctctggggccatccatggaagagttcccctcacaccaccagtaaccaaggtattcctttttatctttgacaacccgaagtccccaaccttgcaaattggccgtacaggatctttcaagttgacaagcaggttgtcacattttaaatcaaaatgcacaatgttttttgaatgtaaatattccatcccaaatgctgcatccatggcaataatgagtcgcttacgacgatcaagttgcctgtctttgctaagcaacacatgtctaagagagccattcaccatgaactctgtgacagtggctagtgttcctccaggtccatcttgcaccacaccataaaaggccactacattggggtggtgaagctttgaaaggatgtcagcttcacgccagaactccacagtcaatctctcttgctcagatgaacgaccagtgaaacagattttttttattcgcttgatggcaacatctgttcctctccattttccgtggtagacagtcccaaacgtacccgaacccaactcccttagctcttccagatcttcatttttaatgatctgcaatgtgcttatatcaaattctccatggcaatgatccacaagaggtacaccagtattctgaatatccaatttcccatccacaaactcacactccggtacttgaaggctttgcccagcttgtacactttcatcacccccgagtggagac

SEQ ID NO: 191355 - DNA, 722 bp, Gossypium hirsutum
gatttttccaagaggagtacatttccgacgggctgggccacgtttaaagatattttgaggaacggtgtcatctacatggataaaataatacacacgtttatggagtatgtaaaagaacatatactatcataatgtcattaatgagtgcatctagcatcaaaatatggggattatttgaggaacattttacttggacgcttggttctgcgtctgcggtcccggtggttatgttcttgaagatgtccctcacttatcggattacatccctgatcttcctgtttattcgaatccgttgcaagacaatcctgcatactcagttgttaagcaatattttgtccatgtagatgacaccgttcctcaaaagattgttgttcacaagaatagtccaagaggagtacatttccgacgagctggaccacgtcaaaagatatatttcgactccgatgacgttcatgcctgtattgtaacgtgtggtggtctttgccctggactcaacaccgtgattagagagatagtatgcggcttgttccacatgtatggtgtgaagaaagtttcggggatagatggaggatatcggggtttttatgctaaaaatactgtgcatttagatcctaaggttgtcaatgatatccataaacgtggtggaactatccttggaacatcacgaggtggccatgatacctcaaagattgttgacagcattcaagatcgtggaattaatc

SEQ ID NO: 191356 - DNA, 708 bp, Gossypium hirsutum
ttttcgcgtccggttttcttttaagataacccccaaaaatgtgtggaggtgcaattatttccgattgcggcgccgtgaaacatgacccgaaattgaccggcgatgacctttggtctgaaattgacatattctccgacctcctaggtttcgacaacaatggcaaaagctttgtcaatcatcagtttcataacaacaacaagaagctgatcaatccaaaagacaatcaacttaacaaagagagaagcgagacgattcagaagacaagccgagtcactaaaaatgttgaaaagactcagcgaactcggaaaaacttttaccgaggaataagacaaaggccatggggcaaatgggcagctgagattagagaccctcaaaaaggcgtccgagtttggctcggtacccataacacagccgaagaagcggctcgagcctacgatgaagccgccaagcgtatccgtggtgataaagccaagctcaacttccctcaaacgcccaccaaaaatcaagcagcttcaccagctcttactctgcttcctcctgctaagaaaaggtgcatcgttcccgagttaactcaaccgagtttccagactgactcaccaccttatcctatgggtcttgggtatggaagaagtgaagattataagccgattgaagtggtggagagtgagttggagttgaaaagacaaatctggagcctggaatcatttt

SEQ ID NO: 191357 - DNA, 547 bp, Gossypium hirsutum
gattataaaatatttataaaaacctcaataatataaaagcttaactttgaagctgcattaaatagttccacaactttttcctgtctagcccacgcgtccgtcttctttcactcagttcgacaacaccaaggccggttccaaagccaagaaccttgaaaaagtggcaaacgagacgactcagaagacaagccgagggagagagaaagaagggaagactcagcgaactcgaaagaacatttacagaggaatcaggcaaaggccatgggggaaatgggcggctgagataagagatcctcacaaaggtgtccgagtctggctcggtacatacaacacggctgaagaagcggctcgagcctacgatgaagccgccaagcgcatccgtggggagaaagccaagctcaacttccctcaaactccacacctaactcagcctcctgctaagaaaaggtgtatgatggctcctgagttgactccgccgagttctgaaaccaagagcccaccaaccccacaactttttatgggttttggttacgagaatggagtttac

SEQ ID NO: 191358 - DNA, 853 bp, Gossypium hirsutum
ataatatattcttcaacggactcgttggttggcaccggccgcctctttgtctcgcttcacgacaagtcccagtttcatttttaattattgttttcacatccattttcactaagctatatatatcgttagttttctggaaatttgagctattgatctttgcgttgaatatggattgtgaaatggagaaaaattcccacgatggggttgtcgttaacggcggaaacgagggcgttttgggcctacatgccaagaggaagaagctcattatcgataccgatccaggaattgatgatagcatggcaatcttaatggcattccaaaatccggaggtggatatcttaggtttgacgactgtatttggaaatgttaggacggaagatgccactcgtaatgccttacttttgtgttagatcgcagggtgtccaagtgttcctgtagttgaaggcagccacgaacctcttaagggtgggaggcccacgtgttgctgactttgatcatggctctgatggaatggggaatatatttcgacctcctccaaaaacagagaaatctgataagagtgcctctgaatttttagttgaaaaggtctctcagtaccctggtgaagtatccatacttgcacttggaccactgacaaatgtggcattggcaatcaaaagagactcttcctttcctagcaaggttaaaaaaatagtagtacttggtggctcattctttgcattaggaaatgttaatcctgcagctgaagcaaatatttatggtgatcctgaagcagctgatgttgtgtttacttcgggagcaaatatcgttgttgtcgggataaacattactacacaagtccaaatgacagatg

SEQ ID NO: 191359 - DNA, 734 bp, Gossypium hirsutum
  unsure (1)..(734): unsure at all n locations
ggcaactgtgttttattacaacaacaacaaaaaaacatcgttctttcgggtctattttttggcaatggagttagggagtgctcttcatttccttgatagcaagtccattttagtcactggtgctgctgggtttctggcaaaaatttttgtggagaaaatactgagggttcaaccaaatgtgaagaagttttatcttcttttacgtgctgcggatcataaatccgctatacaccgctttcacaatgagattataggaaaagatttgttcaaagtcctgaaagaaaaatgcgggaaaaatttcagttcattcatatccgagaaaattacactaattcctggagatatatctcatgaagatttgggcattaaagattgtactttagtgcaagagatgttgaatggggtgtgatgttggggttaaccttgctgctacaaccaactctgacgaaagatatgatgtggcacttggtctcaacacatttggagctcatttgtgcaattcgccagaaatgtgtgaactaaaagtttggtcatgtatcacacttatgtgcangagaaaagacaggcttatcttgaaaatcatacgcatgggagaaacactaatgggttcaggctagacataatttgaaaaagttttgacaaaatgatgactaaatgtagtgctcaacaggattctcaacctgaaattggctcaagggcaattatgtgccatcttgttcaagcatgagaatctn

SEQ ID NO: 191360 - DNA, 424 bp, Gossypium hirsutum
agatcatcgtgaatgggctttcgtttccataactttgcgtctttgcttcttcgtgctgatcttcaatggctccaactctttgctttcttctgatcctttatagattacctatcaccggcattcacctcctccttatattcctccattctctcttataactcttccttctcaccggttttcccggtttcaacaaaatccctgatctttctttctttccgaaggtgaaccaaggggaaaaaaacactcagatcttttatttagaaacaagtattctcagtaaacaaacggaaaatttaaggaatggcatcggtgctgttgtaccatgtagtgggggatctgacggtggggaagcctgagttggttgaattctgcgatgttgagacagttgaatcagctataagagcaataggtggatcaactgagt

SEQ ID NO: 191361 - DNA, 1151 bp, Gossypium hirsutum
gggaggtcctccatttggttctggaggaaggcacagaggcggtagaggagggcatggggctttggttggtactacagtgaaaattcgccagggtccttataagggttaccgtggacgtgttgtagatattaaaggtcaatcagttcgagttgagctggagtctcaaatgaaggttgttacagttgatcgcgattccatatctgataacgtggttatttcaacaccccaccgtgagtcatcccggtatggtatgggaagtgaaactcctatgcaccctgcacgaactccattacatccatacatgactcctatgagagatcctggagcaacacctgtccatgatggcatgaggacacctatgcgtgacagggcctggaatccttatgcaccaatgagtccacctagggataattgggaagaaggaaaccctgcctcttgggggaccagtccacagtatcagccatgaagtcctccttcaagggcatatgaagcacctacacctggttcgggttgggccaacactcctggcggtagttacagtgaggctggaacaccaagacacgccgggtctgctgctggcaatgctccaagtccctatatgccatcaacaccaagtggtcagcctatgacaccaagctcgggaccctatattccgggtacacctggagggcagccaatgacaccaggaactggtggtcttgatgctatgtctcctgtaataggtcctgagagtgaaggaccatggttcgtgccagatattttggtccatgtgcacaaatctggggatgagacacttggcgttatccaggaggtgcttccggatgggtcatgtaaggtggcccttggatcaagtggcagtggggatacagtaatcgccatgcccagtgagatggaaatcataccaccgaagaaatcagacaagatcaaaatcatgggtggctcactacgcggtctgactggcaagctaatcggggtagatggcacggatggcattgtaaggatagatgacagtcttgatgtgaagatattggacttagttatactagcaaaattaccctgataataataacaacaacaataatgataactagcaatgtatatgactggtaagtagtttttgagtaaattttgtttggaattaaaaaaaacaa

SEQ ID NO: 191362 - DNA, 1212 bp, Gossypium hirsutum
ggaaccaatcggcgagtgattttagaggagggagttatgataatgggggtagaacgggaggtgctccggtgaggtcgaagtccacggaggatatgtacacgagatcgcaattggaagcctcggcggccaataaggagagcttttttgcgaggaaaatggcggagaacgaatccaggcctgaaggtttaccaccttctcaaggagggaaatatgttgggtttggatcgactcccatgcctacccaaaggattaataatagttctcagggtgacgtgttctctgttgtttctcaggggattgggaggttatctctggtagctgcatccgctgcaaatgttgtccaagcagggacgaaggagttcacctccaaggttaaggagggtggctatgatgccagggttaatgaaacggttggtgttgtcactgcaaagacaagtgaaattggccagaaaacttggggcatcatgaaaggagtcatggcaatagcttcacagaaggttgaggaatacactaaagatggcatgaactggaaaaatgatggtaactggcaacgaaacgatagcgagaagaatggatattatcaggagtttaaacaggagaataagggatggaattctacttctggtggacaaacctcctctggcgtaaattataattcttataactcaaattcttgggatgattgggacacaaaagacaataggaaggaacatactacaaaagtgactgcttctcatagcaatgatggttgggctggttgggatgaccccaaggatgatggatatgatagtttctataatggtgcatctgataaaaatgccgttggtcgtaatggaaaatcagatgccgcatggactggtggaggctttctttaaggttggtgaacttgaactacatttatgagaatcgtacccacaaacggtaatttatagcacaatggattcctcaagggataatgatattaaatttcatgaagttcgtataccttttagcagtttacccccttttcttatgtatctatctttgaaattttcacaaagtaatatctggagcaactttcatgtttgagagtagttttatcatacttgtacaactgtggctaagtgtccaattggaaagcagtatttgtgagtgtaaaactctagtatcactctgttccttcatcatgattatcttttagtcctgtaataaacaaagggcgcgtacgcgtga

SEQ ID NO: 191363 - DNA, 432 bp, Gossypium hirsutum
gcaaagccgcctcttcttttccactggactttgttttgatccgtagcttctcctcttacataaattaataaagcagtagtggcttttatggagaattatcaaatgttcttccctatctcggccccatcaacagcagctcaatcattaccgttaaacatggcacctaattcccaagcttttaacagttttcatgggaattcggttgatgggttcttaggtttgaagagtaccgaagacttgattcagaaaccagaagctaaggacttcatgaaatcaagtcaaaaaatggaaaagaagattaggaagcctagatatgcttttcaaacaaggagtcaggttgatatacttgacgatggatatcgttggaggaaatatgggcaaaaagctgttaagaacaacaaattcccaagaagctattaccgatgcacacat

SEQ ID NO: 191364 - DNA, 935 bp, Gossypium hirsutum
  unsure (1)..(935): unsure at all n locations
cctgatcaaagctgggattggcagccaagtaaaggttactgttcctctcaatgctgatgtttatgcaagttcaaatacctatccgtctggtggtgatttccgtactgatatctttgaccccatgcttaaaattgtcaagttcttgaatgatagtaattctcccttcacggtgaatatctatccttttataagtctctatactgattccaatttcccagttgagtatgcattctttgatggcaacgcaacgcctctaaatgatggtgggacattatattacaacatgtttgatgctaatcttgatactcttgcacatgcattacaaaagaatggatttggaaatctgcccattatagttggggagattgggtggcccactgatggagaccgaaatgctaacatagaatatgctcgacgattcaatcaaggttttatggctcatatttctggtgggaaaggaaccccaatgagacccgtaccgatagatgcgtatttatttagcttgattgatgaggatgaaaagagcattgatccagggaattttgaacgccactggggtattttttattttgatggacaggttaaataccctctcaaccttggaactacaaacagtggagcattaattcctgcaaaaggtgtacagtacttggaaaggaagtggtgcgtgatgaagccttcagccccacttgatgacccacaagtggcacaaagtgtgagctatgcatgtggccttgctgactgcactagcctcggttatgggacatcttgtggaaacctagatgctaggggaaacatttcttatgcctttaacagttattttcagaagaataaccagtttgaaaaagcctgcgaatttccaaatgtttcagttataacgaaaacggatcccacccctacgngggatgggaaattgcaaatttccaataatgatc

SEQ ID NO: 191365 - DNA, 635 bp, Gossypium hirsutum
gtttaattcttctttaattaaccgttaatcaaattgaagatcatacttattttggatttacgaagagaagtagctatcttttctttgattttcttgttcttgttaagtgatggaaaacaaagcggcggtgaggtttacattagggaagcaatcgtcgatggctccggagagagacagaggcgaagcggatgggaaagagaacgaggaaggagaggagatagacgaaggagttaggttgatgtacttggccaacgaaggtgatttggacggcattcgcgagctcttggactcggggatcaatgttaatttccgcgacatcgatgatcggacggctctccatattgcagcttgtcaaggacagaccgatgtcgtttccttgctccttcagcgcggcgctgacgtcgaatctacagatcgatggggaagcactcctttggcggatgctgtatattataagaatcatgatgtgattaaacttctggagaaacatggatctaagccttttatggctccaatgcatgtaaatcacgcgcgtgaagttccagaatatgagattgatccaaaagaacttgattttactaacagcatcaacattacaaagggaaccttctgtattgcattatggcgtggaacac

SEQ ID NO: 191366 - DNA, 569 bp, Gossypium hirsutum
gagaaaccagaggaagaggcctcttcttctttgaaactagaggtggttgctcaatcagaagagaggccagaagaagccgaagttccccgacctccaccccaagaggtgtctatatggggaattccgcttcttgcggacgaaagaagcgatgttatcctattgaaattcttaagggctagggatttcaaagtcaaggacgcattcaccatgatcaaaaacactgttatctggcgtaaggagttcggagttgatggcttgctggatgaggagcttggaaatgaattggagaaagtggttttcatgcacggatttgataaagaaggtcatcctgtatgctacaacgtgtatggggaattccaaaacaaggagctgtatcagaatacttttgcagatgaagaaaagcgatccaagttcttgaggtggaggattcaattcttggaaaaaagcatcagaaagcttgatttcagtcccaatggtatctctaccatagttcaggtaaacgatctcaagaactcttccggacctggaaaaagggagctcacgcaagctaccaaccaagcccttcactt

SEQ ID NO: 191367 - DNA, 394 bp, Gossypium hirsutum
ccaaagcaaaattcccaaaacacactagaaaatccgagtcaacattttgttccccaaattcattggcctttgcgcagatttctagggtttgtggcggatttcaattcccacttctctgtttctgtttctttagggttttaactaccggtcagttttatttaattattactctcgcttctcttaattttaatcccattgaatcaatcataggagaggaggaagaaattacgagtctatagaaaatggattcgtcgcaagcttcaacgttagggacgagtgggagcggtggaaacgggttggtaagcactcaaactactgagacggcaaacgcaacccctaatgatgatcctaagcagaatctgaatcaagtaatcaactccattcagaaaacttt

SEQ ID NO: 191368 - DNA, 436 bp, Gossypium hirsutum
gttctccatagccgcattctttcctggctgcgaggaacggtcccggaaaattcgagaggttttctcgcaaataaaacttgacccaaaagtaagagatgcgttgacttactgtatccaggcaaaagctatagtcaccgaagagtgagaacatgactgctgaaaagcctccctcaagatctctatacgctagacgtcttgagttcgagcctatgacgttgcttttctataaccatacttcctcctgtgaatcccctatggctgttagcagaggttggtcttaccaattccaatgacctgaattccaccgtactcttggactctacatggatatcaaacatcgtcagaactgaagatctcttctgtgattgtctcggtgtttgtgtttgtttttttcttttgaatggtgaaagatggaaatagacatgactacaacaac

SEQ ID NO: 191369 - DNA, 677 bp, Gossypium hirsutum
caggccagtggcgatagactagagaaaaacctaaggcagagcaaatttgataaaagaaaaatctaaaaaataccccaaaaaaataggaaaaaaaaagtttacattgagagatggtgagcaaaacagaggagacccaattgaataggcttgaaaaccaggtagataatggaggaggaggtgcttgggagtacctttgccttgtgagaaagctcaaagttaggcgttcagagaaagtcttgaaatatggtttatccatcttaaatgatcccaagaaaagatctgctcttggccctgaagaatggactttgtatgagcaggtagctattgctgctatggattgccaatgtctcaacgttgcaaaggattgtataaaggctttactgaaaaaatttcctgagagcaaaagggttggcaggctggatggcatgttgcttgaagcaaagggatcgtgggctgaggctgaaaaagcttactcaagtcttttagaggacaatccacttgatcaagtaatacataagaggagagtttccatggcaaacgctcaaggaaatatttcaggggctattgattcgcttaataaatatcttgagatatttatggctgatcatgatgcttggagagaacttgcagagatatatctctccctacaaatgtacaagcaagccgctttctgctgc

SEQ ID NO: 191370 - DNA, 458 bp, Gossypium hirsutum
tcgagtgtctgctttcttgtcgctcaatgatgagtcttctgtactcgcgcaagtgattttgaaatgtctgagtcaatggcatatgacagttcaaaatcatttggtgaaccatattgttgattagttctagctaattaagttattccgtatcacatctggtcatgtagattagatgagatatgatctggttatgcttagactggatcaatgcaattatgatatatgtcctgtttttactttttacactcaatttgcaggctaactagttactgaaatgtatgataagtctgtcataattcttgttgggttgcaatatgatgagcatcaattaatttacaatcacttgcatgaatcgtgaagttgacatgtctgaaatgatggcatgctgaaagttttacagtaattagtttcttttgtgacaggagaatgaagctgctatctttaaaaaggatgctttt

SEQ ID NO: 191371 - DNA, 772 bp, Gossypium hirsutum
cccacgcgtccgaacggcttaaagatcaaagtaagggaaaggacggggttgatacatccaaacaacgccagtcgcaagaacaagcaaggcggaagaagatgtcgagggcgcaagacgggatattgaagtacatgttgaagatgatggaagtgtgtaaggctcaaggttttgtttatgggattattccggaaaagggaaagccggtaactggggcatcagacaatcttcgagaatggtggaaggataaagtcaggtttgatcgtaatggtcctgctgctatcgcgaagtaccaggcggataattcgattcccggcaacaatgatgggtgtaactcgatcggtccaacaccacacaccttacaagaacttcaagatacaactcttggttctcttttgtctgcactgatgcagcactgtgatcctcctcagaggcggtttcctttagagaaaggtgttcccccaccgtggtggcctactggaaacgaggaatggtggcccccaactcggattgcccaaagatcaaggccctcctccttataagaaacctcatgacttgaagaaggcttggaaagtcggggttcttacagccgtaatcaatcccatggtttccgatatagccaatattcccaagcttgtaatgcagtctaatagcttgcaggacaagatgactgctatgtaaagtgcaacatggcttgcttcatcaaccatgaggagaccttgcttcagaccttaacccaatgctgccactttgtctacgttgatgagtgtatctt

SEQ ID NO: 191372 - DNA, 720 bp, Gossypium hirsutum
cttataaaacaaactaaaggaataatattctttttccctctgtctctctctctctctctctctctctctctctctgtctgaaaatcttctgtttgttgctgaatttacttctttcagctttttggaataaacccaaactgtgggtttttcctggttaacaaaggcttgtttgtgggtgatttgaatttatatcagcacttactggtaacaggagaaaacatagttttggggaagttgaagcttattggttgattgagagattcccttgagtttcaggcttatcttggaacaatgatgatgtttgatgatatgggaatttgtggggatatggatttcttcagtgctccttttggggaaaaagatgcggccacggcaacgttggcggctttgcgtactgaaccagaggccacagtggaagatgattatagtgatgaagagattgatgtggatgaacttgagagaaggatgtggagggacaaaatgcgtctcaaacgacttaaagaacagaacaagagcaaggatggggtcgatattgtgaaacagagacagtctcaagaacaggcgaggaaaaagaagatgtcgagggcgcaagatgggatattgaagtacatgttgaagatgatggaagtgtgcaaggctcaaggttttgtttacggaataatcccggagaaaggaaagccggtaactggggcatctgataatcttcgggaatggtggaag

SEQ ID NO: 191373 - DNA, 371 bp, Gossypium hirsutum
gtgtaacttgatcggtcctacaccgcacactttacaagaacttcaagatacaactctggggtctcttttatctgcactgatgcagcactgcgatccacctcagaggccggttcccttagagaaagggggtcctccgccctggtggcctaccggaacccaggaatggtgggccgcaactcggggtacccaaagatcaaggccctccttcttataagaaaccccatgatttgaaaaaggcttggaaaggtcggggttcttacagccgtaatcaagcatatctcacctgatattgcgaagatccgaaagctcgtacgacagtctaagtgcttacaggacaagatgactgcaaaagaaagcgcaacttggctcgc

SEQ ID NO: 191374 - DNA, 401 bp, Gossypium hirsutum
ggggctcggaagctagggcagattctttcccagtctgaagaaaccctaggagatgaacttcataagtttttctcgaacactctggataggcatggaaatggacagaggcctgatgttcaagatcctgctccattgtctagatttagaggacttggtgcaacacaatcagtgtcaggtacagagtcatgtcaagaagatcaaaacttttatgaatcagaatcttcaaattcaagtactgtgactgggaattatagatcttctgataatgaggggtcactgtgcacagtctataatggggatatgtctgagagggaaacagatgttggtataacctttaaagagccacagggttctgcaaatgcatcaagtatttcagaaatccgtctcacaggggatgctaa

SEQ ID NO: 191375 - DNA, 1293 bp, Gossypium hirsutum
cgaacattaagggagtggatttcatctgctcttgggccttctgcagttgcaaaacacatggtggcagtcagtactaatcttacgcttgttgaaaagtttggaattgaccctaataatgcatttgcattctgggattgggttggtggtcgatacagtgtttgcagtgcagttggagtgttgcctttgtctctgcagtatggtttttcaatagtagaaaagttcttaaagggggcttcaagtattgatgagcatttccgttcagctccttttgagaagaatatacctgtacttttgggtttgctaagcgtatggaacgtttcatttcttggatatcctgcaagagctattttaccatactcccaggccctcgagaaatttgctccacacattcaacaggtcagcatggagagtaatggcaagggggtgtcaattgatggtgtgccacttccttatgaggctggtgaaattgattttggtgaacctggaacgaatggccagcacagcttttatcaactaatccaccagggacgtgtaattccttgtgatttcattggtattgtgaagagccagcaacctgtgaaccttaaaggtgaagttgtgagcaaccatgatgagcttatgtccaactttttcgcacagccggatgccctagcatatggaaagacagcagagcagttgctgaaggagaatgtttcgcagcatcttattcctcataagacgttctctgggaatcggccttctctcagtcttttgctaccatctcttaacgcttacaatattgggcagctcttggcaagctatgaacatagagttgctgttgaaggttttgtttggggcatcaattcttttgaccagtggggagttgagttgggtaagtcactagctactcaagtccgaaaacagcttaatggatcacgtacaaaaagtgaacctgttgaaggctttaattttagtactactacgttgttaacaagatatctacaggcaagttctgatattccagctgagccactcactcttctacctcggatataactgtcttggtgctgtcggccttattgcggtatgccttgcactacagcttcatctgtagtttgtccccatgttaagaaggttttctggtccttttttggtatgtttggtgtatgcggagatccactgaaccttgtgggttatacggtggattttaataaatttacaacgactgacttggaagacattggtgtgcggctaagagtagctctttcataaacttataaaagaataataatataagttgctttgaatttgaat

SEQ ID NO: 191376 - DNA, 747 bp, Gossypium hirsutum
  unsure (1)..(747): unsure at all n locations
cggtccggaanacccggggcggccccacccgtccgattccttccattttctctcttttacttccttgcttttctccaattgcaaccatgggtttgaaaggtttcgttgagggaggcattgcatctatcgtcgccggcgcttcaactcatcctctcgaccttatcaaggtccgtatgcaacttcaaggtgaatcccatctccctaatccttcccttcaactttatcgtccggcacttgccgtcaactctgctgccgttgggaatgtttcgatctcgcaacctcgtgttggtcccatttctatcggtgtccgtatcatccaattggaaggtgtagcggctcttttctccggtgtctccgccacgatgcttcgacaaacgttgtattctactacccgtatgggactttatgaaattataaagaacaaatggactgacaaggaaactgggaatttgccacttacgagcaagatattggctggacttattgccgggggtgtcggcgccgccgttggcaaccccgctgacgtagcaatggttcgaatgcaagctgatgggcgactccctattgatcagcgacgcaattacaagagtgtaatcgatgcattgagtcaaatgacaaaacaagaaggtgtgggcagcttgtggcgcggctcagctctcacggtgaatcgcgcaatgatcgtcaccgcatcgcagcttgcgacgtacgatcaagtcaaggagacgatactggaaaaaggagtgatgg

SEQ ID NO: 191377 - DNA, 1047 bp, Gossypium hirsutum
  unsure (1)..(1047): unsure at all n locations
gtttgaaacgctggaggacagttcctttggttttgagagaaaagagtagatcttggctttcaaccgcgcctaataaccgctcggatttttctcagacgtgaaaaaaatggggctgtctttcaccaagctattcagccggctatttgccaaaaaggagatgcgtatactgatggttgggcttgatgctgctggtaaaaccaccattctttacaagctgaagttgggagagattgtcactaccattcccaccatcggtttcaatgttgagaccgttgaatacaagaacatcagcttcactgtttgggatgttggtggccaggacaagatccgaccattgtggagacactatttccaaaacacgcaaggacttattttcgtggttgatagcaatgatcgtgaccgtgtggttgaagctagagatgagttgcacaggatgttgaatgaggatgagttgagggatgctgtgctgctagtatttgcaaacaagcaagatcttccaaatgctatgaatgctgctgagattaccgacaagcttggccttcattctctccgccagcgtcactggtatatccagagtacatgcgccacatctggtgaaggactgtacgagggactggactggctctcaaacaacattgcaaacaaggcatagatggcgtaattgacttgtctgtctcagaaaatgccagcccctttcggaattattgatgtttctacgtccgttaaaatgttttggtttttcatgttcttttgtttcttgcaaactttgtcatttgttgcttcttgtagtttaagaataattggtaaaattttcggtttctattgttggtcttggtagttggaaaaaaaaaatgtattgttttccccaatctcgaggtcattccattcttgatggaaattaacaggttaagtcggtttctttaatctttaaatataaagataccagatttctttggattctttnnnnnnnnnnnnnnnnnnnnnnnnnnnnnnnnnnnnnnnnnnnnnnnnnnnnnnnnnnnnnnnnnnnnnnnnnnnnnnnnnnnn

SEQ ID NO: 191378 - DNA, 893 bp, Gossypium hirsutum
ttgctccaattgcgtaataaatagccccgaagcccaaccccttcccccattgaatttgatattttgtgagtgttaaacattgtttgcctttcatttctttctctattccttgttgcttcctcggcagcctctcggtttctgagtaatcgaagataaaaaaggatggggctgtcttttgctaagctgtttagtcggctgtttgccaagaaagagatgcgaattcttatggtgggtcttgatgctgctggtaagactaccattttgtacaagctcaagctcggtgagattgtcactaccattcccaccattggctttaatgtggagaccgtagaatataagaacattagcttcactgtttgggatgttggtggtcaggacaagattcgacctttgtggaggcactatttccaaaacactcaggggctaatctttgttgttgatagcaatgaccgtgaccgtgtggttgaggccagggatgagcttcatcgtatgctaaatgaggacgagctgagggatgctgtgcttcttgtgtttgcaaacaagcaagatctgccgaatgctatgaatgctgctgagattactgataagcttggccttcactcccttcgtcagcgccactggtatatccagagtacttgtgccacctctggcgaagggctgtatgagggactggactggctttccaacaacattgctaacaagggttgagggttggttgaattccagtcatatcttcaggcagctatcctattattttctgggtccttttttaagttttacaggaaatgtatcagaatgtgttatataattaatatatattcgccgtactactgaaattaggcatttgcctgctttgtagattgatttctcaaataatttttttctatatgatc

SEQ ID NO: 191379 - DNA, 932 bp, Gossypium hirsutum
  unsure (1)..(932): unsure at all n locations
ggaggacagttcctttggttttttgagataagagagtagatcttcgctcgtttctctctttcgtcgaactccgcgtaataatcgctcatatttctcgcagacgtgaagaatggggctgtctttcacaaagctgttcagccggctttttgccaagaaggagatgcgtatattgatggttggacttgatgctgctggtaaaaccaccattctttacaagctcaagttgggagagattgtcaccacaattccaaccattggtttcaatgtggaaactgtggaatacaagaacatcagctttactgtctgggatgttggtggccaggacaagattcgtccattgtggaggcattacttccaaaacacacaaggactcatttttgtggttgatagcaatgatcgtgatcgtgtggtcgaagccagggatgagttgcacaggatgttgaacgaggatgagttgagggatgctgtgctgctggtattcgcaaacaagcaagatcttccaaatgctatgaatgctgctgagattactgacaagcttggccttcattcactccgccagcgccattggtatatccagagcacatgtgctacttccggtgaaggactgtacgaggggctggactggctctcaaacaacattgcaaacaaggcataggtgtgacatgactgagttggcagtcttacaacccttttggattttatgaatgtctgcccccgttttatgtgttattttttatggtttttcacgtttgttgcaaacactgccatttgttacttatagtttaagaataattgacaaagtttgggaccgttatttcctagcgggatttgatggttagccagtttaattacccttttattgtaaaatatacttattttatcctttttttttttttccttcaaaactgaaaagctggttttnnnnnnnnnna

SEQ ID NO: 191380 - DNA, 887 bp, Gossypium hirsutum
  unsure (1)..(887): unsure at all n locations
tagatcttcgcttctctccttcgattgtcttcgcgtaataatcgtacacatttctctcagacatgaaaaatggggctatctttcacaaagctattcagtcagcttttctccaagaaagagatgcgcatattgatggttggacttgatgccgctggtaaaaccacaattctttacaagctcaagttgggagagattgtcactaccattcccaccataggtttcaatgttgagaccgtggaatacaagaacatcagtttcactgtttgggatgttggtggccangacaagatccgaccattgtggaggcattacttccaaaacacacaaggacttatttttgtggttgatagcaacgatcgcgatcgtgtggttgaggctagagatgagttgcacaggatgttgaacgaggacgagttgagggatgctgtcctgctagtattcgcaaacaagcaagatcttccaaatgctatgaatgctgctgagattactgacaagcttggccttcattctctccgccagcgccactggtacatccagagcacatgtgccacttctggtgaaggtctgtatgagggactggactggctttcgaacaacattgcaaacaaggcatagatggcatcattgagttgtcagtctcaccaatgctggccccttttagagttccggatgttcatcccgttcaagtgtttttggttgttcgtggtcatttgtttcttgcaaacattgccatttgttacttgtagtttaacaataattgataaattgcttgtttcctttgtggtattatcccgatagctgaaaaaaaaaaaaaaacttccccaagtttgggcagctattttcttggtggaaatttaaggatagcaagcttcttgaatgcttctttt

SEQ ID NO: 191381 - DNA, 1070 bp, Gossypium hirsutum
taactccaggctttaccttctagcgttagttcgttcagcgccttcgattccaatagagatagagagagaggaggagatcttcgcttctctccggcgttctgctccatttgataaccgcttgcagttctctcagtgcttgacagacgtgaaaaatggggttgtctttcacaaagctattcagccggcttttcgccaagaaggagatgcgtatactgatggttgggcttgatgctgctggtaaaaccaccattctttacaagcttaagttgggagagattgtcactaccattcctaccatcggtttcaatgttgagaccgtggaatacaagaacatcagctttactgtctgggatgttggtggccaggacaagtcggcatttacttccaaaacacacaaggactcatttttgtggttgatagcaatgatcgtgatcgtgtggtcgaagccagggatgagttgcacaggatgttgaaccgaggatgagttgagggatgctgtgctgctggtatttgcaaacaagcaagatcttccaaatgctatgaatgctgccgagatcactgacaagcttggccttcattctctccgtcagcgccactggtacatacagagcacatgtgccacttccggtgaaggactgtatgagggactggattggctctcaaacaacattgcgaacaaggcttaaatgaaacaattgaaccgacggtcacactaacaatggccccattttgatgttctggatgtccatctcgttcaagtgttctggctttctttttttatatttcttattccctgcaaacattacccatttgtcacttgtagtttaaagaataatttgagtaaatttcgatttcctttgttgtattacctccatagctgcaaaaggaaagaaaaaggttttctcctagtttggggcagtttctacgttgtggcaaaattatatacataatctagtacaacttatgttgaagcagtacataaatcttgatgaatcccaaggttttgtggctttggagaatgctttggagaatggatttgatatgctccaaaatttgatgaaaatttataa

SEQ ID NO: 191382 - DNA, 470 bp, Gossypium hirsutum
gtcgaccccgcgtccgagcgccttcattccaatagagatgggagggggggaggagatcttcgcttctctccgtcggtcggctccatttgataaccgcttgcagctctctcagtgcttgacagacgtgaaaaatggggttgtctttcacaaagctattcagccggcttttcgccaagaaggagatgcgtatactgatggttgggcttgatgctgctggtaaaaccaccattctttacaagcttaagttgggagagattgtcactaccattcctaccatcggtttcaatgttgagaccgtggaatacaagaacatcagcttcacggtttgcgatgttggcggccaggacaagatccgaccattgtggagacattacttccaaaacacacacatggacttatttttgtgggtgatagcaacgatcgtgatcgtgtggttgaagctagatatgaattgcacaggatgttgaatg

SEQ ID NO: 191383 - DNA, 460 bp, Gossypium hirsutum
gtgtaattttacactgaaggacggttcctttgatttcgagagtagatcttcgctcgcttctctctttcgtcgaactccgcgtaataatcgctcatatttctcgcagacgtgaagaatggggctgtctttcacaaagctgttcagccggctttttgccaagaaggagatgcgtatattgatggttggacttgatgctgctggtaaaaccaccattctttacaagctcaagttgggagagattgtcaccacaattccaaccattggtttcaatgcggaaactgtggaatacaagaacatcagctttactgtctgggatgttggtggccaggacaagattcgtccattgtggaggcattacttccaaaacacacaaggactcatttttgcggttgatagcaatgatcgtgatcgtgtggtcgaagccagggatgagttgcacaggatgttgaacgaggatgag

SEQ ID NO: 191384 - DNA, 707 bp, Gossypium hirsutum
gtgtaataaatagccccgaagcccaaccccttcccccattgaatttgatattttcgaagataaaaaaggatggggctgtcttttgctaagctgtttagtcgactgtttgccaagaaagagatgcgaattcttatggtgggtcttgatgctgctggtaagactaccattttgtacaagctcaagctcggtgagattgtcactaccattcccaccattggctttaatgtggagaccgtagaatataagaacattagcttcactgtttgggatgttggtggtcaggacaagattcgacctttgtggaggcactatttccaaaacactcaggggctaatctttgttgttgatagcaatgaccgtgaccgtgtggttgaggccagggatgagcttcatcgtatgctaaatgaggacgagctgagggatgctgtgctgcttgtgtttgcaaacaagcaagatctgccgaatgctatgaatgctgctgagatcactgataaacttggtcttcattccctccgtcagcgccactggtatattcagagtacatgcgctacctctggtgaagggttgtatgagggtctggactggctctccaacaacatagctaacaaggcttgaggcggttggtagaaggtcggtgacatttacatttggggtagcaatctttgtggaattcggatatgtatatttctattttatgatacgttgcg

SEQ ID NO: 191385 - DNA, 732 bp, Gossypium hirsutum
  unsure (1)..(732): unsure at all n locations
ttgtgtgacggggagactctcaggacaaataatatcagatcctcctcctaaactctccacaaagaaaagggaaaaaaaaagagggagatggggttgtcttttacaaagcttttcagccggcttttcgccaagaaggagatgcgtattttaatggtgggtcttgatgcagctggtaaaaccaccattttgtacaagctcaagctcggcgaaatcgtcaccactatccccaccatcgggttcaatgtcgagactgtggaatacaagaacatcagcttcactgtttgggatgtcggtggccaagacaagatccgtcctttgtggaggcactatttccaaaacactcaaggtctcattttcgtggtggatagcaatgacagggaccgtgttgttgaggcaagggatgagttgcacaggatgttgaatgaggatgaactgagagatgctgttttgcttgtatttgccaacaagcaagatcttcccaatgcaatgaatgctgccgaaataactgataagcttggtcttcattctctccgtcagcgccactggtatattcagaggcatgtgcacttctgagaagccttacaggactcgatgctttcacacattgtacaggcttaggnnnnatggtgttggccaattggccaaacttcctgcatcaactttttccccgagttttaaaaattcgaagcccttttcccatttcccttttcaaaagtttgtggagattccatt

SEQ ID NO: 191386 - DNA, 421 bp, Gossypium hirsutum
tttataaatagccccaaagcccaacccctccccccttcgatttggttttttataaaaaaggatggggctgtcttttgctaagctgtttagtcggctgtttgccaagaaagagatgcgaattcttatggtgggtcttgatgctgctggtaagactaccattttgtacaagctcaagctcggtgagattgtcactaccattcccaccattggctttaacgtggagaccgtagaatataagaacattagcttcactgtttgggatgttggtggtcaggacaagattcgacctttgtggaggcactacttccaaaacactcaggggctaatctttgttgttgatagcaatgaccgcgaccgtgtggttgaggccagggatgagcttcatcgtatgctaaatgaggacgagctgagggatgctgtg

SEQ ID NO: 191387 - DNA, 488 bp, Gossypium hirsutum
tcgggatgtttaatgaaattagaccgaaaagaattccgtgcatctacaatcatattttgattttgggtctgtgaattcccgaaggtgtgtttgaaacgctggacgacagttcctttgattttgagagaaaagagagagagagagaagagtagatcttggcttctctccttcgttcgattccgcttaattatagcccgcgtttctctcagacgtgaaaaatggggctgtctttcacaaagctatttagccggcttttcgccaagaaggagatgcgtatactcatggttgggcttgatgctgctggtaaaactaccattctttacaagcttaagttgggagagattgtcactaccattcccaccatcggtttcaatgttgagaccgttgaatacaagaacatcagctttactgtttgggattgttggtgaccagtacatgactcgtccattgttgagactctactttcaaatcacccaaggacttatttt

SEQ ID NO: 191388 - DNA, 419 bp, Gossypium hirsutum
cggacgcgtgggtttcctctttcaattctctgggcacccctctcagatcttccaatctctcaccatccagaataaaaggatggggctttcttttgctaagttgttcactcgcctgtctgccaagaaggacatgcgtattctgatggtgggtcttgatgctgctggtaagactaccatattatacaggttgaagctcggagagattgtcaccacgattcccactattgggtttaatgtggaaactgtggaatataagaacattagcttcaccgtttgggatgttggaggtcaggacaagattcgacctttgtggaggcactacttccaaaatactcaggggctaatctttgttgtggatagcaatgatcgtgatcgtgttgttgaggccagggatgagcttcaccgtatgctaaatgagg

SEQ ID NO: 191389 - DNA, 928 bp, Gossypium hirsutum
gaaataaacggggagactctgaggagaaataatatcagatcctccttctaaactctccacaggggtaacctaattaaaagtcctttttctccttttttccccccctgaaatctaagttcttttatcgagaccaaagcagaaaagggaaaaaaaaagagggagatggggttgtcttttacaaagcttttcagccggcttttcgccaagaaggagatgcgtattttaatggtgggtcttgatgcagctggtaaaacttactattttatacaagctcaagctcggtgaaatagtcaccactatcccaaccatcgggttcaatgtcgagacagtggaatacaagaacatcagcttcactgtttgggatgtcggtggccaggacaagatccgtcctttgtggaggcactatttccagaacactcagggtctcattttcgtggtggatagcaacgacagggaccgtgttgttgaggccaagggatgagttgcacaggatgttgaatgaggatgaactgagagatgctgttttgcttgtatttgccaacaagcaagatcttcccaatgcaatgaatgctgccgaaataactgataagcttggtcttcattctctccgtcagcgccactggtatatccagagtacgtgtgcaacttctggggaaggcctctatgagggccttgattggctttccagcaacattgctagtaaggcatgagaaaggatcagtgtattggttgttagttagacttgttgaaactctggcaactcttgaagaggatatagcttcctgtttatccagcaacgtttgtaatgacagaatatttagctttgtttaatctttttacttggaattttcattttctttaatgtatttgtgttaaatattcggacttgttatggtttatatcggaaaaaaaaaatagtaacattgca

SEQ ID NO: 191390 - DNA, 401 bp, Gossypium hirsutum
cccacgcgtccgcggacgcgtgggcgccttcgatccccctcgcgtccgagagagagaggaggagatcttcgcttctctccgtcgttctgctccatttgataaccgcttgcagttctctcagacgtgaaaaatggggttgtctttcacaaagctattcagccggcttttcgccaagaaggagatgcgtatactgatggttgggcttgatgctgctggtaaaaccaccattctttacaagcttaagttgggagagattgtcactaccattcctaccatcggtttcaatgttgagaccgtggaatacaagaacatcagcttcacggtttgggatgttggtggccaggacaagatccgaccattgtggagacattacttccaaaacacacaaggacttatttttg

SEQ ID NO: 191391 - DNA, 412 bp, Gossypium hirsutum
cccatgcgtccgcccacgcgtccgcgataaaacttttgaaagagttaaatgtgtttgatatttgagcaaattattttttatatgccataaaacagcagagaaataaacggggggactccctcaagataaccacaacagatttcagatcctccttccaagctctgcagaaagtactgtgtgcagaaagtggagagcaacgatggggctgacatttacaaagctctttagccggctttttgccaagaaagagatgcgtattttaatggtgggtcttgatgcagctggtaaaaccaccattttgtacaagctcaagctcggcgaaatcgtcaccacaatccccaccattggattcaatgtggagactgtggaatacaagaacatcagcttcactgtttgggatgttggtggtcaa

SEQ ID NO: 191392 - DNA, 362 bp, Gossypium hirsutum
cttactcgtgggcggacgcgtgggcggacgcgtgggcggacgcgtgggcggacgcgtgggcggacgcgtgggcggacgcgtgggcggacgcgtgggcggacgcgtgggcggggagactcggaggagaaataatatcagatcctccttctaaactctccacaaagaaaagggaaaaaaaaagagggagatggggttgtcttttacaaagcttttcagccggcttttcgccaagaaggagatgcgtattttaatggtgggtcttgatgcagctggtaaaactactattttatacaagctcaagctcggggaaatagtcaccactatcccaaccatcgggttcaatgtcgagacagtggaataca

SEQ ID NO: 191393 - DNA, 1512 bp, Gossypium hirsutum
atgagactgagttcatttatgggcctacggtaatccagggaacacgactctccaccgcttatcaccaaatccttatctttaattcccttcctcacttgttgtcttgttgctccactgtgcacggtttccatatcttttctctcctccattccccaataatttctttccctttttaatgttcttcttctcccccattctcactcccttttagcttcaatttggtgggttctttggtttacttttcaagggtttctctcttcaaaaaaaccctcgagaaatctatgcgcttaacgcttacttttttattcattcgaggggttcttttccttctcttcttcttgttgttttagagatgggtttggtgtctgttttttgggagattttaaagaaacccacaattggagatgtggtgagggagttactggtttttatagctcctttatgggttgctgtaattgttggggttttagttggttgggcatggaagccgaagtgggcaactataggcagggagatgttcatggattgttctggttctaaggattcggctcctgcagaatcttctgagtcttctttcagtggttttggttcccttccgagcttgaatttgatcaagtttcagttgcctagtgttatctcttggatttcagatgacggggctcaaaaagattctttctttttgtcacctactcttcattccaattgcagttcatcacagaacgagaagcaaaaactgggttttctgacagatgatgatttagagcatttatataaattagttgaagaaaaagatggaggtcctgcttggattcacatgatggataagtccaccccaactatgggatatcaggcttggcaaagagatcttgagattggtcctacacaatatcgtagccggactgttttcgatgatgccactcctgagatggtgagggatttcttttgggacgatgaattccgatcaaaattgaagtgggatgaaatgcttcttagtgccgaaactctcgagtcgtctcccactgatggcaccatgacggtccagtgggttcgaaagtttcccttcttctgcagtgacagagaatacttgataggtcgtcggatttggtcgtgtggtcggacatattactgtgttacaaagggagtaccatatccctctattcctagaaaaaccaaacctaggcgcgttgatttatactattcaagttggtgcattcgtgcagctgaatcaaggaaaggggatggccagctgactgcatgcgaggtattactttttcaccatgaaaatatgggtataccatgggaaattgcaaagcttggggtcaagctaggcatgtggggaactgttaggaagattgaccctggcttacgtgcatatcaaaccgaaagagcatcgggagcgcccctttctcattcagcttccatggctcaaataaacaccaaagtaactcaagactatctgacatccttggaaagcaatagtaatgattcatcagagcttgaaacacacaattc

SEQ ID NO: 191394 - DNA, 442 bp, Gossypium hirsutum
aagacaaattaatcctcatgctcatgacaaattaagcaaaaataaaagtgcccatataagccatggcctccgtaacgtagaaattacatctttattattattatagtagaaataggttttcttaatttattacataagtacggtacccagcctaagcttacataatattgtatacacggtataaggatcatggacgaggcttgtgtggctcgggatgatgacctggaccacctggtcctggcggtggcgcatgggggcctggcccaggaggaggagcatggcctggaggaggatgatcagcatgtggcggacctggaggcggagcatggggttgcggatgtgggtggtggggatgatgaggatggtgggggtctggtggtggtggattatgcattttttctcttcttttcaaatttcacccacgtggccgcggacgcgtggg

SEQ ID NO: 191395 - DNA, 1293 bp, Gossypium hirsutum
  unsure (1)..(1293): unsure at all n locations
cccacgcgtccgcccacgcgtccggtttaatataaaaggggaaaggggtgcactcggcagaggaagtttggagaggaagaaaaaaaaactctgatacagaaaaaataatcttgtaaaattgacgaaaatggtgttggcaaacaaggaaatggtggtctactgcttcgacactttgatcgcccattataacagcgaggaggctgctccgcccgctttcgatgagggccaacacccattgtttgtcacttggaagaaggttgtgaatggtggggagcctcgtctacgaggatgtatcggcacacttgaagcttgtcagttgattaatgggtttagggactatgctctgacgagtgctttgagggaccgcaggttccctcctattcaagctaaagaactgcctaacttagaatgtacagtttctattctgactgattatgaaacagctaataactaccttgattgggaggtaggaaagcatggcataattattgagtttgttgatgattataatacaaggcgaagtgccacatatttacctgaggtgccggcacatgaaggttggactagagtggaggcaattgactcacttatccggaaggcaggcttcagtggccccataaccgagtcgctcaggaagcatataaaactgacccgttaccaaagcacattatttaccatgcactacagtgactatgcctcccatgttaaggcaaccaggggggcagcgcctactattgctggcgctaagctcggaaaccactgattcttccaacagctttttaccagaaaagaaggtaaagctgctttggctaaaatataatgacattatattaaaacaaaagaaaaatgggtggaataggttcgattgtgttccgacccagttgttttagtaattacaagacacctttcaaataacattcttcaaattcatttgattttgaagaaagaaaccaaaagaaaaaaaaaagaaaagaagaagcaatgcctgatgtaaactcaggcatacaagtttgtgtttgctttcatttagacattcatattcctgcaacttgtgggaaacctgtttgctgtaagacaaatctcaatttgacctcgaaatggttctgggaaactatgtatgttcccagcacgacattgtttgtgccttttggttttagttaaatttactttttgcnnnnnnnnnnnnnnnnnnnnnnnnnnnnnnnnnnnnnnnnnnnnnnnnnnnnnnnnnnnnnnnnnnnnnnnnnnnnnnnnnnnnnnnnnnnnnnnnnnnnnnnnnnnnnnnnnnnnnnn

SEQ ID NO: 191396 - DNA, 418 bp, Gossypium hirsutum
gcggccgcccttttttttttttttttttacatcaaacgtgctactttttcattattctagtagcaataggttttcatgatttattacataaagcctcccaccaagtaggtgatagagttatacaagtacggtacggagcctaagcgtacataatattggatacacggtataaggatcatgcacgaggcttgtgtggctcgggatgatgacctggaccacctggtcctggcggtggcgcatgggggcctggtccaggaggaggagcatggcctggaggaggatgatcagcatgtggcggacctggagccggagcatggggttccggatgtgggtggtggggatggtcaggatggtgcgggtctggtcctggtggattatgcattttttctcttcttttcaaatttcacggacgcgtggg

SEQ ID NO: 191397 - DNA, 454 bp, Gossypium hirsutum
gccattgttatcttctctgttttctttcttcactctgttcagaacaagttaattaagaaagaagaatgactaaccaacaaaatgtggtggttgtggatgtgaaaccccatggtggggttaagccaccattatcattgccagtggccaagtccttttcaccacaagacctgaagttattgttaatgaagaaaaggtttgaaactgagaatgcttgggtactggattccatgagagcttcttcacctagtcgtatcagcaaccctactacgacttccttacctgaaactgatgtcaaaagttcctggattgttcatcatccctcagctttgaacatgtttgaacaaatagtgactgcttcaaaagggaaacagattgcccgttttgttccttgactacgatggcacactgtcaccaatcgttgaagacccggatcgagctttcatgcccagagaga

SEQ ID NO: 191398 - DNA, 818 bp, Gossypium hirsutum
cccacgcgtccgcccacgcgtccggctctttctcttgctctctttagagtaaatttcttttgcaatcctttgtagagctccgggatccattgtcaccatgtcttgctcaaatctgacaatgtgggtgtcctcaaaaccctctctttctgacacttcttcactctctttccgttctttcatcagcccttttcagctcccatctcagagctcaacccccggtaacccttccaggtcctcatctgtaaccccagttcactgtggtcttcgtgagcttagagaccgtattgattcagtaaagaacacgcagaagatcactgaagccatgaaacttgtggctgctgctaaagttaggagagcacaagaagctgttgtcaatggcagacctttctctgagtccctggttgaagttctttacaacatcaatgaacagctccagactgaagacatagatgctcctctcacaaacgtcaggcctgtcaaaaaagttgctttggttgttgttactggtgatcgtggtctctgtggaggtttcaacaatgctatcctcaagaaagctgaagctagaattgcagaattgaagcagcttggacttgattatacaataatcagtgtggggaaaaagggtaattcatatttcatccgcaggccctacatcccagtggacagattcctagatggtagctcactccctacagctaaagaagctcaggcaattgctgatgatgttttttcactctttgttagtgaagaagtcgataaagtggagcttttgtacaccaaattcgtatccttggttaagtctgatcctgtgattcata

SEQ ID NO: 191399 - DNA, 907 bp, Gossypium hirsutum
  unsure (1)..(907): unsure at all n locations
cagtctttataaaaaatgagtcattttcatacagtgggggttttgcttatgtaattttcccaaataattaattaattttcatcaattaggtaaaaaaaatcaaattttgctgaagcctagctagattctttcagagcttaacagtgttataaaaaataagaggtactttctattgtgtataacaagcagccggtgatatggatttcctgaattggttaatgtactttgttttctacttgatattgtttcaagctttccttttgatcacaagaaggaaattggtaagatcccataagcttccgcccggtccaccaacaattccgatcttcgggaaccttttccaggttggtgataaaccccataggttccttgccaaacttgccaagattcatggggacatcatgactctgaaacttggccacactactaccgtagttttttcatctgcaacaatggccaaagaaatcctccaaaagcatgatgccgtatcttgtaaccgaaccattcccgatgcccttcgtgcccttcaacatcacgaagccggattgccttggatgcctgtttcaaccacatggagaaatcttaggaaaatctgcaatttgcatattttcgctactcataaacttgacgctaatcaatacttgaggcgcagcaaagtagaacaactccttgctggtgttcgggaaagttccctcatcggagaagcgattgagatacgtcaagctgctttcaaatctacgcttagtctcatatcaaatactatgttcgccattgatttagccgactctactcatacttctgaggagtgccgagaaattgtgcagggtatcatggatgagttgggaaaacccaactttggtgattatttccctttgctatttgacttgaggcataagcgtgaatgcan

SEQ ID NO: 191400 - DNA, 516 bp, Gossypium hirsutum
cagagggcagtcgataatgcaaaaggggtggatgaacatctgaagggtgttggccttcgtatgttaggtctttgtttgggaaagcaagataaagtttcttcctctggcgttgaaaggtcccgtcttcagaatgaagcacttaaagatttagattcagcactttcctttgagcaggataatcctgatataatctttgagttgggagctcattatgcagagcagtggaatttgaatgctgctttgcgttttgcgaagaagtacattgatataaccggtggttctgtaatgaagggttggagattgcttgctctaattttgtcggctcaacagcgtttcacagaggctgaggtggtcactgatgctgcattggatgagactggcaaatgggagcaaggaccactgctcaggctgaaagcaaaattgaaggtctcccagtcacgacccatggaagctattgaaacttactgttacctccttgctttggttcaggcccaaagaaaatcatctggtcctatg

SEQ ID NO: 191401 - DNA, 418 bp, Gossypium hirsutum
ttcgatgattatatcctttaaaatcacttgatggcgcgcgtcttattgcaggatttactcccagttgctttacggtactgcttgtcaaaaaatgtgacgtcctgtttaattgaactatccaatttaacgaaggctatttgtggcaaagttttggatgttgaagaacttatgaaagtgcaggatcgagctgttttgactttatgcaatttggagaagatctttccaccttccttcttcactattatagtgcacttggttcctaagcaaattgaaatcttattgtcgcactaagcgttatccagaacgatcaattgctgaaggctacttggcagaggagtgcatgacattctgttctagatatttagaagatgttgaaacacgattgaatagaccaaatagaaatgctgggctcaatgat

SEQ ID NO: 191402 - DNA, 681 bp, Gossypium hirsutum
aactagtctcgtgttttttttttttttttttttggatggatgtatatccatgaattggtcatcatctaatgtaatcagcacatcttggtttaacaaaattcatgtctgcattttctattatctgaaactggcattgccttgccttcaatcccaacccacctctgtttccaatttttttattcaatttaaacttttgctgcaaacttaatagtttcagttcacaaaccccatttaaatgtgcagcaaccacggttatgaaatatttcgtcaaactccgcaaccatacactacacagcctaatcactgttttgcgccgatcaagttcctgatgacatactgcagaatgcctccgtggttgaaatatgccagttccacctctgtatcaaatcgtacagtgcaggtgaatgacctgccactgtctgtagccactgtcacgtcttggccaggtcgaatttcgctcacacagcttggaagatcaattgtgtagcgctcatggccagtcaatccaagagtgtcagcatcctctccagacttgaaacataggggaatgatgcccatgcccaccaaattactacggtgaattcgctcaaaactcttggcaatgactgcttttacacccaataacattggaccttttgcagcccagtctcgagaacttccactcccgtattcagcacctga

SEQ ID NO: 191403 - DNA, 1029 bp, Gossypium hirsutum
caaacttcgatgtgcaagagctcaaacccgggaatctaaattcatctgatttgagtgtggatcgaatgagggccatccaacaaccaccttattctattaagggagaagttgtcaataatttggactttatgcgaaagaggaaaccaagcaatgattcaaacatcatggaacataagatctacaaatgcgagttcgtccaatgtccctatagtgaacatcgcttaggttttcatgacaggattgccagggacaatcatcaattaacatgtccgtatcgaaactcctctgcactgtttagtggttcaagttttaatgttaacgaggtgaaacctgtaattttgcctcaagcatttgcgcaatccaagccaactgcaacagcggttacttccgtctcaacaccatttgatctttcaggacttggagttccggaagatgggcagaaaatgatcagcgaactcatgtcggtttacgataacaacattcaaggcagcaaaaacatgaatcccagtaacaatccaatcgccgaaggccaaaatattcttcacccgaaaatccaacagccacaggatgaatactttcgtggtcaaggaaacttcttcgaggactccagcatgcccaataaccatcagatgtttccacaaggggaaggtcaatttgaccggttcaagggcctgaattctctgtttgagaccgaacataacaacaacaacagcttcccgctgatgttcgggtttccattcgatttgtctactttcgattacaaggaagatcttcaaacagttgggatggacaccatcccaaggcaggatgtttcaatctggttccagtaaaacggtaacgcctgtcggaatatgcactagctgaaaccctttttttttcacttggttattgtaattttcttccttgtgtgtagctgtaggaagtttaagcaagcttagcagctcttcatatggggctccaattaaaacacaaaaaaaaaacatggaaagcaccgtaggatcttgctactgatttacataggatattact

SEQ ID NO: 191404 - DNA, 657 bp, Gossypium hirsutum
ctgcacgaggtttttgtcaacttttttcaactccacttcctggaaatatccactgctggtttctttccccaaagaaatcccattgtttttatttagagattccttgtacaacttttcttgtttctcaaagaaggtccaagttgagtcagagaggatgttggagatgtgcacaaggccgttagagatgtgctttggaggaggtggaggtggaggcgatgagctcttatggcatatggatttgaagccctacgtttctggggactattccatagcagttgttcaagccaattcctctttggaagatcaaggtcaggtgtttacttccccttccgtcacttacgtcggcgtctacgacggccatggtggacctgaggcttcccgtttcatcactcaacatttggtcccttttcttcataagtttgcatcagagcatggggggttatcggcagaagtaataaagaaagcctttgatgctactgaggaggagtttctgcacttagtgaaacgatcgtggccagccaggccacaaatcgcttctgttggttcctgttgtcttgttggggcaattgcaaacgatgttttatatgtggctaatcttggtgactcaagggcggttcttggccggagagtgtctccaaatggacctaataatcaagt

SEQ ID NO: 191405 - DNA, 910 bp, Gossypium hirsutum
cacaagagcattaaatataatgtctggtcttcaacacgggatgggaataggaggctggacagtgcttttgaagatgcacagagaatagctgcagggaaacctaggggctgccccatcttcctcttcttttctgttaatgccagtggacaattctgcggcgttgcggagatgattggcccagttgacttccagaaggctatggatttttggcagcaagataagtggagcggaagcttccctgtcaagtggcacatcattaaagatgttcccaacagccattttagacacatcatattaggcaataatgaaaacaagccagtgactaatagcagggatacgcaagagataatgtacaagcaaggtatggagatgctgaaagtattcaaaaatcatgcgatgaagacctctctacttgatgactttatgttctatgaaaatcgtcagagaatcatgcaggcggagaaagccatgcagctaataaaaagcattgagagtccagtcctagcacctgctttcgatcctgtcaataagctaaaccgtgttgagctactcctgaatgaacatgagagaaggtcccagcagagtgatcctgaacgattgagaacaattgttccttcatctaatcagcctgtttctacagattgtgataggactaatgctagaaggatgaatgaaagttcagggaaaattgcagttgaagctaaagatgatgcatctactttaaagattagttcactcagcataaatccgaagcaggatgagtctaaaatctctacagatgctgctactaaaagtgatgctgttgaggtggtaaacataggatcagtgacggtaaaagtcaataaatttactgactcacctggttttttaacagtaggcactattcctcttaatcccaagaccccacagc

SEQ ID NO: 191406 - DNA, 412 bp, Gossypium hirsutum
  unsure (1)..(412): unsure at all n locations
tcggccaccccttccgcaatttttaaatttttaacccaaaaccaccatgccatatccgagaatcgccgtccccctccaaatgggccttcccatggcaatgttgagctcaaagacctccaggttagataccttccaagcacgcctcttgtgcttaaaggcattactctgagcattaatggtggtgaaaagattggtgttgtgggtcggactgggagtggaaagtcaactttaatccaagttttctttagactggttgagccaacaggagggaaaataataattgatggcatagatatctgcatgctgggacttcatgatcttaggtcacgctttgggatcatccctcaagaacctgtcctttttgaaggaactgtgagaagcaacattgatcctatangacagttctctgatg

SEQ ID NO: 191407 - DNA, 740 bp, Gossypium hirsutum
tcagcactactaaaaaaataagtacaccaatgggagcaacgaagaacatctggaccgccatggaagcaaaccatgctaaacaaagccacaacggcaattcaaccttcgatgatcattcaatccttcactctaatctctcagttgataccgcccttccttttccccttatggtccctcgcgtcatcgccttgtgcaaggatctgtttcggaaatgggctaagttgaacgattcttgcttctccgtcgacactgtatcaggcggcatcacgaatcttctgctgaaggtttctgtcaaggaagaaaatggagaatatgtgtctgtaacagttagattgtatggacccaacactgaatatgtcatcaatcgggaacgtgagttacaggcgatcaaatacctctcggctgcaggatttggtgccaagttgcttggtgtatttggaaatgggatggtacaatcttttatatatgcacgtaccttaactccagcagatatgagaaagccaaagctggtttctgaaatcgcgaagcaacttcgaagattccatcaagtggaaattccaggttctaaagaacctcagctatgggttgacatcttcaagttctttgagaaagcatctactctccagtttgaagatactgataaacaaaggacatatgagttaatttcgttcaaggaagtgcataaggaagttaaagagctgaaggaactgacaacccttctcaattcttcagtggtgttt

SEQ ID NO: 191408 - DNA, 583 bp, Gossypium hirsutum
cacaagaaccaaacacggtttctctattattttcttgtcttacttatggccgtcgttaaggctttcattgcttcacttctcatctctcttctccttctccaacttgttgctgctgatcaactggtgacaagtgccagcaagcgcaagggaactgccccccctgcgaaaattgactgcggcggggcttgtgcggcgaggtgccgattatcatcgaggccacacctatgcaagagggcatgcgggacatgttgcgcacgctgcaactgtgttccaccggggacagccggtaaccaagaaatgtgtccttgctatgctagcttgaccacccacggtggccgacgcaagtgcccttgagtgttaatcgacaatcggaacgaatctttctcttttgatgttggtatgaaattaataaacgtatgcatggtttagttaagaataattctaaaaaaaaaaaaaaaaagtgtcctttgtaaagcacgaatcattttacttaatcactagttttttttagcgatattatatgatgtatgatttcttattttgagtttgaatatataataaataaataatcgaaattttcttt

SEQ ID NO: 191409 - DNA, 662 bp, Gossypium hirsutum
aacaaagctccaccgctaatccttcgataccgaaccttttgaagaacgaaaagcaatggcttcattcgagcaagcgccgcccggaaatgcgaaagctggggagaagatcttcaaaaccaagtgcgcgcagtgtcacaccgtagataaaggcgctggtcacaagcaagggccaaatttgaatgggcttttcgggaggcagtccggcacaactgcgggatactcttattccgctgctaacaaaaatatggctgtgatttggtcagagaacacattgtatgactacttgcttaatcctaagaagtatattcctgggacaaagatggttttccccggattgaagaagccacaggatcgtgccgatctcattgcttatctcaaggaatcaactgcctgatgggtgtgctttttatcagctattttggaacaaatgaaagagtttttgatcaatgatttttttttctttttgttacatgatataaaaactaggcgattcgcataataaaaggaaaacagctccaatataaattgggttttggagttgaaccgagtagtgaaaacgagttgtgtaagaccaatcacatgaaaagtgaggcatttcaaattttcatgatttatttaggctccaacagtttcactgttaggtgctgctaacttgtttaaaa

SEQ ID NO: 191410 - DNA, 490 bp, Gossypium hirsutum
ttttgaaaaaaaaaaaaccctcaaaagccctaattcggaaaaaaaaaatcaaaagcaatggcctcattcgagcaagcaccgcctggtgatgcgaaagctggggagaagatcttcaagaccaagtgtgctcagtgtcataccgtcgataaaggcgccggtcacaagcaagggccaaatttgaatgggcttttcaggaggcagtccgggacaacaccgggatactcgtactctgctgctaataaaaatatggctgtgatttggggagagaatactttgtatgactacttgcttaatcctaagaagtacattcccgggacaaagatggttttccccggattgaagaagcctcaagatcgtgccgacctgattgcatacctgaaggaatcaaccgcctgattcgtctccggttttattaatatgacctatattttggaactgtgacaaaatgaagaattttgatcaatgatgtattttttttacatggaaaaag

SEQ ID NO: 191411 - DNA, 664 bp, Gossypium hirsutum
aagctgtgattgatgggaacctggttgttaatgatgaagcatgcaccacagagggtttgcatgaagttgagttgcttctaccatttatgaaggatatgtacattgaagcatgcagccagaaagatgttgtaggtgttgtcaattttactggctctctatgttccttttcattcttgaattccaaggaaccaatttcacaagcttttgctgatataaaggatgatatcatcaggagtttgcgaagcaggcttgatattatttgcgatgaagcagatgaagacccagggccaatcgacaatggaattaaggaagcaggaaatgacttagcttctgagaagccggtttcccaactcgttttacactccttgaggaaaaattgcaatctttcactacctcggagagtctttgttccatggttggcgggtacatatatctgtgactatctccaaccatcagagacacttgaggttttaaaagatcattgtgttgagttgatgtccatggaagctccaaatgatgcatcaaaaatattggaacctgaagaagaagccattagagtgtccactagatctttttgggatgtagttctcccttactgttcgacatcaagctctacccaagaaaagaacatggaaattaccggcaaagaaaatagccagaaaac

SEQ ID NO: 191412 - DNA, 690 bp, Gossypium hirsutum
ttttgaaaagcggtccttatttttcccaccctttgaatcccttcttctctgttttcacaaaaccatctcagaaaattttattattactatcacttcaaatcaaccaataatcctcactcttgaattgtaatttacaagttgatcaaataggagatactcattagagctgtgatagaaaggatcaataaagatcgttttgggaatggcttgtcgaggatgcttagagtgcttgttgaagctcttgaactttttgatgactcttgctggtctggcaatggttggatacgggatctatttgtttgttgagtacaaaaatgctgccgatactgcaatgcttttgtcacctgttggtagtgatcgagatttgatacagtttggtcgccccatgctcatggctgtgtctctttcgtctagtatttttgataatctgccaaaagcatggtttatatatttatttattggagtaggggcggttctctttgttatctcttgttttggttgtattggagctgcaacacggaatatatgctgcttgacttgttattcagttttggtgatcttgctgatcttggtggagctgggatgtgcagctttcatattctttgacaaaaactggaaagatgaacttcctacggataaaactcggagatttcgatttgaattacggactttttggaagacaaactggag

SEQ ID NO: 191413 - DNA, 737 bp, Gossypium hirsutum
  unsure (1)..(737): unsure at all n locations
ataaaaactagtttcgcggattttaggttttcggaagggaaagggagaggattgttaagcgacacgcctctctcactcaaaccctattctttttcccaatttctcgaatctagggttttacattctccttttcctctccaaatcaaccttatttcattttttttcttctcttagaaataatatcgtcaatgagcaacgaattagttaacttcaacatgtccggtcttggcgatgctcttaatgccgaagcacgagctggtctcgttaacgctctcaagaataaacttcaaagtcttgctggggatcactccgatgtgctggagagcctatcaccgattgtcaggaagcgtgtcgaggttcttagggagatccagagccaacatgatgaattggaggctaggttttttgaggagagggctgcacttgaagctaaatatcaaaaactatatcaacccttgtatgctaagcgatatgatattgtgaatggccttgctgatgctgaaggaacagcaaatgaagctgccaaggaccaaggagaggaaaaggatgctgaagagaaaggggtgcctgatttttggcttactgcaatgaaaaataatgaagtgctctctgatgagatcactgagcgtgatgaangagctctcaagtatctcaaggatattaattggtacagggtanaagaaaccaangattcaagcttgagtcttactttgacaccaatccttatttcaaaaatg

SEQ ID NO: 191414 - DNA, 714 bp, Gossypium hirsutum
aagaggaccccaatctggggactgaatttcatgctgaaaactgtcagccaacaagtgaaggtcaaattggcttggttcccaggggcttttccgacttgcagggtatccatatgagaattaaagctattgaaaaagcagttctggaaatggagaaagcttgcaatgctggagaactttgatctcaattccaaactagtgactgctgcaagacagattgaggaattgagatatggaagcagctcgtagtggacaaagtgttagagcaaagaggcacgtaagtgctagacaagaagaggaggaacttggcaatgggctcagtaacaatgtcaacatgcagagaccaacacctgaaatatctgaagaaaatgagatgatgacaaaagacattatacttgatcaggtatctgagtgctcgtcttatgggttaagcaggagaggaactgctgcagaggttgatactgagacgcttgagttgtgggaaactgctgaccatgatgctaatgccgacctgaaagtcagcaaggcccagaagatggccactgcaccaactgactaccgacagattggaactgtgaaggcaggcaagagcagaactccctctacagaatctcttgtgaaggagttgggtgtagataaagagagctcgaagagatttgcagagcccaacaataacggaagcaagaggaagattttagaaagacttgattctgatgt

SEQ ID NO: 191415 - DNA, 1127 bp, Gossypium hirsutum
taatcacaagcgtataactccattgcttaggttttacacatcaaaaagtgaagaggaattgacaagtttggatacctatgttgaaaatatgagtgagaatcaaaatgcaattcatgacttggcaaccgacagcttgaaaagtgccaagactgctccattcttagagaagttggttcaaaaagacattgaggttctctatttaatagagcctatcgacgaggttgccatccagaacctgcagacctacaaagagaagaaatttgttgatattagcaaggaagacttggaacttggtgatgaagatgaggtaaaagagagggaaactaaacaagaatacaaccttctctgtgattgggtaaagcaacaacttggagacaaagtggccaaagtccaaatttcgaagcgtctatcctcttcacctagtgtgcttgtttctggcaagtttggatggtcagccaacatggaaaggttgatgaaagcacaagcgcttggagatacagcaagtttggagttcatgaggggaaggaggatcctggagattaatccagatcatccaattattaaagacttgaatgctgcttgcaagaatgcgcctgaaagcagtgaagccaagagagcagttgacttgttgtatgatacagcattgatctccagtggtttttctcccgacagccctgccgagttaggtaacaagatatatgagatgatggcaatggcacttggaggaagatggggtagatatgaggacgatgatgaagtggaagcatcagaagttagtgctgctgaaactgatacgagtgccagtgaagcttcagagaaccaagtgatcgaaccatcggaagtaaggacagagagtgatccttggcaagattgaagtgtcaaaatttaaataaaaattttcctgtattatctgattgctattaacaaaagaatccagaaggaaagaagagttgtgggttcggttggggaagatgaggaggttagtgataatggctgttcctatggtggattaaagtcacttatacgtgatgattttaaattttaaagcattcaagtaaagttgtcttttgagttgctgtttttcttcacttggatgataatggtggcttaaatttcgaggagttttg

SEQ ID NO: 191416 - DNA, 445 bp, Gossypium hirsutum
gttaggttgctgaaggaggatggtgaagtggttgctatgaccggggatggagttaacgatgctcctgccttgaagttggctgatattggagtggcaatgggcattgcggggactgaggtatccactaccctttcctattatatccatgatgtccatatggttacttgctaattgtatattgtcagctctccttgtgaaatagcattatgggtgatgattcagagacccggttgaatgcaatgcagtatgcatggttgggctgctttttattcagaatgtatatatgttggaacagctatacaactataccactatttccagacattctatagatattgatctgagtcacctacttattctagacatttgataggatttcatctgtagttcttttaaaaatcttagtacttcattgcctattaccaggcaattatagtaaaaattc

SEQ ID NO: 191417 - DNA, 328 bp, Gossypium hirsutum
taaatagaaagtagacgatagccactaactatgatggaaacctagatcaaagaagaaaaatcaaacatcattactacttgtttacttttagtttgagctgatatggtgtgtctatgcagattatattgtggagagttcatttccatcttgaacattaatatcttactctgcattttaccttttgggttgaggcaggtatcataaatgtacaatccgggtttgtctgtgattgcatgataatatgattcgtccatgattttcatgaattaatttatttgtacaattaaggcacaagaacttgtgtgtttaagttatatttcttttttat

SEQ ID NO: 191418 - DNA, 447 bp, Gossypium hirsutum
ctcgagttttttttttttttttggttgggtttctcaaatggggctgaggataagagtcatagttaacaaatctccacattgactcatattttcacatcgccatctttgccaaagcccgccacgagcctatattaaactatgcatggaattaaccgagtcgaatttgtgcttagaaactgaaagacttccagccctcgacttggacacggccaaatcaaaacttacccgagtctgctttccacgaacacagtgccctaacttttcaaaacctgcttccaaaagggaccctctcttcaacgaaacggtcatacatttttccctcctatgaccaagttgcctccgctccaaacaagttgacttcaactccgtaacggacgagggacgtccgatttcaccggtcactatataaccttccagaatataaagactgtcgattctttacctttt

SEQ ID NO: 191419 - DNA, 439 bp, Gossypium hirsutum
  unsure (1)..(439): unsure at all n locations
cttgttgtatcttcatttgcaggacatcaaacaaggtggtgcaaggttttggcagtctgggtctttttctaatttgtggtcgatgggggaatcagaggaaaagaagagcacgaagagggataaaattaggtggagatgggtgattggagcttccattacaattgttcttgctattgctttggcttcaaggactaaaccagagatctctccgaattttggagacacaaacaagtcttgtcaatgttctcagggaaaacacaggcataaggggactgtagaggattgttgttgtgattatgaaactgtggaccatcttaatggtgaagtattacatccaatacttcaggaacttgtcaaaaccccattntttcggtactacaaggttaaatngtggtgtgattgcccattttggcctgaagatcatatgtgccgtttgcgg

SEQ ID NO: 191420 - DNA, 509 bp, Gossypium hirsutum
gaagaaaatagacagagagttattaaagaagagagttcagataagagtgatgagggtggttggactggttggtcagaaccattatccaaatgtaaggaatctagcacaagtcttgaaaatgttgcccatgatgatgcagcagttgaggatttccatgagaaaatcgagaatgaagatattaagcaagaagatgatacagaatcattgctaaaacagctaggaattgatgttgatgccggggttgatggcgaggttaaagacactttgacatgggctaggtggtcagaagaagagtcctcaagagactctgctcaatggatgcctgttcgtgcaaaatctggtgcagtcactaatttttatgaggaacctaatgaagaagtggatgagcaatttatgagagagatattatatgaagatgtatgcgaatacttgttctcattgagctcgactgaggctcgcttatctctagtattccagttcattgacttttatggtgggaaaatatccct

SEQ ID NO: 191421 - DNA, 1122 bp, Gossypium hirsutum
cgggggagccccacgcttccgcccacgcgtcggcccacgcgtccgcccacgcgtccggacaaatctaagatttctacgcttggcagaaatctagggtttttgtatctcataatttgaccacataaatactcaaacccccacactcagttctcccctcttttcagctttgcttcaaaattcgatcacatttcccctaaattccgtcttttttcttcaaattccccacaaatggccatcactttctcagatctccacacggaatctggccttaaatcccttaatgacttcctcaccggcaaatcttacatctctggggataagctgactaaggatgacataaaagtttatgctgctgttttgaaaaatcctggtggttcatttcccaatgtgagccaatggtataattgtgtgtcttcccatctcgcttctagcttccctgggaaagctgttggcgtttcacttggtggcaaagctgatccagctcaatctgctgaagctaagtctcctgctgcggacgatgacgatgatgacttggatctgtttggcgatgaaacggaggaggataagaaggcagcagaggaaagagaagcagctaaaaagtctgctaagaagaaagagagtggaaaatcttcagtactgatggatgttaaaccatgggatgacgagaccgacatgaagaagttggaagaagccgttcgatctgttgaaatgcctggacttttatggggagcatcaaaattggttgcggtcggatatgggattaagaaactccagatcatgcttacaataattgacgatcttgtttctgttgatacccttatcgaagaacacttgacagtcgagcctcgcaatgaatatattcagagttgtgacatcgttgcattcaaccaaatttagacaaggacgaacccggttgttcttcttcttcttcaagaaatgttgaagcgtaagccgattttccgccatgttttaacctttttggtcgttgctttacccttattattagttttattttgcaatctgaattgctacttgatttgctttagatttgagaattagatgtatgggtaaagaataacttcttgtttttgctgaaatggtggtattgtggtattaatgctc

SEQ ID NO: 191422 - DNA, 425 bp, Gossypium hirsutum
gtcctttcaactttctggtaaaggaaaggacgattggcccctggaagaatgctcccagattcattccttcatcttcctccgaaatgctttccagatacaactcggctaagaacgttcccggttatttacgtctccgcgccaaagccaaggtcgttggtacctgggatgatcatgattatggactcaatgatgctggcaaagaactttctgccaaaactactaatcagagacttcttctcgatttcttagatgaaccccaagacagtcccaggcgcaagcaggatggtgtttacacatcttatacatttggccctccaggtaaacaagtcaagattgtcctattagatactaggtatcacagagatcctctatccagtgacgggagcgtcttgggggattcacagtggtcatggttagggaaagag

SEQ ID NO: 191423 - DNA, 404 bp, Gossypium hirsutum
cccacccccaactgtgcgatgtttttaatttgtaatagatcttcttatgcagtagtcctagtacttgctttcccctatgtcgcaagcttttgctcagtgatttcattttgtgggacttctcactcaaagctgaatgcttaggaaaacaagacttccttcaccagcaaactccaaaccataattcgctccaggagcaaaaagaaaagaacaagaagaaaatatcaaacttacatccacctctctccacctttctgtcttctctaacatgatgtttagttaaccatttttcttgtcatttttgcttgcaagtggtgtggattaaatggctatatgaaactatgttttgagtcgagcaagagagttataaggctctctttaactggtattcatctttatgaagtgat

SEQ ID NO: 191424 - DNA, 728 bp, Gossypium hirsutum
cccacgcgtccgcaaattcactcctgtctttccccccgtgtctgtctctatatatctccataaacattccaacattccaaacgccttgtttttgtgaacatcataattataattatatgcagaaaaacaagaaaaacgtaaagaaaccatcacccttaatccgactactgtttctgtatcttcacaaccctagctaatcccaatttaatcaatatgtcagcagctgttgccgccgccgccgccgccgcaagcgtctcatctaacaccacttcttcttctcatcatccaagtaaccaggcgccgaaccatggctggatacccttttttcaaccaccggcacaacgtgcagcgctcccagctttgagccgctacgaatctcagaagcgacgtgactggaaggcgtttgtagagtacctgaagaagcatcgcccccacttgggtctctcccgctgcaccggagtgcatgtgcttgaattcttggactatcagttcgggaatactaaactccacacacggaactgtcctttttggggcaaccctcctgacctaccatcgccatgctcatgctcttgccctctcgaccaagcatggagcagcttggatggtgtggtagggcgcctccgtgtagcttttgaagagaacggaggccaaccaaagaccaaccctttcagtgctcgtgttgtgaggctgtacctaacggaactcagggatgctcaagccaaggctac

SEQ ID NO: 191425 - DNA, 371 bp, Gossypium hirsutum
cccaaatggtcgccgcaatgccaaaagatgagaggaggtttctccctccaaaggccaacttctacgacagaggaagagttaccgacgatggaggagcgagtcaactcaggtgttcctctctcttttctcttttttgccttgttttttacacacaaataactggaatggagaaatcaaatgaaccaaacaatcgaaaggaaaaactgagaacagcttcaaaatttgatctcgattcatatttttgcgtctggtttcttgtgtattcccctttgcgagtgtattcgtgaaaaaaaagaaacgacccccctattcgcacacttcctttactgtaagcagtgattgatgatgcgcatatgccatggcaaatcaaa

SEQ ID NO: 191426 - DNA, 483 bp, Gossypium hirsutum
gccagtttcaatggcaaagttttgttcctgttttctcctctgctgttttctctggattcatatccccacctgggctcaaagcagacaaccctcctacgccgaacagcaagagaccgacagggtgacgaacttgcctggacagccgccggtgaagttccggcactatgctgggtacgtcaagctccgacctcaagactccaaagccttgttctactggtttttcgaagcccaagatggagtttccgacaagcccctagttctttggcttaatggaggacctggttgctcatcagtggcctacggagcagcacaagaacttggtcctttccttattcgtagcaatggcactcgccttacttttaacaaattctcttggaacaaagttgcaaacatactgtttttggaggcaccagtcggagtggggttttcatacaccaacaattcccaagatttacataaactgggtgatcaagttacagcagc

SEQ ID NO: 191427 - DNA, 637 bp, Gossypium hirsutum
  unsure (1)..(637): unsure at all n locations
cggaanncccgggacgacccaggcggcccacgcaaccaagctctcttctgcacctgcaatacaaaaacaaatcgaaagggcatccccgtgcttttgctcccttacttggcagccatgattattccagagaagaaccgcagagaaatctgcaaatacctatttcaagagggagtttgctatgcaaagaaggattacaatcttgcgaagcaccccgagatcgatgtacccaatttgcaggtcattaaactgatgcagagcttcaagtccaaggaatatgtccgcgagacttttgcttggatgcactactactggtaccttactaatgatggaattgagtttctcagaacttaccttaatcttccatccgaaattgttcctgctactttaaagaaatctgcaaggcccccgggtaggctaggcggcccacctggtgatcgccctcggggtcctcctcgctttgaaggagaccgaccaaggtttggtgacagagatgggtaccgtggaggtcctcgtgggggtgactttggtggtgataagggaggtgccccagcagatttccaaccatcattcaggggtcctggtggaaggcctgcctttggtcgtggaggtggagggtacagtgcagctncatctggtt

SEQ ID NO: 191428 - DNA, 787 bp, Gossypium hirsutum
gagaacatttgggtgagggttttagagagagaaagagaaggccggagttgaaagacaagacacagagagagagacagagagagagatgtcgggaggaatagcgcgtggtcgactcgccgaggaacgtaaggcatggaggaagaaccatccccatggttttgttgcgaaaccagagacgttgcctgatggaacggtcaatttgatggtgtggcattgcacgatccctggtaaagcaggaactgattgggagggtggctacttcccgctcacgctccatttcagtgaagattatcccagcaagcctccaaagtgtaaatttccccagggctttttccacccaaatgtttatccatctggtactgtttgcctttcaatcctaaatgaggatagtggttggagaccagccataactgtgaagcagattcttattggaatccaagatcttctggatgctccaaaccctgctgatcctgctcaaactgaagggtatcacctcttcatccaggatgctaatgaatataagagaagggttcgccagcaagccaagcaatacccacctctggtctagtctgttattaaaaaatagtaactaagactttccatgaaattgctggtaaatgccggctgggttggctgcttgcctcatgtataatgctagacttggcttttgctaagagaaaatatgcttccttgggtatttggtaatctatataaactgtatgaaccagcattggtatttcaactctcatcggattcggattaatgggttgttctaattttatactac

SEQ ID NO: 191429 - DNA, 409 bp, Gossypium hirsutum
gagagaactagtctcgagttttttttttttttgtttttttttggcttctgaaattgttggggattttaatttttacctttacattaagcatagaacaaggtagaaaaaataaacacaatgtttaaaccattacaaaccatatccaatttctgtgttattccaggactacaacatttactacaatataagcaaagttggtcaacatcacgtgttgatctaacaaccttcacttcgatttggcttggatgaaacaaacacctgatcatcttccagggtcggaatccagtcattagttgctgggttgcttttgaagataggcttgctgattgcaccctgcccactttccaggtgaatatcatatccatttccttcacctacttatttcatcactcttatgaatccactttct

SEQ ID NO: 191430 - DNA, 379 bp, Gossypium hirsutum
cggaaactaactatgttccaattacacgaggcaatagagtggtactcatgattaatggcttgggtgccactcctgtgatggaactaatgattgcagctggaaaaactgtccctaagttacagctggaatttggacttgctgttgaaagagtgtatacagggtcatttatgacctctcttgatatggctggattttcaatatctataatgaaggcagatcaaactctgttgcaacgcctggatgctcccactaaggctccacattggcctgttggttctgctggtaatcgtccacctgccaagattcctgttccattgccaccatctcgttcaacatagagtgaggagtcattaagtcggccactgcagcttaatgaaca

SEQ ID NO: 191431 - DNA, 392 bp, Gossypium hirsutum
cttttctttataccagtccctacttgggccaacgcacgagatcatttggagagatgcgtcaggtccctcagaaaacctaccattattatcacccagagtcaaagggtctagattttgcagcaatgatagatgacattaagaatgctccaaatggttcattctttctacttcatgcatgtgctcataaccccactggcgtggatccttcagaggagcagtggagagaaatctcacaccacatcaaggcgaaaggtcattttgccttctttgacatggcgtatcaaggctttgctagcggtgacccacagaaagatgcaaacgccatcaggatttttcttgaggatgggcatcacataggaatggcacaatcatatgcaaaaaacatgtgactc

SEQ ID NO: 191432 - DNA, 434 bp, Gossypium hirsutum
gtgacttcattccattgctacgacccttattgagagggtgcttgaacaagtgcagggacttgcagaccaggaggctggccttcttcaacaactattatgttaagaaaagaagggaaataatggctgctgagggggacaagcacaagataagctgtgccattgatcacattatagatatgctcaaatgaagggagagattagcgaagaaaatgtgctctacattgttgaaaacatcaacgttgcagcaatcgaaaccacactgtggtccatggagtgggccatagctgagctggtgaaccatccccacgttcagcacaggatccgccaagaaatctcccgagtcctcaacggagaggctgtgaaagaatccaacctccatcaactgccctacttgcaggccacagtgaaagagacattaaggttgcacaccccaa

SEQ ID NO: 191433 - DNA, 459 bp, Gossypium hirsutum
gcatagcccatagctgttaataaacacagcaaaaatctcagctagctagcttttcccctccattaaaatccatggcttgcaccattagcatgaagatgaccttggctatccttgctctctcattattctcctcttgcttacaagccacactaggggaaattatatgtgaacaccttgaccaagacacctgtgcttacgcggtggcgtccacaggcaagcgctgtgtgctcgagaagcacgtcaagaggagcggtgaagaagaatacacttgccgtacctccgagatcgaagccgataagataaacaactggatcgaaaccgatcagtgcgttaaatcgtgcggcctcgaccggaaatcattcggtatctcctccgattccctcctcgagtctcgcttcaccgaaatgctttgctctcctcaatgttacaatggttgccccaacgtcatcgatctttact

SEQ ID NO: 191434 - DNA, 575 bp, Gossypium hirsutum
gcttggaaccctaattccgagtgagaagggaagaaaagaaaaagaacaaagatgaggccgattttgatgaaaggtcatgaaaggccattgacgtttctcaagtacaacagagatggcgatcttttgttttcgtgtgccaaggatcacactcccaccgtttggttcgccgacaacggcgagcgtctcggcacttaccgtggccataacggcgctgtttggacttgcgatgtctcaagggattcgatgaggcttataactggaagtgctgatcaaacggtgaagttatggaatgttcagaagggaactcaattatatacgtttaattttggttcaccggcgaggtcggtagagtttgccattggggataaacttgctgtcattaccacggatcccttcatggaattgacatccgctattcatgttaaacgcattgccggagatccaaccgaacaaactgaggaatctgtgcttgtcatcaagggtcctcaaggtagaataaatagagctgtttggggacccctcaataggactatcattattgctggagaaaatgctgtaattcgtatatgggatta

SEQ ID NO: 191435 - DNA, 651 bp, Gossypium hirsutum
gacccacccgtcctctgaacgactagtatttcctactgagcgaaatcttgttgataaaccaaatatattttgtgctgaagttggtctcaatataattggacaagctgctaatgtatgagaattagattctgatgtggcacaaagcaactcatttcttgaggttgatccaatacttattcctggtccgccaggatcgtttttgccaagtcctagagatatgggtctctgatgattttcaaggaaatgcattaacacccaaccagattcgatcctctcgagatcagcttgatttggtagatggggactcatcagattcacccctatccgtattgtcaacaatctctaattctatggaagccaggttcgatttgaagtatgaagaaccattagcatttcttggtgctcctgcagctatggaaacggatagatctggctactctactgccaagtctgacaccttagttgagaatggtgttgctgtggaacatacaagcccgggacaggaaagaacttttgaaggagagaaatttcaggtccctcgaatatctattgaaaagaagcctttcttttccaaaaatgatgatcaaccatgcttgtgccaaacaaaagagagatcctttcaaggttttgctctaaattatcatgagtcac

SEQ ID NO: 191436 - DNA, 1020 bp, Gossypium hirsutum
ttgttattttcccaccctctttcccgaaaaaatttaatctcaaaattttctcgggaaagcgagggtttattacaaacacagctatatagtggagcagtaatcatgagctttcgagatctggaagccggacggccattggtgtcgaggcaaaacctgatcaacggcaagcaagacgccacgcaagcagtggcctctggcattttccagatcaacaccgcagtctccacctttcagcggctcgtcaacaccctcggtactcctaaggatacgcctgagctccgagaaaagctgcataaaacaaggctacatattgggcaattagtgaaggacacttcggctaaacttaaacaagctagtgaaacagatcacagtgccggaattagtgccagcaagaaggtagcagatgctaaacttgcaaaagattttcaagcagttttgaaagagtttcagaaggctcaacgacttgcagctgaaagggaaacatcatacgctccatctgttcccaaggcagttcttccttcaagttactcggctgatgaggtagatgtagattcagatggaggggctgtacagcaagcctttcttctggaatcaagaagacataaggttttgctgttggataatgagatcacatttaatgaggctgtcattgaagaaagagaacaaggaattcaagaaattcagcagcaaattggtgaggtgaatgagatcttcaaagatctcgcagtgctagtacatgagcaaggaactatgattgatgacattgggactcatatcgagaattcacgggctgccactatacaggctaaatcccaacttgcgaaagctgcaaagactcagagatcaaattcttccctgacctgcttgcttatggtgatattcggaatcgtgattctgattgtggtcatactactagtggtctaatcccaaactaaagatcatctcagcagcgagacgctgatctcttcgcctatgtatttgattatgttgttctatgagaaatgatggccaacaggagtt

SEQ ID NO: 191437 - DNA, 442 bp, Gossypium hirsutum
ccctctcgtccgccccaattctctaatttctcctaatccctaaatttcccccaaaagaatcagcggacgcggcgaagactcattgtcgaggtaacatacatctgacgcttttctcgtttgcttcgtcggagtgtaaaatttcagctgcttcggatcattccaagatctgtacggccgagaaccaaaagaagaaagatgatgaggatctgcagttgcagtcttccttcattaactaaaaatttctaaagggtagcagctcctgcataggtgcaatgagggttaaaaatgcatgtatcgcattttggagtttcaacgacgcttaaaaccgcgatgggtgtttgaggtgtttgcaacagctctctcatgaatactccctactgaagaacatgcttcaaaccttattccagctggagcaacaaatagttgcagctggtggatcgat

SEQ ID NO: 191438 - DNA, 386 bp, Gossypium hirsutum
tgaagttttcacaagcaaaaagataacagatgccaaacttgcaaaagattttcaagcagttttgaaagagtttcagaaggctcaacggcttgcagctgaaagagaaacttcatattccccttttgttccccagtcagctcttcctgcaagctacacggcaggggagatggatgcaggttctgataaaagtgctgaacagcgagcccttcttgttgaaagaagacaagaggtcgtgctgctggataatgagattgcatttaatgaggctatcattgacgaaagagaacaaggaattcaagaaattcagcagcaaattggtgaggtgaacgagatcttcaaagatcttgctgtgctagttcatgagcagggaactatgattgatgaca

SEQ ID NO: 191439 - DNA, 387 bp, Gossypium hirsutum
tcgtctttgcgtccgtagattggcccaattctcgggggggttctaatccctaagtggccccccggaagaatcagcagacacggtgaagactcattgtcgaggtaacatacatctgacttgaatcgcttttctgttttgtaggttactcacaacaaattcgtataatcagacgctttttctcatttgcttcatcggagtgtaaaatttcaggctagcaagaaggtagcagatgctaaacttgcaaaagattttcaagcagttttgaaagagtttcagaaggctcaacgacttgcagcttaaagggaaacatcatactgtacgaaggtcttccttcaagaaaaatgcgttgaggaagattacaagatttaagtattgtccagaatactc

SEQ ID NO: 191440 - DNA, 714 bp, Gossypium hirsutum
tcttctcttgagcccgcctctaacttgctggcgactcattcttcacaatttcttttttgaatttattctcgcgatggggtcatcggagctgatattcagaggccatgaaactcagcctgtttccgattcctattcacccaaacccgacaaaccatgggcttccgttacccgcccgattcgttacatgctccgagagcaacgccttctcttcgtcttcctcggcattgctattaccactctcattttcaccctcttcccggcctcacgtgctacgcaacacaacttcgccgattccataacctacttccccatcgacacacagagcaagttctccaacccgcaccgactcggattcggatcgtctaacccgacgggcaagatcccgttggggttaaaacgtaaaggcctgaggatcgtggtaacgggtggagccggcttcgttgggtctcacctcgtggaccggttaatagcaaggggagatagcgtgatggtggtggataacttctttaccggcaggaaagaaaacgtgatgcaccatttcggtaaccccaatttcgagcttataagacacgacgtggtggagcctttgctattggaagttgaccagatctaccatttagcttgccctgcttcaccagttcattacaaattcaacccagtcaaaactatcaagacaaatgtggtggggacattgaacatgttaggactggcgaa

SEQ ID NO: 191441 - DNA, 491 bp, Gossypium hirsutum
ctcttttcacatatttccacaattttcttttgacacttcattatgtcttttgccaatatcaaagcttatcttcttgattcaaaccaacccatttacactaatctgtattgaaaacccttgaaagacttgctttttcttcgtgggatttttgtgttctttattgggtttctttttttgtttttcttgagttttaagactccggggttttgttgaatgaaatcaagctttatgatggtggatggtggtggattgatggatcaaaggaagggtattatgaaaataagacatgtaaacaacaaggtgagatacgtttagagaccaatcaagaagaagaacaacagatcatcatacagggaaagaaaagatcctaaagtgctacaaaagctgtttgattcatgtaaggaagtgtttaaaggcccttgaactgttccatctgattctgatgtcaacaagctatgcagcattcttgatgagatgaagcccaaacatgt

SEQ ID NO: 191442 - DNA, 885 bp, Gossypium hirsutum
attttaggctttagagtctgactgagaaagcaattccgattcctcttttgggtttgttgtgtttcgaatcatcgtcttcgcctaactttttctccttcaatttttcagatgtgggctgcttcatgccttgcatcgtgctgtgcggcgtgcgcctgcgatgcgtgccgcacggtggtttcggggataagccggaggtctgcaaggatggcctattgtggactatttgccctttctctgtttgtttcgtggatcctccgtgaggttgccgcccctctcatggagcagctgccttggatcaatcattttcacaaaacacccaacagggaatggtttgaaacagatgcggtgctgagggtcagcttgggaaattttctctttttcactatcctatcatttttaatgattggtgttaaaaatcagagggatcctcgtgatggtttgcaccatggtagatggatgatgaaaattgtctgctggttcattttagttattttgatgttttttgttcctaatgagattatcagcttttatgagacgatatcaaatttcggctcaggactgtttcttttgattcaagttgtgcttttacttgactttgttcatggatggaatgacaaatgggttggataccatgagcaattctggtatgttgctctttttattgtttcacttgtttgctatttggcgacatttggcttttcgggacttctctttcactggttcactccatctggacaggattgtggactcaataccttctttatcgtgatgaccttgattcttgtcattttgtttgccatagttgcattgcatcctgaagttggtagtagcattttaccagcatcagttatatcactgtattgcatgtacctctgctacagtggg

SEQ ID NO: 191443 - DNA, 740 bp, Gossypium hirsutum
ctttagagtctgactgagaaagcaattccgattcctcttttgggtttgttgtgtttcgaatcatcgtcttcgcctaactttttctccttcaatttctcaggtaacacatatttgctcaattattatttttcctttttgagggctcttccgattcaattctcaacagttagggtcttgtacagaatctattcatttaattttagttttgatcaaagtattaaaggttttagggttcggcgggttaatctatcttgttggggtgaagatgtgggctgcttcatgccttgcatcgtgctgtgcggcgtgcgcctgcgatgcgtgccgcacggtggtttcggggataagccggaggtctgcaaggatagcctattgtggactatttgccctttctctgtttgtttcgtggatcctacgtgaggttgccgcccctctcatggagcagctgccttggatcaatcaatttcacaaaacacccaacagggaatggtttgaaacagatgcggtgctgagggtcagcttgggaaattttctctttttcactatcctatcatttttaatgattggtgttaaaaatcagagagatcctcctgatggtttgcaccctggttaatggatgatgaaaattgctggctggtgcacttagatattatatggctttgttcctatgtgtgataactcttatggatgtatctctgtctggttgatctcttatataaatgcttatttcgagatattctccg

SEQ ID NO: 191444 - DNA, 993 bp, Gossypium hirsutum
tgtccctaatctaaattctctaattctaaaacaaatgaaagtctcgcaaattccacaaattttgcagtatttttattttatttgaactctataatttaatttccccttattggattcaccattcccagtaccaaaccctagttttcttcttttcttttctctgtaattttttccaagaacattcttcaatcatcttatttgaaggtttttttttttttgcttttgcccccctcccgtgtgtgagttgaggggtttaatattttgaggatggatatcgagcaaaaacaagcagagttaatcgatcactttgtgaagaaagcgtcagctcaagttggttcagctattggcgccgtaattgtcgaagcgacgtcccatgcttcactcttcgccttctccgagatccttgccgtgcctacagtcgctgagcttgaaggaactgaaaactcagtttaccttgagttgcttccgtggtttgcacatggcacatggagtgattacaagagtattagtggtagtctccctcaactgctccccgatcaagttctcaagctaaagcaattgactgtccttacacttgcagagaccaacaaggtcctaccgtatgatcaactaatgctggagttagatgtcacaaatgtccgtgaacttgaagattttatcatcaatgaatgcatatatgcgggtatagtcagaggaaagctggatcagctgcgaagatgttttgaggtccaatttgctgctggaagggatttgaggccaggacaacttgggagtatgatacaaacactatcaaactggttgggcacattaaacaacttactcatctcaattcaagagaagataaaatgggctgatacaatgagcgagttggacaagaagcatcggaaggaggtcgaagataaggtggaagaagtaaagaagtcagttgccgtcaaggccgaccttgactttcgagggattgaagagatctactctggacctggtggagtgatg

SEQ ID NO: 191445 - DNA, 415 bp, Gossypium hirsutum
tttcactctcctactccctctttgcttaaacctcagcatagacaagttcaaacattttccagcttttagttaatcaaaacttaacattcaggccaagttccatggttgttacttcttgctcttcaccatttaggctatttcaatccctttggctgcttctgcttgtgatccttggagaagttttttcttcttcataaccaaatttacccggtctatagcaggtcatgaattagtatttccaagttccaaacaaggaatccctctctattttcttacagtggaaggaaagaagaaaaggaaaagaaaaatggagaacatgtggaagtgggagcaggggacactggtgagcgagctgattcaaggaatgcaattagcaaaacagctaaggttgcatttgggtgcatcatcatcttct

SEQ ID NO: 191446 - DNA, 1358 bp, Gossypium hirsutum
gatgtctctaattctcttgtttacaaaagatcaccttcaattcgtagacatcccttttcaccagttttgaatcttcaaaacatcacgaaaagaaccaacgttttggtctcaaaaccattgcatatctcatctgttgagagtattggtaaggagaaaaagccagtaattcaatgcaacgcttatgaagctgacaagtcagagcctattgaggcagcagagcaagttaaatcagaagctgcaaaaagggtgaaaattgggatttattttgcaacttggtggggtttgaacgtggttttcaatatttataacaagaaggttttgaatgcttacccttacccttggttgacttcaactttgtcccttgcttgtggttctttgatgatgttaatttcatgggctacaaggattgctgagaccccaaaaacagattttgagttttggaagactttgtttccggttgctgtggcgcataccattggacatgtagcagcaactgtgagtatgtctaaggttgcagtttcattcactcacataatcaagagtggtgagccagctttcagtgtcctggtttctagtctcgtgcttggagagagcttccctcctgcggtttacctctcccttgttcccatcattggtggttgcgctcttgctgccgtaactgagctcaactttaatatgaccggttttatgggagctatgatatcgaacttggcatttgtcttccgtaacatattctccaagaagggcatgaaaggaaactccgttagtgggatgaactactacgcctgtctatctttgttgtctcttgtaattctcacacctttcgcgattgctgtagagggaccgcagatgtgggctgcaggatgggaaaaggccttatcccaaattggaccacagtttatctggtgggtagcggcccaaagtattttctatcatctctacaaccaggtctcatacatgtcccttgatgagatatctcccttgacatttagcgttggcaacaccatgaaacgtatatcagttatagtctcttccatcatcatcttccacacgcctgtccagccaatcaatgctctaggagctgccatcgctatcctcggaaccttcttgtattctcaggcaaaagcgtgagaaaaaccaggggttcgagaattttgattcatcatacaacatagatgatgaaagacaaaatcggtctccgaatgaatttagctcagatgagttcttatagattactactgtcttttagaattgatgaatgctgggatttggacagataaagtctgtcatagtgtagatattttacaataatgatgattataaacaatgtcatataggaatggtattttttctcttca

SEQ ID NO: 191447 - DNA, 486 bp, Gossypium hirsutum
aaaacccgggccgaccgacgcgtgcgcaaaagccaaggtcaaacgaaggcaaaaataaggttttccatggaaggggaagctggttcatacgaggacgttaagccaaacgtcgtcgctaaacaaagtaatggcgatgttgtcggggataatggtgttggaaatctgggatccgttgaagcccctgattttctttccaagaaaaatttccagaactgttccgtggcaactcctgcatctggactgaattccactggccctgctccatctcaactaaccatcttctatgatggacacgtttgtgtgtttgatgcaattcctgtggaaaaggtgcgggagattatgcttattgctgcaactggtgctgctaactctgttgacatgaagaaagttgcaactgattgtgccaccacctcacctgttcttacgaggtctccttcgcttcaaagtactgctactgcaactgctctggcttcaccacaggcacag

SEQ ID NO: 191448 - DNA, 405 bp, Gossypium hirsutum
  unsure (1)..(405): unsure at all n locations
aaaaaanattttttttttttattttataaaatttatttatttaattatattataattttttttatttttttttttgtttttggttttttctatttttcaaggaatttgacaaatttcattgaatatatattataaggtgaagagtatatatttgcattagggacatgcttacattttttaccaaaaaggaaaaggggactaagagcactacactaagaggaaggaaagttttgtgggagtaccagacacattaaggttcacaagttgaccgggtggctggcttcttccatcttcgagattgaaacggtcgcattgcgagtgacaaaacttactcgagctggcatcgtcggtactgacaaaagctggaagagatcgatatagtaaggtggcaagatcaaatttgtg

SEQ ID NO: 191449 - DNA, 386 bp, Gossypium hirsutum
atagggccatcttttcccttgtggcttcgttctcaaaagcatctagaatatctagacatctcaaattcaagaatttcagacgtcattcctaggtggttttgggggctgtcgacccaatttagagatgtaaatctctctagaaaccaaatttctggccagattccgtatctacctaagggtcctaatattttcacttttgtcgaccttagtttcaataattttagcggtccattgcctcaaatctcaatgggttccaatcagtacatgatagacctttctaataattatttctcgggatctcttttccattttctgtgctatcagttgaatggtaccatcacaacaaggtttcttggtatggctaacaatcctttatctggagagat

SEQ ID NO: 191450 - DNA, 405 bp, Gossypium hirsutum
aatcaaaagccatcctgtatttacattgatctgtaattcatacaatttttttaaaatatttgttgaaacttctgccaaaaaaaaagagaaaaagggagagagaacagacaagaattactaggagtgaaaatcagtaaggttgaagttgagcagctgagcagcttattcgcctccgcttcattggaaaaacttgctggaaacctccaccattggtggcggctacatgccactcgtccaacaccatcccttccacctcaaactgttgcaccgcactagacccatcatataaacacccttcttggaacccgccaagaccaagaccaggacccggtggtttggctttccggcggccagccccaacggggacgttccgtagggctccacctgctgtccagtacctttggc

SEQ ID NO: 191451 - DNA, 1051 bp, Gossypium hirsutum
ttcttacccaatctaaagtatgtttccatcaaggatggcccccttgttggagatgagggagtcgcgagcctgttgtcttcagcctcatattccctcacaaaagtcaagctccaggccttgagcatcactgatgtctctcttgctattattggacactatggcaaggcagtgaccggcctttctctcactagccttccgaatgtgagtgaaaagggcttctgggtaatgggtaatggtcatggactacagaaattgaaatctttcacagttacatcctgccgtggagcgacagattcgggacttgaagctgttggaaaaggttgcccgaatttgaagcagttatgcctcagtaaatgccctttcttatctgataaggggttgtcgtctttagccaaagcagccggttcactagagtgcttgcaactggaggagtgccacagaatctcccagtttgggtttttttgctcccttattaactgtggtgcaaagttgaaggttatttcctttgcaaactgtttaggcattaaggacctaaactcgggattgccacctctatccccttgtgaatcccttagatctttgtccatccataactgccctggtttcggcgatgctagcttgtttgcgttggggaagttgtgccctcatctgcagcatgtggagttgtgtgggcttcatggaataacagatcgtggggttctcctgttgctcgagagttgtgggctggtttataaaggttaatctaacggttgtgtgaatttgagcgcaaagttgttaaacgatctcacttgctgggtggactctagactgctgatctaatggtgcaagatcagcgcgctgtttagtgcattgcaaatggtcagtgtactgatctcgattttcaaggcacctaccgatctgattcgcacttgctatttaatccgatatcgcagcctttcggtcttggtcttatgtttcaacaaactgcctccttgaactggtgaaccttggggtaaactcgcatgaacatagagcggccggactctacgacacttgagggaatcttctaaca

SEQ ID NO: 191452 - DNA, 644 bp, Gossypium hirsutum
attttctctgcttcatctaccactctcataaaagccaaaaaggggcgaagcatagagatatagataaagaaaacaaattttaatttgggttttgtttaattttttaataaattacaattttaatcaatagaaaagagagaaagaaacatttattttcgtttttgtgtgtgtttttgttaaatttcattggttgcacgtggaatccctcttgagtcggtaaaattgtcaaaaagcatggctctttctggggttaaaaatgatagaggggaattgaggattcttgagaatttggatgagctaaggactgatttagctgactatattgctgagttatcagaagctgcagtgaaggagagaggtgtgtttgccatagcactgtctggtggttctctcattggcttaatggggaaactgtgtgaagcaccttataacaagactgtagactgggctaaatggtacatattttgggcagatgaacgcgttgttgcgaaaaaccactcagacagcaattataagcttgcaaaggatggcattctttccaaggtgccgattgttcccagccatgttcattctatcaatgattcggtttcagcagaggaggctgctgacgaatacatgtttgttattcggcagctagttaaaac

SEQ ID NO: 191453 - DNA, 388 bp, Gossypium hirsutum
ccatccttaagctgtacttactcttctacctagccattgtccatttcactcaattcttctttttcttctttaattccgtttcagcgagtgaaactggttggatctacttctaaagcaacgaccaggagtttcttcttgacagctagggcaatggctgagctcgttaaagataaggaatccggtgtcgccgctgctggaggcggctagatggacattgagcattcccgtaccttccttgaagctcgctctgaggaagaactcctatctggaattaagaaggaagtagaagcacgaaggttaccttcaaatgttgcagcaggaatggaagaattctatcggaattataaaaatgctgtaaactgctaatctggaactcttacttcagttc

SEQ ID NO: 191454 - DNA, 427 bp, Gossypium hirsutum
tgataaagaaggcgttcaatgctactgaagaagagtttttacatttggtgaagcaatcattgcccgtaaggcctcaaattgcttcagttggatcatgttgccttgttggtgcgatatccaacgatgtgttgtatgtggcgaatctcggcgactcgagagcagttcttggcaaaagagtttcggaggataagaaaaacaaggttgtggcagagaggctatcaacagatcacaatgttggagttgaggaagtgaggaaagaggttgaggctcttcatcctgatgattcgcatgtcgtggtttacactcgcggagtttggaggattaaaggcataatccaggtgtcaagatctattggtgatgtttacttgaagaaacccgatttttatagagatccaatctttcaacgattcggaaaccctgttcccct

SEQ ID NO: 191455 - DNA, 436 bp, Gossypium hirsutum
ctttctttgttttttcttttttacaaatggatgcttcacagaaaactattcttgttactggtggtgctgggttcattggcactcacacagtggtacagctactcaatgaaggttttaaagtgtcaattattgacaatcttgataactctgttattgaggctgttgatagggttaaggaattagtgggtcctgagctctctaagaaactccagttcaacttgggtgatttgaggaacagggatgacttggataagcttttctctaagacaaagtttgatgctgtcatccattttgctggccttaaggctgttggggagagtgtcggtaaccctcgtcggtattttgacaataatttgattggcactatcaatctgtatgagatcatggccaaatataattgcaaaaagatggtattctcatcttccgcaactgtgta

SEQ ID NO: 191456 - DNA, 602 bp, Gossypium hirsutum
gcagctgcaggctcattgcatcccttcctatttctcttccctcaataatcaaaagcttcttctttctttctttttctgtgcgtgcactctcaaaccacaacaaaccaagatgagtgaagaagataaaaatgaagctaaggtagtggaaactccacgcaaaccaccccgtctgaacgagaggattctttcgtctatgtcacggagatcagttgctgcacatccttggcatgatcttgagattggacctggagctccagcaattttcaactgtgttgttgagataccaaaaggtagtaaagtaaagtatgaacttgacaagaagacaggattgattaaggttgatcgagttttatattcatcagtggtctaccctcataactatgggttcatccctcgcacactttgtgaagacaatgatcccttggattggttgggtattatgcaagaacctgttctttcttgatggtttctgcgaaccaaaacccttggacttatggccatgattgaacaaggggagaaagatgaccagaacattggaagttggggtgatgattctgaataccaacatttcaccgacattaaaaaactttccccttaaccgc

SEQ ID NO: 191457 - DNA, 934 bp, Gossypium hirsutum
atcgtgaatgtataaaaccctagtttggctcccacgggtattctcctcagataagtagtcccccagagtctcttccctcatctacccccaaatctcctcacattatgtctttggtggccaacgaagattttcagcacattttacgtgtgctgaacaccaacgttgatgggaagcagaagattatgtttgcattgacctccatcaagggtatcggaaggcgattcgctaacatcgtttgcaagaaggctgatgtcgacatgaacaagagggctggtgaattgactgcacaggagttggacaatctcatgaccattgttgcaaaccccaggcagtttaaaatccctgactggtttttaaataggcagaaggattacaaggacgggaagtattcccaagtcgtgtctaatgctcttgacatgaagttgagggatgatttggagcgtttgaagaagatcaggaaccaccgtggtctgaggcactactggggccttcgtgtccgtggtcagcacaccaagactactggtcgcagagggaagactgtcggtgtgtctaagaagcgttgaaggcttcatatatattttggaaaaattgatgtagtcttgcagagtgttcatttccttgaatgtaagcactgtttgcacgaagacaaattttggatgtgattttttttgttgtttctagacaagtggtaagactagtagtgttgggtctttatcggttgctattaggaatacttgcgttactgaatttaatttggtttgaatgataattgtctttggaatttgtgttggtttgccaaaaaaaaaagataataaaaaaaaaaaagaagctataacaaaaaaagaaaaaactaaaaatttaaatatcgcaatcaaacaatacaaaacttaataccgacctaccaaatattccaatggctatggggcggcctttt

SEQ ID NO: 191458 - DNA, 871 bp, Gossypium hirsutum
cttcattggtatacttcaaagctcatctgtcaacccagagccccttctctccgccgaatctcctttttctcccgtaaaaatgtctctggtggccaacgaagattttcagcacattttgcgtgtcctgaacaccaacgttgatggaaagcagaagattatgtttgctttgacctccatcaagggtatcggaaggcgtttcgccaacattgtttgcaagaaagccgatgtagacatgaacaagagggctggtgaactgactgcacaggaattggacaatctcatgacgattgtggcgaacccgaggcagtttaaaatcccagattggtttttgaacaggcagaaggattacaaggatggaaagtattcccaagttgtgtccaatgctctcgacatgaagttgagagatgacttggagcgcttgaagaagatcaggaaccaccgtggtctgaggcactactggggccttcgtgtacgtggtcagcacaccaagactactggtcgccgaggaaagactgttggtgtgtctaagaagcgttgaattcttcataacataatctatagtatgacgaggcagatatttatttctttgcttttaagcgatgtttgcatcaaagacaaaattttggatttggttttgttgttttagttggttttttaaaccttgcagacaagtagtgtttctcttttaatcgattgtttgatctttttatcaattgagattaaggatacctgctttgatagataaagattacacatgttttcttcacctcaagtccaagtcctgaagaattggtggcgtccatgaccagattgggttattcacatatgggtattaacctcacatggttgttcatgttgggtgctcatattt

SEQ ID NO: 191459 - DNA, 489 bp, Gossypium hirsutum
tccacgcgtcccctccgctgtttattcgcttcagctcatcacttcccatagtctctcctcctccctcaccaaatcaaaatgtctctggtggcgaacgaagactttcagcacattttgcgtgtgctgaacaccaacgttgatggaaagcagaagatcatgtttgctttgacctccatcaagggtattggaaggcgtttcgctaacattgtttgcaagaaggctgatgtcgacatgaacaagagggctggtgaattgactgcacaggagctggacaatctcatgaccattgttgcaaaccccaggcagtttaagatccctgactggtttttgaataggcagaaggattacaaggatgggaagtattcccaagttgtgtctaatgctctcgacatgaagttgagagatgacttggagcgattgaagaagatcaggaaccaccgtgggctgaggcactattggggtctttgtgtccgtggtcagtacaccaag

SEQ ID NO: 191460 - DNA, 531 bp, Gossypium hirsutum
gtccaacgcgcttgttcatctgtggagtttagattccttgtttgcttctattgaaagctcaactacacacagtacgcatctccctttctggttctggtgtctatgctattttctctgagaagctgaaaaatggcgcgaatcggtggagttgcccaggtcgtttagcaattcttccattcagaaacaaagttttattgcctggcgcctttattcgaattcgctgcacttcacagagcagtgtaaaattggtggagcaagagttatggcagcgagaggagaaaggattaataggaattcttccggttcaagatgctgctgagacgacctccatggattccatgttatctcaaggtgttggaagtgaatcatgtgagcgaagctcgaacgttcaggttagcacatctgatgctcacaaggttgatgggaaaaacccttcagaagtcattcactggcataacaggggagtggcagcacgagctttgcatctatcaagaggagtggagaaaccaagttggagggttacattcattg

SEQ ID NO: 191461 - DNA, 419 bp, Gossypium hirsutum
caaacggctataattgacgttacacaacacgaagcagaggcaaggaagggaattttagattttttcttttcttcaactctttcttaaactttaactctttactgggtttatttcgctagattttctctccttcaaaaatttggcctttttctttggggatttcttttctttttatttgaattctgaaaagaaatagttttttattttcaacatcagcattctttctgcggttgtttaatcatgtctggcggctactctaattcaaagaagactgatgatatctatgaaaaagtttgtggacagcaggcatcctttgcagcattgacgatgtctagattgcggtgtatgttgcgggggatcgatatccggatttgtatcgtccttctcatcgcaatcccggtgttcatgttcggcatata

SEQ ID NO: 191462 - DNA, 530 bp, Gossypium hirsutum
cggacgcgtgggcgaaccaaaacagagccttcccctaaacgggcatagagagaaaccagagaaataccacccaaaacctgttcaaacaaagctaaaaaaccatcaaccatagtagaagaggcaaaagcttgagagaaacaagaccgtggagagtcagagtgaaccttttccattctcaagcttctgaaaaaaaaaaaaccttaatactatcgaatattgtcaaatccagttgttccagtccacaattgtcatcttctcaactggatctagggctttttcaacccaaaaacatggtgctcgataccgatgtcccttcttagccaacatatgggcagccttatttacttctcttgaaatgaagtgaaatcttaaggaaacccatttcagctgcaaagagtaagactctctcgcaagccctagcttctgccacaaaagcatcttggactccatcataagggtaagtacaggaccccataatctgacctttgttatttcgagccagaactgctgcaactgaagtgtatgtatct

SEQ ID NO: 191463 - DNA, 675 bp, Gossypium hirsutum
cagatcctcaaaaatccactccttttgcttcccatggtcttggtggatcagatctggttttgcagccattgaagaagctcaatcaggtcaagaaaaggccaggtggggcttatgcatcactatcagaaggagctgaatatcactcccaaagaccagcggcgcctctcttggacactataaactatccaattcatatgaaaaatctctctgtcaaggaactgaaacaactatctgaagaactgcggtctgatgtggttttcaatgtttcaaaaactgggggtcacttgggttcaagccttggtgtggttgaactcactgtggctcttcattatgtcttcaatgcccctagagacaagatattgtgggatgttggtcatcagtcttaccctcacaaaatcttgactgggagaagacataagatgcataccatgaggcaaactaatggattggccggattcacgaaacggtcggagagtgaatacgattgcttcgggactggtcacagttcaaccacaatctctgcaggcttggggatggctgtgggaagggatctgaaaggtgaaaggaatcatgttgttgctgtcataggtgatggtgctatgactgcaggacaagcttacgaagcaatgaacaatgccggatatcttgattctgatatgattggtattcttaatg

SEQ ID NO: 191464 - DNA, 405 bp, Gossypium hirsutum
ccgacatcacttttcttcttcaccaatcactccaagcgattagtggtaattggtgccatttttgtcatttcattaccacactcaatggtgtttaaccagtgcccccttacctttttacttaactttaatcatttccctaatgtgctaccatgtttatctgcaaaccataacatattcttcctccccctatatccccatatctaaccaacctataccattcctacacactgcaaccccagtatctatcttgtctggtttctttttttaatgatgtctgaacttgaagaagattctttaaagcttccagtacttgatctaacccaacctgataatattgaatcctctttcttgtcttctctcttaaaagcttgtcaagaatggggtttcttttatgttaccaaccat

SEQ ID NO: 191465 - DNA, 412 bp, Gossypium hirsutum
agattctggttttgcttgcagggttgctcgagaacgccgaattggctttggattcactctccatttgcatgacgatatctggatgggtgtttatgatttcggtggggttcaatgccgcagcaagtgtaagagttgggaacgagctaggagcgggacatccaaaatcggcggcgttctcggtggtcatagtgacggtactttcattcataatctcggtggcggcggcaataataataatggttctacgtgatgtcattagctacgccttcacagagggtgaagtggtggcggaggctgtttcagatctctgtccgcttctagcattaacccttatccttaacggagttcagcctgttttgtccggggtggcacttgggtgtggatggcaaacttttgttgcatatgtcaacgt

SEQ ID NO: 191466 - DNA, 611 bp, Gossypium hirsutum
aaaccctaagaaaatccagttagattgtcattcaaacctgaaaaatgggagtagagaagcaagtcatcaggcctggaaccggtcccaaacccacccccggtcagaccgtcaccgttcactgcactggctacgggaaaaatggagatttgtctgagaaattctggagcacaaaggatccagggcagcaacctttctctttccaaattggcaagggctctgttataaaaggatgggatgaaggtgtgatgggaatgcaagtggcagaagttgctcgtcttcggtgctccccagactatgcttatggtgctggtgggtttcctgcatggggaatacagccaaactcggttctcgaattcgagattgaagtcctaagtttgaagtgagtagcaggcagttggtgactgtcgagaaataatatgtagcccgaataactcacctgtgatgaacatatatagatattatggggtagcatgtatgaatattaaatgagtatcaatatcagtcatcttattcatgcatgccagctcttcagtggtgactttttcttctaataatataagatactccgcagcagtttctccaggtcaaacagaaccgaaaaaaaacttagg

SEQ ID NO: 191467 - DNA, 654 bp, Gossypium hirsutum
gctttatccgatctttagggtttttttcttatttatcttcttgaattctctcaagaaagccctaaatacctcggatcaggtctcagcttgtggttgttaagcctatttgatcaactaagtttcatgtctgatctcgacgtccagattcctactgcctttgatccctttgctgatgcaaatgctgaggactcaggtgctggtgcaaaggagtatgtgcacattcgtattcagcaacgcaacggtaggaaaagcttgacgactgtccaagggttgaagaaagaattcagctacaacaagatactcaaagacctcaagaaggagttttgctgcaatggtactgtcgtccaggaccctgaattagggcaggttattcaactgcaaggtgaccagcgcaagaatgtgtcaaccttccttgttcaggctggcattgtgaagaaggaaaacatcaaaatccatggtttctaaattgcatctgcttatggttttctgctaagtcacccgtgcctcgtgtcgaagcaggaaacacaacttgattacaacttgattagagtataatctatatagtgctatggcttctttatgatggtttaataaaaaacaaaaagcactcttatatattgtgtttttcaggcaataggatgctgtattggtgga

SEQ ID NO: 191468 - DNA, 702 bp, Gossypium hirsutum
ctcagacttcgatcatcaattttagggtttttttcctattatttcataatcagattcttgattatccaaaactctaatcttcagatcaggtcttagttttctagttgttgggctctttcgaccagctaagtttcatgtctgatcttgacatccagattcctactgcctttgatccgtttgctgatgcaaatgctgaagactctggtgccggtgccaaggagtatgtgcatattcgtattcagcagcggaatggtaggaaaagcctgaccactgtccaggggttgaaaaaagaattcagctataacaaaattcttaaggacctcaagaaagagttttgttgcaatggcactgtggtccaagaccctgaattagggcaggttattcagcttcaaggcgatcaaaggaagaatgtttccaccttccttgttcaggccggtattgtgaacaaggataacatcaaaatccacggcttttaaagttgcaacggctaaaatttcttccacgactatcctattctgaaactcctatatatgtaatgttataatatgtttatagtggtgtgatactgataaatgcaccctgtgactgtgtttcttgttgtgctttcaactctttagccctatgtgatgctgaatggcgatgttagctttaattatttctatttctcacatggttgttgctaccatcatctttagtaaaaaa

SEQ ID NO: 191469 - DNA, 630 bp, Gossypium hirsutum
aacgaaataattaaactccaccaccccctcagactctatctggtttttagggcttttctaacttttctgattattttttgataatccggagttcaatcatctaaaagaagccctaaaatctttgaatcaggtctgagcttgtggtttgttaggcctctttgatcaaactaagtttcatgtctgatcttgacgttcaaattcctactgccttcgatccctttgctgatgcaaatgctgaggactcaggtgcgggtgcaaaggagtatgtgcatattcgtattcagcagaggaatggtcgcaaaagcctgacaactgtccaggggttgaagaaagaattcagctataacaagatacttaaagacctgaagaaggagttttgctgcaatgggaccgtggtccaggaccctgaattaggacaggtgattcaacttcaaggtgaccagcgtaagaatgtatcaaccttccttactcccggtcagaccgtcaccgttcactgtactggatacgggaaaaatggagatttgtctgagaaattctggagcacaaaggatccagggcagcaacctttctctttccaaattggcaagggctctgttataaaaagatgggatgaaggtgtgatgggaatgc

SEQ ID NO: 191470 - DNA, 725 bp, Gossypium hirsutum
  unsure (1)..(725): unsure at all n locations
gaaatactgacagataaatcattttctctctccccgggccccctttaaccaaattttagatctcacgccgagaaaaagagaatcagctcagacttcgatcatcacctttagggatttctaaatttcataatcagattcttagttattcgaaaccctaatattcagatcagggtgaccggttagtgtttgcagaaaatgatcttgcttgaaaggtaggaagttccgaactgaatcgatctagtatacgaaatatctgatcaagatttgacctttccgtcagctaagtttcatgtctgatcttgacatccaaattcctactgcctttgatccgtttgctgatgcaaatgctgaggactctggtgctggtaccaaggagtacgtgtacattcgtatccaacaacggaatggtaggaaaagcttgactactgtccaagggttgaagaaagaatttagctataacaaaattctcaaggacctcaaggagttctgttgcaatggcactgttgtccaggaccctgagttagggcaggttattcaacttcaaggtgatcaaaggaagaacgtctncactttttcttgttcaggctggtattgtgaaggacaacatcaaaatccatggtttttaagttgcaggttcctagttttctgggaatctagcctctacgtttaatagctgaaaatcttacccactgatgaactngttttgctataagtatccccatgtt

SEQ ID NO: 191471 - DNA, 793 bp, Gossypium hirsutum
tcgtccacgcgttcgcatccatatccgaaaacctaaagattctctctcccaaaccaaaccttcaaatttcagcaagagagagagagagagagaacttacatagctcagacttcgatcatcaatttagggtttcttaattcgattccccgattacccgataccccaattttacagatcaggtctgagtgttctagttgttcggctgtttctatccgctaagtttcatgtctgatcttgacatccagattcctactgcctttgatccgtttgctgatgcaaatgctgaagacgctggtgctggtgccaaggaatacgttcacattcgtattcagcagcggaacggtaggaaaagcctgaccactgttcagggattgaagaaagaatttagctataacaaaattctcaaggacctgaagaaagaattttgttgcaatggcaccgttgtccaggacccagaattaggaaaggttattcaacttcaaggagatcagaggaagaacgtctccactttccttgttcaggctggtattgtgaagaaggatagcatcaaaatccacggtttttaagtctcggctacgagagtttccaggagacttaaaaggtctatcatcttctaagccggaagagctacccgatgaagtattagttatttaggtggtgtcatattatctataatgttagtctgatactctgatatattgcatcctatgtttcttgtgctgtcaactctttaagctatatgtgatgttgaatgacaatgataaccgttgcatattatacataaatagttgtc

SEQ ID NO: 191472 - DNA, 712 bp, Gossypium hirsutum
  unsure (1)..(712): unsure at all n locations
attattttttgataatccggagttcaatcatctaaaagaagccctaaaatccttgaatcaggtctgagcttgtgggtgggtaggcctctttgatcaaactaagtttcatgtctgatcttgacgttcaaattcctactgcctttgatccctttgctgatgcaaatgctgaggactcaggtgcgggtgcaaaggagtatgtgcatattcgtattcagcaaaggaatggtcgcaaaagcctgacaactgtccaggggttgaagaaagaattcagctataacaagatacttaaagacctgaagaaggagttttgctgcaatgggaccgtggtccaggaccctgaattaggacaggtgattcaacttcaaggtgaccagcgtaagaatgtatcaaccttccttgttcaggctggcatagtgaagaaggaaaacatcaaaatccacgggttctaagcctgcgcggtggaagcaggaaatactatctatctgattaggacatatctaagttggttggatgacaaagtatgcatgttgtgttacatgtgctttccagttcagtggatgattatgatatgtttggaagtttgtttggctatgttgattatattagacctttatatgtgttgaaatattctgtggtttggtgcttnnnnnnnnnnnnnnnnnnnnnnnnnnnnnnnnnnnnnnnnnnnnnnnnnnnnnnnnnnnnnnnnnnn

SEQ ID NO: 191473 - DNA, 608 bp, Gossypium hirsutum
aaaaaacctacaccgccatccctcgtaacgcacagcgactgttcccagactttatccgaggaatttcttttgtcatttcgttgataatccgaacttcagttctttaaaaaggctttggattcttggataaggcctctttgataaacaaagtttcatgtctgatctcgacgtccaggttcctactgcctttgatccctttgctgatgcaaatgctgaggactcgggtgctggtgcaaaggagtatgttcatatccgtgttcaacaaaggaacggtaggaaaagcctgacgactgtccaagggttgaagaaagaattcagttacaacaagatacttaaagacctcaagaaggagttttgctgcaatggcactgtggttcaggacccagaattagggcaggttattcaacttcaaggtgaccagcgtaagaatggctccaccttccttgttcaggctggcattgtgaagaaggaaaacatcaaaatccatggtttctaagttgcagcaagcttaaagttttctgctaatctgtgtgccttgtttcgaacctggatatactacccggtcaggatatactataataatatctatgccgttatatcatttcttt

SEQ ID NO: 191474 - DNA, 702 bp, Gossypium hirsutum
cggactcttgtttcgtcccacgctttcctatcacccactacccgactttcacagggcagatctgtttgttctagttgttcggctgtttctatcctctaagtttcatgtctgatcttgacatccagattcctactgcctttgatccgtttgctgatgcaaatgctgaagacgctggtgctggtgccaaggaatacgttcacattcgtattcagcagcggaacggtaggaaaagcctgaccactgttcatggattgaagaaagaatttagctataacaaaattctcaaggacctcaagaaagaattttgttgttatggcactgttggcccaggaccctgatttttgggcaggtttattcaaaacttctaggtgatcagaggaagaacgtctccacttttcttgttcaggttattgtcattatcatttggttttcttatatatattcttaaagctggtatatgcgtccgacataaatgtagatatgctgtgcgaatatgattctattgaacatacatgtgttgacactcgctctctggtctcggtcaggttgtacaagttcttaattttgtatgttctttatgaacaggctggtattgtgaaggacaacatcaaaatccatggtttttaagttgcaggttcctagttttctgggaatctagcctctacgtttaatagctgaaaatcttacccactgatgaacttg

SEQ ID NO: 191475 - DNA, 818 bp, Gossypium hirsutum
gtttgttaggcctctttgatcaaactaagtttcatgtctgatcttgacgttcaaattcctactgcctttggtatgatttgatcttaacttccaaatatttacctttgttcttgttaataacgtgtgtatttgttgtgttagatccctttgctgatgcatatgctgaggactcaggtgcgggtgcaaaggagtatgtgcatattcgtattcagcaaaggaatggtcgcaaaagcctgacaactgtccaggggttgaagaaagaattcagctataacaagatacttaaagacctgaagaaggagttttgctgcaatgggaccgtggtccaggaccctgaattaggacaggtgtgtcccgtaaccccttaccttacctgtatctgttattggaacccaattgtttagtctgttattttgcggtatgtggtcaggtgattcaacttcaaggtgaccagcgtaagaatgtatcaaccttccttgttcaggctggcatagtgaagaaggaaaacatcaaaatccacggtttctaagcctgcgcggtggaagcaggaaatactatctgattaggacatatcttatgttggttggatgacaaagtatgcatgttgtgttacatgtgctttccagttcagtggatgattatgatatgtttggaagtttgtttggctatgttgcttatgttagacctttatatgtgttgaaatattctgtggtttggtgcttattttggcaattagtatgggtgaagaaaaatgagatatagtaattagagatgtaattagccgagctggatctctacaatcacaaagctgatactgg

SEQ ID NO: 191476 - DNA, 443 bp, Gossypium hirsutum
tctcatttctccatatcgtagggagagacctcaatcaccgttccgtggagggggctttcttggcatgcctaaagaagctgagaaatacaaagctaatatgatggttaagtataccagaagcaataacaactcgcaggaattagtaccgtatcagagcagcagacaaggctcaggtcctctaagccctgcagttgagaaaactttgtatgtagatactgtgaatgaaatggcaagttcaaattccaattcctcggatacgaaagtccaaatggattccataggaaaacattcaaatacctcagaagtgaacaaagtgttggaagaacctgctaccatggaatctccccttcaagatacaaaaggccttagtctcttggatggaaaagccatattggaatacgaaaccgcagggtcagtcaaatccagtcgatcttctttcttcg

SEQ ID NO: 191477 - DNA, 453 bp, Gossypium hirsutum
gcgtctagaatagggatcccggctgagaatggacgagctaatcggttatttggtcctgtctcctgcagtcgcgaacctctcctcgattcgtcatgttaacctcgagaacaactcatttcgcggaacgttacctaccgagctctttggtgcaactaggctgaagagcttggtagtttcaggtaattccttatacggaccgcttccgtcccaagtcgggaaccttaagaacctacaaacctttgatgtttcacggaatttattcaatggctccgtaccttcgtccatagttcaatgcaagaaattaactacacttgttctcagtcaaaattatttcaacggctcactccccgagggatttggaaacagtttggttagcctacagaagctcaatctttcttacaacagattcgacggttcaatccctggtgacattggaaacttgtcgaatttgca

SEQ ID NO: 191478 - DNA, 740 bp, Gossypium hirsutum
  unsure (1)..(740): unsure at all n locations
tccacgcgtccgcctgtatccagccaacccgagattttctattttccgattctttttaggtctttttcccaatttttttgtatttctaaaacagaaacaaataggtgtctcaatggcagaagagagcggtgcccctgtaagttgtgctgatttgcccgttaaaaggcccagagaagacgaagaaaacggggtctcttctgctgctgctgttgttgccatggaaatggaagctgataccaataacacttccaaggaagttgatgggatttcctctgttattcctggatggttctctgagattagcccaatgtggcctggagaggcgcattccttaaaggttgaaaaggtcttgtttcaagggaagtctgattaccagaatgttatggtctttcagtcatccacatatgggaaggttcttgttttggatggtgtgattcagctcacagagagagatgaatgtgcatatcaagagatgatcactcatcttccactttgctccattccaaatcctaagaaggttttggtcattggtggtggtgatggtggagttctccgggaagtttctcgtcattcttcggttgagcagattgacatctgtgaaattgacaagatggtcgttgatgtttctaaacaatattttcctgatgtagctgttggttatgatgatccccgtgtgaaacttcatattggtgatggagtancatttttgaaggctgttccanaaggtacttatgatgcac

SEQ ID NO: 191479 - DNA, 411 bp, Gossypium hirsutum
gtgttgaaagcctgttttaatttttatacaagggagaaatggtgcgagtggggtaagcactgagcatctctttttgttctttgtggggataagggaaaatggtagtagtagtagaggatcaaaagcaagagacaaataaggtaaagaatagtagcacttgccttacctctctattttcaaatttcaaaagtttgtgcagcaaatgagaaggggatttgatagacaagcaccaaaaccaacaccatcacccattcaaaaattataatagcaacaataatttacatctccaaacaaattaaaggagggggcattagcaaaggaatagcatatatgtaagattgcaagtcaatgccagttataaagatcactagaacccttttagttatattcccaaagcaatgattaacttga

SEQ ID NO: 191480 - DNA, 500 bp, Gossypium hirsutum
ctcatatttatttgcctttggatatgatgatgattgtcaagtgtttttactggctttgctggtaacagttggttttcttgaattcgtatttatatgattatttaaatttctggctgaattagtttcacaagtgaatcgggaaaaattatggaaatatttttccttaattaaaataaattagtactgtctttcgctctgggcttctctcgctcgctctctgcattctttcaaagctcacatatcgtttatcttgaagctcaaatcattcctcgacccaagatggaagaaaacaaggaaggatccacaaaattggaagcccgggatgagactaggaagcgaccatccattttcatcattggatgtcccaacgtcggcaagcgcaccctgatctcccggcttgccactgtggagttcgaagaagaagaagaagaagatagctcccaagtggttgtccgtcgctggactatcaataccaaatactacactgctgatgtttctct

SEQ ID NO: 191481 - DNA, 610 bp, Gossypium hirsutum
gagagacagtcacattggatatatttatattatcctcacccactacaaaagaagaagagaaagaaaaagaaatgaagtctataatcgctactttgttgtttgtttccctagttttgtgttcatcatttattcaactctcctttgcctcacctgctgctgctccttcacctgctcctccaagttactgtgatgggaagtgcggagagaggtgtgccaaggctggaatgaaagatcggtgcttgaagtattgtgggatatgctgccaagaatgtaagtgtgttccttcagggacctatgggaacaagtcagaatgcccttgctatcgagacaagaagaactccaaacaccagcccaagtgcccttgaacttcaaactcttctccatcttttaaccttcatatatatatagatatatacgcatgtacgatttagctatttagcctccaactcttcatcgtcttaggcttcttcttattataattctcttgccattacactatcacttctgttctgtttatgatgtactgcttctgccacattttatctgccttctccgacctcataaggaaggaatattataggaataataaaatcattaatctactataatg

SEQ ID NO: 191482 - DNA, 525 bp, Gossypium hirsutum
tagaacctacttctttttttgtgttgttaggcttcaaattagttaggctaaaacttcgcacgctggcactgatggatcttagaaagcttcaaaaccatgctgcctttcatgttactggcccttagaaaaagggttttcacactacattgaccacaaataccatacattagaagtcttacatacagttctttctttattcttttgctaccaaaccttcctactcccttccttaatttccctgtatataattccctttgcgtctaaacaacctccaaagccatcaccacttccgacatgggacttacagagtattatgtcaacatttttggttctcttgtgctgcttgctttccttggattgatcctacgtttggatcatgagctggtggtgaagccaatgaagctccgagcaagattactcaagcaaggcatcaaaggaccgtctccgagtctgctaatcggaaacataagagagataaagaaggcacaatccagcattgttaaggtttctagcatgcacccccct

SEQ ID NO: 191483 - DNA, 433 bp, Gossypium hirsutum
acctcagtgcaatttctggtgatccaaagtatagcacagaagggatgaaggttttggcgcatttgaaaactcttcccaagacagaaggactagttcctatctacatcaggtatttttattctcttcaatcattccatcactcctaagttacggctactttaaacagctatatcctttgttatgtctttctaaggttttctagcctgtcgatttaggtcaatgaaaatttccgtttgcttgggtaaagtgatgtcagccatcaaacagagtagaaaataatgtcataactaggtttttcatctatatcattggagttttatttcatttattacctttctttggatggttaaaacatactggattgcttttgaccgttggctgtcacacacctttctttatttatttatttaatgtaccctccaattactatgcc

SEQ ID NO: 191484 - DNA, 1003 bp, Gossypium hirsutum
ctaatctctgccctttgcttcccaggtacttaggtaactaagtcaaattttcatgcgataatagattgtcactatcatccaaaattagttgattgattgatggggtccgaagggccagcagcagtaaccatccatgtgactggttttaagaaattccatggagtttcagagaatccaactgaaacaattgtcagtaatttaaaagagtatacagaaaagaaaggtttgccaaaaggtgttattcttggcagctgtagcgttcttgagactgcaggtcagggagcactccctcaactataccagacattgcaatctgccttaaccggcaaggattctgaatcttcttgttctgggagaattatttgggtacattttggagtcaatagtggtgcaagtagatttgctgttgagcgtcaagctgcgaatgaagctactttccgttgccctgatgagatgggatggaaacctcagaaagtacccattattcctgcagatggtggaatttcacgtgtaagagagacttctcttcctgttgaggagattacaaaggccttagcaaagaagggatttgaggtgatgacctccgatgatgcaggacggtttgtgtgcaattatgtttactatcactcccttcgctttgccgaacagaatgggatcaaatctctctttgtccatgtccctctcttcttgaccatagatgaggagacccaaatgaaatttgccgcttccttgttggtggtactcgcttctctatgtcagtaacatactgcatccactcatctttatgtccagaaattgatatggttgtacggttgtatgtgagtggtggatggaaggatgcatgtttgttgaaagtctttaataaaaggataagtgtatgtgaatgaataaaaactgtatttcagcacatacaccttatgtatttcttttatttctctaaaatgcttcctctgctgcttcggaaattcttgaatcttcttgtaatatgtcaataaatttcctg

SEQ ID NO: 191485 - DNA, 421 bp, Gossypium hirsutum
ccttcctttttcttccaatagactccattttgttaattgtgatgaaaagggtctgattgtggggtcttagtactttgtgcttgatgtttttggtcctttgtgtttggatttgcatgatggagtctattctagtgaagggtatggagattatagcagtgtaatatttggttacttatttggcttttggcaacctgtttagattttgccacaatgttggatggtctgttatttagggacatttgggaagctatttagttggaacttggttccattttgacattgatcacttccttttgtggtaatgaagagcatagattagaatttctgggattattgtgtgctaatatgtcgtcaggttattagtagtttaggcattgtataaaatcgatgaccgattttagaaatagcatcctacattcac

SEQ ID NO: 191486 - DNA, 662 bp, Gossypium hirsutum
  unsure (1)..(662): unsure at all n locations
ggtttgtattaggggattgaatgtaacaagggatataagaacaacccagaggctaataaatcggcttttcaatttggttggttccacactggggatgtcgggttttttgactccgatggatacttgcatcttgttggtcggatcaaggagctcatcaatcgtggaggtgagaaaatatcaccaattgaggtagacgcagtgttattggctcacccagctgtaacacaggcagttgccttcggtgttcccgatgagaaatatggcgaggagataaattgtgcggtgattttaaggggaggaagcttggatgaagcagaaatcacgaaatattgcaaaagaaatcttgcgagtttcaaagtacccaagaaagttttcatcacggattccgtgccgaaaacagctactggaaaaatccagaggaggatagtagcagagcatttcttggctcaaacgtctgccgctaaagtacccaaatttggagcttaaattcagcattgcttgtctattgcttaggtacatatttaagcgactgcaatttattgtttgtgtaaaaggggattactaaagcaccatgttacatgtaattctgattagaaattattggaaagtctacattcataaatattttgatcatccaatcatatcagcnnngggnnggnnng

SEQ ID NO: 191487 - DNA, 424 bp, Gossypium hirsutum
ggcaggtgagaaaatatcaccaattgaggtagacgcagtgttattggctcacccagctgtagcacaggcagttgccttcggtgttcccgatgagaaatatggcgaggaggtaagaaaatccaattcatggttttgattgtttttggttttgaatggctgtttggttgtgtaatttgtctaaaagtcggtgtcaaaaaattgcagataaattgtgcggtgattccaaggggaggagtaagcttggatgaagcagaaatcacgaaatattgcaaaaggaatcttgcgagtttcaaagtacccaagaaagttttcatcacggattccgtgccgaaaacagctactggaaaaatccagaggaggatagtagcagagcatttcttgactcaaatgtctgccgctaaagtacccaaatttggagcttaaa

SEQ ID NO: 191488 - DNA, 427 bp, Gossypium hirsutum
acgaccaacttcaacactgtttcatcatattgatagtttctctgcaaaggagaaagcatggtcaaggactcaaccttattgtgttacagaaaacaaaccctgtattgggtgggttcaaagatacttcagagactgtctttgtaatttaaaagatgaattttcttttgggtttgggattattagtttggtttgttggggtgttgcagagatccctcaaatcattactaatttcaaaaccaagtctgctcatggtgtttccctcctttttctcctcacttgggttgctggtgatgtgtttaatcttgttggttgtcttcttgaacctgcaacattgccgactcagttctacacagctctgctctatacaataagtactgtggttctagtgttgcaaagtgtatactatgattatatcaacaggtggtgg

SEQ ID NO: 191489 - DNA, 756 bp, Gossypium hirsutum
  unsure (1)..(756): unsure at all n locations
aaccatctaaaaaagcttccttcctttatttgtcctgcgaaaattttgttttgaccatctaacttgaatctcttttccatggctttcaatttgaaaaatccaagaaacattatcaacaaccttaaatcaaaggtcggattatggagtttaatgaagcagagtcatagtacttgttgttacagctcttgtctgaataccattcatcttcaccgtttcctcccattaactactctaccacaattcacaaacccagagtctatttcccataaaaaaggacattttccccattttcagcgttttcaatccaccacaactgagaaacagattgattctgtcccaaatgatgaacacaatcaggtattggattttccaggaggaaaagttgttttttctcctgagatgcggtttttatccgaatctcctagtgtgtattcccagtgctaccgagttcttgatgatgctggtcagctaattagtcacagcaactttgtaccggtcagtgaggaagttgctgttaaaatgtatagcaacatggtcacccttcaaactttggataccgtattctacgaagctcaaaggcaaggaagaatttccttctacgtgacctncatgggagaagaggctatcaacattgcatcggcagcagcacttacatcagatgacanttgtttccccagtacagggagccagnagtctattatggcggggttcacccttgcagaattgcanaccagtgttntgaaacaagctgttatg

SEQ ID NO: 191490 - DNA, 1860 bp, Gossypium hirsutum
cccactgcgttcgcccacgcgtccgggaaaaaccagaaaaatggcgaaaccccaacttttatttctattttccttttcccttctctgtctcatttctttttccgccgccgattcctccatcacagccgacttacgtctcgccggttccagtttcccgtcggttcatgcgaagaagctgattagggagttgaatttgtttcctaaaggggaagtcaatgtcgttgacgaacaccgggtttcgttgccggagggtcccaaactggtggagaagcggttcaagttcccaactttggaagtgcccggtggagtttcctttgaggatttgggtcaccatgctgggtattacaagcttcctaattctcatgatgccagaatgttctacttcttcttcgaatcacgcaatagcaaaaaggaccctgttgtaatctggttgactggagggccaggttgtagcagtgaattggctttgttttatgaaaatggccctttcaccattgctgataacatgtctctggtttggaatgaatatggttgggacaaggcttctaaccttctgtatgtggaccaacctattggtactggctttagttacagttcagaccaaagggacattcgtcataatgaagatgaggggagcattgacctatatgatttcttgcaggcattctttgcggagcaccctgagtttgcaaagaacgacttttttataactggagaatcatatgctgggcattacattccagcttttgctgctcgagtccaccgtggaaacaaagccaaggagggaattcatataaatcttaagggatttgctattggtaatggcctgactgaccctgcaatccagtataaagcttacacagattatgctttggacatgggggtaattaaaaagtctgactatgatcgtatcaacaagctggtcccagtttgtgaaatggcaataaagctttgcggcactgatggtacaatctcttgcatggcttcatattttgtctgcaataacatattcaatggcatcatggcacttgctggcgatacaaattactatgacgttagaaagaaatgtgaagggagcctttgctatgacttctcaaacatggagtcatttctgaacaagaaatctgttagggatgcccttggtgttgggaacatagatttcgtgtcctgcagccctactgtgtatcaggccatgctggttgactggatgaggaatctcgaagttggcattcctgttctcctcgaggacggaatcaagcttctcgtgtatgctggggaatatgatctcatctgcaactggcttggcaattcaagatgggttcatgcaatggaatggtctggtcagaaggagtttgtagcatctcctgaggttcctttcatagtagatggtgcagaagccggagtcttgaaaactcatggagctcttggtttccttaaggttcatgatgcgggtcatatggttcctatggaccagcccaaggcagcattggagatgctgaaaaggtggaccaagggtacactatctgacgccagtgattcagagaaactggttgccgagatgtgagttccattacttcagtgctagaatcaaatcttgttggcctttataatgggaataagcatagtgtaaaatatctggactttctgcgtagtttctttgagtacctgtaaatatttccatggggatgcaatagaatccttgtcttcatgttcatcatgttgttgttgtttttaccttgaaaagaacattacctactgatatgaatcaaagaacttttgttgataataaatttggatacaaattcggatttggatagcacaaagagtccgataaagaaagggggccgctcgcgatctaga

SEQ ID NO: 191491 - DNA, 699 bp, Gossypium hirsutum
aacatactaaactctcttattcgctttccttttccttcgctctctctttagatccgatcaaccgccatctcttaatacgacggtgggcatggctctatcgcggctcgcctcttattcttcaacttcacgctccgctcatcttctgaaacccccctgctctgccatctccctccgccgcccgatctccaccgataccactcccataactgcggagacctccgttcctttcacctctcaccagtacgacaccccctcacgctccgtccagaccaatgccaaggagctcctcacctttttccgagacatggcgctgatgcgtcggatggagatcgctgccgattcactctacaaggccaagcttatccgcggtttctgccatctatacgacgggcaagaagccgtcgccgttggcatggaagccgccattaccaaaaaggactgcatcataactgcctaccgcgaccactgcacgttcgtcagtcgcggtggaaccctgctggaagtttttgctgagctgatgggacgccaggctggttgctctaaaggcaaaggaggttcgatgcatttttacaagaaggattcgaatttttatggcggtcacgggattgttggagctcaggttccttagagtgcttgcgttgcccaagtatctagacaacggcactttgttatgtgagggctctaacaggattttgagct

SEQ ID NO: 191492 - DNA, 1352 bp, Gossypium hirsutum
  unsure (1)..(1352): unsure at all n locations
aatccgacggtcgagatggctctatcacacctcgccgcttctgcttctcgctgctctagtcttcttaaacccctctcgtcggctctttccctccgacgcccgatctccggcgataactctcccttgaccgtcgagacctctgtccctttcacctctcaccagtgcgaagctccctcacgttccgtcgagaccaatccgaaggagctccttacctttttccgagacatggcgctgatgcgtcggatggagatcgctgccgattcactctacaaggctaagcttatccgtggtttctgtcatctatacgacgggcaagaagccgtcgccgtcggcatggaagctgccataactaaaaaggactgtatcataaccgcctatcgtgaccactgcacgttcgtcgctcgcggtgggaccctgctggaagttttcgccgagctgatgggacgccaggctggatgttctangggcaaaggaggttcgatgcatttttacaagaaggattcaaatttctatggcggtcacgggattgtcggagcccaggttcctttaggatgtggcttggcgtttgcccaaaagtattctaaagacgaagcggtcacctttgctttatatggtgatggggctgctaatcaagggcagttgtttgaggcgttgaacatctctgcactttgggatctgcctgcaattttggtctgcgagaataatcattatggtatggggacggctgagtggagagccgcaaagagtcctgcttactacaaacgtggggattatgctcctggtttgaaggtggatggaatggatgcttttgctgtgaagcaagcttgcacgtttgccaaagaacatgctttgaagaatggaccaattattcttgaaatggacacttataggtatcatggtcattccatgtctgatcctggaagcacctatcgaacccgtgatgagattagtggtgttagacaggagcgtgatccaattgaaagaatcaggaagctgatattgtctcatgatctagctactgaaaaagagttgaaggatgttgaaaaggaagtgagaaaagaagtagatgatgcaattgctcaagctaaggaaagtccaatgcctgaaccttctgaactcttcacaaacgtgtatgcgaaaggtttgggtgttgagtcatttggagcagataggaaagaagtaagagctacacttccatagtttgagacttctctggagtgagttcattaatttttaactcgttgcccaccaatcaatcttgcaagactgaaaagaaataaagcagctagggaaggtgatctgatttcccggctatcaatttgattttgcacttctatttgtatttgtataga

SEQ ID NO: 191493 - DNA, 665 bp, Gossypium hirsutum
ccctctcgtccgatcgaacccgtgatgagattactggtgttagacaggagcgtgatccggttgaaagaattaggaagctgatattgtctcatgacctagctactgagaaagagttgaaggacattgagaaggaaataagaaaagaggtagatgacgcaattgctcaagctaaggaaaatccactgcctgaatcttctgagctcttcacaaatgtgtacgcaaaaggtttgggtgttgagtcatttggagcagataggaaagaagtaagagctatacttccataaattgggactttgttggaacgtcttcattcttttctttagttttaccaccctcaaccttggaagaaagaagaataaagaaccaaaagagggtaaccagctcttccaagttacaaatatgacttagcatttgtatttgtacggaatacttattattttccctaaaaattacgggcagaattgctccatttaaattgtgggttaacccgcccatggttttacactcctatgattaaattgttgtggtgtgtggctcacagcaatccctggatattcatcgcttgagatgccgaggacctttaatggtccttaccgaggattcatatacacttcgttccaagaaagggcaacttgtattttccatgggaatacaggcaggctggc

SEQ ID NO: 191494 - DNA, 451 bp, Gossypium hirsutum
ttgattttgctcttgttggggccttcaagagggagagggataaagaagccgctttacaggcactgactgctgaaaaccaggcagctatgcagttgatggtatggggacggctgagtggagagccgcaaagagtcctgcttactacaaacgtggggattatgctcctggtttgaatgatacacaggagttgtaactggaattagtgagatggatcctgttagatggtctggttcaaaatggagatgcttgctggtatggttgcagacattgcttatacatttccaaaatatgttcaacatctgagtggactgaaatttgctcttctgtttctcttgtacttttttacatcatggtatgtactagttttattactataggtctgattttgtttaaagattttagttgaattgagcttttttctgttaaaataattaatcgaatcgaaccaact

SEQ ID NO: 191495 - DNA, 952 bp, Gossypium hirsutum
  unsure (1)..(952): unsure at all n locations
cggacgcgtgggaaaacattcacatttctttgattcgggctgccagaaggatttcctctctcttatcttcttctgcaacttctttgggaaggttttcaagttggggaagaagaattaatagctttagtactgctgctgctgcgattgatgaacctatacatccatctattcaagtagatcatactcagcttctcatcaatggacaatttattgatgctgcatcaggaagaaccttccctacagttgatcctaggacaggagatgtaattgctcgagttgcagaaggagatctcgaagatgtaaatcgtgcggttgctgcagctcgtaaagctttcgacgaaggaccatggcctaagatgactgcttatgaaaggtcgcgtataatgttgcgtttcgccgatttgctcgagaagcacactgaagaggtagcgaaacttgaaacttgggacaatgggaagccttatgagcgggctgctgagattgagataccgatggttgtgcgaatgttccgatattatgccgggtgggcggacaagattcatggattcacagttccagctgatggacaacatcatgttcaaacactgcatgaaccgtatggtgtattgtgggctgatcattccatggaattttcctcttttattgtattcctggaaagttggtccggcattacgttgcggacccangntggtctgaagacagcagagcaaccnccggtgtcggctatctatgtttccaagcttttatgaggctggacttctccgggtgtctaaatgtggtcttgaaattgggcctacanctggtgcagcattttcaagtccatgaatgtcaacaaagtatcattacaagttccactgctacngcaagatgtactcgactcctgcaaaagcaacttaaaccgtacattggaactcgagaaatttcgtcatgtggcaaaatctgcgtgacagct

SEQ ID NO: 191496 - DNA, 2017 bp, Gossypium hirsutum
aaaatgggcaatcctcgaagagatgaaaagccaactgcttatgcccgggaagcaagggagtttttgagaacacgccttgttggaaaacaggtgactgtacaaatggaatattccaggaaagtccccatggcagatggagctcctgctgcatctgcagattcaagggtaatggattttggctcagtcttcctcctgtctcccatcaagggtgatggtgatgaggtttctgcagcaaacgcatctgcagctggcagccagcagcctggcttgaatgtggccgagttggtggttggacgtggctttggctctgtgataagacatagggattttgaggaaagatcaaactattatgatgcccttctggctgctgaattacgtgcgatttctgggaagaaaggaatccattctgcgaaggatcctccagtcatgcacattcaagaccttacaatggcatcagccaagaaagctagggatttcctgcctttcctgcttcgcggcaggattccagctattgtggaatatgtcctaagtggtcatcgtttcaagttgttgatcccaaaggaaacttgtagcattgccttttcattttctggtgtcagatgtcctggtcgcgaggagccctactcagatgaagccatagctctgatgagacgaaagatcatgcagagagatgtggcggttgaagtggaaactgtcgatagaactggaacatttttgggatctttgtgggagtcaaaaaccaatgtggctgtgacgcttcttgaggctggcctggctaagctacaaacttcatttggtagtgataggattcctgatgctcatcttcttgaacaggctgagctatctgccaagaggaagaagctgaaaatttgggagaactatgttgaaggagaggaagtttccaatggacctgccactgttgaaaacaagcaaaaagaactgctacaggtggtggttacagaaatattgggtggcggaaaattttatgtccagacggtgggagatcagagagtatcagctatccaaaaacagcttgcatctttaactatccaagaagctcctgtgattggtgcctttaaccctaagaagggtgacatcgtccttgctcagtttagtatggataattcctggaatcgtgcaatgattgtcaatgcacctcgaggaggagttcaatctcctactgacaactttgaagtgttttatattgattatgggaatcaagaggaggttccatacagtcaattacgacctcttgatccttcattatcagcgtctcctgggcttgctcagctatgtagtcttgcattccttaaagttccgagcctggatgatgaatttggtaccgaagctgctcagtttttgagtgagcagacaatgggaagctcactgcagtttactgctatgatagaggaaagggatgtttctggcggaaaagtcaagggaaaaggaactggcaccgttctcattgtaactctcgttgctgagaagtcagaccttagcattaatgctgcaatgctccaggagggactagctaggttggagaaaaggaagagatgggaatccaaggatagaaaatcggtgattgacaacttagagaactttcagaaggaggcaaaaactggtaggcgtggaaatttggccatatgggagatgtggattcggatgatgatgaggatcttcctacacttgcagcagctgctgctaagaagacgggggctggtcgccgatagatttattaatattaatcacttgaaggtaaactccttcactttgggagttatgattaccccaaatgagtacttttagtagttatataggtagttaaaagagcacctagaagagattctcagcctaaacttgcttaaattttgactgcttttcttttttctttttctttatttaatcctttatttttggtagcgcggctgacctttgttttgaacattgtttaaataaggctgaactgtagcacttctcttttgtttccatgcgaggacgttatagacattttcttttc

SEQ ID NO: 191497 - DNA, 479 bp, Gossypium hirsutum
tttgctttaattagttgctataaattctcatgtgaaatcctctctcaattcttcttcttcttcttctgctgcgctgctaaatcatagtcattatccgcatattatgttagcccttcaaagctccgtcaacaatggcgaaaacgacccaaaccacgaccaacatcacgatcacgacgatcaagacggtgaacgtatcagagacatccatgctttaaccccaccacaccctcccgccgtcaacgcccgtcgtcgttgggaaaccggaagcagccgtgcatcgtcatcgagcgaagtagctccgagtgaaaacttcaccaccatgagccgagaattcaatgctctggtcctcgccggatcttccatagaaaacaacgattccgagttccgtacatactttgaataacaatcagctgcgaggatcggggaagatcatgaactgcaagaggaaactaaccctttagctatagtacccgataatg

SEQ ID NO: 191498 - DNA, 1000 bp, Gossypium hirsutum
acgcatgggcttatatttcagtttgctttgctttgctgcatctcattctcacttcaccttttttttttattgtctggatcatcggaaagaaattaaagaaccaatcatgaagcttgacaccagcggactagaatcggctgctcctgtctggggtgctcccagtgaacttgttgacgggttttcggctgctccgtcgttcgatctcccaaacactactgattttgatgggtttcaaaaagaagctatccagatggtaaaacctgctaagggtaccaccacgctagctttcatctttaaggaaggggtcatggttgccgctgattctagagctagcatgggaggctatatctcttcacaatcagtgaagaaaattattgaaatcaatccttacatgcttggaacaatggctggaggagctgctgactgccagttttggcacagaaatttaggcatcaagtgccggctgcatgaattagcaaacaagcgtagaatttcagttacaggggcatcaaaactgttggcaaacattctctattcttaccgaggaatgggactttcggttggaaccatgattgctggatgggatgaaacgggccctggactatactatgtggacagtgaagggggaaggttaaaaggaatgcgtttctctgttggatctggttcaccatatgcttatggtgtgctggataatggctatcggtatgatatgtctgttgaagaggctgcagagttggccagaagagctatttatcatgccacattccgagatggagccagtggtggtgttgccagcgtttactacgtgggaccaaatgggtggaagaagctatctggtgatgatgttggagaacttcactataaatactatccagtgatgccaagcacagtggaacaggaaatggttgaaggaggtggggcataaatgggatctactcaacctaggccaagttgataagatggattaaatgggatttattcttatttacaatgaatactt

SEQ ID NO: 191499 - DNA, 414 bp, Gossypium hirsutum
acggcattgagcgtttcttatggaatgtcgtggggccctgggtagcattgttgaactcaaggaaattcttgttcattctactaattggttagctacaaaagctctaaaagatgggaaaaagcatactgcttttggaaagacttgcatggcatttagtggaatcacaattccttctattcccggtcacattaagccattaaatctttatcttggaaccgctgagggtgcacttgttagggggtttagttcctcatcctgatggactggtagattcagcaatcaactgtttacagagttctgattggatggaaggctctcggacacttgattctgatgggatgctttcctccattcgaaaattatgcagcctcttgattatggttccaggtaatcctgaagtaggaattttgcata

SEQ ID NO: 191500 - DNA, 1786 bp, Gossypium hirsutum
gagagggattttatggctcagatttcaccgaagctgctgagcccggtttcgttgcaagtgtcgagagatgacatcacgggccaactgggtttgatttgggagctaatcaaaacgccattgatagttcccttgctgcaactgggcgtctacatttgcttagccatgtccctcatgctcttcatggagcgggtctacatgggcatagtcattatcctggttaagcttttctggaaaaaaccagagaagcgttacaaatttgagctcattcaagatgatgtggaactcggtagctctaatttccccgtcgttttaatccaaatcccaatgttcaatgaaaaagaagtttacaagatctccattggagcagcttgtggactttcatggccgtcggatcgtctcgtgatccaagtacttgatgattcaactgaccctgcaatcaagttgatggttgagcaagagtgccaaagatgggcgagcaaaggcatcaacataacgtaccaaatcagggaaaatagaacgggttacaaggccggagctttgaaagaagggttaaaacgaagctacgttaaacactgcgaatacgtggccattttcgatgctgatttcaggcctgaacccgatttccttagacgcagcatcccctttctggtcaacaaccctgacattgctctggttcaagcccggtggagattcgtgaatgccgacgaatgtttgttaacaagaatgcaagagatgtcattggattaccatttcacagtggaacaggaagttggatcagcaacacatgctttctttggttttaatgggacggctggtatatggagaattgcggccattaatgaggcaggtgggtggaaggatcggaccaccgtggaggacatggacctggcggtccgagcgagtctccggggatggaaattcctttacctgggtgaccttcaggtgaaaagtgaacttcctagtactttcaaggcatttcgattccagcaacatcgatggtcttgtggccctgctaatctcttcaggaaaatggtgtgggaaatcattcaaaacaagaaagtgaaattctggaagaaagtatacgtaatttacagcttcttcttcgtccggaagatcattgctcatatggtcaccttttgcttttactgcgttgttcttccgctcacgattttgatccccgaagtttgggttcctatttggggagccgtctatattccgtcagtcattaccattctaaactctgtaggaactccaagatcaatccacctattgttttactggatcctgttcgagaacgtgatgtcgttgcaccggacaaaggcgacgtttatcggtctcctagaggcagggagagccaatgaatgggtcgtgaccgagaaactcggtgatgctgtcaagaaagcagccgatgctgctaagaacaagaacaatgccaaagcaccaaggaagttgaaattcaaattcactgataggctgaatacgttggagctcggattcgcagcattccttttcctatgcggatgctacgatttcgtccacgggaagaataactacttcgtatacctcttcctgcaaaccattaccttctttatcacaggaattggatatgttggcaccatcatttaagtaagcaaagtgtatcaacttgtctgctgctgctatcgtttgactgcaaatatcagtcccatcacttatttttagttaaacagaaatagttccttcaatatattcagtacccaaaaaaaaaaaaaaaaaattctgccggcgccacccgccgtggagctct

SEQ ID NO: 191501 - DNA, 422 bp, Gossypium hirsutum
cagctttagcattagacaagttgttttacttttagcttttatcttgaaggctgggacacgaaacttgttgattccactttgcaaagaagcgaaaatgccaggagctagaagcataggggtggctatggatttctccgctagcagcaagaacgctcttaaatgggctatagacaacttggctgacaaaggggatgccctttacatcatccacatcaacaacaactctcttgatgagtctcgcaatgctctctgggcaaaatccggttctcctcttatacctttgacagagtttagagttccggagattatgaagaagtatgatgttgaaactgatattgaagttcttgacatgctcgacactgcttctagacaaaaagagataaacgttgtttcaaaaatctactggggaggagatgccagag

SEQ ID NO: 191502 - DNA, 616 bp, Gossypium hirsutum
gaaagttagggtttttggattctcctatttattttatccacctctgtggttttgagcttcatttctttttcctttatttgtcggtgaaattccaagcaaaatatcatgggcaagggtcctggtctctacactgaaatcggaaagaaagctagagatcttctttacaaggattatcagactgaccaaaagttcactttgaccactagctctcccactggtgtttcaattacctctgccggaacgaagaaaggtgatcttttcttggctgatgttaatacccagctgaagtctaggaatgttacaactgatatcaaagtggacaccagctccaatctatttaccaccataacagttgatgaacctgcacccgggctaaaggcaatctttggcttcagagtccctgatcagaggtctggcaagattgaactccagtatttgcatgagtatgctgggattagctcaagcattggattgactgccaacccgattgttaacttctcgggtgtgcttggaacaaatgttcttgcactaggtaccgatatctcattcgacacaaaaactgggaatttcaccaaatgcaacgcgggattcagcttcaccaatgcagacctcattg

SEQ ID NO: 191503 - DNA, 486 bp, Gossypium hirsutum
aaaaatattttcgctagattctttaatccattaagatatcatgggcaaaggtccaggtctgtacactgaaatcggcaagaaagccagagaccttctttacaaggatttctaagacaaatggctttatatctccaatgtggggaggtgttattgtttggaatccccttggctgtttaaaggattcagaattcaagcccagtgccaagaacataattcccatacaggaccttgagaatatgtttgaagtattcattgggcaattccggcaactatttggtttcaaatctttgaatgtttacacgaatgcatcaggcgattggaaccttctgcctagtgaaagaggttttaccgagtgggaattggacgtcttgtcatggcaacacacgtgttttaatcttcattcatgtgctacgacacttggatctcttttaagattggttcaatcactgccaaggatgattatcaaggatgagataggaaaacagg

SEQ ID NO: 191504 - DNA, 411 bp, Gossypium hirsutum
cggacgcgtggggcacctctgagatttatagctttcaatgttcttttccccattgaaaaaatattttcgctagattctttaatccattaagatatcatgggcaaaggtccaggtctctacactgaaatcggcaagaaagccagagaccttctttacaaggattatcagactgaccacaagttcactctcaccaccagctctccaactggagttgctattacctctgccggaacaaagaaaggcgaactctttttggctgatgttaacacccagctgaagaataagaatgtcacaactgatattaaagtggatacctactccaatctgtataccaccataaccgttgatcaacctgcacccgggctgaaagcaatctttagcttcagagtccctgatcagaggtctggcaag

SEQ ID NO: 191505 - DNA, 817 bp, Gossypium hirsutum
  unsure (1)..(817): unsure at all n locations
agcacatgaagcttatgttatataaagattcacatgtgttaaggtgtcttacttggaacaacactaatagccgaaatggatggaccgtaataaccttgtattggtgtgcagcaagtccccttaccagcccaaaacaggtgaatttcaagatggttctcagttacattagcagtgaaattcttaattattgctctctcaacaccacctgctgccttcgatatatcaaaatccctcaatcgccgagttccctgataaagcattatagcaataaaagatttctaaagtgcgaaacatgagaattacatcattatgatcatgaaagcattgcaaagagggggtatgaaatgaatgatatacagcttagaatgatatgaatttctacattaaaaaaatattacctgaatataaacatcaaaaactcgccnttgctagaactcttccaagactgtgtggttcggcctgggaaacctgtttccgcaaagaacaatcttacagtatagggtccattctgaaggcctaggccatagtatctgagtgatccaggggatagccttgaagtctgatacagctccggagtgttggtacttttcacttgtgctaaagtgttctgcacaaactgtggatcctgtctatctgcaaacaagcctgcattgctgactgcccatttctgtgtgctggttacattaaatgttgctgcgccgagtgtgcgattctcagcctcaaatatattcagtagatgtcatctgtggtccaccacacttgacgcggagtttgcatctaccatggcgacccgaaattgttagcaattattagctta

SEQ ID NO: 191506 - DNA, 618 bp, Gossypium hirsutum
cccacgcgtccgcccacgcgtcctgcttccattcacgtcatcgattgcttcccttcacgctgctttcttcatcgtctccatcaattgcttgcttcacttttcacttagtggctcgctattttttttttcaaagcattgcaccatattcttaagttgcttcatccgcaacttaggttgtaaccgtgaagttctggtggttgcttgctttaccttaccttaaaaatgtcatcattaaagaatgctatcagcagacgtgctcacaaggaacgtgctcaaccttcatcgaggaaaaaatttgggcttcttgagaaacacaaggattatgtcgtccgtgctaaagcattccacaagaaagaagaaatgttacggaaactcaaggagaaagctgcattcagaaacccagatgaattttactttcagatgataaaaacgagaactgtggatggagttcataaacctgagagtcaggctaacaaatacactcaagaagaactcatgctaatgaaaactcaagacataggatatatactacagaaattgcaaagtgaaaggaagaaaattgagaagctaactgcagtgttgcattctgttgataatcatccatctaacagacacatt

SEQ ID NO: 191507 - DNA, 606 bp, Gossypium hirsutum
ccaatacacagatacacttgcttctcactttagaacggtgtatggccgattcaacaccgcttctgtctcactgtgataaaccggcagaaccaaaacggccgcctcgatccctcgatgagaccatcgagggctgtatcggagacttcgggtggtggcaattcttgcaagcaatactcgtctctcttgcttgggtctttgatgctcagcaaaccttcatcagtgtattcactgatgctgagccatcctggcactgcacccaaggcggagacgagtctgtttgtaactctttgtccaacatttgcgagctccccaagaattcatggtcttgggattggccttcccacacatcaatcatagcggaatggggcctggaatgtgcgccttctttcttcactggcctctctctgttgcgatttctacatgggttgctattgctggggacttggcattttctaagattagttgattaaacttttggaccttaaatcaagcctctttaatttaagtctcatgaggtattttacttatattttcacgtttttcactcaattttaggaatattagtcctagaaaatattattggtatgcacttgattgtatgtaaat

SEQ ID NO: 191508 - DNA, 999 bp, Gossypium hirsutum
gtcctcaacatgtcaaccctcgcttggtcagttgtggcgtcagttgaaggacgtgttcctcttgctagtgagggcttgagtctggtcgtgggctccttcaatggtgaagatatgcttatatcttttggaggatataatgggcattataacaatgaggttaatgttcttaagccaagtcacaaatcaaccttgcaatcgaagatgatggaggctcgtgttcctgatagtgtttctgccatccataacgttacaaatcctaccagagatttggagtctgagtttgaaagttaaccacgaaggaaagatacgagaaattgttatggataatattgacacagggcatcagaaatttgaaggggaggagactaccgagcgcataatagcaactctcaaagtggagaacgaagaactagaatcgtcactcaacaaggagaagtttcagtctctccagcttaagcaagaacttgctgaagctaaggcgcaaaactcagatttgcacaaggagctccaaactatacgcagtcaacttgctgccgagcagtttagatgttttaaattagaggttgatgttgcggaacaaagacagaaacttcagacgatggaaacgctacaaaaggagcttgaactcctgcaacggcaaaaagctgcatctcaacaagctgccttgaacgcaaagcagaggtcatggctcacgtggtgtatgccgttggcgtgcgggttgccctcctcaaaacgctgacaatatctaaaattcatggaaagcttagctaaatagtgattttctagacttattcaaattaattgaaattttggttgaaatatatactcttttttctttttcgattacttaacccggtagttctttccatgagaagaattaaattatctagttagcctaaatgaacctttccatagattatagcttcagcttatgaagttagaaatgtctggtaatgaaatatctatctttttgccaaagaaatgctactttagtgaaaa

SEQ ID NO: 191509 - DNA, 434 bp, Gossypium hirsutum
ttcaacttctcgagcaccatatctacccttttataaattaaaacaattctaattgaatatcccctctccatcgtcatattcccatttctctctcccaaaattctctctctttgactctttaatatgaggtgttgaccttccacaggatttctgtaaggattatatagcgttttgcccgacccggaaaatgcccatggaccgaaccctacaatcggagagcatgagatcgccgactgtactctcaatcgaatgtctaaaagggagctcaaaagctgacgaatggaccgcagacatgctccagactggcgatattgttgaagagattcgtattggatccggttcaggacttgcccataaggcaccttttaaaggcggcaggagcggagttcagagggttcttcatagctcctataagaacaaagagacctcaattc

SEQ ID NO: 191510 - DNA, 629 bp, Gossypium hirsutum
  unsure (1)..(629): unsure at all n locations
cccacgcgtccggaaaaaatgatgaggtttcagtttaagcctgttagaagacaagaagccattggtgggttgtttgtgttgcttttcccagttcttttgccttgtttttttgcttcattcagccatgcttccccttcaacattcttggagtggagtgttccgaaacctcgacatttacggttactcgcgagtgccttacaacgtgaaagttctgatggagaaccgactgatctttgggctcctttggctgaccaagggtggagaccatgtcttgggggatcctgtaaccgccccaccgttgccccagaaatctgaaggatatcttcacgtctttcttgatggagggcttaaccagcaaagaatggggatatgtgatgcagttgccgttgctaaaatattgaatgcaacacttgtgatcccgtatctcgaagtaaatccggtttggcaagattcaagctcattcatggatatatttgatgtggatcactctattaatgtaatgaaggcatgaccatcctntntcgtcaaagaactacctgatgatttctcttgtagcacaagagagtattatgccaccgctattcgaccaacccgaattaaacgagcacctgttcatgcatctgcaaact

SEQ ID NO: 191511 - DNA, 656 bp, Gossypium hirsutum
ggaagaatacgcctttagctgatgcagaaggagctaagaagcataatatgattgagttattgaaatcacatggaggattatcttatggccaaaatggaagccattttgaatcaaagcctgttccaccccctctaccaaacaagtgtgactgggaaattgacccttctgagctggacttctcaaattccaatatcatagggaagggttcatttggtgaaattttaaaagccagttggcgaggaacacctgttgctgtcaaacgcattcttccatcactttcagatgacagattagtgattcaggatttccggcatgaagtgaagttgcttgtaaagctccgccatcctaatattgttcaatttctcggagctgtcactgacaggaagcctcttatgttaattactgagtatttaagggggggtgatcttcatcagcatctcaaggaaaagggtgcacttcatccatcaactgccatcaactttgctttggacatcgctaggggtatggcttatcttcacactgagccaaatgtgattattcatcgggacctaaaaccgaggaatgtgcttttggtcaactctagtgcagaccatttgaaagtcggagactttggactgagcaagctcatcaaagttcaaaattctcatgatgtctac

SEQ ID NO: 191512 - DNA, 426 bp, Gossypium hirsutum
cttggaaattgggatctgggagagtgccgttcggttgtgttatgtgtgaggctgtgatagaatggaacatctgattgtgttgatggcaaatttgggataggtagctttgacatattgtaatggcgatccagtagtttagatttttgtctcaccgtaatttagttataaatcttcttccaacttaaaagctgaataacttcacgttcaaagccaagaagcaatcttttgttgtgaacctcttgattaagtagaaatttcgatgcagagtgatcaacagttttactccccaaaagcagtgcccagacttgcagatcacgtggatgataattacattcacatgccggttccttctgcttttggtacagtttttcctccatgtgctaagccattgccacccctccatggcattgagtttcaaccctcaga

SEQ ID NO: 191513 - DNA, 601 bp, Gossypium hirsutum
ctccaaaccgcaagtctactcgctctcgttctttggctactgaggatctgagaagcttcatcgccaaattttacagagttcattgaaacaaattagctagtttcatgggtttgtcgtctattggcactgctactgaaggcatgcaactctgcatatttgatttgagaagaggccaacatgaagggcaagaacttgataaaattttgtacttctttcctactgatttgcccttttcgactcaactctctgtggttgggctcagcgaagggcttattacattcacgcgaattttctctccggaggctgcttgcgacgttatagaggcagagaggcactctcatgtcttttacgaggcagagccagatatgtggatgggtatgatagtggagaaaagtaaggagccggaagccatatggcggattgatgcattaagataggttctcaaggaaattcactctcttttcatgatgtttcatggatctattagagctttgcttgacaaagaacctggcggaggactaactcgtgctcatttataccctttcatcatggattatctaagagattttctggttgggaagaaactcctgttgccatcatt

SEQ ID NO: 191514 - DNA, 769 bp, Gossypium hirsutum
  unsure (1)..(769): unsure at all n locations
aaatgaaagacacgcttaattagaaattttctctcctatttcttcgttcccttaattaaacacaaattcccattttttcccgctgaagaaattatgagtgatcacctggttttgggtgtcgaccgtctgatgaagccggaggagtcggatgctggtccctcaacggaggttccggggtcgtcgtgcttgttggagtctaaggagaagggggttgtcaacggagaggaggaggaggagccgctgattcagtcggcggagtgccgcatttgccaggatgaagattccattaagaatcttgagactccatgtgcctgcagtggcagcctcaagtatgcacatagaaaatgcgtgcagcattggtgcaacgagaaaggcaatataaagtgcgagatatgtcatcagccttatgaaccaggttacactgctctacctcgcacccaaactgaagaaacctctatcgatattggtggagtctggacaatctctggcaccccactggacttgcgtgatccgcgcctcttagccattgcagaggcagaacggcagtttttggaaaccgaatatgatgaatatgctgcatcaaatgccagtggagctgctttttgccgttcagctgcactaattttaatgggacttctgctattgcgccatgcattgaatgttcccgatcccgactcagacgaagatttgtctactttcttctctcttttctttattcgtgctgctgtatttctcttgccatgctacatcatggcctgtgccatcnatg

SEQ ID NO: 191515 - DNA, 551 bp, Gossypium hirsutum
gtcggcatggcatttgatacctctcagcattcaaactctcttcaaggcaacctcgatcttacacagtctgctttaggccaacaaggattttcttcaggccaaatgaatggacacaacaggagtgcagctgttgcaagcaaggcaatgttctcaacaggcgatgttaaggagctcggaagtgcacaaaatgttaaccaacatctcagcaaccttcttgttgacaatacaataagggtcaagtccgagagagtttgcgataccagccctgccaatatattccccgatcacttcggacaagatgatctcatgagtgctcttctcaaacagcaagaaagtgttgcatcatctgaaaacgagtttgacttcgacgggtattctatgaataatattccagtgtagggtgttattccatactccagctcacgtcgtgattgcagtttccgatgtacatatccattgtaacggaaaagttatcacttcagcaatcaagttagtgggaactcaagtttggttaagaaactgcgttttgcttagttggaagaaggtgtctt

SEQ ID NO: 191516 - DNA, 681 bp, Gossypium hirsutum
  unsure (1)..(681): unsure at all n locations
aaaataattggtctgcactcacaangtcatggatgtgttaagctctaatagcatggagctatcacaatcattatcattaggaaccagccgaggtagttcatggtttccgttgtcactgtgtatgagcacttggcatgcttgatgacacattcctcgcaccagaaagtgaagagtgtgtcaggaaggtgaatcaggttgctgacaaatattgggatctctattcaagtgagtcacttgagcgagacttgcctggacacctactccgctaccccatcggtgtttctagtgatggatctgtcactgaattgcctggcatcgagttcttccctgacacaaaggctcgtgttcttggtgccaaatctgattatctgccacctatcctcactacttaggggatctttactttgttcttaagcaataataacttgtctagtttggtgttactggctttggtagtaacaataaaacttgtttttgtgcttgtgtcatagtctgcagagctgcagtgttgtgttggtattgcttttccgtcagctgtgataccgtgttgtgattttagtgctgactggtataataaaacttgtagcctccgggtatatgttctgccgttattgttaattatttgttagttgttaccacattgcggaagcaaaaaaaaaaaaaaaaaactcaagactagtt

SEQ ID NO: 191517 - DNA, 1878 bp, Gossypium hirsutum
cccacgcgtccgggcttcaatattttgatgtgacaaaggaccgcaactgggcctgtggtatcgtaagtcgtaagtttcctggagttccctatacgttttatccgcagagaaaagggtgtaaagtttctctgtaccaggatgcccatatcccagacggatttgtgcctaaaattcctcttgccggaggcaagaattatgagccacatagatgctgggaagatatttttgatgctatcaccaacgctaaacacatgatctacattactggttggtctgtttatactgagatcgctttggtgagagactcaagaaggccaaagcctgggggtgacatcactattggtgaattgctgaaaaagaaagcaagtgaaggtgtcagggttaatatgcttgtttgggatgatagaacttctgttggattgctgaagaaggatgggttaatggccacccatgatgaggaaactgaacaattcttcaaggatactgatgtcaactgtgtcttatgccctcgtaatccagatgatggtggaagttttgtgcaggaattacaaatatctacaatgttcactcatcaccagaagattgttgtagtggatgctgcaatgcctaatggagatccagagaaaaggagaattgtgagctttgttggaggtattgatctttgtgatgggagatatgacacacctttccattccctgttcaggaccttggacaccgctcaccatgatgatttccatcagccaaacttcactgatgcttcaatcaccaaaggtggaccaagggaaccttggcacgatatccactcccgacttgaagggccaattgcctgggatgtcttgttcaattttgagcaaagatggagaagacaaggcggtaaagatgtgcttcttcagctgagggaacttgaagatgttatcattcccccatctccagttgcatttcctgatgaccatgaaacttggaatgtacagttatttagatcaattgatggtggggctgcttttggtttccctgagacacctgaagatgctgccagggctgggcttgtgagtggaaaggacaatatcattgaccgaagtattcaggatgcctatattaatgctatacgacgagcaaagaattttatctatattgaaaatcagtatttcctcggaagctcatttggctggagtcctgatgacatcaagcctgaggatattaatgctttgcatctgattcccaaagaactttcacttaaaattgttagcaagatcgaggcaggagaacggtttacagtttatgttgttgtccctatgtggccagaaggaatcccagagagtgcctcagttcaggcaatattagattggcagagaaggacgatggacatgatgtataaggatgtcattcaggctctcagagccaagggtagcgacgagaatcccagaaactatttaacatttttctgccttgggaaccgagaggttaagaagagtggagaatatgaaccttctgaaagaccagaccctgatacagattatgccagagctcaggaggcccgtcgtttcatgatctatgttcatgcaaaaatgatgattgttgatgatgaatacataataattgggtctgccaacatcaaccagcgatccatggatggtgctagagactctgaaatagccatgggagcctatcaaccatatcatttatcattaagggaaccagcacgaggtcaggtccatggtttccgtttgtcactgtggtatgagcaccttggcatgcttgatgacacattcctcgcaccagaaagtgaagagtgtgtcaggaaggtgaatcacgttgctgacaaatattgggatctctattcaagtgagtcacttgagcgagacttgcctggacacctac

SEQ ID NO: 191518 - DNA, 646 bp, Gossypium hirsutum
gtgggatcttccaacgaggatgatgataataacattgtgatgaaatggtttgaggaaaactaccccaaaaggaaccaagaattcgaggtttacagcatcgaagcaactgcaagcatcgatgtttcggattggttgatgatgaatgtaagagaagaagattacgttgtaatgaaagcagaagctgaagtggtggagaagatgatagaaaggaaaacaattggattggtggatgaattgttctttgagtgtaacaatcaatggcaagatgaagtgaagaagaagaagaagaagaagatgaggaaaaagaaaaggaagaagaataaaagggcttattgggaatgtgtagctttgtatggtaggttgagggatgaaggagttgcagtgcatcaatggtgggaatgaaaattaccaattaagtcacgattagaagacagatggtgtcttttcgtactatgaaactgcatctactgcttgtgtgtgtgtgtgtgtgtgtgtgtgtgatgttttaggagggtttatgtgggggagtttagatgtgatttttccccaaataaaaaccatattatctctttaagcaaggtggttgatgttgattgttgttttgatgttccttttcttaataataaagatgcagtgtggcaattta

SEQ ID NO: 191519 - DNA, 1057 bp, Gossypium hirsutum
attgaatgtggtggtggttacatcaagcttctctccggttacgtaaaccagaagaaatttggtggcgacactccttacagtttgatgtttggaccaaatatttgtggcacacagaccaaaaagctccatgttatactatcctaccagggacaaaattatcctattagaaaggatctacaatgtgaaacggacaagctaactcacttttacacatttattctaaggcctgatgcctcttatagcgtcttaattgataacagagagagagaaacaggcagcatgtatactgattgggatatccttcctccacgaaaaataaaggatgttaaagccaaaaagcctgcagattgggatgatagagaatacattgaggatcctaatgatgtcaaaccggagggatatgataaaattccagctcagattccagatccaaaggcgaaagagcctgatgactgggatgatgaagaggatggtatttggaaaccacctaagatcccaaacccagcatacaaaggaccatggaagcgtaagaaaatcaagaaccccaactacaagggaaagtggaagactccatggattgataacccagagttcgaagatgatccggacctctatgtgctgagaccaataaaatatgtgggtattgaagtctggcaggtaaaggctggttcggtttttgacaacatattgatttgtgatgacccacaatatgcaagagaagttgtagaagatatatgggccaggaatagggaggccgaaaaggaagcctttgaagaagcagagaaagaacgaagagcccgggaagaggaggaagccaaaagagctagagaggaaggtgaaaagcggagaagagagagggaccaccgacatagagacaggaggcaccgtagaaggcacgatcctcgtgattatctggacgattaccatgatgaactatgaggttgtccaccacaatttcgcgagttttaggatcccatttcgattacgaaaaagagaaaaatcgaagcaaggttccacgctgtgagagttggggttactgtgtactggttgttctcat

SEQ ID NO: 191520 - DNA, 1149 bp, Gossypium hirsutum
gtcatcgtggaaaccacttctttatccagaggagaagtgaggagtgtttcaattcagaactactagcttgtccagtggataatacatctgcaacaacagttcttattcctcacagggcaagtgtaaagattcagtatattcaactttttagtgatcatcttgctgtctctgagcgtgaagaaggtttgcccaaaattactgtttaccatcttccggaagttgaagagccactcgtaaatcttgaagggggtaaatcagttcaatttattgaccctgtatactcagttgatctatcagtatcacagttttcctccaccattttgcggttttcttatagctcattgcggatgcctaattctgtctacgactatgacatgaatactggggagtctgttttgaagaagattgaaactgttttgggaggctttgatgcatctaattatgtcaccgaaaggaaatgggctacgtgcttcagatggcactcaaattcccatatcaattgtgtaccaaaagaatcttgtcaagcttgatggatctgatccaatgttgctttatggatatggttcatatgagatatgtatagatcctgactttaaggcatcaaggctgtctttattagatcgtgggtttatctttgcaatagctcatattcgtggaggtggtgaaatggggaggcaatggtatgagaatgggaaatttttaaagaagaagaatactttcactgattttatctcttgtgccgagtatttaattgaacagaagtactgttcaaaggaaaaattgtgcatacagggaagaagtgcaggtggattgcttattggtgcacttcctaacatgaggcctgatttgtggaaggctgctgtcgctggagtgcctctttgtagatctcctgacttcaatgctcgaccctactatccctcttacaacttcagagtgggaggaatggcgtgaccctcgaaaggaagagttgtacttctatttgaactcgtcttcccctgctggtgatgtgaaggctcaaaattatccggatattctcgttacagctggcttacgtgatccgcgtgttatgtactcagaacctgcaaagtttgtagctaaactaagggatatgaaaacggacgataacatgctgttgctcaagtgtgaacg

SEQ ID NO: 191521 - DNA, 682 bp, Gossypium hirsutum
ccgcattattccgctttctttttatctgtgtacttattgacccctatcagtcaactgtcaatcaggttcctttcttttctgtcgatccatctccaaagtttattgcttaaggatcctttcaatcagtgattctggtgtgttaccaggggcggatgtaaagcctttaggcttggcacttggtgcccatgtgtgttccagagggatgttagcctacaagctaggcagttgatgcccaatttttgtagattaaggtttgtggaaatggacgatcgaatcaactcaaagaatcattctatccagatatcttttggttattttttatatgtttatctttgggttatatggcatgtaataggtgtgttttgttaatgttttgaatatttactacatgtgttacatatgagattgatccaaagatgattaagcttagtattagcttgcttgtgtaggtgcccttaatcatgtgtgaatatggtcatataaaattgctttggtcattggatataaacgttatgtaagtatttgaatcatggtatgaatgaataagaataaatggtgaaatataaacatgcatggaaagaatcatatactaacctaaaatatgaaccaaatatgataacaccatttacttaatgtatttatccgccgaatcatatctagcataataaacaggggcggccgt

SEQ ID NO: 191522 - DNA, 1128 bp, Gossypium hirsutum
cacactcttcctttagcaaaaccacattctcaagagaaacaaaggggaaaaaaaaagcagaacgcaagtgaagagagatcaggaaagaaaattaaagtcgggttggttacgggttttcgagctttgttcgtaaaattttgtgtataagtaacgcaatgactagcattatggatgcagaacatgacaagtatagcatgattaatttcgaagagacggagttacgtttaggattacccacaggcattgaaaatgataatgaaaccgccaaaaataatgggaaaagagggtattcggatatggttgatttgaagcttaacctttcaacaacaaaggaagcatcggtggatgaagctgagaagatgaaggagaaaaacactgcaaagccccctgctaaggcacaagtagtaggatggccaccggtcaggtcctttcggaaaaacatcatgaccggtcagaagaacagctccgacaacaagggtgagaaaaccggctgtggcaacaccattaacactgccgtacccgcggcgtttgttaaggtcagcatggatggtgcaccctatctacgcaaggtggacttgaaactatacaagagttaccaacaactctcggatgccttgggcaaggtgtgcagctccttcactattggtaactgtgggggttctcatggaatgaaagatttcatgaatgagggcaaattgatagacctcttgaatgggtctgagtatgttcctacttatgaagacaaagatggagattggatgcttgttggtgatgtcccatgggagatgtttgtcgattcgtgcaagcgcttacgaatcatgaaaggatctgaggcaattggacttgcaccaagagcagtagagaagtgcaagaacagaagctaaggtaggtttagaaacaacaatcccaattaaaatcaagccagatcaaaatcagattgtatgtgaaaccagttgaatcgagaaccgaggtctgaagaagaagaaatattaataaaagttagtagggatatattttgatatttattaagggacaagaaatcaaataatagaaaattcataaagtttactttcaatggtttgtttaaataatatctttaaatatattaatggttttggtttttgagtg

SEQ ID NO: 191523 - DNA, 538 bp, Gossypium hirsutum
gtgcgccctatctacgcaaggtggacttgttattattcaagagttaccaagaactatcgggggcctgtgaggcaaaatgtttagctccttcactattggtaactgtgggggttcacaaggaatgaaagatttcatgaatgaaagcaaattaatagatctcttgaacgggtctgaatatgttcctacttatgaagacaaagatggagattggatgcttgttggtgatgtcccatgggagatgtttgtcgattcatgcaagcgtttacgaatcatgaaaggatcagaagccatcggacttgctccaagagcagtggagaaatgcaaagaacagaagctgatgctagcttcattacaaaacaacaatctgagttgagaatcaagtgttactaagataaaaagaaaagagagcagcaaaccggttcgaaagggatcgagcagggagtttgaatgtgttcatcagcatgaagaaaaaaacgagaagaaattattaagagacaagaaatctatatgaaaaatgtttacgagactttgttttaat

SEQ ID NO: 191524 - DNA, 406 bp, Gossypium hirsutum
taaaaatctatttatggataagcttgtttcaagctggtacaaggatcaatctttgcctgaatcttacatattcccaccccatgaaagacctggcaagctacttgttcctaggtgcaacaccgtgccggtaatcgatctcggcgatacccgaaccaatttagttcaccaaatcttgaaggctagccaagagttcggattatttcaggttgttaaccatggagttcctccaaatatcatgagtgaaaccatgagtgttttccacaagttcttcgagttacctgcagaagacaaggcgagcctcaccgtacacacaaacgatccatagagatgcaagcttgtaaccagcactttggattacgatcgcgaaaagatccacctgtggcgcgatgttttaagacacccttgt

SEQ ID NO: 191525 - DNA, 572 bp, Gossypium hirsutum
cttttaaagctgtttacccatctgttaagagtgccaaagtggttactgataggactacaggccggtctaaaggttatggctttgtaaagtttggtgatgaaactgaacaaattcgtgcaatgactgaaatgaatgggatttattgttcaactagggcaatgcggattggaccagctgctaataagaagcctgtcactgatcagcagtatcagaaagctgcttacccgaatactcaaggaaattctggagagaacgatccgaataataccacaatttttgttggtggtttggatcctagtgtttctgaagaccaactaaaacaaatatttagccagcttggtgaggtagttcatgtaaaaattccggctaacaagcacttgtggttttgttcaatatgctaacagggccagtgcggaacaatctttatctgttttgaatggtactgttttaggaagaagaaatgttaggctttcatggggacgtagtccttcagcaaacaggttcaacctgaacaggcccaatggaatactggatattatggatatgctcaaagatatgaagcatatggatat

SEQ ID NO: 191526 - DNA, 916 bp, Gossypium hirsutum
ctgactccttccttaacactatggggtcatcatcaggatacacggaagatgattttagcacctctgccttcgatccttcaacatttagcgtccaggaacttgttaaattagcagcaccggatttctcaatcccacaaccatttgttcgtataaaccaacaacctccttccttgtctgtcaccactcctttgccaccaaccatcgacatgtctcgtttgcttttggaagatgaccaccagaaccttgagctccacaagttgcactctacttgccaagactggggcatctttcagttggtgaaccatgggcttagctcatcactgctggagaaactgaagcacgaagtggaggaattttataggctgccattggaagagaaactgaaatacaaaataggggaaagagggtgggaagggtatggaaggaagatgtccgcagatggcaaatatgattgggttgacactttgaatattatcactaacccactccataggcgcagccctcatgtcttcccacaactccctcctcctttaagaagtacgatggagtgttacttatcggagctccaaaagcttgccacaaaacttattggtttcatgggaaaagcattgaaaattaaagaaaaggagatgatgcagttgtttgatgatgggttgcaagcggtgaagatggcatattatcctccatgcccacatccagagtcggtgatgggtcttattccacactctgatatgactctcctcactatcctacaccaactaaatggtggtggatggccttgagattaaaaaaaatggcctttggttccctttcaacgtcaacccagatgcttttgtggtcaatgttggagacattttcgagatatttagcacggggtttatacagcgttgacacaggttacttgcaataagagaga

SEQ ID NO: 191527 - DNA, 437 bp, Gossypium hirsutum
tgcttttatatcggggatttttggttgttgaactccagtctaggttctggaatctataccaaaaatccattaagtcaaaactcttatcttccagcaagaagagaaagacatatcttggtttttttttttgctgtaaatcttgatgctgcgtaaattgttgtggttgatccttgagactcatgtctccagttgtcagtgaaatcctccgatccggttttatgataaattcctccctcagacgcaggacccatctcgttcaatctttctcagttgtcttcctctactggttctatgttttttcataaatgacatgcttattttctttactatatatatatatataattatctgttgctagtataggtgtccagtcgcctttgagggtagattatcctgaaatattagtaatttatatttgaagttttagcagtgagttt

SEQ ID NO: 191528 - DNA, 432 bp, Gossypium hirsutum
ttcttccccccttatagagtttagtcaatttctgctctcttcctgtttttcattttcccttgtagagctaacgttctgctggtttcggttcactaattttttcagctgtgtttctttcaaatcgttttgatatgtttttcaaatcgttttgagattcatgtctccagttgtgagtgaaatcctccgatcggggtttatgataaattcctcactcagacgcaggacccatcttgttcaatctttctcagttgtcttcctccactggttctatgtttttcataaataaattctctgtaattgcttgactttcatttcctttacataataaacccaatatataagaaaacgttgcattagctacacgtagttagtatctgggtcctgtcgtcgtctttctatcagtgattttagtgtacatacatcaacatggca

SEQ ID NO: 191529 - DNA, 830 bp, Gossypium hirsutum
  unsure (1)..(830): unsure at all n locations
cccacgcgtccgtgttcacaagctcatgcacctagaggaactgattgatattttccttgcacacgattggccgctcggcatcactgattatgggaactggcaacgtcttgtttgctgcagaaaaacagattcaaaggtgagatccagcaaggaactcttggaagcaaacctgctgctcagctgctcaaaaaaactcagaccatcgtattggttttcagctcacttgcactgcaaattcaccgctcttgttgaacatgaagagggtggtcgagtgacaaaatttcttgcactcgataaatgccttccagggcgcaagttcttgcaggttgttgatattgatctgatctaggaccttatgaggttcagtacgatgaagaatggctggcaataacacggaaattgaactgtctttcctttgaccttccgacgtggagacgttgggtaggagaacaaagctcgacatgcaagattgtcgtcaatgggttaagagccggattggaagacagaggagcccaacccttgtgaattttctcaaacagctccacctcacaaaccctttgattcttacttttttctgattgtatcttttttggaatactagatcttcttatgttcttgataatgcatcgactccaggatactcctccttattgcctcaaaggatgattcagcgaagaattcccatgaagatgagatgatctagaagatgatgcagaacgnnatatgaaaatcgtcctcatgatgtgaatatatttctatcacaaaaggttattatgcaaaagattgtggcatatcttgcttacttgagcttactgnttgtaagtgcaacn

SEQ ID NO: 191530 - DNA, 775 bp, Gossypium hirsutum
  unsure (1)..(775): unsure at all n locations
gtcctaagtacgaaacccggaaaggtagagagaaacgaaaagaaagatggagaaaggcaaaggaataatggggtccggccgaagatgggccgtcgatttctccgataattccaccgctccttcttcgcgtgacatccccgatccccccggcttcactcgtgcctccgtcgatcaggacgattcggctgtgagtcgccaaaagaaggatgctgaagccaattggaaagctcagaaagcttgggaggtggcacaagcacctttcaagaatttgctaatgatgggcttcatgatgtggatggctggcagtacagtgcatctcttcagcattggtatcactttttcagcactttggcaacctattagtgctcttcaaggggttgggaaggtttttgaaccgtataaagacaataaagtagatcttcttggacctaagttgcttttcattgctcttaatttgggtggtttagcacttggtgtttggaagcttaatacattgggactccttcctacacatgcatccgactgggtgtcatccttgtccccagctcaggaggttgaatattcaggtgggggtattcctctgtaatatcgtcttcgtgcgtctgattctcagacaaatttctggtgccagtgaggggaagttgcaaagataggtagaaagaatttggatgtttatacctatgtcttttggagatgttgaagaggaagacactatngattttcattccccccgcccccccttccctcttaaaatttgatgaaccatgtgagctgc

SEQ ID NO: 191531 - DNA, 531 bp, Gossypium hirsutum
gtctttctccttcacctattagcccaaaaaataaatgaataaaagaaaatttactgtttcactgaatccaaactttttttatcttcttcttcgttaactggcttcctataaccctaaccctaaccctaattaccggttcgaatctcccattctccatcatcccttttagccattctccccatttcatactgtgattataattatgccatgcgaggcttcatttcttgcatattgtgccagatccacacgaagaatctgaatatttatcattgtattttatgatcgggttaaattcgtggattttgagcggcgggttcatctcagtgggcatctgattgggtggtgacgatgtcaaacttatatggcgattataaccaaaggattgattatgtattcaaagtggttttgattggggattcagcagttgggaaatctcagctgcttgctcgtttcgccaggaacgaattcagtgtggattcaaaagccacaattggtgttgaattccagactaaaacccttgtaattgataac

SEQ ID NO: 191532 - DNA, 647 bp, Gossypium hirsutum
gaaaaagctgtctggatctcagtaatagggctgatggcaacgaatgggtgtgaaggtaggttgaagatgattgcggaactgaccacaaatgctgagcaaattcaagacgaggtattgggggaaatactaagtcgaaatgcaggaacagagtatttaaggggatacctccatggtcaaaccgagaagcagctctttaagaaaaatgttcccatagttacttatgaagatctcaagccttacatagataggattgctaatggggagacatcagatatccttttagctgaacccattacagggttctttctaagctctgggacttcaggcgggcagccaaagctgatgcctgtcactgctgaagttgctaataagtgggatttatttcgtcgcttgtacgagtctcctgtgataaagcactttgatgacatcaaccaagccggtaaaagattggagcttatgtttgccagaccagagattgaaactcctagtggcctcaaggcagcatctgtttcaacgagcatatacagcgggagtaattttagaaccaggttgcctaagctttacacaagtcccgttgggaccatcttttgcccaaaccccaaccagggcttatactgtcaattactttttggtttaatccaacgaga

SEQ ID NO: 191533 - DNA, 394 bp, Gossypium hirsutum
ggctgcaagagcagctgattatagtattggaaagttcaggtttctcaaaagattaatacctgttcatggccgctattcctacaatcgtccagcatttctttcccagtattccttctacaaatcactagttatatggttcatccaaatttttttctcctttaattttcaggtgggctctgggaactaagtcttttcaattctggtagcttgatggcctataatgtgttctacactagtattcctgttctagtcagtgtccttgacaaagatcttagtgaaggaacagttatgcagcatccacaaattttattttactgccaagcgggaaggtttactgtttctccgccttttttggcctttttcctcctatataacagggttaggaaatgggact

SEQ ID NO: 191534 - DNA, 405 bp, Gossypium hirsutum
ccacggtggagcaatgcggataaagctttgacaacgtgcaggaatggacctttaattgagtactcgaagaacagatgaaaagctgatcgtgcatcacctccatttctttccccccatttgcattttggggaggttagtgtccgaaaagtctttcatctcgtccgaatgaaccacgttttatgggctaatgaaggcaacaaagctgctgaagagagtgctaacttgtttctgaagtcgattggcttgagggaatactcaagatacttgagtcgtaaccatccttacagccatgaaaggcctcttctcggacatcttaagtccttcccttgggttgtcaatgatgggttatttcacggcatggagacatggaagaacaagttatccattgagggatgctggcatgag

SEQ ID NO: 191535 - DNA, 630 bp, Gossypium hirsutum
gatgaatcagggtactacagttggtatgcttacggacgatcaaagcttgctaacatattacatgccaaggagcttgcacggcatctaaaggaagaaggggtggagattactgcgaattcacttcattctggagcaattatttcgaccaatcttatgcgccaccatggtttaatcaacaccgttggtcaaatgttgggaaaatacttcctcaaaaatattccacagggagctgccactacatgctgtgttgcattaaatccacaagtcaaaggtgttagcggagaatatttcttagacagcaacataggtaacccgagcgctaaggcgaaggatgcagatttggcaaaaaagctatgggacttcagctgcaccttgaccaaccccaagtagttagttggttcacaaagccttatcgagacgagctgaagatgttcgatgcttagtgctggtactcttttagctgaaactgtgataaaccgtaatattttcatagacatcccagttttatcgagaagatttgaataaaatgcaaaatatgtatagacactgaaaaaaaaaaataattaaaaatttatttaattatataatttttaaaataaaatattttaattatattttttttaaaaataa

SEQ ID NO: 191536 - DNA, 419 bp, Gossypium hirsutum
aaaagatttactttcaaatctttacttctcttgagccctttctcagcttttgattaatctaaaaagtttcatccatgtttgattccgctccctctgcttctactttctttctcttcaacatcttccctttaataatcgggctttaaagttttctgcttttgatctttacatataggagtttattttcttgaattcgttttattagaagagaaaagaaaatgagggtagccaagtctcgggtatggcaaccatgcaagaagaagaggtatttgattaattgcaagctttgaaagaaaggttttcttgaaaagacaagggaaaataaatttaagagaaatacaaaggaattttagaggaagcgatggcgaatcgcactagtgcagcgagcaagacacgtgtggggaagtacgagctaggga

SEQ ID NO: 191537 - DNA, 406 bp, Gossypium hirsutum
gcttcctgctgcaatcctgatatttctacctggatgcagaaccttgctccaattactcaatggagagctggttccatgtctatttttatatgttcttcaccaacttcatcccatccatcactcaacttctccggtaccaaatacctggaaaactcgtctctttcaatctccatatttgctgatttcaatctccccgttcctctttgggcttcaaaacccttaaccatcaactcaaaatcctcgaaattatttgctgaagcaaccatttcttgcctcacaatcaacgtcatcaaagatgttcttaactactgctcaaacaagaagaatccctcgattctattcccgaaactcgaatctatttcagctttcaaagacatcttctacctagcatctgtaacacttgcgc

SEQ ID NO: 191538 - DNA, 609 bp, Gossypium hirsutum
  unsure (1)..(609): unsure at all n locations
aatggctagcaaagtctcatcaagaagcagatcccaatgctatcatagcaaacgagggaggttttatatttaaacccaaagcatttaacattgtatggggaagtgacactcgttattggcgcattcctcgctcacctattccagagtacgaagttagaacaaatcttatttatttattcattatccttgcatttttggagaaataagttgattaaatttgtggggaagtaaaaataatgggtaggaaacgtggggttgtntcagtgagcaggaagcagcagagctgatttaggtatcttgtggggaagaaacggtttcagtgaaactagagcctttaaccagacatgaaatcagctttaaactcagcttcagaagggattcttttggatggagcggggcacctattttcttgatgcccaaggtagggaagaaagggcagtacaagtggaaaaggctcagggaactagacaacttgcctaaggaccccattatggttccaaccgatgattcctcatatcgaacctatcagactcncgacaaagcttatttggtngatgaatctgatgggaaaggaagagttgaagtctgagcctctcaaaatagttacac

SEQ ID NO: 191539 - DNA, 450 bp, Gossypium hirsutum
cccactcgtccgcggacgcgtgggtggctagcaggtctcatcaagatgcagatcccaatgctatcatagcaaacgagggagattttatatttaaacccaaagcatttaacattgtatggggaaatgacagtcgttattggcgcattcctcgctcacctataccagatgagcaggaagcagcagagctgattcaggtatcttggttggaagtaacgggttcagtgaaactagagcctttaaccagacatgaaatcagctttaaactcagcttcagaagggattcttttggatggagcggggcacctattttcttgatggccaaggtagggaagaaaggtaagtacaagtggaaaaggctcaaggaactagacaacttgcctaaggaccccattatggttccaaccgatgattccttcactatcgaacctattccttcaaacgaacccgaca

SEQ ID NO: 191540 - DNA, 698 bp, Gossypium hirsutum
ataagaaggaaggttggtgagagagaaaaagaggtaaggcaaaattcgaagtcgaggcgagaccaagaagtagcatgataatcccagttcgctgcttcacctgcggaaaggtcattggtaacaaatgggacacttatcttgatcttctccaggccgattataccgaaggagatgctcttgatgctttgggattggttcggtactgctgtaggagaatgcttatgactcatgttgacctcattgagaagcttctgaactacaacacattggagaagtcggagaccagttgaggaaacatgtagaatctaagggtttgttgcagtttgtgtgagtgcctgtcaatgattctcagttttgtttaagtggggccgtgtttgaatccagaagaagggaaggaaaggacttaaatagtactagtctagtttgttttctttagctctatgatggatcgctgtatgtacgaaattagtgggatttgaaatgctgaaagtgattggaatgctttgctgtttgctgggataattgtatgatcaaagactaacttttgttagttgcattgctacagatgtgttagtaagtgtaggatgcatgggaaccttaaccgagcattttaaaatcaataatgacatgaccttctggtagcttacaagctaagtgaaggaagtgggaatgaagcaaaagacaccatttaattatat

SEQ ID NO: 191541 - DNA, 385 bp, Gossypium hirsutum
cccacgcgtccggaggcgagaccaagaagtagcggagcatgttgataattccagttcgctgcttcacctgcggaaaggtcattggtaacaaatgggacacttatcttgatcttctccaggccgattataccgaaggagatgctcttgatgctttgggattggttcggtactgctgtaggagaatgcttatgactcatgttgacctcattgagaagcttctgaactacaacacattggagaagtcggagaccagtcgagggaacatgtagaatctaagggtttgttgcagtttgtgtgagtgcctgtcaatgatggccgtgatctgaatccagaaaaagggagggaaggactttaaatagtactagcctagtttgttttctttagc

SEQ ID NO: 191542 - DNA, 456 bp, Gossypium hirsutum
tcctcgcgtccgcccacgcgtccggaacggcctggatcttctcaaaaaattctgcatctcaaacgttattttttcctgatggagaagctgaaaatttcaccatctaaaaagcttgaagtgctttcggctgataaatgaccagaataacctgtcttctcccccttggaaaaacgttctttcctctgctgtgaaagttctatacctatttttttcacattttcgctgtgaaagctcccttcctgttcctcggtcctcttccgcagagatgctcttgatgctttgggattggctccgtactgctgtaggagaatgcttatgactcatgtcgacctcattgagaagcttctgaactacaacacattggagaagtcggagaccagttgaggaaacatgtagaatctaagggtttgttgcagtttgtttgagcgcctgtcattgattctcagttttgtttaa

SEQ ID NO: 191543 - DNA, 655 bp, Gossypium hirsutum
  unsure (1)..(655): unsure at all n locations
ccattttctcaaaaaattcaccatctaaaacgtgattttctccagatagagaagctgaaaatttcaccatctaaaaagcttgaagtgcttttggctgataaatgaccaaattaacctgtcttctcccccttggaaaaacgttctttcctctgctgtgaaagttctatacccatttttttcacattttcgctgtgaaagctccttcctgttctttggtcctcttccgctgaaatcatggaacaaaagcttgctacacagcatgtggaaatggagagacttggtacagaaaaccagagaactgctgctaccaatgggacattgagacaggaacttgctgctgcacagcatgagttgcagatcttgcatgctcagataggagctgtaacatctgaaagagaacaacaaatgacgagccttacggataaaatagctaagatggaagcagaactgcaagctggacattgttataatagaatgttctttcaattttaaaactgtatgagcaaaatgaaatggactaggatactgcaaagaagtaatcactttgataataagtcattgagtttaagttggattataggttcaattgtatttattgttctagaggctacactaggtatcaactntagcaccctntctctttcaaatttttttt

SEQ ID NO: 191544 - DNA, 354 bp, Gossypium hirsutum
gcgaatcataattaaatttatgtatcattgctataaatgtaaattgtttgacatgcagagatgctcttgatgctttgggattggttcggtactgctgtaggagaatgcttatgactcatgttgacctcattgagaagcttctgaactacaacacattggagaagtcggagaccagttgaggaaacatgttgaatcttagggtttggtgcagtttggttgagatgcctgtcaatgattctcagttttgtttaagtggggccgtgtttgaatccagaagaagggaaggaaaggacttaaatagtactagtctagtttgttttctttagctctatgatggatcgctgtatgtacgaa

SEQ ID NO: 191545 - DNA, 406 bp, Gossypium hirsutum
ccctcacgctcgttcttgaagctgttataaatatagaaggttgatgaggagcccaattgtgccgagctcatatccttctttgagagcctcattgctccatgcataccattgagaccaattagaattgatggagctctcaagggtgggcacaagcgcggaagattagccattaatttggaagaagatgagcaacccaagaaataagtacgactgggtattcctgctactcagtgggtttctgtttacaatgcacgacgtcccatgaagcagcgatatcactacaacgtagcagattcaaggttgcatcagcatgtagagaacggtaatgaagatggattgtttattagttgtgtggcttcagcagcatatctctgggccctgatcatggatgcaggaacagggttct

SEQ ID NO: 191546 - DNA, 660 bp, Gossypium hirsutum
caaaagtgtgcgtcgagcttaaaaaacatcttgtcacagcaagctatgtcgatgactccatgttaatgatggatgaaaaggccaagaatgctggcattacaattcttggtgaaatgggtttggaccctggaatagatcatatgatggcaatgaagatgataaaccaagcgcatctcaaaaagggcaaaataatgtctttcacttcctattgtggagggatcccatctccagcagctgcaaataatccattggcatataaattcagttggaatcctgccggagctattaaagcaggacgaaatcctgccacgtacaaatctcagggtgaaacagtacgtgtaagtggggatgacctctatgattcggctgggagatttcggatacctgatcttccagcttttgcattggagtgccttcctaatcgtaactcgttaacttatggggatctgtatgggatcggacatgaagcatccacaatattccgtggaactctccgctatgaaggttttagtgagataatggccacacttgtaagaattggtatattcaatgctgaaactcatccacttctcaaacatgaaggtcgaccaacatttagaaatttcctttgtgagcttctgaaaattgatactgaagacatgaatgaagttgtagttgggg

SEQ ID NO: 191547 - DNA, 387 bp, Gossypium hirsutum
agaagaagccggaaaaacccaaagaagctgagaagaaaccggaaaaacccaaagaagcagctgagaagaaaccggaaaaacccaaagaagctgagaagaaaccggaaaagcccaaagacggtgagaagaaaccggagaagcctaaagaggcggcggcggagaaaaagcctgataaaccgaaagaggcagcggctgcgccgccacagaaggttgcggaacctgctgcagctgctcctttaccaccgatggcgtatgcagttgggtatacttgctccgaaggttattataatggctatggtggaggacctagctattatggtggaccaccccaacaaccgttcccatgttacgagacttacggtaggcccgtttatgacagctggggcg

SEQ ID NO: 191548 - DNA, 1406 bp, Gossypium hirsutum
  unsure (1)..(1406): unsure at all n locations
caactaggttcnactagtttttatctctgatgaatttaatgagctgttgccaaagtatcttaacttcttgaagggtcttgttgattctgatactctgcctctcaatgtgtcacgagagatgctgcaagcccacagcagtttgaaaacaatcaagaaaaaactcatcaggaaagcccttgatatgattcgtaaaattgccgaggaggatcctgatgagtcgagtggcaaagatgagaaagaagtggaaacatctggtgatgatgatgagaaaaagggacaatacaccaagttctggaatgaatttggaaaatccattaaactcggcatcattgaggatgcaaccaatagaaatcgcttggcaaaactccttcgatttgagagcaccaagtcggatggtaaattgacatcacttgatcagtacatctcaaggatgaaatccggacagaaagatatattctacattacaggaaccagcaaggaacaattagaaaaatctccattcttggagaggcttaagaagaaaaattatgaggtaattttcttcactgatcctgttgatgagtacctgatgcaataccttatggattatgagggaaagcagttccaaaatgtatccaaggagggcctgaaaatcgggaaagaaaagaacaaagaactcaaggagtcatttaaggaactaactaaatggtggaagaatgcacttgctagtgataatgttgatgaagtgaagataagcaaccgtttggacaacactccttgtgtggttgttacatcaaaatacggatggagtgctaatatggagagaatcatgcaatctcaaaccctatctgattctagcaagcaagcttacatgcgcggcaagaggatcctagagattaacccaagacacccaatcgtcaaggagcttcgtgagagagttgccaaggactctgaggatgagggtgtgaagcaaacggctcagcttatttaccagacggctctaatggagagtggtttcaatctacccgatcccaaggattttgcttcacgcatctacagctcggtgaaatctagcctaaatattagtcccgatgcaacaattgaggatgatgatgatgatgtagaagaaaccgagacagagtcggagacaaaagaaagtgcaggcaaagatgagttgtagattgcctgaaacctcggggatatattgcctgaaacctcggggatatatactctttgagtttgttttaccctctgtagacattcacgattgaactgaaacatgcattttcaagtctgaaactaggataaaaagaaaatttacgtagttctttcatttcgggtgttgagaagtctcatcgattttgtctgtggaatgtgtttttgttgacagcccacactggtttgcatgattagcttgtttggaaggt

SEQ ID NO: 191549 - DNA, 788 bp, Gossypium hirsutum
  unsure (1)..(788): unsure at all n locations
aaactccctgtgtggtcgttacatcaaaatacggatggagtgctaatatggagagaatcatgcaatctcaaaccctatctgattctagcaagcaagcttacatgcgcggcaagaggatcctagagattaacccaagacacccaatcatcaaggagcttcgtgagagagttgccaaggactctgaggatgagggtgtgaagcaaacagctcagcttatttaccagacggctctaatggagagtggtttcaatctacccgatcccaaggattttgcttcacgcatctacagctcagtgaaatctagcctaaatatcagtcccgatgcaacaattgaggatgatgatgatgatgtagaagaaaccgagacagaatcggacacaaaagacagtgcagtcaaagatgagttgtagattgcctgaaacctcggggacatgccttctgagttagttttaccctctgatgacaagccgaaggaactgtaacatgcattttcaagtctgaaacttggataaagggaaacattagttagtagaatatatgtaaaccgtagtcgactgtgaaattaatctgtctgcaatttttgctcttttaatgcatcgcagtggttttaagattttcgcgtattaatatatggttgtttcgatcttattatctgtcaacatgttcaacttccattgcttaagattatatcttgtattgttatgcaatttcagtggatgaagggaaaccgttttacttgnnnnnnnnnnnnnnnnnnnnnnnnnnnnnnnnnnnnnnnnnnnnnnnnn

SEQ ID NO: 191550 - DNA, 584 bp, Gossypium hirsutum
agagaatagaggaggagtttggtcctattgtacgtcggattgtagaatgagagactaaagtgtccaaattgggaaagttgaaatataagaatgaaaatgattcagtacaagatgtgaaagctgatgatctgcaacaaatgtttctagccatgacagaagatgttcgcgtcatcattgtcaaattagctgacagattacataatatgcgcactctttcacatatgccggcgcgtaaacagtccagcattgcaatggagacattgcaggtctttgctcctttggcaaaattgttgcggatgtatcacatcaagtctgaacttgaaaacttatccttcatgtacacaaatcctgaagattatgccaaagtgaagagaagggttgctgacctctataacgaacatgagaaagagcttgtggaggcagacaaaattttgatgaaaaggatagagaatgatcaattcctggaccttatgactcttaaaactgaaattcgtgctgtgtgcaaggaaccttatagtatttacaaatctgtgcttaaatccaacagttcaatcagtgaggttaaccaaattgcccagcttcgt

SEQ ID NO: 191551 - DNA, 736 bp, Gossypium hirsutum
tcccacgcgtccgatagtctccaatttgatctccattgacattctaagggattgtcaaagagaaacctcaaaaagaaagggtgttcaaagaccagagaagagaagagaaatggtgggtccagttaggccacagttcgtcctctttggttcatccattgttcaacttagtttcagcaatggtggatggggtgctattcttgctgacgtctatgcccgcaaagccgacatacttttacgaggatatttcggatggaattcacgacgtgccatacaggttctcgatcatgttttcccaaaggatgcttctacacagcctgaattgataataacttattttggcggtaatgactcgatgggggctcatccatctggcccttggcccccatgttccacttcctgaatattcgtgaacttgaaccattttgtatttttgtcggggtttccaatttaaccgtttcaattctttcatgaccttcgtctatgaataaagatcttataatctcctatgtacttttacctaccttttactacaaccgtttattcacaactatactcttctattcaataattctcctcatcttgctctaatgttcttactttcttttttttatatccataataaattcacaaccttttttttaataagctttcttcatcttattgggcaccatttgttgtcatttattatatcacctaatactttgtcttacttttatgtttaatcctccctattccc

SEQ ID NO: 191552 - DNA, 504 bp, Gossypium hirsutum
tgtaagtctcgtttctctttttcctttccccctttaaaaaccgccttttaagcgctttgctttctctctctttttatggatgggatcatctcctttccttctccttcatgaaggctacgatttgaagactgtttttgatttccattagcatgcgaattaggccttttcgttataattcatcgcctgaaatatctgttatcgaatacgcttctacttttttttgtttcctgattttgattttagtgataacaactggaaattttgaatgctcgagctgtaatatgggatatttgaattcggttttgcaatcttcaagtcaggttcatgctgaatatggaccggttagcggcggaggccttagccagaatggaaagtttagctacggctgtgcaagctctcctggaaagaggtcttcaatggaagatttttatgaaacaaggattgacggtgttgatggagagatagttggtctttttggagtttttgatggtcatggaggtgcac

SEQ ID NO: 191553 - DNA, 1166 bp, Gossypium hirsutum
attgtatttacgatcggtgggtataaatgactggcatgaagtccatgtgaaaagggtcgtaaatgaacctatcttgatgtcagagtgcaaactggaatctgatagggcaatcacaccaatctttctgctaatttggatttcttacaaaagaggaaaccgtctgacgatataaacatcgaacacaggatccacacttgtgagttcctccaatgtccttatagtgaactccaattgggttttcttgaccggactgccagggacaatcatcaactaacttgtccacatagaaactcgtctgcagagttcggtggttcgaattttaacataaatgatgtgaaaccggtcattttccctccaccatttgcgcaaccgaagccggcagcaccgtctattacttctgtctcaacaccattcgatctatcagggctcggagttccggaagatggacagaaaatgatcagtgacctcatgtcgatatacgacaacaatgttcaagccaacaagaatgcgagtcccattaaaaatccagtcacggaaggtcaaaatcttcttcagctgaaaacccaacagcaacaggacgagttcttccgtggtcaaggcctttccttcttcaatgagtccaacataccggctaataaccagattttaccacaaggggaagctcaattcgaccggttgaagacctcgaattctccattcgagaccacctacaacaacaacaacaacggtttcaaactgatgttcggctctccattcgatttgtcttcatttgattacaatgatgatctccaagctgttggagtggacaccatgccaaaacaagatgtctcaatctggttctagtaacaatctcaaggctgaaactgaaaccgtacccgactcaaccctactgagccccgtatcgtgtgtttcatcgttatcgtattttttcaagcttgtccgtgtagtaatagaagttttaacaagttttagcaggtttatcatatatggggaactgattttatacatagaatgtgactttgtcttataaataagttaggtgtctggttttttgttctttcatgttcactgtttttttatcagttttctaccattattattacatgttggggtaggaatctgataatgagtgttgttttgtcttgtaatgaagtcattgggggggg

SEQ ID NO: 191554 - DNA, 444 bp, Gossypium hirsutum
gaaggctgattggcatgcatgtcttgtattacaatgttggattcaagggttttgctgtgccaaaggaagagcaggataaagttgctaagttcacattccatggcctgcctgccgaacttagacatggaagtgttgtaattgcggctatcaccagctgtacaaacacatcaaaccctactgtcatgcttggggctgggcttgttgctaagaaggcttatgaactaggtttggaggtcaagccatggattaaaacaagtcttgctcctggatctggagttgttacaaagtatttacttcagagtgggctgcaaaaatacttgaatcaacaaggttttaacattgttggttatggctgcacaacttgtatcggaaattctggagatcttgatgaatcagttgcttcagcaatttcggaaaatgatatcattgctgcagccgttcttt

SEQ ID NO: 191555 - DNA, 700 bp, Gossypium hirsutum
gtcaaatatcacaggtgatggaggagggagtttctcttcagaaactcatcaccaagaacaacaagtaggaaactttcatggaggctcaaactctttgctttcaactaacagtaatggcggctccactgctcctccaccagctaagaagaaaagaaaccttccaggaactcctgatcccaatgcagaagtgattgctttatcaccaaagacccttttggcgacaaaccgattcgtgtgtgaaatatgcaacaaagggttccaaagagaccaaaaccttcaactccatcgacgaggccataacctaccatggaagctaaagcaaagaaccagcaccgagatccgtaaaagggtttacgtctgccctgaaccatcatgcgtccaccataacccagctcgagccctaggtgatctcaccgggatcaagaaacatttttgtcgtaaacatggtgagaagaaatggaaatgcgataaatgctccaagaaatacgctgttcaatctgattggaaagctcattcaaaaacctgtggcacaaaggaatataaatgtgactgtggcaccattttctccagaagagacagttttataacgcatagggctttttgtgatgccctaacagaagaaaacaacaaagcaagccgaggacttataaacgtgggatcaaatttacaaggccaagttgttgctgcagatcagctcatc

SEQ ID NO: 191556 - DNA, 449 bp, Gossypium hirsutum
tcgcccacgcgtccgttttgccttttctttgctttgggtttatttggacatgtcaatcccacatgggttactttgcttgatttcaataagctaagctagcttcgagtttggggactttgagagatttcatataagttaaaacatatatacaaacttgagctagctggttgaggagggtcttttttttttctttgtcgagagtttttaagttttaagcatggaaggtcaaaggtttgttgtcaatggagggatcaaaacgcccattggttacaggttccgtcctacagatgaagagcttgtggttcattacttgaagagaaaggctttgaaccttcctttacctgcttctgtcattcctgagtttgatgtttttcagactgatccttggagtctaccaggtgatgtggaagaaaaaaggtgtttctttagcaacagatattgtaatgaga

SEQ ID NO: 191557 - DNA, 1004 bp, Gossypium hirsutum
gaaagaaggtcatcccgtctgttacaacgtctatggagaattccaaaacaaagagctgtatcaaaacactttcgctgatgaagaaaaacgatccaaggttcttgagatggaggattcagttcctggaaaagagcatccgaaaactcgacttcaatcctactggtatcaataccatggttcaagtgaacgacctcaagaattcacctggacctggtaaaaaggaactcagacaagctaccaaccaagcccttaacttgcttcaagataactatcccgaatttgtggccaaacaagtgttcatcaacgttccatggtggtacttggctttcaataggatgatcagtcctttcctgactcagagaaccaagagcaagttcgtatttgcaagtccagccaaatctgctgagaccctcttcaaatatattgctccggagcaagtaccagttcaatatggtggactgagcagagaaggtgaacaagaatttagcgtggccgatgccgtcacagaggttacaatcaagccagcagcgaagcacagtgttgaattccctataactgagaattgtaatctggtttgggaactccgagtagtgggatgggaagtcaattacggagccgaattcgtgccgaccgccgaagatgggtataccgtgatcgtatcgaaaacaaggaaagtttcttcggccgatgaaaccgtgatctccgatagcttcaagaccggtgagcctggaaaggttgttctcaccattgataatcaaacatcaaagaagaagaaactcctttaccggtccaagaccaagccttattctgattgaagctttgaaatgatcaatggggttggattttgttttcttctttattggaaaaattatttttataaatttagaatctgttggggatttatttttatttatatatatattttttattaggtaattgggattgtggctttttattttgattaaaaatgaatctgggatggaactgtgtgtaatgtggaaaaa

SEQ ID NO: 191558 - DNA, 417 bp, Gossypium hirsutum
  unsure (1)..(417): unsure at all n locations
gaacctactgtttgcaccaatggggcaagttttgatggtgcacccggaagagaaatgctgtccacaccatcatctccttccttcaggaactggcctatattgcctaacttgtcaggtgtcagataatgatagtgaagagaagctgctcttggctgcacagagagttttctttaactcaccacatccacttgagatcttaaccgaccgttctgcatatggttctgaaggaacaatccaaagagaccatgacatgaattcttacttaaaatgtgttaaaggcgtgatacgacaggagctaaaacgcatcaggaagaccaagagagagcagcgacgcaagatctggtggcccctggtattacctcacgacatanatgcgggtggtatcattcttcggaggtcagtagcaacaatgaatgc

SEQ ID NO: 191559 - DNA, 961 bp, Gossypium hirsutum
  unsure (1)..(961): unsure at all n locations
caaagctaaagtgtcatttgaaaatcactcgtcctggtattaacggtacagcgtttcgattttcatagagaaacctcgaaacttctacgtagtgagaggaaagtttgagtacgtgcgatggctcgctcgtggagagcaagcggctctttggtggctctagctatagtcttgtccggatgcttctttgcaatctcaattgccaaggaggaagccgcgaaattgggaacagtcatcggaattgatcttggtacaacttattcttgtgttggtgtgtacaaaaacggtcatgttgaaattatagccaatgaccaaggtaaccgtattactccatcgtgggtggctttcactgacagcgagaggctcatcggtgaggctgcaaagaatcaggcagctgttaacgctgaaagaaccatctttgacgtcaagagacttattggaagaaagttcgatgataaggaggtccagaaggacatgaaacttgttccctacaagattgtgaacagggatggcaaaccttatattcaagtaaagattaaggatggagagaccaaggtcttcantcctgaagagatcagtgctatggttctgactaagatgacggacacacctgaagctttcctccggaagatgagccacgatgcagtggtcactgttcctgcgtacttcaatgatgcccagagacaagccaccaaggatgctggcgttattgctgggctcaatgtggccagaattatcaatgaaccaactgcagctgccattgcctatggtttggacaaaaagggtggtgagaaaaacattcttgtctttgaccttggtggcggaacatttgatgtcagtatcttgacaattgacaatggtgtattcgaggttctttccacaaacggagacactcatttgggaggtgaggattttgaccatagggttatggagtacttcattaaactgattaagaaaaagcatg

SEQ ID NO: 191560 - DNA, 784 bp, Gossypium hirsutum
cccactcgtccgggagtatcggtcctcaaagttcattttagcgattcagcgatttatagtgggaattttagctccgagagacttcttcgaagagaggtagaggagtttaaggacgcgcgatggctggctcgtggagagcacgcggctctttggtggttctagcgatagttctgctcggatgtctctttgcaatctcaattgcaaaggaggaagccacgaaattggggacagtcattgggattgatcttggtacaacttattcttgtgttggtgtttacaagaatggtcatgttgaaatcatagccaatgaccaaggtaaccgtattacaccatcttgggtggctttcactgacagtgagaggctgtcgggtcgggccgcacagtaccaggcagctgttaacgcagagagaaccatctttgatgtcaagggactgatcggctgaaagttcgatgataaggaggtccagaaggacatgaaacttgttccgtataagattgtgaacaaggatggaaagccttatattcaagtagagattaaggatggagagaccaaggtcttcagtcctgaggagatcagtgctatggttctgactaagatgaaggaaacagctgaagctttcctcgggaagaaaatcaaggatgcagtggtcactgttcctgcgtacttcaatgatgcccagagacaagccaccaaggatgctggcgttattgctgggctcaatgtggccagaattatcaatgaaccaactgcagctgccattgcctatggttggacaaaaagggt

SEQ ID NO: 191561 - DNA, 389 bp, Gossypium hirsutum
cccatatccaacaagtatccatggcagacccaaaacaggaagcgatagaagtcatccattcttggtctgctccgagatcactcagtactagtctcatgtattcgttttctcagagggatgacacagaagtgctggatgaacctctgtatggaacttttcttcgtgttactggtgttgaaaggccctaccgtgaagatgttctctctaagatggaatgcgatggtaataaagttgttgacaacattatttacggtcctggaaaaaacagataccggtattgtaagcatattgcaaagcaacgggtgcctggtttgccaaatgacttgctgcagaaaggaaagcactttatactgatacaaaatcctctcaatatactgtcatcctttgag

SEQ ID NO: 191562 - DNA, 317 bp, Gossypium hirsutum
gcgtgatcttcacggtttgcataactgggaggggctgattgagccactccatccttgggtgagacgggaggttgtcaagtacggagagttcgttgaggcgacttacgatgcttttgatttcgatccattatcggagttctgtggaagctgtaggtacaacccgaataaactgtttgaagaactaggacttactaaacatggttacaaggttaccaagtacatatatgctatgtcccatgtggatgttcccgaatggttcgagaggtcacattgtacttggagcaaggagtcgaactgtatggggtacattgcggtta

SEQ ID NO: 191563 - DNA, 753 bp, Gossypium hirsutum
  unsure (1)..(753): unsure at all n locations
ttcttcattgcaatattcttatagaatcaaacttcaaaatggagtttactttagtagctcttacttctctcatagccttagccttggtccatccttcccatgcccaaaactcaccacaagactacctagtccttccctcccaagcccaagactcacaacaagactacctagccttgggaggggactcaccacaagactacctcaatgctcacaatgcagctcgagcagccgtcggtgttggccctatgatttgggacaagaccgtggctgcctatgcacagaactacgctaatcaacgctattacgactgcaaccttattcactccggtggaccttatggtgagaatcttgcctggagtagcgctgacttttcaggcactagtgctgtaagaatgtgggttagtgagagggtaaactacaattacaacttcaacaggtgtgcagcagcaaagggttgcgggcattatactagantggtttggcgcactcgattcgtctggggtgtgctanggtgagtgcaacactggtggaactttcattacttgcaactatgctncttgcaggcattatcatcggtcaaagacctttacaaaaagttaatttgctaaacatcttcaaatcactaatatctccataaaatggctaattatgtagctataactcatggcatattaggagaaatgatgttattgtcnatactgataatnattatgaattttatnntatgtttttaggacgatactaatgccgccn

SEQ ID NO: 191564 - DNA, 670 bp, Gossypium hirsutum
  unsure (1)..(670): unsure at all n locations
gaaaatatcatcataatattaagtcgtcgccagggtcaatctcattctccctcagatcaatttgagtactgtttcttgttctctcttctctggcatcccctgcaatggcgtctgatcttgagaccaaagccaaagaagccttcatcgatgaccacttcgagcttgcgctccatctctactctcaagccatccaacttaatcctaaacacgccgagctctatgctgaccgtgctcaagccaacatcaaactcaataatctcactgaggctgtggcggatgcgaacaaagcgattgagttggatccttccatgtctaaagcttatctgcgtaaagccactgcctgcatgaagcttgaagagtatcaaactgctaagtctgcactggagactggcgctgctttggcacctgcagagtcaagattttccaagttgattaaagaatgtgaagagcgaattgcacaagaaactggtgatgtatcaatgccgatgccagaagcattggctaaaaatgatgttaccgcaaaagaaattgagctggaacaagattancccaatctaaaaaattgaggctgccctccccaacccacgtacaaggctgaatttttacccaaaaccaaaaggagttggttgtttccatatttgctaaaaggattacccctcgattgtgttcc

SEQ ID NO: 191565 - DNA, 596 bp, Gossypium hirsutum
caatcctattcagaaaatcaaaatcccctctcccattgatcttttgatcttctagacacttctcttcctcgttgtgagtctcttggtttgccctggtaatggcgtctgctttagaaaccaaagccaaagaagcatacttcgatgaccactttgaactcgccctcgatctgtactcgcaagccatcggaatcaaccctaaaaaggccgagctctacgctgaccgtgctcaagccaacatcaaactcaacaatctccctgacgctgtggcagatgctaacaaagcaattgagttggatccgtccatgtctaaagcctacttgcgtaaagctactgcgtgtatgaagcttgaggagtatcaaactgctaaggctgcgttggagactggggctgctttggcaccagaagactcgagattttccaagttgattaaagaatgtgaagagcgcattgcagaggaaaatggtgagttaccaaaggagacgttggaagaggtgccaacaaatgttgtacctgcgaaagacatctcttctgtccaggatatacctgatcccatgactgttgcagcaccacccaaatcaacttacaggcatgaattc

SEQ ID NO: 191566 - DNA, 359 bp, Gossypium hirsutum
tgtcctagcccaaatgttgctgggcatgggtgctttggcgtgcggcttatgcttgatccaaaggaaactttgttggagacgccatgtcactcattgctgcctatacaaacgttcctgtcaccgttaaatgtcggattggtgttgatgatcatgattcatataatgagctctgcgattttatctacaacgtttcttccctatcaccaactaggcatttcatcatacattcacggaaggctctactaaatggcatgagcccgtgctgatttccgtagaagtcccccactatcatatgagttctattatgcactcttgcgtgacttttcggacttgacgtttaccataaatggaggcattaa

SEQ ID NO: 191567 - DNA, 460 bp, Gossypium hirsutum
  unsure (1)..(460): unsure at all n locations
aattggtactcaccttgtcagtggcttttgctggagatagggacatggcgctgaaatatgtgctcgagggctgcccacagttgcagaagcttgagattagagatagcccatttggggatgcagctctgcgttctggtttgcatcactactacaacatgaggttcctttggatgtcgtcatgcaggctaacgcgccatggttgccaggagattgctcgtgctatgcctcgcctggtagttgaagtgattaggtctgctgatgaggaggagatggatgatgttgttggaacattatacatgtatcggtctcttgaaggaccaagaactgatgcaccaaaattcgtcaccatcttgtaggtaaatggggtgcaggaagctgtttcaattgttctcatgatagatacaaagcaagttttaaactgtttcacggngaatattgatacggaaggcatcttttaaat

SEQ ID NO: 191568 - DNA, 677 bp, Gossypium hirsutum
catcttcatcccctcctttttcgcaggcttcaatgacttgcgtgacctctcaagttaccttccctgcaaagcttcgtttctgtttctttaacctcaaaatggcggtggatctgatgagttttccgaagatggatgatcagatggcggtacaagaggttgcatcgcaaggcttgaagggcatggaacacctgatccgtctcctttctcaccagtccaaaaacgtcgactgcaccgacctcgccgatctcaccgtctctaaattcaaaaaggtcatttcacttctcaacagaaccggtcacgctcggttcagacgcgggccgattcaacccctgtcttcctcatcttccccctcgacatcatcctctgcttctctgtctgttccgaattctcaaaacaatctaactctaacttctgctgcgatctcaacgccggcgaacataaatacggcgctggtcggtacttcggttatcagtccttctagcttcgttcaatcgcagccgcagagtttgactctggactttacaaaacctaatttgtttggctccaacggtaaaagtaccgagttggagttcacaaaagaaagccttagcgtttcctctaactcttcgtttatgtcttctgccatcaccagagatggcagcgtctcgaacgggaagcagggatcatctctattcttg

SEQ ID NO: 191569 - DNA, 600 bp, Gossypium hirsutum
gctttctgttctggtgttgatgctgttgctctttatcgcttacataatgaagggaaagttgaagattgtaaaagatttctcgagacactatataagtttgtatactcccacgcgtccgatctgaagccgcatgttgcaatcttggacggcataacaatgggatgtggaggtggaatatctctccctgggatgtttcatttagtgaccgataaaactgtttttgctcatccagaggctcaattggggttccatcctgattcaggggcttcattttatctttctcgcctacctggttacttaggggaatgcttagctctaacgggagaaaagttgaatggtgtcgaaatgattgcctgtggcctggctacccattattgcttaaatgctcgactttcttgggtcgaagaatgccttggcaacttgatgaatgatgatcccgctgtcatagattcttctcttgcacaatatggtgaccttgtttatcctgataggagcagcattcttcgcaggattgagacagttgataaatgtttcagccatgacactgttgaggaaattattgattctctggaaaatgaagcagctggagcttatgatgat

SEQ ID NO: 191570 - DNA, 1231 bp, Gossypium hirsutum
gtgattcgtaaaactagggatttaaatttaccacatttggggaaatgaaaatggcattatgggtattccaagaaggccttaccattataattaccttgggcgacagcccacggttactgccgtccactcttattacacagtgagctttttgcagtgttttatttattgattctcttagttctcgttttcatcggagaagaaaagtcaaaaaacaaaaatttcatggctcggaaattctttgtcggtggcaactggaaatgcaatgggacaactgaggaggttaaaaagatcattacaacattgaatgaagctgaagttccttctgaggatgttgtggaggttgttgtgagccctccatttgttttccttacctttgtgaaaagtctgttgcggtctgatttccatgttgctgctcagaactgttgggttcgcaaaggtggtgcttttaccggagaaattagtgctgagatgcttgttaatctgagcattccatgggttatcatcggtcactctgaaagaagggctctcttgaatgagtccaatgagtttgttggagacaaagtagcgtatgcactttctcaaggcttgaaggttattgcctgcattggggagactcttgaagagcgagaatctggctctaccatggctgttgttgctgcacaaaccaaagcaattgctggaaaagtaacaaattgggacaatgttgttttggcttatgaacctgtttgggccattggaacagggaaagttgcaacccctgctcaggctcaggaagttcattgcgagttgaggaaatggcttcatgagaatgttggcggtgacattgctgcatcaactagaattatatatggaggttccgtaaatggagcaaactgcaaggaattggccgcacaacccgatgttgatggctttttggttggtggagcttccctaaagcccgagtttgttgatatcatcaaggccgcgacggtgaaaaagaattagaagttgaaaagcaggaattaaaggtgaaacagaaacaaccttctgggaaactttaatttttgtagttgagatctttccttggaacctaatgtctgttgaaaatttcccgatgtaataagccaaatttaacaatgtgttttttttgtgcggtggttgaggcattgatcctcatttcggactttccctgaatttaccttacaaattgctattgctctaatctttgatctttgcagttgaattgcctatt

SEQ ID NO: 191571 - DNA, 888 bp, Gossypium hirsutum
  unsure (1)..(888): unsure at all n locations
nnnnnnnnnnnnnnnnnnnnnnnnnnnngaaaagagaaagagtggaaatagattacgatatcatacttacaaatatttattagaacacaaataaaagcataggacacattgaattcatacagaattaaaaagacaaacatgcaagaaaatacaaagctcctcccctgtgactgcatattgatctaaacatacatattcagatcaaaatacatgagaaaggaagttgtcactttattcattaaatagatgaatagtgcttcaagtagcggcaacaatagcaacatgtgatactgtttagcttgcttgggtgaggtgggcgtcaatgtctttagagatatcttgaacgaattgcagcagagtctcaggatgcgcaatcccaccgtgcagcttctcgtattccaaagtccagtgcactacgctgccactaccctcgctcttgggcgaaacttgaatcgtgattacaaagctcttatactcttccattagatctccttcgatcactctgaaagtgaccaaattcttatcagggtctactgcttccactacttcctttgcctttttagcctttccatcatgcacataactccaatggacaatggtaccgactttcccccattcaccttcatgtaaatcgcatccttgaatcttgtcatagcaagtatggtgcacatggtgcggtttgtgggcaaacatttcatggaactgctcaggagaagccttaatctctacatctgcctcaagcttacctgtcagagctgaagacgccattgtttcaccaacaatatttaatgtgggagtggtttgtttcggacgcggtgggagtggtttgcgttgatgtttaggctagacattatttatagactagtgtcaatgtctaaggcaatactc

SEQ ID NO: 191572 - DNA, 520 bp, Gossypium hirsutum
cttcattttttaatttgttagttttacaaacaaaggtgggtaaagttttattttcagtttttttttttttttttttacgatatcatacttacaaatatttattagaacacaaataaaagcataggacacattgaattcatacagaactaaaaagacaaacatgcaagaaaatacaaagctccctcccctgtgactgcatattgatctaaacgtacatattcagatcaaaatacatgagaaaggaagttgtcactttattcattaaatagatgaatagtgcttgaagtagcggtaacaatagcaacatgtgatactgtttagcttgcttgggtgaggtgggcgtcaatgtctttatttttgtagttgagatctttccttggaacctaatgtctgttgaaaatttcccgatgtaataagccaaatttaactatgtcctttttttttgcggtggttcacgcattgatcctcatttcggaaaaaaaaaaaaaaaaaaacaaaaaaaagggcggccctcgcgatc

SEQ ID NO: 191573 - DNA, 711 bp, Gossypium hirsutum
gggctgcaagctatgccacttgacccgcttaatgattgtccaagaaatgcatattatatggatggggtgttcgccgccggtgatggtgtaccctatgtccgatcaaacatggtctgcatgtttgagaggtacacaggtgatatagggtggcggcatgcagagagtccaattaccggtatggagattaaggaagtaaggccaaaggtgacattagtggttccaatggctgcatcggtggctaactatgattatattgttgactgggagttccaaacagatggacttatcaggattaaggttggacttagcggcattttgatggtgaaagggactgcatatgagaacatgaatcaagtggaagggcaagaaaatctgttcggtacccttctgtctgaaaacgtcattggcgtcatccatgatcattacatcacattctacttggatatggacatagacggctctgataattcctttgttaacgtaaatatcaaaaggcaagaaacttctccaggagagtcaccaaggaaaagctatctaaaagctgttagaaatgtggctaaaacagagaaagatgctcaaattcaacttaaactctatgacccatcggagttccatgttatcaatccaactaaaaagacaagggttgggaaccctgtcgggtacaaggttgttcctggtggcacagcagctagtttgctggatcatgatgac

SEQ ID NO: 191574 - DNA, 637 bp, Gossypium hirsutum
gttctgggttttagctgcaattttttgcactgaaagaggacttggctgtgaaaaattgaacttcaagctatttaggactctttaaattttctagtttgtgtcatagtgctgggaaaatggcgaatgctatatcgatatcgccatattttagaccttcagatactagatcaatgggggtacttaatgttcttggtgggagagtattaatggagaactctttagggaaacttaggtgcgggtcttcgagtccgagccaaaggtctaatatgcctcattttagatgttccaccaactcccatagcgttagtccgtatcaaaataaggacccttttctgaatatgcacccagaagtttcgatgcttagaggtgaagggaatcctatagtaacaaacccgagaaaggatagctccagtcccgagagcttagggggcatgacgggttcaagtaattatagtgaggctaagatcaaagtcattggtgtcggaagcggtgggtcaaatgctgttaaccgtatgatagagattgctttgaaaggtgtagagttctggattgttaacactgatattcaagccatgaaattgtcacctgtctttcctgagcaccgtttgcaaattggtcaggagctaactcggggtct

SEQ ID NO: 191575 - DNA, 656 bp, Gossypium hirsutum
aaaatccttactttctcagaatagatcacatcgcagtttctcatttccctcgcttcacttattttgttcacatatggacggactgatcaagggtttactggacgtcgctattggccacgagggagataatgagtctcaagatgaacgccccagatccagttcggcgcaggcggtgtcaggggatcaggatcaccaacgagatgaacgctccagatccagttgggcgcaggtggtgtcaggggatcaggatcacgaaaaacaggtgcagagccaatggcagggttcgggttcaagaccttcggggaggacccacaagaccgagtatgggggatatgaaaaaaatgaaggtgatgagcgacgacatggttataaccaaaataagtggaacagaaaggagcaagaagaggagaataatgatggctgggaaactgttggcaaaaagcctcgaagacggccacaaaaggttaatatggatcactggcaagggtataaacgacctcctagtgagcaagaatactctgatgaagttggaactggtactagcatcgaaccttcagaagaggaacttgctgactttttgcaagcttgcaacaggctgtggcaacttgatttaaaccgtctggaaccttgaaaggattatcaaattgactgtggtg

SEQ ID NO: 191576 - DNA, 725 bp, Gossypium hirsutum
  unsure (1)..(725): unsure at all n locations
tagtggtttaaggtttcatacattntcatatttcagtaggcatcttattatcaaacagaacctttggcagaatgggagtcagcaatatattcaaccctgcttcactttgcttgctcaaatccaacgttcgtcaaactcaaaggcccattcgctcttttgaaggaaatcaaaaggggctcatcatggctactttctcttcatcgccttccacggtttcggttgagcatgtcaatcagaagttgagtggtgactcttttattcgaccccatttgagaaaattgtctccttatcagcccattttaccttgtgaggttttgtcagcaaaactgggaagaaagcctgaggatatcatcaaattagatgcgaatgaaaatccttatggcccacctccggagattgtttgtaaggttcttgaagctttggggtcactgaaattcccatacatctaccctgatcctggatctcgtcaattgcgtgctgcccttgctgaagattcggggattgaatctgattatattcttgtaggttgtggctgtgatgaacttattgatctgatattgcgatgcgtgcttgatcctggggaacagatgatgactggctcaacctcacatgtatgaattgatctggtgtaaggagccaattatatattcctggagcaacttcgcttgatatgacatattttagttttagagtntagtaagggttatgtctagtcatagactaaa

SEQ ID NO: 191577 - DNA, 1765 bp, Gossypium hirsutum
acaaggttgtttttgtagtttagtttatgggctgcatctcgacaccgacaccgtcaccgtcgcctctctatattccggaaagtttctactttagccaattttttctcccagtaactatggcttcagatgcagatatggaggattatggattcgagtactccgatgaggaacctgaggaacaagacgttgatatcgagaatcaatattacaattccaaaggtttggtagaaacagaccctgaaggagctctagctggttttgctgaagtggtcagcatggaaccggaaaaggctgagtggggattcaaagctcttaagcagactgtaaagctctattaccgattagggaggtataaagaaatgatggaggcttacagggagatgctaacatacatcaatcatgcagtgacacggaattacagtgagaaatgtataaataatattatggactttgtgtctgggtcagctagtcaaaattttgggctcctgcaagaattctatcagaccactctaaaggcccttgaagaggcaaagaatgagagactttggtttaagacaaatcttaagctatgcaagatctggtttgatatgggtgagtatgggcgaatgagcaagatttgaagaactcataattctggcaaaaggaagatgaacagacgatcaaaagaagggaagtcagcttctggaagtatatgcaattgaaattcaaatgtataccgagacaaagaacaacaaaaagctcaagcaattataccagaaagcacttgctgtcaagtctgcagtaccacatcctagaatcatgggaataattcgtgaatgtggtggcaagatgcatatggctgagcgtcaatgggctgaggcagccacagatttctttgaagctttcaagaactatgatgaagctggaaatcagagacgtatacaatgcctaaaataccttgttctagctaacatgctgatggaatctgaagttaatccttttgatggccaggaggcaaagccgtacaaaaatgaccctgagattttggcgatgacaaaccttgtagcagcctatcaacgaaatgagataatagagtttgaaaaaatccttaagagtaaccgaaggacaatcatggatgatccgttcatccgaaattatattgaagatcttttgaagaatgtcagaactcaagtactacttaagcttataaaaccatatacgagaatccggatccctttcatatcaaaggaactcaatgtgccagaataagatgtagagctgttcgttggtgtccttgatcttggataatcgaatcgatgggcatattgatcaagtgaaccggctgttggagcgtggtaacaggtcgaagggtatgaagaagtacactgctatcgataaatggaacacacaactgaggtccctttatcaaaccgttaacaacagggtttattgagaaagcaaaaatgctatatgatataatccctttggctaaggtactcccctttctttttggggctacaagaatatgcttgctctcttgtgtcaggtgactttagataatctagattcgaaagtttatgttttgttttggttagtcaaagttttattcttattcaatgacagaaaaaagaaaacccgatatatttgcctgtttgcaagaattttgattccgggttgacgcttgtatatgaagtgatgatgttgtgtagatctgacatgaaaaaagtgatactagcactataaatatatgatggaatcaaaatctacggtaaaaaaaaaaaaataa

SEQ ID NO: 191578 - DNA, 642 bp, Gossypium hirsutum
gttataaatgactgcagtgagtatgatgttgaaggtgttgaagatgagccgaacttcgatgtgcaagagcgcaaacccaggactatcagttctaatttggtcatggagagaatgagggctatccaacaaccaccttattcgattaagggggaagttgtcggtaatttggatttcacgcgaaagaggaaaccatccaatgatttaaacatgggtggacaaaaaatctacacttgggagttcctccagtgcccttacagtgaatttcgtttgggttttcatgataggactgccagggacaatcatcaattgacttgtccatatagaaattcctctgcacagtttggtggttcgaatttcagtgttaatgaagtaaaaccagttattttccctcggcaattcggacaatccaagccagctgcaccgcaggttacatctgtctcaacaccctttgatctatccggacttggagttccagaagacgggcagaaaacgatcggcgaactcatgtcagtatatgataacaacattcaaggcaacaagaacatgaatcctagtaacaatcttgttaccaaaggtcaaaacgttcttcagccgaaaatacaacatcagcaagatgaattcttccgcggtcaaggagtcatt

SEQ ID NO: 191579 - DNA, 1263 bp, Gossypium hirsutum
ctaggaaggaaaataaatgggctggcttgaatgaatgaaacgcgatgcgccaaccctccacttttactctgcttattgctaatttgcgccaccgtcgcctcccgccctcccctcgcccacgccggtgccggttacagtaagatcgacgagatctcctgtcccagtcgccggcgaatcatgtccaaatctcgcgtttatactgacgtcaacgttcttcgtcccaaggagtactgggattacgagtctctcgctgttcaatggggtgatcaagatgattatgaggttgttcgaaaagttggaaggggaaaatacagtgaggttttcgagggcataaatgtcaacaacaatgagcgttgtataataaagatcctcaagcctgtcaagaaaaagaagattaagagggagattaaaatccttcagaatctatgtggtggcccgaatattgttaaacttcttgatgttgtaagagatcagcactcaaaaacaccaagcttgatatttgagtatgtcaacagtacagatttcaaagttctctacccaactttgactgactatgacattcgctactatatatatgaacttctcaaggcattaaattactgccattcacaaggaataatgcatagagatgtcaagcctcacaatgtcatgatagatcatgagctgcgcaaacttcgcttgatagattggggacttgctgaattttaccatcctggcaaagagtataatgttcgtgtggcttctcggtactttaaagggcctgagcttctggtagatttgcaggactacgactattccttggacatgtggagccttggttgcatgtttgctggaatgatattccggaaggaaccattcttctatggccatgacaaccatgatcaattagttaaaattgccaaggtactaggtactgatgagttaaatgcttatctcaacaaataccatttggagcttgatcctcaacttgatgctcaagttggaaggcacagccgcaaaccctggtccaaatttattaatgcagataatcagcatcttgtttctcccgaggctattgattttcttgagtaagttgcttcggtacgaccatcaggacaggctaactgctagagaggctatggcccatccttactttgcacaagtcagggcagcagagagcagcaggatgcggactcagtaactcaatttccttgggaggatttcatttgtaaatcagaaccagactcatctggggtaagagatttaatgtgttgtttaatgttc

SEQ ID NO: 191580 - DNA, 786 bp, Gossypium hirsutum
tttcacgcgtccgtccacgcgtccgaccacgcgtacgtccacgcgtccgtccacgcgtccgcaaaatccaaaacctctcgaaccgagcctaagcgtctccaaaaccactcaaagtaagaaatgatatatactggctaggcttgaatgtttgaaacatctccgccgcacccccagccgtccagtttgactctgcctcttgctagtttactccctcatcgcctccccttcggccaccactgttgcgataaccgttagatcgacgagatctcctgtttcaaccgcagtcaaatcatgtccaaatctcgcgtttatgctgacgtcaatgtccttcgtcctaaggagtactgggattacgagtccctcactgttcaatggggtgatcaagatgattatgaggttgttcgaaaagttggaaggggaaaatacagtgaggttttcgagggcataaatgtcaacaacaatgagcgttgtataataaagatcctcaagcctgtcaagaaaaagaagattaagagggagattaaaatccttcagaatctatgtggtggcccgaatattgttaaacttcttgatgttgtaagagatcagcactcaaaaacaccaagcttgatatttgagtatgtcaacagtacagatttcaaggttctctacccaactttgactgactatgacattcgctactatatatatgaacttctcaaggccttagattacctcggtgcattgcccttccgtctgggagagcagcttttccacagggttggaaaatccgtgccgggtcttgtc

SEQ ID NO: 191581 - DNA, 978 bp, Gossypium hirsutum
  unsure (1)..(978): unsure at all n locations
gcttaaattagccaaaaaggggaagattttttcgcggagggattaatattggtggaaacccaagaaggtattgactaagggaactggccgaagatggatactctggtgtcgaagtcagagttactcccatgcgtactgagatcattatcagagccactcgtacccaaaatgttctgggcgagaaagggaggaggattagggaactgacctctgttgttcaaaagcgattcaagttccctgaaaatagcgtggagctttacgctgagaaggtcaataacagaggcctttgtgccattgctcaggctggtctcctttcgctataagctcctcggaggtctcgccgtccgtagggcctgctatggtgtgcttagatttgtcatggagagtggagccaagggttgcgaggttattgttagtggaaagctaagggcacaacgtgccaaatccatgaagttcaaagacggatacatgatttcttctggtcacccagtgaacgagtacattgactctgctgttcgacatgttcttctgagacagggagtactgggcatcaaggtgaagatcatgcttgactgggatccaaagggtaagcaaggcccaacaactccacttccggatcttgtcaccatccaccctcccaaggatgatgaagttatcaaggtggaagcacccgtgccgaccgagattgaacttccgccagtggcttaaagccgatgatgactgttatgatagtcatctatttgatatttggagcatgtcaagtgtcttagattttgtagtttttaagtttggcacctaaaatgaacttatgctggatgctcttttatgaattttcctttggtgtttctcaaattttgttatacttaaaacttattacttgataattttattcaaggattttttattcctttttaaaaaaaaaaaaaaaaaaataaaaaaaaaaaaaaaaaaaaattctgcggctcgaattcttcnnnn

SEQ ID NO: 191582 - DNA, 705 bp, Gossypium hirsutum
  unsure (1)..(705): unsure at all n locations
ggagttctcgcagtccgtagggcctgntatggtgtgcttagatttgtcatggagagtggagccaagggttgcgaggttattgttagtggaaagctaagggcacaacgtgccaaatccatgaagttcaaagacggatacatgatttcttctggtcacccagtgaacgagtacattgactctgctgttcgacatgttcttctgagacagggagtactgggcatcaaggtgaagatcatgcttgactgggatccaaagggtaagcaaggcccaacaactccacttccggattttgtcaccatccaccctcccaaggatgatgaagttatcaaggtggaagcacccgtgccgaccgagattgaacttccgccagtggcttaaagccgatgatgactgttatgatagtcatctatttgatatttggagcatgtcaagtgtcttagattttgtagtttttaagtttggcacctaaaatgaacttatgctggatgctcttttatgaattttcctttggtgtttctcaaattttgttatacttaaaacttattacttgataattttattcaaggattttttattcctttttaagattcatgacatccttttggcttctgcatgtgattatttggttcgtatattatacatgtatatgtaaccacggagtagctattaaaggttttttttgcgatgaaaaaaaaaaaaatatag

SEQ ID NO: 191583 - DNA, 1029 bp, Gossypium hirsutum
tagttctagatcgcgagcggccgctgcgatctagacggacgcgtgggagccggttcacacatctcacttctctgcagtttcactcccttagagagaaaaaaccatggcggccgcagctcaaatcagcaaaaagcgaaagttcgtcgctgacggagtcttcttcgctgaactcaatgaggtcttgactagggaactggccgaagatggatactctggtgtcgaagtcagagttactcccatgcgtactgagatcattatcagagccactcgtacccaaaatgttctgggtgagaaagggaggaggattagggaactgacctctgttgttcaaaagcgattcaagttccctgaaaacagcgtggagctttacgctgagaaggtcaataacagaggcctgtgggccattgctcaggctgagcctccattcgctttaagctcctcggaggtctcgccgtccgtagggcctgataaggtgtgcttagatttgtcatggagagcggagccaagggttgcgaggttattgttagtggaaaggtaagggcacaaagggcccaatccctggaatttcaaggcgggaaaacgatcttcttttttttaaccaggtgaaggagaacatggactctggtgttcgacatgttcttctgagacagggagtactgggcatcaaggtgaagatcatgcttgactgggatccaaagggtaagcaaggcccaacaactccactcccggatgttgtcaccatccaccctcccaaggaggatgaagttatcaaggtggaagcacctgtgccgaccgagattgaacttccgccagtggcttaaagccaatgataactgttatgatagtcatctatttgatatttggagcatgttaagtgtcttagattttgtagtttttaagtttggcacctaaaatgaacttatgctggatgcttttttctgaattttccttttgtgtttctcaaattttgttatacttaaaacttattacttgataattttattcaaggattttttattcctttttaaa

SEQ ID NO: 191584 - DNA, 328 bp, Gossypium hirsutum
aactggtctgagcttctggcaggcctataccttggaacctggggctgagggtgccaaagcttaaagaaatttacgaagaactgcagaagaaaccggttagtactggctgctgactaggattcttaatggtttattgaataatttgggtggatggccctccttaactgtactttggtcggggcaaggaagaaattatggaaatgcagaaaaatcaggtaatgctcatttcttccatttccaccatgcacttgtattagcattcacaacagcaactagctttcagatgggtttcaaagcctaaagattactggatttttgcaaattgtag

SEQ ID NO: 191585 - DNA, 504 bp, Gossypium hirsutum
acttgacatgctggtggaaagtaacttggatctggaggacctatccaaggattcgatggccatgctttctgagattcagctgctaacccgagcagtgaaaagaacgtgtaggaagatggctgacttgctcatacattattctatcagtagtaacgatggatactcgaataagtatatctttccaccgaatcttgagggtgctggtggaatcacacctttacatttggctgcatgtacatctggttccgatgatatggtagatgtgctgacgaatgatcctcacgagattgggttaacctgctggagttcccttctggatgcaaatgggcagtctccatatgcctatgctatgatgagaaacaaccattcttacaacaaattggtggctggtaaatatgctgacagaaggaatggtcaattttctttgactattggtgttgaggatcagcactcatgagtgtctgcagtgcagttaaacaagataagtttgcagttcaaacaaga

SEQ ID NO: 191586 - DNA, 610 bp, Gossypium hirsutum
ggggcccaagccttccgccaacccttccgtttaaatctttttttcttctggcccttttttctatttctgtgttcatacgatcttcaatctcttcaaacattttagtgttatttgtccatgaaggcaatgaagcccggagtgtcttcattgaacccatatgcagcatcatacatacctcttgccaaaagggaggccagtgataatgtgacagccaaagatattaaacacggcaatgagaatgcttggttcaaaccttcctcacactttgcatataacccgcacagtagcaatgcttttcttggctcttcagcctatggtactgaaaagcaccaggttgcagaaggttctgcagtgaaaagccatcctgctcatggttctttgatgcaaaatcctggtgaaatgactgacaagcagattgtggatgaagaatttgacatggatttggagtatcttcgcatgacatttcctggtttgtccaatgagtctcttttggatgtctacttggcgaatgatggagactttgaagccactgttgatatgctgaaccaacttgagatgcacactgttgagtcatctgaaactcttcccgacactttggatatcggtgatc

SEQ ID NO: 191587 - DNA, 449 bp, Gossypium hirsutum
attgtgtgttattctaatcgccgatctcttcaatctggggttcttcttgcccttttttctatttctttcttcagacgatcttcaatctcttcggacattttaggcaatgaagcccggagtttcttcattgaacccatatgcagcatcatacatacctcttgccaaaagggaggccagtgataatgtgacagccaaagatattaaacacagcaatgagaatgcttggttcaaaccttcctcacactttgcatataacccacacagtagcaatgcttctcttggctcttcagcctatggtactgaaaagcaccaggttgcagaaggttctgcagtgaaaagccatcctgctcatggttctttgatgcacaatcctggtgaaatgactgacaagcagattgtggatgaagaatttgacatggatttggagtatcttcgcatgtcatttcctg

SEQ ID NO: 191588 - DNA, 689 bp, Gossypium hirsutum
ttttgtattgtaaaccctttgccaacgccgtcgcagtactctctgaaccgatggcggaccaatctcctgcggatcagaccccaccgttctccggcatgcagtctctctccgtcgattctcaacctccctcctcctcttcaactccacagatgagtttagaagaaaagtttaagattataagaagtgtacgggaagaatgtattcaagaggatgaactgctaaatcttctaaatcacaaacctgaacccatttgctatgatggcttcgagccttctggcagaatgcacattgctcagggagttatgaaggcaataaatgttaacaaactgacctccgctgggtgtagagtaaaaatctggattgcagattggtttgcacagctaaacaataaaatgggtggtgacttgaagaaaatcaaagtagttggacagtatttgattgaaatctggaaggcagttggcatggacctgaatgaaaaggttgaattcttgtggtcttcagatgaaattaactccagggcatcagagtattggccacttgtgatggatatagctcgcagaaacaagctgcccaggataatgaggtgttgtcaaattatgggccgtagtgagcaagatgagttgtcagctgcccaaattctttacccatgcatgcagtgtgctgacatatttttcctcaaggcggacatt

SEQ ID NO: 191589 - DNA, 827 bp, Gossypium hirsutum
  unsure (1)..(827): unsure at all n locations
aaacaaatgccccaagaaaatatcaaacacgacaatgcggaatccaatgcgtccgtaccttcttctatctctagttttcttcttcaacctgtatcattcaatggcagtttcagatcctactcatcaagccctccttcaatgtttaacccaatccattcccaccgacacagcttcctccattatcgtctctaaatccaaccctccatatacttctgttctacgtgcttacactcgtaacgcccgtttcaacacttcttcaacccctaaaccactcatcatcatcactcctttagatgaaccccatgtttccgccgccgttatttgttcccgaaagcttgggtttcaactcaaaatccgtagcggcggccatgatcacgaagggttgtcttatggttttgataaacccttttttgttctcgatatgtttaaatctccggtctgtttctgttaatatgaccgatgaaacagcttgggtcgacgccggtgctacactcggtgaacttttttataacatttggaaaaacagtaaagttcatgagtttcgggcgggggtttgtcctactgtcngcgtcggtggtcatttaancggtgctggacggtttgttggttgatcatgtcgtaaatgctaaattagtcgacgttaacggaaaaatccttgaccggaaagcatgggcgaaaaattttttgggggctataaaaaggcggcggagcagcccgtntcggcgttattatcttatgaaataaaattcatccctgtaacggaaaccgtcaccgtcttcagaatcgaaagatcgttaancgaanacgtcaccccccccccccccccg

SEQ ID NO: 191590 - DNA, 725 bp, Gossypium hirsutum
gttaacaccagccagccaccctgtctgcgaagtcaagtttcagagagtacattggttttcatgccaagccaggaaaaaggtagtactacatagttgttgagttaagtcttgaatcttgagtccgatcatgagttgcaacggctgccgagtcttacggaaaggatgcagtgagtcttgtatattacgtccttgtttgcaatggattgagagccctgaagctcaaggccacgccactgttttcgttgccaagtttttcggccgtgctggtctcatgtcttttatttcaggccgttcctgaatctcaacgccctgctttattccagccgctgttgttcgaagcttgtgggagaacagtgaaccctgtgaacggagccgtggggcttttgtggaacggaaactggcacgtttgccaagcggcggtggaaaccgtcctgcgaggaggatctctacgttccatgcctgaattcatggctccgacgccagcatccgacgaagcgtccgaagccacgtgcacggacatgtggaaattgcgggagacattccccgatccccacctccaactgtcgattctcaaattcgagatccagggtttcacccaagcgtaaaagagtcgaagaagaattcaagaaactacagccctctgatctagatcttggcttgaccccgagcttttcgggcaagcgagttaccgataatcgtcgaccagggactccttctatgaactc

SEQ ID NO: 191591 - DNA, 889 bp, Gossypium hirsutum
  unsure (1)..(889): unsure at all n locations
ggcttttggtgctttcgtcccgttttccctaattcttaacgaagaaagaaaagagaaagacagcgagggaaatcttcaaccgtgggaggtcaaatctttctctgcgaacaaactaagtctctagccatgggaaacaccgagaagctcctgaaccagatcatggaactcaaattcacgtccaaatccctgcagcgccaggccaggaagtgcgagaaggacgagaaatctgagaaattgaaggtcaagaaggccatcgagaaaggtaacatggacggagctcgtatctacgccgagaacgccattcggaagcgcactgagcagatgaactacctccgcctcgcgtcccgcctcgatgctgtggttgccaggctcgatacccaggctaagatgaccaccatcaacaagtccatggctaatatcgtcaagtctctcgaatcttccttgaacacaggcaatttgcagaagatgtcagagacaatggatcaatttgagaagcagtttgtgaatatggaggtccaggcagagtttatggagagtgctatggctggctccacttcattgtccacaccagaaggtgaggtcaacagcttgatgcagcaagtggctgatgactatggcttggaggtctctgttggggtgccacagcccgccgctcatgctgtgccgaccaagacacaggagatggttgacgaggacgatttgtcgaggcgcctcgccgagcttaaggctagaggttagaagaaccgatggtatccatttggatgatcttgtgatatataatagtactatgatgtttgggattgtaagtgctggttgaaacatctcattccatatgntaaattgtctgaattgggtttccctttataattttaaatgctgcatttgtctc

SEQ ID NO: 191592 - DNA, 449 bp, Gossypium hirsutum
cccacgcgtccgatcgaaaaacacagaacggtcaaaacgcgatcaacacacagaaaagccccattctgatccacatttgctttaaaatcctctcaaacatcaaaatttgtttgcaaacagaccaaaaaaatccagctatgggcaatacggagaagctgttgaaccagatcatggacctcaaattcacctccaaatcgctgcaacgccaggccaagaagtgcgagaaggaggagaaatctgagaaattgaaggtgaaaaaggcgatcgagaaaggtaacatggacggtgctcggatctacgccgagaacgccatccgtaagcgcactgagcagatgaactacctgcgtctcgcttcccgactcgatgctgtagttgccaggctcgatacccaggctaagatgaccaccatcaacaagtccatgggaaatatcgtcaagtctctcgaatct

SEQ ID NO: 191593 - DNA, 427 bp, Gossypium hirsutum
gcgaaaccatccagaaaaagacctaaaacggtatcaatgttagcttgagtctggcttcacttcacactctcactggactaactcccttctctcaaacccaaaacaatcagacagacagcctgtaatggacacaacttcaaattcaaaacacaggccattttcgattaaactatggccccctagtgaaagcactcgactggtacttgtgcaacgcttgacgaacaatctctccagtaattctatttttacccagaagtatggtgctcttaacaaagaagatgccgaggagaatgctaagaaaattgaggatatagctttcaacgtggcaaatgaacagtatgatagggagcctgatggtgatggaggtgctgcagtgcagctttatgccaaggaatgtagcaagcttttgtttgaggttcttaaaaga

SEQ ID NO: 191594 - DNA, 379 bp, Gossypium hirsutum
gaaaaccatacaaacaaatcctgaaagactctcgcgttacaacgtaaagagcaaaatgccccaacagcaaaacgtgtagcaataaggcaaaaacacggtagggaagcaaggttgtttatatatacatataaaagttataacggaggaaaggtcgaacgattcaaaaaaacccaacgatggctatgatggtacggtcgctcgctaggccgcttgaacgttgccttgggttaagggccggtggggatggtctcatgtggcacactgatcttaaacctcatgcttccggcgattactctatcgccgtcggtcaagccaataaaaacctttgagatcaaagccaaggctttacatcttctttgggtacctatgttggtggtta

SEQ ID NO: 191595 - DNA, 502 bp, Gossypium hirsutum
cccacgcgtccgctcttctcagtccctctgcagcaatttctcttcgactcaagttgaatcgttcaagtgccgtatctgcaaatacaccctccaaaatttgttgtacttttcctggaaatggaagatgtcaaaggttaagtttcaagaccaaagctgcgggttcagttgaaggaaatgtactggacaaagaatcggctagtatcagtgacaagatagattatggagttgttggtattcaccatgttggaattctatgtgaaaaccttgaaagatcgcttgaattttatcagaatattttaggtcttgaaataaatgaggctaggccacatgataagcttccatacagaggtgcttggttgtgggtgggttctgagatgatacatttgatggaacttccaaatccagaccccttaatcggaagacctgaacatggaggccgagaccgtcatgcttgtatttcaattcgagatgtatctaagctgcaagcaatccttgacaaagc

SEQ ID NO: 191596 - DNA, 421 bp, Gossypium hirsutum
cccatttccagcaacaccaagtcaatacacctacactaattgccggaagtccgtagcttggagcttgtcctgactgcttcctccactaattgccggaagaagccggctgtaaaagaaagatcttttacttcaacctggcttcggttgaccctctttcggtggtagtaagagcagaatcttgggttggtgcttgaagtaagggtcatcaaagagacggatcagtttccttttaatttcaccggtgattcttttggccatggaaaccctagatgaccagaaacccgaggaagaggaggtgatagataaagaaaatgaagagggaagtgaaaagttgaatcgttcaagtgccgtatctgcaaatacaccctccaaaatttgtcatacttttcctggaaatggaagatgtcaaaggttaagtttc

SEQ ID NO: 191597 - DNA, 499 bp, Gossypium hirsutum
  unsure (1)..(499): unsure at all n locations
attcctcctaacgcgacctccctctctgcctgtctgttattcaaatctccgaccaagtgagatttcaaggaactgcagcttagcgagctgcggtctaaacccagttttgtattaagagtaggattaagactttaaaaaaagatggcattggtggtaatttgtgggcagccgtgcagtgggaagtcgacagctgcgaaatgtctagctgaagctctgaatgaatcagagtgcaaacagactgtaaggatcatcgatgagacttcatttcatcttgatcgtaatcagagctatgctaatatgccatcagagaagaatttacggggagtgcttaggtccgaagttgataggtctgtctccaaagataatatcattatagttgattctttgaacagtatcaagggttatcgatacgagttgtggtgtttggctcgtgctgctgggataaggtactgtgtgttgtactgtgatgttggagaatcgcactgtangaaaatggatg

SEQ ID NO: 191598 - DNA, 455 bp, Gossypium hirsutum
aaattccaaatgggaagcaccgccgtcgagaagccagcggggagagcttcaccgagagatggatgagcttcatcgccagcaacccgaggttacagagagggctgagagatcctcgaggactccgaagaggaggactgtcaggcatcggtcctcgtaacttcgccgccaatggttctcgccagcgtggctttcttcgacatgcggataggattgatggagaagatcaacctccggctaagaggcgattgtcatcagctgttgtcaaggttgaagatggagagattgttgatgatgaagtagcaaaggatgccagtgacatggctgtcgaaggatctggtgcagtacatgagagtgatagaaagctttcgactcagcagcaaagtggttggtctagaagggatgtaaatcaaacaccactgaagaaggatgccgaagttccggttgctgagcatgtt

SEQ ID NO: 191599 - DNA, 580 bp, Gossypium hirsutum
cacgcgtccgggaagaaatagaggtaccaaaaccaatattgatgccaatttcaggaaaggagcaaaagtgtgttgggaatatatttagttgcagttttaatgcaagagagaagaaactgatatgtgtgaccagtggcaactcttacttgggttctttcattgtcaaagagctattggctcatggttaccttgttcgagtaaccattcaacacccagctgaatttgaagatgtgaaagacctgctaggggtggaagatttaaacctattggaaagtgtagttgtaaccaagatggaagatttacaaagcctttgtgatgcttttagaggttgccatgctgtttttcatacatcttccttcattgatccacatggtatctctggttattcagaacaaaaggtgtttttggagactgaagtggcaaggactgtcatggaagcttgtgctaaggcagcctatataaagagatgcgtcttcacttcatctctattggcatccatttggaggaatgaaaatatagatggaattattgatgacagctgttggagcagtgaagaattttgcagagaaaaaaagctatg

SEQ ID NO: 191600 - DNA, 1116 bp, Gossypium hirsutum
cggccgcgtcgacggaaggtatcctcaatattgtgccgcatataatgaactacaggctgctggagttgaatttcctccctgagaagagaatcctgtaccattatttactccacctcagacccacccagtaggtcaccaccctgcttctacatatgaggatcctgctatggaggcctctctacagtctgatgcttctggcctcagcttgccggagattcaaaatgcttctggactagcagaaatattaatggaaatgcttagtgcattggatcccaagactcctgaggctgtgaagcaagaagtcattgttgaccttgttgatcaatgccgttcttaccaaaagcgtgtgatgcttcttgttaatagtaccacagatgaggaacttttgtgtcaggggttagcactaaatgacagcttgcaacgtgttctttgccggcatgatgacattctgaaaggaaatactgttccgactggagcagtagcagagactcctgttgtgccatttgttaatattaaccatgaggatgatgagtcggaagatgaatttgctcagctatctcatagatcatcaagggataattctcaaggacatggcaggagagcgcctaaaagtgagactgggcgagttgatccatttcttcctcctccacccccgtcaaaaagtctggttgctacaaattccggcatggttgattaccttagtggtgatacctacaaatctgagaattcccctgaaacaagagaatctgcagctcattctgttcgcactcgtacatcatcacctcctgacccttcaggtgactctggttcctcaccgatgctcagtgggcagcctatatacgacaaaccggcttccctgagcaaatctgctgattctgagttgctgcctccagcaccctgggacactgctgcaggaaaccttccaccaccgccttcgaagtttaatcagagacagcagttctttgaacaacaacatggttatcctggtggttcttctaactccagtaacggatcaggttcctcctatgatggcttggttggacaaactcaaaatctttcccttaactcaacgaccccaaccaaacaagaaaaaccagaagatgctctcttcaaaga

SEQ ID NO: 191601 - DNA, 1631 bp, Gossypium hirsutum
  unsure (1)..(1631): unsure at all n locations
cgctttacagcggtcgaggaatggggaaaaatccggttggtttggtttacagcaaaggtaacagctccggtagtaatttatgtttgaccggttcgctcgatccggctttggtacgtgggaaggtagtgctttgcgatagaagaacaaccgcccgagttgaaaaaggagccgtcgtgcgcgacgcangcggcgtcgggatgatattagcgaacaccgaagctagcggtgaggagctggtggctgacagtcacttgttaccagccgtggcggttgggaggagggtcggtgatttgatcagagaatacccacggtccgatcccaatccaaccgccgcgcttgtcttcggtggtacggttttggatatcaaaccatcaccggttgttgcagcgtttagttcccggggacccaatatggtgacgccacagatcttgaaaccggacgtgattggacctggtgtcaacatattagctgcttggtcagaggctattggtcccactggtttggccaaggactcgaggaagaccatgttcaacatcatgtcaggtacatcaatgtcatgcccacacatcagtgggctagcagcgttgatcaaggctgctcatccagaatggagcccaagtgcaatcaaatcggctctaatgaccactgcctacacccaagacaacaccaactcgactcttagggatgcggcggacggatcgttgtcaaacccatgggcacatggggctggccacgtcgatccccaaaaagctctttcaccaggcctagtatacgacatctcgaccgaagaatacatcacattcttgtgctcactcggctacaccgtcgaccatgtcaagaccatagtgaaacgccccaacattacatgttcgacgaaattcaaggaccctggtgaactcaattacccatcgttttcagtcttgtttgggggcaaaagggttgttcgatacactcgtgaattaacaaacgtaggccctgcaaggtccatatacaaagtcacagtaaatggaccatcgacagtagggatctcagttaggcccaagacactcatctttagatccgtgggtgaaaagaagagatacacagtcacctttgtagctaaaagaggaacaagcccaatggctaaacctgaatttggttcaatagtatggggcaatgctcaaaaccaagttaaaagcccagtttccttctcatggtcattgatgtgagagtgtcccacagtttatatataattctgggtattctttccctcaatgaacctcacacaggacaagaaatctggtgcaaaaagggaccctcatccatggccgaaacctttttcattttgtggtttgtaatatttgtttacatttggatttaagttaatgatggtataaaaatgatcaccttgttggctacacagatgcctttcaaatggagcccctccattgacaaagtacacttcaaggtcttttttataggcggattcgacaaaatagcacacaatacaaggaaaaaaagaaaaggggggacagatggacccctagcagatctttttcctctctttttctttttcaaatagtttcaatgttttttttcttcaggagaaaaattaaaaagcatagtttaattggaaagacccaagagcaaca

SEQ ID NO: 191602 - DNA, 668 bp, Gossypium hirsutum
cccactcgtccgcccacgcgtccgctttttgtgtgtgtgtgtgtgtgtgtttctgctgctgttttatttatagtcgctggcggctaaaaaatgttgcaaagggctttgatattctcttcttcaaatccaatctgttctcaattgccaacgacagctccgcctgacaacaccgtgttccccaaacgaaacggcggctggatcatccctttctcatcctaccagctaccggcatttcgtttgcgaaattacaggcgtacccttcttcctccactctgctcagcgagtgactcagctgcaaatcgaccaaatatggcgtctcaagatgaacaagaccctcgggtgtccaacatttcttctgcgattcgtgtcatccctgacttcccaaaacctgggataatctttcaagacataccacctttgcttcttgttcccaaaccttttcggatactattgatttgtttgttgagaggtacagagggaaagatatattctgccgttccaggtttagaaccagggggattcatttttggcccacccattgccttggccttttggggcaaagtttgttcctatgaggaaacccaataaattgccgggggaggttttatcggaagagtattctttggagtatggaaaggacacaatggagatgcatgttgatgctttca

SEQ ID NO: 191603 - DNA, 742 bp, Gossypium hirsutum
atcagatcaagagcctctctcatggaccttcattcgaccaatggttgaaaatctttaaatgataacatcgtccttttgcccaccactatcaaatttccagattttccaggaaaaagaaaatcaaaacccccaggtgaagaaggtgaaaaccagcagcggcaaaggcaataaaaggtgaagccaaagagagagagatatatacataataaaaaagacttttcaaaagaacacaactatggctcctcatagagaaggatcagatgcttcagtggaagccatggttgctcaagtcgaaaaacacccaatttcatcgatccttatcatcattgctatgcaaacagaagctttgccggtggtgaataagttccagttgattgaaaaccctcattcttcgtttccaaaaggggtcccttggatccattatcatggtgcatacaaggacatcataatcaatctagtttggcctggaaaagatttaacctttggggttgatagtgttggcacgatttctgcctctcttgtgacctatgcatctatccgagcattgcagccagacctaatcataaatgctggcactgccggcggctttaaggaaaaaggagctgcgatcggtgatgtttttctcgcatctcatgttgcattccatgatagaagaataccaatcccggtttttgatctatacggtgttggtttgcggcaaacctactcaacaccaaatctcttgaaagctcttaatttgaat

SEQ ID NO: 191604 - DNA, 407 bp, Gossypium hirsutum
cggacgcgtgggaaaatacaaaacatccagtttttctttttctttttccttcagttttctggttttccgacatggggtttgaagatccagacagggtttcaagacatataaagataagggaagtttggtctgataatttagattcggagttcgagttgatcagtcaagcaatcgatgagtaccctttcatctccatggacactgaatttccgggtcttgttttcagacccaaagtggatccaacccggccttacggcgcccagttccggccgtccgatcattacaagatcctcaaatccaacgttgatgctttgaacttgatccaagtgggcctcaccctcaccgattcttcaggtaatttgcccaccctaggaaccgacgacgagcagttcatctgggaattcaat

SEQ ID NO: 191605 - DNA, 857 bp, Gossypium hirsutum
  unsure (1)..(857): unsure at all n locations
ggcttttgtgttccgttatccgtctccgcctctcttcccaagtatattacataaaatattatgaattaaagcaaatccccgggttccccctcatcccaatcctcaccaaaccctacaacgaaaaccctaattcagattttgctttaattctgatttgctggtccgtaattctattcaaaagaaagacccctatatattgcatttccccaatttattacgttttaatttttaagagaaattgagaagggaatggaaggtataccacacccaataccgagaacggtggaagaggtcttcaacgacttcaagggtagacgctctggcttgattaaggctctcacaactgatgttgacaagttctaccaacagtgtgatcctgagaaggagaacttatgcctatatggacttccaaatgaaacctgggaagttaacttgcctgttgaggaggtgcctcctgagcttccagagccagcattgggcataaactttgctagagatggaatgcaggagaaggactggctatcattggttgcagttcacagtgattcgtggttgcttgctgttgctttctattttggtgcacgatttgggtttggaaagaatgagaggaaaagactcttccagatgataaatgaccttccgaccatatttgaagttgtcacaggaaatgtcaagcaactgaaagaccaatctgcgaatcacaatggcagcagcaaaagcaaatcaagtgctaagtctcgccaatctgaaccccagagtaagatggtaaagatgtctccaccatccaaggatgaagatgagagtggggaagatgatgatgatgatgatgancngggtgccacttgtggggcttgtgt

SEQ ID NO: 191606 - DNA, 445 bp, Gossypium hirsutum
agtagagagtagagaaaaccaaggcaaaggagctagtttaaaaccccccggcctcaatcttttggtctaaaattggcttttagtttccgttatccgtcttcttctctctttcacaaagtgtatatttttatataaaataataatttgaagtaattcccaattccccaaatctcaatcccaccaaaccctacaatgaaaaccctaattcattttaccctttaatttctgatttgctgctctcaaaattctattctaaagttttgtccacgtattattctcctttttgtttttctttaatatttcaatatttgcatatatatagatagagattaaggatttttgggttaagggggggggaaatctttgaaggggaatttgagagaaacaaatggaagggataccacacccgataccgagaacggtagaagaggtcttcaacgacttt

SEQ ID NO: 191607 - DNA, 934 bp, Gossypium hirsutum
  unsure (1)..(934): unsure at all n locations
gggggcgacccacgcnnnccgtacctttttaactctaaagccaagaaagtaagccactaaggttttgagagaagatcaaaatggcttctaaaagatcagcttccatggtcctccttttggcactcaacattctctttttttccctagtcagtgcttgtggctcttgctcttcacccacccctaaaccaaggccaaacccaaaccccaacacccccactcctactccatctgcacgaggcaggtgccctagggatgccctcaaattaggtgtatgtgccaatgtgcttaacctagtcaatgtcaccgttggttcacccccagtgatgccatgctgttcccttctcaatggccttgtcgacctcgaagctgctgcatgcctttgcaccgctatcagagctaacattttaggcatcaaccttaacatcccagtttctcttagcttgctcctcaacgtttgttcaaggaatgttccaactggcttccaatgctaattaagtcatcacttttccctacattttttatcgtctttcttatggtgtttgtgtttgattttagaaagttatgatttctattatttactgtgtgttttcatttgtaactttgttgtttaaatttccttgtggggattgatatagaataagtctaatacttttcttcagatgtttttcttagggaactttagtatctttaagggacatgaaaagacttgtattattcagcttgttttatttccgtacttcttgtttcgttatcactttatttataaaatctctgcatctagctatggcaataaattttatataattttataatgtttgtacttactttttcatatttagngcaaaaaatgcctaccacttttatatttgttatttgggtataagttctattagtatgatacttagaacttatcaatcaacttttataaatgtat

SEQ ID NO: 191608 - DNA, 607 bp, Gossypium hirsutum
  unsure (1)..(607): unsure at all n locations
cttacgcgtgggcggacgcgtgggctttaactctaaagccaagaaagcaagccattaaggttttgagaaaagatcaaaatggattcaaaaagatcagcttccacagccctccttttagccctcaacattctcttcttttccctagtcagtgctaattgtggatcttgttcttcttctggctctaacccaaggccaactcccacccctactccatctgcacgaggtaggtgccctagggatgccctcaaattaggtgtatgtgccaatgtgcttaacttagtcaatgtcaccgttggttcacccccggtgatgccatgttgttcccttctcaacggtcttgtggacctcgaagccgctgcttgcctttgcaccgctatcagagctaacatcttaggcatcaaccttaacatcccagtttcccttagcttgcttctcaacgtttgctcaaggaatgttcctactggcttccaatgctaattttagtcatcactctccctacattctttctcatctttcttatggngtttgtgtttgtatttgtgtttgtgtttggattttaaaaattatgattcagtatttacggtacatcaatgttatcattagttac

SEQ ID NO: 191609 - DNA, 651 bp, Gossypium hirsutum
ttctcttctacttttagctctaagccaagaaagcaggccactaacatcaaaatggcttcaaaacaatcaggttccatggccctccttttggcactcaacattctcttcttttccttggtcagtgctactgccccatcccctcccaccaaacctaaccataaaccaaaggcaaaccccaaccccagcaccccatcttcacaaggcaagtgccctagagatgcccttaaattaggtgtatgtgctaatgtgcttggcctagtcaagcccgtcattggttcacccccagtgatgccatgctgttcccttctcgatggcctcgtcgatcttgaagctgctgtttgcctttgcaccgctatcaaagctaacatcttaggcatcaaccttgacattccagtttctcttagcttgctcctcaatgtttgctcaaagaaagttccttatggcttccaatgctagtttaagtcaatgatttttcccctacattctttctcaacttctttatggtttgcgttcgggtttttttcgagttatgatgccataacttcattgttttaatgtggtttcatttggaattttaatttcctccggggggatagatatagaataaggttaatacctttcttcaagtgttgcttgaaagttttttataac

SEQ ID NO: 191610 - DNA, 1521 bp, Gossypium hirsutum
cttagttttaccagtgccagccataatccatagaaattccaacttaaactgatattgtgttacagtttaagaataaaaatacgaataaagatttattattcgttcaaactagattggttcacatacaaaatccattagtaaatggatagagaaacaaaagcaagggaataatacaagtctttttcatgtcttttggagatacaaaaaaccccaaaagaaaaacacttgaagagaagtattaaatttattcagtatccatccctcacaaggaaattgaaataataaagttacaaatgaaaaaccactgatttactgcaaatgtcggaaaccgtaactttcaataaccaaacacaataaggaaaactagaaagaatgttgggaacagtgaagacttagcattggaagttggaaggaacattctttgagcaaacgttgaggagcaagctaagggaaactggaatgttaaggttgatgcctaagatgttagctttgatagcggtgcaaaggcaaacagcagcttcgagatcgacgaggccatcaagaagggaacagcatggcatcactgggggtgaaccaatgacgggcttggctaagccaagcacattagcacatacacctaatttaagggcatctctagggcatttgccttgtgaagatggagtgggggtggggttggggtttgggtttggctttggtttaggggtgggtgaatagcaagaaccacaagcactgaccagggaaaagaagagaatgttgagtgccaaaaagagggccatggaagctgatctttttgacgccattttgatcttctcttaaaaccctagtgacttgctttcttggcttagagttaaaagtgcaggacgcgcgtccgcccacgcgtccgcccacgcgtccgcccacgcgtccgagcttccatggtcctccttttggcactcaacattctctttttttccctagtcagtgcttgtggctcttgctcttcacccacccctaaaccaaggccaaacccaaaccccaacacccccactcctactccatctgcacgaggcaggtgccctagggatgccctcaaattaggtgtatgtgccaatgtgcttaacctagtcaatgtcaccattggttcacccccagtgatgccatgctgttcccttctcaatggcctgggcgacctcgaagctgctgcttgcctttgtactgctatcagagctaacatcttaggcatcaaccttaacatcccagtttctcttagcttgctcctcaacgtttgttcaaggaatgttccaactggcttccaatgctaattaagtcatcacttttccctccattctttctcaacttccttgtggtgttttgtgtttggttttttataaagttatgatgtcataacttcattgttttaatttgtatcattcttgctttaatttcattgggagaattgatacagaataatatttttcttaaagtgtttttctttgagtgtgtattgtatctctaaaggacatgaaaaagcttgtattattc

SEQ ID NO: 191611 - DNA, 397 bp, Gossypium hirsutum
  unsure (1)..(397): unsure at all n locations
catcaaccttgacattccagtttctcttatcttgctcctcaatgtttgctcaaagaaagggccttatggcttccaatgctaatttaagtcaatcattttcccctacattctttctcaacttctctatggtttgtgtctggtttttttcaagttatgataccataacttcattgttttaatgtgcaataaattagtgttttcatttctaattttgttgttttaatttcttcgtgggggatagatatagaataagtttaatacttatcttcaagtgttgtttgaagtttttttatatctccaaagaacatggaaagacttgtattatttaagctcgttaatttattcccttgtttatttatcagtttattaatatgagccccatttcatatttgtaccn

SEQ ID NO: 191612 - DNA, 544 bp, Gossypium hirsutum
gaccgggcccgaaatcccggggcgaaccaagccgtccgttaaaataaggggaatgtgccaatgggcttaacctagtcaatggcgaccattggttcacccccagtgatgccatgctgttcccttctcaatggccttgtcgacctcgaagccgctgcatgcctttgcaccgctatcagagctaacattttaggcatcaaccttaacatcccagtttcccttagcttgctcctcaacgtttgttcaaggaacgttcctactggcttccaatgctaaacccatcactgttccctacactttttatcgtctttcttatggtgtttgtgtttgattttagaaagttctattatttacagagtgttttcagttgtaactttccttgcgggattgatatagaataagtctaatacttttcttcaaatgttttcttagggaactttaatatctctaagggacgcgaaaagacttgcattattcaccttgttttatttccttacttcttgttttcttaccaacttatttataaaatctctgcatctagttatgg

SEQ ID NO: 191613 - DNA, 1544 bp, Gossypium hirsutum
cccacgcgtccgcccacgcgtccgcccacgcgtccgaaaagcttcaaatctcctctgcctattggagattacagcaaaaggcttttctgtttttgtttttgttttattttttatttatttataattttacaagtgtaaaaatccccttggggaatgcagagagatgagacgttcatcgttggcaaggcctgagctttcttaccaccgtaagcgctccattggcggccgaaattgtcaccgaaaacacgtcgaagacgggtgattcagtttgaagggtttcagttttaaatatacatatatttctcacttctattgtaaatagacagtaattcagatcaaagggtatccgtttcttttcttatttttcgttttaatttctcgagcttttacggttcaaaaatggcggacaaagctaaaaccgaaaacccatcttttctccatggaaaatacgagcttggccgtatgttgggtcatggaacgttcgccaaagtctaccatgcgaagaaccttcaaacagggaagaatgtcgccatgaaagtggtgggcaaagagaaagtgatccaggtcgggatgatggagcagatcaagcgagagatctccgtcatgaaaatggtgaaacaccccaacatcgtcgagctgcacgaagtgatggcgagcaagtccaagatttacttcgccatggagctcgtccgcggcggcgagctcttctcgaaaatcgccaaaggtcgtctcaaggaagacgctgccagggtttacttccagcagctcgtttccgccgtcgatttctgccacagccgcggcgtttaccaccgtgatttgaagccggagaatcttctcttagatgaagaaggcaacttgaaggtcaccgatttcggactcagcgctttcacggaacatttgaaacaagacgggttgttgcacacgacttgcggaacgccggcgtatgtggcgccggaagtcattggaaaaaaagggtacgacggagccaaggcggatatttggtcttgtggggtgattttatacgttcttctcgccgggtttttaccgtttcaagatgataacttggtggcgatgtataagaagatttacagaggagatttcaagtgtccgccatggttctcacctgaagctcggaggctaatatccaagcttttagacccgaacccgaaaacccgaatcgccatctccaagatcacggaatcatcttggttcaaaaaatcaatccccaagactaaaacaactaaggaagaaatagaattcgaagcattcaatggagagaaatcttctaaacccgagaccttaaacgcattccacataatttcattgtcggaaggcttcgatttatctccgttgttcgaagagaaaaagagggaagagaaagaggagttgaggttcgccacgacgaggccgccaagcagcgtgatatcgagcctcgaaaagtggccaactggaaaattcacgtaaaagagcaatttagtcgtttcagggtcagatgtggagaaagtaacttgcttgtgcaattatgcgggacccgtgttttgtgg

SEQ ID NO: 191614 - DNA, 430 bp, Gossypium hirsutum
ttccacgcgtccgcccacgcgtccgcccacgcgtccgattcataacacaactcaatggtaaatggagcgacccaaattgaaaaatgacaaatagagggggccaaaaacaattgctacacaaccaaaccatgatccaaacttaaaaataggacaatcctacactcaaccataccactgaaattacactactaaatgaatcaacccagatcccagagaggaaaacacggacttagtttgtaccttagaaatcgagaatggaacgggaattcgactgtggcttgatttatgtgaggtgggaagtcattgtttgatgatgaaggttattgttgttattgtaacagtgtgtttatgtgattgtttttagatgggaaattgaaaacccagatttgttgttgtttgatccattgtatgttgctgatgttttcagatg

SEQ ID NO: 191615 - DNA, 845 bp, Gossypium hirsutum
ggaaaaaaagggtacgacggagccaaggcggatatttggtcttgtggggtgattttatacgttcttctcgccgggtttttaccgtttcaagatgataacttggtggcaatgtataagaagatttacagaggagatttcaagtgtccgccatggttctcacctgaagctcggaggctaatatccaagcttttagacccgaacccgaaaacccgaatcgccatctccaagatcacggaatcatcttggttcaaaaaatcaatccccaagactaaaacaactaaggaagaaatagaattcgaagcattcaatggagagaaatcttctaaacccgagaccttaaacgcgtgccacataatttcattgtcggaaggcttcgatttatctccgttgttcgaagagaaaaagagggaagagaaagaggagttgaggttcgccacgacgaggccggcaagcagcgtgatatcgaggctcgaagaggtggccaaatcggggaagttcagcgtcaaaaagagcgagtgtagggtgcggttgcagggtcaagaatgtgggaggaaaggtaaacttgccattgctgccgatatatttgcggtgacgccgtcgttcttggtggtggaagttaaaaaggaccatggcgacacattcgagtacaatcagttttgcagtaaagagctccggccggcgcttaaagacatcctatggacgtcgccgcccgagaactcgactgtggcttgatttatgtgaggtgggaagtcattgtttgatgatgaaggttattgttgttattgcgaaagtgtgattatgtgattgtttttagatgggaaattgaaaacccagatttggtggtg

SEQ ID NO: 191616 - DNA, 379 bp, Gossypium hirsutum
caaaaagcttcaaatctcctctgcctattggagattacagcaaaaggctttttttttttttcattataattttacaagtgtaaaaatccccttggggaatgcagagagatgagacgttcatcgttggcaaggcctgagctttgttaccaccgtaagcgctccatcggcggccgaaattgtcaccgaaaacacgtcgaagacgggtgattcagtttgaaggctttcaggtttaaatatacatatatttctcacttataattgtaaatatacagtacttcagatcaaagggtatccggttcttttcttatttttctttttaatttctcgagcttttattggtcaaaaatggcggacaaagcttaaacccgaaacccatttt

SEQ ID NO: 191617 - DNA, 476 bp, Gossypium hirsutum
aattaaatcaaaaacttgatctaaaaacctcatcaaaaggtagggattttcgttgtgtgacctctattttttccataattccatataaatatataaaatggaaggacataaataaagcagcaatgagcaaagagccagtcatgtcatcaaaccaccaatatgacagccaagtaaagtaaacaaatccaagcatgtattacttacacataacgttctggaacaatcaaaggtagcatgcgaaagaaaaagtccgcaatcccgtcccgagtttcctattccagtctttttctatgcttacaatggcccggcacgggcacttgtgttgtaaattgcgaatggtacttcaatagcagtcacaatgtgattagatcatcttttggtccttgttgcttctatgaatcttgaccccctccggatgaacctccacctttcttaccgaaaatcatttcatcgacatcatccatcatgtcatcatt

SEQ ID NO: 191618 - DNA, 684 bp, Gossypium hirsutum
  unsure (1)..(684): unsure at all n locations
aaatatattaaatgacgctagggatctcgctcgcgatcccgatcccgatcccaatctcattctctccggcgacacctttctctaaccgtttccggtgagatctcgaggttggatccgatctcgacccgattcatagtgtctctttgacctagatccgaaccaccatggctccagtttcggctttggccaaatacaagcttgttttcttgggagatcaatctgtcgggaaaaccagtatcatcactcgctttatgtacgataaattcgataatacttaccaggctaccattggtattgactttctatcgaaaaccatgtacctcgaagatcggacagttcggttgcagctctgggatactgctggacaggaaagattcaggagtcttattccaagttacattagggattcctccgtggcagtcatcgtctatgatgttgccagtaggcagtccttccaaaatactacaaaatggattgaagaggtacgaaccgagcgcggtagtgatgttattattgtgcctgttggggaacaaaaccgatcttgtggacaaaaggcaagtctcagttgtggaagccgaagccaaggctcgtgacctcaacgtaatgcttattgaaactagtgccaaggctggcttcaatatcaaggctctttttcggaagatcgcanccgctttacctgaaatc

SEQ ID NO: 191619 - DNA, 479 bp, Gossypium hirsutum
cccacgcgtccgcccacgcgttcgtttagtcgtatcagacgcttttctccccttctctgaaattcccttgctatcgttttctggaagaaaattttttgagatggcccgtacgaagcaaactgctcgtaagtctaccggcggcaaggctccaaggaagcagcttgccactaaggctgctcgcaagtcggcaccgacaaccggaggcgtgaagaagcctcaccgatatcgccctggaactgtagctctgcgtgaaatccggaagtaccagaaaagcactgaactcctcatcaggaaactgcctttccaaaggctcgttcgtgaaattgcccaagactttaagaccgatctacgtttccagagccatgctgtattggcgttgcaagaggcggcagaggcataccttgttgggttgttcgaagataccaacctgtgcgccatccatgctaagcgtgtgacaatcatgcccaaggacattcaac

SEQ ID NO: 191620 - DNA, 658 bp, Gossypium hirsutum
ctcgcaaaaagggcccatagagcgtagcaaaacaatcacatttgcactacgtttggttggatggaattgctattccattccgccctaattccgtgcgctacagtaaatcagttgtttggttcaccatttaggtgattccacggaattgctattacagtctcattccctcagctcaccgtttaggtattcaggggttgggggtctgaatacctattcaacaccacaccgtttaggtttttagaccaaaatagcctgcctctcttcttcccaaaattctctccagatttcttcctccccaaatcaagcatccattcgcccttcatcttcatctccccaaatattgtaaagggctgctcgcaagtcggcaccgacaacttgaggtgtgaagaagcctcaccgatatcgccctgaaactgtagctctgcgtgaaatccgaagtaccagaaaagtactgaactccttatcaggaaactgcctttccaaaggctcgttcgtgaaattgcccaagactttaaggcaattacctccgccggaacaaagaaaggtgatcttttcttggctgatgttaatagccaactgaagtctaagaatgttataactgatatcaaagctatcaaagtagacatcagctccaatttaaagaagataacggacatga

SEQ ID NO: 191621 - DNA, 684 bp, Gossypium hirsutum
attctccctctgtgtctctctatatctttcatcccatagctttttttctggtaaaaggccatggatgggaatggaagagttcacccagattgtcctaatgctgcaaatccctaccatgaatgtggtggactctgcttagagaagattgctgaaggcaaaggaccaaaggcaaaagaaactaaaaagtcattaagttcaaaatttcttgatgcttccagaagctttggccggaaaaagaagggatccgactctctgctgagatcccctaaagcactcgagactacccctgcaataggtgcagtttatcctggtggccctaggtcacctcgttctcatttttctagaaagaaaatggaagcagaaaacggtgagtcgtattcatcttccgagcaacactctggcgagatatattcccaagatcaatcattcgagaaggcgccaattcagtactctcagccactgcatatgtctgggaaaatcacgcctcctgccgatacaccgaccaaatttacacaaacagagaaggtaaaaggattccccgaagatgagttccgatgcaaatatgaacgatgagaaaagtaaatgcccattagctcggcttttagtttcttaatcggccaagatcacgaagagagcgacgattagcggcgaagtcgatctgtatctcgatcagtgtatcgtcga

SEQ ID NO: 191622 - DNA, 714 bp, Gossypium hirsutum
cggacgcgtgggttttgaggttgatctgcctagggacctttatctctattgctactgggggggaatgatatgcattggacaaaagtgttttcggaaagcattggagcttctacacaatgttgtgactgctccaatgtctaccatcaacgctatagctgttgaggcttacaaaaaatatatattggtctctcttattcaccatggacagctttctaccagtctccccaagtatgcttcacgagttgctcagagaaacttgaagagcttatgtctgtcatatatgcaactggcaaatagttataacaatgggaaaattgcagacttagagacttatgtacaggcaaacatggagaaatttggaagtgacaacaatctaggtttggtgaagcaggttgtatcatctatatacaagcgaaacatccagaggttgacccagacatatttaacgctctcacttcaggacatagctaacacggtgcaactgaatagccccaaggaggctgaaatgcatgtccttcaaatgatccaagatggtgagatatatgcaacaatcaaccagaatgatgggatggttagattcgtagaggatcctgaactatataagacctgtgaaatgattgagcatattgacttatcgatccaaaagttgatgaccctctcaaataagctgactgtcatggatgaactcatgtcatgtgatccattgtatctagg

SEQ ID NO: 191623 - DNA, 453 bp, Gossypium hirsutum
cccacgcgtccgcccacgcgtccgcccactcgtccgtaatgatacatgggctagcatgagtacaatagctgatataaatgacaaatgggcttcccatgctggacctggaggatggaatgatcctgatatgctggaagttggtaatggaggcatgacttatcaggaataccgtgctcattttagcatttgggctttgatgaaggcccctcttttaattggttgtgatgtaagaaacatgactgctgaaacccttgaaattttaagcaataaggaggtcatttctgtaaaccaagactcactaggtgtccagggaaggaaagtttatgtttctggagaagctaactgccttcaggtttgggcaggacctttgtctggcaatcgcttagtcgtagctttctggaatagatgttccaaagctgcaactataacagctaggtgggatgtccctcgtct

SEQ ID NO: 191624 - DNA, 672 bp, Gossypium hirsutum
  unsure (1)..(672): unsure at all n locations
gtcttcaacctcggcaaatggcgttattttcttcggcgagggtccttacgtgttcctccctggtgttgatgcatcacagtcgcttacttacacgccactcttcataaaccccgtaagcacagcatccgctttccctatgggcgaagcctccgccgaatatttcatcggcgtaaagtccatcaaggtaaacgaaaactccatctcattgaatacatctttattatccatcaacaacgaagggtgttggtggcacaaaaatcagcacccgtggatccctacactgttctcgaatcttcaatcttcaaggccgccaccggagcctccacttagtgaagctactgccatgaacatcagtagagtgcccggtgtggctccatttgagtgtgtttcactcgagtaacatagcagcacgagattggaccagccgtgccatcgatagaccttgtgctgcagaacgaacgtgttntgagaatgtttggttcgaactcgatggtcgaggttaacaggacgtgttgtgtcttggattgtgaatgtnggtcgaaccgactacttcattgtatggaggcaccatttgagacacgctgctcanttgatttgcacttcaggctggatcagcgcacctatggcagcaactactggcactcactccatcacgctanattaccgaacctg

SEQ ID NO: 191625 - DNA, 1812 bp, Gossypium hirsutum
  unsure (1)..(1812): unsure at all n locations
tgacaatttggaagcaatcaggcatcttccttctactaaacattatgaacatcgagagaggcactgtccagaagaaccaccaacctgccttgttcctcttcctgaaggatataagcgtccaatcgagtggccaaaaagcagggaaaagatttggtactacaatgttccccataccaaattggcacaaattaaggggcatcagaattgggtgaaagttactggagaatacctcacatttcctggtggtggaacccagtttaagcacggtgcgcttcattatatcgacttcatagaagagtctgtgcctgatgtagcttggggaaaacggtctcgcgtagtattggatgttggatgtggggttgccagctttggaggttttctttttgacagaagtgttgttgccatgtcctttgcaccaaaagatgaacatgaagctcaagtacaatttgcacttgaaaggggaattcctgctgtgtctgctgtgatgggtactaagagacttccctaccctggcagagtatttgatattgttcattgtgcacgatgtaaagttccatggcacatagaaggtggtaaactcctcttggagctgaatcgtgtcctgcgacctggtggtttctttgtgtggtctgctactccaatttatcaggacaagactgaaaatgttgaaatctgggaagctatggttgaactaacaaaatcaatgtgctgggagcttgtaaacaaaactattaaggatgcagtaaatggggtggctgtancancatttaggaagcctacttctaacgactgctacgaacaacggtcaaaacaagagcctccagtctgtcctgagtctgatgatccaaatgcggcatggaatgtgcccctgcaaacttgcatgcacaaagtgccagtagatgcttcagaacgtgggtctcagtggcctgatcgatggccagaaaggttggaaaaagcaccttattggttgagttcccaagttggagtttatggcaaagcagcactagaggattttgctgcagacaatgagcactggaaacgggtggtaactaagtcatacctaaatgggatgggaataagctggtcatctgtcagaaatgtcatggacatgaatgctgtttatggaggatttgctgctgcactaaaagatttgagtttatgggtcatgaatgtggtcccaattgactctccagatacgcttcccataatatatgaaagaggtctatttggcatgtatcatgattggtgtgaatcgtttagcacctatccaaggtcttacgatcttctccatgccgaccatctattctcaaagcttaacaagaggtgcaatttggtggccattgttgcagaggttgacagaatactaagaccagaagggaaacttattgttcgagacaacgttgagaccatgaacgagctcgagaatatgttgaagtctatgcagtgggaagtgcgtatgacatactcgaaggacaaggaaggcctgctctgcgtccagaaatccatgtggcgacctaaggaggtagagacgatcaaatatgccattgcttaggcaaatgctatctgttaattgatgatgtttgtcggcacgattagttattctttttgttaaggttttgctaattgaaattcatggtgcttgtatcatgttaaatagggcttttctttagtattgcatacgttgcttcttttgttttttattcctttatcttataagtttggtgtccaaatcttcatgtaatgtgctgtagacttttaatttaattccttttgggctcatttaaaacacaatttcatcgcctgttcaacttg

SEQ ID NO: 191626 - DNA, 1872 bp, Gossypium hirsutum
caacaccttttttcaatagcttcatttccaccactgcaacaatgccacatttctctaattctgtcaagcttaagtatgtcaagcttggctaccaatatctcgtcaatcatattcttacacttactcttatacctgtcatggctggtgttcttattgaggttcttcgtttaggccctgctgagattgttaatctctggaattcccttcattttgatcttgttcaaatcttgtgctcttgtttcttcattatctttgtagccactgtttacttcatgtctaagcctagaagcatttaccttgtggattatgcatgctacaaacctcctgtcacttgtcgtgttccttttgctactttcatggagcactcgaggctgaacttgagcaacaaccctaagagcgttgagtttcagatgaggattctagaaaggtctggtcttggtgaagagacttgtttacctcctgctattcattatattcctccaactccaaccatggaggctgctagaggcgaggctgagattgttatattctcagctatggattctttgttcaagaaaacggggttaaaacctaaagacattgatattcttattgtcaactgcagtctgttttctcctacgccatctttgtctgctatggtgatcaacaaatataagctgaggagtaatataaagagctttaatctttcaggaatggggtgcagtgcggggcttatctccattgatttagctcgagatcttctccaagtacaccctaattctaatgcagttgttgtcagcactgagatcatcactccaaactactaccaaggaaaagaaagagccatgctccttcccaactgtctcttccgcatgggtggcgcagcaatcctgttgtcgaaccgccgctcagagaggcggagagccaagtaccgacttgtgcacgttgttcgaacccacaaaggggccgatgacaaggcctaccgatgcgtgtttgaagaagaagacaaagacggcaaagttgggatatcattatctaaagatctcatggctatagctggagaggctttaaaatccaacattaccacaatagggcctttggtgcttccagggtcggaacaactcctatttcttctcactctgatcgggcgtaaagtcttcaaccccaagtggaagccttatatcccagacttcaagctggcgtttgagcacttctgcatccatgctggagggcgagcagtgatagatgaactgcaaaagaacctgcagctgtcagcagaacacgtagaggcatccaggatgacattgcacagattcggaaacacctcctcctcatccttgtggtacgagatgagctaccttgaggcaaaagggaggatgaaaaagggagataggatttggcagattgcttttgggagtggattcaagtgtaacagtgcggtatggaagtgcaatcgaaccatcaaaaaaccaacagatgggccttgggaggattgcatccataggtatcccgttcatatccctgaagttgtcaagctctagacagcttcttcattcatggccttccttctttgcctttagtactttgctaaaatcaccatcatcatcatcatcatcatcatcatctacttcttatcctactccatctctgcctttatatttctcctctgtatttttcttagctcgtactcatttgtctctcctcttccttttccattttctcttttcaagccatgaattcacatagataccaaatatgatcacatttatgtgttgactaaatatatcccttgcaagggaatgaaaaaacagtgtggaaacaggttggattagctccttgaaataaacctggaatatttaacagaaaaaaaaaaaaaaaaaattctgccgccgc

SEQ ID NO: 191627 - DNA, 689 bp, Gossypium hirsutum
cttcaagcaagcgtttgaagtctggagtatccatgctggtggacgagcagtcatagatgaactgcaaaagaacctgcaactttcagcagagcacgtagaggcatcaaggatgacattgcataggtttggaaacacatcgtcttcatcgctgtggtacgagatgagctacattgaggcaaaggggaggatgaaaaaaggggacagggtttggcaaatagcttgcggaaggggattcaagtgtaacagtgcagtatggaagtgcaacagaaccatcaaaacaccaaaagatggaccatgggcggattgcattcagaggtacccagctcatatccctgaagttgtcaagctctaggctaatagcaacaaacaaatatggttgattcatggctttgtcaaactcagatccttctggatctctgcatttatttatatttctcctgttaactttttctctactcattttgtttctgtcatactgtatcctttttccaatttcttttcaaaatcatgagtttgcataggtacccgatatggtgctctttgtttttgttaattaatgtacaccctgcaggggaaaataacaagtgtggaaaaacaacaggttgaattagccattgcaataaaacctgaaatattaataaagaaaatgctaccccagttgtgattgtaaaaaaaaaaaaaaaaaaacc

SEQ ID NO: 191628 - DNA, 594 bp, Gossypium hirsutum
  unsure (1)..(594): unsure at all n locations
ctttttcttatcttcttaattatttctctatctcttgcaatatgcctccagcctcgcccgatttctccagctctgtcaagcttaagtatgttaagcttggctaccaatacgttgtggatcattttcttactctcttgttggttcctgtcatggttggtatccttattgaagttgttcgtttaggccctcaagagattgttaacctatggaactccctccattttgatcttattcagatattgtgctcttctttcttcatcatttttattgccactgtttacttcatgtccaagccacgatgcatctaccttgtggattatgcatgctacaagcctcctgtgacttgcagggttccttttgctactttcatggagcactccaggttgattttgagcaacaatcctaagagcgtggagttccagatgaggattctggaacggtctgggctgggtgaaaaaacttgtttgcctcctgctattcattacatccctccaaagccaaccatggaggccgctaaaagcgaagctgaggttgttattttctcanctatggattcgttgttcaagaaaacggggctgaaacctanagacatat

SEQ ID NO: 191629 - DNA, 565 bp, Gossypium hirsutum
agctggccgcctgcacggcccggactactggctggacacccatcctgatatctttgtctgctatggtgatcaacaaatacacgctgaggagtaacattaagagctttaatctttcgggaatggggtgcagtgcggggcttatctccattgatttagctcgggatcttctccaagtacacccgaattctaatgcagttgttgtcagcccacgcgttcgtgagatcatcactcccaactactaccgggggaatgaaagagccatgctccttcccaactgtctcttccgcatgggtggcgccgcaatcctcttgtcgaaccgccgctcctagaggcggcgtgccacgtaccgtctctgtccacgttgttcgaacccacaaaggggccgatgacaaagcctaccgatgcgtgttcgaaagaagaagacaaagacggcaatggtgggatatctttatctaaagatctcatggctattgcttggagaggctttaaaaatttaacattaccacttatttggtccctttactttctttcctgcaattctgaagcaacttcctaattttttttt

SEQ ID NO: 191630 - DNA, 564 bp, Gossypium hirsutum
  unsure (1)..(564): unsure at all n locations
gaatagtggtgtgcctacagttttttacttctgcaattgcgagaagaaacgagacggtcaaaatccaatggatttggaaacggtgaagaaatacttggagaaaggagttggggctgacggcgatgacaagaacgcctcaaccatcaatggcatgccttctagattcttcgaaaacttcatcatgcaaggtctccatgttgaccaaatcgaaaagggtcgagtcctttgctccatgaaagtccctcctcgtttgctgaacgctggtaatttcttgcacggtggagctactgcatcactggtggatttggttggatcagcggttatttacacctacggagttagcaccagtggagtttctgtcgaaatcagtatcacttacttggatgctgcttatgttggcgaggaaatcgagatagaggctaaggcattgcgtgttgggaagactgttgccgttgtcacggttgagtttcggaagaaaaaaactgggaaaatcattgcgcaagggcgtcataccaagtacctcaccgcccaaagtanaatgtaaatgatatttctatctgagcc

SEQ ID NO: 191631 - DNA, 1703 bp, Gossypium hirsutum
tcgtccacagcgttcgtttccttctctccactccgaacaagattgaagaaaacccttaaacctctttgcctttttcttttcgtttcattttcgacgaaataacaatgagggaaatccttcacgtgcaaggaggccaatgcgggaaccaaatcggatccaagttttgggaagtgatctgcgacgagcacggtgttgatcctaccggaaagtacagtggagatggatcatccgatattcaattggagcggatcgatgtgtattacaacgaggcttccggtggaaggtacgtccctcgtgcggtactcatggatcttgaacccggtaccatggatagtatcagatccggtcccattggccagatctttagacctgataatttcgtgtttggacaatccggtgccggaaacaactgggccaaaggtcattacactgaaggagctgagttgattgatgctgttcttgatgttgttcgtaaagaggccgagaattgtgattgcctgcaaggcttccaggtatgccattcactcggaggaggcacaggctctggcatgggaactctcctgatatcaaaaatcagggaggagtaccctgaccggatgatgctgacgttttcggtttttccttcacctaaagtgtctgatacggtggttgagccctataatgcgactctatcagtgcaccagcttgtggaaaatggtgatgaatgcatggtccttgacaatgaagctctctatgatatctgcttcagaactcttaagctcacaaatcccagctttggtgacttgaaccatttgatttcaacaaccatgagtggagtcacatgctgccttcgcttccctggccaactcaattccgatcttcgaaaactagcagtaaacttgatcccattcccacgcctccattttttcatggttggttttgcacctttaacatcccggggttcacaacaataccgagctttaacgatccccgagctaactcaacaaatgtgggattccaaaaacatgatgtgcgcggctgatcctcgtcatggaaggtacttaacagcctcggcaatgtttcgaggcaaaatgagcaccaaggaagttgatgaacaaatgatcaatgtccaaaacaagaactcttcgtactttgtggagtggattccgaacaatgttaaatcaagtgtttgcgacatcccaccaaccgggttgacgatgtcatcgacgtttatggggaactcgacgtcgatacaagagatgtttcgacgtgtttcggaacagttcacagtgatgtttaggaggaaagcatttttgcattggtatacaggggaagggatggatgaaatggagtttactgaggctgaaagtaatatgaatgatttggtttctgaatatcaacaatatcaagatgctgtggttgatgaagatggtgaagggtatgaagatgaagctgaggaaaattgacgggatccttttcaactttttatagtaatggcctagagaaaaaaaatcaaatgtggtgttcattttgatggttctaaataaggaggccatgttttttcatttgtgctgggatttttagtaatgtgaattgtgaatttgtatatttatatcaaatgtgaattgtgatttaatgaatttggagtgtaaatttatgtaatgaatttggaatcacaagtttcaagttttcaagttctaagaatgacatagtattatgatttc

SEQ ID NO: 191632 - DNA, 851 bp, Gossypium hirsutum
gctctaggttttcttttttttttcagttcttaatactttgtttcatttcatcaaaaaaaatcgccatcatgagagaaatcctccacgttcaagccggtcagtgtggaaaccaaatcggaggcaaattctgggaagttgttagcgacgaacatggcattgatcccaatgggaactacgtcggtacttctcgtgttcagcttgagagggttaatgtttactacaacgaagctagtggtggtcgttacgtacccagagctgttttaatggaccttgaaccaggaaccatggatagcttgcgtactggtcctcacggacaactttttagacctgataacttcattttcggccaaaatggagctggcaataactgggctaagggacattacactgaaggagctgaattgattgattcggttcttgatgttgttcgtaaagaagctgagaattgtgattgcttacaaggcttccagatttgtcattctttgggaggtggaactggttcagggatggggacactgttgatatcaaagatcaaggaagaataccctgatcggatgatgctgactttctcggtttttccgtcgcctaaagtgtctgatacggtggttgagccctataatgcgactctatcagtgcaccagcttgtggaaaatggtgatgaatgcatggtgcttgataatgaagctctctatgatatctgttttagaactctcaagctcactaatcccagctttggtagattcgtatcagatagatttcaacaactatgagtggagctacatgctgactttttttcccaggccaaactaactacgatcttcgaatactagccgtaaacttgatcccattcc

SEQ ID NO: 191633 - DNA, 402 bp, Gossypium hirsutum
tagaactatgtggatctcctggtctacatgatttcgagccgatttgttacatctgtctgatctatacatttgcggtcatgtctatttacacaagaattttcgaaactcataatgttgtaatcaacgccctcaatggcggtagaacgattgcaaagcattatgaaaagaactatcacaacacacatgttttacatgaaaattcttttgggaaaaaactatggactgatgaataaaaattcactaatgttgaaaaacgaatgacacatgaggagtctaggctacatctatctaaaggttgaaataccctgttctaatcaaagtcatatgatagaagtactttatggactcaacttgtgcaatatggtctgtactgtccggatgcaaccccaatacagttttgtg

SEQ ID NO: 191634 - DNA, 397 bp, Gossypium hirsutum
gggccataatgcatgtcataatttatgatgtaaacttaaataacatgagagttacataatgcatgactttattaaatgcagaacacatagtgcatgtcacaattaaaagatgttgattaataatgcaaaacattaattaaagatgcatataataaacaagacataattaaaagctgaaaaattaattaaactaaacaaacaaccacatgcaaaacattgtatggacatgggatgttattttgggtccaataagggttggacatctcatgttcagcccaaacttgctgaattaggcccatcatcgcccctttaaacttctttgatctagcacatgttataaacccgatgagaatttcaattggatcctctcttgaaataggcaacttagagtttagtc

SEQ ID NO: 191635 - DNA, 1038 bp, Gossypium hirsutum
gcaaattaacgcctttttcttctgtttgctgagctctctcccccaacatcaccatggcagatagggtataccccaaacaagcgacaaatggcaccgccgccacatccaacccttcttttccggccactaaagcacaacaatacggagccacccgccctgtctaccgtccacaacccgaacgccaccgctaccgccgctcttgctgttcttgctgcctttggaccaccatagctatcctcgttctcatcctcatagccgccgtagcttctgctatattgtacgttctttaccgccctcaccgtcctactttcactgtttcctccctcaaaatctcggcacttaacgtaacctcagcttccaagctgatcaccaacatcaacctaaacgtcacagccaaaaacccaaacaagaaagtcgtctacagttacaacccaatcaccgtatcgcttgtcacagacgacgacatcgctattggagaaggttccttcggttccttcgtgcacggaactaaaaacacgaccctcttgaaagctgccataactagtagcaaccaagaactcgatgacgcgtcagctgccaagttgaagaaagctttgaagagcaagaaggggctgccattaaagataaagctcgatactaaagtggaagcaaaaatgggagcattgaagacaccaaaggttgggataagggttgtttgtgaagggattaaagctaccggcccgaaggcaaaatcagcaaccacagcttcaacttctaatgcaaaatgtaaggttgatttgagactcaagatctggaaatggactttctgatcgacgagaatattttgagaaagagaaacaatggagaagaaaaaggtttgttgtttattttattttattacttttgttatggttgtttttttttcttttaaagttgtgtcgttatttttttagggaggtaatatgtttgcaaattgggtgatttgattgtatagggtatagaaaaatgtaatgtatacgttattttcttttctttttcaatatatattttggatttttc

SEQ ID NO: 191636 - DNA, 1838 bp, Gossypium hirsutum
  unsure (1)..(1838): unsure at all n locations
tgaggatttattaattactttgcgtttatatggaaataaaggaggagttgaaaaggagaggtggataattttctctttcatttccccaatcttatataacccccctggccagtgtccgctctcttcttatcacaaaacatataacaagatcaagaataagaaaaacgctgcttgcaggtatgtcatcatccgataagccagaattagttgaaagggatgttaaggacaaggtggatgacaaagaagacaacagtggatttatagacaaggtcaagggtttcattcatgacattggtgagaagatcgaggaaacaatcggctttggcaagcctactgcagatgtagctgagattcacctcccttgtatcaatcttgagaaagcagaaattgtcgttgatgtcctcataaagaacccaaaccctgttccaatccccctcgtcgacattgactacctcattgaaagtgatggtagaaaactcctttcaggcttgattccagatgctggaaccatccatgctcatggtgaggagactgtcaaaataccagttactttgatatatgatgatatcaaaagtacatatgatgacattaagcctggcagcatcattccatataggctgaaagttgatctcattgttgatgttcctgtttttgggaggttaactttacctcttgagaaaactggagagatccctataccttacaagccggatatcgatatggagaagatacactttgagagattctcttgggaggaaactatagcagttcttcatttgaaattggagaatatgaatgactttgacttgggactcaatgcccttgactatgaggtctggctatctgaggtcagcattggatctgcagaacttgaaaaatctgcaaagataggcaaaaacggaatcagttatattgagattcctatctctttcaggcctaaggatttcggatctgctctgtgggacatgattaggggaaaaggaacaggttactctatgaaaggtcacatcaacgttgacactccgtttggagctatgaaattacccatcagcaaggagggtggcacaacccgccttatgaagaatagggaagacggtggtgatgatgatgatgatgatgatgaggtatgttaattactcctgacttgtcctttttgaagtttgaaacttgctatacgaatagaatcctatgttttcttatttcattcttattttgggttaggatgttactcttatgttagatttgattcttcttttaaatacaagaggatggtctttatgattctttagtaactaacaaattggattctaccccttgctatttgcttgtctttttgctttgaaaagaaaaaagtaagaggaatgtttgaatgtaaaagcaagctatgttgatgaagaactaataattcnatgtaaagtttctttagaacgagatacatgatttactttactgtaaattgatcatgttagaattgnngttgtctaacaagtattttgtttatttttaaattattatgattntgcttttatcatttgatttttactttaggcgcctttttggagcanaaagcanatagcatatataacaaaccanacaggcctagtaaatntttgagattgttgatgacttgagnagntctnattggatattacatgtattganaatcnntangaagtagagttctggntaacattgtaagagcactcttgaaagcatgcccccttttggtacatacatatctatatacatggctctaaggagttcagattccaaaatatgtgtgcctcttttttataagggctatcgggttgtcaattgtggacccgttaaatttctcg

SEQ ID NO: 191637 - DNA, 613 bp, Gossypium hirsutum
cttcggccacgcgtccgcccacgcgtccggatctgcagaacttgaaaaatctgcaaagataggcaaaaatggaatcaggtatattgagaattctatctctttcacgcctaaagatttcggatctgctctgtgggacatgattaggggaaaaggaacaggttactctatgaaaggtcacatcaacgttgacactccgtttggagctatgaaattacccatcagcaaggagggtggcacaacccgccttaagaagaatagggaagacggtggtgatgatgatgatgatgatgaggattaaagcaaaagatcaacagggatggtccccttgagcttcttttgttttgttacagagttcattgcaataatatactaatggtgtgtggaatttaatgtttagattgtgacggtaacatgtactacaattatggaaaagttggtacctataattatgcatattatgtattatgtatgtatgcatgaatgggatgctgtgaccctggtttttattttgtctagcagcacccccccccccctcttagcgaacctcttgaatttgcagttgaataaactgttattttgcttttaaaaaaaaaaaaaaaaaaaaaagggcggc

SEQ ID NO: 191638 - DNA, 231 bp, Gossypium hirsutum
gtttttgcttacttgctctcatgatttataaaggtgttgatagaaaagatgtttatgcaaacaaatgtatgtaaagaagatgaacattaaagcccaaaacttcattcatatcttaagcttgtttctgagtctataattagtgaacacttctgtattacaacttatatatatatatatttgttcaattctggtcgaaaaaaaaaaacatgctgaaaattatataaaaataaa

SEQ ID NO: 191639 - DNA, 490 bp, Gossypium hirsutum
gagtgatgaaggtggagatgaacttggacaacgattccaataatctggttcaagctccgacaaacggcgactctgagaagctttcgccctccactttatcttctcttttgggttctaaagatcgtgattatcttctctgctccactgcagcagctgctgaaactgatcacgtgaaaatttcggatctagagggcaaggtgatcggaatttacttctcagctaactggtacccaccatgtagaaatttcaaccgagtattgattggtgtgtatgagcagctgaagagcaatggatctaactttgagattgtatttgtgtcatctgatgaagacttggatgccttcaacagctaccgtgaaaacatgccatggctttcgattcccttttctgatttggagacaaagaaggccttgaatcgaaaatatgacgtggaaagcattccttgcttagttattttgcagcctgacaacaccaaggatgatgatactta

SEQ ID NO: 191640 - DNA, 1036 bp, Gossypium hirsutum
ataacaagttctactagtttgacattgtttattcaaaattactagatagagtgctgtatacagcttgttaactgattacatcagggcctaattctagaagtgataatttgctctaaaaacagtttctaagcatataaattccttgaaaattaggcatgctttgaatcttatcaagcaacaacagggcctttttttttctgtatatgcttagcctcagtctatactggaagaaggtcttgcacacccacaaaaacaacccttctttcgtcttccaccccgtcttccaccattgtagataaagtcccttaagaggacaccggttcgggttttccctttgttcttcctttcatcttctagtttcagcataacgtactcaatgctctgcacctcgaactgcaaccttccgatcttttcagaccctttttgtgcctgctcacgtacgtttttcaagttgccctttccaggtccttccaattccattgagtttgttccgtctaaagatgaactcccttcgacatccttggtcaattcaccattgacgttgcacaactccttgattgcatcctccacctcttgcaattgttctttgacttgtccgtattctaaatcgaacgccttcttcctcttcttgatttccattctctttttcagttgtttgacagaggtttgaagagccatcaatttatgagcatcagaagcaagtctgtctaagacctttcggtttttagctcgtttctttggctctctaatgctggtagatatctctaacttatcaatgctcaactctttctccaccaatgctcccaaagaactctcgttttcaggttctagatcactggactgatgacaggcaatgatctcccccggtacaaacacccgttcttgcatgtcattgatttttgaatcaacaccacattcatgctcagcagactcccatagttcaagcatttgatcatcagctgtgctggtctctctcttactcttgctccctctgcataatgaagaatcagagacatgatccaggggaatatctttc

SEQ ID NO: 191641 - DNA, 913 bp, Gossypium hirsutum
tttgacgcgtgggcggacgcgtgggcggccgcgagaaaaaaaaaaacacaccctaaagagacaatgagaaagctgctagcctttgcctttcttttcttcttcttttgggataaaacattagctcaaatagctccggcgccgccgttaaaggtggacaacatcacttccatcctcgaaaaaggtggccaattcaccactttcatcaagctattgaaagccacacaggtggctgatcaactaaacaaccagctaagcacaccggaccctaacgacgggataacggtgtttgcaccgagtgacaacgcgttctccggactcaaacccgggacgttaaactcactttccgaccaagagaagcttcagttggttcagttccatatactcccgacgttaatgtcgacgtcgcagtttcaaaccgcgagtaaccctttgagaacccaagctggggatgttaaaggtgggaagtttccgcttaatgtgacggcggacgggaaccaagtgaatgtgacgaccggagtggtgaatgcgacggtggagaatagtgtgttttctgaccgaaggatcgcggtttatcaggtggataaggtgcttttgccgttggagatttttgggacagcgccggagccggctccggcgccggttgttccggagaatggtggtttggtttcgagtcctaaaacagcggttaagggtgctgatgcagctggtgcggtgagcttgaaatttcatgctttggcaatgggtttttcgtcatttgctgttttctgggctgtttttgggggattttgattttggattttatttttgcatgcgatgcttgtgttactgtttgtaatttgtggttgtgattaaaaatatttcatttttttgtttgttaatattgaaaaatgcaataaataattattattctgat

SEQ ID NO: 191642 - DNA, 923 bp, Gossypium hirsutum
atttgttttgtgctttgtgtaagaaaaaagaaggggtgcaactaaaataaacaaggggaagaaagaaaagtagattagcaagaactagggtttcctcaattccaggccaaagaggaaagttaagaaacgtgtgaatggcggacggttactggaatcggcgacagccaactcctccgatgctgtcttccagtggggcgcttaaacgacctcgtactgaatacgatggcccaccttctgggctacatccatctcatgagatgcataattatttggcaagagacagtgatcgtggtggacatctgcctgtaaaggatacaaaaacaattgggtcggcatatgatcgctatctgcagagtgcacaaatttctccttttccttctggagaagcaagaacatttggtgggctgggaaagcctgctggtggtgcaatgcctgctcgtccaatagctgatcctcctgtgatgggtcgtcctggatctgctgctccagatatggtatcaaatggtcgaaatgtaggttatggtaatcaacttcctttggatgcaatgtcgaggctaggtcgggatactgtacctctacctccagatgcttccaatactctatatgttgagggacttccttctgacagcacaaggagggaagtagcccacatctttcgcccttttgtgggatataaagaagtacgactagttagcaaagaattccgacatcgtggtggagatcctcttatcctctgttttgttgatttcaccactcctgcttgtgcagcaactgcaatgagtgccttgcaaggttacaaaattgatgaacatgatcctgattctaactacttgagacttcaggtttctcggtaccccaggcccaaggtcaggtccaggagctcgtggaaggaaggtgaatgtcattttctggatggaactaat

SEQ ID NO: 191643 - DNA, 967 bp, Gossypium hirsutum
  unsure (1)..(967): unsure at all n locations
gttttgacaacactcacctgtctcattaaaacagaaaaaaaaaaaaaaancccctcacctgcctcatttcagtatctaccaattaccagaaactagaggcagcaaaaatgagatctacctaaccctctatccgtccttcaaaacatacaaacaaagggttgttttcttgattgcaagagaaaggaaatctttttggacacccaagtgtggttgaaggcttaaacatcagctgaagaactgataatttttctgttccaagctttgcttttgtactgtatttcctcaaaatttctagcgatgactccaattgggtttctgggtttactgtttttgctgctcgctctatactgtgggatagacccttttaagcacagtgcaatctctgaatttcctgactttgagtcttacaaggtggatttgcctccatgggaactggttccgacagacagggacaaggataatttgcttcagaagtcagagattaagttcttgaaccaggttcagggccctgaaagcatggcatttgaccctcttggtcgtggtccttacactggtgttgctgatggtcgagttctcttctgggatggtcaaaactggaaggattttgcttatgcttccagcaataggtctgaaatatgtaatcccaagccatcaccacagagttacctgccaaatgagcatatctgtggcaggcctttgggtctccggtttgataaaaacactggtgatttgtacattgctgatgcatatttggggttgttcaaggtgggtccggaaggcggattagcaacaccacttgtaactgaggtagatggggtgcccctgaggtttaccaatgaccttgacattgatgatgaaggaaacatatattttactgatagcagcagcaaattccagagaaggaacttcatgcagctagtttttttttcgagaatagtgggaggcttctgaagtataatctttacac

SEQ ID NO: 191644 - DNA, 489 bp, Gossypium hirsutum
cggacgcgtgggtgaaagtaggtgacgacagaagagggttgtggaattgggaagccgaagaagaagctactgcgattgcgattgccaactcattcttccgtcatgggcaactgtggcactagagaggaatctgacgttgttactcatgctcaagttcagcagctccacaaccacatcttatccgacaagaagcttactcaaagtcagagccagactcagaatcgtaccctctcagatctgagcgacttcgaggattccaggaaaaatgcgcttctctatacccacattattgccttcactttattcgagcttgagactattaccaagagcttccgttctgactatattctcggggaaggtggcttcggaacagtctataaaggttatattgacgagaatgtgcgggtcggtctcaaatctcttcctgtcgctgtcaaggtcctcaacaaggagggccttcagggtcaccgcgaatggcttactgaggtc

SEQ ID NO: 191645 - DNA, 760 bp, Gossypium hirsutum
cggacgcgtgggggctgaagctcagtcaaagtgctgtcttaaaaccctagttttcgagctctctttcagttttccggaagccatgtcaaggagaaaggttagggagcccaaggaggagaatactaaccttggacctgctgttcgagagggtgagcatgtttttggggtggctcacatttttgcttcattcaatgacacatttattcacgtgactgatttgtctggaagggaaacaatggttcgaatcactggtggtatgaaggtgaaagctgatagggatgagtcttccccttatgcagccatgcttgcagcacaagatgtttctcaacgctgcaaggagttgggtattactgcccttcatataaagctccgagctactggaggaaacaagacgaagacccctggtcctggtgctcagtcagcacttagagcccttgctcgttcaggcatgaaaattggtcgaatagaggatgttactcccattcccactgatagtacccgtagaaagggtggcagacgtggaagaaggctgtgattctttgctttatatcaattactcactcagctactactgctgtggtgcttggagttttctttgttaaacagttttctttatattcaagtgtgttttgctcggttctcttgctgcacatttagttttttggaaatggattttagatcttttatctagacaggaaaaagttgtggaactatttaatgcagcttcaaagttaagcttttatattattgaggtttttat

SEQ ID NO: 191646 - DNA, 814 bp, Gossypium hirsutum
ctagagtcgtcggaggccaaagcatcaacgaaagctttcacaaaaccctagtctctaactacttctttgttttgcctaagccatgtcgaggagaaaggttagagagcccaaggaggagaatactaacctaggacctgctgttcgagagggcgagcatgtttttggggtggctcacatctttgcttcatttaatgacacattcattcatgtgactgatttgtctggaagggaaacaatggttcgcattactggtggcatgaaggtgaaagctgatagggatgagtcttccccttatgcagccatgcttgcagcccaagatgtttctcaacgctgcaaggagttgggtattactgcccttcatataaagcttagagctactggagggaataagaccaagacaccaggtcctggtgcacagtcagcacttagagcccttgctcgttctggcatgaaaattggacgcatagaggatgttactcccattcccactgacagtacccgtagaaagggaggcagacgtgggagaaggctgtgattctttgcttcgtatctgttgctcactgttgctgctcctccaatatgcgtggaatttcttttttaaacaatttttggtttagattgaagcttgttttgccctgttatgttgttgcacattagttccagaatggattttgatcgtaatttacatgtggaactcttggaagttaagctttttattgactgtgattttcctttggagtcaaaatactatattgggaatcaattacatctgaaactcattttatttaattaagtcctgcttttatctgatctt

SEQ ID NO: 191647 - DNA, 624 bp, Gossypium hirsutum
ttttgacagctctctcagtctctcatattttgcctgagaaaaccatgtcggggagaatggttagggagcccatggaggagaatactacccttgggccggctgtacgagacggcgaacatgttttcggggtggctcacatttttgcttcatttaatgacacatttattcatgtaacagatttgtctggaagggaaacaatggttcgcattacgggtggtatgaaggtgaaagctgatagggatgagtcttccccttatgccgccatgcttgcagcacaagatgtttctcaacgctgcaaggagttgggtattacagcccttcatataaagcttcgagctactggagggaacaaaaccaagacacctggtcctggtgcccagtcagcacttagagccctcgctcgttctggcatgaaaattggacgcatagaggatgtcacccccattcccaccgatagtactcgtagaaagggtggcagacgcggaagaaggctgtgattctttgcttcatatctgctactcagccgctgctgctggcggcctgacattaggaattctcttttgcttttgaaacaatcttctgattagattcacgtttgcttgggtctgatcttatgttgcacac

SEQ ID NO: 191648 - DNA, 697 bp, Gossypium hirsutum
cggacgcgtgggcggacgcgtcggccgcgcgtcccctaatttgacagctctctcagtctctcattttgcctgataaccatgtcgaggagaaaggctagggagcccaaggaggagaatactacccttgggccggctgtacgagacggcgagcatgttttcggggtggctcacatgtttgcttcatttaatgacacatctattcatgtgacagatttgtctggaagggaaacaactggttcgcattacgggtggtatgaaggtgaaagctgatagggatgagtcttccccttatgcctgccatgcttgcagcacaagatgtttctcaacgctgcaaggagttgggtattacagcccttcatataaagcttcgagctactggagggaacaaaaccaagacacctggtcctggtgcccagtcagcacttagagccctcgctcgttctggcatgaaaattggacgcatagaggatgtcacccccattcccaccgatagtactcgtagaaagggtggcagacgcggaagaaggctgtgattctttgcttcatatctgctactcagccgctgctgctggcggtttgacattaggaattctctttgcttttgaaacaattttctgattagattcaagtatgctttgctctgttcttatgttgcacacttgtagttcctgaatggattttgatccttgtatcttaa

SEQ ID NO: 191649 - DNA, 474 bp, Gossypium hirsutum
tgtgtgaattttagaccacaaaggagatcaacgtaatcttgaaccgtagcatcgtatataagtccggggtttaaagctctattggggttaacatgaccagctcccatggctaaaggatcagccggtcggagatttccgcctatatcctttatcggactacctgtgttatcgatttgatcggatgttgtcatcaaagccgatcgaattgccgcagggctccaattaggataaacagcttttaaaagggctgctatacccgaaacatggggacatgccatggatgttcccgacaataagttgaaattggtgaacacaaggtcttgatttacacgagctgctgcaacatttggaggccatgcagcgaggactgagtcaccaggtgccataatatcaggctttaaaaccaatggacaactataggaaggacctcgagacgtatagctagtcacccttggtgatggccggacgcgtaaa

SEQ ID NO: 191650 - DNA, 639 bp, Gossypium hirsutum
cccacgcgtccgcccacgcgtccgaaaaggaaaaaaagaagaggaaaatggaggcaccaaagacgattcagcacgaaattggaggagtccagaacgacgccctgcgattcggtctccacggcgttaagagcgacctcgtcggatctcaccctctccaatctgcttacgaatcagcaaagaaaacgcaggaagagatgaagagaaaagttctggccaatacttatgggacagcaatgccactcaaaatggatctcgataggcaaattctctggcggtttcagaggccattgctaccatcttcgatgctagggttggaagcggtgacaggaactttagatgattttggctttgaggattatctgaatgatcctcgagattcggagactgttcggccattggacttgcaccacagcatggaagttcgtctcggcctctccaagggaccagtctgtcctagttttatgtgagattttcattgactacttcagtgttgtcccatgaaggaagtcacttgctgatcttttcattttttccttattgaatttatccgttatcttccttttttttcattctcattccacatttaatttattttttttatttgtgcgtaccctctaaaattatattttccactttgtc

SEQ ID NO: 191651 - DNA, 659 bp, Gossypium hirsutum
tgacctgatgatgataaagtggcggattccaacgtataagagcaacactagatttaaggaataggtttgaggtccaggtgtctttctttttctttggttacaatttccaacaccgaaccacacgtcaaatatctggactgtcaagtctctcacatagtggcttgagttcaagtcttaataagtgaaagagcaagagaaaaaggaaagtcgagcaaaaaaataataataaaaagagagagtaaaggaacatgggaaaatccacttcctgtttcaaaatcatcacttgcggcggagattttgctgagaacaacgacgttattcatgttcctgagcctgagattaagaaatcaaatgacaaatagggatggagttttagaaagagatctgaacggcatcgggtgcttagcaacactgttatacaagaagctacttctggacttaaggaaagcccggaatctgccggttttaattttcaacagcctgatgcatccattattcctgaagaaacctccaccattgaatacagtgaagagaaacctcaggcgctgacaccaaaggagcacattgaagaagaatctaagtgtgtggcatcaaaaggataccctgaaaaaaaatctcagttgttgattccagagggctcaaaagttcctgaaccccgt

SEQ ID NO: 191652 - DNA, 774 bp, Gossypium hirsutum
ggaaaatcaagaaaatagaatacttgatcagatcagaaactgttcttagtttccctttttttttttttttgcaagagctgctttgaattcgtaagtggacgccggagattggaagagaaagatgcgcttgatctgttccaagtttcatttccaactcttcccagaagattggtgcttggacgggatgggcagctgcactgcagagtatatggtggatagcaaatactagagaatctattaaggtttcctggctgaattatggcttctgcaagcctaggaaatggtggagcaggtagttcaaggtctgtcaacggtttcaaaagttcttctagttctgttgattggctggggagagaaatgcttgaaatgagactgagagacaaggtggaccatgatgaagacagagatagtgaaccagaagtagttgatggagtgggtgctgaaacagggcatgtgataagaaccaccattggtggtcgaaatggtcattcaaagcagaatgtcagttatattgctgagcatgcggttggaactggttcttttggtgttgttttccaagcaaaatgtcgtgaaactggagaaattgttgccatcaagaaggttcttcaagacaagcgctacaagaacagggagttgcagattatgcaaatgctggaccatcctaatattgtgtcccttaagcattattttttctcaaaaacagacaaggaggaactctacctcaatcttgttcttgagtatgttcctgagactgttaatcgcacagcaagaagc

SEQ ID NO: 191653 - DNA, 848 bp, Gossypium hirsutum
ctagtctcgagtttttttttcatttcctttttttgtttgttggttttttatcgcgggctgttcaattattcttttttgggaaaaagatctctctctcactctttctctctcctctcttccctgatctcattagatccattcaaagggcaacaaatcatcagaggaagaagtaaagcaaattaagaaaaatggcagcaacattaggagactcaagctcctggtccactgctcttgtcaagatttcaccttatactttctccgccgtcggtatcgccattgccatcggcgtttccgtcctcggcgccgcctggggaatttacataactgggagtagtttgatcggtgccgctattaaagctcctcgaatcacttccaagaatcttattagtgtgatcttctgcgaagctgttgctatctatggtgttattgtggcaattattttacaaacaaagttagagagtgttccttcatcacagatatatgaaccagagtctcttagagctggatatgcaatctttgcttcaggaattattgttggctttgcaaaccttgtttgcggattgtgcgttggaataattggaagcagctgtgcactgtctgatgcacagaactcctcactgtttgtgaagattcttgtgattgagatttttggcagtgcacttggattatttggagtgattgtaggtataatcatgtcagctcaagcaacatggcctgcaaagtcagtgtaattttccgctcttagttacaacttagctctgtgagactgcaatctgttgaatgtattagttactgaaaatggcgcctacatatgtaaccatgtatttagaaacatgcttggacatgct

SEQ ID NO: 191654 - DNA, 639 bp, Gossypium hirsutum
cggacgcgtgggcttttgtgaagctgttgctatatatggtgtaattgttgcaattattttacaaacaaagttagaagagtttccaataataaaaattttatccgcctgagtctctaaaagcaggatttgcaatctttgcttcgggaattattgttggctttgcaaaccttgtttgcggattgtgtgttggaataattggaagtagctgtgcgctgtctgatgcacaaaactcctcactgtttgtgaagattcttgtgattgagatttttggcagtgcacttggactgttcggggtgatcgtaggtataatcatgtcagctcaagcaacatggcctgcaaagtcggtctaatttcacgatcttagtagaaaatagctattgggttaagaatgcaaacctgtttgtttcatgtgccggttatcagaaatgaaattcacattttttcttttgttttgttattggtagtatgtattatttagaaacttgcttggaagtgtctcctctttttcgttcttataacacatttgtcgagtgagaaataaaactttctatgaaaaccatgatttatggttaagaggatgagttgtggcactgggattttttttgggctatagtaattaattttatcgtcaaaaaaaaa

SEQ ID NO: 191655 - DNA, 700 bp, Gossypium hirsutum
gctgtgctaattcccatctgatattattcatatatgatataattacaaacataaggaaaaagaattaacaaatcgtattgtagttttaaatgtttatgtacgaacttcaactcctttacttctatttctacctttagttttaccatgaaacaaaggagaggaaaaaacaatgtgaaaaatctaaaaaaagcatactctcaaaagtcaacaaaggaaacaaacaaaagggtcaatgttgaacttgaacatcatctttttttcttgtgactcgaatgtaagcaaaaactgctgcgaaaaaaacggtgacaagtccaccaatgatgacaccaccagcagccatggagccatcatctgatgatgaatcatgctttcctagccgtctgatccctggtgcttcagcctctctggtctctcgagacgactccgcaggacttggaacaggcacatctgcttctcttggaatcgcccaaccaggccggtcctccttatggaccttaatctcaggtggtttcacattcaccccaaaatcagattcctcacccactgcatggaccagcaatacctccacaagaaggagcaaagaaaacaaaacaagcttacccacagccatatgatatttaagccaaaacaagagaatattgtagcgttggagctgaatactgtgtttggactctccttattcctaggaggcaacacaggt

SEQ ID NO: 191656 - DNA, 774 bp, Gossypium hirsutum
  unsure (1)..(774): unsure at all n locations
cccacgcgtccgcccacgcgtccgcaaaggttaaagaaagaaagaaaacatgtctcttgtgacagaagagataaaagcgagtgcatcagagatttaccatggagatgagatatgccaagagaaatccaagtttttgttggaggaagtaggcatgccaagggggcttttgccacttagagacatcgaagaatgtgggtacgtgaaggacacaggtttcgtgtggctcaaacaaaagaagagcatcacccacaagttcgaaaagatagggaagctggtttcctatgcaactgaagtcacggctgtcgttgagaaaggcaagatcaagaagctgactggggtgaagaccaaagagcttttggtttggatcacactgagtgatatccaagtggatgatcctcccactgggaagatcactttcaagaccccttcagggctgtttaggactttccctgtatcagcttttgagattgaaggtgaacaagttaagggttctaagggtaaggatgaagagaaacaagtgaatggagctgtggaagtgaaggaagtctagagtcctttttcaattcccaacagaagaaagccttaatgtactaaatatcattattagcaatcaataaaaaaaatgattttattttatggtaaaaaaaaaaatcagaaaatgtgttgtgttgttgcttcaatcagctggaatggtagtgtaaccaaatgcctatgtaagtgaaaaaaaatgctccgtttccgcgaaaataatcanatagtaaaatataaattaat

SEQ ID NO: 191657 - DNA, 588 bp, Gossypium hirsutum
tcccgccgttcctgaagcgaaatctgtcggaaaatgagctcctaactggcgttacgttcgcgtcagctggatcaggatatgattatttaactactaggttatccaatgccatcccagtttcaaaacaagttgagatgttcaagagttacataaacaagcttaagggaattgttggaaaagataagggcaacaacatcattggcgaagctgtggtaatcattagtgcagggactaatgatttcgttttcaatttccatgatattccgaccagacgattggagttcgacattgttggataccaacattttctgcttcagaaactagaagatttcctcagggatttgtatgaactcggatgccgaaaaatgatcgtagccggactgcctcccatcggttgcttaccgattcaaatgacggcgaaatttcaaattccaacaaatcgaaaatgcttggaagatcagaactcggacgctgaatcttataacaagaagcttgccaaactgttgcctgaactacaagcaaagcttccagggagcaagcttgcatatgcagacgtttatgaaccattatttgacatgattaattatt

SEQ ID NO: 191658 - DNA, 385 bp, Gossypium hirsutum
tggagattgaacattacagcttcatcaaggtatggattttagctataatttccctttgttattgttactacatatcatcaaagctccccaaaggcattttcaagctttttctttaaccccaatcttcatcttcttcctttacctccctctcaccgtctccacctttcatcttgttggcatcagcgccttcttcctctcttggttagctaatttcaagctcctcctcttttgtttcgaccaaccaccgctttcaccaccaccgtccaacctttttcacttcatttccttagcgtctcttcccattaaacctaaacaaaaaaccccatctcaaaacaaatctaaaccaccccaaagatcaatctttgttgctataaaaagtctacta

SEQ ID NO: 191659 - DNA, 1562 bp, Gossypium hirsutum
ccacgcgtacgcgtacgcgtgggcagtttcgtcggaaaaaaatggctacatcgttcttggcgtctcttttcttcaccttttgggcgctgcttatttcaccggcgatttccctcacctgttcctcccagaagtttacgaaaaaccaagtttactccaactgcctcgaccttccttctctcgcctcttacctccacttcacttacgacccttctaacactactctctccgtcgccttcatctctactccttccaaacccggcggatggatttcctgggccataaatcccaacgccaccggcatggccggttcccaagcactcgtcgcttacaaaaactccaccaccggcgttgccgtcgtgcatacttttgacatcagctcttattcttcaattgtgccgaaggatttgtcgttcgaagttccagataagacggcggagactagaagcgacgggagcctggccattttcgctacaattaaggttccggcgaatttagcggcgaaagggacgattaatcaagtgtggcaagttggtcccggcgttggagaaggtggcatgttagaaagacatgacttcgccgccgccaatttgcattctaaaggaacgctagatttgaaaaatggacagagtagcactaattctggaggagacaccaccgttaagaagaaaaatatccatgggatactgaatactgtgagttggggaattttgtttccacttggagctatgattgctaggtacataagaagctttgagtcagcagatccagcttggttttatcttcatgttttctgtcaaatatcagcttatgccataggagttgctggctggggaactggtcttaagcttggaagtgaatcctctggtatcacatattcgggtcatagatacattgggattgcccttttcgtcctcgctactgtccagatctttgctttgtttttaaggcctaaaaaggaccacaagctccgattctactgggacatttaccaccacagttttggatacgcgatacttgtcctcggcatcatcaatgtgttcaagggcttcaatatcttgaagcctgagcataagtggaaatcggcatatatgattgtgatcattgctatgggcgggatttcgttgctattggaagctattacatggattgtagtgttgaagagaaagtccaggaaatccacaaaaccctatgatggatacaacaatgctcaatctaatcaacagcctcttgccatgtgatcaaccgattccttgtagtccaacctggttttgtagcaatcgtctccctctctagactcgagaccctgcatgaggtttaccgatcccggaccagttatttatttttgtctattgtatgatctcttgattccatatattgctatcatcactagtatttgtattgtatgtacatatcgtgtgtatatatatactgccgagtatatcagctatctttttttcggatagaatataggaagggtgaaactttataagtttgaatatgtattgaaaatgattgtgaaacagattgtattcataattcttttttcttaaaaaaaaaaaaga

SEQ ID NO: 191660 - DNA, 707 bp, Gossypium hirsutum
cctttcgaggttaatcccaattctcccttaagtgtaaatgaatggttttttttccgacgttgttctttaacaacattctgtaaaggcatttaaccctacggatttgggggtttgagatggcctcatcggagtgtttaggatggaagtctggaagggaggccagctccattaggaccttcgattgctttcacataagcagcacggcactgttggacctgttgtccacctcgggccaaaccagtcaaatcatttttggtctcaccttcagtaaaatactcaaactttggaagcttcactccagcaacattctcttgtcgcgatcggactttaagagaagcagtctgaacactttcaagcacgacgtgtttgatgttctcaccagcaacatacttggcctctgttagggaaaatgaggaggtttttataatctctcccattgactctttcgtagacactatcttcttaagaatctgacgaaattgtacggttagggcatcactcttcttcttgagaagtgcgtgacctcttgtcgcgcccacaagccgagctttcatgattccaagcattgtaacagttggaaccacattcaagcgctggctttggccggacatttttcagatatcggtaacggagcggagatttgcggccgacgtttccaacttggatgaataaatttttctgtgcgataatttttttttatttttaaa

SEQ ID NO: 191661 - DNA, 1146 bp, Gossypium hirsutum
gcaagctctaggagctcattcaaagcatagaagatcattcaagcaacagacttgagagctttgaaatgtttcacgtctatcgtcatgaatatcagctcattgataataatactcaatatttcatgacattccatttattcaaaacaacactaaatgattaaaggaatctcccgccatcaaataggcaccagatagaaacccagagctcctaggaaagaccataactaccctcttcattagaaaataatatcttcatccttctccctggctgcggatagcatattgtgagctgaatttatagagaccccttttctcaaggaagccttctcagcaacctgttcctcagcaaccagcttggcctctgcaagctgtctctctatctccctcttcttataaccttgtatcttctttaacctgaagaaatcctccctttcaagctcatccaactctcccttgatgtaacttatggtattctccaaccttggcttcacaacattctccaaagcattaaccctgcgatttgtagtcttgattgcctcgtcaagtgtcaagaatgatgtctgaagagaagcaagctcaactagaacctcaattgctttcacataagcagcacgacactgttgaacctgttgcccacctctggccaaaccagtcagatcattcttggtctcaccttcagtgaaatactcaaacttgggaagtttcactccagcaacattctcttgtcgggaccgaactttaagagaagcattttgaacattctcaaggacaacatgcttgatgttctcaccagcaacatacttggcctcagttagggaaaatgaagaggttttcataatctctcccattgattcttttgtagatactatcttcttaaggatctgacgaaattgtacagtaagggcatcactctttttcttgagaagtgcatgacctcttgtagcacccacaagccgagctttcatgattccaagcattgtaacagttggaaccacattcaagcgctgggattgaccggacatctttcagatatctgaacaaaacgacgtcaccggtaaacagagcggtgtttcgccgccggcgttcaaagatcgaagaatgaatttcgctgtgcgtatctcgagttttattgtaattttgattttg

SEQ ID NO: 191662 - DNA, 474 bp, Gossypium hirsutum
cggctgcgtcgaccagaattttttttttttttttttggagcctcgaaatggtgtatgtctgatcattaaccataacacaaaataagtggagtagagacatgcatatggcatttattcaaaacaccacctgaaaataaaggaatctcccaccgtcgaacatacatcaaatagaaaaaccaagaataccagaaaaaatacagactaacctcttcatcaaaaaataatgtcttcatccttctccctggccgcagatagcaaattgtgagctgcatttattgaaatccctttctgcaaggatatcttctcagcaaacttatcctcgacgaactcctttgcggcagctagctgtttctctatttccctcttcttataaccttggatcttctttagcctgaagaaatcctccctttcaagctcatccaactctcccttaatgtaacttatcgtattctccaaccttggcttcacaacatc

SEQ ID NO: 191663 - DNA, 562 bp, Gossypium hirsutum
cacctacaatatataccacccttacacgtcatggatcccgataactgtgtatatatgtttaagaaatgttacccaatccttccgaagctacagtttaaccctttttgcatggcttggaaagattacactggagacctatatctcgcagattcacatctggctaagatccgggattccagatggtcagcctaagctgctcctttctctgatcccagattacccaatgttgaatttcatgcttacgacttccatatacctggcaatttcttacagactctttgacttgacaaatatactgaaatcagcttttgtacctaccaaagacaacaagcgccttctccacaacttgattactggtgttgtagtctcgagcatattatactctctctctttcgtgttcctaagaatccctcagatgttggtgtgagaactataaatatagagatagtaggaggcagccaccatgaccttgttcatcactgtgttgttggaagtattttccttcacaatggaaacgtaaaattgctgaattcaattggagaatacgttctcttgatcagat

SEQ ID NO: 191664 - DNA, 1433 bp, Gossypium hirsutum
tcgtatacattaagctgactttcacatacatttccatcattcttttttcacactttttttatataattttgatagtataatatggagaaatggtatggggtttcagggctggtgttggttttgagtttgttctttggggttaaaggagaaccccaagtcccatgttacttcatttttggagattcattggtagataatgggaacaataatgaacttcgttcattggctagagctgattacttgccttatgggattgactttgctaatggaccgaccggccggttttcgaacggtcgaactacggtggatgtcatagctgaacttttggggtttgacgattacatccctccatactcaactgcaagtggtagacaaatactgggaggagttaactatgcatctgctgctgctggaatcagagaagaaactggacaacaactgggagctcggattagtttcagtgggcaagtcaaaaattaccaacaaacagttcaacaagtggtgaacgtgcttggagatgaagacagtgcagcaaattacttaaggcagtgtatttattcaattggattgggtagcaacgattaccttaacaactatttcatgcccctttactactcaaccagtagacaatatagtcccgaggaatatgccaattctctgattcaagagtacactgagcagcttcaggcattatacaactatggggcaaggaagtttgtgttgataggtttgggtcagatcggttgcagtccaaatgaattggctcaaaacagtggagatggtcgaacatgtgtggaaagaatcaatgctgccaataggattttcaataacaagcttaggggtcttgtcgatcaattcaataacgccaaatctgatgctaaattcgtctacattaatgcctacggaattttccaagacatcaccagcaaccctgcagcttacggttttaaggtgacaaatgcaggatgttgtggagtggggaggaacaatgggcaaataacatgcttgccattccaaacaccatgccagaacagggatgagtacttgttttgggatgcatttcatccaagtgaggctgccaatgtgatcattgggaggagatcctacagcgctcaatctcctaccgatgcttaccccattgatatccgccgtcttgctcagctctgaaactgaaagtcgacgaggtttttgatgggaatttatagataattaattgaatcgttgtagaattctttctatatttgtgtcgttttgaattgtgtaacagcttacaatcataagtgttattgttctaagggaagtggcaagcaatatatatatatatgcacttttatatgtagctccaaatgatgagtgttgttctgtttggtaattgttgtaaagttttagtttgtatcatcactaataatgttaatggattgatgggttggttt

SEQ ID NO: 191665 - DNA, 381 bp, Gossypium hirsutum
ataaaattatcaaatttggcattatatcaaatgaaaatatagtctacatacagaacacaattattggtatccttaacttgaaacaaattgttcaaggatccagattaactggttttaaatacacaaacaatttattgtgaagtttgaaactttaagcaccaccagtcagctgaaggtgcttgatgtttgtaatctgttttcctgggttcagacccttcgggcaagcacgagcacaattcaatatcgtatggcaacgatacaacttaaactcgtcatttatggcatccaatctctcttttgcgtattcgtcacggctatcgcttatccatctgttagcgtgaagcaaagcagcaggacccaaataagattcaggattccacc

SEQ ID NO: 191666 - DNA, 1894 bp, Gossypium hirsutum
gcctcgtcagccgtcacgcacctccgtcaaccctaacggcaagcaccaccttctgtcatctcctccctatataattcttctgtttccgtcttgcggggtcagaggaaaaaaaaaacctcagtgaaaattcattttctttggactttctctgaaatccgagtcctaggaaagatgcgtgagattcttcatattcaggcagggcagtgcggcaaccagatcggtgccaagttttgggaggtggtttgcgccgagcacggcatagattcaacgggacgctatcaaggggacaatgatttgcaactggagcgcgttaacgtttactacaatgaagcgagttgcgggaggttcgttccacgagccgtccttatggacttggagcctggcactatggatagtgttagatccgggccgtacgggcagattttcaggcctgacaactttgttttcggccagtccggtgcagggaataactgggccaagggtcattacacggaaggggccgagttgatcgactcagtgctagatgtggtgaggaaagaagccgaaaactgtgactgcttgcaaggatttcaagtatgccattcattgggaggaggaactggatcgggcatgggaacacttttgatttccaagatccgagaagaatacccagaccgaatgatgctcactttctctgtgttcccttcccctaaggtgtctgacactgttgtcgaaccttacaatgctactctctctgttcaccagcttgttgagaatgctgatgaatgtatggttttggacaatgaagctttatatgatatttgcttccgtacactgaagctcactactccaagctttggagacttgaaccacttgatttctgccaccatgagtggtgtgacatgctgccttcgtttccctggtcaattaaactcagatctacgcaagcttgccgtcaatctcattccattccctcgcctgcatttctttatggttggctttgctccacttacttctcgagggtcacagcaatacagggctcttactgttcccgagctcactcaacaaatgtgggatgccaaaaacatgatgtgtgctgctgatcctcgccatgggcgatacttgactgcttcagccatgttccgtggcaagatgagcaccaaggaagttcgatgaacaaatgattaatgtccagaataagaactcatcttactttgtggagtggatccccaataatgtgaagtctactgttggggatatccctccaataggcttgaagatggcctcaacgttcattggaaactcgacatctattcaggaaatgttccggagagtaagtgagcagttcactgccatgtttcgcaggaaggctttcttgcactggtatactggggagggaatggatgagatggagtttacggaggctgagagcaacatgaacgatctggtttcagagtaccaacaatatcaagatgcaacagctgatgaggagtatgattatgaggaggaggatgcggaggaggatctccaggaatagtagtagtgtgtgtttcttactgtttgctttcttaacgatttggattttttttttctgttctttcaacctgaattcctggtttgggtgttagaaatgtggtttcctggcttatgtttttttgtttacgaacatctttacatcagtagatagatactagactcgtacggatgcatatggttttgtatgggatgttgctttttggtaactatggaatttggtactataaatatattagaaattactctgaagttatggtgatgtagagagggagagtgaagttacccatcccatctcatttttgtgtgatcttctgtaactcgcatccagagcaacagtgacttgcacaatttctcatttaaaaaaaaaaaaaaaaaaaac

SEQ ID NO: 191667 - DNA, 1646 bp, Gossypium hirsutum
  unsure (1)..(1646): unsure at all n locations
agagagataaccattcttttgttgttgttgttgtcgtcgtcatggcttctctgcctttcatcttcttcttatctttctttataatctccacaacattgacgtcagccggcgccgccgccgccaccatcaaactctccctctctcccttccctcacccttcttcctcccatccttaccaaattctcaacaacttagtcacttcttctgttgcaagagcccaccacctcaaacatcccaaagccaaggccgataatactacctcttctcttctcagggctcccctattttctcacagttatgggggctacactatctccctcaaatttggaactccgcctcaaacccttcctttcgtcatggacaccgggagcagcctctcctggttcccttgcacctctcgttacctttgttcccaatgcgcattccccaatgttgaccctgcaaaaatccccacttttgcccctaaactttcatcttccagtaagctcgtaggttgtagaaaccccaagtgtagttggctttttggccccgacgttgagtctcgttgccaagactgtgaacccacttccgaaaactgcactcaaacctgccctccttacataattcaatacggtttaggttccactgctgggcttctattagtagaaaaccttgctttcccccagaaaaccttccaagatttccttgtcggatgctccatcctctccaaccgacagcccgctggaatagccgggttcggtcggagcgctgagtctataccctcccaattaggcctcaagaaattctcttactgtctcgtttctcgccggttcgatgacactggcgtcagcagcaacatgttgttggaaaccgggtcgggttccggtgatgccaagaccccacgccttagctacacaccgttttacaggaaccaagtggcttcaaacccaagtctcacaggcgtctagtacctagctccacgttgaatcccggtggggcaagaacccttcagggttccgtgcagttactctggtcccaggatcagacgagtaacggtgggaccatcgtggactcgggatcaacattcactttcatggatagaccagtgttcgaggtagtctcgaaagagttcgagtaacaaatgggaaattatataagagcgcgtgaaatagaaaacatttcgggtttagccccatgcttcatcatttcgggctatacttcaataaaattccccgaattgagtttccagttcaaaggaggagccaaaatggcattgcctttggttaactatttctcatttgacggtgatgataaggttgtgtgtttgatgatcgtttcagacaatgtggtcggccaaggctcacacagcggtcctgcaataatactagggagctttcagcagcagaattattacatcgaatttgatatcgcaaacaataggtttggatgggctgaacgaagctgtgcgtgagctgcactttgttattttgtgttttggccatgaatatgaaagtcacctttttctttggcttctatttttaatggaatggtgacaaaagggttataagcttcttttttctgtcatttttaatcaaaaagtttgattatattgaaaattttaatgcatcaatntntttttctccccctcttccntnnnnncccccccc

SEQ ID NO: 191668 - DNA, 1013 bp, Gossypium hirsutum
  unsure (1)..(1013): unsure at all n locations
caagaatgtgaacccacttccgaaaactgcactcaaacttgccctccttacctaattcaatacggtttaggttccactgctgggcttctattagtagaaaaccttgttttcccccagaaaaccttccaagatttccttgtcgggtgctccattctctccaaccgacagcccgctggaatagccgggttcggtcggagcgctgagtctttaccctcccaattaggcctcaagaaattctcttactgtctcgtttctcgccggttcgatgacaccggcgtcagcagcaacatgttgttggaaaccgggtcgggttccggtgatgccaaaaccccaggccttagctacacaccgttttacaggaaccaagtggcttcaaacccagttttcaaagagttctactacgtaactctacgtaaaattctggtgggcgataagcacgtcaaagttccgtacagttatttggtcccaggatcagacggtaacggtggcaccatagtggactcgggatcaacattcacttttatggagagaccagtgttcgaggtagtctcgaaagagttcgagaaacaaatgggaaattatagaagagcgcgtgaaatagaaaacatatcgggtttagccccatgcttcaacacttcgggctatacttcaataaaattccccgaattgagtttccagttcaaaggaggagccaaaatggcattgcctttggttaactatttctcatttgtcggtgatgataaggttgcgtgtttgatgatcgtttcaaacaatgtggtcggccaaggctcacacagcggtcctgcaataatactagggagctttcagcagcagaattattacatcgaatttgatatcgcaaacaataggtttggatgggctgaacgaagctgtgcgtgagctgcactttgttattttgtgttttggccatgaatatgaaagtcatctttttcttttgcttctatttttaatggaatggtgacaaaagggttattancttcttttttctgtcc

SEQ ID NO: 191669 - DNA, 711 bp, Gossypium hirsutum
aagtacccgacataaatttagaaatctatatgagactataaccatccaaaatataaggaaaaagttgagcatacgcactattatttagcgctcttaatccgcggttaacctcactttcaagtacaaattacacatatataattccacatgaaataggatagctaccaagaaaagcttagtaccttcaacttttgaatggttagttaggatttcttacttagtttcctcttgccttttccaaatctggaagatacagcaatccttcatcatcactgctttcttcttcttgaccaacatacgtggcatcatcatcatcagaggccaaatcagaatttggatcttcatcgtcttcatcgcaccatttgttccaatcaaccttgatgtaaggcgcgggtttctcttctgactttaacaatcttttccaccaccctgtttcttctttcatgattgagcatattatattccttaacccaacattagttttgcaaccctcaggaactattttcccaaaaagctccaaactgaaatcgaaggattctccttgcactcccatggcagagaagctaaacagcccctgagggtcacatttaacagaaatgtctttcgcatcaggcaaagaaatcgtaagatataccttatcagagcgctgagcccaaagaacttccgggtgacgactcatatctgggtacttgaaacaagcccacgcgtccg

SEQ ID NO: 191670 - DNA, 371 bp, Gossypium hirsutum
gcaaaacccagggatatgaataatataaccatacttgaaactgggttcaaaccatagtaatatgagtaatctttgtcaaagattggccagaaacctacaactctcatatcatacattattatgattcagaaaacgagtactttaccatcctcaaaatgatatgagcaccaactaaacaaaagtttcactaacttttaccaaacaaataatccgggaagaatactatgagaaatacatgaacaaacaacttcgaagctattctttctccatggttgatggctcaagcctacccttcaagcagcaacctgaccaaagagccacttgcggatctctggaagttttttattgaatgcaacattcaatcgtgcatc

SEQ ID NO: 191671 - DNA, 415 bp, Gossypium hirsutum
cccactcgtcttcccacgcgtccggaatgtcgtggttagctagatcgattgctaactcgctcaagcttgacgacgacgacgacgacgatcggaccaatgcggcgctggatccgaaacccgaatccgatccgaatcctaaccaagcctctccttctcattcccattcatcatcggatcccaacactccacgtggcgtcaaagaagacctatccgagcttaccaaaaccctatctcgtcaattctggggggttgcttccttcttcgctcctcctcctccggaatcatcggagcagcagcccgatcacgcggctgagaaggaggaaaactctctccggccaccgccgtcttctgatgatacggatgagtcgtcggatgaggcattgatagcgggaatccgtagcgatttatctgagat

SEQ ID NO: 191672 - DNA, 480 bp, Gossypium hirsutum
gcaaagagttagatcgaagattgcaaaatgtttaactttgaagctgaggtatttgcaaaagaaatcatcaaaccatcttcactagaaatccatggcatgaaacctttcaaactcaatatctttgaccaactcaccccaacaacttatgcctcattcatggcattttaccccttgaatgaagccaatttcactaccaccaacatcttgcctcatctaaaggcctcgctttctgaaaccctaaacatcttatatccaatttccggtcggatcaaagataacatattcatcgatcatttccatgaaggtgtgccatttttatcagctcaagctggttgtcgattgtctgagtttcttaagcaccatgaggttaagttattgaacaaattgcttccatgccaacctttctccaaggaattcaacaatgaggctcccctccttgtgtgccaagtcactattttcgcttgtggcgggatagctcta

SEQ ID NO: 191673 - DNA, 879 bp, Gossypium hirsutum
  unsure (1)..(879): unsure at all n locations
accggaacggaatggccggacccgacccacgcggtttctataaacaaagagaaactaggtgtgaaacaatggcgtcctcggatcttattggcaagctcgagactgatgtcgagatcgatatttctcccgaaaagttccaccatatgtggtgccacaggccgcaccatgtccaccacactagctctgaaaaagtacaaggatgcgatttacatgaaggtgaatttggaactcccggcgtcgttatctgctggagatatgtgcatgatggaaaggctaaaactgcaaagcaggtagttgaagttatggaccatgagaaaaagtcaataactttcaaaatgcttgaaggagatctgatggaggaatacaaaagcttcgtgattacaatccaaacttcccccaagagcgacggtaaaggcagtatagtgcactggactctggattatgaaaagctgcacgagggtattggacatcccgagtctctgctccagttctttatcgaactcacagcggacatggctgctcatctccgcaaggaaacttaattaatggatagaccatggcaagaaaatcccatgtcgaatcgtctgctattactattactatcagtactgatctaagaataaaactggcagctttgtactgtgttttcatttgaatatttgtatgctaggtttgattatgctgttatgagtgggggagcgcagcgttctgtttttatgtaatgaattaaatctactatgtgcttttatttgagtgnnnnnnnnnnnnnnnnnnnnnnnnnnnnnnnnnnnnnnnnnnnnnnnnnnnnnnnnnnnnnnnnnnnnnnnnnnnnnnnnnnnnnnnnnnnnnnnnnnnnnnnnnnnnnnnnnnnnnnnnnnn

SEQ ID NO: 191674 - DNA, 470 bp, Gossypium hirsutum
cttacgcgtccgcttcacagatccaaaccctttaaaccaacagatccgttgttgaatttcaaagttgtttgttacaggaaatggctggtggaacagctccccctagaggaagtgcagcagcagccgcaagcatgcgtaggcggagaaccacaagtggtgcagcctcaggaggggctgctgggaccatgcttcaattttacacggatgatgcaccaggtctcaagatctcgccgaatgttgtgcttgtcatgagcatcggtttcattgcttttgttgccgttctacatgttatgggcaagctgtattttgctcgtagagaggcttcgaaggaatttgtcggccagaaaaagaaaatgtcaacaggatttatttaggagtcttgagttgccaagcaaaactgtttctttttattattaaaaacaagtctattgtcaaaagtgcaattttgtttacattgttctacttgtttg

SEQ ID NO: 191675 - DNA, 617 bp, Gossypium hirsutum
ggggagaaccaaaatcatcaccaaaaacaagaagaagaagcacagcatagacaacatcaagatcagaatcatgaagaaaaagatcaacaaccacagaaacatgcagcacaagtggaagaacctgagcagaaaagccccacagtttcactatctccattaacccaaaaaaccactcagtcaccaccatcttattattcccctattgattctccgctctcatcttgtaattcttctctcagtcatggcttttctccaccaccaacaacgacaacggcagcagtatctcatccttctgaacccaactccaagccaccatctgcagtggtttccagggcggagctcacatctagagatcaatcaaccacaacaactactaccgttgaacttgaagaacagacacaaaaactgggttctggtagtggtaaaagattgaggcctgatttatctatattaagaagaaccaaaagagataagatgattaaaaaggctttattgggatttagaatttctgggtttgttttttgtttggtttctttctctgttttagctgctgataaaaatcaaggttgggctctagattctttctaccgctacaaggaattcaggttttgtatggc

SEQ ID NO: 191676 - DNA, 609 bp, Gossypium hirsutum
atttattttctcccaattattttcatcgttagggagaacgaaaatagaaatgggaagcgatagcgaagtagagaagacgcagcagaaggagaaggagaggaagaagatgttagctatagctcccatcgcaaagccccttgctggcaaaaagctctccaagaaaacccttaagctcgtccgaaaagcatctgagcacaaatgtttgaagagaggagtaaaggaagtggttaaaagtattcggcgtggtcataaagggttatgtgttatagctggaaacatatctcccattgatgtcataactcatgttccgatcctgtgtgaagaggctgacattccctatgtctatgttccctcaaaagaggatcttgcaactgccgggtctaccaagagaccgacatgctgtgttctggtgctaaccaagcccaccaaaggtgaactcgccatcgaggaacaagaaaagatgaaagccgattatagccacattgtataggatgtatctgagctcacatcctctatgttttaagttaacaaaaaagttgtcattataacatttgatattgacatcctcttattttacttccagggggggaatatgctttactacttgtt

SEQ ID NO: 191677 - DNA, 1769 bp, Gossypium hirsutum
cggggcgaccggggcgtccgcccacgcctccgtgctgtttcaacaggctttctctatatgggtatgatccagttctaacgaaagcttatttggaaccaaatattattgttaagagttgttgtggttcaagaaagtagggaaagtgtgggaataaaaaatacattgacaagaagagggcagctaagagaactgaatcgaccatccctattttcaatatggaagacattgaggagggtgttgaaggatatgaggaagaaagatctcttctcatgtctcagaagagactagagaagcgatttggtcagtccccggtatttattgctgctaccttcatggaacaaggaggcattccaccatcaaccaatcctgcaacacttttaaaagaagcaatccatgttattagttgtggatacgaggacaagactgaatggggcaaggagattggatggatttatggttctgttacagaagatattttgactggttttaagatgcatgctcgtgggtggatatcaatctattgcatgcctcctcgtccagcatttaagggatctgctcctatcaatctttctgatcgtttgaaccaagtgcttcgatgggccttgggttctattgagattttgctgagtagacattgccccatatggtatggttacaaaggaagattgaggcttctggagagactggcatacattaacaccattgtttaccccctcacctctattcctttgcttgcttattgtatgcttcctgccttttgccttctgacaggaaaatttatcattcctgagataagcaactttgctagcatgtggttcattctccttttcgtctccatttttgctactggaattcttgagcttaggtggagtggtgtcagtatcgaagactggtggagaaacgaacagttctgggtcattggtgggacatcagctcatctctttgctgttttccagggtcttctgaaagtgcttgctggaatagataccaacttcactgtcacttcaaaggcgtctgatgatgatggcgattttgccgaactttatgttttcaaatggacatcacttctcattcctccaaccacagtactcattatcaacctggtgggcattgtggccggcgtgtcgtatgctataaacagtggttaccaatcctggggtcctctttttggcaagcttttctttgccatctgggtgattgctcatttgtatcctttcttgaaaggtttggtgggtcgtcaaaatcgtaccccaacaattgtcatcgtgtggtctatacttcttgcttccatcttctcattgctgtgggtgcgtatcgaccccttcacctcagaagctacaaaagctgctgctaatggtcaatgtggcatcaactgttagtttcgtttccggattattttattccagtaaaccctctctccttcaagttggctattgtgtatataaccaaaggaaaaggagacgtcgccctattatctgcaaaaagattatttctactcctgcggcatgatataagtttatggggacctaagaccagccgccctattatctttttggtcacttctattcttctacgtggtattgctgatgaagttggatgttggtgttgtggaattctatgagtatattgctctctttttggtgagaaattttccaaaaaaaaaatataaaaaaattctagggggcccggtcccatatgccttatagagacgttaaatctatgggcgcgtttacacactgactggaaaacctgggtcccacttatactct

SEQ ID NO: 191678 - DNA, 802 bp, Gossypium hirsutum
tgacaatgaagctatatacgatatctgcaggagatggttggacatcgaaaggcccacttataccaacttgaaccgcttgatatcccaaattatctcttctttgaccacttcattgaggtttgatggcgccataaatgtggacattacggagtttcagactaaccttgtgccttatcctcgtatccatttcatgctttcatcttatgccccagtaatctcagctgcaaaagcttaccatgagcagatatctgttcctgagatcacaagtgccgtctttgaaccctcaagcatgatggccaaatgcgatccgaggcatgggaagtacatggcatgttgtttaatgtaccgtggggacgttgtacccaaggacgtcaatgccgctgttgctaccatcaaaactaagcgggcagttcagtttgtagactggtgccctactggtttcaagtgcggcatcaactatcagccaccaacggtggtaccagggggtgatcttgctaaagtacaacgtgcagtgtgtatgatcagcaataacaccgctgtggccgaggtttttgctcgaatcgaccacaaatttgatctcatgtatgccaagagagcattcgttcactggtatgtaggtgaaggaatggaggaaggtgaattctccgaagcccgtgaagatcttgctgctctagagaaagactacgaggaagttggggctgaaggtggtgaagacgaagaagaaccggaagattactagatccgtatttctgaaaagcacaggctaatgattccccacgttcctcatctgattttacttcat

SEQ ID NO: 191679 - DNA, 971 bp, Gossypium hirsutum
gcagaaaatcttgtctcagatcccgatatactcacaccattaacctcatataaacattatttctctttcttccaataagaacacacacacacactccacaatataggctctgatcaccttacttcactctcaactttcaaccacaagggtctttctttgtggtccttaactacttgattgatgatcatttctatatacatatatcaataccacctttttttcctttctttactccctttttcagttttcctctaatacgttatttatatatagggggggttgtggttccgagaaatgcaagaaccagggttaggtatgatgagcagtggtggtgggagtggtggaattggagggttaagcagcggtgaagtgtcggtttccggtgaccagaaccgtcagctgaaggctgagatagctgttcatccgctatatgagcagctattagcagctcatgtttcttgtctccgtgttgctacgccgatcgatcagttgcctttgattgacgcacagttagcacagtcgcataaccttctgagatcctatgcttcacagcatcacaacatggtcactctctatcaccccatgaaagacaggagctcgacaacttcttggcacaatatttgatagtgttgtgtactttcaaagaacagcttcaacaacatgtcagagtccatgccgttgaagctgtcatggcttgccgtgaaattgaaaataacttacaagcgctcactggagtaaccttgggtgaaggcactaggtgcaacaatgtcagacgatgaggatgaactgcaaatggacttttttctggatcaatctgggccccacggccatgatttaatgggttttggtccttacttcccacagaatctgaaaaactttaatggaaggtgtctcagagctcagattgacttaacagggttcaaatcagattgtgattttagaggaatttaccctataggcttgaaattcct

SEQ ID NO: 191680 - DNA, 617 bp, Gossypium hirsutum
cagagtccatgccattgaagctgtcatggcttgccgtgaaatcgaaaataacttgcaagctctcactggagtcaccttgggtgaaggcacaggtgcagcaatgtcagacgatgaggatgatctgcagatggacttctccttggatcaatccggcaccgatgggcatgatttaatgggttttggtcccttgattcctactgaatccgaaagatctttaatggagagggttcgccaggagctcaagattgaattgaaacagggttttaaatctagaatcgaagatgtgagggaggaaattttacggaaaagaagggctgggaaattaccaggtgacacaactacggtgctaaagaactggtggcaacaacactcaaagtggccatacccaactgaagatgataaggccaaacttgtggaggaaacaggattgcagctaaagcaaatcaacaactggttcatcaaccagaggaagcgtaactggcatagcaactctcaatctgtcacctctttaaagtcgaaccgaaaacggtagaggtgaataaattcaatgagaaatggagaagaagaaagtttgagcatgttgatgtcaacttcttgcggtaaatagctgtgggctc

SEQ ID NO: 191681 - DNA, 927 bp, Gossypium hirsutum
tcggcctcctccattttcccacattctgcaaccattcttttctgattaaaaagcaaaaaaaaaaaaaaaaaaacaaaacaaaaccaaacttcaaacaaaagggaattttcttgtcataattttctgaggaattcatcgatggcaaccaaagtgtatattgtatactattccatgtatggacatgtggaaaaactagcagaggagataaagaaaggggcggcatctgttgaaggtgttgaagcgaaactatggcaggtccctgagactctgtcagatgagattcttggaaagatgagtgcaccaccaaaaagtgatgtaccgatcattacaccacatgaccttcctgaggctgatgggtttatttttggcttcccaacaagatttggcatgatgtctgcccaattcaaagcatttatggatgcaactggtggtctatggagaactcagcaacttgctggaaaacctgctgggatattctatagcactggatctcaaggtggcggacaagaaactacaccgttgactgcaatcactcagcttgttcaccacgggatgatttttgttcccatcggatacagctttggtgctggcatgtttgagatggagcaagtgaagggtggaagcccttacggtgcaggaacctatgctggggaacgaacaagaatgccatccgaactcaagttggcgcaagctttccaccaagggaagtacattgccggaatcacaaagaaactcaagacagctgcctgatttcaaattactacagaaaaccacaatttgtccttttgattttttattttctagaatttcagttctctatattttacaaatataaaaagaaagcaataattcatgtcctggtacatgcttgtacgtgtgttacaccttacattggtttctcatttatagtaagtttggtgatttatt

SEQ ID NO: 191682 - DNA, 454 bp, Gossypium hirsutum
ttttaatttgtgaattaaaattaagtaagcggaagagtagttgatattatttatcatcatcgtcgtcgtcatcctccatattaaattatacaggatgggtcaccattcttgctgcaatcaacaaaaggttaagagaggcctttggtcccctgaggaagatgaaaagctcattaggttcatcaccactcatggctatggatgttggagtgaagtccctgagaaagctggtcttcagagatgtgggaaaagttgtaggctgagatggattaattatttaaggcctgatataagaagaggaaggtttacacctgaggaagagaagttgatcattagcctccatggggttgtagggaacaggtgggctcatattgcaagtcacttgcctggaaggacggacaatgagattaagaactactggaactcatggatcaagaagaagataagaaagccttca

SEQ ID NO: 191683 - DNA, 896 bp, Gossypium hirsutum
  unsure (1)..(896): unsure at all n locations
tcttgtttggtcagttgtcacatcagttgaaggacgtgttcctcttgctagtgagggtttaagtctggttgtgggctccatttctggtgaagatatacttgtatcttttggagggtataatgggcgttacaacaatgaggttaatgttctcaagccaagtcacaagtcgactttgcaatcaaagataatggaagcccctgctcctgatagtgtttctgctgtgcaaaatgcgacaaatcctaccagagatttggaatctgactttgaagttggtcaagaaggaaaaatacgagaaattgttatggataacactgactcagagcacatgaaatccaaaggtgaggagactagtgagctcattatagcaacactaaaggcagagaaggaagaactagaatcatcactcaacaaggataaattgcagtctctccagctgaaggaagaactaacccaagctgagactcgaaacacggatctgtacaaggagctccaatccatacgtggtcaacttgctgccgagcagtcgagatgtttcaaattagaggttgatgttgccgagctgcgacagaagcttcagactatggaaacactacaaaaggaactcgaactcctgcaacgacaaaaagctgcatccgaacaagcttccttgaatgcaaagcaaaggcaagggtcaggtggtgtatggggttggcttgcangaagccctccacaaaacgctgatgatgcctgaaaagccgaattaaacagtaatttctacatttattcgaattgatcaaattttagtgaaatacatacatttttctagttaatcaaagttctttctatgatgggaataagatatctagttttgcccaaatgacccattgggggtttttttgcatgaatacatgtctccg

SEQ ID NO: 191684 - DNA, 506 bp, Gossypium hirsutum
agaagagaaagaacaaagcaaaaggaaaaatttaagaagcctttgtttggggttcttgaagctagctagctccacattttctatggcttcaaagcttcttttgattgctgtctttgttcttgatctcattgcttttggtttagctgtggcagctgagcaaagaagaagcactgccaagattgtccaagacagtgaagttaattataactattgtgtctatgactcagacatatcaacaggctatggtgttggtgcatttttgttccttatggttagccaagcccttataatggctgcaagcaaatgcttctgctgtggaaagggtttaaaccccagtggttcaagggcctgggcagtcatccttttcatagtctgctggttgtttttcctgattgctgagatatgcttgctggccggatcggtgagaaatgcctaccataccaaataccgaaccattttcagcgagcagcctccctcttgtgaaactgtgaagaaaggtgtgtttg

SEQ ID NO: 191685 - DNA, 825 bp, Gossypium hirsutum
ccggactctaactcagcgatctgagtcgcgagtcactgggtatcgaacaagacgaaccattggccgttaatttcgcgttcaagctttacaggatgccggacgagagcgtctccgtcgagaatccaagagacgagctcttgcgccgcgtgaaaggattagcaccgcgcgtgctgacattagtggaacaagaaatgaacacgaatacggcgccgttcgcgttaagagtgggagaagcatgcggatattacggagctttattcgactcggttgagtcgaccgtgttgagggataacccggaccgagcgcagctagaggaagggctgttacgcaaaatcgccaactcagttgcttgtgaaggtagggaccgcgttgaaagatgcgaggttttcgggaagtggcgggcccggatgagcatggcggggttcgagttaaagccactgagccaaaccgttgccgaaacgatgcgcgccaaactcaactcatgcaaccgagtcaacccaggcttcaccgttaaagaagaaaacggaggtgttagcttcggttggctgggccgaacactcaccgtcgcatctgcttggcgttaaacttggctttccctcatttctctctctaataataaaattatgatattattattaatggttattatatttctaacgttttccttagaagaaaaagaatatgaaaaagcaagagaaaaaaaatatcccaccaaacccaaataataaaaaggagtgtttggataggaagaaatttctgcgtcttattaatgttttttttttacatttttgtgtgtggaatgaagtgttcgggataatgctgact

SEQ ID NO: 191686 - DNA, 754 bp, Gossypium hirsutum
gatggatgttgcaacagaggcacccaaagctccattgacaagtgaaaggaaggttcgaacagaccttgaagaacacatacctaaaccctatttggcaagggcatttgctaatccagatgtggaacatccacatggaacaccaggacgtgacaactatggaatgagtgctcttcagcaacacgcttccttttttgatcaagataaagatggaattgtttatccttgggagacctacagaggtatgagaaatattggtttcaatccaatttcgagccttgttattgcaattaccatcaatgtggcattgagttattggactctccctggatggctaccaaatctatattttcccatatgcatagatagaatacataaatgcaagcatggaagtgactcttcaacatatgacactgaaggaaggtatatgccaatgaactttgagagtatttttagcaagtacgctcgaactgtgccggacaagttaacactgggggaactatggcacatgactgaggctaatcgaaactcatatgatttcattggctggataatatcaaaaggagaatgggtacttttgtatataattgccaaggatgaaaatggttatctaacaaaagaagcagtaaggggatgttttgatgggagtttgtttgagtatattgccaaaatgaaaggtggcaaggttcactgactgacgttgctgtgttaaaatatatgtgttggttttgggtgatcaaataaagcttgaattaaa

SEQ ID NO: 191687 - DNA, 1100 bp, Gossypium hirsutum
tgggggccccaaaaaaaaaattttaccttgcaaagcaggggaagtaaaacttggatctttaaaaagggcccccctttttttttttttttttttttttttttttttttttttttttggggttttttttttttttttttttttttttttttttttttttttttttttttttttttttttttttttttttttttgacataaaaatgatgggatttgatcaaattaatgaccagatattcaacaaccaaaaagttttttttgatagtcaatgcagtggttttctagcaacgtatcaattaaccaacaatgttgcaactgccaacacctcgaatagatacaacaatgaaatctaatccattcaaataacaaaattgtaagaaaaacaagctagtcactagaaaattcagtacttaacaggcgcaaggatgtcaagttgagaaccaagtttcgcttcagaagccttctcagccttcaccctaagcttattcagctgcttctttctctcatatgccacttgagctctttccttcctcttcctctcaagctccttgatggtgtcataatggttccatccaacctcagaggaaagcttgcccaacaagcagtacttgtgtcctttctgaagcctcaaaaccttgagagcatcaggaataaccatcctctttgtcttatcatatggagctggaatcccctcataagccttcaatcgagcaagagcagctgccccacgcttggtcttgtggggaatcatgccacgaatggtacgccagaggatcttagcaggagcacgaaaatggatggggccatgagaaggcttagtgttcatccgcttcctcaagaacctcatgtacttcatcttctgcctcactaaaccacccgacatacaaatctcttcgcatcgaacaaccactactttttggccattcaacaactccttggccaaaatggaagccaaccttcctagcatgtgatgccttgcatccacaaccactctcttggcgcagatccctgaccctgaaaccatcttgtttctcttttctggttggttgatcgtttacgccccctgctgctgctgatgctgctgatgctattctaacaaaaat

SEQ ID NO: 191688 - DNA, 466 bp, Gossypium hirsutum
aattataaaaggcatatatgaattatatttgaatgatcctacaccaaaaagttcattaagaaaaagggacaacccaagattcaacaaaaattttaacctccacatctcaaaaggaactaaatagtgaaaccaataacctttaacaaaattctatgaaactagctagccactagaaattcagtacttaactggggcaaggatgtcgagttgagagccgagtttctcttctgcagtcttctcggcttttaccctaagcttgttcagctgcttcttcctctcatatgcaacctgagccctttccttcctcttcttctccagctccctgaggttggattgtgtcataatggttccatccaacctcagatgacaagcggcccaacaagcagtacttgtgccccttctgaagcctcaaaaccttaatcttatgaggaatcaatccgcgaacagtgcgccaaaagatcttggc

SEQ ID NO: 191689 - DNA, 519 bp, Gossypium hirsutum
ctaaacagacttaatttttagtcatatatttagataaccatataatccagaacaagtgtaacactgacaactcaagcaaccaaaacttatgtctgaaaatactgttctaatcagataccaaaatctgcgtggtgtttttgcagtaaaaggacatgtttttcaaaggaaaaaaaaaaaggtctcctccaaacgcatgtaagcattaacatctacttcaaaagaaccataaaattatgagctactcagaaagatgcattaaacttaaacccagatgaatcaatactcgattggagaaataacttccaactgcgtgccaagcttctcctcggccaccttctcggctttaaccctgagcttagtgagttgcttccttctctcggatgccacttgagctcttgccttcctcttcctttcaagctccttgatagtgtcatagtggttccatccgacctctgacgagagcttgcccaacaaacaatacttgtgtcctttctgaagcctcaaaaccttgagagcatc

SEQ ID NO: 191690 - DNA, 964 bp, Gossypium hirsutum
tgttaaaatgcccaccttgaaatgggtgtaggcaaaaaaatgtaaaaggctcatagtcgtttgctcaaatgataagactactgcactcttagttctagtaaaatcatgatccaatcccgaaaaacgttagatatcaatattcagaatctagcaatcaggaatgtttctcaagcaaagaaggaaaagcaccgagataacagaggaacatatatagcatagcatctacctgatgcgattgcgggaatagaattatgagcaactctcaaccacattatggaagtgcactgaaacgtaaccagtatgtttcaatcatctttgaatcaatatgtgataggagcaataactcccacctgggcaccaagcttctcctcagcaaccttctcggctttaaccctaagtttagtgagttgcttttttctctcatatgccccctgagctctttccttcctcttcctctcgagctccttgatggtgtcataatggttccatccaacctcagaggaaagcttgcccaacaagcagtacttgtgtcctttctgaagcctcaaaaccttgagagcatcaggaataaccatcctctttgtcttatcatatggagctggaatcccctcataagccttcaatcgagcaagggcagctgccccacgcctaggtcttgtggggtatcatgccgcgaacggtgcgccagaggatcttggcgggagctcggaaatggatgggaccatgagaaggcttggtgttcatccgtttgcggaggaatctcaagtacttcatcttctgtcgaacgagtcctcccgacatgcagatctcctcgcatctcacaaccaccactttctggccgttgagcagctccttggccacgatcgaagccaaccgccccaacatgtggtggcgggcatccaccaccactttcttagcgcacactccagatccggacaccattgttttcgccttatggagctcc

SEQ ID NO: 191691 - DNA, 430 bp, Gossypium hirsutum
cccacgcgtccgagattccaaaaaccaaccatggcatccactgataaaactgctgtcccactgtcatcaccaaagtctgaagctaccccaccatccgcagtggcggctgcggctaagtcccctgtcaactattcttttgtcgatgttgttcttcgggtcttattatttgccgctactctaacttcagtggtggtcatggctaccagcaaggaaaccgagctggttccagtgccaggcttccctttagttaggatccaactccaagcaaagttcaatcattcacctgccctcgtatatttcatagcagcattatcagtaacaggcttctacagcattatcactacgttggcatcactttcaatcgtccttaaccctacctattccaaaaccttcttgctcttttttgctttcttcgatgtgatattggccg

SEQ ID NO: 191692 - DNA, 779 bp, Gossypium hirsutum
  unsure (1)..(779): unsure at all n locations
gtgaaatgagtgagaatcatgtgatccaccccactcggctctctcacactctttgtctctaaatccaaaatccaactaaaaaagatcataaatttatccatccatcaaaactacccaagcttttttctttttcttttttttttctgtatttgctttattgttttgtgtttcaatggcttcaagcgcttcaagatttatcaaatgtgtaacagttggagatggagctgttggcaagacttgcatgcttatttgctatacaagtaacaagttcccgacagattacataccaacagtttttgataacttcagtgccaacgttgtagttgaaggcacaactgtgaacttaggtctttgggacacggctggacaagaggattacaacagactaaggccattgagctacagaggtgcagatgtctttgtcttagctttctcattagttagtcgagcaagccatgagaacgtactaaaaaagtggattcctgaacttcagcattatgccccaggcgtccctgtggttctggttggcaccaaattggatcttcgtgaggataaacattatctggctgatcatcctggcttgctgccggttagcaccgcacagggcgaggagctccgcaaacagataggtgctgcttatacattgagtgcccctcaaaaactcagcagatcgtgaaagcaatttttgatgctgcaatcaaagttgtgatcaagcacccccaaaaacggaagagaaaaagattaacccagttcaagatgtctnataaaatgtctcctct

SEQ ID NO: 191693 - DNA, 1514 bp, Gossypium hirsutum
  unsure (1)..(1514): unsure at all n locations
cccacgcgtacgaccacgcgtgcgcccacgcgtacgcccacgcgtgcggcccaaagaaaattccgcacgtgtcaatatcctcatcatcgggctaatcaggataaccagagagcaaccaacagctcaaaccagtcgctcccatctccaacaaaatccttcgacatccgaaccaggcggagttccgcagcgtccgtacgatttagggctttcctgagaccaacgatcacgatgtaccgtactgcagcctctcgcctccgagctctcaaaggtcgcacgagccgtatagcacctgcaaggtttgcaagttcaagcactgttgctacaacatcatcctcttcaggtggcctcttaagttggctgactgggagtcaatccaagtctgtaccatcactagatttccccctacctggtgttgcccggccaccttcgttgccaggctgattcagggggccaaactcattttgctcttgcatttgaacttcctggtggttggcacaatgagaaggaagctataattttgaccggtcttcagattctaatgggaggaggtggatcattttcagctggtggccctggaaaaggaatgtattcaagattatatctacgtgtcttgaatcagtatccacaagttcagtccttttcagcattcaacagcatttacaaccatactggcttatttggaatacaagctacaactggttctgattttgtaccatctgccattgatgttgctgtcaaggagcttatttgctgttgcaactcctggacaagttgagcagaaagaactggaaggcgtgcttaaacagtcgaccaagtctgccattttgatgaacttggaatccagagcagttgcttcagaagatattggtaaacaaatcttgacatatggtgagaggaaacccgtggagcatctcttgaaggggcgtcaatgaaattacaccaaaggatatttcttcagtagccgaaaagcttctatcttctaatctcacaatggcatcttacgggaatgtcattaacgtaccaagatacgattccattagcagcaagttcaagggaaaatgaaaaactgctttgttctgtcgaacttgggtatttcatctgtctttcaacagtattattatgcatctgcatatcttaaagagttgtttttcataaaaatgatgcggttgaaaatatgaagttttaagctcttctattttgaacaaaataaattatttgtctctagctagtgagcaaaacatattagttaaaaataatagcttctgcaaacaatggggttcgcatgtttctgctgaattccatgattttggtcatggttagtccaaaaataaagtctctgtattcttttttttttactttgttttataaacccaaagtaaattctacgatggttgtggaacttagagcacaatatttgagtggcacaatttatatatgtcagtacatgtgcagtttatggcacaatttttcaaaaaaaaaaaaaaataaccttatttttaaatagataaannnnn

SEQ ID NO: 191694 - DNA, 380 bp, Gossypium hirsutum
cccacgcgtccgcccatcttcaacattaatccttcgacatccgatccaggcggggttccgcagcgtccgtacgatgtagggctttcctgagaccaacgatcacgatgttccgtactgcagcctctcgcctccgagctctcaaaggtcgcacgagccgtatagcacctgcaaggtttgcttgttcaagcactgttgctacaacatcatcctcttcaggtggcctcttaagttggctgactgggagtcaatccttgtctgtaccatctcttggtttccccctaccaggtgttggccctacctccttctttgcctgattatgttgaaccttgtgcctgtttatggtgtacctggtttatcttatgatttcctctgtttcaaat

SEQ ID NO: 191695 - DNA, 1642 bp, Gossypium hirsutum
  unsure (1)..(1642): unsure at all n locations
ggaccccgaagccgaagccgaacccgaaccgataaagaaccccacatcatactcactctactcaacanaaaccctagtccccccttctgtgatatttatcgccctcttacagtctctcccgctccttctcgctgcgatttcgtcttcaagatctcagttctcaaatcgtagcgctcttttctatcaagccatggctctgatcttgcatgcaggaaaaacaaacaaaaatgcctttaaggcactcattgctgcagaatatagtggtgtgcaggtcaaaatggttgagaattttgagatgggtgtgtcaaataagactcctgagttcatcaagatgaaccctttggggaaggttcctgtgttggaaacacctgagggtcctgtatttgagagcaatgccattgctcgttatgttgctcgctcaaaggttaacaaccctatatgtggttctacattgattgattatggtcatatcgagcaatggattgattttgcagccattggaaattgatgctaatattgcaaaatggttgtatccaagacttggttacggtgtttaccttcctccagctgaggaagctgctattgctgcattgaagagagcccttggcgctttgaacactcatcttgcttccaacacatttcttgttggacattttgtcacccttgctgacattatcatgacatgtaacctctacttgggtttctcccagatcatgactaagagttttacctcggagttccctcatgttgagaggtacttttggaccttggttaatcagccaaaaatcaagaagattcttggtgaagtgaagcaggcagtctctctaccacctgttccttcaaagaagcctgctgcccagccaaaagaaactaaaccaaaggctgaaccaaagaaagaagccaaaaaggaggttgagaaacaggcagcaaaggcagaggcagctgaggaggaggaggcaccaaagcccaaaccaaagaatcctcttgatttgctgcctccaagtaagatggtactggatgactggaagaggctttactctaacacaaagaccaatttccgagaggttgcaattaaaggattctgggacatgtatgatcccgagggatactcactgtggttttgtgactacaagtacaatgaggagaatacagtttcatttgtcacaatgaacaaggttggaggattcctgcagagaatggatttggcccgcaagtatgcatttgggaagatgttggtgatcggtgctaaccctccattcaaggtgaaaggactatggcttttccgtgggcaagagattcctcaatttgtgattgacgagtgctatgacatggaactctacgagtggaagaaggttgacctgtcagatgcagcccagaaggaacgggtgaatcagatgattgaagactgcgagccatttgagggagagcctctcttggatgccaagtgctttaagtgatagaatatgttcttaattttacttttttatatttctggtacctttttgcatgtcaggttttatttataggttgctgttttcagttttgattaaggtaacattacaattaagttttaatgttctgagatgttggatttgaaatgctctatttatgttatattaagaagatatagtttctattgttt

SEQ ID NO: 191696 - DNA, 410 bp, Gossypium hirsutum
  unsure (1)..(410): unsure at all n locations
attgacgagtgctatgacatggaactctacgagtggaagaaggttgacctctcagatgcatcccagaaggaacgggtgaatcagatgattgaagactgcgagccatttgtgggagagcctctcttggttgccaagtgctttaagtgaatatgtcttggttttatgttgcttgctactgttctgcctgtcagggttttctatacggtcagttttttcaggttcggacttatttttcttttctcccctttttgagtctggttcagccaacattacaattaagttttaagttctcagatgttgattatggaacgtgttatttatgttattaaggaggtatggtttttgttttttattnnnnnnnnnnnnnnnnnnnnnnnnnnnnnnnnnnnnnnnnnnnnnnnnnnnnnnnn

SEQ ID NO: 191697 - DNA, 739 bp, Gossypium hirsutum
tgttttgggctctcattgtaactactctcacccttcaactagccattacgagtgcacaaacaccagctgcctcaccttccagtacgccaaccaccaccaccaccactccaccttcaacttcgccaccacctacaacttccgcaccacctccttcaacaacccctccacctacaacttcagcaccacctccttcaacagcattgccaccaccatcaccaccaccagtatctcctgcaccagcaccagctcagaaaccaccagctcctgcaccagtaaagctgcccccagcacctgcacccattactttgccaccggctcctgcaccagctcccaccaagcacaagagaaggcacaggcacaggcacaggagacaccaccatgcaccagcaccagcaccaacagttccaagccccccagcaccacctgcagtgccaactacagatgacacgacaccagcaccatcacctagtctcaatttgaatggaggagattcattgttggtggcaggaacaaagctttggtgggcaaggacaggattgactattgccattttgatcgctattacaggctatagtttctaggaactcataagctaaggggtgattgtgatttactttacaattgcttgtcataccttttttctttttggtttgtatttctgtcacataacagagaatattgtttcatttgtgtaacaaaataaattgaaattttaatagaaatagatacgaataagacc

SEQ ID NO: 191698 - DNA, 788 bp, Gossypium hirsutum
cgactccaatgttttgggctctcattgtaactactctcacccttcaactagccattacgagtgcacaaacaccagctgcctcaccttccactacgccaaccaccaccaccactcctccaccttcaacttcaccaccacctacaacttccgcaccgcctccttcaacaacccctccacctacaacttcagcaccatctccttcaacagcaacgcctccaccttccaccacgcccaccgcgccagctcaaccacctgcaacaactccccctcccactgttgcaccagctacaagcccaactgtcccaccgccacaaactccaccacctcaaccacctcaaactcctccaaccacagctccagctcaaccgccagcattgccaccaccatcaccaccaccagtatcttctgcaccagcaccagcccagaaaccaccagctcctgctccagtaaagctgcccccagcacctgcacccattattttgccaccggctcctgcaccagctcccaccaagcacaagagaaggcacaggcacaggcacaggagacaccaccgtgcaccagcaccagcaccaacagttccaagccccccagcaccacctgcagtgccaactacagatgacacgacaccagcaccatcacctagtctcgatttgaatggaggagattcattgttggtggcaggaacaaagctttggtgggcaaggacaggattgactattgccattttgatcgctattacaggctatagtttctaggaactcataagataaggggtgaatgtgatttac

SEQ ID NO: 191699 - DNA, 723 bp, Gossypium hirsutum
gaaacaaacaaaagaaaaacctcaatatccaaaatccaaagccaatctcaaaaaacccatcaaaaaagaaaaaaataacaaatctcaattttctcaaccctttttccttgtggaagagtaggaaaaaaaaataaaaacatgcaagaagaccctcaagccaagtccttggaacctattgaagattatccaagaagtgatatggtgtttgggtggataaagcccaaacaagataaaaagagcagcaagtgtcttgtttacattcttgttattatggtcatccaaggatccatcctcttggttttagccaacatttttttacgtgcccgaacacctgatttcgagatcggctccgtcaaagttagaaacctcaagtatggtaattcatcggttccatcttttaacttcacactcgtgacccaagtcaccggtgagaacacccatttcggagagttcaggtttgacaaaagtacggggactgtctggtgtgggtctgaagttgtggcgctaatgaagatacctaaagggatagctcaagctagggcaactgacaagatgaaggtttctataaattggtggccgggcatgaagctccgatcactggcggaaccatcgtttttgggaccaatctgctgttttcacggtttcaccctcatgcaaacccatgcaccgtgcaccattcctttatataaatcccagcaggaggcaacataatatcaacacagt

SEQ ID NO: 191700 - DNA, 1001 bp, Gossypium hirsutum
tcgttcacgcgtccgtcttcacctatctctttcacaaaggagagcacagaaaaaaggggttcttgttcttgttcaagttcttgatcaatggctaaggatgttgaggttggtggtgagttccaagccaaggactaccatgatcctccaccagctccattggtagatgcccaagagttaactcagtggtccttttatagggctataatagctgagttcattgccacccttttgtttttatacatcactgtgttaacagtgatcggatacaagagccaagttgatccagataagggtggtcaagattgtgatggtgttggcattcttggtattgcttgggcctttggtggcatgattttcatccttgtttactgcactgctggtatctctggaggacacatcaacccagcagtgacctttgggcttttcttggctaggaaggtgtccttagttcgagccatattttatatggctgctcaatgtttgggagccatatgtggatgtgggctagtgaaggcattccaaaagtcatattacaacaagtatggaggaggagccaacagcctcgctgatggatacagcactggaactggtttggcagctgaaatcattggcacctttgtgcttgtctacactgttttctctgcaactgatcccaagaggaatgcaagagattctcatatccctgtcttggcaccacttcccattgggtttgctgtgttcatggttcacttggcaactattccgatcaccggaaccggtatcaaccctgctcgtagtttcggagctgctgttatcttcaaccaggacaagccatgggatgaccattggatattctgggttggaccattcattggagctgccattgctgcaatctatcaccagtttatcctgagggcagcagctgctaaagctcttggatccttcaggagcagctctgccatgtaaaacaaaggggttgccattgaagaatggatcaagttctatctatgactgtgaagaga

SEQ ID NO: 191701 - DNA, 852 bp, Gossypium hirsutum
  unsure (1)..(852): unsure at all n locations
attaacattcactcaaaactctctcagttcatcccatatatatacacacacaactccacttccccatcacaaaaaatatattcttcacttcacatcttttgggcaatcaattttgtaagcaagtatggctaaggacgttgaggttggtggtgagttccaagccaaggactaccatgatcctccaccagctccattagtggacggggaggagttgacaaagtggtcattttatagggctgtaatagccgagtttattgccacgctcttatttttatacatcactgtgttgacagtgatcggatacaagagtcaggttgaccctgataagggcagtgacgaatgcggtggtgttggcattcttggcattgcttgggcttttggtgggatgatctttatccttgtttactgcactgctggtatctctggaggacacatcaacccagcagtgacctttgggcttttcttggctaggaaggtgtccttagttcgagccatattttatatggctgctcaatgtttgggagccatatgtggatgtgggctagtgaaggcattccaaaagtcatattacaacaagtatggaggattggattaagttttatcaatgtggtcaagaggctttttcagaccactcaatttgtttattataatggaggatgtcatgcttttatgtatgtggcacttattttcaatgtgccccatcattatccctgcttttctttcctattttatggtctttctttgtttggcttggtgtttctaagttatctttgaaaattttataaaaatcangtcnctataaaaaaaacacaaacaaacaaagacaatgaaaaatacattaaacaaatantg

SEQ ID NO: 191702 - DNA, 710 bp, Gossypium hirsutum
  unsure (1)..(710): unsure at all n locations
tttgttacgcgtccgcccacgcgtccgatagctgtagagctaaccagcccttccaatataaccacctaaagagacccatcaagcaaaaaaacaagggaggaatatagcagcaatggcgacgccaaagcagcagcagatgttggaacaacagcaatcaccgatgcagcgagtgaagaactcggaggctggggtgatgatggttacttcaagatcaaaaggggtgtagacgagtgcggtatcgaatccgatgtcgtagccggattgccttccaccaaaaaccttgttcgagaggttacagatacaggaattgtcgaagatgcttcattctaagagaagatcatctagacaggcttacctaatatcatagtttatcaatgaaggaactgttatcgttgtttccatttcaagtttcaaatgttacgcttcgcattgcaagaacttcagcctgtatataattcatatgttctgcttcgtagtatggataatgtaatgcaaccattctgacaaattaccacttcgatttagctttataattatcgtcagaaatggcttgatactgcnnnnnnnnnnnnnnnnnnnnnnnnnnnnnnnnnnnnnnnnnnnnnnnnnnnnnnnnnnnnnnnnnnnnnnnnnnnnnnnnnnnnnnnnnnnnnnnnnnnnnnnnnnnnnnnnnnnnnnnnnnnnnnnnnnnnnnnnnnnnnnnnnnnnnn

SEQ ID NO: 191703 - DNA, 495 bp, Gossypium hirsutum
cccacgcgtccgctgtaatccaagcttctattcagttttgtaagagctatggctaaggacattgaggttggtggtgagttccaggccaaggactaccatgatcctccacccgctccattggtcgacgctcaggagttagccaagtggtctttttacagggctgtcatagctgagttcattgccactctcctctttctctacatcactgtcttgactgtgatcggttacaagacccagaccgaccctgctaagggcggtgaagattgtggcggcgttggcattctcggcattgcttgggcttttggtggcatgatctttatccttgtttactgcactgccggtatctctgggggacacatcaacccagcagtaacctttggacttttcttggctaggaaggtgtcgttggttcgagccatattttacatgggtgctcagtgtttgggagccatatgtgggtgtgggctggtcaaggccttccaaactcgtactaca

SEQ ID NO: 191704 - DNA, 666 bp, Gossypium hirsutum
gcaagagactcccatatccctgtcttggcaccacttcccattgggtttgctgtgttcatgggtcacttagccactattcccatcaccggaaccggtatcaacccggctcgtagtttgggggctgctgttatcttcaaccaggacaagatatgggatgaccattggatattctgggtaggaccttttattggagctgccattgccgcaatctatcaccagtttatattgagggcatccggtgctaaagctctgggatccttcaggagcagctctgccatgtaaaatcttgtgaagcaagaactgtgcagccatgagttcaaagtaaaagctggcatgcttggatgaatgaaatgaagttttcttcagaccattgaatttggaaaagataatcaaagggtaatggctcttctttatgcatgtggcacttattttcaatgtgccccatcattatccctgcttttctttccttttttatggtctttctttgtttggcttggtgtttctcagctatctttgaaaattctataaaaatcaagcactttgggttgctttaaaatagatactacaagatcaaaaggggtgtaaacgagtgcagaataaaatccgatgtcgtaaccggattgccttccaccaaaaaccttgttcgagaggttacagatacaggaa

SEQ ID NO: 191705 - DNA, 639 bp, Gossypium hirsutum
tcggccacgcgtccgcggacgcgtgggttaaggtcttggcaccacttcctattggatttgctgtggtcatgggtcacttggcaactattccaatcaccggcaccggtatcaaccctgctcgtagctttggggccgctgttatctacaaccaggacaagccatgggatgatcattggatcttctgggtcggaccatttattggtgcagccattgctgcaatctatcaccagtttatcctgagggcagctgctgttaaagctcttggatccttcaggagcagctctgccatgtaattaaagcaaatcattctccagccacaagtttaaacaaaaaaaaaaaaacgggggggggggggggttgccatggaggattggattaagttttatcaatgtggtcaagaggctttttcagaccactcaatttgtaaattataatggaggatgtcatgcttttatgtatgtggcacttattttcaatgtgccccatcattatccctgcttttctttcctttttcatggtctttcttcagtttggcttggtgtttctaagttatctttgaaaagttcataaaaatcaagtgctttgctgctgctttatacacacaagcttaattcagttcctatcctttcttctctgatg

SEQ ID NO: 191706 - DNA, 870 bp, Gossypium hirsutum
gtttcgtttttctatttctatttatctcactcgttctagtcccgtcctagctaaaaccagcccaaaatcccctaaaccggccaccggaaccgccgtctaccgctgttctccgtcttggggcgcccctagcagaaatttttatcccaatccatcaaggggatcctgtttccttctcttttcacattacctagataaattttccccaaacaaaaaccctaagaagccatcgatctagattgaaaaattggtactgccacttcctcaagtctacgtttccttttggaaatcatctcctagctgctaaaccttcttggattttctggtttgggattttctttgatcgaggttgggattgaaaattactggctgaagtttattttttttttttggtggtggcgtcggaaattgcttgccgttgattctgtaggtattaacagcaactatgtcagggaattctagttgcagtgtctacataggtaatttggatgagatggtaagcgacagagttctgtacgatattcttatccaagcgggaagagtattagacctgtacatccctcgagataaggaaaccgataagcccaaaggatttgcctttgttgaatacgaaaccgaggacgttgctgattatgctgtcaggctcttttctggccttgttactctttataaccgaaccttgaaatttgcgatctccgggcaagacaagtcttctcaaaaccctgccaatgcagccatgcctgctacaaattcatcctacaaatcaaggcattaccatggagtagttaaccacatggaaacctctcagcagccgaagaagtcttcaaccccttctaggattccggattatcctgcgcgttacagccaagcgcc

SEQ ID NO: 191707 - DNA, 492 bp, Gossypium hirsutum
tatgtaattgagaagattgctttgaagcagaaatgggagctggaagggcttaatttttcaaaactggaattgagtaaggttaggttcgggactggcaaaagatgcgagttccggatccgatttggaaaaactcatctgctcttcaaattccccgacgaagtttcttccttgaaaaagtttaccaaacgaagtagcaacgattttcttgattttgtcaatgaaattaattcctcggccgtactcgagccttttacaatggaaggtcccttcgagttacgcctctctcccggtcaccaagcttccctcctctttccgctgaacacttcacatactgatctgaaacgagtccttgttggtcatggcatcactttacaagtaaatggagctcaagagatctctcttttccatacgtttaatctcggtttaccggcaaatgaaaatggtgtcaaggagaagagtagtggatattggcccttctcgcattcattctgt

SEQ ID NO: 191708 - DNA, 772 bp, Gossypium hirsutum
cggacgcgtggaccattcgacaatggtgacaatccctttctttgtcctaaacatcctccttttcctctccagctccgcggctacaccaaagagcggtgcagatcacgacctggtccgttcatcatgtgtccacgccagctatccaagcctctgttttcgcaccctttcttcctactccggcccagccaacaccccacgtgagttagcccaagccgccgtaaaagtcagcctgtcccgtgcccgtaaagtgtcgaactacttgtcgacgagtgtgacggggtacaacaagagggaacgagtcgcactgagtgactgcgtggagcaaatagatgagtcgatggaggagttgagcaagacattaggggagttgaagcacttgagaggggagacgttcgagtttcagatgagtaatgcgcggacatgggtgagtgcggcgctgacgaatgaggacacgtgtcttgatgggttcgaaggagttgacggcaaggttaaatctaatgtgaagaggaagatcacgaatgtggctaaagttaccagtaatgctctgtacatgatcaataggctcaatgaaagtcgtggtaggcaccgttgaatctttgatgatgatgatgatgaataatggatggttgtgatttatctagcttattatggttcttaaatatagtttttattttgattttggttgcaagctgtatatgtaatgttttctatttatatattaagcataaggtgatatgcgtttttttcttgtaaaacaaaaaaatataaatat

SEQ ID NO: 191709 - DNA, 936 bp, Gossypium hirsutum
atttttttttttttttttttttaaataaaaattaacaataaataaataaaattaactaaacatcaaataaagaagaaataaaatactactactatactaaaagcaagaactagaaaaccagatcgaaaaatgtcgggaatcatgcacaagatcgaagaaacccttcacatgggagggcacaagaaggaagaagagaagcacaagggagaagctcatcacgaaggcggccatggctatggcgctgctgagcacaagggagaagttcatcacgaaggcggccatggctatggttatggcgccgctgagcacaagggagaagttcatcacgaaggcggccatggctatggcgccgctgcggccgccggtcacggtcacggtcacggcgagcagcaaaaggaagggtttatggataagatcaaggacaagatccacggcgagggaggtcatgaacatggtcacgagggcgaaaagaaaaagaagaaggagaagaagaagcatgaagatggccatgaaagcagcagcagcagcgacagtgattagatcttccatcatcgtcttactattcctctcccttatagtatcgggtgcatggaatgaatgtgaaggcttgtcaaaatatttgtatcatctttatttttatatgcggaaaaaatgaaaaaaaaaaaaaagtaaaaaaaggggttgtatttggtgtatgatggtaatagtgtgtgatgtatttgacaagctatgaatgtaatatgatatgagaataaatttttgtcattatctataaaaaaaatattaaaaaaaaaaaaaaaaaaaaaaaaaaaaaaaaaaaaaaaaaaaaaaaaaaaaaaaaaaaaaatatagaaaaaaaaaaaaaaaaaataagggggggccctttaaaaaaagggggggccctttttaaaggttcaaagttttattacccttttt

SEQ ID NO: 191710 - DNA, 413 bp, Gossypium hirsutum
ggctgctagaactacctcatcttcactagttggaatgcagaagaatcctattagccgcccggtcaggcatcttggtccgccaccaggttttagccctgttcctctaaaggcgctgaatgaatctgtttctgctgtagaattgaggaaccctccgatggatgattatagttggttggatggacatcagttggcatcatcattagaaggctctacgcgtgagagttctctctattatgcatctcatgctgatccccaacatgtaaataacagaagcaatggcttcactggaacggtaagctttcctttccctggaaagcaagctcctgcagtgcagtttcatatggagaaggataaaggctggcaggactacaatactcttgagcatcatcatgaacagaaatcgcatcaacagc

SEQ ID NO: 191711 - DNA, 453 bp, Gossypium hirsutum
  unsure (1)..(453): unsure at all n locations
gtcgaatgagaactatcttttttctttctctttggatctcttctctgctcccaaacccatccaacatttttgaggtttgttaggtcggaagtccctgattttctggtctaagtctaagattctaagtagttaagagttagttgtaattcatttttattgttattgttctgtcaatatgtggagttttgcttcaaataccattgctagcattgggttaaagagttcaaaagaggcgaatcaagcttgctccgagtgttcagatgacgagctgtgttcaaatggtagtagagatgaaggattagagtgtcccatttgttgggaacctttcaacattgttgagaatgtgccttatgtcttatggtgtggtcacactctttgccaaaattgcttcctgggtctccaacctgctgttttgaaactccccactcagcanatcaagatccccatgttcat

SEQ ID NO: 191712 - DNA, 1323 bp, Gossypium hirsutum
ccccggcctgaagaaattcgcctctagctttgctttgtatttcgttaaccatggctcatagcactcgtcaccctttcttccttttccaacttttactcattagtgtctcactagtgaccggtagccacaccgtctcggcagcggctcgacgtttattcgagacacaagcaacctcatcggagttgccacaattagcttcaaaatacgaaaagcaggaagagtctgaatatgaaaagccggaatacaaacagccaaagtatgacgaagagtacccaaaacatgagaagcctgaaattcacaaggaggaaaaacaaaaaccgtgcaagcaacatgaagagtaccacgagtcacacaaatcgaaggagcacgaagagtaccagaaagaaaaacccgagttccccaaattggaaaagcctaaagagcacgagaaacacaaagtcgaatatccgaaaatacccgagtacaaggaaaaccaagatgagggtaaggaacataaaaatgaagagtaccacgaatcacgcgaatcgaaggagcacgaagaatacgagaaagaaaaacccgagttccccaaacgggaaaagcctaaagagcacgagaaacacgaagtcgaatattcggaaatacccgagtacaaggaaaaggaagataagagtaagaaacataaagatgaagagtgccaggagtcacacgaatcgaaagagcacgaagagtacgagaaagaaaaacccgatttccccaaatgggaaaagcctaaagggcacgagaaacataaagccgaatatccgaaaatacctgagtgcaaggaaaaactagatgaggataaggaacataaacatgagttcccaaagcatgaaaaagaagaggagaagaaacctgagaaaggcatagtaccctgagtgggttaaaatgcctgaatggccgaagtccatgtttactcagtctggctcgagcactaagccttaagccatatgacactggtgcatgtgccatcatcatgcagtaatttcatgggatattgtaattatattgttaataaaaaagatggtgagtgggaaatgtgtgtgtgcattcatccatgtagcaatgctgaatctctttgcatgcatagagattctgaatggttatagtttatgttatatcgtttgttctagtgaaattaattttgaatgttgtatctaatgttaacatcacttggcttgatttatgttttaatgaagtttatgttgtgtattttactttaatgatattgcatgtattgttaatttaacattgcttgatcattatactcttccactattaattataaatggcactgttttgttt

SEQ ID NO: 191713 - DNA, 867 bp, Gossypium hirsutum
  unsure (1)..(867): unsure at all n locations
gttaaaaattcttttctttctatttggttaaccatggctcataactttcgtcatcctttcttccttttccaacttttactcattactgtctcactaatgatcggtagtcacaccgtctcgtcagcggctcgacatttattccagacacaaacaacctcatcagagctgccacaattggcttcaaaatacgaaaagcacgaagagtctgaatacaaacagccaaaatatcacgaagagtacccaaaacatgagaagcctgaaatgcacaaggaggaaaaacaaaaaccctgcaaacatcatgaagagtaccacgagtcacgcgaatcgaaggagcacgaagagtacgataaagaaaaacccgatttccccaaatgggaaaagcctaaagagcacgagaaacacgaagtggaagggcctgaaataccggaggacaagaaaaagcatgatgagggtaacgaacataaacatgagttcccaaagcatgaaaaagaagaggagaagaaacctgagaaaaaggcagagtaccttgagtgggctaaaatgcctgaatggtcgaagtccctggcttctcagcctggctcggccactaagccttgaatcatatgacgctggtgcatgtgccatcatcatgcagtaatttcatggtatatcgtaatatatagttaataaaaaagatggtgattgggaaatgtgtgtgtgcattcctccatgcactaatggtgaatctctttgcatacatagaaattctaaatggttatagtttatgttatagtgtatgttggagtgaaaataaatttaaatgttgtatctaatggtaacatcactnggcttggattaaatgtatgtatgtnatttactttaatgata

SEQ ID NO: 191714 - DNA, 1054 bp, Gossypium hirsutum
  unsure (1)..(1054): unsure at all n locations
tgcaggggttctgcacgagctcgtaccgttaatgtcggacccgtctgctccacccaatatcgaccatgaccaaaggcgatcattgtctagaatatacctgcgacgctggactgtcttattaatgataggtagtcacaccttctcgtctgcggctggacatttattccagacacaaacatcctgatcagagctgtcacaattggcttcaaaatacgaaaagctcgaatagtctgaatacaaacagtcaaaatatcacgaagagtacccaaaacatgagaagcctgaaatgcacaagggggaaaaacaaaaaaccctgcaaacaacatgaagagtacgagaaagaaaaacctgagttccccaaacaggaaaagcctaaagagcacgagaaacacgaagtcgaatatccgaaaatacccgagtacaaggaaaaacaagatgagggcaaggaacataaacatgatgagtgccacgagtcacacgaatcgaaggagcacgaagagtacgagaaagaaaaacccaatttccccaaaggggaaaagcctaaagagcatgagaaacacgaagtcgaatatccgaaaatacccgaatacaaggaaaaacaagatgagggtaaggaacataaacatgagttccaaaagcatgaaaaagaagaggagaaaaaacctgagaaaaaggcagagtactctgagtggccaaagtacatgtttactcaatctggctcgggcactaagccttgaaccatatgacactggtgcatgtgccatcatcatgcagtaatttcatggtatatcttaattatatggttaataaaaaaaagatggtgagtgaataatgtgcgtgcattcctccatgcaccaatggtgaatctctttgcatacatagagattctgaatgattatagtttatgttatattttatgttgtagtgaaattaattttgaatgttgtttttaaattttgatgtcacttggcttgatttatgttttaacgaagcttatgttatgtattttactttaatgatcatgcatgtattggtaatttaacaangcttgatt

SEQ ID NO: 191715 - DNA, 544 bp, Gossypium hirsutum
attctgtgctttctattttgtaaaccatggctcataacattcgtcaccctttcttccttttccaactttttctcatttgtgtctcaccaatgatcggtagccacactgtctcggcaacggctcgacgtttattcgagacacaaacaaccttatcggagctgccacaattggcttcaaaatacgaaaagcacgaagagtttgaatatgaaaagtcagaatacaaacagccaaagtatcacgaagagtaccccaaacatgagaagcctgaaatgcacaaggaggaaaaaaaaaaaccctgcaaacaacatgaagagtacgagaaagaaaaacctgagttccccaaacaggaaaagcctaaagagcacgagaaacacgaagtcgaatatccgaaaatacccgagtacaaggaaaaacaagatgaggataagaaacataaacatgaagagtaccacgagtcatacgaatcgaaggagcacgaagagtacgagaaagaaaaacccgagttccctaaatgggaaaaatctaaagagcacgagaaacacga

SEQ ID NO: 191716 - DNA, 870 bp, Gossypium hirsutum
  unsure (1)..(870): unsure at all n locations
aacaacttccttatcgctaatatatatatataaaaaaccctataccccaaaagtatattctaccgccagctcccctccaacgcctcactccaaacaaagcaattatggcaagcaaagaacccgatcacgagcacagagaagacgaagaagcccccgccgccgaggatgaagacaccggagctcaagtcgcccctatcgtcaagctagaggaagtcgccgtcagcaccggcgaggaaaatgaagatccgatcctcgatctgaagtcgaagctgtaccgatttgataaagaagggaatcaatggaaagagagaggcgctggtactgtgaagctgttgaagcacaaagagacaggaaaagttcgccttgttatgaggcaatctaagactctcaagatctgcgccaatcatttagtgttgccgacaatgacggtgcaggagcacgcagggaacgacaaatcgtgcctatggcacgcttctgactatgctgatggtgaattgaaagatgaacttttctgcattcgttttgcatcagtggaaaattgcaaaaccttcatgcaaaagttccaagaagttgctgaatcacaaaaaccgaaagaggaaaataaagatgcatctgctgctgctggactgctggagaagttgaccgttgatgataaaaaaaccgagattaacctganaggagannaaggancnaancccccccaaaagcggattccgagaaaaagatggggaggcgcttcctccctttnaaggctttgggtgtgtttccctccctgtctttttggcaatatggtgagaatgctcctgggttttccctcggatggaactaaatttgtgtttgtttggattgtctccactgtttatggttgcg

SEQ ID NO: 191717 - DNA, 921 bp, Gossypium hirsutum
  unsure (1)..(921): unsure at all n locations
cccatgcttccgaatcgtgcttatggcacgcctctgattatgctgatggtgaattgaaagatgaacttctctgcattcgttttgcatcactggaaaattgcaaaacctttatgcatatgttccaagaagttgctgattcacaaaaaccaaaagaggaaaacaaggatgcatctgatgctgctggacaacttgagaagttgagctttcaagagaaagctggagaggagaaggctgttgctaagaaggaagagaaggaaacaaaagtggatacagaaaaagcagatacagagaacaaagatggggagccagcttcctccacttgaaaagagtttggctctgttcttcatgccattggcttttggcgaatatggtgagattagtcagctgatcaacctcctcacccatgtctaggatatttctacgggtgaaactagatgggtagtctatgggttggaatggtcgaggtcgtttgtgtccttaggtttgggtgtttgtcaagggttggtctaccccgagtcatgtcagttatgtttgcatggttagagttgcgtttgggatttgagtagtgtcagacatgggtcatttgattgcgtttttcctggcagtaaccactgtgttgaagttatcttgctgctcagcccatgccttgaaagagttcttgttattaaacaacctcctttttttttttttacttggggtttaaattttttggtctgtggtacctctatgtcccaagggaacaaggtctgggttaaaaggaattggttttgccctattggctttattattccgataggctaatctttccttgagcgtcntggccttgcccggcgcctttggtttttcttcggccgcccccgcggtggacctccatttcgccctatatttgagtcgttttcccgcccgctcactgggccgtcc

SEQ ID NO: 191718 - DNA, 1135 bp, Gossypium hirsutum
cacacttgctcttccgtactcctcgttttataaaaaccctaaaccgcctgatatttatctcttagaacgaaaaaccccaaacgcctcgctctaagaaaaaaacaattatggcaagcaaagaacccgaacacgagcacagagaagatgaagaagctcctgccgccgaggatgaagacactggagctcaagtcgcccctattgtcaagctagaggaagtcgctgtcagtacaggcgaggaaaatgaagatccgatcctcgatctgaagtcgaagctgtatcgatttgataaagaagggaatcaatggaaagagagaggtgctggtactgtgaagctgttgaagcacaaagagacaggaaaagttcgccttgttatgaggcaatctaagactctcaagatctgcgccaatcattatgtgttggcaacgatgacggtgcaggagcacgcagggaacgacaaatcgtgcctatggcacgcttctgactttgctgatgatgaactgaaagatgaacttttctgcattcgttttgcatcagtggacaattgcaaaagcttcatggaaacggtccgagaagttgctgaatcacaaaaatcaacagaggaaaataaagaggcatctgctgcagctggtctacttgagaagttgagtgttgaggaaaaggaagccaaggataaagtggaagagaaggatgttaaagcaaaggaagaaacggaaacaaaggaggatacaaaaaaagtagatgatagtgagaagaaagatggggagccagcatcaacttaaaaaaaggggttgggttgtgtttgttttctgtgccatatgctttttgggatatatggtgagattagtcacctcccatgtcttgcatattcatctcctgcagaggaaactagatgggtcagtatgtttataagctggaatggtttgagttcctttgcgtgtcattaggtgtgagtgttggtgagtgttgaggtttgttcaaacaccgagtcatgtttacatacattgcatgttgttgagtgtttttttcgcggttttgagtattgtgagggagggttgcattcaaccgcgcctttcccagtattattattatctccaaattgtctaaattgcttattattgatagacaagtttttctt

SEQ ID NO: 191719 - DNA, 440 bp, Gossypium hirsutum
ctcttgccgcggtattctattggacaattgtattgggttggactgaaacgtgcaaatgagattattggtgtcaccactgaggaactcgtgctgaaggcaagacagggttctatttcagcttaatgctatgctacctcggtgaggatggtgagtggaggatatacatgtatgaacctgagccacgtggtaatgaggttatcagaaccctaaaatccttgcttcatatcatgtgacatgggaactgggatgtgggtgggaagacgtggtccagcaagcagctatgcagttgtgcatattgttgattttaatgtgtgtgtgtatttccttatctcaatttgaggggttcattttctggcatctatgtgctgtacattatattttggggtatgtggcatgttgcagcttcatgaaaattgctaacttcgtttatagtatccatt

SEQ ID NO: 191720 - DNA, 413 bp, Gossypium hirsutum
  unsure (1)..(413): unsure at all n locations
ttttcacgcgtccgaccacgcgtccgcaattttgacatgggagaacctgatacatgcaatcctgctggaagtggcttgccaagtgaggaggcttcggttaagacagcaaagaaaattcataatcagaaattcgctgagctctcaggaaatgacatatttaaggatgatgttcctccaggttctgctgagaaaccactcagtgctgcaaaactgcgggagatgagtggcagtaacatcttcgctgatgggaaggtagagtctcgagactactttggtggtgttcgcaaaccccctggcggcgaaagcagcattgcttttggtttaacttcttagctttctctaaccctgtcaaattgcttcagctgtgtctggtgtttgtctttagntgggggtgtgattgtattatgaacttt

SEQ ID NO: 191721 - DNA, 412 bp, Gossypium hirsutum
gagaactagtctctaaattcctttttactctaagcggaaattttatttatttatcgcttcacacattaaatccaaaaatgtaataccaagaaaacggtaactaaaaacatggaagaattctcaactggtaccgaccctcgtgtgccggcggtcaagccggactctaagccatcttccttcgagggagttccactcgaagctgcctccgctgctgtttcagaagatgccgtggtggataaggacttgctgtgtccgatttgtatgcagataattaaggacgccttcctcacgtcttgcggtcacagcttttgctacatgtgtttaattacccatcttcgaaacaagagcgattgcccttgttgctctcaatttctcactaataatcagcttttccccaatattttgctcgata

SEQ ID NO: 191722 - DNA, 971 bp, Gossypium hirsutum
ttattcgattcttcctcccctcgaagccgccgaagagagagccgagaaaggaagctagaagagcaaagcgaaaatgaagaccatactttcctcagagacaatggacatccccgatggggttagcattaaggtgaaggctaaggtgatcgaggttgaaggtcccaggggtaagcttacccgcaacttcaagcacctcaacctcgatttccatctcatcaaggacgaggagaccggcaagcgtaagctcaggatcgaggcttggtttggctccaggaagaccagcgccgccatccgtaccgctctcagccacgttgagaacctcatcaccggtgtcaccaaaggataccgttacaagatgaggttcgtctacgctcactttccgatcaacgcctccatcactaatggcaacaagtccatcgagatccgtaacttccttggcgagaagaaggtgcgtaaggtggatatgttggaaggggtttccattgttcgatccgagaaggttaaggatgagattgttttggatggtaatgacatcgaacttgtatcccgatctgcagctttgataaaccagaaatgccatgtgaagaacaaggatattagaaagttccttgatggtatctatgttagtgagaagggaagggtcgccgaagaagaatgaatactatctccctgaatcatagttatagtgctgctttatttttttgtcgtagtaatattttgggactccgttttttgtcttgtctttcctgtttccatggattgcaactgttacagagtacaaggatgttatctttatttgtttggagaattttggatatctgtttaatctttagtactctaattattcccccattttaagctgtgtgttgatttatagaactgttccttaatgaatctcatttttctgcaatttgcttacgtgctgagtatgttactggaaatccggacttggatattttgaagtttaatca

SEQ ID NO: 191723 - DNA, 738 bp, Gossypium hirsutum
agtgagtgtaattttcttcctttctgccaaggctgccgcttgggagacaggatgaagaccattctttcttccgagacgatggacatccccgatgggattagcatcaaaataaaagccaaggttatcgaagttgagggtcccaggggtaagctcatccgcgacttcaagcacctcaacctcgacttccatctcattaaggacgaggagaccggcaagcgtaagctcaggcttgaggcttggttcggctccaggaagactagcgccgccatccgcaccgctctcagccacgtcgagaacctcatcaccggcgtcaccaagggataccgttacaaaatgaggttcgtctatgctcactttcccatcaacgcctccatcactaatgccaacaagtccatcgagatccgtaatttccttggcgagaagaaggtgcgtaaggtggatatgttggaaggggtttccatagttcgatctgagaaggtgaaggatgaaattgttttggatggtaatgatattgaacttgtgtcacgatcagcagctttaataaatcagaaatgccatgtgaagaacaacgatattaaaaagttccttgatggtatctatgttagcgagaagggcaggatcgctgaacaagaatgattggtacgggatctcttggttcataacgttataatgctctgctttggttttcaaactttaaattataaagatgttatcttatatttgtttcatctttatggt

SEQ ID NO: 191724 - DNA, 992 bp, Gossypium hirsutum
  unsure (1)..(992): unsure at all n locations
ctctacttagtccctccatcgaagccgccccgagaaaggaagcagagggcaagtaaaatgaagaccattctttcttcagagacaatggacatccctgatggggttgctattaaggtgaaggccaagatgatcgaggttgaaggtcccaggggtaagctcatccgtaacttcaagcacctcaacctcgattttcacctcatcaaggacgaggagagcggcaagcgcaagctcaggatcgaggcttggtttggctccagaaagactagcgccgccatccgtactgctctcagccacgttgagaatctcatcaccggcgtcaccaagggttaccgttacaagatgaggtttgtttatgctcattttccgaacaacgcctgcatcactaaacggaacaagtccatcgagatccggaatttccttggcgagatgaaggtgcgtaaggtttatatgttggaaggggttgccattgcgggatccgagaaggtctccgatgagatcgttttggatggtaatgatattgaactcgtgtctcgttcagcagctttgataaaccagaaatgtcatgtgaagaacaaggatattagaaagtttctcgacggtatctatgttagcgaaaagggcaggatcgccgaagaggaatgattgttatctcaagtcatagttatgggtgccatgttatttttctgttatggtaatttctttggtagcatggttttttgttgttttacctctttatttggattacagctgctgagtagaaggatgtttatctttatttgttgttttggaaaattttgacttgctgtttgatctttagtactaaatgaaacgggtgaagtttccaattcttnnnnnnnnnnnnnnnnnnnnnnnnnnnnnnnnnnnnnnnnnnnnnnnnnnnnnnnnnnnnnnnnnnnnnnnnnnnnnnnnnnnnnnnnnnnnnnnnnnnnnnnnnnnnnnnnnnnnnnnnnnnnnnnnnnnnnnnnnnnnnn

SEQ ID NO: 191725 - DNA, 444 bp, Gossypium hirsutum
cagagtcctctagtttctggtaagtgatgatggccattcttttctccctccatggcctcatttagagcttgcctctcaaccagaaggagaggaacctgttgttcaactttcatatttaatccttcataaaattcttggatttcaaggtagagaggttggcattcatgagtatccataattgcagaatctagacactctaggcacagcctccgaccatcatcaagtgatatatattttacatctacaggctccattctttcgcaactacaacagcgaggagtgccatcacgctcatgagaggggcagtacttttgcatccagtagggatgtgccctgtactcaattagaccagctggatttgtcggtataaatttcctgcaaacatcacattttggatgatgctgctctttatagcaggatttatgaaaaggactattccctgaa

SEQ ID NO: 191726 - DNA, 824 bp, Gossypium hirsutum
cggcacgagggcaattagcactgtccgtttgacgcaaaaaaagcacaaagacagtgggggacgtaagctaaagccttttctcccttttcatccgttgaaggaatggcttcagatcctaaagtgcacattttcgaggaggttgccaaccacaacaaaaccaaagattgttggctgattatttctgggaaggtttatgatgtaactccgttcatggatgatcatcctggaggtgatgaagttttgctgtcagctactgggaaggatgccaccaatgattttgaagatgtgggtcacagtgattcagcaagagaaatgatggaaaaatactatattggtgagattgatccaaaaactgtcccggcaaagcgcacttacattccaccccagcaaacgccttacaatcccgataagacccctgagtttgtcatcaagatcctacaatttcttgttcccctcttgatcctgggcttggctattgcggtacgtcactataccaagaaagagtagcttattactatacaggactttacctgttacgagggaagaatcagtgtgtctcatctgttagttgaaatagcacagtcatatcttttgtttaatttccttttagcatttgtgtgtcgaactaaatacctgttgatgatatgctccattgtcaaaagacaatatatcttgagcatctttgagcccccatttaagttagcagggaaaccagacaatgtttaatattgttggaatttaaaagcaggagcatgtttttatcaaaaaaaaaaacaaagaaaaaaaaaagaaaaaaaaaacaaaaggggctccggctacaaaaa

SEQ ID NO: 191727 - DNA, 555 bp, Gossypium hirsutum
aaaatcccaaaatagatatcccaaacgtttagccatttccagtaaaaccccaaaacagatttccccaattctctacatttcccctaatccctaaatttcccccaaaatccctaagtttttttaatagttcttcgtttaagtaaagtccttatatttaaaaaaaattcaatttttttcaggtattagggaaagcgattcggccaggtatttcagcatctagagtttctgtcaatgttggagaagagcgttgaaggaatagcttcagatcctaaagtgcacactttcgaggaggttgccaaccacaacaaaaccaaagattgttggctaattatttctgggaaggtttatgatgtaactccgttcatggatgatcatcccggaggtgatgaagttttgctgtcagctactggttactaccattgccttgctgctgttttactttttttagctatagttttagttcccggagatattcacagtggctttaaacatggggattgaatggaagagaaatgaattgaaaagctgtgatttttttaaaggaagttgggtttt

SEQ ID NO: 191728 - DNA, 666 bp, Gossypium hirsutum
ggggattctggtaaaggaggggaccctactctatgggcagatcttctgaagtattttggtgaacttggggaagattgctctaaagaagtgaaagaagtattgacatatattgagagggatgacatcttgcctcccattattgttctccagacactttccaggaacccatgtctcacattatctgttattaaggattacattgcccgaaaacttgaacaagagtcaaagctgattgaagaggacagacgagctatagagaagtatcaggaagacacaatggcaatgagaaaagaaattcaggaccttaggacaaacgccaggatatttcagctgagcaagtgcactgcttgcacttttacccttgacctacctgctgtgcacttcatgtgtatgcactcatttcatcagcgttgccttggtgataatgaaaaggaatgccctgagtgtgctccagagtacagatctgtaatggaaatgaaaagaagcttggaacagaattcaaaagatcaagatcaattcttccaacaagtcaagagctcaaaggatggattttccgtgattgctgaatattttggaaagggggtcattagtaaaacgagtaatggttccacaggaactgctagatcagacagcgtctcttccagcagtggcttctgattttcttga

SEQ ID NO: 191729 - DNA, 500 bp, Gossypium hirsutum
tcgagtttttttttttttttcatttaatgggaatcggtccactggatgaagaagattattacacgggatgaacagcaaatcaaaacaagatgaggaccaaacaattagggaagaacatcatattggaaacttaaaagttacgatgaatttactttaaaaaagaaatatccattttaataacactgtaaaagtttcgtgcttttagatcacaaccccaagcagcagggaacgagagatgagaaaaacaaccttaggccttagctgaagtagatggaaacctgaggaatgtcgacatcattgtccgcgtcgtcctcacaagccacgaccacatcaagatgctgtctattcggaggcagttctgcctttgccacttcccgggctagatctaccaccttcttgtccattcgctccctgtgccgagggaacatactattatacagcaagcaacttccgtaagatatgctgtaggcattcaagcccttatccttcagccattggat

SEQ ID NO: 191730 - DNA, 2069 bp, Gossypium hirsutum
gttattttggttttctatctcattttcgagtcttgaatgcatttcaaaacagcagtagttccgaataaacggcagtcagaaaggataaggctttagcagccagcgttttcgaacaaaaaaaaaatgtacacatccgccttctatttcccttatttaagcaaagaaaaaagcggggccgaagtgctcttttacactcttgaataacatcattaaacataaacaacaaacccccaaaataaatgaacagttctgttgctggcattaccaacaccacctagattattttcgaaattactcagcagaaattaaggtatgtggatttgattaggctgcagattccttggcaatcttatctgccttggcaatcacttcctcgattcctccaaccatgtaaaacgactgctcgggcaggtcatcatactttccatccaacacgccctggaagctggtgatgctctccttcaactccacgtacttgccaggagcaccagtgaacacttctgccacatggaaaggctggctcaagaacctttggatcttacgagcacgtgcaacagttaatttatcatcttcactaagctcgtccatccccaaaatagcaataatatcttgcaagttcttgtagttttggagaaccttctgaacaccacgagcagtgttgtagtgttcctcacccaaaatatgaggagagagcatacgagatgtagaatccaaaggatccacagcaggataaataccaagctcagagatctgtcgggacaacacagttgtggcatccaagtgagcaaaggttgttgcaggagctggatctgtcaagtcatcagcaggcacatatatggcttgaacagaagtgatagaacctttcttggtggtggtaatacgttcctgaagacctccaagatcagtagccaaggttggttggtaaccgacagcagatggaatacgacctagcaaggcagacacttcagagtttgcttgagtaaaacggaaaatgttgtcaatgaagagaagcacatcctgcccttctgcatcacggaaatgttcagcaacagtcagaccagtaaggccaacacgagcacgagcaccagggggctcattcatttgaccataaacaagagcacacttgctatcagcctgcttttcacctagcttaataacaccactctcaatcatttccctatacaagtcattaccctctctagtacgttctccaacaccggcaaacactgagaaaccaccgtgggctttagcaacattgttgataagttccataataagcactgtcttccctacaccagcaccaccaaaaagtccaatcttccctcctctttgatatggtgcaaggagatcaacaaccttaataccagtgacaaggatctgttgttcagtagcttgttcgacaaaggctggtgcttctctgtgtatgggcaagaagtggtcggttttgagttcgcctttctcgtcaataggctctccaatgacatttatgatacgaccaagagtagctctaccgacaggcacagtgataggagatccggtgttgagaaccggctgccctctgacgagtccctccgttccatccatagcaatggtcctaaccatgttttcacccaagtggtgagccacttccaacacaagccggatcgagtggtccatcacttcaagcgcagtcaaaatcggaggcaagccttcatcgaatctaacatcgacgacggcaccgattacttgacaaacctgaccgatggctccagcaccagtgaactcatcagtgatcttaccttttccgcccttcttagcgggaggaggctgcgatggagcagaagcggcagcagccgcagatgtagagtactcagcatcgcgtgagagaaagtaggggcacggaaaagggcggcgcgtgggggaaggggaagggaggcgaggggtagggctgggagatttggagagagatcggcgagaagtggagcggaggagagaggagaggagtcgacgcgaagccattggaaagggctcccagatagaggctagggtttgaaccagaacagctctcccacgcgtccgcggacgcgtaa

SEQ ID NO: 191731 - DNA, 478 bp, Gossypium hirsutum
cttaacccatttaaaactgttatttactgccgcttttgtttaactgaaaacagagaaaagtttagcatccgtagttctccaaccaaaaatgtacatatccggtttttatttcccttattaaacaagtaaaaaggggcccaagttctattcctctttctcactcttgaataacatcattaaaacttgaataggaaaaatatcccaaaaaatgaacagtcctgttgttgttggcaacgccaacaccgcctctaattattttcaacattatcggggagtaaacaaaggcatcaacattgaaattaattaagctgcagactccttggcaatcttatctgccttggcaatcacttcctcaatacctccaaccatgtaaaatgactgctctggcaggtcatcatacgttccatccaacactccctggaagctggtgatgctctccttcaactccacatacttgccaggggcaccagtgaaaact

SEQ ID NO: 191732 - DNA, 629 bp, Gossypium hirsutum
tatatgaaaagattaccatctaccaattaacacagacactaaaaatgcatacttttcaacgttatactaattttaataataaagtatatcaatccatggatccacctatcataagaaattaatcacttgctcttaagatgtcataaacacactaatatgatgcaatagaagcaagctaggaagagatataattgtacctggaagctggtgatgctctccttcaactccacatacttgccaggggcaccagtgaaaacttctgccacgtggaaaggctggctcaagaacctttggatcttgcgagcacgagcaacagttaatttatcatcttcactaagctcgtccatccccaaaatagcaataatatcctgcaagttcttgtagttttggagaaccttctggacaccacgagcagtggtggagtggtcctcacccaaaatatgaggagagagcatacgagatgtagaatccaaaggatccacagcaggataaataccaagctcagagatctgttcagcttggttctgtaatatggagctcatcacacgagacatctccatctcctgcatgtggaattgtcttaaaattcccatatgcaagttcctcatatctccatgaataattaactg

SEQ ID NO: 191733 - DNA, 963 bp, Gossypium hirsutum
tcgttccccctctacattctctctctctctctcttcctctccccttctctgcctaaacccaaattattaaaacagtcgtcgtctgcaaccgacaccaatgtccaccgcagttccacccgttatccctgtctcctccgtgcaatccgtcgaatcccaaccgcccgctgccagccccgcctttctctctttcgtttcccgtctcaatgaatcccttcgcaacggcctctcccagcgccgtccttgggctgagctcgttgaccgttccgccttctccaagcccgagtcattctctgatgctctcgttcgcgtccgcaagaactactcgtatttccgagtcaattacctgtctgtgatcggtctcatccttgccttttcccttctttcccatccgttttcccttctccttctcctcggactcctctgctcctggatcttcctctacctcttccgccccgctgatcagcctctcgtcctatttggccgtacattctccgatcgcgagaccctcggctttctcatcatcttcagcgtcttcgttgtctttctcactaccgttggatctcttcttatttctgctctcatggttggagtcggactcgtctgtgcccacggcgcctttcagggcccctgaagatctcttcttggacgaacaagaacaagtatccaccggtttcttgtcctttctaggtggtgctgccaccaatgccgccgttgccgctgcccctgctgttgccgctcgtgtctgaatccgatccacggttccgcctctttgaatcttttcctcttggattacagtaatggttcacatgtcattgattcaatttcagttttttctttaagaacaataaaattcctattggggaatttatagctgtagtttattttttacgaattagagtttatattaacatttgtggaatgtatatggatctcgtttattaaaaaaaaaaaaaaagggcggcc

SEQ ID NO: 191734 - DNA, 893 bp, Gossypium hirsutum
atcatcttcctttcagtagaatttaaggggaatttttttttgaaaacttcctttcagatgagtgaagttttcgaagggtgtgagcggcagtattgcgagctatctgcgaatctttccaagaagtgtacggctgctgttgctcttactggagagcagaagaaacaaaaactttctgatgtaagagctggagtggaagatgcagaagctctgattcgaaagatggacctcgaagcaagaagtttgcagccaaatgttaaggctgtacttcttgctaagttaagggaatataaatcagatctaaacaatctgaaaagtgaagttaaaagaatcgcatctggtaatttgaatgcggctgctcgagacgagttgttagagtccggcatggctgatactctcacggcatcagctgatcaaagatcaagattaatgatgactacagagcggttgaatcagagcagtgacagaattaaggacagcaggagaaccatgttagaaacagaagagcttggggtttcaatccttcaggatttgcattcacagcgactggctcgcttacatgccaataacacgctccatggagtagatgacaacatcggcaagagcaagaaaattttgacagctatttctaggagggtgagcaggaacaagtggatcattggcaccattatcgccgtccttatcattgcgattgctcttgttttgtacttcaaacttgctaaatagtcaattatttgtatcttcgccctgttgattctgcttggtttggctttgtttgtccttgcgaacttgtccatggtgaattccaatataaatggatgctttggtaatcctaaggactgaatttttcgtcactacaattttatgtgctgacttccaagaaatggttttacgta

SEQ ID NO: 191735 - DNA, 411 bp, Gossypium hirsutum
ggaatgttgtctaaagccacctagccactatcggcacgatctcagttgattgtaagagaatggtattgtagaaaaaggtaattaaaagatgagtgaagttttcgaaggatatgaacggcagtattgcgagctatccgcgaatctttccaagaagtgtacggcttctggtgctctgaatggagagaagatgaaacaaaaactttctgaaataaaagccagactagaagatgcagaagctctgattcggtaaatggaccttgaggcaagaagcttgcagccaaatgttaaggctgtacttcttgctaagttacgggaatataagtcagatcttaacaatctcaaaagtgaagttaaaagaattgcatctggcaatttaaatccatctgctcgagaatagttgttggagtctgg

SEQ ID NO: 191736 - DNA, 1168 bp, Gossypium hirsutum
  unsure (1)..(1168): unsure at all n locations
ttactcgtccgcggacgcgtgggcggacgcgtgggctcgtcttcaatatttcaaccgaatccaattctcaaagaaaaaaaatcgccagttaagagagaaaaaaaaagttgaaatcttttttgagcaatggaaggatcagtttttactccatcattggaaggaatgaagcatatcaaatctccagaaggggaaatgcttaccaagccttttttggatgtctgcaagttgattttgccagtcctcgataagttcggatctgctatgagccttgtgaagagtgatgttggtggtaacatatcgaggttggaaaagaaatatgaaactgatcccgctaaatacaatcacttgtacagtatggtgaaagaagaggttgattgtaaaacagcaacagattcatctagttgtaccaatggtcttctctggttgacacgagcaatggatttcctcgtagaattgttccgcaacttacttgcacatccagattggactatgactgaatcttgtaccgactcctatggcaaaaccctgaaaaagttccatggctggattgctagttccgctttcacggttgcattgaagttggctccagataggaagaagttcatggaagtgatagctgggactggagatgttaatgctgacatggagaaattttgttcgactttccccccatttcttgaggagaatcacaaatatctggccaagtttggcttggatgatatgaaggcatgatggaacaagtttaatgagtagaggagagactacctacctatatttactcccgtgttcgaacttccagtatcttgcttccggcttaaaccttcgtttttacttgaaataattaatgagtaatgactttaaacacatactcttgaatgcttagtttttagtaatttttggttaaatgtcttgacccttgaatgatattattgaaattatgttcagttcttctccctaaaaaaaaaaaaaaaaaaaaaaaaaaaaaaaaaaaaaaataaaaaataaaaaaataaaaaaaaaaaataataaaaataaaaattatttataatttaataaaaataaaaaaaaaaannannngggggggcccttttaaagagtcaaagtttttttccgggtgtatgggaagtataaattttttttaaggggccccaaaataaaattacctggc

SEQ ID NO: 191737 - DNA, 529 bp, Gossypium hirsutum
ataatcccaatttctcacggggaaaaactcatccgaattgttaagcttgttcaatggagataatgggtttttcgttgctcttcaagttccttctcttgctctctggctttggggtttcaatggcgttacaagaaaccccattggtggctaaaaacttgggtcaaatcagttctaactcggtgcttgtggccttgttagactcgcattatacggagcttgctgaattagtggagaaagctttgttgttacaaagcttagaagagtctgtgggaaagcataatattaccatttttgctcctaagaatgaagctcttgaaaggaatctagaccctgaattcaagcggtttttgttggaacctggtaatcttaaatccttacaaactctattgctttatcacattgtgccgactaggattgagccacattcatggcctaattcaacatcgggatcgatcattcaccgtacgttatcaaatcacaatgttgagctctcgagtgaagattcaatgggggctaaattcattggtag

SEQ ID NO: 191738 - DNA, 672 bp, Gossypium hirsutum
  unsure (1)..(672): unsure at all n locations
ttntgagtaattcaaanagctatatgaactaaatattagatttacgaaaagaaacagaaatctgtacataaggattcttcatggtgcagtatgtatgaaggtcagaatcaaagggtacaataacttgaattttaaatcttgtgtaattctttagccgcaccaccagttcaagtccttccttcccaactcaaaaaggaataaacaaaggtttcaacacaagttcgtatttctcaaattttaaagcaacaatcacaaaagcatggcagcattatcactgtctcaaaaccagaatcatctgtcgctgaaaggttgtcaacaaaatctggctgctcagctaaacatcgggtccatcggttgcattctctatcttcatgatcttggatgccgtctcctctttggtcggcttcggtcctcttcgtagtccatcactccaccaggttcagagtagatatcttcgagccctcggaactcactntcagccttgacagatacagacttttttacttcttcccccctatcttcaacccccctttgatgtttttttgcccactccattaatgtaacaagcccatttatttccttctggaattaagacaggtaaatggtttatggggcccacccggttggatagggtttgtatcaaacttccaaggtgttctggcctcaaatccc

SEQ ID NO: 191739 - DNA, 309 bp, Gossypium hirsutum
tcgaattaaaagttaaaacccagaaggaaagggagaagacgatcaaatctctggagaaggatttggagattgcgaagatgcagatggttgctgacaaggaagaacttttgagtcttaaggctgaagttgagaagatgaggactgcaaatgaagaaaaactacgtaagatacatgaggagacagataggctcagggtaactgaagaagagcgttccgagtatcttcgcttgcaattggaattgaaggaagaaatagagaaatgcaggcttcgagaagaactactgttgaaagaagctgacgatttgaaac

SEQ ID NO: 191740 - DNA, 974 bp, Gossypium hirsutum
tcccacgcgtccgcgtccgatttcaaactacctgcttttagctctccttttgaatcaatctccatttttggtttttcgtaaagtgaaaggatgttaggcattttcaagaaagaattaatgaatcctccaaaggagctgcatagcccagcttcactcacttcatcaaacaagcccaagcttcccaatcaaatcatcaaccatttcctttcttcaaatcccaacaatgctttctcaatggggttcggatcctcagcttgctttgcttatgctcccacagagaatcgtttccccagtcatcaaaggttgttttgtggagtggatgaaatatactgcatattcttgggggatttgaataatttgagcagcctgctaaagcagtatgggctgtcaaagggcaccaatgaagccatgtttatcatcgaagcatatcggaccctccgagaccgtggtccgtacccggctgaccaggtccttaaggatcttgaaggcagctatggatttgtggtgtatgatagcaaagctggaagtgtatttgctgcattgggtgcagatgaaagggttaatctctattggggtgtagcagctgatggatcagtagttgtttcagataacttgaagcttataaaagaaagctgtgctaaatcatttgcaccatttccacctgggtgtatgttccacagtgagcaaggattgacgagttttgagcatccgaggagcaaaatgaaggcaatgccaagaattgacagtgaaggggtgatgtgtggtgccaatttcatggccgatgctcagtcgagaacaagtaggatgccccgagttggtagcgaagccaattgggcactgcgaggctccaaagcttgaataattcaatactaaatgacccacattttattatgttttttttttttgttgggggggggggttatttcctcgtttatgaaattggtaaatgccttgtaaaaggcatgtttgataaa

SEQ ID NO: 191741 - DNA, 531 bp, Gossypium hirsutum
caagttctcgctttctcagataccaaatgtctcaaaggaaatcaaggttgacaaggttggggttccgagattcaatgatcaaccagaaagcttattcctttctgttaatgataaatcgaatgataagaattctgagagaatgttagctcatctggggatgagcaaatcgagtgatcctgataatgcaagtcaatgcagctcaatttaccatcacgagagaggttttagttctcattcaggagaagaagggagctccggaacggttcgaaagcagtcttcattgtcatatggaggactagtgacggcctctcccttagttggtctgccagaaatttcacatcttgggtggggtcactggtttactcttagggatctcgatcttgccacaaatcacttcgccagcagagaatgtgcttgaaaagggtggatatggggtggtttacaaggttagactgacaatggaacctgagtagccgttaagaaaattcttaataatctgggacaagctgaaaaagaatttagggtggaagt

SEQ ID NO: 191742 - DNA, 1053 bp, Gossypium hirsutum
  unsure (1)..(1053): unsure at all n locations
gaaaaaaagttcctttatgggagcttctttggttctcagtcgttgccaatacttcaatcaccgggatgaacttgagccttatgctgaattcagttggattttatcagatttcaaagctaagtatgattccagttgtttgtgtgatggaatggatactacacagcaaacactattcggacaaagtcaagatttctgtccttgtcgtggtggttggtgttggtgtttgtacagtcactgatgtaaaagttaatgctcaaggatttatttgtgcctgtgtcgctgtcctgtctacctccttacagcaaatttcaattggctccctacaaacgaagtactcgataggctcatttgaattgctcagtcaaacagctccaatccaagctctgtctcttttgttgttcggtccctttgttgattactacctcactggcaaattactagcaagttacaagttctcctcagctgcattttttctcatactactaccgtgctcgctagcggctattgtgcaatataagtcagtatctttgcatcggacgattctccgccacatctttccaagtcctaggccacatgaaaacggtttgtgtattgatattgggatggctactctttgattcggagctgacactgaaaaatatactcgggatggcgattgccatcctcggcatggtagtctacagttgggctgttgaagctgataaacaaacggtatcctaggtttcaccactccccaaggaagcttctgaagaaaatgttgaattgttaaaacaacagcagcaatcggacggttctccgctcaaggacgttgagctcggcaaatctcagccttagatttgtatgttcttcatttttttgttgattctttttcaaatattgatttgtttaatgttttaagctcttggaattggctgtacaaattttaaaagtttactaatttttttcctacgttttctttttaatatttcattgtagtaaagtcattccaggataagctattttctgattgataangcaacaacaggaattttaactgttgggtctgctgagaaa

SEQ ID NO: 191743 - DNA, 663 bp, Gossypium hirsutum
cttatcttggttgcccactaaccctaaccccaaccctttgctttccctattcctaccccgccccccccctctctctctctaatgctagtggctctctttctcagctctccctttggttggccactagtccaagccctacctttttttctcaaatgctagtggttcattcatttctctctttacaaccccccactgagcctttcttttgagcttcaacttctttgatgggtgtgaatacataatgttaacagctaaactataaccaaagagtttgttttttgcttagcatggggagagatggaaaaagaaactaaccaagaaaacccatctctcctctcaaataataacatctccatcactaaagaaaactcctcccctaaaaaacaccctggaaacaccgctgcggctggtggcggagataggctgaaacgtgatgaatggagtgaaggagctgtttcaagcttgcttgaggcttacgaaaacaaatgggtgcttagaaatagagccaaactaaagggtcatgattgggaagatgtggctcgctatgtttcagctcgagctaattgtaccaagtcgccaaagactcaaactcagtgcaagaacaagattgagtcaatgaagaaaaggtatcgatcggagtccgccacggcggatggatcttct

SEQ ID NO: 191744 - DNA, 750 bp, Gossypium hirsutum
  unsure (1)..(750): unsure at all n locations
gaaaaggcatgttatcatcaatggaaaaaagcatagctgagctaagggaaaccttcaaaaatggaggaactaaaagcatttcatggaggaagagccaacttaaggctttacttcaactcataaatcaaaacgaagactccattttcaaagcattggatcaagatcttggaaagagtcctgttgaatcttacagagatgaggttggggttttgaagaaatcagtcacttatactttgagctgcttggagaaatgggtggcacctaaaaaggctgaagtgccattgctttttttccctgctaaagctgaagtgatgcctcaaccactcggtgttgttctcattttctcatcttggaatttccctttcacactggcattggacccattgatcggagcaatatctgccggcaacacggttcttttaaaaccatctgatctggcaccggcatgcatgtcgtttctcgtcgagaccatccctaaatacttggacaacaaagccgttaaggtccttgccggtggagcagatatcggtgaacgactgctccagctaaaatgggacaaaatattcttcaccgggagtccacgagtgggtcgcttggttatggctgccgctgcaaagcatttgacgccggttactttaaaacttggtggcaaatgccccgctattgtggataccctctccactactccttcaaaagcanaggtgactgctaaaaaaattgtagggggcaagtgnggggcttgccaccgct

SEQ ID NO: 191745 - DNA, 1016 bp, Gossypium hirsutum
cccacgcgtccggtttctcgatcttcacactggcagccatagctatcttcgtgcattgtcatctgcgccagtggtgtccttggcagttgagaggggatggagtgagtctgctagtcctaatgtgaggggtccacccgctctcgtattcaacttttctcagctggacgaaaagctgaaggctgggtacaaggccacaacagatggaaaatttaccgaggctcttcggcttttcctcaacattcttcatacaattccattgattgttgtggagtcaaggagggaagttgatgaagtcaaagagttaattatcatcgccaaggagtatgttcttggtctgcagatggagcttaagcgtagagaattgaaagacaatccggtacgccagcaggagcttgctgcctacttcacccattgcaaccttcaaatacctcatctcagacttgctctgctgaatgcaatgaccatctgctacaaggcaaaaaacctggctacagcagctaactttgcccggcgtcttctagaaacaaaccccacaaacgagaaccatgcaaaggcagcgaggcaagtactccaagctgcagagaggaatatgacagatgcatctcagctgaactacgatttcaggaacccttttgtgacatgcggggcaacttacgtcccgatttaccgaggacagaaagatgtatcttgcccttactgtactactcgcttcgtgcctacccaggagggtcaattgtgtacaatctgtgatctcgcagtcatcggagcagacgcatcaggtttgctctgttctccttctcaaattcgataattttgaactacataatcgaggcttgtttctttaatcttgctcaacctttgagcaactgccgtaccagtcacgtcggtagtcagagggcccttgtttaaaataaataatggtcatatctcatatataggacaattacatgttaatgtgtgtcaaatttgctcacttctctttgataccttttttttttctttttttcaaggttcct

SEQ ID NO: 191746 - DNA, 934 bp, Gossypium hirsutum
cgcctggggcaccgccgggcaattatgggcgggacccacgcgtccgcgaagagagatgaaagacaatccagttcgccggggggagcttgctgcctacttcacccactgcaaccttcaactgcctcacctcagacttgctctgctgaatccaatgaccatctgctataaggctaagaaccttgctacagcaggtaactttgcccggcgactactagaaacaaaccccacaaatgagaatcaagcaaagacagcatggacaagtgctccaagctgcagagaggaagatgacagatgcctctcagctgaactatgacttcagaaacccattcgtgacttgtggggcaacttacgtcccaatttaccgaggacagatggatgtatcctgcccttactgcactgctcgcttcgtccctacccgggatgggcaattgtgtacaatctgtgatctcgctgtcattggagcagacgcatcaggtttgctctgttctccttctcaaattcgatgattaagctctgcatactcgaggcatgtttccttcaatcttgctcaacctttgagcagccagcggaaccaatcacatcgatcgaattcttatcctcaggtaaaaaggtatgtgcttgatgaaatctctgatctcaagttcattacttttcaccatttacttttatttgccttttgttttcattataatattcacatgtattttaaacaagttgggaattttggatttttggctattcttttttctttcatgggctgaaaatagtcatagggccctgtttaaaatagataataatggtcatatctcatatgtaggacaattacatgacattgtgtgtcaaatttgcttacttccctttggtacctcttttttttctagtttccattgcttggtgttttttcctattaagtacttgaacctttttttgtgtt

SEQ ID NO: 191747 - DNA, 752 bp, Gossypium hirsutum
ccgggcaccacgcgtcgcccacgcgtccgccacgcgtccggttcttggtctgcagatggagctaagcgaagagaaatgaaagacaatccagtacgccagcaggagcttgctgcctacttcactcactgcaccttcaattaccacacctaagacttgccctgctgaatgcaatgactgtctgctacaaggcaaagaacatggctacagcaggtaactttgcccggcgactgctagaaacaaaccccacaaatgagaatcaagcgaagacagccaggcaagtgcttcaagctgctgagaggaacatgacagatgcttctcagctgaactatgatttcagaaatccatttgtgacatggggggcaacttatgtgcctatttaccgagggcagaaggatgtatcgtgcccatattggactagtcgctttgtgcctagccaggaagggcaattgtgtacagtgtgtgaccttgcattggtcggggcggatgcatcagggttgctgtgttctgcttcacagatacgatgaggcaacaaaagttggatccgcttttgaacttaatcctgctgatccttttagatgcaaaacccatcctcagcgatcaactcatatctgcagtttaaaaggtcagagtttactttagaaattattgagaactgaaattaatttgtttgtgctatttccttctgttttggttttttccggcttaataaagttcattatgattttcgtatgtaagaatgaatttggatttac

SEQ ID NO: 191748 - DNA, 533 bp, Gossypium hirsutum
tcctcgcgtccgtgaagaggagggtggttgggaccttgaagatttggaacttccccctgaggcagacaccccaaaggtttctggcaatgcccgttctatttttgtggcaccaactcccggtatgcctttaagtcagatttgggttcagaaatcttctcttgctgctgaacatgctgcagctggcaattttgatacagcaatgcgtttgctgagcagacaacttggcataagaaacttttctcctttgaaatccttgtttcttgatcttcacactggcagccatagctatcttcgtgcattctcatccgctccagttgtgtcgttggcagttgagaggggatggagtgagtctgctagtcctaatgttaggtgtccgccggccctggtattcaatttctctcagttggatgaaaagctgaaggctggttacaaggccacaacagctggaaaatttactgaggcactccggctcttcctccgcattcttcatactattccgttgattgttgtggagtcaaggagagaagttgatg

SEQ ID NO: 191749 - DNA, 798 bp, Gossypium hirsutum
attttggattgacctcaccacccaattaaactctctcactcagtttatcttagcttcgctttatttttgtagtttcctgtattattcaacaaaacacaacgccactagagtttagtttgatcagcaaccctctgctcttcttcttccttaaacaagcaaaaaaacaagaggaaaaaaatgggtggagaaagaaaggtctacactttggctgaggtttctcaacacaaccatgctaaagactgttggcttgtcattgagggcaaggtatttgatgtgactaaattcttggaggaccaccctggtggtgatgaggtcctgttgtctgcaacagggaaggatgcaagtgatgattttgaggatgttggtcatagtagcagtgctcgggcaatgatggatgagttttacgtgggtgacgtcgatacatcaactatcccaactaagaccaagtacacccctcccaagcagcctcactatgagcaggacaagacctcggactttgttataaagcttctccaattcctcgttcccctgctgatcttgggattggccttcggagtccgcttctataccaaatcacctgcttaagcatcaagaccacaacccagaatggaaaaaacttctcaatattattattatgttagtttaaacgtttgtttggaactgttacatattgagggatggttcgaaatactatatttactcgttctgtttattgaccagctcccggtgccccattttcaatgtaatatctaaactcgtcctctatggcatgtacccagtaaaactaccctttctttt

SEQ ID NO: 191750 - DNA, 946 bp, Gossypium hirsutum
cccacgtttccgcaccaacccccacagatcccatcaaaatttctttccattgatggctcacatttgaccttaccaaccaaacctactcttctttggtttccctttatttttatttgtttggtatttttaggttcaaccccagcacacagagtttgtggttggttagtggcaaccacaagacaacaatattaaattttgggttcagtttgatcagctattctgtgctgcccttcttcttcttcttcttcttcaaacaagcaaaaaaacaagaggaaaaaaatgggtggagaaagaaaggtctacactttggctgaggtttctcaacacaaccatgctaaagactgttggcttgtcattgagggcaaggtatttgatgtgactaaattcttggaggaccaccctggtggtgatgatgtcttgctgtcttccacagggaaggatgcaactgatgattttgaagatgttggtcatagtagcagtgctcgagcaatgatggatgagttttatgtgggtgacatcgatacatcgaccatcccctctaagaggaagtacactcctccaaagcagcctcactacgaacaagacaagacctcagaatttgtcataaagcttctccaattccttgttcctctgctaatcttgggattggccttcggtatccgctcctataccaaaacaccagcttcatcttaagcattgagactcccaagagataatttgagcaatcttcacaataagattatgctagtttaaatttctttggaattttcacatactgcagggtggtaaatggttggatatttttattcaaacatttgctccaatgcagttgaacaaactcagattcgcctccgattgtgataatttgataattgtctttcccagttttcaccatgtgtttgttcaatgctccctttctttgataaaaaaacttgttcatttactc

SEQ ID NO: 191751 - DNA, 944 bp, Gossypium hirsutum
cccactcgtccagccaactttgtacgtacaagtgaagtgatccacaatcttgatacggtaatacgttaggtagttttcagcatacttgttttgagtttagtggttgtagataaagaaaaaatggctgaggagcataccaaggttggtggtgaggaagcagtggagagcaaggagcgagggatgtttgatttcttggggaagaaagaagatgagaagcctcaacctcaagaggaggtggtcgccacccagtttgagaaagtcaagatagaagaggaacataaggaagatgagaagaaacacagtctcctggacaagcttcacctatccaatagcagctccagctcttctagtgacgaggaagaaggtgaaggcggagagaagaagaagaagaagaaaaaggagaagggaaagaaagaacaggacagtgcagtcccagtggagaagtgcgatgaggtagcaacagttcaccactcagagacgccggaaaagaagggtttcatggataagatcaaagacaaactcccaggacagcataagaaagatgaagaggacaccacccaaccaccagctgctgctgccccaattgagaacgaccaccatgaaggagagacaaaagagaagaagggatttttggtgaaaatcaaggagaaaattcctggttaccactccaaaacagaggacgagaaggaaaaagagaccactgctcccaattaatgaatcaatataatgcatttcaagtaaaagatgtgtagagattgtgtggtttatcaatttgttggaactgtctgttctctgtttttctttttggggttgcatacatcatataaatttctgcgtctgttttcctgcttgtaagttaaaaaagaaaagaaagaaaaaagaaggtatgtatatttaatgcttttaatgtcattataataattaagaaatgacggtattatttc

SEQ ID NO: 191752 - DNA, 436 bp, Gossypium hirsutum
tcgtgataaactcccaggacagcataagaaagagggagaggttaacaccccaccaccagctgctgctgccccaactgagaacgaccaccatgagggagagacaaaagagaagaagggatttttggagaaaatcaaggagaaaattcctggttaccactccaaaacagaggacgagaaggaaaaagagaccactgctccccattaatgaatcaatataatgcatttcaagtaaaagatgtctatgagattgtgtggtttattaatttgttggaactgtttgttctctgtatttctttttggggttgcatacatcatataaatttctgcgtctgttttcatgattgtaagtaaaaagtaaaagggtatgtatatttaatgtttttaatgttattataataattaagaaatgatggtactatttcctttttatcaaaaa

SEQ ID NO: 191753 - DNA, 526 bp, Gossypium hirsutum
  unsure (1)..(526): unsure at all n locations
agcttatcatcaacaaacaaagagatgaactctggagaccgagaattcagattgatgaaatattcaaacgaggaatttaatgcattttgaaaagtcttgtcatttctaaatgctgaagtgataatcttgtcgtatttgtcctttaaatccaacagatgttgcacaaaatcgacaggatccttcagcctttcgggatcagtgagtaactgcttaccagtatcacgaatgtatgaagtcatgacgtctctgattaaaacaagcccattggatactcgacgaaacaagcaatacatccttcctaagtcctcatatttttcatcgacaatcatactaatcaaccccgagttctccatttgcacaagcctgtgcatatgactttcaatcatctccgtttctaccacatttgttatcttgacttcacttctggtgtccaagtaatgtgagactctctctatttcttcatttaggcgtctctcggctttctttagatactccccacaatcacaggactctatgaactctngag

SEQ ID NO: 191754 - DNA, 419 bp, Gossypium hirsutum
agggccatggcatattcatttactcatcagcaaacctggaagcatactgcaagatctatgaatccgttattcatggatccaaacaatccctcatggggatggagttggttggaacgatggatggcagcaccaccacaggagggtcgtggtacaacagaaaaggaacagaacgaccagtcatccataaggagtgcacgcagcaactttggaggagaaatcagcaaagcttatgctcgctaccaactcaatttggataagcaatccccaaaggctggccaaaagccaaaccaaacatcaagtctcctatccgtttcaactcctaagacatcagctttaatacctgcccgaaagctgaagtcagcaagccctataagcagtgtggtcggtccacatgatgacggaagaagcatggtgagcat

SEQ ID NO: 191755 - DNA, 617 bp, Gossypium hirsutum
acaagtttttcattttttataatcttttctgcggcaaagctacagcaacgaataaagaagctctgcgataaaagcagaggttgagtaagaagaagatgggtgtagattattacaagattctacaagttgacaagaatgcaaaagatgatgatttgaagaaagcttataggaagcttgccatgaagtggcaccctgataagaacccaaataacaaaaaggaagctgaggccaaattcaagcaaatctctgaagcttatgaggttttgagtgacccacaaaagagagctatctatgaccagtatggtgaagaagggctaaaaggccaagtaccacctcaagatgctggcggacctggtggagcaacatttttccaaaccggagacagtccaaatgtgttcagattcaaccccagaaatgctaatgacatctttgccgagttctttgggtattctagcccctttgggggaatgggcggcagtgggatgagaggtagctcaaggtcatttggtggcatgtttggtgatgatatattcagttcgtttggtgaaggaaggccaatgagtcaaaatcctcgtaaacctcctcctattgaaaatacgttgccttgtagccttgac

SEQ ID NO: 191756 - DNA, 957 bp, Gossypium hirsutum
  unsure (1)..(957): unsure at all n locations
tttttttagaagaatgtaccggagaaattcttgacctccaacggttttatgaaaataaggatttagcgataagaacatgtcctcataanattctatagtagtcatactccagccgtatatgtcatatgtagagcgaaaatatatgtcttttcagacagtgtacgctgnttgaatgtgtntatgtcagaccttcaattntanctctattngnacgtcccttttagcgtagtcagttccctcaccttgcaatttcagctcgtctctttgcttcttcagccatttgattaagttcattgtaactagttcgttcgccaaacatnttgtgtctggtggctgcaatccatggagtgtcctctgagcatgcgcccatttcagttcacgttcttctttcccgaagtctttcttcctgtgaaagcgatcctttgttcaatgacgagatcccagcttttccactgagggcgtatcggatgaagaacttgataaaatcgagtggaatgtaaaagataaggttgtagagccatatcacacgtgcccaaccccatccaattccttcaattgcagcaaaaccccagtttgcatatactgctattaatgtagcaatcagctgagctacgacaaaagccaaaaccagtaaaaaaccgggacgctcaaggaaagaccaacttcttgctcgtgttacaaatatgagagcttgactgataatgctcacttgcaggtatactgccgaagcaagcatttttatgtccttgcggtcggttttatgaaggcttttaaccccaaatgttctaggcaagaagtctgtcttgtatgctgccctaaaccaaatgacagtcaccatggctcagtaaccaccaagaatgattccagttgcaaagatttttcctaacttccaactgtctggcagtgcagatggtttcactctagccatggatatagtcctaatggtaccatcattaa

SEQ ID NO: 191757 - DNA, 618 bp, Gossypium hirsutum
gttttgttttttttttttgtttttttatgaagaagattgaggatttaaacgtataagaaagcagttactgcattaagatgacatattataggtcattattactcccagcagtatatgtacaataagtagagccgaaatgtattatgtctttttcagacagtgtacgcttgctgaattgtgtctatgtcaagacccttcagtctaactactgattcgacgtgcccttttagtgtagtcagttccctcaaccttgcaatttcagctcgtctctttgcctcttcagccatttgattaagttcattgtaactagttcggtcgccaaacatcttggtgtccggtggctgcaatccatggagtgtcctctgagcatgcgcccatttcagttcacgttcttctttcccgaagtcttttcttccttgtgaaagcgatcctttgttcgatgacgagatcccaagcttttccactgagggcgtatcggatgaaaaacttgataaaatcgagtggaatgtaaaagataaggttgtaaagccatatcacacctgcccaaccccatccaattccttcaattgcagcaaaaccccagtttgcacggacgcgtgggcggacgcgtgaaagaaa

SEQ ID NO: 191758 - DNA, 508 bp, Gossypium hirsutum
cagagatcaagtggacagtctctgccaaagcattctcgaggatctatggagtggccttgaatcttccaaggtatctgtgaggtttgaaggatctagttccctagctgcagaataaatgttatgactgtgtttcagctatattgaaagaactccaaactgaacttgataatttgtacactgcgattggaagtgaacacaaggaaagcgattctgtgcctcctcctttaattgttgagagatctctttttattgggagactcttgtttgcattcgagaattactctaaacacattgctttgattcttggctctccacggttctgggtgaaatacacagctcctgcaatttttgagaagctcccttcctcgttgtggcaatctaaagctgtcaatggttctcctttctctgacagccttggaaggcaaatactcactagttccgagaggcaaagttcatcacctactgctgcattgcttggtgcaaatgaaagtgcaaacccaaaacttta

SEQ ID NO: 191759 - DNA, 1117 bp, Gossypium hirsutum
caaacctttctctccaacaacccttctcaaatctcccatggaattaacccttcttttcccccttttcttcttcttcaccttatcttttgctacatacatatccactctaaccttaaaccaaaaccatccatcatcatcatcatcatcaagctggagaagcgataatgaagtgatgggattgtacaaatcttgggtcatccaacatggcaaagcttacaatggtatcagtgaagaagagaaaaggttcgaaatctttaaggataacttgatgttcattgatgaacataactctaacaacaacactacatataagcttgggttgaacaagtttgcggatttaaccaaccaagagtaccgagccaagttcttgggcaccaggactgaccctaggcgtcgactcatgaagtccaagatccccagctcacgttacgctcaccgtgccggcgataacttgccggattcagtaaactggagagatcatggagctgttagtccggtcaaggatcaaggatcttgtggaagttgttgggcattctcaacaattgcaacagtggaaggcataaacaaaatcgtgtccggtgaactagtctctctatcggaacaagaactagtcgattgtgaccgatcctacgatgccggttgcaatggtggcctaatggactatgccttccaattcattatcgacaatggtggcattgacactgaaaaggattatccttaccttggcttcaataaccaatgtgatccaacaaaaaaaaacgctaaggttgttagcattgatgggtatgaggatgttccaaataacgagaatgctttaaaaaaggccgtcgcacatcagcctgtgagtatcgccattgaagctggtggtagagctttccaactctatgaatcaggagtttttaatggtgaatgcgggttagctttagaccacggcgtggttgcgggcggctatggctccgatgattacggtcaagactactggattgtgaggaattcatggggcagcaattggggtgaaaatggatttataagaatggagcgtaacatcaatgctaataccggaaagtgtggtattgcaatggaggcttcctatcctggtaagaatggggcaaatatc

SEQ ID NO: 191760 - DNA, 471 bp, Gossypium hirsutum
attttgtgtaaaatcgagatctgaaatatgggtttcttagtaacagccctaattttttctgtgattgcggtaattgcatcactttgtaccagaatctgttgtaacagaggtccctctgctaatctgttacatctaacattggtcattacagcaaccgtctgttgttggatgatgtgggcaattgtatacctagcacaaatgaaaccactcattgtccccattttaagtgaaggagagtgaagagtgtgtgtgtgtgtatatatatattgcacaaaaatcatttggaagattatcagtaaatcagcaattatggattttggccattgagggaatacctgaattccattgtttaatggaatggatgattcagtgtgttctcatatgttgattttgtatgtgctttgaattggaattgtgttggttctttgatgttattagtttctcatttgttatatttttatgatttccttc

SEQ ID NO: 191761 - DNA, 749 bp, Gossypium hirsutum
ctcaagtaagggagacaatggtttcatcagagagtgaagataatctgatcacctatgatgcagccaactttaagtttgaggcatgccagccatcttcctcgtcagtaacggatgattctgaacaacctcaaattgacagtgcaattaaatctgatctgaaagagacctctcccgagatgaactcacaaggtcaaacaatgcaaatcagtgcacattctcaaatagaggtccattgtctttctaacaagcctgaaactgggagtgaacaacccaaacattctatggaaagatttgcttctgaacatttggaaacagaggcaaaaaaatttgtatttggttcaaaaaggacaagtaatcctgcatttattgctgcacaaaccaaatttgaggagttgagttcaacagccaattcaagtagatcaattgattcatcctaccaagatgttagtgttgaatcaaacttggacactgtgccttctggggcagatatgataagcaggtcaaaggagccaagcatctcagaaaatccagtcctcaacaattggagggttcaacatggtggctccgaatgtggaactgagctttctattacttccactcttgattcacctgatagatcagaagctggaaccttagaatatgaaagtgcaaccaaagtttctgagcaagaaaactgtacttctaagagtacaaaggacttggatgttaaaaacaatgatacagttgcaatcccagtgcccgattcttct

SEQ ID NO: 191762 - DNA, 440 bp, Gossypium hirsutum
aaacccgggcggacccacgcgtccggaaggcttgactgacgatgacattcgaactgctattcagaatgcaactggtcctagatcgtggctatttgtacctgaagtcccgtttgaagtgcttgttcgagggcaaatagcacgtctgctagatccaagccttcaatgtgccaggttcatatatgatgagttaataaagattagccatcgctgtatggtgaatgaactgcagcggtttcccgttctgaggaagcatatggaccaagttgttggaaattttctccgagaaggtcttgaaccatctgagacaatgataggtcatatgattgaaatggagatggattacataaatacttcccacccgaattttattggtgggagcaaggctgtggagcttgccaatcaacagctcaggaattccaaggttgctcttcccatatcta

SEQ ID NO: 191763 - DNA, 705 bp, Gossypium hirsutum
ggtgtactggtgtgaacccaaactagcattatgccatatactgataaaagagctatttacagaagagctgaaatctctccggagaagaaaccaatctccatgtatatatatgatatgatatgatcctatatcaaaggcctcagtatacaggcttcaacttattacaaagacttttcactaagaaacaaaagaagaccaaaacccagtatacaatattaaaattttctgtgtgtataatgtgtaaaagcagctacctctataatttcctatcagttgaagcgatgatcttgataacaaggccggggaaaacatcgtcagggtcatggatatgcgggttccgctcgacgataaacggatcgccacacttgtcgctgatggagtgaagggtttcaccttcgccaacgacatagatttcatcgcagggtcggttccggagctggctacctctcactggttcatctgatacggagtttgccccgattgaccctcgcgtacattacggccaatagggtttgaaccactcagtgttcttgttcagatctgtgggtggcacagctctcacgtacatcttttactttggttatatctcttctgggctttctctttcttcctcaaacaaacggatgggtgactcaaggattgataatggtgaaagctgtgctcgttggtagtgaattcgggtttcaccaattccggacgcgtggg

SEQ ID NO: 191764 - DNA, 627 bp, Gossypium hirsutum
  unsure (1)..(627): unsure at all n locations
tctctccggagaagaaaccaatctccatgtatatatgatatgatatgatcctaatcaaaggccncaatatacaggcttcagcttattacgaagacttctcactaagaaacaaaagaagaccaaaaccagtatccagtattaaattttctgtgtgtatcatgtgtataagcagctacctctataatttcctatcagttgaagcgatgatcttgataacaaggccggggaaaacatcgtcagggtcatggatatgcgggttccgttcgacgattaacgggtcgccacacttgtcgctgatggagtgaagagtttcaccttcgccaacgacatagatttcatcgcagggtcggttccggagctggctacctctcactggttcatctgatacggagtttgccctgattgaccctatcaatattaaggccaataaggttacggaacagtaccacgacgccgtatcgactagccccgtaggttttttcttcatggttttggctcgaggaagaagaagaagaggaaaccatggtacaaaaaaaaaacccagagatttgggggatgttttgaaatttgatgaaacagaggaaataatggaaaattatacgataaggaggattttatacacttttt

SEQ ID NO: 191765 - DNA, 963 bp, Gossypium hirsutum
ggaaagagagcttctcatcacattttattgtgcttatctcttccatttttggcttctctttcagatttcaaagatgtatacatcaaggaagaagatccacaaagataaggatgctgaaccaacagaatttgaggagtctgttgcgcaggcattcttcgatttggagaataccaatcaagatctgaaaagtgaccttaaagatctctatattaattcagcagtccaaattgatgtttctgggagccggaaagctgttgttatccatgtcccgtatagattgaggaaagctttccgcaaggttcatgttaagcttgtgagggaacttgaaaagaagttcagtggcaaggatgtgattcttattgccacccggaggatattaaggcctccaaagaaaggttctgcagttcagaggccacgcagccgcacattgactgctgtacatgaggcaatgctagaagatgttgtcttacctgctgagattgttgggaagcgcactagatatagaattgatggatcaaagataatgaaggtgtatttggaccccaaggaacgaaataacacagagtacaagcttgagacgttttctgcagtttaccggaagcttgctggaaaggatgtcgtgtttgagttcccagtgacggaggcataaatagtactttttgaagtgttgtgaaactttatttctggttaaaattttgacatttttaagagttggtaagcaaagtcatatggatttaatttccttcttatgatttagtttctggtatgcattgcgatggtgtgggattgagtttaaaatggttattgttgtttgacaaattctattctcaattcttatgctcttgtttaaagcaatgaaaaattccgatgaaagctttttcatccaaaaaaaaaaaaaaaaaaaaaaaaaaaaaaaaaaaaaaaaaaaaaaaaaaaaaaaaattctgcgggtcgacgcggccg

SEQ ID NO: 191766 - DNA, 689 bp, Gossypium hirsutum
  unsure (1)..(689): unsure at all n locations
tgtggaaagagagcttctcatcacattttattgtgcttctctctcagatcttgaaaatgtatacatcaatgaagaagatccacaaagataaggatgttgaaccaacagaatttgaggaatcagttgcccaggcattctttgatttggagaataccaaccaggatctgaaaagtgacctcaaggatctctacattaattcagcagtccaaattgatgtgtctgggagccggaaagctgttgttatccatgtcccctaccgattgaggaaagcttttcgcaaggttcatgttaagcttgtgagggagcttgaaaagaagttcagtggaaaggatgtgattcttattgccacccggaggatattgaggcccccaaagaaaggttctgctgttcaaaggccgcgtanccgcacattgaccgctgtacatgaggcaatgctagaagatatcgtcttacctgctgagattgttggaaagcgtactaaatatagaatcgatggatcaaagataatgaaggtctttttggacccaaaggaaaggaacaacactgagtataagctcgagacgttttctgcggtttaccggaagcttgctggaaaggatgttgtgtttgagttcccagttacagaggcataaataagtatntggtgtgtgtgtgtgtgtgtgtcccaagtgtnttgacacctttctggg

SEQ ID NO: 191767 - DNA, 915 bp, Gossypium hirsutum
cgcgtccgtccttacacagccccgccgtcaaacaagcctctcagcagccctttctttctcttcttctccttctccccttctccggtccctgagcaggccagcctgtaattcaaataagatgtatacatcaatgaagaagatccacaaggataaggatgttgaaccaactgaatttgaggagtcggttgcccaggcattcttcgatttggagaataccaaccaggacctgaaaagtgacctcaaagatctctacattaattcagcagtccaaattgatgtttccgggagccggaaagctgttgttatccatgttccctacagattaaggaaagcttttcgcaaggttcatgttaagcttgtgagggaacttgaaaagaagttcagtggcaaggatgtgattctcattgccactcggaggatactgaggcctccaaagaaaggttctgctgttcagaggccgcgtagccgcacattgaccgctgtacatgaggcaatgctagaagatatcgtcttacctgctgagattgttggaaagcgtactagatatagaatcgatggatcaaagataatgaaggtctttttggacccaaaggaaaggaacaacactgagtataagctcgagacgttttctgcggtttaccggaagcttgctggaaaggatgttgtgtttgagttcccagttacagaggcatagataagtattttgtgtgtgtgtgtgtgtgtgttttaagtgttttgacacctttctgtcctggaaactgctttttatggaggtatttaaaattttgagatttaggagttgttaaggaagcagagaaatgatggatggatttgtttagattatgtggtattgcttctaatggtgtaagattgagttttagaaatgtttggttaatttggttcgcaaaaaaaaaa

SEQ ID NO: 191768 - DNA, 487 bp, Gossypium hirsutum
cccatgcgtccgtagatcgcgagcggccgcacattgacttctgtacacgaggcaatgctagaagatattgtcttgcccgccgagattgttgggaagcgcactagatatgcaattgatggatctaagttaatgaaggtgtttttggaccccaaagaacgaaacaacactgagtataagcttgagaccttttctgcagtttaccggaagcttgctgggaaggatgttgtgttcgagttccctgttacagaggcatagataagtccttttacaagtgttgtgacatctttctggtcttatttcatttcttgttttcccttagaaaagctgcatttttgctatttaaaattcgacattattgagttgcccgaacaagcagagatatataagtatcatgatggattttattttattttctttgataatgcgggatgacatttaatgtagggatattatgattttattaaaatgttttttgttggctcccccc

SEQ ID NO: 191769 - DNA, 1456 bp, Gossypium hirsutum
gctgcatggtccgattgcgtaaacctgtatgagttaaccatccttcgtctcaacaaaactgttgattccggcaccaatctcaataaggatgatgctcaaacatggctcagcacggctttaaccaatctcgaaacatgccagaccgggtttatggaactcggggtcccggattatcttcttcccatgatgtctaacaacgtttcccagttaattagtaacaccctggctctcaacaaggcaccttacaaggaaccaacctacaaagatgggttcccgacatgggtgaaacccggtgacaggaagctgttgcagtcgtcgtcgccagcttctacggcgaatatcgtcgtggcccaagatggttcagggaattataagacgataaaagacgctatatccgctgcttcgaagcggtccggaagtggaaggtatgtgatatacgttaaggcaggcacatacaaggaaaacgttgagataggaagcaagctgaaaaacatcatgatggtgggcgatggtatagggaaaactataatcacagggagcaaaagcgtcggaggaggatccacaacgttcaattcagccaccgttgccgttgttggagatgggttcattgctcgtggcattacgttcagaaacaccgctggtcctactaaccatcaggcagtggctctacgttcaggctccgatctctcggtgttctacaaatgcagcttcgaagggtaccaagacactctttacgtccattccgaaaggcaattttacagagaatgtgacatctacgggaccgttgattggatattcggcaacgcagccgttgtgtttcaaaactgcaacatatacgcacgcaatccccctaataagaccaacacggtgacggctcaaggccggaccgacccaaaccagaacactggaattataatccacaactccagagttacagcagcttccgatttgaagccagtgcaaagctcggtgaagacatatctagggaggccatggaaacaatattcgaggacggttttcatgaaaacgtatctggatagcttgattaacccggccggctggatggaatgggatggtaattttgcacttaagacgctgtattatgcggagtatatgaacactggccccggttcatccacgtctaatagagtcaaatggggaggctaccatgttcttaagagcgcaagcgaggtgtcaaagttcaccgtcggtaactttctggctgggaattcttggttgccgagcaccggtgtgcctttcacttcagggctttaatatgttgcgatttcatagttaatttaattgcttgtaaaataagtaacagggtttaatagggttaaggctgtataaaccctcaatattgtactaaaaatgctactttcctacacggttgccatcaattctttgtgtaacgttctaaaatctttgttaatgaatcataaagttgaatttcacc

SEQ ID NO: 191770 - DNA, 1686 bp, Gossypium hirsutum
cccacgcgtccgctcttcagtccggaattcttattccttttatatttttcctctccaattttccgtcactttcccgagaaaatgagagaaatccttcacatccaaggtggccaatgcggcaatcagataggagccaagttctgggaagtcgtatgtgccgaacatggcatcgattcaacgggtcgatatggtggtgactcggagctccagcttgagcgaatcaatgtttactacaacgaagccagttgtggccgttttgttccccgcgcagttttaatggatctggaacccggaaccatggatagcgtaagatccggtccttacggacaaattttccgacccgataacttcgttttcggacagtccggtgcgggaaacaattgggctaagggacattacactgaaggagcggagcttatcgattccgttctcgacgtggttagaaaggaagccgagaattgcgattgcttgcaagggtttcaggtatgccattctttgggaggaggaacgggttccggaatgggaacgttgttgatatcgaagatacgagaggagtatccggaccgaatgatgcttacgttttcggtgtttccatctcccaaggtttctgatactgttgttgagccttacaacgcgacactctcagttcatcagcttgtggaaaatgctgatgagtgtatggttcttgataacgaagctctctacgatatctgtttccgtaccctcaagctcactactccaagttttggagatctcaaccatctaatttctgccaccatgagtggtgtaacatgctgccttcgcttccctggtcagcttaactcagatctccgcaaacttgctgtaaaccttattccattccctcgactacatttcttcatggtgggatttgcgcctctcacctcacgcggttcccaacagtacagagccctcactgtccctgaacttacacagcaaatgtgggatgccaagaacatgatgtgtgcagctgatcctcgacacggccgatacctcacagcatcagcggtcttccgtgggaagatgagcacgaaagaggttgatgagcagatgatcaatgtgcaaaacaagaactcatcttactttgttgaatggatcccgaacaatgtgaagtccactgtttgtgacatccctccaatcggcttaaagatggcatccacatttattgggaactctacttcaatccaagagatgttcaggagggtgagtgaacaattcactgccatgttccgtaggaaagctttcttgcattggtatactggagaagggatggatgagatggagttcacagaagcggagagtaacatgaatgacttggtttctgagtaccaacaataccaggatgcaactgcagatgatgaagagtacgaggaagaggaggaatacgaggcagaggcttaaaatctaatggaataatttggatgttttttgttgtgttttggattgggcttgtggagtgtgttggtgcaatttctcactgcctgttttgggtctttggatcactgtgttgttgattgtgtcgactttagttttgtcctcacagcttacagagtatatgttgttgtattgcttgttgattcatcttataagtaatttcaagtacaccttaagtaaacggtttttttatactaaaaaaaaaaaaaaaaaaaaaaaaagtcgacgcggccg

SEQ ID NO: 191771 - DNA, 665 bp, Gossypium hirsutum
gttctagatcgctagcgatctagaacgatcaatgtgcaaaacaagaactcatcatactttgtcgaatggattccgaacaatgtgaaatccacagtttgtgacattcctccgagtggattgaaaatggcatccacgtttatagggaactctacttcaatccaggagatgttccggagggtgagcgagcaattcactgccatgttccgaagaaaagctttcttgcattggtacactggagaagggatggatgaaatggagttcacagaagctgagagcaacatgaatgatttggtttcggagtaccaacaataccaggatgccactgcagaagacgaggagtacgaggaatatgaggaatacgaggaagaggcttaaaggatgctccttgttctttttatcatgtaggacattcggttgtgcaatctctgctttgctggttttcagcatttggatcgcttattgctgctgtctttgcgatttacagactagtattgctgctttgttttttatcaataattttcagcagtcaggttcgtttctctcacaaatgtagcttacaaatgtgggagcaaatgttaggctgcgaatctatttattaaagtatgcctcttgtactttttatcatgtgggatatttggttgtgtgtatgtgaactctgttgatgc

SEQ ID NO: 191772 - DNA, 515 bp, Gossypium hirsutum
gtctcttcactcttgagtccagtattctaaggtgcatttttccatctactttccgtcactttcccgagaaaatgagagaaatcgttcacgttcaaggtggtcaatgcggcaaccaaattggagccaagttttgggaagttatctgcaccgaacatggaatcgactcaacgggtcgatacaacggcgactcggagcttcagctggagcgtatcaacgtttactataacgaaacaagttccggccgctttgttccacgcgccatcttaatggatctggaacccggtactatggacggcgtaagatccggtccgtttggacaaattttccgacccgataacttcgttttcgggcaatccggagctggaaataattgggctaagggtcattacaccgaaggagccgagcttattgattccgttctagacgtagtcagaaaagaagctgagaattgtgattgcttacaagggtttcaggtatgccattctttgggaggaggaactggatctggaatggga

SEQ ID NO: 191773 - DNA, 756 bp, Gossypium hirsutum
  unsure (1)..(756): unsure at all n locations
nnnnnnnnnnnnnnnnnnnnnnnnnnnnnnnnnnnnnnnnnnnnnnnnnnnnnnnnnnnnnnnaataaacaattaattcattcttcttgtcacaaaacaactaattttctctttgctattttacatttaaactccattgaaaaccataatttcctggcttaagctaaaggtataatacatgcaatttgtcataggttcaatgctaaataattaaaaaaaggtttcggtcggttcaaaagctttcttgctgcaatcctcatcaatggggcattaatttactggactctccctgaatggctaccaaatttacatttccctttatacataaataaaatacataaatgcaaccatggaattgactcttcaacatatgacactgaaggaaggtttatgccaataaactttggaattattttcaccaagtatgctcgaactgtgcgccgacaaggtaacatttggagaactatggcatatgactgaagctaatcgaaatgcatatgacttcattggctggataataccaaagggagaatggatacttttgtatagacttgcaaaagatgaaaatgggtatctgtcaaaagaacctgtcaggggttgtttcaatgggattttgtttaaacactttgccaaaatgaataatactggtaacaaaaaaaaccctaaattgaaggaatgaaggttgtggctttaacatacttgttttttgagtatgtgcccaaataaagaataataatccctgctttaacatatttt

SEQ ID NO: 191774 - DNA, 752 bp, Gossypium hirsutum
attgttatcttccaaacgccagccgactctgtacccttcatttcacatttcttccacaaatcaactgtttcttctcaaatctaaagcaaagcaaagcacgcagcaatcatggcagatgatgaagtgaaggatgaggtgccggaaatcacatcatttgatcctagtaaaaagaagaagaagaagaaggttgtgattcaggaccctgcagatgaatctgttgacaagttggcagagaaaacggaggcattatcagtttctgaagggcttgactttagcaatctgaaaaagaagaagaagaaaccagtagaggccaatacattcactgacgaaagtggggatgcaggagatgattttgatggtcatattgatggggatgaagaaggtgaaggcattgtcttgcaacaacggtacccttgggatggaactgaccgtgattatatatatgatgagctactcggtcgggtgttcaacattctccgggagaacaaccctgagcttgctggagacagacgtagaactgttatgaggcctccacaagttcttcgtgagggcaccaagaaaactgtttttgtaaatttcatggatctatgcaagacaatgcatcgacaacctgaccatgtcatggccttcttgcttgctgagctggggacaagtggatcacttgatgggcagcaaaggttggttgtgaagggcaggtttgcaccaaaaaattttgaagggatcctaaggcgttacatcaatgagtatgtcat

SEQ ID NO: 191775 - DNA, 693 bp, Gossypium hirsutum
aagcaacttaatttgcctcctcaagcacaaatttccctttgtgatgagaaaggagacatcgatagggcttcaagaccgtgggagataataccagctgggcataaaatcggagatccaaaacctttatttgaggaactgaaaactgaaagagttgaagagctaaggcaacaatatgccggaagtcaagctgataggcgtgcaagggcagaagccgatgctgcaaagactgctgagcaactgaagaaaacaaaaatttcagatagcaagaaagagaaggctaagaaatcttcagccaactctaaagaaaagcccactgctgaaccggaaatttccatcacaagactcgatattcgggttggcaagattataaaagctcagaagcatcccgatgctgattctctgtatgttgaagagatcgatgtgggtgaagcccagcctcgaacagttgttagtgggctcgtgaaatatattcctttggaagagatgcaggaccggatggtttgtgttctttgtaatttgaagcctgcaaccatgcgcggtataaaatcacatgcaatggggcttgctgcttcgaacaacgaccacaccaaggtggaattggttgaaccaccaaagtcagtcaaggtcggagagcgagtgaccttttctggtttcacaggctagccggatgatgtgttaaacccaaagaaaaag

SEQ ID NO: 191776 - DNA, 863 bp, Gossypium hirsutum
ctggaccaaattctcgcgttgtatacatcgatggggcattcgagctctttcagtgcagggcatgtggagatccttaagaaggctaggcagcttggagactttttgcttgttggtatccatacagaccatattgcgagggagcacagggggatgccttacccagttatgcatgttcatgagcgcagtcttagtgtgttagcttgccgctatgttgatgaagttatcattggtgctccttgggaagttactaaggacatgattacgaccttcaacatttctattgttgtgcatggaactgttgcagagagtaattctctgttgcctggtgaaactgatccatatgcatttccgaagagcatgggaatttttcggttgcttgaaagcccaaaaagtttaaccactagttctgtatcccaaaggatagttgccaatcatgaggcttatgtgaaacgcaatgtgaagaaggcacagagtgaaatgaaatactatgaagagaagacttatgtcgcaggggagtagctgatttaggtttctaatgttagcgagtttggtacagctcttcatgctgccttaacaattcatattgatgtagatgattatatcagcctgtggaagacccagacagtattattggaagatagaaagagtgcaaggcatggcatcaataccagaaacttccaagccaacgcttaatttatataatttttgttattccaattttttttaccccagttttctgagattttgaagaaccctttaataatttgtttactacggatgcttgtaaacaatgtaatcactgattactttacccctcccttgggtggggcgcatgatttttgtgtgcttttaattcaaaagca

SEQ ID NO: 191777 - DNA, 535 bp, Gossypium hirsutum
tgataatttatcagaaggttgcaataaaaagggagattgtttggatgaagtaataggagacattgggaaagaagcatttttgacgaaggaattcgtgccttaccttctgtttgggctactccttgctactgtcgagacgatttcacccactgtcactttggccaccatgtatctactggacaacccatcggctttgcaacgattaacagaggagcatgaggaaattctaaagaacagagaagatgccaattctggacttgtatgggaggaatacaaatccatgacgttcactcgttacgtgattaatgaaacacttaggttagaaaatgttcttcctgggatgttgaggaaagttatagctgacattcacgtcgatgaatatacaataccaaaagggtggatcctattgcttatgcccacagctcttcatctgaaccctaatatatatgaagatcctcttaccttcaacccatcaagatggaagaacattgggagcaatggaatgggcaagaactttatgccttttgaaggaggg

SEQ ID NO: 191778 - DNA, 1011 bp, Gossypium hirsutum
tcgagtttttttgttttttttttaacaacccattactaagtaaaagagatatgagttgcacaaagcgcacaatatccgagttcgagcttttacagtataaatcttcagatgagtttcatttcctatgacaataccaacaatatgacatccacaagatagtaaaagaccattgagttccttattacctttcacaaatacatatcgcaagccaataccaatgaaaaacacaagactttaaaacagaatttaaagatataaaccaaacccttctttcaaaatttttgtcgcttccttcttgactgatctatattggctgtgaagttctgatctgtggcttgatgttgtcagtcggaagttgcgtgggtgcatctggcaagactactgcagtcatggtttggtactgaggaggcatgttgggtgccataggctgagtgtaatacatttgagcatgagttggatcagtgaattcatatgcatatggggcagccgtgctggaggtaggtgcaacagattgtgatgcatgatgaatctgagaataacccgcatattgttgttgatgctggctgttttgcacttgaaccagttgaatgctctgtgcggcaagcattgttgctttcatcccagatgcacaaactttgttaacagtggtgcatatgaccgagttaggaattcctgcacctagcgcagcctgtctagctggagcctgtcccaaattcgcgctgagtacattgccaaagaaaacttcttgcacaagtgatggatcaacatttgcccttttaagagcagcttctatggctatcgaaccaagcttggtggcagataaagatgacagagagccaagaaatccacccattggagtacgtgcaacaccaacaacacaaacatctctaggctttatagaatctgaagatgttgctgctactggagccataggtgaaaatggatctgtggattcggagaaagtagaaatccgctgaaatacctgtggatattttcgttgaaataaaacga

SEQ ID NO: 191779 - DNA, 659 bp, Gossypium hirsutum
ttaaaccagaatataaagatataaccaacccccttcttttcaaaatttttgtcgcttcctttcttgactgatctatattggctgtgaagttctgatctgtggcttgatgttgtcagtcggaagttgcgtgggtgcatctggcaagactactgcagtcatggtttggtactgaggaggcatgttgggtgccataggctgagtgtaatacatttgagcatgagttggatcagtgaattcatatgcatatggggcagccgtgctggaggtaggtgcaacagattgtgatgcatgatgaatctgagaataacccgcatattgttgttgatgctggctgttttgcacttgaaccagttgtgggttaccagtatttgttgttctgtatacaccagcagcagcagtcatttcaggtttagcaagaggagcatttctcatagggttgtatgctacatgagtaggagccatggtaggattggaaggagtctgcggccggctcgatgggatccctgtgggggcttcattaatgctaggttgctggacacgcatgttgtaagcttgaggctgcctcgaggacaaatagtacaggggatattgctgatcaatctgtgtttgattatcctgtatatccttcccaacagcaacatcaccatcatcaatctgtg

SEQ ID NO: 191780 - DNA, 419 bp, Gossypium hirsutum
gtggtttaaacatattaagttctacatcgaagatgataagttatgcagtgtcgaagacgatgataatgatgttgggtcatgttcagaccaatcatcaatgtctgagtcagagacagagttggaaacgaggaaacgagttggcacattgccaaggccagctagtttaaacgcgttcgaccttatttctttctccccagggttcaacctatccgggttgttcgaggaaggagaagaaggctcccggttcgtttcaggggcaccggtttcgacaatcatatccgaattggaggagatagccaaggttgttagctttactgtgaggaataaggattgtagagtgagctcggagggttctagagaaggagcttaaggtccattatcgattgctgctgagatattcgaattaaccccttcattag

SEQ ID NO: 191781 - DNA, 882 bp, Gossypium hirsutum
agaaaaagtgggtccatcctccactccagctttcgtgtcatttcctttctctctctttcctttacttttccttcaggcatccatatcctaaaccccctccttttgtcccttctcttcatcaatttccccttagtttctgcttttttctttaaaacaataaagatcccttagttccttcttttctttcttcggcttttcctccaacaggagttatgattcggctgtttaaagtaaaggaaaagcagagagaacttgctgaaaatgcaaatgggggagctcctaccaaaaagcaaagtccaggagagttgcgtttgcacaaagatatttctgagcttaacctacccaaatcttgtgctataacatttccaaatggaaaggataacctgatgaattttgaggtttcaattcgccccgatgaaggatattatttcggtggcacatttttattctcctttcaagtttctcccgtctatccacatgaggcacccaaagttaagtgcaagaccaaggtctaccatccaaatattgatttggaaggaaatgtttgccttaacatcttacgtgaagattggaaaccggtgctcaatataaacactataatctatggtttatatcatcttttcacggaaccgaattatgaggatcccctcaatcatgaagctgctgcagtgttgaaggataatccaaaaatgtttgaatccaatgtgaagaagggctattctggcgggtttgttgggcgaaacttttttccccagtgttttctaactttaacaaagtgtcctgaatgtgccaaatgcccccttccttaaacactttaacttcctgttggttttgttaatttacctcgcaaattgcccctaatgttcggcttgatttctcact

SEQ ID NO: 191782 - DNA, 769 bp, Gossypium hirsutum
cattcataaaatccaaagcatccccctctctctcatggttcatttccattttttcttttggattctacaatcatcaaatttctctcaggcttttcatcgagcaggagctatgatacggctgttcaaagtaaaggaaaagcagagagaacttgctgaaaacgcaaatggcggatcacctatcaaaaagcaatctgcaggggagttgcgtttacacaaagacatttctgagctgaacctgcctaaatcatgttccatatcatttccaaatggaaaggatgacctgatgaatttcgaggtttcaattcgacctgatgaaggatattatttcggtggcacatttttgttctccttccaagtttctcccatctatccgcacgaggcaccaaaagttaaatgcaagaccaaggtctaccatccaaatattgacttggaaggaaatgtttgcttaaacatcttgcgtgaagactggaaaccagtgctaaatataaacactgtaatctacggtttataccatcttttcacggagccgaattatgaggatcccctcaatcatgaagctgctgcagtgttgagggataatccaaagatgtttgaatccaatgtgaggagggcaatgtctggcgggtatgttgggcaaacctttttccacggtgtgtctagctttagcaaggtcgctgaatgcgcaaatgcacgtcataaacacttgagcttcatgggttgtataatttacctgcaaattgccctctattgtctgctttgattttctcac

SEQ ID NO: 191783 - DNA, 531 bp, Gossypium hirsutum
cgtgccggtccgaaccggagtttcgggctcgacctacgcgcacatttttgttctccttccaagtttctcccatctatccgcacgaggcaccaaaagttaaatgcaagaccaaggtctaccatccaaatattgacttggaaggaaatgtttgcttaaacatcttgcgtgaagactggaaaccagtgctaaatataaacactgtaatctacggattataccatcttttcacggagccaaattatgaggatcccctcaatcatgatgctgctgcagtgttgagggataatccgaagatgtttgaatcaaatgtgaaaagggctatgtatggtgggtatgtggggcaaacctatttcccacggtgcatgtagcttttacgaggtagctgaaagcgcaaactcgctatgttatggacagttgggtttctgtgggttgtataatttgtctggaaattaccctttgtcatcccctttgattttctcagtgaatctgagtcaaatattttctacaaaaaaaaaaaaaaaaaaaactcga

SEQ ID NO: 191784 - DNA, 640 bp, Gossypium hirsutum
cccacgcgtccgattcggatccgggtcacccgatttcaaaaatacccgggctggtttttgatgcggggacggcgtgctggctttggatatggagacagagaatccggtgaattacaagtttatggggaggagctttaatgatttgagtatcaacgacgattctacagctttcagtgattgtaacagcgatagatcgggggagttcccatcggcatcgtctcagaaccggcgattactactcgcctgtgctaattccgagaattcggatgatttgatacggcagctcgtatcggatctcgattcctgttcgattgacgagcaaaagcaacgcggctttggagcttaggcttctggcgaagaacaagccggagaatcgaatcaagatcgctaaagctggcgcgattaggcctctgatttcgttaatttcatcctctgatccctatcttcaagaaaacggcgtgacagcgattttgaatctctctttatgcgatgagaacaaagaacttatagcctcctccggagcaattaagccactggttagagctttgagaacgggaacttcaacggcgaatgaaaacgcggcttgtgctctgcttcggttgtcacaagtggaagaaaagcaggttgcaatcggacggtc

SEQ ID NO: 191785 - DNA, 847 bp, Gossypium hirsutum
gaagttgagcagtgaagaaagatgatcgaaaatgggttttattgttttggccttgacggtggttttcgccgcgacggtggttacggcggctgacgagagtgggttagcgaatgagtgcagcaaagatttccagagcgtgatgacttgcttaagctttgctcaaggaaaagcagcgtcgccgtcgaaggagtgctgtaattcagtggcggggattaaagagaataaacccaaatgtttgtgttatattttgcaacaaacacaaacctctggtgctcaaaatctcaaaagcttaggtgttcaagaagataagctgtttcagttaccatcggcttgtcaattgaagaacgctagcgtcagtgattgcccaaagcttcttgggttatctccgagctcaccagacgccgccatcttcaccaactcctcctctaaagcaacgacacccagtacttcaacaaccaccgcaacgccgtcttccgcggccgataaaaccgatagcaaatccagtggaatcaagcttggtccccacttcgtcggttccacggcggcgctactggttgctacagcggccgtgtttttccttgtattcccagctggatttgcttcaatagtttaggggttttgcatgggatttcgagatttgggggtttatttattgttgaagtccttttgtttttaaacagtctcagaaaaaagatggactgagttgacaattatgatgatttttggtttatttttcctttttcttatttgatttaacgtccctttgccttaaatctagtatatgccccccgcttcgcctgggaaatcctgttatatatatatatggaaaattttatcaataataatt

SEQ ID NO: 191786 - DNA, 653 bp, Gossypium hirsutum
gctgttgagtcatcggcgtcggtggcgtggaaggagggagggaagaaagaggagaagaaaggggttccggtttacgtgatgatgccgttggatagcgtgacgaacgggaatacggtgaatagaaagaaggcgatgaatgcgagtctccacgcgctgaaaagcgcgggagtggaggggataatgattgacgtttggtggggtctggtggagagggaagcgacgggtgcttacaattggggtggctacgccgagcttctcgagatggctaagaagcatggccttaaagtccaggctgtcatgtcattccatcagtgtgggggcaacgtcggtgactcttgcattattcctttgcccaaatgggttacagaggagatcgagaaggacccagacctcgcatacactgatcaatggggaagaaggaactacgaatacctttcacttggttgcgatacccttcctgtcttgaaaggccgtacgcctgttcagtgttatgctgatttcatgcgtgcctttagggacaatttcaaacaccttcttggtgataccattgtggaaatccaagtcggaatgggtccggcaagtgagcttcggtacccttcgtacccggaggcgaatgggacatggaagttccctggaattggagcctttcaatg

SEQ ID NO: 191787 - DNA, 1136 bp, Gossypium hirsutum
  unsure (1)..(1136): unsure at all n locations
tctgtaaaccacggccctctataatactcttacacacatagaatctcacttttttgttttctggacttctttgacgaaaataggaactcttagaaatggcgatgaaaagcttcagcgttttcttcttcgttctactccttgcttctcctattctccaagttgctaggtgtcaatctgaagcggaggcggatgttgcagaagctgttgaaggaggtgaactcgggattgttggtgaggaagctcaggatttcggttctgggaattttgactcggctccaggagttgaaactctctgtcttttccctaaaaacagtgccaaattggtatcagccggagaagagactgaactccttgttggggtggaaaatgttggtgagtcacctgtgaatgtcattgcaatcacagccagtgttcatctcccttttgatcatcgtatgcttgttcaaaatctatcagcacaggcctttaacaatgcatccgtacccccttcaaagcaagctactttcccttacatatttgcggttagcaagtacttgcagcctggaacttttgatcttgtgggcaacattttctatgagattgaccagcacccataccaaagtacattctataatggtaccattgaagttgctgaagctggtggcttcctcagtgtcgagtctgttttccttgttaccctcgggattgcactgcttgttctcttcggtttatggcttcacggtcaatttcagcgtatctccaagaaaactaagagagctccaaaggtggaagtcggaaccaggactactgatacctcattggacgagtggcttcagggaactgcttacactcagtcagcttccaaatcgaagaaaaagaagtagatggggcagtgcttgcaggctaattgcaaactcatttcttggcattttggaaagttttaagtgagggcacaaatagtttgagaattaggcccagggaaaatggcatacctttgctattgtagcatgtgaaagaattaaaaaaaaaaaaaaccttcagatttaattttcacgaggattccgaaattgagcctttttgaagcaaaactaacttgtgtattagaagtggtaggaacctgnggaattttgctaatggtcaatttctggttttggtcc

SEQ ID NO: 191788 - DNA, 448 bp, Gossypium hirsutum
cggaaaaaaaaatctctgaaatggcgatgaaaattttcagcgttttcttctttgctctcctcttcctcgcatctcctttccttcaagttgctaggtgtcaatcagaagcagaggcagatgttgcagaagctgttgaaggaggtgatctcggtattgttggggaggatgttcaggattttggtgatcctaattacagttcagctcctgaagttaaaactgtttgcgttttccccaaaaatagtgccaaattggttctggctggagaacagactgagctcctcgttgggatggaaaatattggggagtcacctgtgaatgtcattgctatcaaagccagtgttcatcttccttttgatcatcgtatgcttgttcaaaatcttacagcagtggctttcaacaatgctactgtacccccttcagttcaagctactttcccttacgtatttgc

SEQ ID NO: 191789 - DNA, 642 bp, Gossypium hirsutum
cgttgatgcaactgactttattggtcatgcctgggcgctccacaatgaaggtcggcacttggctcacccagctttgaactttgttaagagaacgaagctctatgcagagtcttcggcacgatttccaggaggatctccttatatctatccactatatggacttggagaattgcctcacgcatttgcacgtctaagtgctgtttatggtggtacttacatgctcaacaagccagaatgtaaggtagaatttgacggtgatgggaaagtcattggagtaacttctgaaggcgaaactgctaagtgcaacaaagttgtttgcgatccatcttatttgtctgataaggttaagaaggttgggaaagttgctcgtgctgtatgtgtaatgagccaccctatccctgataccaacgattctcactcagctcaggttattctgcctcagaagcaactcggtcgtaaatcagacatgtacgtcttttgttgctcctatgctcataatgtagctcccaagggaaaatacatcgcttttgtttcagctgaagccgagactgacaaccctgagcaagagttgaagcctggggttgacctactgggatctgtagatgagatattttatgacacttatgacagatatgtgcccac

SEQ ID NO: 191790 - DNA, 666 bp, Gossypium hirsutum
  unsure (1)..(666): unsure at all n locations
tatatgttatctctgaatctaaggaagttagctggggatttgattacagacaccgtgctcgaacaggtttggggtgacacatcttttgagaaatatggaaacgatttcatctgcatgcatttgtcggatcaacatcccgacaagcacaagataatgcttttgtttaagttttcccttcctgatgccaaccacatggcagacatgactcgcttggtggctcttgtaccatactacatcgatttaatcgggcgttacaagctcagctctcaggctcgatccaaaaccgaagctgcaagagtgaaggcagcacaagaggcatacagagaacttcaaaatgctaggctagaagctttgcagaaaaagaaagccgagaggaaaaagatgttagaggaggctgaagcaaagctcagtgcggaagcagttcgcaagaaagaagcaaaagagcgtgcacggcagatgatgaaggcaatgccgaaaatgaagatgacccgtgcttagatgtttttcgatcattaatacacactcttgacgccattaaccatagtagttcagggttgttcttagcatccgcaggtaaattgttatctttccttagaatttatattagttttctgttacctataaacacagctntttgtgggttttgaatgtaccacaagacaatgc

SEQ ID NO: 191791 - DNA, 381 bp, Gossypium hirsutum
tttctttattcctttgttcatcggagtgaagaaaacaatggggtggtgcgataattcatatcacgaagctaagaaactcctcatttcacccaccgtgaaacaaccctttcacttgctagcaaccctcctcctcagcctatggcttccccttgctttcctcctcgtcgccaggctatcttatgttaactacaccttaaacgccaccgtgttagacccttcttctacaccttccccaccatcgtcccttttctctttctacttgtacaccaatccagctcttctttatttcctcgttgcagctattagcatcgtggctctggttcatggtttgactgggaaagtcagcttcgtacctgagtcaccgagttcttttcatcgacc

SEQ ID NO: 191792 - DNA, 687 bp, Gossypium hirsutum
ccctcgcgtccgcccacgcgtccgcaacttctcaaaaagtatctgttctctcgttcatccaaaatacccaaaagtcaagagtagattaaactaatggccggaatcggacctttgactcaagattgggagcccgtcgttattcgtaaaaaagcccctaccgccgccgccaagaaggatgagaaagtcgttaacgccgcccgccgtgccggtgccgagatcgagtccatcaaaaaatcaaatgctgggacgaatagggcggcttcaagtagtacttctttgaacacaaggaagctcgatgaagacactgagaatcttgctcatgaccgagtgccaactgagctaaagaaagccatcatgcaagctcgaatggataagaaacttacccaggctcaacttgctcagatgatcaatgagaagcctcagattatacaggagtatgaatccggaaaagccatccctaaccaacaaataattggtaaactggagagggctcttggtgcgaagctgcgagggaagaagtgagtgagtaagagtctcgtagaaagaacaaacagaacttgaatatcgcccagaatcttgagtcctaaaacttggtgatgtaaatgaatgttttatgccgttatgggtcgcttgtaagaacactgtttttgactttgtgtgatgacttatgtctgcgactgcttatga

SEQ ID NO: 191793 - DNA, 350 bp, Gossypium hirsutum
gcatgctcgagttgaaaagaaacttacccatgcacaacttgctcagttgatcaatgagaaacctcagatcatacaagagtacgaatctggaaaagccattccaaccaacagataatcggtaaactcgagagggctcttggtgcaaagctgcgaggtaagaagtaaggcgagttgggtcttttttccttttgtggtgtaaatgaatgttctctaccattatggttttgcttgtaagaacagtgttttggactttgtggtgaccatgaaatgaagtgtgttcttcaaaaattttatattatatataataattgtatctattatttttgttttatgatattttgttatttttt

SEQ ID NO: 191794 - DNA, 825 bp, Gossypium hirsutum
gagggggggggcggtcgatatctagctagtgcctccggctgcctgaatgaagcccgagggtgccaaaaccccttcaacaatggcgattacgaagcaacatttgatcccgcttttcgctatctcatttctcttgttttctccagctccattgctcaacaacttcagcccaaggctcccgctcagtctcccgcaccacctggtccaccagacgtcaccaaaatcctgcaaaaagccggccaatactccgtcttcgttcgtcttctcaaatccacccaagtctccgaccgtctcattggcgagctcaaagacacagatgatgggaagaccatttttgcccccactgataaggctttctccgccctcaaatctggtgccttgaattcactcaacgatgaacaaagggttcagctggtgctatttcacgtcatcccagattatatcccattttcccaattccaaacagttagcaaccctatgagaacacaagccggagatagcggcgacggtgagtttcctctcaacgtcccctcttcgggaaacacagtggttctaaagacagggctgacgaaaaccagtgttagtgataccatttataccgatggtcagctggctgtttatcgagtcgatcaggtgcttcaacctttgcaagtcttcgctgctaggtcttcagctctggcaccggcaccgggaatgtctaggaaggctgctgacgttgatgggaaatccaaagcttcgagccttgccatgcaaaacttagctttgtttgtagttagtgttatagcttttgcactttctttgtgacaataaaagggttttgataggatt

SEQ ID NO: 191795 - DNA, 458 bp, Gossypium hirsutum
attggaacagagttagaagtgacgaaatcggggggggcaactggttttgcgcattaaacctggagttctcgtcggagaacacaaaagggctgccgttttgagggaattcggcaccaacttgccagatttggggctaggagacagagaaaccgaccatgatttcatgtcattatgcaaggaaggatacatggtgccaagaaccaaatgcgaaccattgccaaggtacaagcttctaagccatgttatatttcatgagggccgcctagtccaaaggccaacccctttggctgctctgttgaccttcctatggcttcctataggcttcatcctctccctactcagggtctacaccaacatcccgttaccggagcgaattgctcgatacaattacaggttgctggggatcaaattgattgttaagggtacccctccaccagcacctaggaaaggccaaagtg

SEQ ID NO: 191796 - DNA, 1173 bp, Gossypium hirsutum
  unsure (1)..(1173): unsure at all n locations
ttttcatttaaaagcatgcagtttcacgcttggtaggggcaccaccgggctatgttggttatgaagagggcggacaactcactgaagttgttcgtagaaggccctattctgtagttctttttgatgaaattgagaaagctcatcatgacgtattcaatattttgctacagctattggatgatggaaggataactgactctcagggaaggactgttagttttacaaattgtgtagtaataatgacttcaaatatcggctctcactacattttggaaactctccagtcaacatatgacagcaaggatgctgtttacaatgtgatgaaaagacgggtggttgagttggcaagacagactttccgcccggagttcatgaaccggattgatgagtatattgttttccagcctcttgactccaaagaaatcagtaaaatagttgagttacagatggtgcggttaaaagatagactgcgacagaagaaaatctatctgcactacacaaaggaagctgttgaacttctggggacactgggatttgaccctaactttggagcaaggccagttaagagggtgatacaacaattagtggagaacgaagttgcaatgggagtgttgagaggagatttcaaggaggaagactcgatcattgttgaggggagtcttgccgtcagtgaagggccgtcccccccaagatatgtggtgcattaagaaattggagagcagttctccattagatgttatggttgcaaatgattagcgctgcctttgggagatgtttatcattcgtacatatacaagcagttttagggttaataatgttatacttgatttgagttcctttccacatttcaaagtcaaaaccaagatattgtgatgaatcaggggtactcgaaccctttttcatagcattccactttatttatatataaaaaaaaccttatagtttctcatatttattttcatgtaaatttcattttttaaattttggatcactcgagggggccggtccaatcgccctatgtgaggttacatcaattgcggtttacacgggactggaaaacctggtaccacntatgcctgagaatcccttcgcactgtaatcaaagcccacgagccttcacgtgcaccgatgcatgattntagtaattggatacggaattgaaccttttccagg

SEQ ID NO: 191797 - DNA, 563 bp, Gossypium hirsutum
gaatgaagcagatcatttcagtaacccgggattagatcctgttttctaacaaagaagacatctcaaacctggtttgtaacatcaaacagaataaaaaacatatcattagatggatccgccattaacaactgtctcagaagagcaaaagcttgtagaattcgattgatggacaggtattctaaaaacccagagtttccctttagcagagacaaagttttgttcgcagaagaattcccaagaaaaccatttttcaatcgtccgatgaacatcgtgaactacaacgtcagtcgtcgtcttcttcccaatcccaccagttcttgccaacatgccggcagtgtagatagttggcatcctccctggtgcttccggcgtgtccccgatcggcccgtccacaaccacaacatcccatttaagcttataaacgtcttctggtaagtttctcaatgccaatttgcaactcgcattgattcaacacgatttgtggtgggagaacaagcaggccatttttcccttgcatgtttgagcaaattgtatgcttttttagctggtatctgatactagac

SEQ ID NO: 191798 - DNA, 854 bp, Gossypium hirsutum
acactactaaacagcgaagtaaacgaccaagtcacctatcccttaaagaagatactcaaacccttaactaatcctcattttcactaaccagtaaccaacctttgtctctttatccgcttttctgtttagagcatgcagagacaatccttaggttcgccaagctccaaactccgcatccatggcggagaagagagttccgtctccgaagatcagaaacgccaagtaatcatcgatgatgatgacagcaaagacatcaggactcgtcgattgtccttctctccaacctcctcgttgacatcgcctcctaagcctgagaagttcattcacttaattcctcttctcactctcctttgcttcctcattctttatctaaattctcacagtccttcacaatctgatttggctgaatttaatggatttaagcatccctcaaagcattcagactcaactgcaatcggtcatgttgaccattttattgattctcggagaggcgatgttttggggattcgaagcctaaagaacttgcaagaacttgataaaaacgtctcaaaatctcgcccccacaggaaaatagccgatgtctaggcagccgtctctcggtttatccttctgtctatctctcccccgtcgctcgttcatggccgccttgtcaagcagaccataagcccacacgtgtcggtcacacttgcacgtgcgagcattttgtgcaaaaaaattgttttgtctatcgtgtaaaattaaattgcatgttaaattcttaggttgtgaagcaactaccttagctggcgctgcgtggtggcccttgttcagttattttattattattattattttcttgaaataaattacatgac

SEQ ID NO: 191799 - DNA, 636 bp, Gossypium hirsutum
cccacgcgtccgtatttttccttctctttctcattctttcttcaattaataaccaatcaaagtgctctctttgcttttccctgttttataagtcatcgaactgttgtttttcttgatctctccatcattcccgtttctgggtttttttgttttttttttttttgagtttttagtaggtagccatgaatgctcttgctgcaaccaaccgcaatttccgactggcgtctcgtttacttgggttagactctaagcttgaaaagagtcttctgatcccttttagagaaatcaaggtggagtgcacgattcccaaggacgatggaaccttggcgacttacgttggatttaggatccaacatgataatgctcgtggcccaatgaaaggtggaatcagatatcatcctgaggtcgagcccgatgaagtaaatgctctggctcaactaatgacatggaagacggctgtagcagccattccttacggcggtgcaaaaggtggcattggatgcaatcctacggatttaagtaagagtgaattggaacgtctaactcgcgtcttcactcagaagatccatgatcttatcggtatacatacagatgttcctgcaccgaatgggactatgacatacatgcatgatttgg

SEQ ID NO: 191800 - DNA, 817 bp, Gossypium hirsutum
ggacttctcaatctagatcttaacaataagatagtcttaaatgccgtgaaagctttttcaccattgaagattagattgggaggctcattgcaagataaggtcatatatggtacagatgacaatcaggaaccctgtacttcatttgttaaagacccttctgagatgtttggttttactaaaggatgtttacccatgaaaagatgggatgaacttaatgccttctttgcaaaagcaggggctaagattattgttggactaaatgctcttgctggaaaatctataaagcctggtggttcagctgtaggagcttggaactacaccaatgcagaatcttttatacgttacaccgttgaaaagaactataaaatccatggttgggagctaggaaacgaattgtccgggaatggggttggaactaggatcgcagttaatcagtatgcagctgatacagcagctctacaaagaatagtgcaaaagatatacaaggatgttgatttgaaacccttgatcatagcacccggtgggttctacgagtcaaaatggttcaaagaattcatcgataaaacaaccacatccttagatgtagtcactcaccacatatacaatcttgggccaggagtcgatacccaccttattgaaaagattcttaacccttctgttcttgatggcatctctggaacattcagcggccttcataacgtcatcaagagttctgcaactaaagcaattgcctgggtgggagaggcaggaggagcttacaatagcggccgtaatcttgttacaaatgcatttgtgttcagtttctggtatttagatc

SEQ ID NO: 191801 - DNA, 1160 bp, Gossypium hirsutum
ggaacatatagatatctgattttggccttagtgcattgcctcaacatattaggggggatggcttactgcatacaacatgtggaagtccaaactacgtcgcgccagagattttggcaaatagagggtatgatggtgccacttcagacatatggtcatgtggtgtcatcttatatgtcattctcaccggttatctccctttcgatgatagaaaccttgcagttctttatcaaaagattttcaaaggggatcctcagatcccgaaatggttgtcacctggggctcggaacatgataagaaggattcttgacccaaaccctgaaaccaggataacaatgacgggtatcaaggaagatgactggttcaagcaagactatactcctgctgtacctgatgatgaggaagaagatatatatattgatgatgaagctttctcaatgtgtgaagtgggttgtgatggaggtaggagtcaagaatcacctactctcattaatgcttttcagttgataggaatgtcatcgtgcctagacctttctggtttctttgagaaggaggatgtatctgaaaggaagatcagatttacctcaaatcgttcgggtaaagatttgcttgcaaagatccaagacacggtgacagagatgggatttcgagtccaaatgagaaacggaaagttgaaagcaacgcaagagcacacggtccaaaaacgccttgccagtctttcagttgcggcggatgtgtttgagataaggccgtcattgtacgtagttgaattaagaaaatcatatggcgattctacagtttatagacagttatgtacaaagctatttaatgacttaggcgatcctcagggccaaggcctggtgtccacagaagcttgagtgacacacaggttgggttggctccaccaacatttaaggatctcagttagatctgtgagccttagaggggatgaatttatttaggctatatattttatggtataggtgatgtttttttttttttttgaactttcacaaaacagagattcaaagtaatagtatttatgtcgaggaagcagcagtttatgctctagagactgctttccgcatgttcatattagattgcttatgttttattggaaataattttcaattttttgaaaaatgttatattttctggtgttt

SEQ ID NO: 191802 - DNA, 2214 bp, Gossypium hirsutum
ccaacgcttcaccattcacgctgtccccccccccccccttttttttcattttgcctgatttttcgagttttagatttcttatataatcaactacctaatcctctcgctctctcaaccacaagctaactagcaaacacacacacatactaacatctatggggagttcagggcagcaagtctcctggaaattggcggatcacccaacacttccaaaggggaagacccttgctctcatcgttctcgatggctggggcgaggacaaacccgatgagtacaattgcattcatgttgctcaaactcccaccatggattctctcaaacagggtgcccctgaaaagtggagattaatcagagctcatggtaaggctgtagggctccccacagaggatgacatgggaaacagtgaagttggtcacaatgctctcggtgcaggtcgcattttcgctcaaggggctaagcttgttgatattgctcttgcctctggaaaaatctatgaaggagaaggattcaagtacataagcgaatgctttgaaaagggaactttgcacctgattggattacttagtgatggtggcgtccattcacgacttgatcaattgcagttgttgctgaagggagctagtgagcgtggtgctaaaagaattcgtgttcatattctcaccgatggtcgtgatgtattggatggttcaagtgtagcctttgtggagactcttgagagtgaccttgcaaaattacgtgagaatggtgttgatgcccggattgcatctggtggaggccgcatgtatgtcacaatggaccgttatgagaatgattgggacgttgtgaaacgaggatgggatgctcaggttcgtggtgaagcccctcacaagtttgcaaatgctgttgaagctgtaaagaaattaagggaaaatgccaatgaccagtacttacctccctttgttattgttgatgagaatgagaaagctgtgggtccaatagaagatggtgatgctgttgttacttttaacttccgagcagatcgaatggttatgcttgctaaggcactcgagtatcaagatttcgacaaatttgatcgcgtacgggtccctaaaattcgttatgctggaatgcttcaatatgatggtgagttgaagcttccaggccgctaccttgtttctccccccgagattgacagaacatccggcgaatatttggtgcacaatggtgtacgtacttttgcgtgcagtgagacagttaaatttggccatgtcacattcttctggaatggaaatcgctccggctatttcaaccctgaaatggaagaatatgcggaaatcccaagtgatgttggcattacattcaatgttcaaccaaaaatgaaggcactggagattggtgaaaaggctagggatgcaattctgagccgcaaatttgaccaggtgcgtgtgaacattccgaatggtgacatggttggtcatactggagatatccaggctactgttgtggcatgcaaggccgctgatgaagctgtcaagatgatcattgatgccatagagcaagttggtggaatatatgttgtgaccgctgaccatggcaatgctgaggacatggtgaagaggaataagtccgggcaacctctttatgacaagagtggcaagctccaaatcctcacttcccacacttgtcagcctgtgcctattgcaatcggaggtccaggattggcagcaggcgttagattccgcagtgatgttccggatggcggacttgcgaacgtggctgcaaccgtcatgaacctccatggtttcgtagctccgaatgactacgagacaacactcatcgaagtggctgacaactaggctcgccgatagaacattgcctcgatttttttatatttgctctgttcctatacccaaacatcaatttagaataaggttcaaaatgttatatttttgttcttttttgggccaaaaaacgttatatttttgctagacatttgtggttgtaagtgtttttccaggaaaactttgggcttcattgcccctttctctttaaatttgacctcataattttcccttgtaatggggccattttctgatgtttgctgagggtcggccttgatcggttcgtagacaatgttattgtaatgtaatgcttcgcagacagtttgtgtattgagtttttttccccaaatataattttatgaaattaaaaatattttattatctttattatatt

SEQ ID NO: 191803 - DNA, 565 bp, Gossypium hirsutum
cccacgcgtccggagcaagttggtttaatatttgctgcgacacctgaccatggcaatgctgaggacatggtgaagaggaataagtccgggcaacctctttatgacaagagcggcaagctccaaagcctaactctccacacttgtcaggctgtgcctattgcaatcggaggtccaggatcggcagcaggcgttagattcaggaatgatgttccggatggcggacttgcgaatgtggctgcaactgtcatgaacctccatggttatgtagctccaaatgactatgagccaacactcattgaagtagtgagcaattagaggcatatgttgcggtcgctgaatgggctaaacgagtttagaataaggatatatttggttcaaaaaaaaggtagtattttggtagacatatgtggtattgagtatttttccccaatgtgttgggaaaatttttgggcttcattgccccatttttaagaacatgggatcgaatgttgaactgatttgcactatgaggtctttttatgattgtttgaaatttttaatgcccaaagattggattattttcatc

SEQ ID NO: 191804 - DNA, 636 bp, Gossypium hirsutum
accgggaaagacgggccgggccgacccgtccggtggaatgcaaggccgttaataaagctgtaaatatgatcatggatgccataaagcaagtggggggaatatatgttgtgaccgctgaccatggaaatgctgaggacatggtgaaaaggaataagtccggccaacctctttatgacaagagtggcaagctccaaatcctcacttccaacacttgtcagcctgtgcctattgcaatcggaggtccaggattggcagcaggcgttagattcaggaatgatgttccggatggcggacttgcgaatgtggctgcaactgtcatgaacctccatggttatgtagctccaaatgactatgagccaacactcattgaagtagtgagcaattagaggcatatgttgcggtcgctgaatgggctaaacgagtttataataaggatatatttggttccaaaaataggttggatttgggaaaacatatgtggttttaagttttttccccaaatgggtgggaaaaattttgggccttaatggccccattttaaaaaaacccgatccaattgtgaaaatatttggaattataaggctttttattaatggtccaaaattttaattgccaaaagttggaataattttggtc

SEQ ID NO: 191805 - DNA, 881 bp, Gossypium hirsutum
aaggaaatgagcttcctcgtctcgtctatgtatctcgagagaaaaggcctggtttcttgcatcacaagaaagcgggtgccatgaacgcccttgttcgtgtctcgggggtgctcacaaatgctccttttatgttgaacttggattgtgaccattatttaaataacagcaaggctgtaagagaggctatgtgtttcttgatggaccctcaaattggaagaaaggtttgctatgtccaattccctcaacgtttcgatggtattgatagacatgatcgatatgccaatcggaacacagttttctttgatattaacatgaaaggtctagatggtatacaaggccctgtatatgtcggcacggggtgtgttttcagaaggcaagctctttatggttatgaacctccaaagggacctaagcgcccgaaaatggtaacctgtggttgctgcccttgctttggacgccgcagaaaggacaaaaagcactctaaggatggtggaaatgcaaatggtctaagcctagaagcagccgaagatgacaaggagttattgatgtcccacatgaactttgaaaagaaatttggacaatcagccatttttgtaacttcaacactgatggaacaaggtggtgtccctccttcttcaagccctgcagctttgctcaaagaagccattcatgtaattagttgtggttatgaagacaaaaccgaatggggaagcgagcttggctggatttacggctcgattacagaagatatcttaacaggattcaagatgcattgccgtggatggagatcaatatactgcatgccaaagttgcctgcattcaagggttcagctcccatcaatctatcggatcgactaaaccaagtccttcgatgggcactc

SEQ ID NO: 191806 - DNA, 372 bp, Gossypium hirsutum
  unsure (1)..(372): unsure at all n locations
gagaaaaaaaagagagcaaagttttcggttatggcgttggttgcaggaatggcaactacgtcgtcgtttgctatggtgaagcttcacagcatcccttcggtttctgccaaagggaaaactggtttgaaacttatgagcgtgaaagtgagagctggttcttttaagaccggtggtgctggtgtattggaacgacctagtttcgatcaatctcagtttgacccttcttcccaagctcttgaaggtggtgatattgggcgattgtgggataagaaaggtactggcagtggagacagttataaagttttgctggttgatgatgctcgtcattctgaaaaattagttgcanagggtttgcctcaagttgttccatct

SEQ ID NO: 191807 - DNA, 615 bp, Gossypium hirsutum
tgctgagtgggctgcacattgtcacaagaaaggcatccttgatcagatcatggatccttatctcaaaggaaagatagcaccagaatgcttcaaaaagtttgccgagaccgcaatgaagtgcgtggccgaccagggtatcgacaggccatcgatgggtgatgtgctgtggaacttggaatttgctttacagctgcaagagagtgcagaagagagtggcaagggaatcgatgcaatagatatcgaggaaggaacctacgacataacctgtaaaggcaagaggggggtatcccctggttttgatggtactgtaacagattcaaggagtagtgggatgagtacaagtatgagcatgagcatcggtggtcgcagcctcgctagtgaagactccgacgggttaacacccagtgctgttttctcacagataatgaaccctaaggggcgttaaagcgacggcaaatggccagaactgagtagccaacagatcaaaaccagtaagccaataacgcttgctgttattattttgtgacatcattggaatcaaaatttgtttcactttggttgtattcatttttcttttatctaatatagcgtacatttattaccccttttcactgg

SEQ ID NO: 191808 - DNA, 726 bp, Gossypium hirsutum
atctcagtcgaatcgggaaaacccaccatttacacacctttttgctgtccatttctcttccaccaaaccaataaccagacccagagaaaagatggccagcaaatccgagggtaaggaacctgtgaacgaacaagtggttgcgaatatgtacggagctatgagatccgaactaaatcaaatttattctaagatcactgagttggagatggaagtgagcgagcattcgctagttataaatgccattcagccacttgaccagtcgaggcggtgctaccggatgattggaggtgtccttgttgagagaaccatcaaagaggttctccctgccgtgcaacgaaacaaagaagggcttgaggaagtaattgctcgtcttaacgagaccctggagaagaaaaagaaggaaattgctgatttcgagacaaaatacaaaattaggatcaaaaagtccgataatgactcgaaagatgaaagcaacaagaaggaaggctccgctcaaggagtccttgtcggccctgcaagttcgagtcagtaataggtatattccttcctatttccttccttatatgctcgaacttgctttttataaaccctaaatcctacccttgttgaactttgttccgttattgccaagaatttatcccggttctagagaatcctatgttttgttccattggggtttatattttcccaccaattccatccaaatgtgtgacggtgtttccaatc

SEQ ID NO: 191809 - DNA, 412 bp, Gossypium hirsutum
atccatgaaactcatccacatcacatagctttctccactgctgttctcgccgggaaccaaccaaccaagaaacaccattttttccccttcccaggtgctctccaattccttcactttttctatcaaaccatccaatcatccttctttttcgatctccccatttttgggttattattttttttcataatatttttggtcgtttgtttttgtcatccggagaaggaaaataaatgagaacaggaaagcaaagtcaagaggaggaagagtacgaggaagaagagtttggttccaaaaaaacaaggcccatcttctaatcaaattatgtccggaaacgccattaacaactccaacaaaggtgggaagaacagtgataaggctaacgctataagatcgaaacactcggttaccgagc

SEQ ID NO: 191810 - DNA, 1174 bp, Gossypium hirsutum
  unsure (1)..(1174): unsure at all n locations
attcaaactaactggattcgacccttcttgatgagcttgttgggaatatcgctacacttgcttgtgtctatcacaaacctcctgatggttttgtaactcgtgcaaagactgcaacacagaaaactgaagacgatgactaccctgatggaaatgaaactaggtattctgaaacactttccaatgctgctaatggtggtgcatcaccacccagttctagtagtgtcccacatgctgcagctaggcagccagctcctgccccagctgctcctgcacctgctgcagtgcctgacctcttaagtgatctgattggccttgataacaatcaaattgtccccgctgatcagcctgccacatcttctggcccccctttgcctattttattaccagcaggaagtggacagggtttgcaaatcagtgcacaattagttcgacaggatggtcaaatattttacagtttacccgcccacgcgtccgcacagatcacactcgatggatttatgattcagtttaacaagaattcattcggtctggcagctgctggacctcttcaggttcccccattggcacctggagcatcagcaagaacattgctgcccatggtattgttccagaatacgtctactggtcctccaaacactcttctgcaggttgctgttaaaaatagtcagcaaccagtctggtacttcaatgacaaaatcttgttgcacgtgttctttaccgaggatgggagaatggagcgaactagttttcttgagacatggaggtcactacccgattcaaatgaggtcttgaaagaattcccaggcatcatggtgactagtgctgaagcaacccttgatcgactagctgcatcaaacatgttctttatagcgaagcgcaaacatgccaatcaagatgtattctacttctcagccaagatccctcgaggtatacctttcttgattgaacttacaacaataattggaaacccgggtgtgaagtgtgcgatcaagaccccaaatccagagatggcgccactgtttttcgaagctattgaaacactcctgaaggcatgatgttcttttaccctttgttatttttgaactcggttataaaaatgttaaaatgcatgtaaaattcatcttcgagcaacccagtttttggattcacattnnnnnnnnnnnnnnnnnnnnnn

SEQ ID NO: 191811 - DNA, 736 bp, Gossypium hirsutum
gaaaatccaaaaacataaaaaatgaaaaaggggaaattcccaaattagttggactctctctgtctcatttgcttgctaccctctgcatcttagataagtaagagaaaagatcagatttttctattttaaatagggattttttttgcgtgtgtggtttttgagaggatccatggctgcaccaccggcaagagctcgggctgattatgattacctcattaagcttcttttgattggcgatagtggtgtggggaagagttgtctgcttttacgtttttctgatggttcctttactactagtttcataacaactatcggcattgattttaagataagaaccattgagcttgatggtaagcgggtcaaattgcaaatctgggatacagctggtcaagagcgatttcgaactattacaacagcttactaccgtggagccatggggattttgctggtttatgatgttactgatgagtcatctttcaacaatattcggaattggattcgcaatattgaacaacatgcttcagacaatgtcaacaagatactggttggaaacaaggctgacatggatgaaagcaaaagggctgtgccgacctccaagggtcaagccctcgccgatgagtatggtatcaagttcttcgaaactagtgcaaagacgaatttgaatgtggaggaggttttcttttcaatagccaccgacattaagcaaaggcttacaaattctgataacaaggctgac

SEQ ID NO: 191812 - DNA, 1776 bp, Gossypium hirsutum
  unsure (1)..(1776): unsure at all n locations
aaactctttctaagaacatgatggcagtactgtttgtatatcttggatttatggtttttggaataattgctcttcgttttctctatcgtttcatagacaacaatggcctccctcgaaactggctatttgttgggatgattcccacgttacttctcaacatccgtcgccctcatgataaagttgcccaaatcctcagacgaagcaatggtaccttcttttatagaggactttggtttactaacaccagcttcttagccacctccgatcctgagaatgtgcgttatatattgagttccaacagttctgtttatttgaaaggtcctgaatggctgaaacagtttgatatcttcggcgaagcacttttcaattccgacggtgaggcatggaaatgtcaccgcagagttttccatgctttcttgaatcaccctcagtaccggcaatcactttcaaaggttctccatcaacgtatagaggaagcgcttgttaaagttcttgaatatgtttctggacgagagatggtggtgaacttgcaagatttgttggtagggcatgcgtttgacattggatgcataacgggcgtgggcttcaaccctggcctactctccattgaattccctgagaatcggttccaaaaagccatgagtgatactctggaggcagctttttacagatatgtagtgcctgacagtctttggaagttgcagagttggcttcagattgggaaagagaagaaacggagtgatgcttggaaggctcttgatgatcttttaacacaatttatatcgacccaacgccacaaatccaccaaatcagtggcatcctcaggctcaaatgaagagcatgatttcaatttcttgaactgttacctgacaggacatgagataacaggcccaacaccgaaagaaagtcttataagagacaaccttatacattttctgtttgccagtgatggtacttacagtttaactcttacttggttcttctatctcatctccaaggcacccgtggttgaaaacaagatcagagaagaaataaagagacacttatcaatgaaacaagtggagggaagcttgcaaataccatccaactacgacgagttgagtaagctaacatatcttcatgcagcgttgtgcgaaaccctaaggctatatccaccgattccgttcgaattaagaacatgtacaaagcaggactttcttccgagcggtcatcgggtcgatcaaaacacccgaatcataattggaatacatgcaatgggaaggatggaaagcttatggggagaagattgctatgcgttcaagccagaaagatggattggtgaagatgggaagattaaacgagagtcgccaactaaatttagcgcattccttgcggggccaaggatttgtccagggaaagaggtgtcgtttctcttgatgaaggctaccgcaacagccatcattcataactacaacgttcatgtggtggaagggcagaatattggtcccaaaaacagtgtggtttatcagatgaagaaggggttaatggttaggattaagaagagatggagttaaggaatttgcagggttaaagtggtaattaagaagtgttaccatatttatacttatataatcttaagtgttatattgtattaaatactctaagttgaatccaatatatactttttacaatgttgtgtaagttgttgtaattgttctaatttttgtctaataaatctggtttgaatgaacannnnnnnnnnnnnnnnnnnnnnnnnnnnnnnnnnnnnnnnnnnnn

SEQ ID NO: 191813 - DNA, 961 bp, Gossypium hirsutum
  unsure (1)..(961): unsure at all n locations
cgaatcccggtcgccacgcgtcggccgcctttttttttttttttgaagaaaagttttttatactgagagttngcagntnttatattattacatcactaacatgaatgcgagagcaaataaattcagagagcaacatatgaagaaacanaccttcatttcacaacttatagtggcattttctgaaacacaacatataaaaaccaaaatcattttcaccagccatgactgccaataggcaaccttcaatcttttcaaccgggccaccagcggtatccgggctacatccacctagacgcctagacggatgcgagcaccgttactcttttggccagggctccttggtgcctggtagactgttgttcctccacctgaacttgatgaatcacaacctggggaattttttgttgatgggttccattgggggtgcatgtggtacacgttgctgcttcataatcataggtccttggcttcgaaccttggctttggcagattgggttggggccatgtagctaggtacattccttgaccctgattgagcctgctgcagggttgagtatgagcttgaatccattgctgtcacaacatccatttcaacagttttctcagacatgttatcggtaacggtagtggttgcggtggtggtcggcagtgtcatgtaagaaccttcttgatggcctagttgacgagcgtcgtacggttgcgatgacatccaatgctcgagccagttccaaccccattgtgccttctcgcgatcattaaggtggactccaacatctttgccattggggtgcggttgcatgagttgttgctgtggctgtagctgctgatagccataggcataagcaagggctcgttctcgtctcatcgcagcatcatgtttcttcgaaacactttccttaaccttctccgagctttgctgtccaccatcccaactgtcatatctcttcaacaggctccttgg

SEQ ID NO: 191814 - DNA, 397 bp, Gossypium hirsutum
ctcttgccgtttggcttttatagaactggcggacaattatcatgtggtgggtaaagcttcaaatactggagagtttgcagctcttatattattacatcactaacatgaatgcgagagcaaataaatacagagagcaacatatgaagaaacaaaccttcatttcacacttcatagtggcattttctgaaacacaacatataaaaaccaaaatcattttcaccagccatgactgccaataggcaacctccaatcttctccaccgtggccaccagcggtatccgggctacatccacctagacgcctagacggtatgcgagcaccgttactcttttggccagggctccttggtgcctggtagactgttgttcctccacctgaacttgatgaatcacaacct

SEQ ID NO: 191815 - DNA, 1213 bp, Gossypium hirsutum
aaaacacagaaacaaaaccgaagaactaaaagaaaaatggcgtctttggctcaacaattcacaggtctaagatgtccaccactctcctcatctcggttttctgtgaaaccaaagcaaacccagaaagtgggcgcttttgcttctcctatagtttcagccgtcgctgtctcaaatgcacagaccaaagataggcttgaactcaagaagatgttcgaggatgcttacgaacgctgtcgaactgctcctatggaaggcgtggcttttactgttgaggattttcaaaatgctcttgagaaatatgactttgattctgagcttggaaccaaggttaaaggaacagttttctgcacagatggcaatggggcattggttgatattactgccaaatcttctgcatatctaccggtccaagaggccagcattcacaaaattaaacatgtagaagaagttggtatagttcctgggttaagggaggaatttatgattatcggtgaaaacgaggctgatgatagcttaattttgagcttaaggtccatccaatatgaacttgcctgggaaagatgcaggcaacttcaagctgaggatgttgtcgtgaagggcaaggttgttggtgcaaacaagggtggagtagtggcattggtgcagggtcttcgagggtttgttcctttctcacagatatcatcgaaatccactgcagaagagcttttagataaggagctccctttgaagtttgtagaggttgacgaggaacagtccaggcttgtcttcagtaaccgcaaggccatggctgatagccaagcacagctcggaattggatcggttgtcctcggaactgttcagagcctgaaaccatatggtgctttcatcgacattggtggaattaacggccttcttcatgtcagtcaaatcagtcatgatcgtgtttcagatattgctacggttcttcaacctggtgacactctgaaggtcatgatattgagccatgaccgtgaaagaggccgagtaagtctttccacaaagaaactagagcctacccctggagacatgattcgcaatccaactcttgtgtttgagaaggctgaagagatggctcagacattcaggcagagaattgcccaagcagaagctatggctcgtgctgacatgctcagattccagcccgagagtgggttaaccctgagctctgatgggatattagggccccttgcatcag

SEQ ID NO: 191816 - DNA, 476 bp, Gossypium hirsutum
cccacgcgtccggcatatcctcaagccagactcgacgcttgctactgcaagcaatgcagaggatggtgagccaggacctgttgctgcaattcggttgccaatgcttcgaatttgcaattttaaagggggaactcctgagcaagtccaggcgtacttttccatattggtatgtgttcttccgaatgaccaacgaagatcgtggtgcaacccggaactagaaatagttaaggtggttgccgatcaggtgggccgctgcaatctctcatgccgcagttctcgaagaatctcaactcatgagggataaactagccgagcaaaatcgggcgttgcagctttcaagacagaatgctatgagagcaagccatgctagaaatgcatttcaaaaggtaatgagtgatggaatgaggaggcctatgcattcaattttaggcttgcttttaaacgttgcaggatggaaacttgaatgacgatcaacg

SEQ ID NO: 191817 - DNA, 693 bp, Gossypium hirsutum
actccacacataaagcagtggctcaaagaccaaaacatgactgctaaagatgcttatcaatattttgtactcaaggctcaagaaatcgcaatctcaaaaaactggacgcctgtcaactgggaagaaaccttcaattcttttccgtcaaagcttaatccacgaactattgtgcacaactggttgggttccggggtttgtccaagggctgttgcgaaaggatacagatgcattttcagcaatcaaggtgcttggtatcttgaccatctggatgttccttggaatgaagtctatagtgcagagccactagaaggaataaataatgtgtccgagcaaaatcttgttctaggaggtgaagtttgcatgtggggcgagacagctgatacatcagatgttcagcaaacaatatggcctcgagctgctgctgcagcagagcgattatggagcaaaagggaggctgtatctgcacgaaacattaccttagccatattaccccggcttcattacttcagatgcctattgaataggcgcggggttcaagctgctcccgtcacaaacaaatacgctcgacaacctccatttgttgccggatcatgctacgagcaatagttcctcagttcattactagtcggattgctccagacctgcctgtatctgctcttgtatatgttgagagtacatctggaaccttaaatt

SEQ ID NO: 191818 - DNA, 887 bp, Gossypium hirsutum
gtcccgggggcacgccgtccaatctttcattctttgctgttgaagtagtaatatctatagcatacagagatggagaggcaaagaagcaagcaggtttgtttgttgatgtgggttttggttgctgcctttttctcccacaatagggtcattgcagtgacctccactggccttggtgagcagaaaaactactatccagctcctgaccctcatgctggaactcccccttcaggttcacatggcacaccaccatcttcaggaggtggatcacctccctctcatggaaccccgtcacatggaggtggttaccacccttcaccaacaccatcaacgccttcgggtggaaattgtggaactcccccacatgacccttcaactccatcaacaccatcacacactcctcctcatggtactccaccatcatctggaggtggtagtcccccatcgtatggaggaggcagtcccccatcgtatggaggaggcagtcccccatcgtatggaggaggcagtcccccatcatacggaggtggcagtcccccatcatatggaggtggcagtccaccaactactcccattgatccaggaactccaagcattccctcacctccattctttcctgctccaactccaccaattggtggtacatgcgatttctggaggagtcaccccacactgatatggggtctgcttggttggtggggcactgtaggcaacgcatttggcgtgaccaacgctcctggacttggaacaagcatgagcttgccccaagcactttcaaacacacttactgatggactgcttacgggaagaacgctcattctcactcatgtgatatagtccatctcatagcaatcggaatttgtgacactgttcaaacctcacaccagtcc

SEQ ID NO: 191819 - DNA, 775 bp, Gossypium hirsutum
ggagaggcaaagaaacaagcaggtttgtttgttgatgtgggttttggttgctgcctttttctcccacaatagggtcattgcagtgacctccactggccttggtgagcagaaaaactactatccagctcctgaccctcatgctggaactcccccttcaggttcacatggcacaccaccatcttcaggaggtggatcacctccctctcatggaaccccgtcacatggaggtggttaccacccttcaccaacaccatcaacgccttcgggtggaaattgtggaactcccccacatgacccttcaactccatcaacaccatcacacactcctcctcatggtactccaccatcatctggaggtggtagtcccccatcgtatggaggaggcagtcccccatcgtatggaggaggcagtcccccatcgtatggaggaggcagtcccccatcatacggaggtggcagtcccccatcatatggaggtggcagtccaccaactactcccattgatccaggaactccaagcattccctcacctccattctttcctgctccaactccaccaattggtggtacatgcgatttctggaggagtcaccccacactgatatggggtctgcttggttggtggggcactgttaggcaacgcatttggcgtgaccaacgctcctggacttggaacaagcatgagcttgccccaagcactcttcaaacacacgtactgatggacttggggcgctttaccgggaaggaacacctcatttctcaactccatggtgac

SEQ ID NO: 191820 - DNA, 1135 bp, Gossypium hirsutum
  unsure (1)..(1135): unsure at all n locations
cggacgcgtgggcggacgcgtgggcggacgggtggncanggatatacaggaggctcttctctgtcactaagagattgacgtgggttttggttgttgcctaattctcccacaataggggcattgcagtgacctccactggccttggtgagcagaaaaactactatctagctcctgaccctcatgctggaactcccccttcaggttcacatggcacaccaccatcttcaggaggtggatcacctccctctcatggaaccccgtcacatggagggggttaccacccttcaccaacaccatctacgccttcgggtggaaattgtggaactcccccacatgacccttcaactccatcaacaccatcacacactcctcctcatggtactccaccatcatctggaggtggtagtcccccatcgtatggaggaggcagtcccccatcgtatggaggaggcagtcccccatcgtatggaggaggcagtcccccatcatacggaggtggcagtcccccatcatatggaggtggcagtccaccaactactcccattgatccaggaactccaagcattccctcacctccattctttcctgctccaactccaccaattggtggtacatgcgatttctggaggagtcaccccacactgatatggggtctgcttggttggtggggcactgtaggcaacgcatttggcgtgaccaacgctcctggacttggaacaagcatgagcttgccccaagcactttcaaacacacgtactgatggacttggggcgctttaccgggaaggaacagcctcatttctcaactccatggtgaataataggttcccattctcgactaagcaagtcagggagacttttgttgcagcacttggttcaaacagcgctgcagcagctcaggctcgtctcttcaagcttgccaatgaaggccacctcaagccaaggacctaagcaaacaccttttggtttgtcagtttcttgaagcattttatccactagtgtgtgctacttagattttatgttcctagtattcgacatctataatgctacagctttcatttggatagatactgtgcctagaactgaatgttaagtttatgttttcttattttaaataaaatttaagatatttgttt

SEQ ID NO: 191821 - DNA, 646 bp, Gossypium hirsutum
  unsure (1)..(646): unsure at all n locations
gcttatgctcatcgcatttttgtggaagagcttggggcacaagaaagctcactgttgaactgtgtacccaaggaggactttggaggagggcatcctgatcccaatctgacttatgcaaaggagttagttgctcgaatgggattagggaaatcggactctgcagttgaccccccagagtttggtgctgctgctgatggtgatgctgatcgtaacatgatactgggaaaaaggttctttgtcactccatcagattcagttgccatcattgctgccaatgctgctaatgcaattccttactctgcttctggtttgaagggagttgccaggagtatgcctacttcagctgcccttgatgttgttgccaagaacttgaacttaaaattttttgaggtacccaccggcgggaaattttttggcaacttaatggatgctggattatgttcgatttgtggagaagaaagttttgggaactggctctgaccatatacgtgagaaagatggaaattgggctgttntggcttggctttcaatacttgctttntanaataaggaaatctcatggggataacctgtgactgttgagatatngtcgtaacattggctattatgtcgacctattcctgatttacttgagatgtgatgtgtg

SEQ ID NO: 191822 - DNA, 905 bp, Gossypium hirsutum
  unsure (1)..(905): unsure at all n locations
ccctcgcgtccgcccacgcgtccgctccaaacactagtagaaggtttagttttacaaacatggctagttccggtgtccttaagttggtttccatgattctcatggtgtgcatgacgatgatgagtgcacccaaggcagccaaagccgccatcacgtgcagcgacgtggtgaaccacttgatcccgtgcttgtcctacgtacaaaacggcggtacacccgctgctgcatgctgcagtggggtaaaagcactctacggcgaggttcagacctccccggaccgccaaaacgtgtgcaagtgcatcaaatcggcggtgaacggaattccgtacaccagcaataacctcaatctcgcagccggcctacctgctaaatgtggtctccaactcccttacagcatcagcccctccactgactgcaacaaggtgcagtgaggttgatgatgatgatatggaaggagtggaagaaggttccagctcagctagataaagtagctagctaaggttaaataagctgtgttggtgtgttgttttttagaaaattccatatataatcggggaaagaaaaagaaatagaagatgtactttgtaactgtatttcgtatgtgatatatataatgtgtcgtaatctttaatttattagtgatgctcctacgttttatacgagtctgtaatgacaatagctttcccttttccatatataggaaggctcatttggaaatgttatttaaaaaaaaaaaaaaaaaaaaaaaaaaaaaaaaaaaaaaaaaaaaaaaaaaacaaaaaaaaaaaaaaaaaaannnnnnnngggggctagaggaatcaaactaaccatctcgggccccccgagttaaaaacttaatccttgtgtaaacaaaaccaaaaaatgtgaaaaacctgttcgatttt

SEQ ID NO: 191823 - DNA, 587 bp, Gossypium hirsutum
tgacaaacctggctcgttccggtgtccttaaggtggtttacatgattctcatggtgtgcatgacgatgatgagtgcgcccaaggcagccaaagccgccatcacgtgcatcgacgtggtgaaccacttgatcccgtgcttgtcctacgtacaaaacggctgtacacccgctgttgcatgctgtattggagtaaaagcactctacggtgaggaacatccctacatgggccgccaaaacgggtgcaaccgcatcaaaccggcggtgaacgggaattccgtacaccaccaataaccccaatctcgcagccggcctacctgctaaatgtggtctccaactcccttacagcatcagcccctccactgactgcaacaaggtgcagtgaggttgatgatgatgatatggaaggagtggaagaaggttccagcttagcttatataagtatcttgctaaagttataaaattttatttaggttgttttttatttttagatatatatttgtttaatttttattaaaatgttgttattctttttttatatatttctttattttgttttttattattattattatattttatttttatatt

SEQ ID NO: 191824 - DNA, 358 bp, Gossypium hirsutum
gcacgagcgagttttttttgcacttttttttttccaggaggattgcaccaaatttgagagttcaagaggcactttctcttttgtaagtcaacaacatcgatgaccactatcttgagtataaatgtaaatgtagtttcaagtttcagctcaggctagcaacgaaatatccaacacaataatgtttatatagtgactaacccgaatttctcaagcacattgtcgaaaaaaatctagaaggactgggaagcaagttttttcatcctcaaatatccataggggccacgccttcgccagcagcagcaccctgctcaggttcgggctcggctgaagcctactgtactgaatcaacatcaggttc

SEQ ID NO: 191825 - DNA, 370 bp, Gossypium hirsutum
ggccccaccaaatggagccactaatactaatcaaaatgatcaaaaaccaaccccggaccagcttgttcgagttgactcagaatgtctatcttccattgtcacaaacctagataaaaacgatccaaaaagtgccaaaaccattgaaacccatcacagcttgcatcaccatcaccatcatcatcaacaacaaagctttgcaacttatggtgccatggaattggacttctcttcctacaatcatcatcaagcagcagcatctaacggtggaggtgtgtcattgacgttagggttacaacaacatggtgggaataatggggtgagcttagcattctccccaacttcacaaagttcattgttttaccctagatcg

SEQ ID NO: 191826 - DNA, 643 bp, Gossypium hirsutum
  unsure (1)..(643): unsure at all n locations
cttgattcttattctgattcttattctcaggtttgatattcaaatggcggatattagcaatggttccaaagggtttgcagtgaaacaaggagaaccaactagggtccttcctgcagaagagacaaagaagggtctttattacctgggaaaccttgaccaaaacattgcagtcataattcgaaccatttacttctttcagtcagagtctaaagggaatgaagatgctgccgaacaagttaaaaatggtttgtcaaagattcttgttcatcattatccacttgctgggcgactaaccatcagctccgaagggaagctcatagtggactgcaccggggagggggctgtttttgtggaggctgaagctaattgtgggattgaagagatgggggacataacaaagcctgaccctaacattcttggaaagttggtttatgaaatctctggtgctcagaacttgctagagatacctcttttggtgattcacgtgactaaatttaagtgtggaggattttctattgggatgagcatgaaccactgtatgctcgatgggattgctgctatggaatttgtgaatggatggggtgaagttaccagangcttgccattaaagacccctncatttttagacagaaccatactgaaa

SEQ ID NO: 191827 - DNA, 570 bp, Gossypium hirsutum
cccagtccaatgacatgttttggggcggaacccttttattaccaacgccaacaaagctttgctctttctccatctatctaagaacacgctactctgcatcatacaccgacgaaaagaaaaaatatgggttttgagaagggagcttcattgttggaagatttgatagaaaaagctggaggctgtgctgtgatggatgggggttttgctactcagcttgagagtcatggtgcttccattaatgacccactttggagcgctctttgcttgatcaaagaccctcaccttatcaagcaggttcatcttgagtatttggaggctggtgcagatatcttggttacttcatcttaccaggctaccattcctggattcctttcccggggactatcccttgaagaaggggagtcattactaaagaagagtgtccaattggcagtggaagcccgtgataagttttgggatcgtgtcggatgtgttcctgggaatagctacaaccgagctttggtagcagcctcaattggaagttatggagcatatctggctgatggatcggaatacagtgggtgctatggt

SEQ ID NO: 191828 - DNA, 753 bp, Gossypium hirsutum
cggtactcggaattctccgggtccgagcccaccggcgtccgggattgagtcaaggtctattccaggaagtacctacatacatacatactacgggtgggtgagtgcgaacgagctccaaccagggttcaacaagggcactggactgggtgccgagatcattggtacctttgttcttgtctacactgtcttcgccgccactgatcctaagaggaatgcaagagattcccatgttcctgtgttggcaccactccccattggattcgctgtgttcatggttcaccttgccacaattccagtcactggcactggtatcaaccctgctaggagttttggagctgctgtcatttacaacaaagagaaggcctgggatgaccaatggatcttctgggtcggacccttcattggagctgccgcagctgcattctaccaccaatacattctcagagccgcagccatcaaggctcttggatctttcaggagcaatgcttaagtccagctttcattttcttacgaacttcaaccaaaaaagaaatggagaaccttgagttcagtgtggaccattgaaatgtaaataaatatttatgaacaagggtgtcttattttcttgctttcaatgtattttatttcgtgtttgtcatctttgttcatccttatcctctcttcttttttccttttttttttccggtgatgcttttcatgttaattttttaatgcataattctacaagtaaaatatattgtttgttttagtgtc

SEQ ID NO: 191829 - DNA, 851 bp, Gossypium hirsutum
ccctctcgtccgcccacgcgtccgcacaaacccaaatctccaattgatctgtttcatttttcagcaaagctagaaaaacaatgactaaggatatcgagactgcagagcaacatggaggggagttctcggccaaggactaccatgatccaccacctgctccattgattgatgctgaagagttaaccaaatggtcgttttacagggcagtgattgccgagttcattgctacacttctcttcctgtatgtcactgtgttgaccgtgattggttacaaggtccaaaccgaccctgctaagaacactgttgaccccgattgcggtggcgttggtattcttggtattgcttgggctttcggtggcatgatctttattcttgtttactgcaccgctggtatctctggagggcatatcaacccggctgtgacattcggtttgttcgtgggacgcaaggtgtcactcatccgagccctgatgtacatggtggctcagtgcttgggtgccatatgtgggtgtggattggtcaaggctttccagaagacctactacaacaactacgggggtggtgcgaacgagctccaaccagggttcaacaagggcactggactgggtgccgagatcattggtacctttgttcttgtctacactgtcttcgccgccactgatcctaagaggaatgcaagagattcccatgttcctgtgttggcaccactccccattggattcgctgtgttcatggttcaccttgccacaattccagtcactggcactggtatcaaccctgctaggagttttggagctgctgtcatttacaacaaagagaaggcctgggatgaccaatggatcttctgggtc

SEQ ID NO: 191830 - DNA, 1085 bp, Gossypium hirsutum
cccacgcgtccggttctagatcgcgacggccgccctttttttttttttttttcaaccagcaaaagatattgtacaaataaatttgcaatcgaatccagtgtcataaataatggcaaaaagaatcagtgactcgaaagacataaaagcatgccctttttaacacactgaaacaaataaacaagggtcaatattcaaagaaaattaaagaaaaaaaaaacttgaaaacgaactaaatgtgtcgtctaaccctcacaaacagttgcatttagcgttgaaagagataaagactacacaaaggcactcaacacataggttctatagataacaaatcacatatacccgaaactacgggtttatcatcatcgagactgataaaagtcttatggcataactcggaaatcccgagtttgccgtttcgaaacctataaacatttcacttaagtaaagacatactgtaggtaggaaggaaggaagcttcccggttgcagatgcctaaaagaaccgtattcagttagcacggcttttgaacacatcgagacccatctcagttggatctgttgcttgcaattccacctgaattccatccagttctcgcttgaatctgtctttggagctggcgtaaatcatcttgctcctgatccttgacgtgtcgggagaccatgcgatgaaaaagattctgctcttcgggacgttctcggccgttagaaaatcaaaatcgtacacagcatatcgacattcatcagcggggagacatttagtaaaatcctcatagctttcggttggttcaccaagcttctccacaataacttgcttttgcttctcctcgattttgaaaacaatgaagcggtgggttctttttgccttgagctccaagaacttcaacttgcaatcatcatgcacagccattcccgatgcagcgttggccatctttttggagcttgtttgaaaacgaggataaggatcgagatcgacggcggtggaaaaggagataaaaaaatatagagagaaaaaaaggaaagctcttccggggacggggggcggaaaacggtggggaggggcaaaggtccttttatttcggtgaaaac

SEQ ID NO: 191831 - DNA, 432 bp, Gossypium hirsutum
cacgagagagactcgtgactaagcgtcgtgcgttacctagcatcagtgtgtctcatcctatcacagttgtatattgaggggttctttctactaggtgagcatataaaattgttggcgtcgcgtaaatcaatgtccagaatgcattacacggaacttagtaactcaactttggtgttcccagctttcccaatacttgttttgttctcccaattttgaaacaatgaagcggtgggttctttttgccttgagctccaagaacttcaacttgcgatcatcatgcacagccattcccgatgcagcgttggccatctttttcgagcttgtttgaagacggggatacggatcgagataaacggcggtgtaaaaggagatgaggccctctagagagagacaaaggccagctctataagaacgcgtgggaggaagagtggg

SEQ ID NO: 191832 - DNA, 532 bp, Gossypium hirsutum
gtccagttctcgcttgaatctgtctttggagctggcgtaaatcatcttgctcctgatccttgacgtgtcgggagaccttcataggacgacaacaacatatagtaagtaataaaaggaaacaatttaacaccacgattaagaaactttgcagtaccatgcgatgaaaaagattctgctcttcgggacgttctcggccgttagaaaatcaaaatcgtacacagcatatcgacattcatcagcggggagacatttagtaaaatcctcgtagctttcggttggttcaccaagcttctccacaataacttgcttttgcttctcctcgattttgaaaacaatgaagcggtgggttctttttgccttgagctccaagaacttcaacttgcaatcatcatgcacagccattcccgatgcagcgttggccatctttttcgagcttgtttgaaaacgaggataaggatcgagatcgacggcgcgtggcaaaggagagaaaaaaaaggaagctcttccgcggacgcgtgggcgaacgcgtggg

SEQ ID NO: 191833 - DNA, 562 bp, Gossypium hirsutum
gaggcgcgtggaacagtggggccccggctgaggaattcttactggagagaactcatctctggggggttcatttttattcacttcaagctctttacacagtttacagccatagaagcaacaacaatgtggagatcaatcataactttcattctcttcgcctttcttttcttccctatttcagcgacgaagataacactctacaacaaatgctcacatccagtatggccagggattcaacccagcgccggcaagccaattttagcccgcggtgggttcaaactcccaccaaacaaagcctactccatgaatctacctccgttatggtccggtcggttctggggtcgacacggttgttcctttgacgcctcgggtcacggccgttgcgcgacaggtgactgcggcggttccttattctgcaacgggctcggcggaaccccacccgctacgttagcggaaatcaccctcggccaacaacaagatttctacgacgtcagtttggtggatggctataacatcgctatgtccattacacctttaaaggcgccggtaaatgtagctacgc

SEQ ID NO: 191834 - DNA, 694 bp, Gossypium hirsutum
gagaaatctgggagtgatgttgtgaagttggggcgaaaggacttccctcgatcggaagggatgactgttacagatgcacggcataaggaggaagaagaggaagaaagtaagaatggggatgaagataataagcctgaggtaaccgaagatgaaggaaatggggaagtcggtgggatgcatgagcatgataatgagatacccgaggagggaactgagcgtgaagaacataggaatgacgataacgaagagactatggaaaatgaaaacaaaggaaatgaggagactcgtgaaggcgataatgaagagaaagagaacatcaaggatagtcgagaaaaggaaaataaagggattggggaagagagcaatgagacggagaagagtgaaggtgagatagagaatgcaggtagctcggatgatcgggttcgtgatggaattgatgggaataatgaagaagcgagagaagaacattacaagggggatgatgcttcaagtgaagtagtccatgatacccaaaatgagacgagtggttcagaaaattccaacgacgctgagcagttggaaaacaaagataagaatgaccgggaggacgaaacaaatagcagtgaagcggccaatgtcggtcatgaagagtcgaatgtgcaagaaaatggaacagcttgaaacaatcaataaagcagtaatgtgagtaacgaag

SEQ ID NO: 191835 - DNA, 831 bp, Gossypium hirsutum
atttcctccaaaaacggactatctgaagaagctacactgaagattttgaatcaggttgagtactattttggcgatttgaacttggccaccacggatcatcttatgaggttcatcaacaaggatcctgatggatatgtgccaatatctgttgttgcatcttttaagaagattaaagcccttgtaactactcattcccagctagctactgttttgcggaactcagcaaagcttgtagttagtgaagatggaaaaaaagtaagacgccagcatccccttactgaatcggatatggaagagttgcaatcgcgtgcatttgtggctgatgaaactgttgagttggctgaaaaagctgttgcggagcttaacgaagagggaaattggaggagtggccttagggtccgtctaatgcttagacatgtgtcaaaacctgctcatgcaagagtgaaaaaggggcatgatggagaaggtcaatgtgaggaagatgatgtttgtatttctgaactgccttcaaatgagaaacaacaagaagatccttctcagttgtctgatattcattcacatgggaatcctgcaagttccaatccaattcttataggagaggagcattctaatgagaaagagtgtgggcagaaaaaaagggagaaacaggggccggggtaaaggacgtgggcggactcaataccataataaccatcatagtagtcacggaaatcatgtaggcactcccccttcagcttcaagtaattgggtcagcaatgagcaagctactggagcaaagcagccccctggtcctcgtatgccagatggcacaagaggatttgctatgggtcg

SEQ ID NO: 191836 - DNA, 517 bp, Gossypium hirsutum
ctggccagcacctttaaagttcattagtgagctcaatgacgaggcaaaggtactattagaacaggccttaatggatgcaaacagggaaagggaaaagaacatcttgaaaggaacagcttactcacttctatcaccgtcaccttcccgctctgattctgggttagacgacagtatttctgaggttagtgatgctgaactatgctgcatatgcttcgagcagatctgcacgatcgaagtccaagactgtggtcaccagatgtgcgcacaatgcacattggccctttgctgccataacaagccgaaccctacaactgcaagcataacacccccggtctgccccttttgccgcagcaccatcgtccgattggcagtagccaagataaaagattgcgacgacgatgttggggaggatggtagttccccgaaggtgagaagacggaggaagtcgaggaatttcagcgaggggagcagcagtttcaagagcttatctgcagttggatcctttaacaagatgggg

SEQ ID NO: 191837 - DNA, 810 bp, Gossypium hirsutum
ggccgaccacgcgtccccctttcactgctttccttcaattatttcccacttccttttgccttcaaaatttccttgggattcctatggctaccgctgaggttgcatcagttcaaactgcacttcatgaggagaaaactgaagaatcagtgaaggatcaagaagctacaacagatgaagtagttgccgaagctccagcagcggaaccagttgccgaagagccaaaggaagcggagcctgcggcggtggtagtcgaggaacctgaagcctcagttgaagttgaaaccaaggaggtggtagaagaaccaaaggctgttactgaggagccagtagtagaggaggctcctaaggaaacaatgccagaaccagttgccgaggagatcaaggaaaccactgaacaaaccgttgaaaccaaagaaactacagagtctagtgaggcagcagcagaagcacccaaagaggaagttaagaaggaagaagaagcaaaaccagctgaagtggaggagaaagttgaaacagaagctgatccagcagagaagactgagtaaataataaagcttttgtgatgaaaatgcgggtgtcaatggaagtgtgtttcaaaaggctacagattgataagattgcatgttaagttcaactagtttctctatgtagtaattaggatgataattggctatggagccacccagtatcctgcagtggttggaactctttgatattaaaaaggtctctaatcctcttgtggaggattttgcttttttataggagattttgtgtaacacttttttttttaagttaggtgtaataagaaat

SEQ ID NO: 191838 - DNA, 658 bp, Gossypium hirsutum
tgaggagccagtagtagaggaggctcctaaggaaacaatgccagaaccagttgccgaggagatgaaggaaaccactgaacaaaccgttgaaaccaaagaaactacagagtctagtgaggcagcagcagaagcacccaaagaggaagttaagaaggaagaagaagcaaaaccagctgaagtggaggagaaagttgaaacagaagctgatccagcagagaagactgagtaaataataaagcttttgtgatgaaaatgcgggtgtcaatggaagtgtgtttcaaatggctacagtttgataagtttgcatgtcaagtcaactagttttcttctatgtaggtcaataaggatgtagtaatgtggctgatggaggcccaccgatagtagtctgcaatgtggctaggttaacatgcatttgcatatgtcaaagagtgacatacttcaagttccattgtgggggaatttttatgggtcatctgttatctgtaaagggatgggtttcttgggtcccaaaccacctttctttgcttatgtttattgttttgcttgtatggttattaggagaggcagtatcaagtatgcatgttgtcttggttataataaatcttagtccttttgtttaacatttgttcaatgcccaatttcttactattcctccaat

SEQ ID NO: 191839 - DNA, 471 bp, Gossypium hirsutum
atcagacgtcattttagtctttcgggacgatgcaaattttgatgataagcacacgccaaattgagcagaacacttactgaagtgattcatgaacaacagtgcgaaaaatctacttactatgacaatgactgaatgttttctgaggggataagatttttaattgatatgtaaaatatacgaagatatgttagaaatttatatttttacattgagtacatttgtcatgagtccttcacttgggggctgatatcaaatacaaaaaagggtcgcctttaggagaagcataatagtaacttatcatgttgaattatgttacttctgtcaatcaacttgaactcatgacagctatttctcgaatcttagtgaatggctgaacttaatatctcactttttatatttcatgaaaaaaaacaccatttggaagtggagggtttctccaaacaaggagtctggtcaagtatccaataaaat

SEQ ID NO: 191840 - DNA, 476 bp, Gossypium hirsutum
  unsure (1)..(476): unsure at all n locations
tcanntttttttttcttttggatttttttaaaaaaccgcttgtatattttccaggtcggctattttcctacgaaaaagggagcaatttatttcactgcgagaattcaatgatacaacattctaattacaggacataaattagataaacgggaaactagcaaacacccttcacaaaggagccctcagctaacctcacctcacctctctctctctctctctaattagatccatctcgccgacatcgacaagacaaatcccggctcaagacaatccataatgaactgtcccggcattcctgtgcgctgctacagcgacggctgcagcaccaactgcaccgaactgggactgtgcctggagaagtttagcatctatgggtaaccttcgctcggtcttggcctgagttctgtaataggggttgctgttcatatcgaatgcagttcctggggacggttttgccaccatgcttaaactggtgt

SEQ ID NO: 191841 - DNA, 690 bp, Gossypium hirsutum
ccggacatcaacaaggtgttcattaaacatggtaaagcaagcaagtttgatgaggctgatggttataagaccggagaggaatgggttctagatacggaaggtgtcaatctcttggctgtcatgtgccatgaagatgttgatgcaaggagaacaacaagcaatcacttgattgaagtgattgaagttctgggaattgaagcagttcggcggtccttgttggatgaattgcgggttgtgatatcatttgacgggtcttatgtgaattatcgacatctagctatcctctgcgatacaatgacatatcgtggtcacttgatggccatcactcgtcatggcatcaaccggaatgatacgggacctatgatgaggtgctcatttgaagaaactgtagatatcctccttgatgctgctgtttatgctgagtcagattatttgaggggtgtgacagagaatataatgctgggtcagcttgcaccaattggtacaggagagtgtgccttgtatctcaatgatgagatgttgaagaatgccattgaacttcagctacctagttacatggaaggtctggaatttggcatgacacctgctcgatctccagtatcaggaactccatatcatgagggcatgatgtctccaaattacttgctgagcccaaatctccgtctctctcccctttcggatgctcagttt

SEQ ID NO: 191842 - DNA, 636 bp, Gossypium hirsutum
  unsure (1)..(636): unsure at all n locations
gttgnnnnnttttttccaatggcngaattatgcgctgaatcatgcattcaagccaaatggtatagacagttaattcacattcacacaatcgagtcaaaattacagggaaacaccaagaatgttgctgtgaatatggccaatgtaagaggaatatatcaaaggaaaaatgaaaaatgcaactgtttcttatagatgatgaaccgaagaataaacacgcaacgacaactctatctatgcaagaaatgaaaatcgaaaaaagaaataaaagattgctgattgtttttcccagtccttttactgaaagatggtggagcacctgtaagaactgaggaagcctgctgggaagaaatccataatatgcatcgcgggtttaatgagtctctttctctgagttggagcgacagagatcctcgatttggttcatcacctcggccattgaaggacgcttgtcagggtattgagcagtgcaattaatggcaagctgtaagagctggaccatatcatcctcaacattctggtatctcagaagttcgaggtcgaacacctcagaggtccagtcctctcgaactatggattggacccatcttggaaggtctatgccttcctcgttcaataaggcatgtgttggtgcctttc

SEQ ID NO: 191843 - DNA, 1178 bp, Gossypium hirsutum
tttaccaatacatctctcatctgggttgtcgtttctatagctgaagaaactcttcaatggctgaaaagagcaaggttttgatcatcggaggaactggatatctgggaaagttcattgtggaagccagtgcaaaagagggtcatcccactttcgtttttgtaagggagtccaccgtctccgaccctgttaagggaaaacttgtcgacaacttcaagaacttaggggtccatttgttgttaggggatatgtacgaccatgagagtttggtcaaggcaataaagcaagttgatgtggtgatttcggttgtgggtcaaatgcagttagcagatcaagttaagatcattgctgctattaaagaagctgggaatgtcaagagatttttcccatcggaatttggaatggacgtggacaagaacaatgcggttgagccagcaaaatcgacattcgcaatcaaggctcaaatccgtcgtgctgttgaggctgaagggatcccttacacttatgtgcctgctaactgctttgcaggctattttcttcctacattgtcgcagccaggagccacctctcccccaagagacaaggtggttattctaggtgatggaaatcctaaagctgttttcaaccatgaagctgacatcggaacgtacaccatcaaagctgttgatgaccccagaacagcgaacaagactctattcatcaagcctcccaagaacacctactcatttaacgagctcatcgccctgtgggagaagttgattggcaaagcccttgagaaaacatatgttcctgaggaccaacttctcaaacagatccaagagtctccaatcccaatcaatattgtgttggccatcagtcactcaatctttgtcaatggtgactgcaccaacttcgagatcgatccatcattcggatacgaagcttctgagctctaccctgaagtgaaatacaccactgtggaagaaggcctcagtcattttgtttgagaaagctagaaatcaaatcagatcattgttattaaactgataccagtaataatgtaaaaactgtcactgagagatttgtgcagaggacttgaggattctgtgtgtacgtatgtgtgtgtgtcataaatttctcgttactatcattcaacataatgccaaacatgcttttcttcttgtgtcgaaaaaaaaattctg

SEQ ID NO: 191844 - DNA, 472 bp, Gossypium hirsutum
cggaaagttcattgttgaagccagtgtgaaagagggtcatcccacttttgctttcgtaagagagggttcagtttcagacccagttaagggaggggttattaacaatttcaagaacttaggggttcatctgttgtatggggatctttacaatcatgagagtctggttaaggcaataaagcaagctgatgtggtgatatccgcggtaggttcgatgcagttagcagatcaagttaagatcattgctgccattaaagaagctgggaatgtgaagaggtttttcccatcggaattcggaaatgatgtggaccgggttcatgctgtatagccagcgaaaacagcattcgcaaccaaggctcaaatccggcgtgctattgaggctgagggaatcccctacacctatgtgtccagtaactgctttgcaggctattttcttcctggtttgtcacagccaggagccactactcccccaaga

SEQ ID NO: 191845 - DNA, 696 bp, Gossypium hirsutum
gatggtctcaactcaagatactaccctccctttaatccccacttctcgttgccctttcctctgtccttggaaacgaaggttatggcttctccctcgttcttttttgctacctttctgttgcttctctctacggttcacccaaaggtgattgctgtggagcaactttcagacgtcaagcttaactctcggatccttcaggattcaattgtaaaacaagtaaataaaaaccccaaggctggatgggaagctgcactgaatcctagattttctaattacaccattggtgagtttaagcaccttcttggagtaaaaccaacacctaagaaagaacttttgggcgttcctattttaactcatgacaaatccttgaagttgccaacttcttttgatgctagaacagcttggccacaatgtacctcaattggaagaattctcgatcagggtcactgtggttcttgctgggcttttggagctgttgaatcactatctgatcggttctgtatccattttgacatgaacatatctctgtctgttaatgatcttcttgcatgctgtggctttctatgtggagatggttgtgatggagggtatccaatctctgcatggagatactttgtacgcagtggtgttgtcactgaagagtgtgatccatactttgatgatattggttgttctcaccctggttgctagcctgca

SEQ ID NO: 191846 - DNA, 711 bp, Gossypium hirsutum
  unsure (1)..(711): unsure at all n locations
gcttctccctcgttcttttttgctacctttctgttgcttctctctacggttcacccaaagcccccaaagttgcaatttggacttaggtgattgctgtggagcaactttcagacgtcaagcttaactctcggatccttcaggattcaattgtaaaacaagtaaatcaaaaccccaaggctggatgggaagctgcactgaatcctagattttctaattacaccattggtgagtttaagcaccttcttggagtaaaaccaacacctaagaaagaacttctgggcgttcctattttaactcatgacaaatccttgaagttgccaacttcttttgatgctagaacagcttggccacaatgtacctcaattggaagaattctcgatcagggtccccgtggtccttgctcggcttttggagctgttgaatcactatctgatcggttctgtatccattttgacatgaacatatctctgtctgttaatgatcttcttgcatgctgtggctttctatgtggagatggttgtgatggagggtatccaatctctgcatggagaaactttgacgcagaggtgttgtcgtaaccggatagcctttcaccaaaaccttgttcgagagttacagatcaggaattgtctaaaagcttattctaaagaagacatctaacggcttaccatatcatagtttcatgaggaatgtatcggggtccattaagtn

SEQ ID NO: 191847 - DNA, 789 bp, Gossypium hirsutum
ctttccccttcgtgtaagcacaagccattccattttcagtctttttttttttttttttgtttacaacaacaatggctggacacacagtttacaccctctcagaagtgtctcgacacaaatccaagaacgactgttggcttgtcatcgatggccgagtaacccggctctctttactcacccaattatctttacttatttatgttgacaaataatcagagacttgactgattctttcaggttctgaacgtgacaaagttcatggaagaacatccaggaggagaagaggtgttgttggaatcagcagggaaggatgcgacgaaagaattcaacgatatcggacatagcaagtcagctcagaatttgctcctcaagtatcagattggtgttctccagggtcacacttcaaagaataatgaacaggttggttcaaccgaggagcccaaaaagaaagagatgagtgcattcgtgatcaaggatgacctgacgcctaaatatgcggcagtcgtcgagttcgcctgccccactcctggttgctggttcctatttctgttacagatacctcacaccaagctcataagtgctgtaatcaatttggttttcaagttcaacctcaacatgccccttcttccctttaaataattgttggcatagaatgtttacaatgatggtgtgttggtcctttccttttatcttcacttgtccttttggttattgctgttgatgattatatacgattgcgagttatcatatccacaagagaaaagaatacatatgaaaacagaactgaag

SEQ ID NO: 191848 - DNA, 583 bp, Gossypium hirsutum
acgacatacgaccacgcatacgtacacacgtccgtttacgcttccggtctttttttttgttttttgtttacaacaacaatggctggacacacagtttacaccctctcagaagtgtctcgatacaaatccaagaacgactgttggcttgtcatcgatggccgagttctgaacgtaacaaagttcctggaagaacatccaggaggagaagaggtgttgttggaatcagcagggaaggatgcgacgaaagaattcaacgatatcggacatagcaagtcggctcagaatttgctcctcaagtatcagattggtgttctccagggtcacactttaaagaataatgaacaggttggttcaaccgaggagcccaaaaagaaagagatgagtgcattcgttatcaaggatgacctgacgcctaaatatgctgcagtcgtcgagttcgccgccccactcctggttgctggttcctatttttttggtacaataataccctcacaacttaatccttatataattgctggtaaaataagtttggggttttccaaggttttaaaccctcaaacattgccccctttttttccccttt

SEQ ID NO: 191849 - DNA, 849 bp, Gossypium hirsutum
ggaaataaaatctctgaaagggaaaaaaaaactcaaaatcaacagatcgaagtgaaaatggagtgcgtgttcggtttagtgggcaacgactttgccatagtggcggcggacacgtcggctgttcacagcatccttgttcacaaatctaacgaagacaagatcatgatcctcgattctcacaaactcatcgccgccagcggtgaatccggggacagagtgcagttcacggagtatatacagaaaaacgtggccttgtatcagtttcgaaacggtattcctttgacgactgccgccgccgctaatttcactcgcggtgagcttgccactgccttaaggaagaatccatactttgtgaacatccttcttgctggctatgacaaagagacaggcccatctctgttctatatcgactacattgctacacttcataaggttgataagggagcattcgggtacggatcctatttttctctcgctatgatggacaggcactacaaaagtggcatgacagtggaagaagccattgatttagttgataaatgcataatggagatcagatcaagactggttgtggcaccaccaaactttgtcatcaagattgtcgataaagatggagcaagagaatatgcctggcgtgaatccgtcaaggatgctgcagttccttcggcctgagattttatcacgtacttgctctcccgttctggatgttttaatttgcatttaccgataggaaacaatgtgtgacggcagtgaaaattagtatatgaaaaactatttactttgatttgattatgttctgaagtggaaatttgatgatattttatcttggaatggaaacctttttatgtg

SEQ ID NO: 191850 - DNA, 609 bp, Gossypium hirsutum
  unsure (1)..(609): unsure at all n locations
gttttatgtgcatttgtgggtttcatccccaaaattgaaagccaaatctttcaccgttattggtagatattagaagaagatggtgctggttttggctttgggggatttgcatataccccatcgggcggctgatctccctcccaaattcaagtccatgctggttcctggaaagatccaacacatcatttgcactggtaatctttgcatcaaggaagttcaagattacttgaagacactttgtcctgacttgcatattaccagaggtgaatatgatgaagatacaagatatcccgagaccaaaacattaactatcggacaattcaagttgggattgtgccatggccatcaggtcattccctggggtgacctagactccttagccatgctacagaggcaactggatgtagacatacttgtaacaggtcacacccactcagttcaccgcttacaaacatgaagccggagttgttataaacccggggtctgctactggtgcatatagcaacatcacttatgatgtcaaccctanctttgtcttgatggatatcgatggactacgtgttgtggtctatgtctatgaactcatcgacggagaagttaaagtcgact

SEQ ID NO: 191851 - DNA, 743 bp, Gossypium hirsutum
gggcggacgcgtgggcgccgctagggtttcaagggatttcttccggtgcgaagagagcagcagccatggttctcaagacggagctttgccgatttagtggtgccaagatataccctgggaaaggcatcagatttgttcgtggtgattctcaggtcttcctcttttccaattcaaaatgcaagaggtacttccacaaccgtctgaagccatcaaaacttacatggacagccatgtataggaagcaacataagaaggacattgcccaagaggccgtgaagaagaggagacgtgcagcaaagaagccatactccagatccattgtgggtgccaccttagaggttatccagaagaagaggagtgagaaacccgaagttcgtgatgctgccagggaagctgctctccgagaaatcaaggaaaggatcaagaaaactaaggatgaaaagaaggcaaagaaagcagaagtagcggcgaagcaacaaaagactcagggcaagggtaaccttccaaagggtggtgcacccaaaggtcccaagcttggtggtggtggtggaaagcgataagttgaccaagttattatctgtttttacataggtagtatgttgattttgaaggcatttgtatggactgaatggccattcggccgtgtatcttttttgctttttatgcgttgtcataaaccttgaactatgtattgaagatgagtgatcaagttattttatgcttgactttgtttttcagccttt

SEQ ID NO: 191852 - DNA, 485 bp, Gossypium hirsutum
gacccacgcgtccgggtttccataacatatgatcagagcttcattttcagccatggttctcaagacggaggtgggcctatttagtggtgcggagagataccctgggaaaggcatcatatttgttcgtggagattctcaggttttcctcttttccaattcgaaatgcaagaggtacttccacaaccgtttgttagccttcaaaacttacatggacagccatgggtaggaagctgcataagaaggatgttgcccaagaggccgtgaagaagagaagacgtgcagccaagaagccttactcccgatccattgttggtgcctccttagaggttatccagaagaagagaagtgagaaacccgaagtccgtgatgctgccagggaagctgctctccgagaaatcatggaaagaaagaaaagaagaaagactatgaagctaaggaaaagatgaaagataataataataatgatgatgtacgagatgaatatg

SEQ ID NO: 191853 - DNA, 351 bp, Gossypium hirsutum
ccggagaaatcaaggaaagaatcaagaaaactaaggatgaaaagaaggcaaagaaagcagaagtagcggcaaagcaacaaaagactcagggcaagggtaacgttccaaagggtggagcaccgaaaggccccaagcttggtggcggtggtggaaagcgttaagttgctaaagttattatctgtttttccctagccagataaaaatagggttagtatgttttttttgaagccaattttatggacttaatggcattgatggccatgatgtttttgcatttatgcttgatcctatactatgaacccagtgttggaagttttgtgatgaagtgcttttatggattttgaatttatt

SEQ ID NO: 191854 - DNA, 573 bp, Gossypium hirsutum
gatataaaacttgtagttggttacctacaacagccatcattgcataggttccccctataaaagcctcacagttccgccatcactacgatgacagcagcgaaagggaagatggcaacatatcttgtcttggttgtagtagctatgctttgtgcaggagccacagctcaatcaggttgcgctagtgtgttgatcggcatgtcaccctgtttgagttacattacagggtcctcatcaaccccatctcaacaatgttgcacacagctagctaatgtcgtgcgttcatcaccgagatgcttgtgccaggtccttaatggtggtggttcatcatttgggatcaacatcaaccagactcaagctttggccttacctgattcatgcaatgttcagactccacctatcagcagttgtaatgctgcttctccagctccagcagactctccggtaggatcacctgaatctggaagcaaaattccaacaggagatggatctagaagtgtaccaactgcacgggagaatggctcatctgatggaagcaccaccaaaatgtcactctctttgttcaccttccttctg

SEQ ID NO: 191855 - DNA, 515 bp, Gossypium hirsutum
ctttcatgattcaaggtccatcagtgggagaatatcaatcagatcagttaaggatcggtataggcatggttcctgaactcgaagctactcaacaagaacatagcaggtcgggatatgtatcgaaggctgctccagtttcgtatgaaccagatgacctttacatggtgattgggcgtggttcagcagaagagactgccatgacatcttggactccagagattgactacgaaatgaacgcgttatctgctgaagccaccagcaggcatgctgatgttgaaataaccggggccaatgaaaaggggcctgatgctaaaaaacttgggaaatctgaggggaaacttccgaataaagaagttcgttctagagtttcaaatggacctcttgccaagagcaagtctgatgtagtatcaaagagcaggaaaccaccagcaggaagcaaaaccatgatacggagaactaagtccgatcaggaagagaacagatagaaaattgatgagttactgatccagctccag

SEQ ID NO: 191856 - DNA, 1328 bp, Gossypium hirsutum
ggttaccatgttgggctcaaaggccaatacactgggagcaaggaagagagatttttcattcacaaccatttggcatttactgtcaagtaccatagggatccacaaactgactcggctaggattgtgggatttgaagttaaaccgtacagcattaaacatgaatatgaggggaaatggagtgagaacactcgtttaacaacatgcgacccccacactaaacacacagttgttaattctaacactccgcaagaagttgaagcaaacaaggagattatattcacctatgatgttgaataccaggagagtgatgtgaagtgggcatccagatgggatgcatatcttttaatgagtgatgaccaaatacactggttttcaattgtcaattctctgatgattgttctcttcctttcgggaatggtagcaatgatcatgctaaggacactataccgtgacatttctaggtataacgaacttgagactcaggaagaagcccaagaagagacaggatggaagcttgtccatggggatgttttcaggcctccatctaattctgatctactctgtgtctatgttggcaccggtgttcaatttttgggcatggtacttgttaccatgatctttgctgtttttggatttctttccccttcaaaccgaggtggtctgatgacagctatgcttttactttgggtcttcatgggcatttttgctggctatgcttctgcccgtctgtacaaaatgtttaaaggagcagaatggaagaaattagcttttaggactgcgtgcatgttcccaggcattgtctttgccatcttctttgtcttaaatgcaattatatggggccagaagtcttctggggccgtgccttttgggacaatgtttgctctggtcctcatgtggttcggaatttcagttccacttgtttttgtgggtggttatgttgggttcaagaagccagcaattgaggatcctgtgaagacgaacaaaatcccaaggcaaatcccagagcaagcttggtatatgaacccgactttctctattctgatcggaggaatacttccattcggagctgttttcatcgagctgttcttcattctcacctcaatctggctgaaccagttctactacatctttggtttcctgttcttggtattcattatcctccttatcacttgtgctgaaataaccattgtgctttgctacttccaattatgcagtgaagattatttgtggtggtggagatcatatctcacatccggctcctccggttttgtacctcttcctctacgctacattctatttcttcacaaagcttgagatcactaagcttg

SEQ ID NO: 191857 - DNA, 622 bp, Gossypium hirsutum
gaacaatcaatgtattattcagattaggatcctgaagttttttggtcaatttcggccaataagcctttgctcggttttatacaagttgatgatgaaggtaattgctaaccacttaaatccaatcctccaaatttcacagagaataagaaaaagggggggggggaatcaaagctaggtttaggattgaattttgcagaaaatggcaatgaggaaagtttatagcgagataaaagggatgaaagtgaaggaagtccctaactacgtgaaaccgatgctatcaatggattacgtgaagaaagcttttcaaaagggtttggacaattacaattcaaagtacattcaaaccgattcgatccagcctctttaccatgtctgtttcggtgggatggtcttttcttacctcgtcgctctcccaaatgagcgtcgccatctcgagcaccagcaacacgccaaggaacatggtcatcactgatccctgctcaggttaaagagtggcatttatggcataatgcttctggttgtaatttctgagcaatttaggcaggaagatactgtctttgatcaaatgcattgcagcattgtggtgataaaataatattaaaaaataaatggatttttgtta

SEQ ID NO: 191858 - DNA, 731 bp, Gossypium hirsutum
aaaaaattggccacccaaagttatcacactatcagcacccgcctgcaagccgtaaagcaaaaatctggcaaatcctataatcaaatagccgaagaaaccggcttaaccaacgtttacgtggctcagctcctcaaacgccaggctcagctcaagcctgaaaccgctcctaagctaagggcagccttgcccgaattgcctgaggagcttctccatgagatgatgaaaccaccgttacggtcctatgatccgaaccttatccaagaacccactgtttacaggttgaatgaggcagtgatgcattttggtgagagcataaaggagattatcaatgaagagtttggtgatgggatcatgtcagctatagacttctactgctctgttgacaaaagttaaagccgtggacgggaaagaccgtgttgtcgtcacatttgatggaaagtacttgccatacagtgaacagaaatctgagcatatggtttcaagattaaggctgcaatgaaagctgatgaacagccatatcctgaaaccttggagcttcttgttgaaaggaaaacaataaaacttggtttgtatattcatttattatgttactcgaactatttatttttctgtctccgaacatgctccggcatatatccggacatgtattggatatactcgtggttgacattaattttggagttcaaataaacatgtcacaagtttttcagtggcattaaattatcatttgc

SEQ ID NO: 191859 - DNA, 547 bp, Gossypium hirsutum
gagaaaacctttggtgatgaaaacaagtccgaaggtaaaggatctgaatgtggtagctcgtgtactggtgatgaaaacaagtcagatttgaaggccgatgaaggtaaacattccgaaactggtagttacttgaacacgacggacagtaaatcaaatgatcacgacactggatcatcaaactctgagcatatctctcctcaaaacacaacagacacaaccgagctcattgtccaagcaagcaataactctacggaagagagtaaagaaaccaacaacttggctgcaaaagaaattccgggttcactgcataacgggacttctgctctagatacaacaggaggtggtagggttattgcagaaatatatttggaataagccaatgagaccgtagtagatgcaagcaagatcgagaacgtagtaaatgtaacaaccgaaggtaaaggttttgaatcttccacgactaaggagactactgataatgagaaacaaggtgacaatgaatcaaatggaaaagatgaaaacgaagacacttcttcctctaatgaga

SEQ ID NO: 191860 - DNA, 2087 bp, Gossypium hirsutum
ctcattcatattcttttttctaatttttataaataaattttcattgtattttttttattttagttagttaaaatttttttttttttttttttcttttacaacatccaacttgactcttttcattgcccttcaaatttcaacaaatttactacataatgacactgaacttacctcacagtacaagtaaatcaatcctaaggcgggttaaattcattaaccgcccacgtccacactgcttctccattctttggaatttatttccccaatgtaaaaaagtacgactaaatggtaaaaattcaacctaaatataaaattaccatacatattacaaacaaacaaacttcggtatattcttcaccttcttttaccagagaagaaatggataggtaaattagtaaattatcaccaataagctatttatttactgtcttaacatttatgaggagagaacccgaccttattattagccaaatcgaagctcacacgtgtcccttgctgttgtacgttcccaattatagacaaagacgacgtcgtgggggcaaacgccaagcaatacgttcccgatgagtccaccggtatcaaataatttttcgccggcaagtccagtgacattccgccgctgaaatgaaacgccaccgacggaaccctaacactggttcttgaagacaagtcgtagcacgtgtcgaacaacgcaaccccaccggtggtcggcaagtccggcgataatttcacgaacgcgtcgcggagtgcgttgtaagcctccgcttgcaaccgtgttatggccgtcccgcagtcgacgatcactcctccgtttcccgattgttccaactcgaaaaagcccggcgggagttgaacaggttggccgcctacgctaagcccggtcagaccgacgtaataaaaggtatccacctttcggctccttattaacggagcaaccactgagtcagccggtaacccggagttgaaatccaacgtcgacgaacccgctgagtcacgatccactaaacaataagaaaacgacgtcgctttaatctgagatgttaaagacaagggaccaccaccgagtccaaccaaaccggcagctgcaacaaataagccttcgttggtatggccacaacccatagcaacgcctttgatatcaccggagttcccaaacgacaccgtttcagtcacgaaatcccctactgtgtaagatccatcaccgtaggacacctggtaaagacatttcccgccacgacaagccgattgtcgtagaagagaacattgccttgactcgcaagtaaccggactgtaagtcgacgacgccgacgggtcaaaaatcgggtcggattgttggtaacaatccgtacatggttcacattggatccaattaacatcactcccggtatcaagaaccatgtagaattgtttagccgggttaccgactccgacccgggtaaaatactccccactcccttggctcgtaccggaaataacaggggtggaaagcgcctctggttctaactcggtaacaacaggcttcagctcagttttgcgaaccccattgacagcgagtagtacctcggtggtgagcgtgttaactcgggctgaatcacggtcgagtcgggatcggaccaggtttttataatcaacatgatgggtttttcgcaaagagccccgtgaatgaagtggaatcgaaaaaccagaacccgatgaagaagaagagttgacgaaaaggggttggcttttggaaaaaccattagaaatttgaggatcaaaggaaagaatatgctgagcttgtttcaaagaagctaagacatcgaggatttttgttgttggtgaaggggaattacgagctaaagtggaagcaaccaagaaggaaaacaagaagaaaagggaaagctttgaagaagatgatgaagtagccattgttgtttatttgggtgactgaatttgaaagagtttagtgggggttttattttggtttagaaaaaggggagaaggagaagaacgtcaccgtcaggctttgttggcagacattaaagggcttcaagctagaagcagatgagagacggggagtggcagagctttgaaacatactatctatg

SEQ ID NO: 191861 - DNA, 1203 bp, Gossypium hirsutum
aacccttgtgtctgtttcacaaacgcgtctcgcagcgcgttatatgcctgagtttgcagccgagtgatggcagtcccgcagtctatgatcactcctccctctcctgactcgttgatttcaaaaagccccggggaaatgtttaccgcttgcccacctacgctgaacccggtgagaccgatgtaataaaacgtattcaccttccggctcttcattaatggagcgatcaccgagtcggccggtaaacccgagttgaagtccaaagtcgacgagccggtcgaatcacgatccactaagcagtaagagaacgatgtcgctttaatctgggatgttaaagacaagggtccacccccgagtccaagcaaccccgccgctccaacaaacaagccttcattatcatggccacaacccaaagccactccattcatgttaccggagtttccaaacgacactgtctcggtaacgaaatcacccaccgtgtaagatccatcaccgtacgagacttggtataggcatttcccgctacggcaagcggaaacttcaagagaagagcactgttttgattcgcaagtaaccgggctgtaagtggaggacccggatgggttaaatatggggtcggattgttggtaacattcgttacagggctcacactgaatccagttgatatcacttccagtatcaagaaccatgtagaattgtttagccggtttaccgactccgacccgggaaaagtactctccactcccttggcttgttccggaaataatgggggtagaaagtgcctcagcttggatctgggtagggagtgggcggagctgggatttcttgactccattgagagcgagtaggagcttggtagagagagagtcgacacgggcggagtcacgctctagtcgggataggacaagggctttgtagtcggtgtggtgggttttgtgtatggagcccctagagtgaagtggaacagagaaaacagcagcagaagtagaagagttgaagaaaaggggttgggtttgggtctgagcgaaagctttcaaagattgtgggtcgaaggaaagtatatgttgagcttgtgaaagagaggaagagacatcgagtgtagtcgtggttgtttggggagagagacgagcgagggtggaagtgaacagaaaggaaaggaagaggggaaaggagagaaggaaatggttggaagaagcagcagccatg

SEQ ID NO: 191862 - DNA, 803 bp, Gossypium hirsutum
  unsure (1)..(803): unsure at all n locations
attgatggtaacgttgaaggaatgggtgagaggaaatcggaaggggaagtaatggatgatttgttttcggcatatatgaatttggataacatcgatgcattgaattcttccgaggataagaacaacaataacgagaatcacgaagatttagatagccgagcgagtggaacaaagaccaacggtggcgatagtagtgacaatgaagcggaaagcagtgcgaacgagagcgggaatagtgtgacacagggcggagtttattcaactgagaaaagagaagggaacaaaaggagtgcagggggtgacattgctcctacttcgagacatatncaaagtgtttcgatggatagtttgggnngaaagttgaactttggtgacgaatcaccaaaactaccttcttcacccggatctcgtcctggacagctctcaccaagcaattcaattgatgggaattctgctgcctttagtttggagctcggaaacggtgagttcagtgaagctgaactgaagaaaattatggcatacgagaagctcgcagaattcgctatgactgatccaaagcgtgcaaagaggattttggctaatcgtcaattcagctgctcgttccaaagaaaggaagatgcggtacatttccgagttggaccaccaggttcagaccctgcaaactggagctaccacattatcggctcaattaacacttctacagagagattccgntgggcttagcaatcagaacaacgagttgaagtttcgtattcaatccatggaacaacaggcacaactccgtgacgctctaaacgaaacat

SEQ ID NO: 191863 - DNA, 502 bp, Gossypium hirsutum
ttggagaatccattgcactccgtctcacttttcctttatccgtggtgcttatagcagcaacaggtaactaccacctcatcaacatgtcgtctcaccacctctctgagttggactccaccaccgattccgtcgcgtcctctccacgctccgagcaccatgctcctcatgatgcccgtgtacggttcatgtgcagtttcggcggaaagatccttccacgtccacatgataatcagctccgttatgccggtggtgatacccgcatcgttgccgtccatcgttccacctccttcgcagccatcctcaccaagctctctaaactctcaggaattgccaacgtgagtgttaagtatcagcttccgaacgaggatcttgacgcgttgatttcagtgatgaccgatgaggatctcgagaacatgatggaagaatatgatcggctagcacagaatcataactctcggttagctcggttgcggatttttcttttctccaaaggcgatgactc

SEQ ID NO: 191864 - DNA, 963 bp, Gossypium hirsutum
ctaacctcaaggcttaaagctagcaagagcagagctgcggcatttcttcctcagaagacccgtcaaacagaaatgaagttcaacattgcaaatccgactactggttgccaaaaaaagctggaaattgatgatgaccagaaacttcgagccttttttgacaagaggatctcacaggaagtcagtggtgatgccctcggtgaggagtttaagggctatgtattcaagatcatgggaggctgtgataaacaaggttttccaatgaagcaaggagttctcactcctggacgtgttcgtcttttgcttcacagaggtactccctgcttccgtgggtatggtaggagaaatggagagcgcaggaggaagtcagttcgcggatgcattgttagtcaggatctttcagttttgaacttggttattgtgaaaaagggtgaaaatgatcttcctggactgactgacactgagaagccaagaatgaggggtccaaagagagcttcgaaaatccggaagttgttcaacctctctaaggaagatgatgttcggaagtatgttaatacttatcgccgaacctttacaaccaaatccggtaagaaagtcagcaaggctcccaaaattcagaggttggtgactccgttgaccctgcagaggaagcgtggcagaattgcagagaagaagaagagagttgcaaaggccaaggctgatgctgctgagtaccagaagctgcttgcccagaggttgaaggagcagcgtgagcgcaggagtgagagcttagccaagaagagatccaggctctctgctgcttctaagccttccattgcagcttaactgtggtttgggcattttggtcagtagttgaatgtttgattctgaaacccgttttatattgtcgaggtcattttgattatcaaatttctagagtctgccgatggtttttggggtattgttttttagtggatagtttacatg

SEQ ID NO: 191865 - DNA, 391 bp, Gossypium hirsutum
tttattagagcagcagcagtcgcggcggcggcagttctacccagggtctgttttctaaacaaccatcaaacagaaatgaagttcaatattgcaaatccgactactggctgccagaagaagctggaaattgacgatgaccagaaactccgagccttctttgacaagaggatctcccaagaagtcagtggtgatgcccttggtgaggagtttaagggctatgtgttcaagataatgggaggctgtgacaagcaaggttttccaatgaagcaaggagttctgactccaggtcgtgttcgtcttttgcttcacagaggtactccctgcttccgtgggtatggtaggagaaatggagagcgaaggtggtaggcagttcgcggatgcattgttagtc

SEQ ID NO: 191866 - DNA, 1368 bp, Gossypium hirsutum
  unsure (1)..(1368): unsure at all n locations
tcttttcgcgttcgcccacgcgtcccgcccgctccttcttcactcctctgtttcagaatcaaaatctctctttctcgtcaatatggcagcaaatggcgttgtttctgacaagagcttgatcgtcagcttcggtgagatgctgatcgattttgtccccactgtctccggtgtttctctagccgaagctcccggcttcctcaaagcccctggcggtgctccggctaacgtggccattgctgttgctagactcggaggcaaagcgtcatttgtcggaaaacttggagacgacgagttcggtcacatgctggccgatattctcaagcaaaacggtgtctccggtgacgggatcttgtttgaccaaggcgctagaactgctcttgccttcgttacgttacgcgccgacggagagcgtgagttcatgttctataggaatcctagcgccgacatgctgttgaagccggaggagttgaaccttgatcttatcagatcttccaaggtatttcactatggatcaataagtttgatcgtggagccatgcagatcagctcatttaaaggcaatggaagtagccaaaggagctggtgcattgctctcatatgatccaaaccttcgcttgccactttggccttcagctgatgaggctaggaaacagattttgtccatttgggataaggcagatattgtcaaggttagtgatgtcgagctcgagttcctcaccggtagcaacaaagtcgacgacgaaactgccatgaaactttggcgacccaactttacactgctcttggtcacccttggtgaaaagggtagccgatactacaccaagaatttccgtggggcagtcgatgctttccatgtcaataccgtggacacaactggcgccggtgactcctttgttggtgcattgctatgcaagattgttgaaaacccaaccattcttgaggatgaagcaaaattaagggaagtgttgaaatttgcaaatgcatgtggagccatcacgacgaccaaaaagggagcaatccctgcactaccaaccgtggccgatgcccttgccttaatcaatggagcttagattttaagcaacttgaataatttgcacgttgttttgcctcccgtgattatcctttcatttcaaagagttctcaatttattcccctttgatatgcgacctttgttcccccaacgcccaattgcttgtgttctaatgatggaaaagactttgtggttttaagcgtgtaggaaattcttttccctcttttataattttgcaatgtgattatcgaacttgttctgtcatcnnnnnnnnnnnnnnnnnnnnnnnnnnnnnnnnnnnnnnnnnnnnnnnnnnnnnnnnnnnnnnnnnnnnnnnnn

SEQ ID NO: 191867 - DNA, 452 bp, Gossypium hirsutum
ttaaaagaaaaaaagatcgtttattttttgctttcttatcgacgccatggcacctaacggggtcgtttccgacaagagttcaatcgtgagtttcggtgagatgctcatcgacttcgtccccaccgtctccggcgtttctttagcggaagctccaggcttcctcaaagcccccggtggagccccagccaacgtggcgattgccgtctcaagactaggcggtaaagcatccttcgtcggaaaactcggcgacgatgagttcggtcacatgcttgccgatattctcaagcaaaacggagtctctggtgacgggatcttatttgaccaaggtgctaggaccgctcttgccttcgtaactctacgcgccgacggagagcgtgagttcatgttttataggaatcccagtgctgacatgctgttgacgccggaggaattgaatcttgatcttataagat

SEQ ID NO: 191868 - DNA, 588 bp, Gossypium hirsutum
attgaacttgccgaaaagcagaaggttttgaatgagtgtgttgaagctgaggcctggctcagagagaaaaaacagcagcaggatcaacttcccaagtatgccacacctgttctcttgtcagctgatgtgaggaagaaggctgaagcacttgacaggttttgcaggccaataatgatgaaacctaaaccggctaaaccagccacgcctgaagcaccggcaaccccaccacatcctggaagtgaggctcaaccacagggtgcaaacagcccgaaagcaagccctaaccgcaatggtgaccccagtgaaaatgtgccggcaggaagtggtgaggcacctccagcatccgtagaaccaatggaaactgacaaagcggagactacgagtgccgcatagaagattagcagggtgagtcattttatgattttatatatatgcggccagaagttagttgttatgtataagcagttacaagcactattttctaaggagcctgagatgagatacccaactctatcttttggtaggctgataagaaaaggctgtgttgttttcgattttaaaaagccttctcttgcagtgtctgctgag

SEQ ID NO: 191869 - DNA, 1465 bp, Gossypium hirsutum
ctcagtgcagacttctcaccattttgcccattttcagcagcaactttttccttttggcagttaagtgaaacgatgccgtactactcgaggggtggcgaagatgacgttgacgagttcgacgaattcgatccgacgccttacggtggtggatacaatctcgaactaacttatggtcgtcctttggaaccctccgatgagacttgctacccttccgctacaccctccgatggcgactttgattacgcacgtcccgatttctcttccggttacgcgcacttagcttatgccgacgaagccctcgaaactgaatacagtagctatcttaaacccaagccccgacctggacgattcgaacctgcacctgcttttggtgactatggaaggaaacctgaatatgagcaattcgaatctggtcatggacgcaaaccggagttcggacgacccggctccgaatttgaatctgattttggccgaagacctgaattcgagcagcctcctgaggagtttggatctgggcatggccggaggccggcatatgagcattcacatcaaccggatttcggatccggccggagatcagaatttgagcagcctccgccgcctgagtttggatctgggtatcgacggagacccgaatttgagcagcctccgcctcctgaatttgaatctgggtatggccggagacccgaatatggcgaacaagagtccgagtacagatctgagtatagtaggaaaccagagcacggtgaatatggatccgaatatgggaggagacccagctatggtgaacccgaatctgaatacggatctgggtttggccgaaaggcagagtatgaaggaggcggatccgaatatggaaccggatacggacggaggactgagggcgagtatggatcgggttatggaggtaggacagagactgaatacgggtccgggtatgagaggaaaccaagttatggtagatccgaggaagaggaagaaggatataggaagccaagttatggtagatccgaggaagaggcagaaggatataggaagccaagttatggtagatccgaggaagaaggatatggccgcaagaaacatggcgatgacgacagtgatgatgatgatgaagagaagcgtcaccaccaccgctataaggaccaccaccataagcgccatgatgactatgacgactagtcagactggccattccctctacaaatggaaatctgcagtaatagctattaaataaatgatcgaggcatgccacctttgatcgtttcttctaccatttccgtgtgctttttgtgtgtgtgtcagtgtttgatcgtcaataaaatgcccgaacattagggttagcgcaattgcgcttgttgattatcaatctgatgatgataatatactgccatgatctacttgcatgttaactacttaatgcttatgatataataaaatgcttacgcatgtgatgttcttgctt

SEQ ID NO: 191870 - DNA, 415 bp, Gossypium hirsutum
  unsure (1)..(415): unsure at all n locations
ggcgggaccggcccggacgacccacgcgtacgaccacgcgtncggccgcaagaaacatggcgatgtcgacagtgttgatgatgatgaagagaagcgtcaccaccaccgctataagccccaccaccataagcgccacgatgactatgacgactagtcagactggccgttccctctacaaatggaaatctgcagtaatagctattaaataaatgatcgaggcatgccacctttgatcgtttcttctaccatttccgtgtgctttttgtgtgtgtgtcagtgtttgatcgtcaataaaatgcccgaacattagggttagcgcaattgcgcttgttgattntcaaanaaaaaaaaataaaaatattattataatttttatatttttttttttttatatatttattttttatttaatttt

SEQ ID NO: 191871 - DNA, 747 bp, Gossypium hirsutum
ttctaactctccaactgttgcttccacttcctctcttccagatctgaatcgcaaaagggaattttcagttgaaaaagatgggtcgcggagttagcagtggcggtgggcagagctcattaggttatttgtttggtagcggagaagctcctaaaccagggacaaacaactcccaagctgctccagctgaagcaccagctgtctccaaacctggccctgctcctgaaccagtagatatttccaagcaaattcctgctggtattaacagtatttccgcaaacaattacatgcgtgccgatggtcagaatactggcaatttccttacggatcgaccttccaccaaggttcattctgcccctggaggcggatcttctctggactacctatttggtggacctggaggtagtaaatgagattgtgccttaataacatctaataacatctttgataagggagagtattgtttgttgatttgggggaagcagtaaagctgtggatgaaatgctgttcttataatctttgaacacagaagcaatgaaaacatgcctgtctcttgtggtgtaatattgcaggtcttgtggtggttgttttgttgattcaatcaaatgagttctccagattaggtgcacaaacatctaattctgcagagctgggttaaaaagaacattgttatatttttcatgttatgcatagttatgtcgtttttccttactctacccactcttttattcaatttggctcactcttttc

SEQ ID NO: 191872 - DNA, 798 bp, Gossypium hirsutum
ctcccactttatcatcatcactgtctctttagcctttaccctttgtttcgttgatttgtttctaaggatttaatctccaaaccttcttcccatttcttcattacattgttcaagaaaaaagaagcaaaaaaacatggccaaagttctgttgttcattgcactatgtgtgcttccagctttggttagtgctacacgcattctgaataaccaattggtggttgaaggctatgtgtactgtgatacttgccgtgctggttttgaaacccctaagactagaaggctagctgatgccatggttaagttggtatgctccgacaggaagagcggcgaagttgttttcaaaaaggagggatacaccgacaaaaccggaaaataccagattcgtgtatccgaggatcacttggatcagatctgtgatgcagttcttgtgaagagctcccagcttggttgtgccacaatgtcccccggtcgtgaacgtgcccgtgttatcttgaccaacttcaatggcatttcatccaccacccgttatgccaatgccatgggcttcatggttgacgagcctgaagcaggctgtgctgagatgatgaagatgtatcgggaggatgaggaggatgtctagtgtgttggtttggatttatttgcatatgaaatatgatgttgtctgctatttgttatgtgaattgcttcgttatttctacgtttagaggactaataccagaaataaaagcagagcaacgagcactctttttggacccaaagccggctataagacggccgatcccgggccggagacatttg

SEQ ID NO: 191873 - DNA, 657 bp, Gossypium hirsutum
  unsure (1)..(657): unsure at all n locations
tttttgtttgttcttgaacaatgtaatgaagaaatgggaagaagcaaaaaaacatggccaaagttctgttgttcattgctctatgtgtgcttccagctttggttagtgctacacgcattctgaataaccaattggtggttgaaggctatgtgtactgtgatacttgccgtgctggttttgaaacccctaagactagaaggctagctgatgccatggttaagctggtatgctccgacaggaagaccggcggagttgttttcgagaaggagggatataccgacaaaaccggaaaataccagattcgtgtatccgaggatcacttggatcagatctgtgatgcatgttcttgtgaagagcccccagcttggttgtgccacaatgtcccccggtcgtgaacgtgcccgtgttatcttgaccaacttcaatggcatttcatccaccacccgttatgccaatgccatgggcttcatggttgacgagcctgaagcaggctgtgctgagatgatgaagataataataaccattcagatttcgaccnnnnnnnnnnnnnnnnnnnnnnnnnnnnnnnnnnnnnnnnnnnnnnnnnnnnnnnnnnnnnnnnnnnnnnnnnnnnnnnnnnnnnnnnnnnnnnnnnnnnnnnnnnnnnnnnnnnnnnnn

SEQ ID NO: 191874 - DNA, 397 bp, Gossypium hirsutum
ttccacgcgtccggcactgtctcaagaaaaaagaagcaaaaaaaacatggccaaagttctgttgttcattgctctatgtgtgcttccagctttggttagtgctacacgcattctgaataaccaattggtggttgaaggctatgtgtactgtgatacttgccgtgctggttttgaaacccctaagactagaagcctagctgatgccatggttaggctggtatgctccgacaggaagaccggccgagttgtcttcgagaaggagggatacaccgacaaaaccggaaaataccagatttcgtgtatccgaggatcacttggatcagatctgtgatgcagttcttgtgaagagctcccagcttggttgtgccacaatgtcccccggtcgtgaacgtgcccg

SEQ ID NO: 191875 - DNA, 699 bp, Gossypium hirsutum
acgcgtccgaggcagatacgccagatggcactctctcctggctgcagtgcagcacctgtctgttcggcgtgacttgtgaagagctcccagcttggttgtgccacaatgtcccccggtcgtgaacgtgcccgtgttatcttgaccaacttcaatggcttttcatccaccacccgttatgccaatgccatgggcttcatggttgacgagcctgaagcaggctgtgctgagatgatgaagatgtatcaggaggatgaggaggatgtctagtgtgttggtttggatttatttgcatatgaaatatgatgttgtctgctatttgttatgtgaattgctccgttatttctacgtttagaggacttctataacttatttttcttacaaattctattaccaattatataaacctaagctatggcttctatctcggaagtatttttttgggtaatttaaaaaaaaaaaaaaaaaaaaaaaaaaaaaaaaaaaaaaaaacaaaaaaaaaaaaaaacaaaaaaaaaaaaaaaaactaaacaaaaagaaaaaaaaattaaataataacaaaaaaacaatttatataagtacggggcggcccttttaaaagaaataaggttaaaatcccgggggtccaacaaaaatattttttttttaggcccccaaaatacaaatcactggccggtgttttaaaaatttgaatatgggaaa

SEQ ID NO: 191876 - DNA, 776 bp, Gossypium hirsutum
  unsure (1)..(776): unsure at all n locations
gttctagatcgcgagcgcgccctttgttttttttttttttttttgttnggaagtataaacaccattttacttcataacatcaaactggtaaacttgttctctgttgacatcatttactagagttgtttgctgggattttaactgtgtggcctattgctataataacgaattgttgttgtgttgttgtcatggtcctactcttatagacctttcttcttgttataactcgcggagttgttctcgagatggagggatataccgacaaaaccggaatataccagattcgtgtatccgaggatcacttggatcagatctgtgatgcagttcttgtgaagagcccccagcttggatgtgccacaatgtcccccggtcgtgaacgtgcccgtgttatcttgaccaactccaatggcatttcatccaccacccgttatgccggtgccatgggcttcatggttgacgagcctgaagcaggctgtgctgagatgatgaagatgtatcaggaggatgaggaggatgtctagtgtgttggtttggacttatttgcatatgaaatatgatgttgtctgctatttgttatgtgaattgctccgttatttctacgtttagaggacttctataacttatttttcttacaaattctattaccaattatataaacctaagctatggcttctatctcggaagtatttttttccccaattgatgttgtttcaacttgatgaaactgctgtttatttagcaataaggtacattagctatgagttgtattatttaac

SEQ ID NO: 191877 - DNA, 603 bp, Gossypium hirsutum
  unsure (1)..(603): unsure at all n locations
ggaaagcaaaacgccaaggaccttaatttcctttattcacatactggcactgttcaagaagttaagccagtacactcgttgatttgtttctaaggatttaatctccaaaccttcttcccattttttcattacattggtcaagaaaaaagaagcaaaaaaacatggccaaagttctgttgttcattgcactatgtgtgcttccagctttggttggtgcttcacgcattctgaataatcaattggggggagaaggctatgtgtactgggatacttgccgggctggttttgaaacccctaatactagaagcctagctgatgccatggttaggttggtatgcttttactggaatattgtgtcttattgtttatatttatttttgattcatcnnnnnnnnnnnnnnnnnnnnnnnnnnnnnnnnnnnnnnnnnnnnnnnnnnnnnnnnnnnnnnnnnnnnnnnnnnnnnnnnnnnnnnnnnnnnnnnnnnnnnnnnnnnnnnnnnnnnnnnnnnnnnnnnnnnnnnnnnnnnnnnnnnnnnnnnnnnnnnnnnnnnnnnnnnnnnnnnnnnnnnnnnnnnnnnnnnnnnnnnnnnnnnnnnnnnnnnn

SEQ ID NO: 191878 - DNA, 1040 bp, Gossypium hirsutum
aacagacacaaaaaaacgcatttattttgttatcgcaagagcgaaaaagtgaataaaataaaatatattattttattaaagtttttgtttgggggaaattgagagaaaattttgaaaaaaaaaaaatccaagatgaagatcacatcgttagtagtgctgaagtgcaacccggaaggatccgatccgataatactagcgaacgctaccgatttgagccattttggttactttcaaaggtcaagcgtcaaggagttcatcgtcttcgtttctcgaactgttgctaaacgtactccttctggtcagcgccagtccgttcagcacgaagagtacaaggtacatgcttacaacagaaatggactttgtgccttgggatttatggatgatcattatccagttcgaagtgctttttcgcttctcaaccagattctagatgaatatcagaaaaattttggggagtcttggagaaatgcacaagctgatagcactcaaccttggccgtatctgaatgatgctttgaccaaatttcaggaccctgcagaggcggataaattattgaaaattcagagggaggtggatgaaactaaaatcatccttcataaaactattgatagtgtgcttgcacgaggtgagaggctggacagtttagttgagaagagttcagatctgagtgctgcgtctcagatgttctacaagcaggctaagaaaaccaatcaatgttgtaccatactgtaaacttgcaagagaaagcaacaatgttgtgatatgggattcgtttatgttggcctctaaagttgatgatgattgatgactgaaaacttgtgtttataatatggtttttcaagattgtttgctggtgagaattcctgatctttcccctttctgggcaatttgttgtttggatgaaaagtggaagggtaaacaactggtctcaccattggcggtgtattagatatttttttcttttctttgcactcgacttgacaaatagatcttatttcttgtttctgtggattagtaatataatataatataataatttg

SEQ ID NO: 191879 - DNA, 477 bp, Gossypium hirsutum
ttatacaagaatttatagcagatagagaagaagaaatgattgaaattttattattaatattatcatttctttttgtgtggaaaattaagggagaaaggggaagatgaagatcacgtcgttattggtgttgaagtgcaacccagaaggatcggatccgatcatattagcgaacgcaactgatgtgagccatttcggttacttccaaaggtcaagcgtgagggagtttatcgtctttgttgctcgaaccgtcgccaaacgtacacctcccggccagcgccagtccgtccagcacgaagagtacaaggtacacgcttacaacagaaatggacttgttgccttgggatttatggatgaccactatcctgttcgaagtgctttttcgcttctcaaccaggtgctagatgaatacctgaaaaattttggggaatcatggagaactgtgcacgctgatagtgctcaatcttggccctacctgga

SEQ ID NO: 191880 - DNA, 440 bp, Gossypium hirsutum
  unsure (1)..(440): unsure at all n locations
ttatgatgttccaattgctcttgaagctgtgatattgcaggttgaagttcgtgctttgtatcctgatgtgttctattgagcaggttattctcctccattagtgaagaaatctgagactgaaatctctgcccttcagaagctatctgctgagttaaatcttactatagccttctttgaagagtgaaggtgatcagcattttcatccttctctgccagggcagcttcccagtttgccctccatatcacttgagttttgactcgtattgtggctatgttcctcattcagctccatattttcctcggccagcccttccactttccttttcaaagtgagattacttgttttgcattttcttaacatggcttttcaagcttctttaagttttacaagaatttttttccttcctaaatttttnnnnnnnnnnnnnnnnnnnnnnnnn

SEQ ID NO: 191881 - DNA, 496 bp, Gossypium hirsutum
  unsure (1)..(496): unsure at all n locations
gactgaacaagagcaggcactctcttcagagcttagcaacaaggtgaaaggaaggcagacagcacgtgaaataattttatggattgaggaaactgtctatactattcacggccaggaaattaccctcagtgtggttatacaaactcttcttgacattgggtctaaaagtttcactcatttgatcactgtcttggagaggtatggacaggtcatggcaaaactttgcgctgatcaagataagcaggtcatgcttatatctgaagttggttcatattggaagaacaatgcacagatgacagccataacaattgatagaatgatgggttatcgtcttatatctaatttggccattgtgagatgggtcttctctccagaaaacattgagcaatttcatatatctgatcgtccatgggaggttctgaggaatgcaattagtaagacannnnnnnnnnnnnnnnnnnnnnnnnnnnnnnnnnnnnnnnnnnnnnnnnnnnnn

SEQ ID NO: 191882 - DNA, 554 bp, Gossypium hirsutum
ttctctggtgtaactgcttgaattctggcattgggcctccatcgacttgggaagactgatgttccggcatatgatggatcttggactgaatggggtgcggtatctgacacacctgtggacacttgatcttaaatcttaatgcaaagctgtcaaaaagtgccgaagagtcaagcttgcaatcgaccagtttcagttctcagatatggagacatgaagggtttgtatctagaaaagcctcaggtgtcattcatcaattggtggcgttccaatatggacctgtatgtggtgacgctacacattttcagaaactgtgtttgacaacaaaaccgttgaattctgaagtgtattatggtgtttttgaaacatgtctgctgtttcacattacatggcaacaaggattgtcacttgtttggcagcaaaaaaactgtccaaaatgaaaggtgatgatgattgaggcattgtcgaattgattaaaagtaggaataaataagcgcgtgcacaaatctctttgcaatttcagaccactatgttaacaatttcaccggcacgagggg

SEQ ID NO: 191883 - DNA, 342 bp, Gossypium hirsutum
gtctcgagttttttttttttacattctgcttaccattacgtcccagccttatctccctctttttcatgcttctatacttaccaacccgatctccctttgacaaaatagagagaaaatagagaggcctttcgatcgtttcttcggcgatatcggcggcgatagcagcagcttttatggtgaggcgaaggagcggcctattgaggagttttacaatgcgatcgagataatctatgaaccagtggagggagctgtgaaaaaaatgagttttcgaaaaaaaattggtcgattggtttgatgcttgctttttgttttacagattctgatcgcattatataggacatg

SEQ ID NO: 191884 - DNA, 525 bp, Gossypium hirsutum
cgtagctgctaataaaccaatcaatcattttctgcaattggggtaatcgggtggaactggtggccaagaaaattacagaacttgggtactcttgcttttatatccatgcaaagatgcttcaggaccatcgtaacagaggatttcatgatttccgtaacggcgcatgcagaaatcttgcttgtactgatctttttacaaggggtatagatatccaagctgtgaatgttgttattaactttgacttccccaagaactctgaaacatacctccatagggttggtcgatcaggaaggtttggtcatcttggattggctgtgaatttgatcacttatgaggaccgctttaacttgtataggattgagcatgatcttgggactgaaattaagcacattcctccacacatcgatcaggcaatttactgccgatgatatatgcaggatatttcctgctttgcctatggtggtgaacaacgggtcaatggagctgatctatcaaggtgtttgccctggcaaatgggtgtgcgtt

SEQ ID NO: 191885 - DNA, 454 bp, Gossypium hirsutum
ctagagaaatggctgcaaggatacaacttggcaactatgctgtgtacatgttggatagaaagttgggtaaaggtggttttggacaagtttatgttggaagaaggatcactagtgccataggatgcactggtgctgatgcctttgaggttgctttgaaatttgagcatcgaaatggtaagggatgtagatctggtcctccttatgagtggcaagtatacagctctcttaatggctgctatggacttccatcgggtcattacaagggtcaactaggggactactacatactcgtcatggatatgcttggtccaaatttatgggatgtttggaactcaaacaaccagatgcttacaaaaaaaattgttgcttgtatagcaattgaggccatatcaattttagagcagcttcattacaaaagctttgttcatggagatgttaagcctgggaacttttt

SEQ ID NO: 191886 - DNA, 574 bp, Gossypium hirsutum
cccacgcgaattggttcagaaaagaaaaatggccaccattgatgttcctgagcaggtttcggttcttgcagatgcagaagctcttagaaaggcttgtaaaggatgggggacagatgagaaggcaataatttcagtgttgggtcacagaaatgcagttcaaaggaagcaaatcaggcttgcttatgaagacctttaccaggaagatctcatcaagcgtcttgaatcagagctttctggtgatttcgagaaagcagtgtatcgttggatattggatccagcagaccgagatgccgtgttagctaatgttgccataaagaaattaagccctgatcaccatgtgatcgttgaaatttcatgcaccagatcccctgaagagctcttggctgtgaggagagcttatcaggctcgatacaagcattccctggaagaagatgtggctgctcataccaagggagacactcgaaagctcttggttgccttagtgagtgcatttagataccgatgggaagaaataaatacgagagtagcaaattctgaagccaaaattctccatgaagctgtcaaagacatggaa

SEQ ID NO: 191887 - DNA, 293 bp, Gossypium hirsutum
gaaggtgtcacaagggagggggtattggacaactttacaccaaaaaatttaccaaataaatcacaaggtggagaagccgatgactactcagctgatttaatggacattgcgattaatcaaaccctcaaatattgcataaagatctctgttatccgggccaaaaatctcctctgctttcctcaaagtctcttctctcgtttgtttgtgggagtttagttctttaacatttgccaccaatgcaccaaactgctcatacgacaagcggctcctgacttgacggaagaattctttcc

SEQ ID NO: 191888 - DNA, 455 bp, Gossypium hirsutum
  unsure (1)..(455): unsure at all n locations
ggtctctgttttcgtttcttcttccttaaccgttgctgcagctgcagccgcnttcttctccttttccttttccttcttttttttcttcttctttgctgcagcagactctgcaggttcatcctcaccttctttctcacctgtggcatcagcagcgataactggctccggctctggctctggctctggctgaacctgggctttctcctcctggggaggggctgctgttgtgggttttgttacggcaggcccctcaccaagttcagcaagaattttatccaaatcttcctcctcttgtgcagtccttccactcttattcttcttcttgttcctcttcttgttcttcgaggtttccacagcctcttcccccttgtccccggttttagaatcaacagcttcaacatttctagttcctaaacttgatagttcggttttcaccatgtctgaacttcactttg

SEQ ID NO: 191889 - DNA, 1008 bp, Gossypium hirsutum
ggtcacctttattgaagctctagatcaacttatgcctggatttgatcctgagatcggtaagctggctcaaagggtgttgatcaaccctaggaaaattgactatcatacaggagtatttgcaacaaagatcactcctgcaaaggatggaaaacctgtcattattgagcttattgatgccaagaccaaggagcccaaggacaccttggaggtagatgcagccttaattgcaaccggaagggcaccattcaccaatggtctcggcttggagaatgttaatgtagtaacacaaaggggtttcgtgcctgttgatgagaggatgcgagtaattgacacaaatggcaatctggttcctcatttgtactgcattggtgatgcaaacggtaaaatgatgcttgctcatgcagcaagtgcacaaggaatttcagtggtggaacaagtgacaggacgagatcatgtgcttaatcaccttagcatccccgcagcctgcttcactcaccctgaaataagtatggttgggttaacagagcctcaagcaagggagaaagcccagaaggaaggatttgaagtaggcgttgccaaaacaagtttcaaggctaacacgaaggcacttgccgaaaatgaaggggagggacttgctaagttgatatacagacccgacaacggcgagatactcggagttcatatatttggcttacatgcagcagacctcatccatgaagcatcaaatgccatagctttaggaacacgtatccaggacataaaattcggccgttcacgcacatccaacactttctgaagttctggacgaactatttaaatcagccacagttaaagctgctgcttcgagccacggtccagtaagtgaaccggttgcagtctaaacccttaatcgacagttttcggattaaaaaaaataggtataaattttttgaagaactttgcttgtattaaggactgtcaagaaacatcatggaggaatttacttataaatctaagatgatcgttgtg

SEQ ID NO: 191890 - DNA, 1156 bp, Gossypium hirsutum
  unsure (1)..(1156): unsure at all n locations
ggcctgctctaaagggccgggaggtatgggtcaaatcgtgcaagaaaatcagaagggcatagagatgatgcagtcgaccacccttggaccataaatctatacttgctggactgaaaaaaaaggtgcatggaattgctccactcgctcagctaggaggcacacagaaggaactcaacattgcattgagcaagtatccaaaagctcttgagaaaacccttaatcctgatatatccaaggcttatcgaaatatcgagtttgattctcatacagttaaccaaataattgccagccatttctatcggcagggcatgtttgatgttggtgattgttttataactgaagctggggaagcaaaagctgttgctgctatgagatcgctttttcaagaaatgtatcaaatacttgaagccatgaagagtaggaacctagagcctgccctgaaatgggcagccacaaactccgataaactgaaagaaaatggttcagacctcctgttggggctccatcagttgcagtttgtgaaaatactacagaagggaagcagagaagaagcactcaagtatgcaagaactaacttcgttccttttgccggaaaccatatggccgagatccagaaactcatggggtgtctcttgtattccgatagacttagtgagtccccatatgctcatttattatcaccaaccaattgggatatagtggctgttgagctcactcgacagttctgcaacttactggggcagtcatatcagagcccattgagtgtgacaatagcagcaggtgtgcaaggtctaccaccacttttaaagtttatgacagttatggctgggaagaancaagaatggcaatcaatgaagcagttgcccgtgccagtggagttagataaagagttccaatttcattctatattcgtgtgtcccgtgtctaaggagcaatcgaccgaagataacccgccgatgctgatgtcgtgtggtcatgtgctctgcaaacaatccatcaacaagatgtcgaagaatggatcgaaaactttcaagtgcccgtactgcccatccgatgttgatgcgccccggtgcagacagctgaatttctgattaagtgttaccctaaaatgcaaatggggttgtattaaaaaaaaaaaaaaaaaattctgcggccg

SEQ ID NO: 191891 - DNA, 566 bp, Gossypium hirsutum
  unsure (1)..(566): unsure at all n locations
ggcctgcccatgagcatggtcttgccaggtgttgttgggtttaaactattaggaaagttgagggatggtgtgacagctaccgatttagtgttgacagttactcaaatgctgaggaagcatggggttgttggcaagtttgtcgaattctatggggaaggcatgagtgaattgtcattagcagaccgtgcaactattgccaacatgtctcctgagtatggtgcaaccatggggtttttccctgtggatcatgtcaccctgcaatatctgcaattgactggcaggagtgaggagactattgcaatgatagaatcttatttacgggccaataagatgtttgtagactacaatgagcctcaaattgagaaagtgtactcttcctacctgcaattgaaacttgaggaagttgaaccctgtatatcaaggcccaagaagcctcatgatcgagttcctctgaaagaaatgaaagcggattgtcaggcatgcttatacaacaaggttggatttaagggatttgctataccanaggaatcttaggataaggcttcaaagtttttatttcatgggac

SEQ ID NO: 191892 - DNA, 752 bp, Gossypium hirsutum
cccacgcgtccgagaatacatactgaaaccaggggatggcactgtggatatcaatagggtagaggaatacatatcctttgtcgttgatgcaactggcaaggctggaattattcggcaaatggaggcatttcgagctggatttaatcaggtttttgatgttgcatcattacaaatatttactccccaagagttggactatttgctatgtggtcgcagagagttgtgggaggccgagacacttgctgatcatataaaattcgatcatggatatactgcaaagagccctgcagttgttaatttacttgaaattatgggagaatttacaccagagcaacagcgggccttctgccaatttgttactggtgcgcctagacttccacctggtggtctggcagtgctgaatccaaagcttacaatcgttagaaagcattcgtcgtctgcaattgctgctacttccaatggaagtggaccctcagaatcagcagatgatgacttgcccagtgtcatgacttgtgctaattacttgaagcttcctccatattcttccaaggaaattatgtataagaaattgctatatgcaatctacgaagggcaaggatcttttgatttatcatgagtgagtgttcgcaaccaaaacatacaattgtggagtatagttctgaacaacacaatgtggggtcaacttatctcacctgctgcgatcatttttgatatttccaagtggcgtattaattttgctcaaataatggttc

SEQ ID NO: 191893 - DNA, 451 bp, Gossypium hirsutum
atcatatagttgatgtcaatagttgcggattgggttcaaggtcattcagaatgctttaattgtgctatctcacaaaggatgttgatggaattgtggatgcgctggcgaaagaggaaatgtattttccttctattttgagccaggaggtgaaatttcaattttattcgttgtctttgtttgctgcttttgtgttttagggaggcgtttaaagcaaaactaatacattaataaggagggattgcagatgcgctggcgaaagatggaatgtatttactggttctattctgagcctcggtggtagaatttcggctttatctgttggctctggctgctagttgtcgttttggcgaggcatttttcttgtatcttgcttcgagattttgtcttagttgtattttgtgtgtttgtttttcttctacttctggtgatgtattttgttttggagtgggat

SEQ ID NO: 191894 - DNA, 521 bp, Gossypium hirsutum
gctcaacatgccataagcgcgtaggtcagacaggattgggctgcaggtgtggaaacctcttctgcgcggctcatcgatactcagacaaacacgagtgcactttcgattaccaggctgctgctcgtagcgctatttctaaagccaaccctgttgacagagctgcgaaactggatgaaatttaagagtcctggatgaaggtgaagatgcgcgtactcaaatatgatgattctccctctattccttgggtatggggcccattgtagtgaaggtttataagttgggtgcttgtctccccatgatagggaagacatggttgcagtgtaagtcttatattccatgtcaatcggttggcattacaatggctcatgtttgtaagactttgtatgttctggtttgatggacaacgatacgattgaacaccatggtaatgattctttgtggtatacacatttctttataatagtacctcgcctatatcatgtgaagtgtgttttgttacaaaaaaaaaaaaaaagaaaact

SEQ ID NO: 191895 - DNA, 2494 bp, Gossypium hirsutum
cccacgcgtccgaagaggggtcccttcaccatcctcaccctctcaatcaacaatggcctctacttcatctgtcaccctatctcaagccctcctctctcgcgctatctcttcccatgcctccgcccaatcctccgaccaccgcccctccctctccactatctcttttcccggtttctccggcctcaaatcttctatccctcgcgcttcctcatcccgtcgacgccttccctcccgctccaaccacaagcgccaggtccgtgctgctgccgtcgaaacaattggcaccgccgccgagacttccttggtcgagaaatccgtcaacaccatcagattcttgtctattgatgcggtcgagaaggcgaattcaggtcatcctgggttgcccatgggctgtgctcccatgggtcacattttgtacgatgaagtcatgaggtataaccccaagaacccttactggttcaaccgtgaccgtttcattctgtccgctggtcatggttgtatgttgcagtatgctctgcttcacctcgctggttacgacagtgtcctggaagaagatttgaagagttgccgtcagtggggaagcagaacccctggacatcccgagaactttgaaacaccaggagttgaagtcacaactgggcctcttggtcagggtatcgcaaatgctgctggattggctcttgctgagaaacacttggctgctagattcaacaagccagacaatgagattgttgatcactacacatatgttatcttgggagatggttgtcaaatggagggtatttcaaatgaagcttgttcacttgctggacactggggacttggaaagcttatagctttctatgatgacaaccacatttccattgatggtgacactgaaattgcgtttactgagaatgttgatacacgttttgaggggcaatggaaacactggctacgatgaaattcgtgctgctattaaggaagcaaaggctgtcaaagacaagcccactctgatcaaggtgacaaccaccattggttatggatctccaaacaaggcaaactcgtacagtgttcacggtagtgcattgggtgccaaggaagtggatgctactaggaaaaacctggcgtggccacacgagccattccatgtacccgaagatgttaaagggcactggagtcgccgtgtccctcagggggctgccctggaggccgaatggaatgctaagtttgctgcatacgagaagaagtacaaagaggaagctgcagagctcaaatcaatcatcaccggtgaaccaccggccggatgggagaaggcacttccaacatacactccagagagcccagctgatgctaccagaaatctctctcaacaaaatctcaatgcccttgtaaaagtactcccaggtcttcttggtggaagtgcagatcttgcttcttccaacatgaccttgctcaaaatgtttggggatttccagaaggacacccctgaggaacgcaatgttcggtttggtgttagggaacatggaatgggagccatctgcaatggcattgcccttcacagccctggcctgattccatactgtgctactttctttgtcttcactgactacatgagagccgccattaggatttctgccttgagtcaggctagagttatctacgttatgacccatgattccattggtcttggggaagatggaccaacccaccagccaattgagcacttggcaagcttccgtgcaatgcctaatgttttgatgctccgtccagctgatggaaatgaaacggctggagcatacaaggttgctgtcctcaacaggaagagaccttctattcttgccctctctaggcaaaagctgccccaacttcctggaacttccattgagggagttgaaaaaggtggctacattgtttcagacaattcgtctggcaacaatcccaatgtaattctgattggaactggttctgagttggagattgctgctaaagctgcagatgaactaaggaaggaaggcaagaccgttagggttgtctcctttgtttcttgggagctctttgatgagcaatcagatgcctacaaggaaagcgttttaccatctgctgtatcagctagggtgagtattgaggctggatcaacatttgggtgggcgaagattgttggatccaaggggaaggctattggaattgaccggttcggggcaagtgcaccagcaggcaaaatatacaaggagtttggcttgactcccgaggctgttgttgcagcagcaaaagaactttgctaagcttgcttagaagtgtcgggagaaatttgtggttctgggttggaggttacactgaagagagaccattccatttgtgacagtctcgtttgtttttaataagaatcagaatccacttatattttatgttgcctgtgattcatcaaaaagcaaaacatagagagaaagggagggtagagtttgtgtatgatcatcaattttgaatttactctcggactttttcccagagtttt

SEQ ID NO: 191896 - DNA, 471 bp, Gossypium hirsutum
tttacgttttcgcaaccagcctagctcaacttctgaattgaatgtagatagatcagttgaattgccaccacaggatgaaactggtaacatgggggtttcaaaggtgatcagagctgaccagaagagattcttctttgatcttgggagcaacaacagaggacatttcttgaggatatctgaagttgcaggttctgatcggtcttccatcattctcccactgtcaggattaaagcagttccacgaaatagtgggtcattttgtggagataacaaaggatcgcattgaaggaatgatgggtgcaaatcttcgaacggtggatccgccacaaaggtgaatggctggcagtggaagatggtaaaataaataattgtcaagttttggtttaaagcctctaattgtagagatgcaattgtggtgtcattcaaggcttggaaataatccgatttttctgtttgattaacagagaaatat

SEQ ID NO: 191897 - DNA, 643 bp, Gossypium hirsutum
gatgctttgaatagagaagttagagaaaagaaagagaggctggagcgtgagaggcaacaaagggaaagagaagaggaagagagagagcaaaggaggcgtgaagtagagagggaaagggaggagaaggagagagaacaaagaaggcttgagaaagagagggagcgaattatgcagatggagagggaaagggaaagggccagacaagctgttgaaagggctactagagaagcacgggaatgagcagctgctgaagctcgtgcgagagctgaaagggcagctgttgaaaaggcagccactgaagcccgagaacgtgcagaaagggctgcagtgcagagagcacaggctgaagcccgcgaaagggcagcagctgaggcaagagaaagagcagaacgagctgctgcagaagcaagagagaggactgctgcaacaaaagctgaagctgaagcaaggcttagagctgaaagagctgctgccgagagggctgctgctgaagctcgagaaagagcagctgcttctgcaagggcgagccagcaaaagaatgacgatgatcttgaatcattctttatgggtttctcgagcaagcagtgcaccaaggccaagagctaactcatcagatcccctgtttgatggacaaaacaaggga

SEQ ID NO: 191898 - DNA, 1128 bp, Gossypium hirsutum
tttaaaaggaaaaaagcatttgtaattgtaattgtttcgagatctctgtgtgtatagacagtctcaaatggcagtagctgcagcaccagatcacttgttccatttgaggaacaatttctacttgggttcctttcaggctgccatcaacaacagcgatcttcccaacctctcccccgacgacgccgtcgagcgcgactgcctcgtctaccgctcttacatcgctctcggcagctaccaactggtgatcaatgagatcgactccgccgctgccactcctctccaagccgttaaactgctggccctctatctctccaaccctcatgataaggaatcaacaattgcgagcttgaaagaatggttagcagatccagcgattggaagcaatgccttattaaggttgattgctggaatcgttttcatgcatgaagaagattatattgaagctcttaaacacaccaatgctggtggcaccatggaactgcatgcactgaatgtgcaaatattcattaagatgcaccggtcggactatgcagagagacagctgagggtcatgcagcagattgatgaggaccatacactgactcaacttgcaaatgcatggttgaacctggcagtgggtggttccaagatacaggaagcctactctgatcttccaagatttctctgagaaatatcctatgactggactaatcctcaatgggaaggctgcctgctgtatgcacatggcgaaactttgacaaggctgaaacactgttacttgaagcacttaataaggatgcaaaggatcctgaaactctggccaacctggttgtatgcggccttcacctcggtaaatcatcttcacgttatctaagccaattgaaactcacacatacagagcacattcttgttaaacgtgcatcatctgcggaagacagctttgaaagagcagagcaatcagatgcttgaagaagtggagttagttttgttttattctacaactgctctgactgctattctttgccctacgtgagtctatgatcaattatgagatcgttggcaaatttagagcttgctcggcaaaatagaacggtacttggaaacatttggattctgcgtttttttttggctgttagtactgctcttaaa

SEQ ID NO: 191899 - DNA, 1772 bp, Gossypium hirsutum
  unsure (1)..(1772): unsure at all n locations
tttcagttgagctgtcaacacttaacagaacagaaaatacttgaaatggcagctaaataattttcaagtgttgaagtattgaagctgtctggtgttctgtttgttttttgaaatctgatgtctccgccgcttcttggcgtggaggaagggggtcagaacaatgtgactttactgggttcttctggctctatggatagtgtgtgccagaataatgctgaattgaaggagcgcaattacatgggcttgtctgattgttcttctattgattgctctgttgtcacccctggttccgacgatggcaacgtaagttcgaatctgaaggcaacagagctcaggcttgggcttcctggatcacagtctcctgaaagaaatcctgagctttgcttgttaagctctgctcaacttgatgagaaaccccttttccctttgcatccttcaagtgatggtcactgctttccatctcaaaagactgtagcttcaggcaaccaaaagaggcttctctgatgcaaggatggtttctcagaggggaatttcctttctaattcgaaagtagatgtgatgttgacacccaggccttcgtcaaacttgggactgaaatctctttctatgcttgagaaccttggggttcaaccaacaaaggcgaaagaggtcacgaaccagaaggtggtaaaggactcgcctcatgctgccaatgagacgaggcccaaccataatgcatctgtaaacaataacagtggagcacctgcttccaaggcacaggttgtaggttggcctcctatcagatcgtttaggaagaactcattggcctcctcttcgaagaacactgatgaagtcgatggaaaggcagggcctggtgctttgtttgtgaaggttagcatggatggtgctccgtatctgaggaaagtagacttgaaaaactacactaaatatcaggagctgtcttctgcacttgagaagatgttcagctgttttaccataggtcagtatggatctcatggaacctcgggcagggagctgctgagcgaaagcaagctgaaggatcttctgcatggatcagaatatgttctcacttatgaggataaagatggtgattggatgcttgtgggtgatgtcccatgggagatgtttactgatacctgcaaaaggctgaggatcatgaaaagctctgatgctattggactcgctccaagggccgtggaaaaatgccggaaccggaactagctagtttaatacatgatttttgctatccgaagcagttctttctgaagaaataagaggatgttggagcgggcaggagatcacagggtatctgcttttcacatggtgctactttttatcttctatttgcatgggaatttatatcatgtacgcttgtttttattctactgaaaanagtcgtatccagtgcgtaaggctaccgctataagcaagaactagaaattcccattgtaggcacaaccattgtcggtgtttgtagcgaataaacctgttagtctacattaagttataaaaccttcctagtcctagcgtttgtgagtaactttaagattctatcagtcatgagtccgaacgagtccctgtttcaaagcatgatctttttagtttgtaaagtgcattgcttgttgaacttttatggtgcgtgtttgaatgatgaaagacctcgacatattatctattgaaaaaaaaaacaaaaaaaaaaaacatgaaaaaacagattaaaagacacaattttctttgtgcattaagtacaggtctgaacctttgttctaaaa

SEQ ID NO: 191900 - DNA, 810 bp, Gossypium hirsutum
cgatgggaaggcagggcctggtgctttgtttgtgaaggttagcatggatggtgctccgtatttgaggaaagtagacttgaaaaactacactaaatatcaggagctgtcttctgcacttgagaagatgttcagctgttttaccataggtcagtgtggatctcatggaacctcgggcagggagctgctgagcgaaagcaagctcaaggatctacttcatggatcagaatatgttcttacttacgaggataaagatggtgactggatgcttgtgggtgatgttccatgggagatgttcactgacacctgcaaaaggttgaggatcatgaaaagctctgatgccattggactcgctccgagggccatggaaaaatgcaggaaccggaactagctaccatcatacatgatcttttcccacacaccgaagattattatttctgaaagagatgacatgatgctggagtgggtaggagatcatcatgtaagcctgtttttgttctactgaaaaaagtcgtatccagtgcgtaaggctactgctataagcaagaactagaaattcccattgtaggcacaaccatttgtcggtgtttgtagcaaataaacctgttagtctacattaagttataaaaccttcctagtcctagcgtttgtgaggaactttaagattctatcagtcatgagtccgaacgagtccctgtttcaaagcatgatctttttagtttgtaaagtgcattgcttgttgaacttttatggtgcgtgtttgaatgatgaaagacctcgacatattatctatacagtgtgtgacttgcttgc

SEQ ID NO: 191901 - DNA, 490 bp, Gossypium hirsutum
cttttgttactttgtgacaaatggagggtccttagctttctctctctctccaaaaaaaaaaaaaaaagaaaacgaaaaaaagtttcgcttctttgctttctttcgagtaaaaatcaaacgaaaaacaacttaaataatattaaaagattttgattttgatcatcaaattttctgtttctgatccaccagtccagtcagagtgttgaagtattgaagctgtctggtgttttgtttgttttttgaaatctgatgtctccgccgcttcttggcgtggaggaagggggtcagaacaatgtgactttactgggttcttctggctctattgatagtgtgtgccagaataatgctgaattgaaggagcgcaattacatgggcttgtctgattgttcttctattgattgctctgttgtcacccttggttccgacgatagcaacgtaagtttgaatctgaaggcaacagagctcaggcttgggctttctggatcacagt

SEQ ID NO: 191902 - DNA, 428 bp, Gossypium hirsutum
  unsure (1)..(428): unsure at all n locations
anaaaattacaaatcaatttcttgggtttctcgacatttttgtgaatctcatagtttgtataagcctttactctggtgctgtacaggaagatagaaaggtttacattgcatacttgggatcacttcctgatggagactacattgcttcatctcaccattgcaatatgcttcaagcactttctaaacacagctctgtggaaaattacttaatccgaagttacaaaaggagcttcaatggatttgcagctaagctaactaatgaagaggcaaagaaactttcaagctttaaaggagtggtttcggtttttccaagtaaagtttaccacctgcatacaacaagatcatgggatttcttgggactcaatcaaactgttaaacgtaatgccacagagagcgatgtcattgtcggtgtctttgataccggaatc

SEQ ID NO: 191903 - DNA, 460 bp, Gossypium hirsutum
gttgccaaggagccacaaaatcctgaggcagacgaggatgatggatatgtggttgggtatgtccacaatgaaaacacaggagagtcaaggttcctggtgatggacgcacaatcacccaatcttgacattgtggcagccgtgaagctgccccgtagggttccctacggttttcatggactatttgtgagggaaagtgatctaaataagctgtagaagtagattcacttcctctcggtcgggttcaggtggatgatcattcattaaacacatataatagcagtgaataccatagcagatgaaagttacaaggcgtttacaacatattgtataaacatatagtattttgttacagatgattgaagtcccaatatcataatcattgcatgtaatccttgtatctacattttacctttataaaataaccaattatataatccagtgaattatttatcggtcaaaa

SEQ ID NO: 191904 - DNA, 436 bp, Gossypium hirsutum
  unsure (1)..(436): unsure at all n locations
acggccatatacataaaatcacgtactatatgaggtaacgaaaccaatacccctggaccgggagctcattcaactctcacggctattgctacctctagaatgaaaattgggcgtatcgaggatggtccacccatatcgacagatagcacccggaaaaagggtggtcgaagagggagaaggctataaactagcacattatgttctagcaaatctatccttcagtgttttttcggtggtattggaatttggttatttggtaataactggtctttatgagccctttttcatagttttatattggtgtattttatattgcagtaatgttttatatgaatctcatgtcataagtagaaatgtttaaatgaaaatagtctggtgatatttttattaaaaaattggtgggttttatcacnnnnnnnnnnnnnnnnnnnnnnnn

SEQ ID NO: 191905 - DNA, 683 bp, Gossypium hirsutum
  unsure (1)..(683): unsure at all n locations
tcgaaattataatcttcaaagtctctctggtctttagaatcctaactcgcaagttactaagaagaaatggcaactgaacaaccaaagcctcaaaatgaagacataaatatggatttgtttgaagatgacgatgaatttgaagaatttgaaatcgatggagagtgggatgacaaggaagaaggaaaggaagaaggaaaggaagtaacacagcagtgggaagatgaatgggatgacgatgatgtcagtgacgacttctcactgcaactgaggaaggaactcgagaataacaccaagaactgaaccagagttgtgcttctctattgtcttgcttcctcgtttgaatttattttggtttcttgcaaaactgatgtttgagctttaactctttatgattgggatgtttgatagaaacagtgtgcagaagctggtctttatggttatctgaaatatagattgtgtgggtgtttgccttgtttaaactgggcccatgttttgctttttttttttttnnnnnnnnnnnnnnnnnnnnnnnnnnnnnnnnnnnnnnnnnnnnnnnnnnnnnnnnnnnnnnnnnnnnnnnnnnnnnnnnnnnnnnnnnnnnnnnnnnnnnnnnnnnnnnnnnnnnnnnnnnnnnnnnnnnnnnnnnnnnnnnnnnnnnnnnnnnnnnnnnnnnnnnnnnnnnn

SEQ ID NO: 191906 - DNA, 530 bp, Gossypium hirsutum
  unsure (1)..(530): unsure at all n locations
tcgaatgttactaataagaaatggcaactgaacaggcaaggccttaaaatgaagacataaatatggatcaattcgaagatgacaataaattttaagaatatgaaatcgatggagagtgggatgacaaggaacaagaaagcaaaaaggaaaggatgtaacacagcagtgggaagatgaatgggaggactatgatgtcagtgagcgacgtctcactgcaacttatgaaggaactctagaatcacaccaagaactgaaccagaattgtgcttctttattgtcttgcttccttcgttgaatttaattttgggttcttgcaaaactgatgtttgagctttaactctttatgaatgggatgttttatagaaacaagtgtcaaaaacttgtctttattgttatcttaaatataaattttttgcttgtttctcttttaatactaannnnnnnnnnnnnnnnnnnnnnnnnnnnnnnnnnnnnnnnnnnnnnnnnnnnnnnnnnnnnnnnnnnnnnnnnnnnnnnnnnnnnnnnnnnnn

SEQ ID NO: 191907 - DNA, 357 bp, Gossypium hirsutum
aaaagaaaagatagaatcaatggatggaataatgaataagataaggaatttagatgcgtacgcctaagataaacgaggatttctacagccgcacgctttccggtggcgttatcactgtcgtctcctccgttgttatgttcttgctcttcttctccgagctccgattatatcttcatgctgcaaccgaaacaaaactcgtggttgacacttcaaggggggaaactctacgcatcaattttgatgttacatttcctgctcttgcatgctcaatcgttagcgttgatgcaatggatataagtggagagcaacaccttgatgtgaaacatgacataatcaagaaacggatagatgcacatg

SEQ ID NO: 191908 - DNA, 402 bp, Gossypium hirsutum
tttatattcaacaaaaaagaatgaactttcaggtttatacgttcaggttcttaaaaagtatgtaagcattcattaaataacactttaacaagtgacagcattgaaaggaattacatcgattaaacaaaatttctcatcctgcatggatccaacaccttcagtgtctgcataaaattttctaggtatgtctagttctcatcactcatcaacttcaacacctgacattggaattcctccactagttttgctcctttcccttaacataatccacaccaaagtcataattatcatcatcatcatccatagcatcatcccctggggttaatttatttttggcttttttccttctcttattctcagctcttttcatctttgtgttcagcatgccttctactgcataca

SEQ ID NO: 191909 - DNA, 953 bp, Gossypium hirsutum
  unsure (1)..(953): unsure at all n locations
tctctcacgcgtccgtgaaaaaaaaaatcacctactctctcactttgctctcttcttgttcctgtcctctttcaccaaactatcgccgacaacctctccaaaagaatggcatatgaagggattctgttggggatgggtaatcctctccttgacatttcgttagtcgtggacgaagagttcttgaaaaaatatgatatcaagttgaacaatgcaattttagctgaggagaaacaccttcccatgtatcaagaaatggcatccaagcccaatgtagagtatattgctggaggtgctactcaaaattcaatcaaagttgcacagtggatgcttcaaattcctggtgcaactggttacattggctgcattgggaaggacaagtttggggaggaaatgaagaagaactcaaaagctgctggtgttaatgttcaatatctcgaggatgaaactgcaccaacaggaacttgtgctgtttgtgttgttggtggtgaaaggtcactcattgcaaatctatcagctgctaactgctataagtctgagcatttgaagaaacctgagaattgggcgttggttgagaaggccaagtacttctatattgctggatttttccttatctgtatctccggattccatacagcttgttgctgatctccttantctgatataactaagattattataataatcattgtttatctgtcttatacataattcatatgtagctataataatgctctatgtaatgtccttatttagatattctacattgctaatcaatcttatattgatgatgttaataacgtactaatagttgatatattaaattattatatacgtcatatctttgttctcttatattattttataatacacgtactaagtatatcatcacactatcctgattactatagtatatgatgatgtgagagtctaacactttattacttctatatatt

SEQ ID NO: 191910 - DNA, 1278 bp, Gossypium hirsutum
tgaaaaaatatgatatcaagttgaacaatgcaattttagctgaggagaaacaccttcccatgtatcaagaaatggcatccaagcccaatgtaaagtatattgctggaggtgctactcaaaattcaatcaaagttgcacagtggatgcttcaaattcctggtgcaactggttacattggctgcattgggaaggacaagtttggggaggaaatgaagaagaactcaaaagctgctggtgttaatgttcaatatctcgaggatgaaactgcaccaacaggaacttgtgctgtttgtgttgttggtggtgaaaggtcactcattgcaaatctatcagctgctaactgctacaagtctgagcatttgaagaagcctgagaattgggcgttggttgagaaggccaagtacttctatattgctggatttttccttactgtatctccggaatccatacagcttgttgctgaacacgctgctgcaaagaacaaggtgttctcaatgaatctttctgctccatttatttgcgagttctttaaggatgcacaagagaaagcactaccgtatatggactttgtctttggcaacgaaactgaagcaagaaccttctcaaaggttcatggctgggagactgatgatgttgcagagatagccctgaagatttcacagtggccaaaagcttctggaacatacaagaggactactgttattactcagggtgcagatccggtaattgttgccgaggatgggaaagtgaagcaattccctgttattttgttacccaaggaaaagcttgttgatacaaatggtgcaggtgatgcctttgttggaggctttctttcacaattggttcaagggaagtccattgaggattgcgtaagggctggttgctatgcatccaacgttatcatccaaaggtctggatgcacatacccagaaaagcctgaatttaaataaagctattccactttcctgatctcctctccactgttgttttcaagtttctgattgttaagaaccctcttgctaattgaattttgtttttatttttcctatttgccggtgtcatttcgatgcctgcatcttgaaatggcatatgagaataacattttatgtttattcatgaaaggagccaatcgtttcatttcataagcttatggttgagatgagtttgtggattgtggtcaatgtttttttcccctggtttttcttaaaaaaaaaatcataaaagtggggactactggtaatgattttttgaagaggggggatccccttttcccccccc

SEQ ID NO: 191911 - DNA, 1113 bp, Gossypium hirsutum
  unsure (1)..(1113): unsure at all n locations
gcccggaccggaccggacatggccgggccgagcgacgcgtgcgcccacgcgtccgggcaaaggcagtggccattcacatcaccacaccaattttaattactttaacacctcctttccctccttcctccgttcttcattagaatattttagatttaaacggactcgatccctaagctagttttgtactaatgggagcagttagtgttgcaaacaaggatatcaatgttagcttagctgaaaaaaagcctagagttgtttttgttttgggtggccctggcagtgggaaaggtacccaatgcgcaaatatagtcgaacactttcattacacccatctcagtgctggagatcttctccgagcagaaattaagtctggttcggaaaatggaaccatgattcagaacatgatcaaagaaggaaagattgttccttccgaggtcacaattaagcttctcgagaaagcaatgctggaaagtggtaatgacaagttccttatcgatggttttcctcgtaatgaagaaaaccgtgcagcattcgaagctgttacaaaaatcgagccagaatttgtcctgtttttcaattgccctgaagaagagatggagaagcgtcttctgagtaggaaccagggaagagaagatgataacatcgaaacaataaggaaacgattcaaggtgtttctcgattccagccttcctgtaatcgagtactataaggtcaagggaaaagttcgagagattgaacctgcaaagcccatagaaaagtgtttgaggccgttaaagttgtcttcaccccaaaaactgaaaaggttgttgcctaggccgggtttgcaaactctaccagtgataaattagcatattcatttgaggttaaatatgtcaacagtttggtgcacatcattactgtattcttaataatttggaaggggtttttttttttttttttgtatcacatagtatttggtttattattgttattattatcacatgatatgtcatgatgaaaattcatacatttatattcttcctatcgtattttctgatattcccaataaacccccaaagtcttctattttgtgtgacatgatattcttattcttntgttaacccnnnnnnnnnn

SEQ ID NO: 191912 - DNA, 844 bp, Gossypium hirsutum
ccgcccacgcgtccttgcaaaggctttggtttttcacatcaccacacctattttgggtggtttaacaccggcggggctggttccttcattcttcattataatattttacatttaaacggactcgatccctaagctagttttgtactaatgggaacagttattgttgcaaacaaggatatcaatgttatctttacctgaaaaaaacacctaaaattgtttttgttttgggtggccctggcagtgggaaaggtacccaatgcccaaatatagtcgaacactttcattacacccatctcactgctggagatcttctccgagcagaaattaagtctggttcggaaaatggaaccatgattcagaacatgatcaaagaaggaaagattgttccttccgaggtcacaattaagcttctcgagaaagcaatgctggaaagtggtaatgacaagttccttatcgatggttttcctcgttatgaagaaaaccgtgcagcattcgaagctgttacaaaaatcgagccagaatttgacctgtttttcaattgtcctgaaaaagaaattgagaaaccgtttttgggatacgaaccccgggaaaacattttgtttacttcgaaaccattataggaaaccaattcaaaggagttttttcgattccaacctttcctgttaatcgagtactataacgaccaatgtaaaagttcgagagatttgagcttggaaacccataagaaaagtgttctgagcctgtataagttcttatcccctatatcttgatttgagtttgtcaatgtctattttgtatactttacattgtatcaaactcattcttagtgggcattatatatcaa

SEQ ID NO: 191913 - DNA, 2023 bp, Gossypium hirsutum
agcactggctgctggtgctgacgttagtatgattggtcaatttggtgttggtttctactcagcatacttggttgctgagaaggttattgtaaccacaaagcataatgatgatgaacaatatgtgtgggagtcccaagctggtggttcattcactgtcaccagggatacatccggagagaacattggtaggggtacaaagattactctgtttttgaaagaggatcaacttgagtaccttgaggagcgacgtttgaaggatttgattaagaagcattctgaatttattagctatccaatttcactttggattgagaagaccactgagaaggagatttctgatgatgaagatgaggaggataagaaggacgaagaagggaaagttgaggatgttgatgaggagaaagagaaggaagaaaagaaaaagaagaagattaaggaggtgtcgcacgagtggtctttggtgaacaaacagaagcccatctggatgaggaagcctgaggagattaccaaggaagaatatgctgctttctacaagagccttacaaatgactgggaagagcatttggccgtcaagcacttctcagttgaggggcaacttgagttcaaggctgtcctctttgtccccaagagggctccttttgatctctttgatacaaggaagaagcccaacaacattaagctctatgtgagacgtgtctttatcatggacaactgcgaggagttgattcctgaattcctcagctttgttaagggtattgtcgactcagaggaccttcctttgaacatctcaagagaaatgttgcagcaaaacaagatcttgaaggttatccgcaagaacttggtaaagaagtgcattgagctcttctttgaaatagcagagaacaaggaagattacaacaagttttatgaggcattctcaaagaacctcaagcttggtatccatgaggactctcagaacaggactaaaattgccgaattgctccgctaccactccaccaagagtggtgatgagctgaccagcttgaaggactatgtgaccagaatgaaggagggtcagaatgatatctactacatcactggtgagagtaaaaaggcagttgagaactctcccttccttgagaagctgaagaagaagggttatgaggtcctttacatggttgatgctattgatgagtatgctgtcggacagctcaaggaatttgagggcaaaaagcttgtgtcagctaccaaggaaggtcttaaacttgatgagagtgaggatgagaagaaaaagaaggaagctttgaaggaaaagtttgagggtctttgcaaggtcatcaaggatgtgctgggtgacaaggttgaaaaggttgtggtttctgatcgtgtggttgactcaccttgctgtttagtgactggcgagtatggttggactgcaaacatggagagaatcatgaaggcccaggctttgagggataacagcatggctggttacatgtcaagcaagaagacaatggagatcaacccggagaaccccatcatggaagagctgagaaagagagccgatgcagagaagaatgataaatctgtgaaggaccttgttctccttctcttcgagactgctctcctcacctctggcttcagccttgatgagcctaacacctttggcaacagaatccacaggatgctgaaactcggcttgagcattgacgaggatgcaggtgaaggtgaagctgatgctgatatgcccccattagaggatgctgatgctgaaggcagcaagatggaagaagttgactaagcaccactcttcttgttggaactttttactagtttttttttaattattattgaagttatccttaggtttaatattctgttttgtgcctttttgggaggttttgttagtgattttggagaaagttcttaatgataattgctgttctgtttctgggatatttatacattttatcggtgccttatctttggtgcttgcttagaatggttgctgttgccatatgttttcttaaatggttattataca

SEQ ID NO: 191914 - DNA, 510 bp, Gossypium hirsutum
gaaggcccaggctttgagggataacagcatggctggttacatgtcaagcaagaagacaatggagatcaacccggagaaccccatcatggaagagctgagaaagagagccgatgcagagaagaatgataaatctgtgaaggaccttgttctccttctcttcgagactgctctcctcacctctggcttcagccttgatgagcctaacacctttggcaacagaatccacaggatgctgaaactcggcttgagcattgatgaggatgcaggtgaaggtgaaggtgatgctgatatgcccccattggaggatgctgatgccgaaggcagcaagatggaggaagttgattaagcctaacatgtttttataagatcagtagatttatcttacttttgaagcatctgttagcttgttttacattttgtttggtgcttttgcttttgttatgttgttgttagttattgtcgagtactcttaaatgataagtgctgtttttttctgggttaaaaaacaaa

SEQ ID NO: 191915 - DNA, 720 bp, Gossypium hirsutum
ggtagccatgcctgggaaactgctcgtgctagtccgtccctttggcgctgctgtaacgtagtccagagtcttcaatgtttgggctctgtgcacctgctttgaaaacggacggctatgagcgatgaccatttctgcggcgctaatcatcacactagggtttgggctaacgttacccttaggttgaataattgggccacgactgggtctaatgtactgggctaatggtttcatgactgtcttggactcaatggatatctatggtttgttcccctccgtggaagagctgagaaagagggctgatgctgataagaatgacaagtctgtgaaagaccttgttctgttgctctttgagactgccctcctcacctctgggtttagcctcgatgacccaaatacttttggcaacagaatccagaggatgttgaaacttgggttgagcattgatgaggatgcaggagatgctgatgccgactctgagatgccaccattcgaggatgctgatgccgagggcagcaagatggaggaagttgactaagctttttaacatgtttgtgaagagttcatttggtagtctcatttttagcttttaatataatattctggaaaattggtcaatgctgtgttttctttgtaatggtaaatgaatctttagtgctcgtaaatggaatctagtccactgccgtatgcttttttcaaataataattattatattttataat

SEQ ID NO: 191916 - DNA, 425 bp, Gossypium hirsutum
  unsure (1)..(425): unsure at all n locations
cccacgcgtccgcccacgcgtccgcccacgcgtccgcccacgcgtccgcccacgcgtccggccacgcgtccgcccacgcgtgcgcccacgcgtccggcattgacgaggatgcaggtgaagctgaagctgatgctgatatgcccccattggaggatgctgatgccgaaggcagcaagatggaggaagttgattaagcctaacatgtttttatatgaactctaatcagtagatttatcgtacttttgaagcatctgttagcttgttttacattttgtttggtgcttttgttagttattttcgagtacttttaaatgataagtgctgtttttttctgggatnnnnnnnnnnnnnnnnnnnnnnnnnnnnnnnnnnnnnnnnnnnnnnnnnnnnnnnnnnnnnnnnnnnnnnnnnnnnnnnnnnnnnnn

SEQ ID NO: 191917 - DNA, 356 bp, Gossypium hirsutum
gaacagattttgacataaaagaaggtccaaaccctacaaaaatggcggagaaattggctcctgaaaaacgacacagttttctccacaacggtgaaaaggtatttgaatgggatcaaaccttggaagaggtgaatatttacataaacttaccgccgaatgttcactccaaacagttttactgtaagattcagtccaaacatgtcgaagttggcatcaaaggcaaccctccttatctcaatcatgatttgttctccccagtgaagacggattcatctttttggacgctagaggatgatataatgcacataactttgcaaaaaagggacaagggtcagacatggtcgtcaccgatacta

SEQ ID NO: 191918 - DNA, 871 bp, Gossypium hirsutum
atagcagtaatgttaaccagagtttgagagccgaaactccggttccagttccagttccggcaaagtctaatgagctagaaagtccgaaacaggtggatggtactgttgttcatgaagtcaagctgccatccaggagacttgtgattgttgttacaccaaccagcacaaaagatcagtttcaaggtgtgttcttgaggaggctagcgaatactattcggctggttcctcaaccattgttgtggatcgtcgtggaagggcaatcggattcgaacgagctatccgaaatacttaggaaaacaggcattatgtataggcatttggtgttcaaggagaatttcacagatcctgaagcagagctaaatcatcaacgaaatgttgcattgaagcacattgagcaacacaagctgagtgggatagttcatttcgctggacttaccaatgtttacgatcttgatttcttcaaagaacttagacaaattgaggtgtttggcacttggccaatggccctgctatcagcaaacgagagacgggttgtgattgaaggacctgtttgtgattcatcacaagttataggatggcacctaaggaagatgaataaccagacagatgcagaaacagatgctgatacgaaacctcctattcatatatcaagttttgcatttaacagttcaatcctttgggaccctgagagatggggacgtctcacatcggtccaaggcacttcacagaactcactgaaatttgtgaaacaaattgtaatggaagatgagggcaagttaaagggtatcccaccggaagagtgctcccaaataatgctatggcgtcttcatccccccattggagttgtgcctagaaatcttgtcaaaacatc

SEQ ID NO: 191919 - DNA, 430 bp, Gossypium hirsutum
cgggatgggtttttcttgttgggtacttgtctttgttgtccaacaattgtttggtcaaagttctgcatatttgttgattcatggtgagcctaccaactacgtttctgccgttggggaccctggaatgacgaacccaaacgtcagagttgctttggaagcttggaatttctgcaacgaagttggctttgaagttcctaacgtgggcagcccccgctgggctgattgtactgatctttactgctcttctgactccgtttatctgggtggcggccttgttaataatggcagtcagtgcagagtacttcacaaagtgaatgagactgacaacaggttaggagctggtgataaatgtcctataatgggctttgagtcttatgctgaccctgacctgtttgcaaaggagaaagagctgtatctcggttctttatgt

SEQ ID NO: 191920 - DNA, 686 bp, Gossypium hirsutum
  unsure (1)..(686): unsure at all n locations
tttaagtgngagtggttctaaggtacatcatcatcatgtgggtgaactccgataatctcatcccaatttcctccccagcatcactctgtttggtttcttggtcagtttccgttattaaacaatggaaaagattcagcacagccatgtccaagcgcgaggattaaagcttcacgtagcccaaagtggaacaggtcctaaggtggtgcttttcctgcatggcttcccggagatttggtattcatggaggcaccagatgattgctgtggctaatgctggtttccgagcaattgcttttgatttcaggggctacggactctccgaccacccaccggagcccgaaaaagctagtttcaaggaccttgtcgacgatgttgttgcccttcttgatttgttgggaatcaataaggtttttcttgttgggaaggattttggagcagtgcctgcatttatggtagctggtatccaccctgaaagggtgttaggtgtcataacactaggcattcctttccttatacctggtcctgttggtatccaatttgatctcctccccaaaggcttctacatattaagatgggcagaaccaggaagagctgaagcggatttcggccgatttgatgttaagaccgttgtaagaaacatttacattctcttctgcagaagtgagctacaagtagctggtgaaaacg

SEQ ID NO: 191921 - DNA, 655 bp, Gossypium hirsutum
tgtaaatattggattgcttggatgtagcgaagtctcattattcgatcactgtacttcaccatggaacaccacttcacccaactcgacgacggcgcctccgccgacggcaaaccggcgtctaatttcggagcggcggttgcgacggtgctcctagctttgcttttacaaatattttgccgttgctgtcgctcaatttaccgtaatcatgtcaagaaatacaagttttcttcttcttccgccgccgctaacatggaccggtcgataatcgccgccgtggagaagatccttaaatacaagtttaaagacaaaagactcctggaagaagccttgacgcactcttcgtgccgcgaagacatgtcgtacgaaatactggagttcattggggactcagggctcgcttgggatgtagctacccatttttcatgttggagctcattatgaactctgaccagcttactcggattccgaaaaaaagtgtatctacatgatactgccgccgtggctaaatgcatgggcttaccgtttatcagatgaagacattgttttgttgacctatgttagaacatgtaggcagtaactagagagtattttacttgtaatccagtttatgtatatgttaatttatcggtctttaatataatattataaactctag

SEQ ID NO: 191922 - DNA, 1280 bp, Gossypium hirsutum
  unsure (1)..(1280): unsure at all n locations
tcgcccacgcgtncgcggacgcgtgggtttcaacccaaaaattttcaaaaaaaaaattctaaataagtgatggggtttccggccaatggctcatcggacaaaccattgaagttcctgatctacggtcgaaccggttggatcggtggtttgttaggcaaactctgcgaatcccagggaatcgattacgagtacggctccggccgtttggagaaccggatttcacttgagtccgacatagccaacgtgaaaccgacccatgtattcaatgccgccggtgtcaccggtcgtccgaacgtcgattggtgcgaatcccataaggtcgagaccatcagaaccaatgtggtcgggacccttaccctcgctgacgtctgcagagacaaaggcctcatcttgattaattatgctacaggttgcatctttgagtacgatgaggctcatcaaatcggaacgggtatcgggtttaaggaagaagatactcctaatttcatcggttccttttattctaagaccaaagctatggtggaggaattgctcaaaaattatgaaaatgtatgtaccttgcgagttaggatgcctatttcatcggatttagccaatccccgaaacttcatcacaaaaatcactcggtatgataaagtggttaacattcctaactcgatgaccatcctcgatgagcttcttccgatttccatcgagatgggaaagaggaacttgactggaatttggaactttacaaacccgggagtggtcagtcacaatgagatattagaaatgtaccgtgactacattgaccctaacttcacctggaagaacttcaatctcgaggagcaggccaaagttatcgtagccccgagaagcaacaacgaactcgatgccaccaaattgaagacagaattccctgagctcctttcgattaaagagtctcttgttaagtatgtattcgaaccgaataagaagactggtggagcttgagcagttactttgcctgttaaaaagtttgtcttcaaaggtaaactatgtgagactagttgagcttgagattttaggttatgaattcattgattttcctctctttttttatcatcttttttatgaatttggttcgtgtgggtcgatatggatggtgataacctcgggcgatacgcacgcacgcctcttcccagatgactcgaaagattgctggtatttttgtatttgaatgttgtattcatatatgaacatttgaataagtcagttggaaatggttttatctggttatgaatatgcattttgagttttat

SEQ ID NO: 191923 - DNA, 481 bp, Gossypium hirsutum
agaaggtagtcatttctaatttcacgttaattttaatttgctttgatttattggttgtttgttttctggtgctttctttctctatcctgaaaccacagccgtaaccatgtcttccttcctagccaacggcatttccagcttctcaccacagcctacttccgattcaaccaagttccttaaaggcttcttcccaaagctcgattccgtcaaacccataaccccaaaactccaaagttcaaggcttttgaaggtcagagcagatgttggtttcgatcctcaaaccctcacgtcagatcccagctcttcatcaggtaaatcctacgatgacaaaatccaggaaattcttcgaaaccgtgattatgataagaagtttggctttactatggatatcgattcttttgcgatacccaaagggctttctgcagaaacaatccgtttaatttcttctttaaaggaagaacctgattggatggtggagctt

SEQ ID NO: 191924 - DNA, 942 bp, Gossypium hirsutum
aagactttcagatccatcacaatatcaatcaatagttgatgcagaatggaatatcatttatgacaagttggataaatgtgtgaagagtggtgcaaaagttgttctttcacggttggctattggtgatttggcgacacagtattttgcagatagagatattttctgtgctggtcgtgtagctgaggaagatcttaatcgggttgctgctgcaactggtggaaccatacaaacagctgttaacaatataattgatgaggttctaggaacatgtgaggtttttgaggaaaagcaggttggaaatgaaagatttaatatattcagcggttgcccgtcaggacggacagctactatagttctacgcggtggagcagatcagttcattgaagaagctgagaggagcttacatgatgcaattatgattgttagaagagctttgaagaactctactgtagttgctggaggtggtgctatagatatggagataagtcgatacttgaggcagcatgcacgcacaatagctgggaaatctcaactttttattaactcttatgcaaaagcacttgaggttattccacggcagctttgtgacaatgctggatttgatgcaactgatgtgttgaacaaattaaggcacaagcatgcacttccatctggtgagggtgcaccttacggagtggacatcaacactggcggaatagcagattcatttgcaaactttgtgtgggagccatcagttgtaaagatcaatgcaatcaatgctgcaactgaggctgcatgtcttattctaagtgtcgatgagactgttaagaatcccaagtcggagagtgcacagggagaagctgctgcaagtgccatgggtggcaaaggtcgtggaggtggttttcctggccctggacgaggaatgaggaagcgtttagataactgtttcatttttttgttatc

SEQ ID NO: 191925 - DNA, 853 bp, Gossypium hirsutum
ttttaatttgccacttaatctctctctgtcctttccttttctgttctctttcttcccccctccccctttcacatcaaccctaaccctacctcaccaatcaggatacaacatgaagggaggtaaatccaagtcagatactaagagctccaggctcgccgtgaacaagaaatctagcgccaaagctggaaagaaatcggggaaggcggctaaggatccaaacaagccaaagaggcctgctagtgccttcttcgttttcatggaggagttccgtgagcaatacaagaaggaacacccaaaaaacaaatctgtcgctgctgtgggcaaagctggtggagataaatggaagagcttgtctgatgctgaaaaagcaccttatatagcaaaggcagagaagcgaaaggtcgagtatgaaaagaacatgaaagcctacactaagagacaggctgaggctcccaaagaagaagagtcggagtctgagaagtcagtgtctgaggtgaatgatgaggaagatgaggacgatgaaaaaggccgcggagaggaagaagatgatgactaacaaagaaggaagacttgttggaagagatatagcataacaagtataggctggtgcttaattggttatatgttaatgcttttgatgttcccatgttattctctctaaatgggcatatgcatgttcatttaagggaaaaaaaaattgtacctcttaatcttctgattttctttccaacgtttaatagattaatagcctcaaaaatgttcctttgattccaacgtcgaggaatggcttgtaaacatatccttttagatgataacttgatgccttatttagaaaaaaaaaaaaaaattacgt

SEQ ID NO: 191926 - DNA, 953 bp, Gossypium hirsutum
tttttccgcctttcggcctcactactcacccctcaatccccaagctcatctctctcctttgttttcccttttgtctctctctctctttttccaaccctaaccctacctcaccaaccaggattcaacatgaagggaggaaaatccaagtcagatactaagagtgccaagctatccgtgaaatccaaagctggaaagaaatcggggaaggctgccaaggatccaaacaagccaaagaggcctgctagtgccttctttgttttcatggaggagttccgtgagcaatacaagaaggatcaccctaaaaacaaatccgttgcggctgtcggcaaagctggtggagataaatggaagagcttgtctgaagctgaaaaggcaccttatgtagccaaggcagaaaagcgaaaggtcgagtatgaaaagaacatgaaggcctacaataagagacaggctgagggtcccaaagacgaagatgttgagtctgacaaatcagtgtctgaggtgaatgatgaggatgatgatgaagaaggcagcggagacgaagaagatgatgagtaggaaggtccgtggtggatagcataatcaatgtaggctgtgatagtgtttgatcaaaaccatatgttaatgctttcgatgtttccatgttattcttttagatgcgcatgccatctaagggagaaatgtacctctgaatcctgttggttccttttgaccttcagaaattaatagttgtagatgggataatctgcttctatatgtacttttgatttaaagttgaatggcttagataaatcctttttgtaaaaaaaaaaaaaaaaaaaaaaaaaaaaaaaaaaaaaaaaaaaaaaaaaaaaaaaggaagaaaaataaaaaaggacaaaaataaaaaacaaaaaaaataaaaaataaaggggtggcctatttggaaaccaaaatttttttcccgggccctggtt

SEQ ID NO: 191927 - DNA, 768 bp, Gossypium hirsutum
ctcaacacatctctatttctatcgcacttttattcccctattcctctctccctctctcatccgtgactctaaccctagccctctatcaggattcaaacatgaaaggaggtaaatccaagtcggatgccaagagcgccaagctctccgtgaataagaaatcaaccacgaaagctggaaagaaatcggggaaggcagctaaggatccaaacaagccaaagaggcctgctagcgccttcttcgttttcatggaggagttccgcgagcaatacaagaaggagcaccctaaaaacaagtccgttgctgctgttggcaaagctggtggagataaatggaagagcctttctgaagctgaaaagcgaccttatgttgataaggcagagaaacgaaaggtcgagtatgaaaagaacatgaaagcctacaataagagacaggctgagggtccccaagaagatgaggaggaatctgagaagtctgtatctgaggtgaatgatgaagaagaagatgatgatgaaggcagtggagacgaggaagatgatgagtaggaaaaatcctgggaggatagcataatcaaagtaggctgtgatagtgtttgatcatcttatgttaatgctttttaaatgcaaatttcatttaagcaaaaatgtaactctggatggtgttggtttcttttgacgcttggaaattaatagttgtagatgggtcaaacaaaaaaaaacccaacaaaaattttaaatatcttttctctttttttattttaaaaaataaaaa

SEQ ID NO: 191928 - DNA, 838 bp, Gossypium hirsutum
cccactcgttcggcccttccttgctattcatcattttcctacaactttttcggcttcctgtcgattttagtggctttttcctgatctgcgatcttaattgcaggatacaacatgaagggaggtaaatccaagtcagatactaagggctctaggctcgccgtgaacaagaaatctagcgccaaagctggaaagaaatcggggaaggcggctaaggatccaaacaagccaaagaggcctgctagtgccttcttcgttttcatggaggagttccgtgagcaatacaagaaggaacacccaaaaaacaaatctgtcgctgctgtgggcaaagctggtggagataaatggaagagcttgtctgatgctgaaaaagcaccttatgtagctaaggccgagaaccgaaaggtcgagtatgaaaagaacatgaaagcctacactaagagacaggctgagggtccccaagaagatgaggaggaatctgagaagtctgtttctgaggtgaatgatgaagaagaagatgatgatgaaggcagtggagacgaagatgatgagtaggaaaaatccagggaggatagcataatcaaactaggctgtgatagtgtttgatcatcttatgttaatgctttttaaatgcaaatttcatttaagcaaaaatgtaactctggatgctgttggtttcttttgacgtttcgaaattaatagttgtagatgggtacatttgttgctacatgtactttgcatttgaagttgaatggcgtaagataggtaaatccttttctagagaatttggtccctctttgtatggctttgttgcctgcccatattctattgcttttttgct

SEQ ID NO: 191929 - DNA, 413 bp, Gossypium hirsutum
cttttgagtggggccagcaactgagtagttcttttgatggaaaaaagacatcacctgctggtaattcaaaagagacttcaagtgctcacaagcgggaaccagaggggatgaatgtgggtggcccaccagagaagaggcggaagatggaccgttgcatgactcagcagtgctctgccctacctcaccaaccaggattcaacatgaagggaggaaaatccaagtcagatactaagagtgccaagctatccgtgaaatccaaagctggaaagaaatcggggaaggctgccaaggatccaaacaagccaaagaggcctgctagtgccttctttgttttcatggaggagttccgtgagcaatacaagaaggatcaccctaaaaacaaatccgttgcggctgtcggcaaagctggtgga

SEQ ID NO: 191930 - DNA, 390 bp, Gossypium hirsutum
  unsure (1)..(390): unsure at all n locations
cttccnnnaccccttggccgaccccttttctttttcctggcaaaaatggattatttgctgcgttggtttttagaaatggcagacctttgctcctttaatggcattatgatcatgtttgttgccgttatgctctcactcaccaccactgcgtcagctcaggacagtgcaatggcgcctgcgccgtcaatggataccggagctgctttctcgccgatggtttccggtgttgcggttatgttccctcttattatttcccttgttgcgcttttgaagcactgagttacgtgcatgtgagtgattgagtattgtatttcatttatagcatattgaacttattatattgggttatatcttctatttgcaattaattggtaacgtatgatatgaatt

SEQ ID NO: 191931 - DNA, 380 bp, Gossypium hirsutum
tcttttttttgagtaatttctttttcttgcagaaatttgtatatttgctccgtttgttttaagaaatggcagagcttggcttctctaaaggcgtgatgatcatgtttgttgccgttgtgctctcactcaccaccactgcatcagctcaggacagtgcaatggcgcctgcgccgtcaatggataccggagctgctttctcgccggcggtttccggaattgcggttatgttctctctgattgtttcccttgttgcgcttttgaagcactgggttgagtacatttgagtgattgagtattgtatcatattgagtttattattaattaattactgtattggctaatatattttttatttataattaataagtactgttattggt

SEQ ID NO: 191932 - DNA, 3011 bp, Gossypium hirsutum
  unsure (1)..(3011): unsure at all n locations
nnnnnnnnnnnnnnnnnnnnnnnnnnnnnnnnnnnnnnnnnnnnnnnnnnnnnnnnnnntaatttatttgtaggttcttttacattttttttttttaaatagagaaagaagctaatatagtcagtccacagccacagccacagccacagccagtactgacattttcattaggctcataaaagatacactaccaaatttcgtgcctttcaaagtaattgaaggcaattcatatattcccgaaaatacaaaaatttagagggtaaataaccaaaaaagaaaaaggaaaacaattggcctaaaagaggggcatatgatacgcctaacaaatacttccaacacacagttattcaaatgatttaagacaaatttcctctggatcatcttcgatataaaggatgatgtccgaccttggatatgcctctcacttggcactcgcaagttgggtgcggagcagcttggccgctgcaaccatgttgttcagggctggcttcacctcggcatacttgcgagtcttgagaccacagtctgggttaacccacaagatgttggtctcaagcacagcaagcatcttgttaattcggtcagcaatctcttcggttgatggtattctgggagagtggatgtcatagacaccagggccgattccagcaccatacttcactccttcacggaatacagaaaggagcttttcatctgaacgtgagttctcgatggttatcacatcagcatccatgtcgataattgagtggatgatgtcattgaagttggagtagcacatatgagtgtggatctgggtagtgtcctggacaccacagttggtgattctgaaggagtggacagcccatttcaagtagaaggcgtgctccgactttctaagaggcaacccctctctcaaagcagcctcgtcaatttggataacattgataccggccttctcaagatcctccacttcgtccttgatggccaaggcaatctggtagcaagtctcaaaccggggctgatcatttctgacaaaggaccagttgaggatggtaacagggccagtaagcattcccttcattgggcgtgcagtcatgctttgtgcagtagatgaccagaaaacagtcattggcttggggcggctaacatcaccgtagatgattggtggcttgacacagcgagatccgtaagattgcacccatccattaacagtgaaagcaaaaccagacaactgctcaccaaagtactcaaccatatcgtttctctcaggctctccatgaaccaagacatcaatgtcaagctcttcctgaaggtcaacaaccttcttaatttcctccttaatggctttaacgtaatcatcctcagagatcttgttagccttgaattcacgacgaactctcctgagctccaaggtttgagggaaggatccaatggttgtggtggggaggactggaaggttaagctttttctgctgggcatcgagtctagcactaacatttgttgcacgacggtggtcagagcccttcaaagcagcagcagccttttgaacagcctcattggtcactctcggggaggacttccttgaagcctgagcagcagcattggcagcgaagaaggcctcatccttctgaccagccaatgccttggcaagtgcattgacttcaacaactttctgggcagcaaatgcgagccaggatttgatttcatcatctagcttagtctcgtttactagatcaacggcagtgtggagaagcgagcaggaggtagacaccacaagcttgtctttgcccacaatagcttcgagctgctgcaaggtgctaagagaagaagcaagatcattggcccaaatgttccttccatccacaactccagcaaagaggtacttgcccttagggaaattgctcttgaccaaatcaagagtctgggttccacgaaccaaatccaaaccataagcagtgacacccttcaacccaatgagggtcttgtatgcctcagcagtaagatcagcaaagtaggtctcgatcaatacattcaagccagagagagtggattccaaatcatcataagcagcagtgaatgcttgcaatttgtgagagtcaagatccaagacaagggtcggttcatcaaactgaatccaggaagcaccagctgccttaagctcagatataacttccttgtagatagggaggattttggggaggagggagagaagagaaaaggtcttctcaacaccctttgcaggtttagagagcaacaagtatgagacagggccgataaggaccgggactgtgtcaactccaagcgccttagcttccttgtactcatccactgccttgtgagatgcataagagaagttaacatcaggtcccaattcaggaacaatgaagtggtagttggtgtcaaaccacttggtcatttccatggcaggcacagaggcatttcctctggccatggagaagtaagtgtcaaatccgatctcaccaccgttccagccatatctaggtggaacagctccgagcatcgatgtggcatcgagcacctggtcgtagtaagagaaagtgttgctcgggatgtacttgatcccagcatcagccatttgtttccagatggatgacctgagatcagctgcaaccttttgcaaatcctcggcactgctcttcttgtcccagaaagattccaaagcaaatttaagctctctcttaggtcccatgcggggatatccaacaatgtgagaggccatttttcgaagtgaacggaggtggaaccggagagagaactaaaaagaagtcactcaaagagatacagagagatgaagaggaagaagtggcacaattttagagagtggagaggttggctatttatagctaaaatggtgtactattggctataaatgagtgaaaacccagatctgaatctgacgatgatggtgatggtgatttttttcttctctttttttttttctttctagttttagtttttaatgaaatttaagcatacgcgcggcctttttaggtggcggtgtgtcaaagcga

SEQ ID NO: 191933 - DNA, 803 bp, Gossypium hirsutum
ttttaagtttttttgaaataaaaagaaccttttttaaatacaggttatccttattattttttgttaaattaacttattttttcatccaattatttcactgatttgtaaggtacataatttatggattggaaggcgagaagccttctttcttactacaaatattgtataaatagatgagaattgactattggttaaggtaaaagaaacctttaccattttatctaacccttgacatatcaaaataccaaattaaacaagcccagaaaaaaaaagaacacgtaaaagaaaaacccaaacattgctgaggaaacagtggaaatgagcttaagcacatttgtaaccagcaggcatttgcttttcgcaggaattgaggagcaaagacaatgaaacaggaacgtttaggttaacccccaacacattagctttaatagcagtgcaaaggcaaacagcagcatcgagatcagccaaacccgaaatgagagagcagcatttggtcctcgacggtccaacaacaacgcgcactgagcccaacaaatcagcacaaacgcctagtttcagtgcatctctggggcaagtgcctggctgttcaggtgccgagggtgggcttttgtgggtaggcttgtggctctttggtggtggtgggcaaggcacgtaggtagagctaaccaaagtgaagaacaacaagttcaaggtaagaagaagagcagcggatgcaacagtgttggaagccatgtctggttttttttttttcttgcagtgatatctttgagacttaatgcaagcgcccgcgtagttcggccctt

SEQ ID NO: 191934 - DNA, 517 bp, Gossypium hirsutum
tccttgtactcatccactgccttgtgagatgcataagagaagttaacatcaggtcccaattcaggaacaatgaagtggtagttggtgtcaaaccacttgggtcatttccattgcagggacagaggcatttcctctggccatggagaagtaagtgtcaaatccgatctcaccaccactccagccgtatctaggtggaacagctccgagcatggatgtggcatcgagcacctggtcatagtaagagaaagcattgctggggatgtacttgatcccagcatcagacatctgtttccagatggatgacctgagatcagcagcaaccttttgcaaatcctcggcactgctcttcttatcccagaaggattccaaagcaaacttaagctctctctttggtcccatacggggatatccaacaatgtgggaggccattttcttaatagaaggaactggtaagaaaatctaaagaccccctttagatatagagagagaggaacccacgcgtccgcccacgcgtccg

SEQ ID NO: 191935 - DNA, 926 bp, Gossypium hirsutum
  unsure (1)..(926): unsure at all n locations
cccgaagttaagatcttgaccatttgggtcaacttctctntntctctcttttcacagggttgcnccggtaaaacgcgtgcttccgggttgaaaaagagcatgacatgcaaaacgtcggtttggcaatcacctgtgcccacgctcttgatttgcgttggtgatcacctccagctggtctcccaggttgatcacgatggagtggcgcaaggggggaacatccacccattccccgtctttaagaagctgaaggccgcccacttgggggtcttggaacagcaagatgatgccaccggcgtccgtgtgggctctgagtcccttgattttgtctggggtgggacatggtgggtagttgctaactttggtgccaaaggtgggaccttttgccccatagaaagcctttttcagatatcctttttctagaccaaggttctcacagaacaagtccagcagctcctctgctagtttctccaatttcaatgcaaattctttcatcaccttcctgtattcatcggttagatctgggatttcagccatatttgattcagggagatggcgcaaatagaaggtactttcccagtccatatcagtaacctcagcctggagaccctcaagggccttgcttgccaccaattccttaaacctttgctccatgcatttcttgtaatgctctttcgtcaagctttcaattttgtccatgaaatcatagggaatcccatgatttagcacctcaaagaagccccaattctcgcatgcatctttgattaactccatggttgctgctctctcctcaccattgagtttctccatgttgatcactggaaattttaccattgctcttaaaatctttcaaagtgaggctgttttacaatggggtttttcttttttttgctaagcacaatagggatgttattatgtgcttagagttg

SEQ ID NO: 191936 - DNA, 534 bp, Gossypium hirsutum
  unsure (1)..(534): unsure at all n locations
gttgtggtgggaaggacaggtaagttaagcttttcttgctgggcatcgagtctagcactaacatttgttgcacggcggtggtcagagcccttcaaagcagcagcagccttttgaacagcctcattagtcactctcggggaggatttcctagaagcctgagcagcagtgcattgacttcaacaactttctgggcagcgaatgcgagccaggatttgatttcatcatctagcttagtctcgtttactagatcaacggcagtgtggagaagcgagcaggaggtagacgccacaagcttgtctttgcccacaatatcttcgagctgatgcaaggtggtaagagaagaaggaagataattggagcaaatgttcattcaattgacaattaaggcatagaggtattttcattggggtaagaaagcgttgattaaataaatggtatgggtttcaggaagaatttaattttgataaccggatatttaaaaaagcaacccagggtntagtttgcgtgggtagaaaaaaaaaaaaatttgagttt

SEQ ID NO: 191937 - DNA, 673 bp, Gossypium hirsutum
  unsure (1)..(673): unsure at all n locations
ttttaaaactaaagcggccactgggttttggacaacagataatgcacggcgtcgtgtggctttagttccatgaattgtctgggttgancatggtggtagttgctactttgggtgcaaaggttgggacttttgccacatagaaagctttttcagatatcctttttatagacaaaggttctcacagagcaggtccagcagctcctntgctagtttctccaatttcaacgcaaaattctttcatcacccttcctgtgttcatcggttagatctgggattctcagccatgtttgattcagggagatggcgcaaatagaaagtactttcccagtccatatcagtaacctcagcctggagaccctcaagggccttgcttgccaccagttccttaaacctttgctccatgcatttcttgtaatgctccctcgtcaagctttccactctgtccataaattcatagggaatcccatggttcaacacctcaaagaagccccaattctcacaggcatctttgattagatccatggttgctgctctctcaccattcagtttctccaagttgatcactgggaattttgccatttctcttaccactttattttttttctaaacaactctcagagtgaggctgtttacggtggggatgttattatgcaatagcttacggacgagtggg

SEQ ID NO: 191938 - DNA, 1084 bp, Gossypium hirsutum
  unsure (1)..(1084): unsure at all n locations
nnnnnnnnnnnnnnnnnnnnnnnnnnnnnnnnnnnnnnnnnnnnnnnnnnnnnnnnnnnnnnnnnnnnnnnnnnnnnnnnnnnnnnnnnnnnnnnnnnnnnnnnnnnnnnnnactaagaaactgaagacagcatatatgtgatattcccaagaaagtacatgatacttagagaaaagaacacccaaaaataaggaaatcaaagggacgccaagggcatgtaacaaatatttcatcaacaacagagttattcaaatgataagatagaagaaacttctttgccatttttctttttaatctctctggaatggtatgggattcggatttccaatatctcgggagcctatcacttggcgctggcgagttgggtgcggagcagcttggcagcagcaaccatgttgctcagggctggtttcacctcagcgtacttgcgagtcttgagcccacagtcagggttaacccacaagatgttggtctcgagcacggcaagcatcttgttaattctgtcagcaatctcttcggttgatggtattctgggagagtggatgtcatagacaccgggtccaattccagcaccgtacttcactccttcacggaagactgacaggagcttctcatctgaacgtgagttctcaatggttatgacatcggcatccatgtcgatgatcgagtggatgatgtcattgaagttggagtagcacatgtgggcccgcgcctgggtagtgtcctggacaccgcagttggtgattctgaaggagtggacagcccatttcaagtagaaggcgtgctccgactttctaagaggcaacccctctctcaaagcagcctcgtcaatttggataacattgataccggccttctcaagatcctccacttcgtccttgatggccaaggcaatctggtagcaagtctcaaaccggggctgatcatttctgacaaaggaccagttgaggatggtaacgggcccagtaagcattcccttcattgggcgtgcagtcatgctttgtgcagtagatgaccagaaaacagtcattggccggacgcgtgggcgcacgcgtgggcggacgcgtggtcggacgcgaaaga

SEQ ID NO: 191939 - DNA, 723 bp, Gossypium hirsutum
tttttctaaaattaacttattttttcatccaattgtttcactgacttgtaacatacataatttatggattggaaggcaagacgccttctttcttactaacatgacaagtattgtataaatagatgagaattgagtattggttaaggtaagagaccttaaccattttatctaacccttgacatatcaaaacaccaaatttaacacgcccagaaaaaaaaagaacacgtaaaagaaaaacccaaacattgcttaagcacatttgtaaccagcaggcatttgcttttcgcaggaattgaggagcaaagacaatgaaacaggaacgtttaggttaacccccaacacattagctttaatagcagtgcaaaggcaaacagcagcatcgagatcagccaaacccgaaatgagtgagcagcatttggtcctcgacggtccaacaacaacgcgcaccgagcccaacaaatcagcacaaacacctagtttcagtgtatctttggggcaagtggctggctgtttaggtgccgagggtgggctcttgtgggtaggcttgtggctctttggtggtggtgggcaaggcacgtaggtagagctaaccaaagtgaagaacaacaagttcaaggtaagaagaagagcagcggatgcaacagtgttggaagcacccggacgcgtgggcgcacgcgtggaacacccatttccttcaaccatggcgtaaaatctctctttatt

SEQ ID NO: 191940 - DNA, 508 bp, Gossypium hirsutum
ccgcccttttttatttttatttattcctaatctaattgaatcataggcatttttccaataaaatcatgatgtctaaaatatcagatacagatatgtatttaatgaggataattgaatttttgtaccttttttcatgtatttggatacgaagtactttgagaaaatcaattggccttgaaggccatattatttgctaacaaatatttcatcaagaaaacaaagtaattgaaacaattgagagatttttcttaatcattcatggacatttccaatctttcataaagccctctttcacttggcactagcaagttgggttcggagcaacttagcggcagcaaccatgttgttgagtgccggtttcacctctgcatacttgcgagtcttgagtccacagtcagggttaacccaccccatgttggtctcgagcaccgcaagcatcttggtgatcctatcggcgatctcttcggtcgatggtattctttggagaagtgatataataaacaccagg

SEQ ID NO: 191941 - DNA, 426 bp, Gossypium hirsutum
catcactttcctatattcatcactgagatctgggatttcagccatgtttgattcagggagatggcacaagtgaaatgtactttcccaatccatatccgtaacttcagcctcaagtccttcaagagccttgcttgctaccagttctttaaacctttgttccatacatttcttataatgttctttcgttaatctctcaacagtgtccataaaatcatgtggaatcccatggttcatcacctcaaaaaatccccagttttcacaggcatccttgatttgctccatgattcttgatctctcatcaccattaagcttctctaagttgatcactgggaaagtagccatttctcttacaaacccttttttaggggggacctaaaagatgttgtctcaaagtctccactcgttttactttgggtgtttatggag

SEQ ID NO: 191942 - DNA, 413 bp, Gossypium hirsutum
gtttatctatttaattgattgaatcaaaacaatggaacggaataaaattaatgtagggagtgtacattcaacaatgaaaggcgtctcctcggcgcccggagattacatccacttcaagtcccaagtcccccttcacaagatccccattggcacaaagcagtggcgatattatgattttggtcccaaagtagttcctcctctcatatgtcttcctggaactgctgggacagcagatgtctactacaaacagatcatgtccttgtccatgaagggttatcgggtaatttctgttgatattccatgtgtttggaatcatcaagagtggattcaaagtttcgaaaagttcttggatgccattgatgttcaccatatacatttatatggcacatctcttggaggcttcctagctcaac

SEQ ID NO: 191943 - DNA, 979 bp, Gossypium hirsutum
aaacagtgataacgttcatccatagtggcgcgaccaacactgacctcaaacaaatcccccactctagtaatgaaaaacacgtcatggtgtttttctagtacgacagataagggtgaaagtacaatcatctccttggtttattattatgacaagctatcatcaattccttaaaatgttcaatgtttttcatcagattgaaattgggtctcataaattttactaaccttagaacaggggcaagcttggtgggaaccgcacatgcatccattgtctttcatacgttgataaatgattccatccaatctcatccagcaatgacagcttcatttcgtagaatttcttctttggtggctctccatcatcctgaatcatgtcatttagtaccttcagtgcagttccaagcctcccaaatcgcctctcccgcagtacatagagggtgccatatttagaggacttcacatctacccattttgtcagttctttaaagttttcctcaaataagtctgaccggagatcagagctgacagcttcacttgcagccaaggctgaaggtttctcaccctttatagattcaatctcagccagtgcaagtcctttttggtacagtgcttctgctaatcgatcacgagttgtctccatcttcttcttatttttcctctgaatcctcatcctcaggatcagctttaagtgaaaagagttttgccagttcatctgcaccgatactatcaatcacctcatctgccgcacttataatcttttcataatagtggattttgtccccaatattgcttcgtgaaagcaaactttccaagatctttacaagcaatggagtgtacctagggtactcagacttgagagattgagctaattttttccattctgagcgatcttcatcaccatcctgcttcaggcttcccaaaacctttatttttgcctctcgaacctcttcttgtaacccgacgcgggggccgcccgggtt

SEQ ID NO: 191944 - DNA, 768 bp, Gossypium hirsutum
cccacgcgtccgatttcaaataattttcttccaatgttaaaggagttgtttataggcataactgaggttccatttagatgtgcagaagaagtctctttgtgggttttggctgcaatgaaagatgttggaattgggttcttaattgaagtcggctttgctgctttcagcttcgtttttgccttgggaactatagtaggagcaatgaaaggccaaacgactgaaactggattgttcaatggggctggacttggtgctgttgcaggtgcaatcacagccgttcaattgcttgaatcattggctgatggggagttattatcacaggtagctttattagttaggttagtgagtcagaaggtcttcattgcacgggtgaattcagcaatgctaaaagcttttcaatgggaaatgaacatatttgaatcaacatatacagagatctcaaacatttgtgatgtaaatggagcaaagggtttgtcaagaagttggattcaaaagcttccaatgcatgaaattcaatctagtcccatgtttcagtcttcttgttcaatttgcttacagggtctaaaacatggtgaaatggcaagaaatcttccgagatgtgagcatatgtttcacttaaattgcatagatgaatggctgagcaaggtaggcacctgtccaatgtgcagagaccatgttttttagatttggaaatcttcaaactttgatttatgaacagaaacatatatatatatattaatggggattgggtttttaaattgatttcat

SEQ ID NO: 191945 - DNA, 388 bp, Gossypium hirsutum
gtaatgtgaaggttcttgtgtttgatgaagctgatcacatgctggctgaggatgggttggaagatgactccttgagaataatgagggatattgaaaagatgagttctcactgccaggttcttctgttttctgccacatttagcgacactgtgacgaattttgtctcaaagatagtcaagagagatcacaatcaactttttgtcaagaaggaagaactatctttggagtctgtgaagcaatacaagggtgaatgttccagatgaactttccaaagttttggtgaataaagatagaatttttgaaattggagaacgcctatggcagactataatatttgtacgcacaaaggatatccgaagcatgtttgcaaaaaacacttgtttaattt

SEQ ID NO: 191946 - DNA, 721 bp, Gossypium hirsutum
attcaacaaagtcctgactatgcggaagagccagattttgaagctggattacaagactttacaacccggttagctaattacgaaaaggtttatgaaccagttgatgaagggtcttacatcaaaatgattgatatggctagtgggcatggtggacaaatacaagttaacaacatgagtggctatcttccaggacgaatcgtcttcttcttggttaatacacatttgacacctcgcccaatactacttaccaggcatggagagagtcgtgataatgttagaggcagaattggtggtgacagtgtattgagtgataccggagaaatttatatgaagaaactcgcaaactttgttgagaagcgactgaaatctgaaaggactgcttctatatggaccagcacccttcagagaacgattctgacagcaagtccaattgttggatttccaaagatacaatggcgtgcactagatgagataaatgctggagtatgtgatggaatgacttatgaagaaataaagaagaatatgccagaggaatatgaatctcgcaggaaagacaagcttagatatcggtttcctcgtggagaatcttacctggatgttattccaaggcttgaacctgtaattattgagcttgaacgacaaagagcacccgttgtagtgatatctcaccaggcccggttgagagcattatatgcttattttgctgataggcccctcaaag

SEQ ID NO: 191947 - DNA, 627 bp, Gossypium hirsutum
caaggagatggatttcttttcttctcaatatcaatcacatgatcatcatcatcatcatcaagagggcaacactaataataatggatcatcttcttttattgattcgagtgtaaacattggattaaatcttctcaggtcaagccccggagtttcaagggcatcaaatgaagagaaacccaaagctcaagagagtgctctcaaaatggagttagaaaagttaaacgaagagaatcggagactaagaagcatgttggatcagattaccaaaaattacaatgaactacaaggtcaactattaatggcgttgcaaaaacaggcccacagaaatcaacaagaccagaaggatgcagtacatgggatggcgagtaccataatgtcagtccaacaattcatggacccacggccttcggctgcattagatgtcaacgagccttctgggtctgacgacaagacgcaagagttgtcagcatctcccgaaaatactatagaaattgtctcaaaggaatacgaccatcgaatggttcataatatgccgggaaagcaggtttctattgaagatggtactgatcaaacatctcacagttggggatcactcaagagtccgaagatagatcagtccaagaatgt

SEQ ID NO: 191948 - DNA, 492 bp, Gossypium hirsutum
tgtccataatggtaccttgaatgaagatgtgttaggtgtcaaaagctcaaattttggtaccgatatccctgatgagaaaaaggaaaagatcggagatcagaagttcaccgaccatgtgaaattaagccctgtcgcatctaaatctggtggtgccggagatattcgtgtgcaccataactcaaaagctggtgctaacggcatagcaagtgttcaatctacaccttctcctattgctacaaagaattttgagcgaagctctcctctgactccttcgatgtcaaggaagctatttcagcctttcgacaggaggcatcccgatgatgaggataattggtctgttgcatccactacggttgcatcttttcgtacttctagatccagggtaactattggaactgctccaactttcaaaagtgccgaacgtgctgagagacggaagcagttttacctgaagttagaggaaaaacatcaagctttggaggccgaaagaag

SEQ ID NO: 191949 - DNA, 547 bp, Gossypium hirsutum
ttggattcgatttgcttcctcttagacatatatacccgtactcttttaatcttatttcatttcgttgatataaccgagagaaatcctccgattacgccattgtcacgcttttcttcactttctgtttcaactacgagcttctttgttggtgacttaatggcgatccgaagagctatgtctggtcgcatcatggatcggacggccgtcgttggtgcgcgatacatgtcatcgtggtggcgtagcgttcaacccgctcccaaggatcctattcttggtgttacggaggcttttttggccgatcaaagtcccgataaagttaatgttggagtcggtgcttaccgtgatgataatggaaagccagttgttttggaatgtgttagagaagccgagcgaaggattgctgggaatttgaacatggaatatcttcctatgggaggaagcgtgaagatggtggaagaaacactgaagttggcctatggtgagaattctgagttgataaaagaaaaaaggatagcagcagttcaagctctgtctgggactggtgcat

SEQ ID NO: 191950 - DNA, 603 bp, Gossypium hirsutum
aacaggaacccttcctattccaatctaccgcttgatgtgaggtggtggcttcagttgcagcctagctatggaccccaaaagggtttaacaaatgagcagttatatgccttggaggatgaagtggaaagtttgaaagctgaaataaagtctccctccaatgtaagtagagttcacccgcatgatgcacaagatgcttctggtgttgacagaaaaaagaacaatggaggttctcttgattcaactgagacggtgcgaaactatgaacttttggagatggaatctgttgaatgccatgtttccaaaaaaatcaatgactgctgttacgatccagagtctccttgggctggggatgggaaggctgagccatggtggcgcacaacagataaagatgagcttgcctctttggttgcacagaagtcgttggatttcattgagaattgtgatcttcccccacctcagaagatgcatgtaagaaggtactcgtgtgcatcttccggttcttatggcggtaatcggaagtctgaagcaggccctatgcttggtccaatcctcaatgcgcagggctctcctgattctgtaataactcttggaagaaagatgcag

SEQ ID NO: 191951 - DNA, 840 bp, Gossypium hirsutum
  unsure (1)..(840): unsure at all n locations
cttagtaaagagagattagaaatacaataaactataaataaataattaataagattaaaaaagaaaaaataacacatatatatgaaataataataaacacatacaaaataatagataagagagaaccataaatattacaaagatttataaaaataaaaaatatataaaaacataatataaaggaataagaaaagagagtaaataaggtataaagactttaaaaaattaaagaattaacaaagaaagattatctaaatataataaaggaaacctttcttctctggcgtctctggctggactactggctcatcgcacttctctactggaactgaggtgtcctcttctttcttttccccttctaatttctcttcaatcttttcttccagtcccttcttctccttctttttcttcttcttcttctcttctccttcaccttcttcctcgtcgcttgaagagctggagctgctgctatctgatcggtgaagcttctccaggagaccatgcttcttcttctcctcaccttcttcctctgcctttgtctcttcgatagtaaccttttcaaactcggttacgatcacctcctcttgaggcttctcctcttctttcttccccatgaaatcgaacaaccctcggtccttgctctccactgctccttcaccgctaacgttgctctccaactcaggggccttactggtatgctcctcggccatttttgacactaaaatatgatcgaaggtactcaagtgtttttgaactatacggaaatggaatggaacgcttggatgtcaattcacttattcacagttggctccggacgcgtgggcgtcgcccgggnntttc

SEQ ID NO: 191952 - DNA, 824 bp, Gossypium hirsutum
tgttttcctcatatgtacattcgaatttcagttctttgatcatagtttgatttttatcatttagtatgcttgttcatttttttagtatttttgcttttttttttttataaacaacaaagcaagaaattgattcattaaatactgttcgaatcacaaaaagacagaatggaaacatgtcatttcttacataccgaaagcaaactttttttttcttatgatttgtactaaaaatgctgggaaaagaagaaacttaatatgaaatatacaacaaatacaacctcaaaacaaaaacagatatttttttaacaattgaagaaacacacaatcccatcagtatttttatgtgaacttgaatctcaagccttttctttttcttcatctgatttggagtgtttaccaggaagcttctccttgatcttctccagaattcccttcttttcctttgactccccttcgtgatggggctcagctgctggggctggagctgggctactggcctcttcagctttcttgtgttgtccagggagtttctccttgatcttctcgaggaaacctttcttctctggcgtctctggctggactactggctcatcgcacttctctactggaactgaggtgtcctcttctttcttttctccttctaacttctcttcaatcttttctttcagccccttcttctccttctttttcttcttcttcttctcttctccttcaccttcttcctcgtcgcttgaagagctggagttgactgcacgttcaggcaacagatttcatgttagtataattatagtacaaccaagcggacgcgtgggcggacgcgtagg

SEQ ID NO: 191953 - DNA, 688 bp, Gossypium hirsutum
gcttctccttgattttctccaaaattcccttcttttcctttgactcctcttcgtgatggggctcagctgctggggctggagccgggctactggcctcttcagctttcttgtgttgtccagggagtttctccttgatcttctcgaggaaacctttcttctctggcgtctctggctggactactggctcatcgcacttctctactggaactgaggtgtcctcttctttcttttctccttctaacttctcttcaatcttttctttcagccccttcttctccttctttttcttcttcttcttctcttctccttcaccttcttcctcgtcgcttgaagagctggagctgctgctatctgatcggtgaagcttctccaggagaccatgcttcttcttctcctcaccttcttcctctgcctttgtctcttcgatagtaaccttttcaaactcggttacgatcacctcctcttgaggcttctcctcttctttcttccccatgaaatcgaacaaccctcggtccttgctctccactgctccttcaccgctaacgttgctctccaactcaggggccttactggtatgctcctcggccatttttgacactaaaatatgatcgaaggtactcaagtgtttttgaactatacggaaatggaatggaacgcttggatgtcaattcacttattcacagttggc

SEQ ID NO: 191954 - DNA, 578 bp, Gossypium hirsutum
aaaatggtaattttgaaacaatagtccggggcaaaaatgaccttacaggcattttatctttaatgtccggcattggcatcacggttccctgcttcaacaacttttcccggaagaatttgcccggatcggctttcttgtgttgtccagggagtttctccttgatcttctcgaggaaacctttcttctctggcgtctctggctggactactggctcatcgcacttctctactggaactgaggtgtcctcttctttcttttccccttctaatttctcttcaatcttttcttccagtcccttcttctccttctttttcttcgtcttcgtctcttctccttcaccttcttcctcgtcgcttgaagagctggagctgctgctatctgatcggtgaagcttctccaggagaccatgcttattcttctcctcaccttcttcctctgcatttgtctcttcgatattaaccttttcaaactcggttacgatcacctcctcttgaggcttctcctcttctttcttccccatgaaatcgaaccggacgcaagggcggacgcgtgggcggaagcgtgggcggacgcgtggg

SEQ ID NO: 191955 - DNA, 777 bp, Gossypium hirsutum
tggaaaacgcaagggttttccgactaatccgtttttaaaacagcgcccaaaaattaatatttggggtacccaaaaaagatgtataagggtcaaagtattgggagtaaaaatttggtcccttaaaagggccgcccctttttttttgtttttttttttttttttgttttttttttgttttttttttgttgtttttttttttttttttatattttttttttttttttttttttttttttttttttttttttttttttttttttttttttttttttttttttttttttttttttaaacaagaaagcaagaaattgattcattaaatactgttcgaatcacaaaaagacagaatggaaacatgtcatttcttacataccgaaagcaaactttttttttcttatgatttgtactaaaaatgctgggaaaagaagaaacttaatatgaaatatacaacaaatacaacctcaaaacaaaaacagatatttttttaacaattgaagaaacacacaatcccatcagtatttttatgtgaacttgaatctcaagccttttctttttcttcatctgatttggagtgtttaccatgaagcttctccttgatcttctccagaattcccttcttttcctttgactccccttcgtgatggggctcagctgctgtggctggagctgtgctactggcctcttcagctttcttgtgaagtccagggagtttctccttgatcttctccaggggggaccccggtcccaattacccctatagtgagtcgcattacaatt

SEQ ID NO: 191956 - DNA, 372 bp, Gossypium hirsutum
ctttactctgctctcaaaaaatagaaaaccaggtcagacttcggccgcattatgtaatggattaatttttttaaagatccgataatgtaatttttttttgtgattttttcaaccaatcagatggcttcgattcgtagaactctgtcgccggcatatcaccaccgttcttaccagaacggcgccggattctcctctccgtctcacatgtttttacccaacgggaacagcaaacattcctcttcaaggcatttaccgctgttattcactgccttaaatctagtctaccgcacaggatggcggcgatctttgtgctggtgtctcttctttttccttatagggttcgtttttggaatcacgctgtttggaaacatg

SEQ ID NO: 191957 - DNA, 617 bp, Gossypium hirsutum
  unsure (1)..(617): unsure at all n locations
aagggggtccacccacacgaccgcctaaaagggaaaaaaaaatgaagctcttgtttctaactttgctgctttgttctcttcttctatgttcttcagtttttgcaccaacaatggctcagcctcgttcacctttttgtgaagggaaatgcaaagggaggtgcaataaagcggcggtttgggatcggtgcttcaaatattgcggcatatgttgcgaggagtgtcaatgcgttccgtccggtacttacgggaacaaacacgagtgtccttgctacagagataaggtgaacaacaagggcaaacccaaatgcccttgaaaatgaaatatattcgagttcgggatttaatcaagcttaaagatcgaggacgaagaggccatatatatatatatatgcatgttgatgatgatgttattataaaaataaacttgttttgttgctgttattttcctttgggtttttgtgttggtagtgttgaataaaatttcccttatattttcccactcaccgccgtgtccaccgccatgcacacatgttttgttgtcttttgatcatgggtggcggtggtggtggtgaaaatggtgccattcacaggtgtctgcanggtcggtaaaatgcatc

SEQ ID NO: 191958 - DNA, 433 bp, Gossypium hirsutum
ataaaaaggaaagaaaaaaatgaagctcttgtttctaactttgctgctttgttctcttcttctatgttcttcagtttttgcaccaacaatggctcagcctcgttcacgtaagcaaacatatttttttcataatctaagccttgggtgtgtgtgtgtgtgttttaatctttgatgtaattttttttggggggggggaatggcagctttttgtgaagggaaatgcaaagggaggtgcaataaagcggcggtttgggatcggtgcttcaaatattgcggcatatgttgcgaggagtgtcaatgcgttccgtccggtacttacgggaacaaacacgagtgtccttgctacagagataaggtgaacaacaagggcaaacccaaatgcccttgaaaatgaaatatattcgagttcgggatttaatcaagcttaaagatc

SEQ ID NO: 191959 - DNA, 432 bp, Gossypium hirsutum
ggtaaatggcgtaaaagcggggccttccggaaccgttaagggtttaagaacaaaccccacagtgattccagatgaacccgttaatccgagattggcggaaattctggaagctgttgccgtcggaagagagcttatagtggcacttgcaaactggaacgtgaaggagtcgttagagatttggttcacaaacattaagagagttggcataactaattatttggttgttgctttggatgataagatcactgaattttgcaagtcaaataatgttccagtgtataagagagatgcaaatgatgggattgcttccattgggaggacggtgaataaccatgctgtttccggattgaaatttcatatcttgagagagtttttgcagctggggtatagtgttctcctttcggatatcgataatgggtatttgcaaaaccc

SEQ ID NO: 191960 - DNA, 866 bp, Gossypium hirsutum
ccagaattcaggaacttctttaaaaccttttgatctaacggtggagaaaaacagcttcttttgcaaagtttggtggataaaaagtaggtctaggtgttgggagggcaaatgcggttgattttctctatctagtctgctttttttcttgtttggctaccgagaaaaattttgttcttgtttctgtttctgggtcttttggttttagtgaaggagaagtagagggaataaaaaaaaacaaaaacagagaagagatctttttggtggtttcttaatttgggttgaagaaaagatgcaacaaaatcagttgaagaaggagctaaaagagatggactttttcaccgaatatggggatgcaaacaggtacaagattcttgaagtcattggtaagggaagctatggagtagtttgtgcagcgcttgacacacatacgggtgagaaagttgcaataaagaaaatacaagatgtatttgagcatatgtccgatgcaattaggattttacgtgaagtcaagctacttaggcttcttagacatcccgacatagttgaaattaaacgtataatgttgccaccatcaaagagggagttcaaagacttatttgttgttttcgagctcatggaatcggatcttcaccaagtcatcaaagctaatgatgacttaacacgagagcatcaccagtttttcctgtaccaaatgcttcgtgcaatgaaatatatgcatacagccaatgtgtaccatcgtgaccttaaaccgaagaatatactggcaaatgcaaattgcaagcttaaagtttgtgattttgggctagcaagagttgcatttaatgataccccaacgacagtcttctggacggattatgttgctacac

SEQ ID NO: 191961 - DNA, 619 bp, Gossypium hirsutum
gtgatactttttatataaataaacacacaaataaggaaagtttacaatccaaatttggcatacaatcaatcacatattttcaatcaaaattcttcacaaaatgcatcaaattcacaacacaaatcacacatggctcgttaagcatcaaatgacaaatcaccaagtagtccccaaaaacaccattggcttttttttttttttgcttttaagttgaattttataaaaaataataatcaccttaattttccattgcctcatcttcataatcttcatcattgtcatctgcaacagcatcttgatattgctgatactccgaaaccagatcattcatgttactttccgcttctgtaaactccatttcatccattccttcccctgtataccagtgcaaaaacgccttcctacggaacataacggtgaattgttccgaaacacgccggaacatctcttgaatcgacgtcgaattccccatgaatgttgatgacattgttaacccgctgggtgggatgtcacaaacacttgatttaacattgttgggaatccactctacgaaatacgatgagttcttgctctgcacatttatcatttgttcatcaacttctttagtgctcatcttgcc
